United States Patent Application Publication US 2015/0141320 A1 - sequence listing, part 34

SEQ ID NO: 1275238 - DNA, 15 bp, Homo sapiens
tatctcccataccaa

SEQ ID NO: 1275239 - DNA, 15 bp, Homo sapiens
gtatctcccatacca

SEQ ID NO: 1275240 - DNA, 15 bp, Homo sapiens
cgtatctcccatacc

SEQ ID NO: 1275241 - DNA, 15 bp, Homo sapiens
acgtatctcccatac

SEQ ID NO: 1275242 - DNA, 15 bp, Homo sapiens
cacgtatctcccata

SEQ ID NO: 1275243 - DNA, 15 bp, Homo sapiens
ccacgtatctcccat

SEQ ID NO: 1275244 - DNA, 15 bp, Homo sapiens
cccacgtatctccca

SEQ ID NO: 1275245 - DNA, 15 bp, Homo sapiens
tcccacgtatctccc

SEQ ID NO: 1275246 - DNA, 15 bp, Homo sapiens
ctcccacgtatctcc

SEQ ID NO: 1275247 - DNA, 15 bp, Homo sapiens
actcccacgtatctc

SEQ ID NO: 1275248 - DNA, 15 bp, Homo sapiens
cactcccacgtatct

SEQ ID NO: 1275249 - DNA, 15 bp, Homo sapiens
ccactcccacgtatc

SEQ ID NO: 1275250 - DNA, 15 bp, Homo sapiens
accactcccacgtat

SEQ ID NO: 1275251 - DNA, 15 bp, Homo sapiens
caccactcccacgta

SEQ ID NO: 1275252 - DNA, 15 bp, Homo sapiens
gcaccactcccacgt

SEQ ID NO: 1275253 - DNA, 15 bp, Homo sapiens
cgcaccactcccacg

SEQ ID NO: 1275254 - DNA, 15 bp, Homo sapiens
acgcaccactcccac

SEQ ID NO: 1275255 - DNA, 15 bp, Homo sapiens
cacgcaccactccca

SEQ ID NO: 1275256 - DNA, 15 bp, Homo sapiens
ccacgcaccactccc

SEQ ID NO: 1275257 - DNA, 15 bp, Homo sapiens
accacgcaccactcc

SEQ ID NO: 1275258 - DNA, 15 bp, Homo sapiens
caccacgcaccactc

SEQ ID NO: 1275259 - DNA, 15 bp, Homo sapiens
acaccacgcaccact

SEQ ID NO: 1275260 - DNA, 15 bp, Homo sapiens
tacaccacgcaccac

SEQ ID NO: 1275261 - DNA, 15 bp, Homo sapiens
ctacaccacgcacca

SEQ ID NO: 1275262 - DNA, 15 bp, Homo sapiens
cctacaccacgcacc

SEQ ID NO: 1275263 - DNA, 15 bp, Homo sapiens
ccctacaccacgcac

SEQ ID NO: 1275264 - DNA, 15 bp, Homo sapiens
accctacaccacgca

SEQ ID NO: 1275265 - DNA, 15 bp, Homo sapiens
gaccctacaccacgc

SEQ ID NO: 1275266 - DNA, 15 bp, Homo sapiens
agaccctacaccacg

SEQ ID NO: 1275267 - DNA, 15 bp, Homo sapiens
cagaccctacaccac

SEQ ID NO: 1275268 - DNA, 15 bp, Homo sapiens
acagaccctacacca

SEQ ID NO: 1275269 - DNA, 15 bp, Homo sapiens
cacagaccctacacc

SEQ ID NO: 1275270 - DNA, 15 bp, Homo sapiens
acacagaccctacac

SEQ ID NO: 1275271 - DNA, 15 bp, Homo sapiens
cacacagaccctaca

SEQ ID NO: 1275272 - DNA, 15 bp, Homo sapiens
acacacagaccctac

SEQ ID NO: 1275273 - DNA, 15 bp, Homo sapiens
gacacacagacccta

SEQ ID NO: 1275274 - DNA, 15 bp, Homo sapiens
agacacacagaccct

SEQ ID NO: 1275275 - DNA, 15 bp, Homo sapiens
aagacacacagaccc

SEQ ID NO: 1275276 - DNA, 15 bp, Homo sapiens
caagacacacagacc

SEQ ID NO: 1275277 - DNA, 15 bp, Homo sapiens
acaagacacacagac

SEQ ID NO: 1275278 - DNA, 15 bp, Homo sapiens
aacaagacacacaga

SEQ ID NO: 1275279 - DNA, 15 bp, Homo sapiens
gaacaagacacacag

SEQ ID NO: 1275280 - DNA, 15 bp, Homo sapiens
agaacaagacacaca

SEQ ID NO: 1275281 - DNA, 15 bp, Homo sapiens
cagaacaagacacac

SEQ ID NO: 1275282 - DNA, 15 bp, Homo sapiens
tcagaacaagacaca

SEQ ID NO: 1275283 - DNA, 15 bp, Homo sapiens
atcagaacaagacac

SEQ ID NO: 1275284 - DNA, 15 bp, Homo sapiens
catcagaacaagaca

SEQ ID NO: 1275285 - DNA, 15 bp, Homo sapiens
ccatcagaacaagac

SEQ ID NO: 1275286 - DNA, 15 bp, Homo sapiens
gccatcagaacaaga

SEQ ID NO: 1275287 - DNA, 15 bp, Homo sapiens
agccatcagaacaag

SEQ ID NO: 1275288 - DNA, 15 bp, Homo sapiens
tagccatcagaacaa

SEQ ID NO: 1275289 - DNA, 15 bp, Homo sapiens
atagccatcagaaca

SEQ ID NO: 1275290 - DNA, 15 bp, Homo sapiens
gatagccatcagaac

SEQ ID NO: 1275291 - DNA, 15 bp, Homo sapiens
agatagccatcagaa

SEQ ID NO: 1275292 - DNA, 15 bp, Homo sapiens
gagatagccatcaga

SEQ ID NO: 1275293 - DNA, 15 bp, Homo sapiens
tgagatagccatcag

SEQ ID NO: 1275294 - DNA, 15 bp, Homo sapiens
ctgagatagccatca

SEQ ID NO: 1275295 - DNA, 15 bp, Homo sapiens
cctgagatagccatc

SEQ ID NO: 1275296 - DNA, 15 bp, Homo sapiens
acctgagatagccat

SEQ ID NO: 1275297 - DNA, 15 bp, Homo sapiens
tacctgagatagcca

SEQ ID NO: 1275298 - DNA, 15 bp, Homo sapiens
ttacctgagatagcc

SEQ ID NO: 1275299 - DNA, 15 bp, Homo sapiens
gttacctgagatagc

SEQ ID NO: 1275300 - DNA, 15 bp, Homo sapiens
ggttacctgagatag

SEQ ID NO: 1275301 - DNA, 15 bp, Homo sapiens
cggttacctgagata

SEQ ID NO: 1275302 - DNA, 15 bp, Homo sapiens
gcggttacctgagat

SEQ ID NO: 1275303 - DNA, 15 bp, Homo sapiens
ggcggttacctgaga

SEQ ID NO: 1275304 - DNA, 15 bp, Homo sapiens
aggcggttacctgag

SEQ ID NO: 1275305 - DNA, 15 bp, Homo sapiens
caggcggttacctga

SEQ ID NO: 1275306 - DNA, 15 bp, Homo sapiens
acaggcggttacctg

SEQ ID NO: 1275307 - DNA, 15 bp, Homo sapiens
gacaggcggttacct

SEQ ID NO: 1275308 - DNA, 15 bp, Homo sapiens
ggacaggcggttacc

SEQ ID NO: 1275309 - DNA, 15 bp, Homo sapiens
cggacaggcggttac

SEQ ID NO: 1275310 - DNA, 15 bp, Homo sapiens
ccggacaggcggtta

SEQ ID NO: 1275311 - DNA, 15 bp, Homo sapiens
tccggacaggcggtt

SEQ ID NO: 1275312 - DNA, 15 bp, Homo sapiens
ctccggacaggcggt

SEQ ID NO: 1275313 - DNA, 15 bp, Homo sapiens
cctccggacaggcgg

SEQ ID NO: 1275314 - DNA, 15 bp, Homo sapiens
acctccggacaggcg

SEQ ID NO: 1275315 - DNA, 15 bp, Homo sapiens
gacctccggacaggc

SEQ ID NO: 1275316 - DNA, 15 bp, Homo sapiens
agacctccggacagg

SEQ ID NO: 1275317 - DNA, 15 bp, Homo sapiens
cagacctccggacag

SEQ ID NO: 1275318 - DNA, 15 bp, Homo sapiens
acagacctccggaca

SEQ ID NO: 1275319 - DNA, 15 bp, Homo sapiens
aacagacctccggac

SEQ ID NO: 1275320 - DNA, 15 bp, Homo sapiens
aaacagacctccgga

SEQ ID NO: 1275321 - DNA, 15 bp, Homo sapiens
caaacagacctccgg

SEQ ID NO: 1275322 - DNA, 15 bp, Homo sapiens
ccaaacagacctccg

SEQ ID NO: 1275323 - DNA, 15 bp, Homo sapiens
cccaaacagacctcc

SEQ ID NO: 1275324 - DNA, 15 bp, Homo sapiens
tcccaaacagacctc

SEQ ID NO: 1275325 - DNA, 15 bp, Homo sapiens
atcccaaacagacct

SEQ ID NO: 1275326 - DNA, 15 bp, Homo sapiens
gatcccaaacagacc

SEQ ID NO: 1275327 - DNA, 15 bp, Homo sapiens
tgatcccaaacagac

SEQ ID NO: 1275328 - DNA, 15 bp, Homo sapiens
atgatcccaaacaga

SEQ ID NO: 1275329 - DNA, 15 bp, Homo sapiens
gatgatcccaaacag

SEQ ID NO: 1275330 - DNA, 15 bp, Homo sapiens
agatgatcccaaaca

SEQ ID NO: 1275331 - DNA, 15 bp, Homo sapiens
aagatgatcccaaac

SEQ ID NO: 1275332 - DNA, 15 bp, Homo sapiens
taagatgatcccaaa

SEQ ID NO: 1275333 - DNA, 15 bp, Homo sapiens
ttaagatgatcccaa

SEQ ID NO: 1275334 - DNA, 15 bp, Homo sapiens
gttaagatgatccca

SEQ ID NO: 1275335 - DNA, 15 bp, Homo sapiens
agttaagatgatccc

SEQ ID NO: 1275336 - DNA, 15 bp, Homo sapiens
aagttaagatgatcc

SEQ ID NO: 1275337 - DNA, 15 bp, Homo sapiens
gaagttaagatgatc

SEQ ID NO: 1275338 - DNA, 15 bp, Homo sapiens
tgaagttaagatgat

SEQ ID NO: 1275339 - DNA, 15 bp, Homo sapiens
ctgaagttaagatga

SEQ ID NO: 1275340 - DNA, 15 bp, Homo sapiens
gctgaagttaagatg

SEQ ID NO: 1275341 - DNA, 15 bp, Homo sapiens
agctgaagttaagat

SEQ ID NO: 1275342 - DNA, 15 bp, Homo sapiens
tagctgaagttaaga

SEQ ID NO: 1275343 - DNA, 15 bp, Homo sapiens
ctagctgaagttaag

SEQ ID NO: 1275344 - DNA, 15 bp, Homo sapiens
tctagctgaagttaa

SEQ ID NO: 1275345 - DNA, 15 bp, Homo sapiens
atctagctgaagtta

SEQ ID NO: 1275346 - DNA, 15 bp, Homo sapiens
catctagctgaagtt

SEQ ID NO: 1275347 - DNA, 15 bp, Homo sapiens
tcatctagctgaagt

SEQ ID NO: 1275348 - DNA, 15 bp, Homo sapiens
atcatctagctgaag

SEQ ID NO: 1275349 - DNA, 15 bp, Homo sapiens
catcatctagctgaa

SEQ ID NO: 1275350 - DNA, 15 bp, Homo sapiens
ccatcatctagctga

SEQ ID NO: 1275351 - DNA, 15 bp, Homo sapiens
tccatcatctagctg

SEQ ID NO: 1275352 - DNA, 15 bp, Homo sapiens
atccatcatctagct

SEQ ID NO: 1275353 - DNA, 15 bp, Homo sapiens
aatccatcatctagc

SEQ ID NO: 1275354 - DNA, 15 bp, Homo sapiens
gaatccatcatctag

SEQ ID NO: 1275355 - DNA, 15 bp, Homo sapiens
tgaatccatcatcta

SEQ ID NO: 1275356 - DNA, 15 bp, Homo sapiens
atgaatccatcatct

SEQ ID NO: 1275357 - DNA, 15 bp, Homo sapiens
aatgaatccatcatc

SEQ ID NO: 1275358 - DNA, 15 bp, Homo sapiens
caatgaatccatcat

SEQ ID NO: 1275359 - DNA, 15 bp, Homo sapiens
acaatgaatccatca

SEQ ID NO: 1275360 - DNA, 15 bp, Homo sapiens
aacaatgaatccatc

SEQ ID NO: 1275361 - DNA, 15 bp, Homo sapiens
gaacaatgaatccat

SEQ ID NO: 1275362 - DNA, 15 bp, Homo sapiens
tgaacaatgaatcca

SEQ ID NO: 1275363 - DNA, 15 bp, Homo sapiens
atgaacaatgaatcc

SEQ ID NO: 1275364 - DNA, 15 bp, Homo sapiens
catgaacaatgaatc

SEQ ID NO: 1275365 - DNA, 15 bp, Homo sapiens
tcatgaacaatgaat

SEQ ID NO: 1275366 - DNA, 15 bp, Homo sapiens
atcatgaacaatgaa

SEQ ID NO: 1275367 - DNA, 15 bp, Homo sapiens
aatcatgaacaatga

SEQ ID NO: 1275368 - DNA, 15 bp, Homo sapiens
gaatcatgaacaatg

SEQ ID NO: 1275369 - DNA, 15 bp, Homo sapiens
ggaatcatgaacaat

SEQ ID NO: 1275370 - DNA, 15 bp, Homo sapiens
aggaatcatgaacaa

SEQ ID NO: 1275371 - DNA, 15 bp, Homo sapiens
aaggaatcatgaaca

SEQ ID NO: 1275372 - DNA, 15 bp, Homo sapiens
gaaggaatcatgaac

SEQ ID NO: 1275373 - DNA, 15 bp, Homo sapiens
agaaggaatcatgaa

SEQ ID NO: 1275374 - DNA, 15 bp, Homo sapiens
tagaaggaatcatga

SEQ ID NO: 1275375 - DNA, 15 bp, Homo sapiens
ttagaaggaatcatg

SEQ ID NO: 1275376 - DNA, 15 bp, Homo sapiens
gttagaaggaatcat

SEQ ID NO: 1275377 - DNA, 15 bp, Homo sapiens
ggttagaaggaatca

SEQ ID NO: 1275378 - DNA, 15 bp, Homo sapiens
tggttagaaggaatc

SEQ ID NO: 1275379 - DNA, 15 bp, Homo sapiens
ctggttagaaggaat

SEQ ID NO: 1275380 - DNA, 15 bp, Homo sapiens
cctggttagaaggaa

SEQ ID NO: 1275381 - DNA, 15 bp, Homo sapiens
tcctggttagaagga

SEQ ID NO: 1275382 - DNA, 15 bp, Homo sapiens
ctcctggttagaagg

SEQ ID NO: 1275383 - DNA, 15 bp, Homo sapiens
cctcctggttagaag

SEQ ID NO: 1275384 - DNA, 15 bp, Homo sapiens
tcctcctggttagaa

SEQ ID NO: 1275385 - DNA, 15 bp, Homo sapiens
atcctcctggttaga

SEQ ID NO: 1275386 - DNA, 15 bp, Homo sapiens
aatcctcctggttag

SEQ ID NO: 1275387 - DNA, 15 bp, Homo sapiens
gaatcctcctggtta

SEQ ID NO: 1275388 - DNA, 15 bp, Homo sapiens
agaatcctcctggtt

SEQ ID NO: 1275389 - DNA, 15 bp, Homo sapiens
cagaatcctcctggt

SEQ ID NO: 1275390 - DNA, 15 bp, Homo sapiens
gcagaatcctcctgg

SEQ ID NO: 1275391 - DNA, 15 bp, Homo sapiens
tgcagaatcctcctg

SEQ ID NO: 1275392 - DNA, 15 bp, Homo sapiens
ttgcagaatcctcct

SEQ ID NO: 1275393 - DNA, 15 bp, Homo sapiens
attgcagaatcctcc

SEQ ID NO: 1275394 - DNA, 15 bp, Homo sapiens
cattgcagaatcctc

SEQ ID NO: 1275395 - DNA, 15 bp, Homo sapiens
ccattgcagaatcct

SEQ ID NO: 1275396 - DNA, 15 bp, Homo sapiens
cccattgcagaatcc

SEQ ID NO: 1275397 - DNA, 15 bp, Homo sapiens
ccccattgcagaatc

SEQ ID NO: 1275398 - DNA, 15 bp, Homo sapiens
cccccattgcagaat

SEQ ID NO: 1275399 - DNA, 15 bp, Homo sapiens
gcccccattgcagaa

SEQ ID NO: 1275400 - DNA, 15 bp, Homo sapiens
agcccccattgcaga

SEQ ID NO: 1275401 - DNA, 15 bp, Homo sapiens
gagcccccattgcag

SEQ ID NO: 1275402 - DNA, 15 bp, Homo sapiens
ggagcccccattgca

SEQ ID NO: 1275403 - DNA, 15 bp, Homo sapiens
aggagcccccattgc

SEQ ID NO: 1275404 - DNA, 15 bp, Homo sapiens
aaggagcccccattg

SEQ ID NO: 1275405 - DNA, 15 bp, Homo sapiens
caaggagcccccatt

SEQ ID NO: 1275406 - DNA, 15 bp, Homo sapiens
gcaaggagcccccat

SEQ ID NO: 1275407 - DNA, 15 bp, Homo sapiens
ggcaaggagccccca

SEQ ID NO: 1275408 - DNA, 15 bp, Homo sapiens
aggcaaggagccccc

SEQ ID NO: 1275409 - DNA, 15 bp, Homo sapiens
gaggcaaggagcccc

SEQ ID NO: 1275410 - DNA, 15 bp, Homo sapiens
cgaggcaaggagccc

SEQ ID NO: 1275411 - DNA, 15 bp, Homo sapiens
acgaggcaaggagcc

SEQ ID NO: 1275412 - DNA, 15 bp, Homo sapiens
aacgaggcaaggagc

SEQ ID NO: 1275413 - DNA, 15 bp, Homo sapiens
aaacgaggcaaggag

SEQ ID NO: 1275414 - DNA, 15 bp, Homo sapiens
caaacgaggcaagga

SEQ ID NO: 1275415 - DNA, 15 bp, Homo sapiens
acaaacgaggcaagg

SEQ ID NO: 1275416 - DNA, 15 bp, Homo sapiens
aacaaacgaggcaag

SEQ ID NO: 1275417 - DNA, 15 bp, Homo sapiens
aaacaaacgaggcaa

SEQ ID NO: 1275418 - DNA, 15 bp, Homo sapiens
taaacaaacgaggca

SEQ ID NO: 1275419 - DNA, 15 bp, Homo sapiens
ttaaacaaacgaggc

SEQ ID NO: 1275420 - DNA, 15 bp, Homo sapiens
tttaaacaaacgagg

SEQ ID NO: 1275421 - DNA, 15 bp, Homo sapiens
ctttaaacaaacgag

SEQ ID NO: 1275422 - DNA, 15 bp, Homo sapiens
tctttaaacaaacga

SEQ ID NO: 1275423 - DNA, 15 bp, Homo sapiens
atctttaaacaaacg

SEQ ID NO: 1275424 - DNA, 15 bp, Homo sapiens
gatctttaaacaaac

SEQ ID NO: 1275425 - DNA, 15 bp, Homo sapiens
tgatctttaaacaaa

SEQ ID NO: 1275426 - DNA, 15 bp, Homo sapiens
ctgatctttaaacaa

SEQ ID NO: 1275427 - DNA, 15 bp, Homo sapiens
gctgatctttaaaca

SEQ ID NO: 1275428 - DNA, 15 bp, Homo sapiens
ggctgatctttaaac

SEQ ID NO: 1275429 - DNA, 15 bp, Homo sapiens
aggctgatctttaaa

SEQ ID NO: 1275430 - DNA, 15 bp, Homo sapiens
gaggctgatctttaa

SEQ ID NO: 1275431 - DNA, 15 bp, Homo sapiens
agaggctgatcttta

SEQ ID NO: 1275432 - DNA, 15 bp, Homo sapiens
cagaggctgatcttt

SEQ ID NO: 1275433 - DNA, 15 bp, Homo sapiens
ccagaggctgatctt

SEQ ID NO: 1275434 - DNA, 15 bp, Homo sapiens
cccagaggctgatct

SEQ ID NO: 1275435 - DNA, 15 bp, Homo sapiens
tcccagaggctgatc

SEQ ID NO: 1275436 - DNA, 15 bp, Homo sapiens
atcccagaggctgat

SEQ ID NO: 1275437 - DNA, 15 bp, Homo sapiens
aatcccagaggctga

SEQ ID NO: 1275438 - DNA, 15 bp, Homo sapiens
aaatcccagaggctg

SEQ ID NO: 1275439 - DNA, 15 bp, Homo sapiens
aaaatcccagaggct

SEQ ID NO: 1275440 - DNA, 15 bp, Homo sapiens
aaaaatcccagaggc

SEQ ID NO: 1275441 - DNA, 15 bp, Homo sapiens
taaaaatcccagagg

SEQ ID NO: 1275442 - DNA, 15 bp, Homo sapiens
ttaaaaatcccagag

SEQ ID NO: 1275443 - DNA, 15 bp, Homo sapiens
tttaaaaatcccaga

SEQ ID NO: 1275444 - DNA, 15 bp, Homo sapiens
ctttaaaaatcccag

SEQ ID NO: 1275445 - DNA, 15 bp, Homo sapiens
gctttaaaaatccca

SEQ ID NO: 1275446 - DNA, 15 bp, Homo sapiens
tgctttaaaaatccc

SEQ ID NO: 1275447 - DNA, 15 bp, Homo sapiens
ttgctttaaaaatcc

SEQ ID NO: 1275448 - DNA, 15 bp, Homo sapiens
cttgctttaaaaatc

SEQ ID NO: 1275449 - DNA, 15 bp, Homo sapiens
tcttgctttaaaaat

SEQ ID NO: 1275450 - DNA, 15 bp, Homo sapiens
ctcttgctttaaaaa

SEQ ID NO: 1275451 - DNA, 15 bp, Homo sapiens
actcttgctttaaaa

SEQ ID NO: 1275452 - DNA, 15 bp, Homo sapiens
tactcttgctttaaa

SEQ ID NO: 1275453 - DNA, 15 bp, Homo sapiens
atactcttgctttaa

SEQ ID NO: 1275454 - DNA, 15 bp, Homo sapiens
tatactcttgcttta

SEQ ID NO: 1275455 - DNA, 15 bp, Homo sapiens
ttatactcttgcttt

SEQ ID NO: 1275456 - DNA, 15 bp, Homo sapiens
attatactcttgctt

SEQ ID NO: 1275457 - DNA, 15 bp, Homo sapiens
aattatactcttgct

SEQ ID NO: 1275458 - DNA, 15 bp, Homo sapiens
taattatactcttgc

SEQ ID NO: 1275459 - DNA, 15 bp, Homo sapiens
ctaattatactcttg

SEQ ID NO: 1275460 - DNA, 15 bp, Homo sapiens
tctaattatactctt

SEQ ID NO: 1275461 - DNA, 15 bp, Homo sapiens
atctaattatactct

SEQ ID NO: 1275462 - DNA, 15 bp, Homo sapiens
tatctaattatactc

SEQ ID NO: 1275463 - DNA, 15 bp, Homo sapiens
ttatctaattatact

SEQ ID NO: 1275464 - DNA, 15 bp, Homo sapiens
cttatctaattatac

SEQ ID NO: 1275465 - DNA, 15 bp, Homo sapiens
gcttatctaattata

SEQ ID NO: 1275466 - DNA, 15 bp, Homo sapiens
tgcttatctaattat

SEQ ID NO: 1275467 - DNA, 15 bp, Homo sapiens
atgcttatctaatta

SEQ ID NO: 1275468 - DNA, 15 bp, Homo sapiens
tatgcttatctaatt

SEQ ID NO: 1275469 - DNA, 15 bp, Homo sapiens
gtatgcttatctaat

SEQ ID NO: 1275470 - DNA, 15 bp, Homo sapiens
tgtatgcttatctaa

SEQ ID NO: 1275471 - DNA, 15 bp, Homo sapiens
atgtatgcttatcta

SEQ ID NO: 1275472 - DNA, 15 bp, Homo sapiens
aatgtatgcttatct

SEQ ID NO: 1275473 - DNA, 15 bp, Homo sapiens
caatgtatgcttatc

SEQ ID NO: 1275474 - DNA, 15 bp, Homo sapiens
gcaatgtatgcttat

SEQ ID NO: 1275475 - DNA, 15 bp, Homo sapiens
ggcaatgtatgctta

SEQ ID NO: 1275476 - DNA, 15 bp, Homo sapiens
tggcaatgtatgctt

SEQ ID NO: 1275477 - DNA, 15 bp, Homo sapiens
ctggcaatgtatgct

SEQ ID NO: 1275478 - DNA, 15 bp, Homo sapiens
tctggcaatgtatgc

SEQ ID NO: 1275479 - DNA, 15 bp, Homo sapiens
ctctggcaatgtatg

SEQ ID NO: 1275480 - DNA, 15 bp, Homo sapiens
cctctggcaatgtat

SEQ ID NO: 1275481 - DNA, 15 bp, Homo sapiens
ccctctggcaatgta

SEQ ID NO: 1275482 - DNA, 15 bp, Homo sapiens
cccctctggcaatgt

SEQ ID NO: 1275483 - DNA, 15 bp, Homo sapiens
tcccctctggcaatg

SEQ ID NO: 1275484 - DNA, 15 bp, Homo sapiens
ctcccctctggcaat

SEQ ID NO: 1275485 - DNA, 15 bp, Homo sapiens
actcccctctggcaa

SEQ ID NO: 1275486 - DNA, 15 bp, Homo sapiens
cactcccctctggca

SEQ ID NO: 1275487 - DNA, 15 bp, Homo sapiens
acactcccctctggc

SEQ ID NO: 1275488 - DNA, 15 bp, Homo sapiens
gacactcccctctgg

SEQ ID NO: 1275489 - DNA, 15 bp, Homo sapiens
agacactcccctctg

SEQ ID NO: 1275490 - DNA, 15 bp, Homo sapiens
tagacactcccctct

SEQ ID NO: 1275491 - DNA, 15 bp, Homo sapiens
ctagacactcccctc

SEQ ID NO: 1275492 - DNA, 15 bp, Homo sapiens
tctagacactcccct

SEQ ID NO: 1275493 - DNA, 15 bp, Homo sapiens
ctctagacactcccc

SEQ ID NO: 1275494 - DNA, 15 bp, Homo sapiens
tctctagacactccc

SEQ ID NO: 1275495 - DNA, 15 bp, Homo sapiens
ctctctagacactcc

SEQ ID NO: 1275496 - DNA, 15 bp, Homo sapiens
cctctctagacactc

SEQ ID NO: 1275497 - DNA, 15 bp, Homo sapiens
ccctctctagacact

SEQ ID NO: 1275498 - DNA, 15 bp, Homo sapiens
tccctctctagacac

SEQ ID NO: 1275499 - DNA, 15 bp, Homo sapiens
ttccctctctagaca

SEQ ID NO: 1275500 - DNA, 15 bp, Homo sapiens
cttccctctctagac

SEQ ID NO: 1275501 - DNA, 15 bp, Homo sapiens
ccttccctctctaga

SEQ ID NO: 1275502 - DNA, 15 bp, Homo sapiens
tccttccctctctag

SEQ ID NO: 1275503 - DNA, 15 bp, Homo sapiens
ttccttccctctcta

SEQ ID NO: 1275504 - DNA, 15 bp, Homo sapiens
attccttccctctct

SEQ ID NO: 1275505 - DNA, 15 bp, Homo sapiens
cattccttccctctc

SEQ ID NO: 1275506 - DNA, 15 bp, Homo sapiens
tcattccttccctct

SEQ ID NO: 1275507 - DNA, 15 bp, Homo sapiens
ttcattccttccctc

SEQ ID NO: 1275508 - DNA, 15 bp, Homo sapiens
cttcattccttccct

SEQ ID NO: 1275509 - DNA, 15 bp, Homo sapiens
tcttcattccttccc

SEQ ID NO: 1275510 - DNA, 15 bp, Homo sapiens
ctcttcattccttcc

SEQ ID NO: 1275511 - DNA, 15 bp, Homo sapiens
cctcttcattccttc

SEQ ID NO: 1275512 - DNA, 15 bp, Homo sapiens
acctcttcattcctt

SEQ ID NO: 1275513 - DNA, 15 bp, Homo sapiens
cacctcttcattcct

SEQ ID NO: 1275514 - DNA, 15 bp, Homo sapiens
tcacctcttcattcc

SEQ ID NO: 1275515 - DNA, 15 bp, Homo sapiens
ctcacctcttcattc

SEQ ID NO: 1275516 - DNA, 15 bp, Homo sapiens
tctcacctcttcatt

SEQ ID NO: 1275517 - DNA, 15 bp, Homo sapiens
ctctcacctcttcat

SEQ ID NO: 1275518 - DNA, 15 bp, Homo sapiens
cctctcacctcttca

SEQ ID NO: 1275519 - DNA, 15 bp, Homo sapiens
tcctctcacctcttc

SEQ ID NO: 1275520 - DNA, 15 bp, Homo sapiens
ttcctctcacctctt

SEQ ID NO: 1275521 - DNA, 15 bp, Homo sapiens
tttcctctcacctct

SEQ ID NO: 1275522 - DNA, 15 bp, Homo sapiens
ctttcctctcacctc

SEQ ID NO: 1275523 - DNA, 15 bp, Homo sapiens
tctttcctctcacct

SEQ ID NO: 1275524 - DNA, 15 bp, Homo sapiens
ttctttcctctcacc

SEQ ID NO: 1275525 - DNA, 15 bp, Homo sapiens
tttctttcctctcac

SEQ ID NO: 1275526 - DNA, 15 bp, Homo sapiens
ttttctttcctctca

SEQ ID NO: 1275527 - DNA, 15 bp, Homo sapiens
cttttctttcctctc

SEQ ID NO: 1275528 - DNA, 15 bp, Homo sapiens
ccttttctttcctct

SEQ ID NO: 1275529 - DNA, 15 bp, Homo sapiens
tccttttctttcctc

SEQ ID NO: 1275530 - DNA, 15 bp, Homo sapiens
ttccttttctttcct

SEQ ID NO: 1275531 - DNA, 15 bp, Homo sapiens
cttccttttctttcc

SEQ ID NO: 1275532 - DNA, 15 bp, Homo sapiens
tcttccttttctttc

SEQ ID NO: 1275533 - DNA, 15 bp, Homo sapiens
ttcttccttttcttt

SEQ ID NO: 1275534 - DNA, 15 bp, Homo sapiens
tttcttccttttctt

SEQ ID NO: 1275535 - DNA, 15 bp, Homo sapiens
ctttttcttcctttt

SEQ ID NO: 1275536 - DNA, 15 bp, Homo sapiens
tctttttcttccttt

SEQ ID NO: 1275537 - DNA, 15 bp, Homo sapiens
ttctttttcttcctt

SEQ ID NO: 1275538 - DNA, 15 bp, Homo sapiens
tttctttttcttcct

SEQ ID NO: 1275539 - DNA, 15 bp, Homo sapiens
ctttctttttcttcc

SEQ ID NO: 1275540 - DNA, 15 bp, Homo sapiens
actttctttttcttc

SEQ ID NO: 1275541 - DNA, 15 bp, Homo sapiens
cactttctttttctt

SEQ ID NO: 1275542 - DNA, 15 bp, Homo sapiens
ccactttctttttct

SEQ ID NO: 1275543 - DNA, 15 bp, Homo sapiens
cccactttctttttc

SEQ ID NO: 1275544 - DNA, 15 bp, Homo sapiens
acccactttcttttt

SEQ ID NO: 1275545 - DNA, 15 bp, Homo sapiens
tacccactttctttt

SEQ ID NO: 1275546 - DNA, 15 bp, Homo sapiens
ttacccactttcttt

SEQ ID NO: 1275547 - DNA, 15 bp, Homo sapiens
cttacccactttctt

SEQ ID NO: 1275548 - DNA, 15 bp, Homo sapiens
tcttacccactttct

SEQ ID NO: 1275549 - DNA, 15 bp, Homo sapiens
ctcttacccactttc

SEQ ID NO: 1275550 - DNA, 15 bp, Homo sapiens
cctcttacccacttt

SEQ ID NO: 1275551 - DNA, 15 bp, Homo sapiens
gcctcttacccactt

SEQ ID NO: 1275552 - DNA, 15 bp, Homo sapiens
tgcctcttacccact

SEQ ID NO: 1275553 - DNA, 15 bp, Homo sapiens
ctgcctcttacccac

SEQ ID NO: 1275554 - DNA, 15 bp, Homo sapiens
tctgcctcttaccca

SEQ ID NO: 1275555 - DNA, 15 bp, Homo sapiens
ctctgcctcttaccc

SEQ ID NO: 1275556 - DNA, 15 bp, Homo sapiens
gctctgcctcttacc

SEQ ID NO: 1275557 - DNA, 15 bp, Homo sapiens
tgctctgcctcttac

SEQ ID NO: 1275558 - DNA, 15 bp, Homo sapiens
ttgctctgcctctta

SEQ ID NO: 1275559 - DNA, 15 bp, Homo sapiens
cttgctctgcctctt

SEQ ID NO: 1275560 - DNA, 15 bp, Homo sapiens
tcttgctctgcctct

SEQ ID NO: 1275561 - DNA, 15 bp, Homo sapiens
atcttgctctgcctc

SEQ ID NO: 1275562 - DNA, 15 bp, Homo sapiens
catcttgctctgcct

SEQ ID NO: 1275563 - DNA, 15 bp, Homo sapiens
ccatcttgctctgcc

SEQ ID NO: 1275564 - DNA, 15 bp, Homo sapiens
gccatcttgctctgc

SEQ ID NO: 1275565 - DNA, 15 bp, Homo sapiens
tgccatcttgctctg

SEQ ID NO: 1275566 - DNA, 15 bp, Homo sapiens
ctgccatcttgctct

SEQ ID NO: 1275567 - DNA, 15 bp, Homo sapiens
tctgccatcttgctc

SEQ ID NO: 1275568 - DNA, 15 bp, Homo sapiens
ttctgccatcttgct

SEQ ID NO: 1275569 - DNA, 15 bp, Homo sapiens
attctgccatcttgc

SEQ ID NO: 1275570 - DNA, 15 bp, Homo sapiens
tattctgccatcttg

SEQ ID NO: 1275571 - DNA, 15 bp, Homo sapiens
ctattctgccatctt

SEQ ID NO: 1275572 - DNA, 15 bp, Homo sapiens
tctattctgccatct

SEQ ID NO: 1275573 - DNA, 15 bp, Homo sapiens
ttctattctgccatc

SEQ ID NO: 1275574 - DNA, 15 bp, Homo sapiens
tttctattctgccat

SEQ ID NO: 1275575 - DNA, 15 bp, Homo sapiens
ctttctattctgcca

SEQ ID NO: 1275576 - DNA, 15 bp, Homo sapiens
gctttctattctgcc

SEQ ID NO: 1275577 - DNA, 15 bp, Homo sapiens
agctttctattctgc

SEQ ID NO: 1275578 - DNA, 15 bp, Homo sapiens
gagctttctattctg

SEQ ID NO: 1275579 - DNA, 15 bp, Homo sapiens
ggagctttctattct

SEQ ID NO: 1275580 - DNA, 15 bp, Homo sapiens
tggagctttctattc

SEQ ID NO: 1275581 - DNA, 15 bp, Homo sapiens
gtggagctttctatt

SEQ ID NO: 1275582 - DNA, 15 bp, Homo sapiens
ggtggagctttctat

SEQ ID NO: 1275583 - DNA, 15 bp, Homo sapiens
tggtggagctttcta

SEQ ID NO: 1275584 - DNA, 15 bp, Homo sapiens
ttggtggagctttct

SEQ ID NO: 1275585 - DNA, 15 bp, Homo sapiens
attggtggagctttc

SEQ ID NO: 1275586 - DNA, 15 bp, Homo sapiens
cattggtggagcttt

SEQ ID NO: 1275587 - DNA, 15 bp, Homo sapiens
ccattggtggagctt

SEQ ID NO: 1275588 - DNA, 15 bp, Homo sapiens
tccattggtggagct

SEQ ID NO: 1275589 - DNA, 15 bp, Homo sapiens
gtccattggtggagc

SEQ ID NO: 1275590 - DNA, 15 bp, Homo sapiens
ggtccattggtggag

SEQ ID NO: 1275591 - DNA, 15 bp, Homo sapiens
gggtccattggtgga

SEQ ID NO: 1275592 - DNA, 15 bp, Homo sapiens
ggggtccattggtgg

SEQ ID NO: 1275593 - DNA, 15 bp, Homo sapiens
gggggtccattggtg

SEQ ID NO: 1275594 - DNA, 15 bp, Homo sapiens
agggggtccattggt

SEQ ID NO: 1275595 - DNA, 15 bp, Homo sapiens
cagggggtccattgg

SEQ ID NO: 1275596 - DNA, 15 bp, Homo sapiens
ccagggggtccattg

SEQ ID NO: 1275597 - DNA, 15 bp, Homo sapiens
gccagggggtccatt

SEQ ID NO: 1275598 - DNA, 15 bp, Homo sapiens
tgccagggggtccat

SEQ ID NO: 1275599 - DNA, 15 bp, Homo sapiens
ttgccagggggtcca

SEQ ID NO: 1275600 - DNA, 15 bp, Homo sapiens
cttgccagggggtcc

SEQ ID NO: 1275601 - DNA, 15 bp, Homo sapiens
ccttgccagggggtc

SEQ ID NO: 1275602 - DNA, 15 bp, Homo sapiens
tccttgccagggggt

SEQ ID NO: 1275603 - DNA, 15 bp, Homo sapiens
atccttgccaggggg

SEQ ID NO: 1275604 - DNA, 15 bp, Homo sapiens
tatccttgccagggg

SEQ ID NO: 1275605 - DNA, 15 bp, Homo sapiens
gtatccttgccaggg

SEQ ID NO: 1275606 - DNA, 15 bp, Homo sapiens
tgtatccttgccagg

SEQ ID NO: 1275607 - DNA, 15 bp, Homo sapiens
ttgtatccttgccag

SEQ ID NO: 1275608 - DNA, 15 bp, Homo sapiens
tttgtatccttgcca

SEQ ID NO: 1275609 - DNA, 15 bp, Homo sapiens
ctttgtatccttgcc

SEQ ID NO: 1275610 - DNA, 15 bp, Homo sapiens
actttgtatccttgc

SEQ ID NO: 1275611 - DNA, 15 bp, Homo sapiens
aactttgtatccttg

SEQ ID NO: 1275612 - DNA, 15 bp, Homo sapiens
taactttgtatcctt

SEQ ID NO: 1275613 - DNA, 15 bp, Homo sapiens
ttaactttgtatcct

SEQ ID NO: 1275614 - DNA, 15 bp, Homo sapiens
gttaactttgtatcc

SEQ ID NO: 1275615 - DNA, 15 bp, Homo sapiens
tgttaactttgtatc

SEQ ID NO: 1275616 - DNA, 15 bp, Homo sapiens
ttgttaactttgtat

SEQ ID NO: 1275617 - DNA, 15 bp, Homo sapiens
gttgttaactttgta

SEQ ID NO: 1275618 - DNA, 15 bp, Homo sapiens
agttgttaactttgt

SEQ ID NO: 1275619 - DNA, 15 bp, Homo sapiens
tagttgttaactttg

SEQ ID NO: 1275620 - DNA, 15 bp, Homo sapiens
atagttgttaacttt

SEQ ID NO: 1275621 - DNA, 15 bp, Homo sapiens
gatagttgttaactt

SEQ ID NO: 1275622 - DNA, 15 bp, Homo sapiens
agatagttgttaact

SEQ ID NO: 1275623 - DNA, 15 bp, Homo sapiens
cagatagttgttaac

SEQ ID NO: 1275624 - DNA, 15 bp, Homo sapiens
gcagatagttgttaa

SEQ ID NO: 1275625 - DNA, 15 bp, Homo sapiens
tgcagatagttgtta

SEQ ID NO: 1275626 - DNA, 15 bp, Homo sapiens
gtgcagatagttgtt

SEQ ID NO: 1275627 - DNA, 15 bp, Homo sapiens
tgtgcagatagttgt

SEQ ID NO: 1275628 - DNA, 15 bp, Homo sapiens
ctgtgcagatagttg

SEQ ID NO: 1275629 - DNA, 15 bp, Homo sapiens
tctgtgcagatagtt

SEQ ID NO: 1275630 - DNA, 15 bp, Homo sapiens
ttctgtgcagatagt

SEQ ID NO: 1275631 - DNA, 15 bp, Homo sapiens
tttctgtgcagatag

SEQ ID NO: 1275632 - DNA, 15 bp, Homo sapiens
ttttctgtgcagata

SEQ ID NO: 1275633 - DNA, 15 bp, Homo sapiens
tttttctgtgcagat

SEQ ID NO: 1275634 - DNA, 15 bp, Homo sapiens
gtttttctgtgcaga

SEQ ID NO: 1275635 - DNA, 15 bp, Homo sapiens
tgtttttctgtgcag

SEQ ID NO: 1275636 - DNA, 15 bp, Homo sapiens
ttgtttttctgtgca

SEQ ID NO: 1275637 - DNA, 15 bp, Homo sapiens
tttgtttttctgtgc

SEQ ID NO: 1275638 - DNA, 15 bp, Homo sapiens
gtttgtttttctgtg

SEQ ID NO: 1275639 - DNA, 15 bp, Homo sapiens
tgtttgtttttctgt

SEQ ID NO: 1275640 - DNA, 15 bp, Homo sapiens
ttgtttgtttttctg

SEQ ID NO: 1275641 - DNA, 15 bp, Homo sapiens
tttgtttgtttttct

SEQ ID NO: 1275642 - DNA, 15 bp, Homo sapiens
gtttgtttgtttttc

SEQ ID NO: 1275643 - DNA, 15 bp, Homo sapiens
gttttttgtttgttt

SEQ ID NO: 1275644 - DNA, 15 bp, Homo sapiens
tgttttttgtttgtt

SEQ ID NO: 1275645 - DNA, 15 bp, Homo sapiens
gtgttttttgtttgt

SEQ ID NO: 1275646 - DNA, 15 bp, Homo sapiens
ggtgttttttgtttg

SEQ ID NO: 1275647 - DNA, 15 bp, Homo sapiens
aggtgttttttgttt

SEQ ID NO: 1275648 - DNA, 15 bp, Homo sapiens
aaggtgttttttgtt

SEQ ID NO: 1275649 - DNA, 15 bp, Homo sapiens
gaaggtgttttttgt

SEQ ID NO: 1275650 - DNA, 15 bp, Homo sapiens
tgaaggtgttttttg

SEQ ID NO: 1275651 - DNA, 15 bp, Homo sapiens
atgaaggtgtttttt

SEQ ID NO: 1275652 - DNA, 15 bp, Homo sapiens
tatgaaggtgttttt

SEQ ID NO: 1275653 - DNA, 15 bp, Homo sapiens
ttatgaaggtgtttt

SEQ ID NO: 1275654 - DNA, 15 bp, Homo sapiens
cttatgaaggtgttt

SEQ ID NO: 1275655 - DNA, 15 bp, Homo sapiens
tcttatgaaggtgtt

SEQ ID NO: 1275656 - DNA, 15 bp, Homo sapiens
ttcttatgaaggtgt

SEQ ID NO: 1275657 - DNA, 15 bp, Homo sapiens
attcttatgaaggtg

SEQ ID NO: 1275658 - DNA, 15 bp, Homo sapiens
gattcttatgaaggt

SEQ ID NO: 1275659 - DNA, 15 bp, Homo sapiens
tgattcttatgaagg

SEQ ID NO: 1275660 - DNA, 15 bp, Homo sapiens
ctgattcttatgaag

SEQ ID NO: 1275661 - DNA, 15 bp, Homo sapiens
tctgattcttatgaa

SEQ ID NO: 1275662 - DNA, 15 bp, Homo sapiens
ttctgattcttatga

SEQ ID NO: 1275663 - DNA, 15 bp, Homo sapiens
gttctgattcttatg

SEQ ID NO: 1275664 - DNA, 15 bp, Homo sapiens
agttctgattcttat

SEQ ID NO: 1275665 - DNA, 15 bp, Homo sapiens
gagttctgattctta

SEQ ID NO: 1275666 - DNA, 15 bp, Homo sapiens
tgagttctgattctt

SEQ ID NO: 1275667 - DNA, 15 bp, Homo sapiens
ctgagttctgattct

SEQ ID NO: 1275668 - DNA, 15 bp, Homo sapiens
cctgagttctgattc

SEQ ID NO: 1275669 - DNA, 15 bp, Homo sapiens
acctgagttctgatt

SEQ ID NO: 1275670 - DNA, 15 bp, Homo sapiens
cacctgagttctgat

SEQ ID NO: 1275671 - DNA, 15 bp, Homo sapiens
tcacctgagttctga

SEQ ID NO: 1275672 - DNA, 15 bp, Homo sapiens
ctcacctgagttctg

SEQ ID NO: 1275673 - DNA, 15 bp, Homo sapiens
gctcacctgagttct

SEQ ID NO: 1275674 - DNA, 15 bp, Homo sapiens
tgctcacctgagttc

SEQ ID NO: 1275675 - DNA, 15 bp, Homo sapiens
gtgctcacctgagtt

SEQ ID NO: 1275676 - DNA, 15 bp, Homo sapiens
tgtgctcacctgagt

SEQ ID NO: 1275677 - DNA, 15 bp, Homo sapiens
gtgtgctcacctgag

SEQ ID NO: 1275678 - DNA, 15 bp, Homo sapiens
tgtgtgctcacctga

SEQ ID NO: 1275679 - DNA, 15 bp, Homo sapiens
atgtgtgctcacctg

SEQ ID NO: 1275680 - DNA, 15 bp, Homo sapiens
tatgtgtgctcacct

SEQ ID NO: 1275681 - DNA, 15 bp, Homo sapiens
ctatgtgtgctcacc

SEQ ID NO: 1275682 - DNA, 15 bp, Homo sapiens
actatgtgtgctcac

SEQ ID NO: 1275683 - DNA, 15 bp, Homo sapiens
tactatgtgtgctca

SEQ ID NO: 1275684 - DNA, 15 bp, Homo sapiens
gtactatgtgtgctc

SEQ ID NO: 1275685 - DNA, 15 bp, Homo sapiens
ggtactatgtgtgct

SEQ ID NO: 1275686 - DNA, 15 bp, Homo sapiens
aggtactatgtgtgc

SEQ ID NO: 1275687 - DNA, 15 bp, Homo sapiens
caggtactatgtgtg

SEQ ID NO: 1275688 - DNA, 15 bp, Homo sapiens
ccaggtactatgtgt

SEQ ID NO: 1275689 - DNA, 15 bp, Homo sapiens
accaggtactatgtg

SEQ ID NO: 1275690 - DNA, 15 bp, Homo sapiens
aaccaggtactatgt

SEQ ID NO: 1275691 - DNA, 15 bp, Homo sapiens
aaaccaggtactatg

SEQ ID NO: 1275692 - DNA, 15 bp, Homo sapiens
aaaaccaggtactat

SEQ ID NO: 1275693 - DNA, 15 bp, Homo sapiens
taaaaccaggtacta

SEQ ID NO: 1275694 - DNA, 15 bp, Homo sapiens
ttaaaaccaggtact

SEQ ID NO: 1275695 - DNA, 15 bp, Homo sapiens
gttaaaaccaggtac

SEQ ID NO: 1275696 - DNA, 15 bp, Homo sapiens
agttaaaaccaggta

SEQ ID NO: 1275697 - DNA, 15 bp, Homo sapiens
aagttaaaaccaggt

SEQ ID NO: 1275698 - DNA, 15 bp, Homo sapiens
gaagttaaaaccagg

SEQ ID NO: 1275699 - DNA, 15 bp, Homo sapiens
tgaagttaaaaccag

SEQ ID NO: 1275700 - DNA, 15 bp, Homo sapiens
atgaagttaaaacca

SEQ ID NO: 1275701 - DNA, 15 bp, Homo sapiens
tatgaagttaaaacc

SEQ ID NO: 1275702 - DNA, 15 bp, Homo sapiens
atatgaagttaaaac

SEQ ID NO: 1275703 - DNA, 15 bp, Homo sapiens
gatatgaagttaaaa

SEQ ID NO: 1275704 - DNA, 15 bp, Homo sapiens
tgatatgaagttaaa

SEQ ID NO: 1275705 - DNA, 15 bp, Homo sapiens
gtgatatgaagttaa

SEQ ID NO: 1275706 - DNA, 15 bp, Homo sapiens
agtgatatgaagtta

SEQ ID NO: 1275707 - DNA, 15 bp, Homo sapiens
cagtgatatgaagtt

SEQ ID NO: 1275708 - DNA, 15 bp, Homo sapiens
tcagtgatatgaagt

SEQ ID NO: 1275709 - DNA, 15 bp, Homo sapiens
ttcagtgatatgaag

SEQ ID NO: 1275710 - DNA, 15 bp, Homo sapiens
tttcagtgatatgaa

SEQ ID NO: 1275711 - DNA, 15 bp, Homo sapiens
gtttcagtgatatga

SEQ ID NO: 1275712 - DNA, 15 bp, Homo sapiens
tgtttcagtgatatg

SEQ ID NO: 1275713 - DNA, 15 bp, Homo sapiens
ctgtttcagtgatat

SEQ ID NO: 1275714 - DNA, 15 bp, Homo sapiens
cctgtttcagtgata

SEQ ID NO: 1275715 - DNA, 15 bp, Homo sapiens
gcctgtttcagtgat

SEQ ID NO: 1275716 - DNA, 15 bp, Homo sapiens
tgcctgtttcagtga

SEQ ID NO: 1275717 - DNA, 15 bp, Homo sapiens
gtgcctgtttcagtg

SEQ ID NO: 1275718 - DNA, 15 bp, Homo sapiens
agtgcctgtttcagt

SEQ ID NO: 1275719 - DNA, 15 bp, Homo sapiens
cagtgcctgtttcag

SEQ ID NO: 1275720 - DNA, 15 bp, Homo sapiens
tcagtgcctgtttca

SEQ ID NO: 1275721 - DNA, 15 bp, Homo sapiens
ttcagtgcctgtttc

SEQ ID NO: 1275722 - DNA, 15 bp, Homo sapiens
cttcagtgcctgttt

SEQ ID NO: 1275723 - DNA, 15 bp, Homo sapiens
tcttcagtgcctgtt

SEQ ID NO: 1275724 - DNA, 15 bp, Homo sapiens
ttcttcagtgcctgt

SEQ ID NO: 1275725 - DNA, 15 bp, Homo sapiens
tttcttcagtgcctg

SEQ ID NO: 1275726 - DNA, 15 bp, Homo sapiens
atttcttcagtgcct

SEQ ID NO: 1275727 - DNA, 15 bp, Homo sapiens
aatttcttcagtgcc

SEQ ID NO: 1275728 - DNA, 15 bp, Homo sapiens
taatttcttcagtgc

SEQ ID NO: 1275729 - DNA, 15 bp, Homo sapiens
ttaatttcttcagtg

SEQ ID NO: 1275730 - DNA, 15 bp, Homo sapiens
tttaatttcttcagt

SEQ ID NO: 1275731 - DNA, 15 bp, Homo sapiens
ttttaatttcttcag

SEQ ID NO: 1275732 - DNA, 15 bp, Homo sapiens
tttttaatttcttca

SEQ ID NO: 1275733 - DNA, 15 bp, Homo sapiens
ttttttaatttcttc

SEQ ID NO: 1275734 - DNA, 15 bp, Homo sapiens
gttttttaatttctt

SEQ ID NO: 1275735 - DNA, 15 bp, Homo sapiens
tgttttttaatttct

SEQ ID NO: 1275736 - DNA, 15 bp, Homo sapiens
ctgttttttaatttc

SEQ ID NO: 1275737 - DNA, 15 bp, Homo sapiens
actgttttttaattt

SEQ ID NO: 1275738 - DNA, 15 bp, Homo sapiens
gactgttttttaatt

SEQ ID NO: 1275739 - DNA, 15 bp, Homo sapiens
ggactgttttttaat

SEQ ID NO: 1275740 - DNA, 15 bp, Homo sapiens
aggactgttttttaa

SEQ ID NO: 1275741 - DNA, 15 bp, Homo sapiens
caggactgtttttta

SEQ ID NO: 1275742 - DNA, 15 bp, Homo sapiens
tcaggactgtttttt

SEQ ID NO: 1275743 - DNA, 15 bp, Homo sapiens
ttcaggactgttttt

SEQ ID NO: 1275744 - DNA, 15 bp, Homo sapiens
attcaggactgtttt

SEQ ID NO: 1275745 - DNA, 15 bp, Homo sapiens
gattcaggactgttt

SEQ ID NO: 1275746 - DNA, 15 bp, Homo sapiens
tgattcaggactgtt

SEQ ID NO: 1275747 - DNA, 15 bp, Homo sapiens
gtgattcaggactgt

SEQ ID NO: 1275748 - DNA, 15 bp, Homo sapiens
tgtgattcaggactg

SEQ ID NO: 1275749 - DNA, 15 bp, Homo sapiens
ttgtgattcaggact

SEQ ID NO: 1275750 - DNA, 15 bp, Homo sapiens
attgtgattcaggac

SEQ ID NO: 1275751 - DNA, 15 bp, Homo sapiens
cattgtgattcagga

SEQ ID NO: 1275752 - DNA, 15 bp, Homo sapiens
gcattgtgattcagg

SEQ ID NO: 1275753 - DNA, 15 bp, Homo sapiens
agcattgtgattcag

SEQ ID NO: 1275754 - DNA, 15 bp, Homo sapiens
tagcattgtgattca

SEQ ID NO: 1275755 - DNA, 15 bp, Homo sapiens
gtagcattgtgattc

SEQ ID NO: 1275756 - DNA, 15 bp, Homo sapiens
ggtagcattgtgatt

SEQ ID NO: 1275757 - DNA, 15 bp, Homo sapiens
gggtagcattgtgat

SEQ ID NO: 1275758 - DNA, 15 bp, Homo sapiens
ggggtagcattgtga

SEQ ID NO: 1275759 - DNA, 15 bp, Homo sapiens
aggggtagcattgtg

SEQ ID NO: 1275760 - DNA, 15 bp, Homo sapiens
gaggggtagcattgt

SEQ ID NO: 1275761 - DNA, 15 bp, Homo sapiens
ggaggggtagcattg

SEQ ID NO: 1275762 - DNA, 15 bp, Homo sapiens
gggaggggtagcatt

SEQ ID NO: 1275763 - DNA, 15 bp, Homo sapiens
ggggaggggtagcat

SEQ ID NO: 1275764 - DNA, 15 bp, Homo sapiens
aggggaggggtagca

SEQ ID NO: 1275765 - DNA, 15 bp, Homo sapiens
taggggaggggtagc

SEQ ID NO: 1275766 - DNA, 15 bp, Homo sapiens
ataggggaggggtag

SEQ ID NO: 1275767 - DNA, 15 bp, Homo sapiens
gataggggaggggta

SEQ ID NO: 1275768 - DNA, 15 bp, Homo sapiens
ggataggggaggggt

SEQ ID NO: 1275769 - DNA, 15 bp, Homo sapiens
tggataggggagggg

SEQ ID NO: 1275770 - DNA, 15 bp, Homo sapiens
gtggataggggaggg

SEQ ID NO: 1275771 - DNA, 15 bp, Homo sapiens
tgtggataggggagg

SEQ ID NO: 1275772 - DNA, 15 bp, Homo sapiens
ctgtggataggggag

SEQ ID NO: 1275773 - DNA, 15 bp, Homo sapiens
gctgtggatagggga

SEQ ID NO: 1275774 - DNA, 15 bp, Homo sapiens
tgctgtggatagggg

SEQ ID NO: 1275775 - DNA, 15 bp, Homo sapiens
ctgctgtggataggg

SEQ ID NO: 1275776 - DNA, 15 bp, Homo sapiens
gctgctgtggatagg

SEQ ID NO: 1275777 - DNA, 15 bp, Homo sapiens
tgctgctgtggatag

SEQ ID NO: 1275778 - DNA, 15 bp, Homo sapiens
ctgctgctgtggata

SEQ ID NO: 1275779 - DNA, 15 bp, Homo sapiens
actgctgctgtggat

SEQ ID NO: 1275780 - DNA, 15 bp, Homo sapiens
cactgctgctgtgga

SEQ ID NO: 1275781 - DNA, 15 bp, Homo sapiens
ccactgctgctgtgg

SEQ ID NO: 1275782 - DNA, 15 bp, Homo sapiens
accactgctgctgtg

SEQ ID NO: 1275783 - DNA, 15 bp, Homo sapiens
caccactgctgctgt

SEQ ID NO: 1275784 - DNA, 15 bp, Homo sapiens
acaccactgctgctg

SEQ ID NO: 1275785 - DNA, 15 bp, Homo sapiens
cacaccactgctgct

SEQ ID NO: 1275786 - DNA, 15 bp, Homo sapiens
ccacaccactgctgc

SEQ ID NO: 1275787 - DNA, 15 bp, Homo sapiens
accacaccactgctg

SEQ ID NO: 1275788 - DNA, 15 bp, Homo sapiens
caccacaccactgct

SEQ ID NO: 1275789 - DNA, 15 bp, Homo sapiens
gcaccacaccactgc

SEQ ID NO: 1275790 - DNA, 15 bp, Homo sapiens
cgcaccacaccactg

SEQ ID NO: 1275791 - DNA, 15 bp, Homo sapiens
ccgcaccacaccact

SEQ ID NO: 1275792 - DNA, 15 bp, Homo sapiens
tccgcaccacaccac

SEQ ID NO: 1275793 - DNA, 15 bp, Homo sapiens
ctccgcaccacacca

SEQ ID NO: 1275794 - DNA, 15 bp, Homo sapiens
tctccgcaccacacc

SEQ ID NO: 1275795 - DNA, 15 bp, Homo sapiens
ttctccgcaccacac

SEQ ID NO: 1275796 - DNA, 15 bp, Homo sapiens
attctccgcaccaca

SEQ ID NO: 1275797 - DNA, 15 bp, Homo sapiens
cattctccgcaccac

SEQ ID NO: 1275798 - DNA, 15 bp, Homo sapiens
acattctccgcacca

SEQ ID NO: 1275799 - DNA, 15 bp, Homo sapiens
gacattctccgcacc

SEQ ID NO: 1275800 - DNA, 15 bp, Homo sapiens
agacattctccgcac

SEQ ID NO: 1275801 - DNA, 15 bp, Homo sapiens
gagacattctccgca

SEQ ID NO: 1275802 - DNA, 15 bp, Homo sapiens
agagacattctccgc

SEQ ID NO: 1275803 - DNA, 15 bp, Homo sapiens
cagagacattctccg

SEQ ID NO: 1275804 - DNA, 15 bp, Homo sapiens
ccagagacattctcc

SEQ ID NO: 1275805 - DNA, 15 bp, Homo sapiens
cccagagacattctc

SEQ ID NO: 1275806 - DNA, 15 bp, Homo sapiens
acccagagacattct

SEQ ID NO: 1275807 - DNA, 15 bp, Homo sapiens
cacccagagacattc

SEQ ID NO: 1275808 - DNA, 15 bp, Homo sapiens
gcacccagagacatt

SEQ ID NO: 1275809 - DNA, 15 bp, Homo sapiens
agcacccagagacat

SEQ ID NO: 1275810 - DNA, 15 bp, Homo sapiens
cagcacccagagaca

SEQ ID NO: 1275811 - DNA, 15 bp, Homo sapiens
ccagcacccagagac

SEQ ID NO: 1275812 - DNA, 15 bp, Homo sapiens
cccagcacccagaga

SEQ ID NO: 1275813 - DNA, 15 bp, Homo sapiens
tcccagcacccagag

SEQ ID NO: 1275814 - DNA, 15 bp, Homo sapiens
ctcccagcacccaga

SEQ ID NO: 1275815 - DNA, 15 bp, Homo sapiens
tctcccagcacccag

SEQ ID NO: 1275816 - DNA, 15 bp, Homo sapiens
ttctcccagcaccca

SEQ ID NO: 1275817 - DNA, 15 bp, Homo sapiens
cttctcccagcaccc

SEQ ID NO: 1275818 - DNA, 15 bp, Homo sapiens
ccttctcccagcacc

SEQ ID NO: 1275819 - DNA, 15 bp, Homo sapiens
tccttctcccagcac

SEQ ID NO: 1275820 - DNA, 15 bp, Homo sapiens
ctccttctcccagca

SEQ ID NO: 1275821 - DNA, 15 bp, Homo sapiens
tctccttctcccagc

SEQ ID NO: 1275822 - DNA, 15 bp, Homo sapiens
ttctccttctcccag

SEQ ID NO: 1275823 - DNA, 15 bp, Homo sapiens
gttctccttctccca

SEQ ID NO: 1275824 - DNA, 15 bp, Homo sapiens
tgttctccttctccc

SEQ ID NO: 1275825 - DNA, 15 bp, Homo sapiens
gtgttctccttctcc

SEQ ID NO: 1275826 - DNA, 15 bp, Homo sapiens
tgtgttctccttctc

SEQ ID NO: 1275827 - DNA, 15 bp, Homo sapiens
atgtgttctccttct

SEQ ID NO: 1275828 - DNA, 15 bp, Homo sapiens
gatgtgttctccttc

SEQ ID NO: 1275829 - DNA, 15 bp, Homo sapiens
tgatgtgttctcctt

SEQ ID NO: 1275830 - DNA, 15 bp, Homo sapiens
ttgatgtgttctcct

SEQ ID NO: 1275831 - DNA, 15 bp, Homo sapiens
attgatgtgttctcc

SEQ ID NO: 1275832 - DNA, 15 bp, Homo sapiens
aattgatgtgttctc

SEQ ID NO: 1275833 - DNA, 15 bp, Homo sapiens
caattgatgtgttct

SEQ ID NO: 1275834 - DNA, 15 bp, Homo sapiens
acaattgatgtgttc

SEQ ID NO: 1275835 - DNA, 15 bp, Homo sapiens
cacaattgatgtgtt

SEQ ID NO: 1275836 - DNA, 15 bp, Homo sapiens
ccacaattgatgtgt

SEQ ID NO: 1275837 - DNA, 15 bp, Homo sapiens
cccacaattgatgtg

SEQ ID NO: 1275838 - DNA, 15 bp, Homo sapiens
ccccacaattgatgt

SEQ ID NO: 1275839 - DNA, 15 bp, Homo sapiens
gccccacaattgatg

SEQ ID NO: 1275840 - DNA, 15 bp, Homo sapiens
tgccccacaattgat

SEQ ID NO: 1275841 - DNA, 15 bp, Homo sapiens
gtgccccacaattga

SEQ ID NO: 1275842 - DNA, 15 bp, Homo sapiens
agtgccccacaattg

SEQ ID NO: 1275843 - DNA, 15 bp, Homo sapiens
cagtgccccacaatt

SEQ ID NO: 1275844 - DNA, 15 bp, Homo sapiens
tcagtgccccacaat

SEQ ID NO: 1275845 - DNA, 15 bp, Homo sapiens
ttcagtgccccacaa

SEQ ID NO: 1275846 - DNA, 15 bp, Homo sapiens
gttcagtgccccaca

SEQ ID NO: 1275847 - DNA, 15 bp, Homo sapiens
agttcagtgccccac

SEQ ID NO: 1275848 - DNA, 15 bp, Homo sapiens
gagttcagtgcccca

SEQ ID NO: 1275849 - DNA, 15 bp, Homo sapiens
tgagttcagtgcccc

SEQ ID NO: 1275850 - DNA, 15 bp, Homo sapiens
ctgagttcagtgccc

SEQ ID NO: 1275851 - DNA, 15 bp, Homo sapiens
actgagttcagtgcc

SEQ ID NO: 1275852 - DNA, 15 bp, Homo sapiens
tactgagttcagtgc

SEQ ID NO: 1275853 - DNA, 15 bp, Homo sapiens
gtactgagttcagtg

SEQ ID NO: 1275854 - DNA, 15 bp, Homo sapiens
agtactgagttcagt

SEQ ID NO: 1275855 - DNA, 15 bp, Homo sapiens
cagtactgagttcag

SEQ ID NO: 1275856 - DNA, 15 bp, Homo sapiens
acagtactgagttca

SEQ ID NO: 1275857 - DNA, 15 bp, Homo sapiens
gacagtactgagttc

SEQ ID NO: 1275858 - DNA, 15 bp, Homo sapiens
ggacagtactgagtt

SEQ ID NO: 1275859 - DNA, 15 bp, Homo sapiens
aggacagtactgagt

SEQ ID NO: 1275860 - DNA, 15 bp, Homo sapiens
caggacagtactgag

SEQ ID NO: 1275861 - DNA, 15 bp, Homo sapiens
acaggacagtactga

SEQ ID NO: 1275862 - DNA, 15 bp, Homo sapiens
aacaggacagtactg

SEQ ID NO: 1275863 - DNA, 15 bp, Homo sapiens
taacaggacagtact

SEQ ID NO: 1275864 - DNA, 15 bp, Homo sapiens
ctaacaggacagtac

SEQ ID NO: 1275865 - DNA, 15 bp, Homo sapiens
tctaacaggacagta

SEQ ID NO: 1275866 - DNA, 15 bp, Homo sapiens
ctctaacaggacagt

SEQ ID NO: 1275867 - DNA, 15 bp, Homo sapiens
cctctaacaggacag

SEQ ID NO: 1275868 - DNA, 15 bp, Homo sapiens
tcctctaacaggaca

SEQ ID NO: 1275869 - DNA, 15 bp, Homo sapiens
ctcctctaacaggac

SEQ ID NO: 1275870 - DNA, 15 bp, Homo sapiens
tctcctctaacagga

SEQ ID NO: 1275871 - DNA, 15 bp, Homo sapiens
ttctcctctaacagg

SEQ ID NO: 1275872 - DNA, 15 bp, Homo sapiens
tttctcctctaacag

SEQ ID NO: 1275873 - DNA, 15 bp, Homo sapiens
ctttctcctctaaca

SEQ ID NO: 1275874 - DNA, 15 bp, Homo sapiens
cctttctcctctaac

SEQ ID NO: 1275875 - DNA, 15 bp, Homo sapiens
tcctttctcctctaa

SEQ ID NO: 1275876 - DNA, 15 bp, Homo sapiens
ttcctttctcctcta

SEQ ID NO: 1275877 - DNA, 15 bp, Homo sapiens
tttcctttctcctct

SEQ ID NO: 1275878 - DNA, 15 bp, Homo sapiens
ttttcctttctcctc

SEQ ID NO: 1275879 - DNA, 15 bp, Homo sapiens
gttttcctttctcct

SEQ ID NO: 1275880 - DNA, 15 bp, Homo sapiens
ggttttcctttctcc

SEQ ID NO: 1275881 - DNA, 15 bp, Homo sapiens
tggttttcctttctc

SEQ ID NO: 1275882 - DNA, 15 bp, Homo sapiens
ctggttttcctttct

SEQ ID NO: 1275883 - DNA, 15 bp, Homo sapiens
tctggttttcctttc

SEQ ID NO: 1275884 - DNA, 15 bp, Homo sapiens
gtctggttttccttt

SEQ ID NO: 1275885 - DNA, 15 bp, Homo sapiens
agtctggttttcctt

SEQ ID NO: 1275886 - DNA, 15 bp, Homo sapiens
tagtctggttttcct

SEQ ID NO: 1275887 - DNA, 15 bp, Homo sapiens
ttagtctggttttcc

SEQ ID NO: 1275888 - DNA, 15 bp, Homo sapiens
tttagtctggttttc

SEQ ID NO: 1275889 - DNA, 15 bp, Homo sapiens
gtttagtctggtttt

SEQ ID NO: 1275890 - DNA, 15 bp, Homo sapiens
agtttagtctggttt

SEQ ID NO: 1275891 - DNA, 15 bp, Homo sapiens
aagtttagtctggtt

SEQ ID NO: 1275892 - DNA, 15 bp, Homo sapiens
taagtttagtctggt

SEQ ID NO: 1275893 - DNA, 15 bp, Homo sapiens
ctaagtttagtctgg

SEQ ID NO: 1275894 - DNA, 15 bp, Homo sapiens
gctaagtttagtctg

SEQ ID NO: 1275895 - DNA, 15 bp, Homo sapiens
agctaagtttagtct

SEQ ID NO: 1275896 - DNA, 15 bp, Homo sapiens
cagctaagtttagtc

SEQ ID NO: 1275897 - DNA, 15 bp, Homo sapiens
tcagctaagtttagt

SEQ ID NO: 1275898 - DNA, 15 bp, Homo sapiens
atcagctaagtttag

SEQ ID NO: 1275899 - DNA, 15 bp, Homo sapiens
catcagctaagttta

SEQ ID NO: 1275900 - DNA, 15 bp, Homo sapiens
acatcagctaagttt

SEQ ID NO: 1275901 - DNA, 15 bp, Homo sapiens
gacatcagctaagtt

SEQ ID NO: 1275902 - DNA, 15 bp, Homo sapiens
ggacatcagctaagt

SEQ ID NO: 1275903 - DNA, 15 bp, Homo sapiens
tggacatcagctaag

SEQ ID NO: 1275904 - DNA, 15 bp, Homo sapiens
gtggacatcagctaa

SEQ ID NO: 1275905 - DNA, 15 bp, Homo sapiens
agtggacatcagcta

SEQ ID NO: 1275906 - DNA, 15 bp, Homo sapiens
gagtggacatcagct

SEQ ID NO: 1275907 - DNA, 15 bp, Homo sapiens
tgagtggacatcagc

SEQ ID NO: 1275908 - DNA, 15 bp, Homo sapiens
gtgagtggacatcag

SEQ ID NO: 1275909 - DNA, 15 bp, Homo sapiens
tgtgagtggacatca

SEQ ID NO: 1275910 - DNA, 15 bp, Homo sapiens
ctgtgagtggacatc

SEQ ID NO: 1275911 - DNA, 15 bp, Homo sapiens
tctgtgagtggacat

SEQ ID NO: 1275912 - DNA, 15 bp, Homo sapiens
ctctgtgagtggaca

SEQ ID NO: 1275913 - DNA, 15 bp, Homo sapiens
cctctgtgagtggac

SEQ ID NO: 1275914 - DNA, 15 bp, Homo sapiens
tgctccctctgtgag

SEQ ID NO: 1275915 - DNA, 15 bp, Homo sapiens
atgctccctctgtga

SEQ ID NO: 1275916 - DNA, 15 bp, Homo sapiens
aatgctccctctgtg

SEQ ID NO: 1275917 - DNA, 15 bp, Homo sapiens
aaatgctccctctgt

SEQ ID NO: 1275918 - DNA, 15 bp, Homo sapiens
taaatgctccctctg

SEQ ID NO: 1275919 - DNA, 15 bp, Homo sapiens
ttaaatgctccctct

SEQ ID NO: 1275920 - DNA, 15 bp, Homo sapiens
tttaaatgctccctc

SEQ ID NO: 1275921 - DNA, 15 bp, Homo sapiens
gtttaaatgctccct

SEQ ID NO: 1275922 - DNA, 15 bp, Homo sapiens
ggtttaaatgctccc

SEQ ID NO: 1275923 - DNA, 15 bp, Homo sapiens
tggtttaaatgctcc

SEQ ID NO: 1275924 - DNA, 15 bp, Homo sapiens
atggtttaaatgctc

SEQ ID NO: 1275925 - DNA, 15 bp, Homo sapiens
gatggtttaaatgct

SEQ ID NO: 1275926 - DNA, 15 bp, Homo sapiens
ggatggtttaaatgc

SEQ ID NO: 1275927 - DNA, 15 bp, Homo sapiens
gggatggtttaaatg

SEQ ID NO: 1275928 - DNA, 15 bp, Homo sapiens
agggatggtttaaat

SEQ ID NO: 1275929 - DNA, 15 bp, Homo sapiens
tagggatggtttaaa

SEQ ID NO: 1275930 - DNA, 15 bp, Homo sapiens
ctagggatggtttaa

SEQ ID NO: 1275931 - DNA, 15 bp, Homo sapiens
gctagggatggttta

SEQ ID NO: 1275932 - DNA, 15 bp, Homo sapiens
ggctagggatggttt

SEQ ID NO: 1275933 - DNA, 15 bp, Homo sapiens
gggctagggatggtt

SEQ ID NO: 1275934 - DNA, 15 bp, Homo sapiens
tgggctagggatggt

SEQ ID NO: 1275935 - DNA, 15 bp, Homo sapiens
ttgggctagggatgg

SEQ ID NO: 1275936 - DNA, 15 bp, Homo sapiens
cttgggctagggatg

SEQ ID NO: 1275937 - DNA, 15 bp, Homo sapiens
tcttgggctagggat

SEQ ID NO: 1275938 - DNA, 15 bp, Homo sapiens
ctcttgggctaggga

SEQ ID NO: 1275939 - DNA, 15 bp, Homo sapiens
cctcttgggctaggg

SEQ ID NO: 1275940 - DNA, 15 bp, Homo sapiens
tcctcttgggctagg

SEQ ID NO: 1275941 - DNA, 15 bp, Homo sapiens
ttcctcttgggctag

SEQ ID NO: 1275942 - DNA, 15 bp, Homo sapiens
attcctcttgggcta

SEQ ID NO: 1275943 - DNA, 15 bp, Homo sapiens
aattcctcttgggct

SEQ ID NO: 1275944 - DNA, 15 bp, Homo sapiens
caattcctcttgggc

SEQ ID NO: 1275945 - DNA, 15 bp, Homo sapiens
acaattcctcttggg

SEQ ID NO: 1275946 - DNA, 15 bp, Homo sapiens
gacaattcctcttgg

SEQ ID NO: 1275947 - DNA, 15 bp, Homo sapiens
tgacaattcctcttg

SEQ ID NO: 1275948 - DNA, 15 bp, Homo sapiens
ttgacaattcctctt

SEQ ID NO: 1275949 - DNA, 15 bp, Homo sapiens
attgacaattcctct

SEQ ID NO: 1275950 - DNA, 15 bp, Homo sapiens
gattgacaattcctc

SEQ ID NO: 1275951 - DNA, 15 bp, Homo sapiens
ggattgacaattcct

SEQ ID NO: 1275952 - DNA, 15 bp, Homo sapiens
gggattgacaattcc

SEQ ID NO: 1275953 - DNA, 15 bp, Homo sapiens
ggggattgacaattc

SEQ ID NO: 1275954 - DNA, 15 bp, Homo sapiens
tggggattgacaatt

SEQ ID NO: 1275955 - DNA, 15 bp, Homo sapiens
ctggggattgacaat

SEQ ID NO: 1275956 - DNA, 15 bp, Homo sapiens
gctggggattgacaa

SEQ ID NO: 1275957 - DNA, 15 bp, Homo sapiens
tgctggggattgaca

SEQ ID NO: 1275958 - DNA, 15 bp, Homo sapiens
ctgctggggattgac

SEQ ID NO: 1275959 - DNA, 15 bp, Homo sapiens
actgctggggattga

SEQ ID NO: 1275960 - DNA, 15 bp, Homo sapiens
gactgctggggattg

SEQ ID NO: 1275961 - DNA, 15 bp, Homo sapiens
ggactgctggggatt

SEQ ID NO: 1275962 - DNA, 15 bp, Homo sapiens
tggactgctggggat

SEQ ID NO: 1275963 - DNA, 15 bp, Homo sapiens
ttggactgctgggga

SEQ ID NO: 1275964 - DNA, 15 bp, Homo sapiens
tttggactgctgggg

SEQ ID NO: 1275965 - DNA, 15 bp, Homo sapiens
gtttggactgctggg

SEQ ID NO: 1275966 - DNA, 15 bp, Homo sapiens
agtttggactgctgg

SEQ ID NO: 1275967 - DNA, 15 bp, Homo sapiens
aagtttggactgctg

SEQ ID NO: 1275968 - DNA, 15 bp, Homo sapiens
caagtttggactgct

SEQ ID NO: 1275969 - DNA, 15 bp, Homo sapiens
tcaagtttggactgc

SEQ ID NO: 1275970 - DNA, 15 bp, Homo sapiens
ctcaagtttggactg

SEQ ID NO: 1275971 - DNA, 15 bp, Homo sapiens
actcaagtttggact

SEQ ID NO: 1275972 - DNA, 15 bp, Homo sapiens
tactcaagtttggac

SEQ ID NO: 1275973 - DNA, 15 bp, Homo sapiens
ctactcaagtttgga

SEQ ID NO: 1275974 - DNA, 15 bp, Homo sapiens
gctactcaagtttgg

SEQ ID NO: 1275975 - DNA, 15 bp, Homo sapiens
ggctactcaagtttg

SEQ ID NO: 1275976 - DNA, 15 bp, Homo sapiens
cggctactcaagttt

SEQ ID NO: 1275977 - DNA, 15 bp, Homo sapiens
gcggctactcaagtt

SEQ ID NO: 1275978 - DNA, 15 bp, Homo sapiens
tgcggctactcaagt

SEQ ID NO: 1275979 - DNA, 15 bp, Homo sapiens
ttgcggctactcaag

SEQ ID NO: 1275980 - DNA, 15 bp, Homo sapiens
tttgcggctactcaa

SEQ ID NO: 1275981 - DNA, 15 bp, Homo sapiens
ttttgcggctactca

SEQ ID NO: 1275982 - DNA, 15 bp, Homo sapiens
gttttgcggctactc

SEQ ID NO: 1275983 - DNA, 15 bp, Homo sapiens
agttttgcggctact

SEQ ID NO: 1275984 - DNA, 15 bp, Homo sapiens
gagttttgcggctac

SEQ ID NO: 1275985 - DNA, 15 bp, Homo sapiens
agagttttgcggcta

SEQ ID NO: 1275986 - DNA, 15 bp, Homo sapiens
gagagttttgcggct

SEQ ID NO: 1275987 - DNA, 15 bp, Homo sapiens
ggagagttttgcggc

SEQ ID NO: 1275988 - DNA, 15 bp, Homo sapiens
tggagagttttgcgg

SEQ ID NO: 1275989 - DNA, 15 bp, Homo sapiens
gtggagagttttgcg

SEQ ID NO: 1275990 - DNA, 15 bp, Homo sapiens
agtggagagttttgc

SEQ ID NO: 1275991 - DNA, 15 bp, Homo sapiens
cagtggagagttttg

SEQ ID NO: 1275992 - DNA, 15 bp, Homo sapiens
tcagtggagagtttt

SEQ ID NO: 1275993 - DNA, 15 bp, Homo sapiens
ctcagtggagagttt

SEQ ID NO: 1275994 - DNA, 15 bp, Homo sapiens
cctcagtggagagtt

SEQ ID NO: 1275995 - DNA, 15 bp, Homo sapiens
ccctcagtggagagt

SEQ ID NO: 1275996 - DNA, 15 bp, Homo sapiens
gccctcagtggagag

SEQ ID NO: 1275997 - DNA, 15 bp, Homo sapiens
ggccctcagtggaga

SEQ ID NO: 1275998 - DNA, 15 bp, Homo sapiens
tggccctcagtggag

SEQ ID NO: 1275999 - DNA, 15 bp, Homo sapiens
ttggccctcagtgga

SEQ ID NO: 1276000 - DNA, 15 bp, Homo sapiens
tttggccctcagtgg

SEQ ID NO: 1276001 - DNA, 15 bp, Homo sapiens
gtttggccctcagtg

SEQ ID NO: 1276002 - DNA, 15 bp, Homo sapiens
agtttggccctcagt

SEQ ID NO: 1276003 - DNA, 15 bp, Homo sapiens
aagtttggccctcag

SEQ ID NO: 1276004 - DNA, 15 bp, Homo sapiens
caagtttggccctca

SEQ ID NO: 1276005 - DNA, 15 bp, Homo sapiens
tcaagtttggccctc

SEQ ID NO: 1276006 - DNA, 15 bp, Homo sapiens
ttcaagtttggccct

SEQ ID NO: 1276007 - DNA, 15 bp, Homo sapiens
tttcaagtttggccc

SEQ ID NO: 1276008 - DNA, 15 bp, Homo sapiens
ctttcaagtttggcc

SEQ ID NO: 1276009 - DNA, 15 bp, Homo sapiens
cctttcaagtttggc

SEQ ID NO: 1276010 - DNA, 15 bp, Homo sapiens
gcctttcaagtttgg

SEQ ID NO: 1276011 - DNA, 15 bp, Homo sapiens
tgcctttcaagtttg

SEQ ID NO: 1276012 - DNA, 15 bp, Homo sapiens
ctgcctttcaagttt

SEQ ID NO: 1276013 - DNA, 15 bp, Homo sapiens
actgcctttcaagtt

SEQ ID NO: 1276014 - DNA, 15 bp, Homo sapiens
gactgcctttcaagt

SEQ ID NO: 1276015 - DNA, 15 bp, Homo sapiens
agactgcctttcaag

SEQ ID NO: 1276016 - DNA, 15 bp, Homo sapiens
tagactgcctttcaa

SEQ ID NO: 1276017 - DNA, 15 bp, Homo sapiens
ctagactgcctttca

SEQ ID NO: 1276018 - DNA, 15 bp, Homo sapiens
cctagactgcctttc

SEQ ID NO: 1276019 - DNA, 15 bp, Homo sapiens
ggcctagactgcctt

SEQ ID NO: 1276020 - DNA, 15 bp, Homo sapiens
tggcctagactgcct

SEQ ID NO: 1276021 - DNA, 15 bp, Homo sapiens
atggcctagactgcc

SEQ ID NO: 1276022 - DNA, 15 bp, Homo sapiens
tatggcctagactgc

SEQ ID NO: 1276023 - DNA, 15 bp, Homo sapiens
ttatggcctagactg

SEQ ID NO: 1276024 - DNA, 15 bp, Homo sapiens
cttatggcctagact

SEQ ID NO: 1276025 - DNA, 15 bp, Homo sapiens
ccttatggcctagac

SEQ ID NO: 1276026 - DNA, 15 bp, Homo sapiens
tccttatggcctaga

SEQ ID NO: 1276027 - DNA, 15 bp, Homo sapiens
gtccttatggcctag

SEQ ID NO: 1276028 - DNA, 15 bp, Homo sapiens
agtccttatggccta

SEQ ID NO: 1276029 - DNA, 15 bp, Homo sapiens
cagtccttatggcct

SEQ ID NO: 1276030 - DNA, 15 bp, Homo sapiens
gcagtccttatggcc

SEQ ID NO: 1276031 - DNA, 15 bp, Homo sapiens
tgcagtccttatggc

SEQ ID NO: 1276032 - DNA, 15 bp, Homo sapiens
ttgcagtccttatgg

SEQ ID NO: 1276033 - DNA, 15 bp, Homo sapiens
gttgcagtccttatg

SEQ ID NO: 1276034 - DNA, 15 bp, Homo sapiens
agttgcagtccttat

SEQ ID NO: 1276035 - DNA, 15 bp, Homo sapiens
gagttgcagtcctta

SEQ ID NO: 1276036 - DNA, 15 bp, Homo sapiens
agagttgcagtcctt

SEQ ID NO: 1276037 - DNA, 15 bp, Homo sapiens
aagagttgcagtcct

SEQ ID NO: 1276038 - DNA, 15 bp, Homo sapiens
taagagttgcagtcc

SEQ ID NO: 1276039 - DNA, 15 bp, Homo sapiens
ctaagagttgcagtc

SEQ ID NO: 1276040 - DNA, 15 bp, Homo sapiens
cctaagagttgcagt

SEQ ID NO: 1276041 - DNA, 15 bp, Homo sapiens
gcctaagagttgcag

SEQ ID NO: 1276042 - DNA, 15 bp, Homo sapiens
tgcctaagagttgca

SEQ ID NO: 1276043 - DNA, 15 bp, Homo sapiens
ttgcctaagagttgc

SEQ ID NO: 1276044 - DNA, 15 bp, Homo sapiens
cttgcctaagagttg

SEQ ID NO: 1276045 - DNA, 15 bp, Homo sapiens
acttgcctaagagtt

SEQ ID NO: 1276046 - DNA, 15 bp, Homo sapiens
tacttgcctaagagt

SEQ ID NO: 1276047 - DNA, 15 bp, Homo sapiens
gtacttgcctaagag

SEQ ID NO: 1276048 - DNA, 15 bp, Homo sapiens
agtacttgcctaaga

SEQ ID NO: 1276049 - DNA, 15 bp, Homo sapiens
tagtacttgcctaag

SEQ ID NO: 1276050 - DNA, 15 bp, Homo sapiens
ctagtacttgcctaa

SEQ ID NO: 1276051 - DNA, 15 bp, Homo sapiens
cctagtacttgccta

SEQ ID NO: 1276052 - DNA, 15 bp, Homo sapiens
ccctagtacttgcct

SEQ ID NO: 1276053 - DNA, 15 bp, Homo sapiens
gccctagtacttgcc

SEQ ID NO: 1276054 - DNA, 15 bp, Homo sapiens
agccctagtacttgc

SEQ ID NO: 1276055 - DNA, 15 bp, Homo sapiens
gagccctagtacttg

SEQ ID NO: 1276056 - DNA, 15 bp, Homo sapiens
tgagccctagtactt

SEQ ID NO: 1276057 - DNA, 15 bp, Homo sapiens
ttgagccctagtact

SEQ ID NO: 1276058 - DNA, 15 bp, Homo sapiens
gttgagccctagtac

SEQ ID NO: 1276059 - DNA, 15 bp, Homo sapiens
tgttgagccctagta

SEQ ID NO: 1276060 - DNA, 15 bp, Homo sapiens
ttgttgagccctagt

SEQ ID NO: 1276061 - DNA, 15 bp, Homo sapiens
cttgttgagccctag

SEQ ID NO: 1276062 - DNA, 15 bp, Homo sapiens
ccttgttgagcccta

SEQ ID NO: 1276063 - DNA, 15 bp, Homo sapiens
gccttgttgagccct

SEQ ID NO: 1276064 - DNA, 15 bp, Homo sapiens
ggccttgttgagccc

SEQ ID NO: 1276065 - DNA, 15 bp, Homo sapiens
gggccttgttgagcc

SEQ ID NO: 1276066 - DNA, 15 bp, Homo sapiens
cgggccttgttgagc

SEQ ID NO: 1276067 - DNA, 15 bp, Homo sapiens
ccgggccttgttgag

SEQ ID NO: 1276068 - DNA, 15 bp, Homo sapiens
tccgggccttgttga

SEQ ID NO: 1276069 - DNA, 15 bp, Homo sapiens
ctccgggccttgttg

SEQ ID NO: 1276070 - DNA, 15 bp, Homo sapiens
tctccgggccttgtt

SEQ ID NO: 1276071 - DNA, 15 bp, Homo sapiens
gtctccgggccttgt

SEQ ID NO: 1276072 - DNA, 15 bp, Homo sapiens
ggtctccgggccttg

SEQ ID NO: 1276073 - DNA, 15 bp, Homo sapiens
aggtctccgggcctt

SEQ ID NO: 1276074 - DNA, 15 bp, Homo sapiens
taggtctccgggcct

SEQ ID NO: 1276075 - DNA, 15 bp, Homo sapiens
ctaggtctccgggcc

SEQ ID NO: 1276076 - DNA, 15 bp, Homo sapiens
actaggtctccgggc

SEQ ID NO: 1276077 - DNA, 15 bp, Homo sapiens
cactaggtctccggg

SEQ ID NO: 1276078 - DNA, 15 bp, Homo sapiens
ccactaggtctccgg

SEQ ID NO: 1276079 - DNA, 15 bp, Homo sapiens
tccactaggtctccg

SEQ ID NO: 1276080 - DNA, 15 bp, Homo sapiens
gtccactaggtctcc

SEQ ID NO: 1276081 - DNA, 15 bp, Homo sapiens
agtccactaggtctc

SEQ ID NO: 1276082 - DNA, 15 bp, Homo sapiens
cagtccactaggtct

SEQ ID NO: 1276083 - DNA, 15 bp, Homo sapiens
tcagtccactaggtc

SEQ ID NO: 1276084 - DNA, 15 bp, Homo sapiens
ctcagtccactaggt

SEQ ID NO: 1276085 - DNA, 15 bp, Homo sapiens
cctcagtccactagg

SEQ ID NO: 1276086 - DNA, 15 bp, Homo sapiens
ccctcagtccactag

SEQ ID NO: 1276087 - DNA, 15 bp, Homo sapiens
cccctcagtccacta

SEQ ID NO: 1276088 - DNA, 15 bp, Homo sapiens
tcccctcagtccact

SEQ ID NO: 1276089 - DNA, 15 bp, Homo sapiens
gtcccctcagtccac

SEQ ID NO: 1276090 - DNA, 15 bp, Homo sapiens
tgtcccctcagtcca

SEQ ID NO: 1276091 - DNA, 15 bp, Homo sapiens
atgtcccctcagtcc

SEQ ID NO: 1276092 - DNA, 15 bp, Homo sapiens
catgtcccctcagtc

SEQ ID NO: 1276093 - DNA, 15 bp, Homo sapiens
acatgtcccctcagt

SEQ ID NO: 1276094 - DNA, 15 bp, Homo sapiens
cacatgtcccctcag

SEQ ID NO: 1276095 - DNA, 15 bp, Homo sapiens
tcacatgtcccctca

SEQ ID NO: 1276096 - DNA, 15 bp, Homo sapiens
gtcacatgtcccctc

SEQ ID NO: 1276097 - DNA, 15 bp, Homo sapiens
tgtcacatgtcccct

SEQ ID NO: 1276098 - DNA, 15 bp, Homo sapiens
atgtcacatgtcccc

SEQ ID NO: 1276099 - DNA, 15 bp, Homo sapiens
tatgtcacatgtccc

SEQ ID NO: 1276100 - DNA, 15 bp, Homo sapiens
gtatgtcacatgtcc

SEQ ID NO: 1276101 - DNA, 15 bp, Homo sapiens
ggtatgtcacatgtc

SEQ ID NO: 1276102 - DNA, 15 bp, Homo sapiens
cggtatgtcacatgt

SEQ ID NO: 1276103 - DNA, 15 bp, Homo sapiens
tcggtatgtcacatg

SEQ ID NO: 1276104 - DNA, 15 bp, Homo sapiens
ctcggtatgtcacat

SEQ ID NO: 1276105 - DNA, 15 bp, Homo sapiens
tctcggtatgtcaca

SEQ ID NO: 1276106 - DNA, 15 bp, Homo sapiens
atctcggtatgtcac

SEQ ID NO: 1276107 - DNA, 15 bp, Homo sapiens
tatctcggtatgtca

SEQ ID NO: 1276108 - DNA, 15 bp, Homo sapiens
gtatctcggtatgtc

SEQ ID NO: 1276109 - DNA, 15 bp, Homo sapiens
ggtatctcggtatgt

SEQ ID NO: 1276110 - DNA, 15 bp, Homo sapiens
tggtatctcggtatg

SEQ ID NO: 1276111 - DNA, 15 bp, Homo sapiens
ctggtatctcggtat

SEQ ID NO: 1276112 - DNA, 15 bp, Homo sapiens
gctggtatctcggta

SEQ ID NO: 1276113 - DNA, 15 bp, Homo sapiens
agctggtatctcggt

SEQ ID NO: 1276114 - DNA, 15 bp, Homo sapiens
cagctggtatctcgg

SEQ ID NO: 1276115 - DNA, 15 bp, Homo sapiens
tcagctggtatctcg

SEQ ID NO: 1276116 - DNA, 15 bp, Homo sapiens
ctcagctggtatctc

SEQ ID NO: 1276117 - DNA, 15 bp, Homo sapiens
cctcagctggtatct

SEQ ID NO: 1276118 - DNA, 15 bp, Homo sapiens
gcctcagctggtatc

SEQ ID NO: 1276119 - DNA, 15 bp, Homo sapiens
tgcctcagctggtat

SEQ ID NO: 1276120 - DNA, 15 bp, Homo sapiens
ctgcctcagctggta

SEQ ID NO: 1276121 - DNA, 15 bp, Homo sapiens
gctgcctcagctggt

SEQ ID NO: 1276122 - DNA, 15 bp, Homo sapiens
ggctgcctcagctgg

SEQ ID NO: 1276123 - DNA, 15 bp, Homo sapiens
tggctgcctcagctg

SEQ ID NO: 1276124 - DNA, 15 bp, Homo sapiens
ttggctgcctcagct

SEQ ID NO: 1276125 - DNA, 15 bp, Homo sapiens
cttggctgcctcagc

SEQ ID NO: 1276126 - DNA, 15 bp, Homo sapiens
ccttggctgcctcag

SEQ ID NO: 1276127 - DNA, 15 bp, Homo sapiens
cccttggctgcctca

SEQ ID NO: 1276128 - DNA, 15 bp, Homo sapiens
tcccttggctgcctc

SEQ ID NO: 1276129 - DNA, 15 bp, Homo sapiens
ctcccttggctgcct

SEQ ID NO: 1276130 - DNA, 15 bp, Homo sapiens
actcccttggctgcc

SEQ ID NO: 1276131 - DNA, 15 bp, Homo sapiens
tactcccttggctgc

SEQ ID NO: 1276132 - DNA, 15 bp, Homo sapiens
atactcccttggctg

SEQ ID NO: 1276133 - DNA, 15 bp, Homo sapiens
aatactcccttggct

SEQ ID NO: 1276134 - DNA, 15 bp, Homo sapiens
caatactcccttggc

SEQ ID NO: 1276135 - DNA, 15 bp, Homo sapiens
ccaatactcccttgg

SEQ ID NO: 1276136 - DNA, 15 bp, Homo sapiens
gccaatactcccttg

SEQ ID NO: 1276137 - DNA, 15 bp, Homo sapiens
agccaatactccctt

SEQ ID NO: 1276138 - DNA, 15 bp, Homo sapiens
aagccaatactccct

SEQ ID NO: 1276139 - DNA, 15 bp, Homo sapiens
gaagccaatactccc

SEQ ID NO: 1276140 - DNA, 15 bp, Homo sapiens
tgaagccaatactcc

SEQ ID NO: 1276141 - DNA, 15 bp, Homo sapiens
gtgaagccaatactc

SEQ ID NO: 1276142 - DNA, 15 bp, Homo sapiens
ggtgaagccaatact

SEQ ID NO: 1276143 - DNA, 15 bp, Homo sapiens
gggtgaagccaatac

SEQ ID NO: 1276144 - DNA, 15 bp, Homo sapiens
ggggtgaagccaata

SEQ ID NO: 1276145 - DNA, 15 bp, Homo sapiens
aggggtgaagccaat

SEQ ID NO: 1276146 - DNA, 15 bp, Homo sapiens
gaggggtgaagccaa

SEQ ID NO: 1276147 - DNA, 15 bp, Homo sapiens
agaggggtgaagcca

SEQ ID NO: 1276148 - DNA, 15 bp, Homo sapiens
gagaggggtgaagcc

SEQ ID NO: 1276149 - DNA, 15 bp, Homo sapiens
ggagaggggtgaagc

SEQ ID NO: 1276150 - DNA, 15 bp, Homo sapiens
aggagaggggtgaag

SEQ ID NO: 1276151 - DNA, 15 bp, Homo sapiens
taggagaggggtgaa

SEQ ID NO: 1276152 - DNA, 15 bp, Homo sapiens
ttaggagaggggtga

SEQ ID NO: 1276153 - DNA, 15 bp, Homo sapiens
attaggagaggggtg

SEQ ID NO: 1276154 - DNA, 15 bp, Homo sapiens
gattaggagaggggt

SEQ ID NO: 1276155 - DNA, 15 bp, Homo sapiens
ggattaggagagggg

SEQ ID NO: 1276156 - DNA, 15 bp, Homo sapiens
aggattaggagaggg

SEQ ID NO: 1276157 - DNA, 15 bp, Homo sapiens
taggattaggagagg

SEQ ID NO: 1276158 - DNA, 15 bp, Homo sapiens
ctaggattaggagag

SEQ ID NO: 1276159 - DNA, 15 bp, Homo sapiens
cctaggattaggaga

SEQ ID NO: 1276160 - DNA, 15 bp, Homo sapiens
gcctaggattaggag

SEQ ID NO: 1276161 - DNA, 15 bp, Homo sapiens
agcctaggattagga

SEQ ID NO: 1276162 - DNA, 15 bp, Homo sapiens
cagcctaggattagg

SEQ ID NO: 1276163 - DNA, 15 bp, Homo sapiens
gcagcctaggattag

SEQ ID NO: 1276164 - DNA, 15 bp, Homo sapiens
tgcagcctaggatta

SEQ ID NO: 1276165 - DNA, 15 bp, Homo sapiens
gtgcagcctaggatt

SEQ ID NO: 1276166 - DNA, 15 bp, Homo sapiens
tgtgcagcctaggat

SEQ ID NO: 1276167 - DNA, 15 bp, Homo sapiens
ttgtgcagcctagga

SEQ ID NO: 1276168 - DNA, 15 bp, Homo sapiens
cttgtgcagcctagg

SEQ ID NO: 1276169 - DNA, 15 bp, Homo sapiens
acttgtgcagcctag

SEQ ID NO: 1276170 - DNA, 15 bp, Homo sapiens
gacttgtgcagccta

SEQ ID NO: 1276171 - DNA, 15 bp, Homo sapiens
tgacttgtgcagcct

SEQ ID NO: 1276172 - DNA, 15 bp, Homo sapiens
atgacttgtgcagcc

SEQ ID NO: 1276173 - DNA, 15 bp, Homo sapiens
tatgacttgtgcagc

SEQ ID NO: 1276174 - DNA, 15 bp, Homo sapiens
ctatgacttgtgcag

SEQ ID NO: 1276175 - DNA, 15 bp, Homo sapiens
gctatgacttgtgca

SEQ ID NO: 1276176 - DNA, 15 bp, Homo sapiens
agctatgacttgtgc

SEQ ID NO: 1276177 - DNA, 15 bp, Homo sapiens
aagctatgacttgtg

SEQ ID NO: 1276178 - DNA, 15 bp, Homo sapiens
gaagctatgacttgt

SEQ ID NO: 1276179 - DNA, 15 bp, Homo sapiens
tgaagctatgacttg

SEQ ID NO: 1276180 - DNA, 15 bp, Homo sapiens
ttgaagctatgactt

SEQ ID NO: 1276181 - DNA, 15 bp, Homo sapiens
tttgaagctatgact

SEQ ID NO: 1276182 - DNA, 15 bp, Homo sapiens
ttttgaagctatgac

SEQ ID NO: 1276183 - DNA, 15 bp, Homo sapiens
cttttgaagctatga

SEQ ID NO: 1276184 - DNA, 15 bp, Homo sapiens
tcttttgaagctatg

SEQ ID NO: 1276185 - DNA, 15 bp, Homo sapiens
ctcttttgaagctat

SEQ ID NO: 1276186 - DNA, 15 bp, Homo sapiens
tctcttttgaagcta

SEQ ID NO: 1276187 - DNA, 15 bp, Homo sapiens
gtctcttttgaagct

SEQ ID NO: 1276188 - DNA, 15 bp, Homo sapiens
agtctcttttgaagc

SEQ ID NO: 1276189 - DNA, 15 bp, Homo sapiens
aagtctcttttgaag

SEQ ID NO: 1276190 - DNA, 15 bp, Homo sapiens
aaagtctcttttgaa

SEQ ID NO: 1276191 - DNA, 15 bp, Homo sapiens
aaaagtctcttttga

SEQ ID NO: 1276192 - DNA, 15 bp, Homo sapiens
aaaaagtctcttttg

SEQ ID NO: 1276193 - DNA, 15 bp, Homo sapiens
gaaaaagtctctttt

SEQ ID NO: 1276194 - DNA, 15 bp, Homo sapiens
agaaaaagtctcttt

SEQ ID NO: 1276195 - DNA, 15 bp, Homo sapiens
aagaaaaagtctctt

SEQ ID NO: 1276196 - DNA, 15 bp, Homo sapiens
gaaagaaaaagtctc

SEQ ID NO: 1276197 - DNA, 15 bp, Homo sapiens
agaaagaaaaagtct

SEQ ID NO: 1276198 - DNA, 15 bp, Homo sapiens
cagaaagaaaaagtc

SEQ ID NO: 1276199 - DNA, 15 bp, Homo sapiens
gcagaaagaaaaagt

SEQ ID NO: 1276200 - DNA, 15 bp, Homo sapiens
agcagaaagaaaaag

SEQ ID NO: 1276201 - DNA, 15 bp, Homo sapiens
aagcagaaagaaaaa

SEQ ID NO: 1276202 - DNA, 15 bp, Homo sapiens
caagcagaaagaaaa

SEQ ID NO: 1276203 - DNA, 15 bp, Homo sapiens
tcaagcagaaagaaa

SEQ ID NO: 1276204 - DNA, 15 bp, Homo sapiens
ctcaagcagaaagaa

SEQ ID NO: 1276205 - DNA, 15 bp, Homo sapiens
cctcaagcagaaaga

SEQ ID NO: 1276206 - DNA, 15 bp, Homo sapiens
tcctcaagcagaaag

SEQ ID NO: 1276207 - DNA, 15 bp, Homo sapiens
ctcctcaagcagaaa

SEQ ID NO: 1276208 - DNA, 15 bp, Homo sapiens
tctcctcaagcagaa

SEQ ID NO: 1276209 - DNA, 15 bp, Homo sapiens
ctctcctcaagcaga

SEQ ID NO: 1276210 - DNA, 15 bp, Homo sapiens
tctctcctcaagcag

SEQ ID NO: 1276211 - DNA, 15 bp, Homo sapiens
ttctctcctcaagca

SEQ ID NO: 1276212 - DNA, 15 bp, Homo sapiens
cttctctcctcaagc

SEQ ID NO: 1276213 - DNA, 15 bp, Homo sapiens
tcttctctcctcaag

SEQ ID NO: 1276214 - DNA, 15 bp, Homo sapiens
gtcttctctcctcaa

SEQ ID NO: 1276215 - DNA, 15 bp, Homo sapiens
tgtcttctctcctca

SEQ ID NO: 1276216 - DNA, 15 bp, Homo sapiens
ctgtcttctctcctc

SEQ ID NO: 1276217 - DNA, 15 bp, Homo sapiens
tctgtcttctctcct

SEQ ID NO: 1276218 - DNA, 15 bp, Homo sapiens
ttctgtcttctctcc

SEQ ID NO: 1276219 - DNA, 15 bp, Homo sapiens
cttctgtcttctctc

SEQ ID NO: 1276220 - DNA, 15 bp, Homo sapiens
tcttctgtcttctct

SEQ ID NO: 1276221 - DNA, 15 bp, Homo sapiens
ctcttctgtcttctc

SEQ ID NO: 1276222 - DNA, 15 bp, Homo sapiens
actcttctgtcttct

SEQ ID NO: 1276223 - DNA, 15 bp, Homo sapiens
cactcttctgtcttc

SEQ ID NO: 1276224 - DNA, 15 bp, Homo sapiens
ccactcttctgtctt

SEQ ID NO: 1276225 - DNA, 15 bp, Homo sapiens
cccactcttctgtct

SEQ ID NO: 1276226 - DNA, 15 bp, Homo sapiens
ccccactcttctgtc

SEQ ID NO: 1276227 - DNA, 15 bp, Homo sapiens
tccccactcttctgt

SEQ ID NO: 1276228 - DNA, 15 bp, Homo sapiens
ctccccactcttctg

SEQ ID NO: 1276229 - DNA, 15 bp, Homo sapiens
cctccccactcttct

SEQ ID NO: 1276230 - DNA, 15 bp, Homo sapiens
tcctccccactcttc

SEQ ID NO: 1276231 - DNA, 15 bp, Homo sapiens
gtcctccccactctt

SEQ ID NO: 1276232 - DNA, 15 bp, Homo sapiens
agtcctccccactct

SEQ ID NO: 1276233 - DNA, 15 bp, Homo sapiens
aagtcctccccactc

SEQ ID NO: 1276234 - DNA, 15 bp, Homo sapiens
caagtcctccccact

SEQ ID NO: 1276235 - DNA, 15 bp, Homo sapiens
ccaagtcctccccac

SEQ ID NO: 1276236 - DNA, 15 bp, Homo sapiens
gccaagtcctcccca

SEQ ID NO: 1276237 - DNA, 15 bp, Homo sapiens
ggccaagtcctcccc

SEQ ID NO: 1276238 - DNA, 15 bp, Homo sapiens
aggccaagtcctccc

SEQ ID NO: 1276239 - DNA, 15 bp, Homo sapiens
aaggccaagtcctcc

SEQ ID NO: 1276240 - DNA, 15 bp, Homo sapiens
taaggccaagtcctc

SEQ ID NO: 1276241 - DNA, 15 bp, Homo sapiens
gtaaggccaagtcct

SEQ ID NO: 1276242 - DNA, 15 bp, Homo sapiens
ggtaaggccaagtcc

SEQ ID NO: 1276243 - DNA, 15 bp, Homo sapiens
aggtaaggccaagtc

SEQ ID NO: 1276244 - DNA, 15 bp, Homo sapiens
gaggtaaggccaagt

SEQ ID NO: 1276245 - DNA, 15 bp, Homo sapiens
agaggtaaggccaag

SEQ ID NO: 1276246 - DNA, 15 bp, Homo sapiens
aagaggtaaggccaa

SEQ ID NO: 1276247 - DNA, 15 bp, Homo sapiens
caagaggtaaggcca

SEQ ID NO: 1276248 - DNA, 15 bp, Homo sapiens
ccaagaggtaaggcc

SEQ ID NO: 1276249 - DNA, 15 bp, Homo sapiens
tccaagaggtaaggc

SEQ ID NO: 1276250 - DNA, 15 bp, Homo sapiens
atccaagaggtaagg

SEQ ID NO: 1276251 - DNA, 15 bp, Homo sapiens
tatccaagaggtaag

SEQ ID NO: 1276252 - DNA, 15 bp, Homo sapiens
gtatccaagaggtaa

SEQ ID NO: 1276253 - DNA, 15 bp, Homo sapiens
ggtatccaagaggta

SEQ ID NO: 1276254 - DNA, 15 bp, Homo sapiens
tggtatccaagaggt

SEQ ID NO: 1276255 - DNA, 15 bp, Homo sapiens
ctggtatccaagagg

SEQ ID NO: 1276256 - DNA, 15 bp, Homo sapiens
gctggtatccaagag

SEQ ID NO: 1276257 - DNA, 15 bp, Homo sapiens
agctggtatccaaga

SEQ ID NO: 1276258 - DNA, 15 bp, Homo sapiens
gagctggtatccaag

SEQ ID NO: 1276259 - DNA, 15 bp, Homo sapiens
tgagctggtatccaa

SEQ ID NO: 1276260 - DNA, 15 bp, Homo sapiens
ctgagctggtatcca

SEQ ID NO: 1276261 - DNA, 15 bp, Homo sapiens
gctgagctggtatcc

SEQ ID NO: 1276262 - DNA, 15 bp, Homo sapiens
agctgagctggtatc

SEQ ID NO: 1276263 - DNA, 15 bp, Homo sapiens
tagctgagctggtat

SEQ ID NO: 1276264 - DNA, 15 bp, Homo sapiens
gtagctgagctggta

SEQ ID NO: 1276265 - DNA, 15 bp, Homo sapiens
tgtagctgagctggt

SEQ ID NO: 1276266 - DNA, 15 bp, Homo sapiens
ctgtagctgagctgg

SEQ ID NO: 1276267 - DNA, 15 bp, Homo sapiens
gctgtagctgagctg

SEQ ID NO: 1276268 - DNA, 15 bp, Homo sapiens
tgctgtagctgagct

SEQ ID NO: 1276269 - DNA, 15 bp, Homo sapiens
ctgctgtagctgagc

SEQ ID NO: 1276270 - DNA, 15 bp, Homo sapiens
cctgctgtagctgag

SEQ ID NO: 1276271 - DNA, 15 bp, Homo sapiens
tcctgctgtagctga

SEQ ID NO: 1276272 - DNA, 15 bp, Homo sapiens
atcctgctgtagctg

SEQ ID NO: 1276273 - DNA, 15 bp, Homo sapiens
tatcctgctgtagct

SEQ ID NO: 1276274 - DNA, 15 bp, Homo sapiens
ctatcctgctgtagc

SEQ ID NO: 1276275 - DNA, 15 bp, Homo sapiens
cctatcctgctgtag

SEQ ID NO: 1276276 - DNA, 15 bp, Homo sapiens
ccctatcctgctgta

SEQ ID NO: 1276277 - DNA, 15 bp, Homo sapiens
gccctatcctgctgt

SEQ ID NO: 1276278 - DNA, 15 bp, Homo sapiens
tgccctatcctgctg

SEQ ID NO: 1276279 - DNA, 15 bp, Homo sapiens
gtgccctatcctgct

SEQ ID NO: 1276280 - DNA, 15 bp, Homo sapiens
agtgccctatcctgc

SEQ ID NO: 1276281 - DNA, 15 bp, Homo sapiens
tagtgccctatcctg

SEQ ID NO: 1276282 - DNA, 15 bp, Homo sapiens
ctagtgccctatcct

SEQ ID NO: 1276283 - DNA, 15 bp, Homo sapiens
actagtgccctatcc

SEQ ID NO: 1276284 - DNA, 15 bp, Homo sapiens
gactagtgccctatc

SEQ ID NO: 1276285 - DNA, 15 bp, Homo sapiens
tgactagtgccctat

SEQ ID NO: 1276286 - DNA, 15 bp, Homo sapiens
ctgactagtgcccta

SEQ ID NO: 1276287 - DNA, 15 bp, Homo sapiens
tctgactagtgccct

SEQ ID NO: 1276288 - DNA, 15 bp, Homo sapiens
ctctgactagtgccc

SEQ ID NO: 1276289 - DNA, 15 bp, Homo sapiens
actctgactagtgcc

SEQ ID NO: 1276290 - DNA, 15 bp, Homo sapiens
gactctgactagtgc

SEQ ID NO: 1276291 - DNA, 15 bp, Homo sapiens
tgactctgactagtg

SEQ ID NO: 1276292 - DNA, 15 bp, Homo sapiens
atgactctgactagt

SEQ ID NO: 1276293 - DNA, 15 bp, Homo sapiens
tatgactctgactag

SEQ ID NO: 1276294 - DNA, 15 bp, Homo sapiens
ttatgactctgacta

SEQ ID NO: 1276295 - DNA, 15 bp, Homo sapiens
cttatgactctgact

SEQ ID NO: 1276296 - DNA, 15 bp, Homo sapiens
ccttatgactctgac

SEQ ID NO: 1276297 - DNA, 15 bp, Homo sapiens
gccttatgactctga

SEQ ID NO: 1276298 - DNA, 15 bp, Homo sapiens
ggccttatgactctg

SEQ ID NO: 1276299 - DNA, 15 bp, Homo sapiens
gggccttatgactct

SEQ ID NO: 1276300 - DNA, 15 bp, Homo sapiens
cgggccttatgactc

SEQ ID NO: 1276301 - DNA, 15 bp, Homo sapiens
acgggccttatgact

SEQ ID NO: 1276302 - DNA, 15 bp, Homo sapiens
tacgggccttatgac

SEQ ID NO: 1276303 - DNA, 15 bp, Homo sapiens
atacgggccttatga

SEQ ID NO: 1276304 - DNA, 15 bp, Homo sapiens
aatacgggccttatg

SEQ ID NO: 1276305 - DNA, 15 bp, Homo sapiens
gaatacgggccttat

SEQ ID NO: 1276306 - DNA, 15 bp, Homo sapiens
ggaatacgggcctta

SEQ ID NO: 1276307 - DNA, 15 bp, Homo sapiens
tggaatacgggcctt

SEQ ID NO: 1276308 - DNA, 15 bp, Homo sapiens
ctggaatacgggcct

SEQ ID NO: 1276309 - DNA, 15 bp, Homo sapiens
tctggaatacgggcc

SEQ ID NO: 1276310 - DNA, 15 bp, Homo sapiens
gtctggaatacgggc

SEQ ID NO: 1276311 - DNA, 15 bp, Homo sapiens
ggtctggaatacggg

SEQ ID NO: 1276312 - DNA, 15 bp, Homo sapiens
gggtctggaatacgg

SEQ ID NO: 1276313 - DNA, 15 bp, Homo sapiens
tgggtctggaatacg

SEQ ID NO: 1276314 - DNA, 15 bp, Homo sapiens
ttgggtctggaatac

SEQ ID NO: 1276315 - DNA, 15 bp, Homo sapiens
cttgggtctggaata

SEQ ID NO: 1276316 - DNA, 15 bp, Homo sapiens
gcttgggtctggaat

SEQ ID NO: 1276317 - DNA, 15 bp, Homo sapiens
agcttgggtctggaa

SEQ ID NO: 1276318 - DNA, 15 bp, Homo sapiens
gagcttgggtctgga

SEQ ID NO: 1276319 - DNA, 15 bp, Homo sapiens
ggagcttgggtctgg

SEQ ID NO: 1276320 - DNA, 15 bp, Homo sapiens
tggagcttgggtctg

SEQ ID NO: 1276321 - DNA, 15 bp, Homo sapiens
ttggagcttgggtct

SEQ ID NO: 1276322 - DNA, 15 bp, Homo sapiens
cttggagcttgggtc

SEQ ID NO: 1276323 - DNA, 15 bp, Homo sapiens
tcttggagcttgggt

SEQ ID NO: 1276324 - DNA, 15 bp, Homo sapiens
gtcttggagcttggg

SEQ ID NO: 1276325 - DNA, 15 bp, Homo sapiens
tgtcttggagcttgg

SEQ ID NO: 1276326 - DNA, 15 bp, Homo sapiens
ttgtcttggagcttg

SEQ ID NO: 1276327 - DNA, 15 bp, Homo sapiens
gttgtcttggagctt

SEQ ID NO: 1276328 - DNA, 15 bp, Homo sapiens
tgttgtcttggagct

SEQ ID NO: 1276329 - DNA, 15 bp, Homo sapiens
atgttgtcttggagc

SEQ ID NO: 1276330 - DNA, 15 bp, Homo sapiens
aatgttgtcttggag

SEQ ID NO: 1276331 - DNA, 15 bp, Homo sapiens
aaatgttgtcttgga

SEQ ID NO: 1276332 - DNA, 15 bp, Homo sapiens
gaaatgttgtcttgg

SEQ ID NO: 1276333 - DNA, 15 bp, Homo sapiens
agaaatgttgtcttg

SEQ ID NO: 1276334 - DNA, 15 bp, Homo sapiens
tagaaatgttgtctt

SEQ ID NO: 1276335 - DNA, 15 bp, Homo sapiens
ctagaaatgttgtct

SEQ ID NO: 1276336 - DNA, 15 bp, Homo sapiens
tctagaaatgttgtc

SEQ ID NO: 1276337 - DNA, 15 bp, Homo sapiens
gtctagaaatgttgt

SEQ ID NO: 1276338 - DNA, 15 bp, Homo sapiens
tgtctagaaatgttg

SEQ ID NO: 1276339 - DNA, 15 bp, Homo sapiens
gtgtctagaaatgtt

SEQ ID NO: 1276340 - DNA, 15 bp, Homo sapiens
tgtgtctagaaatgt

SEQ ID NO: 1276341 - DNA, 15 bp, Homo sapiens
atgtgtctagaaatg

SEQ ID NO: 1276342 - DNA, 15 bp, Homo sapiens
gatgtgtctagaaat

SEQ ID NO: 1276343 - DNA, 15 bp, Homo sapiens
ggatgtgtctagaaa

SEQ ID NO: 1276344 - DNA, 15 bp, Homo sapiens
aggatgtgtctagaa

SEQ ID NO: 1276345 - DNA, 15 bp, Homo sapiens
taggatgtgtctaga

SEQ ID NO: 1276346 - DNA, 15 bp, Homo sapiens
ctaggatgtgtctag

SEQ ID NO: 1276347 - DNA, 15 bp, Homo sapiens
tctaggatgtgtcta

SEQ ID NO: 1276348 - DNA, 15 bp, Homo sapiens
gtctaggatgtgtct

SEQ ID NO: 1276349 - DNA, 15 bp, Homo sapiens
agtctaggatgtgtc

SEQ ID NO: 1276350 - DNA, 15 bp, Homo sapiens
tagtctaggatgtgt

SEQ ID NO: 1276351 - DNA, 15 bp, Homo sapiens
ctagtctaggatgtg

SEQ ID NO: 1276352 - DNA, 15 bp, Homo sapiens
tctagtctaggatgt

SEQ ID NO: 1276353 - DNA, 15 bp, Homo sapiens
ttctagtctaggatg

SEQ ID NO: 1276354 - DNA, 15 bp, Homo sapiens
cttctagtctaggat

SEQ ID NO: 1276355 - DNA, 15 bp, Homo sapiens
ccttctagtctagga

SEQ ID NO: 1276356 - DNA, 15 bp, Homo sapiens
cccttctagtctagg

SEQ ID NO: 1276357 - DNA, 15 bp, Homo sapiens
tcccttctagtctag

SEQ ID NO: 1276358 - DNA, 15 bp, Homo sapiens
ttcccttctagtcta

SEQ ID NO: 1276359 - DNA, 15 bp, Homo sapiens
gttcccttctagtct

SEQ ID NO: 1276360 - DNA, 15 bp, Homo sapiens
ggttcccttctagtc

SEQ ID NO: 1276361 - DNA, 15 bp, Homo sapiens
gggttcccttctagt

SEQ ID NO: 1276362 - DNA, 15 bp, Homo sapiens
tgggttcccttctag

SEQ ID NO: 1276363 - DNA, 15 bp, Homo sapiens
gtgggttcccttcta

SEQ ID NO: 1276364 - DNA, 15 bp, Homo sapiens
agtgggttcccttct

SEQ ID NO: 1276365 - DNA, 15 bp, Homo sapiens
cagtgggttcccttc

SEQ ID NO: 1276366 - DNA, 15 bp, Homo sapiens
gcagtgggttccctt

SEQ ID NO: 1276367 - DNA, 15 bp, Homo sapiens
ggcagtgggttccct

SEQ ID NO: 1276368 - DNA, 15 bp, Homo sapiens
aggcagtgggttccc

SEQ ID NO: 1276369 - DNA, 15 bp, Homo sapiens
aaggcagtgggttcc

SEQ ID NO: 1276370 - DNA, 15 bp, Homo sapiens
caaggcagtgggttc

SEQ ID NO: 1276371 - DNA, 15 bp, Homo sapiens
tcaaggcagtgggtt

SEQ ID NO: 1276372 - DNA, 15 bp, Homo sapiens
ttcaaggcagtgggt

SEQ ID NO: 1276373 - DNA, 15 bp, Homo sapiens
attcaaggcagtggg

SEQ ID NO: 1276374 - DNA, 15 bp, Homo sapiens
cattcaaggcagtgg

SEQ ID NO: 1276375 - DNA, 15 bp, Homo sapiens
tcattcaaggcagtg

SEQ ID NO: 1276376 - DNA, 15 bp, Homo sapiens
ttcattcaaggcagt

SEQ ID NO: 1276377 - DNA, 15 bp, Homo sapiens
tttcattcaaggcag

SEQ ID NO: 1276378 - DNA, 15 bp, Homo sapiens
ctttcattcaaggca

SEQ ID NO: 1276379 - DNA, 15 bp, Homo sapiens
cctttcattcaaggc

SEQ ID NO: 1276380 - DNA, 15 bp, Homo sapiens
tcctttcattcaagg

SEQ ID NO: 1276381 - DNA, 15 bp, Homo sapiens
gtcctttcattcaag

SEQ ID NO: 1276382 - DNA, 15 bp, Homo sapiens
ggtcctttcattcaa

SEQ ID NO: 1276383 - DNA, 15 bp, Homo sapiens
gggtcctttcattca

SEQ ID NO: 1276384 - DNA, 15 bp, Homo sapiens
tgggtcctttcattc

SEQ ID NO: 1276385 - DNA, 15 bp, Homo sapiens
ctgggtcctttcatt

SEQ ID NO: 1276386 - DNA, 15 bp, Homo sapiens
actgggtcctttcat

SEQ ID NO: 1276387 - DNA, 15 bp, Homo sapiens
gactgggtcctttca

SEQ ID NO: 1276388 - DNA, 15 bp, Homo sapiens
ggactgggtcctttc

SEQ ID NO: 1276389 - DNA, 15 bp, Homo sapiens
aggactgggtccttt

SEQ ID NO: 1276390 - DNA, 15 bp, Homo sapiens
caggactgggtcctt

SEQ ID NO: 1276391 - DNA, 15 bp, Homo sapiens
ccaggactgggtcct

SEQ ID NO: 1276392 - DNA, 15 bp, Homo sapiens
gccaggactgggtcc

SEQ ID NO: 1276393 - DNA, 15 bp, Homo sapiens
tgccaggactgggtc

SEQ ID NO: 1276394 - DNA, 15 bp, Homo sapiens
ctgccaggactgggt

SEQ ID NO: 1276395 - DNA, 15 bp, Homo sapiens
gctgccaggactggg

SEQ ID NO: 1276396 - DNA, 15 bp, Homo sapiens
tgctgccaggactgg

SEQ ID NO: 1276397 - DNA, 15 bp, Homo sapiens
atgctgccaggactg

SEQ ID NO: 1276398 - DNA, 15 bp, Homo sapiens
aatgctgccaggact

SEQ ID NO: 1276399 - DNA, 15 bp, Homo sapiens
gaatgctgccaggac

SEQ ID NO: 1276400 - DNA, 15 bp, Homo sapiens
tgaatgctgccagga

SEQ ID NO: 1276401 - DNA, 15 bp, Homo sapiens
atgaatgctgccagg

SEQ ID NO: 1276402 - DNA, 15 bp, Homo sapiens
gatgaatgctgccag

SEQ ID NO: 1276403 - DNA, 15 bp, Homo sapiens
tgatgaatgctgcca

SEQ ID NO: 1276404 - DNA, 15 bp, Homo sapiens
gtgatgaatgctgcc

SEQ ID NO: 1276405 - DNA, 15 bp, Homo sapiens
tgtgatgaatgctgc

SEQ ID NO: 1276406 - DNA, 15 bp, Homo sapiens
atgtgatgaatgctg

SEQ ID NO: 1276407 - DNA, 15 bp, Homo sapiens
catgtgatgaatgct

SEQ ID NO: 1276408 - DNA, 15 bp, Homo sapiens
gcatgtgatgaatgc

SEQ ID NO: 1276409 - DNA, 15 bp, Homo sapiens
agcatgtgatgaatg

SEQ ID NO: 1276410 - DNA, 15 bp, Homo sapiens
tagcatgtgatgaat

SEQ ID NO: 1276411 - DNA, 15 bp, Homo sapiens
ttagcatgtgatgaa

SEQ ID NO: 1276412 - DNA, 15 bp, Homo sapiens
gttagcatgtgatga

SEQ ID NO: 1276413 - DNA, 15 bp, Homo sapiens
agttagcatgtgatg

SEQ ID NO: 1276414 - DNA, 15 bp, Homo sapiens
cagttagcatgtgat

SEQ ID NO: 1276415 - DNA, 15 bp, Homo sapiens
tcagttagcatgtga

SEQ ID NO: 1276416 - DNA, 15 bp, Homo sapiens
ttcagttagcatgtg

SEQ ID NO: 1276417 - DNA, 15 bp, Homo sapiens
tttcagttagcatgt

SEQ ID NO: 1276418 - DNA, 15 bp, Homo sapiens
ttttcagttagcatg

SEQ ID NO: 1276419 - DNA, 15 bp, Homo sapiens
cttttcagttagcat

SEQ ID NO: 1276420 - DNA, 15 bp, Homo sapiens
gcttttcagttagca

SEQ ID NO: 1276421 - DNA, 15 bp, Homo sapiens
ggcttttcagttagc

SEQ ID NO: 1276422 - DNA, 15 bp, Homo sapiens
gggcttttcagttag

SEQ ID NO: 1276423 - DNA, 15 bp, Homo sapiens
agggcttttcagtta

SEQ ID NO: 1276424 - DNA, 15 bp, Homo sapiens
aagggcttttcagtt

SEQ ID NO: 1276425 - DNA, 15 bp, Homo sapiens
caagggcttttcagt

SEQ ID NO: 1276426 - DNA, 15 bp, Homo sapiens
ccaagggcttttcag

SEQ ID NO: 1276427 - DNA, 15 bp, Homo sapiens
cccaagggcttttca

SEQ ID NO: 1276428 - DNA, 15 bp, Homo sapiens
gcccaagggcttttc

SEQ ID NO: 1276429 - DNA, 15 bp, Homo sapiens
ggcccaagggctttt

SEQ ID NO: 1276430 - DNA, 15 bp, Homo sapiens
gggcccaagggcttt

SEQ ID NO: 1276431 - DNA, 15 bp, Homo sapiens
agggcccaagggctt

SEQ ID NO: 1276432 - DNA, 15 bp, Homo sapiens
cagggcccaagggct

SEQ ID NO: 1276433 - DNA, 15 bp, Homo sapiens
tcagggcccaagggc

SEQ ID NO: 1276434 - DNA, 15 bp, Homo sapiens
ttcagggcccaaggg

SEQ ID NO: 1276435 - DNA, 15 bp, Homo sapiens
attcagggcccaagg

SEQ ID NO: 1276436 - DNA, 15 bp, Homo sapiens
tattcagggcccaag

SEQ ID NO: 1276437 - DNA, 15 bp, Homo sapiens
ttattcagggcccaa

SEQ ID NO: 1276438 - DNA, 15 bp, Homo sapiens
gttattcagggccca

SEQ ID NO: 1276439 - DNA, 15 bp, Homo sapiens
ggttattcagggccc

SEQ ID NO: 1276440 - DNA, 15 bp, Homo sapiens
tggttattcagggcc

SEQ ID NO: 1276441 - DNA, 15 bp, Homo sapiens
ctggttattcagggc

SEQ ID NO: 1276442 - DNA, 15 bp, Homo sapiens
actggttattcaggg

SEQ ID NO: 1276443 - DNA, 15 bp, Homo sapiens
tactggttattcagg

SEQ ID NO: 1276444 - DNA, 15 bp, Homo sapiens
ctactggttattcag

SEQ ID NO: 1276445 - DNA, 15 bp, Homo sapiens
gctactggttattca

SEQ ID NO: 1276446 - DNA, 15 bp, Homo sapiens
cgctactggttattc

SEQ ID NO: 1276447 - DNA, 15 bp, Homo sapiens
tcgctactggttatt

SEQ ID NO: 1276448 - DNA, 15 bp, Homo sapiens
atcgctactggttat

SEQ ID NO: 1276449 - DNA, 15 bp, Homo sapiens
gatcgctactggtta

SEQ ID NO: 1276450 - DNA, 15 bp, Homo sapiens
ggatcgctactggtt

SEQ ID NO: 1276451 - DNA, 15 bp, Homo sapiens
gggatcgctactggt

SEQ ID NO: 1276452 - DNA, 15 bp, Homo sapiens
ggggatcgctactgg

SEQ ID NO: 1276453 - DNA, 15 bp, Homo sapiens
tggggatcgctactg

SEQ ID NO: 1276454 - DNA, 15 bp, Homo sapiens
ctggggatcgctact

SEQ ID NO: 1276455 - DNA, 15 bp, Homo sapiens
cctggggatcgctac

SEQ ID NO: 1276456 - DNA, 15 bp, Homo sapiens
acctggggatcgcta

SEQ ID NO: 1276457 - DNA, 15 bp, Homo sapiens
tacctggggatcgct

SEQ ID NO: 1276458 - DNA, 15 bp, Homo sapiens
gtacctggggatcgc

SEQ ID NO: 1276459 - DNA, 15 bp, Homo sapiens
agtacctggggatcg

SEQ ID NO: 1276460 - DNA, 15 bp, Homo sapiens
tagtacctggggatc

SEQ ID NO: 1276461 - DNA, 15 bp, Homo sapiens
gtagtacctggggat

SEQ ID NO: 1276462 - DNA, 15 bp, Homo sapiens
tgtagtacctgggga

SEQ ID NO: 1276463 - DNA, 15 bp, Homo sapiens
atgtagtacctgggg

SEQ ID NO: 1276464 - DNA, 15 bp, Homo sapiens
gatgtagtacctggg

SEQ ID NO: 1276465 - DNA, 15 bp, Homo sapiens
cgatgtagtacctgg

SEQ ID NO: 1276466 - DNA, 15 bp, Homo sapiens
tcgatgtagtacctg

SEQ ID NO: 1276467 - DNA, 15 bp, Homo sapiens
ctcgatgtagtacct

SEQ ID NO: 1276468 - DNA, 15 bp, Homo sapiens
cctcgatgtagtacc

SEQ ID NO: 1276469 - DNA, 15 bp, Homo sapiens
ccctcgatgtagtac

SEQ ID NO: 1276470 - DNA, 15 bp, Homo sapiens
gccctcgatgtagta

SEQ ID NO: 1276471 - DNA, 15 bp, Homo sapiens
ggccctcgatgtagt

SEQ ID NO: 1276472 - DNA, 15 bp, Homo sapiens
aggccctcgatgtag

SEQ ID NO: 1276473 - DNA, 15 bp, Homo sapiens
aaggccctcgatgta

SEQ ID NO: 1276474 - DNA, 15 bp, Homo sapiens
taaggccctcgatgt

SEQ ID NO: 1276475 - DNA, 15 bp, Homo sapiens
ctaaggccctcgatg

SEQ ID NO: 1276476 - DNA, 15 bp, Homo sapiens
cctaaggccctcgat

SEQ ID NO: 1276477 - DNA, 15 bp, Homo sapiens
acctaaggccctcga

SEQ ID NO: 1276478 - DNA, 15 bp, Homo sapiens
cacctaaggccctcg

SEQ ID NO: 1276479 - DNA, 15 bp, Homo sapiens
tcacctaaggccctc

SEQ ID NO: 1276480 - DNA, 15 bp, Homo sapiens
ctcacctaaggccct

SEQ ID NO: 1276481 - DNA, 15 bp, Homo sapiens
gctcacctaaggccc

SEQ ID NO: 1276482 - DNA, 15 bp, Homo sapiens
ggctcacctaaggcc

SEQ ID NO: 1276483 - DNA, 15 bp, Homo sapiens
aggctcacctaaggc

SEQ ID NO: 1276484 - DNA, 15 bp, Homo sapiens
gaggctcacctaagg

SEQ ID NO: 1276485 - DNA, 15 bp, Homo sapiens
agaggctcacctaag

SEQ ID NO: 1276486 - DNA, 15 bp, Homo sapiens
cagaggctcacctaa

SEQ ID NO: 1276487 - DNA, 15 bp, Homo sapiens
tcagaggctcaccta

SEQ ID NO: 1276488 - DNA, 15 bp, Homo sapiens
ctcagaggctcacct

SEQ ID NO: 1276489 - DNA, 15 bp, Homo sapiens
tctcagaggctcacc

SEQ ID NO: 1276490 - DNA, 15 bp, Homo sapiens
gtctcagaggctcac

SEQ ID NO: 1276491 - DNA, 15 bp, Homo sapiens
agtctcagaggctca

SEQ ID NO: 1276492 - DNA, 15 bp, Homo sapiens
aagtctcagaggctc

SEQ ID NO: 1276493 - DNA, 15 bp, Homo sapiens
caagtctcagaggct

SEQ ID NO: 1276494 - DNA, 15 bp, Homo sapiens
gcaagtctcagaggc

SEQ ID NO: 1276495 - DNA, 15 bp, Homo sapiens
agcaagtctcagagg

SEQ ID NO: 1276496 - DNA, 15 bp, Homo sapiens
cagcaagtctcagag

SEQ ID NO: 1276497 - DNA, 15 bp, Homo sapiens
ccagcaagtctcaga

SEQ ID NO: 1276498 - DNA, 15 bp, Homo sapiens
gccagcaagtctcag

SEQ ID NO: 1276499 - DNA, 15 bp, Homo sapiens
agccagcaagtctca

SEQ ID NO: 1276500 - DNA, 15 bp, Homo sapiens
aagccagcaagtctc

SEQ ID NO: 1276501 - DNA, 15 bp, Homo sapiens
gaagccagcaagtct

SEQ ID NO: 1276502 - DNA, 15 bp, Homo sapiens
tgaagccagcaagtc

SEQ ID NO: 1276503 - DNA, 15 bp, Homo sapiens
ctgaagccagcaagt

SEQ ID NO: 1276504 - DNA, 15 bp, Homo sapiens
cctgaagccagcaag

SEQ ID NO: 1276505 - DNA, 15 bp, Homo sapiens
acctgaagccagcaa

SEQ ID NO: 1276506 - DNA, 15 bp, Homo sapiens
cacctgaagccagca

SEQ ID NO: 1276507 - DNA, 15 bp, Homo sapiens
tcacctgaagccagc

SEQ ID NO: 1276508 - DNA, 15 bp, Homo sapiens
ctcacctgaagccag

SEQ ID NO: 1276509 - DNA, 15 bp, Homo sapiens
tctcacctgaagcca

SEQ ID NO: 1276510 - DNA, 15 bp, Homo sapiens
atctcacctgaagcc

SEQ ID NO: 1276511 - DNA, 15 bp, Homo sapiens
aatctcacctgaagc

SEQ ID NO: 1276512 - DNA, 15 bp, Homo sapiens
gaatctcacctgaag

SEQ ID NO: 1276513 - DNA, 15 bp, Homo sapiens
tgaatctcacctgaa

SEQ ID NO: 1276514 - DNA, 15 bp, Homo sapiens
ctgaatctcacctga

SEQ ID NO: 1276515 - DNA, 15 bp, Homo sapiens
gctgaatctcacctg

SEQ ID NO: 1276516 - DNA, 15 bp, Homo sapiens
tgctgaatctcacct

SEQ ID NO: 1276517 - DNA, 15 bp, Homo sapiens
gtgctgaatctcacc

SEQ ID NO: 1276518 - DNA, 15 bp, Homo sapiens
tgtgctgaatctcac

SEQ ID NO: 1276519 - DNA, 15 bp, Homo sapiens
atgtgctgaatctca

SEQ ID NO: 1276520 - DNA, 15 bp, Homo sapiens
aatgtgctgaatctc

SEQ ID NO: 1276521 - DNA, 15 bp, Homo sapiens
taatgtgctgaatct

SEQ ID NO: 1276522 - DNA, 15 bp, Homo sapiens
gtaatgtgctgaatc

SEQ ID NO: 1276523 - DNA, 15 bp, Homo sapiens
ggtaatgtgctgaat

SEQ ID NO: 1276524 - DNA, 15 bp, Homo sapiens
tggtaatgtgctgaa

SEQ ID NO: 1276525 - DNA, 15 bp, Homo sapiens
gtggtaatgtgctga

SEQ ID NO: 1276526 - DNA, 15 bp, Homo sapiens
ggtggtaatgtgctg

SEQ ID NO: 1276527 - DNA, 15 bp, Homo sapiens
aggtggtaatgtgct

SEQ ID NO: 1276528 - DNA, 15 bp, Homo sapiens
taggtggtaatgtgc

SEQ ID NO: 1276529 - DNA, 15 bp, Homo sapiens
ataggtggtaatgtg

SEQ ID NO: 1276530 - DNA, 15 bp, Homo sapiens
cataggtggtaatgt

SEQ ID NO: 1276531 - DNA, 15 bp, Homo sapiens
ccataggtggtaatg

SEQ ID NO: 1276532 - DNA, 15 bp, Homo sapiens
accataggtggtaat

SEQ ID NO: 1276533 - DNA, 15 bp, Homo sapiens
caccataggtggtaa

SEQ ID NO: 1276534 - DNA, 15 bp, Homo sapiens
ccaccataggtggta

SEQ ID NO: 1276535 - DNA, 15 bp, Homo sapiens
gccaccataggtggt

SEQ ID NO: 1276536 - DNA, 15 bp, Homo sapiens
agccaccataggtgg

SEQ ID NO: 1276537 - DNA, 15 bp, Homo sapiens
tagccaccataggtg

SEQ ID NO: 1276538 - DNA, 15 bp, Homo sapiens
atagccaccataggt

SEQ ID NO: 1276539 - DNA, 15 bp, Homo sapiens
catagccaccatagg

SEQ ID NO: 1276540 - DNA, 15 bp, Homo sapiens
ccatagccaccatag

SEQ ID NO: 1276541 - DNA, 15 bp, Homo sapiens
cccatagccaccata

SEQ ID NO: 1276542 - DNA, 15 bp, Homo sapiens
ccccatagccaccat

SEQ ID NO: 1276543 - DNA, 15 bp, Homo sapiens
gccccatagccacca

SEQ ID NO: 1276544 - DNA, 15 bp, Homo sapiens
tgccccatagccacc

SEQ ID NO: 1276545 - DNA, 15 bp, Homo sapiens
ttgccccatagccac

SEQ ID NO: 1276546 - DNA, 15 bp, Homo sapiens
tttgccccatagcca

SEQ ID NO: 1276547 - DNA, 15 bp, Homo sapiens
ttttgccccatagcc

SEQ ID NO: 1276548 - DNA, 15 bp, Homo sapiens
gttttgccccatagc

SEQ ID NO: 1276549 - DNA, 15 bp, Homo sapiens
agttttgccccatag

SEQ ID NO: 1276550 - DNA, 15 bp, Homo sapiens
gagttttgccccata

SEQ ID NO: 1276551 - DNA, 15 bp, Homo sapiens
ggagttttgccccat

SEQ ID NO: 1276552 - DNA, 15 bp, Homo sapiens
aggagttttgcccca

SEQ ID NO: 1276553 - DNA, 15 bp, Homo sapiens
gaggagttttgcccc

SEQ ID NO: 1276554 - DNA, 15 bp, Homo sapiens
ggaggagttttgccc

SEQ ID NO: 1276555 - DNA, 15 bp, Homo sapiens
aggaggagttttgcc

SEQ ID NO: 1276556 - DNA, 15 bp, Homo sapiens
caggaggagttttgc

SEQ ID NO: 1276557 - DNA, 15 bp, Homo sapiens
gcaggaggagttttg

SEQ ID NO: 1276558 - DNA, 15 bp, Homo sapiens
agcaggaggagtttt

SEQ ID NO: 1276559 - DNA, 15 bp, Homo sapiens
aagcaggaggagttt

SEQ ID NO: 1276560 - DNA, 15 bp, Homo sapiens
caagcaggaggagtt

SEQ ID NO: 1276561 - DNA, 15 bp, Homo sapiens
ccaagcaggaggagt

SEQ ID NO: 1276562 - DNA, 15 bp, Homo sapiens
cccaagcaggaggag

SEQ ID NO: 1276563 - DNA, 15 bp, Homo sapiens
tcccaagcaggagga

SEQ ID NO: 1276564 - DNA, 15 bp, Homo sapiens
ttcccaagcaggagg

SEQ ID NO: 1276565 - DNA, 15 bp, Homo sapiens
tttcccaagcaggag

SEQ ID NO: 1276566 - DNA, 15 bp, Homo sapiens
ttttcccaagcagga

SEQ ID NO: 1276567 - DNA, 15 bp, Homo sapiens
cttttcccaagcagg

SEQ ID NO: 1276568 - DNA, 15 bp, Homo sapiens
gcttttcccaagcag

SEQ ID NO: 1276569 - DNA, 15 bp, Homo sapiens
tgcttttcccaagca

SEQ ID NO: 1276570 - DNA, 15 bp, Homo sapiens
ctgcttttcccaagc

SEQ ID NO: 1276571 - DNA, 15 bp, Homo sapiens
tctgcttttcccaag

SEQ ID NO: 1276572 - DNA, 15 bp, Homo sapiens
ctctgcttttcccaa

SEQ ID NO: 1276573 - DNA, 15 bp, Homo sapiens
cctctgcttttccca

SEQ ID NO: 1276574 - DNA, 15 bp, Homo sapiens
ccctctgcttttccc

SEQ ID NO: 1276575 - DNA, 15 bp, Homo sapiens
tccctctgcttttcc

SEQ ID NO: 1276576 - DNA, 15 bp, Homo sapiens
ttccctctgcttttc

SEQ ID NO: 1276577 - DNA, 15 bp, Homo sapiens
tttccctctgctttt

SEQ ID NO: 1276578 - DNA, 15 bp, Homo sapiens
ttttccctctgcttt

SEQ ID NO: 1276579 - DNA, 15 bp, Homo sapiens
cttttccctctgctt

SEQ ID NO: 1276580 - DNA, 15 bp, Homo sapiens
acttttccctctgct

SEQ ID NO: 1276581 - DNA, 15 bp, Homo sapiens
tacttttccctctgc

SEQ ID NO: 1276582 - DNA, 15 bp, Homo sapiens
ttacttttccctctg

SEQ ID NO: 1276583 - DNA, 15 bp, Homo sapiens
tttacttttccctct

SEQ ID NO: 1276584 - DNA, 15 bp, Homo sapiens
gtttacttttccctc

SEQ ID NO: 1276585 - DNA, 15 bp, Homo sapiens
cgtttacttttccct

SEQ ID NO: 1276586 - DNA, 15 bp, Homo sapiens
ccgtttacttttccc

SEQ ID NO: 1276587 - DNA, 15 bp, Homo sapiens
cccgtttacttttcc

SEQ ID NO: 1276588 - DNA, 15 bp, Homo sapiens
ccccgtttacttttc

SEQ ID NO: 1276589 - DNA, 15 bp, Homo sapiens
gccccgtttactttt

SEQ ID NO: 1276590 - DNA, 15 bp, Homo sapiens
agccccgtttacttt

SEQ ID NO: 1276591 - DNA, 15 bp, Homo sapiens
cagccccgtttactt

SEQ ID NO: 1276592 - DNA, 15 bp, Homo sapiens
acagccccgtttact

SEQ ID NO: 1276593 - DNA, 15 bp, Homo sapiens
tacagccccgtttac

SEQ ID NO: 1276594 - DNA, 15 bp, Homo sapiens
atacagccccgttta

SEQ ID NO: 1276595 - DNA, 15 bp, Homo sapiens
gatacagccccgttt

SEQ ID NO: 1276596 - DNA, 15 bp, Homo sapiens
agatacagccccgtt

SEQ ID NO: 1276597 - DNA, 15 bp, Homo sapiens
aagatacagccccgt

SEQ ID NO: 1276598 - DNA, 15 bp, Homo sapiens
caagatacagccccg

SEQ ID NO: 1276599 - DNA, 15 bp, Homo sapiens
acaagatacagcccc

SEQ ID NO: 1276600 - DNA, 15 bp, Homo sapiens
aacaagatacagccc

SEQ ID NO: 1276601 - DNA, 15 bp, Homo sapiens
caacaagatacagcc

SEQ ID NO: 1276602 - DNA, 15 bp, Homo sapiens
gcaacaagatacagc

SEQ ID NO: 1276603 - DNA, 15 bp, Homo sapiens
tgcaacaagatacag

SEQ ID NO: 1276604 - DNA, 15 bp, Homo sapiens
gtgcaacaagataca

SEQ ID NO: 1276605 - DNA, 15 bp, Homo sapiens
ggtgcaacaagatac

SEQ ID NO: 1276606 - DNA, 15 bp, Homo sapiens
aggtgcaacaagata

SEQ ID NO: 1276607 - DNA, 15 bp, Homo sapiens
aaggtgcaacaagat

SEQ ID NO: 1276608 - DNA, 15 bp, Homo sapiens
taaggtgcaacaaga

SEQ ID NO: 1276609 - DNA, 15 bp, Homo sapiens
ctaaggtgcaacaag

SEQ ID NO: 1276610 - DNA, 15 bp, Homo sapiens
cctaaggtgcaacaa

SEQ ID NO: 1276611 - DNA, 15 bp, Homo sapiens
acctaaggtgcaaca

SEQ ID NO: 1276612 - DNA, 15 bp, Homo sapiens
tacctaaggtgcaac

SEQ ID NO: 1276613 - DNA, 15 bp, Homo sapiens
gtacctaaggtgcaa

SEQ ID NO: 1276614 - DNA, 15 bp, Homo sapiens
ggtacctaaggtgca

SEQ ID NO: 1276615 - DNA, 15 bp, Homo sapiens
tggtacctaaggtgc

SEQ ID NO: 1276616 - DNA, 15 bp, Homo sapiens
ttggtacctaaggtg

SEQ ID NO: 1276617 - DNA, 15 bp, Homo sapiens
gttggtacctaaggt

SEQ ID NO: 1276618 - DNA, 15 bp, Homo sapiens
tgttggtacctaagg

SEQ ID NO: 1276619 - DNA, 15 bp, Homo sapiens
gtgttggtacctaag

SEQ ID NO: 1276620 - DNA, 15 bp, Homo sapiens
ggtgttggtacctaa

SEQ ID NO: 1276621 - DNA, 15 bp, Homo sapiens
tggtgttggtaccta

SEQ ID NO: 1276622 - DNA, 15 bp, Homo sapiens
gtggtgttggtacct

SEQ ID NO: 1276623 - DNA, 15 bp, Homo sapiens
ggtggtgttggtacc

SEQ ID NO: 1276624 - DNA, 15 bp, Homo sapiens
tggtggtgttggtac

SEQ ID NO: 1276625 - DNA, 15 bp, Homo sapiens
gtggtggtgttggta

SEQ ID NO: 1276626 - DNA, 15 bp, Homo sapiens
tgtggtggtgttggt

SEQ ID NO: 1276627 - DNA, 15 bp, Homo sapiens
ttgtggtggtgttgg

SEQ ID NO: 1276628 - DNA, 15 bp, Homo sapiens
cttgtggtggtgttg

SEQ ID NO: 1276629 - DNA, 15 bp, Homo sapiens
ccttgtggtggtgtt

SEQ ID NO: 1276630 - DNA, 15 bp, Homo sapiens
cccttgtggtggtgt

SEQ ID NO: 1276631 - DNA, 15 bp, Homo sapiens
ccccttgtggtggtg

SEQ ID NO: 1276632 - DNA, 15 bp, Homo sapiens
cccccttgtggtggt

SEQ ID NO: 1276633 - DNA, 15 bp, Homo sapiens
acccccttgtggtgg

SEQ ID NO: 1276634 - DNA, 15 bp, Homo sapiens
tacccccttgtggtg

SEQ ID NO: 1276635 - DNA, 15 bp, Homo sapiens
ctacccccttgtggt

SEQ ID NO: 1276636 - DNA, 15 bp, Homo sapiens
tctacccccttgtgg

SEQ ID NO: 1276637 - DNA, 15 bp, Homo sapiens
ctctacccccttgtg

SEQ ID NO: 1276638 - DNA, 15 bp, Homo sapiens
gctctacccccttgt

SEQ ID NO: 1276639 - DNA, 15 bp, Homo sapiens
tgctctacccccttg

SEQ ID NO: 1276640 - DNA, 15 bp, Homo sapiens
gtgctctaccccctt

SEQ ID NO: 1276641 - DNA, 15 bp, Homo sapiens
ggtgctctaccccct

SEQ ID NO: 1276642 - DNA, 15 bp, Homo sapiens
tggtgctctaccccc

SEQ ID NO: 1276643 - DNA, 15 bp, Homo sapiens
ctggtgctctacccc

SEQ ID NO: 1276644 - DNA, 15 bp, Homo sapiens
cctggtgctctaccc

SEQ ID NO: 1276645 - DNA, 15 bp, Homo sapiens
acctggtgctctacc

SEQ ID NO: 1276646 - DNA, 15 bp, Homo sapiens
cacctggtgctctac

SEQ ID NO: 1276647 - DNA, 15 bp, Homo sapiens
ccacctggtgctcta

SEQ ID NO: 1276648 - DNA, 15 bp, Homo sapiens
cccacctggtgctct

SEQ ID NO: 1276649 - DNA, 15 bp, Homo sapiens
tcccacctggtgctc

SEQ ID NO: 1276650 - DNA, 15 bp, Homo sapiens
atcccacctggtgct

SEQ ID NO: 1276651 - DNA, 15 bp, Homo sapiens
gatcccacctggtgc

SEQ ID NO: 1276652 - DNA, 15 bp, Homo sapiens
agatcccacctggtg

SEQ ID NO: 1276653 - DNA, 15 bp, Homo sapiens
aagatcccacctggt

SEQ ID NO: 1276654 - DNA, 15 bp, Homo sapiens
caagatcccacctgg

SEQ ID NO: 1276655 - DNA, 15 bp, Homo sapiens
ccaagatcccacctg

SEQ ID NO: 1276656 - DNA, 15 bp, Homo sapiens
cccaagatcccacct

SEQ ID NO: 1276657 - DNA, 15 bp, Homo sapiens
ccccaagatcccacc

SEQ ID NO: 1276658 - DNA, 15 bp, Homo sapiens
accccaagatcccac

SEQ ID NO: 1276659 - DNA, 15 bp, Homo sapiens
gaccccaagatccca

SEQ ID NO: 1276660 - DNA, 15 bp, Homo sapiens
ggaccccaagatccc

SEQ ID NO: 1276661 - DNA, 15 bp, Homo sapiens
gggaccccaagatcc

SEQ ID NO: 1276662 - DNA, 15 bp, Homo sapiens
agggaccccaagatc

SEQ ID NO: 1276663 - DNA, 15 bp, Homo sapiens
cagggaccccaagat

SEQ ID NO: 1276664 - DNA, 15 bp, Homo sapiens
tcagggaccccaaga

SEQ ID NO: 1276665 - DNA, 15 bp, Homo sapiens
atcagggaccccaag

SEQ ID NO: 1276666 - DNA, 15 bp, Homo sapiens
aatcagggaccccaa

SEQ ID NO: 1276667 - DNA, 15 bp, Homo sapiens
gaatcagggacccca

SEQ ID NO: 1276668 - DNA, 15 bp, Homo sapiens
ggaatcagggacccc

SEQ ID NO: 1276669 - DNA, 15 bp, Homo sapiens
tggaatcagggaccc

SEQ ID NO: 1276670 - DNA, 15 bp, Homo sapiens
ttggaatcagggacc

SEQ ID NO: 1276671 - DNA, 15 bp, Homo sapiens
cttggaatcagggac

SEQ ID NO: 1276672 - DNA, 15 bp, Homo sapiens
gcttggaatcaggga

SEQ ID NO: 1276673 - DNA, 15 bp, Homo sapiens
agcttggaatcaggg

SEQ ID NO: 1276674 - DNA, 15 bp, Homo sapiens
aagcttggaatcagg

SEQ ID NO: 1276675 - DNA, 15 bp, Homo sapiens
aaagcttggaatcag

SEQ ID NO: 1276676 - DNA, 15 bp, Homo sapiens
caaagcttggaatca

SEQ ID NO: 1276677 - DNA, 15 bp, Homo sapiens
tcaaagcttggaatc

SEQ ID NO: 1276678 - DNA, 15 bp, Homo sapiens
gtcaaagcttggaat

SEQ ID NO: 1276679 - DNA, 15 bp, Homo sapiens
agtcaaagcttggaa

SEQ ID NO: 1276680 - DNA, 15 bp, Homo sapiens
gagtcaaagcttgga

SEQ ID NO: 1276681 - DNA, 15 bp, Homo sapiens
tgagtcaaagcttgg

SEQ ID NO: 1276682 - DNA, 15 bp, Homo sapiens
atgagtcaaagcttg

SEQ ID NO: 1276683 - DNA, 15 bp, Homo sapiens
catgagtcaaagctt

SEQ ID NO: 1276684 - DNA, 15 bp, Homo sapiens
tcatgagtcaaagct

SEQ ID NO: 1276685 - DNA, 15 bp, Homo sapiens
ctcatgagtcaaagc

SEQ ID NO: 1276686 - DNA, 15 bp, Homo sapiens
actcatgagtcaaag

SEQ ID NO: 1276687 - DNA, 15 bp, Homo sapiens
cactcatgagtcaaa

SEQ ID NO: 1276688 - DNA, 15 bp, Homo sapiens
ccactcatgagtcaa

SEQ ID NO: 1276689 - DNA, 15 bp, Homo sapiens
gccactcatgagtca

SEQ ID NO: 1276690 - DNA, 15 bp, Homo sapiens
tgccactcatgagtc

SEQ ID NO: 1276691 - DNA, 15 bp, Homo sapiens
atgccactcatgagt

SEQ ID NO: 1276692 - DNA, 15 bp, Homo sapiens
aatgccactcatgag

SEQ ID NO: 1276693 - DNA, 15 bp, Homo sapiens
aaatgccactcatga

SEQ ID NO: 1276694 - DNA, 15 bp, Homo sapiens
gaaatgccactcatg

SEQ ID NO: 1276695 - DNA, 15 bp, Homo sapiens
agaaatgccactcat

SEQ ID NO: 1276696 - DNA, 15 bp, Homo sapiens
cagaaatgccactca

SEQ ID NO: 1276697 - DNA, 15 bp, Homo sapiens
ccagaaatgccactc

SEQ ID NO: 1276698 - DNA, 15 bp, Homo sapiens
tccagaaatgccact

SEQ ID NO: 1276699 - DNA, 15 bp, Homo sapiens
gtccagaaatgccac

SEQ ID NO: 1276700 - DNA, 15 bp, Homo sapiens
ggtccagaaatgcca

SEQ ID NO: 1276701 - DNA, 15 bp, Homo sapiens
aggtccagaaatgcc

SEQ ID NO: 1276702 - DNA, 15 bp, Homo sapiens
caggtccagaaatgc

SEQ ID NO: 1276703 - DNA, 15 bp, Homo sapiens
gcaggtccagaaatg

SEQ ID NO: 1276704 - DNA, 15 bp, Homo sapiens
ggcaggtccagaaat

SEQ ID NO: 1276705 - DNA, 15 bp, Homo sapiens
gggcaggtccagaaa

SEQ ID NO: 1276706 - DNA, 15 bp, Homo sapiens
agggcaggtccagaa

SEQ ID NO: 1276707 - DNA, 15 bp, Homo sapiens
cagggcaggtccaga

SEQ ID NO: 1276708 - DNA, 15 bp, Homo sapiens
acagggcaggtccag

SEQ ID NO: 1276709 - DNA, 15 bp, Homo sapiens
cacagggcaggtcca

SEQ ID NO: 1276710 - DNA, 15 bp, Homo sapiens
gcacagggcaggtcc

SEQ ID NO: 1276711 - DNA, 15 bp, Homo sapiens
ggcacagggcaggtc

SEQ ID NO: 1276712 - DNA, 15 bp, Homo sapiens
tggcacagggcaggt

SEQ ID NO: 1276713 - DNA, 15 bp, Homo sapiens
ctggcacagggcagg

SEQ ID NO: 1276714 - DNA, 15 bp, Homo sapiens
tctggcacagggcag

SEQ ID NO: 1276715 - DNA, 15 bp, Homo sapiens
ctctggcacagggca

SEQ ID NO: 1276716 - DNA, 15 bp, Homo sapiens
tctctggcacagggc

SEQ ID NO: 1276717 - DNA, 15 bp, Homo sapiens
ctctctggcacaggg

SEQ ID NO: 1276718 - DNA, 15 bp, Homo sapiens
tctctctggcacagg

SEQ ID NO: 1276719 - DNA, 15 bp, Homo sapiens
ctctctctggcacag

SEQ ID NO: 1276720 - DNA, 15 bp, Homo sapiens
cctctctctggcaca

SEQ ID NO: 1276721 - DNA, 15 bp, Homo sapiens
gcctctctctggcac

SEQ ID NO: 1276722 - DNA, 15 bp, Homo sapiens
ggcctctctctggca

SEQ ID NO: 1276723 - DNA, 15 bp, Homo sapiens
aggcctctctctggc

SEQ ID NO: 1276724 - DNA, 15 bp, Homo sapiens
taggcctctctctgg

SEQ ID NO: 1276725 - DNA, 15 bp, Homo sapiens
ataggcctctctctg

SEQ ID NO: 1276726 - DNA, 15 bp, Homo sapiens
aataggcctctctct

SEQ ID NO: 1276727 - DNA, 15 bp, Homo sapiens
caataggcctctctc

SEQ ID NO: 1276728 - DNA, 15 bp, Homo sapiens
gcaataggcctctct

SEQ ID NO: 1276729 - DNA, 15 bp, Homo sapiens
ggcaataggcctctc

SEQ ID NO: 1276730 - DNA, 15 bp, Homo sapiens
gggcaataggcctct

SEQ ID NO: 1276731 - DNA, 15 bp, Homo sapiens
agggcaataggcctc

SEQ ID NO: 1276732 - DNA, 15 bp, Homo sapiens
cagggcaataggcct

SEQ ID NO: 1276733 - DNA, 15 bp, Homo sapiens
tcagggcaataggcc

SEQ ID NO: 1276734 - DNA, 15 bp, Homo sapiens
ttcagggcaataggc

SEQ ID NO: 1276735 - DNA, 15 bp, Homo sapiens
cttcagggcaatagg

SEQ ID NO: 1276736 - DNA, 15 bp, Homo sapiens
ccttcagggcaatag

SEQ ID NO: 1276737 - DNA, 15 bp, Homo sapiens
cccttcagggcaata

SEQ ID NO: 1276738 - DNA, 15 bp, Homo sapiens
acccttcagggcaat

SEQ ID NO: 1276739 - DNA, 15 bp, Homo sapiens
cacccttcagggcaa

SEQ ID NO: 1276740 - DNA, 15 bp, Homo sapiens
tcacccttcagggca

SEQ ID NO: 1276741 - DNA, 15 bp, Homo sapiens
ctcacccttcagggc

SEQ ID NO: 1276742 - DNA, 15 bp, Homo sapiens
actcacccttcaggg

SEQ ID NO: 1276743 - DNA, 15 bp, Homo sapiens
gactcacccttcagg

SEQ ID NO: 1276744 - DNA, 15 bp, Homo sapiens
agactcacccttcag

SEQ ID NO: 1276745 - DNA, 15 bp, Homo sapiens
gagactcacccttca

SEQ ID NO: 1276746 - DNA, 15 bp, Homo sapiens
tgagactcacccttc

SEQ ID NO: 1276747 - DNA, 15 bp, Homo sapiens
ctgagactcaccctt

SEQ ID NO: 1276748 - DNA, 15 bp, Homo sapiens
cctgagactcaccct

SEQ ID NO: 1276749 - DNA, 15 bp, Homo sapiens
gcctgagactcaccc

SEQ ID NO: 1276750 - DNA, 15 bp, Homo sapiens
ggcctgagactcacc

SEQ ID NO: 1276751 - DNA, 15 bp, Homo sapiens
tggcctgagactcac

SEQ ID NO: 1276752 - DNA, 15 bp, Homo sapiens
ctggcctgagactca

SEQ ID NO: 1276753 - DNA, 15 bp, Homo sapiens
cctggcctgagactc

SEQ ID NO: 1276754 - DNA, 15 bp, Homo sapiens
gcctggcctgagact

SEQ ID NO: 1276755 - DNA, 15 bp, Homo sapiens
tgcctggcctgagac

SEQ ID NO: 1276756 - DNA, 15 bp, Homo sapiens
ctgcctggcctgaga

SEQ ID NO: 1276757 - DNA, 15 bp, Homo sapiens
gctgcctggcctgag

SEQ ID NO: 1276758 - DNA, 15 bp, Homo sapiens
tgctgcctggcctga

SEQ ID NO: 1276759 - DNA, 15 bp, Homo sapiens
atgctgcctggcctg

SEQ ID NO: 1276760 - DNA, 15 bp, Homo sapiens
aatgctgcctggcct

SEQ ID NO: 1276761 - DNA, 15 bp, Homo sapiens
gaatgctgcctggcc

SEQ ID NO: 1276762 - DNA, 15 bp, Homo sapiens
tgaatgctgcctggc

SEQ ID NO: 1276763 - DNA, 15 bp, Homo sapiens
gtgaatgctgcctgg

SEQ ID NO: 1276764 - DNA, 15 bp, Homo sapiens
ggtgaatgctgcctg

SEQ ID NO: 1276765 - DNA, 15 bp, Homo sapiens
tggtgaatgctgcct

SEQ ID NO: 1276766 - DNA, 15 bp, Homo sapiens
gtggtgaatgctgcc

SEQ ID NO: 1276767 - DNA, 15 bp, Homo sapiens
tgtggtgaatgctgc

SEQ ID NO: 1276768 - DNA, 15 bp, Homo sapiens
ttgtggtgaatgctg

SEQ ID NO: 1276769 - DNA, 15 bp, Homo sapiens
cttgtggtgaatgct

SEQ ID NO: 1276770 - DNA, 15 bp, Homo sapiens
gcttgtggtgaatgc

SEQ ID NO: 1276771 - DNA, 15 bp, Homo sapiens
agcttgtggtgaatg

SEQ ID NO: 1276772 - DNA, 15 bp, Homo sapiens
cagcttgtggtgaat

SEQ ID NO: 1276773 - DNA, 15 bp, Homo sapiens
tcagcttgtggtgaa

SEQ ID NO: 1276774 - DNA, 15 bp, Homo sapiens
gtcagcttgtggtga

SEQ ID NO: 1276775 - DNA, 15 bp, Homo sapiens
agtcagcttgtggtg

SEQ ID NO: 1276776 - DNA, 15 bp, Homo sapiens
aagtcagcttgtggt

SEQ ID NO: 1276777 - DNA, 15 bp, Homo sapiens
taagtcagcttgtgg

SEQ ID NO: 1276778 - DNA, 15 bp, Homo sapiens
ttaagtcagcttgtg

SEQ ID NO: 1276779 - DNA, 15 bp, Homo sapiens
tttaagtcagcttgt

SEQ ID NO: 1276780 - DNA, 15 bp, Homo sapiens
ttttaagtcagcttg

SEQ ID NO: 1276781 - DNA, 15 bp, Homo sapiens
cttttaagtcagctt

SEQ ID NO: 1276782 - DNA, 15 bp, Homo sapiens
tcttttaagtcagct

SEQ ID NO: 1276783 - DNA, 15 bp, Homo sapiens
gtcttttaagtcagc

SEQ ID NO: 1276784 - DNA, 15 bp, Homo sapiens
ggtcttttaagtcag

SEQ ID NO: 1276785 - DNA, 15 bp, Homo sapiens
aggtcttttaagtca

SEQ ID NO: 1276786 - DNA, 15 bp, Homo sapiens
taggtcttttaagtc

SEQ ID NO: 1276787 - DNA, 15 bp, Homo sapiens
ttaggtcttttaagt

SEQ ID NO: 1276788 - DNA, 15 bp, Homo sapiens
cttaggtcttttaag

SEQ ID NO: 1276789 - DNA, 15 bp, Homo sapiens
ccttaggtcttttaa

SEQ ID NO: 1276790 - DNA, 15 bp, Homo sapiens
gccttaggtctttta

SEQ ID NO: 1276791 - DNA, 15 bp, Homo sapiens
ggccttaggtctttt

SEQ ID NO: 1276792 - DNA, 15 bp, Homo sapiens
aggccttaggtcttt

SEQ ID NO: 1276793 - DNA, 15 bp, Homo sapiens
aaggccttaggtctt

SEQ ID NO: 1276794 - DNA, 15 bp, Homo sapiens
taaggccttaggtct

SEQ ID NO: 1276795 - DNA, 15 bp, Homo sapiens
ttaaggccttaggtc

SEQ ID NO: 1276796 - DNA, 15 bp, Homo sapiens
cttaaggccttaggt

SEQ ID NO: 1276797 - DNA, 15 bp, Homo sapiens
ccttaaggccttagg

SEQ ID NO: 1276798 - DNA, 15 bp, Homo sapiens
cccttaaggccttag

SEQ ID NO: 1276799 - DNA, 15 bp, Homo sapiens
tcccttaaggcctta

SEQ ID NO: 1276800 - DNA, 15 bp, Homo sapiens
ttcccttaaggcctt

SEQ ID NO: 1276801 - DNA, 15 bp, Homo sapiens
gttcccttaaggcct

SEQ ID NO: 1276802 - DNA, 15 bp, Homo sapiens
tgttcccttaaggcc

SEQ ID NO: 1276803 - DNA, 15 bp, Homo sapiens
atgttcccttaaggc

SEQ ID NO: 1276804 - DNA, 15 bp, Homo sapiens
gatgttcccttaagg

SEQ ID NO: 1276805 - DNA, 15 bp, Homo sapiens
ggatgttcccttaag

SEQ ID NO: 1276806 - DNA, 15 bp, Homo sapiens
tggatgttcccttaa

SEQ ID NO: 1276807 - DNA, 15 bp, Homo sapiens
atggatgttccctta

SEQ ID NO: 1276808 - DNA, 15 bp, Homo sapiens
catggatgttccctt

SEQ ID NO: 1276809 - DNA, 15 bp, Homo sapiens
ccatggatgttccct

SEQ ID NO: 1276810 - DNA, 15 bp, Homo sapiens
accatggatgttccc

SEQ ID NO: 1276811 - DNA, 15 bp, Homo sapiens
caccatggatgttcc

SEQ ID NO: 1276812 - DNA, 15 bp, Homo sapiens
ccaccatggatgttc

SEQ ID NO: 1276813 - DNA, 15 bp, Homo sapiens
accaccatggatgtt

SEQ ID NO: 1276814 - DNA, 15 bp, Homo sapiens
gaccaccatggatgt

SEQ ID NO: 1276815 - DNA, 15 bp, Homo sapiens
agaccaccatggatg

SEQ ID NO: 1276816 - DNA, 15 bp, Homo sapiens
cagaccaccatggat

SEQ ID NO: 1276817 - DNA, 15 bp, Homo sapiens
ccagaccaccatgga

SEQ ID NO: 1276818 - DNA, 15 bp, Homo sapiens
accagaccaccatgg

SEQ ID NO: 1276819 - DNA, 15 bp, Homo sapiens
taccagaccaccatg

SEQ ID NO: 1276820 - DNA, 15 bp, Homo sapiens
ctaccagaccaccat

SEQ ID NO: 1276821 - DNA, 15 bp, Homo sapiens
gctaccagaccacca

SEQ ID NO: 1276822 - DNA, 15 bp, Homo sapiens
tgctaccagaccacc

SEQ ID NO: 1276823 - DNA, 15 bp, Homo sapiens
gtgctaccagaccac

SEQ ID NO: 1276824 - DNA, 15 bp, Homo sapiens
agtgctaccagacca

SEQ ID NO: 1276825 - DNA, 15 bp, Homo sapiens
aagtgctaccagacc

SEQ ID NO: 1276826 - DNA, 15 bp, Homo sapiens
gaagtgctaccagac

SEQ ID NO: 1276827 - DNA, 15 bp, Homo sapiens
agaagtgctaccaga

SEQ ID NO: 1276828 - DNA, 15 bp, Homo sapiens
aagaagtgctaccag

SEQ ID NO: 1276829 - DNA, 15 bp, Homo sapiens
taagaagtgctacca

SEQ ID NO: 1276830 - DNA, 15 bp, Homo sapiens
ttaagaagtgctacc

SEQ ID NO: 1276831 - DNA, 15 bp, Homo sapiens
cttaagaagtgctac

SEQ ID NO: 1276832 - DNA, 15 bp, Homo sapiens
ccttaagaagtgcta

SEQ ID NO: 1276833 - DNA, 15 bp, Homo sapiens
gccttaagaagtgct

SEQ ID NO: 1276834 - DNA, 15 bp, Homo sapiens
ggccttaagaagtgc

SEQ ID NO: 1276835 - DNA, 15 bp, Homo sapiens
tggccttaagaagtg

SEQ ID NO: 1276836 - DNA, 15 bp, Homo sapiens
gtggccttaagaagt

SEQ ID NO: 1276837 - DNA, 15 bp, Homo sapiens
agtggccttaagaag

SEQ ID NO: 1276838 - DNA, 15 bp, Homo sapiens
cagtggccttaagaa

SEQ ID NO: 1276839 - DNA, 15 bp, Homo sapiens
ccagtggccttaaga

SEQ ID NO: 1276840 - DNA, 15 bp, Homo sapiens
cccagtggccttaag

SEQ ID NO: 1276841 - DNA, 15 bp, Homo sapiens
ccccagtggccttaa

SEQ ID NO: 1276842 - DNA, 15 bp, Homo sapiens
tccccagtggcctta

SEQ ID NO: 1276843 - DNA, 15 bp, Homo sapiens
tgctccccagtggcc

SEQ ID NO: 1276844 - DNA, 15 bp, Homo sapiens
ctgctccccagtggc

SEQ ID NO: 1276845 - DNA, 15 bp, Homo sapiens
cctgctccccagtgg

SEQ ID NO: 1276846 - DNA, 15 bp, Homo sapiens
ccctgctccccagtg

SEQ ID NO: 1276847 - DNA, 15 bp, Homo sapiens
accctgctccccagt

SEQ ID NO: 1276848 - DNA, 15 bp, Homo sapiens
caccctgctccccag

SEQ ID NO: 1276849 - DNA, 15 bp, Homo sapiens
ccaccctgctcccca

SEQ ID NO: 1276850 - DNA, 15 bp, Homo sapiens
cccaccctgctcccc

SEQ ID NO: 1276851 - DNA, 15 bp, Homo sapiens
gcccaccctgctccc

SEQ ID NO: 1276852 - DNA, 15 bp, Homo sapiens
tgcccaccctgctcc

SEQ ID NO: 1276853 - DNA, 15 bp, Homo sapiens
ctgcccaccctgctc

SEQ ID NO: 1276854 - DNA, 15 bp, Homo sapiens
actgcccaccctgct

SEQ ID NO: 1276855 - DNA, 15 bp, Homo sapiens
tactgcccaccctgc

SEQ ID NO: 1276856 - DNA, 15 bp, Homo sapiens
ctactgcccaccctg

SEQ ID NO: 1276857 - DNA, 15 bp, Homo sapiens
gctactgcccaccct

SEQ ID NO: 1276858 - DNA, 15 bp, Homo sapiens
agctactgcccaccc

SEQ ID NO: 1276859 - DNA, 15 bp, Homo sapiens
tagctactgcccacc

SEQ ID NO: 1276860 - DNA, 15 bp, Homo sapiens
gtagctactgcccac

SEQ ID NO: 1276861 - DNA, 15 bp, Homo sapiens
tgtagctactgccca

SEQ ID NO: 1276862 - DNA, 15 bp, Homo sapiens
ctgtagctactgccc

SEQ ID NO: 1276863 - DNA, 15 bp, Homo sapiens
cctgtagctactgcc

SEQ ID NO: 1276864 - DNA, 15 bp, Homo sapiens
ccctgtagctactgc

SEQ ID NO: 1276865 - DNA, 15 bp, Homo sapiens
accctgtagctactg

SEQ ID NO: 1276866 - DNA, 15 bp, Homo sapiens
caccctgtagctact

SEQ ID NO: 1276867 - DNA, 15 bp, Homo sapiens
tcaccctgtagctac

SEQ ID NO: 1276868 - DNA, 15 bp, Homo sapiens
ctcaccctgtagcta

SEQ ID NO: 1276869 - DNA, 15 bp, Homo sapiens
cctcaccctgtagct

SEQ ID NO: 1276870 - DNA, 15 bp, Homo sapiens
ccctcaccctgtagc

SEQ ID NO: 1276871 - DNA, 15 bp, Homo sapiens
accctcaccctgtag

SEQ ID NO: 1276872 - DNA, 15 bp, Homo sapiens
aaccctcaccctgta

SEQ ID NO: 1276873 - DNA, 15 bp, Homo sapiens
gaaccctcaccctgt

SEQ ID NO: 1276874 - DNA, 15 bp, Homo sapiens
agaaccctcaccctg

SEQ ID NO: 1276875 - DNA, 15 bp, Homo sapiens
gagaaccctcaccct

SEQ ID NO: 1276876 - DNA, 15 bp, Homo sapiens
agagaaccctcaccc

SEQ ID NO: 1276877 - DNA, 15 bp, Homo sapiens
cagagaaccctcacc

SEQ ID NO: 1276878 - DNA, 15 bp, Homo sapiens
gcagagaaccctcac

SEQ ID NO: 1276879 - DNA, 15 bp, Homo sapiens
agcagagaaccctca

SEQ ID NO: 1276880 - DNA, 15 bp, Homo sapiens
aagcagagaaccctc

SEQ ID NO: 1276881 - DNA, 15 bp, Homo sapiens
gaagcagagaaccct

SEQ ID NO: 1276882 - DNA, 15 bp, Homo sapiens
agaagcagagaaccc

SEQ ID NO: 1276883 - DNA, 15 bp, Homo sapiens
cagaagcagagaacc

SEQ ID NO: 1276884 - DNA, 15 bp, Homo sapiens
tcagaagcagagaac

SEQ ID NO: 1276885 - DNA, 15 bp, Homo sapiens
ttcagaagcagagaa

SEQ ID NO: 1276886 - DNA, 15 bp, Homo sapiens
tttcagaagcagaga

SEQ ID NO: 1276887 - DNA, 15 bp, Homo sapiens
ttttcagaagcagag

SEQ ID NO: 1276888 - DNA, 15 bp, Homo sapiens
cttttcagaagcaga

SEQ ID NO: 1276889 - DNA, 15 bp, Homo sapiens
ccttttcagaagcag

SEQ ID NO: 1276890 - DNA, 15 bp, Homo sapiens
cccttttcagaagca

SEQ ID NO: 1276891 - DNA, 15 bp, Homo sapiens
ccccttttcagaagc

SEQ ID NO: 1276892 - DNA, 15 bp, Homo sapiens
tccccttttcagaag

SEQ ID NO: 1276893 - DNA, 15 bp, Homo sapiens
ctccccttttcagaa

SEQ ID NO: 1276894 - DNA, 15 bp, Homo sapiens
cctccccttttcaga

SEQ ID NO: 1276895 - DNA, 15 bp, Homo sapiens
ccctccccttttcag

SEQ ID NO: 1276896 - DNA, 15 bp, Homo sapiens
tccctccccttttca

SEQ ID NO: 1276897 - DNA, 15 bp, Homo sapiens
ttccctccccttttc

SEQ ID NO: 1276898 - DNA, 15 bp, Homo sapiens
cttccctcccctttt

SEQ ID NO: 1276899 - DNA, 15 bp, Homo sapiens
tcttccctccccttt

SEQ ID NO: 1276900 - DNA, 15 bp, Homo sapiens
ctcttccctcccctt

SEQ ID NO: 1276901 - DNA, 15 bp, Homo sapiens
actcttccctcccct

SEQ ID NO: 1276902 - DNA, 15 bp, Homo sapiens
cactcttccctcccc

SEQ ID NO: 1276903 - DNA, 15 bp, Homo sapiens
ccactcttccctccc

SEQ ID NO: 1276904 - DNA, 15 bp, Homo sapiens
cccactcttccctcc

SEQ ID NO: 1276905 - DNA, 15 bp, Homo sapiens
tcccactcttccctc

SEQ ID NO: 1276906 - DNA, 15 bp, Homo sapiens
ttcccactcttccct

SEQ ID NO: 1276907 - DNA, 15 bp, Homo sapiens
cttcccactcttccc

SEQ ID NO: 1276908 - DNA, 15 bp, Homo sapiens
ccttcccactcttcc

SEQ ID NO: 1276909 - DNA, 15 bp, Homo sapiens
tccttcccactcttc

SEQ ID NO: 1276910 - DNA, 15 bp, Homo sapiens
gtccttcccactctt

SEQ ID NO: 1276911 - DNA, 15 bp, Homo sapiens
agtccttcccactct

SEQ ID NO: 1276912 - DNA, 15 bp, Homo sapiens
cagtccttcccactc

SEQ ID NO: 1276913 - DNA, 15 bp, Homo sapiens
gcagtccttcccact

SEQ ID NO: 1276914 - DNA, 15 bp, Homo sapiens
tgcagtccttcccac

SEQ ID NO: 1276915 - DNA, 15 bp, Homo sapiens
atgcagtccttccca

SEQ ID NO: 1276916 - DNA, 15 bp, Homo sapiens
gatgcagtccttccc

SEQ ID NO: 1276917 - DNA, 15 bp, Homo sapiens
agatgcagtccttcc

SEQ ID NO: 1276918 - DNA, 15 bp, Homo sapiens
aagatgcagtccttc

SEQ ID NO: 1276919 - DNA, 15 bp, Homo sapiens
caagatgcagtcctt

SEQ ID NO: 1276920 - DNA, 15 bp, Homo sapiens
acaagatgcagtcct

SEQ ID NO: 1276921 - DNA, 15 bp, Homo sapiens
cacaagatgcagtcc

SEQ ID NO: 1276922 - DNA, 15 bp, Homo sapiens
ccacaagatgcagtc

SEQ ID NO: 1276923 - DNA, 15 bp, Homo sapiens
cccacaagatgcagt

SEQ ID NO: 1276924 - DNA, 15 bp, Homo sapiens
acccacaagatgcag

SEQ ID NO: 1276925 - DNA, 15 bp, Homo sapiens
aacccacaagatgca

SEQ ID NO: 1276926 - DNA, 15 bp, Homo sapiens
caacccacaagatgc

SEQ ID NO: 1276927 - DNA, 15 bp, Homo sapiens
tcaacccacaagatg

SEQ ID NO: 1276928 - DNA, 15 bp, Homo sapiens
ctcaacccacaagat

SEQ ID NO: 1276929 - DNA, 15 bp, Homo sapiens
actcaacccacaaga

SEQ ID NO: 1276930 - DNA, 15 bp, Homo sapiens
cactcaacccacaag

SEQ ID NO: 1276931 - DNA, 15 bp, Homo sapiens
acactcaacccacaa

SEQ ID NO: 1276932 - DNA, 15 bp, Homo sapiens
gacactcaacccaca

SEQ ID NO: 1276933 - DNA, 15 bp, Homo sapiens
agacactcaacccac

SEQ ID NO: 1276934 - DNA, 15 bp, Homo sapiens
cagacactcaaccca

SEQ ID NO: 1276935 - DNA, 15 bp, Homo sapiens
gcagacactcaaccc

SEQ ID NO: 1276936 - DNA, 15 bp, Homo sapiens
agcagacactcaacc

SEQ ID NO: 1276937 - DNA, 15 bp, Homo sapiens
gagcagacactcaac

SEQ ID NO: 1276938 - DNA, 15 bp, Homo sapiens
tgagcagacactcaa

SEQ ID NO: 1276939 - DNA, 15 bp, Homo sapiens
ctgagcagacactca

SEQ ID NO: 1276940 - DNA, 15 bp, Homo sapiens
actgagcagacactc

SEQ ID NO: 1276941 - DNA, 15 bp, Homo sapiens
gactgagcagacact

SEQ ID NO: 1276942 - DNA, 15 bp, Homo sapiens
tgactgagcagacac

SEQ ID NO: 1276943 - DNA, 15 bp, Homo sapiens
gtgactgagcagaca

SEQ ID NO: 1276944 - DNA, 15 bp, Homo sapiens
tgtgactgagcagac

SEQ ID NO: 1276945 - DNA, 15 bp, Homo sapiens
ttgtgactgagcaga

SEQ ID NO: 1276946 - DNA, 15 bp, Homo sapiens
cttgtgactgagcag

SEQ ID NO: 1276947 - DNA, 15 bp, Homo sapiens
tcttgtgactgagca

SEQ ID NO: 1276948 - DNA, 15 bp, Homo sapiens
gtcttgtgactgagc

SEQ ID NO: 1276949 - DNA, 15 bp, Homo sapiens
tgtcttgtgactgag

SEQ ID NO: 1276950 - DNA, 15 bp, Homo sapiens
ttgtcttgtgactga

SEQ ID NO: 1276951 - DNA, 15 bp, Homo sapiens
attgtcttgtgactg

SEQ ID NO: 1276952 - DNA, 15 bp, Homo sapiens
tattgtcttgtgact

SEQ ID NO: 1276953 - DNA, 15 bp, Homo sapiens
ctattgtcttgtgac

SEQ ID NO: 1276954 - DNA, 15 bp, Homo sapiens
tctattgtcttgtga

SEQ ID NO: 1276955 - DNA, 15 bp, Homo sapiens
gtctattgtcttgtg

SEQ ID NO: 1276956 - DNA, 15 bp, Homo sapiens
agtctattgtcttgt

SEQ ID NO: 1276957 - DNA, 15 bp, Homo sapiens
tagtctattgtcttg

SEQ ID NO: 1276958 - DNA, 15 bp, Homo sapiens
gtagtctattgtctt

SEQ ID NO: 1276959 - DNA, 15 bp, Homo sapiens
ttgtagtctattgtc

SEQ ID NO: 1276960 - DNA, 15 bp, Homo sapiens
cttgtagtctattgt

SEQ ID NO: 1276961 - DNA, 15 bp, Homo sapiens
ccttgtagtctattg

SEQ ID NO: 1276962 - DNA, 15 bp, Homo sapiens
accttgtagtctatt

SEQ ID NO: 1276963 - DNA, 15 bp, Homo sapiens
taccttgtagtctat

SEQ ID NO: 1276964 - DNA, 15 bp, Homo sapiens
ctaccttgtagtcta

SEQ ID NO: 1276965 - DNA, 15 bp, Homo sapiens
tctaccttgtagtct

SEQ ID NO: 1276966 - DNA, 15 bp, Homo sapiens
gtctaccttgtagtc

SEQ ID NO: 1276967 - DNA, 15 bp, Homo sapiens
agtctaccttgtagt

SEQ ID NO: 1276968 - DNA, 15 bp, Homo sapiens
aagtctaccttgtag

SEQ ID NO: 1276969 - DNA, 15 bp, Homo sapiens
gaagtctaccttgta

SEQ ID NO: 1276970 - DNA, 15 bp, Homo sapiens
agaagtctaccttgt

SEQ ID NO: 1276971 - DNA, 15 bp, Homo sapiens
tagaagtctaccttg

SEQ ID NO: 1276972 - DNA, 15 bp, Homo sapiens
ttagaagtctacctt

SEQ ID NO: 1276973 - DNA, 15 bp, Homo sapiens
cttagaagtctacct

SEQ ID NO: 1276974 - DNA, 15 bp, Homo sapiens
acttagaagtctacc

SEQ ID NO: 1276975 - DNA, 15 bp, Homo sapiens
aacttagaagtctac

SEQ ID NO: 1276976 - DNA, 15 bp, Homo sapiens
aaacttagaagtcta

SEQ ID NO: 1276977 - DNA, 15 bp, Homo sapiens
aaaacttagaagtct

SEQ ID NO: 1276978 - DNA, 15 bp, Homo sapiens
aaaaacttagaagtc

SEQ ID NO: 1276979 - DNA, 15 bp, Homo sapiens
aaaaaacttagaagt

SEQ ID NO: 1276980 - DNA, 15 bp, Homo sapiens
taaaaaacttagaag

SEQ ID NO: 1276981 - DNA, 15 bp, Homo sapiens
gtaaaaaacttagaa

SEQ ID NO: 1276982 - DNA, 15 bp, Homo sapiens
agtaaaaaacttaga

SEQ ID NO: 1276983 - DNA, 15 bp, Homo sapiens
gagtaaaaaacttag

SEQ ID NO: 1276984 - DNA, 15 bp, Homo sapiens
agagtaaaaaactta

SEQ ID NO: 1276985 - DNA, 15 bp, Homo sapiens
cagagtaaaaaactt

SEQ ID NO: 1276986 - DNA, 15 bp, Homo sapiens
ccagagtaaaaaact

SEQ ID NO: 1276987 - DNA, 15 bp, Homo sapiens
accagagtaaaaaac

SEQ ID NO: 1276988 - DNA, 15 bp, Homo sapiens
gaccagagtaaaaaa

SEQ ID NO: 1276989 - DNA, 15 bp, Homo sapiens
ggaccagagtaaaaa

SEQ ID NO: 1276990 - DNA, 15 bp, Homo sapiens
gggaccagagtaaaa

SEQ ID NO: 1276991 - DNA, 15 bp, Homo sapiens
agggaccagagtaaa

SEQ ID NO: 1276992 - DNA, 15 bp, Homo sapiens
tagggaccagagtaa

SEQ ID NO: 1276993 - DNA, 15 bp, Homo sapiens
ttagggaccagagta

SEQ ID NO: 1276994 - DNA, 15 bp, Homo sapiens
gttagggaccagagt

SEQ ID NO: 1276995 - DNA, 15 bp, Homo sapiens
agttagggaccagag

SEQ ID NO: 1276996 - DNA, 15 bp, Homo sapiens
gagttagggaccaga

SEQ ID NO: 1276997 - DNA, 15 bp, Homo sapiens
ggagttagggaccag

SEQ ID NO: 1276998 - DNA, 15 bp, Homo sapiens
gggagttagggacca

SEQ ID NO: 1276999 - DNA, 15 bp, Homo sapiens
tgggagttagggacc

SEQ ID NO: 1277000 - DNA, 15 bp, Homo sapiens
ctgggagttagggac

SEQ ID NO: 1277001 - DNA, 15 bp, Homo sapiens
tctgggagttaggga

SEQ ID NO: 1277002 - DNA, 15 bp, Homo sapiens
atctgggagttaggg

SEQ ID NO: 1277003 - DNA, 15 bp, Homo sapiens
catctgggagttagg

SEQ ID NO: 1277004 - DNA, 15 bp, Homo sapiens
ccatctgggagttag

SEQ ID NO: 1277005 - DNA, 15 bp, Homo sapiens
gccatctgggagtta

SEQ ID NO: 1277006 - DNA, 15 bp, Homo sapiens
tgccatctgggagtt

SEQ ID NO: 1277007 - DNA, 15 bp, Homo sapiens
gtgccatctgggagt

SEQ ID NO: 1277008 - DNA, 15 bp, Homo sapiens
agtgccatctgggag

SEQ ID NO: 1277009 - DNA, 15 bp, Homo sapiens
aagtgccatctggga

SEQ ID NO: 1277010 - DNA, 15 bp, Homo sapiens
gaagtgccatctggg

SEQ ID NO: 1277011 - DNA, 15 bp, Homo sapiens
agaagtgccatctgg

SEQ ID NO: 1277012 - DNA, 15 bp, Homo sapiens
cagaagtgccatctg

SEQ ID NO: 1277013 - DNA, 15 bp, Homo sapiens
ccagaagtgccatct

SEQ ID NO: 1277014 - DNA, 15 bp, Homo sapiens
tccagaagtgccatc

SEQ ID NO: 1277015 - DNA, 15 bp, Homo sapiens
gtccagaagtgccat

SEQ ID NO: 1277016 - DNA, 15 bp, Homo sapiens
ggtccagaagtgcca

SEQ ID NO: 1277017 - DNA, 15 bp, Homo sapiens
aggtccagaagtgcc

SEQ ID NO: 1277018 - DNA, 15 bp, Homo sapiens
taggtccagaagtgc

SEQ ID NO: 1277019 - DNA, 15 bp, Homo sapiens
gtaggtccagaagtg

SEQ ID NO: 1277020 - DNA, 15 bp, Homo sapiens
ggtaggtccagaagt

SEQ ID NO: 1277021 - DNA, 15 bp, Homo sapiens
gggtaggtccagaag

SEQ ID NO: 1277022 - DNA, 15 bp, Homo sapiens
agggtaggtccagaa

SEQ ID NO: 1277023 - DNA, 15 bp, Homo sapiens
cagggtaggtccaga

SEQ ID NO: 1277024 - DNA, 15 bp, Homo sapiens
ccagggtaggtccag

SEQ ID NO: 1277025 - DNA, 15 bp, Homo sapiens
cccagggtaggtcca

SEQ ID NO: 1277026 - DNA, 15 bp, Homo sapiens
ccccagggtaggtcc

SEQ ID NO: 1277027 - DNA, 15 bp, Homo sapiens
tccccagggtaggtc

SEQ ID NO: 1277028 - DNA, 15 bp, Homo sapiens
gtccccagggtaggt

SEQ ID NO: 1277029 - DNA, 15 bp, Homo sapiens
ggtccccagggtagg

SEQ ID NO: 1277030 - DNA, 15 bp, Homo sapiens
aggtccccagggtag

SEQ ID NO: 1277031 - DNA, 15 bp, Homo sapiens
gaggtccccagggta

SEQ ID NO: 1277032 - DNA, 15 bp, Homo sapiens
tgaggtccccagggt

SEQ ID NO: 1277033 - DNA, 15 bp, Homo sapiens
atgaggtccccaggg

SEQ ID NO: 1277034 - DNA, 15 bp, Homo sapiens
gatgaggtccccagg

SEQ ID NO: 1277035 - DNA, 15 bp, Homo sapiens
tgatgaggtccccag

SEQ ID NO: 1277036 - DNA, 15 bp, Homo sapiens
gtgatgaggtcccca

SEQ ID NO: 1277037 - DNA, 15 bp, Homo sapiens
ggtgatgaggtcccc

SEQ ID NO: 1277038 - DNA, 15 bp, Homo sapiens
gggtgatgaggtccc

SEQ ID NO: 1277039 - DNA, 15 bp, Homo sapiens
agggtgatgaggtcc

SEQ ID NO: 1277040 - DNA, 15 bp, Homo sapiens
cagggtgatgaggtc

SEQ ID NO: 1277041 - DNA, 15 bp, Homo sapiens
tcagggtgatgaggt

SEQ ID NO: 1277042 - DNA, 15 bp, Homo sapiens
ttcagggtgatgagg

SEQ ID NO: 1277043 - DNA, 15 bp, Homo sapiens
tttcagggtgatgag

SEQ ID NO: 1277044 - DNA, 15 bp, Homo sapiens
ctttcagggtgatga

SEQ ID NO: 1277045 - DNA, 15 bp, Homo sapiens
tctttcagggtgatg

SEQ ID NO: 1277046 - DNA, 15 bp, Homo sapiens
ttctttcagggtgat

SEQ ID NO: 1277047 - DNA, 15 bp, Homo sapiens
tttctttcagggtga

SEQ ID NO: 1277048 - DNA, 15 bp, Homo sapiens
ctttctttcagggtg

SEQ ID NO: 1277049 - DNA, 15 bp, Homo sapiens
cctttctttcagggt

SEQ ID NO: 1277050 - DNA, 15 bp, Homo sapiens
tcctttctttcaggg

SEQ ID NO: 1277051 - DNA, 15 bp, Homo sapiens
gtcctttctttcagg

SEQ ID NO: 1277052 - DNA, 15 bp, Homo sapiens
tgtcctttctttcag

SEQ ID NO: 1277053 - DNA, 15 bp, Homo sapiens
gtgtcctttctttca

SEQ ID NO: 1277054 - DNA, 15 bp, Homo sapiens
tgtgtcctttctttc

SEQ ID NO: 1277055 - DNA, 15 bp, Homo sapiens
ctgtgtcctttcttt

SEQ ID NO: 1277056 - DNA, 15 bp, Homo sapiens
cctgtgtcctttctt

SEQ ID NO: 1277057 - DNA, 15 bp, Homo sapiens
gcctgtgtcctttct

SEQ ID NO: 1277058 - DNA, 15 bp, Homo sapiens
ggcctgtgtcctttc

SEQ ID NO: 1277059 - DNA, 15 bp, Homo sapiens
aggcctgtgtccttt

SEQ ID NO: 1277060 - DNA, 15 bp, Homo sapiens
caggcctgtgtcctt

SEQ ID NO: 1277061 - DNA, 15 bp, Homo sapiens
ccaggcctgtgtcct

SEQ ID NO: 1277062 - DNA, 15 bp, Homo sapiens
gccaggcctgtgtcc

SEQ ID NO: 1277063 - DNA, 15 bp, Homo sapiens
agccaggcctgtgtc

SEQ ID NO: 1277064 - DNA, 15 bp, Homo sapiens
cagccaggcctgtgt

SEQ ID NO: 1277065 - DNA, 15 bp, Homo sapiens
ccagccaggcctgtg

SEQ ID NO: 1277066 - DNA, 15 bp, Homo sapiens
gccagccaggcctgt

SEQ ID NO: 1277067 - DNA, 15 bp, Homo sapiens
agccagccaggcctg

SEQ ID NO: 1277068 - DNA, 15 bp, Homo sapiens
aagccagccaggcct

SEQ ID NO: 1277069 - DNA, 15 bp, Homo sapiens
aaagccagccaggcc

SEQ ID NO: 1277070 - DNA, 15 bp, Homo sapiens
caaagccagccaggc

SEQ ID NO: 1277071 - DNA, 15 bp, Homo sapiens
gcaaagccagccagg

SEQ ID NO: 1277072 - DNA, 15 bp, Homo sapiens
ggcaaagccagccag

SEQ ID NO: 1277073 - DNA, 15 bp, Homo sapiens
tggcaaagccagcca

SEQ ID NO: 1277074 - DNA, 15 bp, Homo sapiens
atggcaaagccagcc

SEQ ID NO: 1277075 - DNA, 15 bp, Homo sapiens
gatggcaaagccagc

SEQ ID NO: 1277076 - DNA, 15 bp, Homo sapiens
agatggcaaagccag

SEQ ID NO: 1277077 - DNA, 15 bp, Homo sapiens
cagatggcaaagcca

SEQ ID NO: 1277078 - DNA, 15 bp, Homo sapiens
gcagatggcaaagcc

SEQ ID NO: 1277079 - DNA, 15 bp, Homo sapiens
agcagatggcaaagc

SEQ ID NO: 1277080 - DNA, 15 bp, Homo sapiens
cagcagatggcaaag

SEQ ID NO: 1277081 - DNA, 15 bp, Homo sapiens
tcagcagatggcaaa

SEQ ID NO: 1277082 - DNA, 15 bp, Homo sapiens
atcagcagatggcaa

SEQ ID NO: 1277083 - DNA, 15 bp, Homo sapiens
aatcagcagatggca

SEQ ID NO: 1277084 - DNA, 15 bp, Homo sapiens
taatcagcagatggc

SEQ ID NO: 1277085 - DNA, 15 bp, Homo sapiens
ataatcagcagatgg

SEQ ID NO: 1277086 - DNA, 15 bp, Homo sapiens
aataatcagcagatg

SEQ ID NO: 1277087 - DNA, 15 bp, Homo sapiens
caataatcagcagat

SEQ ID NO: 1277088 - DNA, 15 bp, Homo sapiens
tcaataatcagcaga

SEQ ID NO: 1277089 - DNA, 15 bp, Homo sapiens
ctcaataatcagcag

SEQ ID NO: 1277090 - DNA, 15 bp, Homo sapiens
gctcaataatcagca

SEQ ID NO: 1277091 - DNA, 15 bp, Homo sapiens
ggctcaataatcagc

SEQ ID NO: 1277092 - DNA, 15 bp, Homo sapiens
gggctcaataatcag

SEQ ID NO: 1277093 - DNA, 15 bp, Homo sapiens
ggggctcaataatca

SEQ ID NO: 1277094 - DNA, 15 bp, Homo sapiens
tggggctcaataatc

SEQ ID NO: 1277095 - DNA, 15 bp, Homo sapiens
ctggggctcaataat

SEQ ID NO: 1277096 - DNA, 15 bp, Homo sapiens
cctggggctcaataa

SEQ ID NO: 1277097 - DNA, 15 bp, Homo sapiens
ccctggggctcaata

SEQ ID NO: 1277098 - DNA, 15 bp, Homo sapiens
gccctggggctcaat

SEQ ID NO: 1277099 - DNA, 15 bp, Homo sapiens
ggccctggggctcaa

SEQ ID NO: 1277100 - DNA, 15 bp, Homo sapiens
aggccctggggctca

SEQ ID NO: 1277101 - DNA, 15 bp, Homo sapiens
aaggccctggggctc

SEQ ID NO: 1277102 - DNA, 15 bp, Homo sapiens
gaaggccctggggct

SEQ ID NO: 1277103 - DNA, 15 bp, Homo sapiens
tgaaggccctggggc

SEQ ID NO: 1277104 - DNA, 15 bp, Homo sapiens
ctgaaggccctgggg

SEQ ID NO: 1277105 - DNA, 15 bp, Homo sapiens
gctgaaggccctggg

SEQ ID NO: 1277106 - DNA, 15 bp, Homo sapiens
tgctgaaggccctgg

SEQ ID NO: 1277107 - DNA, 15 bp, Homo sapiens
ttgctgaaggccctg

SEQ ID NO: 1277108 - DNA, 15 bp, Homo sapiens
tttgctgaaggccct

SEQ ID NO: 1277109 - DNA, 15 bp, Homo sapiens
gtttgctgaaggccc

SEQ ID NO: 1277110 - DNA, 15 bp, Homo sapiens
tgtttgctgaaggcc

SEQ ID NO: 1277111 - DNA, 15 bp, Homo sapiens
atgtttgctgaaggc

SEQ ID NO: 1277112 - DNA, 15 bp, Homo sapiens
tatgtttgctgaagg

SEQ ID NO: 1277113 - DNA, 15 bp, Homo sapiens
ctatgtttgctgaag

SEQ ID NO: 1277114 - DNA, 15 bp, Homo sapiens
cctatgtttgctgaa

SEQ ID NO: 1277115 - DNA, 15 bp, Homo sapiens
gcctatgtttgctga

SEQ ID NO: 1277116 - DNA, 15 bp, Homo sapiens
tgcctatgtttgctg

SEQ ID NO: 1277117 - DNA, 15 bp, Homo sapiens
ctgcctatgtttgct

SEQ ID NO: 1277118 - DNA, 15 bp, Homo sapiens
actgcctatgtttgc

SEQ ID NO: 1277119 - DNA, 15 bp, Homo sapiens
tactgcctatgtttg

SEQ ID NO: 1277120 - DNA, 15 bp, Homo sapiens
ctactgcctatgttt

SEQ ID NO: 1277121 - DNA, 15 bp, Homo sapiens
gctactgcctatgtt

SEQ ID NO: 1277122 - DNA, 15 bp, Homo sapiens
ggctactgcctatgt

SEQ ID NO: 1277123 - DNA, 15 bp, Homo sapiens
tggctactgcctatg

SEQ ID NO: 1277124 - DNA, 15 bp, Homo sapiens
ctggctactgcctat

SEQ ID NO: 1277125 - DNA, 15 bp, Homo sapiens
tctggctactgccta

SEQ ID NO: 1277126 - DNA, 15 bp, Homo sapiens
ctctggctactgcct

SEQ ID NO: 1277127 - DNA, 15 bp, Homo sapiens
tctctggctactgcc

SEQ ID NO: 1277128 - DNA, 15 bp, Homo sapiens
ctctctggctactgc

SEQ ID NO: 1277129 - DNA, 15 bp, Homo sapiens
actctctggctactg

SEQ ID NO: 1277130 - DNA, 15 bp, Homo sapiens
cactctctggctact

SEQ ID NO: 1277131 - DNA, 15 bp, Homo sapiens
ccactctctggctac

SEQ ID NO: 1277132 - DNA, 15 bp, Homo sapiens
accactctctggcta

SEQ ID NO: 1277133 - DNA, 15 bp, Homo sapiens
aaccactctctggct

SEQ ID NO: 1277134 - DNA, 15 bp, Homo sapiens
taaccactctctggc

SEQ ID NO: 1277135 - DNA, 15 bp, Homo sapiens
gtaaccactctctgg

SEQ ID NO: 1277136 - DNA, 15 bp, Homo sapiens
tgtaaccactctctg

SEQ ID NO: 1277137 - DNA, 15 bp, Homo sapiens
ctgtaaccactctct

SEQ ID NO: 1277138 - DNA, 15 bp, Homo sapiens
gctgtaaccactctc

SEQ ID NO: 1277139 - DNA, 15 bp, Homo sapiens
tgctgtaaccactct

SEQ ID NO: 1277140 - DNA, 15 bp, Homo sapiens
ctgctgtaaccactc

SEQ ID NO: 1277141 - DNA, 15 bp, Homo sapiens
cctgctgtaaccact

SEQ ID NO: 1277142 - DNA, 15 bp, Homo sapiens
gcctgctgtaaccac

SEQ ID NO: 1277143 - DNA, 15 bp, Homo sapiens
ggcctgctgtaacca

SEQ ID NO: 1277144 - DNA, 15 bp, Homo sapiens
aggcctgctgtaacc

SEQ ID NO: 1277145 - DNA, 15 bp, Homo sapiens
gaggcctgctgtaac

SEQ ID NO: 1277146 - DNA, 15 bp, Homo sapiens
cgaggcctgctgtaa

SEQ ID NO: 1277147 - DNA, 15 bp, Homo sapiens
ccgaggcctgctgta

SEQ ID NO: 1277148 - DNA, 15 bp, Homo sapiens
cccgaggcctgctgt

SEQ ID NO: 1277149 - DNA, 15 bp, Homo sapiens
acccgaggcctgctg

SEQ ID NO: 1277150 - DNA, 15 bp, Homo sapiens
tacccgaggcctgct

SEQ ID NO: 1277151 - DNA, 15 bp, Homo sapiens
ttacccgaggcctgc

SEQ ID NO: 1277152 - DNA, 15 bp, Homo sapiens
cttacccgaggcctg

SEQ ID NO: 1277153 - DNA, 15 bp, Homo sapiens
tcttacccgaggcct

SEQ ID NO: 1277154 - DNA, 15 bp, Homo sapiens
gtcttacccgaggcc

SEQ ID NO: 1277155 - DNA, 15 bp, Homo sapiens
ggtcttacccgaggc

SEQ ID NO: 1277156 - DNA, 15 bp, Homo sapiens
gggtcttacccgagg

SEQ ID NO: 1277157 - DNA, 15 bp, Homo sapiens
tgggtcttacccgag

SEQ ID NO: 1277158 - DNA, 15 bp, Homo sapiens
ctgggtcttacccga

SEQ ID NO: 1277159 - DNA, 15 bp, Homo sapiens
actgggtcttacccg

SEQ ID NO: 1277160 - DNA, 15 bp, Homo sapiens
cactgggtcttaccc

SEQ ID NO: 1277161 - DNA, 15 bp, Homo sapiens
gcactgggtcttacc

SEQ ID NO: 1277162 - DNA, 15 bp, Homo sapiens
agcactgggtcttac

SEQ ID NO: 1277163 - DNA, 15 bp, Homo sapiens
cagcactgggtctta

SEQ ID NO: 1277164 - DNA, 15 bp, Homo sapiens
acagcactgggtctt

SEQ ID NO: 1277165 - DNA, 15 bp, Homo sapiens
cacagcactgggtct

SEQ ID NO: 1277166 - DNA, 15 bp, Homo sapiens
gcacagcactgggtc

SEQ ID NO: 1277167 - DNA, 15 bp, Homo sapiens
agcacagcactgggt

SEQ ID NO: 1277168 - DNA, 15 bp, Homo sapiens
cagcacagcactggg

SEQ ID NO: 1277169 - DNA, 15 bp, Homo sapiens
ccagcacagcactgg

SEQ ID NO: 1277170 - DNA, 15 bp, Homo sapiens
gccagcacagcactg

SEQ ID NO: 1277171 - DNA, 15 bp, Homo sapiens
agccagcacagcact

SEQ ID NO: 1277172 - DNA, 15 bp, Homo sapiens
aagccagcacagcac

SEQ ID NO: 1277173 - DNA, 15 bp, Homo sapiens
gaagccagcacagca

SEQ ID NO: 1277174 - DNA, 15 bp, Homo sapiens
tgaagccagcacagc

SEQ ID NO: 1277175 - DNA, 15 bp, Homo sapiens
ctgaagccagcacag

SEQ ID NO: 1277176 - DNA, 15 bp, Homo sapiens
cctgaagccagcaca

SEQ ID NO: 1277177 - DNA, 15 bp, Homo sapiens
acctgaagccagcac

SEQ ID NO: 1277178 - DNA, 15 bp, Homo sapiens
acacctgaagccagc

SEQ ID NO: 1277179 - DNA, 15 bp, Homo sapiens
cacacctgaagccag

SEQ ID NO: 1277180 - DNA, 15 bp, Homo sapiens
tcacacctgaagcca

SEQ ID NO: 1277181 - DNA, 15 bp, Homo sapiens
gtcacacctgaagcc

SEQ ID NO: 1277182 - DNA, 15 bp, Homo sapiens
ggtcacacctgaagc

SEQ ID NO: 1277183 - DNA, 15 bp, Homo sapiens
gggtcacacctgaag

SEQ ID NO: 1277184 - DNA, 15 bp, Homo sapiens
tgggtcacacctgaa

SEQ ID NO: 1277185 - DNA, 15 bp, Homo sapiens
ctgggtcacacctga

SEQ ID NO: 1277186 - DNA, 15 bp, Homo sapiens
actgggtcacacctg

SEQ ID NO: 1277187 - DNA, 15 bp, Homo sapiens
cactgggtcacacct

SEQ ID NO: 1277188 - DNA, 15 bp, Homo sapiens
gcactgggtcacacc

SEQ ID NO: 1277189 - DNA, 15 bp, Homo sapiens
tgcactgggtcacac

SEQ ID NO: 1277190 - DNA, 15 bp, Homo sapiens
ctgcactgggtcaca

SEQ ID NO: 1277191 - DNA, 15 bp, Homo sapiens
actgcactgggtcac

SEQ ID NO: 1277192 - DNA, 15 bp, Homo sapiens
gactgcactgggtca

SEQ ID NO: 1277193 - DNA, 15 bp, Homo sapiens
tgactgcactgggtc

SEQ ID NO: 1277194 - DNA, 15 bp, Homo sapiens
gtgactgcactgggt

SEQ ID NO: 1277195 - DNA, 15 bp, Homo sapiens
tgtgactgcactggg

SEQ ID NO: 1277196 - DNA, 15 bp, Homo sapiens
ctgtgactgcactgg

SEQ ID NO: 1277197 - DNA, 15 bp, Homo sapiens
actgtgactgcactg

SEQ ID NO: 1277198 - DNA, 15 bp, Homo sapiens
cactgtgactgcact

SEQ ID NO: 1277199 - DNA, 15 bp, Homo sapiens
ccactgtgactgcac

SEQ ID NO: 1277200 - DNA, 15 bp, Homo sapiens
accactgtgactgca

SEQ ID NO: 1277201 - DNA, 15 bp, Homo sapiens
caccactgtgactgc

SEQ ID NO: 1277202 - DNA, 15 bp, Homo sapiens
ccaccactgtgactg

SEQ ID NO: 1277203 - DNA, 15 bp, Homo sapiens
accaccactgtgact

SEQ ID NO: 1277204 - DNA, 15 bp, Homo sapiens
caccaccactgtgac

SEQ ID NO: 1277205 - DNA, 15 bp, Homo sapiens
ccaccaccactgtga

SEQ ID NO: 1277206 - DNA, 15 bp, Homo sapiens
gccaccaccactgtg

SEQ ID NO: 1277207 - DNA, 15 bp, Homo sapiens
ggccaccaccactgt

SEQ ID NO: 1277208 - DNA, 15 bp, Homo sapiens
tggccaccaccactg

SEQ ID NO: 1277209 - DNA, 15 bp, Homo sapiens
gtggccaccaccact

SEQ ID NO: 1277210 - DNA, 15 bp, Homo sapiens
tgtggccaccaccac

SEQ ID NO: 1277211 - DNA, 15 bp, Homo sapiens
atgtggccaccacca

SEQ ID NO: 1277212 - DNA, 15 bp, Homo sapiens
catgtggccaccacc

SEQ ID NO: 1277213 - DNA, 15 bp, Homo sapiens
ccatgtggccaccac

SEQ ID NO: 1277214 - DNA, 15 bp, Homo sapiens
cccatgtggccacca

SEQ ID NO: 1277215 - DNA, 15 bp, Homo sapiens
acccatgtggccacc

SEQ ID NO: 1277216 - DNA, 15 bp, Homo sapiens
cacccatgtggccac

SEQ ID NO: 1277217 - DNA, 15 bp, Homo sapiens
gcacccatgtggcca

SEQ ID NO: 1277218 - DNA, 15 bp, Homo sapiens
agcacccatgtggcc

SEQ ID NO: 1277219 - DNA, 15 bp, Homo sapiens
aagcacccatgtggc

SEQ ID NO: 1277220 - DNA, 15 bp, Homo sapiens
caagcacccatgtgg

SEQ ID NO: 1277221 - DNA, 15 bp, Homo sapiens
acaagcacccatgtg

SEQ ID NO: 1277222 - DNA, 15 bp, Homo sapiens
cacaagcacccatgt

SEQ ID NO: 1277223 - DNA, 15 bp, Homo sapiens
acacaagcacccatg

SEQ ID NO: 1277224 - DNA, 15 bp, Homo sapiens
gacacaagcacccat

SEQ ID NO: 1277225 - DNA, 15 bp, Homo sapiens
tgacacaagcaccca

SEQ ID NO: 1277226 - DNA, 15 bp, Homo sapiens
atgacacaagcaccc

SEQ ID NO: 1277227 - DNA, 15 bp, Homo sapiens
aatgacacaagcacc

SEQ ID NO: 1277228 - DNA, 15 bp, Homo sapiens
aaatgacacaagcac

SEQ ID NO: 1277229 - DNA, 15 bp, Homo sapiens
gaaatgacacaagca

SEQ ID NO: 1277230 - DNA, 15 bp, Homo sapiens
tgaaatgacacaagc

SEQ ID NO: 1277231 - DNA, 15 bp, Homo sapiens
gtgaaatgacacaag

SEQ ID NO: 1277232 - DNA, 15 bp, Homo sapiens
ggtgaaatgacacaa

SEQ ID NO: 1277233 - DNA, 15 bp, Homo sapiens
gggtgaaatgacaca

SEQ ID NO: 1277234 - DNA, 15 bp, Homo sapiens
ggggtgaaatgacac

SEQ ID NO: 1277235 - DNA, 15 bp, Homo sapiens
gggggtgaaatgaca

SEQ ID NO: 1277236 - DNA, 15 bp, Homo sapiens
tgggggtgaaatgac

SEQ ID NO: 1277237 - DNA, 15 bp, Homo sapiens
ctgggggtgaaatga

SEQ ID NO: 1277238 - DNA, 15 bp, Homo sapiens
gctgggggtgaaatg

SEQ ID NO: 1277239 - DNA, 15 bp, Homo sapiens
agctgggggtgaaat

SEQ ID NO: 1277240 - DNA, 15 bp, Homo sapiens
aagctgggggtgaaa

SEQ ID NO: 1277241 - DNA, 15 bp, Homo sapiens
aaagctgggggtgaa

SEQ ID NO: 1277242 - DNA, 15 bp, Homo sapiens
taaagctgggggtga

SEQ ID NO: 1277243 - DNA, 15 bp, Homo sapiens
ctaaagctgggggtg

SEQ ID NO: 1277244 - DNA, 15 bp, Homo sapiens
cctaaagctgggggt

SEQ ID NO: 1277245 - DNA, 15 bp, Homo sapiens
acctaaagctggggg

SEQ ID NO: 1277246 - DNA, 15 bp, Homo sapiens
cacctaaagctgggg

SEQ ID NO: 1277247 - DNA, 15 bp, Homo sapiens
ccacctaaagctggg

SEQ ID NO: 1277248 - DNA, 15 bp, Homo sapiens
gccacctaaagctgg

SEQ ID NO: 1277249 - DNA, 15 bp, Homo sapiens
agccacctaaagctg

SEQ ID NO: 1277250 - DNA, 15 bp, Homo sapiens
gagccacctaaagct

SEQ ID NO: 1277251 - DNA, 15 bp, Homo sapiens
tgagccacctaaagc

SEQ ID NO: 1277252 - DNA, 15 bp, Homo sapiens
ctgagccacctaaag

SEQ ID NO: 1277253 - DNA, 15 bp, Homo sapiens
tctgagccacctaaa

SEQ ID NO: 1277254 - DNA, 15 bp, Homo sapiens
ttctgagccacctaa

SEQ ID NO: 1277255 - DNA, 15 bp, Homo sapiens
gttctgagccaccta

SEQ ID NO: 1277256 - DNA, 15 bp, Homo sapiens
tgttctgagccacct

SEQ ID NO: 1277257 - DNA, 15 bp, Homo sapiens
ctgttctgagccacc

SEQ ID NO: 1277258 - DNA, 15 bp, Homo sapiens
tctgttctgagccac

SEQ ID NO: 1277259 - DNA, 15 bp, Homo sapiens
ttctgttctgagcca

SEQ ID NO: 1277260 - DNA, 15 bp, Homo sapiens
tttctgttctgagcc

SEQ ID NO: 1277261 - DNA, 15 bp, Homo sapiens
ctttctgttctgagc

SEQ ID NO: 1277262 - DNA, 15 bp, Homo sapiens
tctttctgttctgag

SEQ ID NO: 1277263 - DNA, 15 bp, Homo sapiens
ctctttctgttctga

SEQ ID NO: 1277264 - DNA, 15 bp, Homo sapiens
tctctttctgttctg

SEQ ID NO: 1277265 - DNA, 15 bp, Homo sapiens
ctctctttctgttct

SEQ ID NO: 1277266 - DNA, 15 bp, Homo sapiens
tctctctttctgttc

SEQ ID NO: 1277267 - DNA, 15 bp, Homo sapiens
atctctctttctgtt

SEQ ID NO: 1277268 - DNA, 15 bp, Homo sapiens
aatctctctttctgt

SEQ ID NO: 1277269 - DNA, 15 bp, Homo sapiens
gaatctctctttctg

SEQ ID NO: 1277270 - DNA, 15 bp, Homo sapiens
agaatctctctttct

SEQ ID NO: 1277271 - DNA, 15 bp, Homo sapiens
cagaatctctctttc

SEQ ID NO: 1277272 - DNA, 15 bp, Homo sapiens
acagaatctctcttt

SEQ ID NO: 1277273 - DNA, 15 bp, Homo sapiens
tacagaatctctctt

SEQ ID NO: 1277274 - DNA, 15 bp, Homo sapiens
atacagaatctctct

SEQ ID NO: 1277275 - DNA, 15 bp, Homo sapiens
catacagaatctctc

SEQ ID NO: 1277276 - DNA, 15 bp, Homo sapiens
acatacagaatctct

SEQ ID NO: 1277277 - DNA, 15 bp, Homo sapiens
tacatacagaatctc

SEQ ID NO: 1277278 - DNA, 15 bp, Homo sapiens
atacatacagaatct

SEQ ID NO: 1277279 - DNA, 15 bp, Homo sapiens
catacatacagaatc

SEQ ID NO: 1277280 - DNA, 15 bp, Homo sapiens
acatacatacagaat

SEQ ID NO: 1277281 - DNA, 15 bp, Homo sapiens
aacatacatacagaa

SEQ ID NO: 1277282 - DNA, 15 bp, Homo sapiens
aaacatacatacaga

SEQ ID NO: 1277283 - DNA, 15 bp, Homo sapiens
caaacatacatacag

SEQ ID NO: 1277284 - DNA, 15 bp, Homo sapiens
ccaaacatacataca

SEQ ID NO: 1277285 - DNA, 15 bp, Homo sapiens
cccaaacatacatac

SEQ ID NO: 1277286 - DNA, 15 bp, Homo sapiens
tcccaaacatacata

SEQ ID NO: 1277287 - DNA, 15 bp, Homo sapiens
ctcccaaacatacat

SEQ ID NO: 1277288 - DNA, 15 bp, Homo sapiens
tctcccaaacataca

SEQ ID NO: 1277289 - DNA, 15 bp, Homo sapiens
ttctcccaaacatac

SEQ ID NO: 1277290 - DNA, 15 bp, Homo sapiens
tttctcccaaacata

SEQ ID NO: 1277291 - DNA, 15 bp, Homo sapiens
ctttctcccaaacat

SEQ ID NO: 1277292 - DNA, 15 bp, Homo sapiens
actttctcccaaaca

SEQ ID NO: 1277293 - DNA, 15 bp, Homo sapiens
tactttctcccaaac

SEQ ID NO: 1277294 - DNA, 15 bp, Homo sapiens
ttactttctcccaaa

SEQ ID NO: 1277295 - DNA, 15 bp, Homo sapiens
tttactttctcccaa

SEQ ID NO: 1277296 - DNA, 15 bp, Homo sapiens
ttttactttctccca

SEQ ID NO: 1277297 - DNA, 15 bp, Homo sapiens
cttttactttctccc

SEQ ID NO: 1277298 - DNA, 15 bp, Homo sapiens
tcttttactttctcc

SEQ ID NO: 1277299 - DNA, 15 bp, Homo sapiens
ctcttttactttctc

SEQ ID NO: 1277300 - DNA, 15 bp, Homo sapiens
cctcttttactttct

SEQ ID NO: 1277301 - DNA, 15 bp, Homo sapiens
tcctcttttactttc

SEQ ID NO: 1277302 - DNA, 15 bp, Homo sapiens
ctcctcttttacttt

SEQ ID NO: 1277303 - DNA, 15 bp, Homo sapiens
tctcctcttttactt

SEQ ID NO: 1277304 - DNA, 15 bp, Homo sapiens
ttctcctcttttact

SEQ ID NO: 1277305 - DNA, 15 bp, Homo sapiens
gttctcctcttttac

SEQ ID NO: 1277306 - DNA, 15 bp, Homo sapiens
tgttctcctctttta

SEQ ID NO: 1277307 - DNA, 15 bp, Homo sapiens
ttgttctcctctttt

SEQ ID NO: 1277308 - DNA, 15 bp, Homo sapiens
cttgttctcctcttt

SEQ ID NO: 1277309 - DNA, 15 bp, Homo sapiens
tcttgttctcctctt

SEQ ID NO: 1277310 - DNA, 15 bp, Homo sapiens
ctcttgttctcctct

SEQ ID NO: 1277311 - DNA, 15 bp, Homo sapiens
cctcttgttctcctc

SEQ ID NO: 1277312 - DNA, 15 bp, Homo sapiens
gcctcttgttctcct

SEQ ID NO: 1277313 - DNA, 15 bp, Homo sapiens
agcctcttgttctcc

SEQ ID NO: 1277314 - DNA, 15 bp, Homo sapiens
gagcctcttgttctc

SEQ ID NO: 1277315 - DNA, 15 bp, Homo sapiens
agagcctcttgttct

SEQ ID NO: 1277316 - DNA, 15 bp, Homo sapiens
cagagcctcttgttc

SEQ ID NO: 1277317 - DNA, 15 bp, Homo sapiens
gcagagcctcttgtt

SEQ ID NO: 1277318 - DNA, 15 bp, Homo sapiens
ggcagagcctcttgt

SEQ ID NO: 1277319 - DNA, 15 bp, Homo sapiens
aggcagagcctcttg

SEQ ID NO: 1277320 - DNA, 15 bp, Homo sapiens
caggcagagcctctt

SEQ ID NO: 1277321 - DNA, 15 bp, Homo sapiens
ccaggcagagcctct

SEQ ID NO: 1277322 - DNA, 15 bp, Homo sapiens
accaggcagagcctc

SEQ ID NO: 1277323 - DNA, 15 bp, Homo sapiens
taccaggcagagcct

SEQ ID NO: 1277324 - DNA, 15 bp, Homo sapiens
ttaccaggcagagcc

SEQ ID NO: 1277325 - DNA, 15 bp, Homo sapiens
attaccaggcagagc

SEQ ID NO: 1277326 - DNA, 15 bp, Homo sapiens
gattaccaggcagag

SEQ ID NO: 1277327 - DNA, 15 bp, Homo sapiens
ggattaccaggcaga

SEQ ID NO: 1277328 - DNA, 15 bp, Homo sapiens
tggattaccaggcag

SEQ ID NO: 1277329 - DNA, 15 bp, Homo sapiens
ctggattaccaggca

SEQ ID NO: 1277330 - DNA, 15 bp, Homo sapiens
tctggattaccaggc

SEQ ID NO: 1277331 - DNA, 15 bp, Homo sapiens
ctctggattaccagg

SEQ ID NO: 1277332 - DNA, 15 bp, Homo sapiens
tctctggattaccag

SEQ ID NO: 1277333 - DNA, 15 bp, Homo sapiens
ttctctggattacca

SEQ ID NO: 1277334 - DNA, 15 bp, Homo sapiens
attctctggattacc

SEQ ID NO: 1277335 - DNA, 15 bp, Homo sapiens
aattctctggattac

SEQ ID NO: 1277336 - DNA, 15 bp, Homo sapiens
gaattctctggatta

SEQ ID NO: 1277337 - DNA, 15 bp, Homo sapiens
agaattctctggatt

SEQ ID NO: 1277338 - DNA, 15 bp, Homo sapiens
gagaattctctggat

SEQ ID NO: 1277339 - DNA, 15 bp, Homo sapiens
agagaattctctgga

SEQ ID NO: 1277340 - DNA, 15 bp, Homo sapiens
gagagaattctctgg

SEQ ID NO: 1277341 - DNA, 15 bp, Homo sapiens
tgagagaattctctg

SEQ ID NO: 1277342 - DNA, 15 bp, Homo sapiens
ctgagagaattctct

SEQ ID NO: 1277343 - DNA, 15 bp, Homo sapiens
tctgagagaattctc

SEQ ID NO: 1277344 - DNA, 15 bp, Homo sapiens
atctgagagaattct

SEQ ID NO: 1277345 - DNA, 15 bp, Homo sapiens
gatctgagagaattc

SEQ ID NO: 1277346 - DNA, 15 bp, Homo sapiens
ggatctgagagaatt

SEQ ID NO: 1277347 - DNA, 15 bp, Homo sapiens
aggatctgagagaat

SEQ ID NO: 1277348 - DNA, 15 bp, Homo sapiens
caggatctgagagaa

SEQ ID NO: 1277349 - DNA, 15 bp, Homo sapiens
acaggatctgagaga

SEQ ID NO: 1277350 - DNA, 15 bp, Homo sapiens
gacaggatctgagag

SEQ ID NO: 1277351 - DNA, 15 bp, Homo sapiens
agacaggatctgaga

SEQ ID NO: 1277352 - DNA, 15 bp, Homo sapiens
tagacaggatctgag

SEQ ID NO: 1277353 - DNA, 15 bp, Homo sapiens
ttagacaggatctga

SEQ ID NO: 1277354 - DNA, 15 bp, Homo sapiens
cttagacaggatctg

SEQ ID NO: 1277355 - DNA, 15 bp, Homo sapiens
ccttagacaggatct

SEQ ID NO: 1277356 - DNA, 15 bp, Homo sapiens
gccttagacaggatc

SEQ ID NO: 1277357 - DNA, 15 bp, Homo sapiens
agccttagacaggat

SEQ ID NO: 1277358 - DNA, 15 bp, Homo sapiens
tagccttagacagga

SEQ ID NO: 1277359 - DNA, 15 bp, Homo sapiens
atagccttagacagg

SEQ ID NO: 1277360 - DNA, 15 bp, Homo sapiens
gatagccttagacag

SEQ ID NO: 1277361 - DNA, 15 bp, Homo sapiens
tgatagccttagaca

SEQ ID NO: 1277362 - DNA, 15 bp, Homo sapiens
ttgatagccttagac

SEQ ID NO: 1277363 - DNA, 15 bp, Homo sapiens
cttgatagccttaga

SEQ ID NO: 1277364 - DNA, 15 bp, Homo sapiens
ccttgatagccttag

SEQ ID NO: 1277365 - DNA, 15 bp, Homo sapiens
gccttgatagcctta

SEQ ID NO: 1277366 - DNA, 15 bp, Homo sapiens
tgccttgatagcctt

SEQ ID NO: 1277367 - DNA, 15 bp, Homo sapiens
ctgccttgatagcct

SEQ ID NO: 1277368 - DNA, 15 bp, Homo sapiens
actgccttgatagcc

SEQ ID NO: 1277369 - DNA, 15 bp, Homo sapiens
tactgccttgatagc

SEQ ID NO: 1277370 - DNA, 15 bp, Homo sapiens
gtactgccttgatag

SEQ ID NO: 1277371 - DNA, 15 bp, Homo sapiens
ggtactgccttgata

SEQ ID NO: 1277372 - DNA, 15 bp, Homo sapiens
aggtactgccttgat

SEQ ID NO: 1277373 - DNA, 15 bp, Homo sapiens
gaggtactgccttga

SEQ ID NO: 1277374 - DNA, 15 bp, Homo sapiens
agaggtactgccttg

SEQ ID NO: 1277375 - DNA, 15 bp, Homo sapiens
tagaggtactgcctt

SEQ ID NO: 1277376 - DNA, 15 bp, Homo sapiens
atagaggtactgcct

SEQ ID NO: 1277377 - DNA, 15 bp, Homo sapiens
catagaggtactgcc

SEQ ID NO: 1277378 - DNA, 15 bp, Homo sapiens
tcatagaggtactgc

SEQ ID NO: 1277379 - DNA, 15 bp, Homo sapiens
ttcatagaggtactg

SEQ ID NO: 1277380 - DNA, 15 bp, Homo sapiens
attcatagaggtact

SEQ ID NO: 1277381 - DNA, 15 bp, Homo sapiens
gattcatagaggtac

SEQ ID NO: 1277382 - DNA, 15 bp, Homo sapiens
agattcatagaggta

SEQ ID NO: 1277383 - DNA, 15 bp, Homo sapiens
cagattcatagaggt

SEQ ID NO: 1277384 - DNA, 15 bp, Homo sapiens
gcagattcatagagg

SEQ ID NO: 1277385 - DNA, 15 bp, Homo sapiens
tgcagattcatagag

SEQ ID NO: 1277386 - DNA, 15 bp, Homo sapiens
ttgcagattcataga

SEQ ID NO: 1277387 - DNA, 15 bp, Homo sapiens
cttgcagattcatag

SEQ ID NO: 1277388 - DNA, 15 bp, Homo sapiens
tcttgcagattcata

SEQ ID NO: 1277389 - DNA, 15 bp, Homo sapiens
ttcttgcagattcat

SEQ ID NO: 1277390 - DNA, 15 bp, Homo sapiens
gttcttgcagattca

SEQ ID NO: 1277391 - DNA, 15 bp, Homo sapiens
ggttcttgcagattc

SEQ ID NO: 1277392 - DNA, 15 bp, Homo sapiens
tggttcttgcagatt

SEQ ID NO: 1277393 - DNA, 15 bp, Homo sapiens
gtggttcttgcagat

SEQ ID NO: 1277394 - DNA, 15 bp, Homo sapiens
tgtggttcttgcaga

SEQ ID NO: 1277395 - DNA, 15 bp, Homo sapiens
ctgtggttcttgcag

SEQ ID NO: 1277396 - DNA, 15 bp, Homo sapiens
gctgtggttcttgca

SEQ ID NO: 1277397 - DNA, 15 bp, Homo sapiens
tgctgtggttcttgc

SEQ ID NO: 1277398 - DNA, 15 bp, Homo sapiens
atgctgtggttcttg

SEQ ID NO: 1277399 - DNA, 15 bp, Homo sapiens
aatgctgtggttctt

SEQ ID NO: 1277400 - DNA, 15 bp, Homo sapiens
gaatgctgtggttct

SEQ ID NO: 1277401 - DNA, 15 bp, Homo sapiens
ggaatgctgtggttc

SEQ ID NO: 1277402 - DNA, 15 bp, Homo sapiens
aggaatgctgtggtt

SEQ ID NO: 1277403 - DNA, 15 bp, Homo sapiens
caggaatgctgtggt

SEQ ID NO: 1277404 - DNA, 15 bp, Homo sapiens
ccaggaatgctgtgg

SEQ ID NO: 1277405 - DNA, 15 bp, Homo sapiens
cccaggaatgctgtg

SEQ ID NO: 1277406 - DNA, 15 bp, Homo sapiens
acccaggaatgctgt

SEQ ID NO: 1277407 - DNA, 15 bp, Homo sapiens
cacccaggaatgctg

SEQ ID NO: 1277408 - DNA, 15 bp, Homo sapiens
ccacccaggaatgct

SEQ ID NO: 1277409 - DNA, 15 bp, Homo sapiens
cccacccaggaatgc

SEQ ID NO: 1277410 - DNA, 15 bp, Homo sapiens
tcccacccaggaatg

SEQ ID NO: 1277411 - DNA, 15 bp, Homo sapiens
ctcccacccaggaat

SEQ ID NO: 1277412 - DNA, 15 bp, Homo sapiens
cctcccacccaggaa

SEQ ID NO: 1277413 - DNA, 15 bp, Homo sapiens
acctcccacccagga

SEQ ID NO: 1277414 - DNA, 15 bp, Homo sapiens
cacctcccacccagg

SEQ ID NO: 1277415 - DNA, 15 bp, Homo sapiens
gcacctcccacccag

SEQ ID NO: 1277416 - DNA, 15 bp, Homo sapiens
ggcacctcccaccca

SEQ ID NO: 1277417 - DNA, 15 bp, Homo sapiens
gggcacctcccaccc

SEQ ID NO: 1277418 - DNA, 15 bp, Homo sapiens
ggggcacctcccacc

SEQ ID NO: 1277419 - DNA, 15 bp, Homo sapiens
gggggcacctcccac

SEQ ID NO: 1277420 - DNA, 15 bp, Homo sapiens
agggggcacctccca

SEQ ID NO: 1277421 - DNA, 15 bp, Homo sapiens
tagggggcacctccc

SEQ ID NO: 1277422 - DNA, 15 bp, Homo sapiens
ttagggggcacctcc

SEQ ID NO: 1277423 - DNA, 15 bp, Homo sapiens
tttagggggcacctc

SEQ ID NO: 1277424 - DNA, 15 bp, Homo sapiens
ctttagggggcacct

SEQ ID NO: 1277425 - DNA, 15 bp, Homo sapiens
tctttagggggcacc

SEQ ID NO: 1277426 - DNA, 15 bp, Homo sapiens
ttctttagggggcac

SEQ ID NO: 1277427 - DNA, 15 bp, Homo sapiens
cttctttagggggca

SEQ ID NO: 1277428 - DNA, 15 bp, Homo sapiens
tcttctttagggggc

SEQ ID NO: 1277429 - DNA, 15 bp, Homo sapiens
ttcttctttaggggg

SEQ ID NO: 1277430 - DNA, 15 bp, Homo sapiens
tttcttctttagggg

SEQ ID NO: 1277431 - DNA, 15 bp, Homo sapiens
gtttcttctttaggg

SEQ ID NO: 1277432 - DNA, 15 bp, Homo sapiens
tgtttcttctttagg

SEQ ID NO: 1277433 - DNA, 15 bp, Homo sapiens
ctgtttcttctttag

SEQ ID NO: 1277434 - DNA, 15 bp, Homo sapiens
gctgtttcttcttta

SEQ ID NO: 1277435 - DNA, 15 bp, Homo sapiens
agctgtttcttcttt

SEQ ID NO: 1277436 - DNA, 15 bp, Homo sapiens
aagctgtttcttctt

SEQ ID NO: 1277437 - DNA, 15 bp, Homo sapiens
taagctgtttcttct

SEQ ID NO: 1277438 - DNA, 15 bp, Homo sapiens
ctaagctgtttcttc

SEQ ID NO: 1277439 - DNA, 15 bp, Homo sapiens
tctaagctgtttctt

SEQ ID NO: 1277440 - DNA, 15 bp, Homo sapiens
atctaagctgtttct

SEQ ID NO: 1277441 - DNA, 15 bp, Homo sapiens
aatctaagctgtttc

SEQ ID NO: 1277442 - DNA, 15 bp, Homo sapiens
taatctaagctgttt

SEQ ID NO: 1277443 - DNA, 15 bp, Homo sapiens
gtaatctaagctgtt

SEQ ID NO: 1277444 - DNA, 15 bp, Homo sapiens
tgtaatctaagctgt

SEQ ID NO: 1277445 - DNA, 15 bp, Homo sapiens
ttgtaatctaagctg

SEQ ID NO: 1277446 - DNA, 15 bp, Homo sapiens
gttgtaatctaagct

SEQ ID NO: 1277447 - DNA, 15 bp, Homo sapiens
tgttgtaatctaagc

SEQ ID NO: 1277448 - DNA, 15 bp, Homo sapiens
gtgttgtaatctaag

SEQ ID NO: 1277449 - DNA, 15 bp, Homo sapiens
ggtgttgtaatctaa

SEQ ID NO: 1277450 - DNA, 15 bp, Homo sapiens
gggtgttgtaatcta

SEQ ID NO: 1277451 - DNA, 15 bp, Homo sapiens
tgggtgttgtaatct

SEQ ID NO: 1277452 - DNA, 15 bp, Homo sapiens
ttgggtgttgtaatc

SEQ ID NO: 1277453 - DNA, 15 bp, Homo sapiens
tttgggtgttgtaat

SEQ ID NO: 1277454 - DNA, 15 bp, Homo sapiens
atttgggtgttgtaa

SEQ ID NO: 1277455 - DNA, 15 bp, Homo sapiens
gatttgggtgttgta

SEQ ID NO: 1277456 - DNA, 15 bp, Homo sapiens
ggatttgggtgttgt

SEQ ID NO: 1277457 - DNA, 15 bp, Homo sapiens
aggatttgggtgttg

SEQ ID NO: 1277458 - DNA, 15 bp, Homo sapiens
aaggatttgggtgtt

SEQ ID NO: 1277459 - DNA, 15 bp, Homo sapiens
aaaggatttgggtgt

SEQ ID NO: 1277460 - DNA, 15 bp, Homo sapiens
gaaaggatttgggtg

SEQ ID NO: 1277461 - DNA, 15 bp, Homo sapiens
tgaaaggatttgggt

SEQ ID NO: 1277462 - DNA, 15 bp, Homo sapiens
ttgaaaggatttggg

SEQ ID NO: 1277463 - DNA, 15 bp, Homo sapiens
tttgaaaggatttgg

SEQ ID NO: 1277464 - DNA, 15 bp, Homo sapiens
atttgaaaggatttg

SEQ ID NO: 1277465 - DNA, 15 bp, Homo sapiens
tatttgaaaggattt

SEQ ID NO: 1277466 - DNA, 15 bp, Homo sapiens
gtatttgaaaggatt

SEQ ID NO: 1277467 - DNA, 15 bp, Homo sapiens
ggtatttgaaaggat

SEQ ID NO: 1277468 - DNA, 15 bp, Homo sapiens
aggtatttgaaagga

SEQ ID NO: 1277469 - DNA, 15 bp, Homo sapiens
caggtatttgaaagg

SEQ ID NO: 1277470 - DNA, 15 bp, Homo sapiens
ccaggtatttgaaag

SEQ ID NO: 1277471 - DNA, 15 bp, Homo sapiens
tccaggtatttgaaa

SEQ ID NO: 1277472 - DNA, 15 bp, Homo sapiens
ttccaggtatttgaa

SEQ ID NO: 1277473 - DNA, 15 bp, Homo sapiens
tttccaggtatttga

SEQ ID NO: 1277474 - DNA, 15 bp, Homo sapiens
atttccaggtatttg

SEQ ID NO: 1277475 - DNA, 15 bp, Homo sapiens
gatttccaggtattt

SEQ ID NO: 1277476 - DNA, 15 bp, Homo sapiens
ggatttccaggtatt

SEQ ID NO: 1277477 - DNA, 15 bp, Homo sapiens
aggatttccaggtat

SEQ ID NO: 1277478 - DNA, 15 bp, Homo sapiens
aaggatttccaggta

SEQ ID NO: 1277479 - DNA, 15 bp, Homo sapiens
gaaggatttccaggt

SEQ ID NO: 1277480 - DNA, 15 bp, Homo sapiens
ggaaggatttccagg

SEQ ID NO: 1277481 - DNA, 15 bp, Homo sapiens
gggaaggatttccag

SEQ ID NO: 1277482 - DNA, 15 bp, Homo sapiens
tgggaaggatttcca

SEQ ID NO: 1277483 - DNA, 15 bp, Homo sapiens
ttgggaaggatttcc

SEQ ID NO: 1277484 - DNA, 15 bp, Homo sapiens
cttgggaaggatttc

SEQ ID NO: 1277485 - DNA, 15 bp, Homo sapiens
tcttgggaaggattt

SEQ ID NO: 1277486 - DNA, 15 bp, Homo sapiens
ttcttgggaaggatt

SEQ ID NO: 1277487 - DNA, 15 bp, Homo sapiens
cttcttgggaaggat

SEQ ID NO: 1277488 - DNA, 15 bp, Homo sapiens
ccttcttgggaagga

SEQ ID NO: 1277489 - DNA, 15 bp, Homo sapiens
tccttcttgggaagg

SEQ ID NO: 1277490 - DNA, 15 bp, Homo sapiens
atccttcttgggaag

SEQ ID NO: 1277491 - DNA, 15 bp, Homo sapiens
tatccttcttgggaa

SEQ ID NO: 1277492 - DNA, 15 bp, Homo sapiens
ctatccttcttggga

SEQ ID NO: 1277493 - DNA, 15 bp, Homo sapiens
gctatccttcttggg

SEQ ID NO: 1277494 - DNA, 15 bp, Homo sapiens
agctatccttcttgg

SEQ ID NO: 1277495 - DNA, 15 bp, Homo sapiens
tagctatccttcttg

SEQ ID NO: 1277496 - DNA, 15 bp, Homo sapiens
gtagctatccttctt

SEQ ID NO: 1277497 - DNA, 15 bp, Homo sapiens
tgtagctatccttct

SEQ ID NO: 1277498 - DNA, 15 bp, Homo sapiens
ttgtagctatccttc

SEQ ID NO: 1277499 - DNA, 15 bp, Homo sapiens
tttgtagctatcctt

SEQ ID NO: 1277500 - DNA, 15 bp, Homo sapiens
atttgtagctatcct

SEQ ID NO: 1277501 - DNA, 15 bp, Homo sapiens
tatttgtagctatcc

SEQ ID NO: 1277502 - DNA, 15 bp, Homo sapiens
ttatttgtagctatc

SEQ ID NO: 1277503 - DNA, 15 bp, Homo sapiens
cttatttgtagctat

SEQ ID NO: 1277504 - DNA, 15 bp, Homo sapiens
gcttatttgtagcta

SEQ ID NO: 1277505 - DNA, 15 bp, Homo sapiens
ggcttatttgtagct

SEQ ID NO: 1277506 - DNA, 15 bp, Homo sapiens
gggcttatttgtagc

SEQ ID NO: 1277507 - DNA, 15 bp, Homo sapiens
tgggcttatttgtag

SEQ ID NO: 1277508 - DNA, 15 bp, Homo sapiens
ctgggcttatttgta

SEQ ID NO: 1277509 - DNA, 15 bp, Homo sapiens
tctgggcttatttgt

SEQ ID NO: 1277510 - DNA, 15 bp, Homo sapiens
gtctgggcttatttg

SEQ ID NO: 1277511 - DNA, 15 bp, Homo sapiens
tgtctgggcttattt

SEQ ID NO: 1277512 - DNA, 15 bp, Homo sapiens
ttgtctgggcttatt

SEQ ID NO: 1277513 - DNA, 15 bp, Homo sapiens
attgtctgggcttat

SEQ ID NO: 1277514 - DNA, 15 bp, Homo sapiens
cattgtctgggctta

SEQ ID NO: 1277515 - DNA, 15 bp, Homo sapiens
tcattgtctgggctt

SEQ ID NO: 1277516 - DNA, 15 bp, Homo sapiens
ttcattgtctgggct

SEQ ID NO: 1277517 - DNA, 15 bp, Homo sapiens
cttcattgtctgggc

SEQ ID NO: 1277518 - DNA, 15 bp, Homo sapiens
tcttcattgtctggg

SEQ ID NO: 1277519 - DNA, 15 bp, Homo sapiens
gtcttcattgtctgg

SEQ ID NO: 1277520 - DNA, 15 bp, Homo sapiens
agtcttcattgtctg

SEQ ID NO: 1277521 - DNA, 15 bp, Homo sapiens
tagtcttcattgtct

SEQ ID NO: 1277522 - DNA, 15 bp, Homo sapiens
gtagtcttcattgtc

SEQ ID NO: 1277523 - DNA, 15 bp, Homo sapiens
tgtagtcttcattgt

SEQ ID NO: 1277524 - DNA, 15 bp, Homo sapiens
ttgtagtcttcattg

SEQ ID NO: 1277525 - DNA, 15 bp, Homo sapiens
attgtagtcttcatt

SEQ ID NO: 1277526 - DNA, 15 bp, Homo sapiens
tattgtagtcttcat

SEQ ID NO: 1277527 - DNA, 15 bp, Homo sapiens
ttattgtagtcttca

SEQ ID NO: 1277528 - DNA, 15 bp, Homo sapiens
tttattgtagtcttc

SEQ ID NO: 1277529 - DNA, 15 bp, Homo sapiens
atttattgtagtctt

SEQ ID NO: 1277530 - DNA, 15 bp, Homo sapiens
tatttattgtagtct

SEQ ID NO: 1277531 - DNA, 15 bp, Homo sapiens
atatttattgtagtc

SEQ ID NO: 1277532 - DNA, 15 bp, Homo sapiens
gatatttattgtagt

SEQ ID NO: 1277533 - DNA, 15 bp, Homo sapiens
agatatttattgtag

SEQ ID NO: 1277534 - DNA, 15 bp, Homo sapiens
tagatatttattgta

SEQ ID NO: 1277535 - DNA, 15 bp, Homo sapiens
ttagatatttattgt

SEQ ID NO: 1277536 - DNA, 15 bp, Homo sapiens
gttagatatttattg

SEQ ID NO: 1277537 - DNA, 15 bp, Homo sapiens
agttagatatttatt

SEQ ID NO: 1277538 - DNA, 15 bp, Homo sapiens
gagttagatatttat

SEQ ID NO: 1277539 - DNA, 15 bp, Homo sapiens
agagttagatattta

SEQ ID NO: 1277540 - DNA, 15 bp, Homo sapiens
aagagttagatattt

SEQ ID NO: 1277541 - DNA, 15 bp, Homo sapiens
gaagagttagatatt

SEQ ID NO: 1277542 - DNA, 15 bp, Homo sapiens
tgaagagttagatat

SEQ ID NO: 1277543 - DNA, 15 bp, Homo sapiens
ttgaagagttagata

SEQ ID NO: 1277544 - DNA, 15 bp, Homo sapiens
attgaagagttagat

SEQ ID NO: 1277545 - DNA, 15 bp, Homo sapiens
cattgaagagttaga

SEQ ID NO: 1277546 - DNA, 15 bp, Homo sapiens
gcattgaagagttag

SEQ ID NO: 1277547 - DNA, 15 bp, Homo sapiens
ggcattgaagagtta

SEQ ID NO: 1277548 - DNA, 15 bp, Homo sapiens
gggcattgaagagtt

SEQ ID NO: 1277549 - DNA, 15 bp, Homo sapiens
tgggcattgaagagt

SEQ ID NO: 1277550 - DNA, 15 bp, Homo sapiens
ctgggcattgaagag

SEQ ID NO: 1277551 - DNA, 15 bp, Homo sapiens
tctgggcattgaaga

SEQ ID NO: 1277552 - DNA, 15 bp, Homo sapiens
gtctgggcattgaag

SEQ ID NO: 1277553 - DNA, 15 bp, Homo sapiens
tgtctgggcattgaa

SEQ ID NO: 1277554 - DNA, 15 bp, Homo sapiens
atgtctgggcattga

SEQ ID NO: 1277555 - DNA, 15 bp, Homo sapiens
gatgtctgggcattg

SEQ ID NO: 1277556 - DNA, 15 bp, Homo sapiens
tgatgtctgggcatt

SEQ ID NO: 1277557 - DNA, 15 bp, Homo sapiens
ttgatgtctgggcat

SEQ ID NO: 1277558 - DNA, 15 bp, Homo sapiens
tttgatgtctgggca

SEQ ID NO: 1277559 - DNA, 15 bp, Homo sapiens
ctttgatgtctgggc

SEQ ID NO: 1277560 - DNA, 15 bp, Homo sapiens
tctttgatgtctggg

SEQ ID NO: 1277561 - DNA, 15 bp, Homo sapiens
ttctttgatgtctgg

SEQ ID NO: 1277562 - DNA, 15 bp, Homo sapiens
gttctttgatgtctg

SEQ ID NO: 1277563 - DNA, 15 bp, Homo sapiens
tgttctttgatgtct

SEQ ID NO: 1277564 - DNA, 15 bp, Homo sapiens
atgttctttgatgtc

SEQ ID NO: 1277565 - DNA, 15 bp, Homo sapiens
gatgttctttgatgt

SEQ ID NO: 1277566 - DNA, 15 bp, Homo sapiens
agatgttctttgatg

SEQ ID NO: 1277567 - DNA, 15 bp, Homo sapiens
tagatgttctttgat

SEQ ID NO: 1277568 - DNA, 15 bp, Homo sapiens
gtagatgttctttga

SEQ ID NO: 1277569 - DNA, 15 bp, Homo sapiens
agtagatgttctttg

SEQ ID NO: 1277570 - DNA, 15 bp, Homo sapiens
tagtagatgttcttt

SEQ ID NO: 1277571 - DNA, 15 bp, Homo sapiens
ctagtagatgttctt

SEQ ID NO: 1277572 - DNA, 15 bp, Homo sapiens
gctagtagatgttct

SEQ ID NO: 1277573 - DNA, 15 bp, Homo sapiens
tgctagtagatgttc

SEQ ID NO: 1277574 - DNA, 15 bp, Homo sapiens
atgctagtagatgtt

SEQ ID NO: 1277575 - DNA, 15 bp, Homo sapiens
gatgctagtagatgt

SEQ ID NO: 1277576 - DNA, 15 bp, Homo sapiens
tgatgctagtagatg

SEQ ID NO: 1277577 - DNA, 15 bp, Homo sapiens
ttgatgctagtagat

SEQ ID NO: 1277578 - DNA, 15 bp, Homo sapiens
gttgatgctagtaga

SEQ ID NO: 1277579 - DNA, 15 bp, Homo sapiens
tgttgatgctagtag

SEQ ID NO: 1277580 - DNA, 15 bp, Homo sapiens
gtgttgatgctagta

SEQ ID NO: 1277581 - DNA, 15 bp, Homo sapiens
agtgttgatgctagt

SEQ ID NO: 1277582 - DNA, 15 bp, Homo sapiens
tagtgttgatgctag

SEQ ID NO: 1277583 - DNA, 15 bp, Homo sapiens
atagtgttgatgcta

SEQ ID NO: 1277584 - DNA, 15 bp, Homo sapiens
gatagtgttgatgct

SEQ ID NO: 1277585 - DNA, 15 bp, Homo sapiens
ggatagtgttgatgc

SEQ ID NO: 1277586 - DNA, 15 bp, Homo sapiens
tggatagtgttgatg

SEQ ID NO: 1277587 - DNA, 15 bp, Homo sapiens
ctggatagtgttgat

SEQ ID NO: 1277588 - DNA, 15 bp, Homo sapiens
cctggatagtgttga

SEQ ID NO: 1277589 - DNA, 15 bp, Homo sapiens
tcctggatagtgttg

SEQ ID NO: 1277590 - DNA, 15 bp, Homo sapiens
ttcctggatagtgtt

SEQ ID NO: 1277591 - DNA, 15 bp, Homo sapiens
tttcctggatagtgt

SEQ ID NO: 1277592 - DNA, 15 bp, Homo sapiens
ttttcctggatagtg

SEQ ID NO: 1277593 - DNA, 15 bp, Homo sapiens
gttttcctggatagt

SEQ ID NO: 1277594 - DNA, 15 bp, Homo sapiens
cgttttcctggatag

SEQ ID NO: 1277595 - DNA, 15 bp, Homo sapiens
acgttttcctggata

SEQ ID NO: 1277596 - DNA, 15 bp, Homo sapiens
cacgttttcctggat

SEQ ID NO: 1277597 - DNA, 15 bp, Homo sapiens
tcacgttttcctgga

SEQ ID NO: 1277598 - DNA, 15 bp, Homo sapiens
gtcacgttttcctgg

SEQ ID NO: 1277599 - DNA, 15 bp, Homo sapiens
ggtcacgttttcctg

SEQ ID NO: 1277600 - DNA, 15 bp, Homo sapiens
tggtcacgttttcct

SEQ ID NO: 1277601 - DNA, 15 bp, Homo sapiens
gtggtcacgttttcc

SEQ ID NO: 1277602 - DNA, 15 bp, Homo sapiens
tgtggtcacgttttc

SEQ ID NO: 1277603 - DNA, 15 bp, Homo sapiens
gtgtggtcacgtttt

SEQ ID NO: 1277604 - DNA, 15 bp, Homo sapiens
ggtgtggtcacgttt

SEQ ID NO: 1277605 - DNA, 15 bp, Homo sapiens
tggtgtggtcacgtt

SEQ ID NO: 1277606 - DNA, 15 bp, Homo sapiens
ctggtgtggtcacgt

SEQ ID NO: 1277607 - DNA, 15 bp, Homo sapiens
tctggtgtggtcacg

SEQ ID NO: 1277608 - DNA, 15 bp, Homo sapiens
atctggtgtggtcac

SEQ ID NO: 1277609 - DNA, 15 bp, Homo sapiens
catctggtgtggtca

SEQ ID NO: 1277610 - DNA, 15 bp, Homo sapiens
tcatctggtgtggtc

SEQ ID NO: 1277611 - DNA, 15 bp, Homo sapiens
ttcatctggtgtggt

SEQ ID NO: 1277612 - DNA, 15 bp, Homo sapiens
gttcatctggtgtgg

SEQ ID NO: 1277613 - DNA, 15 bp, Homo sapiens
agttcatctggtgtg

SEQ ID NO: 1277614 - DNA, 15 bp, Homo sapiens
tagttcatctggtgt

SEQ ID NO: 1277615 - DNA, 15 bp, Homo sapiens
ttagttcatctggtg

SEQ ID NO: 1277616 - DNA, 15 bp, Homo sapiens
tttagttcatctggt

SEQ ID NO: 1277617 - DNA, 15 bp, Homo sapiens
atttagttcatctgg

SEQ ID NO: 1277618 - DNA, 15 bp, Homo sapiens
tatttagttcatctg

SEQ ID NO: 1277619 - DNA, 15 bp, Homo sapiens
ttatttagttcatct

SEQ ID NO: 1277620 - DNA, 15 bp, Homo sapiens
cttatttagttcatc

SEQ ID NO: 1277621 - DNA, 15 bp, Homo sapiens
acttatttagttcat

SEQ ID NO: 1277622 - DNA, 15 bp, Homo sapiens
gacttatttagttca

SEQ ID NO: 1277623 - DNA, 15 bp, Homo sapiens
tgacttatttagttc

SEQ ID NO: 1277624 - DNA, 15 bp, Homo sapiens
gtgacttatttagtt

SEQ ID NO: 1277625 - DNA, 15 bp, Homo sapiens
ggtgacttatttagt

SEQ ID NO: 1277626 - DNA, 15 bp, Homo sapiens
tggtgacttatttag

SEQ ID NO: 1277627 - DNA, 15 bp, Homo sapiens
ctggtgacttattta

SEQ ID NO: 1277628 - DNA, 15 bp, Homo sapiens
tctggtgacttattt

SEQ ID NO: 1277629 - DNA, 15 bp, Homo sapiens
ttctggtgacttatt

SEQ ID NO: 1277630 - DNA, 15 bp, Homo sapiens
tttctggtgacttat

SEQ ID NO: 1277631 - DNA, 15 bp, Homo sapiens
gtttctggtgactta

SEQ ID NO: 1277632 - DNA, 15 bp, Homo sapiens
ggtttctggtgactt

SEQ ID NO: 1277633 - DNA, 15 bp, Homo sapiens
tggtttctggtgact

SEQ ID NO: 1277634 - DNA, 15 bp, Homo sapiens
ttggtttctggtgac

SEQ ID NO: 1277635 - DNA, 15 bp, Homo sapiens
attggtttctggtga

SEQ ID NO: 1277636 - DNA, 15 bp, Homo sapiens
gattggtttctggtg

SEQ ID NO: 1277637 - DNA, 15 bp, Homo sapiens
ggattggtttctggt

SEQ ID NO: 1277638 - DNA, 15 bp, Homo sapiens
aggattggtttctgg

SEQ ID NO: 1277639 - DNA, 15 bp, Homo sapiens
taggattggtttctg

SEQ ID NO: 1277640 - DNA, 15 bp, Homo sapiens
ctaggattggtttct

SEQ ID NO: 1277641 - DNA, 15 bp, Homo sapiens
tctaggattggtttc

SEQ ID NO: 1277642 - DNA, 15 bp, Homo sapiens
ctctaggattggttt

SEQ ID NO: 1277643 - DNA, 15 bp, Homo sapiens
tctctaggattggtt

SEQ ID NO: 1277644 - DNA, 15 bp, Homo sapiens
ttctctaggattggt

SEQ ID NO: 1277645 - DNA, 15 bp, Homo sapiens
tttctctaggattgg

SEQ ID NO: 1277646 - DNA, 15 bp, Homo sapiens
gtttctctaggattg

SEQ ID NO: 1277647 - DNA, 15 bp, Homo sapiens
tgtttctctaggatt

SEQ ID NO: 1277648 - DNA, 15 bp, Homo sapiens
ctgtttctctaggat

SEQ ID NO: 1277649 - DNA, 15 bp, Homo sapiens
tctgtttctctagga

SEQ ID NO: 1277650 - DNA, 15 bp, Homo sapiens
ctctgtttctctagg

SEQ ID NO: 1277651 - DNA, 15 bp, Homo sapiens
tctctgtttctctag

SEQ ID NO: 1277652 - DNA, 15 bp, Homo sapiens
atctctgtttctcta

SEQ ID NO: 1277653 - DNA, 15 bp, Homo sapiens
tatctctgtttctct

SEQ ID NO: 1277654 - DNA, 15 bp, Homo sapiens
atatctctgtttctc

SEQ ID NO: 1277655 - DNA, 15 bp, Homo sapiens
catatctctgtttct

SEQ ID NO: 1277656 - DNA, 15 bp, Homo sapiens
acatatctctgtttc

SEQ ID NO: 1277657 - DNA, 15 bp, Homo sapiens
cacatatctctgttt

SEQ ID NO: 1277658 - DNA, 15 bp, Homo sapiens
tcacatatctctgtt

SEQ ID NO: 1277659 - DNA, 15 bp, Homo sapiens
gtcacatatctctgt

SEQ ID NO: 1277660 - DNA, 15 bp, Homo sapiens
ggtcacatatctctg

SEQ ID NO: 1277661 - DNA, 15 bp, Homo sapiens
aggtcacatatctct

SEQ ID NO: 1277662 - DNA, 15 bp, Homo sapiens
aaggtcacatatctc

SEQ ID NO: 1277663 - DNA, 15 bp, Homo sapiens
aaaggtcacatatct

SEQ ID NO: 1277664 - DNA, 15 bp, Homo sapiens
gaaaggtcacatatc

SEQ ID NO: 1277665 - DNA, 15 bp, Homo sapiens
tgaaaggtcacatat

SEQ ID NO: 1277666 - DNA, 15 bp, Homo sapiens
ctgaaaggtcacata

SEQ ID NO: 1277667 - DNA, 15 bp, Homo sapiens
tctgaaaggtcacat

SEQ ID NO: 1277668 - DNA, 15 bp, Homo sapiens
gtctgaaaggtcaca

SEQ ID NO: 1277669 - DNA, 15 bp, Homo sapiens
tgtctgaaaggtcac

SEQ ID NO: 1277670 - DNA, 15 bp, Homo sapiens
ctgtctgaaaggtca

SEQ ID NO: 1277671 - DNA, 15 bp, Homo sapiens
tctgtctgaaaggtc

SEQ ID NO: 1277672 - DNA, 15 bp, Homo sapiens
ctctgtctgaaaggt

SEQ ID NO: 1277673 - DNA, 15 bp, Homo sapiens
tctctgtctgaaagg

SEQ ID NO: 1277674 - DNA, 15 bp, Homo sapiens
ttctctgtctgaaag

SEQ ID NO: 1277675 - DNA, 15 bp, Homo sapiens
attctctgtctgaaa

SEQ ID NO: 1277676 - DNA, 15 bp, Homo sapiens
aattctctgtctgaa

SEQ ID NO: 1277677 - DNA, 15 bp, Homo sapiens
gaattctctgtctga

SEQ ID NO: 1277678 - DNA, 15 bp, Homo sapiens
tgaattctctgtctg

SEQ ID NO: 1277679 - DNA, 15 bp, Homo sapiens
ttgaattctctgtct

SEQ ID NO: 1277680 - DNA, 15 bp, Homo sapiens
tttgaattctctgtc

SEQ ID NO: 1277681 - DNA, 15 bp, Homo sapiens
ttttgaattctctgt

SEQ ID NO: 1277682 - DNA, 15 bp, Homo sapiens
attttgaattctctg

SEQ ID NO: 1277683 - DNA, 15 bp, Homo sapiens
tattttgaattctct

SEQ ID NO: 1277684 - DNA, 15 bp, Homo sapiens
ctattttgaattctc

SEQ ID NO: 1277685 - DNA, 15 bp, Homo sapiens
gctattttgaattct

SEQ ID NO: 1277686 - DNA, 15 bp, Homo sapiens
agctattttgaattc

SEQ ID NO: 1277687 - DNA, 15 bp, Homo sapiens
tagctattttgaatt

SEQ ID NO: 1277688 - DNA, 15 bp, Homo sapiens
atagctattttgaat

SEQ ID NO: 1277689 - DNA, 15 bp, Homo sapiens
aatagctattttgaa

SEQ ID NO: 1277690 - DNA, 15 bp, Homo sapiens
aaatagctattttga

SEQ ID NO: 1277691 - DNA, 15 bp, Homo sapiens
caaatagctattttg

SEQ ID NO: 1277692 - DNA, 15 bp, Homo sapiens
tcaaatagctatttt

SEQ ID NO: 1277693 - DNA, 15 bp, Homo sapiens
ctcaaatagctattt

SEQ ID NO: 1277694 - DNA, 15 bp, Homo sapiens
cctcaaatagctatt

SEQ ID NO: 1277695 - DNA, 15 bp, Homo sapiens
tcctcaaatagctat

SEQ ID NO: 1277696 - DNA, 15 bp, Homo sapiens
ttcctcaaatagcta

SEQ ID NO: 1277697 - DNA, 15 bp, Homo sapiens
tttcctcaaatagct

SEQ ID NO: 1277698 - DNA, 15 bp, Homo sapiens
ctttcctcaaatagc

SEQ ID NO: 1277699 - DNA, 15 bp, Homo sapiens
actttcctcaaatag

SEQ ID NO: 1277700 - DNA, 15 bp, Homo sapiens
gactttcctcaaata

SEQ ID NO: 1277701 - DNA, 15 bp, Homo sapiens
tgactttcctcaaat

SEQ ID NO: 1277702 - DNA, 15 bp, Homo sapiens
ttgactttcctcaaa

SEQ ID NO: 1277703 - DNA, 15 bp, Homo sapiens
tttgactttcctcaa

SEQ ID NO: 1277704 - DNA, 15 bp, Homo sapiens
ctttgactttcctca

SEQ ID NO: 1277705 - DNA, 15 bp, Homo sapiens
tctttgactttcctc

SEQ ID NO: 1277706 - DNA, 15 bp, Homo sapiens
ttctttgactttcct

SEQ ID NO: 1277707 - DNA, 15 bp, Homo sapiens
attctttgactttcc

SEQ ID NO: 1277708 - DNA, 15 bp, Homo sapiens
aattctttgactttc

SEQ ID NO: 1277709 - DNA, 15 bp, Homo sapiens
gaattctttgacttt

SEQ ID NO: 1277710 - DNA, 15 bp, Homo sapiens
tgaattctttgactt

SEQ ID NO: 1277711 - DNA, 15 bp, Homo sapiens
ttgaattctttgact

SEQ ID NO: 1277712 - DNA, 15 bp, Homo sapiens
cttgaattctttgac

SEQ ID NO: 1277713 - DNA, 15 bp, Homo sapiens
tcttgaattctttga

SEQ ID NO: 1277714 - DNA, 15 bp, Homo sapiens
atcttgaattctttg

SEQ ID NO: 1277715 - DNA, 15 bp, Homo sapiens
tatcttgaattcttt

SEQ ID NO: 1277716 - DNA, 15 bp, Homo sapiens
gtatcttgaattctt

SEQ ID NO: 1277717 - DNA, 15 bp, Homo sapiens
tgtatcttgaattct

SEQ ID NO: 1277718 - DNA, 15 bp, Homo sapiens
gtgtatcttgaattc

SEQ ID NO: 1277719 - DNA, 15 bp, Homo sapiens
tgtgtatcttgaatt

SEQ ID NO: 1277720 - DNA, 15 bp, Homo sapiens
ctgtgtatcttgaat

SEQ ID NO: 1277721 - DNA, 15 bp, Homo sapiens
tctgtgtatcttgaa

SEQ ID NO: 1277722 - DNA, 15 bp, Homo sapiens
ctctgtgtatcttga

SEQ ID NO: 1277723 - DNA, 15 bp, Homo sapiens
tctctgtgtatcttg

SEQ ID NO: 1277724 - DNA, 15 bp, Homo sapiens
ttctctgtgtatctt

SEQ ID NO: 1277725 - DNA, 15 bp, Homo sapiens
cttctctgtgtatct

SEQ ID NO: 1277726 - DNA, 15 bp, Homo sapiens
ccttctctgtgtatc

SEQ ID NO: 1277727 - DNA, 15 bp, Homo sapiens
tccttctctgtgtat

SEQ ID NO: 1277728 - DNA, 15 bp, Homo sapiens
ttccttctctgtgta

SEQ ID NO: 1277729 - DNA, 15 bp, Homo sapiens
attccttctctgtgt

SEQ ID NO: 1277730 - DNA, 15 bp, Homo sapiens
aattccttctctgtg

SEQ ID NO: 1277731 - DNA, 15 bp, Homo sapiens
gaattccttctctgt

SEQ ID NO: 1277732 - DNA, 15 bp, Homo sapiens
tgaattccttctctg

SEQ ID NO: 1277733 - DNA, 15 bp, Homo sapiens
ctgaattccttctct

SEQ ID NO: 1277734 - DNA, 15 bp, Homo sapiens
tctgaattccttctc

SEQ ID NO: 1277735 - DNA, 15 bp, Homo sapiens
ttctgaattccttct

SEQ ID NO: 1277736 - DNA, 15 bp, Homo sapiens
attctgaattccttc

SEQ ID NO: 1277737 - DNA, 15 bp, Homo sapiens
aattctgaattcctt

SEQ ID NO: 1277738 - DNA, 15 bp, Homo sapiens
aaattctgaattcct

SEQ ID NO: 1277739 - DNA, 15 bp, Homo sapiens
aaaattctgaattcc

SEQ ID NO: 1277740 - DNA, 15 bp, Homo sapiens
caaaattctgaattc

SEQ ID NO: 1277741 - DNA, 15 bp, Homo sapiens
acaaaattctgaatt

SEQ ID NO: 1277742 - DNA, 15 bp, Homo sapiens
gacaaaattctgaat

SEQ ID NO: 1277743 - DNA, 15 bp, Homo sapiens
tgacaaaattctgaa

SEQ ID NO: 1277744 - DNA, 15 bp, Homo sapiens
ctgacaaaattctga

SEQ ID NO: 1277745 - DNA, 15 bp, Homo sapiens
tctgacaaaattctg

SEQ ID NO: 1277746 - DNA, 15 bp, Homo sapiens
gtctgacaaaattct

SEQ ID NO: 1277747 - DNA, 15 bp, Homo sapiens
tgtctgacaaaattc

SEQ ID NO: 1277748 - DNA, 15 bp, Homo sapiens
ttgtctgacaaaatt

SEQ ID NO: 1277749 - DNA, 15 bp, Homo sapiens
tttgtctgacaaaat

SEQ ID NO: 1277750 - DNA, 15 bp, Homo sapiens
gtttgtctgacaaaa

SEQ ID NO: 1277751 - DNA, 15 bp, Homo sapiens
agtttgtctgacaaa

SEQ ID NO: 1277752 - DNA, 15 bp, Homo sapiens
aagtttgtctgacaa

SEQ ID NO: 1277753 - DNA, 15 bp, Homo sapiens
taagtttgtctgaca

SEQ ID NO: 1277754 - DNA, 15 bp, Homo sapiens
ctaagtttgtctgac

SEQ ID NO: 1277755 - DNA, 15 bp, Homo sapiens
gctaagtttgtctga

SEQ ID NO: 1277756 - DNA, 15 bp, Homo sapiens
tgctaagtttgtctg

SEQ ID NO: 1277757 - DNA, 15 bp, Homo sapiens
ttgctaagtttgtct

SEQ ID NO: 1277758 - DNA, 15 bp, Homo sapiens
tttgctaagtttgtc

SEQ ID NO: 1277759 - DNA, 15 bp, Homo sapiens
ctttgctaagtttgt

SEQ ID NO: 1277760 - DNA, 15 bp, Homo sapiens
tctttgctaagtttg

SEQ ID NO: 1277761 - DNA, 15 bp, Homo sapiens
ctctttgctaagttt

SEQ ID NO: 1277762 - DNA, 15 bp, Homo sapiens
tctctttgctaagtt

SEQ ID NO: 1277763 - DNA, 15 bp, Homo sapiens
atctctttgctaagt

SEQ ID NO: 1277764 - DNA, 15 bp, Homo sapiens
aatctctttgctaag

SEQ ID NO: 1277765 - DNA, 15 bp, Homo sapiens
caatctctttgctaa

SEQ ID NO: 1277766 - DNA, 15 bp, Homo sapiens
tcaatctctttgcta

SEQ ID NO: 1277767 - DNA, 15 bp, Homo sapiens
ttcaatctctttgct

SEQ ID NO: 1277768 - DNA, 15 bp, Homo sapiens
tttcaatctctttgc

SEQ ID NO: 1277769 - DNA, 15 bp, Homo sapiens
atttcaatctctttg

SEQ ID NO: 1277770 - DNA, 15 bp, Homo sapiens
tatttcaatctcttt

SEQ ID NO: 1277771 - DNA, 15 bp, Homo sapiens
ttatttcaatctctt

SEQ ID NO: 1277772 - DNA, 15 bp, Homo sapiens
attatttcaatctct

SEQ ID NO: 1277773 - DNA, 15 bp, Homo sapiens
aattatttcaatctc

SEQ ID NO: 1277774 - DNA, 15 bp, Homo sapiens
aaattatttcaatct

SEQ ID NO: 1277775 - DNA, 15 bp, Homo sapiens
aaaattatttcaatc

SEQ ID NO: 1277776 - DNA, 15 bp, Homo sapiens
caaaattatttcaat

SEQ ID NO: 1277777 - DNA, 15 bp, Homo sapiens
tcaaaattatttcaa

SEQ ID NO: 1277778 - DNA, 15 bp, Homo sapiens
ctcaaaattatttca

SEQ ID NO: 1277779 - DNA, 15 bp, Homo sapiens
tctcaaaattatttc

SEQ ID NO: 1277780 - DNA, 15 bp, Homo sapiens
ttctcaaaattattt

SEQ ID NO: 1277781 - DNA, 15 bp, Homo sapiens
tttctcaaaattatt

SEQ ID NO: 1277782 - DNA, 15 bp, Homo sapiens
atttctcaaaattat

SEQ ID NO: 1277783 - DNA, 15 bp, Homo sapiens
gatttctcaaaatta

SEQ ID NO: 1277784 - DNA, 15 bp, Homo sapiens
tgatttctcaaaatt

SEQ ID NO: 1277785 - DNA, 15 bp, Homo sapiens
ttgatttctcaaaat

SEQ ID NO: 1277786 - DNA, 15 bp, Homo sapiens
cttgatttctcaaaa

SEQ ID NO: 1277787 - DNA, 15 bp, Homo sapiens
gcttgatttctcaaa

SEQ ID NO: 1277788 - DNA, 15 bp, Homo sapiens
tgcttgatttctcaa

SEQ ID NO: 1277789 - DNA, 15 bp, Homo sapiens
ctgcttgatttctca

SEQ ID NO: 1277790 - DNA, 15 bp, Homo sapiens
tctgcttgatttctc

SEQ ID NO: 1277791 - DNA, 15 bp, Homo sapiens
ttctgcttgatttct

SEQ ID NO: 1277792 - DNA, 15 bp, Homo sapiens
cttctgcttgatttc

SEQ ID NO: 1277793 - DNA, 15 bp, Homo sapiens
acttctgcttgattt

SEQ ID NO: 1277794 - DNA, 15 bp, Homo sapiens
aacttctgcttgatt

SEQ ID NO: 1277795 - DNA, 15 bp, Homo sapiens
taacttctgcttgat

SEQ ID NO: 1277796 - DNA, 15 bp, Homo sapiens
ataacttctgcttga

SEQ ID NO: 1277797 - DNA, 15 bp, Homo sapiens
cataacttctgcttg

SEQ ID NO: 1277798 - DNA, 15 bp, Homo sapiens
ccataacttctgctt

SEQ ID NO: 1277799 - DNA, 15 bp, Homo sapiens
tccataacttctgct

SEQ ID NO: 1277800 - DNA, 15 bp, Homo sapiens
ctccataacttctgc

SEQ ID NO: 1277801 - DNA, 15 bp, Homo sapiens
gctccataacttctg

SEQ ID NO: 1277802 - DNA, 15 bp, Homo sapiens
agctccataacttct

SEQ ID NO: 1277803 - DNA, 15 bp, Homo sapiens
cagctccataacttc

SEQ ID NO: 1277804 - DNA, 15 bp, Homo sapiens
tcagctccataactt

SEQ ID NO: 1277805 - DNA, 15 bp, Homo sapiens
ttcagctccataact

SEQ ID NO: 1277806 - DNA, 15 bp, Homo sapiens
tttcagctccataac

SEQ ID NO: 1277807 - DNA, 15 bp, Homo sapiens
ttttcagctccataa

SEQ ID NO: 1277808 - DNA, 15 bp, Homo sapiens
tttttcagctccata

SEQ ID NO: 1277809 - DNA, 15 bp, Homo sapiens
atttttcagctccat

SEQ ID NO: 1277810 - DNA, 15 bp, Homo sapiens
catttttcagctcca

SEQ ID NO: 1277811 - DNA, 15 bp, Homo sapiens
gcatttttcagctcc

SEQ ID NO: 1277812 - DNA, 15 bp, Homo sapiens
tgcatttttcagctc

SEQ ID NO: 1277813 - DNA, 15 bp, Homo sapiens
ttgcatttttcagct

SEQ ID NO: 1277814 - DNA, 15 bp, Homo sapiens
attgcatttttcagc

SEQ ID NO: 1277815 - DNA, 15 bp, Homo sapiens
aattgcatttttcag

SEQ ID NO: 1277816 - DNA, 15 bp, Homo sapiens
caattgcatttttca

SEQ ID NO: 1277817 - DNA, 15 bp, Homo sapiens
ccaattgcatttttc

SEQ ID NO: 1277818 - DNA, 15 bp, Homo sapiens
gccaattgcattttt

SEQ ID NO: 1277819 - DNA, 15 bp, Homo sapiens
tgccaattgcatttt

SEQ ID NO: 1277820 - DNA, 15 bp, Homo sapiens
atgccaattgcattt

SEQ ID NO: 1277821 - DNA, 15 bp, Homo sapiens
tatgccaattgcatt

SEQ ID NO: 1277822 - DNA, 15 bp, Homo sapiens
ttatgccaattgcat

SEQ ID NO: 1277823 - DNA, 15 bp, Homo sapiens
attatgccaattgca

SEQ ID NO: 1277824 - DNA, 15 bp, Homo sapiens
cattatgccaattgc

SEQ ID NO: 1277825 - DNA, 15 bp, Homo sapiens
tcattatgccaattg

SEQ ID NO: 1277826 - DNA, 15 bp, Homo sapiens
ttcattatgccaatt

SEQ ID NO: 1277827 - DNA, 15 bp, Homo sapiens
cttcattatgccaat

SEQ ID NO: 1277828 - DNA, 15 bp, Homo sapiens
tcttcattatgccaa

SEQ ID NO: 1277829 - DNA, 15 bp, Homo sapiens
ttcttcattatgcca

SEQ ID NO: 1277830 - DNA, 15 bp, Homo sapiens
attcttcattatgcc

SEQ ID NO: 1277831 - DNA, 15 bp, Homo sapiens
cattcttcattatgc

SEQ ID NO: 1277832 - DNA, 15 bp, Homo sapiens
gcattcttcattatg

SEQ ID NO: 1277833 - DNA, 15 bp, Homo sapiens
tgcattcttcattat

SEQ ID NO: 1277834 - DNA, 15 bp, Homo sapiens
atgcattcttcatta

SEQ ID NO: 1277835 - DNA, 15 bp, Homo sapiens
gatgcattcttcatt

SEQ ID NO: 1277836 - DNA, 15 bp, Homo sapiens
tgatgcattcttcat

SEQ ID NO: 1277837 - DNA, 15 bp, Homo sapiens
ctgatgcattcttca

SEQ ID NO: 1277838 - DNA, 15 bp, Homo sapiens
tctgatgcattcttc

SEQ ID NO: 1277839 - DNA, 15 bp, Homo sapiens
ctctgatgcattctt

SEQ ID NO: 1277840 - DNA, 15 bp, Homo sapiens
actctgatgcattct

SEQ ID NO: 1277841 - DNA, 15 bp, Homo sapiens
gactctgatgcattc

SEQ ID NO: 1277842 - DNA, 15 bp, Homo sapiens
ggactctgatgcatt

SEQ ID NO: 1277843 - DNA, 15 bp, Homo sapiens
aggactctgatgcat

SEQ ID NO: 1277844 - DNA, 15 bp, Homo sapiens
aaggactctgatgca

SEQ ID NO: 1277845 - DNA, 15 bp, Homo sapiens
aaaggactctgatgc

SEQ ID NO: 1277846 - DNA, 15 bp, Homo sapiens
taaaggactctgatg

SEQ ID NO: 1277847 - DNA, 15 bp, Homo sapiens
ttaaaggactctgat

SEQ ID NO: 1277848 - DNA, 15 bp, Homo sapiens
attaaaggactctga

SEQ ID NO: 1277849 - DNA, 15 bp, Homo sapiens
tattaaaggactctg

SEQ ID NO: 1277850 - DNA, 15 bp, Homo sapiens
ctattaaaggactct

SEQ ID NO: 1277851 - DNA, 15 bp, Homo sapiens
gctattaaaggactc

SEQ ID NO: 1277852 - DNA, 15 bp, Homo sapiens
tgctattaaaggact

SEQ ID NO: 1277853 - DNA, 15 bp, Homo sapiens
ctgctattaaaggac

SEQ ID NO: 1277854 - DNA, 15 bp, Homo sapiens
tctgctattaaagga

SEQ ID NO: 1277855 - DNA, 15 bp, Homo sapiens
ttctgctattaaagg

SEQ ID NO: 1277856 - DNA, 15 bp, Homo sapiens
attctgctattaaag

SEQ ID NO: 1277857 - DNA, 15 bp, Homo sapiens
aattctgctattaaa

SEQ ID NO: 1277858 - DNA, 15 bp, Homo sapiens
caattctgctattaa

SEQ ID NO: 1277859 - DNA, 15 bp, Homo sapiens
tcaattctgctatta

SEQ ID NO: 1277860 - DNA, 15 bp, Homo sapiens
atcaattctgctatt

SEQ ID NO: 1277861 - DNA, 15 bp, Homo sapiens
gatcaattctgctat

SEQ ID NO: 1277862 - DNA, 15 bp, Homo sapiens
tgatcaattctgcta

SEQ ID NO: 1277863 - DNA, 15 bp, Homo sapiens
ttgatcaattctgct

SEQ ID NO: 1277864 - DNA, 15 bp, Homo sapiens
cttgatcaattctgc

SEQ ID NO: 1277865 - DNA, 15 bp, Homo sapiens
gcttgatcaattctg

SEQ ID NO: 1277866 - DNA, 15 bp, Homo sapiens
tgcttgatcaattct

SEQ ID NO: 1277867 - DNA, 15 bp, Homo sapiens
ctgcttgatcaattc

SEQ ID NO: 1277868 - DNA, 15 bp, Homo sapiens
tctgcttgatcaatt

SEQ ID NO: 1277869 - DNA, 15 bp, Homo sapiens
ttctgcttgatcaat

SEQ ID NO: 1277870 - DNA, 15 bp, Homo sapiens
cttctgcttgatcaa

SEQ ID NO: 1277871 - DNA, 15 bp, Homo sapiens
tcttctgcttgatca

SEQ ID NO: 1277872 - DNA, 15 bp, Homo sapiens
ttcttctgcttgatc

SEQ ID NO: 1277873 - DNA, 15 bp, Homo sapiens
tttcttctgcttgat

SEQ ID NO: 1277874 - DNA, 15 bp, Homo sapiens
ctttcttctgcttga

SEQ ID NO: 1277875 - DNA, 15 bp, Homo sapiens
tctttcttctgcttg

SEQ ID NO: 1277876 - DNA, 15 bp, Homo sapiens
ttctttcttctgctt

SEQ ID NO: 1277877 - DNA, 15 bp, Homo sapiens
attctttcttctgct

SEQ ID NO: 1277878 - DNA, 15 bp, Homo sapiens
aattctttcttctgc

SEQ ID NO: 1277879 - DNA, 15 bp, Homo sapiens
taattctttcttctg

SEQ ID NO: 1277880 - DNA, 15 bp, Homo sapiens
ctaattctttcttct

SEQ ID NO: 1277881 - DNA, 15 bp, Homo sapiens
actaattctttcttc

SEQ ID NO: 1277882 - DNA, 15 bp, Homo sapiens
cactaattctttctt

SEQ ID NO: 1277883 - DNA, 15 bp, Homo sapiens
tcactaattctttct

SEQ ID NO: 1277884 - DNA, 15 bp, Homo sapiens
ttcactaattctttc

SEQ ID NO: 1277885 - DNA, 15 bp, Homo sapiens
gttcactaattcttt

SEQ ID NO: 1277886 - DNA, 15 bp, Homo sapiens
agttcactaattctt

SEQ ID NO: 1277887 - DNA, 15 bp, Homo sapiens
aagttcactaattct

SEQ ID NO: 1277888 - DNA, 15 bp, Homo sapiens
caagttcactaattc

SEQ ID NO: 1277889 - DNA, 15 bp, Homo sapiens
tcaagttcactaatt

SEQ ID NO: 1277890 - DNA, 15 bp, Homo sapiens
ttcaagttcactaat

SEQ ID NO: 1277891 - DNA, 15 bp, Homo sapiens
cttcaagttcactaa

SEQ ID NO: 1277892 - DNA, 15 bp, Homo sapiens
tcttcaagttcacta

SEQ ID NO: 1277893 - DNA, 15 bp, Homo sapiens
gtcttcaagttcact

SEQ ID NO: 1277894 - DNA, 15 bp, Homo sapiens
tgtcttcaagttcac

SEQ ID NO: 1277895 - DNA, 15 bp, Homo sapiens
ttgtcttcaagttca

SEQ ID NO: 1277896 - DNA, 15 bp, Homo sapiens
cttgtcttcaagttc

SEQ ID NO: 1277897 - DNA, 15 bp, Homo sapiens
gcttgtcttcaagtt

SEQ ID NO: 1277898 - DNA, 15 bp, Homo sapiens
agcttgtcttcaagt

SEQ ID NO: 1277899 - DNA, 15 bp, Homo sapiens
tagcttgtcttcaag

SEQ ID NO: 1277900 - DNA, 15 bp, Homo sapiens
atagcttgtcttcaa

SEQ ID NO: 1277901 - DNA, 15 bp, Homo sapiens
aatagcttgtcttca

SEQ ID NO: 1277902 - DNA, 15 bp, Homo sapiens
aaatagcttgtcttc

SEQ ID NO: 1277903 - DNA, 15 bp, Homo sapiens
caaatagcttgtctt

SEQ ID NO: 1277904 - DNA, 15 bp, Homo sapiens
tcaaatagcttgtct

SEQ ID NO: 1277905 - DNA, 15 bp, Homo sapiens
ttcaaatagcttgtc

SEQ ID NO: 1277906 - DNA, 15 bp, Homo sapiens
tttcaaatagcttgt

SEQ ID NO: 1277907 - DNA, 15 bp, Homo sapiens
ttttcaaatagcttg

SEQ ID NO: 1277908 - DNA, 15 bp, Homo sapiens
attttcaaatagctt

SEQ ID NO: 1277909 - DNA, 15 bp, Homo sapiens
tattttcaaatagct

SEQ ID NO: 1277910 - DNA, 15 bp, Homo sapiens
gtattttcaaatagc

SEQ ID NO: 1277911 - DNA, 15 bp, Homo sapiens
tgtattttcaaatag

SEQ ID NO: 1277912 - DNA, 15 bp, Homo sapiens
atgtattttcaaata

SEQ ID NO: 1277913 - DNA, 15 bp, Homo sapiens
tatgtattttcaaat

SEQ ID NO: 1277914 - DNA, 15 bp, Homo sapiens
ctatgtattttcaaa

SEQ ID NO: 1277915 - DNA, 15 bp, Homo sapiens
actatgtattttcaa

SEQ ID NO: 1277916 - DNA, 15 bp, Homo sapiens
gactatgtattttca

SEQ ID NO: 1277917 - DNA, 15 bp, Homo sapiens
tgactatgtattttc

SEQ ID NO: 1277918 - DNA, 15 bp, Homo sapiens
ctgactatgtatttt

SEQ ID NO: 1277919 - DNA, 15 bp, Homo sapiens
tctgactatgtattt

SEQ ID NO: 1277920 - DNA, 15 bp, Homo sapiens
ctctgactatgtatt

SEQ ID NO: 1277921 - DNA, 15 bp, Homo sapiens
cctctgactatgtat

SEQ ID NO: 1277922 - DNA, 15 bp, Homo sapiens
tcctctgactatgta

SEQ ID NO: 1277923 - DNA, 15 bp, Homo sapiens
ctcctctgactatgt

SEQ ID NO: 1277924 - DNA, 15 bp, Homo sapiens
tctcctctgactatg

SEQ ID NO: 1277925 - DNA, 15 bp, Homo sapiens
gtctcctctgactat

SEQ ID NO: 1277926 - DNA, 15 bp, Homo sapiens
tgtctcctctgacta

SEQ ID NO: 1277927 - DNA, 15 bp, Homo sapiens
ttgtctcctctgact

SEQ ID NO: 1277928 - DNA, 15 bp, Homo sapiens
tttgtctcctctgac

SEQ ID NO: 1277929 - DNA, 15 bp, Homo sapiens
ttttgtctcctctga

SEQ ID NO: 1277930 - DNA, 15 bp, Homo sapiens
cttttgtctcctctg

SEQ ID NO: 1277931 - DNA, 15 bp, Homo sapiens
tcttttgtctcctct

SEQ ID NO: 1277932 - DNA, 15 bp, Homo sapiens
ttcttttgtctcctc

SEQ ID NO: 1277933 - DNA, 15 bp, Homo sapiens
tttcttttgtctcct

SEQ ID NO: 1277934 - DNA, 15 bp, Homo sapiens
ttttcttttgtctcc

SEQ ID NO: 1277935 - DNA, 15 bp, Homo sapiens
tttttcttttgtctc

SEQ ID NO: 1277936 - DNA, 15 bp, Homo sapiens
ctttttcttttgtct

SEQ ID NO: 1277937 - DNA, 15 bp, Homo sapiens
tctttttcttttgtc

SEQ ID NO: 1277938 - DNA, 15 bp, Homo sapiens
ttctttttcttttgt

SEQ ID NO: 1277939 - DNA, 15 bp, Homo sapiens
attctttttcttttg

SEQ ID NO: 1277940 - DNA, 15 bp, Homo sapiens
tattctttttctttt

SEQ ID NO: 1277941 - DNA, 15 bp, Homo sapiens
ttattctttttcttt

SEQ ID NO: 1277942 - DNA, 15 bp, Homo sapiens
tttattctttttctt

SEQ ID NO: 1277943 - DNA, 15 bp, Homo sapiens
ttttattctttttct

SEQ ID NO: 1277944 - DNA, 15 bp, Homo sapiens
tttttattctttttc

SEQ ID NO: 1277945 - DNA, 15 bp, Homo sapiens
ttttttattcttttt

SEQ ID NO: 1277946 - DNA, 15 bp, Homo sapiens
gttttttattctttt

SEQ ID NO: 1277947 - DNA, 15 bp, Homo sapiens
agttttttattcttt

SEQ ID NO: 1277948 - DNA, 15 bp, Homo sapiens
tagttttttattctt

SEQ ID NO: 1277949 - DNA, 15 bp, Homo sapiens
atagttttttattct

SEQ ID NO: 1277950 - DNA, 15 bp, Homo sapiens
catagttttttattc

SEQ ID NO: 1277951 - DNA, 15 bp, Homo sapiens
tcatagttttttatt

SEQ ID NO: 1277952 - DNA, 15 bp, Homo sapiens
ttcatagttttttat

SEQ ID NO: 1277953 - DNA, 15 bp, Homo sapiens
cttcatagtttttta

SEQ ID NO: 1277954 - DNA, 15 bp, Homo sapiens
gcttcatagtttttt

SEQ ID NO: 1277955 - DNA, 15 bp, Homo sapiens
tgcttcatagttttt

SEQ ID NO: 1277956 - DNA, 15 bp, Homo sapiens
gtgcttcatagtttt

SEQ ID NO: 1277957 - DNA, 15 bp, Homo sapiens
tgtgcttcatagttt

SEQ ID NO: 1277958 - DNA, 15 bp, Homo sapiens
ttgtgcttcatagtt

SEQ ID NO: 1277959 - DNA, 15 bp, Homo sapiens
gttgtgcttcatagt

SEQ ID NO: 1277960 - DNA, 15 bp, Homo sapiens
agttgtgcttcatag

SEQ ID NO: 1277961 - DNA, 15 bp, Homo sapiens
tagttgtgcttcata

SEQ ID NO: 1277962 - DNA, 15 bp, Homo sapiens
atagttgtgcttcat

SEQ ID NO: 1277963 - DNA, 15 bp, Homo sapiens
catagttgtgcttca

SEQ ID NO: 1277964 - DNA, 15 bp, Homo sapiens
ccatagttgtgcttc

SEQ ID NO: 1277965 - DNA, 15 bp, Homo sapiens
cccatagttgtgctt

SEQ ID NO: 1277966 - DNA, 15 bp, Homo sapiens
tcccatagttgtgct

SEQ ID NO: 1277967 - DNA, 15 bp, Homo sapiens
atcccatagttgtgc

SEQ ID NO: 1277968 - DNA, 15 bp, Homo sapiens
gatcccatagttgtg

SEQ ID NO: 1277969 - DNA, 15 bp, Homo sapiens
agatcccatagttgt

SEQ ID NO: 1277970 - DNA, 15 bp, Homo sapiens
tagatcccatagttg

SEQ ID NO: 1277971 - DNA, 15 bp, Homo sapiens
ctagatcccatagtt

SEQ ID NO: 1277972 - DNA, 15 bp, Homo sapiens
tctagatcccatagt

SEQ ID NO: 1277973 - DNA, 15 bp, Homo sapiens
ttctagatcccatag

SEQ ID NO: 1277974 - DNA, 15 bp, Homo sapiens
tttctagatcccata

SEQ ID NO: 1277975 - DNA, 15 bp, Homo sapiens
ttttctagatcccat

SEQ ID NO: 1277976 - DNA, 15 bp, Homo sapiens
gttttctagatccca

SEQ ID NO: 1277977 - DNA, 15 bp, Homo sapiens
tgttttctagatccc

SEQ ID NO: 1277978 - DNA, 15 bp, Homo sapiens
ctgttttctagatcc

SEQ ID NO: 1277979 - DNA, 15 bp, Homo sapiens
gctgttttctagatc

SEQ ID NO: 1277980 - DNA, 15 bp, Homo sapiens
ggctgttttctagat

SEQ ID NO: 1277981 - DNA, 15 bp, Homo sapiens
aggctgttttctaga

SEQ ID NO: 1277982 - DNA, 15 bp, Homo sapiens
gaggctgttttctag

SEQ ID NO: 1277983 - DNA, 15 bp, Homo sapiens
tgaggctgttttcta

SEQ ID NO: 1277984 - DNA, 15 bp, Homo sapiens
ttgaggctgttttct

SEQ ID NO: 1277985 - DNA, 15 bp, Homo sapiens
tttgaggctgttttc

SEQ ID NO: 1277986 - DNA, 15 bp, Homo sapiens
atttgaggctgtttt

SEQ ID NO: 1277987 - DNA, 15 bp, Homo sapiens
catttgaggctgttt

SEQ ID NO: 1277988 - DNA, 15 bp, Homo sapiens
ccatttgaggctgtt

SEQ ID NO: 1277989 - DNA, 15 bp, Homo sapiens
cccatttgaggctgt

SEQ ID NO: 1277990 - DNA, 15 bp, Homo sapiens
acccatttgaggctg

SEQ ID NO: 1277991 - DNA, 15 bp, Homo sapiens
tacccatttgaggct

SEQ ID NO: 1277992 - DNA, 15 bp, Homo sapiens
ttacccatttgaggc

SEQ ID NO: 1277993 - DNA, 15 bp, Homo sapiens
cttacccatttgagg

SEQ ID NO: 1277994 - DNA, 15 bp, Homo sapiens
acttacccatttgag

SEQ ID NO: 1277995 - DNA, 15 bp, Homo sapiens
aacttacccatttga

SEQ ID NO: 1277996 - DNA, 15 bp, Homo sapiens
aaacttacccatttg

SEQ ID NO: 1277997 - DNA, 15 bp, Homo sapiens
taaacttacccattt

SEQ ID NO: 1277998 - DNA, 15 bp, Homo sapiens
ttaaacttacccatt

SEQ ID NO: 1277999 - DNA, 15 bp, Homo sapiens
cttaaacttacccat

SEQ ID NO: 1278000 - DNA, 15 bp, Homo sapiens
tcttaaacttaccca

SEQ ID NO: 1278001 - DNA, 15 bp, Homo sapiens
ctcttaaacttaccc

SEQ ID NO: 1278002 - DNA, 15 bp, Homo sapiens
actcttaaacttacc

SEQ ID NO: 1278003 - DNA, 15 bp, Homo sapiens
aactcttaaacttac

SEQ ID NO: 1278004 - DNA, 15 bp, Homo sapiens
taactcttaaactta

SEQ ID NO: 1278005 - DNA, 15 bp, Homo sapiens
ataactcttaaactt

SEQ ID NO: 1278006 - DNA, 15 bp, Homo sapiens
aataactcttaaact

SEQ ID NO: 1278007 - DNA, 15 bp, Homo sapiens
caataactcttaaac

SEQ ID NO: 1278008 - DNA, 15 bp, Homo sapiens
ccaataactcttaaa

SEQ ID NO: 1278009 - DNA, 15 bp, Homo sapiens
tccaataactcttaa

SEQ ID NO: 1278010 - DNA, 15 bp, Homo sapiens
gtccaataactctta

SEQ ID NO: 1278011 - DNA, 15 bp, Homo sapiens
agtccaataactctt

SEQ ID NO: 1278012 - DNA, 15 bp, Homo sapiens
aagtccaataactct

SEQ ID NO: 1278013 - DNA, 15 bp, Homo sapiens
taagtccaataactc

SEQ ID NO: 1278014 - DNA, 15 bp, Homo sapiens
ttaagtccaataact

SEQ ID NO: 1278015 - DNA, 15 bp, Homo sapiens
tttaagtccaataac

SEQ ID NO: 1278016 - DNA, 15 bp, Homo sapiens
ctttaagtccaataa

SEQ ID NO: 1278017 - DNA, 15 bp, Homo sapiens
tctttaagtccaata

SEQ ID NO: 1278018 - DNA, 15 bp, Homo sapiens
ctctttaagtccaat

SEQ ID NO: 1278019 - DNA, 15 bp, Homo sapiens
cctctttaagtccaa

SEQ ID NO: 1278020 - DNA, 15 bp, Homo sapiens
tcctctttaagtcca

SEQ ID NO: 1278021 - DNA, 15 bp, Homo sapiens
ctcctctttaagtcc

SEQ ID NO: 1278022 - DNA, 15 bp, Homo sapiens
cctcctctttaagtc

SEQ ID NO: 1278023 - DNA, 15 bp, Homo sapiens
acctcctctttaagt

SEQ ID NO: 1278024 - DNA, 15 bp, Homo sapiens
tacctcctctttaag

SEQ ID NO: 1278025 - DNA, 15 bp, Homo sapiens
ctacctcctctttaa

SEQ ID NO: 1278026 - DNA, 15 bp, Homo sapiens
tctacctcctcttta

SEQ ID NO: 1278027 - DNA, 15 bp, Homo sapiens
ctctacctcctcttt

SEQ ID NO: 1278028 - DNA, 15 bp, Homo sapiens
tctctacctcctctt

SEQ ID NO: 1278029 - DNA, 15 bp, Homo sapiens
ttctctacctcctct

SEQ ID NO: 1278030 - DNA, 15 bp, Homo sapiens
tttctctacctcctc

SEQ ID NO: 1278031 - DNA, 15 bp, Homo sapiens
ctttctctacctcct

SEQ ID NO: 1278032 - DNA, 15 bp, Homo sapiens
tctttctctacctcc

SEQ ID NO: 1278033 - DNA, 15 bp, Homo sapiens
ctctttctctacctc

SEQ ID NO: 1278034 - DNA, 15 bp, Homo sapiens
tctctttctctacct

SEQ ID NO: 1278035 - DNA, 15 bp, Homo sapiens
atctctttctctacc

SEQ ID NO: 1278036 - DNA, 15 bp, Homo sapiens
catctctttctctac

SEQ ID NO: 1278037 - DNA, 15 bp, Homo sapiens
ccatctctttctcta

SEQ ID NO: 1278038 - DNA, 15 bp, Homo sapiens
cccatctctttctct

SEQ ID NO: 1278039 - DNA, 15 bp, Homo sapiens
ccccatctctttctc

SEQ ID NO: 1278040 - DNA, 15 bp, Homo sapiens
accccatctctttct

SEQ ID NO: 1278041 - DNA, 15 bp, Homo sapiens
taccccatctctttc

SEQ ID NO: 1278042 - DNA, 15 bp, Homo sapiens
ctaccccatctcttt

SEQ ID NO: 1278043 - DNA, 15 bp, Homo sapiens
tctaccccatctctt

SEQ ID NO: 1278044 - DNA, 15 bp, Homo sapiens
ttctaccccatctct

SEQ ID NO: 1278045 - DNA, 15 bp, Homo sapiens
tttctaccccatctc

SEQ ID NO: 1278046 - DNA, 15 bp, Homo sapiens
ctttctaccccatct

SEQ ID NO: 1278047 - DNA, 15 bp, Homo sapiens
gctttctaccccatc

SEQ ID NO: 1278048 - DNA, 15 bp, Homo sapiens
agctttctaccccat

SEQ ID NO: 1278049 - DNA, 15 bp, Homo sapiens
aagctttctacccca

SEQ ID NO: 1278050 - DNA, 15 bp, Homo sapiens
taagctttctacccc

SEQ ID NO: 1278051 - DNA, 15 bp, Homo sapiens
ataagctttctaccc

SEQ ID NO: 1278052 - DNA, 15 bp, Homo sapiens
aataagctttctacc

SEQ ID NO: 1278053 - DNA, 15 bp, Homo sapiens
gaataagctttctac

SEQ ID NO: 1278054 - DNA, 15 bp, Homo sapiens
tgaataagctttcta

SEQ ID NO: 1278055 - DNA, 15 bp, Homo sapiens
ctgaataagctttct

SEQ ID NO: 1278056 - DNA, 15 bp, Homo sapiens
tctgaataagctttc

SEQ ID NO: 1278057 - DNA, 15 bp, Homo sapiens
ctctgaataagcttt

SEQ ID NO: 1278058 - DNA, 15 bp, Homo sapiens
cctctgaataagctt

SEQ ID NO: 1278059 - DNA, 15 bp, Homo sapiens
ccctctgaataagct

SEQ ID NO: 1278060 - DNA, 15 bp, Homo sapiens
tccctctgaataagc

SEQ ID NO: 1278061 - DNA, 15 bp, Homo sapiens
ttccctctgaataag

SEQ ID NO: 1278062 - DNA, 15 bp, Homo sapiens
ttttccctctgaata

SEQ ID NO: 1278063 - DNA, 15 bp, Homo sapiens
attttccctctgaat

SEQ ID NO: 1278064 - DNA, 15 bp, Homo sapiens
tattttccctctgaa

SEQ ID NO: 1278065 - DNA, 15 bp, Homo sapiens
ttattttccctctga

SEQ ID NO: 1278066 - DNA, 15 bp, Homo sapiens
gttattttccctctg

SEQ ID NO: 1278067 - DNA, 15 bp, Homo sapiens
tgttattttccctct

SEQ ID NO: 1278068 - DNA, 15 bp, Homo sapiens
ctgttattttccctc

SEQ ID NO: 1278069 - DNA, 15 bp, Homo sapiens
tctgttattttccct

SEQ ID NO: 1278070 - DNA, 15 bp, Homo sapiens
ctctgttattttccc

SEQ ID NO: 1278071 - DNA, 15 bp, Homo sapiens
tctctgttattttcc

SEQ ID NO: 1278072 - DNA, 15 bp, Homo sapiens
ttctctgttattttc

SEQ ID NO: 1278073 - DNA, 15 bp, Homo sapiens
gttctctgttatttt

SEQ ID NO: 1278074 - DNA, 15 bp, Homo sapiens
agttctctgttattt

SEQ ID NO: 1278075 - DNA, 15 bp, Homo sapiens
aagttctctgttatt

SEQ ID NO: 1278076 - DNA, 15 bp, Homo sapiens
gaagttctctgttat

SEQ ID NO: 1278077 - DNA, 15 bp, Homo sapiens
agaagttctctgtta

SEQ ID NO: 1278078 - DNA, 15 bp, Homo sapiens
gagaagttctctgtt

SEQ ID NO: 1278079 - DNA, 15 bp, Homo sapiens
tgagaagttctctgt

SEQ ID NO: 1278080 - DNA, 15 bp, Homo sapiens
ttgagaagttctctg

SEQ ID NO: 1278081 - DNA, 15 bp, Homo sapiens
tttgagaagttctct

SEQ ID NO: 1278082 - DNA, 15 bp, Homo sapiens
gtttgagaagttctc

SEQ ID NO: 1278083 - DNA, 15 bp, Homo sapiens
tgtttgagaagttct

SEQ ID NO: 1278084 - DNA, 15 bp, Homo sapiens
atgtttgagaagttc

SEQ ID NO: 1278085 - DNA, 15 bp, Homo sapiens
tatgtttgagaagtt

SEQ ID NO: 1278086 - DNA, 15 bp, Homo sapiens
ctatgtttgagaagt

SEQ ID NO: 1278087 - DNA, 15 bp, Homo sapiens
tctatgtttgagaag

SEQ ID NO: 1278088 - DNA, 15 bp, Homo sapiens
ctctatgtttgagaa

SEQ ID NO: 1278089 - DNA, 15 bp, Homo sapiens
tctctatgtttgaga

SEQ ID NO: 1278090 - DNA, 15 bp, Homo sapiens
ttctctatgtttgag

SEQ ID NO: 1278091 - DNA, 15 bp, Homo sapiens
tttctctatgtttga

SEQ ID NO: 1278092 - DNA, 15 bp, Homo sapiens
ctttctctatgtttg

SEQ ID NO: 1278093 - DNA, 15 bp, Homo sapiens
tctttctctatgttt

SEQ ID NO: 1278094 - DNA, 15 bp, Homo sapiens
atctttctctatgtt

SEQ ID NO: 1278095 - DNA, 15 bp, Homo sapiens
tatctttctctatgt

SEQ ID NO: 1278096 - DNA, 15 bp, Homo sapiens
atatctttctctatg

SEQ ID NO: 1278097 - DNA, 15 bp, Homo sapiens
aatatctttctctat

SEQ ID NO: 1278098 - DNA, 15 bp, Homo sapiens
taatatctttctcta

SEQ ID NO: 1278099 - DNA, 15 bp, Homo sapiens
ttaatatctttctct

SEQ ID NO: 1278100 - DNA, 15 bp, Homo sapiens
attaatatctttctc

SEQ ID NO: 1278101 - DNA, 15 bp, Homo sapiens
tattaatatctttct

SEQ ID NO: 1278102 - DNA, 15 bp, Homo sapiens
atattaatatctttc

SEQ ID NO: 1278103 - DNA, 15 bp, Homo sapiens
gatattaatatcttt

SEQ ID NO: 1278104 - DNA, 15 bp, Homo sapiens
ggatattaatatctt

SEQ ID NO: 1278105 - DNA, 15 bp, Homo sapiens
tggatattaatatct

SEQ ID NO: 1278106 - DNA, 15 bp, Homo sapiens
ttggatattaatatc

SEQ ID NO: 1278107 - DNA, 15 bp, Homo sapiens
cttggatattaatat

SEQ ID NO: 1278108 - DNA, 15 bp, Homo sapiens
gcttggatattaata

SEQ ID NO: 1278109 - DNA, 15 bp, Homo sapiens
tgcttggatattaat

SEQ ID NO: 1278110 - DNA, 15 bp, Homo sapiens
gtgcttggatattaa

SEQ ID NO: 1278111 - DNA, 15 bp, Homo sapiens
tgtgcttggatatta

SEQ ID NO: 1278112 - DNA, 15 bp, Homo sapiens
ttgtgcttggatatt

SEQ ID NO: 1278113 - DNA, 15 bp, Homo sapiens
cttgtgcttggatat

SEQ ID NO: 1278114 - DNA, 15 bp, Homo sapiens
tcttgtgcttggata

SEQ ID NO: 1278115 - DNA, 15 bp, Homo sapiens
ttcttgtgcttggat

SEQ ID NO: 1278116 - DNA, 15 bp, Homo sapiens
cttcttgtgcttgga

SEQ ID NO: 1278117 - DNA, 15 bp, Homo sapiens
tcttcttgtgcttgg

SEQ ID NO: 1278118 - DNA, 15 bp, Homo sapiens
atcttcttgtgcttg

SEQ ID NO: 1278119 - DNA, 15 bp, Homo sapiens
aatcttcttgtgctt

SEQ ID NO: 1278120 - DNA, 15 bp, Homo sapiens
taatcttcttgtgct

SEQ ID NO: 1278121 - DNA, 15 bp, Homo sapiens
ataatcttcttgtgc

SEQ ID NO: 1278122 - DNA, 15 bp, Homo sapiens
tataatcttcttgtg

SEQ ID NO: 1278123 - DNA, 15 bp, Homo sapiens
ctataatcttcttgt

SEQ ID NO: 1278124 - DNA, 15 bp, Homo sapiens
tctataatcttcttg

SEQ ID NO: 1278125 - DNA, 15 bp, Homo sapiens
ttctataatcttctt

SEQ ID NO: 1278126 - DNA, 15 bp, Homo sapiens
gttctataatcttct

SEQ ID NO: 1278127 - DNA, 15 bp, Homo sapiens
tgttctataatcttc

SEQ ID NO: 1278128 - DNA, 15 bp, Homo sapiens
gtgttctataatctt

SEQ ID NO: 1278129 - DNA, 15 bp, Homo sapiens
ggtgttctataatct

SEQ ID NO: 1278130 - DNA, 15 bp, Homo sapiens
tggtgttctataatc

SEQ ID NO: 1278131 - DNA, 15 bp, Homo sapiens
ttggtgttctataat

SEQ ID NO: 1278132 - DNA, 15 bp, Homo sapiens
cttggtgttctataa

SEQ ID NO: 1278133 - DNA, 15 bp, Homo sapiens
gcttggtgttctata

SEQ ID NO: 1278134 - DNA, 15 bp, Homo sapiens
tgcttggtgttctat

SEQ ID NO: 1278135 - DNA, 15 bp, Homo sapiens
ctgcttggtgttcta

SEQ ID NO: 1278136 - DNA, 15 bp, Homo sapiens
tctgcttggtgttct

SEQ ID NO: 1278137 - DNA, 15 bp, Homo sapiens
atctgcttggtgttc

SEQ ID NO: 1278138 - DNA, 15 bp, Homo sapiens
aatctgcttggtgtt

SEQ ID NO: 1278139 - DNA, 15 bp, Homo sapiens
aaatctgcttggtgt

SEQ ID NO: 1278140 - DNA, 15 bp, Homo sapiens
taaatctgcttggtg

SEQ ID NO: 1278141 - DNA, 15 bp, Homo sapiens
ttaaatctgcttggt

SEQ ID NO: 1278142 - DNA, 15 bp, Homo sapiens
gttaaatctgcttgg

SEQ ID NO: 1278143 - DNA, 15 bp, Homo sapiens
ggttaaatctgcttg

SEQ ID NO: 1278144 - DNA, 15 bp, Homo sapiens
gggttaaatctgctt

SEQ ID NO: 1278145 - DNA, 15 bp, Homo sapiens
tgggttaaatctgct

SEQ ID NO: 1278146 - DNA, 15 bp, Homo sapiens
ttgggttaaatctgc

SEQ ID NO: 1278147 - DNA, 15 bp, Homo sapiens
tttgggttaaatctg

SEQ ID NO: 1278148 - DNA, 15 bp, Homo sapiens
ttttgggttaaatct

SEQ ID NO: 1278149 - DNA, 15 bp, Homo sapiens
tttttgggttaaatc

SEQ ID NO: 1278150 - DNA, 15 bp, Homo sapiens
ttttttgggttaaat

SEQ ID NO: 1278151 - DNA, 15 bp, Homo sapiens
tttttttgggttaaa

SEQ ID NO: 1278152 - DNA, 15 bp, Homo sapiens
ctttttttgggttaa

SEQ ID NO: 1278153 - DNA, 15 bp, Homo sapiens
gctttttttgggtta

SEQ ID NO: 1278154 - DNA, 15 bp, Homo sapiens
ggctttttttgggtt

SEQ ID NO: 1278155 - DNA, 15 bp, Homo sapiens
aggctttttttgggt

SEQ ID NO: 1278156 - DNA, 15 bp, Homo sapiens
taggctttttttggg

SEQ ID NO: 1278157 - DNA, 15 bp, Homo sapiens
gtaggctttttttgg

SEQ ID NO: 1278158 - DNA, 15 bp, Homo sapiens
ggtaggctttttttg

SEQ ID NO: 1278159 - DNA, 15 bp, Homo sapiens
aggtaggcttttttt

SEQ ID NO: 1278160 - DNA, 15 bp, Homo sapiens
gaggtaggctttttt

SEQ ID NO: 1278161 - DNA, 15 bp, Homo sapiens
tgaggtaggcttttt

SEQ ID NO: 1278162 - DNA, 15 bp, Homo sapiens
ttgaggtaggctttt

SEQ ID NO: 1278163 - DNA, 15 bp, Homo sapiens
cttgaggtaggcttt

SEQ ID NO: 1278164 - DNA, 15 bp, Homo sapiens
ccttgaggtaggctt

SEQ ID NO: 1278165 - DNA, 15 bp, Homo sapiens
gccttgaggtaggct

SEQ ID NO: 1278166 - DNA, 15 bp, Homo sapiens
tgccttgaggtaggc

SEQ ID NO: 1278167 - DNA, 15 bp, Homo sapiens
atgccttgaggtagg

SEQ ID NO: 1278168 - DNA, 15 bp, Homo sapiens
aatgccttgaggtag

SEQ ID NO: 1278169 - DNA, 15 bp, Homo sapiens
aaatgccttgaggta

SEQ ID NO: 1278170 - DNA, 15 bp, Homo sapiens
gaaatgccttgaggt

SEQ ID NO: 1278171 - DNA, 15 bp, Homo sapiens
tgaaatgccttgagg

SEQ ID NO: 1278172 - DNA, 15 bp, Homo sapiens
atgaaatgccttgag

SEQ ID NO: 1278173 - DNA, 15 bp, Homo sapiens
tatgaaatgccttga

SEQ ID NO: 1278174 - DNA, 15 bp, Homo sapiens
ttatgaaatgccttg

SEQ ID NO: 1278175 - DNA, 15 bp, Homo sapiens
attatgaaatgcctt

SEQ ID NO: 1278176 - DNA, 15 bp, Homo sapiens
gattatgaaatgcct

SEQ ID NO: 1278177 - DNA, 15 bp, Homo sapiens
ggattatgaaatgcc

SEQ ID NO: 1278178 - DNA, 15 bp, Homo sapiens
tggattatgaaatgc

SEQ ID NO: 1278179 - DNA, 15 bp, Homo sapiens
ttggattatgaaatg

SEQ ID NO: 1278180 - DNA, 15 bp, Homo sapiens
gttggattatgaaat

SEQ ID NO: 1278181 - DNA, 15 bp, Homo sapiens
agttggattatgaaa

SEQ ID NO: 1278182 - DNA, 15 bp, Homo sapiens
gagttggattatgaa

SEQ ID NO: 1278183 - DNA, 15 bp, Homo sapiens
ggagttggattatga

SEQ ID NO: 1278184 - DNA, 15 bp, Homo sapiens
gggagttggattatg

SEQ ID NO: 1278185 - DNA, 15 bp, Homo sapiens
tgggagttggattat

SEQ ID NO: 1278186 - DNA, 15 bp, Homo sapiens
ttgggagttggatta

SEQ ID NO: 1278187 - DNA, 15 bp, Homo sapiens
tttgggagttggatt

SEQ ID NO: 1278188 - DNA, 15 bp, Homo sapiens
ctttgggagttggat

SEQ ID NO: 1278189 - DNA, 15 bp, Homo sapiens
cctttgggagttgga

SEQ ID NO: 1278190 - DNA, 15 bp, Homo sapiens
acctttgggagttgg

SEQ ID NO: 1278191 - DNA, 15 bp, Homo sapiens
tacctttgggagttg

SEQ ID NO: 1278192 - DNA, 15 bp, Homo sapiens
ttacctttgggagtt

SEQ ID NO: 1278193 - DNA, 15 bp, Homo sapiens
tttacctttgggagt

SEQ ID NO: 1278194 - DNA, 15 bp, Homo sapiens
ctttacctttgggag

SEQ ID NO: 1278195 - DNA, 15 bp, Homo sapiens
tctttacctttggga

SEQ ID NO: 1278196 - DNA, 15 bp, Homo sapiens
ttctttacctttggg

SEQ ID NO: 1278197 - DNA, 15 bp, Homo sapiens
attctttacctttgg

SEQ ID NO: 1278198 - DNA, 15 bp, Homo sapiens
tattctttacctttg

SEQ ID NO: 1278199 - DNA, 15 bp, Homo sapiens
ttattctttaccttt

SEQ ID NO: 1278200 - DNA, 15 bp, Homo sapiens
tttattctttacctt

SEQ ID NO: 1278201 - DNA, 15 bp, Homo sapiens
ctttattctttacct

SEQ ID NO: 1278202 - DNA, 15 bp, Homo sapiens
tctttattctttacc

SEQ ID NO: 1278203 - DNA, 15 bp, Homo sapiens
ttctttattctttac

SEQ ID NO: 1278204 - DNA, 15 bp, Homo sapiens
tttctttattcttta

SEQ ID NO: 1278205 - DNA, 15 bp, Homo sapiens
ctttctttattcttt

SEQ ID NO: 1278206 - DNA, 15 bp, Homo sapiens
cctttctttattctt

SEQ ID NO: 1278207 - DNA, 15 bp, Homo sapiens
tcctttctttattct

SEQ ID NO: 1278208 - DNA, 15 bp, Homo sapiens
gtcctttctttattc

SEQ ID NO: 1278209 - DNA, 15 bp, Homo sapiens
ggtcctttctttatt

SEQ ID NO: 1278210 - DNA, 15 bp, Homo sapiens
gggtcctttctttat

SEQ ID NO: 1278211 - DNA, 15 bp, Homo sapiens
agggtcctttcttta

SEQ ID NO: 1278212 - DNA, 15 bp, Homo sapiens
tagggtcctttcttt

SEQ ID NO: 1278213 - DNA, 15 bp, Homo sapiens
ttagggtcctttctt

SEQ ID NO: 1278214 - DNA, 15 bp, Homo sapiens
tttagggtcctttct

SEQ ID NO: 1278215 - DNA, 15 bp, Homo sapiens
ttttagggtcctttc

SEQ ID NO: 1278216 - DNA, 15 bp, Homo sapiens
cttttagggtccttt

SEQ ID NO: 1278217 - DNA, 15 bp, Homo sapiens
gcttttagggtcctt

SEQ ID NO: 1278218 - DNA, 15 bp, Homo sapiens
tgcttttagggtcct

SEQ ID NO: 1278219 - DNA, 15 bp, Homo sapiens
ctgcttttagggtcc

SEQ ID NO: 1278220 - DNA, 15 bp, Homo sapiens
gctgcttttagggtc

SEQ ID NO: 1278221 - DNA, 15 bp, Homo sapiens
tgctgcttttagggt

SEQ ID NO: 1278222 - DNA, 15 bp, Homo sapiens
ttgctgcttttaggg

SEQ ID NO: 1278223 - DNA, 15 bp, Homo sapiens
cttgctgcttttagg

SEQ ID NO: 1278224 - DNA, 15 bp, Homo sapiens
tcttgctgcttttag

SEQ ID NO: 1278225 - DNA, 15 bp, Homo sapiens
ttcttgctgctttta

SEQ ID NO: 1278226 - DNA, 15 bp, Homo sapiens
tttcttgctgctttt

SEQ ID NO: 1278227 - DNA, 15 bp, Homo sapiens
ttttcttgctgcttt

SEQ ID NO: 1278228 - DNA, 15 bp, Homo sapiens
tttttcttgctgctt

SEQ ID NO: 1278229 - DNA, 15 bp, Homo sapiens
ttttttcttgctgct

SEQ ID NO: 1278230 - DNA, 15 bp, Homo sapiens
gttttttcttgctgc

SEQ ID NO: 1278231 - DNA, 15 bp, Homo sapiens
tgttttttcttgctg

SEQ ID NO: 1278232 - DNA, 15 bp, Homo sapiens
ttgttttttcttgct

SEQ ID NO: 1278233 - DNA, 15 bp, Homo sapiens
cttgttttttcttgc

SEQ ID NO: 1278234 - DNA, 15 bp, Homo sapiens
acttgttttttcttg

SEQ ID NO: 1278235 - DNA, 15 bp, Homo sapiens
tacttgttttttctt

SEQ ID NO: 1278236 - DNA, 15 bp, Homo sapiens
ttacttgttttttct

SEQ ID NO: 1278237 - DNA, 15 bp, Homo sapiens
tttacttgttttttc

SEQ ID NO: 1278238 - DNA, 15 bp, Homo sapiens
atttacttgtttttt

SEQ ID NO: 1278239 - DNA, 15 bp, Homo sapiens
tatttacttgttttt

SEQ ID NO: 1278240 - DNA, 15 bp, Homo sapiens
ctatttacttgtttt

SEQ ID NO: 1278241 - DNA, 15 bp, Homo sapiens
gctatttacttgttt

SEQ ID NO: 1278242 - DNA, 15 bp, Homo sapiens
tgctatttacttgtt

SEQ ID NO: 1278243 - DNA, 15 bp, Homo sapiens
atgctatttacttgt

SEQ ID NO: 1278244 - DNA, 15 bp, Homo sapiens
tatgctatttacttg

SEQ ID NO: 1278245 - DNA, 15 bp, Homo sapiens
gtatgctatttactt

SEQ ID NO: 1278246 - DNA, 15 bp, Homo sapiens
tgtatgctatttact

SEQ ID NO: 1278247 - DNA, 15 bp, Homo sapiens
ttgtatgctatttac

SEQ ID NO: 1278248 - DNA, 15 bp, Homo sapiens
attgtatgctattta

SEQ ID NO: 1278249 - DNA, 15 bp, Homo sapiens
cattgtatgctattt

SEQ ID NO: 1278250 - DNA, 15 bp, Homo sapiens
ccattgtatgctatt

SEQ ID NO: 1278251 - DNA, 15 bp, Homo sapiens
gccattgtatgctat

SEQ ID NO: 1278252 - DNA, 15 bp, Homo sapiens
tgccattgtatgcta

SEQ ID NO: 1278253 - DNA, 15 bp, Homo sapiens
gtgccattgtatgct

SEQ ID NO: 1278254 - DNA, 15 bp, Homo sapiens
agtgccattgtatgc

SEQ ID NO: 1278255 - DNA, 15 bp, Homo sapiens
gagtgccattgtatg

SEQ ID NO: 1278256 - DNA, 15 bp, Homo sapiens
ggagtgccattgtat

SEQ ID NO: 1278257 - DNA, 15 bp, Homo sapiens
tggagtgccattgta

SEQ ID NO: 1278258 - DNA, 15 bp, Homo sapiens
ttggagtgccattgt

SEQ ID NO: 1278259 - DNA, 15 bp, Homo sapiens
cttggagtgccattg

SEQ ID NO: 1278260 - DNA, 15 bp, Homo sapiens
tcttggagtgccatt

SEQ ID NO: 1278261 - DNA, 15 bp, Homo sapiens
gtcttggagtgccat

SEQ ID NO: 1278262 - DNA, 15 bp, Homo sapiens
tgtcttggagtgcca

SEQ ID NO: 1278263 - DNA, 15 bp, Homo sapiens
atgtcttggagtgcc

SEQ ID NO: 1278264 - DNA, 15 bp, Homo sapiens
gatgtcttggagtgc

SEQ ID NO: 1278265 - DNA, 15 bp, Homo sapiens
agatgtcttggagtg

SEQ ID NO: 1278266 - DNA, 15 bp, Homo sapiens
tagatgtcttggagt

SEQ ID NO: 1278267 - DNA, 15 bp, Homo sapiens
ctagatgtcttggag

SEQ ID NO: 1278268 - DNA, 15 bp, Homo sapiens
gctagatgtcttgga

SEQ ID NO: 1278269 - DNA, 15 bp, Homo sapiens
tgctagatgtcttgg

SEQ ID NO: 1278270 - DNA, 15 bp, Homo sapiens
ctgctagatgtcttg

SEQ ID NO: 1278271 - DNA, 15 bp, Homo sapiens
gctgctagatgtctt

SEQ ID NO: 1278272 - DNA, 15 bp, Homo sapiens
tgctgctagatgtct

SEQ ID NO: 1278273 - DNA, 15 bp, Homo sapiens
ctgctgctagatgtc

SEQ ID NO: 1278274 - DNA, 15 bp, Homo sapiens
tctgctgctagatgt

SEQ ID NO: 1278275 - DNA, 15 bp, Homo sapiens
gtctgctgctagatg

SEQ ID NO: 1278276 - DNA, 15 bp, Homo sapiens
agtctgctgctagat

SEQ ID NO: 1278277 - DNA, 15 bp, Homo sapiens
tagtctgctgctaga

SEQ ID NO: 1278278 - DNA, 15 bp, Homo sapiens
atagtctgctgctag

SEQ ID NO: 1278279 - DNA, 15 bp, Homo sapiens
aatagtctgctgcta

SEQ ID NO: 1278280 - DNA, 15 bp, Homo sapiens
gaatagtctgctgct

SEQ ID NO: 1278281 - DNA, 15 bp, Homo sapiens
tgaatagtctgctgc

SEQ ID NO: 1278282 - DNA, 15 bp, Homo sapiens
ctgaatagtctgctg

SEQ ID NO: 1278283 - DNA, 15 bp, Homo sapiens
actgaatagtctgct

SEQ ID NO: 1278284 - DNA, 15 bp, Homo sapiens
cactgaatagtctgc

SEQ ID NO: 1278285 - DNA, 15 bp, Homo sapiens
ccactgaatagtctg

SEQ ID NO: 1278286 - DNA, 15 bp, Homo sapiens
tccactgaatagtct

SEQ ID NO: 1278287 - DNA, 15 bp, Homo sapiens
ttccactgaatagtc

SEQ ID NO: 1278288 - DNA, 15 bp, Homo sapiens
tttccactgaatagt

SEQ ID NO: 1278289 - DNA, 15 bp, Homo sapiens
gtttccactgaatag

SEQ ID NO: 1278290 - DNA, 15 bp, Homo sapiens
ggtttccactgaata

SEQ ID NO: 1278291 - DNA, 15 bp, Homo sapiens
aggtttccactgaat

SEQ ID NO: 1278292 - DNA, 15 bp, Homo sapiens
aaggtttccactgaa

SEQ ID NO: 1278293 - DNA, 15 bp, Homo sapiens
taaggtttccactga

SEQ ID NO: 1278294 - DNA, 15 bp, Homo sapiens
gtaaggtttccactg

SEQ ID NO: 1278295 - DNA, 15 bp, Homo sapiens
tgtaaggtttccact

SEQ ID NO: 1278296 - DNA, 15 bp, Homo sapiens
ctgtaaggtttccac

SEQ ID NO: 1278297 - DNA, 15 bp, Homo sapiens
cctgtaaggtttcca

SEQ ID NO: 1278298 - DNA, 15 bp, Homo sapiens
gcctgtaaggtttcc

SEQ ID NO: 1278299 - DNA, 15 bp, Homo sapiens
ggcctgtaaggtttc

SEQ ID NO: 1278300 - DNA, 15 bp, Homo sapiens
tggcctgtaaggttt

SEQ ID NO: 1278301 - DNA, 15 bp, Homo sapiens
ctggcctgtaaggtt

SEQ ID NO: 1278302 - DNA, 15 bp, Homo sapiens
cctggcctgtaaggt

SEQ ID NO: 1278303 - DNA, 15 bp, Homo sapiens
tcctggcctgtaagg

SEQ ID NO: 1278304 - DNA, 15 bp, Homo sapiens
ctcctggcctgtaag

SEQ ID NO: 1278305 - DNA, 15 bp, Homo sapiens
tctcctggcctgtaa

SEQ ID NO: 1278306 - DNA, 15 bp, Homo sapiens
ctctcctggcctgta

SEQ ID NO: 1278307 - DNA, 15 bp, Homo sapiens
tctctcctggcctgt

SEQ ID NO: 1278308 - DNA, 15 bp, Homo sapiens
ctctctcctggcctg

SEQ ID NO: 1278309 - DNA, 15 bp, Homo sapiens
actctctcctggcct

SEQ ID NO: 1278310 - DNA, 15 bp, Homo sapiens
cactctctcctggcc

SEQ ID NO: 1278311 - DNA, 15 bp, Homo sapiens
ccactctctcctggc

SEQ ID NO: 1278312 - DNA, 15 bp, Homo sapiens
gccactctctcctgg

SEQ ID NO: 1278313 - DNA, 15 bp, Homo sapiens
tgccactctctcctg

SEQ ID NO: 1278314 - DNA, 15 bp, Homo sapiens
atgccactctctcct

SEQ ID NO: 1278315 - DNA, 15 bp, Homo sapiens
catgccactctctcc

SEQ ID NO: 1278316 - DNA, 15 bp, Homo sapiens
tcatgccactctctc

SEQ ID NO: 1278317 - DNA, 15 bp, Homo sapiens
gtcatgccactctct

SEQ ID NO: 1278318 - DNA, 15 bp, Homo sapiens
tgtcatgccactctc

SEQ ID NO: 1278319 - DNA, 15 bp, Homo sapiens
atgtcatgccactct

SEQ ID NO: 1278320 - DNA, 15 bp, Homo sapiens
tatgtcatgccactc

SEQ ID NO: 1278321 - DNA, 15 bp, Homo sapiens
atatgtcatgccact

SEQ ID NO: 1278322 - DNA, 15 bp, Homo sapiens
aatatgtcatgccac

SEQ ID NO: 1278323 - DNA, 15 bp, Homo sapiens
aaatatgtcatgcca

SEQ ID NO: 1278324 - DNA, 15 bp, Homo sapiens
taaatatgtcatgcc

SEQ ID NO: 1278325 - DNA, 15 bp, Homo sapiens
ttaaatatgtcatgc

SEQ ID NO: 1278326 - DNA, 15 bp, Homo sapiens
tttaaatatgtcatg

SEQ ID NO: 1278327 - DNA, 15 bp, Homo sapiens
ctttaaatatgtcat

SEQ ID NO: 1278328 - DNA, 15 bp, Homo sapiens
actttaaatatgtca

SEQ ID NO: 1278329 - DNA, 15 bp, Homo sapiens
cactttaaatatgtc

SEQ ID NO: 1278330 - DNA, 15 bp, Homo sapiens
gcactttaaatatgt

SEQ ID NO: 1278331 - DNA, 15 bp, Homo sapiens
agcactttaaatatg

SEQ ID NO: 1278332 - DNA, 15 bp, Homo sapiens
cagcactttaaatat

SEQ ID NO: 1278333 - DNA, 15 bp, Homo sapiens
ccagcactttaaata

SEQ ID NO: 1278334 - DNA, 15 bp, Homo sapiens
tccagcactttaaat

SEQ ID NO: 1278335 - DNA, 15 bp, Homo sapiens
ttccagcactttaaa

SEQ ID NO: 1278336 - DNA, 15 bp, Homo sapiens
tttccagcactttaa

SEQ ID NO: 1278337 - DNA, 15 bp, Homo sapiens
ttttccagcacttta

SEQ ID NO: 1278338 - DNA, 15 bp, Homo sapiens
tttttccagcacttt

SEQ ID NO: 1278339 - DNA, 15 bp, Homo sapiens
gtttttccagcactt

SEQ ID NO: 1278340 - DNA, 15 bp, Homo sapiens
tgtttttccagcact

SEQ ID NO: 1278341 - DNA, 15 bp, Homo sapiens
ttgtttttccagcac

SEQ ID NO: 1278342 - DNA, 15 bp, Homo sapiens
tttgtttttccagca

SEQ ID NO: 1278343 - DNA, 15 bp, Homo sapiens
ttttgtttttccagc

SEQ ID NO: 1278344 - DNA, 15 bp, Homo sapiens
gttttgtttttccag

SEQ ID NO: 1278345 - DNA, 15 bp, Homo sapiens
tgttttgtttttcca

SEQ ID NO: 1278346 - DNA, 15 bp, Homo sapiens
ttgttttgtttttcc

SEQ ID NO: 1278347 - DNA, 15 bp, Homo sapiens
tttgttttgtttttc

SEQ ID NO: 1278348 - DNA, 15 bp, Homo sapiens
ggtttttgttttgtt

SEQ ID NO: 1278349 - DNA, 15 bp, Homo sapiens
aggtttttgttttgt

SEQ ID NO: 1278350 - DNA, 15 bp, Homo sapiens
gaaaggtttttgttt

SEQ ID NO: 1278351 - DNA, 15 bp, Homo sapiens
tgaaaggtttttgtt

SEQ ID NO: 1278352 - DNA, 15 bp, Homo sapiens
gtgaaaggtttttgt

SEQ ID NO: 1278353 - DNA, 15 bp, Homo sapiens
ggtgaaaggtttttg

SEQ ID NO: 1278354 - DNA, 15 bp, Homo sapiens
gggtgaaaggttttt

SEQ ID NO: 1278355 - DNA, 15 bp, Homo sapiens
agggtgaaaggtttt

SEQ ID NO: 1278356 - DNA, 15 bp, Homo sapiens
tagggtgaaaggttt

SEQ ID NO: 1278357 - DNA, 15 bp, Homo sapiens
ctagggtgaaaggtt

SEQ ID NO: 1278358 - DNA, 15 bp, Homo sapiens
tctagggtgaaaggt

SEQ ID NO: 1278359 - DNA, 15 bp, Homo sapiens
ttctagggtgaaagg

SEQ ID NO: 1278360 - DNA, 15 bp, Homo sapiens
attctagggtgaaag

SEQ ID NO: 1278361 - DNA, 15 bp, Homo sapiens
tattctagggtgaaa

SEQ ID NO: 1278362 - DNA, 15 bp, Homo sapiens
ctattctagggtgaa

SEQ ID NO: 1278363 - DNA, 15 bp, Homo sapiens
actattctagggtga

SEQ ID NO: 1278364 - DNA, 15 bp, Homo sapiens
tactattctagggtg

SEQ ID NO: 1278365 - DNA, 15 bp, Homo sapiens
atactattctagggt

SEQ ID NO: 1278366 - DNA, 15 bp, Homo sapiens
tatactattctaggg

SEQ ID NO: 1278367 - DNA, 15 bp, Homo sapiens
atatactattctagg

SEQ ID NO: 1278368 - DNA, 15 bp, Homo sapiens
gatatactattctag

SEQ ID NO: 1278369 - DNA, 15 bp, Homo sapiens
ggatatactattcta

SEQ ID NO: 1278370 - DNA, 15 bp, Homo sapiens
tggatatactattct

SEQ ID NO: 1278371 - DNA, 15 bp, Homo sapiens
ctggatatactattc

SEQ ID NO: 1278372 - DNA, 15 bp, Homo sapiens
gctggatatactatt

SEQ ID NO: 1278373 - DNA, 15 bp, Homo sapiens
tgctggatatactat

SEQ ID NO: 1278374 - DNA, 15 bp, Homo sapiens
ttgctggatatacta

SEQ ID NO: 1278375 - DNA, 15 bp, Homo sapiens
tttgctggatatact

SEQ ID NO: 1278376 - DNA, 15 bp, Homo sapiens
ttttgctggatatac

SEQ ID NO: 1278377 - DNA, 15 bp, Homo sapiens
tttttgctggatata

SEQ ID NO: 1278378 - DNA, 15 bp, Homo sapiens
atttttgctggatat

SEQ ID NO: 1278379 - DNA, 15 bp, Homo sapiens
tatttttgctggata

SEQ ID NO: 1278380 - DNA, 15 bp, Homo sapiens
atatttttgctggat

SEQ ID NO: 1278381 - DNA, 15 bp, Homo sapiens
gatatttttgctgga

SEQ ID NO: 1278382 - DNA, 15 bp, Homo sapiens
ggatatttttgctgg

SEQ ID NO: 1278383 - DNA, 15 bp, Homo sapiens
aggatatttttgctg

SEQ ID NO: 1278384 - DNA, 15 bp, Homo sapiens
aaggatatttttgct

SEQ ID NO: 1278385 - DNA, 15 bp, Homo sapiens
gaaggatatttttgc

SEQ ID NO: 1278386 - DNA, 15 bp, Homo sapiens
tgaaggatatttttg

SEQ ID NO: 1278387 - DNA, 15 bp, Homo sapiens
ttgaaggatattttt

SEQ ID NO: 1278388 - DNA, 15 bp, Homo sapiens
tttgaaggatatttt

SEQ ID NO: 1278389 - DNA, 15 bp, Homo sapiens
gtttgaaggatattt

SEQ ID NO: 1278390 - DNA, 15 bp, Homo sapiens
tgtttgaaggatatt

SEQ ID NO: 1278391 - DNA, 15 bp, Homo sapiens
atgtttgaaggatat

SEQ ID NO: 1278392 - DNA, 15 bp, Homo sapiens
tatgtttgaaggata

SEQ ID NO: 1278393 - DNA, 15 bp, Homo sapiens
atatgtttgaaggat

SEQ ID NO: 1278394 - DNA, 15 bp, Homo sapiens
tatatgtttgaagga

SEQ ID NO: 1278395 - DNA, 15 bp, Homo sapiens
ctatatgtttgaagg

SEQ ID NO: 1278396 - DNA, 15 bp, Homo sapiens
tctatatgtttgaag

SEQ ID NO: 1278397 - DNA, 15 bp, Homo sapiens
ttctatatgtttgaa

SEQ ID NO: 1278398 - DNA, 15 bp, Homo sapiens
cttctatatgtttga

SEQ ID NO: 1278399 - DNA, 15 bp, Homo sapiens
tcttctatatgtttg

SEQ ID NO: 1278400 - DNA, 15 bp, Homo sapiens
ttcttctatatgttt

SEQ ID NO: 1278401 - DNA, 15 bp, Homo sapiens
tttcttctatatgtt

SEQ ID NO: 1278402 - DNA, 15 bp, Homo sapiens
atttcttctatatgt

SEQ ID NO: 1278403 - DNA, 15 bp, Homo sapiens
tatttcttctatatg

SEQ ID NO: 1278404 - DNA, 15 bp, Homo sapiens
ctatttcttctatat

SEQ ID NO: 1278405 - DNA, 15 bp, Homo sapiens
tctatttcttctata

SEQ ID NO: 1278406 - DNA, 15 bp, Homo sapiens
gtctatttcttctat

SEQ ID NO: 1278407 - DNA, 15 bp, Homo sapiens
agtctatttcttcta

SEQ ID NO: 1278408 - DNA, 15 bp, Homo sapiens
aagtctatttcttct

SEQ ID NO: 1278409 - DNA, 15 bp, Homo sapiens
aaagtctatttcttc

SEQ ID NO: 1278410 - DNA, 15 bp, Homo sapiens
aaaagtctatttctt

SEQ ID NO: 1278411 - DNA, 15 bp, Homo sapiens
aaaaagtctatttct

SEQ ID NO: 1278412 - DNA, 15 bp, Homo sapiens
gaaaaagtctatttc

SEQ ID NO: 1278413 - DNA, 15 bp, Homo sapiens
tgaaaaagtctattt

SEQ ID NO: 1278414 - DNA, 15 bp, Homo sapiens
ctgaaaaagtctatt

SEQ ID NO: 1278415 - DNA, 15 bp, Homo sapiens
tctgaaaaagtctat

SEQ ID NO: 1278416 - DNA, 15 bp, Homo sapiens
gtctgaaaaagtcta

SEQ ID NO: 1278417 - DNA, 15 bp, Homo sapiens
tgtctgaaaaagtct

SEQ ID NO: 1278418 - DNA, 15 bp, Homo sapiens
ttgtctgaaaaagtc

SEQ ID NO: 1278419 - DNA, 15 bp, Homo sapiens
tttgtctgaaaaagt

SEQ ID NO: 1278420 - DNA, 15 bp, Homo sapiens
gtttgtctgaaaaag

SEQ ID NO: 1278421 - DNA, 15 bp, Homo sapiens
tgtttgtctgaaaaa

SEQ ID NO: 1278422 - DNA, 15 bp, Homo sapiens
ttgtttgtctgaaaa

SEQ ID NO: 1278423 - DNA, 15 bp, Homo sapiens
tttgtttgtctgaaa

SEQ ID NO: 1278424 - DNA, 15 bp, Homo sapiens
ttttgtttgtctgaa

SEQ ID NO: 1278425 - DNA, 15 bp, Homo sapiens
cttttgtttgtctga

SEQ ID NO: 1278426 - DNA, 15 bp, Homo sapiens
gcttttgtttgtctg

SEQ ID NO: 1278427 - DNA, 15 bp, Homo sapiens
agcttttgtttgtct

SEQ ID NO: 1278428 - DNA, 15 bp, Homo sapiens
cagcttttgtttgtc

SEQ ID NO: 1278429 - DNA, 15 bp, Homo sapiens
tcagcttttgtttgt

SEQ ID NO: 1278430 - DNA, 15 bp, Homo sapiens
ctcagcttttgtttg

SEQ ID NO: 1278431 - DNA, 15 bp, Homo sapiens
cctcagcttttgttt

SEQ ID NO: 1278432 - DNA, 15 bp, Homo sapiens
ccctcagcttttgtt

SEQ ID NO: 1278433 - DNA, 15 bp, Homo sapiens
tccctcagcttttgt

SEQ ID NO: 1278434 - DNA, 15 bp, Homo sapiens
atccctcagcttttg

SEQ ID NO: 1278435 - DNA, 15 bp, Homo sapiens
aatccctcagctttt

SEQ ID NO: 1278436 - DNA, 15 bp, Homo sapiens
aaatccctcagcttt

SEQ ID NO: 1278437 - DNA, 15 bp, Homo sapiens
gaaatccctcagctt

SEQ ID NO: 1278438 - DNA, 15 bp, Homo sapiens
tgaaatccctcagct

SEQ ID NO: 1278439 - DNA, 15 bp, Homo sapiens
atgaaatccctcagc

SEQ ID NO: 1278440 - DNA, 15 bp, Homo sapiens
tatgaaatccctcag

SEQ ID NO: 1278441 - DNA, 15 bp, Homo sapiens
ttatgaaatccctca

SEQ ID NO: 1278442 - DNA, 15 bp, Homo sapiens
tttatgaaatccctc

SEQ ID NO: 1278443 - DNA, 15 bp, Homo sapiens
atttatgaaatccct

SEQ ID NO: 1278444 - DNA, 15 bp, Homo sapiens
tatttatgaaatccc

SEQ ID NO: 1278445 - DNA, 15 bp, Homo sapiens
ttatttatgaaatcc

SEQ ID NO: 1278446 - DNA, 15 bp, Homo sapiens
gttatttatgaaatc

SEQ ID NO: 1278447 - DNA, 15 bp, Homo sapiens
ggttatttatgaaat

SEQ ID NO: 1278448 - DNA, 15 bp, Homo sapiens
cggttatttatgaaa

SEQ ID NO: 1278449 - DNA, 15 bp, Homo sapiens
tcggttatttatgaa

SEQ ID NO: 1278450 - DNA, 15 bp, Homo sapiens
atcggttatttatga

SEQ ID NO: 1278451 - DNA, 15 bp, Homo sapiens
gatcggttatttatg

SEQ ID NO: 1278452 - DNA, 15 bp, Homo sapiens
agatcggttatttat

SEQ ID NO: 1278453 - DNA, 15 bp, Homo sapiens
cagatcggttattta

SEQ ID NO: 1278454 - DNA, 15 bp, Homo sapiens
acagatcggttattt

SEQ ID NO: 1278455 - DNA, 15 bp, Homo sapiens
gacagatcggttatt

SEQ ID NO: 1278456 - DNA, 15 bp, Homo sapiens
ggacagatcggttat

SEQ ID NO: 1278457 - DNA, 15 bp, Homo sapiens
aggacagatcggtta

SEQ ID NO: 1278458 - DNA, 15 bp, Homo sapiens
taggacagatcggtt

SEQ ID NO: 1278459 - DNA, 15 bp, Homo sapiens
gtaggacagatcggt

SEQ ID NO: 1278460 - DNA, 15 bp, Homo sapiens
tgtaggacagatcgg

SEQ ID NO: 1278461 - DNA, 15 bp, Homo sapiens
ttgtaggacagatcg

SEQ ID NO: 1278462 - DNA, 15 bp, Homo sapiens
cttgtaggacagatc

SEQ ID NO: 1278463 - DNA, 15 bp, Homo sapiens
tcttgtaggacagat

SEQ ID NO: 1278464 - DNA, 15 bp, Homo sapiens
ttcttgtaggacaga

SEQ ID NO: 1278465 - DNA, 15 bp, Homo sapiens
tttcttgtaggacag

SEQ ID NO: 1278466 - DNA, 15 bp, Homo sapiens
atttcttgtaggaca

SEQ ID NO: 1278467 - DNA, 15 bp, Homo sapiens
catttcttgtaggac

SEQ ID NO: 1278468 - DNA, 15 bp, Homo sapiens
gcatttcttgtagga

SEQ ID NO: 1278469 - DNA, 15 bp, Homo sapiens
agcatttcttgtagg

SEQ ID NO: 1278470 - DNA, 15 bp, Homo sapiens
tagcatttcttgtag

SEQ ID NO: 1278471 - DNA, 15 bp, Homo sapiens
ttagcatttcttgta

SEQ ID NO: 1278472 - DNA, 15 bp, Homo sapiens
tttagcatttcttgt

SEQ ID NO: 1278473 - DNA, 15 bp, Homo sapiens
atttagcatttcttg

SEQ ID NO: 1278474 - DNA, 15 bp, Homo sapiens
catttagcatttctt

SEQ ID NO: 1278475 - DNA, 15 bp, Homo sapiens
ccatttagcatttct

SEQ ID NO: 1278476 - DNA, 15 bp, Homo sapiens
tccatttagcatttc

SEQ ID NO: 1278477 - DNA, 15 bp, Homo sapiens
ctccatttagcattt

SEQ ID NO: 1278478 - DNA, 15 bp, Homo sapiens
actccatttagcatt

SEQ ID NO: 1278479 - DNA, 15 bp, Homo sapiens
tactccatttagcat

SEQ ID NO: 1278480 - DNA, 15 bp, Homo sapiens
gtactccatttagca

SEQ ID NO: 1278481 - DNA, 15 bp, Homo sapiens
agtactccatttagc

SEQ ID NO: 1278482 - DNA, 15 bp, Homo sapiens
tagtactccatttag

SEQ ID NO: 1278483 - DNA, 15 bp, Homo sapiens
gtagtactccattta

SEQ ID NO: 1278484 - DNA, 15 bp, Homo sapiens
tgtagtactccattt

SEQ ID NO: 1278485 - DNA, 15 bp, Homo sapiens
ctgtagtactccatt

SEQ ID NO: 1278486 - DNA, 15 bp, Homo sapiens
actgtagtactccat

SEQ ID NO: 1278487 - DNA, 15 bp, Homo sapiens
gactgtagtactcca

SEQ ID NO: 1278488 - DNA, 15 bp, Homo sapiens
tgactgtagtactcc

SEQ ID NO: 1278489 - DNA, 15 bp, Homo sapiens
ctgactgtagtactc

SEQ ID NO: 1278490 - DNA, 15 bp, Homo sapiens
tctgactgtagtact

SEQ ID NO: 1278491 - DNA, 15 bp, Homo sapiens
ttctgactgtagtac

SEQ ID NO: 1278492 - DNA, 15 bp, Homo sapiens
tttctgactgtagta

SEQ ID NO: 1278493 - DNA, 15 bp, Homo sapiens
ctttctgactgtagt

SEQ ID NO: 1278494 - DNA, 15 bp, Homo sapiens
tctttctgactgtag

SEQ ID NO: 1278495 - DNA, 15 bp, Homo sapiens
ttctttctgactgta

SEQ ID NO: 1278496 - DNA, 15 bp, Homo sapiens
tttctttctgactgt

SEQ ID NO: 1278497 - DNA, 15 bp, Homo sapiens
ttttctttctgactg

SEQ ID NO: 1278498 - DNA, 15 bp, Homo sapiens
cttttctttctgact

SEQ ID NO: 1278499 - DNA, 15 bp, Homo sapiens
ccttttctttctgac

SEQ ID NO: 1278500 - DNA, 15 bp, Homo sapiens
tccttttctttctga

SEQ ID NO: 1278501 - DNA, 15 bp, Homo sapiens
gtccttttctttctg

SEQ ID NO: 1278502 - DNA, 15 bp, Homo sapiens
tgtccttttctttct

SEQ ID NO: 1278503 - DNA, 15 bp, Homo sapiens
atgtccttttctttc

SEQ ID NO: 1278504 - DNA, 15 bp, Homo sapiens
aatgtccttttcttt

SEQ ID NO: 1278505 - DNA, 15 bp, Homo sapiens
taatgtccttttctt

SEQ ID NO: 1278506 - DNA, 15 bp, Homo sapiens
ttaatgtccttttct

SEQ ID NO: 1278507 - DNA, 15 bp, Homo sapiens
attaatgtccttttc

SEQ ID NO: 1278508 - DNA, 15 bp, Homo sapiens
cattaatgtcctttt

SEQ ID NO: 1278509 - DNA, 15 bp, Homo sapiens
tcattaatgtccttt

SEQ ID NO: 1278510 - DNA, 15 bp, Homo sapiens
ctcattaatgtcctt

SEQ ID NO: 1278511 - DNA, 15 bp, Homo sapiens
gctcattaatgtcct

SEQ ID NO: 1278512 - DNA, 15 bp, Homo sapiens
tgctcattaatgtcc

SEQ ID NO: 1278513 - DNA, 15 bp, Homo sapiens
ttgctcattaatgtc

SEQ ID NO: 1278514 - DNA, 15 bp, Homo sapiens
attgctcattaatgt

SEQ ID NO: 1278515 - DNA, 15 bp, Homo sapiens
tattgctcattaatg

SEQ ID NO: 1278516 - DNA, 15 bp, Homo sapiens
ttattgctcattaat

SEQ ID NO: 1278517 - DNA, 15 bp, Homo sapiens
tttattgctcattaa

SEQ ID NO: 1278518 - DNA, 15 bp, Homo sapiens
atttattgctcatta

SEQ ID NO: 1278519 - DNA, 15 bp, Homo sapiens
tatttattgctcatt

SEQ ID NO: 1278520 - DNA, 15 bp, Homo sapiens
ttatttattgctcat

SEQ ID NO: 1278521 - DNA, 15 bp, Homo sapiens
attatttattgctca

SEQ ID NO: 1278522 - DNA, 15 bp, Homo sapiens
gattatttattgctc

SEQ ID NO: 1278523 - DNA, 15 bp, Homo sapiens
tgattatttattgct

SEQ ID NO: 1278524 - DNA, 15 bp, Homo sapiens
gtgattatttattgc

SEQ ID NO: 1278525 - DNA, 15 bp, Homo sapiens
ggtgattatttattg

SEQ ID NO: 1278526 - DNA, 15 bp, Homo sapiens
aggtgattatttatt

SEQ ID NO: 1278527 - DNA, 15 bp, Homo sapiens
caggtgattatttat

SEQ ID NO: 1278528 - DNA, 15 bp, Homo sapiens
tcaggtgattattta

SEQ ID NO: 1278529 - DNA, 15 bp, Homo sapiens
ttcaggtgattattt

SEQ ID NO: 1278530 - DNA, 15 bp, Homo sapiens
cttcaggtgattatt

SEQ ID NO: 1278531 - DNA, 15 bp, Homo sapiens
ccttcaggtgattat

SEQ ID NO: 1278532 - DNA, 15 bp, Homo sapiens
accttcaggtgatta

SEQ ID NO: 1278533 - DNA, 15 bp, Homo sapiens
taccttcaggtgatt

SEQ ID NO: 1278534 - DNA, 15 bp, Homo sapiens
ataccttcaggtgat

SEQ ID NO: 1278535 - DNA, 15 bp, Homo sapiens
tataccttcaggtga

SEQ ID NO: 1278536 - DNA, 15 bp, Homo sapiens
ttataccttcaggtg

SEQ ID NO: 1278537 - DNA, 15 bp, Homo sapiens
tttataccttcaggt

SEQ ID NO: 1278538 - DNA, 15 bp, Homo sapiens
ttttataccttcagg

SEQ ID NO: 1278539 - DNA, 15 bp, Homo sapiens
gttttataccttcag

SEQ ID NO: 1278540 - DNA, 15 bp, Homo sapiens
agttttataccttca

SEQ ID NO: 1278541 - DNA, 15 bp, Homo sapiens
aagttttataccttc

SEQ ID NO: 1278542 - DNA, 15 bp, Homo sapiens
taagttttatacctt

SEQ ID NO: 1278543 - DNA, 15 bp, Homo sapiens
gtaagttttatacct

SEQ ID NO: 1278544 - DNA, 15 bp, Homo sapiens
agtaagttttatacc

SEQ ID NO: 1278545 - DNA, 15 bp, Homo sapiens
cagtaagttttatac

SEQ ID NO: 1278546 - DNA, 15 bp, Homo sapiens
ccagtaagttttata

SEQ ID NO: 1278547 - DNA, 15 bp, Homo sapiens
accagtaagttttat

SEQ ID NO: 1278548 - DNA, 15 bp, Homo sapiens
taccagtaagtttta

SEQ ID NO: 1278549 - DNA, 15 bp, Homo sapiens
ttaccagtaagtttt

SEQ ID NO: 1278550 - DNA, 15 bp, Homo sapiens
attaccagtaagttt

SEQ ID NO: 1278551 - DNA, 15 bp, Homo sapiens
tattaccagtaagtt

SEQ ID NO: 1278552 - DNA, 15 bp, Homo sapiens
ctattaccagtaagt

SEQ ID NO: 1278553 - DNA, 15 bp, Homo sapiens
actattaccagtaag

SEQ ID NO: 1278554 - DNA, 15 bp, Homo sapiens
tactattaccagtaa

SEQ ID NO: 1278555 - DNA, 15 bp, Homo sapiens
ttactattaccagta

SEQ ID NO: 1278556 - DNA, 15 bp, Homo sapiens
cttactattaccagt

SEQ ID NO: 1278557 - DNA, 15 bp, Homo sapiens
acttactattaccag

SEQ ID NO: 1278558 - DNA, 15 bp, Homo sapiens
cacttactattacca

SEQ ID NO: 1278559 - DNA, 15 bp, Homo sapiens
gcacttactattacc

SEQ ID NO: 1278560 - DNA, 15 bp, Homo sapiens
tgcacttactattac

SEQ ID NO: 1278561 - DNA, 15 bp, Homo sapiens
atgcacttactatta

SEQ ID NO: 1278562 - DNA, 15 bp, Homo sapiens
tatgcacttactatt

SEQ ID NO: 1278563 - DNA, 15 bp, Homo sapiens
ctatgcacttactat

SEQ ID NO: 1278564 - DNA, 15 bp, Homo sapiens
tctatgcacttacta

SEQ ID NO: 1278565 - DNA, 15 bp, Homo sapiens
atctatgcacttact

SEQ ID NO: 1278566 - DNA, 15 bp, Homo sapiens
tatctatgcacttac

SEQ ID NO: 1278567 - DNA, 15 bp, Homo sapiens
ttatctatgcactta

SEQ ID NO: 1278568 - DNA, 15 bp, Homo sapiens
tttatctatgcactt

SEQ ID NO: 1278569 - DNA, 15 bp, Homo sapiens
gtttatctatgcact

SEQ ID NO: 1278570 - DNA, 15 bp, Homo sapiens
tgtttatctatgcac

SEQ ID NO: 1278571 - DNA, 15 bp, Homo sapiens
gtgtttatctatgca

SEQ ID NO: 1278572 - DNA, 15 bp, Homo sapiens
tgtgtttatctatgc

SEQ ID NO: 1278573 - DNA, 15 bp, Homo sapiens
ctgtgtttatctatg

SEQ ID NO: 1278574 - DNA, 15 bp, Homo sapiens
tctgtgtttatctat

SEQ ID NO: 1278575 - DNA, 15 bp, Homo sapiens
ttctgtgtttatcta

SEQ ID NO: 1278576 - DNA, 15 bp, Homo sapiens
attctgtgtttatct

SEQ ID NO: 1278577 - DNA, 15 bp, Homo sapiens
cattctgtgtttatc

SEQ ID NO: 1278578 - DNA, 15 bp, Homo sapiens
acattctgtgtttat

SEQ ID NO: 1278579 - DNA, 15 bp, Homo sapiens
cacattctgtgttta

SEQ ID NO: 1278580 - DNA, 15 bp, Homo sapiens
tcacattctgtgttt

SEQ ID NO: 1278581 - DNA, 15 bp, Homo sapiens
atcacattctgtgtt

SEQ ID NO: 1278582 - DNA, 15 bp, Homo sapiens
tatcacattctgtgt

SEQ ID NO: 1278583 - DNA, 15 bp, Homo sapiens
ttatcacattctgtg

SEQ ID NO: 1278584 - DNA, 15 bp, Homo sapiens
gttatcacattctgt

SEQ ID NO: 1278585 - DNA, 15 bp, Homo sapiens
tgttatcacattctg

SEQ ID NO: 1278586 - DNA, 15 bp, Homo sapiens
gtgttatcacattct

SEQ ID NO: 1278587 - DNA, 15 bp, Homo sapiens
agtgttatcacattc

SEQ ID NO: 1278588 - DNA, 15 bp, Homo sapiens
cagtgttatcacatt

SEQ ID NO: 1278589 - DNA, 15 bp, Homo sapiens
acagtgttatcacat

SEQ ID NO: 1278590 - DNA, 15 bp, Homo sapiens
tacagtgttatcaca

SEQ ID NO: 1278591 - DNA, 15 bp, Homo sapiens
ttacagtgttatcac

SEQ ID NO: 1278592 - DNA, 15 bp, Homo sapiens
gttacagtgttatca

SEQ ID NO: 1278593 - DNA, 15 bp, Homo sapiens
agttacagtgttatc

SEQ ID NO: 1278594 - DNA, 15 bp, Homo sapiens
cagttacagtgttat

SEQ ID NO: 1278595 - DNA, 15 bp, Homo sapiens
gcagttacagtgtta

SEQ ID NO: 1278596 - DNA, 15 bp, Homo sapiens
agcagttacagtgtt

SEQ ID NO: 1278597 - DNA, 15 bp, Homo sapiens
tagcagttacagtgt

SEQ ID NO: 1278598 - DNA, 15 bp, Homo sapiens
atagcagttacagtg

SEQ ID NO: 1278599 - DNA, 15 bp, Homo sapiens
tatagcagttacagt

SEQ ID NO: 1278600 - DNA, 15 bp, Homo sapiens
atatagcagttacag

SEQ ID NO: 1278601 - DNA, 15 bp, Homo sapiens
catatagcagttaca

SEQ ID NO: 1278602 - DNA, 15 bp, Homo sapiens
acatatagcagttac

SEQ ID NO: 1278603 - DNA, 15 bp, Homo sapiens
tacatatagcagtta

SEQ ID NO: 1278604 - DNA, 15 bp, Homo sapiens
ttacatatagcagtt

SEQ ID NO: 1278605 - DNA, 15 bp, Homo sapiens
tttacatatagcagt

SEQ ID NO: 1278606 - DNA, 15 bp, Homo sapiens
gtttacatatagcag

SEQ ID NO: 1278607 - DNA, 15 bp, Homo sapiens
ggtttacatatagca

SEQ ID NO: 1278608 - DNA, 15 bp, Homo sapiens
tggtttacatatagc

SEQ ID NO: 1278609 - DNA, 15 bp, Homo sapiens
gtggtttacatatag

SEQ ID NO: 1278610 - DNA, 15 bp, Homo sapiens
agtggtttacatata

SEQ ID NO: 1278611 - DNA, 15 bp, Homo sapiens
gagtggtttacatat

SEQ ID NO: 1278612 - DNA, 15 bp, Homo sapiens
agagtggtttacata

SEQ ID NO: 1278613 - DNA, 15 bp, Homo sapiens
aagagtggtttacat

SEQ ID NO: 1278614 - DNA, 15 bp, Homo sapiens
taagagtggtttaca

SEQ ID NO: 1278615 - DNA, 15 bp, Homo sapiens
ttaagagtggtttac

SEQ ID NO: 1278616 - DNA, 15 bp, Homo sapiens
tttaagagtggttta

SEQ ID NO: 1278617 - DNA, 15 bp, Homo sapiens
ttttaagagtggttt

SEQ ID NO: 1278618 - DNA, 15 bp, Homo sapiens
tttttaagagtggtt

SEQ ID NO: 1278619 - DNA, 15 bp, Homo sapiens
ctttttaagagtggt

SEQ ID NO: 1278620 - DNA, 15 bp, Homo sapiens
actttttaagagtgg

SEQ ID NO: 1278621 - DNA, 15 bp, Homo sapiens
aactttttaagagtg

SEQ ID NO: 1278622 - DNA, 15 bp, Homo sapiens
taactttttaagagt

SEQ ID NO: 1278623 - DNA, 15 bp, Homo sapiens
ttaactttttaagag

SEQ ID NO: 1278624 - DNA, 15 bp, Homo sapiens
tttaactttttaaga

SEQ ID NO: 1278625 - DNA, 15 bp, Homo sapiens
ttttaactttttaag

SEQ ID NO: 1278626 - DNA, 15 bp, Homo sapiens
ctttttaacttttta

SEQ ID NO: 1278627 - DNA, 15 bp, Homo sapiens
gctttttaacttttt

SEQ ID NO: 1278628 - DNA, 15 bp, Homo sapiens
agctttttaactttt

SEQ ID NO: 1278629 - DNA, 15 bp, Homo sapiens
cagctttttaacttt

SEQ ID NO: 1278630 - DNA, 15 bp, Homo sapiens
ccagctttttaactt

SEQ ID NO: 1278631 - DNA, 15 bp, Homo sapiens
cccagctttttaact

SEQ ID NO: 1278632 - DNA, 15 bp, Homo sapiens
ccccagctttttaac

SEQ ID NO: 1278633 - DNA, 15 bp, Homo sapiens
cccccagctttttaa

SEQ ID NO: 1278634 - DNA, 15 bp, Homo sapiens
tcccccagcttttta

SEQ ID NO: 1278635 - DNA, 15 bp, Homo sapiens
gtcccccagcttttt

SEQ ID NO: 1278636 - DNA, 15 bp, Homo sapiens
tgtcccccagctttt

SEQ ID NO: 1278637 - DNA, 15 bp, Homo sapiens
ttgtcccccagcttt

SEQ ID NO: 1278638 - DNA, 15 bp, Homo sapiens
tttgtcccccagctt

SEQ ID NO: 1278639 - DNA, 15 bp, Homo sapiens
ctttgtcccccagct

SEQ ID NO: 1278640 - DNA, 15 bp, Homo sapiens
actttgtcccccagc

SEQ ID NO: 1278641 - DNA, 15 bp, Homo sapiens
aactttgtcccccag

SEQ ID NO: 1278642 - DNA, 15 bp, Homo sapiens
taactttgtccccca

SEQ ID NO: 1278643 - DNA, 15 bp, Homo sapiens
ttaactttgtccccc

SEQ ID NO: 1278644 - DNA, 15 bp, Homo sapiens
cttaactttgtcccc

SEQ ID NO: 1278645 - DNA, 15 bp, Homo sapiens
tcttaactttgtccc

SEQ ID NO: 1278646 - DNA, 15 bp, Homo sapiens
ctcttaactttgtcc

SEQ ID NO: 1278647 - DNA, 15 bp, Homo sapiens
actcttaactttgtc

SEQ ID NO: 1278648 - DNA, 15 bp, Homo sapiens
aactcttaactttgt

SEQ ID NO: 1278649 - DNA, 15 bp, Homo sapiens
aaactcttaactttg

SEQ ID NO: 1278650 - DNA, 15 bp, Homo sapiens
aaaactcttaacttt

SEQ ID NO: 1278651 - DNA, 15 bp, Homo sapiens
aaaaactcttaactt

SEQ ID NO: 1278652 - DNA, 15 bp, Homo sapiens
taaaaactcttaact

SEQ ID NO: 1278653 - DNA, 15 bp, Homo sapiens
ataaaaactcttaac

SEQ ID NO: 1278654 - DNA, 15 bp, Homo sapiens
aataaaaactcttaa

SEQ ID NO: 1278655 - DNA, 15 bp, Homo sapiens
taataaaaactctta

SEQ ID NO: 1278656 - DNA, 15 bp, Homo sapiens
ctaataaaaactctt

SEQ ID NO: 1278657 - DNA, 15 bp, Homo sapiens
actaataaaaactct

SEQ ID NO: 1278658 - DNA, 15 bp, Homo sapiens
aactaataaaaactc

SEQ ID NO: 1278659 - DNA, 15 bp, Homo sapiens
aaactaataaaaact

SEQ ID NO: 1278660 - DNA, 15 bp, Homo sapiens
aaaactaataaaaac

SEQ ID NO: 1278661 - DNA, 15 bp, Homo sapiens
gaaaactaataaaaa

SEQ ID NO: 1278662 - DNA, 15 bp, Homo sapiens
agaaaactaataaaa

SEQ ID NO: 1278663 - DNA, 15 bp, Homo sapiens
aagaaaactaataaa

SEQ ID NO: 1278664 - DNA, 15 bp, Homo sapiens
aaagaaaactaataa

SEQ ID NO: 1278665 - DNA, 15 bp, Homo sapiens
aaaagaaaactaata

SEQ ID NO: 1278666 - DNA, 15 bp, Homo sapiens
aaaaagaaaactaat

SEQ ID NO: 1278667 - DNA, 15 bp, Homo sapiens
caaaaagaaaactaa

SEQ ID NO: 1278668 - DNA, 15 bp, Homo sapiens
gcaaaaagaaaacta

SEQ ID NO: 1278669 - DNA, 15 bp, Homo sapiens
agcaaaaagaaaact

SEQ ID NO: 1278670 - DNA, 15 bp, Homo sapiens
aagcaaaaagaaaac

SEQ ID NO: 1278671 - DNA, 15 bp, Homo sapiens
caagcaaaaagaaaa

SEQ ID NO: 1278672 - DNA, 15 bp, Homo sapiens
acaagcaaaaagaaa

SEQ ID NO: 1278673 - DNA, 15 bp, Homo sapiens
aacaagcaaaaagaa

SEQ ID NO: 1278674 - DNA, 15 bp, Homo sapiens
aaacaagcaaaaaga

SEQ ID NO: 1278675 - DNA, 15 bp, Homo sapiens
caaacaagcaaaaag

SEQ ID NO: 1278676 - DNA, 15 bp, Homo sapiens
acaaacaagcaaaaa

SEQ ID NO: 1278677 - DNA, 15 bp, Homo sapiens
aacaaacaagcaaaa

SEQ ID NO: 1278678 - DNA, 15 bp, Homo sapiens
aaacaaacaagcaaa

SEQ ID NO: 1278679 - DNA, 15 bp, Homo sapiens
caaacaaacaagcaa

SEQ ID NO: 1278680 - DNA, 15 bp, Homo sapiens
acaaacaaacaagca

SEQ ID NO: 1278681 - DNA, 15 bp, Homo sapiens
aacaaacaaacaagc

SEQ ID NO: 1278682 - DNA, 15 bp, Homo sapiens
ataaacaaacaaaca

SEQ ID NO: 1278683 - DNA, 15 bp, Homo sapiens
cataaacaaacaaac

SEQ ID NO: 1278684 - DNA, 15 bp, Homo sapiens
gcataaacaaacaaa

SEQ ID NO: 1278685 - DNA, 15 bp, Homo sapiens
tgcataaacaaacaa

SEQ ID NO: 1278686 - DNA, 15 bp, Homo sapiens
ttgcataaacaaaca

SEQ ID NO: 1278687 - DNA, 15 bp, Homo sapiens
tttgcataaacaaac

SEQ ID NO: 1278688 - DNA, 15 bp, Homo sapiens
atttgcataaacaaa

SEQ ID NO: 1278689 - DNA, 15 bp, Homo sapiens
tatttgcataaacaa

SEQ ID NO: 1278690 - DNA, 15 bp, Homo sapiens
ctatttgcataaaca

SEQ ID NO: 1278691 - DNA, 15 bp, Homo sapiens
actatttgcataaac

SEQ ID NO: 1278692 - DNA, 15 bp, Homo sapiens
cactatttgcataaa

SEQ ID NO: 1278693 - DNA, 15 bp, Homo sapiens
acactatttgcataa

SEQ ID NO: 1278694 - DNA, 15 bp, Homo sapiens
aacactatttgcata

SEQ ID NO: 1278695 - DNA, 15 bp, Homo sapiens
caacactatttgcat

SEQ ID NO: 1278696 - DNA, 15 bp, Homo sapiens
acaacactatttgca

SEQ ID NO: 1278697 - DNA, 15 bp, Homo sapiens
aacaacactatttgc

SEQ ID NO: 1278698 - DNA, 15 bp, Homo sapiens
caacaacactatttg

SEQ ID NO: 1278699 - DNA, 15 bp, Homo sapiens
acaacaacactattt

SEQ ID NO: 1278700 - DNA, 15 bp, Homo sapiens
aacaacaacactatt

SEQ ID NO: 1278701 - DNA, 15 bp, Homo sapiens
taacaacaacactat

SEQ ID NO: 1278702 - DNA, 15 bp, Homo sapiens
gtaacaacaacacta

SEQ ID NO: 1278703 - DNA, 15 bp, Homo sapiens
ggtaacaacaacact

SEQ ID NO: 1278704 - DNA, 15 bp, Homo sapiens
tggtaacaacaacac

SEQ ID NO: 1278705 - DNA, 15 bp, Homo sapiens
gtggtaacaacaaca

SEQ ID NO: 1278706 - DNA, 15 bp, Homo sapiens
cgtggtaacaacaac

SEQ ID NO: 1278707 - DNA, 15 bp, Homo sapiens
acgtggtaacaacaa

SEQ ID NO: 1278708 - DNA, 15 bp, Homo sapiens
aacgtggtaacaaca

SEQ ID NO: 1278709 - DNA, 15 bp, Homo sapiens
taacgtggtaacaac

SEQ ID NO: 1278710 - DNA, 15 bp, Homo sapiens
ttaacgtggtaacaa

SEQ ID NO: 1278711 - DNA, 15 bp, Homo sapiens
tttaacgtggtaaca

SEQ ID NO: 1278712 - DNA, 15 bp, Homo sapiens
ttttaacgtggtaac

SEQ ID NO: 1278713 - DNA, 15 bp, Homo sapiens
attttaacgtggtaa

SEQ ID NO: 1278714 - DNA, 15 bp, Homo sapiens
tattttaacgtggta

SEQ ID NO: 1278715 - DNA, 15 bp, Homo sapiens
ttattttaacgtggt

SEQ ID NO: 1278716 - DNA, 15 bp, Homo sapiens
attattttaacgtgg

SEQ ID NO: 1278717 - DNA, 15 bp, Homo sapiens
cattattttaacgtg

SEQ ID NO: 1278718 - DNA, 15 bp, Homo sapiens
ccattattttaacgt

SEQ ID NO: 1278719 - DNA, 15 bp, Homo sapiens
tccattattttaacg

SEQ ID NO: 1278720 - DNA, 15 bp, Homo sapiens
atccattattttaac

SEQ ID NO: 1278721 - DNA, 15 bp, Homo sapiens
aatccattattttaa

SEQ ID NO: 1278722 - DNA, 15 bp, Homo sapiens
taatccattatttta

SEQ ID NO: 1278723 - DNA, 15 bp, Homo sapiens
ataatccattatttt

SEQ ID NO: 1278724 - DNA, 15 bp, Homo sapiens
tataatccattattt

SEQ ID NO: 1278725 - DNA, 15 bp, Homo sapiens
ttataatccattatt

SEQ ID NO: 1278726 - DNA, 15 bp, Homo sapiens
cttataatccattat

SEQ ID NO: 1278727 - DNA, 15 bp, Homo sapiens
tcttataatccatta

SEQ ID NO: 1278728 - DNA, 15 bp, Homo sapiens
atcttataatccatt

SEQ ID NO: 1278729 - DNA, 15 bp, Homo sapiens
tatcttataatccat

SEQ ID NO: 1278730 - DNA, 15 bp, Homo sapiens
ctatcttataatcca

SEQ ID NO: 1278731 - DNA, 15 bp, Homo sapiens
actatcttataatcc

SEQ ID NO: 1278732 - DNA, 15 bp, Homo sapiens
tactatcttataatc

SEQ ID NO: 1278733 - DNA, 15 bp, Homo sapiens
atactatcttataat

SEQ ID NO: 1278734 - DNA, 15 bp, Homo sapiens
aatactatcttataa

SEQ ID NO: 1278735 - DNA, 15 bp, Homo sapiens
aaatactatcttata

SEQ ID NO: 1278736 - DNA, 15 bp, Homo sapiens
caaatactatcttat

SEQ ID NO: 1278737 - DNA, 15 bp, Homo sapiens
gcaaatactatctta

SEQ ID NO: 1278738 - DNA, 15 bp, Homo sapiens
tgcaaatactatctt

SEQ ID NO: 1278739 - DNA, 15 bp, Homo sapiens
ttgcaaatactatct

SEQ ID NO: 1278740 - DNA, 15 bp, Homo sapiens
cttgcaaatactatc

SEQ ID NO: 1278741 - DNA, 15 bp, Homo sapiens
gcttgcaaatactat

SEQ ID NO: 1278742 - DNA, 15 bp, Homo sapiens
ggcttgcaaatacta

SEQ ID NO: 1278743 - DNA, 15 bp, Homo sapiens
aggcttgcaaatact

SEQ ID NO: 1278744 - DNA, 15 bp, Homo sapiens
gaggcttgcaaatac

SEQ ID NO: 1278745 - DNA, 15 bp, Homo sapiens
tgaggcttgcaaata

SEQ ID NO: 1278746 - DNA, 15 bp, Homo sapiens
atgaggcttgcaaat

SEQ ID NO: 1278747 - DNA, 15 bp, Homo sapiens
catgaggcttgcaaa

SEQ ID NO: 1278748 - DNA, 15 bp, Homo sapiens
ccatgaggcttgcaa

SEQ ID NO: 1278749 - DNA, 15 bp, Homo sapiens
accatgaggcttgca

SEQ ID NO: 1278750 - DNA, 15 bp, Homo sapiens
taccatgaggcttgc

SEQ ID NO: 1278751 - DNA, 15 bp, Homo sapiens
ttaccatgaggcttg

SEQ ID NO: 1278752 - DNA, 15 bp, Homo sapiens
gttaccatgaggctt

SEQ ID NO: 1278753 - DNA, 15 bp, Homo sapiens
ggttaccatgaggct

SEQ ID NO: 1278754 - DNA, 15 bp, Homo sapiens
aggttaccatgaggc

SEQ ID NO: 1278755 - DNA, 15 bp, Homo sapiens
gaggttaccatgagg

SEQ ID NO: 1278756 - DNA, 15 bp, Homo sapiens
tgaggttaccatgag

SEQ ID NO: 1278757 - DNA, 15 bp, Homo sapiens
ttgaggttaccatga

SEQ ID NO: 1278758 - DNA, 15 bp, Homo sapiens
tttgaggttaccatg

SEQ ID NO: 1278759 - DNA, 15 bp, Homo sapiens
gtttgaggttaccat

SEQ ID NO: 1278760 - DNA, 15 bp, Homo sapiens
ggtttgaggttacca

SEQ ID NO: 1278761 - DNA, 15 bp, Homo sapiens
tggtttgaggttacc

SEQ ID NO: 1278762 - DNA, 15 bp, Homo sapiens
ttggtttgaggttac

SEQ ID NO: 1278763 - DNA, 15 bp, Homo sapiens
tttggtttgaggtta

SEQ ID NO: 1278764 - DNA, 15 bp, Homo sapiens
ttttggtttgaggtt

SEQ ID NO: 1278765 - DNA, 15 bp, Homo sapiens
tttttggtttgaggt

SEQ ID NO: 1278766 - DNA, 15 bp, Homo sapiens
ttttttggtttgagg

SEQ ID NO: 1278767 - DNA, 15 bp, Homo sapiens
gttttttggtttgag

SEQ ID NO: 1278768 - DNA, 15 bp, Homo sapiens
tgttttttggtttga

SEQ ID NO: 1278769 - DNA, 15 bp, Homo sapiens
atgttttttggtttg

SEQ ID NO: 1278770 - DNA, 15 bp, Homo sapiens
tatgttttttggttt

SEQ ID NO: 1278771 - DNA, 15 bp, Homo sapiens
gtatgttttttggtt

SEQ ID NO: 1278772 - DNA, 15 bp, Homo sapiens
tgtatgttttttggt

SEQ ID NO: 1278773 - DNA, 15 bp, Homo sapiens
ttgtatgttttttgg

SEQ ID NO: 1278774 - DNA, 15 bp, Homo sapiens
attgtatgttttttg

SEQ ID NO: 1278775 - DNA, 15 bp, Homo sapiens
aattgtatgtttttt

SEQ ID NO: 1278776 - DNA, 15 bp, Homo sapiens
caattgtatgttttt

SEQ ID NO: 1278777 - DNA, 15 bp, Homo sapiens
tcaattgtatgtttt

SEQ ID NO: 1278778 - DNA, 15 bp, Homo sapiens
atcaattgtatgttt

SEQ ID NO: 1278779 - DNA, 15 bp, Homo sapiens
tatcaattgtatgtt

SEQ ID NO: 1278780 - DNA, 15 bp, Homo sapiens
gtatcaattgtatgt

SEQ ID NO: 1278781 - DNA, 15 bp, Homo sapiens
ggtatcaattgtatg

SEQ ID NO: 1278782 - DNA, 15 bp, Homo sapiens
gggtatcaattgtat

SEQ ID NO: 1278783 - DNA, 15 bp, Homo sapiens
tgggtatcaattgta

SEQ ID NO: 1278784 - DNA, 15 bp, Homo sapiens
ttgggtatcaattgt

SEQ ID NO: 1278785 - DNA, 15 bp, Homo sapiens
tttgggtatcaattg

SEQ ID NO: 1278786 - DNA, 15 bp, Homo sapiens
ttttgggtatcaatt

SEQ ID NO: 1278787 - DNA, 15 bp, Homo sapiens
tttttgggtatcaat

SEQ ID NO: 1278788 - DNA, 15 bp, Homo sapiens
ttttttgggtatcaa

SEQ ID NO: 1278789 - DNA, 15 bp, Homo sapiens
attttttgggtatca

SEQ ID NO: 1278790 - DNA, 15 bp, Homo sapiens
tattttttgggtatc

SEQ ID NO: 1278791 - DNA, 15 bp, Homo sapiens
ttattttttgggtat

SEQ ID NO: 1278792 - DNA, 15 bp, Homo sapiens
cttattttttgggta

SEQ ID NO: 1278793 - DNA, 15 bp, Homo sapiens
tcttattttttgggt

SEQ ID NO: 1278794 - DNA, 15 bp, Homo sapiens
ttcttattttttggg

SEQ ID NO: 1278795 - DNA, 15 bp, Homo sapiens
cttcttattttttgg

SEQ ID NO: 1278796 - DNA, 15 bp, Homo sapiens
gcttcttattttttg

SEQ ID NO: 1278797 - DNA, 15 bp, Homo sapiens
tgcttcttatttttt

SEQ ID NO: 1278798 - DNA, 15 bp, Homo sapiens
ttgcttcttattttt

SEQ ID NO: 1278799 - DNA, 15 bp, Homo sapiens
cttgcttcttatttt

SEQ ID NO: 1278800 - DNA, 15 bp, Homo sapiens
tcttgcttcttattt

SEQ ID NO: 1278801 - DNA, 15 bp, Homo sapiens
ttcttgcttcttatt

SEQ ID NO: 1278802 - DNA, 15 bp, Homo sapiens
tttcttgcttcttat

SEQ ID NO: 1278803 - DNA, 15 bp, Homo sapiens
gtttcttgcttctta

SEQ ID NO: 1278804 - DNA, 15 bp, Homo sapiens
agtttcttgcttctt

SEQ ID NO: 1278805 - DNA, 15 bp, Homo sapiens
tagtttcttgcttct

SEQ ID NO: 1278806 - DNA, 15 bp, Homo sapiens
ttagtttcttgcttc

SEQ ID NO: 1278807 - DNA, 15 bp, Homo sapiens
tttagtttcttgctt

SEQ ID NO: 1278808 - DNA, 15 bp, Homo sapiens
atttagtttcttgct

SEQ ID NO: 1278809 - DNA, 15 bp, Homo sapiens
gatttagtttcttgc

SEQ ID NO: 1278810 - DNA, 15 bp, Homo sapiens
tgatttagtttcttg

SEQ ID NO: 1278811 - DNA, 15 bp, Homo sapiens
atgatttagtttctt

SEQ ID NO: 1278812 - DNA, 15 bp, Homo sapiens
tatgatttagtttct

SEQ ID NO: 1278813 - DNA, 15 bp, Homo sapiens
atatgatttagtttc

SEQ ID NO: 1278814 - DNA, 15 bp, Homo sapiens
gatatgatttagttt

SEQ ID NO: 1278815 - DNA, 15 bp, Homo sapiens
tgatatgatttagtt

SEQ ID NO: 1278816 - DNA, 15 bp, Homo sapiens
gtgatatgatttagt

SEQ ID NO: 1278817 - DNA, 15 bp, Homo sapiens
ggtgatatgatttag

SEQ ID NO: 1278818 - DNA, 15 bp, Homo sapiens
tggtgatatgattta

SEQ ID NO: 1278819 - DNA, 15 bp, Homo sapiens
ctggtgatatgattt

SEQ ID NO: 1278820 - DNA, 15 bp, Homo sapiens
tctggtgatatgatt

SEQ ID NO: 1278821 - DNA, 15 bp, Homo sapiens
ctctggtgatatgat

SEQ ID NO: 1278822 - DNA, 15 bp, Homo sapiens
tctctggtgatatga

SEQ ID NO: 1278823 - DNA, 15 bp, Homo sapiens
ttctctggtgatatg

SEQ ID NO: 1278824 - DNA, 15 bp, Homo sapiens
tttctctggtgatat

SEQ ID NO: 1278825 - DNA, 15 bp, Homo sapiens
ttttctctggtgata

SEQ ID NO: 1278826 - DNA, 15 bp, Homo sapiens
attttctctggtgat

SEQ ID NO: 1278827 - DNA, 15 bp, Homo sapiens
aattttctctggtga

SEQ ID NO: 1278828 - DNA, 15 bp, Homo sapiens
taattttctctggtg

SEQ ID NO: 1278829 - DNA, 15 bp, Homo sapiens
ataattttctctggt

SEQ ID NO: 1278830 - DNA, 15 bp, Homo sapiens
gataattttctctgg

SEQ ID NO: 1278831 - DNA, 15 bp, Homo sapiens
agataattttctctg

SEQ ID NO: 1278832 - DNA, 15 bp, Homo sapiens
aagataattttctct

SEQ ID NO: 1278833 - DNA, 15 bp, Homo sapiens
aaagataattttctc

SEQ ID NO: 1278834 - DNA, 15 bp, Homo sapiens
taaagataattttct

SEQ ID NO: 1278835 - DNA, 15 bp, Homo sapiens
gtaaagataattttc

SEQ ID NO: 1278836 - DNA, 15 bp, Homo sapiens
agtaaagataatttt

SEQ ID NO: 1278837 - DNA, 15 bp, Homo sapiens
tagtaaagataattt

SEQ ID NO: 1278838 - DNA, 15 bp, Homo sapiens
ctagtaaagataatt

SEQ ID NO: 1278839 - DNA, 15 bp, Homo sapiens
tctagtaaagataat

SEQ ID NO: 1278840 - DNA, 15 bp, Homo sapiens
ctctagtaaagataa

SEQ ID NO: 1278841 - DNA, 15 bp, Homo sapiens
cctctagtaaagata

SEQ ID NO: 1278842 - DNA, 15 bp, Homo sapiens
gcctctagtaaagat

SEQ ID NO: 1278843 - DNA, 15 bp, Homo sapiens
tgcctctagtaaaga

SEQ ID NO: 1278844 - DNA, 15 bp, Homo sapiens
ctgcctctagtaaag

SEQ ID NO: 1278845 - DNA, 15 bp, Homo sapiens
tctgcctctagtaaa

SEQ ID NO: 1278846 - DNA, 15 bp, Homo sapiens
gtctgcctctagtaa

SEQ ID NO: 1278847 - DNA, 15 bp, Homo sapiens
tgtctgcctctagta

SEQ ID NO: 1278848 - DNA, 15 bp, Homo sapiens
ctgtctgcctctagt

SEQ ID NO: 1278849 - DNA, 15 bp, Homo sapiens
cctgtctgcctctag

SEQ ID NO: 1278850 - DNA, 15 bp, Homo sapiens
tcctgtctgcctcta

SEQ ID NO: 1278851 - DNA, 15 bp, Homo sapiens
ttcctgtctgcctct

SEQ ID NO: 1278852 - DNA, 15 bp, Homo sapiens
attcctgtctgcctc

SEQ ID NO: 1278853 - DNA, 15 bp, Homo sapiens
cattcctgtctgcct

SEQ ID NO: 1278854 - DNA, 15 bp, Homo sapiens
tcattcctgtctgcc

SEQ ID NO: 1278855 - DNA, 15 bp, Homo sapiens
ttcattcctgtctgc

SEQ ID NO: 1278856 - DNA, 15 bp, Homo sapiens
tttcattcctgtctg

SEQ ID NO: 1278857 - DNA, 15 bp, Homo sapiens
ctttcattcctgtct

SEQ ID NO: 1278858 - DNA, 15 bp, Homo sapiens
tctttcattcctgtc

SEQ ID NO: 1278859 - DNA, 15 bp, Homo sapiens
ttctttcattcctgt

SEQ ID NO: 1278860 - DNA, 15 bp, Homo sapiens
tttctttcattcctg

SEQ ID NO: 1278861 - DNA, 15 bp, Homo sapiens
ctttctttcattcct

SEQ ID NO: 1278862 - DNA, 15 bp, Homo sapiens
tctttctttcattcc

SEQ ID NO: 1278863 - DNA, 15 bp, Homo sapiens
ttctttctttcattc

SEQ ID NO: 1278864 - DNA, 15 bp, Homo sapiens
cttctttctttcatt

SEQ ID NO: 1278865 - DNA, 15 bp, Homo sapiens
ccttctttctttcat

SEQ ID NO: 1278866 - DNA, 15 bp, Homo sapiens
tccttctttctttca

SEQ ID NO: 1278867 - DNA, 15 bp, Homo sapiens
ttccttctttctttc

SEQ ID NO: 1278868 - DNA, 15 bp, Homo sapiens
cttccttctttcttt

SEQ ID NO: 1278869 - DNA, 15 bp, Homo sapiens
tcttccttctttctt

SEQ ID NO: 1278870 - DNA, 15 bp, Homo sapiens
ctcttccttctttct

SEQ ID NO: 1278871 - DNA, 15 bp, Homo sapiens
tctcttccttctttc

SEQ ID NO: 1278872 - DNA, 15 bp, Homo sapiens
ttctcttccttcttt

SEQ ID NO: 1278873 - DNA, 15 bp, Homo sapiens
cttctcttccttctt

SEQ ID NO: 1278874 - DNA, 15 bp, Homo sapiens
tcttctcttccttct

SEQ ID NO: 1278875 - DNA, 15 bp, Homo sapiens
gtcttctcttccttc

SEQ ID NO: 1278876 - DNA, 15 bp, Homo sapiens
ggtcttctcttcctt

SEQ ID NO: 1278877 - DNA, 15 bp, Homo sapiens
tggtcttctcttcct

SEQ ID NO: 1278878 - DNA, 15 bp, Homo sapiens
gtggtcttctcttcc

SEQ ID NO: 1278879 - DNA, 15 bp, Homo sapiens
tgtggtcttctcttc

SEQ ID NO: 1278880 - DNA, 15 bp, Homo sapiens
ttgtggtcttctctt

SEQ ID NO: 1278881 - DNA, 15 bp, Homo sapiens
tttgtggtcttctct

SEQ ID NO: 1278882 - DNA, 15 bp, Homo sapiens
ttttgtggtcttctc

SEQ ID NO: 1278883 - DNA, 15 bp, Homo sapiens
gttttgtggtcttct

SEQ ID NO: 1278884 - DNA, 15 bp, Homo sapiens
tgttttgtggtcttc

SEQ ID NO: 1278885 - DNA, 15 bp, Homo sapiens
ttgttttgtggtctt

SEQ ID NO: 1278886 - DNA, 15 bp, Homo sapiens
gttgttttgtggtct

SEQ ID NO: 1278887 - DNA, 15 bp, Homo sapiens
ggttgttttgtggtc

SEQ ID NO: 1278888 - DNA, 15 bp, Homo sapiens
tggttgttttgtggt

SEQ ID NO: 1278889 - DNA, 15 bp, Homo sapiens
ctggttgttttgtgg

SEQ ID NO: 1278890 - DNA, 15 bp, Homo sapiens
tctggttgttttgtg

SEQ ID NO: 1278891 - DNA, 15 bp, Homo sapiens
ttctggttgttttgt

SEQ ID NO: 1278892 - DNA, 15 bp, Homo sapiens
tttctggttgttttg

SEQ ID NO: 1278893 - DNA, 15 bp, Homo sapiens
ttttctggttgtttt

SEQ ID NO: 1278894 - DNA, 15 bp, Homo sapiens
gttttctggttgttt

SEQ ID NO: 1278895 - DNA, 15 bp, Homo sapiens
tgttttctggttgtt

SEQ ID NO: 1278896 - DNA, 15 bp, Homo sapiens
ttgttttctggttgt

SEQ ID NO: 1278897 - DNA, 15 bp, Homo sapiens
tttgttttctggttg

SEQ ID NO: 1278898 - DNA, 15 bp, Homo sapiens
atttgttttctggtt

SEQ ID NO: 1278899 - DNA, 15 bp, Homo sapiens
tatttgttttctggt

SEQ ID NO: 1278900 - DNA, 15 bp, Homo sapiens
ttatttgttttctgg

SEQ ID NO: 1278901 - DNA, 15 bp, Homo sapiens
gttatttgttttctg

SEQ ID NO: 1278902 - DNA, 15 bp, Homo sapiens
tgttatttgttttct

SEQ ID NO: 1278903 - DNA, 15 bp, Homo sapiens
ttgttatttgttttc

SEQ ID NO: 1278904 - DNA, 15 bp, Homo sapiens
tttgttatttgtttt

SEQ ID NO: 1278905 - DNA, 15 bp, Homo sapiens
ttttgttatttgttt

SEQ ID NO: 1278906 - DNA, 15 bp, Homo sapiens
attttgttatttgtt

SEQ ID NO: 1278907 - DNA, 15 bp, Homo sapiens
cattttgttatttgt

SEQ ID NO: 1278908 - DNA, 15 bp, Homo sapiens
ccattttgttatttg

SEQ ID NO: 1278909 - DNA, 15 bp, Homo sapiens
gccattttgttattt

SEQ ID NO: 1278910 - DNA, 15 bp, Homo sapiens
tgccattttgttatt

SEQ ID NO: 1278911 - DNA, 15 bp, Homo sapiens
ctgccattttgttat

SEQ ID NO: 1278912 - DNA, 15 bp, Homo sapiens
actgccattttgtta

SEQ ID NO: 1278913 - DNA, 15 bp, Homo sapiens
tactgccattttgtt

SEQ ID NO: 1278914 - DNA, 15 bp, Homo sapiens
ctactgccattttgt

SEQ ID NO: 1278915 - DNA, 15 bp, Homo sapiens
actactgccattttg

SEQ ID NO: 1278916 - DNA, 15 bp, Homo sapiens
tactactgccatttt

SEQ ID NO: 1278917 - DNA, 15 bp, Homo sapiens
ttactactgccattt

SEQ ID NO: 1278918 - DNA, 15 bp, Homo sapiens
cttactactgccatt

SEQ ID NO: 1278919 - DNA, 15 bp, Homo sapiens
acttactactgccat

SEQ ID NO: 1278920 - DNA, 15 bp, Homo sapiens
gacttactactgcca

SEQ ID NO: 1278921 - DNA, 15 bp, Homo sapiens
ggacttactactgcc

SEQ ID NO: 1278922 - DNA, 15 bp, Homo sapiens
aggacttactactgc

SEQ ID NO: 1278923 - DNA, 15 bp, Homo sapiens
aaggacttactactg

SEQ ID NO: 1278924 - DNA, 15 bp, Homo sapiens
taaggacttactact

SEQ ID NO: 1278925 - DNA, 15 bp, Homo sapiens
gtaaggacttactac

SEQ ID NO: 1278926 - DNA, 15 bp, Homo sapiens
agtaaggacttacta

SEQ ID NO: 1278927 - DNA, 15 bp, Homo sapiens
aagtaaggacttact

SEQ ID NO: 1278928 - DNA, 15 bp, Homo sapiens
taagtaaggacttac

SEQ ID NO: 1278929 - DNA, 15 bp, Homo sapiens
ataagtaaggactta

SEQ ID NO: 1278930 - DNA, 15 bp, Homo sapiens
gataagtaaggactt

SEQ ID NO: 1278931 - DNA, 15 bp, Homo sapiens
tgataagtaaggact

SEQ ID NO: 1278932 - DNA, 15 bp, Homo sapiens
ttgataagtaaggac

SEQ ID NO: 1278933 - DNA, 15 bp, Homo sapiens
attgataagtaagga

SEQ ID NO: 1278934 - DNA, 15 bp, Homo sapiens
tattgataagtaagg

SEQ ID NO: 1278935 - DNA, 15 bp, Homo sapiens
ttattgataagtaag

SEQ ID NO: 1278936 - DNA, 15 bp, Homo sapiens
attattgataagtaa

SEQ ID NO: 1278937 - DNA, 15 bp, Homo sapiens
tattattgataagta

SEQ ID NO: 1278938 - DNA, 15 bp, Homo sapiens
ttattattgataagt

SEQ ID NO: 1278939 - DNA, 15 bp, Homo sapiens
gttattattgataag

SEQ ID NO: 1278940 - DNA, 15 bp, Homo sapiens
cgttattattgataa

SEQ ID NO: 1278941 - DNA, 15 bp, Homo sapiens
acgttattattgata

SEQ ID NO: 1278942 - DNA, 15 bp, Homo sapiens
aacgttattattgat

SEQ ID NO: 1278943 - DNA, 15 bp, Homo sapiens
caacgttattattga

SEQ ID NO: 1278944 - DNA, 15 bp, Homo sapiens
tcaacgttattattg

SEQ ID NO: 1278945 - DNA, 15 bp, Homo sapiens
ttcaacgttattatt

SEQ ID NO: 1278946 - DNA, 15 bp, Homo sapiens
attcaacgttattat

SEQ ID NO: 1278947 - DNA, 15 bp, Homo sapiens
cattcaacgttatta

SEQ ID NO: 1278948 - DNA, 15 bp, Homo sapiens
acattcaacgttatt

SEQ ID NO: 1278949 - DNA, 15 bp, Homo sapiens
tacattcaacgttat

SEQ ID NO: 1278950 - DNA, 15 bp, Homo sapiens
ttacattcaacgtta

SEQ ID NO: 1278951 - DNA, 15 bp, Homo sapiens
tttacattcaacgtt

SEQ ID NO: 1278952 - DNA, 15 bp, Homo sapiens
atttacattcaacgt

SEQ ID NO: 1278953 - DNA, 15 bp, Homo sapiens
catttacattcaacg

SEQ ID NO: 1278954 - DNA, 15 bp, Homo sapiens
tcatttacattcaac

SEQ ID NO: 1278955 - DNA, 15 bp, Homo sapiens
ttcatttacattcaa

SEQ ID NO: 1278956 - DNA, 15 bp, Homo sapiens
gttcatttacattca

SEQ ID NO: 1278957 - DNA, 15 bp, Homo sapiens
agttcatttacattc

SEQ ID NO: 1278958 - DNA, 15 bp, Homo sapiens
tagttcatttacatt

SEQ ID NO: 1278959 - DNA, 15 bp, Homo sapiens
ttagttcatttacat

SEQ ID NO: 1278960 - DNA, 15 bp, Homo sapiens
tttagttcatttaca

SEQ ID NO: 1278961 - DNA, 15 bp, Homo sapiens
gtttagttcatttac

SEQ ID NO: 1278962 - DNA, 15 bp, Homo sapiens
agtttagttcattta

SEQ ID NO: 1278963 - DNA, 15 bp, Homo sapiens
gagtttagttcattt

SEQ ID NO: 1278964 - DNA, 15 bp, Homo sapiens
agagtttagttcatt

SEQ ID NO: 1278965 - DNA, 15 bp, Homo sapiens
aagagtttagttcat

SEQ ID NO: 1278966 - DNA, 15 bp, Homo sapiens
gaagagtttagttca

SEQ ID NO: 1278967 - DNA, 15 bp, Homo sapiens
tgaagagtttagttc

SEQ ID NO: 1278968 - DNA, 15 bp, Homo sapiens
ttgaagagtttagtt

SEQ ID NO: 1278969 - DNA, 15 bp, Homo sapiens
attgaagagtttagt

SEQ ID NO: 1278970 - DNA, 15 bp, Homo sapiens
gattgaagagtttag

SEQ ID NO: 1278971 - DNA, 15 bp, Homo sapiens
agattgaagagttta

SEQ ID NO: 1278972 - DNA, 15 bp, Homo sapiens
aagattgaagagttt

SEQ ID NO: 1278973 - DNA, 15 bp, Homo sapiens
gaagattgaagagtt

SEQ ID NO: 1278974 - DNA, 15 bp, Homo sapiens
tgaagattgaagagt

SEQ ID NO: 1278975 - DNA, 15 bp, Homo sapiens
ctgaagattgaagag

SEQ ID NO: 1278976 - DNA, 15 bp, Homo sapiens
tctgaagattgaaga

SEQ ID NO: 1278977 - DNA, 15 bp, Homo sapiens
gtctgaagattgaag

SEQ ID NO: 1278978 - DNA, 15 bp, Homo sapiens
tgtctgaagattgaa

SEQ ID NO: 1278979 - DNA, 15 bp, Homo sapiens
gtgtctgaagattga

SEQ ID NO: 1278980 - DNA, 15 bp, Homo sapiens
tgtgtctgaagattg

SEQ ID NO: 1278981 - DNA, 15 bp, Homo sapiens
ctgtgtctgaagatt

SEQ ID NO: 1278982 - DNA, 15 bp, Homo sapiens
tctgtgtctgaagat

SEQ ID NO: 1278983 - DNA, 15 bp, Homo sapiens
gtctgtgtctgaaga

SEQ ID NO: 1278984 - DNA, 15 bp, Homo sapiens
agtctgtgtctgaag

SEQ ID NO: 1278985 - DNA, 15 bp, Homo sapiens
cagtctgtgtctgaa

SEQ ID NO: 1278986 - DNA, 15 bp, Homo sapiens
ccagtctgtgtctga

SEQ ID NO: 1278987 - DNA, 15 bp, Homo sapiens
gccagtctgtgtctg

SEQ ID NO: 1278988 - DNA, 15 bp, Homo sapiens
agccagtctgtgtct

SEQ ID NO: 1278989 - DNA, 15 bp, Homo sapiens
cagccagtctgtgtc

SEQ ID NO: 1278990 - DNA, 15 bp, Homo sapiens
tcagccagtctgtgt

SEQ ID NO: 1278991 - DNA, 15 bp, Homo sapiens
ttcagccagtctgtg

SEQ ID NO: 1278992 - DNA, 15 bp, Homo sapiens
attcagccagtctgt

SEQ ID NO: 1278993 - DNA, 15 bp, Homo sapiens
cattcagccagtctg

SEQ ID NO: 1278994 - DNA, 15 bp, Homo sapiens
ccattcagccagtct

SEQ ID NO: 1278995 - DNA, 15 bp, Homo sapiens
tccattcagccagtc

SEQ ID NO: 1278996 - DNA, 15 bp, Homo sapiens
atccattcagccagt

SEQ ID NO: 1278997 - DNA, 15 bp, Homo sapiens
catccattcagccag

SEQ ID NO: 1278998 - DNA, 15 bp, Homo sapiens
tcatccattcagcca

SEQ ID NO: 1278999 - DNA, 15 bp, Homo sapiens
ttcatccattcagcc

SEQ ID NO: 1279000 - DNA, 15 bp, Homo sapiens
tttcatccattcagc

SEQ ID NO: 1279001 - DNA, 15 bp, Homo sapiens
ttttcatccattcag

SEQ ID NO: 1279002 - DNA, 15 bp, Homo sapiens
tttttcatccattca

SEQ ID NO: 1279003 - DNA, 15 bp, Homo sapiens
ttttttcatccattc

SEQ ID NO: 1279004 - DNA, 15 bp, Homo sapiens
tttttttcatccatt

SEQ ID NO: 1279005 - DNA, 15 bp, Homo sapiens
ctttttttcatccat

SEQ ID NO: 1279006 - DNA, 15 bp, Homo sapiens
gctttttttcatcca

SEQ ID NO: 1279007 - DNA, 15 bp, Homo sapiens
ggctttttttcatcc

SEQ ID NO: 1279008 - DNA, 15 bp, Homo sapiens
tggctttttttcatc

SEQ ID NO: 1279009 - DNA, 15 bp, Homo sapiens
atggctttttttcat

SEQ ID NO: 1279010 - DNA, 15 bp, Homo sapiens
aatggctttttttca

SEQ ID NO: 1279011 - DNA, 15 bp, Homo sapiens
caatggctttttttc

SEQ ID NO: 1279012 - DNA, 15 bp, Homo sapiens
tcaatggcttttttt

SEQ ID NO: 1279013 - DNA, 15 bp, Homo sapiens
atcaatggctttttt

SEQ ID NO: 1279014 - DNA, 15 bp, Homo sapiens
gatcaatggcttttt

SEQ ID NO: 1279015 - DNA, 15 bp, Homo sapiens
ggatcaatggctttt

SEQ ID NO: 1279016 - DNA, 15 bp, Homo sapiens
tggatcaatggcttt

SEQ ID NO: 1279017 - DNA, 15 bp, Homo sapiens
atggatcaatggctt

SEQ ID NO: 1279018 - DNA, 15 bp, Homo sapiens
aatggatcaatggct

SEQ ID NO: 1279019 - DNA, 15 bp, Homo sapiens
caatggatcaatggc

SEQ ID NO: 1279020 - DNA, 15 bp, Homo sapiens
gcaatggatcaatgg

SEQ ID NO: 1279021 - DNA, 15 bp, Homo sapiens
ggcaatggatcaatg

SEQ ID NO: 1279022 - DNA, 15 bp, Homo sapiens
aggcaatggatcaat

SEQ ID NO: 1279023 - DNA, 15 bp, Homo sapiens
caggcaatggatcaa

SEQ ID NO: 1279024 - DNA, 15 bp, Homo sapiens
gcaggcaatggatca

SEQ ID NO: 1279025 - DNA, 15 bp, Homo sapiens
tgcaggcaatggatc

SEQ ID NO: 1279026 - DNA, 15 bp, Homo sapiens
ttgcaggcaatggat

SEQ ID NO: 1279027 - DNA, 15 bp, Homo sapiens
cttgcaggcaatgga

SEQ ID NO: 1279028 - DNA, 15 bp, Homo sapiens
tcttgcaggcaatgg

SEQ ID NO: 1279029 - DNA, 15 bp, Homo sapiens
ttcttgcaggcaatg

SEQ ID NO: 1279030 - DNA, 15 bp, Homo sapiens
tttcttgcaggcaat

SEQ ID NO: 1279031 - DNA, 15 bp, Homo sapiens
gtttcttgcaggcaa

SEQ ID NO: 1279032 - DNA, 15 bp, Homo sapiens
tgtttcttgcaggca

SEQ ID NO: 1279033 - DNA, 15 bp, Homo sapiens
gtgtttcttgcaggc

SEQ ID NO: 1279034 - DNA, 15 bp, Homo sapiens
tgtgtttcttgcagg

SEQ ID NO: 1279035 - DNA, 15 bp, Homo sapiens
gtgtgtttcttgcag

SEQ ID NO: 1279036 - DNA, 15 bp, Homo sapiens
agtgtgtttcttgca

SEQ ID NO: 1279037 - DNA, 15 bp, Homo sapiens
aagtgtgtttcttgc

SEQ ID NO: 1279038 - DNA, 15 bp, Homo sapiens
gaagtgtgtttcttg

SEQ ID NO: 1279039 - DNA, 15 bp, Homo sapiens
tgaagtgtgtttctt

SEQ ID NO: 1279040 - DNA, 15 bp, Homo sapiens
atgaagtgtgtttct

SEQ ID NO: 1279041 - DNA, 15 bp, Homo sapiens
gatgaagtgtgtttc

SEQ ID NO: 1279042 - DNA, 15 bp, Homo sapiens
agatgaagtgtgttt

SEQ ID NO: 1279043 - DNA, 15 bp, Homo sapiens
tagatgaagtgtgtt

SEQ ID NO: 1279044 - DNA, 15 bp, Homo sapiens
atagatgaagtgtgt

SEQ ID NO: 1279045 - DNA, 15 bp, Homo sapiens
tatagatgaagtgtg

SEQ ID NO: 1279046 - DNA, 15 bp, Homo sapiens
ttatagatgaagtgt

SEQ ID NO: 1279047 - DNA, 15 bp, Homo sapiens
tttatagatgaagtg

SEQ ID NO: 1279048 - DNA, 15 bp, Homo sapiens
ctttatagatgaagt

SEQ ID NO: 1279049 - DNA, 15 bp, Homo sapiens
tctttatagatgaag

SEQ ID NO: 1279050 - DNA, 15 bp, Homo sapiens
gtctttatagatgaa

SEQ ID NO: 1279051 - DNA, 15 bp, Homo sapiens
tgtctttatagatga

SEQ ID NO: 1279052 - DNA, 15 bp, Homo sapiens
gtgtctttatagatg

SEQ ID NO: 1279053 - DNA, 15 bp, Homo sapiens
tgtgtctttatagat

SEQ ID NO: 1279054 - DNA, 15 bp, Homo sapiens
gtgtgtctttataga

SEQ ID NO: 1279055 - DNA, 15 bp, Homo sapiens
tgtgtgtctttatag

SEQ ID NO: 1279056 - DNA, 15 bp, Homo sapiens
atgtgtgtctttata

SEQ ID NO: 1279057 - DNA, 15 bp, Homo sapiens
tatgtgtgtctttat

SEQ ID NO: 1279058 - DNA, 15 bp, Homo sapiens
ctatgtgtgtcttta

SEQ ID NO: 1279059 - DNA, 15 bp, Homo sapiens
tctatgtgtgtcttt

SEQ ID NO: 1279060 - DNA, 15 bp, Homo sapiens
gtctatgtgtgtctt

SEQ ID NO: 1279061 - DNA, 15 bp, Homo sapiens
agtctatgtgtgtct

SEQ ID NO: 1279062 - DNA, 15 bp, Homo sapiens
cagtctatgtgtgtc

SEQ ID NO: 1279063 - DNA, 15 bp, Homo sapiens
tcagtctatgtgtgt

SEQ ID NO: 1279064 - DNA, 15 bp, Homo sapiens
ttcagtctatgtgtg

SEQ ID NO: 1279065 - DNA, 15 bp, Homo sapiens
tttcagtctatgtgt

SEQ ID NO: 1279066 - DNA, 15 bp, Homo sapiens
ttttcagtctatgtg

SEQ ID NO: 1279067 - DNA, 15 bp, Homo sapiens
attttcagtctatgt

SEQ ID NO: 1279068 - DNA, 15 bp, Homo sapiens
tattttcagtctatg

SEQ ID NO: 1279069 - DNA, 15 bp, Homo sapiens
ttattttcagtctat

SEQ ID NO: 1279070 - DNA, 15 bp, Homo sapiens
tttattttcagtcta

SEQ ID NO: 1279071 - DNA, 15 bp, Homo sapiens
ctttattttcagtct

SEQ ID NO: 1279072 - DNA, 15 bp, Homo sapiens
cctttattttcagtc

SEQ ID NO: 1279073 - DNA, 15 bp, Homo sapiens
tcctttattttcagt

SEQ ID NO: 1279074 - DNA, 15 bp, Homo sapiens
ctcctttattttcag

SEQ ID NO: 1279075 - DNA, 15 bp, Homo sapiens
actcctttattttca

SEQ ID NO: 1279076 - DNA, 15 bp, Homo sapiens
cactcctttattttc

SEQ ID NO: 1279077 - DNA, 15 bp, Homo sapiens
ccactcctttatttt

SEQ ID NO: 1279078 - DNA, 15 bp, Homo sapiens
tccactcctttattt

SEQ ID NO: 1279079 - DNA, 15 bp, Homo sapiens
ttccactcctttatt

SEQ ID NO: 1279080 - DNA, 15 bp, Homo sapiens
tttccactcctttat

SEQ ID NO: 1279081 - DNA, 15 bp, Homo sapiens
ttttccactccttta

SEQ ID NO: 1279082 - DNA, 15 bp, Homo sapiens
tttttccactccttt

SEQ ID NO: 1279083 - DNA, 15 bp, Homo sapiens
ctttttccactcctt

SEQ ID NO: 1279084 - DNA, 15 bp, Homo sapiens
tctttttccactcct

SEQ ID NO: 1279085 - DNA, 15 bp, Homo sapiens
atctttttccactcc

SEQ ID NO: 1279086 - DNA, 15 bp, Homo sapiens
tatctttttccactc

SEQ ID NO: 1279087 - DNA, 15 bp, Homo sapiens
atatctttttccact

SEQ ID NO: 1279088 - DNA, 15 bp, Homo sapiens
aatatctttttccac

SEQ ID NO: 1279089 - DNA, 15 bp, Homo sapiens
gaatatctttttcca

SEQ ID NO: 1279090 - DNA, 15 bp, Homo sapiens
ggaatatctttttcc

SEQ ID NO: 1279091 - DNA, 15 bp, Homo sapiens
tggaatatctttttc

SEQ ID NO: 1279092 - DNA, 15 bp, Homo sapiens
atggaatatcttttt

SEQ ID NO: 1279093 - DNA, 15 bp, Homo sapiens
catggaatatctttt

SEQ ID NO: 1279094 - DNA, 15 bp, Homo sapiens
gcatggaatatcttt

SEQ ID NO: 1279095 - DNA, 15 bp, Homo sapiens
ggcatggaatatctt

SEQ ID NO: 1279096 - DNA, 15 bp, Homo sapiens
tggcatggaatatct

SEQ ID NO: 1279097 - DNA, 15 bp, Homo sapiens
ttggcatggaatatc

SEQ ID NO: 1279098 - DNA, 15 bp, Homo sapiens
attggcatggaatat

SEQ ID NO: 1279099 - DNA, 15 bp, Homo sapiens
cattggcatggaata

SEQ ID NO: 1279100 - DNA, 15 bp, Homo sapiens
ccattggcatggaat

SEQ ID NO: 1279101 - DNA, 15 bp, Homo sapiens
tccattggcatggaa

SEQ ID NO: 1279102 - DNA, 15 bp, Homo sapiens
ttccattggcatgga

SEQ ID NO: 1279103 - DNA, 15 bp, Homo sapiens
tttccattggcatgg

SEQ ID NO: 1279104 - DNA, 15 bp, Homo sapiens
gtttccattggcatg

SEQ ID NO: 1279105 - DNA, 15 bp, Homo sapiens
tgtttccattggcat

SEQ ID NO: 1279106 - DNA, 15 bp, Homo sapiens
ttgtttccattggca

SEQ ID NO: 1279107 - DNA, 15 bp, Homo sapiens
tttgtttccattggc

SEQ ID NO: 1279108 - DNA, 15 bp, Homo sapiens
ttttgtttccattgg

SEQ ID NO: 1279109 - DNA, 15 bp, Homo sapiens
tttttgtttccattg

SEQ ID NO: 1279110 - DNA, 15 bp, Homo sapiens
ttttttgtttccatt

SEQ ID NO: 1279111 - DNA, 15 bp, Homo sapiens
tttttttgtttccat

SEQ ID NO: 1279112 - DNA, 15 bp, Homo sapiens
ctttttttgtttcca

SEQ ID NO: 1279113 - DNA, 15 bp, Homo sapiens
gctttttttgtttcc

SEQ ID NO: 1279114 - DNA, 15 bp, Homo sapiens
tgctttttttgtttc

SEQ ID NO: 1279115 - DNA, 15 bp, Homo sapiens
ttgctttttttgttt

SEQ ID NO: 1279116 - DNA, 15 bp, Homo sapiens
cttgctttttttgtt

SEQ ID NO: 1279117 - DNA, 15 bp, Homo sapiens
tcttgctttttttgt

SEQ ID NO: 1279118 - DNA, 15 bp, Homo sapiens
ctcttgctttttttg

SEQ ID NO: 1279119 - DNA, 15 bp, Homo sapiens
actcttgcttttttt

SEQ ID NO: 1279120 - DNA, 15 bp, Homo sapiens
aactcttgctttttt

SEQ ID NO: 1279121 - DNA, 15 bp, Homo sapiens
caactcttgcttttt

SEQ ID NO: 1279122 - DNA, 15 bp, Homo sapiens
acaactcttgctttt

SEQ ID NO: 1279123 - DNA, 15 bp, Homo sapiens
aacaactcttgcttt

SEQ ID NO: 1279124 - DNA, 15 bp, Homo sapiens
taacaactcttgctt

SEQ ID NO: 1279125 - DNA, 15 bp, Homo sapiens
ataacaactcttgct

SEQ ID NO: 1279126 - DNA, 15 bp, Homo sapiens
tataacaactcttgc

SEQ ID NO: 1279127 - DNA, 15 bp, Homo sapiens
atataacaactcttg

SEQ ID NO: 1279128 - DNA, 15 bp, Homo sapiens
gatataacaactctt

SEQ ID NO: 1279129 - DNA, 15 bp, Homo sapiens
tgatataacaactct

SEQ ID NO: 1279130 - DNA, 15 bp, Homo sapiens
ctgatataacaactc

SEQ ID NO: 1279131 - DNA, 15 bp, Homo sapiens
tctgatataacaact

SEQ ID NO: 1279132 - DNA, 15 bp, Homo sapiens
gtctgatataacaac

SEQ ID NO: 1279133 - DNA, 15 bp, Homo sapiens
tgtctgatataacaa

SEQ ID NO: 1279134 - DNA, 15 bp, Homo sapiens
ttgtctgatataaca

SEQ ID NO: 1279135 - DNA, 15 bp, Homo sapiens
tttgtctgatataac

SEQ ID NO: 1279136 - DNA, 15 bp, Homo sapiens
ttttgtctgatataa

SEQ ID NO: 1279137 - DNA, 15 bp, Homo sapiens
attttgtctgatata

SEQ ID NO: 1279138 - DNA, 15 bp, Homo sapiens
tattttgtctgatat

SEQ ID NO: 1279139 - DNA, 15 bp, Homo sapiens
ctattttgtctgata

SEQ ID NO: 1279140 - DNA, 15 bp, Homo sapiens
tctattttgtctgat

SEQ ID NO: 1279141 - DNA, 15 bp, Homo sapiens
gtctattttgtctga

SEQ ID NO: 1279142 - DNA, 15 bp, Homo sapiens
agtctattttgtctg

SEQ ID NO: 1279143 - DNA, 15 bp, Homo sapiens
aagtctattttgtct

SEQ ID NO: 1279144 - DNA, 15 bp, Homo sapiens
gaagtctattttgtc

SEQ ID NO: 1279145 - DNA, 15 bp, Homo sapiens
tgaagtctattttgt

SEQ ID NO: 1279146 - DNA, 15 bp, Homo sapiens
ttgaagtctattttg

SEQ ID NO: 1279147 - DNA, 15 bp, Homo sapiens
cttgaagtctatttt

SEQ ID NO: 1279148 - DNA, 15 bp, Homo sapiens
tcttgaagtctattt

SEQ ID NO: 1279149 - DNA, 15 bp, Homo sapiens
gtcttgaagtctatt

SEQ ID NO: 1279150 - DNA, 15 bp, Homo sapiens
tgtcttgaagtctat

SEQ ID NO: 1279151 - DNA, 15 bp, Homo sapiens
ttgtcttgaagtcta

SEQ ID NO: 1279152 - DNA, 15 bp, Homo sapiens
tttgtcttgaagtct

SEQ ID NO: 1279153 - DNA, 15 bp, Homo sapiens
ttttgtcttgaagtc

SEQ ID NO: 1279154 - DNA, 15 bp, Homo sapiens
tttttgtcttgaagt

SEQ ID NO: 1279155 - DNA, 15 bp, Homo sapiens
gtttttgtcttgaag

SEQ ID NO: 1279156 - DNA, 15 bp, Homo sapiens
ggtttttgtcttgaa

SEQ ID NO: 1279157 - DNA, 15 bp, Homo sapiens
tggtttttgtcttga

SEQ ID NO: 1279158 - DNA, 15 bp, Homo sapiens
atggtttttgtcttg

SEQ ID NO: 1279159 - DNA, 15 bp, Homo sapiens
ttatggtttttgtct

SEQ ID NO: 1279160 - DNA, 15 bp, Homo sapiens
cttatggtttttgtc

SEQ ID NO: 1279161 - DNA, 15 bp, Homo sapiens
tcttatggtttttgt

SEQ ID NO: 1279162 - DNA, 15 bp, Homo sapiens
gtcttatggtttttg

SEQ ID NO: 1279163 - DNA, 15 bp, Homo sapiens
cgtcttatggttttt

SEQ ID NO: 1279164 - DNA, 15 bp, Homo sapiens
tcgtcttatggtttt

SEQ ID NO: 1279165 - DNA, 15 bp, Homo sapiens
ctcgtcttatggttt

SEQ ID NO: 1279166 - DNA, 15 bp, Homo sapiens
tctcgtcttatggtt

SEQ ID NO: 1279167 - DNA, 15 bp, Homo sapiens
gtctcgtcttatggt

SEQ ID NO: 1279168 - DNA, 15 bp, Homo sapiens
tgtctcgtcttatgg

SEQ ID NO: 1279169 - DNA, 15 bp, Homo sapiens
ttgtctcgtcttatg

SEQ ID NO: 1279170 - DNA, 15 bp, Homo sapiens
tttgtctcgtcttat

SEQ ID NO: 1279171 - DNA, 15 bp, Homo sapiens
ctttgtctcgtctta

SEQ ID NO: 1279172 - DNA, 15 bp, Homo sapiens
tctttgtctcgtctt

SEQ ID NO: 1279173 - DNA, 15 bp, Homo sapiens
ttctttgtctcgtct

SEQ ID NO: 1279174 - DNA, 15 bp, Homo sapiens
cttctttgtctcgtc

SEQ ID NO: 1279175 - DNA, 15 bp, Homo sapiens
ccttctttgtctcgt

SEQ ID NO: 1279176 - DNA, 15 bp, Homo sapiens
accttctttgtctcg

SEQ ID NO: 1279177 - DNA, 15 bp, Homo sapiens
gaccttctttgtctc

SEQ ID NO: 1279178 - DNA, 15 bp, Homo sapiens
tgaccttctttgtct

SEQ ID NO: 1279179 - DNA, 15 bp, Homo sapiens
gtgaccttctttgtc

SEQ ID NO: 1279180 - DNA, 15 bp, Homo sapiens
agtgaccttctttgt

SEQ ID NO: 1279181 - DNA, 15 bp, Homo sapiens
tagtgaccttctttg

SEQ ID NO: 1279182 - DNA, 15 bp, Homo sapiens
atagtgaccttcttt

SEQ ID NO: 1279183 - DNA, 15 bp, Homo sapiens
aatagtgaccttctt

SEQ ID NO: 1279184 - DNA, 15 bp, Homo sapiens
taatagtgaccttct

SEQ ID NO: 1279185 - DNA, 15 bp, Homo sapiens
ttaatagtgaccttc

SEQ ID NO: 1279186 - DNA, 15 bp, Homo sapiens
attaatagtgacctt

SEQ ID NO: 1279187 - DNA, 15 bp, Homo sapiens
cattaatagtgacct

SEQ ID NO: 1279188 - DNA, 15 bp, Homo sapiens
tcattaatagtgacc

SEQ ID NO: 1279189 - DNA, 15 bp, Homo sapiens
atcattaatagtgac

SEQ ID NO: 1279190 - DNA, 15 bp, Homo sapiens
tatcattaatagtga

SEQ ID NO: 1279191 - DNA, 15 bp, Homo sapiens
ttatcattaatagtg

SEQ ID NO: 1279192 - DNA, 15 bp, Homo sapiens
tttatcattaatagt

SEQ ID NO: 1279193 - DNA, 15 bp, Homo sapiens
ttttatcattaatag

SEQ ID NO: 1279194 - DNA, 15 bp, Homo sapiens
attttatcattaata

SEQ ID NO: 1279195 - DNA, 15 bp, Homo sapiens
cattttatcattaat

SEQ ID NO: 1279196 - DNA, 15 bp, Homo sapiens
tcattttatcattaa

SEQ ID NO: 1279197 - DNA, 15 bp, Homo sapiens
atcattttatcatta

SEQ ID NO: 1279198 - DNA, 15 bp, Homo sapiens
tatcattttatcatt

SEQ ID NO: 1279199 - DNA, 15 bp, Homo sapiens
atatcattttatcat

SEQ ID NO: 1279200 - DNA, 15 bp, Homo sapiens
tatatcattttatca

SEQ ID NO: 1279201 - DNA, 15 bp, Homo sapiens
atatatcattttatc

SEQ ID NO: 1279202 - DNA, 15 bp, Homo sapiens
aatatatcattttat

SEQ ID NO: 1279203 - DNA, 15 bp, Homo sapiens
aaatatatcatttta

SEQ ID NO: 1279204 - DNA, 15 bp, Homo sapiens
caaatatatcatttt

SEQ ID NO: 1279205 - DNA, 15 bp, Homo sapiens
tcaaatatatcattt

SEQ ID NO: 1279206 - DNA, 15 bp, Homo sapiens
gtcaaatatatcatt

SEQ ID NO: 1279207 - DNA, 15 bp, Homo sapiens
tgtcaaatatatcat

SEQ ID NO: 1279208 - DNA, 15 bp, Homo sapiens
ttgtcaaatatatca

SEQ ID NO: 1279209 - DNA, 15 bp, Homo sapiens
tttgtcaaatatatc

SEQ ID NO: 1279210 - DNA, 15 bp, Homo sapiens
ttttgtcaaatatat

SEQ ID NO: 1279211 - DNA, 15 bp, Homo sapiens
tttttgtcaaatata

SEQ ID NO: 1279212 - DNA, 15 bp, Homo sapiens
ctttttgtcaaatat

SEQ ID NO: 1279213 - DNA, 15 bp, Homo sapiens
tctttttgtcaaata

SEQ ID NO: 1279214 - DNA, 15 bp, Homo sapiens
atctttttgtcaaat

SEQ ID NO: 1279215 - DNA, 15 bp, Homo sapiens
tatctttttgtcaaa

SEQ ID NO: 1279216 - DNA, 15 bp, Homo sapiens
atatctttttgtcaa

SEQ ID NO: 1279217 - DNA, 15 bp, Homo sapiens
tatatctttttgtca

SEQ ID NO: 1279218 - DNA, 15 bp, Homo sapiens
ttatatctttttgtc

SEQ ID NO: 1279219 - DNA, 15 bp, Homo sapiens
gttatatctttttgt

SEQ ID NO: 1279220 - DNA, 15 bp, Homo sapiens
tgttatatctttttg

SEQ ID NO: 1279221 - DNA, 15 bp, Homo sapiens
ttgttatatcttttt

SEQ ID NO: 1279222 - DNA, 15 bp, Homo sapiens
attgttatatctttt

SEQ ID NO: 1279223 - DNA, 15 bp, Homo sapiens
aattgttatatcttt

SEQ ID NO: 1279224 - DNA, 15 bp, Homo sapiens
aaattgttatatctt

SEQ ID NO: 1279225 - DNA, 15 bp, Homo sapiens
aaaattgttatatct

SEQ ID NO: 1279226 - DNA, 15 bp, Homo sapiens
taaaattgttatatc

SEQ ID NO: 1279227 - DNA, 15 bp, Homo sapiens
ttaaaattgttatat

SEQ ID NO: 1279228 - DNA, 15 bp, Homo sapiens
tttaaaattgttata

SEQ ID NO: 1279229 - DNA, 15 bp, Homo sapiens
atttaaaattgttat

SEQ ID NO: 1279230 - DNA, 15 bp, Homo sapiens
tatttaaaattgtta

SEQ ID NO: 1279231 - DNA, 15 bp, Homo sapiens
atatttaaaattgtt

SEQ ID NO: 1279232 - DNA, 15 bp, Homo sapiens
tatatttaaaattgt

SEQ ID NO: 1279233 - DNA, 15 bp, Homo sapiens
atatatttaaaattg

SEQ ID NO: 1279234 - DNA, 15 bp, Homo sapiens
tatatatttaaaatt

SEQ ID NO: 1279235 - DNA, 15 bp, Homo sapiens
atatatatttaaaat

SEQ ID NO: 1279236 - DNA, 15 bp, Homo sapiens
catatatatttaaaa

SEQ ID NO: 1279237 - DNA, 15 bp, Homo sapiens
gcatatatatttaaa

SEQ ID NO: 1279238 - DNA, 15 bp, Homo sapiens
tgcatatatatttaa

SEQ ID NO: 1279239 - DNA, 15 bp, Homo sapiens
gtgcatatatattta

SEQ ID NO: 1279240 - DNA, 15 bp, Homo sapiens
ggtgcatatatattt

SEQ ID NO: 1279241 - DNA, 15 bp, Homo sapiens
gggtgcatatatatt

SEQ ID NO: 1279242 - DNA, 15 bp, Homo sapiens
tgggtgcatatatat

SEQ ID NO: 1279243 - DNA, 15 bp, Homo sapiens
ttgggtgcatatata

SEQ ID NO: 1279244 - DNA, 15 bp, Homo sapiens
gttgggtgcatatat

SEQ ID NO: 1279245 - DNA, 15 bp, Homo sapiens
tgttgggtgcatata

SEQ ID NO: 1279246 - DNA, 15 bp, Homo sapiens
gtgttgggtgcatat

SEQ ID NO: 1279247 - DNA, 15 bp, Homo sapiens
agtgttgggtgcata

SEQ ID NO: 1279248 - DNA, 15 bp, Homo sapiens
cagtgttgggtgcat

SEQ ID NO: 1279249 - DNA, 15 bp, Homo sapiens
ccagtgttgggtgca

SEQ ID NO: 1279250 - DNA, 15 bp, Homo sapiens
tccagtgttgggtgc

SEQ ID NO: 1279251 - DNA, 15 bp, Homo sapiens
ctccagtgttgggtg

SEQ ID NO: 1279252 - DNA, 15 bp, Homo sapiens
gctccagtgttgggt

SEQ ID NO: 1279253 - DNA, 15 bp, Homo sapiens
tgctccagtgttggg

SEQ ID NO: 1279254 - DNA, 15 bp, Homo sapiens
gtgctccagtgttgg

SEQ ID NO: 1279255 - DNA, 15 bp, Homo sapiens
ggtgctccagtgttg

SEQ ID NO: 1279256 - DNA, 15 bp, Homo sapiens
gggtgctccagtgtt

SEQ ID NO: 1279257 - DNA, 15 bp, Homo sapiens
tgggtgctccagtgt

SEQ ID NO: 1279258 - DNA, 15 bp, Homo sapiens
ctgggtgctccagtg

SEQ ID NO: 1279259 - DNA, 15 bp, Homo sapiens
tctgggtgctccagt

SEQ ID NO: 1279260 - DNA, 15 bp, Homo sapiens
atctgggtgctccag

SEQ ID NO: 1279261 - DNA, 15 bp, Homo sapiens
tatctgggtgctcca

SEQ ID NO: 1279262 - DNA, 15 bp, Homo sapiens
atatctgggtgctcc

SEQ ID NO: 1279263 - DNA, 15 bp, Homo sapiens
tatatctgggtgctc

SEQ ID NO: 1279264 - DNA, 15 bp, Homo sapiens
atatatctgggtgct

SEQ ID NO: 1279265 - DNA, 15 bp, Homo sapiens
tatatatctgggtgc

SEQ ID NO: 1279266 - DNA, 15 bp, Homo sapiens
ttatatatctgggtg

SEQ ID NO: 1279267 - DNA, 15 bp, Homo sapiens
tttatatatctgggt

SEQ ID NO: 1279268 - DNA, 15 bp, Homo sapiens
ctttatatatctggg

SEQ ID NO: 1279269 - DNA, 15 bp, Homo sapiens
cctttatatatctgg

SEQ ID NO: 1279270 - DNA, 15 bp, Homo sapiens
tcctttatatatctg

SEQ ID NO: 1279271 - DNA, 15 bp, Homo sapiens
ttcctttatatatct

SEQ ID NO: 1279272 - DNA, 15 bp, Homo sapiens
tttcctttatatatc

SEQ ID NO: 1279273 - DNA, 15 bp, Homo sapiens
atttcctttatatat

SEQ ID NO: 1279274 - DNA, 15 bp, Homo sapiens
tatttcctttatata

SEQ ID NO: 1279275 - DNA, 15 bp, Homo sapiens
atatttcctttatat

SEQ ID NO: 1279276 - DNA, 15 bp, Homo sapiens
aatatttcctttata

SEQ ID NO: 1279277 - DNA, 15 bp, Homo sapiens
taatatttcctttat

SEQ ID NO: 1279278 - DNA, 15 bp, Homo sapiens
ataatatttccttta

SEQ ID NO: 1279279 - DNA, 15 bp, Homo sapiens
aataatatttccttt

SEQ ID NO: 1279280 - DNA, 15 bp, Homo sapiens
taataatatttcctt

SEQ ID NO: 1279281 - DNA, 15 bp, Homo sapiens
ctaataatatttcct

SEQ ID NO: 1279282 - DNA, 15 bp, Homo sapiens
tctaataatatttcc

SEQ ID NO: 1279283 - DNA, 15 bp, Homo sapiens
ctctaataatatttc

SEQ ID NO: 1279284 - DNA, 15 bp, Homo sapiens
gctctaataatattt

SEQ ID NO: 1279285 - DNA, 15 bp, Homo sapiens
agctctaataatatt

SEQ ID NO: 1279286 - DNA, 15 bp, Homo sapiens
tagctctaataatat

SEQ ID NO: 1279287 - DNA, 15 bp, Homo sapiens
ttagctctaataata

SEQ ID NO: 1279288 - DNA, 15 bp, Homo sapiens
tttagctctaataat

SEQ ID NO: 1279289 - DNA, 15 bp, Homo sapiens
ctttagctctaataa

SEQ ID NO: 1279290 - DNA, 15 bp, Homo sapiens
tctttagctctaata

SEQ ID NO: 1279291 - DNA, 15 bp, Homo sapiens
ctctttagctctaat

SEQ ID NO: 1279292 - DNA, 15 bp, Homo sapiens
tctctttagctctaa

SEQ ID NO: 1279293 - DNA, 15 bp, Homo sapiens
ctctctttagctcta

SEQ ID NO: 1279294 - DNA, 15 bp, Homo sapiens
tctctctttagctct

SEQ ID NO: 1279295 - DNA, 15 bp, Homo sapiens
ctctctctttagctc

SEQ ID NO: 1279296 - DNA, 15 bp, Homo sapiens
tctctctctttagct

SEQ ID NO: 1279297 - DNA, 15 bp, Homo sapiens
atctctctctttagc

SEQ ID NO: 1279298 - DNA, 15 bp, Homo sapiens
tatctctctctttag

SEQ ID NO: 1279299 - DNA, 15 bp, Homo sapiens
ctatctctctcttta

SEQ ID NO: 1279300 - DNA, 15 bp, Homo sapiens
cctatctctctcttt

SEQ ID NO: 1279301 - DNA, 15 bp, Homo sapiens
acctatctctctctt

SEQ ID NO: 1279302 - DNA, 15 bp, Homo sapiens
gacctatctctctct

SEQ ID NO: 1279303 - DNA, 15 bp, Homo sapiens
ggacctatctctctc

SEQ ID NO: 1279304 - DNA, 15 bp, Homo sapiens
aggacctatctctct

SEQ ID NO: 1279305 - DNA, 15 bp, Homo sapiens
taggacctatctctc

SEQ ID NO: 1279306 - DNA, 15 bp, Homo sapiens
ttaggacctatctct

SEQ ID NO: 1279307 - DNA, 15 bp, Homo sapiens
attaggacctatctc

SEQ ID NO: 1279308 - DNA, 15 bp, Homo sapiens
tattaggacctatct

SEQ ID NO: 1279309 - DNA, 15 bp, Homo sapiens
gtattaggacctatc

SEQ ID NO: 1279310 - DNA, 15 bp, Homo sapiens
tgtattaggacctat

SEQ ID NO: 1279311 - DNA, 15 bp, Homo sapiens
ttgtattaggaccta

SEQ ID NO: 1279312 - DNA, 15 bp, Homo sapiens
attgtattaggacct

SEQ ID NO: 1279313 - DNA, 15 bp, Homo sapiens
tattgtattaggacc

SEQ ID NO: 1279314 - DNA, 15 bp, Homo sapiens
ttattgtattaggac

SEQ ID NO: 1279315 - DNA, 15 bp, Homo sapiens
attattgtattagga

SEQ ID NO: 1279316 - DNA, 15 bp, Homo sapiens
tattattgtattagg

SEQ ID NO: 1279317 - DNA, 15 bp, Homo sapiens
ctattattgtattag

SEQ ID NO: 1279318 - DNA, 15 bp, Homo sapiens
gctattattgtatta

SEQ ID NO: 1279319 - DNA, 15 bp, Homo sapiens
agctattattgtatt

SEQ ID NO: 1279320 - DNA, 15 bp, Homo sapiens
cagctattattgtat

SEQ ID NO: 1279321 - DNA, 15 bp, Homo sapiens
ccagctattattgta

SEQ ID NO: 1279322 - DNA, 15 bp, Homo sapiens
tccagctattattgt

SEQ ID NO: 1279323 - DNA, 15 bp, Homo sapiens
ttccagctattattg

SEQ ID NO: 1279324 - DNA, 15 bp, Homo sapiens
tttccagctattatt

SEQ ID NO: 1279325 - DNA, 15 bp, Homo sapiens
gtttccagctattat

SEQ ID NO: 1279326 - DNA, 15 bp, Homo sapiens
tgtttccagctatta

SEQ ID NO: 1279327 - DNA, 15 bp, Homo sapiens
atgtttccagctatt

SEQ ID NO: 1279328 - DNA, 15 bp, Homo sapiens
gatgtttccagctat

SEQ ID NO: 1279329 - DNA, 15 bp, Homo sapiens
tgatgtttccagcta

SEQ ID NO: 1279330 - DNA, 15 bp, Homo sapiens
ttgatgtttccagct

SEQ ID NO: 1279331 - DNA, 15 bp, Homo sapiens
attgatgtttccagc

SEQ ID NO: 1279332 - DNA, 15 bp, Homo sapiens
tattgatgtttccag

SEQ ID NO: 1279333 - DNA, 15 bp, Homo sapiens
gtattgatgtttcca

SEQ ID NO: 1279334 - DNA, 15 bp, Homo sapiens
ggtattgatgtttcc

SEQ ID NO: 1279335 - DNA, 15 bp, Homo sapiens
gggtattgatgtttc

SEQ ID NO: 1279336 - DNA, 15 bp, Homo sapiens
ggggtattgatgttt

SEQ ID NO: 1279337 - DNA, 15 bp, Homo sapiens
tggggtattgatgtt

SEQ ID NO: 1279338 - DNA, 15 bp, Homo sapiens
gtggggtattgatgt

SEQ ID NO: 1279339 - DNA, 15 bp, Homo sapiens
agtggggtattgatg

SEQ ID NO: 1279340 - DNA, 15 bp, Homo sapiens
aagtggggtattgat

SEQ ID NO: 1279341 - DNA, 15 bp, Homo sapiens
aaagtggggtattga

SEQ ID NO: 1279342 - DNA, 15 bp, Homo sapiens
gaaagtggggtattg

SEQ ID NO: 1279343 - DNA, 15 bp, Homo sapiens
tgaaagtggggtatt

SEQ ID NO: 1279344 - DNA, 15 bp, Homo sapiens
ctgaaagtggggtat

SEQ ID NO: 1279345 - DNA, 15 bp, Homo sapiens
gctgaaagtggggta

SEQ ID NO: 1279346 - DNA, 15 bp, Homo sapiens
tgctgaaagtggggt

SEQ ID NO: 1279347 - DNA, 15 bp, Homo sapiens
atgctgaaagtgggg

SEQ ID NO: 1279348 - DNA, 15 bp, Homo sapiens
aatgctgaaagtggg

SEQ ID NO: 1279349 - DNA, 15 bp, Homo sapiens
caatgctgaaagtgg

SEQ ID NO: 1279350 - DNA, 15 bp, Homo sapiens
ccaatgctgaaagtg

SEQ ID NO: 1279351 - DNA, 15 bp, Homo sapiens
cccaatgctgaaagt

SEQ ID NO: 1279352 - DNA, 15 bp, Homo sapiens
gcccaatgctgaaag

SEQ ID NO: 1279353 - DNA, 15 bp, Homo sapiens
tgcccaatgctgaaa

SEQ ID NO: 1279354 - DNA, 15 bp, Homo sapiens
ctgcccaatgctgaa

SEQ ID NO: 1279355 - DNA, 15 bp, Homo sapiens
tctgcccaatgctga

SEQ ID NO: 1279356 - DNA, 15 bp, Homo sapiens
atctgcccaatgctg

SEQ ID NO: 1279357 - DNA, 15 bp, Homo sapiens
gatctgcccaatgct

SEQ ID NO: 1279358 - DNA, 15 bp, Homo sapiens
agatctgcccaatgc

SEQ ID NO: 1279359 - DNA, 15 bp, Homo sapiens
aagatctgcccaatg

SEQ ID NO: 1279360 - DNA, 15 bp, Homo sapiens
gaagatctgcccaat

SEQ ID NO: 1279361 - DNA, 15 bp, Homo sapiens
ggaagatctgcccaa

SEQ ID NO: 1279362 - DNA, 15 bp, Homo sapiens
tggaagatctgccca

SEQ ID NO: 1279363 - DNA, 15 bp, Homo sapiens
ctggaagatctgccc

SEQ ID NO: 1279364 - DNA, 15 bp, Homo sapiens
tctggaagatctgcc

SEQ ID NO: 1279365 - DNA, 15 bp, Homo sapiens
gtctggaagatctgc

SEQ ID NO: 1279366 - DNA, 15 bp, Homo sapiens
tgtctggaagatctg

SEQ ID NO: 1279367 - DNA, 15 bp, Homo sapiens
ctgtctggaagatct

SEQ ID NO: 1279368 - DNA, 15 bp, Homo sapiens
tctgtctggaagatc

SEQ ID NO: 1279369 - DNA, 15 bp, Homo sapiens
ttctgtctggaagat

SEQ ID NO: 1279370 - DNA, 15 bp, Homo sapiens
tttctgtctggaaga

SEQ ID NO: 1279371 - DNA, 15 bp, Homo sapiens
ttttctgtctggaag

SEQ ID NO: 1279372 - DNA, 15 bp, Homo sapiens
attttctgtctggaa

SEQ ID NO: 1279373 - DNA, 15 bp, Homo sapiens
gattttctgtctgga

SEQ ID NO: 1279374 - DNA, 15 bp, Homo sapiens
tgattttctgtctgg

SEQ ID NO: 1279375 - DNA, 15 bp, Homo sapiens
ttgattttctgtctg

SEQ ID NO: 1279376 - DNA, 15 bp, Homo sapiens
attgattttctgtct

SEQ ID NO: 1279377 - DNA, 15 bp, Homo sapiens
tattgattttctgtc

SEQ ID NO: 1279378 - DNA, 15 bp, Homo sapiens
ttattgattttctgt

SEQ ID NO: 1279379 - DNA, 15 bp, Homo sapiens
tttattgattttctg

SEQ ID NO: 1279380 - DNA, 15 bp, Homo sapiens
ctttattgattttct

SEQ ID NO: 1279381 - DNA, 15 bp, Homo sapiens
tctttattgattttc

SEQ ID NO: 1279382 - DNA, 15 bp, Homo sapiens
ttctttattgatttt

SEQ ID NO: 1279383 - DNA, 15 bp, Homo sapiens
tttctttattgattt

SEQ ID NO: 1279384 - DNA, 15 bp, Homo sapiens
gtttctttattgatt

SEQ ID NO: 1279385 - DNA, 15 bp, Homo sapiens
tgtttctttattgat

SEQ ID NO: 1279386 - DNA, 15 bp, Homo sapiens
atgtttctttattga

SEQ ID NO: 1279387 - DNA, 15 bp, Homo sapiens
gatgtttctttattg

SEQ ID NO: 1279388 - DNA, 15 bp, Homo sapiens
tgatgtttctttatt

SEQ ID NO: 1279389 - DNA, 15 bp, Homo sapiens
ctgatgtttctttat

SEQ ID NO: 1279390 - DNA, 15 bp, Homo sapiens
tctgatgtttcttta

SEQ ID NO: 1279391 - DNA, 15 bp, Homo sapiens
atctgatgtttcttt

SEQ ID NO: 1279392 - DNA, 15 bp, Homo sapiens
aatctgatgtttctt

SEQ ID NO: 1279393 - DNA, 15 bp, Homo sapiens
aaatctgatgtttct

SEQ ID NO: 1279394 - DNA, 15 bp, Homo sapiens
taaatctgatgtttc

SEQ ID NO: 1279395 - DNA, 15 bp, Homo sapiens
ttaaatctgatgttt

SEQ ID NO: 1279396 - DNA, 15 bp, Homo sapiens
attaaatctgatgtt

SEQ ID NO: 1279397 - DNA, 15 bp, Homo sapiens
gattaaatctgatgt

SEQ ID NO: 1279398 - DNA, 15 bp, Homo sapiens
agattaaatctgatg

SEQ ID NO: 1279399 - DNA, 15 bp, Homo sapiens
cagattaaatctgat

SEQ ID NO: 1279400 - DNA, 15 bp, Homo sapiens
gcagattaaatctga

SEQ ID NO: 1279401 - DNA, 15 bp, Homo sapiens
tgcagattaaatctg

SEQ ID NO: 1279402 - DNA, 15 bp, Homo sapiens
gtgcagattaaatct

SEQ ID NO: 1279403 - DNA, 15 bp, Homo sapiens
agtgcagattaaatc

SEQ ID NO: 1279404 - DNA, 15 bp, Homo sapiens
tagtgcagattaaat

SEQ ID NO: 1279405 - DNA, 15 bp, Homo sapiens
atagtgcagattaaa

SEQ ID NO: 1279406 - DNA, 15 bp, Homo sapiens
aatagtgcagattaa

SEQ ID NO: 1279407 - DNA, 15 bp, Homo sapiens
caatagtgcagatta

SEQ ID NO: 1279408 - DNA, 15 bp, Homo sapiens
tcaatagtgcagatt

SEQ ID NO: 1279409 - DNA, 15 bp, Homo sapiens
gtcaatagtgcagat

SEQ ID NO: 1279410 - DNA, 15 bp, Homo sapiens
ggtcaatagtgcaga

SEQ ID NO: 1279411 - DNA, 15 bp, Homo sapiens
tggtcaatagtgcag

SEQ ID NO: 1279412 - DNA, 15 bp, Homo sapiens
ttggtcaatagtgca

SEQ ID NO: 1279413 - DNA, 15 bp, Homo sapiens
tttggtcaatagtgc

SEQ ID NO: 1279414 - DNA, 15 bp, Homo sapiens
atttggtcaatagtg

SEQ ID NO: 1279415 - DNA, 15 bp, Homo sapiens
catttggtcaatagt

SEQ ID NO: 1279416 - DNA, 15 bp, Homo sapiens
acatttggtcaatag

SEQ ID NO: 1279417 - DNA, 15 bp, Homo sapiens
tacatttggtcaata

SEQ ID NO: 1279418 - DNA, 15 bp, Homo sapiens
atacatttggtcaat

SEQ ID NO: 1279419 - DNA, 15 bp, Homo sapiens
gatacatttggtcaa

SEQ ID NO: 1279420 - DNA, 15 bp, Homo sapiens
agatacatttggtca

SEQ ID NO: 1279421 - DNA, 15 bp, Homo sapiens
tagatacatttggtc

SEQ ID NO: 1279422 - DNA, 15 bp, Homo sapiens
ttagatacatttggt

SEQ ID NO: 1279423 - DNA, 15 bp, Homo sapiens
gttagatacatttgg

SEQ ID NO: 1279424 - DNA, 15 bp, Homo sapiens
tgttagatacatttg

SEQ ID NO: 1279425 - DNA, 15 bp, Homo sapiens
ctgttagatacattt

SEQ ID NO: 1279426 - DNA, 15 bp, Homo sapiens
tctgttagatacatt

SEQ ID NO: 1279427 - DNA, 15 bp, Homo sapiens
atctgttagatacat

SEQ ID NO: 1279428 - DNA, 15 bp, Homo sapiens
tatctgttagataca

SEQ ID NO: 1279429 - DNA, 15 bp, Homo sapiens
atatctgttagatac

SEQ ID NO: 1279430 - DNA, 15 bp, Homo sapiens
aatatctgttagata

SEQ ID NO: 1279431 - DNA, 15 bp, Homo sapiens
aaatatctgttagat

SEQ ID NO: 1279432 - DNA, 15 bp, Homo sapiens
taaatatctgttaga

SEQ ID NO: 1279433 - DNA, 15 bp, Homo sapiens
gtaaatatctgttag

SEQ ID NO: 1279434 - DNA, 15 bp, Homo sapiens
tgtaaatatctgtta

SEQ ID NO: 1279435 - DNA, 15 bp, Homo sapiens
ctgtaaatatctgtt

SEQ ID NO: 1279436 - DNA, 15 bp, Homo sapiens
tctgtaaatatctgt

SEQ ID NO: 1279437 - DNA, 15 bp, Homo sapiens
ttctgtaaatatctg

SEQ ID NO: 1279438 - DNA, 15 bp, Homo sapiens
gttctgtaaatatct

SEQ ID NO: 1279439 - DNA, 15 bp, Homo sapiens
tgttctgtaaatatc

SEQ ID NO: 1279440 - DNA, 15 bp, Homo sapiens
atgttctgtaaatat

SEQ ID NO: 1279441 - DNA, 15 bp, Homo sapiens
aatgttctgtaaata

SEQ ID NO: 1279442 - DNA, 15 bp, Homo sapiens
aaatgttctgtaaat

SEQ ID NO: 1279443 - DNA, 15 bp, Homo sapiens
aaaatgttctgtaaa

SEQ ID NO: 1279444 - DNA, 15 bp, Homo sapiens
taaaatgttctgtaa

SEQ ID NO: 1279445 - DNA, 15 bp, Homo sapiens
ataaaatgttctgta

SEQ ID NO: 1279446 - DNA, 15 bp, Homo sapiens
gataaaatgttctgt

SEQ ID NO: 1279447 - DNA, 15 bp, Homo sapiens
ggataaaatgttctg

SEQ ID NO: 1279448 - DNA, 15 bp, Homo sapiens
tggataaaatgttct

SEQ ID NO: 1279449 - DNA, 15 bp, Homo sapiens
ttggataaaatgttc

SEQ ID NO: 1279450 - DNA, 15 bp, Homo sapiens
cttggataaaatgtt

SEQ ID NO: 1279451 - DNA, 15 bp, Homo sapiens
tcttggataaaatgt

SEQ ID NO: 1279452 - DNA, 15 bp, Homo sapiens
ctcttggataaaatg

SEQ ID NO: 1279453 - DNA, 15 bp, Homo sapiens
gctcttggataaaat

SEQ ID NO: 1279454 - DNA, 15 bp, Homo sapiens
agctcttggataaaa

SEQ ID NO: 1279455 - DNA, 15 bp, Homo sapiens
cagctcttggataaa

SEQ ID NO: 1279456 - DNA, 15 bp, Homo sapiens
gcagctcttggataa

SEQ ID NO: 1279457 - DNA, 15 bp, Homo sapiens
tgcagctcttggata

SEQ ID NO: 1279458 - DNA, 15 bp, Homo sapiens
ctgcagctcttggat

SEQ ID NO: 1279459 - DNA, 15 bp, Homo sapiens
tctgcagctcttgga

SEQ ID NO: 1279460 - DNA, 15 bp, Homo sapiens
ttctgcagctcttgg

SEQ ID NO: 1279461 - DNA, 15 bp, Homo sapiens
tttctgcagctcttg

SEQ ID NO: 1279462 - DNA, 15 bp, Homo sapiens
ttttctgcagctctt

SEQ ID NO: 1279463 - DNA, 15 bp, Homo sapiens
gttttctgcagctct

SEQ ID NO: 1279464 - DNA, 15 bp, Homo sapiens
tgttttctgcagctc

SEQ ID NO: 1279465 - DNA, 15 bp, Homo sapiens
gtgttttctgcagct

SEQ ID NO: 1279466 - DNA, 15 bp, Homo sapiens
tgtgttttctgcagc

SEQ ID NO: 1279467 - DNA, 15 bp, Homo sapiens
atgtgttttctgcag

SEQ ID NO: 1279468 - DNA, 15 bp, Homo sapiens
aatgtgttttctgca

SEQ ID NO: 1279469 - DNA, 15 bp, Homo sapiens
aaatgtgttttctgc

SEQ ID NO: 1279470 - DNA, 15 bp, Homo sapiens
aaaatgtgttttctg

SEQ ID NO: 1279471 - DNA, 15 bp, Homo sapiens
gaaaatgtgttttct

SEQ ID NO: 1279472 - DNA, 15 bp, Homo sapiens
ggaaaatgtgttttc

SEQ ID NO: 1279473 - DNA, 15 bp, Homo sapiens
aggaaaatgtgtttt

SEQ ID NO: 1279474 - DNA, 15 bp, Homo sapiens
gaggaaaatgtgttt

SEQ ID NO: 1279475 - DNA, 15 bp, Homo sapiens
tgaggaaaatgtgtt

SEQ ID NO: 1279476 - DNA, 15 bp, Homo sapiens
ctgaggaaaatgtgt

SEQ ID NO: 1279477 - DNA, 15 bp, Homo sapiens
actgaggaaaatgtg

SEQ ID NO: 1279478 - DNA, 15 bp, Homo sapiens
tactgaggaaaatgt

SEQ ID NO: 1279479 - DNA, 15 bp, Homo sapiens
gtactgaggaaaatg

SEQ ID NO: 1279480 - DNA, 15 bp, Homo sapiens
tgtactgaggaaaat

SEQ ID NO: 1279481 - DNA, 15 bp, Homo sapiens
atgtactgaggaaaa

SEQ ID NO: 1279482 - DNA, 15 bp, Homo sapiens
catgtactgaggaaa

SEQ ID NO: 1279483 - DNA, 15 bp, Homo sapiens
ccatgtactgaggaa

SEQ ID NO: 1279484 - DNA, 15 bp, Homo sapiens
tccatgtactgagga

SEQ ID NO: 1279485 - DNA, 15 bp, Homo sapiens
atccatgtactgagg

SEQ ID NO: 1279486 - DNA, 15 bp, Homo sapiens
gatccatgtactgag

SEQ ID NO: 1279487 - DNA, 15 bp, Homo sapiens
cgatccatgtactga

SEQ ID NO: 1279488 - DNA, 15 bp, Homo sapiens
acgatccatgtactg

SEQ ID NO: 1279489 - DNA, 15 bp, Homo sapiens
aacgatccatgtact

SEQ ID NO: 1279490 - DNA, 15 bp, Homo sapiens
gaacgatccatgtac

SEQ ID NO: 1279491 - DNA, 15 bp, Homo sapiens
agaacgatccatgta

SEQ ID NO: 1279492 - DNA, 15 bp, Homo sapiens
gagaacgatccatgt

SEQ ID NO: 1279493 - DNA, 15 bp, Homo sapiens
tgagaacgatccatg

SEQ ID NO: 1279494 - DNA, 15 bp, Homo sapiens
ttgagaacgatccat

SEQ ID NO: 1279495 - DNA, 15 bp, Homo sapiens
cttgagaacgatcca

SEQ ID NO: 1279496 - DNA, 15 bp, Homo sapiens
ccttgagaacgatcc

SEQ ID NO: 1279497 - DNA, 15 bp, Homo sapiens
tccttgagaacgatc

SEQ ID NO: 1279498 - DNA, 15 bp, Homo sapiens
atccttgagaacgat

SEQ ID NO: 1279499 - DNA, 15 bp, Homo sapiens
tatccttgagaacga

SEQ ID NO: 1279500 - DNA, 15 bp, Homo sapiens
ctatccttgagaacg

SEQ ID NO: 1279501 - DNA, 15 bp, Homo sapiens
tctatccttgagaac

SEQ ID NO: 1279502 - DNA, 15 bp, Homo sapiens
gtctatccttgagaa

SEQ ID NO: 1279503 - DNA, 15 bp, Homo sapiens
ggtctatccttgaga

SEQ ID NO: 1279504 - DNA, 15 bp, Homo sapiens
tggtctatccttgag

SEQ ID NO: 1279505 - DNA, 15 bp, Homo sapiens
atggtctatccttga

SEQ ID NO: 1279506 - DNA, 15 bp, Homo sapiens
tatggtctatccttg

SEQ ID NO: 1279507 - DNA, 15 bp, Homo sapiens
atatggtctatcctt

SEQ ID NO: 1279508 - DNA, 15 bp, Homo sapiens
catatggtctatcct

SEQ ID NO: 1279509 - DNA, 15 bp, Homo sapiens
acatatggtctatcc

SEQ ID NO: 1279510 - DNA, 15 bp, Homo sapiens
aacatatggtctatc

SEQ ID NO: 1279511 - DNA, 15 bp, Homo sapiens
taacatatggtctat

SEQ ID NO: 1279512 - DNA, 15 bp, Homo sapiens
ctaacatatggtcta

SEQ ID NO: 1279513 - DNA, 15 bp, Homo sapiens
cctaacatatggtct

SEQ ID NO: 1279514 - DNA, 15 bp, Homo sapiens
acctaacatatggtc

SEQ ID NO: 1279515 - DNA, 15 bp, Homo sapiens
gacctaacatatggt

SEQ ID NO: 1279516 - DNA, 15 bp, Homo sapiens
tgacctaacatatgg

SEQ ID NO: 1279517 - DNA, 15 bp, Homo sapiens
ctgacctaacatatg

SEQ ID NO: 1279518 - DNA, 15 bp, Homo sapiens
tctgacctaacatat

SEQ ID NO: 1279519 - DNA, 15 bp, Homo sapiens
ttctgacctaacata

SEQ ID NO: 1279520 - DNA, 15 bp, Homo sapiens
tttctgacctaacat

SEQ ID NO: 1279521 - DNA, 15 bp, Homo sapiens
ttttctgacctaaca

SEQ ID NO: 1279522 - DNA, 15 bp, Homo sapiens
gttttctgacctaac

SEQ ID NO: 1279523 - DNA, 15 bp, Homo sapiens
tgttttctgacctaa

SEQ ID NO: 1279524 - DNA, 15 bp, Homo sapiens
ttgttttctgaccta

SEQ ID NO: 1279525 - DNA, 15 bp, Homo sapiens
cttgttttctgacct

SEQ ID NO: 1279526 - DNA, 15 bp, Homo sapiens
acttgttttctgacc

SEQ ID NO: 1279527 - DNA, 15 bp, Homo sapiens
gacttgttttctgac

SEQ ID NO: 1279528 - DNA, 15 bp, Homo sapiens
agacttgttttctga

SEQ ID NO: 1279529 - DNA, 15 bp, Homo sapiens
aagacttgttttctg

SEQ ID NO: 1279530 - DNA, 15 bp, Homo sapiens
taagacttgttttct

SEQ ID NO: 1279531 - DNA, 15 bp, Homo sapiens
ttaagacttgttttc

SEQ ID NO: 1279532 - DNA, 15 bp, Homo sapiens
tttaagacttgtttt

SEQ ID NO: 1279533 - DNA, 15 bp, Homo sapiens
ttttaagacttgttt

SEQ ID NO: 1279534 - DNA, 15 bp, Homo sapiens
attttaagacttgtt

SEQ ID NO: 1279535 - DNA, 15 bp, Homo sapiens
tattttaagacttgt

SEQ ID NO: 1279536 - DNA, 15 bp, Homo sapiens
atattttaagacttg

SEQ ID NO: 1279537 - DNA, 15 bp, Homo sapiens
aatattttaagactt

SEQ ID NO: 1279538 - DNA, 15 bp, Homo sapiens
aaatattttaagact

SEQ ID NO: 1279539 - DNA, 15 bp, Homo sapiens
aaaatattttaagac

SEQ ID NO: 1279540 - DNA, 15 bp, Homo sapiens
aaaaatattttaaga

SEQ ID NO: 1279541 - DNA, 15 bp, Homo sapiens
aaaaaatattttaag

SEQ ID NO: 1279542 - DNA, 15 bp, Homo sapiens
taaaaaatattttaa

SEQ ID NO: 1279543 - DNA, 15 bp, Homo sapiens
ttaaaaaatatttta

SEQ ID NO: 1279544 - DNA, 15 bp, Homo sapiens
tttttaaaaaatatt

SEQ ID NO: 1279545 - DNA, 15 bp, Homo sapiens
atttttaaaaaatat

SEQ ID NO: 1279546 - DNA, 15 bp, Homo sapiens
caatttttaaaaaat

SEQ ID NO: 1279547 - DNA, 15 bp, Homo sapiens
tcaatttttaaaaaa

SEQ ID NO: 1279548 - DNA, 15 bp, Homo sapiens
ttcaatttttaaaaa

SEQ ID NO: 1279549 - DNA, 15 bp, Homo sapiens
tttcaatttttaaaa

SEQ ID NO: 1279550 - DNA, 15 bp, Homo sapiens
atttcaatttttaaa

SEQ ID NO: 1279551 - DNA, 15 bp, Homo sapiens
tatttcaatttttaa

SEQ ID NO: 1279552 - DNA, 15 bp, Homo sapiens
ttatttcaattttta

SEQ ID NO: 1279553 - DNA, 15 bp, Homo sapiens
attatttcaattttt

SEQ ID NO: 1279554 - DNA, 15 bp, Homo sapiens
tattatttcaatttt

SEQ ID NO: 1279555 - DNA, 15 bp, Homo sapiens
atattatttcaattt

SEQ ID NO: 1279556 - DNA, 15 bp, Homo sapiens
gatattatttcaatt

SEQ ID NO: 1279557 - DNA, 15 bp, Homo sapiens
tgatattatttcaat

SEQ ID NO: 1279558 - DNA, 15 bp, Homo sapiens
ttgatattatttcaa

SEQ ID NO: 1279559 - DNA, 15 bp, Homo sapiens
cttgatattatttca

SEQ ID NO: 1279560 - DNA, 15 bp, Homo sapiens
gcttgatattatttc

SEQ ID NO: 1279561 - DNA, 15 bp, Homo sapiens
tgcttgatattattt

SEQ ID NO: 1279562 - DNA, 15 bp, Homo sapiens
atgcttgatattatt

SEQ ID NO: 1279563 - DNA, 15 bp, Homo sapiens
gatgcttgatattat

SEQ ID NO: 1279564 - DNA, 15 bp, Homo sapiens
agatgcttgatatta

SEQ ID NO: 1279565 - DNA, 15 bp, Homo sapiens
aagatgcttgatatt

SEQ ID NO: 1279566 - DNA, 15 bp, Homo sapiens
gaagatgcttgatat

SEQ ID NO: 1279567 - DNA, 15 bp, Homo sapiens
agaagatgcttgata

SEQ ID NO: 1279568 - DNA, 15 bp, Homo sapiens
gagaagatgcttgat

SEQ ID NO: 1279569 - DNA, 15 bp, Homo sapiens
agagaagatgcttga

SEQ ID NO: 1279570 - DNA, 15 bp, Homo sapiens
cagagaagatgcttg

SEQ ID NO: 1279571 - DNA, 15 bp, Homo sapiens
tcagagaagatgctt

SEQ ID NO: 1279572 - DNA, 15 bp, Homo sapiens
gtcagagaagatgct

SEQ ID NO: 1279573 - DNA, 15 bp, Homo sapiens
ggtcagagaagatgc

SEQ ID NO: 1279574 - DNA, 15 bp, Homo sapiens
tggtcagagaagatg

SEQ ID NO: 1279575 - DNA, 15 bp, Homo sapiens
gtggtcagagaagat

SEQ ID NO: 1279576 - DNA, 15 bp, Homo sapiens
tgtggtcagagaaga

SEQ ID NO: 1279577 - DNA, 15 bp, Homo sapiens
ttgtggtcagagaag

SEQ ID NO: 1279578 - DNA, 15 bp, Homo sapiens
attgtggtcagagaa

SEQ ID NO: 1279579 - DNA, 15 bp, Homo sapiens
cattgtggtcagaga

SEQ ID NO: 1279580 - DNA, 15 bp, Homo sapiens
ccattgtggtcagag

SEQ ID NO: 1279581 - DNA, 15 bp, Homo sapiens
tccattgtggtcaga

SEQ ID NO: 1279582 - DNA, 15 bp, Homo sapiens
ttccattgtggtcag

SEQ ID NO: 1279583 - DNA, 15 bp, Homo sapiens
attccattgtggtca

SEQ ID NO: 1279584 - DNA, 15 bp, Homo sapiens
tattccattgtggtc

SEQ ID NO: 1279585 - DNA, 15 bp, Homo sapiens
ttattccattgtggt

SEQ ID NO: 1279586 - DNA, 15 bp, Homo sapiens
tttattccattgtgg

SEQ ID NO: 1279587 - DNA, 15 bp, Homo sapiens
ttttattccattgtg

SEQ ID NO: 1279588 - DNA, 15 bp, Homo sapiens
gttttattccattgt

SEQ ID NO: 1279589 - DNA, 15 bp, Homo sapiens
agttttattccattg

SEQ ID NO: 1279590 - DNA, 15 bp, Homo sapiens
tagttttattccatt

SEQ ID NO: 1279591 - DNA, 15 bp, Homo sapiens
ctagttttattccat

SEQ ID NO: 1279592 - DNA, 15 bp, Homo sapiens
tctagttttattcca

SEQ ID NO: 1279593 - DNA, 15 bp, Homo sapiens
ttctagttttattcc

SEQ ID NO: 1279594 - DNA, 15 bp, Homo sapiens
tttctagttttattc

SEQ ID NO: 1279595 - DNA, 15 bp, Homo sapiens
ctttctagttttatt

SEQ ID NO: 1279596 - DNA, 15 bp, Homo sapiens
actttctagttttat

SEQ ID NO: 1279597 - DNA, 15 bp, Homo sapiens
tactttctagtttta

SEQ ID NO: 1279598 - DNA, 15 bp, Homo sapiens
ttactttctagtttt

SEQ ID NO: 1279599 - DNA, 15 bp, Homo sapiens
attactttctagttt

SEQ ID NO: 1279600 - DNA, 15 bp, Homo sapiens
tattactttctagtt

SEQ ID NO: 1279601 - DNA, 15 bp, Homo sapiens
ttattactttctagt

SEQ ID NO: 1279602 - DNA, 15 bp, Homo sapiens
gttattactttctag

SEQ ID NO: 1279603 - DNA, 15 bp, Homo sapiens
agttattactttcta

SEQ ID NO: 1279604 - DNA, 15 bp, Homo sapiens
tagttattactttct

SEQ ID NO: 1279605 - DNA, 15 bp, Homo sapiens
ctagttattactttc

SEQ ID NO: 1279606 - DNA, 15 bp, Homo sapiens
tctagttattacttt

SEQ ID NO: 1279607 - DNA, 15 bp, Homo sapiens
ctctagttattactt

SEQ ID NO: 1279608 - DNA, 15 bp, Homo sapiens
cctctagttattact

SEQ ID NO: 1279609 - DNA, 15 bp, Homo sapiens
tcctctagttattac

SEQ ID NO: 1279610 - DNA, 15 bp, Homo sapiens
ttcctctagttatta

SEQ ID NO: 1279611 - DNA, 15 bp, Homo sapiens
attcctctagttatt

SEQ ID NO: 1279612 - DNA, 15 bp, Homo sapiens
aattcctctagttat

SEQ ID NO: 1279613 - DNA, 15 bp, Homo sapiens
aaattcctctagtta

SEQ ID NO: 1279614 - DNA, 15 bp, Homo sapiens
aaaattcctctagtt

SEQ ID NO: 1279615 - DNA, 15 bp, Homo sapiens
caaaattcctctagt

SEQ ID NO: 1279616 - DNA, 15 bp, Homo sapiens
ccaaaattcctctag

SEQ ID NO: 1279617 - DNA, 15 bp, Homo sapiens
tccaaaattcctcta

SEQ ID NO: 1279618 - DNA, 15 bp, Homo sapiens
ttccaaaattcctct

SEQ ID NO: 1279619 - DNA, 15 bp, Homo sapiens
tttccaaaattcctc

SEQ ID NO: 1279620 - DNA, 15 bp, Homo sapiens
gtttccaaaattcct

SEQ ID NO: 1279621 - DNA, 15 bp, Homo sapiens
agtttccaaaattcc

SEQ ID NO: 1279622 - DNA, 15 bp, Homo sapiens
tagtttccaaaattc

SEQ ID NO: 1279623 - DNA, 15 bp, Homo sapiens
atagtttccaaaatt

SEQ ID NO: 1279624 - DNA, 15 bp, Homo sapiens
tatagtttccaaaat

SEQ ID NO: 1279625 - DNA, 15 bp, Homo sapiens
gtatagtttccaaaa

SEQ ID NO: 1279626 - DNA, 15 bp, Homo sapiens
tgtatagtttccaaa

SEQ ID NO: 1279627 - DNA, 15 bp, Homo sapiens
ttgtatagtttccaa

SEQ ID NO: 1279628 - DNA, 15 bp, Homo sapiens
tttgtatagtttcca

SEQ ID NO: 1279629 - DNA, 15 bp, Homo sapiens
gtttgtatagtttcc

SEQ ID NO: 1279630 - DNA, 15 bp, Homo sapiens
tgtttgtatagtttc

SEQ ID NO: 1279631 - DNA, 15 bp, Homo sapiens
gtgtttgtatagttt

SEQ ID NO: 1279632 - DNA, 15 bp, Homo sapiens
tgtgtttgtatagtt

SEQ ID NO: 1279633 - DNA, 15 bp, Homo sapiens
atgtgtttgtatagt

SEQ ID NO: 1279634 - DNA, 15 bp, Homo sapiens
tatgtgtttgtatag

SEQ ID NO: 1279635 - DNA, 15 bp, Homo sapiens
ctatgtgtttgtata

SEQ ID NO: 1279636 - DNA, 15 bp, Homo sapiens
tctatgtgtttgtat

SEQ ID NO: 1279637 - DNA, 15 bp, Homo sapiens
ttctatgtgtttgta

SEQ ID NO: 1279638 - DNA, 15 bp, Homo sapiens
tttctatgtgtttgt

SEQ ID NO: 1279639 - DNA, 15 bp, Homo sapiens
atttctatgtgtttg

SEQ ID NO: 1279640 - DNA, 15 bp, Homo sapiens
aatttctatgtgttt

SEQ ID NO: 1279641 - DNA, 15 bp, Homo sapiens
taatttctatgtgtt

SEQ ID NO: 1279642 - DNA, 15 bp, Homo sapiens
ttaatttctatgtgt

SEQ ID NO: 1279643 - DNA, 15 bp, Homo sapiens
tttaatttctatgtg

SEQ ID NO: 1279644 - DNA, 15 bp, Homo sapiens
gtttaatttctatgt

SEQ ID NO: 1279645 - DNA, 15 bp, Homo sapiens
tgtttaatttctatg

SEQ ID NO: 1279646 - DNA, 15 bp, Homo sapiens
ttgtttaatttctat

SEQ ID NO: 1279647 - DNA, 15 bp, Homo sapiens
attgtttaatttcta

SEQ ID NO: 1279648 - DNA, 15 bp, Homo sapiens
tattgtttaatttct

SEQ ID NO: 1279649 - DNA, 15 bp, Homo sapiens
atattgtttaatttc

SEQ ID NO: 1279650 - DNA, 15 bp, Homo sapiens
catattgtttaattt

SEQ ID NO: 1279651 - DNA, 15 bp, Homo sapiens
gcatattgtttaatt

SEQ ID NO: 1279652 - DNA, 15 bp, Homo sapiens
agcatattgtttaat

SEQ ID NO: 1279653 - DNA, 15 bp, Homo sapiens
gagcatattgtttaa

SEQ ID NO: 1279654 - DNA, 15 bp, Homo sapiens
ggagcatattgttta

SEQ ID NO: 1279655 - DNA, 15 bp, Homo sapiens
aggagcatattgttt

SEQ ID NO: 1279656 - DNA, 15 bp, Homo sapiens
caggagcatattgtt

SEQ ID NO: 1279657 - DNA, 15 bp, Homo sapiens
tcaggagcatattgt

SEQ ID NO: 1279658 - DNA, 15 bp, Homo sapiens
ttcaggagcatattg

SEQ ID NO: 1279659 - DNA, 15 bp, Homo sapiens
attcaggagcatatt

SEQ ID NO: 1279660 - DNA, 15 bp, Homo sapiens
cattcaggagcatat

SEQ ID NO: 1279661 - DNA, 15 bp, Homo sapiens
tcattcaggagcata

SEQ ID NO: 1279662 - DNA, 15 bp, Homo sapiens
gtcattcaggagcat

SEQ ID NO: 1279663 - DNA, 15 bp, Homo sapiens
ggtcattcaggagca

SEQ ID NO: 1279664 - DNA, 15 bp, Homo sapiens
tggtcattcaggagc

SEQ ID NO: 1279665 - DNA, 15 bp, Homo sapiens
ctggtcattcaggag

SEQ ID NO: 1279666 - DNA, 15 bp, Homo sapiens
actggtcattcagga

SEQ ID NO: 1279667 - DNA, 15 bp, Homo sapiens
cactggtcattcagg

SEQ ID NO: 1279668 - DNA, 15 bp, Homo sapiens
ccactggtcattcag

SEQ ID NO: 1279669 - DNA, 15 bp, Homo sapiens
cccactggtcattca

SEQ ID NO: 1279670 - DNA, 15 bp, Homo sapiens
acccactggtcattc

SEQ ID NO: 1279671 - DNA, 15 bp, Homo sapiens
gacccactggtcatt

SEQ ID NO: 1279672 - DNA, 15 bp, Homo sapiens
tgacccactggtcat

SEQ ID NO: 1279673 - DNA, 15 bp, Homo sapiens
ttgacccactggtca

SEQ ID NO: 1279674 - DNA, 15 bp, Homo sapiens
attgacccactggtc

SEQ ID NO: 1279675 - DNA, 15 bp, Homo sapiens
cattgacccactggt

SEQ ID NO: 1279676 - DNA, 15 bp, Homo sapiens
tcattgacccactgg

SEQ ID NO: 1279677 - DNA, 15 bp, Homo sapiens
ttcattgacccactg

SEQ ID NO: 1279678 - DNA, 15 bp, Homo sapiens
cttcattgacccact

SEQ ID NO: 1279679 - DNA, 15 bp, Homo sapiens
tcttcattgacccac

SEQ ID NO: 1279680 - DNA, 15 bp, Homo sapiens
gtcttcattgaccca

SEQ ID NO: 1279681 - DNA, 15 bp, Homo sapiens
tgtcttcattgaccc

SEQ ID NO: 1279682 - DNA, 15 bp, Homo sapiens
atgtcttcattgacc

SEQ ID NO: 1279683 - DNA, 15 bp, Homo sapiens
aatgtcttcattgac

SEQ ID NO: 1279684 - DNA, 15 bp, Homo sapiens
taatgtcttcattga

SEQ ID NO: 1279685 - DNA, 15 bp, Homo sapiens
ttaatgtcttcattg

SEQ ID NO: 1279686 - DNA, 15 bp, Homo sapiens
cttaatgtcttcatt

SEQ ID NO: 1279687 - DNA, 15 bp, Homo sapiens
tcttaatgtcttcat

SEQ ID NO: 1279688 - DNA, 15 bp, Homo sapiens
ttcttaatgtcttca

SEQ ID NO: 1279689 - DNA, 15 bp, Homo sapiens
cttcttaatgtcttc

SEQ ID NO: 1279690 - DNA, 15 bp, Homo sapiens
ccttcttaatgtctt

SEQ ID NO: 1279691 - DNA, 15 bp, Homo sapiens
cccttcttaatgtct

SEQ ID NO: 1279692 - DNA, 15 bp, Homo sapiens
tcccttcttaatgtc

SEQ ID NO: 1279693 - DNA, 15 bp, Homo sapiens
ttcccttcttaatgt

SEQ ID NO: 1279694 - DNA, 15 bp, Homo sapiens
attcccttcttaatg

SEQ ID NO: 1279695 - DNA, 15 bp, Homo sapiens
aattcccttcttaat

SEQ ID NO: 1279696 - DNA, 15 bp, Homo sapiens
caattcccttcttaa

SEQ ID NO: 1279697 - DNA, 15 bp, Homo sapiens
tcaattcccttctta

SEQ ID NO: 1279698 - DNA, 15 bp, Homo sapiens
ttcaattcccttctt

SEQ ID NO: 1279699 - DNA, 15 bp, Homo sapiens
tttcaattcccttct

SEQ ID NO: 1279700 - DNA, 15 bp, Homo sapiens
ttttcaattcccttc

SEQ ID NO: 1279701 - DNA, 15 bp, Homo sapiens
tttttcaattccctt

SEQ ID NO: 1279702 - DNA, 15 bp, Homo sapiens
atttttcaattccct

SEQ ID NO: 1279703 - DNA, 15 bp, Homo sapiens
aatttttcaattccc

SEQ ID NO: 1279704 - DNA, 15 bp, Homo sapiens
aaatttttcaattcc

SEQ ID NO: 1279705 - DNA, 15 bp, Homo sapiens
taaatttttcaattc

SEQ ID NO: 1279706 - DNA, 15 bp, Homo sapiens
ctaaatttttcaatt

SEQ ID NO: 1279707 - DNA, 15 bp, Homo sapiens
actaaatttttcaat

SEQ ID NO: 1279708 - DNA, 15 bp, Homo sapiens
cactaaatttttcaa

SEQ ID NO: 1279709 - DNA, 15 bp, Homo sapiens
tcactaaatttttca

SEQ ID NO: 1279710 - DNA, 15 bp, Homo sapiens
atcactaaatttttc

SEQ ID NO: 1279711 - DNA, 15 bp, Homo sapiens
tatcactaaattttt

SEQ ID NO: 1279712 - DNA, 15 bp, Homo sapiens
ttatcactaaatttt

SEQ ID NO: 1279713 - DNA, 15 bp, Homo sapiens
attatcactaaattt

SEQ ID NO: 1279714 - DNA, 15 bp, Homo sapiens
cattatcactaaatt

SEQ ID NO: 1279715 - DNA, 15 bp, Homo sapiens
ccattatcactaaat

SEQ ID NO: 1279716 - DNA, 15 bp, Homo sapiens
tccattatcactaaa

SEQ ID NO: 1279717 - DNA, 15 bp, Homo sapiens
ttccattatcactaa

SEQ ID NO: 1279718 - DNA, 15 bp, Homo sapiens
tttccattatcacta

SEQ ID NO: 1279719 - DNA, 15 bp, Homo sapiens
gtttccattatcact

SEQ ID NO: 1279720 - DNA, 15 bp, Homo sapiens
tgtttccattatcac

SEQ ID NO: 1279721 - DNA, 15 bp, Homo sapiens
gtgtttccattatca

SEQ ID NO: 1279722 - DNA, 15 bp, Homo sapiens
tgtgtttccattatc

SEQ ID NO: 1279723 - DNA, 15 bp, Homo sapiens
ttgtgtttccattat

SEQ ID NO: 1279724 - DNA, 15 bp, Homo sapiens
gttgtgtttccatta

SEQ ID NO: 1279725 - DNA, 15 bp, Homo sapiens
tgttgtgtttccatt

SEQ ID NO: 1279726 - DNA, 15 bp, Homo sapiens
atgttgtgtttccat

SEQ ID NO: 1279727 - DNA, 15 bp, Homo sapiens
tatgttgtgtttcca

SEQ ID NO: 1279728 - DNA, 15 bp, Homo sapiens
gtatgttgtgtttcc

SEQ ID NO: 1279729 - DNA, 15 bp, Homo sapiens
ggtatgttgtgtttc

SEQ ID NO: 1279730 - DNA, 15 bp, Homo sapiens
gggtatgttgtgttt

SEQ ID NO: 1279731 - DNA, 15 bp, Homo sapiens
tgggtatgttgtgtt

SEQ ID NO: 1279732 - DNA, 15 bp, Homo sapiens
ttgggtatgttgtgt

SEQ ID NO: 1279733 - DNA, 15 bp, Homo sapiens
tttgggtatgttgtg

SEQ ID NO: 1279734 - DNA, 15 bp, Homo sapiens
gtttgggtatgttgt

SEQ ID NO: 1279735 - DNA, 15 bp, Homo sapiens
ggtttgggtatgttg

SEQ ID NO: 1279736 - DNA, 15 bp, Homo sapiens
gggtttgggtatgtt

SEQ ID NO: 1279737 - DNA, 15 bp, Homo sapiens
tgggtttgggtatgt

SEQ ID NO: 1279738 - DNA, 15 bp, Homo sapiens
atgggtttgggtatg

SEQ ID NO: 1279739 - DNA, 15 bp, Homo sapiens
catgggtttgggtat

SEQ ID NO: 1279740 - DNA, 15 bp, Homo sapiens
ccatgggtttgggta

SEQ ID NO: 1279741 - DNA, 15 bp, Homo sapiens
cccatgggtttgggt

SEQ ID NO: 1279742 - DNA, 15 bp, Homo sapiens
tcccatgggtttggg

SEQ ID NO: 1279743 - DNA, 15 bp, Homo sapiens
atcccatgggtttgg

SEQ ID NO: 1279744 - DNA, 15 bp, Homo sapiens
tatcccatgggtttg

SEQ ID NO: 1279745 - DNA, 15 bp, Homo sapiens
gtatcccatgggttt

SEQ ID NO: 1279746 - DNA, 15 bp, Homo sapiens
tgtatcccatgggtt

SEQ ID NO: 1279747 - DNA, 15 bp, Homo sapiens
ctgtatcccatgggt

SEQ ID NO: 1279748 - DNA, 15 bp, Homo sapiens
gctgtatcccatggg

SEQ ID NO: 1279749 - DNA, 15 bp, Homo sapiens
tgctgtatcccatgg

SEQ ID NO: 1279750 - DNA, 15 bp, Homo sapiens
ttgctgtatcccatg

SEQ ID NO: 1279751 - DNA, 15 bp, Homo sapiens
tttgctgtatcccat

SEQ ID NO: 1279752 - DNA, 15 bp, Homo sapiens
ttttgctgtatccca

SEQ ID NO: 1279753 - DNA, 15 bp, Homo sapiens
cttttgctgtatccc

SEQ ID NO: 1279754 - DNA, 15 bp, Homo sapiens
gcttttgctgtatcc

SEQ ID NO: 1279755 - DNA, 15 bp, Homo sapiens
tgcttttgctgtatc

SEQ ID NO: 1279756 - DNA, 15 bp, Homo sapiens
ctgcttttgctgtat

SEQ ID NO: 1279757 - DNA, 15 bp, Homo sapiens
actgcttttgctgta

SEQ ID NO: 1279758 - DNA, 15 bp, Homo sapiens
tactgcttttgctgt

SEQ ID NO: 1279759 - DNA, 15 bp, Homo sapiens
gtactgcttttgctg

SEQ ID NO: 1279760 - DNA, 15 bp, Homo sapiens
agtactgcttttgct

SEQ ID NO: 1279761 - DNA, 15 bp, Homo sapiens
tagtactgcttttgc

SEQ ID NO: 1279762 - DNA, 15 bp, Homo sapiens
ttagtactgcttttg

SEQ ID NO: 1279763 - DNA, 15 bp, Homo sapiens
cttagtactgctttt

SEQ ID NO: 1279764 - DNA, 15 bp, Homo sapiens
tcttagtactgcttt

SEQ ID NO: 1279765 - DNA, 15 bp, Homo sapiens
ctcttagtactgctt

SEQ ID NO: 1279766 - DNA, 15 bp, Homo sapiens
actcttagtactgct

SEQ ID NO: 1279767 - DNA, 15 bp, Homo sapiens
cactcttagtactgc

SEQ ID NO: 1279768 - DNA, 15 bp, Homo sapiens
tcactcttagtactg

SEQ ID NO: 1279769 - DNA, 15 bp, Homo sapiens
ttcactcttagtact

SEQ ID NO: 1279770 - DNA, 15 bp, Homo sapiens
cttcactcttagtac

SEQ ID NO: 1279771 - DNA, 15 bp, Homo sapiens
acttcactcttagta

SEQ ID NO: 1279772 - DNA, 15 bp, Homo sapiens
aacttcactcttagt

SEQ ID NO: 1279773 - DNA, 15 bp, Homo sapiens
aaacttcactcttag

SEQ ID NO: 1279774 - DNA, 15 bp, Homo sapiens
taaacttcactctta

SEQ ID NO: 1279775 - DNA, 15 bp, Homo sapiens
ataaacttcactctt

SEQ ID NO: 1279776 - DNA, 15 bp, Homo sapiens
tataaacttcactct

SEQ ID NO: 1279777 - DNA, 15 bp, Homo sapiens
ctataaacttcactc

SEQ ID NO: 1279778 - DNA, 15 bp, Homo sapiens
gctataaacttcact

SEQ ID NO: 1279779 - DNA, 15 bp, Homo sapiens
agctataaacttcac

SEQ ID NO: 1279780 - DNA, 15 bp, Homo sapiens
tagctataaacttca

SEQ ID NO: 1279781 - DNA, 15 bp, Homo sapiens
atagctataaacttc

SEQ ID NO: 1279782 - DNA, 15 bp, Homo sapiens
tatagctataaactt

SEQ ID NO: 1279783 - DNA, 15 bp, Homo sapiens
ttatagctataaact

SEQ ID NO: 1279784 - DNA, 15 bp, Homo sapiens
cttatagctataaac

SEQ ID NO: 1279785 - DNA, 15 bp, Homo sapiens
acttatagctataaa

SEQ ID NO: 1279786 - DNA, 15 bp, Homo sapiens
cacttatagctataa

SEQ ID NO: 1279787 - DNA, 15 bp, Homo sapiens
gcacttatagctata

SEQ ID NO: 1279788 - DNA, 15 bp, Homo sapiens
ggcacttatagctat

SEQ ID NO: 1279789 - DNA, 15 bp, Homo sapiens
aggcacttatagcta

SEQ ID NO: 1279790 - DNA, 15 bp, Homo sapiens
taggcacttatagct

SEQ ID NO: 1279791 - DNA, 15 bp, Homo sapiens
gtaggcacttatagc

SEQ ID NO: 1279792 - DNA, 15 bp, Homo sapiens
tgtaggcacttatag

SEQ ID NO: 1279793 - DNA, 15 bp, Homo sapiens
atgtaggcacttata

SEQ ID NO: 1279794 - DNA, 15 bp, Homo sapiens
gatgtaggcacttat

SEQ ID NO: 1279795 - DNA, 15 bp, Homo sapiens
tgatgtaggcactta

SEQ ID NO: 1279796 - DNA, 15 bp, Homo sapiens
gtgatgtaggcactt

SEQ ID NO: 1279797 - DNA, 15 bp, Homo sapiens
tgtgatgtaggcact

SEQ ID NO: 1279798 - DNA, 15 bp, Homo sapiens
ttgtgatgtaggcac

SEQ ID NO: 1279799 - DNA, 15 bp, Homo sapiens
tttgtgatgtaggca

SEQ ID NO: 1279800 - DNA, 15 bp, Homo sapiens
ttttgtgatgtaggc

SEQ ID NO: 1279801 - DNA, 15 bp, Homo sapiens
cttttgtgatgtagg

SEQ ID NO: 1279802 - DNA, 15 bp, Homo sapiens
tcttttgtgatgtag

SEQ ID NO: 1279803 - DNA, 15 bp, Homo sapiens
ctcttttgtgatgta

SEQ ID NO: 1279804 - DNA, 15 bp, Homo sapiens
cctcttttgtgatgt

SEQ ID NO: 1279805 - DNA, 15 bp, Homo sapiens
tcctcttttgtgatg

SEQ ID NO: 1279806 - DNA, 15 bp, Homo sapiens
ttcctcttttgtgat

SEQ ID NO: 1279807 - DNA, 15 bp, Homo sapiens
tttcctcttttgtga

SEQ ID NO: 1279808 - DNA, 15 bp, Homo sapiens
ttttcctcttttgtg

SEQ ID NO: 1279809 - DNA, 15 bp, Homo sapiens
tttttcctcttttgt

SEQ ID NO: 1279810 - DNA, 15 bp, Homo sapiens
gtttttcctcttttg

SEQ ID NO: 1279811 - DNA, 15 bp, Homo sapiens
agtttttcctctttt

SEQ ID NO: 1279812 - DNA, 15 bp, Homo sapiens
aagtttttcctcttt

SEQ ID NO: 1279813 - DNA, 15 bp, Homo sapiens
gaagtttttcctctt

SEQ ID NO: 1279814 - DNA, 15 bp, Homo sapiens
tgaagtttttcctct

SEQ ID NO: 1279815 - DNA, 15 bp, Homo sapiens
ttgaagtttttcctc

SEQ ID NO: 1279816 - DNA, 15 bp, Homo sapiens
tttgaagtttttcct

SEQ ID NO: 1279817 - DNA, 15 bp, Homo sapiens
atttgaagtttttcc

SEQ ID NO: 1279818 - DNA, 15 bp, Homo sapiens
tatttgaagtttttc

SEQ ID NO: 1279819 - DNA, 15 bp, Homo sapiens
ttatttgaagttttt

SEQ ID NO: 1279820 - DNA, 15 bp, Homo sapiens
tttatttgaagtttt

SEQ ID NO: 1279821 - DNA, 15 bp, Homo sapiens
gtttatttgaagttt

SEQ ID NO: 1279822 - DNA, 15 bp, Homo sapiens
tgtttatttgaagtt

SEQ ID NO: 1279823 - DNA, 15 bp, Homo sapiens
ttgtttatttgaagt

SEQ ID NO: 1279824 - DNA, 15 bp, Homo sapiens
attgtttatttgaag

SEQ ID NO: 1279825 - DNA, 15 bp, Homo sapiens
gattgtttatttgaa

SEQ ID NO: 1279826 - DNA, 15 bp, Homo sapiens
agattgtttatttga

SEQ ID NO: 1279827 - DNA, 15 bp, Homo sapiens
tagattgtttatttg

SEQ ID NO: 1279828 - DNA, 15 bp, Homo sapiens
ttagattgtttattt

SEQ ID NO: 1279829 - DNA, 15 bp, Homo sapiens
attagattgtttatt

SEQ ID NO: 1279830 - DNA, 15 bp, Homo sapiens
cattagattgtttat

SEQ ID NO: 1279831 - DNA, 15 bp, Homo sapiens
tcattagattgttta

SEQ ID NO: 1279832 - DNA, 15 bp, Homo sapiens
atcattagattgttt

SEQ ID NO: 1279833 - DNA, 15 bp, Homo sapiens
catcattagattgtt

SEQ ID NO: 1279834 - DNA, 15 bp, Homo sapiens
acatcattagattgt

SEQ ID NO: 1279835 - DNA, 15 bp, Homo sapiens
tacatcattagattg

SEQ ID NO: 1279836 - DNA, 15 bp, Homo sapiens
atacatcattagatt

SEQ ID NO: 1279837 - DNA, 15 bp, Homo sapiens
gatacatcattagat

SEQ ID NO: 1279838 - DNA, 15 bp, Homo sapiens
agatacatcattaga

SEQ ID NO: 1279839 - DNA, 15 bp, Homo sapiens
aagatacatcattag

SEQ ID NO: 1279840 - DNA, 15 bp, Homo sapiens
taagatacatcatta

SEQ ID NO: 1279841 - DNA, 15 bp, Homo sapiens
ttaagatacatcatt

SEQ ID NO: 1279842 - DNA, 15 bp, Homo sapiens
tttaagatacatcat

SEQ ID NO: 1279843 - DNA, 15 bp, Homo sapiens
ctttaagatacatca

SEQ ID NO: 1279844 - DNA, 15 bp, Homo sapiens
tctttaagatacatc

SEQ ID NO: 1279845 - DNA, 15 bp, Homo sapiens
ttctttaagatacat

SEQ ID NO: 1279846 - DNA, 15 bp, Homo sapiens
gttctttaagataca

SEQ ID NO: 1279847 - DNA, 15 bp, Homo sapiens
agttctttaagatac

SEQ ID NO: 1279848 - DNA, 15 bp, Homo sapiens
tagttctttaagata

SEQ ID NO: 1279849 - DNA, 15 bp, Homo sapiens
ttagttctttaagat

SEQ ID NO: 1279850 - DNA, 15 bp, Homo sapiens
tttagttctttaaga

SEQ ID NO: 1279851 - DNA, 15 bp, Homo sapiens
ttttagttctttaag

SEQ ID NO: 1279852 - DNA, 15 bp, Homo sapiens
tttttagttctttaa

SEQ ID NO: 1279853 - DNA, 15 bp, Homo sapiens
ttttttagttcttta

SEQ ID NO: 1279854 - DNA, 15 bp, Homo sapiens
cttttttagttcttt

SEQ ID NO: 1279855 - DNA, 15 bp, Homo sapiens
gcttttttagttctt

SEQ ID NO: 1279856 - DNA, 15 bp, Homo sapiens
tgcttttttagttct

SEQ ID NO: 1279857 - DNA, 15 bp, Homo sapiens
ttgcttttttagttc

SEQ ID NO: 1279858 - DNA, 15 bp, Homo sapiens
cttgcttttttagtt

SEQ ID NO: 1279859 - DNA, 15 bp, Homo sapiens
tcttgcttttttagt

SEQ ID NO: 1279860 - DNA, 15 bp, Homo sapiens
ctcttgcttttttag

SEQ ID NO: 1279861 - DNA, 15 bp, Homo sapiens
gctcttgctttttta

SEQ ID NO: 1279862 - DNA, 15 bp, Homo sapiens
tgctcttgctttttt

SEQ ID NO: 1279863 - DNA, 15 bp, Homo sapiens
ttgctcttgcttttt

SEQ ID NO: 1279864 - DNA, 15 bp, Homo sapiens
tttgctcttgctttt

SEQ ID NO: 1279865 - DNA, 15 bp, Homo sapiens
gtttgctcttgcttt

SEQ ID NO: 1279866 - DNA, 15 bp, Homo sapiens
ggtttgctcttgctt

SEQ ID NO: 1279867 - DNA, 15 bp, Homo sapiens
tggtttgctcttgct

SEQ ID NO: 1279868 - DNA, 15 bp, Homo sapiens
ttggtttgctcttgc

SEQ ID NO: 1279869 - DNA, 15 bp, Homo sapiens
tttggtttgctcttg

SEQ ID NO: 1279870 - DNA, 15 bp, Homo sapiens
gtttggtttgctctt

SEQ ID NO: 1279871 - DNA, 15 bp, Homo sapiens
agtttggtttgctct

SEQ ID NO: 1279872 - DNA, 15 bp, Homo sapiens
gagtttggtttgctc

SEQ ID NO: 1279873 - DNA, 15 bp, Homo sapiens
tgagtttggtttgct

SEQ ID NO: 1279874 - DNA, 15 bp, Homo sapiens
ttgagtttggtttgc

SEQ ID NO: 1279875 - DNA, 15 bp, Homo sapiens
tttgagtttggtttg

SEQ ID NO: 1279876 - DNA, 15 bp, Homo sapiens
ttttgagtttggttt

SEQ ID NO: 1279877 - DNA, 15 bp, Homo sapiens
attttgagtttggtt

SEQ ID NO: 1279878 - DNA, 15 bp, Homo sapiens
aattttgagtttggt

SEQ ID NO: 1279879 - DNA, 15 bp, Homo sapiens
aaattttgagtttgg

SEQ ID NO: 1279880 - DNA, 15 bp, Homo sapiens
taaattttgagtttg

SEQ ID NO: 1279881 - DNA, 15 bp, Homo sapiens
ataaattttgagttt

SEQ ID NO: 1279882 - DNA, 15 bp, Homo sapiens
tataaattttgagtt

SEQ ID NO: 1279883 - DNA, 15 bp, Homo sapiens
atataaattttgagt

SEQ ID NO: 1279884 - DNA, 15 bp, Homo sapiens
gatataaattttgag

SEQ ID NO: 1279885 - DNA, 15 bp, Homo sapiens
tgatataaattttga

SEQ ID NO: 1279886 - DNA, 15 bp, Homo sapiens
ttgatataaattttg

SEQ ID NO: 1279887 - DNA, 15 bp, Homo sapiens
tttgatataaatttt

SEQ ID NO: 1279888 - DNA, 15 bp, Homo sapiens
ttttgatataaattt

SEQ ID NO: 1279889 - DNA, 15 bp, Homo sapiens
gttttgatataaatt

SEQ ID NO: 1279890 - DNA, 15 bp, Homo sapiens
tgttttgatataaat

SEQ ID NO: 1279891 - DNA, 15 bp, Homo sapiens
ttgttttgatataaa

SEQ ID NO: 1279892 - DNA, 15 bp, Homo sapiens
tttgttttgatataa

SEQ ID NO: 1279893 - DNA, 15 bp, Homo sapiens
atttgttttgatata

SEQ ID NO: 1279894 - DNA, 15 bp, Homo sapiens
tatttgttttgatat

SEQ ID NO: 1279895 - DNA, 15 bp, Homo sapiens
ttatttgttttgata

SEQ ID NO: 1279896 - DNA, 15 bp, Homo sapiens
tttatttgttttgat

SEQ ID NO: 1279897 - DNA, 15 bp, Homo sapiens
ctttatttgttttga

SEQ ID NO: 1279898 - DNA, 15 bp, Homo sapiens
tctttatttgttttg

SEQ ID NO: 1279899 - DNA, 15 bp, Homo sapiens
atctttatttgtttt

SEQ ID NO: 1279900 - DNA, 15 bp, Homo sapiens
gatctttatttgttt

SEQ ID NO: 1279901 - DNA, 15 bp, Homo sapiens
tgatctttatttgtt

SEQ ID NO: 1279902 - DNA, 15 bp, Homo sapiens
ctgatctttatttgt

SEQ ID NO: 1279903 - DNA, 15 bp, Homo sapiens
tctgatctttatttg

SEQ ID NO: 1279904 - DNA, 15 bp, Homo sapiens
ttctgatctttattt

SEQ ID NO: 1279905 - DNA, 15 bp, Homo sapiens
gttctgatctttatt

SEQ ID NO: 1279906 - DNA, 15 bp, Homo sapiens
tgttctgatctttat

SEQ ID NO: 1279907 - DNA, 15 bp, Homo sapiens
ctgttctgatcttta

SEQ ID NO: 1279908 - DNA, 15 bp, Homo sapiens
tctgttctgatcttt

SEQ ID NO: 1279909 - DNA, 15 bp, Homo sapiens
ttctgttctgatctt

SEQ ID NO: 1279910 - DNA, 15 bp, Homo sapiens
tttctgttctgatct

SEQ ID NO: 1279911 - DNA, 15 bp, Homo sapiens
atttctgttctgatc

SEQ ID NO: 1279912 - DNA, 15 bp, Homo sapiens
tatttctgttctgat

SEQ ID NO: 1279913 - DNA, 15 bp, Homo sapiens
ttatttctgttctga

SEQ ID NO: 1279914 - DNA, 15 bp, Homo sapiens
tttatttctgttctg

SEQ ID NO: 1279915 - DNA, 15 bp, Homo sapiens
atttatttctgttct

SEQ ID NO: 1279916 - DNA, 15 bp, Homo sapiens
catttatttctgttc

SEQ ID NO: 1279917 - DNA, 15 bp, Homo sapiens
tcatttatttctgtt

SEQ ID NO: 1279918 - DNA, 15 bp, Homo sapiens
ttcatttatttctgt

SEQ ID NO: 1279919 - DNA, 15 bp, Homo sapiens
tttcatttatttctg

SEQ ID NO: 1279920 - DNA, 15 bp, Homo sapiens
atttcatttatttct

SEQ ID NO: 1279921 - DNA, 15 bp, Homo sapiens
aatttcatttatttc

SEQ ID NO: 1279922 - DNA, 15 bp, Homo sapiens
taatttcatttattt

SEQ ID NO: 1279923 - DNA, 15 bp, Homo sapiens
ttaatttcatttatt

SEQ ID NO: 1279924 - DNA, 15 bp, Homo sapiens
tttaatttcatttat

SEQ ID NO: 1279925 - DNA, 15 bp, Homo sapiens
ttttaatttcattta

SEQ ID NO: 1279926 - DNA, 15 bp, Homo sapiens
attttaatttcattt

SEQ ID NO: 1279927 - DNA, 15 bp, Homo sapiens
aattttaatttcatt

SEQ ID NO: 1279928 - DNA, 15 bp, Homo sapiens
taattttaatttcat

SEQ ID NO: 1279929 - DNA, 15 bp, Homo sapiens
ttaattttaatttca

SEQ ID NO: 1279930 - DNA, 15 bp, Homo sapiens
tttaattttaatttc

SEQ ID NO: 1279931 - DNA, 15 bp, Homo sapiens
ttttaattttaattt

SEQ ID NO: 1279932 - DNA, 15 bp, Homo sapiens
tttttaattttaatt

SEQ ID NO: 1279933 - DNA, 15 bp, Homo sapiens
ttttttaattttaat

SEQ ID NO: 1279934 - DNA, 15 bp, Homo sapiens
tttttttaattttaa

SEQ ID NO: 1279935 - DNA, 15 bp, Homo sapiens
cttttttttaatttt

SEQ ID NO: 1279936 - DNA, 15 bp, Homo sapiens
tcttttttttaattt

SEQ ID NO: 1279937 - DNA, 15 bp, Homo sapiens
atcttttttttaatt

SEQ ID NO: 1279938 - DNA, 15 bp, Homo sapiens
gatcttttttttaat

SEQ ID NO: 1279939 - DNA, 15 bp, Homo sapiens
tgatcttttttttaa

SEQ ID NO: 1279940 - DNA, 15 bp, Homo sapiens
ttgatctttttttta

SEQ ID NO: 1279941 - DNA, 15 bp, Homo sapiens
attgatctttttttt

SEQ ID NO: 1279942 - DNA, 15 bp, Homo sapiens
cattgatcttttttt

SEQ ID NO: 1279943 - DNA, 15 bp, Homo sapiens
tcattgatctttttt

SEQ ID NO: 1279944 - DNA, 15 bp, Homo sapiens
ttcattgatcttttt

SEQ ID NO: 1279945 - DNA, 15 bp, Homo sapiens
tttcattgatctttt

SEQ ID NO: 1279946 - DNA, 15 bp, Homo sapiens
gtttcattgatcttt

SEQ ID NO: 1279947 - DNA, 15 bp, Homo sapiens
tgtttcattgatctt

SEQ ID NO: 1279948 - DNA, 15 bp, Homo sapiens
ttgtttcattgatct

SEQ ID NO: 1279949 - DNA, 15 bp, Homo sapiens
tttgtttcattgatc

SEQ ID NO: 1279950 - DNA, 15 bp, Homo sapiens
ttttgtttcattgat

SEQ ID NO: 1279951 - DNA, 15 bp, Homo sapiens
tttttgtttcattga

SEQ ID NO: 1279952 - DNA, 15 bp, Homo sapiens
ctttttgtttcattg

SEQ ID NO: 1279953 - DNA, 15 bp, Homo sapiens
actttttgtttcatt

SEQ ID NO: 1279954 - DNA, 15 bp, Homo sapiens
aactttttgtttcat

SEQ ID NO: 1279955 - DNA, 15 bp, Homo sapiens
taactttttgtttca

SEQ ID NO: 1279956 - DNA, 15 bp, Homo sapiens
ttaactttttgtttc

SEQ ID NO: 1279957 - DNA, 15 bp, Homo sapiens
tttaactttttgttt

SEQ ID NO: 1279958 - DNA, 15 bp, Homo sapiens
ttttaactttttgtt

SEQ ID NO: 1279959 - DNA, 15 bp, Homo sapiens
tttttaactttttgt

SEQ ID NO: 1279960 - DNA, 15 bp, Homo sapiens
ttttttaactttttg

SEQ ID NO: 1279961 - DNA, 15 bp, Homo sapiens
ttaactttttttttt

SEQ ID NO: 1279962 - DNA, 15 bp, Homo sapiens
tttaacttttttttt

SEQ ID NO: 1279963 - DNA, 15 bp, Homo sapiens
gtttaactttttttt

SEQ ID NO: 1279964 - DNA, 15 bp, Homo sapiens
tgtttaacttttttt

SEQ ID NO: 1279965 - DNA, 15 bp, Homo sapiens
ttgtttaactttttt

SEQ ID NO: 1279966 - DNA, 15 bp, Homo sapiens
tttgtttaacttttt

SEQ ID NO: 1279967 - DNA, 15 bp, Homo sapiens
ttttgtttaactttt

SEQ ID NO: 1279968 - DNA, 15 bp, Homo sapiens
attttgtttaacttt

SEQ ID NO: 1279969 - DNA, 15 bp, Homo sapiens
aattttgtttaactt

SEQ ID NO: 1279970 - DNA, 15 bp, Homo sapiens
caattttgtttaact

SEQ ID NO: 1279971 - DNA, 15 bp, Homo sapiens
tcaattttgtttaac

SEQ ID NO: 1279972 - DNA, 15 bp, Homo sapiens
gtcaattttgtttaa

SEQ ID NO: 1279973 - DNA, 15 bp, Homo sapiens
tgtcaattttgttta

SEQ ID NO: 1279974 - DNA, 15 bp, Homo sapiens
ttgtcaattttgttt

SEQ ID NO: 1279975 - DNA, 15 bp, Homo sapiens
tttgtcaattttgtt

SEQ ID NO: 1279976 - DNA, 15 bp, Homo sapiens
gtttgtcaattttgt

SEQ ID NO: 1279977 - DNA, 15 bp, Homo sapiens
ggtttgtcaattttg

SEQ ID NO: 1279978 - DNA, 15 bp, Homo sapiens
aggtttgtcaatttt

SEQ ID NO: 1279979 - DNA, 15 bp, Homo sapiens
aaggtttgtcaattt

SEQ ID NO: 1279980 - DNA, 15 bp, Homo sapiens
aaaggtttgtcaatt

SEQ ID NO: 1279981 - DNA, 15 bp, Homo sapiens
taaaggtttgtcaat

SEQ ID NO: 1279982 - DNA, 15 bp, Homo sapiens
ttaaaggtttgtcaa

SEQ ID NO: 1279983 - DNA, 15 bp, Homo sapiens
gttaaaggtttgtca

SEQ ID NO: 1279984 - DNA, 15 bp, Homo sapiens
ggttaaaggtttgtc

SEQ ID NO: 1279985 - DNA, 15 bp, Homo sapiens
tggttaaaggtttgt

SEQ ID NO: 1279986 - DNA, 15 bp, Homo sapiens
ttggttaaaggtttg

SEQ ID NO: 1279987 - DNA, 15 bp, Homo sapiens
tttggttaaaggttt

SEQ ID NO: 1279988 - DNA, 15 bp, Homo sapiens
gtttggttaaaggtt

SEQ ID NO: 1279989 - DNA, 15 bp, Homo sapiens
agtttggttaaaggt

SEQ ID NO: 1279990 - DNA, 15 bp, Homo sapiens
tagtttggttaaagg

SEQ ID NO: 1279991 - DNA, 15 bp, Homo sapiens
ttagtttggttaaag

SEQ ID NO: 1279992 - DNA, 15 bp, Homo sapiens
cttagtttggttaaa

SEQ ID NO: 1279993 - DNA, 15 bp, Homo sapiens
ccttagtttggttaa

SEQ ID NO: 1279994 - DNA, 15 bp, Homo sapiens
tccttagtttggtta

SEQ ID NO: 1279995 - DNA, 15 bp, Homo sapiens
ttccttagtttggtt

SEQ ID NO: 1279996 - DNA, 15 bp, Homo sapiens
tttccttagtttggt

SEQ ID NO: 1279997 - DNA, 15 bp, Homo sapiens
ttttccttagtttgg

SEQ ID NO: 1279998 - DNA, 15 bp, Homo sapiens
tttttccttagtttg

SEQ ID NO: 1279999 - DNA, 15 bp, Homo sapiens
ctttttccttagttt

SEQ ID NO: 1280000 - DNA, 15 bp, Homo sapiens
tctttttccttagtt

SEQ ID NO: 1280001 - DNA, 15 bp, Homo sapiens
ctctttttccttagt

SEQ ID NO: 1280002 - DNA, 15 bp, Homo sapiens
tctctttttccttag

SEQ ID NO: 1280003 - DNA, 15 bp, Homo sapiens
ctctctttttcctta

SEQ ID NO: 1280004 - DNA, 15 bp, Homo sapiens
tctctctttttcctt

SEQ ID NO: 1280005 - DNA, 15 bp, Homo sapiens
atctctctttttcct

SEQ ID NO: 1280006 - DNA, 15 bp, Homo sapiens
gatctctctttttcc

SEQ ID NO: 1280007 - DNA, 15 bp, Homo sapiens
ggatctctctttttc

SEQ ID NO: 1280008 - DNA, 15 bp, Homo sapiens
tggatctctcttttt

SEQ ID NO: 1280009 - DNA, 15 bp, Homo sapiens
ttggatctctctttt

SEQ ID NO: 1280010 - DNA, 15 bp, Homo sapiens
tttggatctctcttt

SEQ ID NO: 1280011 - DNA, 15 bp, Homo sapiens
atttggatctctctt

SEQ ID NO: 1280012 - DNA, 15 bp, Homo sapiens
tatttggatctctct

SEQ ID NO: 1280013 - DNA, 15 bp, Homo sapiens
ttatttggatctctc

SEQ ID NO: 1280014 - DNA, 15 bp, Homo sapiens
tttatttggatctct

SEQ ID NO: 1280015 - DNA, 15 bp, Homo sapiens
atttatttggatctc

SEQ ID NO: 1280016 - DNA, 15 bp, Homo sapiens
tatttatttggatct

SEQ ID NO: 1280017 - DNA, 15 bp, Homo sapiens
ttatttatttggatc

SEQ ID NO: 1280018 - DNA, 15 bp, Homo sapiens
tttatttatttggat

SEQ ID NO: 1280019 - DNA, 15 bp, Homo sapiens
ttttatttatttgga

SEQ ID NO: 1280020 - DNA, 15 bp, Homo sapiens
attttatttatttgg

SEQ ID NO: 1280021 - DNA, 15 bp, Homo sapiens
gattttatttatttg

SEQ ID NO: 1280022 - DNA, 15 bp, Homo sapiens
tgattttatttattt

SEQ ID NO: 1280023 - DNA, 15 bp, Homo sapiens
ctgattttatttatt

SEQ ID NO: 1280024 - DNA, 15 bp, Homo sapiens
tctgattttatttat

SEQ ID NO: 1280025 - DNA, 15 bp, Homo sapiens
ttctgattttattta

SEQ ID NO: 1280026 - DNA, 15 bp, Homo sapiens
tttctgattttattt

SEQ ID NO: 1280027 - DNA, 15 bp, Homo sapiens
atttctgattttatt

SEQ ID NO: 1280028 - DNA, 15 bp, Homo sapiens
tatttctgattttat

SEQ ID NO: 1280029 - DNA, 15 bp, Homo sapiens
ttatttctgatttta

SEQ ID NO: 1280030 - DNA, 15 bp, Homo sapiens
ttttatttctgattt

SEQ ID NO: 1280031 - DNA, 15 bp, Homo sapiens
tttttatttctgatt

SEQ ID NO: 1280032 - DNA, 15 bp, Homo sapiens
ttttttatttctgat

SEQ ID NO: 1280033 - DNA, 15 bp, Homo sapiens
cttttttatttctga

SEQ ID NO: 1280034 - DNA, 15 bp, Homo sapiens
ccttttttatttctg

SEQ ID NO: 1280035 - DNA, 15 bp, Homo sapiens
tccttttttatttct

SEQ ID NO: 1280036 - DNA, 15 bp, Homo sapiens
ctccttttttatttc

SEQ ID NO: 1280037 - DNA, 15 bp, Homo sapiens
tctccttttttattt

SEQ ID NO: 1280038 - DNA, 15 bp, Homo sapiens
gtctccttttttatt

SEQ ID NO: 1280039 - DNA, 15 bp, Homo sapiens
tgtctccttttttat

SEQ ID NO: 1280040 - DNA, 15 bp, Homo sapiens
atgtctcctttttta

SEQ ID NO: 1280041 - DNA, 15 bp, Homo sapiens
aatgtctcctttttt

SEQ ID NO: 1280042 - DNA, 15 bp, Homo sapiens
taatgtctccttttt

SEQ ID NO: 1280043 - DNA, 15 bp, Homo sapiens
gtaatgtctcctttt

SEQ ID NO: 1280044 - DNA, 15 bp, Homo sapiens
tgtaatgtctccttt

SEQ ID NO: 1280045 - DNA, 15 bp, Homo sapiens
ttgtaatgtctcctt

SEQ ID NO: 1280046 - DNA, 15 bp, Homo sapiens
gttgtaatgtctcct

SEQ ID NO: 1280047 - DNA, 15 bp, Homo sapiens
agttgtaatgtctcc

SEQ ID NO: 1280048 - DNA, 15 bp, Homo sapiens
agtatcagttgtaat

SEQ ID NO: 1280049 - DNA, 15 bp, Homo sapiens
cagtatcagttgtaa

SEQ ID NO: 1280050 - DNA, 15 bp, Homo sapiens
gcagtatcagttgta

SEQ ID NO: 1280051 - DNA, 15 bp, Homo sapiens
tgcagtatcagttgt

SEQ ID NO: 1280052 - DNA, 15 bp, Homo sapiens
ctgcagtatcagttg

SEQ ID NO: 1280053 - DNA, 15 bp, Homo sapiens
tctgcagtatcagtt

SEQ ID NO: 1280054 - DNA, 15 bp, Homo sapiens
ttctgcagtatcagt

SEQ ID NO: 1280055 - DNA, 15 bp, Homo sapiens
tttctgcagtatcag

SEQ ID NO: 1280056 - DNA, 15 bp, Homo sapiens
atttctgcagtatca

SEQ ID NO: 1280057 - DNA, 15 bp, Homo sapiens
aatttctgcagtatc

SEQ ID NO: 1280058 - DNA, 15 bp, Homo sapiens
gaatttctgcagtat

SEQ ID NO: 1280059 - DNA, 15 bp, Homo sapiens
tgaatttctgcagta

SEQ ID NO: 1280060 - DNA, 15 bp, Homo sapiens
ttgaatttctgcagt

SEQ ID NO: 1280061 - DNA, 15 bp, Homo sapiens
tttgaatttctgcag

SEQ ID NO: 1280062 - DNA, 15 bp, Homo sapiens
ctttgaatttctgca

SEQ ID NO: 1280063 - DNA, 15 bp, Homo sapiens
cctttgaatttctgc

SEQ ID NO: 1280064 - DNA, 15 bp, Homo sapiens
tcctttgaatttctg

SEQ ID NO: 1280065 - DNA, 15 bp, Homo sapiens
atcctttgaatttct

SEQ ID NO: 1280066 - DNA, 15 bp, Homo sapiens
gatcctttgaatttc

SEQ ID NO: 1280067 - DNA, 15 bp, Homo sapiens
tgatcctttgaattt

SEQ ID NO: 1280068 - DNA, 15 bp, Homo sapiens
atgatcctttgaatt

SEQ ID NO: 1280069 - DNA, 15 bp, Homo sapiens
aatgatcctttgaat

SEQ ID NO: 1280070 - DNA, 15 bp, Homo sapiens
aaatgatcctttgaa

SEQ ID NO: 1280071 - DNA, 15 bp, Homo sapiens
caaatgatcctttga

SEQ ID NO: 1280072 - DNA, 15 bp, Homo sapiens
acaaatgatcctttg

SEQ ID NO: 1280073 - DNA, 15 bp, Homo sapiens
cacaaatgatccttt

SEQ ID NO: 1280074 - DNA, 15 bp, Homo sapiens
ccacaaatgatcctt

SEQ ID NO: 1280075 - DNA, 15 bp, Homo sapiens
gccacaaatgatcct

SEQ ID NO: 1280076 - DNA, 15 bp, Homo sapiens
agccacaaatgatcc

SEQ ID NO: 1280077 - DNA, 15 bp, Homo sapiens
tagccacaaatgatc

SEQ ID NO: 1280078 - DNA, 15 bp, Homo sapiens
gtagccacaaatgat

SEQ ID NO: 1280079 - DNA, 15 bp, Homo sapiens
agtagccacaaatga

SEQ ID NO: 1280080 - DNA, 15 bp, Homo sapiens
tagtagccacaaatg

SEQ ID NO: 1280081 - DNA, 15 bp, Homo sapiens
atagtagccacaaat

SEQ ID NO: 1280082 - DNA, 15 bp, Homo sapiens
tatagtagccacaaa

SEQ ID NO: 1280083 - DNA, 15 bp, Homo sapiens
ttatagtagccacaa

SEQ ID NO: 1280084 - DNA, 15 bp, Homo sapiens
gttatagtagccaca

SEQ ID NO: 1280085 - DNA, 15 bp, Homo sapiens
agttatagtagccac

SEQ ID NO: 1280086 - DNA, 15 bp, Homo sapiens
tagttatagtagcca

SEQ ID NO: 1280087 - DNA, 15 bp, Homo sapiens
ttagttatagtagcc

SEQ ID NO: 1280088 - DNA, 15 bp, Homo sapiens
gttagttatagtagc

SEQ ID NO: 1280089 - DNA, 15 bp, Homo sapiens
agttagttatagtag

SEQ ID NO: 1280090 - DNA, 15 bp, Homo sapiens
cagttagttatagta

SEQ ID NO: 1280091 - DNA, 15 bp, Homo sapiens
acagttagttatagt

SEQ ID NO: 1280092 - DNA, 15 bp, Homo sapiens
tacagttagttatag

SEQ ID NO: 1280093 - DNA, 15 bp, Homo sapiens
ttacagttagttata

SEQ ID NO: 1280094 - DNA, 15 bp, Homo sapiens
cttacagttagttat

SEQ ID NO: 1280095 - DNA, 15 bp, Homo sapiens
gcttacagttagtta

SEQ ID NO: 1280096 - DNA, 15 bp, Homo sapiens
ggcttacagttagtt

SEQ ID NO: 1280097 - DNA, 15 bp, Homo sapiens
tggcttacagttagt

SEQ ID NO: 1280098 - DNA, 15 bp, Homo sapiens
ctggcttacagttag

SEQ ID NO: 1280099 - DNA, 15 bp, Homo sapiens
actggcttacagtta

SEQ ID NO: 1280100 - DNA, 15 bp, Homo sapiens
tactggcttacagtt

SEQ ID NO: 1280101 - DNA, 15 bp, Homo sapiens
ttactggcttacagt

SEQ ID NO: 1280102 - DNA, 15 bp, Homo sapiens
tttactggcttacag

SEQ ID NO: 1280103 - DNA, 15 bp, Homo sapiens
atttactggcttaca

SEQ ID NO: 1280104 - DNA, 15 bp, Homo sapiens
aatttactggcttac

SEQ ID NO: 1280105 - DNA, 15 bp, Homo sapiens
caatttactggctta

SEQ ID NO: 1280106 - DNA, 15 bp, Homo sapiens
tcaatttactggctt

SEQ ID NO: 1280107 - DNA, 15 bp, Homo sapiens
ttcaatttactggct

SEQ ID NO: 1280108 - DNA, 15 bp, Homo sapiens
tttcaatttactggc

SEQ ID NO: 1280109 - DNA, 15 bp, Homo sapiens
ttttcaatttactgg

SEQ ID NO: 1280110 - DNA, 15 bp, Homo sapiens
tttttcaatttactg

SEQ ID NO: 1280111 - DNA, 15 bp, Homo sapiens
atttttcaatttact

SEQ ID NO: 1280112 - DNA, 15 bp, Homo sapiens
gatttttcaatttac

SEQ ID NO: 1280113 - DNA, 15 bp, Homo sapiens
agatttttcaattta

SEQ ID NO: 1280114 - DNA, 15 bp, Homo sapiens
tagatttttcaattt

SEQ ID NO: 1280115 - DNA, 15 bp, Homo sapiens
ctagatttttcaatt

SEQ ID NO: 1280116 - DNA, 15 bp, Homo sapiens
tctagatttttcaat

SEQ ID NO: 1280117 - DNA, 15 bp, Homo sapiens
ctctagatttttcaa

SEQ ID NO: 1280118 - DNA, 15 bp, Homo sapiens
cctctagatttttca

SEQ ID NO: 1280119 - DNA, 15 bp, Homo sapiens
tcctctagatttttc

SEQ ID NO: 1280120 - DNA, 15 bp, Homo sapiens
ttcctctagattttt

SEQ ID NO: 1280121 - DNA, 15 bp, Homo sapiens
tttcctctagatttt

SEQ ID NO: 1280122 - DNA, 15 bp, Homo sapiens
atttcctctagattt

SEQ ID NO: 1280123 - DNA, 15 bp, Homo sapiens
catttcctctagatt

SEQ ID NO: 1280124 - DNA, 15 bp, Homo sapiens
ccatttcctctagat

SEQ ID NO: 1280125 - DNA, 15 bp, Homo sapiens
tccatttcctctaga

SEQ ID NO: 1280126 - DNA, 15 bp, Homo sapiens
gtccatttcctctag

SEQ ID NO: 1280127 - DNA, 15 bp, Homo sapiens
tgtccatttcctcta

SEQ ID NO: 1280128 - DNA, 15 bp, Homo sapiens
ttgtccatttcctct

SEQ ID NO: 1280129 - DNA, 15 bp, Homo sapiens
tttgtccatttcctc

SEQ ID NO: 1280130 - DNA, 15 bp, Homo sapiens
atttgtccatttcct

SEQ ID NO: 1280131 - DNA, 15 bp, Homo sapiens
tatttgtccatttcc

SEQ ID NO: 1280132 - DNA, 15 bp, Homo sapiens
gtatttgtccatttc

SEQ ID NO: 1280133 - DNA, 15 bp, Homo sapiens
agtatttgtccattt

SEQ ID NO: 1280134 - DNA, 15 bp, Homo sapiens
cagtatttgtccatt

SEQ ID NO: 1280135 - DNA, 15 bp, Homo sapiens
tcagtatttgtccat

SEQ ID NO: 1280136 - DNA, 15 bp, Homo sapiens
ctcagtatttgtcca

SEQ ID NO: 1280137 - DNA, 15 bp, Homo sapiens
tctcagtatttgtcc

SEQ ID NO: 1280138 - DNA, 15 bp, Homo sapiens
atctcagtatttgtc

SEQ ID NO: 1280139 - DNA, 15 bp, Homo sapiens
tatctcagtatttgt

SEQ ID NO: 1280140 - DNA, 15 bp, Homo sapiens
gtatctcagtatttg

SEQ ID NO: 1280141 - DNA, 15 bp, Homo sapiens
tgtatctcagtattt

SEQ ID NO: 1280142 - DNA, 15 bp, Homo sapiens
atgtatctcagtatt

SEQ ID NO: 1280143 - DNA, 15 bp, Homo sapiens
tatgtatctcagtat

SEQ ID NO: 1280144 - DNA, 15 bp, Homo sapiens
gtatgtatctcagta

SEQ ID NO: 1280145 - DNA, 15 bp, Homo sapiens
tgtatgtatctcagt

SEQ ID NO: 1280146 - DNA, 15 bp, Homo sapiens
ttgtatgtatctcag

SEQ ID NO: 1280147 - DNA, 15 bp, Homo sapiens
gttgtatgtatctca

SEQ ID NO: 1280148 - DNA, 15 bp, Homo sapiens
ggttgtatgtatctc

SEQ ID NO: 1280149 - DNA, 15 bp, Homo sapiens
aggttgtatgtatct

SEQ ID NO: 1280150 - DNA, 15 bp, Homo sapiens
taggttgtatgtatc

SEQ ID NO: 1280151 - DNA, 15 bp, Homo sapiens
gtaggttgtatgtat

SEQ ID NO: 1280152 - DNA, 15 bp, Homo sapiens
ggtaggttgtatgta

SEQ ID NO: 1280153 - DNA, 15 bp, Homo sapiens
tggtaggttgtatgt

SEQ ID NO: 1280154 - DNA, 15 bp, Homo sapiens
ttggtaggttgtatg

SEQ ID NO: 1280155 - DNA, 15 bp, Homo sapiens
cttggtaggttgtat

SEQ ID NO: 1280156 - DNA, 15 bp, Homo sapiens
tcttggtaggttgta

SEQ ID NO: 1280157 - DNA, 15 bp, Homo sapiens
gtcttggtaggttgt

SEQ ID NO: 1280158 - DNA, 15 bp, Homo sapiens
agtcttggtaggttg

SEQ ID NO: 1280159 - DNA, 15 bp, Homo sapiens
cagtcttggtaggtt

SEQ ID NO: 1280160 - DNA, 15 bp, Homo sapiens
tcagtcttggtaggt

SEQ ID NO: 1280161 - DNA, 15 bp, Homo sapiens
ttcagtcttggtagg

SEQ ID NO: 1280162 - DNA, 15 bp, Homo sapiens
gttcagtcttggtag

SEQ ID NO: 1280163 - DNA, 15 bp, Homo sapiens
ggttcagtcttggta

SEQ ID NO: 1280164 - DNA, 15 bp, Homo sapiens
tggttcagtcttggt

SEQ ID NO: 1280165 - DNA, 15 bp, Homo sapiens
ctggttcagtcttgg

SEQ ID NO: 1280166 - DNA, 15 bp, Homo sapiens
actggttcagtcttg

SEQ ID NO: 1280167 - DNA, 15 bp, Homo sapiens
tactggttcagtctt

SEQ ID NO: 1280168 - DNA, 15 bp, Homo sapiens
ttactggttcagtct

SEQ ID NO: 1280169 - DNA, 15 bp, Homo sapiens
attactggttcagtc

SEQ ID NO: 1280170 - DNA, 15 bp, Homo sapiens
tattactggttcagt

SEQ ID NO: 1280171 - DNA, 15 bp, Homo sapiens
ttattactggttcag

SEQ ID NO: 1280172 - DNA, 15 bp, Homo sapiens
tttattactggttca

SEQ ID NO: 1280173 - DNA, 15 bp, Homo sapiens
atttattactggttc

SEQ ID NO: 1280174 - DNA, 15 bp, Homo sapiens
aatttattactggtt

SEQ ID NO: 1280175 - DNA, 15 bp, Homo sapiens
caatttattactggt

SEQ ID NO: 1280176 - DNA, 15 bp, Homo sapiens
tcaatttattactgg

SEQ ID NO: 1280177 - DNA, 15 bp, Homo sapiens
ttcaatttattactg

SEQ ID NO: 1280178 - DNA, 15 bp, Homo sapiens
tttcaatttattact

SEQ ID NO: 1280179 - DNA, 15 bp, Homo sapiens
ttttcaatttattac

SEQ ID NO: 1280180 - DNA, 15 bp, Homo sapiens
gttttcaatttatta

SEQ ID NO: 1280181 - DNA, 15 bp, Homo sapiens
ggttttcaatttatt

SEQ ID NO: 1280182 - DNA, 15 bp, Homo sapiens
aggttttcaatttat

SEQ ID NO: 1280183 - DNA, 15 bp, Homo sapiens
caggttttcaattta

SEQ ID NO: 1280184 - DNA, 15 bp, Homo sapiens
tcaggttttcaattt

SEQ ID NO: 1280185 - DNA, 15 bp, Homo sapiens
ttcaggttttcaatt

SEQ ID NO: 1280186 - DNA, 15 bp, Homo sapiens
gttcaggttttcaat

SEQ ID NO: 1280187 - DNA, 15 bp, Homo sapiens
tgttcaggttttcaa

SEQ ID NO: 1280188 - DNA, 15 bp, Homo sapiens
ctgttcaggttttca

SEQ ID NO: 1280189 - DNA, 15 bp, Homo sapiens
tctgttcaggttttc

SEQ ID NO: 1280190 - DNA, 15 bp, Homo sapiens
atctgttcaggtttt

SEQ ID NO: 1280191 - DNA, 15 bp, Homo sapiens
aatctgttcaggttt

SEQ ID NO: 1280192 - DNA, 15 bp, Homo sapiens
taatctgttcaggtt

SEQ ID NO: 1280193 - DNA, 15 bp, Homo sapiens
ctaatctgttcaggt

SEQ ID NO: 1280194 - DNA, 15 bp, Homo sapiens
actaatctgttcagg

SEQ ID NO: 1280195 - DNA, 15 bp, Homo sapiens
tactaatctgttcag

SEQ ID NO: 1280196 - DNA, 15 bp, Homo sapiens
ttactaatctgttca

SEQ ID NO: 1280197 - DNA, 15 bp, Homo sapiens
gttactaatctgttc

SEQ ID NO: 1280198 - DNA, 15 bp, Homo sapiens
tgttactaatctgtt

SEQ ID NO: 1280199 - DNA, 15 bp, Homo sapiens
ttgttactaatctgt

SEQ ID NO: 1280200 - DNA, 15 bp, Homo sapiens
cttgttactaatctg

SEQ ID NO: 1280201 - DNA, 15 bp, Homo sapiens
acttgttactaatct

SEQ ID NO: 1280202 - DNA, 15 bp, Homo sapiens
tacttgttactaatc

SEQ ID NO: 1280203 - DNA, 15 bp, Homo sapiens
ttacttgttactaat

SEQ ID NO: 1280204 - DNA, 15 bp, Homo sapiens
attacttgttactaa

SEQ ID NO: 1280205 - DNA, 15 bp, Homo sapiens
cattacttgttacta

SEQ ID NO: 1280206 - DNA, 15 bp, Homo sapiens
tcattacttgttact

SEQ ID NO: 1280207 - DNA, 15 bp, Homo sapiens
ctcattacttgttac

SEQ ID NO: 1280208 - DNA, 15 bp, Homo sapiens
tctcattacttgtta

SEQ ID NO: 1280209 - DNA, 15 bp, Homo sapiens
atctcattacttgtt

SEQ ID NO: 1280210 - DNA, 15 bp, Homo sapiens
aatctcattacttgt

SEQ ID NO: 1280211 - DNA, 15 bp, Homo sapiens
caatctcattacttg

SEQ ID NO: 1280212 - DNA, 15 bp, Homo sapiens
tcaatctcattactt

SEQ ID NO: 1280213 - DNA, 15 bp, Homo sapiens
ttcaatctcattact

SEQ ID NO: 1280214 - DNA, 15 bp, Homo sapiens
cttcaatctcattac

SEQ ID NO: 1280215 - DNA, 15 bp, Homo sapiens
gcttcaatctcatta

SEQ ID NO: 1280216 - DNA, 15 bp, Homo sapiens
agcttcaatctcatt

SEQ ID NO: 1280217 - DNA, 15 bp, Homo sapiens
cagagtttgagatat

SEQ ID NO: 1280218 - DNA, 15 bp, Homo sapiens
tcagagtttgagata

SEQ ID NO: 1280219 - DNA, 15 bp, Homo sapiens
ttcagagtttgagat

SEQ ID NO: 1280220 - DNA, 15 bp, Homo sapiens
tttcagagtttgaga

SEQ ID NO: 1280221 - DNA, 15 bp, Homo sapiens
gtttcagagtttgag

SEQ ID NO: 1280222 - DNA, 15 bp, Homo sapiens
agtttcagagtttga

SEQ ID NO: 1280223 - DNA, 15 bp, Homo sapiens
cagtttcagagtttg

SEQ ID NO: 1280224 - DNA, 15 bp, Homo sapiens
acagtttcagagttt

SEQ ID NO: 1280225 - DNA, 15 bp, Homo sapiens
cacagtttcagagtt

SEQ ID NO: 1280226 - DNA, 15 bp, Homo sapiens
acacagtttcagagt

SEQ ID NO: 1280227 - DNA, 15 bp, Homo sapiens
aacacagtttcagag

SEQ ID NO: 1280228 - DNA, 15 bp, Homo sapiens
taacacagtttcaga

SEQ ID NO: 1280229 - DNA, 15 bp, Homo sapiens
ctaacacagtttcag

SEQ ID NO: 1280230 - DNA, 15 bp, Homo sapiens
actaacacagtttca

SEQ ID NO: 1280231 - DNA, 15 bp, Homo sapiens
tactaacacagtttc

SEQ ID NO: 1280232 - DNA, 15 bp, Homo sapiens
ttactaacacagttt

SEQ ID NO: 1280233 - DNA, 15 bp, Homo sapiens
tttactaacacagtt

SEQ ID NO: 1280234 - DNA, 15 bp, Homo sapiens
ttttactaacacagt

SEQ ID NO: 1280235 - DNA, 15 bp, Homo sapiens
cttttactaacacag

SEQ ID NO: 1280236 - DNA, 15 bp, Homo sapiens
tcttttactaacaca

SEQ ID NO: 1280237 - DNA, 15 bp, Homo sapiens
ttcttttactaacac

SEQ ID NO: 1280238 - DNA, 15 bp, Homo sapiens
attcttttactaaca

SEQ ID NO: 1280239 - DNA, 15 bp, Homo sapiens
cattcttttactaac

SEQ ID NO: 1280240 - DNA, 15 bp, Homo sapiens
ccattcttttactaa

SEQ ID NO: 1280241 - DNA, 15 bp, Homo sapiens
cccattcttttacta

SEQ ID NO: 1280242 - DNA, 15 bp, Homo sapiens
tcccattcttttact

SEQ ID NO: 1280243 - DNA, 15 bp, Homo sapiens
ttcccattcttttac

SEQ ID NO: 1280244 - DNA, 15 bp, Homo sapiens
attcccattctttta

SEQ ID NO: 1280245 - DNA, 15 bp, Homo sapiens
aattcccattctttt

SEQ ID NO: 1280246 - DNA, 15 bp, Homo sapiens
gaattcccattcttt

SEQ ID NO: 1280247 - DNA, 15 bp, Homo sapiens
agaattcccattctt

SEQ ID NO: 1280248 - DNA, 15 bp, Homo sapiens
cagaattcccattct

SEQ ID NO: 1280249 - DNA, 15 bp, Homo sapiens
acagaattcccattc

SEQ ID NO: 1280250 - DNA, 15 bp, Homo sapiens
cacagaattcccatt

SEQ ID NO: 1280251 - DNA, 15 bp, Homo sapiens
tcacagaattcccat

SEQ ID NO: 1280252 - DNA, 15 bp, Homo sapiens
ttcacagaattccca

SEQ ID NO: 1280253 - DNA, 15 bp, Homo sapiens
tttcacagaattccc

SEQ ID NO: 1280254 - DNA, 15 bp, Homo sapiens
ctttcacagaattcc

SEQ ID NO: 1280255 - DNA, 15 bp, Homo sapiens
tctttcacagaattc

SEQ ID NO: 1280256 - DNA, 15 bp, Homo sapiens
ctctttcacagaatt

SEQ ID NO: 1280257 - DNA, 15 bp, Homo sapiens
tctctttcacagaat

SEQ ID NO: 1280258 - DNA, 15 bp, Homo sapiens
ttctctttcacagaa

SEQ ID NO: 1280259 - DNA, 15 bp, Homo sapiens
tttctctttcacaga

SEQ ID NO: 1280260 - DNA, 15 bp, Homo sapiens
atttctctttcacag

SEQ ID NO: 1280261 - DNA, 15 bp, Homo sapiens
tatttctctttcaca

SEQ ID NO: 1280262 - DNA, 15 bp, Homo sapiens
ttatttctctttcac

SEQ ID NO: 1280263 - DNA, 15 bp, Homo sapiens
tttatttctctttca

SEQ ID NO: 1280264 - DNA, 15 bp, Homo sapiens
atttatttctctttc

SEQ ID NO: 1280265 - DNA, 15 bp, Homo sapiens
tatttatttctcttt

SEQ ID NO: 1280266 - DNA, 15 bp, Homo sapiens
atatttatttctctt

SEQ ID NO: 1280267 - DNA, 15 bp, Homo sapiens
tatatttatttctct

SEQ ID NO: 1280268 - DNA, 15 bp, Homo sapiens
atatatttatttctc

SEQ ID NO: 1280269 - DNA, 15 bp, Homo sapiens
gatatatttatttct

SEQ ID NO: 1280270 - DNA, 15 bp, Homo sapiens
ggatatatttatttc

SEQ ID NO: 1280271 - DNA, 15 bp, Homo sapiens
tggatatatttattt

SEQ ID NO: 1280272 - DNA, 15 bp, Homo sapiens
ttggatatatttatt

SEQ ID NO: 1280273 - DNA, 15 bp, Homo sapiens
tttggatatatttat

SEQ ID NO: 1280274 - DNA, 15 bp, Homo sapiens
atttggatatattta

SEQ ID NO: 1280275 - DNA, 15 bp, Homo sapiens
aatttggatatattt

SEQ ID NO: 1280276 - DNA, 15 bp, Homo sapiens
gaatttggatatatt

SEQ ID NO: 1280277 - DNA, 15 bp, Homo sapiens
ggaatttggatatat

SEQ ID NO: 1280278 - DNA, 15 bp, Homo sapiens
tggaatttggatata

SEQ ID NO: 1280279 - DNA, 15 bp, Homo sapiens
ctggaatttggatat

SEQ ID NO: 1280280 - DNA, 15 bp, Homo sapiens
cctggaatttggata

SEQ ID NO: 1280281 - DNA, 15 bp, Homo sapiens
acctggaatttggat

SEQ ID NO: 1280282 - DNA, 15 bp, Homo sapiens
gacctggaatttgga

SEQ ID NO: 1280283 - DNA, 15 bp, Homo sapiens
agacctggaatttgg

SEQ ID NO: 1280284 - DNA, 15 bp, Homo sapiens
cagacctggaatttg

SEQ ID NO: 1280285 - DNA, 15 bp, Homo sapiens
acagacctggaattt

SEQ ID NO: 1280286 - DNA, 15 bp, Homo sapiens
aacagacctggaatt

SEQ ID NO: 1280287 - DNA, 15 bp, Homo sapiens
taacagacctggaat

SEQ ID NO: 1280288 - DNA, 15 bp, Homo sapiens
ttaacagacctggaa

SEQ ID NO: 1280289 - DNA, 15 bp, Homo sapiens
tttaacagacctgga

SEQ ID NO: 1280290 - DNA, 15 bp, Homo sapiens
ttttaacagacctgg

SEQ ID NO: 1280291 - DNA, 15 bp, Homo sapiens
attttaacagacctg

SEQ ID NO: 1280292 - DNA, 15 bp, Homo sapiens
aattttaacagacct

SEQ ID NO: 1280293 - DNA, 15 bp, Homo sapiens
aaattttaacagacc

SEQ ID NO: 1280294 - DNA, 15 bp, Homo sapiens
taaattttaacagac

SEQ ID NO: 1280295 - DNA, 15 bp, Homo sapiens
ctaaattttaacaga

SEQ ID NO: 1280296 - DNA, 15 bp, Homo sapiens
gctaaattttaacag

SEQ ID NO: 1280297 - DNA, 15 bp, Homo sapiens
cgctaaattttaaca

SEQ ID NO: 1280298 - DNA, 15 bp, Homo sapiens
gcgctaaattttaac

SEQ ID NO: 1280299 - DNA, 15 bp, Homo sapiens
tgcgctaaattttaa

SEQ ID NO: 1280300 - DNA, 15 bp, Homo sapiens
gtgcgctaaatttta

SEQ ID NO: 1280301 - DNA, 15 bp, Homo sapiens
agtgcgctaaatttt

SEQ ID NO: 1280302 - DNA, 15 bp, Homo sapiens
aagtgcgctaaattt

SEQ ID NO: 1280303 - DNA, 15 bp, Homo sapiens
caagtgcgctaaatt

SEQ ID NO: 1280304 - DNA, 15 bp, Homo sapiens
ccaagtgcgctaaat

SEQ ID NO: 1280305 - DNA, 15 bp, Homo sapiens
tccaagtgcgctaaa

SEQ ID NO: 1280306 - DNA, 15 bp, Homo sapiens
atccaagtgcgctaa

SEQ ID NO: 1280307 - DNA, 15 bp, Homo sapiens
catccaagtgcgcta

SEQ ID NO: 1280308 - DNA, 15 bp, Homo sapiens
acatccaagtgcgct

SEQ ID NO: 1280309 - DNA, 15 bp, Homo sapiens
aacatccaagtgcgc

SEQ ID NO: 1280310 - DNA, 15 bp, Homo sapiens
caacatccaagtgcg

SEQ ID NO: 1280311 - DNA, 15 bp, Homo sapiens
ccaacatccaagtgc

SEQ ID NO: 1280312 - DNA, 15 bp, Homo sapiens
accaacatccaagtg

SEQ ID NO: 1280313 - DNA, 15 bp, Homo sapiens
caccaacatccaagt

SEQ ID NO: 1280314 - DNA, 15 bp, Homo sapiens
gcaccaacatccaag

SEQ ID NO: 1280315 - DNA, 15 bp, Homo sapiens
cgcaccaacatccaa

SEQ ID NO: 1280316 - DNA, 15 bp, Homo sapiens
tcgcaccaacatcca

SEQ ID NO: 1280317 - DNA, 15 bp, Homo sapiens
gtcgcaccaacatcc

SEQ ID NO: 1280318 - DNA, 15 bp, Homo sapiens
tgtcgcaccaacatc

SEQ ID NO: 1280319 - DNA, 15 bp, Homo sapiens
ctgtcgcaccaacat

SEQ ID NO: 1280320 - DNA, 15 bp, Homo sapiens
tctgtcgcaccaaca

SEQ ID NO: 1280321 - DNA, 15 bp, Homo sapiens
ctctgtcgcaccaac

SEQ ID NO: 1280322 - DNA, 15 bp, Homo sapiens
tctctgtcgcaccaa

SEQ ID NO: 1280323 - DNA, 15 bp, Homo sapiens
ttctctgtcgcacca

SEQ ID NO: 1280324 - DNA, 15 bp, Homo sapiens
attctctgtcgcacc

SEQ ID NO: 1280325 - DNA, 15 bp, Homo sapiens
aattctctgtcgcac

SEQ ID NO: 1280326 - DNA, 15 bp, Homo sapiens
aaattctctgtcgca

SEQ ID NO: 1280327 - DNA, 15 bp, Homo sapiens
taaattctctgtcgc

SEQ ID NO: 1280328 - DNA, 15 bp, Homo sapiens
ttaaattctctgtcg

SEQ ID NO: 1280329 - DNA, 15 bp, Homo sapiens
attaaattctctgtc

SEQ ID NO: 1280330 - DNA, 15 bp, Homo sapiens
gattaaattctctgt

SEQ ID NO: 1280331 - DNA, 15 bp, Homo sapiens
agattaaattctctg

SEQ ID NO: 1280332 - DNA, 15 bp, Homo sapiens
cagattaaattctct

SEQ ID NO: 1280333 - DNA, 15 bp, Homo sapiens
gcagattaaattctc

SEQ ID NO: 1280334 - DNA, 15 bp, Homo sapiens
tgcagattaaattct

SEQ ID NO: 1280335 - DNA, 15 bp, Homo sapiens
gtgcagattaaattc

SEQ ID NO: 1280336 - DNA, 15 bp, Homo sapiens
tgtgcagattaaatt

SEQ ID NO: 1280337 - DNA, 15 bp, Homo sapiens
gtgtgcagattaaat

SEQ ID NO: 1280338 - DNA, 15 bp, Homo sapiens
agtgtgcagattaaa

SEQ ID NO: 1280339 - DNA, 15 bp, Homo sapiens
gagtgtgcagattaa

SEQ ID NO: 1280340 - DNA, 15 bp, Homo sapiens
tgagtgtgcagatta

SEQ ID NO: 1280341 - DNA, 15 bp, Homo sapiens
ctgagtgtgcagatt

SEQ ID NO: 1280342 - DNA, 15 bp, Homo sapiens
tctgagtgtgcagat

SEQ ID NO: 1280343 - DNA, 15 bp, Homo sapiens
ttctgagtgtgcaga

SEQ ID NO: 1280344 - DNA, 15 bp, Homo sapiens
cttctgagtgtgcag

SEQ ID NO: 1280345 - DNA, 15 bp, Homo sapiens
tcttctgagtgtgca

SEQ ID NO: 1280346 - DNA, 15 bp, Homo sapiens
ttcttctgagtgtgc

SEQ ID NO: 1280347 - DNA, 15 bp, Homo sapiens
cttcttctgagtgtg

SEQ ID NO: 1280348 - DNA, 15 bp, Homo sapiens
ccttcttctgagtgt

SEQ ID NO: 1280349 - DNA, 15 bp, Homo sapiens
accttcttctgagtg

SEQ ID NO: 1280350 - DNA, 15 bp, Homo sapiens
taccttcttctgagt

SEQ ID NO: 1280351 - DNA, 15 bp, Homo sapiens
ctaccttcttctgag

SEQ ID NO: 1280352 - DNA, 15 bp, Homo sapiens
actaccttcttctga

SEQ ID NO: 1280353 - DNA, 15 bp, Homo sapiens
cactaccttcttctg

SEQ ID NO: 1280354 - DNA, 15 bp, Homo sapiens
ccactaccttcttct

SEQ ID NO: 1280355 - DNA, 15 bp, Homo sapiens
accactaccttcttc

SEQ ID NO: 1280356 - DNA, 15 bp, Homo sapiens
aaccactaccttctt

SEQ ID NO: 1280357 - DNA, 15 bp, Homo sapiens
taaccactaccttct

SEQ ID NO: 1280358 - DNA, 15 bp, Homo sapiens
ttaaccactaccttc

SEQ ID NO: 1280359 - DNA, 15 bp, Homo sapiens
gttaaccactacctt

SEQ ID NO: 1280360 - DNA, 15 bp, Homo sapiens
agttaaccactacct

SEQ ID NO: 1280361 - DNA, 15 bp, Homo sapiens
gagttaaccactacc

SEQ ID NO: 1280362 - DNA, 15 bp, Homo sapiens
tgagttaaccactac

SEQ ID NO: 1280363 - DNA, 15 bp, Homo sapiens
atgagttaaccacta

SEQ ID NO: 1280364 - DNA, 15 bp, Homo sapiens
aatgagttaaccact

SEQ ID NO: 1280365 - DNA, 15 bp, Homo sapiens
gaatgagttaaccac

SEQ ID NO: 1280366 - DNA, 15 bp, Homo sapiens
tgaatgagttaacca

SEQ ID NO: 1280367 - DNA, 15 bp, Homo sapiens
ctgaatgagttaacc

SEQ ID NO: 1280368 - DNA, 15 bp, Homo sapiens
actgaatgagttaac

SEQ ID NO: 1280369 - DNA, 15 bp, Homo sapiens
cactgaatgagttaa

SEQ ID NO: 1280370 - DNA, 15 bp, Homo sapiens
ccactgaatgagtta

SEQ ID NO: 1280371 - DNA, 15 bp, Homo sapiens
accactgaatgagtt

SEQ ID NO: 1280372 - DNA, 15 bp, Homo sapiens
aaccactgaatgagt

SEQ ID NO: 1280373 - DNA, 15 bp, Homo sapiens
taaccactgaatgag

SEQ ID NO: 1280374 - DNA, 15 bp, Homo sapiens
ataaccactgaatga

SEQ ID NO: 1280375 - DNA, 15 bp, Homo sapiens
cataaccactgaatg

SEQ ID NO: 1280376 - DNA, 15 bp, Homo sapiens
tcataaccactgaat

SEQ ID NO: 1280377 - DNA, 15 bp, Homo sapiens
ttcataaccactgaa

SEQ ID NO: 1280378 - DNA, 15 bp, Homo sapiens
attcataaccactga

SEQ ID NO: 1280379 - DNA, 15 bp, Homo sapiens
gattcataaccactg

SEQ ID NO: 1280380 - DNA, 15 bp, Homo sapiens
agattcataaccact

SEQ ID NO: 1280381 - DNA, 15 bp, Homo sapiens
aagattcataaccac

SEQ ID NO: 1280382 - DNA, 15 bp, Homo sapiens
gaagattcataacca

SEQ ID NO: 1280383 - DNA, 15 bp, Homo sapiens
ggaagattcataacc

SEQ ID NO: 1280384 - DNA, 15 bp, Homo sapiens
aggaagattcataac

SEQ ID NO: 1280385 - DNA, 15 bp, Homo sapiens
aaggaagattcataa

SEQ ID NO: 1280386 - DNA, 15 bp, Homo sapiens
caaggaagattcata

SEQ ID NO: 1280387 - DNA, 15 bp, Homo sapiens
gcaaggaagattcat

SEQ ID NO: 1280388 - DNA, 15 bp, Homo sapiens
ggcaaggaagattca

SEQ ID NO: 1280389 - DNA, 15 bp, Homo sapiens
aggcaaggaagattc

SEQ ID NO: 1280390 - DNA, 15 bp, Homo sapiens
aaggcaaggaagatt

SEQ ID NO: 1280391 - DNA, 15 bp, Homo sapiens
taaggcaaggaagat

SEQ ID NO: 1280392 - DNA, 15 bp, Homo sapiens
ctaaggcaaggaaga

SEQ ID NO: 1280393 - DNA, 15 bp, Homo sapiens
tctaaggcaaggaag

SEQ ID NO: 1280394 - DNA, 15 bp, Homo sapiens
ttctaaggcaaggaa

SEQ ID NO: 1280395 - DNA, 15 bp, Homo sapiens
tttctaaggcaagga

SEQ ID NO: 1280396 - DNA, 15 bp, Homo sapiens
ctttctaaggcaagg

SEQ ID NO: 1280397 - DNA, 15 bp, Homo sapiens
tctttctaaggcaag

SEQ ID NO: 1280398 - DNA, 15 bp, Homo sapiens
atctttctaaggcaa

SEQ ID NO: 1280399 - DNA, 15 bp, Homo sapiens
gatctttctaaggca

SEQ ID NO: 1280400 - DNA, 15 bp, Homo sapiens
tgatctttctaaggc

SEQ ID NO: 1280401 - DNA, 15 bp, Homo sapiens
ttgatctttctaagg

SEQ ID NO: 1280402 - DNA, 15 bp, Homo sapiens
attgatctttctaag

SEQ ID NO: 1280403 - DNA, 15 bp, Homo sapiens
aattgatctttctaa

SEQ ID NO: 1280404 - DNA, 15 bp, Homo sapiens
gaattgatctttcta

SEQ ID NO: 1280405 - DNA, 15 bp, Homo sapiens
ggaattgatctttct

SEQ ID NO: 1280406 - DNA, 15 bp, Homo sapiens
aggaattgatctttc

SEQ ID NO: 1280407 - DNA, 15 bp, Homo sapiens
aaggaattgatcttt

SEQ ID NO: 1280408 - DNA, 15 bp, Homo sapiens
caaggaattgatctt

SEQ ID NO: 1280409 - DNA, 15 bp, Homo sapiens
acaaggaattgatct

SEQ ID NO: 1280410 - DNA, 15 bp, Homo sapiens
cacaaggaattgatc

SEQ ID NO: 1280411 - DNA, 15 bp, Homo sapiens
gcacaaggaattgat

SEQ ID NO: 1280412 - DNA, 15 bp, Homo sapiens
ggcacaaggaattga

SEQ ID NO: 1280413 - DNA, 15 bp, Homo sapiens
aggcacaaggaattg

SEQ ID NO: 1280414 - DNA, 15 bp, Homo sapiens
gaggcacaaggaatt

SEQ ID NO: 1280415 - DNA, 15 bp, Homo sapiens
agaggcacaaggaat

SEQ ID NO: 1280416 - DNA, 15 bp, Homo sapiens
gagaggcacaaggaa

SEQ ID NO: 1280417 - DNA, 15 bp, Homo sapiens
ggagaggcacaagga

SEQ ID NO: 1280418 - DNA, 15 bp, Homo sapiens
tggagaggcacaagg

SEQ ID NO: 1280419 - DNA, 15 bp, Homo sapiens
gtggagaggcacaag

SEQ ID NO: 1280420 - DNA, 15 bp, Homo sapiens
ggtggagaggcacaa

SEQ ID NO: 1280421 - DNA, 15 bp, Homo sapiens
aggtggagaggcaca

SEQ ID NO: 1280422 - DNA, 15 bp, Homo sapiens
gaggtggagaggcac

SEQ ID NO: 1280423 - DNA, 15 bp, Homo sapiens
ggaggtggagaggca

SEQ ID NO: 1280424 - DNA, 15 bp, Homo sapiens
cggaggtggagaggc

SEQ ID NO: 1280425 - DNA, 15 bp, Homo sapiens
acggaggtggagagg

SEQ ID NO: 1280426 - DNA, 15 bp, Homo sapiens
cacggaggtggagag

SEQ ID NO: 1280427 - DNA, 15 bp, Homo sapiens
ccacggaggtggaga

SEQ ID NO: 1280428 - DNA, 15 bp, Homo sapiens
gccacggaggtggag

SEQ ID NO: 1280429 - DNA, 15 bp, Homo sapiens
ggccacggaggtgga

SEQ ID NO: 1280430 - DNA, 15 bp, Homo sapiens
aggccacggaggtgg

SEQ ID NO: 1280431 - DNA, 15 bp, Homo sapiens
caggccacggaggtg

SEQ ID NO: 1280432 - DNA, 15 bp, Homo sapiens
ccaggccacggaggt

SEQ ID NO: 1280433 - DNA, 15 bp, Homo sapiens
tccaggccacggagg

SEQ ID NO: 1280434 - DNA, 15 bp, Homo sapiens
ttccaggccacggag

SEQ ID NO: 1280435 - DNA, 15 bp, Homo sapiens
tttccaggccacgga

SEQ ID NO: 1280436 - DNA, 15 bp, Homo sapiens
atttccaggccacgg

SEQ ID NO: 1280437 - DNA, 15 bp, Homo sapiens
tatttccaggccacg

SEQ ID NO: 1280438 - DNA, 15 bp, Homo sapiens
gtatttccaggccac

SEQ ID NO: 1280439 - DNA, 15 bp, Homo sapiens
tgtatttccaggcca

SEQ ID NO: 1280440 - DNA, 15 bp, Homo sapiens
atgtatttccaggcc

SEQ ID NO: 1280441 - DNA, 15 bp, Homo sapiens
aatgtatttccaggc

SEQ ID NO: 1280442 - DNA, 15 bp, Homo sapiens
taatgtatttccagg

SEQ ID NO: 1280443 - DNA, 15 bp, Homo sapiens
ataatgtatttccag

SEQ ID NO: 1280444 - DNA, 15 bp, Homo sapiens
aataatgtatttcca

SEQ ID NO: 1280445 - DNA, 15 bp, Homo sapiens
taataatgtatttcc

SEQ ID NO: 1280446 - DNA, 15 bp, Homo sapiens
ataataatgtatttc

SEQ ID NO: 1280447 - DNA, 15 bp, Homo sapiens
tataataatgtattt

SEQ ID NO: 1280448 - DNA, 15 bp, Homo sapiens
atataataatgtatt

SEQ ID NO: 1280449 - DNA, 15 bp, Homo sapiens
aatataataatgtat

SEQ ID NO: 1280450 - DNA, 15 bp, Homo sapiens
aaatataataatgta

SEQ ID NO: 1280451 - DNA, 15 bp, Homo sapiens
gaaatataataatgt

SEQ ID NO: 1280452 - DNA, 15 bp, Homo sapiens
tgaaatataataatg

SEQ ID NO: 1280453 - DNA, 15 bp, Homo sapiens
ttgaaatataataat

SEQ ID NO: 1280454 - DNA, 15 bp, Homo sapiens
attgaaatataataa

SEQ ID NO: 1280455 - DNA, 15 bp, Homo sapiens
tattgaaatataata

SEQ ID NO: 1280456 - DNA, 15 bp, Homo sapiens
atattgaaatataat

SEQ ID NO: 1280457 - DNA, 15 bp, Homo sapiens
catattgaaatataa

SEQ ID NO: 1280458 - DNA, 15 bp, Homo sapiens
ccatattgaaatata

SEQ ID NO: 1280459 - DNA, 15 bp, Homo sapiens
gccatattgaaatat

SEQ ID NO: 1280460 - DNA, 15 bp, Homo sapiens
agccatattgaaata

SEQ ID NO: 1280461 - DNA, 15 bp, Homo sapiens
gagccatattgaaat

SEQ ID NO: 1280462 - DNA, 15 bp, Homo sapiens
agagccatattgaaa

SEQ ID NO: 1280463 - DNA, 15 bp, Homo sapiens
gagagccatattgaa

SEQ ID NO: 1280464 - DNA, 15 bp, Homo sapiens
agagagccatattga

SEQ ID NO: 1280465 - DNA, 15 bp, Homo sapiens
aagagagccatattg

SEQ ID NO: 1280466 - DNA, 15 bp, Homo sapiens
aaagagagccatatt

SEQ ID NO: 1280467 - DNA, 15 bp, Homo sapiens
gaaagagagccatat

SEQ ID NO: 1280468 - DNA, 15 bp, Homo sapiens
agaaagagagccata

SEQ ID NO: 1280469 - DNA, 15 bp, Homo sapiens
tagaaagagagccat

SEQ ID NO: 1280470 - DNA, 15 bp, Homo sapiens
ctagaaagagagcca

SEQ ID NO: 1280471 - DNA, 15 bp, Homo sapiens
cctagaaagagagcc

SEQ ID NO: 1280472 - DNA, 15 bp, Homo sapiens
gcctagaaagagagc

SEQ ID NO: 1280473 - DNA, 15 bp, Homo sapiens
ggcctagaaagagag

SEQ ID NO: 1280474 - DNA, 15 bp, Homo sapiens
tggcctagaaagaga

SEQ ID NO: 1280475 - DNA, 15 bp, Homo sapiens
atggcctagaaagag

SEQ ID NO: 1280476 - DNA, 15 bp, Homo sapiens
aatggcctagaaaga

SEQ ID NO: 1280477 - DNA, 15 bp, Homo sapiens
caatggcctagaaag

SEQ ID NO: 1280478 - DNA, 15 bp, Homo sapiens
gcaatggcctagaaa

SEQ ID NO: 1280479 - DNA, 15 bp, Homo sapiens
cgcaatggcctagaa

SEQ ID NO: 1280480 - DNA, 15 bp, Homo sapiens
gcgcaatggcctaga

SEQ ID NO: 1280481 - DNA, 15 bp, Homo sapiens
tgcgcaatggcctag

SEQ ID NO: 1280482 - DNA, 15 bp, Homo sapiens
atgcgcaatggccta

SEQ ID NO: 1280483 - DNA, 15 bp, Homo sapiens
aatgcgcaatggcct

SEQ ID NO: 1280484 - DNA, 15 bp, Homo sapiens
caatgcgcaatggcc

SEQ ID NO: 1280485 - DNA, 15 bp, Homo sapiens
acaatgcgcaatggc

SEQ ID NO: 1280486 - DNA, 15 bp, Homo sapiens
cacaatgcgcaatgg

SEQ ID NO: 1280487 - DNA, 15 bp, Homo sapiens
ccacaatgcgcaatg

SEQ ID NO: 1280488 - DNA, 15 bp, Homo sapiens
gccacaatgcgcaat

SEQ ID NO: 1280489 - DNA, 15 bp, Homo sapiens
ggccacaatgcgcaa

SEQ ID NO: 1280490 - DNA, 15 bp, Homo sapiens
cggccacaatgcgca

SEQ ID NO: 1280491 - DNA, 15 bp, Homo sapiens
acggccacaatgcgc

SEQ ID NO: 1280492 - DNA, 15 bp, Homo sapiens
cacggccacaatgcg

SEQ ID NO: 1280493 - DNA, 15 bp, Homo sapiens
acacggccacaatgc

SEQ ID NO: 1280494 - DNA, 15 bp, Homo sapiens
cacacggccacaatg

SEQ ID NO: 1280495 - DNA, 15 bp, Homo sapiens
gcacacggccacaat

SEQ ID NO: 1280496 - DNA, 15 bp, Homo sapiens
ggcacacggccacaa

SEQ ID NO: 1280497 - DNA, 15 bp, Homo sapiens
aggcacacggccaca

SEQ ID NO: 1280498 - DNA, 15 bp, Homo sapiens
caggcacacggccac

SEQ ID NO: 1280499 - DNA, 15 bp, Homo sapiens
gcaggcacacggcca

SEQ ID NO: 1280500 - DNA, 15 bp, Homo sapiens
ggcaggcacacggcc

SEQ ID NO: 1280501 - DNA, 15 bp, Homo sapiens
tggcaggcacacggc

SEQ ID NO: 1280502 - DNA, 15 bp, Homo sapiens
ttggcaggcacacgg

SEQ ID NO: 1280503 - DNA, 15 bp, Homo sapiens
tttggcaggcacacg

SEQ ID NO: 1280504 - DNA, 15 bp, Homo sapiens
gtttggcaggcacac

SEQ ID NO: 1280505 - DNA, 15 bp, Homo sapiens
ggtttggcaggcaca

SEQ ID NO: 1280506 - DNA, 15 bp, Homo sapiens
gggtttggcaggcac

SEQ ID NO: 1280507 - DNA, 15 bp, Homo sapiens
ggggtttggcaggca

SEQ ID NO: 1280508 - DNA, 15 bp, Homo sapiens
cggggtttggcaggc

SEQ ID NO: 1280509 - DNA, 15 bp, Homo sapiens
acggggtttggcagg

SEQ ID NO: 1280510 - DNA, 15 bp, Homo sapiens
cacggggtttggcag

SEQ ID NO: 1280511 - DNA, 15 bp, Homo sapiens
gcacggggtttggca

SEQ ID NO: 1280512 - DNA, 15 bp, Homo sapiens
tgcacggggtttggc

SEQ ID NO: 1280513 - DNA, 15 bp, Homo sapiens
atgcacggggtttgg

SEQ ID NO: 1280514 - DNA, 15 bp, Homo sapiens
catgcacggggtttg

SEQ ID NO: 1280515 - DNA, 15 bp, Homo sapiens
ccatgcacggggttt

SEQ ID NO: 1280516 - DNA, 15 bp, Homo sapiens
tccatgcacggggtt

SEQ ID NO: 1280517 - DNA, 15 bp, Homo sapiens
ttccatgcacggggt

SEQ ID NO: 1280518 - DNA, 15 bp, Homo sapiens
attccatgcacgggg

SEQ ID NO: 1280519 - DNA, 15 bp, Homo sapiens
tattccatgcacggg

SEQ ID NO: 1280520 - DNA, 15 bp, Homo sapiens
atattccatgcacgg

SEQ ID NO: 1280521 - DNA, 15 bp, Homo sapiens
aatattccatgcacg

SEQ ID NO: 1280522 - DNA, 15 bp, Homo sapiens
aaatattccatgcac

SEQ ID NO: 1280523 - DNA, 15 bp, Homo sapiens
caaatattccatgca

SEQ ID NO: 1280524 - DNA, 15 bp, Homo sapiens
ccaaatattccatgc

SEQ ID NO: 1280525 - DNA, 15 bp, Homo sapiens
tccaaatattccatg

SEQ ID NO: 1280526 - DNA, 15 bp, Homo sapiens
ttccaaatattccat

SEQ ID NO: 1280527 - DNA, 15 bp, Homo sapiens
cttccaaatattcca

SEQ ID NO: 1280528 - DNA, 15 bp, Homo sapiens
gcttccaaatattcc

SEQ ID NO: 1280529 - DNA, 15 bp, Homo sapiens
tgcttccaaatattc

SEQ ID NO: 1280530 - DNA, 15 bp, Homo sapiens
ctgcttccaaatatt

SEQ ID NO: 1280531 - DNA, 15 bp, Homo sapiens
cctgcttccaaatat

SEQ ID NO: 1280532 - DNA, 15 bp, Homo sapiens
tcctgcttccaaata

SEQ ID NO: 1280533 - DNA, 15 bp, Homo sapiens
ctcctgcttccaaat

SEQ ID NO: 1280534 - DNA, 15 bp, Homo sapiens
tctcctgcttccaaa

SEQ ID NO: 1280535 - DNA, 15 bp, Homo sapiens
gtctcctgcttccaa

SEQ ID NO: 1280536 - DNA, 15 bp, Homo sapiens
tgtctcctgcttcca

SEQ ID NO: 1280537 - DNA, 15 bp, Homo sapiens
ttgtctcctgcttcc

SEQ ID NO: 1280538 - DNA, 15 bp, Homo sapiens
tttgtctcctgcttc

SEQ ID NO: 1280539 - DNA, 15 bp, Homo sapiens
atttgtctcctgctt

SEQ ID NO: 1280540 - DNA, 15 bp, Homo sapiens
aatttgtctcctgct

SEQ ID NO: 1280541 - DNA, 15 bp, Homo sapiens
caatttgtctcctgc

SEQ ID NO: 1280542 - DNA, 15 bp, Homo sapiens
ccaatttgtctcctg

SEQ ID NO: 1280543 - DNA, 15 bp, Homo sapiens
accaatttgtctcct

SEQ ID NO: 1280544 - DNA, 15 bp, Homo sapiens
aaccaatttgtctcc

SEQ ID NO: 1280545 - DNA, 15 bp, Homo sapiens
taaccaatttgtctc

SEQ ID NO: 1280546 - DNA, 15 bp, Homo sapiens
ctaaccaatttgtct

SEQ ID NO: 1280547 - DNA, 15 bp, Homo sapiens
actaaccaatttgtc

SEQ ID NO: 1280548 - DNA, 15 bp, Homo sapiens
aactaaccaatttgt

SEQ ID NO: 1280549 - DNA, 15 bp, Homo sapiens
taactaaccaatttg

SEQ ID NO: 1280550 - DNA, 15 bp, Homo sapiens
ctaactaaccaattt

SEQ ID NO: 1280551 - DNA, 15 bp, Homo sapiens
gctaactaaccaatt

SEQ ID NO: 1280552 - DNA, 15 bp, Homo sapiens
tgctaactaaccaat

SEQ ID NO: 1280553 - DNA, 15 bp, Homo sapiens
ttgctaactaaccaa

SEQ ID NO: 1280554 - DNA, 15 bp, Homo sapiens
tttgctaactaacca

SEQ ID NO: 1280555 - DNA, 15 bp, Homo sapiens
atttgctaactaacc

SEQ ID NO: 1280556 - DNA, 15 bp, Homo sapiens
gatttgctaactaac

SEQ ID NO: 1280557 - DNA, 15 bp, Homo sapiens
agatttgctaactaa

SEQ ID NO: 1280558 - DNA, 15 bp, Homo sapiens
aagatttgctaacta

SEQ ID NO: 1280559 - DNA, 15 bp, Homo sapiens
aaagatttgctaact

SEQ ID NO: 1280560 - DNA, 15 bp, Homo sapiens
taaagatttgctaac

SEQ ID NO: 1280561 - DNA, 15 bp, Homo sapiens
ataaagatttgctaa

SEQ ID NO: 1280562 - DNA, 15 bp, Homo sapiens
aataaagatttgcta

SEQ ID NO: 1280563 - DNA, 15 bp, Homo sapiens
taataaagatttgct

SEQ ID NO: 1280564 - DNA, 15 bp, Homo sapiens
ctaataaagatttgc

SEQ ID NO: 1280565 - DNA, 15 bp, Homo sapiens
gctaataaagatttg

SEQ ID NO: 1280566 - DNA, 15 bp, Homo sapiens
tgctaataaagattt

SEQ ID NO: 1280567 - DNA, 15 bp, Homo sapiens
atgctaataaagatt

SEQ ID NO: 1280568 - DNA, 15 bp, Homo sapiens
catgctaataaagat

SEQ ID NO: 1280569 - DNA, 15 bp, Homo sapiens
ccatgctaataaaga

SEQ ID NO: 1280570 - DNA, 15 bp, Homo sapiens
gccatgctaataaag

SEQ ID NO: 1280571 - DNA, 15 bp, Homo sapiens
agccatgctaataaa

SEQ ID NO: 1280572 - DNA, 15 bp, Homo sapiens
cagccatgctaataa

SEQ ID NO: 1280573 - DNA, 15 bp, Homo sapiens
ccagccatgctaata

SEQ ID NO: 1280574 - DNA, 15 bp, Homo sapiens
gccagccatgctaat

SEQ ID NO: 1280575 - DNA, 15 bp, Homo sapiens
ggccagccatgctaa

SEQ ID NO: 1280576 - DNA, 15 bp, Homo sapiens
aggccagccatgcta

SEQ ID NO: 1280577 - DNA, 15 bp, Homo sapiens
aaggccagccatgct

SEQ ID NO: 1280578 - DNA, 15 bp, Homo sapiens
aaaggccagccatgc

SEQ ID NO: 1280579 - DNA, 15 bp, Homo sapiens
aaaaggccagccatg

SEQ ID NO: 1280580 - DNA, 15 bp, Homo sapiens
gaaaaggccagccat

SEQ ID NO: 1280581 - DNA, 15 bp, Homo sapiens
ggaaaaggccagcca

SEQ ID NO: 1280582 - DNA, 15 bp, Homo sapiens
gggaaaaggccagcc

SEQ ID NO: 1280583 - DNA, 15 bp, Homo sapiens
cgggaaaaggccagc

SEQ ID NO: 1280584 - DNA, 15 bp, Homo sapiens
ccgggaaaaggccag

SEQ ID NO: 1280585 - DNA, 15 bp, Homo sapiens
cccgggaaaaggcca

SEQ ID NO: 1280586 - DNA, 15 bp, Homo sapiens
ccccgggaaaaggcc

SEQ ID NO: 1280587 - DNA, 15 bp, Homo sapiens
tccccgggaaaaggc

SEQ ID NO: 1280588 - DNA, 15 bp, Homo sapiens
atccccgggaaaagg

SEQ ID NO: 1280589 - DNA, 15 bp, Homo sapiens
tatccccgggaaaag

SEQ ID NO: 1280590 - DNA, 15 bp, Homo sapiens
atatccccgggaaaa

SEQ ID NO: 1280591 - DNA, 15 bp, Homo sapiens
catatccccgggaaa

SEQ ID NO: 1280592 - DNA, 15 bp, Homo sapiens
ccatatccccgggaa

SEQ ID NO: 1280593 - DNA, 15 bp, Homo sapiens
cccatatccccggga

SEQ ID NO: 1280594 - DNA, 15 bp, Homo sapiens
ccccatatccccggg

SEQ ID NO: 1280595 - DNA, 15 bp, Homo sapiens
accccatatccccgg

SEQ ID NO: 1280596 - DNA, 15 bp, Homo sapiens
gaccccatatccccg

SEQ ID NO: 1280597 - DNA, 15 bp, Homo sapiens
tgaccccatatcccc

SEQ ID NO: 1280598 - DNA, 15 bp, Homo sapiens
atgaccccatatccc

SEQ ID NO: 1280599 - DNA, 15 bp, Homo sapiens
catgaccccatatcc

SEQ ID NO: 1280600 - DNA, 15 bp, Homo sapiens
acatgaccccatatc

SEQ ID NO: 1280601 - DNA, 15 bp, Homo sapiens
tacatgaccccatat

SEQ ID NO: 1280602 - DNA, 15 bp, Homo sapiens
ttacatgaccccata

SEQ ID NO: 1280603 - DNA, 15 bp, Homo sapiens
cttacatgaccccat

SEQ ID NO: 1280604 - DNA, 15 bp, Homo sapiens
tcttacatgacccca

SEQ ID NO: 1280605 - DNA, 15 bp, Homo sapiens
gtcttacatgacccc

SEQ ID NO: 1280606 - DNA, 15 bp, Homo sapiens
tgtcttacatgaccc

SEQ ID NO: 1280607 - DNA, 15 bp, Homo sapiens
atgtcttacatgacc

SEQ ID NO: 1280608 - DNA, 15 bp, Homo sapiens
gatgtcttacatgac

SEQ ID NO: 1280609 - DNA, 15 bp, Homo sapiens
tgatgtcttacatga

SEQ ID NO: 1280610 - DNA, 15 bp, Homo sapiens
atgatgtcttacatg

SEQ ID NO: 1280611 - DNA, 15 bp, Homo sapiens
aatgatgtcttacat

SEQ ID NO: 1280612 - DNA, 15 bp, Homo sapiens
aaatgatgtcttaca

SEQ ID NO: 1280613 - DNA, 15 bp, Homo sapiens
gaaatgatgtcttac

SEQ ID NO: 1280614 - DNA, 15 bp, Homo sapiens
ggaaatgatgtctta

SEQ ID NO: 1280615 - DNA, 15 bp, Homo sapiens
aggaaatgatgtctt

SEQ ID NO: 1280616 - DNA, 15 bp, Homo sapiens
gaggaaatgatgtct

SEQ ID NO: 1280617 - DNA, 15 bp, Homo sapiens
agaggaaatgatgtc

SEQ ID NO: 1280618 - DNA, 15 bp, Homo sapiens
agagaggaaatgatg

SEQ ID NO: 1280619 - DNA, 15 bp, Homo sapiens
cagagaggaaatgat

SEQ ID NO: 1280620 - DNA, 15 bp, Homo sapiens
ccagagaggaaatga

SEQ ID NO: 1280621 - DNA, 15 bp, Homo sapiens
gccagagaggaaatg

SEQ ID NO: 1280622 - DNA, 15 bp, Homo sapiens
tgccagagaggaaat

SEQ ID NO: 1280623 - DNA, 15 bp, Homo sapiens
ttgccagagaggaaa

SEQ ID NO: 1280624 - DNA, 15 bp, Homo sapiens
attgccagagaggaa

SEQ ID NO: 1280625 - DNA, 15 bp, Homo sapiens
tattgccagagagga

SEQ ID NO: 1280626 - DNA, 15 bp, Homo sapiens
gtattgccagagagg

SEQ ID NO: 1280627 - DNA, 15 bp, Homo sapiens
ggtattgccagagag

SEQ ID NO: 1280628 - DNA, 15 bp, Homo sapiens
cggtattgccagaga

SEQ ID NO: 1280629 - DNA, 15 bp, Homo sapiens
ccggtattgccagag

SEQ ID NO: 1280630 - DNA, 15 bp, Homo sapiens
accggtattgccaga

SEQ ID NO: 1280631 - DNA, 15 bp, Homo sapiens
taccggtattgccag

SEQ ID NO: 1280632 - DNA, 15 bp, Homo sapiens
ttaccggtattgcca

SEQ ID NO: 1280633 - DNA, 15 bp, Homo sapiens
gttaccggtattgcc

SEQ ID NO: 1280634 - DNA, 15 bp, Homo sapiens
ggttaccggtattgc

SEQ ID NO: 1280635 - DNA, 15 bp, Homo sapiens
tggttaccggtattg

SEQ ID NO: 1280636 - DNA, 15 bp, Homo sapiens
gtggttaccggtatt

SEQ ID NO: 1280637 - DNA, 15 bp, Homo sapiens
tgtggttaccggtat

SEQ ID NO: 1280638 - DNA, 15 bp, Homo sapiens
atgtggttaccggta

SEQ ID NO: 1280639 - DNA, 15 bp, Homo sapiens
aatgtggttaccggt

SEQ ID NO: 1280640 - DNA, 15 bp, Homo sapiens
caatgtggttaccgg

SEQ ID NO: 1280641 - DNA, 15 bp, Homo sapiens
gcaatgtggttaccg

SEQ ID NO: 1280642 - DNA, 15 bp, Homo sapiens
tgcaatgtggttacc

SEQ ID NO: 1280643 - DNA, 15 bp, Homo sapiens
atgcaatgtggttac

SEQ ID NO: 1280644 - DNA, 15 bp, Homo sapiens
catgcaatgtggtta

SEQ ID NO: 1280645 - DNA, 15 bp, Homo sapiens
tcatgcaatgtggtt

SEQ ID NO: 1280646 - DNA, 15 bp, Homo sapiens
atcatgcaatgtggt

SEQ ID NO: 1280647 - DNA, 15 bp, Homo sapiens
aatcatgcaatgtgg

SEQ ID NO: 1280648 - DNA, 15 bp, Homo sapiens
gaatcatgcaatgtg

SEQ ID NO: 1280649 - DNA, 15 bp, Homo sapiens
ggaatcatgcaatgt

SEQ ID NO: 1280650 - DNA, 15 bp, Homo sapiens
tggaatcatgcaatg

SEQ ID NO: 1280651 - DNA, 15 bp, Homo sapiens
ctggaatcatgcaat

SEQ ID NO: 1280652 - DNA, 15 bp, Homo sapiens
cctggaatcatgcaa

SEQ ID NO: 1280653 - DNA, 15 bp, Homo sapiens
ccctggaatcatgca

SEQ ID NO: 1280654 - DNA, 15 bp, Homo sapiens
gccctggaatcatgc

SEQ ID NO: 1280655 - DNA, 15 bp, Homo sapiens
cgccctggaatcatg

SEQ ID NO: 1280656 - DNA, 15 bp, Homo sapiens
gcgccctggaatcat

SEQ ID NO: 1280657 - DNA, 15 bp, Homo sapiens
ggcgccctggaatca

SEQ ID NO: 1280658 - DNA, 15 bp, Homo sapiens
tggcgccctggaatc

SEQ ID NO: 1280659 - DNA, 15 bp, Homo sapiens
gtggcgccctggaat

SEQ ID NO: 1280660 - DNA, 15 bp, Homo sapiens
agtggcgccctggaa

SEQ ID NO: 1280661 - DNA, 15 bp, Homo sapiens
gagtggcgccctgga

SEQ ID NO: 1280662 - DNA, 15 bp, Homo sapiens
tgagtggcgccctgg

SEQ ID NO: 1280663 - DNA, 15 bp, Homo sapiens
gtgagtggcgccctg

SEQ ID NO: 1280664 - DNA, 15 bp, Homo sapiens
tgtgagtggcgccct

SEQ ID NO: 1280665 - DNA, 15 bp, Homo sapiens
atgtgagtggcgccc

SEQ ID NO: 1280666 - DNA, 15 bp, Homo sapiens
gatgtgagtggcgcc

SEQ ID NO: 1280667 - DNA, 15 bp, Homo sapiens
ggatgtgagtggcgc

SEQ ID NO: 1280668 - DNA, 15 bp, Homo sapiens
aggatgtgagtggcg

SEQ ID NO: 1280669 - DNA, 15 bp, Homo sapiens
caggatgtgagtggc

SEQ ID NO: 1280670 - DNA, 15 bp, Homo sapiens
ccaggatgtgagtgg

SEQ ID NO: 1280671 - DNA, 15 bp, Homo sapiens
accaggatgtgagtg

SEQ ID NO: 1280672 - DNA, 15 bp, Homo sapiens
gaccaggatgtgagt

SEQ ID NO: 1280673 - DNA, 15 bp, Homo sapiens
tgaccaggatgtgag

SEQ ID NO: 1280674 - DNA, 15 bp, Homo sapiens
atgaccaggatgtga

SEQ ID NO: 1280675 - DNA, 15 bp, Homo sapiens
catgaccaggatgtg

SEQ ID NO: 1280676 - DNA, 15 bp, Homo sapiens
tcatgaccaggatgt

SEQ ID NO: 1280677 - DNA, 15 bp, Homo sapiens
ttcatgaccaggatg

SEQ ID NO: 1280678 - DNA, 15 bp, Homo sapiens
attcatgaccaggat

SEQ ID NO: 1280679 - DNA, 15 bp, Homo sapiens
cattcatgaccagga

SEQ ID NO: 1280680 - DNA, 15 bp, Homo sapiens
tcattcatgaccagg

SEQ ID NO: 1280681 - DNA, 15 bp, Homo sapiens
ttcattcatgaccag

SEQ ID NO: 1280682 - DNA, 15 bp, Homo sapiens
cttcattcatgacca

SEQ ID NO: 1280683 - DNA, 15 bp, Homo sapiens
gcttcattcatgacc

SEQ ID NO: 1280684 - DNA, 15 bp, Homo sapiens
ggcttcattcatgac

SEQ ID NO: 1280685 - DNA, 15 bp, Homo sapiens
gggcttcattcatga

SEQ ID NO: 1280686 - DNA, 15 bp, Homo sapiens
agggcttcattcatg

SEQ ID NO: 1280687 - DNA, 15 bp, Homo sapiens
gagggcttcattcat

SEQ ID NO: 1280688 - DNA, 15 bp, Homo sapiens
agagggcttcattca

SEQ ID NO: 1280689 - DNA, 15 bp, Homo sapiens
cagagggcttcattc

SEQ ID NO: 1280690 - DNA, 15 bp, Homo sapiens
ccagagggcttcatt

SEQ ID NO: 1280691 - DNA, 15 bp, Homo sapiens
tccagagggcttcat

SEQ ID NO: 1280692 - DNA, 15 bp, Homo sapiens
ctccagagggcttca

SEQ ID NO: 1280693 - DNA, 15 bp, Homo sapiens
actccagagggcttc

SEQ ID NO: 1280694 - DNA, 15 bp, Homo sapiens
aactccagagggctt

SEQ ID NO: 1280695 - DNA, 15 bp, Homo sapiens
caactccagagggct

SEQ ID NO: 1280696 - DNA, 15 bp, Homo sapiens
acaactccagagggc

SEQ ID NO: 1280697 - DNA, 15 bp, Homo sapiens
cacaactccagaggg

SEQ ID NO: 1280698 - DNA, 15 bp, Homo sapiens
gcacaactccagagg

SEQ ID NO: 1280699 - DNA, 15 bp, Homo sapiens
tgcacaactccagag

SEQ ID NO: 1280700 - DNA, 15 bp, Homo sapiens
ctgcacaactccaga

SEQ ID NO: 1280701 - DNA, 15 bp, Homo sapiens
actgcacaactccag

SEQ ID NO: 1280702 - DNA, 15 bp, Homo sapiens
cactgcacaactcca

SEQ ID NO: 1280703 - DNA, 15 bp, Homo sapiens
gcactgcacaactcc

SEQ ID NO: 1280704 - DNA, 15 bp, Homo sapiens
tgcactgcacaactc

SEQ ID NO: 1280705 - DNA, 15 bp, Homo sapiens
gtgcactgcacaact

SEQ ID NO: 1280706 - DNA, 15 bp, Homo sapiens
tgtgcactgcacaac

SEQ ID NO: 1280707 - DNA, 15 bp, Homo sapiens
ctgtgcactgcacaa

SEQ ID NO: 1280708 - DNA, 15 bp, Homo sapiens
gctgtgcactgcaca

SEQ ID NO: 1280709 - DNA, 15 bp, Homo sapiens
ggctgtgcactgcac

SEQ ID NO: 1280710 - DNA, 15 bp, Homo sapiens
aggctgtgcactgca

SEQ ID NO: 1280711 - DNA, 15 bp, Homo sapiens
caggctgtgcactgc

SEQ ID NO: 1280712 - DNA, 15 bp, Homo sapiens
gcaggctgtgcactg

SEQ ID NO: 1280713 - DNA, 15 bp, Homo sapiens
tgcaggctgtgcact

SEQ ID NO: 1280714 - DNA, 15 bp, Homo sapiens
atgcaggctgtgcac

SEQ ID NO: 1280715 - DNA, 15 bp, Homo sapiens
catgcaggctgtgca

SEQ ID NO: 1280716 - DNA, 15 bp, Homo sapiens
gcatgcaggctgtgc

SEQ ID NO: 1280717 - DNA, 15 bp, Homo sapiens
ggcatgcaggctgtg

SEQ ID NO: 1280718 - DNA, 15 bp, Homo sapiens
gggcatgcaggctgt

SEQ ID NO: 1280719 - DNA, 15 bp, Homo sapiens
tgggcatgcaggctg

SEQ ID NO: 1280720 - DNA, 15 bp, Homo sapiens
atgggcatgcaggct

SEQ ID NO: 1280721 - DNA, 15 bp, Homo sapiens
tatgggcatgcaggc

SEQ ID NO: 1280722 - DNA, 15 bp, Homo sapiens
atatgggcatgcagg

SEQ ID NO: 1280723 - DNA, 15 bp, Homo sapiens
tatatgggcatgcag

SEQ ID NO: 1280724 - DNA, 15 bp, Homo sapiens
gtatatgggcatgca

SEQ ID NO: 1280725 - DNA, 15 bp, Homo sapiens
tgtatatgggcatgc

SEQ ID NO: 1280726 - DNA, 15 bp, Homo sapiens
atgtatatgggcatg

SEQ ID NO: 1280727 - DNA, 15 bp, Homo sapiens
aatgtatatgggcat

SEQ ID NO: 1280728 - DNA, 15 bp, Homo sapiens
caatgtatatgggca

SEQ ID NO: 1280729 - DNA, 15 bp, Homo sapiens
acaatgtatatgggc

SEQ ID NO: 1280730 - DNA, 15 bp, Homo sapiens
gacaatgtatatggg

SEQ ID NO: 1280731 - DNA, 15 bp, Homo sapiens
agacaatgtatatgg

SEQ ID NO: 1280732 - DNA, 15 bp, Homo sapiens
aagacaatgtatatg

SEQ ID NO: 1280733 - DNA, 15 bp, Homo sapiens
aaagacaatgtatat

SEQ ID NO: 1280734 - DNA, 15 bp, Homo sapiens
aaaagacaatgtata

SEQ ID NO: 1280735 - DNA, 15 bp, Homo sapiens
gaaaagacaatgtat

SEQ ID NO: 1280736 - DNA, 15 bp, Homo sapiens
agaaaagacaatgta

SEQ ID NO: 1280737 - DNA, 15 bp, Homo sapiens
tagaaaagacaatgt

SEQ ID NO: 1280738 - DNA, 15 bp, Homo sapiens
ctagaaaagacaatg

SEQ ID NO: 1280739 - DNA, 15 bp, Homo sapiens
cctagaaaagacaat

SEQ ID NO: 1280740 - DNA, 15 bp, Homo sapiens
gcctagaaaagacaa

SEQ ID NO: 1280741 - DNA, 15 bp, Homo sapiens
tgcctagaaaagaca

SEQ ID NO: 1280742 - DNA, 15 bp, Homo sapiens
atgcctagaaaagac

SEQ ID NO: 1280743 - DNA, 15 bp, Homo sapiens
gatgcctagaaaaga

SEQ ID NO: 1280744 - DNA, 15 bp, Homo sapiens
agatgcctagaaaag

SEQ ID NO: 1280745 - DNA, 15 bp, Homo sapiens
tagatgcctagaaaa

SEQ ID NO: 1280746 - DNA, 15 bp, Homo sapiens
ctagatgcctagaaa

SEQ ID NO: 1280747 - DNA, 15 bp, Homo sapiens
gctagatgcctagaa

SEQ ID NO: 1280748 - DNA, 15 bp, Homo sapiens
agctagatgcctaga

SEQ ID NO: 1280749 - DNA, 15 bp, Homo sapiens
cagctagatgcctag

SEQ ID NO: 1280750 - DNA, 15 bp, Homo sapiens
acagctagatgccta

SEQ ID NO: 1280751 - DNA, 15 bp, Homo sapiens
cacagctagatgcct

SEQ ID NO: 1280752 - DNA, 15 bp, Homo sapiens
acacagctagatgcc

SEQ ID NO: 1280753 - DNA, 15 bp, Homo sapiens
aacacagctagatgc

SEQ ID NO: 1280754 - DNA, 15 bp, Homo sapiens
aaacacagctagatg

SEQ ID NO: 1280755 - DNA, 15 bp, Homo sapiens
caaacacagctagat

SEQ ID NO: 1280756 - DNA, 15 bp, Homo sapiens
acaaacacagctaga

SEQ ID NO: 1280757 - DNA, 15 bp, Homo sapiens
cacaaacacagctag

SEQ ID NO: 1280758 - DNA, 15 bp, Homo sapiens
acacaaacacagcta

SEQ ID NO: 1280759 - DNA, 15 bp, Homo sapiens
tacacaaacacagct

SEQ ID NO: 1280760 - DNA, 15 bp, Homo sapiens
ttacacaaacacagc

SEQ ID NO: 1280761 - DNA, 15 bp, Homo sapiens
tttacacaaacacag

SEQ ID NO: 1280762 - DNA, 15 bp, Homo sapiens
ttttacacaaacaca

SEQ ID NO: 1280763 - DNA, 15 bp, Homo sapiens
gttttacacaaacac

SEQ ID NO: 1280764 - DNA, 15 bp, Homo sapiens
ggttttacacaaaca

SEQ ID NO: 1280765 - DNA, 15 bp, Homo sapiens
gggttttacacaaac

SEQ ID NO: 1280766 - DNA, 15 bp, Homo sapiens
agggttttacacaaa

SEQ ID NO: 1280767 - DNA, 15 bp, Homo sapiens
aagggttttacacaa

SEQ ID NO: 1280768 - DNA, 15 bp, Homo sapiens
taagggttttacaca

SEQ ID NO: 1280769 - DNA, 15 bp, Homo sapiens
gtaagggttttacac

SEQ ID NO: 1280770 - DNA, 15 bp, Homo sapiens
tgtaagggttttaca

SEQ ID NO: 1280771 - DNA, 15 bp, Homo sapiens
gtgtaagggttttac

SEQ ID NO: 1280772 - DNA, 15 bp, Homo sapiens
tgtgtaagggtttta

SEQ ID NO: 1280773 - DNA, 15 bp, Homo sapiens
ttgtgtaagggtttt

SEQ ID NO: 1280774 - DNA, 15 bp, Homo sapiens
gttgtgtaagggttt

SEQ ID NO: 1280775 - DNA, 15 bp, Homo sapiens
tgttgtgtaagggtt

SEQ ID NO: 1280776 - DNA, 15 bp, Homo sapiens
ttgttgtgtaagggt

SEQ ID NO: 1280777 - DNA, 15 bp, Homo sapiens
tttgttgtgtaaggg

SEQ ID NO: 1280778 - DNA, 15 bp, Homo sapiens
atttgttgtgtaagg

SEQ ID NO: 1280779 - DNA, 15 bp, Homo sapiens
aatttgttgtgtaag

SEQ ID NO: 1280780 - DNA, 15 bp, Homo sapiens
taatttgttgtgtaa

SEQ ID NO: 1280781 - DNA, 15 bp, Homo sapiens
ttaatttgttgtgta

SEQ ID NO: 1280782 - DNA, 15 bp, Homo sapiens
tttaatttgttgtgt

SEQ ID NO: 1280783 - DNA, 15 bp, Homo sapiens
ttttaatttgttgtg

SEQ ID NO: 1280784 - DNA, 15 bp, Homo sapiens
tttttaatttgttgt

SEQ ID NO: 1280785 - DNA, 15 bp, Homo sapiens
gtttttaatttgttg

SEQ ID NO: 1280786 - DNA, 15 bp, Homo sapiens
tgtttttaatttgtt

SEQ ID NO: 1280787 - DNA, 15 bp, Homo sapiens
gtgtttttaatttgt

SEQ ID NO: 1280788 - DNA, 15 bp, Homo sapiens
tgtgtttttaatttg

SEQ ID NO: 1280789 - DNA, 15 bp, Homo sapiens
ctgtgtttttaattt

SEQ ID NO: 1280790 - DNA, 15 bp, Homo sapiens
actgtgtttttaatt

SEQ ID NO: 1280791 - DNA, 15 bp, Homo sapiens
cactgtgtttttaat

SEQ ID NO: 1280792 - DNA, 15 bp, Homo sapiens
gcactgtgtttttaa

SEQ ID NO: 1280793 - DNA, 15 bp, Homo sapiens
tgcactgtgttttta

SEQ ID NO: 1280794 - DNA, 15 bp, Homo sapiens
ttgcactgtgttttt

SEQ ID NO: 1280795 - DNA, 15 bp, Homo sapiens
tttgcactgtgtttt

SEQ ID NO: 1280796 - DNA, 15 bp, Homo sapiens
ctttgcactgtgttt

SEQ ID NO: 1280797 - DNA, 15 bp, Homo sapiens
gctttgcactgtgtt

SEQ ID NO: 1280798 - DNA, 15 bp, Homo sapiens
ggctttgcactgtgt

SEQ ID NO: 1280799 - DNA, 15 bp, Homo sapiens
gggctttgcactgtg

SEQ ID NO: 1280800 - DNA, 15 bp, Homo sapiens
tgggctttgcactgt

SEQ ID NO: 1280801 - DNA, 15 bp, Homo sapiens
atgggctttgcactg

SEQ ID NO: 1280802 - DNA, 15 bp, Homo sapiens
tatgggctttgcact

SEQ ID NO: 1280803 - DNA, 15 bp, Homo sapiens
ttatgggctttgcac

SEQ ID NO: 1280804 - DNA, 15 bp, Homo sapiens
attatgggctttgca

SEQ ID NO: 1280805 - DNA, 15 bp, Homo sapiens
aattatgggctttgc

SEQ ID NO: 1280806 - DNA, 15 bp, Homo sapiens
gaattatgggctttg

SEQ ID NO: 1280807 - DNA, 15 bp, Homo sapiens
agaattatgggcttt

SEQ ID NO: 1280808 - DNA, 15 bp, Homo sapiens
aagaattatgggctt

SEQ ID NO: 1280809 - DNA, 15 bp, Homo sapiens
taagaattatgggct

SEQ ID NO: 1280810 - DNA, 15 bp, Homo sapiens
ttaagaattatgggc

SEQ ID NO: 1280811 - DNA, 15 bp, Homo sapiens
attaagaattatggg

SEQ ID NO: 1280812 - DNA, 15 bp, Homo sapiens
cattaagaattatgg

SEQ ID NO: 1280813 - DNA, 15 bp, Homo sapiens
ccattaagaattatg

SEQ ID NO: 1280814 - DNA, 15 bp, Homo sapiens
gccattaagaattat

SEQ ID NO: 1280815 - DNA, 15 bp, Homo sapiens
tgccattaagaatta

SEQ ID NO: 1280816 - DNA, 15 bp, Homo sapiens
ttgccattaagaatt

SEQ ID NO: 1280817 - DNA, 15 bp, Homo sapiens
attgccattaagaat

SEQ ID NO: 1280818 - DNA, 15 bp, Homo sapiens
cattgccattaagaa

SEQ ID NO: 1280819 - DNA, 15 bp, Homo sapiens
acattgccattaaga

SEQ ID NO: 1280820 - DNA, 15 bp, Homo sapiens
cacattgccattaag

SEQ ID NO: 1280821 - DNA, 15 bp, Homo sapiens
tcacattgccattaa

SEQ ID NO: 1280822 - DNA, 15 bp, Homo sapiens
ttcacattgccatta

SEQ ID NO: 1280823 - DNA, 15 bp, Homo sapiens
attcacattgccatt

SEQ ID NO: 1280824 - DNA, 15 bp, Homo sapiens
tattcacattgccat

SEQ ID NO: 1280825 - DNA, 15 bp, Homo sapiens
ttattcacattgcca

SEQ ID NO: 1280826 - DNA, 15 bp, Homo sapiens
gttattcacattgcc

SEQ ID NO: 1280827 - DNA, 15 bp, Homo sapiens
tgttattcacattgc

SEQ ID NO: 1280828 - DNA, 15 bp, Homo sapiens
ctgttattcacattg

SEQ ID NO: 1280829 - DNA, 15 bp, Homo sapiens
tctgttattcacatt

SEQ ID NO: 1280830 - DNA, 15 bp, Homo sapiens
ttctgttattcacat

SEQ ID NO: 1280831 - DNA, 15 bp, Homo sapiens
tttctgttattcaca

SEQ ID NO: 1280832 - DNA, 15 bp, Homo sapiens
gtttctgttattcac

SEQ ID NO: 1280833 - DNA, 15 bp, Homo sapiens
tgtttctgttattca

SEQ ID NO: 1280834 - DNA, 15 bp, Homo sapiens
atgtttctgttattc

SEQ ID NO: 1280835 - DNA, 15 bp, Homo sapiens
gatgtttctgttatt

SEQ ID NO: 1280836 - DNA, 15 bp, Homo sapiens
tgatgtttctgttat

SEQ ID NO: 1280837 - DNA, 15 bp, Homo sapiens
ttgatgtttctgtta

SEQ ID NO: 1280838 - DNA, 15 bp, Homo sapiens
cttgatgtttctgtt

SEQ ID NO: 1280839 - DNA, 15 bp, Homo sapiens
tcttgatgtttctgt

SEQ ID NO: 1280840 - DNA, 15 bp, Homo sapiens
ttcttgatgtttctg

SEQ ID NO: 1280841 - DNA, 15 bp, Homo sapiens
attcttgatgtttct

SEQ ID NO: 1280842 - DNA, 15 bp, Homo sapiens
aattcttgatgtttc

SEQ ID NO: 1280843 - DNA, 15 bp, Homo sapiens
aaattcttgatgttt

SEQ ID NO: 1280844 - DNA, 15 bp, Homo sapiens
caaattcttgatgtt

SEQ ID NO: 1280845 - DNA, 15 bp, Homo sapiens
ccaaattcttgatgt

SEQ ID NO: 1280846 - DNA, 15 bp, Homo sapiens
cccaaattcttgatg

SEQ ID NO: 1280847 - DNA, 15 bp, Homo sapiens
acccaaattcttgat

SEQ ID NO: 1280848 - DNA, 15 bp, Homo sapiens
aacccaaattcttga

SEQ ID NO: 1280849 - DNA, 15 bp, Homo sapiens
aaacccaaattcttg

SEQ ID NO: 1280850 - DNA, 15 bp, Homo sapiens
gaaacccaaattctt

SEQ ID NO: 1280851 - DNA, 15 bp, Homo sapiens
ggaaacccaaattct

SEQ ID NO: 1280852 - DNA, 15 bp, Homo sapiens
tggaaacccaaattc

SEQ ID NO: 1280853 - DNA, 15 bp, Homo sapiens
ttggaaacccaaatt

SEQ ID NO: 1280854 - DNA, 15 bp, Homo sapiens
tttggaaacccaaat

SEQ ID NO: 1280855 - DNA, 15 bp, Homo sapiens
ttttggaaacccaaa

SEQ ID NO: 1280856 - DNA, 15 bp, Homo sapiens
tttttggaaacccaa

SEQ ID NO: 1280857 - DNA, 15 bp, Homo sapiens
atttttggaaaccca

SEQ ID NO: 1280858 - DNA, 15 bp, Homo sapiens
catttttggaaaccc

SEQ ID NO: 1280859 - DNA, 15 bp, Homo sapiens
ccatttttggaaacc

SEQ ID NO: 1280860 - DNA, 15 bp, Homo sapiens
cccatttttggaaac

SEQ ID NO: 1280861 - DNA, 15 bp, Homo sapiens
ccccatttttggaaa

SEQ ID NO: 1280862 - DNA, 15 bp, Homo sapiens
tccccatttttggaa

SEQ ID NO: 1280863 - DNA, 15 bp, Homo sapiens
ctccccatttttgga

SEQ ID NO: 1280864 - DNA, 15 bp, Homo sapiens
tctccccatttttgg

SEQ ID NO: 1280865 - DNA, 15 bp, Homo sapiens
ttctccccatttttg

SEQ ID NO: 1280866 - DNA, 15 bp, Homo sapiens
tttctccccattttt

SEQ ID NO: 1280867 - DNA, 15 bp, Homo sapiens
ttttctccccatttt

SEQ ID NO: 1280868 - DNA, 15 bp, Homo sapiens
gttttctccccattt

SEQ ID NO: 1280869 - DNA, 15 bp, Homo sapiens
tgttttctccccatt

SEQ ID NO: 1280870 - DNA, 15 bp, Homo sapiens
ctgttttctccccat

SEQ ID NO: 1280871 - DNA, 15 bp, Homo sapiens
tctgttttctcccca

SEQ ID NO: 1280872 - DNA, 15 bp, Homo sapiens
ttctgttttctcccc

SEQ ID NO: 1280873 - DNA, 15 bp, Homo sapiens
gttctgttttctccc

SEQ ID NO: 1280874 - DNA, 15 bp, Homo sapiens
agttctgttttctcc

SEQ ID NO: 1280875 - DNA, 15 bp, Homo sapiens
cagttctgttttctc

SEQ ID NO: 1280876 - DNA, 15 bp, Homo sapiens
ccagttctgttttct

SEQ ID NO: 1280877 - DNA, 15 bp, Homo sapiens
gccagttctgttttc

SEQ ID NO: 1280878 - DNA, 15 bp, Homo sapiens
ggccagttctgtttt

SEQ ID NO: 1280879 - DNA, 15 bp, Homo sapiens
cggccagttctgttt

SEQ ID NO: 1280880 - DNA, 15 bp, Homo sapiens
acggccagttctgtt

SEQ ID NO: 1280881 - DNA, 15 bp, Homo sapiens
tacggccagttctgt

SEQ ID NO: 1280882 - DNA, 15 bp, Homo sapiens
ctacggccagttctg

SEQ ID NO: 1280883 - DNA, 15 bp, Homo sapiens
tctacggccagttct

SEQ ID NO: 1280884 - DNA, 15 bp, Homo sapiens
ctctacggccagttc

SEQ ID NO: 1280885 - DNA, 15 bp, Homo sapiens
cctctacggccagtt

SEQ ID NO: 1280886 - DNA, 15 bp, Homo sapiens
ccctctacggccagt

SEQ ID NO: 1280887 - DNA, 15 bp, Homo sapiens
tccctctacggccag

SEQ ID NO: 1280888 - DNA, 15 bp, Homo sapiens
ctccctctacggcca

SEQ ID NO: 1280889 - DNA, 15 bp, Homo sapiens
actccctctacggcc

SEQ ID NO: 1280890 - DNA, 15 bp, Homo sapiens
cactccctctacggc

SEQ ID NO: 1280891 - DNA, 15 bp, Homo sapiens
ccactccctctacgg

SEQ ID NO: 1280892 - DNA, 15 bp, Homo sapiens
gccactccctctacg

SEQ ID NO: 1280893 - DNA, 15 bp, Homo sapiens
ggccactccctctac

SEQ ID NO: 1280894 - DNA, 15 bp, Homo sapiens
tggccactccctcta

SEQ ID NO: 1280895 - DNA, 15 bp, Homo sapiens
ctggccactccctct

SEQ ID NO: 1280896 - DNA, 15 bp, Homo sapiens
tctggccactccctc

SEQ ID NO: 1280897 - DNA, 15 bp, Homo sapiens
ctctggccactccct

SEQ ID NO: 1280898 - DNA, 15 bp, Homo sapiens
tctctggccactccc

SEQ ID NO: 1280899 - DNA, 15 bp, Homo sapiens
ctctctggccactcc

SEQ ID NO: 1280900 - DNA, 15 bp, Homo sapiens
tctctctggccactc

SEQ ID NO: 1280901 - DNA, 15 bp, Homo sapiens
ttctctctggccact

SEQ ID NO: 1280902 - DNA, 15 bp, Homo sapiens
gttctctctggccac

SEQ ID NO: 1280903 - DNA, 15 bp, Homo sapiens
ggttctctctggcca

SEQ ID NO: 1280904 - DNA, 15 bp, Homo sapiens
gggttctctctggcc

SEQ ID NO: 1280905 - DNA, 15 bp, Homo sapiens
tgggttctctctggc

SEQ ID NO: 1280906 - DNA, 15 bp, Homo sapiens
gtgggttctctctgg

SEQ ID NO: 1280907 - DNA, 15 bp, Homo sapiens
agtgggttctctctg

SEQ ID NO: 1280908 - DNA, 15 bp, Homo sapiens
cagtgggttctctct

SEQ ID NO: 1280909 - DNA, 15 bp, Homo sapiens
ccagtgggttctctc

SEQ ID NO: 1280910 - DNA, 15 bp, Homo sapiens
cccagtgggttctct

SEQ ID NO: 1280911 - DNA, 15 bp, Homo sapiens
ccccagtgggttctc

SEQ ID NO: 1280912 - DNA, 15 bp, Homo sapiens
tccccagtgggttct

SEQ ID NO: 1280913 - DNA, 15 bp, Homo sapiens
atccccagtgggttc

SEQ ID NO: 1280914 - DNA, 15 bp, Homo sapiens
catccccagtgggtt

SEQ ID NO: 1280915 - DNA, 15 bp, Homo sapiens
acatccccagtgggt

SEQ ID NO: 1280916 - DNA, 15 bp, Homo sapiens
cacatccccagtggg

SEQ ID NO: 1280917 - DNA, 15 bp, Homo sapiens
ccacatccccagtgg

SEQ ID NO: 1280918 - DNA, 15 bp, Homo sapiens
cccacatccccagtg

SEQ ID NO: 1280919 - DNA, 15 bp, Homo sapiens
ccccacatccccagt

SEQ ID NO: 1280920 - DNA, 15 bp, Homo sapiens
accccacatccccag

SEQ ID NO: 1280921 - DNA, 15 bp, Homo sapiens
aaccccacatcccca

SEQ ID NO: 1280922 - DNA, 15 bp, Homo sapiens
taaccccacatcccc

SEQ ID NO: 1280923 - DNA, 15 bp, Homo sapiens
ataaccccacatccc

SEQ ID NO: 1280924 - DNA, 15 bp, Homo sapiens
cataaccccacatcc

SEQ ID NO: 1280925 - DNA, 15 bp, Homo sapiens
tcataaccccacatc

SEQ ID NO: 1280926 - DNA, 15 bp, Homo sapiens
gtcataaccccacat

SEQ ID NO: 1280927 - DNA, 15 bp, Homo sapiens
cgtcataaccccaca

SEQ ID NO: 1280928 - DNA, 15 bp, Homo sapiens
ccgtcataaccccac

SEQ ID NO: 1280929 - DNA, 15 bp, Homo sapiens
gccgtcataacccca

SEQ ID NO: 1280930 - DNA, 15 bp, Homo sapiens
tgccgtcataacccc

SEQ ID NO: 1280931 - DNA, 15 bp, Homo sapiens
ctgccgtcataaccc

SEQ ID NO: 1280932 - DNA, 15 bp, Homo sapiens
gctgccgtcataacc

SEQ ID NO: 1280933 - DNA, 15 bp, Homo sapiens
ggctgccgtcataac

SEQ ID NO: 1280934 - DNA, 15 bp, Homo sapiens
gggctgccgtcataa

SEQ ID NO: 1280935 - DNA, 15 bp, Homo sapiens
ggggctgccgtcata

SEQ ID NO: 1280936 - DNA, 15 bp, Homo sapiens
tggggctgccgtcat

SEQ ID NO: 1280937 - DNA, 15 bp, Homo sapiens
ctggggctgccgtca

SEQ ID NO: 1280938 - DNA, 15 bp, Homo sapiens
gctggggctgccgtc

SEQ ID NO: 1280939 - DNA, 15 bp, Homo sapiens
tgctggggctgccgt

SEQ ID NO: 1280940 - DNA, 15 bp, Homo sapiens
atgctggggctgccg

SEQ ID NO: 1280941 - DNA, 15 bp, Homo sapiens
tatgctggggctgcc

SEQ ID NO: 1280942 - DNA, 15 bp, Homo sapiens
atatgctggggctgc

SEQ ID NO: 1280943 - DNA, 15 bp, Homo sapiens
gatatgctggggctg

SEQ ID NO: 1280944 - DNA, 15 bp, Homo sapiens
ggatatgctggggct

SEQ ID NO: 1280945 - DNA, 15 bp, Homo sapiens
aggatatgctggggc

SEQ ID NO: 1280946 - DNA, 15 bp, Homo sapiens
gaggatatgctgggg

SEQ ID NO: 1280947 - DNA, 15 bp, Homo sapiens
ggaggatatgctggg

SEQ ID NO: 1280948 - DNA, 15 bp, Homo sapiens
tggaggatatgctgg

SEQ ID NO: 1280949 - DNA, 15 bp, Homo sapiens
ttggaggatatgctg

SEQ ID NO: 1280950 - DNA, 15 bp, Homo sapiens
tttggaggatatgct

SEQ ID NO: 1280951 - DNA, 15 bp, Homo sapiens
atttggaggatatgc

SEQ ID NO: 1280952 - DNA, 15 bp, Homo sapiens
gatttggaggatatg

SEQ ID NO: 1280953 - DNA, 15 bp, Homo sapiens
ggatttggaggatat

SEQ ID NO: 1280954 - DNA, 15 bp, Homo sapiens
tggatttggaggata

SEQ ID NO: 1280955 - DNA, 15 bp, Homo sapiens
ctggatttggaggat

SEQ ID NO: 1280956 - DNA, 15 bp, Homo sapiens
gctggatttggagga

SEQ ID NO: 1280957 - DNA, 15 bp, Homo sapiens
ggctggatttggagg

SEQ ID NO: 1280958 - DNA, 15 bp, Homo sapiens
aggctggatttggag

SEQ ID NO: 1280959 - DNA, 15 bp, Homo sapiens
gaggctggatttgga

SEQ ID NO: 1280960 - DNA, 15 bp, Homo sapiens
agaggctggatttgg

SEQ ID NO: 1280961 - DNA, 15 bp, Homo sapiens
cagaggctggatttg

SEQ ID NO: 1280962 - DNA, 15 bp, Homo sapiens
gcagaggctggattt

SEQ ID NO: 1280963 - DNA, 15 bp, Homo sapiens
tgcagaggctggatt

SEQ ID NO: 1280964 - DNA, 15 bp, Homo sapiens
ttgcagaggctggat

SEQ ID NO: 1280965 - DNA, 15 bp, Homo sapiens
gttgcagaggctgga

SEQ ID NO: 1280966 - DNA, 15 bp, Homo sapiens
tgttgcagaggctgg

SEQ ID NO: 1280967 - DNA, 15 bp, Homo sapiens
ctgttgcagaggctg

SEQ ID NO: 1280968 - DNA, 15 bp, Homo sapiens
cctgttgcagaggct

SEQ ID NO: 1280969 - DNA, 15 bp, Homo sapiens
gcctgttgcagaggc

SEQ ID NO: 1280970 - DNA, 15 bp, Homo sapiens
cgcctgttgcagagg

SEQ ID NO: 1280971 - DNA, 15 bp, Homo sapiens
gcgcctgttgcagag

SEQ ID NO: 1280972 - DNA, 15 bp, Homo sapiens
agcgcctgttgcaga

SEQ ID NO: 1280973 - DNA, 15 bp, Homo sapiens
gagcgcctgttgcag

SEQ ID NO: 1280974 - DNA, 15 bp, Homo sapiens
agagcgcctgttgca

SEQ ID NO: 1280975 - DNA, 15 bp, Homo sapiens
gagagcgcctgttgc

SEQ ID NO: 1280976 - DNA, 15 bp, Homo sapiens
ggagagcgcctgttg

SEQ ID NO: 1280977 - DNA, 15 bp, Homo sapiens
gggagagcgcctgtt

SEQ ID NO: 1280978 - DNA, 15 bp, Homo sapiens
agggagagcgcctgt

SEQ ID NO: 1280979 - DNA, 15 bp, Homo sapiens
tagggagagcgcctg

SEQ ID NO: 1280980 - DNA, 15 bp, Homo sapiens
ttagggagagcgcct

SEQ ID NO: 1280981 - DNA, 15 bp, Homo sapiens
gttagggagagcgcc

SEQ ID NO: 1280982 - DNA, 15 bp, Homo sapiens
agttagggagagcgc

SEQ ID NO: 1280983 - DNA, 15 bp, Homo sapiens
aagttagggagagcg

SEQ ID NO: 1280984 - DNA, 15 bp, Homo sapiens
gaagttagggagagc

SEQ ID NO: 1280985 - DNA, 15 bp, Homo sapiens
agaagttagggagag

SEQ ID NO: 1280986 - DNA, 15 bp, Homo sapiens
cagaagttagggaga

SEQ ID NO: 1280987 - DNA, 15 bp, Homo sapiens
tcagaagttagggag

SEQ ID NO: 1280988 - DNA, 15 bp, Homo sapiens
atcagaagttaggga

SEQ ID NO: 1280989 - DNA, 15 bp, Homo sapiens
gatcagaagttaggg

SEQ ID NO: 1280990 - DNA, 15 bp, Homo sapiens
tgatcagaagttagg

SEQ ID NO: 1280991 - DNA, 15 bp, Homo sapiens
gtgatcagaagttag

SEQ ID NO: 1280992 - DNA, 15 bp, Homo sapiens
agtgatcagaagtta

SEQ ID NO: 1280993 - DNA, 15 bp, Homo sapiens
cagtgatcagaagtt

SEQ ID NO: 1280994 - DNA, 15 bp, Homo sapiens
acagtgatcagaagt

SEQ ID NO: 1280995 - DNA, 15 bp, Homo sapiens
cacagtgatcagaag

SEQ ID NO: 1280996 - DNA, 15 bp, Homo sapiens
gcacagtgatcagaa

SEQ ID NO: 1280997 - DNA, 15 bp, Homo sapiens
tgcacagtgatcaga

SEQ ID NO: 1280998 - DNA, 15 bp, Homo sapiens
ctgcacagtgatcag

SEQ ID NO: 1280999 - DNA, 15 bp, Homo sapiens
gctgcacagtgatca

SEQ ID NO: 1281000 - DNA, 15 bp, Homo sapiens
agctgcacagtgatc

SEQ ID NO: 1281001 - DNA, 15 bp, Homo sapiens
gagctgcacagtgat

SEQ ID NO: 1281002 - DNA, 15 bp, Homo sapiens
ggagctgcacagtga

SEQ ID NO: 1281003 - DNA, 15 bp, Homo sapiens
aggagctgcacagtg

SEQ ID NO: 1281004 - DNA, 15 bp, Homo sapiens
caggagctgcacagt

SEQ ID NO: 1281005 - DNA, 15 bp, Homo sapiens
tcaggagctgcacag

SEQ ID NO: 1281006 - DNA, 15 bp, Homo sapiens
gtcaggagctgcaca

SEQ ID NO: 1281007 - DNA, 15 bp, Homo sapiens
tgtcaggagctgcac

SEQ ID NO: 1281008 - DNA, 15 bp, Homo sapiens
atgtcaggagctgca

SEQ ID NO: 1281009 - DNA, 15 bp, Homo sapiens
catgtcaggagctgc

SEQ ID NO: 1281010 - DNA, 15 bp, Homo sapiens
tcatgtcaggagctg

SEQ ID NO: 1281011 - DNA, 15 bp, Homo sapiens
atcatgtcaggagct

SEQ ID NO: 1281012 - DNA, 15 bp, Homo sapiens
tatcatgtcaggagc

SEQ ID NO: 1281013 - DNA, 15 bp, Homo sapiens
gtatcatgtcaggag

SEQ ID NO: 1281014 - DNA, 15 bp, Homo sapiens
tgtatcatgtcagga

SEQ ID NO: 1281015 - DNA, 15 bp, Homo sapiens
ttgtatcatgtcagg

SEQ ID NO: 1281016 - DNA, 15 bp, Homo sapiens
cttgtatcatgtcag

SEQ ID NO: 1281017 - DNA, 15 bp, Homo sapiens
tcttgtatcatgtca

SEQ ID NO: 1281018 - DNA, 15 bp, Homo sapiens
ctcttgtatcatgtc

SEQ ID NO: 1281019 - DNA, 15 bp, Homo sapiens
cctcttgtatcatgt

SEQ ID NO: 1281020 - DNA, 15 bp, Homo sapiens
gcctcttgtatcatg

SEQ ID NO: 1281021 - DNA, 15 bp, Homo sapiens
ggcctcttgtatcat

SEQ ID NO: 1281022 - DNA, 15 bp, Homo sapiens
aggcctcttgtatca

SEQ ID NO: 1281023 - DNA, 15 bp, Homo sapiens
gaggcctcttgtatc

SEQ ID NO: 1281024 - DNA, 15 bp, Homo sapiens
ggaggcctcttgtat

SEQ ID NO: 1281025 - DNA, 15 bp, Homo sapiens
gggaggcctcttgta

SEQ ID NO: 1281026 - DNA, 15 bp, Homo sapiens
tgggaggcctcttgt

SEQ ID NO: 1281027 - DNA, 15 bp, Homo sapiens
ctgggaggcctcttg

SEQ ID NO: 1281028 - DNA, 15 bp, Homo sapiens
cctgggaggcctctt

SEQ ID NO: 1281029 - DNA, 15 bp, Homo sapiens
gcctgggaggcctct

SEQ ID NO: 1281030 - DNA, 15 bp, Homo sapiens
ggcctgggaggcctc

SEQ ID NO: 1281031 - DNA, 15 bp, Homo sapiens
aggcctgggaggcct

SEQ ID NO: 1281032 - DNA, 15 bp, Homo sapiens
gaggcctgggaggcc

SEQ ID NO: 1281033 - DNA, 15 bp, Homo sapiens
agaggcctgggaggc

SEQ ID NO: 1281034 - DNA, 15 bp, Homo sapiens
cagaggcctgggagg

SEQ ID NO: 1281035 - DNA, 15 bp, Homo sapiens
acagaggcctgggag

SEQ ID NO: 1281036 - DNA, 15 bp, Homo sapiens
cacagaggcctggga

SEQ ID NO: 1281037 - DNA, 15 bp, Homo sapiens
gcacagaggcctggg

SEQ ID NO: 1281038 - DNA, 15 bp, Homo sapiens
ggcacagaggcctgg

SEQ ID NO: 1281039 - DNA, 15 bp, Homo sapiens
aggcacagaggcctg

SEQ ID NO: 1281040 - DNA, 15 bp, Homo sapiens
caggcacagaggcct

SEQ ID NO: 1281041 - DNA, 15 bp, Homo sapiens
acaggcacagaggcc

SEQ ID NO: 1281042 - DNA, 15 bp, Homo sapiens
aacaggcacagaggc

SEQ ID NO: 1281043 - DNA, 15 bp, Homo sapiens
gaacaggcacagagg

SEQ ID NO: 1281044 - DNA, 15 bp, Homo sapiens
agaacaggcacagag

SEQ ID NO: 1281045 - DNA, 15 bp, Homo sapiens
tagaacaggcacaga

SEQ ID NO: 1281046 - DNA, 15 bp, Homo sapiens
ttagaacaggcacag

SEQ ID NO: 1281047 - DNA, 15 bp, Homo sapiens
cttagaacaggcaca

SEQ ID NO: 1281048 - DNA, 15 bp, Homo sapiens
gcttagaacaggcac

SEQ ID NO: 1281049 - DNA, 15 bp, Homo sapiens
tgcttagaacaggca

SEQ ID NO: 1281050 - DNA, 15 bp, Homo sapiens
atgcttagaacaggc

SEQ ID NO: 1281051 - DNA, 15 bp, Homo sapiens
catgcttagaacagg

SEQ ID NO: 1281052 - DNA, 15 bp, Homo sapiens
tcatgcttagaacag

SEQ ID NO: 1281053 - DNA, 15 bp, Homo sapiens
ctcatgcttagaaca

SEQ ID NO: 1281054 - DNA, 15 bp, Homo sapiens
gctcatgcttagaac

SEQ ID NO: 1281055 - DNA, 15 bp, Homo sapiens
ggctcatgcttagaa

SEQ ID NO: 1281056 - DNA, 15 bp, Homo sapiens
aggctcatgcttaga

SEQ ID NO: 1281057 - DNA, 15 bp, Homo sapiens
aaggctcatgcttag

SEQ ID NO: 1281058 - DNA, 15 bp, Homo sapiens
caaggctcatgctta

SEQ ID NO: 1281059 - DNA, 15 bp, Homo sapiens
ccaaggctcatgctt

SEQ ID NO: 1281060 - DNA, 15 bp, Homo sapiens
tccaaggctcatgct

SEQ ID NO: 1281061 - DNA, 15 bp, Homo sapiens
ctccaaggctcatgc

SEQ ID NO: 1281062 - DNA, 15 bp, Homo sapiens
tctccaaggctcatg

SEQ ID NO: 1281063 - DNA, 15 bp, Homo sapiens
ttctccaaggctcat

SEQ ID NO: 1281064 - DNA, 15 bp, Homo sapiens
cttctccaaggctca

SEQ ID NO: 1281065 - DNA, 15 bp, Homo sapiens
tcttctccaaggctc

SEQ ID NO: 1281066 - DNA, 15 bp, Homo sapiens
ctcttctccaaggct

SEQ ID NO: 1281067 - DNA, 15 bp, Homo sapiens
tctcttctccaaggc

SEQ ID NO: 1281068 - DNA, 15 bp, Homo sapiens
ctctcttctccaagg

SEQ ID NO: 1281069 - DNA, 15 bp, Homo sapiens
tctctcttctccaag

SEQ ID NO: 1281070 - DNA, 15 bp, Homo sapiens
ttctctcttctccaa

SEQ ID NO: 1281071 - DNA, 15 bp, Homo sapiens
attctctcttctcca

SEQ ID NO: 1281072 - DNA, 15 bp, Homo sapiens
cattctctcttctcc

SEQ ID NO: 1281073 - DNA, 15 bp, Homo sapiens
gcattctctcttctc

SEQ ID NO: 1281074 - DNA, 15 bp, Homo sapiens
agcattctctcttct

SEQ ID NO: 1281075 - DNA, 15 bp, Homo sapiens
gagcattctctcttc

SEQ ID NO: 1281076 - DNA, 15 bp, Homo sapiens
tgagcattctctctt

SEQ ID NO: 1281077 - DNA, 15 bp, Homo sapiens
ctgagcattctctct

SEQ ID NO: 1281078 - DNA, 15 bp, Homo sapiens
actgagcattctctc

SEQ ID NO: 1281079 - DNA, 15 bp, Homo sapiens
cactgagcattctct

SEQ ID NO: 1281080 - DNA, 15 bp, Homo sapiens
gcactgagcattctc

SEQ ID NO: 1281081 - DNA, 15 bp, Homo sapiens
ggcactgagcattct

SEQ ID NO: 1281082 - DNA, 15 bp, Homo sapiens
tggcactgagcattc

SEQ ID NO: 1281083 - DNA, 15 bp, Homo sapiens
ctggcactgagcatt

SEQ ID NO: 1281084 - DNA, 15 bp, Homo sapiens
gctggcactgagcat

SEQ ID NO: 1281085 - DNA, 15 bp, Homo sapiens
agctggcactgagca

SEQ ID NO: 1281086 - DNA, 15 bp, Homo sapiens
gagctggcactgagc

SEQ ID NO: 1281087 - DNA, 15 bp, Homo sapiens
tgagctggcactgag

SEQ ID NO: 1281088 - DNA, 15 bp, Homo sapiens
atgagctggcactga

SEQ ID NO: 1281089 - DNA, 15 bp, Homo sapiens
catgagctggcactg

SEQ ID NO: 1281090 - DNA, 15 bp, Homo sapiens
acatgagctggcact

SEQ ID NO: 1281091 - DNA, 15 bp, Homo sapiens
cacatgagctggcac

SEQ ID NO: 1281092 - DNA, 15 bp, Homo sapiens
acacatgagctggca

SEQ ID NO: 1281093 - DNA, 15 bp, Homo sapiens
tacacatgagctggc

SEQ ID NO: 1281094 - DNA, 15 bp, Homo sapiens
atacacatgagctgg

SEQ ID NO: 1281095 - DNA, 15 bp, Homo sapiens
gatacacatgagctg

SEQ ID NO: 1281096 - DNA, 15 bp, Homo sapiens
ggatacacatgagct

SEQ ID NO: 1281097 - DNA, 15 bp, Homo sapiens
gggatacacatgagc

SEQ ID NO: 1281098 - DNA, 15 bp, Homo sapiens
tgggatacacatgag

SEQ ID NO: 1281099 - DNA, 15 bp, Homo sapiens
atgggatacacatga

SEQ ID NO: 1281100 - DNA, 15 bp, Homo sapiens
catgggatacacatg

SEQ ID NO: 1281101 - DNA, 15 bp, Homo sapiens
ccatgggatacacat

SEQ ID NO: 1281102 - DNA, 15 bp, Homo sapiens
tccatgggatacaca

SEQ ID NO: 1281103 - DNA, 15 bp, Homo sapiens
gtccatgggatacac

SEQ ID NO: 1281104 - DNA, 15 bp, Homo sapiens
tgtccatgggataca

SEQ ID NO: 1281105 - DNA, 15 bp, Homo sapiens
ttgtccatgggatac

SEQ ID NO: 1281106 - DNA, 15 bp, Homo sapiens
cttgtccatgggata

SEQ ID NO: 1281107 - DNA, 15 bp, Homo sapiens
ccttgtccatgggat

SEQ ID NO: 1281108 - DNA, 15 bp, Homo sapiens
tccttgtccatggga

SEQ ID NO: 1281109 - DNA, 15 bp, Homo sapiens
gtccttgtccatggg

SEQ ID NO: 1281110 - DNA, 15 bp, Homo sapiens
agtccttgtccatgg

SEQ ID NO: 1281111 - DNA, 15 bp, Homo sapiens
tagtccttgtccatg

SEQ ID NO: 1281112 - DNA, 15 bp, Homo sapiens
ttagtccttgtccat

SEQ ID NO: 1281113 - DNA, 15 bp, Homo sapiens
attagtccttgtcca

SEQ ID NO: 1281114 - DNA, 15 bp, Homo sapiens
tattagtccttgtcc

SEQ ID NO: 1281115 - DNA, 15 bp, Homo sapiens
ctattagtccttgtc

SEQ ID NO: 1281116 - DNA, 15 bp, Homo sapiens
cctattagtccttgt

SEQ ID NO: 1281117 - DNA, 15 bp, Homo sapiens
tcctattagtccttg

SEQ ID NO: 1281118 - DNA, 15 bp, Homo sapiens
gtcctattagtcctt

SEQ ID NO: 1281119 - DNA, 15 bp, Homo sapiens
ggtcctattagtcct

SEQ ID NO: 1281120 - DNA, 15 bp, Homo sapiens
gggtcctattagtcc

SEQ ID NO: 1281121 - DNA, 15 bp, Homo sapiens
agggtcctattagtc

SEQ ID NO: 1281122 - DNA, 15 bp, Homo sapiens
cagggtcctattagt

SEQ ID NO: 1281123 - DNA, 15 bp, Homo sapiens
tcagggtcctattag

SEQ ID NO: 1281124 - DNA, 15 bp, Homo sapiens
ctcagggtcctatta

SEQ ID NO: 1281125 - DNA, 15 bp, Homo sapiens
cctcagggtcctatt

SEQ ID NO: 1281126 - DNA, 15 bp, Homo sapiens
tcctcagggtcctat

SEQ ID NO: 1281127 - DNA, 15 bp, Homo sapiens
gtcctcagggtccta

SEQ ID NO: 1281128 - DNA, 15 bp, Homo sapiens
agtcctcagggtcct

SEQ ID NO: 1281129 - DNA, 15 bp, Homo sapiens
aagtcctcagggtcc

SEQ ID NO: 1281130 - DNA, 15 bp, Homo sapiens
taagtcctcagggtc

SEQ ID NO: 1281131 - DNA, 15 bp, Homo sapiens
ctaagtcctcagggt

SEQ ID NO: 1281132 - DNA, 15 bp, Homo sapiens
tctaagtcctcaggg

SEQ ID NO: 1281133 - DNA, 15 bp, Homo sapiens
ttctaagtcctcagg

SEQ ID NO: 1281134 - DNA, 15 bp, Homo sapiens
tttctaagtcctcag

SEQ ID NO: 1281135 - DNA, 15 bp, Homo sapiens
ttttctaagtcctca

SEQ ID NO: 1281136 - DNA, 15 bp, Homo sapiens
cttttctaagtcctc

SEQ ID NO: 1281137 - DNA, 15 bp, Homo sapiens
gcttttctaagtcct

SEQ ID NO: 1281138 - DNA, 15 bp, Homo sapiens
ggcttttctaagtcc

SEQ ID NO: 1281139 - DNA, 15 bp, Homo sapiens
aggcttttctaagtc

SEQ ID NO: 1281140 - DNA, 15 bp, Homo sapiens
aaggcttttctaagt

SEQ ID NO: 1281141 - DNA, 15 bp, Homo sapiens
gaaggcttttctaag

SEQ ID NO: 1281142 - DNA, 15 bp, Homo sapiens
agaaggcttttctaa

SEQ ID NO: 1281143 - DNA, 15 bp, Homo sapiens
gagaaggcttttcta

SEQ ID NO: 1281144 - DNA, 15 bp, Homo sapiens
agagaaggcttttct

SEQ ID NO: 1281145 - DNA, 15 bp, Homo sapiens
cagagaaggcttttc

SEQ ID NO: 1281146 - DNA, 15 bp, Homo sapiens
acagagaaggctttt

SEQ ID NO: 1281147 - DNA, 15 bp, Homo sapiens
aacagagaaggcttt

SEQ ID NO: 1281148 - DNA, 15 bp, Homo sapiens
caacagagaaggctt

SEQ ID NO: 1281149 - DNA, 15 bp, Homo sapiens
gcaacagagaaggct

SEQ ID NO: 1281150 - DNA, 15 bp, Homo sapiens
ggcaacagagaaggc

SEQ ID NO: 1281151 - DNA, 15 bp, Homo sapiens
tggcaacagagaagg

SEQ ID NO: 1281152 - DNA, 15 bp, Homo sapiens
ttggcaacagagaag

SEQ ID NO: 1281153 - DNA, 15 bp, Homo sapiens
gttggcaacagagaa

SEQ ID NO: 1281154 - DNA, 15 bp, Homo sapiens
agttggcaacagaga

SEQ ID NO: 1281155 - DNA, 15 bp, Homo sapiens
cagttggcaacagag

SEQ ID NO: 1281156 - DNA, 15 bp, Homo sapiens
acagttggcaacaga

SEQ ID NO: 1281157 - DNA, 15 bp, Homo sapiens
cacagttggcaacag

SEQ ID NO: 1281158 - DNA, 15 bp, Homo sapiens
gcacagttggcaaca

SEQ ID NO: 1281159 - DNA, 15 bp, Homo sapiens
agcacagttggcaac

SEQ ID NO: 1281160 - DNA, 15 bp, Homo sapiens
tagcacagttggcaa

SEQ ID NO: 1281161 - DNA, 15 bp, Homo sapiens
atagcacagttggca

SEQ ID NO: 1281162 - DNA, 15 bp, Homo sapiens
aatagcacagttggc

SEQ ID NO: 1281163 - DNA, 15 bp, Homo sapiens
aaatagcacagttgg

SEQ ID NO: 1281164 - DNA, 15 bp, Homo sapiens
aaaatagcacagttg

SEQ ID NO: 1281165 - DNA, 15 bp, Homo sapiens
aaaaatagcacagtt

SEQ ID NO: 1281166 - DNA, 15 bp, Homo sapiens
taaaaatagcacagt

SEQ ID NO: 1281167 - DNA, 15 bp, Homo sapiens
gtaaaaatagcacag

SEQ ID NO: 1281168 - DNA, 15 bp, Homo sapiens
ggtaaaaatagcaca

SEQ ID NO: 1281169 - DNA, 15 bp, Homo sapiens
aggtaaaaatagcac

SEQ ID NO: 1281170 - DNA, 15 bp, Homo sapiens
gaggtaaaaatagca

SEQ ID NO: 1281171 - DNA, 15 bp, Homo sapiens
ggaggtaaaaatagc

SEQ ID NO: 1281172 - DNA, 15 bp, Homo sapiens
gggaggtaaaaatag

SEQ ID NO: 1281173 - DNA, 15 bp, Homo sapiens
agggaggtaaaaata

SEQ ID NO: 1281174 - DNA, 15 bp, Homo sapiens
gagggaggtaaaaat

SEQ ID NO: 1281175 - DNA, 15 bp, Homo sapiens
ggagggaggtaaaaa

SEQ ID NO: 1281176 - DNA, 15 bp, Homo sapiens
gggagggaggtaaaa

SEQ ID NO: 1281177 - DNA, 15 bp, Homo sapiens
tgggagggaggtaaa

SEQ ID NO: 1281178 - DNA, 15 bp, Homo sapiens
gtgggagggaggtaa

SEQ ID NO: 1281179 - DNA, 15 bp, Homo sapiens
tgtgggagggaggta

SEQ ID NO: 1281180 - DNA, 15 bp, Homo sapiens
ctgtgggagggaggt

SEQ ID NO: 1281181 - DNA, 15 bp, Homo sapiens
gctgtgggagggagg

SEQ ID NO: 1281182 - DNA, 15 bp, Homo sapiens
agctgtgggagggag

SEQ ID NO: 1281183 - DNA, 15 bp, Homo sapiens
gagctgtgggaggga

SEQ ID NO: 1281184 - DNA, 15 bp, Homo sapiens
ggagctgtgggaggg

SEQ ID NO: 1281185 - DNA, 15 bp, Homo sapiens
aggagctgtgggagg

SEQ ID NO: 1281186 - DNA, 15 bp, Homo sapiens
caggagctgtgggag

SEQ ID NO: 1281187 - DNA, 15 bp, Homo sapiens
gcaggagctgtggga

SEQ ID NO: 1281188 - DNA, 15 bp, Homo sapiens
agcaggagctgtggg

SEQ ID NO: 1281189 - DNA, 15 bp, Homo sapiens
aagcaggagctgtgg

SEQ ID NO: 1281190 - DNA, 15 bp, Homo sapiens
aaagcaggagctgtg

SEQ ID NO: 1281191 - DNA, 15 bp, Homo sapiens
gaaagcaggagctgt

SEQ ID NO: 1281192 - DNA, 15 bp, Homo sapiens
ggaaagcaggagctg

SEQ ID NO: 1281193 - DNA, 15 bp, Homo sapiens
gggaaagcaggagct

SEQ ID NO: 1281194 - DNA, 15 bp, Homo sapiens
ggggaaagcaggagc

SEQ ID NO: 1281195 - DNA, 15 bp, Homo sapiens
tggggaaagcaggag

SEQ ID NO: 1281196 - DNA, 15 bp, Homo sapiens
ctggggaaagcagga

SEQ ID NO: 1281197 - DNA, 15 bp, Homo sapiens
cctggggaaagcagg

SEQ ID NO: 1281198 - DNA, 15 bp, Homo sapiens
acctggggaaagcag

SEQ ID NO: 1281199 - DNA, 15 bp, Homo sapiens
tacctggggaaagca

SEQ ID NO: 1281200 - DNA, 15 bp, Homo sapiens
atacctggggaaagc

SEQ ID NO: 1281201 - DNA, 15 bp, Homo sapiens
aatacctggggaaag

SEQ ID NO: 1281202 - DNA, 15 bp, Homo sapiens
aaatacctggggaaa

SEQ ID NO: 1281203 - DNA, 15 bp, Homo sapiens
caaatacctggggaa

SEQ ID NO: 1281204 - DNA, 15 bp, Homo sapiens
acaaatacctgggga

SEQ ID NO: 1281205 - DNA, 15 bp, Homo sapiens
gacaaatacctgggg

SEQ ID NO: 1281206 - DNA, 15 bp, Homo sapiens
tgacaaatacctggg

SEQ ID NO: 1281207 - DNA, 15 bp, Homo sapiens
ctgacaaatacctgg

SEQ ID NO: 1281208 - DNA, 15 bp, Homo sapiens
gctgacaaatacctg

SEQ ID NO: 1281209 - DNA, 15 bp, Homo sapiens
tgctgacaaatacct

SEQ ID NO: 1281210 - DNA, 15 bp, Homo sapiens
ctgctgacaaatacc

SEQ ID NO: 1281211 - DNA, 15 bp, Homo sapiens
tctgctgacaaatac

SEQ ID NO: 1281212 - DNA, 15 bp, Homo sapiens
ctctgctgacaaata

SEQ ID NO: 1281213 - DNA, 15 bp, Homo sapiens
gctctgctgacaaat

SEQ ID NO: 1281214 - DNA, 15 bp, Homo sapiens
cgctctgctgacaaa

SEQ ID NO: 1281215 - DNA, 15 bp, Homo sapiens
acgctctgctgacaa

SEQ ID NO: 1281216 - DNA, 15 bp, Homo sapiens
gacgctctgctgaca

SEQ ID NO: 1281217 - DNA, 15 bp, Homo sapiens
agacgctctgctgac

SEQ ID NO: 1281218 - DNA, 15 bp, Homo sapiens
aagacgctctgctga

SEQ ID NO: 1281219 - DNA, 15 bp, Homo sapiens
caagacgctctgctg

SEQ ID NO: 1281220 - DNA, 15 bp, Homo sapiens
gcaagacgctctgct

SEQ ID NO: 1281221 - DNA, 15 bp, Homo sapiens
tgcaagacgctctgc

SEQ ID NO: 1281222 - DNA, 15 bp, Homo sapiens
gtgcaagacgctctg

SEQ ID NO: 1281223 - DNA, 15 bp, Homo sapiens
ggtgcaagacgctct

SEQ ID NO: 1281224 - DNA, 15 bp, Homo sapiens
aggtgcaagacgctc

SEQ ID NO: 1281225 - DNA, 15 bp, Homo sapiens
caggtgcaagacgct

SEQ ID NO: 1281226 - DNA, 15 bp, Homo sapiens
gcaggtgcaagacgc

SEQ ID NO: 1281227 - DNA, 15 bp, Homo sapiens
tgcaggtgcaagacg

SEQ ID NO: 1281228 - DNA, 15 bp, Homo sapiens
atgcaggtgcaagac

SEQ ID NO: 1281229 - DNA, 15 bp, Homo sapiens
catgcaggtgcaaga

SEQ ID NO: 1281230 - DNA, 15 bp, Homo sapiens
ccatgcaggtgcaag

SEQ ID NO: 1281231 - DNA, 15 bp, Homo sapiens
tccatgcaggtgcaa

SEQ ID NO: 1281232 - DNA, 15 bp, Homo sapiens
ttccatgcaggtgca

SEQ ID NO: 1281233 - DNA, 15 bp, Homo sapiens
tttccatgcaggtgc

SEQ ID NO: 1281234 - DNA, 15 bp, Homo sapiens
ctttccatgcaggtg

SEQ ID NO: 1281235 - DNA, 15 bp, Homo sapiens
actttccatgcaggt

SEQ ID NO: 1281236 - DNA, 15 bp, Homo sapiens
cactttccatgcagg

SEQ ID NO: 1281237 - DNA, 15 bp, Homo sapiens
ccactttccatgcag

SEQ ID NO: 1281238 - DNA, 15 bp, Homo sapiens
gccactttccatgca

SEQ ID NO: 1281239 - DNA, 15 bp, Homo sapiens
tgccactttccatgc

SEQ ID NO: 1281240 - DNA, 15 bp, Homo sapiens
ctgccactttccatg

SEQ ID NO: 1281241 - DNA, 15 bp, Homo sapiens
actgccactttccat

SEQ ID NO: 1281242 - DNA, 15 bp, Homo sapiens
aactgccactttcca

SEQ ID NO: 1281243 - DNA, 15 bp, Homo sapiens
caactgccactttcc

SEQ ID NO: 1281244 - DNA, 15 bp, Homo sapiens
ccaactgccactttc

SEQ ID NO: 1281245 - DNA, 15 bp, Homo sapiens
cccaactgccacttt

SEQ ID NO: 1281246 - DNA, 15 bp, Homo sapiens
ccccaactgccactt

SEQ ID NO: 1281247 - DNA, 15 bp, Homo sapiens
gccccaactgccact

SEQ ID NO: 1281248 - DNA, 15 bp, Homo sapiens
ggccccaactgccac

SEQ ID NO: 1281249 - DNA, 15 bp, Homo sapiens
gggccccaactgcca

SEQ ID NO: 1281250 - DNA, 15 bp, Homo sapiens
tgggccccaactgcc

SEQ ID NO: 1281251 - DNA, 15 bp, Homo sapiens
ctgggccccaactgc

SEQ ID NO: 1281252 - DNA, 15 bp, Homo sapiens
cctgggccccaactg

SEQ ID NO: 1281253 - DNA, 15 bp, Homo sapiens
tcctgggccccaact

SEQ ID NO: 1281254 - DNA, 15 bp, Homo sapiens
atcctgggccccaac

SEQ ID NO: 1281255 - DNA, 15 bp, Homo sapiens
catcctgggccccaa

SEQ ID NO: 1281256 - DNA, 15 bp, Homo sapiens
ccatcctgggcccca

SEQ ID NO: 1281257 - DNA, 15 bp, Homo sapiens
gccatcctgggcccc

SEQ ID NO: 1281258 - DNA, 15 bp, Homo sapiens
ggccatcctgggccc

SEQ ID NO: 1281259 - DNA, 15 bp, Homo sapiens
aggccatcctgggcc

SEQ ID NO: 1281260 - DNA, 15 bp, Homo sapiens
aaggccatcctgggc

SEQ ID NO: 1281261 - DNA, 15 bp, Homo sapiens
caaggccatcctggg

SEQ ID NO: 1281262 - DNA, 15 bp, Homo sapiens
acaaggccatcctgg

SEQ ID NO: 1281263 - DNA, 15 bp, Homo sapiens
cacaaggccatcctg

SEQ ID NO: 1281264 - DNA, 15 bp, Homo sapiens
gcacaaggccatcct

SEQ ID NO: 1281265 - DNA, 15 bp, Homo sapiens
agcacaaggccatcc

SEQ ID NO: 1281266 - DNA, 15 bp, Homo sapiens
cagcacaaggccatc

SEQ ID NO: 1281267 - DNA, 15 bp, Homo sapiens
acagcacaaggccat

SEQ ID NO: 1281268 - DNA, 15 bp, Homo sapiens
cacagcacaaggcca

SEQ ID NO: 1281269 - DNA, 15 bp, Homo sapiens
gcacagcacaaggcc

SEQ ID NO: 1281270 - DNA, 15 bp, Homo sapiens
tgcacagcacaaggc

SEQ ID NO: 1281271 - DNA, 15 bp, Homo sapiens
ctgcacagcacaagg

SEQ ID NO: 1281272 - DNA, 15 bp, Homo sapiens
cctgcacagcacaag

SEQ ID NO: 1281273 - DNA, 15 bp, Homo sapiens
gcctgcacagcacaa

SEQ ID NO: 1281274 - DNA, 15 bp, Homo sapiens
ggcctgcacagcaca

SEQ ID NO: 1281275 - DNA, 15 bp, Homo sapiens
tggcctgcacagcac

SEQ ID NO: 1281276 - DNA, 15 bp, Homo sapiens
gtggcctgcacagca

SEQ ID NO: 1281277 - DNA, 15 bp, Homo sapiens
tgtggcctgcacagc

SEQ ID NO: 1281278 - DNA, 15 bp, Homo sapiens
ctgtggcctgcacag

SEQ ID NO: 1281279 - DNA, 15 bp, Homo sapiens
gctgtggcctgcaca

SEQ ID NO: 1281280 - DNA, 15 bp, Homo sapiens
tgctgtggcctgcac

SEQ ID NO: 1281281 - DNA, 15 bp, Homo sapiens
ctgctgtggcctgca

SEQ ID NO: 1281282 - DNA, 15 bp, Homo sapiens
actgctgtggcctgc

SEQ ID NO: 1281283 - DNA, 15 bp, Homo sapiens
gactgctgtggcctg

SEQ ID NO: 1281284 - DNA, 15 bp, Homo sapiens
agactgctgtggcct

SEQ ID NO: 1281285 - DNA, 15 bp, Homo sapiens
gagactgctgtggcc

SEQ ID NO: 1281286 - DNA, 15 bp, Homo sapiens
ggagactgctgtggc

SEQ ID NO: 1281287 - DNA, 15 bp, Homo sapiens
aggagactgctgtgg

SEQ ID NO: 1281288 - DNA, 15 bp, Homo sapiens
aaggagactgctgtg

SEQ ID NO: 1281289 - DNA, 15 bp, Homo sapiens
taaggagactgctgt

SEQ ID NO: 1281290 - DNA, 15 bp, Homo sapiens
gtaaggagactgctg

SEQ ID NO: 1281291 - DNA, 15 bp, Homo sapiens
ggtaaggagactgct

SEQ ID NO: 1281292 - DNA, 15 bp, Homo sapiens
tggtaaggagactgc

SEQ ID NO: 1281293 - DNA, 15 bp, Homo sapiens
ctggtaaggagactg

SEQ ID NO: 1281294 - DNA, 15 bp, Homo sapiens
cctggtaaggagact

SEQ ID NO: 1281295 - DNA, 15 bp, Homo sapiens
gcctggtaaggagac

SEQ ID NO: 1281296 - DNA, 15 bp, Homo sapiens
ggcctggtaaggaga

SEQ ID NO: 1281297 - DNA, 15 bp, Homo sapiens
aggcctggtaaggag

SEQ ID NO: 1281298 - DNA, 15 bp, Homo sapiens
caggcctggtaagga

SEQ ID NO: 1281299 - DNA, 15 bp, Homo sapiens
ccaggcctggtaagg

SEQ ID NO: 1281300 - DNA, 15 bp, Homo sapiens
gccaggcctggtaag

SEQ ID NO: 1281301 - DNA, 15 bp, Homo sapiens
cgccaggcctggtaa

SEQ ID NO: 1281302 - DNA, 15 bp, Homo sapiens
ccgccaggcctggta

SEQ ID NO: 1281303 - DNA, 15 bp, Homo sapiens
gccgccaggcctggt

SEQ ID NO: 1281304 - DNA, 15 bp, Homo sapiens
ggccgccaggcctgg

SEQ ID NO: 1281305 - DNA, 15 bp, Homo sapiens
tggccgccaggcctg

SEQ ID NO: 1281306 - DNA, 15 bp, Homo sapiens
ctggccgccaggcct

SEQ ID NO: 1281307 - DNA, 15 bp, Homo sapiens
cctggccgccaggcc

SEQ ID NO: 1281308 - DNA, 15 bp, Homo sapiens
gcctggccgccaggc

SEQ ID NO: 1281309 - DNA, 15 bp, Homo sapiens
ggcctggccgccagg

SEQ ID NO: 1281310 - DNA, 15 bp, Homo sapiens
gggcctggccgccag

SEQ ID NO: 1281311 - DNA, 15 bp, Homo sapiens
cgggcctggccgcca

SEQ ID NO: 1281312 - DNA, 15 bp, Homo sapiens
ccgggcctggccgcc

SEQ ID NO: 1281313 - DNA, 15 bp, Homo sapiens
gccgggcctggccgc

SEQ ID NO: 1281314 - DNA, 15 bp, Homo sapiens
cgccgggcctggccg

SEQ ID NO: 1281315 - DNA, 15 bp, Homo sapiens
ccgccgggcctggcc

SEQ ID NO: 1281316 - DNA, 15 bp, Homo sapiens
gccgccgggcctggc

SEQ ID NO: 1281317 - DNA, 15 bp, Homo sapiens
ggccgccgggcctgg

SEQ ID NO: 1281318 - DNA, 15 bp, Homo sapiens
tggccgccgggcctg

SEQ ID NO: 1281319 - DNA, 15 bp, Homo sapiens
ctggccgccgggcct

SEQ ID NO: 1281320 - DNA, 15 bp, Homo sapiens
cctggccgccgggcc

SEQ ID NO: 1281321 - DNA, 15 bp, Homo sapiens
gcctggccgccgggc

SEQ ID NO: 1281322 - DNA, 15 bp, Homo sapiens
ggcctggccgccggg

SEQ ID NO: 1281323 - DNA, 15 bp, Homo sapiens
gggcctggccgccgg

SEQ ID NO: 1281324 - DNA, 15 bp, Homo sapiens
tgggcctggccgccg

SEQ ID NO: 1281325 - DNA, 15 bp, Homo sapiens
ctgggcctggccgcc

SEQ ID NO: 1281326 - DNA, 15 bp, Homo sapiens
gctgggcctggccgc

SEQ ID NO: 1281327 - DNA, 15 bp, Homo sapiens
ggctgggcctggccg

SEQ ID NO: 1281328 - DNA, 15 bp, Homo sapiens
aggctgggcctggcc

SEQ ID NO: 1281329 - DNA, 15 bp, Homo sapiens
gaggctgggcctggc

SEQ ID NO: 1281330 - DNA, 15 bp, Homo sapiens
agaggctgggcctgg

SEQ ID NO: 1281331 - DNA, 15 bp, Homo sapiens
cagaggctgggcctg

SEQ ID NO: 1281332 - DNA, 15 bp, Homo sapiens
tcagaggctgggcct

SEQ ID NO: 1281333 - DNA, 15 bp, Homo sapiens
ctcagaggctgggcc

SEQ ID NO: 1281334 - DNA, 15 bp, Homo sapiens
cctcagaggctgggc

SEQ ID NO: 1281335 - DNA, 15 bp, Homo sapiens
gcctcagaggctggg

SEQ ID NO: 1281336 - DNA, 15 bp, Homo sapiens
agcctcagaggctgg

SEQ ID NO: 1281337 - DNA, 15 bp, Homo sapiens
cagcctcagaggctg

SEQ ID NO: 1281338 - DNA, 15 bp, Homo sapiens
ccagcctcagaggct

SEQ ID NO: 1281339 - DNA, 15 bp, Homo sapiens
gccagcctcagaggc

SEQ ID NO: 1281340 - DNA, 15 bp, Homo sapiens
tgccagcctcagagg

SEQ ID NO: 1281341 - DNA, 15 bp, Homo sapiens
ctgccagcctcagag

SEQ ID NO: 1281342 - DNA, 15 bp, Homo sapiens
cctgccagcctcaga

SEQ ID NO: 1281343 - DNA, 15 bp, Homo sapiens
gcctgccagcctcag

SEQ ID NO: 1281344 - DNA, 15 bp, Homo sapiens
agcctgccagcctca

SEQ ID NO: 1281345 - DNA, 15 bp, Homo sapiens
cagcctgccagcctc

SEQ ID NO: 1281346 - DNA, 15 bp, Homo sapiens
acagcctgccagcct

SEQ ID NO: 1281347 - DNA, 15 bp, Homo sapiens
cacagcctgccagcc

SEQ ID NO: 1281348 - DNA, 15 bp, Homo sapiens
ccacagcctgccagc

SEQ ID NO: 1281349 - DNA, 15 bp, Homo sapiens
accacagcctgccag

SEQ ID NO: 1281350 - DNA, 15 bp, Homo sapiens
caccacagcctgcca

SEQ ID NO: 1281351 - DNA, 15 bp, Homo sapiens
tcaccacagcctgcc

SEQ ID NO: 1281352 - DNA, 15 bp, Homo sapiens
ctcaccacagcctgc

SEQ ID NO: 1281353 - DNA, 15 bp, Homo sapiens
cctcaccacagcctg

SEQ ID NO: 1281354 - DNA, 15 bp, Homo sapiens
tcctcaccacagcct

SEQ ID NO: 1281355 - DNA, 15 bp, Homo sapiens
atcctcaccacagcc

SEQ ID NO: 1281356 - DNA, 15 bp, Homo sapiens
catcctcaccacagc

SEQ ID NO: 1281357 - DNA, 15 bp, Homo sapiens
ccatcctcaccacag

SEQ ID NO: 1281358 - DNA, 15 bp, Homo sapiens
accatcctcaccaca

SEQ ID NO: 1281359 - DNA, 15 bp, Homo sapiens
aaccatcctcaccac

SEQ ID NO: 1281360 - DNA, 15 bp, Homo sapiens
caaccatcctcacca

SEQ ID NO: 1281361 - DNA, 15 bp, Homo sapiens
gcaaccatcctcacc

SEQ ID NO: 1281362 - DNA, 15 bp, Homo sapiens
tgcaaccatcctcac

SEQ ID NO: 1281363 - DNA, 15 bp, Homo sapiens
atgcaaccatcctca

SEQ ID NO: 1281364 - DNA, 15 bp, Homo sapiens
tatgcaaccatcctc

SEQ ID NO: 1281365 - DNA, 15 bp, Homo sapiens
ttatgcaaccatcct

SEQ ID NO: 1281366 - DNA, 15 bp, Homo sapiens
gttatgcaaccatcc

SEQ ID NO: 1281367 - DNA, 15 bp, Homo sapiens
agttatgcaaccatc

SEQ ID NO: 1281368 - DNA, 15 bp, Homo sapiens
cagttatgcaaccat

SEQ ID NO: 1281369 - DNA, 15 bp, Homo sapiens
ccagttatgcaacca

SEQ ID NO: 1281370 - DNA, 15 bp, Homo sapiens
gccagttatgcaacc

SEQ ID NO: 1281371 - DNA, 15 bp, Homo sapiens
ggccagttatgcaac

SEQ ID NO: 1281372 - DNA, 15 bp, Homo sapiens
aggccagttatgcaa

SEQ ID NO: 1281373 - DNA, 15 bp, Homo sapiens
aaggccagttatgca

SEQ ID NO: 1281374 - DNA, 15 bp, Homo sapiens
aaaggccagttatgc

SEQ ID NO: 1281375 - DNA, 15 bp, Homo sapiens
gaaaggccagttatg

SEQ ID NO: 1281376 - DNA, 15 bp, Homo sapiens
agaaaggccagttat

SEQ ID NO: 1281377 - DNA, 15 bp, Homo sapiens
cagaaaggccagtta

SEQ ID NO: 1281378 - DNA, 15 bp, Homo sapiens
gcagaaaggccagtt

SEQ ID NO: 1281379 - DNA, 15 bp, Homo sapiens
ggcagaaaggccagt

SEQ ID NO: 1281380 - DNA, 15 bp, Homo sapiens
cggcagaaaggccag

SEQ ID NO: 1281381 - DNA, 15 bp, Homo sapiens
gcggcagaaaggcca

SEQ ID NO: 1281382 - DNA, 15 bp, Homo sapiens
agcggcagaaaggcc

SEQ ID NO: 1281383 - DNA, 15 bp, Homo sapiens
cagcggcagaaaggc

SEQ ID NO: 1281384 - DNA, 15 bp, Homo sapiens
ccagcggcagaaagg

SEQ ID NO: 1281385 - DNA, 15 bp, Homo sapiens
accagcggcagaaag

SEQ ID NO: 1281386 - DNA, 15 bp, Homo sapiens
aaccagcggcagaaa

SEQ ID NO: 1281387 - DNA, 15 bp, Homo sapiens
gaaccagcggcagaa

SEQ ID NO: 1281388 - DNA, 15 bp, Homo sapiens
agaaccagcggcaga

SEQ ID NO: 1281389 - DNA, 15 bp, Homo sapiens
cagaaccagcggcag

SEQ ID NO: 1281390 - DNA, 15 bp, Homo sapiens
ccagaaccagcggca

SEQ ID NO: 1281391 - DNA, 15 bp, Homo sapiens
cccagaaccagcggc

SEQ ID NO: 1281392 - DNA, 15 bp, Homo sapiens
acccagaaccagcgg

SEQ ID NO: 1281393 - DNA, 15 bp, Homo sapiens
cacccagaaccagcg

SEQ ID NO: 1281394 - DNA, 15 bp, Homo sapiens
tcacccagaaccagc

SEQ ID NO: 1281395 - DNA, 15 bp, Homo sapiens
ctcacccagaaccag

SEQ ID NO: 1281396 - DNA, 15 bp, Homo sapiens
cctcacccagaacca

SEQ ID NO: 1281397 - DNA, 15 bp, Homo sapiens
acctcacccagaacc

SEQ ID NO: 1281398 - DNA, 15 bp, Homo sapiens
gacctcacccagaac

SEQ ID NO: 1281399 - DNA, 15 bp, Homo sapiens
cgacctcacccagaa

SEQ ID NO: 1281400 - DNA, 15 bp, Homo sapiens
tcgacctcacccaga

SEQ ID NO: 1281401 - DNA, 15 bp, Homo sapiens
ctcgacctcacccag

SEQ ID NO: 1281402 - DNA, 15 bp, Homo sapiens
gctcgacctcaccca

SEQ ID NO: 1281403 - DNA, 15 bp, Homo sapiens
ggctcgacctcaccc

SEQ ID NO: 1281404 - DNA, 15 bp, Homo sapiens
tggctcgacctcacc

SEQ ID NO: 1281405 - DNA, 15 bp, Homo sapiens
ctggctcgacctcac

SEQ ID NO: 1281406 - DNA, 15 bp, Homo sapiens
tctggctcgacctca

SEQ ID NO: 1281407 - DNA, 15 bp, Homo sapiens
ctctggctcgacctc

SEQ ID NO: 1281408 - DNA, 15 bp, Homo sapiens
tctctggctcgacct

SEQ ID NO: 1281409 - DNA, 15 bp, Homo sapiens
ttctctggctcgacc

SEQ ID NO: 1281410 - DNA, 15 bp, Homo sapiens
tttctctggctcgac

SEQ ID NO: 1281411 - DNA, 15 bp, Homo sapiens
ttttctctggctcga

SEQ ID NO: 1281412 - DNA, 15 bp, Homo sapiens
gttttctctggctcg

SEQ ID NO: 1281413 - DNA, 15 bp, Homo sapiens
tgttttctctggctc

SEQ ID NO: 1281414 - DNA, 15 bp, Homo sapiens
ctgttttctctggct

SEQ ID NO: 1281415 - DNA, 15 bp, Homo sapiens
actgttttctctggc

SEQ ID NO: 1281416 - DNA, 15 bp, Homo sapiens
aactgttttctctgg

SEQ ID NO: 1281417 - DNA, 15 bp, Homo sapiens
gaactgttttctctg

SEQ ID NO: 1281418 - DNA, 15 bp, Homo sapiens
agaactgttttctct

SEQ ID NO: 1281419 - DNA, 15 bp, Homo sapiens
cagaactgttttctc

SEQ ID NO: 1281420 - DNA, 15 bp, Homo sapiens
gcagaactgttttct

SEQ ID NO: 1281421 - DNA, 15 bp, Homo sapiens
tgcagaactgttttc

SEQ ID NO: 1281422 - DNA, 15 bp, Homo sapiens
ctgcagaactgtttt

SEQ ID NO: 1281423 - DNA, 15 bp, Homo sapiens
actgcagaactgttt

SEQ ID NO: 1281424 - DNA, 15 bp, Homo sapiens
gactgcagaactgtt

SEQ ID NO: 1281425 - DNA, 15 bp, Homo sapiens
cgactgcagaactgt

SEQ ID NO: 1281426 - DNA, 15 bp, Homo sapiens
tcgactgcagaactg

SEQ ID NO: 1281427 - DNA, 15 bp, Homo sapiens
gtcgactgcagaact

SEQ ID NO: 1281428 - DNA, 15 bp, Homo sapiens
tgtcgactgcagaac

SEQ ID NO: 1281429 - DNA, 15 bp, Homo sapiens
ctgtcgactgcagaa

SEQ ID NO: 1281430 - DNA, 15 bp, Homo sapiens
gctgtcgactgcaga

SEQ ID NO: 1281431 - DNA, 15 bp, Homo sapiens
ggctgtcgactgcag

SEQ ID NO: 1281432 - DNA, 15 bp, Homo sapiens
gggctgtcgactgca

SEQ ID NO: 1281433 - DNA, 15 bp, Homo sapiens
ggggctgtcgactgc

SEQ ID NO: 1281434 - DNA, 15 bp, Homo sapiens
aggggctgtcgactg

SEQ ID NO: 1281435 - DNA, 15 bp, Homo sapiens
gaggggctgtcgact

SEQ ID NO: 1281436 - DNA, 15 bp, Homo sapiens
ggaggggctgtcgac

SEQ ID NO: 1281437 - DNA, 15 bp, Homo sapiens
aggaggggctgtcga

SEQ ID NO: 1281438 - DNA, 15 bp, Homo sapiens
caggaggggctgtcg

SEQ ID NO: 1281439 - DNA, 15 bp, Homo sapiens
ccaggaggggctgtc

SEQ ID NO: 1281440 - DNA, 15 bp, Homo sapiens
cccaggaggggctgt

SEQ ID NO: 1281441 - DNA, 15 bp, Homo sapiens
gcccaggaggggctg

SEQ ID NO: 1281442 - DNA, 15 bp, Homo sapiens
tgcccaggaggggct

SEQ ID NO: 1281443 - DNA, 15 bp, Homo sapiens
gtgcccaggaggggc

SEQ ID NO: 1281444 - DNA, 15 bp, Homo sapiens
agtgcccaggagggg

SEQ ID NO: 1281445 - DNA, 15 bp, Homo sapiens
cagtgcccaggaggg

SEQ ID NO: 1281446 - DNA, 15 bp, Homo sapiens
ccagtgcccaggagg

SEQ ID NO: 1281447 - DNA, 15 bp, Homo sapiens
accagtgcccaggag

SEQ ID NO: 1281448 - DNA, 15 bp, Homo sapiens
caccagtgcccagga

SEQ ID NO: 1281449 - DNA, 15 bp, Homo sapiens
gcaccagtgcccagg

SEQ ID NO: 1281450 - DNA, 15 bp, Homo sapiens
tgcaccagtgcccag

SEQ ID NO: 1281451 - DNA, 15 bp, Homo sapiens
ttgcaccagtgccca

SEQ ID NO: 1281452 - DNA, 15 bp, Homo sapiens
gttgcaccagtgccc

SEQ ID NO: 1281453 - DNA, 15 bp, Homo sapiens
tgttgcaccagtgcc

SEQ ID NO: 1281454 - DNA, 15 bp, Homo sapiens
ctgttgcaccagtgc

SEQ ID NO: 1281455 - DNA, 15 bp, Homo sapiens
tctgttgcaccagtg

SEQ ID NO: 1281456 - DNA, 15 bp, Homo sapiens
gtctgttgcaccagt

SEQ ID NO: 1281457 - DNA, 15 bp, Homo sapiens
tgtctgttgcaccag

SEQ ID NO: 1281458 - DNA, 15 bp, Homo sapiens
ctgtctgttgcacca

SEQ ID NO: 1281459 - DNA, 15 bp, Homo sapiens
cctgtctgttgcacc

SEQ ID NO: 1281460 - DNA, 15 bp, Homo sapiens
gcctgtctgttgcac

SEQ ID NO: 1281461 - DNA, 15 bp, Homo sapiens
agcctgtctgttgca

SEQ ID NO: 1281462 - DNA, 15 bp, Homo sapiens
aagcctgtctgttgc

SEQ ID NO: 1281463 - DNA, 15 bp, Homo sapiens
caagcctgtctgttg

SEQ ID NO: 1281464 - DNA, 15 bp, Homo sapiens
acaagcctgtctgtt

SEQ ID NO: 1281465 - DNA, 15 bp, Homo sapiens
cacaagcctgtctgt

SEQ ID NO: 1281466 - DNA, 15 bp, Homo sapiens
ccacaagcctgtctg

SEQ ID NO: 1281467 - DNA, 15 bp, Homo sapiens
cccacaagcctgtct

SEQ ID NO: 1281468 - DNA, 15 bp, Homo sapiens
gcccacaagcctgtc

SEQ ID NO: 1281469 - DNA, 15 bp, Homo sapiens
ggcccacaagcctgt

SEQ ID NO: 1281470 - DNA, 15 bp, Homo sapiens
aggcccacaagcctg

SEQ ID NO: 1281471 - DNA, 15 bp, Homo sapiens
caggcccacaagcct

SEQ ID NO: 1281472 - DNA, 15 bp, Homo sapiens
ccaggcccacaagcc

SEQ ID NO: 1281473 - DNA, 15 bp, Homo sapiens
accaggcccacaagc

SEQ ID NO: 1281474 - DNA, 15 bp, Homo sapiens
caccaggcccacaag

SEQ ID NO: 1281475 - DNA, 15 bp, Homo sapiens
gcaccaggcccacaa

SEQ ID NO: 1281476 - DNA, 15 bp, Homo sapiens
agcaccaggcccaca

SEQ ID NO: 1281477 - DNA, 15 bp, Homo sapiens
cagcaccaggcccac

SEQ ID NO: 1281478 - DNA, 15 bp, Homo sapiens
tcagcaccaggccca

SEQ ID NO: 1281479 - DNA, 15 bp, Homo sapiens
gtcagcaccaggccc

SEQ ID NO: 1281480 - DNA, 15 bp, Homo sapiens
ggtcagcaccaggcc

SEQ ID NO: 1281481 - DNA, 15 bp, Homo sapiens
gggtcagcaccaggc

SEQ ID NO: 1281482 - DNA, 15 bp, Homo sapiens
ggggtcagcaccagg

SEQ ID NO: 1281483 - DNA, 15 bp, Homo sapiens
aggggtcagcaccag

SEQ ID NO: 1281484 - DNA, 15 bp, Homo sapiens
gaggggtcagcacca

SEQ ID NO: 1281485 - DNA, 15 bp, Homo sapiens
tgaggggtcagcacc

SEQ ID NO: 1281486 - DNA, 15 bp, Homo sapiens
gtgaggggtcagcac

SEQ ID NO: 1281487 - DNA, 15 bp, Homo sapiens
cgtgaggggtcagca

SEQ ID NO: 1281488 - DNA, 15 bp, Homo sapiens
ccgtgaggggtcagc

SEQ ID NO: 1281489 - DNA, 15 bp, Homo sapiens
accgtgaggggtcag

SEQ ID NO: 1281490 - DNA, 15 bp, Homo sapiens
gaccgtgaggggtca

SEQ ID NO: 1281491 - DNA, 15 bp, Homo sapiens
tgaccgtgaggggtc

SEQ ID NO: 1281492 - DNA, 15 bp, Homo sapiens
ctgaccgtgaggggt

SEQ ID NO: 1281493 - DNA, 15 bp, Homo sapiens
cctgaccgtgagggg

SEQ ID NO: 1281494 - DNA, 15 bp, Homo sapiens
tcctgaccgtgaggg

SEQ ID NO: 1281495 - DNA, 15 bp, Homo sapiens
ctcctgaccgtgagg

SEQ ID NO: 1281496 - DNA, 15 bp, Homo sapiens
gctcctgaccgtgag

SEQ ID NO: 1281497 - DNA, 15 bp, Homo sapiens
ggctcctgaccgtga

SEQ ID NO: 1281498 - DNA, 15 bp, Homo sapiens
tggctcctgaccgtg

SEQ ID NO: 1281499 - DNA, 15 bp, Homo sapiens
gtggctcctgaccgt

SEQ ID NO: 1281500 - DNA, 15 bp, Homo sapiens
ggtggctcctgaccg

SEQ ID NO: 1281501 - DNA, 15 bp, Homo sapiens
gggtggctcctgacc

SEQ ID NO: 1281502 - DNA, 15 bp, Homo sapiens
agggtggctcctgac

SEQ ID NO: 1281503 - DNA, 15 bp, Homo sapiens
aagggtggctcctga

SEQ ID NO: 1281504 - DNA, 15 bp, Homo sapiens
caagggtggctcctg

SEQ ID NO: 1281505 - DNA, 15 bp, Homo sapiens
gcaagggtggctcct

SEQ ID NO: 1281506 - DNA, 15 bp, Homo sapiens
agcaagggtggctcc

SEQ ID NO: 1281507 - DNA, 15 bp, Homo sapiens
gagcaagggtggctc

SEQ ID NO: 1281508 - DNA, 15 bp, Homo sapiens
agagcaagggtggct

SEQ ID NO: 1281509 - DNA, 15 bp, Homo sapiens
aagagcaagggtggc

SEQ ID NO: 1281510 - DNA, 15 bp, Homo sapiens
caagagcaagggtgg

SEQ ID NO: 1281511 - DNA, 15 bp, Homo sapiens
tcaagagcaagggtg

SEQ ID NO: 1281512 - DNA, 15 bp, Homo sapiens
ctcaagagcaagggt

SEQ ID NO: 1281513 - DNA, 15 bp, Homo sapiens
gctcaagagcaaggg

SEQ ID NO: 1281514 - DNA, 15 bp, Homo sapiens
agctcaagagcaagg

SEQ ID NO: 1281515 - DNA, 15 bp, Homo sapiens
cagctcaagagcaag

SEQ ID NO: 1281516 - DNA, 15 bp, Homo sapiens
gcagctcaagagcaa

SEQ ID NO: 1281517 - DNA, 15 bp, Homo sapiens
agcagctcaagagca

SEQ ID NO: 1281518 - DNA, 15 bp, Homo sapiens
cagcagctcaagagc

SEQ ID NO: 1281519 - DNA, 15 bp, Homo sapiens
tcagcagctcaagag

SEQ ID NO: 1281520 - DNA, 15 bp, Homo sapiens
atcagcagctcaaga

SEQ ID NO: 1281521 - DNA, 15 bp, Homo sapiens
gatcagcagctcaag

SEQ ID NO: 1281522 - DNA, 15 bp, Homo sapiens
tgatcagcagctcaa

SEQ ID NO: 1281523 - DNA, 15 bp, Homo sapiens
atgatcagcagctca

SEQ ID NO: 1281524 - DNA, 15 bp, Homo sapiens
gatgatcagcagctc

SEQ ID NO: 1281525 - DNA, 15 bp, Homo sapiens
tgatgatcagcagct

SEQ ID NO: 1281526 - DNA, 15 bp, Homo sapiens
gtgatgatcagcagc

SEQ ID NO: 1281527 - DNA, 15 bp, Homo sapiens
agtgatgatcagcag

SEQ ID NO: 1281528 - DNA, 15 bp, Homo sapiens
cagtgatgatcagca

SEQ ID NO: 1281529 - DNA, 15 bp, Homo sapiens
gcagtgatgatcagc

SEQ ID NO: 1281530 - DNA, 15 bp, Homo sapiens
tgcagtgatgatcag

SEQ ID NO: 1281531 - DNA, 15 bp, Homo sapiens
ctgcagtgatgatca

SEQ ID NO: 1281532 - DNA, 15 bp, Homo sapiens
tctgcagtgatgatc

SEQ ID NO: 1281533 - DNA, 15 bp, Homo sapiens
ctctgcagtgatgat

SEQ ID NO: 1281534 - DNA, 15 bp, Homo sapiens
actctgcagtgatga

SEQ ID NO: 1281535 - DNA, 15 bp, Homo sapiens
cactctgcagtgatg

SEQ ID NO: 1281536 - DNA, 15 bp, Homo sapiens
gcactctgcagtgat

SEQ ID NO: 1281537 - DNA, 15 bp, Homo sapiens
ggcactctgcagtga

SEQ ID NO: 1281538 - DNA, 15 bp, Homo sapiens
gggcactctgcagtg

SEQ ID NO: 1281539 - DNA, 15 bp, Homo sapiens
tgggcactctgcagt

SEQ ID NO: 1281540 - DNA, 15 bp, Homo sapiens
ctgggcactctgcag

SEQ ID NO: 1281541 - DNA, 15 bp, Homo sapiens
cctgggcactctgca

SEQ ID NO: 1281542 - DNA, 15 bp, Homo sapiens
acctgggcactctgc

SEQ ID NO: 1281543 - DNA, 15 bp, Homo sapiens
gacctgggcactctg

SEQ ID NO: 1281544 - DNA, 15 bp, Homo sapiens
agacctgggcactct

SEQ ID NO: 1281545 - DNA, 15 bp, Homo sapiens
cagacctgggcactc

SEQ ID NO: 1281546 - DNA, 15 bp, Homo sapiens
tcagacctgggcact

SEQ ID NO: 1281547 - DNA, 15 bp, Homo sapiens
atcagacctgggcac

SEQ ID NO: 1281548 - DNA, 15 bp, Homo sapiens
gatcagacctgggca

SEQ ID NO: 1281549 - DNA, 15 bp, Homo sapiens
tgatcagacctgggc

SEQ ID NO: 1281550 - DNA, 15 bp, Homo sapiens
ttgatcagacctggg

SEQ ID NO: 1281551 - DNA, 15 bp, Homo sapiens
gttgatcagacctgg

SEQ ID NO: 1281552 - DNA, 15 bp, Homo sapiens
tgttgatcagacctg

SEQ ID NO: 1281553 - DNA, 15 bp, Homo sapiens
atgttgatcagacct

SEQ ID NO: 1281554 - DNA, 15 bp, Homo sapiens
gatgttgatcagacc

SEQ ID NO: 1281555 - DNA, 15 bp, Homo sapiens
ggatgttgatcagac

SEQ ID NO: 1281556 - DNA, 15 bp, Homo sapiens
gggatgttgatcaga

SEQ ID NO: 1281557 - DNA, 15 bp, Homo sapiens
agggatgttgatcag

SEQ ID NO: 1281558 - DNA, 15 bp, Homo sapiens
cagggatgttgatca

SEQ ID NO: 1281559 - DNA, 15 bp, Homo sapiens
gcagggatgttgatc

SEQ ID NO: 1281560 - DNA, 15 bp, Homo sapiens
agcagggatgttgat

SEQ ID NO: 1281561 - DNA, 15 bp, Homo sapiens
cagcagggatgttga

SEQ ID NO: 1281562 - DNA, 15 bp, Homo sapiens
ccagcagggatgttg

SEQ ID NO: 1281563 - DNA, 15 bp, Homo sapiens
cccagcagggatgtt

SEQ ID NO: 1281564 - DNA, 15 bp, Homo sapiens
tcccagcagggatgt

SEQ ID NO: 1281565 - DNA, 15 bp, Homo sapiens
ttcccagcagggatg

SEQ ID NO: 1281566 - DNA, 15 bp, Homo sapiens
tttcccagcagggat

SEQ ID NO: 1281567 - DNA, 15 bp, Homo sapiens
ttttcccagcaggga

SEQ ID NO: 1281568 - DNA, 15 bp, Homo sapiens
cttttcccagcaggg

SEQ ID NO: 1281569 - DNA, 15 bp, Homo sapiens
gcttttcccagcagg

SEQ ID NO: 1281570 - DNA, 15 bp, Homo sapiens
cgcttttcccagcag

SEQ ID NO: 1281571 - DNA, 15 bp, Homo sapiens
ccgcttttcccagca

SEQ ID NO: 1281572 - DNA, 15 bp, Homo sapiens
tccgcttttcccagc

SEQ ID NO: 1281573 - DNA, 15 bp, Homo sapiens
ctccgcttttcccag

SEQ ID NO: 1281574 - DNA, 15 bp, Homo sapiens
tctccgcttttccca

SEQ ID NO: 1281575 - DNA, 15 bp, Homo sapiens
atctccgcttttccc

SEQ ID NO: 1281576 - DNA, 15 bp, Homo sapiens
catctccgcttttcc

SEQ ID NO: 1281577 - DNA, 15 bp, Homo sapiens
tcatctccgcttttc

SEQ ID NO: 1281578 - DNA, 15 bp, Homo sapiens
gtcatctccgctttt

SEQ ID NO: 1281579 - DNA, 15 bp, Homo sapiens
ggtcatctccgcttt

SEQ ID NO: 1281580 - DNA, 15 bp, Homo sapiens
aggtcatctccgctt

SEQ ID NO: 1281581 - DNA, 15 bp, Homo sapiens
caggtcatctccgct

SEQ ID NO: 1281582 - DNA, 15 bp, Homo sapiens
ccaggtcatctccgc

SEQ ID NO: 1281583 - DNA, 15 bp, Homo sapiens
gccaggtcatctccg

SEQ ID NO: 1281584 - DNA, 15 bp, Homo sapiens
cgccaggtcatctcc

SEQ ID NO: 1281585 - DNA, 15 bp, Homo sapiens
acgccaggtcatctc

SEQ ID NO: 1281586 - DNA, 15 bp, Homo sapiens
cacgccaggtcatct

SEQ ID NO: 1281587 - DNA, 15 bp, Homo sapiens
ccacgccaggtcatc

SEQ ID NO: 1281588 - DNA, 15 bp, Homo sapiens
accacgccaggtcat

SEQ ID NO: 1281589 - DNA, 15 bp, Homo sapiens
gaccacgccaggtca

SEQ ID NO: 1281590 - DNA, 15 bp, Homo sapiens
ggaccacgccaggtc

SEQ ID NO: 1281591 - DNA, 15 bp, Homo sapiens
tggaccacgccaggt

SEQ ID NO: 1281592 - DNA, 15 bp, Homo sapiens
atggaccacgccagg

SEQ ID NO: 1281593 - DNA, 15 bp, Homo sapiens
tatggaccacgccag

SEQ ID NO: 1281594 - DNA, 15 bp, Homo sapiens
ctatggaccacgcca

SEQ ID NO: 1281595 - DNA, 15 bp, Homo sapiens
actatggaccacgcc

SEQ ID NO: 1281596 - DNA, 15 bp, Homo sapiens
cactatggaccacgc

SEQ ID NO: 1281597 - DNA, 15 bp, Homo sapiens
tcactatggaccacg

SEQ ID NO: 1281598 - DNA, 15 bp, Homo sapiens
atcactatggaccac

SEQ ID NO: 1281599 - DNA, 15 bp, Homo sapiens
gatcactatggacca

SEQ ID NO: 1281600 - DNA, 15 bp, Homo sapiens
ggatcactatggacc

SEQ ID NO: 1281601 - DNA, 15 bp, Homo sapiens
tggatcactatggac

SEQ ID NO: 1281602 - DNA, 15 bp, Homo sapiens
ttggatcactatgga

SEQ ID NO: 1281603 - DNA, 15 bp, Homo sapiens
tttggatcactatgg

SEQ ID NO: 1281604 - DNA, 15 bp, Homo sapiens
atttggatcactatg

SEQ ID NO: 1281605 - DNA, 15 bp, Homo sapiens
catttggatcactat

SEQ ID NO: 1281606 - DNA, 15 bp, Homo sapiens
acatttggatcacta

SEQ ID NO: 1281607 - DNA, 15 bp, Homo sapiens
cacatttggatcact

SEQ ID NO: 1281608 - DNA, 15 bp, Homo sapiens
tcacatttggatcac

SEQ ID NO: 1281609 - DNA, 15 bp, Homo sapiens
atcacatttggatca

SEQ ID NO: 1281610 - DNA, 15 bp, Homo sapiens
tatcacatttggatc

SEQ ID NO: 1281611 - DNA, 15 bp, Homo sapiens
ctatcacatttggat

SEQ ID NO: 1281612 - DNA, 15 bp, Homo sapiens
tctatcacatttgga

SEQ ID NO: 1281613 - DNA, 15 bp, Homo sapiens
ttctatcacatttgg

SEQ ID NO: 1281614 - DNA, 15 bp, Homo sapiens
cttctatcacatttg

SEQ ID NO: 1281615 - DNA, 15 bp, Homo sapiens
ccttctatcacattt

SEQ ID NO: 1281616 - DNA, 15 bp, Homo sapiens
gccttctatcacatt

SEQ ID NO: 1281617 - DNA, 15 bp, Homo sapiens
agccttctatcacat

SEQ ID NO: 1281618 - DNA, 15 bp, Homo sapiens
cagccttctatcaca

SEQ ID NO: 1281619 - DNA, 15 bp, Homo sapiens
ccagccttctatcac

SEQ ID NO: 1281620 - DNA, 15 bp, Homo sapiens
cccagccttctatca

SEQ ID NO: 1281621 - DNA, 15 bp, Homo sapiens
ccccagccttctatc

SEQ ID NO: 1281622 - DNA, 15 bp, Homo sapiens
cccccagccttctat

SEQ ID NO: 1281623 - DNA, 15 bp, Homo sapiens
acccccagccttcta

SEQ ID NO: 1281624 - DNA, 15 bp, Homo sapiens
cacccccagccttct

SEQ ID NO: 1281625 - DNA, 15 bp, Homo sapiens
ccacccccagccttc

SEQ ID NO: 1281626 - DNA, 15 bp, Homo sapiens
gccacccccagcctt

SEQ ID NO: 1281627 - DNA, 15 bp, Homo sapiens
ggccacccccagcct

SEQ ID NO: 1281628 - DNA, 15 bp, Homo sapiens
gggccacccccagcc

SEQ ID NO: 1281629 - DNA, 15 bp, Homo sapiens
ggggccacccccagc

SEQ ID NO: 1281630 - DNA, 15 bp, Homo sapiens
tggggccacccccag

SEQ ID NO: 1281631 - DNA, 15 bp, Homo sapiens
ctggggccaccccca

SEQ ID NO: 1281632 - DNA, 15 bp, Homo sapiens
actggggccaccccc

SEQ ID NO: 1281633 - DNA, 15 bp, Homo sapiens
cactggggccacccc

SEQ ID NO: 1281634 - DNA, 15 bp, Homo sapiens
tcactggggccaccc

SEQ ID NO: 1281635 - DNA, 15 bp, Homo sapiens
atcactggggccacc

SEQ ID NO: 1281636 - DNA, 15 bp, Homo sapiens
catcactggggccac

SEQ ID NO: 1281637 - DNA, 15 bp, Homo sapiens
ccatcactggggcca

SEQ ID NO: 1281638 - DNA, 15 bp, Homo sapiens
gccatcactggggcc

SEQ ID NO: 1281639 - DNA, 15 bp, Homo sapiens
ggccatcactggggc

SEQ ID NO: 1281640 - DNA, 15 bp, Homo sapiens
aggccatcactgggg

SEQ ID NO: 1281641 - DNA, 15 bp, Homo sapiens
taggccatcactggg

SEQ ID NO: 1281642 - DNA, 15 bp, Homo sapiens
gtaggccatcactgg

SEQ ID NO: 1281643 - DNA, 15 bp, Homo sapiens
agtaggccatcactg

SEQ ID NO: 1281644 - DNA, 15 bp, Homo sapiens
gagtaggccatcact

SEQ ID NO: 1281645 - DNA, 15 bp, Homo sapiens
ggagtaggccatcac

SEQ ID NO: 1281646 - DNA, 15 bp, Homo sapiens
aggagtaggccatca

SEQ ID NO: 1281647 - DNA, 15 bp, Homo sapiens
aaggagtaggccatc

SEQ ID NO: 1281648 - DNA, 15 bp, Homo sapiens
gaaggagtaggccat

SEQ ID NO: 1281649 - DNA, 15 bp, Homo sapiens
ggaaggagtaggcca

SEQ ID NO: 1281650 - DNA, 15 bp, Homo sapiens
gggaaggagtaggcc

SEQ ID NO: 1281651 - DNA, 15 bp, Homo sapiens
agggaaggagtaggc

SEQ ID NO: 1281652 - DNA, 15 bp, Homo sapiens
aagggaaggagtagg

SEQ ID NO: 1281653 - DNA, 15 bp, Homo sapiens
gaagggaaggagtag

SEQ ID NO: 1281654 - DNA, 15 bp, Homo sapiens
ggaagggaaggagta

SEQ ID NO: 1281655 - DNA, 15 bp, Homo sapiens
tggaagggaaggagt

SEQ ID NO: 1281656 - DNA, 15 bp, Homo sapiens
ttggaagggaaggag

SEQ ID NO: 1281657 - DNA, 15 bp, Homo sapiens
gttggaagggaagga

SEQ ID NO: 1281658 - DNA, 15 bp, Homo sapiens
ggttggaagggaagg

SEQ ID NO: 1281659 - DNA, 15 bp, Homo sapiens
gggttggaagggaag

SEQ ID NO: 1281660 - DNA, 15 bp, Homo sapiens
agggttggaagggaa

SEQ ID NO: 1281661 - DNA, 15 bp, Homo sapiens
gagggttggaaggga

SEQ ID NO: 1281662 - DNA, 15 bp, Homo sapiens
ggagggttggaaggg

SEQ ID NO: 1281663 - DNA, 15 bp, Homo sapiens
tggagggttggaagg

SEQ ID NO: 1281664 - DNA, 15 bp, Homo sapiens
gtggagggttggaag

SEQ ID NO: 1281665 - DNA, 15 bp, Homo sapiens
ggtggagggttggaa

SEQ ID NO: 1281666 - DNA, 15 bp, Homo sapiens
aggtggagggttgga

SEQ ID NO: 1281667 - DNA, 15 bp, Homo sapiens
gaggtggagggttgg

SEQ ID NO: 1281668 - DNA, 15 bp, Homo sapiens
ggaggtggagggttg

SEQ ID NO: 1281669 - DNA, 15 bp, Homo sapiens
aggaggtggagggtt

SEQ ID NO: 1281670 - DNA, 15 bp, Homo sapiens
gaggaggtggagggt

SEQ ID NO: 1281671 - DNA, 15 bp, Homo sapiens
ggaggaggtggaggg

SEQ ID NO: 1281672 - DNA, 15 bp, Homo sapiens
tggaggaggtggagg

SEQ ID NO: 1281673 - DNA, 15 bp, Homo sapiens
atggaggaggtggag

SEQ ID NO: 1281674 - DNA, 15 bp, Homo sapiens
gatggaggaggtgga

SEQ ID NO: 1281675 - DNA, 15 bp, Homo sapiens
ggatggaggaggtgg

SEQ ID NO: 1281676 - DNA, 15 bp, Homo sapiens
aggatggaggaggtg

SEQ ID NO: 1281677 - DNA, 15 bp, Homo sapiens
gaggatggaggaggt

SEQ ID NO: 1281678 - DNA, 15 bp, Homo sapiens
ggaggatggaggagg

SEQ ID NO: 1281679 - DNA, 15 bp, Homo sapiens
tggaggatggaggag

SEQ ID NO: 1281680 - DNA, 15 bp, Homo sapiens
ttggaggatggagga

SEQ ID NO: 1281681 - DNA, 15 bp, Homo sapiens
cttggaggatggagg

SEQ ID NO: 1281682 - DNA, 15 bp, Homo sapiens
acttggaggatggag

SEQ ID NO: 1281683 - DNA, 15 bp, Homo sapiens
gacttggaggatgga

SEQ ID NO: 1281684 - DNA, 15 bp, Homo sapiens
agacttggaggatgg

SEQ ID NO: 1281685 - DNA, 15 bp, Homo sapiens
aagacttggaggatg

SEQ ID NO: 1281686 - DNA, 15 bp, Homo sapiens
taagacttggaggat

SEQ ID NO: 1281687 - DNA, 15 bp, Homo sapiens
ctaagacttggagga

SEQ ID NO: 1281688 - DNA, 15 bp, Homo sapiens
gctaagacttggagg

SEQ ID NO: 1281689 - DNA, 15 bp, Homo sapiens
agctaagacttggag

SEQ ID NO: 1281690 - DNA, 15 bp, Homo sapiens
gagctaagacttgga

SEQ ID NO: 1281691 - DNA, 15 bp, Homo sapiens
tgagctaagacttgg

SEQ ID NO: 1281692 - DNA, 15 bp, Homo sapiens
atgagctaagacttg

SEQ ID NO: 1281693 - DNA, 15 bp, Homo sapiens
gatgagctaagactt

SEQ ID NO: 1281694 - DNA, 15 bp, Homo sapiens
agatgagctaagact

SEQ ID NO: 1281695 - DNA, 15 bp, Homo sapiens
aagatgagctaagac

SEQ ID NO: 1281696 - DNA, 15 bp, Homo sapiens
caagatgagctaaga

SEQ ID NO: 1281697 - DNA, 15 bp, Homo sapiens
gcaagatgagctaag

SEQ ID NO: 1281698 - DNA, 15 bp, Homo sapiens
agcaagatgagctaa

SEQ ID NO: 1281699 - DNA, 15 bp, Homo sapiens
cagcaagatgagcta

SEQ ID NO: 1281700 - DNA, 15 bp, Homo sapiens
ccagcaagatgagct

SEQ ID NO: 1281701 - DNA, 15 bp, Homo sapiens
cccagcaagatgagc

SEQ ID NO: 1281702 - DNA, 15 bp, Homo sapiens
tcccagcaagatgag

SEQ ID NO: 1281703 - DNA, 15 bp, Homo sapiens
ttcccagcaagatga

SEQ ID NO: 1281704 - DNA, 15 bp, Homo sapiens
attcccagcaagatg

SEQ ID NO: 1281705 - DNA, 15 bp, Homo sapiens
cattcccagcaagat

SEQ ID NO: 1281706 - DNA, 15 bp, Homo sapiens
gcattcccagcaaga

SEQ ID NO: 1281707 - DNA, 15 bp, Homo sapiens
ggcattcccagcaag

SEQ ID NO: 1281708 - DNA, 15 bp, Homo sapiens
cggcattcccagcaa

SEQ ID NO: 1281709 - DNA, 15 bp, Homo sapiens
gcggcattcccagca

SEQ ID NO: 1281710 - DNA, 15 bp, Homo sapiens
ggcggcattcccagc

SEQ ID NO: 1281711 - DNA, 15 bp, Homo sapiens
aggcggcattcccag

SEQ ID NO: 1281712 - DNA, 15 bp, Homo sapiens
aaggcggcattccca

SEQ ID NO: 1281713 - DNA, 15 bp, Homo sapiens
gaaggcggcattccc

SEQ ID NO: 1281714 - DNA, 15 bp, Homo sapiens
ggaaggcggcattcc

SEQ ID NO: 1281715 - DNA, 15 bp, Homo sapiens
aggaaggcggcattc

SEQ ID NO: 1281716 - DNA, 15 bp, Homo sapiens
caggaaggcggcatt

SEQ ID NO: 1281717 - DNA, 15 bp, Homo sapiens
ccaggaaggcggcat

SEQ ID NO: 1281718 - DNA, 15 bp, Homo sapiens
cccaggaaggcggca

SEQ ID NO: 1281719 - DNA, 15 bp, Homo sapiens
tcccaggaaggcggc

SEQ ID NO: 1281720 - DNA, 15 bp, Homo sapiens
ttcccaggaaggcgg

SEQ ID NO: 1281721 - DNA, 15 bp, Homo sapiens
cttcccaggaaggcg

SEQ ID NO: 1281722 - DNA, 15 bp, Homo sapiens
gcttcccaggaaggc

SEQ ID NO: 1281723 - DNA, 15 bp, Homo sapiens
ggcttcccaggaagg

SEQ ID NO: 1281724 - DNA, 15 bp, Homo sapiens
aggcttcccaggaag

SEQ ID NO: 1281725 - DNA, 15 bp, Homo sapiens
aaggcttcccaggaa

SEQ ID NO: 1281726 - DNA, 15 bp, Homo sapiens
gaaggcttcccagga

SEQ ID NO: 1281727 - DNA, 15 bp, Homo sapiens
agaaggcttcccagg

SEQ ID NO: 1281728 - DNA, 15 bp, Homo sapiens
gagaaggcttcccag

SEQ ID NO: 1281729 - DNA, 15 bp, Homo sapiens
agagaaggcttccca

SEQ ID NO: 1281730 - DNA, 15 bp, Homo sapiens
tagagaaggcttccc

SEQ ID NO: 1281731 - DNA, 15 bp, Homo sapiens
gtagagaaggcttcc

SEQ ID NO: 1281732 - DNA, 15 bp, Homo sapiens
ggtagagaaggcttc

SEQ ID NO: 1281733 - DNA, 15 bp, Homo sapiens
aggtagagaaggctt

SEQ ID NO: 1281734 - DNA, 15 bp, Homo sapiens
taggtagagaaggct

SEQ ID NO: 1281735 - DNA, 15 bp, Homo sapiens
gtaggtagagaaggc

SEQ ID NO: 1281736 - DNA, 15 bp, Homo sapiens
ggtaggtagagaagg

SEQ ID NO: 1281737 - DNA, 15 bp, Homo sapiens
gggtaggtagagaag

SEQ ID NO: 1281738 - DNA, 15 bp, Homo sapiens
agggtaggtagagaa

SEQ ID NO: 1281739 - DNA, 15 bp, Homo sapiens
tagggtaggtagaga

SEQ ID NO: 1281740 - DNA, 15 bp, Homo sapiens
ctagggtaggtagag

SEQ ID NO: 1281741 - DNA, 15 bp, Homo sapiens
actagggtaggtaga

SEQ ID NO: 1281742 - DNA, 15 bp, Homo sapiens
gactagggtaggtag

SEQ ID NO: 1281743 - DNA, 15 bp, Homo sapiens
tgactagggtaggta

SEQ ID NO: 1281744 - DNA, 15 bp, Homo sapiens
ctgactagggtaggt

SEQ ID NO: 1281745 - DNA, 15 bp, Homo sapiens
gctgactagggtagg

SEQ ID NO: 1281746 - DNA, 15 bp, Homo sapiens
agctgactagggtag

SEQ ID NO: 1281747 - DNA, 15 bp, Homo sapiens
aagctgactagggta

SEQ ID NO: 1281748 - DNA, 15 bp, Homo sapiens
aaagctgactagggt

SEQ ID NO: 1281749 - DNA, 15 bp, Homo sapiens
gaaagctgactaggg

SEQ ID NO: 1281750 - DNA, 15 bp, Homo sapiens
agaaagctgactagg

SEQ ID NO: 1281751 - DNA, 15 bp, Homo sapiens
gagaaagctgactag

SEQ ID NO: 1281752 - DNA, 15 bp, Homo sapiens
agagaaagctgacta

SEQ ID NO: 1281753 - DNA, 15 bp, Homo sapiens
cagagaaagctgact

SEQ ID NO: 1281754 - DNA, 15 bp, Homo sapiens
gcagagaaagctgac

SEQ ID NO: 1281755 - DNA, 15 bp, Homo sapiens
ggcagagaaagctga

SEQ ID NO: 1281756 - DNA, 15 bp, Homo sapiens
aggcagagaaagctg

SEQ ID NO: 1281757 - DNA, 15 bp, Homo sapiens
gaggcagagaaagct

SEQ ID NO: 1281758 - DNA, 15 bp, Homo sapiens
agaggcagagaaagc

SEQ ID NO: 1281759 - DNA, 15 bp, Homo sapiens
gagaggcagagaaag

SEQ ID NO: 1281760 - DNA, 15 bp, Homo sapiens
ggagaggcagagaaa

SEQ ID NO: 1281761 - DNA, 15 bp, Homo sapiens
gggagaggcagagaa

SEQ ID NO: 1281762 - DNA, 15 bp, Homo sapiens
agggagaggcagaga

SEQ ID NO: 1281763 - DNA, 15 bp, Homo sapiens
aagggagaggcagag

SEQ ID NO: 1281764 - DNA, 15 bp, Homo sapiens
gaagggagaggcaga

SEQ ID NO: 1281765 - DNA, 15 bp, Homo sapiens
ggaagggagaggcag

SEQ ID NO: 1281766 - DNA, 15 bp, Homo sapiens
gggaagggagaggca

SEQ ID NO: 1281767 - DNA, 15 bp, Homo sapiens
agggaagggagaggc

SEQ ID NO: 1281768 - DNA, 15 bp, Homo sapiens
cagggaagggagagg

SEQ ID NO: 1281769 - DNA, 15 bp, Homo sapiens
tcagggaagggagag

SEQ ID NO: 1281770 - DNA, 15 bp, Homo sapiens
atcagggaagggaga

SEQ ID NO: 1281771 - DNA, 15 bp, Homo sapiens
catcagggaagggag

SEQ ID NO: 1281772 - DNA, 15 bp, Homo sapiens
gcatcagggaaggga

SEQ ID NO: 1281773 - DNA, 15 bp, Homo sapiens
cgcatcagggaaggg

SEQ ID NO: 1281774 - DNA, 15 bp, Homo sapiens
acgcatcagggaagg

SEQ ID NO: 1281775 - DNA, 15 bp, Homo sapiens
gacgcatcagggaag

SEQ ID NO: 1281776 - DNA, 15 bp, Homo sapiens
ggacgcatcagggaa

SEQ ID NO: 1281777 - DNA, 15 bp, Homo sapiens
aggacgcatcaggga

SEQ ID NO: 1281778 - DNA, 15 bp, Homo sapiens
gaggacgcatcaggg

SEQ ID NO: 1281779 - DNA, 15 bp, Homo sapiens
agaggacgcatcagg

SEQ ID NO: 1281780 - DNA, 15 bp, Homo sapiens
gagaggacgcatcag

SEQ ID NO: 1281781 - DNA, 15 bp, Homo sapiens
agagaggacgcatca

SEQ ID NO: 1281782 - DNA, 15 bp, Homo sapiens
cagagaggacgcatc

SEQ ID NO: 1281783 - DNA, 15 bp, Homo sapiens
acagagaggacgcat

SEQ ID NO: 1281784 - DNA, 15 bp, Homo sapiens
aacagagaggacgca

SEQ ID NO: 1281785 - DNA, 15 bp, Homo sapiens
aaacagagaggacgc

SEQ ID NO: 1281786 - DNA, 15 bp, Homo sapiens
caaacagagaggacg

SEQ ID NO: 1281787 - DNA, 15 bp, Homo sapiens
acaaacagagaggac

SEQ ID NO: 1281788 - DNA, 15 bp, Homo sapiens
gacaaacagagagga

SEQ ID NO: 1281789 - DNA, 15 bp, Homo sapiens
ggacaaacagagagg

SEQ ID NO: 1281790 - DNA, 15 bp, Homo sapiens
aggacaaacagagag

SEQ ID NO: 1281791 - DNA, 15 bp, Homo sapiens
aaggacaaacagaga

SEQ ID NO: 1281792 - DNA, 15 bp, Homo sapiens
gaaggacaaacagag

SEQ ID NO: 1281793 - DNA, 15 bp, Homo sapiens
ggaaggacaaacaga

SEQ ID NO: 1281794 - DNA, 15 bp, Homo sapiens
tggaaggacaaacag

SEQ ID NO: 1281795 - DNA, 15 bp, Homo sapiens
atggaaggacaaaca

SEQ ID NO: 1281796 - DNA, 15 bp, Homo sapiens
gatggaaggacaaac

SEQ ID NO: 1281797 - DNA, 15 bp, Homo sapiens
ggatggaaggacaaa

SEQ ID NO: 1281798 - DNA, 15 bp, Homo sapiens
aggatggaaggacaa

SEQ ID NO: 1281799 - DNA, 15 bp, Homo sapiens
caggatggaaggaca

SEQ ID NO: 1281800 - DNA, 15 bp, Homo sapiens
ccaggatggaaggac

SEQ ID NO: 1281801 - DNA, 15 bp, Homo sapiens
cccaggatggaagga

SEQ ID NO: 1281802 - DNA, 15 bp, Homo sapiens
acccaggatggaagg

SEQ ID NO: 1281803 - DNA, 15 bp, Homo sapiens
cacccaggatggaag

SEQ ID NO: 1281804 - DNA, 15 bp, Homo sapiens
ccacccaggatggaa

SEQ ID NO: 1281805 - DNA, 15 bp, Homo sapiens
cccacccaggatgga

SEQ ID NO: 1281806 - DNA, 15 bp, Homo sapiens
ccccacccaggatgg

SEQ ID NO: 1281807 - DNA, 15 bp, Homo sapiens
tccccacccaggatg

SEQ ID NO: 1281808 - DNA, 15 bp, Homo sapiens
ctccccacccaggat

SEQ ID NO: 1281809 - DNA, 15 bp, Homo sapiens
gctccccacccagga

SEQ ID NO: 1281810 - DNA, 15 bp, Homo sapiens
tgctccccacccagg

SEQ ID NO: 1281811 - DNA, 15 bp, Homo sapiens
ctgctccccacccag

SEQ ID NO: 1281812 - DNA, 15 bp, Homo sapiens
gctgctccccaccca

SEQ ID NO: 1281813 - DNA, 15 bp, Homo sapiens
ggctgctccccaccc

SEQ ID NO: 1281814 - DNA, 15 bp, Homo sapiens
cggctgctccccacc

SEQ ID NO: 1281815 - DNA, 15 bp, Homo sapiens
acggctgctccccac

SEQ ID NO: 1281816 - DNA, 15 bp, Homo sapiens
gacggctgctcccca

SEQ ID NO: 1281817 - DNA, 15 bp, Homo sapiens
agacggctgctcccc

SEQ ID NO: 1281818 - DNA, 15 bp, Homo sapiens
cagacggctgctccc

SEQ ID NO: 1281819 - DNA, 15 bp, Homo sapiens
tcagacggctgctcc

SEQ ID NO: 1281820 - DNA, 15 bp, Homo sapiens
atcagacggctgctc

SEQ ID NO: 1281821 - DNA, 15 bp, Homo sapiens
catcagacggctgct

SEQ ID NO: 1281822 - DNA, 15 bp, Homo sapiens
gcatcagacggctgc

SEQ ID NO: 1281823 - DNA, 15 bp, Homo sapiens
agcatcagacggctg

SEQ ID NO: 1281824 - DNA, 15 bp, Homo sapiens
cagcatcagacggct

SEQ ID NO: 1281825 - DNA, 15 bp, Homo sapiens
gcagcatcagacggc

SEQ ID NO: 1281826 - DNA, 15 bp, Homo sapiens
tgcagcatcagacgg

SEQ ID NO: 1281827 - DNA, 15 bp, Homo sapiens
ctgcagcatcagacg

SEQ ID NO: 1281828 - DNA, 15 bp, Homo sapiens
gctgcagcatcagac

SEQ ID NO: 1281829 - DNA, 15 bp, Homo sapiens
ggctgcagcatcaga

SEQ ID NO: 1281830 - DNA, 15 bp, Homo sapiens
gggctgcagcatcag

SEQ ID NO: 1281831 - DNA, 15 bp, Homo sapiens
agggctgcagcatca

SEQ ID NO: 1281832 - DNA, 15 bp, Homo sapiens
tagggctgcagcatc

SEQ ID NO: 1281833 - DNA, 15 bp, Homo sapiens
atagggctgcagcat

SEQ ID NO: 1281834 - DNA, 15 bp, Homo sapiens
aatagggctgcagca

SEQ ID NO: 1281835 - DNA, 15 bp, Homo sapiens
aaatagggctgcagc

SEQ ID NO: 1281836 - DNA, 15 bp, Homo sapiens
aaaatagggctgcag

SEQ ID NO: 1281837 - DNA, 15 bp, Homo sapiens
gaaaatagggctgca

SEQ ID NO: 1281838 - DNA, 15 bp, Homo sapiens
agaaaatagggctgc

SEQ ID NO: 1281839 - DNA, 15 bp, Homo sapiens
tagaaaatagggctg

SEQ ID NO: 1281840 - DNA, 15 bp, Homo sapiens
atagaaaatagggct

SEQ ID NO: 1281841 - DNA, 15 bp, Homo sapiens
tatagaaaatagggc

SEQ ID NO: 1281842 - DNA, 15 bp, Homo sapiens
gtatagaaaataggg

SEQ ID NO: 1281843 - DNA, 15 bp, Homo sapiens
tgtatagaaaatagg

SEQ ID NO: 1281844 - DNA, 15 bp, Homo sapiens
ctgtatagaaaatag

SEQ ID NO: 1281845 - DNA, 15 bp, Homo sapiens
cctgtatagaaaata

SEQ ID NO: 1281846 - DNA, 15 bp, Homo sapiens
gcctgtatagaaaat

SEQ ID NO: 1281847 - DNA, 15 bp, Homo sapiens
tgcctgtatagaaaa

SEQ ID NO: 1281848 - DNA, 15 bp, Homo sapiens
atgcctgtatagaaa

SEQ ID NO: 1281849 - DNA, 15 bp, Homo sapiens
gatgcctgtatagaa

SEQ ID NO: 1281850 - DNA, 15 bp, Homo sapiens
ggatgcctgtataga

SEQ ID NO: 1281851 - DNA, 15 bp, Homo sapiens
aggatgcctgtatag

SEQ ID NO: 1281852 - DNA, 15 bp, Homo sapiens
caggatgcctgtata

SEQ ID NO: 1281853 - DNA, 15 bp, Homo sapiens
acaggatgcctgtat

SEQ ID NO: 1281854 - DNA, 15 bp, Homo sapiens
gacaggatgcctgta

SEQ ID NO: 1281855 - DNA, 15 bp, Homo sapiens
agacaggatgcctgt

SEQ ID NO: 1281856 - DNA, 15 bp, Homo sapiens
gagacaggatgcctg

SEQ ID NO: 1281857 - DNA, 15 bp, Homo sapiens
ggagacaggatgcct

SEQ ID NO: 1281858 - DNA, 15 bp, Homo sapiens
aggagacaggatgcc

SEQ ID NO: 1281859 - DNA, 15 bp, Homo sapiens
gaggagacaggatgc

SEQ ID NO: 1281860 - DNA, 15 bp, Homo sapiens
agaggagacaggatg

SEQ ID NO: 1281861 - DNA, 15 bp, Homo sapiens
cagaggagacaggat

SEQ ID NO: 1281862 - DNA, 15 bp, Homo sapiens
gcagaggagacagga

SEQ ID NO: 1281863 - DNA, 15 bp, Homo sapiens
tgcagaggagacagg

SEQ ID NO: 1281864 - DNA, 15 bp, Homo sapiens
ctgcagaggagacag

SEQ ID NO: 1281865 - DNA, 15 bp, Homo sapiens
tctgcagaggagaca

SEQ ID NO: 1281866 - DNA, 15 bp, Homo sapiens
gtctgcagaggagac

SEQ ID NO: 1281867 - DNA, 15 bp, Homo sapiens
tgtctgcagaggaga

SEQ ID NO: 1281868 - DNA, 15 bp, Homo sapiens
ctgtctgcagaggag

SEQ ID NO: 1281869 - DNA, 15 bp, Homo sapiens
gctgtctgcagagga

SEQ ID NO: 1281870 - DNA, 15 bp, Homo sapiens
agctgtctgcagagg

SEQ ID NO: 1281871 - DNA, 15 bp, Homo sapiens
gagctgtctgcagag

SEQ ID NO: 1281872 - DNA, 15 bp, Homo sapiens
ggagctgtctgcaga

SEQ ID NO: 1281873 - DNA, 15 bp, Homo sapiens
aggagctgtctgcag

SEQ ID NO: 1281874 - DNA, 15 bp, Homo sapiens
aaggagctgtctgca

SEQ ID NO: 1281875 - DNA, 15 bp, Homo sapiens
caaggagctgtctgc

SEQ ID NO: 1281876 - DNA, 15 bp, Homo sapiens
acaaggagctgtctg

SEQ ID NO: 1281877 - DNA, 15 bp, Homo sapiens
cacaaggagctgtct

SEQ ID NO: 1281878 - DNA, 15 bp, Homo sapiens
ccacaaggagctgtc

SEQ ID NO: 1281879 - DNA, 15 bp, Homo sapiens
tccacaaggagctgt

SEQ ID NO: 1281880 - DNA, 15 bp, Homo sapiens
gtccacaaggagctg

SEQ ID NO: 1281881 - DNA, 15 bp, Homo sapiens
tgtccacaaggagct

SEQ ID NO: 1281882 - DNA, 15 bp, Homo sapiens
ctgtccacaaggagc

SEQ ID NO: 1281883 - DNA, 15 bp, Homo sapiens
cctgtccacaaggag

SEQ ID NO: 1281884 - DNA, 15 bp, Homo sapiens
ccctgtccacaagga

SEQ ID NO: 1281885 - DNA, 15 bp, Homo sapiens
gccctgtccacaagg

SEQ ID NO: 1281886 - DNA, 15 bp, Homo sapiens
agccctgtccacaag

SEQ ID NO: 1281887 - DNA, 15 bp, Homo sapiens
cagccctgtccacaa

SEQ ID NO: 1281888 - DNA, 15 bp, Homo sapiens
ccagccctgtccaca

SEQ ID NO: 1281889 - DNA, 15 bp, Homo sapiens
accagccctgtccac

SEQ ID NO: 1281890 - DNA, 15 bp, Homo sapiens
gaccagccctgtcca

SEQ ID NO: 1281891 - DNA, 15 bp, Homo sapiens
ggaccagccctgtcc

SEQ ID NO: 1281892 - DNA, 15 bp, Homo sapiens
aggaccagccctgtc

SEQ ID NO: 1281893 - DNA, 15 bp, Homo sapiens
caggaccagccctgt

SEQ ID NO: 1281894 - DNA, 15 bp, Homo sapiens
ccaggaccagccctg

SEQ ID NO: 1281895 - DNA, 15 bp, Homo sapiens
accaggaccagccct

SEQ ID NO: 1281896 - DNA, 15 bp, Homo sapiens
aaccaggaccagccc

SEQ ID NO: 1281897 - DNA, 15 bp, Homo sapiens
aaaccaggaccagcc

SEQ ID NO: 1281898 - DNA, 15 bp, Homo sapiens
gaaaccaggaccagc

SEQ ID NO: 1281899 - DNA, 15 bp, Homo sapiens
agaaaccaggaccag

SEQ ID NO: 1281900 - DNA, 15 bp, Homo sapiens
aagaaaccaggacca

SEQ ID NO: 1281901 - DNA, 15 bp, Homo sapiens
aaagaaaccaggacc

SEQ ID NO: 1281902 - DNA, 15 bp, Homo sapiens
gaaagaaaccaggac

SEQ ID NO: 1281903 - DNA, 15 bp, Homo sapiens
agaaagaaaccagga

SEQ ID NO: 1281904 - DNA, 15 bp, Homo sapiens
cagaaagaaaccagg

SEQ ID NO: 1281905 - DNA, 15 bp, Homo sapiens
ccagaaagaaaccag

SEQ ID NO: 1281906 - DNA, 15 bp, Homo sapiens
tccagaaagaaacca

SEQ ID NO: 1281907 - DNA, 15 bp, Homo sapiens
atccagaaagaaacc

SEQ ID NO: 1281908 - DNA, 15 bp, Homo sapiens
gatccagaaagaaac

SEQ ID NO: 1281909 - DNA, 15 bp, Homo sapiens
cagatccagaaagaa

SEQ ID NO: 1281910 - DNA, 15 bp, Homo sapiens
acagatccagaaaga

SEQ ID NO: 1281911 - DNA, 15 bp, Homo sapiens
cacagatccagaaag

SEQ ID NO: 1281912 - DNA, 15 bp, Homo sapiens
gcacagatccagaaa

SEQ ID NO: 1281913 - DNA, 15 bp, Homo sapiens
ggcacagatccagaa

SEQ ID NO: 1281914 - DNA, 15 bp, Homo sapiens
aggcacagatccaga

SEQ ID NO: 1281915 - DNA, 15 bp, Homo sapiens
caggcacagatccag

SEQ ID NO: 1281916 - DNA, 15 bp, Homo sapiens
ccaggcacagatcca

SEQ ID NO: 1281917 - DNA, 15 bp, Homo sapiens
gccaggcacagatcc

SEQ ID NO: 1281918 - DNA, 15 bp, Homo sapiens
tgccaggcacagatc

SEQ ID NO: 1281919 - DNA, 15 bp, Homo sapiens
ctgccaggcacagat

SEQ ID NO: 1281920 - DNA, 15 bp, Homo sapiens
cctgccaggcacaga

SEQ ID NO: 1281921 - DNA, 15 bp, Homo sapiens
acctgccaggcacag

SEQ ID NO: 1281922 - DNA, 15 bp, Homo sapiens
cacctgccaggcaca

SEQ ID NO: 1281923 - DNA, 15 bp, Homo sapiens
ccacctgccaggcac

SEQ ID NO: 1281924 - DNA, 15 bp, Homo sapiens
accacctgccaggca

SEQ ID NO: 1281925 - DNA, 15 bp, Homo sapiens
gaccacctgccaggc

SEQ ID NO: 1281926 - DNA, 15 bp, Homo sapiens
ggaccacctgccagg

SEQ ID NO: 1281927 - DNA, 15 bp, Homo sapiens
aggaccacctgccag

SEQ ID NO: 1281928 - DNA, 15 bp, Homo sapiens
taggaccacctgcca

SEQ ID NO: 1281929 - DNA, 15 bp, Homo sapiens
ctaggaccacctgcc

SEQ ID NO: 1281930 - DNA, 15 bp, Homo sapiens
tctaggaccacctgc

SEQ ID NO: 1281931 - DNA, 15 bp, Homo sapiens
ctctaggaccacctg

SEQ ID NO: 1281932 - DNA, 15 bp, Homo sapiens
cctctaggaccacct

SEQ ID NO: 1281933 - DNA, 15 bp, Homo sapiens
ccctctaggaccacc

SEQ ID NO: 1281934 - DNA, 15 bp, Homo sapiens
gccctctaggaccac

SEQ ID NO: 1281935 - DNA, 15 bp, Homo sapiens
tgccctctaggacca

SEQ ID NO: 1281936 - DNA, 15 bp, Homo sapiens
ctgccctctaggacc

SEQ ID NO: 1281937 - DNA, 15 bp, Homo sapiens
actgccctctaggac

SEQ ID NO: 1281938 - DNA, 15 bp, Homo sapiens
cactgccctctagga

SEQ ID NO: 1281939 - DNA, 15 bp, Homo sapiens
tcactgccctctagg

SEQ ID NO: 1281940 - DNA, 15 bp, Homo sapiens
gtcactgccctctag

SEQ ID NO: 1281941 - DNA, 15 bp, Homo sapiens
ggtcactgccctcta

SEQ ID NO: 1281942 - DNA, 15 bp, Homo sapiens
tggtcactgccctct

SEQ ID NO: 1281943 - DNA, 15 bp, Homo sapiens
ctggtcactgccctc

SEQ ID NO: 1281944 - DNA, 15 bp, Homo sapiens
cctggtcactgccct

SEQ ID NO: 1281945 - DNA, 15 bp, Homo sapiens
ccctggtcactgccc

SEQ ID NO: 1281946 - DNA, 15 bp, Homo sapiens
cccctggtcactgcc

SEQ ID NO: 1281947 - DNA, 15 bp, Homo sapiens
acccctggtcactgc

SEQ ID NO: 1281948 - DNA, 15 bp, Homo sapiens
gacccctggtcactg

SEQ ID NO: 1281949 - DNA, 15 bp, Homo sapiens
cgacccctggtcact

SEQ ID NO: 1281950 - DNA, 15 bp, Homo sapiens
gcgacccctggtcac

SEQ ID NO: 1281951 - DNA, 15 bp, Homo sapiens
agcgacccctggtca

SEQ ID NO: 1281952 - DNA, 15 bp, Homo sapiens
gagcgacccctggtc

SEQ ID NO: 1281953 - DNA, 15 bp, Homo sapiens
tgagcgacccctggt

SEQ ID NO: 1281954 - DNA, 15 bp, Homo sapiens
ttgagcgacccctgg

SEQ ID NO: 1281955 - DNA, 15 bp, Homo sapiens
attgagcgacccctg

SEQ ID NO: 1281956 - DNA, 15 bp, Homo sapiens
cattgagcgacccct

SEQ ID NO: 1281957 - DNA, 15 bp, Homo sapiens
acattgagcgacccc

SEQ ID NO: 1281958 - DNA, 15 bp, Homo sapiens
cacattgagcgaccc

SEQ ID NO: 1281959 - DNA, 15 bp, Homo sapiens
ccacattgagcgacc

SEQ ID NO: 1281960 - DNA, 15 bp, Homo sapiens
accacattgagcgac

SEQ ID NO: 1281961 - DNA, 15 bp, Homo sapiens
caccacattgagcga

SEQ ID NO: 1281962 - DNA, 15 bp, Homo sapiens
ccaccacattgagcg

SEQ ID NO: 1281963 - DNA, 15 bp, Homo sapiens
gccaccacattgagc

SEQ ID NO: 1281964 - DNA, 15 bp, Homo sapiens
agccaccacattgag

SEQ ID NO: 1281965 - DNA, 15 bp, Homo sapiens
cagccaccacattga

SEQ ID NO: 1281966 - DNA, 15 bp, Homo sapiens
ccagccaccacattg

SEQ ID NO: 1281967 - DNA, 15 bp, Homo sapiens
accagccaccacatt

SEQ ID NO: 1281968 - DNA, 15 bp, Homo sapiens
gaccagccaccacat

SEQ ID NO: 1281969 - DNA, 15 bp, Homo sapiens
tgaccagccaccaca

SEQ ID NO: 1281970 - DNA, 15 bp, Homo sapiens
atgaccagccaccac

SEQ ID NO: 1281971 - DNA, 15 bp, Homo sapiens
gatgaccagccacca

SEQ ID NO: 1281972 - DNA, 15 bp, Homo sapiens
ttctaggtctcagtt

SEQ ID NO: 1281973 - DNA, 15 bp, Homo sapiens
tttctaggtctcagt

SEQ ID NO: 1281974 - DNA, 15 bp, Homo sapiens
ttttctaggtctcag

SEQ ID NO: 1281975 - DNA, 15 bp, Homo sapiens
gttttctaggtctca

SEQ ID NO: 1281976 - DNA, 15 bp, Homo sapiens
agttttctaggtctc

SEQ ID NO: 1281977 - DNA, 15 bp, Homo sapiens
tagttttctaggtct

SEQ ID NO: 1281978 - DNA, 15 bp, Homo sapiens
ttagttttctaggtc

SEQ ID NO: 1281979 - DNA, 15 bp, Homo sapiens
cttagttttctaggt

SEQ ID NO: 1281980 - DNA, 15 bp, Homo sapiens
acttagttttctagg

SEQ ID NO: 1281981 - DNA, 15 bp, Homo sapiens
tacttagttttctag

SEQ ID NO: 1281982 - DNA, 15 bp, Homo sapiens
gtacttagttttcta

SEQ ID NO: 1281983 - DNA, 15 bp, Homo sapiens
agtacttagttttct

SEQ ID NO: 1281984 - DNA, 15 bp, Homo sapiens
aagtacttagttttc

SEQ ID NO: 1281985 - DNA, 15 bp, Homo sapiens
caagtacttagtttt

SEQ ID NO: 1281986 - DNA, 15 bp, Homo sapiens
acaagtacttagttt

SEQ ID NO: 1281987 - DNA, 15 bp, Homo sapiens
gacaagtacttagtt

SEQ ID NO: 1281988 - DNA, 15 bp, Homo sapiens
ggacaagtacttagt

SEQ ID NO: 1281989 - DNA, 15 bp, Homo sapiens
aggacaagtacttag

SEQ ID NO: 1281990 - DNA, 15 bp, Homo sapiens
taggacaagtactta

SEQ ID NO: 1281991 - DNA, 15 bp, Homo sapiens
gtaggacaagtactt

SEQ ID NO: 1281992 - DNA, 15 bp, Homo sapiens
agtaggacaagtact

SEQ ID NO: 1281993 - DNA, 15 bp, Homo sapiens
gagtaggacaagtac

SEQ ID NO: 1281994 - DNA, 15 bp, Homo sapiens
ggagtaggacaagta

SEQ ID NO: 1281995 - DNA, 15 bp, Homo sapiens
tggagtaggacaagt

SEQ ID NO: 1281996 - DNA, 15 bp, Homo sapiens
ctggagtaggacaag

SEQ ID NO: 1281997 - DNA, 15 bp, Homo sapiens
actggagtaggacaa

SEQ ID NO: 1281998 - DNA, 15 bp, Homo sapiens
cactggagtaggaca

SEQ ID NO: 1281999 - DNA, 15 bp, Homo sapiens
gcactggagtaggac

SEQ ID NO: 1282000 - DNA, 15 bp, Homo sapiens
agcactggagtagga

SEQ ID NO: 1282001 - DNA, 15 bp, Homo sapiens
cagcactggagtagg

SEQ ID NO: 1282002 - DNA, 15 bp, Homo sapiens
gcagcactggagtag

SEQ ID NO: 1282003 - DNA, 15 bp, Homo sapiens
ggcagcactggagta

SEQ ID NO: 1282004 - DNA, 15 bp, Homo sapiens
aggcagcactggagt

SEQ ID NO: 1282005 - DNA, 15 bp, Homo sapiens
gaggcagcactggag

SEQ ID NO: 1282006 - DNA, 15 bp, Homo sapiens
ggaggcagcactgga

SEQ ID NO: 1282007 - DNA, 15 bp, Homo sapiens
gggaggcagcactgg

SEQ ID NO: 1282008 - DNA, 15 bp, Homo sapiens
ggggaggcagcactg

SEQ ID NO: 1282009 - DNA, 15 bp, Homo sapiens
tggggaggcagcact

SEQ ID NO: 1282010 - DNA, 15 bp, Homo sapiens
ctggggaggcagcac

SEQ ID NO: 1282011 - DNA, 15 bp, Homo sapiens
actggggaggcagca

SEQ ID NO: 1282012 - DNA, 15 bp, Homo sapiens
gactggggaggcagc

SEQ ID NO: 1282013 - DNA, 15 bp, Homo sapiens
tgactggggaggcag

SEQ ID NO: 1282014 - DNA, 15 bp, Homo sapiens
atgactggggaggca

SEQ ID NO: 1282015 - DNA, 15 bp, Homo sapiens
gatgactggggaggc

SEQ ID NO: 1282016 - DNA, 15 bp, Homo sapiens
ggatgactggggagg

SEQ ID NO: 1282017 - DNA, 15 bp, Homo sapiens
tggatgactggggag

SEQ ID NO: 1282018 - DNA, 15 bp, Homo sapiens
atggatgactgggga

SEQ ID NO: 1282019 - DNA, 15 bp, Homo sapiens
catggatgactgggg

SEQ ID NO: 1282020 - DNA, 15 bp, Homo sapiens
ccatggatgactggg

SEQ ID NO: 1282021 - DNA, 15 bp, Homo sapiens
gccatggatgactgg

SEQ ID NO: 1282022 - DNA, 15 bp, Homo sapiens
ggccatggatgactg

SEQ ID NO: 1282023 - DNA, 15 bp, Homo sapiens
tggccatggatgact

SEQ ID NO: 1282024 - DNA, 15 bp, Homo sapiens
ctggccatggatgac

SEQ ID NO: 1282025 - DNA, 15 bp, Homo sapiens
tctggccatggatga

SEQ ID NO: 1282026 - DNA, 15 bp, Homo sapiens
gtctggccatggatg

SEQ ID NO: 1282027 - DNA, 15 bp, Homo sapiens
agtctggccatggat

SEQ ID NO: 1282028 - DNA, 15 bp, Homo sapiens
tagtctggccatgga

SEQ ID NO: 1282029 - DNA, 15 bp, Homo sapiens
ttagtctggccatgg

SEQ ID NO: 1282030 - DNA, 15 bp, Homo sapiens
tttagtctggccatg

SEQ ID NO: 1282031 - DNA, 15 bp, Homo sapiens
atttagtctggccat

SEQ ID NO: 1282032 - DNA, 15 bp, Homo sapiens
aatttagtctggcca

SEQ ID NO: 1282033 - DNA, 15 bp, Homo sapiens
taatttagtctggcc

SEQ ID NO: 1282034 - DNA, 15 bp, Homo sapiens
gtaatttagtctggc

SEQ ID NO: 1282035 - DNA, 15 bp, Homo sapiens
agtaatttagtctgg

SEQ ID NO: 1282036 - DNA, 15 bp, Homo sapiens
gagtaatttagtctg

SEQ ID NO: 1282037 - DNA, 15 bp, Homo sapiens
agagtaatttagtct

SEQ ID NO: 1282038 - DNA, 15 bp, Homo sapiens
tagagtaatttagtc

SEQ ID NO: 1282039 - DNA, 15 bp, Homo sapiens
atagagtaatttagt

SEQ ID NO: 1282040 - DNA, 15 bp, Homo sapiens
gatagagtaatttag

SEQ ID NO: 1282041 - DNA, 15 bp, Homo sapiens
agatagagtaattta

SEQ ID NO: 1282042 - DNA, 15 bp, Homo sapiens
aagatagagtaattt

SEQ ID NO: 1282043 - DNA, 15 bp, Homo sapiens
aaagatagagtaatt

SEQ ID NO: 1282044 - DNA, 15 bp, Homo sapiens
gaaagatagagtaat

SEQ ID NO: 1282045 - DNA, 15 bp, Homo sapiens
ggaaagatagagtaa

SEQ ID NO: 1282046 - DNA, 15 bp, Homo sapiens
aggaaagatagagta

SEQ ID NO: 1282047 - DNA, 15 bp, Homo sapiens
aaggaaagatagagt

SEQ ID NO: 1282048 - DNA, 15 bp, Homo sapiens
aaaggaaagatagag

SEQ ID NO: 1282049 - DNA, 15 bp, Homo sapiens
caaaggaaagataga

SEQ ID NO: 1282050 - DNA, 15 bp, Homo sapiens
ccaaaggaaagatag

SEQ ID NO: 1282051 - DNA, 15 bp, Homo sapiens
cccaaaggaaagata

SEQ ID NO: 1282052 - DNA, 15 bp, Homo sapiens
gcccaaaggaaagat

SEQ ID NO: 1282053 - DNA, 15 bp, Homo sapiens
agcccaaaggaaaga

SEQ ID NO: 1282054 - DNA, 15 bp, Homo sapiens
cagcccaaaggaaag

SEQ ID NO: 1282055 - DNA, 15 bp, Homo sapiens
gcagcccaaaggaaa

SEQ ID NO: 1282056 - DNA, 15 bp, Homo sapiens
tgcagcccaaaggaa

SEQ ID NO: 1282057 - DNA, 15 bp, Homo sapiens
ttgcagcccaaagga

SEQ ID NO: 1282058 - DNA, 15 bp, Homo sapiens
tttgcagcccaaagg

SEQ ID NO: 1282059 - DNA, 15 bp, Homo sapiens
ctttgcagcccaaag

SEQ ID NO: 1282060 - DNA, 15 bp, Homo sapiens
actttgcagcccaaa

SEQ ID NO: 1282061 - DNA, 15 bp, Homo sapiens
gactttgcagcccaa

SEQ ID NO: 1282062 - DNA, 15 bp, Homo sapiens
cgactttgcagccca

SEQ ID NO: 1282063 - DNA, 15 bp, Homo sapiens
acgactttgcagccc

SEQ ID NO: 1282064 - DNA, 15 bp, Homo sapiens
aacgactttgcagcc

SEQ ID NO: 1282065 - DNA, 15 bp, Homo sapiens
aaacgactttgcagc

SEQ ID NO: 1282066 - DNA, 15 bp, Homo sapiens
aaaacgactttgcag

SEQ ID NO: 1282067 - DNA, 15 bp, Homo sapiens
taaaacgactttgca

SEQ ID NO: 1282068 - DNA, 15 bp, Homo sapiens
ataaaacgactttgc

SEQ ID NO: 1282069 - DNA, 15 bp, Homo sapiens
aataaaacgactttg

SEQ ID NO: 1282070 - DNA, 15 bp, Homo sapiens
aaataaaacgacttt

SEQ ID NO: 1282071 - DNA, 15 bp, Homo sapiens
taaataaaacgactt

SEQ ID NO: 1282072 - DNA, 15 bp, Homo sapiens
ataaataaaacgact

SEQ ID NO: 1282073 - DNA, 15 bp, Homo sapiens
tataaataaaacgac

SEQ ID NO: 1282074 - DNA, 15 bp, Homo sapiens
ttataaataaaacga

SEQ ID NO: 1282075 - DNA, 15 bp, Homo sapiens
gttataaataaaacg

SEQ ID NO: 1282076 - DNA, 15 bp, Homo sapiens
tgttataaataaaac

SEQ ID NO: 1282077 - DNA, 15 bp, Homo sapiens
gtgttataaataaaa

SEQ ID NO: 1282078 - DNA, 15 bp, Homo sapiens
tgtgttataaataaa

SEQ ID NO: 1282079 - DNA, 15 bp, Homo sapiens
gtgtgttataaataa

SEQ ID NO: 1282080 - DNA, 15 bp, Homo sapiens
ggtgtgttataaata

SEQ ID NO: 1282081 - DNA, 15 bp, Homo sapiens
aggtgtgttataaat

SEQ ID NO: 1282082 - DNA, 15 bp, Homo sapiens
gaggtgtgttataaa

SEQ ID NO: 1282083 - DNA, 15 bp, Homo sapiens
agaggtgtgttataa

SEQ ID NO: 1282084 - DNA, 15 bp, Homo sapiens
gagaggtgtgttata

SEQ ID NO: 1282085 - DNA, 15 bp, Homo sapiens
agagaggtgtgttat

SEQ ID NO: 1282086 - DNA, 15 bp, Homo sapiens
aagagaggtgtgtta

SEQ ID NO: 1282087 - DNA, 15 bp, Homo sapiens
caagagaggtgtgtt

SEQ ID NO: 1282088 - DNA, 15 bp, Homo sapiens
acaagagaggtgtgt

SEQ ID NO: 1282089 - DNA, 15 bp, Homo sapiens
aacaagagaggtgtg

SEQ ID NO: 1282090 - DNA, 15 bp, Homo sapiens
aaacaagagaggtgt

SEQ ID NO: 1282091 - DNA, 15 bp, Homo sapiens
aaaacaagagaggtg

SEQ ID NO: 1282092 - DNA, 15 bp, Homo sapiens
taaaacaagagaggt

SEQ ID NO: 1282093 - DNA, 15 bp, Homo sapiens
ataaaacaagagagg

SEQ ID NO: 1282094 - DNA, 15 bp, Homo sapiens
tataaaacaagagag

SEQ ID NO: 1282095 - DNA, 15 bp, Homo sapiens
ttataaaacaagaga

SEQ ID NO: 1282096 - DNA, 15 bp, Homo sapiens
cttataaaacaagag

SEQ ID NO: 1282097 - DNA, 15 bp, Homo sapiens
acttataaaacaaga

SEQ ID NO: 1282098 - DNA, 15 bp, Homo sapiens
tacttataaaacaag

SEQ ID NO: 1282099 - DNA, 15 bp, Homo sapiens
ctacttataaaacaa

SEQ ID NO: 1282100 - DNA, 15 bp, Homo sapiens
gctacttataaaaca

SEQ ID NO: 1282101 - DNA, 15 bp, Homo sapiens
ggctacttataaaac

SEQ ID NO: 1282102 - DNA, 15 bp, Homo sapiens
tggctacttataaaa

SEQ ID NO: 1282103 - DNA, 15 bp, Homo sapiens
atggctacttataaa

SEQ ID NO: 1282104 - DNA, 15 bp, Homo sapiens
catggctacttataa

SEQ ID NO: 1282105 - DNA, 15 bp, Homo sapiens
tcatggctacttata

SEQ ID NO: 1282106 - DNA, 15 bp, Homo sapiens
ttcatggctacttat

SEQ ID NO: 1282107 - DNA, 15 bp, Homo sapiens
cttcatggctactta

SEQ ID NO: 1282108 - DNA, 15 bp, Homo sapiens
ccttcatggctactt

SEQ ID NO: 1282109 - DNA, 15 bp, Homo sapiens
cccttcatggctact

SEQ ID NO: 1282110 - DNA, 15 bp, Homo sapiens
ccccttcatggctac

SEQ ID NO: 1282111 - DNA, 15 bp, Homo sapiens
accccttcatggcta

SEQ ID NO: 1282112 - DNA, 15 bp, Homo sapiens
aaccccttcatggct

SEQ ID NO: 1282113 - DNA, 15 bp, Homo sapiens
aaaccccttcatggc

SEQ ID NO: 1282114 - DNA, 15 bp, Homo sapiens
caaaccccttcatgg

SEQ ID NO: 1282115 - DNA, 15 bp, Homo sapiens
acaaaccccttcatg

SEQ ID NO: 1282116 - DNA, 15 bp, Homo sapiens
aacaaaccccttcat

SEQ ID NO: 1282117 - DNA, 15 bp, Homo sapiens
aaacaaaccccttca

SEQ ID NO: 1282118 - DNA, 15 bp, Homo sapiens
aaaacaaaccccttc

SEQ ID NO: 1282119 - DNA, 15 bp, Homo sapiens
taaaacaaacccctt

SEQ ID NO: 1282120 - DNA, 15 bp, Homo sapiens
gtaaaacaaacccct

SEQ ID NO: 1282121 - DNA, 15 bp, Homo sapiens
ggtaaaacaaacccc

SEQ ID NO: 1282122 - DNA, 15 bp, Homo sapiens
gggtaaaacaaaccc

SEQ ID NO: 1282123 - DNA, 15 bp, Homo sapiens
tgggtaaaacaaacc

SEQ ID NO: 1282124 - DNA, 15 bp, Homo sapiens
gtgggtaaaacaaac

SEQ ID NO: 1282125 - DNA, 15 bp, Homo sapiens
agtgggtaaaacaaa

SEQ ID NO: 1282126 - DNA, 15 bp, Homo sapiens
tagtgggtaaaacaa

SEQ ID NO: 1282127 - DNA, 15 bp, Homo sapiens
ctagtgggtaaaaca

SEQ ID NO: 1282128 - DNA, 15 bp, Homo sapiens
tctagtgggtaaaac

SEQ ID NO: 1282129 - DNA, 15 bp, Homo sapiens
atctagtgggtaaaa

SEQ ID NO: 1282130 - DNA, 15 bp, Homo sapiens
aatctagtgggtaaa

SEQ ID NO: 1282131 - DNA, 15 bp, Homo sapiens
taatctagtgggtaa

SEQ ID NO: 1282132 - DNA, 15 bp, Homo sapiens
ctaatctagtgggta

SEQ ID NO: 1282133 - DNA, 15 bp, Homo sapiens
cctaatctagtgggt

SEQ ID NO: 1282134 - DNA, 15 bp, Homo sapiens
ccctaatctagtggg

SEQ ID NO: 1282135 - DNA, 15 bp, Homo sapiens
tccctaatctagtgg

SEQ ID NO: 1282136 - DNA, 15 bp, Homo sapiens
atccctaatctagtg

SEQ ID NO: 1282137 - DNA, 15 bp, Homo sapiens
aatccctaatctagt

SEQ ID NO: 1282138 - DNA, 15 bp, Homo sapiens
caatccctaatctag

SEQ ID NO: 1282139 - DNA, 15 bp, Homo sapiens
ccaatccctaatcta

SEQ ID NO: 1282140 - DNA, 15 bp, Homo sapiens
accaatccctaatct

SEQ ID NO: 1282141 - DNA, 15 bp, Homo sapiens
taccaatccctaatc

SEQ ID NO: 1282142 - DNA, 15 bp, Homo sapiens
gtaccaatccctaat

SEQ ID NO: 1282143 - DNA, 15 bp, Homo sapiens
tgtaccaatccctaa

SEQ ID NO: 1282144 - DNA, 15 bp, Homo sapiens
atgtaccaatcccta

SEQ ID NO: 1282145 - DNA, 15 bp, Homo sapiens
aatgtaccaatccct

SEQ ID NO: 1282146 - DNA, 15 bp, Homo sapiens
taatgtaccaatccc

SEQ ID NO: 1282147 - DNA, 15 bp, Homo sapiens
gtaatgtaccaatcc

SEQ ID NO: 1282148 - DNA, 15 bp, Homo sapiens
tgtaatgtaccaatc

SEQ ID NO: 1282149 - DNA, 15 bp, Homo sapiens
ctgtaatgtaccaat

SEQ ID NO: 1282150 - DNA, 15 bp, Homo sapiens
cctgtaatgtaccaa

SEQ ID NO: 1282151 - DNA, 15 bp, Homo sapiens
acctgtaatgtacca

SEQ ID NO: 1282152 - DNA, 15 bp, Homo sapiens
gacctgtaatgtacc

SEQ ID NO: 1282153 - DNA, 15 bp, Homo sapiens
cgacctgtaatgtac

SEQ ID NO: 1282154 - DNA, 15 bp, Homo sapiens
tcgacctgtaatgta

SEQ ID NO: 1282155 - DNA, 15 bp, Homo sapiens
ttcgacctgtaatgt

SEQ ID NO: 1282156 - DNA, 15 bp, Homo sapiens
attcgacctgtaatg

SEQ ID NO: 1282157 - DNA, 15 bp, Homo sapiens
gattcgacctgtaat

SEQ ID NO: 1282158 - DNA, 15 bp, Homo sapiens
ggattcgacctgtaa

SEQ ID NO: 1282159 - DNA, 15 bp, Homo sapiens
cggattcgacctgta

SEQ ID NO: 1282160 - DNA, 15 bp, Homo sapiens
ccggattcgacctgt

SEQ ID NO: 1282161 - DNA, 15 bp, Homo sapiens
gccggattcgacctg

SEQ ID NO: 1282162 - DNA, 15 bp, Homo sapiens
ggccggattcgacct

SEQ ID NO: 1282163 - DNA, 15 bp, Homo sapiens
gggccggattcgacc

SEQ ID NO: 1282164 - DNA, 15 bp, Homo sapiens
tgggccggattcgac

SEQ ID NO: 1282165 - DNA, 15 bp, Homo sapiens
gtgggccggattcga

SEQ ID NO: 1282166 - DNA, 15 bp, Homo sapiens
agtgggccggattcg

SEQ ID NO: 1282167 - DNA, 15 bp, Homo sapiens
cagtgggccggattc

SEQ ID NO: 1282168 - DNA, 15 bp, Homo sapiens
gcagtgggccggatt

SEQ ID NO: 1282169 - DNA, 15 bp, Homo sapiens
tgcagtgggccggat

SEQ ID NO: 1282170 - DNA, 15 bp, Homo sapiens
atgcagtgggccgga

SEQ ID NO: 1282171 - DNA, 15 bp, Homo sapiens
catgcagtgggccgg

SEQ ID NO: 1282172 - DNA, 15 bp, Homo sapiens
acatgcagtgggccg

SEQ ID NO: 1282173 - DNA, 15 bp, Homo sapiens
aacatgcagtgggcc

SEQ ID NO: 1282174 - DNA, 15 bp, Homo sapiens
aaacatgcagtgggc

SEQ ID NO: 1282175 - DNA, 15 bp, Homo sapiens
aaaacatgcagtggg

SEQ ID NO: 1282176 - DNA, 15 bp, Homo sapiens
caaaacatgcagtgg

SEQ ID NO: 1282177 - DNA, 15 bp, Homo sapiens
acaaaacatgcagtg

SEQ ID NO: 1282178 - DNA, 15 bp, Homo sapiens
tacaaaacatgcagt

SEQ ID NO: 1282179 - DNA, 15 bp, Homo sapiens
ttacaaaacatgcag

SEQ ID NO: 1282180 - DNA, 15 bp, Homo sapiens
tttacaaaacatgca

SEQ ID NO: 1282181 - DNA, 15 bp, Homo sapiens
atttacaaaacatgc

SEQ ID NO: 1282182 - DNA, 15 bp, Homo sapiens
tatttacaaaacatg

SEQ ID NO: 1282183 - DNA, 15 bp, Homo sapiens
ttatttacaaaacat

SEQ ID NO: 1282184 - DNA, 15 bp, Homo sapiens
tttatttacaaaaca

SEQ ID NO: 1282185 - DNA, 15 bp, Homo sapiens
ctttatttacaaaac

SEQ ID NO: 1282186 - DNA, 15 bp, Homo sapiens
actttatttacaaaa

SEQ ID NO: 1282187 - DNA, 15 bp, Homo sapiens
aactttatttacaaa

SEQ ID NO: 1282188 - DNA, 15 bp, Homo sapiens
aaactttatttacaa

SEQ ID NO: 1282189 - DNA, 15 bp, Homo sapiens
aaaactttatttaca

SEQ ID NO: 1282190 - DNA, 15 bp, Homo sapiens
taaaactttatttac

SEQ ID NO: 1282191 - DNA, 15 bp, Homo sapiens
ataaaactttattta

SEQ ID NO: 1282192 - DNA, 15 bp, Homo sapiens
aataaaactttattt

SEQ ID NO: 1282193 - DNA, 15 bp, Homo sapiens
caataaaactttatt

SEQ ID NO: 1282194 - DNA, 15 bp, Homo sapiens
ccaataaaactttat

SEQ ID NO: 1282195 - DNA, 15 bp, Homo sapiens
tccaataaaacttta

SEQ ID NO: 1282196 - DNA, 15 bp, Homo sapiens
ttccaataaaacttt

SEQ ID NO: 1282197 - DNA, 15 bp, Homo sapiens
gttccaataaaactt

SEQ ID NO: 1282198 - DNA, 15 bp, Homo sapiens
tgttccaataaaact

SEQ ID NO: 1282199 - DNA, 15 bp, Homo sapiens
gtgttccaataaaac

SEQ ID NO: 1282200 - DNA, 15 bp, Homo sapiens
tgtgttccaataaaa

SEQ ID NO: 1282201 - DNA, 15 bp, Homo sapiens
ctgtgttccaataaa

SEQ ID NO: 1282202 - DNA, 15 bp, Homo sapiens
tctgtgttccaataa

SEQ ID NO: 1282203 - DNA, 15 bp, Homo sapiens
atctgtgttccaata

SEQ ID NO: 1282204 - DNA, 15 bp, Homo sapiens
tatctgtgttccaat

SEQ ID NO: 1282205 - DNA, 15 bp, Homo sapiens
atatctgtgttccaa

SEQ ID NO: 1282206 - DNA, 15 bp, Homo sapiens
catatctgtgttcca

SEQ ID NO: 1282207 - DNA, 15 bp, Homo sapiens
gcatatctgtgttcc

SEQ ID NO: 1282208 - DNA, 15 bp, Homo sapiens
agcatatctgtgttc

SEQ ID NO: 1282209 - DNA, 15 bp, Homo sapiens
gagcatatctgtgtt

SEQ ID NO: 1282210 - DNA, 15 bp, Homo sapiens
tgagcatatctgtgt

SEQ ID NO: 1282211 - DNA, 15 bp, Homo sapiens
atgagcatatctgtg

SEQ ID NO: 1282212 - DNA, 15 bp, Homo sapiens
aatgagcatatctgt

SEQ ID NO: 1282213 - DNA, 15 bp, Homo sapiens
aaatgagcatatctg

SEQ ID NO: 1282214 - DNA, 15 bp, Homo sapiens
caaatgagcatatct

SEQ ID NO: 1282215 - DNA, 15 bp, Homo sapiens
acaaatgagcatatc

SEQ ID NO: 1282216 - DNA, 15 bp, Homo sapiens
aacaaatgagcatat

SEQ ID NO: 1282217 - DNA, 15 bp, Homo sapiens
gaacaaatgagcata

SEQ ID NO: 1282218 - DNA, 15 bp, Homo sapiens
cgaacaaatgagcat

SEQ ID NO: 1282219 - DNA, 15 bp, Homo sapiens
acgaacaaatgagca

SEQ ID NO: 1282220 - DNA, 15 bp, Homo sapiens
cacgaacaaatgagc

SEQ ID NO: 1282221 - DNA, 15 bp, Homo sapiens
acacgaacaaatgag

SEQ ID NO: 1282222 - DNA, 15 bp, Homo sapiens
tacacgaacaaatga

SEQ ID NO: 1282223 - DNA, 15 bp, Homo sapiens
atacacgaacaaatg

SEQ ID NO: 1282224 - DNA, 15 bp, Homo sapiens
aatacacgaacaaat

SEQ ID NO: 1282225 - DNA, 15 bp, Homo sapiens
caatacacgaacaaa

SEQ ID NO: 1282226 - DNA, 15 bp, Homo sapiens
acaatacacgaacaa

SEQ ID NO: 1282227 - DNA, 15 bp, Homo sapiens
cacaatacacgaaca

SEQ ID NO: 1282228 - DNA, 15 bp, Homo sapiens
gcacaatacacgaac

SEQ ID NO: 1282229 - DNA, 15 bp, Homo sapiens
tgcacaatacacgaa

SEQ ID NO: 1282230 - DNA, 15 bp, Homo sapiens
atgcacaatacacga

SEQ ID NO: 1282231 - DNA, 15 bp, Homo sapiens
catgcacaatacacg

SEQ ID NO: 1282232 - DNA, 15 bp, Homo sapiens
ccatgcacaatacac

SEQ ID NO: 1282233 - DNA, 15 bp, Homo sapiens
gccatgcacaataca

SEQ ID NO: 1282234 - DNA, 15 bp, Homo sapiens
ggccatgcacaatac

SEQ ID NO: 1282235 - DNA, 15 bp, Homo sapiens
tggccatgcacaata

SEQ ID NO: 1282236 - DNA, 15 bp, Homo sapiens
gtggccatgcacaat

SEQ ID NO: 1282237 - DNA, 15 bp, Homo sapiens
agtggccatgcacaa

SEQ ID NO: 1282238 - DNA, 15 bp, Homo sapiens
aagtggccatgcaca

SEQ ID NO: 1282239 - DNA, 15 bp, Homo sapiens
aaagtggccatgcac

SEQ ID NO: 1282240 - DNA, 15 bp, Homo sapiens
aaaagtggccatgca

SEQ ID NO: 1282241 - DNA, 15 bp, Homo sapiens
caaaagtggccatgc

SEQ ID NO: 1282242 - DNA, 15 bp, Homo sapiens
acaaaagtggccatg

SEQ ID NO: 1282243 - DNA, 15 bp, Homo sapiens
cacaaaagtggccat

SEQ ID NO: 1282244 - DNA, 15 bp, Homo sapiens
gcacaaaagtggcca

SEQ ID NO: 1282245 - DNA, 15 bp, Homo sapiens
agcacaaaagtggcc

SEQ ID NO: 1282246 - DNA, 15 bp, Homo sapiens
tagcacaaaagtggc

SEQ ID NO: 1282247 - DNA, 15 bp, Homo sapiens
atagcacaaaagtgg

SEQ ID NO: 1282248 - DNA, 15 bp, Homo sapiens
catagcacaaaagtg

SEQ ID NO: 1282249 - DNA, 15 bp, Homo sapiens
acatagcacaaaagt

SEQ ID NO: 1282250 - DNA, 15 bp, Homo sapiens
gacatagcacaaaag

SEQ ID NO: 1282251 - DNA, 15 bp, Homo sapiens
tgacatagcacaaaa

SEQ ID NO: 1282252 - DNA, 15 bp, Homo sapiens
ctgacatagcacaaa

SEQ ID NO: 1282253 - DNA, 15 bp, Homo sapiens
tctgacatagcacaa

SEQ ID NO: 1282254 - DNA, 15 bp, Homo sapiens
ctctgacatagcaca

SEQ ID NO: 1282255 - DNA, 15 bp, Homo sapiens
cctctgacatagcac

SEQ ID NO: 1282256 - DNA, 15 bp, Homo sapiens
acctctgacatagca

SEQ ID NO: 1282257 - DNA, 15 bp, Homo sapiens
cacctctgacatagc

SEQ ID NO: 1282258 - DNA, 15 bp, Homo sapiens
tcacctctgacatag

SEQ ID NO: 1282259 - DNA, 15 bp, Homo sapiens
ctcacctctgacata

SEQ ID NO: 1282260 - DNA, 15 bp, Homo sapiens
gctcacctctgacat

SEQ ID NO: 1282261 - DNA, 15 bp, Homo sapiens
tgctcacctctgaca

SEQ ID NO: 1282262 - DNA, 15 bp, Homo sapiens
atgctcacctctgac

SEQ ID NO: 1282263 - DNA, 15 bp, Homo sapiens
aatgctcacctctga

SEQ ID NO: 1282264 - DNA, 15 bp, Homo sapiens
aaatgctcacctctg

SEQ ID NO: 1282265 - DNA, 15 bp, Homo sapiens
caaatgctcacctct

SEQ ID NO: 1282266 - DNA, 15 bp, Homo sapiens
gcaaatgctcacctc

SEQ ID NO: 1282267 - DNA, 15 bp, Homo sapiens
agcaaatgctcacct

SEQ ID NO: 1282268 - DNA, 15 bp, Homo sapiens
tagcaaatgctcacc

SEQ ID NO: 1282269 - DNA, 15 bp, Homo sapiens
gtagcaaatgctcac

SEQ ID NO: 1282270 - DNA, 15 bp, Homo sapiens
tgtagcaaatgctca

SEQ ID NO: 1282271 - DNA, 15 bp, Homo sapiens
ctgtagcaaatgctc

SEQ ID NO: 1282272 - DNA, 15 bp, Homo sapiens
tctgtagcaaatgct

SEQ ID NO: 1282273 - DNA, 15 bp, Homo sapiens
ctctgtagcaaatgc

SEQ ID NO: 1282274 - DNA, 15 bp, Homo sapiens
tctctgtagcaaatg

SEQ ID NO: 1282275 - DNA, 15 bp, Homo sapiens
gtctctgtagcaaat

SEQ ID NO: 1282276 - DNA, 15 bp, Homo sapiens
agtctctgtagcaaa

SEQ ID NO: 1282277 - DNA, 15 bp, Homo sapiens
tagtctctgtagcaa

SEQ ID NO: 1282278 - DNA, 15 bp, Homo sapiens
ttagtctctgtagca

SEQ ID NO: 1282279 - DNA, 15 bp, Homo sapiens
gttagtctctgtagc

SEQ ID NO: 1282280 - DNA, 15 bp, Homo sapiens
agttagtctctgtag

SEQ ID NO: 1282281 - DNA, 15 bp, Homo sapiens
cagttagtctctgta

SEQ ID NO: 1282282 - DNA, 15 bp, Homo sapiens
ccagttagtctctgt

SEQ ID NO: 1282283 - DNA, 15 bp, Homo sapiens
gccagttagtctctg

SEQ ID NO: 1282284 - DNA, 15 bp, Homo sapiens
ggccagttagtctct

SEQ ID NO: 1282285 - DNA, 15 bp, Homo sapiens
aggccagttagtctc

SEQ ID NO: 1282286 - DNA, 15 bp, Homo sapiens
caggccagttagtct

SEQ ID NO: 1282287 - DNA, 15 bp, Homo sapiens
gcaggccagttagtc

SEQ ID NO: 1282288 - DNA, 15 bp, Homo sapiens
tgcaggccagttagt

SEQ ID NO: 1282289 - DNA, 15 bp, Homo sapiens
gtgcaggccagttag

SEQ ID NO: 1282290 - DNA, 15 bp, Homo sapiens
tgtgcaggccagtta

SEQ ID NO: 1282291 - DNA, 15 bp, Homo sapiens
ctgtgcaggccagtt

SEQ ID NO: 1282292 - DNA, 15 bp, Homo sapiens
actgtgcaggccagt

SEQ ID NO: 1282293 - DNA, 15 bp, Homo sapiens
gactgtgcaggccag

SEQ ID NO: 1282294 - DNA, 15 bp, Homo sapiens
agactgtgcaggcca

SEQ ID NO: 1282295 - DNA, 15 bp, Homo sapiens
cagactgtgcaggcc

SEQ ID NO: 1282296 - DNA, 15 bp, Homo sapiens
tcagactgtgcaggc

SEQ ID NO: 1282297 - DNA, 15 bp, Homo sapiens
ttcagactgtgcagg

SEQ ID NO: 1282298 - DNA, 15 bp, Homo sapiens
cttcagactgtgcag

SEQ ID NO: 1282299 - DNA, 15 bp, Homo sapiens
acttcagactgtgca

SEQ ID NO: 1282300 - DNA, 15 bp, Homo sapiens
tacttcagactgtgc

SEQ ID NO: 1282301 - DNA, 15 bp, Homo sapiens
atacttcagactgtg

SEQ ID NO: 1282302 - DNA, 15 bp, Homo sapiens
aatacttcagactgt

SEQ ID NO: 1282303 - DNA, 15 bp, Homo sapiens
gaatacttcagactg

SEQ ID NO: 1282304 - DNA, 15 bp, Homo sapiens
tgaatacttcagact

SEQ ID NO: 1282305 - DNA, 15 bp, Homo sapiens
gtgaatacttcagac

SEQ ID NO: 1282306 - DNA, 15 bp, Homo sapiens
agtgaatacttcaga

SEQ ID NO: 1282307 - DNA, 15 bp, Homo sapiens
tagtgaatacttcag

SEQ ID NO: 1282308 - DNA, 15 bp, Homo sapiens
atagtgaatacttca

SEQ ID NO: 1282309 - DNA, 15 bp, Homo sapiens
gatagtgaatacttc

SEQ ID NO: 1282310 - DNA, 15 bp, Homo sapiens
ggatagtgaatactt

SEQ ID NO: 1282311 - DNA, 15 bp, Homo sapiens
cggatagtgaatact

SEQ ID NO: 1282312 - DNA, 15 bp, Homo sapiens
ccggatagtgaatac

SEQ ID NO: 1282313 - DNA, 15 bp, Homo sapiens
accggatagtgaata

SEQ ID NO: 1282314 - DNA, 15 bp, Homo sapiens
aaccggatagtgaat

SEQ ID NO: 1282315 - DNA, 15 bp, Homo sapiens
gaaccggatagtgaa

SEQ ID NO: 1282316 - DNA, 15 bp, Homo sapiens
agaaccggatagtga

SEQ ID NO: 1282317 - DNA, 15 bp, Homo sapiens
aagaaccggatagtg

SEQ ID NO: 1282318 - DNA, 15 bp, Homo sapiens
gaagaaccggatagt

SEQ ID NO: 1282319 - DNA, 15 bp, Homo sapiens
tgaagaaccggatag

SEQ ID NO: 1282320 - DNA, 15 bp, Homo sapiens
gtgaagaaccggata

SEQ ID NO: 1282321 - DNA, 15 bp, Homo sapiens
tgtgaagaaccggat

SEQ ID NO: 1282322 - DNA, 15 bp, Homo sapiens
ctgtgaagaaccgga

SEQ ID NO: 1282323 - DNA, 15 bp, Homo sapiens
tctgtgaagaaccgg

SEQ ID NO: 1282324 - DNA, 15 bp, Homo sapiens
ttctgtgaagaaccg

SEQ ID NO: 1282325 - DNA, 15 bp, Homo sapiens
tttctgtgaagaacc

SEQ ID NO: 1282326 - DNA, 15 bp, Homo sapiens
ttttctgtgaagaac

SEQ ID NO: 1282327 - DNA, 15 bp, Homo sapiens
attttctgtgaagaa

SEQ ID NO: 1282328 - DNA, 15 bp, Homo sapiens
cattttctgtgaaga

SEQ ID NO: 1282329 - DNA, 15 bp, Homo sapiens
acattttctgtgaag

SEQ ID NO: 1282330 - DNA, 15 bp, Homo sapiens
aacattttctgtgaa

SEQ ID NO: 1282331 - DNA, 15 bp, Homo sapiens
aaacattttctgtga

SEQ ID NO: 1282332 - DNA, 15 bp, Homo sapiens
caaacattttctgtg

SEQ ID NO: 1282333 - DNA, 15 bp, Homo sapiens
gcaaacattttctgt

SEQ ID NO: 1282334 - DNA, 15 bp, Homo sapiens
ggcaaacattttctg

SEQ ID NO: 1282335 - DNA, 15 bp, Homo sapiens
tggcaaacattttct

SEQ ID NO: 1282336 - DNA, 15 bp, Homo sapiens
ctggcaaacattttc

SEQ ID NO: 1282337 - DNA, 15 bp, Homo sapiens
gctggcaaacatttt

SEQ ID NO: 1282338 - DNA, 15 bp, Homo sapiens
agctggcaaacattt

SEQ ID NO: 1282339 - DNA, 15 bp, Homo sapiens
gagctggcaaacatt

SEQ ID NO: 1282340 - DNA, 15 bp, Homo sapiens
ggagctggcaaacat

SEQ ID NO: 1282341 - DNA, 15 bp, Homo sapiens
aggagctggcaaaca

SEQ ID NO: 1282342 - DNA, 15 bp, Homo sapiens
gaggagctggcaaac

SEQ ID NO: 1282343 - DNA, 15 bp, Homo sapiens
ggaggagctggcaaa

SEQ ID NO: 1282344 - DNA, 15 bp, Homo sapiens
gggaggagctggcaa

SEQ ID NO: 1282345 - DNA, 15 bp, Homo sapiens
ggggaggagctggca

SEQ ID NO: 1282346 - DNA, 15 bp, Homo sapiens
aggggaggagctggc

SEQ ID NO: 1282347 - DNA, 15 bp, Homo sapiens
caggggaggagctgg

SEQ ID NO: 1282348 - DNA, 15 bp, Homo sapiens
ccaggggaggagctg

SEQ ID NO: 1282349 - DNA, 15 bp, Homo sapiens
cccaggggaggagct

SEQ ID NO: 1282350 - DNA, 15 bp, Homo sapiens
tcccaggggaggagc

SEQ ID NO: 1282351 - DNA, 15 bp, Homo sapiens
ctcccaggggaggag

SEQ ID NO: 1282352 - DNA, 15 bp, Homo sapiens
cctcccaggggagga

SEQ ID NO: 1282353 - DNA, 15 bp, Homo sapiens
acctcccaggggagg

SEQ ID NO: 1282354 - DNA, 15 bp, Homo sapiens
cacctcccaggggag

SEQ ID NO: 1282355 - DNA, 15 bp, Homo sapiens
tcacctcccagggga

SEQ ID NO: 1282356 - DNA, 15 bp, Homo sapiens
ctcacctcccagggg

SEQ ID NO: 1282357 - DNA, 15 bp, Homo sapiens
gctcacctcccaggg

SEQ ID NO: 1282358 - DNA, 15 bp, Homo sapiens
agctcacctcccagg

SEQ ID NO: 1282359 - DNA, 15 bp, Homo sapiens
gagctcacctcccag

SEQ ID NO: 1282360 - DNA, 15 bp, Homo sapiens
ggagctcacctccca

SEQ ID NO: 1282361 - DNA, 15 bp, Homo sapiens
gggagctcacctccc

SEQ ID NO: 1282362 - DNA, 15 bp, Homo sapiens
agggagctcacctcc

SEQ ID NO: 1282363 - DNA, 15 bp, Homo sapiens
cagggagctcacctc

SEQ ID NO: 1282364 - DNA, 15 bp, Homo sapiens
tcagggagctcacct

SEQ ID NO: 1282365 - DNA, 15 bp, Homo sapiens
ctcagggagctcacc

SEQ ID NO: 1282366 - DNA, 15 bp, Homo sapiens
cctcagggagctcac

SEQ ID NO: 1282367 - DNA, 15 bp, Homo sapiens
ccctcagggagctca

SEQ ID NO: 1282368 - DNA, 15 bp, Homo sapiens
gccctcagggagctc

SEQ ID NO: 1282369 - DNA, 15 bp, Homo sapiens
tgccctcagggagct

SEQ ID NO: 1282370 - DNA, 15 bp, Homo sapiens
ctgccctcagggagc

SEQ ID NO: 1282371 - DNA, 15 bp, Homo sapiens
cctgccctcagggag

SEQ ID NO: 1282372 - DNA, 15 bp, Homo sapiens
tcctgccctcaggga

SEQ ID NO: 1282373 - DNA, 15 bp, Homo sapiens
ttcctgccctcaggg

SEQ ID NO: 1282374 - DNA, 15 bp, Homo sapiens
gttcctgccctcagg

SEQ ID NO: 1282375 - DNA, 15 bp, Homo sapiens
cgttcctgccctcag

SEQ ID NO: 1282376 - DNA, 15 bp, Homo sapiens
ccgttcctgccctca

SEQ ID NO: 1282377 - DNA, 15 bp, Homo sapiens
gccgttcctgccctc

SEQ ID NO: 1282378 - DNA, 15 bp, Homo sapiens
tgccgttcctgccct

SEQ ID NO: 1282379 - DNA, 15 bp, Homo sapiens
gtgccgttcctgccc

SEQ ID NO: 1282380 - DNA, 15 bp, Homo sapiens
agtgccgttcctgcc

SEQ ID NO: 1282381 - DNA, 15 bp, Homo sapiens
gagtgccgttcctgc

SEQ ID NO: 1282382 - DNA, 15 bp, Homo sapiens
ggagtgccgttcctg

SEQ ID NO: 1282383 - DNA, 15 bp, Homo sapiens
cggagtgccgttcct

SEQ ID NO: 1282384 - DNA, 15 bp, Homo sapiens
acggagtgccgttcc

SEQ ID NO: 1282385 - DNA, 15 bp, Homo sapiens
aacggagtgccgttc

SEQ ID NO: 1282386 - DNA, 15 bp, Homo sapiens
aaacggagtgccgtt

SEQ ID NO: 1282387 - DNA, 15 bp, Homo sapiens
taaacggagtgccgt

SEQ ID NO: 1282388 - DNA, 15 bp, Homo sapiens
ataaacggagtgccg

SEQ ID NO: 1282389 - DNA, 15 bp, Homo sapiens
gataaacggagtgcc

SEQ ID NO: 1282390 - DNA, 15 bp, Homo sapiens
agataaacggagtgc

SEQ ID NO: 1282391 - DNA, 15 bp, Homo sapiens
aagataaacggagtg

SEQ ID NO: 1282392 - DNA, 15 bp, Homo sapiens
caagataaacggagt

SEQ ID NO: 1282393 - DNA, 15 bp, Homo sapiens
gcaagataaacggag

SEQ ID NO: 1282394 - DNA, 15 bp, Homo sapiens
agcaagataaacgga

SEQ ID NO: 1282395 - DNA, 15 bp, Homo sapiens
cagcaagataaacgg

SEQ ID NO: 1282396 - DNA, 15 bp, Homo sapiens
gcagcaagataaacg

SEQ ID NO: 1282397 - DNA, 15 bp, Homo sapiens
agcagcaagataaac

SEQ ID NO: 1282398 - DNA, 15 bp, Homo sapiens
aagcagcaagataaa

SEQ ID NO: 1282399 - DNA, 15 bp, Homo sapiens
gaagcagcaagataa

SEQ ID NO: 1282400 - DNA, 15 bp, Homo sapiens
agaagcagcaagata

SEQ ID NO: 1282401 - DNA, 15 bp, Homo sapiens
aagaagcagcaagat

SEQ ID NO: 1282402 - DNA, 15 bp, Homo sapiens
caagaagcagcaaga

SEQ ID NO: 1282403 - DNA, 15 bp, Homo sapiens
acaagaagcagcaag

SEQ ID NO: 1282404 - DNA, 15 bp, Homo sapiens
aacaagaagcagcaa

SEQ ID NO: 1282405 - DNA, 15 bp, Homo sapiens
aaacaagaagcagca

SEQ ID NO: 1282406 - DNA, 15 bp, Homo sapiens
gaaacaagaagcagc

SEQ ID NO: 1282407 - DNA, 15 bp, Homo sapiens
agaaacaagaagcag

SEQ ID NO: 1282408 - DNA, 15 bp, Homo sapiens
aagaaacaagaagca

SEQ ID NO: 1282409 - DNA, 15 bp, Homo sapiens
caagaaacaagaagc

SEQ ID NO: 1282410 - DNA, 15 bp, Homo sapiens
gcaagaaacaagaag

SEQ ID NO: 1282411 - DNA, 15 bp, Homo sapiens
agcaagaaacaagaa

SEQ ID NO: 1282412 - DNA, 15 bp, Homo sapiens
cagcaagaaacaaga

SEQ ID NO: 1282413 - DNA, 15 bp, Homo sapiens
ccagcaagaaacaag

SEQ ID NO: 1282414 - DNA, 15 bp, Homo sapiens
accagcaagaaacaa

SEQ ID NO: 1282415 - DNA, 15 bp, Homo sapiens
taccagcaagaaaca

SEQ ID NO: 1282416 - DNA, 15 bp, Homo sapiens
ctaccagcaagaaac

SEQ ID NO: 1282417 - DNA, 15 bp, Homo sapiens
actaccagcaagaaa

SEQ ID NO: 1282418 - DNA, 15 bp, Homo sapiens
tactaccagcaagaa

SEQ ID NO: 1282419 - DNA, 15 bp, Homo sapiens
ctactaccagcaaga

SEQ ID NO: 1282420 - DNA, 15 bp, Homo sapiens
cctactaccagcaag

SEQ ID NO: 1282421 - DNA, 15 bp, Homo sapiens
gcctactaccagcaa

SEQ ID NO: 1282422 - DNA, 15 bp, Homo sapiens
tgcctactaccagca

SEQ ID NO: 1282423 - DNA, 15 bp, Homo sapiens
gtgcctactaccagc

SEQ ID NO: 1282424 - DNA, 15 bp, Homo sapiens
agtgcctactaccag

SEQ ID NO: 1282425 - DNA, 15 bp, Homo sapiens
gagtgcctactacca

SEQ ID NO: 1282426 - DNA, 15 bp, Homo sapiens
tgagtgcctactacc

SEQ ID NO: 1282427 - DNA, 15 bp, Homo sapiens
ttgagtgcctactac

SEQ ID NO: 1282428 - DNA, 15 bp, Homo sapiens
attgagtgcctacta

SEQ ID NO: 1282429 - DNA, 15 bp, Homo sapiens
tattgagtgcctact

SEQ ID NO: 1282430 - DNA, 15 bp, Homo sapiens
ttattgagtgcctac

SEQ ID NO: 1282431 - DNA, 15 bp, Homo sapiens
tttattgagtgccta

SEQ ID NO: 1282432 - DNA, 15 bp, Homo sapiens
atttattgagtgcct

SEQ ID NO: 1282433 - DNA, 15 bp, Homo sapiens
catttattgagtgcc

SEQ ID NO: 1282434 - DNA, 15 bp, Homo sapiens
acatttattgagtgc

SEQ ID NO: 1282435 - DNA, 15 bp, Homo sapiens
tacatttattgagtg

SEQ ID NO: 1282436 - DNA, 15 bp, Homo sapiens
atacatttattgagt

SEQ ID NO: 1282437 - DNA, 15 bp, Homo sapiens
catacatttattgag

SEQ ID NO: 1282438 - DNA, 15 bp, Homo sapiens
acatacatttattga

SEQ ID NO: 1282439 - DNA, 15 bp, Homo sapiens
aacatacatttattg

SEQ ID NO: 1282440 - DNA, 15 bp, Homo sapiens
caacatacatttatt

SEQ ID NO: 1282441 - DNA, 15 bp, Homo sapiens
tcaacatacatttat

SEQ ID NO: 1282442 - DNA, 15 bp, Homo sapiens
ttcaacatacattta

SEQ ID NO: 1282443 - DNA, 15 bp, Homo sapiens
attcaacatacattt

SEQ ID NO: 1282444 - DNA, 15 bp, Homo sapiens
tattcaacatacatt

SEQ ID NO: 1282445 - DNA, 15 bp, Homo sapiens
ctattcaacatacat

SEQ ID NO: 1282446 - DNA, 15 bp, Homo sapiens
cctattcaacataca

SEQ ID NO: 1282447 - DNA, 15 bp, Homo sapiens
gcctattcaacatac

SEQ ID NO: 1282448 - DNA, 15 bp, Homo sapiens
agcctattcaacata

SEQ ID NO: 1282449 - DNA, 15 bp, Homo sapiens
aagcctattcaacat

SEQ ID NO: 1282450 - DNA, 15 bp, Homo sapiens
caagcctattcaaca

SEQ ID NO: 1282451 - DNA, 15 bp, Homo sapiens
tcaagcctattcaac

SEQ ID NO: 1282452 - DNA, 15 bp, Homo sapiens
ttcaagcctattcaa

SEQ ID NO: 1282453 - DNA, 15 bp, Homo sapiens
tttcaagcctattca

SEQ ID NO: 1282454 - DNA, 15 bp, Homo sapiens
atttcaagcctattc

SEQ ID NO: 1282455 - DNA, 15 bp, Homo sapiens
catttcaagcctatt

SEQ ID NO: 1282456 - DNA, 15 bp, Homo sapiens
gcatttcaagcctat

SEQ ID NO: 1282457 - DNA, 15 bp, Homo sapiens
tgcatttcaagccta

SEQ ID NO: 1282458 - DNA, 15 bp, Homo sapiens
ctgcatttcaagcct

SEQ ID NO: 1282459 - DNA, 15 bp, Homo sapiens
actgcatttcaagcc

SEQ ID NO: 1282460 - DNA, 15 bp, Homo sapiens
cactgcatttcaagc

SEQ ID NO: 1282461 - DNA, 15 bp, Homo sapiens
ccactgcatttcaag

SEQ ID NO: 1282462 - DNA, 15 bp, Homo sapiens
tccactgcatttcaa

SEQ ID NO: 1282463 - DNA, 15 bp, Homo sapiens
atccactgcatttca

SEQ ID NO: 1282464 - DNA, 15 bp, Homo sapiens
aatccactgcatttc

SEQ ID NO: 1282465 - DNA, 15 bp, Homo sapiens
caatccactgcattt

SEQ ID NO: 1282466 - DNA, 15 bp, Homo sapiens
tcaatccactgcatt

SEQ ID NO: 1282467 - DNA, 15 bp, Homo sapiens
atcaatccactgcat

SEQ ID NO: 1282468 - DNA, 15 bp, Homo sapiens
aatcaatccactgca

SEQ ID NO: 1282469 - DNA, 15 bp, Homo sapiens
aaatcaatccactgc

SEQ ID NO: 1282470 - DNA, 15 bp, Homo sapiens
caaatcaatccactg

SEQ ID NO: 1282471 - DNA, 15 bp, Homo sapiens
acaaatcaatccact

SEQ ID NO: 1282472 - DNA, 15 bp, Homo sapiens
gacaaatcaatccac

SEQ ID NO: 1282473 - DNA, 15 bp, Homo sapiens
tgacaaatcaatcca

SEQ ID NO: 1282474 - DNA, 15 bp, Homo sapiens
ttgacaaatcaatcc

SEQ ID NO: 1282475 - DNA, 15 bp, Homo sapiens
tttgacaaatcaatc

SEQ ID NO: 1282476 - DNA, 15 bp, Homo sapiens
ctttgacaaatcaat

SEQ ID NO: 1282477 - DNA, 15 bp, Homo sapiens
tctttgacaaatcaa

SEQ ID NO: 1282478 - DNA, 15 bp, Homo sapiens
atctttgacaaatca

SEQ ID NO: 1282479 - DNA, 15 bp, Homo sapiens
catctttgacaaatc

SEQ ID NO: 1282480 - DNA, 15 bp, Homo sapiens
tcatctttgacaaat

SEQ ID NO: 1282481 - DNA, 15 bp, Homo sapiens
ctcatctttgacaaa

SEQ ID NO: 1282482 - DNA, 15 bp, Homo sapiens
gctcatctttgacaa

SEQ ID NO: 1282483 - DNA, 15 bp, Homo sapiens
cgctcatctttgaca

SEQ ID NO: 1282484 - DNA, 15 bp, Homo sapiens
gcgctcatctttgac

SEQ ID NO: 1282485 - DNA, 15 bp, Homo sapiens
ggcgctcatctttga

SEQ ID NO: 1282486 - DNA, 15 bp, Homo sapiens
tggcgctcatctttg

SEQ ID NO: 1282487 - DNA, 15 bp, Homo sapiens
ctggcgctcatcttt

SEQ ID NO: 1282488 - DNA, 15 bp, Homo sapiens
gctggcgctcatctt

SEQ ID NO: 1282489 - DNA, 15 bp, Homo sapiens
ggctggcgctcatct

SEQ ID NO: 1282490 - DNA, 15 bp, Homo sapiens
tggctggcgctcatc

SEQ ID NO: 1282491 - DNA, 15 bp, Homo sapiens
gtggctggcgctcat

SEQ ID NO: 1282492 - DNA, 15 bp, Homo sapiens
tgtggctggcgctca

SEQ ID NO: 1282493 - DNA, 15 bp, Homo sapiens
atgtggctggcgctc

SEQ ID NO: 1282494 - DNA, 15 bp, Homo sapiens
catgtggctggcgct

SEQ ID NO: 1282495 - DNA, 15 bp, Homo sapiens
ccatgtggctggcgc

SEQ ID NO: 1282496 - DNA, 15 bp, Homo sapiens
gccatgtggctggcg

SEQ ID NO: 1282497 - DNA, 15 bp, Homo sapiens
agccatgtggctggc

SEQ ID NO: 1282498 - DNA, 15 bp, Homo sapiens
cagccatgtggctgg

SEQ ID NO: 1282499 - DNA, 15 bp, Homo sapiens
acagccatgtggctg

SEQ ID NO: 1282500 - DNA, 15 bp, Homo sapiens
aacagccatgtggct

SEQ ID NO: 1282501 - DNA, 15 bp, Homo sapiens
gaacagccatgtggc

SEQ ID NO: 1282502 - DNA, 15 bp, Homo sapiens
agaacagccatgtgg

SEQ ID NO: 1282503 - DNA, 15 bp, Homo sapiens
cagaacagccatgtg

SEQ ID NO: 1282504 - DNA, 15 bp, Homo sapiens
ccagaacagccatgt

SEQ ID NO: 1282505 - DNA, 15 bp, Homo sapiens
gccagaacagccatg

SEQ ID NO: 1282506 - DNA, 15 bp, Homo sapiens
agccagaacagccat

SEQ ID NO: 1282507 - DNA, 15 bp, Homo sapiens
aagccagaacagcca

SEQ ID NO: 1282508 - DNA, 15 bp, Homo sapiens
gaagccagaacagcc

SEQ ID NO: 1282509 - DNA, 15 bp, Homo sapiens
ggaagccagaacagc

SEQ ID NO: 1282510 - DNA, 15 bp, Homo sapiens
gggaagccagaacag

SEQ ID NO: 1282511 - DNA, 15 bp, Homo sapiens
ggggaagccagaaca

SEQ ID NO: 1282512 - DNA, 15 bp, Homo sapiens
tggggaagccagaac

SEQ ID NO: 1282513 - DNA, 15 bp, Homo sapiens
ctggggaagccagaa

SEQ ID NO: 1282514 - DNA, 15 bp, Homo sapiens
cctggggaagccaga

SEQ ID NO: 1282515 - DNA, 15 bp, Homo sapiens
acctggggaagccag

SEQ ID NO: 1282516 - DNA, 15 bp, Homo sapiens
aacctggggaagcca

SEQ ID NO: 1282517 - DNA, 15 bp, Homo sapiens
aaacctggggaagcc

SEQ ID NO: 1282518 - DNA, 15 bp, Homo sapiens
gaaacctggggaagc

SEQ ID NO: 1282519 - DNA, 15 bp, Homo sapiens
ggaaacctggggaag

SEQ ID NO: 1282520 - DNA, 15 bp, Homo sapiens
aggaaacctggggaa

SEQ ID NO: 1282521 - DNA, 15 bp, Homo sapiens
gaggaaacctgggga

SEQ ID NO: 1282522 - DNA, 15 bp, Homo sapiens
agaggaaacctgggg

SEQ ID NO: 1282523 - DNA, 15 bp, Homo sapiens
aagaggaaacctggg

SEQ ID NO: 1282524 - DNA, 15 bp, Homo sapiens
caagaggaaacctgg

SEQ ID NO: 1282525 - DNA, 15 bp, Homo sapiens
gcaagaggaaacctg

SEQ ID NO: 1282526 - DNA, 15 bp, Homo sapiens
agcaagaggaaacct

SEQ ID NO: 1282527 - DNA, 15 bp, Homo sapiens
cagcaagaggaaacc

SEQ ID NO: 1282528 - DNA, 15 bp, Homo sapiens
acagcaagaggaaac

SEQ ID NO: 1282529 - DNA, 15 bp, Homo sapiens
aacagcaagaggaaa

SEQ ID NO: 1282530 - DNA, 15 bp, Homo sapiens
aaacagcaagaggaa

SEQ ID NO: 1282531 - DNA, 15 bp, Homo sapiens
caaacagcaagagga

SEQ ID NO: 1282532 - DNA, 15 bp, Homo sapiens
ccaaacagcaagagg

SEQ ID NO: 1282533 - DNA, 15 bp, Homo sapiens
gccaaacagcaagag

SEQ ID NO: 1282534 - DNA, 15 bp, Homo sapiens
ggccaaacagcaaga

SEQ ID NO: 1282535 - DNA, 15 bp, Homo sapiens
tggccaaacagcaag

SEQ ID NO: 1282536 - DNA, 15 bp, Homo sapiens
gtggccaaacagcaa

SEQ ID NO: 1282537 - DNA, 15 bp, Homo sapiens
agtggccaaacagca

SEQ ID NO: 1282538 - DNA, 15 bp, Homo sapiens
aagtggccaaacagc

SEQ ID NO: 1282539 - DNA, 15 bp, Homo sapiens
aaagtggccaaacag

SEQ ID NO: 1282540 - DNA, 15 bp, Homo sapiens
caaagtggccaaaca

SEQ ID NO: 1282541 - DNA, 15 bp, Homo sapiens
acaaagtggccaaac

SEQ ID NO: 1282542 - DNA, 15 bp, Homo sapiens
cacaaagtggccaaa

SEQ ID NO: 1282543 - DNA, 15 bp, Homo sapiens
gcacaaagtggccaa

SEQ ID NO: 1282544 - DNA, 15 bp, Homo sapiens
agcacaaagtggcca

SEQ ID NO: 1282545 - DNA, 15 bp, Homo sapiens
gagcacaaagtggcc

SEQ ID NO: 1282546 - DNA, 15 bp, Homo sapiens
ggagcacaaagtggc

SEQ ID NO: 1282547 - DNA, 15 bp, Homo sapiens
tggagcacaaagtgg

SEQ ID NO: 1282548 - DNA, 15 bp, Homo sapiens
ctggagcacaaagtg

SEQ ID NO: 1282549 - DNA, 15 bp, Homo sapiens
actggagcacaaagt

SEQ ID NO: 1282550 - DNA, 15 bp, Homo sapiens
aactggagcacaaag

SEQ ID NO: 1282551 - DNA, 15 bp, Homo sapiens
aaactggagcacaaa

SEQ ID NO: 1282552 - DNA, 15 bp, Homo sapiens
aaaactggagcacaa

SEQ ID NO: 1282553 - DNA, 15 bp, Homo sapiens
gaaaactggagcaca

SEQ ID NO: 1282554 - DNA, 15 bp, Homo sapiens
agaaaactggagcac

SEQ ID NO: 1282555 - DNA, 15 bp, Homo sapiens
gagaaaactggagca

SEQ ID NO: 1282556 - DNA, 15 bp, Homo sapiens
agagaaaactggagc

SEQ ID NO: 1282557 - DNA, 15 bp, Homo sapiens
gagagaaaactggag

SEQ ID NO: 1282558 - DNA, 15 bp, Homo sapiens
agagagaaaactgga

SEQ ID NO: 1282559 - DNA, 15 bp, Homo sapiens
tagagagaaaactgg

SEQ ID NO: 1282560 - DNA, 15 bp, Homo sapiens
gtagagagaaaactg

SEQ ID NO: 1282561 - DNA, 15 bp, Homo sapiens
tgtagagagaaaact

SEQ ID NO: 1282562 - DNA, 15 bp, Homo sapiens
ctgtagagagaaaac

SEQ ID NO: 1282563 - DNA, 15 bp, Homo sapiens
tctgtagagagaaaa

SEQ ID NO: 1282564 - DNA, 15 bp, Homo sapiens
ttctgtagagagaaa

SEQ ID NO: 1282565 - DNA, 15 bp, Homo sapiens
tttctgtagagagaa

SEQ ID NO: 1282566 - DNA, 15 bp, Homo sapiens
ctttctgtagagaga

SEQ ID NO: 1282567 - DNA, 15 bp, Homo sapiens
tctttctgtagagag

SEQ ID NO: 1282568 - DNA, 15 bp, Homo sapiens
ttctttctgtagaga

SEQ ID NO: 1282569 - DNA, 15 bp, Homo sapiens
cttctttctgtagag

SEQ ID NO: 1282570 - DNA, 15 bp, Homo sapiens
tcttctttctgtaga

SEQ ID NO: 1282571 - DNA, 15 bp, Homo sapiens
atcttctttctgtag

SEQ ID NO: 1282572 - DNA, 15 bp, Homo sapiens
tatcttctttctgta

SEQ ID NO: 1282573 - DNA, 15 bp, Homo sapiens
ttatcttctttctgt

SEQ ID NO: 1282574 - DNA, 15 bp, Homo sapiens
attatcttctttctg

SEQ ID NO: 1282575 - DNA, 15 bp, Homo sapiens
tattatcttctttct

SEQ ID NO: 1282576 - DNA, 15 bp, Homo sapiens
atattatcttctttc

SEQ ID NO: 1282577 - DNA, 15 bp, Homo sapiens
aatattatcttcttt

SEQ ID NO: 1282578 - DNA, 15 bp, Homo sapiens
taatattatcttctt

SEQ ID NO: 1282579 - DNA, 15 bp, Homo sapiens
ataatattatcttct

SEQ ID NO: 1282580 - DNA, 15 bp, Homo sapiens
gataatattatcttc

SEQ ID NO: 1282581 - DNA, 15 bp, Homo sapiens
agataatattatctt

SEQ ID NO: 1282582 - DNA, 15 bp, Homo sapiens
tagataatattatct

SEQ ID NO: 1282583 - DNA, 15 bp, Homo sapiens
atagataatattatc

SEQ ID NO: 1282584 - DNA, 15 bp, Homo sapiens
gatagataatattat

SEQ ID NO: 1282585 - DNA, 15 bp, Homo sapiens
agatagataatatta

SEQ ID NO: 1282586 - DNA, 15 bp, Homo sapiens
aagatagataatatt

SEQ ID NO: 1282587 - DNA, 15 bp, Homo sapiens
caagatagataatat

SEQ ID NO: 1282588 - DNA, 15 bp, Homo sapiens
gcaagatagataata

SEQ ID NO: 1282589 - DNA, 15 bp, Homo sapiens
agcaagatagataat

SEQ ID NO: 1282590 - DNA, 15 bp, Homo sapiens
cagcaagatagataa

SEQ ID NO: 1282591 - DNA, 15 bp, Homo sapiens
tcagcaagatagata

SEQ ID NO: 1282592 - DNA, 15 bp, Homo sapiens
ctcagcaagatagat

SEQ ID NO: 1282593 - DNA, 15 bp, Homo sapiens
actcagcaagataga

SEQ ID NO: 1282594 - DNA, 15 bp, Homo sapiens
aactcagcaagatag

SEQ ID NO: 1282595 - DNA, 15 bp, Homo sapiens
gaactcagcaagata

SEQ ID NO: 1282596 - DNA, 15 bp, Homo sapiens
cgaactcagcaagat

SEQ ID NO: 1282597 - DNA, 15 bp, Homo sapiens
acgaactcagcaaga

SEQ ID NO: 1282598 - DNA, 15 bp, Homo sapiens
aacgaactcagcaag

SEQ ID NO: 1282599 - DNA, 15 bp, Homo sapiens
caacgaactcagcaa

SEQ ID NO: 1282600 - DNA, 15 bp, Homo sapiens
tcaacgaactcagca

SEQ ID NO: 1282601 - DNA, 15 bp, Homo sapiens
atcaacgaactcagc

SEQ ID NO: 1282602 - DNA, 15 bp, Homo sapiens
gatcaacgaactcag

SEQ ID NO: 1282603 - DNA, 15 bp, Homo sapiens
agatcaacgaactca

SEQ ID NO: 1282604 - DNA, 15 bp, Homo sapiens
cagatcaacgaactc

SEQ ID NO: 1282605 - DNA, 15 bp, Homo sapiens
acagatcaacgaact

SEQ ID NO: 1282606 - DNA, 15 bp, Homo sapiens
cacagatcaacgaac

SEQ ID NO: 1282607 - DNA, 15 bp, Homo sapiens
ccacagatcaacgaa

SEQ ID NO: 1282608 - DNA, 15 bp, Homo sapiens
accacagatcaacga

SEQ ID NO: 1282609 - DNA, 15 bp, Homo sapiens
caccacagatcaacg

SEQ ID NO: 1282610 - DNA, 15 bp, Homo sapiens
tcaccacagatcaac

SEQ ID NO: 1282611 - DNA, 15 bp, Homo sapiens
ctcaccacagatcaa

SEQ ID NO: 1282612 - DNA, 15 bp, Homo sapiens
cctcaccacagatca

SEQ ID NO: 1282613 - DNA, 15 bp, Homo sapiens
ccctcaccacagatc

SEQ ID NO: 1282614 - DNA, 15 bp, Homo sapiens
accctcaccacagat

SEQ ID NO: 1282615 - DNA, 15 bp, Homo sapiens
taccctcaccacaga

SEQ ID NO: 1282616 - DNA, 15 bp, Homo sapiens
ctaccctcaccacag

SEQ ID NO: 1282617 - DNA, 15 bp, Homo sapiens
tctaccctcaccaca

SEQ ID NO: 1282618 - DNA, 15 bp, Homo sapiens
ttctaccctcaccac

SEQ ID NO: 1282619 - DNA, 15 bp, Homo sapiens
gttctaccctcacca

SEQ ID NO: 1282620 - DNA, 15 bp, Homo sapiens
tgttctaccctcacc

SEQ ID NO: 1282621 - DNA, 15 bp, Homo sapiens
ctgttctaccctcac

SEQ ID NO: 1282622 - DNA, 15 bp, Homo sapiens
cctgttctaccctca

SEQ ID NO: 1282623 - DNA, 15 bp, Homo sapiens
tcctgttctaccctc

SEQ ID NO: 1282624 - DNA, 15 bp, Homo sapiens
atcctgttctaccct

SEQ ID NO: 1282625 - DNA, 15 bp, Homo sapiens
tatcctgttctaccc

SEQ ID NO: 1282626 - DNA, 15 bp, Homo sapiens
atatcctgttctacc

SEQ ID NO: 1282627 - DNA, 15 bp, Homo sapiens
aatatcctgttctac

SEQ ID NO: 1282628 - DNA, 15 bp, Homo sapiens
taatatcctgttcta

SEQ ID NO: 1282629 - DNA, 15 bp, Homo sapiens
ttaatatcctgttct

SEQ ID NO: 1282630 - DNA, 15 bp, Homo sapiens
tttaatatcctgttc

SEQ ID NO: 1282631 - DNA, 15 bp, Homo sapiens
ttttaatatcctgtt

SEQ ID NO: 1282632 - DNA, 15 bp, Homo sapiens
attttaatatcctgt

SEQ ID NO: 1282633 - DNA, 15 bp, Homo sapiens
tattttaatatcctg

SEQ ID NO: 1282634 - DNA, 15 bp, Homo sapiens
atattttaatatcct

SEQ ID NO: 1282635 - DNA, 15 bp, Homo sapiens
gatattttaatatcc

SEQ ID NO: 1282636 - DNA, 15 bp, Homo sapiens
agatattttaatatc

SEQ ID NO: 1282637 - DNA, 15 bp, Homo sapiens
aagatattttaatat

SEQ ID NO: 1282638 - DNA, 15 bp, Homo sapiens
taagatattttaata

SEQ ID NO: 1282639 - DNA, 15 bp, Homo sapiens
gtaagatattttaat

SEQ ID NO: 1282640 - DNA, 15 bp, Homo sapiens
agtaagatattttaa

SEQ ID NO: 1282641 - DNA, 15 bp, Homo sapiens
tagtaagatatttta

SEQ ID NO: 1282642 - DNA, 15 bp, Homo sapiens
ctagtaagatatttt

SEQ ID NO: 1282643 - DNA, 15 bp, Homo sapiens
tctagtaagatattt

SEQ ID NO: 1282644 - DNA, 15 bp, Homo sapiens
ttctagtaagatatt

SEQ ID NO: 1282645 - DNA, 15 bp, Homo sapiens
gttctagtaagatat

SEQ ID NO: 1282646 - DNA, 15 bp, Homo sapiens
ggttctagtaagata

SEQ ID NO: 1282647 - DNA, 15 bp, Homo sapiens
aggttctagtaagat

SEQ ID NO: 1282648 - DNA, 15 bp, Homo sapiens
aaggttctagtaaga

SEQ ID NO: 1282649 - DNA, 15 bp, Homo sapiens
caaggttctagtaag

SEQ ID NO: 1282650 - DNA, 15 bp, Homo sapiens
ccaaggttctagtaa

SEQ ID NO: 1282651 - DNA, 15 bp, Homo sapiens
cccaaggttctagta

SEQ ID NO: 1282652 - DNA, 15 bp, Homo sapiens
gcccaaggttctagt

SEQ ID NO: 1282653 - DNA, 15 bp, Homo sapiens
ggcccaaggttctag

SEQ ID NO: 1282654 - DNA, 15 bp, Homo sapiens
gggcccaaggttcta

SEQ ID NO: 1282655 - DNA, 15 bp, Homo sapiens
tgggcccaaggttct

SEQ ID NO: 1282656 - DNA, 15 bp, Homo sapiens
ctgggcccaaggttc

SEQ ID NO: 1282657 - DNA, 15 bp, Homo sapiens
gctgggcccaaggtt

SEQ ID NO: 1282658 - DNA, 15 bp, Homo sapiens
agctgggcccaaggt

SEQ ID NO: 1282659 - DNA, 15 bp, Homo sapiens
aagctgggcccaagg

SEQ ID NO: 1282660 - DNA, 15 bp, Homo sapiens
gaagctgggcccaag

SEQ ID NO: 1282661 - DNA, 15 bp, Homo sapiens
ggaagctgggcccaa

SEQ ID NO: 1282662 - DNA, 15 bp, Homo sapiens
cggaagctgggccca

SEQ ID NO: 1282663 - DNA, 15 bp, Homo sapiens
ccggaagctgggccc

SEQ ID NO: 1282664 - DNA, 15 bp, Homo sapiens
accggaagctgggcc

SEQ ID NO: 1282665 - DNA, 15 bp, Homo sapiens
gaccggaagctgggc

SEQ ID NO: 1282666 - DNA, 15 bp, Homo sapiens
agaccggaagctggg

SEQ ID NO: 1282667 - DNA, 15 bp, Homo sapiens
aagaccggaagctgg

SEQ ID NO: 1282668 - DNA, 15 bp, Homo sapiens
gaagaccggaagctg

SEQ ID NO: 1282669 - DNA, 15 bp, Homo sapiens
ggaagaccggaagct

SEQ ID NO: 1282670 - DNA, 15 bp, Homo sapiens
aggaagaccggaagc

SEQ ID NO: 1282671 - DNA, 15 bp, Homo sapiens
caggaagaccggaag

SEQ ID NO: 1282672 - DNA, 15 bp, Homo sapiens
tcaggaagaccggaa

SEQ ID NO: 1282673 - DNA, 15 bp, Homo sapiens
atcaggaagaccgga

SEQ ID NO: 1282674 - DNA, 15 bp, Homo sapiens
catcaggaagaccgg

SEQ ID NO: 1282675 - DNA, 15 bp, Homo sapiens
ccatcaggaagaccg

SEQ ID NO: 1282676 - DNA, 15 bp, Homo sapiens
accatcaggaagacc

SEQ ID NO: 1282677 - DNA, 15 bp, Homo sapiens
aaccatcaggaagac

SEQ ID NO: 1282678 - DNA, 15 bp, Homo sapiens
aaaccatcaggaaga

SEQ ID NO: 1282679 - DNA, 15 bp, Homo sapiens
gaaaccatcaggaag

SEQ ID NO: 1282680 - DNA, 15 bp, Homo sapiens
tgaaaccatcaggaa

SEQ ID NO: 1282681 - DNA, 15 bp, Homo sapiens
ttgaaaccatcagga

SEQ ID NO: 1282682 - DNA, 15 bp, Homo sapiens
attgaaaccatcagg

SEQ ID NO: 1282683 - DNA, 15 bp, Homo sapiens
gattgaaaccatcag

SEQ ID NO: 1282684 - DNA, 15 bp, Homo sapiens
ggattgaaaccatca

SEQ ID NO: 1282685 - DNA, 15 bp, Homo sapiens
tggattgaaaccatc

SEQ ID NO: 1282686 - DNA, 15 bp, Homo sapiens
ctggattgaaaccat

SEQ ID NO: 1282687 - DNA, 15 bp, Homo sapiens
cctggattgaaacca

SEQ ID NO: 1282688 - DNA, 15 bp, Homo sapiens
gcctggattgaaacc

SEQ ID NO: 1282689 - DNA, 15 bp, Homo sapiens
ggcctggattgaaac

SEQ ID NO: 1282690 - DNA, 15 bp, Homo sapiens
aggcctggattgaaa

SEQ ID NO: 1282691 - DNA, 15 bp, Homo sapiens
taggcctggattgaa

SEQ ID NO: 1282692 - DNA, 15 bp, Homo sapiens
ctaggcctggattga

SEQ ID NO: 1282693 - DNA, 15 bp, Homo sapiens
gctaggcctggattg

SEQ ID NO: 1282694 - DNA, 15 bp, Homo sapiens
tgctaggcctggatt

SEQ ID NO: 1282695 - DNA, 15 bp, Homo sapiens
gtgctaggcctggat

SEQ ID NO: 1282696 - DNA, 15 bp, Homo sapiens
cgtgctaggcctgga

SEQ ID NO: 1282697 - DNA, 15 bp, Homo sapiens
ccgtgctaggcctgg

SEQ ID NO: 1282698 - DNA, 15 bp, Homo sapiens
cccgtgctaggcctg

SEQ ID NO: 1282699 - DNA, 15 bp, Homo sapiens
tcccgtgctaggcct

SEQ ID NO: 1282700 - DNA, 15 bp, Homo sapiens
gtcccgtgctaggcc

SEQ ID NO: 1282701 - DNA, 15 bp, Homo sapiens
ggtcccgtgctaggc

SEQ ID NO: 1282702 - DNA, 15 bp, Homo sapiens
aggtcccgtgctagg

SEQ ID NO: 1282703 - DNA, 15 bp, Homo sapiens
gaggtcccgtgctag

SEQ ID NO: 1282704 - DNA, 15 bp, Homo sapiens
agaggtcccgtgcta

SEQ ID NO: 1282705 - DNA, 15 bp, Homo sapiens
cagaggtcccgtgct

SEQ ID NO: 1282706 - DNA, 15 bp, Homo sapiens
acagaggtcccgtgc

SEQ ID NO: 1282707 - DNA, 15 bp, Homo sapiens
gacagaggtcccgtg

SEQ ID NO: 1282708 - DNA, 15 bp, Homo sapiens
agacagaggtcccgt

SEQ ID NO: 1282709 - DNA, 15 bp, Homo sapiens
tagacagaggtcccg

SEQ ID NO: 1282710 - DNA, 15 bp, Homo sapiens
ttagacagaggtccc

SEQ ID NO: 1282711 - DNA, 15 bp, Homo sapiens
tttagacagaggtcc

SEQ ID NO: 1282712 - DNA, 15 bp, Homo sapiens
ttttagacagaggtc

SEQ ID NO: 1282713 - DNA, 15 bp, Homo sapiens
attttagacagaggt

SEQ ID NO: 1282714 - DNA, 15 bp, Homo sapiens
aattttagacagagg

SEQ ID NO: 1282715 - DNA, 15 bp, Homo sapiens
gaattttagacagag

SEQ ID NO: 1282716 - DNA, 15 bp, Homo sapiens
agaattttagacaga

SEQ ID NO: 1282717 - DNA, 15 bp, Homo sapiens
gagaattttagacag

SEQ ID NO: 1282718 - DNA, 15 bp, Homo sapiens
agagaattttagaca

SEQ ID NO: 1282719 - DNA, 15 bp, Homo sapiens
cagagaattttagac

SEQ ID NO: 1282720 - DNA, 15 bp, Homo sapiens
gcagagaattttaga

SEQ ID NO: 1282721 - DNA, 15 bp, Homo sapiens
agcagagaattttag

SEQ ID NO: 1282722 - DNA, 15 bp, Homo sapiens
gagcagagaatttta

SEQ ID NO: 1282723 - DNA, 15 bp, Homo sapiens
agagcagagaatttt

SEQ ID NO: 1282724 - DNA, 15 bp, Homo sapiens
gagagcagagaattt

SEQ ID NO: 1282725 - DNA, 15 bp, Homo sapiens
tgagagcagagaatt

SEQ ID NO: 1282726 - DNA, 15 bp, Homo sapiens
atgagagcagagaat

SEQ ID NO: 1282727 - DNA, 15 bp, Homo sapiens
catgagagcagagaa

SEQ ID NO: 1282728 - DNA, 15 bp, Homo sapiens
ccatgagagcagaga

SEQ ID NO: 1282729 - DNA, 15 bp, Homo sapiens
gccatgagagcagag

SEQ ID NO: 1282730 - DNA, 15 bp, Homo sapiens
ggccatgagagcaga

SEQ ID NO: 1282731 - DNA, 15 bp, Homo sapiens
gggccatgagagcag

SEQ ID NO: 1282732 - DNA, 15 bp, Homo sapiens
agggccatgagagca

SEQ ID NO: 1282733 - DNA, 15 bp, Homo sapiens
cagggccatgagagc

SEQ ID NO: 1282734 - DNA, 15 bp, Homo sapiens
gcagggccatgagag

SEQ ID NO: 1282735 - DNA, 15 bp, Homo sapiens
ggcagggccatgaga

SEQ ID NO: 1282736 - DNA, 15 bp, Homo sapiens
tggcagggccatgag

SEQ ID NO: 1282737 - DNA, 15 bp, Homo sapiens
atggcagggccatga

SEQ ID NO: 1282738 - DNA, 15 bp, Homo sapiens
aatggcagggccatg

SEQ ID NO: 1282739 - DNA, 15 bp, Homo sapiens
gaatggcagggccat

SEQ ID NO: 1282740 - DNA, 15 bp, Homo sapiens
ggaatggcagggcca

SEQ ID NO: 1282741 - DNA, 15 bp, Homo sapiens
aggaatggcagggcc

SEQ ID NO: 1282742 - DNA, 15 bp, Homo sapiens
caggaatggcagggc

SEQ ID NO: 1282743 - DNA, 15 bp, Homo sapiens
tcaggaatggcaggg

SEQ ID NO: 1282744 - DNA, 15 bp, Homo sapiens
ctcaggaatggcagg

SEQ ID NO: 1282745 - DNA, 15 bp, Homo sapiens
cctcaggaatggcag

SEQ ID NO: 1282746 - DNA, 15 bp, Homo sapiens
gcctcaggaatggca

SEQ ID NO: 1282747 - DNA, 15 bp, Homo sapiens
tgcctcaggaatggc

SEQ ID NO: 1282748 - DNA, 15 bp, Homo sapiens
gtgcctcaggaatgg

SEQ ID NO: 1282749 - DNA, 15 bp, Homo sapiens
ggtgcctcaggaatg

SEQ ID NO: 1282750 - DNA, 15 bp, Homo sapiens
gggtgcctcaggaat

SEQ ID NO: 1282751 - DNA, 15 bp, Homo sapiens
agggtgcctcaggaa

SEQ ID NO: 1282752 - DNA, 15 bp, Homo sapiens
aagggtgcctcagga

SEQ ID NO: 1282753 - DNA, 15 bp, Homo sapiens
aaagggtgcctcagg

SEQ ID NO: 1282754 - DNA, 15 bp, Homo sapiens
caaagggtgcctcag

SEQ ID NO: 1282755 - DNA, 15 bp, Homo sapiens
gcaaagggtgcctca

SEQ ID NO: 1282756 - DNA, 15 bp, Homo sapiens
ggcaaagggtgcctc

SEQ ID NO: 1282757 - DNA, 15 bp, Homo sapiens
aggcaaagggtgcct

SEQ ID NO: 1282758 - DNA, 15 bp, Homo sapiens
gaggcaaagggtgcc

SEQ ID NO: 1282759 - DNA, 15 bp, Homo sapiens
ggaggcaaagggtgc

SEQ ID NO: 1282760 - DNA, 15 bp, Homo sapiens
tggaggcaaagggtg

SEQ ID NO: 1282761 - DNA, 15 bp, Homo sapiens
ctggaggcaaagggt

SEQ ID NO: 1282762 - DNA, 15 bp, Homo sapiens
cctggaggcaaaggg

SEQ ID NO: 1282763 - DNA, 15 bp, Homo sapiens
gcctggaggcaaagg

SEQ ID NO: 1282764 - DNA, 15 bp, Homo sapiens
agcctggaggcaaag

SEQ ID NO: 1282765 - DNA, 15 bp, Homo sapiens
tagcctggaggcaaa

SEQ ID NO: 1282766 - DNA, 15 bp, Homo sapiens
ttagcctggaggcaa

SEQ ID NO: 1282767 - DNA, 15 bp, Homo sapiens
tttagcctggaggca

SEQ ID NO: 1282768 - DNA, 15 bp, Homo sapiens
ctttagcctggaggc

SEQ ID NO: 1282769 - DNA, 15 bp, Homo sapiens
actttagcctggagg

SEQ ID NO: 1282770 - DNA, 15 bp, Homo sapiens
tactttagcctggag

SEQ ID NO: 1282771 - DNA, 15 bp, Homo sapiens
ttactttagcctgga

SEQ ID NO: 1282772 - DNA, 15 bp, Homo sapiens
tttactttagcctgg

SEQ ID NO: 1282773 - DNA, 15 bp, Homo sapiens
gtttactttagcctg

SEQ ID NO: 1282774 - DNA, 15 bp, Homo sapiens
tgtttactttagcct

SEQ ID NO: 1282775 - DNA, 15 bp, Homo sapiens
gtgtttactttagcc

SEQ ID NO: 1282776 - DNA, 15 bp, Homo sapiens
ggtgtttactttagc

SEQ ID NO: 1282777 - DNA, 15 bp, Homo sapiens
aggtgtttactttag

SEQ ID NO: 1282778 - DNA, 15 bp, Homo sapiens
caggtgtttacttta

SEQ ID NO: 1282779 - DNA, 15 bp, Homo sapiens
acaggtgtttacttt

SEQ ID NO: 1282780 - DNA, 15 bp, Homo sapiens
gacaggtgtttactt

SEQ ID NO: 1282781 - DNA, 15 bp, Homo sapiens
tgacaggtgtttact

SEQ ID NO: 1282782 - DNA, 15 bp, Homo sapiens
atgacaggtgtttac

SEQ ID NO: 1282783 - DNA, 15 bp, Homo sapiens
aatgacaggtgttta

SEQ ID NO: 1282784 - DNA, 15 bp, Homo sapiens
gaatgacaggtgttt

SEQ ID NO: 1282785 - DNA, 15 bp, Homo sapiens
tgaatgacaggtgtt

SEQ ID NO: 1282786 - DNA, 15 bp, Homo sapiens
atgaatgacaggtgt

SEQ ID NO: 1282787 - DNA, 15 bp, Homo sapiens
catgaatgacaggtg

SEQ ID NO: 1282788 - DNA, 15 bp, Homo sapiens
tcatgaatgacaggt

SEQ ID NO: 1282789 - DNA, 15 bp, Homo sapiens
atcatgaatgacagg

SEQ ID NO: 1282790 - DNA, 15 bp, Homo sapiens
gatcatgaatgacag

SEQ ID NO: 1282791 - DNA, 15 bp, Homo sapiens
ggatcatgaatgaca

SEQ ID NO: 1282792 - DNA, 15 bp, Homo sapiens
aggatcatgaatgac

SEQ ID NO: 1282793 - DNA, 15 bp, Homo sapiens
gaggatcatgaatga

SEQ ID NO: 1282794 - DNA, 15 bp, Homo sapiens
ggaggatcatgaatg

SEQ ID NO: 1282795 - DNA, 15 bp, Homo sapiens
aggaggatcatgaat

SEQ ID NO: 1282796 - DNA, 15 bp, Homo sapiens
aaggaggatcatgaa

SEQ ID NO: 1282797 - DNA, 15 bp, Homo sapiens
taaggaggatcatga

SEQ ID NO: 1282798 - DNA, 15 bp, Homo sapiens
gtaaggaggatcatg

SEQ ID NO: 1282799 - DNA, 15 bp, Homo sapiens
agtaaggaggatcat

SEQ ID NO: 1282800 - DNA, 15 bp, Homo sapiens
aagtaaggaggatca

SEQ ID NO: 1282801 - DNA, 15 bp, Homo sapiens
aaagtaaggaggatc

SEQ ID NO: 1282802 - DNA, 15 bp, Homo sapiens
caaagtaaggaggat

SEQ ID NO: 1282803 - DNA, 15 bp, Homo sapiens
tcaaagtaaggagga

SEQ ID NO: 1282804 - DNA, 15 bp, Homo sapiens
atcaaagtaaggagg

SEQ ID NO: 1282805 - DNA, 15 bp, Homo sapiens
tatcaaagtaaggag

SEQ ID NO: 1282806 - DNA, 15 bp, Homo sapiens
atatcaaagtaagga

SEQ ID NO: 1282807 - DNA, 15 bp, Homo sapiens
catatcaaagtaagg

SEQ ID NO: 1282808 - DNA, 15 bp, Homo sapiens
tcatatcaaagtaag

SEQ ID NO: 1282809 - DNA, 15 bp, Homo sapiens
atcatatcaaagtaa

SEQ ID NO: 1282810 - DNA, 15 bp, Homo sapiens
tatcatatcaaagta

SEQ ID NO: 1282811 - DNA, 15 bp, Homo sapiens
ttatcatatcaaagt

SEQ ID NO: 1282812 - DNA, 15 bp, Homo sapiens
tttatcatatcaaag

SEQ ID NO: 1282813 - DNA, 15 bp, Homo sapiens
ttttatcatatcaaa

SEQ ID NO: 1282814 - DNA, 15 bp, Homo sapiens
attttatcatatcaa

SEQ ID NO: 1282815 - DNA, 15 bp, Homo sapiens
tattttatcatatca

SEQ ID NO: 1282816 - DNA, 15 bp, Homo sapiens
atattttatcatatc

SEQ ID NO: 1282817 - DNA, 15 bp, Homo sapiens
gatattttatcatat

SEQ ID NO: 1282818 - DNA, 15 bp, Homo sapiens
tgatattttatcata

SEQ ID NO: 1282819 - DNA, 15 bp, Homo sapiens
ctgatattttatcat

SEQ ID NO: 1282820 - DNA, 15 bp, Homo sapiens
cctgatattttatca

SEQ ID NO: 1282821 - DNA, 15 bp, Homo sapiens
ccctgatattttatc

SEQ ID NO: 1282822 - DNA, 15 bp, Homo sapiens
gccctgatattttat

SEQ ID NO: 1282823 - DNA, 15 bp, Homo sapiens
ggccctgatatttta

SEQ ID NO: 1282824 - DNA, 15 bp, Homo sapiens
gggccctgatatttt

SEQ ID NO: 1282825 - DNA, 15 bp, Homo sapiens
tgggccctgatattt

SEQ ID NO: 1282826 - DNA, 15 bp, Homo sapiens
ctgggccctgatatt

SEQ ID NO: 1282827 - DNA, 15 bp, Homo sapiens
tctgggccctgatat

SEQ ID NO: 1282828 - DNA, 15 bp, Homo sapiens
gtctgggccctgata

SEQ ID NO: 1282829 - DNA, 15 bp, Homo sapiens
agtctgggccctgat

SEQ ID NO: 1282830 - DNA, 15 bp, Homo sapiens
cagtctgggccctga

SEQ ID NO: 1282831 - DNA, 15 bp, Homo sapiens
gcagtctgggccctg

SEQ ID NO: 1282832 - DNA, 15 bp, Homo sapiens
tgcagtctgggccct

SEQ ID NO: 1282833 - DNA, 15 bp, Homo sapiens
ctgcagtctgggccc

SEQ ID NO: 1282834 - DNA, 15 bp, Homo sapiens
actgcagtctgggcc

SEQ ID NO: 1282835 - DNA, 15 bp, Homo sapiens
gactgcagtctgggc

SEQ ID NO: 1282836 - DNA, 15 bp, Homo sapiens
ggactgcagtctggg

SEQ ID NO: 1282837 - DNA, 15 bp, Homo sapiens
gggactgcagtctgg

SEQ ID NO: 1282838 - DNA, 15 bp, Homo sapiens
tgggactgcagtctg

SEQ ID NO: 1282839 - DNA, 15 bp, Homo sapiens
gtgggactgcagtct

SEQ ID NO: 1282840 - DNA, 15 bp, Homo sapiens
cgtgggactgcagtc

SEQ ID NO: 1282841 - DNA, 15 bp, Homo sapiens
ccgtgggactgcagt

SEQ ID NO: 1282842 - DNA, 15 bp, Homo sapiens
gccgtgggactgcag

SEQ ID NO: 1282843 - DNA, 15 bp, Homo sapiens
ggccgtgggactgca

SEQ ID NO: 1282844 - DNA, 15 bp, Homo sapiens
gggccgtgggactgc

SEQ ID NO: 1282845 - DNA, 15 bp, Homo sapiens
agggccgtgggactg

SEQ ID NO: 1282846 - DNA, 15 bp, Homo sapiens
cagggccgtgggact

SEQ ID NO: 1282847 - DNA, 15 bp, Homo sapiens
ccagggccgtgggac

SEQ ID NO: 1282848 - DNA, 15 bp, Homo sapiens
tccagggccgtggga

SEQ ID NO: 1282849 - DNA, 15 bp, Homo sapiens
gtccagggccgtggg

SEQ ID NO: 1282850 - DNA, 15 bp, Homo sapiens
agtccagggccgtgg

SEQ ID NO: 1282851 - DNA, 15 bp, Homo sapiens
gagtccagggccgtg

SEQ ID NO: 1282852 - DNA, 15 bp, Homo sapiens
ggagtccagggccgt

SEQ ID NO: 1282853 - DNA, 15 bp, Homo sapiens
tggagtccagggccg

SEQ ID NO: 1282854 - DNA, 15 bp, Homo sapiens
ctggagtccagggcc

SEQ ID NO: 1282855 - DNA, 15 bp, Homo sapiens
tctggagtccagggc

SEQ ID NO: 1282856 - DNA, 15 bp, Homo sapiens
gtctggagtccaggg

SEQ ID NO: 1282857 - DNA, 15 bp, Homo sapiens
ggtctggagtccagg

SEQ ID NO: 1282858 - DNA, 15 bp, Homo sapiens
aggtctggagtccag

SEQ ID NO: 1282859 - DNA, 15 bp, Homo sapiens
taggtctggagtcca

SEQ ID NO: 1282860 - DNA, 15 bp, Homo sapiens
gtaggtctggagtcc

SEQ ID NO: 1282861 - DNA, 15 bp, Homo sapiens
ggtaggtctggagtc

SEQ ID NO: 1282862 - DNA, 15 bp, Homo sapiens
aggtaggtctggagt

SEQ ID NO: 1282863 - DNA, 15 bp, Homo sapiens
caggtaggtctggag

SEQ ID NO: 1282864 - DNA, 15 bp, Homo sapiens
acaggtaggtctgga

SEQ ID NO: 1282865 - DNA, 15 bp, Homo sapiens
gacaggtaggtctgg

SEQ ID NO: 1282866 - DNA, 15 bp, Homo sapiens
agacaggtaggtctg

SEQ ID NO: 1282867 - DNA, 15 bp, Homo sapiens
cagacaggtaggtct

SEQ ID NO: 1282868 - DNA, 15 bp, Homo sapiens
acagacaggtaggtc

SEQ ID NO: 1282869 - DNA, 15 bp, Homo sapiens
gacagacaggtaggt

SEQ ID NO: 1282870 - DNA, 15 bp, Homo sapiens
agacagacaggtagg

SEQ ID NO: 1282871 - DNA, 15 bp, Homo sapiens
aagacagacaggtag

SEQ ID NO: 1282872 - DNA, 15 bp, Homo sapiens
caagacagacaggta

SEQ ID NO: 1282873 - DNA, 15 bp, Homo sapiens
tcaagacagacaggt

SEQ ID NO: 1282874 - DNA, 15 bp, Homo sapiens
atcaagacagacagg

SEQ ID NO: 1282875 - DNA, 15 bp, Homo sapiens
gatcaagacagacag

SEQ ID NO: 1282876 - DNA, 15 bp, Homo sapiens
agatcaagacagaca

SEQ ID NO: 1282877 - DNA, 15 bp, Homo sapiens
gagatcaagacagac

SEQ ID NO: 1282878 - DNA, 15 bp, Homo sapiens
agagatcaagacaga

SEQ ID NO: 1282879 - DNA, 15 bp, Homo sapiens
gagagatcaagacag

SEQ ID NO: 1282880 - DNA, 15 bp, Homo sapiens
tgagagatcaagaca

SEQ ID NO: 1282881 - DNA, 15 bp, Homo sapiens
ttgagagatcaagac

SEQ ID NO: 1282882 - DNA, 15 bp, Homo sapiens
attgagagatcaaga

SEQ ID NO: 1282883 - DNA, 15 bp, Homo sapiens
gattgagagatcaag

SEQ ID NO: 1282884 - DNA, 15 bp, Homo sapiens
ggattgagagatcaa

SEQ ID NO: 1282885 - DNA, 15 bp, Homo sapiens
aggattgagagatca

SEQ ID NO: 1282886 - DNA, 15 bp, Homo sapiens
gaggattgagagatc

SEQ ID NO: 1282887 - DNA, 15 bp, Homo sapiens
agaggattgagagat

SEQ ID NO: 1282888 - DNA, 15 bp, Homo sapiens
tagaggattgagaga

SEQ ID NO: 1282889 - DNA, 15 bp, Homo sapiens
ctagaggattgagag

SEQ ID NO: 1282890 - DNA, 15 bp, Homo sapiens
cctagaggattgaga

SEQ ID NO: 1282891 - DNA, 15 bp, Homo sapiens
ccctagaggattgag

SEQ ID NO: 1282892 - DNA, 15 bp, Homo sapiens
gccctagaggattga

SEQ ID NO: 1282893 - DNA, 15 bp, Homo sapiens
tgccctagaggattg

SEQ ID NO: 1282894 - DNA, 15 bp, Homo sapiens
ctgccctagaggatt

SEQ ID NO: 1282895 - DNA, 15 bp, Homo sapiens
gctgccctagaggat

SEQ ID NO: 1282896 - DNA, 15 bp, Homo sapiens
ggctgccctagagga

SEQ ID NO: 1282897 - DNA, 15 bp, Homo sapiens
aggctgccctagagg

SEQ ID NO: 1282898 - DNA, 15 bp, Homo sapiens
aaggctgccctagag

SEQ ID NO: 1282899 - DNA, 15 bp, Homo sapiens
gaaggctgccctaga

SEQ ID NO: 1282900 - DNA, 15 bp, Homo sapiens
agaaggctgccctag

SEQ ID NO: 1282901 - DNA, 15 bp, Homo sapiens
gagaaggctgcccta

SEQ ID NO: 1282902 - DNA, 15 bp, Homo sapiens
ggagaaggctgccct

SEQ ID NO: 1282903 - DNA, 15 bp, Homo sapiens
aggagaaggctgccc

SEQ ID NO: 1282904 - DNA, 15 bp, Homo sapiens
taggagaaggctgcc

SEQ ID NO: 1282905 - DNA, 15 bp, Homo sapiens
gtaggagaaggctgc

SEQ ID NO: 1282906 - DNA, 15 bp, Homo sapiens
tgtaggagaaggctg

SEQ ID NO: 1282907 - DNA, 15 bp, Homo sapiens
atgtaggagaaggct

SEQ ID NO: 1282908 - DNA, 15 bp, Homo sapiens
gatgtaggagaaggc

SEQ ID NO: 1282909 - DNA, 15 bp, Homo sapiens
ggatgtaggagaagg

SEQ ID NO: 1282910 - DNA, 15 bp, Homo sapiens
tggatgtaggagaag

SEQ ID NO: 1282911 - DNA, 15 bp, Homo sapiens
ctggatgtaggagaa

SEQ ID NO: 1282912 - DNA, 15 bp, Homo sapiens
tctggatgtaggaga

SEQ ID NO: 1282913 - DNA, 15 bp, Homo sapiens
ttctggatgtaggag

SEQ ID NO: 1282914 - DNA, 15 bp, Homo sapiens
attctggatgtagga

SEQ ID NO: 1282915 - DNA, 15 bp, Homo sapiens
aattctggatgtagg

SEQ ID NO: 1282916 - DNA, 15 bp, Homo sapiens
aaattctggatgtag

SEQ ID NO: 1282917 - DNA, 15 bp, Homo sapiens
aaaattctggatgta

SEQ ID NO: 1282918 - DNA, 15 bp, Homo sapiens
gaaaattctggatgt

SEQ ID NO: 1282919 - DNA, 15 bp, Homo sapiens
agaaaattctggatg

SEQ ID NO: 1282920 - DNA, 15 bp, Homo sapiens
cagaaaattctggat

SEQ ID NO: 1282921 - DNA, 15 bp, Homo sapiens
gcagaaaattctgga

SEQ ID NO: 1282922 - DNA, 15 bp, Homo sapiens
tgcagaaaattctgg

SEQ ID NO: 1282923 - DNA, 15 bp, Homo sapiens
atgcagaaaattctg

SEQ ID NO: 1282924 - DNA, 15 bp, Homo sapiens
aatgcagaaaattct

SEQ ID NO: 1282925 - DNA, 15 bp, Homo sapiens
gaatgcagaaaattc

SEQ ID NO: 1282926 - DNA, 15 bp, Homo sapiens
agaatgcagaaaatt

SEQ ID NO: 1282927 - DNA, 15 bp, Homo sapiens
cagaatgcagaaaat

SEQ ID NO: 1282928 - DNA, 15 bp, Homo sapiens
acagaatgcagaaaa

SEQ ID NO: 1282929 - DNA, 15 bp, Homo sapiens
gacagaatgcagaaa

SEQ ID NO: 1282930 - DNA, 15 bp, Homo sapiens
ggacagaatgcagaa

SEQ ID NO: 1282931 - DNA, 15 bp, Homo sapiens
gggacagaatgcaga

SEQ ID NO: 1282932 - DNA, 15 bp, Homo sapiens
ggggacagaatgcag

SEQ ID NO: 1282933 - DNA, 15 bp, Homo sapiens
aggggacagaatgca

SEQ ID NO: 1282934 - DNA, 15 bp, Homo sapiens
taggggacagaatgc

SEQ ID NO: 1282935 - DNA, 15 bp, Homo sapiens
gtaggggacagaatg

SEQ ID NO: 1282936 - DNA, 15 bp, Homo sapiens
tgtaggggacagaat

SEQ ID NO: 1282937 - DNA, 15 bp, Homo sapiens
atgtaggggacagaa

SEQ ID NO: 1282938 - DNA, 15 bp, Homo sapiens
catgtaggggacaga

SEQ ID NO: 1282939 - DNA, 15 bp, Homo sapiens
tcatgtaggggacag

SEQ ID NO: 1282940 - DNA, 15 bp, Homo sapiens
ttcatgtaggggaca

SEQ ID NO: 1282941 - DNA, 15 bp, Homo sapiens
attcatgtaggggac

SEQ ID NO: 1282942 - DNA, 15 bp, Homo sapiens
tattcatgtagggga

SEQ ID NO: 1282943 - DNA, 15 bp, Homo sapiens
atattcatgtagggg

SEQ ID NO: 1282944 - DNA, 15 bp, Homo sapiens
aatattcatgtaggg

SEQ ID NO: 1282945 - DNA, 15 bp, Homo sapiens
caatattcatgtagg

SEQ ID NO: 1282946 - DNA, 15 bp, Homo sapiens
gcaatattcatgtag

SEQ ID NO: 1282947 - DNA, 15 bp, Homo sapiens
tgcaatattcatgta

SEQ ID NO: 1282948 - DNA, 15 bp, Homo sapiens
gtgcaatattcatgt

SEQ ID NO: 1282949 - DNA, 15 bp, Homo sapiens
agtgcaatattcatg

SEQ ID NO: 1282950 - DNA, 15 bp, Homo sapiens
aagtgcaatattcat

SEQ ID NO: 1282951 - DNA, 15 bp, Homo sapiens
caagtgcaatattca

SEQ ID NO: 1282952 - DNA, 15 bp, Homo sapiens
acaagtgcaatattc

SEQ ID NO: 1282953 - DNA, 15 bp, Homo sapiens
aacaagtgcaatatt

SEQ ID NO: 1282954 - DNA, 15 bp, Homo sapiens
gaacaagtgcaatat

SEQ ID NO: 1282955 - DNA, 15 bp, Homo sapiens
agaacaagtgcaata

SEQ ID NO: 1282956 - DNA, 15 bp, Homo sapiens
aagaacaagtgcaat

SEQ ID NO: 1282957 - DNA, 15 bp, Homo sapiens
caagaacaagtgcaa

SEQ ID NO: 1282958 - DNA, 15 bp, Homo sapiens
ccaagaacaagtgca

SEQ ID NO: 1282959 - DNA, 15 bp, Homo sapiens
cccaagaacaagtgc

SEQ ID NO: 1282960 - DNA, 15 bp, Homo sapiens
tcccaagaacaagtg

SEQ ID NO: 1282961 - DNA, 15 bp, Homo sapiens
gtcccaagaacaagt

SEQ ID NO: 1282962 - DNA, 15 bp, Homo sapiens
ggtcccaagaacaag

SEQ ID NO: 1282963 - DNA, 15 bp, Homo sapiens
gggtcccaagaacaa

SEQ ID NO: 1282964 - DNA, 15 bp, Homo sapiens
agggtcccaagaaca

SEQ ID NO: 1282965 - DNA, 15 bp, Homo sapiens
tagggtcccaagaac

SEQ ID NO: 1282966 - DNA, 15 bp, Homo sapiens
atagggtcccaagaa

SEQ ID NO: 1282967 - DNA, 15 bp, Homo sapiens
gatagggtcccaaga

SEQ ID NO: 1282968 - DNA, 15 bp, Homo sapiens
ggatagggtcccaag

SEQ ID NO: 1282969 - DNA, 15 bp, Homo sapiens
gggatagggtcccaa

SEQ ID NO: 1282970 - DNA, 15 bp, Homo sapiens
ggggatagggtccca

SEQ ID NO: 1282971 - DNA, 15 bp, Homo sapiens
gggggatagggtccc

SEQ ID NO: 1282972 - DNA, 15 bp, Homo sapiens
agggggatagggtcc

SEQ ID NO: 1282973 - DNA, 15 bp, Homo sapiens
gagggggatagggtc

SEQ ID NO: 1282974 - DNA, 15 bp, Homo sapiens
agagggggatagggt

SEQ ID NO: 1282975 - DNA, 15 bp, Homo sapiens
gagagggggataggg

SEQ ID NO: 1282976 - DNA, 15 bp, Homo sapiens
ggagagggggatagg

SEQ ID NO: 1282977 - DNA, 15 bp, Homo sapiens
gggagagggggatag

SEQ ID NO: 1282978 - DNA, 15 bp, Homo sapiens
agggagagggggata

SEQ ID NO: 1282979 - DNA, 15 bp, Homo sapiens
gagggagagggggat

SEQ ID NO: 1282980 - DNA, 15 bp, Homo sapiens
ggagggagaggggga

SEQ ID NO: 1282981 - DNA, 15 bp, Homo sapiens
aggagggagaggggg

SEQ ID NO: 1282982 - DNA, 15 bp, Homo sapiens
taggagggagagggg

SEQ ID NO: 1282983 - DNA, 15 bp, Homo sapiens
ttaggagggagaggg

SEQ ID NO: 1282984 - DNA, 15 bp, Homo sapiens
gttaggagggagagg

SEQ ID NO: 1282985 - DNA, 15 bp, Homo sapiens
agttaggagggagag

SEQ ID NO: 1282986 - DNA, 15 bp, Homo sapiens
aagttaggagggaga

SEQ ID NO: 1282987 - DNA, 15 bp, Homo sapiens
gaagttaggagggag

SEQ ID NO: 1282988 - DNA, 15 bp, Homo sapiens
ggaagttaggaggga

SEQ ID NO: 1282989 - DNA, 15 bp, Homo sapiens
aggaagttaggaggg

SEQ ID NO: 1282990 - DNA, 15 bp, Homo sapiens
taggaagttaggagg

SEQ ID NO: 1282991 - DNA, 15 bp, Homo sapiens
gtaggaagttaggag

SEQ ID NO: 1282992 - DNA, 15 bp, Homo sapiens
ggtaggaagttagga

SEQ ID NO: 1282993 - DNA, 15 bp, Homo sapiens
aggtaggaagttagg

SEQ ID NO: 1282994 - DNA, 15 bp, Homo sapiens
aaggtaggaagttag

SEQ ID NO: 1282995 - DNA, 15 bp, Homo sapiens
caaggtaggaagtta

SEQ ID NO: 1282996 - DNA, 15 bp, Homo sapiens
gcaaggtaggaagtt

SEQ ID NO: 1282997 - DNA, 15 bp, Homo sapiens
ggcaaggtaggaagt

SEQ ID NO: 1282998 - DNA, 15 bp, Homo sapiens
gggcaaggtaggaag

SEQ ID NO: 1282999 - DNA, 15 bp, Homo sapiens
ggggcaaggtaggaa

SEQ ID NO: 1283000 - DNA, 15 bp, Homo sapiens
aggggcaaggtagga

SEQ ID NO: 1283001 - DNA, 15 bp, Homo sapiens
aaggggcaaggtagg

SEQ ID NO: 1283002 - DNA, 15 bp, Homo sapiens
aaaggggcaaggtag

SEQ ID NO: 1283003 - DNA, 15 bp, Homo sapiens
gaaaggggcaaggta

SEQ ID NO: 1283004 - DNA, 15 bp, Homo sapiens
agaaaggggcaaggt

SEQ ID NO: 1283005 - DNA, 15 bp, Homo sapiens
cagaaaggggcaagg

SEQ ID NO: 1283006 - DNA, 15 bp, Homo sapiens
gcagaaaggggcaag

SEQ ID NO: 1283007 - DNA, 15 bp, Homo sapiens
ggcagaaaggggcaa

SEQ ID NO: 1283008 - DNA, 15 bp, Homo sapiens
aggcagaaaggggca

SEQ ID NO: 1283009 - DNA, 15 bp, Homo sapiens
aaggcagaaaggggc

SEQ ID NO: 1283010 - DNA, 15 bp, Homo sapiens
aaaggcagaaagggg

SEQ ID NO: 1283011 - DNA, 15 bp, Homo sapiens
gaaaggcagaaaggg

SEQ ID NO: 1283012 - DNA, 15 bp, Homo sapiens
agaaaggcagaaagg

SEQ ID NO: 1283013 - DNA, 15 bp, Homo sapiens
cagaaaggcagaaag

SEQ ID NO: 1283014 - DNA, 15 bp, Homo sapiens
gcagaaaggcagaaa

SEQ ID NO: 1283015 - DNA, 15 bp, Homo sapiens
agcagaaaggcagaa

SEQ ID NO: 1283016 - DNA, 15 bp, Homo sapiens
gagcagaaaggcaga

SEQ ID NO: 1283017 - DNA, 15 bp, Homo sapiens
agagcagaaaggcag

SEQ ID NO: 1283018 - DNA, 15 bp, Homo sapiens
gagagcagaaaggca

SEQ ID NO: 1283019 - DNA, 15 bp, Homo sapiens
tgagagcagaaaggc

SEQ ID NO: 1283020 - DNA, 15 bp, Homo sapiens
ctgagagcagaaagg

SEQ ID NO: 1283021 - DNA, 15 bp, Homo sapiens
gctgagagcagaaag

SEQ ID NO: 1283022 - DNA, 15 bp, Homo sapiens
ggctgagagcagaaa

SEQ ID NO: 1283023 - DNA, 15 bp, Homo sapiens
aggctgagagcagaa

SEQ ID NO: 1283024 - DNA, 15 bp, Homo sapiens
gaggctgagagcaga

SEQ ID NO: 1283025 - DNA, 15 bp, Homo sapiens
ggaggctgagagcag

SEQ ID NO: 1283026 - DNA, 15 bp, Homo sapiens
aggaggctgagagca

SEQ ID NO: 1283027 - DNA, 15 bp, Homo sapiens
caggaggctgagagc

SEQ ID NO: 1283028 - DNA, 15 bp, Homo sapiens
acaggaggctgagag

SEQ ID NO: 1283029 - DNA, 15 bp, Homo sapiens
gacaggaggctgaga

SEQ ID NO: 1283030 - DNA, 15 bp, Homo sapiens
agacaggaggctgag

SEQ ID NO: 1283031 - DNA, 15 bp, Homo sapiens
cagacaggaggctga

SEQ ID NO: 1283032 - DNA, 15 bp, Homo sapiens
gcagacaggaggctg

SEQ ID NO: 1283033 - DNA, 15 bp, Homo sapiens
ggcagacaggaggct

SEQ ID NO: 1283034 - DNA, 15 bp, Homo sapiens
gggcagacaggaggc

SEQ ID NO: 1283035 - DNA, 15 bp, Homo sapiens
agggcagacaggagg

SEQ ID NO: 1283036 - DNA, 15 bp, Homo sapiens
aagggcagacaggag

SEQ ID NO: 1283037 - DNA, 15 bp, Homo sapiens
caagggcagacagga

SEQ ID NO: 1283038 - DNA, 15 bp, Homo sapiens
gcaagggcagacagg

SEQ ID NO: 1283039 - DNA, 15 bp, Homo sapiens
tgcaagggcagacag

SEQ ID NO: 1283040 - DNA, 15 bp, Homo sapiens
ctgcaagggcagaca

SEQ ID NO: 1283041 - DNA, 15 bp, Homo sapiens
cctgcaagggcagac

SEQ ID NO: 1283042 - DNA, 15 bp, Homo sapiens
acctgcaagggcaga

SEQ ID NO: 1283043 - DNA, 15 bp, Homo sapiens
gacctgcaagggcag

SEQ ID NO: 1283044 - DNA, 15 bp, Homo sapiens
agacctgcaagggca

SEQ ID NO: 1283045 - DNA, 15 bp, Homo sapiens
gagacctgcaagggc

SEQ ID NO: 1283046 - DNA, 15 bp, Homo sapiens
agagacctgcaaggg

SEQ ID NO: 1283047 - DNA, 15 bp, Homo sapiens
aagagacctgcaagg

SEQ ID NO: 1283048 - DNA, 15 bp, Homo sapiens
aaagagacctgcaag

SEQ ID NO: 1283049 - DNA, 15 bp, Homo sapiens
aaaagagacctgcaa

SEQ ID NO: 1283050 - DNA, 15 bp, Homo sapiens
taaaagagacctgca

SEQ ID NO: 1283051 - DNA, 15 bp, Homo sapiens
ataaaagagacctgc

SEQ ID NO: 1283052 - DNA, 15 bp, Homo sapiens
cataaaagagacctg

SEQ ID NO: 1283053 - DNA, 15 bp, Homo sapiens
acataaaagagacct

SEQ ID NO: 1283054 - DNA, 15 bp, Homo sapiens
gacataaaagagacc

SEQ ID NO: 1283055 - DNA, 15 bp, Homo sapiens
agacataaaagagac

SEQ ID NO: 1283056 - DNA, 15 bp, Homo sapiens
cagacataaaagaga

SEQ ID NO: 1283057 - DNA, 15 bp, Homo sapiens
tcagacataaaagag

SEQ ID NO: 1283058 - DNA, 15 bp, Homo sapiens
gtcagacataaaaga

SEQ ID NO: 1283059 - DNA, 15 bp, Homo sapiens
ggtcagacataaaag

SEQ ID NO: 1283060 - DNA, 15 bp, Homo sapiens
aggtcagacataaaa

SEQ ID NO: 1283061 - DNA, 15 bp, Homo sapiens
aaggtcagacataaa

SEQ ID NO: 1283062 - DNA, 15 bp, Homo sapiens
caaggtcagacataa

SEQ ID NO: 1283063 - DNA, 15 bp, Homo sapiens
gcaaggtcagacata

SEQ ID NO: 1283064 - DNA, 15 bp, Homo sapiens
agcaaggtcagacat

SEQ ID NO: 1283065 - DNA, 15 bp, Homo sapiens
cagcaaggtcagaca

SEQ ID NO: 1283066 - DNA, 15 bp, Homo sapiens
ccagcaaggtcagac

SEQ ID NO: 1283067 - DNA, 15 bp, Homo sapiens
tccagcaaggtcaga

SEQ ID NO: 1283068 - DNA, 15 bp, Homo sapiens
ctccagcaaggtcag

SEQ ID NO: 1283069 - DNA, 15 bp, Homo sapiens
actccagcaaggtca

SEQ ID NO: 1283070 - DNA, 15 bp, Homo sapiens
gactccagcaaggtc

SEQ ID NO: 1283071 - DNA, 15 bp, Homo sapiens
ggactccagcaaggt

SEQ ID NO: 1283072 - DNA, 15 bp, Homo sapiens
aggactccagcaagg

SEQ ID NO: 1283073 - DNA, 15 bp, Homo sapiens
aaggactccagcaag

SEQ ID NO: 1283074 - DNA, 15 bp, Homo sapiens
aaaggactccagcaa

SEQ ID NO: 1283075 - DNA, 15 bp, Homo sapiens
caaaggactccagca

SEQ ID NO: 1283076 - DNA, 15 bp, Homo sapiens
tcaaaggactccagc

SEQ ID NO: 1283077 - DNA, 15 bp, Homo sapiens
gtcaaaggactccag

SEQ ID NO: 1283078 - DNA, 15 bp, Homo sapiens
ggtcaaaggactcca

SEQ ID NO: 1283079 - DNA, 15 bp, Homo sapiens
aggtcaaaggactcc

SEQ ID NO: 1283080 - DNA, 15 bp, Homo sapiens
gaggtcaaaggactc

SEQ ID NO: 1283081 - DNA, 15 bp, Homo sapiens
cgaggtcaaaggact

SEQ ID NO: 1283082 - DNA, 15 bp, Homo sapiens
ccgaggtcaaaggac

SEQ ID NO: 1283083 - DNA, 15 bp, Homo sapiens
gccgaggtcaaagga

SEQ ID NO: 1283084 - DNA, 15 bp, Homo sapiens
ggccgaggtcaaagg

SEQ ID NO: 1283085 - DNA, 15 bp, Homo sapiens
tggccgaggtcaaag

SEQ ID NO: 1283086 - DNA, 15 bp, Homo sapiens
ttggccgaggtcaaa

SEQ ID NO: 1283087 - DNA, 15 bp, Homo sapiens
gttggccgaggtcaa

SEQ ID NO: 1283088 - DNA, 15 bp, Homo sapiens
tgttggccgaggtca

SEQ ID NO: 1283089 - DNA, 15 bp, Homo sapiens
ctgttggccgaggtc

SEQ ID NO: 1283090 - DNA, 15 bp, Homo sapiens
cctgttggccgaggt

SEQ ID NO: 1283091 - DNA, 15 bp, Homo sapiens
tcctgttggccgagg

SEQ ID NO: 1283092 - DNA, 15 bp, Homo sapiens
ctcctgttggccgag

SEQ ID NO: 1283093 - DNA, 15 bp, Homo sapiens
actcctgttggccga

SEQ ID NO: 1283094 - DNA, 15 bp, Homo sapiens
cactcctgttggccg

SEQ ID NO: 1283095 - DNA, 15 bp, Homo sapiens
tcactcctgttggcc

SEQ ID NO: 1283096 - DNA, 15 bp, Homo sapiens
gtcactcctgttggc

SEQ ID NO: 1283097 - DNA, 15 bp, Homo sapiens
agtcactcctgttgg

SEQ ID NO: 1283098 - DNA, 15 bp, Homo sapiens
cagtcactcctgttg

SEQ ID NO: 1283099 - DNA, 15 bp, Homo sapiens
acagtcactcctgtt

SEQ ID NO: 1283100 - DNA, 15 bp, Homo sapiens
gacagtcactcctgt

SEQ ID NO: 1283101 - DNA, 15 bp, Homo sapiens
agacagtcactcctg

SEQ ID NO: 1283102 - DNA, 15 bp, Homo sapiens
gagacagtcactcct

SEQ ID NO: 1283103 - DNA, 15 bp, Homo sapiens
tgagacagtcactcc

SEQ ID NO: 1283104 - DNA, 15 bp, Homo sapiens
atgagacagtcactc

SEQ ID NO: 1283105 - DNA, 15 bp, Homo sapiens
aatgagacagtcact

SEQ ID NO: 1283106 - DNA, 15 bp, Homo sapiens
aaatgagacagtcac

SEQ ID NO: 1283107 - DNA, 15 bp, Homo sapiens
caaatgagacagtca

SEQ ID NO: 1283108 - DNA, 15 bp, Homo sapiens
gcaaatgagacagtc

SEQ ID NO: 1283109 - DNA, 15 bp, Homo sapiens
ggcaaatgagacagt

SEQ ID NO: 1283110 - DNA, 15 bp, Homo sapiens
tggcaaatgagacag

SEQ ID NO: 1283111 - DNA, 15 bp, Homo sapiens
gtggcaaatgagaca

SEQ ID NO: 1283112 - DNA, 15 bp, Homo sapiens
agtggcaaatgagac

SEQ ID NO: 1283113 - DNA, 15 bp, Homo sapiens
aagtggcaaatgaga

SEQ ID NO: 1283114 - DNA, 15 bp, Homo sapiens
taagtggcaaatgag

SEQ ID NO: 1283115 - DNA, 15 bp, Homo sapiens
ctaagtggcaaatga

SEQ ID NO: 1283116 - DNA, 15 bp, Homo sapiens
cctaagtggcaaatg

SEQ ID NO: 1283117 - DNA, 15 bp, Homo sapiens
gcctaagtggcaaat

SEQ ID NO: 1283118 - DNA, 15 bp, Homo sapiens
tgcctaagtggcaaa

SEQ ID NO: 1283119 - DNA, 15 bp, Homo sapiens
gtgcctaagtggcaa

SEQ ID NO: 1283120 - DNA, 15 bp, Homo sapiens
agtgcctaagtggca

SEQ ID NO: 1283121 - DNA, 15 bp, Homo sapiens
cagtgcctaagtggc

SEQ ID NO: 1283122 - DNA, 15 bp, Homo sapiens
acagtgcctaagtgg

SEQ ID NO: 1283123 - DNA, 15 bp, Homo sapiens
gacagtgcctaagtg

SEQ ID NO: 1283124 - DNA, 15 bp, Homo sapiens
agacagtgcctaagt

SEQ ID NO: 1283125 - DNA, 15 bp, Homo sapiens
aagacagtgcctaag

SEQ ID NO: 1283126 - DNA, 15 bp, Homo sapiens
taagacagtgcctaa

SEQ ID NO: 1283127 - DNA, 15 bp, Homo sapiens
ctaagacagtgccta

SEQ ID NO: 1283128 - DNA, 15 bp, Homo sapiens
cctaagacagtgcct

SEQ ID NO: 1283129 - DNA, 15 bp, Homo sapiens
acctaagacagtgcc

SEQ ID NO: 1283130 - DNA, 15 bp, Homo sapiens
aacctaagacagtgc

SEQ ID NO: 1283131 - DNA, 15 bp, Homo sapiens
aaacctaagacagtg

SEQ ID NO: 1283132 - DNA, 15 bp, Homo sapiens
aaaacctaagacagt

SEQ ID NO: 1283133 - DNA, 15 bp, Homo sapiens
taaaacctaagacag

SEQ ID NO: 1283134 - DNA, 15 bp, Homo sapiens
ttaaaacctaagaca

SEQ ID NO: 1283135 - DNA, 15 bp, Homo sapiens
tttaaaacctaagac

SEQ ID NO: 1283136 - DNA, 15 bp, Homo sapiens
atttaaaacctaaga

SEQ ID NO: 1283137 - DNA, 15 bp, Homo sapiens
aatttaaaacctaag

SEQ ID NO: 1283138 - DNA, 15 bp, Homo sapiens
aaatttaaaacctaa

SEQ ID NO: 1283139 - DNA, 15 bp, Homo sapiens
taaaaatttaaaacc

SEQ ID NO: 1283140 - DNA, 15 bp, Homo sapiens
ttaaaaatttaaaac

SEQ ID NO: 1283141 - DNA, 15 bp, Homo sapiens
attaaaaatttaaaa

SEQ ID NO: 1283142 - DNA, 15 bp, Homo sapiens
gattaaaaatttaaa

SEQ ID NO: 1283143 - DNA, 15 bp, Homo sapiens
agattaaaaatttaa

SEQ ID NO: 1283144 - DNA, 15 bp, Homo sapiens
aagattaaaaattta

SEQ ID NO: 1283145 - DNA, 15 bp, Homo sapiens
aaagattaaaaattt

SEQ ID NO: 1283146 - DNA, 15 bp, Homo sapiens
caaagattaaaaatt

SEQ ID NO: 1283147 - DNA, 15 bp, Homo sapiens
acaaagattaaaaat

SEQ ID NO: 1283148 - DNA, 15 bp, Homo sapiens
cacaaagattaaaaa

SEQ ID NO: 1283149 - DNA, 15 bp, Homo sapiens
ccacaaagattaaaa

SEQ ID NO: 1283150 - DNA, 15 bp, Homo sapiens
gccacaaagattaaa

SEQ ID NO: 1283151 - DNA, 15 bp, Homo sapiens
agccacaaagattaa

SEQ ID NO: 1283152 - DNA, 15 bp, Homo sapiens
cagccacaaagatta

SEQ ID NO: 1283153 - DNA, 15 bp, Homo sapiens
gcagccacaaagatt

SEQ ID NO: 1283154 - DNA, 15 bp, Homo sapiens
agcagccacaaagat

SEQ ID NO: 1283155 - DNA, 15 bp, Homo sapiens
aagcagccacaaaga

SEQ ID NO: 1283156 - DNA, 15 bp, Homo sapiens
caagcagccacaaag

SEQ ID NO: 1283157 - DNA, 15 bp, Homo sapiens
acaagcagccacaaa

SEQ ID NO: 1283158 - DNA, 15 bp, Homo sapiens
aacaagcagccacaa

SEQ ID NO: 1283159 - DNA, 15 bp, Homo sapiens
taacaagcagccaca

SEQ ID NO: 1283160 - DNA, 15 bp, Homo sapiens
ttaacaagcagccac

SEQ ID NO: 1283161 - DNA, 15 bp, Homo sapiens
tttaacaagcagcca

SEQ ID NO: 1283162 - DNA, 15 bp, Homo sapiens
ttttaacaagcagcc

SEQ ID NO: 1283163 - DNA, 15 bp, Homo sapiens
tttttaacaagcagc

SEQ ID NO: 1283164 - DNA, 15 bp, Homo sapiens
atttttaacaagcag

SEQ ID NO: 1283165 - DNA, 15 bp, Homo sapiens
tatttttaacaagca

SEQ ID NO: 1283166 - DNA, 15 bp, Homo sapiens
gtatttttaacaagc

SEQ ID NO: 1283167 - DNA, 15 bp, Homo sapiens
tgtatttttaacaag

SEQ ID NO: 1283168 - DNA, 15 bp, Homo sapiens
ctgtatttttaacaa

SEQ ID NO: 1283169 - DNA, 15 bp, Homo sapiens
cctgtatttttaaca

SEQ ID NO: 1283170 - DNA, 15 bp, Homo sapiens
ccctgtatttttaac

SEQ ID NO: 1283171 - DNA, 15 bp, Homo sapiens
tccctgtatttttaa

SEQ ID NO: 1283172 - DNA, 15 bp, Homo sapiens
gtccctgtattttta

SEQ ID NO: 1283173 - DNA, 15 bp, Homo sapiens
ggtccctgtattttt

SEQ ID NO: 1283174 - DNA, 15 bp, Homo sapiens
gggtccctgtatttt

SEQ ID NO: 1283175 - DNA, 15 bp, Homo sapiens
tgggtccctgtattt

SEQ ID NO: 1283176 - DNA, 15 bp, Homo sapiens
ctgggtccctgtatt

SEQ ID NO: 1283177 - DNA, 15 bp, Homo sapiens
cctgggtccctgtat

SEQ ID NO: 1283178 - DNA, 15 bp, Homo sapiens
gcctgggtccctgta

SEQ ID NO: 1283179 - DNA, 15 bp, Homo sapiens
agcctgggtccctgt

SEQ ID NO: 1283180 - DNA, 15 bp, Homo sapiens
aagcctgggtccctg

SEQ ID NO: 1283181 - DNA, 15 bp, Homo sapiens
gaagcctgggtccct

SEQ ID NO: 1283182 - DNA, 15 bp, Homo sapiens
tgaagcctgggtccc

SEQ ID NO: 1283183 - DNA, 15 bp, Homo sapiens
atgaagcctgggtcc

SEQ ID NO: 1283184 - DNA, 15 bp, Homo sapiens
aatgaagcctgggtc

SEQ ID NO: 1283185 - DNA, 15 bp, Homo sapiens
gaatgaagcctgggt

SEQ ID NO: 1283186 - DNA, 15 bp, Homo sapiens
ggaatgaagcctggg

SEQ ID NO: 1283187 - DNA, 15 bp, Homo sapiens
gggaatgaagcctgg

SEQ ID NO: 1283188 - DNA, 15 bp, Homo sapiens
tgggaatgaagcctg

SEQ ID NO: 1283189 - DNA, 15 bp, Homo sapiens
atgggaatgaagcct

SEQ ID NO: 1283190 - DNA, 15 bp, Homo sapiens
catgggaatgaagcc

SEQ ID NO: 1283191 - DNA, 15 bp, Homo sapiens
ccatgggaatgaagc

SEQ ID NO: 1283192 - DNA, 15 bp, Homo sapiens
tccatgggaatgaag

SEQ ID NO: 1283193 - DNA, 15 bp, Homo sapiens
ttccatgggaatgaa

SEQ ID NO: 1283194 - DNA, 15 bp, Homo sapiens
attccatgggaatga

SEQ ID NO: 1283195 - DNA, 15 bp, Homo sapiens
aattccatgggaatg

SEQ ID NO: 1283196 - DNA, 15 bp, Homo sapiens
taattccatgggaat

SEQ ID NO: 1283197 - DNA, 15 bp, Homo sapiens
ctaattccatgggaa

SEQ ID NO: 1283198 - DNA, 15 bp, Homo sapiens
tctaattccatggga

SEQ ID NO: 1283199 - DNA, 15 bp, Homo sapiens
ttctaattccatggg

SEQ ID NO: 1283200 - DNA, 15 bp, Homo sapiens
attctaattccatgg

SEQ ID NO: 1283201 - DNA, 15 bp, Homo sapiens
gattctaattccatg

SEQ ID NO: 1283202 - DNA, 15 bp, Homo sapiens
agattctaattccat

SEQ ID NO: 1283203 - DNA, 15 bp, Homo sapiens
gagattctaattcca

SEQ ID NO: 1283204 - DNA, 15 bp, Homo sapiens
ggagattctaattcc

SEQ ID NO: 1283205 - DNA, 15 bp, Homo sapiens
tggagattctaattc

SEQ ID NO: 1283206 - DNA, 15 bp, Homo sapiens
ttggagattctaatt

SEQ ID NO: 1283207 - DNA, 15 bp, Homo sapiens
tttggagattctaat

SEQ ID NO: 1283208 - DNA, 15 bp, Homo sapiens
ctttggagattctaa

SEQ ID NO: 1283209 - DNA, 15 bp, Homo sapiens
tctttggagattcta

SEQ ID NO: 1283210 - DNA, 15 bp, Homo sapiens
atctttggagattct

SEQ ID NO: 1283211 - DNA, 15 bp, Homo sapiens
catctttggagattc

SEQ ID NO: 1283212 - DNA, 15 bp, Homo sapiens
acatctttggagatt

SEQ ID NO: 1283213 - DNA, 15 bp, Homo sapiens
cacatctttggagat

SEQ ID NO: 1283214 - DNA, 15 bp, Homo sapiens
tcacatctttggaga

SEQ ID NO: 1283215 - DNA, 15 bp, Homo sapiens
atcacatctttggag

SEQ ID NO: 1283216 - DNA, 15 bp, Homo sapiens
gatcacatctttgga

SEQ ID NO: 1283217 - DNA, 15 bp, Homo sapiens
ggatcacatctttgg

SEQ ID NO: 1283218 - DNA, 15 bp, Homo sapiens
tggatcacatctttg

SEQ ID NO: 1283219 - DNA, 15 bp, Homo sapiens
ctggatcacatcttt

SEQ ID NO: 1283220 - DNA, 15 bp, Homo sapiens
cctggatcacatctt

SEQ ID NO: 1283221 - DNA, 15 bp, Homo sapiens
gcctggatcacatct

SEQ ID NO: 1283222 - DNA, 15 bp, Homo sapiens
ggcctggatcacatc

SEQ ID NO: 1283223 - DNA, 15 bp, Homo sapiens
gggcctggatcacat

SEQ ID NO: 1283224 - DNA, 15 bp, Homo sapiens
ggggcctggatcaca

SEQ ID NO: 1283225 - DNA, 15 bp, Homo sapiens
aggggcctggatcac

SEQ ID NO: 1283226 - DNA, 15 bp, Homo sapiens
aaggggcctggatca

SEQ ID NO: 1283227 - DNA, 15 bp, Homo sapiens
aaaggggcctggatc

SEQ ID NO: 1283228 - DNA, 15 bp, Homo sapiens
caaaggggcctggat

SEQ ID NO: 1283229 - DNA, 15 bp, Homo sapiens
gtcaaaggggcctgg

SEQ ID NO: 1283230 - DNA, 15 bp, Homo sapiens
agtcaaaggggcctg

SEQ ID NO: 1283231 - DNA, 15 bp, Homo sapiens
aagtcaaaggggcct

SEQ ID NO: 1283232 - DNA, 15 bp, Homo sapiens
aaagtcaaaggggcc

SEQ ID NO: 1283233 - DNA, 15 bp, Homo sapiens
aaaagtcaaaggggc

SEQ ID NO: 1283234 - DNA, 15 bp, Homo sapiens
taaaagtcaaagggg

SEQ ID NO: 1283235 - DNA, 15 bp, Homo sapiens
ttaaaagtcaaaggg

SEQ ID NO: 1283236 - DNA, 15 bp, Homo sapiens
attaaaagtcaaagg

SEQ ID NO: 1283237 - DNA, 15 bp, Homo sapiens
tattaaaagtcaaag

SEQ ID NO: 1283238 - DNA, 15 bp, Homo sapiens
ttattaaaagtcaaa

SEQ ID NO: 1283239 - DNA, 15 bp, Homo sapiens
cttattaaaagtcaa

SEQ ID NO: 1283240 - DNA, 15 bp, Homo sapiens
gcttattaaaagtca

SEQ ID NO: 1283241 - DNA, 15 bp, Homo sapiens
agcttattaaaagtc

SEQ ID NO: 1283242 - DNA, 15 bp, Homo sapiens
gagcttattaaaagt

SEQ ID NO: 1283243 - DNA, 15 bp, Homo sapiens
ggagcttattaaaag

SEQ ID NO: 1283244 - DNA, 15 bp, Homo sapiens
aggagcttattaaaa

SEQ ID NO: 1283245 - DNA, 15 bp, Homo sapiens
taggagcttattaaa

SEQ ID NO: 1283246 - DNA, 15 bp, Homo sapiens
ttaggagcttattaa

SEQ ID NO: 1283247 - DNA, 15 bp, Homo sapiens
attaggagcttatta

SEQ ID NO: 1283248 - DNA, 15 bp, Homo sapiens
cattaggagcttatt

SEQ ID NO: 1283249 - DNA, 15 bp, Homo sapiens
acattaggagcttat

SEQ ID NO: 1283250 - DNA, 15 bp, Homo sapiens
cacattaggagctta

SEQ ID NO: 1283251 - DNA, 15 bp, Homo sapiens
ccacattaggagctt

SEQ ID NO: 1283252 - DNA, 15 bp, Homo sapiens
accacattaggagct

SEQ ID NO: 1283253 - DNA, 15 bp, Homo sapiens
aaccacattaggagc

SEQ ID NO: 1283254 - DNA, 15 bp, Homo sapiens
caaccacattaggag

SEQ ID NO: 1283255 - DNA, 15 bp, Homo sapiens
acaaccacattagga

SEQ ID NO: 1283256 - DNA, 15 bp, Homo sapiens
cacaaccacattagg

SEQ ID NO: 1283257 - DNA, 15 bp, Homo sapiens
tcacaaccacattag

SEQ ID NO: 1283258 - DNA, 15 bp, Homo sapiens
atcacaaccacatta

SEQ ID NO: 1283259 - DNA, 15 bp, Homo sapiens
aatcacaaccacatt

SEQ ID NO: 1283260 - DNA, 15 bp, Homo sapiens
taatcacaaccacat

SEQ ID NO: 1283261 - DNA, 15 bp, Homo sapiens
ataatcacaaccaca

SEQ ID NO: 1283262 - DNA, 15 bp, Homo sapiens
cataatcacaaccac

SEQ ID NO: 1283263 - DNA, 15 bp, Homo sapiens
tcataatcacaacca

SEQ ID NO: 1283264 - DNA, 15 bp, Homo sapiens
atcataatcacaacc

SEQ ID NO: 1283265 - DNA, 15 bp, Homo sapiens
gatcataatcacaac

SEQ ID NO: 1283266 - DNA, 15 bp, Homo sapiens
tgatcataatcacaa

SEQ ID NO: 1283267 - DNA, 15 bp, Homo sapiens
ttgatcataatcaca

SEQ ID NO: 1283268 - DNA, 15 bp, Homo sapiens
tttgatcataatcac

SEQ ID NO: 1283269 - DNA, 15 bp, Homo sapiens
ctttgatcataatca

SEQ ID NO: 1283270 - DNA, 15 bp, Homo sapiens
actttgatcataatc

SEQ ID NO: 1283271 - DNA, 15 bp, Homo sapiens
aactttgatcataat

SEQ ID NO: 1283272 - DNA, 15 bp, Homo sapiens
aaactttgatcataa

SEQ ID NO: 1283273 - DNA, 15 bp, Homo sapiens
caaactttgatcata

SEQ ID NO: 1283274 - DNA, 15 bp, Homo sapiens
tcaaactttgatcat

SEQ ID NO: 1283275 - DNA, 15 bp, Homo sapiens
ctcaaactttgatca

SEQ ID NO: 1283276 - DNA, 15 bp, Homo sapiens
cctcaaactttgatc

SEQ ID NO: 1283277 - DNA, 15 bp, Homo sapiens
tcctcaaactttgat

SEQ ID NO: 1283278 - DNA, 15 bp, Homo sapiens
ttcctcaaactttga

SEQ ID NO: 1283279 - DNA, 15 bp, Homo sapiens
cttcctcaaactttg

SEQ ID NO: 1283280 - DNA, 15 bp, Homo sapiens
tcttcctcaaacttt

SEQ ID NO: 1283281 - DNA, 15 bp, Homo sapiens
gtcttcctcaaactt

SEQ ID NO: 1283282 - DNA, 15 bp, Homo sapiens
agtcttcctcaaact

SEQ ID NO: 1283283 - DNA, 15 bp, Homo sapiens
tagtcttcctcaaac

SEQ ID NO: 1283284 - DNA, 15 bp, Homo sapiens
ttagtcttcctcaaa

SEQ ID NO: 1283285 - DNA, 15 bp, Homo sapiens
gttagtcttcctcaa

SEQ ID NO: 1283286 - DNA, 15 bp, Homo sapiens
agttagtcttcctca

SEQ ID NO: 1283287 - DNA, 15 bp, Homo sapiens
aagttagtcttcctc

SEQ ID NO: 1283288 - DNA, 15 bp, Homo sapiens
taagttagtcttcct

SEQ ID NO: 1283289 - DNA, 15 bp, Homo sapiens
ttaagttagtcttcc

SEQ ID NO: 1283290 - DNA, 15 bp, Homo sapiens
tttaagttagtcttc

SEQ ID NO: 1283291 - DNA, 15 bp, Homo sapiens
ttttaagttagtctt

SEQ ID NO: 1283292 - DNA, 15 bp, Homo sapiens
attttaagttagtct

SEQ ID NO: 1283293 - DNA, 15 bp, Homo sapiens
tattttaagttagtc

SEQ ID NO: 1283294 - DNA, 15 bp, Homo sapiens
ctattttaagttagt

SEQ ID NO: 1283295 - DNA, 15 bp, Homo sapiens
tctattttaagttag

SEQ ID NO: 1283296 - DNA, 15 bp, Homo sapiens
ctctattttaagtta

SEQ ID NO: 1283297 - DNA, 15 bp, Homo sapiens
actctattttaagtt

SEQ ID NO: 1283298 - DNA, 15 bp, Homo sapiens
cactctattttaagt

SEQ ID NO: 1283299 - DNA, 15 bp, Homo sapiens
gcactctattttaag

SEQ ID NO: 1283300 - DNA, 15 bp, Homo sapiens
agcactctattttaa

SEQ ID NO: 1283301 - DNA, 15 bp, Homo sapiens
aagcactctatttta

SEQ ID NO: 1283302 - DNA, 15 bp, Homo sapiens
aaagcactctatttt

SEQ ID NO: 1283303 - DNA, 15 bp, Homo sapiens
caaagcactctattt

SEQ ID NO: 1283304 - DNA, 15 bp, Homo sapiens
gcaaagcactctatt

SEQ ID NO: 1283305 - DNA, 15 bp, Homo sapiens
tgcaaagcactctat

SEQ ID NO: 1283306 - DNA, 15 bp, Homo sapiens
ctgcaaagcactcta

SEQ ID NO: 1283307 - DNA, 15 bp, Homo sapiens
actgcaaagcactct

SEQ ID NO: 1283308 - DNA, 15 bp, Homo sapiens
tactgcaaagcactc

SEQ ID NO: 1283309 - DNA, 15 bp, Homo sapiens
atactgcaaagcact

SEQ ID NO: 1283310 - DNA, 15 bp, Homo sapiens
aatactgcaaagcac

SEQ ID NO: 1283311 - DNA, 15 bp, Homo sapiens
taatactgcaaagca

SEQ ID NO: 1283312 - DNA, 15 bp, Homo sapiens
ataatactgcaaagc

SEQ ID NO: 1283313 - DNA, 15 bp, Homo sapiens
aataatactgcaaag

SEQ ID NO: 1283314 - DNA, 15 bp, Homo sapiens
aaataatactgcaaa

SEQ ID NO: 1283315 - DNA, 15 bp, Homo sapiens
gaaataatactgcaa

SEQ ID NO: 1283316 - DNA, 15 bp, Homo sapiens
agaaataatactgca

SEQ ID NO: 1283317 - DNA, 15 bp, Homo sapiens
gagaaataatactgc

SEQ ID NO: 1283318 - DNA, 15 bp, Homo sapiens
agagaaataatactg

SEQ ID NO: 1283319 - DNA, 15 bp, Homo sapiens
aagagaaataatact

SEQ ID NO: 1283320 - DNA, 15 bp, Homo sapiens
aaagagaaataatac

SEQ ID NO: 1283321 - DNA, 15 bp, Homo sapiens
gaaagagaaataata

SEQ ID NO: 1283322 - DNA, 15 bp, Homo sapiens
agaaagagaaataat

SEQ ID NO: 1283323 - DNA, 15 bp, Homo sapiens
cagaaagagaaataa

SEQ ID NO: 1283324 - DNA, 15 bp, Homo sapiens
acagaaagagaaata

SEQ ID NO: 1283325 - DNA, 15 bp, Homo sapiens
cacagaaagagaaat

SEQ ID NO: 1283326 - DNA, 15 bp, Homo sapiens
ccacagaaagagaaa

SEQ ID NO: 1283327 - DNA, 15 bp, Homo sapiens
cccacagaaagagaa

SEQ ID NO: 1283328 - DNA, 15 bp, Homo sapiens
tcccacagaaagaga

SEQ ID NO: 1283329 - DNA, 15 bp, Homo sapiens
gtcccacagaaagag

SEQ ID NO: 1283330 - DNA, 15 bp, Homo sapiens
agtcccacagaaaga

SEQ ID NO: 1283331 - DNA, 15 bp, Homo sapiens
gagtcccacagaaag

SEQ ID NO: 1283332 - DNA, 15 bp, Homo sapiens
agagtcccacagaaa

SEQ ID NO: 1283333 - DNA, 15 bp, Homo sapiens
cagagtcccacagaa

SEQ ID NO: 1283334 - DNA, 15 bp, Homo sapiens
gcagagtcccacaga

SEQ ID NO: 1283335 - DNA, 15 bp, Homo sapiens
agcagagtcccacag

SEQ ID NO: 1283336 - DNA, 15 bp, Homo sapiens
aagcagagtcccaca

SEQ ID NO: 1283337 - DNA, 15 bp, Homo sapiens
taagcagagtcccac

SEQ ID NO: 1283338 - DNA, 15 bp, Homo sapiens
ataagcagagtccca

SEQ ID NO: 1283339 - DNA, 15 bp, Homo sapiens
cataagcagagtccc

SEQ ID NO: 1283340 - DNA, 15 bp, Homo sapiens
acataagcagagtcc

SEQ ID NO: 1283341 - DNA, 15 bp, Homo sapiens
gacataagcagagtc

SEQ ID NO: 1283342 - DNA, 15 bp, Homo sapiens
agacataagcagagt

SEQ ID NO: 1283343 - DNA, 15 bp, Homo sapiens
gagacataagcagag

SEQ ID NO: 1283344 - DNA, 15 bp, Homo sapiens
ggagacataagcaga

SEQ ID NO: 1283345 - DNA, 15 bp, Homo sapiens
tggagacataagcag

SEQ ID NO: 1283346 - DNA, 15 bp, Homo sapiens
ttggagacataagca

SEQ ID NO: 1283347 - DNA, 15 bp, Homo sapiens
tttggagacataagc

SEQ ID NO: 1283348 - DNA, 15 bp, Homo sapiens
atttggagacataag

SEQ ID NO: 1283349 - DNA, 15 bp, Homo sapiens
tatttggagacataa

SEQ ID NO: 1283350 - DNA, 15 bp, Homo sapiens
ttatttggagacata

SEQ ID NO: 1283351 - DNA, 15 bp, Homo sapiens
tttatttggagacat

SEQ ID NO: 1283352 - DNA, 15 bp, Homo sapiens
gtttatttggagaca

SEQ ID NO: 1283353 - DNA, 15 bp, Homo sapiens
agtttatttggagac

SEQ ID NO: 1283354 - DNA, 15 bp, Homo sapiens
tagtttatttggaga

SEQ ID NO: 1283355 - DNA, 15 bp, Homo sapiens
atagtttatttggag

SEQ ID NO: 1283356 - DNA, 15 bp, Homo sapiens
tatagtttatttgga

SEQ ID NO: 1283357 - DNA, 15 bp, Homo sapiens
ttatagtttatttgg

SEQ ID NO: 1283358 - DNA, 15 bp, Homo sapiens
tttatagtttatttg

SEQ ID NO: 1283359 - DNA, 15 bp, Homo sapiens
gtttatagtttattt

SEQ ID NO: 1283360 - DNA, 15 bp, Homo sapiens
tgtttatagtttatt

SEQ ID NO: 1283361 - DNA, 15 bp, Homo sapiens
atgtttatagtttat

SEQ ID NO: 1283362 - DNA, 15 bp, Homo sapiens
gatgtttatagttta

SEQ ID NO: 1283363 - DNA, 15 bp, Homo sapiens
agatgtttatagttt

SEQ ID NO: 1283364 - DNA, 15 bp, Homo sapiens
aagatgtttatagtt

SEQ ID NO: 1283365 - DNA, 15 bp, Homo sapiens
caagatgtttatagt

SEQ ID NO: 1283366 - DNA, 15 bp, Homo sapiens
tcaagatgtttatag

SEQ ID NO: 1283367 - DNA, 15 bp, Homo sapiens
ttcaagatgtttata

SEQ ID NO: 1283368 - DNA, 15 bp, Homo sapiens
cttcaagatgtttat

SEQ ID NO: 1283369 - DNA, 15 bp, Homo sapiens
ccttcaagatgttta

SEQ ID NO: 1283370 - DNA, 15 bp, Homo sapiens
gccttcaagatgttt

SEQ ID NO: 1283371 - DNA, 15 bp, Homo sapiens
tgccttcaagatgtt

SEQ ID NO: 1283372 - DNA, 15 bp, Homo sapiens
ctgccttcaagatgt

SEQ ID NO: 1283373 - DNA, 15 bp, Homo sapiens
tctgccttcaagatg

SEQ ID NO: 1283374 - DNA, 15 bp, Homo sapiens
atctgccttcaagat

SEQ ID NO: 1283375 - DNA, 15 bp, Homo sapiens
gatctgccttcaaga

SEQ ID NO: 1283376 - DNA, 15 bp, Homo sapiens
agatctgccttcaag

SEQ ID NO: 1283377 - DNA, 15 bp, Homo sapiens
cagatctgccttcaa

SEQ ID NO: 1283378 - DNA, 15 bp, Homo sapiens
ccagatctgccttca

SEQ ID NO: 1283379 - DNA, 15 bp, Homo sapiens
cccagatctgccttc

SEQ ID NO: 1283380 - DNA, 15 bp, Homo sapiens
gcccagatctgcctt

SEQ ID NO: 1283381 - DNA, 15 bp, Homo sapiens
ggcccagatctgcct

SEQ ID NO: 1283382 - DNA, 15 bp, Homo sapiens
aggcccagatctgcc

SEQ ID NO: 1283383 - DNA, 15 bp, Homo sapiens
aaggcccagatctgc

SEQ ID NO: 1283384 - DNA, 15 bp, Homo sapiens
taaggcccagatctg

SEQ ID NO: 1283385 - DNA, 15 bp, Homo sapiens
ataaggcccagatct

SEQ ID NO: 1283386 - DNA, 15 bp, Homo sapiens
aataaggcccagatc

SEQ ID NO: 1283387 - DNA, 15 bp, Homo sapiens
aaataaggcccagat

SEQ ID NO: 1283388 - DNA, 15 bp, Homo sapiens
aaaataaggcccaga

SEQ ID NO: 1283389 - DNA, 15 bp, Homo sapiens
gaaaataaggcccag

SEQ ID NO: 1283390 - DNA, 15 bp, Homo sapiens
agaaaataaggccca

SEQ ID NO: 1283391 - DNA, 15 bp, Homo sapiens
aagaaaataaggccc

SEQ ID NO: 1283392 - DNA, 15 bp, Homo sapiens
aaagaaaataaggcc

SEQ ID NO: 1283393 - DNA, 15 bp, Homo sapiens
aaaagaaaataaggc

SEQ ID NO: 1283394 - DNA, 15 bp, Homo sapiens
gaaaagaaaataagg

SEQ ID NO: 1283395 - DNA, 15 bp, Homo sapiens
tgaaaagaaaataag

SEQ ID NO: 1283396 - DNA, 15 bp, Homo sapiens
ctgaaaagaaaataa

SEQ ID NO: 1283397 - DNA, 15 bp, Homo sapiens
tctgaaaagaaaata

SEQ ID NO: 1283398 - DNA, 15 bp, Homo sapiens
ctctgaaaagaaaat

SEQ ID NO: 1283399 - DNA, 15 bp, Homo sapiens
actctgaaaagaaaa

SEQ ID NO: 1283400 - DNA, 15 bp, Homo sapiens
cactctgaaaagaaa

SEQ ID NO: 1283401 - DNA, 15 bp, Homo sapiens
ccactctgaaaagaa

SEQ ID NO: 1283402 - DNA, 15 bp, Homo sapiens
gccactctgaaaaga

SEQ ID NO: 1283403 - DNA, 15 bp, Homo sapiens
tgccactctgaaaag

SEQ ID NO: 1283404 - DNA, 15 bp, Homo sapiens
gtgccactctgaaaa

SEQ ID NO: 1283405 - DNA, 15 bp, Homo sapiens
tgtgccactctgaaa

SEQ ID NO: 1283406 - DNA, 15 bp, Homo sapiens
atgtgccactctgaa

SEQ ID NO: 1283407 - DNA, 15 bp, Homo sapiens
tatgtgccactctga

SEQ ID NO: 1283408 - DNA, 15 bp, Homo sapiens
atatgtgccactctg

SEQ ID NO: 1283409 - DNA, 15 bp, Homo sapiens
tatatgtgccactct

SEQ ID NO: 1283410 - DNA, 15 bp, Homo sapiens
atatatgtgccactc

SEQ ID NO: 1283411 - DNA, 15 bp, Homo sapiens
gatatatgtgccact

SEQ ID NO: 1283412 - DNA, 15 bp, Homo sapiens
agatatatgtgccac

SEQ ID NO: 1283413 - DNA, 15 bp, Homo sapiens
cagatatatgtgcca

SEQ ID NO: 1283414 - DNA, 15 bp, Homo sapiens
tcagatatatgtgcc

SEQ ID NO: 1283415 - DNA, 15 bp, Homo sapiens
ttcagatatatgtgc

SEQ ID NO: 1283416 - DNA, 15 bp, Homo sapiens
cttcagatatatgtg

SEQ ID NO: 1283417 - DNA, 15 bp, Homo sapiens
tcttcagatatatgt

SEQ ID NO: 1283418 - DNA, 15 bp, Homo sapiens
gtcttcagatatatg

SEQ ID NO: 1283419 - DNA, 15 bp, Homo sapiens
agtcttcagatatat

SEQ ID NO: 1283420 - DNA, 15 bp, Homo sapiens
cagtcttcagatata

SEQ ID NO: 1283421 - DNA, 15 bp, Homo sapiens
ccagtcttcagatat

SEQ ID NO: 1283422 - DNA, 15 bp, Homo sapiens
cccagtcttcagata

SEQ ID NO: 1283423 - DNA, 15 bp, Homo sapiens
ccccagtcttcagat

SEQ ID NO: 1283424 - DNA, 15 bp, Homo sapiens
gccccagtcttcaga

SEQ ID NO: 1283425 - DNA, 15 bp, Homo sapiens
ggccccagtcttcag

SEQ ID NO: 1283426 - DNA, 15 bp, Homo sapiens
cggccccagtcttca

SEQ ID NO: 1283427 - DNA, 15 bp, Homo sapiens
acggccccagtcttc

SEQ ID NO: 1283428 - DNA, 15 bp, Homo sapiens
cacggccccagtctt

SEQ ID NO: 1283429 - DNA, 15 bp, Homo sapiens
tcacggccccagtct

SEQ ID NO: 1283430 - DNA, 15 bp, Homo sapiens
ctcacggccccagtc

SEQ ID NO: 1283431 - DNA, 15 bp, Homo sapiens
tctcacggccccagt

SEQ ID NO: 1283432 - DNA, 15 bp, Homo sapiens
atctcacggccccag

SEQ ID NO: 1283433 - DNA, 15 bp, Homo sapiens
catctcacggcccca

SEQ ID NO: 1283434 - DNA, 15 bp, Homo sapiens
tcatctcacggcccc

SEQ ID NO: 1283435 - DNA, 15 bp, Homo sapiens
atcatctcacggccc

SEQ ID NO: 1283436 - DNA, 15 bp, Homo sapiens
gatcatctcacggcc

SEQ ID NO: 1283437 - DNA, 15 bp, Homo sapiens
agatcatctcacggc

SEQ ID NO: 1283438 - DNA, 15 bp, Homo sapiens
cagatcatctcacgg

SEQ ID NO: 1283439 - DNA, 15 bp, Homo sapiens
acagatcatctcacg

SEQ ID NO: 1283440 - DNA, 15 bp, Homo sapiens
gacagatcatctcac

SEQ ID NO: 1283441 - DNA, 15 bp, Homo sapiens
cgacagatcatctca

SEQ ID NO: 1283442 - DNA, 15 bp, Homo sapiens
ccgacagatcatctc

SEQ ID NO: 1283443 - DNA, 15 bp, Homo sapiens
accgacagatcatct

SEQ ID NO: 1283444 - DNA, 15 bp, Homo sapiens
caccgacagatcatc

SEQ ID NO: 1283445 - DNA, 15 bp, Homo sapiens
tcaccgacagatcat

SEQ ID NO: 1283446 - DNA, 15 bp, Homo sapiens
ctcaccgacagatca

SEQ ID NO: 1283447 - DNA, 15 bp, Homo sapiens
tctcaccgacagatc

SEQ ID NO: 1283448 - DNA, 15 bp, Homo sapiens
atctcaccgacagat

SEQ ID NO: 1283449 - DNA, 15 bp, Homo sapiens
tatctcaccgacaga

SEQ ID NO: 1283450 - DNA, 15 bp, Homo sapiens
ttatctcaccgacag

SEQ ID NO: 1283451 - DNA, 15 bp, Homo sapiens
gttatctcaccgaca

SEQ ID NO: 1283452 - DNA, 15 bp, Homo sapiens
agttatctcaccgac

SEQ ID NO: 1283453 - DNA, 15 bp, Homo sapiens
gagttatctcaccga

SEQ ID NO: 1283454 - DNA, 15 bp, Homo sapiens
ggagttatctcaccg

SEQ ID NO: 1283455 - DNA, 15 bp, Homo sapiens
tggagttatctcacc

SEQ ID NO: 1283456 - DNA, 15 bp, Homo sapiens
gtggagttatctcac

SEQ ID NO: 1283457 - DNA, 15 bp, Homo sapiens
ggtggagttatctca

SEQ ID NO: 1283458 - DNA, 15 bp, Homo sapiens
aggtggagttatctc

SEQ ID NO: 1283459 - DNA, 15 bp, Homo sapiens
caggtggagttatct

SEQ ID NO: 1283460 - DNA, 15 bp, Homo sapiens
ccaggtggagttatc

SEQ ID NO: 1283461 - DNA, 15 bp, Homo sapiens
cccaggtggagttat

SEQ ID NO: 1283462 - DNA, 15 bp, Homo sapiens
ccccaggtggagtta

SEQ ID NO: 1283463 - DNA, 15 bp, Homo sapiens
gccccaggtggagtt

SEQ ID NO: 1283464 - DNA, 15 bp, Homo sapiens
ggccccaggtggagt

SEQ ID NO: 1283465 - DNA, 15 bp, Homo sapiens
gggccccaggtggag

SEQ ID NO: 1283466 - DNA, 15 bp, Homo sapiens
agggccccaggtgga

SEQ ID NO: 1283467 - DNA, 15 bp, Homo sapiens
cagggccccaggtgg

SEQ ID NO: 1283468 - DNA, 15 bp, Homo sapiens
gcagggccccaggtg

SEQ ID NO: 1283469 - DNA, 15 bp, Homo sapiens
tgcagggccccaggt

SEQ ID NO: 1283470 - DNA, 15 bp, Homo sapiens
atgcagggccccagg

SEQ ID NO: 1283471 - DNA, 15 bp, Homo sapiens
gatgcagggccccag

SEQ ID NO: 1283472 - DNA, 15 bp, Homo sapiens
agatgcagggcccca

SEQ ID NO: 1283473 - DNA, 15 bp, Homo sapiens
cagatgcagggcccc

SEQ ID NO: 1283474 - DNA, 15 bp, Homo sapiens
tcagatgcagggccc

SEQ ID NO: 1283475 - DNA, 15 bp, Homo sapiens
atcagatgcagggcc

SEQ ID NO: 1283476 - DNA, 15 bp, Homo sapiens
tatcagatgcagggc

SEQ ID NO: 1283477 - DNA, 15 bp, Homo sapiens
ctatcagatgcaggg

SEQ ID NO: 1283478 - DNA, 15 bp, Homo sapiens
cctatcagatgcagg

SEQ ID NO: 1283479 - DNA, 15 bp, Homo sapiens
gcctatcagatgcag

SEQ ID NO: 1283480 - DNA, 15 bp, Homo sapiens
cgcctatcagatgca

SEQ ID NO: 1283481 - DNA, 15 bp, Homo sapiens
gcgcctatcagatgc

SEQ ID NO: 1283482 - DNA, 15 bp, Homo sapiens
agcgcctatcagatg

SEQ ID NO: 1283483 - DNA, 15 bp, Homo sapiens
gagcgcctatcagat

SEQ ID NO: 1283484 - DNA, 15 bp, Homo sapiens
tgagcgcctatcaga

SEQ ID NO: 1283485 - DNA, 15 bp, Homo sapiens
ctgagcgcctatcag

SEQ ID NO: 1283486 - DNA, 15 bp, Homo sapiens
actgagcgcctatca

SEQ ID NO: 1283487 - DNA, 15 bp, Homo sapiens
tactgagcgcctatc

SEQ ID NO: 1283488 - DNA, 15 bp, Homo sapiens
ttactgagcgcctat

SEQ ID NO: 1283489 - DNA, 15 bp, Homo sapiens
cttactgagcgccta

SEQ ID NO: 1283490 - DNA, 15 bp, Homo sapiens
acttactgagcgcct

SEQ ID NO: 1283491 - DNA, 15 bp, Homo sapiens
cacttactgagcgcc

SEQ ID NO: 1283492 - DNA, 15 bp, Homo sapiens
acacttactgagcgc

SEQ ID NO: 1283493 - DNA, 15 bp, Homo sapiens
aacacttactgagcg

SEQ ID NO: 1283494 - DNA, 15 bp, Homo sapiens
aaacacttactgagc

SEQ ID NO: 1283495 - DNA, 15 bp, Homo sapiens
caaacacttactgag

SEQ ID NO: 1283496 - DNA, 15 bp, Homo sapiens
gcaaacacttactga

SEQ ID NO: 1283497 - DNA, 15 bp, Homo sapiens
agcaaacacttactg

SEQ ID NO: 1283498 - DNA, 15 bp, Homo sapiens
aagcaaacacttact

SEQ ID NO: 1283499 - DNA, 15 bp, Homo sapiens
caagcaaacacttac

SEQ ID NO: 1283500 - DNA, 15 bp, Homo sapiens
acaagcaaacactta

SEQ ID NO: 1283501 - DNA, 15 bp, Homo sapiens
aacaagcaaacactt

SEQ ID NO: 1283502 - DNA, 15 bp, Homo sapiens
caacaagcaaacact

SEQ ID NO: 1283503 - DNA, 15 bp, Homo sapiens
tcaacaagcaaacac

SEQ ID NO: 1283504 - DNA, 15 bp, Homo sapiens
atcaacaagcaaaca

SEQ ID NO: 1283505 - DNA, 15 bp, Homo sapiens
gatcaacaagcaaac

SEQ ID NO: 1283506 - DNA, 15 bp, Homo sapiens
tgatcaacaagcaaa

SEQ ID NO: 1283507 - DNA, 15 bp, Homo sapiens
ttgatcaacaagcaa

SEQ ID NO: 1283508 - DNA, 15 bp, Homo sapiens
attgatcaacaagca

SEQ ID NO: 1283509 - DNA, 15 bp, Homo sapiens
tattgatcaacaagc

SEQ ID NO: 1283510 - DNA, 15 bp, Homo sapiens
ttattgatcaacaag

SEQ ID NO: 1283511 - DNA, 15 bp, Homo sapiens
tttattgatcaacaa

SEQ ID NO: 1283512 - DNA, 15 bp, Homo sapiens
ttttattgatcaaca

SEQ ID NO: 1283513 - DNA, 15 bp, Homo sapiens
cttttattgatcaac

SEQ ID NO: 1283514 - DNA, 15 bp, Homo sapiens
tcttttattgatcaa

SEQ ID NO: 1283515 - DNA, 15 bp, Homo sapiens
gtcttttattgatca

SEQ ID NO: 1283516 - DNA, 15 bp, Homo sapiens
tgtcttttattgatc

SEQ ID NO: 1283517 - DNA, 15 bp, Homo sapiens
atgtcttttattgat

SEQ ID NO: 1283518 - DNA, 15 bp, Homo sapiens
catgtcttttattga

SEQ ID NO: 1283519 - DNA, 15 bp, Homo sapiens
tcatgtcttttattg

SEQ ID NO: 1283520 - DNA, 15 bp, Homo sapiens
ttcatgtcttttatt

SEQ ID NO: 1283521 - DNA, 15 bp, Homo sapiens
tttcatgtcttttat

SEQ ID NO: 1283522 - DNA, 15 bp, Homo sapiens
ctttcatgtctttta

SEQ ID NO: 1283523 - DNA, 15 bp, Homo sapiens
gctttcatgtctttt

SEQ ID NO: 1283524 - DNA, 15 bp, Homo sapiens
tgctttcatgtcttt

SEQ ID NO: 1283525 - DNA, 15 bp, Homo sapiens
gtgctttcatgtctt

SEQ ID NO: 1283526 - DNA, 15 bp, Homo sapiens
ggtgctttcatgtct

SEQ ID NO: 1283527 - DNA, 15 bp, Homo sapiens
aggtgctttcatgtc

SEQ ID NO: 1283528 - DNA, 15 bp, Homo sapiens
caggtgctttcatgt

SEQ ID NO: 1283529 - DNA, 15 bp, Homo sapiens
ccaggtgctttcatg

SEQ ID NO: 1283530 - DNA, 15 bp, Homo sapiens
cccaggtgctttcat

SEQ ID NO: 1283531 - DNA, 15 bp, Homo sapiens
tcccaggtgctttca

SEQ ID NO: 1283532 - DNA, 15 bp, Homo sapiens
ttcccaggtgctttc

SEQ ID NO: 1283533 - DNA, 15 bp, Homo sapiens
tttcccaggtgcttt

SEQ ID NO: 1283534 - DNA, 15 bp, Homo sapiens
ctttcccaggtgctt

SEQ ID NO: 1283535 - DNA, 15 bp, Homo sapiens
gctttcccaggtgct

SEQ ID NO: 1283536 - DNA, 15 bp, Homo sapiens
tgctttcccaggtgc

SEQ ID NO: 1283537 - DNA, 15 bp, Homo sapiens
ttgctttcccaggtg

SEQ ID NO: 1283538 - DNA, 15 bp, Homo sapiens
tttgctttcccaggt

SEQ ID NO: 1283539 - DNA, 15 bp, Homo sapiens
ttttgctttcccagg

SEQ ID NO: 1283540 - DNA, 15 bp, Homo sapiens
gttttgctttcccag

SEQ ID NO: 1283541 - DNA, 15 bp, Homo sapiens
tgttttgctttccca

SEQ ID NO: 1283542 - DNA, 15 bp, Homo sapiens
ctgttttgctttccc

SEQ ID NO: 1283543 - DNA, 15 bp, Homo sapiens
gctgttttgctttcc

SEQ ID NO: 1283544 - DNA, 15 bp, Homo sapiens
ggctgttttgctttc

SEQ ID NO: 1283545 - DNA, 15 bp, Homo sapiens
aggctgttttgcttt

SEQ ID NO: 1283546 - DNA, 15 bp, Homo sapiens
gaggctgttttgctt

SEQ ID NO: 1283547 - DNA, 15 bp, Homo sapiens
agaggctgttttgct

SEQ ID NO: 1283548 - DNA, 15 bp, Homo sapiens
cagaggctgttttgc

SEQ ID NO: 1283549 - DNA, 15 bp, Homo sapiens
gcagaggctgttttg

SEQ ID NO: 1283550 - DNA, 15 bp, Homo sapiens
tgcagaggctgtttt

SEQ ID NO: 1283551 - DNA, 15 bp, Homo sapiens
ttgcagaggctgttt

SEQ ID NO: 1283552 - DNA, 15 bp, Homo sapiens
tttgcagaggctgtt

SEQ ID NO: 1283553 - DNA, 15 bp, Homo sapiens
ctttgcagaggctgt

SEQ ID NO: 1283554 - DNA, 15 bp, Homo sapiens
gctttgcagaggctg

SEQ ID NO: 1283555 - DNA, 15 bp, Homo sapiens
tgctttgcagaggct

SEQ ID NO: 1283556 - DNA, 15 bp, Homo sapiens
ctgctttgcagaggc

SEQ ID NO: 1283557 - DNA, 15 bp, Homo sapiens
cctgctttgcagagg

SEQ ID NO: 1283558 - DNA, 15 bp, Homo sapiens
ccctgctttgcagag

SEQ ID NO: 1283559 - DNA, 15 bp, Homo sapiens
gccctgctttgcaga

SEQ ID NO: 1283560 - DNA, 15 bp, Homo sapiens
tgccctgctttgcag

SEQ ID NO: 1283561 - DNA, 15 bp, Homo sapiens
atgccctgctttgca

SEQ ID NO: 1283562 - DNA, 15 bp, Homo sapiens
aatgccctgctttgc

SEQ ID NO: 1283563 - DNA, 15 bp, Homo sapiens
taatgccctgctttg

SEQ ID NO: 1283564 - DNA, 15 bp, Homo sapiens
ataatgccctgcttt

SEQ ID NO: 1283565 - DNA, 15 bp, Homo sapiens
aataatgccctgctt

SEQ ID NO: 1283566 - DNA, 15 bp, Homo sapiens
taataatgccctgct

SEQ ID NO: 1283567 - DNA, 15 bp, Homo sapiens
gtaataatgccctgc

SEQ ID NO: 1283568 - DNA, 15 bp, Homo sapiens
agtaataatgccctg

SEQ ID NO: 1283569 - DNA, 15 bp, Homo sapiens
cagtaataatgccct

SEQ ID NO: 1283570 - DNA, 15 bp, Homo sapiens
ccagtaataatgccc

SEQ ID NO: 1283571 - DNA, 15 bp, Homo sapiens
cccagtaataatgcc

SEQ ID NO: 1283572 - DNA, 15 bp, Homo sapiens
tcccagtaataatgc

SEQ ID NO: 1283573 - DNA, 15 bp, Homo sapiens
ctcccagtaataatg

SEQ ID NO: 1283574 - DNA, 15 bp, Homo sapiens
gctcccagtaataat

SEQ ID NO: 1283575 - DNA, 15 bp, Homo sapiens
tgctcccagtaataa

SEQ ID NO: 1283576 - DNA, 15 bp, Homo sapiens
ctgctcccagtaata

SEQ ID NO: 1283577 - DNA, 15 bp, Homo sapiens
tctgctcccagtaat

SEQ ID NO: 1283578 - DNA, 15 bp, Homo sapiens
atctgctcccagtaa

SEQ ID NO: 1283579 - DNA, 15 bp, Homo sapiens
gatctgctcccagta

SEQ ID NO: 1283580 - DNA, 15 bp, Homo sapiens
agatctgctcccagt

SEQ ID NO: 1283581 - DNA, 15 bp, Homo sapiens
cagatctgctcccag

SEQ ID NO: 1283582 - DNA, 15 bp, Homo sapiens
tcagatctgctccca

SEQ ID NO: 1283583 - DNA, 15 bp, Homo sapiens
atcagatctgctccc

SEQ ID NO: 1283584 - DNA, 15 bp, Homo sapiens
catcagatctgctcc

SEQ ID NO: 1283585 - DNA, 15 bp, Homo sapiens
acatcagatctgctc

SEQ ID NO: 1283586 - DNA, 15 bp, Homo sapiens
cacatcagatctgct

SEQ ID NO: 1283587 - DNA, 15 bp, Homo sapiens
acacatcagatctgc

SEQ ID NO: 1283588 - DNA, 15 bp, Homo sapiens
tacacatcagatctg

SEQ ID NO: 1283589 - DNA, 15 bp, Homo sapiens
gtacacatcagatct

SEQ ID NO: 1283590 - DNA, 15 bp, Homo sapiens
ggtacacatcagatc

SEQ ID NO: 1283591 - DNA, 15 bp, Homo sapiens
aggtacacatcagat

SEQ ID NO: 1283592 - DNA, 15 bp, Homo sapiens
aaggtacacatcaga

SEQ ID NO: 1283593 - DNA, 15 bp, Homo sapiens
gaaggtacacatcag

SEQ ID NO: 1283594 - DNA, 15 bp, Homo sapiens
ggaaggtacacatca

SEQ ID NO: 1283595 - DNA, 15 bp, Homo sapiens
tggaaggtacacatc

SEQ ID NO: 1283596 - DNA, 15 bp, Homo sapiens
gtggaaggtacacat

SEQ ID NO: 1283597 - DNA, 15 bp, Homo sapiens
tgtggaaggtacaca

SEQ ID NO: 1283598 - DNA, 15 bp, Homo sapiens
ctgtggaaggtacac

SEQ ID NO: 1283599 - DNA, 15 bp, Homo sapiens
tctgtggaaggtaca

SEQ ID NO: 1283600 - DNA, 15 bp, Homo sapiens
atctgtggaaggtac

SEQ ID NO: 1283601 - DNA, 15 bp, Homo sapiens
aatctgtggaaggta

SEQ ID NO: 1283602 - DNA, 15 bp, Homo sapiens
gaatctgtggaaggt

SEQ ID NO: 1283603 - DNA, 15 bp, Homo sapiens
ggaatctgtggaagg

SEQ ID NO: 1283604 - DNA, 15 bp, Homo sapiens
tggaatctgtggaag

SEQ ID NO: 1283605 - DNA, 15 bp, Homo sapiens
gtggaatctgtggaa

SEQ ID NO: 1283606 - DNA, 15 bp, Homo sapiens
agtggaatctgtgga

SEQ ID NO: 1283607 - DNA, 15 bp, Homo sapiens
cagtggaatctgtgg

SEQ ID NO: 1283608 - DNA, 15 bp, Homo sapiens
tcagtggaatctgtg

SEQ ID NO: 1283609 - DNA, 15 bp, Homo sapiens
ttcagtggaatctgt

SEQ ID NO: 1283610 - DNA, 15 bp, Homo sapiens
cttcagtggaatctg

SEQ ID NO: 1283611 - DNA, 15 bp, Homo sapiens
ccttcagtggaatct

SEQ ID NO: 1283612 - DNA, 15 bp, Homo sapiens
accttcagtggaatc

SEQ ID NO: 1283613 - DNA, 15 bp, Homo sapiens
caccttcagtggaat

SEQ ID NO: 1283614 - DNA, 15 bp, Homo sapiens
acaccttcagtggaa

SEQ ID NO: 1283615 - DNA, 15 bp, Homo sapiens
gacaccttcagtgga

SEQ ID NO: 1283616 - DNA, 15 bp, Homo sapiens
ggacaccttcagtgg

SEQ ID NO: 1283617 - DNA, 15 bp, Homo sapiens
aggacaccttcagtg

SEQ ID NO: 1283618 - DNA, 15 bp, Homo sapiens
gaggacaccttcagt

SEQ ID NO: 1283619 - DNA, 15 bp, Homo sapiens
tgaggacaccttcag

SEQ ID NO: 1283620 - DNA, 15 bp, Homo sapiens
ctgaggacaccttca

SEQ ID NO: 1283621 - DNA, 15 bp, Homo sapiens
tctgaggacaccttc

SEQ ID NO: 1283622 - DNA, 15 bp, Homo sapiens
ctctgaggacacctt

SEQ ID NO: 1283623 - DNA, 15 bp, Homo sapiens
gctctgaggacacct

SEQ ID NO: 1283624 - DNA, 15 bp, Homo sapiens
tgctctgaggacacc

SEQ ID NO: 1283625 - DNA, 15 bp, Homo sapiens
gtgctctgaggacac

SEQ ID NO: 1283626 - DNA, 15 bp, Homo sapiens
ggtgctctgaggaca

SEQ ID NO: 1283627 - DNA, 15 bp, Homo sapiens
cggtgctctgaggac

SEQ ID NO: 1283628 - DNA, 15 bp, Homo sapiens
ccggtgctctgagga

SEQ ID NO: 1283629 - DNA, 15 bp, Homo sapiens
tccggtgctctgagg

SEQ ID NO: 1283630 - DNA, 15 bp, Homo sapiens
gtccggtgctctgag

SEQ ID NO: 1283631 - DNA, 15 bp, Homo sapiens
tgtccggtgctctga

SEQ ID NO: 1283632 - DNA, 15 bp, Homo sapiens
gtgtccggtgctctg

SEQ ID NO: 1283633 - DNA, 15 bp, Homo sapiens
agtgtccggtgctct

SEQ ID NO: 1283634 - DNA, 15 bp, Homo sapiens
gagtgtccggtgctc

SEQ ID NO: 1283635 - DNA, 15 bp, Homo sapiens
tgagtgtccggtgct

SEQ ID NO: 1283636 - DNA, 15 bp, Homo sapiens
ctgagtgtccggtgc

SEQ ID NO: 1283637 - DNA, 15 bp, Homo sapiens
cctgagtgtccggtg

SEQ ID NO: 1283638 - DNA, 15 bp, Homo sapiens
ccctgagtgtccggt

SEQ ID NO: 1283639 - DNA, 15 bp, Homo sapiens
cccctgagtgtccgg

SEQ ID NO: 1283640 - DNA, 15 bp, Homo sapiens
gcccctgagtgtccg

SEQ ID NO: 1283641 - DNA, 15 bp, Homo sapiens
ggcccctgagtgtcc

SEQ ID NO: 1283642 - DNA, 15 bp, Homo sapiens
gggcccctgagtgtc

SEQ ID NO: 1283643 - DNA, 15 bp, Homo sapiens
cgggcccctgagtgt

SEQ ID NO: 1283644 - DNA, 15 bp, Homo sapiens
gcgggcccctgagtg

SEQ ID NO: 1283645 - DNA, 15 bp, Homo sapiens
tgcgggcccctgagt

SEQ ID NO: 1283646 - DNA, 15 bp, Homo sapiens
ctgcgggcccctgag

SEQ ID NO: 1283647 - DNA, 15 bp, Homo sapiens
gctgcgggcccctga

SEQ ID NO: 1283648 - DNA, 15 bp, Homo sapiens
ggctgcgggcccctg

SEQ ID NO: 1283649 - DNA, 15 bp, Homo sapiens
gggctgcgggcccct

SEQ ID NO: 1283650 - DNA, 15 bp, Homo sapiens
tgggctgcgggcccc

SEQ ID NO: 1283651 - DNA, 15 bp, Homo sapiens
ctgggctgcgggccc

SEQ ID NO: 1283652 - DNA, 15 bp, Homo sapiens
tctgggctgcgggcc

SEQ ID NO: 1283653 - DNA, 15 bp, Homo sapiens
gtctgggctgcgggc

SEQ ID NO: 1283654 - DNA, 15 bp, Homo sapiens
tgtctgggctgcggg

SEQ ID NO: 1283655 - DNA, 15 bp, Homo sapiens
gtgtctgggctgcgg

SEQ ID NO: 1283656 - DNA, 15 bp, Homo sapiens
tgtgtctgggctgcg

SEQ ID NO: 1283657 - DNA, 15 bp, Homo sapiens
ctgtgtctgggctgc

SEQ ID NO: 1283658 - DNA, 15 bp, Homo sapiens
tctgtgtctgggctg

SEQ ID NO: 1283659 - DNA, 15 bp, Homo sapiens
ttctgtgtctgggct

SEQ ID NO: 1283660 - DNA, 15 bp, Homo sapiens
tttctgtgtctgggc

SEQ ID NO: 1283661 - DNA, 15 bp, Homo sapiens
ctttctgtgtctggg

SEQ ID NO: 1283662 - DNA, 15 bp, Homo sapiens
actttctgtgtctgg

SEQ ID NO: 1283663 - DNA, 15 bp, Homo sapiens
gactttctgtgtctg

SEQ ID NO: 1283664 - DNA, 15 bp, Homo sapiens
ggactttctgtgtct

SEQ ID NO: 1283665 - DNA, 15 bp, Homo sapiens
tggactttctgtgtc

SEQ ID NO: 1283666 - DNA, 15 bp, Homo sapiens
gtggactttctgtgt

SEQ ID NO: 1283667 - DNA, 15 bp, Homo sapiens
agtggactttctgtg

SEQ ID NO: 1283668 - DNA, 15 bp, Homo sapiens
gagtggactttctgt

SEQ ID NO: 1283669 - DNA, 15 bp, Homo sapiens
agagtggactttctg

SEQ ID NO: 1283670 - DNA, 15 bp, Homo sapiens
cagagtggactttct

SEQ ID NO: 1283671 - DNA, 15 bp, Homo sapiens
gcagagtggactttc

SEQ ID NO: 1283672 - DNA, 15 bp, Homo sapiens
agcagagtggacttt

SEQ ID NO: 1283673 - DNA, 15 bp, Homo sapiens
cagcagagtggactt

SEQ ID NO: 1283674 - DNA, 15 bp, Homo sapiens
tcagcagagtggact

SEQ ID NO: 1283675 - DNA, 15 bp, Homo sapiens
ctcagcagagtggac

SEQ ID NO: 1283676 - DNA, 15 bp, Homo sapiens
tctcagcagagtgga

SEQ ID NO: 1283677 - DNA, 15 bp, Homo sapiens
ttctcagcagagtgg

SEQ ID NO: 1283678 - DNA, 15 bp, Homo sapiens
tttctcagcagagtg

SEQ ID NO: 1283679 - DNA, 15 bp, Homo sapiens
atttctcagcagagt

SEQ ID NO: 1283680 - DNA, 15 bp, Homo sapiens
catttctcagcagag

SEQ ID NO: 1283681 - DNA, 15 bp, Homo sapiens
gcatttctcagcaga

SEQ ID NO: 1283682 - DNA, 15 bp, Homo sapiens
agcatttctcagcag

SEQ ID NO: 1283683 - DNA, 15 bp, Homo sapiens
gagcatttctcagca

SEQ ID NO: 1283684 - DNA, 15 bp, Homo sapiens
tgagcatttctcagc

SEQ ID NO: 1283685 - DNA, 15 bp, Homo sapiens
gtgagcatttctcag

SEQ ID NO: 1283686 - DNA, 15 bp, Homo sapiens
ggtgagcatttctca

SEQ ID NO: 1283687 - DNA, 15 bp, Homo sapiens
tggtgagcatttctc

SEQ ID NO: 1283688 - DNA, 15 bp, Homo sapiens
ttggtgagcatttct

SEQ ID NO: 1283689 - DNA, 15 bp, Homo sapiens
cttggtgagcatttc

SEQ ID NO: 1283690 - DNA, 15 bp, Homo sapiens
gcttggtgagcattt

SEQ ID NO: 1283691 - DNA, 15 bp, Homo sapiens
tgcttggtgagcatt

SEQ ID NO: 1283692 - DNA, 15 bp, Homo sapiens
ctgcttggtgagcat

SEQ ID NO: 1283693 - DNA, 15 bp, Homo sapiens
tctgcttggtgagca

SEQ ID NO: 1283694 - DNA, 15 bp, Homo sapiens
ttctgcttggtgagc

SEQ ID NO: 1283695 - DNA, 15 bp, Homo sapiens
attctgcttggtgag

SEQ ID NO: 1283696 - DNA, 15 bp, Homo sapiens
gattctgcttggtga

SEQ ID NO: 1283697 - DNA, 15 bp, Homo sapiens
ggattctgcttggtg

SEQ ID NO: 1283698 - DNA, 15 bp, Homo sapiens
gggattctgcttggt

SEQ ID NO: 1283699 - DNA, 15 bp, Homo sapiens
agggattctgcttgg

SEQ ID NO: 1283700 - DNA, 15 bp, Homo sapiens
gagggattctgcttg

SEQ ID NO: 1283701 - DNA, 15 bp, Homo sapiens
tgagggattctgctt

SEQ ID NO: 1283702 - DNA, 15 bp, Homo sapiens
gtgagggattctgct

SEQ ID NO: 1283703 - DNA, 15 bp, Homo sapiens
tgtgagggattctgc

SEQ ID NO: 1283704 - DNA, 15 bp, Homo sapiens
gtgtgagggattctg

SEQ ID NO: 1283705 - DNA, 15 bp, Homo sapiens
agtgtgagggattct

SEQ ID NO: 1283706 - DNA, 15 bp, Homo sapiens
gagtgtgagggattc

SEQ ID NO: 1283707 - DNA, 15 bp, Homo sapiens
agagtgtgagggatt

SEQ ID NO: 1283708 - DNA, 15 bp, Homo sapiens
gagagtgtgagggat

SEQ ID NO: 1283709 - DNA, 15 bp, Homo sapiens
agagagtgtgaggga

SEQ ID NO: 1283710 - DNA, 15 bp, Homo sapiens
tagagagtgtgaggg

SEQ ID NO: 1283711 - DNA, 15 bp, Homo sapiens
ctagagagtgtgagg

SEQ ID NO: 1283712 - DNA, 15 bp, Homo sapiens
gctagagagtgtgag

SEQ ID NO: 1283713 - DNA, 15 bp, Homo sapiens
agctagagagtgtga

SEQ ID NO: 1283714 - DNA, 15 bp, Homo sapiens
aagctagagagtgtg

SEQ ID NO: 1283715 - DNA, 15 bp, Homo sapiens
aaagctagagagtgt

SEQ ID NO: 1283716 - DNA, 15 bp, Homo sapiens
caaagctagagagtg

SEQ ID NO: 1283717 - DNA, 15 bp, Homo sapiens
acaaagctagagagt

SEQ ID NO: 1283718 - DNA, 15 bp, Homo sapiens
aacaaagctagagag

SEQ ID NO: 1283719 - DNA, 15 bp, Homo sapiens
aaacaaagctagaga

SEQ ID NO: 1283720 - DNA, 15 bp, Homo sapiens
aaaacaaagctagag

SEQ ID NO: 1283721 - DNA, 15 bp, Homo sapiens
gaaaacaaagctaga

SEQ ID NO: 1283722 - DNA, 15 bp, Homo sapiens
agaaaacaaagctag

SEQ ID NO: 1283723 - DNA, 15 bp, Homo sapiens
aagaaaacaaagcta

SEQ ID NO: 1283724 - DNA, 15 bp, Homo sapiens
aaagaaaacaaagct

SEQ ID NO: 1283725 - DNA, 15 bp, Homo sapiens
caaagaaaacaaagc

SEQ ID NO: 1283726 - DNA, 15 bp, Homo sapiens
tcaaagaaaacaaag

SEQ ID NO: 1283727 - DNA, 15 bp, Homo sapiens
atcaaagaaaacaaa

SEQ ID NO: 1283728 - DNA, 15 bp, Homo sapiens
gatcaaagaaaacaa

SEQ ID NO: 1283729 - DNA, 15 bp, Homo sapiens
agatcaaagaaaaca

SEQ ID NO: 1283730 - DNA, 15 bp, Homo sapiens
gagatcaaagaaaac

SEQ ID NO: 1283731 - DNA, 15 bp, Homo sapiens
agagatcaaagaaaa

SEQ ID NO: 1283732 - DNA, 15 bp, Homo sapiens
gagagatcaaagaaa

SEQ ID NO: 1283733 - DNA, 15 bp, Homo sapiens
agagagatcaaagaa

SEQ ID NO: 1283734 - DNA, 15 bp, Homo sapiens
cagagagatcaaaga

SEQ ID NO: 1283735 - DNA, 15 bp, Homo sapiens
tcagagagatcaaag

SEQ ID NO: 1283736 - DNA, 15 bp, Homo sapiens
ctcagagagatcaaa

SEQ ID NO: 1283737 - DNA, 15 bp, Homo sapiens
gctcagagagatcaa

SEQ ID NO: 1283738 - DNA, 15 bp, Homo sapiens
agctcagagagatca

SEQ ID NO: 1283739 - DNA, 15 bp, Homo sapiens
aagctcagagagatc

SEQ ID NO: 1283740 - DNA, 15 bp, Homo sapiens
taagctcagagagat

SEQ ID NO: 1283741 - DNA, 15 bp, Homo sapiens
ctaagctcagagaga

SEQ ID NO: 1283742 - DNA, 15 bp, Homo sapiens
cctaagctcagagag

SEQ ID NO: 1283743 - DNA, 15 bp, Homo sapiens
tcctaagctcagaga

SEQ ID NO: 1283744 - DNA, 15 bp, Homo sapiens
ctcctaagctcagag

SEQ ID NO: 1283745 - DNA, 15 bp, Homo sapiens
cctcctaagctcaga

SEQ ID NO: 1283746 - DNA, 15 bp, Homo sapiens
tcctcctaagctcag

SEQ ID NO: 1283747 - DNA, 15 bp, Homo sapiens
ttcctcctaagctca

SEQ ID NO: 1283748 - DNA, 15 bp, Homo sapiens
tttcctcctaagctc

SEQ ID NO: 1283749 - DNA, 15 bp, Homo sapiens
ctttcctcctaagct

SEQ ID NO: 1283750 - DNA, 15 bp, Homo sapiens
cctttcctcctaagc

SEQ ID NO: 1283751 - DNA, 15 bp, Homo sapiens
gcctttcctcctaag

SEQ ID NO: 1283752 - DNA, 15 bp, Homo sapiens
agcctttcctcctaa

SEQ ID NO: 1283753 - DNA, 15 bp, Homo sapiens
gagcctttcctccta

SEQ ID NO: 1283754 - DNA, 15 bp, Homo sapiens
ggagcctttcctcct

SEQ ID NO: 1283755 - DNA, 15 bp, Homo sapiens
aggagcctttcctcc

SEQ ID NO: 1283756 - DNA, 15 bp, Homo sapiens
caggagcctttcctc

SEQ ID NO: 1283757 - DNA, 15 bp, Homo sapiens
acaggagcctttcct

SEQ ID NO: 1283758 - DNA, 15 bp, Homo sapiens
aacaggagcctttcc

SEQ ID NO: 1283759 - DNA, 15 bp, Homo sapiens
gaacaggagcctttc

SEQ ID NO: 1283760 - DNA, 15 bp, Homo sapiens
ggaacaggagccttt

SEQ ID NO: 1283761 - DNA, 15 bp, Homo sapiens
gggaacaggagcctt

SEQ ID NO: 1283762 - DNA, 15 bp, Homo sapiens
agggaacaggagcct

SEQ ID NO: 1283763 - DNA, 15 bp, Homo sapiens
gagggaacaggagcc

SEQ ID NO: 1283764 - DNA, 15 bp, Homo sapiens
ggagggaacaggagc

SEQ ID NO: 1283765 - DNA, 15 bp, Homo sapiens
gggagggaacaggag

SEQ ID NO: 1283766 - DNA, 15 bp, Homo sapiens
agggagggaacagga

SEQ ID NO: 1283767 - DNA, 15 bp, Homo sapiens
gagggagggaacagg

SEQ ID NO: 1283768 - DNA, 15 bp, Homo sapiens
agagggagggaacag

SEQ ID NO: 1283769 - DNA, 15 bp, Homo sapiens
aagagggagggaaca

SEQ ID NO: 1283770 - DNA, 15 bp, Homo sapiens
caagagggagggaac

SEQ ID NO: 1283771 - DNA, 15 bp, Homo sapiens
ccaagagggagggaa

SEQ ID NO: 1283772 - DNA, 15 bp, Homo sapiens
gccaagagggaggga

SEQ ID NO: 1283773 - DNA, 15 bp, Homo sapiens
agccaagagggaggg

SEQ ID NO: 1283774 - DNA, 15 bp, Homo sapiens
aagccaagagggagg

SEQ ID NO: 1283775 - DNA, 15 bp, Homo sapiens
taagccaagagggag

SEQ ID NO: 1283776 - DNA, 15 bp, Homo sapiens
ataagccaagaggga

SEQ ID NO: 1283777 - DNA, 15 bp, Homo sapiens
gataagccaagaggg

SEQ ID NO: 1283778 - DNA, 15 bp, Homo sapiens
ggataagccaagagg

SEQ ID NO: 1283779 - DNA, 15 bp, Homo sapiens
gggataagccaagag

SEQ ID NO: 1283780 - DNA, 15 bp, Homo sapiens
tgggataagccaaga

SEQ ID NO: 1283781 - DNA, 15 bp, Homo sapiens
ttgggataagccaag

SEQ ID NO: 1283782 - DNA, 15 bp, Homo sapiens
attgggataagccaa

SEQ ID NO: 1283783 - DNA, 15 bp, Homo sapiens
tattgggataagcca

SEQ ID NO: 1283784 - DNA, 15 bp, Homo sapiens
ttattgggataagcc

SEQ ID NO: 1283785 - DNA, 15 bp, Homo sapiens
attattgggataagc

SEQ ID NO: 1283786 - DNA, 15 bp, Homo sapiens
cattattgggataag

SEQ ID NO: 1283787 - DNA, 15 bp, Homo sapiens
gcattattgggataa

SEQ ID NO: 1283788 - DNA, 15 bp, Homo sapiens
tgcattattgggata

SEQ ID NO: 1283789 - DNA, 15 bp, Homo sapiens
ttgcattattgggat

SEQ ID NO: 1283790 - DNA, 15 bp, Homo sapiens
tttgcattattggga

SEQ ID NO: 1283791 - DNA, 15 bp, Homo sapiens
ctttgcattattggg

SEQ ID NO: 1283792 - DNA, 15 bp, Homo sapiens
gctttgcattattgg

SEQ ID NO: 1283793 - DNA, 15 bp, Homo sapiens
ggctttgcattattg

SEQ ID NO: 1283794 - DNA, 15 bp, Homo sapiens
tggctttgcattatt

SEQ ID NO: 1283795 - DNA, 15 bp, Homo sapiens
atggctttgcattat

SEQ ID NO: 1283796 - DNA, 15 bp, Homo sapiens
tatggctttgcatta

SEQ ID NO: 1283797 - DNA, 15 bp, Homo sapiens
ctatggctttgcatt

SEQ ID NO: 1283798 - DNA, 15 bp, Homo sapiens
tctatggctttgcat

SEQ ID NO: 1283799 - DNA, 15 bp, Homo sapiens
ttctatggctttgca

SEQ ID NO: 1283800 - DNA, 15 bp, Homo sapiens
cttctatggctttgc

SEQ ID NO: 1283801 - DNA, 15 bp, Homo sapiens
acttctatggctttg

SEQ ID NO: 1283802 - DNA, 15 bp, Homo sapiens
cacttctatggcttt

SEQ ID NO: 1283803 - DNA, 15 bp, Homo sapiens
gcacttctatggctt

SEQ ID NO: 1283804 - DNA, 15 bp, Homo sapiens
tgcacttctatggct

SEQ ID NO: 1283805 - DNA, 15 bp, Homo sapiens
ctgcacttctatggc

SEQ ID NO: 1283806 - DNA, 15 bp, Homo sapiens
cctgcacttctatgg

SEQ ID NO: 1283807 - DNA, 15 bp, Homo sapiens
gcctgcacttctatg

SEQ ID NO: 1283808 - DNA, 15 bp, Homo sapiens
agcctgcacttctat

SEQ ID NO: 1283809 - DNA, 15 bp, Homo sapiens
cagcctgcacttcta

SEQ ID NO: 1283810 - DNA, 15 bp, Homo sapiens
gcagcctgcacttct

SEQ ID NO: 1283811 - DNA, 15 bp, Homo sapiens
agcagcctgcacttc

SEQ ID NO: 1283812 - DNA, 15 bp, Homo sapiens
cagcagcctgcactt

SEQ ID NO: 1283813 - DNA, 15 bp, Homo sapiens
ccagcagcctgcact

SEQ ID NO: 1283814 - DNA, 15 bp, Homo sapiens
cccagcagcctgcac

SEQ ID NO: 1283815 - DNA, 15 bp, Homo sapiens
ccccagcagcctgca

SEQ ID NO: 1283816 - DNA, 15 bp, Homo sapiens
tccccagcagcctgc

SEQ ID NO: 1283817 - DNA, 15 bp, Homo sapiens
ttccccagcagcctg

SEQ ID NO: 1283818 - DNA, 15 bp, Homo sapiens
tttccccagcagcct

SEQ ID NO: 1283819 - DNA, 15 bp, Homo sapiens
ttttccccagcagcc

SEQ ID NO: 1283820 - DNA, 15 bp, Homo sapiens
cttttccccagcagc

SEQ ID NO: 1283821 - DNA, 15 bp, Homo sapiens
acttttccccagcag

SEQ ID NO: 1283822 - DNA, 15 bp, Homo sapiens
aacttttccccagca

SEQ ID NO: 1283823 - DNA, 15 bp, Homo sapiens
aaacttttccccagc

SEQ ID NO: 1283824 - DNA, 15 bp, Homo sapiens
caaacttttccccag

SEQ ID NO: 1283825 - DNA, 15 bp, Homo sapiens
acaaacttttcccca

SEQ ID NO: 1283826 - DNA, 15 bp, Homo sapiens
aacaaacttttcccc

SEQ ID NO: 1283827 - DNA, 15 bp, Homo sapiens
aaacaaacttttccc

SEQ ID NO: 1283828 - DNA, 15 bp, Homo sapiens
caaacaaacttttcc

SEQ ID NO: 1283829 - DNA, 15 bp, Homo sapiens
ccaaacaaacttttc

SEQ ID NO: 1283830 - DNA, 15 bp, Homo sapiens
tccaaacaaactttt

SEQ ID NO: 1283831 - DNA, 15 bp, Homo sapiens
gtccaaacaaacttt

SEQ ID NO: 1283832 - DNA, 15 bp, Homo sapiens
tgtccaaacaaactt

SEQ ID NO: 1283833 - DNA, 15 bp, Homo sapiens
gtgtccaaacaaact

SEQ ID NO: 1283834 - DNA, 15 bp, Homo sapiens
agtgtccaaacaaac

SEQ ID NO: 1283835 - DNA, 15 bp, Homo sapiens
aagtgtccaaacaaa

SEQ ID NO: 1283836 - DNA, 15 bp, Homo sapiens
taagtgtccaaacaa

SEQ ID NO: 1283837 - DNA, 15 bp, Homo sapiens
ttaagtgtccaaaca

SEQ ID NO: 1283838 - DNA, 15 bp, Homo sapiens
cttaagtgtccaaac

SEQ ID NO: 1283839 - DNA, 15 bp, Homo sapiens
tcttaagtgtccaaa

SEQ ID NO: 1283840 - DNA, 15 bp, Homo sapiens
ttcttaagtgtccaa

SEQ ID NO: 1283841 - DNA, 15 bp, Homo sapiens
attcttaagtgtcca

SEQ ID NO: 1283842 - DNA, 15 bp, Homo sapiens
cattcttaagtgtcc

SEQ ID NO: 1283843 - DNA, 15 bp, Homo sapiens
acattcttaagtgtc

SEQ ID NO: 1283844 - DNA, 15 bp, Homo sapiens
tacattcttaagtgt

SEQ ID NO: 1283845 - DNA, 15 bp, Homo sapiens
ctacattcttaagtg

SEQ ID NO: 1283846 - DNA, 15 bp, Homo sapiens
tctacattcttaagt

SEQ ID NO: 1283847 - DNA, 15 bp, Homo sapiens
ttctacattcttaag

SEQ ID NO: 1283848 - DNA, 15 bp, Homo sapiens
tttctacattcttaa

SEQ ID NO: 1283849 - DNA, 15 bp, Homo sapiens
ttttctacattctta

SEQ ID NO: 1283850 - DNA, 15 bp, Homo sapiens
cttttctacattctt

SEQ ID NO: 1283851 - DNA, 15 bp, Homo sapiens
ccttttctacattct

SEQ ID NO: 1283852 - DNA, 15 bp, Homo sapiens
cccttttctacattc

SEQ ID NO: 1283853 - DNA, 15 bp, Homo sapiens
acccttttctacatt

SEQ ID NO: 1283854 - DNA, 15 bp, Homo sapiens
aacccttttctacat

SEQ ID NO: 1283855 - DNA, 15 bp, Homo sapiens
aaacccttttctaca

SEQ ID NO: 1283856 - DNA, 15 bp, Homo sapiens
taaacccttttctac

SEQ ID NO: 1283857 - DNA, 15 bp, Homo sapiens
ctaaacccttttcta

SEQ ID NO: 1283858 - DNA, 15 bp, Homo sapiens
gctaaacccttttct

SEQ ID NO: 1283859 - DNA, 15 bp, Homo sapiens
agctaaacccttttc

SEQ ID NO: 1283860 - DNA, 15 bp, Homo sapiens
aagctaaaccctttt

SEQ ID NO: 1283861 - DNA, 15 bp, Homo sapiens
caagctaaacccttt

SEQ ID NO: 1283862 - DNA, 15 bp, Homo sapiens
acaagctaaaccctt

SEQ ID NO: 1283863 - DNA, 15 bp, Homo sapiens
tacaagctaaaccct

SEQ ID NO: 1283864 - DNA, 15 bp, Homo sapiens
atacaagctaaaccc

SEQ ID NO: 1283865 - DNA, 15 bp, Homo sapiens
tatacaagctaaacc

SEQ ID NO: 1283866 - DNA, 15 bp, Homo sapiens
ttatacaagctaaac

SEQ ID NO: 1283867 - DNA, 15 bp, Homo sapiens
tttatacaagctaaa

SEQ ID NO: 1283868 - DNA, 15 bp, Homo sapiens
ctttatacaagctaa

SEQ ID NO: 1283869 - DNA, 15 bp, Homo sapiens
tctttatacaagcta

SEQ ID NO: 1283870 - DNA, 15 bp, Homo sapiens
ctctttatacaagct

SEQ ID NO: 1283871 - DNA, 15 bp, Homo sapiens
actctttatacaagc

SEQ ID NO: 1283872 - DNA, 15 bp, Homo sapiens
aactctttatacaag

SEQ ID NO: 1283873 - DNA, 15 bp, Homo sapiens
aaactctttatacaa

SEQ ID NO: 1283874 - DNA, 15 bp, Homo sapiens
aaaactctttataca

SEQ ID NO: 1283875 - DNA, 15 bp, Homo sapiens
caaaactctttatac

SEQ ID NO: 1283876 - DNA, 15 bp, Homo sapiens
gcaaaactctttata

SEQ ID NO: 1283877 - DNA, 15 bp, Homo sapiens
agcaaaactctttat

SEQ ID NO: 1283878 - DNA, 15 bp, Homo sapiens
aagcaaaactcttta

SEQ ID NO: 1283879 - DNA, 15 bp, Homo sapiens
aaagcaaaactcttt

SEQ ID NO: 1283880 - DNA, 15 bp, Homo sapiens
gaaagcaaaactctt

SEQ ID NO: 1283881 - DNA, 15 bp, Homo sapiens
agaaagcaaaactct

SEQ ID NO: 1283882 - DNA, 15 bp, Homo sapiens
gagaaagcaaaactc

SEQ ID NO: 1283883 - DNA, 15 bp, Homo sapiens
tgagaaagcaaaact

SEQ ID NO: 1283884 - DNA, 15 bp, Homo sapiens
atgagaaagcaaaac

SEQ ID NO: 1283885 - DNA, 15 bp, Homo sapiens
aatgagaaagcaaaa

SEQ ID NO: 1283886 - DNA, 15 bp, Homo sapiens
taatgagaaagcaaa

SEQ ID NO: 1283887 - DNA, 15 bp, Homo sapiens
ataatgagaaagcaa

SEQ ID NO: 1283888 - DNA, 15 bp, Homo sapiens
tataatgagaaagca

SEQ ID NO: 1283889 - DNA, 15 bp, Homo sapiens
ttataatgagaaagc

SEQ ID NO: 1283890 - DNA, 15 bp, Homo sapiens
attataatgagaaag

SEQ ID NO: 1283891 - DNA, 15 bp, Homo sapiens
cattataatgagaaa

SEQ ID NO: 1283892 - DNA, 15 bp, Homo sapiens
gcattataatgagaa

SEQ ID NO: 1283893 - DNA, 15 bp, Homo sapiens
agcattataatgaga

SEQ ID NO: 1283894 - DNA, 15 bp, Homo sapiens
aagcattataatgag

SEQ ID NO: 1283895 - DNA, 15 bp, Homo sapiens
caagcattataatga

SEQ ID NO: 1283896 - DNA, 15 bp, Homo sapiens
ccaagcattataatg

SEQ ID NO: 1283897 - DNA, 15 bp, Homo sapiens
tccaagcattataat

SEQ ID NO: 1283898 - DNA, 15 bp, Homo sapiens
ctccaagcattataa

SEQ ID NO: 1283899 - DNA, 15 bp, Homo sapiens
tttatttactatgtt

SEQ ID NO: 1283900 - DNA, 15 bp, Homo sapiens
atttatttactatgt

SEQ ID NO: 1283901 - DNA, 15 bp, Homo sapiens
tatttatttactatg

SEQ ID NO: 1283902 - DNA, 15 bp, Homo sapiens
ttatttatttactat

SEQ ID NO: 1283903 - DNA, 15 bp, Homo sapiens
attatttatttacta

SEQ ID NO: 1283904 - DNA, 15 bp, Homo sapiens
tattatttatttact

SEQ ID NO: 1283905 - DNA, 15 bp, Homo sapiens
ttattatttatttac

SEQ ID NO: 1283906 - DNA, 15 bp, Homo sapiens
gtttattatttattt

SEQ ID NO: 1283907 - DNA, 15 bp, Homo sapiens
agtttattatttatt

SEQ ID NO: 1283908 - DNA, 15 bp, Homo sapiens
tagtttattatttat

SEQ ID NO: 1283909 - DNA, 15 bp, Homo sapiens
ttagtttattattta

SEQ ID NO: 1283910 - DNA, 15 bp, Homo sapiens
gttagtttattattt

SEQ ID NO: 1283911 - DNA, 15 bp, Homo sapiens
agttagtttattatt

SEQ ID NO: 1283912 - DNA, 15 bp, Homo sapiens
aagttagtttattat

SEQ ID NO: 1283913 - DNA, 15 bp, Homo sapiens
gaagttagtttatta

SEQ ID NO: 1283914 - DNA, 15 bp, Homo sapiens
tgaagttagtttatt

SEQ ID NO: 1283915 - DNA, 15 bp, Homo sapiens
ctgaagttagtttat

SEQ ID NO: 1283916 - DNA, 15 bp, Homo sapiens
tctgaagttagttta

SEQ ID NO: 1283917 - DNA, 15 bp, Homo sapiens
atctgaagttagttt

SEQ ID NO: 1283918 - DNA, 15 bp, Homo sapiens
tatctgaagttagtt

SEQ ID NO: 1283919 - DNA, 15 bp, Homo sapiens
ttatctgaagttagt

SEQ ID NO: 1283920 - DNA, 15 bp, Homo sapiens
attatctgaagttag

SEQ ID NO: 1283921 - DNA, 15 bp, Homo sapiens
cattatctgaagtta

SEQ ID NO: 1283922 - DNA, 15 bp, Homo sapiens
tcattatctgaagtt

SEQ ID NO: 1283923 - DNA, 15 bp, Homo sapiens
ctcattatctgaagt

SEQ ID NO: 1283924 - DNA, 15 bp, Homo sapiens
tctcattatctgaag

SEQ ID NO: 1283925 - DNA, 15 bp, Homo sapiens
ttctcattatctgaa

SEQ ID NO: 1283926 - DNA, 15 bp, Homo sapiens
gttctcattatctga

SEQ ID NO: 1283927 - DNA, 15 bp, Homo sapiens
agttctcattatctg

SEQ ID NO: 1283928 - DNA, 15 bp, Homo sapiens
cagttctcattatct

SEQ ID NO: 1283929 - DNA, 15 bp, Homo sapiens
ccagttctcattatc

SEQ ID NO: 1283930 - DNA, 15 bp, Homo sapiens
accagttctcattat

SEQ ID NO: 1283931 - DNA, 15 bp, Homo sapiens
aaccagttctcatta

SEQ ID NO: 1283932 - DNA, 15 bp, Homo sapiens
aaaccagttctcatt

SEQ ID NO: 1283933 - DNA, 15 bp, Homo sapiens
aaaaccagttctcat

SEQ ID NO: 1283934 - DNA, 15 bp, Homo sapiens
taaaaccagttctca

SEQ ID NO: 1283935 - DNA, 15 bp, Homo sapiens
ctaaaaccagttctc

SEQ ID NO: 1283936 - DNA, 15 bp, Homo sapiens
tctaaaaccagttct

SEQ ID NO: 1283937 - DNA, 15 bp, Homo sapiens
ttctaaaaccagttc

SEQ ID NO: 1283938 - DNA, 15 bp, Homo sapiens
attctaaaaccagtt

SEQ ID NO: 1283939 - DNA, 15 bp, Homo sapiens
tattctaaaaccagt

SEQ ID NO: 1283940 - DNA, 15 bp, Homo sapiens
atattctaaaaccag

SEQ ID NO: 1283941 - DNA, 15 bp, Homo sapiens
catattctaaaacca

SEQ ID NO: 1283942 - DNA, 15 bp, Homo sapiens
tcatattctaaaacc

SEQ ID NO: 1283943 - DNA, 15 bp, Homo sapiens
ttcatattctaaaac

SEQ ID NO: 1283944 - DNA, 15 bp, Homo sapiens
tttcatattctaaaa

SEQ ID NO: 1283945 - DNA, 15 bp, Homo sapiens
gtttcatattctaaa

SEQ ID NO: 1283946 - DNA, 15 bp, Homo sapiens
tgtttcatattctaa

SEQ ID NO: 1283947 - DNA, 15 bp, Homo sapiens
ctgtttcatattcta

SEQ ID NO: 1283948 - DNA, 15 bp, Homo sapiens
cctgtttcatattct

SEQ ID NO: 1283949 - DNA, 15 bp, Homo sapiens
gcctgtttcatattc

SEQ ID NO: 1283950 - DNA, 15 bp, Homo sapiens
agcctgtttcatatt

SEQ ID NO: 1283951 - DNA, 15 bp, Homo sapiens
tagcctgtttcatat

SEQ ID NO: 1283952 - DNA, 15 bp, Homo sapiens
ttagcctgtttcata

SEQ ID NO: 1283953 - DNA, 15 bp, Homo sapiens
cttagcctgtttcat

SEQ ID NO: 1283954 - DNA, 15 bp, Homo sapiens
ccttagcctgtttca

SEQ ID NO: 1283955 - DNA, 15 bp, Homo sapiens
cccttagcctgtttc

SEQ ID NO: 1283956 - DNA, 15 bp, Homo sapiens
ccccttagcctgttt

SEQ ID NO: 1283957 - DNA, 15 bp, Homo sapiens
tccccttagcctgtt

SEQ ID NO: 1283958 - DNA, 15 bp, Homo sapiens
atccccttagcctgt

SEQ ID NO: 1283959 - DNA, 15 bp, Homo sapiens
tatccccttagcctg

SEQ ID NO: 1283960 - DNA, 15 bp, Homo sapiens
ctatccccttagcct

SEQ ID NO: 1283961 - DNA, 15 bp, Homo sapiens
actatccccttagcc

SEQ ID NO: 1283962 - DNA, 15 bp, Homo sapiens
cactatccccttagc

SEQ ID NO: 1283963 - DNA, 15 bp, Homo sapiens
tcactatccccttag

SEQ ID NO: 1283964 - DNA, 15 bp, Homo sapiens
atcactatcccctta

SEQ ID NO: 1283965 - DNA, 15 bp, Homo sapiens
catcactatcccctt

SEQ ID NO: 1283966 - DNA, 15 bp, Homo sapiens
acatcactatcccct

SEQ ID NO: 1283967 - DNA, 15 bp, Homo sapiens
cacatcactatcccc

SEQ ID NO: 1283968 - DNA, 15 bp, Homo sapiens
tcacatcactatccc

SEQ ID NO: 1283969 - DNA, 15 bp, Homo sapiens
ctcacatcactatcc

SEQ ID NO: 1283970 - DNA, 15 bp, Homo sapiens
actcacatcactatc

SEQ ID NO: 1283971 - DNA, 15 bp, Homo sapiens
cactcacatcactat

SEQ ID NO: 1283972 - DNA, 15 bp, Homo sapiens
gcactcacatcacta

SEQ ID NO: 1283973 - DNA, 15 bp, Homo sapiens
tgcactcacatcact

SEQ ID NO: 1283974 - DNA, 15 bp, Homo sapiens
ttgcactcacatcac

SEQ ID NO: 1283975 - DNA, 15 bp, Homo sapiens
attgcactcacatca

SEQ ID NO: 1283976 - DNA, 15 bp, Homo sapiens
cattgcactcacatc

SEQ ID NO: 1283977 - DNA, 15 bp, Homo sapiens
ccattgcactcacat

SEQ ID NO: 1283978 - DNA, 15 bp, Homo sapiens
cccattgcactcaca

SEQ ID NO: 1283979 - DNA, 15 bp, Homo sapiens
ccccattgcactcac

SEQ ID NO: 1283980 - DNA, 15 bp, Homo sapiens
tccccattgcactca

SEQ ID NO: 1283981 - DNA, 15 bp, Homo sapiens
ttccccattgcactc

SEQ ID NO: 1283982 - DNA, 15 bp, Homo sapiens
gttccccattgcact

SEQ ID NO: 1283983 - DNA, 15 bp, Homo sapiens
ggttccccattgcac

SEQ ID NO: 1283984 - DNA, 15 bp, Homo sapiens
aggttccccattgca

SEQ ID NO: 1283985 - DNA, 15 bp, Homo sapiens
caggttccccattgc

SEQ ID NO: 1283986 - DNA, 15 bp, Homo sapiens
acaggttccccattg

SEQ ID NO: 1283987 - DNA, 15 bp, Homo sapiens
aacaggttccccatt

SEQ ID NO: 1283988 - DNA, 15 bp, Homo sapiens
aaacaggttccccat

SEQ ID NO: 1283989 - DNA, 15 bp, Homo sapiens
aaaacaggttcccca

SEQ ID NO: 1283990 - DNA, 15 bp, Homo sapiens
taaaacaggttcccc

SEQ ID NO: 1283991 - DNA, 15 bp, Homo sapiens
ataaaacaggttccc

SEQ ID NO: 1283992 - DNA, 15 bp, Homo sapiens
cataaaacaggttcc

SEQ ID NO: 1283993 - DNA, 15 bp, Homo sapiens
acataaaacaggttc

SEQ ID NO: 1283994 - DNA, 15 bp, Homo sapiens
tacataaaacaggtt

SEQ ID NO: 1283995 - DNA, 15 bp, Homo sapiens
ctacataaaacaggt

SEQ ID NO: 1283996 - DNA, 15 bp, Homo sapiens
actacataaaacagg

SEQ ID NO: 1283997 - DNA, 15 bp, Homo sapiens
aactacataaaacag

SEQ ID NO: 1283998 - DNA, 15 bp, Homo sapiens
caactacataaaaca

SEQ ID NO: 1283999 - DNA, 15 bp, Homo sapiens
ccaactacataaaac

SEQ ID NO: 1284000 - DNA, 15 bp, Homo sapiens
gccaactacataaaa

SEQ ID NO: 1284001 - DNA, 15 bp, Homo sapiens
ggccaactacataaa

SEQ ID NO: 1284002 - DNA, 15 bp, Homo sapiens
tggccaactacataa

SEQ ID NO: 1284003 - DNA, 15 bp, Homo sapiens
ctggccaactacata

SEQ ID NO: 1284004 - DNA, 15 bp, Homo sapiens
cctggccaactacat

SEQ ID NO: 1284005 - DNA, 15 bp, Homo sapiens
ccctggccaactaca

SEQ ID NO: 1284006 - DNA, 15 bp, Homo sapiens
tccctggccaactac

SEQ ID NO: 1284007 - DNA, 15 bp, Homo sapiens
ctccctggccaacta

SEQ ID NO: 1284008 - DNA, 15 bp, Homo sapiens
cctccctggccaact

SEQ ID NO: 1284009 - DNA, 15 bp, Homo sapiens
ccctccctggccaac

SEQ ID NO: 1284010 - DNA, 15 bp, Homo sapiens
accctccctggccaa

SEQ ID NO: 1284011 - DNA, 15 bp, Homo sapiens
gaccctccctggcca

SEQ ID NO: 1284012 - DNA, 15 bp, Homo sapiens
agaccctccctggcc

SEQ ID NO: 1284013 - DNA, 15 bp, Homo sapiens
aagaccctccctggc

SEQ ID NO: 1284014 - DNA, 15 bp, Homo sapiens
aaagaccctccctgg

SEQ ID NO: 1284015 - DNA, 15 bp, Homo sapiens
gaaagaccctccctg

SEQ ID NO: 1284016 - DNA, 15 bp, Homo sapiens
agaaagaccctccct

SEQ ID NO: 1284017 - DNA, 15 bp, Homo sapiens
tagaaagaccctccc

SEQ ID NO: 1284018 - DNA, 15 bp, Homo sapiens
ttagaaagaccctcc

SEQ ID NO: 1284019 - DNA, 15 bp, Homo sapiens
cttagaaagaccctc

SEQ ID NO: 1284020 - DNA, 15 bp, Homo sapiens
ccttagaaagaccct

SEQ ID NO: 1284021 - DNA, 15 bp, Homo sapiens
tccttagaaagaccc

SEQ ID NO: 1284022 - DNA, 15 bp, Homo sapiens
ttccttagaaagacc

SEQ ID NO: 1284023 - DNA, 15 bp, Homo sapiens
cttccttagaaagac

SEQ ID NO: 1284024 - DNA, 15 bp, Homo sapiens
acttccttagaaaga

SEQ ID NO: 1284025 - DNA, 15 bp, Homo sapiens
cacttccttagaaag

SEQ ID NO: 1284026 - DNA, 15 bp, Homo sapiens
ccacttccttagaaa

SEQ ID NO: 1284027 - DNA, 15 bp, Homo sapiens
gccacttccttagaa

SEQ ID NO: 1284028 - DNA, 15 bp, Homo sapiens
ggccacttccttaga

SEQ ID NO: 1284029 - DNA, 15 bp, Homo sapiens
tggccacttccttag

SEQ ID NO: 1284030 - DNA, 15 bp, Homo sapiens
ttggccacttcctta

SEQ ID NO: 1284031 - DNA, 15 bp, Homo sapiens
attggccacttcctt

SEQ ID NO: 1284032 - DNA, 15 bp, Homo sapiens
cattggccacttcct

SEQ ID NO: 1284033 - DNA, 15 bp, Homo sapiens
tcattggccacttcc

SEQ ID NO: 1284034 - DNA, 15 bp, Homo sapiens
ctcattggccacttc

SEQ ID NO: 1284035 - DNA, 15 bp, Homo sapiens
actcattggccactt

SEQ ID NO: 1284036 - DNA, 15 bp, Homo sapiens
cactcattggccact

SEQ ID NO: 1284037 - DNA, 15 bp, Homo sapiens
ccactcattggccac

SEQ ID NO: 1284038 - DNA, 15 bp, Homo sapiens
tccactcattggcca

SEQ ID NO: 1284039 - DNA, 15 bp, Homo sapiens
ttccactcattggcc

SEQ ID NO: 1284040 - DNA, 15 bp, Homo sapiens
gttccactcattggc

SEQ ID NO: 1284041 - DNA, 15 bp, Homo sapiens
tgttccactcattgg

SEQ ID NO: 1284042 - DNA, 15 bp, Homo sapiens
ttgttccactcattg

SEQ ID NO: 1284043 - DNA, 15 bp, Homo sapiens
cttgttccactcatt

SEQ ID NO: 1284044 - DNA, 15 bp, Homo sapiens
tcttgttccactcat

SEQ ID NO: 1284045 - DNA, 15 bp, Homo sapiens
atcttgttccactca

SEQ ID NO: 1284046 - DNA, 15 bp, Homo sapiens
gatcttgttccactc

SEQ ID NO: 1284047 - DNA, 15 bp, Homo sapiens
tgatcttgttccact

SEQ ID NO: 1284048 - DNA, 15 bp, Homo sapiens
ttgatcttgttccac

SEQ ID NO: 1284049 - DNA, 15 bp, Homo sapiens
gttgatcttgttcca

SEQ ID NO: 1284050 - DNA, 15 bp, Homo sapiens
agttgatcttgttcc

SEQ ID NO: 1284051 - DNA, 15 bp, Homo sapiens
aagttgatcttgttc

SEQ ID NO: 1284052 - DNA, 15 bp, Homo sapiens
caagttgatcttgtt

SEQ ID NO: 1284053 - DNA, 15 bp, Homo sapiens
gcaagttgatcttgt

SEQ ID NO: 1284054 - DNA, 15 bp, Homo sapiens
ggcaagttgatcttg

SEQ ID NO: 1284055 - DNA, 15 bp, Homo sapiens
aggcaagttgatctt

SEQ ID NO: 1284056 - DNA, 15 bp, Homo sapiens
caggcaagttgatct

SEQ ID NO: 1284057 - DNA, 15 bp, Homo sapiens
ccaggcaagttgatc

SEQ ID NO: 1284058 - DNA, 15 bp, Homo sapiens
tccaggcaagttgat

SEQ ID NO: 1284059 - DNA, 15 bp, Homo sapiens
ttccaggcaagttga

SEQ ID NO: 1284060 - DNA, 15 bp, Homo sapiens
tttccaggcaagttg

SEQ ID NO: 1284061 - DNA, 15 bp, Homo sapiens
ttttccaggcaagtt

SEQ ID NO: 1284062 - DNA, 15 bp, Homo sapiens
cttttccaggcaagt

SEQ ID NO: 1284063 - DNA, 15 bp, Homo sapiens
ccttttccaggcaag

SEQ ID NO: 1284064 - DNA, 15 bp, Homo sapiens
tccttttccaggcaa

SEQ ID NO: 1284065 - DNA, 15 bp, Homo sapiens
ttccttttccaggca

SEQ ID NO: 1284066 - DNA, 15 bp, Homo sapiens
tttccttttccaggc

SEQ ID NO: 1284067 - DNA, 15 bp, Homo sapiens
gtttccttttccagg

SEQ ID NO: 1284068 - DNA, 15 bp, Homo sapiens
agtttccttttccag

SEQ ID NO: 1284069 - DNA, 15 bp, Homo sapiens
tagtttccttttcca

SEQ ID NO: 1284070 - DNA, 15 bp, Homo sapiens
atagtttccttttcc

SEQ ID NO: 1284071 - DNA, 15 bp, Homo sapiens
catagtttccttttc

SEQ ID NO: 1284072 - DNA, 15 bp, Homo sapiens
ccatagtttcctttt

SEQ ID NO: 1284073 - DNA, 15 bp, Homo sapiens
cccatagtttccttt

SEQ ID NO: 1284074 - DNA, 15 bp, Homo sapiens
ccccatagtttcctt

SEQ ID NO: 1284075 - DNA, 15 bp, Homo sapiens
cccccatagtttcct

SEQ ID NO: 1284076 - DNA, 15 bp, Homo sapiens
tcccccatagtttcc

SEQ ID NO: 1284077 - DNA, 15 bp, Homo sapiens
atcccccatagtttc

SEQ ID NO: 1284078 - DNA, 15 bp, Homo sapiens
gatcccccatagttt

SEQ ID NO: 1284079 - DNA, 15 bp, Homo sapiens
agatcccccatagtt

SEQ ID NO: 1284080 - DNA, 15 bp, Homo sapiens
aagatcccccatagt

SEQ ID NO: 1284081 - DNA, 15 bp, Homo sapiens
aaagatcccccatag

SEQ ID NO: 1284082 - DNA, 15 bp, Homo sapiens
caaagatcccccata

SEQ ID NO: 1284083 - DNA, 15 bp, Homo sapiens
tcaaagatcccccat

SEQ ID NO: 1284084 - DNA, 15 bp, Homo sapiens
ctcaaagatccccca

SEQ ID NO: 1284085 - DNA, 15 bp, Homo sapiens
cctcaaagatccccc

SEQ ID NO: 1284086 - DNA, 15 bp, Homo sapiens
ccctcaaagatcccc

SEQ ID NO: 1284087 - DNA, 15 bp, Homo sapiens
tccctcaaagatccc

SEQ ID NO: 1284088 - DNA, 15 bp, Homo sapiens
ttccctcaaagatcc

SEQ ID NO: 1284089 - DNA, 15 bp, Homo sapiens
gttccctcaaagatc

SEQ ID NO: 1284090 - DNA, 15 bp, Homo sapiens
tgttccctcaaagat

SEQ ID NO: 1284091 - DNA, 15 bp, Homo sapiens
ctgttccctcaaaga

SEQ ID NO: 1284092 - DNA, 15 bp, Homo sapiens
actgttccctcaaag

SEQ ID NO: 1284093 - DNA, 15 bp, Homo sapiens
tactgttccctcaaa

SEQ ID NO: 1284094 - DNA, 15 bp, Homo sapiens
gtactgttccctcaa

SEQ ID NO: 1284095 - DNA, 15 bp, Homo sapiens
agtactgttccctca

SEQ ID NO: 1284096 - DNA, 15 bp, Homo sapiens
aagtactgttccctc

SEQ ID NO: 1284097 - DNA, 15 bp, Homo sapiens
gaagtactgttccct

SEQ ID NO: 1284098 - DNA, 15 bp, Homo sapiens
tgaagtactgttccc

SEQ ID NO: 1284099 - DNA, 15 bp, Homo sapiens
ctgaagtactgttcc

SEQ ID NO: 1284100 - DNA, 15 bp, Homo sapiens
cctgaagtactgttc

SEQ ID NO: 1284101 - DNA, 15 bp, Homo sapiens
acctgaagtactgtt

SEQ ID NO: 1284102 - DNA, 15 bp, Homo sapiens
cacctgaagtactgt

SEQ ID NO: 1284103 - DNA, 15 bp, Homo sapiens
acacctgaagtactg

SEQ ID NO: 1284104 - DNA, 15 bp, Homo sapiens
cacacctgaagtact

SEQ ID NO: 1284105 - DNA, 15 bp, Homo sapiens
acacacctgaagtac

SEQ ID NO: 1284106 - DNA, 15 bp, Homo sapiens
cacacacctgaagta

SEQ ID NO: 1284107 - DNA, 15 bp, Homo sapiens
ccacacacctgaagt

SEQ ID NO: 1284108 - DNA, 15 bp, Homo sapiens
tccacacacctgaag

SEQ ID NO: 1284109 - DNA, 15 bp, Homo sapiens
ttccacacacctgaa

SEQ ID NO: 1284110 - DNA, 15 bp, Homo sapiens
gttccacacacctga

SEQ ID NO: 1284111 - DNA, 15 bp, Homo sapiens
tgttccacacacctg

SEQ ID NO: 1284112 - DNA, 15 bp, Homo sapiens
ctgttccacacacct

SEQ ID NO: 1284113 - DNA, 15 bp, Homo sapiens
gctgttccacacacc

SEQ ID NO: 1284114 - DNA, 15 bp, Homo sapiens
tgctgttccacacac

SEQ ID NO: 1284115 - DNA, 15 bp, Homo sapiens
ctgctgttccacaca

SEQ ID NO: 1284116 - DNA, 15 bp, Homo sapiens
gctgctgttccacac

SEQ ID NO: 1284117 - DNA, 15 bp, Homo sapiens
agctgctgttccaca

SEQ ID NO: 1284118 - DNA, 15 bp, Homo sapiens
cagctgctgttccac

SEQ ID NO: 1284119 - DNA, 15 bp, Homo sapiens
acagctgctgttcca

SEQ ID NO: 1284120 - DNA, 15 bp, Homo sapiens
cacagctgctgttcc

SEQ ID NO: 1284121 - DNA, 15 bp, Homo sapiens
tcacagctgctgttc

SEQ ID NO: 1284122 - DNA, 15 bp, Homo sapiens
ttcacagctgctgtt

SEQ ID NO: 1284123 - DNA, 15 bp, Homo sapiens
cttcacagctgctgt

SEQ ID NO: 1284124 - DNA, 15 bp, Homo sapiens
gcttcacagctgctg

SEQ ID NO: 1284125 - DNA, 15 bp, Homo sapiens
ggcttcacagctgct

SEQ ID NO: 1284126 - DNA, 15 bp, Homo sapiens
aggcttcacagctgc

SEQ ID NO: 1284127 - DNA, 15 bp, Homo sapiens
gaggcttcacagctg

SEQ ID NO: 1284128 - DNA, 15 bp, Homo sapiens
agaggcttcacagct

SEQ ID NO: 1284129 - DNA, 15 bp, Homo sapiens
cagaggcttcacagc

SEQ ID NO: 1284130 - DNA, 15 bp, Homo sapiens
ccagaggcttcacag

SEQ ID NO: 1284131 - DNA, 15 bp, Homo sapiens
cccagaggcttcaca

SEQ ID NO: 1284132 - DNA, 15 bp, Homo sapiens
ccccagaggcttcac

SEQ ID NO: 1284133 - DNA, 15 bp, Homo sapiens
tccccagaggcttca

SEQ ID NO: 1284134 - DNA, 15 bp, Homo sapiens
ctccccagaggcttc

SEQ ID NO: 1284135 - DNA, 15 bp, Homo sapiens
cctccccagaggctt

SEQ ID NO: 1284136 - DNA, 15 bp, Homo sapiens
ccctccccagaggct

SEQ ID NO: 1284137 - DNA, 15 bp, Homo sapiens
tccctccccagaggc

SEQ ID NO: 1284138 - DNA, 15 bp, Homo sapiens
ttccctccccagagg

SEQ ID NO: 1284139 - DNA, 15 bp, Homo sapiens
gttccctccccagag

SEQ ID NO: 1284140 - DNA, 15 bp, Homo sapiens
cgttccctccccaga

SEQ ID NO: 1284141 - DNA, 15 bp, Homo sapiens
tcgttccctccccag

SEQ ID NO: 1284142 - DNA, 15 bp, Homo sapiens
ctcgttccctcccca

SEQ ID NO: 1284143 - DNA, 15 bp, Homo sapiens
cctcgttccctcccc

SEQ ID NO: 1284144 - DNA, 15 bp, Homo sapiens
gcctcgttccctccc

SEQ ID NO: 1284145 - DNA, 15 bp, Homo sapiens
agcctcgttccctcc

SEQ ID NO: 1284146 - DNA, 15 bp, Homo sapiens
cagcctcgttccctc

SEQ ID NO: 1284147 - DNA, 15 bp, Homo sapiens
ccagcctcgttccct

SEQ ID NO: 1284148 - DNA, 15 bp, Homo sapiens
gccagcctcgttccc

SEQ ID NO: 1284149 - DNA, 15 bp, Homo sapiens
agccagcctcgttcc

SEQ ID NO: 1284150 - DNA, 15 bp, Homo sapiens
cagccagcctcgttc

SEQ ID NO: 1284151 - DNA, 15 bp, Homo sapiens
gcagccagcctcgtt

SEQ ID NO: 1284152 - DNA, 15 bp, Homo sapiens
agcagccagcctcgt

SEQ ID NO: 1284153 - DNA, 15 bp, Homo sapiens
cagcagccagcctcg

SEQ ID NO: 1284154 - DNA, 15 bp, Homo sapiens
ccagcagccagcctc

SEQ ID NO: 1284155 - DNA, 15 bp, Homo sapiens
tccagcagccagcct

SEQ ID NO: 1284156 - DNA, 15 bp, Homo sapiens
ctccagcagccagcc

SEQ ID NO: 1284157 - DNA, 15 bp, Homo sapiens
tctccagcagccagc

SEQ ID NO: 1284158 - DNA, 15 bp, Homo sapiens
ctctccagcagccag

SEQ ID NO: 1284159 - DNA, 15 bp, Homo sapiens
actctccagcagcca

SEQ ID NO: 1284160 - DNA, 15 bp, Homo sapiens
aactctccagcagcc

SEQ ID NO: 1284161 - DNA, 15 bp, Homo sapiens
aaactctccagcagc

SEQ ID NO: 1284162 - DNA, 15 bp, Homo sapiens
gaaactctccagcag

SEQ ID NO: 1284163 - DNA, 15 bp, Homo sapiens
ggaaactctccagca

SEQ ID NO: 1284164 - DNA, 15 bp, Homo sapiens
aggaaactctccagc

SEQ ID NO: 1284165 - DNA, 15 bp, Homo sapiens
aaggaaactctccag

SEQ ID NO: 1284166 - DNA, 15 bp, Homo sapiens
caaggaaactctcca

SEQ ID NO: 1284167 - DNA, 15 bp, Homo sapiens
ccaaggaaactctcc

SEQ ID NO: 1284168 - DNA, 15 bp, Homo sapiens
gccaaggaaactctc

SEQ ID NO: 1284169 - DNA, 15 bp, Homo sapiens
agccaaggaaactct

SEQ ID NO: 1284170 - DNA, 15 bp, Homo sapiens
tagccaaggaaactc

SEQ ID NO: 1284171 - DNA, 15 bp, Homo sapiens
gtagccaaggaaact

SEQ ID NO: 1284172 - DNA, 15 bp, Homo sapiens
ggtagccaaggaaac

SEQ ID NO: 1284173 - DNA, 15 bp, Homo sapiens
gggtagccaaggaaa

SEQ ID NO: 1284174 - DNA, 15 bp, Homo sapiens
agggtagccaaggaa

SEQ ID NO: 1284175 - DNA, 15 bp, Homo sapiens
cagggtagccaagga

SEQ ID NO: 1284176 - DNA, 15 bp, Homo sapiens
tcagggtagccaagg

SEQ ID NO: 1284177 - DNA, 15 bp, Homo sapiens
atcagggtagccaag

SEQ ID NO: 1284178 - DNA, 15 bp, Homo sapiens
aatcagggtagccaa

SEQ ID NO: 1284179 - DNA, 15 bp, Homo sapiens
taatcagggtagcca

SEQ ID NO: 1284180 - DNA, 15 bp, Homo sapiens
ttaatcagggtagcc

SEQ ID NO: 1284181 - DNA, 15 bp, Homo sapiens
gttaatcagggtagc

SEQ ID NO: 1284182 - DNA, 15 bp, Homo sapiens
cgttaatcagggtag

SEQ ID NO: 1284183 - DNA, 15 bp, Homo sapiens
ccgttaatcagggta

SEQ ID NO: 1284184 - DNA, 15 bp, Homo sapiens
gccgttaatcagggt

SEQ ID NO: 1284185 - DNA, 15 bp, Homo sapiens
ggccgttaatcaggg

SEQ ID NO: 1284186 - DNA, 15 bp, Homo sapiens
gggccgttaatcagg

SEQ ID NO: 1284187 - DNA, 15 bp, Homo sapiens
ggggccgttaatcag

SEQ ID NO: 1284188 - DNA, 15 bp, Homo sapiens
aggggccgttaatca

SEQ ID NO: 1284189 - DNA, 15 bp, Homo sapiens
gaggggccgttaatc

SEQ ID NO: 1284190 - DNA, 15 bp, Homo sapiens
agaggggccgttaat

SEQ ID NO: 1284191 - DNA, 15 bp, Homo sapiens
aagaggggccgttaa

SEQ ID NO: 1284192 - DNA, 15 bp, Homo sapiens
gaagaggggccgtta

SEQ ID NO: 1284193 - DNA, 15 bp, Homo sapiens
ggaagaggggccgtt

SEQ ID NO: 1284194 - DNA, 15 bp, Homo sapiens
aggaagaggggccgt

SEQ ID NO: 1284195 - DNA, 15 bp, Homo sapiens
caggaagaggggccg

SEQ ID NO: 1284196 - DNA, 15 bp, Homo sapiens
gcaggaagaggggcc

SEQ ID NO: 1284197 - DNA, 15 bp, Homo sapiens
ggcaggaagaggggc

SEQ ID NO: 1284198 - DNA, 15 bp, Homo sapiens
aggcaggaagagggg

SEQ ID NO: 1284199 - DNA, 15 bp, Homo sapiens
gaggcaggaagaggg

SEQ ID NO: 1284200 - DNA, 15 bp, Homo sapiens
ggaggcaggaagagg

SEQ ID NO: 1284201 - DNA, 15 bp, Homo sapiens
gggaggcaggaagag

SEQ ID NO: 1284202 - DNA, 15 bp, Homo sapiens
agggaggcaggaaga

SEQ ID NO: 1284203 - DNA, 15 bp, Homo sapiens
aagggaggcaggaag

SEQ ID NO: 1284204 - DNA, 15 bp, Homo sapiens
gaagggaggcaggaa

SEQ ID NO: 1284205 - DNA, 15 bp, Homo sapiens
ggaagggaggcagga

SEQ ID NO: 1284206 - DNA, 15 bp, Homo sapiens
gggaagggaggcagg

SEQ ID NO: 1284207 - DNA, 15 bp, Homo sapiens
agggaagggaggcag

SEQ ID NO: 1284208 - DNA, 15 bp, Homo sapiens
tagggaagggaggca

SEQ ID NO: 1284209 - DNA, 15 bp, Homo sapiens
atagggaagggaggc

SEQ ID NO: 1284210 - DNA, 15 bp, Homo sapiens
aatagggaagggagg

SEQ ID NO: 1284211 - DNA, 15 bp, Homo sapiens
aaatagggaagggag

SEQ ID NO: 1284212 - DNA, 15 bp, Homo sapiens
aaaatagggaaggga

SEQ ID NO: 1284213 - DNA, 15 bp, Homo sapiens
taaaatagggaaggg

SEQ ID NO: 1284214 - DNA, 15 bp, Homo sapiens
ataaaatagggaagg

SEQ ID NO: 1284215 - DNA, 15 bp, Homo sapiens
aataaaatagggaag

SEQ ID NO: 1284216 - DNA, 15 bp, Homo sapiens
taataaaatagggaa

SEQ ID NO: 1284217 - DNA, 15 bp, Homo sapiens
ataataaaataggga

SEQ ID NO: 1284218 - DNA, 15 bp, Homo sapiens
aataataaaataggg

SEQ ID NO: 1284219 - DNA, 15 bp, Homo sapiens
aaataataaaatagg

SEQ ID NO: 1284220 - DNA, 15 bp, Homo sapiens
aaaataataaaatag

SEQ ID NO: 1284221 - DNA, 15 bp, Homo sapiens
gaaaataataaaata

SEQ ID NO: 1284222 - DNA, 15 bp, Homo sapiens
agaaaataataaaat

SEQ ID NO: 1284223 - DNA, 15 bp, Homo sapiens
cagagaaaataataa

SEQ ID NO: 1284224 - DNA, 15 bp, Homo sapiens
ccagagaaaataata

SEQ ID NO: 1284225 - DNA, 15 bp, Homo sapiens
cccagagaaaataat

SEQ ID NO: 1284226 - DNA, 15 bp, Homo sapiens
ccccagagaaaataa

SEQ ID NO: 1284227 - DNA, 15 bp, Homo sapiens
gccccagagaaaata

SEQ ID NO: 1284228 - DNA, 15 bp, Homo sapiens
tgccccagagaaaat

SEQ ID NO: 1284229 - DNA, 15 bp, Homo sapiens
atgccccagagaaaa

SEQ ID NO: 1284230 - DNA, 15 bp, Homo sapiens
aatgccccagagaaa

SEQ ID NO: 1284231 - DNA, 15 bp, Homo sapiens
aaatgccccagagaa

SEQ ID NO: 1284232 - DNA, 15 bp, Homo sapiens
caaatgccccagaga

SEQ ID NO: 1284233 - DNA, 15 bp, Homo sapiens
acaaatgccccagag

SEQ ID NO: 1284234 - DNA, 15 bp, Homo sapiens
gacaaatgccccaga

SEQ ID NO: 1284235 - DNA, 15 bp, Homo sapiens
tgacaaatgccccag

SEQ ID NO: 1284236 - DNA, 15 bp, Homo sapiens
gtgacaaatgcccca

SEQ ID NO: 1284237 - DNA, 15 bp, Homo sapiens
ggtgacaaatgcccc

SEQ ID NO: 1284238 - DNA, 15 bp, Homo sapiens
tggtgacaaatgccc

SEQ ID NO: 1284239 - DNA, 15 bp, Homo sapiens
atggtgacaaatgcc

SEQ ID NO: 1284240 - DNA, 15 bp, Homo sapiens
gatggtgacaaatgc

SEQ ID NO: 1284241 - DNA, 15 bp, Homo sapiens
agatggtgacaaatg

SEQ ID NO: 1284242 - DNA, 15 bp, Homo sapiens
aagatggtgacaaat

SEQ ID NO: 1284243 - DNA, 15 bp, Homo sapiens
taagatggtgacaaa

SEQ ID NO: 1284244 - DNA, 15 bp, Homo sapiens
ataagatggtgacaa

SEQ ID NO: 1284245 - DNA, 15 bp, Homo sapiens
tataagatggtgaca

SEQ ID NO: 1284246 - DNA, 15 bp, Homo sapiens
atataagatggtgac

SEQ ID NO: 1284247 - DNA, 15 bp, Homo sapiens
aatataagatggtga

SEQ ID NO: 1284248 - DNA, 15 bp, Homo sapiens
aaatataagatggtg

SEQ ID NO: 1284249 - DNA, 15 bp, Homo sapiens
caaatataagatggt

SEQ ID NO: 1284250 - DNA, 15 bp, Homo sapiens
acaaatataagatgg

SEQ ID NO: 1284251 - DNA, 15 bp, Homo sapiens
gacaaatataagatg

SEQ ID NO: 1284252 - DNA, 15 bp, Homo sapiens
agacaaatataagat

SEQ ID NO: 1284253 - DNA, 15 bp, Homo sapiens
aagacaaatataaga

SEQ ID NO: 1284254 - DNA, 15 bp, Homo sapiens
taagacaaatataag

SEQ ID NO: 1284255 - DNA, 15 bp, Homo sapiens
ttaagacaaatataa

SEQ ID NO: 1284256 - DNA, 15 bp, Homo sapiens
gttaagacaaatata

SEQ ID NO: 1284257 - DNA, 15 bp, Homo sapiens
tgttaagacaaatat

SEQ ID NO: 1284258 - DNA, 15 bp, Homo sapiens
gtgttaagacaaata

SEQ ID NO: 1284259 - DNA, 15 bp, Homo sapiens
tgtgttaagacaaat

SEQ ID NO: 1284260 - DNA, 15 bp, Homo sapiens
gtgtgttaagacaaa

SEQ ID NO: 1284261 - DNA, 15 bp, Homo sapiens
ggtgtgttaagacaa

SEQ ID NO: 1284262 - DNA, 15 bp, Homo sapiens
aggtgtgttaagaca

SEQ ID NO: 1284263 - DNA, 15 bp, Homo sapiens
aaggtgtgttaagac

SEQ ID NO: 1284264 - DNA, 15 bp, Homo sapiens
taaggtgtgttaaga

SEQ ID NO: 1284265 - DNA, 15 bp, Homo sapiens
ataaggtgtgttaag

SEQ ID NO: 1284266 - DNA, 15 bp, Homo sapiens
tataaggtgtgttaa

SEQ ID NO: 1284267 - DNA, 15 bp, Homo sapiens
atataaggtgtgtta

SEQ ID NO: 1284268 - DNA, 15 bp, Homo sapiens
aatataaggtgtgtt

SEQ ID NO: 1284269 - DNA, 15 bp, Homo sapiens
aaatataaggtgtgt

SEQ ID NO: 1284270 - DNA, 15 bp, Homo sapiens
gaaatataaggtgtg

SEQ ID NO: 1284271 - DNA, 15 bp, Homo sapiens
agaaatataaggtgt

SEQ ID NO: 1284272 - DNA, 15 bp, Homo sapiens
gagaaatataaggtg

SEQ ID NO: 1284273 - DNA, 15 bp, Homo sapiens
agagaaatataaggt

SEQ ID NO: 1284274 - DNA, 15 bp, Homo sapiens
aagagaaatataagg

SEQ ID NO: 1284275 - DNA, 15 bp, Homo sapiens
taagagaaatataag

SEQ ID NO: 1284276 - DNA, 15 bp, Homo sapiens
ataagagaaatataa

SEQ ID NO: 1284277 - DNA, 15 bp, Homo sapiens
gataagagaaatata

SEQ ID NO: 1284278 - DNA, 15 bp, Homo sapiens
tgataagagaaatat

SEQ ID NO: 1284279 - DNA, 15 bp, Homo sapiens
ctgataagagaaata

SEQ ID NO: 1284280 - DNA, 15 bp, Homo sapiens
actgataagagaaat

SEQ ID NO: 1284281 - DNA, 15 bp, Homo sapiens
aactgataagagaaa

SEQ ID NO: 1284282 - DNA, 15 bp, Homo sapiens
aaactgataagagaa

SEQ ID NO: 1284283 - DNA, 15 bp, Homo sapiens
caaactgataagaga

SEQ ID NO: 1284284 - DNA, 15 bp, Homo sapiens
ccaaactgataagag

SEQ ID NO: 1284285 - DNA, 15 bp, Homo sapiens
gccaaactgataaga

SEQ ID NO: 1284286 - DNA, 15 bp, Homo sapiens
agccaaactgataag

SEQ ID NO: 1284287 - DNA, 15 bp, Homo sapiens
aagccaaactgataa

SEQ ID NO: 1284288 - DNA, 15 bp, Homo sapiens
taagccaaactgata

SEQ ID NO: 1284289 - DNA, 15 bp, Homo sapiens
ataagccaaactgat

SEQ ID NO: 1284290 - DNA, 15 bp, Homo sapiens
gataagccaaactga

SEQ ID NO: 1284291 - DNA, 15 bp, Homo sapiens
cgataagccaaactg

SEQ ID NO: 1284292 - DNA, 15 bp, Homo sapiens
gcgataagccaaact

SEQ ID NO: 1284293 - DNA, 15 bp, Homo sapiens
ggcgataagccaaac

SEQ ID NO: 1284294 - DNA, 15 bp, Homo sapiens
aggcgataagccaaa

SEQ ID NO: 1284295 - DNA, 15 bp, Homo sapiens
caggcgataagccaa

SEQ ID NO: 1284296 - DNA, 15 bp, Homo sapiens
acaggcgataagcca

SEQ ID NO: 1284297 - DNA, 15 bp, Homo sapiens
aacaggcgataagcc

SEQ ID NO: 1284298 - DNA, 15 bp, Homo sapiens
aaacaggcgataagc

SEQ ID NO: 1284299 - DNA, 15 bp, Homo sapiens
gaaacaggcgataag

SEQ ID NO: 1284300 - DNA, 15 bp, Homo sapiens
ggaaacaggcgataa

SEQ ID NO: 1284301 - DNA, 15 bp, Homo sapiens
aggaaacaggcgata

SEQ ID NO: 1284302 - DNA, 15 bp, Homo sapiens
gaggaaacaggcgat

SEQ ID NO: 1284303 - DNA, 15 bp, Homo sapiens
tgaggaaacaggcga

SEQ ID NO: 1284304 - DNA, 15 bp, Homo sapiens
ttgaggaaacaggcg

SEQ ID NO: 1284305 - DNA, 15 bp, Homo sapiens
gttgaggaaacaggc

SEQ ID NO: 1284306 - DNA, 15 bp, Homo sapiens
agttgaggaaacagg

SEQ ID NO: 1284307 - DNA, 15 bp, Homo sapiens
tagttgaggaaacag

SEQ ID NO: 1284308 - DNA, 15 bp, Homo sapiens
gtagttgaggaaaca

SEQ ID NO: 1284309 - DNA, 15 bp, Homo sapiens
tgtagttgaggaaac

SEQ ID NO: 1284310 - DNA, 15 bp, Homo sapiens
ttgtagttgaggaaa

SEQ ID NO: 1284311 - DNA, 15 bp, Homo sapiens
attgtagttgaggaa

SEQ ID NO: 1284312 - DNA, 15 bp, Homo sapiens
cattgtagttgagga

SEQ ID NO: 1284313 - DNA, 15 bp, Homo sapiens
acattgtagttgagg

SEQ ID NO: 1284314 - DNA, 15 bp, Homo sapiens
gacattgtagttgag

SEQ ID NO: 1284315 - DNA, 15 bp, Homo sapiens
agacattgtagttga

SEQ ID NO: 1284316 - DNA, 15 bp, Homo sapiens
cagacattgtagttg

SEQ ID NO: 1284317 - DNA, 15 bp, Homo sapiens
acagacattgtagtt

SEQ ID NO: 1284318 - DNA, 15 bp, Homo sapiens
aacagacattgtagt

SEQ ID NO: 1284319 - DNA, 15 bp, Homo sapiens
caacagacattgtag

SEQ ID NO: 1284320 - DNA, 15 bp, Homo sapiens
gcaacagacattgta

SEQ ID NO: 1284321 - DNA, 15 bp, Homo sapiens
tgcaacagacattgt

SEQ ID NO: 1284322 - DNA, 15 bp, Homo sapiens
atgcaacagacattg

SEQ ID NO: 1284323 - DNA, 15 bp, Homo sapiens
catgcaacagacatt

SEQ ID NO: 1284324 - DNA, 15 bp, Homo sapiens
ccatgcaacagacat

SEQ ID NO: 1284325 - DNA, 15 bp, Homo sapiens
tccatgcaacagaca

SEQ ID NO: 1284326 - DNA, 15 bp, Homo sapiens
ctccatgcaacagac

SEQ ID NO: 1284327 - DNA, 15 bp, Homo sapiens
cctccatgcaacaga

SEQ ID NO: 1284328 - DNA, 15 bp, Homo sapiens
gcctccatgcaacag

SEQ ID NO: 1284329 - DNA, 15 bp, Homo sapiens
tgcctccatgcaaca

SEQ ID NO: 1284330 - DNA, 15 bp, Homo sapiens
ctgcctccatgcaac

SEQ ID NO: 1284331 - DNA, 15 bp, Homo sapiens
actgcctccatgcaa

SEQ ID NO: 1284332 - DNA, 15 bp, Homo sapiens
tactgcctccatgca

SEQ ID NO: 1284333 - DNA, 15 bp, Homo sapiens
gtactgcctccatgc

SEQ ID NO: 1284334 - DNA, 15 bp, Homo sapiens
agtactgcctccatg

SEQ ID NO: 1284335 - DNA, 15 bp, Homo sapiens
aagtactgcctccat

SEQ ID NO: 1284336 - DNA, 15 bp, Homo sapiens
aaagtactgcctcca

SEQ ID NO: 1284337 - DNA, 15 bp, Homo sapiens
taaagtactgcctcc

SEQ ID NO: 1284338 - DNA, 15 bp, Homo sapiens
gtaaagtactgcctc

SEQ ID NO: 1284339 - DNA, 15 bp, Homo sapiens
ggtaaagtactgcct

SEQ ID NO: 1284340 - DNA, 15 bp, Homo sapiens
aggtaaagtactgcc

SEQ ID NO: 1284341 - DNA, 15 bp, Homo sapiens
caggtaaagtactgc

SEQ ID NO: 1284342 - DNA, 15 bp, Homo sapiens
acaggtaaagtactg

SEQ ID NO: 1284343 - DNA, 15 bp, Homo sapiens
cacaggtaaagtact

SEQ ID NO: 1284344 - DNA, 15 bp, Homo sapiens
acacaggtaaagtac

SEQ ID NO: 1284345 - DNA, 15 bp, Homo sapiens
aacacaggtaaagta

SEQ ID NO: 1284346 - DNA, 15 bp, Homo sapiens
aaacacaggtaaagt

SEQ ID NO: 1284347 - DNA, 15 bp, Homo sapiens
aaaacacaggtaaag

SEQ ID NO: 1284348 - DNA, 15 bp, Homo sapiens
aaaaacacaggtaaa

SEQ ID NO: 1284349 - DNA, 15 bp, Homo sapiens
gaaaaacacaggtaa

SEQ ID NO: 1284350 - DNA, 15 bp, Homo sapiens
tgaaaaacacaggta

SEQ ID NO: 1284351 - DNA, 15 bp, Homo sapiens
ctgaaaaacacaggt

SEQ ID NO: 1284352 - DNA, 15 bp, Homo sapiens
actgaaaaacacagg

SEQ ID NO: 1284353 - DNA, 15 bp, Homo sapiens
aactgaaaaacacag

SEQ ID NO: 1284354 - DNA, 15 bp, Homo sapiens
gaactgaaaaacaca

SEQ ID NO: 1284355 - DNA, 15 bp, Homo sapiens
agaactgaaaaacac

SEQ ID NO: 1284356 - DNA, 15 bp, Homo sapiens
tagaactgaaaaaca

SEQ ID NO: 1284357 - DNA, 15 bp, Homo sapiens
gtagaactgaaaaac

SEQ ID NO: 1284358 - DNA, 15 bp, Homo sapiens
tgtagaactgaaaaa

SEQ ID NO: 1284359 - DNA, 15 bp, Homo sapiens
gtgtagaactgaaaa

SEQ ID NO: 1284360 - DNA, 15 bp, Homo sapiens
ggtgtagaactgaaa

SEQ ID NO: 1284361 - DNA, 15 bp, Homo sapiens
gggtgtagaactgaa

SEQ ID NO: 1284362 - DNA, 15 bp, Homo sapiens
agggtgtagaactga

SEQ ID NO: 1284363 - DNA, 15 bp, Homo sapiens
tagggtgtagaactg

SEQ ID NO: 1284364 - DNA, 15 bp, Homo sapiens
ctagggtgtagaact

SEQ ID NO: 1284365 - DNA, 15 bp, Homo sapiens
cctagggtgtagaac

SEQ ID NO: 1284366 - DNA, 15 bp, Homo sapiens
tcctagggtgtagaa

SEQ ID NO: 1284367 - DNA, 15 bp, Homo sapiens
ttcctagggtgtaga

SEQ ID NO: 1284368 - DNA, 15 bp, Homo sapiens
attcctagggtgtag

SEQ ID NO: 1284369 - DNA, 15 bp, Homo sapiens
cattcctagggtgta

SEQ ID NO: 1284370 - DNA, 15 bp, Homo sapiens
acattcctagggtgt

SEQ ID NO: 1284371 - DNA, 15 bp, Homo sapiens
cacattcctagggtg

SEQ ID NO: 1284372 - DNA, 15 bp, Homo sapiens
gcacattcctagggt

SEQ ID NO: 1284373 - DNA, 15 bp, Homo sapiens
ggcacattcctaggg

SEQ ID NO: 1284374 - DNA, 15 bp, Homo sapiens
aggcacattcctagg

SEQ ID NO: 1284375 - DNA, 15 bp, Homo sapiens
caggcacattcctag

SEQ ID NO: 1284376 - DNA, 15 bp, Homo sapiens
ccaggcacattccta

SEQ ID NO: 1284377 - DNA, 15 bp, Homo sapiens
cccaggcacattcct

SEQ ID NO: 1284378 - DNA, 15 bp, Homo sapiens
tcccaggcacattcc

SEQ ID NO: 1284379 - DNA, 15 bp, Homo sapiens
ttcccaggcacattc

SEQ ID NO: 1284380 - DNA, 15 bp, Homo sapiens
tttcccaggcacatt

SEQ ID NO: 1284381 - DNA, 15 bp, Homo sapiens
atttcccaggcacat

SEQ ID NO: 1284382 - DNA, 15 bp, Homo sapiens
tatttcccaggcaca

SEQ ID NO: 1284383 - DNA, 15 bp, Homo sapiens
ctatttcccaggcac

SEQ ID NO: 1284384 - DNA, 15 bp, Homo sapiens
actatttcccaggca

SEQ ID NO: 1284385 - DNA, 15 bp, Homo sapiens
cactatttcccaggc

SEQ ID NO: 1284386 - DNA, 15 bp, Homo sapiens
ccactatttcccagg

SEQ ID NO: 1284387 - DNA, 15 bp, Homo sapiens
accactatttcccag

SEQ ID NO: 1284388 - DNA, 15 bp, Homo sapiens
caccactatttccca

SEQ ID NO: 1284389 - DNA, 15 bp, Homo sapiens
gcaccactatttccc

SEQ ID NO: 1284390 - DNA, 15 bp, Homo sapiens
agcaccactatttcc

SEQ ID NO: 1284391 - DNA, 15 bp, Homo sapiens
aagcaccactatttc

SEQ ID NO: 1284392 - DNA, 15 bp, Homo sapiens
caagcaccactattt

SEQ ID NO: 1284393 - DNA, 15 bp, Homo sapiens
tcaagcaccactatt

SEQ ID NO: 1284394 - DNA, 15 bp, Homo sapiens
atcaagcaccactat

SEQ ID NO: 1284395 - DNA, 15 bp, Homo sapiens
tatcaagcaccacta

SEQ ID NO: 1284396 - DNA, 15 bp, Homo sapiens
gtatcaagcaccact

SEQ ID NO: 1284397 - DNA, 15 bp, Homo sapiens
ggtatcaagcaccac

SEQ ID NO: 1284398 - DNA, 15 bp, Homo sapiens
aggtatcaagcacca

SEQ ID NO: 1284399 - DNA, 15 bp, Homo sapiens
gaggtatcaagcacc

SEQ ID NO: 1284400 - DNA, 15 bp, Homo sapiens
ggaggtatcaagcac

SEQ ID NO: 1284401 - DNA, 15 bp, Homo sapiens
aggaggtatcaagca

SEQ ID NO: 1284402 - DNA, 15 bp, Homo sapiens
aaggaggtatcaagc

SEQ ID NO: 1284403 - DNA, 15 bp, Homo sapiens
caaggaggtatcaag

SEQ ID NO: 1284404 - DNA, 15 bp, Homo sapiens
acaaggaggtatcaa

SEQ ID NO: 1284405 - DNA, 15 bp, Homo sapiens
aacaaggaggtatca

SEQ ID NO: 1284406 - DNA, 15 bp, Homo sapiens
caacaaggaggtatc

SEQ ID NO: 1284407 - DNA, 15 bp, Homo sapiens
tcaacaaggaggtat

SEQ ID NO: 1284408 - DNA, 15 bp, Homo sapiens
ttcaacaaggaggta

SEQ ID NO: 1284409 - DNA, 15 bp, Homo sapiens
attcaacaaggaggt

SEQ ID NO: 1284410 - DNA, 15 bp, Homo sapiens
cattcaacaaggagg

SEQ ID NO: 1284411 - DNA, 15 bp, Homo sapiens
ccattcaacaaggag

SEQ ID NO: 1284412 - DNA, 15 bp, Homo sapiens
cccattcaacaagga

SEQ ID NO: 1284413 - DNA, 15 bp, Homo sapiens
ccccattcaacaagg

SEQ ID NO: 1284414 - DNA, 15 bp, Homo sapiens
tccccattcaacaag

SEQ ID NO: 1284415 - DNA, 15 bp, Homo sapiens
ttccccattcaacaa

SEQ ID NO: 1284416 - DNA, 15 bp, Homo sapiens
tttccccattcaaca

SEQ ID NO: 1284417 - DNA, 15 bp, Homo sapiens
atttccccattcaac

SEQ ID NO: 1284418 - DNA, 15 bp, Homo sapiens
catttccccattcaa

SEQ ID NO: 1284419 - DNA, 15 bp, Homo sapiens
tcatttccccattca

SEQ ID NO: 1284420 - DNA, 15 bp, Homo sapiens
ttcatttccccattc

SEQ ID NO: 1284421 - DNA, 15 bp, Homo sapiens
gttcatttccccatt

SEQ ID NO: 1284422 - DNA, 15 bp, Homo sapiens
tgttcatttccccat

SEQ ID NO: 1284423 - DNA, 15 bp, Homo sapiens
ttgttcatttcccca

SEQ ID NO: 1284424 - DNA, 15 bp, Homo sapiens
tttgttcatttcccc

SEQ ID NO: 1284425 - DNA, 15 bp, Homo sapiens
atttgttcatttccc

SEQ ID NO: 1284426 - DNA, 15 bp, Homo sapiens
catttgttcatttcc

SEQ ID NO: 1284427 - DNA, 15 bp, Homo sapiens
gcatttgttcatttc

SEQ ID NO: 1284428 - DNA, 15 bp, Homo sapiens
tgcatttgttcattt

SEQ ID NO: 1284429 - DNA, 15 bp, Homo sapiens
atgcatttgttcatt

SEQ ID NO: 1284430 - DNA, 15 bp, Homo sapiens
catgcatttgttcat

SEQ ID NO: 1284431 - DNA, 15 bp, Homo sapiens
ccatgcatttgttca

SEQ ID NO: 1284432 - DNA, 15 bp, Homo sapiens
tccatgcatttgttc

SEQ ID NO: 1284433 - DNA, 15 bp, Homo sapiens
gtccatgcatttgtt

SEQ ID NO: 1284434 - DNA, 15 bp, Homo sapiens
agtccatgcatttgt

SEQ ID NO: 1284435 - DNA, 15 bp, Homo sapiens
gagtccatgcatttg

SEQ ID NO: 1284436 - DNA, 15 bp, Homo sapiens
tgagtccatgcattt

SEQ ID NO: 1284437 - DNA, 15 bp, Homo sapiens
ctgagtccatgcatt

SEQ ID NO: 1284438 - DNA, 15 bp, Homo sapiens
gctgagtccatgcat

SEQ ID NO: 1284439 - DNA, 15 bp, Homo sapiens
tgctgagtccatgca

SEQ ID NO: 1284440 - DNA, 15 bp, Homo sapiens
ttgctgagtccatgc

SEQ ID NO: 1284441 - DNA, 15 bp, Homo sapiens
cttgctgagtccatg

SEQ ID NO: 1284442 - DNA, 15 bp, Homo sapiens
gcttgctgagtccat

SEQ ID NO: 1284443 - DNA, 15 bp, Homo sapiens
tgcttgctgagtcca

SEQ ID NO: 1284444 - DNA, 15 bp, Homo sapiens
ttgcttgctgagtcc

SEQ ID NO: 1284445 - DNA, 15 bp, Homo sapiens
cttgcttgctgagtc

SEQ ID NO: 1284446 - DNA, 15 bp, Homo sapiens
ccttgcttgctgagt

SEQ ID NO: 1284447 - DNA, 15 bp, Homo sapiens
gccttgcttgctgag

SEQ ID NO: 1284448 - DNA, 15 bp, Homo sapiens
tgccttgcttgctga

SEQ ID NO: 1284449 - DNA, 15 bp, Homo sapiens
ctgccttgcttgctg

SEQ ID NO: 1284450 - DNA, 15 bp, Homo sapiens
tctgccttgcttgct

SEQ ID NO: 1284451 - DNA, 15 bp, Homo sapiens
gtctgccttgcttgc

SEQ ID NO: 1284452 - DNA, 15 bp, Homo sapiens
cgtctgccttgcttg

SEQ ID NO: 1284453 - DNA, 15 bp, Homo sapiens
ccgtctgccttgctt

SEQ ID NO: 1284454 - DNA, 15 bp, Homo sapiens
accgtctgccttgct

SEQ ID NO: 1284455 - DNA, 15 bp, Homo sapiens
caccgtctgccttgc

SEQ ID NO: 1284456 - DNA, 15 bp, Homo sapiens
ccaccgtctgccttg

SEQ ID NO: 1284457 - DNA, 15 bp, Homo sapiens
cccaccgtctgcctt

SEQ ID NO: 1284458 - DNA, 15 bp, Homo sapiens
tcccaccgtctgcct

SEQ ID NO: 1284459 - DNA, 15 bp, Homo sapiens
ctcccaccgtctgcc

SEQ ID NO: 1284460 - DNA, 15 bp, Homo sapiens
cctcccaccgtctgc

SEQ ID NO: 1284461 - DNA, 15 bp, Homo sapiens
tcctcccaccgtctg

SEQ ID NO: 1284462 - DNA, 15 bp, Homo sapiens
ctcctcccaccgtct

SEQ ID NO: 1284463 - DNA, 15 bp, Homo sapiens
tctcctcccaccgtc

SEQ ID NO: 1284464 - DNA, 15 bp, Homo sapiens
atctcctcccaccgt

SEQ ID NO: 1284465 - DNA, 15 bp, Homo sapiens
catctcctcccaccg

SEQ ID NO: 1284466 - DNA, 15 bp, Homo sapiens
acatctcctcccacc

SEQ ID NO: 1284467 - DNA, 15 bp, Homo sapiens
cacatctcctcccac

SEQ ID NO: 1284468 - DNA, 15 bp, Homo sapiens
tcacatctcctccca

SEQ ID NO: 1284469 - DNA, 15 bp, Homo sapiens
gtcacatctcctccc

SEQ ID NO: 1284470 - DNA, 15 bp, Homo sapiens
ggtcacatctcctcc

SEQ ID NO: 1284471 - DNA, 15 bp, Homo sapiens
tggtcacatctcctc

SEQ ID NO: 1284472 - DNA, 15 bp, Homo sapiens
ctggtcacatctcct

SEQ ID NO: 1284473 - DNA, 15 bp, Homo sapiens
cctggtcacatctcc

SEQ ID NO: 1284474 - DNA, 15 bp, Homo sapiens
tcctggtcacatctc

SEQ ID NO: 1284475 - DNA, 15 bp, Homo sapiens
ttcctggtcacatct

SEQ ID NO: 1284476 - DNA, 15 bp, Homo sapiens
cttcctggtcacatc

SEQ ID NO: 1284477 - DNA, 15 bp, Homo sapiens
tcttcctggtcacat

SEQ ID NO: 1284478 - DNA, 15 bp, Homo sapiens
atcttcctggtcaca

SEQ ID NO: 1284479 - DNA, 15 bp, Homo sapiens
catcttcctggtcac

SEQ ID NO: 1284480 - DNA, 15 bp, Homo sapiens
ccatcttcctggtca

SEQ ID NO: 1284481 - DNA, 15 bp, Homo sapiens
cccatcttcctggtc

SEQ ID NO: 1284482 - DNA, 15 bp, Homo sapiens
gcccatcttcctggt

SEQ ID NO: 1284483 - DNA, 15 bp, Homo sapiens
tcctgcccatcttcc

SEQ ID NO: 1284484 - DNA, 15 bp, Homo sapiens
ctcctgcccatcttc

SEQ ID NO: 1284485 - DNA, 15 bp, Homo sapiens
actcctgcccatctt

SEQ ID NO: 1284486 - DNA, 15 bp, Homo sapiens
gactcctgcccatct

SEQ ID NO: 1284487 - DNA, 15 bp, Homo sapiens
cgactcctgcccatc

SEQ ID NO: 1284488 - DNA, 15 bp, Homo sapiens
ccgactcctgcccat

SEQ ID NO: 1284489 - DNA, 15 bp, Homo sapiens
tccgactcctgccca

SEQ ID NO: 1284490 - DNA, 15 bp, Homo sapiens
ctccgactcctgccc

SEQ ID NO: 1284491 - DNA, 15 bp, Homo sapiens
cctccgactcctgcc

SEQ ID NO: 1284492 - DNA, 15 bp, Homo sapiens
ccctccgactcctgc

SEQ ID NO: 1284493 - DNA, 15 bp, Homo sapiens
cccctccgactcctg

SEQ ID NO: 1284494 - DNA, 15 bp, Homo sapiens
ccccctccgactcct

SEQ ID NO: 1284495 - DNA, 15 bp, Homo sapiens
tccccctccgactcc

SEQ ID NO: 1284496 - DNA, 15 bp, Homo sapiens
ctccccctccgactc

SEQ ID NO: 1284497 - DNA, 15 bp, Homo sapiens
tctccccctccgact

SEQ ID NO: 1284498 - DNA, 15 bp, Homo sapiens
ctctccccctccgac

SEQ ID NO: 1284499 - DNA, 15 bp, Homo sapiens
cctctccccctccga

SEQ ID NO: 1284500 - DNA, 15 bp, Homo sapiens
gcctctccccctccg

SEQ ID NO: 1284501 - DNA, 15 bp, Homo sapiens
agcctctccccctcc

SEQ ID NO: 1284502 - DNA, 15 bp, Homo sapiens
cagcctctccccctc

SEQ ID NO: 1284503 - DNA, 15 bp, Homo sapiens
tcagcctctccccct

SEQ ID NO: 1284504 - DNA, 15 bp, Homo sapiens
ctcagcctctccccc

SEQ ID NO: 1284505 - DNA, 15 bp, Homo sapiens
tctcagcctctcccc

SEQ ID NO: 1284506 - DNA, 15 bp, Homo sapiens
ttctcagcctctccc

SEQ ID NO: 1284507 - DNA, 15 bp, Homo sapiens
gttctcagcctctcc

SEQ ID NO: 1284508 - DNA, 15 bp, Homo sapiens
tgttctcagcctctc

SEQ ID NO: 1284509 - DNA, 15 bp, Homo sapiens
gtgttctcagcctct

SEQ ID NO: 1284510 - DNA, 15 bp, Homo sapiens
cgtgttctcagcctc

SEQ ID NO: 1284511 - DNA, 15 bp, Homo sapiens
ccgtgttctcagcct

SEQ ID NO: 1284512 - DNA, 15 bp, Homo sapiens
cccgtgttctcagcc

SEQ ID NO: 1284513 - DNA, 15 bp, Homo sapiens
gcccgtgttctcagc

SEQ ID NO: 1284514 - DNA, 15 bp, Homo sapiens
ggcccgtgttctcag

SEQ ID NO: 1284515 - DNA, 15 bp, Homo sapiens
gggcccgtgttctca

SEQ ID NO: 1284516 - DNA, 15 bp, Homo sapiens
agggcccgtgttctc

SEQ ID NO: 1284517 - DNA, 15 bp, Homo sapiens
aagggcccgtgttct

SEQ ID NO: 1284518 - DNA, 15 bp, Homo sapiens
gaagggcccgtgttc

SEQ ID NO: 1284519 - DNA, 15 bp, Homo sapiens
tgaagggcccgtgtt

SEQ ID NO: 1284520 - DNA, 15 bp, Homo sapiens
ctgaagggcccgtgt

SEQ ID NO: 1284521 - DNA, 15 bp, Homo sapiens
actgaagggcccgtg

SEQ ID NO: 1284522 - DNA, 15 bp, Homo sapiens
cactgaagggcccgt

SEQ ID NO: 1284523 - DNA, 15 bp, Homo sapiens
acactgaagggcccg

SEQ ID NO: 1284524 - DNA, 15 bp, Homo sapiens
gacactgaagggccc

SEQ ID NO: 1284525 - DNA, 15 bp, Homo sapiens
agacactgaagggcc

SEQ ID NO: 1284526 - DNA, 15 bp, Homo sapiens
cagacactgaagggc

SEQ ID NO: 1284527 - DNA, 15 bp, Homo sapiens
acagacactgaaggg

SEQ ID NO: 1284528 - DNA, 15 bp, Homo sapiens
cacagacactgaagg

SEQ ID NO: 1284529 - DNA, 15 bp, Homo sapiens
acacagacactgaag

SEQ ID NO: 1284530 - DNA, 15 bp, Homo sapiens
gacacagacactgaa

SEQ ID NO: 1284531 - DNA, 15 bp, Homo sapiens
ggacacagacactga

SEQ ID NO: 1284532 - DNA, 15 bp, Homo sapiens
aggacacagacactg

SEQ ID NO: 1284533 - DNA, 15 bp, Homo sapiens
aaggacacagacact

SEQ ID NO: 1284534 - DNA, 15 bp, Homo sapiens
caaggacacagacac

SEQ ID NO: 1284535 - DNA, 15 bp, Homo sapiens
acaaggacacagaca

SEQ ID NO: 1284536 - DNA, 15 bp, Homo sapiens
gacaaggacacagac

SEQ ID NO: 1284537 - DNA, 15 bp, Homo sapiens
agacaaggacacaga

SEQ ID NO: 1284538 - DNA, 15 bp, Homo sapiens
gagacaaggacacag

SEQ ID NO: 1284539 - DNA, 15 bp, Homo sapiens
tgagacaaggacaca

SEQ ID NO: 1284540 - DNA, 15 bp, Homo sapiens
gtgagacaaggacac

SEQ ID NO: 1284541 - DNA, 15 bp, Homo sapiens
agtgagacaaggaca

SEQ ID NO: 1284542 - DNA, 15 bp, Homo sapiens
cagtgagacaaggac

SEQ ID NO: 1284543 - DNA, 15 bp, Homo sapiens
gcagtgagacaagga

SEQ ID NO: 1284544 - DNA, 15 bp, Homo sapiens
agcagtgagacaagg

SEQ ID NO: 1284545 - DNA, 15 bp, Homo sapiens
cagcagtgagacaag

SEQ ID NO: 1284546 - DNA, 15 bp, Homo sapiens
gcagcagtgagacaa

SEQ ID NO: 1284547 - DNA, 15 bp, Homo sapiens
agcagcagtgagaca

SEQ ID NO: 1284548 - DNA, 15 bp, Homo sapiens
cagcagcagtgagac

SEQ ID NO: 1284549 - DNA, 15 bp, Homo sapiens
ccagcagcagtgaga

SEQ ID NO: 1284550 - DNA, 15 bp, Homo sapiens
cccagcagcagtgag

SEQ ID NO: 1284551 - DNA, 15 bp, Homo sapiens
tcccagcagcagtga

SEQ ID NO: 1284552 - DNA, 15 bp, Homo sapiens
ctcccagcagcagtg

SEQ ID NO: 1284553 - DNA, 15 bp, Homo sapiens
cctcccagcagcagt

SEQ ID NO: 1284554 - DNA, 15 bp, Homo sapiens
ccctcccagcagcag

SEQ ID NO: 1284555 - DNA, 15 bp, Homo sapiens
cccctcccagcagca

SEQ ID NO: 1284556 - DNA, 15 bp, Homo sapiens
gcccctcccagcagc

SEQ ID NO: 1284557 - DNA, 15 bp, Homo sapiens
agcccctcccagcag

SEQ ID NO: 1284558 - DNA, 15 bp, Homo sapiens
cagcccctcccagca

SEQ ID NO: 1284559 - DNA, 15 bp, Homo sapiens
ccagcccctcccagc

SEQ ID NO: 1284560 - DNA, 15 bp, Homo sapiens
gccagcccctcccag

SEQ ID NO: 1284561 - DNA, 15 bp, Homo sapiens
tgccagcccctccca

SEQ ID NO: 1284562 - DNA, 15 bp, Homo sapiens
ctgccagcccctccc

SEQ ID NO: 1284563 - DNA, 15 bp, Homo sapiens
tctgccagcccctcc

SEQ ID NO: 1284564 - DNA, 15 bp, Homo sapiens
ttctgccagcccctc

SEQ ID NO: 1284565 - DNA, 15 bp, Homo sapiens
tttctgccagcccct

SEQ ID NO: 1284566 - DNA, 15 bp, Homo sapiens
gtttctgccagcccc

SEQ ID NO: 1284567 - DNA, 15 bp, Homo sapiens
agtttctgccagccc

SEQ ID NO: 1284568 - DNA, 15 bp, Homo sapiens
cagtttctgccagcc

SEQ ID NO: 1284569 - DNA, 15 bp, Homo sapiens
ccagtttctgccagc

SEQ ID NO: 1284570 - DNA, 15 bp, Homo sapiens
gccagtttctgccag

SEQ ID NO: 1284571 - DNA, 15 bp, Homo sapiens
ggccagtttctgcca

SEQ ID NO: 1284572 - DNA, 15 bp, Homo sapiens
aggccagtttctgcc

SEQ ID NO: 1284573 - DNA, 15 bp, Homo sapiens
aaggccagtttctgc

SEQ ID NO: 1284574 - DNA, 15 bp, Homo sapiens
gaaggccagtttctg

SEQ ID NO: 1284575 - DNA, 15 bp, Homo sapiens
agaaggccagtttct

SEQ ID NO: 1284576 - DNA, 15 bp, Homo sapiens
aagaaggccagtttc

SEQ ID NO: 1284577 - DNA, 15 bp, Homo sapiens
caagaaggccagttt

SEQ ID NO: 1284578 - DNA, 15 bp, Homo sapiens
gcaagaaggccagtt

SEQ ID NO: 1284579 - DNA, 15 bp, Homo sapiens
ggcaagaaggccagt

SEQ ID NO: 1284580 - DNA, 15 bp, Homo sapiens
gggcaagaaggccag

SEQ ID NO: 1284581 - DNA, 15 bp, Homo sapiens
ggggcaagaaggcca

SEQ ID NO: 1284582 - DNA, 15 bp, Homo sapiens
tggggcaagaaggcc

SEQ ID NO: 1284583 - DNA, 15 bp, Homo sapiens
atggggcaagaaggc

SEQ ID NO: 1284584 - DNA, 15 bp, Homo sapiens
catggggcaagaagg

SEQ ID NO: 1284585 - DNA, 15 bp, Homo sapiens
tcatggggcaagaag

SEQ ID NO: 1284586 - DNA, 15 bp, Homo sapiens
ctcatggggcaagaa

SEQ ID NO: 1284587 - DNA, 15 bp, Homo sapiens
gctcatggggcaaga

SEQ ID NO: 1284588 - DNA, 15 bp, Homo sapiens
ggctcatggggcaag

SEQ ID NO: 1284589 - DNA, 15 bp, Homo sapiens
gggctcatggggcaa

SEQ ID NO: 1284590 - DNA, 15 bp, Homo sapiens
ggggctcatggggca

SEQ ID NO: 1284591 - DNA, 15 bp, Homo sapiens
tggggctcatggggc

SEQ ID NO: 1284592 - DNA, 15 bp, Homo sapiens
ttggggctcatgggg

SEQ ID NO: 1284593 - DNA, 15 bp, Homo sapiens
gttggggctcatggg

SEQ ID NO: 1284594 - DNA, 15 bp, Homo sapiens
agttggggctcatgg

SEQ ID NO: 1284595 - DNA, 15 bp, Homo sapiens
gagttggggctcatg

SEQ ID NO: 1284596 - DNA, 15 bp, Homo sapiens
tgagttggggctcat

SEQ ID NO: 1284597 - DNA, 15 bp, Homo sapiens
ctgagttggggctca

SEQ ID NO: 1284598 - DNA, 15 bp, Homo sapiens
gctgagttggggctc

SEQ ID NO: 1284599 - DNA, 15 bp, Homo sapiens
tgctgagttggggct

SEQ ID NO: 1284600 - DNA, 15 bp, Homo sapiens
ctgctgagttggggc

SEQ ID NO: 1284601 - DNA, 15 bp, Homo sapiens
tctgctgagttgggg

SEQ ID NO: 1284602 - DNA, 15 bp, Homo sapiens
ttctgctgagttggg

SEQ ID NO: 1284603 - DNA, 15 bp, Homo sapiens
gttctgctgagttgg

SEQ ID NO: 1284604 - DNA, 15 bp, Homo sapiens
ggttctgctgagttg

SEQ ID NO: 1284605 - DNA, 15 bp, Homo sapiens
tggttctgctgagtt

SEQ ID NO: 1284606 - DNA, 15 bp, Homo sapiens
gtggttctgctgagt

SEQ ID NO: 1284607 - DNA, 15 bp, Homo sapiens
ggtggttctgctgag

SEQ ID NO: 1284608 - DNA, 15 bp, Homo sapiens
gggtggttctgctga

SEQ ID NO: 1284609 - DNA, 15 bp, Homo sapiens
tgggtggttctgctg

SEQ ID NO: 1284610 - DNA, 15 bp, Homo sapiens
ctgggtggttctgct

SEQ ID NO: 1284611 - DNA, 15 bp, Homo sapiens
gctgggtggttctgc

SEQ ID NO: 1284612 - DNA, 15 bp, Homo sapiens
tgctgggtggttctg

SEQ ID NO: 1284613 - DNA, 15 bp, Homo sapiens
ctgctgggtggttct

SEQ ID NO: 1284614 - DNA, 15 bp, Homo sapiens
cctgctgggtggttc

SEQ ID NO: 1284615 - DNA, 15 bp, Homo sapiens
acctgctgggtggtt

SEQ ID NO: 1284616 - DNA, 15 bp, Homo sapiens
gacctgctgggtggt

SEQ ID NO: 1284617 - DNA, 15 bp, Homo sapiens
agacctgctgggtgg

SEQ ID NO: 1284618 - DNA, 15 bp, Homo sapiens
aagacctgctgggtg

SEQ ID NO: 1284619 - DNA, 15 bp, Homo sapiens
taagacctgctgggt

SEQ ID NO: 1284620 - DNA, 15 bp, Homo sapiens
ctaagacctgctggg

SEQ ID NO: 1284621 - DNA, 15 bp, Homo sapiens
gctaagacctgctgg

SEQ ID NO: 1284622 - DNA, 15 bp, Homo sapiens
tgctaagacctgctg

SEQ ID NO: 1284623 - DNA, 15 bp, Homo sapiens
atgctaagacctgct

SEQ ID NO: 1284624 - DNA, 15 bp, Homo sapiens
gatgctaagacctgc

SEQ ID NO: 1284625 - DNA, 15 bp, Homo sapiens
ggatgctaagacctg

SEQ ID NO: 1284626 - DNA, 15 bp, Homo sapiens
gggatgctaagacct

SEQ ID NO: 1284627 - DNA, 15 bp, Homo sapiens
ggggatgctaagacc

SEQ ID NO: 1284628 - DNA, 15 bp, Homo sapiens
tggggatgctaagac

SEQ ID NO: 1284629 - DNA, 15 bp, Homo sapiens
ctggggatgctaaga

SEQ ID NO: 1284630 - DNA, 15 bp, Homo sapiens
gctggggatgctaag

SEQ ID NO: 1284631 - DNA, 15 bp, Homo sapiens
ggctggggatgctaa

SEQ ID NO: 1284632 - DNA, 15 bp, Homo sapiens
aggctggggatgcta

SEQ ID NO: 1284633 - DNA, 15 bp, Homo sapiens
caggctggggatgct

SEQ ID NO: 1284634 - DNA, 15 bp, Homo sapiens
ccaggctggggatgc

SEQ ID NO: 1284635 - DNA, 15 bp, Homo sapiens
gccaggctggggatg

SEQ ID NO: 1284636 - DNA, 15 bp, Homo sapiens
agccaggctggggat

SEQ ID NO: 1284637 - DNA, 15 bp, Homo sapiens
cagccaggctgggga

SEQ ID NO: 1284638 - DNA, 15 bp, Homo sapiens
gcagccaggctgggg

SEQ ID NO: 1284639 - DNA, 15 bp, Homo sapiens
agcagccaggctggg

SEQ ID NO: 1284640 - DNA, 15 bp, Homo sapiens
gagcagccaggctgg

SEQ ID NO: 1284641 - DNA, 15 bp, Homo sapiens
ggagcagccaggctg

SEQ ID NO: 1284642 - DNA, 15 bp, Homo sapiens
gggagcagccaggct

SEQ ID NO: 1284643 - DNA, 15 bp, Homo sapiens
tgggagcagccaggc

SEQ ID NO: 1284644 - DNA, 15 bp, Homo sapiens
ctgggagcagccagg

SEQ ID NO: 1284645 - DNA, 15 bp, Homo sapiens
actgggagcagccag

SEQ ID NO: 1284646 - DNA, 15 bp, Homo sapiens
cactgggagcagcca

SEQ ID NO: 1284647 - DNA, 15 bp, Homo sapiens
ccactgggagcagcc

SEQ ID NO: 1284648 - DNA, 15 bp, Homo sapiens
tccactgggagcagc

SEQ ID NO: 1284649 - DNA, 15 bp, Homo sapiens
atccactgggagcag

SEQ ID NO: 1284650 - DNA, 15 bp, Homo sapiens
catccactgggagca

SEQ ID NO: 1284651 - DNA, 15 bp, Homo sapiens
gcatccactgggagc

SEQ ID NO: 1284652 - DNA, 15 bp, Homo sapiens
tgcatccactgggag

SEQ ID NO: 1284653 - DNA, 15 bp, Homo sapiens
ttgcatccactggga

SEQ ID NO: 1284654 - DNA, 15 bp, Homo sapiens
attgcatccactggg

SEQ ID NO: 1284655 - DNA, 15 bp, Homo sapiens
cattgcatccactgg

SEQ ID NO: 1284656 - DNA, 15 bp, Homo sapiens
gcattgcatccactg

SEQ ID NO: 1284657 - DNA, 15 bp, Homo sapiens
agcattgcatccact

SEQ ID NO: 1284658 - DNA, 15 bp, Homo sapiens
gagcattgcatccac

SEQ ID NO: 1284659 - DNA, 15 bp, Homo sapiens
tgagcattgcatcca

SEQ ID NO: 1284660 - DNA, 15 bp, Homo sapiens
atgagcattgcatcc

SEQ ID NO: 1284661 - DNA, 15 bp, Homo sapiens
aatgagcattgcatc

SEQ ID NO: 1284662 - DNA, 15 bp, Homo sapiens
taatgagcattgcat

SEQ ID NO: 1284663 - DNA, 15 bp, Homo sapiens
ttaatgagcattgca

SEQ ID NO: 1284664 - DNA, 15 bp, Homo sapiens
gttaatgagcattgc

SEQ ID NO: 1284665 - DNA, 15 bp, Homo sapiens
ggttaatgagcattg

SEQ ID NO: 1284666 - DNA, 15 bp, Homo sapiens
tggttaatgagcatt

SEQ ID NO: 1284667 - DNA, 15 bp, Homo sapiens
atggttaatgagcat

SEQ ID NO: 1284668 - DNA, 15 bp, Homo sapiens
catggttaatgagca

SEQ ID NO: 1284669 - DNA, 15 bp, Homo sapiens
ccatggttaatgagc

SEQ ID NO: 1284670 - DNA, 15 bp, Homo sapiens
tccatggttaatgag

SEQ ID NO: 1284671 - DNA, 15 bp, Homo sapiens
ctccatggttaatga

SEQ ID NO: 1284672 - DNA, 15 bp, Homo sapiens
gctccatggttaatg

SEQ ID NO: 1284673 - DNA, 15 bp, Homo sapiens
agctccatggttaat

SEQ ID NO: 1284674 - DNA, 15 bp, Homo sapiens
cagctccatggttaa

SEQ ID NO: 1284675 - DNA, 15 bp, Homo sapiens
ccagctccatggtta

SEQ ID NO: 1284676 - DNA, 15 bp, Homo sapiens
accagctccatggtt

SEQ ID NO: 1284677 - DNA, 15 bp, Homo sapiens
taccagctccatggt

SEQ ID NO: 1284678 - DNA, 15 bp, Homo sapiens
ttaccagctccatgg

SEQ ID NO: 1284679 - DNA, 15 bp, Homo sapiens
attaccagctccatg

SEQ ID NO: 1284680 - DNA, 15 bp, Homo sapiens
tattaccagctccat

SEQ ID NO: 1284681 - DNA, 15 bp, Homo sapiens
ttattaccagctcca

SEQ ID NO: 1284682 - DNA, 15 bp, Homo sapiens
gttattaccagctcc

SEQ ID NO: 1284683 - DNA, 15 bp, Homo sapiens
tgttattaccagctc

SEQ ID NO: 1284684 - DNA, 15 bp, Homo sapiens
gtgttattaccagct

SEQ ID NO: 1284685 - DNA, 15 bp, Homo sapiens
cgtgttattaccagc

SEQ ID NO: 1284686 - DNA, 15 bp, Homo sapiens
gcgtgttattaccag

SEQ ID NO: 1284687 - DNA, 15 bp, Homo sapiens
ggcgtgttattacca

SEQ ID NO: 1284688 - DNA, 15 bp, Homo sapiens
gggcgtgttattacc

SEQ ID NO: 1284689 - DNA, 15 bp, Homo sapiens
tgggcgtgttattac

SEQ ID NO: 1284690 - DNA, 15 bp, Homo sapiens
atgggcgtgttatta

SEQ ID NO: 1284691 - DNA, 15 bp, Homo sapiens
catgggcgtgttatt

SEQ ID NO: 1284692 - DNA, 15 bp, Homo sapiens
acatgggcgtgttat

SEQ ID NO: 1284693 - DNA, 15 bp, Homo sapiens
gacatgggcgtgtta

SEQ ID NO: 1284694 - DNA, 15 bp, Homo sapiens
ggacatgggcgtgtt

SEQ ID NO: 1284695 - DNA, 15 bp, Homo sapiens
aggacatgggcgtgt

SEQ ID NO: 1284696 - DNA, 15 bp, Homo sapiens
caggacatgggcgtg

SEQ ID NO: 1284697 - DNA, 15 bp, Homo sapiens
gcaggacatgggcgt

SEQ ID NO: 1284698 - DNA, 15 bp, Homo sapiens
tgcaggacatgggcg

SEQ ID NO: 1284699 - DNA, 15 bp, Homo sapiens
gtgcaggacatgggc

SEQ ID NO: 1284700 - DNA, 15 bp, Homo sapiens
agtgcaggacatggg

SEQ ID NO: 1284701 - DNA, 15 bp, Homo sapiens
cagtgcaggacatgg

SEQ ID NO: 1284702 - DNA, 15 bp, Homo sapiens
gcagtgcaggacatg

SEQ ID NO: 1284703 - DNA, 15 bp, Homo sapiens
tgcagtgcaggacat

SEQ ID NO: 1284704 - DNA, 15 bp, Homo sapiens
gtgcagtgcaggaca

SEQ ID NO: 1284705 - DNA, 15 bp, Homo sapiens
agtgcagtgcaggac

SEQ ID NO: 1284706 - DNA, 15 bp, Homo sapiens
cagtgcagtgcagga

SEQ ID NO: 1284707 - DNA, 15 bp, Homo sapiens
ccagtgcagtgcagg

SEQ ID NO: 1284708 - DNA, 15 bp, Homo sapiens
accagtgcagtgcag

SEQ ID NO: 1284709 - DNA, 15 bp, Homo sapiens
caccagtgcagtgca

SEQ ID NO: 1284710 - DNA, 15 bp, Homo sapiens
gcaccagtgcagtgc

SEQ ID NO: 1284711 - DNA, 15 bp, Homo sapiens
ggcaccagtgcagtg

SEQ ID NO: 1284712 - DNA, 15 bp, Homo sapiens
aggcaccagtgcagt

SEQ ID NO: 1284713 - DNA, 15 bp, Homo sapiens
gaggcaccagtgcag

SEQ ID NO: 1284714 - DNA, 15 bp, Homo sapiens
tgaggcaccagtgca

SEQ ID NO: 1284715 - DNA, 15 bp, Homo sapiens
ttgaggcaccagtgc

SEQ ID NO: 1284716 - DNA, 15 bp, Homo sapiens
tttgaggcaccagtg

SEQ ID NO: 1284717 - DNA, 15 bp, Homo sapiens
atttgaggcaccagt

SEQ ID NO: 1284718 - DNA, 15 bp, Homo sapiens
gatttgaggcaccag

SEQ ID NO: 1284719 - DNA, 15 bp, Homo sapiens
agatttgaggcacca

SEQ ID NO: 1284720 - DNA, 15 bp, Homo sapiens
tagatttgaggcacc

SEQ ID NO: 1284721 - DNA, 15 bp, Homo sapiens
atagatttgaggcac

SEQ ID NO: 1284722 - DNA, 15 bp, Homo sapiens
catagatttgaggca

SEQ ID NO: 1284723 - DNA, 15 bp, Homo sapiens
acatagatttgaggc

SEQ ID NO: 1284724 - DNA, 15 bp, Homo sapiens
cacatagatttgagg

SEQ ID NO: 1284725 - DNA, 15 bp, Homo sapiens
acacatagatttgag

SEQ ID NO: 1284726 - DNA, 15 bp, Homo sapiens
aacacatagatttga

SEQ ID NO: 1284727 - DNA, 15 bp, Homo sapiens
gaacacatagatttg

SEQ ID NO: 1284728 - DNA, 15 bp, Homo sapiens
tgaacacatagattt

SEQ ID NO: 1284729 - DNA, 15 bp, Homo sapiens
ctgaacacatagatt

SEQ ID NO: 1284730 - DNA, 15 bp, Homo sapiens
gctgaacacatagat

SEQ ID NO: 1284731 - DNA, 15 bp, Homo sapiens
ggctgaacacataga

SEQ ID NO: 1284732 - DNA, 15 bp, Homo sapiens
aggctgaacacatag

SEQ ID NO: 1284733 - DNA, 15 bp, Homo sapiens
aaggctgaacacata

SEQ ID NO: 1284734 - DNA, 15 bp, Homo sapiens
caaggctgaacacat

SEQ ID NO: 1284735 - DNA, 15 bp, Homo sapiens
ccaaggctgaacaca

SEQ ID NO: 1284736 - DNA, 15 bp, Homo sapiens
accaaggctgaacac

SEQ ID NO: 1284737 - DNA, 15 bp, Homo sapiens
caccaaggctgaaca

SEQ ID NO: 1284738 - DNA, 15 bp, Homo sapiens
acaccaaggctgaac

SEQ ID NO: 1284739 - DNA, 15 bp, Homo sapiens
tacaccaaggctgaa

SEQ ID NO: 1284740 - DNA, 15 bp, Homo sapiens
ttacaccaaggctga

SEQ ID NO: 1284741 - DNA, 15 bp, Homo sapiens
tttacaccaaggctg

SEQ ID NO: 1284742 - DNA, 15 bp, Homo sapiens
ttttacaccaaggct

SEQ ID NO: 1284743 - DNA, 15 bp, Homo sapiens
attttacaccaaggc

SEQ ID NO: 1284744 - DNA, 15 bp, Homo sapiens
gattttacaccaagg

SEQ ID NO: 1284745 - DNA, 15 bp, Homo sapiens
tgattttacaccaag

SEQ ID NO: 1284746 - DNA, 15 bp, Homo sapiens
gtgattttacaccaa

SEQ ID NO: 1284747 - DNA, 15 bp, Homo sapiens
agtgattttacacca

SEQ ID NO: 1284748 - DNA, 15 bp, Homo sapiens
tagtgattttacacc

SEQ ID NO: 1284749 - DNA, 15 bp, Homo sapiens
ctagtgattttacac

SEQ ID NO: 1284750 - DNA, 15 bp, Homo sapiens
cctagtgattttaca

SEQ ID NO: 1284751 - DNA, 15 bp, Homo sapiens
tcctagtgattttac

SEQ ID NO: 1284752 - DNA, 15 bp, Homo sapiens
ctcctagtgatttta

SEQ ID NO: 1284753 - DNA, 15 bp, Homo sapiens
gctcctagtgatttt

SEQ ID NO: 1284754 - DNA, 15 bp, Homo sapiens
ggctcctagtgattt

SEQ ID NO: 1284755 - DNA, 15 bp, Homo sapiens
tggctcctagtgatt

SEQ ID NO: 1284756 - DNA, 15 bp, Homo sapiens
ctggctcctagtgat

SEQ ID NO: 1284757 - DNA, 15 bp, Homo sapiens
cctggctcctagtga

SEQ ID NO: 1284758 - DNA, 15 bp, Homo sapiens
ccctggctcctagtg

SEQ ID NO: 1284759 - DNA, 15 bp, Homo sapiens
tccctggctcctagt

SEQ ID NO: 1284760 - DNA, 15 bp, Homo sapiens
gtccctggctcctag

SEQ ID NO: 1284761 - DNA, 15 bp, Homo sapiens
tgtccctggctccta

SEQ ID NO: 1284762 - DNA, 15 bp, Homo sapiens
ctgtccctggctcct

SEQ ID NO: 1284763 - DNA, 15 bp, Homo sapiens
tctgtccctggctcc

SEQ ID NO: 1284764 - DNA, 15 bp, Homo sapiens
ctctgtccctggctc

SEQ ID NO: 1284765 - DNA, 15 bp, Homo sapiens
cctctgtccctggct

SEQ ID NO: 1284766 - DNA, 15 bp, Homo sapiens
ccctctgtccctggc

SEQ ID NO: 1284767 - DNA, 15 bp, Homo sapiens
tccctctgtccctgg

SEQ ID NO: 1284768 - DNA, 15 bp, Homo sapiens
atccctctgtccctg

SEQ ID NO: 1284769 - DNA, 15 bp, Homo sapiens
aatccctctgtccct

SEQ ID NO: 1284770 - DNA, 15 bp, Homo sapiens
gaatccctctgtccc

SEQ ID NO: 1284771 - DNA, 15 bp, Homo sapiens
ggaatccctctgtcc

SEQ ID NO: 1284772 - DNA, 15 bp, Homo sapiens
tggaatccctctgtc

SEQ ID NO: 1284773 - DNA, 15 bp, Homo sapiens
ctggaatccctctgt

SEQ ID NO: 1284774 - DNA, 15 bp, Homo sapiens
cctggaatccctctg

SEQ ID NO: 1284775 - DNA, 15 bp, Homo sapiens
ccctggaatccctct

SEQ ID NO: 1284776 - DNA, 15 bp, Homo sapiens
tccctggaatccctc

SEQ ID NO: 1284777 - DNA, 15 bp, Homo sapiens
gtccctggaatccct

SEQ ID NO: 1284778 - DNA, 15 bp, Homo sapiens
ggtccctggaatccc

SEQ ID NO: 1284779 - DNA, 15 bp, Homo sapiens
gggtccctggaatcc

SEQ ID NO: 1284780 - DNA, 15 bp, Homo sapiens
ggggtccctggaatc

SEQ ID NO: 1284781 - DNA, 15 bp, Homo sapiens
tggggtccctggaat

SEQ ID NO: 1284782 - DNA, 15 bp, Homo sapiens
gtggggtccctggaa

SEQ ID NO: 1284783 - DNA, 15 bp, Homo sapiens
cgtggggtccctgga

SEQ ID NO: 1284784 - DNA, 15 bp, Homo sapiens
gcgtggggtccctgg

SEQ ID NO: 1284785 - DNA, 15 bp, Homo sapiens
ggcgtggggtccctg

SEQ ID NO: 1284786 - DNA, 15 bp, Homo sapiens
gggcgtggggtccct

SEQ ID NO: 1284787 - DNA, 15 bp, Homo sapiens
tgggcgtggggtccc

SEQ ID NO: 1284788 - DNA, 15 bp, Homo sapiens
ctgggcgtggggtcc

SEQ ID NO: 1284789 - DNA, 15 bp, Homo sapiens
cctgggcgtggggtc

SEQ ID NO: 1284790 - DNA, 15 bp, Homo sapiens
ccctgggcgtggggt

SEQ ID NO: 1284791 - DNA, 15 bp, Homo sapiens
cccctgggcgtgggg

SEQ ID NO: 1284792 - DNA, 15 bp, Homo sapiens
ccccctgggcgtggg

SEQ ID NO: 1284793 - DNA, 15 bp, Homo sapiens
gccccctgggcgtgg

SEQ ID NO: 1284794 - DNA, 15 bp, Homo sapiens
ggccccctgggcgtg

SEQ ID NO: 1284795 - DNA, 15 bp, Homo sapiens
aggccccctgggcgt

SEQ ID NO: 1284796 - DNA, 15 bp, Homo sapiens
caggccccctgggcg

SEQ ID NO: 1284797 - DNA, 15 bp, Homo sapiens
tcaggccccctgggc

SEQ ID NO: 1284798 - DNA, 15 bp, Homo sapiens
ctcaggccccctggg

SEQ ID NO: 1284799 - DNA, 15 bp, Homo sapiens
tctcaggccccctgg

SEQ ID NO: 1284800 - DNA, 15 bp, Homo sapiens
ctctcaggccccctg

SEQ ID NO: 1284801 - DNA, 15 bp, Homo sapiens
cctctcaggccccct

SEQ ID NO: 1284802 - DNA, 15 bp, Homo sapiens
gcctctcaggccccc

SEQ ID NO: 1284803 - DNA, 15 bp, Homo sapiens
agcctctcaggcccc

SEQ ID NO: 1284804 - DNA, 15 bp, Homo sapiens
gagcctctcaggccc

SEQ ID NO: 1284805 - DNA, 15 bp, Homo sapiens
tgagcctctcaggcc

SEQ ID NO: 1284806 - DNA, 15 bp, Homo sapiens
atgagcctctcaggc

SEQ ID NO: 1284807 - DNA, 15 bp, Homo sapiens
gatgagcctctcagg

SEQ ID NO: 1284808 - DNA, 15 bp, Homo sapiens
ggatgagcctctcag

SEQ ID NO: 1284809 - DNA, 15 bp, Homo sapiens
aggatgagcctctca

SEQ ID NO: 1284810 - DNA, 15 bp, Homo sapiens
aaggatgagcctctc

SEQ ID NO: 1284811 - DNA, 15 bp, Homo sapiens
gaaggatgagcctct

SEQ ID NO: 1284812 - DNA, 15 bp, Homo sapiens
cgaaggatgagcctc

SEQ ID NO: 1284813 - DNA, 15 bp, Homo sapiens
acgaaggatgagcct

SEQ ID NO: 1284814 - DNA, 15 bp, Homo sapiens
cacgaaggatgagcc

SEQ ID NO: 1284815 - DNA, 15 bp, Homo sapiens
acacgaaggatgagc

SEQ ID NO: 1284816 - DNA, 15 bp, Homo sapiens
gacacgaaggatgag

SEQ ID NO: 1284817 - DNA, 15 bp, Homo sapiens
tgacacgaaggatga

SEQ ID NO: 1284818 - DNA, 15 bp, Homo sapiens
ctgacacgaaggatg

SEQ ID NO: 1284819 - DNA, 15 bp, Homo sapiens
gctgacacgaaggat

SEQ ID NO: 1284820 - DNA, 15 bp, Homo sapiens
agctgacacgaagga

SEQ ID NO: 1284821 - DNA, 15 bp, Homo sapiens
aagctgacacgaagg

SEQ ID NO: 1284822 - DNA, 15 bp, Homo sapiens
caagctgacacgaag

SEQ ID NO: 1284823 - DNA, 15 bp, Homo sapiens
acaagctgacacgaa

SEQ ID NO: 1284824 - DNA, 15 bp, Homo sapiens
cacaagctgacacga

SEQ ID NO: 1284825 - DNA, 15 bp, Homo sapiens
acacaagctgacacg

SEQ ID NO: 1284826 - DNA, 15 bp, Homo sapiens
aacacaagctgacac

SEQ ID NO: 1284827 - DNA, 15 bp, Homo sapiens
aaacacaagctgaca

SEQ ID NO: 1284828 - DNA, 15 bp, Homo sapiens
aaaacacaagctgac

SEQ ID NO: 1284829 - DNA, 15 bp, Homo sapiens
gaaaacacaagctga

SEQ ID NO: 1284830 - DNA, 15 bp, Homo sapiens
ggaaaacacaagctg

SEQ ID NO: 1284831 - DNA, 15 bp, Homo sapiens
tggaaaacacaagct

SEQ ID NO: 1284832 - DNA, 15 bp, Homo sapiens
ctggaaaacacaagc

SEQ ID NO: 1284833 - DNA, 15 bp, Homo sapiens
cctggaaaacacaag

SEQ ID NO: 1284834 - DNA, 15 bp, Homo sapiens
ccctggaaaacacaa

SEQ ID NO: 1284835 - DNA, 15 bp, Homo sapiens
cccctggaaaacaca

SEQ ID NO: 1284836 - DNA, 15 bp, Homo sapiens
acccctggaaaacac

SEQ ID NO: 1284837 - DNA, 15 bp, Homo sapiens
cacccctggaaaaca

SEQ ID NO: 1284838 - DNA, 15 bp, Homo sapiens
ccacccctggaaaac

SEQ ID NO: 1284839 - DNA, 15 bp, Homo sapiens
accacccctggaaaa

SEQ ID NO: 1284840 - DNA, 15 bp, Homo sapiens
aaccacccctggaaa

SEQ ID NO: 1284841 - DNA, 15 bp, Homo sapiens
aaaccacccctggaa

SEQ ID NO: 1284842 - DNA, 15 bp, Homo sapiens
aaaaccacccctgga

SEQ ID NO: 1284843 - DNA, 15 bp, Homo sapiens
caaaaccacccctgg

SEQ ID NO: 1284844 - DNA, 15 bp, Homo sapiens
gcaaaaccacccctg

SEQ ID NO: 1284845 - DNA, 15 bp, Homo sapiens
ggcaaaaccacccct

SEQ ID NO: 1284846 - DNA, 15 bp, Homo sapiens
aggcaaaaccacccc

SEQ ID NO: 1284847 - DNA, 15 bp, Homo sapiens
caggcaaaaccaccc

SEQ ID NO: 1284848 - DNA, 15 bp, Homo sapiens
gcaggcaaaaccacc

SEQ ID NO: 1284849 - DNA, 15 bp, Homo sapiens
ggcaggcaaaaccac

SEQ ID NO: 1284850 - DNA, 15 bp, Homo sapiens
gggcaggcaaaacca

SEQ ID NO: 1284851 - DNA, 15 bp, Homo sapiens
cgggcaggcaaaacc

SEQ ID NO: 1284852 - DNA, 15 bp, Homo sapiens
ccgggcaggcaaaac

SEQ ID NO: 1284853 - DNA, 15 bp, Homo sapiens
accgggcaggcaaaa

SEQ ID NO: 1284854 - DNA, 15 bp, Homo sapiens
aaccgggcaggcaaa

SEQ ID NO: 1284855 - DNA, 15 bp, Homo sapiens
taaccgggcaggcaa

SEQ ID NO: 1284856 - DNA, 15 bp, Homo sapiens
gtaaccgggcaggca

SEQ ID NO: 1284857 - DNA, 15 bp, Homo sapiens
agtaaccgggcaggc

SEQ ID NO: 1284858 - DNA, 15 bp, Homo sapiens
cagtaaccgggcagg

SEQ ID NO: 1284859 - DNA, 15 bp, Homo sapiens
gcagtaaccgggcag

SEQ ID NO: 1284860 - DNA, 15 bp, Homo sapiens
agcagtaaccgggca

SEQ ID NO: 1284861 - DNA, 15 bp, Homo sapiens
cagcagtaaccgggc

SEQ ID NO: 1284862 - DNA, 15 bp, Homo sapiens
acagcagtaaccggg

SEQ ID NO: 1284863 - DNA, 15 bp, Homo sapiens
cacagcagtaaccgg

SEQ ID NO: 1284864 - DNA, 15 bp, Homo sapiens
ccacagcagtaaccg

SEQ ID NO: 1284865 - DNA, 15 bp, Homo sapiens
tccacagcagtaacc

SEQ ID NO: 1284866 - DNA, 15 bp, Homo sapiens
ttccacagcagtaac

SEQ ID NO: 1284867 - DNA, 15 bp, Homo sapiens
attccacagcagtaa

SEQ ID NO: 1284868 - DNA, 15 bp, Homo sapiens
aattccacagcagta

SEQ ID NO: 1284869 - DNA, 15 bp, Homo sapiens
caattccacagcagt

SEQ ID NO: 1284870 - DNA, 15 bp, Homo sapiens
gcaattccacagcag

SEQ ID NO: 1284871 - DNA, 15 bp, Homo sapiens
ggcaattccacagca

SEQ ID NO: 1284872 - DNA, 15 bp, Homo sapiens
aggcaattccacagc

SEQ ID NO: 1284873 - DNA, 15 bp, Homo sapiens
gaggcaattccacag

SEQ ID NO: 1284874 - DNA, 15 bp, Homo sapiens
agaggcaattccaca

SEQ ID NO: 1284875 - DNA, 15 bp, Homo sapiens
cagaggcaattccac

SEQ ID NO: 1284876 - DNA, 15 bp, Homo sapiens
ccagaggcaattcca

SEQ ID NO: 1284877 - DNA, 15 bp, Homo sapiens
gccagaggcaattcc

SEQ ID NO: 1284878 - DNA, 15 bp, Homo sapiens
ggccagaggcaattc

SEQ ID NO: 1284879 - DNA, 15 bp, Homo sapiens
gggccagaggcaatt

SEQ ID NO: 1284880 - DNA, 15 bp, Homo sapiens
tgggccagaggcaat

SEQ ID NO: 1284881 - DNA, 15 bp, Homo sapiens
atgggccagaggcaa

SEQ ID NO: 1284882 - DNA, 15 bp, Homo sapiens
aatgggccagaggca

SEQ ID NO: 1284883 - DNA, 15 bp, Homo sapiens
aaatgggccagaggc

SEQ ID NO: 1284884 - DNA, 15 bp, Homo sapiens
taaatgggccagagg

SEQ ID NO: 1284885 - DNA, 15 bp, Homo sapiens
ataaatgggccagag

SEQ ID NO: 1284886 - DNA, 15 bp, Homo sapiens
cataaatgggccaga

SEQ ID NO: 1284887 - DNA, 15 bp, Homo sapiens
ccataaatgggccag

SEQ ID NO: 1284888 - DNA, 15 bp, Homo sapiens
accataaatgggcca

SEQ ID NO: 1284889 - DNA, 15 bp, Homo sapiens
caccataaatgggcc

SEQ ID NO: 1284890 - DNA, 15 bp, Homo sapiens
ccaccataaatgggc

SEQ ID NO: 1284891 - DNA, 15 bp, Homo sapiens
tccaccataaatggg

SEQ ID NO: 1284892 - DNA, 15 bp, Homo sapiens
ctccaccataaatgg

SEQ ID NO: 1284893 - DNA, 15 bp, Homo sapiens
cctccaccataaatg

SEQ ID NO: 1284894 - DNA, 15 bp, Homo sapiens
gcctccaccataaat

SEQ ID NO: 1284895 - DNA, 15 bp, Homo sapiens
ggcctccaccataaa

SEQ ID NO: 1284896 - DNA, 15 bp, Homo sapiens
aggcctccaccataa

SEQ ID NO: 1284897 - DNA, 15 bp, Homo sapiens
caggcctccaccata

SEQ ID NO: 1284898 - DNA, 15 bp, Homo sapiens
ccaggcctccaccat

SEQ ID NO: 1284899 - DNA, 15 bp, Homo sapiens
cccaggcctccacca

SEQ ID NO: 1284900 - DNA, 15 bp, Homo sapiens
acccaggcctccacc

SEQ ID NO: 1284901 - DNA, 15 bp, Homo sapiens
gaacccaggcctcca

SEQ ID NO: 1284902 - DNA, 15 bp, Homo sapiens
ggaacccaggcctcc

SEQ ID NO: 1284903 - DNA, 15 bp, Homo sapiens
cggaacccaggcctc

SEQ ID NO: 1284904 - DNA, 15 bp, Homo sapiens
ccggaacccaggcct

SEQ ID NO: 1284905 - DNA, 15 bp, Homo sapiens
accggaacccaggcc

SEQ ID NO: 1284906 - DNA, 15 bp, Homo sapiens
caccggaacccaggc

SEQ ID NO: 1284907 - DNA, 15 bp, Homo sapiens
tcaccggaacccagg

SEQ ID NO: 1284908 - DNA, 15 bp, Homo sapiens
gtcaccggaacccag

SEQ ID NO: 1284909 - DNA, 15 bp, Homo sapiens
tgtcaccggaaccca

SEQ ID NO: 1284910 - DNA, 15 bp, Homo sapiens
gtgtcaccggaaccc

SEQ ID NO: 1284911 - DNA, 15 bp, Homo sapiens
agtgtcaccggaacc

SEQ ID NO: 1284912 - DNA, 15 bp, Homo sapiens
cagtgtcaccggaac

SEQ ID NO: 1284913 - DNA, 15 bp, Homo sapiens
gcagtgtcaccggaa

SEQ ID NO: 1284914 - DNA, 15 bp, Homo sapiens
agcagtgtcaccgga

SEQ ID NO: 1284915 - DNA, 15 bp, Homo sapiens
aagcagtgtcaccgg

SEQ ID NO: 1284916 - DNA, 15 bp, Homo sapiens
aaagcagtgtcaccg

SEQ ID NO: 1284917 - DNA, 15 bp, Homo sapiens
gaaagcagtgtcacc

SEQ ID NO: 1284918 - DNA, 15 bp, Homo sapiens
agaaagcagtgtcac

SEQ ID NO: 1284919 - DNA, 15 bp, Homo sapiens
aagaaagcagtgtca

SEQ ID NO: 1284920 - DNA, 15 bp, Homo sapiens
aaagaaagcagtgtc

SEQ ID NO: 1284921 - DNA, 15 bp, Homo sapiens
gaaagaaagcagtgt

SEQ ID NO: 1284922 - DNA, 15 bp, Homo sapiens
agaaagaaagcagtg

SEQ ID NO: 1284923 - DNA, 15 bp, Homo sapiens
cagaaagaaagcagt

SEQ ID NO: 1284924 - DNA, 15 bp, Homo sapiens
acagaaagaaagcag

SEQ ID NO: 1284925 - DNA, 15 bp, Homo sapiens
tacagaaagaaagca

SEQ ID NO: 1284926 - DNA, 15 bp, Homo sapiens
gtacagaaagaaagc

SEQ ID NO: 1284927 - DNA, 15 bp, Homo sapiens
tgtacagaaagaaag

SEQ ID NO: 1284928 - DNA, 15 bp, Homo sapiens
gtgtacagaaagaaa

SEQ ID NO: 1284929 - DNA, 15 bp, Homo sapiens
ggtgtacagaaagaa

SEQ ID NO: 1284930 - DNA, 15 bp, Homo sapiens
aggtgtacagaaaga

SEQ ID NO: 1284931 - DNA, 15 bp, Homo sapiens
aaggtgtacagaaag

SEQ ID NO: 1284932 - DNA, 15 bp, Homo sapiens
caaggtgtacagaaa

SEQ ID NO: 1284933 - DNA, 15 bp, Homo sapiens
tcaaggtgtacagaa

SEQ ID NO: 1284934 - DNA, 15 bp, Homo sapiens
ttcaaggtgtacaga

SEQ ID NO: 1284935 - DNA, 15 bp, Homo sapiens
attcaaggtgtacag

SEQ ID NO: 1284936 - DNA, 15 bp, Homo sapiens
cattcaaggtgtaca

SEQ ID NO: 1284937 - DNA, 15 bp, Homo sapiens
tcattcaaggtgtac

SEQ ID NO: 1284938 - DNA, 15 bp, Homo sapiens
ctcattcaaggtgta

SEQ ID NO: 1284939 - DNA, 15 bp, Homo sapiens
cctcattcaaggtgt

SEQ ID NO: 1284940 - DNA, 15 bp, Homo sapiens
acctcattcaaggtg

SEQ ID NO: 1284941 - DNA, 15 bp, Homo sapiens
gacctcattcaaggt

SEQ ID NO: 1284942 - DNA, 15 bp, Homo sapiens
tgacctcattcaagg

SEQ ID NO: 1284943 - DNA, 15 bp, Homo sapiens
ctgacctcattcaag

SEQ ID NO: 1284944 - DNA, 15 bp, Homo sapiens
cctgacctcattcaa

SEQ ID NO: 1284945 - DNA, 15 bp, Homo sapiens
gcctgacctcattca

SEQ ID NO: 1284946 - DNA, 15 bp, Homo sapiens
tgcctgacctcattc

SEQ ID NO: 1284947 - DNA, 15 bp, Homo sapiens
ctgcctgacctcatt

SEQ ID NO: 1284948 - DNA, 15 bp, Homo sapiens
gctgcctgacctcat

SEQ ID NO: 1284949 - DNA, 15 bp, Homo sapiens
agctgcctgacctca

SEQ ID NO: 1284950 - DNA, 15 bp, Homo sapiens
gagctgcctgacctc

SEQ ID NO: 1284951 - DNA, 15 bp, Homo sapiens
agagctgcctgacct

SEQ ID NO: 1284952 - DNA, 15 bp, Homo sapiens
aagagctgcctgacc

SEQ ID NO: 1284953 - DNA, 15 bp, Homo sapiens
gaagagctgcctgac

SEQ ID NO: 1284954 - DNA, 15 bp, Homo sapiens
tgaagagctgcctga

SEQ ID NO: 1284955 - DNA, 15 bp, Homo sapiens
atgaagagctgcctg

SEQ ID NO: 1284956 - DNA, 15 bp, Homo sapiens
tatgaagagctgcct

SEQ ID NO: 1284957 - DNA, 15 bp, Homo sapiens
ctatgaagagctgcc

SEQ ID NO: 1284958 - DNA, 15 bp, Homo sapiens
tctatgaagagctgc

SEQ ID NO: 1284959 - DNA, 15 bp, Homo sapiens
ctctatgaagagctg

SEQ ID NO: 1284960 - DNA, 15 bp, Homo sapiens
cctctatgaagagct

SEQ ID NO: 1284961 - DNA, 15 bp, Homo sapiens
ccctctatgaagagc

SEQ ID NO: 1284962 - DNA, 15 bp, Homo sapiens
tccctctatgaagag

SEQ ID NO: 1284963 - DNA, 15 bp, Homo sapiens
ctccctctatgaaga

SEQ ID NO: 1284964 - DNA, 15 bp, Homo sapiens
cctccctctatgaag

SEQ ID NO: 1284965 - DNA, 15 bp, Homo sapiens
tcctccctctatgaa

SEQ ID NO: 1284966 - DNA, 15 bp, Homo sapiens
ttcctccctctatga

SEQ ID NO: 1284967 - DNA, 15 bp, Homo sapiens
gttcctccctctatg

SEQ ID NO: 1284968 - DNA, 15 bp, Homo sapiens
agttcctccctctat

SEQ ID NO: 1284969 - DNA, 15 bp, Homo sapiens
gagttcctccctcta

SEQ ID NO: 1284970 - DNA, 15 bp, Homo sapiens
agagttcctccctct

SEQ ID NO: 1284971 - DNA, 15 bp, Homo sapiens
aagagttcctccctc

SEQ ID NO: 1284972 - DNA, 15 bp, Homo sapiens
gaagagttcctccct

SEQ ID NO: 1284973 - DNA, 15 bp, Homo sapiens
ggaagagttcctccc

SEQ ID NO: 1284974 - DNA, 15 bp, Homo sapiens
aggaagagttcctcc

SEQ ID NO: 1284975 - DNA, 15 bp, Homo sapiens
caggaagagttcctc

SEQ ID NO: 1284976 - DNA, 15 bp, Homo sapiens
ccaggaagagttcct

SEQ ID NO: 1284977 - DNA, 15 bp, Homo sapiens
tccaggaagagttcc

SEQ ID NO: 1284978 - DNA, 15 bp, Homo sapiens
ctccaggaagagttc

SEQ ID NO: 1284979 - DNA, 15 bp, Homo sapiens
actccaggaagagtt

SEQ ID NO: 1284980 - DNA, 15 bp, Homo sapiens
cactccaggaagagt

SEQ ID NO: 1284981 - DNA, 15 bp, Homo sapiens
gcactccaggaagag

SEQ ID NO: 1284982 - DNA, 15 bp, Homo sapiens
ggcactccaggaaga

SEQ ID NO: 1284983 - DNA, 15 bp, Homo sapiens
tggcactccaggaag

SEQ ID NO: 1284984 - DNA, 15 bp, Homo sapiens
ttggcactccaggaa

SEQ ID NO: 1284985 - DNA, 15 bp, Homo sapiens
cttggcactccagga

SEQ ID NO: 1284986 - DNA, 15 bp, Homo sapiens
ccttggcactccagg

SEQ ID NO: 1284987 - DNA, 15 bp, Homo sapiens
cccttggcactccag

SEQ ID NO: 1284988 - DNA, 15 bp, Homo sapiens
acccttggcactcca

SEQ ID NO: 1284989 - DNA, 15 bp, Homo sapiens
tacccttggcactcc

SEQ ID NO: 1284990 - DNA, 15 bp, Homo sapiens
ctacccttggcactc

SEQ ID NO: 1284991 - DNA, 15 bp, Homo sapiens
cctacccttggcact

SEQ ID NO: 1284992 - DNA, 15 bp, Homo sapiens
ccctacccttggcac

SEQ ID NO: 1284993 - DNA, 15 bp, Homo sapiens
accctacccttggca

SEQ ID NO: 1284994 - DNA, 15 bp, Homo sapiens
gaccctacccttggc

SEQ ID NO: 1284995 - DNA, 15 bp, Homo sapiens
agaccctacccttgg

SEQ ID NO: 1284996 - DNA, 15 bp, Homo sapiens
cagaccctacccttg

SEQ ID NO: 1284997 - DNA, 15 bp, Homo sapiens
gcagaccctaccctt

SEQ ID NO: 1284998 - DNA, 15 bp, Homo sapiens
ggcagaccctaccct

SEQ ID NO: 1284999 - DNA, 15 bp, Homo sapiens
aggcagaccctaccc

SEQ ID NO: 1285000 - DNA, 15 bp, Homo sapiens
taggcagaccctacc

SEQ ID NO: 1285001 - DNA, 15 bp, Homo sapiens
ctaggcagaccctac

SEQ ID NO: 1285002 - DNA, 15 bp, Homo sapiens
actaggcagacccta

SEQ ID NO: 1285003 - DNA, 15 bp, Homo sapiens
gactaggcagaccct

SEQ ID NO: 1285004 - DNA, 15 bp, Homo sapiens
ggactaggcagaccc

SEQ ID NO: 1285005 - DNA, 15 bp, Homo sapiens
gggactaggcagacc

SEQ ID NO: 1285006 - DNA, 15 bp, Homo sapiens
tgggactaggcagac

SEQ ID NO: 1285007 - DNA, 15 bp, Homo sapiens
ctgggactaggcaga

SEQ ID NO: 1285008 - DNA, 15 bp, Homo sapiens
actgggactaggcag

SEQ ID NO: 1285009 - DNA, 15 bp, Homo sapiens
gactgggactaggca

SEQ ID NO: 1285010 - DNA, 15 bp, Homo sapiens
agactgggactaggc

SEQ ID NO: 1285011 - DNA, 15 bp, Homo sapiens
gagactgggactagg

SEQ ID NO: 1285012 - DNA, 15 bp, Homo sapiens
agagactgggactag

SEQ ID NO: 1285013 - DNA, 15 bp, Homo sapiens
gagagactgggacta

SEQ ID NO: 1285014 - DNA, 15 bp, Homo sapiens
tggagagactgggac

SEQ ID NO: 1285015 - DNA, 15 bp, Homo sapiens
ctggagagactggga

SEQ ID NO: 1285016 - DNA, 15 bp, Homo sapiens
gctggagagactggg

SEQ ID NO: 1285017 - DNA, 15 bp, Homo sapiens
ggctggagagactgg

SEQ ID NO: 1285018 - DNA, 15 bp, Homo sapiens
aggctggagagactg

SEQ ID NO: 1285019 - DNA, 15 bp, Homo sapiens
caggctggagagact

SEQ ID NO: 1285020 - DNA, 15 bp, Homo sapiens
tcaggctggagagac

SEQ ID NO: 1285021 - DNA, 15 bp, Homo sapiens
ctcaggctggagaga

SEQ ID NO: 1285022 - DNA, 15 bp, Homo sapiens
actcaggctggagag

SEQ ID NO: 1285023 - DNA, 15 bp, Homo sapiens
aactcaggctggaga

SEQ ID NO: 1285024 - DNA, 15 bp, Homo sapiens
aaactcaggctggag

SEQ ID NO: 1285025 - DNA, 15 bp, Homo sapiens
caaactcaggctgga

SEQ ID NO: 1285026 - DNA, 15 bp, Homo sapiens
gcaaactcaggctgg

SEQ ID NO: 1285027 - DNA, 15 bp, Homo sapiens
tgcaaactcaggctg

SEQ ID NO: 1285028 - DNA, 15 bp, Homo sapiens
atgcaaactcaggct

SEQ ID NO: 1285029 - DNA, 15 bp, Homo sapiens
gatgcaaactcaggc

SEQ ID NO: 1285030 - DNA, 15 bp, Homo sapiens
tgatgcaaactcagg

SEQ ID NO: 1285031 - DNA, 15 bp, Homo sapiens
ctgatgcaaactcag

SEQ ID NO: 1285032 - DNA, 15 bp, Homo sapiens
cctgatgcaaactca

SEQ ID NO: 1285033 - DNA, 15 bp, Homo sapiens
ccctgatgcaaactc

SEQ ID NO: 1285034 - DNA, 15 bp, Homo sapiens
tccctgatgcaaact

SEQ ID NO: 1285035 - DNA, 15 bp, Homo sapiens
ctccctgatgcaaac

SEQ ID NO: 1285036 - DNA, 15 bp, Homo sapiens
tctccctgatgcaaa

SEQ ID NO: 1285037 - DNA, 15 bp, Homo sapiens
ttctccctgatgcaa

SEQ ID NO: 1285038 - DNA, 15 bp, Homo sapiens
tttctccctgatgca

SEQ ID NO: 1285039 - DNA, 15 bp, Homo sapiens
ttttctccctgatgc

SEQ ID NO: 1285040 - DNA, 15 bp, Homo sapiens
tttttctccctgatg

SEQ ID NO: 1285041 - DNA, 15 bp, Homo sapiens
ctttttctccctgat

SEQ ID NO: 1285042 - DNA, 15 bp, Homo sapiens
gctttttctccctga

SEQ ID NO: 1285043 - DNA, 15 bp, Homo sapiens
tgctttttctccctg

SEQ ID NO: 1285044 - DNA, 15 bp, Homo sapiens
gtgctttttctccct

SEQ ID NO: 1285045 - DNA, 15 bp, Homo sapiens
ggtgctttttctccc

SEQ ID NO: 1285046 - DNA, 15 bp, Homo sapiens
tggtgctttttctcc

SEQ ID NO: 1285047 - DNA, 15 bp, Homo sapiens
ctggtgctttttctc

SEQ ID NO: 1285048 - DNA, 15 bp, Homo sapiens
gctggtgctttttct

SEQ ID NO: 1285049 - DNA, 15 bp, Homo sapiens
tgctggtgctttttc

SEQ ID NO: 1285050 - DNA, 15 bp, Homo sapiens
gtgctggtgcttttt

SEQ ID NO: 1285051 - DNA, 15 bp, Homo sapiens
ggtgctggtgctttt

SEQ ID NO: 1285052 - DNA, 15 bp, Homo sapiens
aggtgctggtgcttt

SEQ ID NO: 1285053 - DNA, 15 bp, Homo sapiens
aaggtgctggtgctt

SEQ ID NO: 1285054 - DNA, 15 bp, Homo sapiens
aaaggtgctggtgct

SEQ ID NO: 1285055 - DNA, 15 bp, Homo sapiens
aaaaggtgctggtgc

SEQ ID NO: 1285056 - DNA, 15 bp, Homo sapiens
aaaaaggtgctggtg

SEQ ID NO: 1285057 - DNA, 15 bp, Homo sapiens
gaaaaaggtgctggt

SEQ ID NO: 1285058 - DNA, 15 bp, Homo sapiens
tgaaaaaggtgctgg

SEQ ID NO: 1285059 - DNA, 15 bp, Homo sapiens
gtgaaaaaggtgctg

SEQ ID NO: 1285060 - DNA, 15 bp, Homo sapiens
ggtgaaaaaggtgct

SEQ ID NO: 1285061 - DNA, 15 bp, Homo sapiens
tggtgaaaaaggtgc

SEQ ID NO: 1285062 - DNA, 15 bp, Homo sapiens
ttggtgaaaaaggtg

SEQ ID NO: 1285063 - DNA, 15 bp, Homo sapiens
attggtgaaaaaggt

SEQ ID NO: 1285064 - DNA, 15 bp, Homo sapiens
cattggtgaaaaagg

SEQ ID NO: 1285065 - DNA, 15 bp, Homo sapiens
gcattggtgaaaaag

SEQ ID NO: 1285066 - DNA, 15 bp, Homo sapiens
cgcattggtgaaaaa

SEQ ID NO: 1285067 - DNA, 15 bp, Homo sapiens
gcgcattggtgaaaa

SEQ ID NO: 1285068 - DNA, 15 bp, Homo sapiens
ggcgcattggtgaaa

SEQ ID NO: 1285069 - DNA, 15 bp, Homo sapiens
gggcgcattggtgaa

SEQ ID NO: 1285070 - DNA, 15 bp, Homo sapiens
agggcgcattggtga

SEQ ID NO: 1285071 - DNA, 15 bp, Homo sapiens
aagggcgcattggtg

SEQ ID NO: 1285072 - DNA, 15 bp, Homo sapiens
gaagggcgcattggt

SEQ ID NO: 1285073 - DNA, 15 bp, Homo sapiens
ggaagggcgcattgg

SEQ ID NO: 1285074 - DNA, 15 bp, Homo sapiens
gggaagggcgcattg

SEQ ID NO: 1285075 - DNA, 15 bp, Homo sapiens
ggggaagggcgcatt

SEQ ID NO: 1285076 - DNA, 15 bp, Homo sapiens
tggggaagggcgcat

SEQ ID NO: 1285077 - DNA, 15 bp, Homo sapiens
gtggggaagggcgca

SEQ ID NO: 1285078 - DNA, 15 bp, Homo sapiens
tgtggggaagggcgc

SEQ ID NO: 1285079 - DNA, 15 bp, Homo sapiens
atgtggggaagggcg

SEQ ID NO: 1285080 - DNA, 15 bp, Homo sapiens
aatgtggggaagggc

SEQ ID NO: 1285081 - DNA, 15 bp, Homo sapiens
gaatgtggggaaggg

SEQ ID NO: 1285082 - DNA, 15 bp, Homo sapiens
tgaatgtggggaagg

SEQ ID NO: 1285083 - DNA, 15 bp, Homo sapiens
gtgaatgtggggaag

SEQ ID NO: 1285084 - DNA, 15 bp, Homo sapiens
tgtgaatgtggggaa

SEQ ID NO: 1285085 - DNA, 15 bp, Homo sapiens
gtgtgaatgtgggga

SEQ ID NO: 1285086 - DNA, 15 bp, Homo sapiens
tgtgtgaatgtgggg

SEQ ID NO: 1285087 - DNA, 15 bp, Homo sapiens
gtgtgtgaatgtggg

SEQ ID NO: 1285088 - DNA, 15 bp, Homo sapiens
cgtgtgtgaatgtgg

SEQ ID NO: 1285089 - DNA, 15 bp, Homo sapiens
gcgtgtgtgaatgtg

SEQ ID NO: 1285090 - DNA, 15 bp, Homo sapiens
tgcgtgtgtgaatgt

SEQ ID NO: 1285091 - DNA, 15 bp, Homo sapiens
atgcgtgtgtgaatg

SEQ ID NO: 1285092 - DNA, 15 bp, Homo sapiens
catgcgtgtgtgaat

SEQ ID NO: 1285093 - DNA, 15 bp, Homo sapiens
acatgcgtgtgtgaa

SEQ ID NO: 1285094 - DNA, 15 bp, Homo sapiens
aacatgcgtgtgtga

SEQ ID NO: 1285095 - DNA, 15 bp, Homo sapiens
gaacatgcgtgtgtg

SEQ ID NO: 1285096 - DNA, 15 bp, Homo sapiens
tgaacatgcgtgtgt

SEQ ID NO: 1285097 - DNA, 15 bp, Homo sapiens
gtgaacatgcgtgtg

SEQ ID NO: 1285098 - DNA, 15 bp, Homo sapiens
tgtgaacatgcgtgt

SEQ ID NO: 1285099 - DNA, 15 bp, Homo sapiens
atgtgaacatgcgtg

SEQ ID NO: 1285100 - DNA, 15 bp, Homo sapiens
catgtgaacatgcgt

SEQ ID NO: 1285101 - DNA, 15 bp, Homo sapiens
gcatgtgaacatgcg

SEQ ID NO: 1285102 - DNA, 15 bp, Homo sapiens
tgcatgtgaacatgc

SEQ ID NO: 1285103 - DNA, 15 bp, Homo sapiens
atgcatgtgaacatg

SEQ ID NO: 1285104 - DNA, 15 bp, Homo sapiens
catgcatgtgaacat

SEQ ID NO: 1285105 - DNA, 15 bp, Homo sapiens
gcatgcatgtgaaca

SEQ ID NO: 1285106 - DNA, 15 bp, Homo sapiens
tgcatgcatgtgaac

SEQ ID NO: 1285107 - DNA, 15 bp, Homo sapiens
gtgcatgcatgtgaa

SEQ ID NO: 1285108 - DNA, 15 bp, Homo sapiens
tgtgcatgcatgtga

SEQ ID NO: 1285109 - DNA, 15 bp, Homo sapiens
atgtgcatgcatgtg

SEQ ID NO: 1285110 - DNA, 15 bp, Homo sapiens
catgtgcatgcatgt

SEQ ID NO: 1285111 - DNA, 15 bp, Homo sapiens
acatgtgcatgcatg

SEQ ID NO: 1285112 - DNA, 15 bp, Homo sapiens
tacatgtgcatgcat

SEQ ID NO: 1285113 - DNA, 15 bp, Homo sapiens
atacatgtgcatgca

SEQ ID NO: 1285114 - DNA, 15 bp, Homo sapiens
catacatgtgcatgc

SEQ ID NO: 1285115 - DNA, 15 bp, Homo sapiens
gcatacatgtgcatg

SEQ ID NO: 1285116 - DNA, 15 bp, Homo sapiens
tgcatacatgtgcat

SEQ ID NO: 1285117 - DNA, 15 bp, Homo sapiens
ctgcatacatgtgca

SEQ ID NO: 1285118 - DNA, 15 bp, Homo sapiens
cctgcatacatgtgc

SEQ ID NO: 1285119 - DNA, 15 bp, Homo sapiens
gcctgcatacatgtg

SEQ ID NO: 1285120 - DNA, 15 bp, Homo sapiens
ggcctgcatacatgt

SEQ ID NO: 1285121 - DNA, 15 bp, Homo sapiens
cggcctgcatacatg

SEQ ID NO: 1285122 - DNA, 15 bp, Homo sapiens
ccggcctgcatacat

SEQ ID NO: 1285123 - DNA, 15 bp, Homo sapiens
gccggcctgcataca

SEQ ID NO: 1285124 - DNA, 15 bp, Homo sapiens
agccggcctgcatac

SEQ ID NO: 1285125 - DNA, 15 bp, Homo sapiens
aagccggcctgcata

SEQ ID NO: 1285126 - DNA, 15 bp, Homo sapiens
gaagccggcctgcat

SEQ ID NO: 1285127 - DNA, 15 bp, Homo sapiens
ggaagccggcctgca

SEQ ID NO: 1285128 - DNA, 15 bp, Homo sapiens
gggaagccggcctgc

SEQ ID NO: 1285129 - DNA, 15 bp, Homo sapiens
ggggaagccggcctg

SEQ ID NO: 1285130 - DNA, 15 bp, Homo sapiens
aggggaagccggcct

SEQ ID NO: 1285131 - DNA, 15 bp, Homo sapiens
gaggggaagccggcc

SEQ ID NO: 1285132 - DNA, 15 bp, Homo sapiens
tgaggggaagccggc

SEQ ID NO: 1285133 - DNA, 15 bp, Homo sapiens
gtgaggggaagccgg

SEQ ID NO: 1285134 - DNA, 15 bp, Homo sapiens
ggtgaggggaagccg

SEQ ID NO: 1285135 - DNA, 15 bp, Homo sapiens
aggtgaggggaagcc

SEQ ID NO: 1285136 - DNA, 15 bp, Homo sapiens
aaggtgaggggaagc

SEQ ID NO: 1285137 - DNA, 15 bp, Homo sapiens
aaaggtgaggggaag

SEQ ID NO: 1285138 - DNA, 15 bp, Homo sapiens
aaaaggtgaggggaa

SEQ ID NO: 1285139 - DNA, 15 bp, Homo sapiens
caaaaggtgagggga

SEQ ID NO: 1285140 - DNA, 15 bp, Homo sapiens
acaaaaggtgagggg

SEQ ID NO: 1285141 - DNA, 15 bp, Homo sapiens
aacaaaaggtgaggg

SEQ ID NO: 1285142 - DNA, 15 bp, Homo sapiens
aaacaaaaggtgagg

SEQ ID NO: 1285143 - DNA, 15 bp, Homo sapiens
aaaacaaaaggtgag

SEQ ID NO: 1285144 - DNA, 15 bp, Homo sapiens
aaaaacaaaaggtga

SEQ ID NO: 1285145 - DNA, 15 bp, Homo sapiens
aaaaaacaaaaggtg

SEQ ID NO: 1285146 - DNA, 15 bp, Homo sapiens
aaaaaaacaaaaggt

SEQ ID NO: 1285147 - DNA, 15 bp, Homo sapiens
aaaaaaaacaaaagg

SEQ ID NO: 1285148 - DNA, 15 bp, Homo sapiens
aaaaaaaaacaaaag

SEQ ID NO: 1285149 - DNA, 15 bp, Homo sapiens
tttttacaaaaaaaa

SEQ ID NO: 1285150 - DNA, 15 bp, Homo sapiens
ttttttacaaaaaaa

SEQ ID NO: 1285151 - DNA, 15 bp, Homo sapiens
gttttttacaaaaaa

SEQ ID NO: 1285152 - DNA, 15 bp, Homo sapiens
tgttttttacaaaaa

SEQ ID NO: 1285153 - DNA, 15 bp, Homo sapiens
gtgttttttacaaaa

SEQ ID NO: 1285154 - DNA, 15 bp, Homo sapiens
tgtgttttttacaaa

SEQ ID NO: 1285155 - DNA, 15 bp, Homo sapiens
gtgtgttttttacaa

SEQ ID NO: 1285156 - DNA, 15 bp, Homo sapiens
tgtgtgttttttaca

SEQ ID NO: 1285157 - DNA, 15 bp, Homo sapiens
atgtgtgttttttac

SEQ ID NO: 1285158 - DNA, 15 bp, Homo sapiens
gatgtgtgtttttta

SEQ ID NO: 1285159 - DNA, 15 bp, Homo sapiens
ggatgtgtgtttttt

SEQ ID NO: 1285160 - DNA, 15 bp, Homo sapiens
gggatgtgtgttttt

SEQ ID NO: 1285161 - DNA, 15 bp, Homo sapiens
agggatgtgtgtttt

SEQ ID NO: 1285162 - DNA, 15 bp, Homo sapiens
tagggatgtgtgttt

SEQ ID NO: 1285163 - DNA, 15 bp, Homo sapiens
atagggatgtgtgtt

SEQ ID NO: 1285164 - DNA, 15 bp, Homo sapiens
catagggatgtgtgt

SEQ ID NO: 1285165 - DNA, 15 bp, Homo sapiens
acatagggatgtgtg

SEQ ID NO: 1285166 - DNA, 15 bp, Homo sapiens
gacatagggatgtgt

SEQ ID NO: 1285167 - DNA, 15 bp, Homo sapiens
ggacatagggatgtg

SEQ ID NO: 1285168 - DNA, 15 bp, Homo sapiens
tggacatagggatgt

SEQ ID NO: 1285169 - DNA, 15 bp, Homo sapiens
gtggacatagggatg

SEQ ID NO: 1285170 - DNA, 15 bp, Homo sapiens
tgtggacatagggat

SEQ ID NO: 1285171 - DNA, 15 bp, Homo sapiens
ttgtggacataggga

SEQ ID NO: 1285172 - DNA, 15 bp, Homo sapiens
tttgtggacataggg

SEQ ID NO: 1285173 - DNA, 15 bp, Homo sapiens
gtttgtggacatagg

SEQ ID NO: 1285174 - DNA, 15 bp, Homo sapiens
tgtttgtggacatag

SEQ ID NO: 1285175 - DNA, 15 bp, Homo sapiens
gtgtttgtggacata

SEQ ID NO: 1285176 - DNA, 15 bp, Homo sapiens
ggtgtttgtggacat

SEQ ID NO: 1285177 - DNA, 15 bp, Homo sapiens
gggtgtttgtggaca

SEQ ID NO: 1285178 - DNA, 15 bp, Homo sapiens
agggtgtttgtggac

SEQ ID NO: 1285179 - DNA, 15 bp, Homo sapiens
gagggtgtttgtgga

SEQ ID NO: 1285180 - DNA, 15 bp, Homo sapiens
tgagggtgtttgtgg

SEQ ID NO: 1285181 - DNA, 15 bp, Homo sapiens
gtgagggtgtttgtg

SEQ ID NO: 1285182 - DNA, 15 bp, Homo sapiens
ggtgagggtgtttgt

SEQ ID NO: 1285183 - DNA, 15 bp, Homo sapiens
gggtgagggtgtttg

SEQ ID NO: 1285184 - DNA, 15 bp, Homo sapiens
agggtgagggtgttt

SEQ ID NO: 1285185 - DNA, 15 bp, Homo sapiens
gagggtgagggtgtt

SEQ ID NO: 1285186 - DNA, 15 bp, Homo sapiens
tgagggtgagggtgt

SEQ ID NO: 1285187 - DNA, 15 bp, Homo sapiens
gtgagggtgagggtg

SEQ ID NO: 1285188 - DNA, 15 bp, Homo sapiens
agtgagggtgagggt

SEQ ID NO: 1285189 - DNA, 15 bp, Homo sapiens
aagtgagggtgaggg

SEQ ID NO: 1285190 - DNA, 15 bp, Homo sapiens
gaagtgagggtgagg

SEQ ID NO: 1285191 - DNA, 15 bp, Homo sapiens
ggaagtgagggtgag

SEQ ID NO: 1285192 - DNA, 15 bp, Homo sapiens
aggaagtgagggtga

SEQ ID NO: 1285193 - DNA, 15 bp, Homo sapiens
gaggaagtgagggtg

SEQ ID NO: 1285194 - DNA, 15 bp, Homo sapiens
ggaggaagtgagggt

SEQ ID NO: 1285195 - DNA, 15 bp, Homo sapiens
gggaggaagtgaggg

SEQ ID NO: 1285196 - DNA, 15 bp, Homo sapiens
agggaggaagtgagg

SEQ ID NO: 1285197 - DNA, 15 bp, Homo sapiens
gagggaggaagtgag

SEQ ID NO: 1285198 - DNA, 15 bp, Homo sapiens
tgagggaggaagtga

SEQ ID NO: 1285199 - DNA, 15 bp, Homo sapiens
atgagggaggaagtg

SEQ ID NO: 1285200 - DNA, 15 bp, Homo sapiens
gatgagggaggaagt

SEQ ID NO: 1285201 - DNA, 15 bp, Homo sapiens
ggatgagggaggaag

SEQ ID NO: 1285202 - DNA, 15 bp, Homo sapiens
tggatgagggaggaa

SEQ ID NO: 1285203 - DNA, 15 bp, Homo sapiens
gtggatgagggagga

SEQ ID NO: 1285204 - DNA, 15 bp, Homo sapiens
tgtggatgagggagg

SEQ ID NO: 1285205 - DNA, 15 bp, Homo sapiens
ctgtggatgagggag

SEQ ID NO: 1285206 - DNA, 15 bp, Homo sapiens
tctgtggatgaggga

SEQ ID NO: 1285207 - DNA, 15 bp, Homo sapiens
gtctgtggatgaggg

SEQ ID NO: 1285208 - DNA, 15 bp, Homo sapiens
tgtctgtggatgagg

SEQ ID NO: 1285209 - DNA, 15 bp, Homo sapiens
gtgtctgtggatgag

SEQ ID NO: 1285210 - DNA, 15 bp, Homo sapiens
ggtgtctgtggatga

SEQ ID NO: 1285211 - DNA, 15 bp, Homo sapiens
aggtgtctgtggatg

SEQ ID NO: 1285212 - DNA, 15 bp, Homo sapiens
caggtgtctgtggat

SEQ ID NO: 1285213 - DNA, 15 bp, Homo sapiens
acaggtgtctgtgga

SEQ ID NO: 1285214 - DNA, 15 bp, Homo sapiens
aacaggtgtctgtgg

SEQ ID NO: 1285215 - DNA, 15 bp, Homo sapiens
gaacaggtgtctgtg

SEQ ID NO: 1285216 - DNA, 15 bp, Homo sapiens
ggaacaggtgtctgt

SEQ ID NO: 1285217 - DNA, 15 bp, Homo sapiens
gggaacaggtgtctg

SEQ ID NO: 1285218 - DNA, 15 bp, Homo sapiens
ggggaacaggtgtct

SEQ ID NO: 1285219 - DNA, 15 bp, Homo sapiens
tggggaacaggtgtc

SEQ ID NO: 1285220 - DNA, 15 bp, Homo sapiens
ctggggaacaggtgt

SEQ ID NO: 1285221 - DNA, 15 bp, Homo sapiens
actggggaacaggtg

SEQ ID NO: 1285222 - DNA, 15 bp, Homo sapiens
cactggggaacaggt

SEQ ID NO: 1285223 - DNA, 15 bp, Homo sapiens
tcactggggaacagg

SEQ ID NO: 1285224 - DNA, 15 bp, Homo sapiens
atcactggggaacag

SEQ ID NO: 1285225 - DNA, 15 bp, Homo sapiens
catcactggggaaca

SEQ ID NO: 1285226 - DNA, 15 bp, Homo sapiens
gcatcactggggaac

SEQ ID NO: 1285227 - DNA, 15 bp, Homo sapiens
tgcatcactggggaa

SEQ ID NO: 1285228 - DNA, 15 bp, Homo sapiens
gtgcatcactgggga

SEQ ID NO: 1285229 - DNA, 15 bp, Homo sapiens
tgtgcatcactgggg

SEQ ID NO: 1285230 - DNA, 15 bp, Homo sapiens
atgtgcatcactggg

SEQ ID NO: 1285231 - DNA, 15 bp, Homo sapiens
aatgtgcatcactgg

SEQ ID NO: 1285232 - DNA, 15 bp, Homo sapiens
aaatgtgcatcactg

SEQ ID NO: 1285233 - DNA, 15 bp, Homo sapiens
caaatgtgcatcact

SEQ ID NO: 1285234 - DNA, 15 bp, Homo sapiens
gcaaatgtgcatcac

SEQ ID NO: 1285235 - DNA, 15 bp, Homo sapiens
agcaaatgtgcatca

SEQ ID NO: 1285236 - DNA, 15 bp, Homo sapiens
gagcaaatgtgcatc

SEQ ID NO: 1285237 - DNA, 15 bp, Homo sapiens
tgagcaaatgtgcat

SEQ ID NO: 1285238 - DNA, 15 bp, Homo sapiens
gtgagcaaatgtgca

SEQ ID NO: 1285239 - DNA, 15 bp, Homo sapiens
tgtgagcaaatgtgc

SEQ ID NO: 1285240 - DNA, 15 bp, Homo sapiens
ggatcacagtctctt

SEQ ID NO: 1285241 - DNA, 15 bp, Homo sapiens
aggatcacagtctct

SEQ ID NO: 1285242 - DNA, 15 bp, Homo sapiens
gaggatcacagtctc

SEQ ID NO: 1285243 - DNA, 15 bp, Homo sapiens
agaggatcacagtct

SEQ ID NO: 1285244 - DNA, 15 bp, Homo sapiens
cagaggatcacagtc

SEQ ID NO: 1285245 - DNA, 15 bp, Homo sapiens
tcagaggatcacagt

SEQ ID NO: 1285246 - DNA, 15 bp, Homo sapiens
ttcagaggatcacag

SEQ ID NO: 1285247 - DNA, 15 bp, Homo sapiens
cttcagaggatcaca

SEQ ID NO: 1285248 - DNA, 15 bp, Homo sapiens
gcttcagaggatcac

SEQ ID NO: 1285249 - DNA, 15 bp, Homo sapiens
ggcttcagaggatca

SEQ ID NO: 1285250 - DNA, 15 bp, Homo sapiens
gggcttcagaggatc

SEQ ID NO: 1285251 - DNA, 15 bp, Homo sapiens
ggggcttcagaggat

SEQ ID NO: 1285252 - DNA, 15 bp, Homo sapiens
aggggcttcagagga

SEQ ID NO: 1285253 - DNA, 15 bp, Homo sapiens
caggggcttcagagg

SEQ ID NO: 1285254 - DNA, 15 bp, Homo sapiens
ccaggggcttcagag

SEQ ID NO: 1285255 - DNA, 15 bp, Homo sapiens
tccaggggcttcaga

SEQ ID NO: 1285256 - DNA, 15 bp, Homo sapiens
atccaggggcttcag

SEQ ID NO: 1285257 - DNA, 15 bp, Homo sapiens
tatccaggggcttca

SEQ ID NO: 1285258 - DNA, 15 bp, Homo sapiens
atatccaggggcttc

SEQ ID NO: 1285259 - DNA, 15 bp, Homo sapiens
catatccaggggctt

SEQ ID NO: 1285260 - DNA, 15 bp, Homo sapiens
acatatccaggggct

SEQ ID NO: 1285261 - DNA, 15 bp, Homo sapiens
gacatatccaggggc

SEQ ID NO: 1285262 - DNA, 15 bp, Homo sapiens
tgacatatccagggg

SEQ ID NO: 1285263 - DNA, 15 bp, Homo sapiens
ttgacatatccaggg

SEQ ID NO: 1285264 - DNA, 15 bp, Homo sapiens
tttgacatatccagg

SEQ ID NO: 1285265 - DNA, 15 bp, Homo sapiens
atttgacatatccag

SEQ ID NO: 1285266 - DNA, 15 bp, Homo sapiens
aatttgacatatcca

SEQ ID NO: 1285267 - DNA, 15 bp, Homo sapiens
gaatttgacatatcc

SEQ ID NO: 1285268 - DNA, 15 bp, Homo sapiens
tgaatttgacatatc

SEQ ID NO: 1285269 - DNA, 15 bp, Homo sapiens
atgaatttgacatat

SEQ ID NO: 1285270 - DNA, 15 bp, Homo sapiens
gatgaatttgacata

SEQ ID NO: 1285271 - DNA, 15 bp, Homo sapiens
agatgaatttgacat

SEQ ID NO: 1285272 - DNA, 15 bp, Homo sapiens
gagatgaatttgaca

SEQ ID NO: 1285273 - DNA, 15 bp, Homo sapiens
tgagatgaatttgac

SEQ ID NO: 1285274 - DNA, 15 bp, Homo sapiens
ctgagatgaatttga

SEQ ID NO: 1285275 - DNA, 15 bp, Homo sapiens
actgagatgaatttg

SEQ ID NO: 1285276 - DNA, 15 bp, Homo sapiens
cactgagatgaattt

SEQ ID NO: 1285277 - DNA, 15 bp, Homo sapiens
ccactgagatgaatt

SEQ ID NO: 1285278 - DNA, 15 bp, Homo sapiens
gccactgagatgaat

SEQ ID NO: 1285279 - DNA, 15 bp, Homo sapiens
ggccactgagatgaa

SEQ ID NO: 1285280 - DNA, 15 bp, Homo sapiens
aggccactgagatga

SEQ ID NO: 1285281 - DNA, 15 bp, Homo sapiens
aaggccactgagatg

SEQ ID NO: 1285282 - DNA, 15 bp, Homo sapiens
taaggccactgagat

SEQ ID NO: 1285283 - DNA, 15 bp, Homo sapiens
ataaggccactgaga

SEQ ID NO: 1285284 - DNA, 15 bp, Homo sapiens
cataaggccactgag

SEQ ID NO: 1285285 - DNA, 15 bp, Homo sapiens
gcataaggccactga

SEQ ID NO: 1285286 - DNA, 15 bp, Homo sapiens
tgcataaggccactg

SEQ ID NO: 1285287 - DNA, 15 bp, Homo sapiens
gtgcataaggccact

SEQ ID NO: 1285288 - DNA, 15 bp, Homo sapiens
ggtgcataaggccac

SEQ ID NO: 1285289 - DNA, 15 bp, Homo sapiens
gggtgcataaggcca

SEQ ID NO: 1285290 - DNA, 15 bp, Homo sapiens
agggtgcataaggcc

SEQ ID NO: 1285291 - DNA, 15 bp, Homo sapiens
aagggtgcataaggc

SEQ ID NO: 1285292 - DNA, 15 bp, Homo sapiens
gaagggtgcataagg

SEQ ID NO: 1285293 - DNA, 15 bp, Homo sapiens
cgaagggtgcataag

SEQ ID NO: 1285294 - DNA, 15 bp, Homo sapiens
gcgaagggtgcataa

SEQ ID NO: 1285295 - DNA, 15 bp, Homo sapiens
tgcgaagggtgcata

SEQ ID NO: 1285296 - DNA, 15 bp, Homo sapiens
atgcgaagggtgcat

SEQ ID NO: 1285297 - DNA, 15 bp, Homo sapiens
catgcgaagggtgca

SEQ ID NO: 1285298 - DNA, 15 bp, Homo sapiens
gcatgcgaagggtgc

SEQ ID NO: 1285299 - DNA, 15 bp, Homo sapiens
tgcatgcgaagggtg

SEQ ID NO: 1285300 - DNA, 15 bp, Homo sapiens
gtgcatgcgaagggt

SEQ ID NO: 1285301 - DNA, 15 bp, Homo sapiens
ggtgcatgcgaaggg

SEQ ID NO: 1285302 - DNA, 15 bp, Homo sapiens
aggtgcatgcgaagg

SEQ ID NO: 1285303 - DNA, 15 bp, Homo sapiens
caggtgcatgcgaag

SEQ ID NO: 1285304 - DNA, 15 bp, Homo sapiens
ccaggtgcatgcgaa

SEQ ID NO: 1285305 - DNA, 15 bp, Homo sapiens
accaggtgcatgcga

SEQ ID NO: 1285306 - DNA, 15 bp, Homo sapiens
taccaggtgcatgcg

SEQ ID NO: 1285307 - DNA, 15 bp, Homo sapiens
ataccaggtgcatgc

SEQ ID NO: 1285308 - DNA, 15 bp, Homo sapiens
tataccaggtgcatg

SEQ ID NO: 1285309 - DNA, 15 bp, Homo sapiens
ctataccaggtgcat

SEQ ID NO: 1285310 - DNA, 15 bp, Homo sapiens
cctataccaggtgca

SEQ ID NO: 1285311 - DNA, 15 bp, Homo sapiens
gcctataccaggtgc

SEQ ID NO: 1285312 - DNA, 15 bp, Homo sapiens
ggcctataccaggtg

SEQ ID NO: 1285313 - DNA, 15 bp, Homo sapiens
tggcctataccaggt

SEQ ID NO: 1285314 - DNA, 15 bp, Homo sapiens
ctggcctataccagg

SEQ ID NO: 1285315 - DNA, 15 bp, Homo sapiens
actggcctataccag

SEQ ID NO: 1285316 - DNA, 15 bp, Homo sapiens
cactggcctatacca

SEQ ID NO: 1285317 - DNA, 15 bp, Homo sapiens
gcactggcctatacc

SEQ ID NO: 1285318 - DNA, 15 bp, Homo sapiens
agcactggcctatac

SEQ ID NO: 1285319 - DNA, 15 bp, Homo sapiens
gagcactggcctata

SEQ ID NO: 1285320 - DNA, 15 bp, Homo sapiens
tgagcactggcctat

SEQ ID NO: 1285321 - DNA, 15 bp, Homo sapiens
ctgagcactggccta

SEQ ID NO: 1285322 - DNA, 15 bp, Homo sapiens
tctgagcactggcct

SEQ ID NO: 1285323 - DNA, 15 bp, Homo sapiens
ttctgagcactggcc

SEQ ID NO: 1285324 - DNA, 15 bp, Homo sapiens
tttctgagcactggc

SEQ ID NO: 1285325 - DNA, 15 bp, Homo sapiens
ttttctgagcactgg

SEQ ID NO: 1285326 - DNA, 15 bp, Homo sapiens
gttttctgagcactg

SEQ ID NO: 1285327 - DNA, 15 bp, Homo sapiens
tgttttctgagcact

SEQ ID NO: 1285328 - DNA, 15 bp, Homo sapiens
atgttttctgagcac

SEQ ID NO: 1285329 - DNA, 15 bp, Homo sapiens
aatgttttctgagca

SEQ ID NO: 1285330 - DNA, 15 bp, Homo sapiens
aaatgttttctgagc

SEQ ID NO: 1285331 - DNA, 15 bp, Homo sapiens
caaatgttttctgag

SEQ ID NO: 1285332 - DNA, 15 bp, Homo sapiens
gcaaatgttttctga

SEQ ID NO: 1285333 - DNA, 15 bp, Homo sapiens
agcaaatgttttctg

SEQ ID NO: 1285334 - DNA, 15 bp, Homo sapiens
gagcaaatgttttct

SEQ ID NO: 1285335 - DNA, 15 bp, Homo sapiens
ggagcaaatgttttc

SEQ ID NO: 1285336 - DNA, 15 bp, Homo sapiens
aggagcaaatgtttt

SEQ ID NO: 1285337 - DNA, 15 bp, Homo sapiens
caggagcaaatgttt

SEQ ID NO: 1285338 - DNA, 15 bp, Homo sapiens
ccaggagcaaatgtt

SEQ ID NO: 1285339 - DNA, 15 bp, Homo sapiens
tccaggagcaaatgt

SEQ ID NO: 1285340 - DNA, 15 bp, Homo sapiens
ctccaggagcaaatg

SEQ ID NO: 1285341 - DNA, 15 bp, Homo sapiens
tctccaggagcaaat

SEQ ID NO: 1285342 - DNA, 15 bp, Homo sapiens
ttctccaggagcaaa

SEQ ID NO: 1285343 - DNA, 15 bp, Homo sapiens
cttctccaggagcaa

SEQ ID NO: 1285344 - DNA, 15 bp, Homo sapiens
acttctccaggagca

SEQ ID NO: 1285345 - DNA, 15 bp, Homo sapiens
aacttctccaggagc

SEQ ID NO: 1285346 - DNA, 15 bp, Homo sapiens
caacttctccaggag

SEQ ID NO: 1285347 - DNA, 15 bp, Homo sapiens
gcaacttctccagga

SEQ ID NO: 1285348 - DNA, 15 bp, Homo sapiens
agcaacttctccagg

SEQ ID NO: 1285349 - DNA, 15 bp, Homo sapiens
cagcaacttctccag

SEQ ID NO: 1285350 - DNA, 15 bp, Homo sapiens
ccagcaacttctcca

SEQ ID NO: 1285351 - DNA, 15 bp, Homo sapiens
accagcaacttctcc

SEQ ID NO: 1285352 - DNA, 15 bp, Homo sapiens
aaccagcaacttctc

SEQ ID NO: 1285353 - DNA, 15 bp, Homo sapiens
gaaccagcaacttct

SEQ ID NO: 1285354 - DNA, 15 bp, Homo sapiens
tgaaccagcaacttc

SEQ ID NO: 1285355 - DNA, 15 bp, Homo sapiens
ctgaaccagcaactt

SEQ ID NO: 1285356 - DNA, 15 bp, Homo sapiens
actgaaccagcaact

SEQ ID NO: 1285357 - DNA, 15 bp, Homo sapiens
aactgaaccagcaac

SEQ ID NO: 1285358 - DNA, 15 bp, Homo sapiens
gaactgaaccagcaa

SEQ ID NO: 1285359 - DNA, 15 bp, Homo sapiens
agaactgaaccagca

SEQ ID NO: 1285360 - DNA, 15 bp, Homo sapiens
cagaactgaaccagc

SEQ ID NO: 1285361 - DNA, 15 bp, Homo sapiens
acagaactgaaccag

SEQ ID NO: 1285362 - DNA, 15 bp, Homo sapiens
cacagaactgaacca

SEQ ID NO: 1285363 - DNA, 15 bp, Homo sapiens
acacagaactgaacc

SEQ ID NO: 1285364 - DNA, 15 bp, Homo sapiens
cacacagaactgaac

SEQ ID NO: 1285365 - DNA, 15 bp, Homo sapiens
ccacacagaactgaa

SEQ ID NO: 1285366 - DNA, 15 bp, Homo sapiens
tccacacagaactga

SEQ ID NO: 1285367 - DNA, 15 bp, Homo sapiens
ctccacacagaactg

SEQ ID NO: 1285368 - DNA, 15 bp, Homo sapiens
gctccacacagaact

SEQ ID NO: 1285369 - DNA, 15 bp, Homo sapiens
agctccacacagaac

SEQ ID NO: 1285370 - DNA, 15 bp, Homo sapiens
cagctccacacagaa

SEQ ID NO: 1285371 - DNA, 15 bp, Homo sapiens
gcagctccacacaga

SEQ ID NO: 1285372 - DNA, 15 bp, Homo sapiens
agcagctccacacag

SEQ ID NO: 1285373 - DNA, 15 bp, Homo sapiens
gagcagctccacaca

SEQ ID NO: 1285374 - DNA, 15 bp, Homo sapiens
agagcagctccacac

SEQ ID NO: 1285375 - DNA, 15 bp, Homo sapiens
cagagcagctccaca

SEQ ID NO: 1285376 - DNA, 15 bp, Homo sapiens
acagagcagctccac

SEQ ID NO: 1285377 - DNA, 15 bp, Homo sapiens
cacagagcagctcca

SEQ ID NO: 1285378 - DNA, 15 bp, Homo sapiens
acacagagcagctcc

SEQ ID NO: 1285379 - DNA, 15 bp, Homo sapiens
aacacagagcagctc

SEQ ID NO: 1285380 - DNA, 15 bp, Homo sapiens
gaacacagagcagct

SEQ ID NO: 1285381 - DNA, 15 bp, Homo sapiens
ggaacacagagcagc

SEQ ID NO: 1285382 - DNA, 15 bp, Homo sapiens
tggaacacagagcag

SEQ ID NO: 1285383 - DNA, 15 bp, Homo sapiens
ttggaacacagagca

SEQ ID NO: 1285384 - DNA, 15 bp, Homo sapiens
cttggaacacagagc

SEQ ID NO: 1285385 - DNA, 15 bp, Homo sapiens
tcttggaacacagag

SEQ ID NO: 1285386 - DNA, 15 bp, Homo sapiens
atcttggaacacaga

SEQ ID NO: 1285387 - DNA, 15 bp, Homo sapiens
gatcttggaacacag

SEQ ID NO: 1285388 - DNA, 15 bp, Homo sapiens
agatcttggaacaca

SEQ ID NO: 1285389 - DNA, 15 bp, Homo sapiens
cagatcttggaacac

SEQ ID NO: 1285390 - DNA, 15 bp, Homo sapiens
gcagatcttggaaca

SEQ ID NO: 1285391 - DNA, 15 bp, Homo sapiens
cgcagatcttggaac

SEQ ID NO: 1285392 - DNA, 15 bp, Homo sapiens
gcgcagatcttggaa

SEQ ID NO: 1285393 - DNA, 15 bp, Homo sapiens
agcgcagatcttgga

SEQ ID NO: 1285394 - DNA, 15 bp, Homo sapiens
cagcgcagatcttgg

SEQ ID NO: 1285395 - DNA, 15 bp, Homo sapiens
ccagcgcagatcttg

SEQ ID NO: 1285396 - DNA, 15 bp, Homo sapiens
gccagcgcagatctt

SEQ ID NO: 1285397 - DNA, 15 bp, Homo sapiens
agccagcgcagatct

SEQ ID NO: 1285398 - DNA, 15 bp, Homo sapiens
cagccagcgcagatc

SEQ ID NO: 1285399 - DNA, 15 bp, Homo sapiens
gcagccagcgcagat

SEQ ID NO: 1285400 - DNA, 15 bp, Homo sapiens
tgcagccagcgcaga

SEQ ID NO: 1285401 - DNA, 15 bp, Homo sapiens
ctgcagccagcgcag

SEQ ID NO: 1285402 - DNA, 15 bp, Homo sapiens
cctgcagccagcgca

SEQ ID NO: 1285403 - DNA, 15 bp, Homo sapiens
ccctgcagccagcgc

SEQ ID NO: 1285404 - DNA, 15 bp, Homo sapiens
tccctgcagccagcg

SEQ ID NO: 1285405 - DNA, 15 bp, Homo sapiens
atccctgcagccagc

SEQ ID NO: 1285406 - DNA, 15 bp, Homo sapiens
tatccctgcagccag

SEQ ID NO: 1285407 - DNA, 15 bp, Homo sapiens
ttatccctgcagcca

SEQ ID NO: 1285408 - DNA, 15 bp, Homo sapiens
gttatccctgcagcc

SEQ ID NO: 1285409 - DNA, 15 bp, Homo sapiens
tgttatccctgcagc

SEQ ID NO: 1285410 - DNA, 15 bp, Homo sapiens
ctgttatccctgcag

SEQ ID NO: 1285411 - DNA, 15 bp, Homo sapiens
cctgttatccctgca

SEQ ID NO: 1285412 - DNA, 15 bp, Homo sapiens
ccctgttatccctgc

SEQ ID NO: 1285413 - DNA, 15 bp, Homo sapiens
tccctgttatccctg

SEQ ID NO: 1285414 - DNA, 15 bp, Homo sapiens
atccctgttatccct

SEQ ID NO: 1285415 - DNA, 15 bp, Homo sapiens
cttccatccctgtta

SEQ ID NO: 1285416 - DNA, 15 bp, Homo sapiens
tcttccatccctgtt

SEQ ID NO: 1285417 - DNA, 15 bp, Homo sapiens
ctcttccatccctgt

SEQ ID NO: 1285418 - DNA, 15 bp, Homo sapiens
tctcttccatccctg

SEQ ID NO: 1285419 - DNA, 15 bp, Homo sapiens
ttctcttccatccct

SEQ ID NO: 1285420 - DNA, 15 bp, Homo sapiens
gttctcttccatccc

SEQ ID NO: 1285421 - DNA, 15 bp, Homo sapiens
ggttctcttccatcc

SEQ ID NO: 1285422 - DNA, 15 bp, Homo sapiens
tggttctcttccatc

SEQ ID NO: 1285423 - DNA, 15 bp, Homo sapiens
ctggttctcttccat

SEQ ID NO: 1285424 - DNA, 15 bp, Homo sapiens
gctggttctcttcca

SEQ ID NO: 1285425 - DNA, 15 bp, Homo sapiens
ggctggttctcttcc

SEQ ID NO: 1285426 - DNA, 15 bp, Homo sapiens
gggctggttctcttc

SEQ ID NO: 1285427 - DNA, 15 bp, Homo sapiens
agggctggttctctt

SEQ ID NO: 1285428 - DNA, 15 bp, Homo sapiens
aagggctggttctct

SEQ ID NO: 1285429 - DNA, 15 bp, Homo sapiens
gaagggctggttctc

SEQ ID NO: 1285430 - DNA, 15 bp, Homo sapiens
agaagggctggttct

SEQ ID NO: 1285431 - DNA, 15 bp, Homo sapiens
gagaagggctggttc

SEQ ID NO: 1285432 - DNA, 15 bp, Homo sapiens
agagaagggctggtt

SEQ ID NO: 1285433 - DNA, 15 bp, Homo sapiens
aagagaagggctggt

SEQ ID NO: 1285434 - DNA, 15 bp, Homo sapiens
caagagaagggctgg

SEQ ID NO: 1285435 - DNA, 15 bp, Homo sapiens
tcaagagaagggctg

SEQ ID NO: 1285436 - DNA, 15 bp, Homo sapiens
ctcaagagaagggct

SEQ ID NO: 1285437 - DNA, 15 bp, Homo sapiens
cctcaagagaagggc

SEQ ID NO: 1285438 - DNA, 15 bp, Homo sapiens
tcctcaagagaaggg

SEQ ID NO: 1285439 - DNA, 15 bp, Homo sapiens
ctcctcaagagaagg

SEQ ID NO: 1285440 - DNA, 15 bp, Homo sapiens
gctcctcaagagaag

SEQ ID NO: 1285441 - DNA, 15 bp, Homo sapiens
agctcctcaagagaa

SEQ ID NO: 1285442 - DNA, 15 bp, Homo sapiens
gagctcctcaagaga

SEQ ID NO: 1285443 - DNA, 15 bp, Homo sapiens
ggagctcctcaagag

SEQ ID NO: 1285444 - DNA, 15 bp, Homo sapiens
gggagctcctcaaga

SEQ ID NO: 1285445 - DNA, 15 bp, Homo sapiens
agggagctcctcaag

SEQ ID NO: 1285446 - DNA, 15 bp, Homo sapiens
cagggagctcctcaa

SEQ ID NO: 1285447 - DNA, 15 bp, Homo sapiens
gcagggagctcctca

SEQ ID NO: 1285448 - DNA, 15 bp, Homo sapiens
agcagggagctcctc

SEQ ID NO: 1285449 - DNA, 15 bp, Homo sapiens
tagcagggagctcct

SEQ ID NO: 1285450 - DNA, 15 bp, Homo sapiens
ctagcagggagctcc

SEQ ID NO: 1285451 - DNA, 15 bp, Homo sapiens
actagcagggagctc

SEQ ID NO: 1285452 - DNA, 15 bp, Homo sapiens
cactagcagggagct

SEQ ID NO: 1285453 - DNA, 15 bp, Homo sapiens
tcactagcagggagc

SEQ ID NO: 1285454 - DNA, 15 bp, Homo sapiens
ctcactagcagggag

SEQ ID NO: 1285455 - DNA, 15 bp, Homo sapiens
cctcactagcaggga

SEQ ID NO: 1285456 - DNA, 15 bp, Homo sapiens
ccctcactagcaggg

SEQ ID NO: 1285457 - DNA, 15 bp, Homo sapiens
accctcactagcagg

SEQ ID NO: 1285458 - DNA, 15 bp, Homo sapiens
gaccctcactagcag

SEQ ID NO: 1285459 - DNA, 15 bp, Homo sapiens
tgaccctcactagca

SEQ ID NO: 1285460 - DNA, 15 bp, Homo sapiens
ttgaccctcactagc

SEQ ID NO: 1285461 - DNA, 15 bp, Homo sapiens
attgaccctcactag

SEQ ID NO: 1285462 - DNA, 15 bp, Homo sapiens
gattgaccctcacta

SEQ ID NO: 1285463 - DNA, 15 bp, Homo sapiens
tgattgaccctcact

SEQ ID NO: 1285464 - DNA, 15 bp, Homo sapiens
ttgattgaccctcac

SEQ ID NO: 1285465 - DNA, 15 bp, Homo sapiens
cttgattgaccctca

SEQ ID NO: 1285466 - DNA, 15 bp, Homo sapiens
acttgattgaccctc

SEQ ID NO: 1285467 - DNA, 15 bp, Homo sapiens
cacttgattgaccct

SEQ ID NO: 1285468 - DNA, 15 bp, Homo sapiens
gcacttgattgaccc

SEQ ID NO: 1285469 - DNA, 15 bp, Homo sapiens
ggcacttgattgacc

SEQ ID NO: 1285470 - DNA, 15 bp, Homo sapiens
aggcacttgattgac

SEQ ID NO: 1285471 - DNA, 15 bp, Homo sapiens
caggcacttgattga

SEQ ID NO: 1285472 - DNA, 15 bp, Homo sapiens
ccaggcacttgattg

SEQ ID NO: 1285473 - DNA, 15 bp, Homo sapiens
tccaggcacttgatt

SEQ ID NO: 1285474 - DNA, 15 bp, Homo sapiens
ttccaggcacttgat

SEQ ID NO: 1285475 - DNA, 15 bp, Homo sapiens
cttccaggcacttga

SEQ ID NO: 1285476 - DNA, 15 bp, Homo sapiens
acttccaggcacttg

SEQ ID NO: 1285477 - DNA, 15 bp, Homo sapiens
aacttccaggcactt

SEQ ID NO: 1285478 - DNA, 15 bp, Homo sapiens
caacttccaggcact

SEQ ID NO: 1285479 - DNA, 15 bp, Homo sapiens
acaacttccaggcac

SEQ ID NO: 1285480 - DNA, 15 bp, Homo sapiens
cacaacttccaggca

SEQ ID NO: 1285481 - DNA, 15 bp, Homo sapiens
acacaacttccaggc

SEQ ID NO: 1285482 - DNA, 15 bp, Homo sapiens
cacacaacttccagg

SEQ ID NO: 1285483 - DNA, 15 bp, Homo sapiens
acacacaacttccag

SEQ ID NO: 1285484 - DNA, 15 bp, Homo sapiens
cacacacaacttcca

SEQ ID NO: 1285485 - DNA, 15 bp, Homo sapiens
ccacacacaacttcc

SEQ ID NO: 1285486 - DNA, 15 bp, Homo sapiens
cccacacacaacttc

SEQ ID NO: 1285487 - DNA, 15 bp, Homo sapiens
gcccacacacaactt

SEQ ID NO: 1285488 - DNA, 15 bp, Homo sapiens
tgcccacacacaact

SEQ ID NO: 1285489 - DNA, 15 bp, Homo sapiens
atgcccacacacaac

SEQ ID NO: 1285490 - DNA, 15 bp, Homo sapiens
catgcccacacacaa

SEQ ID NO: 1285491 - DNA, 15 bp, Homo sapiens
gcatgcccacacaca

SEQ ID NO: 1285492 - DNA, 15 bp, Homo sapiens
tgcatgcccacacac

SEQ ID NO: 1285493 - DNA, 15 bp, Homo sapiens
ctgcatgcccacaca

SEQ ID NO: 1285494 - DNA, 15 bp, Homo sapiens
tctgcatgcccacac

SEQ ID NO: 1285495 - DNA, 15 bp, Homo sapiens
ctctgcatgcccaca

SEQ ID NO: 1285496 - DNA, 15 bp, Homo sapiens
actctgcatgcccac

SEQ ID NO: 1285497 - DNA, 15 bp, Homo sapiens
cactctgcatgccca

SEQ ID NO: 1285498 - DNA, 15 bp, Homo sapiens
gcactctgcatgccc

SEQ ID NO: 1285499 - DNA, 15 bp, Homo sapiens
tgcactctgcatgcc

SEQ ID NO: 1285500 - DNA, 15 bp, Homo sapiens
atgcactctgcatgc

SEQ ID NO: 1285501 - DNA, 15 bp, Homo sapiens
catgcactctgcatg

SEQ ID NO: 1285502 - DNA, 15 bp, Homo sapiens
tcatgcactctgcat

SEQ ID NO: 1285503 - DNA, 15 bp, Homo sapiens
atcatgcactctgca

SEQ ID NO: 1285504 - DNA, 15 bp, Homo sapiens
tatcatgcactctgc

SEQ ID NO: 1285505 - DNA, 15 bp, Homo sapiens
atatcatgcactctg

SEQ ID NO: 1285506 - DNA, 15 bp, Homo sapiens
catatcatgcactct

SEQ ID NO: 1285507 - DNA, 15 bp, Homo sapiens
gcatatcatgcactc

SEQ ID NO: 1285508 - DNA, 15 bp, Homo sapiens
ggcatatcatgcact

SEQ ID NO: 1285509 - DNA, 15 bp, Homo sapiens
tggcatatcatgcac

SEQ ID NO: 1285510 - DNA, 15 bp, Homo sapiens
ctggcatatcatgca

SEQ ID NO: 1285511 - DNA, 15 bp, Homo sapiens
cctggcatatcatgc

SEQ ID NO: 1285512 - DNA, 15 bp, Homo sapiens
acctggcatatcatg

SEQ ID NO: 1285513 - DNA, 15 bp, Homo sapiens
cacctggcatatcat

SEQ ID NO: 1285514 - DNA, 15 bp, Homo sapiens
gcacctggcatatca

SEQ ID NO: 1285515 - DNA, 15 bp, Homo sapiens
ggcacctggcatatc

SEQ ID NO: 1285516 - DNA, 15 bp, Homo sapiens
cggcacctggcatat

SEQ ID NO: 1285517 - DNA, 15 bp, Homo sapiens
ccggcacctggcata

SEQ ID NO: 1285518 - DNA, 15 bp, Homo sapiens
cccggcacctggcat

SEQ ID NO: 1285519 - DNA, 15 bp, Homo sapiens
tcccggcacctggca

SEQ ID NO: 1285520 - DNA, 15 bp, Homo sapiens
ttcccggcacctggc

SEQ ID NO: 1285521 - DNA, 15 bp, Homo sapiens
cttcccggcacctgg

SEQ ID NO: 1285522 - DNA, 15 bp, Homo sapiens
gcttcccggcacctg

SEQ ID NO: 1285523 - DNA, 15 bp, Homo sapiens
ggcttcccggcacct

SEQ ID NO: 1285524 - DNA, 15 bp, Homo sapiens
aggcttcccggcacc

SEQ ID NO: 1285525 - DNA, 15 bp, Homo sapiens
gaggcttcccggcac

SEQ ID NO: 1285526 - DNA, 15 bp, Homo sapiens
ggaggcttcccggca

SEQ ID NO: 1285527 - DNA, 15 bp, Homo sapiens
gggaggcttcccggc

SEQ ID NO: 1285528 - DNA, 15 bp, Homo sapiens
tgggaggcttcccgg

SEQ ID NO: 1285529 - DNA, 15 bp, Homo sapiens
ctgggaggcttcccg

SEQ ID NO: 1285530 - DNA, 15 bp, Homo sapiens
gctgggaggcttccc

SEQ ID NO: 1285531 - DNA, 15 bp, Homo sapiens
ggctgggaggcttcc

SEQ ID NO: 1285532 - DNA, 15 bp, Homo sapiens
gggctgggaggcttc

SEQ ID NO: 1285533 - DNA, 15 bp, Homo sapiens
tgggctgggaggctt

SEQ ID NO: 1285534 - DNA, 15 bp, Homo sapiens
ctgggctgggaggct

SEQ ID NO: 1285535 - DNA, 15 bp, Homo sapiens
cctgggctgggaggc

SEQ ID NO: 1285536 - DNA, 15 bp, Homo sapiens
ccctgggctgggagg

SEQ ID NO: 1285537 - DNA, 15 bp, Homo sapiens
cccctgggctgggag

SEQ ID NO: 1285538 - DNA, 15 bp, Homo sapiens
gcccctgggctggga

SEQ ID NO: 1285539 - DNA, 15 bp, Homo sapiens
agcccctgggctggg

SEQ ID NO: 1285540 - DNA, 15 bp, Homo sapiens
cagcccctgggctgg

SEQ ID NO: 1285541 - DNA, 15 bp, Homo sapiens
ccagcccctgggctg

SEQ ID NO: 1285542 - DNA, 15 bp, Homo sapiens
tccagcccctgggct

SEQ ID NO: 1285543 - DNA, 15 bp, Homo sapiens
ctccagcccctgggc

SEQ ID NO: 1285544 - DNA, 15 bp, Homo sapiens
cctccagcccctggg

SEQ ID NO: 1285545 - DNA, 15 bp, Homo sapiens
ccctccagcccctgg

SEQ ID NO: 1285546 - DNA, 15 bp, Homo sapiens
tccctccagcccctg

SEQ ID NO: 1285547 - DNA, 15 bp, Homo sapiens
ctccctccagcccct

SEQ ID NO: 1285548 - DNA, 15 bp, Homo sapiens
cctccctccagcccc

SEQ ID NO: 1285549 - DNA, 15 bp, Homo sapiens
ccctccctccagccc

SEQ ID NO: 1285550 - DNA, 15 bp, Homo sapiens
cccctccctccagcc

SEQ ID NO: 1285551 - DNA, 15 bp, Homo sapiens
gcccctccctccagc

SEQ ID NO: 1285552 - DNA, 15 bp, Homo sapiens
tgcccctccctccag

SEQ ID NO: 1285553 - DNA, 15 bp, Homo sapiens
gtgcccctccctcca

SEQ ID NO: 1285554 - DNA, 15 bp, Homo sapiens
agtgcccctccctcc

SEQ ID NO: 1285555 - DNA, 15 bp, Homo sapiens
cagtgcccctccctc

SEQ ID NO: 1285556 - DNA, 15 bp, Homo sapiens
gcagtgcccctccct

SEQ ID NO: 1285557 - DNA, 15 bp, Homo sapiens
agcagtgcccctccc

SEQ ID NO: 1285558 - DNA, 15 bp, Homo sapiens
aagcagtgcccctcc

SEQ ID NO: 1285559 - DNA, 15 bp, Homo sapiens
taagcagtgcccctc

SEQ ID NO: 1285560 - DNA, 15 bp, Homo sapiens
ctaagcagtgcccct

SEQ ID NO: 1285561 - DNA, 15 bp, Homo sapiens
actaagcagtgcccc

SEQ ID NO: 1285562 - DNA, 15 bp, Homo sapiens
cactaagcagtgccc

SEQ ID NO: 1285563 - DNA, 15 bp, Homo sapiens
ccactaagcagtgcc

SEQ ID NO: 1285564 - DNA, 15 bp, Homo sapiens
cccactaagcagtgc

SEQ ID NO: 1285565 - DNA, 15 bp, Homo sapiens
gcccactaagcagtg

SEQ ID NO: 1285566 - DNA, 15 bp, Homo sapiens
tgcccactaagcagt

SEQ ID NO: 1285567 - DNA, 15 bp, Homo sapiens
ctgcccactaagcag

SEQ ID NO: 1285568 - DNA, 15 bp, Homo sapiens
gctgcccactaagca

SEQ ID NO: 1285569 - DNA, 15 bp, Homo sapiens
agctgcccactaagc

SEQ ID NO: 1285570 - DNA, 15 bp, Homo sapiens
gagctgcccactaag

SEQ ID NO: 1285571 - DNA, 15 bp, Homo sapiens
agagctgcccactaa

SEQ ID NO: 1285572 - DNA, 15 bp, Homo sapiens
aagagctgcccacta

SEQ ID NO: 1285573 - DNA, 15 bp, Homo sapiens
aaagagctgcccact

SEQ ID NO: 1285574 - DNA, 15 bp, Homo sapiens
caaagagctgcccac

SEQ ID NO: 1285575 - DNA, 15 bp, Homo sapiens
ccaaagagctgccca

SEQ ID NO: 1285576 - DNA, 15 bp, Homo sapiens
tccaaagagctgccc

SEQ ID NO: 1285577 - DNA, 15 bp, Homo sapiens
ctccaaagagctgcc

SEQ ID NO: 1285578 - DNA, 15 bp, Homo sapiens
cctccaaagagctgc

SEQ ID NO: 1285579 - DNA, 15 bp, Homo sapiens
tcctccaaagagctg

SEQ ID NO: 1285580 - DNA, 15 bp, Homo sapiens
ctcctccaaagagct

SEQ ID NO: 1285581 - DNA, 15 bp, Homo sapiens
gctcctccaaagagc

SEQ ID NO: 1285582 - DNA, 15 bp, Homo sapiens
agctcctccaaagag

SEQ ID NO: 1285583 - DNA, 15 bp, Homo sapiens
cagctcctccaaaga

SEQ ID NO: 1285584 - DNA, 15 bp, Homo sapiens
tcagctcctccaaag

SEQ ID NO: 1285585 - DNA, 15 bp, Homo sapiens
atcagctcctccaaa

SEQ ID NO: 1285586 - DNA, 15 bp, Homo sapiens
catcagctcctccaa

SEQ ID NO: 1285587 - DNA, 15 bp, Homo sapiens
gcatcagctcctcca

SEQ ID NO: 1285588 - DNA, 15 bp, Homo sapiens
agcatcagctcctcc

SEQ ID NO: 1285589 - DNA, 15 bp, Homo sapiens
aagcatcagctcctc

SEQ ID NO: 1285590 - DNA, 15 bp, Homo sapiens
caagcatcagctcct

SEQ ID NO: 1285591 - DNA, 15 bp, Homo sapiens
tcaagcatcagctcc

SEQ ID NO: 1285592 - DNA, 15 bp, Homo sapiens
ttcaagcatcagctc

SEQ ID NO: 1285593 - DNA, 15 bp, Homo sapiens
gttcaagcatcagct

SEQ ID NO: 1285594 - DNA, 15 bp, Homo sapiens
tgttcaagcatcagc

SEQ ID NO: 1285595 - DNA, 15 bp, Homo sapiens
ctgttcaagcatcag

SEQ ID NO: 1285596 - DNA, 15 bp, Homo sapiens
tctgttcaagcatca

SEQ ID NO: 1285597 - DNA, 15 bp, Homo sapiens
ctctgttcaagcatc

SEQ ID NO: 1285598 - DNA, 15 bp, Homo sapiens
actctgttcaagcat

SEQ ID NO: 1285599 - DNA, 15 bp, Homo sapiens
gactctgttcaagca

SEQ ID NO: 1285600 - DNA, 15 bp, Homo sapiens
agactctgttcaagc

SEQ ID NO: 1285601 - DNA, 15 bp, Homo sapiens
aagactctgttcaag

SEQ ID NO: 1285602 - DNA, 15 bp, Homo sapiens
gaagactctgttcaa

SEQ ID NO: 1285603 - DNA, 15 bp, Homo sapiens
tgaagactctgttca

SEQ ID NO: 1285604 - DNA, 15 bp, Homo sapiens
ctgaagactctgttc

SEQ ID NO: 1285605 - DNA, 15 bp, Homo sapiens
cctgaagactctgtt

SEQ ID NO: 1285606 - DNA, 15 bp, Homo sapiens
tcctgaagactctgt

SEQ ID NO: 1285607 - DNA, 15 bp, Homo sapiens
ttcctgaagactctg

SEQ ID NO: 1285608 - DNA, 15 bp, Homo sapiens
cttcctgaagactct

SEQ ID NO: 1285609 - DNA, 15 bp, Homo sapiens
ccttcctgaagactc

SEQ ID NO: 1285610 - DNA, 15 bp, Homo sapiens
tccttcctgaagact

SEQ ID NO: 1285611 - DNA, 15 bp, Homo sapiens
ctccttcctgaagac

SEQ ID NO: 1285612 - DNA, 15 bp, Homo sapiens
tctccttcctgaaga

SEQ ID NO: 1285613 - DNA, 15 bp, Homo sapiens
ctctccttcctgaag

SEQ ID NO: 1285614 - DNA, 15 bp, Homo sapiens
cctctccttcctgaa

SEQ ID NO: 1285615 - DNA, 15 bp, Homo sapiens
tcctctccttcctga

SEQ ID NO: 1285616 - DNA, 15 bp, Homo sapiens
ctcctctccttcctg

SEQ ID NO: 1285617 - DNA, 15 bp, Homo sapiens
actcctctccttcct

SEQ ID NO: 1285618 - DNA, 15 bp, Homo sapiens
aactcctctccttcc

SEQ ID NO: 1285619 - DNA, 15 bp, Homo sapiens
taactcctctccttc

SEQ ID NO: 1285620 - DNA, 15 bp, Homo sapiens
ctaactcctctcctt

SEQ ID NO: 1285621 - DNA, 15 bp, Homo sapiens
gctaactcctctcct

SEQ ID NO: 1285622 - DNA, 15 bp, Homo sapiens
ggctaactcctctcc

SEQ ID NO: 1285623 - DNA, 15 bp, Homo sapiens
gggctaactcctctc

SEQ ID NO: 1285624 - DNA, 15 bp, Homo sapiens
agggctaactcctct

SEQ ID NO: 1285625 - DNA, 15 bp, Homo sapiens
cagggctaactcctc

SEQ ID NO: 1285626 - DNA, 15 bp, Homo sapiens
ccagggctaactcct

SEQ ID NO: 1285627 - DNA, 15 bp, Homo sapiens
cccagggctaactcc

SEQ ID NO: 1285628 - DNA, 15 bp, Homo sapiens
acccagggctaactc

SEQ ID NO: 1285629 - DNA, 15 bp, Homo sapiens
cacccagggctaact

SEQ ID NO: 1285630 - DNA, 15 bp, Homo sapiens
ccacccagggctaac

SEQ ID NO: 1285631 - DNA, 15 bp, Homo sapiens
cccacccagggctaa

SEQ ID NO: 1285632 - DNA, 15 bp, Homo sapiens
ccccacccagggcta

SEQ ID NO: 1285633 - DNA, 15 bp, Homo sapiens
tccccacccagggct

SEQ ID NO: 1285634 - DNA, 15 bp, Homo sapiens
ctccccacccagggc

SEQ ID NO: 1285635 - DNA, 15 bp, Homo sapiens
cctccccacccaggg

SEQ ID NO: 1285636 - DNA, 15 bp, Homo sapiens
gcctccccacccagg

SEQ ID NO: 1285637 - DNA, 15 bp, Homo sapiens
tgcctccccacccag

SEQ ID NO: 1285638 - DNA, 15 bp, Homo sapiens
tctctgcctccccac

SEQ ID NO: 1285639 - DNA, 15 bp, Homo sapiens
ttctctgcctcccca

SEQ ID NO: 1285640 - DNA, 15 bp, Homo sapiens
cttctctgcctcccc

SEQ ID NO: 1285641 - DNA, 15 bp, Homo sapiens
ccttctctgcctccc

SEQ ID NO: 1285642 - DNA, 15 bp, Homo sapiens
tccttctctgcctcc

SEQ ID NO: 1285643 - DNA, 15 bp, Homo sapiens
ttccttctctgcctc

SEQ ID NO: 1285644 - DNA, 15 bp, Homo sapiens
tttccttctctgcct

SEQ ID NO: 1285645 - DNA, 15 bp, Homo sapiens
ctttccttctctgcc

SEQ ID NO: 1285646 - DNA, 15 bp, Homo sapiens
tctttccttctctgc

SEQ ID NO: 1285647 - DNA, 15 bp, Homo sapiens
ctctttccttctctg

SEQ ID NO: 1285648 - DNA, 15 bp, Homo sapiens
tctctttccttctct

SEQ ID NO: 1285649 - DNA, 15 bp, Homo sapiens
gtctctttccttctc

SEQ ID NO: 1285650 - DNA, 15 bp, Homo sapiens
tgtctctttccttct

SEQ ID NO: 1285651 - DNA, 15 bp, Homo sapiens
gtgtctctttccttc

SEQ ID NO: 1285652 - DNA, 15 bp, Homo sapiens
agtgtctctttcctt

SEQ ID NO: 1285653 - DNA, 15 bp, Homo sapiens
cagtgtctctttcct

SEQ ID NO: 1285654 - DNA, 15 bp, Homo sapiens
tcagtgtctctttcc

SEQ ID NO: 1285655 - DNA, 15 bp, Homo sapiens
ttcagtgtctctttc

SEQ ID NO: 1285656 - DNA, 15 bp, Homo sapiens
tttcagtgtctcttt

SEQ ID NO: 1285657 - DNA, 15 bp, Homo sapiens
ctttcagtgtctctt

SEQ ID NO: 1285658 - DNA, 15 bp, Homo sapiens
gctttcagtgtctct

SEQ ID NO: 1285659 - DNA, 15 bp, Homo sapiens
ggctttcagtgtctc

SEQ ID NO: 1285660 - DNA, 15 bp, Homo sapiens
cggctttcagtgtct

SEQ ID NO: 1285661 - DNA, 15 bp, Homo sapiens
tcggctttcagtgtc

SEQ ID NO: 1285662 - DNA, 15 bp, Homo sapiens
ctcggctttcagtgt

SEQ ID NO: 1285663 - DNA, 15 bp, Homo sapiens
cctcggctttcagtg

SEQ ID NO: 1285664 - DNA, 15 bp, Homo sapiens
ccctcggctttcagt

SEQ ID NO: 1285665 - DNA, 15 bp, Homo sapiens
cccctcggctttcag

SEQ ID NO: 1285666 - DNA, 15 bp, Homo sapiens
acccctcggctttca

SEQ ID NO: 1285667 - DNA, 15 bp, Homo sapiens
cacccctcggctttc

SEQ ID NO: 1285668 - DNA, 15 bp, Homo sapiens
tcacccctcggcttt

SEQ ID NO: 1285669 - DNA, 15 bp, Homo sapiens
ttcacccctcggctt

SEQ ID NO: 1285670 - DNA, 15 bp, Homo sapiens
gttcacccctcggct

SEQ ID NO: 1285671 - DNA, 15 bp, Homo sapiens
ggttcacccctcggc

SEQ ID NO: 1285672 - DNA, 15 bp, Homo sapiens
tggttcacccctcgg

SEQ ID NO: 1285673 - DNA, 15 bp, Homo sapiens
gtggttcacccctcg

SEQ ID NO: 1285674 - DNA, 15 bp, Homo sapiens
tgtggttcacccctc

SEQ ID NO: 1285675 - DNA, 15 bp, Homo sapiens
ttgtggttcacccct

SEQ ID NO: 1285676 - DNA, 15 bp, Homo sapiens
tttgtggttcacccc

SEQ ID NO: 1285677 - DNA, 15 bp, Homo sapiens
atttgtggttcaccc

SEQ ID NO: 1285678 - DNA, 15 bp, Homo sapiens
tatttgtggttcacc

SEQ ID NO: 1285679 - DNA, 15 bp, Homo sapiens
atatttgtggttcac

SEQ ID NO: 1285680 - DNA, 15 bp, Homo sapiens
aatatttgtggttca

SEQ ID NO: 1285681 - DNA, 15 bp, Homo sapiens
aaatatttgtggttc

SEQ ID NO: 1285682 - DNA, 15 bp, Homo sapiens
caaatatttgtggtt

SEQ ID NO: 1285683 - DNA, 15 bp, Homo sapiens
ccaaatatttgtggt

SEQ ID NO: 1285684 - DNA, 15 bp, Homo sapiens
cccaaatatttgtgg

SEQ ID NO: 1285685 - DNA, 15 bp, Homo sapiens
tcccaaatatttgtg

SEQ ID NO: 1285686 - DNA, 15 bp, Homo sapiens
ttcccaaatatttgt

SEQ ID NO: 1285687 - DNA, 15 bp, Homo sapiens
tttcccaaatatttg

SEQ ID NO: 1285688 - DNA, 15 bp, Homo sapiens
atttcccaaatattt

SEQ ID NO: 1285689 - DNA, 15 bp, Homo sapiens
catttcccaaatatt

SEQ ID NO: 1285690 - DNA, 15 bp, Homo sapiens
ccatttcccaaatat

SEQ ID NO: 1285691 - DNA, 15 bp, Homo sapiens
gccatttcccaaata

SEQ ID NO: 1285692 - DNA, 15 bp, Homo sapiens
tgccatttcccaaat

SEQ ID NO: 1285693 - DNA, 15 bp, Homo sapiens
gtgccatttcccaaa

SEQ ID NO: 1285694 - DNA, 15 bp, Homo sapiens
ggtgccatttcccaa

SEQ ID NO: 1285695 - DNA, 15 bp, Homo sapiens
tggtgccatttccca

SEQ ID NO: 1285696 - DNA, 15 bp, Homo sapiens
ctggtgccatttccc

SEQ ID NO: 1285697 - DNA, 15 bp, Homo sapiens
gctggtgccatttcc

SEQ ID NO: 1285698 - DNA, 15 bp, Homo sapiens
tgctggtgccatttc

SEQ ID NO: 1285699 - DNA, 15 bp, Homo sapiens
ttgctggtgccattt

SEQ ID NO: 1285700 - DNA, 15 bp, Homo sapiens
cttgctggtgccatt

SEQ ID NO: 1285701 - DNA, 15 bp, Homo sapiens
ccttgctggtgccat

SEQ ID NO: 1285702 - DNA, 15 bp, Homo sapiens
accttgctggtgcca

SEQ ID NO: 1285703 - DNA, 15 bp, Homo sapiens
caccttgctggtgcc

SEQ ID NO: 1285704 - DNA, 15 bp, Homo sapiens
acaccttgctggtgc

SEQ ID NO: 1285705 - DNA, 15 bp, Homo sapiens
tacaccttgctggtg

SEQ ID NO: 1285706 - DNA, 15 bp, Homo sapiens
gtacaccttgctggt

SEQ ID NO: 1285707 - DNA, 15 bp, Homo sapiens
tgtacaccttgctgg

SEQ ID NO: 1285708 - DNA, 15 bp, Homo sapiens
ctgtacaccttgctg

SEQ ID NO: 1285709 - DNA, 15 bp, Homo sapiens
gctgtacaccttgct

SEQ ID NO: 1285710 - DNA, 15 bp, Homo sapiens
tgctgtacaccttgc

SEQ ID NO: 1285711 - DNA, 15 bp, Homo sapiens
ctgctgtacaccttg

SEQ ID NO: 1285712 - DNA, 15 bp, Homo sapiens
cctgctgtacacctt

SEQ ID NO: 1285713 - DNA, 15 bp, Homo sapiens
ccctgctgtacacct

SEQ ID NO: 1285714 - DNA, 15 bp, Homo sapiens
cccctgctgtacacc

SEQ ID NO: 1285715 - DNA, 15 bp, Homo sapiens
acccctgctgtacac

SEQ ID NO: 1285716 - DNA, 15 bp, Homo sapiens
aacccctgctgtaca

SEQ ID NO: 1285717 - DNA, 15 bp, Homo sapiens
aaacccctgctgtac

SEQ ID NO: 1285718 - DNA, 15 bp, Homo sapiens
gaaacccctgctgta

SEQ ID NO: 1285719 - DNA, 15 bp, Homo sapiens
ggaaacccctgctgt

SEQ ID NO: 1285720 - DNA, 15 bp, Homo sapiens
tggaaacccctgctg

SEQ ID NO: 1285721 - DNA, 15 bp, Homo sapiens
ttggaaacccctgct

SEQ ID NO: 1285722 - DNA, 15 bp, Homo sapiens
tttggaaacccctgc

SEQ ID NO: 1285723 - DNA, 15 bp, Homo sapiens
ctttggaaacccctg

SEQ ID NO: 1285724 - DNA, 15 bp, Homo sapiens
tctttggaaacccct

SEQ ID NO: 1285725 - DNA, 15 bp, Homo sapiens
ctctttggaaacccc

SEQ ID NO: 1285726 - DNA, 15 bp, Homo sapiens
actctttggaaaccc

SEQ ID NO: 1285727 - DNA, 15 bp, Homo sapiens
aactctttggaaacc

SEQ ID NO: 1285728 - DNA, 15 bp, Homo sapiens
gaactctttggaaac

SEQ ID NO: 1285729 - DNA, 15 bp, Homo sapiens
ggaactctttggaaa

SEQ ID NO: 1285730 - DNA, 15 bp, Homo sapiens
aggaactctttggaa

SEQ ID NO: 1285731 - DNA, 15 bp, Homo sapiens
caggaactctttgga

SEQ ID NO: 1285732 - DNA, 15 bp, Homo sapiens
tcaggaactctttgg

SEQ ID NO: 1285733 - DNA, 15 bp, Homo sapiens
atcaggaactctttg

SEQ ID NO: 1285734 - DNA, 15 bp, Homo sapiens
aatcaggaactcttt

SEQ ID NO: 1285735 - DNA, 15 bp, Homo sapiens
gaatcaggaactctt

SEQ ID NO: 1285736 - DNA, 15 bp, Homo sapiens
ggaatcaggaactct

SEQ ID NO: 1285737 - DNA, 15 bp, Homo sapiens
gggaatcaggaactc

SEQ ID NO: 1285738 - DNA, 15 bp, Homo sapiens
agggaatcaggaact

SEQ ID NO: 1285739 - DNA, 15 bp, Homo sapiens
gagggaatcaggaac

SEQ ID NO: 1285740 - DNA, 15 bp, Homo sapiens
ggagggaatcaggaa

SEQ ID NO: 1285741 - DNA, 15 bp, Homo sapiens
aggagggaatcagga

SEQ ID NO: 1285742 - DNA, 15 bp, Homo sapiens
gaggagggaatcagg

SEQ ID NO: 1285743 - DNA, 15 bp, Homo sapiens
tgaggagggaatcag

SEQ ID NO: 1285744 - DNA, 15 bp, Homo sapiens
ttgaggagggaatca

SEQ ID NO: 1285745 - DNA, 15 bp, Homo sapiens
tttgaggagggaatc

SEQ ID NO: 1285746 - DNA, 15 bp, Homo sapiens
ctttgaggagggaat

SEQ ID NO: 1285747 - DNA, 15 bp, Homo sapiens
actttgaggagggaa

SEQ ID NO: 1285748 - DNA, 15 bp, Homo sapiens
cactttgaggaggga

SEQ ID NO: 1285749 - DNA, 15 bp, Homo sapiens
tcactttgaggaggg

SEQ ID NO: 1285750 - DNA, 15 bp, Homo sapiens
atcactttgaggagg

SEQ ID NO: 1285751 - DNA, 15 bp, Homo sapiens
catcactttgaggag

SEQ ID NO: 1285752 - DNA, 15 bp, Homo sapiens
ccatcactttgagga

SEQ ID NO: 1285753 - DNA, 15 bp, Homo sapiens
cccatcactttgagg

SEQ ID NO: 1285754 - DNA, 15 bp, Homo sapiens
tcccatcactttgag

SEQ ID NO: 1285755 - DNA, 15 bp, Homo sapiens
ctcccatcactttga

SEQ ID NO: 1285756 - DNA, 15 bp, Homo sapiens
gctcccatcactttg

SEQ ID NO: 1285757 - DNA, 15 bp, Homo sapiens
ggctcccatcacttt

SEQ ID NO: 1285758 - DNA, 15 bp, Homo sapiens
tggctcccatcactt

SEQ ID NO: 1285759 - DNA, 15 bp, Homo sapiens
gtggctcccatcact

SEQ ID NO: 1285760 - DNA, 15 bp, Homo sapiens
tgtggctcccatcac

SEQ ID NO: 1285761 - DNA, 15 bp, Homo sapiens
gtgtggctcccatca

SEQ ID NO: 1285762 - DNA, 15 bp, Homo sapiens
agtgtggctcccatc

SEQ ID NO: 1285763 - DNA, 15 bp, Homo sapiens
aagtgtggctcccat

SEQ ID NO: 1285764 - DNA, 15 bp, Homo sapiens
gaagtgtggctccca

SEQ ID NO: 1285765 - DNA, 15 bp, Homo sapiens
ggaagtgtggctccc

SEQ ID NO: 1285766 - DNA, 15 bp, Homo sapiens
aggaagtgtggctcc

SEQ ID NO: 1285767 - DNA, 15 bp, Homo sapiens
caggaagtgtggctc

SEQ ID NO: 1285768 - DNA, 15 bp, Homo sapiens
ccaggaagtgtggct

SEQ ID NO: 1285769 - DNA, 15 bp, Homo sapiens
gccaggaagtgtggc

SEQ ID NO: 1285770 - DNA, 15 bp, Homo sapiens
agccaggaagtgtgg

SEQ ID NO: 1285771 - DNA, 15 bp, Homo sapiens
aagccaggaagtgtg

SEQ ID NO: 1285772 - DNA, 15 bp, Homo sapiens
taagccaggaagtgt

SEQ ID NO: 1285773 - DNA, 15 bp, Homo sapiens
ataagccaggaagtg

SEQ ID NO: 1285774 - DNA, 15 bp, Homo sapiens
gataagccaggaagt

SEQ ID NO: 1285775 - DNA, 15 bp, Homo sapiens
tgataagccaggaag

SEQ ID NO: 1285776 - DNA, 15 bp, Homo sapiens
ctgataagccaggaa

SEQ ID NO: 1285777 - DNA, 15 bp, Homo sapiens
actgataagccagga

SEQ ID NO: 1285778 - DNA, 15 bp, Homo sapiens
aactgataagccagg

SEQ ID NO: 1285779 - DNA, 15 bp, Homo sapiens
caactgataagccag

SEQ ID NO: 1285780 - DNA, 15 bp, Homo sapiens
ccaactgataagcca

SEQ ID NO: 1285781 - DNA, 15 bp, Homo sapiens
accaactgataagcc

SEQ ID NO: 1285782 - DNA, 15 bp, Homo sapiens
gaccaactgataagc

SEQ ID NO: 1285783 - DNA, 15 bp, Homo sapiens
ggaccaactgataag

SEQ ID NO: 1285784 - DNA, 15 bp, Homo sapiens
aggaccaactgataa

SEQ ID NO: 1285785 - DNA, 15 bp, Homo sapiens
aaggaccaactgata

SEQ ID NO: 1285786 - DNA, 15 bp, Homo sapiens
caaggaccaactgat

SEQ ID NO: 1285787 - DNA, 15 bp, Homo sapiens
gcaaggaccaactga

SEQ ID NO: 1285788 - DNA, 15 bp, Homo sapiens
ggcaaggaccaactg

SEQ ID NO: 1285789 - DNA, 15 bp, Homo sapiens
gggcaaggaccaact

SEQ ID NO: 1285790 - DNA, 15 bp, Homo sapiens
agggcaaggaccaac

SEQ ID NO: 1285791 - DNA, 15 bp, Homo sapiens
gagggcaaggaccaa

SEQ ID NO: 1285792 - DNA, 15 bp, Homo sapiens
agagggcaaggacca

SEQ ID NO: 1285793 - DNA, 15 bp, Homo sapiens
cagagggcaaggacc

SEQ ID NO: 1285794 - DNA, 15 bp, Homo sapiens
ccagagggcaaggac

SEQ ID NO: 1285795 - DNA, 15 bp, Homo sapiens
gccagagggcaagga

SEQ ID NO: 1285796 - DNA, 15 bp, Homo sapiens
agccagagggcaagg

SEQ ID NO: 1285797 - DNA, 15 bp, Homo sapiens
cagccagagggcaag

SEQ ID NO: 1285798 - DNA, 15 bp, Homo sapiens
ccagccagagggcaa

SEQ ID NO: 1285799 - DNA, 15 bp, Homo sapiens
accagccagagggca

SEQ ID NO: 1285800 - DNA, 15 bp, Homo sapiens
caccagccagagggc

SEQ ID NO: 1285801 - DNA, 15 bp, Homo sapiens
gcaccagccagaggg

SEQ ID NO: 1285802 - DNA, 15 bp, Homo sapiens
agcaccagccagagg

SEQ ID NO: 1285803 - DNA, 15 bp, Homo sapiens
cagcaccagccagag

SEQ ID NO: 1285804 - DNA, 15 bp, Homo sapiens
acagcaccagccaga

SEQ ID NO: 1285805 - DNA, 15 bp, Homo sapiens
cacagcaccagccag

SEQ ID NO: 1285806 - DNA, 15 bp, Homo sapiens
acacagcaccagcca

SEQ ID NO: 1285807 - DNA, 15 bp, Homo sapiens
cacacagcaccagcc

SEQ ID NO: 1285808 - DNA, 15 bp, Homo sapiens
acacacagcaccagc

SEQ ID NO: 1285809 - DNA, 15 bp, Homo sapiens
gacacacagcaccag

SEQ ID NO: 1285810 - DNA, 15 bp, Homo sapiens
agacacacagcacca

SEQ ID NO: 1285811 - DNA, 15 bp, Homo sapiens
cagacacacagcacc

SEQ ID NO: 1285812 - DNA, 15 bp, Homo sapiens
tcagacacacagcac

SEQ ID NO: 1285813 - DNA, 15 bp, Homo sapiens
ctcagacacacagca

SEQ ID NO: 1285814 - DNA, 15 bp, Homo sapiens
tctcagacacacagc

SEQ ID NO: 1285815 - DNA, 15 bp, Homo sapiens
ctctcagacacacag

SEQ ID NO: 1285816 - DNA, 15 bp, Homo sapiens
cctctcagacacaca

SEQ ID NO: 1285817 - DNA, 15 bp, Homo sapiens
gcctctcagacacac

SEQ ID NO: 1285818 - DNA, 15 bp, Homo sapiens
tgcctctcagacaca

SEQ ID NO: 1285819 - DNA, 15 bp, Homo sapiens
ctgcctctcagacac

SEQ ID NO: 1285820 - DNA, 15 bp, Homo sapiens
gctgcctctcagaca

SEQ ID NO: 1285821 - DNA, 15 bp, Homo sapiens
ggctgcctctcagac

SEQ ID NO: 1285822 - DNA, 15 bp, Homo sapiens
aggctgcctctcaga

SEQ ID NO: 1285823 - DNA, 15 bp, Homo sapiens
taggctgcctctcag

SEQ ID NO: 1285824 - DNA, 15 bp, Homo sapiens
ctaggctgcctctca

SEQ ID NO: 1285825 - DNA, 15 bp, Homo sapiens
cctaggctgcctctc

SEQ ID NO: 1285826 - DNA, 15 bp, Homo sapiens
tcctaggctgcctct

SEQ ID NO: 1285827 - DNA, 15 bp, Homo sapiens
ttcctaggctgcctc

SEQ ID NO: 1285828 - DNA, 15 bp, Homo sapiens
cttcctaggctgcct

SEQ ID NO: 1285829 - DNA, 15 bp, Homo sapiens
tcttcctaggctgcc

SEQ ID NO: 1285830 - DNA, 15 bp, Homo sapiens
gtcttcctaggctgc

SEQ ID NO: 1285831 - DNA, 15 bp, Homo sapiens
ggtcttcctaggctg

SEQ ID NO: 1285832 - DNA, 15 bp, Homo sapiens
aggtcttcctaggct

SEQ ID NO: 1285833 - DNA, 15 bp, Homo sapiens
gaggtcttcctaggc

SEQ ID NO: 1285834 - DNA, 15 bp, Homo sapiens
agaggtcttcctagg

SEQ ID NO: 1285835 - DNA, 15 bp, Homo sapiens
gagaggtcttcctag

SEQ ID NO: 1285836 - DNA, 15 bp, Homo sapiens
agagaggtcttccta

SEQ ID NO: 1285837 - DNA, 15 bp, Homo sapiens
cagagaggtcttcct

SEQ ID NO: 1285838 - DNA, 15 bp, Homo sapiens
ccagagaggtcttcc

SEQ ID NO: 1285839 - DNA, 15 bp, Homo sapiens
cccagagaggtcttc

SEQ ID NO: 1285840 - DNA, 15 bp, Homo sapiens
ccccagagaggtctt

SEQ ID NO: 1285841 - DNA, 15 bp, Homo sapiens
tccccagagaggtct

SEQ ID NO: 1285842 - DNA, 15 bp, Homo sapiens
ctccccagagaggtc

SEQ ID NO: 1285843 - DNA, 15 bp, Homo sapiens
tctccccagagaggt

SEQ ID NO: 1285844 - DNA, 15 bp, Homo sapiens
ttctccccagagagg

SEQ ID NO: 1285845 - DNA, 15 bp, Homo sapiens
cttctccccagagag

SEQ ID NO: 1285846 - DNA, 15 bp, Homo sapiens
gcttctccccagaga

SEQ ID NO: 1285847 - DNA, 15 bp, Homo sapiens
tgcttctccccagag

SEQ ID NO: 1285848 - DNA, 15 bp, Homo sapiens
ctgcttctccccaga

SEQ ID NO: 1285849 - DNA, 15 bp, Homo sapiens
tctgcttctccccag

SEQ ID NO: 1285850 - DNA, 15 bp, Homo sapiens
ctctgcttctcccca

SEQ ID NO: 1285851 - DNA, 15 bp, Homo sapiens
tctctgcttctcccc

SEQ ID NO: 1285852 - DNA, 15 bp, Homo sapiens
ttctctgcttctccc

SEQ ID NO: 1285853 - DNA, 15 bp, Homo sapiens
tttctctgcttctcc

SEQ ID NO: 1285854 - DNA, 15 bp, Homo sapiens
ctttctctgcttctc

SEQ ID NO: 1285855 - DNA, 15 bp, Homo sapiens
tctttctctgcttct

SEQ ID NO: 1285856 - DNA, 15 bp, Homo sapiens
atctttctctgcttc

SEQ ID NO: 1285857 - DNA, 15 bp, Homo sapiens
tatctttctctgctt

SEQ ID NO: 1285858 - DNA, 15 bp, Homo sapiens
ctatctttctctgct

SEQ ID NO: 1285859 - DNA, 15 bp, Homo sapiens
gctatctttctctgc

SEQ ID NO: 1285860 - DNA, 15 bp, Homo sapiens
cgctatctttctctg

SEQ ID NO: 1285861 - DNA, 15 bp, Homo sapiens
tcgctatctttctct

SEQ ID NO: 1285862 - DNA, 15 bp, Homo sapiens
gtcgctatctttctc

SEQ ID NO: 1285863 - DNA, 15 bp, Homo sapiens
ggtcgctatctttct

SEQ ID NO: 1285864 - DNA, 15 bp, Homo sapiens
aggtcgctatctttc

SEQ ID NO: 1285865 - DNA, 15 bp, Homo sapiens
gaggtcgctatcttt

SEQ ID NO: 1285866 - DNA, 15 bp, Homo sapiens
agaggtcgctatctt

SEQ ID NO: 1285867 - DNA, 15 bp, Homo sapiens
cagaggtcgctatct

SEQ ID NO: 1285868 - DNA, 15 bp, Homo sapiens
tcagaggtcgctatc

SEQ ID NO: 1285869 - DNA, 15 bp, Homo sapiens
ttcagaggtcgctat

SEQ ID NO: 1285870 - DNA, 15 bp, Homo sapiens
gttcagaggtcgcta

SEQ ID NO: 1285871 - DNA, 15 bp, Homo sapiens
cgttcagaggtcgct

SEQ ID NO: 1285872 - DNA, 15 bp, Homo sapiens
acgttcagaggtcgc

SEQ ID NO: 1285873 - DNA, 15 bp, Homo sapiens
cacgttcagaggtcg

SEQ ID NO: 1285874 - DNA, 15 bp, Homo sapiens
gcacgttcagaggtc

SEQ ID NO: 1285875 - DNA, 15 bp, Homo sapiens
agcacgttcagaggt

SEQ ID NO: 1285876 - DNA, 15 bp, Homo sapiens
gagcacgttcagagg

SEQ ID NO: 1285877 - DNA, 15 bp, Homo sapiens
ggagcacgttcagag

SEQ ID NO: 1285878 - DNA, 15 bp, Homo sapiens
gggagcacgttcaga

SEQ ID NO: 1285879 - DNA, 15 bp, Homo sapiens
ggggagcacgttcag

SEQ ID NO: 1285880 - DNA, 15 bp, Homo sapiens
tggggagcacgttca

SEQ ID NO: 1285881 - DNA, 15 bp, Homo sapiens
ctggggagcacgttc

SEQ ID NO: 1285882 - DNA, 15 bp, Homo sapiens
tctggggagcacgtt

SEQ ID NO: 1285883 - DNA, 15 bp, Homo sapiens
ttctggggagcacgt

SEQ ID NO: 1285884 - DNA, 15 bp, Homo sapiens
attctggggagcacg

SEQ ID NO: 1285885 - DNA, 15 bp, Homo sapiens
aattctggggagcac

SEQ ID NO: 1285886 - DNA, 15 bp, Homo sapiens
gaattctggggagca

SEQ ID NO: 1285887 - DNA, 15 bp, Homo sapiens
tgaattctggggagc

SEQ ID NO: 1285888 - DNA, 15 bp, Homo sapiens
ctgaattctggggag

SEQ ID NO: 1285889 - DNA, 15 bp, Homo sapiens
actgaattctgggga

SEQ ID NO: 1285890 - DNA, 15 bp, Homo sapiens
gactgaattctgggg

SEQ ID NO: 1285891 - DNA, 15 bp, Homo sapiens
tgactgaattctggg

SEQ ID NO: 1285892 - DNA, 15 bp, Homo sapiens
gtgactgaattctgg

SEQ ID NO: 1285893 - DNA, 15 bp, Homo sapiens
ggtgactgaattctg

SEQ ID NO: 1285894 - DNA, 15 bp, Homo sapiens
gggtgactgaattct

SEQ ID NO: 1285895 - DNA, 15 bp, Homo sapiens
ggggtgactgaattc

SEQ ID NO: 1285896 - DNA, 15 bp, Homo sapiens
tggggtgactgaatt

SEQ ID NO: 1285897 - DNA, 15 bp, Homo sapiens
atggggtgactgaat

SEQ ID NO: 1285898 - DNA, 15 bp, Homo sapiens
gatggggtgactgaa

SEQ ID NO: 1285899 - DNA, 15 bp, Homo sapiens
ggatggggtgactga

SEQ ID NO: 1285900 - DNA, 15 bp, Homo sapiens
aggatggggtgactg

SEQ ID NO: 1285901 - DNA, 15 bp, Homo sapiens
taggatggggtgact

SEQ ID NO: 1285902 - DNA, 15 bp, Homo sapiens
gtaggatggggtgac

SEQ ID NO: 1285903 - DNA, 15 bp, Homo sapiens
ggtaggatggggtga

SEQ ID NO: 1285904 - DNA, 15 bp, Homo sapiens
aggtaggatggggtg

SEQ ID NO: 1285905 - DNA, 15 bp, Homo sapiens
taggtaggatggggt

SEQ ID NO: 1285906 - DNA, 15 bp, Homo sapiens
ataggtaggatgggg

SEQ ID NO: 1285907 - DNA, 15 bp, Homo sapiens
cataggtaggatggg

SEQ ID NO: 1285908 - DNA, 15 bp, Homo sapiens
tcataggtaggatgg

SEQ ID NO: 1285909 - DNA, 15 bp, Homo sapiens
ctcataggtaggatg

SEQ ID NO: 1285910 - DNA, 15 bp, Homo sapiens
tctcataggtaggat

SEQ ID NO: 1285911 - DNA, 15 bp, Homo sapiens
ctctcataggtagga

SEQ ID NO: 1285912 - DNA, 15 bp, Homo sapiens
cctctcataggtagg

SEQ ID NO: 1285913 - DNA, 15 bp, Homo sapiens
ccctctcataggtag

SEQ ID NO: 1285914 - DNA, 15 bp, Homo sapiens
cccctctcataggta

SEQ ID NO: 1285915 - DNA, 15 bp, Homo sapiens
tcccctctcataggt

SEQ ID NO: 1285916 - DNA, 15 bp, Homo sapiens
gtcccctctcatagg

SEQ ID NO: 1285917 - DNA, 15 bp, Homo sapiens
tgtcccctctcatag

SEQ ID NO: 1285918 - DNA, 15 bp, Homo sapiens
ttgtcccctctcata

SEQ ID NO: 1285919 - DNA, 15 bp, Homo sapiens
tttgtcccctctcat

SEQ ID NO: 1285920 - DNA, 15 bp, Homo sapiens
gtttgtcccctctca

SEQ ID NO: 1285921 - DNA, 15 bp, Homo sapiens
agtttgtcccctctc

SEQ ID NO: 1285922 - DNA, 15 bp, Homo sapiens
cagtttgtcccctct

SEQ ID NO: 1285923 - DNA, 15 bp, Homo sapiens
ccagtttgtcccctc

SEQ ID NO: 1285924 - DNA, 15 bp, Homo sapiens
gccagtttgtcccct

SEQ ID NO: 1285925 - DNA, 15 bp, Homo sapiens
tgccagtttgtcccc

SEQ ID NO: 1285926 - DNA, 15 bp, Homo sapiens
ctgccagtttgtccc

SEQ ID NO: 1285927 - DNA, 15 bp, Homo sapiens
actgccagtttgtcc

SEQ ID NO: 1285928 - DNA, 15 bp, Homo sapiens
gactgccagtttgtc

SEQ ID NO: 1285929 - DNA, 15 bp, Homo sapiens
agactgccagtttgt

SEQ ID NO: 1285930 - DNA, 15 bp, Homo sapiens
tagactgccagtttg

SEQ ID NO: 1285931 - DNA, 15 bp, Homo sapiens
gtagactgccagttt

SEQ ID NO: 1285932 - DNA, 15 bp, Homo sapiens
tgtagactgccagtt

SEQ ID NO: 1285933 - DNA, 15 bp, Homo sapiens
ctgtagactgccagt

SEQ ID NO: 1285934 - DNA, 15 bp, Homo sapiens
cctgtagactgccag

SEQ ID NO: 1285935 - DNA, 15 bp, Homo sapiens
acctgtagactgcca

SEQ ID NO: 1285936 - DNA, 15 bp, Homo sapiens
cacctgtagactgcc

SEQ ID NO: 1285937 - DNA, 15 bp, Homo sapiens
acacctgtagactgc

SEQ ID NO: 1285938 - DNA, 15 bp, Homo sapiens
cacacctgtagactg

SEQ ID NO: 1285939 - DNA, 15 bp, Homo sapiens
acacacctgtagact

SEQ ID NO: 1285940 - DNA, 15 bp, Homo sapiens
aacacacctgtagac

SEQ ID NO: 1285941 - DNA, 15 bp, Homo sapiens
aaacacacctgtaga

SEQ ID NO: 1285942 - DNA, 15 bp, Homo sapiens
caaacacacctgtag

SEQ ID NO: 1285943 - DNA, 15 bp, Homo sapiens
ccaaacacacctgta

SEQ ID NO: 1285944 - DNA, 15 bp, Homo sapiens
accaaacacacctgt

SEQ ID NO: 1285945 - DNA, 15 bp, Homo sapiens
aaccaaacacacctg

SEQ ID NO: 1285946 - DNA, 15 bp, Homo sapiens
atctgtttcttccag

SEQ ID NO: 1285947 - DNA, 15 bp, Homo sapiens
aatctgtttcttcca

SEQ ID NO: 1285948 - DNA, 15 bp, Homo sapiens
caatctgtttcttcc

SEQ ID NO: 1285949 - DNA, 15 bp, Homo sapiens
tcaatctgtttcttc

SEQ ID NO: 1285950 - DNA, 15 bp, Homo sapiens
ttcaatctgtttctt

SEQ ID NO: 1285951 - DNA, 15 bp, Homo sapiens
attcaatctgtttct

SEQ ID NO: 1285952 - DNA, 15 bp, Homo sapiens
gattcaatctgtttc

SEQ ID NO: 1285953 - DNA, 15 bp, Homo sapiens
tgattcaatctgttt

SEQ ID NO: 1285954 - DNA, 15 bp, Homo sapiens
atgattcaatctgtt

SEQ ID NO: 1285955 - DNA, 15 bp, Homo sapiens
catgattcaatctgt

SEQ ID NO: 1285956 - DNA, 15 bp, Homo sapiens
ccatgattcaatctg

SEQ ID NO: 1285957 - DNA, 15 bp, Homo sapiens
tccatgattcaatct

SEQ ID NO: 1285958 - DNA, 15 bp, Homo sapiens
gtccatgattcaatc

SEQ ID NO: 1285959 - DNA, 15 bp, Homo sapiens
ggtccatgattcaat

SEQ ID NO: 1285960 - DNA, 15 bp, Homo sapiens
aggtccatgattcaa

SEQ ID NO: 1285961 - DNA, 15 bp, Homo sapiens
caggtccatgattca

SEQ ID NO: 1285962 - DNA, 15 bp, Homo sapiens
gcaggtccatgattc

SEQ ID NO: 1285963 - DNA, 15 bp, Homo sapiens
ggcaggtccatgatt

SEQ ID NO: 1285964 - DNA, 15 bp, Homo sapiens
gggcaggtccatgat

SEQ ID NO: 1285965 - DNA, 15 bp, Homo sapiens
tgggcaggtccatga

SEQ ID NO: 1285966 - DNA, 15 bp, Homo sapiens
atgggcaggtccatg

SEQ ID NO: 1285967 - DNA, 15 bp, Homo sapiens
gatgggcaggtccat

SEQ ID NO: 1285968 - DNA, 15 bp, Homo sapiens
tgatgggcaggtcca

SEQ ID NO: 1285969 - DNA, 15 bp, Homo sapiens
ctgatgggcaggtcc

SEQ ID NO: 1285970 - DNA, 15 bp, Homo sapiens
cctgatgggcaggtc

SEQ ID NO: 1285971 - DNA, 15 bp, Homo sapiens
ccctgatgggcaggt

SEQ ID NO: 1285972 - DNA, 15 bp, Homo sapiens
accctgatgggcagg

SEQ ID NO: 1285973 - DNA, 15 bp, Homo sapiens
gaccctgatgggcag

SEQ ID NO: 1285974 - DNA, 15 bp, Homo sapiens
tgaccctgatgggca

SEQ ID NO: 1285975 - DNA, 15 bp, Homo sapiens
atgaccctgatgggc

SEQ ID NO: 1285976 - DNA, 15 bp, Homo sapiens
gatgaccctgatggg

SEQ ID NO: 1285977 - DNA, 15 bp, Homo sapiens
agatgaccctgatgg

SEQ ID NO: 1285978 - DNA, 15 bp, Homo sapiens
cagatgaccctgatg

SEQ ID NO: 1285979 - DNA, 15 bp, Homo sapiens
tcagatgaccctgat

SEQ ID NO: 1285980 - DNA, 15 bp, Homo sapiens
ctcagatgaccctga

SEQ ID NO: 1285981 - DNA, 15 bp, Homo sapiens
cctcagatgaccctg

SEQ ID NO: 1285982 - DNA, 15 bp, Homo sapiens
tcctcagatgaccct

SEQ ID NO: 1285983 - DNA, 15 bp, Homo sapiens
ctcctcagatgaccc

SEQ ID NO: 1285984 - DNA, 15 bp, Homo sapiens
actcctcagatgacc

SEQ ID NO: 1285985 - DNA, 15 bp, Homo sapiens
gactcctcagatgac

SEQ ID NO: 1285986 - DNA, 15 bp, Homo sapiens
agactcctcagatga

SEQ ID NO: 1285987 - DNA, 15 bp, Homo sapiens
gagactcctcagatg

SEQ ID NO: 1285988 - DNA, 15 bp, Homo sapiens
tgagactcctcagat

SEQ ID NO: 1285989 - DNA, 15 bp, Homo sapiens
gtgagactcctcaga

SEQ ID NO: 1285990 - DNA, 15 bp, Homo sapiens
agtgagactcctcag

SEQ ID NO: 1285991 - DNA, 15 bp, Homo sapiens
cagtgagactcctca

SEQ ID NO: 1285992 - DNA, 15 bp, Homo sapiens
acagtgagactcctc

SEQ ID NO: 1285993 - DNA, 15 bp, Homo sapiens
aacagtgagactcct

SEQ ID NO: 1285994 - DNA, 15 bp, Homo sapiens
caacagtgagactcc

SEQ ID NO: 1285995 - DNA, 15 bp, Homo sapiens
ccaacagtgagactc

SEQ ID NO: 1285996 - DNA, 15 bp, Homo sapiens
accaacagtgagact

SEQ ID NO: 1285997 - DNA, 15 bp, Homo sapiens
caccaacagtgagac

SEQ ID NO: 1285998 - DNA, 15 bp, Homo sapiens
ccaccaacagtgaga

SEQ ID NO: 1285999 - DNA, 15 bp, Homo sapiens
accaccaacagtgag

SEQ ID NO: 1286000 - DNA, 15 bp, Homo sapiens
aaccaccaacagtga

SEQ ID NO: 1286001 - DNA, 15 bp, Homo sapiens
aaaccaccaacagtg

SEQ ID NO: 1286002 - DNA, 15 bp, Homo sapiens
gaaaccaccaacagt

SEQ ID NO: 1286003 - DNA, 15 bp, Homo sapiens
tgaaaccaccaacag

SEQ ID NO: 1286004 - DNA, 15 bp, Homo sapiens
ctgaaaccaccaaca

SEQ ID NO: 1286005 - DNA, 15 bp, Homo sapiens
tctgaaaccaccaac

SEQ ID NO: 1286006 - DNA, 15 bp, Homo sapiens
atctgaaaccaccaa

SEQ ID NO: 1286007 - DNA, 15 bp, Homo sapiens
gatctgaaaccacca

SEQ ID NO: 1286008 - DNA, 15 bp, Homo sapiens
agatctgaaaccacc

SEQ ID NO: 1286009 - DNA, 15 bp, Homo sapiens
aagatctgaaaccac

SEQ ID NO: 1286010 - DNA, 15 bp, Homo sapiens
gaagatctgaaacca

SEQ ID NO: 1286011 - DNA, 15 bp, Homo sapiens
ggaagatctgaaacc

SEQ ID NO: 1286012 - DNA, 15 bp, Homo sapiens
tggaagatctgaaac

SEQ ID NO: 1286013 - DNA, 15 bp, Homo sapiens
ctggaagatctgaaa

SEQ ID NO: 1286014 - DNA, 15 bp, Homo sapiens
tctggaagatctgaa

SEQ ID NO: 1286015 - DNA, 15 bp, Homo sapiens
ttctggaagatctga

SEQ ID NO: 1286016 - DNA, 15 bp, Homo sapiens
cttctggaagatctg

SEQ ID NO: 1286017 - DNA, 15 bp, Homo sapiens
tcttctggaagatct

SEQ ID NO: 1286018 - DNA, 15 bp, Homo sapiens
ttcttctggaagatc

SEQ ID NO: 1286019 - DNA, 15 bp, Homo sapiens
tttcttctggaagat

SEQ ID NO: 1286020 - DNA, 15 bp, Homo sapiens
gtttcttctggaaga

SEQ ID NO: 1286021 - DNA, 15 bp, Homo sapiens
agtttcttctggaag

SEQ ID NO: 1286022 - DNA, 15 bp, Homo sapiens
gagtttcttctggaa

SEQ ID NO: 1286023 - DNA, 15 bp, Homo sapiens
agagtttcttctgga

SEQ ID NO: 1286024 - DNA, 15 bp, Homo sapiens
tagagtttcttctgg

SEQ ID NO: 1286025 - DNA, 15 bp, Homo sapiens
ttagagtttcttctg

SEQ ID NO: 1286026 - DNA, 15 bp, Homo sapiens
attagagtttcttct

SEQ ID NO: 1286027 - DNA, 15 bp, Homo sapiens
aattagagtttcttc

SEQ ID NO: 1286028 - DNA, 15 bp, Homo sapiens
taattagagtttctt

SEQ ID NO: 1286029 - DNA, 15 bp, Homo sapiens
ctaattagagtttct

SEQ ID NO: 1286030 - DNA, 15 bp, Homo sapiens
gctaattagagtttc

SEQ ID NO: 1286031 - DNA, 15 bp, Homo sapiens
agctaattagagttt

SEQ ID NO: 1286032 - DNA, 15 bp, Homo sapiens
gagctaattagagtt

SEQ ID NO: 1286033 - DNA, 15 bp, Homo sapiens
agagctaattagagt

SEQ ID NO: 1286034 - DNA, 15 bp, Homo sapiens
tagagctaattagag

SEQ ID NO: 1286035 - DNA, 15 bp, Homo sapiens
gtagagctaattaga

SEQ ID NO: 1286036 - DNA, 15 bp, Homo sapiens
tgtagagctaattag

SEQ ID NO: 1286037 - DNA, 15 bp, Homo sapiens
gtgtagagctaatta

SEQ ID NO: 1286038 - DNA, 15 bp, Homo sapiens
tgtgtagagctaatt

SEQ ID NO: 1286039 - DNA, 15 bp, Homo sapiens
ttgtgtagagctaat

SEQ ID NO: 1286040 - DNA, 15 bp, Homo sapiens
cttgtgtagagctaa

SEQ ID NO: 1286041 - DNA, 15 bp, Homo sapiens
tcttgtgtagagcta

SEQ ID NO: 1286042 - DNA, 15 bp, Homo sapiens
ctcttgtgtagagct

SEQ ID NO: 1286043 - DNA, 15 bp, Homo sapiens
gctcttgtgtagagc

SEQ ID NO: 1286044 - DNA, 15 bp, Homo sapiens
ggctcttgtgtagag

SEQ ID NO: 1286045 - DNA, 15 bp, Homo sapiens
tggctcttgtgtaga

SEQ ID NO: 1286046 - DNA, 15 bp, Homo sapiens
ctggctcttgtgtag

SEQ ID NO: 1286047 - DNA, 15 bp, Homo sapiens
tctggctcttgtgta

SEQ ID NO: 1286048 - DNA, 15 bp, Homo sapiens
ctctggctcttgtgt

SEQ ID NO: 1286049 - DNA, 15 bp, Homo sapiens
cctctggctcttgtg

SEQ ID NO: 1286050 - DNA, 15 bp, Homo sapiens
ccctctggctcttgt

SEQ ID NO: 1286051 - DNA, 15 bp, Homo sapiens
cccctctggctcttg

SEQ ID NO: 1286052 - DNA, 15 bp, Homo sapiens
acccctctggctctt

SEQ ID NO: 1286053 - DNA, 15 bp, Homo sapiens
aacccctctggctct

SEQ ID NO: 1286054 - DNA, 15 bp, Homo sapiens
taacccctctggctc

SEQ ID NO: 1286055 - DNA, 15 bp, Homo sapiens
ctaacccctctggct

SEQ ID NO: 1286056 - DNA, 15 bp, Homo sapiens
actaacccctctggc

SEQ ID NO: 1286057 - DNA, 15 bp, Homo sapiens
gactaacccctctgg

SEQ ID NO: 1286058 - DNA, 15 bp, Homo sapiens
tgactaacccctctg

SEQ ID NO: 1286059 - DNA, 15 bp, Homo sapiens
gtgactaacccctct

SEQ ID NO: 1286060 - DNA, 15 bp, Homo sapiens
ggtgactaacccctc

SEQ ID NO: 1286061 - DNA, 15 bp, Homo sapiens
tggtgactaacccct

SEQ ID NO: 1286062 - DNA, 15 bp, Homo sapiens
ttggtgactaacccc

SEQ ID NO: 1286063 - DNA, 15 bp, Homo sapiens
tttggtgactaaccc

SEQ ID NO: 1286064 - DNA, 15 bp, Homo sapiens
ctttggtgactaacc

SEQ ID NO: 1286065 - DNA, 15 bp, Homo sapiens
tctttggtgactaac

SEQ ID NO: 1286066 - DNA, 15 bp, Homo sapiens
ctctttggtgactaa

SEQ ID NO: 1286067 - DNA, 15 bp, Homo sapiens
actctttggtgacta

SEQ ID NO: 1286068 - DNA, 15 bp, Homo sapiens
cactctttggtgact

SEQ ID NO: 1286069 - DNA, 15 bp, Homo sapiens
tcactctttggtgac

SEQ ID NO: 1286070 - DNA, 15 bp, Homo sapiens
aatcactctttggtg

SEQ ID NO: 1286071 - DNA, 15 bp, Homo sapiens
gaatcactctttggt

SEQ ID NO: 1286072 - DNA, 15 bp, Homo sapiens
tgaatcactctttgg

SEQ ID NO: 1286073 - DNA, 15 bp, Homo sapiens
gtgaatcactctttg

SEQ ID NO: 1286074 - DNA, 15 bp, Homo sapiens
ggtgaatcactcttt

SEQ ID NO: 1286075 - DNA, 15 bp, Homo sapiens
gggtgaatcactctt

SEQ ID NO: 1286076 - DNA, 15 bp, Homo sapiens
ggggtgaatcactct

SEQ ID NO: 1286077 - DNA, 15 bp, Homo sapiens
tggggtgaatcactc

SEQ ID NO: 1286078 - DNA, 15 bp, Homo sapiens
atggggtgaatcact

SEQ ID NO: 1286079 - DNA, 15 bp, Homo sapiens
gatggggtgaatcac

SEQ ID NO: 1286080 - DNA, 15 bp, Homo sapiens
tgatggggtgaatca

SEQ ID NO: 1286081 - DNA, 15 bp, Homo sapiens
gtgatggggtgaatc

SEQ ID NO: 1286082 - DNA, 15 bp, Homo sapiens
agtgatggggtgaat

SEQ ID NO: 1286083 - DNA, 15 bp, Homo sapiens
gagtgatggggtgaa

SEQ ID NO: 1286084 - DNA, 15 bp, Homo sapiens
agagtgatggggtga

SEQ ID NO: 1286085 - DNA, 15 bp, Homo sapiens
aagagtgatggggtg

SEQ ID NO: 1286086 - DNA, 15 bp, Homo sapiens
aaagagtgatggggt

SEQ ID NO: 1286087 - DNA, 15 bp, Homo sapiens
caaagagtgatgggg

SEQ ID NO: 1286088 - DNA, 15 bp, Homo sapiens
ccaaagagtgatggg

SEQ ID NO: 1286089 - DNA, 15 bp, Homo sapiens
accaaagagtgatgg

SEQ ID NO: 1286090 - DNA, 15 bp, Homo sapiens
caccaaagagtgatg

SEQ ID NO: 1286091 - DNA, 15 bp, Homo sapiens
ttcaccaaagagtga

SEQ ID NO: 1286092 - DNA, 15 bp, Homo sapiens
attcaccaaagagtg

SEQ ID NO: 1286093 - DNA, 15 bp, Homo sapiens
aattcaccaaagagt

SEQ ID NO: 1286094 - DNA, 15 bp, Homo sapiens
aaattcaccaaagag

SEQ ID NO: 1286095 - DNA, 15 bp, Homo sapiens
taaattcaccaaaga

SEQ ID NO: 1286096 - DNA, 15 bp, Homo sapiens
ttaaattcaccaaag

SEQ ID NO: 1286097 - DNA, 15 bp, Homo sapiens
gttaaattcaccaaa

SEQ ID NO: 1286098 - DNA, 15 bp, Homo sapiens
ggttaaattcaccaa

SEQ ID NO: 1286099 - DNA, 15 bp, Homo sapiens
tggttaaattcacca

SEQ ID NO: 1286100 - DNA, 15 bp, Homo sapiens
ttggttaaattcacc

SEQ ID NO: 1286101 - DNA, 15 bp, Homo sapiens
tttggttaaattcac

SEQ ID NO: 1286102 - DNA, 15 bp, Homo sapiens
atttggttaaattca

SEQ ID NO: 1286103 - DNA, 15 bp, Homo sapiens
aatttggttaaattc

SEQ ID NO: 1286104 - DNA, 15 bp, Homo sapiens
aaatttggttaaatt

SEQ ID NO: 1286105 - DNA, 15 bp, Homo sapiens
taaatttggttaaat

SEQ ID NO: 1286106 - DNA, 15 bp, Homo sapiens
ttaaatttggttaaa

SEQ ID NO: 1286107 - DNA, 15 bp, Homo sapiens
tttaaatttggttaa

SEQ ID NO: 1286108 - DNA, 15 bp, Homo sapiens
atttaaatttggtta

SEQ ID NO: 1286109 - DNA, 15 bp, Homo sapiens
catttaaatttggtt

SEQ ID NO: 1286110 - DNA, 15 bp, Homo sapiens
ccatttaaatttggt

SEQ ID NO: 1286111 - DNA, 15 bp, Homo sapiens
accatttaaatttgg

SEQ ID NO: 1286112 - DNA, 15 bp, Homo sapiens
caccatttaaatttg

SEQ ID NO: 1286113 - DNA, 15 bp, Homo sapiens
tcaccatttaaattt

SEQ ID NO: 1286114 - DNA, 15 bp, Homo sapiens
atcaccatttaaatt

SEQ ID NO: 1286115 - DNA, 15 bp, Homo sapiens
tatcaccatttaaat

SEQ ID NO: 1286116 - DNA, 15 bp, Homo sapiens
ctatcaccatttaaa

SEQ ID NO: 1286117 - DNA, 15 bp, Homo sapiens
cctatcaccatttaa

SEQ ID NO: 1286118 - DNA, 15 bp, Homo sapiens
ccctatcaccattta

SEQ ID NO: 1286119 - DNA, 15 bp, Homo sapiens
tccctatcaccattt

SEQ ID NO: 1286120 - DNA, 15 bp, Homo sapiens
ttccctatcaccatt

SEQ ID NO: 1286121 - DNA, 15 bp, Homo sapiens
attccctatcaccat

SEQ ID NO: 1286122 - DNA, 15 bp, Homo sapiens
aattccctatcacca

SEQ ID NO: 1286123 - DNA, 15 bp, Homo sapiens
gaattccctatcacc

SEQ ID NO: 1286124 - DNA, 15 bp, Homo sapiens
ggaattccctatcac

SEQ ID NO: 1286125 - DNA, 15 bp, Homo sapiens
aggaattccctatca

SEQ ID NO: 1286126 - DNA, 15 bp, Homo sapiens
aaggaattccctatc

SEQ ID NO: 1286127 - DNA, 15 bp, Homo sapiens
aaaggaattccctat

SEQ ID NO: 1286128 - DNA, 15 bp, Homo sapiens
aaaaggaattcccta

SEQ ID NO: 1286129 - DNA, 15 bp, Homo sapiens
taaaaggaattccct

SEQ ID NO: 1286130 - DNA, 15 bp, Homo sapiens
gtaaaaggaattccc

SEQ ID NO: 1286131 - DNA, 15 bp, Homo sapiens
tgtaaaaggaattcc

SEQ ID NO: 1286132 - DNA, 15 bp, Homo sapiens
ttgtaaaaggaattc

SEQ ID NO: 1286133 - DNA, 15 bp, Homo sapiens
attgtaaaaggaatt

SEQ ID NO: 1286134 - DNA, 15 bp, Homo sapiens
aattgtaaaaggaat

SEQ ID NO: 1286135 - DNA, 15 bp, Homo sapiens
gaattgtaaaaggaa

SEQ ID NO: 1286136 - DNA, 15 bp, Homo sapiens
ggaattgtaaaagga

SEQ ID NO: 1286137 - DNA, 15 bp, Homo sapiens
gggaattgtaaaagg

SEQ ID NO: 1286138 - DNA, 15 bp, Homo sapiens
agggaattgtaaaag

SEQ ID NO: 1286139 - DNA, 15 bp, Homo sapiens
tagggaattgtaaaa

SEQ ID NO: 1286140 - DNA, 15 bp, Homo sapiens
ttagggaattgtaaa

SEQ ID NO: 1286141 - DNA, 15 bp, Homo sapiens
cttagggaattgtaa

SEQ ID NO: 1286142 - DNA, 15 bp, Homo sapiens
tcttagggaattgta

SEQ ID NO: 1286143 - DNA, 15 bp, Homo sapiens
ctcttagggaattgt

SEQ ID NO: 1286144 - DNA, 15 bp, Homo sapiens
cctcttagggaattg

SEQ ID NO: 1286145 - DNA, 15 bp, Homo sapiens
tcctcttagggaatt

SEQ ID NO: 1286146 - DNA, 15 bp, Homo sapiens
ttcctcttagggaat

SEQ ID NO: 1286147 - DNA, 15 bp, Homo sapiens
tttcctcttagggaa

SEQ ID NO: 1286148 - DNA, 15 bp, Homo sapiens
atttcctcttaggga

SEQ ID NO: 1286149 - DNA, 15 bp, Homo sapiens
catttcctcttaggg

SEQ ID NO: 1286150 - DNA, 15 bp, Homo sapiens
tcatttcctcttagg

SEQ ID NO: 1286151 - DNA, 15 bp, Homo sapiens
ctcatttcctcttag

SEQ ID NO: 1286152 - DNA, 15 bp, Homo sapiens
tctcatttcctctta

SEQ ID NO: 1286153 - DNA, 15 bp, Homo sapiens
ctctcatttcctctt

SEQ ID NO: 1286154 - DNA, 15 bp, Homo sapiens
tctctcatttcctct

SEQ ID NO: 1286155 - DNA, 15 bp, Homo sapiens
ttctctcatttcctc

SEQ ID NO: 1286156 - DNA, 15 bp, Homo sapiens
tttctctcatttcct

SEQ ID NO: 1286157 - DNA, 15 bp, Homo sapiens
ctttctctcatttcc

SEQ ID NO: 1286158 - DNA, 15 bp, Homo sapiens
tctttctctcatttc

SEQ ID NO: 1286159 - DNA, 15 bp, Homo sapiens
ctctttctctcattt

SEQ ID NO: 1286160 - DNA, 15 bp, Homo sapiens
actctttctctcatt

SEQ ID NO: 1286161 - DNA, 15 bp, Homo sapiens
aactctttctctcat

SEQ ID NO: 1286162 - DNA, 15 bp, Homo sapiens
caactctttctctca

SEQ ID NO: 1286163 - DNA, 15 bp, Homo sapiens
ccaactctttctctc

SEQ ID NO: 1286164 - DNA, 15 bp, Homo sapiens
accaactctttctct

SEQ ID NO: 1286165 - DNA, 15 bp, Homo sapiens
gaccaactctttctc

SEQ ID NO: 1286166 - DNA, 15 bp, Homo sapiens
agaccaactctttct

SEQ ID NO: 1286167 - DNA, 15 bp, Homo sapiens
aagaccaactctttc

SEQ ID NO: 1286168 - DNA, 15 bp, Homo sapiens
aaagaccaactcttt

SEQ ID NO: 1286169 - DNA, 15 bp, Homo sapiens
gaaagaccaactctt

SEQ ID NO: 1286170 - DNA, 15 bp, Homo sapiens
ggaaagaccaactct

SEQ ID NO: 1286171 - DNA, 15 bp, Homo sapiens
gggaaagaccaactc

SEQ ID NO: 1286172 - DNA, 15 bp, Homo sapiens
tgggaaagaccaact

SEQ ID NO: 1286173 - DNA, 15 bp, Homo sapiens
ttgggaaagaccaac

SEQ ID NO: 1286174 - DNA, 15 bp, Homo sapiens
cttgggaaagaccaa

SEQ ID NO: 1286175 - DNA, 15 bp, Homo sapiens
gcttgggaaagacca

SEQ ID NO: 1286176 - DNA, 15 bp, Homo sapiens
tgcttgggaaagacc

SEQ ID NO: 1286177 - DNA, 15 bp, Homo sapiens
ctgcttgggaaagac

SEQ ID NO: 1286178 - DNA, 15 bp, Homo sapiens
gctgcttgggaaaga

SEQ ID NO: 1286179 - DNA, 15 bp, Homo sapiens
tgctgcttgggaaag

SEQ ID NO: 1286180 - DNA, 15 bp, Homo sapiens
atgctgcttgggaaa

SEQ ID NO: 1286181 - DNA, 15 bp, Homo sapiens
catgctgcttgggaa

SEQ ID NO: 1286182 - DNA, 15 bp, Homo sapiens
ccatgctgcttggga

SEQ ID NO: 1286183 - DNA, 15 bp, Homo sapiens
accatgctgcttggg

SEQ ID NO: 1286184 - DNA, 15 bp, Homo sapiens
aaccatgctgcttgg

SEQ ID NO: 1286185 - DNA, 15 bp, Homo sapiens
aaaccatgctgcttg

SEQ ID NO: 1286186 - DNA, 15 bp, Homo sapiens
aaaaccatgctgctt

SEQ ID NO: 1286187 - DNA, 15 bp, Homo sapiens
gaaaaccatgctgct

SEQ ID NO: 1286188 - DNA, 15 bp, Homo sapiens
tgaaaaccatgctgc

SEQ ID NO: 1286189 - DNA, 15 bp, Homo sapiens
ctgaaaaccatgctg

SEQ ID NO: 1286190 - DNA, 15 bp, Homo sapiens
cctgaaaaccatgct

SEQ ID NO: 1286191 - DNA, 15 bp, Homo sapiens
ccctgaaaaccatgc

SEQ ID NO: 1286192 - DNA, 15 bp, Homo sapiens
tccctgaaaaccatg

SEQ ID NO: 1286193 - DNA, 15 bp, Homo sapiens
gtccctgaaaaccat

SEQ ID NO: 1286194 - DNA, 15 bp, Homo sapiens
agtccctgaaaacca

SEQ ID NO: 1286195 - DNA, 15 bp, Homo sapiens
aagtccctgaaaacc

SEQ ID NO: 1286196 - DNA, 15 bp, Homo sapiens
caagtccctgaaaac

SEQ ID NO: 1286197 - DNA, 15 bp, Homo sapiens
gcaagtccctgaaaa

SEQ ID NO: 1286198 - DNA, 15 bp, Homo sapiens
agcaagtccctgaaa

SEQ ID NO: 1286199 - DNA, 15 bp, Homo sapiens
aagcaagtccctgaa

SEQ ID NO: 1286200 - DNA, 15 bp, Homo sapiens
gaagcaagtccctga

SEQ ID NO: 1286201 - DNA, 15 bp, Homo sapiens
agaagcaagtccctg

SEQ ID NO: 1286202 - DNA, 15 bp, Homo sapiens
gagaagcaagtccct

SEQ ID NO: 1286203 - DNA, 15 bp, Homo sapiens
ggagaagcaagtccc

SEQ ID NO: 1286204 - DNA, 15 bp, Homo sapiens
aggagaagcaagtcc

SEQ ID NO: 1286205 - DNA, 15 bp, Homo sapiens
caggagaagcaagtc

SEQ ID NO: 1286206 - DNA, 15 bp, Homo sapiens
ccaggagaagcaagt

SEQ ID NO: 1286207 - DNA, 15 bp, Homo sapiens
accaggagaagcaag

SEQ ID NO: 1286208 - DNA, 15 bp, Homo sapiens
caccaggagaagcaa

SEQ ID NO: 1286209 - DNA, 15 bp, Homo sapiens
gcaccaggagaagca

SEQ ID NO: 1286210 - DNA, 15 bp, Homo sapiens
ggcaccaggagaagc

SEQ ID NO: 1286211 - DNA, 15 bp, Homo sapiens
aggcaccaggagaag

SEQ ID NO: 1286212 - DNA, 15 bp, Homo sapiens
aaggcaccaggagaa

SEQ ID NO: 1286213 - DNA, 15 bp, Homo sapiens
gaaggcaccaggaga

SEQ ID NO: 1286214 - DNA, 15 bp, Homo sapiens
agaaggcaccaggag

SEQ ID NO: 1286215 - DNA, 15 bp, Homo sapiens
gagaaggcaccagga

SEQ ID NO: 1286216 - DNA, 15 bp, Homo sapiens
agagaaggcaccagg

SEQ ID NO: 1286217 - DNA, 15 bp, Homo sapiens
tagagaaggcaccag

SEQ ID NO: 1286218 - DNA, 15 bp, Homo sapiens
ctagagaaggcacca

SEQ ID NO: 1286219 - DNA, 15 bp, Homo sapiens
actagagaaggcacc

SEQ ID NO: 1286220 - DNA, 15 bp, Homo sapiens
gactagagaaggcac

SEQ ID NO: 1286221 - DNA, 15 bp, Homo sapiens
tgactagagaaggca

SEQ ID NO: 1286222 - DNA, 15 bp, Homo sapiens
ctgactagagaaggc

SEQ ID NO: 1286223 - DNA, 15 bp, Homo sapiens
actgactagagaagg

SEQ ID NO: 1286224 - DNA, 15 bp, Homo sapiens
aactgactagagaag

SEQ ID NO: 1286225 - DNA, 15 bp, Homo sapiens
caactgactagagaa

SEQ ID NO: 1286226 - DNA, 15 bp, Homo sapiens
gcaactgactagaga

SEQ ID NO: 1286227 - DNA, 15 bp, Homo sapiens
ggcaactgactagag

SEQ ID NO: 1286228 - DNA, 15 bp, Homo sapiens
tggcaactgactaga

SEQ ID NO: 1286229 - DNA, 15 bp, Homo sapiens
ttggcaactgactag

SEQ ID NO: 1286230 - DNA, 15 bp, Homo sapiens
tttggcaactgacta

SEQ ID NO: 1286231 - DNA, 15 bp, Homo sapiens
atttggcaactgact

SEQ ID NO: 1286232 - DNA, 15 bp, Homo sapiens
gatttggcaactgac

SEQ ID NO: 1286233 - DNA, 15 bp, Homo sapiens
ggatttggcaactga

SEQ ID NO: 1286234 - DNA, 15 bp, Homo sapiens
aggatttggcaactg

SEQ ID NO: 1286235 - DNA, 15 bp, Homo sapiens
gaggatttggcaact

SEQ ID NO: 1286236 - DNA, 15 bp, Homo sapiens
cgaggatttggcaac

SEQ ID NO: 1286237 - DNA, 15 bp, Homo sapiens
acgaggatttggcaa

SEQ ID NO: 1286238 - DNA, 15 bp, Homo sapiens
cacgaggatttggca

SEQ ID NO: 1286239 - DNA, 15 bp, Homo sapiens
ccacgaggatttggc

SEQ ID NO: 1286240 - DNA, 15 bp, Homo sapiens
gccacgaggatttgg

SEQ ID NO: 1286241 - DNA, 15 bp, Homo sapiens
agccacgaggatttg

SEQ ID NO: 1286242 - DNA, 15 bp, Homo sapiens
gagccacgaggattt

SEQ ID NO: 1286243 - DNA, 15 bp, Homo sapiens
tgagccacgaggatt

SEQ ID NO: 1286244 - DNA, 15 bp, Homo sapiens
ttgagccacgaggat

SEQ ID NO: 1286245 - DNA, 15 bp, Homo sapiens
gttgagccacgagga

SEQ ID NO: 1286246 - DNA, 15 bp, Homo sapiens
agttgagccacgagg

SEQ ID NO: 1286247 - DNA, 15 bp, Homo sapiens
gagttgagccacgag

SEQ ID NO: 1286248 - DNA, 15 bp, Homo sapiens
agagttgagccacga

SEQ ID NO: 1286249 - DNA, 15 bp, Homo sapiens
aagagttgagccacg

SEQ ID NO: 1286250 - DNA, 15 bp, Homo sapiens
gaagagttgagccac

SEQ ID NO: 1286251 - DNA, 15 bp, Homo sapiens
agaagagttgagcca

SEQ ID NO: 1286252 - DNA, 15 bp, Homo sapiens
gagaagagttgagcc

SEQ ID NO: 1286253 - DNA, 15 bp, Homo sapiens
ggagaagagttgagc

SEQ ID NO: 1286254 - DNA, 15 bp, Homo sapiens
tggagaagagttgag

SEQ ID NO: 1286255 - DNA, 15 bp, Homo sapiens
gtggagaagagttga

SEQ ID NO: 1286256 - DNA, 15 bp, Homo sapiens
agtggagaagagttg

SEQ ID NO: 1286257 - DNA, 15 bp, Homo sapiens
cagtggagaagagtt

SEQ ID NO: 1286258 - DNA, 15 bp, Homo sapiens
gcagtggagaagagt

SEQ ID NO: 1286259 - DNA, 15 bp, Homo sapiens
agcagtggagaagag

SEQ ID NO: 1286260 - DNA, 15 bp, Homo sapiens
cagcagtggagaaga

SEQ ID NO: 1286261 - DNA, 15 bp, Homo sapiens
gcagcagtggagaag

SEQ ID NO: 1286262 - DNA, 15 bp, Homo sapiens
agcagcagtggagaa

SEQ ID NO: 1286263 - DNA, 15 bp, Homo sapiens
cagcagcagtggaga

SEQ ID NO: 1286264 - DNA, 15 bp, Homo sapiens
acagcagcagtggag

SEQ ID NO: 1286265 - DNA, 15 bp, Homo sapiens
gacagcagcagtgga

SEQ ID NO: 1286266 - DNA, 15 bp, Homo sapiens
agacagcagcagtgg

SEQ ID NO: 1286267 - DNA, 15 bp, Homo sapiens
gagacagcagcagtg

SEQ ID NO: 1286268 - DNA, 15 bp, Homo sapiens
agagacagcagcagt

SEQ ID NO: 1286269 - DNA, 15 bp, Homo sapiens
aagagacagcagcag

SEQ ID NO: 1286270 - DNA, 15 bp, Homo sapiens
aaagagacagcagca

SEQ ID NO: 1286271 - DNA, 15 bp, Homo sapiens
aaaagagacagcagc

SEQ ID NO: 1286272 - DNA, 15 bp, Homo sapiens
gaaaagagacagcag

SEQ ID NO: 1286273 - DNA, 15 bp, Homo sapiens
agaaaagagacagca

SEQ ID NO: 1286274 - DNA, 15 bp, Homo sapiens
tagaaaagagacagc

SEQ ID NO: 1286275 - DNA, 15 bp, Homo sapiens
ctagaaaagagacag

SEQ ID NO: 1286276 - DNA, 15 bp, Homo sapiens
actagaaaagagaca

SEQ ID NO: 1286277 - DNA, 15 bp, Homo sapiens
aactagaaaagagac

SEQ ID NO: 1286278 - DNA, 15 bp, Homo sapiens
gaactagaaaagaga

SEQ ID NO: 1286279 - DNA, 15 bp, Homo sapiens
tgaactagaaaagag

SEQ ID NO: 1286280 - DNA, 15 bp, Homo sapiens
ctgaactagaaaaga

SEQ ID NO: 1286281 - DNA, 15 bp, Homo sapiens
cctgaactagaaaag

SEQ ID NO: 1286282 - DNA, 15 bp, Homo sapiens
gcctgaactagaaaa

SEQ ID NO: 1286283 - DNA, 15 bp, Homo sapiens
agcctgaactagaaa

SEQ ID NO: 1286284 - DNA, 15 bp, Homo sapiens
aagcctgaactagaa

SEQ ID NO: 1286285 - DNA, 15 bp, Homo sapiens
gaagcctgaactaga

SEQ ID NO: 1286286 - DNA, 15 bp, Homo sapiens
ggaagcctgaactag

SEQ ID NO: 1286287 - DNA, 15 bp, Homo sapiens
tggaagcctgaacta

SEQ ID NO: 1286288 - DNA, 15 bp, Homo sapiens
atggaagcctgaact

SEQ ID NO: 1286289 - DNA, 15 bp, Homo sapiens
aatggaagcctgaac

SEQ ID NO: 1286290 - DNA, 15 bp, Homo sapiens
caatggaagcctgaa

SEQ ID NO: 1286291 - DNA, 15 bp, Homo sapiens
gcaatggaagcctga

SEQ ID NO: 1286292 - DNA, 15 bp, Homo sapiens
agcaatggaagcctg

SEQ ID NO: 1286293 - DNA, 15 bp, Homo sapiens
cagcaatggaagcct

SEQ ID NO: 1286294 - DNA, 15 bp, Homo sapiens
gcagcaatggaagcc

SEQ ID NO: 1286295 - DNA, 15 bp, Homo sapiens
agcagcaatggaagc

SEQ ID NO: 1286296 - DNA, 15 bp, Homo sapiens
aagcagcaatggaag

SEQ ID NO: 1286297 - DNA, 15 bp, Homo sapiens
caagcagcaatggaa

SEQ ID NO: 1286298 - DNA, 15 bp, Homo sapiens
gcaagcagcaatgga

SEQ ID NO: 1286299 - DNA, 15 bp, Homo sapiens
agcaagcagcaatgg

SEQ ID NO: 1286300 - DNA, 15 bp, Homo sapiens
aagcaagcagcaatg

SEQ ID NO: 1286301 - DNA, 15 bp, Homo sapiens
caagcaagcagcaat

SEQ ID NO: 1286302 - DNA, 15 bp, Homo sapiens
ccaagcaagcagcaa

SEQ ID NO: 1286303 - DNA, 15 bp, Homo sapiens
tccaagcaagcagca

SEQ ID NO: 1286304 - DNA, 15 bp, Homo sapiens
gtccaagcaagcagc

SEQ ID NO: 1286305 - DNA, 15 bp, Homo sapiens
agtccaagcaagcag

SEQ ID NO: 1286306 - DNA, 15 bp, Homo sapiens
gagtccaagcaagca

SEQ ID NO: 1286307 - DNA, 15 bp, Homo sapiens
agagtccaagcaagc

SEQ ID NO: 1286308 - DNA, 15 bp, Homo sapiens
aagagtccaagcaag

SEQ ID NO: 1286309 - DNA, 15 bp, Homo sapiens
caagagtccaagcaa

SEQ ID NO: 1286310 - DNA, 15 bp, Homo sapiens
gcaagagtccaagca

SEQ ID NO: 1286311 - DNA, 15 bp, Homo sapiens
tgcaagagtccaagc

SEQ ID NO: 1286312 - DNA, 15 bp, Homo sapiens
ctgcaagagtccaag

SEQ ID NO: 1286313 - DNA, 15 bp, Homo sapiens
actgcaagagtccaa

SEQ ID NO: 1286314 - DNA, 15 bp, Homo sapiens
tactgcaagagtcca

SEQ ID NO: 1286315 - DNA, 15 bp, Homo sapiens
gtactgcaagagtcc

SEQ ID NO: 1286316 - DNA, 15 bp, Homo sapiens
agtactgcaagagtc

SEQ ID NO: 1286317 - DNA, 15 bp, Homo sapiens
gagtactgcaagagt

SEQ ID NO: 1286318 - DNA, 15 bp, Homo sapiens
agagtactgcaagag

SEQ ID NO: 1286319 - DNA, 15 bp, Homo sapiens
aagagtactgcaaga

SEQ ID NO: 1286320 - DNA, 15 bp, Homo sapiens
gaagagtactgcaag

SEQ ID NO: 1286321 - DNA, 15 bp, Homo sapiens
ggaagagtactgcaa

SEQ ID NO: 1286322 - DNA, 15 bp, Homo sapiens
tggaagagtactgca

SEQ ID NO: 1286323 - DNA, 15 bp, Homo sapiens
ctggaagagtactgc

SEQ ID NO: 1286324 - DNA, 15 bp, Homo sapiens
gctggaagagtactg

SEQ ID NO: 1286325 - DNA, 15 bp, Homo sapiens
agctggaagagtact

SEQ ID NO: 1286326 - DNA, 15 bp, Homo sapiens
cagctggaagagtac

SEQ ID NO: 1286327 - DNA, 15 bp, Homo sapiens
ccagctggaagagta

SEQ ID NO: 1286328 - DNA, 15 bp, Homo sapiens
accagctggaagagt

SEQ ID NO: 1286329 - DNA, 15 bp, Homo sapiens
gaccagctggaagag

SEQ ID NO: 1286330 - DNA, 15 bp, Homo sapiens
agaccagctggaaga

SEQ ID NO: 1286331 - DNA, 15 bp, Homo sapiens
gagaccagctggaag

SEQ ID NO: 1286332 - DNA, 15 bp, Homo sapiens
cgagaccagctggaa

SEQ ID NO: 1286333 - DNA, 15 bp, Homo sapiens
acgagaccagctgga

SEQ ID NO: 1286334 - DNA, 15 bp, Homo sapiens
cacgagaccagctgg

SEQ ID NO: 1286335 - DNA, 15 bp, Homo sapiens
tcacgagaccagctg

SEQ ID NO: 1286336 - DNA, 15 bp, Homo sapiens
gtcacgagaccagct

SEQ ID NO: 1286337 - DNA, 15 bp, Homo sapiens
agtcacgagaccagc

SEQ ID NO: 1286338 - DNA, 15 bp, Homo sapiens
gagtcacgagaccag

SEQ ID NO: 1286339 - DNA, 15 bp, Homo sapiens
agagtcacgagacca

SEQ ID NO: 1286340 - DNA, 15 bp, Homo sapiens
cagagtcacgagacc

SEQ ID NO: 1286341 - DNA, 15 bp, Homo sapiens
acagagtcacgagac

SEQ ID NO: 1286342 - DNA, 15 bp, Homo sapiens
gacagagtcacgaga

SEQ ID NO: 1286343 - DNA, 15 bp, Homo sapiens
tgacagagtcacgag

SEQ ID NO: 1286344 - DNA, 15 bp, Homo sapiens
atgacagagtcacga

SEQ ID NO: 1286345 - DNA, 15 bp, Homo sapiens
aatgacagagtcacg

SEQ ID NO: 1286346 - DNA, 15 bp, Homo sapiens
aaatgacagagtcac

SEQ ID NO: 1286347 - DNA, 15 bp, Homo sapiens
gaaatgacagagtca

SEQ ID NO: 1286348 - DNA, 15 bp, Homo sapiens
agaaatgacagagtc

SEQ ID NO: 1286349 - DNA, 15 bp, Homo sapiens
cagaaatgacagagt

SEQ ID NO: 1286350 - DNA, 15 bp, Homo sapiens
tcagaaatgacagag

SEQ ID NO: 1286351 - DNA, 15 bp, Homo sapiens
atcagaaatgacaga

SEQ ID NO: 1286352 - DNA, 15 bp, Homo sapiens
aatcagaaatgacag

SEQ ID NO: 1286353 - DNA, 15 bp, Homo sapiens
taatcagaaatgaca

SEQ ID NO: 1286354 - DNA, 15 bp, Homo sapiens
ctaatcagaaatgac

SEQ ID NO: 1286355 - DNA, 15 bp, Homo sapiens
actaatcagaaatga

SEQ ID NO: 1286356 - DNA, 15 bp, Homo sapiens
gactaatcagaaatg

SEQ ID NO: 1286357 - DNA, 15 bp, Homo sapiens
tgactaatcagaaat

SEQ ID NO: 1286358 - DNA, 15 bp, Homo sapiens
atgactaatcagaaa

SEQ ID NO: 1286359 - DNA, 15 bp, Homo sapiens
tatgactaatcagaa

SEQ ID NO: 1286360 - DNA, 15 bp, Homo sapiens
gtatgactaatcaga

SEQ ID NO: 1286361 - DNA, 15 bp, Homo sapiens
tgtatgactaatcag

SEQ ID NO: 1286362 - DNA, 15 bp, Homo sapiens
atgtatgactaatca

SEQ ID NO: 1286363 - DNA, 15 bp, Homo sapiens
gatgtatgactaatc

SEQ ID NO: 1286364 - DNA, 15 bp, Homo sapiens
agatgtatgactaat

SEQ ID NO: 1286365 - DNA, 15 bp, Homo sapiens
aagatgtatgactaa

SEQ ID NO: 1286366 - DNA, 15 bp, Homo sapiens
taagatgtatgacta

SEQ ID NO: 1286367 - DNA, 15 bp, Homo sapiens
gtaagatgtatgact

SEQ ID NO: 1286368 - DNA, 15 bp, Homo sapiens
agtaagatgtatgac

SEQ ID NO: 1286369 - DNA, 15 bp, Homo sapiens
tagtaagatgtatga

SEQ ID NO: 1286370 - DNA, 15 bp, Homo sapiens
gtagtaagatgtatg

SEQ ID NO: 1286371 - DNA, 15 bp, Homo sapiens
ggtagtaagatgtat

SEQ ID NO: 1286372 - DNA, 15 bp, Homo sapiens
gggtagtaagatgta

SEQ ID NO: 1286373 - DNA, 15 bp, Homo sapiens
tgggtagtaagatgt

SEQ ID NO: 1286374 - DNA, 15 bp, Homo sapiens
gtgggtagtaagatg

SEQ ID NO: 1286375 - DNA, 15 bp, Homo sapiens
agtgggtagtaagat

SEQ ID NO: 1286376 - DNA, 15 bp, Homo sapiens
aagtgggtagtaaga

SEQ ID NO: 1286377 - DNA, 15 bp, Homo sapiens
taagtgggtagtaag

SEQ ID NO: 1286378 - DNA, 15 bp, Homo sapiens
ttaagtgggtagtaa

SEQ ID NO: 1286379 - DNA, 15 bp, Homo sapiens
tttaagtgggtagta

SEQ ID NO: 1286380 - DNA, 15 bp, Homo sapiens
gtttaagtgggtagt

SEQ ID NO: 1286381 - DNA, 15 bp, Homo sapiens
agtttaagtgggtag

SEQ ID NO: 1286382 - DNA, 15 bp, Homo sapiens
aagtttaagtgggta

SEQ ID NO: 1286383 - DNA, 15 bp, Homo sapiens
aaagtttaagtgggt

SEQ ID NO: 1286384 - DNA, 15 bp, Homo sapiens
gaaagtttaagtggg

SEQ ID NO: 1286385 - DNA, 15 bp, Homo sapiens
agaaagtttaagtgg

SEQ ID NO: 1286386 - DNA, 15 bp, Homo sapiens
tagaaagtttaagtg

SEQ ID NO: 1286387 - DNA, 15 bp, Homo sapiens
ttagaaagtttaagt

SEQ ID NO: 1286388 - DNA, 15 bp, Homo sapiens
tttagaaagtttaag

SEQ ID NO: 1286389 - DNA, 15 bp, Homo sapiens
atttagaaagtttaa

SEQ ID NO: 1286390 - DNA, 15 bp, Homo sapiens
catttagaaagttta

SEQ ID NO: 1286391 - DNA, 15 bp, Homo sapiens
acatttagaaagttt

SEQ ID NO: 1286392 - DNA, 15 bp, Homo sapiens
aacatttagaaagtt

SEQ ID NO: 1286393 - DNA, 15 bp, Homo sapiens
taacatttagaaagt

SEQ ID NO: 1286394 - DNA, 15 bp, Homo sapiens
ctaacatttagaaag

SEQ ID NO: 1286395 - DNA, 15 bp, Homo sapiens
gctaacatttagaaa

SEQ ID NO: 1286396 - DNA, 15 bp, Homo sapiens
agctaacatttagaa

SEQ ID NO: 1286397 - DNA, 15 bp, Homo sapiens
tagctaacatttaga

SEQ ID NO: 1286398 - DNA, 15 bp, Homo sapiens
ttagctaacatttag

SEQ ID NO: 1286399 - DNA, 15 bp, Homo sapiens
attagctaacattta

SEQ ID NO: 1286400 - DNA, 15 bp, Homo sapiens
aattagctaacattt

SEQ ID NO: 1286401 - DNA, 15 bp, Homo sapiens
taattagctaacatt

SEQ ID NO: 1286402 - DNA, 15 bp, Homo sapiens
gtaattagctaacat

SEQ ID NO: 1286403 - DNA, 15 bp, Homo sapiens
agtaattagctaaca

SEQ ID NO: 1286404 - DNA, 15 bp, Homo sapiens
aagtaattagctaac

SEQ ID NO: 1286405 - DNA, 15 bp, Homo sapiens
gaagtaattagctaa

SEQ ID NO: 1286406 - DNA, 15 bp, Homo sapiens
tgaagtaattagcta

SEQ ID NO: 1286407 - DNA, 15 bp, Homo sapiens
gtgaagtaattagct

SEQ ID NO: 1286408 - DNA, 15 bp, Homo sapiens
agtgaagtaattagc

SEQ ID NO: 1286409 - DNA, 15 bp, Homo sapiens
aagtgaagtaattag

SEQ ID NO: 1286410 - DNA, 15 bp, Homo sapiens
aaagtgaagtaatta

SEQ ID NO: 1286411 - DNA, 15 bp, Homo sapiens
gaaagtgaagtaatt

SEQ ID NO: 1286412 - DNA, 15 bp, Homo sapiens
ggaaagtgaagtaat

SEQ ID NO: 1286413 - DNA, 15 bp, Homo sapiens
aggaaagtgaagtaa

SEQ ID NO: 1286414 - DNA, 15 bp, Homo sapiens
gaggaaagtgaagta

SEQ ID NO: 1286415 - DNA, 15 bp, Homo sapiens
ggaggaaagtgaagt

SEQ ID NO: 1286416 - DNA, 15 bp, Homo sapiens
tggaggaaagtgaag

SEQ ID NO: 1286417 - DNA, 15 bp, Homo sapiens
gtggaggaaagtgaa

SEQ ID NO: 1286418 - DNA, 15 bp, Homo sapiens
tgtggaggaaagtga

SEQ ID NO: 1286419 - DNA, 15 bp, Homo sapiens
ttgtggaggaaagtg

SEQ ID NO: 1286420 - DNA, 15 bp, Homo sapiens
tttgtggaggaaagt

SEQ ID NO: 1286421 - DNA, 15 bp, Homo sapiens
atttgtggaggaaag

SEQ ID NO: 1286422 - DNA, 15 bp, Homo sapiens
tatttgtggaggaaa

SEQ ID NO: 1286423 - DNA, 15 bp, Homo sapiens
gtatttgtggaggaa

SEQ ID NO: 1286424 - DNA, 15 bp, Homo sapiens
agtatttgtggagga

SEQ ID NO: 1286425 - DNA, 15 bp, Homo sapiens
gagtatttgtggagg

SEQ ID NO: 1286426 - DNA, 15 bp, Homo sapiens
agagtatttgtggag

SEQ ID NO: 1286427 - DNA, 15 bp, Homo sapiens
aagagtatttgtgga

SEQ ID NO: 1286428 - DNA, 15 bp, Homo sapiens
aaagagtatttgtgg

SEQ ID NO: 1286429 - DNA, 15 bp, Homo sapiens
gaaagagtatttgtg

SEQ ID NO: 1286430 - DNA, 15 bp, Homo sapiens
tgaaagagtatttgt

SEQ ID NO: 1286431 - DNA, 15 bp, Homo sapiens
atgaaagagtatttg

SEQ ID NO: 1286432 - DNA, 15 bp, Homo sapiens
catgaaagagtattt

SEQ ID NO: 1286433 - DNA, 15 bp, Homo sapiens
ccatgaaagagtatt

SEQ ID NO: 1286434 - DNA, 15 bp, Homo sapiens
gccatgaaagagtat

SEQ ID NO: 1286435 - DNA, 15 bp, Homo sapiens
agccatgaaagagta

SEQ ID NO: 1286436 - DNA, 15 bp, Homo sapiens
gagccatgaaagagt

SEQ ID NO: 1286437 - DNA, 15 bp, Homo sapiens
ggagccatgaaagag

SEQ ID NO: 1286438 - DNA, 15 bp, Homo sapiens
aggagccatgaaaga

SEQ ID NO: 1286439 - DNA, 15 bp, Homo sapiens
gaggagccatgaaag

SEQ ID NO: 1286440 - DNA, 15 bp, Homo sapiens
tgaggagccatgaaa

SEQ ID NO: 1286441 - DNA, 15 bp, Homo sapiens
atgaggagccatgaa

SEQ ID NO: 1286442 - DNA, 15 bp, Homo sapiens
aatgaggagccatga

SEQ ID NO: 1286443 - DNA, 15 bp, Homo sapiens
taatgaggagccatg

SEQ ID NO: 1286444 - DNA, 15 bp, Homo sapiens
ttaatgaggagccat

SEQ ID NO: 1286445 - DNA, 15 bp, Homo sapiens
gttaatgaggagcca

SEQ ID NO: 1286446 - DNA, 15 bp, Homo sapiens
ggttaatgaggagcc

SEQ ID NO: 1286447 - DNA, 15 bp, Homo sapiens
tggttaatgaggagc

SEQ ID NO: 1286448 - DNA, 15 bp, Homo sapiens
ttggttaatgaggag

SEQ ID NO: 1286449 - DNA, 15 bp, Homo sapiens
tttggttaatgagga

SEQ ID NO: 1286450 - DNA, 15 bp, Homo sapiens
ctttggttaatgagg

SEQ ID NO: 1286451 - DNA, 15 bp, Homo sapiens
cctttggttaatgag

SEQ ID NO: 1286452 - DNA, 15 bp, Homo sapiens
tcctttggttaatga

SEQ ID NO: 1286453 - DNA, 15 bp, Homo sapiens
ttcctttggttaatg

SEQ ID NO: 1286454 - DNA, 15 bp, Homo sapiens
tttcctttggttaat

SEQ ID NO: 1286455 - DNA, 15 bp, Homo sapiens
ttttcctttggttaa

SEQ ID NO: 1286456 - DNA, 15 bp, Homo sapiens
gttttcctttggtta

SEQ ID NO: 1286457 - DNA, 15 bp, Homo sapiens
tgttttcctttggtt

SEQ ID NO: 1286458 - DNA, 15 bp, Homo sapiens
ttgttttcctttggt

SEQ ID NO: 1286459 - DNA, 15 bp, Homo sapiens
tttgttttcctttgg

SEQ ID NO: 1286460 - DNA, 15 bp, Homo sapiens
ttttgttttcctttg

SEQ ID NO: 1286461 - DNA, 15 bp, Homo sapiens
tttttgttttccttt

SEQ ID NO: 1286462 - DNA, 15 bp, Homo sapiens
ctttttgttttcctt

SEQ ID NO: 1286463 - DNA, 15 bp, Homo sapiens
actttttgttttcct

SEQ ID NO: 1286464 - DNA, 15 bp, Homo sapiens
gactttttgttttcc

SEQ ID NO: 1286465 - DNA, 15 bp, Homo sapiens
ggactttttgttttc

SEQ ID NO: 1286466 - DNA, 15 bp, Homo sapiens
tggactttttgtttt

SEQ ID NO: 1286467 - DNA, 15 bp, Homo sapiens
ttggactttttgttt

SEQ ID NO: 1286468 - DNA, 15 bp, Homo sapiens
tttggactttttgtt

SEQ ID NO: 1286469 - DNA, 15 bp, Homo sapiens
gtttggactttttgt

SEQ ID NO: 1286470 - DNA, 15 bp, Homo sapiens
agtttggactttttg

SEQ ID NO: 1286471 - DNA, 15 bp, Homo sapiens
aagtttggacttttt

SEQ ID NO: 1286472 - DNA, 15 bp, Homo sapiens
gaagtttggactttt

SEQ ID NO: 1286473 - DNA, 15 bp, Homo sapiens
agaagtttggacttt

SEQ ID NO: 1286474 - DNA, 15 bp, Homo sapiens
gagaagtttggactt

SEQ ID NO: 1286475 - DNA, 15 bp, Homo sapiens
agagaagtttggact

SEQ ID NO: 1286476 - DNA, 15 bp, Homo sapiens
aagagaagtttggac

SEQ ID NO: 1286477 - DNA, 15 bp, Homo sapiens
gaagagaagtttgga

SEQ ID NO: 1286478 - DNA, 15 bp, Homo sapiens
agaagagaagtttgg

SEQ ID NO: 1286479 - DNA, 15 bp, Homo sapiens
aagaagagaagtttg

SEQ ID NO: 1286480 - DNA, 15 bp, Homo sapiens
caagaagagaagttt

SEQ ID NO: 1286481 - DNA, 15 bp, Homo sapiens
ccaagaagagaagtt

SEQ ID NO: 1286482 - DNA, 15 bp, Homo sapiens
accaagaagagaagt

SEQ ID NO: 1286483 - DNA, 15 bp, Homo sapiens
caccaagaagagaag

SEQ ID NO: 1286484 - DNA, 15 bp, Homo sapiens
gcaccaagaagagaa

SEQ ID NO: 1286485 - DNA, 15 bp, Homo sapiens
agcaccaagaagaga

SEQ ID NO: 1286486 - DNA, 15 bp, Homo sapiens
gagcaccaagaagag

SEQ ID NO: 1286487 - DNA, 15 bp, Homo sapiens
tgagcaccaagaaga

SEQ ID NO: 1286488 - DNA, 15 bp, Homo sapiens
ttgagcaccaagaag

SEQ ID NO: 1286489 - DNA, 15 bp, Homo sapiens
tttgagcaccaagaa

SEQ ID NO: 1286490 - DNA, 15 bp, Homo sapiens
ctttgagcaccaaga

SEQ ID NO: 1286491 - DNA, 15 bp, Homo sapiens
tctttgagcaccaag

SEQ ID NO: 1286492 - DNA, 15 bp, Homo sapiens
atctttgagcaccaa

SEQ ID NO: 1286493 - DNA, 15 bp, Homo sapiens
gatctttgagcacca

SEQ ID NO: 1286494 - DNA, 15 bp, Homo sapiens
agatctttgagcacc

SEQ ID NO: 1286495 - DNA, 15 bp, Homo sapiens
gagatctttgagcac

SEQ ID NO: 1286496 - DNA, 15 bp, Homo sapiens
ggagatctttgagca

SEQ ID NO: 1286497 - DNA, 15 bp, Homo sapiens
tggagatctttgagc

SEQ ID NO: 1286498 - DNA, 15 bp, Homo sapiens
atggagatctttgag

SEQ ID NO: 1286499 - DNA, 15 bp, Homo sapiens
gatggagatctttga

SEQ ID NO: 1286500 - DNA, 15 bp, Homo sapiens
tgatggagatctttg

SEQ ID NO: 1286501 - DNA, 15 bp, Homo sapiens
atgatggagatcttt

SEQ ID NO: 1286502 - DNA, 15 bp, Homo sapiens
aatgatggagatctt

SEQ ID NO: 1286503 - DNA, 15 bp, Homo sapiens
gaatgatggagatct

SEQ ID NO: 1286504 - DNA, 15 bp, Homo sapiens
ggaatgatggagatc

SEQ ID NO: 1286505 - DNA, 15 bp, Homo sapiens
aggaatgatggagat

SEQ ID NO: 1286506 - DNA, 15 bp, Homo sapiens
gaggaatgatggaga

SEQ ID NO: 1286507 - DNA, 15 bp, Homo sapiens
ggaggaatgatggag

SEQ ID NO: 1286508 - DNA, 15 bp, Homo sapiens
gggaggaatgatgga

SEQ ID NO: 1286509 - DNA, 15 bp, Homo sapiens
agggaggaatgatgg

SEQ ID NO: 1286510 - DNA, 15 bp, Homo sapiens
cagggaggaatgatg

SEQ ID NO: 1286511 - DNA, 15 bp, Homo sapiens
acagggaggaatgat

SEQ ID NO: 1286512 - DNA, 15 bp, Homo sapiens
cacagggaggaatga

SEQ ID NO: 1286513 - DNA, 15 bp, Homo sapiens
acacagggaggaatg

SEQ ID NO: 1286514 - DNA, 15 bp, Homo sapiens
aacacagggaggaat

SEQ ID NO: 1286515 - DNA, 15 bp, Homo sapiens
gaacacagggaggaa

SEQ ID NO: 1286516 - DNA, 15 bp, Homo sapiens
ggaacacagggagga

SEQ ID NO: 1286517 - DNA, 15 bp, Homo sapiens
aggaacacagggagg

SEQ ID NO: 1286518 - DNA, 15 bp, Homo sapiens
caggaacacagggag

SEQ ID NO: 1286519 - DNA, 15 bp, Homo sapiens
ccaggaacacaggga

SEQ ID NO: 1286520 - DNA, 15 bp, Homo sapiens
cccaggaacacaggg

SEQ ID NO: 1286521 - DNA, 15 bp, Homo sapiens
gcccaggaacacagg

SEQ ID NO: 1286522 - DNA, 15 bp, Homo sapiens
agcccaggaacacag

SEQ ID NO: 1286523 - DNA, 15 bp, Homo sapiens
cagcccaggaacaca

SEQ ID NO: 1286524 - DNA, 15 bp, Homo sapiens
gcagcccaggaacac

SEQ ID NO: 1286525 - DNA, 15 bp, Homo sapiens
tgcagcccaggaaca

SEQ ID NO: 1286526 - DNA, 15 bp, Homo sapiens
ttgcagcccaggaac

SEQ ID NO: 1286527 - DNA, 15 bp, Homo sapiens
gttgcagcccaggaa

SEQ ID NO: 1286528 - DNA, 15 bp, Homo sapiens
ggttgcagcccagga

SEQ ID NO: 1286529 - DNA, 15 bp, Homo sapiens
gggttgcagcccagg

SEQ ID NO: 1286530 - DNA, 15 bp, Homo sapiens
tgggttgcagcccag

SEQ ID NO: 1286531 - DNA, 15 bp, Homo sapiens
gtgggttgcagccca

SEQ ID NO: 1286532 - DNA, 15 bp, Homo sapiens
tgtgggttgcagccc

SEQ ID NO: 1286533 - DNA, 15 bp, Homo sapiens
atgtgggttgcagcc

SEQ ID NO: 1286534 - DNA, 15 bp, Homo sapiens
tatgtgggttgcagc

SEQ ID NO: 1286535 - DNA, 15 bp, Homo sapiens
ttatgtgggttgcag

SEQ ID NO: 1286536 - DNA, 15 bp, Homo sapiens
gttatgtgggttgca

SEQ ID NO: 1286537 - DNA, 15 bp, Homo sapiens
agttatgtgggttgc

SEQ ID NO: 1286538 - DNA, 15 bp, Homo sapiens
tagttatgtgggttg

SEQ ID NO: 1286539 - DNA, 15 bp, Homo sapiens
ctagttatgtgggtt

SEQ ID NO: 1286540 - DNA, 15 bp, Homo sapiens
actagttatgtgggt

SEQ ID NO: 1286541 - DNA, 15 bp, Homo sapiens
gactagttatgtggg

SEQ ID NO: 1286542 - DNA, 15 bp, Homo sapiens
tgactagttatgtgg

SEQ ID NO: 1286543 - DNA, 15 bp, Homo sapiens
gtgactagttatgtg

SEQ ID NO: 1286544 - DNA, 15 bp, Homo sapiens
ggtgactagttatgt

SEQ ID NO: 1286545 - DNA, 15 bp, Homo sapiens
gggtgactagttatg

SEQ ID NO: 1286546 - DNA, 15 bp, Homo sapiens
ggggtgactagttat

SEQ ID NO: 1286547 - DNA, 15 bp, Homo sapiens
aggggtgactagtta

SEQ ID NO: 1286548 - DNA, 15 bp, Homo sapiens
taggggtgactagtt

SEQ ID NO: 1286549 - DNA, 15 bp, Homo sapiens
ataggggtgactagt

SEQ ID NO: 1286550 - DNA, 15 bp, Homo sapiens
gataggggtgactag

SEQ ID NO: 1286551 - DNA, 15 bp, Homo sapiens
agataggggtgacta

SEQ ID NO: 1286552 - DNA, 15 bp, Homo sapiens
gagataggggtgact

SEQ ID NO: 1286553 - DNA, 15 bp, Homo sapiens
ggagataggggtgac

SEQ ID NO: 1286554 - DNA, 15 bp, Homo sapiens
aggagataggggtga

SEQ ID NO: 1286555 - DNA, 15 bp, Homo sapiens
caggagataggggtg

SEQ ID NO: 1286556 - DNA, 15 bp, Homo sapiens
gcaggagataggggt

SEQ ID NO: 1286557 - DNA, 15 bp, Homo sapiens
ggcaggagatagggg

SEQ ID NO: 1286558 - DNA, 15 bp, Homo sapiens
aggcaggagataggg

SEQ ID NO: 1286559 - DNA, 15 bp, Homo sapiens
aaggcaggagatagg

SEQ ID NO: 1286560 - DNA, 15 bp, Homo sapiens
taaggcaggagatag

SEQ ID NO: 1286561 - DNA, 15 bp, Homo sapiens
ataaggcaggagata

SEQ ID NO: 1286562 - DNA, 15 bp, Homo sapiens
cataaggcaggagat

SEQ ID NO: 1286563 - DNA, 15 bp, Homo sapiens
acataaggcaggaga

SEQ ID NO: 1286564 - DNA, 15 bp, Homo sapiens
cacataaggcaggag

SEQ ID NO: 1286565 - DNA, 15 bp, Homo sapiens
ccacataaggcagga

SEQ ID NO: 1286566 - DNA, 15 bp, Homo sapiens
cccacataaggcagg

SEQ ID NO: 1286567 - DNA, 15 bp, Homo sapiens
tcccacataaggcag

SEQ ID NO: 1286568 - DNA, 15 bp, Homo sapiens
ctcccacataaggca

SEQ ID NO: 1286569 - DNA, 15 bp, Homo sapiens
actcccacataaggc

SEQ ID NO: 1286570 - DNA, 15 bp, Homo sapiens
aactcccacataagg

SEQ ID NO: 1286571 - DNA, 15 bp, Homo sapiens
gaactcccacataag

SEQ ID NO: 1286572 - DNA, 15 bp, Homo sapiens
tgaactcccacataa

SEQ ID NO: 1286573 - DNA, 15 bp, Homo sapiens
atgaactcccacata

SEQ ID NO: 1286574 - DNA, 15 bp, Homo sapiens
aatgaactcccacat

SEQ ID NO: 1286575 - DNA, 15 bp, Homo sapiens
aaatgaactcccaca

SEQ ID NO: 1286576 - DNA, 15 bp, Homo sapiens
aaaatgaactcccac

SEQ ID NO: 1286577 - DNA, 15 bp, Homo sapiens
taaaatgaactccca

SEQ ID NO: 1286578 - DNA, 15 bp, Homo sapiens
ataaaatgaactccc

SEQ ID NO: 1286579 - DNA, 15 bp, Homo sapiens
gataaaatgaactcc

SEQ ID NO: 1286580 - DNA, 15 bp, Homo sapiens
agataaaatgaactc

SEQ ID NO: 1286581 - DNA, 15 bp, Homo sapiens
aagataaaatgaact

SEQ ID NO: 1286582 - DNA, 15 bp, Homo sapiens
aaagataaaatgaac

SEQ ID NO: 1286583 - DNA, 15 bp, Homo sapiens
aaaagataaaatgaa

SEQ ID NO: 1286584 - DNA, 15 bp, Homo sapiens
gaaaagataaaatga

SEQ ID NO: 1286585 - DNA, 15 bp, Homo sapiens
agaaaagataaaatg

SEQ ID NO: 1286586 - DNA, 15 bp, Homo sapiens
cagaaaagataaaat

SEQ ID NO: 1286587 - DNA, 15 bp, Homo sapiens
gcagaaaagataaaa

SEQ ID NO: 1286588 - DNA, 15 bp, Homo sapiens
agcagaaaagataaa

SEQ ID NO: 1286589 - DNA, 15 bp, Homo sapiens
aagcagaaaagataa

SEQ ID NO: 1286590 - DNA, 15 bp, Homo sapiens
aaagcagaaaagata

SEQ ID NO: 1286591 - DNA, 15 bp, Homo sapiens
gaaagcagaaaagat

SEQ ID NO: 1286592 - DNA, 15 bp, Homo sapiens
agaaagcagaaaaga

SEQ ID NO: 1286593 - DNA, 15 bp, Homo sapiens
aagaaagcagaaaag

SEQ ID NO: 1286594 - DNA, 15 bp, Homo sapiens
caagaaagcagaaaa

SEQ ID NO: 1286595 - DNA, 15 bp, Homo sapiens
acaagaaagcagaaa

SEQ ID NO: 1286596 - DNA, 15 bp, Homo sapiens
gacaagaaagcagaa

SEQ ID NO: 1286597 - DNA, 15 bp, Homo sapiens
agacaagaaagcaga

SEQ ID NO: 1286598 - DNA, 15 bp, Homo sapiens
cagacaagaaagcag

SEQ ID NO: 1286599 - DNA, 15 bp, Homo sapiens
acagacaagaaagca

SEQ ID NO: 1286600 - DNA, 15 bp, Homo sapiens
cacagacaagaaagc

SEQ ID NO: 1286601 - DNA, 15 bp, Homo sapiens
acacagacaagaaag

SEQ ID NO: 1286602 - DNA, 15 bp, Homo sapiens
tacacagacaagaaa

SEQ ID NO: 1286603 - DNA, 15 bp, Homo sapiens
atacacagacaagaa

SEQ ID NO: 1286604 - DNA, 15 bp, Homo sapiens
gatacacagacaaga

SEQ ID NO: 1286605 - DNA, 15 bp, Homo sapiens
ggatacacagacaag

SEQ ID NO: 1286606 - DNA, 15 bp, Homo sapiens
aggatacacagacaa

SEQ ID NO: 1286607 - DNA, 15 bp, Homo sapiens
caggatacacagaca

SEQ ID NO: 1286608 - DNA, 15 bp, Homo sapiens
tcaggatacacagac

SEQ ID NO: 1286609 - DNA, 15 bp, Homo sapiens
ttcaggatacacaga

SEQ ID NO: 1286610 - DNA, 15 bp, Homo sapiens
tttcaggatacacag

SEQ ID NO: 1286611 - DNA, 15 bp, Homo sapiens
atttcaggatacaca

SEQ ID NO: 1286612 - DNA, 15 bp, Homo sapiens
aatttcaggatacac

SEQ ID NO: 1286613 - DNA, 15 bp, Homo sapiens
gaatttcaggataca

SEQ ID NO: 1286614 - DNA, 15 bp, Homo sapiens
ggaatttcaggatac

SEQ ID NO: 1286615 - DNA, 15 bp, Homo sapiens
tggaatttcaggata

SEQ ID NO: 1286616 - DNA, 15 bp, Homo sapiens
gtggaatttcaggat

SEQ ID NO: 1286617 - DNA, 15 bp, Homo sapiens
agtggaatttcagga

SEQ ID NO: 1286618 - DNA, 15 bp, Homo sapiens
gagtggaatttcagg

SEQ ID NO: 1286619 - DNA, 15 bp, Homo sapiens
tgagtggaatttcag

SEQ ID NO: 1286620 - DNA, 15 bp, Homo sapiens
atgagtggaatttca

SEQ ID NO: 1286621 - DNA, 15 bp, Homo sapiens
aatgagtggaatttc

SEQ ID NO: 1286622 - DNA, 15 bp, Homo sapiens
gaatgagtggaattt

SEQ ID NO: 1286623 - DNA, 15 bp, Homo sapiens
agaatgagtggaatt

SEQ ID NO: 1286624 - DNA, 15 bp, Homo sapiens
aagaatgagtggaat

SEQ ID NO: 1286625 - DNA, 15 bp, Homo sapiens
gaagaatgagtggaa

SEQ ID NO: 1286626 - DNA, 15 bp, Homo sapiens
tgaagaatgagtgga

SEQ ID NO: 1286627 - DNA, 15 bp, Homo sapiens
atgaagaatgagtgg

SEQ ID NO: 1286628 - DNA, 15 bp, Homo sapiens
catgaagaatgagtg

SEQ ID NO: 1286629 - DNA, 15 bp, Homo sapiens
ccatgaagaatgagt

SEQ ID NO: 1286630 - DNA, 15 bp, Homo sapiens
gccatgaagaatgag

SEQ ID NO: 1286631 - DNA, 15 bp, Homo sapiens
ggccatgaagaatga

SEQ ID NO: 1286632 - DNA, 15 bp, Homo sapiens
aggccatgaagaatg

SEQ ID NO: 1286633 - DNA, 15 bp, Homo sapiens
caggccatgaagaat

SEQ ID NO: 1286634 - DNA, 15 bp, Homo sapiens
ccaggccatgaagaa

SEQ ID NO: 1286635 - DNA, 15 bp, Homo sapiens
cccaggccatgaaga

SEQ ID NO: 1286636 - DNA, 15 bp, Homo sapiens
ccccaggccatgaag

SEQ ID NO: 1286637 - DNA, 15 bp, Homo sapiens
gccccaggccatgaa

SEQ ID NO: 1286638 - DNA, 15 bp, Homo sapiens
agccccaggccatga

SEQ ID NO: 1286639 - DNA, 15 bp, Homo sapiens
tagccccaggccatg

SEQ ID NO: 1286640 - DNA, 15 bp, Homo sapiens
ttagccccaggccat

SEQ ID NO: 1286641 - DNA, 15 bp, Homo sapiens
tttagccccaggcca

SEQ ID NO: 1286642 - DNA, 15 bp, Homo sapiens
ctttagccccaggcc

SEQ ID NO: 1286643 - DNA, 15 bp, Homo sapiens
gctttagccccaggc

SEQ ID NO: 1286644 - DNA, 15 bp, Homo sapiens
ggctttagccccagg

SEQ ID NO: 1286645 - DNA, 15 bp, Homo sapiens
tggctttagccccag

SEQ ID NO: 1286646 - DNA, 15 bp, Homo sapiens
cctggctttagcccc

SEQ ID NO: 1286647 - DNA, 15 bp, Homo sapiens
tcctggctttagccc

SEQ ID NO: 1286648 - DNA, 15 bp, Homo sapiens
ttcctggctttagcc

SEQ ID NO: 1286649 - DNA, 15 bp, Homo sapiens
cttcctggctttagc

SEQ ID NO: 1286650 - DNA, 15 bp, Homo sapiens
gcttcctggctttag

SEQ ID NO: 1286651 - DNA, 15 bp, Homo sapiens
agcttcctggcttta

SEQ ID NO: 1286652 - DNA, 15 bp, Homo sapiens
aagcttcctggcttt

SEQ ID NO: 1286653 - DNA, 15 bp, Homo sapiens
gaagcttcctggctt

SEQ ID NO: 1286654 - DNA, 15 bp, Homo sapiens
agaagcttcctggct

SEQ ID NO: 1286655 - DNA, 15 bp, Homo sapiens
cagaagcttcctggc

SEQ ID NO: 1286656 - DNA, 15 bp, Homo sapiens
acagaagcttcctgg

SEQ ID NO: 1286657 - DNA, 15 bp, Homo sapiens
aacagaagcttcctg

SEQ ID NO: 1286658 - DNA, 15 bp, Homo sapiens
aaacagaagcttcct

SEQ ID NO: 1286659 - DNA, 15 bp, Homo sapiens
aaaacagaagcttcc

SEQ ID NO: 1286660 - DNA, 15 bp, Homo sapiens
aaaaacagaagcttc

SEQ ID NO: 1286661 - DNA, 15 bp, Homo sapiens
caaaaacagaagctt

SEQ ID NO: 1286662 - DNA, 15 bp, Homo sapiens
tcaaaaacagaagct

SEQ ID NO: 1286663 - DNA, 15 bp, Homo sapiens
atcaaaaacagaagc

SEQ ID NO: 1286664 - DNA, 15 bp, Homo sapiens
catcaaaaacagaag

SEQ ID NO: 1286665 - DNA, 15 bp, Homo sapiens
acatcaaaaacagaa

SEQ ID NO: 1286666 - DNA, 15 bp, Homo sapiens
aacatcaaaaacaga

SEQ ID NO: 1286667 - DNA, 15 bp, Homo sapiens
gaacatcaaaaacag

SEQ ID NO: 1286668 - DNA, 15 bp, Homo sapiens
agaacatcaaaaaca

SEQ ID NO: 1286669 - DNA, 15 bp, Homo sapiens
tagaacatcaaaaac

SEQ ID NO: 1286670 - DNA, 15 bp, Homo sapiens
ttagaacatcaaaaa

SEQ ID NO: 1286671 - DNA, 15 bp, Homo sapiens
cttagaacatcaaaa

SEQ ID NO: 1286672 - DNA, 15 bp, Homo sapiens
acttagaacatcaaa

SEQ ID NO: 1286673 - DNA, 15 bp, Homo sapiens
aacttagaacatcaa

SEQ ID NO: 1286674 - DNA, 15 bp, Homo sapiens
taacttagaacatca

SEQ ID NO: 1286675 - DNA, 15 bp, Homo sapiens
ctaacttagaacatc

SEQ ID NO: 1286676 - DNA, 15 bp, Homo sapiens
tctaacttagaacat

SEQ ID NO: 1286677 - DNA, 15 bp, Homo sapiens
ttctaacttagaaca

SEQ ID NO: 1286678 - DNA, 15 bp, Homo sapiens
cttctaacttagaac

SEQ ID NO: 1286679 - DNA, 15 bp, Homo sapiens
acttctaacttagaa

SEQ ID NO: 1286680 - DNA, 15 bp, Homo sapiens
tacttctaacttaga

SEQ ID NO: 1286681 - DNA, 15 bp, Homo sapiens
ttacttctaacttag

SEQ ID NO: 1286682 - DNA, 15 bp, Homo sapiens
gttacttctaactta

SEQ ID NO: 1286683 - DNA, 15 bp, Homo sapiens
tgttacttctaactt

SEQ ID NO: 1286684 - DNA, 15 bp, Homo sapiens
atgttacttctaact

SEQ ID NO: 1286685 - DNA, 15 bp, Homo sapiens
gatgttacttctaac

SEQ ID NO: 1286686 - DNA, 15 bp, Homo sapiens
agatgttacttctaa

SEQ ID NO: 1286687 - DNA, 15 bp, Homo sapiens
gagatgttacttcta

SEQ ID NO: 1286688 - DNA, 15 bp, Homo sapiens
agagatgttacttct

SEQ ID NO: 1286689 - DNA, 15 bp, Homo sapiens
gagagatgttacttc

SEQ ID NO: 1286690 - DNA, 15 bp, Homo sapiens
agagagatgttactt

SEQ ID NO: 1286691 - DNA, 15 bp, Homo sapiens
gagagagatgttact

SEQ ID NO: 1286692 - DNA, 15 bp, Homo sapiens
ggagagagatgttac

SEQ ID NO: 1286693 - DNA, 15 bp, Homo sapiens
aggagagagatgtta

SEQ ID NO: 1286694 - DNA, 15 bp, Homo sapiens
gaggagagagatgtt

SEQ ID NO: 1286695 - DNA, 15 bp, Homo sapiens
agaggagagagatgt

SEQ ID NO: 1286696 - DNA, 15 bp, Homo sapiens
tagaggagagagatg

SEQ ID NO: 1286697 - DNA, 15 bp, Homo sapiens
ttagaggagagagat

SEQ ID NO: 1286698 - DNA, 15 bp, Homo sapiens
gttagaggagagaga

SEQ ID NO: 1286699 - DNA, 15 bp, Homo sapiens
agttagaggagagag

SEQ ID NO: 1286700 - DNA, 15 bp, Homo sapiens
tagttagaggagaga

SEQ ID NO: 1286701 - DNA, 15 bp, Homo sapiens
ttagttagaggagag

SEQ ID NO: 1286702 - DNA, 15 bp, Homo sapiens
attagttagaggaga

SEQ ID NO: 1286703 - DNA, 15 bp, Homo sapiens
cattagttagaggag

SEQ ID NO: 1286704 - DNA, 15 bp, Homo sapiens
tcattagttagagga

SEQ ID NO: 1286705 - DNA, 15 bp, Homo sapiens
ctcattagttagagg

SEQ ID NO: 1286706 - DNA, 15 bp, Homo sapiens
gctcattagttagag

SEQ ID NO: 1286707 - DNA, 15 bp, Homo sapiens
agctcattagttaga

SEQ ID NO: 1286708 - DNA, 15 bp, Homo sapiens
aagctcattagttag

SEQ ID NO: 1286709 - DNA, 15 bp, Homo sapiens
gaagctcattagtta

SEQ ID NO: 1286710 - DNA, 15 bp, Homo sapiens
ggaagctcattagtt

SEQ ID NO: 1286711 - DNA, 15 bp, Homo sapiens
gggaagctcattagt

SEQ ID NO: 1286712 - DNA, 15 bp, Homo sapiens
ggggaagctcattag

SEQ ID NO: 1286713 - DNA, 15 bp, Homo sapiens
gggggaagctcatta

SEQ ID NO: 1286714 - DNA, 15 bp, Homo sapiens
ggggggaagctcatt

SEQ ID NO: 1286715 - DNA, 15 bp, Homo sapiens
tggggggaagctcat

SEQ ID NO: 1286716 - DNA, 15 bp, Homo sapiens
ttggggggaagctca

SEQ ID NO: 1286717 - DNA, 15 bp, Homo sapiens
gttggggggaagctc

SEQ ID NO: 1286718 - DNA, 15 bp, Homo sapiens
ggttggggggaagct

SEQ ID NO: 1286719 - DNA, 15 bp, Homo sapiens
tggttggggggaagc

SEQ ID NO: 1286720 - DNA, 15 bp, Homo sapiens
ttggttggggggaag

SEQ ID NO: 1286721 - DNA, 15 bp, Homo sapiens
tttggttggggggaa

SEQ ID NO: 1286722 - DNA, 15 bp, Homo sapiens
ctttggttgggggga

SEQ ID NO: 1286723 - DNA, 15 bp, Homo sapiens
gctttggttgggggg

SEQ ID NO: 1286724 - DNA, 15 bp, Homo sapiens
agctttggttggggg

SEQ ID NO: 1286725 - DNA, 15 bp, Homo sapiens
aagctttggttgggg

SEQ ID NO: 1286726 - DNA, 15 bp, Homo sapiens
gaagctttggttggg

SEQ ID NO: 1286727 - DNA, 15 bp, Homo sapiens
agaagctttggttgg

SEQ ID NO: 1286728 - DNA, 15 bp, Homo sapiens
tagaagctttggttg

SEQ ID NO: 1286729 - DNA, 15 bp, Homo sapiens
gtagaagctttggtt

SEQ ID NO: 1286730 - DNA, 15 bp, Homo sapiens
ggtagaagctttggt

SEQ ID NO: 1286731 - DNA, 15 bp, Homo sapiens
gggtagaagctttgg

SEQ ID NO: 1286732 - DNA, 15 bp, Homo sapiens
ggggtagaagctttg

SEQ ID NO: 1286733 - DNA, 15 bp, Homo sapiens
tggggtagaagcttt

SEQ ID NO: 1286734 - DNA, 15 bp, Homo sapiens
atggggtagaagctt

SEQ ID NO: 1286735 - DNA, 15 bp, Homo sapiens
tcatggagcttgtca

SEQ ID NO: 1286736 - DNA, 15 bp, Homo sapiens
ctcatggagcttgtc

SEQ ID NO: 1286737 - DNA, 15 bp, Homo sapiens
actcatggagcttgt

SEQ ID NO: 1286738 - DNA, 15 bp, Homo sapiens
gactcatggagcttg

SEQ ID NO: 1286739 - DNA, 15 bp, Homo sapiens
tgactcatggagctt

SEQ ID NO: 1286740 - DNA, 15 bp, Homo sapiens
gtgactcatggagct

SEQ ID NO: 1286741 - DNA, 15 bp, Homo sapiens
agtgactcatggagc

SEQ ID NO: 1286742 - DNA, 15 bp, Homo sapiens
gagtgactcatggag

SEQ ID NO: 1286743 - DNA, 15 bp, Homo sapiens
tgagtgactcatgga

SEQ ID NO: 1286744 - DNA, 15 bp, Homo sapiens
ttgagtgactcatgg

SEQ ID NO: 1286745 - DNA, 15 bp, Homo sapiens
gttgagtgactcatg

SEQ ID NO: 1286746 - DNA, 15 bp, Homo sapiens
agttgagtgactcat

SEQ ID NO: 1286747 - DNA, 15 bp, Homo sapiens
cagttgagtgactca

SEQ ID NO: 1286748 - DNA, 15 bp, Homo sapiens
ccagttgagtgactc

SEQ ID NO: 1286749 - DNA, 15 bp, Homo sapiens
gccagttgagtgact

SEQ ID NO: 1286750 - DNA, 15 bp, Homo sapiens
ggccagttgagtgac

SEQ ID NO: 1286751 - DNA, 15 bp, Homo sapiens
cggccagttgagtga

SEQ ID NO: 1286752 - DNA, 15 bp, Homo sapiens
gcggccagttgagtg

SEQ ID NO: 1286753 - DNA, 15 bp, Homo sapiens
agcggccagttgagt

SEQ ID NO: 1286754 - DNA, 15 bp, Homo sapiens
gagcggccagttgag

SEQ ID NO: 1286755 - DNA, 15 bp, Homo sapiens
ggagcggccagttga

SEQ ID NO: 1286756 - DNA, 15 bp, Homo sapiens
tggagcggccagttg

SEQ ID NO: 1286757 - DNA, 15 bp, Homo sapiens
ctggagcggccagtt

SEQ ID NO: 1286758 - DNA, 15 bp, Homo sapiens
gctggagcggccagt

SEQ ID NO: 1286759 - DNA, 15 bp, Homo sapiens
ggctggagcggccag

SEQ ID NO: 1286760 - DNA, 15 bp, Homo sapiens
tggctggagcggcca

SEQ ID NO: 1286761 - DNA, 15 bp, Homo sapiens
ctggctggagcggcc

SEQ ID NO: 1286762 - DNA, 15 bp, Homo sapiens
tctggctggagcggc

SEQ ID NO: 1286763 - DNA, 15 bp, Homo sapiens
ctctggctggagcgg

SEQ ID NO: 1286764 - DNA, 15 bp, Homo sapiens
tctctggctggagcg

SEQ ID NO: 1286765 - DNA, 15 bp, Homo sapiens
ctctctggctggagc

SEQ ID NO: 1286766 - DNA, 15 bp, Homo sapiens
gctctctggctggag

SEQ ID NO: 1286767 - DNA, 15 bp, Homo sapiens
tgctctctggctgga

SEQ ID NO: 1286768 - DNA, 15 bp, Homo sapiens
atgctctctggctgg

SEQ ID NO: 1286769 - DNA, 15 bp, Homo sapiens
gatgctctctggctg

SEQ ID NO: 1286770 - DNA, 15 bp, Homo sapiens
tgatgctctctggct

SEQ ID NO: 1286771 - DNA, 15 bp, Homo sapiens
ttgatgctctctggc

SEQ ID NO: 1286772 - DNA, 15 bp, Homo sapiens
cttgatgctctctgg

SEQ ID NO: 1286773 - DNA, 15 bp, Homo sapiens
ccttgatgctctctg

SEQ ID NO: 1286774 - DNA, 15 bp, Homo sapiens
tccttgatgctctct

SEQ ID NO: 1286775 - DNA, 15 bp, Homo sapiens
ctccttgatgctctc

SEQ ID NO: 1286776 - DNA, 15 bp, Homo sapiens
cctccttgatgctct

SEQ ID NO: 1286777 - DNA, 15 bp, Homo sapiens
ccctccttgatgctc

SEQ ID NO: 1286778 - DNA, 15 bp, Homo sapiens
cccctccttgatgct

SEQ ID NO: 1286779 - DNA, 15 bp, Homo sapiens
acccctccttgatgc

SEQ ID NO: 1286780 - DNA, 15 bp, Homo sapiens
aacccctccttgatg

SEQ ID NO: 1286781 - DNA, 15 bp, Homo sapiens
aaacccctccttgat

SEQ ID NO: 1286782 - DNA, 15 bp, Homo sapiens
taaacccctccttga

SEQ ID NO: 1286783 - DNA, 15 bp, Homo sapiens
ataaacccctccttg

SEQ ID NO: 1286784 - DNA, 15 bp, Homo sapiens
cataaacccctcctt

SEQ ID NO: 1286785 - DNA, 15 bp, Homo sapiens
tcataaacccctcct

SEQ ID NO: 1286786 - DNA, 15 bp, Homo sapiens
gtcataaacccctcc

SEQ ID NO: 1286787 - DNA, 15 bp, Homo sapiens
tgtcataaacccctc

SEQ ID NO: 1286788 - DNA, 15 bp, Homo sapiens
gtgtcataaacccct

SEQ ID NO: 1286789 - DNA, 15 bp, Homo sapiens
agtgtcataaacccc

SEQ ID NO: 1286790 - DNA, 15 bp, Homo sapiens
cagtgtcataaaccc

SEQ ID NO: 1286791 - DNA, 15 bp, Homo sapiens
gcagtgtcataaacc

SEQ ID NO: 1286792 - DNA, 15 bp, Homo sapiens
ggcagtgtcataaac

SEQ ID NO: 1286793 - DNA, 15 bp, Homo sapiens
aggcagtgtcataaa

SEQ ID NO: 1286794 - DNA, 15 bp, Homo sapiens
gaggcagtgtcataa

SEQ ID NO: 1286795 - DNA, 15 bp, Homo sapiens
tgaggcagtgtcata

SEQ ID NO: 1286796 - DNA, 15 bp, Homo sapiens
atgaggcagtgtcat

SEQ ID NO: 1286797 - DNA, 15 bp, Homo sapiens
catgaggcagtgtca

SEQ ID NO: 1286798 - DNA, 15 bp, Homo sapiens
gcatgaggcagtgtc

SEQ ID NO: 1286799 - DNA, 15 bp, Homo sapiens
tgcatgaggcagtgt

SEQ ID NO: 1286800 - DNA, 15 bp, Homo sapiens
ctgcatgaggcagtg

SEQ ID NO: 1286801 - DNA, 15 bp, Homo sapiens
gctgcatgaggcagt

SEQ ID NO: 1286802 - DNA, 15 bp, Homo sapiens
tgctgcatgaggcag

SEQ ID NO: 1286803 - DNA, 15 bp, Homo sapiens
ctgctgcatgaggca

SEQ ID NO: 1286804 - DNA, 15 bp, Homo sapiens
actgctgcatgaggc

SEQ ID NO: 1286805 - DNA, 15 bp, Homo sapiens
cactgctgcatgagg

SEQ ID NO: 1286806 - DNA, 15 bp, Homo sapiens
tcactgctgcatgag

SEQ ID NO: 1286807 - DNA, 15 bp, Homo sapiens
atcactgctgcatga

SEQ ID NO: 1286808 - DNA, 15 bp, Homo sapiens
gatcactgctgcatg

SEQ ID NO: 1286809 - DNA, 15 bp, Homo sapiens
tgatcactgctgcat

SEQ ID NO: 1286810 - DNA, 15 bp, Homo sapiens
ctgatcactgctgca

SEQ ID NO: 1286811 - DNA, 15 bp, Homo sapiens
gctgatcactgctgc

SEQ ID NO: 1286812 - DNA, 15 bp, Homo sapiens
ggctgatcactgctg

SEQ ID NO: 1286813 - DNA, 15 bp, Homo sapiens
tggctgatcactgct

SEQ ID NO: 1286814 - DNA, 15 bp, Homo sapiens
atggctgatcactgc

SEQ ID NO: 1286815 - DNA, 15 bp, Homo sapiens
catggctgatcactg

SEQ ID NO: 1286816 - DNA, 15 bp, Homo sapiens
tcatggctgatcact

SEQ ID NO: 1286817 - DNA, 15 bp, Homo sapiens
ctcatggctgatcac

SEQ ID NO: 1286818 - DNA, 15 bp, Homo sapiens
cctcatggctgatca

SEQ ID NO: 1286819 - DNA, 15 bp, Homo sapiens
acctcatggctgatc

SEQ ID NO: 1286820 - DNA, 15 bp, Homo sapiens
cacctcatggctgat

SEQ ID NO: 1286821 - DNA, 15 bp, Homo sapiens
ccacctcatggctga

SEQ ID NO: 1286822 - DNA, 15 bp, Homo sapiens
gccacctcatggctg

SEQ ID NO: 1286823 - DNA, 15 bp, Homo sapiens
tgccacctcatggct

SEQ ID NO: 1286824 - DNA, 15 bp, Homo sapiens
atgccacctcatggc

SEQ ID NO: 1286825 - DNA, 15 bp, Homo sapiens
gatgccacctcatgg

SEQ ID NO: 1286826 - DNA, 15 bp, Homo sapiens
ggatgccacctcatg

SEQ ID NO: 1286827 - DNA, 15 bp, Homo sapiens
tggatgccacctcat

SEQ ID NO: 1286828 - DNA, 15 bp, Homo sapiens
atggatgccacctca

SEQ ID NO: 1286829 - DNA, 15 bp, Homo sapiens
gatggatgccacctc

SEQ ID NO: 1286830 - DNA, 15 bp, Homo sapiens
ggatggatgccacct

SEQ ID NO: 1286831 - DNA, 15 bp, Homo sapiens
tggatggatgccacc

SEQ ID NO: 1286832 - DNA, 15 bp, Homo sapiens
atggatggatgccac

SEQ ID NO: 1286833 - DNA, 15 bp, Homo sapiens
aatggatggatgcca

SEQ ID NO: 1286834 - DNA, 15 bp, Homo sapiens
caatggatggatgcc

SEQ ID NO: 1286835 - DNA, 15 bp, Homo sapiens
acaatggatggatgc

SEQ ID NO: 1286836 - DNA, 15 bp, Homo sapiens
gacaatggatggatg

SEQ ID NO: 1286837 - DNA, 15 bp, Homo sapiens
tgacaatggatggat

SEQ ID NO: 1286838 - DNA, 15 bp, Homo sapiens
ctgacaatggatgga

SEQ ID NO: 1286839 - DNA, 15 bp, Homo sapiens
cctgacaatggatgg

SEQ ID NO: 1286840 - DNA, 15 bp, Homo sapiens
ccctgacaatggatg

SEQ ID NO: 1286841 - DNA, 15 bp, Homo sapiens
cccctgacaatggat

SEQ ID NO: 1286842 - DNA, 15 bp, Homo sapiens
tcccctgacaatgga

SEQ ID NO: 1286843 - DNA, 15 bp, Homo sapiens
gtcccctgacaatgg

SEQ ID NO: 1286844 - DNA, 15 bp, Homo sapiens
tgtcccctgacaatg

SEQ ID NO: 1286845 - DNA, 15 bp, Homo sapiens
ctgtcccctgacaat

SEQ ID NO: 1286846 - DNA, 15 bp, Homo sapiens
actgtcccctgacaa

SEQ ID NO: 1286847 - DNA, 15 bp, Homo sapiens
gactgtcccctgaca

SEQ ID NO: 1286848 - DNA, 15 bp, Homo sapiens
ggactgtcccctgac

SEQ ID NO: 1286849 - DNA, 15 bp, Homo sapiens
tggactgtcccctga

SEQ ID NO: 1286850 - DNA, 15 bp, Homo sapiens
atggactgtcccctg

SEQ ID NO: 1286851 - DNA, 15 bp, Homo sapiens
gatggactgtcccct

SEQ ID NO: 1286852 - DNA, 15 bp, Homo sapiens
ggatggactgtcccc

SEQ ID NO: 1286853 - DNA, 15 bp, Homo sapiens
aggatggactgtccc

SEQ ID NO: 1286854 - DNA, 15 bp, Homo sapiens
gaggatggactgtcc

SEQ ID NO: 1286855 - DNA, 15 bp, Homo sapiens
ggaggatggactgtc

SEQ ID NO: 1286856 - DNA, 15 bp, Homo sapiens
aggaggatggactgt

SEQ ID NO: 1286857 - DNA, 15 bp, Homo sapiens
gaggaggatggactg

SEQ ID NO: 1286858 - DNA, 15 bp, Homo sapiens
tgaggaggatggact

SEQ ID NO: 1286859 - DNA, 15 bp, Homo sapiens
ctgaggaggatggac

SEQ ID NO: 1286860 - DNA, 15 bp, Homo sapiens
cctgaggaggatgga

SEQ ID NO: 1286861 - DNA, 15 bp, Homo sapiens
gcctgaggaggatgg

SEQ ID NO: 1286862 - DNA, 15 bp, Homo sapiens
tgcctgaggaggatg

SEQ ID NO: 1286863 - DNA, 15 bp, Homo sapiens
gtgcctgaggaggat

SEQ ID NO: 1286864 - DNA, 15 bp, Homo sapiens
tgtgcctgaggagga

SEQ ID NO: 1286865 - DNA, 15 bp, Homo sapiens
atgtgcctgaggagg

SEQ ID NO: 1286866 - DNA, 15 bp, Homo sapiens
catgtgcctgaggag

SEQ ID NO: 1286867 - DNA, 15 bp, Homo sapiens
gcatgtgcctgagga

SEQ ID NO: 1286868 - DNA, 15 bp, Homo sapiens
tgcatgtgcctgagg

SEQ ID NO: 1286869 - DNA, 15 bp, Homo sapiens
gtgcatgtgcctgag

SEQ ID NO: 1286870 - DNA, 15 bp, Homo sapiens
tgtgcatgtgcctga

SEQ ID NO: 1286871 - DNA, 15 bp, Homo sapiens
ctgtgcatgtgcctg

SEQ ID NO: 1286872 - DNA, 15 bp, Homo sapiens
tctgtgcatgtgcct

SEQ ID NO: 1286873 - DNA, 15 bp, Homo sapiens
ctctgtgcatgtgcc

SEQ ID NO: 1286874 - DNA, 15 bp, Homo sapiens
cctctgtgcatgtgc

SEQ ID NO: 1286875 - DNA, 15 bp, Homo sapiens
tcctctgtgcatgtg

SEQ ID NO: 1286876 - DNA, 15 bp, Homo sapiens
atcctctgtgcatgt

SEQ ID NO: 1286877 - DNA, 15 bp, Homo sapiens
aatcctctgtgcatg

SEQ ID NO: 1286878 - DNA, 15 bp, Homo sapiens
caatcctctgtgcat

SEQ ID NO: 1286879 - DNA, 15 bp, Homo sapiens
ccaatcctctgtgca

SEQ ID NO: 1286880 - DNA, 15 bp, Homo sapiens
cccaatcctctgtgc

SEQ ID NO: 1286881 - DNA, 15 bp, Homo sapiens
acccaatcctctgtg

SEQ ID NO: 1286882 - DNA, 15 bp, Homo sapiens
cacccaatcctctgt

SEQ ID NO: 1286883 - DNA, 15 bp, Homo sapiens
gcacccaatcctctg

SEQ ID NO: 1286884 - DNA, 15 bp, Homo sapiens
tgcacccaatcctct

SEQ ID NO: 1286885 - DNA, 15 bp, Homo sapiens
ctgcacccaatcctc

SEQ ID NO: 1286886 - DNA, 15 bp, Homo sapiens
tctgcacccaatcct

SEQ ID NO: 1286887 - DNA, 15 bp, Homo sapiens
ctctgcacccaatcc

SEQ ID NO: 1286888 - DNA, 15 bp, Homo sapiens
cctctgcacccaatc

SEQ ID NO: 1286889 - DNA, 15 bp, Homo sapiens
tcctctgcacccaat

SEQ ID NO: 1286890 - DNA, 15 bp, Homo sapiens
ctcctctgcacccaa

SEQ ID NO: 1286891 - DNA, 15 bp, Homo sapiens
actcctctgcaccca

SEQ ID NO: 1286892 - DNA, 15 bp, Homo sapiens
aactcctctgcaccc

SEQ ID NO: 1286893 - DNA, 15 bp, Homo sapiens
gaactcctctgcacc

SEQ ID NO: 1286894 - DNA, 15 bp, Homo sapiens
tgaactcctctgcac

SEQ ID NO: 1286895 - DNA, 15 bp, Homo sapiens
gtgaactcctctgca

SEQ ID NO: 1286896 - DNA, 15 bp, Homo sapiens
ggtgaactcctctgc

SEQ ID NO: 1286897 - DNA, 15 bp, Homo sapiens
gggtgaactcctctg

SEQ ID NO: 1286898 - DNA, 15 bp, Homo sapiens
agggtgaactcctct

SEQ ID NO: 1286899 - DNA, 15 bp, Homo sapiens
gagggtgaactcctc

SEQ ID NO: 1286900 - DNA, 15 bp, Homo sapiens
tgagggtgaactcct

SEQ ID NO: 1286901 - DNA, 15 bp, Homo sapiens
ttgagggtgaactcc

SEQ ID NO: 1286902 - DNA, 15 bp, Homo sapiens
gttgagggtgaactc

SEQ ID NO: 1286903 - DNA, 15 bp, Homo sapiens
tgttgagggtgaact

SEQ ID NO: 1286904 - DNA, 15 bp, Homo sapiens
gtgttgagggtgaac

SEQ ID NO: 1286905 - DNA, 15 bp, Homo sapiens
ggtgttgagggtgaa

SEQ ID NO: 1286906 - DNA, 15 bp, Homo sapiens
aggtgttgagggtga

SEQ ID NO: 1286907 - DNA, 15 bp, Homo sapiens
gaggtgttgagggtg

SEQ ID NO: 1286908 - DNA, 15 bp, Homo sapiens
agaggtgttgagggt

SEQ ID NO: 1286909 - DNA, 15 bp, Homo sapiens
cagaggtgttgaggg

SEQ ID NO: 1286910 - DNA, 15 bp, Homo sapiens
ccagaggtgttgagg

SEQ ID NO: 1286911 - DNA, 15 bp, Homo sapiens
cccagaggtgttgag

SEQ ID NO: 1286912 - DNA, 15 bp, Homo sapiens
acccagaggtgttga

SEQ ID NO: 1286913 - DNA, 15 bp, Homo sapiens
cacccagaggtgttg

SEQ ID NO: 1286914 - DNA, 15 bp, Homo sapiens
acacccagaggtgtt

SEQ ID NO: 1286915 - DNA, 15 bp, Homo sapiens
aacacccagaggtgt

SEQ ID NO: 1286916 - DNA, 15 bp, Homo sapiens
caacacccagaggtg

SEQ ID NO: 1286917 - DNA, 15 bp, Homo sapiens
ccaacacccagaggt

SEQ ID NO: 1286918 - DNA, 15 bp, Homo sapiens
cccaacacccagagg

SEQ ID NO: 1286919 - DNA, 15 bp, Homo sapiens
tcccaacacccagag

SEQ ID NO: 1286920 - DNA, 15 bp, Homo sapiens
ctcccaacacccaga

SEQ ID NO: 1286921 - DNA, 15 bp, Homo sapiens
cctcccaacacccag

SEQ ID NO: 1286922 - DNA, 15 bp, Homo sapiens
gcctcccaacaccca

SEQ ID NO: 1286923 - DNA, 15 bp, Homo sapiens
tgcctcccaacaccc

SEQ ID NO: 1286924 - DNA, 15 bp, Homo sapiens
ctgcctcccaacacc

SEQ ID NO: 1286925 - DNA, 15 bp, Homo sapiens
cctgcctcccaacac

SEQ ID NO: 1286926 - DNA, 15 bp, Homo sapiens
tcctgcctcccaaca

SEQ ID NO: 1286927 - DNA, 15 bp, Homo sapiens
ctcctgcctcccaac

SEQ ID NO: 1286928 - DNA, 15 bp, Homo sapiens
tctcctgcctcccaa

SEQ ID NO: 1286929 - DNA, 15 bp, Homo sapiens
ctctcctgcctccca

SEQ ID NO: 1286930 - DNA, 15 bp, Homo sapiens
gctctcctgcctccc

SEQ ID NO: 1286931 - DNA, 15 bp, Homo sapiens
tgctctcctgcctcc

SEQ ID NO: 1286932 - DNA, 15 bp, Homo sapiens
ctgctctcctgcctc

SEQ ID NO: 1286933 - DNA, 15 bp, Homo sapiens
actgctctcctgcct

SEQ ID NO: 1286934 - DNA, 15 bp, Homo sapiens
cactgctctcctgcc

SEQ ID NO: 1286935 - DNA, 15 bp, Homo sapiens
ccactgctctcctgc

SEQ ID NO: 1286936 - DNA, 15 bp, Homo sapiens
cccactgctctcctg

SEQ ID NO: 1286937 - DNA, 15 bp, Homo sapiens
ccccactgctctcct

SEQ ID NO: 1286938 - DNA, 15 bp, Homo sapiens
gccccactgctctcc

SEQ ID NO: 1286939 - DNA, 15 bp, Homo sapiens
agccccactgctctc

SEQ ID NO: 1286940 - DNA, 15 bp, Homo sapiens
cagccccactgctct

SEQ ID NO: 1286941 - DNA, 15 bp, Homo sapiens
ccagccccactgctc

SEQ ID NO: 1286942 - DNA, 15 bp, Homo sapiens
tccagccccactgct

SEQ ID NO: 1286943 - DNA, 15 bp, Homo sapiens
ctccagccccactgc

SEQ ID NO: 1286944 - DNA, 15 bp, Homo sapiens
cctccagccccactg

SEQ ID NO: 1286945 - DNA, 15 bp, Homo sapiens
gcctccagccccact

SEQ ID NO: 1286946 - DNA, 15 bp, Homo sapiens
tgcctccagccccac

SEQ ID NO: 1286947 - DNA, 15 bp, Homo sapiens
gtgcctccagcccca

SEQ ID NO: 1286948 - DNA, 15 bp, Homo sapiens
tgtgcctccagcccc

SEQ ID NO: 1286949 - DNA, 15 bp, Homo sapiens
ctgtgcctccagccc

SEQ ID NO: 1286950 - DNA, 15 bp, Homo sapiens
gctgtgcctccagcc

SEQ ID NO: 1286951 - DNA, 15 bp, Homo sapiens
agctgtgcctccagc

SEQ ID NO: 1286952 - DNA, 15 bp, Homo sapiens
gagctgtgcctccag

SEQ ID NO: 1286953 - DNA, 15 bp, Homo sapiens
agagctgtgcctcca

SEQ ID NO: 1286954 - DNA, 15 bp, Homo sapiens
cagagctgtgcctcc

SEQ ID NO: 1286955 - DNA, 15 bp, Homo sapiens
gcagagctgtgcctc

SEQ ID NO: 1286956 - DNA, 15 bp, Homo sapiens
ggcagagctgtgcct

SEQ ID NO: 1286957 - DNA, 15 bp, Homo sapiens
tggcagagctgtgcc

SEQ ID NO: 1286958 - DNA, 15 bp, Homo sapiens
ttggcagagctgtgc

SEQ ID NO: 1286959 - DNA, 15 bp, Homo sapiens
cttggcagagctgtg

SEQ ID NO: 1286960 - DNA, 15 bp, Homo sapiens
gcttggcagagctgt

SEQ ID NO: 1286961 - DNA, 15 bp, Homo sapiens
tgcttggcagagctg

SEQ ID NO: 1286962 - DNA, 15 bp, Homo sapiens
atgcttggcagagct

SEQ ID NO: 1286963 - DNA, 15 bp, Homo sapiens
aatgcttggcagagc

SEQ ID NO: 1286964 - DNA, 15 bp, Homo sapiens
gaatgcttggcagag

SEQ ID NO: 1286965 - DNA, 15 bp, Homo sapiens
ggaatgcttggcaga

SEQ ID NO: 1286966 - DNA, 15 bp, Homo sapiens
aggaatgcttggcag

SEQ ID NO: 1286967 - DNA, 15 bp, Homo sapiens
caggaatgcttggca

SEQ ID NO: 1286968 - DNA, 15 bp, Homo sapiens
tcaggaatgcttggc

SEQ ID NO: 1286969 - DNA, 15 bp, Homo sapiens
ttcaggaatgcttgg

SEQ ID NO: 1286970 - DNA, 15 bp, Homo sapiens
gttcaggaatgcttg

SEQ ID NO: 1286971 - DNA, 15 bp, Homo sapiens
ggttcaggaatgctt

SEQ ID NO: 1286972 - DNA, 15 bp, Homo sapiens
tggttcaggaatgct

SEQ ID NO: 1286973 - DNA, 15 bp, Homo sapiens
ttggttcaggaatgc

SEQ ID NO: 1286974 - DNA, 15 bp, Homo sapiens
tttggttcaggaatg

SEQ ID NO: 1286975 - DNA, 15 bp, Homo sapiens
ctttggttcaggaat

SEQ ID NO: 1286976 - DNA, 15 bp, Homo sapiens
gctttggttcaggaa

SEQ ID NO: 1286977 - DNA, 15 bp, Homo sapiens
tgctttggttcagga

SEQ ID NO: 1286978 - DNA, 15 bp, Homo sapiens
ttgctttggttcagg

SEQ ID NO: 1286979 - DNA, 15 bp, Homo sapiens
cttgctttggttcag

SEQ ID NO: 1286980 - DNA, 15 bp, Homo sapiens
gcttgctttggttca

SEQ ID NO: 1286981 - DNA, 15 bp, Homo sapiens
ggcttgctttggttc

SEQ ID NO: 1286982 - DNA, 15 bp, Homo sapiens
tggcttgctttggtt

SEQ ID NO: 1286983 - DNA, 15 bp, Homo sapiens
atggcttgctttggt

SEQ ID NO: 1286984 - DNA, 15 bp, Homo sapiens
gatggcttgctttgg

SEQ ID NO: 1286985 - DNA, 15 bp, Homo sapiens
tgatggcttgctttg

SEQ ID NO: 1286986 - DNA, 15 bp, Homo sapiens
ttgatggcttgcttt

SEQ ID NO: 1286987 - DNA, 15 bp, Homo sapiens
attgatggcttgctt

SEQ ID NO: 1286988 - DNA, 15 bp, Homo sapiens
cattgatggcttgct

SEQ ID NO: 1286989 - DNA, 15 bp, Homo sapiens
tcattgatggcttgc

SEQ ID NO: 1286990 - DNA, 15 bp, Homo sapiens
ctcattgatggcttg

SEQ ID NO: 1286991 - DNA, 15 bp, Homo sapiens
actcattgatggctt

SEQ ID NO: 1286992 - DNA, 15 bp, Homo sapiens
cactcattgatggct

SEQ ID NO: 1286993 - DNA, 15 bp, Homo sapiens
gcactcattgatggc

SEQ ID NO: 1286994 - DNA, 15 bp, Homo sapiens
agcactcattgatgg

SEQ ID NO: 1286995 - DNA, 15 bp, Homo sapiens
gagcactcattgatg

SEQ ID NO: 1286996 - DNA, 15 bp, Homo sapiens
tgagcactcattgat

SEQ ID NO: 1286997 - DNA, 15 bp, Homo sapiens
gtgagcactcattga

SEQ ID NO: 1286998 - DNA, 15 bp, Homo sapiens
tgtgagcactcattg

SEQ ID NO: 1286999 - DNA, 15 bp, Homo sapiens
gtgtgagcactcatt

SEQ ID NO: 1287000 - DNA, 15 bp, Homo sapiens
ggtgtgagcactcat

SEQ ID NO: 1287001 - DNA, 15 bp, Homo sapiens
cggtgtgagcactca

SEQ ID NO: 1287002 - DNA, 15 bp, Homo sapiens
acggtgtgagcactc

SEQ ID NO: 1287003 - DNA, 15 bp, Homo sapiens
cacggtgtgagcact

SEQ ID NO: 1287004 - DNA, 15 bp, Homo sapiens
gcacggtgtgagcac

SEQ ID NO: 1287005 - DNA, 15 bp, Homo sapiens
tgcacggtgtgagca

SEQ ID NO: 1287006 - DNA, 15 bp, Homo sapiens
ctgcacggtgtgagc

SEQ ID NO: 1287007 - DNA, 15 bp, Homo sapiens
cctgcacggtgtgag

SEQ ID NO: 1287008 - DNA, 15 bp, Homo sapiens
gcctgcacggtgtga

SEQ ID NO: 1287009 - DNA, 15 bp, Homo sapiens
tgcctgcacggtgtg

SEQ ID NO: 1287010 - DNA, 15 bp, Homo sapiens
gtgcctgcacggtgt

SEQ ID NO: 1287011 - DNA, 15 bp, Homo sapiens
agtgcctgcacggtg

SEQ ID NO: 1287012 - DNA, 15 bp, Homo sapiens
cagtgcctgcacggt

SEQ ID NO: 1287013 - DNA, 15 bp, Homo sapiens
acagtgcctgcacgg

SEQ ID NO: 1287014 - DNA, 15 bp, Homo sapiens
cacagtgcctgcacg

SEQ ID NO: 1287015 - DNA, 15 bp, Homo sapiens
tcacagtgcctgcac

SEQ ID NO: 1287016 - DNA, 15 bp, Homo sapiens
ctcacagtgcctgca

SEQ ID NO: 1287017 - DNA, 15 bp, Homo sapiens
gctcacagtgcctgc

SEQ ID NO: 1287018 - DNA, 15 bp, Homo sapiens
ggctcacagtgcctg

SEQ ID NO: 1287019 - DNA, 15 bp, Homo sapiens
aggctcacagtgcct

SEQ ID NO: 1287020 - DNA, 15 bp, Homo sapiens
caggctcacagtgcc

SEQ ID NO: 1287021 - DNA, 15 bp, Homo sapiens
acaggctcacagtgc

SEQ ID NO: 1287022 - DNA, 15 bp, Homo sapiens
cacaggctcacagtg

SEQ ID NO: 1287023 - DNA, 15 bp, Homo sapiens
acacaggctcacagt

SEQ ID NO: 1287024 - DNA, 15 bp, Homo sapiens
gacacaggctcacag

SEQ ID NO: 1287025 - DNA, 15 bp, Homo sapiens
ggacacaggctcaca

SEQ ID NO: 1287026 - DNA, 15 bp, Homo sapiens
tggacacaggctcac

SEQ ID NO: 1287027 - DNA, 15 bp, Homo sapiens
gtggacacaggctca

SEQ ID NO: 1287028 - DNA, 15 bp, Homo sapiens
tgtggacacaggctc

SEQ ID NO: 1287029 - DNA, 15 bp, Homo sapiens
atgtggacacaggct

SEQ ID NO: 1287030 - DNA, 15 bp, Homo sapiens
catgtggacacaggc

SEQ ID NO: 1287031 - DNA, 15 bp, Homo sapiens
tcatgtggacacagg

SEQ ID NO: 1287032 - DNA, 15 bp, Homo sapiens
atcatgtggacacag

SEQ ID NO: 1287033 - DNA, 15 bp, Homo sapiens
gatcatgtggacaca

SEQ ID NO: 1287034 - DNA, 15 bp, Homo sapiens
agatcatgtggacac

SEQ ID NO: 1287035 - DNA, 15 bp, Homo sapiens
gagatcatgtggaca

SEQ ID NO: 1287036 - DNA, 15 bp, Homo sapiens
tgagatcatgtggac

SEQ ID NO: 1287037 - DNA, 15 bp, Homo sapiens
atgagatcatgtgga

SEQ ID NO: 1287038 - DNA, 15 bp, Homo sapiens
gatgagatcatgtgg

SEQ ID NO: 1287039 - DNA, 15 bp, Homo sapiens
agatgagatcatgtg

SEQ ID NO: 1287040 - DNA, 15 bp, Homo sapiens
caagatgagatcatg

SEQ ID NO: 1287041 - DNA, 15 bp, Homo sapiens
acaagatgagatcat

SEQ ID NO: 1287042 - DNA, 15 bp, Homo sapiens
gacaagatgagatca

SEQ ID NO: 1287043 - DNA, 15 bp, Homo sapiens
ggacaagatgagatc

SEQ ID NO: 1287044 - DNA, 15 bp, Homo sapiens
aggacaagatgagat

SEQ ID NO: 1287045 - DNA, 15 bp, Homo sapiens
gaggacaagatgaga

SEQ ID NO: 1287046 - DNA, 15 bp, Homo sapiens
tgaggacaagatgag

SEQ ID NO: 1287047 - DNA, 15 bp, Homo sapiens
ctgaggacaagatga

SEQ ID NO: 1287048 - DNA, 15 bp, Homo sapiens
cctgaggacaagatg

SEQ ID NO: 1287049 - DNA, 15 bp, Homo sapiens
ccctgaggacaagat

SEQ ID NO: 1287050 - DNA, 15 bp, Homo sapiens
gccctgaggacaaga

SEQ ID NO: 1287051 - DNA, 15 bp, Homo sapiens
ggccctgaggacaag

SEQ ID NO: 1287052 - DNA, 15 bp, Homo sapiens
tggccctgaggacaa

SEQ ID NO: 1287053 - DNA, 15 bp, Homo sapiens
atggccctgaggaca

SEQ ID NO: 1287054 - DNA, 15 bp, Homo sapiens
catggccctgaggac

SEQ ID NO: 1287055 - DNA, 15 bp, Homo sapiens
gcatggccctgagga

SEQ ID NO: 1287056 - DNA, 15 bp, Homo sapiens
ggcatggccctgagg

SEQ ID NO: 1287057 - DNA, 15 bp, Homo sapiens
tggcatggccctgag

SEQ ID NO: 1287058 - DNA, 15 bp, Homo sapiens
ttggcatggccctga

SEQ ID NO: 1287059 - DNA, 15 bp, Homo sapiens
cttggcatggccctg

SEQ ID NO: 1287060 - DNA, 15 bp, Homo sapiens
tcttggcatggccct

SEQ ID NO: 1287061 - DNA, 15 bp, Homo sapiens
ctcttggcatggccc

SEQ ID NO: 1287062 - DNA, 15 bp, Homo sapiens
cctcttggcatggcc

SEQ ID NO: 1287063 - DNA, 15 bp, Homo sapiens
tcctcttggcatggc

SEQ ID NO: 1287064 - DNA, 15 bp, Homo sapiens
ctcctcttggcatgg

SEQ ID NO: 1287065 - DNA, 15 bp, Homo sapiens
cctcctcttggcatg

SEQ ID NO: 1287066 - DNA, 15 bp, Homo sapiens
gcctcctcttggcat

SEQ ID NO: 1287067 - DNA, 15 bp, Homo sapiens
tgcctcctcttggca

SEQ ID NO: 1287068 - DNA, 15 bp, Homo sapiens
gtgcctcctcttggc

SEQ ID NO: 1287069 - DNA, 15 bp, Homo sapiens
agtgcctcctcttgg

SEQ ID NO: 1287070 - DNA, 15 bp, Homo sapiens
tagtgcctcctcttg

SEQ ID NO: 1287071 - DNA, 15 bp, Homo sapiens
atagtgcctcctctt

SEQ ID NO: 1287072 - DNA, 15 bp, Homo sapiens
aatagtgcctcctct

SEQ ID NO: 1287073 - DNA, 15 bp, Homo sapiens
gaatagtgcctcctc

SEQ ID NO: 1287074 - DNA, 15 bp, Homo sapiens
agaatagtgcctcct

SEQ ID NO: 1287075 - DNA, 15 bp, Homo sapiens
aagaatagtgcctcc

SEQ ID NO: 1287076 - DNA, 15 bp, Homo sapiens
gaagaatagtgcctc

SEQ ID NO: 1287077 - DNA, 15 bp, Homo sapiens
agaagaatagtgcct

SEQ ID NO: 1287078 - DNA, 15 bp, Homo sapiens
aagaagaatagtgcc

SEQ ID NO: 1287079 - DNA, 15 bp, Homo sapiens
gaagaagaatagtgc

SEQ ID NO: 1287080 - DNA, 15 bp, Homo sapiens
agaagaagaatagtg

SEQ ID NO: 1287081 - DNA, 15 bp, Homo sapiens
aagaagaagaatagt

SEQ ID NO: 1287082 - DNA, 15 bp, Homo sapiens
gaagaagaagaatag

SEQ ID NO: 1287083 - DNA, 15 bp, Homo sapiens
agaagaagaagaata

SEQ ID NO: 1287084 - DNA, 15 bp, Homo sapiens
gagaagaagaagaat

SEQ ID NO: 1287085 - DNA, 15 bp, Homo sapiens
tgagaagaagaagaa

SEQ ID NO: 1287086 - DNA, 15 bp, Homo sapiens
ctgagaagaagaaga

SEQ ID NO: 1287087 - DNA, 15 bp, Homo sapiens
actgagaagaagaag

SEQ ID NO: 1287088 - DNA, 15 bp, Homo sapiens
aactgagaagaagaa

SEQ ID NO: 1287089 - DNA, 15 bp, Homo sapiens
aaactgagaagaaga

SEQ ID NO: 1287090 - DNA, 15 bp, Homo sapiens
taaactgagaagaag

SEQ ID NO: 1287091 - DNA, 15 bp, Homo sapiens
ataaactgagaagaa

SEQ ID NO: 1287092 - DNA, 15 bp, Homo sapiens
cataaactgagaaga

SEQ ID NO: 1287093 - DNA, 15 bp, Homo sapiens
ccataaactgagaag

SEQ ID NO: 1287094 - DNA, 15 bp, Homo sapiens
tccataaactgagaa

SEQ ID NO: 1287095 - DNA, 15 bp, Homo sapiens
atccataaactgaga

SEQ ID NO: 1287096 - DNA, 15 bp, Homo sapiens
catccataaactgag

SEQ ID NO: 1287097 - DNA, 15 bp, Homo sapiens
tcatccataaactga

SEQ ID NO: 1287098 - DNA, 15 bp, Homo sapiens
atcatccataaactg

SEQ ID NO: 1287099 - DNA, 15 bp, Homo sapiens
catcatccataaact

SEQ ID NO: 1287100 - DNA, 15 bp, Homo sapiens
tcatcatccataaac

SEQ ID NO: 1287101 - DNA, 15 bp, Homo sapiens
atcatcatccataaa

SEQ ID NO: 1287102 - DNA, 15 bp, Homo sapiens
tatcatcatccataa

SEQ ID NO: 1287103 - DNA, 15 bp, Homo sapiens
ttatcatcatccata

SEQ ID NO: 1287104 - DNA, 15 bp, Homo sapiens
attatcatcatccat

SEQ ID NO: 1287105 - DNA, 15 bp, Homo sapiens
cattatcatcatcca

SEQ ID NO: 1287106 - DNA, 15 bp, Homo sapiens
ccattatcatcatcc

SEQ ID NO: 1287107 - DNA, 15 bp, Homo sapiens
tccattatcatcatc

SEQ ID NO: 1287108 - DNA, 15 bp, Homo sapiens
ctccattatcatcat

SEQ ID NO: 1287109 - DNA, 15 bp, Homo sapiens
cctccattatcatca

SEQ ID NO: 1287110 - DNA, 15 bp, Homo sapiens
gcctccattatcatc

SEQ ID NO: 1287111 - DNA, 15 bp, Homo sapiens
tgcctccattatcat

SEQ ID NO: 1287112 - DNA, 15 bp, Homo sapiens
atgcctccattatca

SEQ ID NO: 1287113 - DNA, 15 bp, Homo sapiens
tatgcctccattatc

SEQ ID NO: 1287114 - DNA, 15 bp, Homo sapiens
ctatgcctccattat

SEQ ID NO: 1287115 - DNA, 15 bp, Homo sapiens
tctatgcctccatta

SEQ ID NO: 1287116 - DNA, 15 bp, Homo sapiens
ctctatgcctccatt

SEQ ID NO: 1287117 - DNA, 15 bp, Homo sapiens
tctctatgcctccat

SEQ ID NO: 1287118 - DNA, 15 bp, Homo sapiens
ctctctatgcctcca

SEQ ID NO: 1287119 - DNA, 15 bp, Homo sapiens
cctctctatgcctcc

SEQ ID NO: 1287120 - DNA, 15 bp, Homo sapiens
acctctctatgcctc

SEQ ID NO: 1287121 - DNA, 15 bp, Homo sapiens
aacctctctatgcct

SEQ ID NO: 1287122 - DNA, 15 bp, Homo sapiens
taacctctctatgcc

SEQ ID NO: 1287123 - DNA, 15 bp, Homo sapiens
ttaacctctctatgc

SEQ ID NO: 1287124 - DNA, 15 bp, Homo sapiens
cttaacctctctatg

SEQ ID NO: 1287125 - DNA, 15 bp, Homo sapiens
gcttaacctctctat

SEQ ID NO: 1287126 - DNA, 15 bp, Homo sapiens
tgcttaacctctcta

SEQ ID NO: 1287127 - DNA, 15 bp, Homo sapiens
ttgcttaacctctct

SEQ ID NO: 1287128 - DNA, 15 bp, Homo sapiens
gttgcttaacctctc

SEQ ID NO: 1287129 - DNA, 15 bp, Homo sapiens
agttgcttaacctct

SEQ ID NO: 1287130 - DNA, 15 bp, Homo sapiens
aagttgcttaacctc

SEQ ID NO: 1287131 - DNA, 15 bp, Homo sapiens
caagttgcttaacct

SEQ ID NO: 1287132 - DNA, 15 bp, Homo sapiens
acaagttgcttaacc

SEQ ID NO: 1287133 - DNA, 15 bp, Homo sapiens
aacaagttgcttaac

SEQ ID NO: 1287134 - DNA, 15 bp, Homo sapiens
aaacaagttgcttaa

SEQ ID NO: 1287135 - DNA, 15 bp, Homo sapiens
caaacaagttgctta

SEQ ID NO: 1287136 - DNA, 15 bp, Homo sapiens
tcaaacaagttgctt

SEQ ID NO: 1287137 - DNA, 15 bp, Homo sapiens
atcaaacaagttgct

SEQ ID NO: 1287138 - DNA, 15 bp, Homo sapiens
catcaaacaagttgc

SEQ ID NO: 1287139 - DNA, 15 bp, Homo sapiens
acatcaaacaagttg

SEQ ID NO: 1287140 - DNA, 15 bp, Homo sapiens
gacatcaaacaagtt

SEQ ID NO: 1287141 - DNA, 15 bp, Homo sapiens
tgacatcaaacaagt

SEQ ID NO: 1287142 - DNA, 15 bp, Homo sapiens
gtgacatcaaacaag

SEQ ID NO: 1287143 - DNA, 15 bp, Homo sapiens
ggtgacatcaaacaa

SEQ ID NO: 1287144 - DNA, 15 bp, Homo sapiens
gggtgacatcaaaca

SEQ ID NO: 1287145 - DNA, 15 bp, Homo sapiens
tgggtgacatcaaac

SEQ ID NO: 1287146 - DNA, 15 bp, Homo sapiens
ttgggtgacatcaaa

SEQ ID NO: 1287147 - DNA, 15 bp, Homo sapiens
gttgggtgacatcaa

SEQ ID NO: 1287148 - DNA, 15 bp, Homo sapiens
tgttgggtgacatca

SEQ ID NO: 1287149 - DNA, 15 bp, Homo sapiens
ttgttgggtgacatc

SEQ ID NO: 1287150 - DNA, 15 bp, Homo sapiens
attgttgggtgacat

SEQ ID NO: 1287151 - DNA, 15 bp, Homo sapiens
cattgttgggtgaca

SEQ ID NO: 1287152 - DNA, 15 bp, Homo sapiens
gcattgttgggtgac

SEQ ID NO: 1287153 - DNA, 15 bp, Homo sapiens
agcattgttgggtga

SEQ ID NO: 1287154 - DNA, 15 bp, Homo sapiens
cagcattgttgggtg

SEQ ID NO: 1287155 - DNA, 15 bp, Homo sapiens
tcagcattgttgggt

SEQ ID NO: 1287156 - DNA, 15 bp, Homo sapiens
ttcagcattgttggg

SEQ ID NO: 1287157 - DNA, 15 bp, Homo sapiens
tttcagcattgttgg

SEQ ID NO: 1287158 - DNA, 15 bp, Homo sapiens
atttcagcattgttg

SEQ ID NO: 1287159 - DNA, 15 bp, Homo sapiens
catttcagcattgtt

SEQ ID NO: 1287160 - DNA, 15 bp, Homo sapiens
ccatttcagcattgt

SEQ ID NO: 1287161 - DNA, 15 bp, Homo sapiens
cccatttcagcattg

SEQ ID NO: 1287162 - DNA, 15 bp, Homo sapiens
ccccatttcagcatt

SEQ ID NO: 1287163 - DNA, 15 bp, Homo sapiens
gccccatttcagcat

SEQ ID NO: 1287164 - DNA, 15 bp, Homo sapiens
tgccccatttcagca

SEQ ID NO: 1287165 - DNA, 15 bp, Homo sapiens
ctgccccatttcagc

SEQ ID NO: 1287166 - DNA, 15 bp, Homo sapiens
cctgccccatttcag

SEQ ID NO: 1287167 - DNA, 15 bp, Homo sapiens
tcctgccccatttca

SEQ ID NO: 1287168 - DNA, 15 bp, Homo sapiens
atcctgccccatttc

SEQ ID NO: 1287169 - DNA, 15 bp, Homo sapiens
aatcctgccccattt

SEQ ID NO: 1287170 - DNA, 15 bp, Homo sapiens
aaatcctgccccatt

SEQ ID NO: 1287171 - DNA, 15 bp, Homo sapiens
caaatcctgccccat

SEQ ID NO: 1287172 - DNA, 15 bp, Homo sapiens
ccaaatcctgcccca

SEQ ID NO: 1287173 - DNA, 15 bp, Homo sapiens
gccaaatcctgcccc

SEQ ID NO: 1287174 - DNA, 15 bp, Homo sapiens
ggccaaatcctgccc

SEQ ID NO: 1287175 - DNA, 15 bp, Homo sapiens
gggccaaatcctgcc

SEQ ID NO: 1287176 - DNA, 15 bp, Homo sapiens
agggccaaatcctgc

SEQ ID NO: 1287177 - DNA, 15 bp, Homo sapiens
cagggccaaatcctg

SEQ ID NO: 1287178 - DNA, 15 bp, Homo sapiens
ccagggccaaatcct

SEQ ID NO: 1287179 - DNA, 15 bp, Homo sapiens
gccagggccaaatcc

SEQ ID NO: 1287180 - DNA, 15 bp, Homo sapiens
ggccagggccaaatc

SEQ ID NO: 1287181 - DNA, 15 bp, Homo sapiens
gggccagggccaaat

SEQ ID NO: 1287182 - DNA, 15 bp, Homo sapiens
agggccagggccaaa

SEQ ID NO: 1287183 - DNA, 15 bp, Homo sapiens
gagggccagggccaa

SEQ ID NO: 1287184 - DNA, 15 bp, Homo sapiens
ggagggccagggcca

SEQ ID NO: 1287185 - DNA, 15 bp, Homo sapiens
tggagggccagggcc

SEQ ID NO: 1287186 - DNA, 15 bp, Homo sapiens
ctggagggccagggc

SEQ ID NO: 1287187 - DNA, 15 bp, Homo sapiens
tctggagggccaggg

SEQ ID NO: 1287188 - DNA, 15 bp, Homo sapiens
ctctggagggccagg

SEQ ID NO: 1287189 - DNA, 15 bp, Homo sapiens
gctctggagggccag

SEQ ID NO: 1287190 - DNA, 15 bp, Homo sapiens
ggctctggagggcca

SEQ ID NO: 1287191 - DNA, 15 bp, Homo sapiens
aggctctggagggcc

SEQ ID NO: 1287192 - DNA, 15 bp, Homo sapiens
taggctctggagggc

SEQ ID NO: 1287193 - DNA, 15 bp, Homo sapiens
ataggctctggaggg

SEQ ID NO: 1287194 - DNA, 15 bp, Homo sapiens
cataggctctggagg

SEQ ID NO: 1287195 - DNA, 15 bp, Homo sapiens
ccataggctctggag

SEQ ID NO: 1287196 - DNA, 15 bp, Homo sapiens
cccataggctctgga

SEQ ID NO: 1287197 - DNA, 15 bp, Homo sapiens
gcccataggctctgg

SEQ ID NO: 1287198 - DNA, 15 bp, Homo sapiens
agcccataggctctg

SEQ ID NO: 1287199 - DNA, 15 bp, Homo sapiens
aagcccataggctct

SEQ ID NO: 1287200 - DNA, 15 bp, Homo sapiens
taagcccataggctc

SEQ ID NO: 1287201 - DNA, 15 bp, Homo sapiens
ttaagcccataggct

SEQ ID NO: 1287202 - DNA, 15 bp, Homo sapiens
attaagcccataggc

SEQ ID NO: 1287203 - DNA, 15 bp, Homo sapiens
aattaagcccatagg

SEQ ID NO: 1287204 - DNA, 15 bp, Homo sapiens
caattaagcccatag

SEQ ID NO: 1287205 - DNA, 15 bp, Homo sapiens
acaattaagcccata

SEQ ID NO: 1287206 - DNA, 15 bp, Homo sapiens
aacaattaagcccat

SEQ ID NO: 1287207 - DNA, 15 bp, Homo sapiens
caacaattaagccca

SEQ ID NO: 1287208 - DNA, 15 bp, Homo sapiens
gcaacaattaagccc

SEQ ID NO: 1287209 - DNA, 15 bp, Homo sapiens
ggcaacaattaagcc

SEQ ID NO: 1287210 - DNA, 15 bp, Homo sapiens
aggcaacaattaagc

SEQ ID NO: 1287211 - DNA, 15 bp, Homo sapiens
aaggcaacaattaag

SEQ ID NO: 1287212 - DNA, 15 bp, Homo sapiens
caaggcaacaattaa

SEQ ID NO: 1287213 - DNA, 15 bp, Homo sapiens
ccaaggcaacaatta

SEQ ID NO: 1287214 - DNA, 15 bp, Homo sapiens
accaaggcaacaatt

SEQ ID NO: 1287215 - DNA, 15 bp, Homo sapiens
caccaaggcaacaat

SEQ ID NO: 1287216 - DNA, 15 bp, Homo sapiens
ccaccaaggcaacaa

SEQ ID NO: 1287217 - DNA, 15 bp, Homo sapiens
cccaccaaggcaaca

SEQ ID NO: 1287218 - DNA, 15 bp, Homo sapiens
acccaccaaggcaac

SEQ ID NO: 1287219 - DNA, 15 bp, Homo sapiens
gacccaccaaggcaa

SEQ ID NO: 1287220 - DNA, 15 bp, Homo sapiens
agacccaccaaggca

SEQ ID NO: 1287221 - DNA, 15 bp, Homo sapiens
aagacccaccaaggc

SEQ ID NO: 1287222 - DNA, 15 bp, Homo sapiens
taagacccaccaagg

SEQ ID NO: 1287223 - DNA, 15 bp, Homo sapiens
ctaagacccaccaag

SEQ ID NO: 1287224 - DNA, 15 bp, Homo sapiens
gctaagacccaccaa

SEQ ID NO: 1287225 - DNA, 15 bp, Homo sapiens
ggctaagacccacca

SEQ ID NO: 1287226 - DNA, 15 bp, Homo sapiens
aggctaagacccacc

SEQ ID NO: 1287227 - DNA, 15 bp, Homo sapiens
aaggctaagacccac

SEQ ID NO: 1287228 - DNA, 15 bp, Homo sapiens
caaggctaagaccca

SEQ ID NO: 1287229 - DNA, 15 bp, Homo sapiens
tcaaggctaagaccc

SEQ ID NO: 1287230 - DNA, 15 bp, Homo sapiens
ctcaaggctaagacc

SEQ ID NO: 1287231 - DNA, 15 bp, Homo sapiens
gctcaaggctaagac

SEQ ID NO: 1287232 - DNA, 15 bp, Homo sapiens
ggctcaaggctaaga

SEQ ID NO: 1287233 - DNA, 15 bp, Homo sapiens
aggctcaaggctaag

SEQ ID NO: 1287234 - DNA, 15 bp, Homo sapiens
caggctcaaggctaa

SEQ ID NO: 1287235 - DNA, 15 bp, Homo sapiens
gcaggctcaaggcta

SEQ ID NO: 1287236 - DNA, 15 bp, Homo sapiens
tgcaggctcaaggct

SEQ ID NO: 1287237 - DNA, 15 bp, Homo sapiens
atgcaggctcaaggc

SEQ ID NO: 1287238 - DNA, 15 bp, Homo sapiens
aatgcaggctcaagg

SEQ ID NO: 1287239 - DNA, 15 bp, Homo sapiens
taatgcaggctcaag

SEQ ID NO: 1287240 - DNA, 15 bp, Homo sapiens
ctaatgcaggctcaa

SEQ ID NO: 1287241 - DNA, 15 bp, Homo sapiens
tctaatgcaggctca

SEQ ID NO: 1287242 - DNA, 15 bp, Homo sapiens
ttctaatgcaggctc

SEQ ID NO: 1287243 - DNA, 15 bp, Homo sapiens
gttctaatgcaggct

SEQ ID NO: 1287244 - DNA, 15 bp, Homo sapiens
tgttctaatgcaggc

SEQ ID NO: 1287245 - DNA, 15 bp, Homo sapiens
ttgttctaatgcagg

SEQ ID NO: 1287246 - DNA, 15 bp, Homo sapiens
gttgttctaatgcag

SEQ ID NO: 1287247 - DNA, 15 bp, Homo sapiens
ggttgttctaatgca

SEQ ID NO: 1287248 - DNA, 15 bp, Homo sapiens
aggttgttctaatgc

SEQ ID NO: 1287249 - DNA, 15 bp, Homo sapiens
tccaggttgttctaa

SEQ ID NO: 1287250 - DNA, 15 bp, Homo sapiens
ctccaggttgttcta

SEQ ID NO: 1287251 - DNA, 15 bp, Homo sapiens
cctccaggttgttct

SEQ ID NO: 1287252 - DNA, 15 bp, Homo sapiens
ccctccaggttgttc

SEQ ID NO: 1287253 - DNA, 15 bp, Homo sapiens
gccctccaggttgtt

SEQ ID NO: 1287254 - DNA, 15 bp, Homo sapiens
agccctccaggttgt

SEQ ID NO: 1287255 - DNA, 15 bp, Homo sapiens
aagccctccaggttg

SEQ ID NO: 1287256 - DNA, 15 bp, Homo sapiens
caagccctccaggtt

SEQ ID NO: 1287257 - DNA, 15 bp, Homo sapiens
ccaagccctccaggt

SEQ ID NO: 1287258 - DNA, 15 bp, Homo sapiens
gccaagccctccagg

SEQ ID NO: 1287259 - DNA, 15 bp, Homo sapiens
ggccaagccctccag

SEQ ID NO: 1287260 - DNA, 15 bp, Homo sapiens
gggccaagccctcca

SEQ ID NO: 1287261 - DNA, 15 bp, Homo sapiens
ggggccaagccctcc

SEQ ID NO: 1287262 - DNA, 15 bp, Homo sapiens
tggggccaagccctc

SEQ ID NO: 1287263 - DNA, 15 bp, Homo sapiens
gtggggccaagccct

SEQ ID NO: 1287264 - DNA, 15 bp, Homo sapiens
agtggggccaagccc

SEQ ID NO: 1287265 - DNA, 15 bp, Homo sapiens
gagtggggccaagcc

SEQ ID NO: 1287266 - DNA, 15 bp, Homo sapiens
ggagtggggccaagc

SEQ ID NO: 1287267 - DNA, 15 bp, Homo sapiens
tggagtggggccaag

SEQ ID NO: 1287268 - DNA, 15 bp, Homo sapiens
ctggagtggggccaa

SEQ ID NO: 1287269 - DNA, 15 bp, Homo sapiens
tctggagtggggcca

SEQ ID NO: 1287270 - DNA, 15 bp, Homo sapiens
ctctggagtggggcc

SEQ ID NO: 1287271 - DNA, 15 bp, Homo sapiens
actctggagtggggc

SEQ ID NO: 1287272 - DNA, 15 bp, Homo sapiens
aactctggagtgggg

SEQ ID NO: 1287273 - DNA, 15 bp, Homo sapiens
aaactctggagtggg

SEQ ID NO: 1287274 - DNA, 15 bp, Homo sapiens
gaaactctggagtgg

SEQ ID NO: 1287275 - DNA, 15 bp, Homo sapiens
agaaactctggagtg

SEQ ID NO: 1287276 - DNA, 15 bp, Homo sapiens
cagaaactctggagt

SEQ ID NO: 1287277 - DNA, 15 bp, Homo sapiens
tcagaaactctggag

SEQ ID NO: 1287278 - DNA, 15 bp, Homo sapiens
atcagaaactctgga

SEQ ID NO: 1287279 - DNA, 15 bp, Homo sapiens
aatcagaaactctgg

SEQ ID NO: 1287280 - DNA, 15 bp, Homo sapiens
aaatcagaaactctg

SEQ ID NO: 1287281 - DNA, 15 bp, Homo sapiens
gaaatcagaaactct

SEQ ID NO: 1287282 - DNA, 15 bp, Homo sapiens
cgaaatcagaaactc

SEQ ID NO: 1287283 - DNA, 15 bp, Homo sapiens
ccgaaatcagaaact

SEQ ID NO: 1287284 - DNA, 15 bp, Homo sapiens
accgaaatcagaaac

SEQ ID NO: 1287285 - DNA, 15 bp, Homo sapiens
gaccgaaatcagaaa

SEQ ID NO: 1287286 - DNA, 15 bp, Homo sapiens
tgaccgaaatcagaa

SEQ ID NO: 1287287 - DNA, 15 bp, Homo sapiens
ctgaccgaaatcaga

SEQ ID NO: 1287288 - DNA, 15 bp, Homo sapiens
cctgaccgaaatcag

SEQ ID NO: 1287289 - DNA, 15 bp, Homo sapiens
acctgaccgaaatca

SEQ ID NO: 1287290 - DNA, 15 bp, Homo sapiens
gacctgaccgaaatc

SEQ ID NO: 1287291 - DNA, 15 bp, Homo sapiens
agacctgaccgaaat

SEQ ID NO: 1287292 - DNA, 15 bp, Homo sapiens
cagacctgaccgaaa

SEQ ID NO: 1287293 - DNA, 15 bp, Homo sapiens
gcagacctgaccgaa

SEQ ID NO: 1287294 - DNA, 15 bp, Homo sapiens
cgcagacctgaccga

SEQ ID NO: 1287295 - DNA, 15 bp, Homo sapiens
tcgcagacctgaccg

SEQ ID NO: 1287296 - DNA, 15 bp, Homo sapiens
atcgcagacctgacc

SEQ ID NO: 1287297 - DNA, 15 bp, Homo sapiens
tatcgcagacctgac

SEQ ID NO: 1287298 - DNA, 15 bp, Homo sapiens
ctatcgcagacctga

SEQ ID NO: 1287299 - DNA, 15 bp, Homo sapiens
cctatcgcagacctg

SEQ ID NO: 1287300 - DNA, 15 bp, Homo sapiens
acctatcgcagacct

SEQ ID NO: 1287301 - DNA, 15 bp, Homo sapiens
gacctatcgcagacc

SEQ ID NO: 1287302 - DNA, 15 bp, Homo sapiens
agacctatcgcagac

SEQ ID NO: 1287303 - DNA, 15 bp, Homo sapiens
cagacctatcgcaga

SEQ ID NO: 1287304 - DNA, 15 bp, Homo sapiens
tcagacctatcgcag

SEQ ID NO: 1287305 - DNA, 15 bp, Homo sapiens
ctcagacctatcgca

SEQ ID NO: 1287306 - DNA, 15 bp, Homo sapiens
tctcagacctatcgc

SEQ ID NO: 1287307 - DNA, 15 bp, Homo sapiens
ttctcagacctatcg

SEQ ID NO: 1287308 - DNA, 15 bp, Homo sapiens
attctcagacctatc

SEQ ID NO: 1287309 - DNA, 15 bp, Homo sapiens
cattctcagacctat

SEQ ID NO: 1287310 - DNA, 15 bp, Homo sapiens
acattctcagaccta

SEQ ID NO: 1287311 - DNA, 15 bp, Homo sapiens
cacattctcagacct

SEQ ID NO: 1287312 - DNA, 15 bp, Homo sapiens
acacattctcagacc

SEQ ID NO: 1287313 - DNA, 15 bp, Homo sapiens
cacacattctcagac

SEQ ID NO: 1287314 - DNA, 15 bp, Homo sapiens
acacacattctcaga

SEQ ID NO: 1287315 - DNA, 15 bp, Homo sapiens
aacacacattctcag

SEQ ID NO: 1287316 - DNA, 15 bp, Homo sapiens
aaacacacattctca

SEQ ID NO: 1287317 - DNA, 15 bp, Homo sapiens
aaaacacacattctc

SEQ ID NO: 1287318 - DNA, 15 bp, Homo sapiens
aaaaacacacattct

SEQ ID NO: 1287319 - DNA, 15 bp, Homo sapiens
taaaaacacacattc

SEQ ID NO: 1287320 - DNA, 15 bp, Homo sapiens
ttaaaaacacacatt

SEQ ID NO: 1287321 - DNA, 15 bp, Homo sapiens
attaaaaacacacat

SEQ ID NO: 1287322 - DNA, 15 bp, Homo sapiens
tattaaaaacacaca

SEQ ID NO: 1287323 - DNA, 15 bp, Homo sapiens
ttattaaaaacacac

SEQ ID NO: 1287324 - DNA, 15 bp, Homo sapiens
cttattaaaaacaca

SEQ ID NO: 1287325 - DNA, 15 bp, Homo sapiens
acttattaaaaacac

SEQ ID NO: 1287326 - DNA, 15 bp, Homo sapiens
aacttattaaaaaca

SEQ ID NO: 1287327 - DNA, 15 bp, Homo sapiens
aaacttattaaaaac

SEQ ID NO: 1287328 - DNA, 15 bp, Homo sapiens
gaaacttattaaaaa

SEQ ID NO: 1287329 - DNA, 15 bp, Homo sapiens
ggaaacttattaaaa

SEQ ID NO: 1287330 - DNA, 15 bp, Homo sapiens
tggaaacttattaaa

SEQ ID NO: 1287331 - DNA, 15 bp, Homo sapiens
atggaaacttattaa

SEQ ID NO: 1287332 - DNA, 15 bp, Homo sapiens
aatggaaacttatta

SEQ ID NO: 1287333 - DNA, 15 bp, Homo sapiens
aaatggaaacttatt

SEQ ID NO: 1287334 - DNA, 15 bp, Homo sapiens
caaatggaaacttat

SEQ ID NO: 1287335 - DNA, 15 bp, Homo sapiens
tcaaatggaaactta

SEQ ID NO: 1287336 - DNA, 15 bp, Homo sapiens
ctcaaatggaaactt

SEQ ID NO: 1287337 - DNA, 15 bp, Homo sapiens
cctcaaatggaaact

SEQ ID NO: 1287338 - DNA, 15 bp, Homo sapiens
acctcaaatggaaac

SEQ ID NO: 1287339 - DNA, 15 bp, Homo sapiens
tacctcaaatggaaa

SEQ ID NO: 1287340 - DNA, 15 bp, Homo sapiens
ttacctcaaatggaa

SEQ ID NO: 1287341 - DNA, 15 bp, Homo sapiens
tttacctcaaatgga

SEQ ID NO: 1287342 - DNA, 15 bp, Homo sapiens
ctttacctcaaatgg

SEQ ID NO: 1287343 - DNA, 15 bp, Homo sapiens
gctttacctcaaatg

SEQ ID NO: 1287344 - DNA, 15 bp, Homo sapiens
ggctttacctcaaat

SEQ ID NO: 1287345 - DNA, 15 bp, Homo sapiens
gggctttacctcaaa

SEQ ID NO: 1287346 - DNA, 15 bp, Homo sapiens
tgggctttacctcaa

SEQ ID NO: 1287347 - DNA, 15 bp, Homo sapiens
ctgggctttacctca

SEQ ID NO: 1287348 - DNA, 15 bp, Homo sapiens
cctgggctttacctc

SEQ ID NO: 1287349 - DNA, 15 bp, Homo sapiens
ccctgggctttacct

SEQ ID NO: 1287350 - DNA, 15 bp, Homo sapiens
tccctgggctttacc

SEQ ID NO: 1287351 - DNA, 15 bp, Homo sapiens
gtccctgggctttac

SEQ ID NO: 1287352 - DNA, 15 bp, Homo sapiens
ggtccctgggcttta

SEQ ID NO: 1287353 - DNA, 15 bp, Homo sapiens
tggtccctgggcttt

SEQ ID NO: 1287354 - DNA, 15 bp, Homo sapiens
gtggtccctgggctt

SEQ ID NO: 1287355 - DNA, 15 bp, Homo sapiens
tgtggtccctgggct

SEQ ID NO: 1287356 - DNA, 15 bp, Homo sapiens
tagtgtggtccctgg

SEQ ID NO: 1287357 - DNA, 15 bp, Homo sapiens
ctagtgtggtccctg

SEQ ID NO: 1287358 - DNA, 15 bp, Homo sapiens
actagtgtggtccct

SEQ ID NO: 1287359 - DNA, 15 bp, Homo sapiens
gactagtgtggtccc

SEQ ID NO: 1287360 - DNA, 15 bp, Homo sapiens
agactagtgtggtcc

SEQ ID NO: 1287361 - DNA, 15 bp, Homo sapiens
cagactagtgtggtc

SEQ ID NO: 1287362 - DNA, 15 bp, Homo sapiens
acagactagtgtggt

SEQ ID NO: 1287363 - DNA, 15 bp, Homo sapiens
cacagactagtgtgg

SEQ ID NO: 1287364 - DNA, 15 bp, Homo sapiens
gcacagactagtgtg

SEQ ID NO: 1287365 - DNA, 15 bp, Homo sapiens
agcacagactagtgt

SEQ ID NO: 1287366 - DNA, 15 bp, Homo sapiens
cagcacagactagtg

SEQ ID NO: 1287367 - DNA, 15 bp, Homo sapiens
acagcacagactagt

SEQ ID NO: 1287368 - DNA, 15 bp, Homo sapiens
tacagcacagactag

SEQ ID NO: 1287369 - DNA, 15 bp, Homo sapiens
gtacagcacagacta

SEQ ID NO: 1287370 - DNA, 15 bp, Homo sapiens
agtacagcacagact

SEQ ID NO: 1287371 - DNA, 15 bp, Homo sapiens
cagtacagcacagac

SEQ ID NO: 1287372 - DNA, 15 bp, Homo sapiens
tcagtacagcacaga

SEQ ID NO: 1287373 - DNA, 15 bp, Homo sapiens
gtcagtacagcacag

SEQ ID NO: 1287374 - DNA, 15 bp, Homo sapiens
gagtcagtacagcac

SEQ ID NO: 1287375 - DNA, 15 bp, Homo sapiens
tgagtcagtacagca

SEQ ID NO: 1287376 - DNA, 15 bp, Homo sapiens
atgagtcagtacagc

SEQ ID NO: 1287377 - DNA, 15 bp, Homo sapiens
gatgagtcagtacag

SEQ ID NO: 1287378 - DNA, 15 bp, Homo sapiens
tgatgagtcagtaca

SEQ ID NO: 1287379 - DNA, 15 bp, Homo sapiens
atgatgagtcagtac

SEQ ID NO: 1287380 - DNA, 15 bp, Homo sapiens
gatgatgagtcagta

SEQ ID NO: 1287381 - DNA, 15 bp, Homo sapiens
ggatgatgagtcagt

SEQ ID NO: 1287382 - DNA, 15 bp, Homo sapiens
gggatgatgagtcag

SEQ ID NO: 1287383 - DNA, 15 bp, Homo sapiens
cgggatgatgagtca

SEQ ID NO: 1287384 - DNA, 15 bp, Homo sapiens
acgggatgatgagtc

SEQ ID NO: 1287385 - DNA, 15 bp, Homo sapiens
gacgggatgatgagt

SEQ ID NO: 1287386 - DNA, 15 bp, Homo sapiens
agacgggatgatgag

SEQ ID NO: 1287387 - DNA, 15 bp, Homo sapiens
gagacgggatgatga

SEQ ID NO: 1287388 - DNA, 15 bp, Homo sapiens
tgagacgggatgatg

SEQ ID NO: 1287389 - DNA, 15 bp, Homo sapiens
ctgagacgggatgat

SEQ ID NO: 1287390 - DNA, 15 bp, Homo sapiens
actgagacgggatga

SEQ ID NO: 1287391 - DNA, 15 bp, Homo sapiens
aactgagacgggatg

SEQ ID NO: 1287392 - DNA, 15 bp, Homo sapiens
aaactgagacgggat

SEQ ID NO: 1287393 - DNA, 15 bp, Homo sapiens
gaaactgagacggga

SEQ ID NO: 1287394 - DNA, 15 bp, Homo sapiens
ggaaactgagacggg

SEQ ID NO: 1287395 - DNA, 15 bp, Homo sapiens
tggaaactgagacgg

SEQ ID NO: 1287396 - DNA, 15 bp, Homo sapiens
ttggaaactgagacg

SEQ ID NO: 1287397 - DNA, 15 bp, Homo sapiens
gttggaaactgagac

SEQ ID NO: 1287398 - DNA, 15 bp, Homo sapiens
ggttggaaactgaga

SEQ ID NO: 1287399 - DNA, 15 bp, Homo sapiens
aggttggaaactgag

SEQ ID NO: 1287400 - DNA, 15 bp, Homo sapiens
gaggttggaaactga

SEQ ID NO: 1287401 - DNA, 15 bp, Homo sapiens
ggaggttggaaactg

SEQ ID NO: 1287402 - DNA, 15 bp, Homo sapiens
tggaggttggaaact

SEQ ID NO: 1287403 - DNA, 15 bp, Homo sapiens
ttggaggttggaaac

SEQ ID NO: 1287404 - DNA, 15 bp, Homo sapiens
tttggaggttggaaa

SEQ ID NO: 1287405 - DNA, 15 bp, Homo sapiens
ttttggaggttggaa

SEQ ID NO: 1287406 - DNA, 15 bp, Homo sapiens
gttttggaggttgga

SEQ ID NO: 1287407 - DNA, 15 bp, Homo sapiens
ggttttggaggttgg

SEQ ID NO: 1287408 - DNA, 15 bp, Homo sapiens
tggttttggaggttg

SEQ ID NO: 1287409 - DNA, 15 bp, Homo sapiens
ctggttttggaggtt

SEQ ID NO: 1287410 - DNA, 15 bp, Homo sapiens
tctggttttggaggt

SEQ ID NO: 1287411 - DNA, 15 bp, Homo sapiens
ctctggttttggagg

SEQ ID NO: 1287412 - DNA, 15 bp, Homo sapiens
cctctggttttggag

SEQ ID NO: 1287413 - DNA, 15 bp, Homo sapiens
ccctctggttttgga

SEQ ID NO: 1287414 - DNA, 15 bp, Homo sapiens
accctctggttttgg

SEQ ID NO: 1287415 - DNA, 15 bp, Homo sapiens
aaccctctggttttg

SEQ ID NO: 1287416 - DNA, 15 bp, Homo sapiens
caaccctctggtttt

SEQ ID NO: 1287417 - DNA, 15 bp, Homo sapiens
tcaaccctctggttt

SEQ ID NO: 1287418 - DNA, 15 bp, Homo sapiens
ctcaaccctctggtt

SEQ ID NO: 1287419 - DNA, 15 bp, Homo sapiens
gctcaaccctctggt

SEQ ID NO: 1287420 - DNA, 15 bp, Homo sapiens
agctcaaccctctgg

SEQ ID NO: 1287421 - DNA, 15 bp, Homo sapiens
aagctcaaccctctg

SEQ ID NO: 1287422 - DNA, 15 bp, Homo sapiens
aaagctcaaccctct

SEQ ID NO: 1287423 - DNA, 15 bp, Homo sapiens
gaaagctcaaccctc

SEQ ID NO: 1287424 - DNA, 15 bp, Homo sapiens
agaaagctcaaccct

SEQ ID NO: 1287425 - DNA, 15 bp, Homo sapiens
tagaaagctcaaccc

SEQ ID NO: 1287426 - DNA, 15 bp, Homo sapiens
gtagaaagctcaacc

SEQ ID NO: 1287427 - DNA, 15 bp, Homo sapiens
ggtagaaagctcaac

SEQ ID NO: 1287428 - DNA, 15 bp, Homo sapiens
tggtagaaagctcaa

SEQ ID NO: 1287429 - DNA, 15 bp, Homo sapiens
ctggtagaaagctca

SEQ ID NO: 1287430 - DNA, 15 bp, Homo sapiens
actggtagaaagctc

SEQ ID NO: 1287431 - DNA, 15 bp, Homo sapiens
aactggtagaaagct

SEQ ID NO: 1287432 - DNA, 15 bp, Homo sapiens
gaactggtagaaagc

SEQ ID NO: 1287433 - DNA, 15 bp, Homo sapiens
agaactggtagaaag

SEQ ID NO: 1287434 - DNA, 15 bp, Homo sapiens
gagaactggtagaaa

SEQ ID NO: 1287435 - DNA, 15 bp, Homo sapiens
agagaactggtagaa

SEQ ID NO: 1287436 - DNA, 15 bp, Homo sapiens
gagagaactggtaga

SEQ ID NO: 1287437 - DNA, 15 bp, Homo sapiens
ggagagaactggtag

SEQ ID NO: 1287438 - DNA, 15 bp, Homo sapiens
tggagagaactggta

SEQ ID NO: 1287439 - DNA, 15 bp, Homo sapiens
ctggagagaactggt

SEQ ID NO: 1287440 - DNA, 15 bp, Homo sapiens
actggagagaactgg

SEQ ID NO: 1287441 - DNA, 15 bp, Homo sapiens
aactggagagaactg

SEQ ID NO: 1287442 - DNA, 15 bp, Homo sapiens
caactggagagaact

SEQ ID NO: 1287443 - DNA, 15 bp, Homo sapiens
tcaactggagagaac

SEQ ID NO: 1287444 - DNA, 15 bp, Homo sapiens
gtcaactggagagaa

SEQ ID NO: 1287445 - DNA, 15 bp, Homo sapiens
ggtcaactggagaga

SEQ ID NO: 1287446 - DNA, 15 bp, Homo sapiens
tggtcaactggagag

SEQ ID NO: 1287447 - DNA, 15 bp, Homo sapiens
ctggtcaactggaga

SEQ ID NO: 1287448 - DNA, 15 bp, Homo sapiens
actggtcaactggag

SEQ ID NO: 1287449 - DNA, 15 bp, Homo sapiens
aactggtcaactgga

SEQ ID NO: 1287450 - DNA, 15 bp, Homo sapiens
taactggtcaactgg

SEQ ID NO: 1287451 - DNA, 15 bp, Homo sapiens
ttaactggtcaactg

SEQ ID NO: 1287452 - DNA, 15 bp, Homo sapiens
gttaactggtcaact

SEQ ID NO: 1287453 - DNA, 15 bp, Homo sapiens
cgttaactggtcaac

SEQ ID NO: 1287454 - DNA, 15 bp, Homo sapiens
gcgttaactggtcaa

SEQ ID NO: 1287455 - DNA, 15 bp, Homo sapiens
tgcgttaactggtca

SEQ ID NO: 1287456 - DNA, 15 bp, Homo sapiens
ctgcgttaactggtc

SEQ ID NO: 1287457 - DNA, 15 bp, Homo sapiens
tctgcgttaactggt

SEQ ID NO: 1287458 - DNA, 15 bp, Homo sapiens
ttctgcgttaactgg

SEQ ID NO: 1287459 - DNA, 15 bp, Homo sapiens
tttctgcgttaactg

SEQ ID NO: 1287460 - DNA, 15 bp, Homo sapiens
atttctgcgttaact

SEQ ID NO: 1287461 - DNA, 15 bp, Homo sapiens
aatttctgcgttaac

SEQ ID NO: 1287462 - DNA, 15 bp, Homo sapiens
gaatttctgcgttaa

SEQ ID NO: 1287463 - DNA, 15 bp, Homo sapiens
ggaatttctgcgtta

SEQ ID NO: 1287464 - DNA, 15 bp, Homo sapiens
tggaatttctgcgtt

SEQ ID NO: 1287465 - DNA, 15 bp, Homo sapiens
ctggaatttctgcgt

SEQ ID NO: 1287466 - DNA, 15 bp, Homo sapiens
gctggaatttctgcg

SEQ ID NO: 1287467 - DNA, 15 bp, Homo sapiens
ggctggaatttctgc

SEQ ID NO: 1287468 - DNA, 15 bp, Homo sapiens
aggctggaatttctg

SEQ ID NO: 1287469 - DNA, 15 bp, Homo sapiens
aaggctggaatttct

SEQ ID NO: 1287470 - DNA, 15 bp, Homo sapiens
gaaggctggaatttc

SEQ ID NO: 1287471 - DNA, 15 bp, Homo sapiens
agaaggctggaattt

SEQ ID NO: 1287472 - DNA, 15 bp, Homo sapiens
tagaaggctggaatt

SEQ ID NO: 1287473 - DNA, 15 bp, Homo sapiens
ttagaaggctggaat

SEQ ID NO: 1287474 - DNA, 15 bp, Homo sapiens
attagaaggctggaa

SEQ ID NO: 1287475 - DNA, 15 bp, Homo sapiens
gattagaaggctgga

SEQ ID NO: 1287476 - DNA, 15 bp, Homo sapiens
tgattagaaggctgg

SEQ ID NO: 1287477 - DNA, 15 bp, Homo sapiens
gtgattagaaggctg

SEQ ID NO: 1287478 - DNA, 15 bp, Homo sapiens
ggtgattagaaggct

SEQ ID NO: 1287479 - DNA, 15 bp, Homo sapiens
gggtgattagaaggc

SEQ ID NO: 1287480 - DNA, 15 bp, Homo sapiens
tgggtgattagaagg

SEQ ID NO: 1287481 - DNA, 15 bp, Homo sapiens
atgggtgattagaag

SEQ ID NO: 1287482 - DNA, 15 bp, Homo sapiens
tatgggtgattagaa

SEQ ID NO: 1287483 - DNA, 15 bp, Homo sapiens
ttatgggtgattaga

SEQ ID NO: 1287484 - DNA, 15 bp, Homo sapiens
attatgggtgattag

SEQ ID NO: 1287485 - DNA, 15 bp, Homo sapiens
aattatgggtgatta

SEQ ID NO: 1287486 - DNA, 15 bp, Homo sapiens
taattatgggtgatt

SEQ ID NO: 1287487 - DNA, 15 bp, Homo sapiens
ataattatgggtgat

SEQ ID NO: 1287488 - DNA, 15 bp, Homo sapiens
cataattatgggtga

SEQ ID NO: 1287489 - DNA, 15 bp, Homo sapiens
acataattatgggtg

SEQ ID NO: 1287490 - DNA, 15 bp, Homo sapiens
aacataattatgggt

SEQ ID NO: 1287491 - DNA, 15 bp, Homo sapiens
aaacataattatggg

SEQ ID NO: 1287492 - DNA, 15 bp, Homo sapiens
taaacataattatgg

SEQ ID NO: 1287493 - DNA, 15 bp, Homo sapiens
ctaaacataattatg

SEQ ID NO: 1287494 - DNA, 15 bp, Homo sapiens
actaaacataattat

SEQ ID NO: 1287495 - DNA, 15 bp, Homo sapiens
aactaaacataatta

SEQ ID NO: 1287496 - DNA, 15 bp, Homo sapiens
aaactaaacataatt

SEQ ID NO: 1287497 - DNA, 15 bp, Homo sapiens
aaaactaaacataat

SEQ ID NO: 1287498 - DNA, 15 bp, Homo sapiens
caaaactaaacataa

SEQ ID NO: 1287499 - DNA, 15 bp, Homo sapiens
ccaaaactaaacata

SEQ ID NO: 1287500 - DNA, 15 bp, Homo sapiens
tccaaaactaaacat

SEQ ID NO: 1287501 - DNA, 15 bp, Homo sapiens
gtccaaaactaaaca

SEQ ID NO: 1287502 - DNA, 15 bp, Homo sapiens
tgtccaaaactaaac

SEQ ID NO: 1287503 - DNA, 15 bp, Homo sapiens
ttgtccaaaactaaa

SEQ ID NO: 1287504 - DNA, 15 bp, Homo sapiens
gttgtccaaaactaa

SEQ ID NO: 1287505 - DNA, 15 bp, Homo sapiens
agttgtccaaaacta

SEQ ID NO: 1287506 - DNA, 15 bp, Homo sapiens
aagttgtccaaaact

SEQ ID NO: 1287507 - DNA, 15 bp, Homo sapiens
taagttgtccaaaac

SEQ ID NO: 1287508 - DNA, 15 bp, Homo sapiens
ttaagttgtccaaaa

SEQ ID NO: 1287509 - DNA, 15 bp, Homo sapiens
attaagttgtccaaa

SEQ ID NO: 1287510 - DNA, 15 bp, Homo sapiens
tattaagttgtccaa

SEQ ID NO: 1287511 - DNA, 15 bp, Homo sapiens
atattaagttgtcca

SEQ ID NO: 1287512 - DNA, 15 bp, Homo sapiens
tatattaagttgtcc

SEQ ID NO: 1287513 - DNA, 15 bp, Homo sapiens
atatattaagttgtc

SEQ ID NO: 1287514 - DNA, 15 bp, Homo sapiens
catatattaagttgt

SEQ ID NO: 1287515 - DNA, 15 bp, Homo sapiens
tcatatattaagttg

SEQ ID NO: 1287516 - DNA, 15 bp, Homo sapiens
ctcatatattaagtt

SEQ ID NO: 1287517 - DNA, 15 bp, Homo sapiens
tctcatatattaagt

SEQ ID NO: 1287518 - DNA, 15 bp, Homo sapiens
ctctcatatattaag

SEQ ID NO: 1287519 - DNA, 15 bp, Homo sapiens
tctctcatatattaa

SEQ ID NO: 1287520 - DNA, 15 bp, Homo sapiens
ctctctcatatatta

SEQ ID NO: 1287521 - DNA, 15 bp, Homo sapiens
gctctctcatatatt

SEQ ID NO: 1287522 - DNA, 15 bp, Homo sapiens
tgctctctcatatat

SEQ ID NO: 1287523 - DNA, 15 bp, Homo sapiens
ttgctctctcatata

SEQ ID NO: 1287524 - DNA, 15 bp, Homo sapiens
attgctctctcatat

SEQ ID NO: 1287525 - DNA, 15 bp, Homo sapiens
tattgctctctcata

SEQ ID NO: 1287526 - DNA, 15 bp, Homo sapiens
ctattgctctctcat

SEQ ID NO: 1287527 - DNA, 15 bp, Homo sapiens
actattgctctctca

SEQ ID NO: 1287528 - DNA, 15 bp, Homo sapiens
tactattgctctctc

SEQ ID NO: 1287529 - DNA, 15 bp, Homo sapiens
gtactattgctctct

SEQ ID NO: 1287530 - DNA, 15 bp, Homo sapiens
agtactattgctctc

SEQ ID NO: 1287531 - DNA, 15 bp, Homo sapiens
aagtactattgctct

SEQ ID NO: 1287532 - DNA, 15 bp, Homo sapiens
gaagtactattgctc

SEQ ID NO: 1287533 - DNA, 15 bp, Homo sapiens
tgaagtactattgct

SEQ ID NO: 1287534 - DNA, 15 bp, Homo sapiens
ctgaagtactattgc

SEQ ID NO: 1287535 - DNA, 15 bp, Homo sapiens
actgaagtactattg

SEQ ID NO: 1287536 - DNA, 15 bp, Homo sapiens
tactgaagtactatt

SEQ ID NO: 1287537 - DNA, 15 bp, Homo sapiens
ttactgaagtactat

SEQ ID NO: 1287538 - DNA, 15 bp, Homo sapiens
tttactgaagtacta

SEQ ID NO: 1287539 - DNA, 15 bp, Homo sapiens
gtttactgaagtact

SEQ ID NO: 1287540 - DNA, 15 bp, Homo sapiens
agtttactgaagtac

SEQ ID NO: 1287541 - DNA, 15 bp, Homo sapiens
gagtttactgaagta

SEQ ID NO: 1287542 - DNA, 15 bp, Homo sapiens
ggagtttactgaagt

SEQ ID NO: 1287543 - DNA, 15 bp, Homo sapiens
aggagtttactgaag

SEQ ID NO: 1287544 - DNA, 15 bp, Homo sapiens
gaggagtttactgaa

SEQ ID NO: 1287545 - DNA, 15 bp, Homo sapiens
agaggagtttactga

SEQ ID NO: 1287546 - DNA, 15 bp, Homo sapiens
tagaggagtttactg

SEQ ID NO: 1287547 - DNA, 15 bp, Homo sapiens
gtagaggagtttact

SEQ ID NO: 1287548 - DNA, 15 bp, Homo sapiens
agtagaggagtttac

SEQ ID NO: 1287549 - DNA, 15 bp, Homo sapiens
cagtagaggagttta

SEQ ID NO: 1287550 - DNA, 15 bp, Homo sapiens
gcagtagaggagttt

SEQ ID NO: 1287551 - DNA, 15 bp, Homo sapiens
agcagtagaggagtt

SEQ ID NO: 1287552 - DNA, 15 bp, Homo sapiens
tagcagtagaggagt

SEQ ID NO: 1287553 - DNA, 15 bp, Homo sapiens
gtagcagtagaggag

SEQ ID NO: 1287554 - DNA, 15 bp, Homo sapiens
agtagcagtagagga

SEQ ID NO: 1287555 - DNA, 15 bp, Homo sapiens
cagtagcagtagagg

SEQ ID NO: 1287556 - DNA, 15 bp, Homo sapiens
ccagtagcagtagag

SEQ ID NO: 1287557 - DNA, 15 bp, Homo sapiens
cccagtagcagtaga

SEQ ID NO: 1287558 - DNA, 15 bp, Homo sapiens
acccagtagcagtag

SEQ ID NO: 1287559 - DNA, 15 bp, Homo sapiens
aacccagtagcagta

SEQ ID NO: 1287560 - DNA, 15 bp, Homo sapiens
aaacccagtagcagt

SEQ ID NO: 1287561 - DNA, 15 bp, Homo sapiens
gaaacccagtagcag

SEQ ID NO: 1287562 - DNA, 15 bp, Homo sapiens
agaaacccagtagca

SEQ ID NO: 1287563 - DNA, 15 bp, Homo sapiens
cagaaacccagtagc

SEQ ID NO: 1287564 - DNA, 15 bp, Homo sapiens
acagaaacccagtag

SEQ ID NO: 1287565 - DNA, 15 bp, Homo sapiens
gacagaaacccagta

SEQ ID NO: 1287566 - DNA, 15 bp, Homo sapiens
tgacagaaacccagt

SEQ ID NO: 1287567 - DNA, 15 bp, Homo sapiens
gtgacagaaacccag

SEQ ID NO: 1287568 - DNA, 15 bp, Homo sapiens
agtgacagaaaccca

SEQ ID NO: 1287569 - DNA, 15 bp, Homo sapiens
aagtgacagaaaccc

SEQ ID NO: 1287570 - DNA, 15 bp, Homo sapiens
caagtgacagaaacc

SEQ ID NO: 1287571 - DNA, 15 bp, Homo sapiens
acaagtgacagaaac

SEQ ID NO: 1287572 - DNA, 15 bp, Homo sapiens
gacaagtgacagaaa

SEQ ID NO: 1287573 - DNA, 15 bp, Homo sapiens
agacaagtgacagaa

SEQ ID NO: 1287574 - DNA, 15 bp, Homo sapiens
gagacaagtgacaga

SEQ ID NO: 1287575 - DNA, 15 bp, Homo sapiens
ggagacaagtgacag

SEQ ID NO: 1287576 - DNA, 15 bp, Homo sapiens
aggagacaagtgaca

SEQ ID NO: 1287577 - DNA, 15 bp, Homo sapiens
gaggagacaagtgac

SEQ ID NO: 1287578 - DNA, 15 bp, Homo sapiens
agaggagacaagtga

SEQ ID NO: 1287579 - DNA, 15 bp, Homo sapiens
aagaggagacaagtg

SEQ ID NO: 1287580 - DNA, 15 bp, Homo sapiens
taagaggagacaagt

SEQ ID NO: 1287581 - DNA, 15 bp, Homo sapiens
ataagaggagacaag

SEQ ID NO: 1287582 - DNA, 15 bp, Homo sapiens
aataagaggagacaa

SEQ ID NO: 1287583 - DNA, 15 bp, Homo sapiens
aaataagaggagaca

SEQ ID NO: 1287584 - DNA, 15 bp, Homo sapiens
aaaataagaggagac

SEQ ID NO: 1287585 - DNA, 15 bp, Homo sapiens
aaaaataagaggaga

SEQ ID NO: 1287586 - DNA, 15 bp, Homo sapiens
caaaaataagaggag

SEQ ID NO: 1287587 - DNA, 15 bp, Homo sapiens
tcaaaaataagagga

SEQ ID NO: 1287588 - DNA, 15 bp, Homo sapiens
gtcaaaaataagagg

SEQ ID NO: 1287589 - DNA, 15 bp, Homo sapiens
tgtcaaaaataagag

SEQ ID NO: 1287590 - DNA, 15 bp, Homo sapiens
ttgtcaaaaataaga

SEQ ID NO: 1287591 - DNA, 15 bp, Homo sapiens
attgtcaaaaataag

SEQ ID NO: 1287592 - DNA, 15 bp, Homo sapiens
aattgtcaaaaataa

SEQ ID NO: 1287593 - DNA, 15 bp, Homo sapiens
aaattgtcaaaaata

SEQ ID NO: 1287594 - DNA, 15 bp, Homo sapiens
caaattgtcaaaaat

SEQ ID NO: 1287595 - DNA, 15 bp, Homo sapiens
tcaaattgtcaaaaa

SEQ ID NO: 1287596 - DNA, 15 bp, Homo sapiens
atcaaattgtcaaaa

SEQ ID NO: 1287597 - DNA, 15 bp, Homo sapiens
catcaaattgtcaaa

SEQ ID NO: 1287598 - DNA, 15 bp, Homo sapiens
acatcaaattgtcaa

SEQ ID NO: 1287599 - DNA, 15 bp, Homo sapiens
aacatcaaattgtca

SEQ ID NO: 1287600 - DNA, 15 bp, Homo sapiens
aaacatcaaattgtc

SEQ ID NO: 1287601 - DNA, 15 bp, Homo sapiens
aaaacatcaaattgt

SEQ ID NO: 1287602 - DNA, 15 bp, Homo sapiens
caaaacatcaaattg

SEQ ID NO: 1287603 - DNA, 15 bp, Homo sapiens
acaaaacatcaaatt

SEQ ID NO: 1287604 - DNA, 15 bp, Homo sapiens
cacaaaacatcaaat

SEQ ID NO: 1287605 - DNA, 15 bp, Homo sapiens
acacaaaacatcaaa

SEQ ID NO: 1287606 - DNA, 15 bp, Homo sapiens
aacacaaaacatcaa

SEQ ID NO: 1287607 - DNA, 15 bp, Homo sapiens
caacacaaaacatca

SEQ ID NO: 1287608 - DNA, 15 bp, Homo sapiens
acaacacaaaacatc

SEQ ID NO: 1287609 - DNA, 15 bp, Homo sapiens
cacaacacaaaacat

SEQ ID NO: 1287610 - DNA, 15 bp, Homo sapiens
tcacaacacaaaaca

SEQ ID NO: 1287611 - DNA, 15 bp, Homo sapiens
ctcacaacacaaaac

SEQ ID NO: 1287612 - DNA, 15 bp, Homo sapiens
cctcacaacacaaaa

SEQ ID NO: 1287613 - DNA, 15 bp, Homo sapiens
gcctcacaacacaaa

SEQ ID NO: 1287614 - DNA, 15 bp, Homo sapiens
agcctcacaacacaa

SEQ ID NO: 1287615 - DNA, 15 bp, Homo sapiens
aagcctcacaacaca

SEQ ID NO: 1287616 - DNA, 15 bp, Homo sapiens
gaagcctcacaacac

SEQ ID NO: 1287617 - DNA, 15 bp, Homo sapiens
ggaagcctcacaaca

SEQ ID NO: 1287618 - DNA, 15 bp, Homo sapiens
aggaagcctcacaac

SEQ ID NO: 1287619 - DNA, 15 bp, Homo sapiens
aaggaagcctcacaa

SEQ ID NO: 1287620 - DNA, 15 bp, Homo sapiens
aaaggaagcctcaca

SEQ ID NO: 1287621 - DNA, 15 bp, Homo sapiens
caaaggaagcctcac

SEQ ID NO: 1287622 - DNA, 15 bp, Homo sapiens
acaaaggaagcctca

SEQ ID NO: 1287623 - DNA, 15 bp, Homo sapiens
cacaaaggaagcctc

SEQ ID NO: 1287624 - DNA, 15 bp, Homo sapiens
gcacaaaggaagcct

SEQ ID NO: 1287625 - DNA, 15 bp, Homo sapiens
aggcacaaaggaagc

SEQ ID NO: 1287626 - DNA, 15 bp, Homo sapiens
taggcacaaaggaag

SEQ ID NO: 1287627 - DNA, 15 bp, Homo sapiens
ttaggcacaaaggaa

SEQ ID NO: 1287628 - DNA, 15 bp, Homo sapiens
tttaggcacaaagga

SEQ ID NO: 1287629 - DNA, 15 bp, Homo sapiens
ttttaggcacaaagg

SEQ ID NO: 1287630 - DNA, 15 bp, Homo sapiens
cttttaggcacaaag

SEQ ID NO: 1287631 - DNA, 15 bp, Homo sapiens
acttttaggcacaaa

SEQ ID NO: 1287632 - DNA, 15 bp, Homo sapiens
gacttttaggcacaa

SEQ ID NO: 1287633 - DNA, 15 bp, Homo sapiens
tgacttttaggcaca

SEQ ID NO: 1287634 - DNA, 15 bp, Homo sapiens
atgacttttaggcac

SEQ ID NO: 1287635 - DNA, 15 bp, Homo sapiens
aatgacttttaggca

SEQ ID NO: 1287636 - DNA, 15 bp, Homo sapiens
caatgacttttaggc

SEQ ID NO: 1287637 - DNA, 15 bp, Homo sapiens
tcaatgacttttagg

SEQ ID NO: 1287638 - DNA, 15 bp, Homo sapiens
gtcaatgacttttag

SEQ ID NO: 1287639 - DNA, 15 bp, Homo sapiens
agtcaatgactttta

SEQ ID NO: 1287640 - DNA, 15 bp, Homo sapiens
aagtcaatgactttt

SEQ ID NO: 1287641 - DNA, 15 bp, Homo sapiens
aaagtcaatgacttt

SEQ ID NO: 1287642 - DNA, 15 bp, Homo sapiens
aaaagtcaatgactt

SEQ ID NO: 1287643 - DNA, 15 bp, Homo sapiens
taaaagtcaatgact

SEQ ID NO: 1287644 - DNA, 15 bp, Homo sapiens
ctaaaagtcaatgac

SEQ ID NO: 1287645 - DNA, 15 bp, Homo sapiens
tctaaaagtcaatga

SEQ ID NO: 1287646 - DNA, 15 bp, Homo sapiens
atctaaaagtcaatg

SEQ ID NO: 1287647 - DNA, 15 bp, Homo sapiens
tatctaaaagtcaat

SEQ ID NO: 1287648 - DNA, 15 bp, Homo sapiens
gtatctaaaagtcaa

SEQ ID NO: 1287649 - DNA, 15 bp, Homo sapiens
agtatctaaaagtca

SEQ ID NO: 1287650 - DNA, 15 bp, Homo sapiens
gagtatctaaaagtc

SEQ ID NO: 1287651 - DNA, 15 bp, Homo sapiens
tgagtatctaaaagt

SEQ ID NO: 1287652 - DNA, 15 bp, Homo sapiens
gtgagtatctaaaag

SEQ ID NO: 1287653 - DNA, 15 bp, Homo sapiens
agtgagtatctaaaa

SEQ ID NO: 1287654 - DNA, 15 bp, Homo sapiens
aagtgagtatctaaa

SEQ ID NO: 1287655 - DNA, 15 bp, Homo sapiens
aaagtgagtatctaa

SEQ ID NO: 1287656 - DNA, 15 bp, Homo sapiens
caaagtgagtatcta

SEQ ID NO: 1287657 - DNA, 15 bp, Homo sapiens
ccaaagtgagtatct

SEQ ID NO: 1287658 - DNA, 15 bp, Homo sapiens
tccaaagtgagtatc

SEQ ID NO: 1287659 - DNA, 15 bp, Homo sapiens
atccaaagtgagtat

SEQ ID NO: 1287660 - DNA, 15 bp, Homo sapiens
aatccaaagtgagta

SEQ ID NO: 1287661 - DNA, 15 bp, Homo sapiens
taatccaaagtgagt

SEQ ID NO: 1287662 - DNA, 15 bp, Homo sapiens
ataatccaaagtgag

SEQ ID NO: 1287663 - DNA, 15 bp, Homo sapiens
gataatccaaagtga

SEQ ID NO: 1287664 - DNA, 15 bp, Homo sapiens
agataatccaaagtg

SEQ ID NO: 1287665 - DNA, 15 bp, Homo sapiens
gagataatccaaagt

SEQ ID NO: 1287666 - DNA, 15 bp, Homo sapiens
ggagataatccaaag

SEQ ID NO: 1287667 - DNA, 15 bp, Homo sapiens
tggagataatccaaa

SEQ ID NO: 1287668 - DNA, 15 bp, Homo sapiens
atggagataatccaa

SEQ ID NO: 1287669 - DNA, 15 bp, Homo sapiens
gatggagataatcca

SEQ ID NO: 1287670 - DNA, 15 bp, Homo sapiens
tgatggagataatcc

SEQ ID NO: 1287671 - DNA, 15 bp, Homo sapiens
ttgatggagataatc

SEQ ID NO: 1287672 - DNA, 15 bp, Homo sapiens
attgatggagataat

SEQ ID NO: 1287673 - DNA, 15 bp, Homo sapiens
cattgatggagataa

SEQ ID NO: 1287674 - DNA, 15 bp, Homo sapiens
acattgatggagata

SEQ ID NO: 1287675 - DNA, 15 bp, Homo sapiens
cacattgatggagat

SEQ ID NO: 1287676 - DNA, 15 bp, Homo sapiens
tcacattgatggaga

SEQ ID NO: 1287677 - DNA, 15 bp, Homo sapiens
ttcacattgatggag

SEQ ID NO: 1287678 - DNA, 15 bp, Homo sapiens
tttcacattgatgga

SEQ ID NO: 1287679 - DNA, 15 bp, Homo sapiens
gtttcacattgatgg

SEQ ID NO: 1287680 - DNA, 15 bp, Homo sapiens
ggtttcacattgatg

SEQ ID NO: 1287681 - DNA, 15 bp, Homo sapiens
aggtttcacattgat

SEQ ID NO: 1287682 - DNA, 15 bp, Homo sapiens
gaggtttcacattga

SEQ ID NO: 1287683 - DNA, 15 bp, Homo sapiens
ggaggtttcacattg

SEQ ID NO: 1287684 - DNA, 15 bp, Homo sapiens
aggaggtttcacatt

SEQ ID NO: 1287685 - DNA, 15 bp, Homo sapiens
caggaggtttcacat

SEQ ID NO: 1287686 - DNA, 15 bp, Homo sapiens
acaggaggtttcaca

SEQ ID NO: 1287687 - DNA, 15 bp, Homo sapiens
cacaggaggtttcac

SEQ ID NO: 1287688 - DNA, 15 bp, Homo sapiens
acacaggaggtttca

SEQ ID NO: 1287689 - DNA, 15 bp, Homo sapiens
aacacaggaggtttc

SEQ ID NO: 1287690 - DNA, 15 bp, Homo sapiens
caacacaggaggttt

SEQ ID NO: 1287691 - DNA, 15 bp, Homo sapiens
gcaacacaggaggtt

SEQ ID NO: 1287692 - DNA, 15 bp, Homo sapiens
ggcaacacaggaggt

SEQ ID NO: 1287693 - DNA, 15 bp, Homo sapiens
aggcaacacaggagg

SEQ ID NO: 1287694 - DNA, 15 bp, Homo sapiens
aaggcaacacaggag

SEQ ID NO: 1287695 - DNA, 15 bp, Homo sapiens
taaggcaacacagga

SEQ ID NO: 1287696 - DNA, 15 bp, Homo sapiens
ataaggcaacacagg

SEQ ID NO: 1287697 - DNA, 15 bp, Homo sapiens
aataaggcaacacag

SEQ ID NO: 1287698 - DNA, 15 bp, Homo sapiens
aaataaggcaacaca

SEQ ID NO: 1287699 - DNA, 15 bp, Homo sapiens
taaataaggcaacac

SEQ ID NO: 1287700 - DNA, 15 bp, Homo sapiens
ttaaataaggcaaca

SEQ ID NO: 1287701 - DNA, 15 bp, Homo sapiens
attaaataaggcaac

SEQ ID NO: 1287702 - DNA, 15 bp, Homo sapiens
cattaaataaggcaa

SEQ ID NO: 1287703 - DNA, 15 bp, Homo sapiens
acattaaataaggca

SEQ ID NO: 1287704 - DNA, 15 bp, Homo sapiens
gacattaaataaggc

SEQ ID NO: 1287705 - DNA, 15 bp, Homo sapiens
agacattaaataagg

SEQ ID NO: 1287706 - DNA, 15 bp, Homo sapiens
aagacattaaataag

SEQ ID NO: 1287707 - DNA, 15 bp, Homo sapiens
aaagacattaaataa

SEQ ID NO: 1287708 - DNA, 15 bp, Homo sapiens
aaaagacattaaata

SEQ ID NO: 1287709 - DNA, 15 bp, Homo sapiens
caaaagacattaaat

SEQ ID NO: 1287710 - DNA, 15 bp, Homo sapiens
gcaaaagacattaaa

SEQ ID NO: 1287711 - DNA, 15 bp, Homo sapiens
ggcaaaagacattaa

SEQ ID NO: 1287712 - DNA, 15 bp, Homo sapiens
aggcaaaagacatta

SEQ ID NO: 1287713 - DNA, 15 bp, Homo sapiens
aaggcaaaagacatt

SEQ ID NO: 1287714 - DNA, 15 bp, Homo sapiens
caaggcaaaagacat

SEQ ID NO: 1287715 - DNA, 15 bp, Homo sapiens
tcaaggcaaaagaca

SEQ ID NO: 1287716 - DNA, 15 bp, Homo sapiens
ttcaaggcaaaagac

SEQ ID NO: 1287717 - DNA, 15 bp, Homo sapiens
attcaaggcaaaaga

SEQ ID NO: 1287718 - DNA, 15 bp, Homo sapiens
aattcaaggcaaaag

SEQ ID NO: 1287719 - DNA, 15 bp, Homo sapiens
aaattcaaggcaaaa

SEQ ID NO: 1287720 - DNA, 15 bp, Homo sapiens
gaaattcaaggcaaa

SEQ ID NO: 1287721 - DNA, 15 bp, Homo sapiens
tgaaattcaaggcaa

SEQ ID NO: 1287722 - DNA, 15 bp, Homo sapiens
gtgaaattcaaggca

SEQ ID NO: 1287723 - DNA, 15 bp, Homo sapiens
agtgaaattcaaggc

SEQ ID NO: 1287724 - DNA, 15 bp, Homo sapiens
aagtgaaattcaagg

SEQ ID NO: 1287725 - DNA, 15 bp, Homo sapiens
caagtgaaattcaag

SEQ ID NO: 1287726 - DNA, 15 bp, Homo sapiens
gcaagtgaaattcaa

SEQ ID NO: 1287727 - DNA, 15 bp, Homo sapiens
agcaagtgaaattca

SEQ ID NO: 1287728 - DNA, 15 bp, Homo sapiens
aagcaagtgaaattc

SEQ ID NO: 1287729 - DNA, 15 bp, Homo sapiens
caagcaagtgaaatt

SEQ ID NO: 1287730 - DNA, 15 bp, Homo sapiens
ccaagcaagtgaaat

SEQ ID NO: 1287731 - DNA, 15 bp, Homo sapiens
tccaagcaagtgaaa

SEQ ID NO: 1287732 - DNA, 15 bp, Homo sapiens
atccaagcaagtgaa

SEQ ID NO: 1287733 - DNA, 15 bp, Homo sapiens
tatccaagcaagtga

SEQ ID NO: 1287734 - DNA, 15 bp, Homo sapiens
gtatccaagcaagtg

SEQ ID NO: 1287735 - DNA, 15 bp, Homo sapiens
ggtatccaagcaagt

SEQ ID NO: 1287736 - DNA, 15 bp, Homo sapiens
tggtatccaagcaag

SEQ ID NO: 1287737 - DNA, 15 bp, Homo sapiens
atggtatccaagcaa

SEQ ID NO: 1287738 - DNA, 15 bp, Homo sapiens
aatggtatccaagca

SEQ ID NO: 1287739 - DNA, 15 bp, Homo sapiens
caatggtatccaagc

SEQ ID NO: 1287740 - DNA, 15 bp, Homo sapiens
gcaatggtatccaag

SEQ ID NO: 1287741 - DNA, 15 bp, Homo sapiens
ggcaatggtatccaa

SEQ ID NO: 1287742 - DNA, 15 bp, Homo sapiens
aggcaatggtatcca

SEQ ID NO: 1287743 - DNA, 15 bp, Homo sapiens
aaggcaatggtatcc

SEQ ID NO: 1287744 - DNA, 15 bp, Homo sapiens
aaaggcaatggtatc

SEQ ID NO: 1287745 - DNA, 15 bp, Homo sapiens
taaaggcaatggtat

SEQ ID NO: 1287746 - DNA, 15 bp, Homo sapiens
ttaaaggcaatggta

SEQ ID NO: 1287747 - DNA, 15 bp, Homo sapiens
gttaaaggcaatggt

SEQ ID NO: 1287748 - DNA, 15 bp, Homo sapiens
agttaaaggcaatgg

SEQ ID NO: 1287749 - DNA, 15 bp, Homo sapiens
aagttaaaggcaatg

SEQ ID NO: 1287750 - DNA, 15 bp, Homo sapiens
caagttaaaggcaat

SEQ ID NO: 1287751 - DNA, 15 bp, Homo sapiens
ccaagttaaaggcaa

SEQ ID NO: 1287752 - DNA, 15 bp, Homo sapiens
gccaagttaaaggca

SEQ ID NO: 1287753 - DNA, 15 bp, Homo sapiens
tgccaagttaaaggc

SEQ ID NO: 1287754 - DNA, 15 bp, Homo sapiens
atgccaagttaaagg

SEQ ID NO: 1287755 - DNA, 15 bp, Homo sapiens
gatgccaagttaaag

SEQ ID NO: 1287756 - DNA, 15 bp, Homo sapiens
tgatgccaagttaaa

SEQ ID NO: 1287757 - DNA, 15 bp, Homo sapiens
gtgatgccaagttaa

SEQ ID NO: 1287758 - DNA, 15 bp, Homo sapiens
agtgatgccaagtta

SEQ ID NO: 1287759 - DNA, 15 bp, Homo sapiens
gagtgatgccaagtt

SEQ ID NO: 1287760 - DNA, 15 bp, Homo sapiens
ggagtgatgccaagt

SEQ ID NO: 1287761 - DNA, 15 bp, Homo sapiens
aggagtgatgccaag

SEQ ID NO: 1287762 - DNA, 15 bp, Homo sapiens
aaggagtgatgccaa

SEQ ID NO: 1287763 - DNA, 15 bp, Homo sapiens
taaggagtgatgcca

SEQ ID NO: 1287764 - DNA, 15 bp, Homo sapiens
ctaaggagtgatgcc

SEQ ID NO: 1287765 - DNA, 15 bp, Homo sapiens
gctaaggagtgatgc

SEQ ID NO: 1287766 - DNA, 15 bp, Homo sapiens
agctaaggagtgatg

SEQ ID NO: 1287767 - DNA, 15 bp, Homo sapiens
aagctaaggagtgat

SEQ ID NO: 1287768 - DNA, 15 bp, Homo sapiens
caagctaaggagtga

SEQ ID NO: 1287769 - DNA, 15 bp, Homo sapiens
gcaagctaaggagtg

SEQ ID NO: 1287770 - DNA, 15 bp, Homo sapiens
agcaagctaaggagt

SEQ ID NO: 1287771 - DNA, 15 bp, Homo sapiens
aagcaagctaaggag

SEQ ID NO: 1287772 - DNA, 15 bp, Homo sapiens
aaagcaagctaagga

SEQ ID NO: 1287773 - DNA, 15 bp, Homo sapiens
aaaagcaagctaagg

SEQ ID NO: 1287774 - DNA, 15 bp, Homo sapiens
aaaaagcaagctaag

SEQ ID NO: 1287775 - DNA, 15 bp, Homo sapiens
taaaaagcaagctaa

SEQ ID NO: 1287776 - DNA, 15 bp, Homo sapiens
gtaaaaagcaagcta

SEQ ID NO: 1287777 - DNA, 15 bp, Homo sapiens
tgtaaaaagcaagct

SEQ ID NO: 1287778 - DNA, 15 bp, Homo sapiens
ctgtaaaaagcaagc

SEQ ID NO: 1287779 - DNA, 15 bp, Homo sapiens
actgtaaaaagcaag

SEQ ID NO: 1287780 - DNA, 15 bp, Homo sapiens
aactgtaaaaagcaa

SEQ ID NO: 1287781 - DNA, 15 bp, Homo sapiens
aaactgtaaaaagca

SEQ ID NO: 1287782 - DNA, 15 bp, Homo sapiens
caaactgtaaaaagc

SEQ ID NO: 1287783 - DNA, 15 bp, Homo sapiens
ccaaactgtaaaaag

SEQ ID NO: 1287784 - DNA, 15 bp, Homo sapiens
accaaactgtaaaaa

SEQ ID NO: 1287785 - DNA, 15 bp, Homo sapiens
taccaaactgtaaaa

SEQ ID NO: 1287786 - DNA, 15 bp, Homo sapiens
ctaccaaactgtaaa

SEQ ID NO: 1287787 - DNA, 15 bp, Homo sapiens
tctaccaaactgtaa

SEQ ID NO: 1287788 - DNA, 15 bp, Homo sapiens
ctctaccaaactgta

SEQ ID NO: 1287789 - DNA, 15 bp, Homo sapiens
tctctaccaaactgt

SEQ ID NO: 1287790 - DNA, 15 bp, Homo sapiens
atctctaccaaactg

SEQ ID NO: 1287791 - DNA, 15 bp, Homo sapiens
catctctaccaaact

SEQ ID NO: 1287792 - DNA, 15 bp, Homo sapiens
ccatctctaccaaac

SEQ ID NO: 1287793 - DNA, 15 bp, Homo sapiens
accatctctaccaaa

SEQ ID NO: 1287794 - DNA, 15 bp, Homo sapiens
caccatctctaccaa

SEQ ID NO: 1287795 - DNA, 15 bp, Homo sapiens
acaccatctctacca

SEQ ID NO: 1287796 - DNA, 15 bp, Homo sapiens
gacaccatctctacc

SEQ ID NO: 1287797 - DNA, 15 bp, Homo sapiens
agacaccatctctac

SEQ ID NO: 1287798 - DNA, 15 bp, Homo sapiens
gagacaccatctcta

SEQ ID NO: 1287799 - DNA, 15 bp, Homo sapiens
tgagacaccatctct

SEQ ID NO: 1287800 - DNA, 15 bp, Homo sapiens
gtgagacaccatctc

SEQ ID NO: 1287801 - DNA, 15 bp, Homo sapiens
agtgagacaccatct

SEQ ID NO: 1287802 - DNA, 15 bp, Homo sapiens
tagtgagacaccatc

SEQ ID NO: 1287803 - DNA, 15 bp, Homo sapiens
atagtgagacaccat

SEQ ID NO: 1287804 - DNA, 15 bp, Homo sapiens
tatagtgagacacca

SEQ ID NO: 1287805 - DNA, 15 bp, Homo sapiens
atatagtgagacacc

SEQ ID NO: 1287806 - DNA, 15 bp, Homo sapiens
aatatagtgagacac

SEQ ID NO: 1287807 - DNA, 15 bp, Homo sapiens
caatatagtgagaca

SEQ ID NO: 1287808 - DNA, 15 bp, Homo sapiens
gcaatatagtgagac

SEQ ID NO: 1287809 - DNA, 15 bp, Homo sapiens
ggcaatatagtgaga

SEQ ID NO: 1287810 - DNA, 15 bp, Homo sapiens
gggcaatatagtgag

SEQ ID NO: 1287811 - DNA, 15 bp, Homo sapiens
agggcaatatagtga

SEQ ID NO: 1287812 - DNA, 15 bp, Homo sapiens
cagggcaatatagtg

SEQ ID NO: 1287813 - DNA, 15 bp, Homo sapiens
ccagggcaatatagt

SEQ ID NO: 1287814 - DNA, 15 bp, Homo sapiens
gccagggcaatatag

SEQ ID NO: 1287815 - DNA, 15 bp, Homo sapiens
agccagggcaatata

SEQ ID NO: 1287816 - DNA, 15 bp, Homo sapiens
cagccagggcaatat

SEQ ID NO: 1287817 - DNA, 15 bp, Homo sapiens
ccagccagggcaata

SEQ ID NO: 1287818 - DNA, 15 bp, Homo sapiens
accagccagggcaat

SEQ ID NO: 1287819 - DNA, 15 bp, Homo sapiens
aaccagccagggcaa

SEQ ID NO: 1287820 - DNA, 15 bp, Homo sapiens
gaaaccagccagggc

SEQ ID NO: 1287821 - DNA, 15 bp, Homo sapiens
tgaaaccagccaggg

SEQ ID NO: 1287822 - DNA, 15 bp, Homo sapiens
ttgaaaccagccagg

SEQ ID NO: 1287823 - DNA, 15 bp, Homo sapiens
tttgaaaccagccag

SEQ ID NO: 1287824 - DNA, 15 bp, Homo sapiens
gtttgaaaccagcca

SEQ ID NO: 1287825 - DNA, 15 bp, Homo sapiens
agtttgaaaccagcc

SEQ ID NO: 1287826 - DNA, 15 bp, Homo sapiens
gagtttgaaaccagc

SEQ ID NO: 1287827 - DNA, 15 bp, Homo sapiens
ggagtttgaaaccag

SEQ ID NO: 1287828 - DNA, 15 bp, Homo sapiens
caggagtttgaaacc

SEQ ID NO: 1287829 - DNA, 15 bp, Homo sapiens
ccaggagtttgaaac

SEQ ID NO: 1287830 - DNA, 15 bp, Homo sapiens
gccaggagtttgaaa

SEQ ID NO: 1287831 - DNA, 15 bp, Homo sapiens
ggccaggagtttgaa

SEQ ID NO: 1287832 - DNA, 15 bp, Homo sapiens
caggatcacttgagg

SEQ ID NO: 1287833 - DNA, 15 bp, Homo sapiens
gcaggatcacttgag

SEQ ID NO: 1287834 - DNA, 15 bp, Homo sapiens
ggcaggatcacttga

SEQ ID NO: 1287835 - DNA, 15 bp, Homo sapiens
tggcaggatcacttg

SEQ ID NO: 1287836 - DNA, 15 bp, Homo sapiens
gtggcaggatcactt

SEQ ID NO: 1287837 - DNA, 15 bp, Homo sapiens
ggtggcaggatcact

SEQ ID NO: 1287838 - DNA, 15 bp, Homo sapiens
aggtggcaggatcac

SEQ ID NO: 1287839 - DNA, 15 bp, Homo sapiens
gaggtggcaggatca

SEQ ID NO: 1287840 - DNA, 15 bp, Homo sapiens
cgaggtggcaggatc

SEQ ID NO: 1287841 - DNA, 15 bp, Homo sapiens
ccgaggtggcaggat

SEQ ID NO: 1287842 - DNA, 15 bp, Homo sapiens
gccgaggtggcagga

SEQ ID NO: 1287843 - DNA, 15 bp, Homo sapiens
ggccgaggtggcagg

SEQ ID NO: 1287844 - DNA, 15 bp, Homo sapiens
aggccgaggtggcag

SEQ ID NO: 1287845 - DNA, 15 bp, Homo sapiens
gaggccgaggtggca

SEQ ID NO: 1287846 - DNA, 15 bp, Homo sapiens
ggaggccgaggtggc

SEQ ID NO: 1287847 - DNA, 15 bp, Homo sapiens
gctttgggaggccga

SEQ ID NO: 1287848 - DNA, 15 bp, Homo sapiens
tgctttgggaggccg

SEQ ID NO: 1287849 - DNA, 15 bp, Homo sapiens
ctgctttgggaggcc

SEQ ID NO: 1287850 - DNA, 15 bp, Homo sapiens
actgctttgggaggc

SEQ ID NO: 1287851 - DNA, 15 bp, Homo sapiens
cactgctttgggagg

SEQ ID NO: 1287852 - DNA, 15 bp, Homo sapiens
ccactgctttgggag

SEQ ID NO: 1287853 - DNA, 15 bp, Homo sapiens
cccactgctttggga

SEQ ID NO: 1287854 - DNA, 15 bp, Homo sapiens
tcccactgctttggg

SEQ ID NO: 1287855 - DNA, 15 bp, Homo sapiens
atcccactgctttgg

SEQ ID NO: 1287856 - DNA, 15 bp, Homo sapiens
aatcccactgctttg

SEQ ID NO: 1287857 - DNA, 15 bp, Homo sapiens
taatcccactgcttt

SEQ ID NO: 1287858 - DNA, 15 bp, Homo sapiens
gtaatcccactgctt

SEQ ID NO: 1287859 - DNA, 15 bp, Homo sapiens
tgtaatcccactgct

SEQ ID NO: 1287860 - DNA, 15 bp, Homo sapiens
ctgtaatcccactgc

SEQ ID NO: 1287861 - DNA, 15 bp, Homo sapiens
cctgtaatcccactg

SEQ ID NO: 1287862 - DNA, 15 bp, Homo sapiens
acctgtaatcccact

SEQ ID NO: 1287863 - DNA, 15 bp, Homo sapiens
cacctgtaatcccac

SEQ ID NO: 1287864 - DNA, 15 bp, Homo sapiens
ttatttctgcttctt

SEQ ID NO: 1287865 - DNA, 15 bp, Homo sapiens
tttatttctgcttct

SEQ ID NO: 1287866 - DNA, 15 bp, Homo sapiens
ttttatttctgcttc

SEQ ID NO: 1287867 - DNA, 15 bp, Homo sapiens
gttttatttctgctt

SEQ ID NO: 1287868 - DNA, 15 bp, Homo sapiens
ggttttatttctgct

SEQ ID NO: 1287869 - DNA, 15 bp, Homo sapiens
aggttttatttctgc

SEQ ID NO: 1287870 - DNA, 15 bp, Homo sapiens
gaggttttatttctg

SEQ ID NO: 1287871 - DNA, 15 bp, Homo sapiens
ggaggttttatttct

SEQ ID NO: 1287872 - DNA, 15 bp, Homo sapiens
gggaggttttatttc

SEQ ID NO: 1287873 - DNA, 15 bp, Homo sapiens
tgggaggttttattt

SEQ ID NO: 1287874 - DNA, 15 bp, Homo sapiens
atgggaggttttatt

SEQ ID NO: 1287875 - DNA, 15 bp, Homo sapiens
tatgggaggttttat

SEQ ID NO: 1287876 - DNA, 15 bp, Homo sapiens
ttatgggaggtttta

SEQ ID NO: 1287877 - DNA, 15 bp, Homo sapiens
attatgggaggtttt

SEQ ID NO: 1287878 - DNA, 15 bp, Homo sapiens
gattatgggaggttt

SEQ ID NO: 1287879 - DNA, 15 bp, Homo sapiens
tgattatgggaggtt

SEQ ID NO: 1287880 - DNA, 15 bp, Homo sapiens
gtgattatgggaggt

SEQ ID NO: 1287881 - DNA, 15 bp, Homo sapiens
tgtgattatgggagg

SEQ ID NO: 1287882 - DNA, 15 bp, Homo sapiens
ttgtgattatgggag

SEQ ID NO: 1287883 - DNA, 15 bp, Homo sapiens
gttgtgattatggga

SEQ ID NO: 1287884 - DNA, 15 bp, Homo sapiens
tgttgtgattatggg

SEQ ID NO: 1287885 - DNA, 15 bp, Homo sapiens
ctgttgtgattatgg

SEQ ID NO: 1287886 - DNA, 15 bp, Homo sapiens
tctgttgtgattatg

SEQ ID NO: 1287887 - DNA, 15 bp, Homo sapiens
ttctgttgtgattat

SEQ ID NO: 1287888 - DNA, 15 bp, Homo sapiens
tttctgttgtgatta

SEQ ID NO: 1287889 - DNA, 15 bp, Homo sapiens
gtttctgttgtgatt

SEQ ID NO: 1287890 - DNA, 15 bp, Homo sapiens
tgtttctgttgtgat

SEQ ID NO: 1287891 - DNA, 15 bp, Homo sapiens
atgtttctgttgtga

SEQ ID NO: 1287892 - DNA, 15 bp, Homo sapiens
gatgtttctgttgtg

SEQ ID NO: 1287893 - DNA, 15 bp, Homo sapiens
agatgtttctgttgt

SEQ ID NO: 1287894 - DNA, 15 bp, Homo sapiens
tagatgtttctgttg

SEQ ID NO: 1287895 - DNA, 15 bp, Homo sapiens
gtagatgtttctgtt

SEQ ID NO: 1287896 - DNA, 15 bp, Homo sapiens
agtagatgtttctgt

SEQ ID NO: 1287897 - DNA, 15 bp, Homo sapiens
tagtagatgtttctg

SEQ ID NO: 1287898 - DNA, 15 bp, Homo sapiens
gtagtagatgtttct

SEQ ID NO: 1287899 - DNA, 15 bp, Homo sapiens
agtagtagatgtttc

SEQ ID NO: 1287900 - DNA, 15 bp, Homo sapiens
cagtagtagatgttt

SEQ ID NO: 1287901 - DNA, 15 bp, Homo sapiens
acagtagtagatgtt

SEQ ID NO: 1287902 - DNA, 15 bp, Homo sapiens
aacagtagtagatgt

SEQ ID NO: 1287903 - DNA, 15 bp, Homo sapiens
gaacagtagtagatg

SEQ ID NO: 1287904 - DNA, 15 bp, Homo sapiens
tgaacagtagtagat

SEQ ID NO: 1287905 - DNA, 15 bp, Homo sapiens
atgaacagtagtaga

SEQ ID NO: 1287906 - DNA, 15 bp, Homo sapiens
catgaacagtagtag

SEQ ID NO: 1287907 - DNA, 15 bp, Homo sapiens
tcatgaacagtagta

SEQ ID NO: 1287908 - DNA, 15 bp, Homo sapiens
atcatgaacagtagt

SEQ ID NO: 1287909 - DNA, 15 bp, Homo sapiens
aatcatgaacagtag

SEQ ID NO: 1287910 - DNA, 15 bp, Homo sapiens
gaatcatgaacagta

SEQ ID NO: 1287911 - DNA, 15 bp, Homo sapiens
cgaatcatgaacagt

SEQ ID NO: 1287912 - DNA, 15 bp, Homo sapiens
acgaatcatgaacag

SEQ ID NO: 1287913 - DNA, 15 bp, Homo sapiens
aacgaatcatgaaca

SEQ ID NO: 1287914 - DNA, 15 bp, Homo sapiens
aaacgaatcatgaac

SEQ ID NO: 1287915 - DNA, 15 bp, Homo sapiens
aaaacgaatcatgaa

SEQ ID NO: 1287916 - DNA, 15 bp, Homo sapiens
taaaacgaatcatga

SEQ ID NO: 1287917 - DNA, 15 bp, Homo sapiens
ataaaacgaatcatg

SEQ ID NO: 1287918 - DNA, 15 bp, Homo sapiens
aataaaacgaatcat

SEQ ID NO: 1287919 - DNA, 15 bp, Homo sapiens
aaataaaacgaatca

SEQ ID NO: 1287920 - DNA, 15 bp, Homo sapiens
aaaataaaacgaatc

SEQ ID NO: 1287921 - DNA, 15 bp, Homo sapiens
gaaaataaaacgaat

SEQ ID NO: 1287922 - DNA, 15 bp, Homo sapiens
ggaaaataaaacgaa

SEQ ID NO: 1287923 - DNA, 15 bp, Homo sapiens
gggaaaataaaacga

SEQ ID NO: 1287924 - DNA, 15 bp, Homo sapiens
ggggaaaataaaacg

SEQ ID NO: 1287925 - DNA, 15 bp, Homo sapiens
gggggaaaataaaac

SEQ ID NO: 1287926 - DNA, 15 bp, Homo sapiens
tgggggaaaataaaa

SEQ ID NO: 1287927 - DNA, 15 bp, Homo sapiens
ttgggggaaaataaa

SEQ ID NO: 1287928 - DNA, 15 bp, Homo sapiens
tttgggggaaaataa

SEQ ID NO: 1287929 - DNA, 15 bp, Homo sapiens
atttgggggaaaata

SEQ ID NO: 1287930 - DNA, 15 bp, Homo sapiens
tatttgggggaaaat

SEQ ID NO: 1287931 - DNA, 15 bp, Homo sapiens
tatatttgggggaaa

SEQ ID NO: 1287932 - DNA, 15 bp, Homo sapiens
atatatttgggggaa

SEQ ID NO: 1287933 - DNA, 15 bp, Homo sapiens
aatatatttggggga

SEQ ID NO: 1287934 - DNA, 15 bp, Homo sapiens
taatatatttggggg

SEQ ID NO: 1287935 - DNA, 15 bp, Homo sapiens
gtaatatatttgggg

SEQ ID NO: 1287936 - DNA, 15 bp, Homo sapiens
agtaatatatttggg

SEQ ID NO: 1287937 - DNA, 15 bp, Homo sapiens
cagtaatatatttgg

SEQ ID NO: 1287938 - DNA, 15 bp, Homo sapiens
acagtaatatatttg

SEQ ID NO: 1287939 - DNA, 15 bp, Homo sapiens
cacagtaatatattt

SEQ ID NO: 1287940 - DNA, 15 bp, Homo sapiens
gcacagtaatatatt

SEQ ID NO: 1287941 - DNA, 15 bp, Homo sapiens
tgcacagtaatatat

SEQ ID NO: 1287942 - DNA, 15 bp, Homo sapiens
atgcacagtaatata

SEQ ID NO: 1287943 - DNA, 15 bp, Homo sapiens
aatgcacagtaatat

SEQ ID NO: 1287944 - DNA, 15 bp, Homo sapiens
aaatgcacagtaata

SEQ ID NO: 1287945 - DNA, 15 bp, Homo sapiens
aaaatgcacagtaat

SEQ ID NO: 1287946 - DNA, 15 bp, Homo sapiens
aaaaatgcacagtaa

SEQ ID NO: 1287947 - DNA, 15 bp, Homo sapiens
gaaaaatgcacagta

SEQ ID NO: 1287948 - DNA, 15 bp, Homo sapiens
agaaaaatgcacagt

SEQ ID NO: 1287949 - DNA, 15 bp, Homo sapiens
aagaaaaatgcacag

SEQ ID NO: 1287950 - DNA, 15 bp, Homo sapiens
aaagaaaaatgcaca

SEQ ID NO: 1287951 - DNA, 15 bp, Homo sapiens
taaagaaaaatgcac

SEQ ID NO: 1287952 - DNA, 15 bp, Homo sapiens
ataaagaaaaatgca

SEQ ID NO: 1287953 - DNA, 15 bp, Homo sapiens
tataaagaaaaatgc

SEQ ID NO: 1287954 - DNA, 15 bp, Homo sapiens
ttataaagaaaaatg

SEQ ID NO: 1287955 - DNA, 15 bp, Homo sapiens
attataaagaaaaat

SEQ ID NO: 1287956 - DNA, 15 bp, Homo sapiens
cattataaagaaaaa

SEQ ID NO: 1287957 - DNA, 15 bp, Homo sapiens
gcattataaagaaaa

SEQ ID NO: 1287958 - DNA, 15 bp, Homo sapiens
ggcattataaagaaa

SEQ ID NO: 1287959 - DNA, 15 bp, Homo sapiens
cggcattataaagaa

SEQ ID NO: 1287960 - DNA, 15 bp, Homo sapiens
tcggcattataaaga

SEQ ID NO: 1287961 - DNA, 15 bp, Homo sapiens
ctcggcattataaag

SEQ ID NO: 1287962 - DNA, 15 bp, Homo sapiens
tctcggcattataaa

SEQ ID NO: 1287963 - DNA, 15 bp, Homo sapiens
atctcggcattataa

SEQ ID NO: 1287964 - DNA, 15 bp, Homo sapiens
gatctcggcattata

SEQ ID NO: 1287965 - DNA, 15 bp, Homo sapiens
ggatctcggcattat

SEQ ID NO: 1287966 - DNA, 15 bp, Homo sapiens
aggatctcggcatta

SEQ ID NO: 1287967 - DNA, 15 bp, Homo sapiens
taggatctcggcatt

SEQ ID NO: 1287968 - DNA, 15 bp, Homo sapiens
ctaggatctcggcat

SEQ ID NO: 1287969 - DNA, 15 bp, Homo sapiens
tctaggatctcggca

SEQ ID NO: 1287970 - DNA, 15 bp, Homo sapiens
ttctaggatctcggc

SEQ ID NO: 1287971 - DNA, 15 bp, Homo sapiens
attctaggatctcgg

SEQ ID NO: 1287972 - DNA, 15 bp, Homo sapiens
tattctaggatctcg

SEQ ID NO: 1287973 - DNA, 15 bp, Homo sapiens
atattctaggatctc

SEQ ID NO: 1287974 - DNA, 15 bp, Homo sapiens
catattctaggatct

SEQ ID NO: 1287975 - DNA, 15 bp, Homo sapiens
acatattctaggatc

SEQ ID NO: 1287976 - DNA, 15 bp, Homo sapiens
cacatattctaggat

SEQ ID NO: 1287977 - DNA, 15 bp, Homo sapiens
gcacatattctagga

SEQ ID NO: 1287978 - DNA, 15 bp, Homo sapiens
cgcacatattctagg

SEQ ID NO: 1287979 - DNA, 15 bp, Homo sapiens
tcgcacatattctag

SEQ ID NO: 1287980 - DNA, 15 bp, Homo sapiens
atcgcacatattcta

SEQ ID NO: 1287981 - DNA, 15 bp, Homo sapiens
aatcgcacatattct

SEQ ID NO: 1287982 - DNA, 15 bp, Homo sapiens
aaatcgcacatattc

SEQ ID NO: 1287983 - DNA, 15 bp, Homo sapiens
taaatcgcacatatt

SEQ ID NO: 1287984 - DNA, 15 bp, Homo sapiens
ctaaatcgcacatat

SEQ ID NO: 1287985 - DNA, 15 bp, Homo sapiens
actaaatcgcacata

SEQ ID NO: 1287986 - DNA, 15 bp, Homo sapiens
cactaaatcgcacat

SEQ ID NO: 1287987 - DNA, 15 bp, Homo sapiens
acactaaatcgcaca

SEQ ID NO: 1287988 - DNA, 15 bp, Homo sapiens
aacactaaatcgcac

SEQ ID NO: 1287989 - DNA, 15 bp, Homo sapiens
gaacactaaatcgca

SEQ ID NO: 1287990 - DNA, 15 bp, Homo sapiens
agaacactaaatcgc

SEQ ID NO: 1287991 - DNA, 15 bp, Homo sapiens
cagaacactaaatcg

SEQ ID NO: 1287992 - DNA, 15 bp, Homo sapiens
gcagaacactaaatc

SEQ ID NO: 1287993 - DNA, 15 bp, Homo sapiens
agcagaacactaaat

SEQ ID NO: 1287994 - DNA, 15 bp, Homo sapiens
aagcagaacactaaa

SEQ ID NO: 1287995 - DNA, 15 bp, Homo sapiens
aaagcagaacactaa

SEQ ID NO: 1287996 - DNA, 15 bp, Homo sapiens
aaaagcagaacacta

SEQ ID NO: 1287997 - DNA, 15 bp, Homo sapiens
gaaaagcagaacact

SEQ ID NO: 1287998 - DNA, 15 bp, Homo sapiens
agaaaagcagaacac

SEQ ID NO: 1287999 - DNA, 15 bp, Homo sapiens
aagaaaagcagaaca

SEQ ID NO: 1288000 - DNA, 15 bp, Homo sapiens
gaagaaaagcagaac

SEQ ID NO: 1288001 - DNA, 15 bp, Homo sapiens
agaagaaaagcagaa

SEQ ID NO: 1288002 - DNA, 15 bp, Homo sapiens
aagaagaaaagcaga

SEQ ID NO: 1288003 - DNA, 15 bp, Homo sapiens
taagaagaaaagcag

SEQ ID NO: 1288004 - DNA, 15 bp, Homo sapiens
ttaagaagaaaagca

SEQ ID NO: 1288005 - DNA, 15 bp, Homo sapiens
gttaagaagaaaagc

SEQ ID NO: 1288006 - DNA, 15 bp, Homo sapiens
tgttaagaagaaaag

SEQ ID NO: 1288007 - DNA, 15 bp, Homo sapiens
atgttaagaagaaaa

SEQ ID NO: 1288008 - DNA, 15 bp, Homo sapiens
aatgttaagaagaaa

SEQ ID NO: 1288009 - DNA, 15 bp, Homo sapiens
taatgttaagaagaa

SEQ ID NO: 1288010 - DNA, 15 bp, Homo sapiens
gtaatgttaagaaga

SEQ ID NO: 1288011 - DNA, 15 bp, Homo sapiens
cgtaatgttaagaag

SEQ ID NO: 1288012 - DNA, 15 bp, Homo sapiens
acgtaatgttaagaa

SEQ ID NO: 1288013 - DNA, 15 bp, Homo sapiens
aacgtaatgttaaga

SEQ ID NO: 1288014 - DNA, 15 bp, Homo sapiens
taacgtaatgttaag

SEQ ID NO: 1288015 - DNA, 15 bp, Homo sapiens
ataacgtaatgttaa

SEQ ID NO: 1288016 - DNA, 15 bp, Homo sapiens
gataacgtaatgtta

SEQ ID NO: 1288017 - DNA, 15 bp, Homo sapiens
tgataacgtaatgtt

SEQ ID NO: 1288018 - DNA, 15 bp, Homo sapiens
ctgataacgtaatgt

SEQ ID NO: 1288019 - DNA, 15 bp, Homo sapiens
gctgataacgtaatg

SEQ ID NO: 1288020 - DNA, 15 bp, Homo sapiens
tgctgataacgtaat

SEQ ID NO: 1288021 - DNA, 15 bp, Homo sapiens
atgctgataacgtaa

SEQ ID NO: 1288022 - DNA, 15 bp, Homo sapiens
aatgctgataacgta

SEQ ID NO: 1288023 - DNA, 15 bp, Homo sapiens
aaatgctgataacgt

SEQ ID NO: 1288024 - DNA, 15 bp, Homo sapiens
gaaatgctgataacg

SEQ ID NO: 1288025 - DNA, 15 bp, Homo sapiens
ggaaatgctgataac

SEQ ID NO: 1288026 - DNA, 15 bp, Homo sapiens
tggaaatgctgataa

SEQ ID NO: 1288027 - DNA, 15 bp, Homo sapiens
ttggaaatgctgata

SEQ ID NO: 1288028 - DNA, 15 bp, Homo sapiens
cttggaaatgctgat

SEQ ID NO: 1288029 - DNA, 15 bp, Homo sapiens
acttggaaatgctga

SEQ ID NO: 1288030 - DNA, 15 bp, Homo sapiens
cacttggaaatgctg

SEQ ID NO: 1288031 - DNA, 15 bp, Homo sapiens
tcacttggaaatgct

SEQ ID NO: 1288032 - DNA, 15 bp, Homo sapiens
gtcacttggaaatgc

SEQ ID NO: 1288033 - DNA, 15 bp, Homo sapiens
tgtcacttggaaatg

SEQ ID NO: 1288034 - DNA, 15 bp, Homo sapiens
gtgtcacttggaaat

SEQ ID NO: 1288035 - DNA, 15 bp, Homo sapiens
agtgtcacttggaaa

SEQ ID NO: 1288036 - DNA, 15 bp, Homo sapiens
cagtgtcacttggaa

SEQ ID NO: 1288037 - DNA, 15 bp, Homo sapiens
ccagtgtcacttgga

SEQ ID NO: 1288038 - DNA, 15 bp, Homo sapiens
cccagtgtcacttgg

SEQ ID NO: 1288039 - DNA, 15 bp, Homo sapiens
tcccagtgtcacttg

SEQ ID NO: 1288040 - DNA, 15 bp, Homo sapiens
gtcccagtgtcactt

SEQ ID NO: 1288041 - DNA, 15 bp, Homo sapiens
agtcccagtgtcact

SEQ ID NO: 1288042 - DNA, 15 bp, Homo sapiens
gagtcccagtgtcac

SEQ ID NO: 1288043 - DNA, 15 bp, Homo sapiens
agagtcccagtgtca

SEQ ID NO: 1288044 - DNA, 15 bp, Homo sapiens
tagagtcccagtgtc

SEQ ID NO: 1288045 - DNA, 15 bp, Homo sapiens
atagagtcccagtgt

SEQ ID NO: 1288046 - DNA, 15 bp, Homo sapiens
tatagagtcccagtg

SEQ ID NO: 1288047 - DNA, 15 bp, Homo sapiens
ttatagagtcccagt

SEQ ID NO: 1288048 - DNA, 15 bp, Homo sapiens
tttatagagtcccag

SEQ ID NO: 1288049 - DNA, 15 bp, Homo sapiens
gtttatagagtccca

SEQ ID NO: 1288050 - DNA, 15 bp, Homo sapiens
tgtttatagagtccc

SEQ ID NO: 1288051 - DNA, 15 bp, Homo sapiens
atgtttatagagtcc

SEQ ID NO: 1288052 - DNA, 15 bp, Homo sapiens
tatgtttatagagtc

SEQ ID NO: 1288053 - DNA, 15 bp, Homo sapiens
atatgtttatagagt

SEQ ID NO: 1288054 - DNA, 15 bp, Homo sapiens
aatatgtttatagag

SEQ ID NO: 1288055 - DNA, 15 bp, Homo sapiens
aaatatgtttataga

SEQ ID NO: 1288056 - DNA, 15 bp, Homo sapiens
aaaatatgtttatag

SEQ ID NO: 1288057 - DNA, 15 bp, Homo sapiens
taaaatatgtttata

SEQ ID NO: 1288058 - DNA, 15 bp, Homo sapiens
ttaaaatatgtttat

SEQ ID NO: 1288059 - DNA, 15 bp, Homo sapiens
tttaaaatatgttta

SEQ ID NO: 1288060 - DNA, 15 bp, Homo sapiens
atttaaaatatgttt

SEQ ID NO: 1288061 - DNA, 15 bp, Homo sapiens
catttaaaatatgtt

SEQ ID NO: 1288062 - DNA, 15 bp, Homo sapiens
tcatttaaaatatgt

SEQ ID NO: 1288063 - DNA, 15 bp, Homo sapiens
gtcatttaaaatatg

SEQ ID NO: 1288064 - DNA, 15 bp, Homo sapiens
agtcatttaaaatat

SEQ ID NO: 1288065 - DNA, 15 bp, Homo sapiens
tagtcatttaaaata

SEQ ID NO: 1288066 - DNA, 15 bp, Homo sapiens
atagtcatttaaaat

SEQ ID NO: 1288067 - DNA, 15 bp, Homo sapiens
tatagtcatttaaaa

SEQ ID NO: 1288068 - DNA, 15 bp, Homo sapiens
atatagtcatttaaa

SEQ ID NO: 1288069 - DNA, 15 bp, Homo sapiens
gatatagtcatttaa

SEQ ID NO: 1288070 - DNA, 15 bp, Homo sapiens
agatatagtcattta

SEQ ID NO: 1288071 - DNA, 15 bp, Homo sapiens
aagatatagtcattt

SEQ ID NO: 1288072 - DNA, 15 bp, Homo sapiens
taagatatagtcatt

SEQ ID NO: 1288073 - DNA, 15 bp, Homo sapiens
ataagatatagtcat

SEQ ID NO: 1288074 - DNA, 15 bp, Homo sapiens
tataagatatagtca

SEQ ID NO: 1288075 - DNA, 15 bp, Homo sapiens
atataagatatagtc

SEQ ID NO: 1288076 - DNA, 15 bp, Homo sapiens
catataagatatagt

SEQ ID NO: 1288077 - DNA, 15 bp, Homo sapiens
ccatataagatatag

SEQ ID NO: 1288078 - DNA, 15 bp, Homo sapiens
tccatataagatata

SEQ ID NO: 1288079 - DNA, 15 bp, Homo sapiens
atccatataagatat

SEQ ID NO: 1288080 - DNA, 15 bp, Homo sapiens
catccatataagata

SEQ ID NO: 1288081 - DNA, 15 bp, Homo sapiens
gcatccatataagat

SEQ ID NO: 1288082 - DNA, 15 bp, Homo sapiens
agcatccatataaga

SEQ ID NO: 1288083 - DNA, 15 bp, Homo sapiens
gagcatccatataag

SEQ ID NO: 1288084 - DNA, 15 bp, Homo sapiens
tgagcatccatataa

SEQ ID NO: 1288085 - DNA, 15 bp, Homo sapiens
gtgagcatccatata

SEQ ID NO: 1288086 - DNA, 15 bp, Homo sapiens
agtgagcatccatat

SEQ ID NO: 1288087 - DNA, 15 bp, Homo sapiens
gagtgagcatccata

SEQ ID NO: 1288088 - DNA, 15 bp, Homo sapiens
ggagtgagcatccat

SEQ ID NO: 1288089 - DNA, 15 bp, Homo sapiens
aggagtgagcatcca

SEQ ID NO: 1288090 - DNA, 15 bp, Homo sapiens
aaggagtgagcatcc

SEQ ID NO: 1288091 - DNA, 15 bp, Homo sapiens
aaaggagtgagcatc

SEQ ID NO: 1288092 - DNA, 15 bp, Homo sapiens
aaaaggagtgagcat

SEQ ID NO: 1288093 - DNA, 15 bp, Homo sapiens
gaaaaggagtgagca

SEQ ID NO: 1288094 - DNA, 15 bp, Homo sapiens
ggaaaaggagtgagc

SEQ ID NO: 1288095 - DNA, 15 bp, Homo sapiens
aggaaaaggagtgag

SEQ ID NO: 1288096 - DNA, 15 bp, Homo sapiens
aaggaaaaggagtga

SEQ ID NO: 1288097 - DNA, 15 bp, Homo sapiens
taaggaaaaggagtg

SEQ ID NO: 1288098 - DNA, 15 bp, Homo sapiens
ataaggaaaaggagt

SEQ ID NO: 1288099 - DNA, 15 bp, Homo sapiens
tataaggaaaaggag

SEQ ID NO: 1288100 - DNA, 15 bp, Homo sapiens
atataaggaaaagga

SEQ ID NO: 1288101 - DNA, 15 bp, Homo sapiens
aatataaggaaaagg

SEQ ID NO: 1288102 - DNA, 15 bp, Homo sapiens
aaatataaggaaaag

SEQ ID NO: 1288103 - DNA, 15 bp, Homo sapiens
caaatataaggaaaa

SEQ ID NO: 1288104 - DNA, 15 bp, Homo sapiens
gcaaatataaggaaa

SEQ ID NO: 1288105 - DNA, 15 bp, Homo sapiens
agcaaatataaggaa

SEQ ID NO: 1288106 - DNA, 15 bp, Homo sapiens
gagcaaatataagga

SEQ ID NO: 1288107 - DNA, 15 bp, Homo sapiens
agagcaaatataagg

SEQ ID NO: 1288108 - DNA, 15 bp, Homo sapiens
aagagcaaatataag

SEQ ID NO: 1288109 - DNA, 15 bp, Homo sapiens
aaagagcaaatataa

SEQ ID NO: 1288110 - DNA, 15 bp, Homo sapiens
taaagagcaaatata

SEQ ID NO: 1288111 - DNA, 15 bp, Homo sapiens
gtaaagagcaaatat

SEQ ID NO: 1288112 - DNA, 15 bp, Homo sapiens
agtaaagagcaaata

SEQ ID NO: 1288113 - DNA, 15 bp, Homo sapiens
aagtaaagagcaaat

SEQ ID NO: 1288114 - DNA, 15 bp, Homo sapiens
aaagtaaagagcaaa

SEQ ID NO: 1288115 - DNA, 15 bp, Homo sapiens
aaaagtaaagagcaa

SEQ ID NO: 1288116 - DNA, 15 bp, Homo sapiens
aaaaagtaaagagca

SEQ ID NO: 1288117 - DNA, 15 bp, Homo sapiens
gaaaaagtaaagagc

SEQ ID NO: 1288118 - DNA, 15 bp, Homo sapiens
ggaaaaagtaaagag

SEQ ID NO: 1288119 - DNA, 15 bp, Homo sapiens
aggaaaaagtaaaga

SEQ ID NO: 1288120 - DNA, 15 bp, Homo sapiens
gaggaaaaagtaaag

SEQ ID NO: 1288121 - DNA, 15 bp, Homo sapiens
agaggaaaaagtaaa

SEQ ID NO: 1288122 - DNA, 15 bp, Homo sapiens
aagaggaaaaagtaa

SEQ ID NO: 1288123 - DNA, 15 bp, Homo sapiens
aaagaggaaaaagta

SEQ ID NO: 1288124 - DNA, 15 bp, Homo sapiens
aaaagaggaaaaagt

SEQ ID NO: 1288125 - DNA, 15 bp, Homo sapiens
aaaaagaggaaaaag

SEQ ID NO: 1288126 - DNA, 15 bp, Homo sapiens
gcaaaaaagaggaaa

SEQ ID NO: 1288127 - DNA, 15 bp, Homo sapiens
agcaaaaaagaggaa

SEQ ID NO: 1288128 - DNA, 15 bp, Homo sapiens
tagcaaaaaagagga

SEQ ID NO: 1288129 - DNA, 15 bp, Homo sapiens
atagcaaaaaagagg

SEQ ID NO: 1288130 - DNA, 15 bp, Homo sapiens
aatagcaaaaaagag

SEQ ID NO: 1288131 - DNA, 15 bp, Homo sapiens
taatagcaaaaaaga

SEQ ID NO: 1288132 - DNA, 15 bp, Homo sapiens
ataatagcaaaaaag

SEQ ID NO: 1288133 - DNA, 15 bp, Homo sapiens
tataatagcaaaaaa

SEQ ID NO: 1288134 - DNA, 15 bp, Homo sapiens
ttataatagcaaaaa

SEQ ID NO: 1288135 - DNA, 15 bp, Homo sapiens
tttataatagcaaaa

SEQ ID NO: 1288136 - DNA, 15 bp, Homo sapiens
atttataatagcaaa

SEQ ID NO: 1288137 - DNA, 15 bp, Homo sapiens
tatttataatagcaa

SEQ ID NO: 1288138 - DNA, 15 bp, Homo sapiens
ctatttataatagca

SEQ ID NO: 1288139 - DNA, 15 bp, Homo sapiens
gctatttataatagc

SEQ ID NO: 1288140 - DNA, 15 bp, Homo sapiens
tgctatttataatag

SEQ ID NO: 1288141 - DNA, 15 bp, Homo sapiens
atgctatttataata

SEQ ID NO: 1288142 - DNA, 15 bp, Homo sapiens
aatgctatttataat

SEQ ID NO: 1288143 - DNA, 15 bp, Homo sapiens
caatgctatttataa

SEQ ID NO: 1288144 - DNA, 15 bp, Homo sapiens
acaatgctatttata

SEQ ID NO: 1288145 - DNA, 15 bp, Homo sapiens
tacaatgctatttat

SEQ ID NO: 1288146 - DNA, 15 bp, Homo sapiens
gtacaatgctattta

SEQ ID NO: 1288147 - DNA, 15 bp, Homo sapiens
agtacaatgctattt

SEQ ID NO: 1288148 - DNA, 15 bp, Homo sapiens
cagtacaatgctatt

SEQ ID NO: 1288149 - DNA, 15 bp, Homo sapiens
tcagtacaatgctat

SEQ ID NO: 1288150 - DNA, 15 bp, Homo sapiens
ttcagtacaatgcta

SEQ ID NO: 1288151 - DNA, 15 bp, Homo sapiens
tttcagtacaatgct

SEQ ID NO: 1288152 - DNA, 15 bp, Homo sapiens
atttcagtacaatgc

SEQ ID NO: 1288153 - DNA, 15 bp, Homo sapiens
gatttcagtacaatg

SEQ ID NO: 1288154 - DNA, 15 bp, Homo sapiens
ggatttcagtacaat

SEQ ID NO: 1288155 - DNA, 15 bp, Homo sapiens
aggatttcagtacaa

SEQ ID NO: 1288156 - DNA, 15 bp, Homo sapiens
aaggatttcagtaca

SEQ ID NO: 1288157 - DNA, 15 bp, Homo sapiens
gaaggatttcagtac

SEQ ID NO: 1288158 - DNA, 15 bp, Homo sapiens
agaaggatttcagta

SEQ ID NO: 1288159 - DNA, 15 bp, Homo sapiens
cagaaggatttcagt

SEQ ID NO: 1288160 - DNA, 15 bp, Homo sapiens
gcagaaggatttcag

SEQ ID NO: 1288161 - DNA, 15 bp, Homo sapiens
tgcagaaggatttca

SEQ ID NO: 1288162 - DNA, 15 bp, Homo sapiens
ctgcagaaggatttc

SEQ ID NO: 1288163 - DNA, 15 bp, Homo sapiens
cctgcagaaggattt

SEQ ID NO: 1288164 - DNA, 15 bp, Homo sapiens
ccctgcagaaggatt

SEQ ID NO: 1288165 - DNA, 15 bp, Homo sapiens
accctgcagaaggat

SEQ ID NO: 1288166 - DNA, 15 bp, Homo sapiens
aaccctgcagaagga

SEQ ID NO: 1288167 - DNA, 15 bp, Homo sapiens
taaccctgcagaagg

SEQ ID NO: 1288168 - DNA, 15 bp, Homo sapiens
ataaccctgcagaag

SEQ ID NO: 1288169 - DNA, 15 bp, Homo sapiens
cataaccctgcagaa

SEQ ID NO: 1288170 - DNA, 15 bp, Homo sapiens
acataaccctgcaga

SEQ ID NO: 1288171 - DNA, 15 bp, Homo sapiens
tacataaccctgcag

SEQ ID NO: 1288172 - DNA, 15 bp, Homo sapiens
gtacataaccctgca

SEQ ID NO: 1288173 - DNA, 15 bp, Homo sapiens
tgtacataaccctgc

SEQ ID NO: 1288174 - DNA, 15 bp, Homo sapiens
atgtacataaccctg

SEQ ID NO: 1288175 - DNA, 15 bp, Homo sapiens
aatgtacataaccct

SEQ ID NO: 1288176 - DNA, 15 bp, Homo sapiens
taatgtacataaccc

SEQ ID NO: 1288177 - DNA, 15 bp, Homo sapiens
gtaatgtacataacc

SEQ ID NO: 1288178 - DNA, 15 bp, Homo sapiens
ggtaatgtacataac

SEQ ID NO: 1288179 - DNA, 15 bp, Homo sapiens
aggtaatgtacataa

SEQ ID NO: 1288180 - DNA, 15 bp, Homo sapiens
gaggtaatgtacata

SEQ ID NO: 1288181 - DNA, 15 bp, Homo sapiens
tgaggtaatgtacat

SEQ ID NO: 1288182 - DNA, 15 bp, Homo sapiens
atgaggtaatgtaca

SEQ ID NO: 1288183 - DNA, 15 bp, Homo sapiens
aatgaggtaatgtac

SEQ ID NO: 1288184 - DNA, 15 bp, Homo sapiens
caatgaggtaatgta

SEQ ID NO: 1288185 - DNA, 15 bp, Homo sapiens
ccaatgaggtaatgt

SEQ ID NO: 1288186 - DNA, 15 bp, Homo sapiens
accaatgaggtaatg

SEQ ID NO: 1288187 - DNA, 15 bp, Homo sapiens
aaccaatgaggtaat

SEQ ID NO: 1288188 - DNA, 15 bp, Homo sapiens
aaaccaatgaggtaa

SEQ ID NO: 1288189 - DNA, 15 bp, Homo sapiens
taaaccaatgaggta

SEQ ID NO: 1288190 - DNA, 15 bp, Homo sapiens
ataaaccaatgaggt

SEQ ID NO: 1288191 - DNA, 15 bp, Homo sapiens
aataaaccaatgagg

SEQ ID NO: 1288192 - DNA, 15 bp, Homo sapiens
aaataaaccaatgag

SEQ ID NO: 1288193 - DNA, 15 bp, Homo sapiens
taaataaaccaatga

SEQ ID NO: 1288194 - DNA, 15 bp, Homo sapiens
ataaataaaccaatg

SEQ ID NO: 1288195 - DNA, 15 bp, Homo sapiens
aataaataaaccaat

SEQ ID NO: 1288196 - DNA, 15 bp, Homo sapiens
aaataaataaaccaa

SEQ ID NO: 1288197 - DNA, 15 bp, Homo sapiens
taaataaataaacca

SEQ ID NO: 1288198 - DNA, 15 bp, Homo sapiens
ttaaataaataaacc

SEQ ID NO: 1288199 - DNA, 15 bp, Homo sapiens
gttaaataaataaac

SEQ ID NO: 1288200 - DNA, 15 bp, Homo sapiens
tgttaaataaataaa

SEQ ID NO: 1288201 - DNA, 15 bp, Homo sapiens
ctgttaaataaataa

SEQ ID NO: 1288202 - DNA, 15 bp, Homo sapiens
tctgttaaataaata

SEQ ID NO: 1288203 - DNA, 15 bp, Homo sapiens
gtctgttaaataaat

SEQ ID NO: 1288204 - DNA, 15 bp, Homo sapiens
agtctgttaaataaa

SEQ ID NO: 1288205 - DNA, 15 bp, Homo sapiens
aagtctgttaaataa

SEQ ID NO: 1288206 - DNA, 15 bp, Homo sapiens
aaagtctgttaaata

SEQ ID NO: 1288207 - DNA, 15 bp, Homo sapiens
caaagtctgttaaat

SEQ ID NO: 1288208 - DNA, 15 bp, Homo sapiens
tcaaagtctgttaaa

SEQ ID NO: 1288209 - DNA, 15 bp, Homo sapiens
ctcaaagtctgttaa

SEQ ID NO: 1288210 - DNA, 15 bp, Homo sapiens
actcaaagtctgtta

SEQ ID NO: 1288211 - DNA, 15 bp, Homo sapiens
tactcaaagtctgtt

SEQ ID NO: 1288212 - DNA, 15 bp, Homo sapiens
atactcaaagtctgt

SEQ ID NO: 1288213 - DNA, 15 bp, Homo sapiens
gatactcaaagtctg

SEQ ID NO: 1288214 - DNA, 15 bp, Homo sapiens
agatactcaaagtct

SEQ ID NO: 1288215 - DNA, 15 bp, Homo sapiens
tagatactcaaagtc

SEQ ID NO: 1288216 - DNA, 15 bp, Homo sapiens
gtagatactcaaagt

SEQ ID NO: 1288217 - DNA, 15 bp, Homo sapiens
tgtagatactcaaag

SEQ ID NO: 1288218 - DNA, 15 bp, Homo sapiens
ttgtagatactcaaa

SEQ ID NO: 1288219 - DNA, 15 bp, Homo sapiens
attgtagatactcaa

SEQ ID NO: 1288220 - DNA, 15 bp, Homo sapiens
cattgtagatactca

SEQ ID NO: 1288221 - DNA, 15 bp, Homo sapiens
acattgtagatactc

SEQ ID NO: 1288222 - DNA, 15 bp, Homo sapiens
cacattgtagatact

SEQ ID NO: 1288223 - DNA, 15 bp, Homo sapiens
gcacattgtagatac

SEQ ID NO: 1288224 - DNA, 15 bp, Homo sapiens
tgcacattgtagata

SEQ ID NO: 1288225 - DNA, 15 bp, Homo sapiens
ttgcacattgtagat

SEQ ID NO: 1288226 - DNA, 15 bp, Homo sapiens
attgcacattgtaga

SEQ ID NO: 1288227 - DNA, 15 bp, Homo sapiens
tattgcacattgtag

SEQ ID NO: 1288228 - DNA, 15 bp, Homo sapiens
gtattgcacattgta

SEQ ID NO: 1288229 - DNA, 15 bp, Homo sapiens
tgtattgcacattgt

SEQ ID NO: 1288230 - DNA, 15 bp, Homo sapiens
ttgtattgcacattg

SEQ ID NO: 1288231 - DNA, 15 bp, Homo sapiens
attgtattgcacatt

SEQ ID NO: 1288232 - DNA, 15 bp, Homo sapiens
cattgtattgcacat

SEQ ID NO: 1288233 - DNA, 15 bp, Homo sapiens
acattgtattgcaca

SEQ ID NO: 1288234 - DNA, 15 bp, Homo sapiens
cacattgtattgcac

SEQ ID NO: 1288235 - DNA, 15 bp, Homo sapiens
gcacattgtattgca

SEQ ID NO: 1288236 - DNA, 15 bp, Homo sapiens
agcacattgtattgc

SEQ ID NO: 1288237 - DNA, 15 bp, Homo sapiens
aagcacattgtattg

SEQ ID NO: 1288238 - DNA, 15 bp, Homo sapiens
aaagcacattgtatt

SEQ ID NO: 1288239 - DNA, 15 bp, Homo sapiens
aaaagcacattgtat

SEQ ID NO: 1288240 - DNA, 15 bp, Homo sapiens
taaaagcacattgta

SEQ ID NO: 1288241 - DNA, 15 bp, Homo sapiens
ctaaaagcacattgt

SEQ ID NO: 1288242 - DNA, 15 bp, Homo sapiens
actaaaagcacattg

SEQ ID NO: 1288243 - DNA, 15 bp, Homo sapiens
aactaaaagcacatt

SEQ ID NO: 1288244 - DNA, 15 bp, Homo sapiens
gaactaaaagcacat

SEQ ID NO: 1288245 - DNA, 15 bp, Homo sapiens
agaactaaaagcaca

SEQ ID NO: 1288246 - DNA, 15 bp, Homo sapiens
cagaactaaaagcac

SEQ ID NO: 1288247 - DNA, 15 bp, Homo sapiens
tcagaactaaaagca

SEQ ID NO: 1288248 - DNA, 15 bp, Homo sapiens
ctcagaactaaaagc

SEQ ID NO: 1288249 - DNA, 15 bp, Homo sapiens
tctcagaactaaaag

SEQ ID NO: 1288250 - DNA, 15 bp, Homo sapiens
ctctcagaactaaaa

SEQ ID NO: 1288251 - DNA, 15 bp, Homo sapiens
cctctcagaactaaa

SEQ ID NO: 1288252 - DNA, 15 bp, Homo sapiens
tcctctcagaactaa

SEQ ID NO: 1288253 - DNA, 15 bp, Homo sapiens
ttcctctcagaacta

SEQ ID NO: 1288254 - DNA, 15 bp, Homo sapiens
tttcctctcagaact

SEQ ID NO: 1288255 - DNA, 15 bp, Homo sapiens
gtttcctctcagaac

SEQ ID NO: 1288256 - DNA, 15 bp, Homo sapiens
ggtttcctctcagaa

SEQ ID NO: 1288257 - DNA, 15 bp, Homo sapiens
tggtttcctctcaga

SEQ ID NO: 1288258 - DNA, 15 bp, Homo sapiens
atggtttcctctcag

SEQ ID NO: 1288259 - DNA, 15 bp, Homo sapiens
gatggtttcctctca

SEQ ID NO: 1288260 - DNA, 15 bp, Homo sapiens
agatggtttcctctc

SEQ ID NO: 1288261 - DNA, 15 bp, Homo sapiens
cagatggtttcctct

SEQ ID NO: 1288262 - DNA, 15 bp, Homo sapiens
tcagatggtttcctc

SEQ ID NO: 1288263 - DNA, 15 bp, Homo sapiens
ttcagatggtttcct

SEQ ID NO: 1288264 - DNA, 15 bp, Homo sapiens
tttcagatggtttcc

SEQ ID NO: 1288265 - DNA, 15 bp, Homo sapiens
atttcagatggtttc

SEQ ID NO: 1288266 - DNA, 15 bp, Homo sapiens
tatttcagatggttt

SEQ ID NO: 1288267 - DNA, 15 bp, Homo sapiens
ctatttcagatggtt

SEQ ID NO: 1288268 - DNA, 15 bp, Homo sapiens
gctatttcagatggt

SEQ ID NO: 1288269 - DNA, 15 bp, Homo sapiens
tgctatttcagatgg

SEQ ID NO: 1288270 - DNA, 15 bp, Homo sapiens
ttgctatttcagatg

SEQ ID NO: 1288271 - DNA, 15 bp, Homo sapiens
tttgctatttcagat

SEQ ID NO: 1288272 - DNA, 15 bp, Homo sapiens
ttttgctatttcaga

SEQ ID NO: 1288273 - DNA, 15 bp, Homo sapiens
tttttgctatttcag

SEQ ID NO: 1288274 - DNA, 15 bp, Homo sapiens
ctttttgctatttca

SEQ ID NO: 1288275 - DNA, 15 bp, Homo sapiens
tctttttgctatttc

SEQ ID NO: 1288276 - DNA, 15 bp, Homo sapiens
ctctttttgctattt

SEQ ID NO: 1288277 - DNA, 15 bp, Homo sapiens
tctctttttgctatt

SEQ ID NO: 1288278 - DNA, 15 bp, Homo sapiens
gtctctttttgctat

SEQ ID NO: 1288279 - DNA, 15 bp, Homo sapiens
tgtctctttttgcta

SEQ ID NO: 1288280 - DNA, 15 bp, Homo sapiens
atgtctctttttgct

SEQ ID NO: 1288281 - DNA, 15 bp, Homo sapiens
tatgtctctttttgc

SEQ ID NO: 1288282 - DNA, 15 bp, Homo sapiens
ttatgtctctttttg

SEQ ID NO: 1288283 - DNA, 15 bp, Homo sapiens
tttatgtctcttttt

SEQ ID NO: 1288284 - DNA, 15 bp, Homo sapiens
atttatgtctctttt

SEQ ID NO: 1288285 - DNA, 15 bp, Homo sapiens
catttatgtctcttt

SEQ ID NO: 1288286 - DNA, 15 bp, Homo sapiens
tcatttatgtctctt

SEQ ID NO: 1288287 - DNA, 15 bp, Homo sapiens
ttcatttatgtctct

SEQ ID NO: 1288288 - DNA, 15 bp, Homo sapiens
tttcatttatgtctc

SEQ ID NO: 1288289 - DNA, 15 bp, Homo sapiens
atttcatttatgtct

SEQ ID NO: 1288290 - DNA, 15 bp, Homo sapiens
tatttcatttatgtc

SEQ ID NO: 1288291 - DNA, 15 bp, Homo sapiens
gtatttcatttatgt

SEQ ID NO: 1288292 - DNA, 15 bp, Homo sapiens
ggtatttcatttatg

SEQ ID NO: 1288293 - DNA, 15 bp, Homo sapiens
aggtatttcatttat

SEQ ID NO: 1288294 - DNA, 15 bp, Homo sapiens
gaggtatttcattta

SEQ ID NO: 1288295 - DNA, 15 bp, Homo sapiens
tgaggtatttcattt

SEQ ID NO: 1288296 - DNA, 15 bp, Homo sapiens
gtgaggtatttcatt

SEQ ID NO: 1288297 - DNA, 15 bp, Homo sapiens
tgtgaggtatttcat

SEQ ID NO: 1288298 - DNA, 15 bp, Homo sapiens
atgtgaggtatttca

SEQ ID NO: 1288299 - DNA, 15 bp, Homo sapiens
catgtgaggtatttc

SEQ ID NO: 1288300 - DNA, 15 bp, Homo sapiens
acatgtgaggtattt

SEQ ID NO: 1288301 - DNA, 15 bp, Homo sapiens
tacatgtgaggtatt

SEQ ID NO: 1288302 - DNA, 15 bp, Homo sapiens
ctacatgtgaggtat

SEQ ID NO: 1288303 - DNA, 15 bp, Homo sapiens
tctacatgtgaggta

SEQ ID NO: 1288304 - DNA, 15 bp, Homo sapiens
ctctacatgtgaggt

SEQ ID NO: 1288305 - DNA, 15 bp, Homo sapiens
actctacatgtgagg

SEQ ID NO: 1288306 - DNA, 15 bp, Homo sapiens
aactctacatgtgag

SEQ ID NO: 1288307 - DNA, 15 bp, Homo sapiens
aaactctacatgtga

SEQ ID NO: 1288308 - DNA, 15 bp, Homo sapiens
aaaactctacatgtg

SEQ ID NO: 1288309 - DNA, 15 bp, Homo sapiens
caaaactctacatgt

SEQ ID NO: 1288310 - DNA, 15 bp, Homo sapiens
acaaaactctacatg

SEQ ID NO: 1288311 - DNA, 15 bp, Homo sapiens
cacaaaactctacat

SEQ ID NO: 1288312 - DNA, 15 bp, Homo sapiens
tcacaaaactctaca

SEQ ID NO: 1288313 - DNA, 15 bp, Homo sapiens
atcacaaaactctac

SEQ ID NO: 1288314 - DNA, 15 bp, Homo sapiens
tatcacaaaactcta

SEQ ID NO: 1288315 - DNA, 15 bp, Homo sapiens
gtatcacaaaactct

SEQ ID NO: 1288316 - DNA, 15 bp, Homo sapiens
agtatcacaaaactc

SEQ ID NO: 1288317 - DNA, 15 bp, Homo sapiens
gagtatcacaaaact

SEQ ID NO: 1288318 - DNA, 15 bp, Homo sapiens
agagtatcacaaaac

SEQ ID NO: 1288319 - DNA, 15 bp, Homo sapiens
aagagtatcacaaaa

SEQ ID NO: 1288320 - DNA, 15 bp, Homo sapiens
aaagagtatcacaaa

SEQ ID NO: 1288321 - DNA, 15 bp, Homo sapiens
aaaagagtatcacaa

SEQ ID NO: 1288322 - DNA, 15 bp, Homo sapiens
aaaaagagtatcaca

SEQ ID NO: 1288323 - DNA, 15 bp, Homo sapiens
aaaaaagagtatcac

SEQ ID NO: 1288324 - DNA, 15 bp, Homo sapiens
taaaaaagagtatca

SEQ ID NO: 1288325 - DNA, 15 bp, Homo sapiens
ataaaaaagagtatc

SEQ ID NO: 1288326 - DNA, 15 bp, Homo sapiens
tataaaaaagagtat

SEQ ID NO: 1288327 - DNA, 15 bp, Homo sapiens
ctataaaaaagagta

SEQ ID NO: 1288328 - DNA, 15 bp, Homo sapiens
actataaaaaagagt

SEQ ID NO: 1288329 - DNA, 15 bp, Homo sapiens
tactataaaaaagag

SEQ ID NO: 1288330 - DNA, 15 bp, Homo sapiens
ttactataaaaaaga

SEQ ID NO: 1288331 - DNA, 15 bp, Homo sapiens
cttactataaaaaag

SEQ ID NO: 1288332 - DNA, 15 bp, Homo sapiens
acttactataaaaaa

SEQ ID NO: 1288333 - DNA, 15 bp, Homo sapiens
tacttactataaaaa

SEQ ID NO: 1288334 - DNA, 15 bp, Homo sapiens
atacttactataaaa

SEQ ID NO: 1288335 - DNA, 15 bp, Homo sapiens
tatacttactataaa

SEQ ID NO: 1288336 - DNA, 15 bp, Homo sapiens
gtatacttactataa

SEQ ID NO: 1288337 - DNA, 15 bp, Homo sapiens
ggtatacttactata

SEQ ID NO: 1288338 - DNA, 15 bp, Homo sapiens
aggtatacttactat

SEQ ID NO: 1288339 - DNA, 15 bp, Homo sapiens
caggtatacttacta

SEQ ID NO: 1288340 - DNA, 15 bp, Homo sapiens
ccaggtatacttact

SEQ ID NO: 1288341 - DNA, 15 bp, Homo sapiens
gccaggtatacttac

SEQ ID NO: 1288342 - DNA, 15 bp, Homo sapiens
agccaggtatactta

SEQ ID NO: 1288343 - DNA, 15 bp, Homo sapiens
aagccaggtatactt

SEQ ID NO: 1288344 - DNA, 15 bp, Homo sapiens
caagccaggtatact

SEQ ID NO: 1288345 - DNA, 15 bp, Homo sapiens
ccaagccaggtatac

SEQ ID NO: 1288346 - DNA, 15 bp, Homo sapiens
tccaagccaggtata

SEQ ID NO: 1288347 - DNA, 15 bp, Homo sapiens
ctccaagccaggtat

SEQ ID NO: 1288348 - DNA, 15 bp, Homo sapiens
actccaagccaggta

SEQ ID NO: 1288349 - DNA, 15 bp, Homo sapiens
tactccaagccaggt

SEQ ID NO: 1288350 - DNA, 15 bp, Homo sapiens
ttactccaagccagg

SEQ ID NO: 1288351 - DNA, 15 bp, Homo sapiens
gttactccaagccag

SEQ ID NO: 1288352 - DNA, 15 bp, Homo sapiens
tgttactccaagcca

SEQ ID NO: 1288353 - DNA, 15 bp, Homo sapiens
gtgttactccaagcc

SEQ ID NO: 1288354 - DNA, 15 bp, Homo sapiens
agtgttactccaagc

SEQ ID NO: 1288355 - DNA, 15 bp, Homo sapiens
cagtgttactccaag

SEQ ID NO: 1288356 - DNA, 15 bp, Homo sapiens
acagtgttactccaa

SEQ ID NO: 1288357 - DNA, 15 bp, Homo sapiens
cacagtgttactcca

SEQ ID NO: 1288358 - DNA, 15 bp, Homo sapiens
ccacagtgttactcc

SEQ ID NO: 1288359 - DNA, 15 bp, Homo sapiens
cccacagtgttactc

SEQ ID NO: 1288360 - DNA, 15 bp, Homo sapiens
gcccacagtgttact

SEQ ID NO: 1288361 - DNA, 15 bp, Homo sapiens
ggcccacagtgttac

SEQ ID NO: 1288362 - DNA, 15 bp, Homo sapiens
cggcccacagtgtta

SEQ ID NO: 1288363 - DNA, 15 bp, Homo sapiens
ccggcccacagtgtt

SEQ ID NO: 1288364 - DNA, 15 bp, Homo sapiens
accggcccacagtgt

SEQ ID NO: 1288365 - DNA, 15 bp, Homo sapiens
aaccggcccacagtg

SEQ ID NO: 1288366 - DNA, 15 bp, Homo sapiens
taaccggcccacagt

SEQ ID NO: 1288367 - DNA, 15 bp, Homo sapiens
ttaaccggcccacag

SEQ ID NO: 1288368 - DNA, 15 bp, Homo sapiens
attaaccggcccaca

SEQ ID NO: 1288369 - DNA, 15 bp, Homo sapiens
aattaaccggcccac

SEQ ID NO: 1288370 - DNA, 15 bp, Homo sapiens
caattaaccggccca

SEQ ID NO: 1288371 - DNA, 15 bp, Homo sapiens
acaattaaccggccc

SEQ ID NO: 1288372 - DNA, 15 bp, Homo sapiens
aacaattaaccggcc

SEQ ID NO: 1288373 - DNA, 15 bp, Homo sapiens
gaacaattaaccggc

SEQ ID NO: 1288374 - DNA, 15 bp, Homo sapiens
agaacaattaaccgg

SEQ ID NO: 1288375 - DNA, 15 bp, Homo sapiens
cagaacaattaaccg

SEQ ID NO: 1288376 - DNA, 15 bp, Homo sapiens
ccagaacaattaacc

SEQ ID NO: 1288377 - DNA, 15 bp, Homo sapiens
cccagaacaattaac

SEQ ID NO: 1288378 - DNA, 15 bp, Homo sapiens
gcccagaacaattaa

SEQ ID NO: 1288379 - DNA, 15 bp, Homo sapiens
ggcccagaacaatta

SEQ ID NO: 1288380 - DNA, 15 bp, Homo sapiens
aggcccagaacaatt

SEQ ID NO: 1288381 - DNA, 15 bp, Homo sapiens
caggcccagaacaat

SEQ ID NO: 1288382 - DNA, 15 bp, Homo sapiens
tcaggcccagaacaa

SEQ ID NO: 1288383 - DNA, 15 bp, Homo sapiens
ttcaggcccagaaca

SEQ ID NO: 1288384 - DNA, 15 bp, Homo sapiens
attcaggcccagaac

SEQ ID NO: 1288385 - DNA, 15 bp, Homo sapiens
aattcaggcccagaa

SEQ ID NO: 1288386 - DNA, 15 bp, Homo sapiens
aaattcaggcccaga

SEQ ID NO: 1288387 - DNA, 15 bp, Homo sapiens
gaaattcaggcccag

SEQ ID NO: 1288388 - DNA, 15 bp, Homo sapiens
agaaattcaggccca

SEQ ID NO: 1288389 - DNA, 15 bp, Homo sapiens
cagaaattcaggccc

SEQ ID NO: 1288390 - DNA, 15 bp, Homo sapiens
gcagaaattcaggcc

SEQ ID NO: 1288391 - DNA, 15 bp, Homo sapiens
tgcagaaattcaggc

SEQ ID NO: 1288392 - DNA, 15 bp, Homo sapiens
atgcagaaattcagg

SEQ ID NO: 1288393 - DNA, 15 bp, Homo sapiens
gatgcagaaattcag

SEQ ID NO: 1288394 - DNA, 15 bp, Homo sapiens
agatgcagaaattca

SEQ ID NO: 1288395 - DNA, 15 bp, Homo sapiens
aagatgcagaaattc

SEQ ID NO: 1288396 - DNA, 15 bp, Homo sapiens
aaagatgcagaaatt

SEQ ID NO: 1288397 - DNA, 15 bp, Homo sapiens
taaagatgcagaaat

SEQ ID NO: 1288398 - DNA, 15 bp, Homo sapiens
ctaaagatgcagaaa

SEQ ID NO: 1288399 - DNA, 15 bp, Homo sapiens
actaaagatgcagaa

SEQ ID NO: 1288400 - DNA, 15 bp, Homo sapiens
gactaaagatgcaga

SEQ ID NO: 1288401 - DNA, 15 bp, Homo sapiens
tgactaaagatgcag

SEQ ID NO: 1288402 - DNA, 15 bp, Homo sapiens
gtgactaaagatgca

SEQ ID NO: 1288403 - DNA, 15 bp, Homo sapiens
agtgactaaagatgc

SEQ ID NO: 1288404 - DNA, 15 bp, Homo sapiens
tagtgactaaagatg

SEQ ID NO: 1288405 - DNA, 15 bp, Homo sapiens
ctagtgactaaagat

SEQ ID NO: 1288406 - DNA, 15 bp, Homo sapiens
tctagtgactaaaga

SEQ ID NO: 1288407 - DNA, 15 bp, Homo sapiens
atctagtgactaaag

SEQ ID NO: 1288408 - DNA, 15 bp, Homo sapiens
catctagtgactaaa

SEQ ID NO: 1288409 - DNA, 15 bp, Homo sapiens
ccatctagtgactaa

SEQ ID NO: 1288410 - DNA, 15 bp, Homo sapiens
accatctagtgacta

SEQ ID NO: 1288411 - DNA, 15 bp, Homo sapiens
aaccatctagtgact

SEQ ID NO: 1288412 - DNA, 15 bp, Homo sapiens
aaaccatctagtgac

SEQ ID NO: 1288413 - DNA, 15 bp, Homo sapiens
gaaaccatctagtga

SEQ ID NO: 1288414 - DNA, 15 bp, Homo sapiens
agaaaccatctagtg

SEQ ID NO: 1288415 - DNA, 15 bp, Homo sapiens
tagaaaccatctagt

SEQ ID NO: 1288416 - DNA, 15 bp, Homo sapiens
ttagaaaccatctag

SEQ ID NO: 1288417 - DNA, 15 bp, Homo sapiens
cttagaaaccatcta

SEQ ID NO: 1288418 - DNA, 15 bp, Homo sapiens
gcttagaaaccatct

SEQ ID NO: 1288419 - DNA, 15 bp, Homo sapiens
agcttagaaaccatc

SEQ ID NO: 1288420 - DNA, 15 bp, Homo sapiens
cagcttagaaaccat

SEQ ID NO: 1288421 - DNA, 15 bp, Homo sapiens
ggcagcttagaaacc

SEQ ID NO: 1288422 - DNA, 15 bp, Homo sapiens
aggcagcttagaaac

SEQ ID NO: 1288423 - DNA, 15 bp, Homo sapiens
gaggcagcttagaaa

SEQ ID NO: 1288424 - DNA, 15 bp, Homo sapiens
agaggcagcttagaa

SEQ ID NO: 1288425 - DNA, 15 bp, Homo sapiens
aagaggcagcttaga

SEQ ID NO: 1288426 - DNA, 15 bp, Homo sapiens
caagaggcagcttag

SEQ ID NO: 1288427 - DNA, 15 bp, Homo sapiens
acaagaggcagctta

SEQ ID NO: 1288428 - DNA, 15 bp, Homo sapiens
gacaagaggcagctt

SEQ ID NO: 1288429 - DNA, 15 bp, Homo sapiens
agacaagaggcagct

SEQ ID NO: 1288430 - DNA, 15 bp, Homo sapiens
gagacaagaggcagc

SEQ ID NO: 1288431 - DNA, 15 bp, Homo sapiens
ggagacaagaggcag

SEQ ID NO: 1288432 - DNA, 15 bp, Homo sapiens
tggagacaagaggca

SEQ ID NO: 1288433 - DNA, 15 bp, Homo sapiens
ctggagacaagaggc

SEQ ID NO: 1288434 - DNA, 15 bp, Homo sapiens
gctggagacaagagg

SEQ ID NO: 1288435 - DNA, 15 bp, Homo sapiens
tgctggagacaagag

SEQ ID NO: 1288436 - DNA, 15 bp, Homo sapiens
gtgctggagacaaga

SEQ ID NO: 1288437 - DNA, 15 bp, Homo sapiens
agtgctggagacaag

SEQ ID NO: 1288438 - DNA, 15 bp, Homo sapiens
gagtgctggagacaa

SEQ ID NO: 1288439 - DNA, 15 bp, Homo sapiens
agagtgctggagaca

SEQ ID NO: 1288440 - DNA, 15 bp, Homo sapiens
cagagtgctggagac

SEQ ID NO: 1288441 - DNA, 15 bp, Homo sapiens
acagagtgctggaga

SEQ ID NO: 1288442 - DNA, 15 bp, Homo sapiens
cacagagtgctggag

SEQ ID NO: 1288443 - DNA, 15 bp, Homo sapiens
ccacagagtgctgga

SEQ ID NO: 1288444 - DNA, 15 bp, Homo sapiens
accacagagtgctgg

SEQ ID NO: 1288445 - DNA, 15 bp, Homo sapiens
gaccacagagtgctg

SEQ ID NO: 1288446 - DNA, 15 bp, Homo sapiens
ggaccacagagtgct

SEQ ID NO: 1288447 - DNA, 15 bp, Homo sapiens
aggaccacagagtgc

SEQ ID NO: 1288448 - DNA, 15 bp, Homo sapiens
caggaccacagagtg

SEQ ID NO: 1288449 - DNA, 15 bp, Homo sapiens
tcaggaccacagagt

SEQ ID NO: 1288450 - DNA, 15 bp, Homo sapiens
gtcaggaccacagag

SEQ ID NO: 1288451 - DNA, 15 bp, Homo sapiens
agtcaggaccacaga

SEQ ID NO: 1288452 - DNA, 15 bp, Homo sapiens
cagtcaggaccacag

SEQ ID NO: 1288453 - DNA, 15 bp, Homo sapiens
gcagtcaggaccaca

SEQ ID NO: 1288454 - DNA, 15 bp, Homo sapiens
tgcagtcaggaccac

SEQ ID NO: 1288455 - DNA, 15 bp, Homo sapiens
ttgcagtcaggacca

SEQ ID NO: 1288456 - DNA, 15 bp, Homo sapiens
tttgcagtcaggacc

SEQ ID NO: 1288457 - DNA, 15 bp, Homo sapiens
atttgcagtcaggac

SEQ ID NO: 1288458 - DNA, 15 bp, Homo sapiens
catttgcagtcagga

SEQ ID NO: 1288459 - DNA, 15 bp, Homo sapiens
acatttgcagtcagg

SEQ ID NO: 1288460 - DNA, 15 bp, Homo sapiens
tacatttgcagtcag

SEQ ID NO: 1288461 - DNA, 15 bp, Homo sapiens
ttacatttgcagtca

SEQ ID NO: 1288462 - DNA, 15 bp, Homo sapiens
cttacatttgcagtc

SEQ ID NO: 1288463 - DNA, 15 bp, Homo sapiens
tcttacatttgcagt

SEQ ID NO: 1288464 - DNA, 15 bp, Homo sapiens
ttcttacatttgcag

SEQ ID NO: 1288465 - DNA, 15 bp, Homo sapiens
attcttacatttgca

SEQ ID NO: 1288466 - DNA, 15 bp, Homo sapiens
gattcttacatttgc

SEQ ID NO: 1288467 - DNA, 15 bp, Homo sapiens
tgattcttacatttg

SEQ ID NO: 1288468 - DNA, 15 bp, Homo sapiens
gtgattcttacattt

SEQ ID NO: 1288469 - DNA, 15 bp, Homo sapiens
ggtgattcttacatt

SEQ ID NO: 1288470 - DNA, 15 bp, Homo sapiens
cggtgattcttacat

SEQ ID NO: 1288471 - DNA, 15 bp, Homo sapiens
acggtgattcttaca

SEQ ID NO: 1288472 - DNA, 15 bp, Homo sapiens
tacggtgattcttac

SEQ ID NO: 1288473 - DNA, 15 bp, Homo sapiens
ctacggtgattctta

SEQ ID NO: 1288474 - DNA, 15 bp, Homo sapiens
gctacggtgattctt

SEQ ID NO: 1288475 - DNA, 15 bp, Homo sapiens
tgctacggtgattct

SEQ ID NO: 1288476 - DNA, 15 bp, Homo sapiens
atgctacggtgattc

SEQ ID NO: 1288477 - DNA, 15 bp, Homo sapiens
aatgctacggtgatt

SEQ ID NO: 1288478 - DNA, 15 bp, Homo sapiens
gaatgctacggtgat

SEQ ID NO: 1288479 - DNA, 15 bp, Homo sapiens
tgaatgctacggtga

SEQ ID NO: 1288480 - DNA, 15 bp, Homo sapiens
atgaatgctacggtg

SEQ ID NO: 1288481 - DNA, 15 bp, Homo sapiens
gatgaatgctacggt

SEQ ID NO: 1288482 - DNA, 15 bp, Homo sapiens
agatgaatgctacgg

SEQ ID NO: 1288483 - DNA, 15 bp, Homo sapiens
tagatgaatgctacg

SEQ ID NO: 1288484 - DNA, 15 bp, Homo sapiens
atagatgaatgctac

SEQ ID NO: 1288485 - DNA, 15 bp, Homo sapiens
gatagatgaatgcta

SEQ ID NO: 1288486 - DNA, 15 bp, Homo sapiens
ggatagatgaatgct

SEQ ID NO: 1288487 - DNA, 15 bp, Homo sapiens
aggatagatgaatgc

SEQ ID NO: 1288488 - DNA, 15 bp, Homo sapiens
aaggatagatgaatg

SEQ ID NO: 1288489 - DNA, 15 bp, Homo sapiens
caaggatagatgaat

SEQ ID NO: 1288490 - DNA, 15 bp, Homo sapiens
acaaggatagatgaa

SEQ ID NO: 1288491 - DNA, 15 bp, Homo sapiens
cacaaggatagatga

SEQ ID NO: 1288492 - DNA, 15 bp, Homo sapiens
tcacaaggatagatg

SEQ ID NO: 1288493 - DNA, 15 bp, Homo sapiens
gtcacaaggatagat

SEQ ID NO: 1288494 - DNA, 15 bp, Homo sapiens
agtcacaaggataga

SEQ ID NO: 1288495 - DNA, 15 bp, Homo sapiens
gagtcacaaggatag

SEQ ID NO: 1288496 - DNA, 15 bp, Homo sapiens
tgagtcacaaggata

SEQ ID NO: 1288497 - DNA, 15 bp, Homo sapiens
gtgagtcacaaggat

SEQ ID NO: 1288498 - DNA, 15 bp, Homo sapiens
agtgagtcacaagga

SEQ ID NO: 1288499 - DNA, 15 bp, Homo sapiens
tagtgagtcacaagg

SEQ ID NO: 1288500 - DNA, 15 bp, Homo sapiens
ctagtgagtcacaag

SEQ ID NO: 1288501 - DNA, 15 bp, Homo sapiens
cctagtgagtcacaa

SEQ ID NO: 1288502 - DNA, 15 bp, Homo sapiens
ccctagtgagtcaca

SEQ ID NO: 1288503 - DNA, 15 bp, Homo sapiens
gccctagtgagtcac

SEQ ID NO: 1288504 - DNA, 15 bp, Homo sapiens
agccctagtgagtca

SEQ ID NO: 1288505 - DNA, 15 bp, Homo sapiens
cagccctagtgagtc

SEQ ID NO: 1288506 - DNA, 15 bp, Homo sapiens
acagccctagtgagt

SEQ ID NO: 1288507 - DNA, 15 bp, Homo sapiens
aacagccctagtgag

SEQ ID NO: 1288508 - DNA, 15 bp, Homo sapiens
aaacagccctagtga

SEQ ID NO: 1288509 - DNA, 15 bp, Homo sapiens
caaacagccctagtg

SEQ ID NO: 1288510 - DNA, 15 bp, Homo sapiens
acaaacagccctagt

SEQ ID NO: 1288511 - DNA, 15 bp, Homo sapiens
cacaaacagccctag

SEQ ID NO: 1288512 - DNA, 15 bp, Homo sapiens
acacaaacagcccta

SEQ ID NO: 1288513 - DNA, 15 bp, Homo sapiens
aacacaaacagccct

SEQ ID NO: 1288514 - DNA, 15 bp, Homo sapiens
aaacacaaacagccc

SEQ ID NO: 1288515 - DNA, 15 bp, Homo sapiens
caaacacaaacagcc

SEQ ID NO: 1288516 - DNA, 15 bp, Homo sapiens
ccaaacacaaacagc

SEQ ID NO: 1288517 - DNA, 15 bp, Homo sapiens
tccaaacacaaacag

SEQ ID NO: 1288518 - DNA, 15 bp, Homo sapiens
ctccaaacacaaaca

SEQ ID NO: 1288519 - DNA, 15 bp, Homo sapiens
gctccaaacacaaac

SEQ ID NO: 1288520 - DNA, 15 bp, Homo sapiens
tgctccaaacacaaa

SEQ ID NO: 1288521 - DNA, 15 bp, Homo sapiens
atgctccaaacacaa

SEQ ID NO: 1288522 - DNA, 15 bp, Homo sapiens
aatgctccaaacaca

SEQ ID NO: 1288523 - DNA, 15 bp, Homo sapiens
gaatgctccaaacac

SEQ ID NO: 1288524 - DNA, 15 bp, Homo sapiens
ggaatgctccaaaca

SEQ ID NO: 1288525 - DNA, 15 bp, Homo sapiens
aggaatgctccaaac

SEQ ID NO: 1288526 - DNA, 15 bp, Homo sapiens
caggaatgctccaaa

SEQ ID NO: 1288527 - DNA, 15 bp, Homo sapiens
ccaggaatgctccaa

SEQ ID NO: 1288528 - DNA, 15 bp, Homo sapiens
accaggaatgctcca

SEQ ID NO: 1288529 - DNA, 15 bp, Homo sapiens
caccaggaatgctcc

SEQ ID NO: 1288530 - DNA, 15 bp, Homo sapiens
gcaccaggaatgctc

SEQ ID NO: 1288531 - DNA, 15 bp, Homo sapiens
tgcaccaggaatgct

SEQ ID NO: 1288532 - DNA, 15 bp, Homo sapiens
gtgcaccaggaatgc

SEQ ID NO: 1288533 - DNA, 15 bp, Homo sapiens
tgtgcaccaggaatg

SEQ ID NO: 1288534 - DNA, 15 bp, Homo sapiens
ctgtgcaccaggaat

SEQ ID NO: 1288535 - DNA, 15 bp, Homo sapiens
tctgtgcaccaggaa

SEQ ID NO: 1288536 - DNA, 15 bp, Homo sapiens
atctgtgcaccagga

SEQ ID NO: 1288537 - DNA, 15 bp, Homo sapiens
catctgtgcaccagg

SEQ ID NO: 1288538 - DNA, 15 bp, Homo sapiens
tcatctgtgcaccag

SEQ ID NO: 1288539 - DNA, 15 bp, Homo sapiens
atcatctgtgcacca

SEQ ID NO: 1288540 - DNA, 15 bp, Homo sapiens
catcatctgtgcacc

SEQ ID NO: 1288541 - DNA, 15 bp, Homo sapiens
acatcatctgtgcac

SEQ ID NO: 1288542 - DNA, 15 bp, Homo sapiens
cacatcatctgtgca

SEQ ID NO: 1288543 - DNA, 15 bp, Homo sapiens
acacatcatctgtgc

SEQ ID NO: 1288544 - DNA, 15 bp, Homo sapiens
aacacatcatctgtg

SEQ ID NO: 1288545 - DNA, 15 bp, Homo sapiens
caacacatcatctgt

SEQ ID NO: 1288546 - DNA, 15 bp, Homo sapiens
tcaacacatcatctg

SEQ ID NO: 1288547 - DNA, 15 bp, Homo sapiens
atcaacacatcatct

SEQ ID NO: 1288548 - DNA, 15 bp, Homo sapiens
catcaacacatcatc

SEQ ID NO: 1288549 - DNA, 15 bp, Homo sapiens
ccatcaacacatcat

SEQ ID NO: 1288550 - DNA, 15 bp, Homo sapiens
tccatcaacacatca

SEQ ID NO: 1288551 - DNA, 15 bp, Homo sapiens
gtccatcaacacatc

SEQ ID NO: 1288552 - DNA, 15 bp, Homo sapiens
agtccatcaacacat

SEQ ID NO: 1288553 - DNA, 15 bp, Homo sapiens
aagtccatcaacaca

SEQ ID NO: 1288554 - DNA, 15 bp, Homo sapiens
caagtccatcaacac

SEQ ID NO: 1288555 - DNA, 15 bp, Homo sapiens
ccaagtccatcaaca

SEQ ID NO: 1288556 - DNA, 15 bp, Homo sapiens
tccaagtccatcaac

SEQ ID NO: 1288557 - DNA, 15 bp, Homo sapiens
gtccaagtccatcaa

SEQ ID NO: 1288558 - DNA, 15 bp, Homo sapiens
tgtccaagtccatca

SEQ ID NO: 1288559 - DNA, 15 bp, Homo sapiens
gtgtccaagtccatc

SEQ ID NO: 1288560 - DNA, 15 bp, Homo sapiens
tgtgtccaagtccat

SEQ ID NO: 1288561 - DNA, 15 bp, Homo sapiens
ctgtgtccaagtcca

SEQ ID NO: 1288562 - DNA, 15 bp, Homo sapiens
actgtgtccaagtcc

SEQ ID NO: 1288563 - DNA, 15 bp, Homo sapiens
gactgtgtccaagtc

SEQ ID NO: 1288564 - DNA, 15 bp, Homo sapiens
agactgtgtccaagt

SEQ ID NO: 1288565 - DNA, 15 bp, Homo sapiens
cagactgtgtccaag

SEQ ID NO: 1288566 - DNA, 15 bp, Homo sapiens
acagactgtgtccaa

SEQ ID NO: 1288567 - DNA, 15 bp, Homo sapiens
aacagactgtgtcca

SEQ ID NO: 1288568 - DNA, 15 bp, Homo sapiens
gaacagactgtgtcc

SEQ ID NO: 1288569 - DNA, 15 bp, Homo sapiens
agaacagactgtgtc

SEQ ID NO: 1288570 - DNA, 15 bp, Homo sapiens
gagaacagactgtgt

SEQ ID NO: 1288571 - DNA, 15 bp, Homo sapiens
agagaacagactgtg

SEQ ID NO: 1288572 - DNA, 15 bp, Homo sapiens
aagagaacagactgt

SEQ ID NO: 1288573 - DNA, 15 bp, Homo sapiens
gaagagaacagactg

SEQ ID NO: 1288574 - DNA, 15 bp, Homo sapiens
ggaagagaacagact

SEQ ID NO: 1288575 - DNA, 15 bp, Homo sapiens
gggaagagaacagac

SEQ ID NO: 1288576 - DNA, 15 bp, Homo sapiens
ggggaagagaacaga

SEQ ID NO: 1288577 - DNA, 15 bp, Homo sapiens
aggggaagagaacag

SEQ ID NO: 1288578 - DNA, 15 bp, Homo sapiens
gaggggaagagaaca

SEQ ID NO: 1288579 - DNA, 15 bp, Homo sapiens
agaggggaagagaac

SEQ ID NO: 1288580 - DNA, 15 bp, Homo sapiens
gagaggggaagagaa

SEQ ID NO: 1288581 - DNA, 15 bp, Homo sapiens
tgagaggggaagaga

SEQ ID NO: 1288582 - DNA, 15 bp, Homo sapiens
ctgagaggggaagag

SEQ ID NO: 1288583 - DNA, 15 bp, Homo sapiens
actgagaggggaaga

SEQ ID NO: 1288584 - DNA, 15 bp, Homo sapiens
gactgagaggggaag

SEQ ID NO: 1288585 - DNA, 15 bp, Homo sapiens
tgactgagaggggaa

SEQ ID NO: 1288586 - DNA, 15 bp, Homo sapiens
atgactgagagggga

SEQ ID NO: 1288587 - DNA, 15 bp, Homo sapiens
catgactgagagggg

SEQ ID NO: 1288588 - DNA, 15 bp, Homo sapiens
tcatgactgagaggg

SEQ ID NO: 1288589 - DNA, 15 bp, Homo sapiens
ctcatgactgagagg

SEQ ID NO: 1288590 - DNA, 15 bp, Homo sapiens
gctcatgactgagag

SEQ ID NO: 1288591 - DNA, 15 bp, Homo sapiens
tgctcatgactgaga

SEQ ID NO: 1288592 - DNA, 15 bp, Homo sapiens
ctgctcatgactgag

SEQ ID NO: 1288593 - DNA, 15 bp, Homo sapiens
tctgctcatgactga

SEQ ID NO: 1288594 - DNA, 15 bp, Homo sapiens
ctctgctcatgactg

SEQ ID NO: 1288595 - DNA, 15 bp, Homo sapiens
gctctgctcatgact

SEQ ID NO: 1288596 - DNA, 15 bp, Homo sapiens
cgctctgctcatgac

SEQ ID NO: 1288597 - DNA, 15 bp, Homo sapiens
acgctctgctcatga

SEQ ID NO: 1288598 - DNA, 15 bp, Homo sapiens
aacgctctgctcatg

SEQ ID NO: 1288599 - DNA, 15 bp, Homo sapiens
gaacgctctgctcat

SEQ ID NO: 1288600 - DNA, 15 bp, Homo sapiens
tgaacgctctgctca

SEQ ID NO: 1288601 - DNA, 15 bp, Homo sapiens
atgaacgctctgctc

SEQ ID NO: 1288602 - DNA, 15 bp, Homo sapiens
gatgaacgctctgct

SEQ ID NO: 1288603 - DNA, 15 bp, Homo sapiens
agatgaacgctctgc

SEQ ID NO: 1288604 - DNA, 15 bp, Homo sapiens
cagatgaacgctctg

SEQ ID NO: 1288605 - DNA, 15 bp, Homo sapiens
gcagatgaacgctct

SEQ ID NO: 1288606 - DNA, 15 bp, Homo sapiens
agcagatgaacgctc

SEQ ID NO: 1288607 - DNA, 15 bp, Homo sapiens
gagcagatgaacgct

SEQ ID NO: 1288608 - DNA, 15 bp, Homo sapiens
tgagcagatgaacgc

SEQ ID NO: 1288609 - DNA, 15 bp, Homo sapiens
ctgagcagatgaacg

SEQ ID NO: 1288610 - DNA, 15 bp, Homo sapiens
actgagcagatgaac

SEQ ID NO: 1288611 - DNA, 15 bp, Homo sapiens
cactgagcagatgaa

SEQ ID NO: 1288612 - DNA, 15 bp, Homo sapiens
gcactgagcagatga

SEQ ID NO: 1288613 - DNA, 15 bp, Homo sapiens
agcactgagcagatg

SEQ ID NO: 1288614 - DNA, 15 bp, Homo sapiens
aagcactgagcagat

SEQ ID NO: 1288615 - DNA, 15 bp, Homo sapiens
gaagcactgagcaga

SEQ ID NO: 1288616 - DNA, 15 bp, Homo sapiens
agaagcactgagcag

SEQ ID NO: 1288617 - DNA, 15 bp, Homo sapiens
aagaagcactgagca

SEQ ID NO: 1288618 - DNA, 15 bp, Homo sapiens
aaagaagcactgagc

SEQ ID NO: 1288619 - DNA, 15 bp, Homo sapiens
aaaagaagcactgag

SEQ ID NO: 1288620 - DNA, 15 bp, Homo sapiens
aaaaagaagcactga

SEQ ID NO: 1288621 - DNA, 15 bp, Homo sapiens
taaaaagaagcactg

SEQ ID NO: 1288622 - DNA, 15 bp, Homo sapiens
ttaaaaagaagcact

SEQ ID NO: 1288623 - DNA, 15 bp, Homo sapiens
attaaaaagaagcac

SEQ ID NO: 1288624 - DNA, 15 bp, Homo sapiens
tattaaaaagaagca

SEQ ID NO: 1288625 - DNA, 15 bp, Homo sapiens
ttattaaaaagaagc

SEQ ID NO: 1288626 - DNA, 15 bp, Homo sapiens
cttattaaaaagaag

SEQ ID NO: 1288627 - DNA, 15 bp, Homo sapiens
acttattaaaaagaa

SEQ ID NO: 1288628 - DNA, 15 bp, Homo sapiens
tacttattaaaaaga

SEQ ID NO: 1288629 - DNA, 15 bp, Homo sapiens
ctacttattaaaaag

SEQ ID NO: 1288630 - DNA, 15 bp, Homo sapiens
actacttattaaaaa

SEQ ID NO: 1288631 - DNA, 15 bp, Homo sapiens
aactacttattaaaa

SEQ ID NO: 1288632 - DNA, 15 bp, Homo sapiens
gaactacttattaaa

SEQ ID NO: 1288633 - DNA, 15 bp, Homo sapiens
tgaactacttattaa

SEQ ID NO: 1288634 - DNA, 15 bp, Homo sapiens
ctgaactacttatta

SEQ ID NO: 1288635 - DNA, 15 bp, Homo sapiens
cctgaactacttatt

SEQ ID NO: 1288636 - DNA, 15 bp, Homo sapiens
ccctgaactacttat

SEQ ID NO: 1288637 - DNA, 15 bp, Homo sapiens
cccctgaactactta

SEQ ID NO: 1288638 - DNA, 15 bp, Homo sapiens
acccctgaactactt

SEQ ID NO: 1288639 - DNA, 15 bp, Homo sapiens
aacccctgaactact

SEQ ID NO: 1288640 - DNA, 15 bp, Homo sapiens
caacccctgaactac

SEQ ID NO: 1288641 - DNA, 15 bp, Homo sapiens
tcaacccctgaacta

SEQ ID NO: 1288642 - DNA, 15 bp, Homo sapiens
gtcaacccctgaact

SEQ ID NO: 1288643 - DNA, 15 bp, Homo sapiens
agtcaacccctgaac

SEQ ID NO: 1288644 - DNA, 15 bp, Homo sapiens
cagtcaacccctgaa

SEQ ID NO: 1288645 - DNA, 15 bp, Homo sapiens
gcagtcaacccctga

SEQ ID NO: 1288646 - DNA, 15 bp, Homo sapiens
tgcagtcaacccctg

SEQ ID NO: 1288647 - DNA, 15 bp, Homo sapiens
ctgcagtcaacccct

SEQ ID NO: 1288648 - DNA, 15 bp, Homo sapiens
gctgcagtcaacccc

SEQ ID NO: 1288649 - DNA, 15 bp, Homo sapiens
agctgcagtcaaccc

SEQ ID NO: 1288650 - DNA, 15 bp, Homo sapiens
gagctgcagtcaacc

SEQ ID NO: 1288651 - DNA, 15 bp, Homo sapiens
tgagctgcagtcaac

SEQ ID NO: 1288652 - DNA, 15 bp, Homo sapiens
ctgagctgcagtcaa

SEQ ID NO: 1288653 - DNA, 15 bp, Homo sapiens
gctgagctgcagtca

SEQ ID NO: 1288654 - DNA, 15 bp, Homo sapiens
agctgagctgcagtc

SEQ ID NO: 1288655 - DNA, 15 bp, Homo sapiens
gagctgagctgcagt

SEQ ID NO: 1288656 - DNA, 15 bp, Homo sapiens
agagctgagctgcag

SEQ ID NO: 1288657 - DNA, 15 bp, Homo sapiens
cagagctgagctgca

SEQ ID NO: 1288658 - DNA, 15 bp, Homo sapiens
acagagctgagctgc

SEQ ID NO: 1288659 - DNA, 15 bp, Homo sapiens
aacagagctgagctg

SEQ ID NO: 1288660 - DNA, 15 bp, Homo sapiens
caacagagctgagct

SEQ ID NO: 1288661 - DNA, 15 bp, Homo sapiens
ccaacagagctgagc

SEQ ID NO: 1288662 - DNA, 15 bp, Homo sapiens
cccaacagagctgag

SEQ ID NO: 1288663 - DNA, 15 bp, Homo sapiens
tcccaacagagctga

SEQ ID NO: 1288664 - DNA, 15 bp, Homo sapiens
ttcccaacagagctg

SEQ ID NO: 1288665 - DNA, 15 bp, Homo sapiens
attcccaacagagct

SEQ ID NO: 1288666 - DNA, 15 bp, Homo sapiens
aattcccaacagagc

SEQ ID NO: 1288667 - DNA, 15 bp, Homo sapiens
taattcccaacagag

SEQ ID NO: 1288668 - DNA, 15 bp, Homo sapiens
ttaattcccaacaga

SEQ ID NO: 1288669 - DNA, 15 bp, Homo sapiens
gttaattcccaacag

SEQ ID NO: 1288670 - DNA, 15 bp, Homo sapiens
tgttaattcccaaca

SEQ ID NO: 1288671 - DNA, 15 bp, Homo sapiens
gtgttaattcccaac

SEQ ID NO: 1288672 - DNA, 15 bp, Homo sapiens
tgtgttaattcccaa

SEQ ID NO: 1288673 - DNA, 15 bp, Homo sapiens
ctgtgttaattccca

SEQ ID NO: 1288674 - DNA, 15 bp, Homo sapiens
tctgtgttaattccc

SEQ ID NO: 1288675 - DNA, 15 bp, Homo sapiens
gtctgtgttaattcc

SEQ ID NO: 1288676 - DNA, 15 bp, Homo sapiens
tgtctgtgttaattc

SEQ ID NO: 1288677 - DNA, 15 bp, Homo sapiens
atgtctgtgttaatt

SEQ ID NO: 1288678 - DNA, 15 bp, Homo sapiens
tatgtctgtgttaat

SEQ ID NO: 1288679 - DNA, 15 bp, Homo sapiens
ttatgtctgtgttaa

SEQ ID NO: 1288680 - DNA, 15 bp, Homo sapiens
attatgtctgtgtta

SEQ ID NO: 1288681 - DNA, 15 bp, Homo sapiens
tattatgtctgtgtt

SEQ ID NO: 1288682 - DNA, 15 bp, Homo sapiens
ctattatgtctgtgt

SEQ ID NO: 1288683 - DNA, 15 bp, Homo sapiens
tctattatgtctgtg

SEQ ID NO: 1288684 - DNA, 15 bp, Homo sapiens
gtctattatgtctgt

SEQ ID NO: 1288685 - DNA, 15 bp, Homo sapiens
agtctattatgtctg

SEQ ID NO: 1288686 - DNA, 15 bp, Homo sapiens
aagtctattatgtct

SEQ ID NO: 1288687 - DNA, 15 bp, Homo sapiens
aaagtctattatgtc

SEQ ID NO: 1288688 - DNA, 15 bp, Homo sapiens
aaaagtctattatgt

SEQ ID NO: 1288689 - DNA, 15 bp, Homo sapiens
taaaagtctattatg

SEQ ID NO: 1288690 - DNA, 15 bp, Homo sapiens
ataaaagtctattat

SEQ ID NO: 1288691 - DNA, 15 bp, Homo sapiens
tataaaagtctatta

SEQ ID NO: 1288692 - DNA, 15 bp, Homo sapiens
ttataaaagtctatt

SEQ ID NO: 1288693 - DNA, 15 bp, Homo sapiens
tttataaaagtctat

SEQ ID NO: 1288694 - DNA, 15 bp, Homo sapiens
ttttataaaagtcta

SEQ ID NO: 1288695 - DNA, 15 bp, Homo sapiens
cttttataaaagtct

SEQ ID NO: 1288696 - DNA, 15 bp, Homo sapiens
acttttataaaagtc

SEQ ID NO: 1288697 - DNA, 15 bp, Homo sapiens
cacttttataaaagt

SEQ ID NO: 1288698 - DNA, 15 bp, Homo sapiens
acacttttataaaag

SEQ ID NO: 1288699 - DNA, 15 bp, Homo sapiens
cacacttttataaaa

SEQ ID NO: 1288700 - DNA, 15 bp, Homo sapiens
tcacacttttataaa

SEQ ID NO: 1288701 - DNA, 15 bp, Homo sapiens
gctcacacttttata

SEQ ID NO: 1288702 - DNA, 15 bp, Homo sapiens
tgctcacacttttat

SEQ ID NO: 1288703 - DNA, 15 bp, Homo sapiens
ctgctcacactttta

SEQ ID NO: 1288704 - DNA, 15 bp, Homo sapiens
tctgctcacactttt

SEQ ID NO: 1288705 - DNA, 15 bp, Homo sapiens
ctctgctcacacttt

SEQ ID NO: 1288706 - DNA, 15 bp, Homo sapiens
gctctgctcacactt

SEQ ID NO: 1288707 - DNA, 15 bp, Homo sapiens
tgctctgctcacact

SEQ ID NO: 1288708 - DNA, 15 bp, Homo sapiens
ttgctctgctcacac

SEQ ID NO: 1288709 - DNA, 15 bp, Homo sapiens
gttgctctgctcaca

SEQ ID NO: 1288710 - DNA, 15 bp, Homo sapiens
agttgctctgctcac

SEQ ID NO: 1288711 - DNA, 15 bp, Homo sapiens
tagttgctctgctca

SEQ ID NO: 1288712 - DNA, 15 bp, Homo sapiens
ttagttgctctgctc

SEQ ID NO: 1288713 - DNA, 15 bp, Homo sapiens
cttagttgctctgct

SEQ ID NO: 1288714 - DNA, 15 bp, Homo sapiens
gcttagttgctctgc

SEQ ID NO: 1288715 - DNA, 15 bp, Homo sapiens
ggcttagttgctctg

SEQ ID NO: 1288716 - DNA, 15 bp, Homo sapiens
tggcttagttgctct

SEQ ID NO: 1288717 - DNA, 15 bp, Homo sapiens
ctggcttagttgctc

SEQ ID NO: 1288718 - DNA, 15 bp, Homo sapiens
actggcttagttgct

SEQ ID NO: 1288719 - DNA, 15 bp, Homo sapiens
tactggcttagttgc

SEQ ID NO: 1288720 - DNA, 15 bp, Homo sapiens
gtactggcttagttg

SEQ ID NO: 1288721 - DNA, 15 bp, Homo sapiens
tgtactggcttagtt

SEQ ID NO: 1288722 - DNA, 15 bp, Homo sapiens
ctgtactggcttagt

SEQ ID NO: 1288723 - DNA, 15 bp, Homo sapiens
tctgtactggcttag

SEQ ID NO: 1288724 - DNA, 15 bp, Homo sapiens
gtctgtactggctta

SEQ ID NO: 1288725 - DNA, 15 bp, Homo sapiens
agtctgtactggctt

SEQ ID NO: 1288726 - DNA, 15 bp, Homo sapiens
gagtctgtactggct

SEQ ID NO: 1288727 - DNA, 15 bp, Homo sapiens
agagtctgtactggc

SEQ ID NO: 1288728 - DNA, 15 bp, Homo sapiens
aagagtctgtactgg

SEQ ID NO: 1288729 - DNA, 15 bp, Homo sapiens
aaagagtctgtactg

SEQ ID NO: 1288730 - DNA, 15 bp, Homo sapiens
caaagagtctgtact

SEQ ID NO: 1288731 - DNA, 15 bp, Homo sapiens
gcaaagagtctgtac

SEQ ID NO: 1288732 - DNA, 15 bp, Homo sapiens
ggcaaagagtctgta

SEQ ID NO: 1288733 - DNA, 15 bp, Homo sapiens
tggcaaagagtctgt

SEQ ID NO: 1288734 - DNA, 15 bp, Homo sapiens
gtggcaaagagtctg

SEQ ID NO: 1288735 - DNA, 15 bp, Homo sapiens
tgtggcaaagagtct

SEQ ID NO: 1288736 - DNA, 15 bp, Homo sapiens
atgtggcaaagagtc

SEQ ID NO: 1288737 - DNA, 15 bp, Homo sapiens
gatgtggcaaagagt

SEQ ID NO: 1288738 - DNA, 15 bp, Homo sapiens
ggatgtggcaaagag

SEQ ID NO: 1288739 - DNA, 15 bp, Homo sapiens
aggatgtggcaaaga

SEQ ID NO: 1288740 - DNA, 15 bp, Homo sapiens
caggatgtggcaaag

SEQ ID NO: 1288741 - DNA, 15 bp, Homo sapiens
tcaggatgtggcaaa

SEQ ID NO: 1288742 - DNA, 15 bp, Homo sapiens
gtcaggatgtggcaa

SEQ ID NO: 1288743 - DNA, 15 bp, Homo sapiens
tgtcaggatgtggca

SEQ ID NO: 1288744 - DNA, 15 bp, Homo sapiens
atgtcaggatgtggc

SEQ ID NO: 1288745 - DNA, 15 bp, Homo sapiens
catgtcaggatgtgg

SEQ ID NO: 1288746 - DNA, 15 bp, Homo sapiens
gcatgtcaggatgtg

SEQ ID NO: 1288747 - DNA, 15 bp, Homo sapiens
agcatgtcaggatgt

SEQ ID NO: 1288748 - DNA, 15 bp, Homo sapiens
tagcatgtcaggatg

SEQ ID NO: 1288749 - DNA, 15 bp, Homo sapiens
ttagcatgtcaggat

SEQ ID NO: 1288750 - DNA, 15 bp, Homo sapiens
cttagcatgtcagga

SEQ ID NO: 1288751 - DNA, 15 bp, Homo sapiens
tcttagcatgtcagg

SEQ ID NO: 1288752 - DNA, 15 bp, Homo sapiens
ctcttagcatgtcag

SEQ ID NO: 1288753 - DNA, 15 bp, Homo sapiens
tctcttagcatgtca

SEQ ID NO: 1288754 - DNA, 15 bp, Homo sapiens
ctctcttagcatgtc

SEQ ID NO: 1288755 - DNA, 15 bp, Homo sapiens
tctctcttagcatgt

SEQ ID NO: 1288756 - DNA, 15 bp, Homo sapiens
ctctctcttagcatg

SEQ ID NO: 1288757 - DNA, 15 bp, Homo sapiens
cctctctcttagcat

SEQ ID NO: 1288758 - DNA, 15 bp, Homo sapiens
acctctctcttagca

SEQ ID NO: 1288759 - DNA, 15 bp, Homo sapiens
gacctctctcttagc

SEQ ID NO: 1288760 - DNA, 15 bp, Homo sapiens
ggacctctctcttag

SEQ ID NO: 1288761 - DNA, 15 bp, Homo sapiens
gggacctctctctta

SEQ ID NO: 1288762 - DNA, 15 bp, Homo sapiens
actcacactacacac

SEQ ID NO: 1288763 - DNA, 15 bp, Homo sapiens
aactcacactacaca

SEQ ID NO: 1288764 - DNA, 15 bp, Homo sapiens
caactcacactacac

SEQ ID NO: 1288765 - DNA, 15 bp, Homo sapiens
gcaactcacactaca

SEQ ID NO: 1288766 - DNA, 15 bp, Homo sapiens
tgcaactcacactac

SEQ ID NO: 1288767 - DNA, 15 bp, Homo sapiens
atgcaactcacacta

SEQ ID NO: 1288768 - DNA, 15 bp, Homo sapiens
aatgcaactcacact

SEQ ID NO: 1288769 - DNA, 15 bp, Homo sapiens
caatgcaactcacac

SEQ ID NO: 1288770 - DNA, 15 bp, Homo sapiens
acaatgcaactcaca

SEQ ID NO: 1288771 - DNA, 15 bp, Homo sapiens
cacaatgcaactcac

SEQ ID NO: 1288772 - DNA, 15 bp, Homo sapiens
acacaatgcaactca

SEQ ID NO: 1288773 - DNA, 15 bp, Homo sapiens
cacacaatgcaactc

SEQ ID NO: 1288774 - DNA, 15 bp, Homo sapiens
acacacaatgcaact

SEQ ID NO: 1288775 - DNA, 15 bp, Homo sapiens
cacacacaatgcaac

SEQ ID NO: 1288776 - DNA, 15 bp, Homo sapiens
ccacacacaatgcaa

SEQ ID NO: 1288777 - DNA, 15 bp, Homo sapiens
accacacacaatgca

SEQ ID NO: 1288778 - DNA, 15 bp, Homo sapiens
caccacacacaatgc

SEQ ID NO: 1288779 - DNA, 15 bp, Homo sapiens
gcaccacacacaatg

SEQ ID NO: 1288780 - DNA, 15 bp, Homo sapiens
agcaccacacacaat

SEQ ID NO: 1288781 - DNA, 15 bp, Homo sapiens
aagcaccacacacaa

SEQ ID NO: 1288782 - DNA, 15 bp, Homo sapiens
caagcaccacacaca

SEQ ID NO: 1288783 - DNA, 15 bp, Homo sapiens
ccaagcaccacacac

SEQ ID NO: 1288784 - DNA, 15 bp, Homo sapiens
accaagcaccacaca

SEQ ID NO: 1288785 - DNA, 15 bp, Homo sapiens
caccaagcaccacac

SEQ ID NO: 1288786 - DNA, 15 bp, Homo sapiens
acaccaagcaccaca

SEQ ID NO: 1288787 - DNA, 15 bp, Homo sapiens
cacaccaagcaccac

SEQ ID NO: 1288788 - DNA, 15 bp, Homo sapiens
acacaccaagcacca

SEQ ID NO: 1288789 - DNA, 15 bp, Homo sapiens
cacacaccaagcacc

SEQ ID NO: 1288790 - DNA, 15 bp, Homo sapiens
acacacaccaagcac

SEQ ID NO: 1288791 - DNA, 15 bp, Homo sapiens
tacacacaccaagca

SEQ ID NO: 1288792 - DNA, 15 bp, Homo sapiens
atacacacaccaagc

SEQ ID NO: 1288793 - DNA, 15 bp, Homo sapiens
catacacacaccaag

SEQ ID NO: 1288794 - DNA, 15 bp, Homo sapiens
acatacacacaccaa

SEQ ID NO: 1288795 - DNA, 15 bp, Homo sapiens
taacacacatcacac

SEQ ID NO: 1288796 - DNA, 15 bp, Homo sapiens
ataacacacatcaca

SEQ ID NO: 1288797 - DNA, 15 bp, Homo sapiens
cataacacacatcac

SEQ ID NO: 1288798 - DNA, 15 bp, Homo sapiens
acataacacacatca

SEQ ID NO: 1288799 - DNA, 15 bp, Homo sapiens
cacataacacacatc

SEQ ID NO: 1288800 - DNA, 15 bp, Homo sapiens
ccacataacacacat

SEQ ID NO: 1288801 - DNA, 15 bp, Homo sapiens
accacataacacaca

SEQ ID NO: 1288802 - DNA, 15 bp, Homo sapiens
caccacataacacac

SEQ ID NO: 1288803 - DNA, 15 bp, Homo sapiens
acaccacataacaca

SEQ ID NO: 1288804 - DNA, 15 bp, Homo sapiens
cacaccacataacac

SEQ ID NO: 1288805 - DNA, 15 bp, Homo sapiens
acacaccacataaca

SEQ ID NO: 1288806 - DNA, 15 bp, Homo sapiens
cacacaccacataac

SEQ ID NO: 1288807 - DNA, 15 bp, Homo sapiens
ccacacacaccacat

SEQ ID NO: 1288808 - DNA, 15 bp, Homo sapiens
accacacacaccaca

SEQ ID NO: 1288809 - DNA, 15 bp, Homo sapiens
taccacacacaccac

SEQ ID NO: 1288810 - DNA, 15 bp, Homo sapiens
ttaccacacacacca

SEQ ID NO: 1288811 - DNA, 15 bp, Homo sapiens
cttaccacacacacc

SEQ ID NO: 1288812 - DNA, 15 bp, Homo sapiens
acttaccacacacac

SEQ ID NO: 1288813 - DNA, 15 bp, Homo sapiens
tacttaccacacaca

SEQ ID NO: 1288814 - DNA, 15 bp, Homo sapiens
ctacttaccacacac

SEQ ID NO: 1288815 - DNA, 15 bp, Homo sapiens
actacttaccacaca

SEQ ID NO: 1288816 - DNA, 15 bp, Homo sapiens
cactacttaccacac

SEQ ID NO: 1288817 - DNA, 15 bp, Homo sapiens
acactacttaccaca

SEQ ID NO: 1288818 - DNA, 15 bp, Homo sapiens
cacactacttaccac

SEQ ID NO: 1288819 - DNA, 15 bp, Homo sapiens
acacactacttacca

SEQ ID NO: 1288820 - DNA, 15 bp, Homo sapiens
cacacactacttacc

SEQ ID NO: 1288821 - DNA, 15 bp, Homo sapiens
acacacactacttac

SEQ ID NO: 1288822 - DNA, 15 bp, Homo sapiens
aacacacactactta

SEQ ID NO: 1288823 - DNA, 15 bp, Homo sapiens
caacacacactactt

SEQ ID NO: 1288824 - DNA, 15 bp, Homo sapiens
acaacacacactact

SEQ ID NO: 1288825 - DNA, 15 bp, Homo sapiens
cacaacacacactac

SEQ ID NO: 1288826 - DNA, 15 bp, Homo sapiens
acacaacacacacta

SEQ ID NO: 1288827 - DNA, 15 bp, Homo sapiens
aacacaacacacact

SEQ ID NO: 1288828 - DNA, 15 bp, Homo sapiens
taacacaacacacac

SEQ ID NO: 1288829 - DNA, 15 bp, Homo sapiens
gtaacacaacacaca

SEQ ID NO: 1288830 - DNA, 15 bp, Homo sapiens
tgtaacacaacacac

SEQ ID NO: 1288831 - DNA, 15 bp, Homo sapiens
atgtaacacaacaca

SEQ ID NO: 1288832 - DNA, 15 bp, Homo sapiens
catgtaacacaacac

SEQ ID NO: 1288833 - DNA, 15 bp, Homo sapiens
acatgtaacacaaca

SEQ ID NO: 1288834 - DNA, 15 bp, Homo sapiens
cacatgtaacacaac

SEQ ID NO: 1288835 - DNA, 15 bp, Homo sapiens
acacatgtaacacaa

SEQ ID NO: 1288836 - DNA, 15 bp, Homo sapiens
aacacatgtaacaca

SEQ ID NO: 1288837 - DNA, 15 bp, Homo sapiens
caacacatgtaacac

SEQ ID NO: 1288838 - DNA, 15 bp, Homo sapiens
acaacacatgtaaca

SEQ ID NO: 1288839 - DNA, 15 bp, Homo sapiens
cacaacacatgtaac

SEQ ID NO: 1288840 - DNA, 15 bp, Homo sapiens
acacaacacatgtaa

SEQ ID NO: 1288841 - DNA, 15 bp, Homo sapiens
aacacaacacatgta

SEQ ID NO: 1288842 - DNA, 15 bp, Homo sapiens
caacacaacacatgt

SEQ ID NO: 1288843 - DNA, 15 bp, Homo sapiens
acaacacaacacatg

SEQ ID NO: 1288844 - DNA, 15 bp, Homo sapiens
cacaacacaacacat

SEQ ID NO: 1288845 - DNA, 15 bp, Homo sapiens
acacaacacaacaca

SEQ ID NO: 1288846 - DNA, 15 bp, Homo sapiens
cacacaacacaacac

SEQ ID NO: 1288847 - DNA, 15 bp, Homo sapiens
acacacaacacaaca

SEQ ID NO: 1288848 - DNA, 15 bp, Homo sapiens
cacacacaacacaac

SEQ ID NO: 1288849 - DNA, 15 bp, Homo sapiens
acacacacaacacaa

SEQ ID NO: 1288850 - DNA, 15 bp, Homo sapiens
tacacacacaacaca

SEQ ID NO: 1288851 - DNA, 15 bp, Homo sapiens
ctacacacacaacac

SEQ ID NO: 1288852 - DNA, 15 bp, Homo sapiens
actacacacacaaca

SEQ ID NO: 1288853 - DNA, 15 bp, Homo sapiens
cactacacacacaac

SEQ ID NO: 1288854 - DNA, 15 bp, Homo sapiens
acactacacacacaa

SEQ ID NO: 1288855 - DNA, 15 bp, Homo sapiens
acaactcacactaca

SEQ ID NO: 1288856 - DNA, 15 bp, Homo sapiens
cacaactcacactac

SEQ ID NO: 1288857 - DNA, 15 bp, Homo sapiens
acacaactcacacta

SEQ ID NO: 1288858 - DNA, 15 bp, Homo sapiens
cacacaactcacact

SEQ ID NO: 1288859 - DNA, 15 bp, Homo sapiens
acacacaactcacac

SEQ ID NO: 1288860 - DNA, 15 bp, Homo sapiens
cacacacaactcaca

SEQ ID NO: 1288861 - DNA, 15 bp, Homo sapiens
ccacacacaactcac

SEQ ID NO: 1288862 - DNA, 15 bp, Homo sapiens
accacacacaactca

SEQ ID NO: 1288863 - DNA, 15 bp, Homo sapiens
caccacacacaactc

SEQ ID NO: 1288864 - DNA, 15 bp, Homo sapiens
acaccacacacaact

SEQ ID NO: 1288865 - DNA, 15 bp, Homo sapiens
cacaccacacacaac

SEQ ID NO: 1288866 - DNA, 15 bp, Homo sapiens
gcacaccacacacaa

SEQ ID NO: 1288867 - DNA, 15 bp, Homo sapiens
tgcacaccacacaca

SEQ ID NO: 1288868 - DNA, 15 bp, Homo sapiens
gtgcacaccacacac

SEQ ID NO: 1288869 - DNA, 15 bp, Homo sapiens
agtgcacaccacaca

SEQ ID NO: 1288870 - DNA, 15 bp, Homo sapiens
cagtgcacaccacac

SEQ ID NO: 1288871 - DNA, 15 bp, Homo sapiens
acagtgcacaccaca

SEQ ID NO: 1288872 - DNA, 15 bp, Homo sapiens
cacagtgcacaccac

SEQ ID NO: 1288873 - DNA, 15 bp, Homo sapiens
acacagtgcacacca

SEQ ID NO: 1288874 - DNA, 15 bp, Homo sapiens
tacacagtgcacacc

SEQ ID NO: 1288875 - DNA, 15 bp, Homo sapiens
ctacacagtgcacac

SEQ ID NO: 1288876 - DNA, 15 bp, Homo sapiens
actacacagtgcaca

SEQ ID NO: 1288877 - DNA, 15 bp, Homo sapiens
cactacacagtgcac

SEQ ID NO: 1288878 - DNA, 15 bp, Homo sapiens
acactacacagtgca

SEQ ID NO: 1288879 - DNA, 15 bp, Homo sapiens
cacactacacagtgc

SEQ ID NO: 1288880 - DNA, 15 bp, Homo sapiens
acacactacacagtg

SEQ ID NO: 1288881 - DNA, 15 bp, Homo sapiens
cacacactacacagt

SEQ ID NO: 1288882 - DNA, 15 bp, Homo sapiens
acacacactacacag

SEQ ID NO: 1288883 - DNA, 15 bp, Homo sapiens
aacacacactacaca

SEQ ID NO: 1288884 - DNA, 15 bp, Homo sapiens
caacacacactacac

SEQ ID NO: 1288885 - DNA, 15 bp, Homo sapiens
acaacacacactaca

SEQ ID NO: 1288886 - DNA, 15 bp, Homo sapiens
cacacatgtaacaca

SEQ ID NO: 1288887 - DNA, 15 bp, Homo sapiens
ccacacatgtaacac

SEQ ID NO: 1288888 - DNA, 15 bp, Homo sapiens
accacacatgtaaca

SEQ ID NO: 1288889 - DNA, 15 bp, Homo sapiens
caccacacatgtaac

SEQ ID NO: 1288890 - DNA, 15 bp, Homo sapiens
acaccacacatgtaa

SEQ ID NO: 1288891 - DNA, 15 bp, Homo sapiens
cacaccacacatgta

SEQ ID NO: 1288892 - DNA, 15 bp, Homo sapiens
acacaccacacatgt

SEQ ID NO: 1288893 - DNA, 15 bp, Homo sapiens
tacacaccacacatg

SEQ ID NO: 1288894 - DNA, 15 bp, Homo sapiens
atacacaccacacat

SEQ ID NO: 1288895 - DNA, 15 bp, Homo sapiens
aatacacaccacaca

SEQ ID NO: 1288896 - DNA, 15 bp, Homo sapiens
caatacacaccacac

SEQ ID NO: 1288897 - DNA, 15 bp, Homo sapiens
acaatacacaccaca

SEQ ID NO: 1288898 - DNA, 15 bp, Homo sapiens
cacaatacacaccac

SEQ ID NO: 1288899 - DNA, 15 bp, Homo sapiens
acacaatacacacca

SEQ ID NO: 1288900 - DNA, 15 bp, Homo sapiens
cacacaatacacacc

SEQ ID NO: 1288901 - DNA, 15 bp, Homo sapiens
aacacacaatacaca

SEQ ID NO: 1288902 - DNA, 15 bp, Homo sapiens
caacacacaatacac

SEQ ID NO: 1288903 - DNA, 15 bp, Homo sapiens
acaacacacaataca

SEQ ID NO: 1288904 - DNA, 15 bp, Homo sapiens
tacaacacacaatac

SEQ ID NO: 1288905 - DNA, 15 bp, Homo sapiens
atacaacacacaata

SEQ ID NO: 1288906 - DNA, 15 bp, Homo sapiens
catacaacacacaat

SEQ ID NO: 1288907 - DNA, 15 bp, Homo sapiens
acatacaacacacaa

SEQ ID NO: 1288908 - DNA, 15 bp, Homo sapiens
cacatacaacacaca

SEQ ID NO: 1288909 - DNA, 15 bp, Homo sapiens
gcacatacaacacac

SEQ ID NO: 1288910 - DNA, 15 bp, Homo sapiens
cgcacatacaacaca

SEQ ID NO: 1288911 - DNA, 15 bp, Homo sapiens
acgcacatacaacac

SEQ ID NO: 1288912 - DNA, 15 bp, Homo sapiens
aacgcacatacaaca

SEQ ID NO: 1288913 - DNA, 15 bp, Homo sapiens
caacgcacatacaac

SEQ ID NO: 1288914 - DNA, 15 bp, Homo sapiens
acaacgcacatacaa

SEQ ID NO: 1288915 - DNA, 15 bp, Homo sapiens
cacaacgcacataca

SEQ ID NO: 1288916 - DNA, 15 bp, Homo sapiens
acacaacgcacatac

SEQ ID NO: 1288917 - DNA, 15 bp, Homo sapiens
cacacaacgcacata

SEQ ID NO: 1288918 - DNA, 15 bp, Homo sapiens
acacacaacgcacat

SEQ ID NO: 1288919 - DNA, 15 bp, Homo sapiens
cacacacaacgcaca

SEQ ID NO: 1288920 - DNA, 15 bp, Homo sapiens
acacacacaacgcac

SEQ ID NO: 1288921 - DNA, 15 bp, Homo sapiens
tacacacacaacgca

SEQ ID NO: 1288922 - DNA, 15 bp, Homo sapiens
ctacacacacaacgc

SEQ ID NO: 1288923 - DNA, 15 bp, Homo sapiens
actacacacacaacg

SEQ ID NO: 1288924 - DNA, 15 bp, Homo sapiens
aacacaactcacact

SEQ ID NO: 1288925 - DNA, 15 bp, Homo sapiens
taacacaactcacac

SEQ ID NO: 1288926 - DNA, 15 bp, Homo sapiens
ataacacaactcaca

SEQ ID NO: 1288927 - DNA, 15 bp, Homo sapiens
cataacacaactcac

SEQ ID NO: 1288928 - DNA, 15 bp, Homo sapiens
acataacacaactca

SEQ ID NO: 1288929 - DNA, 15 bp, Homo sapiens
cacataacacaactc

SEQ ID NO: 1288930 - DNA, 15 bp, Homo sapiens
acacataacacaact

SEQ ID NO: 1288931 - DNA, 15 bp, Homo sapiens
cacacataacacaac

SEQ ID NO: 1288932 - DNA, 15 bp, Homo sapiens
acacacataacacaa

SEQ ID NO: 1288933 - DNA, 15 bp, Homo sapiens
ttacacacataacac

SEQ ID NO: 1288934 - DNA, 15 bp, Homo sapiens
attacacacataaca

SEQ ID NO: 1288935 - DNA, 15 bp, Homo sapiens
cattacacacataac

SEQ ID NO: 1288936 - DNA, 15 bp, Homo sapiens
acattacacacataa

SEQ ID NO: 1288937 - DNA, 15 bp, Homo sapiens
cacattacacacata

SEQ ID NO: 1288938 - DNA, 15 bp, Homo sapiens
acacattacacacat

SEQ ID NO: 1288939 - DNA, 15 bp, Homo sapiens
cacacattacacaca

SEQ ID NO: 1288940 - DNA, 15 bp, Homo sapiens
acacacattacacac

SEQ ID NO: 1288941 - DNA, 15 bp, Homo sapiens
aacacacattacaca

SEQ ID NO: 1288942 - DNA, 15 bp, Homo sapiens
caacacacattacac

SEQ ID NO: 1288943 - DNA, 15 bp, Homo sapiens
acaacacacattaca

SEQ ID NO: 1288944 - DNA, 15 bp, Homo sapiens
cacaacacacattac

SEQ ID NO: 1288945 - DNA, 15 bp, Homo sapiens
acacaacacacatta

SEQ ID NO: 1288946 - DNA, 15 bp, Homo sapiens
tacacaacacacatt

SEQ ID NO: 1288947 - DNA, 15 bp, Homo sapiens
ctacacaacacacat

SEQ ID NO: 1288948 - DNA, 15 bp, Homo sapiens
actacacaacacaca

SEQ ID NO: 1288949 - DNA, 15 bp, Homo sapiens
cactacacaacacac

SEQ ID NO: 1288950 - DNA, 15 bp, Homo sapiens
acactacacaacaca

SEQ ID NO: 1288951 - DNA, 15 bp, Homo sapiens
cacactacacaacac

SEQ ID NO: 1288952 - DNA, 15 bp, Homo sapiens
acacactacacaaca

SEQ ID NO: 1288953 - DNA, 15 bp, Homo sapiens
cacacactacacaac

SEQ ID NO: 1288954 - DNA, 15 bp, Homo sapiens
acacacactacacaa

SEQ ID NO: 1288955 - DNA, 15 bp, Homo sapiens
gcaacacacactaca

SEQ ID NO: 1288956 - DNA, 15 bp, Homo sapiens
tgcaacacacactac

SEQ ID NO: 1288957 - DNA, 15 bp, Homo sapiens
atgcaacacacacta

SEQ ID NO: 1288958 - DNA, 15 bp, Homo sapiens
catgcaacacacact

SEQ ID NO: 1288959 - DNA, 15 bp, Homo sapiens
acatgcaacacacac

SEQ ID NO: 1288960 - DNA, 15 bp, Homo sapiens
cacatgcaacacaca

SEQ ID NO: 1288961 - DNA, 15 bp, Homo sapiens
acacatgcaacacac

SEQ ID NO: 1288962 - DNA, 15 bp, Homo sapiens
cacacatgcaacaca

SEQ ID NO: 1288963 - DNA, 15 bp, Homo sapiens
ccacacatgcaacac

SEQ ID NO: 1288964 - DNA, 15 bp, Homo sapiens
accacacatgcaaca

SEQ ID NO: 1288965 - DNA, 15 bp, Homo sapiens
caccacacatgcaac

SEQ ID NO: 1288966 - DNA, 15 bp, Homo sapiens
acaccacacatgcaa

SEQ ID NO: 1288967 - DNA, 15 bp, Homo sapiens
cacaccacacatgca

SEQ ID NO: 1288968 - DNA, 15 bp, Homo sapiens
acacaccacacatgc

SEQ ID NO: 1288969 - DNA, 15 bp, Homo sapiens
cacaacacacaatac

SEQ ID NO: 1288970 - DNA, 15 bp, Homo sapiens
acacaacacacaata

SEQ ID NO: 1288971 - DNA, 15 bp, Homo sapiens
cacacaacacacaat

SEQ ID NO: 1288972 - DNA, 15 bp, Homo sapiens
acacacaacacacaa

SEQ ID NO: 1288973 - DNA, 15 bp, Homo sapiens
cacacacaacacaca

SEQ ID NO: 1288974 - DNA, 15 bp, Homo sapiens
ccacacacaacacac

SEQ ID NO: 1288975 - DNA, 15 bp, Homo sapiens
accacacacaacaca

SEQ ID NO: 1288976 - DNA, 15 bp, Homo sapiens
caccacacacaacac

SEQ ID NO: 1288977 - DNA, 15 bp, Homo sapiens
acaccacacacaaca

SEQ ID NO: 1288978 - DNA, 15 bp, Homo sapiens
acacaccacacacaa

SEQ ID NO: 1288979 - DNA, 15 bp, Homo sapiens
tacacacacaccaca

SEQ ID NO: 1288980 - DNA, 15 bp, Homo sapiens
ctacacacacaccac

SEQ ID NO: 1288981 - DNA, 15 bp, Homo sapiens
aacaactcacactac

SEQ ID NO: 1288982 - DNA, 15 bp, Homo sapiens
taacaactcacacta

SEQ ID NO: 1288983 - DNA, 15 bp, Homo sapiens
ataacaactcacact

SEQ ID NO: 1288984 - DNA, 15 bp, Homo sapiens
cataacaactcacac

SEQ ID NO: 1288985 - DNA, 15 bp, Homo sapiens
acataacaactcaca

SEQ ID NO: 1288986 - DNA, 15 bp, Homo sapiens
cacataacaactcac

SEQ ID NO: 1288987 - DNA, 15 bp, Homo sapiens
acacataacaactca

SEQ ID NO: 1288988 - DNA, 15 bp, Homo sapiens
cacacataacaactc

SEQ ID NO: 1288989 - DNA, 15 bp, Homo sapiens
acacacataacaact

SEQ ID NO: 1288990 - DNA, 15 bp, Homo sapiens
cacacacataacaac

SEQ ID NO: 1288991 - DNA, 15 bp, Homo sapiens
ccacacacataacaa

SEQ ID NO: 1288992 - DNA, 15 bp, Homo sapiens
accacacacataaca

SEQ ID NO: 1288993 - DNA, 15 bp, Homo sapiens
caccacacacataac

SEQ ID NO: 1288994 - DNA, 15 bp, Homo sapiens
acaccacacacataa

SEQ ID NO: 1288995 - DNA, 15 bp, Homo sapiens
cacaccacacacata

SEQ ID NO: 1288996 - DNA, 15 bp, Homo sapiens
tacacaccacacaca

SEQ ID NO: 1288997 - DNA, 15 bp, Homo sapiens
ctacacaccacacac

SEQ ID NO: 1288998 - DNA, 15 bp, Homo sapiens
actacacaccacaca

SEQ ID NO: 1288999 - DNA, 15 bp, Homo sapiens
cactacacaccacac

SEQ ID NO: 1289000 - DNA, 15 bp, Homo sapiens
acactacacaccaca

SEQ ID NO: 1289001 - DNA, 15 bp, Homo sapiens
cacactacacaccac

SEQ ID NO: 1289002 - DNA, 15 bp, Homo sapiens
tcacactacacacca

SEQ ID NO: 1289003 - DNA, 15 bp, Homo sapiens
ctcacactacacacc

SEQ ID NO: 1289004 - DNA, 15 bp, Homo sapiens
taactcacactacac

SEQ ID NO: 1289005 - DNA, 15 bp, Homo sapiens
ataactcacactaca

SEQ ID NO: 1289006 - DNA, 15 bp, Homo sapiens
cataactcacactac

SEQ ID NO: 1289007 - DNA, 15 bp, Homo sapiens
acataactcacacta

SEQ ID NO: 1289008 - DNA, 15 bp, Homo sapiens
tacataactcacact

SEQ ID NO: 1289009 - DNA, 15 bp, Homo sapiens
ttacataactcacac

SEQ ID NO: 1289010 - DNA, 15 bp, Homo sapiens
gttacataactcaca

SEQ ID NO: 1289011 - DNA, 15 bp, Homo sapiens
tgttacataactcac

SEQ ID NO: 1289012 - DNA, 15 bp, Homo sapiens
atgttacataactca

SEQ ID NO: 1289013 - DNA, 15 bp, Homo sapiens
catgttacataactc

SEQ ID NO: 1289014 - DNA, 15 bp, Homo sapiens
acatgttacataact

SEQ ID NO: 1289015 - DNA, 15 bp, Homo sapiens
gacatgttacataac

SEQ ID NO: 1289016 - DNA, 15 bp, Homo sapiens
agacatgttacataa

SEQ ID NO: 1289017 - DNA, 15 bp, Homo sapiens
cagacatgttacata

SEQ ID NO: 1289018 - DNA, 15 bp, Homo sapiens
ccagacatgttacat

SEQ ID NO: 1289019 - DNA, 15 bp, Homo sapiens
accagacatgttaca

SEQ ID NO: 1289020 - DNA, 15 bp, Homo sapiens
caccagacatgttac

SEQ ID NO: 1289021 - DNA, 15 bp, Homo sapiens
acaccagacatgtta

SEQ ID NO: 1289022 - DNA, 15 bp, Homo sapiens
cacaccagacatgtt

SEQ ID NO: 1289023 - DNA, 15 bp, Homo sapiens
acacaccagacatgt

SEQ ID NO: 1289024 - DNA, 15 bp, Homo sapiens
tacacaccagacatg

SEQ ID NO: 1289025 - DNA, 15 bp, Homo sapiens
atacacaccagacat

SEQ ID NO: 1289026 - DNA, 15 bp, Homo sapiens
aatacacaccagaca

SEQ ID NO: 1289027 - DNA, 15 bp, Homo sapiens
caatacacaccagac

SEQ ID NO: 1289028 - DNA, 15 bp, Homo sapiens
acaatacacaccaga

SEQ ID NO: 1289029 - DNA, 15 bp, Homo sapiens
cacaatacacaccag

SEQ ID NO: 1289030 - DNA, 15 bp, Homo sapiens
tatacaacacacaat

SEQ ID NO: 1289031 - DNA, 15 bp, Homo sapiens
atatacaacacacaa

SEQ ID NO: 1289032 - DNA, 15 bp, Homo sapiens
catatacaacacaca

SEQ ID NO: 1289033 - DNA, 15 bp, Homo sapiens
acatatacaacacac

SEQ ID NO: 1289034 - DNA, 15 bp, Homo sapiens
cacatatacaacaca

SEQ ID NO: 1289035 - DNA, 15 bp, Homo sapiens
acacatatacaacac

SEQ ID NO: 1289036 - DNA, 15 bp, Homo sapiens
aacacatatacaaca

SEQ ID NO: 1289037 - DNA, 15 bp, Homo sapiens
caacacatatacaac

SEQ ID NO: 1289038 - DNA, 15 bp, Homo sapiens
acaacacatatacaa

SEQ ID NO: 1289039 - DNA, 15 bp, Homo sapiens
cacaacacatataca

SEQ ID NO: 1289040 - DNA, 15 bp, Homo sapiens
acacaacacatatac

SEQ ID NO: 1289041 - DNA, 15 bp, Homo sapiens
cacacaacacatata

SEQ ID NO: 1289042 - DNA, 15 bp, Homo sapiens
acacacaacacatat

SEQ ID NO: 1289043 - DNA, 15 bp, Homo sapiens
cacacacaacacata

SEQ ID NO: 1289044 - DNA, 15 bp, Homo sapiens
acacacacaacacat

SEQ ID NO: 1289045 - DNA, 15 bp, Homo sapiens
tactacacacacaac

SEQ ID NO: 1289046 - DNA, 15 bp, Homo sapiens
atactacacacacaa

SEQ ID NO: 1289047 - DNA, 15 bp, Homo sapiens
tcatactacacacac

SEQ ID NO: 1289048 - DNA, 15 bp, Homo sapiens
ctcatactacacaca

SEQ ID NO: 1289049 - DNA, 15 bp, Homo sapiens
actcatactacacac

SEQ ID NO: 1289050 - DNA, 15 bp, Homo sapiens
aactcatactacaca

SEQ ID NO: 1289051 - DNA, 15 bp, Homo sapiens
caactcatactacac

SEQ ID NO: 1289052 - DNA, 15 bp, Homo sapiens
acaactcatactaca

SEQ ID NO: 1289053 - DNA, 15 bp, Homo sapiens
cacaactcatactac

SEQ ID NO: 1289054 - DNA, 15 bp, Homo sapiens
acacaactcatacta

SEQ ID NO: 1289055 - DNA, 15 bp, Homo sapiens
aacacaactcatact

SEQ ID NO: 1289056 - DNA, 15 bp, Homo sapiens
taacacaactcatac

SEQ ID NO: 1289057 - DNA, 15 bp, Homo sapiens
ataacacaactcata

SEQ ID NO: 1289058 - DNA, 15 bp, Homo sapiens
cataacacaactcat

SEQ ID NO: 1289059 - DNA, 15 bp, Homo sapiens
tacataacacaactc

SEQ ID NO: 1289060 - DNA, 15 bp, Homo sapiens
atacataacacaact

SEQ ID NO: 1289061 - DNA, 15 bp, Homo sapiens
catacataacacaac

SEQ ID NO: 1289062 - DNA, 15 bp, Homo sapiens
acatacataacacaa

SEQ ID NO: 1289063 - DNA, 15 bp, Homo sapiens
cacatacataacaca

SEQ ID NO: 1289064 - DNA, 15 bp, Homo sapiens
ccacatacataacac

SEQ ID NO: 1289065 - DNA, 15 bp, Homo sapiens
accacatacataaca

SEQ ID NO: 1289066 - DNA, 15 bp, Homo sapiens
caccacatacataac

SEQ ID NO: 1289067 - DNA, 15 bp, Homo sapiens
acaccacatacataa

SEQ ID NO: 1289068 - DNA, 15 bp, Homo sapiens
cacaccacatacata

SEQ ID NO: 1289069 - DNA, 15 bp, Homo sapiens
gcacaccacatacat

SEQ ID NO: 1289070 - DNA, 15 bp, Homo sapiens
tgcacaccacataca

SEQ ID NO: 1289071 - DNA, 15 bp, Homo sapiens
ctgcacaccacatac

SEQ ID NO: 1289072 - DNA, 15 bp, Homo sapiens
actgcacaccacata

SEQ ID NO: 1289073 - DNA, 15 bp, Homo sapiens
cactgcacaccacat

SEQ ID NO: 1289074 - DNA, 15 bp, Homo sapiens
acactgcacaccaca

SEQ ID NO: 1289075 - DNA, 15 bp, Homo sapiens
cacactgcacaccac

SEQ ID NO: 1289076 - DNA, 15 bp, Homo sapiens
acacactgcacacca

SEQ ID NO: 1289077 - DNA, 15 bp, Homo sapiens
tacacactgcacacc

SEQ ID NO: 1289078 - DNA, 15 bp, Homo sapiens
ctacacactgcacac

SEQ ID NO: 1289079 - DNA, 15 bp, Homo sapiens
actacacactgcaca

SEQ ID NO: 1289080 - DNA, 15 bp, Homo sapiens
cactacacactgcac

SEQ ID NO: 1289081 - DNA, 15 bp, Homo sapiens
acactacacactgca

SEQ ID NO: 1289082 - DNA, 15 bp, Homo sapiens
cacactacacactgc

SEQ ID NO: 1289083 - DNA, 15 bp, Homo sapiens
acacactacacactg

SEQ ID NO: 1289084 - DNA, 15 bp, Homo sapiens
cacacactacacact

SEQ ID NO: 1289085 - DNA, 15 bp, Homo sapiens
acacacatgtaacac

SEQ ID NO: 1289086 - DNA, 15 bp, Homo sapiens
aacacacatgtaaca

SEQ ID NO: 1289087 - DNA, 15 bp, Homo sapiens
caacacacatgtaac

SEQ ID NO: 1289088 - DNA, 15 bp, Homo sapiens
acaacacacatgtaa

SEQ ID NO: 1289089 - DNA, 15 bp, Homo sapiens
cacaacacacatgta

SEQ ID NO: 1289090 - DNA, 15 bp, Homo sapiens
acacaacacacatgt

SEQ ID NO: 1289091 - DNA, 15 bp, Homo sapiens
cacacaacacacatg

SEQ ID NO: 1289092 - DNA, 15 bp, Homo sapiens
ccacacaacacacat

SEQ ID NO: 1289093 - DNA, 15 bp, Homo sapiens
accacacaacacaca

SEQ ID NO: 1289094 - DNA, 15 bp, Homo sapiens
caccacacaacacac

SEQ ID NO: 1289095 - DNA, 15 bp, Homo sapiens
acaccacacaacaca

SEQ ID NO: 1289096 - DNA, 15 bp, Homo sapiens
cacaccacacaacac

SEQ ID NO: 1289097 - DNA, 15 bp, Homo sapiens
acacaccacacaaca

SEQ ID NO: 1289098 - DNA, 15 bp, Homo sapiens
cacacaccacacaac

SEQ ID NO: 1289099 - DNA, 15 bp, Homo sapiens
acacacaccacacaa

SEQ ID NO: 1289100 - DNA, 15 bp, Homo sapiens
ccatacacacaccac

SEQ ID NO: 1289101 - DNA, 15 bp, Homo sapiens
accatacacacacca

SEQ ID NO: 1289102 - DNA, 15 bp, Homo sapiens
caccatacacacacc

SEQ ID NO: 1289103 - DNA, 15 bp, Homo sapiens
acaccatacacacac

SEQ ID NO: 1289104 - DNA, 15 bp, Homo sapiens
cacaccatacacaca

SEQ ID NO: 1289105 - DNA, 15 bp, Homo sapiens
gcacaccatacacac

SEQ ID NO: 1289106 - DNA, 15 bp, Homo sapiens
cgcacaccatacaca

SEQ ID NO: 1289107 - DNA, 15 bp, Homo sapiens
acgcacaccatacac

SEQ ID NO: 1289108 - DNA, 15 bp, Homo sapiens
gacgcacaccataca

SEQ ID NO: 1289109 - DNA, 15 bp, Homo sapiens
agacgcacaccatac

SEQ ID NO: 1289110 - DNA, 15 bp, Homo sapiens
tagacgcacaccata

SEQ ID NO: 1289111 - DNA, 15 bp, Homo sapiens
atagacgcacaccat

SEQ ID NO: 1289112 - DNA, 15 bp, Homo sapiens
gatagacgcacacca

SEQ ID NO: 1289113 - DNA, 15 bp, Homo sapiens
ggatagacgcacacc

SEQ ID NO: 1289114 - DNA, 15 bp, Homo sapiens
tggatagacgcacac

SEQ ID NO: 1289115 - DNA, 15 bp, Homo sapiens
atggatagacgcaca

SEQ ID NO: 1289116 - DNA, 15 bp, Homo sapiens
aatggatagacgcac

SEQ ID NO: 1289117 - DNA, 15 bp, Homo sapiens
caatggatagacgca

SEQ ID NO: 1289118 - DNA, 15 bp, Homo sapiens
ccaatggatagacgc

SEQ ID NO: 1289119 - DNA, 15 bp, Homo sapiens
tccaatggatagacg

SEQ ID NO: 1289120 - DNA, 15 bp, Homo sapiens
atccaatggatagac

SEQ ID NO: 1289121 - DNA, 15 bp, Homo sapiens
catccaatggataga

SEQ ID NO: 1289122 - DNA, 15 bp, Homo sapiens
tcatccaatggatag

SEQ ID NO: 1289123 - DNA, 15 bp, Homo sapiens
ctcatccaatggata

SEQ ID NO: 1289124 - DNA, 15 bp, Homo sapiens
gctcatccaatggat

SEQ ID NO: 1289125 - DNA, 15 bp, Homo sapiens
ggctcatccaatgga

SEQ ID NO: 1289126 - DNA, 15 bp, Homo sapiens
cggctcatccaatgg

SEQ ID NO: 1289127 - DNA, 15 bp, Homo sapiens
ccggctcatccaatg

SEQ ID NO: 1289128 - DNA, 15 bp, Homo sapiens
cccggctcatccaat

SEQ ID NO: 1289129 - DNA, 15 bp, Homo sapiens
gcccggctcatccaa

SEQ ID NO: 1289130 - DNA, 15 bp, Homo sapiens
agcccggctcatcca

SEQ ID NO: 1289131 - DNA, 15 bp, Homo sapiens
cagcccggctcatcc

SEQ ID NO: 1289132 - DNA, 15 bp, Homo sapiens
gcagcccggctcatc

SEQ ID NO: 1289133 - DNA, 15 bp, Homo sapiens
ggcagcccggctcat

SEQ ID NO: 1289134 - DNA, 15 bp, Homo sapiens
aggcagcccggctca

SEQ ID NO: 1289135 - DNA, 15 bp, Homo sapiens
gaggcagcccggctc

SEQ ID NO: 1289136 - DNA, 15 bp, Homo sapiens
agaggcagcccggct

SEQ ID NO: 1289137 - DNA, 15 bp, Homo sapiens
gagaggcagcccggc

SEQ ID NO: 1289138 - DNA, 15 bp, Homo sapiens
agagaggcagcccgg

SEQ ID NO: 1289139 - DNA, 15 bp, Homo sapiens
cagagaggcagcccg

SEQ ID NO: 1289140 - DNA, 15 bp, Homo sapiens
tcagagaggcagccc

SEQ ID NO: 1289141 - DNA, 15 bp, Homo sapiens
ctcagagaggcagcc

SEQ ID NO: 1289142 - DNA, 15 bp, Homo sapiens
cctcagagaggcagc

SEQ ID NO: 1289143 - DNA, 15 bp, Homo sapiens
ccctcagagaggcag

SEQ ID NO: 1289144 - DNA, 15 bp, Homo sapiens
gccctcagagaggca

SEQ ID NO: 1289145 - DNA, 15 bp, Homo sapiens
tgccctcagagaggc

SEQ ID NO: 1289146 - DNA, 15 bp, Homo sapiens
ctgccctcagagagg

SEQ ID NO: 1289147 - DNA, 15 bp, Homo sapiens
cctgccctcagagag

SEQ ID NO: 1289148 - DNA, 15 bp, Homo sapiens
tcctgccctcagaga

SEQ ID NO: 1289149 - DNA, 15 bp, Homo sapiens
ctcctgccctcagag

SEQ ID NO: 1289150 - DNA, 15 bp, Homo sapiens
cctcctgccctcaga

SEQ ID NO: 1289151 - DNA, 15 bp, Homo sapiens
gcctcctgccctcag

SEQ ID NO: 1289152 - DNA, 15 bp, Homo sapiens
ggcctcctgccctca

SEQ ID NO: 1289153 - DNA, 15 bp, Homo sapiens
gggcctcctgccctc

SEQ ID NO: 1289154 - DNA, 15 bp, Homo sapiens
agggcctcctgccct

SEQ ID NO: 1289155 - DNA, 15 bp, Homo sapiens
gagggcctcctgccc

SEQ ID NO: 1289156 - DNA, 15 bp, Homo sapiens
agagggcctcctgcc

SEQ ID NO: 1289157 - DNA, 15 bp, Homo sapiens
aagagggcctcctgc

SEQ ID NO: 1289158 - DNA, 15 bp, Homo sapiens
caagagggcctcctg

SEQ ID NO: 1289159 - DNA, 15 bp, Homo sapiens
gcaagagggcctcct

SEQ ID NO: 1289160 - DNA, 15 bp, Homo sapiens
ggcaagagggcctcc

SEQ ID NO: 1289161 - DNA, 15 bp, Homo sapiens
aggcaagagggcctc

SEQ ID NO: 1289162 - DNA, 15 bp, Homo sapiens
caggcaagagggcct

SEQ ID NO: 1289163 - DNA, 15 bp, Homo sapiens
gcaggcaagagggcc

SEQ ID NO: 1289164 - DNA, 15 bp, Homo sapiens
agcaggcaagagggc

SEQ ID NO: 1289165 - DNA, 15 bp, Homo sapiens
aagcaggcaagaggg

SEQ ID NO: 1289166 - DNA, 15 bp, Homo sapiens
gaagcaggcaagagg

SEQ ID NO: 1289167 - DNA, 15 bp, Homo sapiens
tgaagcaggcaagag

SEQ ID NO: 1289168 - DNA, 15 bp, Homo sapiens
atgaagcaggcaaga

SEQ ID NO: 1289169 - DNA, 15 bp, Homo sapiens
aatgaagcaggcaag

SEQ ID NO: 1289170 - DNA, 15 bp, Homo sapiens
gaatgaagcaggcaa

SEQ ID NO: 1289171 - DNA, 15 bp, Homo sapiens
ggaatgaagcaggca

SEQ ID NO: 1289172 - DNA, 15 bp, Homo sapiens
gggaatgaagcaggc

SEQ ID NO: 1289173 - DNA, 15 bp, Homo sapiens
ggggaatgaagcagg

SEQ ID NO: 1289174 - DNA, 15 bp, Homo sapiens
tggggaatgaagcag

SEQ ID NO: 1289175 - DNA, 15 bp, Homo sapiens
gtggggaatgaagca

SEQ ID NO: 1289176 - DNA, 15 bp, Homo sapiens
ggtggggaatgaagc

SEQ ID NO: 1289177 - DNA, 15 bp, Homo sapiens
gggtggggaatgaag

SEQ ID NO: 1289178 - DNA, 15 bp, Homo sapiens
ggggtggggaatgaa

SEQ ID NO: 1289179 - DNA, 15 bp, Homo sapiens
cggggtggggaatga

SEQ ID NO: 1289180 - DNA, 15 bp, Homo sapiens
ccggggtggggaatg

SEQ ID NO: 1289181 - DNA, 15 bp, Homo sapiens
accggggtggggaat

SEQ ID NO: 1289182 - DNA, 15 bp, Homo sapiens
aaccggggtggggaa

SEQ ID NO: 1289183 - DNA, 15 bp, Homo sapiens
aaaccggggtgggga

SEQ ID NO: 1289184 - DNA, 15 bp, Homo sapiens
aaaaccggggtgggg

SEQ ID NO: 1289185 - DNA, 15 bp, Homo sapiens
gaaaaccggggtggg

SEQ ID NO: 1289186 - DNA, 15 bp, Homo sapiens
agaaaaccggggtgg

SEQ ID NO: 1289187 - DNA, 15 bp, Homo sapiens
gagaaaaccggggtg

SEQ ID NO: 1289188 - DNA, 15 bp, Homo sapiens
ggagaaaaccggggt

SEQ ID NO: 1289189 - DNA, 15 bp, Homo sapiens
aggagaaaaccgggg

SEQ ID NO: 1289190 - DNA, 15 bp, Homo sapiens
gaggagaaaaccggg

SEQ ID NO: 1289191 - DNA, 15 bp, Homo sapiens
tgaggagaaaaccgg

SEQ ID NO: 1289192 - DNA, 15 bp, Homo sapiens
gtgaggagaaaaccg

SEQ ID NO: 1289193 - DNA, 15 bp, Homo sapiens
agtgaggagaaaacc

SEQ ID NO: 1289194 - DNA, 15 bp, Homo sapiens
cagtgaggagaaaac

SEQ ID NO: 1289195 - DNA, 15 bp, Homo sapiens
gcagtgaggagaaaa

SEQ ID NO: 1289196 - DNA, 15 bp, Homo sapiens
ggcagtgaggagaaa

SEQ ID NO: 1289197 - DNA, 15 bp, Homo sapiens
aggcagtgaggagaa

SEQ ID NO: 1289198 - DNA, 15 bp, Homo sapiens
gaggcagtgaggaga

SEQ ID NO: 1289199 - DNA, 15 bp, Homo sapiens
tgaggcagtgaggag

SEQ ID NO: 1289200 - DNA, 15 bp, Homo sapiens
ctgaggcagtgagga

SEQ ID NO: 1289201 - DNA, 15 bp, Homo sapiens
gctgaggcagtgagg

SEQ ID NO: 1289202 - DNA, 15 bp, Homo sapiens
agctgaggcagtgag

SEQ ID NO: 1289203 - DNA, 15 bp, Homo sapiens
cagctgaggcagtga

SEQ ID NO: 1289204 - DNA, 15 bp, Homo sapiens
ccagctgaggcagtg

SEQ ID NO: 1289205 - DNA, 15 bp, Homo sapiens
gccagctgaggcagt

SEQ ID NO: 1289206 - DNA, 15 bp, Homo sapiens
tgccagctgaggcag

SEQ ID NO: 1289207 - DNA, 15 bp, Homo sapiens
atgccagctgaggca

SEQ ID NO: 1289208 - DNA, 15 bp, Homo sapiens
tatgccagctgaggc

SEQ ID NO: 1289209 - DNA, 15 bp, Homo sapiens
ctatgccagctgagg

SEQ ID NO: 1289210 - DNA, 15 bp, Homo sapiens
actatgccagctgag

SEQ ID NO: 1289211 - DNA, 15 bp, Homo sapiens
aactatgccagctga

SEQ ID NO: 1289212 - DNA, 15 bp, Homo sapiens
caactatgccagctg

SEQ ID NO: 1289213 - DNA, 15 bp, Homo sapiens
acaactatgccagct

SEQ ID NO: 1289214 - DNA, 15 bp, Homo sapiens
cacaactatgccagc

SEQ ID NO: 1289215 - DNA, 15 bp, Homo sapiens
gcacaactatgccag

SEQ ID NO: 1289216 - DNA, 15 bp, Homo sapiens
agcacaactatgcca

SEQ ID NO: 1289217 - DNA, 15 bp, Homo sapiens
aagcacaactatgcc

SEQ ID NO: 1289218 - DNA, 15 bp, Homo sapiens
caagcacaactatgc

SEQ ID NO: 1289219 - DNA, 15 bp, Homo sapiens
tcaagcacaactatg

SEQ ID NO: 1289220 - DNA, 15 bp, Homo sapiens
atcaagcacaactat

SEQ ID NO: 1289221 - DNA, 15 bp, Homo sapiens
aatcaagcacaacta

SEQ ID NO: 1289222 - DNA, 15 bp, Homo sapiens
aaatcaagcacaact

SEQ ID NO: 1289223 - DNA, 15 bp, Homo sapiens
taaatcaagcacaac

SEQ ID NO: 1289224 - DNA, 15 bp, Homo sapiens
ctaaatcaagcacaa

SEQ ID NO: 1289225 - DNA, 15 bp, Homo sapiens
gctaaatcaagcaca

SEQ ID NO: 1289226 - DNA, 15 bp, Homo sapiens
agctaaatcaagcac

SEQ ID NO: 1289227 - DNA, 15 bp, Homo sapiens
gagctaaatcaagca

SEQ ID NO: 1289228 - DNA, 15 bp, Homo sapiens
tgagctaaatcaagc

SEQ ID NO: 1289229 - DNA, 15 bp, Homo sapiens
ttgagctaaatcaag

SEQ ID NO: 1289230 - DNA, 15 bp, Homo sapiens
cttgagctaaatcaa

SEQ ID NO: 1289231 - DNA, 15 bp, Homo sapiens
ccttgagctaaatca

SEQ ID NO: 1289232 - DNA, 15 bp, Homo sapiens
tccttgagctaaatc

SEQ ID NO: 1289233 - DNA, 15 bp, Homo sapiens
ttccttgagctaaat

SEQ ID NO: 1289234 - DNA, 15 bp, Homo sapiens
gttccttgagctaaa

SEQ ID NO: 1289235 - DNA, 15 bp, Homo sapiens
tgttccttgagctaa

SEQ ID NO: 1289236 - DNA, 15 bp, Homo sapiens
ttgttccttgagcta

SEQ ID NO: 1289237 - DNA, 15 bp, Homo sapiens
tttgttccttgagct

SEQ ID NO: 1289238 - DNA, 15 bp, Homo sapiens
ctttgttccttgagc

SEQ ID NO: 1289239 - DNA, 15 bp, Homo sapiens
actttgttccttgag

SEQ ID NO: 1289240 - DNA, 15 bp, Homo sapiens
tactttgttccttga

SEQ ID NO: 1289241 - DNA, 15 bp, Homo sapiens
ttactttgttccttg

SEQ ID NO: 1289242 - DNA, 15 bp, Homo sapiens
cttactttgttcctt

SEQ ID NO: 1289243 - DNA, 15 bp, Homo sapiens
tcttactttgttcct

SEQ ID NO: 1289244 - DNA, 15 bp, Homo sapiens
ctcttactttgttcc

SEQ ID NO: 1289245 - DNA, 15 bp, Homo sapiens
tctcttactttgttc

SEQ ID NO: 1289246 - DNA, 15 bp, Homo sapiens
ttctcttactttgtt

SEQ ID NO: 1289247 - DNA, 15 bp, Homo sapiens
attctcttactttgt

SEQ ID NO: 1289248 - DNA, 15 bp, Homo sapiens
gattctcttactttg

SEQ ID NO: 1289249 - DNA, 15 bp, Homo sapiens
ggattctcttacttt

SEQ ID NO: 1289250 - DNA, 15 bp, Homo sapiens
tggattctcttactt

SEQ ID NO: 1289251 - DNA, 15 bp, Homo sapiens
ttggattctcttact

SEQ ID NO: 1289252 - DNA, 15 bp, Homo sapiens
cttggattctcttac

SEQ ID NO: 1289253 - DNA, 15 bp, Homo sapiens
acttggattctctta

SEQ ID NO: 1289254 - DNA, 15 bp, Homo sapiens
aacttggattctctt

SEQ ID NO: 1289255 - DNA, 15 bp, Homo sapiens
aaacttggattctct

SEQ ID NO: 1289256 - DNA, 15 bp, Homo sapiens
aaaacttggattctc

SEQ ID NO: 1289257 - DNA, 15 bp, Homo sapiens
aaaaacttggattct

SEQ ID NO: 1289258 - DNA, 15 bp, Homo sapiens
caaaaacttggattc

SEQ ID NO: 1289259 - DNA, 15 bp, Homo sapiens
ccaaaaacttggatt

SEQ ID NO: 1289260 - DNA, 15 bp, Homo sapiens
tccaaaaacttggat

SEQ ID NO: 1289261 - DNA, 15 bp, Homo sapiens
gtccaaaaacttgga

SEQ ID NO: 1289262 - DNA, 15 bp, Homo sapiens
tgtccaaaaacttgg

SEQ ID NO: 1289263 - DNA, 15 bp, Homo sapiens
ttgtccaaaaacttg

SEQ ID NO: 1289264 - DNA, 15 bp, Homo sapiens
tttgtccaaaaactt

SEQ ID NO: 1289265 - DNA, 15 bp, Homo sapiens
ttttgtccaaaaact

SEQ ID NO: 1289266 - DNA, 15 bp, Homo sapiens
gttttgtccaaaaac

SEQ ID NO: 1289267 - DNA, 15 bp, Homo sapiens
tgttttgtccaaaaa

SEQ ID NO: 1289268 - DNA, 15 bp, Homo sapiens
ttgttttgtccaaaa

SEQ ID NO: 1289269 - DNA, 15 bp, Homo sapiens
tttgttttgtccaaa

SEQ ID NO: 1289270 - DNA, 15 bp, Homo sapiens
atttgttttgtccaa

SEQ ID NO: 1289271 - DNA, 15 bp, Homo sapiens
catttgttttgtcca

SEQ ID NO: 1289272 - DNA, 15 bp, Homo sapiens
gcatttgttttgtcc

SEQ ID NO: 1289273 - DNA, 15 bp, Homo sapiens
ggcatttgttttgtc

SEQ ID NO: 1289274 - DNA, 15 bp, Homo sapiens
aggcatttgttttgt

SEQ ID NO: 1289275 - DNA, 15 bp, Homo sapiens
taggcatttgttttg

SEQ ID NO: 1289276 - DNA, 15 bp, Homo sapiens
ctaggcatttgtttt

SEQ ID NO: 1289277 - DNA, 15 bp, Homo sapiens
tctaggcatttgttt

SEQ ID NO: 1289278 - DNA, 15 bp, Homo sapiens
ttctaggcatttgtt

SEQ ID NO: 1289279 - DNA, 15 bp, Homo sapiens
tttctaggcatttgt

SEQ ID NO: 1289280 - DNA, 15 bp, Homo sapiens
atttctaggcatttg

SEQ ID NO: 1289281 - DNA, 15 bp, Homo sapiens
aatttctaggcattt

SEQ ID NO: 1289282 - DNA, 15 bp, Homo sapiens
caatttctaggcatt

SEQ ID NO: 1289283 - DNA, 15 bp, Homo sapiens
acaatttctaggcat

SEQ ID NO: 1289284 - DNA, 15 bp, Homo sapiens
cacaatttctaggca

SEQ ID NO: 1289285 - DNA, 15 bp, Homo sapiens
gcacaatttctaggc

SEQ ID NO: 1289286 - DNA, 15 bp, Homo sapiens
aagcacaatttctag

SEQ ID NO: 1289287 - DNA, 15 bp, Homo sapiens
gaagcacaatttcta

SEQ ID NO: 1289288 - DNA, 15 bp, Homo sapiens
agaagcacaatttct

SEQ ID NO: 1289289 - DNA, 15 bp, Homo sapiens
tagaagcacaatttc

SEQ ID NO: 1289290 - DNA, 15 bp, Homo sapiens
ttagaagcacaattt

SEQ ID NO: 1289291 - DNA, 15 bp, Homo sapiens
tttagaagcacaatt

SEQ ID NO: 1289292 - DNA, 15 bp, Homo sapiens
ctttagaagcacaat

SEQ ID NO: 1289293 - DNA, 15 bp, Homo sapiens
tctttagaagcacaa

SEQ ID NO: 1289294 - DNA, 15 bp, Homo sapiens
ttctttagaagcaca

SEQ ID NO: 1289295 - DNA, 15 bp, Homo sapiens
cttctttagaagcac

SEQ ID NO: 1289296 - DNA, 15 bp, Homo sapiens
acttctttagaagca

SEQ ID NO: 1289297 - DNA, 15 bp, Homo sapiens
tacttctttagaagc

SEQ ID NO: 1289298 - DNA, 15 bp, Homo sapiens
ctacttctttagaag

SEQ ID NO: 1289299 - DNA, 15 bp, Homo sapiens
actacttctttagaa

SEQ ID NO: 1289300 - DNA, 15 bp, Homo sapiens
aactacttctttaga

SEQ ID NO: 1289301 - DNA, 15 bp, Homo sapiens
aaactacttctttag

SEQ ID NO: 1289302 - DNA, 15 bp, Homo sapiens
aaaactacttcttta

SEQ ID NO: 1289303 - DNA, 15 bp, Homo sapiens
aaaaactacttcttt

SEQ ID NO: 1289304 - DNA, 15 bp, Homo sapiens
caaaaactacttctt

SEQ ID NO: 1289305 - DNA, 15 bp, Homo sapiens
tcaaaaactacttct

SEQ ID NO: 1289306 - DNA, 15 bp, Homo sapiens
atcaaaaactacttc

SEQ ID NO: 1289307 - DNA, 15 bp, Homo sapiens
catcaaaaactactt

SEQ ID NO: 1289308 - DNA, 15 bp, Homo sapiens
ccatcaaaaactact

SEQ ID NO: 1289309 - DNA, 15 bp, Homo sapiens
gccatcaaaaactac

SEQ ID NO: 1289310 - DNA, 15 bp, Homo sapiens
agccatcaaaaacta

SEQ ID NO: 1289311 - DNA, 15 bp, Homo sapiens
gagccatcaaaaact

SEQ ID NO: 1289312 - DNA, 15 bp, Homo sapiens
agagccatcaaaaac

SEQ ID NO: 1289313 - DNA, 15 bp, Homo sapiens
aagagccatcaaaaa

SEQ ID NO: 1289314 - DNA, 15 bp, Homo sapiens
caagagccatcaaaa

SEQ ID NO: 1289315 - DNA, 15 bp, Homo sapiens
acaagagccatcaaa

SEQ ID NO: 1289316 - DNA, 15 bp, Homo sapiens
tacaagagccatcaa

SEQ ID NO: 1289317 - DNA, 15 bp, Homo sapiens
ctacaagagccatca

SEQ ID NO: 1289318 - DNA, 15 bp, Homo sapiens
tctacaagagccatc

SEQ ID NO: 1289319 - DNA, 15 bp, Homo sapiens
ctctacaagagccat

SEQ ID NO: 1289320 - DNA, 15 bp, Homo sapiens
tctctacaagagcca

SEQ ID NO: 1289321 - DNA, 15 bp, Homo sapiens
ttctctacaagagcc

SEQ ID NO: 1289322 - DNA, 15 bp, Homo sapiens
tttctctacaagagc

SEQ ID NO: 1289323 - DNA, 15 bp, Homo sapiens
gtttctctacaagag

SEQ ID NO: 1289324 - DNA, 15 bp, Homo sapiens
ggtttctctacaaga

SEQ ID NO: 1289325 - DNA, 15 bp, Homo sapiens
gggtttctctacaag

SEQ ID NO: 1289326 - DNA, 15 bp, Homo sapiens
agggtttctctacaa

SEQ ID NO: 1289327 - DNA, 15 bp, Homo sapiens
cagggtttctctaca

SEQ ID NO: 1289328 - DNA, 15 bp, Homo sapiens
ccagggtttctctac

SEQ ID NO: 1289329 - DNA, 15 bp, Homo sapiens
accagggtttctcta

SEQ ID NO: 1289330 - DNA, 15 bp, Homo sapiens
aaccagggtttctct

SEQ ID NO: 1289331 - DNA, 15 bp, Homo sapiens
caaccagggtttctc

SEQ ID NO: 1289332 - DNA, 15 bp, Homo sapiens
gcaaccagggtttct

SEQ ID NO: 1289333 - DNA, 15 bp, Homo sapiens
agcaaccagggtttc

SEQ ID NO: 1289334 - DNA, 15 bp, Homo sapiens
aagcaaccagggttt

SEQ ID NO: 1289335 - DNA, 15 bp, Homo sapiens
caagcaaccagggtt

SEQ ID NO: 1289336 - DNA, 15 bp, Homo sapiens
tcaagcaaccagggt

SEQ ID NO: 1289337 - DNA, 15 bp, Homo sapiens
ttcaagcaaccaggg

SEQ ID NO: 1289338 - DNA, 15 bp, Homo sapiens
tttcaagcaaccagg

SEQ ID NO: 1289339 - DNA, 15 bp, Homo sapiens
atttcaagcaaccag

SEQ ID NO: 1289340 - DNA, 15 bp, Homo sapiens
catttcaagcaacca

SEQ ID NO: 1289341 - DNA, 15 bp, Homo sapiens
tcatttcaagcaacc

SEQ ID NO: 1289342 - DNA, 15 bp, Homo sapiens
ctcatttcaagcaac

SEQ ID NO: 1289343 - DNA, 15 bp, Homo sapiens
cctcatttcaagcaa

SEQ ID NO: 1289344 - DNA, 15 bp, Homo sapiens
acctcatttcaagca

SEQ ID NO: 1289345 - DNA, 15 bp, Homo sapiens
cacctcatttcaagc

SEQ ID NO: 1289346 - DNA, 15 bp, Homo sapiens
tcacctcatttcaag

SEQ ID NO: 1289347 - DNA, 15 bp, Homo sapiens
ctcacctcatttcaa

SEQ ID NO: 1289348 - DNA, 15 bp, Homo sapiens
tctcacctcatttca

SEQ ID NO: 1289349 - DNA, 15 bp, Homo sapiens
ctctcacctcatttc

SEQ ID NO: 1289350 - DNA, 15 bp, Homo sapiens
actctcacctcattt

SEQ ID NO: 1289351 - DNA, 15 bp, Homo sapiens
aactctcacctcatt

SEQ ID NO: 1289352 - DNA, 15 bp, Homo sapiens
aaactctcacctcat

SEQ ID NO: 1289353 - DNA, 15 bp, Homo sapiens
gaaactctcacctca

SEQ ID NO: 1289354 - DNA, 15 bp, Homo sapiens
ggaaactctcacctc

SEQ ID NO: 1289355 - DNA, 15 bp, Homo sapiens
gggaaactctcacct

SEQ ID NO: 1289356 - DNA, 15 bp, Homo sapiens
tgggaaactctcacc

SEQ ID NO: 1289357 - DNA, 15 bp, Homo sapiens
ttgggaaactctcac

SEQ ID NO: 1289358 - DNA, 15 bp, Homo sapiens
cttgggaaactctca

SEQ ID NO: 1289359 - DNA, 15 bp, Homo sapiens
acttgggaaactctc

SEQ ID NO: 1289360 - DNA, 15 bp, Homo sapiens
aacttgggaaactct

SEQ ID NO: 1289361 - DNA, 15 bp, Homo sapiens
taacttgggaaactc

SEQ ID NO: 1289362 - DNA, 15 bp, Homo sapiens
ctaacttgggaaact

SEQ ID NO: 1289363 - DNA, 15 bp, Homo sapiens
tctaacttgggaaac

SEQ ID NO: 1289364 - DNA, 15 bp, Homo sapiens
gtctaacttgggaaa

SEQ ID NO: 1289365 - DNA, 15 bp, Homo sapiens
ggtctaacttgggaa

SEQ ID NO: 1289366 - DNA, 15 bp, Homo sapiens
gggtctaacttggga

SEQ ID NO: 1289367 - DNA, 15 bp, Homo sapiens
ggggtctaacttggg

SEQ ID NO: 1289368 - DNA, 15 bp, Homo sapiens
tggggtctaacttgg

SEQ ID NO: 1289369 - DNA, 15 bp, Homo sapiens
ctggggtctaacttg

SEQ ID NO: 1289370 - DNA, 15 bp, Homo sapiens
actggggtctaactt

SEQ ID NO: 1289371 - DNA, 15 bp, Homo sapiens
tactggggtctaact

SEQ ID NO: 1289372 - DNA, 15 bp, Homo sapiens
ttactggggtctaac

SEQ ID NO: 1289373 - DNA, 15 bp, Homo sapiens
cttactggggtctaa

SEQ ID NO: 1289374 - DNA, 15 bp, Homo sapiens
tcttactggggtcta

SEQ ID NO: 1289375 - DNA, 15 bp, Homo sapiens
atcttactggggtct

SEQ ID NO: 1289376 - DNA, 15 bp, Homo sapiens
catcttactggggtc

SEQ ID NO: 1289377 - DNA, 15 bp, Homo sapiens
ccatcttactggggt

SEQ ID NO: 1289378 - DNA, 15 bp, Homo sapiens
gccatcttactgggg

SEQ ID NO: 1289379 - DNA, 15 bp, Homo sapiens
cgccatcttactggg

SEQ ID NO: 1289380 - DNA, 15 bp, Homo sapiens
ccgccatcttactgg

SEQ ID NO: 1289381 - DNA, 15 bp, Homo sapiens
tccgccatcttactg

SEQ ID NO: 1289382 - DNA, 15 bp, Homo sapiens
ctccgccatcttact

SEQ ID NO: 1289383 - DNA, 15 bp, Homo sapiens
gctccgccatcttac

SEQ ID NO: 1289384 - DNA, 15 bp, Homo sapiens
ggctccgccatctta

SEQ ID NO: 1289385 - DNA, 15 bp, Homo sapiens
aggctccgccatctt

SEQ ID NO: 1289386 - DNA, 15 bp, Homo sapiens
caggctccgccatct

SEQ ID NO: 1289387 - DNA, 15 bp, Homo sapiens
gcaggctccgccatc

SEQ ID NO: 1289388 - DNA, 15 bp, Homo sapiens
tgcaggctccgccat

SEQ ID NO: 1289389 - DNA, 15 bp, Homo sapiens
gtgcaggctccgcca

SEQ ID NO: 1289390 - DNA, 15 bp, Homo sapiens
tgtgcaggctccgcc

SEQ ID NO: 1289391 - DNA, 15 bp, Homo sapiens
gtgtgcaggctccgc

SEQ ID NO: 1289392 - DNA, 15 bp, Homo sapiens
tgtgtgcaggctccg

SEQ ID NO: 1289393 - DNA, 15 bp, Homo sapiens
ctgtgtgcaggctcc

SEQ ID NO: 1289394 - DNA, 15 bp, Homo sapiens
cctgtgtgcaggctc

SEQ ID NO: 1289395 - DNA, 15 bp, Homo sapiens
gcctgtgtgcaggct

SEQ ID NO: 1289396 - DNA, 15 bp, Homo sapiens
agcctgtgtgcaggc

SEQ ID NO: 1289397 - DNA, 15 bp, Homo sapiens
aagcctgtgtgcagg

SEQ ID NO: 1289398 - DNA, 15 bp, Homo sapiens
aaagcctgtgtgcag

SEQ ID NO: 1289399 - DNA, 15 bp, Homo sapiens
taaagcctgtgtgca

SEQ ID NO: 1289400 - DNA, 15 bp, Homo sapiens
ttaaagcctgtgtgc

SEQ ID NO: 1289401 - DNA, 15 bp, Homo sapiens
tttaaagcctgtgtg

SEQ ID NO: 1289402 - DNA, 15 bp, Homo sapiens
ttttaaagcctgtgt

SEQ ID NO: 1289403 - DNA, 15 bp, Homo sapiens
tttttaaagcctgtg

SEQ ID NO: 1289404 - DNA, 15 bp, Homo sapiens
atttttaaagcctgt

SEQ ID NO: 1289405 - DNA, 15 bp, Homo sapiens
catttttaaagcctg

SEQ ID NO: 1289406 - DNA, 15 bp, Homo sapiens
tcatttttaaagcct

SEQ ID NO: 1289407 - DNA, 15 bp, Homo sapiens
atcatttttaaagcc

SEQ ID NO: 1289408 - DNA, 15 bp, Homo sapiens
aatcatttttaaagc

SEQ ID NO: 1289409 - DNA, 15 bp, Homo sapiens
taatcatttttaaag

SEQ ID NO: 1289410 - DNA, 15 bp, Homo sapiens
ttaatcatttttaaa

SEQ ID NO: 1289411 - DNA, 15 bp, Homo sapiens
tttaatcatttttaa

SEQ ID NO: 1289412 - DNA, 15 bp, Homo sapiens
atttaatcattttta

SEQ ID NO: 1289413 - DNA, 15 bp, Homo sapiens
aatttaatcattttt

SEQ ID NO: 1289414 - DNA, 15 bp, Homo sapiens
taatttaatcatttt

SEQ ID NO: 1289415 - DNA, 15 bp, Homo sapiens
gtaatttaatcattt

SEQ ID NO: 1289416 - DNA, 15 bp, Homo sapiens
agtaatttaatcatt

SEQ ID NO: 1289417 - DNA, 15 bp, Homo sapiens
gagtaatttaatcat

SEQ ID NO: 1289418 - DNA, 15 bp, Homo sapiens
cgagtaatttaatca

SEQ ID NO: 1289419 - DNA, 15 bp, Homo sapiens
acgagtaatttaatc

SEQ ID NO: 1289420 - DNA, 15 bp, Homo sapiens
aacgagtaatttaat

SEQ ID NO: 1289421 - DNA, 15 bp, Homo sapiens
gaacgagtaatttaa

SEQ ID NO: 1289422 - DNA, 15 bp, Homo sapiens
tgaacgagtaattta

SEQ ID NO: 1289423 - DNA, 15 bp, Homo sapiens
ctgaacgagtaattt

SEQ ID NO: 1289424 - DNA, 15 bp, Homo sapiens
actgaacgagtaatt

SEQ ID NO: 1289425 - DNA, 15 bp, Homo sapiens
tactgaacgagtaat

SEQ ID NO: 1289426 - DNA, 15 bp, Homo sapiens
atactgaacgagtaa

SEQ ID NO: 1289427 - DNA, 15 bp, Homo sapiens
catactgaacgagta

SEQ ID NO: 1289428 - DNA, 15 bp, Homo sapiens
tcatactgaacgagt

SEQ ID NO: 1289429 - DNA, 15 bp, Homo sapiens
atcatactgaacgag

SEQ ID NO: 1289430 - DNA, 15 bp, Homo sapiens
gatcatactgaacga

SEQ ID NO: 1289431 - DNA, 15 bp, Homo sapiens
tgatcatactgaacg

SEQ ID NO: 1289432 - DNA, 15 bp, Homo sapiens
ctgatcatactgaac

SEQ ID NO: 1289433 - DNA, 15 bp, Homo sapiens
cctgatcatactgaa

SEQ ID NO: 1289434 - DNA, 15 bp, Homo sapiens
tcctgatcatactga

SEQ ID NO: 1289435 - DNA, 15 bp, Homo sapiens
atcctgatcatactg

SEQ ID NO: 1289436 - DNA, 15 bp, Homo sapiens
aatcctgatcatact

SEQ ID NO: 1289437 - DNA, 15 bp, Homo sapiens
taatcctgatcatac

SEQ ID NO: 1289438 - DNA, 15 bp, Homo sapiens
ataatcctgatcata

SEQ ID NO: 1289439 - DNA, 15 bp, Homo sapiens
cataatcctgatcat

SEQ ID NO: 1289440 - DNA, 15 bp, Homo sapiens
ccataatcctgatca

SEQ ID NO: 1289441 - DNA, 15 bp, Homo sapiens
accataatcctgatc

SEQ ID NO: 1289442 - DNA, 15 bp, Homo sapiens
gaccataatcctgat

SEQ ID NO: 1289443 - DNA, 15 bp, Homo sapiens
tgaccataatcctga

SEQ ID NO: 1289444 - DNA, 15 bp, Homo sapiens
ttgaccataatcctg

SEQ ID NO: 1289445 - DNA, 15 bp, Homo sapiens
cttgaccataatcct

SEQ ID NO: 1289446 - DNA, 15 bp, Homo sapiens
acttgaccataatcc

SEQ ID NO: 1289447 - DNA, 15 bp, Homo sapiens
cacttgaccataatc

SEQ ID NO: 1289448 - DNA, 15 bp, Homo sapiens
gcacttgaccataat

SEQ ID NO: 1289449 - DNA, 15 bp, Homo sapiens
ggcacttgaccataa

SEQ ID NO: 1289450 - DNA, 15 bp, Homo sapiens
aggcacttgaccata

SEQ ID NO: 1289451 - DNA, 15 bp, Homo sapiens
aaggcacttgaccat

SEQ ID NO: 1289452 - DNA, 15 bp, Homo sapiens
gaaggcacttgacca

SEQ ID NO: 1289453 - DNA, 15 bp, Homo sapiens
agaaggcacttgacc

SEQ ID NO: 1289454 - DNA, 15 bp, Homo sapiens
aagaaggcacttgac

SEQ ID NO: 1289455 - DNA, 15 bp, Homo sapiens
aaagaaggcacttga

SEQ ID NO: 1289456 - DNA, 15 bp, Homo sapiens
gaaagaaggcacttg

SEQ ID NO: 1289457 - DNA, 15 bp, Homo sapiens
agaaagaaggcactt

SEQ ID NO: 1289458 - DNA, 15 bp, Homo sapiens
cagaaagaaggcact

SEQ ID NO: 1289459 - DNA, 15 bp, Homo sapiens
gcagaaagaaggcac

SEQ ID NO: 1289460 - DNA, 15 bp, Homo sapiens
agcagaaagaaggca

SEQ ID NO: 1289461 - DNA, 15 bp, Homo sapiens
gagcagaaagaaggc

SEQ ID NO: 1289462 - DNA, 15 bp, Homo sapiens
agagcagaaagaagg

SEQ ID NO: 1289463 - DNA, 15 bp, Homo sapiens
aagagcagaaagaag

SEQ ID NO: 1289464 - DNA, 15 bp, Homo sapiens
gaagagcagaaagaa

SEQ ID NO: 1289465 - DNA, 15 bp, Homo sapiens
agaagagcagaaaga

SEQ ID NO: 1289466 - DNA, 15 bp, Homo sapiens
cagaagagcagaaag

SEQ ID NO: 1289467 - DNA, 15 bp, Homo sapiens
acagaagagcagaaa

SEQ ID NO: 1289468 - DNA, 15 bp, Homo sapiens
gacagaagagcagaa

SEQ ID NO: 1289469 - DNA, 15 bp, Homo sapiens
agacagaagagcaga

SEQ ID NO: 1289470 - DNA, 15 bp, Homo sapiens
cagacagaagagcag

SEQ ID NO: 1289471 - DNA, 15 bp, Homo sapiens
tcagacagaagagca

SEQ ID NO: 1289472 - DNA, 15 bp, Homo sapiens
agtcagacagaagag

SEQ ID NO: 1289473 - DNA, 15 bp, Homo sapiens
aagtcagacagaaga

SEQ ID NO: 1289474 - DNA, 15 bp, Homo sapiens
caagtcagacagaag

SEQ ID NO: 1289475 - DNA, 15 bp, Homo sapiens
gcaagtcagacagaa

SEQ ID NO: 1289476 - DNA, 15 bp, Homo sapiens
tgcaagtcagacaga

SEQ ID NO: 1289477 - DNA, 15 bp, Homo sapiens
ctgcaagtcagacag

SEQ ID NO: 1289478 - DNA, 15 bp, Homo sapiens
gctgcaagtcagaca

SEQ ID NO: 1289479 - DNA, 15 bp, Homo sapiens
agctgcaagtcagac

SEQ ID NO: 1289480 - DNA, 15 bp, Homo sapiens
tagctgcaagtcaga

SEQ ID NO: 1289481 - DNA, 15 bp, Homo sapiens
ttagctgcaagtcag

SEQ ID NO: 1289482 - DNA, 15 bp, Homo sapiens
tttagctgcaagtca

SEQ ID NO: 1289483 - DNA, 15 bp, Homo sapiens
ttttagctgcaagtc

SEQ ID NO: 1289484 - DNA, 15 bp, Homo sapiens
tttttagctgcaagt

SEQ ID NO: 1289485 - DNA, 15 bp, Homo sapiens
atttttagctgcaag

SEQ ID NO: 1289486 - DNA, 15 bp, Homo sapiens
tatttttagctgcaa

SEQ ID NO: 1289487 - DNA, 15 bp, Homo sapiens
ttatttttagctgca

SEQ ID NO: 1289488 - DNA, 15 bp, Homo sapiens
tttatttttagctgc

SEQ ID NO: 1289489 - DNA, 15 bp, Homo sapiens
ttttatttttagctg

SEQ ID NO: 1289490 - DNA, 15 bp, Homo sapiens
cttttatttttagct

SEQ ID NO: 1289491 - DNA, 15 bp, Homo sapiens
acttttatttttagc

SEQ ID NO: 1289492 - DNA, 15 bp, Homo sapiens
gacttttatttttag

SEQ ID NO: 1289493 - DNA, 15 bp, Homo sapiens
tgacttttattttta

SEQ ID NO: 1289494 - DNA, 15 bp, Homo sapiens
ctgacttttattttt

SEQ ID NO: 1289495 - DNA, 15 bp, Homo sapiens
cctgacttttatttt

SEQ ID NO: 1289496 - DNA, 15 bp, Homo sapiens
tcctgacttttattt

SEQ ID NO: 1289497 - DNA, 15 bp, Homo sapiens
ttcctgacttttatt

SEQ ID NO: 1289498 - DNA, 15 bp, Homo sapiens
attcctgacttttat

SEQ ID NO: 1289499 - DNA, 15 bp, Homo sapiens
aattcctgactttta

SEQ ID NO: 1289500 - DNA, 15 bp, Homo sapiens
taattcctgactttt

SEQ ID NO: 1289501 - DNA, 15 bp, Homo sapiens
ctaattcctgacttt

SEQ ID NO: 1289502 - DNA, 15 bp, Homo sapiens
tctaattcctgactt

SEQ ID NO: 1289503 - DNA, 15 bp, Homo sapiens
atctaattcctgact

SEQ ID NO: 1289504 - DNA, 15 bp, Homo sapiens
aatctaattcctgac

SEQ ID NO: 1289505 - DNA, 15 bp, Homo sapiens
gaatctaattcctga

SEQ ID NO: 1289506 - DNA, 15 bp, Homo sapiens
agaatctaattcctg

SEQ ID NO: 1289507 - DNA, 15 bp, Homo sapiens
aagaatctaattcct

SEQ ID NO: 1289508 - DNA, 15 bp, Homo sapiens
gaagaatctaattcc

SEQ ID NO: 1289509 - DNA, 15 bp, Homo sapiens
agaagaatctaattc

SEQ ID NO: 1289510 - DNA, 15 bp, Homo sapiens
aagaagaatctaatt

SEQ ID NO: 1289511 - DNA, 15 bp, Homo sapiens
aaagaagaatctaat

SEQ ID NO: 1289512 - DNA, 15 bp, Homo sapiens
aaaagaagaatctaa

SEQ ID NO: 1289513 - DNA, 15 bp, Homo sapiens
aaaaagaagaatcta

SEQ ID NO: 1289514 - DNA, 15 bp, Homo sapiens
gaaaaagaagaatct

SEQ ID NO: 1289515 - DNA, 15 bp, Homo sapiens
agaaaaagaagaatc

SEQ ID NO: 1289516 - DNA, 15 bp, Homo sapiens
aagaaaaagaagaat

SEQ ID NO: 1289517 - DNA, 15 bp, Homo sapiens
gaagaaaaagaagaa

SEQ ID NO: 1289518 - DNA, 15 bp, Homo sapiens
agaagaaaaagaaga

SEQ ID NO: 1289519 - DNA, 15 bp, Homo sapiens
gagaagaaaaagaag

SEQ ID NO: 1289520 - DNA, 15 bp, Homo sapiens
ggagaagaaaaagaa

SEQ ID NO: 1289521 - DNA, 15 bp, Homo sapiens
tggagaagaaaaaga

SEQ ID NO: 1289522 - DNA, 15 bp, Homo sapiens
gtggagaagaaaaag

SEQ ID NO: 1289523 - DNA, 15 bp, Homo sapiens
agtggagaagaaaaa

SEQ ID NO: 1289524 - DNA, 15 bp, Homo sapiens
cagtggagaagaaaa

SEQ ID NO: 1289525 - DNA, 15 bp, Homo sapiens
tcagtggagaagaaa

SEQ ID NO: 1289526 - DNA, 15 bp, Homo sapiens
ttcagtggagaagaa

SEQ ID NO: 1289527 - DNA, 15 bp, Homo sapiens
cttcagtggagaaga

SEQ ID NO: 1289528 - DNA, 15 bp, Homo sapiens
tcttcagtggagaag

SEQ ID NO: 1289529 - DNA, 15 bp, Homo sapiens
ctcttcagtggagaa

SEQ ID NO: 1289530 - DNA, 15 bp, Homo sapiens
gctcttcagtggaga

SEQ ID NO: 1289531 - DNA, 15 bp, Homo sapiens
tgctcttcagtggag

SEQ ID NO: 1289532 - DNA, 15 bp, Homo sapiens
gtgctcttcagtgga

SEQ ID NO: 1289533 - DNA, 15 bp, Homo sapiens
ggtgctcttcagtgg

SEQ ID NO: 1289534 - DNA, 15 bp, Homo sapiens
gggtgctcttcagtg

SEQ ID NO: 1289535 - DNA, 15 bp, Homo sapiens
agggtgctcttcagt

SEQ ID NO: 1289536 - DNA, 15 bp, Homo sapiens
aagggtgctcttcag

SEQ ID NO: 1289537 - DNA, 15 bp, Homo sapiens
aaagggtgctcttca

SEQ ID NO: 1289538 - DNA, 15 bp, Homo sapiens
caaagggtgctcttc

SEQ ID NO: 1289539 - DNA, 15 bp, Homo sapiens
acaaagggtgctctt

SEQ ID NO: 1289540 - DNA, 15 bp, Homo sapiens
cacaaagggtgctct

SEQ ID NO: 1289541 - DNA, 15 bp, Homo sapiens
ccacaaagggtgctc

SEQ ID NO: 1289542 - DNA, 15 bp, Homo sapiens
accacaaagggtgct

SEQ ID NO: 1289543 - DNA, 15 bp, Homo sapiens
gaccacaaagggtgc

SEQ ID NO: 1289544 - DNA, 15 bp, Homo sapiens
cgaccacaaagggtg

SEQ ID NO: 1289545 - DNA, 15 bp, Homo sapiens
gcgaccacaaagggt

SEQ ID NO: 1289546 - DNA, 15 bp, Homo sapiens
agcgaccacaaaggg

SEQ ID NO: 1289547 - DNA, 15 bp, Homo sapiens
cagcgaccacaaagg

SEQ ID NO: 1289548 - DNA, 15 bp, Homo sapiens
ccagcgaccacaaag

SEQ ID NO: 1289549 - DNA, 15 bp, Homo sapiens
gccagcgaccacaaa

SEQ ID NO: 1289550 - DNA, 15 bp, Homo sapiens
cgccagcgaccacaa

SEQ ID NO: 1289551 - DNA, 15 bp, Homo sapiens
gcgccagcgaccaca

SEQ ID NO: 1289552 - DNA, 15 bp, Homo sapiens
agcgccagcgaccac

SEQ ID NO: 1289553 - DNA, 15 bp, Homo sapiens
cagcgccagcgacca

SEQ ID NO: 1289554 - DNA, 15 bp, Homo sapiens
ccagcgccagcgacc

SEQ ID NO: 1289555 - DNA, 15 bp, Homo sapiens
accagcgccagcgac

SEQ ID NO: 1289556 - DNA, 15 bp, Homo sapiens
aaccagcgccagcga

SEQ ID NO: 1289557 - DNA, 15 bp, Homo sapiens
taaccagcgccagcg

SEQ ID NO: 1289558 - DNA, 15 bp, Homo sapiens
ctaaccagcgccagc

SEQ ID NO: 1289559 - DNA, 15 bp, Homo sapiens
cctaaccagcgccag

SEQ ID NO: 1289560 - DNA, 15 bp, Homo sapiens
tcctaaccagcgcca

SEQ ID NO: 1289561 - DNA, 15 bp, Homo sapiens
ctcctaaccagcgcc

SEQ ID NO: 1289562 - DNA, 15 bp, Homo sapiens
cctcctaaccagcgc

SEQ ID NO: 1289563 - DNA, 15 bp, Homo sapiens
tcctcctaaccagcg

SEQ ID NO: 1289564 - DNA, 15 bp, Homo sapiens
ctcctcctaaccagc

SEQ ID NO: 1289565 - DNA, 15 bp, Homo sapiens
tctcctcctaaccag

SEQ ID NO: 1289566 - DNA, 15 bp, Homo sapiens
atctcctcctaacca

SEQ ID NO: 1289567 - DNA, 15 bp, Homo sapiens
gatctcctcctaacc

SEQ ID NO: 1289568 - DNA, 15 bp, Homo sapiens
ggatctcctcctaac

SEQ ID NO: 1289569 - DNA, 15 bp, Homo sapiens
gggatctcctcctaa

SEQ ID NO: 1289570 - DNA, 15 bp, Homo sapiens
ggggatctcctccta

SEQ ID NO: 1289571 - DNA, 15 bp, Homo sapiens
aggggatctcctcct

SEQ ID NO: 1289572 - DNA, 15 bp, Homo sapiens
caggggatctcctcc

SEQ ID NO: 1289573 - DNA, 15 bp, Homo sapiens
gcaggggatctcctc

SEQ ID NO: 1289574 - DNA, 15 bp, Homo sapiens
ggcaggggatctcct

SEQ ID NO: 1289575 - DNA, 15 bp, Homo sapiens
gggcaggggatctcc

SEQ ID NO: 1289576 - DNA, 15 bp, Homo sapiens
tgggcaggggatctc

SEQ ID NO: 1289577 - DNA, 15 bp, Homo sapiens
ctgggcaggggatct

SEQ ID NO: 1289578 - DNA, 15 bp, Homo sapiens
tctgggcaggggatc

SEQ ID NO: 1289579 - DNA, 15 bp, Homo sapiens
ctctgggcaggggat

SEQ ID NO: 1289580 - DNA, 15 bp, Homo sapiens
gctctgggcagggga

SEQ ID NO: 1289581 - DNA, 15 bp, Homo sapiens
ggctctgggcagggg

SEQ ID NO: 1289582 - DNA, 15 bp, Homo sapiens
gggctctgggcaggg

SEQ ID NO: 1289583 - DNA, 15 bp, Homo sapiens
agggctctgggcagg

SEQ ID NO: 1289584 - DNA, 15 bp, Homo sapiens
gagggctctgggcag

SEQ ID NO: 1289585 - DNA, 15 bp, Homo sapiens
tgagggctctgggca

SEQ ID NO: 1289586 - DNA, 15 bp, Homo sapiens
atgagggctctgggc

SEQ ID NO: 1289587 - DNA, 15 bp, Homo sapiens
catgagggctctggg

SEQ ID NO: 1289588 - DNA, 15 bp, Homo sapiens
acatgagggctctgg

SEQ ID NO: 1289589 - DNA, 15 bp, Homo sapiens
cacatgagggctctg

SEQ ID NO: 1289590 - DNA, 15 bp, Homo sapiens
ccacatgagggctct

SEQ ID NO: 1289591 - DNA, 15 bp, Homo sapiens
cccacatgagggctc

SEQ ID NO: 1289592 - DNA, 15 bp, Homo sapiens
ccccacatgagggct

SEQ ID NO: 1289593 - DNA, 15 bp, Homo sapiens
tccccacatgagggc

SEQ ID NO: 1289594 - DNA, 15 bp, Homo sapiens
gtccccacatgaggg

SEQ ID NO: 1289595 - DNA, 15 bp, Homo sapiens
tgtccccacatgagg

SEQ ID NO: 1289596 - DNA, 15 bp, Homo sapiens
ctgtccccacatgag

SEQ ID NO: 1289597 - DNA, 15 bp, Homo sapiens
cctgtccccacatga

SEQ ID NO: 1289598 - DNA, 15 bp, Homo sapiens
tcctgtccccacatg

SEQ ID NO: 1289599 - DNA, 15 bp, Homo sapiens
atcctgtccccacat

SEQ ID NO: 1289600 - DNA, 15 bp, Homo sapiens
gatcctgtccccaca

SEQ ID NO: 1289601 - DNA, 15 bp, Homo sapiens
agatcctgtccccac

SEQ ID NO: 1289602 - DNA, 15 bp, Homo sapiens
aagatcctgtcccca

SEQ ID NO: 1289603 - DNA, 15 bp, Homo sapiens
gaagatcctgtcccc

SEQ ID NO: 1289604 - DNA, 15 bp, Homo sapiens
ggaagatcctgtccc

SEQ ID NO: 1289605 - DNA, 15 bp, Homo sapiens
cggaagatcctgtcc

SEQ ID NO: 1289606 - DNA, 15 bp, Homo sapiens
ccggaagatcctgtc

SEQ ID NO: 1289607 - DNA, 15 bp, Homo sapiens
gccggaagatcctgt

SEQ ID NO: 1289608 - DNA, 15 bp, Homo sapiens
tgccggaagatcctg

SEQ ID NO: 1289609 - DNA, 15 bp, Homo sapiens
ctgccggaagatcct

SEQ ID NO: 1289610 - DNA, 15 bp, Homo sapiens
gctgccggaagatcc

SEQ ID NO: 1289611 - DNA, 15 bp, Homo sapiens
tgctgccggaagatc

SEQ ID NO: 1289612 - DNA, 15 bp, Homo sapiens
gtgctgccggaagat

SEQ ID NO: 1289613 - DNA, 15 bp, Homo sapiens
agtgctgccggaaga

SEQ ID NO: 1289614 - DNA, 15 bp, Homo sapiens
cagtgctgccggaag

SEQ ID NO: 1289615 - DNA, 15 bp, Homo sapiens
ccagtgctgccggaa

SEQ ID NO: 1289616 - DNA, 15 bp, Homo sapiens
cccagtgctgccgga

SEQ ID NO: 1289617 - DNA, 15 bp, Homo sapiens
acccagtgctgccgg

SEQ ID NO: 1289618 - DNA, 15 bp, Homo sapiens
cacccagtgctgccg

SEQ ID NO: 1289619 - DNA, 15 bp, Homo sapiens
acacccagtgctgcc

SEQ ID NO: 1289620 - DNA, 15 bp, Homo sapiens
aacacccagtgctgc

SEQ ID NO: 1289621 - DNA, 15 bp, Homo sapiens
gaacacccagtgctg

SEQ ID NO: 1289622 - DNA, 15 bp, Homo sapiens
tgaacacccagtgct

SEQ ID NO: 1289623 - DNA, 15 bp, Homo sapiens
ttgaacacccagtgc

SEQ ID NO: 1289624 - DNA, 15 bp, Homo sapiens
cttgaacacccagtg

SEQ ID NO: 1289625 - DNA, 15 bp, Homo sapiens
ccttgaacacccagt

SEQ ID NO: 1289626 - DNA, 15 bp, Homo sapiens
accttgaacacccag

SEQ ID NO: 1289627 - DNA, 15 bp, Homo sapiens
taccttgaacaccca

SEQ ID NO: 1289628 - DNA, 15 bp, Homo sapiens
ctaccttgaacaccc

SEQ ID NO: 1289629 - DNA, 15 bp, Homo sapiens
cctaccttgaacacc

SEQ ID NO: 1289630 - DNA, 15 bp, Homo sapiens
ccctaccttgaacac

SEQ ID NO: 1289631 - DNA, 15 bp, Homo sapiens
accctaccttgaaca

SEQ ID NO: 1289632 - DNA, 15 bp, Homo sapiens
caccctaccttgaac

SEQ ID NO: 1289633 - DNA, 15 bp, Homo sapiens
gcaccctaccttgaa

SEQ ID NO: 1289634 - DNA, 15 bp, Homo sapiens
ggcaccctaccttga

SEQ ID NO: 1289635 - DNA, 15 bp, Homo sapiens
cggcaccctaccttg

SEQ ID NO: 1289636 - DNA, 15 bp, Homo sapiens
ccggcaccctacctt

SEQ ID NO: 1289637 - DNA, 15 bp, Homo sapiens
cccggcaccctacct

SEQ ID NO: 1289638 - DNA, 15 bp, Homo sapiens
gcccggcaccctacc

SEQ ID NO: 1289639 - DNA, 15 bp, Homo sapiens
ggcccggcaccctac

SEQ ID NO: 1289640 - DNA, 15 bp, Homo sapiens
aggcccggcacccta

SEQ ID NO: 1289641 - DNA, 15 bp, Homo sapiens
aaggcccggcaccct

SEQ ID NO: 1289642 - DNA, 15 bp, Homo sapiens
aaaggcccggcaccc

SEQ ID NO: 1289643 - DNA, 15 bp, Homo sapiens
caaaggcccggcacc

SEQ ID NO: 1289644 - DNA, 15 bp, Homo sapiens
ccaaaggcccggcac

SEQ ID NO: 1289645 - DNA, 15 bp, Homo sapiens
accaaaggcccggca

SEQ ID NO: 1289646 - DNA, 15 bp, Homo sapiens
aaccaaaggcccggc

SEQ ID NO: 1289647 - DNA, 15 bp, Homo sapiens
aaaccaaaggcccgg

SEQ ID NO: 1289648 - DNA, 15 bp, Homo sapiens
taaaccaaaggcccg

SEQ ID NO: 1289649 - DNA, 15 bp, Homo sapiens
gtaaaccaaaggccc

SEQ ID NO: 1289650 - DNA, 15 bp, Homo sapiens
tgtaaaccaaaggcc

SEQ ID NO: 1289651 - DNA, 15 bp, Homo sapiens
atgtaaaccaaaggc

SEQ ID NO: 1289652 - DNA, 15 bp, Homo sapiens
aatgtaaaccaaagg

SEQ ID NO: 1289653 - DNA, 15 bp, Homo sapiens
aaatgtaaaccaaag

SEQ ID NO: 1289654 - DNA, 15 bp, Homo sapiens
gaaatgtaaaccaaa

SEQ ID NO: 1289655 - DNA, 15 bp, Homo sapiens
agaaatgtaaaccaa

SEQ ID NO: 1289656 - DNA, 15 bp, Homo sapiens
cagaaatgtaaacca

SEQ ID NO: 1289657 - DNA, 15 bp, Homo sapiens
ccagaaatgtaaacc

SEQ ID NO: 1289658 - DNA, 15 bp, Homo sapiens
atccagaaatgtaaa

SEQ ID NO: 1289659 - DNA, 15 bp, Homo sapiens
catccagaaatgtaa

SEQ ID NO: 1289660 - DNA, 15 bp, Homo sapiens
tcatccagaaatgta

SEQ ID NO: 1289661 - DNA, 15 bp, Homo sapiens
ttcatccagaaatgt

SEQ ID NO: 1289662 - DNA, 15 bp, Homo sapiens
cttcatccagaaatg

SEQ ID NO: 1289663 - DNA, 15 bp, Homo sapiens
gcttcatccagaaat

SEQ ID NO: 1289664 - DNA, 15 bp, Homo sapiens
agcttcatccagaaa

SEQ ID NO: 1289665 - DNA, 15 bp, Homo sapiens
gagcttcatccagaa

SEQ ID NO: 1289666 - DNA, 15 bp, Homo sapiens
agagcttcatccaga

SEQ ID NO: 1289667 - DNA, 15 bp, Homo sapiens
aagagcttcatccag

SEQ ID NO: 1289668 - DNA, 15 bp, Homo sapiens
gaagagcttcatcca

SEQ ID NO: 1289669 - DNA, 15 bp, Homo sapiens
agaagagcttcatcc

SEQ ID NO: 1289670 - DNA, 15 bp, Homo sapiens
cagaagagcttcatc

SEQ ID NO: 1289671 - DNA, 15 bp, Homo sapiens
gcagaagagcttcat

SEQ ID NO: 1289672 - DNA, 15 bp, Homo sapiens
agcagaagagcttca

SEQ ID NO: 1289673 - DNA, 15 bp, Homo sapiens
cagcagaagagcttc

SEQ ID NO: 1289674 - DNA, 15 bp, Homo sapiens
gcagcagaagagctt

SEQ ID NO: 1289675 - DNA, 15 bp, Homo sapiens
ggcagcagaagagct

SEQ ID NO: 1289676 - DNA, 15 bp, Homo sapiens
gggcagcagaagagc

SEQ ID NO: 1289677 - DNA, 15 bp, Homo sapiens
agggcagcagaagag

SEQ ID NO: 1289678 - DNA, 15 bp, Homo sapiens
tagggcagcagaaga

SEQ ID NO: 1289679 - DNA, 15 bp, Homo sapiens
gtagggcagcagaag

SEQ ID NO: 1289680 - DNA, 15 bp, Homo sapiens
ggtagggcagcagaa

SEQ ID NO: 1289681 - DNA, 15 bp, Homo sapiens
gggtagggcagcaga

SEQ ID NO: 1289682 - DNA, 15 bp, Homo sapiens
agggtagggcagcag

SEQ ID NO: 1289683 - DNA, 15 bp, Homo sapiens
gagggtagggcagca

SEQ ID NO: 1289684 - DNA, 15 bp, Homo sapiens
ggagggtagggcagc

SEQ ID NO: 1289685 - DNA, 15 bp, Homo sapiens
gggagggtagggcag

SEQ ID NO: 1289686 - DNA, 15 bp, Homo sapiens
agggagggtagggca

SEQ ID NO: 1289687 - DNA, 15 bp, Homo sapiens
gagggagggtagggc

SEQ ID NO: 1289688 - DNA, 15 bp, Homo sapiens
agagggagggtaggg

SEQ ID NO: 1289689 - DNA, 15 bp, Homo sapiens
cagagggagggtagg

SEQ ID NO: 1289690 - DNA, 15 bp, Homo sapiens
acagagggagggtag

SEQ ID NO: 1289691 - DNA, 15 bp, Homo sapiens
gacagagggagggta

SEQ ID NO: 1289692 - DNA, 15 bp, Homo sapiens
agacagagggagggt

SEQ ID NO: 1289693 - DNA, 15 bp, Homo sapiens
cagacagagggaggg

SEQ ID NO: 1289694 - DNA, 15 bp, Homo sapiens
tcagacagagggagg

SEQ ID NO: 1289695 - DNA, 15 bp, Homo sapiens
ctcagacagagggag

SEQ ID NO: 1289696 - DNA, 15 bp, Homo sapiens
cctcagacagaggga

SEQ ID NO: 1289697 - DNA, 15 bp, Homo sapiens
gcctcagacagaggg

SEQ ID NO: 1289698 - DNA, 15 bp, Homo sapiens
ggcctcagacagagg

SEQ ID NO: 1289699 - DNA, 15 bp, Homo sapiens
tggcctcagacagag

SEQ ID NO: 1289700 - DNA, 15 bp, Homo sapiens
gtggcctcagacaga

SEQ ID NO: 1289701 - DNA, 15 bp, Homo sapiens
ggtggcctcagacag

SEQ ID NO: 1289702 - DNA, 15 bp, Homo sapiens
gggtggcctcagaca

SEQ ID NO: 1289703 - DNA, 15 bp, Homo sapiens
cgggtggcctcagac

SEQ ID NO: 1289704 - DNA, 15 bp, Homo sapiens
ccgggtggcctcaga

SEQ ID NO: 1289705 - DNA, 15 bp, Homo sapiens
tccgggtggcctcag

SEQ ID NO: 1289706 - DNA, 15 bp, Homo sapiens
ctccgggtggcctca

SEQ ID NO: 1289707 - DNA, 15 bp, Homo sapiens
actccgggtggcctc

SEQ ID NO: 1289708 - DNA, 15 bp, Homo sapiens
gactccgggtggcct

SEQ ID NO: 1289709 - DNA, 15 bp, Homo sapiens
agactccgggtggcc

SEQ ID NO: 1289710 - DNA, 15 bp, Homo sapiens
aagactccgggtggc

SEQ ID NO: 1289711 - DNA, 15 bp, Homo sapiens
gaagactccgggtgg

SEQ ID NO: 1289712 - DNA, 15 bp, Homo sapiens
ggaagactccgggtg

SEQ ID NO: 1289713 - DNA, 15 bp, Homo sapiens
gggaagactccgggt

SEQ ID NO: 1289714 - DNA, 15 bp, Homo sapiens
agggaagactccggg

SEQ ID NO: 1289715 - DNA, 15 bp, Homo sapiens
aagggaagactccgg

SEQ ID NO: 1289716 - DNA, 15 bp, Homo sapiens
aaagggaagactccg

SEQ ID NO: 1289717 - DNA, 15 bp, Homo sapiens
caaagggaagactcc

SEQ ID NO: 1289718 - DNA, 15 bp, Homo sapiens
gcaaagggaagactc

SEQ ID NO: 1289719 - DNA, 15 bp, Homo sapiens
cgcaaagggaagact

SEQ ID NO: 1289720 - DNA, 15 bp, Homo sapiens
ccgcaaagggaagac

SEQ ID NO: 1289721 - DNA, 15 bp, Homo sapiens
gccgcaaagggaaga

SEQ ID NO: 1289722 - DNA, 15 bp, Homo sapiens
tgccgcaaagggaag

SEQ ID NO: 1289723 - DNA, 15 bp, Homo sapiens
gtgccgcaaagggaa

SEQ ID NO: 1289724 - DNA, 15 bp, Homo sapiens
tgtgccgcaaaggga

SEQ ID NO: 1289725 - DNA, 15 bp, Homo sapiens
gtgtgccgcaaaggg

SEQ ID NO: 1289726 - DNA, 15 bp, Homo sapiens
tgtgtgccgcaaagg

SEQ ID NO: 1289727 - DNA, 15 bp, Homo sapiens
ctgtgtgccgcaaag

SEQ ID NO: 1289728 - DNA, 15 bp, Homo sapiens
actgtgtgccgcaaa

SEQ ID NO: 1289729 - DNA, 15 bp, Homo sapiens
tactgtgtgccgcaa

SEQ ID NO: 1289730 - DNA, 15 bp, Homo sapiens
ttactgtgtgccgca

SEQ ID NO: 1289731 - DNA, 15 bp, Homo sapiens
cttactgtgtgccgc

SEQ ID NO: 1289732 - DNA, 15 bp, Homo sapiens
gcttactgtgtgccg

SEQ ID NO: 1289733 - DNA, 15 bp, Homo sapiens
tgcttactgtgtgcc

SEQ ID NO: 1289734 - DNA, 15 bp, Homo sapiens
ctgcttactgtgtgc

SEQ ID NO: 1289735 - DNA, 15 bp, Homo sapiens
gctgcttactgtgtg

SEQ ID NO: 1289736 - DNA, 15 bp, Homo sapiens
agctgcttactgtgt

SEQ ID NO: 1289737 - DNA, 15 bp, Homo sapiens
aagctgcttactgtg

SEQ ID NO: 1289738 - DNA, 15 bp, Homo sapiens
aaagctgcttactgt

SEQ ID NO: 1289739 - DNA, 15 bp, Homo sapiens
taaagctgcttactg

SEQ ID NO: 1289740 - DNA, 15 bp, Homo sapiens
ctaaagctgcttact

SEQ ID NO: 1289741 - DNA, 15 bp, Homo sapiens
actaaagctgcttac

SEQ ID NO: 1289742 - DNA, 15 bp, Homo sapiens
cactaaagctgctta

SEQ ID NO: 1289743 - DNA, 15 bp, Homo sapiens
tcactaaagctgctt

SEQ ID NO: 1289744 - DNA, 15 bp, Homo sapiens
gtcactaaagctgct

SEQ ID NO: 1289745 - DNA, 15 bp, Homo sapiens
tgtcactaaagctgc

SEQ ID NO: 1289746 - DNA, 15 bp, Homo sapiens
gtgtcactaaagctg

SEQ ID NO: 1289747 - DNA, 15 bp, Homo sapiens
cgtgtcactaaagct

SEQ ID NO: 1289748 - DNA, 15 bp, Homo sapiens
acgtgtcactaaagc

SEQ ID NO: 1289749 - DNA, 15 bp, Homo sapiens
aacgtgtcactaaag

SEQ ID NO: 1289750 - DNA, 15 bp, Homo sapiens
aaacgtgtcactaaa

SEQ ID NO: 1289751 - DNA, 15 bp, Homo sapiens
gaaacgtgtcactaa

SEQ ID NO: 1289752 - DNA, 15 bp, Homo sapiens
ggaaacgtgtcacta

SEQ ID NO: 1289753 - DNA, 15 bp, Homo sapiens
cggaaacgtgtcact

SEQ ID NO: 1289754 - DNA, 15 bp, Homo sapiens
ccggaaacgtgtcac

SEQ ID NO: 1289755 - DNA, 15 bp, Homo sapiens
cccggaaacgtgtca

SEQ ID NO: 1289756 - DNA, 15 bp, Homo sapiens
gcccggaaacgtgtc

SEQ ID NO: 1289757 - DNA, 15 bp, Homo sapiens
ggcccggaaacgtgt

SEQ ID NO: 1289758 - DNA, 15 bp, Homo sapiens
aggcccggaaacgtg

SEQ ID NO: 1289759 - DNA, 15 bp, Homo sapiens
gaggcccggaaacgt

SEQ ID NO: 1289760 - DNA, 15 bp, Homo sapiens
tgaggcccggaaacg

SEQ ID NO: 1289761 - DNA, 15 bp, Homo sapiens
gtgaggcccggaaac

SEQ ID NO: 1289762 - DNA, 15 bp, Homo sapiens
ggtgaggcccggaaa

SEQ ID NO: 1289763 - DNA, 15 bp, Homo sapiens
aggtgaggcccggaa

SEQ ID NO: 1289764 - DNA, 15 bp, Homo sapiens
gaggtgaggcccgga

SEQ ID NO: 1289765 - DNA, 15 bp, Homo sapiens
ggaggtgaggcccgg

SEQ ID NO: 1289766 - DNA, 15 bp, Homo sapiens
aggaggtgaggcccg

SEQ ID NO: 1289767 - DNA, 15 bp, Homo sapiens
gaggaggtgaggccc

SEQ ID NO: 1289768 - DNA, 15 bp, Homo sapiens
tgaggaggtgaggcc

SEQ ID NO: 1289769 - DNA, 15 bp, Homo sapiens
ctgaggaggtgaggc

SEQ ID NO: 1289770 - DNA, 15 bp, Homo sapiens
actgaggaggtgagg

SEQ ID NO: 1289771 - DNA, 15 bp, Homo sapiens
caaactgaggaggtg

SEQ ID NO: 1289772 - DNA, 15 bp, Homo sapiens
gcaaactgaggaggt

SEQ ID NO: 1289773 - DNA, 15 bp, Homo sapiens
agcaaactgaggagg

SEQ ID NO: 1289774 - DNA, 15 bp, Homo sapiens
cagcaaactgaggag

SEQ ID NO: 1289775 - DNA, 15 bp, Homo sapiens
tcagcaaactgagga

SEQ ID NO: 1289776 - DNA, 15 bp, Homo sapiens
ctcagcaaactgagg

SEQ ID NO: 1289777 - DNA, 15 bp, Homo sapiens
actcagcaaactgag

SEQ ID NO: 1289778 - DNA, 15 bp, Homo sapiens
gactcagcaaactga

SEQ ID NO: 1289779 - DNA, 15 bp, Homo sapiens
agactcagcaaactg

SEQ ID NO: 1289780 - DNA, 15 bp, Homo sapiens
gagactcagcaaact

SEQ ID NO: 1289781 - DNA, 15 bp, Homo sapiens
ggagactcagcaaac

SEQ ID NO: 1289782 - DNA, 15 bp, Homo sapiens
tggagactcagcaaa

SEQ ID NO: 1289783 - DNA, 15 bp, Homo sapiens
atggagactcagcaa

SEQ ID NO: 1289784 - DNA, 15 bp, Homo sapiens
aatggagactcagca

SEQ ID NO: 1289785 - DNA, 15 bp, Homo sapiens
taatggagactcagc

SEQ ID NO: 1289786 - DNA, 15 bp, Homo sapiens
gtaatggagactcag

SEQ ID NO: 1289787 - DNA, 15 bp, Homo sapiens
tgtaatggagactca

SEQ ID NO: 1289788 - DNA, 15 bp, Homo sapiens
atgtaatggagactc

SEQ ID NO: 1289789 - DNA, 15 bp, Homo sapiens
gatgtaatggagact

SEQ ID NO: 1289790 - DNA, 15 bp, Homo sapiens
agatgtaatggagac

SEQ ID NO: 1289791 - DNA, 15 bp, Homo sapiens
cagatgtaatggaga

SEQ ID NO: 1289792 - DNA, 15 bp, Homo sapiens
acagatgtaatggag

SEQ ID NO: 1289793 - DNA, 15 bp, Homo sapiens
cacagatgtaatgga

SEQ ID NO: 1289794 - DNA, 15 bp, Homo sapiens
ccacagatgtaatgg

SEQ ID NO: 1289795 - DNA, 15 bp, Homo sapiens
gccacagatgtaatg

SEQ ID NO: 1289796 - DNA, 15 bp, Homo sapiens
tgccacagatgtaat

SEQ ID NO: 1289797 - DNA, 15 bp, Homo sapiens
gtgccacagatgtaa

SEQ ID NO: 1289798 - DNA, 15 bp, Homo sapiens
ggtgccacagatgta

SEQ ID NO: 1289799 - DNA, 15 bp, Homo sapiens
cggtgccacagatgt

SEQ ID NO: 1289800 - DNA, 15 bp, Homo sapiens
acggtgccacagatg

SEQ ID NO: 1289801 - DNA, 15 bp, Homo sapiens
aacggtgccacagat

SEQ ID NO: 1289802 - DNA, 15 bp, Homo sapiens
aaacggtgccacaga

SEQ ID NO: 1289803 - DNA, 15 bp, Homo sapiens
taaacggtgccacag

SEQ ID NO: 1289804 - DNA, 15 bp, Homo sapiens
ttaaacggtgccaca

SEQ ID NO: 1289805 - DNA, 15 bp, Homo sapiens
cttaaacggtgccac

SEQ ID NO: 1289806 - DNA, 15 bp, Homo sapiens
gcttaaacggtgcca

SEQ ID NO: 1289807 - DNA, 15 bp, Homo sapiens
tgcttaaacggtgcc

SEQ ID NO: 1289808 - DNA, 15 bp, Homo sapiens
ctgcttaaacggtgc

SEQ ID NO: 1289809 - DNA, 15 bp, Homo sapiens
gctgcttaaacggtg

SEQ ID NO: 1289810 - DNA, 15 bp, Homo sapiens
ggctgcttaaacggt

SEQ ID NO: 1289811 - DNA, 15 bp, Homo sapiens
gggctgcttaaacgg

SEQ ID NO: 1289812 - DNA, 15 bp, Homo sapiens
tgggctgcttaaacg

SEQ ID NO: 1289813 - DNA, 15 bp, Homo sapiens
atgggctgcttaaac

SEQ ID NO: 1289814 - DNA, 15 bp, Homo sapiens
tatgggctgcttaaa

SEQ ID NO: 1289815 - DNA, 15 bp, Homo sapiens
ttatgggctgcttaa

SEQ ID NO: 1289816 - DNA, 15 bp, Homo sapiens
attatgggctgctta

SEQ ID NO: 1289817 - DNA, 15 bp, Homo sapiens
gattatgggctgctt

SEQ ID NO: 1289818 - DNA, 15 bp, Homo sapiens
tgattatgggctgct

SEQ ID NO: 1289819 - DNA, 15 bp, Homo sapiens
atgattatgggctgc

SEQ ID NO: 1289820 - DNA, 15 bp, Homo sapiens
aatgattatgggctg

SEQ ID NO: 1289821 - DNA, 15 bp, Homo sapiens
aaatgattatgggct

SEQ ID NO: 1289822 - DNA, 15 bp, Homo sapiens
caaatgattatgggc

SEQ ID NO: 1289823 - DNA, 15 bp, Homo sapiens
acaaatgattatggg

SEQ ID NO: 1289824 - DNA, 15 bp, Homo sapiens
cacaaatgattatgg

SEQ ID NO: 1289825 - DNA, 15 bp, Homo sapiens
ccacaaatgattatg

SEQ ID NO: 1289826 - DNA, 15 bp, Homo sapiens
cccacaaatgattat

SEQ ID NO: 1289827 - DNA, 15 bp, Homo sapiens
ccccacaaatgatta

SEQ ID NO: 1289828 - DNA, 15 bp, Homo sapiens
accccacaaatgatt

SEQ ID NO: 1289829 - DNA, 15 bp, Homo sapiens
taccccacaaatgat

SEQ ID NO: 1289830 - DNA, 15 bp, Homo sapiens
ttaccccacaaatga

SEQ ID NO: 1289831 - DNA, 15 bp, Homo sapiens
tttaccccacaaatg

SEQ ID NO: 1289832 - DNA, 15 bp, Homo sapiens
atttaccccacaaat

SEQ ID NO: 1289833 - DNA, 15 bp, Homo sapiens
aatttaccccacaaa

SEQ ID NO: 1289834 - DNA, 15 bp, Homo sapiens
taatttaccccacaa

SEQ ID NO: 1289835 - DNA, 15 bp, Homo sapiens
ttaatttaccccaca

SEQ ID NO: 1289836 - DNA, 15 bp, Homo sapiens
attaatttaccccac

SEQ ID NO: 1289837 - DNA, 15 bp, Homo sapiens
tattaatttacccca

SEQ ID NO: 1289838 - DNA, 15 bp, Homo sapiens
gtattaatttacccc

SEQ ID NO: 1289839 - DNA, 15 bp, Homo sapiens
tgtattaatttaccc

SEQ ID NO: 1289840 - DNA, 15 bp, Homo sapiens
ctgtattaatttacc

SEQ ID NO: 1289841 - DNA, 15 bp, Homo sapiens
actgtattaatttac

SEQ ID NO: 1289842 - DNA, 15 bp, Homo sapiens
tactgtattaattta

SEQ ID NO: 1289843 - DNA, 15 bp, Homo sapiens
gtactgtattaattt

SEQ ID NO: 1289844 - DNA, 15 bp, Homo sapiens
tgtactgtattaatt

SEQ ID NO: 1289845 - DNA, 15 bp, Homo sapiens
atgtactgtattaat

SEQ ID NO: 1289846 - DNA, 15 bp, Homo sapiens
catgtactgtattaa

SEQ ID NO: 1289847 - DNA, 15 bp, Homo sapiens
acatgtactgtatta

SEQ ID NO: 1289848 - DNA, 15 bp, Homo sapiens
gacatgtactgtatt

SEQ ID NO: 1289849 - DNA, 15 bp, Homo sapiens
agacatgtactgtat

SEQ ID NO: 1289850 - DNA, 15 bp, Homo sapiens
gagacatgtactgta

SEQ ID NO: 1289851 - DNA, 15 bp, Homo sapiens
tgagacatgtactgt

SEQ ID NO: 1289852 - DNA, 15 bp, Homo sapiens
ctgagacatgtactg

SEQ ID NO: 1289853 - DNA, 15 bp, Homo sapiens
cctgagacatgtact

SEQ ID NO: 1289854 - DNA, 15 bp, Homo sapiens
gcctgagacatgtac

SEQ ID NO: 1289855 - DNA, 15 bp, Homo sapiens
ggcctgagacatgta

SEQ ID NO: 1289856 - DNA, 15 bp, Homo sapiens
gggcctgagacatgt

SEQ ID NO: 1289857 - DNA, 15 bp, Homo sapiens
agggcctgagacatg

SEQ ID NO: 1289858 - DNA, 15 bp, Homo sapiens
gagggcctgagacat

SEQ ID NO: 1289859 - DNA, 15 bp, Homo sapiens
ggagggcctgagaca

SEQ ID NO: 1289860 - DNA, 15 bp, Homo sapiens
gggagggcctgagac

SEQ ID NO: 1289861 - DNA, 15 bp, Homo sapiens
ggggagggcctgaga

SEQ ID NO: 1289862 - DNA, 15 bp, Homo sapiens
gggggagggcctgag

SEQ ID NO: 1289863 - DNA, 15 bp, Homo sapiens
tgggggagggcctga

SEQ ID NO: 1289864 - DNA, 15 bp, Homo sapiens
ctgggggagggcctg

SEQ ID NO: 1289865 - DNA, 15 bp, Homo sapiens
cctgggggagggcct

SEQ ID NO: 1289866 - DNA, 15 bp, Homo sapiens
tcctgggggagggcc

SEQ ID NO: 1289867 - DNA, 15 bp, Homo sapiens
atcctgggggagggc

SEQ ID NO: 1289868 - DNA, 15 bp, Homo sapiens
aatcctgggggaggg

SEQ ID NO: 1289869 - DNA, 15 bp, Homo sapiens
caatcctgggggagg

SEQ ID NO: 1289870 - DNA, 15 bp, Homo sapiens
ccaatcctgggggag

SEQ ID NO: 1289871 - DNA, 15 bp, Homo sapiens
gccaatcctggggga

SEQ ID NO: 1289872 - DNA, 15 bp, Homo sapiens
tgccaatcctggggg

SEQ ID NO: 1289873 - DNA, 15 bp, Homo sapiens
atgccaatcctgggg

SEQ ID NO: 1289874 - DNA, 15 bp, Homo sapiens
tatgccaatcctggg

SEQ ID NO: 1289875 - DNA, 15 bp, Homo sapiens
ctatgccaatcctgg

SEQ ID NO: 1289876 - DNA, 15 bp, Homo sapiens
cctatgccaatcctg

SEQ ID NO: 1289877 - DNA, 15 bp, Homo sapiens
ccctatgccaatcct

SEQ ID NO: 1289878 - DNA, 15 bp, Homo sapiens
tccctatgccaatcc

SEQ ID NO: 1289879 - DNA, 15 bp, Homo sapiens
ttccctatgccaatc

SEQ ID NO: 1289880 - DNA, 15 bp, Homo sapiens
gttccctatgccaat

SEQ ID NO: 1289881 - DNA, 15 bp, Homo sapiens
agttccctatgccaa

SEQ ID NO: 1289882 - DNA, 15 bp, Homo sapiens
cagttccctatgcca

SEQ ID NO: 1289883 - DNA, 15 bp, Homo sapiens
tcagttccctatgcc

SEQ ID NO: 1289884 - DNA, 15 bp, Homo sapiens
ctcagttccctatgc

SEQ ID NO: 1289885 - DNA, 15 bp, Homo sapiens
tctcagttccctatg

SEQ ID NO: 1289886 - DNA, 15 bp, Homo sapiens
ttctcagttccctat

SEQ ID NO: 1289887 - DNA, 15 bp, Homo sapiens
attctcagttcccta

SEQ ID NO: 1289888 - DNA, 15 bp, Homo sapiens
aattctcagttccct

SEQ ID NO: 1289889 - DNA, 15 bp, Homo sapiens
gaattctcagttccc

SEQ ID NO: 1289890 - DNA, 15 bp, Homo sapiens
ggaattctcagttcc

SEQ ID NO: 1289891 - DNA, 15 bp, Homo sapiens
tggaattctcagttc

SEQ ID NO: 1289892 - DNA, 15 bp, Homo sapiens
gtggaattctcagtt

SEQ ID NO: 1289893 - DNA, 15 bp, Homo sapiens
ggtggaattctcagt

SEQ ID NO: 1289894 - DNA, 15 bp, Homo sapiens
aggtggaattctcag

SEQ ID NO: 1289895 - DNA, 15 bp, Homo sapiens
caggtggaattctca

SEQ ID NO: 1289896 - DNA, 15 bp, Homo sapiens
acaggtggaattctc

SEQ ID NO: 1289897 - DNA, 15 bp, Homo sapiens
aacaggtggaattct

SEQ ID NO: 1289898 - DNA, 15 bp, Homo sapiens
aaacaggtggaattc

SEQ ID NO: 1289899 - DNA, 15 bp, Homo sapiens
gggaaacaggtggaa

SEQ ID NO: 1289900 - DNA, 15 bp, Homo sapiens
agggaaacaggtgga

SEQ ID NO: 1289901 - DNA, 15 bp, Homo sapiens
aagggaaacaggtgg

SEQ ID NO: 1289902 - DNA, 15 bp, Homo sapiens
aaagggaaacaggtg

SEQ ID NO: 1289903 - DNA, 15 bp, Homo sapiens
gaaagggaaacaggt

SEQ ID NO: 1289904 - DNA, 15 bp, Homo sapiens
ggaaagggaaacagg

SEQ ID NO: 1289905 - DNA, 15 bp, Homo sapiens
aggaaagggaaacag

SEQ ID NO: 1289906 - DNA, 15 bp, Homo sapiens
caggaaagggaaaca

SEQ ID NO: 1289907 - DNA, 15 bp, Homo sapiens
ccaggaaagggaaac

SEQ ID NO: 1289908 - DNA, 15 bp, Homo sapiens
tccaggaaagggaaa

SEQ ID NO: 1289909 - DNA, 15 bp, Homo sapiens
atccaggaaagggaa

SEQ ID NO: 1289910 - DNA, 15 bp, Homo sapiens
gatccaggaaaggga

SEQ ID NO: 1289911 - DNA, 15 bp, Homo sapiens
ggatccaggaaaggg

SEQ ID NO: 1289912 - DNA, 15 bp, Homo sapiens
aggatccaggaaagg

SEQ ID NO: 1289913 - DNA, 15 bp, Homo sapiens
aaggatccaggaaag

SEQ ID NO: 1289914 - DNA, 15 bp, Homo sapiens
caaggatccaggaaa

SEQ ID NO: 1289915 - DNA, 15 bp, Homo sapiens
gcaaggatccaggaa

SEQ ID NO: 1289916 - DNA, 15 bp, Homo sapiens
tgcaaggatccagga

SEQ ID NO: 1289917 - DNA, 15 bp, Homo sapiens
ctgcaaggatccagg

SEQ ID NO: 1289918 - DNA, 15 bp, Homo sapiens
actgcaaggatccag

SEQ ID NO: 1289919 - DNA, 15 bp, Homo sapiens
aactgcaaggatcca

SEQ ID NO: 1289920 - DNA, 15 bp, Homo sapiens
caactgcaaggatcc

SEQ ID NO: 1289921 - DNA, 15 bp, Homo sapiens
ccaactgcaaggatc

SEQ ID NO: 1289922 - DNA, 15 bp, Homo sapiens
accaactgcaaggat

SEQ ID NO: 1289923 - DNA, 15 bp, Homo sapiens
caccaactgcaagga

SEQ ID NO: 1289924 - DNA, 15 bp, Homo sapiens
tcaccaactgcaagg

SEQ ID NO: 1289925 - DNA, 15 bp, Homo sapiens
gtcaccaactgcaag

SEQ ID NO: 1289926 - DNA, 15 bp, Homo sapiens
ggtcaccaactgcaa

SEQ ID NO: 1289927 - DNA, 15 bp, Homo sapiens
tggtcaccaactgca

SEQ ID NO: 1289928 - DNA, 15 bp, Homo sapiens
ctggtcaccaactgc

SEQ ID NO: 1289929 - DNA, 15 bp, Homo sapiens
actggtcaccaactg

SEQ ID NO: 1289930 - DNA, 15 bp, Homo sapiens
cactggtcaccaact

SEQ ID NO: 1289931 - DNA, 15 bp, Homo sapiens
ccactggtcaccaac

SEQ ID NO: 1289932 - DNA, 15 bp, Homo sapiens
tccactggtcaccaa

SEQ ID NO: 1289933 - DNA, 15 bp, Homo sapiens
ctccactggtcacca

SEQ ID NO: 1289934 - DNA, 15 bp, Homo sapiens
tctccactggtcacc

SEQ ID NO: 1289935 - DNA, 15 bp, Homo sapiens
ttctccactggtcac

SEQ ID NO: 1289936 - DNA, 15 bp, Homo sapiens
cttctccactggtca

SEQ ID NO: 1289937 - DNA, 15 bp, Homo sapiens
tcttctccactggtc

SEQ ID NO: 1289938 - DNA, 15 bp, Homo sapiens
atcttctccactggt

SEQ ID NO: 1289939 - DNA, 15 bp, Homo sapiens
catcttctccactgg

SEQ ID NO: 1289940 - DNA, 15 bp, Homo sapiens
ccatcttctccactg

SEQ ID NO: 1289941 - DNA, 15 bp, Homo sapiens
gccatcttctccact

SEQ ID NO: 1289942 - DNA, 15 bp, Homo sapiens
ggccatcttctccac

SEQ ID NO: 1289943 - DNA, 15 bp, Homo sapiens
gggccatcttctcca

SEQ ID NO: 1289944 - DNA, 15 bp, Homo sapiens
agggccatcttctcc

SEQ ID NO: 1289945 - DNA, 15 bp, Homo sapiens
cagggccatcttctc

SEQ ID NO: 1289946 - DNA, 15 bp, Homo sapiens
ccagggccatcttct

SEQ ID NO: 1289947 - DNA, 15 bp, Homo sapiens
cccagggccatcttc

SEQ ID NO: 1289948 - DNA, 15 bp, Homo sapiens
ccccagggccatctt

SEQ ID NO: 1289949 - DNA, 15 bp, Homo sapiens
accccagggccatct

SEQ ID NO: 1289950 - DNA, 15 bp, Homo sapiens
aaccccagggccatc

SEQ ID NO: 1289951 - DNA, 15 bp, Homo sapiens
aaaccccagggccat

SEQ ID NO: 1289952 - DNA, 15 bp, Homo sapiens
gaaaccccagggcca

SEQ ID NO: 1289953 - DNA, 15 bp, Homo sapiens
ggaaaccccagggcc

SEQ ID NO: 1289954 - DNA, 15 bp, Homo sapiens
aggaaaccccagggc

SEQ ID NO: 1289955 - DNA, 15 bp, Homo sapiens
gaggaaaccccaggg

SEQ ID NO: 1289956 - DNA, 15 bp, Homo sapiens
ggaggaaaccccagg

SEQ ID NO: 1289957 - DNA, 15 bp, Homo sapiens
aggaggaaaccccag

SEQ ID NO: 1289958 - DNA, 15 bp, Homo sapiens
gaggaggaaacccca

SEQ ID NO: 1289959 - DNA, 15 bp, Homo sapiens
tgaggaggaaacccc

SEQ ID NO: 1289960 - DNA, 15 bp, Homo sapiens
ctgaggaggaaaccc

SEQ ID NO: 1289961 - DNA, 15 bp, Homo sapiens
gctgaggaggaaacc

SEQ ID NO: 1289962 - DNA, 15 bp, Homo sapiens
ggctgaggaggaaac

SEQ ID NO: 1289963 - DNA, 15 bp, Homo sapiens
gggctgaggaggaaa

SEQ ID NO: 1289964 - DNA, 15 bp, Homo sapiens
ggggctgaggaggaa

SEQ ID NO: 1289965 - DNA, 15 bp, Homo sapiens
tggggctgaggagga

SEQ ID NO: 1289966 - DNA, 15 bp, Homo sapiens
ttggggctgaggagg

SEQ ID NO: 1289967 - DNA, 15 bp, Homo sapiens
tttggggctgaggag

SEQ ID NO: 1289968 - DNA, 15 bp, Homo sapiens
atttggggctgagga

SEQ ID NO: 1289969 - DNA, 15 bp, Homo sapiens
aatttggggctgagg

SEQ ID NO: 1289970 - DNA, 15 bp, Homo sapiens
gaatttggggctgag

SEQ ID NO: 1289971 - DNA, 15 bp, Homo sapiens
ggaatttggggctga

SEQ ID NO: 1289972 - DNA, 15 bp, Homo sapiens
aggaatttggggctg

SEQ ID NO: 1289973 - DNA, 15 bp, Homo sapiens
taggaatttggggct

SEQ ID NO: 1289974 - DNA, 15 bp, Homo sapiens
gtaggaatttggggc

SEQ ID NO: 1289975 - DNA, 15 bp, Homo sapiens
tgtaggaatttgggg

SEQ ID NO: 1289976 - DNA, 15 bp, Homo sapiens
atgtaggaatttggg

SEQ ID NO: 1289977 - DNA, 15 bp, Homo sapiens
gatgtaggaatttgg

SEQ ID NO: 1289978 - DNA, 15 bp, Homo sapiens
ggatgtaggaatttg

SEQ ID NO: 1289979 - DNA, 15 bp, Homo sapiens
gggatgtaggaattt

SEQ ID NO: 1289980 - DNA, 15 bp, Homo sapiens
agggatgtaggaatt

SEQ ID NO: 1289981 - DNA, 15 bp, Homo sapiens
gagggatgtaggaat

SEQ ID NO: 1289982 - DNA, 15 bp, Homo sapiens
ggagggatgtaggaa

SEQ ID NO: 1289983 - DNA, 15 bp, Homo sapiens
tggagggatgtagga

SEQ ID NO: 1289984 - DNA, 15 bp, Homo sapiens
ttggagggatgtagg

SEQ ID NO: 1289985 - DNA, 15 bp, Homo sapiens
tttggagggatgtag

SEQ ID NO: 1289986 - DNA, 15 bp, Homo sapiens
ttttggagggatgta

SEQ ID NO: 1289987 - DNA, 15 bp, Homo sapiens
cttttggagggatgt

SEQ ID NO: 1289988 - DNA, 15 bp, Homo sapiens
tcttttggagggatg

SEQ ID NO: 1289989 - DNA, 15 bp, Homo sapiens
ttcttttggagggat

SEQ ID NO: 1289990 - DNA, 15 bp, Homo sapiens
gttcttttggaggga

SEQ ID NO: 1289991 - DNA, 15 bp, Homo sapiens
ggttcttttggaggg

SEQ ID NO: 1289992 - DNA, 15 bp, Homo sapiens
aggttcttttggagg

SEQ ID NO: 1289993 - DNA, 15 bp, Homo sapiens
gaggttcttttggag

SEQ ID NO: 1289994 - DNA, 15 bp, Homo sapiens
tgaggttcttttgga

SEQ ID NO: 1289995 - DNA, 15 bp, Homo sapiens
ctgaggttcttttgg

SEQ ID NO: 1289996 - DNA, 15 bp, Homo sapiens
tctgaggttcttttg

SEQ ID NO: 1289997 - DNA, 15 bp, Homo sapiens
ctctgaggttctttt

SEQ ID NO: 1289998 - DNA, 15 bp, Homo sapiens
tctctgaggttcttt

SEQ ID NO: 1289999 - DNA, 15 bp, Homo sapiens
ctctctgaggttctt

SEQ ID NO: 1290000 - DNA, 15 bp, Homo sapiens
gctctctgaggttct

SEQ ID NO: 1290001 - DNA, 15 bp, Homo sapiens
tgctctctgaggttc

SEQ ID NO: 1290002 - DNA, 15 bp, Homo sapiens
ttgctctctgaggtt

SEQ ID NO: 1290003 - DNA, 15 bp, Homo sapiens
tttgctctctgaggt

SEQ ID NO: 1290004 - DNA, 15 bp, Homo sapiens
ctttgctctctgagg

SEQ ID NO: 1290005 - DNA, 15 bp, Homo sapiens
cctttgctctctgag

SEQ ID NO: 1290006 - DNA, 15 bp, Homo sapiens
gcctttgctctctga

SEQ ID NO: 1290007 - DNA, 15 bp, Homo sapiens
tgcctttgctctctg

SEQ ID NO: 1290008 - DNA, 15 bp, Homo sapiens
ctgcctttgctctct

SEQ ID NO: 1290009 - DNA, 15 bp, Homo sapiens
gctgcctttgctctc

SEQ ID NO: 1290010 - DNA, 15 bp, Homo sapiens
ggctgcctttgctct

SEQ ID NO: 1290011 - DNA, 15 bp, Homo sapiens
cggctgcctttgctc

SEQ ID NO: 1290012 - DNA, 15 bp, Homo sapiens
ccggctgcctttgct

SEQ ID NO: 1290013 - DNA, 15 bp, Homo sapiens
tccggctgcctttgc

SEQ ID NO: 1290014 - DNA, 15 bp, Homo sapiens
gtccggctgcctttg

SEQ ID NO: 1290015 - DNA, 15 bp, Homo sapiens
cgtccggctgccttt

SEQ ID NO: 1290016 - DNA, 15 bp, Homo sapiens
gcgtccggctgcctt

SEQ ID NO: 1290017 - DNA, 15 bp, Homo sapiens
tgcgtccggctgcct

SEQ ID NO: 1290018 - DNA, 15 bp, Homo sapiens
atgcgtccggctgcc

SEQ ID NO: 1290019 - DNA, 15 bp, Homo sapiens
gatgcgtccggctgc

SEQ ID NO: 1290020 - DNA, 15 bp, Homo sapiens
ggatgcgtccggctg

SEQ ID NO: 1290021 - DNA, 15 bp, Homo sapiens
cggatgcgtccggct

SEQ ID NO: 1290022 - DNA, 15 bp, Homo sapiens
tcggatgcgtccggc

SEQ ID NO: 1290023 - DNA, 15 bp, Homo sapiens
gtcggatgcgtccgg

SEQ ID NO: 1290024 - DNA, 15 bp, Homo sapiens
ggtcggatgcgtccg

SEQ ID NO: 1290025 - DNA, 15 bp, Homo sapiens
gggtcggatgcgtcc

SEQ ID NO: 1290026 - DNA, 15 bp, Homo sapiens
agggtcggatgcgtc

SEQ ID NO: 1290027 - DNA, 15 bp, Homo sapiens
cagggtcggatgcgt

SEQ ID NO: 1290028 - DNA, 15 bp, Homo sapiens
ccagggtcggatgcg

SEQ ID NO: 1290029 - DNA, 15 bp, Homo sapiens
gccagggtcggatgc

SEQ ID NO: 1290030 - DNA, 15 bp, Homo sapiens
ggccagggtcggatg

SEQ ID NO: 1290031 - DNA, 15 bp, Homo sapiens
aggccagggtcggat

SEQ ID NO: 1290032 - DNA, 15 bp, Homo sapiens
gaggccagggtcgga

SEQ ID NO: 1290033 - DNA, 15 bp, Homo sapiens
ggaggccagggtcgg

SEQ ID NO: 1290034 - DNA, 15 bp, Homo sapiens
aggaggccagggtcg

SEQ ID NO: 1290035 - DNA, 15 bp, Homo sapiens
aaggaggccagggtc

SEQ ID NO: 1290036 - DNA, 15 bp, Homo sapiens
gaaggaggccagggt

SEQ ID NO: 1290037 - DNA, 15 bp, Homo sapiens
agaaggaggccaggg

SEQ ID NO: 1290038 - DNA, 15 bp, Homo sapiens
gagaaggaggccagg

SEQ ID NO: 1290039 - DNA, 15 bp, Homo sapiens
tgagaaggaggccag

SEQ ID NO: 1290040 - DNA, 15 bp, Homo sapiens
gtgagaaggaggcca

SEQ ID NO: 1290041 - DNA, 15 bp, Homo sapiens
ggtgagaaggaggcc

SEQ ID NO: 1290042 - DNA, 15 bp, Homo sapiens
tggtgagaaggaggc

SEQ ID NO: 1290043 - DNA, 15 bp, Homo sapiens
gtggtgagaaggagg

SEQ ID NO: 1290044 - DNA, 15 bp, Homo sapiens
agtggtgagaaggag

SEQ ID NO: 1290045 - DNA, 15 bp, Homo sapiens
cagtggtgagaagga

SEQ ID NO: 1290046 - DNA, 15 bp, Homo sapiens
gcagtggtgagaagg

SEQ ID NO: 1290047 - DNA, 15 bp, Homo sapiens
agcagtggtgagaag

SEQ ID NO: 1290048 - DNA, 15 bp, Homo sapiens
cagcagtggtgagaa

SEQ ID NO: 1290049 - DNA, 15 bp, Homo sapiens
tcagcagtggtgaga

SEQ ID NO: 1290050 - DNA, 15 bp, Homo sapiens
gtcagcagtggtgag

SEQ ID NO: 1290051 - DNA, 15 bp, Homo sapiens
tgtcagcagtggtga

SEQ ID NO: 1290052 - DNA, 15 bp, Homo sapiens
ctgtcagcagtggtg

SEQ ID NO: 1290053 - DNA, 15 bp, Homo sapiens
tctgtcagcagtggt

SEQ ID NO: 1290054 - DNA, 15 bp, Homo sapiens
ttctgtcagcagtgg

SEQ ID NO: 1290055 - DNA, 15 bp, Homo sapiens
cttctgtcagcagtg

SEQ ID NO: 1290056 - DNA, 15 bp, Homo sapiens
ccttctgtcagcagt

SEQ ID NO: 1290057 - DNA, 15 bp, Homo sapiens
tccttctgtcagcag

SEQ ID NO: 1290058 - DNA, 15 bp, Homo sapiens
ctccttctgtcagca

SEQ ID NO: 1290059 - DNA, 15 bp, Homo sapiens
gctccttctgtcagc

SEQ ID NO: 1290060 - DNA, 15 bp, Homo sapiens
tgctccttctgtcag

SEQ ID NO: 1290061 - DNA, 15 bp, Homo sapiens
ctgctccttctgtca

SEQ ID NO: 1290062 - DNA, 15 bp, Homo sapiens
tctgctccttctgtc

SEQ ID NO: 1290063 - DNA, 15 bp, Homo sapiens
ttctgctccttctgt

SEQ ID NO: 1290064 - DNA, 15 bp, Homo sapiens
attctgctccttctg

SEQ ID NO: 1290065 - DNA, 15 bp, Homo sapiens
gattctgctccttct

SEQ ID NO: 1290066 - DNA, 15 bp, Homo sapiens
agattctgctccttc

SEQ ID NO: 1290067 - DNA, 15 bp, Homo sapiens
aagattctgctcctt

SEQ ID NO: 1290068 - DNA, 15 bp, Homo sapiens
caagattctgctcct

SEQ ID NO: 1290069 - DNA, 15 bp, Homo sapiens
ccaagattctgctcc

SEQ ID NO: 1290070 - DNA, 15 bp, Homo sapiens
gccaagattctgctc

SEQ ID NO: 1290071 - DNA, 15 bp, Homo sapiens
tgccaagattctgct

SEQ ID NO: 1290072 - DNA, 15 bp, Homo sapiens
ctgccaagattctgc

SEQ ID NO: 1290073 - DNA, 15 bp, Homo sapiens
gctgccaagattctg

SEQ ID NO: 1290074 - DNA, 15 bp, Homo sapiens
tgctgccaagattct

SEQ ID NO: 1290075 - DNA, 15 bp, Homo sapiens
atgctgccaagattc

SEQ ID NO: 1290076 - DNA, 15 bp, Homo sapiens
aatgctgccaagatt

SEQ ID NO: 1290077 - DNA, 15 bp, Homo sapiens
caatgctgccaagat

SEQ ID NO: 1290078 - DNA, 15 bp, Homo sapiens
acaatgctgccaaga

SEQ ID NO: 1290079 - DNA, 15 bp, Homo sapiens
aacaatgctgccaag

SEQ ID NO: 1290080 - DNA, 15 bp, Homo sapiens
taacaatgctgccaa

SEQ ID NO: 1290081 - DNA, 15 bp, Homo sapiens
ctaacaatgctgcca

SEQ ID NO: 1290082 - DNA, 15 bp, Homo sapiens
cctaacaatgctgcc

SEQ ID NO: 1290083 - DNA, 15 bp, Homo sapiens
acctaacaatgctgc

SEQ ID NO: 1290084 - DNA, 15 bp, Homo sapiens
gacctaacaatgctg

SEQ ID NO: 1290085 - DNA, 15 bp, Homo sapiens
agacctaacaatgct

SEQ ID NO: 1290086 - DNA, 15 bp, Homo sapiens
aagacctaacaatgc

SEQ ID NO: 1290087 - DNA, 15 bp, Homo sapiens
gaagacctaacaatg

SEQ ID NO: 1290088 - DNA, 15 bp, Homo sapiens
tgaagacctaacaat

SEQ ID NO: 1290089 - DNA, 15 bp, Homo sapiens
atgaagacctaacaa

SEQ ID NO: 1290090 - DNA, 15 bp, Homo sapiens
gatgaagacctaaca

SEQ ID NO: 1290091 - DNA, 15 bp, Homo sapiens
agatgaagacctaac

SEQ ID NO: 1290092 - DNA, 15 bp, Homo sapiens
cagatgaagacctaa

SEQ ID NO: 1290093 - DNA, 15 bp, Homo sapiens
gcagatgaagaccta

SEQ ID NO: 1290094 - DNA, 15 bp, Homo sapiens
agcagatgaagacct

SEQ ID NO: 1290095 - DNA, 15 bp, Homo sapiens
tagcagatgaagacc

SEQ ID NO: 1290096 - DNA, 15 bp, Homo sapiens
atagcagatgaagac

SEQ ID NO: 1290097 - DNA, 15 bp, Homo sapiens
aatagcagatgaaga

SEQ ID NO: 1290098 - DNA, 15 bp, Homo sapiens
taatagcagatgaag

SEQ ID NO: 1290099 - DNA, 15 bp, Homo sapiens
ctaatagcagatgaa

SEQ ID NO: 1290100 - DNA, 15 bp, Homo sapiens
gctaatagcagatga

SEQ ID NO: 1290101 - DNA, 15 bp, Homo sapiens
agctaatagcagatg

SEQ ID NO: 1290102 - DNA, 15 bp, Homo sapiens
cagctaatagcagat

SEQ ID NO: 1290103 - DNA, 15 bp, Homo sapiens
tcagctaatagcaga

SEQ ID NO: 1290104 - DNA, 15 bp, Homo sapiens
atcagctaatagcag

SEQ ID NO: 1290105 - DNA, 15 bp, Homo sapiens
aatcagctaatagca

SEQ ID NO: 1290106 - DNA, 15 bp, Homo sapiens
taatcagctaatagc

SEQ ID NO: 1290107 - DNA, 15 bp, Homo sapiens
ttaatcagctaatag

SEQ ID NO: 1290108 - DNA, 15 bp, Homo sapiens
tggcttctcgaatgc

SEQ ID NO: 1290109 - DNA, 15 bp, Homo sapiens
ctggcttctcgaatg

SEQ ID NO: 1290110 - DNA, 15 bp, Homo sapiens
actggcttctcgaat

SEQ ID NO: 1290111 - DNA, 15 bp, Homo sapiens
tactggcttctcgaa

SEQ ID NO: 1290112 - DNA, 15 bp, Homo sapiens
gtactggcttctcga

SEQ ID NO: 1290113 - DNA, 15 bp, Homo sapiens
tgtactggcttctcg

SEQ ID NO: 1290114 - DNA, 15 bp, Homo sapiens
gtgtactggcttctc

SEQ ID NO: 1290115 - DNA, 15 bp, Homo sapiens
agtgtactggcttct

SEQ ID NO: 1290116 - DNA, 15 bp, Homo sapiens
cagtgtactggcttc

SEQ ID NO: 1290117 - DNA, 15 bp, Homo sapiens
ccagtgtactggctt

SEQ ID NO: 1290118 - DNA, 15 bp, Homo sapiens
gccagtgtactggct

SEQ ID NO: 1290119 - DNA, 15 bp, Homo sapiens
agccagtgtactggc

SEQ ID NO: 1290120 - DNA, 15 bp, Homo sapiens
cagccagtgtactgg

SEQ ID NO: 1290121 - DNA, 15 bp, Homo sapiens
gcagccagtgtactg

SEQ ID NO: 1290122 - DNA, 15 bp, Homo sapiens
agcagccagtgtact

SEQ ID NO: 1290123 - DNA, 15 bp, Homo sapiens
tagcagccagtgtac

SEQ ID NO: 1290124 - DNA, 15 bp, Homo sapiens
ttagcagccagtgta

SEQ ID NO: 1290125 - DNA, 15 bp, Homo sapiens
attagcagccagtgt

SEQ ID NO: 1290126 - DNA, 15 bp, Homo sapiens
aattagcagccagtg

SEQ ID NO: 1290127 - DNA, 15 bp, Homo sapiens
caattagcagccagt

SEQ ID NO: 1290128 - DNA, 15 bp, Homo sapiens
acaattagcagccag

SEQ ID NO: 1290129 - DNA, 15 bp, Homo sapiens
cacaattagcagcca

SEQ ID NO: 1290130 - DNA, 15 bp, Homo sapiens
gcacaattagcagcc

SEQ ID NO: 1290131 - DNA, 15 bp, Homo sapiens
agcacaattagcagc

SEQ ID NO: 1290132 - DNA, 15 bp, Homo sapiens
tagcacaattagcag

SEQ ID NO: 1290133 - DNA, 15 bp, Homo sapiens
ctagcacaattagca

SEQ ID NO: 1290134 - DNA, 15 bp, Homo sapiens
gctagcacaattagc

SEQ ID NO: 1290135 - DNA, 15 bp, Homo sapiens
agctagcacaattag

SEQ ID NO: 1290136 - DNA, 15 bp, Homo sapiens
aagctagcacaatta

SEQ ID NO: 1290137 - DNA, 15 bp, Homo sapiens
caagctagcacaatt

SEQ ID NO: 1290138 - DNA, 15 bp, Homo sapiens
acaagctagcacaat

SEQ ID NO: 1290139 - DNA, 15 bp, Homo sapiens
tacaagctagcacaa

SEQ ID NO: 1290140 - DNA, 15 bp, Homo sapiens
gtacaagctagcaca

SEQ ID NO: 1290141 - DNA, 15 bp, Homo sapiens
ggtacaagctagcac

SEQ ID NO: 1290142 - DNA, 15 bp, Homo sapiens
aggtacaagctagca

SEQ ID NO: 1290143 - DNA, 15 bp, Homo sapiens
caggtacaagctagc

SEQ ID NO: 1290144 - DNA, 15 bp, Homo sapiens
ccaggtacaagctag

SEQ ID NO: 1290145 - DNA, 15 bp, Homo sapiens
cccaggtacaagcta

SEQ ID NO: 1290146 - DNA, 15 bp, Homo sapiens
ccccaggtacaagct

SEQ ID NO: 1290147 - DNA, 15 bp, Homo sapiens
gccccaggtacaagc

SEQ ID NO: 1290148 - DNA, 15 bp, Homo sapiens
agccccaggtacaag

SEQ ID NO: 1290149 - DNA, 15 bp, Homo sapiens
cagccccaggtacaa

SEQ ID NO: 1290150 - DNA, 15 bp, Homo sapiens
ccagccccaggtaca

SEQ ID NO: 1290151 - DNA, 15 bp, Homo sapiens
cccagccccaggtac

SEQ ID NO: 1290152 - DNA, 15 bp, Homo sapiens
acccagccccaggta

SEQ ID NO: 1290153 - DNA, 15 bp, Homo sapiens
aacccagccccaggt

SEQ ID NO: 1290154 - DNA, 15 bp, Homo sapiens
aaacccagccccagg

SEQ ID NO: 1290155 - DNA, 15 bp, Homo sapiens
caaacccagccccag

SEQ ID NO: 1290156 - DNA, 15 bp, Homo sapiens
ccaaacccagcccca

SEQ ID NO: 1290157 - DNA, 15 bp, Homo sapiens
cccaaacccagcccc

SEQ ID NO: 1290158 - DNA, 15 bp, Homo sapiens
acccaaacccagccc

SEQ ID NO: 1290159 - DNA, 15 bp, Homo sapiens
aacccaaacccagcc

SEQ ID NO: 1290160 - DNA, 15 bp, Homo sapiens
aaacccaaacccagc

SEQ ID NO: 1290161 - DNA, 15 bp, Homo sapiens
gaaacccaaacccag

SEQ ID NO: 1290162 - DNA, 15 bp, Homo sapiens
tgaaacccaaaccca

SEQ ID NO: 1290163 - DNA, 15 bp, Homo sapiens
ctgaaacccaaaccc

SEQ ID NO: 1290164 - DNA, 15 bp, Homo sapiens
cctgaaacccaaacc

SEQ ID NO: 1290165 - DNA, 15 bp, Homo sapiens
acctgaaacccaaac

SEQ ID NO: 1290166 - DNA, 15 bp, Homo sapiens
gacctgaaacccaaa

SEQ ID NO: 1290167 - DNA, 15 bp, Homo sapiens
ggacctgaaacccaa

SEQ ID NO: 1290168 - DNA, 15 bp, Homo sapiens
gggacctgaaaccca

SEQ ID NO: 1290169 - DNA, 15 bp, Homo sapiens
agggacctgaaaccc

SEQ ID NO: 1290170 - DNA, 15 bp, Homo sapiens
gagggacctgaaacc

SEQ ID NO: 1290171 - DNA, 15 bp, Homo sapiens
ggagggacctgaaac

SEQ ID NO: 1290172 - DNA, 15 bp, Homo sapiens
gggagggacctgaaa

SEQ ID NO: 1290173 - DNA, 15 bp, Homo sapiens
agggagggacctgaa

SEQ ID NO: 1290174 - DNA, 15 bp, Homo sapiens
aagggagggacctga

SEQ ID NO: 1290175 - DNA, 15 bp, Homo sapiens
gaagggagggacctg

SEQ ID NO: 1290176 - DNA, 15 bp, Homo sapiens
ggaagggagggacct

SEQ ID NO: 1290177 - DNA, 15 bp, Homo sapiens
aggaagggagggacc

SEQ ID NO: 1290178 - DNA, 15 bp, Homo sapiens
gaggaagggagggac

SEQ ID NO: 1290179 - DNA, 15 bp, Homo sapiens
ggaggaagggaggga

SEQ ID NO: 1290180 - DNA, 15 bp, Homo sapiens
gggaggaagggaggg

SEQ ID NO: 1290181 - DNA, 15 bp, Homo sapiens
agggaggaagggagg

SEQ ID NO: 1290182 - DNA, 15 bp, Homo sapiens
aagggaggaagggag

SEQ ID NO: 1290183 - DNA, 15 bp, Homo sapiens
aaagggaggaaggga

SEQ ID NO: 1290184 - DNA, 15 bp, Homo sapiens
gaaagggaggaaggg

SEQ ID NO: 1290185 - DNA, 15 bp, Homo sapiens
agaaagggaggaagg

SEQ ID NO: 1290186 - DNA, 15 bp, Homo sapiens
gagaaagggaggaag

SEQ ID NO: 1290187 - DNA, 15 bp, Homo sapiens
ggagaaagggaggaa

SEQ ID NO: 1290188 - DNA, 15 bp, Homo sapiens
gggagaaagggagga

SEQ ID NO: 1290189 - DNA, 15 bp, Homo sapiens
tgggagaaagggagg

SEQ ID NO: 1290190 - DNA, 15 bp, Homo sapiens
ttgggagaaagggag

SEQ ID NO: 1290191 - DNA, 15 bp, Homo sapiens
attgggagaaaggga

SEQ ID NO: 1290192 - DNA, 15 bp, Homo sapiens
cattgggagaaaggg

SEQ ID NO: 1290193 - DNA, 15 bp, Homo sapiens
gcattgggagaaagg

SEQ ID NO: 1290194 - DNA, 15 bp, Homo sapiens
agcattgggagaaag

SEQ ID NO: 1290195 - DNA, 15 bp, Homo sapiens
aagcattgggagaaa

SEQ ID NO: 1290196 - DNA, 15 bp, Homo sapiens
caagcattgggagaa

SEQ ID NO: 1290197 - DNA, 15 bp, Homo sapiens
ccaagcattgggaga

SEQ ID NO: 1290198 - DNA, 15 bp, Homo sapiens
accaagcattgggag

SEQ ID NO: 1290199 - DNA, 15 bp, Homo sapiens
gaccaagcattggga

SEQ ID NO: 1290200 - DNA, 15 bp, Homo sapiens
agaccaagcattggg

SEQ ID NO: 1290201 - DNA, 15 bp, Homo sapiens
aagaccaagcattgg

SEQ ID NO: 1290202 - DNA, 15 bp, Homo sapiens
taagaccaagcattg

SEQ ID NO: 1290203 - DNA, 15 bp, Homo sapiens
ataagaccaagcatt

SEQ ID NO: 1290204 - DNA, 15 bp, Homo sapiens
aataagaccaagcat

SEQ ID NO: 1290205 - DNA, 15 bp, Homo sapiens
taataagaccaagca

SEQ ID NO: 1290206 - DNA, 15 bp, Homo sapiens
ctaataagaccaagc

SEQ ID NO: 1290207 - DNA, 15 bp, Homo sapiens
cctaataagaccaag

SEQ ID NO: 1290208 - DNA, 15 bp, Homo sapiens
tcctaataagaccaa

SEQ ID NO: 1290209 - DNA, 15 bp, Homo sapiens
ttcctaataagacca

SEQ ID NO: 1290210 - DNA, 15 bp, Homo sapiens
tttcctaataagacc

SEQ ID NO: 1290211 - DNA, 15 bp, Homo sapiens
gtttcctaataagac

SEQ ID NO: 1290212 - DNA, 15 bp, Homo sapiens
tgtttcctaataaga

SEQ ID NO: 1290213 - DNA, 15 bp, Homo sapiens
atgtttcctaataag

SEQ ID NO: 1290214 - DNA, 15 bp, Homo sapiens
aatgtttcctaataa

SEQ ID NO: 1290215 - DNA, 15 bp, Homo sapiens
caatgtttcctaata

SEQ ID NO: 1290216 - DNA, 15 bp, Homo sapiens
gcaatgtttcctaat

SEQ ID NO: 1290217 - DNA, 15 bp, Homo sapiens
tgcaatgtttcctaa

SEQ ID NO: 1290218 - DNA, 15 bp, Homo sapiens
atgcaatgtttccta

SEQ ID NO: 1290219 - DNA, 15 bp, Homo sapiens
gatgcaatgtttcct

SEQ ID NO: 1290220 - DNA, 15 bp, Homo sapiens
cgatgcaatgtttcc

SEQ ID NO: 1290221 - DNA, 15 bp, Homo sapiens
gcgatgcaatgtttc

SEQ ID NO: 1290222 - DNA, 15 bp, Homo sapiens
agcgatgcaatgttt

SEQ ID NO: 1290223 - DNA, 15 bp, Homo sapiens
tagcgatgcaatgtt

SEQ ID NO: 1290224 - DNA, 15 bp, Homo sapiens
ttagcgatgcaatgt

SEQ ID NO: 1290225 - DNA, 15 bp, Homo sapiens
tttagcgatgcaatg

SEQ ID NO: 1290226 - DNA, 15 bp, Homo sapiens
ttttagcgatgcaat

SEQ ID NO: 1290227 - DNA, 15 bp, Homo sapiens
attttagcgatgcaa

SEQ ID NO: 1290228 - DNA, 15 bp, Homo sapiens
tattttagcgatgca

SEQ ID NO: 1290229 - DNA, 15 bp, Homo sapiens
ttattttagcgatgc

SEQ ID NO: 1290230 - DNA, 15 bp, Homo sapiens
gttattttagcgatg

SEQ ID NO: 1290231 - DNA, 15 bp, Homo sapiens
tgttattttagcgat

SEQ ID NO: 1290232 - DNA, 15 bp, Homo sapiens
ttgttattttagcga

SEQ ID NO: 1290233 - DNA, 15 bp, Homo sapiens
attgttattttagcg

SEQ ID NO: 1290234 - DNA, 15 bp, Homo sapiens
aattgttattttagc

SEQ ID NO: 1290235 - DNA, 15 bp, Homo sapiens
taattgttattttag

SEQ ID NO: 1290236 - DNA, 15 bp, Homo sapiens
gtaattgttatttta

SEQ ID NO: 1290237 - DNA, 15 bp, Homo sapiens
agtaattgttatttt

SEQ ID NO: 1290238 - DNA, 15 bp, Homo sapiens
gagtaattgttattt

SEQ ID NO: 1290239 - DNA, 15 bp, Homo sapiens
agagtaattgttatt

SEQ ID NO: 1290240 - DNA, 15 bp, Homo sapiens
tagagtaattgttat

SEQ ID NO: 1290241 - DNA, 15 bp, Homo sapiens
gtagagtaattgtta

SEQ ID NO: 1290242 - DNA, 15 bp, Homo sapiens
tgtagagtaattgtt

SEQ ID NO: 1290243 - DNA, 15 bp, Homo sapiens
ctgtagagtaattgt

SEQ ID NO: 1290244 - DNA, 15 bp, Homo sapiens
tctgtagagtaattg

SEQ ID NO: 1290245 - DNA, 15 bp, Homo sapiens
atctgtagagtaatt

SEQ ID NO: 1290246 - DNA, 15 bp, Homo sapiens
tatctgtagagtaat

SEQ ID NO: 1290247 - DNA, 15 bp, Homo sapiens
ctatctgtagagtaa

SEQ ID NO: 1290248 - DNA, 15 bp, Homo sapiens
tctatctgtagagta

SEQ ID NO: 1290249 - DNA, 15 bp, Homo sapiens
ctctatctgtagagt

SEQ ID NO: 1290250 - DNA, 15 bp, Homo sapiens
actctatctgtagag

SEQ ID NO: 1290251 - DNA, 15 bp, Homo sapiens
tactctatctgtaga

SEQ ID NO: 1290252 - DNA, 15 bp, Homo sapiens
ttactctatctgtag

SEQ ID NO: 1290253 - DNA, 15 bp, Homo sapiens
attactctatctgta

SEQ ID NO: 1290254 - DNA, 15 bp, Homo sapiens
tattactctatctgt

SEQ ID NO: 1290255 - DNA, 15 bp, Homo sapiens
ctattactctatctg

SEQ ID NO: 1290256 - DNA, 15 bp, Homo sapiens
tctattactctatct

SEQ ID NO: 1290257 - DNA, 15 bp, Homo sapiens
ttctattactctatc

SEQ ID NO: 1290258 - DNA, 15 bp, Homo sapiens
cttctattactctat

SEQ ID NO: 1290259 - DNA, 15 bp, Homo sapiens
acttctattactcta

SEQ ID NO: 1290260 - DNA, 15 bp, Homo sapiens
cacttctattactct

SEQ ID NO: 1290261 - DNA, 15 bp, Homo sapiens
acacttctattactc

SEQ ID NO: 1290262 - DNA, 15 bp, Homo sapiens
aacacttctattact

SEQ ID NO: 1290263 - DNA, 15 bp, Homo sapiens
gaacacttctattac

SEQ ID NO: 1290264 - DNA, 15 bp, Homo sapiens
tgaacacttctatta

SEQ ID NO: 1290265 - DNA, 15 bp, Homo sapiens
ttgaacacttctatt

SEQ ID NO: 1290266 - DNA, 15 bp, Homo sapiens
tttgaacacttctat

SEQ ID NO: 1290267 - DNA, 15 bp, Homo sapiens
ctttgaacacttcta

SEQ ID NO: 1290268 - DNA, 15 bp, Homo sapiens
cctttgaacacttct

SEQ ID NO: 1290269 - DNA, 15 bp, Homo sapiens
acctttgaacacttc

SEQ ID NO: 1290270 - DNA, 15 bp, Homo sapiens
tacctttgaacactt

SEQ ID NO: 1290271 - DNA, 15 bp, Homo sapiens
ctacctttgaacact

SEQ ID NO: 1290272 - DNA, 15 bp, Homo sapiens
cctacctttgaacac

SEQ ID NO: 1290273 - DNA, 15 bp, Homo sapiens
ccctacctttgaaca

SEQ ID NO: 1290274 - DNA, 15 bp, Homo sapiens
accctacctttgaac

SEQ ID NO: 1290275 - DNA, 15 bp, Homo sapiens
aaccctacctttgaa

SEQ ID NO: 1290276 - DNA, 15 bp, Homo sapiens
taaccctacctttga

SEQ ID NO: 1290277 - DNA, 15 bp, Homo sapiens
ttaaccctacctttg

SEQ ID NO: 1290278 - DNA, 15 bp, Homo sapiens
attaaccctaccttt

SEQ ID NO: 1290279 - DNA, 15 bp, Homo sapiens
aattaaccctacctt

SEQ ID NO: 1290280 - DNA, 15 bp, Homo sapiens
taattaaccctacct

SEQ ID NO: 1290281 - DNA, 15 bp, Homo sapiens
ctaattaaccctacc

SEQ ID NO: 1290282 - DNA, 15 bp, Homo sapiens
tctaattaaccctac

SEQ ID NO: 1290283 - DNA, 15 bp, Homo sapiens
ttctaattaacccta

SEQ ID NO: 1290284 - DNA, 15 bp, Homo sapiens
tttctaattaaccct

SEQ ID NO: 1290285 - DNA, 15 bp, Homo sapiens
gtttctaattaaccc

SEQ ID NO: 1290286 - DNA, 15 bp, Homo sapiens
agtttctaattaacc

SEQ ID NO: 1290287 - DNA, 15 bp, Homo sapiens
aagtttctaattaac

SEQ ID NO: 1290288 - DNA, 15 bp, Homo sapiens
aaagtttctaattaa

SEQ ID NO: 1290289 - DNA, 15 bp, Homo sapiens
gaaagtttctaatta

SEQ ID NO: 1290290 - DNA, 15 bp, Homo sapiens
tgaaagtttctaatt

SEQ ID NO: 1290291 - DNA, 15 bp, Homo sapiens
atgaaagtttctaat

SEQ ID NO: 1290292 - DNA, 15 bp, Homo sapiens
aatgaaagtttctaa

SEQ ID NO: 1290293 - DNA, 15 bp, Homo sapiens
taatgaaagtttcta

SEQ ID NO: 1290294 - DNA, 15 bp, Homo sapiens
ttaatgaaagtttct

SEQ ID NO: 1290295 - DNA, 15 bp, Homo sapiens
tttaatgaaagtttc

SEQ ID NO: 1290296 - DNA, 15 bp, Homo sapiens
ctttaatgaaagttt

SEQ ID NO: 1290297 - DNA, 15 bp, Homo sapiens
cctttaatgaaagtt

SEQ ID NO: 1290298 - DNA, 15 bp, Homo sapiens
tcctttaatgaaagt

SEQ ID NO: 1290299 - DNA, 15 bp, Homo sapiens
gtcctttaatgaaag

SEQ ID NO: 1290300 - DNA, 15 bp, Homo sapiens
ggtcctttaatgaaa

SEQ ID NO: 1290301 - DNA, 15 bp, Homo sapiens
aggtcctttaatgaa

SEQ ID NO: 1290302 - DNA, 15 bp, Homo sapiens
aaggtcctttaatga

SEQ ID NO: 1290303 - DNA, 15 bp, Homo sapiens
caaggtcctttaatg

SEQ ID NO: 1290304 - DNA, 15 bp, Homo sapiens
ccaaggtcctttaat

SEQ ID NO: 1290305 - DNA, 15 bp, Homo sapiens
tccaaggtcctttaa

SEQ ID NO: 1290306 - DNA, 15 bp, Homo sapiens
gtccaaggtccttta

SEQ ID NO: 1290307 - DNA, 15 bp, Homo sapiens
ggtccaaggtccttt

SEQ ID NO: 1290308 - DNA, 15 bp, Homo sapiens
aggtccaaggtcctt

SEQ ID NO: 1290309 - DNA, 15 bp, Homo sapiens
aaggtccaaggtcct

SEQ ID NO: 1290310 - DNA, 15 bp, Homo sapiens
caaggtccaaggtcc

SEQ ID NO: 1290311 - DNA, 15 bp, Homo sapiens
acaaggtccaaggtc

SEQ ID NO: 1290312 - DNA, 15 bp, Homo sapiens
aacaaggtccaaggt

SEQ ID NO: 1290313 - DNA, 15 bp, Homo sapiens
caacaaggtccaagg

SEQ ID NO: 1290314 - DNA, 15 bp, Homo sapiens
gcaacaaggtccaag

SEQ ID NO: 1290315 - DNA, 15 bp, Homo sapiens
tgcaacaaggtccaa

SEQ ID NO: 1290316 - DNA, 15 bp, Homo sapiens
ttgcaacaaggtcca

SEQ ID NO: 1290317 - DNA, 15 bp, Homo sapiens
attgcaacaaggtcc

SEQ ID NO: 1290318 - DNA, 15 bp, Homo sapiens
aattgcaacaaggtc

SEQ ID NO: 1290319 - DNA, 15 bp, Homo sapiens
caattgcaacaaggt

SEQ ID NO: 1290320 - DNA, 15 bp, Homo sapiens
ccaattgcaacaagg

SEQ ID NO: 1290321 - DNA, 15 bp, Homo sapiens
accaattgcaacaag

SEQ ID NO: 1290322 - DNA, 15 bp, Homo sapiens
gaccaattgcaacaa

SEQ ID NO: 1290323 - DNA, 15 bp, Homo sapiens
tgaccaattgcaaca

SEQ ID NO: 1290324 - DNA, 15 bp, Homo sapiens
atgaccaattgcaac

SEQ ID NO: 1290325 - DNA, 15 bp, Homo sapiens
aatgaccaattgcaa

SEQ ID NO: 1290326 - DNA, 15 bp, Homo sapiens
gaatgaccaattgca

SEQ ID NO: 1290327 - DNA, 15 bp, Homo sapiens
tgaatgaccaattgc

SEQ ID NO: 1290328 - DNA, 15 bp, Homo sapiens
atgaatgaccaattg

SEQ ID NO: 1290329 - DNA, 15 bp, Homo sapiens
aatgaatgaccaatt

SEQ ID NO: 1290330 - DNA, 15 bp, Homo sapiens
caatgaatgaccaat

SEQ ID NO: 1290331 - DNA, 15 bp, Homo sapiens
tcaatgaatgaccaa

SEQ ID NO: 1290332 - DNA, 15 bp, Homo sapiens
atcaatgaatgacca

SEQ ID NO: 1290333 - DNA, 15 bp, Homo sapiens
tatcaatgaatgacc

SEQ ID NO: 1290334 - DNA, 15 bp, Homo sapiens
atatcaatgaatgac

SEQ ID NO: 1290335 - DNA, 15 bp, Homo sapiens
aatatcaatgaatga

SEQ ID NO: 1290336 - DNA, 15 bp, Homo sapiens
aaatatcaatgaatg

SEQ ID NO: 1290337 - DNA, 15 bp, Homo sapiens
aaaatatcaatgaat

SEQ ID NO: 1290338 - DNA, 15 bp, Homo sapiens
aaaaatatcaatgaa

SEQ ID NO: 1290339 - DNA, 15 bp, Homo sapiens
gaaaaatatcaatga

SEQ ID NO: 1290340 - DNA, 15 bp, Homo sapiens
agaaaaatatcaatg

SEQ ID NO: 1290341 - DNA, 15 bp, Homo sapiens
cagaaaaatatcaat

SEQ ID NO: 1290342 - DNA, 15 bp, Homo sapiens
tcagaaaaatatcaa

SEQ ID NO: 1290343 - DNA, 15 bp, Homo sapiens
atcagaaaaatatca

SEQ ID NO: 1290344 - DNA, 15 bp, Homo sapiens
gatcagaaaaatatc

SEQ ID NO: 1290345 - DNA, 15 bp, Homo sapiens
tgatcagaaaaatat

SEQ ID NO: 1290346 - DNA, 15 bp, Homo sapiens
ttgatcagaaaaata

SEQ ID NO: 1290347 - DNA, 15 bp, Homo sapiens
gttgatcagaaaaat

SEQ ID NO: 1290348 - DNA, 15 bp, Homo sapiens
tgttgatcagaaaaa

SEQ ID NO: 1290349 - DNA, 15 bp, Homo sapiens
ttgttgatcagaaaa

SEQ ID NO: 1290350 - DNA, 15 bp, Homo sapiens
tttgttgatcagaaa

SEQ ID NO: 1290351 - DNA, 15 bp, Homo sapiens
atttgttgatcagaa

SEQ ID NO: 1290352 - DNA, 15 bp, Homo sapiens
gatttgttgatcaga

SEQ ID NO: 1290353 - DNA, 15 bp, Homo sapiens
tgatttgttgatcag

SEQ ID NO: 1290354 - DNA, 15 bp, Homo sapiens
ttgatttgttgatca

SEQ ID NO: 1290355 - DNA, 15 bp, Homo sapiens
gttgatttgttgatc

SEQ ID NO: 1290356 - DNA, 15 bp, Homo sapiens
ggttgatttgttgat

SEQ ID NO: 1290357 - DNA, 15 bp, Homo sapiens
tggttgatttgttga

SEQ ID NO: 1290358 - DNA, 15 bp, Homo sapiens
atggttgatttgttg

SEQ ID NO: 1290359 - DNA, 15 bp, Homo sapiens
tatggttgatttgtt

SEQ ID NO: 1290360 - DNA, 15 bp, Homo sapiens
ctatggttgatttgt

SEQ ID NO: 1290361 - DNA, 15 bp, Homo sapiens
actatggttgatttg

SEQ ID NO: 1290362 - DNA, 15 bp, Homo sapiens
aactatggttgattt

SEQ ID NO: 1290363 - DNA, 15 bp, Homo sapiens
aaactatggttgatt

SEQ ID NO: 1290364 - DNA, 15 bp, Homo sapiens
gaaactatggttgat

SEQ ID NO: 1290365 - DNA, 15 bp, Homo sapiens
agaaactatggttga

SEQ ID NO: 1290366 - DNA, 15 bp, Homo sapiens
aagaaactatggttg

SEQ ID NO: 1290367 - DNA, 15 bp, Homo sapiens
aaagaaactatggtt

SEQ ID NO: 1290368 - DNA, 15 bp, Homo sapiens
aaaagaaactatggt

SEQ ID NO: 1290369 - DNA, 15 bp, Homo sapiens
caaaagaaactatgg

SEQ ID NO: 1290370 - DNA, 15 bp, Homo sapiens
tcaaaagaaactatg

SEQ ID NO: 1290371 - DNA, 15 bp, Homo sapiens
ttcaaaagaaactat

SEQ ID NO: 1290372 - DNA, 15 bp, Homo sapiens
attcaaaagaaacta

SEQ ID NO: 1290373 - DNA, 15 bp, Homo sapiens
tattcaaaagaaact

SEQ ID NO: 1290374 - DNA, 15 bp, Homo sapiens
ttattcaaaagaaac

SEQ ID NO: 1290375 - DNA, 15 bp, Homo sapiens
attattcaaaagaaa

SEQ ID NO: 1290376 - DNA, 15 bp, Homo sapiens
aattattcaaaagaa

SEQ ID NO: 1290377 - DNA, 15 bp, Homo sapiens
caattattcaaaaga

SEQ ID NO: 1290378 - DNA, 15 bp, Homo sapiens
gcaattattcaaaag

SEQ ID NO: 1290379 - DNA, 15 bp, Homo sapiens
tgcaattattcaaaa

SEQ ID NO: 1290380 - DNA, 15 bp, Homo sapiens
ttgcaattattcaaa

SEQ ID NO: 1290381 - DNA, 15 bp, Homo sapiens
cttgcaattattcaa

SEQ ID NO: 1290382 - DNA, 15 bp, Homo sapiens
tcttgcaattattca

SEQ ID NO: 1290383 - DNA, 15 bp, Homo sapiens
atcttgcaattattc

SEQ ID NO: 1290384 - DNA, 15 bp, Homo sapiens
aatcttgcaattatt

SEQ ID NO: 1290385 - DNA, 15 bp, Homo sapiens
aaatcttgcaattat

SEQ ID NO: 1290386 - DNA, 15 bp, Homo sapiens
aaaatcttgcaatta

SEQ ID NO: 1290387 - DNA, 15 bp, Homo sapiens
aaaaatcttgcaatt

SEQ ID NO: 1290388 - DNA, 15 bp, Homo sapiens
aaaaaatcttgcaat

SEQ ID NO: 1290389 - DNA, 15 bp, Homo sapiens
aaaaaaatcttgcaa

SEQ ID NO: 1290390 - DNA, 15 bp, Homo sapiens
aaaaaaaatcttgca

SEQ ID NO: 1290391 - DNA, 15 bp, Homo sapiens
taaaaaaaatcttgc

SEQ ID NO: 1290392 - DNA, 15 bp, Homo sapiens
ataaaaaaaatcttg

SEQ ID NO: 1290393 - DNA, 15 bp, Homo sapiens
aataaaaaaaatctt

SEQ ID NO: 1290394 - DNA, 15 bp, Homo sapiens
aaataaaaaaaatct

SEQ ID NO: 1290395 - DNA, 15 bp, Homo sapiens
aaaataaaaaaaatc

SEQ ID NO: 1290396 - DNA, 15 bp, Homo sapiens
gaaaaataaaaaaaa

SEQ ID NO: 1290397 - DNA, 15 bp, Homo sapiens
tgaaaaataaaaaaa

SEQ ID NO: 1290398 - DNA, 15 bp, Homo sapiens
atgaaaaataaaaaa

SEQ ID NO: 1290399 - DNA, 15 bp, Homo sapiens
tatgaaaaataaaaa

SEQ ID NO: 1290400 - DNA, 15 bp, Homo sapiens
atatgaaaaataaaa

SEQ ID NO: 1290401 - DNA, 15 bp, Homo sapiens
catatgaaaaataaa

SEQ ID NO: 1290402 - DNA, 15 bp, Homo sapiens
acatatgaaaaataa

SEQ ID NO: 1290403 - DNA, 15 bp, Homo sapiens
cacatatgaaaaata

SEQ ID NO: 1290404 - DNA, 15 bp, Homo sapiens
acacatatgaaaaat

SEQ ID NO: 1290405 - DNA, 15 bp, Homo sapiens
cacacatatgaaaaa

SEQ ID NO: 1290406 - DNA, 15 bp, Homo sapiens
acacacatatgaaaa

SEQ ID NO: 1290407 - DNA, 15 bp, Homo sapiens
cacacacatatgaaa

SEQ ID NO: 1290408 - DNA, 15 bp, Homo sapiens
acacacacatatgaa

SEQ ID NO: 1290409 - DNA, 15 bp, Homo sapiens
cacacacacatatga

SEQ ID NO: 1290410 - DNA, 15 bp, Homo sapiens
acacacacacatatg

SEQ ID NO: 1290411 - DNA, 15 bp, Homo sapiens
gacacacacacacac

SEQ ID NO: 1290412 - DNA, 15 bp, Homo sapiens
agacacacacacaca

SEQ ID NO: 1290413 - DNA, 15 bp, Homo sapiens
cacagacacacacac

SEQ ID NO: 1290414 - DNA, 15 bp, Homo sapiens
tacacagacacacac

SEQ ID NO: 1290415 - DNA, 15 bp, Homo sapiens
atacacagacacaca

SEQ ID NO: 1290416 - DNA, 15 bp, Homo sapiens
gcacatacacagaca

SEQ ID NO: 1290417 - DNA, 15 bp, Homo sapiens
cgcacatacacagac

SEQ ID NO: 1290418 - DNA, 15 bp, Homo sapiens
acgcacatacacaga

SEQ ID NO: 1290419 - DNA, 15 bp, Homo sapiens
cacgcacatacacag

SEQ ID NO: 1290420 - DNA, 15 bp, Homo sapiens
tcacacgcacataca

SEQ ID NO: 1290421 - DNA, 15 bp, Homo sapiens
ctcacacgcacatac

SEQ ID NO: 1290422 - DNA, 15 bp, Homo sapiens
tctcacacgcacata

SEQ ID NO: 1290423 - DNA, 15 bp, Homo sapiens
ctctcacacgcacat

SEQ ID NO: 1290424 - DNA, 15 bp, Homo sapiens
tctctcacacgcaca

SEQ ID NO: 1290425 - DNA, 15 bp, Homo sapiens
ctctctcacacgcac

SEQ ID NO: 1290426 - DNA, 15 bp, Homo sapiens
tctctctcacacgca

SEQ ID NO: 1290427 - DNA, 15 bp, Homo sapiens
ctctctctcacacgc

SEQ ID NO: 1290428 - DNA, 15 bp, Homo sapiens
tctctctctcacacg

SEQ ID NO: 1290429 - DNA, 15 bp, Homo sapiens
ctctctctctcacac

SEQ ID NO: 1290430 - DNA, 15 bp, Homo sapiens
attctctctctctct

SEQ ID NO: 1290431 - DNA, 15 bp, Homo sapiens
tattctctctctctc

SEQ ID NO: 1290432 - DNA, 15 bp, Homo sapiens
atattctctctctct

SEQ ID NO: 1290433 - DNA, 15 bp, Homo sapiens
catattctctctctc

SEQ ID NO: 1290434 - DNA, 15 bp, Homo sapiens
ccatattctctctct

SEQ ID NO: 1290435 - DNA, 15 bp, Homo sapiens
tccatattctctctc

SEQ ID NO: 1290436 - DNA, 15 bp, Homo sapiens
gtccatattctctct

SEQ ID NO: 1290437 - DNA, 15 bp, Homo sapiens
cgtccatattctctc

SEQ ID NO: 1290438 - DNA, 15 bp, Homo sapiens
tcgtccatattctct

SEQ ID NO: 1290439 - DNA, 15 bp, Homo sapiens
atcgtccatattctc

SEQ ID NO: 1290440 - DNA, 15 bp, Homo sapiens
catcgtccatattct

SEQ ID NO: 1290441 - DNA, 15 bp, Homo sapiens
gcatcgtccatattc

SEQ ID NO: 1290442 - DNA, 15 bp, Homo sapiens
tgcatcgtccatatt

SEQ ID NO: 1290443 - DNA, 15 bp, Homo sapiens
ctgcatcgtccatat

SEQ ID NO: 1290444 - DNA, 15 bp, Homo sapiens
tctgcatcgtccata

SEQ ID NO: 1290445 - DNA, 15 bp, Homo sapiens
ctctgcatcgtccat

SEQ ID NO: 1290446 - DNA, 15 bp, Homo sapiens
cctctgcatcgtcca

SEQ ID NO: 1290447 - DNA, 15 bp, Homo sapiens
acctctgcatcgtcc

SEQ ID NO: 1290448 - DNA, 15 bp, Homo sapiens
cacctctgcatcgtc

SEQ ID NO: 1290449 - DNA, 15 bp, Homo sapiens
ccacctctgcatcgt

SEQ ID NO: 1290450 - DNA, 15 bp, Homo sapiens
tccacctctgcatcg

SEQ ID NO: 1290451 - DNA, 15 bp, Homo sapiens
atccacctctgcatc

SEQ ID NO: 1290452 - DNA, 15 bp, Homo sapiens
catccacctctgcat

SEQ ID NO: 1290453 - DNA, 15 bp, Homo sapiens
ccatccacctctgca

SEQ ID NO: 1290454 - DNA, 15 bp, Homo sapiens
tccatccacctctgc

SEQ ID NO: 1290455 - DNA, 15 bp, Homo sapiens
ctccatccacctctg

SEQ ID NO: 1290456 - DNA, 15 bp, Homo sapiens
cctccatccacctct

SEQ ID NO: 1290457 - DNA, 15 bp, Homo sapiens
tcctccatccacctc

SEQ ID NO: 1290458 - DNA, 15 bp, Homo sapiens
atcctccatccacct

SEQ ID NO: 1290459 - DNA, 15 bp, Homo sapiens
aatcctccatccacc

SEQ ID NO: 1290460 - DNA, 15 bp, Homo sapiens
taatcctccatccac

SEQ ID NO: 1290461 - DNA, 15 bp, Homo sapiens
ataatcctccatcca

SEQ ID NO: 1290462 - DNA, 15 bp, Homo sapiens
aataatcctccatcc

SEQ ID NO: 1290463 - DNA, 15 bp, Homo sapiens
aaataatcctccatc

SEQ ID NO: 1290464 - DNA, 15 bp, Homo sapiens
aaaataatcctccat

SEQ ID NO: 1290465 - DNA, 15 bp, Homo sapiens
gaaaataatcctcca

SEQ ID NO: 1290466 - DNA, 15 bp, Homo sapiens
agaaaataatcctcc

SEQ ID NO: 1290467 - DNA, 15 bp, Homo sapiens
cagaaaataatcctc

SEQ ID NO: 1290468 - DNA, 15 bp, Homo sapiens
acagaaaataatcct

SEQ ID NO: 1290469 - DNA, 15 bp, Homo sapiens
aacagaaaataatcc

SEQ ID NO: 1290470 - DNA, 15 bp, Homo sapiens
taacagaaaataatc

SEQ ID NO: 1290471 - DNA, 15 bp, Homo sapiens
ttaacagaaaataat

SEQ ID NO: 1290472 - DNA, 15 bp, Homo sapiens
tttaacagaaaataa

SEQ ID NO: 1290473 - DNA, 15 bp, Homo sapiens
ttttaacagaaaata

SEQ ID NO: 1290474 - DNA, 15 bp, Homo sapiens
attttaacagaaaat

SEQ ID NO: 1290475 - DNA, 15 bp, Homo sapiens
gattttaacagaaaa

SEQ ID NO: 1290476 - DNA, 15 bp, Homo sapiens
ggattttaacagaaa

SEQ ID NO: 1290477 - DNA, 15 bp, Homo sapiens
gggattttaacagaa

SEQ ID NO: 1290478 - DNA, 15 bp, Homo sapiens
ggggattttaacaga

SEQ ID NO: 1290479 - DNA, 15 bp, Homo sapiens
tggggattttaacag

SEQ ID NO: 1290480 - DNA, 15 bp, Homo sapiens
ctggggattttaaca

SEQ ID NO: 1290481 - DNA, 15 bp, Homo sapiens
gctggggattttaac

SEQ ID NO: 1290482 - DNA, 15 bp, Homo sapiens
cgctggggattttaa

SEQ ID NO: 1290483 - DNA, 15 bp, Homo sapiens
acgctggggatttta

SEQ ID NO: 1290484 - DNA, 15 bp, Homo sapiens
cacgctggggatttt

SEQ ID NO: 1290485 - DNA, 15 bp, Homo sapiens
ccacgctggggattt

SEQ ID NO: 1290486 - DNA, 15 bp, Homo sapiens
gccacgctggggatt

SEQ ID NO: 1290487 - DNA, 15 bp, Homo sapiens
agccacgctggggat

SEQ ID NO: 1290488 - DNA, 15 bp, Homo sapiens
gagccacgctgggga

SEQ ID NO: 1290489 - DNA, 15 bp, Homo sapiens
tgagccacgctgggg

SEQ ID NO: 1290490 - DNA, 15 bp, Homo sapiens
ctgagccacgctggg

SEQ ID NO: 1290491 - DNA, 15 bp, Homo sapiens
gctgagccacgctgg

SEQ ID NO: 1290492 - DNA, 15 bp, Homo sapiens
agctgagccacgctg

SEQ ID NO: 1290493 - DNA, 15 bp, Homo sapiens
gagctgagccacgct

SEQ ID NO: 1290494 - DNA, 15 bp, Homo sapiens
tgagctgagccacgc

SEQ ID NO: 1290495 - DNA, 15 bp, Homo sapiens
gtgagctgagccacg

SEQ ID NO: 1290496 - DNA, 15 bp, Homo sapiens
ggtgagctgagccac

SEQ ID NO: 1290497 - DNA, 15 bp, Homo sapiens
aggtgagctgagcca

SEQ ID NO: 1290498 - DNA, 15 bp, Homo sapiens
caggtgagctgagcc

SEQ ID NO: 1290499 - DNA, 15 bp, Homo sapiens
acaggtgagctgagc

SEQ ID NO: 1290500 - DNA, 15 bp, Homo sapiens
cacaggtgagctgag

SEQ ID NO: 1290501 - DNA, 15 bp, Homo sapiens
ccacaggtgagctga

SEQ ID NO: 1290502 - DNA, 15 bp, Homo sapiens
cccacaggtgagctg

SEQ ID NO: 1290503 - DNA, 15 bp, Homo sapiens
ccccacaggtgagct

SEQ ID NO: 1290504 - DNA, 15 bp, Homo sapiens
gccccacaggtgagc

SEQ ID NO: 1290505 - DNA, 15 bp, Homo sapiens
ggccccacaggtgag

SEQ ID NO: 1290506 - DNA, 15 bp, Homo sapiens
aggccccacaggtga

SEQ ID NO: 1290507 - DNA, 15 bp, Homo sapiens
caggccccacaggtg

SEQ ID NO: 1290508 - DNA, 15 bp, Homo sapiens
gcaggccccacaggt

SEQ ID NO: 1290509 - DNA, 15 bp, Homo sapiens
ggcaggccccacagg

SEQ ID NO: 1290510 - DNA, 15 bp, Homo sapiens
aggcaggccccacag

SEQ ID NO: 1290511 - DNA, 15 bp, Homo sapiens
gaggcaggccccaca

SEQ ID NO: 1290512 - DNA, 15 bp, Homo sapiens
tgaggcaggccccac

SEQ ID NO: 1290513 - DNA, 15 bp, Homo sapiens
ctgaggcaggcccca

SEQ ID NO: 1290514 - DNA, 15 bp, Homo sapiens
gctgaggcaggcccc

SEQ ID NO: 1290515 - DNA, 15 bp, Homo sapiens
agctgaggcaggccc

SEQ ID NO: 1290516 - DNA, 15 bp, Homo sapiens
gagctgaggcaggcc

SEQ ID NO: 1290517 - DNA, 15 bp, Homo sapiens
agagctgaggcaggc

SEQ ID NO: 1290518 - DNA, 15 bp, Homo sapiens
cagagctgaggcagg

SEQ ID NO: 1290519 - DNA, 15 bp, Homo sapiens
gcagagctgaggcag

SEQ ID NO: 1290520 - DNA, 15 bp, Homo sapiens
tgcagagctgaggca

SEQ ID NO: 1290521 - DNA, 15 bp, Homo sapiens
atgcagagctgaggc

SEQ ID NO: 1290522 - DNA, 15 bp, Homo sapiens
catgcagagctgagg

SEQ ID NO: 1290523 - DNA, 15 bp, Homo sapiens
gcatgcagagctgag

SEQ ID NO: 1290524 - DNA, 15 bp, Homo sapiens
ggcatgcagagctga

SEQ ID NO: 1290525 - DNA, 15 bp, Homo sapiens
tggcatgcagagctg

SEQ ID NO: 1290526 - DNA, 15 bp, Homo sapiens
ctggcatgcagagct

SEQ ID NO: 1290527 - DNA, 15 bp, Homo sapiens
gctggcatgcagagc

SEQ ID NO: 1290528 - DNA, 15 bp, Homo sapiens
agctggcatgcagag

SEQ ID NO: 1290529 - DNA, 15 bp, Homo sapiens
aagctggcatgcaga

SEQ ID NO: 1290530 - DNA, 15 bp, Homo sapiens
aaagctggcatgcag

SEQ ID NO: 1290531 - DNA, 15 bp, Homo sapiens
caaagctggcatgca

SEQ ID NO: 1290532 - DNA, 15 bp, Homo sapiens
ccaaagctggcatgc

SEQ ID NO: 1290533 - DNA, 15 bp, Homo sapiens
cccaaagctggcatg

SEQ ID NO: 1290534 - DNA, 15 bp, Homo sapiens
gcccaaagctggcat

SEQ ID NO: 1290535 - DNA, 15 bp, Homo sapiens
agcccaaagctggca

SEQ ID NO: 1290536 - DNA, 15 bp, Homo sapiens
cagcccaaagctggc

SEQ ID NO: 1290537 - DNA, 15 bp, Homo sapiens
gcagcccaaagctgg

SEQ ID NO: 1290538 - DNA, 15 bp, Homo sapiens
ggcagcccaaagctg

SEQ ID NO: 1290539 - DNA, 15 bp, Homo sapiens
tggcagcccaaagct

SEQ ID NO: 1290540 - DNA, 15 bp, Homo sapiens
ctggcagcccaaagc

SEQ ID NO: 1290541 - DNA, 15 bp, Homo sapiens
tctggcagcccaaag

SEQ ID NO: 1290542 - DNA, 15 bp, Homo sapiens
atctggcagcccaaa

SEQ ID NO: 1290543 - DNA, 15 bp, Homo sapiens
tatctggcagcccaa

SEQ ID NO: 1290544 - DNA, 15 bp, Homo sapiens
ctatctggcagccca

SEQ ID NO: 1290545 - DNA, 15 bp, Homo sapiens
actatctggcagccc

SEQ ID NO: 1290546 - DNA, 15 bp, Homo sapiens
gactatctggcagcc

SEQ ID NO: 1290547 - DNA, 15 bp, Homo sapiens
agactatctggcagc

SEQ ID NO: 1290548 - DNA, 15 bp, Homo sapiens
aagactatctggcag

SEQ ID NO: 1290549 - DNA, 15 bp, Homo sapiens
caagactatctggca

SEQ ID NO: 1290550 - DNA, 15 bp, Homo sapiens
ccaagactatctggc

SEQ ID NO: 1290551 - DNA, 15 bp, Homo sapiens
tccaagactatctgg

SEQ ID NO: 1290552 - DNA, 15 bp, Homo sapiens
ctccaagactatctg

SEQ ID NO: 1290553 - DNA, 15 bp, Homo sapiens
gctccaagactatct

SEQ ID NO: 1290554 - DNA, 15 bp, Homo sapiens
agctccaagactatc

SEQ ID NO: 1290555 - DNA, 15 bp, Homo sapiens
aagctccaagactat

SEQ ID NO: 1290556 - DNA, 15 bp, Homo sapiens
caagctccaagacta

SEQ ID NO: 1290557 - DNA, 15 bp, Homo sapiens
gcaagctccaagact

SEQ ID NO: 1290558 - DNA, 15 bp, Homo sapiens
ggcaagctccaagac

SEQ ID NO: 1290559 - DNA, 15 bp, Homo sapiens
aggcaagctccaaga

SEQ ID NO: 1290560 - DNA, 15 bp, Homo sapiens
aaggcaagctccaag

SEQ ID NO: 1290561 - DNA, 15 bp, Homo sapiens
taaggcaagctccaa

SEQ ID NO: 1290562 - DNA, 15 bp, Homo sapiens
ataaggcaagctcca

SEQ ID NO: 1290563 - DNA, 15 bp, Homo sapiens
tataaggcaagctcc

SEQ ID NO: 1290564 - DNA, 15 bp, Homo sapiens
ctataaggcaagctc

SEQ ID NO: 1290565 - DNA, 15 bp, Homo sapiens
tctataaggcaagct

SEQ ID NO: 1290566 - DNA, 15 bp, Homo sapiens
ttctataaggcaagc

SEQ ID NO: 1290567 - DNA, 15 bp, Homo sapiens
tttctataaggcaag

SEQ ID NO: 1290568 - DNA, 15 bp, Homo sapiens
ctttctataaggcaa

SEQ ID NO: 1290569 - DNA, 15 bp, Homo sapiens
actttctataaggca

SEQ ID NO: 1290570 - DNA, 15 bp, Homo sapiens
cactttctataaggc

SEQ ID NO: 1290571 - DNA, 15 bp, Homo sapiens
ccactttctataagg

SEQ ID NO: 1290572 - DNA, 15 bp, Homo sapiens
cccactttctataag

SEQ ID NO: 1290573 - DNA, 15 bp, Homo sapiens
ccccactttctataa

SEQ ID NO: 1290574 - DNA, 15 bp, Homo sapiens
tccccactttctata

SEQ ID NO: 1290575 - DNA, 15 bp, Homo sapiens
atccccactttctat

SEQ ID NO: 1290576 - DNA, 15 bp, Homo sapiens
gatccccactttcta

SEQ ID NO: 1290577 - DNA, 15 bp, Homo sapiens
ggatccccactttct

SEQ ID NO: 1290578 - DNA, 15 bp, Homo sapiens
aggatccccactttc

SEQ ID NO: 1290579 - DNA, 15 bp, Homo sapiens
taggatccccacttt

SEQ ID NO: 1290580 - DNA, 15 bp, Homo sapiens
ctaggatccccactt

SEQ ID NO: 1290581 - DNA, 15 bp, Homo sapiens
gctaggatccccact

SEQ ID NO: 1290582 - DNA, 15 bp, Homo sapiens
ggctaggatccccac

SEQ ID NO: 1290583 - DNA, 15 bp, Homo sapiens
gggctaggatcccca

SEQ ID NO: 1290584 - DNA, 15 bp, Homo sapiens
ggggctaggatcccc

SEQ ID NO: 1290585 - DNA, 15 bp, Homo sapiens
tggggctaggatccc

SEQ ID NO: 1290586 - DNA, 15 bp, Homo sapiens
atggggctaggatcc

SEQ ID NO: 1290587 - DNA, 15 bp, Homo sapiens
aatggggctaggatc

SEQ ID NO: 1290588 - DNA, 15 bp, Homo sapiens
aaatggggctaggat

SEQ ID NO: 1290589 - DNA, 15 bp, Homo sapiens
aaaatggggctagga

SEQ ID NO: 1290590 - DNA, 15 bp, Homo sapiens
aaaaatggggctagg

SEQ ID NO: 1290591 - DNA, 15 bp, Homo sapiens
aaaaaatggggctag

SEQ ID NO: 1290592 - DNA, 15 bp, Homo sapiens
aaaaaaatggggcta

SEQ ID NO: 1290593 - DNA, 15 bp, Homo sapiens
gaaaaaaatggggct

SEQ ID NO: 1290594 - DNA, 15 bp, Homo sapiens
ggaaaaaaatggggc

SEQ ID NO: 1290595 - DNA, 15 bp, Homo sapiens
aggaaaaaaatgggg

SEQ ID NO: 1290596 - DNA, 15 bp, Homo sapiens
caggaaaaaaatggg

SEQ ID NO: 1290597 - DNA, 15 bp, Homo sapiens
acaggaaaaaaatgg

SEQ ID NO: 1290598 - DNA, 15 bp, Homo sapiens
cacaggaaaaaaatg

SEQ ID NO: 1290599 - DNA, 15 bp, Homo sapiens
ccacaggaaaaaaat

SEQ ID NO: 1290600 - DNA, 15 bp, Homo sapiens
gccacaggaaaaaaa

SEQ ID NO: 1290601 - DNA, 15 bp, Homo sapiens
agccacaggaaaaaa

SEQ ID NO: 1290602 - DNA, 15 bp, Homo sapiens
aagccacaggaaaaa

SEQ ID NO: 1290603 - DNA, 15 bp, Homo sapiens
gaagccacaggaaaa

SEQ ID NO: 1290604 - DNA, 15 bp, Homo sapiens
ggaagccacaggaaa

SEQ ID NO: 1290605 - DNA, 15 bp, Homo sapiens
gggaagccacaggaa

SEQ ID NO: 1290606 - DNA, 15 bp, Homo sapiens
agggaagccacagga

SEQ ID NO: 1290607 - DNA, 15 bp, Homo sapiens
cagggaagccacagg

SEQ ID NO: 1290608 - DNA, 15 bp, Homo sapiens
ccagggaagccacag

SEQ ID NO: 1290609 - DNA, 15 bp, Homo sapiens
cccagggaagccaca

SEQ ID NO: 1290610 - DNA, 15 bp, Homo sapiens
acccagggaagccac

SEQ ID NO: 1290611 - DNA, 15 bp, Homo sapiens
aaacccagggaagcc

SEQ ID NO: 1290612 - DNA, 15 bp, Homo sapiens
aaaacccagggaagc

SEQ ID NO: 1290613 - DNA, 15 bp, Homo sapiens
aaaaacccagggaag

SEQ ID NO: 1290614 - DNA, 15 bp, Homo sapiens
gaaaaacccagggaa

SEQ ID NO: 1290615 - DNA, 15 bp, Homo sapiens
agaaaaacccaggga

SEQ ID NO: 1290616 - DNA, 15 bp, Homo sapiens
cagaaaaacccaggg

SEQ ID NO: 1290617 - DNA, 15 bp, Homo sapiens
tcagaaaaacccagg

SEQ ID NO: 1290618 - DNA, 15 bp, Homo sapiens
ttcagaaaaacccag

SEQ ID NO: 1290619 - DNA, 15 bp, Homo sapiens
gttcagaaaaaccca

SEQ ID NO: 1290620 - DNA, 15 bp, Homo sapiens
tgttcagaaaaaccc

SEQ ID NO: 1290621 - DNA, 15 bp, Homo sapiens
atgttcagaaaaacc

SEQ ID NO: 1290622 - DNA, 15 bp, Homo sapiens
catgttcagaaaaac

SEQ ID NO: 1290623 - DNA, 15 bp, Homo sapiens
tcatgttcagaaaaa

SEQ ID NO: 1290624 - DNA, 15 bp, Homo sapiens
ttcatgttcagaaaa

SEQ ID NO: 1290625 - DNA, 15 bp, Homo sapiens
gttcatgttcagaaa

SEQ ID NO: 1290626 - DNA, 15 bp, Homo sapiens
tgttcatgttcagaa

SEQ ID NO: 1290627 - DNA, 15 bp, Homo sapiens
ttgttcatgttcaga

SEQ ID NO: 1290628 - DNA, 15 bp, Homo sapiens
tttgttcatgttcag

SEQ ID NO: 1290629 - DNA, 15 bp, Homo sapiens
gtttgttcatgttca

SEQ ID NO: 1290630 - DNA, 15 bp, Homo sapiens
ggtttgttcatgttc

SEQ ID NO: 1290631 - DNA, 15 bp, Homo sapiens
aggtttgttcatgtt

SEQ ID NO: 1290632 - DNA, 15 bp, Homo sapiens
aaggtttgttcatgt

SEQ ID NO: 1290633 - DNA, 15 bp, Homo sapiens
caaggtttgttcatg

SEQ ID NO: 1290634 - DNA, 15 bp, Homo sapiens
gcaaggtttgttcat

SEQ ID NO: 1290635 - DNA, 15 bp, Homo sapiens
agcaaggtttgttca

SEQ ID NO: 1290636 - DNA, 15 bp, Homo sapiens
aagcaaggtttgttc

SEQ ID NO: 1290637 - DNA, 15 bp, Homo sapiens
aaagcaaggtttgtt

SEQ ID NO: 1290638 - DNA, 15 bp, Homo sapiens
gaaagcaaggtttgt

SEQ ID NO: 1290639 - DNA, 15 bp, Homo sapiens
ggaaagcaaggtttg

SEQ ID NO: 1290640 - DNA, 15 bp, Homo sapiens
tggaaagcaaggttt

SEQ ID NO: 1290641 - DNA, 15 bp, Homo sapiens
atggaaagcaaggtt

SEQ ID NO: 1290642 - DNA, 15 bp, Homo sapiens
gatggaaagcaaggt

SEQ ID NO: 1290643 - DNA, 15 bp, Homo sapiens
agatggaaagcaagg

SEQ ID NO: 1290644 - DNA, 15 bp, Homo sapiens
gagatggaaagcaag

SEQ ID NO: 1290645 - DNA, 15 bp, Homo sapiens
agagatggaaagcaa

SEQ ID NO: 1290646 - DNA, 15 bp, Homo sapiens
tagagatggaaagca

SEQ ID NO: 1290647 - DNA, 15 bp, Homo sapiens
ttagagatggaaagc

SEQ ID NO: 1290648 - DNA, 15 bp, Homo sapiens
tttagagatggaaag

SEQ ID NO: 1290649 - DNA, 15 bp, Homo sapiens
gtttagagatggaaa

SEQ ID NO: 1290650 - DNA, 15 bp, Homo sapiens
cgtttagagatggaa

SEQ ID NO: 1290651 - DNA, 15 bp, Homo sapiens
gcgtttagagatgga

SEQ ID NO: 1290652 - DNA, 15 bp, Homo sapiens
agcgtttagagatgg

SEQ ID NO: 1290653 - DNA, 15 bp, Homo sapiens
cagcgtttagagatg

SEQ ID NO: 1290654 - DNA, 15 bp, Homo sapiens
gcagcgtttagagat

SEQ ID NO: 1290655 - DNA, 15 bp, Homo sapiens
agcagcgtttagaga

SEQ ID NO: 1290656 - DNA, 15 bp, Homo sapiens
cagcagcgtttagag

SEQ ID NO: 1290657 - DNA, 15 bp, Homo sapiens
ccagcagcgtttaga

SEQ ID NO: 1290658 - DNA, 15 bp, Homo sapiens
cccagcagcgtttag

SEQ ID NO: 1290659 - DNA, 15 bp, Homo sapiens
acccagcagcgttta

SEQ ID NO: 1290660 - DNA, 15 bp, Homo sapiens
cacccagcagcgttt

SEQ ID NO: 1290661 - DNA, 15 bp, Homo sapiens
ccacccagcagcgtt

SEQ ID NO: 1290662 - DNA, 15 bp, Homo sapiens
accacccagcagcgt

SEQ ID NO: 1290663 - DNA, 15 bp, Homo sapiens
gaccacccagcagcg

SEQ ID NO: 1290664 - DNA, 15 bp, Homo sapiens
ggaccacccagcagc

SEQ ID NO: 1290665 - DNA, 15 bp, Homo sapiens
aggaccacccagcag

SEQ ID NO: 1290666 - DNA, 15 bp, Homo sapiens
aaggaccacccagca

SEQ ID NO: 1290667 - DNA, 15 bp, Homo sapiens
caaggaccacccagc

SEQ ID NO: 1290668 - DNA, 15 bp, Homo sapiens
gcaaggaccacccag

SEQ ID NO: 1290669 - DNA, 15 bp, Homo sapiens
ggcaaggaccaccca

SEQ ID NO: 1290670 - DNA, 15 bp, Homo sapiens
cggcaaggaccaccc

SEQ ID NO: 1290671 - DNA, 15 bp, Homo sapiens
acggcaaggaccacc

SEQ ID NO: 1290672 - DNA, 15 bp, Homo sapiens
aacggcaaggaccac

SEQ ID NO: 1290673 - DNA, 15 bp, Homo sapiens
caacggcaaggacca

SEQ ID NO: 1290674 - DNA, 15 bp, Homo sapiens
ccaacggcaaggacc

SEQ ID NO: 1290675 - DNA, 15 bp, Homo sapiens
cccaacggcaaggac

SEQ ID NO: 1290676 - DNA, 15 bp, Homo sapiens
tcccaacggcaagga

SEQ ID NO: 1290677 - DNA, 15 bp, Homo sapiens
atcccaacggcaagg

SEQ ID NO: 1290678 - DNA, 15 bp, Homo sapiens
aatcccaacggcaag

SEQ ID NO: 1290679 - DNA, 15 bp, Homo sapiens
gaatcccaacggcaa

SEQ ID NO: 1290680 - DNA, 15 bp, Homo sapiens
agaatcccaacggca

SEQ ID NO: 1290681 - DNA, 15 bp, Homo sapiens
cagaatcccaacggc

SEQ ID NO: 1290682 - DNA, 15 bp, Homo sapiens
ccagaatcccaacgg

SEQ ID NO: 1290683 - DNA, 15 bp, Homo sapiens
tccagaatcccaacg

SEQ ID NO: 1290684 - DNA, 15 bp, Homo sapiens
ttccagaatcccaac

SEQ ID NO: 1290685 - DNA, 15 bp, Homo sapiens
attccagaatcccaa

SEQ ID NO: 1290686 - DNA, 15 bp, Homo sapiens
aattccagaatccca

SEQ ID NO: 1290687 - DNA, 15 bp, Homo sapiens
gaattccagaatccc

SEQ ID NO: 1290688 - DNA, 15 bp, Homo sapiens
agaattccagaatcc

SEQ ID NO: 1290689 - DNA, 15 bp, Homo sapiens
cagaattccagaatc

SEQ ID NO: 1290690 - DNA, 15 bp, Homo sapiens
ccagaattccagaat

SEQ ID NO: 1290691 - DNA, 15 bp, Homo sapiens
gccagaattccagaa

SEQ ID NO: 1290692 - DNA, 15 bp, Homo sapiens
ggccagaattccaga

SEQ ID NO: 1290693 - DNA, 15 bp, Homo sapiens
gggccagaattccag

SEQ ID NO: 1290694 - DNA, 15 bp, Homo sapiens
agggccagaattcca

SEQ ID NO: 1290695 - DNA, 15 bp, Homo sapiens
cagggccagaattcc

SEQ ID NO: 1290696 - DNA, 15 bp, Homo sapiens
acagggccagaattc

SEQ ID NO: 1290697 - DNA, 15 bp, Homo sapiens
gacagggccagaatt

SEQ ID NO: 1290698 - DNA, 15 bp, Homo sapiens
agacagggccagaat

SEQ ID NO: 1290699 - DNA, 15 bp, Homo sapiens
cagacagggccagaa

SEQ ID NO: 1290700 - DNA, 15 bp, Homo sapiens
ccagacagggccaga

SEQ ID NO: 1290701 - DNA, 15 bp, Homo sapiens
cccagacagggccag

SEQ ID NO: 1290702 - DNA, 15 bp, Homo sapiens
ccccagacagggcca

SEQ ID NO: 1290703 - DNA, 15 bp, Homo sapiens
accccagacagggcc

SEQ ID NO: 1290704 - DNA, 15 bp, Homo sapiens
caccccagacagggc

SEQ ID NO: 1290705 - DNA, 15 bp, Homo sapiens
tcaccccagacaggg

SEQ ID NO: 1290706 - DNA, 15 bp, Homo sapiens
ctcaccccagacagg

SEQ ID NO: 1290707 - DNA, 15 bp, Homo sapiens
gctcaccccagacag

SEQ ID NO: 1290708 - DNA, 15 bp, Homo sapiens
ggctcaccccagaca

SEQ ID NO: 1290709 - DNA, 15 bp, Homo sapiens
aggctcaccccagac

SEQ ID NO: 1290710 - DNA, 15 bp, Homo sapiens
aaggctcaccccaga

SEQ ID NO: 1290711 - DNA, 15 bp, Homo sapiens
caaggctcaccccag

SEQ ID NO: 1290712 - DNA, 15 bp, Homo sapiens
ccaaggctcacccca

SEQ ID NO: 1290713 - DNA, 15 bp, Homo sapiens
cccaaggctcacccc

SEQ ID NO: 1290714 - DNA, 15 bp, Homo sapiens
gcccaaggctcaccc

SEQ ID NO: 1290715 - DNA, 15 bp, Homo sapiens
tgcccaaggctcacc

SEQ ID NO: 1290716 - DNA, 15 bp, Homo sapiens
atgcccaaggctcac

SEQ ID NO: 1290717 - DNA, 15 bp, Homo sapiens
gatgcccaaggctca

SEQ ID NO: 1290718 - DNA, 15 bp, Homo sapiens
agatgcccaaggctc

SEQ ID NO: 1290719 - DNA, 15 bp, Homo sapiens
tagatgcccaaggct

SEQ ID NO: 1290720 - DNA, 15 bp, Homo sapiens
atagatgcccaaggc

SEQ ID NO: 1290721 - DNA, 15 bp, Homo sapiens
gatagatgcccaagg

SEQ ID NO: 1290722 - DNA, 15 bp, Homo sapiens
agatagatgcccaag

SEQ ID NO: 1290723 - DNA, 15 bp, Homo sapiens
gagatagatgcccaa

SEQ ID NO: 1290724 - DNA, 15 bp, Homo sapiens
tgagatagatgccca

SEQ ID NO: 1290725 - DNA, 15 bp, Homo sapiens
atgagatagatgccc

SEQ ID NO: 1290726 - DNA, 15 bp, Homo sapiens
tatgagatagatgcc

SEQ ID NO: 1290727 - DNA, 15 bp, Homo sapiens
ctatgagatagatgc

SEQ ID NO: 1290728 - DNA, 15 bp, Homo sapiens
cctatgagatagatg

SEQ ID NO: 1290729 - DNA, 15 bp, Homo sapiens
gcctatgagatagat

SEQ ID NO: 1290730 - DNA, 15 bp, Homo sapiens
tgcctatgagataga

SEQ ID NO: 1290731 - DNA, 15 bp, Homo sapiens
gtgcctatgagatag

SEQ ID NO: 1290732 - DNA, 15 bp, Homo sapiens
agtgcctatgagata

SEQ ID NO: 1290733 - DNA, 15 bp, Homo sapiens
gagtgcctatgagat

SEQ ID NO: 1290734 - DNA, 15 bp, Homo sapiens
tgagtgcctatgaga

SEQ ID NO: 1290735 - DNA, 15 bp, Homo sapiens
tgccggctgccctcc

SEQ ID NO: 1290736 - DNA, 15 bp, Homo sapiens
ctgccggctgccctc

SEQ ID NO: 1290737 - DNA, 15 bp, Homo sapiens
gctgccggctgccct

SEQ ID NO: 1290738 - DNA, 15 bp, Homo sapiens
ggctgccggctgccc

SEQ ID NO: 1290739 - DNA, 15 bp, Homo sapiens
aggctgccggctgcc

SEQ ID NO: 1290740 - DNA, 15 bp, Homo sapiens
gaggctgccggctgc

SEQ ID NO: 1290741 - DNA, 15 bp, Homo sapiens
tgaggctgccggctg

SEQ ID NO: 1290742 - DNA, 15 bp, Homo sapiens
ctgaggctgccggct

SEQ ID NO: 1290743 - DNA, 15 bp, Homo sapiens
gctgaggctgccggc

SEQ ID NO: 1290744 - DNA, 15 bp, Homo sapiens
agctgaggctgccgg

SEQ ID NO: 1290745 - DNA, 15 bp, Homo sapiens
gagctgaggctgccg

SEQ ID NO: 1290746 - DNA, 15 bp, Homo sapiens
ggagctgaggctgcc

SEQ ID NO: 1290747 - DNA, 15 bp, Homo sapiens
tggagctgaggctgc

SEQ ID NO: 1290748 - DNA, 15 bp, Homo sapiens
ctggagctgaggctg

SEQ ID NO: 1290749 - DNA, 15 bp, Homo sapiens
cctggagctgaggct

SEQ ID NO: 1290750 - DNA, 15 bp, Homo sapiens
gcctggagctgaggc

SEQ ID NO: 1290751 - DNA, 15 bp, Homo sapiens
ggcctggagctgagg

SEQ ID NO: 1290752 - DNA, 15 bp, Homo sapiens
aggcctggagctgag

SEQ ID NO: 1290753 - DNA, 15 bp, Homo sapiens
aaggcctggagctga

SEQ ID NO: 1290754 - DNA, 15 bp, Homo sapiens
caaggcctggagctg

SEQ ID NO: 1290755 - DNA, 15 bp, Homo sapiens
tcaaggcctggagct

SEQ ID NO: 1290756 - DNA, 15 bp, Homo sapiens
ttcaaggcctggagc

SEQ ID NO: 1290757 - DNA, 15 bp, Homo sapiens
cttcaaggcctggag

SEQ ID NO: 1290758 - DNA, 15 bp, Homo sapiens
tcttcaaggcctgga

SEQ ID NO: 1290759 - DNA, 15 bp, Homo sapiens
atcttcaaggcctgg

SEQ ID NO: 1290760 - DNA, 15 bp, Homo sapiens
gatcttcaaggcctg

SEQ ID NO: 1290761 - DNA, 15 bp, Homo sapiens
tgatcttcaaggcct

SEQ ID NO: 1290762 - DNA, 15 bp, Homo sapiens
ctgatcttcaaggcc

SEQ ID NO: 1290763 - DNA, 15 bp, Homo sapiens
cctgatcttcaaggc

SEQ ID NO: 1290764 - DNA, 15 bp, Homo sapiens
gcctgatcttcaagg

SEQ ID NO: 1290765 - DNA, 15 bp, Homo sapiens
ggcctgatcttcaag

SEQ ID NO: 1290766 - DNA, 15 bp, Homo sapiens
aggcctgatcttcaa

SEQ ID NO: 1290767 - DNA, 15 bp, Homo sapiens
aaggcctgatcttca

SEQ ID NO: 1290768 - DNA, 15 bp, Homo sapiens
caaggcctgatcttc

SEQ ID NO: 1290769 - DNA, 15 bp, Homo sapiens
tcaaggcctgatctt

SEQ ID NO: 1290770 - DNA, 15 bp, Homo sapiens
ctcaaggcctgatct

SEQ ID NO: 1290771 - DNA, 15 bp, Homo sapiens
cctcaaggcctgatc

SEQ ID NO: 1290772 - DNA, 15 bp, Homo sapiens
tcctcaaggcctgat

SEQ ID NO: 1290773 - DNA, 15 bp, Homo sapiens
ctcctcaaggcctga

SEQ ID NO: 1290774 - DNA, 15 bp, Homo sapiens
actcctcaaggcctg

SEQ ID NO: 1290775 - DNA, 15 bp, Homo sapiens
aactcctcaaggcct

SEQ ID NO: 1290776 - DNA, 15 bp, Homo sapiens
aaactcctcaaggcc

SEQ ID NO: 1290777 - DNA, 15 bp, Homo sapiens
caaactcctcaaggc

SEQ ID NO: 1290778 - DNA, 15 bp, Homo sapiens
tcaaactcctcaagg

SEQ ID NO: 1290779 - DNA, 15 bp, Homo sapiens
gtcaaactcctcaag

SEQ ID NO: 1290780 - DNA, 15 bp, Homo sapiens
agtcaaactcctcaa

SEQ ID NO: 1290781 - DNA, 15 bp, Homo sapiens
aagtcaaactcctca

SEQ ID NO: 1290782 - DNA, 15 bp, Homo sapiens
gaagtcaaactcctc

SEQ ID NO: 1290783 - DNA, 15 bp, Homo sapiens
agaagtcaaactcct

SEQ ID NO: 1290784 - DNA, 15 bp, Homo sapiens
tagaagtcaaactcc

SEQ ID NO: 1290785 - DNA, 15 bp, Homo sapiens
atagaagtcaaactc

SEQ ID NO: 1290786 - DNA, 15 bp, Homo sapiens
catagaagtcaaact

SEQ ID NO: 1290787 - DNA, 15 bp, Homo sapiens
gcatagaagtcaaac

SEQ ID NO: 1290788 - DNA, 15 bp, Homo sapiens
agcatagaagtcaaa

SEQ ID NO: 1290789 - DNA, 15 bp, Homo sapiens
aagcatagaagtcaa

SEQ ID NO: 1290790 - DNA, 15 bp, Homo sapiens
taagcatagaagtca

SEQ ID NO: 1290791 - DNA, 15 bp, Homo sapiens
ctaagcatagaagtc

SEQ ID NO: 1290792 - DNA, 15 bp, Homo sapiens
cctaagcatagaagt

SEQ ID NO: 1290793 - DNA, 15 bp, Homo sapiens
ccctaagcatagaag

SEQ ID NO: 1290794 - DNA, 15 bp, Homo sapiens
gccctaagcatagaa

SEQ ID NO: 1290795 - DNA, 15 bp, Homo sapiens
tgccctaagcataga

SEQ ID NO: 1290796 - DNA, 15 bp, Homo sapiens
atgccctaagcatag

SEQ ID NO: 1290797 - DNA, 15 bp, Homo sapiens
aatgccctaagcata

SEQ ID NO: 1290798 - DNA, 15 bp, Homo sapiens
caatgccctaagcat

SEQ ID NO: 1290799 - DNA, 15 bp, Homo sapiens
acaatgccctaagca

SEQ ID NO: 1290800 - DNA, 15 bp, Homo sapiens
cacaatgccctaagc

SEQ ID NO: 1290801 - DNA, 15 bp, Homo sapiens
ccacaatgccctaag

SEQ ID NO: 1290802 - DNA, 15 bp, Homo sapiens
tccacaatgccctaa

SEQ ID NO: 1290803 - DNA, 15 bp, Homo sapiens
gtccacaatgcccta

SEQ ID NO: 1290804 - DNA, 15 bp, Homo sapiens
agtccacaatgccct

SEQ ID NO: 1290805 - DNA, 15 bp, Homo sapiens
aagtccacaatgccc

SEQ ID NO: 1290806 - DNA, 15 bp, Homo sapiens
caagtccacaatgcc

SEQ ID NO: 1290807 - DNA, 15 bp, Homo sapiens
ccaagtccacaatgc

SEQ ID NO: 1290808 - DNA, 15 bp, Homo sapiens
gccaagtccacaatg

SEQ ID NO: 1290809 - DNA, 15 bp, Homo sapiens
tgccaagtccacaat

SEQ ID NO: 1290810 - DNA, 15 bp, Homo sapiens
ctgccaagtccacaa

SEQ ID NO: 1290811 - DNA, 15 bp, Homo sapiens
cctgccaagtccaca

SEQ ID NO: 1290812 - DNA, 15 bp, Homo sapiens
tcctgccaagtccac

SEQ ID NO: 1290813 - DNA, 15 bp, Homo sapiens
atcctgccaagtcca

SEQ ID NO: 1290814 - DNA, 15 bp, Homo sapiens
aatcctgccaagtcc

SEQ ID NO: 1290815 - DNA, 15 bp, Homo sapiens
aaatcctgccaagtc

SEQ ID NO: 1290816 - DNA, 15 bp, Homo sapiens
aaaatcctgccaagt

SEQ ID NO: 1290817 - DNA, 15 bp, Homo sapiens
aaaaatcctgccaag

SEQ ID NO: 1290818 - DNA, 15 bp, Homo sapiens
caaaaatcctgccaa

SEQ ID NO: 1290819 - DNA, 15 bp, Homo sapiens
tcaaaaatcctgcca

SEQ ID NO: 1290820 - DNA, 15 bp, Homo sapiens
ctcaaaaatcctgcc

SEQ ID NO: 1290821 - DNA, 15 bp, Homo sapiens
tctcaaaaatcctgc

SEQ ID NO: 1290822 - DNA, 15 bp, Homo sapiens
atctcaaaaatcctg

SEQ ID NO: 1290823 - DNA, 15 bp, Homo sapiens
aatctcaaaaatcct

SEQ ID NO: 1290824 - DNA, 15 bp, Homo sapiens
gaatctcaaaaatcc

SEQ ID NO: 1290825 - DNA, 15 bp, Homo sapiens
ggaatctcaaaaatc

SEQ ID NO: 1290826 - DNA, 15 bp, Homo sapiens
tggaatctcaaaaat

SEQ ID NO: 1290827 - DNA, 15 bp, Homo sapiens
ctggaatctcaaaaa

SEQ ID NO: 1290828 - DNA, 15 bp, Homo sapiens
tctggaatctcaaaa

SEQ ID NO: 1290829 - DNA, 15 bp, Homo sapiens
ttctggaatctcaaa

SEQ ID NO: 1290830 - DNA, 15 bp, Homo sapiens
cttctggaatctcaa

SEQ ID NO: 1290831 - DNA, 15 bp, Homo sapiens
tcttctggaatctca

SEQ ID NO: 1290832 - DNA, 15 bp, Homo sapiens
atcttctggaatctc

SEQ ID NO: 1290833 - DNA, 15 bp, Homo sapiens
tatcttctggaatct

SEQ ID NO: 1290834 - DNA, 15 bp, Homo sapiens
atatcttctggaatc

SEQ ID NO: 1290835 - DNA, 15 bp, Homo sapiens
catatcttctggaat

SEQ ID NO: 1290836 - DNA, 15 bp, Homo sapiens
tcatatcttctggaa

SEQ ID NO: 1290837 - DNA, 15 bp, Homo sapiens
ctcatatcttctgga

SEQ ID NO: 1290838 - DNA, 15 bp, Homo sapiens
gctcatatcttctgg

SEQ ID NO: 1290839 - DNA, 15 bp, Homo sapiens
cgctcatatcttctg

SEQ ID NO: 1290840 - DNA, 15 bp, Homo sapiens
tcgctcatatcttct

SEQ ID NO: 1290841 - DNA, 15 bp, Homo sapiens
ttcgctcatatcttc

SEQ ID NO: 1290842 - DNA, 15 bp, Homo sapiens
cttcgctcatatctt

SEQ ID NO: 1290843 - DNA, 15 bp, Homo sapiens
tcttcgctcatatct

SEQ ID NO: 1290844 - DNA, 15 bp, Homo sapiens
ctcttcgctcatatc

SEQ ID NO: 1290845 - DNA, 15 bp, Homo sapiens
actcttcgctcatat

SEQ ID NO: 1290846 - DNA, 15 bp, Homo sapiens
cactcttcgctcata

SEQ ID NO: 1290847 - DNA, 15 bp, Homo sapiens
tcactcttcgctcat

SEQ ID NO: 1290848 - DNA, 15 bp, Homo sapiens
ttcactcttcgctca

SEQ ID NO: 1290849 - DNA, 15 bp, Homo sapiens
tttcactcttcgctc

SEQ ID NO: 1290850 - DNA, 15 bp, Homo sapiens
ttttcactcttcgct

SEQ ID NO: 1290851 - DNA, 15 bp, Homo sapiens
gttttcactcttcgc

SEQ ID NO: 1290852 - DNA, 15 bp, Homo sapiens
tgttttcactcttcg

SEQ ID NO: 1290853 - DNA, 15 bp, Homo sapiens
ttgttttcactcttc

SEQ ID NO: 1290854 - DNA, 15 bp, Homo sapiens
tttgttttcactctt

SEQ ID NO: 1290855 - DNA, 15 bp, Homo sapiens
ctttgttttcactct

SEQ ID NO: 1290856 - DNA, 15 bp, Homo sapiens
gctttgttttcactc

SEQ ID NO: 1290857 - DNA, 15 bp, Homo sapiens
tgctttgttttcact

SEQ ID NO: 1290858 - DNA, 15 bp, Homo sapiens
ctgctttgttttcac

SEQ ID NO: 1290859 - DNA, 15 bp, Homo sapiens
cctgctttgttttca

SEQ ID NO: 1290860 - DNA, 15 bp, Homo sapiens
tcctgctttgttttc

SEQ ID NO: 1290861 - DNA, 15 bp, Homo sapiens
gtcctgctttgtttt

SEQ ID NO: 1290862 - DNA, 15 bp, Homo sapiens
tgtcctgctttgttt

SEQ ID NO: 1290863 - DNA, 15 bp, Homo sapiens
ctgtcctgctttgtt

SEQ ID NO: 1290864 - DNA, 15 bp, Homo sapiens
tctgtcctgctttgt

SEQ ID NO: 1290865 - DNA, 15 bp, Homo sapiens
ttctgtcctgctttg

SEQ ID NO: 1290866 - DNA, 15 bp, Homo sapiens
gttctgtcctgcttt

SEQ ID NO: 1290867 - DNA, 15 bp, Homo sapiens
tgttctgtcctgctt

SEQ ID NO: 1290868 - DNA, 15 bp, Homo sapiens
ttgttctgtcctgct

SEQ ID NO: 1290869 - DNA, 15 bp, Homo sapiens
tttgttctgtcctgc

SEQ ID NO: 1290870 - DNA, 15 bp, Homo sapiens
ttttgttctgtcctg

SEQ ID NO: 1290871 - DNA, 15 bp, Homo sapiens
tttttgttctgtcct

SEQ ID NO: 1290872 - DNA, 15 bp, Homo sapiens
ttttttgttctgtcc

SEQ ID NO: 1290873 - DNA, 15 bp, Homo sapiens
gttttttgttctgtc

SEQ ID NO: 1290874 - DNA, 15 bp, Homo sapiens
tgttttttgttctgt

SEQ ID NO: 1290875 - DNA, 15 bp, Homo sapiens
ctgttttttgttctg

SEQ ID NO: 1290876 - DNA, 15 bp, Homo sapiens
tctgttttttgttct

SEQ ID NO: 1290877 - DNA, 15 bp, Homo sapiens
ttctgttttttgttc

SEQ ID NO: 1290878 - DNA, 15 bp, Homo sapiens
attctgttttttgtt

SEQ ID NO: 1290879 - DNA, 15 bp, Homo sapiens
aattctgttttttgt

SEQ ID NO: 1290880 - DNA, 15 bp, Homo sapiens
aaattctgttttttg

SEQ ID NO: 1290881 - DNA, 15 bp, Homo sapiens
gaaattctgtttttt

SEQ ID NO: 1290882 - DNA, 15 bp, Homo sapiens
agaaattctgttttt

SEQ ID NO: 1290883 - DNA, 15 bp, Homo sapiens
aagaaattctgtttt

SEQ ID NO: 1290884 - DNA, 15 bp, Homo sapiens
gaagaaattctgttt

SEQ ID NO: 1290885 - DNA, 15 bp, Homo sapiens
tgaagaaattctgtt

SEQ ID NO: 1290886 - DNA, 15 bp, Homo sapiens
atgaagaaattctgt

SEQ ID NO: 1290887 - DNA, 15 bp, Homo sapiens
aatgaagaaattctg

SEQ ID NO: 1290888 - DNA, 15 bp, Homo sapiens
aaatgaagaaattct

SEQ ID NO: 1290889 - DNA, 15 bp, Homo sapiens
taaatgaagaaattc

SEQ ID NO: 1290890 - DNA, 15 bp, Homo sapiens
ataaatgaagaaatt

SEQ ID NO: 1290891 - DNA, 15 bp, Homo sapiens
aataaatgaagaaat

SEQ ID NO: 1290892 - DNA, 15 bp, Homo sapiens
taataaatgaagaaa

SEQ ID NO: 1290893 - DNA, 15 bp, Homo sapiens
ataataaatgaagaa

SEQ ID NO: 1290894 - DNA, 15 bp, Homo sapiens
aataataaatgaaga

SEQ ID NO: 1290895 - DNA, 15 bp, Homo sapiens
aaataataaatgaag

SEQ ID NO: 1290896 - DNA, 15 bp, Homo sapiens
gaaataataaatgaa

SEQ ID NO: 1290897 - DNA, 15 bp, Homo sapiens
tgaaataataaatga

SEQ ID NO: 1290898 - DNA, 15 bp, Homo sapiens
ctgaaataataaatg

SEQ ID NO: 1290899 - DNA, 15 bp, Homo sapiens
actgaaataataaat

SEQ ID NO: 1290900 - DNA, 15 bp, Homo sapiens
cactgaaataataaa

SEQ ID NO: 1290901 - DNA, 15 bp, Homo sapiens
gcactgaaataataa

SEQ ID NO: 1290902 - DNA, 15 bp, Homo sapiens
tgcactgaaataata

SEQ ID NO: 1290903 - DNA, 15 bp, Homo sapiens
gtgcactgaaataat

SEQ ID NO: 1290904 - DNA, 15 bp, Homo sapiens
agtgcactgaaataa

SEQ ID NO: 1290905 - DNA, 15 bp, Homo sapiens
cagtgcactgaaata

SEQ ID NO: 1290906 - DNA, 15 bp, Homo sapiens
acagtgcactgaaat

SEQ ID NO: 1290907 - DNA, 15 bp, Homo sapiens
cacagtgcactgaaa

SEQ ID NO: 1290908 - DNA, 15 bp, Homo sapiens
tcacagtgcactgaa

SEQ ID NO: 1290909 - DNA, 15 bp, Homo sapiens
ttcacagtgcactga

SEQ ID NO: 1290910 - DNA, 15 bp, Homo sapiens
tttcacagtgcactg

SEQ ID NO: 1290911 - DNA, 15 bp, Homo sapiens
atttcacagtgcact

SEQ ID NO: 1290912 - DNA, 15 bp, Homo sapiens
catttcacagtgcac

SEQ ID NO: 1290913 - DNA, 15 bp, Homo sapiens
gcatttcacagtgca

SEQ ID NO: 1290914 - DNA, 15 bp, Homo sapiens
agcatttcacagtgc

SEQ ID NO: 1290915 - DNA, 15 bp, Homo sapiens
gagcatttcacagtg

SEQ ID NO: 1290916 - DNA, 15 bp, Homo sapiens
tgagcatttcacagt

SEQ ID NO: 1290917 - DNA, 15 bp, Homo sapiens
gtgagcatttcacag

SEQ ID NO: 1290918 - DNA, 15 bp, Homo sapiens
ggtgagcatttcaca

SEQ ID NO: 1290919 - DNA, 15 bp, Homo sapiens
cggtgagcatttcac

SEQ ID NO: 1290920 - DNA, 15 bp, Homo sapiens
acggtgagcatttca

SEQ ID NO: 1290921 - DNA, 15 bp, Homo sapiens
cacggtgagcatttc

SEQ ID NO: 1290922 - DNA, 15 bp, Homo sapiens
acacggtgagcattt

SEQ ID NO: 1290923 - DNA, 15 bp, Homo sapiens
cacacggtgagcatt

SEQ ID NO: 1290924 - DNA, 15 bp, Homo sapiens
gcacacggtgagcat

SEQ ID NO: 1290925 - DNA, 15 bp, Homo sapiens
agcacacggtgagca

SEQ ID NO: 1290926 - DNA, 15 bp, Homo sapiens
tagcacacggtgagc

SEQ ID NO: 1290927 - DNA, 15 bp, Homo sapiens
ctagcacacggtgag

SEQ ID NO: 1290928 - DNA, 15 bp, Homo sapiens
cctagcacacggtga

SEQ ID NO: 1290929 - DNA, 15 bp, Homo sapiens
acctagcacacggtg

SEQ ID NO: 1290930 - DNA, 15 bp, Homo sapiens
cacctagcacacggt

SEQ ID NO: 1290931 - DNA, 15 bp, Homo sapiens
gcacctagcacacgg

SEQ ID NO: 1290932 - DNA, 15 bp, Homo sapiens
agcacctagcacacg

SEQ ID NO: 1290933 - DNA, 15 bp, Homo sapiens
acagcacctagcaca

SEQ ID NO: 1290934 - DNA, 15 bp, Homo sapiens
aacagcacctagcac

SEQ ID NO: 1290935 - DNA, 15 bp, Homo sapiens
gaacagcacctagca

SEQ ID NO: 1290936 - DNA, 15 bp, Homo sapiens
tgaacagcacctagc

SEQ ID NO: 1290937 - DNA, 15 bp, Homo sapiens
ctgaacagcacctag

SEQ ID NO: 1290938 - DNA, 15 bp, Homo sapiens
cctgaacagcaccta

SEQ ID NO: 1290939 - DNA, 15 bp, Homo sapiens
gcctgaacagcacct

SEQ ID NO: 1290940 - DNA, 15 bp, Homo sapiens
agcctgaacagcacc

SEQ ID NO: 1290941 - DNA, 15 bp, Homo sapiens
aagcctgaacagcac

SEQ ID NO: 1290942 - DNA, 15 bp, Homo sapiens
aaagcctgaacagca

SEQ ID NO: 1290943 - DNA, 15 bp, Homo sapiens
caaagcctgaacagc

SEQ ID NO: 1290944 - DNA, 15 bp, Homo sapiens
tcaaagcctgaacag

SEQ ID NO: 1290945 - DNA, 15 bp, Homo sapiens
ctcaaagcctgaaca

SEQ ID NO: 1290946 - DNA, 15 bp, Homo sapiens
cctcaaagcctgaac

SEQ ID NO: 1290947 - DNA, 15 bp, Homo sapiens
tcctcaaagcctgaa

SEQ ID NO: 1290948 - DNA, 15 bp, Homo sapiens
atcctcaaagcctga

SEQ ID NO: 1290949 - DNA, 15 bp, Homo sapiens
catcctcaaagcctg

SEQ ID NO: 1290950 - DNA, 15 bp, Homo sapiens
acatcctcaaagcct

SEQ ID NO: 1290951 - DNA, 15 bp, Homo sapiens
cacatcctcaaagcc

SEQ ID NO: 1290952 - DNA, 15 bp, Homo sapiens
ccacatcctcaaagc

SEQ ID NO: 1290953 - DNA, 15 bp, Homo sapiens
tccacatcctcaaag

SEQ ID NO: 1290954 - DNA, 15 bp, Homo sapiens
ctccacatcctcaaa

SEQ ID NO: 1290955 - DNA, 15 bp, Homo sapiens
actccacatcctcaa

SEQ ID NO: 1290956 - DNA, 15 bp, Homo sapiens
cactccacatcctca

SEQ ID NO: 1290957 - DNA, 15 bp, Homo sapiens
ccactccacatcctc

SEQ ID NO: 1290958 - DNA, 15 bp, Homo sapiens
cccactccacatcct

SEQ ID NO: 1290959 - DNA, 15 bp, Homo sapiens
gcccactccacatcc

SEQ ID NO: 1290960 - DNA, 15 bp, Homo sapiens
tgcccactccacatc

SEQ ID NO: 1290961 - DNA, 15 bp, Homo sapiens
ttgcccactccacat

SEQ ID NO: 1290962 - DNA, 15 bp, Homo sapiens
tttgcccactccaca

SEQ ID NO: 1290963 - DNA, 15 bp, Homo sapiens
atttgcccactccac

SEQ ID NO: 1290964 - DNA, 15 bp, Homo sapiens
gatttgcccactcca

SEQ ID NO: 1290965 - DNA, 15 bp, Homo sapiens
tgatttgcccactcc

SEQ ID NO: 1290966 - DNA, 15 bp, Homo sapiens
ctgatttgcccactc

SEQ ID NO: 1290967 - DNA, 15 bp, Homo sapiens
cctgatttgcccact

SEQ ID NO: 1290968 - DNA, 15 bp, Homo sapiens
gcctgatttgcccac

SEQ ID NO: 1290969 - DNA, 15 bp, Homo sapiens
tgcctgatttgccca

SEQ ID NO: 1290970 - DNA, 15 bp, Homo sapiens
ctgcctgatttgccc

SEQ ID NO: 1290971 - DNA, 15 bp, Homo sapiens
tctgcctgatttgcc

SEQ ID NO: 1290972 - DNA, 15 bp, Homo sapiens
gtctgcctgatttgc

SEQ ID NO: 1290973 - DNA, 15 bp, Homo sapiens
agtctgcctgatttg

SEQ ID NO: 1290974 - DNA, 15 bp, Homo sapiens
gagtctgcctgattt

SEQ ID NO: 1290975 - DNA, 15 bp, Homo sapiens
agagtctgcctgatt

SEQ ID NO: 1290976 - DNA, 15 bp, Homo sapiens
cagagtctgcctgat

SEQ ID NO: 1290977 - DNA, 15 bp, Homo sapiens
gcagagtctgcctga

SEQ ID NO: 1290978 - DNA, 15 bp, Homo sapiens
ggcagagtctgcctg

SEQ ID NO: 1290979 - DNA, 15 bp, Homo sapiens
gggcagagtctgcct

SEQ ID NO: 1290980 - DNA, 15 bp, Homo sapiens
agggcagagtctgcc

SEQ ID NO: 1290981 - DNA, 15 bp, Homo sapiens
cagggcagagtctgc

SEQ ID NO: 1290982 - DNA, 15 bp, Homo sapiens
tcagggcagagtctg

SEQ ID NO: 1290983 - DNA, 15 bp, Homo sapiens
gtcagggcagagtct

SEQ ID NO: 1290984 - DNA, 15 bp, Homo sapiens
agtcagggcagagtc

SEQ ID NO: 1290985 - DNA, 15 bp, Homo sapiens
cagtcagggcagagt

SEQ ID NO: 1290986 - DNA, 15 bp, Homo sapiens
gcagtcagggcagag

SEQ ID NO: 1290987 - DNA, 15 bp, Homo sapiens
agcagtcagggcaga

SEQ ID NO: 1290988 - DNA, 15 bp, Homo sapiens
tagcagtcagggcag

SEQ ID NO: 1290989 - DNA, 15 bp, Homo sapiens
ctagcagtcagggca

SEQ ID NO: 1290990 - DNA, 15 bp, Homo sapiens
tctagcagtcagggc

SEQ ID NO: 1290991 - DNA, 15 bp, Homo sapiens
ctctagcagtcaggg

SEQ ID NO: 1290992 - DNA, 15 bp, Homo sapiens
tctctagcagtcagg

SEQ ID NO: 1290993 - DNA, 15 bp, Homo sapiens
ttctctagcagtcag

SEQ ID NO: 1290994 - DNA, 15 bp, Homo sapiens
attctctagcagtca

SEQ ID NO: 1290995 - DNA, 15 bp, Homo sapiens
tattctctagcagtc

SEQ ID NO: 1290996 - DNA, 15 bp, Homo sapiens
ttattctctagcagt

SEQ ID NO: 1290997 - DNA, 15 bp, Homo sapiens
cttattctctagcag

SEQ ID NO: 1290998 - DNA, 15 bp, Homo sapiens
gcttattctctagca

SEQ ID NO: 1290999 - DNA, 15 bp, Homo sapiens
tgcttattctctagc

SEQ ID NO: 1291000 - DNA, 15 bp, Homo sapiens
gtgcttattctctag

SEQ ID NO: 1291001 - DNA, 15 bp, Homo sapiens
tgtgcttattctcta

SEQ ID NO: 1291002 - DNA, 15 bp, Homo sapiens
gtgtgcttattctct

SEQ ID NO: 1291003 - DNA, 15 bp, Homo sapiens
cgtgtgcttattctc

SEQ ID NO: 1291004 - DNA, 15 bp, Homo sapiens
acgtgtgcttattct

SEQ ID NO: 1291005 - DNA, 15 bp, Homo sapiens
cacgtgtgcttattc

SEQ ID NO: 1291006 - DNA, 15 bp, Homo sapiens
acacgtgtgcttatt

SEQ ID NO: 1291007 - DNA, 15 bp, Homo sapiens
cacacgtgtgcttat

SEQ ID NO: 1291008 - DNA, 15 bp, Homo sapiens
acacacgtgtgctta

SEQ ID NO: 1291009 - DNA, 15 bp, Homo sapiens
cacacacgtgtgctt

SEQ ID NO: 1291010 - DNA, 15 bp, Homo sapiens
tcacacacgtgtgct

SEQ ID NO: 1291011 - DNA, 15 bp, Homo sapiens
atcacacacgtgtgc

SEQ ID NO: 1291012 - DNA, 15 bp, Homo sapiens
catcacacacgtgtg

SEQ ID NO: 1291013 - DNA, 15 bp, Homo sapiens
tcatcacacacgtgt

SEQ ID NO: 1291014 - DNA, 15 bp, Homo sapiens
ttcatcacacacgtg

SEQ ID NO: 1291015 - DNA, 15 bp, Homo sapiens
cttcatcacacacgt

SEQ ID NO: 1291016 - DNA, 15 bp, Homo sapiens
ccttcatcacacacg

SEQ ID NO: 1291017 - DNA, 15 bp, Homo sapiens
accttcatcacacac

SEQ ID NO: 1291018 - DNA, 15 bp, Homo sapiens
caccttcatcacaca

SEQ ID NO: 1291019 - DNA, 15 bp, Homo sapiens
ccaccttcatcacac

SEQ ID NO: 1291020 - DNA, 15 bp, Homo sapiens
accaccttcatcaca

SEQ ID NO: 1291021 - DNA, 15 bp, Homo sapiens
taccaccttcatcac

SEQ ID NO: 1291022 - DNA, 15 bp, Homo sapiens
ctaccaccttcatca

SEQ ID NO: 1291023 - DNA, 15 bp, Homo sapiens
actaccaccttcatc

SEQ ID NO: 1291024 - DNA, 15 bp, Homo sapiens
cactaccaccttcat

SEQ ID NO: 1291025 - DNA, 15 bp, Homo sapiens
ccactaccaccttca

SEQ ID NO: 1291026 - DNA, 15 bp, Homo sapiens
accactaccaccttc

SEQ ID NO: 1291027 - DNA, 15 bp, Homo sapiens
caccactaccacctt

SEQ ID NO: 1291028 - DNA, 15 bp, Homo sapiens
ccaccactaccacct

SEQ ID NO: 1291029 - DNA, 15 bp, Homo sapiens
cccaccactaccacc

SEQ ID NO: 1291030 - DNA, 15 bp, Homo sapiens
tcccaccactaccac

SEQ ID NO: 1291031 - DNA, 15 bp, Homo sapiens
ttcccaccactacca

SEQ ID NO: 1291032 - DNA, 15 bp, Homo sapiens
cttcccaccactacc

SEQ ID NO: 1291033 - DNA, 15 bp, Homo sapiens
gcttcccaccactac

SEQ ID NO: 1291034 - DNA, 15 bp, Homo sapiens
tgcttcccaccacta

SEQ ID NO: 1291035 - DNA, 15 bp, Homo sapiens
ttgcttcccaccact

SEQ ID NO: 1291036 - DNA, 15 bp, Homo sapiens
tttgcttcccaccac

SEQ ID NO: 1291037 - DNA, 15 bp, Homo sapiens
ctttgcttcccacca

SEQ ID NO: 1291038 - DNA, 15 bp, Homo sapiens
tctttgcttcccacc

SEQ ID NO: 1291039 - DNA, 15 bp, Homo sapiens
ttctttgcttcccac

SEQ ID NO: 1291040 - DNA, 15 bp, Homo sapiens
gttctttgcttccca

SEQ ID NO: 1291041 - DNA, 15 bp, Homo sapiens
tgttctttgcttccc

SEQ ID NO: 1291042 - DNA, 15 bp, Homo sapiens
ctgttctttgcttcc

SEQ ID NO: 1291043 - DNA, 15 bp, Homo sapiens
gctgttctttgcttc

SEQ ID NO: 1291044 - DNA, 15 bp, Homo sapiens
tgctgttctttgctt

SEQ ID NO: 1291045 - DNA, 15 bp, Homo sapiens
ctgctgttctttgct

SEQ ID NO: 1291046 - DNA, 15 bp, Homo sapiens
gctgctgttctttgc

SEQ ID NO: 1291047 - DNA, 15 bp, Homo sapiens
cgctgctgttctttg

SEQ ID NO: 1291048 - DNA, 15 bp, Homo sapiens
tcgctgctgttcttt

SEQ ID NO: 1291049 - DNA, 15 bp, Homo sapiens
ttcgctgctgttctt

SEQ ID NO: 1291050 - DNA, 15 bp, Homo sapiens
cttcgctgctgttct

SEQ ID NO: 1291051 - DNA, 15 bp, Homo sapiens
ccttcgctgctgttc

SEQ ID NO: 1291052 - DNA, 15 bp, Homo sapiens
cccttcgctgctgtt

SEQ ID NO: 1291053 - DNA, 15 bp, Homo sapiens
ccccttcgctgctgt

SEQ ID NO: 1291054 - DNA, 15 bp, Homo sapiens
tccccttcgctgctg

SEQ ID NO: 1291055 - DNA, 15 bp, Homo sapiens
atccccttcgctgct

SEQ ID NO: 1291056 - DNA, 15 bp, Homo sapiens
catccccttcgctgc

SEQ ID NO: 1291057 - DNA, 15 bp, Homo sapiens
tcatccccttcgctg

SEQ ID NO: 1291058 - DNA, 15 bp, Homo sapiens
gtcatccccttcgct

SEQ ID NO: 1291059 - DNA, 15 bp, Homo sapiens
ggtcatccccttcgc

SEQ ID NO: 1291060 - DNA, 15 bp, Homo sapiens
cggtcatccccttcg

SEQ ID NO: 1291061 - DNA, 15 bp, Homo sapiens
acggtcatccccttc

SEQ ID NO: 1291062 - DNA, 15 bp, Homo sapiens
cacggtcatcccctt

SEQ ID NO: 1291063 - DNA, 15 bp, Homo sapiens
acacggtcatcccct

SEQ ID NO: 1291064 - DNA, 15 bp, Homo sapiens
aacacggtcatcccc

SEQ ID NO: 1291065 - DNA, 15 bp, Homo sapiens
gaacacggtcatccc

SEQ ID NO: 1291066 - DNA, 15 bp, Homo sapiens
ggaacacggtcatcc

SEQ ID NO: 1291067 - DNA, 15 bp, Homo sapiens
gggaacacggtcatc

SEQ ID NO: 1291068 - DNA, 15 bp, Homo sapiens
agggaacacggtcat

SEQ ID NO: 1291069 - DNA, 15 bp, Homo sapiens
aagggaacacggtca

SEQ ID NO: 1291070 - DNA, 15 bp, Homo sapiens
gaagggaacacggtc

SEQ ID NO: 1291071 - DNA, 15 bp, Homo sapiens
ggaagggaacacggt

SEQ ID NO: 1291072 - DNA, 15 bp, Homo sapiens
cggaagggaacacgg

SEQ ID NO: 1291073 - DNA, 15 bp, Homo sapiens
acggaagggaacacg

SEQ ID NO: 1291074 - DNA, 15 bp, Homo sapiens
cacggaagggaacac

SEQ ID NO: 1291075 - DNA, 15 bp, Homo sapiens
acacggaagggaaca

SEQ ID NO: 1291076 - DNA, 15 bp, Homo sapiens
cacacggaagggaac

SEQ ID NO: 1291077 - DNA, 15 bp, Homo sapiens
ccacacggaagggaa

SEQ ID NO: 1291078 - DNA, 15 bp, Homo sapiens
cccacacggaaggga

SEQ ID NO: 1291079 - DNA, 15 bp, Homo sapiens
ccccacacggaaggg

SEQ ID NO: 1291080 - DNA, 15 bp, Homo sapiens
gccccacacggaagg

SEQ ID NO: 1291081 - DNA, 15 bp, Homo sapiens
tgccccacacggaag

SEQ ID NO: 1291082 - DNA, 15 bp, Homo sapiens
gtgccccacacggaa

SEQ ID NO: 1291083 - DNA, 15 bp, Homo sapiens
agtgccccacacgga

SEQ ID NO: 1291084 - DNA, 15 bp, Homo sapiens
cagtgccccacacgg

SEQ ID NO: 1291085 - DNA, 15 bp, Homo sapiens
ccagtgccccacacg

SEQ ID NO: 1291086 - DNA, 15 bp, Homo sapiens
cccagtgccccacac

SEQ ID NO: 1291087 - DNA, 15 bp, Homo sapiens
gcccagtgccccaca

SEQ ID NO: 1291088 - DNA, 15 bp, Homo sapiens
agcccagtgccccac

SEQ ID NO: 1291089 - DNA, 15 bp, Homo sapiens
cagcccagtgcccca

SEQ ID NO: 1291090 - DNA, 15 bp, Homo sapiens
acagcccagtgcccc

SEQ ID NO: 1291091 - DNA, 15 bp, Homo sapiens
cacagcccagtgccc

SEQ ID NO: 1291092 - DNA, 15 bp, Homo sapiens
tcacagcccagtgcc

SEQ ID NO: 1291093 - DNA, 15 bp, Homo sapiens
gtcacagcccagtgc

SEQ ID NO: 1291094 - DNA, 15 bp, Homo sapiens
agtcacagcccagtg

SEQ ID NO: 1291095 - DNA, 15 bp, Homo sapiens
aagtcacagcccagt

SEQ ID NO: 1291096 - DNA, 15 bp, Homo sapiens
taagtcacagcccag

SEQ ID NO: 1291097 - DNA, 15 bp, Homo sapiens
gtaagtcacagccca

SEQ ID NO: 1291098 - DNA, 15 bp, Homo sapiens
tgtaagtcacagccc

SEQ ID NO: 1291099 - DNA, 15 bp, Homo sapiens
atgtaagtcacagcc

SEQ ID NO: 1291100 - DNA, 15 bp, Homo sapiens
aatgtaagtcacagc

SEQ ID NO: 1291101 - DNA, 15 bp, Homo sapiens
caatgtaagtcacag

SEQ ID NO: 1291102 - DNA, 15 bp, Homo sapiens
gcaatgtaagtcaca

SEQ ID NO: 1291103 - DNA, 15 bp, Homo sapiens
agcaatgtaagtcac

SEQ ID NO: 1291104 - DNA, 15 bp, Homo sapiens
gagcaatgtaagtca

SEQ ID NO: 1291105 - DNA, 15 bp, Homo sapiens
agagcaatgtaagtc

SEQ ID NO: 1291106 - DNA, 15 bp, Homo sapiens
gagagcaatgtaagt

SEQ ID NO: 1291107 - DNA, 15 bp, Homo sapiens
cgagagcaatgtaag

SEQ ID NO: 1291108 - DNA, 15 bp, Homo sapiens
ccgagagcaatgtaa

SEQ ID NO: 1291109 - DNA, 15 bp, Homo sapiens
cccgagagcaatgta

SEQ ID NO: 1291110 - DNA, 15 bp, Homo sapiens
acccgagagcaatgt

SEQ ID NO: 1291111 - DNA, 15 bp, Homo sapiens
aacccgagagcaatg

SEQ ID NO: 1291112 - DNA, 15 bp, Homo sapiens
taacccgagagcaat

SEQ ID NO: 1291113 - DNA, 15 bp, Homo sapiens
gtaacccgagagcaa

SEQ ID NO: 1291114 - DNA, 15 bp, Homo sapiens
agtaacccgagagca

SEQ ID NO: 1291115 - DNA, 15 bp, Homo sapiens
gagtaacccgagagc

SEQ ID NO: 1291116 - DNA, 15 bp, Homo sapiens
tgagtaacccgagag

SEQ ID NO: 1291117 - DNA, 15 bp, Homo sapiens
ggtggaactacaagg

SEQ ID NO: 1291118 - DNA, 15 bp, Homo sapiens
aggtggaactacaag

SEQ ID NO: 1291119 - DNA, 15 bp, Homo sapiens
aaggtggaactacaa

SEQ ID NO: 1291120 - DNA, 15 bp, Homo sapiens
taaggtggaactaca

SEQ ID NO: 1291121 - DNA, 15 bp, Homo sapiens
ataaggtggaactac

SEQ ID NO: 1291122 - DNA, 15 bp, Homo sapiens
tataaggtggaacta

SEQ ID NO: 1291123 - DNA, 15 bp, Homo sapiens
gtataaggtggaact

SEQ ID NO: 1291124 - DNA, 15 bp, Homo sapiens
agtataaggtggaac

SEQ ID NO: 1291125 - DNA, 15 bp, Homo sapiens
cagtataaggtggaa

SEQ ID NO: 1291126 - DNA, 15 bp, Homo sapiens
gcagtataaggtgga

SEQ ID NO: 1291127 - DNA, 15 bp, Homo sapiens
ggcagtataaggtgg

SEQ ID NO: 1291128 - DNA, 15 bp, Homo sapiens
cggcagtataaggtg

SEQ ID NO: 1291129 - DNA, 15 bp, Homo sapiens
tcggcagtataaggt

SEQ ID NO: 1291130 - DNA, 15 bp, Homo sapiens
ctcggcagtataagg

SEQ ID NO: 1291131 - DNA, 15 bp, Homo sapiens
tctcggcagtataag

SEQ ID NO: 1291132 - DNA, 15 bp, Homo sapiens
ttctcggcagtataa

SEQ ID NO: 1291133 - DNA, 15 bp, Homo sapiens
cttctcggcagtata

SEQ ID NO: 1291134 - DNA, 15 bp, Homo sapiens
ccttctcggcagtat

SEQ ID NO: 1291135 - DNA, 15 bp, Homo sapiens
tccttctcggcagta

SEQ ID NO: 1291136 - DNA, 15 bp, Homo sapiens
ttccttctcggcagt

SEQ ID NO: 1291137 - DNA, 15 bp, Homo sapiens
tttccttctcggcag

SEQ ID NO: 1291138 - DNA, 15 bp, Homo sapiens
gtttccttctcggca

SEQ ID NO: 1291139 - DNA, 15 bp, Homo sapiens
ggtttccttctcggc

SEQ ID NO: 1291140 - DNA, 15 bp, Homo sapiens
cggtttccttctcgg

SEQ ID NO: 1291141 - DNA, 15 bp, Homo sapiens
tcggtttccttctcg

SEQ ID NO: 1291142 - DNA, 15 bp, Homo sapiens
ctcggtttccttctc

SEQ ID NO: 1291143 - DNA, 15 bp, Homo sapiens
cctcggtttccttct

SEQ ID NO: 1291144 - DNA, 15 bp, Homo sapiens
gcctcggtttccttc

SEQ ID NO: 1291145 - DNA, 15 bp, Homo sapiens
ggcctcggtttcctt

SEQ ID NO: 1291146 - DNA, 15 bp, Homo sapiens
aggcctcggtttcct

SEQ ID NO: 1291147 - DNA, 15 bp, Homo sapiens
caggcctcggtttcc

SEQ ID NO: 1291148 - DNA, 15 bp, Homo sapiens
ccaggcctcggtttc

SEQ ID NO: 1291149 - DNA, 15 bp, Homo sapiens
tccaggcctcggttt

SEQ ID NO: 1291150 - DNA, 15 bp, Homo sapiens
ctccaggcctcggtt

SEQ ID NO: 1291151 - DNA, 15 bp, Homo sapiens
cctccaggcctcggt

SEQ ID NO: 1291152 - DNA, 15 bp, Homo sapiens
ccctccaggcctcgg

SEQ ID NO: 1291153 - DNA, 15 bp, Homo sapiens
tccctccaggcctcg

SEQ ID NO: 1291154 - DNA, 15 bp, Homo sapiens
ctccctccaggcctc

SEQ ID NO: 1291155 - DNA, 15 bp, Homo sapiens
gctccctccaggcct

SEQ ID NO: 1291156 - DNA, 15 bp, Homo sapiens
ggctccctccaggcc

SEQ ID NO: 1291157 - DNA, 15 bp, Homo sapiens
gggctccctccaggc

SEQ ID NO: 1291158 - DNA, 15 bp, Homo sapiens
tgggctccctccagg

SEQ ID NO: 1291159 - DNA, 15 bp, Homo sapiens
atgggctccctccag

SEQ ID NO: 1291160 - DNA, 15 bp, Homo sapiens
catgggctccctcca

SEQ ID NO: 1291161 - DNA, 15 bp, Homo sapiens
tcatgggctccctcc

SEQ ID NO: 1291162 - DNA, 15 bp, Homo sapiens
atcatgggctccctc

SEQ ID NO: 1291163 - DNA, 15 bp, Homo sapiens
catcatgggctccct

SEQ ID NO: 1291164 - DNA, 15 bp, Homo sapiens
acatcatgggctccc

SEQ ID NO: 1291165 - DNA, 15 bp, Homo sapiens
cacatcatgggctcc

SEQ ID NO: 1291166 - DNA, 15 bp, Homo sapiens
acacatcatgggctc

SEQ ID NO: 1291167 - DNA, 15 bp, Homo sapiens
aacacatcatgggct

SEQ ID NO: 1291168 - DNA, 15 bp, Homo sapiens
gaacacatcatgggc

SEQ ID NO: 1291169 - DNA, 15 bp, Homo sapiens
tgaacacatcatggg

SEQ ID NO: 1291170 - DNA, 15 bp, Homo sapiens
atgaacacatcatgg

SEQ ID NO: 1291171 - DNA, 15 bp, Homo sapiens
catgaacacatcatg

SEQ ID NO: 1291172 - DNA, 15 bp, Homo sapiens
acatgaacacatcat

SEQ ID NO: 1291173 - DNA, 15 bp, Homo sapiens
aacatgaacacatca

SEQ ID NO: 1291174 - DNA, 15 bp, Homo sapiens
taaacatgaacacat

SEQ ID NO: 1291175 - DNA, 15 bp, Homo sapiens
gtaaacatgaacaca

SEQ ID NO: 1291176 - DNA, 15 bp, Homo sapiens
tgtaaacatgaacac

SEQ ID NO: 1291177 - DNA, 15 bp, Homo sapiens
gtgtaaacatgaaca

SEQ ID NO: 1291178 - DNA, 15 bp, Homo sapiens
ggtgtaaacatgaac

SEQ ID NO: 1291179 - DNA, 15 bp, Homo sapiens
cggtgtaaacatgaa

SEQ ID NO: 1291180 - DNA, 15 bp, Homo sapiens
gcggtgtaaacatga

SEQ ID NO: 1291181 - DNA, 15 bp, Homo sapiens
tgcggtgtaaacatg

SEQ ID NO: 1291182 - DNA, 15 bp, Homo sapiens
ttgcggtgtaaacat

SEQ ID NO: 1291183 - DNA, 15 bp, Homo sapiens
cttgcggtgtaaaca

SEQ ID NO: 1291184 - DNA, 15 bp, Homo sapiens
acttgcggtgtaaac

SEQ ID NO: 1291185 - DNA, 15 bp, Homo sapiens
aacttgcggtgtaaa

SEQ ID NO: 1291186 - DNA, 15 bp, Homo sapiens
taacttgcggtgtaa

SEQ ID NO: 1291187 - DNA, 15 bp, Homo sapiens
ctaacttgcggtgta

SEQ ID NO: 1291188 - DNA, 15 bp, Homo sapiens
actaacttgcggtgt

SEQ ID NO: 1291189 - DNA, 15 bp, Homo sapiens
cactaacttgcggtg

SEQ ID NO: 1291190 - DNA, 15 bp, Homo sapiens
acactaacttgcggt

SEQ ID NO: 1291191 - DNA, 15 bp, Homo sapiens
aacactaacttgcgg

SEQ ID NO: 1291192 - DNA, 15 bp, Homo sapiens
taacactaacttgcg

SEQ ID NO: 1291193 - DNA, 15 bp, Homo sapiens
ttaacactaacttgc

SEQ ID NO: 1291194 - DNA, 15 bp, Homo sapiens
tttaacactaacttg

SEQ ID NO: 1291195 - DNA, 15 bp, Homo sapiens
atttaacactaactt

SEQ ID NO: 1291196 - DNA, 15 bp, Homo sapiens
tatttaacactaact

SEQ ID NO: 1291197 - DNA, 15 bp, Homo sapiens
atatttaacactaac

SEQ ID NO: 1291198 - DNA, 15 bp, Homo sapiens
aatatttaacactaa

SEQ ID NO: 1291199 - DNA, 15 bp, Homo sapiens
gaatatttaacacta

SEQ ID NO: 1291200 - DNA, 15 bp, Homo sapiens
ggaatatttaacact

SEQ ID NO: 1291201 - DNA, 15 bp, Homo sapiens
tggaatatttaacac

SEQ ID NO: 1291202 - DNA, 15 bp, Homo sapiens
atggaatatttaaca

SEQ ID NO: 1291203 - DNA, 15 bp, Homo sapiens
aatggaatatttaac

SEQ ID NO: 1291204 - DNA, 15 bp, Homo sapiens
aaatggaatatttaa

SEQ ID NO: 1291205 - DNA, 15 bp, Homo sapiens
aaaatggaatattta

SEQ ID NO: 1291206 - DNA, 15 bp, Homo sapiens
aaaaatggaatattt

SEQ ID NO: 1291207 - DNA, 15 bp, Homo sapiens
aaaaaatggaatatt

SEQ ID NO: 1291208 - DNA, 15 bp, Homo sapiens
caaaaaatggaatat

SEQ ID NO: 1291209 - DNA, 15 bp, Homo sapiens
ccaaaaaatggaata

SEQ ID NO: 1291210 - DNA, 15 bp, Homo sapiens
tccaaaaaatggaat

SEQ ID NO: 1291211 - DNA, 15 bp, Homo sapiens
ttccaaaaaatggaa

SEQ ID NO: 1291212 - DNA, 15 bp, Homo sapiens
cttccaaaaaatgga

SEQ ID NO: 1291213 - DNA, 15 bp, Homo sapiens
ccttccaaaaaatgg

SEQ ID NO: 1291214 - DNA, 15 bp, Homo sapiens
tccttccaaaaaatg

SEQ ID NO: 1291215 - DNA, 15 bp, Homo sapiens
ttccttccaaaaaat

SEQ ID NO: 1291216 - DNA, 15 bp, Homo sapiens
attccttccaaaaaa

SEQ ID NO: 1291217 - DNA, 15 bp, Homo sapiens
aattccttccaaaaa

SEQ ID NO: 1291218 - DNA, 15 bp, Homo sapiens
aaattccttccaaaa

SEQ ID NO: 1291219 - DNA, 15 bp, Homo sapiens
aaaattccttccaaa

SEQ ID NO: 1291220 - DNA, 15 bp, Homo sapiens
taaaattccttccaa

SEQ ID NO: 1291221 - DNA, 15 bp, Homo sapiens
gtaaaattccttcca

SEQ ID NO: 1291222 - DNA, 15 bp, Homo sapiens
agtaaaattccttcc

SEQ ID NO: 1291223 - DNA, 15 bp, Homo sapiens
aagtaaaattccttc

SEQ ID NO: 1291224 - DNA, 15 bp, Homo sapiens
taagtaaaattcctt

SEQ ID NO: 1291225 - DNA, 15 bp, Homo sapiens
gtaagtaaaattcct

SEQ ID NO: 1291226 - DNA, 15 bp, Homo sapiens
tgtaagtaaaattcc

SEQ ID NO: 1291227 - DNA, 15 bp, Homo sapiens
atgtaagtaaaattc

SEQ ID NO: 1291228 - DNA, 15 bp, Homo sapiens
catgtaagtaaaatt

SEQ ID NO: 1291229 - DNA, 15 bp, Homo sapiens
gcatgtaagtaaaat

SEQ ID NO: 1291230 - DNA, 15 bp, Homo sapiens
tgcatgtaagtaaaa

SEQ ID NO: 1291231 - DNA, 15 bp, Homo sapiens
atgcatgtaagtaaa

SEQ ID NO: 1291232 - DNA, 15 bp, Homo sapiens
tatgcatgtaagtaa

SEQ ID NO: 1291233 - DNA, 15 bp, Homo sapiens
atatgcatgtaagta

SEQ ID NO: 1291234 - DNA, 15 bp, Homo sapiens
aatatgcatgtaagt

SEQ ID NO: 1291235 - DNA, 15 bp, Homo sapiens
aaatatgcatgtaag

SEQ ID NO: 1291236 - DNA, 15 bp, Homo sapiens
aaaatatgcatgtaa

SEQ ID NO: 1291237 - DNA, 15 bp, Homo sapiens
gaaaatatgcatgta

SEQ ID NO: 1291238 - DNA, 15 bp, Homo sapiens
ggaaaatatgcatgt

SEQ ID NO: 1291239 - DNA, 15 bp, Homo sapiens
tggaaaatatgcatg

SEQ ID NO: 1291240 - DNA, 15 bp, Homo sapiens
atggaaaatatgcat

SEQ ID NO: 1291241 - DNA, 15 bp, Homo sapiens
aatggaaaatatgca

SEQ ID NO: 1291242 - DNA, 15 bp, Homo sapiens
taatggaaaatatgc

SEQ ID NO: 1291243 - DNA, 15 bp, Homo sapiens
ataatggaaaatatg

SEQ ID NO: 1291244 - DNA, 15 bp, Homo sapiens
acataatggaaaata

SEQ ID NO: 1291245 - DNA, 15 bp, Homo sapiens
aacataatggaaaat

SEQ ID NO: 1291246 - DNA, 15 bp, Homo sapiens
aaacataatggaaaa

SEQ ID NO: 1291247 - DNA, 15 bp, Homo sapiens
taaacataatggaaa

SEQ ID NO: 1291248 - DNA, 15 bp, Homo sapiens
ataaacataatggaa

SEQ ID NO: 1291249 - DNA, 15 bp, Homo sapiens
tataaacataatgga

SEQ ID NO: 1291250 - DNA, 15 bp, Homo sapiens
ttataaacataatgg

SEQ ID NO: 1291251 - DNA, 15 bp, Homo sapiens
tttataaacataatg

SEQ ID NO: 1291252 - DNA, 15 bp, Homo sapiens
atttataaacataat

SEQ ID NO: 1291253 - DNA, 15 bp, Homo sapiens
aatttataaacataa

SEQ ID NO: 1291254 - DNA, 15 bp, Homo sapiens
aaatttataaacata

SEQ ID NO: 1291255 - DNA, 15 bp, Homo sapiens
gaaatttataaacat

SEQ ID NO: 1291256 - DNA, 15 bp, Homo sapiens
ggaaatttataaaca

SEQ ID NO: 1291257 - DNA, 15 bp, Homo sapiens
gggaaatttataaac

SEQ ID NO: 1291258 - DNA, 15 bp, Homo sapiens
ggggaaatttataaa

SEQ ID NO: 1291259 - DNA, 15 bp, Homo sapiens
gggggaaatttataa

SEQ ID NO: 1291260 - DNA, 15 bp, Homo sapiens
agggggaaatttata

SEQ ID NO: 1291261 - DNA, 15 bp, Homo sapiens
tagggggaaatttat

SEQ ID NO: 1291262 - DNA, 15 bp, Homo sapiens
atagggggaaattta

SEQ ID NO: 1291263 - DNA, 15 bp, Homo sapiens
aatagggggaaattt

SEQ ID NO: 1291264 - DNA, 15 bp, Homo sapiens
aaatagggggaaatt

SEQ ID NO: 1291265 - DNA, 15 bp, Homo sapiens
aaaatagggggaaat

SEQ ID NO: 1291266 - DNA, 15 bp, Homo sapiens
taaaatagggggaaa

SEQ ID NO: 1291267 - DNA, 15 bp, Homo sapiens
ttaaaatagggggaa

SEQ ID NO: 1291268 - DNA, 15 bp, Homo sapiens
tttaaaataggggga

SEQ ID NO: 1291269 - DNA, 15 bp, Homo sapiens
atttaaaataggggg

SEQ ID NO: 1291270 - DNA, 15 bp, Homo sapiens
aatttaaaatagggg

SEQ ID NO: 1291271 - DNA, 15 bp, Homo sapiens
taatttaaaataggg

SEQ ID NO: 1291272 - DNA, 15 bp, Homo sapiens
ataatttaaaatagg

SEQ ID NO: 1291273 - DNA, 15 bp, Homo sapiens
gataatttaaaatag

SEQ ID NO: 1291274 - DNA, 15 bp, Homo sapiens
ggataatttaaaata

SEQ ID NO: 1291275 - DNA, 15 bp, Homo sapiens
gggataatttaaaat

SEQ ID NO: 1291276 - DNA, 15 bp, Homo sapiens
ggggataatttaaaa

SEQ ID NO: 1291277 - DNA, 15 bp, Homo sapiens
tggggataatttaaa

SEQ ID NO: 1291278 - DNA, 15 bp, Homo sapiens
atggggataatttaa

SEQ ID NO: 1291279 - DNA, 15 bp, Homo sapiens
aatggggataattta

SEQ ID NO: 1291280 - DNA, 15 bp, Homo sapiens
gaatggggataattt

SEQ ID NO: 1291281 - DNA, 15 bp, Homo sapiens
ggaatggggataatt

SEQ ID NO: 1291282 - DNA, 15 bp, Homo sapiens
gggaatggggataat

SEQ ID NO: 1291283 - DNA, 15 bp, Homo sapiens
agggaatggggataa

SEQ ID NO: 1291284 - DNA, 15 bp, Homo sapiens
tagggaatggggata

SEQ ID NO: 1291285 - DNA, 15 bp, Homo sapiens
gtagggaatggggat

SEQ ID NO: 1291286 - DNA, 15 bp, Homo sapiens
agtagggaatgggga

SEQ ID NO: 1291287 - DNA, 15 bp, Homo sapiens
tagtagggaatgggg

SEQ ID NO: 1291288 - DNA, 15 bp, Homo sapiens
ttagtagggaatggg

SEQ ID NO: 1291289 - DNA, 15 bp, Homo sapiens
attagtagggaatgg

SEQ ID NO: 1291290 - DNA, 15 bp, Homo sapiens
aattagtagggaatg

SEQ ID NO: 1291291 - DNA, 15 bp, Homo sapiens
caattagtagggaat

SEQ ID NO: 1291292 - DNA, 15 bp, Homo sapiens
acaattagtagggaa

SEQ ID NO: 1291293 - DNA, 15 bp, Homo sapiens
tacaattagtaggga

SEQ ID NO: 1291294 - DNA, 15 bp, Homo sapiens
atacaattagtaggg

SEQ ID NO: 1291295 - DNA, 15 bp, Homo sapiens
gatacaattagtagg

SEQ ID NO: 1291296 - DNA, 15 bp, Homo sapiens
agatacaattagtag

SEQ ID NO: 1291297 - DNA, 15 bp, Homo sapiens
aagatacaattagta

SEQ ID NO: 1291298 - DNA, 15 bp, Homo sapiens
aaagatacaattagt

SEQ ID NO: 1291299 - DNA, 15 bp, Homo sapiens
gaaagatacaattag

SEQ ID NO: 1291300 - DNA, 15 bp, Homo sapiens
tgaaagatacaatta

SEQ ID NO: 1291301 - DNA, 15 bp, Homo sapiens
atgaaagatacaatt

SEQ ID NO: 1291302 - DNA, 15 bp, Homo sapiens
aatgaaagatacaat

SEQ ID NO: 1291303 - DNA, 15 bp, Homo sapiens
aaatgaaagatacaa

SEQ ID NO: 1291304 - DNA, 15 bp, Homo sapiens
aaaatgaaagataca

SEQ ID NO: 1291305 - DNA, 15 bp, Homo sapiens
aaaaatgaaagatac

SEQ ID NO: 1291306 - DNA, 15 bp, Homo sapiens
aaaaaatgaaagata

SEQ ID NO: 1291307 - DNA, 15 bp, Homo sapiens
gaaaaaatgaaagat

SEQ ID NO: 1291308 - DNA, 15 bp, Homo sapiens
agaaaaaatgaaaga

SEQ ID NO: 1291309 - DNA, 15 bp, Homo sapiens
aagaaaaaatgaaag

SEQ ID NO: 1291310 - DNA, 15 bp, Homo sapiens
aaagaaaaaatgaaa

SEQ ID NO: 1291311 - DNA, 15 bp, Homo sapiens
taaagaaaaaatgaa

SEQ ID NO: 1291312 - DNA, 15 bp, Homo sapiens
ataaagaaaaaatga

SEQ ID NO: 1291313 - DNA, 15 bp, Homo sapiens
tataaagaaaaaatg

SEQ ID NO: 1291314 - DNA, 15 bp, Homo sapiens
ttataaagaaaaaat

SEQ ID NO: 1291315 - DNA, 15 bp, Homo sapiens
tttataaagaaaaaa

SEQ ID NO: 1291316 - DNA, 15 bp, Homo sapiens
gtttataaagaaaaa

SEQ ID NO: 1291317 - DNA, 15 bp, Homo sapiens
ggtttataaagaaaa

SEQ ID NO: 1291318 - DNA, 15 bp, Homo sapiens
aggtttataaagaaa

SEQ ID NO: 1291319 - DNA, 15 bp, Homo sapiens
aaggtttataaagaa

SEQ ID NO: 1291320 - DNA, 15 bp, Homo sapiens
taaggtttataaaga

SEQ ID NO: 1291321 - DNA, 15 bp, Homo sapiens
ataaggtttataaag

SEQ ID NO: 1291322 - DNA, 15 bp, Homo sapiens
tataaggtttataaa

SEQ ID NO: 1291323 - DNA, 15 bp, Homo sapiens
ttataaggtttataa

SEQ ID NO: 1291324 - DNA, 15 bp, Homo sapiens
attataaggtttata

SEQ ID NO: 1291325 - DNA, 15 bp, Homo sapiens
aattataaggtttat

SEQ ID NO: 1291326 - DNA, 15 bp, Homo sapiens
gaattataaggttta

SEQ ID NO: 1291327 - DNA, 15 bp, Homo sapiens
agaattataaggttt

SEQ ID NO: 1291328 - DNA, 15 bp, Homo sapiens
gagaattataaggtt

SEQ ID NO: 1291329 - DNA, 15 bp, Homo sapiens
agagaattataaggt

SEQ ID NO: 1291330 - DNA, 15 bp, Homo sapiens
tagagaattataagg

SEQ ID NO: 1291331 - DNA, 15 bp, Homo sapiens
ttagagaattataag

SEQ ID NO: 1291332 - DNA, 15 bp, Homo sapiens
attagagaattataa

SEQ ID NO: 1291333 - DNA, 15 bp, Homo sapiens
tattagagaattata

SEQ ID NO: 1291334 - DNA, 15 bp, Homo sapiens
atattagagaattat

SEQ ID NO: 1291335 - DNA, 15 bp, Homo sapiens
tatattagagaatta

SEQ ID NO: 1291336 - DNA, 15 bp, Homo sapiens
gtatattagagaatt

SEQ ID NO: 1291337 - DNA, 15 bp, Homo sapiens
agtatattagagaat

SEQ ID NO: 1291338 - DNA, 15 bp, Homo sapiens
tagtatattagagaa

SEQ ID NO: 1291339 - DNA, 15 bp, Homo sapiens
atagtatattagaga

SEQ ID NO: 1291340 - DNA, 15 bp, Homo sapiens
tatagtatattagag

SEQ ID NO: 1291341 - DNA, 15 bp, Homo sapiens
atatagtatattaga

SEQ ID NO: 1291342 - DNA, 15 bp, Homo sapiens
tatatagtatattag

SEQ ID NO: 1291343 - DNA, 15 bp, Homo sapiens
atatatagtatatta

SEQ ID NO: 1291344 - DNA, 15 bp, Homo sapiens
tatatatagtatatt

SEQ ID NO: 1291345 - DNA, 15 bp, Homo sapiens
gtatatatagtatat

SEQ ID NO: 1291346 - DNA, 15 bp, Homo sapiens
agtatatatagtata

SEQ ID NO: 1291347 - DNA, 15 bp, Homo sapiens
aagtatatatagtat

SEQ ID NO: 1291348 - DNA, 15 bp, Homo sapiens
aaagtatatatagta

SEQ ID NO: 1291349 - DNA, 15 bp, Homo sapiens
taaagtatatatagt

SEQ ID NO: 1291350 - DNA, 15 bp, Homo sapiens
ataaagtatatatag

SEQ ID NO: 1291351 - DNA, 15 bp, Homo sapiens
aataaagtatatata

SEQ ID NO: 1291352 - DNA, 15 bp, Homo sapiens
aaataaagtatatat

SEQ ID NO: 1291353 - DNA, 15 bp, Homo sapiens
taaataaagtatata

SEQ ID NO: 1291354 - DNA, 15 bp, Homo sapiens
ataaataaagtatat

SEQ ID NO: 1291355 - DNA, 15 bp, Homo sapiens
aataaataaagtata

SEQ ID NO: 1291356 - DNA, 15 bp, Homo sapiens
aaataaataaagtat

SEQ ID NO: 1291357 - DNA, 15 bp, Homo sapiens
aaaataaataaagta

SEQ ID NO: 1291358 - DNA, 15 bp, Homo sapiens
taaaataaataaagt

SEQ ID NO: 1291359 - DNA, 15 bp, Homo sapiens
gtaaaataaataaag

SEQ ID NO: 1291360 - DNA, 15 bp, Homo sapiens
agtaaaataaataaa

SEQ ID NO: 1291361 - DNA, 15 bp, Homo sapiens
aagtaaaataaataa

SEQ ID NO: 1291362 - DNA, 15 bp, Homo sapiens
taagtaaaataaata

SEQ ID NO: 1291363 - DNA, 15 bp, Homo sapiens
ataagtaaaataaat

SEQ ID NO: 1291364 - DNA, 15 bp, Homo sapiens
gataagtaaaataaa

SEQ ID NO: 1291365 - DNA, 15 bp, Homo sapiens
tgataagtaaaataa

SEQ ID NO: 1291366 - DNA, 15 bp, Homo sapiens
atgataagtaaaata

SEQ ID NO: 1291367 - DNA, 15 bp, Homo sapiens
gatgataagtaaaat

SEQ ID NO: 1291368 - DNA, 15 bp, Homo sapiens
agatgataagtaaaa

SEQ ID NO: 1291369 - DNA, 15 bp, Homo sapiens
tagatgataagtaaa

SEQ ID NO: 1291370 - DNA, 15 bp, Homo sapiens
atagatgataagtaa

SEQ ID NO: 1291371 - DNA, 15 bp, Homo sapiens
gatagatgataagta

SEQ ID NO: 1291372 - DNA, 15 bp, Homo sapiens
agatagatgataagt

SEQ ID NO: 1291373 - DNA, 15 bp, Homo sapiens
aagatagatgataag

SEQ ID NO: 1291374 - DNA, 15 bp, Homo sapiens
gaagatagatgataa

SEQ ID NO: 1291375 - DNA, 15 bp, Homo sapiens
ggaagatagatgata

SEQ ID NO: 1291376 - DNA, 15 bp, Homo sapiens
gggaagatagatgat

SEQ ID NO: 1291377 - DNA, 15 bp, Homo sapiens
ggggaagatagatga

SEQ ID NO: 1291378 - DNA, 15 bp, Homo sapiens
aggggaagatagatg

SEQ ID NO: 1291379 - DNA, 15 bp, Homo sapiens
caggggaagatagat

SEQ ID NO: 1291380 - DNA, 15 bp, Homo sapiens
acaggggaagataga

SEQ ID NO: 1291381 - DNA, 15 bp, Homo sapiens
gacaggggaagatag

SEQ ID NO: 1291382 - DNA, 15 bp, Homo sapiens
agacaggggaagata

SEQ ID NO: 1291383 - DNA, 15 bp, Homo sapiens
gagacaggggaagat

SEQ ID NO: 1291384 - DNA, 15 bp, Homo sapiens
ggagacaggggaaga

SEQ ID NO: 1291385 - DNA, 15 bp, Homo sapiens
tggagacaggggaag

SEQ ID NO: 1291386 - DNA, 15 bp, Homo sapiens
gtggagacaggggaa

SEQ ID NO: 1291387 - DNA, 15 bp, Homo sapiens
agtggagacagggga

SEQ ID NO: 1291388 - DNA, 15 bp, Homo sapiens
tagtggagacagggg

SEQ ID NO: 1291389 - DNA, 15 bp, Homo sapiens
ttagtggagacaggg

SEQ ID NO: 1291390 - DNA, 15 bp, Homo sapiens
tttagtggagacagg

SEQ ID NO: 1291391 - DNA, 15 bp, Homo sapiens
ttttagtggagacag

SEQ ID NO: 1291392 - DNA, 15 bp, Homo sapiens
attttagtggagaca

SEQ ID NO: 1291393 - DNA, 15 bp, Homo sapiens
gattttagtggagac

SEQ ID NO: 1291394 - DNA, 15 bp, Homo sapiens
ggattttagtggaga

SEQ ID NO: 1291395 - DNA, 15 bp, Homo sapiens
tggattttagtggag

SEQ ID NO: 1291396 - DNA, 15 bp, Homo sapiens
ttggattttagtgga

SEQ ID NO: 1291397 - DNA, 15 bp, Homo sapiens
tttggattttagtgg

SEQ ID NO: 1291398 - DNA, 15 bp, Homo sapiens
gtttggattttagtg

SEQ ID NO: 1291399 - DNA, 15 bp, Homo sapiens
agtttggattttagt

SEQ ID NO: 1291400 - DNA, 15 bp, Homo sapiens
tagtttggattttag

SEQ ID NO: 1291401 - DNA, 15 bp, Homo sapiens
ttagtttggatttta

SEQ ID NO: 1291402 - DNA, 15 bp, Homo sapiens
gttagtttggatttt

SEQ ID NO: 1291403 - DNA, 15 bp, Homo sapiens
agttagtttggattt

SEQ ID NO: 1291404 - DNA, 15 bp, Homo sapiens
gagttagtttggatt

SEQ ID NO: 1291405 - DNA, 15 bp, Homo sapiens
ggagttagtttggat

SEQ ID NO: 1291406 - DNA, 15 bp, Homo sapiens
tggagttagtttgga

SEQ ID NO: 1291407 - DNA, 15 bp, Homo sapiens
atggagttagtttgg

SEQ ID NO: 1291408 - DNA, 15 bp, Homo sapiens
tatggagttagtttg

SEQ ID NO: 1291409 - DNA, 15 bp, Homo sapiens
ttatggagttagttt

SEQ ID NO: 1291410 - DNA, 15 bp, Homo sapiens
tttatggagttagtt

SEQ ID NO: 1291411 - DNA, 15 bp, Homo sapiens
ttttatggagttagt

SEQ ID NO: 1291412 - DNA, 15 bp, Homo sapiens
cttttatggagttag

SEQ ID NO: 1291413 - DNA, 15 bp, Homo sapiens
gcttttatggagtta

SEQ ID NO: 1291414 - DNA, 15 bp, Homo sapiens
tgcttttatggagtt

SEQ ID NO: 1291415 - DNA, 15 bp, Homo sapiens
ctgcttttatggagt

SEQ ID NO: 1291416 - DNA, 15 bp, Homo sapiens
cctgcttttatggag

SEQ ID NO: 1291417 - DNA, 15 bp, Homo sapiens
ccctgcttttatgga

SEQ ID NO: 1291418 - DNA, 15 bp, Homo sapiens
gccctgcttttatgg

SEQ ID NO: 1291419 - DNA, 15 bp, Homo sapiens
agccctgcttttatg

SEQ ID NO: 1291420 - DNA, 15 bp, Homo sapiens
aagccctgcttttat

SEQ ID NO: 1291421 - DNA, 15 bp, Homo sapiens
aaagccctgctttta

SEQ ID NO: 1291422 - DNA, 15 bp, Homo sapiens
aaaagccctgctttt

SEQ ID NO: 1291423 - DNA, 15 bp, Homo sapiens
aaaaagccctgcttt

SEQ ID NO: 1291424 - DNA, 15 bp, Homo sapiens
caaaaagccctgctt

SEQ ID NO: 1291425 - DNA, 15 bp, Homo sapiens
acaaaaagccctgct

SEQ ID NO: 1291426 - DNA, 15 bp, Homo sapiens
gacaaaaagccctgc

SEQ ID NO: 1291427 - DNA, 15 bp, Homo sapiens
agacaaaaagccctg

SEQ ID NO: 1291428 - DNA, 15 bp, Homo sapiens
cagacaaaaagccct

SEQ ID NO: 1291429 - DNA, 15 bp, Homo sapiens
ccagacaaaaagccc

SEQ ID NO: 1291430 - DNA, 15 bp, Homo sapiens
cccagacaaaaagcc

SEQ ID NO: 1291431 - DNA, 15 bp, Homo sapiens
acccagacaaaaagc

SEQ ID NO: 1291432 - DNA, 15 bp, Homo sapiens
gacccagacaaaaag

SEQ ID NO: 1291433 - DNA, 15 bp, Homo sapiens
tgacccagacaaaaa

SEQ ID NO: 1291434 - DNA, 15 bp, Homo sapiens
gtgacccagacaaaa

SEQ ID NO: 1291435 - DNA, 15 bp, Homo sapiens
agtgacccagacaaa

SEQ ID NO: 1291436 - DNA, 15 bp, Homo sapiens
gagtgacccagacaa

SEQ ID NO: 1291437 - DNA, 15 bp, Homo sapiens
ggagtgacccagaca

SEQ ID NO: 1291438 - DNA, 15 bp, Homo sapiens
aggagtgacccagac

SEQ ID NO: 1291439 - DNA, 15 bp, Homo sapiens
caggagtgacccaga

SEQ ID NO: 1291440 - DNA, 15 bp, Homo sapiens
acaggagtgacccag

SEQ ID NO: 1291441 - DNA, 15 bp, Homo sapiens
tacaggagtgaccca

SEQ ID NO: 1291442 - DNA, 15 bp, Homo sapiens
atacaggagtgaccc

SEQ ID NO: 1291443 - DNA, 15 bp, Homo sapiens
catacaggagtgacc

SEQ ID NO: 1291444 - DNA, 15 bp, Homo sapiens
ccatacaggagtgac

SEQ ID NO: 1291445 - DNA, 15 bp, Homo sapiens
accatacaggagtga

SEQ ID NO: 1291446 - DNA, 15 bp, Homo sapiens
aaccatacaggagtg

SEQ ID NO: 1291447 - DNA, 15 bp, Homo sapiens
caaccatacaggagt

SEQ ID NO: 1291448 - DNA, 15 bp, Homo sapiens
tcaaccatacaggag

SEQ ID NO: 1291449 - DNA, 15 bp, Homo sapiens
gtcaaccatacagga

SEQ ID NO: 1291450 - DNA, 15 bp, Homo sapiens
tgtcaaccatacagg

SEQ ID NO: 1291451 - DNA, 15 bp, Homo sapiens
gtgtcaaccatacag

SEQ ID NO: 1291452 - DNA, 15 bp, Homo sapiens
agtgtcaaccataca

SEQ ID NO: 1291453 - DNA, 15 bp, Homo sapiens
aagtgtcaaccatac

SEQ ID NO: 1291454 - DNA, 15 bp, Homo sapiens
taagtgtcaaccata

SEQ ID NO: 1291455 - DNA, 15 bp, Homo sapiens
ataagtgtcaaccat

SEQ ID NO: 1291456 - DNA, 15 bp, Homo sapiens
aataagtgtcaacca

SEQ ID NO: 1291457 - DNA, 15 bp, Homo sapiens
aaataagtgtcaacc

SEQ ID NO: 1291458 - DNA, 15 bp, Homo sapiens
gaaataagtgtcaac

SEQ ID NO: 1291459 - DNA, 15 bp, Homo sapiens
ggaaataagtgtcaa

SEQ ID NO: 1291460 - DNA, 15 bp, Homo sapiens
aggaaataagtgtca

SEQ ID NO: 1291461 - DNA, 15 bp, Homo sapiens
caggaaataagtgtc

SEQ ID NO: 1291462 - DNA, 15 bp, Homo sapiens
ccaggaaataagtgt

SEQ ID NO: 1291463 - DNA, 15 bp, Homo sapiens
tccaggaaataagtg

SEQ ID NO: 1291464 - DNA, 15 bp, Homo sapiens
ttccaggaaataagt

SEQ ID NO: 1291465 - DNA, 15 bp, Homo sapiens
gttccaggaaataag

SEQ ID NO: 1291466 - DNA, 15 bp, Homo sapiens
tgttccaggaaataa

SEQ ID NO: 1291467 - DNA, 15 bp, Homo sapiens
gtgttccaggaaata

SEQ ID NO: 1291468 - DNA, 15 bp, Homo sapiens
tgtgttccaggaaat

SEQ ID NO: 1291469 - DNA, 15 bp, Homo sapiens
ctgtgttccaggaaa

SEQ ID NO: 1291470 - DNA, 15 bp, Homo sapiens
actgtgttccaggaa

SEQ ID NO: 1291471 - DNA, 15 bp, Homo sapiens
tactgtgttccagga

SEQ ID NO: 1291472 - DNA, 15 bp, Homo sapiens
ctactgtgttccagg

SEQ ID NO: 1291473 - DNA, 15 bp, Homo sapiens
cctactgtgttccag

SEQ ID NO: 1291474 - DNA, 15 bp, Homo sapiens
ccctactgtgttcca

SEQ ID NO: 1291475 - DNA, 15 bp, Homo sapiens
cccctactgtgttcc

SEQ ID NO: 1291476 - DNA, 15 bp, Homo sapiens
gcccctactgtgttc

SEQ ID NO: 1291477 - DNA, 15 bp, Homo sapiens
agcccctactgtgtt

SEQ ID NO: 1291478 - DNA, 15 bp, Homo sapiens
cagcccctactgtgt

SEQ ID NO: 1291479 - DNA, 15 bp, Homo sapiens
tcagcccctactgtg

SEQ ID NO: 1291480 - DNA, 15 bp, Homo sapiens
ttcagcccctactgt

SEQ ID NO: 1291481 - DNA, 15 bp, Homo sapiens
tgttgtcgtctgaaa

SEQ ID NO: 1291482 - DNA, 15 bp, Homo sapiens
atgttgtcgtctgaa

SEQ ID NO: 1291483 - DNA, 15 bp, Homo sapiens
tatgttgtcgtctga

SEQ ID NO: 1291484 - DNA, 15 bp, Homo sapiens
ttatgttgtcgtctg

SEQ ID NO: 1291485 - DNA, 15 bp, Homo sapiens
tttatgttgtcgtct

SEQ ID NO: 1291486 - DNA, 15 bp, Homo sapiens
ttttatgttgtcgtc

SEQ ID NO: 1291487 - DNA, 15 bp, Homo sapiens
attttatgttgtcgt

SEQ ID NO: 1291488 - DNA, 15 bp, Homo sapiens
aattttatgttgtcg

SEQ ID NO: 1291489 - DNA, 15 bp, Homo sapiens
aaattttatgttgtc

SEQ ID NO: 1291490 - DNA, 15 bp, Homo sapiens
gaaattttatgttgt

SEQ ID NO: 1291491 - DNA, 15 bp, Homo sapiens
ggaaattttatgttg

SEQ ID NO: 1291492 - DNA, 15 bp, Homo sapiens
tggaaattttatgtt

SEQ ID NO: 1291493 - DNA, 15 bp, Homo sapiens
ttggaaattttatgt

SEQ ID NO: 1291494 - DNA, 15 bp, Homo sapiens
tttggaaattttatg

SEQ ID NO: 1291495 - DNA, 15 bp, Homo sapiens
ttttggaaattttat

SEQ ID NO: 1291496 - DNA, 15 bp, Homo sapiens
attttggaaatttta

SEQ ID NO: 1291497 - DNA, 15 bp, Homo sapiens
tattttggaaatttt

SEQ ID NO: 1291498 - DNA, 15 bp, Homo sapiens
atattttggaaattt

SEQ ID NO: 1291499 - DNA, 15 bp, Homo sapiens
aatattttggaaatt

SEQ ID NO: 1291500 - DNA, 15 bp, Homo sapiens
aaatattttggaaat

SEQ ID NO: 1291501 - DNA, 15 bp, Homo sapiens
aaaatattttggaaa

SEQ ID NO: 1291502 - DNA, 15 bp, Homo sapiens
caaaatattttggaa

SEQ ID NO: 1291503 - DNA, 15 bp, Homo sapiens
acaaaatattttgga

SEQ ID NO: 1291504 - DNA, 15 bp, Homo sapiens
aacaaaatattttgg

SEQ ID NO: 1291505 - DNA, 15 bp, Homo sapiens
aaacaaaatattttg

SEQ ID NO: 1291506 - DNA, 15 bp, Homo sapiens
taaacaaaatatttt

SEQ ID NO: 1291507 - DNA, 15 bp, Homo sapiens
ttaaacaaaatattt

SEQ ID NO: 1291508 - DNA, 15 bp, Homo sapiens
gttaaacaaaatatt

SEQ ID NO: 1291509 - DNA, 15 bp, Homo sapiens
ggttaaacaaaatat

SEQ ID NO: 1291510 - DNA, 15 bp, Homo sapiens
aggttaaacaaaata

SEQ ID NO: 1291511 - DNA, 15 bp, Homo sapiens
caggttaaacaaaat

SEQ ID NO: 1291512 - DNA, 15 bp, Homo sapiens
acaggttaaacaaaa

SEQ ID NO: 1291513 - DNA, 15 bp, Homo sapiens
aacaggttaaacaaa

SEQ ID NO: 1291514 - DNA, 15 bp, Homo sapiens
gaacaggttaaacaa

SEQ ID NO: 1291515 - DNA, 15 bp, Homo sapiens
tgaacaggttaaaca

SEQ ID NO: 1291516 - DNA, 15 bp, Homo sapiens
gtgaacaggttaaac

SEQ ID NO: 1291517 - DNA, 15 bp, Homo sapiens
tgtgaacaggttaaa

SEQ ID NO: 1291518 - DNA, 15 bp, Homo sapiens
gtgtgaacaggttaa

SEQ ID NO: 1291519 - DNA, 15 bp, Homo sapiens
tgtgtgaacaggtta

SEQ ID NO: 1291520 - DNA, 15 bp, Homo sapiens
gtgtgtgaacaggtt

SEQ ID NO: 1291521 - DNA, 15 bp, Homo sapiens
agtgtgtgaacaggt

SEQ ID NO: 1291522 - DNA, 15 bp, Homo sapiens
aagtgtgtgaacagg

SEQ ID NO: 1291523 - DNA, 15 bp, Homo sapiens
aaagtgtgtgaacag

SEQ ID NO: 1291524 - DNA, 15 bp, Homo sapiens
gaaagtgtgtgaaca

SEQ ID NO: 1291525 - DNA, 15 bp, Homo sapiens
tgaaagtgtgtgaac

SEQ ID NO: 1291526 - DNA, 15 bp, Homo sapiens
atgaaagtgtgtgaa

SEQ ID NO: 1291527 - DNA, 15 bp, Homo sapiens
aatgaaagtgtgtga

SEQ ID NO: 1291528 - DNA, 15 bp, Homo sapiens
gaatgaaagtgtgtg

SEQ ID NO: 1291529 - DNA, 15 bp, Homo sapiens
tgaatgaaagtgtgt

SEQ ID NO: 1291530 - DNA, 15 bp, Homo sapiens
atgaatgaaagtgtg

SEQ ID NO: 1291531 - DNA, 15 bp, Homo sapiens
aatgaatgaaagtgt

SEQ ID NO: 1291532 - DNA, 15 bp, Homo sapiens
aaatgaatgaaagtg

SEQ ID NO: 1291533 - DNA, 15 bp, Homo sapiens
aaaatgaatgaaagt

SEQ ID NO: 1291534 - DNA, 15 bp, Homo sapiens
aaaaatgaatgaaag

SEQ ID NO: 1291535 - DNA, 15 bp, Homo sapiens
gaaaaatgaatgaaa

SEQ ID NO: 1291536 - DNA, 15 bp, Homo sapiens
ggaaaaatgaatgaa

SEQ ID NO: 1291537 - DNA, 15 bp, Homo sapiens
gggaaaaatgaatga

SEQ ID NO: 1291538 - DNA, 15 bp, Homo sapiens
ggggaaaaatgaatg

SEQ ID NO: 1291539 - DNA, 15 bp, Homo sapiens
gggggaaaaatgaat

SEQ ID NO: 1291540 - DNA, 15 bp, Homo sapiens
agggggaaaaatgaa

SEQ ID NO: 1291541 - DNA, 15 bp, Homo sapiens
gagggggaaaaatga

SEQ ID NO: 1291542 - DNA, 15 bp, Homo sapiens
agagggggaaaaatg

SEQ ID NO: 1291543 - DNA, 15 bp, Homo sapiens
cagagggggaaaaat

SEQ ID NO: 1291544 - DNA, 15 bp, Homo sapiens
tcagagggggaaaaa

SEQ ID NO: 1291545 - DNA, 15 bp, Homo sapiens
ctcagagggggaaaa

SEQ ID NO: 1291546 - DNA, 15 bp, Homo sapiens
tctcagagggggaaa

SEQ ID NO: 1291547 - DNA, 15 bp, Homo sapiens
ctctcagagggggaa

SEQ ID NO: 1291548 - DNA, 15 bp, Homo sapiens
actctcagaggggga

SEQ ID NO: 1291549 - DNA, 15 bp, Homo sapiens
tactctcagaggggg

SEQ ID NO: 1291550 - DNA, 15 bp, Homo sapiens
ttactctcagagggg

SEQ ID NO: 1291551 - DNA, 15 bp, Homo sapiens
gttactctcagaggg

SEQ ID NO: 1291552 - DNA, 15 bp, Homo sapiens
agttactctcagagg

SEQ ID NO: 1291553 - DNA, 15 bp, Homo sapiens
tagttactctcagag

SEQ ID NO: 1291554 - DNA, 15 bp, Homo sapiens
atagttactctcaga

SEQ ID NO: 1291555 - DNA, 15 bp, Homo sapiens
aatagttactctcag

SEQ ID NO: 1291556 - DNA, 15 bp, Homo sapiens
aaatagttactctca

SEQ ID NO: 1291557 - DNA, 15 bp, Homo sapiens
caaatagttactctc

SEQ ID NO: 1291558 - DNA, 15 bp, Homo sapiens
acaaatagttactct

SEQ ID NO: 1291559 - DNA, 15 bp, Homo sapiens
tacaaatagttactc

SEQ ID NO: 1291560 - DNA, 15 bp, Homo sapiens
ttacaaatagttact

SEQ ID NO: 1291561 - DNA, 15 bp, Homo sapiens
gttacaaatagttac

SEQ ID NO: 1291562 - DNA, 15 bp, Homo sapiens
ggttacaaatagtta

SEQ ID NO: 1291563 - DNA, 15 bp, Homo sapiens
gggttacaaatagtt

SEQ ID NO: 1291564 - DNA, 15 bp, Homo sapiens
ggggttacaaatagt

SEQ ID NO: 1291565 - DNA, 15 bp, Homo sapiens
tggggttacaaatag

SEQ ID NO: 1291566 - DNA, 15 bp, Homo sapiens
ttggggttacaaata

SEQ ID NO: 1291567 - DNA, 15 bp, Homo sapiens
gttggggttacaaat

SEQ ID NO: 1291568 - DNA, 15 bp, Homo sapiens
agttggggttacaaa

SEQ ID NO: 1291569 - DNA, 15 bp, Homo sapiens
tagttggggttacaa

SEQ ID NO: 1291570 - DNA, 15 bp, Homo sapiens
ttagttggggttaca

SEQ ID NO: 1291571 - DNA, 15 bp, Homo sapiens
attagttggggttac

SEQ ID NO: 1291572 - DNA, 15 bp, Homo sapiens
tattagttggggtta

SEQ ID NO: 1291573 - DNA, 15 bp, Homo sapiens
ttattagttggggtt

SEQ ID NO: 1291574 - DNA, 15 bp, Homo sapiens
attattagttggggt

SEQ ID NO: 1291575 - DNA, 15 bp, Homo sapiens
cattattagttgggg

SEQ ID NO: 1291576 - DNA, 15 bp, Homo sapiens
tcattattagttggg

SEQ ID NO: 1291577 - DNA, 15 bp, Homo sapiens
ttcattattagttgg

SEQ ID NO: 1291578 - DNA, 15 bp, Homo sapiens
gttcattattagttg

SEQ ID NO: 1291579 - DNA, 15 bp, Homo sapiens
tgttcattattagtt

SEQ ID NO: 1291580 - DNA, 15 bp, Homo sapiens
gtgttcattattagt

SEQ ID NO: 1291581 - DNA, 15 bp, Homo sapiens
agtgttcattattag

SEQ ID NO: 1291582 - DNA, 15 bp, Homo sapiens
tagtgttcattatta

SEQ ID NO: 1291583 - DNA, 15 bp, Homo sapiens
ctagtgttcattatt

SEQ ID NO: 1291584 - DNA, 15 bp, Homo sapiens
actagtgttcattat

SEQ ID NO: 1291585 - DNA, 15 bp, Homo sapiens
cactagtgttcatta

SEQ ID NO: 1291586 - DNA, 15 bp, Homo sapiens
acactagtgttcatt

SEQ ID NO: 1291587 - DNA, 15 bp, Homo sapiens
aacactagtgttcat

SEQ ID NO: 1291588 - DNA, 15 bp, Homo sapiens
aaacactagtgttca

SEQ ID NO: 1291589 - DNA, 15 bp, Homo sapiens
taaacactagtgttc

SEQ ID NO: 1291590 - DNA, 15 bp, Homo sapiens
ataaacactagtgtt

SEQ ID NO: 1291591 - DNA, 15 bp, Homo sapiens
cataaacactagtgt

SEQ ID NO: 1291592 - DNA, 15 bp, Homo sapiens
tcataaacactagtg

SEQ ID NO: 1291593 - DNA, 15 bp, Homo sapiens
ttcataaacactagt

SEQ ID NO: 1291594 - DNA, 15 bp, Homo sapiens
cttcataaacactag

SEQ ID NO: 1291595 - DNA, 15 bp, Homo sapiens
ccttcataaacacta

SEQ ID NO: 1291596 - DNA, 15 bp, Homo sapiens
tccttcataaacact

SEQ ID NO: 1291597 - DNA, 15 bp, Homo sapiens
atccttcataaacac

SEQ ID NO: 1291598 - DNA, 15 bp, Homo sapiens
aatccttcataaaca

SEQ ID NO: 1291599 - DNA, 15 bp, Homo sapiens
aaatccttcataaac

SEQ ID NO: 1291600 - DNA, 15 bp, Homo sapiens
taaatccttcataaa

SEQ ID NO: 1291601 - DNA, 15 bp, Homo sapiens
gtaaatccttcataa

SEQ ID NO: 1291602 - DNA, 15 bp, Homo sapiens
agtaaatccttcata

SEQ ID NO: 1291603 - DNA, 15 bp, Homo sapiens
tagtaaatccttcat

SEQ ID NO: 1291604 - DNA, 15 bp, Homo sapiens
ttagtaaatccttca

SEQ ID NO: 1291605 - DNA, 15 bp, Homo sapiens
tttagtaaatccttc

SEQ ID NO: 1291606 - DNA, 15 bp, Homo sapiens
atttagtaaatcctt

SEQ ID NO: 1291607 - DNA, 15 bp, Homo sapiens
catttagtaaatcct

SEQ ID NO: 1291608 - DNA, 15 bp, Homo sapiens
gcatttagtaaatcc

SEQ ID NO: 1291609 - DNA, 15 bp, Homo sapiens
ggcatttagtaaatc

SEQ ID NO: 1291610 - DNA, 15 bp, Homo sapiens
tggcatttagtaaat

SEQ ID NO: 1291611 - DNA, 15 bp, Homo sapiens
gtggcatttagtaaa

SEQ ID NO: 1291612 - DNA, 15 bp, Homo sapiens
ggtggcatttagtaa

SEQ ID NO: 1291613 - DNA, 15 bp, Homo sapiens
aggtggcatttagta

SEQ ID NO: 1291614 - DNA, 15 bp, Homo sapiens
taggtggcatttagt

SEQ ID NO: 1291615 - DNA, 15 bp, Homo sapiens
gtaggtggcatttag

SEQ ID NO: 1291616 - DNA, 15 bp, Homo sapiens
tgtaggtggcattta

SEQ ID NO: 1291617 - DNA, 15 bp, Homo sapiens
ttgtaggtggcattt

SEQ ID NO: 1291618 - DNA, 15 bp, Homo sapiens
attgtaggtggcatt

SEQ ID NO: 1291619 - DNA, 15 bp, Homo sapiens
tattgtaggtggcat

SEQ ID NO: 1291620 - DNA, 15 bp, Homo sapiens
gtattgtaggtggca

SEQ ID NO: 1291621 - DNA, 15 bp, Homo sapiens
ggtattgtaggtggc

SEQ ID NO: 1291622 - DNA, 15 bp, Homo sapiens
tggtattgtaggtgg

SEQ ID NO: 1291623 - DNA, 15 bp, Homo sapiens
ctggtattgtaggtg

SEQ ID NO: 1291624 - DNA, 15 bp, Homo sapiens
cctggtattgtaggt

SEQ ID NO: 1291625 - DNA, 15 bp, Homo sapiens
acctggtattgtagg

SEQ ID NO: 1291626 - DNA, 15 bp, Homo sapiens
cacctggtattgtag

SEQ ID NO: 1291627 - DNA, 15 bp, Homo sapiens
tcacctggtattgta

SEQ ID NO: 1291628 - DNA, 15 bp, Homo sapiens
atcacctggtattgt

SEQ ID NO: 1291629 - DNA, 15 bp, Homo sapiens
aatcacctggtattg

SEQ ID NO: 1291630 - DNA, 15 bp, Homo sapiens
aaatcacctggtatt

SEQ ID NO: 1291631 - DNA, 15 bp, Homo sapiens
aaaatcacctggtat

SEQ ID NO: 1291632 - DNA, 15 bp, Homo sapiens
aaaaatcacctggta

SEQ ID NO: 1291633 - DNA, 15 bp, Homo sapiens
gaaaaatcacctggt

SEQ ID NO: 1291634 - DNA, 15 bp, Homo sapiens
agaaaaatcacctgg

SEQ ID NO: 1291635 - DNA, 15 bp, Homo sapiens
tagaaaaatcacctg

SEQ ID NO: 1291636 - DNA, 15 bp, Homo sapiens
gtagaaaaatcacct

SEQ ID NO: 1291637 - DNA, 15 bp, Homo sapiens
tgtagaaaaatcacc

SEQ ID NO: 1291638 - DNA, 15 bp, Homo sapiens
gatgtagaaaaatca

SEQ ID NO: 1291639 - DNA, 15 bp, Homo sapiens
tgatgtagaaaaatc

SEQ ID NO: 1291640 - DNA, 15 bp, Homo sapiens
gtgatgtagaaaaat

SEQ ID NO: 1291641 - DNA, 15 bp, Homo sapiens
ggtgatgtagaaaaa

SEQ ID NO: 1291642 - DNA, 15 bp, Homo sapiens
aggtgatgtagaaaa

SEQ ID NO: 1291643 - DNA, 15 bp, Homo sapiens
gaggtgatgtagaaa

SEQ ID NO: 1291644 - DNA, 15 bp, Homo sapiens
tgaggtgatgtagaa

SEQ ID NO: 1291645 - DNA, 15 bp, Homo sapiens
atgaggtgatgtaga

SEQ ID NO: 1291646 - DNA, 15 bp, Homo sapiens
aatgaggtgatgtag

SEQ ID NO: 1291647 - DNA, 15 bp, Homo sapiens
taatgaggtgatgta

SEQ ID NO: 1291648 - DNA, 15 bp, Homo sapiens
ttaatgaggtgatgt

SEQ ID NO: 1291649 - DNA, 15 bp, Homo sapiens
attaatgaggtgatg

SEQ ID NO: 1291650 - DNA, 15 bp, Homo sapiens
gattaatgaggtgat

SEQ ID NO: 1291651 - DNA, 15 bp, Homo sapiens
ggattaatgaggtga

SEQ ID NO: 1291652 - DNA, 15 bp, Homo sapiens
aggattaatgaggtg

SEQ ID NO: 1291653 - DNA, 15 bp, Homo sapiens
gaggattaatgaggt

SEQ ID NO: 1291654 - DNA, 15 bp, Homo sapiens
tgaggattaatgagg

SEQ ID NO: 1291655 - DNA, 15 bp, Homo sapiens
atgaggattaatgag

SEQ ID NO: 1291656 - DNA, 15 bp, Homo sapiens
tatgaggattaatga

SEQ ID NO: 1291657 - DNA, 15 bp, Homo sapiens
atatgaggattaatg

SEQ ID NO: 1291658 - DNA, 15 bp, Homo sapiens
gatatgaggattaat

SEQ ID NO: 1291659 - DNA, 15 bp, Homo sapiens
ggatatgaggattaa

SEQ ID NO: 1291660 - DNA, 15 bp, Homo sapiens
gggatatgaggatta

SEQ ID NO: 1291661 - DNA, 15 bp, Homo sapiens
agggatatgaggatt

SEQ ID NO: 1291662 - DNA, 15 bp, Homo sapiens
tagggatatgaggat

SEQ ID NO: 1291663 - DNA, 15 bp, Homo sapiens
gtagggatatgagga

SEQ ID NO: 1291664 - DNA, 15 bp, Homo sapiens
agtagggatatgagg

SEQ ID NO: 1291665 - DNA, 15 bp, Homo sapiens
tagtagggatatgag

SEQ ID NO: 1291666 - DNA, 15 bp, Homo sapiens
atagtagggatatga

SEQ ID NO: 1291667 - DNA, 15 bp, Homo sapiens
catagtagggatatg

SEQ ID NO: 1291668 - DNA, 15 bp, Homo sapiens
tcatagtagggatat

SEQ ID NO: 1291669 - DNA, 15 bp, Homo sapiens
ctcatagtagggata

SEQ ID NO: 1291670 - DNA, 15 bp, Homo sapiens
tctcatagtagggat

SEQ ID NO: 1291671 - DNA, 15 bp, Homo sapiens
ctctcatagtaggga

SEQ ID NO: 1291672 - DNA, 15 bp, Homo sapiens
actctcatagtaggg

SEQ ID NO: 1291673 - DNA, 15 bp, Homo sapiens
tactctcatagtagg

SEQ ID NO: 1291674 - DNA, 15 bp, Homo sapiens
ctactctcatagtag

SEQ ID NO: 1291675 - DNA, 15 bp, Homo sapiens
cctactctcatagta

SEQ ID NO: 1291676 - DNA, 15 bp, Homo sapiens
acctactctcatagt

SEQ ID NO: 1291677 - DNA, 15 bp, Homo sapiens
tacctactctcatag

SEQ ID NO: 1291678 - DNA, 15 bp, Homo sapiens
gtacctactctcata

SEQ ID NO: 1291679 - DNA, 15 bp, Homo sapiens
ggtacctactctcat

SEQ ID NO: 1291680 - DNA, 15 bp, Homo sapiens
cggtacctactctca

SEQ ID NO: 1291681 - DNA, 15 bp, Homo sapiens
gcggtacctactctc

SEQ ID NO: 1291682 - DNA, 15 bp, Homo sapiens
tgcggtacctactct

SEQ ID NO: 1291683 - DNA, 15 bp, Homo sapiens
atgcggtacctactc

SEQ ID NO: 1291684 - DNA, 15 bp, Homo sapiens
aatgcggtacctact

SEQ ID NO: 1291685 - DNA, 15 bp, Homo sapiens
gaatgcggtacctac

SEQ ID NO: 1291686 - DNA, 15 bp, Homo sapiens
tgaatgcggtaccta

SEQ ID NO: 1291687 - DNA, 15 bp, Homo sapiens
atgaatgcggtacct

SEQ ID NO: 1291688 - DNA, 15 bp, Homo sapiens
gatgaatgcggtacc

SEQ ID NO: 1291689 - DNA, 15 bp, Homo sapiens
ggatgaatgcggtac

SEQ ID NO: 1291690 - DNA, 15 bp, Homo sapiens
gggatgaatgcggta

SEQ ID NO: 1291691 - DNA, 15 bp, Homo sapiens
ggggatgaatgcggt

SEQ ID NO: 1291692 - DNA, 15 bp, Homo sapiens
tggggatgaatgcgg

SEQ ID NO: 1291693 - DNA, 15 bp, Homo sapiens
atggggatgaatgcg

SEQ ID NO: 1291694 - DNA, 15 bp, Homo sapiens
aatggggatgaatgc

SEQ ID NO: 1291695 - DNA, 15 bp, Homo sapiens
gaatggggatgaatg

SEQ ID NO: 1291696 - DNA, 15 bp, Homo sapiens
tgaatggggatgaat

SEQ ID NO: 1291697 - DNA, 15 bp, Homo sapiens
ctgaatggggatgaa

SEQ ID NO: 1291698 - DNA, 15 bp, Homo sapiens
actgaatggggatga

SEQ ID NO: 1291699 - DNA, 15 bp, Homo sapiens
cactgaatggggatg

SEQ ID NO: 1291700 - DNA, 15 bp, Homo sapiens
ccactgaatggggat

SEQ ID NO: 1291701 - DNA, 15 bp, Homo sapiens
tccactgaatgggga

SEQ ID NO: 1291702 - DNA, 15 bp, Homo sapiens
ctccactgaatgggg

SEQ ID NO: 1291703 - DNA, 15 bp, Homo sapiens
gctccactgaatggg

SEQ ID NO: 1291704 - DNA, 15 bp, Homo sapiens
ggctccactgaatgg

SEQ ID NO: 1291705 - DNA, 15 bp, Homo sapiens
gggctccactgaatg

SEQ ID NO: 1291706 - DNA, 15 bp, Homo sapiens
tgggctccactgaat

SEQ ID NO: 1291707 - DNA, 15 bp, Homo sapiens
atgggctccactgaa

SEQ ID NO: 1291708 - DNA, 15 bp, Homo sapiens
tatgggctccactga

SEQ ID NO: 1291709 - DNA, 15 bp, Homo sapiens
ctatgggctccactg

SEQ ID NO: 1291710 - DNA, 15 bp, Homo sapiens
cctatgggctccact

SEQ ID NO: 1291711 - DNA, 15 bp, Homo sapiens
ccctatgggctccac

SEQ ID NO: 1291712 - DNA, 15 bp, Homo sapiens
cccctatgggctcca

SEQ ID NO: 1291713 - DNA, 15 bp, Homo sapiens
tcccctatgggctcc

SEQ ID NO: 1291714 - DNA, 15 bp, Homo sapiens
ctcccctatgggctc

SEQ ID NO: 1291715 - DNA, 15 bp, Homo sapiens
cctcccctatgggct

SEQ ID NO: 1291716 - DNA, 15 bp, Homo sapiens
tcctcccctatgggc

SEQ ID NO: 1291717 - DNA, 15 bp, Homo sapiens
ttcctcccctatggg

SEQ ID NO: 1291718 - DNA, 15 bp, Homo sapiens
tttcctcccctatgg

SEQ ID NO: 1291719 - DNA, 15 bp, Homo sapiens
gtttcctcccctatg

SEQ ID NO: 1291720 - DNA, 15 bp, Homo sapiens
agtttcctcccctat

SEQ ID NO: 1291721 - DNA, 15 bp, Homo sapiens
cagtttcctccccta

SEQ ID NO: 1291722 - DNA, 15 bp, Homo sapiens
tcagtttcctcccct

SEQ ID NO: 1291723 - DNA, 15 bp, Homo sapiens
gtcagtttcctcccc

SEQ ID NO: 1291724 - DNA, 15 bp, Homo sapiens
cgtcagtttcctccc

SEQ ID NO: 1291725 - DNA, 15 bp, Homo sapiens
acgtcagtttcctcc

SEQ ID NO: 1291726 - DNA, 15 bp, Homo sapiens
cacgtcagtttcctc

SEQ ID NO: 1291727 - DNA, 15 bp, Homo sapiens
ccacgtcagtttcct

SEQ ID NO: 1291728 - DNA, 15 bp, Homo sapiens
cccacgtcagtttcc

SEQ ID NO: 1291729 - DNA, 15 bp, Homo sapiens
tcccacgtcagtttc

SEQ ID NO: 1291730 - DNA, 15 bp, Homo sapiens
ctcccacgtcagttt

SEQ ID NO: 1291731 - DNA, 15 bp, Homo sapiens
cctcccacgtcagtt

SEQ ID NO: 1291732 - DNA, 15 bp, Homo sapiens
gcctcccacgtcagt

SEQ ID NO: 1291733 - DNA, 15 bp, Homo sapiens
agcctcccacgtcag

SEQ ID NO: 1291734 - DNA, 15 bp, Homo sapiens
cagcctcccacgtca

SEQ ID NO: 1291735 - DNA, 15 bp, Homo sapiens
ccagcctcccacgtc

SEQ ID NO: 1291736 - DNA, 15 bp, Homo sapiens
gccagcctcccacgt

SEQ ID NO: 1291737 - DNA, 15 bp, Homo sapiens
agccagcctcccacg

SEQ ID NO: 1291738 - DNA, 15 bp, Homo sapiens
gagccagcctcccac

SEQ ID NO: 1291739 - DNA, 15 bp, Homo sapiens
tgagccagcctccca

SEQ ID NO: 1291740 - DNA, 15 bp, Homo sapiens
ctgagccagcctccc

SEQ ID NO: 1291741 - DNA, 15 bp, Homo sapiens
actgagccagcctcc

SEQ ID NO: 1291742 - DNA, 15 bp, Homo sapiens
aactgagccagcctc

SEQ ID NO: 1291743 - DNA, 15 bp, Homo sapiens
gaactgagccagcct

SEQ ID NO: 1291744 - DNA, 15 bp, Homo sapiens
ggaactgagccagcc

SEQ ID NO: 1291745 - DNA, 15 bp, Homo sapiens
gggaactgagccagc

SEQ ID NO: 1291746 - DNA, 15 bp, Homo sapiens
agggaactgagccag

SEQ ID NO: 1291747 - DNA, 15 bp, Homo sapiens
aagggaactgagcca

SEQ ID NO: 1291748 - DNA, 15 bp, Homo sapiens
taagggaactgagcc

SEQ ID NO: 1291749 - DNA, 15 bp, Homo sapiens
ctaagggaactgagc

SEQ ID NO: 1291750 - DNA, 15 bp, Homo sapiens
actaagggaactgag

SEQ ID NO: 1291751 - DNA, 15 bp, Homo sapiens
cactaagggaactga

SEQ ID NO: 1291752 - DNA, 15 bp, Homo sapiens
tcactaagggaactg

SEQ ID NO: 1291753 - DNA, 15 bp, Homo sapiens
atcactaagggaact

SEQ ID NO: 1291754 - DNA, 15 bp, Homo sapiens
catcactaagggaac

SEQ ID NO: 1291755 - DNA, 15 bp, Homo sapiens
ccatcactaagggaa

SEQ ID NO: 1291756 - DNA, 15 bp, Homo sapiens
gccatcactaaggga

SEQ ID NO: 1291757 - DNA, 15 bp, Homo sapiens
tgccatcactaaggg

SEQ ID NO: 1291758 - DNA, 15 bp, Homo sapiens
ctgccatcactaagg

SEQ ID NO: 1291759 - DNA, 15 bp, Homo sapiens
actgccatcactaag

SEQ ID NO: 1291760 - DNA, 15 bp, Homo sapiens
gactgccatcactaa

SEQ ID NO: 1291761 - DNA, 15 bp, Homo sapiens
agactgccatcacta

SEQ ID NO: 1291762 - DNA, 15 bp, Homo sapiens
cagactgccatcact

SEQ ID NO: 1291763 - DNA, 15 bp, Homo sapiens
tcagactgccatcac

SEQ ID NO: 1291764 - DNA, 15 bp, Homo sapiens
atcagactgccatca

SEQ ID NO: 1291765 - DNA, 15 bp, Homo sapiens
catcagactgccatc

SEQ ID NO: 1291766 - DNA, 15 bp, Homo sapiens
ccatcagactgccat

SEQ ID NO: 1291767 - DNA, 15 bp, Homo sapiens
tccatcagactgcca

SEQ ID NO: 1291768 - DNA, 15 bp, Homo sapiens
ctccatcagactgcc

SEQ ID NO: 1291769 - DNA, 15 bp, Homo sapiens
cctccatcagactgc

SEQ ID NO: 1291770 - DNA, 15 bp, Homo sapiens
acctccatcagactg

SEQ ID NO: 1291771 - DNA, 15 bp, Homo sapiens
cacctccatcagact

SEQ ID NO: 1291772 - DNA, 15 bp, Homo sapiens
gcacctccatcagac

SEQ ID NO: 1291773 - DNA, 15 bp, Homo sapiens
agcacctccatcaga

SEQ ID NO: 1291774 - DNA, 15 bp, Homo sapiens
cagcacctccatcag

SEQ ID NO: 1291775 - DNA, 15 bp, Homo sapiens
tcagcacctccatca

SEQ ID NO: 1291776 - DNA, 15 bp, Homo sapiens
gtcagcacctccatc

SEQ ID NO: 1291777 - DNA, 15 bp, Homo sapiens
ggtcagcacctccat

SEQ ID NO: 1291778 - DNA, 15 bp, Homo sapiens
gggtcagcacctcca

SEQ ID NO: 1291779 - DNA, 15 bp, Homo sapiens
tgggtcagcacctcc

SEQ ID NO: 1291780 - DNA, 15 bp, Homo sapiens
ttgggtcagcacctc

SEQ ID NO: 1291781 - DNA, 15 bp, Homo sapiens
cttgggtcagcacct

SEQ ID NO: 1291782 - DNA, 15 bp, Homo sapiens
acttgggtcagcacc

SEQ ID NO: 1291783 - DNA, 15 bp, Homo sapiens
cacttgggtcagcac

SEQ ID NO: 1291784 - DNA, 15 bp, Homo sapiens
ccacttgggtcagca

SEQ ID NO: 1291785 - DNA, 15 bp, Homo sapiens
tccacttgggtcagc

SEQ ID NO: 1291786 - DNA, 15 bp, Homo sapiens
gtccacttgggtcag

SEQ ID NO: 1291787 - DNA, 15 bp, Homo sapiens
tgtccacttgggtca

SEQ ID NO: 1291788 - DNA, 15 bp, Homo sapiens
gtgtccacttgggtc

SEQ ID NO: 1291789 - DNA, 15 bp, Homo sapiens
ggtgtccacttgggt

SEQ ID NO: 1291790 - DNA, 15 bp, Homo sapiens
tggtgtccacttggg

SEQ ID NO: 1291791 - DNA, 15 bp, Homo sapiens
ttggtgtccacttgg

SEQ ID NO: 1291792 - DNA, 15 bp, Homo sapiens
tttggtgtccacttg

SEQ ID NO: 1291793 - DNA, 15 bp, Homo sapiens
atttggtgtccactt

SEQ ID NO: 1291794 - DNA, 15 bp, Homo sapiens
catttggtgtccact

SEQ ID NO: 1291795 - DNA, 15 bp, Homo sapiens
acatttggtgtccac

SEQ ID NO: 1291796 - DNA, 15 bp, Homo sapiens
aacatttggtgtcca

SEQ ID NO: 1291797 - DNA, 15 bp, Homo sapiens
aaacatttggtgtcc

SEQ ID NO: 1291798 - DNA, 15 bp, Homo sapiens
aaaacatttggtgtc

SEQ ID NO: 1291799 - DNA, 15 bp, Homo sapiens
caaaacatttggtgt

SEQ ID NO: 1291800 - DNA, 15 bp, Homo sapiens
acaaaacatttggtg

SEQ ID NO: 1291801 - DNA, 15 bp, Homo sapiens
tacaaaacatttggt

SEQ ID NO: 1291802 - DNA, 15 bp, Homo sapiens
atacaaaacatttgg

SEQ ID NO: 1291803 - DNA, 15 bp, Homo sapiens
aatacaaaacatttg

SEQ ID NO: 1291804 - DNA, 15 bp, Homo sapiens
caatacaaaacattt

SEQ ID NO: 1291805 - DNA, 15 bp, Homo sapiens
tcaatacaaaacatt

SEQ ID NO: 1291806 - DNA, 15 bp, Homo sapiens
ttcaatacaaaacat

SEQ ID NO: 1291807 - DNA, 15 bp, Homo sapiens
tttcaatacaaaaca

SEQ ID NO: 1291808 - DNA, 15 bp, Homo sapiens
gtttcaatacaaaac

SEQ ID NO: 1291809 - DNA, 15 bp, Homo sapiens
tgtttcaatacaaaa

SEQ ID NO: 1291810 - DNA, 15 bp, Homo sapiens
atgtttcaatacaaa

SEQ ID NO: 1291811 - DNA, 15 bp, Homo sapiens
tatgtttcaatacaa

SEQ ID NO: 1291812 - DNA, 15 bp, Homo sapiens
ttatgtttcaataca

SEQ ID NO: 1291813 - DNA, 15 bp, Homo sapiens
attatgtttcaatac

SEQ ID NO: 1291814 - DNA, 15 bp, Homo sapiens
tattatgtttcaata

SEQ ID NO: 1291815 - DNA, 15 bp, Homo sapiens
gtattatgtttcaat

SEQ ID NO: 1291816 - DNA, 15 bp, Homo sapiens
tgtattatgtttcaa

SEQ ID NO: 1291817 - DNA, 15 bp, Homo sapiens
ctgtattatgtttca

SEQ ID NO: 1291818 - DNA, 15 bp, Homo sapiens
actgtattatgtttc

SEQ ID NO: 1291819 - DNA, 15 bp, Homo sapiens
cactgtattatgttt

SEQ ID NO: 1291820 - DNA, 15 bp, Homo sapiens
gcactgtattatgtt

SEQ ID NO: 1291821 - DNA, 15 bp, Homo sapiens
tgcactgtattatgt

SEQ ID NO: 1291822 - DNA, 15 bp, Homo sapiens
ctgcactgtattatg

SEQ ID NO: 1291823 - DNA, 15 bp, Homo sapiens
gctgcactgtattat

SEQ ID NO: 1291824 - DNA, 15 bp, Homo sapiens
tgctgcactgtatta

SEQ ID NO: 1291825 - DNA, 15 bp, Homo sapiens
atgctgcactgtatt

SEQ ID NO: 1291826 - DNA, 15 bp, Homo sapiens
aatgctgcactgtat

SEQ ID NO: 1291827 - DNA, 15 bp, Homo sapiens
taatgctgcactgta

SEQ ID NO: 1291828 - DNA, 15 bp, Homo sapiens
ataatgctgcactgt

SEQ ID NO: 1291829 - DNA, 15 bp, Homo sapiens
cataatgctgcactg

SEQ ID NO: 1291830 - DNA, 15 bp, Homo sapiens
ccataatgctgcact

SEQ ID NO: 1291831 - DNA, 15 bp, Homo sapiens
cccataatgctgcac

SEQ ID NO: 1291832 - DNA, 15 bp, Homo sapiens
ccccataatgctgca

SEQ ID NO: 1291833 - DNA, 15 bp, Homo sapiens
gccccataatgctgc

SEQ ID NO: 1291834 - DNA, 15 bp, Homo sapiens
tgccccataatgctg

SEQ ID NO: 1291835 - DNA, 15 bp, Homo sapiens
ctgccccataatgct

SEQ ID NO: 1291836 - DNA, 15 bp, Homo sapiens
cctgccccataatgc

SEQ ID NO: 1291837 - DNA, 15 bp, Homo sapiens
ccctgccccataatg

SEQ ID NO: 1291838 - DNA, 15 bp, Homo sapiens
tccctgccccataat

SEQ ID NO: 1291839 - DNA, 15 bp, Homo sapiens
atccctgccccataa

SEQ ID NO: 1291840 - DNA, 15 bp, Homo sapiens
catccctgccccata

SEQ ID NO: 1291841 - DNA, 15 bp, Homo sapiens
ccatccctgccccat

SEQ ID NO: 1291842 - DNA, 15 bp, Homo sapiens
cccatccctgcccca

SEQ ID NO: 1291843 - DNA, 15 bp, Homo sapiens
ctccccatccctgcc

SEQ ID NO: 1291844 - DNA, 15 bp, Homo sapiens
gctccccatccctgc

SEQ ID NO: 1291845 - DNA, 15 bp, Homo sapiens
agctccccatccctg

SEQ ID NO: 1291846 - DNA, 15 bp, Homo sapiens
cagctccccatccct

SEQ ID NO: 1291847 - DNA, 15 bp, Homo sapiens
gcagctccccatccc

SEQ ID NO: 1291848 - DNA, 15 bp, Homo sapiens
agcagctccccatcc

SEQ ID NO: 1291849 - DNA, 15 bp, Homo sapiens
cagcagctccccatc

SEQ ID NO: 1291850 - DNA, 15 bp, Homo sapiens
ccagcagctccccat

SEQ ID NO: 1291851 - DNA, 15 bp, Homo sapiens
gccagcagctcccca

SEQ ID NO: 1291852 - DNA, 15 bp, Homo sapiens
ggccagcagctcccc

SEQ ID NO: 1291853 - DNA, 15 bp, Homo sapiens
gggccagcagctccc

SEQ ID NO: 1291854 - DNA, 15 bp, Homo sapiens
tgggccagcagctcc

SEQ ID NO: 1291855 - DNA, 15 bp, Homo sapiens
atgggccagcagctc

SEQ ID NO: 1291856 - DNA, 15 bp, Homo sapiens
catgggccagcagct

SEQ ID NO: 1291857 - DNA, 15 bp, Homo sapiens
tcatgggccagcagc

SEQ ID NO: 1291858 - DNA, 15 bp, Homo sapiens
ctcatgggccagcag

SEQ ID NO: 1291859 - DNA, 15 bp, Homo sapiens
gctcatgggccagca

SEQ ID NO: 1291860 - DNA, 15 bp, Homo sapiens
agctcatgggccagc

SEQ ID NO: 1291861 - DNA, 15 bp, Homo sapiens
cagctcatgggccag

SEQ ID NO: 1291862 - DNA, 15 bp, Homo sapiens
ccagctcatgggcca

SEQ ID NO: 1291863 - DNA, 15 bp, Homo sapiens
tccagctcatgggcc

SEQ ID NO: 1291864 - DNA, 15 bp, Homo sapiens
atccagctcatgggc

SEQ ID NO: 1291865 - DNA, 15 bp, Homo sapiens
tatccagctcatggg

SEQ ID NO: 1291866 - DNA, 15 bp, Homo sapiens
atatccagctcatgg

SEQ ID NO: 1291867 - DNA, 15 bp, Homo sapiens
tatatccagctcatg

SEQ ID NO: 1291868 - DNA, 15 bp, Homo sapiens
ctatatccagctcat

SEQ ID NO: 1291869 - DNA, 15 bp, Homo sapiens
actatatccagctca

SEQ ID NO: 1291870 - DNA, 15 bp, Homo sapiens
gactatatccagctc

SEQ ID NO: 1291871 - DNA, 15 bp, Homo sapiens
agactatatccagct

SEQ ID NO: 1291872 - DNA, 15 bp, Homo sapiens
aagactatatccagc

SEQ ID NO: 1291873 - DNA, 15 bp, Homo sapiens
caagactatatccag

SEQ ID NO: 1291874 - DNA, 15 bp, Homo sapiens
tcaagactatatcca

SEQ ID NO: 1291875 - DNA, 15 bp, Homo sapiens
atcaagactatatcc

SEQ ID NO: 1291876 - DNA, 15 bp, Homo sapiens
catcaagactatatc

SEQ ID NO: 1291877 - DNA, 15 bp, Homo sapiens
acatcaagactatat

SEQ ID NO: 1291878 - DNA, 15 bp, Homo sapiens
cacatcaagactata

SEQ ID NO: 1291879 - DNA, 15 bp, Homo sapiens
tcacatcaagactat

SEQ ID NO: 1291880 - DNA, 15 bp, Homo sapiens
atcacatcaagacta

SEQ ID NO: 1291881 - DNA, 15 bp, Homo sapiens
aatcacatcaagact

SEQ ID NO: 1291882 - DNA, 15 bp, Homo sapiens
aaatcacatcaagac

SEQ ID NO: 1291883 - DNA, 15 bp, Homo sapiens
aaaatcacatcaaga

SEQ ID NO: 1291884 - DNA, 15 bp, Homo sapiens
taaaatcacatcaag

SEQ ID NO: 1291885 - DNA, 15 bp, Homo sapiens
ataaaatcacatcaa

SEQ ID NO: 1291886 - DNA, 15 bp, Homo sapiens
cataaaatcacatca

SEQ ID NO: 1291887 - DNA, 15 bp, Homo sapiens
acataaaatcacatc

SEQ ID NO: 1291888 - DNA, 15 bp, Homo sapiens
gacataaaatcacat

SEQ ID NO: 1291889 - DNA, 15 bp, Homo sapiens
tgacataaaatcaca

SEQ ID NO: 1291890 - DNA, 15 bp, Homo sapiens
atgacataaaatcac

SEQ ID NO: 1291891 - DNA, 15 bp, Homo sapiens
aatgacataaaatca

SEQ ID NO: 1291892 - DNA, 15 bp, Homo sapiens
taatgacataaaatc

SEQ ID NO: 1291893 - DNA, 15 bp, Homo sapiens
ttaatgacataaaat

SEQ ID NO: 1291894 - DNA, 15 bp, Homo sapiens
cttaatgacataaaa

SEQ ID NO: 1291895 - DNA, 15 bp, Homo sapiens
ccttaatgacataaa

SEQ ID NO: 1291896 - DNA, 15 bp, Homo sapiens
tccttaatgacataa

SEQ ID NO: 1291897 - DNA, 15 bp, Homo sapiens
ttccttaatgacata

SEQ ID NO: 1291898 - DNA, 15 bp, Homo sapiens
tttccttaatgacat

SEQ ID NO: 1291899 - DNA, 15 bp, Homo sapiens
gtttccttaatgaca

SEQ ID NO: 1291900 - DNA, 15 bp, Homo sapiens
tgtttccttaatgac

SEQ ID NO: 1291901 - DNA, 15 bp, Homo sapiens
ttgtttccttaatga

SEQ ID NO: 1291902 - DNA, 15 bp, Homo sapiens
attgtttccttaatg

SEQ ID NO: 1291903 - DNA, 15 bp, Homo sapiens
aattgtttccttaat

SEQ ID NO: 1291904 - DNA, 15 bp, Homo sapiens
taattgtttccttaa

SEQ ID NO: 1291905 - DNA, 15 bp, Homo sapiens
gtaattgtttcctta

SEQ ID NO: 1291906 - DNA, 15 bp, Homo sapiens
agtaattgtttcctt

SEQ ID NO: 1291907 - DNA, 15 bp, Homo sapiens
tagtaattgtttcct

SEQ ID NO: 1291908 - DNA, 15 bp, Homo sapiens
ttagtaattgtttcc

SEQ ID NO: 1291909 - DNA, 15 bp, Homo sapiens
cttagtaattgtttc

SEQ ID NO: 1291910 - DNA, 15 bp, Homo sapiens
tcttagtaattgttt

SEQ ID NO: 1291911 - DNA, 15 bp, Homo sapiens
ctcttagtaattgtt

SEQ ID NO: 1291912 - DNA, 15 bp, Homo sapiens
actcttagtaattgt

SEQ ID NO: 1291913 - DNA, 15 bp, Homo sapiens
tactcttagtaattg

SEQ ID NO: 1291914 - DNA, 15 bp, Homo sapiens
ttactcttagtaatt

SEQ ID NO: 1291915 - DNA, 15 bp, Homo sapiens
gttactcttagtaat

SEQ ID NO: 1291916 - DNA, 15 bp, Homo sapiens
tgttactcttagtaa

SEQ ID NO: 1291917 - DNA, 15 bp, Homo sapiens
gtgttactcttagta

SEQ ID NO: 1291918 - DNA, 15 bp, Homo sapiens
tgtgttactcttagt

SEQ ID NO: 1291919 - DNA, 15 bp, Homo sapiens
gtgtgttactcttag

SEQ ID NO: 1291920 - DNA, 15 bp, Homo sapiens
ggtgtgttactctta

SEQ ID NO: 1291921 - DNA, 15 bp, Homo sapiens
gggtgtgttactctt

SEQ ID NO: 1291922 - DNA, 15 bp, Homo sapiens
agggtgtgttactct

SEQ ID NO: 1291923 - DNA, 15 bp, Homo sapiens
aagggtgtgttactc

SEQ ID NO: 1291924 - DNA, 15 bp, Homo sapiens
aaagggtgtgttact

SEQ ID NO: 1291925 - DNA, 15 bp, Homo sapiens
taaagggtgtgttac

SEQ ID NO: 1291926 - DNA, 15 bp, Homo sapiens
gtaaagggtgtgtta

SEQ ID NO: 1291927 - DNA, 15 bp, Homo sapiens
agtaaagggtgtgtt

SEQ ID NO: 1291928 - DNA, 15 bp, Homo sapiens
gagtaaagggtgtgt

SEQ ID NO: 1291929 - DNA, 15 bp, Homo sapiens
ggagtaaagggtgtg

SEQ ID NO: 1291930 - DNA, 15 bp, Homo sapiens
aggagtaaagggtgt

SEQ ID NO: 1291931 - DNA, 15 bp, Homo sapiens
caggagtaaagggtg

SEQ ID NO: 1291932 - DNA, 15 bp, Homo sapiens
acaggagtaaagggt

SEQ ID NO: 1291933 - DNA, 15 bp, Homo sapiens
tacaggagtaaaggg

SEQ ID NO: 1291934 - DNA, 15 bp, Homo sapiens
ctacaggagtaaagg

SEQ ID NO: 1291935 - DNA, 15 bp, Homo sapiens
actacaggagtaaag

SEQ ID NO: 1291936 - DNA, 15 bp, Homo sapiens
gactacaggagtaaa

SEQ ID NO: 1291937 - DNA, 15 bp, Homo sapiens
tgactacaggagtaa

SEQ ID NO: 1291938 - DNA, 15 bp, Homo sapiens
atgactacaggagta

SEQ ID NO: 1291939 - DNA, 15 bp, Homo sapiens
tatgactacaggagt

SEQ ID NO: 1291940 - DNA, 15 bp, Homo sapiens
ttatgactacaggag

SEQ ID NO: 1291941 - DNA, 15 bp, Homo sapiens
tttatgactacagga

SEQ ID NO: 1291942 - DNA, 15 bp, Homo sapiens
atttatgactacagg

SEQ ID NO: 1291943 - DNA, 15 bp, Homo sapiens
gatttatgactacag

SEQ ID NO: 1291944 - DNA, 15 bp, Homo sapiens
agatttatgactaca

SEQ ID NO: 1291945 - DNA, 15 bp, Homo sapiens
cagatttatgactac

SEQ ID NO: 1291946 - DNA, 15 bp, Homo sapiens
acagatttatgacta

SEQ ID NO: 1291947 - DNA, 15 bp, Homo sapiens
tacagatttatgact

SEQ ID NO: 1291948 - DNA, 15 bp, Homo sapiens
ctacagatttatgac

SEQ ID NO: 1291949 - DNA, 15 bp, Homo sapiens
actacagatttatga

SEQ ID NO: 1291950 - DNA, 15 bp, Homo sapiens
gactacagatttatg

SEQ ID NO: 1291951 - DNA, 15 bp, Homo sapiens
agactacagatttat

SEQ ID NO: 1291952 - DNA, 15 bp, Homo sapiens
tagactacagattta

SEQ ID NO: 1291953 - DNA, 15 bp, Homo sapiens
gtagactacagattt

SEQ ID NO: 1291954 - DNA, 15 bp, Homo sapiens
agtagactacagatt

SEQ ID NO: 1291955 - DNA, 15 bp, Homo sapiens
aagtagactacagat

SEQ ID NO: 1291956 - DNA, 15 bp, Homo sapiens
aaagtagactacaga

SEQ ID NO: 1291957 - DNA, 15 bp, Homo sapiens
aaaagtagactacag

SEQ ID NO: 1291958 - DNA, 15 bp, Homo sapiens
taaaagtagactaca

SEQ ID NO: 1291959 - DNA, 15 bp, Homo sapiens
ttaaaagtagactac

SEQ ID NO: 1291960 - DNA, 15 bp, Homo sapiens
tttaaaagtagacta

SEQ ID NO: 1291961 - DNA, 15 bp, Homo sapiens
ttttaaaagtagact

SEQ ID NO: 1291962 - DNA, 15 bp, Homo sapiens
attttaaaagtagac

SEQ ID NO: 1291963 - DNA, 15 bp, Homo sapiens
gattttaaaagtaga

SEQ ID NO: 1291964 - DNA, 15 bp, Homo sapiens
agattttaaaagtag

SEQ ID NO: 1291965 - DNA, 15 bp, Homo sapiens
tagattttaaaagta

SEQ ID NO: 1291966 - DNA, 15 bp, Homo sapiens
gtagattttaaaagt

SEQ ID NO: 1291967 - DNA, 15 bp, Homo sapiens
agtagattttaaaag

SEQ ID NO: 1291968 - DNA, 15 bp, Homo sapiens
cagtagattttaaaa

SEQ ID NO: 1291969 - DNA, 15 bp, Homo sapiens
tcagtagattttaaa

SEQ ID NO: 1291970 - DNA, 15 bp, Homo sapiens
atcagtagattttaa

SEQ ID NO: 1291971 - DNA, 15 bp, Homo sapiens
tatcagtagatttta

SEQ ID NO: 1291972 - DNA, 15 bp, Homo sapiens
ttatcagtagatttt

SEQ ID NO: 1291973 - DNA, 15 bp, Homo sapiens
cttatcagtagattt

SEQ ID NO: 1291974 - DNA, 15 bp, Homo sapiens
gcttatcagtagatt

SEQ ID NO: 1291975 - DNA, 15 bp, Homo sapiens
agcttatcagtagat

SEQ ID NO: 1291976 - DNA, 15 bp, Homo sapiens
aagcttatcagtaga

SEQ ID NO: 1291977 - DNA, 15 bp, Homo sapiens
gaagcttatcagtag

SEQ ID NO: 1291978 - DNA, 15 bp, Homo sapiens
ggaagcttatcagta

SEQ ID NO: 1291979 - DNA, 15 bp, Homo sapiens
tggaagcttatcagt

SEQ ID NO: 1291980 - DNA, 15 bp, Homo sapiens
ttggaagcttatcag

SEQ ID NO: 1291981 - DNA, 15 bp, Homo sapiens
tttggaagcttatca

SEQ ID NO: 1291982 - DNA, 15 bp, Homo sapiens
ttttggaagcttatc

SEQ ID NO: 1291983 - DNA, 15 bp, Homo sapiens
attttggaagcttat

SEQ ID NO: 1291984 - DNA, 15 bp, Homo sapiens
aattttggaagctta

SEQ ID NO: 1291985 - DNA, 15 bp, Homo sapiens
taattttggaagctt

SEQ ID NO: 1291986 - DNA, 15 bp, Homo sapiens
ataattttggaagct

SEQ ID NO: 1291987 - DNA, 15 bp, Homo sapiens
cataattttggaagc

SEQ ID NO: 1291988 - DNA, 15 bp, Homo sapiens
ccataattttggaag

SEQ ID NO: 1291989 - DNA, 15 bp, Homo sapiens
cccataattttggaa

SEQ ID NO: 1291990 - DNA, 15 bp, Homo sapiens
acccataattttgga

SEQ ID NO: 1291991 - DNA, 15 bp, Homo sapiens
aacccataattttgg

SEQ ID NO: 1291992 - DNA, 15 bp, Homo sapiens
gaacccataattttg

SEQ ID NO: 1291993 - DNA, 15 bp, Homo sapiens
ggaacccataatttt

SEQ ID NO: 1291994 - DNA, 15 bp, Homo sapiens
aggaacccataattt

SEQ ID NO: 1291995 - DNA, 15 bp, Homo sapiens
aaggaacccataatt

SEQ ID NO: 1291996 - DNA, 15 bp, Homo sapiens
aaaggaacccataat

SEQ ID NO: 1291997 - DNA, 15 bp, Homo sapiens
taaaggaacccataa

SEQ ID NO: 1291998 - DNA, 15 bp, Homo sapiens
ttaaaggaacccata

SEQ ID NO: 1291999 - DNA, 15 bp, Homo sapiens
cttaaaggaacccat

SEQ ID NO: 1292000 - DNA, 15 bp, Homo sapiens
tcttaaaggaaccca

SEQ ID NO: 1292001 - DNA, 15 bp, Homo sapiens
ttcttaaaggaaccc

SEQ ID NO: 1292002 - DNA, 15 bp, Homo sapiens
tttcttaaaggaacc

SEQ ID NO: 1292003 - DNA, 15 bp, Homo sapiens
ctttcttaaaggaac

SEQ ID NO: 1292004 - DNA, 15 bp, Homo sapiens
actttcttaaaggaa

SEQ ID NO: 1292005 - DNA, 15 bp, Homo sapiens
aactttcttaaagga

SEQ ID NO: 1292006 - DNA, 15 bp, Homo sapiens
aaactttcttaaagg

SEQ ID NO: 1292007 - DNA, 15 bp, Homo sapiens
gaaactttcttaaag

SEQ ID NO: 1292008 - DNA, 15 bp, Homo sapiens
agaaactttcttaaa

SEQ ID NO: 1292009 - DNA, 15 bp, Homo sapiens
gagaaactttcttaa

SEQ ID NO: 1292010 - DNA, 15 bp, Homo sapiens
agagaaactttctta

SEQ ID NO: 1292011 - DNA, 15 bp, Homo sapiens
aagagaaactttctt

SEQ ID NO: 1292012 - DNA, 15 bp, Homo sapiens
aaagagaaactttct

SEQ ID NO: 1292013 - DNA, 15 bp, Homo sapiens
taaagagaaactttc

SEQ ID NO: 1292014 - DNA, 15 bp, Homo sapiens
ctaaagagaaacttt

SEQ ID NO: 1292015 - DNA, 15 bp, Homo sapiens
actaaagagaaactt

SEQ ID NO: 1292016 - DNA, 15 bp, Homo sapiens
aactaaagagaaact

SEQ ID NO: 1292017 - DNA, 15 bp, Homo sapiens
gaactaaagagaaac

SEQ ID NO: 1292018 - DNA, 15 bp, Homo sapiens
agaactaaagagaaa

SEQ ID NO: 1292019 - DNA, 15 bp, Homo sapiens
tagaactaaagagaa

SEQ ID NO: 1292020 - DNA, 15 bp, Homo sapiens
ttagaactaaagaga

SEQ ID NO: 1292021 - DNA, 15 bp, Homo sapiens
attagaactaaagag

SEQ ID NO: 1292022 - DNA, 15 bp, Homo sapiens
aattagaactaaaga

SEQ ID NO: 1292023 - DNA, 15 bp, Homo sapiens
aaattagaactaaag

SEQ ID NO: 1292024 - DNA, 15 bp, Homo sapiens
aaaattagaactaaa

SEQ ID NO: 1292025 - DNA, 15 bp, Homo sapiens
taaaattagaactaa

SEQ ID NO: 1292026 - DNA, 15 bp, Homo sapiens
ataaaattagaacta

SEQ ID NO: 1292027 - DNA, 15 bp, Homo sapiens
aataaaattagaact

SEQ ID NO: 1292028 - DNA, 15 bp, Homo sapiens
taataaaattagaac

SEQ ID NO: 1292029 - DNA, 15 bp, Homo sapiens
ataataaaattagaa

SEQ ID NO: 1292030 - DNA, 15 bp, Homo sapiens
aataataaaattaga

SEQ ID NO: 1292031 - DNA, 15 bp, Homo sapiens
caataataaaattag

SEQ ID NO: 1292032 - DNA, 15 bp, Homo sapiens
acaataataaaatta

SEQ ID NO: 1292033 - DNA, 15 bp, Homo sapiens
aacaataataaaatt

SEQ ID NO: 1292034 - DNA, 15 bp, Homo sapiens
caacaataataaaat

SEQ ID NO: 1292035 - DNA, 15 bp, Homo sapiens
acaacaataataaaa

SEQ ID NO: 1292036 - DNA, 15 bp, Homo sapiens
aacaacaataataaa

SEQ ID NO: 1292037 - DNA, 15 bp, Homo sapiens
aaacaacaataataa

SEQ ID NO: 1292038 - DNA, 15 bp, Homo sapiens
caaacaacaataata

SEQ ID NO: 1292039 - DNA, 15 bp, Homo sapiens
acaaacaacaataat

SEQ ID NO: 1292040 - DNA, 15 bp, Homo sapiens
aacaaacaacaataa

SEQ ID NO: 1292041 - DNA, 15 bp, Homo sapiens
aaacaaacaacaata

SEQ ID NO: 1292042 - DNA, 15 bp, Homo sapiens
caaacaaacaacaat

SEQ ID NO: 1292043 - DNA, 15 bp, Homo sapiens
tcaaacaaacaacaa

SEQ ID NO: 1292044 - DNA, 15 bp, Homo sapiens
atcaaacaaacaaca

SEQ ID NO: 1292045 - DNA, 15 bp, Homo sapiens
aatcaaacaaacaac

SEQ ID NO: 1292046 - DNA, 15 bp, Homo sapiens
caatcaaacaaacaa

SEQ ID NO: 1292047 - DNA, 15 bp, Homo sapiens
acaatcaaacaaaca

SEQ ID NO: 1292048 - DNA, 15 bp, Homo sapiens
aacaatcaaacaaac

SEQ ID NO: 1292049 - DNA, 15 bp, Homo sapiens
aaacaatcaaacaaa

SEQ ID NO: 1292050 - DNA, 15 bp, Homo sapiens
aaaacaatcaaacaa

SEQ ID NO: 1292051 - DNA, 15 bp, Homo sapiens
gaaaacaatcaaaca

SEQ ID NO: 1292052 - DNA, 15 bp, Homo sapiens
agaaaacaatcaaac

SEQ ID NO: 1292053 - DNA, 15 bp, Homo sapiens
aagaaaacaatcaaa

SEQ ID NO: 1292054 - DNA, 15 bp, Homo sapiens
aaagaaaacaatcaa

SEQ ID NO: 1292055 - DNA, 15 bp, Homo sapiens
aaaagaaaacaatca

SEQ ID NO: 1292056 - DNA, 15 bp, Homo sapiens
gaaaagaaaacaatc

SEQ ID NO: 1292057 - DNA, 15 bp, Homo sapiens
agaaaagaaaacaat

SEQ ID NO: 1292058 - DNA, 15 bp, Homo sapiens
cagaaaagaaaacaa

SEQ ID NO: 1292059 - DNA, 15 bp, Homo sapiens
gcagaaaagaaaaca

SEQ ID NO: 1292060 - DNA, 15 bp, Homo sapiens
ggcagaaaagaaaac

SEQ ID NO: 1292061 - DNA, 15 bp, Homo sapiens
aggcagaaaagaaaa

SEQ ID NO: 1292062 - DNA, 15 bp, Homo sapiens
taggcagaaaagaaa

SEQ ID NO: 1292063 - DNA, 15 bp, Homo sapiens
gtaggcagaaaagaa

SEQ ID NO: 1292064 - DNA, 15 bp, Homo sapiens
tgtaggcagaaaaga

SEQ ID NO: 1292065 - DNA, 15 bp, Homo sapiens
atgtaggcagaaaag

SEQ ID NO: 1292066 - DNA, 15 bp, Homo sapiens
tatgtaggcagaaaa

SEQ ID NO: 1292067 - DNA, 15 bp, Homo sapiens
atatgtaggcagaaa

SEQ ID NO: 1292068 - DNA, 15 bp, Homo sapiens
catatgtaggcagaa

SEQ ID NO: 1292069 - DNA, 15 bp, Homo sapiens
acatatgtaggcaga

SEQ ID NO: 1292070 - DNA, 15 bp, Homo sapiens
gacatatgtaggcag

SEQ ID NO: 1292071 - DNA, 15 bp, Homo sapiens
agacatatgtaggca

SEQ ID NO: 1292072 - DNA, 15 bp, Homo sapiens
cagacatatgtaggc

SEQ ID NO: 1292073 - DNA, 15 bp, Homo sapiens
tcagacatatgtagg

SEQ ID NO: 1292074 - DNA, 15 bp, Homo sapiens
atcagacatatgtag

SEQ ID NO: 1292075 - DNA, 15 bp, Homo sapiens
aatcagacatatgta

SEQ ID NO: 1292076 - DNA, 15 bp, Homo sapiens
aaatcagacatatgt

SEQ ID NO: 1292077 - DNA, 15 bp, Homo sapiens
aaaatcagacatatg

SEQ ID NO: 1292078 - DNA, 15 bp, Homo sapiens
gaaaatcagacatat

SEQ ID NO: 1292079 - DNA, 15 bp, Homo sapiens
agaaaatcagacata

SEQ ID NO: 1292080 - DNA, 15 bp, Homo sapiens
gagaaaatcagacat

SEQ ID NO: 1292081 - DNA, 15 bp, Homo sapiens
agagaaaatcagaca

SEQ ID NO: 1292082 - DNA, 15 bp, Homo sapiens
aagagaaaatcagac

SEQ ID NO: 1292083 - DNA, 15 bp, Homo sapiens
gaagagaaaatcaga

SEQ ID NO: 1292084 - DNA, 15 bp, Homo sapiens
tgaagagaaaatcag

SEQ ID NO: 1292085 - DNA, 15 bp, Homo sapiens
gtgaagagaaaatca

SEQ ID NO: 1292086 - DNA, 15 bp, Homo sapiens
tgtgaagagaaaatc

SEQ ID NO: 1292087 - DNA, 15 bp, Homo sapiens
ttgtgaagagaaaat

SEQ ID NO: 1292088 - DNA, 15 bp, Homo sapiens
gttgtgaagagaaaa

SEQ ID NO: 1292089 - DNA, 15 bp, Homo sapiens
agttgtgaagagaaa

SEQ ID NO: 1292090 - DNA, 15 bp, Homo sapiens
cagttgtgaagagaa

SEQ ID NO: 1292091 - DNA, 15 bp, Homo sapiens
gcagttgtgaagaga

SEQ ID NO: 1292092 - DNA, 15 bp, Homo sapiens
tgcagttgtgaagag

SEQ ID NO: 1292093 - DNA, 15 bp, Homo sapiens
atgcagttgtgaaga

SEQ ID NO: 1292094 - DNA, 15 bp, Homo sapiens
gatgcagttgtgaag

SEQ ID NO: 1292095 - DNA, 15 bp, Homo sapiens
ggatgcagttgtgaa

SEQ ID NO: 1292096 - DNA, 15 bp, Homo sapiens
aggatgcagttgtga

SEQ ID NO: 1292097 - DNA, 15 bp, Homo sapiens
taggatgcagttgtg

SEQ ID NO: 1292098 - DNA, 15 bp, Homo sapiens
ctaggatgcagttgt

SEQ ID NO: 1292099 - DNA, 15 bp, Homo sapiens
tctaggatgcagttg

SEQ ID NO: 1292100 - DNA, 15 bp, Homo sapiens
atctaggatgcagtt

SEQ ID NO: 1292101 - DNA, 15 bp, Homo sapiens
catctaggatgcagt

SEQ ID NO: 1292102 - DNA, 15 bp, Homo sapiens
gcatctaggatgcag

SEQ ID NO: 1292103 - DNA, 15 bp, Homo sapiens
ggcatctaggatgca

SEQ ID NO: 1292104 - DNA, 15 bp, Homo sapiens
aggcatctaggatgc

SEQ ID NO: 1292105 - DNA, 15 bp, Homo sapiens
aaggcatctaggatg

SEQ ID NO: 1292106 - DNA, 15 bp, Homo sapiens
gaaggcatctaggat

SEQ ID NO: 1292107 - DNA, 15 bp, Homo sapiens
ggaaggcatctagga

SEQ ID NO: 1292108 - DNA, 15 bp, Homo sapiens
aggaaggcatctagg

SEQ ID NO: 1292109 - DNA, 15 bp, Homo sapiens
aaggaaggcatctag

SEQ ID NO: 1292110 - DNA, 15 bp, Homo sapiens
taaggaaggcatcta

SEQ ID NO: 1292111 - DNA, 15 bp, Homo sapiens
ctaaggaaggcatct

SEQ ID NO: 1292112 - DNA, 15 bp, Homo sapiens
actaaggaaggcatc

SEQ ID NO: 1292113 - DNA, 15 bp, Homo sapiens
gactaaggaaggcat

SEQ ID NO: 1292114 - DNA, 15 bp, Homo sapiens
agactaaggaaggca

SEQ ID NO: 1292115 - DNA, 15 bp, Homo sapiens
gagactaaggaaggc

SEQ ID NO: 1292116 - DNA, 15 bp, Homo sapiens
agagactaaggaagg

SEQ ID NO: 1292117 - DNA, 15 bp, Homo sapiens
aagagactaaggaag

SEQ ID NO: 1292118 - DNA, 15 bp, Homo sapiens
gaagagactaaggaa

SEQ ID NO: 1292119 - DNA, 15 bp, Homo sapiens
agaagagactaagga

SEQ ID NO: 1292120 - DNA, 15 bp, Homo sapiens
cagaagagactaagg

SEQ ID NO: 1292121 - DNA, 15 bp, Homo sapiens
gcagaagagactaag

SEQ ID NO: 1292122 - DNA, 15 bp, Homo sapiens
agcagaagagactaa

SEQ ID NO: 1292123 - DNA, 15 bp, Homo sapiens
aagcagaagagacta

SEQ ID NO: 1292124 - DNA, 15 bp, Homo sapiens
gaagcagaagagact

SEQ ID NO: 1292125 - DNA, 15 bp, Homo sapiens
agaagcagaagagac

SEQ ID NO: 1292126 - DNA, 15 bp, Homo sapiens
gagaagcagaagaga

SEQ ID NO: 1292127 - DNA, 15 bp, Homo sapiens
agagaagcagaagag

SEQ ID NO: 1292128 - DNA, 15 bp, Homo sapiens
aagagaagcagaaga

SEQ ID NO: 1292129 - DNA, 15 bp, Homo sapiens
gaagagaagcagaag

SEQ ID NO: 1292130 - DNA, 15 bp, Homo sapiens
agaagagaagcagaa

SEQ ID NO: 1292131 - DNA, 15 bp, Homo sapiens
cagaagagaagcaga

SEQ ID NO: 1292132 - DNA, 15 bp, Homo sapiens
acagaagagaagcag

SEQ ID NO: 1292133 - DNA, 15 bp, Homo sapiens
aacagaagagaagca

SEQ ID NO: 1292134 - DNA, 15 bp, Homo sapiens
taacagaagagaagc

SEQ ID NO: 1292135 - DNA, 15 bp, Homo sapiens
gtaacagaagagaag

SEQ ID NO: 1292136 - DNA, 15 bp, Homo sapiens
agtaacagaagagaa

SEQ ID NO: 1292137 - DNA, 15 bp, Homo sapiens
gagtaacagaagaga

SEQ ID NO: 1292138 - DNA, 15 bp, Homo sapiens
agagtaacagaagag

SEQ ID NO: 1292139 - DNA, 15 bp, Homo sapiens
aagagtaacagaaga

SEQ ID NO: 1292140 - DNA, 15 bp, Homo sapiens
caagagtaacagaag

SEQ ID NO: 1292141 - DNA, 15 bp, Homo sapiens
acaagagtaacagaa

SEQ ID NO: 1292142 - DNA, 15 bp, Homo sapiens
aacaagagtaacaga

SEQ ID NO: 1292143 - DNA, 15 bp, Homo sapiens
aaacaagagtaacag

SEQ ID NO: 1292144 - DNA, 15 bp, Homo sapiens
aaaacaagagtaaca

SEQ ID NO: 1292145 - DNA, 15 bp, Homo sapiens
gaaaacaagagtaac

SEQ ID NO: 1292146 - DNA, 15 bp, Homo sapiens
agaaaacaagagtaa

SEQ ID NO: 1292147 - DNA, 15 bp, Homo sapiens
cagaaaacaagagta

SEQ ID NO: 1292148 - DNA, 15 bp, Homo sapiens
gcagaaaacaagagt

SEQ ID NO: 1292149 - DNA, 15 bp, Homo sapiens
agcagaaaacaagag

SEQ ID NO: 1292150 - DNA, 15 bp, Homo sapiens
aagcagaaaacaaga

SEQ ID NO: 1292151 - DNA, 15 bp, Homo sapiens
gaagcagaaaacaag

SEQ ID NO: 1292152 - DNA, 15 bp, Homo sapiens
agaagcagaaaacaa

SEQ ID NO: 1292153 - DNA, 15 bp, Homo sapiens
tagaagcagaaaaca

SEQ ID NO: 1292154 - DNA, 15 bp, Homo sapiens
atagaagcagaaaac

SEQ ID NO: 1292155 - DNA, 15 bp, Homo sapiens
tatagaagcagaaaa

SEQ ID NO: 1292156 - DNA, 15 bp, Homo sapiens
atatagaagcagaaa

SEQ ID NO: 1292157 - DNA, 15 bp, Homo sapiens
tatatagaagcagaa

SEQ ID NO: 1292158 - DNA, 15 bp, Homo sapiens
atatatagaagcaga

SEQ ID NO: 1292159 - DNA, 15 bp, Homo sapiens
aatatatagaagcag

SEQ ID NO: 1292160 - DNA, 15 bp, Homo sapiens
aaatatatagaagca

SEQ ID NO: 1292161 - DNA, 15 bp, Homo sapiens
taaatatatagaagc

SEQ ID NO: 1292162 - DNA, 15 bp, Homo sapiens
ataaatatatagaag

SEQ ID NO: 1292163 - DNA, 15 bp, Homo sapiens
gataaatatatagaa

SEQ ID NO: 1292164 - DNA, 15 bp, Homo sapiens
agataaatatataga

SEQ ID NO: 1292165 - DNA, 15 bp, Homo sapiens
cagataaatatatag

SEQ ID NO: 1292166 - DNA, 15 bp, Homo sapiens
gcagataaatatata

SEQ ID NO: 1292167 - DNA, 15 bp, Homo sapiens
agcagataaatatat

SEQ ID NO: 1292168 - DNA, 15 bp, Homo sapiens
cagcagataaatata

SEQ ID NO: 1292169 - DNA, 15 bp, Homo sapiens
acagcagataaatat

SEQ ID NO: 1292170 - DNA, 15 bp, Homo sapiens
aacagcagataaata

SEQ ID NO: 1292171 - DNA, 15 bp, Homo sapiens
aaacagcagataaat

SEQ ID NO: 1292172 - DNA, 15 bp, Homo sapiens
aaaacagcagataaa

SEQ ID NO: 1292173 - DNA, 15 bp, Homo sapiens
gaaaacagcagataa

SEQ ID NO: 1292174 - DNA, 15 bp, Homo sapiens
ggaaaacagcagata

SEQ ID NO: 1292175 - DNA, 15 bp, Homo sapiens
aggaaaacagcagat

SEQ ID NO: 1292176 - DNA, 15 bp, Homo sapiens
aaggaaaacagcaga

SEQ ID NO: 1292177 - DNA, 15 bp, Homo sapiens
aaaggaaaacagcag

SEQ ID NO: 1292178 - DNA, 15 bp, Homo sapiens
gaaaggaaaacagca

SEQ ID NO: 1292179 - DNA, 15 bp, Homo sapiens
agaaaggaaaacagc

SEQ ID NO: 1292180 - DNA, 15 bp, Homo sapiens
cagaaaggaaaacag

SEQ ID NO: 1292181 - DNA, 15 bp, Homo sapiens
acagaaaggaaaaca

SEQ ID NO: 1292182 - DNA, 15 bp, Homo sapiens
tacagaaaggaaaac

SEQ ID NO: 1292183 - DNA, 15 bp, Homo sapiens
gtacagaaaggaaaa

SEQ ID NO: 1292184 - DNA, 15 bp, Homo sapiens
agtacagaaaggaaa

SEQ ID NO: 1292185 - DNA, 15 bp, Homo sapiens
aagtacagaaaggaa

SEQ ID NO: 1292186 - DNA, 15 bp, Homo sapiens
aaagtacagaaagga

SEQ ID NO: 1292187 - DNA, 15 bp, Homo sapiens
aaaagtacagaaagg

SEQ ID NO: 1292188 - DNA, 15 bp, Homo sapiens
gaaaagtacagaaag

SEQ ID NO: 1292189 - DNA, 15 bp, Homo sapiens
ggaaaagtacagaaa

SEQ ID NO: 1292190 - DNA, 15 bp, Homo sapiens
gggaaaagtacagaa

SEQ ID NO: 1292191 - DNA, 15 bp, Homo sapiens
agggaaaagtacaga

SEQ ID NO: 1292192 - DNA, 15 bp, Homo sapiens
gagggaaaagtacag

SEQ ID NO: 1292193 - DNA, 15 bp, Homo sapiens
agagggaaaagtaca

SEQ ID NO: 1292194 - DNA, 15 bp, Homo sapiens
aagagggaaaagtac

SEQ ID NO: 1292195 - DNA, 15 bp, Homo sapiens
gaagagggaaaagta

SEQ ID NO: 1292196 - DNA, 15 bp, Homo sapiens
agaagagggaaaagt

SEQ ID NO: 1292197 - DNA, 15 bp, Homo sapiens
cagaagagggaaaag

SEQ ID NO: 1292198 - DNA, 15 bp, Homo sapiens
acagaagagggaaaa

SEQ ID NO: 1292199 - DNA, 15 bp, Homo sapiens
gacagaagagggaaa

SEQ ID NO: 1292200 - DNA, 15 bp, Homo sapiens
agacagaagagggaa

SEQ ID NO: 1292201 - DNA, 15 bp, Homo sapiens
cagacagaagaggga

SEQ ID NO: 1292202 - DNA, 15 bp, Homo sapiens
acagacagaagaggg

SEQ ID NO: 1292203 - DNA, 15 bp, Homo sapiens
tacagacagaagagg

SEQ ID NO: 1292204 - DNA, 15 bp, Homo sapiens
gtacagacagaagag

SEQ ID NO: 1292205 - DNA, 15 bp, Homo sapiens
ggtacagacagaaga

SEQ ID NO: 1292206 - DNA, 15 bp, Homo sapiens
gggtacagacagaag

SEQ ID NO: 1292207 - DNA, 15 bp, Homo sapiens
tgggtacagacagaa

SEQ ID NO: 1292208 - DNA, 15 bp, Homo sapiens
atgggtacagacaga

SEQ ID NO: 1292209 - DNA, 15 bp, Homo sapiens
aatgggtacagacag

SEQ ID NO: 1292210 - DNA, 15 bp, Homo sapiens
taatgggtacagaca

SEQ ID NO: 1292211 - DNA, 15 bp, Homo sapiens
ctaatgggtacagac

SEQ ID NO: 1292212 - DNA, 15 bp, Homo sapiens
actaatgggtacaga

SEQ ID NO: 1292213 - DNA, 15 bp, Homo sapiens
tactaatgggtacag

SEQ ID NO: 1292214 - DNA, 15 bp, Homo sapiens
atactaatgggtaca

SEQ ID NO: 1292215 - DNA, 15 bp, Homo sapiens
gatactaatgggtac

SEQ ID NO: 1292216 - DNA, 15 bp, Homo sapiens
ggatactaatgggta

SEQ ID NO: 1292217 - DNA, 15 bp, Homo sapiens
gggatactaatgggt

SEQ ID NO: 1292218 - DNA, 15 bp, Homo sapiens
agggatactaatggg

SEQ ID NO: 1292219 - DNA, 15 bp, Homo sapiens
aagggatactaatgg

SEQ ID NO: 1292220 - DNA, 15 bp, Homo sapiens
taagggatactaatg

SEQ ID NO: 1292221 - DNA, 15 bp, Homo sapiens
ttaagggatactaat

SEQ ID NO: 1292222 - DNA, 15 bp, Homo sapiens
tttaagggatactaa

SEQ ID NO: 1292223 - DNA, 15 bp, Homo sapiens
atttaagggatacta

SEQ ID NO: 1292224 - DNA, 15 bp, Homo sapiens
catttaagggatact

SEQ ID NO: 1292225 - DNA, 15 bp, Homo sapiens
gcatttaagggatac

SEQ ID NO: 1292226 - DNA, 15 bp, Homo sapiens
ggcatttaagggata

SEQ ID NO: 1292227 - DNA, 15 bp, Homo sapiens
aggcatttaagggat

SEQ ID NO: 1292228 - DNA, 15 bp, Homo sapiens
caggcatttaaggga

SEQ ID NO: 1292229 - DNA, 15 bp, Homo sapiens
acaggcatttaaggg

SEQ ID NO: 1292230 - DNA, 15 bp, Homo sapiens
cacaggcatttaagg

SEQ ID NO: 1292231 - DNA, 15 bp, Homo sapiens
tcacaggcatttaag

SEQ ID NO: 1292232 - DNA, 15 bp, Homo sapiens
ttcacaggcatttaa

SEQ ID NO: 1292233 - DNA, 15 bp, Homo sapiens
tttcacaggcattta

SEQ ID NO: 1292234 - DNA, 15 bp, Homo sapiens
ttttcacaggcattt

SEQ ID NO: 1292235 - DNA, 15 bp, Homo sapiens
cttttcacaggcatt

SEQ ID NO: 1292236 - DNA, 15 bp, Homo sapiens
ccttttcacaggcat

SEQ ID NO: 1292237 - DNA, 15 bp, Homo sapiens
tccttttcacaggca

SEQ ID NO: 1292238 - DNA, 15 bp, Homo sapiens
ttccttttcacaggc

SEQ ID NO: 1292239 - DNA, 15 bp, Homo sapiens
attccttttcacagg

SEQ ID NO: 1292240 - DNA, 15 bp, Homo sapiens
aattccttttcacag

SEQ ID NO: 1292241 - DNA, 15 bp, Homo sapiens
gaattccttttcaca

SEQ ID NO: 1292242 - DNA, 15 bp, Homo sapiens
tgaattccttttcac

SEQ ID NO: 1292243 - DNA, 15 bp, Homo sapiens
ttgaattccttttca

SEQ ID NO: 1292244 - DNA, 15 bp, Homo sapiens
cttgaattccttttc

SEQ ID NO: 1292245 - DNA, 15 bp, Homo sapiens
acttgaattcctttt

SEQ ID NO: 1292246 - DNA, 15 bp, Homo sapiens
cacttgaattccttt

SEQ ID NO: 1292247 - DNA, 15 bp, Homo sapiens
tcacttgaattcctt

SEQ ID NO: 1292248 - DNA, 15 bp, Homo sapiens
ctcacttgaattcct

SEQ ID NO: 1292249 - DNA, 15 bp, Homo sapiens
actcacttgaattcc

SEQ ID NO: 1292250 - DNA, 15 bp, Homo sapiens
aactcacttgaattc

SEQ ID NO: 1292251 - DNA, 15 bp, Homo sapiens
gaactcacttgaatt

SEQ ID NO: 1292252 - DNA, 15 bp, Homo sapiens
agaactcacttgaat

SEQ ID NO: 1292253 - DNA, 15 bp, Homo sapiens
aagaactcacttgaa

SEQ ID NO: 1292254 - DNA, 15 bp, Homo sapiens
taagaactcacttga

SEQ ID NO: 1292255 - DNA, 15 bp, Homo sapiens
ataagaactcacttg

SEQ ID NO: 1292256 - DNA, 15 bp, Homo sapiens
aataagaactcactt

SEQ ID NO: 1292257 - DNA, 15 bp, Homo sapiens
caataagaactcact

SEQ ID NO: 1292258 - DNA, 15 bp, Homo sapiens
gcaataagaactcac

SEQ ID NO: 1292259 - DNA, 15 bp, Homo sapiens
agcaataagaactca

SEQ ID NO: 1292260 - DNA, 15 bp, Homo sapiens
aagcaataagaactc

SEQ ID NO: 1292261 - DNA, 15 bp, Homo sapiens
taagcaataagaact

SEQ ID NO: 1292262 - DNA, 15 bp, Homo sapiens
ataagcaataagaac

SEQ ID NO: 1292263 - DNA, 15 bp, Homo sapiens
aataagcaataagaa

SEQ ID NO: 1292264 - DNA, 15 bp, Homo sapiens
caataagcaataaga

SEQ ID NO: 1292265 - DNA, 15 bp, Homo sapiens
ccaataagcaataag

SEQ ID NO: 1292266 - DNA, 15 bp, Homo sapiens
cccaataagcaataa

SEQ ID NO: 1292267 - DNA, 15 bp, Homo sapiens
acccaataagcaata

SEQ ID NO: 1292268 - DNA, 15 bp, Homo sapiens
tacccaataagcaat

SEQ ID NO: 1292269 - DNA, 15 bp, Homo sapiens
ctacccaataagcaa

SEQ ID NO: 1292270 - DNA, 15 bp, Homo sapiens
tctacccaataagca

SEQ ID NO: 1292271 - DNA, 15 bp, Homo sapiens
ttctacccaataagc

SEQ ID NO: 1292272 - DNA, 15 bp, Homo sapiens
cttctacccaataag

SEQ ID NO: 1292273 - DNA, 15 bp, Homo sapiens
tcttctacccaataa

SEQ ID NO: 1292274 - DNA, 15 bp, Homo sapiens
ctcttctacccaata

SEQ ID NO: 1292275 - DNA, 15 bp, Homo sapiens
cctcttctacccaat

SEQ ID NO: 1292276 - DNA, 15 bp, Homo sapiens
ccctcttctacccaa

SEQ ID NO: 1292277 - DNA, 15 bp, Homo sapiens
accctcttctaccca

SEQ ID NO: 1292278 - DNA, 15 bp, Homo sapiens
aaccctcttctaccc

SEQ ID NO: 1292279 - DNA, 15 bp, Homo sapiens
aaaccctcttctacc

SEQ ID NO: 1292280 - DNA, 15 bp, Homo sapiens
aaaaccctcttctac

SEQ ID NO: 1292281 - DNA, 15 bp, Homo sapiens
taaaaccctcttcta

SEQ ID NO: 1292282 - DNA, 15 bp, Homo sapiens
ataaaaccctcttct

SEQ ID NO: 1292283 - DNA, 15 bp, Homo sapiens
cataaaaccctcttc

SEQ ID NO: 1292284 - DNA, 15 bp, Homo sapiens
gcataaaaccctctt

SEQ ID NO: 1292285 - DNA, 15 bp, Homo sapiens
agcataaaaccctct

SEQ ID NO: 1292286 - DNA, 15 bp, Homo sapiens
aagcataaaaccctc

SEQ ID NO: 1292287 - DNA, 15 bp, Homo sapiens
aaagcataaaaccct

SEQ ID NO: 1292288 - DNA, 15 bp, Homo sapiens
taaagcataaaaccc

SEQ ID NO: 1292289 - DNA, 15 bp, Homo sapiens
ttaaagcataaaacc

SEQ ID NO: 1292290 - DNA, 15 bp, Homo sapiens
attaaagcataaaac

SEQ ID NO: 1292291 - DNA, 15 bp, Homo sapiens
aattaaagcataaaa

SEQ ID NO: 1292292 - DNA, 15 bp, Homo sapiens
aaattaaagcataaa

SEQ ID NO: 1292293 - DNA, 15 bp, Homo sapiens
taaattaaagcataa

SEQ ID NO: 1292294 - DNA, 15 bp, Homo sapiens
ttaaattaaagcata

SEQ ID NO: 1292295 - DNA, 15 bp, Homo sapiens
tttaaattaaagcat

SEQ ID NO: 1292296 - DNA, 15 bp, Homo sapiens
ttttaaattaaagca

SEQ ID NO: 1292297 - DNA, 15 bp, Homo sapiens
tttttaaattaaagc

SEQ ID NO: 1292298 - DNA, 15 bp, Homo sapiens
atttttaaattaaag

SEQ ID NO: 1292299 - DNA, 15 bp, Homo sapiens
catttttaaattaaa

SEQ ID NO: 1292300 - DNA, 15 bp, Homo sapiens
ccatttttaaattaa

SEQ ID NO: 1292301 - DNA, 15 bp, Homo sapiens
accatttttaaatta

SEQ ID NO: 1292302 - DNA, 15 bp, Homo sapiens
aaccatttttaaatt

SEQ ID NO: 1292303 - DNA, 15 bp, Homo sapiens
caaccatttttaaat

SEQ ID NO: 1292304 - DNA, 15 bp, Homo sapiens
tcaaccatttttaaa

SEQ ID NO: 1292305 - DNA, 15 bp, Homo sapiens
cctcaaccattttta

SEQ ID NO: 1292306 - DNA, 15 bp, Homo sapiens
tcctcaaccattttt

SEQ ID NO: 1292307 - DNA, 15 bp, Homo sapiens
atcctcaaccatttt

SEQ ID NO: 1292308 - DNA, 15 bp, Homo sapiens
aatcctcaaccattt

SEQ ID NO: 1292309 - DNA, 15 bp, Homo sapiens
aaatcctcaaccatt

SEQ ID NO: 1292310 - DNA, 15 bp, Homo sapiens
taaatcctcaaccat

SEQ ID NO: 1292311 - DNA, 15 bp, Homo sapiens
ttaaatcctcaacca

SEQ ID NO: 1292312 - DNA, 15 bp, Homo sapiens
attaaatcctcaacc

SEQ ID NO: 1292313 - DNA, 15 bp, Homo sapiens
tattaaatcctcaac

SEQ ID NO: 1292314 - DNA, 15 bp, Homo sapiens
ctattaaatcctcaa

SEQ ID NO: 1292315 - DNA, 15 bp, Homo sapiens
actattaaatcctca

SEQ ID NO: 1292316 - DNA, 15 bp, Homo sapiens
tactattaaatcctc

SEQ ID NO: 1292317 - DNA, 15 bp, Homo sapiens
atactattaaatcct

SEQ ID NO: 1292318 - DNA, 15 bp, Homo sapiens
aatactattaaatcc

SEQ ID NO: 1292319 - DNA, 15 bp, Homo sapiens
aaatactattaaatc

SEQ ID NO: 1292320 - DNA, 15 bp, Homo sapiens
gaaatactattaaat

SEQ ID NO: 1292321 - DNA, 15 bp, Homo sapiens
agaaatactattaaa

SEQ ID NO: 1292322 - DNA, 15 bp, Homo sapiens
cagaaatactattaa

SEQ ID NO: 1292323 - DNA, 15 bp, Homo sapiens
acagaaatactatta

SEQ ID NO: 1292324 - DNA, 15 bp, Homo sapiens
gacagaaatactatt

SEQ ID NO: 1292325 - DNA, 15 bp, Homo sapiens
agacagaaatactat

SEQ ID NO: 1292326 - DNA, 15 bp, Homo sapiens
aagacagaaatacta

SEQ ID NO: 1292327 - DNA, 15 bp, Homo sapiens
aaagacagaaatact

SEQ ID NO: 1292328 - DNA, 15 bp, Homo sapiens
taaagacagaaatac

SEQ ID NO: 1292329 - DNA, 15 bp, Homo sapiens
ttaaagacagaaata

SEQ ID NO: 1292330 - DNA, 15 bp, Homo sapiens
tttaaagacagaaat

SEQ ID NO: 1292331 - DNA, 15 bp, Homo sapiens
ttttaaagacagaaa

SEQ ID NO: 1292332 - DNA, 15 bp, Homo sapiens
cttttaaagacagaa

SEQ ID NO: 1292333 - DNA, 15 bp, Homo sapiens
tcttttaaagacaga

SEQ ID NO: 1292334 - DNA, 15 bp, Homo sapiens
atcttttaaagacag

SEQ ID NO: 1292335 - DNA, 15 bp, Homo sapiens
tatcttttaaagaca

SEQ ID NO: 1292336 - DNA, 15 bp, Homo sapiens
ttatcttttaaagac

SEQ ID NO: 1292337 - DNA, 15 bp, Homo sapiens
attatcttttaaaga

SEQ ID NO: 1292338 - DNA, 15 bp, Homo sapiens
tattatcttttaaag

SEQ ID NO: 1292339 - DNA, 15 bp, Homo sapiens
ttattatcttttaaa

SEQ ID NO: 1292340 - DNA, 15 bp, Homo sapiens
gttattatcttttaa

SEQ ID NO: 1292341 - DNA, 15 bp, Homo sapiens
tgttattatctttta

SEQ ID NO: 1292342 - DNA, 15 bp, Homo sapiens
atgttattatctttt

SEQ ID NO: 1292343 - DNA, 15 bp, Homo sapiens
aatgttattatcttt

SEQ ID NO: 1292344 - DNA, 15 bp, Homo sapiens
taatgttattatctt

SEQ ID NO: 1292345 - DNA, 15 bp, Homo sapiens
gtaatgttattatct

SEQ ID NO: 1292346 - DNA, 15 bp, Homo sapiens
tgtaatgttattatc

SEQ ID NO: 1292347 - DNA, 15 bp, Homo sapiens
atgtaatgttattat

SEQ ID NO: 1292348 - DNA, 15 bp, Homo sapiens
aatgtaatgttatta

SEQ ID NO: 1292349 - DNA, 15 bp, Homo sapiens
caatgtaatgttatt

SEQ ID NO: 1292350 - DNA, 15 bp, Homo sapiens
gcaatgtaatgttat

SEQ ID NO: 1292351 - DNA, 15 bp, Homo sapiens
agcaatgtaatgtta

SEQ ID NO: 1292352 - DNA, 15 bp, Homo sapiens
aagcaatgtaatgtt

SEQ ID NO: 1292353 - DNA, 15 bp, Homo sapiens
aaagcaatgtaatgt

SEQ ID NO: 1292354 - DNA, 15 bp, Homo sapiens
aaaagcaatgtaatg

SEQ ID NO: 1292355 - DNA, 15 bp, Homo sapiens
aaaaagcaatgtaat

SEQ ID NO: 1292356 - DNA, 15 bp, Homo sapiens
aaaaaagcaatgtaa

SEQ ID NO: 1292357 - DNA, 15 bp, Homo sapiens
taaaaaagcaatgta

SEQ ID NO: 1292358 - DNA, 15 bp, Homo sapiens
gtaaaaaagcaatgt

SEQ ID NO: 1292359 - DNA, 15 bp, Homo sapiens
agtaaaaaagcaatg

SEQ ID NO: 1292360 - DNA, 15 bp, Homo sapiens
aagtaaaaaagcaat

SEQ ID NO: 1292361 - DNA, 15 bp, Homo sapiens
aaagtaaaaaagcaa

SEQ ID NO: 1292362 - DNA, 15 bp, Homo sapiens
taaagtaaaaaagca

SEQ ID NO: 1292363 - DNA, 15 bp, Homo sapiens
ataaagtaaaaaagc

SEQ ID NO: 1292364 - DNA, 15 bp, Homo sapiens
aataaagtaaaaaag

SEQ ID NO: 1292365 - DNA, 15 bp, Homo sapiens
aaataaagtaaaaaa

SEQ ID NO: 1292366 - DNA, 15 bp, Homo sapiens
caaataaagtaaaaa

SEQ ID NO: 1292367 - DNA, 15 bp, Homo sapiens
acaaataaagtaaaa

SEQ ID NO: 1292368 - DNA, 15 bp, Homo sapiens
tacaaataaagtaaa

SEQ ID NO: 1292369 - DNA, 15 bp, Homo sapiens
atacaaataaagtaa

SEQ ID NO: 1292370 - DNA, 15 bp, Homo sapiens
aatacaaataaagta

SEQ ID NO: 1292371 - DNA, 15 bp, Homo sapiens
taatacaaataaagt

SEQ ID NO: 1292372 - DNA, 15 bp, Homo sapiens
ctaatacaaataaag

SEQ ID NO: 1292373 - DNA, 15 bp, Homo sapiens
tctaatacaaataaa

SEQ ID NO: 1292374 - DNA, 15 bp, Homo sapiens
ttctaatacaaataa

SEQ ID NO: 1292375 - DNA, 15 bp, Homo sapiens
tttctaatacaaata

SEQ ID NO: 1292376 - DNA, 15 bp, Homo sapiens
ttttctaatacaaat

SEQ ID NO: 1292377 - DNA, 15 bp, Homo sapiens
tttttctaatacaaa

SEQ ID NO: 1292378 - DNA, 15 bp, Homo sapiens
atttttctaatacaa

SEQ ID NO: 1292379 - DNA, 15 bp, Homo sapiens
tatttttctaataca

SEQ ID NO: 1292380 - DNA, 15 bp, Homo sapiens
atatttttctaatac

SEQ ID NO: 1292381 - DNA, 15 bp, Homo sapiens
aatatttttctaata

SEQ ID NO: 1292382 - DNA, 15 bp, Homo sapiens
gaatatttttctaat

SEQ ID NO: 1292383 - DNA, 15 bp, Homo sapiens
agaatatttttctaa

SEQ ID NO: 1292384 - DNA, 15 bp, Homo sapiens
cagaatatttttcta

SEQ ID NO: 1292385 - DNA, 15 bp, Homo sapiens
tcagaatatttttct

SEQ ID NO: 1292386 - DNA, 15 bp, Homo sapiens
gtcagaatatttttc

SEQ ID NO: 1292387 - DNA, 15 bp, Homo sapiens
agtcagaatattttt

SEQ ID NO: 1292388 - DNA, 15 bp, Homo sapiens
gagtcagaatatttt

SEQ ID NO: 1292389 - DNA, 15 bp, Homo sapiens
agagtcagaatattt

SEQ ID NO: 1292390 - DNA, 15 bp, Homo sapiens
gagagtcagaatatt

SEQ ID NO: 1292391 - DNA, 15 bp, Homo sapiens
ggagagtcagaatat

SEQ ID NO: 1292392 - DNA, 15 bp, Homo sapiens
tggagagtcagaata

SEQ ID NO: 1292393 - DNA, 15 bp, Homo sapiens
atggagagtcagaat

SEQ ID NO: 1292394 - DNA, 15 bp, Homo sapiens
aatggagagtcagaa

SEQ ID NO: 1292395 - DNA, 15 bp, Homo sapiens
taatggagagtcaga

SEQ ID NO: 1292396 - DNA, 15 bp, Homo sapiens
ctaatggagagtcag

SEQ ID NO: 1292397 - DNA, 15 bp, Homo sapiens
cctaatggagagtca

SEQ ID NO: 1292398 - DNA, 15 bp, Homo sapiens
gcctaatggagagtc

SEQ ID NO: 1292399 - DNA, 15 bp, Homo sapiens
tgcctaatggagagt

SEQ ID NO: 1292400 - DNA, 15 bp, Homo sapiens
ctgcctaatggagag

SEQ ID NO: 1292401 - DNA, 15 bp, Homo sapiens
actgcctaatggaga

SEQ ID NO: 1292402 - DNA, 15 bp, Homo sapiens
aactgcctaatggag

SEQ ID NO: 1292403 - DNA, 15 bp, Homo sapiens
caactgcctaatgga

SEQ ID NO: 1292404 - DNA, 15 bp, Homo sapiens
acaactgcctaatgg

SEQ ID NO: 1292405 - DNA, 15 bp, Homo sapiens
gacaactgcctaatg

SEQ ID NO: 1292406 - DNA, 15 bp, Homo sapiens
ggacaactgcctaat

SEQ ID NO: 1292407 - DNA, 15 bp, Homo sapiens
aggacaactgcctaa

SEQ ID NO: 1292408 - DNA, 15 bp, Homo sapiens
aaggacaactgccta

SEQ ID NO: 1292409 - DNA, 15 bp, Homo sapiens
caaggacaactgcct

SEQ ID NO: 1292410 - DNA, 15 bp, Homo sapiens
tcaaggacaactgcc

SEQ ID NO: 1292411 - DNA, 15 bp, Homo sapiens
atcaaggacaactgc

SEQ ID NO: 1292412 - DNA, 15 bp, Homo sapiens
tatcaaggacaactg

SEQ ID NO: 1292413 - DNA, 15 bp, Homo sapiens
ctatcaaggacaact

SEQ ID NO: 1292414 - DNA, 15 bp, Homo sapiens
tctatcaaggacaac

SEQ ID NO: 1292415 - DNA, 15 bp, Homo sapiens
ctctatcaaggacaa

SEQ ID NO: 1292416 - DNA, 15 bp, Homo sapiens
actctatcaaggaca

SEQ ID NO: 1292417 - DNA, 15 bp, Homo sapiens
cactctatcaaggac

SEQ ID NO: 1292418 - DNA, 15 bp, Homo sapiens
ccactctatcaagga

SEQ ID NO: 1292419 - DNA, 15 bp, Homo sapiens
cccactctatcaagg

SEQ ID NO: 1292420 - DNA, 15 bp, Homo sapiens
tcccactctatcaag

SEQ ID NO: 1292421 - DNA, 15 bp, Homo sapiens
ttcccactctatcaa

SEQ ID NO: 1292422 - DNA, 15 bp, Homo sapiens
tttcccactctatca

SEQ ID NO: 1292423 - DNA, 15 bp, Homo sapiens
ttttcccactctatc

SEQ ID NO: 1292424 - DNA, 15 bp, Homo sapiens
tttttcccactctat

SEQ ID NO: 1292425 - DNA, 15 bp, Homo sapiens
ctttttcccactcta

SEQ ID NO: 1292426 - DNA, 15 bp, Homo sapiens
cctttttcccactct

SEQ ID NO: 1292427 - DNA, 15 bp, Homo sapiens
gcctttttcccactc

SEQ ID NO: 1292428 - DNA, 15 bp, Homo sapiens
agcctttttcccact

SEQ ID NO: 1292429 - DNA, 15 bp, Homo sapiens
gagcctttttcccac

SEQ ID NO: 1292430 - DNA, 15 bp, Homo sapiens
tgagcctttttccca

SEQ ID NO: 1292431 - DNA, 15 bp, Homo sapiens
ctgagcctttttccc

SEQ ID NO: 1292432 - DNA, 15 bp, Homo sapiens
tctgagcctttttcc

SEQ ID NO: 1292433 - DNA, 15 bp, Homo sapiens
ttctgagcctttttc

SEQ ID NO: 1292434 - DNA, 15 bp, Homo sapiens
attctgagccttttt

SEQ ID NO: 1292435 - DNA, 15 bp, Homo sapiens
aattctgagcctttt

SEQ ID NO: 1292436 - DNA, 15 bp, Homo sapiens
gaattctgagccttt

SEQ ID NO: 1292437 - DNA, 15 bp, Homo sapiens
ggaattctgagcctt

SEQ ID NO: 1292438 - DNA, 15 bp, Homo sapiens
cggaattctgagcct

SEQ ID NO: 1292439 - DNA, 15 bp, Homo sapiens
acggaattctgagcc

SEQ ID NO: 1292440 - DNA, 15 bp, Homo sapiens
gacggaattctgagc

SEQ ID NO: 1292441 - DNA, 15 bp, Homo sapiens
tgacggaattctgag

SEQ ID NO: 1292442 - DNA, 15 bp, Homo sapiens
ttgacggaattctga

SEQ ID NO: 1292443 - DNA, 15 bp, Homo sapiens
cttgacggaattctg

SEQ ID NO: 1292444 - DNA, 15 bp, Homo sapiens
gcttgacggaattct

SEQ ID NO: 1292445 - DNA, 15 bp, Homo sapiens
tgcttgacggaattc

SEQ ID NO: 1292446 - DNA, 15 bp, Homo sapiens
ctgcttgacggaatt

SEQ ID NO: 1292447 - DNA, 15 bp, Homo sapiens
cctgcttgacggaat

SEQ ID NO: 1292448 - DNA, 15 bp, Homo sapiens
acctgcttgacggaa

SEQ ID NO: 1292449 - DNA, 15 bp, Homo sapiens
cacctgcttgacgga

SEQ ID NO: 1292450 - DNA, 15 bp, Homo sapiens
acacctgcttgacgg

SEQ ID NO: 1292451 - DNA, 15 bp, Homo sapiens
tacacctgcttgacg

SEQ ID NO: 1292452 - DNA, 15 bp, Homo sapiens
atacacctgcttgac

SEQ ID NO: 1292453 - DNA, 15 bp, Homo sapiens
gatacacctgcttga

SEQ ID NO: 1292454 - DNA, 15 bp, Homo sapiens
tgatacacctgcttg

SEQ ID NO: 1292455 - DNA, 15 bp, Homo sapiens
ttgatacacctgctt

SEQ ID NO: 1292456 - DNA, 15 bp, Homo sapiens
cttgatacacctgct

SEQ ID NO: 1292457 - DNA, 15 bp, Homo sapiens
tcttgatacacctgc

SEQ ID NO: 1292458 - DNA, 15 bp, Homo sapiens
ttcttgatacacctg

SEQ ID NO: 1292459 - DNA, 15 bp, Homo sapiens
cttcttgatacacct

SEQ ID NO: 1292460 - DNA, 15 bp, Homo sapiens
acttcttgatacacc

SEQ ID NO: 1292461 - DNA, 15 bp, Homo sapiens
aacttcttgatacac

SEQ ID NO: 1292462 - DNA, 15 bp, Homo sapiens
caacttcttgataca

SEQ ID NO: 1292463 - DNA, 15 bp, Homo sapiens
gcaacttcttgatac

SEQ ID NO: 1292464 - DNA, 15 bp, Homo sapiens
agcaacttcttgata

SEQ ID NO: 1292465 - DNA, 15 bp, Homo sapiens
tagcaacttcttgat

SEQ ID NO: 1292466 - DNA, 15 bp, Homo sapiens
atagcaacttcttga

SEQ ID NO: 1292467 - DNA, 15 bp, Homo sapiens
aatagcaacttcttg

SEQ ID NO: 1292468 - DNA, 15 bp, Homo sapiens
aaatagcaacttctt

SEQ ID NO: 1292469 - DNA, 15 bp, Homo sapiens
caaatagcaacttct

SEQ ID NO: 1292470 - DNA, 15 bp, Homo sapiens
ccaaatagcaacttc

SEQ ID NO: 1292471 - DNA, 15 bp, Homo sapiens
accaaatagcaactt

SEQ ID NO: 1292472 - DNA, 15 bp, Homo sapiens
gaccaaatagcaact

SEQ ID NO: 1292473 - DNA, 15 bp, Homo sapiens
agaccaaatagcaac

SEQ ID NO: 1292474 - DNA, 15 bp, Homo sapiens
cagaccaaatagcaa

SEQ ID NO: 1292475 - DNA, 15 bp, Homo sapiens
acagaccaaatagca

SEQ ID NO: 1292476 - DNA, 15 bp, Homo sapiens
aacagaccaaatagc

SEQ ID NO: 1292477 - DNA, 15 bp, Homo sapiens
caacagaccaaatag

SEQ ID NO: 1292478 - DNA, 15 bp, Homo sapiens
acaacagaccaaata

SEQ ID NO: 1292479 - DNA, 15 bp, Homo sapiens
gacaacagaccaaat

SEQ ID NO: 1292480 - DNA, 15 bp, Homo sapiens
agacaacagaccaaa

SEQ ID NO: 1292481 - DNA, 15 bp, Homo sapiens
aagacaacagaccaa

SEQ ID NO: 1292482 - DNA, 15 bp, Homo sapiens
aaagacaacagacca

SEQ ID NO: 1292483 - DNA, 15 bp, Homo sapiens
gaaagacaacagacc

SEQ ID NO: 1292484 - DNA, 15 bp, Homo sapiens
ggaaagacaacagac

SEQ ID NO: 1292485 - DNA, 15 bp, Homo sapiens
aggaaagacaacaga

SEQ ID NO: 1292486 - DNA, 15 bp, Homo sapiens
caggaaagacaacag

SEQ ID NO: 1292487 - DNA, 15 bp, Homo sapiens
ccaggaaagacaaca

SEQ ID NO: 1292488 - DNA, 15 bp, Homo sapiens
accaggaaagacaac

SEQ ID NO: 1292489 - DNA, 15 bp, Homo sapiens
aaccaggaaagacaa

SEQ ID NO: 1292490 - DNA, 15 bp, Homo sapiens
taaccaggaaagaca

SEQ ID NO: 1292491 - DNA, 15 bp, Homo sapiens
ataaccaggaaagac

SEQ ID NO: 1292492 - DNA, 15 bp, Homo sapiens
aataaccaggaaaga

SEQ ID NO: 1292493 - DNA, 15 bp, Homo sapiens
gaataaccaggaaag

SEQ ID NO: 1292494 - DNA, 15 bp, Homo sapiens
tgaataaccaggaaa

SEQ ID NO: 1292495 - DNA, 15 bp, Homo sapiens
atgaataaccaggaa

SEQ ID NO: 1292496 - DNA, 15 bp, Homo sapiens
aatgaataaccagga

SEQ ID NO: 1292497 - DNA, 15 bp, Homo sapiens
taatgaataaccagg

SEQ ID NO: 1292498 - DNA, 15 bp, Homo sapiens
ataatgaataaccag

SEQ ID NO: 1292499 - DNA, 15 bp, Homo sapiens
aataatgaataacca

SEQ ID NO: 1292500 - DNA, 15 bp, Homo sapiens
gaataatgaataacc

SEQ ID NO: 1292501 - DNA, 15 bp, Homo sapiens
tgaataatgaataac

SEQ ID NO: 1292502 - DNA, 15 bp, Homo sapiens
ctgaataatgaataa

SEQ ID NO: 1292503 - DNA, 15 bp, Homo sapiens
actgaataatgaata

SEQ ID NO: 1292504 - DNA, 15 bp, Homo sapiens
aactgaataatgaat

SEQ ID NO: 1292505 - DNA, 15 bp, Homo sapiens
aaactgaataatgaa

SEQ ID NO: 1292506 - DNA, 15 bp, Homo sapiens
taaactgaataatga

SEQ ID NO: 1292507 - DNA, 15 bp, Homo sapiens
ttaaactgaataatg

SEQ ID NO: 1292508 - DNA, 15 bp, Homo sapiens
gttaaactgaataat

SEQ ID NO: 1292509 - DNA, 15 bp, Homo sapiens
tgttaaactgaataa

SEQ ID NO: 1292510 - DNA, 15 bp, Homo sapiens
gtgttaaactgaata

SEQ ID NO: 1292511 - DNA, 15 bp, Homo sapiens
tgtgttaaactgaat

SEQ ID NO: 1292512 - DNA, 15 bp, Homo sapiens
ctgtgttaaactgaa

SEQ ID NO: 1292513 - DNA, 15 bp, Homo sapiens
tctgtgttaaactga

SEQ ID NO: 1292514 - DNA, 15 bp, Homo sapiens
ttctgtgttaaactg

SEQ ID NO: 1292515 - DNA, 15 bp, Homo sapiens
tttctgtgttaaact

SEQ ID NO: 1292516 - DNA, 15 bp, Homo sapiens
atttctgtgttaaac

SEQ ID NO: 1292517 - DNA, 15 bp, Homo sapiens
gatttctgtgttaaa

SEQ ID NO: 1292518 - DNA, 15 bp, Homo sapiens
tgatttctgtgttaa

SEQ ID NO: 1292519 - DNA, 15 bp, Homo sapiens
atgatttctgtgtta

SEQ ID NO: 1292520 - DNA, 15 bp, Homo sapiens
aatgatttctgtgtt

SEQ ID NO: 1292521 - DNA, 15 bp, Homo sapiens
taatgatttctgtgt

SEQ ID NO: 1292522 - DNA, 15 bp, Homo sapiens
ttaatgatttctgtg

SEQ ID NO: 1292523 - DNA, 15 bp, Homo sapiens
tttaatgatttctgt

SEQ ID NO: 1292524 - DNA, 15 bp, Homo sapiens
gtttaatgatttctg

SEQ ID NO: 1292525 - DNA, 15 bp, Homo sapiens
tgtttaatgatttct

SEQ ID NO: 1292526 - DNA, 15 bp, Homo sapiens
atgtttaatgatttc

SEQ ID NO: 1292527 - DNA, 15 bp, Homo sapiens
tatgtttaatgattt

SEQ ID NO: 1292528 - DNA, 15 bp, Homo sapiens
gtatgtttaatgatt

SEQ ID NO: 1292529 - DNA, 15 bp, Homo sapiens
tgtatgtttaatgat

SEQ ID NO: 1292530 - DNA, 15 bp, Homo sapiens
gtgtatgtttaatga

SEQ ID NO: 1292531 - DNA, 15 bp, Homo sapiens
agtgtatgtttaatg

SEQ ID NO: 1292532 - DNA, 15 bp, Homo sapiens
cagtgtatgtttaat

SEQ ID NO: 1292533 - DNA, 15 bp, Homo sapiens
acagtgtatgtttaa

SEQ ID NO: 1292534 - DNA, 15 bp, Homo sapiens
aacagtgtatgttta

SEQ ID NO: 1292535 - DNA, 15 bp, Homo sapiens
aaacagtgtatgttt

SEQ ID NO: 1292536 - DNA, 15 bp, Homo sapiens
aaaacagtgtatgtt

SEQ ID NO: 1292537 - DNA, 15 bp, Homo sapiens
gaaaacagtgtatgt

SEQ ID NO: 1292538 - DNA, 15 bp, Homo sapiens
agaaaacagtgtatg

SEQ ID NO: 1292539 - DNA, 15 bp, Homo sapiens
tagaaaacagtgtat

SEQ ID NO: 1292540 - DNA, 15 bp, Homo sapiens
atagaaaacagtgta

SEQ ID NO: 1292541 - DNA, 15 bp, Homo sapiens
catagaaaacagtgt

SEQ ID NO: 1292542 - DNA, 15 bp, Homo sapiens
ccatagaaaacagtg

SEQ ID NO: 1292543 - DNA, 15 bp, Homo sapiens
accatagaaaacagt

SEQ ID NO: 1292544 - DNA, 15 bp, Homo sapiens
caccatagaaaacag

SEQ ID NO: 1292545 - DNA, 15 bp, Homo sapiens
gcaccatagaaaaca

SEQ ID NO: 1292546 - DNA, 15 bp, Homo sapiens
ggcaccatagaaaac

SEQ ID NO: 1292547 - DNA, 15 bp, Homo sapiens
tggcaccatagaaaa

SEQ ID NO: 1292548 - DNA, 15 bp, Homo sapiens
ttggcaccatagaaa

SEQ ID NO: 1292549 - DNA, 15 bp, Homo sapiens
tttggcaccatagaa

SEQ ID NO: 1292550 - DNA, 15 bp, Homo sapiens
gtttggcaccataga

SEQ ID NO: 1292551 - DNA, 15 bp, Homo sapiens
tgtttggcaccatag

SEQ ID NO: 1292552 - DNA, 15 bp, Homo sapiens
atgtttggcaccata

SEQ ID NO: 1292553 - DNA, 15 bp, Homo sapiens
gatgtttggcaccat

SEQ ID NO: 1292554 - DNA, 15 bp, Homo sapiens
tgatgtttggcacca

SEQ ID NO: 1292555 - DNA, 15 bp, Homo sapiens
ttgatgtttggcacc

SEQ ID NO: 1292556 - DNA, 15 bp, Homo sapiens
tttgatgtttggcac

SEQ ID NO: 1292557 - DNA, 15 bp, Homo sapiens
atttgatgtttggca

SEQ ID NO: 1292558 - DNA, 15 bp, Homo sapiens
catttgatgtttggc

SEQ ID NO: 1292559 - DNA, 15 bp, Homo sapiens
tcatttgatgtttgg

SEQ ID NO: 1292560 - DNA, 15 bp, Homo sapiens
ttcatttgatgtttg

SEQ ID NO: 1292561 - DNA, 15 bp, Homo sapiens
tttcatttgatgttt

SEQ ID NO: 1292562 - DNA, 15 bp, Homo sapiens
gtttcatttgatgtt

SEQ ID NO: 1292563 - DNA, 15 bp, Homo sapiens
tgtttcatttgatgt

SEQ ID NO: 1292564 - DNA, 15 bp, Homo sapiens
atgtttcatttgatg

SEQ ID NO: 1292565 - DNA, 15 bp, Homo sapiens
catgtttcatttgat

SEQ ID NO: 1292566 - DNA, 15 bp, Homo sapiens
gcatgtttcatttga

SEQ ID NO: 1292567 - DNA, 15 bp, Homo sapiens
agcatgtttcatttg

SEQ ID NO: 1292568 - DNA, 15 bp, Homo sapiens
aagcatgtttcattt

SEQ ID NO: 1292569 - DNA, 15 bp, Homo sapiens
taagcatgtttcatt

SEQ ID NO: 1292570 - DNA, 15 bp, Homo sapiens
ctaagcatgtttcat

SEQ ID NO: 1292571 - DNA, 15 bp, Homo sapiens
cctaagcatgtttca

SEQ ID NO: 1292572 - DNA, 15 bp, Homo sapiens
gcctaagcatgtttc

SEQ ID NO: 1292573 - DNA, 15 bp, Homo sapiens
ggcctaagcatgttt

SEQ ID NO: 1292574 - DNA, 15 bp, Homo sapiens
aggcctaagcatgtt

SEQ ID NO: 1292575 - DNA, 15 bp, Homo sapiens
caggcctaagcatgt

SEQ ID NO: 1292576 - DNA, 15 bp, Homo sapiens
acaggcctaagcatg

SEQ ID NO: 1292577 - DNA, 15 bp, Homo sapiens
cacaggcctaagcat

SEQ ID NO: 1292578 - DNA, 15 bp, Homo sapiens
tcacaggcctaagca

SEQ ID NO: 1292579 - DNA, 15 bp, Homo sapiens
ttcacaggcctaagc

SEQ ID NO: 1292580 - DNA, 15 bp, Homo sapiens
gttcacaggcctaag

SEQ ID NO: 1292581 - DNA, 15 bp, Homo sapiens
ggttcacaggcctaa

SEQ ID NO: 1292582 - DNA, 15 bp, Homo sapiens
tggttcacaggccta

SEQ ID NO: 1292583 - DNA, 15 bp, Homo sapiens
ttggttcacaggcct

SEQ ID NO: 1292584 - DNA, 15 bp, Homo sapiens
cttggttcacaggcc

SEQ ID NO: 1292585 - DNA, 15 bp, Homo sapiens
tcttggttcacaggc

SEQ ID NO: 1292586 - DNA, 15 bp, Homo sapiens
ttcttggttcacagg

SEQ ID NO: 1292587 - DNA, 15 bp, Homo sapiens
gttcttggttcacag

SEQ ID NO: 1292588 - DNA, 15 bp, Homo sapiens
agttcttggttcaca

SEQ ID NO: 1292589 - DNA, 15 bp, Homo sapiens
aagttcttggttcac

SEQ ID NO: 1292590 - DNA, 15 bp, Homo sapiens
gaagttcttggttca

SEQ ID NO: 1292591 - DNA, 15 bp, Homo sapiens
agaagttcttggttc

SEQ ID NO: 1292592 - DNA, 15 bp, Homo sapiens
tagaagttcttggtt

SEQ ID NO: 1292593 - DNA, 15 bp, Homo sapiens
ctagaagttcttggt

SEQ ID NO: 1292594 - DNA, 15 bp, Homo sapiens
tctagaagttcttgg

SEQ ID NO: 1292595 - DNA, 15 bp, Homo sapiens
ttctagaagttcttg

SEQ ID NO: 1292596 - DNA, 15 bp, Homo sapiens
tttctagaagttctt

SEQ ID NO: 1292597 - DNA, 15 bp, Homo sapiens
gtttctagaagttct

SEQ ID NO: 1292598 - DNA, 15 bp, Homo sapiens
ggtttctagaagttc

SEQ ID NO: 1292599 - DNA, 15 bp, Homo sapiens
tggtttctagaagtt

SEQ ID NO: 1292600 - DNA, 15 bp, Homo sapiens
ctggtttctagaagt

SEQ ID NO: 1292601 - DNA, 15 bp, Homo sapiens
tctggtttctagaag

SEQ ID NO: 1292602 - DNA, 15 bp, Homo sapiens
gtctggtttctagaa

SEQ ID NO: 1292603 - DNA, 15 bp, Homo sapiens
tgtctggtttctaga

SEQ ID NO: 1292604 - DNA, 15 bp, Homo sapiens
ttgtctggtttctag

SEQ ID NO: 1292605 - DNA, 15 bp, Homo sapiens
attgtctggtttcta

SEQ ID NO: 1292606 - DNA, 15 bp, Homo sapiens
aattgtctggtttct

SEQ ID NO: 1292607 - DNA, 15 bp, Homo sapiens
taattgtctggtttc

SEQ ID NO: 1292608 - DNA, 15 bp, Homo sapiens
gtaattgtctggttt

SEQ ID NO: 1292609 - DNA, 15 bp, Homo sapiens
ggtaattgtctggtt

SEQ ID NO: 1292610 - DNA, 15 bp, Homo sapiens
tggtaattgtctggt

SEQ ID NO: 1292611 - DNA, 15 bp, Homo sapiens
ttggtaattgtctgg

SEQ ID NO: 1292612 - DNA, 15 bp, Homo sapiens
cttggtaattgtctg

SEQ ID NO: 1292613 - DNA, 15 bp, Homo sapiens
ccttggtaattgtct

SEQ ID NO: 1292614 - DNA, 15 bp, Homo sapiens
cccttggtaattgtc

SEQ ID NO: 1292615 - DNA, 15 bp, Homo sapiens
gcccttggtaattgt

SEQ ID NO: 1292616 - DNA, 15 bp, Homo sapiens
cgcccttggtaattg

SEQ ID NO: 1292617 - DNA, 15 bp, Homo sapiens
acgcccttggtaatt

SEQ ID NO: 1292618 - DNA, 15 bp, Homo sapiens
gacgcccttggtaat

SEQ ID NO: 1292619 - DNA, 15 bp, Homo sapiens
tgacgcccttggtaa

SEQ ID NO: 1292620 - DNA, 15 bp, Homo sapiens
ttgacgcccttggta

SEQ ID NO: 1292621 - DNA, 15 bp, Homo sapiens
tttgacgcccttggt

SEQ ID NO: 1292622 - DNA, 15 bp, Homo sapiens
ttttgacgcccttgg

SEQ ID NO: 1292623 - DNA, 15 bp, Homo sapiens
attttgacgcccttg

SEQ ID NO: 1292624 - DNA, 15 bp, Homo sapiens
cattttgacgccctt

SEQ ID NO: 1292625 - DNA, 15 bp, Homo sapiens
acattttgacgccct

SEQ ID NO: 1292626 - DNA, 15 bp, Homo sapiens
gacattttgacgccc

SEQ ID NO: 1292627 - DNA, 15 bp, Homo sapiens
agacattttgacgcc

SEQ ID NO: 1292628 - DNA, 15 bp, Homo sapiens
gagacattttgacgc

SEQ ID NO: 1292629 - DNA, 15 bp, Homo sapiens
tgagacattttgacg

SEQ ID NO: 1292630 - DNA, 15 bp, Homo sapiens
atgagacattttgac

SEQ ID NO: 1292631 - DNA, 15 bp, Homo sapiens
gatgagacattttga

SEQ ID NO: 1292632 - DNA, 15 bp, Homo sapiens
agatgagacattttg

SEQ ID NO: 1292633 - DNA, 15 bp, Homo sapiens
aagatgagacatttt

SEQ ID NO: 1292634 - DNA, 15 bp, Homo sapiens
caagatgagacattt

SEQ ID NO: 1292635 - DNA, 15 bp, Homo sapiens
acaagatgagacatt

SEQ ID NO: 1292636 - DNA, 15 bp, Homo sapiens
aacaagatgagacat

SEQ ID NO: 1292637 - DNA, 15 bp, Homo sapiens
caacaagatgagaca

SEQ ID NO: 1292638 - DNA, 15 bp, Homo sapiens
gcaacaagatgagac

SEQ ID NO: 1292639 - DNA, 15 bp, Homo sapiens
agcaacaagatgaga

SEQ ID NO: 1292640 - DNA, 15 bp, Homo sapiens
aagcaacaagatgag

SEQ ID NO: 1292641 - DNA, 15 bp, Homo sapiens
caagcaacaagatga

SEQ ID NO: 1292642 - DNA, 15 bp, Homo sapiens
acaagcaacaagatg

SEQ ID NO: 1292643 - DNA, 15 bp, Homo sapiens
tacaagcaacaagat

SEQ ID NO: 1292644 - DNA, 15 bp, Homo sapiens
ttacaagcaacaaga

SEQ ID NO: 1292645 - DNA, 15 bp, Homo sapiens
gttacaagcaacaag

SEQ ID NO: 1292646 - DNA, 15 bp, Homo sapiens
agttacaagcaacaa

SEQ ID NO: 1292647 - DNA, 15 bp, Homo sapiens
aaggctggcattagc

SEQ ID NO: 1292648 - DNA, 15 bp, Homo sapiens
gaaggctggcattag

SEQ ID NO: 1292649 - DNA, 15 bp, Homo sapiens
agaaggctggcatta

SEQ ID NO: 1292650 - DNA, 15 bp, Homo sapiens
gagaaggctggcatt

SEQ ID NO: 1292651 - DNA, 15 bp, Homo sapiens
agagaaggctggcat

SEQ ID NO: 1292652 - DNA, 15 bp, Homo sapiens
cagagaaggctggca

SEQ ID NO: 1292653 - DNA, 15 bp, Homo sapiens
ccagagaaggctggc

SEQ ID NO: 1292654 - DNA, 15 bp, Homo sapiens
tccagagaaggctgg

SEQ ID NO: 1292655 - DNA, 15 bp, Homo sapiens
ttccagagaaggctg

SEQ ID NO: 1292656 - DNA, 15 bp, Homo sapiens
cttccagagaaggct

SEQ ID NO: 1292657 - DNA, 15 bp, Homo sapiens
acttccagagaaggc

SEQ ID NO: 1292658 - DNA, 15 bp, Homo sapiens
gacttccagagaagg

SEQ ID NO: 1292659 - DNA, 15 bp, Homo sapiens
agacttccagagaag

SEQ ID NO: 1292660 - DNA, 15 bp, Homo sapiens
cagacttccagagaa

SEQ ID NO: 1292661 - DNA, 15 bp, Homo sapiens
acagacttccagaga

SEQ ID NO: 1292662 - DNA, 15 bp, Homo sapiens
gacagacttccagag

SEQ ID NO: 1292663 - DNA, 15 bp, Homo sapiens
agacagacttccaga

SEQ ID NO: 1292664 - DNA, 15 bp, Homo sapiens
gagacagacttccag

SEQ ID NO: 1292665 - DNA, 15 bp, Homo sapiens
agagacagacttcca

SEQ ID NO: 1292666 - DNA, 15 bp, Homo sapiens
aagagacagacttcc

SEQ ID NO: 1292667 - DNA, 15 bp, Homo sapiens
aaagagacagacttc

SEQ ID NO: 1292668 - DNA, 15 bp, Homo sapiens
caaagagacagactt

SEQ ID NO: 1292669 - DNA, 15 bp, Homo sapiens
tcaaagagacagact

SEQ ID NO: 1292670 - DNA, 15 bp, Homo sapiens
ttcaaagagacagac

SEQ ID NO: 1292671 - DNA, 15 bp, Homo sapiens
cttcaaagagacaga

SEQ ID NO: 1292672 - DNA, 15 bp, Homo sapiens
acttcaaagagacag

SEQ ID NO: 1292673 - DNA, 15 bp, Homo sapiens
aacttcaaagagaca

SEQ ID NO: 1292674 - DNA, 15 bp, Homo sapiens
caacttcaaagagac

SEQ ID NO: 1292675 - DNA, 15 bp, Homo sapiens
tcaacttcaaagaga

SEQ ID NO: 1292676 - DNA, 15 bp, Homo sapiens
ctcaacttcaaagag

SEQ ID NO: 1292677 - DNA, 15 bp, Homo sapiens
cctcaacttcaaaga

SEQ ID NO: 1292678 - DNA, 15 bp, Homo sapiens
acctcaacttcaaag

SEQ ID NO: 1292679 - DNA, 15 bp, Homo sapiens
gacctcaacttcaaa

SEQ ID NO: 1292680 - DNA, 15 bp, Homo sapiens
tgacctcaacttcaa

SEQ ID NO: 1292681 - DNA, 15 bp, Homo sapiens
atgacctcaacttca

SEQ ID NO: 1292682 - DNA, 15 bp, Homo sapiens
aatgacctcaacttc

SEQ ID NO: 1292683 - DNA, 15 bp, Homo sapiens
aaatgacctcaactt

SEQ ID NO: 1292684 - DNA, 15 bp, Homo sapiens
gaaatgacctcaact

SEQ ID NO: 1292685 - DNA, 15 bp, Homo sapiens
ggaaatgacctcaac

SEQ ID NO: 1292686 - DNA, 15 bp, Homo sapiens
tggaaatgacctcaa

SEQ ID NO: 1292687 - DNA, 15 bp, Homo sapiens
gtggaaatgacctca

SEQ ID NO: 1292688 - DNA, 15 bp, Homo sapiens
ggtggaaatgacctc

SEQ ID NO: 1292689 - DNA, 15 bp, Homo sapiens
tggtggaaatgacct

SEQ ID NO: 1292690 - DNA, 15 bp, Homo sapiens
gtggtggaaatgacc

SEQ ID NO: 1292691 - DNA, 15 bp, Homo sapiens
tgtggtggaaatgac

SEQ ID NO: 1292692 - DNA, 15 bp, Homo sapiens
gtgtggtggaaatga

SEQ ID NO: 1292693 - DNA, 15 bp, Homo sapiens
ggtgtggtggaaatg

SEQ ID NO: 1292694 - DNA, 15 bp, Homo sapiens
gggtgtggtggaaat

SEQ ID NO: 1292695 - DNA, 15 bp, Homo sapiens
ggggtgtggtggaaa

SEQ ID NO: 1292696 - DNA, 15 bp, Homo sapiens
tggggtgtggtggaa

SEQ ID NO: 1292697 - DNA, 15 bp, Homo sapiens
ctggggtgtggtgga

SEQ ID NO: 1292698 - DNA, 15 bp, Homo sapiens
tctggggtgtggtgg

SEQ ID NO: 1292699 - DNA, 15 bp, Homo sapiens
ctctggggtgtggtg

SEQ ID NO: 1292700 - DNA, 15 bp, Homo sapiens
cctctggggtgtggt

SEQ ID NO: 1292701 - DNA, 15 bp, Homo sapiens
ccctctggggtgtgg

SEQ ID NO: 1292702 - DNA, 15 bp, Homo sapiens
tccctctggggtgtg

SEQ ID NO: 1292703 - DNA, 15 bp, Homo sapiens
gtccctctggggtgt

SEQ ID NO: 1292704 - DNA, 15 bp, Homo sapiens
ggtccctctggggtg

SEQ ID NO: 1292705 - DNA, 15 bp, Homo sapiens
gggtccctctggggt

SEQ ID NO: 1292706 - DNA, 15 bp, Homo sapiens
tgggtccctctgggg

SEQ ID NO: 1292707 - DNA, 15 bp, Homo sapiens
atgggtccctctggg

SEQ ID NO: 1292708 - DNA, 15 bp, Homo sapiens
gatgggtccctctgg

SEQ ID NO: 1292709 - DNA, 15 bp, Homo sapiens
agatgggtccctctg

SEQ ID NO: 1292710 - DNA, 15 bp, Homo sapiens
tagatgggtccctct

SEQ ID NO: 1292711 - DNA, 15 bp, Homo sapiens
ctagatgggtccctc

SEQ ID NO: 1292712 - DNA, 15 bp, Homo sapiens
actagatgggtccct

SEQ ID NO: 1292713 - DNA, 15 bp, Homo sapiens
gactagatgggtccc

SEQ ID NO: 1292714 - DNA, 15 bp, Homo sapiens
cgactagatgggtcc

SEQ ID NO: 1292715 - DNA, 15 bp, Homo sapiens
tcgactagatgggtc

SEQ ID NO: 1292716 - DNA, 15 bp, Homo sapiens
gtcgactagatgggt

SEQ ID NO: 1292717 - DNA, 15 bp, Homo sapiens
cgtcgactagatggg

SEQ ID NO: 1292718 - DNA, 15 bp, Homo sapiens
gcgtcgactagatgg

SEQ ID NO: 1292719 - DNA, 15 bp, Homo sapiens
ggcgtcgactagatg

SEQ ID NO: 1292720 - DNA, 15 bp, Homo sapiens
aggcgtcgactagat

SEQ ID NO: 1292721 - DNA, 15 bp, Homo sapiens
caggcgtcgactaga

SEQ ID NO: 1292722 - DNA, 15 bp, Homo sapiens
gcaggcgtcgactag

SEQ ID NO: 1292723 - DNA, 15 bp, Homo sapiens
ggcaggcgtcgacta

SEQ ID NO: 1292724 - DNA, 15 bp, Homo sapiens
aggcaggcgtcgact

SEQ ID NO: 1292725 - DNA, 15 bp, Homo sapiens
caggcaggcgtcgac

SEQ ID NO: 1292726 - DNA, 15 bp, Homo sapiens
gcaggcaggcgtcga

SEQ ID NO: 1292727 - DNA, 15 bp, Homo sapiens
ggcaggcaggcgtcg

SEQ ID NO: 1292728 - DNA, 15 bp, Homo sapiens
aggcaggcaggcgtc

SEQ ID NO: 1292729 - DNA, 15 bp, Homo sapiens
caggcaggcaggcgt

SEQ ID NO: 1292730 - DNA, 15 bp, Homo sapiens
ccaggcaggcaggcg

SEQ ID NO: 1292731 - DNA, 15 bp, Homo sapiens
gccaggcaggcaggc

SEQ ID NO: 1292732 - DNA, 15 bp, Homo sapiens
ggccaggcaggcagg

SEQ ID NO: 1292733 - DNA, 15 bp, Homo sapiens
tggccaggcaggcag

SEQ ID NO: 1292734 - DNA, 15 bp, Homo sapiens
gtggccaggcaggca

SEQ ID NO: 1292735 - DNA, 15 bp, Homo sapiens
ggtggccaggcaggc

SEQ ID NO: 1292736 - DNA, 15 bp, Homo sapiens
tggtggccaggcagg

SEQ ID NO: 1292737 - DNA, 15 bp, Homo sapiens
gtggtggccaggcag

SEQ ID NO: 1292738 - DNA, 15 bp, Homo sapiens
agtggtggccaggca

SEQ ID NO: 1292739 - DNA, 15 bp, Homo sapiens
aagtggtggccaggc

SEQ ID NO: 1292740 - DNA, 15 bp, Homo sapiens
gaagtggtggccagg

SEQ ID NO: 1292741 - DNA, 15 bp, Homo sapiens
ggaagtggtggccag

SEQ ID NO: 1292742 - DNA, 15 bp, Homo sapiens
gggaagtggtggcca

SEQ ID NO: 1292743 - DNA, 15 bp, Homo sapiens
agggaagtggtggcc

SEQ ID NO: 1292744 - DNA, 15 bp, Homo sapiens
tagggaagtggtggc

SEQ ID NO: 1292745 - DNA, 15 bp, Homo sapiens
gtagggaagtggtgg

SEQ ID NO: 1292746 - DNA, 15 bp, Homo sapiens
agtagggaagtggtg

SEQ ID NO: 1292747 - DNA, 15 bp, Homo sapiens
cagtagggaagtggt

SEQ ID NO: 1292748 - DNA, 15 bp, Homo sapiens
ccagtagggaagtgg

SEQ ID NO: 1292749 - DNA, 15 bp, Homo sapiens
tccagtagggaagtg

SEQ ID NO: 1292750 - DNA, 15 bp, Homo sapiens
ttccagtagggaagt

SEQ ID NO: 1292751 - DNA, 15 bp, Homo sapiens
tttccagtagggaag

SEQ ID NO: 1292752 - DNA, 15 bp, Homo sapiens
ttttccagtagggaa

SEQ ID NO: 1292753 - DNA, 15 bp, Homo sapiens
attttccagtaggga

SEQ ID NO: 1292754 - DNA, 15 bp, Homo sapiens
gattttccagtaggg

SEQ ID NO: 1292755 - DNA, 15 bp, Homo sapiens
tgattttccagtagg

SEQ ID NO: 1292756 - DNA, 15 bp, Homo sapiens
atgattttccagtag

SEQ ID NO: 1292757 - DNA, 15 bp, Homo sapiens
gatgattttccagta

SEQ ID NO: 1292758 - DNA, 15 bp, Homo sapiens
tgatgattttccagt

SEQ ID NO: 1292759 - DNA, 15 bp, Homo sapiens
atgatgattttccag

SEQ ID NO: 1292760 - DNA, 15 bp, Homo sapiens
aatgatgattttcca

SEQ ID NO: 1292761 - DNA, 15 bp, Homo sapiens
aaatgatgattttcc

SEQ ID NO: 1292762 - DNA, 15 bp, Homo sapiens
ggaaatgatgatttt

SEQ ID NO: 1292763 - DNA, 15 bp, Homo sapiens
gggaaatgatgattt

SEQ ID NO: 1292764 - DNA, 15 bp, Homo sapiens
tgggaaatgatgatt

SEQ ID NO: 1292765 - DNA, 15 bp, Homo sapiens
atgggaaatgatgat

SEQ ID NO: 1292766 - DNA, 15 bp, Homo sapiens
catgggaaatgatga

SEQ ID NO: 1292767 - DNA, 15 bp, Homo sapiens
acatgggaaatgatg

SEQ ID NO: 1292768 - DNA, 15 bp, Homo sapiens
aacatgggaaatgat

SEQ ID NO: 1292769 - DNA, 15 bp, Homo sapiens
gaacatgggaaatga

SEQ ID NO: 1292770 - DNA, 15 bp, Homo sapiens
agaacatgggaaatg

SEQ ID NO: 1292771 - DNA, 15 bp, Homo sapiens
tagaacatgggaaat

SEQ ID NO: 1292772 - DNA, 15 bp, Homo sapiens
ctagaacatgggaaa

SEQ ID NO: 1292773 - DNA, 15 bp, Homo sapiens
actagaacatgggaa

SEQ ID NO: 1292774 - DNA, 15 bp, Homo sapiens
aactagaacatggga

SEQ ID NO: 1292775 - DNA, 15 bp, Homo sapiens
caactagaacatggg

SEQ ID NO: 1292776 - DNA, 15 bp, Homo sapiens
ccaactagaacatgg

SEQ ID NO: 1292777 - DNA, 15 bp, Homo sapiens
cccaactagaacatg

SEQ ID NO: 1292778 - DNA, 15 bp, Homo sapiens
ccccaactagaacat

SEQ ID NO: 1292779 - DNA, 15 bp, Homo sapiens
tccccaactagaaca

SEQ ID NO: 1292780 - DNA, 15 bp, Homo sapiens
ttccccaactagaac

SEQ ID NO: 1292781 - DNA, 15 bp, Homo sapiens
cttccccaactagaa

SEQ ID NO: 1292782 - DNA, 15 bp, Homo sapiens
ccttccccaactaga

SEQ ID NO: 1292783 - DNA, 15 bp, Homo sapiens
tccttccccaactag

SEQ ID NO: 1292784 - DNA, 15 bp, Homo sapiens
gtccttccccaacta

SEQ ID NO: 1292785 - DNA, 15 bp, Homo sapiens
ggtccttccccaact

SEQ ID NO: 1292786 - DNA, 15 bp, Homo sapiens
gggtccttccccaac

SEQ ID NO: 1292787 - DNA, 15 bp, Homo sapiens
tgggtccttccccaa

SEQ ID NO: 1292788 - DNA, 15 bp, Homo sapiens
ctgggtccttcccca

SEQ ID NO: 1292789 - DNA, 15 bp, Homo sapiens
gctgggtccttcccc

SEQ ID NO: 1292790 - DNA, 15 bp, Homo sapiens
tgctgggtccttccc

SEQ ID NO: 1292791 - DNA, 15 bp, Homo sapiens
ctgctgggtccttcc

SEQ ID NO: 1292792 - DNA, 15 bp, Homo sapiens
gctgctgggtccttc

SEQ ID NO: 1292793 - DNA, 15 bp, Homo sapiens
agctgctgggtcctt

SEQ ID NO: 1292794 - DNA, 15 bp, Homo sapiens
gagctgctgggtcct

SEQ ID NO: 1292795 - DNA, 15 bp, Homo sapiens
agagctgctgggtcc

SEQ ID NO: 1292796 - DNA, 15 bp, Homo sapiens
aagagctgctgggtc

SEQ ID NO: 1292797 - DNA, 15 bp, Homo sapiens
aaagagctgctgggt

SEQ ID NO: 1292798 - DNA, 15 bp, Homo sapiens
gaaagagctgctggg

SEQ ID NO: 1292799 - DNA, 15 bp, Homo sapiens
agaaagagctgctgg

SEQ ID NO: 1292800 - DNA, 15 bp, Homo sapiens
gagaaagagctgctg

SEQ ID NO: 1292801 - DNA, 15 bp, Homo sapiens
agagaaagagctgct

SEQ ID NO: 1292802 - DNA, 15 bp, Homo sapiens
aagagaaagagctgc

SEQ ID NO: 1292803 - DNA, 15 bp, Homo sapiens
aaagagaaagagctg

SEQ ID NO: 1292804 - DNA, 15 bp, Homo sapiens
caaagagaaagagct

SEQ ID NO: 1292805 - DNA, 15 bp, Homo sapiens
ccaaagagaaagagc

SEQ ID NO: 1292806 - DNA, 15 bp, Homo sapiens
gccaaagagaaagag

SEQ ID NO: 1292807 - DNA, 15 bp, Homo sapiens
ggccaaagagaaaga

SEQ ID NO: 1292808 - DNA, 15 bp, Homo sapiens
gggccaaagagaaag

SEQ ID NO: 1292809 - DNA, 15 bp, Homo sapiens
tgggccaaagagaaa

SEQ ID NO: 1292810 - DNA, 15 bp, Homo sapiens
atgggccaaagagaa

SEQ ID NO: 1292811 - DNA, 15 bp, Homo sapiens
gatgggccaaagaga

SEQ ID NO: 1292812 - DNA, 15 bp, Homo sapiens
agatgggccaaagag

SEQ ID NO: 1292813 - DNA, 15 bp, Homo sapiens
gagatgggccaaaga

SEQ ID NO: 1292814 - DNA, 15 bp, Homo sapiens
agagatgggccaaag

SEQ ID NO: 1292815 - DNA, 15 bp, Homo sapiens
gagagatgggccaaa

SEQ ID NO: 1292816 - DNA, 15 bp, Homo sapiens
agagagatgggccaa

SEQ ID NO: 1292817 - DNA, 15 bp, Homo sapiens
aagagagatgggcca

SEQ ID NO: 1292818 - DNA, 15 bp, Homo sapiens
gaagagagatgggcc

SEQ ID NO: 1292819 - DNA, 15 bp, Homo sapiens
ggaagagagatgggc

SEQ ID NO: 1292820 - DNA, 15 bp, Homo sapiens
aggaagagagatggg

SEQ ID NO: 1292821 - DNA, 15 bp, Homo sapiens
aaggaagagagatgg

SEQ ID NO: 1292822 - DNA, 15 bp, Homo sapiens
aaaggaagagagatg

SEQ ID NO: 1292823 - DNA, 15 bp, Homo sapiens
aaaaggaagagagat

SEQ ID NO: 1292824 - DNA, 15 bp, Homo sapiens
taaaaggaagagaga

SEQ ID NO: 1292825 - DNA, 15 bp, Homo sapiens
ataaaaggaagagag

SEQ ID NO: 1292826 - DNA, 15 bp, Homo sapiens
cataaaaggaagaga

SEQ ID NO: 1292827 - DNA, 15 bp, Homo sapiens
tcataaaaggaagag

SEQ ID NO: 1292828 - DNA, 15 bp, Homo sapiens
ctcataaaaggaaga

SEQ ID NO: 1292829 - DNA, 15 bp, Homo sapiens
gctcataaaaggaag

SEQ ID NO: 1292830 - DNA, 15 bp, Homo sapiens
ggctcataaaaggaa

SEQ ID NO: 1292831 - DNA, 15 bp, Homo sapiens
tggctcataaaagga

SEQ ID NO: 1292832 - DNA, 15 bp, Homo sapiens
ctggctcataaaagg

SEQ ID NO: 1292833 - DNA, 15 bp, Homo sapiens
gctggctcataaaag

SEQ ID NO: 1292834 - DNA, 15 bp, Homo sapiens
agctggctcataaaa

SEQ ID NO: 1292835 - DNA, 15 bp, Homo sapiens
tagctggctcataaa

SEQ ID NO: 1292836 - DNA, 15 bp, Homo sapiens
ttagctggctcataa

SEQ ID NO: 1292837 - DNA, 15 bp, Homo sapiens
tttagctggctcata

SEQ ID NO: 1292838 - DNA, 15 bp, Homo sapiens
ttttagctggctcat

SEQ ID NO: 1292839 - DNA, 15 bp, Homo sapiens
cttttagctggctca

SEQ ID NO: 1292840 - DNA, 15 bp, Homo sapiens
ccttttagctggctc

SEQ ID NO: 1292841 - DNA, 15 bp, Homo sapiens
tccttttagctggct

SEQ ID NO: 1292842 - DNA, 15 bp, Homo sapiens
ttccttttagctggc

SEQ ID NO: 1292843 - DNA, 15 bp, Homo sapiens
attccttttagctgg

SEQ ID NO: 1292844 - DNA, 15 bp, Homo sapiens
gattccttttagctg

SEQ ID NO: 1292845 - DNA, 15 bp, Homo sapiens
ggattccttttagct

SEQ ID NO: 1292846 - DNA, 15 bp, Homo sapiens
gggattccttttagc

SEQ ID NO: 1292847 - DNA, 15 bp, Homo sapiens
ggggattccttttag

SEQ ID NO: 1292848 - DNA, 15 bp, Homo sapiens
gggggattcctttta

SEQ ID NO: 1292849 - DNA, 15 bp, Homo sapiens
tgggggattcctttt

SEQ ID NO: 1292850 - DNA, 15 bp, Homo sapiens
ctgggggattccttt

SEQ ID NO: 1292851 - DNA, 15 bp, Homo sapiens
tctgggggattcctt

SEQ ID NO: 1292852 - DNA, 15 bp, Homo sapiens
ctctgggggattcct

SEQ ID NO: 1292853 - DNA, 15 bp, Homo sapiens
cctctgggggattcc

SEQ ID NO: 1292854 - DNA, 15 bp, Homo sapiens
acctctgggggattc

SEQ ID NO: 1292855 - DNA, 15 bp, Homo sapiens
gacctctgggggatt

SEQ ID NO: 1292856 - DNA, 15 bp, Homo sapiens
tgacctctgggggat

SEQ ID NO: 1292857 - DNA, 15 bp, Homo sapiens
atgacctctggggga

SEQ ID NO: 1292858 - DNA, 15 bp, Homo sapiens
gatgacctctggggg

SEQ ID NO: 1292859 - DNA, 15 bp, Homo sapiens
agatgacctctgggg

SEQ ID NO: 1292860 - DNA, 15 bp, Homo sapiens
aagatgacctctggg

SEQ ID NO: 1292861 - DNA, 15 bp, Homo sapiens
aaagatgacctctgg

SEQ ID NO: 1292862 - DNA, 15 bp, Homo sapiens
caaagatgacctctg

SEQ ID NO: 1292863 - DNA, 15 bp, Homo sapiens
acaaagatgacctct

SEQ ID NO: 1292864 - DNA, 15 bp, Homo sapiens
gacaaagatgacctc

SEQ ID NO: 1292865 - DNA, 15 bp, Homo sapiens
ggacaaagatgacct

SEQ ID NO: 1292866 - DNA, 15 bp, Homo sapiens
aggacaaagatgacc

SEQ ID NO: 1292867 - DNA, 15 bp, Homo sapiens
aaggacaaagatgac

SEQ ID NO: 1292868 - DNA, 15 bp, Homo sapiens
caaggacaaagatga

SEQ ID NO: 1292869 - DNA, 15 bp, Homo sapiens
ccaaggacaaagatg

SEQ ID NO: 1292870 - DNA, 15 bp, Homo sapiens
gccaaggacaaagat

SEQ ID NO: 1292871 - DNA, 15 bp, Homo sapiens
cgccaaggacaaaga

SEQ ID NO: 1292872 - DNA, 15 bp, Homo sapiens
acgccaaggacaaag

SEQ ID NO: 1292873 - DNA, 15 bp, Homo sapiens
cacgccaaggacaaa

SEQ ID NO: 1292874 - DNA, 15 bp, Homo sapiens
ccacgccaaggacaa

SEQ ID NO: 1292875 - DNA, 15 bp, Homo sapiens
cccacgccaaggaca

SEQ ID NO: 1292876 - DNA, 15 bp, Homo sapiens
tcccacgccaaggac

SEQ ID NO: 1292877 - DNA, 15 bp, Homo sapiens
ttcccacgccaagga

SEQ ID NO: 1292878 - DNA, 15 bp, Homo sapiens
tttcccacgccaagg

SEQ ID NO: 1292879 - DNA, 15 bp, Homo sapiens
ctttcccacgccaag

SEQ ID NO: 1292880 - DNA, 15 bp, Homo sapiens
tctttcccacgccaa

SEQ ID NO: 1292881 - DNA, 15 bp, Homo sapiens
ctctttcccacgcca

SEQ ID NO: 1292882 - DNA, 15 bp, Homo sapiens
tctctttcccacgcc

SEQ ID NO: 1292883 - DNA, 15 bp, Homo sapiens
ctctctttcccacgc

SEQ ID NO: 1292884 - DNA, 15 bp, Homo sapiens
tctctctttcccacg

SEQ ID NO: 1292885 - DNA, 15 bp, Homo sapiens
ctctctctttcccac

SEQ ID NO: 1292886 - DNA, 15 bp, Homo sapiens
cctctctctttccca

SEQ ID NO: 1292887 - DNA, 15 bp, Homo sapiens
gcctctctctttccc

SEQ ID NO: 1292888 - DNA, 15 bp, Homo sapiens
ggcctctctctttcc

SEQ ID NO: 1292889 - DNA, 15 bp, Homo sapiens
aggcctctctctttc

SEQ ID NO: 1292890 - DNA, 15 bp, Homo sapiens
aaggcctctctcttt

SEQ ID NO: 1292891 - DNA, 15 bp, Homo sapiens
caaggcctctctctt

SEQ ID NO: 1292892 - DNA, 15 bp, Homo sapiens
acaaggcctctctct

SEQ ID NO: 1292893 - DNA, 15 bp, Homo sapiens
gacaaggcctctctc

SEQ ID NO: 1292894 - DNA, 15 bp, Homo sapiens
tgacaaggcctctct

SEQ ID NO: 1292895 - DNA, 15 bp, Homo sapiens
ctgacaaggcctctc

SEQ ID NO: 1292896 - DNA, 15 bp, Homo sapiens
gctgacaaggcctct

SEQ ID NO: 1292897 - DNA, 15 bp, Homo sapiens
tgctgacaaggcctc

SEQ ID NO: 1292898 - DNA, 15 bp, Homo sapiens
ctgctgacaaggcct

SEQ ID NO: 1292899 - DNA, 15 bp, Homo sapiens
cctgctgacaaggcc

SEQ ID NO: 1292900 - DNA, 15 bp, Homo sapiens
acctgctgacaaggc

SEQ ID NO: 1292901 - DNA, 15 bp, Homo sapiens
cacctgctgacaagg

SEQ ID NO: 1292902 - DNA, 15 bp, Homo sapiens
ccacctgctgacaag

SEQ ID NO: 1292903 - DNA, 15 bp, Homo sapiens
cccacctgctgacaa

SEQ ID NO: 1292904 - DNA, 15 bp, Homo sapiens
ccccacctgctgaca

SEQ ID NO: 1292905 - DNA, 15 bp, Homo sapiens
cccccacctgctgac

SEQ ID NO: 1292906 - DNA, 15 bp, Homo sapiens
tcccccacctgctga

SEQ ID NO: 1292907 - DNA, 15 bp, Homo sapiens
ctcccccacctgctg

SEQ ID NO: 1292908 - DNA, 15 bp, Homo sapiens
cctcccccacctgct

SEQ ID NO: 1292909 - DNA, 15 bp, Homo sapiens
acctcccccacctgc

SEQ ID NO: 1292910 - DNA, 15 bp, Homo sapiens
tacctcccccacctg

SEQ ID NO: 1292911 - DNA, 15 bp, Homo sapiens
ctacctcccccacct

SEQ ID NO: 1292912 - DNA, 15 bp, Homo sapiens
cctacctcccccacc

SEQ ID NO: 1292913 - DNA, 15 bp, Homo sapiens
tcctacctcccccac

SEQ ID NO: 1292914 - DNA, 15 bp, Homo sapiens
ttcctacctccccca

SEQ ID NO: 1292915 - DNA, 15 bp, Homo sapiens
tttcctacctccccc

SEQ ID NO: 1292916 - DNA, 15 bp, Homo sapiens
atttcctacctcccc

SEQ ID NO: 1292917 - DNA, 15 bp, Homo sapiens
catttcctacctccc

SEQ ID NO: 1292918 - DNA, 15 bp, Homo sapiens
gcatttcctacctcc

SEQ ID NO: 1292919 - DNA, 15 bp, Homo sapiens
agcatttcctacctc

SEQ ID NO: 1292920 - DNA, 15 bp, Homo sapiens
cagcatttcctacct

SEQ ID NO: 1292921 - DNA, 15 bp, Homo sapiens
acagcatttcctacc

SEQ ID NO: 1292922 - DNA, 15 bp, Homo sapiens
aacagcatttcctac

SEQ ID NO: 1292923 - DNA, 15 bp, Homo sapiens
gaacagcatttccta

SEQ ID NO: 1292924 - DNA, 15 bp, Homo sapiens
agaacagcatttcct

SEQ ID NO: 1292925 - DNA, 15 bp, Homo sapiens
gagaacagcatttcc

SEQ ID NO: 1292926 - DNA, 15 bp, Homo sapiens
ggagaacagcatttc

SEQ ID NO: 1292927 - DNA, 15 bp, Homo sapiens
aggagaacagcattt

SEQ ID NO: 1292928 - DNA, 15 bp, Homo sapiens
caggagaacagcatt

SEQ ID NO: 1292929 - DNA, 15 bp, Homo sapiens
acaggagaacagcat

SEQ ID NO: 1292930 - DNA, 15 bp, Homo sapiens
cacaggagaacagca

SEQ ID NO: 1292931 - DNA, 15 bp, Homo sapiens
ccacaggagaacagc

SEQ ID NO: 1292932 - DNA, 15 bp, Homo sapiens
cccacaggagaacag

SEQ ID NO: 1292933 - DNA, 15 bp, Homo sapiens
gcccacaggagaaca

SEQ ID NO: 1292934 - DNA, 15 bp, Homo sapiens
agcccacaggagaac

SEQ ID NO: 1292935 - DNA, 15 bp, Homo sapiens
cagcccacaggagaa

SEQ ID NO: 1292936 - DNA, 15 bp, Homo sapiens
tcagcccacaggaga

SEQ ID NO: 1292937 - DNA, 15 bp, Homo sapiens
ttcagcccacaggag

SEQ ID NO: 1292938 - DNA, 15 bp, Homo sapiens
cttcagcccacagga

SEQ ID NO: 1292939 - DNA, 15 bp, Homo sapiens
ccttcagcccacagg

SEQ ID NO: 1292940 - DNA, 15 bp, Homo sapiens
accttcagcccacag

SEQ ID NO: 1292941 - DNA, 15 bp, Homo sapiens
gaccttcagcccaca

SEQ ID NO: 1292942 - DNA, 15 bp, Homo sapiens
tgaccttcagcccac

SEQ ID NO: 1292943 - DNA, 15 bp, Homo sapiens
ctgaccttcagccca

SEQ ID NO: 1292944 - DNA, 15 bp, Homo sapiens
actgaccttcagccc

SEQ ID NO: 1292945 - DNA, 15 bp, Homo sapiens
cactgaccttcagcc

SEQ ID NO: 1292946 - DNA, 15 bp, Homo sapiens
tcactgaccttcagc

SEQ ID NO: 1292947 - DNA, 15 bp, Homo sapiens
ttcactgaccttcag

SEQ ID NO: 1292948 - DNA, 15 bp, Homo sapiens
tttcactgaccttca

SEQ ID NO: 1292949 - DNA, 15 bp, Homo sapiens
ctttcactgaccttc

SEQ ID NO: 1292950 - DNA, 15 bp, Homo sapiens
cctttcactgacctt

SEQ ID NO: 1292951 - DNA, 15 bp, Homo sapiens
acctttcactgacct

SEQ ID NO: 1292952 - DNA, 15 bp, Homo sapiens
cacctttcactgacc

SEQ ID NO: 1292953 - DNA, 15 bp, Homo sapiens
tcacctttcactgac

SEQ ID NO: 1292954 - DNA, 15 bp, Homo sapiens
ctcacctttcactga

SEQ ID NO: 1292955 - DNA, 15 bp, Homo sapiens
gctcacctttcactg

SEQ ID NO: 1292956 - DNA, 15 bp, Homo sapiens
agctcacctttcact

SEQ ID NO: 1292957 - DNA, 15 bp, Homo sapiens
cagctcacctttcac

SEQ ID NO: 1292958 - DNA, 15 bp, Homo sapiens
ccagctcacctttca

SEQ ID NO: 1292959 - DNA, 15 bp, Homo sapiens
cccagctcacctttc

SEQ ID NO: 1292960 - DNA, 15 bp, Homo sapiens
ccccagctcaccttt

SEQ ID NO: 1292961 - DNA, 15 bp, Homo sapiens
gccccagctcacctt

SEQ ID NO: 1292962 - DNA, 15 bp, Homo sapiens
agccccagctcacct

SEQ ID NO: 1292963 - DNA, 15 bp, Homo sapiens
gagccccagctcacc

SEQ ID NO: 1292964 - DNA, 15 bp, Homo sapiens
ggagccccagctcac

SEQ ID NO: 1292965 - DNA, 15 bp, Homo sapiens
aggagccccagctca

SEQ ID NO: 1292966 - DNA, 15 bp, Homo sapiens
caggagccccagctc

SEQ ID NO: 1292967 - DNA, 15 bp, Homo sapiens
tcaggagccccagct

SEQ ID NO: 1292968 - DNA, 15 bp, Homo sapiens
ctcaggagccccagc

SEQ ID NO: 1292969 - DNA, 15 bp, Homo sapiens
cctcaggagccccag

SEQ ID NO: 1292970 - DNA, 15 bp, Homo sapiens
gcctcaggagcccca

SEQ ID NO: 1292971 - DNA, 15 bp, Homo sapiens
ggcctcaggagcccc

SEQ ID NO: 1292972 - DNA, 15 bp, Homo sapiens
tggcctcaggagccc

SEQ ID NO: 1292973 - DNA, 15 bp, Homo sapiens
ctggcctcaggagcc

SEQ ID NO: 1292974 - DNA, 15 bp, Homo sapiens
gctggcctcaggagc

SEQ ID NO: 1292975 - DNA, 15 bp, Homo sapiens
tgctggcctcaggag

SEQ ID NO: 1292976 - DNA, 15 bp, Homo sapiens
ctgctggcctcagga

SEQ ID NO: 1292977 - DNA, 15 bp, Homo sapiens
cctgctggcctcagg

SEQ ID NO: 1292978 - DNA, 15 bp, Homo sapiens
acctgctggcctcag

SEQ ID NO: 1292979 - DNA, 15 bp, Homo sapiens
aacctgctggcctca

SEQ ID NO: 1292980 - DNA, 15 bp, Homo sapiens
gaacctgctggcctc

SEQ ID NO: 1292981 - DNA, 15 bp, Homo sapiens
agaacctgctggcct

SEQ ID NO: 1292982 - DNA, 15 bp, Homo sapiens
cagaacctgctggcc

SEQ ID NO: 1292983 - DNA, 15 bp, Homo sapiens
ccagaacctgctggc

SEQ ID NO: 1292984 - DNA, 15 bp, Homo sapiens
gccagaacctgctgg

SEQ ID NO: 1292985 - DNA, 15 bp, Homo sapiens
tgccagaacctgctg

SEQ ID NO: 1292986 - DNA, 15 bp, Homo sapiens
gtgccagaacctgct

SEQ ID NO: 1292987 - DNA, 15 bp, Homo sapiens
tgtgccagaacctgc

SEQ ID NO: 1292988 - DNA, 15 bp, Homo sapiens
ctgtgccagaacctg

SEQ ID NO: 1292989 - DNA, 15 bp, Homo sapiens
tctgtgccagaacct

SEQ ID NO: 1292990 - DNA, 15 bp, Homo sapiens
ttctgtgccagaacc

SEQ ID NO: 1292991 - DNA, 15 bp, Homo sapiens
cttctgtgccagaac

SEQ ID NO: 1292992 - DNA, 15 bp, Homo sapiens
gcttctgtgccagaa

SEQ ID NO: 1292993 - DNA, 15 bp, Homo sapiens
tgcttctgtgccaga

SEQ ID NO: 1292994 - DNA, 15 bp, Homo sapiens
ctgcttctgtgccag

SEQ ID NO: 1292995 - DNA, 15 bp, Homo sapiens
gctgcttctgtgcca

SEQ ID NO: 1292996 - DNA, 15 bp, Homo sapiens
ggctgcttctgtgcc

SEQ ID NO: 1292997 - DNA, 15 bp, Homo sapiens
gggctgcttctgtgc

SEQ ID NO: 1292998 - DNA, 15 bp, Homo sapiens
cgggctgcttctgtg

SEQ ID NO: 1292999 - DNA, 15 bp, Homo sapiens
ccgggctgcttctgt

SEQ ID NO: 1293000 - DNA, 15 bp, Homo sapiens
cccgggctgcttctg

SEQ ID NO: 1293001 - DNA, 15 bp, Homo sapiens
tcccgggctgcttct

SEQ ID NO: 1293002 - DNA, 15 bp, Homo sapiens
ctcccgggctgcttc

SEQ ID NO: 1293003 - DNA, 15 bp, Homo sapiens
cctcccgggctgctt

SEQ ID NO: 1293004 - DNA, 15 bp, Homo sapiens
tcctcccgggctgct

SEQ ID NO: 1293005 - DNA, 15 bp, Homo sapiens
ttcctcccgggctgc

SEQ ID NO: 1293006 - DNA, 15 bp, Homo sapiens
cttcctcccgggctg

SEQ ID NO: 1293007 - DNA, 15 bp, Homo sapiens
gcttcctcccgggct

SEQ ID NO: 1293008 - DNA, 15 bp, Homo sapiens
agcttcctcccgggc

SEQ ID NO: 1293009 - DNA, 15 bp, Homo sapiens
cagcttcctcccggg

SEQ ID NO: 1293010 - DNA, 15 bp, Homo sapiens
gcagcttcctcccgg

SEQ ID NO: 1293011 - DNA, 15 bp, Homo sapiens
ggcagcttcctcccg

SEQ ID NO: 1293012 - DNA, 15 bp, Homo sapiens
gggcagcttcctccc

SEQ ID NO: 1293013 - DNA, 15 bp, Homo sapiens
agggcagcttcctcc

SEQ ID NO: 1293014 - DNA, 15 bp, Homo sapiens
cagggcagcttcctc

SEQ ID NO: 1293015 - DNA, 15 bp, Homo sapiens
ccagggcagcttcct

SEQ ID NO: 1293016 - DNA, 15 bp, Homo sapiens
tccagggcagcttcc

SEQ ID NO: 1293017 - DNA, 15 bp, Homo sapiens
ttccagggcagcttc

SEQ ID NO: 1293018 - DNA, 15 bp, Homo sapiens
attccagggcagctt

SEQ ID NO: 1293019 - DNA, 15 bp, Homo sapiens
cattccagggcagct

SEQ ID NO: 1293020 - DNA, 15 bp, Homo sapiens
acattccagggcagc

SEQ ID NO: 1293021 - DNA, 15 bp, Homo sapiens
cacattccagggcag

SEQ ID NO: 1293022 - DNA, 15 bp, Homo sapiens
gcacattccagggca

SEQ ID NO: 1293023 - DNA, 15 bp, Homo sapiens
agcacattccagggc

SEQ ID NO: 1293024 - DNA, 15 bp, Homo sapiens
cagcacattccaggg

SEQ ID NO: 1293025 - DNA, 15 bp, Homo sapiens
acagcacattccagg

SEQ ID NO: 1293026 - DNA, 15 bp, Homo sapiens
cacagcacattccag

SEQ ID NO: 1293027 - DNA, 15 bp, Homo sapiens
ccacagcacattcca

SEQ ID NO: 1293028 - DNA, 15 bp, Homo sapiens
tccacagcacattcc

SEQ ID NO: 1293029 - DNA, 15 bp, Homo sapiens
gtccacagcacattc

SEQ ID NO: 1293030 - DNA, 15 bp, Homo sapiens
tgtccacagcacatt

SEQ ID NO: 1293031 - DNA, 15 bp, Homo sapiens
ctgtccacagcacat

SEQ ID NO: 1293032 - DNA, 15 bp, Homo sapiens
tctgtccacagcaca

SEQ ID NO: 1293033 - DNA, 15 bp, Homo sapiens
gtctgtccacagcac

SEQ ID NO: 1293034 - DNA, 15 bp, Homo sapiens
ggtctgtccacagca

SEQ ID NO: 1293035 - DNA, 15 bp, Homo sapiens
aggtctgtccacagc

SEQ ID NO: 1293036 - DNA, 15 bp, Homo sapiens
caggtctgtccacag

SEQ ID NO: 1293037 - DNA, 15 bp, Homo sapiens
gcaggtctgtccaca

SEQ ID NO: 1293038 - DNA, 15 bp, Homo sapiens
cgcaggtctgtccac

SEQ ID NO: 1293039 - DNA, 15 bp, Homo sapiens
acgcaggtctgtcca

SEQ ID NO: 1293040 - DNA, 15 bp, Homo sapiens
tacgcaggtctgtcc

SEQ ID NO: 1293041 - DNA, 15 bp, Homo sapiens
ctacgcaggtctgtc

SEQ ID NO: 1293042 - DNA, 15 bp, Homo sapiens
tctacgcaggtctgt

SEQ ID NO: 1293043 - DNA, 15 bp, Homo sapiens
atctacgcaggtctg

SEQ ID NO: 1293044 - DNA, 15 bp, Homo sapiens
gatctacgcaggtct

SEQ ID NO: 1293045 - DNA, 15 bp, Homo sapiens
ggatctacgcaggtc

SEQ ID NO: 1293046 - DNA, 15 bp, Homo sapiens
gggatctacgcaggt

SEQ ID NO: 1293047 - DNA, 15 bp, Homo sapiens
agggatctacgcagg

SEQ ID NO: 1293048 - DNA, 15 bp, Homo sapiens
aagggatctacgcag

SEQ ID NO: 1293049 - DNA, 15 bp, Homo sapiens
gaagggatctacgca

SEQ ID NO: 1293050 - DNA, 15 bp, Homo sapiens
agaagggatctacgc

SEQ ID NO: 1293051 - DNA, 15 bp, Homo sapiens
aagaagggatctacg

SEQ ID NO: 1293052 - DNA, 15 bp, Homo sapiens
aaagaagggatctac

SEQ ID NO: 1293053 - DNA, 15 bp, Homo sapiens
gaaagaagggatcta

SEQ ID NO: 1293054 - DNA, 15 bp, Homo sapiens
ggaaagaagggatct

SEQ ID NO: 1293055 - DNA, 15 bp, Homo sapiens
gggaaagaagggatc

SEQ ID NO: 1293056 - DNA, 15 bp, Homo sapiens
tgggaaagaagggat

SEQ ID NO: 1293057 - DNA, 15 bp, Homo sapiens
gtgggaaagaaggga

SEQ ID NO: 1293058 - DNA, 15 bp, Homo sapiens
cgtgggaaagaaggg

SEQ ID NO: 1293059 - DNA, 15 bp, Homo sapiens
acgtgggaaagaagg

SEQ ID NO: 1293060 - DNA, 15 bp, Homo sapiens
gacgtgggaaagaag

SEQ ID NO: 1293061 - DNA, 15 bp, Homo sapiens
ggacgtgggaaagaa

SEQ ID NO: 1293062 - DNA, 15 bp, Homo sapiens
tggacgtgggaaaga

SEQ ID NO: 1293063 - DNA, 15 bp, Homo sapiens
ctggacgtgggaaag

SEQ ID NO: 1293064 - DNA, 15 bp, Homo sapiens
cctggacgtgggaaa

SEQ ID NO: 1293065 - DNA, 15 bp, Homo sapiens
gcctggacgtgggaa

SEQ ID NO: 1293066 - DNA, 15 bp, Homo sapiens
agcctggacgtggga

SEQ ID NO: 1293067 - DNA, 15 bp, Homo sapiens
cagcctggacgtggg

SEQ ID NO: 1293068 - DNA, 15 bp, Homo sapiens
acagcctggacgtgg

SEQ ID NO: 1293069 - DNA, 15 bp, Homo sapiens
gacagcctggacgtg

SEQ ID NO: 1293070 - DNA, 15 bp, Homo sapiens
ggacagcctggacgt

SEQ ID NO: 1293071 - DNA, 15 bp, Homo sapiens
gggacagcctggacg

SEQ ID NO: 1293072 - DNA, 15 bp, Homo sapiens
tgggacagcctggac

SEQ ID NO: 1293073 - DNA, 15 bp, Homo sapiens
ctgggacagcctgga

SEQ ID NO: 1293074 - DNA, 15 bp, Homo sapiens
gctgggacagcctgg

SEQ ID NO: 1293075 - DNA, 15 bp, Homo sapiens
tgctgggacagcctg

SEQ ID NO: 1293076 - DNA, 15 bp, Homo sapiens
atgctgggacagcct

SEQ ID NO: 1293077 - DNA, 15 bp, Homo sapiens
gatgctgggacagcc

SEQ ID NO: 1293078 - DNA, 15 bp, Homo sapiens
agatgctgggacagc

SEQ ID NO: 1293079 - DNA, 15 bp, Homo sapiens
gagatgctgggacag

SEQ ID NO: 1293080 - DNA, 15 bp, Homo sapiens
agagatgctgggaca

SEQ ID NO: 1293081 - DNA, 15 bp, Homo sapiens
cagagatgctgggac

SEQ ID NO: 1293082 - DNA, 15 bp, Homo sapiens
tcagagatgctggga

SEQ ID NO: 1293083 - DNA, 15 bp, Homo sapiens
gtcagagatgctggg

SEQ ID NO: 1293084 - DNA, 15 bp, Homo sapiens
ggtcagagatgctgg

SEQ ID NO: 1293085 - DNA, 15 bp, Homo sapiens
tggtcagagatgctg

SEQ ID NO: 1293086 - DNA, 15 bp, Homo sapiens
ctggtcagagatgct

SEQ ID NO: 1293087 - DNA, 15 bp, Homo sapiens
cctggtcagagatgc

SEQ ID NO: 1293088 - DNA, 15 bp, Homo sapiens
gcctggtcagagatg

SEQ ID NO: 1293089 - DNA, 15 bp, Homo sapiens
ggcctggtcagagat

SEQ ID NO: 1293090 - DNA, 15 bp, Homo sapiens
tggcctggtcagaga

SEQ ID NO: 1293091 - DNA, 15 bp, Homo sapiens
ttggcctggtcagag

SEQ ID NO: 1293092 - DNA, 15 bp, Homo sapiens
cttggcctggtcaga

SEQ ID NO: 1293093 - DNA, 15 bp, Homo sapiens
ccttggcctggtcag

SEQ ID NO: 1293094 - DNA, 15 bp, Homo sapiens
accttggcctggtca

SEQ ID NO: 1293095 - DNA, 15 bp, Homo sapiens
gaccttggcctggtc

SEQ ID NO: 1293096 - DNA, 15 bp, Homo sapiens
tgaccttggcctggt

SEQ ID NO: 1293097 - DNA, 15 bp, Homo sapiens
gtgaccttggcctgg

SEQ ID NO: 1293098 - DNA, 15 bp, Homo sapiens
ggtgaccttggcctg

SEQ ID NO: 1293099 - DNA, 15 bp, Homo sapiens
aggtgaccttggcct

SEQ ID NO: 1293100 - DNA, 15 bp, Homo sapiens
taggtgaccttggcc

SEQ ID NO: 1293101 - DNA, 15 bp, Homo sapiens
ctaggtgaccttggc

SEQ ID NO: 1293102 - DNA, 15 bp, Homo sapiens
cctaggtgaccttgg

SEQ ID NO: 1293103 - DNA, 15 bp, Homo sapiens
gcctaggtgaccttg

SEQ ID NO: 1293104 - DNA, 15 bp, Homo sapiens
cgcctaggtgacctt

SEQ ID NO: 1293105 - DNA, 15 bp, Homo sapiens
gcgcctaggtgacct

SEQ ID NO: 1293106 - DNA, 15 bp, Homo sapiens
tgcgcctaggtgacc

SEQ ID NO: 1293107 - DNA, 15 bp, Homo sapiens
ctgcgcctaggtgac

SEQ ID NO: 1293108 - DNA, 15 bp, Homo sapiens
cctgcgcctaggtga

SEQ ID NO: 1293109 - DNA, 15 bp, Homo sapiens
gcctgcgcctaggtg

SEQ ID NO: 1293110 - DNA, 15 bp, Homo sapiens
agcctgcgcctaggt

SEQ ID NO: 1293111 - DNA, 15 bp, Homo sapiens
gagcctgcgcctagg

SEQ ID NO: 1293112 - DNA, 15 bp, Homo sapiens
agagcctgcgcctag

SEQ ID NO: 1293113 - DNA, 15 bp, Homo sapiens
aagagcctgcgccta

SEQ ID NO: 1293114 - DNA, 15 bp, Homo sapiens
gaagagcctgcgcct

SEQ ID NO: 1293115 - DNA, 15 bp, Homo sapiens
agaagagcctgcgcc

SEQ ID NO: 1293116 - DNA, 15 bp, Homo sapiens
gagaagagcctgcgc

SEQ ID NO: 1293117 - DNA, 15 bp, Homo sapiens
ggagaagagcctgcg

SEQ ID NO: 1293118 - DNA, 15 bp, Homo sapiens
aggagaagagcctgc

SEQ ID NO: 1293119 - DNA, 15 bp, Homo sapiens
aaggagaagagcctg

SEQ ID NO: 1293120 - DNA, 15 bp, Homo sapiens
taaggagaagagcct

SEQ ID NO: 1293121 - DNA, 15 bp, Homo sapiens
gtaaggagaagagcc

SEQ ID NO: 1293122 - DNA, 15 bp, Homo sapiens
ggtaaggagaagagc

SEQ ID NO: 1293123 - DNA, 15 bp, Homo sapiens
aggtaaggagaagag

SEQ ID NO: 1293124 - DNA, 15 bp, Homo sapiens
gaggtaaggagaaga

SEQ ID NO: 1293125 - DNA, 15 bp, Homo sapiens
tgaggtaaggagaag

SEQ ID NO: 1293126 - DNA, 15 bp, Homo sapiens
gtgaggtaaggagaa

SEQ ID NO: 1293127 - DNA, 15 bp, Homo sapiens
tgtgaggtaaggaga

SEQ ID NO: 1293128 - DNA, 15 bp, Homo sapiens
ctgtgaggtaaggag

SEQ ID NO: 1293129 - DNA, 15 bp, Homo sapiens
tctgtgaggtaagga

SEQ ID NO: 1293130 - DNA, 15 bp, Homo sapiens
gtctgtgaggtaagg

SEQ ID NO: 1293131 - DNA, 15 bp, Homo sapiens
tgtctgtgaggtaag

SEQ ID NO: 1293132 - DNA, 15 bp, Homo sapiens
ttgtctgtgaggtaa

SEQ ID NO: 1293133 - DNA, 15 bp, Homo sapiens
tttgtctgtgaggta

SEQ ID NO: 1293134 - DNA, 15 bp, Homo sapiens
ttttgtctgtgaggt

SEQ ID NO: 1293135 - DNA, 15 bp, Homo sapiens
tttttgtctgtgagg

SEQ ID NO: 1293136 - DNA, 15 bp, Homo sapiens
ctttttgtctgtgag

SEQ ID NO: 1293137 - DNA, 15 bp, Homo sapiens
tctttttgtctgtga

SEQ ID NO: 1293138 - DNA, 15 bp, Homo sapiens
ttctttttgtctgtg

SEQ ID NO: 1293139 - DNA, 15 bp, Homo sapiens
gttctttttgtctgt

SEQ ID NO: 1293140 - DNA, 15 bp, Homo sapiens
agttctttttgtctg

SEQ ID NO: 1293141 - DNA, 15 bp, Homo sapiens
aagttctttttgtct

SEQ ID NO: 1293142 - DNA, 15 bp, Homo sapiens
taagttctttttgtc

SEQ ID NO: 1293143 - DNA, 15 bp, Homo sapiens
ctaagttctttttgt

SEQ ID NO: 1293144 - DNA, 15 bp, Homo sapiens
gctaagttctttttg

SEQ ID NO: 1293145 - DNA, 15 bp, Homo sapiens
tgctaagttcttttt

SEQ ID NO: 1293146 - DNA, 15 bp, Homo sapiens
gtgctaagttctttt

SEQ ID NO: 1293147 - DNA, 15 bp, Homo sapiens
agtgctaagttcttt

SEQ ID NO: 1293148 - DNA, 15 bp, Homo sapiens
cagtgctaagttctt

SEQ ID NO: 1293149 - DNA, 15 bp, Homo sapiens
acagtgctaagttct

SEQ ID NO: 1293150 - DNA, 15 bp, Homo sapiens
tacagtgctaagttc

SEQ ID NO: 1293151 - DNA, 15 bp, Homo sapiens
ttacagtgctaagtt

SEQ ID NO: 1293152 - DNA, 15 bp, Homo sapiens
attacagtgctaagt

SEQ ID NO: 1293153 - DNA, 15 bp, Homo sapiens
gattacagtgctaag

SEQ ID NO: 1293154 - DNA, 15 bp, Homo sapiens
agattacagtgctaa

SEQ ID NO: 1293155 - DNA, 15 bp, Homo sapiens
tagattacagtgcta

SEQ ID NO: 1293156 - DNA, 15 bp, Homo sapiens
ttagattacagtgct

SEQ ID NO: 1293157 - DNA, 15 bp, Homo sapiens
cttagattacagtgc

SEQ ID NO: 1293158 - DNA, 15 bp, Homo sapiens
acttagattacagtg

SEQ ID NO: 1293159 - DNA, 15 bp, Homo sapiens
cacttagattacagt

SEQ ID NO: 1293160 - DNA, 15 bp, Homo sapiens
acacttagattacag

SEQ ID NO: 1293161 - DNA, 15 bp, Homo sapiens
aacacttagattaca

SEQ ID NO: 1293162 - DNA, 15 bp, Homo sapiens
gaacacttagattac

SEQ ID NO: 1293163 - DNA, 15 bp, Homo sapiens
ggaacacttagatta

SEQ ID NO: 1293164 - DNA, 15 bp, Homo sapiens
gggaacacttagatt

SEQ ID NO: 1293165 - DNA, 15 bp, Homo sapiens
tgggaacacttagat

SEQ ID NO: 1293166 - DNA, 15 bp, Homo sapiens
gtgggaacacttaga

SEQ ID NO: 1293167 - DNA, 15 bp, Homo sapiens
agtgggaacacttag

SEQ ID NO: 1293168 - DNA, 15 bp, Homo sapiens
gagtgggaacactta

SEQ ID NO: 1293169 - DNA, 15 bp, Homo sapiens
ggagtgggaacactt

SEQ ID NO: 1293170 - DNA, 15 bp, Homo sapiens
aggagtgggaacact

SEQ ID NO: 1293171 - DNA, 15 bp, Homo sapiens
gaggagtgggaacac

SEQ ID NO: 1293172 - DNA, 15 bp, Homo sapiens
tgaggagtgggaaca

SEQ ID NO: 1293173 - DNA, 15 bp, Homo sapiens
atgaggagtgggaac

SEQ ID NO: 1293174 - DNA, 15 bp, Homo sapiens
aatgaggagtgggaa

SEQ ID NO: 1293175 - DNA, 15 bp, Homo sapiens
aaatgaggagtggga

SEQ ID NO: 1293176 - DNA, 15 bp, Homo sapiens
caaatgaggagtggg

SEQ ID NO: 1293177 - DNA, 15 bp, Homo sapiens
tcaaatgaggagtgg

SEQ ID NO: 1293178 - DNA, 15 bp, Homo sapiens
ttcaaatgaggagtg

SEQ ID NO: 1293179 - DNA, 15 bp, Homo sapiens
tttcaaatgaggagt

SEQ ID NO: 1293180 - DNA, 15 bp, Homo sapiens
ttttcaaatgaggag

SEQ ID NO: 1293181 - DNA, 15 bp, Homo sapiens
cttttcaaatgagga

SEQ ID NO: 1293182 - DNA, 15 bp, Homo sapiens
ccttttcaaatgagg

SEQ ID NO: 1293183 - DNA, 15 bp, Homo sapiens
cccttttcaaatgag

SEQ ID NO: 1293184 - DNA, 15 bp, Homo sapiens
tcccttttcaaatga

SEQ ID NO: 1293185 - DNA, 15 bp, Homo sapiens
ttcccttttcaaatg

SEQ ID NO: 1293186 - DNA, 15 bp, Homo sapiens
cttcccttttcaaat

SEQ ID NO: 1293187 - DNA, 15 bp, Homo sapiens
gcttcccttttcaaa

SEQ ID NO: 1293188 - DNA, 15 bp, Homo sapiens
tgcttcccttttcaa

SEQ ID NO: 1293189 - DNA, 15 bp, Homo sapiens
atgcttcccttttca

SEQ ID NO: 1293190 - DNA, 15 bp, Homo sapiens
aatgcttcccttttc

SEQ ID NO: 1293191 - DNA, 15 bp, Homo sapiens
aaatgcttccctttt

SEQ ID NO: 1293192 - DNA, 15 bp, Homo sapiens
gaaatgcttcccttt

SEQ ID NO: 1293193 - DNA, 15 bp, Homo sapiens
tgaaatgcttccctt

SEQ ID NO: 1293194 - DNA, 15 bp, Homo sapiens
atgaaatgcttccct

SEQ ID NO: 1293195 - DNA, 15 bp, Homo sapiens
aatgaaatgcttccc

SEQ ID NO: 1293196 - DNA, 15 bp, Homo sapiens
aaatgaaatgcttcc

SEQ ID NO: 1293197 - DNA, 15 bp, Homo sapiens
aaaatgaaatgcttc

SEQ ID NO: 1293198 - DNA, 15 bp, Homo sapiens
aaaaatgaaatgctt

SEQ ID NO: 1293199 - DNA, 15 bp, Homo sapiens
taaaaatgaaatgct

SEQ ID NO: 1293200 - DNA, 15 bp, Homo sapiens
ataaaaatgaaatgc

SEQ ID NO: 1293201 - DNA, 15 bp, Homo sapiens
cataaaaatgaaatg

SEQ ID NO: 1293202 - DNA, 15 bp, Homo sapiens
acataaaaatgaaat

SEQ ID NO: 1293203 - DNA, 15 bp, Homo sapiens
tacataaaaatgaaa

SEQ ID NO: 1293204 - DNA, 15 bp, Homo sapiens
atacataaaaatgaa

SEQ ID NO: 1293205 - DNA, 15 bp, Homo sapiens
catacataaaaatga

SEQ ID NO: 1293206 - DNA, 15 bp, Homo sapiens
acatacataaaaatg

SEQ ID NO: 1293207 - DNA, 15 bp, Homo sapiens
tacatacataaaaat

SEQ ID NO: 1293208 - DNA, 15 bp, Homo sapiens
atacatacataaaaa

SEQ ID NO: 1293209 - DNA, 15 bp, Homo sapiens
catacatacataaaa

SEQ ID NO: 1293210 - DNA, 15 bp, Homo sapiens
acatacatacataaa

SEQ ID NO: 1293211 - DNA, 15 bp, Homo sapiens
tacatacatacataa

SEQ ID NO: 1293212 - DNA, 15 bp, Homo sapiens
catacatacatacat

SEQ ID NO: 1293213 - DNA, 15 bp, Homo sapiens
tacatacatacatac

SEQ ID NO: 1293214 - DNA, 15 bp, Homo sapiens
aatacatacatacat

SEQ ID NO: 1293215 - DNA, 15 bp, Homo sapiens
aaatacatacataca

SEQ ID NO: 1293216 - DNA, 15 bp, Homo sapiens
taaatacatacatac

SEQ ID NO: 1293217 - DNA, 15 bp, Homo sapiens
ataaatacatacata

SEQ ID NO: 1293218 - DNA, 15 bp, Homo sapiens
aataaatacatacat

SEQ ID NO: 1293219 - DNA, 15 bp, Homo sapiens
aaataaatacataca

SEQ ID NO: 1293220 - DNA, 15 bp, Homo sapiens
taaataaatacatac

SEQ ID NO: 1293221 - DNA, 15 bp, Homo sapiens
ctctcaaaataaata

SEQ ID NO: 1293222 - DNA, 15 bp, Homo sapiens
cctctcaaaataaat

SEQ ID NO: 1293223 - DNA, 15 bp, Homo sapiens
ccctctcaaaataaa

SEQ ID NO: 1293224 - DNA, 15 bp, Homo sapiens
tccctctcaaaataa

SEQ ID NO: 1293225 - DNA, 15 bp, Homo sapiens
ttccctctcaaaata

SEQ ID NO: 1293226 - DNA, 15 bp, Homo sapiens
attccctctcaaaat

SEQ ID NO: 1293227 - DNA, 15 bp, Homo sapiens
gattccctctcaaaa

SEQ ID NO: 1293228 - DNA, 15 bp, Homo sapiens
agattccctctcaaa

SEQ ID NO: 1293229 - DNA, 15 bp, Homo sapiens
aagattccctctcaa

SEQ ID NO: 1293230 - DNA, 15 bp, Homo sapiens
caagattccctctca

SEQ ID NO: 1293231 - DNA, 15 bp, Homo sapiens
gcaagattccctctc

SEQ ID NO: 1293232 - DNA, 15 bp, Homo sapiens
agcaagattccctct

SEQ ID NO: 1293233 - DNA, 15 bp, Homo sapiens
gagcaagattccctc

SEQ ID NO: 1293234 - DNA, 15 bp, Homo sapiens
agagcaagattccct

SEQ ID NO: 1293235 - DNA, 15 bp, Homo sapiens
cagagcaagattccc

SEQ ID NO: 1293236 - DNA, 15 bp, Homo sapiens
acagagcaagattcc

SEQ ID NO: 1293237 - DNA, 15 bp, Homo sapiens
gacagagcaagattc

SEQ ID NO: 1293238 - DNA, 15 bp, Homo sapiens
tgacagagcaagatt

SEQ ID NO: 1293239 - DNA, 15 bp, Homo sapiens
gtgacagagcaagat

SEQ ID NO: 1293240 - DNA, 15 bp, Homo sapiens
tagtgagccgagatc

SEQ ID NO: 1293241 - DNA, 15 bp, Homo sapiens
gtagtgagccgagat

SEQ ID NO: 1293242 - DNA, 15 bp, Homo sapiens
tgtagtgagccgaga

SEQ ID NO: 1293243 - DNA, 15 bp, Homo sapiens
aggttgtagtgagcc

SEQ ID NO: 1293244 - DNA, 15 bp, Homo sapiens
gaggttgtagtgagc

SEQ ID NO: 1293245 - DNA, 15 bp, Homo sapiens
agaggttgtagtgag

SEQ ID NO: 1293246 - DNA, 15 bp, Homo sapiens
agaggcagaggttgt

SEQ ID NO: 1293247 - DNA, 15 bp, Homo sapiens
acttgaacccaagag

SEQ ID NO: 1293248 - DNA, 15 bp, Homo sapiens
cacttgaacccaaga

SEQ ID NO: 1293249 - DNA, 15 bp, Homo sapiens
tcacttgaacccaag

SEQ ID NO: 1293250 - DNA, 15 bp, Homo sapiens
atcacttgaacccaa

SEQ ID NO: 1293251 - DNA, 15 bp, Homo sapiens
cgtggcgcatgcctg

SEQ ID NO: 1293252 - DNA, 15 bp, Homo sapiens
tcgtggcgcatgcct

SEQ ID NO: 1293253 - DNA, 15 bp, Homo sapiens
gtcgtggcgcatgcc

SEQ ID NO: 1293254 - DNA, 15 bp, Homo sapiens
agtcgtggcgcatgc

SEQ ID NO: 1293255 - DNA, 15 bp, Homo sapiens
gagtcgtggcgcatg

SEQ ID NO: 1293256 - DNA, 15 bp, Homo sapiens
ggagtcgtggcgcat

SEQ ID NO: 1293257 - DNA, 15 bp, Homo sapiens
aggagtcgtggcgca

SEQ ID NO: 1293258 - DNA, 15 bp, Homo sapiens
caggagtcgtggcgc

SEQ ID NO: 1293259 - DNA, 15 bp, Homo sapiens
ccaggagtcgtggcg

SEQ ID NO: 1293260 - DNA, 15 bp, Homo sapiens
gccaggagtcgtggc

SEQ ID NO: 1293261 - DNA, 15 bp, Homo sapiens
agccaggagtcgtgg

SEQ ID NO: 1293262 - DNA, 15 bp, Homo sapiens
tagccaggagtcgtg

SEQ ID NO: 1293263 - DNA, 15 bp, Homo sapiens
ttagccaggagtcgt

SEQ ID NO: 1293264 - DNA, 15 bp, Homo sapiens
attagccaggagtcg

SEQ ID NO: 1293265 - DNA, 15 bp, Homo sapiens
aattagccaggagtc

SEQ ID NO: 1293266 - DNA, 15 bp, Homo sapiens
aaattagccaggagt

SEQ ID NO: 1293267 - DNA, 15 bp, Homo sapiens
aaaattagccaggag

SEQ ID NO: 1293268 - DNA, 15 bp, Homo sapiens
aaaaattagccagga

SEQ ID NO: 1293269 - DNA, 15 bp, Homo sapiens
tcaacatggtgaaac

SEQ ID NO: 1293270 - DNA, 15 bp, Homo sapiens
gtcaacatggtgaaa

SEQ ID NO: 1293271 - DNA, 15 bp, Homo sapiens
ggtcaacatggtgaa

SEQ ID NO: 1293272 - DNA, 15 bp, Homo sapiens
tggtcaacatggtga

SEQ ID NO: 1293273 - DNA, 15 bp, Homo sapiens
ttggtcaacatggtg

SEQ ID NO: 1293274 - DNA, 15 bp, Homo sapiens
cttggtcaacatggt

SEQ ID NO: 1293275 - DNA, 15 bp, Homo sapiens
gcttggtcaacatgg

SEQ ID NO: 1293276 - DNA, 15 bp, Homo sapiens
agcttggtcaacatg

SEQ ID NO: 1293277 - DNA, 15 bp, Homo sapiens
cagcttggtcaacat

SEQ ID NO: 1293278 - DNA, 15 bp, Homo sapiens
ccagcttggtcaaca

SEQ ID NO: 1293279 - DNA, 15 bp, Homo sapiens
accagcttggtcaac

SEQ ID NO: 1293280 - DNA, 15 bp, Homo sapiens
gaccagcttggtcaa

SEQ ID NO: 1293281 - DNA, 15 bp, Homo sapiens
agaccagcttggtca

SEQ ID NO: 1293282 - DNA, 15 bp, Homo sapiens
aagaccagcttggtc

SEQ ID NO: 1293283 - DNA, 15 bp, Homo sapiens
caagaccagcttggt

SEQ ID NO: 1293284 - DNA, 15 bp, Homo sapiens
tcaagaccagcttgg

SEQ ID NO: 1293285 - DNA, 15 bp, Homo sapiens
ttcaagaccagcttg

SEQ ID NO: 1293286 - DNA, 15 bp, Homo sapiens
attcaagaccagctt

SEQ ID NO: 1293287 - DNA, 15 bp, Homo sapiens
tattcaagaccagct

SEQ ID NO: 1293288 - DNA, 15 bp, Homo sapiens
gtattcaagaccagc

SEQ ID NO: 1293289 - DNA, 15 bp, Homo sapiens
ggtattcaagaccag

SEQ ID NO: 1293290 - DNA, 15 bp, Homo sapiens
aggtattcaagacca

SEQ ID NO: 1293291 - DNA, 15 bp, Homo sapiens
caggtattcaagacc

SEQ ID NO: 1293292 - DNA, 15 bp, Homo sapiens
tcaggtattcaagac

SEQ ID NO: 1293293 - DNA, 15 bp, Homo sapiens
gtcaggtattcaaga

SEQ ID NO: 1293294 - DNA, 15 bp, Homo sapiens
ggtcaggtattcaag

SEQ ID NO: 1293295 - DNA, 15 bp, Homo sapiens
aggtcaggtattcaa

SEQ ID NO: 1293296 - DNA, 15 bp, Homo sapiens
gaggtcaggtattca

SEQ ID NO: 1293297 - DNA, 15 bp, Homo sapiens
tgaggtcaggtattc

SEQ ID NO: 1293298 - DNA, 15 bp, Homo sapiens
ctgaggtcaggtatt

SEQ ID NO: 1293299 - DNA, 15 bp, Homo sapiens
cctgaggtcaggtat

SEQ ID NO: 1293300 - DNA, 15 bp, Homo sapiens
acctgaggtcaggta

SEQ ID NO: 1293301 - DNA, 15 bp, Homo sapiens
cacctgaggtcaggt

SEQ ID NO: 1293302 - DNA, 15 bp, Homo sapiens
aaggtgggtggatca

SEQ ID NO: 1293303 - DNA, 15 bp, Homo sapiens
caaggtgggtggatc

SEQ ID NO: 1293304 - DNA, 15 bp, Homo sapiens
tgaggccgggcacag

SEQ ID NO: 1293305 - DNA, 15 bp, Homo sapiens
atgaggccgggcaca

SEQ ID NO: 1293306 - DNA, 15 bp, Homo sapiens
aatgaggccgggcac

SEQ ID NO: 1293307 - DNA, 15 bp, Homo sapiens
aaatgaggccgggca

SEQ ID NO: 1293308 - DNA, 15 bp, Homo sapiens
aaaatgaggccgggc

SEQ ID NO: 1293309 - DNA, 15 bp, Homo sapiens
aaaaatgaggccggg

SEQ ID NO: 1293310 - DNA, 15 bp, Homo sapiens
aaaaaatgaggccgg

SEQ ID NO: 1293311 - DNA, 15 bp, Homo sapiens
aaaaaaatgaggccg

SEQ ID NO: 1293312 - DNA, 15 bp, Homo sapiens
aaaaaaaatgaggcc

SEQ ID NO: 1293313 - DNA, 15 bp, Homo sapiens
aaaaaaaaatgaggc

SEQ ID NO: 1293314 - DNA, 15 bp, Homo sapiens
aaaaaaaaaatgagg

SEQ ID NO: 1293315 - DNA, 15 bp, Homo sapiens
aaaaaaaaaaatgag

SEQ ID NO: 1293316 - DNA, 15 bp, Homo sapiens
aaaaaaaaaaaatga

SEQ ID NO: 1293317 - DNA, 15 bp, Homo sapiens
taaaaaaaaaaaatg

SEQ ID NO: 1293318 - DNA, 15 bp, Homo sapiens
tcattaaaaaaaaaa

SEQ ID NO: 1293319 - DNA, 15 bp, Homo sapiens
ttcattaaaaaaaaa

SEQ ID NO: 1293320 - DNA, 15 bp, Homo sapiens
aattcattaaaaaaa

SEQ ID NO: 1293321 - DNA, 15 bp, Homo sapiens
taattcattaaaaaa

SEQ ID NO: 1293322 - DNA, 15 bp, Homo sapiens
ttaattcattaaaaa

SEQ ID NO: 1293323 - DNA, 15 bp, Homo sapiens
tttaattcattaaaa

SEQ ID NO: 1293324 - DNA, 15 bp, Homo sapiens
ttttaattcattaaa

SEQ ID NO: 1293325 - DNA, 15 bp, Homo sapiens
tttttaattcattaa

SEQ ID NO: 1293326 - DNA, 15 bp, Homo sapiens
ttttttaattcatta

SEQ ID NO: 1293327 - DNA, 15 bp, Homo sapiens
tttttttaattcatt

SEQ ID NO: 1293328 - DNA, 15 bp, Homo sapiens
ttttttttaattcat

SEQ ID NO: 1293329 - DNA, 15 bp, Homo sapiens
tttttttttaattca

SEQ ID NO: 1293330 - DNA, 15 bp, Homo sapiens
ttttttttttaattc

SEQ ID NO: 1293331 - DNA, 15 bp, Homo sapiens
tttttttttttaatt

SEQ ID NO: 1293332 - DNA, 15 bp, Homo sapiens
agttttttttttttt

SEQ ID NO: 1293333 - DNA, 15 bp, Homo sapiens
aagtttttttttttt

SEQ ID NO: 1293334 - DNA, 15 bp, Homo sapiens
taagttttttttttt

SEQ ID NO: 1293335 - DNA, 15 bp, Homo sapiens
ataagtttttttttt

SEQ ID NO: 1293336 - DNA, 15 bp, Homo sapiens
cataagttttttttt

SEQ ID NO: 1293337 - DNA, 15 bp, Homo sapiens
acataagtttttttt

SEQ ID NO: 1293338 - DNA, 15 bp, Homo sapiens
cacataagttttttt

SEQ ID NO: 1293339 - DNA, 15 bp, Homo sapiens
ccacataagtttttt

SEQ ID NO: 1293340 - DNA, 15 bp, Homo sapiens
gccacataagttttt

SEQ ID NO: 1293341 - DNA, 15 bp, Homo sapiens
tgccacataagtttt

SEQ ID NO: 1293342 - DNA, 15 bp, Homo sapiens
ctgccacataagttt

SEQ ID NO: 1293343 - DNA, 15 bp, Homo sapiens
actgccacataagtt

SEQ ID NO: 1293344 - DNA, 15 bp, Homo sapiens
aactgccacataagt

SEQ ID NO: 1293345 - DNA, 15 bp, Homo sapiens
caactgccacataag

SEQ ID NO: 1293346 - DNA, 15 bp, Homo sapiens
tcaactgccacataa

SEQ ID NO: 1293347 - DNA, 15 bp, Homo sapiens
atcaactgccacata

SEQ ID NO: 1293348 - DNA, 15 bp, Homo sapiens
tatcaactgccacat

SEQ ID NO: 1293349 - DNA, 15 bp, Homo sapiens
ttatcaactgccaca

SEQ ID NO: 1293350 - DNA, 15 bp, Homo sapiens
tttatcaactgccac

SEQ ID NO: 1293351 - DNA, 15 bp, Homo sapiens
ttttatcaactgcca

SEQ ID NO: 1293352 - DNA, 15 bp, Homo sapiens
attttatcaactgcc

SEQ ID NO: 1293353 - DNA, 15 bp, Homo sapiens
tattttatcaactgc

SEQ ID NO: 1293354 - DNA, 15 bp, Homo sapiens
ttattttatcaactg

SEQ ID NO: 1293355 - DNA, 15 bp, Homo sapiens
attattttatcaact

SEQ ID NO: 1293356 - DNA, 15 bp, Homo sapiens
aattattttatcaac

SEQ ID NO: 1293357 - DNA, 15 bp, Homo sapiens
taattattttatcaa

SEQ ID NO: 1293358 - DNA, 15 bp, Homo sapiens
ataattattttatca

SEQ ID NO: 1293359 - DNA, 15 bp, Homo sapiens
aataattattttatc

SEQ ID NO: 1293360 - DNA, 15 bp, Homo sapiens
aaataattattttat

SEQ ID NO: 1293361 - DNA, 15 bp, Homo sapiens
aaaataattatttta

SEQ ID NO: 1293362 - DNA, 15 bp, Homo sapiens
caaaataattatttt

SEQ ID NO: 1293363 - DNA, 15 bp, Homo sapiens
tcaaaataattattt

SEQ ID NO: 1293364 - DNA, 15 bp, Homo sapiens
ttcaaaataattatt

SEQ ID NO: 1293365 - DNA, 15 bp, Homo sapiens
tttcaaaataattat

SEQ ID NO: 1293366 - DNA, 15 bp, Homo sapiens
atttcaaaataatta

SEQ ID NO: 1293367 - DNA, 15 bp, Homo sapiens
aatttcaaaataatt

SEQ ID NO: 1293368 - DNA, 15 bp, Homo sapiens
taatttcaaaataat

SEQ ID NO: 1293369 - DNA, 15 bp, Homo sapiens
ctaatttcaaaataa

SEQ ID NO: 1293370 - DNA, 15 bp, Homo sapiens
gctaatttcaaaata

SEQ ID NO: 1293371 - DNA, 15 bp, Homo sapiens
ggctaatttcaaaat

SEQ ID NO: 1293372 - DNA, 15 bp, Homo sapiens
tggctaatttcaaaa

SEQ ID NO: 1293373 - DNA, 15 bp, Homo sapiens
gtggctaatttcaaa

SEQ ID NO: 1293374 - DNA, 15 bp, Homo sapiens
agtggctaatttcaa

SEQ ID NO: 1293375 - DNA, 15 bp, Homo sapiens
aagtggctaatttca

SEQ ID NO: 1293376 - DNA, 15 bp, Homo sapiens
taagtggctaatttc

SEQ ID NO: 1293377 - DNA, 15 bp, Homo sapiens
ataagtggctaattt

SEQ ID NO: 1293378 - DNA, 15 bp, Homo sapiens
gataagtggctaatt

SEQ ID NO: 1293379 - DNA, 15 bp, Homo sapiens
agataagtggctaat

SEQ ID NO: 1293380 - DNA, 15 bp, Homo sapiens
aagataagtggctaa

SEQ ID NO: 1293381 - DNA, 15 bp, Homo sapiens
gaagataagtggcta

SEQ ID NO: 1293382 - DNA, 15 bp, Homo sapiens
agaagataagtggct

SEQ ID NO: 1293383 - DNA, 15 bp, Homo sapiens
tagaagataagtggc

SEQ ID NO: 1293384 - DNA, 15 bp, Homo sapiens
ctagaagataagtgg

SEQ ID NO: 1293385 - DNA, 15 bp, Homo sapiens
tctagaagataagtg

SEQ ID NO: 1293386 - DNA, 15 bp, Homo sapiens
ttctagaagataagt

SEQ ID NO: 1293387 - DNA, 15 bp, Homo sapiens
tttctagaagataag

SEQ ID NO: 1293388 - DNA, 15 bp, Homo sapiens
ttttctagaagataa

SEQ ID NO: 1293389 - DNA, 15 bp, Homo sapiens
tttttctagaagata

SEQ ID NO: 1293390 - DNA, 15 bp, Homo sapiens
ttttttctagaagat

SEQ ID NO: 1293391 - DNA, 15 bp, Homo sapiens
tttttttctagaaga

SEQ ID NO: 1293392 - DNA, 15 bp, Homo sapiens
ttttttttctagaag

SEQ ID NO: 1293393 - DNA, 15 bp, Homo sapiens
tttttttttctagaa

SEQ ID NO: 1293394 - DNA, 15 bp, Homo sapiens
atttttttttctaga

SEQ ID NO: 1293395 - DNA, 15 bp, Homo sapiens
catttttttttctag

SEQ ID NO: 1293396 - DNA, 15 bp, Homo sapiens
acatttttttttcta

SEQ ID NO: 1293397 - DNA, 15 bp, Homo sapiens
aacatttttttttct

SEQ ID NO: 1293398 - DNA, 15 bp, Homo sapiens
aaacatttttttttc

SEQ ID NO: 1293399 - DNA, 15 bp, Homo sapiens
caaacattttttttt

SEQ ID NO: 1293400 - DNA, 15 bp, Homo sapiens
acaaacatttttttt

SEQ ID NO: 1293401 - DNA, 15 bp, Homo sapiens
aacaaacattttttt

SEQ ID NO: 1293402 - DNA, 15 bp, Homo sapiens
caacaaacatttttt

SEQ ID NO: 1293403 - DNA, 15 bp, Homo sapiens
gcaacaaacattttt

SEQ ID NO: 1293404 - DNA, 15 bp, Homo sapiens
agcaacaaacatttt

SEQ ID NO: 1293405 - DNA, 15 bp, Homo sapiens
gagcaacaaacattt

SEQ ID NO: 1293406 - DNA, 15 bp, Homo sapiens
agagcaacaaacatt

SEQ ID NO: 1293407 - DNA, 15 bp, Homo sapiens
aagagcaacaaacat

SEQ ID NO: 1293408 - DNA, 15 bp, Homo sapiens
gaagagcaacaaaca

SEQ ID NO: 1293409 - DNA, 15 bp, Homo sapiens
agaagagcaacaaac

SEQ ID NO: 1293410 - DNA, 15 bp, Homo sapiens
cagaagagcaacaaa

SEQ ID NO: 1293411 - DNA, 15 bp, Homo sapiens
tcagaagagcaacaa

SEQ ID NO: 1293412 - DNA, 15 bp, Homo sapiens
atcagaagagcaaca

SEQ ID NO: 1293413 - DNA, 15 bp, Homo sapiens
tatcagaagagcaac

SEQ ID NO: 1293414 - DNA, 15 bp, Homo sapiens
atatcagaagagcaa

SEQ ID NO: 1293415 - DNA, 15 bp, Homo sapiens
aatatcagaagagca

SEQ ID NO: 1293416 - DNA, 15 bp, Homo sapiens
caatatcagaagagc

SEQ ID NO: 1293417 - DNA, 15 bp, Homo sapiens
ccaatatcagaagag

SEQ ID NO: 1293418 - DNA, 15 bp, Homo sapiens
accaatatcagaaga

SEQ ID NO: 1293419 - DNA, 15 bp, Homo sapiens
taccaatatcagaag

SEQ ID NO: 1293420 - DNA, 15 bp, Homo sapiens
ctaccaatatcagaa

SEQ ID NO: 1293421 - DNA, 15 bp, Homo sapiens
cctaccaatatcaga

SEQ ID NO: 1293422 - DNA, 15 bp, Homo sapiens
tcctaccaatatcag

SEQ ID NO: 1293423 - DNA, 15 bp, Homo sapiens
ctcctaccaatatca

SEQ ID NO: 1293424 - DNA, 15 bp, Homo sapiens
actcctaccaatatc

SEQ ID NO: 1293425 - DNA, 15 bp, Homo sapiens
aactcctaccaatat

SEQ ID NO: 1293426 - DNA, 15 bp, Homo sapiens
aaactcctaccaata

SEQ ID NO: 1293427 - DNA, 15 bp, Homo sapiens
gaaactcctaccaat

SEQ ID NO: 1293428 - DNA, 15 bp, Homo sapiens
agaaactcctaccaa

SEQ ID NO: 1293429 - DNA, 15 bp, Homo sapiens
aagaaactcctacca

SEQ ID NO: 1293430 - DNA, 15 bp, Homo sapiens
gaagaaactcctacc

SEQ ID NO: 1293431 - DNA, 15 bp, Homo sapiens
ggaagaaactcctac

SEQ ID NO: 1293432 - DNA, 15 bp, Homo sapiens
aggaagaaactccta

SEQ ID NO: 1293433 - DNA, 15 bp, Homo sapiens
gaggaagaaactcct

SEQ ID NO: 1293434 - DNA, 15 bp, Homo sapiens
agaggaagaaactcc

SEQ ID NO: 1293435 - DNA, 15 bp, Homo sapiens
aagaggaagaaactc

SEQ ID NO: 1293436 - DNA, 15 bp, Homo sapiens
gaagaggaagaaact

SEQ ID NO: 1293437 - DNA, 15 bp, Homo sapiens
ggaagaggaagaaac

SEQ ID NO: 1293438 - DNA, 15 bp, Homo sapiens
tggaagaggaagaaa

SEQ ID NO: 1293439 - DNA, 15 bp, Homo sapiens
ttggaagaggaagaa

SEQ ID NO: 1293440 - DNA, 15 bp, Homo sapiens
cttggaagaggaaga

SEQ ID NO: 1293441 - DNA, 15 bp, Homo sapiens
ccttggaagaggaag

SEQ ID NO: 1293442 - DNA, 15 bp, Homo sapiens
accttggaagaggaa

SEQ ID NO: 1293443 - DNA, 15 bp, Homo sapiens
caccttggaagagga

SEQ ID NO: 1293444 - DNA, 15 bp, Homo sapiens
tcaccttggaagagg

SEQ ID NO: 1293445 - DNA, 15 bp, Homo sapiens
gtcaccttggaagag

SEQ ID NO: 1293446 - DNA, 15 bp, Homo sapiens
agtcaccttggaaga

SEQ ID NO: 1293447 - DNA, 15 bp, Homo sapiens
aagtcaccttggaag

SEQ ID NO: 1293448 - DNA, 15 bp, Homo sapiens
aaagtcaccttggaa

SEQ ID NO: 1293449 - DNA, 15 bp, Homo sapiens
aaaagtcaccttgga

SEQ ID NO: 1293450 - DNA, 15 bp, Homo sapiens
aaaaagtcaccttgg

SEQ ID NO: 1293451 - DNA, 15 bp, Homo sapiens
caaaaagtcaccttg

SEQ ID NO: 1293452 - DNA, 15 bp, Homo sapiens
ccaaaaagtcacctt

SEQ ID NO: 1293453 - DNA, 15 bp, Homo sapiens
tccaaaaagtcacct

SEQ ID NO: 1293454 - DNA, 15 bp, Homo sapiens
atccaaaaagtcacc

SEQ ID NO: 1293455 - DNA, 15 bp, Homo sapiens
tatccaaaaagtcac

SEQ ID NO: 1293456 - DNA, 15 bp, Homo sapiens
ttatccaaaaagtca

SEQ ID NO: 1293457 - DNA, 15 bp, Homo sapiens
gttatccaaaaagtc

SEQ ID NO: 1293458 - DNA, 15 bp, Homo sapiens
tgttatccaaaaagt

SEQ ID NO: 1293459 - DNA, 15 bp, Homo sapiens
gtgttatccaaaaag

SEQ ID NO: 1293460 - DNA, 15 bp, Homo sapiens
ggtgttatccaaaaa

SEQ ID NO: 1293461 - DNA, 15 bp, Homo sapiens
gggtgttatccaaaa

SEQ ID NO: 1293462 - DNA, 15 bp, Homo sapiens
agggtgttatccaaa

SEQ ID NO: 1293463 - DNA, 15 bp, Homo sapiens
cagggtgttatccaa

SEQ ID NO: 1293464 - DNA, 15 bp, Homo sapiens
tcagggtgttatcca

SEQ ID NO: 1293465 - DNA, 15 bp, Homo sapiens
ctcagggtgttatcc

SEQ ID NO: 1293466 - DNA, 15 bp, Homo sapiens
cctcagggtgttatc

SEQ ID NO: 1293467 - DNA, 15 bp, Homo sapiens
ccctcagggtgttat

SEQ ID NO: 1293468 - DNA, 15 bp, Homo sapiens
cccctcagggtgtta

SEQ ID NO: 1293469 - DNA, 15 bp, Homo sapiens
tcccctcagggtgtt

SEQ ID NO: 1293470 - DNA, 15 bp, Homo sapiens
gtcccctcagggtgt

SEQ ID NO: 1293471 - DNA, 15 bp, Homo sapiens
agtcccctcagggtg

SEQ ID NO: 1293472 - DNA, 15 bp, Homo sapiens
tagtcccctcagggt

SEQ ID NO: 1293473 - DNA, 15 bp, Homo sapiens
gtagtcccctcaggg

SEQ ID NO: 1293474 - DNA, 15 bp, Homo sapiens
ggtagtcccctcagg

SEQ ID NO: 1293475 - DNA, 15 bp, Homo sapiens
gggtagtcccctcag

SEQ ID NO: 1293476 - DNA, 15 bp, Homo sapiens
agggtagtcccctca

SEQ ID NO: 1293477 - DNA, 15 bp, Homo sapiens
aagggtagtcccctc

SEQ ID NO: 1293478 - DNA, 15 bp, Homo sapiens
gaagggtagtcccct

SEQ ID NO: 1293479 - DNA, 15 bp, Homo sapiens
tgaagggtagtcccc

SEQ ID NO: 1293480 - DNA, 15 bp, Homo sapiens
atgaagggtagtccc

SEQ ID NO: 1293481 - DNA, 15 bp, Homo sapiens
gatgaagggtagtcc

SEQ ID NO: 1293482 - DNA, 15 bp, Homo sapiens
ggatgaagggtagtc

SEQ ID NO: 1293483 - DNA, 15 bp, Homo sapiens
aggatgaagggtagt

SEQ ID NO: 1293484 - DNA, 15 bp, Homo sapiens
aaggatgaagggtag

SEQ ID NO: 1293485 - DNA, 15 bp, Homo sapiens
aaaggatgaagggta

SEQ ID NO: 1293486 - DNA, 15 bp, Homo sapiens
taaaggatgaagggt

SEQ ID NO: 1293487 - DNA, 15 bp, Homo sapiens
ataaaggatgaaggg

SEQ ID NO: 1293488 - DNA, 15 bp, Homo sapiens
gataaaggatgaagg

SEQ ID NO: 1293489 - DNA, 15 bp, Homo sapiens
agataaaggatgaag

SEQ ID NO: 1293490 - DNA, 15 bp, Homo sapiens
gagataaaggatgaa

SEQ ID NO: 1293491 - DNA, 15 bp, Homo sapiens
ggagataaaggatga

SEQ ID NO: 1293492 - DNA, 15 bp, Homo sapiens
tggagataaaggatg

SEQ ID NO: 1293493 - DNA, 15 bp, Homo sapiens
atggagataaaggat

SEQ ID NO: 1293494 - DNA, 15 bp, Homo sapiens
gatggagataaagga

SEQ ID NO: 1293495 - DNA, 15 bp, Homo sapiens
cgatggagataaagg

SEQ ID NO: 1293496 - DNA, 15 bp, Homo sapiens
gcgatggagataaag

SEQ ID NO: 1293497 - DNA, 15 bp, Homo sapiens
tgcgatggagataaa

SEQ ID NO: 1293498 - DNA, 15 bp, Homo sapiens
ctgcgatggagataa

SEQ ID NO: 1293499 - DNA, 15 bp, Homo sapiens
gctgcgatggagata

SEQ ID NO: 1293500 - DNA, 15 bp, Homo sapiens
ggctgcgatggagat

SEQ ID NO: 1293501 - DNA, 15 bp, Homo sapiens
tggctgcgatggaga

SEQ ID NO: 1293502 - DNA, 15 bp, Homo sapiens
atggctgcgatggag

SEQ ID NO: 1293503 - DNA, 15 bp, Homo sapiens
aatggctgcgatgga

SEQ ID NO: 1293504 - DNA, 15 bp, Homo sapiens
gaatggctgcgatgg

SEQ ID NO: 1293505 - DNA, 15 bp, Homo sapiens
ggaatggctgcgatg

SEQ ID NO: 1293506 - DNA, 15 bp, Homo sapiens
tggaatggctgcgat

SEQ ID NO: 1293507 - DNA, 15 bp, Homo sapiens
ctggaatggctgcga

SEQ ID NO: 1293508 - DNA, 15 bp, Homo sapiens
cctggaatggctgcg

SEQ ID NO: 1293509 - DNA, 15 bp, Homo sapiens
gcctggaatggctgc

SEQ ID NO: 1293510 - DNA, 15 bp, Homo sapiens
ggcctggaatggctg

SEQ ID NO: 1293511 - DNA, 15 bp, Homo sapiens
aggcctggaatggct

SEQ ID NO: 1293512 - DNA, 15 bp, Homo sapiens
aaggcctggaatggc

SEQ ID NO: 1293513 - DNA, 15 bp, Homo sapiens
gaaggcctggaatgg

SEQ ID NO: 1293514 - DNA, 15 bp, Homo sapiens
agaaggcctggaatg

SEQ ID NO: 1293515 - DNA, 15 bp, Homo sapiens
cagaaggcctggaat

SEQ ID NO: 1293516 - DNA, 15 bp, Homo sapiens
acagaaggcctggaa

SEQ ID NO: 1293517 - DNA, 15 bp, Homo sapiens
cacagaaggcctgga

SEQ ID NO: 1293518 - DNA, 15 bp, Homo sapiens
tcacagaaggcctgg

SEQ ID NO: 1293519 - DNA, 15 bp, Homo sapiens
gtcacagaaggcctg

SEQ ID NO: 1293520 - DNA, 15 bp, Homo sapiens
agtcacagaaggcct

SEQ ID NO: 1293521 - DNA, 15 bp, Homo sapiens
gagtcacagaaggcc

SEQ ID NO: 1293522 - DNA, 15 bp, Homo sapiens
ggagtcacagaaggc

SEQ ID NO: 1293523 - DNA, 15 bp, Homo sapiens
aggagtcacagaagg

SEQ ID NO: 1293524 - DNA, 15 bp, Homo sapiens
caggagtcacagaag

SEQ ID NO: 1293525 - DNA, 15 bp, Homo sapiens
ccaggagtcacagaa

SEQ ID NO: 1293526 - DNA, 15 bp, Homo sapiens
cccaggagtcacaga

SEQ ID NO: 1293527 - DNA, 15 bp, Homo sapiens
tcccaggagtcacag

SEQ ID NO: 1293528 - DNA, 15 bp, Homo sapiens
atcccaggagtcaca

SEQ ID NO: 1293529 - DNA, 15 bp, Homo sapiens
tatcccaggagtcac

SEQ ID NO: 1293530 - DNA, 15 bp, Homo sapiens
ttatcccaggagtca

SEQ ID NO: 1293531 - DNA, 15 bp, Homo sapiens
tttatcccaggagtc

SEQ ID NO: 1293532 - DNA, 15 bp, Homo sapiens
ttttatcccaggagt

SEQ ID NO: 1293533 - DNA, 15 bp, Homo sapiens
attttatcccaggag

SEQ ID NO: 1293534 - DNA, 15 bp, Homo sapiens
tattttatcccagga

SEQ ID NO: 1293535 - DNA, 15 bp, Homo sapiens
ttattttatcccagg

SEQ ID NO: 1293536 - DNA, 15 bp, Homo sapiens
tttattttatcccag

SEQ ID NO: 1293537 - DNA, 15 bp, Homo sapiens
gtttattttatccca

SEQ ID NO: 1293538 - DNA, 15 bp, Homo sapiens
tgtttattttatccc

SEQ ID NO: 1293539 - DNA, 15 bp, Homo sapiens
atgtttattttatcc

SEQ ID NO: 1293540 - DNA, 15 bp, Homo sapiens
aatgtttattttatc

SEQ ID NO: 1293541 - DNA, 15 bp, Homo sapiens
taatgtttattttat

SEQ ID NO: 1293542 - DNA, 15 bp, Homo sapiens
ctaatgtttatttta

SEQ ID NO: 1293543 - DNA, 15 bp, Homo sapiens
actaatgtttatttt

SEQ ID NO: 1293544 - DNA, 15 bp, Homo sapiens
cactaatgtttattt

SEQ ID NO: 1293545 - DNA, 15 bp, Homo sapiens
ccactaatgtttatt

SEQ ID NO: 1293546 - DNA, 15 bp, Homo sapiens
cccactaatgtttat

SEQ ID NO: 1293547 - DNA, 15 bp, Homo sapiens
gcccactaatgttta

SEQ ID NO: 1293548 - DNA, 15 bp, Homo sapiens
tgcccactaatgttt

SEQ ID NO: 1293549 - DNA, 15 bp, Homo sapiens
gtgcccactaatgtt

SEQ ID NO: 1293550 - DNA, 15 bp, Homo sapiens
agtgcccactaatgt

SEQ ID NO: 1293551 - DNA, 15 bp, Homo sapiens
cagtgcccactaatg

SEQ ID NO: 1293552 - DNA, 15 bp, Homo sapiens
acagtgcccactaat

SEQ ID NO: 1293553 - DNA, 15 bp, Homo sapiens
aacagtgcccactaa

SEQ ID NO: 1293554 - DNA, 15 bp, Homo sapiens
gaacagtgcccacta

SEQ ID NO: 1293555 - DNA, 15 bp, Homo sapiens
ggaacagtgcccact

SEQ ID NO: 1293556 - DNA, 15 bp, Homo sapiens
tggaacagtgcccac

SEQ ID NO: 1293557 - DNA, 15 bp, Homo sapiens
atggaacagtgccca

SEQ ID NO: 1293558 - DNA, 15 bp, Homo sapiens
aatggaacagtgccc

SEQ ID NO: 1293559 - DNA, 15 bp, Homo sapiens
taatggaacagtgcc

SEQ ID NO: 1293560 - DNA, 15 bp, Homo sapiens
gtaatggaacagtgc

SEQ ID NO: 1293561 - DNA, 15 bp, Homo sapiens
tgtaatggaacagtg

SEQ ID NO: 1293562 - DNA, 15 bp, Homo sapiens
ctgtaatggaacagt

SEQ ID NO: 1293563 - DNA, 15 bp, Homo sapiens
cctgtaatggaacag

SEQ ID NO: 1293564 - DNA, 15 bp, Homo sapiens
ccctgtaatggaaca

SEQ ID NO: 1293565 - DNA, 15 bp, Homo sapiens
accctgtaatggaac

SEQ ID NO: 1293566 - DNA, 15 bp, Homo sapiens
aaccctgtaatggaa

SEQ ID NO: 1293567 - DNA, 15 bp, Homo sapiens
gaaccctgtaatgga

SEQ ID NO: 1293568 - DNA, 15 bp, Homo sapiens
ggaaccctgtaatgg

SEQ ID NO: 1293569 - DNA, 15 bp, Homo sapiens
gggaaccctgtaatg

SEQ ID NO: 1293570 - DNA, 15 bp, Homo sapiens
agggaaccctgtaat

SEQ ID NO: 1293571 - DNA, 15 bp, Homo sapiens
aagggaaccctgtaa

SEQ ID NO: 1293572 - DNA, 15 bp, Homo sapiens
aaagggaaccctgta

SEQ ID NO: 1293573 - DNA, 15 bp, Homo sapiens
aaaagggaaccctgt

SEQ ID NO: 1293574 - DNA, 15 bp, Homo sapiens
caaaagggaaccctg

SEQ ID NO: 1293575 - DNA, 15 bp, Homo sapiens
ccaaaagggaaccct

SEQ ID NO: 1293576 - DNA, 15 bp, Homo sapiens
accaaaagggaaccc

SEQ ID NO: 1293577 - DNA, 15 bp, Homo sapiens
caccaaaagggaacc

SEQ ID NO: 1293578 - DNA, 15 bp, Homo sapiens
acaccaaaagggaac

SEQ ID NO: 1293579 - DNA, 15 bp, Homo sapiens
cacaccaaaagggaa

SEQ ID NO: 1293580 - DNA, 15 bp, Homo sapiens
acacaccaaaaggga

SEQ ID NO: 1293581 - DNA, 15 bp, Homo sapiens
aacacaccaaaaggg

SEQ ID NO: 1293582 - DNA, 15 bp, Homo sapiens
gaacacaccaaaagg

SEQ ID NO: 1293583 - DNA, 15 bp, Homo sapiens
ggaacacaccaaaag

SEQ ID NO: 1293584 - DNA, 15 bp, Homo sapiens
tggaacacaccaaaa

SEQ ID NO: 1293585 - DNA, 15 bp, Homo sapiens
atggaacacaccaaa

SEQ ID NO: 1293586 - DNA, 15 bp, Homo sapiens
aatggaacacaccaa

SEQ ID NO: 1293587 - DNA, 15 bp, Homo sapiens
caatggaacacacca

SEQ ID NO: 1293588 - DNA, 15 bp, Homo sapiens
acaatggaacacacc

SEQ ID NO: 1293589 - DNA, 15 bp, Homo sapiens
aacaatggaacacac

SEQ ID NO: 1293590 - DNA, 15 bp, Homo sapiens
taacaatggaacaca

SEQ ID NO: 1293591 - DNA, 15 bp, Homo sapiens
ataacaatggaacac

SEQ ID NO: 1293592 - DNA, 15 bp, Homo sapiens
gataacaatggaaca

SEQ ID NO: 1293593 - DNA, 15 bp, Homo sapiens
agataacaatggaac

SEQ ID NO: 1293594 - DNA, 15 bp, Homo sapiens
gagataacaatggaa

SEQ ID NO: 1293595 - DNA, 15 bp, Homo sapiens
ggagataacaatgga

SEQ ID NO: 1293596 - DNA, 15 bp, Homo sapiens
gggagataacaatgg

SEQ ID NO: 1293597 - DNA, 15 bp, Homo sapiens
ggggagataacaatg

SEQ ID NO: 1293598 - DNA, 15 bp, Homo sapiens
gggggagataacaat

SEQ ID NO: 1293599 - DNA, 15 bp, Homo sapiens
agggggagataacaa

SEQ ID NO: 1293600 - DNA, 15 bp, Homo sapiens
gagggggagataaca

SEQ ID NO: 1293601 - DNA, 15 bp, Homo sapiens
agagggggagataac

SEQ ID NO: 1293602 - DNA, 15 bp, Homo sapiens
gagagggggagataa

SEQ ID NO: 1293603 - DNA, 15 bp, Homo sapiens
ggagagggggagata

SEQ ID NO: 1293604 - DNA, 15 bp, Homo sapiens
gggagagggggagat

SEQ ID NO: 1293605 - DNA, 15 bp, Homo sapiens
ggggagagggggaga

SEQ ID NO: 1293606 - DNA, 15 bp, Homo sapiens
gggggagagggggag

SEQ ID NO: 1293607 - DNA, 15 bp, Homo sapiens
tgggggagaggggga

SEQ ID NO: 1293608 - DNA, 15 bp, Homo sapiens
ctgggggagaggggg

SEQ ID NO: 1293609 - DNA, 15 bp, Homo sapiens
cctgggggagagggg

SEQ ID NO: 1293610 - DNA, 15 bp, Homo sapiens
tcctgggggagaggg

SEQ ID NO: 1293611 - DNA, 15 bp, Homo sapiens
gtcctgggggagagg

SEQ ID NO: 1293612 - DNA, 15 bp, Homo sapiens
ggtcctgggggagag

SEQ ID NO: 1293613 - DNA, 15 bp, Homo sapiens
aggtcctgggggaga

SEQ ID NO: 1293614 - DNA, 15 bp, Homo sapiens
taggtcctgggggag

SEQ ID NO: 1293615 - DNA, 15 bp, Homo sapiens
ataggtcctggggga

SEQ ID NO: 1293616 - DNA, 15 bp, Homo sapiens
aataggtcctggggg

SEQ ID NO: 1293617 - DNA, 15 bp, Homo sapiens
gaataggtcctgggg

SEQ ID NO: 1293618 - DNA, 15 bp, Homo sapiens
agaataggtcctggg

SEQ ID NO: 1293619 - DNA, 15 bp, Homo sapiens
gagaataggtcctgg

SEQ ID NO: 1293620 - DNA, 15 bp, Homo sapiens
ggagaataggtcctg

SEQ ID NO: 1293621 - DNA, 15 bp, Homo sapiens
gggagaataggtcct

SEQ ID NO: 1293622 - DNA, 15 bp, Homo sapiens
cgggagaataggtcc

SEQ ID NO: 1293623 - DNA, 15 bp, Homo sapiens
ccgggagaataggtc

SEQ ID NO: 1293624 - DNA, 15 bp, Homo sapiens
cccgggagaataggt

SEQ ID NO: 1293625 - DNA, 15 bp, Homo sapiens
tcccgggagaatagg

SEQ ID NO: 1293626 - DNA, 15 bp, Homo sapiens
ttcccgggagaatag

SEQ ID NO: 1293627 - DNA, 15 bp, Homo sapiens
tttcccgggagaata

SEQ ID NO: 1293628 - DNA, 15 bp, Homo sapiens
atttcccgggagaat

SEQ ID NO: 1293629 - DNA, 15 bp, Homo sapiens
catttcccgggagaa

SEQ ID NO: 1293630 - DNA, 15 bp, Homo sapiens
tcatttcccgggaga

SEQ ID NO: 1293631 - DNA, 15 bp, Homo sapiens
atcatttcccgggag

SEQ ID NO: 1293632 - DNA, 15 bp, Homo sapiens
tatcatttcccggga

SEQ ID NO: 1293633 - DNA, 15 bp, Homo sapiens
ttatcatttcccggg

SEQ ID NO: 1293634 - DNA, 15 bp, Homo sapiens
tttatcatttcccgg

SEQ ID NO: 1293635 - DNA, 15 bp, Homo sapiens
gtttatcatttcccg

SEQ ID NO: 1293636 - DNA, 15 bp, Homo sapiens
ggtttatcatttccc

SEQ ID NO: 1293637 - DNA, 15 bp, Homo sapiens
aggtttatcatttcc

SEQ ID NO: 1293638 - DNA, 15 bp, Homo sapiens
caggtttatcatttc

SEQ ID NO: 1293639 - DNA, 15 bp, Homo sapiens
ccaggtttatcattt

SEQ ID NO: 1293640 - DNA, 15 bp, Homo sapiens
cccaggtttatcatt

SEQ ID NO: 1293641 - DNA, 15 bp, Homo sapiens
ccccaggtttatcat

SEQ ID NO: 1293642 - DNA, 15 bp, Homo sapiens
cccccaggtttatca

SEQ ID NO: 1293643 - DNA, 15 bp, Homo sapiens
gcccccaggtttatc

SEQ ID NO: 1293644 - DNA, 15 bp, Homo sapiens
agcccccaggtttat

SEQ ID NO: 1293645 - DNA, 15 bp, Homo sapiens
aagcccccaggttta

SEQ ID NO: 1293646 - DNA, 15 bp, Homo sapiens
aaagcccccaggttt

SEQ ID NO: 1293647 - DNA, 15 bp, Homo sapiens
taaagcccccaggtt

SEQ ID NO: 1293648 - DNA, 15 bp, Homo sapiens
ctaaagcccccaggt

SEQ ID NO: 1293649 - DNA, 15 bp, Homo sapiens
actaaagcccccagg

SEQ ID NO: 1293650 - DNA, 15 bp, Homo sapiens
cactaaagcccccag

SEQ ID NO: 1293651 - DNA, 15 bp, Homo sapiens
ccactaaagccccca

SEQ ID NO: 1293652 - DNA, 15 bp, Homo sapiens
accactaaagccccc

SEQ ID NO: 1293653 - DNA, 15 bp, Homo sapiens
caccactaaagcccc

SEQ ID NO: 1293654 - DNA, 15 bp, Homo sapiens
ccaccactaaagccc

SEQ ID NO: 1293655 - DNA, 15 bp, Homo sapiens
tccaccactaaagcc

SEQ ID NO: 1293656 - DNA, 15 bp, Homo sapiens
ctccaccactaaagc

SEQ ID NO: 1293657 - DNA, 15 bp, Homo sapiens
tctccaccactaaag

SEQ ID NO: 1293658 - DNA, 15 bp, Homo sapiens
ttctccaccactaaa

SEQ ID NO: 1293659 - DNA, 15 bp, Homo sapiens
cttctccaccactaa

SEQ ID NO: 1293660 - DNA, 15 bp, Homo sapiens
ccttctccaccacta

SEQ ID NO: 1293661 - DNA, 15 bp, Homo sapiens
accttctccaccact

SEQ ID NO: 1293662 - DNA, 15 bp, Homo sapiens
gaccttctccaccac

SEQ ID NO: 1293663 - DNA, 15 bp, Homo sapiens
agaccttctccacca

SEQ ID NO: 1293664 - DNA, 15 bp, Homo sapiens
tagaccttctccacc

SEQ ID NO: 1293665 - DNA, 15 bp, Homo sapiens
gtagaccttctccac

SEQ ID NO: 1293666 - DNA, 15 bp, Homo sapiens
tgtagaccttctcca

SEQ ID NO: 1293667 - DNA, 15 bp, Homo sapiens
ctgtagaccttctcc

SEQ ID NO: 1293668 - DNA, 15 bp, Homo sapiens
tctgtagaccttctc

SEQ ID NO: 1293669 - DNA, 15 bp, Homo sapiens
ctctgtagaccttct

SEQ ID NO: 1293670 - DNA, 15 bp, Homo sapiens
gctctgtagaccttc

SEQ ID NO: 1293671 - DNA, 15 bp, Homo sapiens
ggctctgtagacctt

SEQ ID NO: 1293672 - DNA, 15 bp, Homo sapiens
gggctctgtagacct

SEQ ID NO: 1293673 - DNA, 15 bp, Homo sapiens
tgggctctgtagacc

SEQ ID NO: 1293674 - DNA, 15 bp, Homo sapiens
ttgggctctgtagac

SEQ ID NO: 1293675 - DNA, 15 bp, Homo sapiens
gttgggctctgtaga

SEQ ID NO: 1293676 - DNA, 15 bp, Homo sapiens
ggttgggctctgtag

SEQ ID NO: 1293677 - DNA, 15 bp, Homo sapiens
aggttgggctctgta

SEQ ID NO: 1293678 - DNA, 15 bp, Homo sapiens
gaggttgggctctgt

SEQ ID NO: 1293679 - DNA, 15 bp, Homo sapiens
tgaggttgggctctg

SEQ ID NO: 1293680 - DNA, 15 bp, Homo sapiens
ttgaggttgggctct

SEQ ID NO: 1293681 - DNA, 15 bp, Homo sapiens
gttgaggttgggctc

SEQ ID NO: 1293682 - DNA, 15 bp, Homo sapiens
agttgaggttgggct

SEQ ID NO: 1293683 - DNA, 15 bp, Homo sapiens
aagttgaggttgggc

SEQ ID NO: 1293684 - DNA, 15 bp, Homo sapiens
taagttgaggttggg

SEQ ID NO: 1293685 - DNA, 15 bp, Homo sapiens
ttaagttgaggttgg

SEQ ID NO: 1293686 - DNA, 15 bp, Homo sapiens
tttaagttgaggttg

SEQ ID NO: 1293687 - DNA, 15 bp, Homo sapiens
ttttaagttgaggtt

SEQ ID NO: 1293688 - DNA, 15 bp, Homo sapiens
attttaagttgaggt

SEQ ID NO: 1293689 - DNA, 15 bp, Homo sapiens
aattttaagttgagg

SEQ ID NO: 1293690 - DNA, 15 bp, Homo sapiens
aaattttaagttgag

SEQ ID NO: 1293691 - DNA, 15 bp, Homo sapiens
gaaattttaagttga

SEQ ID NO: 1293692 - DNA, 15 bp, Homo sapiens
ggaaattttaagttg

SEQ ID NO: 1293693 - DNA, 15 bp, Homo sapiens
gggaaattttaagtt

SEQ ID NO: 1293694 - DNA, 15 bp, Homo sapiens
ggggaaattttaagt

SEQ ID NO: 1293695 - DNA, 15 bp, Homo sapiens
tggggaaattttaag

SEQ ID NO: 1293696 - DNA, 15 bp, Homo sapiens
ctggggaaattttaa

SEQ ID NO: 1293697 - DNA, 15 bp, Homo sapiens
gctggggaaatttta

SEQ ID NO: 1293698 - DNA, 15 bp, Homo sapiens
ggctggggaaatttt

SEQ ID NO: 1293699 - DNA, 15 bp, Homo sapiens
aggctggggaaattt

SEQ ID NO: 1293700 - DNA, 15 bp, Homo sapiens
gaggctggggaaatt

SEQ ID NO: 1293701 - DNA, 15 bp, Homo sapiens
agaggctggggaaat

SEQ ID NO: 1293702 - DNA, 15 bp, Homo sapiens
aagaggctggggaaa

SEQ ID NO: 1293703 - DNA, 15 bp, Homo sapiens
aaagaggctggggaa

SEQ ID NO: 1293704 - DNA, 15 bp, Homo sapiens
aaaagaggctgggga

SEQ ID NO: 1293705 - DNA, 15 bp, Homo sapiens
caaaagaggctgggg

SEQ ID NO: 1293706 - DNA, 15 bp, Homo sapiens
ccaaaagaggctggg

SEQ ID NO: 1293707 - DNA, 15 bp, Homo sapiens
tccaaaagaggctgg

SEQ ID NO: 1293708 - DNA, 15 bp, Homo sapiens
ttccaaaagaggctg

SEQ ID NO: 1293709 - DNA, 15 bp, Homo sapiens
cttccaaaagaggct

SEQ ID NO: 1293710 - DNA, 15 bp, Homo sapiens
gcttccaaaagaggc

SEQ ID NO: 1293711 - DNA, 15 bp, Homo sapiens
ggcttccaaaagagg

SEQ ID NO: 1293712 - DNA, 15 bp, Homo sapiens
tggcttccaaaagag

SEQ ID NO: 1293713 - DNA, 15 bp, Homo sapiens
ttggcttccaaaaga

SEQ ID NO: 1293714 - DNA, 15 bp, Homo sapiens
gttggcttccaaaag

SEQ ID NO: 1293715 - DNA, 15 bp, Homo sapiens
agttggcttccaaaa

SEQ ID NO: 1293716 - DNA, 15 bp, Homo sapiens
tagttggcttccaaa

SEQ ID NO: 1293717 - DNA, 15 bp, Homo sapiens
ctagttggcttccaa

SEQ ID NO: 1293718 - DNA, 15 bp, Homo sapiens
cctagttggcttcca

SEQ ID NO: 1293719 - DNA, 15 bp, Homo sapiens
acctagttggcttcc

SEQ ID NO: 1293720 - DNA, 15 bp, Homo sapiens
tacctagttggcttc

SEQ ID NO: 1293721 - DNA, 15 bp, Homo sapiens
gtacctagttggctt

SEQ ID NO: 1293722 - DNA, 15 bp, Homo sapiens
ggtacctagttggct

SEQ ID NO: 1293723 - DNA, 15 bp, Homo sapiens
aggtacctagttggc

SEQ ID NO: 1293724 - DNA, 15 bp, Homo sapiens
caggtacctagttgg

SEQ ID NO: 1293725 - DNA, 15 bp, Homo sapiens
tcaggtacctagttg

SEQ ID NO: 1293726 - DNA, 15 bp, Homo sapiens
atcaggtacctagtt

SEQ ID NO: 1293727 - DNA, 15 bp, Homo sapiens
aatcaggtacctagt

SEQ ID NO: 1293728 - DNA, 15 bp, Homo sapiens
aaatcaggtacctag

SEQ ID NO: 1293729 - DNA, 15 bp, Homo sapiens
aaaatcaggtaccta

SEQ ID NO: 1293730 - DNA, 15 bp, Homo sapiens
gaaaatcaggtacct

SEQ ID NO: 1293731 - DNA, 15 bp, Homo sapiens
ggaaaatcaggtacc

SEQ ID NO: 1293732 - DNA, 15 bp, Homo sapiens
aggaaaatcaggtac

SEQ ID NO: 1293733 - DNA, 15 bp, Homo sapiens
caggaaaatcaggta

SEQ ID NO: 1293734 - DNA, 15 bp, Homo sapiens
tcaggaaaatcaggt

SEQ ID NO: 1293735 - DNA, 15 bp, Homo sapiens
ctcaggaaaatcagg

SEQ ID NO: 1293736 - DNA, 15 bp, Homo sapiens
actcaggaaaatcag

SEQ ID NO: 1293737 - DNA, 15 bp, Homo sapiens
cactcaggaaaatca

SEQ ID NO: 1293738 - DNA, 15 bp, Homo sapiens
ccactcaggaaaatc

SEQ ID NO: 1293739 - DNA, 15 bp, Homo sapiens
cccactcaggaaaat

SEQ ID NO: 1293740 - DNA, 15 bp, Homo sapiens
tcccactcaggaaaa

SEQ ID NO: 1293741 - DNA, 15 bp, Homo sapiens
gtcccactcaggaaa

SEQ ID NO: 1293742 - DNA, 15 bp, Homo sapiens
tgtcccactcaggaa

SEQ ID NO: 1293743 - DNA, 15 bp, Homo sapiens
gtgtcccactcagga

SEQ ID NO: 1293744 - DNA, 15 bp, Homo sapiens
cgtgtcccactcagg

SEQ ID NO: 1293745 - DNA, 15 bp, Homo sapiens
ccgtgtcccactcag

SEQ ID NO: 1293746 - DNA, 15 bp, Homo sapiens
gccgtgtcccactca

SEQ ID NO: 1293747 - DNA, 15 bp, Homo sapiens
tgccgtgtcccactc

SEQ ID NO: 1293748 - DNA, 15 bp, Homo sapiens
ctgccgtgtcccact

SEQ ID NO: 1293749 - DNA, 15 bp, Homo sapiens
gctgccgtgtcccac

SEQ ID NO: 1293750 - DNA, 15 bp, Homo sapiens
ggctgccgtgtccca

SEQ ID NO: 1293751 - DNA, 15 bp, Homo sapiens
gggctgccgtgtccc

SEQ ID NO: 1293752 - DNA, 15 bp, Homo sapiens
ggggctgccgtgtcc

SEQ ID NO: 1293753 - DNA, 15 bp, Homo sapiens
gggggctgccgtgtc

SEQ ID NO: 1293754 - DNA, 15 bp, Homo sapiens
agggggctgccgtgt

SEQ ID NO: 1293755 - DNA, 15 bp, Homo sapiens
cagggggctgccgtg

SEQ ID NO: 1293756 - DNA, 15 bp, Homo sapiens
ccagggggctgccgt

SEQ ID NO: 1293757 - DNA, 15 bp, Homo sapiens
cccagggggctgccg

SEQ ID NO: 1293758 - DNA, 15 bp, Homo sapiens
acccagggggctgcc

SEQ ID NO: 1293759 - DNA, 15 bp, Homo sapiens
cacccagggggctgc

SEQ ID NO: 1293760 - DNA, 15 bp, Homo sapiens
ccacccagggggctg

SEQ ID NO: 1293761 - DNA, 15 bp, Homo sapiens
accacccagggggct

SEQ ID NO: 1293762 - DNA, 15 bp, Homo sapiens
gaccacccagggggc

SEQ ID NO: 1293763 - DNA, 15 bp, Homo sapiens
tgaccacccaggggg

SEQ ID NO: 1293764 - DNA, 15 bp, Homo sapiens
atgaccacccagggg

SEQ ID NO: 1293765 - DNA, 15 bp, Homo sapiens
tatgaccacccaggg

SEQ ID NO: 1293766 - DNA, 15 bp, Homo sapiens
ctatgaccacccagg

SEQ ID NO: 1293767 - DNA, 15 bp, Homo sapiens
gctatgaccacccag

SEQ ID NO: 1293768 - DNA, 15 bp, Homo sapiens
tgctatgaccaccca

SEQ ID NO: 1293769 - DNA, 15 bp, Homo sapiens
gtgctatgaccaccc

SEQ ID NO: 1293770 - DNA, 15 bp, Homo sapiens
ggtgctatgaccacc

SEQ ID NO: 1293771 - DNA, 15 bp, Homo sapiens
tggtgctatgaccac

SEQ ID NO: 1293772 - DNA, 15 bp, Homo sapiens
gtggtgctatgacca

SEQ ID NO: 1293773 - DNA, 15 bp, Homo sapiens
tgtggtgctatgacc

SEQ ID NO: 1293774 - DNA, 15 bp, Homo sapiens
ctgtggtgctatgac

SEQ ID NO: 1293775 - DNA, 15 bp, Homo sapiens
actgtggtgctatga

SEQ ID NO: 1293776 - DNA, 15 bp, Homo sapiens
tactgtggtgctatg

SEQ ID NO: 1293777 - DNA, 15 bp, Homo sapiens
atactgtggtgctat

SEQ ID NO: 1293778 - DNA, 15 bp, Homo sapiens
tatactgtggtgcta

SEQ ID NO: 1293779 - DNA, 15 bp, Homo sapiens
gtatactgtggtgct

SEQ ID NO: 1293780 - DNA, 15 bp, Homo sapiens
agtatactgtggtgc

SEQ ID NO: 1293781 - DNA, 15 bp, Homo sapiens
cagtatactgtggtg

SEQ ID NO: 1293782 - DNA, 15 bp, Homo sapiens
acagtatactgtggt

SEQ ID NO: 1293783 - DNA, 15 bp, Homo sapiens
aacagtatactgtgg

SEQ ID NO: 1293784 - DNA, 15 bp, Homo sapiens
aaacagtatactgtg

SEQ ID NO: 1293785 - DNA, 15 bp, Homo sapiens
aaaacagtatactgt

SEQ ID NO: 1293786 - DNA, 15 bp, Homo sapiens
taaaacagtatactg

SEQ ID NO: 1293787 - DNA, 15 bp, Homo sapiens
gtaaaacagtatact

SEQ ID NO: 1293788 - DNA, 15 bp, Homo sapiens
agtaaaacagtatac

SEQ ID NO: 1293789 - DNA, 15 bp, Homo sapiens
aagtaaaacagtata

SEQ ID NO: 1293790 - DNA, 15 bp, Homo sapiens
taagtaaaacagtat

SEQ ID NO: 1293791 - DNA, 15 bp, Homo sapiens
gtaagtaaaacagta

SEQ ID NO: 1293792 - DNA, 15 bp, Homo sapiens
ggtaagtaaaacagt

SEQ ID NO: 1293793 - DNA, 15 bp, Homo sapiens
aggtaagtaaaacag

SEQ ID NO: 1293794 - DNA, 15 bp, Homo sapiens
caggtaagtaaaaca

SEQ ID NO: 1293795 - DNA, 15 bp, Homo sapiens
acaggtaagtaaaac

SEQ ID NO: 1293796 - DNA, 15 bp, Homo sapiens
tacaggtaagtaaaa

SEQ ID NO: 1293797 - DNA, 15 bp, Homo sapiens
atacaggtaagtaaa

SEQ ID NO: 1293798 - DNA, 15 bp, Homo sapiens
gatacaggtaagtaa

SEQ ID NO: 1293799 - DNA, 15 bp, Homo sapiens
agatacaggtaagta

SEQ ID NO: 1293800 - DNA, 15 bp, Homo sapiens
gagatacaggtaagt

SEQ ID NO: 1293801 - DNA, 15 bp, Homo sapiens
agagatacaggtaag

SEQ ID NO: 1293802 - DNA, 15 bp, Homo sapiens
aagagatacaggtaa

SEQ ID NO: 1293803 - DNA, 15 bp, Homo sapiens
caagagatacaggta

SEQ ID NO: 1293804 - DNA, 15 bp, Homo sapiens
ccaagagatacaggt

SEQ ID NO: 1293805 - DNA, 15 bp, Homo sapiens
gccaagagatacagg

SEQ ID NO: 1293806 - DNA, 15 bp, Homo sapiens
ggccaagagatacag

SEQ ID NO: 1293807 - DNA, 15 bp, Homo sapiens
tggccaagagataca

SEQ ID NO: 1293808 - DNA, 15 bp, Homo sapiens
atggccaagagatac

SEQ ID NO: 1293809 - DNA, 15 bp, Homo sapiens
catggccaagagata

SEQ ID NO: 1293810 - DNA, 15 bp, Homo sapiens
gcatggccaagagat

SEQ ID NO: 1293811 - DNA, 15 bp, Homo sapiens
ggcatggccaagaga

SEQ ID NO: 1293812 - DNA, 15 bp, Homo sapiens
tggcatggccaagag

SEQ ID NO: 1293813 - DNA, 15 bp, Homo sapiens
ctggcatggccaaga

SEQ ID NO: 1293814 - DNA, 15 bp, Homo sapiens
gctggcatggccaag

SEQ ID NO: 1293815 - DNA, 15 bp, Homo sapiens
tgctggcatggccaa

SEQ ID NO: 1293816 - DNA, 15 bp, Homo sapiens
ctgctggcatggcca

SEQ ID NO: 1293817 - DNA, 15 bp, Homo sapiens
gctgctggcatggcc

SEQ ID NO: 1293818 - DNA, 15 bp, Homo sapiens
tgctgctggcatggc

SEQ ID NO: 1293819 - DNA, 15 bp, Homo sapiens
ttgctgctggcatgg

SEQ ID NO: 1293820 - DNA, 15 bp, Homo sapiens
cttgctgctggcatg

SEQ ID NO: 1293821 - DNA, 15 bp, Homo sapiens
tcttgctgctggcat

SEQ ID NO: 1293822 - DNA, 15 bp, Homo sapiens
ctcttgctgctggca

SEQ ID NO: 1293823 - DNA, 15 bp, Homo sapiens
gctcttgctgctggc

SEQ ID NO: 1293824 - DNA, 15 bp, Homo sapiens
ggctcttgctgctgg

SEQ ID NO: 1293825 - DNA, 15 bp, Homo sapiens
aggctcttgctgctg

SEQ ID NO: 1293826 - DNA, 15 bp, Homo sapiens
gaggctcttgctgct

SEQ ID NO: 1293827 - DNA, 15 bp, Homo sapiens
agaggctcttgctgc

SEQ ID NO: 1293828 - DNA, 15 bp, Homo sapiens
aagaggctcttgctg

SEQ ID NO: 1293829 - DNA, 15 bp, Homo sapiens
caagaggctcttgct

SEQ ID NO: 1293830 - DNA, 15 bp, Homo sapiens
ccaagaggctcttgc

SEQ ID NO: 1293831 - DNA, 15 bp, Homo sapiens
tccaagaggctcttg

SEQ ID NO: 1293832 - DNA, 15 bp, Homo sapiens
gtccaagaggctctt

SEQ ID NO: 1293833 - DNA, 15 bp, Homo sapiens
ggtccaagaggctct

SEQ ID NO: 1293834 - DNA, 15 bp, Homo sapiens
aggtccaagaggctc

SEQ ID NO: 1293835 - DNA, 15 bp, Homo sapiens
taggtccaagaggct

SEQ ID NO: 1293836 - DNA, 15 bp, Homo sapiens
ctaggtccaagaggc

SEQ ID NO: 1293837 - DNA, 15 bp, Homo sapiens
tctaggtccaagagg

SEQ ID NO: 1293838 - DNA, 15 bp, Homo sapiens
ttctaggtccaagag

SEQ ID NO: 1293839 - DNA, 15 bp, Homo sapiens
attctaggtccaaga

SEQ ID NO: 1293840 - DNA, 15 bp, Homo sapiens
cattctaggtccaag

SEQ ID NO: 1293841 - DNA, 15 bp, Homo sapiens
tcattctaggtccaa

SEQ ID NO: 1293842 - DNA, 15 bp, Homo sapiens
gtcattctaggtcca

SEQ ID NO: 1293843 - DNA, 15 bp, Homo sapiens
ggtcattctaggtcc

SEQ ID NO: 1293844 - DNA, 15 bp, Homo sapiens
tggtcattctaggtc

SEQ ID NO: 1293845 - DNA, 15 bp, Homo sapiens
ttggtcattctaggt

SEQ ID NO: 1293846 - DNA, 15 bp, Homo sapiens
cttggtcattctagg

SEQ ID NO: 1293847 - DNA, 15 bp, Homo sapiens
ccttggtcattctag

SEQ ID NO: 1293848 - DNA, 15 bp, Homo sapiens
tccttggtcattcta

SEQ ID NO: 1293849 - DNA, 15 bp, Homo sapiens
gtccttggtcattct

SEQ ID NO: 1293850 - DNA, 15 bp, Homo sapiens
ggtccttggtcattc

SEQ ID NO: 1293851 - DNA, 15 bp, Homo sapiens
cggtccttggtcatt

SEQ ID NO: 1293852 - DNA, 15 bp, Homo sapiens
acggtccttggtcat

SEQ ID NO: 1293853 - DNA, 15 bp, Homo sapiens
cacggtccttggtca

SEQ ID NO: 1293854 - DNA, 15 bp, Homo sapiens
ccacggtccttggtc

SEQ ID NO: 1293855 - DNA, 15 bp, Homo sapiens
gccacggtccttggt

SEQ ID NO: 1293856 - DNA, 15 bp, Homo sapiens
ggccacggtccttgg

SEQ ID NO: 1293857 - DNA, 15 bp, Homo sapiens
aggccacggtccttg

SEQ ID NO: 1293858 - DNA, 15 bp, Homo sapiens
caggccacggtcctt

SEQ ID NO: 1293859 - DNA, 15 bp, Homo sapiens
acaggccacggtcct

SEQ ID NO: 1293860 - DNA, 15 bp, Homo sapiens
gacaggccacggtcc

SEQ ID NO: 1293861 - DNA, 15 bp, Homo sapiens
gccacagggagggag

SEQ ID NO: 1293862 - DNA, 15 bp, Homo sapiens
ggccacagggaggga

SEQ ID NO: 1293863 - DNA, 15 bp, Homo sapiens
aggccacagggaggg

SEQ ID NO: 1293864 - DNA, 15 bp, Homo sapiens
caggccacagggagg

SEQ ID NO: 1293865 - DNA, 15 bp, Homo sapiens
gcaggccacagggag

SEQ ID NO: 1293866 - DNA, 15 bp, Homo sapiens
tgcaggccacaggga

SEQ ID NO: 1293867 - DNA, 15 bp, Homo sapiens
ctgcaggccacaggg

SEQ ID NO: 1293868 - DNA, 15 bp, Homo sapiens
tctgcaggccacagg

SEQ ID NO: 1293869 - DNA, 15 bp, Homo sapiens
ctctgcaggccacag

SEQ ID NO: 1293870 - DNA, 15 bp, Homo sapiens
tctctgcaggccaca

SEQ ID NO: 1293871 - DNA, 15 bp, Homo sapiens
atctctgcaggccac

SEQ ID NO: 1293872 - DNA, 15 bp, Homo sapiens
aatctctgcaggcca

SEQ ID NO: 1293873 - DNA, 15 bp, Homo sapiens
gaatctctgcaggcc

SEQ ID NO: 1293874 - DNA, 15 bp, Homo sapiens
ggaatctctgcaggc

SEQ ID NO: 1293875 - DNA, 15 bp, Homo sapiens
cggaatctctgcagg

SEQ ID NO: 1293876 - DNA, 15 bp, Homo sapiens
tcggaatctctgcag

SEQ ID NO: 1293877 - DNA, 15 bp, Homo sapiens
gtcggaatctctgca

SEQ ID NO: 1293878 - DNA, 15 bp, Homo sapiens
agtcggaatctctgc

SEQ ID NO: 1293879 - DNA, 15 bp, Homo sapiens
cagtcggaatctctg

SEQ ID NO: 1293880 - DNA, 15 bp, Homo sapiens
gcagtcggaatctct

SEQ ID NO: 1293881 - DNA, 15 bp, Homo sapiens
agcagtcggaatctc

SEQ ID NO: 1293882 - DNA, 15 bp, Homo sapiens
cagcagtcggaatct

SEQ ID NO: 1293883 - DNA, 15 bp, Homo sapiens
gcagcagtcggaatc

SEQ ID NO: 1293884 - DNA, 15 bp, Homo sapiens
agcagcagtcggaat

SEQ ID NO: 1293885 - DNA, 15 bp, Homo sapiens
aagcagcagtcggaa

SEQ ID NO: 1293886 - DNA, 15 bp, Homo sapiens
aaagcagcagtcgga

SEQ ID NO: 1293887 - DNA, 15 bp, Homo sapiens
caaagcagcagtcgg

SEQ ID NO: 1293888 - DNA, 15 bp, Homo sapiens
acaaagcagcagtcg

SEQ ID NO: 1293889 - DNA, 15 bp, Homo sapiens
aacaaagcagcagtc

SEQ ID NO: 1293890 - DNA, 15 bp, Homo sapiens
aaacaaagcagcagt

SEQ ID NO: 1293891 - DNA, 15 bp, Homo sapiens
gaaacaaagcagcag

SEQ ID NO: 1293892 - DNA, 15 bp, Homo sapiens
tgaaacaaagcagca

SEQ ID NO: 1293893 - DNA, 15 bp, Homo sapiens
gtgaaacaaagcagc

SEQ ID NO: 1293894 - DNA, 15 bp, Homo sapiens
ggtgaaacaaagcag

SEQ ID NO: 1293895 - DNA, 15 bp, Homo sapiens
gggtgaaacaaagca

SEQ ID NO: 1293896 - DNA, 15 bp, Homo sapiens
tgggtgaaacaaagc

SEQ ID NO: 1293897 - DNA, 15 bp, Homo sapiens
ctgggtgaaacaaag

SEQ ID NO: 1293898 - DNA, 15 bp, Homo sapiens
tctgggtgaaacaaa

SEQ ID NO: 1293899 - DNA, 15 bp, Homo sapiens
ctctgggtgaaacaa

SEQ ID NO: 1293900 - DNA, 15 bp, Homo sapiens
gctctgggtgaaaca

SEQ ID NO: 1293901 - DNA, 15 bp, Homo sapiens
tgctctgggtgaaac

SEQ ID NO: 1293902 - DNA, 15 bp, Homo sapiens
gtgctctgggtgaaa

SEQ ID NO: 1293903 - DNA, 15 bp, Homo sapiens
ggtgctctgggtgaa

SEQ ID NO: 1293904 - DNA, 15 bp, Homo sapiens
aggtgctctgggtga

SEQ ID NO: 1293905 - DNA, 15 bp, Homo sapiens
gaggtgctctgggtg

SEQ ID NO: 1293906 - DNA, 15 bp, Homo sapiens
agaggtgctctgggt

SEQ ID NO: 1293907 - DNA, 15 bp, Homo sapiens
aagaggtgctctggg

SEQ ID NO: 1293908 - DNA, 15 bp, Homo sapiens
gaagaggtgctctgg

SEQ ID NO: 1293909 - DNA, 15 bp, Homo sapiens
agaagaggtgctctg

SEQ ID NO: 1293910 - DNA, 15 bp, Homo sapiens
cagaagaggtgctct

SEQ ID NO: 1293911 - DNA, 15 bp, Homo sapiens
ccagaagaggtgctc

SEQ ID NO: 1293912 - DNA, 15 bp, Homo sapiens
cccagaagaggtgct

SEQ ID NO: 1293913 - DNA, 15 bp, Homo sapiens
gcccagaagaggtgc

SEQ ID NO: 1293914 - DNA, 15 bp, Homo sapiens
agcccagaagaggtg

SEQ ID NO: 1293915 - DNA, 15 bp, Homo sapiens
cagcccagaagaggt

SEQ ID NO: 1293916 - DNA, 15 bp, Homo sapiens
tcagcccagaagagg

SEQ ID NO: 1293917 - DNA, 15 bp, Homo sapiens
ctcagcccagaagag

SEQ ID NO: 1293918 - DNA, 15 bp, Homo sapiens
actcagcccagaaga

SEQ ID NO: 1293919 - DNA, 15 bp, Homo sapiens
cactcagcccagaag

SEQ ID NO: 1293920 - DNA, 15 bp, Homo sapiens
gcactcagcccagaa

SEQ ID NO: 1293921 - DNA, 15 bp, Homo sapiens
agcactcagcccaga

SEQ ID NO: 1293922 - DNA, 15 bp, Homo sapiens
cagcactcagcccag

SEQ ID NO: 1293923 - DNA, 15 bp, Homo sapiens
acagcactcagccca

SEQ ID NO: 1293924 - DNA, 15 bp, Homo sapiens
cacagcactcagccc

SEQ ID NO: 1293925 - DNA, 15 bp, Homo sapiens
ccacagcactcagcc

SEQ ID NO: 1293926 - DNA, 15 bp, Homo sapiens
tccacagcactcagc

SEQ ID NO: 1293927 - DNA, 15 bp, Homo sapiens
ttccacagcactcag

SEQ ID NO: 1293928 - DNA, 15 bp, Homo sapiens
tttccacagcactca

SEQ ID NO: 1293929 - DNA, 15 bp, Homo sapiens
ctttccacagcactc

SEQ ID NO: 1293930 - DNA, 15 bp, Homo sapiens
cctttccacagcact

SEQ ID NO: 1293931 - DNA, 15 bp, Homo sapiens
ccctttccacagcac

SEQ ID NO: 1293932 - DNA, 15 bp, Homo sapiens
gccctttccacagca

SEQ ID NO: 1293933 - DNA, 15 bp, Homo sapiens
ggccctttccacagc

SEQ ID NO: 1293934 - DNA, 15 bp, Homo sapiens
tggccctttccacag

SEQ ID NO: 1293935 - DNA, 15 bp, Homo sapiens
ctggccctttccaca

SEQ ID NO: 1293936 - DNA, 15 bp, Homo sapiens
cctggccctttccac

SEQ ID NO: 1293937 - DNA, 15 bp, Homo sapiens
acctggccctttcca

SEQ ID NO: 1293938 - DNA, 15 bp, Homo sapiens
tacctggccctttcc

SEQ ID NO: 1293939 - DNA, 15 bp, Homo sapiens
ctacctggccctttc

SEQ ID NO: 1293940 - DNA, 15 bp, Homo sapiens
cctacctggcccttt

SEQ ID NO: 1293941 - DNA, 15 bp, Homo sapiens
tcctacctggccctt

SEQ ID NO: 1293942 - DNA, 15 bp, Homo sapiens
ttcctacctggccct

SEQ ID NO: 1293943 - DNA, 15 bp, Homo sapiens
tttcctacctggccc

SEQ ID NO: 1293944 - DNA, 15 bp, Homo sapiens
ctttcctacctggcc

SEQ ID NO: 1293945 - DNA, 15 bp, Homo sapiens
cctttcctacctggc

SEQ ID NO: 1293946 - DNA, 15 bp, Homo sapiens
tcctttcctacctgg

SEQ ID NO: 1293947 - DNA, 15 bp, Homo sapiens
ctcctttcctacctg

SEQ ID NO: 1293948 - DNA, 15 bp, Homo sapiens
tctcctttcctacct

SEQ ID NO: 1293949 - DNA, 15 bp, Homo sapiens
atctcctttcctacc

SEQ ID NO: 1293950 - DNA, 15 bp, Homo sapiens
aatctcctttcctac

SEQ ID NO: 1293951 - DNA, 15 bp, Homo sapiens
aaatctcctttccta

SEQ ID NO: 1293952 - DNA, 15 bp, Homo sapiens
taaatctcctttcct

SEQ ID NO: 1293953 - DNA, 15 bp, Homo sapiens
ttaaatctcctttcc

SEQ ID NO: 1293954 - DNA, 15 bp, Homo sapiens
tttaaatctcctttc

SEQ ID NO: 1293955 - DNA, 15 bp, Homo sapiens
ctttaaatctccttt

SEQ ID NO: 1293956 - DNA, 15 bp, Homo sapiens
actttaaatctcctt

SEQ ID NO: 1293957 - DNA, 15 bp, Homo sapiens
tactttaaatctcct

SEQ ID NO: 1293958 - DNA, 15 bp, Homo sapiens
ctactttaaatctcc

SEQ ID NO: 1293959 - DNA, 15 bp, Homo sapiens
gctactttaaatctc

SEQ ID NO: 1293960 - DNA, 15 bp, Homo sapiens
agctactttaaatct

SEQ ID NO: 1293961 - DNA, 15 bp, Homo sapiens
aagctactttaaatc

SEQ ID NO: 1293962 - DNA, 15 bp, Homo sapiens
caagctactttaaat

SEQ ID NO: 1293963 - DNA, 15 bp, Homo sapiens
tcaagctactttaaa

SEQ ID NO: 1293964 - DNA, 15 bp, Homo sapiens
gtcaagctactttaa

SEQ ID NO: 1293965 - DNA, 15 bp, Homo sapiens
agtcaagctacttta

SEQ ID NO: 1293966 - DNA, 15 bp, Homo sapiens
gagtcaagctacttt

SEQ ID NO: 1293967 - DNA, 15 bp, Homo sapiens
tgagtcaagctactt

SEQ ID NO: 1293968 - DNA, 15 bp, Homo sapiens
ctgagtcaagctact

SEQ ID NO: 1293969 - DNA, 15 bp, Homo sapiens
actgagtcaagctac

SEQ ID NO: 1293970 - DNA, 15 bp, Homo sapiens
aactgagtcaagcta

SEQ ID NO: 1293971 - DNA, 15 bp, Homo sapiens
aaactgagtcaagct

SEQ ID NO: 1293972 - DNA, 15 bp, Homo sapiens
gaaactgagtcaagc

SEQ ID NO: 1293973 - DNA, 15 bp, Homo sapiens
agaaactgagtcaag

SEQ ID NO: 1293974 - DNA, 15 bp, Homo sapiens
gagaaactgagtcaa

SEQ ID NO: 1293975 - DNA, 15 bp, Homo sapiens
ggagaaactgagtca

SEQ ID NO: 1293976 - DNA, 15 bp, Homo sapiens
gggagaaactgagtc

SEQ ID NO: 1293977 - DNA, 15 bp, Homo sapiens
ggggagaaactgagt

SEQ ID NO: 1293978 - DNA, 15 bp, Homo sapiens
aggggagaaactgag

SEQ ID NO: 1293979 - DNA, 15 bp, Homo sapiens
caggggagaaactga

SEQ ID NO: 1293980 - DNA, 15 bp, Homo sapiens
tcaggggagaaactg

SEQ ID NO: 1293981 - DNA, 15 bp, Homo sapiens
ctcaggggagaaact

SEQ ID NO: 1293982 - DNA, 15 bp, Homo sapiens
actcaggggagaaac

SEQ ID NO: 1293983 - DNA, 15 bp, Homo sapiens
aactcaggggagaaa

SEQ ID NO: 1293984 - DNA, 15 bp, Homo sapiens
aaactcaggggagaa

SEQ ID NO: 1293985 - DNA, 15 bp, Homo sapiens
gaaactcaggggaga

SEQ ID NO: 1293986 - DNA, 15 bp, Homo sapiens
ggaaactcaggggag

SEQ ID NO: 1293987 - DNA, 15 bp, Homo sapiens
gggaaactcagggga

SEQ ID NO: 1293988 - DNA, 15 bp, Homo sapiens
agggaaactcagggg

SEQ ID NO: 1293989 - DNA, 15 bp, Homo sapiens
aagggaaactcaggg

SEQ ID NO: 1293990 - DNA, 15 bp, Homo sapiens
aaagggaaactcagg

SEQ ID NO: 1293991 - DNA, 15 bp, Homo sapiens
caaagggaaactcag

SEQ ID NO: 1293992 - DNA, 15 bp, Homo sapiens
ccaaagggaaactca

SEQ ID NO: 1293993 - DNA, 15 bp, Homo sapiens
tccaaagggaaactc

SEQ ID NO: 1293994 - DNA, 15 bp, Homo sapiens
ctccaaagggaaact

SEQ ID NO: 1293995 - DNA, 15 bp, Homo sapiens
tctccaaagggaaac

SEQ ID NO: 1293996 - DNA, 15 bp, Homo sapiens
gtctccaaagggaaa

SEQ ID NO: 1293997 - DNA, 15 bp, Homo sapiens
ggtctccaaagggaa

SEQ ID NO: 1293998 - DNA, 15 bp, Homo sapiens
gggtctccaaaggga

SEQ ID NO: 1293999 - DNA, 15 bp, Homo sapiens
cgggtctccaaaggg

SEQ ID NO: 1294000 - DNA, 15 bp, Homo sapiens
tcgggtctccaaagg

SEQ ID NO: 1294001 - DNA, 15 bp, Homo sapiens
ctcgggtctccaaag

SEQ ID NO: 1294002 - DNA, 15 bp, Homo sapiens
tctcgggtctccaaa

SEQ ID NO: 1294003 - DNA, 15 bp, Homo sapiens
ttctcgggtctccaa

SEQ ID NO: 1294004 - DNA, 15 bp, Homo sapiens
tttctcgggtctcca

SEQ ID NO: 1294005 - DNA, 15 bp, Homo sapiens
gtttctcgggtctcc

SEQ ID NO: 1294006 - DNA, 15 bp, Homo sapiens
tgtttctcgggtctc

SEQ ID NO: 1294007 - DNA, 15 bp, Homo sapiens
gtgtttctcgggtct

SEQ ID NO: 1294008 - DNA, 15 bp, Homo sapiens
tgtgtttctcgggtc

SEQ ID NO: 1294009 - DNA, 15 bp, Homo sapiens
atgtgtttctcgggt

SEQ ID NO: 1294010 - DNA, 15 bp, Homo sapiens
gatgtgtttctcggg

SEQ ID NO: 1294011 - DNA, 15 bp, Homo sapiens
agatgtgtttctcgg

SEQ ID NO: 1294012 - DNA, 15 bp, Homo sapiens
cagatgtgtttctcg

SEQ ID NO: 1294013 - DNA, 15 bp, Homo sapiens
ccagatgtgtttctc

SEQ ID NO: 1294014 - DNA, 15 bp, Homo sapiens
cccagatgtgtttct

SEQ ID NO: 1294015 - DNA, 15 bp, Homo sapiens
tcccagatgtgtttc

SEQ ID NO: 1294016 - DNA, 15 bp, Homo sapiens
ttcccagatgtgttt

SEQ ID NO: 1294017 - DNA, 15 bp, Homo sapiens
cttcccagatgtgtt

SEQ ID NO: 1294018 - DNA, 15 bp, Homo sapiens
acttcccagatgtgt

SEQ ID NO: 1294019 - DNA, 15 bp, Homo sapiens
cacttcccagatgtg

SEQ ID NO: 1294020 - DNA, 15 bp, Homo sapiens
tcacttcccagatgt

SEQ ID NO: 1294021 - DNA, 15 bp, Homo sapiens
ttcacttcccagatg

SEQ ID NO: 1294022 - DNA, 15 bp, Homo sapiens
attcacttcccagat

SEQ ID NO: 1294023 - DNA, 15 bp, Homo sapiens
cattcacttcccaga

SEQ ID NO: 1294024 - DNA, 15 bp, Homo sapiens
ccattcacttcccag

SEQ ID NO: 1294025 - DNA, 15 bp, Homo sapiens
cccattcacttccca

SEQ ID NO: 1294026 - DNA, 15 bp, Homo sapiens
tcccattcacttccc

SEQ ID NO: 1294027 - DNA, 15 bp, Homo sapiens
ttcccattcacttcc

SEQ ID NO: 1294028 - DNA, 15 bp, Homo sapiens
cttcccattcacttc

SEQ ID NO: 1294029 - DNA, 15 bp, Homo sapiens
tcttcccattcactt

SEQ ID NO: 1294030 - DNA, 15 bp, Homo sapiens
atcttcccattcact

SEQ ID NO: 1294031 - DNA, 15 bp, Homo sapiens
catcttcccattcac

SEQ ID NO: 1294032 - DNA, 15 bp, Homo sapiens
tcatcttcccattca

SEQ ID NO: 1294033 - DNA, 15 bp, Homo sapiens
ctcatcttcccattc

SEQ ID NO: 1294034 - DNA, 15 bp, Homo sapiens
tctcatcttcccatt

SEQ ID NO: 1294035 - DNA, 15 bp, Homo sapiens
ttctcatcttcccat

SEQ ID NO: 1294036 - DNA, 15 bp, Homo sapiens
cttctcatcttccca

SEQ ID NO: 1294037 - DNA, 15 bp, Homo sapiens
tcttctcatcttccc

SEQ ID NO: 1294038 - DNA, 15 bp, Homo sapiens
ttcttctcatcttcc

SEQ ID NO: 1294039 - DNA, 15 bp, Homo sapiens
cttcttctcatcttc

SEQ ID NO: 1294040 - DNA, 15 bp, Homo sapiens
acttcttctcatctt

SEQ ID NO: 1294041 - DNA, 15 bp, Homo sapiens
tacttcttctcatct

SEQ ID NO: 1294042 - DNA, 15 bp, Homo sapiens
ttacttcttctcatc

SEQ ID NO: 1294043 - DNA, 15 bp, Homo sapiens
cttacttcttctcat

SEQ ID NO: 1294044 - DNA, 15 bp, Homo sapiens
gcttacttcttctca

SEQ ID NO: 1294045 - DNA, 15 bp, Homo sapiens
tgcttacttcttctc

SEQ ID NO: 1294046 - DNA, 15 bp, Homo sapiens
ttgcttacttcttct

SEQ ID NO: 1294047 - DNA, 15 bp, Homo sapiens
tttgcttacttcttc

SEQ ID NO: 1294048 - DNA, 15 bp, Homo sapiens
ttttgcttacttctt

SEQ ID NO: 1294049 - DNA, 15 bp, Homo sapiens
agttttgcttacttc

SEQ ID NO: 1294050 - DNA, 15 bp, Homo sapiens
cagttttgcttactt

SEQ ID NO: 1294051 - DNA, 15 bp, Homo sapiens
ccagttttgcttact

SEQ ID NO: 1294052 - DNA, 15 bp, Homo sapiens
cccagttttgcttac

SEQ ID NO: 1294053 - DNA, 15 bp, Homo sapiens
tcccagttttgctta

SEQ ID NO: 1294054 - DNA, 15 bp, Homo sapiens
ttcccagttttgctt

SEQ ID NO: 1294055 - DNA, 15 bp, Homo sapiens
cttcccagttttgct

SEQ ID NO: 1294056 - DNA, 15 bp, Homo sapiens
tcttcccagttttgc

SEQ ID NO: 1294057 - DNA, 15 bp, Homo sapiens
ctcttcccagttttg

SEQ ID NO: 1294058 - DNA, 15 bp, Homo sapiens
actcttcccagtttt

SEQ ID NO: 1294059 - DNA, 15 bp, Homo sapiens
cactcttcccagttt

SEQ ID NO: 1294060 - DNA, 15 bp, Homo sapiens
tcactcttcccagtt

SEQ ID NO: 1294061 - DNA, 15 bp, Homo sapiens
ttcactcttcccagt

SEQ ID NO: 1294062 - DNA, 15 bp, Homo sapiens
cttcactcttcccag

SEQ ID NO: 1294063 - DNA, 15 bp, Homo sapiens
ccttcactcttccca

SEQ ID NO: 1294064 - DNA, 15 bp, Homo sapiens
gccttcactcttccc

SEQ ID NO: 1294065 - DNA, 15 bp, Homo sapiens
ggccttcactcttcc

SEQ ID NO: 1294066 - DNA, 15 bp, Homo sapiens
aggccttcactcttc

SEQ ID NO: 1294067 - DNA, 15 bp, Homo sapiens
aaggccttcactctt

SEQ ID NO: 1294068 - DNA, 15 bp, Homo sapiens
caaggccttcactct

SEQ ID NO: 1294069 - DNA, 15 bp, Homo sapiens
ccaaggccttcactc

SEQ ID NO: 1294070 - DNA, 15 bp, Homo sapiens
tccaaggccttcact

SEQ ID NO: 1294071 - DNA, 15 bp, Homo sapiens
ttccaaggccttcac

SEQ ID NO: 1294072 - DNA, 15 bp, Homo sapiens
cttccaaggccttca

SEQ ID NO: 1294073 - DNA, 15 bp, Homo sapiens
acttccaaggccttc

SEQ ID NO: 1294074 - DNA, 15 bp, Homo sapiens
cacttccaaggcctt

SEQ ID NO: 1294075 - DNA, 15 bp, Homo sapiens
gcacttccaaggcct

SEQ ID NO: 1294076 - DNA, 15 bp, Homo sapiens
tgcacttccaaggcc

SEQ ID NO: 1294077 - DNA, 15 bp, Homo sapiens
ctgcacttccaaggc

SEQ ID NO: 1294078 - DNA, 15 bp, Homo sapiens
tctgcacttccaagg

SEQ ID NO: 1294079 - DNA, 15 bp, Homo sapiens
ctctgcacttccaag

SEQ ID NO: 1294080 - DNA, 15 bp, Homo sapiens
cctctgcacttccaa

SEQ ID NO: 1294081 - DNA, 15 bp, Homo sapiens
tcctctgcacttcca

SEQ ID NO: 1294082 - DNA, 15 bp, Homo sapiens
atcctctgcacttcc

SEQ ID NO: 1294083 - DNA, 15 bp, Homo sapiens
catcctctgcacttc

SEQ ID NO: 1294084 - DNA, 15 bp, Homo sapiens
gcatcctctgcactt

SEQ ID NO: 1294085 - DNA, 15 bp, Homo sapiens
ggcatcctctgcact

SEQ ID NO: 1294086 - DNA, 15 bp, Homo sapiens
cggcatcctctgcac

SEQ ID NO: 1294087 - DNA, 15 bp, Homo sapiens
ccggcatcctctgca

SEQ ID NO: 1294088 - DNA, 15 bp, Homo sapiens
accggcatcctctgc

SEQ ID NO: 1294089 - DNA, 15 bp, Homo sapiens
gaccggcatcctctg

SEQ ID NO: 1294090 - DNA, 15 bp, Homo sapiens
cgaccggcatcctct

SEQ ID NO: 1294091 - DNA, 15 bp, Homo sapiens
acgaccggcatcctc

SEQ ID NO: 1294092 - DNA, 15 bp, Homo sapiens
gacgaccggcatcct

SEQ ID NO: 1294093 - DNA, 15 bp, Homo sapiens
ggacgaccggcatcc

SEQ ID NO: 1294094 - DNA, 15 bp, Homo sapiens
gggacgaccggcatc

SEQ ID NO: 1294095 - DNA, 15 bp, Homo sapiens
tgggacgaccggcat

SEQ ID NO: 1294096 - DNA, 15 bp, Homo sapiens
ctgggacgaccggca

SEQ ID NO: 1294097 - DNA, 15 bp, Homo sapiens
cctgggacgaccggc

SEQ ID NO: 1294098 - DNA, 15 bp, Homo sapiens
acctgggacgaccgg

SEQ ID NO: 1294099 - DNA, 15 bp, Homo sapiens
cacctgggacgaccg

SEQ ID NO: 1294100 - DNA, 15 bp, Homo sapiens
gcacctgggacgacc

SEQ ID NO: 1294101 - DNA, 15 bp, Homo sapiens
agcacctgggacgac

SEQ ID NO: 1294102 - DNA, 15 bp, Homo sapiens
gagcacctgggacga

SEQ ID NO: 1294103 - DNA, 15 bp, Homo sapiens
ggagcacctgggacg

SEQ ID NO: 1294104 - DNA, 15 bp, Homo sapiens
cggagcacctgggac

SEQ ID NO: 1294105 - DNA, 15 bp, Homo sapiens
ccggagcacctggga

SEQ ID NO: 1294106 - DNA, 15 bp, Homo sapiens
cccggagcacctggg

SEQ ID NO: 1294107 - DNA, 15 bp, Homo sapiens
ccccggagcacctgg

SEQ ID NO: 1294108 - DNA, 15 bp, Homo sapiens
tccccggagcacctg

SEQ ID NO: 1294109 - DNA, 15 bp, Homo sapiens
ctccccggagcacct

SEQ ID NO: 1294110 - DNA, 15 bp, Homo sapiens
actccccggagcacc

SEQ ID NO: 1294111 - DNA, 15 bp, Homo sapiens
tactccccggagcac

SEQ ID NO: 1294112 - DNA, 15 bp, Homo sapiens
atactccccggagca

SEQ ID NO: 1294113 - DNA, 15 bp, Homo sapiens
aatactccccggagc

SEQ ID NO: 1294114 - DNA, 15 bp, Homo sapiens
aaatactccccggag

SEQ ID NO: 1294115 - DNA, 15 bp, Homo sapiens
gaaatactccccgga

SEQ ID NO: 1294116 - DNA, 15 bp, Homo sapiens
agaaatactccccgg

SEQ ID NO: 1294117 - DNA, 15 bp, Homo sapiens
cagaaatactccccg

SEQ ID NO: 1294118 - DNA, 15 bp, Homo sapiens
acagaaatactcccc

SEQ ID NO: 1294119 - DNA, 15 bp, Homo sapiens
aacagaaatactccc

SEQ ID NO: 1294120 - DNA, 15 bp, Homo sapiens
aaacagaaatactcc

SEQ ID NO: 1294121 - DNA, 15 bp, Homo sapiens
taaacagaaatactc

SEQ ID NO: 1294122 - DNA, 15 bp, Homo sapiens
ctaaacagaaatact

SEQ ID NO: 1294123 - DNA, 15 bp, Homo sapiens
tctaaacagaaatac

SEQ ID NO: 1294124 - DNA, 15 bp, Homo sapiens
ctctaaacagaaata

SEQ ID NO: 1294125 - DNA, 15 bp, Homo sapiens
actctaaacagaaat

SEQ ID NO: 1294126 - DNA, 15 bp, Homo sapiens
cactctaaacagaaa

SEQ ID NO: 1294127 - DNA, 15 bp, Homo sapiens
ccactctaaacagaa

SEQ ID NO: 1294128 - DNA, 15 bp, Homo sapiens
gccactctaaacaga

SEQ ID NO: 1294129 - DNA, 15 bp, Homo sapiens
tgccactctaaacag

SEQ ID NO: 1294130 - DNA, 15 bp, Homo sapiens
atgccactctaaaca

SEQ ID NO: 1294131 - DNA, 15 bp, Homo sapiens
catgccactctaaac

SEQ ID NO: 1294132 - DNA, 15 bp, Homo sapiens
acatgccactctaaa

SEQ ID NO: 1294133 - DNA, 15 bp, Homo sapiens
cacatgccactctaa

SEQ ID NO: 1294134 - DNA, 15 bp, Homo sapiens
ccacatgccactcta

SEQ ID NO: 1294135 - DNA, 15 bp, Homo sapiens
ctccacatgccactc

SEQ ID NO: 1294136 - DNA, 15 bp, Homo sapiens
cctccacatgccact

SEQ ID NO: 1294137 - DNA, 15 bp, Homo sapiens
ccctccacatgccac

SEQ ID NO: 1294138 - DNA, 15 bp, Homo sapiens
tccctccacatgcca

SEQ ID NO: 1294139 - DNA, 15 bp, Homo sapiens
ctccctccacatgcc

SEQ ID NO: 1294140 - DNA, 15 bp, Homo sapiens
actccctccacatgc

SEQ ID NO: 1294141 - DNA, 15 bp, Homo sapiens
cactccctccacatg

SEQ ID NO: 1294142 - DNA, 15 bp, Homo sapiens
gcactccctccacat

SEQ ID NO: 1294143 - DNA, 15 bp, Homo sapiens
agcactccctccaca

SEQ ID NO: 1294144 - DNA, 15 bp, Homo sapiens
gagcactccctccac

SEQ ID NO: 1294145 - DNA, 15 bp, Homo sapiens
agagcactccctcca

SEQ ID NO: 1294146 - DNA, 15 bp, Homo sapiens
gagagcactccctcc

SEQ ID NO: 1294147 - DNA, 15 bp, Homo sapiens
ggagagcactccctc

SEQ ID NO: 1294148 - DNA, 15 bp, Homo sapiens
aggagagcactccct

SEQ ID NO: 1294149 - DNA, 15 bp, Homo sapiens
caggagagcactccc

SEQ ID NO: 1294150 - DNA, 15 bp, Homo sapiens
ccaggagagcactcc

SEQ ID NO: 1294151 - DNA, 15 bp, Homo sapiens
accaggagagcactc

SEQ ID NO: 1294152 - DNA, 15 bp, Homo sapiens
taccaggagagcact

SEQ ID NO: 1294153 - DNA, 15 bp, Homo sapiens
gtaccaggagagcac

SEQ ID NO: 1294154 - DNA, 15 bp, Homo sapiens
tgtaccaggagagca

SEQ ID NO: 1294155 - DNA, 15 bp, Homo sapiens
ctgtaccaggagagc

SEQ ID NO: 1294156 - DNA, 15 bp, Homo sapiens
gctgtaccaggagag

SEQ ID NO: 1294157 - DNA, 15 bp, Homo sapiens
tgctgtaccaggaga

SEQ ID NO: 1294158 - DNA, 15 bp, Homo sapiens
ctgctgtaccaggag

SEQ ID NO: 1294159 - DNA, 15 bp, Homo sapiens
cctgctgtaccagga

SEQ ID NO: 1294160 - DNA, 15 bp, Homo sapiens
gcctgctgtaccagg

SEQ ID NO: 1294161 - DNA, 15 bp, Homo sapiens
cgcctgctgtaccag

SEQ ID NO: 1294162 - DNA, 15 bp, Homo sapiens
acgcctgctgtacca

SEQ ID NO: 1294163 - DNA, 15 bp, Homo sapiens
gacgcctgctgtacc

SEQ ID NO: 1294164 - DNA, 15 bp, Homo sapiens
ggacgcctgctgtac

SEQ ID NO: 1294165 - DNA, 15 bp, Homo sapiens
tggacgcctgctgta

SEQ ID NO: 1294166 - DNA, 15 bp, Homo sapiens
ctggacgcctgctgt

SEQ ID NO: 1294167 - DNA, 15 bp, Homo sapiens
cctggacgcctgctg

SEQ ID NO: 1294168 - DNA, 15 bp, Homo sapiens
gcctggacgcctgct

SEQ ID NO: 1294169 - DNA, 15 bp, Homo sapiens
tgcctggacgcctgc

SEQ ID NO: 1294170 - DNA, 15 bp, Homo sapiens
ctgcctggacgcctg

SEQ ID NO: 1294171 - DNA, 15 bp, Homo sapiens
tctgcctggacgcct

SEQ ID NO: 1294172 - DNA, 15 bp, Homo sapiens
ctctgcctggacgcc

SEQ ID NO: 1294173 - DNA, 15 bp, Homo sapiens
actctgcctggacgc

SEQ ID NO: 1294174 - DNA, 15 bp, Homo sapiens
cactctgcctggacg

SEQ ID NO: 1294175 - DNA, 15 bp, Homo sapiens
tcactctgcctggac

SEQ ID NO: 1294176 - DNA, 15 bp, Homo sapiens
ctcactctgcctgga

SEQ ID NO: 1294177 - DNA, 15 bp, Homo sapiens
tctcactctgcctgg

SEQ ID NO: 1294178 - DNA, 15 bp, Homo sapiens
gtctcactctgcctg

SEQ ID NO: 1294179 - DNA, 15 bp, Homo sapiens
gcagagtctcactct

SEQ ID NO: 1294180 - DNA, 15 bp, Homo sapiens
agcagagtctcactc

SEQ ID NO: 1294181 - DNA, 15 bp, Homo sapiens
tagcagagtctcact

SEQ ID NO: 1294182 - DNA, 15 bp, Homo sapiens
ctagcagagtctcac

SEQ ID NO: 1294183 - DNA, 15 bp, Homo sapiens
tctagcagagtctca

SEQ ID NO: 1294184 - DNA, 15 bp, Homo sapiens
gtctagcagagtctc

SEQ ID NO: 1294185 - DNA, 15 bp, Homo sapiens
agtctagcagagtct

SEQ ID NO: 1294186 - DNA, 15 bp, Homo sapiens
gagtctagcagagtc

SEQ ID NO: 1294187 - DNA, 15 bp, Homo sapiens
tgagtctagcagagt

SEQ ID NO: 1294188 - DNA, 15 bp, Homo sapiens
ttgagtctagcagag

SEQ ID NO: 1294189 - DNA, 15 bp, Homo sapiens
gttgagtctagcaga

SEQ ID NO: 1294190 - DNA, 15 bp, Homo sapiens
agttgagtctagcag

SEQ ID NO: 1294191 - DNA, 15 bp, Homo sapiens
gagttgagtctagca

SEQ ID NO: 1294192 - DNA, 15 bp, Homo sapiens
agagttgagtctagc

SEQ ID NO: 1294193 - DNA, 15 bp, Homo sapiens
aagagttgagtctag

SEQ ID NO: 1294194 - DNA, 15 bp, Homo sapiens
aaagagttgagtcta

SEQ ID NO: 1294195 - DNA, 15 bp, Homo sapiens
gaaagagttgagtct

SEQ ID NO: 1294196 - DNA, 15 bp, Homo sapiens
agaaagagttgagtc

SEQ ID NO: 1294197 - DNA, 15 bp, Homo sapiens
aagaaagagttgagt

SEQ ID NO: 1294198 - DNA, 15 bp, Homo sapiens
gaagaaagagttgag

SEQ ID NO: 1294199 - DNA, 15 bp, Homo sapiens
agaagaaagagttga

SEQ ID NO: 1294200 - DNA, 15 bp, Homo sapiens
aagaagaaagagttg

SEQ ID NO: 1294201 - DNA, 15 bp, Homo sapiens
gaagaagaaagagtt

SEQ ID NO: 1294202 - DNA, 15 bp, Homo sapiens
agaagaagaaagagt

SEQ ID NO: 1294203 - DNA, 15 bp, Homo sapiens
gagaagaagaaagag

SEQ ID NO: 1294204 - DNA, 15 bp, Homo sapiens
agagaagaagaaaga

SEQ ID NO: 1294205 - DNA, 15 bp, Homo sapiens
cagagaagaagaaag

SEQ ID NO: 1294206 - DNA, 15 bp, Homo sapiens
tcagagaagaagaaa

SEQ ID NO: 1294207 - DNA, 15 bp, Homo sapiens
ttcagagaagaagaa

SEQ ID NO: 1294208 - DNA, 15 bp, Homo sapiens
cttcagagaagaaga

SEQ ID NO: 1294209 - DNA, 15 bp, Homo sapiens
ccttcagagaagaag

SEQ ID NO: 1294210 - DNA, 15 bp, Homo sapiens
tccttcagagaagaa

SEQ ID NO: 1294211 - DNA, 15 bp, Homo sapiens
ttccttcagagaaga

SEQ ID NO: 1294212 - DNA, 15 bp, Homo sapiens
attccttcagagaag

SEQ ID NO: 1294213 - DNA, 15 bp, Homo sapiens
gattccttcagagaa

SEQ ID NO: 1294214 - DNA, 15 bp, Homo sapiens
tgattccttcagaga

SEQ ID NO: 1294215 - DNA, 15 bp, Homo sapiens
ctgattccttcagag

SEQ ID NO: 1294216 - DNA, 15 bp, Homo sapiens
tctgattccttcaga

SEQ ID NO: 1294217 - DNA, 15 bp, Homo sapiens
ctctgattccttcag

SEQ ID NO: 1294218 - DNA, 15 bp, Homo sapiens
tctctgattccttca

SEQ ID NO: 1294219 - DNA, 15 bp, Homo sapiens
gtctctgattccttc

SEQ ID NO: 1294220 - DNA, 15 bp, Homo sapiens
agtctctgattcctt

SEQ ID NO: 1294221 - DNA, 15 bp, Homo sapiens
cagtctctgattcct

SEQ ID NO: 1294222 - DNA, 15 bp, Homo sapiens
tcagtctctgattcc

SEQ ID NO: 1294223 - DNA, 15 bp, Homo sapiens
ttcagtctctgattc

SEQ ID NO: 1294224 - DNA, 15 bp, Homo sapiens
tttcagtctctgatt

SEQ ID NO: 1294225 - DNA, 15 bp, Homo sapiens
gtttcagtctctgat

SEQ ID NO: 1294226 - DNA, 15 bp, Homo sapiens
tgtttcagtctctga

SEQ ID NO: 1294227 - DNA, 15 bp, Homo sapiens
ttgtttcagtctctg

SEQ ID NO: 1294228 - DNA, 15 bp, Homo sapiens
cttgtttcagtctct

SEQ ID NO: 1294229 - DNA, 15 bp, Homo sapiens
ccttgtttcagtctc

SEQ ID NO: 1294230 - DNA, 15 bp, Homo sapiens
tccttgtttcagtct

SEQ ID NO: 1294231 - DNA, 15 bp, Homo sapiens
atccttgtttcagtc

SEQ ID NO: 1294232 - DNA, 15 bp, Homo sapiens
catccttgtttcagt

SEQ ID NO: 1294233 - DNA, 15 bp, Homo sapiens
ccatccttgtttcag

SEQ ID NO: 1294234 - DNA, 15 bp, Homo sapiens
gccatccttgtttca

SEQ ID NO: 1294235 - DNA, 15 bp, Homo sapiens
agccatccttgtttc

SEQ ID NO: 1294236 - DNA, 15 bp, Homo sapiens
aagccatccttgttt

SEQ ID NO: 1294237 - DNA, 15 bp, Homo sapiens
gaagccatccttgtt

SEQ ID NO: 1294238 - DNA, 15 bp, Homo sapiens
tgaagccatccttgt

SEQ ID NO: 1294239 - DNA, 15 bp, Homo sapiens
atgaagccatccttg

SEQ ID NO: 1294240 - DNA, 15 bp, Homo sapiens
gatgaagccatcctt

SEQ ID NO: 1294241 - DNA, 15 bp, Homo sapiens
tgatgaagccatcct

SEQ ID NO: 1294242 - DNA, 15 bp, Homo sapiens
ctgatgaagccatcc

SEQ ID NO: 1294243 - DNA, 15 bp, Homo sapiens
actgatgaagccatc

SEQ ID NO: 1294244 - DNA, 15 bp, Homo sapiens
aactgatgaagccat

SEQ ID NO: 1294245 - DNA, 15 bp, Homo sapiens
aaactgatgaagcca

SEQ ID NO: 1294246 - DNA, 15 bp, Homo sapiens
caaactgatgaagcc

SEQ ID NO: 1294247 - DNA, 15 bp, Homo sapiens
ccaaactgatgaagc

SEQ ID NO: 1294248 - DNA, 15 bp, Homo sapiens
gccaaactgatgaag

SEQ ID NO: 1294249 - DNA, 15 bp, Homo sapiens
ggccaaactgatgaa

SEQ ID NO: 1294250 - DNA, 15 bp, Homo sapiens
tggccaaactgatga

SEQ ID NO: 1294251 - DNA, 15 bp, Homo sapiens
atggccaaactgatg

SEQ ID NO: 1294252 - DNA, 15 bp, Homo sapiens
tatggccaaactgat

SEQ ID NO: 1294253 - DNA, 15 bp, Homo sapiens
ctatggccaaactga

SEQ ID NO: 1294254 - DNA, 15 bp, Homo sapiens
gctatggccaaactg

SEQ ID NO: 1294255 - DNA, 15 bp, Homo sapiens
ggctatggccaaact

SEQ ID NO: 1294256 - DNA, 15 bp, Homo sapiens
aggctatggccaaac

SEQ ID NO: 1294257 - DNA, 15 bp, Homo sapiens
caggctatggccaaa

SEQ ID NO: 1294258 - DNA, 15 bp, Homo sapiens
ccaggctatggccaa

SEQ ID NO: 1294259 - DNA, 15 bp, Homo sapiens
tccaggctatggcca

SEQ ID NO: 1294260 - DNA, 15 bp, Homo sapiens
ttccaggctatggcc

SEQ ID NO: 1294261 - DNA, 15 bp, Homo sapiens
tttccaggctatggc

SEQ ID NO: 1294262 - DNA, 15 bp, Homo sapiens
ctttccaggctatgg

SEQ ID NO: 1294263 - DNA, 15 bp, Homo sapiens
tctttccaggctatg

SEQ ID NO: 1294264 - DNA, 15 bp, Homo sapiens
gtctttccaggctat

SEQ ID NO: 1294265 - DNA, 15 bp, Homo sapiens
agtctttccaggcta

SEQ ID NO: 1294266 - DNA, 15 bp, Homo sapiens
cagtctttccaggct

SEQ ID NO: 1294267 - DNA, 15 bp, Homo sapiens
ccagtctttccaggc

SEQ ID NO: 1294268 - DNA, 15 bp, Homo sapiens
cccagtctttccagg

SEQ ID NO: 1294269 - DNA, 15 bp, Homo sapiens
tcccagtctttccag

SEQ ID NO: 1294270 - DNA, 15 bp, Homo sapiens
ttcccagtctttcca

SEQ ID NO: 1294271 - DNA, 15 bp, Homo sapiens
tttcccagtctttcc

SEQ ID NO: 1294272 - DNA, 15 bp, Homo sapiens
gtttcccagtctttc

SEQ ID NO: 1294273 - DNA, 15 bp, Homo sapiens
ggtttcccagtcttt

SEQ ID NO: 1294274 - DNA, 15 bp, Homo sapiens
gggtttcccagtctt

SEQ ID NO: 1294275 - DNA, 15 bp, Homo sapiens
tgggtttcccagtct

SEQ ID NO: 1294276 - DNA, 15 bp, Homo sapiens
ctgggtttcccagtc

SEQ ID NO: 1294277 - DNA, 15 bp, Homo sapiens
gctgggtttcccagt

SEQ ID NO: 1294278 - DNA, 15 bp, Homo sapiens
tgctgggtttcccag

SEQ ID NO: 1294279 - DNA, 15 bp, Homo sapiens
ctgctgggtttccca

SEQ ID NO: 1294280 - DNA, 15 bp, Homo sapiens
gctgctgggtttccc

SEQ ID NO: 1294281 - DNA, 15 bp, Homo sapiens
agctgctgggtttcc

SEQ ID NO: 1294282 - DNA, 15 bp, Homo sapiens
gagctgctgggtttc

SEQ ID NO: 1294283 - DNA, 15 bp, Homo sapiens
agagctgctgggttt

SEQ ID NO: 1294284 - DNA, 15 bp, Homo sapiens
gagagctgctgggtt

SEQ ID NO: 1294285 - DNA, 15 bp, Homo sapiens
agagagctgctgggt

SEQ ID NO: 1294286 - DNA, 15 bp, Homo sapiens
cagagagctgctggg

SEQ ID NO: 1294287 - DNA, 15 bp, Homo sapiens
ccagagagctgctgg

SEQ ID NO: 1294288 - DNA, 15 bp, Homo sapiens
gccagagagctgctg

SEQ ID NO: 1294289 - DNA, 15 bp, Homo sapiens
ggccagagagctgct

SEQ ID NO: 1294290 - DNA, 15 bp, Homo sapiens
gggccagagagctgc

SEQ ID NO: 1294291 - DNA, 15 bp, Homo sapiens
ggggccagagagctg

SEQ ID NO: 1294292 - DNA, 15 bp, Homo sapiens
aggggccagagagct

SEQ ID NO: 1294293 - DNA, 15 bp, Homo sapiens
caggggccagagagc

SEQ ID NO: 1294294 - DNA, 15 bp, Homo sapiens
ccaggggccagagag

SEQ ID NO: 1294295 - DNA, 15 bp, Homo sapiens
cccaggggccagaga

SEQ ID NO: 1294296 - DNA, 15 bp, Homo sapiens
gcccaggggccagag

SEQ ID NO: 1294297 - DNA, 15 bp, Homo sapiens
agcccaggggccaga

SEQ ID NO: 1294298 - DNA, 15 bp, Homo sapiens
gagcccaggggccag

SEQ ID NO: 1294299 - DNA, 15 bp, Homo sapiens
tgagcccaggggcca

SEQ ID NO: 1294300 - DNA, 15 bp, Homo sapiens
gtgagcccaggggcc

SEQ ID NO: 1294301 - DNA, 15 bp, Homo sapiens
tgtgagcccaggggc

SEQ ID NO: 1294302 - DNA, 15 bp, Homo sapiens
ctgtgagcccagggg

SEQ ID NO: 1294303 - DNA, 15 bp, Homo sapiens
tctgtgagcccaggg

SEQ ID NO: 1294304 - DNA, 15 bp, Homo sapiens
gtctgtgagcccagg

SEQ ID NO: 1294305 - DNA, 15 bp, Homo sapiens
cgtctgtgagcccag

SEQ ID NO: 1294306 - DNA, 15 bp, Homo sapiens
tcgtctgtgagccca

SEQ ID NO: 1294307 - DNA, 15 bp, Homo sapiens
gtcgtctgtgagccc

SEQ ID NO: 1294308 - DNA, 15 bp, Homo sapiens
tgtcgtctgtgagcc

SEQ ID NO: 1294309 - DNA, 15 bp, Homo sapiens
atgtcgtctgtgagc

SEQ ID NO: 1294310 - DNA, 15 bp, Homo sapiens
tatgtcgtctgtgag

SEQ ID NO: 1294311 - DNA, 15 bp, Homo sapiens
ctatgtcgtctgtga

SEQ ID NO: 1294312 - DNA, 15 bp, Homo sapiens
actatgtcgtctgtg

SEQ ID NO: 1294313 - DNA, 15 bp, Homo sapiens
aactatgtcgtctgt

SEQ ID NO: 1294314 - DNA, 15 bp, Homo sapiens
gaactatgtcgtctg

SEQ ID NO: 1294315 - DNA, 15 bp, Homo sapiens
agaactatgtcgtct

SEQ ID NO: 1294316 - DNA, 15 bp, Homo sapiens
aagaactatgtcgtc

SEQ ID NO: 1294317 - DNA, 15 bp, Homo sapiens
caagaactatgtcgt

SEQ ID NO: 1294318 - DNA, 15 bp, Homo sapiens
ccaagaactatgtcg

SEQ ID NO: 1294319 - DNA, 15 bp, Homo sapiens
tccaagaactatgtc

SEQ ID NO: 1294320 - DNA, 15 bp, Homo sapiens
ttccaagaactatgt

SEQ ID NO: 1294321 - DNA, 15 bp, Homo sapiens
cttccaagaactatg

SEQ ID NO: 1294322 - DNA, 15 bp, Homo sapiens
gcttccaagaactat

SEQ ID NO: 1294323 - DNA, 15 bp, Homo sapiens
agcttccaagaacta

SEQ ID NO: 1294324 - DNA, 15 bp, Homo sapiens
cagcttccaagaact

SEQ ID NO: 1294325 - DNA, 15 bp, Homo sapiens
acagcttccaagaac

SEQ ID NO: 1294326 - DNA, 15 bp, Homo sapiens
gacagcttccaagaa

SEQ ID NO: 1294327 - DNA, 15 bp, Homo sapiens
tgacagcttccaaga

SEQ ID NO: 1294328 - DNA, 15 bp, Homo sapiens
atgacagcttccaag

SEQ ID NO: 1294329 - DNA, 15 bp, Homo sapiens
gatgacagcttccaa

SEQ ID NO: 1294330 - DNA, 15 bp, Homo sapiens
ggatgacagcttcca

SEQ ID NO: 1294331 - DNA, 15 bp, Homo sapiens
gggatgacagcttcc

SEQ ID NO: 1294332 - DNA, 15 bp, Homo sapiens
agggatgacagcttc

SEQ ID NO: 1294333 - DNA, 15 bp, Homo sapiens
cagggatgacagctt

SEQ ID NO: 1294334 - DNA, 15 bp, Homo sapiens
gcagggatgacagct

SEQ ID NO: 1294335 - DNA, 15 bp, Homo sapiens
ggcagggatgacagc

SEQ ID NO: 1294336 - DNA, 15 bp, Homo sapiens
aggcagggatgacag

SEQ ID NO: 1294337 - DNA, 15 bp, Homo sapiens
caggcagggatgaca

SEQ ID NO: 1294338 - DNA, 15 bp, Homo sapiens
acaggcagggatgac

SEQ ID NO: 1294339 - DNA, 15 bp, Homo sapiens
cacaggcagggatga

SEQ ID NO: 1294340 - DNA, 15 bp, Homo sapiens
tcacaggcagggatg

SEQ ID NO: 1294341 - DNA, 15 bp, Homo sapiens
atcacaggcagggat

SEQ ID NO: 1294342 - DNA, 15 bp, Homo sapiens
catcacaggcaggga

SEQ ID NO: 1294343 - DNA, 15 bp, Homo sapiens
tcatcacaggcaggg

SEQ ID NO: 1294344 - DNA, 15 bp, Homo sapiens
gtcatcacaggcagg

SEQ ID NO: 1294345 - DNA, 15 bp, Homo sapiens
agtcatcacaggcag

SEQ ID NO: 1294346 - DNA, 15 bp, Homo sapiens
cagtcatcacaggca

SEQ ID NO: 1294347 - DNA, 15 bp, Homo sapiens
tcagtcatcacaggc

SEQ ID NO: 1294348 - DNA, 15 bp, Homo sapiens
gtcagtcatcacagg

SEQ ID NO: 1294349 - DNA, 15 bp, Homo sapiens
ggtcagtcatcacag

SEQ ID NO: 1294350 - DNA, 15 bp, Homo sapiens
aggtcagtcatcaca

SEQ ID NO: 1294351 - DNA, 15 bp, Homo sapiens
caggtcagtcatcac

SEQ ID NO: 1294352 - DNA, 15 bp, Homo sapiens
gcaggtcagtcatca

SEQ ID NO: 1294353 - DNA, 15 bp, Homo sapiens
ggcaggtcagtcatc

SEQ ID NO: 1294354 - DNA, 15 bp, Homo sapiens
aggcaggtcagtcat

SEQ ID NO: 1294355 - DNA, 15 bp, Homo sapiens
gaggcaggtcagtca

SEQ ID NO: 1294356 - DNA, 15 bp, Homo sapiens
agaggcaggtcagtc

SEQ ID NO: 1294357 - DNA, 15 bp, Homo sapiens
aagaggcaggtcagt

SEQ ID NO: 1294358 - DNA, 15 bp, Homo sapiens
caagaggcaggtcag

SEQ ID NO: 1294359 - DNA, 15 bp, Homo sapiens
gcaagaggcaggtca

SEQ ID NO: 1294360 - DNA, 15 bp, Homo sapiens
ggcaagaggcaggtc

SEQ ID NO: 1294361 - DNA, 15 bp, Homo sapiens
tggcaagaggcaggt

SEQ ID NO: 1294362 - DNA, 15 bp, Homo sapiens
ctggcaagaggcagg

SEQ ID NO: 1294363 - DNA, 15 bp, Homo sapiens
cctggcaagaggcag

SEQ ID NO: 1294364 - DNA, 15 bp, Homo sapiens
gcctggcaagaggca

SEQ ID NO: 1294365 - DNA, 15 bp, Homo sapiens
agcctggcaagaggc

SEQ ID NO: 1294366 - DNA, 15 bp, Homo sapiens
aagcctggcaagagg

SEQ ID NO: 1294367 - DNA, 15 bp, Homo sapiens
gaagcctggcaagag

SEQ ID NO: 1294368 - DNA, 15 bp, Homo sapiens
ggaagcctggcaaga

SEQ ID NO: 1294369 - DNA, 15 bp, Homo sapiens
tggaagcctggcaag

SEQ ID NO: 1294370 - DNA, 15 bp, Homo sapiens
atggaagcctggcaa

SEQ ID NO: 1294371 - DNA, 15 bp, Homo sapiens
gatggaagcctggca

SEQ ID NO: 1294372 - DNA, 15 bp, Homo sapiens
ggatggaagcctggc

SEQ ID NO: 1294373 - DNA, 15 bp, Homo sapiens
aggatggaagcctgg

SEQ ID NO: 1294374 - DNA, 15 bp, Homo sapiens
aaggatggaagcctg

SEQ ID NO: 1294375 - DNA, 15 bp, Homo sapiens
caaggatggaagcct

SEQ ID NO: 1294376 - DNA, 15 bp, Homo sapiens
gcaaggatggaagcc

SEQ ID NO: 1294377 - DNA, 15 bp, Homo sapiens
agcaaggatggaagc

SEQ ID NO: 1294378 - DNA, 15 bp, Homo sapiens
aagcaaggatggaag

SEQ ID NO: 1294379 - DNA, 15 bp, Homo sapiens
gaagcaaggatggaa

SEQ ID NO: 1294380 - DNA, 15 bp, Homo sapiens
tgaagcaaggatgga

SEQ ID NO: 1294381 - DNA, 15 bp, Homo sapiens
ttgaagcaaggatgg

SEQ ID NO: 1294382 - DNA, 15 bp, Homo sapiens
cttgaagcaaggatg

SEQ ID NO: 1294383 - DNA, 15 bp, Homo sapiens
ccttgaagcaaggat

SEQ ID NO: 1294384 - DNA, 15 bp, Homo sapiens
gccttgaagcaagga

SEQ ID NO: 1294385 - DNA, 15 bp, Homo sapiens
ggccttgaagcaagg

SEQ ID NO: 1294386 - DNA, 15 bp, Homo sapiens
aggccttgaagcaag

SEQ ID NO: 1294387 - DNA, 15 bp, Homo sapiens
caggccttgaagcaa

SEQ ID NO: 1294388 - DNA, 15 bp, Homo sapiens
gcaggccttgaagca

SEQ ID NO: 1294389 - DNA, 15 bp, Homo sapiens
agcaggccttgaagc

SEQ ID NO: 1294390 - DNA, 15 bp, Homo sapiens
tagcaggccttgaag

SEQ ID NO: 1294391 - DNA, 15 bp, Homo sapiens
ttagcaggccttgaa

SEQ ID NO: 1294392 - DNA, 15 bp, Homo sapiens
attagcaggccttga

SEQ ID NO: 1294393 - DNA, 15 bp, Homo sapiens
gattagcaggccttg

SEQ ID NO: 1294394 - DNA, 15 bp, Homo sapiens
tgattagcaggcctt

SEQ ID NO: 1294395 - DNA, 15 bp, Homo sapiens
atgattagcaggcct

SEQ ID NO: 1294396 - DNA, 15 bp, Homo sapiens
gatgattagcaggcc

SEQ ID NO: 1294397 - DNA, 15 bp, Homo sapiens
tgatgattagcaggc

SEQ ID NO: 1294398 - DNA, 15 bp, Homo sapiens
ctgatgattagcagg

SEQ ID NO: 1294399 - DNA, 15 bp, Homo sapiens
gctgatgattagcag

SEQ ID NO: 1294400 - DNA, 15 bp, Homo sapiens
agctgatgattagca

SEQ ID NO: 1294401 - DNA, 15 bp, Homo sapiens
gagctgatgattagc

SEQ ID NO: 1294402 - DNA, 15 bp, Homo sapiens
ggagctgatgattag

SEQ ID NO: 1294403 - DNA, 15 bp, Homo sapiens
tggagctgatgatta

SEQ ID NO: 1294404 - DNA, 15 bp, Homo sapiens
gtggagctgatgatt

SEQ ID NO: 1294405 - DNA, 15 bp, Homo sapiens
agtggagctgatgat

SEQ ID NO: 1294406 - DNA, 15 bp, Homo sapiens
cagtggagctgatga

SEQ ID NO: 1294407 - DNA, 15 bp, Homo sapiens
ccagtggagctgatg

SEQ ID NO: 1294408 - DNA, 15 bp, Homo sapiens
cccagtggagctgat

SEQ ID NO: 1294409 - DNA, 15 bp, Homo sapiens
tcccagtggagctga

SEQ ID NO: 1294410 - DNA, 15 bp, Homo sapiens
ctcccagtggagctg

SEQ ID NO: 1294411 - DNA, 15 bp, Homo sapiens
tctcccagtggagct

SEQ ID NO: 1294412 - DNA, 15 bp, Homo sapiens
atctcccagtggagc

SEQ ID NO: 1294413 - DNA, 15 bp, Homo sapiens
gatctcccagtggag

SEQ ID NO: 1294414 - DNA, 15 bp, Homo sapiens
agatctcccagtgga

SEQ ID NO: 1294415 - DNA, 15 bp, Homo sapiens
aagatctcccagtgg

SEQ ID NO: 1294416 - DNA, 15 bp, Homo sapiens
aaagatctcccagtg

SEQ ID NO: 1294417 - DNA, 15 bp, Homo sapiens
caaagatctcccagt

SEQ ID NO: 1294418 - DNA, 15 bp, Homo sapiens
gcaaagatctcccag

SEQ ID NO: 1294419 - DNA, 15 bp, Homo sapiens
tgcaaagatctccca

SEQ ID NO: 1294420 - DNA, 15 bp, Homo sapiens
ctgcaaagatctccc

SEQ ID NO: 1294421 - DNA, 15 bp, Homo sapiens
cctgcaaagatctcc

SEQ ID NO: 1294422 - DNA, 15 bp, Homo sapiens
gcctgcaaagatctc

SEQ ID NO: 1294423 - DNA, 15 bp, Homo sapiens
agcctgcaaagatct

SEQ ID NO: 1294424 - DNA, 15 bp, Homo sapiens
cagcctgcaaagatc

SEQ ID NO: 1294425 - DNA, 15 bp, Homo sapiens
gcagcctgcaaagat

SEQ ID NO: 1294426 - DNA, 15 bp, Homo sapiens
ggcagcctgcaaaga

SEQ ID NO: 1294427 - DNA, 15 bp, Homo sapiens
gggcagcctgcaaag

SEQ ID NO: 1294428 - DNA, 15 bp, Homo sapiens
agggcagcctgcaaa

SEQ ID NO: 1294429 - DNA, 15 bp, Homo sapiens
cagggcagcctgcaa

SEQ ID NO: 1294430 - DNA, 15 bp, Homo sapiens
ccagggcagcctgca

SEQ ID NO: 1294431 - DNA, 15 bp, Homo sapiens
ttccagggcagcctg

SEQ ID NO: 1294432 - DNA, 15 bp, Homo sapiens
attccagggcagcct

SEQ ID NO: 1294433 - DNA, 15 bp, Homo sapiens
gattccagggcagcc

SEQ ID NO: 1294434 - DNA, 15 bp, Homo sapiens
tgattccagggcagc

SEQ ID NO: 1294435 - DNA, 15 bp, Homo sapiens
atgattccagggcag

SEQ ID NO: 1294436 - DNA, 15 bp, Homo sapiens
tatgattccagggca

SEQ ID NO: 1294437 - DNA, 15 bp, Homo sapiens
ctatgattccagggc

SEQ ID NO: 1294438 - DNA, 15 bp, Homo sapiens
gctatgattccaggg

SEQ ID NO: 1294439 - DNA, 15 bp, Homo sapiens
agctatgattccagg

SEQ ID NO: 1294440 - DNA, 15 bp, Homo sapiens
gagctatgattccag

SEQ ID NO: 1294441 - DNA, 15 bp, Homo sapiens
ggagctatgattcca

SEQ ID NO: 1294442 - DNA, 15 bp, Homo sapiens
tggagctatgattcc

SEQ ID NO: 1294443 - DNA, 15 bp, Homo sapiens
ctggagctatgattc

SEQ ID NO: 1294444 - DNA, 15 bp, Homo sapiens
cctggagctatgatt

SEQ ID NO: 1294445 - DNA, 15 bp, Homo sapiens
gcctggagctatgat

SEQ ID NO: 1294446 - DNA, 15 bp, Homo sapiens
ggcctggagctatga

SEQ ID NO: 1294447 - DNA, 15 bp, Homo sapiens
aggcctggagctatg

SEQ ID NO: 1294448 - DNA, 15 bp, Homo sapiens
aaggcctggagctat

SEQ ID NO: 1294449 - DNA, 15 bp, Homo sapiens
aaaggcctggagcta

SEQ ID NO: 1294450 - DNA, 15 bp, Homo sapiens
caaaggcctggagct

SEQ ID NO: 1294451 - DNA, 15 bp, Homo sapiens
acaaaggcctggagc

SEQ ID NO: 1294452 - DNA, 15 bp, Homo sapiens
aacaaaggcctggag

SEQ ID NO: 1294453 - DNA, 15 bp, Homo sapiens
gaacaaaggcctgga

SEQ ID NO: 1294454 - DNA, 15 bp, Homo sapiens
agaacaaaggcctgg

SEQ ID NO: 1294455 - DNA, 15 bp, Homo sapiens
tagaacaaaggcctg

SEQ ID NO: 1294456 - DNA, 15 bp, Homo sapiens
ctagaacaaaggcct

SEQ ID NO: 1294457 - DNA, 15 bp, Homo sapiens
tctagaacaaaggcc

SEQ ID NO: 1294458 - DNA, 15 bp, Homo sapiens
ttctagaacaaaggc

SEQ ID NO: 1294459 - DNA, 15 bp, Homo sapiens
gttctagaacaaagg

SEQ ID NO: 1294460 - DNA, 15 bp, Homo sapiens
tgttctagaacaaag

SEQ ID NO: 1294461 - DNA, 15 bp, Homo sapiens
atgttctagaacaaa

SEQ ID NO: 1294462 - DNA, 15 bp, Homo sapiens
gatgttctagaacaa

SEQ ID NO: 1294463 - DNA, 15 bp, Homo sapiens
agatgttctagaaca

SEQ ID NO: 1294464 - DNA, 15 bp, Homo sapiens
cagatgttctagaac

SEQ ID NO: 1294465 - DNA, 15 bp, Homo sapiens
acagatgttctagaa

SEQ ID NO: 1294466 - DNA, 15 bp, Homo sapiens
aacagatgttctaga

SEQ ID NO: 1294467 - DNA, 15 bp, Homo sapiens
caacagatgttctag

SEQ ID NO: 1294468 - DNA, 15 bp, Homo sapiens
gcaacagatgttcta

SEQ ID NO: 1294469 - DNA, 15 bp, Homo sapiens
tgcaacagatgttct

SEQ ID NO: 1294470 - DNA, 15 bp, Homo sapiens
atgcaacagatgttc

SEQ ID NO: 1294471 - DNA, 15 bp, Homo sapiens
aatgcaacagatgtt

SEQ ID NO: 1294472 - DNA, 15 bp, Homo sapiens
caatgcaacagatgt

SEQ ID NO: 1294473 - DNA, 15 bp, Homo sapiens
acaatgcaacagatg

SEQ ID NO: 1294474 - DNA, 15 bp, Homo sapiens
tacaatgcaacagat

SEQ ID NO: 1294475 - DNA, 15 bp, Homo sapiens
atacaatgcaacaga

SEQ ID NO: 1294476 - DNA, 15 bp, Homo sapiens
aatacaatgcaacag

SEQ ID NO: 1294477 - DNA, 15 bp, Homo sapiens
caatacaatgcaaca

SEQ ID NO: 1294478 - DNA, 15 bp, Homo sapiens
acaatacaatgcaac

SEQ ID NO: 1294479 - DNA, 15 bp, Homo sapiens
tacaatacaatgcaa

SEQ ID NO: 1294480 - DNA, 15 bp, Homo sapiens
gtacaatacaatgca

SEQ ID NO: 1294481 - DNA, 15 bp, Homo sapiens
ggtacaatacaatgc

SEQ ID NO: 1294482 - DNA, 15 bp, Homo sapiens
aggtacaatacaatg

SEQ ID NO: 1294483 - DNA, 15 bp, Homo sapiens
taggtacaatacaat

SEQ ID NO: 1294484 - DNA, 15 bp, Homo sapiens
ataggtacaatacaa

SEQ ID NO: 1294485 - DNA, 15 bp, Homo sapiens
aataggtacaataca

SEQ ID NO: 1294486 - DNA, 15 bp, Homo sapiens
caataggtacaatac

SEQ ID NO: 1294487 - DNA, 15 bp, Homo sapiens
gcaataggtacaata

SEQ ID NO: 1294488 - DNA, 15 bp, Homo sapiens
agcaataggtacaat

SEQ ID NO: 1294489 - DNA, 15 bp, Homo sapiens
aagcaataggtacaa

SEQ ID NO: 1294490 - DNA, 15 bp, Homo sapiens
aaagcaataggtaca

SEQ ID NO: 1294491 - DNA, 15 bp, Homo sapiens
taaagcaataggtac

SEQ ID NO: 1294492 - DNA, 15 bp, Homo sapiens
ataaagcaataggta

SEQ ID NO: 1294493 - DNA, 15 bp, Homo sapiens
tataaagcaataggt

SEQ ID NO: 1294494 - DNA, 15 bp, Homo sapiens
atataaagcaatagg

SEQ ID NO: 1294495 - DNA, 15 bp, Homo sapiens
tatataaagcaatag

SEQ ID NO: 1294496 - DNA, 15 bp, Homo sapiens
atatataaagcaata

SEQ ID NO: 1294497 - DNA, 15 bp, Homo sapiens
aatatataaagcaat

SEQ ID NO: 1294498 - DNA, 15 bp, Homo sapiens
aaatatataaagcaa

SEQ ID NO: 1294499 - DNA, 15 bp, Homo sapiens
aaaatatataaagca

SEQ ID NO: 1294500 - DNA, 15 bp, Homo sapiens
aaaaatatataaagc

SEQ ID NO: 1294501 - DNA, 15 bp, Homo sapiens
gaaaaatatataaag

SEQ ID NO: 1294502 - DNA, 15 bp, Homo sapiens
agaaaaatatataaa

SEQ ID NO: 1294503 - DNA, 15 bp, Homo sapiens
aagaaaaatatataa

SEQ ID NO: 1294504 - DNA, 15 bp, Homo sapiens
gaagaaaaatatata

SEQ ID NO: 1294505 - DNA, 15 bp, Homo sapiens
ggaagaaaaatatat

SEQ ID NO: 1294506 - DNA, 15 bp, Homo sapiens
aggaagaaaaatata

SEQ ID NO: 1294507 - DNA, 15 bp, Homo sapiens
aaggaagaaaaatat

SEQ ID NO: 1294508 - DNA, 15 bp, Homo sapiens
aaaggaagaaaaata

SEQ ID NO: 1294509 - DNA, 15 bp, Homo sapiens
aaaaggaagaaaaat

SEQ ID NO: 1294510 - DNA, 15 bp, Homo sapiens
gaaaaggaagaaaaa

SEQ ID NO: 1294511 - DNA, 15 bp, Homo sapiens
agaaaaggaagaaaa

SEQ ID NO: 1294512 - DNA, 15 bp, Homo sapiens
gagaaaaggaagaaa

SEQ ID NO: 1294513 - DNA, 15 bp, Homo sapiens
ggagaaaaggaagaa

SEQ ID NO: 1294514 - DNA, 15 bp, Homo sapiens
tggagaaaaggaaga

SEQ ID NO: 1294515 - DNA, 15 bp, Homo sapiens
ttggagaaaaggaag

SEQ ID NO: 1294516 - DNA, 15 bp, Homo sapiens
cttggagaaaaggaa

SEQ ID NO: 1294517 - DNA, 15 bp, Homo sapiens
tcttggagaaaagga

SEQ ID NO: 1294518 - DNA, 15 bp, Homo sapiens
gtcttggagaaaagg

SEQ ID NO: 1294519 - DNA, 15 bp, Homo sapiens
tgtcttggagaaaag

SEQ ID NO: 1294520 - DNA, 15 bp, Homo sapiens
ttgtcttggagaaaa

SEQ ID NO: 1294521 - DNA, 15 bp, Homo sapiens
cttgtcttggagaaa

SEQ ID NO: 1294522 - DNA, 15 bp, Homo sapiens
tcttgtcttggagaa

SEQ ID NO: 1294523 - DNA, 15 bp, Homo sapiens
ttcttgtcttggaga

SEQ ID NO: 1294524 - DNA, 15 bp, Homo sapiens
attcttgtcttggag

SEQ ID NO: 1294525 - DNA, 15 bp, Homo sapiens
cattcttgtcttgga

SEQ ID NO: 1294526 - DNA, 15 bp, Homo sapiens
acattcttgtcttgg

SEQ ID NO: 1294527 - DNA, 15 bp, Homo sapiens
cacattcttgtcttg

SEQ ID NO: 1294528 - DNA, 15 bp, Homo sapiens
gcacattcttgtctt

SEQ ID NO: 1294529 - DNA, 15 bp, Homo sapiens
tgcacattcttgtct

SEQ ID NO: 1294530 - DNA, 15 bp, Homo sapiens
gtgcacattcttgtc

SEQ ID NO: 1294531 - DNA, 15 bp, Homo sapiens
agtgcacattcttgt

SEQ ID NO: 1294532 - DNA, 15 bp, Homo sapiens
gagtgcacattcttg

SEQ ID NO: 1294533 - DNA, 15 bp, Homo sapiens
tgagtgcacattctt

SEQ ID NO: 1294534 - DNA, 15 bp, Homo sapiens
atgagtgcacattct

SEQ ID NO: 1294535 - DNA, 15 bp, Homo sapiens
aatgagtgcacattc

SEQ ID NO: 1294536 - DNA, 15 bp, Homo sapiens
gaatgagtgcacatt

SEQ ID NO: 1294537 - DNA, 15 bp, Homo sapiens
tgaatgagtgcacat

SEQ ID NO: 1294538 - DNA, 15 bp, Homo sapiens
ttgaatgagtgcaca

SEQ ID NO: 1294539 - DNA, 15 bp, Homo sapiens
cttgaatgagtgcac

SEQ ID NO: 1294540 - DNA, 15 bp, Homo sapiens
gcttgaatgagtgca

SEQ ID NO: 1294541 - DNA, 15 bp, Homo sapiens
ggcttgaatgagtgc

SEQ ID NO: 1294542 - DNA, 15 bp, Homo sapiens
aggcttgaatgagtg

SEQ ID NO: 1294543 - DNA, 15 bp, Homo sapiens
caggcttgaatgagt

SEQ ID NO: 1294544 - DNA, 15 bp, Homo sapiens
ccaggcttgaatgag

SEQ ID NO: 1294545 - DNA, 15 bp, Homo sapiens
cccaggcttgaatga

SEQ ID NO: 1294546 - DNA, 15 bp, Homo sapiens
tcccaggcttgaatg

SEQ ID NO: 1294547 - DNA, 15 bp, Homo sapiens
atcccaggcttgaat

SEQ ID NO: 1294548 - DNA, 15 bp, Homo sapiens
catcccaggcttgaa

SEQ ID NO: 1294549 - DNA, 15 bp, Homo sapiens
ccatcccaggcttga

SEQ ID NO: 1294550 - DNA, 15 bp, Homo sapiens
cccatcccaggcttg

SEQ ID NO: 1294551 - DNA, 15 bp, Homo sapiens
gcccatcccaggctt

SEQ ID NO: 1294552 - DNA, 15 bp, Homo sapiens
agcccatcccaggct

SEQ ID NO: 1294553 - DNA, 15 bp, Homo sapiens
gagcccatcccaggc

SEQ ID NO: 1294554 - DNA, 15 bp, Homo sapiens
agagcccatcccagg

SEQ ID NO: 1294555 - DNA, 15 bp, Homo sapiens
aagagcccatcccag

SEQ ID NO: 1294556 - DNA, 15 bp, Homo sapiens
gaagagcccatccca

SEQ ID NO: 1294557 - DNA, 15 bp, Homo sapiens
agaagagcccatccc

SEQ ID NO: 1294558 - DNA, 15 bp, Homo sapiens
aagaagagcccatcc

SEQ ID NO: 1294559 - DNA, 15 bp, Homo sapiens
taagaagagcccatc

SEQ ID NO: 1294560 - DNA, 15 bp, Homo sapiens
ataagaagagcccat

SEQ ID NO: 1294561 - DNA, 15 bp, Homo sapiens
cataagaagagccca

SEQ ID NO: 1294562 - DNA, 15 bp, Homo sapiens
acataagaagagccc

SEQ ID NO: 1294563 - DNA, 15 bp, Homo sapiens
cacataagaagagcc

SEQ ID NO: 1294564 - DNA, 15 bp, Homo sapiens
gcacataagaagagc

SEQ ID NO: 1294565 - DNA, 15 bp, Homo sapiens
tgcacataagaagag

SEQ ID NO: 1294566 - DNA, 15 bp, Homo sapiens
atgcacataagaaga

SEQ ID NO: 1294567 - DNA, 15 bp, Homo sapiens
tatgcacataagaag

SEQ ID NO: 1294568 - DNA, 15 bp, Homo sapiens
atatgcacataagaa

SEQ ID NO: 1294569 - DNA, 15 bp, Homo sapiens
aatatgcacataaga

SEQ ID NO: 1294570 - DNA, 15 bp, Homo sapiens
gaatatgcacataag

SEQ ID NO: 1294571 - DNA, 15 bp, Homo sapiens
tgaatatgcacataa

SEQ ID NO: 1294572 - DNA, 15 bp, Homo sapiens
ctgaatatgcacata

SEQ ID NO: 1294573 - DNA, 15 bp, Homo sapiens
actgaatatgcacat

SEQ ID NO: 1294574 - DNA, 15 bp, Homo sapiens
aactgaatatgcaca

SEQ ID NO: 1294575 - DNA, 15 bp, Homo sapiens
gaactgaatatgcac

SEQ ID NO: 1294576 - DNA, 15 bp, Homo sapiens
ggaactgaatatgca

SEQ ID NO: 1294577 - DNA, 15 bp, Homo sapiens
tggaactgaatatgc

SEQ ID NO: 1294578 - DNA, 15 bp, Homo sapiens
ttggaactgaatatg

SEQ ID NO: 1294579 - DNA, 15 bp, Homo sapiens
cttggaactgaatat

SEQ ID NO: 1294580 - DNA, 15 bp, Homo sapiens
tcttggaactgaata

SEQ ID NO: 1294581 - DNA, 15 bp, Homo sapiens
ttcttggaactgaat

SEQ ID NO: 1294582 - DNA, 15 bp, Homo sapiens
tttcttggaactgaa

SEQ ID NO: 1294583 - DNA, 15 bp, Homo sapiens
atttcttggaactga

SEQ ID NO: 1294584 - DNA, 15 bp, Homo sapiens
tatttcttggaactg

SEQ ID NO: 1294585 - DNA, 15 bp, Homo sapiens
atatttcttggaact

SEQ ID NO: 1294586 - DNA, 15 bp, Homo sapiens
aatatttcttggaac

SEQ ID NO: 1294587 - DNA, 15 bp, Homo sapiens
aaatatttcttggaa

SEQ ID NO: 1294588 - DNA, 15 bp, Homo sapiens
taaatatttcttgga

SEQ ID NO: 1294589 - DNA, 15 bp, Homo sapiens
ttaaatatttcttgg

SEQ ID NO: 1294590 - DNA, 15 bp, Homo sapiens
tttaaatatttcttg

SEQ ID NO: 1294591 - DNA, 15 bp, Homo sapiens
gtttaaatatttctt

SEQ ID NO: 1294592 - DNA, 15 bp, Homo sapiens
agtttaaatatttct

SEQ ID NO: 1294593 - DNA, 15 bp, Homo sapiens
tagtttaaatatttc

SEQ ID NO: 1294594 - DNA, 15 bp, Homo sapiens
atagtttaaatattt

SEQ ID NO: 1294595 - DNA, 15 bp, Homo sapiens
gatagtttaaatatt

SEQ ID NO: 1294596 - DNA, 15 bp, Homo sapiens
tgatagtttaaatat

SEQ ID NO: 1294597 - DNA, 15 bp, Homo sapiens
gtgatagtttaaata

SEQ ID NO: 1294598 - DNA, 15 bp, Homo sapiens
agtgatagtttaaat

SEQ ID NO: 1294599 - DNA, 15 bp, Homo sapiens
tagtgatagtttaaa

SEQ ID NO: 1294600 - DNA, 15 bp, Homo sapiens
ctagtgatagtttaa

SEQ ID NO: 1294601 - DNA, 15 bp, Homo sapiens
actagtgatagttta

SEQ ID NO: 1294602 - DNA, 15 bp, Homo sapiens
cactagtgatagttt

SEQ ID NO: 1294603 - DNA, 15 bp, Homo sapiens
acactagtgatagtt

SEQ ID NO: 1294604 - DNA, 15 bp, Homo sapiens
tacactagtgatagt

SEQ ID NO: 1294605 - DNA, 15 bp, Homo sapiens
ttacactagtgatag

SEQ ID NO: 1294606 - DNA, 15 bp, Homo sapiens
attacactagtgata

SEQ ID NO: 1294607 - DNA, 15 bp, Homo sapiens
aattacactagtgat

SEQ ID NO: 1294608 - DNA, 15 bp, Homo sapiens
gaattacactagtga

SEQ ID NO: 1294609 - DNA, 15 bp, Homo sapiens
tgaattacactagtg

SEQ ID NO: 1294610 - DNA, 15 bp, Homo sapiens
ctgaattacactagt

SEQ ID NO: 1294611 - DNA, 15 bp, Homo sapiens
gctgaattacactag

SEQ ID NO: 1294612 - DNA, 15 bp, Homo sapiens
tgctgaattacacta

SEQ ID NO: 1294613 - DNA, 15 bp, Homo sapiens
atgctgaattacact

SEQ ID NO: 1294614 - DNA, 15 bp, Homo sapiens
gatgctgaattacac

SEQ ID NO: 1294615 - DNA, 15 bp, Homo sapiens
ggatgctgaattaca

SEQ ID NO: 1294616 - DNA, 15 bp, Homo sapiens
tggatgctgaattac

SEQ ID NO: 1294617 - DNA, 15 bp, Homo sapiens
atggatgctgaatta

SEQ ID NO: 1294618 - DNA, 15 bp, Homo sapiens
tatggatgctgaatt

SEQ ID NO: 1294619 - DNA, 15 bp, Homo sapiens
ttatggatgctgaat

SEQ ID NO: 1294620 - DNA, 15 bp, Homo sapiens
attatggatgctgaa

SEQ ID NO: 1294621 - DNA, 15 bp, Homo sapiens
cattatggatgctga

SEQ ID NO: 1294622 - DNA, 15 bp, Homo sapiens
tcattatggatgctg

SEQ ID NO: 1294623 - DNA, 15 bp, Homo sapiens
ctcattatggatgct

SEQ ID NO: 1294624 - DNA, 15 bp, Homo sapiens
actcattatggatgc

SEQ ID NO: 1294625 - DNA, 15 bp, Homo sapiens
aactcattatggatg

SEQ ID NO: 1294626 - DNA, 15 bp, Homo sapiens
aaactcattatggat

SEQ ID NO: 1294627 - DNA, 15 bp, Homo sapiens
taaactcattatgga

SEQ ID NO: 1294628 - DNA, 15 bp, Homo sapiens
ataaactcattatgg

SEQ ID NO: 1294629 - DNA, 15 bp, Homo sapiens
tataaactcattatg

SEQ ID NO: 1294630 - DNA, 15 bp, Homo sapiens
gtataaactcattat

SEQ ID NO: 1294631 - DNA, 15 bp, Homo sapiens
agtataaactcatta

SEQ ID NO: 1294632 - DNA, 15 bp, Homo sapiens
gagtataaactcatt

SEQ ID NO: 1294633 - DNA, 15 bp, Homo sapiens
agagtataaactcat

SEQ ID NO: 1294634 - DNA, 15 bp, Homo sapiens
aagagtataaactca

SEQ ID NO: 1294635 - DNA, 15 bp, Homo sapiens
caagagtataaactc

SEQ ID NO: 1294636 - DNA, 15 bp, Homo sapiens
acaagagtataaact

SEQ ID NO: 1294637 - DNA, 15 bp, Homo sapiens
cacaagagtataaac

SEQ ID NO: 1294638 - DNA, 15 bp, Homo sapiens
acacaagagtataaa

SEQ ID NO: 1294639 - DNA, 15 bp, Homo sapiens
tacacaagagtataa

SEQ ID NO: 1294640 - DNA, 15 bp, Homo sapiens
atacacaagagtata

SEQ ID NO: 1294641 - DNA, 15 bp, Homo sapiens
aatacacaagagtat

SEQ ID NO: 1294642 - DNA, 15 bp, Homo sapiens
caatacacaagagta

SEQ ID NO: 1294643 - DNA, 15 bp, Homo sapiens
tcaatacacaagagt

SEQ ID NO: 1294644 - DNA, 15 bp, Homo sapiens
ttcaatacacaagag

SEQ ID NO: 1294645 - DNA, 15 bp, Homo sapiens
tttcaatacacaaga

SEQ ID NO: 1294646 - DNA, 15 bp, Homo sapiens
atttcaatacacaag

SEQ ID NO: 1294647 - DNA, 15 bp, Homo sapiens
gatttcaatacacaa

SEQ ID NO: 1294648 - DNA, 15 bp, Homo sapiens
tgatttcaatacaca

SEQ ID NO: 1294649 - DNA, 15 bp, Homo sapiens
ctgatttcaatacac

SEQ ID NO: 1294650 - DNA, 15 bp, Homo sapiens
tctgatttcaataca

SEQ ID NO: 1294651 - DNA, 15 bp, Homo sapiens
atctgatttcaatac

SEQ ID NO: 1294652 - DNA, 15 bp, Homo sapiens
catctgatttcaata

SEQ ID NO: 1294653 - DNA, 15 bp, Homo sapiens
tcatctgatttcaat

SEQ ID NO: 1294654 - DNA, 15 bp, Homo sapiens
gtcatctgatttcaa

SEQ ID NO: 1294655 - DNA, 15 bp, Homo sapiens
agtcatctgatttca

SEQ ID NO: 1294656 - DNA, 15 bp, Homo sapiens
aagtcatctgatttc

SEQ ID NO: 1294657 - DNA, 15 bp, Homo sapiens
aaagtcatctgattt

SEQ ID NO: 1294658 - DNA, 15 bp, Homo sapiens
gaaagtcatctgatt

SEQ ID NO: 1294659 - DNA, 15 bp, Homo sapiens
ggaaagtcatctgat

SEQ ID NO: 1294660 - DNA, 15 bp, Homo sapiens
aggaaagtcatctga

SEQ ID NO: 1294661 - DNA, 15 bp, Homo sapiens
caggaaagtcatctg

SEQ ID NO: 1294662 - DNA, 15 bp, Homo sapiens
acaggaaagtcatct

SEQ ID NO: 1294663 - DNA, 15 bp, Homo sapiens
gacaggaaagtcatc

SEQ ID NO: 1294664 - DNA, 15 bp, Homo sapiens
agacaggaaagtcat

SEQ ID NO: 1294665 - DNA, 15 bp, Homo sapiens
aagacaggaaagtca

SEQ ID NO: 1294666 - DNA, 15 bp, Homo sapiens
aaagacaggaaagtc

SEQ ID NO: 1294667 - DNA, 15 bp, Homo sapiens
caaagacaggaaagt

SEQ ID NO: 1294668 - DNA, 15 bp, Homo sapiens
acaaagacaggaaag

SEQ ID NO: 1294669 - DNA, 15 bp, Homo sapiens
cacaaagacaggaaa

SEQ ID NO: 1294670 - DNA, 15 bp, Homo sapiens
ccacaaagacaggaa

SEQ ID NO: 1294671 - DNA, 15 bp, Homo sapiens
accacaaagacagga

SEQ ID NO: 1294672 - DNA, 15 bp, Homo sapiens
aaccacaaagacagg

SEQ ID NO: 1294673 - DNA, 15 bp, Homo sapiens
gaaccacaaagacag

SEQ ID NO: 1294674 - DNA, 15 bp, Homo sapiens
tgaaccacaaagaca

SEQ ID NO: 1294675 - DNA, 15 bp, Homo sapiens
atgaaccacaaagac

SEQ ID NO: 1294676 - DNA, 15 bp, Homo sapiens
tatgaaccacaaaga

SEQ ID NO: 1294677 - DNA, 15 bp, Homo sapiens
atatgaaccacaaag

SEQ ID NO: 1294678 - DNA, 15 bp, Homo sapiens
aatatgaaccacaaa

SEQ ID NO: 1294679 - DNA, 15 bp, Homo sapiens
taatatgaaccacaa

SEQ ID NO: 1294680 - DNA, 15 bp, Homo sapiens
ataatatgaaccaca

SEQ ID NO: 1294681 - DNA, 15 bp, Homo sapiens
aataatatgaaccac

SEQ ID NO: 1294682 - DNA, 15 bp, Homo sapiens
taataatatgaacca

SEQ ID NO: 1294683 - DNA, 15 bp, Homo sapiens
ttaataatatgaacc

SEQ ID NO: 1294684 - DNA, 15 bp, Homo sapiens
attaataatatgaac

SEQ ID NO: 1294685 - DNA, 15 bp, Homo sapiens
tattaataatatgaa

SEQ ID NO: 1294686 - DNA, 15 bp, Homo sapiens
atattaataatatga

SEQ ID NO: 1294687 - DNA, 15 bp, Homo sapiens
aatattaataatatg

SEQ ID NO: 1294688 - DNA, 15 bp, Homo sapiens
gaatattaataatat

SEQ ID NO: 1294689 - DNA, 15 bp, Homo sapiens
agaatattaataata

SEQ ID NO: 1294690 - DNA, 15 bp, Homo sapiens
aagaatattaataat

SEQ ID NO: 1294691 - DNA, 15 bp, Homo sapiens
gaagaatattaataa

SEQ ID NO: 1294692 - DNA, 15 bp, Homo sapiens
agaagaatattaata

SEQ ID NO: 1294693 - DNA, 15 bp, Homo sapiens
aagaagaatattaat

SEQ ID NO: 1294694 - DNA, 15 bp, Homo sapiens
taagaagaatattaa

SEQ ID NO: 1294695 - DNA, 15 bp, Homo sapiens
ataagaagaatatta

SEQ ID NO: 1294696 - DNA, 15 bp, Homo sapiens
gataagaagaatatt

SEQ ID NO: 1294697 - DNA, 15 bp, Homo sapiens
cgataagaagaatat

SEQ ID NO: 1294698 - DNA, 15 bp, Homo sapiens
gcgataagaagaata

SEQ ID NO: 1294699 - DNA, 15 bp, Homo sapiens
agcgataagaagaat

SEQ ID NO: 1294700 - DNA, 15 bp, Homo sapiens
aagcgataagaagaa

SEQ ID NO: 1294701 - DNA, 15 bp, Homo sapiens
aaagcgataagaaga

SEQ ID NO: 1294702 - DNA, 15 bp, Homo sapiens
caaagcgataagaag

SEQ ID NO: 1294703 - DNA, 15 bp, Homo sapiens
gcaaagcgataagaa

SEQ ID NO: 1294704 - DNA, 15 bp, Homo sapiens
agcaaagcgataaga

SEQ ID NO: 1294705 - DNA, 15 bp, Homo sapiens
gagcaaagcgataag

SEQ ID NO: 1294706 - DNA, 15 bp, Homo sapiens
agagcaaagcgataa

SEQ ID NO: 1294707 - DNA, 15 bp, Homo sapiens
cagagcaaagcgata

SEQ ID NO: 1294708 - DNA, 15 bp, Homo sapiens
gcagagcaaagcgat

SEQ ID NO: 1294709 - DNA, 15 bp, Homo sapiens
agcagagcaaagcga

SEQ ID NO: 1294710 - DNA, 15 bp, Homo sapiens
aagcagagcaaagcg

SEQ ID NO: 1294711 - DNA, 15 bp, Homo sapiens
taagcagagcaaagc

SEQ ID NO: 1294712 - DNA, 15 bp, Homo sapiens
ctaagcagagcaaag

SEQ ID NO: 1294713 - DNA, 15 bp, Homo sapiens
actaagcagagcaaa

SEQ ID NO: 1294714 - DNA, 15 bp, Homo sapiens
aactaagcagagcaa

SEQ ID NO: 1294715 - DNA, 15 bp, Homo sapiens
gaactaagcagagca

SEQ ID NO: 1294716 - DNA, 15 bp, Homo sapiens
agaactaagcagagc

SEQ ID NO: 1294717 - DNA, 15 bp, Homo sapiens
aagaactaagcagag

SEQ ID NO: 1294718 - DNA, 15 bp, Homo sapiens
aaagaactaagcaga

SEQ ID NO: 1294719 - DNA, 15 bp, Homo sapiens
aaaagaactaagcag

SEQ ID NO: 1294720 - DNA, 15 bp, Homo sapiens
aaaaagaactaagca

SEQ ID NO: 1294721 - DNA, 15 bp, Homo sapiens
aaaaaagaactaagc

SEQ ID NO: 1294722 - DNA, 15 bp, Homo sapiens
aaaaaaagaactaag

SEQ ID NO: 1294723 - DNA, 15 bp, Homo sapiens
taaaaaaagaactaa

SEQ ID NO: 1294724 - DNA, 15 bp, Homo sapiens
ataaaaaaagaacta

SEQ ID NO: 1294725 - DNA, 15 bp, Homo sapiens
tataaaaaaagaact

SEQ ID NO: 1294726 - DNA, 15 bp, Homo sapiens
gtataaaaaaagaac

SEQ ID NO: 1294727 - DNA, 15 bp, Homo sapiens
tgtataaaaaaagaa

SEQ ID NO: 1294728 - DNA, 15 bp, Homo sapiens
atgtataaaaaaaga

SEQ ID NO: 1294729 - DNA, 15 bp, Homo sapiens
gatgtataaaaaaag

SEQ ID NO: 1294730 - DNA, 15 bp, Homo sapiens
agatgtataaaaaaa

SEQ ID NO: 1294731 - DNA, 15 bp, Homo sapiens
aagatgtataaaaaa

SEQ ID NO: 1294732 - DNA, 15 bp, Homo sapiens
aaagatgtataaaaa

SEQ ID NO: 1294733 - DNA, 15 bp, Homo sapiens
caaagatgtataaaa

SEQ ID NO: 1294734 - DNA, 15 bp, Homo sapiens
gcaaagatgtataaa

SEQ ID NO: 1294735 - DNA, 15 bp, Homo sapiens
ggcaaagatgtataa

SEQ ID NO: 1294736 - DNA, 15 bp, Homo sapiens
aggcaaagatgtata

SEQ ID NO: 1294737 - DNA, 15 bp, Homo sapiens
gaggcaaagatgtat

SEQ ID NO: 1294738 - DNA, 15 bp, Homo sapiens
agaggcaaagatgta

SEQ ID NO: 1294739 - DNA, 15 bp, Homo sapiens
gagaggcaaagatgt

SEQ ID NO: 1294740 - DNA, 15 bp, Homo sapiens
tgagaggcaaagatg

SEQ ID NO: 1294741 - DNA, 15 bp, Homo sapiens
gtgagaggcaaagat

SEQ ID NO: 1294742 - DNA, 15 bp, Homo sapiens
ggtgagaggcaaaga

SEQ ID NO: 1294743 - DNA, 15 bp, Homo sapiens
gggtgagaggcaaag

SEQ ID NO: 1294744 - DNA, 15 bp, Homo sapiens
ggggtgagaggcaaa

SEQ ID NO: 1294745 - DNA, 15 bp, Homo sapiens
gggggtgagaggcaa

SEQ ID NO: 1294746 - DNA, 15 bp, Homo sapiens
tgggggtgagaggca

SEQ ID NO: 1294747 - DNA, 15 bp, Homo sapiens
atgggggtgagaggc

SEQ ID NO: 1294748 - DNA, 15 bp, Homo sapiens
aatgggggtgagagg

SEQ ID NO: 1294749 - DNA, 15 bp, Homo sapiens
aaatgggggtgagag

SEQ ID NO: 1294750 - DNA, 15 bp, Homo sapiens
aaaatgggggtgaga

SEQ ID NO: 1294751 - DNA, 15 bp, Homo sapiens
gaaaatgggggtgag

SEQ ID NO: 1294752 - DNA, 15 bp, Homo sapiens
agaaaatgggggtga

SEQ ID NO: 1294753 - DNA, 15 bp, Homo sapiens
cagaaaatgggggtg

SEQ ID NO: 1294754 - DNA, 15 bp, Homo sapiens
gcagaaaatgggggt

SEQ ID NO: 1294755 - DNA, 15 bp, Homo sapiens
ggcagaaaatggggg

SEQ ID NO: 1294756 - DNA, 15 bp, Homo sapiens
aggcagaaaatgggg

SEQ ID NO: 1294757 - DNA, 15 bp, Homo sapiens
aaggcagaaaatggg

SEQ ID NO: 1294758 - DNA, 15 bp, Homo sapiens
caaggcagaaaatgg

SEQ ID NO: 1294759 - DNA, 15 bp, Homo sapiens
ccaaggcagaaaatg

SEQ ID NO: 1294760 - DNA, 15 bp, Homo sapiens
gccaaggcagaaaat

SEQ ID NO: 1294761 - DNA, 15 bp, Homo sapiens
tgccaaggcagaaaa

SEQ ID NO: 1294762 - DNA, 15 bp, Homo sapiens
atgccaaggcagaaa

SEQ ID NO: 1294763 - DNA, 15 bp, Homo sapiens
aatgccaaggcagaa

SEQ ID NO: 1294764 - DNA, 15 bp, Homo sapiens
gaatgccaaggcaga

SEQ ID NO: 1294765 - DNA, 15 bp, Homo sapiens
cgaatgccaaggcag

SEQ ID NO: 1294766 - DNA, 15 bp, Homo sapiens
acgaatgccaaggca

SEQ ID NO: 1294767 - DNA, 15 bp, Homo sapiens
aacgaatgccaaggc

SEQ ID NO: 1294768 - DNA, 15 bp, Homo sapiens
aaacgaatgccaagg

SEQ ID NO: 1294769 - DNA, 15 bp, Homo sapiens
caaacgaatgccaag

SEQ ID NO: 1294770 - DNA, 15 bp, Homo sapiens
acaaacgaatgccaa

SEQ ID NO: 1294771 - DNA, 15 bp, Homo sapiens
aacaaacgaatgcca

SEQ ID NO: 1294772 - DNA, 15 bp, Homo sapiens
gaacaaacgaatgcc

SEQ ID NO: 1294773 - DNA, 15 bp, Homo sapiens
agaacaaacgaatgc

SEQ ID NO: 1294774 - DNA, 15 bp, Homo sapiens
aagaacaaacgaatg

SEQ ID NO: 1294775 - DNA, 15 bp, Homo sapiens
aaagaacaaacgaat

SEQ ID NO: 1294776 - DNA, 15 bp, Homo sapiens
gaaagaacaaacgaa

SEQ ID NO: 1294777 - DNA, 15 bp, Homo sapiens
tgaaagaacaaacga

SEQ ID NO: 1294778 - DNA, 15 bp, Homo sapiens
ctgaaagaacaaacg

SEQ ID NO: 1294779 - DNA, 15 bp, Homo sapiens
gctgaaagaacaaac

SEQ ID NO: 1294780 - DNA, 15 bp, Homo sapiens
cgctgaaagaacaaa

SEQ ID NO: 1294781 - DNA, 15 bp, Homo sapiens
tcgctgaaagaacaa

SEQ ID NO: 1294782 - DNA, 15 bp, Homo sapiens
ttcgctgaaagaaca

SEQ ID NO: 1294783 - DNA, 15 bp, Homo sapiens
attcgctgaaagaac

SEQ ID NO: 1294784 - DNA, 15 bp, Homo sapiens
cattcgctgaaagaa

SEQ ID NO: 1294785 - DNA, 15 bp, Homo sapiens
acattcgctgaaaga

SEQ ID NO: 1294786 - DNA, 15 bp, Homo sapiens
gacattcgctgaaag

SEQ ID NO: 1294787 - DNA, 15 bp, Homo sapiens
ggacattcgctgaaa

SEQ ID NO: 1294788 - DNA, 15 bp, Homo sapiens
tggacattcgctgaa

SEQ ID NO: 1294789 - DNA, 15 bp, Homo sapiens
gtggacattcgctga

SEQ ID NO: 1294790 - DNA, 15 bp, Homo sapiens
agtggacattcgctg

SEQ ID NO: 1294791 - DNA, 15 bp, Homo sapiens
cagtggacattcgct

SEQ ID NO: 1294792 - DNA, 15 bp, Homo sapiens
ccagtggacattcgc

SEQ ID NO: 1294793 - DNA, 15 bp, Homo sapiens
cccagtggacattcg

SEQ ID NO: 1294794 - DNA, 15 bp, Homo sapiens
gcccagtggacattc

SEQ ID NO: 1294795 - DNA, 15 bp, Homo sapiens
tgcccagtggacatt

SEQ ID NO: 1294796 - DNA, 15 bp, Homo sapiens
gtgcccagtggacat

SEQ ID NO: 1294797 - DNA, 15 bp, Homo sapiens
ggtgcccagtggaca

SEQ ID NO: 1294798 - DNA, 15 bp, Homo sapiens
aggtgcccagtggac

SEQ ID NO: 1294799 - DNA, 15 bp, Homo sapiens
taggtgcccagtgga

SEQ ID NO: 1294800 - DNA, 15 bp, Homo sapiens
gtaggtgcccagtgg

SEQ ID NO: 1294801 - DNA, 15 bp, Homo sapiens
agtaggtgcccagtg

SEQ ID NO: 1294802 - DNA, 15 bp, Homo sapiens
cagtaggtgcccagt

SEQ ID NO: 1294803 - DNA, 15 bp, Homo sapiens
acagtaggtgcccag

SEQ ID NO: 1294804 - DNA, 15 bp, Homo sapiens
cacagtaggtgccca

SEQ ID NO: 1294805 - DNA, 15 bp, Homo sapiens
acacagtaggtgccc

SEQ ID NO: 1294806 - DNA, 15 bp, Homo sapiens
cacacagtaggtgcc

SEQ ID NO: 1294807 - DNA, 15 bp, Homo sapiens
gcacacagtaggtgc

SEQ ID NO: 1294808 - DNA, 15 bp, Homo sapiens
ggcacacagtaggtg

SEQ ID NO: 1294809 - DNA, 15 bp, Homo sapiens
tggcacacagtaggt

SEQ ID NO: 1294810 - DNA, 15 bp, Homo sapiens
cagtgcctggcacac

SEQ ID NO: 1294811 - DNA, 15 bp, Homo sapiens
cagcacctagaacag

SEQ ID NO: 1294812 - DNA, 15 bp, Homo sapiens
ccagcacctagaaca

SEQ ID NO: 1294813 - DNA, 15 bp, Homo sapiens
cccagcacctagaac

SEQ ID NO: 1294814 - DNA, 15 bp, Homo sapiens
ccccagcacctagaa

SEQ ID NO: 1294815 - DNA, 15 bp, Homo sapiens
tccccagcacctaga

SEQ ID NO: 1294816 - DNA, 15 bp, Homo sapiens
tatccccagcaccta

SEQ ID NO: 1294817 - DNA, 15 bp, Homo sapiens
gtatccccagcacct

SEQ ID NO: 1294818 - DNA, 15 bp, Homo sapiens
tgtatccccagcacc

SEQ ID NO: 1294819 - DNA, 15 bp, Homo sapiens
ctgtatccccagcac

SEQ ID NO: 1294820 - DNA, 15 bp, Homo sapiens
tctgtatccccagca

SEQ ID NO: 1294821 - DNA, 15 bp, Homo sapiens
ttctgtatccccagc

SEQ ID NO: 1294822 - DNA, 15 bp, Homo sapiens
tttctgtatccccag

SEQ ID NO: 1294823 - DNA, 15 bp, Homo sapiens
atttctgtatcccca

SEQ ID NO: 1294824 - DNA, 15 bp, Homo sapiens
catttctgtatcccc

SEQ ID NO: 1294825 - DNA, 15 bp, Homo sapiens
tcatttctgtatccc

SEQ ID NO: 1294826 - DNA, 15 bp, Homo sapiens
ttcatttctgtatcc

SEQ ID NO: 1294827 - DNA, 15 bp, Homo sapiens
gttcatttctgtatc

SEQ ID NO: 1294828 - DNA, 15 bp, Homo sapiens
tgttcatttctgtat

SEQ ID NO: 1294829 - DNA, 15 bp, Homo sapiens
ctgttcatttctgta

SEQ ID NO: 1294830 - DNA, 15 bp, Homo sapiens
cctgttcatttctgt

SEQ ID NO: 1294831 - DNA, 15 bp, Homo sapiens
tcctgttcatttctg

SEQ ID NO: 1294832 - DNA, 15 bp, Homo sapiens
ttcctgttcatttct

SEQ ID NO: 1294833 - DNA, 15 bp, Homo sapiens
tttcctgttcatttc

SEQ ID NO: 1294834 - DNA, 15 bp, Homo sapiens
ttttcctgttcattt

SEQ ID NO: 1294835 - DNA, 15 bp, Homo sapiens
attttcctgttcatt

SEQ ID NO: 1294836 - DNA, 15 bp, Homo sapiens
aattttcctgttcat

SEQ ID NO: 1294837 - DNA, 15 bp, Homo sapiens
caattttcctgttca

SEQ ID NO: 1294838 - DNA, 15 bp, Homo sapiens
tcaattttcctgttc

SEQ ID NO: 1294839 - DNA, 15 bp, Homo sapiens
atcaattttcctgtt

SEQ ID NO: 1294840 - DNA, 15 bp, Homo sapiens
aatcaattttcctgt

SEQ ID NO: 1294841 - DNA, 15 bp, Homo sapiens
caatcaattttcctg

SEQ ID NO: 1294842 - DNA, 15 bp, Homo sapiens
ccaatcaattttcct

SEQ ID NO: 1294843 - DNA, 15 bp, Homo sapiens
gccaatcaattttcc

SEQ ID NO: 1294844 - DNA, 15 bp, Homo sapiens
agccaatcaattttc

SEQ ID NO: 1294845 - DNA, 15 bp, Homo sapiens
aagccaatcaatttt

SEQ ID NO: 1294846 - DNA, 15 bp, Homo sapiens
taagccaatcaattt

SEQ ID NO: 1294847 - DNA, 15 bp, Homo sapiens
ataagccaatcaatt

SEQ ID NO: 1294848 - DNA, 15 bp, Homo sapiens
aataagccaatcaat

SEQ ID NO: 1294849 - DNA, 15 bp, Homo sapiens
aaataagccaatcaa

SEQ ID NO: 1294850 - DNA, 15 bp, Homo sapiens
taaataagccaatca

SEQ ID NO: 1294851 - DNA, 15 bp, Homo sapiens
ataaataagccaatc

SEQ ID NO: 1294852 - DNA, 15 bp, Homo sapiens
aataaataagccaat

SEQ ID NO: 1294853 - DNA, 15 bp, Homo sapiens
aaataaataagccaa

SEQ ID NO: 1294854 - DNA, 15 bp, Homo sapiens
caaataaataagcca

SEQ ID NO: 1294855 - DNA, 15 bp, Homo sapiens
tcaaataaataagcc

SEQ ID NO: 1294856 - DNA, 15 bp, Homo sapiens
ttcaaataaataagc

SEQ ID NO: 1294857 - DNA, 15 bp, Homo sapiens
tttcaaataaataag

SEQ ID NO: 1294858 - DNA, 15 bp, Homo sapiens
ttttcaaataaataa

SEQ ID NO: 1294859 - DNA, 15 bp, Homo sapiens
tttttcaaataaata

SEQ ID NO: 1294860 - DNA, 15 bp, Homo sapiens
gtttttcaaataaat

SEQ ID NO: 1294861 - DNA, 15 bp, Homo sapiens
tgtttttcaaataaa

SEQ ID NO: 1294862 - DNA, 15 bp, Homo sapiens
gtgtttttcaaataa

SEQ ID NO: 1294863 - DNA, 15 bp, Homo sapiens
tgtgtttttcaaata

SEQ ID NO: 1294864 - DNA, 15 bp, Homo sapiens
ctgtgtttttcaaat

SEQ ID NO: 1294865 - DNA, 15 bp, Homo sapiens
tctgtgtttttcaaa

SEQ ID NO: 1294866 - DNA, 15 bp, Homo sapiens
ttctgtgtttttcaa

SEQ ID NO: 1294867 - DNA, 15 bp, Homo sapiens
attctgtgtttttca

SEQ ID NO: 1294868 - DNA, 15 bp, Homo sapiens
aattctgtgtttttc

SEQ ID NO: 1294869 - DNA, 15 bp, Homo sapiens
taattctgtgttttt

SEQ ID NO: 1294870 - DNA, 15 bp, Homo sapiens
ctaattctgtgtttt

SEQ ID NO: 1294871 - DNA, 15 bp, Homo sapiens
cctaattctgtgttt

SEQ ID NO: 1294872 - DNA, 15 bp, Homo sapiens
ccctaattctgtgtt

SEQ ID NO: 1294873 - DNA, 15 bp, Homo sapiens
accctaattctgtgt

SEQ ID NO: 1294874 - DNA, 15 bp, Homo sapiens
aaccctaattctgtg

SEQ ID NO: 1294875 - DNA, 15 bp, Homo sapiens
caaccctaattctgt

SEQ ID NO: 1294876 - DNA, 15 bp, Homo sapiens
tcaaccctaattctg

SEQ ID NO: 1294877 - DNA, 15 bp, Homo sapiens
gtcaaccctaattct

SEQ ID NO: 1294878 - DNA, 15 bp, Homo sapiens
agtcaaccctaattc

SEQ ID NO: 1294879 - DNA, 15 bp, Homo sapiens
gagtcaaccctaatt

SEQ ID NO: 1294880 - DNA, 15 bp, Homo sapiens
tgagtcaaccctaat

SEQ ID NO: 1294881 - DNA, 15 bp, Homo sapiens
ctgagtcaaccctaa

SEQ ID NO: 1294882 - DNA, 15 bp, Homo sapiens
cctgagtcaacccta

SEQ ID NO: 1294883 - DNA, 15 bp, Homo sapiens
ccctgagtcaaccct

SEQ ID NO: 1294884 - DNA, 15 bp, Homo sapiens
accctgagtcaaccc

SEQ ID NO: 1294885 - DNA, 15 bp, Homo sapiens
caccctgagtcaacc

SEQ ID NO: 1294886 - DNA, 15 bp, Homo sapiens
tcaccctgagtcaac

SEQ ID NO: 1294887 - DNA, 15 bp, Homo sapiens
ttcaccctgagtcaa

SEQ ID NO: 1294888 - DNA, 15 bp, Homo sapiens
cttcaccctgagtca

SEQ ID NO: 1294889 - DNA, 15 bp, Homo sapiens
gcttcaccctgagtc

SEQ ID NO: 1294890 - DNA, 15 bp, Homo sapiens
agcttcaccctgagt

SEQ ID NO: 1294891 - DNA, 15 bp, Homo sapiens
aagcttcaccctgag

SEQ ID NO: 1294892 - DNA, 15 bp, Homo sapiens
caagcttcaccctga

SEQ ID NO: 1294893 - DNA, 15 bp, Homo sapiens
tcaagcttcaccctg

SEQ ID NO: 1294894 - DNA, 15 bp, Homo sapiens
atcaagcttcaccct

SEQ ID NO: 1294895 - DNA, 15 bp, Homo sapiens
gatcaagcttcaccc

SEQ ID NO: 1294896 - DNA, 15 bp, Homo sapiens
ggatcaagcttcacc

SEQ ID NO: 1294897 - DNA, 15 bp, Homo sapiens
tggatcaagcttcac

SEQ ID NO: 1294898 - DNA, 15 bp, Homo sapiens
gtggatcaagcttca

SEQ ID NO: 1294899 - DNA, 15 bp, Homo sapiens
agtggatcaagcttc

SEQ ID NO: 1294900 - DNA, 15 bp, Homo sapiens
cagtggatcaagctt

SEQ ID NO: 1294901 - DNA, 15 bp, Homo sapiens
ccagtggatcaagct

SEQ ID NO: 1294902 - DNA, 15 bp, Homo sapiens
gccagtggatcaagc

SEQ ID NO: 1294903 - DNA, 15 bp, Homo sapiens
agccagtggatcaag

SEQ ID NO: 1294904 - DNA, 15 bp, Homo sapiens
gagccagtggatcaa

SEQ ID NO: 1294905 - DNA, 15 bp, Homo sapiens
tgagccagtggatca

SEQ ID NO: 1294906 - DNA, 15 bp, Homo sapiens
ttgagccagtggatc

SEQ ID NO: 1294907 - DNA, 15 bp, Homo sapiens
gttgagccagtggat

SEQ ID NO: 1294908 - DNA, 15 bp, Homo sapiens
tgttgagccagtgga

SEQ ID NO: 1294909 - DNA, 15 bp, Homo sapiens
ctgttgagccagtgg

SEQ ID NO: 1294910 - DNA, 15 bp, Homo sapiens
actgttgagccagtg

SEQ ID NO: 1294911 - DNA, 15 bp, Homo sapiens
cactgttgagccagt

SEQ ID NO: 1294912 - DNA, 15 bp, Homo sapiens
acactgttgagccag

SEQ ID NO: 1294913 - DNA, 15 bp, Homo sapiens
gacactgttgagcca

SEQ ID NO: 1294914 - DNA, 15 bp, Homo sapiens
tgacactgttgagcc

SEQ ID NO: 1294915 - DNA, 15 bp, Homo sapiens
gtgacactgttgagc

SEQ ID NO: 1294916 - DNA, 15 bp, Homo sapiens
ggtgacactgttgag

SEQ ID NO: 1294917 - DNA, 15 bp, Homo sapiens
gggtgacactgttga

SEQ ID NO: 1294918 - DNA, 15 bp, Homo sapiens
ggggtgacactgttg

SEQ ID NO: 1294919 - DNA, 15 bp, Homo sapiens
gggggtgacactgtt

SEQ ID NO: 1294920 - DNA, 15 bp, Homo sapiens
tgggggtgacactgt

SEQ ID NO: 1294921 - DNA, 15 bp, Homo sapiens
ctgggggtgacactg

SEQ ID NO: 1294922 - DNA, 15 bp, Homo sapiens
tctgggggtgacact

SEQ ID NO: 1294923 - DNA, 15 bp, Homo sapiens
ctctgggggtgacac

SEQ ID NO: 1294924 - DNA, 15 bp, Homo sapiens
gctctgggggtgaca

SEQ ID NO: 1294925 - DNA, 15 bp, Homo sapiens
agctctgggggtgac

SEQ ID NO: 1294926 - DNA, 15 bp, Homo sapiens
gagctctgggggtga

SEQ ID NO: 1294927 - DNA, 15 bp, Homo sapiens
ggagctctgggggtg

SEQ ID NO: 1294928 - DNA, 15 bp, Homo sapiens
gggagctctgggggt

SEQ ID NO: 1294929 - DNA, 15 bp, Homo sapiens
tgggagctctggggg

SEQ ID NO: 1294930 - DNA, 15 bp, Homo sapiens
atgggagctctgggg

SEQ ID NO: 1294931 - DNA, 15 bp, Homo sapiens
gatgggagctctggg

SEQ ID NO: 1294932 - DNA, 15 bp, Homo sapiens
agatgggagctctgg

SEQ ID NO: 1294933 - DNA, 15 bp, Homo sapiens
gagatgggagctctg

SEQ ID NO: 1294934 - DNA, 15 bp, Homo sapiens
ggagatgggagctct

SEQ ID NO: 1294935 - DNA, 15 bp, Homo sapiens
cggagatgggagctc

SEQ ID NO: 1294936 - DNA, 15 bp, Homo sapiens
acggagatgggagct

SEQ ID NO: 1294937 - DNA, 15 bp, Homo sapiens
cacggagatgggagc

SEQ ID NO: 1294938 - DNA, 15 bp, Homo sapiens
ccacggagatgggag

SEQ ID NO: 1294939 - DNA, 15 bp, Homo sapiens
cccacggagatggga

SEQ ID NO: 1294940 - DNA, 15 bp, Homo sapiens
gcccacggagatggg

SEQ ID NO: 1294941 - DNA, 15 bp, Homo sapiens
gtgcccacggagatg

SEQ ID NO: 1294942 - DNA, 15 bp, Homo sapiens
agtgcccacggagat

SEQ ID NO: 1294943 - DNA, 15 bp, Homo sapiens
gagtgcccacggaga

SEQ ID NO: 1294944 - DNA, 15 bp, Homo sapiens
tgagtgcccacggag

SEQ ID NO: 1294945 - DNA, 15 bp, Homo sapiens
gtgagtgcccacgga

SEQ ID NO: 1294946 - DNA, 15 bp, Homo sapiens
ggtgagtgcccacgg

SEQ ID NO: 1294947 - DNA, 15 bp, Homo sapiens
gggtgagtgcccacg

SEQ ID NO: 1294948 - DNA, 15 bp, Homo sapiens
agggtgagtgcccac

SEQ ID NO: 1294949 - DNA, 15 bp, Homo sapiens
cagggtgagtgccca

SEQ ID NO: 1294950 - DNA, 15 bp, Homo sapiens
acagggtgagtgccc

SEQ ID NO: 1294951 - DNA, 15 bp, Homo sapiens
cacagggtgagtgcc

SEQ ID NO: 1294952 - DNA, 15 bp, Homo sapiens
ccacagggtgagtgc

SEQ ID NO: 1294953 - DNA, 15 bp, Homo sapiens
cccacagggtgagtg

SEQ ID NO: 1294954 - DNA, 15 bp, Homo sapiens
acccacagggtgagt

SEQ ID NO: 1294955 - DNA, 15 bp, Homo sapiens
aacccacagggtgag

SEQ ID NO: 1294956 - DNA, 15 bp, Homo sapiens
taacccacagggtga

SEQ ID NO: 1294957 - DNA, 15 bp, Homo sapiens
ttaacccacagggtg

SEQ ID NO: 1294958 - DNA, 15 bp, Homo sapiens
gttaacccacagggt

SEQ ID NO: 1294959 - DNA, 15 bp, Homo sapiens
agttaacccacaggg

SEQ ID NO: 1294960 - DNA, 15 bp, Homo sapiens
cagttaacccacagg

SEQ ID NO: 1294961 - DNA, 15 bp, Homo sapiens
ccagttaacccacag

SEQ ID NO: 1294962 - DNA, 15 bp, Homo sapiens
cccagttaacccaca

SEQ ID NO: 1294963 - DNA, 15 bp, Homo sapiens
acccagttaacccac

SEQ ID NO: 1294964 - DNA, 15 bp, Homo sapiens
gacccagttaaccca

SEQ ID NO: 1294965 - DNA, 15 bp, Homo sapiens
agacccagttaaccc

SEQ ID NO: 1294966 - DNA, 15 bp, Homo sapiens
aagacccagttaacc

SEQ ID NO: 1294967 - DNA, 15 bp, Homo sapiens
aaagacccagttaac

SEQ ID NO: 1294968 - DNA, 15 bp, Homo sapiens
caaagacccagttaa

SEQ ID NO: 1294969 - DNA, 15 bp, Homo sapiens
ccaaagacccagtta

SEQ ID NO: 1294970 - DNA, 15 bp, Homo sapiens
cccaaagacccagtt

SEQ ID NO: 1294971 - DNA, 15 bp, Homo sapiens
ccccaaagacccagt

SEQ ID NO: 1294972 - DNA, 15 bp, Homo sapiens
gccccaaagacccag

SEQ ID NO: 1294973 - DNA, 15 bp, Homo sapiens
cgccccaaagaccca

SEQ ID NO: 1294974 - DNA, 15 bp, Homo sapiens
gcgccccaaagaccc

SEQ ID NO: 1294975 - DNA, 15 bp, Homo sapiens
ggcgccccaaagacc

SEQ ID NO: 1294976 - DNA, 15 bp, Homo sapiens
tggcgccccaaagac

SEQ ID NO: 1294977 - DNA, 15 bp, Homo sapiens
atggcgccccaaaga

SEQ ID NO: 1294978 - DNA, 15 bp, Homo sapiens
aatggcgccccaaag

SEQ ID NO: 1294979 - DNA, 15 bp, Homo sapiens
aaatggcgccccaaa

SEQ ID NO: 1294980 - DNA, 15 bp, Homo sapiens
gaaatggcgccccaa

SEQ ID NO: 1294981 - DNA, 15 bp, Homo sapiens
ggaaatggcgcccca

SEQ ID NO: 1294982 - DNA, 15 bp, Homo sapiens
aggaaatggcgcccc

SEQ ID NO: 1294983 - DNA, 15 bp, Homo sapiens
caggaaatggcgccc

SEQ ID NO: 1294984 - DNA, 15 bp, Homo sapiens
ccaggaaatggcgcc

SEQ ID NO: 1294985 - DNA, 15 bp, Homo sapiens
tccaggaaatggcgc

SEQ ID NO: 1294986 - DNA, 15 bp, Homo sapiens
gtccaggaaatggcg

SEQ ID NO: 1294987 - DNA, 15 bp, Homo sapiens
tgtccaggaaatggc

SEQ ID NO: 1294988 - DNA, 15 bp, Homo sapiens
atgtccaggaaatgg

SEQ ID NO: 1294989 - DNA, 15 bp, Homo sapiens
catgtccaggaaatg

SEQ ID NO: 1294990 - DNA, 15 bp, Homo sapiens
gcatgtccaggaaat

SEQ ID NO: 1294991 - DNA, 15 bp, Homo sapiens
ggcatgtccaggaaa

SEQ ID NO: 1294992 - DNA, 15 bp, Homo sapiens
aggcatgtccaggaa

SEQ ID NO: 1294993 - DNA, 15 bp, Homo sapiens
gaggcatgtccagga

SEQ ID NO: 1294994 - DNA, 15 bp, Homo sapiens
tgaggcatgtccagg

SEQ ID NO: 1294995 - DNA, 15 bp, Homo sapiens
ttgaggcatgtccag

SEQ ID NO: 1294996 - DNA, 15 bp, Homo sapiens
cttgaggcatgtcca

SEQ ID NO: 1294997 - DNA, 15 bp, Homo sapiens
tcttgaggcatgtcc

SEQ ID NO: 1294998 - DNA, 15 bp, Homo sapiens
gtcttgaggcatgtc

SEQ ID NO: 1294999 - DNA, 15 bp, Homo sapiens
agtcttgaggcatgt

SEQ ID NO: 1295000 - DNA, 15 bp, Homo sapiens
aagtcttgaggcatg

SEQ ID NO: 1295001 - DNA, 15 bp, Homo sapiens
gaagtcttgaggcat

SEQ ID NO: 1295002 - DNA, 15 bp, Homo sapiens
ggaagtcttgaggca

SEQ ID NO: 1295003 - DNA, 15 bp, Homo sapiens
gggaagtcttgaggc

SEQ ID NO: 1295004 - DNA, 15 bp, Homo sapiens
agggaagtcttgagg

SEQ ID NO: 1295005 - DNA, 15 bp, Homo sapiens
cagggaagtcttgag

SEQ ID NO: 1295006 - DNA, 15 bp, Homo sapiens
tcagggaagtcttga

SEQ ID NO: 1295007 - DNA, 15 bp, Homo sapiens
ttcagggaagtcttg

SEQ ID NO: 1295008 - DNA, 15 bp, Homo sapiens
attcagggaagtctt

SEQ ID NO: 1295009 - DNA, 15 bp, Homo sapiens
cattcagggaagtct

SEQ ID NO: 1295010 - DNA, 15 bp, Homo sapiens
tcattcagggaagtc

SEQ ID NO: 1295011 - DNA, 15 bp, Homo sapiens
ctcattcagggaagt

SEQ ID NO: 1295012 - DNA, 15 bp, Homo sapiens
actcattcagggaag

SEQ ID NO: 1295013 - DNA, 15 bp, Homo sapiens
cactcattcagggaa

SEQ ID NO: 1295014 - DNA, 15 bp, Homo sapiens
ccactcattcaggga

SEQ ID NO: 1295015 - DNA, 15 bp, Homo sapiens
accactcattcaggg

SEQ ID NO: 1295016 - DNA, 15 bp, Homo sapiens
aaccactcattcagg

SEQ ID NO: 1295017 - DNA, 15 bp, Homo sapiens
gaaccactcattcag

SEQ ID NO: 1295018 - DNA, 15 bp, Homo sapiens
tgaaccactcattca

SEQ ID NO: 1295019 - DNA, 15 bp, Homo sapiens
atgaaccactcattc

SEQ ID NO: 1295020 - DNA, 15 bp, Homo sapiens
gatgaaccactcatt

SEQ ID NO: 1295021 - DNA, 15 bp, Homo sapiens
agatgaaccactcat

SEQ ID NO: 1295022 - DNA, 15 bp, Homo sapiens
cagatgaaccactca

SEQ ID NO: 1295023 - DNA, 15 bp, Homo sapiens
ccagatgaaccactc

SEQ ID NO: 1295024 - DNA, 15 bp, Homo sapiens
accagatgaaccact

SEQ ID NO: 1295025 - DNA, 15 bp, Homo sapiens
taccagatgaaccac

SEQ ID NO: 1295026 - DNA, 15 bp, Homo sapiens
ttaccagatgaacca

SEQ ID NO: 1295027 - DNA, 15 bp, Homo sapiens
attaccagatgaacc

SEQ ID NO: 1295028 - DNA, 15 bp, Homo sapiens
cattaccagatgaac

SEQ ID NO: 1295029 - DNA, 15 bp, Homo sapiens
tcattaccagatgaa

SEQ ID NO: 1295030 - DNA, 15 bp, Homo sapiens
ttcattaccagatga

SEQ ID NO: 1295031 - DNA, 15 bp, Homo sapiens
attcattaccagatg

SEQ ID NO: 1295032 - DNA, 15 bp, Homo sapiens
cattcattaccagat

SEQ ID NO: 1295033 - DNA, 15 bp, Homo sapiens
tcattcattaccaga

SEQ ID NO: 1295034 - DNA, 15 bp, Homo sapiens
ctcattcattaccag

SEQ ID NO: 1295035 - DNA, 15 bp, Homo sapiens
cctcattcattacca

SEQ ID NO: 1295036 - DNA, 15 bp, Homo sapiens
gcctcattcattacc

SEQ ID NO: 1295037 - DNA, 15 bp, Homo sapiens
ggcctcattcattac

SEQ ID NO: 1295038 - DNA, 15 bp, Homo sapiens
tggcctcattcatta

SEQ ID NO: 1295039 - DNA, 15 bp, Homo sapiens
gtggcctcattcatt

SEQ ID NO: 1295040 - DNA, 15 bp, Homo sapiens
tgtggcctcattcat

SEQ ID NO: 1295041 - DNA, 15 bp, Homo sapiens
gtgtggcctcattca

SEQ ID NO: 1295042 - DNA, 15 bp, Homo sapiens
tgtgtggcctcattc

SEQ ID NO: 1295043 - DNA, 15 bp, Homo sapiens
ctgtgtggcctcatt

SEQ ID NO: 1295044 - DNA, 15 bp, Homo sapiens
cctgtgtggcctcat

SEQ ID NO: 1295045 - DNA, 15 bp, Homo sapiens
gcctgtgtggcctca

SEQ ID NO: 1295046 - DNA, 15 bp, Homo sapiens
agcctgtgtggcctc

SEQ ID NO: 1295047 - DNA, 15 bp, Homo sapiens
gagcctgtgtggcct

SEQ ID NO: 1295048 - DNA, 15 bp, Homo sapiens
ggagcctgtgtggcc

SEQ ID NO: 1295049 - DNA, 15 bp, Homo sapiens
gggagcctgtgtggc

SEQ ID NO: 1295050 - DNA, 15 bp, Homo sapiens
agggagcctgtgtgg

SEQ ID NO: 1295051 - DNA, 15 bp, Homo sapiens
aagggagcctgtgtg

SEQ ID NO: 1295052 - DNA, 15 bp, Homo sapiens
taagggagcctgtgt

SEQ ID NO: 1295053 - DNA, 15 bp, Homo sapiens
ataagggagcctgtg

SEQ ID NO: 1295054 - DNA, 15 bp, Homo sapiens
tataagggagcctgt

SEQ ID NO: 1295055 - DNA, 15 bp, Homo sapiens
gtataagggagcctg

SEQ ID NO: 1295056 - DNA, 15 bp, Homo sapiens
agtataagggagcct

SEQ ID NO: 1295057 - DNA, 15 bp, Homo sapiens
aagtataagggagcc

SEQ ID NO: 1295058 - DNA, 15 bp, Homo sapiens
caagtataagggagc

SEQ ID NO: 1295059 - DNA, 15 bp, Homo sapiens
acaagtataagggag

SEQ ID NO: 1295060 - DNA, 15 bp, Homo sapiens
gacaagtataaggga

SEQ ID NO: 1295061 - DNA, 15 bp, Homo sapiens
ggacaagtataaggg

SEQ ID NO: 1295062 - DNA, 15 bp, Homo sapiens
gggacaagtataagg

SEQ ID NO: 1295063 - DNA, 15 bp, Homo sapiens
agggacaagtataag

SEQ ID NO: 1295064 - DNA, 15 bp, Homo sapiens
cagggacaagtataa

SEQ ID NO: 1295065 - DNA, 15 bp, Homo sapiens
ccagggacaagtata

SEQ ID NO: 1295066 - DNA, 15 bp, Homo sapiens
gccagggacaagtat

SEQ ID NO: 1295067 - DNA, 15 bp, Homo sapiens
cgccagggacaagta

SEQ ID NO: 1295068 - DNA, 15 bp, Homo sapiens
acgccagggacaagt

SEQ ID NO: 1295069 - DNA, 15 bp, Homo sapiens
cacgccagggacaag

SEQ ID NO: 1295070 - DNA, 15 bp, Homo sapiens
ccacgccagggacaa

SEQ ID NO: 1295071 - DNA, 15 bp, Homo sapiens
cccacgccagggaca

SEQ ID NO: 1295072 - DNA, 15 bp, Homo sapiens
tcccacgccagggac

SEQ ID NO: 1295073 - DNA, 15 bp, Homo sapiens
ctcccacgccaggga

SEQ ID NO: 1295074 - DNA, 15 bp, Homo sapiens
gctcccacgccaggg

SEQ ID NO: 1295075 - DNA, 15 bp, Homo sapiens
agctcccacgccagg

SEQ ID NO: 1295076 - DNA, 15 bp, Homo sapiens
cagctcccacgccag

SEQ ID NO: 1295077 - DNA, 15 bp, Homo sapiens
gcagctcccacgcca

SEQ ID NO: 1295078 - DNA, 15 bp, Homo sapiens
ggcagctcccacgcc

SEQ ID NO: 1295079 - DNA, 15 bp, Homo sapiens
aggcagctcccacgc

SEQ ID NO: 1295080 - DNA, 15 bp, Homo sapiens
aaggcagctcccacg

SEQ ID NO: 1295081 - DNA, 15 bp, Homo sapiens
gaaggcagctcccac

SEQ ID NO: 1295082 - DNA, 15 bp, Homo sapiens
agaaggcagctccca

SEQ ID NO: 1295083 - DNA, 15 bp, Homo sapiens
tagaaggcagctccc

SEQ ID NO: 1295084 - DNA, 15 bp, Homo sapiens
ttagaaggcagctcc

SEQ ID NO: 1295085 - DNA, 15 bp, Homo sapiens
cttagaaggcagctc

SEQ ID NO: 1295086 - DNA, 15 bp, Homo sapiens
ccttagaaggcagct

SEQ ID NO: 1295087 - DNA, 15 bp, Homo sapiens
accttagaaggcagc

SEQ ID NO: 1295088 - DNA, 15 bp, Homo sapiens
aaccttagaaggcag

SEQ ID NO: 1295089 - DNA, 15 bp, Homo sapiens
aaaccttagaaggca

SEQ ID NO: 1295090 - DNA, 15 bp, Homo sapiens
gaaaccttagaaggc

SEQ ID NO: 1295091 - DNA, 15 bp, Homo sapiens
tgaaaccttagaagg

SEQ ID NO: 1295092 - DNA, 15 bp, Homo sapiens
atgaaaccttagaag

SEQ ID NO: 1295093 - DNA, 15 bp, Homo sapiens
tatgaaaccttagaa

SEQ ID NO: 1295094 - DNA, 15 bp, Homo sapiens
ttatgaaaccttaga

SEQ ID NO: 1295095 - DNA, 15 bp, Homo sapiens
attatgaaaccttag

SEQ ID NO: 1295096 - DNA, 15 bp, Homo sapiens
cattatgaaacctta

SEQ ID NO: 1295097 - DNA, 15 bp, Homo sapiens
tcattatgaaacctt

SEQ ID NO: 1295098 - DNA, 15 bp, Homo sapiens
ctcattatgaaacct

SEQ ID NO: 1295099 - DNA, 15 bp, Homo sapiens
tctcattatgaaacc

SEQ ID NO: 1295100 - DNA, 15 bp, Homo sapiens
ttctcattatgaaac

SEQ ID NO: 1295101 - DNA, 15 bp, Homo sapiens
gttctcattatgaaa

SEQ ID NO: 1295102 - DNA, 15 bp, Homo sapiens
tgttctcattatgaa

SEQ ID NO: 1295103 - DNA, 15 bp, Homo sapiens
atgttctcattatga

SEQ ID NO: 1295104 - DNA, 15 bp, Homo sapiens
catgttctcattatg

SEQ ID NO: 1295105 - DNA, 15 bp, Homo sapiens
gcatgttctcattat

SEQ ID NO: 1295106 - DNA, 15 bp, Homo sapiens
agcatgttctcatta

SEQ ID NO: 1295107 - DNA, 15 bp, Homo sapiens
aagcatgttctcatt

SEQ ID NO: 1295108 - DNA, 15 bp, Homo sapiens
aaagcatgttctcat

SEQ ID NO: 1295109 - DNA, 15 bp, Homo sapiens
aaaagcatgttctca

SEQ ID NO: 1295110 - DNA, 15 bp, Homo sapiens
aaaaagcatgttctc

SEQ ID NO: 1295111 - DNA, 15 bp, Homo sapiens
aaaaaagcatgttct

SEQ ID NO: 1295112 - DNA, 15 bp, Homo sapiens
taaaaaagcatgttc

SEQ ID NO: 1295113 - DNA, 15 bp, Homo sapiens
ctaaaaaagcatgtt

SEQ ID NO: 1295114 - DNA, 15 bp, Homo sapiens
cctaaaaaagcatgt

SEQ ID NO: 1295115 - DNA, 15 bp, Homo sapiens
ccctaaaaaagcatg

SEQ ID NO: 1295116 - DNA, 15 bp, Homo sapiens
cccctaaaaaagcat

SEQ ID NO: 1295117 - DNA, 15 bp, Homo sapiens
tcccctaaaaaagca

SEQ ID NO: 1295118 - DNA, 15 bp, Homo sapiens
ctcccctaaaaaagc

SEQ ID NO: 1295119 - DNA, 15 bp, Homo sapiens
gctcccctaaaaaag

SEQ ID NO: 1295120 - DNA, 15 bp, Homo sapiens
tgctcccctaaaaaa

SEQ ID NO: 1295121 - DNA, 15 bp, Homo sapiens
ctgctcccctaaaaa

SEQ ID NO: 1295122 - DNA, 15 bp, Homo sapiens
cctgctcccctaaaa

SEQ ID NO: 1295123 - DNA, 15 bp, Homo sapiens
acctgctcccctaaa

SEQ ID NO: 1295124 - DNA, 15 bp, Homo sapiens
cacctgctcccctaa

SEQ ID NO: 1295125 - DNA, 15 bp, Homo sapiens
acacctgctccccta

SEQ ID NO: 1295126 - DNA, 15 bp, Homo sapiens
cacacctgctcccct

SEQ ID NO: 1295127 - DNA, 15 bp, Homo sapiens
acacacctgctcccc

SEQ ID NO: 1295128 - DNA, 15 bp, Homo sapiens
cacacacctgctccc

SEQ ID NO: 1295129 - DNA, 15 bp, Homo sapiens
ccacacacctgctcc

SEQ ID NO: 1295130 - DNA, 15 bp, Homo sapiens
accacacacctgctc

SEQ ID NO: 1295131 - DNA, 15 bp, Homo sapiens
taccacacacctgct

SEQ ID NO: 1295132 - DNA, 15 bp, Homo sapiens
ctaccacacacctgc

SEQ ID NO: 1295133 - DNA, 15 bp, Homo sapiens
tctaccacacacctg

SEQ ID NO: 1295134 - DNA, 15 bp, Homo sapiens
gtctaccacacacct

SEQ ID NO: 1295135 - DNA, 15 bp, Homo sapiens
agtctaccacacacc

SEQ ID NO: 1295136 - DNA, 15 bp, Homo sapiens
gagtctaccacacac

SEQ ID NO: 1295137 - DNA, 15 bp, Homo sapiens
agagtctaccacaca

SEQ ID NO: 1295138 - DNA, 15 bp, Homo sapiens
cagagtctaccacac

SEQ ID NO: 1295139 - DNA, 15 bp, Homo sapiens
ccagagtctaccaca

SEQ ID NO: 1295140 - DNA, 15 bp, Homo sapiens
tccagagtctaccac

SEQ ID NO: 1295141 - DNA, 15 bp, Homo sapiens
gtccagagtctacca

SEQ ID NO: 1295142 - DNA, 15 bp, Homo sapiens
agtccagagtctacc

SEQ ID NO: 1295143 - DNA, 15 bp, Homo sapiens
gagtccagagtctac

SEQ ID NO: 1295144 - DNA, 15 bp, Homo sapiens
ggagtccagagtcta

SEQ ID NO: 1295145 - DNA, 15 bp, Homo sapiens
aggagtccagagtct

SEQ ID NO: 1295146 - DNA, 15 bp, Homo sapiens
taggagtccagagtc

SEQ ID NO: 1295147 - DNA, 15 bp, Homo sapiens
gtaggagtccagagt

SEQ ID NO: 1295148 - DNA, 15 bp, Homo sapiens
cgtaggagtccagag

SEQ ID NO: 1295149 - DNA, 15 bp, Homo sapiens
gcgtaggagtccaga

SEQ ID NO: 1295150 - DNA, 15 bp, Homo sapiens
agcgtaggagtccag

SEQ ID NO: 1295151 - DNA, 15 bp, Homo sapiens
cagcgtaggagtcca

SEQ ID NO: 1295152 - DNA, 15 bp, Homo sapiens
gcagcgtaggagtcc

SEQ ID NO: 1295153 - DNA, 15 bp, Homo sapiens
agcagcgtaggagtc

SEQ ID NO: 1295154 - DNA, 15 bp, Homo sapiens
cagcagcgtaggagt

SEQ ID NO: 1295155 - DNA, 15 bp, Homo sapiens
acagcagcgtaggag

SEQ ID NO: 1295156 - DNA, 15 bp, Homo sapiens
gacagcagcgtagga

SEQ ID NO: 1295157 - DNA, 15 bp, Homo sapiens
agacagcagcgtagg

SEQ ID NO: 1295158 - DNA, 15 bp, Homo sapiens
aagacagcagcgtag

SEQ ID NO: 1295159 - DNA, 15 bp, Homo sapiens
gaagacagcagcgta

SEQ ID NO: 1295160 - DNA, 15 bp, Homo sapiens
agaagacagcagcgt

SEQ ID NO: 1295161 - DNA, 15 bp, Homo sapiens
cagaagacagcagcg

SEQ ID NO: 1295162 - DNA, 15 bp, Homo sapiens
tcagaagacagcagc

SEQ ID NO: 1295163 - DNA, 15 bp, Homo sapiens
atcagaagacagcag

SEQ ID NO: 1295164 - DNA, 15 bp, Homo sapiens
aatcagaagacagca

SEQ ID NO: 1295165 - DNA, 15 bp, Homo sapiens
taatcagaagacagc

SEQ ID NO: 1295166 - DNA, 15 bp, Homo sapiens
gaataatcagaagac

SEQ ID NO: 1295167 - DNA, 15 bp, Homo sapiens
ggaataatcagaaga

SEQ ID NO: 1295168 - DNA, 15 bp, Homo sapiens
gggaataatcagaag

SEQ ID NO: 1295169 - DNA, 15 bp, Homo sapiens
tgggaataatcagaa

SEQ ID NO: 1295170 - DNA, 15 bp, Homo sapiens
ctgggaataatcaga

SEQ ID NO: 1295171 - DNA, 15 bp, Homo sapiens
tctgggaataatcag

SEQ ID NO: 1295172 - DNA, 15 bp, Homo sapiens
ctctgggaataatca

SEQ ID NO: 1295173 - DNA, 15 bp, Homo sapiens
tctctgggaataatc

SEQ ID NO: 1295174 - DNA, 15 bp, Homo sapiens
ttctctgggaataat

SEQ ID NO: 1295175 - DNA, 15 bp, Homo sapiens
gttctctgggaataa

SEQ ID NO: 1295176 - DNA, 15 bp, Homo sapiens
agttctctgggaata

SEQ ID NO: 1295177 - DNA, 15 bp, Homo sapiens
cagttctctgggaat

SEQ ID NO: 1295178 - DNA, 15 bp, Homo sapiens
gcagttctctgggaa

SEQ ID NO: 1295179 - DNA, 15 bp, Homo sapiens
tgcagttctctggga

SEQ ID NO: 1295180 - DNA, 15 bp, Homo sapiens
gtgcagttctctggg

SEQ ID NO: 1295181 - DNA, 15 bp, Homo sapiens
ggtgcagttctctgg

SEQ ID NO: 1295182 - DNA, 15 bp, Homo sapiens
aggtgcagttctctg

SEQ ID NO: 1295183 - DNA, 15 bp, Homo sapiens
gaggtgcagttctct

SEQ ID NO: 1295184 - DNA, 15 bp, Homo sapiens
agaggtgcagttctc

SEQ ID NO: 1295185 - DNA, 15 bp, Homo sapiens
gagaggtgcagttct

SEQ ID NO: 1295186 - DNA, 15 bp, Homo sapiens
ggagaggtgcagttc

SEQ ID NO: 1295187 - DNA, 15 bp, Homo sapiens
cggagaggtgcagtt

SEQ ID NO: 1295188 - DNA, 15 bp, Homo sapiens
gcggagaggtgcagt

SEQ ID NO: 1295189 - DNA, 15 bp, Homo sapiens
agcggagaggtgcag

SEQ ID NO: 1295190 - DNA, 15 bp, Homo sapiens
gagcggagaggtgca

SEQ ID NO: 1295191 - DNA, 15 bp, Homo sapiens
agagcggagaggtgc

SEQ ID NO: 1295192 - DNA, 15 bp, Homo sapiens
cagagcggagaggtg

SEQ ID NO: 1295193 - DNA, 15 bp, Homo sapiens
ccagagcggagaggt

SEQ ID NO: 1295194 - DNA, 15 bp, Homo sapiens
accagagcggagagg

SEQ ID NO: 1295195 - DNA, 15 bp, Homo sapiens
aaccagagcggagag

SEQ ID NO: 1295196 - DNA, 15 bp, Homo sapiens
caaccagagcggaga

SEQ ID NO: 1295197 - DNA, 15 bp, Homo sapiens
ccaaccagagcggag

SEQ ID NO: 1295198 - DNA, 15 bp, Homo sapiens
cccaaccagagcgga

SEQ ID NO: 1295199 - DNA, 15 bp, Homo sapiens
gcccaaccagagcgg

SEQ ID NO: 1295200 - DNA, 15 bp, Homo sapiens
agcccaaccagagcg

SEQ ID NO: 1295201 - DNA, 15 bp, Homo sapiens
cagcccaaccagagc

SEQ ID NO: 1295202 - DNA, 15 bp, Homo sapiens
tcagcccaaccagag

SEQ ID NO: 1295203 - DNA, 15 bp, Homo sapiens
ctcagcccaaccaga

SEQ ID NO: 1295204 - DNA, 15 bp, Homo sapiens
cctcagcccaaccag

SEQ ID NO: 1295205 - DNA, 15 bp, Homo sapiens
gcctcagcccaacca

SEQ ID NO: 1295206 - DNA, 15 bp, Homo sapiens
agcctcagcccaacc

SEQ ID NO: 1295207 - DNA, 15 bp, Homo sapiens
cagcctcagcccaac

SEQ ID NO: 1295208 - DNA, 15 bp, Homo sapiens
acagcctcagcccaa

SEQ ID NO: 1295209 - DNA, 15 bp, Homo sapiens
aacagcctcagccca

SEQ ID NO: 1295210 - DNA, 15 bp, Homo sapiens
aaacagcctcagccc

SEQ ID NO: 1295211 - DNA, 15 bp, Homo sapiens
aaaacagcctcagcc

SEQ ID NO: 1295212 - DNA, 15 bp, Homo sapiens
aaaaacagcctcagc

SEQ ID NO: 1295213 - DNA, 15 bp, Homo sapiens
caaaaacagcctcag

SEQ ID NO: 1295214 - DNA, 15 bp, Homo sapiens
acaaaaacagcctca

SEQ ID NO: 1295215 - DNA, 15 bp, Homo sapiens
gacaaaaacagcctc

SEQ ID NO: 1295216 - DNA, 15 bp, Homo sapiens
tgacaaaaacagcct

SEQ ID NO: 1295217 - DNA, 15 bp, Homo sapiens
gtgacaaaaacagcc

SEQ ID NO: 1295218 - DNA, 15 bp, Homo sapiens
ggtgacaaaaacagc

SEQ ID NO: 1295219 - DNA, 15 bp, Homo sapiens
gggtgacaaaaacag

SEQ ID NO: 1295220 - DNA, 15 bp, Homo sapiens
ggggtgacaaaaaca

SEQ ID NO: 1295221 - DNA, 15 bp, Homo sapiens
tggggtgacaaaaac

SEQ ID NO: 1295222 - DNA, 15 bp, Homo sapiens
gtggggtgacaaaaa

SEQ ID NO: 1295223 - DNA, 15 bp, Homo sapiens
tgtggggtgacaaaa

SEQ ID NO: 1295224 - DNA, 15 bp, Homo sapiens
ctgtggggtgacaaa

SEQ ID NO: 1295225 - DNA, 15 bp, Homo sapiens
cctgtggggtgacaa

SEQ ID NO: 1295226 - DNA, 15 bp, Homo sapiens
gcctgtggggtgaca

SEQ ID NO: 1295227 - DNA, 15 bp, Homo sapiens
ggcctgtggggtgac

SEQ ID NO: 1295228 - DNA, 15 bp, Homo sapiens
aggcctgtggggtga

SEQ ID NO: 1295229 - DNA, 15 bp, Homo sapiens
caggcctgtggggtg

SEQ ID NO: 1295230 - DNA, 15 bp, Homo sapiens
cacaggcctgtgggg

SEQ ID NO: 1295231 - DNA, 15 bp, Homo sapiens
acacaggcctgtggg

SEQ ID NO: 1295232 - DNA, 15 bp, Homo sapiens
aacacaggcctgtgg

SEQ ID NO: 1295233 - DNA, 15 bp, Homo sapiens
caacacaggcctgtg

SEQ ID NO: 1295234 - DNA, 15 bp, Homo sapiens
acaacacaggcctgt

SEQ ID NO: 1295235 - DNA, 15 bp, Homo sapiens
aacaacacaggcctg

SEQ ID NO: 1295236 - DNA, 15 bp, Homo sapiens
aaacaacacaggcct

SEQ ID NO: 1295237 - DNA, 15 bp, Homo sapiens
caaacaacacaggcc

SEQ ID NO: 1295238 - DNA, 15 bp, Homo sapiens
acaaacaacacaggc

SEQ ID NO: 1295239 - DNA, 15 bp, Homo sapiens
aacaaacaacacagg

SEQ ID NO: 1295240 - DNA, 15 bp, Homo sapiens
gaacaaacaacacag

SEQ ID NO: 1295241 - DNA, 15 bp, Homo sapiens
tgaacaaacaacaca

SEQ ID NO: 1295242 - DNA, 15 bp, Homo sapiens
atgaacaaacaacac

SEQ ID NO: 1295243 - DNA, 15 bp, Homo sapiens
tatgaacaaacaaca

SEQ ID NO: 1295244 - DNA, 15 bp, Homo sapiens
ttatgaacaaacaac

SEQ ID NO: 1295245 - DNA, 15 bp, Homo sapiens
tttatgaacaaacaa

SEQ ID NO: 1295246 - DNA, 15 bp, Homo sapiens
ctttatgaacaaaca

SEQ ID NO: 1295247 - DNA, 15 bp, Homo sapiens
gctttatgaacaaac

SEQ ID NO: 1295248 - DNA, 15 bp, Homo sapiens
tgctttatgaacaaa

SEQ ID NO: 1295249 - DNA, 15 bp, Homo sapiens
ctgctttatgaacaa

SEQ ID NO: 1295250 - DNA, 15 bp, Homo sapiens
tctgctttatgaaca

SEQ ID NO: 1295251 - DNA, 15 bp, Homo sapiens
ctctgctttatgaac

SEQ ID NO: 1295252 - DNA, 15 bp, Homo sapiens
tctctgctttatgaa

SEQ ID NO: 1295253 - DNA, 15 bp, Homo sapiens
ctctctgctttatga

SEQ ID NO: 1295254 - DNA, 15 bp, Homo sapiens
tctctctgctttatg

SEQ ID NO: 1295255 - DNA, 15 bp, Homo sapiens
gtctctctgctttat

SEQ ID NO: 1295256 - DNA, 15 bp, Homo sapiens
tgtctctctgcttta

SEQ ID NO: 1295257 - DNA, 15 bp, Homo sapiens
atgtctctctgcttt

SEQ ID NO: 1295258 - DNA, 15 bp, Homo sapiens
gatgtctctctgctt

SEQ ID NO: 1295259 - DNA, 15 bp, Homo sapiens
agatgtctctctgct

SEQ ID NO: 1295260 - DNA, 15 bp, Homo sapiens
cagatgtctctctgc

SEQ ID NO: 1295261 - DNA, 15 bp, Homo sapiens
acagatgtctctctg

SEQ ID NO: 1295262 - DNA, 15 bp, Homo sapiens
gacagatgtctctct

SEQ ID NO: 1295263 - DNA, 15 bp, Homo sapiens
tgacagatgtctctc

SEQ ID NO: 1295264 - DNA, 15 bp, Homo sapiens
atgacagatgtctct

SEQ ID NO: 1295265 - DNA, 15 bp, Homo sapiens
gatgacagatgtctc

SEQ ID NO: 1295266 - DNA, 15 bp, Homo sapiens
ggatgacagatgtct

SEQ ID NO: 1295267 - DNA, 15 bp, Homo sapiens
aggatgacagatgtc

SEQ ID NO: 1295268 - DNA, 15 bp, Homo sapiens
gaggatgacagatgt

SEQ ID NO: 1295269 - DNA, 15 bp, Homo sapiens
tgaggatgacagatg

SEQ ID NO: 1295270 - DNA, 15 bp, Homo sapiens
gtgaggatgacagat

SEQ ID NO: 1295271 - DNA, 15 bp, Homo sapiens
agtgaggatgacaga

SEQ ID NO: 1295272 - DNA, 15 bp, Homo sapiens
cagtgaggatgacag

SEQ ID NO: 1295273 - DNA, 15 bp, Homo sapiens
tcagtgaggatgaca

SEQ ID NO: 1295274 - DNA, 15 bp, Homo sapiens
ctcagtgaggatgac

SEQ ID NO: 1295275 - DNA, 15 bp, Homo sapiens
gctcagtgaggatga

SEQ ID NO: 1295276 - DNA, 15 bp, Homo sapiens
ggctcagtgaggatg

SEQ ID NO: 1295277 - DNA, 15 bp, Homo sapiens
gggctcagtgaggat

SEQ ID NO: 1295278 - DNA, 15 bp, Homo sapiens
cgggctcagtgagga

SEQ ID NO: 1295279 - DNA, 15 bp, Homo sapiens
tcgggctcagtgagg

SEQ ID NO: 1295280 - DNA, 15 bp, Homo sapiens
gtcgggctcagtgag

SEQ ID NO: 1295281 - DNA, 15 bp, Homo sapiens
tgtcgggctcagtga

SEQ ID NO: 1295282 - DNA, 15 bp, Homo sapiens
ctgtcgggctcagtg

SEQ ID NO: 1295283 - DNA, 15 bp, Homo sapiens
tctgtcgggctcagt

SEQ ID NO: 1295284 - DNA, 15 bp, Homo sapiens
atctgtcgggctcag

SEQ ID NO: 1295285 - DNA, 15 bp, Homo sapiens
catctgtcgggctca

SEQ ID NO: 1295286 - DNA, 15 bp, Homo sapiens
gcatctgtcgggctc

SEQ ID NO: 1295287 - DNA, 15 bp, Homo sapiens
ggcatctgtcgggct

SEQ ID NO: 1295288 - DNA, 15 bp, Homo sapiens
tggcatctgtcgggc

SEQ ID NO: 1295289 - DNA, 15 bp, Homo sapiens
gtggcatctgtcggg

SEQ ID NO: 1295290 - DNA, 15 bp, Homo sapiens
tgtggcatctgtcgg

SEQ ID NO: 1295291 - DNA, 15 bp, Homo sapiens
atgtggcatctgtcg

SEQ ID NO: 1295292 - DNA, 15 bp, Homo sapiens
aatgtggcatctgtc

SEQ ID NO: 1295293 - DNA, 15 bp, Homo sapiens
gaatgtggcatctgt

SEQ ID NO: 1295294 - DNA, 15 bp, Homo sapiens
tgaatgtggcatctg

SEQ ID NO: 1295295 - DNA, 15 bp, Homo sapiens
ttgaatgtggcatct

SEQ ID NO: 1295296 - DNA, 15 bp, Homo sapiens
tttgaatgtggcatc

SEQ ID NO: 1295297 - DNA, 15 bp, Homo sapiens
ctttgaatgtggcat

SEQ ID NO: 1295298 - DNA, 15 bp, Homo sapiens
tctttgaatgtggca

SEQ ID NO: 1295299 - DNA, 15 bp, Homo sapiens
gtctttgaatgtggc

SEQ ID NO: 1295300 - DNA, 15 bp, Homo sapiens
ggtctttgaatgtgg

SEQ ID NO: 1295301 - DNA, 15 bp, Homo sapiens
gggtctttgaatgtg

SEQ ID NO: 1295302 - DNA, 15 bp, Homo sapiens
tgggtctttgaatgt

SEQ ID NO: 1295303 - DNA, 15 bp, Homo sapiens
ctgggtctttgaatg

SEQ ID NO: 1295304 - DNA, 15 bp, Homo sapiens
gctgggtctttgaat

SEQ ID NO: 1295305 - DNA, 15 bp, Homo sapiens
tgctgggtctttgaa

SEQ ID NO: 1295306 - DNA, 15 bp, Homo sapiens
gtgctgggtctttga

SEQ ID NO: 1295307 - DNA, 15 bp, Homo sapiens
tgtgctgggtctttg

SEQ ID NO: 1295308 - DNA, 15 bp, Homo sapiens
atgtgctgggtcttt

SEQ ID NO: 1295309 - DNA, 15 bp, Homo sapiens
catgtgctgggtctt

SEQ ID NO: 1295310 - DNA, 15 bp, Homo sapiens
gcatgtgctgggtct

SEQ ID NO: 1295311 - DNA, 15 bp, Homo sapiens
tgcatgtgctgggtc

SEQ ID NO: 1295312 - DNA, 15 bp, Homo sapiens
ctgcatgtgctgggt

SEQ ID NO: 1295313 - DNA, 15 bp, Homo sapiens
gctgcatgtgctggg

SEQ ID NO: 1295314 - DNA, 15 bp, Homo sapiens
tgctgcatgtgctgg

SEQ ID NO: 1295315 - DNA, 15 bp, Homo sapiens
ctgctgcatgtgctg

SEQ ID NO: 1295316 - DNA, 15 bp, Homo sapiens
gctgctgcatgtgct

SEQ ID NO: 1295317 - DNA, 15 bp, Homo sapiens
tgctgctgcatgtgc

SEQ ID NO: 1295318 - DNA, 15 bp, Homo sapiens
ctgctgctgcatgtg

SEQ ID NO: 1295319 - DNA, 15 bp, Homo sapiens
gctgctgctgcatgt

SEQ ID NO: 1295320 - DNA, 15 bp, Homo sapiens
cgctgctgctgcatg

SEQ ID NO: 1295321 - DNA, 15 bp, Homo sapiens
ccgctgctgctgcat

SEQ ID NO: 1295322 - DNA, 15 bp, Homo sapiens
accgctgctgctgca

SEQ ID NO: 1295323 - DNA, 15 bp, Homo sapiens
caccgctgctgctgc

SEQ ID NO: 1295324 - DNA, 15 bp, Homo sapiens
ccaccgctgctgctg

SEQ ID NO: 1295325 - DNA, 15 bp, Homo sapiens
gccaccgctgctgct

SEQ ID NO: 1295326 - DNA, 15 bp, Homo sapiens
tgccaccgctgctgc

SEQ ID NO: 1295327 - DNA, 15 bp, Homo sapiens
ctgccaccgctgctg

SEQ ID NO: 1295328 - DNA, 15 bp, Homo sapiens
gctgccaccgctgct

SEQ ID NO: 1295329 - DNA, 15 bp, Homo sapiens
tgctgccaccgctgc

SEQ ID NO: 1295330 - DNA, 15 bp, Homo sapiens
gtgctgccaccgctg

SEQ ID NO: 1295331 - DNA, 15 bp, Homo sapiens
agtgctgccaccgct

SEQ ID NO: 1295332 - DNA, 15 bp, Homo sapiens
cagtgctgccaccgc

SEQ ID NO: 1295333 - DNA, 15 bp, Homo sapiens
acagtgctgccaccg

SEQ ID NO: 1295334 - DNA, 15 bp, Homo sapiens
gacagtgctgccacc

SEQ ID NO: 1295335 - DNA, 15 bp, Homo sapiens
tgacagtgctgccac

SEQ ID NO: 1295336 - DNA, 15 bp, Homo sapiens
atgacagtgctgcca

SEQ ID NO: 1295337 - DNA, 15 bp, Homo sapiens
aatgacagtgctgcc

SEQ ID NO: 1295338 - DNA, 15 bp, Homo sapiens
caatgacagtgctgc

SEQ ID NO: 1295339 - DNA, 15 bp, Homo sapiens
gcaatgacagtgctg

SEQ ID NO: 1295340 - DNA, 15 bp, Homo sapiens
cgcaatgacagtgct

SEQ ID NO: 1295341 - DNA, 15 bp, Homo sapiens
ccgcaatgacagtgc

SEQ ID NO: 1295342 - DNA, 15 bp, Homo sapiens
gccgcaatgacagtg

SEQ ID NO: 1295343 - DNA, 15 bp, Homo sapiens
cgccgcaatgacagt

SEQ ID NO: 1295344 - DNA, 15 bp, Homo sapiens
gcgccgcaatgacag

SEQ ID NO: 1295345 - DNA, 15 bp, Homo sapiens
agcgccgcaatgaca

SEQ ID NO: 1295346 - DNA, 15 bp, Homo sapiens
gagcgccgcaatgac

SEQ ID NO: 1295347 - DNA, 15 bp, Homo sapiens
tgagcgccgcaatga

SEQ ID NO: 1295348 - DNA, 15 bp, Homo sapiens
gtgagcgccgcaatg

SEQ ID NO: 1295349 - DNA, 15 bp, Homo sapiens
tgtgagcgccgcaat

SEQ ID NO: 1295350 - DNA, 15 bp, Homo sapiens
gtgtgagcgccgcaa

SEQ ID NO: 1295351 - DNA, 15 bp, Homo sapiens
tgtgtgagcgccgca

SEQ ID NO: 1295352 - DNA, 15 bp, Homo sapiens
gtgtgtgagcgccgc

SEQ ID NO: 1295353 - DNA, 15 bp, Homo sapiens
tgtgtgtgagcgccg

SEQ ID NO: 1295354 - DNA, 15 bp, Homo sapiens
gtgtgtgtgagcgcc

SEQ ID NO: 1295355 - DNA, 15 bp, Homo sapiens
tgtgtgtgtgagcgc

SEQ ID NO: 1295356 - DNA, 15 bp, Homo sapiens
atgtgtgtgtgagcg

SEQ ID NO: 1295357 - DNA, 15 bp, Homo sapiens
tatgtgtgtgtgagc

SEQ ID NO: 1295358 - DNA, 15 bp, Homo sapiens
gtatgtgtgtgtgag

SEQ ID NO: 1295359 - DNA, 15 bp, Homo sapiens
ggtatgtgtgtgtga

SEQ ID NO: 1295360 - DNA, 15 bp, Homo sapiens
cggtatgtgtgtgtg

SEQ ID NO: 1295361 - DNA, 15 bp, Homo sapiens
tcggtatgtgtgtgt

SEQ ID NO: 1295362 - DNA, 15 bp, Homo sapiens
gtcggtatgtgtgtg

SEQ ID NO: 1295363 - DNA, 15 bp, Homo sapiens
tgtcggtatgtgtgt

SEQ ID NO: 1295364 - DNA, 15 bp, Homo sapiens
gtgtcggtatgtgtg

SEQ ID NO: 1295365 - DNA, 15 bp, Homo sapiens
tgtgtcggtatgtgt

SEQ ID NO: 1295366 - DNA, 15 bp, Homo sapiens
gtgtgtcggtatgtg

SEQ ID NO: 1295367 - DNA, 15 bp, Homo sapiens
agtgtgtcggtatgt

SEQ ID NO: 1295368 - DNA, 15 bp, Homo sapiens
gagtgtgtcggtatg

SEQ ID NO: 1295369 - DNA, 15 bp, Homo sapiens
cgagtgtgtcggtat

SEQ ID NO: 1295370 - DNA, 15 bp, Homo sapiens
acgagtgtgtcggta

SEQ ID NO: 1295371 - DNA, 15 bp, Homo sapiens
aacgagtgtgtcggt

SEQ ID NO: 1295372 - DNA, 15 bp, Homo sapiens
aaacgagtgtgtcgg

SEQ ID NO: 1295373 - DNA, 15 bp, Homo sapiens
gaaacgagtgtgtcg

SEQ ID NO: 1295374 - DNA, 15 bp, Homo sapiens
agaaacgagtgtgtc

SEQ ID NO: 1295375 - DNA, 15 bp, Homo sapiens
aagaaacgagtgtgt

SEQ ID NO: 1295376 - DNA, 15 bp, Homo sapiens
gaagaaacgagtgtg

SEQ ID NO: 1295377 - DNA, 15 bp, Homo sapiens
agaagaaacgagtgt

SEQ ID NO: 1295378 - DNA, 15 bp, Homo sapiens
aagaagaaacgagtg

SEQ ID NO: 1295379 - DNA, 15 bp, Homo sapiens
gaagaagaaacgagt

SEQ ID NO: 1295380 - DNA, 15 bp, Homo sapiens
ggaagaagaaacgag

SEQ ID NO: 1295381 - DNA, 15 bp, Homo sapiens
aggaagaagaaacga

SEQ ID NO: 1295382 - DNA, 15 bp, Homo sapiens
caggaagaagaaacg

SEQ ID NO: 1295383 - DNA, 15 bp, Homo sapiens
ccaggaagaagaaac

SEQ ID NO: 1295384 - DNA, 15 bp, Homo sapiens
gccaggaagaagaaa

SEQ ID NO: 1295385 - DNA, 15 bp, Homo sapiens
cgccaggaagaagaa

SEQ ID NO: 1295386 - DNA, 15 bp, Homo sapiens
ccgccaggaagaaga

SEQ ID NO: 1295387 - DNA, 15 bp, Homo sapiens
tccgccaggaagaag

SEQ ID NO: 1295388 - DNA, 15 bp, Homo sapiens
gtccgccaggaagaa

SEQ ID NO: 1295389 - DNA, 15 bp, Homo sapiens
tgtccgccaggaaga

SEQ ID NO: 1295390 - DNA, 15 bp, Homo sapiens
ttgtccgccaggaag

SEQ ID NO: 1295391 - DNA, 15 bp, Homo sapiens
tttgtccgccaggaa

SEQ ID NO: 1295392 - DNA, 15 bp, Homo sapiens
gtttgtccgccagga

SEQ ID NO: 1295393 - DNA, 15 bp, Homo sapiens
ggtttgtccgccagg

SEQ ID NO: 1295394 - DNA, 15 bp, Homo sapiens
aggtttgtccgccag

SEQ ID NO: 1295395 - DNA, 15 bp, Homo sapiens
aaggtttgtccgcca

SEQ ID NO: 1295396 - DNA, 15 bp, Homo sapiens
tggaaggccaaatga

SEQ ID NO: 1295397 - DNA, 15 bp, Homo sapiens
ttggaaggccaaatg

SEQ ID NO: 1295398 - DNA, 15 bp, Homo sapiens
gttggaaggccaaat

SEQ ID NO: 1295399 - DNA, 15 bp, Homo sapiens
agttggaaggccaaa

SEQ ID NO: 1295400 - DNA, 15 bp, Homo sapiens
aagttggaaggccaa

SEQ ID NO: 1295401 - DNA, 15 bp, Homo sapiens
taagttggaaggcca

SEQ ID NO: 1295402 - DNA, 15 bp, Homo sapiens
ctaagttggaaggcc

SEQ ID NO: 1295403 - DNA, 15 bp, Homo sapiens
actaagttggaaggc

SEQ ID NO: 1295404 - DNA, 15 bp, Homo sapiens
aactaagttggaagg

SEQ ID NO: 1295405 - DNA, 15 bp, Homo sapiens
caactaagttggaag

SEQ ID NO: 1295406 - DNA, 15 bp, Homo sapiens
ccaactaagttggaa

SEQ ID NO: 1295407 - DNA, 15 bp, Homo sapiens
cccaactaagttgga

SEQ ID NO: 1295408 - DNA, 15 bp, Homo sapiens
tcccaactaagttgg

SEQ ID NO: 1295409 - DNA, 15 bp, Homo sapiens
atcccaactaagttg

SEQ ID NO: 1295410 - DNA, 15 bp, Homo sapiens
catcccaactaagtt

SEQ ID NO: 1295411 - DNA, 15 bp, Homo sapiens
tcatcccaactaagt

SEQ ID NO: 1295412 - DNA, 15 bp, Homo sapiens
atcatcccaactaag

SEQ ID NO: 1295413 - DNA, 15 bp, Homo sapiens
catcatcccaactaa

SEQ ID NO: 1295414 - DNA, 15 bp, Homo sapiens
ccatcatcccaacta

SEQ ID NO: 1295415 - DNA, 15 bp, Homo sapiens
accatcatcccaact

SEQ ID NO: 1295416 - DNA, 15 bp, Homo sapiens
caccatcatcccaac

SEQ ID NO: 1295417 - DNA, 15 bp, Homo sapiens
ccaccatcatcccaa

SEQ ID NO: 1295418 - DNA, 15 bp, Homo sapiens
agccaccatcatccc

SEQ ID NO: 1295419 - DNA, 15 bp, Homo sapiens
cagccaccatcatcc

SEQ ID NO: 1295420 - DNA, 15 bp, Homo sapiens
acagccaccatcatc

SEQ ID NO: 1295421 - DNA, 15 bp, Homo sapiens
gacagccaccatcat

SEQ ID NO: 1295422 - DNA, 15 bp, Homo sapiens
tgacagccaccatca

SEQ ID NO: 1295423 - DNA, 15 bp, Homo sapiens
gtgacagccaccatc

SEQ ID NO: 1295424 - DNA, 15 bp, Homo sapiens
agtgacagccaccat

SEQ ID NO: 1295425 - DNA, 15 bp, Homo sapiens
aagtgacagccacca

SEQ ID NO: 1295426 - DNA, 15 bp, Homo sapiens
aaagtgacagccacc

SEQ ID NO: 1295427 - DNA, 15 bp, Homo sapiens
taaagtgacagccac

SEQ ID NO: 1295428 - DNA, 15 bp, Homo sapiens
ataaagtgacagcca

SEQ ID NO: 1295429 - DNA, 15 bp, Homo sapiens
gataaagtgacagcc

SEQ ID NO: 1295430 - DNA, 15 bp, Homo sapiens
agataaagtgacagc

SEQ ID NO: 1295431 - DNA, 15 bp, Homo sapiens
gagataaagtgacag

SEQ ID NO: 1295432 - DNA, 15 bp, Homo sapiens
agagataaagtgaca

SEQ ID NO: 1295433 - DNA, 15 bp, Homo sapiens
aagagataaagtgac

SEQ ID NO: 1295434 - DNA, 15 bp, Homo sapiens
aaagagataaagtga

SEQ ID NO: 1295435 - DNA, 15 bp, Homo sapiens
caaagagataaagtg

SEQ ID NO: 1295436 - DNA, 15 bp, Homo sapiens
ccaaagagataaagt

SEQ ID NO: 1295437 - DNA, 15 bp, Homo sapiens
gccaaagagataaag

SEQ ID NO: 1295438 - DNA, 15 bp, Homo sapiens
ggccaaagagataaa

SEQ ID NO: 1295439 - DNA, 15 bp, Homo sapiens
aggccaaagagataa

SEQ ID NO: 1295440 - DNA, 15 bp, Homo sapiens
gaggccaaagagata

SEQ ID NO: 1295441 - DNA, 15 bp, Homo sapiens
tgaggccaaagagat

SEQ ID NO: 1295442 - DNA, 15 bp, Homo sapiens
ttgaggccaaagaga

SEQ ID NO: 1295443 - DNA, 15 bp, Homo sapiens
attgaggccaaagag

SEQ ID NO: 1295444 - DNA, 15 bp, Homo sapiens
aattgaggccaaaga

SEQ ID NO: 1295445 - DNA, 15 bp, Homo sapiens
caattgaggccaaag

SEQ ID NO: 1295446 - DNA, 15 bp, Homo sapiens
acaattgaggccaaa

SEQ ID NO: 1295447 - DNA, 15 bp, Homo sapiens
aacaattgaggccaa

SEQ ID NO: 1295448 - DNA, 15 bp, Homo sapiens
aaacaattgaggcca

SEQ ID NO: 1295449 - DNA, 15 bp, Homo sapiens
gaaacaattgaggcc

SEQ ID NO: 1295450 - DNA, 15 bp, Homo sapiens
tgaaacaattgaggc

SEQ ID NO: 1295451 - DNA, 15 bp, Homo sapiens
atgaaacaattgagg

SEQ ID NO: 1295452 - DNA, 15 bp, Homo sapiens
gatgaaacaattgag

SEQ ID NO: 1295453 - DNA, 15 bp, Homo sapiens
agatgaaacaattga

SEQ ID NO: 1295454 - DNA, 15 bp, Homo sapiens
cagatgaaacaattg

SEQ ID NO: 1295455 - DNA, 15 bp, Homo sapiens
acagatgaaacaatt

SEQ ID NO: 1295456 - DNA, 15 bp, Homo sapiens
tacagatgaaacaat

SEQ ID NO: 1295457 - DNA, 15 bp, Homo sapiens
ttacagatgaaacaa

SEQ ID NO: 1295458 - DNA, 15 bp, Homo sapiens
tttacagatgaaaca

SEQ ID NO: 1295459 - DNA, 15 bp, Homo sapiens
ttttacagatgaaac

SEQ ID NO: 1295460 - DNA, 15 bp, Homo sapiens
attttacagatgaaa

SEQ ID NO: 1295461 - DNA, 15 bp, Homo sapiens
atattttacagatga

SEQ ID NO: 1295462 - DNA, 15 bp, Homo sapiens
aatattttacagatg

SEQ ID NO: 1295463 - DNA, 15 bp, Homo sapiens
caatattttacagat

SEQ ID NO: 1295464 - DNA, 15 bp, Homo sapiens
tcaatattttacaga

SEQ ID NO: 1295465 - DNA, 15 bp, Homo sapiens
atcaatattttacag

SEQ ID NO: 1295466 - DNA, 15 bp, Homo sapiens
tatcaatattttaca

SEQ ID NO: 1295467 - DNA, 15 bp, Homo sapiens
gtatcaatattttac

SEQ ID NO: 1295468 - DNA, 15 bp, Homo sapiens
tgtatcaatatttta

SEQ ID NO: 1295469 - DNA, 15 bp, Homo sapiens
ttgtatcaatatttt

SEQ ID NO: 1295470 - DNA, 15 bp, Homo sapiens
cttgtatcaatattt

SEQ ID NO: 1295471 - DNA, 15 bp, Homo sapiens
acttgtatcaatatt

SEQ ID NO: 1295472 - DNA, 15 bp, Homo sapiens
tacttgtatcaatat

SEQ ID NO: 1295473 - DNA, 15 bp, Homo sapiens
ttacttgtatcaata

SEQ ID NO: 1295474 - DNA, 15 bp, Homo sapiens
attacttgtatcaat

SEQ ID NO: 1295475 - DNA, 15 bp, Homo sapiens
cattacttgtatcaa

SEQ ID NO: 1295476 - DNA, 15 bp, Homo sapiens
acattacttgtatca

SEQ ID NO: 1295477 - DNA, 15 bp, Homo sapiens
gacattacttgtatc

SEQ ID NO: 1295478 - DNA, 15 bp, Homo sapiens
ggacattacttgtat

SEQ ID NO: 1295479 - DNA, 15 bp, Homo sapiens
tggacattacttgta

SEQ ID NO: 1295480 - DNA, 15 bp, Homo sapiens
gtggacattacttgt

SEQ ID NO: 1295481 - DNA, 15 bp, Homo sapiens
tgtggacattacttg

SEQ ID NO: 1295482 - DNA, 15 bp, Homo sapiens
atgtggacattactt

SEQ ID NO: 1295483 - DNA, 15 bp, Homo sapiens
aatgtggacattact

SEQ ID NO: 1295484 - DNA, 15 bp, Homo sapiens
taatgtggacattac

SEQ ID NO: 1295485 - DNA, 15 bp, Homo sapiens
ataatgtggacatta

SEQ ID NO: 1295486 - DNA, 15 bp, Homo sapiens
tataatgtggacatt

SEQ ID NO: 1295487 - DNA, 15 bp, Homo sapiens
ctataatgtggacat

SEQ ID NO: 1295488 - DNA, 15 bp, Homo sapiens
cctataatgtggaca

SEQ ID NO: 1295489 - DNA, 15 bp, Homo sapiens
acctataatgtggac

SEQ ID NO: 1295490 - DNA, 15 bp, Homo sapiens
aacctataatgtgga

SEQ ID NO: 1295491 - DNA, 15 bp, Homo sapiens
caacctataatgtgg

SEQ ID NO: 1295492 - DNA, 15 bp, Homo sapiens
acaacctataatgtg

SEQ ID NO: 1295493 - DNA, 15 bp, Homo sapiens
aacaacctataatgt

SEQ ID NO: 1295494 - DNA, 15 bp, Homo sapiens
caacaacctataatg

SEQ ID NO: 1295495 - DNA, 15 bp, Homo sapiens
acaacaacctataat

SEQ ID NO: 1295496 - DNA, 15 bp, Homo sapiens
tacaacaacctataa

SEQ ID NO: 1295497 - DNA, 15 bp, Homo sapiens
ttacaacaacctata

SEQ ID NO: 1295498 - DNA, 15 bp, Homo sapiens
cttacaacaacctat

SEQ ID NO: 1295499 - DNA, 15 bp, Homo sapiens
ccttacaacaaccta

SEQ ID NO: 1295500 - DNA, 15 bp, Homo sapiens
tccttacaacaacct

SEQ ID NO: 1295501 - DNA, 15 bp, Homo sapiens
atccttacaacaacc

SEQ ID NO: 1295502 - DNA, 15 bp, Homo sapiens
aatccttacaacaac

SEQ ID NO: 1295503 - DNA, 15 bp, Homo sapiens
taatccttacaacaa

SEQ ID NO: 1295504 - DNA, 15 bp, Homo sapiens
ttaatccttacaaca

SEQ ID NO: 1295505 - DNA, 15 bp, Homo sapiens
attaatccttacaac

SEQ ID NO: 1295506 - DNA, 15 bp, Homo sapiens
gattaatccttacaa

SEQ ID NO: 1295507 - DNA, 15 bp, Homo sapiens
ggattaatccttaca

SEQ ID NO: 1295508 - DNA, 15 bp, Homo sapiens
aggattaatccttac

SEQ ID NO: 1295509 - DNA, 15 bp, Homo sapiens
gaggattaatcctta

SEQ ID NO: 1295510 - DNA, 15 bp, Homo sapiens
tgaggattaatcctt

SEQ ID NO: 1295511 - DNA, 15 bp, Homo sapiens
atgaggattaatcct

SEQ ID NO: 1295512 - DNA, 15 bp, Homo sapiens
aatgaggattaatcc

SEQ ID NO: 1295513 - DNA, 15 bp, Homo sapiens
aaatgaggattaatc

SEQ ID NO: 1295514 - DNA, 15 bp, Homo sapiens
taaatgaggattaat

SEQ ID NO: 1295515 - DNA, 15 bp, Homo sapiens
ttaaatgaggattaa

SEQ ID NO: 1295516 - DNA, 15 bp, Homo sapiens
gttaaatgaggatta

SEQ ID NO: 1295517 - DNA, 15 bp, Homo sapiens
agttaaatgaggatt

SEQ ID NO: 1295518 - DNA, 15 bp, Homo sapiens
gagttaaatgaggat

SEQ ID NO: 1295519 - DNA, 15 bp, Homo sapiens
tgagttaaatgagga

SEQ ID NO: 1295520 - DNA, 15 bp, Homo sapiens
atgagttaaatgagg

SEQ ID NO: 1295521 - DNA, 15 bp, Homo sapiens
aatgagttaaatgag

SEQ ID NO: 1295522 - DNA, 15 bp, Homo sapiens
aaatgagttaaatga

SEQ ID NO: 1295523 - DNA, 15 bp, Homo sapiens
taaatgagttaaatg

SEQ ID NO: 1295524 - DNA, 15 bp, Homo sapiens
gtaaatgagttaaat

SEQ ID NO: 1295525 - DNA, 15 bp, Homo sapiens
tgtaaatgagttaaa

SEQ ID NO: 1295526 - DNA, 15 bp, Homo sapiens
ttgtaaatgagttaa

SEQ ID NO: 1295527 - DNA, 15 bp, Homo sapiens
tttgtaaatgagtta

SEQ ID NO: 1295528 - DNA, 15 bp, Homo sapiens
atttgtaaatgagtt

SEQ ID NO: 1295529 - DNA, 15 bp, Homo sapiens
aatttgtaaatgagt

SEQ ID NO: 1295530 - DNA, 15 bp, Homo sapiens
aaatttgtaaatgag

SEQ ID NO: 1295531 - DNA, 15 bp, Homo sapiens
aaaatttgtaaatga

SEQ ID NO: 1295532 - DNA, 15 bp, Homo sapiens
taaaatttgtaaatg

SEQ ID NO: 1295533 - DNA, 15 bp, Homo sapiens
ataaaatttgtaaat

SEQ ID NO: 1295534 - DNA, 15 bp, Homo sapiens
cataaaatttgtaaa

SEQ ID NO: 1295535 - DNA, 15 bp, Homo sapiens
gcataaaatttgtaa

SEQ ID NO: 1295536 - DNA, 15 bp, Homo sapiens
tgcataaaatttgta

SEQ ID NO: 1295537 - DNA, 15 bp, Homo sapiens
atgcataaaatttgt

SEQ ID NO: 1295538 - DNA, 15 bp, Homo sapiens
aatgcataaaatttg

SEQ ID NO: 1295539 - DNA, 15 bp, Homo sapiens
taatgcataaaattt

SEQ ID NO: 1295540 - DNA, 15 bp, Homo sapiens
ataatgcataaaatt

SEQ ID NO: 1295541 - DNA, 15 bp, Homo sapiens
tataatgcataaaat

SEQ ID NO: 1295542 - DNA, 15 bp, Homo sapiens
atataatgcataaaa

SEQ ID NO: 1295543 - DNA, 15 bp, Homo sapiens
tatataatgcataaa

SEQ ID NO: 1295544 - DNA, 15 bp, Homo sapiens
atatataatgcataa

SEQ ID NO: 1295545 - DNA, 15 bp, Homo sapiens
catatataatgcata

SEQ ID NO: 1295546 - DNA, 15 bp, Homo sapiens
acatatataatgcat

SEQ ID NO: 1295547 - DNA, 15 bp, Homo sapiens
tacatatataatgca

SEQ ID NO: 1295548 - DNA, 15 bp, Homo sapiens
atacatatataatgc

SEQ ID NO: 1295549 - DNA, 15 bp, Homo sapiens
aatatatacatatat

SEQ ID NO: 1295550 - DNA, 15 bp, Homo sapiens
taatatatacatata

SEQ ID NO: 1295551 - DNA, 15 bp, Homo sapiens
ataatatatacatat

SEQ ID NO: 1295552 - DNA, 15 bp, Homo sapiens
tataatatatacata

SEQ ID NO: 1295553 - DNA, 15 bp, Homo sapiens
atataatatatacat

SEQ ID NO: 1295554 - DNA, 15 bp, Homo sapiens
tatataatatataca

SEQ ID NO: 1295555 - DNA, 15 bp, Homo sapiens
atatataatatatac

SEQ ID NO: 1295556 - DNA, 15 bp, Homo sapiens
tatatataatatata

SEQ ID NO: 1295557 - DNA, 15 bp, Homo sapiens
gtatatataatatat

SEQ ID NO: 1295558 - DNA, 15 bp, Homo sapiens
ggtatatataatata

SEQ ID NO: 1295559 - DNA, 15 bp, Homo sapiens
aggtatatataatat

SEQ ID NO: 1295560 - DNA, 15 bp, Homo sapiens
aaggtatatataata

SEQ ID NO: 1295561 - DNA, 15 bp, Homo sapiens
gaaggtatatataat

SEQ ID NO: 1295562 - DNA, 15 bp, Homo sapiens
tgaaggtatatataa

SEQ ID NO: 1295563 - DNA, 15 bp, Homo sapiens
atgaaggtatatata

SEQ ID NO: 1295564 - DNA, 15 bp, Homo sapiens
tatgaaggtatatat

SEQ ID NO: 1295565 - DNA, 15 bp, Homo sapiens
atatgaaggtatata

SEQ ID NO: 1295566 - DNA, 15 bp, Homo sapiens
tatatgaaggtatat

SEQ ID NO: 1295567 - DNA, 15 bp, Homo sapiens
atatatgaaggtata

SEQ ID NO: 1295568 - DNA, 15 bp, Homo sapiens
tatatatgaaggtat

SEQ ID NO: 1295569 - DNA, 15 bp, Homo sapiens
atatatatgaaggta

SEQ ID NO: 1295570 - DNA, 15 bp, Homo sapiens
catatatatgaaggt

SEQ ID NO: 1295571 - DNA, 15 bp, Homo sapiens
ccatatatatgaagg

SEQ ID NO: 1295572 - DNA, 15 bp, Homo sapiens
tccatatatatgaag

SEQ ID NO: 1295573 - DNA, 15 bp, Homo sapiens
ttccatatatatgaa

SEQ ID NO: 1295574 - DNA, 15 bp, Homo sapiens
tttccatatatatga

SEQ ID NO: 1295575 - DNA, 15 bp, Homo sapiens
ttttccatatatatg

SEQ ID NO: 1295576 - DNA, 15 bp, Homo sapiens
gttttccatatatat

SEQ ID NO: 1295577 - DNA, 15 bp, Homo sapiens
tgttttccatatata

SEQ ID NO: 1295578 - DNA, 15 bp, Homo sapiens
gtgttttccatatat

SEQ ID NO: 1295579 - DNA, 15 bp, Homo sapiens
agtgttttccatata

SEQ ID NO: 1295580 - DNA, 15 bp, Homo sapiens
aagtgttttccatat

SEQ ID NO: 1295581 - DNA, 15 bp, Homo sapiens
caagtgttttccata

SEQ ID NO: 1295582 - DNA, 15 bp, Homo sapiens
acaagtgttttccat

SEQ ID NO: 1295583 - DNA, 15 bp, Homo sapiens
tacaagtgttttcca

SEQ ID NO: 1295584 - DNA, 15 bp, Homo sapiens
ttacaagtgttttcc

SEQ ID NO: 1295585 - DNA, 15 bp, Homo sapiens
gttacaagtgttttc

SEQ ID NO: 1295586 - DNA, 15 bp, Homo sapiens
tgttacaagtgtttt

SEQ ID NO: 1295587 - DNA, 15 bp, Homo sapiens
ctgttacaagtgttt

SEQ ID NO: 1295588 - DNA, 15 bp, Homo sapiens
gctgttacaagtgtt

SEQ ID NO: 1295589 - DNA, 15 bp, Homo sapiens
tgctgttacaagtgt

SEQ ID NO: 1295590 - DNA, 15 bp, Homo sapiens
atgctgttacaagtg

SEQ ID NO: 1295591 - DNA, 15 bp, Homo sapiens
gatgctgttacaagt

SEQ ID NO: 1295592 - DNA, 15 bp, Homo sapiens
agatgctgttacaag

SEQ ID NO: 1295593 - DNA, 15 bp, Homo sapiens
tagatgctgttacaa

SEQ ID NO: 1295594 - DNA, 15 bp, Homo sapiens
ctagatgctgttaca

SEQ ID NO: 1295595 - DNA, 15 bp, Homo sapiens
actagatgctgttac

SEQ ID NO: 1295596 - DNA, 15 bp, Homo sapiens
tactagatgctgtta

SEQ ID NO: 1295597 - DNA, 15 bp, Homo sapiens
ttactagatgctgtt

SEQ ID NO: 1295598 - DNA, 15 bp, Homo sapiens
cttactagatgctgt

SEQ ID NO: 1295599 - DNA, 15 bp, Homo sapiens
gcttactagatgctg

SEQ ID NO: 1295600 - DNA, 15 bp, Homo sapiens
tgcttactagatgct

SEQ ID NO: 1295601 - DNA, 15 bp, Homo sapiens
gtgcttactagatgc

SEQ ID NO: 1295602 - DNA, 15 bp, Homo sapiens
cgtgcttactagatg

SEQ ID NO: 1295603 - DNA, 15 bp, Homo sapiens
tcgtgcttactagat

SEQ ID NO: 1295604 - DNA, 15 bp, Homo sapiens
ttcgtgcttactaga

SEQ ID NO: 1295605 - DNA, 15 bp, Homo sapiens
attcgtgcttactag

SEQ ID NO: 1295606 - DNA, 15 bp, Homo sapiens
cattcgtgcttacta

SEQ ID NO: 1295607 - DNA, 15 bp, Homo sapiens
tcattcgtgcttact

SEQ ID NO: 1295608 - DNA, 15 bp, Homo sapiens
atcattcgtgcttac

SEQ ID NO: 1295609 - DNA, 15 bp, Homo sapiens
catcattcgtgctta

SEQ ID NO: 1295610 - DNA, 15 bp, Homo sapiens
acatcattcgtgctt

SEQ ID NO: 1295611 - DNA, 15 bp, Homo sapiens
cacatcattcgtgct

SEQ ID NO: 1295612 - DNA, 15 bp, Homo sapiens
ccacatcattcgtgc

SEQ ID NO: 1295613 - DNA, 15 bp, Homo sapiens
tccacatcattcgtg

SEQ ID NO: 1295614 - DNA, 15 bp, Homo sapiens
atccacatcattcgt

SEQ ID NO: 1295615 - DNA, 15 bp, Homo sapiens
tatccacatcattcg

SEQ ID NO: 1295616 - DNA, 15 bp, Homo sapiens
ctatccacatcattc

SEQ ID NO: 1295617 - DNA, 15 bp, Homo sapiens
tctatccacatcatt

SEQ ID NO: 1295618 - DNA, 15 bp, Homo sapiens
atctatccacatcat

SEQ ID NO: 1295619 - DNA, 15 bp, Homo sapiens
tatctatccacatca

SEQ ID NO: 1295620 - DNA, 15 bp, Homo sapiens
ctatctatccacatc

SEQ ID NO: 1295621 - DNA, 15 bp, Homo sapiens
tctatctatccacat

SEQ ID NO: 1295622 - DNA, 15 bp, Homo sapiens
gtctatctatccaca

SEQ ID NO: 1295623 - DNA, 15 bp, Homo sapiens
tgtctatctatccac

SEQ ID NO: 1295624 - DNA, 15 bp, Homo sapiens
atgtctatctatcca

SEQ ID NO: 1295625 - DNA, 15 bp, Homo sapiens
tatgtctatctatcc

SEQ ID NO: 1295626 - DNA, 15 bp, Homo sapiens
atatgtctatctatc

SEQ ID NO: 1295627 - DNA, 15 bp, Homo sapiens
gatatgtctatctat

SEQ ID NO: 1295628 - DNA, 15 bp, Homo sapiens
agatatgtctatcta

SEQ ID NO: 1295629 - DNA, 15 bp, Homo sapiens
aagatatgtctatct

SEQ ID NO: 1295630 - DNA, 15 bp, Homo sapiens
taagatatgtctatc

SEQ ID NO: 1295631 - DNA, 15 bp, Homo sapiens
ataagatatgtctat

SEQ ID NO: 1295632 - DNA, 15 bp, Homo sapiens
tataagatatgtcta

SEQ ID NO: 1295633 - DNA, 15 bp, Homo sapiens
ctataagatatgtct

SEQ ID NO: 1295634 - DNA, 15 bp, Homo sapiens
cctataagatatgtc

SEQ ID NO: 1295635 - DNA, 15 bp, Homo sapiens
ccctataagatatgt

SEQ ID NO: 1295636 - DNA, 15 bp, Homo sapiens
accctataagatatg

SEQ ID NO: 1295637 - DNA, 15 bp, Homo sapiens
aaccctataagatat

SEQ ID NO: 1295638 - DNA, 15 bp, Homo sapiens
caaccctataagata

SEQ ID NO: 1295639 - DNA, 15 bp, Homo sapiens
gcaaccctataagat

SEQ ID NO: 1295640 - DNA, 15 bp, Homo sapiens
agcaaccctataaga

SEQ ID NO: 1295641 - DNA, 15 bp, Homo sapiens
cagcaaccctataag

SEQ ID NO: 1295642 - DNA, 15 bp, Homo sapiens
acagcaaccctataa

SEQ ID NO: 1295643 - DNA, 15 bp, Homo sapiens
tacagcaaccctata

SEQ ID NO: 1295644 - DNA, 15 bp, Homo sapiens
ttacagcaaccctat

SEQ ID NO: 1295645 - DNA, 15 bp, Homo sapiens
cttacagcaacccta

SEQ ID NO: 1295646 - DNA, 15 bp, Homo sapiens
gcttacagcaaccct

SEQ ID NO: 1295647 - DNA, 15 bp, Homo sapiens
ggcttacagcaaccc

SEQ ID NO: 1295648 - DNA, 15 bp, Homo sapiens
gggcttacagcaacc

SEQ ID NO: 1295649 - DNA, 15 bp, Homo sapiens
agggcttacagcaac

SEQ ID NO: 1295650 - DNA, 15 bp, Homo sapiens
tagggcttacagcaa

SEQ ID NO: 1295651 - DNA, 15 bp, Homo sapiens
ctagggcttacagca

SEQ ID NO: 1295652 - DNA, 15 bp, Homo sapiens
tctctagggcttaca

SEQ ID NO: 1295653 - DNA, 15 bp, Homo sapiens
gtctctagggcttac

SEQ ID NO: 1295654 - DNA, 15 bp, Homo sapiens
agtctctagggctta

SEQ ID NO: 1295655 - DNA, 15 bp, Homo sapiens
aagtctctagggctt

SEQ ID NO: 1295656 - DNA, 15 bp, Homo sapiens
aaagtctctagggct

SEQ ID NO: 1295657 - DNA, 15 bp, Homo sapiens
caaagtctctagggc

SEQ ID NO: 1295658 - DNA, 15 bp, Homo sapiens
gcaaagtctctaggg

SEQ ID NO: 1295659 - DNA, 15 bp, Homo sapiens
tgcaaagtctctagg

SEQ ID NO: 1295660 - DNA, 15 bp, Homo sapiens
atgcaaagtctctag

SEQ ID NO: 1295661 - DNA, 15 bp, Homo sapiens
tatgcaaagtctcta

SEQ ID NO: 1295662 - DNA, 15 bp, Homo sapiens
atatgcaaagtctct

SEQ ID NO: 1295663 - DNA, 15 bp, Homo sapiens
tatatgcaaagtctc

SEQ ID NO: 1295664 - DNA, 15 bp, Homo sapiens
atatatgcaaagtct

SEQ ID NO: 1295665 - DNA, 15 bp, Homo sapiens
tatatatgcaaagtc

SEQ ID NO: 1295666 - DNA, 15 bp, Homo sapiens
atatatatgcaaagt

SEQ ID NO: 1295667 - DNA, 15 bp, Homo sapiens
aatatatatgcaaag

SEQ ID NO: 1295668 - DNA, 15 bp, Homo sapiens
caatatatatgcaaa

SEQ ID NO: 1295669 - DNA, 15 bp, Homo sapiens
acaatatatatgcaa

SEQ ID NO: 1295670 - DNA, 15 bp, Homo sapiens
gacaatatatatgca

SEQ ID NO: 1295671 - DNA, 15 bp, Homo sapiens
agacaatatatatgc

SEQ ID NO: 1295672 - DNA, 15 bp, Homo sapiens
cagacaatatatatg

SEQ ID NO: 1295673 - DNA, 15 bp, Homo sapiens
ccagacaatatatat

SEQ ID NO: 1295674 - DNA, 15 bp, Homo sapiens
gccagacaatatata

SEQ ID NO: 1295675 - DNA, 15 bp, Homo sapiens
tgccagacaatatat

SEQ ID NO: 1295676 - DNA, 15 bp, Homo sapiens
ttgccagacaatata

SEQ ID NO: 1295677 - DNA, 15 bp, Homo sapiens
attgccagacaatat

SEQ ID NO: 1295678 - DNA, 15 bp, Homo sapiens
tattgccagacaata

SEQ ID NO: 1295679 - DNA, 15 bp, Homo sapiens
ctattgccagacaat

SEQ ID NO: 1295680 - DNA, 15 bp, Homo sapiens
gctattgccagacaa

SEQ ID NO: 1295681 - DNA, 15 bp, Homo sapiens
tgctattgccagaca

SEQ ID NO: 1295682 - DNA, 15 bp, Homo sapiens
ctgctattgccagac

SEQ ID NO: 1295683 - DNA, 15 bp, Homo sapiens
tctgctattgccaga

SEQ ID NO: 1295684 - DNA, 15 bp, Homo sapiens
gtctgctattgccag

SEQ ID NO: 1295685 - DNA, 15 bp, Homo sapiens
tgtctgctattgcca

SEQ ID NO: 1295686 - DNA, 15 bp, Homo sapiens
gtgtctgctattgcc

SEQ ID NO: 1295687 - DNA, 15 bp, Homo sapiens
agtgtctgctattgc

SEQ ID NO: 1295688 - DNA, 15 bp, Homo sapiens
cagtgtctgctattg

SEQ ID NO: 1295689 - DNA, 15 bp, Homo sapiens
tcagtgtctgctatt

SEQ ID NO: 1295690 - DNA, 15 bp, Homo sapiens
ttcagtgtctgctat

SEQ ID NO: 1295691 - DNA, 15 bp, Homo sapiens
attcagtgtctgcta

SEQ ID NO: 1295692 - DNA, 15 bp, Homo sapiens
tattcagtgtctgct

SEQ ID NO: 1295693 - DNA, 15 bp, Homo sapiens
ttattcagtgtctgc

SEQ ID NO: 1295694 - DNA, 15 bp, Homo sapiens
tttattcagtgtctg

SEQ ID NO: 1295695 - DNA, 15 bp, Homo sapiens
atttattcagtgtct

SEQ ID NO: 1295696 - DNA, 15 bp, Homo sapiens
gatttattcagtgtc

SEQ ID NO: 1295697 - DNA, 15 bp, Homo sapiens
agatttattcagtgt

SEQ ID NO: 1295698 - DNA, 15 bp, Homo sapiens
aagatttattcagtg

SEQ ID NO: 1295699 - DNA, 15 bp, Homo sapiens
taagatttattcagt

SEQ ID NO: 1295700 - DNA, 15 bp, Homo sapiens
ctaagatttattcag

SEQ ID NO: 1295701 - DNA, 15 bp, Homo sapiens
gctaagatttattca

SEQ ID NO: 1295702 - DNA, 15 bp, Homo sapiens
agctaagatttattc

SEQ ID NO: 1295703 - DNA, 15 bp, Homo sapiens
tagctaagatttatt

SEQ ID NO: 1295704 - DNA, 15 bp, Homo sapiens
atagctaagatttat

SEQ ID NO: 1295705 - DNA, 15 bp, Homo sapiens
aatagctaagattta

SEQ ID NO: 1295706 - DNA, 15 bp, Homo sapiens
taatagctaagattt

SEQ ID NO: 1295707 - DNA, 15 bp, Homo sapiens
ataatagctaagatt

SEQ ID NO: 1295708 - DNA, 15 bp, Homo sapiens
aataatagctaagat

SEQ ID NO: 1295709 - DNA, 15 bp, Homo sapiens
taataatagctaaga

SEQ ID NO: 1295710 - DNA, 15 bp, Homo sapiens
ttaataatagctaag

SEQ ID NO: 1295711 - DNA, 15 bp, Homo sapiens
attaataatagctaa

SEQ ID NO: 1295712 - DNA, 15 bp, Homo sapiens
tattaataatagcta

SEQ ID NO: 1295713 - DNA, 15 bp, Homo sapiens
ttattaataatagct

SEQ ID NO: 1295714 - DNA, 15 bp, Homo sapiens
aattattaataatag

SEQ ID NO: 1295715 - DNA, 15 bp, Homo sapiens
taattattaataata

SEQ ID NO: 1295716 - DNA, 15 bp, Homo sapiens
ataattattaataat

SEQ ID NO: 1295717 - DNA, 15 bp, Homo sapiens
aataattattaataa

SEQ ID NO: 1295718 - DNA, 15 bp, Homo sapiens
taataattattaata

SEQ ID NO: 1295719 - DNA, 15 bp, Homo sapiens
ataataattattaat

SEQ ID NO: 1295720 - DNA, 15 bp, Homo sapiens
cataataattattaa

SEQ ID NO: 1295721 - DNA, 15 bp, Homo sapiens
acataataattatta

SEQ ID NO: 1295722 - DNA, 15 bp, Homo sapiens
aacataataattatt

SEQ ID NO: 1295723 - DNA, 15 bp, Homo sapiens
caacataataattat

SEQ ID NO: 1295724 - DNA, 15 bp, Homo sapiens
tcaacataataatta

SEQ ID NO: 1295725 - DNA, 15 bp, Homo sapiens
atcaacataataatt

SEQ ID NO: 1295726 - DNA, 15 bp, Homo sapiens
aatcaacataataat

SEQ ID NO: 1295727 - DNA, 15 bp, Homo sapiens
caatcaacataataa

SEQ ID NO: 1295728 - DNA, 15 bp, Homo sapiens
tcaatcaacataata

SEQ ID NO: 1295729 - DNA, 15 bp, Homo sapiens
ttcaatcaacataat

SEQ ID NO: 1295730 - DNA, 15 bp, Homo sapiens
gttcaatcaacataa

SEQ ID NO: 1295731 - DNA, 15 bp, Homo sapiens
agttcaatcaacata

SEQ ID NO: 1295732 - DNA, 15 bp, Homo sapiens
cagttcaatcaacat

SEQ ID NO: 1295733 - DNA, 15 bp, Homo sapiens
acagttcaatcaaca

SEQ ID NO: 1295734 - DNA, 15 bp, Homo sapiens
aacagttcaatcaac

SEQ ID NO: 1295735 - DNA, 15 bp, Homo sapiens
aaacagttcaatcaa

SEQ ID NO: 1295736 - DNA, 15 bp, Homo sapiens
taaacagttcaatca

SEQ ID NO: 1295737 - DNA, 15 bp, Homo sapiens
ttaaacagttcaatc

SEQ ID NO: 1295738 - DNA, 15 bp, Homo sapiens
attaaacagttcaat

SEQ ID NO: 1295739 - DNA, 15 bp, Homo sapiens
tattaaacagttcaa

SEQ ID NO: 1295740 - DNA, 15 bp, Homo sapiens
ttattaaacagttca

SEQ ID NO: 1295741 - DNA, 15 bp, Homo sapiens
attattaaacagttc

SEQ ID NO: 1295742 - DNA, 15 bp, Homo sapiens
tattattaaacagtt

SEQ ID NO: 1295743 - DNA, 15 bp, Homo sapiens
ttattattaaacagt

SEQ ID NO: 1295744 - DNA, 15 bp, Homo sapiens
attattattaaacag

SEQ ID NO: 1295745 - DNA, 15 bp, Homo sapiens
cattattattaaaca

SEQ ID NO: 1295746 - DNA, 15 bp, Homo sapiens
acattattattaaac

SEQ ID NO: 1295747 - DNA, 15 bp, Homo sapiens
cacattattattaaa

SEQ ID NO: 1295748 - DNA, 15 bp, Homo sapiens
tcacattattattaa

SEQ ID NO: 1295749 - DNA, 15 bp, Homo sapiens
atcacattattatta

SEQ ID NO: 1295750 - DNA, 15 bp, Homo sapiens
aatcacattattatt

SEQ ID NO: 1295751 - DNA, 15 bp, Homo sapiens
gaatcacattattat

SEQ ID NO: 1295752 - DNA, 15 bp, Homo sapiens
tgaatcacattatta

SEQ ID NO: 1295753 - DNA, 15 bp, Homo sapiens
atgaatcacattatt

SEQ ID NO: 1295754 - DNA, 15 bp, Homo sapiens
gatgaatcacattat

SEQ ID NO: 1295755 - DNA, 15 bp, Homo sapiens
agatgaatcacatta

SEQ ID NO: 1295756 - DNA, 15 bp, Homo sapiens
tagatgaatcacatt

SEQ ID NO: 1295757 - DNA, 15 bp, Homo sapiens
ttagatgaatcacat

SEQ ID NO: 1295758 - DNA, 15 bp, Homo sapiens
tttagatgaatcaca

SEQ ID NO: 1295759 - DNA, 15 bp, Homo sapiens
atttagatgaatcac

SEQ ID NO: 1295760 - DNA, 15 bp, Homo sapiens
tatttagatgaatca

SEQ ID NO: 1295761 - DNA, 15 bp, Homo sapiens
ctatttagatgaatc

SEQ ID NO: 1295762 - DNA, 15 bp, Homo sapiens
tctatttagatgaat

SEQ ID NO: 1295763 - DNA, 15 bp, Homo sapiens
ctctatttagatgaa

SEQ ID NO: 1295764 - DNA, 15 bp, Homo sapiens
gctctatttagatga

SEQ ID NO: 1295765 - DNA, 15 bp, Homo sapiens
agctctatttagatg

SEQ ID NO: 1295766 - DNA, 15 bp, Homo sapiens
aagctctatttagat

SEQ ID NO: 1295767 - DNA, 15 bp, Homo sapiens
aaagctctatttaga

SEQ ID NO: 1295768 - DNA, 15 bp, Homo sapiens
taaagctctatttag

SEQ ID NO: 1295769 - DNA, 15 bp, Homo sapiens
ataaagctctattta

SEQ ID NO: 1295770 - DNA, 15 bp, Homo sapiens
tataaagctctattt

SEQ ID NO: 1295771 - DNA, 15 bp, Homo sapiens
ctataaagctctatt

SEQ ID NO: 1295772 - DNA, 15 bp, Homo sapiens
actataaagctctat

SEQ ID NO: 1295773 - DNA, 15 bp, Homo sapiens
aactataaagctcta

SEQ ID NO: 1295774 - DNA, 15 bp, Homo sapiens
aaactataaagctct

SEQ ID NO: 1295775 - DNA, 15 bp, Homo sapiens
gaaactataaagctc

SEQ ID NO: 1295776 - DNA, 15 bp, Homo sapiens
agaaactataaagct

SEQ ID NO: 1295777 - DNA, 15 bp, Homo sapiens
cagaaactataaagc

SEQ ID NO: 1295778 - DNA, 15 bp, Homo sapiens
ccagaaactataaag

SEQ ID NO: 1295779 - DNA, 15 bp, Homo sapiens
tccagaaactataaa

SEQ ID NO: 1295780 - DNA, 15 bp, Homo sapiens
ctccagaaactataa

SEQ ID NO: 1295781 - DNA, 15 bp, Homo sapiens
actccagaaactata

SEQ ID NO: 1295782 - DNA, 15 bp, Homo sapiens
aactccagaaactat

SEQ ID NO: 1295783 - DNA, 15 bp, Homo sapiens
gaactccagaaacta

SEQ ID NO: 1295784 - DNA, 15 bp, Homo sapiens
agaactccagaaact

SEQ ID NO: 1295785 - DNA, 15 bp, Homo sapiens
aagaactccagaaac

SEQ ID NO: 1295786 - DNA, 15 bp, Homo sapiens
caagaactccagaaa

SEQ ID NO: 1295787 - DNA, 15 bp, Homo sapiens
gcaagaactccagaa

SEQ ID NO: 1295788 - DNA, 15 bp, Homo sapiens
agcaagaactccaga

SEQ ID NO: 1295789 - DNA, 15 bp, Homo sapiens
cagcaagaactccag

SEQ ID NO: 1295790 - DNA, 15 bp, Homo sapiens
gcagcaagaactcca

SEQ ID NO: 1295791 - DNA, 15 bp, Homo sapiens
ggcagcaagaactcc

SEQ ID NO: 1295792 - DNA, 15 bp, Homo sapiens
tggcagcaagaactc

SEQ ID NO: 1295793 - DNA, 15 bp, Homo sapiens
ttggcagcaagaact

SEQ ID NO: 1295794 - DNA, 15 bp, Homo sapiens
attggcagcaagaac

SEQ ID NO: 1295795 - DNA, 15 bp, Homo sapiens
tattggcagcaagaa

SEQ ID NO: 1295796 - DNA, 15 bp, Homo sapiens
atattggcagcaaga

SEQ ID NO: 1295797 - DNA, 15 bp, Homo sapiens
catattggcagcaag

SEQ ID NO: 1295798 - DNA, 15 bp, Homo sapiens
tcatattggcagcaa

SEQ ID NO: 1295799 - DNA, 15 bp, Homo sapiens
atcatattggcagca

SEQ ID NO: 1295800 - DNA, 15 bp, Homo sapiens
gatcatattggcagc

SEQ ID NO: 1295801 - DNA, 15 bp, Homo sapiens
ggatcatattggcag

SEQ ID NO: 1295802 - DNA, 15 bp, Homo sapiens
aggatcatattggca

SEQ ID NO: 1295803 - DNA, 15 bp, Homo sapiens
aaggatcatattggc

SEQ ID NO: 1295804 - DNA, 15 bp, Homo sapiens
gaaggatcatattgg

SEQ ID NO: 1295805 - DNA, 15 bp, Homo sapiens
agaaggatcatattg

SEQ ID NO: 1295806 - DNA, 15 bp, Homo sapiens
aagaaggatcatatt

SEQ ID NO: 1295807 - DNA, 15 bp, Homo sapiens
caagaaggatcatat

SEQ ID NO: 1295808 - DNA, 15 bp, Homo sapiens
tcaagaaggatcata

SEQ ID NO: 1295809 - DNA, 15 bp, Homo sapiens
ctcaagaaggatcat

SEQ ID NO: 1295810 - DNA, 15 bp, Homo sapiens
gctcaagaaggatca

SEQ ID NO: 1295811 - DNA, 15 bp, Homo sapiens
ggctcaagaaggatc

SEQ ID NO: 1295812 - DNA, 15 bp, Homo sapiens
gggctcaagaaggat

SEQ ID NO: 1295813 - DNA, 15 bp, Homo sapiens
agggctcaagaagga

SEQ ID NO: 1295814 - DNA, 15 bp, Homo sapiens
tagggctcaagaagg

SEQ ID NO: 1295815 - DNA, 15 bp, Homo sapiens
gtagggctcaagaag

SEQ ID NO: 1295816 - DNA, 15 bp, Homo sapiens
tgtagggctcaagaa

SEQ ID NO: 1295817 - DNA, 15 bp, Homo sapiens
ttgtagggctcaaga

SEQ ID NO: 1295818 - DNA, 15 bp, Homo sapiens
gttgtagggctcaag

SEQ ID NO: 1295819 - DNA, 15 bp, Homo sapiens
ggttgtagggctcaa

SEQ ID NO: 1295820 - DNA, 15 bp, Homo sapiens
tggttgtagggctca

SEQ ID NO: 1295821 - DNA, 15 bp, Homo sapiens
gtggttgtagggctc

SEQ ID NO: 1295822 - DNA, 15 bp, Homo sapiens
agtggttgtagggct

SEQ ID NO: 1295823 - DNA, 15 bp, Homo sapiens
gagtggttgtagggc

SEQ ID NO: 1295824 - DNA, 15 bp, Homo sapiens
tgagtggttgtaggg

SEQ ID NO: 1295825 - DNA, 15 bp, Homo sapiens
ctgagtggttgtagg

SEQ ID NO: 1295826 - DNA, 15 bp, Homo sapiens
actgagtggttgtag

SEQ ID NO: 1295827 - DNA, 15 bp, Homo sapiens
cactgagtggttgta

SEQ ID NO: 1295828 - DNA, 15 bp, Homo sapiens
tcactgagtggttgt

SEQ ID NO: 1295829 - DNA, 15 bp, Homo sapiens
atcactgagtggttg

SEQ ID NO: 1295830 - DNA, 15 bp, Homo sapiens
catcactgagtggtt

SEQ ID NO: 1295831 - DNA, 15 bp, Homo sapiens
ccatcactgagtggt

SEQ ID NO: 1295832 - DNA, 15 bp, Homo sapiens
cccatcactgagtgg

SEQ ID NO: 1295833 - DNA, 15 bp, Homo sapiens
ccccatcactgagtg

SEQ ID NO: 1295834 - DNA, 15 bp, Homo sapiens
gccccatcactgagt

SEQ ID NO: 1295835 - DNA, 15 bp, Homo sapiens
agccccatcactgag

SEQ ID NO: 1295836 - DNA, 15 bp, Homo sapiens
gagccccatcactga

SEQ ID NO: 1295837 - DNA, 15 bp, Homo sapiens
ggagccccatcactg

SEQ ID NO: 1295838 - DNA, 15 bp, Homo sapiens
aggagccccatcact

SEQ ID NO: 1295839 - DNA, 15 bp, Homo sapiens
taggagccccatcac

SEQ ID NO: 1295840 - DNA, 15 bp, Homo sapiens
ataggagccccatca

SEQ ID NO: 1295841 - DNA, 15 bp, Homo sapiens
aataggagccccatc

SEQ ID NO: 1295842 - DNA, 15 bp, Homo sapiens
gaataggagccccat

SEQ ID NO: 1295843 - DNA, 15 bp, Homo sapiens
ggaataggagcccca

SEQ ID NO: 1295844 - DNA, 15 bp, Homo sapiens
aggaataggagcccc

SEQ ID NO: 1295845 - DNA, 15 bp, Homo sapiens
gaggaataggagccc

SEQ ID NO: 1295846 - DNA, 15 bp, Homo sapiens
agaggaataggagcc

SEQ ID NO: 1295847 - DNA, 15 bp, Homo sapiens
cagaggaataggagc

SEQ ID NO: 1295848 - DNA, 15 bp, Homo sapiens
acagaggaataggag

SEQ ID NO: 1295849 - DNA, 15 bp, Homo sapiens
gacagaggaatagga

SEQ ID NO: 1295850 - DNA, 15 bp, Homo sapiens
ggacagaggaatagg

SEQ ID NO: 1295851 - DNA, 15 bp, Homo sapiens
tggacagaggaatag

SEQ ID NO: 1295852 - DNA, 15 bp, Homo sapiens
ctggacagaggaata

SEQ ID NO: 1295853 - DNA, 15 bp, Homo sapiens
actggacagaggaat

SEQ ID NO: 1295854 - DNA, 15 bp, Homo sapiens
cactggacagaggaa

SEQ ID NO: 1295855 - DNA, 15 bp, Homo sapiens
ccactggacagagga

SEQ ID NO: 1295856 - DNA, 15 bp, Homo sapiens
gccactggacagagg

SEQ ID NO: 1295857 - DNA, 15 bp, Homo sapiens
agccactggacagag

SEQ ID NO: 1295858 - DNA, 15 bp, Homo sapiens
gagccactggacaga

SEQ ID NO: 1295859 - DNA, 15 bp, Homo sapiens
agagccactggacag

SEQ ID NO: 1295860 - DNA, 15 bp, Homo sapiens
gagagccactggaca

SEQ ID NO: 1295861 - DNA, 15 bp, Homo sapiens
tgagagccactggac

SEQ ID NO: 1295862 - DNA, 15 bp, Homo sapiens
ctgagagccactgga

SEQ ID NO: 1295863 - DNA, 15 bp, Homo sapiens
cctgagagccactgg

SEQ ID NO: 1295864 - DNA, 15 bp, Homo sapiens
ccctgagagccactg

SEQ ID NO: 1295865 - DNA, 15 bp, Homo sapiens
tccctgagagccact

SEQ ID NO: 1295866 - DNA, 15 bp, Homo sapiens
ttccctgagagccac

SEQ ID NO: 1295867 - DNA, 15 bp, Homo sapiens
cttccctgagagcca

SEQ ID NO: 1295868 - DNA, 15 bp, Homo sapiens
ccttccctgagagcc

SEQ ID NO: 1295869 - DNA, 15 bp, Homo sapiens
cccttccctgagagc

SEQ ID NO: 1295870 - DNA, 15 bp, Homo sapiens
acccttccctgagag

SEQ ID NO: 1295871 - DNA, 15 bp, Homo sapiens
aacccttccctgaga

SEQ ID NO: 1295872 - DNA, 15 bp, Homo sapiens
caacccttccctgag

SEQ ID NO: 1295873 - DNA, 15 bp, Homo sapiens
ccaacccttccctga

SEQ ID NO: 1295874 - DNA, 15 bp, Homo sapiens
tccaacccttccctg

SEQ ID NO: 1295875 - DNA, 15 bp, Homo sapiens
atccaacccttccct

SEQ ID NO: 1295876 - DNA, 15 bp, Homo sapiens
catccaacccttccc

SEQ ID NO: 1295877 - DNA, 15 bp, Homo sapiens
gcatccaacccttcc

SEQ ID NO: 1295878 - DNA, 15 bp, Homo sapiens
ggcatccaacccttc

SEQ ID NO: 1295879 - DNA, 15 bp, Homo sapiens
aggcatccaaccctt

SEQ ID NO: 1295880 - DNA, 15 bp, Homo sapiens
gaggcatccaaccct

SEQ ID NO: 1295881 - DNA, 15 bp, Homo sapiens
agaggcatccaaccc

SEQ ID NO: 1295882 - DNA, 15 bp, Homo sapiens
gagaggcatccaacc

SEQ ID NO: 1295883 - DNA, 15 bp, Homo sapiens
ggagaggcatccaac

SEQ ID NO: 1295884 - DNA, 15 bp, Homo sapiens
tggagaggcatccaa

SEQ ID NO: 1295885 - DNA, 15 bp, Homo sapiens
ctggagaggcatcca

SEQ ID NO: 1295886 - DNA, 15 bp, Homo sapiens
cctggagaggcatcc

SEQ ID NO: 1295887 - DNA, 15 bp, Homo sapiens
ccctggagaggcatc

SEQ ID NO: 1295888 - DNA, 15 bp, Homo sapiens
accctggagaggcat

SEQ ID NO: 1295889 - DNA, 15 bp, Homo sapiens
gaccctggagaggca

SEQ ID NO: 1295890 - DNA, 15 bp, Homo sapiens
agaccctggagaggc

SEQ ID NO: 1295891 - DNA, 15 bp, Homo sapiens
gagaccctggagagg

SEQ ID NO: 1295892 - DNA, 15 bp, Homo sapiens
ggagaccctggagag

SEQ ID NO: 1295893 - DNA, 15 bp, Homo sapiens
aggagaccctggaga

SEQ ID NO: 1295894 - DNA, 15 bp, Homo sapiens
caggagaccctggag

SEQ ID NO: 1295895 - DNA, 15 bp, Homo sapiens
ccaggagaccctgga

SEQ ID NO: 1295896 - DNA, 15 bp, Homo sapiens
gccaggagaccctgg

SEQ ID NO: 1295897 - DNA, 15 bp, Homo sapiens
ggccaggagaccctg

SEQ ID NO: 1295898 - DNA, 15 bp, Homo sapiens
tggccaggagaccct

SEQ ID NO: 1295899 - DNA, 15 bp, Homo sapiens
ctggccaggagaccc

SEQ ID NO: 1295900 - DNA, 15 bp, Homo sapiens
cctggccaggagacc

SEQ ID NO: 1295901 - DNA, 15 bp, Homo sapiens
acctggccaggagac

SEQ ID NO: 1295902 - DNA, 15 bp, Homo sapiens
cacctggccaggaga

SEQ ID NO: 1295903 - DNA, 15 bp, Homo sapiens
ccacctggccaggag

SEQ ID NO: 1295904 - DNA, 15 bp, Homo sapiens
accacctggccagga

SEQ ID NO: 1295905 - DNA, 15 bp, Homo sapiens
gaccacctggccagg

SEQ ID NO: 1295906 - DNA, 15 bp, Homo sapiens
tgaccacctggccag

SEQ ID NO: 1295907 - DNA, 15 bp, Homo sapiens
atgaccacctggcca

SEQ ID NO: 1295908 - DNA, 15 bp, Homo sapiens
aatgaccacctggcc

SEQ ID NO: 1295909 - DNA, 15 bp, Homo sapiens
taatgaccacctggc

SEQ ID NO: 1295910 - DNA, 15 bp, Homo sapiens
ctaatgaccacctgg

SEQ ID NO: 1295911 - DNA, 15 bp, Homo sapiens
gctaatgaccacctg

SEQ ID NO: 1295912 - DNA, 15 bp, Homo sapiens
tgctaatgaccacct

SEQ ID NO: 1295913 - DNA, 15 bp, Homo sapiens
ctgctaatgaccacc

SEQ ID NO: 1295914 - DNA, 15 bp, Homo sapiens
cctgctaatgaccac

SEQ ID NO: 1295915 - DNA, 15 bp, Homo sapiens
tcctgctaatgacca

SEQ ID NO: 1295916 - DNA, 15 bp, Homo sapiens
gtcctgctaatgacc

SEQ ID NO: 1295917 - DNA, 15 bp, Homo sapiens
ggtcctgctaatgac

SEQ ID NO: 1295918 - DNA, 15 bp, Homo sapiens
tggtcctgctaatga

SEQ ID NO: 1295919 - DNA, 15 bp, Homo sapiens
ctggtcctgctaatg

SEQ ID NO: 1295920 - DNA, 15 bp, Homo sapiens
cctggtcctgctaat

SEQ ID NO: 1295921 - DNA, 15 bp, Homo sapiens
ccctggtcctgctaa

SEQ ID NO: 1295922 - DNA, 15 bp, Homo sapiens
accctggtcctgcta

SEQ ID NO: 1295923 - DNA, 15 bp, Homo sapiens
caccctggtcctgct

SEQ ID NO: 1295924 - DNA, 15 bp, Homo sapiens
acaccctggtcctgc

SEQ ID NO: 1295925 - DNA, 15 bp, Homo sapiens
cacaccctggtcctg

SEQ ID NO: 1295926 - DNA, 15 bp, Homo sapiens
tcacaccctggtcct

SEQ ID NO: 1295927 - DNA, 15 bp, Homo sapiens
ttcacaccctggtcc

SEQ ID NO: 1295928 - DNA, 15 bp, Homo sapiens
attcacaccctggtc

SEQ ID NO: 1295929 - DNA, 15 bp, Homo sapiens
gattcacaccctggt

SEQ ID NO: 1295930 - DNA, 15 bp, Homo sapiens
tgattcacaccctgg

SEQ ID NO: 1295931 - DNA, 15 bp, Homo sapiens
atgattcacaccctg

SEQ ID NO: 1295932 - DNA, 15 bp, Homo sapiens
tatgattcacaccct

SEQ ID NO: 1295933 - DNA, 15 bp, Homo sapiens
ctatgattcacaccc

SEQ ID NO: 1295934 - DNA, 15 bp, Homo sapiens
actatgattcacacc

SEQ ID NO: 1295935 - DNA, 15 bp, Homo sapiens
cactatgattcacac

SEQ ID NO: 1295936 - DNA, 15 bp, Homo sapiens
tcactatgattcaca

SEQ ID NO: 1295937 - DNA, 15 bp, Homo sapiens
ctcactatgattcac

SEQ ID NO: 1295938 - DNA, 15 bp, Homo sapiens
cctcactatgattca

SEQ ID NO: 1295939 - DNA, 15 bp, Homo sapiens
tcctcactatgattc

SEQ ID NO: 1295940 - DNA, 15 bp, Homo sapiens
ctcctcactatgatt

SEQ ID NO: 1295941 - DNA, 15 bp, Homo sapiens
gctcctcactatgat

SEQ ID NO: 1295942 - DNA, 15 bp, Homo sapiens
agctcctcactatga

SEQ ID NO: 1295943 - DNA, 15 bp, Homo sapiens
aagctcctcactatg

SEQ ID NO: 1295944 - DNA, 15 bp, Homo sapiens
gaagctcctcactat

SEQ ID NO: 1295945 - DNA, 15 bp, Homo sapiens
ggaagctcctcacta

SEQ ID NO: 1295946 - DNA, 15 bp, Homo sapiens
gggaagctcctcact

SEQ ID NO: 1295947 - DNA, 15 bp, Homo sapiens
tgggaagctcctcac

SEQ ID NO: 1295948 - DNA, 15 bp, Homo sapiens
ctgggaagctcctca

SEQ ID NO: 1295949 - DNA, 15 bp, Homo sapiens
actgggaagctcctc

SEQ ID NO: 1295950 - DNA, 15 bp, Homo sapiens
gactgggaagctcct

SEQ ID NO: 1295951 - DNA, 15 bp, Homo sapiens
ggactgggaagctcc

SEQ ID NO: 1295952 - DNA, 15 bp, Homo sapiens
tggactgggaagctc

SEQ ID NO: 1295953 - DNA, 15 bp, Homo sapiens
ctggactgggaagct

SEQ ID NO: 1295954 - DNA, 15 bp, Homo sapiens
cctggactgggaagc

SEQ ID NO: 1295955 - DNA, 15 bp, Homo sapiens
ccctggactgggaag

SEQ ID NO: 1295956 - DNA, 15 bp, Homo sapiens
gccctggactgggaa

SEQ ID NO: 1295957 - DNA, 15 bp, Homo sapiens
agccctggactggga

SEQ ID NO: 1295958 - DNA, 15 bp, Homo sapiens
aagccctggactggg

SEQ ID NO: 1295959 - DNA, 15 bp, Homo sapiens
caagccctggactgg

SEQ ID NO: 1295960 - DNA, 15 bp, Homo sapiens
acaagccctggactg

SEQ ID NO: 1295961 - DNA, 15 bp, Homo sapiens
aacaagccctggact

SEQ ID NO: 1295962 - DNA, 15 bp, Homo sapiens
gaacaagccctggac

SEQ ID NO: 1295963 - DNA, 15 bp, Homo sapiens
ggaacaagccctgga

SEQ ID NO: 1295964 - DNA, 15 bp, Homo sapiens
tggaacaagccctgg

SEQ ID NO: 1295965 - DNA, 15 bp, Homo sapiens
gtggaacaagccctg

SEQ ID NO: 1295966 - DNA, 15 bp, Homo sapiens
tgtggaacaagccct

SEQ ID NO: 1295967 - DNA, 15 bp, Homo sapiens
atgtggaacaagccc

SEQ ID NO: 1295968 - DNA, 15 bp, Homo sapiens
gatgtggaacaagcc

SEQ ID NO: 1295969 - DNA, 15 bp, Homo sapiens
ggatgtggaacaagc

SEQ ID NO: 1295970 - DNA, 15 bp, Homo sapiens
aggatgtggaacaag

SEQ ID NO: 1295971 - DNA, 15 bp, Homo sapiens
gaggatgtggaacaa

SEQ ID NO: 1295972 - DNA, 15 bp, Homo sapiens
agaggatgtggaaca

SEQ ID NO: 1295973 - DNA, 15 bp, Homo sapiens
gagaggatgtggaac

SEQ ID NO: 1295974 - DNA, 15 bp, Homo sapiens
agagaggatgtggaa

SEQ ID NO: 1295975 - DNA, 15 bp, Homo sapiens
aagagaggatgtgga

SEQ ID NO: 1295976 - DNA, 15 bp, Homo sapiens
gaagagaggatgtgg

SEQ ID NO: 1295977 - DNA, 15 bp, Homo sapiens
ggaagagaggatgtg

SEQ ID NO: 1295978 - DNA, 15 bp, Homo sapiens
gggaagagaggatgt

SEQ ID NO: 1295979 - DNA, 15 bp, Homo sapiens
ggggaagagaggatg

SEQ ID NO: 1295980 - DNA, 15 bp, Homo sapiens
gggggaagagaggat

SEQ ID NO: 1295981 - DNA, 15 bp, Homo sapiens
tgggggaagagagga

SEQ ID NO: 1295982 - DNA, 15 bp, Homo sapiens
atgggggaagagagg

SEQ ID NO: 1295983 - DNA, 15 bp, Homo sapiens
aatgggggaagagag

SEQ ID NO: 1295984 - DNA, 15 bp, Homo sapiens
gaatgggggaagaga

SEQ ID NO: 1295985 - DNA, 15 bp, Homo sapiens
agaatgggggaagag

SEQ ID NO: 1295986 - DNA, 15 bp, Homo sapiens
tagaatgggggaaga

SEQ ID NO: 1295987 - DNA, 15 bp, Homo sapiens
ttagaatgggggaag

SEQ ID NO: 1295988 - DNA, 15 bp, Homo sapiens
tttagaatgggggaa

SEQ ID NO: 1295989 - DNA, 15 bp, Homo sapiens
ctttagaatggggga

SEQ ID NO: 1295990 - DNA, 15 bp, Homo sapiens
cctttagaatggggg

SEQ ID NO: 1295991 - DNA, 15 bp, Homo sapiens
gcctttagaatgggg

SEQ ID NO: 1295992 - DNA, 15 bp, Homo sapiens
ggcctttagaatggg

SEQ ID NO: 1295993 - DNA, 15 bp, Homo sapiens
aggcctttagaatgg

SEQ ID NO: 1295994 - DNA, 15 bp, Homo sapiens
gaggcctttagaatg

SEQ ID NO: 1295995 - DNA, 15 bp, Homo sapiens
ggaggcctttagaat

SEQ ID NO: 1295996 - DNA, 15 bp, Homo sapiens
gggaggcctttagaa

SEQ ID NO: 1295997 - DNA, 15 bp, Homo sapiens
tgggaggcctttaga

SEQ ID NO: 1295998 - DNA, 15 bp, Homo sapiens
ctgggaggcctttag

SEQ ID NO: 1295999 - DNA, 15 bp, Homo sapiens
gctgggaggccttta

SEQ ID NO: 1296000 - DNA, 15 bp, Homo sapiens
ggctgggaggccttt

SEQ ID NO: 1296001 - DNA, 15 bp, Homo sapiens
tggctgggaggcctt

SEQ ID NO: 1296002 - DNA, 15 bp, Homo sapiens
atggctgggaggcct

SEQ ID NO: 1296003 - DNA, 15 bp, Homo sapiens
aatggctgggaggcc

SEQ ID NO: 1296004 - DNA, 15 bp, Homo sapiens
aaatggctgggaggc

SEQ ID NO: 1296005 - DNA, 15 bp, Homo sapiens
caaatggctgggagg

SEQ ID NO: 1296006 - DNA, 15 bp, Homo sapiens
acaaatggctgggag

SEQ ID NO: 1296007 - DNA, 15 bp, Homo sapiens
gacaaatggctggga

SEQ ID NO: 1296008 - DNA, 15 bp, Homo sapiens
tgacaaatggctggg

SEQ ID NO: 1296009 - DNA, 15 bp, Homo sapiens
gtgacaaatggctgg

SEQ ID NO: 1296010 - DNA, 15 bp, Homo sapiens
tgtgacaaatggctg

SEQ ID NO: 1296011 - DNA, 15 bp, Homo sapiens
ctgtgacaaatggct

SEQ ID NO: 1296012 - DNA, 15 bp, Homo sapiens
gctgtgacaaatggc

SEQ ID NO: 1296013 - DNA, 15 bp, Homo sapiens
ggctgtgacaaatgg

SEQ ID NO: 1296014 - DNA, 15 bp, Homo sapiens
aggctgtgacaaatg

SEQ ID NO: 1296015 - DNA, 15 bp, Homo sapiens
gaggctgtgacaaat

SEQ ID NO: 1296016 - DNA, 15 bp, Homo sapiens
tgaggctgtgacaaa

SEQ ID NO: 1296017 - DNA, 15 bp, Homo sapiens
atgaggctgtgacaa

SEQ ID NO: 1296018 - DNA, 15 bp, Homo sapiens
aatgaggctgtgaca

SEQ ID NO: 1296019 - DNA, 15 bp, Homo sapiens
aaatgaggctgtgac

SEQ ID NO: 1296020 - DNA, 15 bp, Homo sapiens
caaatgaggctgtga

SEQ ID NO: 1296021 - DNA, 15 bp, Homo sapiens
tcaaatgaggctgtg

SEQ ID NO: 1296022 - DNA, 15 bp, Homo sapiens
ttcaaatgaggctgt

SEQ ID NO: 1296023 - DNA, 15 bp, Homo sapiens
tttcaaatgaggctg

SEQ ID NO: 1296024 - DNA, 15 bp, Homo sapiens
atttcaaatgaggct

SEQ ID NO: 1296025 - DNA, 15 bp, Homo sapiens
catttcaaatgaggc

SEQ ID NO: 1296026 - DNA, 15 bp, Homo sapiens
gcatttcaaatgagg

SEQ ID NO: 1296027 - DNA, 15 bp, Homo sapiens
ggcatttcaaatgag

SEQ ID NO: 1296028 - DNA, 15 bp, Homo sapiens
aggcatttcaaatga

SEQ ID NO: 1296029 - DNA, 15 bp, Homo sapiens
caggcatttcaaatg

SEQ ID NO: 1296030 - DNA, 15 bp, Homo sapiens
acaggcatttcaaat

SEQ ID NO: 1296031 - DNA, 15 bp, Homo sapiens
cacaggcatttcaaa

SEQ ID NO: 1296032 - DNA, 15 bp, Homo sapiens
gcacaggcatttcaa

SEQ ID NO: 1296033 - DNA, 15 bp, Homo sapiens
agcacaggcatttca

SEQ ID NO: 1296034 - DNA, 15 bp, Homo sapiens
aagcacaggcatttc

SEQ ID NO: 1296035 - DNA, 15 bp, Homo sapiens
gaagcacaggcattt

SEQ ID NO: 1296036 - DNA, 15 bp, Homo sapiens
agaagcacaggcatt

SEQ ID NO: 1296037 - DNA, 15 bp, Homo sapiens
gagaagcacaggcat

SEQ ID NO: 1296038 - DNA, 15 bp, Homo sapiens
tgagaagcacaggca

SEQ ID NO: 1296039 - DNA, 15 bp, Homo sapiens
atgagaagcacaggc

SEQ ID NO: 1296040 - DNA, 15 bp, Homo sapiens
gatgagaagcacagg

SEQ ID NO: 1296041 - DNA, 15 bp, Homo sapiens
agatgagaagcacag

SEQ ID NO: 1296042 - DNA, 15 bp, Homo sapiens
cagatgagaagcaca

SEQ ID NO: 1296043 - DNA, 15 bp, Homo sapiens
acagatgagaagcac

SEQ ID NO: 1296044 - DNA, 15 bp, Homo sapiens
tacagatgagaagca

SEQ ID NO: 1296045 - DNA, 15 bp, Homo sapiens
ttacagatgagaagc

SEQ ID NO: 1296046 - DNA, 15 bp, Homo sapiens
attacagatgagaag

SEQ ID NO: 1296047 - DNA, 15 bp, Homo sapiens
tattacagatgagaa

SEQ ID NO: 1296048 - DNA, 15 bp, Homo sapiens
atattacagatgaga

SEQ ID NO: 1296049 - DNA, 15 bp, Homo sapiens
gatattacagatgag

SEQ ID NO: 1296050 - DNA, 15 bp, Homo sapiens
ggatattacagatga

SEQ ID NO: 1296051 - DNA, 15 bp, Homo sapiens
aggatattacagatg

SEQ ID NO: 1296052 - DNA, 15 bp, Homo sapiens
caggatattacagat

SEQ ID NO: 1296053 - DNA, 15 bp, Homo sapiens
tcaggatattacaga

SEQ ID NO: 1296054 - DNA, 15 bp, Homo sapiens
atcaggatattacag

SEQ ID NO: 1296055 - DNA, 15 bp, Homo sapiens
aatcaggatattaca

SEQ ID NO: 1296056 - DNA, 15 bp, Homo sapiens
caatcaggatattac

SEQ ID NO: 1296057 - DNA, 15 bp, Homo sapiens
acaatcaggatatta

SEQ ID NO: 1296058 - DNA, 15 bp, Homo sapiens
gacaatcaggatatt

SEQ ID NO: 1296059 - DNA, 15 bp, Homo sapiens
ggacaatcaggatat

SEQ ID NO: 1296060 - DNA, 15 bp, Homo sapiens
gggacaatcaggata

SEQ ID NO: 1296061 - DNA, 15 bp, Homo sapiens
tgggacaatcaggat

SEQ ID NO: 1296062 - DNA, 15 bp, Homo sapiens
atgggacaatcagga

SEQ ID NO: 1296063 - DNA, 15 bp, Homo sapiens
aatgggacaatcagg

SEQ ID NO: 1296064 - DNA, 15 bp, Homo sapiens
taatgggacaatcag

SEQ ID NO: 1296065 - DNA, 15 bp, Homo sapiens
ttaatgggacaatca

SEQ ID NO: 1296066 - DNA, 15 bp, Homo sapiens
attaatgggacaatc

SEQ ID NO: 1296067 - DNA, 15 bp, Homo sapiens
gattaatgggacaat

SEQ ID NO: 1296068 - DNA, 15 bp, Homo sapiens
agattaatgggacaa

SEQ ID NO: 1296069 - DNA, 15 bp, Homo sapiens
gagattaatgggaca

SEQ ID NO: 1296070 - DNA, 15 bp, Homo sapiens
ggagattaatgggac

SEQ ID NO: 1296071 - DNA, 15 bp, Homo sapiens
aggagattaatggga

SEQ ID NO: 1296072 - DNA, 15 bp, Homo sapiens
aaggagattaatggg

SEQ ID NO: 1296073 - DNA, 15 bp, Homo sapiens
aaaggagattaatgg

SEQ ID NO: 1296074 - DNA, 15 bp, Homo sapiens
taaaggagattaatg

SEQ ID NO: 1296075 - DNA, 15 bp, Homo sapiens
ttaaaggagattaat

SEQ ID NO: 1296076 - DNA, 15 bp, Homo sapiens
cttaaaggagattaa

SEQ ID NO: 1296077 - DNA, 15 bp, Homo sapiens
gcttaaaggagatta

SEQ ID NO: 1296078 - DNA, 15 bp, Homo sapiens
agcttaaaggagatt

SEQ ID NO: 1296079 - DNA, 15 bp, Homo sapiens
aagcttaaaggagat

SEQ ID NO: 1296080 - DNA, 15 bp, Homo sapiens
gaagcttaaaggaga

SEQ ID NO: 1296081 - DNA, 15 bp, Homo sapiens
tgaagcttaaaggag

SEQ ID NO: 1296082 - DNA, 15 bp, Homo sapiens
atgaagcttaaagga

SEQ ID NO: 1296083 - DNA, 15 bp, Homo sapiens
catgaagcttaaagg

SEQ ID NO: 1296084 - DNA, 15 bp, Homo sapiens
tcatgaagcttaaag

SEQ ID NO: 1296085 - DNA, 15 bp, Homo sapiens
ttcatgaagcttaaa

SEQ ID NO: 1296086 - DNA, 15 bp, Homo sapiens
tttcatgaagcttaa

SEQ ID NO: 1296087 - DNA, 15 bp, Homo sapiens
ttttcatgaagctta

SEQ ID NO: 1296088 - DNA, 15 bp, Homo sapiens
tttttcatgaagctt

SEQ ID NO: 1296089 - DNA, 15 bp, Homo sapiens
atttttcatgaagct

SEQ ID NO: 1296090 - DNA, 15 bp, Homo sapiens
tatttttcatgaagc

SEQ ID NO: 1296091 - DNA, 15 bp, Homo sapiens
gtatttttcatgaag

SEQ ID NO: 1296092 - DNA, 15 bp, Homo sapiens
tgtatttttcatgaa

SEQ ID NO: 1296093 - DNA, 15 bp, Homo sapiens
ttgtatttttcatga

SEQ ID NO: 1296094 - DNA, 15 bp, Homo sapiens
cttgtatttttcatg

SEQ ID NO: 1296095 - DNA, 15 bp, Homo sapiens
ccttgtatttttcat

SEQ ID NO: 1296096 - DNA, 15 bp, Homo sapiens
cccttgtatttttca

SEQ ID NO: 1296097 - DNA, 15 bp, Homo sapiens
ccccttgtatttttc

SEQ ID NO: 1296098 - DNA, 15 bp, Homo sapiens
tccagccccttgtat

SEQ ID NO: 1296099 - DNA, 15 bp, Homo sapiens
atccagccccttgta

SEQ ID NO: 1296100 - DNA, 15 bp, Homo sapiens
gatccagccccttgt

SEQ ID NO: 1296101 - DNA, 15 bp, Homo sapiens
tgatccagccccttg

SEQ ID NO: 1296102 - DNA, 15 bp, Homo sapiens
ctgatccagcccctt

SEQ ID NO: 1296103 - DNA, 15 bp, Homo sapiens
cctgatccagcccct

SEQ ID NO: 1296104 - DNA, 15 bp, Homo sapiens
tcctgatccagcccc

SEQ ID NO: 1296105 - DNA, 15 bp, Homo sapiens
ttcctgatccagccc

SEQ ID NO: 1296106 - DNA, 15 bp, Homo sapiens
tttcctgatccagcc

SEQ ID NO: 1296107 - DNA, 15 bp, Homo sapiens
atttcctgatccagc

SEQ ID NO: 1296108 - DNA, 15 bp, Homo sapiens
tatttcctgatccag

SEQ ID NO: 1296109 - DNA, 15 bp, Homo sapiens
ctatttcctgatcca

SEQ ID NO: 1296110 - DNA, 15 bp, Homo sapiens
gctatttcctgatcc

SEQ ID NO: 1296111 - DNA, 15 bp, Homo sapiens
ggctatttcctgatc

SEQ ID NO: 1296112 - DNA, 15 bp, Homo sapiens
tggctatttcctgat

SEQ ID NO: 1296113 - DNA, 15 bp, Homo sapiens
gtggctatttcctga

SEQ ID NO: 1296114 - DNA, 15 bp, Homo sapiens
ggtggctatttcctg

SEQ ID NO: 1296115 - DNA, 15 bp, Homo sapiens
tggtggctatttcct

SEQ ID NO: 1296116 - DNA, 15 bp, Homo sapiens
ttggtggctatttcc

SEQ ID NO: 1296117 - DNA, 15 bp, Homo sapiens
cttggtggctatttc

SEQ ID NO: 1296118 - DNA, 15 bp, Homo sapiens
acttggtggctattt

SEQ ID NO: 1296119 - DNA, 15 bp, Homo sapiens
aacttggtggctatt

SEQ ID NO: 1296120 - DNA, 15 bp, Homo sapiens
gaacttggtggctat

SEQ ID NO: 1296121 - DNA, 15 bp, Homo sapiens
agaacttggtggcta

SEQ ID NO: 1296122 - DNA, 15 bp, Homo sapiens
tagaacttggtggct

SEQ ID NO: 1296123 - DNA, 15 bp, Homo sapiens
ttagaacttggtggc

SEQ ID NO: 1296124 - DNA, 15 bp, Homo sapiens
attagaacttggtgg

SEQ ID NO: 1296125 - DNA, 15 bp, Homo sapiens
aattagaacttggtg

SEQ ID NO: 1296126 - DNA, 15 bp, Homo sapiens
aaattagaacttggt

SEQ ID NO: 1296127 - DNA, 15 bp, Homo sapiens
aaaattagaacttgg

SEQ ID NO: 1296128 - DNA, 15 bp, Homo sapiens
caaaattagaacttg

SEQ ID NO: 1296129 - DNA, 15 bp, Homo sapiens
gcaaaattagaactt

SEQ ID NO: 1296130 - DNA, 15 bp, Homo sapiens
tgcaaaattagaact

SEQ ID NO: 1296131 - DNA, 15 bp, Homo sapiens
atgcaaaattagaac

SEQ ID NO: 1296132 - DNA, 15 bp, Homo sapiens
aatgcaaaattagaa

SEQ ID NO: 1296133 - DNA, 15 bp, Homo sapiens
gaatgcaaaattaga

SEQ ID NO: 1296134 - DNA, 15 bp, Homo sapiens
tgaatgcaaaattag

SEQ ID NO: 1296135 - DNA, 15 bp, Homo sapiens
ctgaatgcaaaatta

SEQ ID NO: 1296136 - DNA, 15 bp, Homo sapiens
cctgaatgcaaaatt

SEQ ID NO: 1296137 - DNA, 15 bp, Homo sapiens
ccctgaatgcaaaat

SEQ ID NO: 1296138 - DNA, 15 bp, Homo sapiens
cccctgaatgcaaaa

SEQ ID NO: 1296139 - DNA, 15 bp, Homo sapiens
tcccctgaatgcaaa

SEQ ID NO: 1296140 - DNA, 15 bp, Homo sapiens
atcccctgaatgcaa

SEQ ID NO: 1296141 - DNA, 15 bp, Homo sapiens
aatcccctgaatgca

SEQ ID NO: 1296142 - DNA, 15 bp, Homo sapiens
caatcccctgaatgc

SEQ ID NO: 1296143 - DNA, 15 bp, Homo sapiens
acaatcccctgaatg

SEQ ID NO: 1296144 - DNA, 15 bp, Homo sapiens
gacaatcccctgaat

SEQ ID NO: 1296145 - DNA, 15 bp, Homo sapiens
agacaatcccctgaa

SEQ ID NO: 1296146 - DNA, 15 bp, Homo sapiens
aagacaatcccctga

SEQ ID NO: 1296147 - DNA, 15 bp, Homo sapiens
gaagacaatcccctg

SEQ ID NO: 1296148 - DNA, 15 bp, Homo sapiens
ggaagacaatcccct

SEQ ID NO: 1296149 - DNA, 15 bp, Homo sapiens
tggaagacaatcccc

SEQ ID NO: 1296150 - DNA, 15 bp, Homo sapiens
atggaagacaatccc

SEQ ID NO: 1296151 - DNA, 15 bp, Homo sapiens
catggaagacaatcc

SEQ ID NO: 1296152 - DNA, 15 bp, Homo sapiens
ccatggaagacaatc

SEQ ID NO: 1296153 - DNA, 15 bp, Homo sapiens
tccatggaagacaat

SEQ ID NO: 1296154 - DNA, 15 bp, Homo sapiens
gtccatggaagacaa

SEQ ID NO: 1296155 - DNA, 15 bp, Homo sapiens
cgtccatggaagaca

SEQ ID NO: 1296156 - DNA, 15 bp, Homo sapiens
acgtccatggaagac

SEQ ID NO: 1296157 - DNA, 15 bp, Homo sapiens
cacgtccatggaaga

SEQ ID NO: 1296158 - DNA, 15 bp, Homo sapiens
tcacgtccatggaag

SEQ ID NO: 1296159 - DNA, 15 bp, Homo sapiens
ttcacgtccatggaa

SEQ ID NO: 1296160 - DNA, 15 bp, Homo sapiens
cttcacgtccatgga

SEQ ID NO: 1296161 - DNA, 15 bp, Homo sapiens
tcttcacgtccatgg

SEQ ID NO: 1296162 - DNA, 15 bp, Homo sapiens
ctcttcacgtccatg

SEQ ID NO: 1296163 - DNA, 15 bp, Homo sapiens
tctcttcacgtccat

SEQ ID NO: 1296164 - DNA, 15 bp, Homo sapiens
gtctcttcacgtcca

SEQ ID NO: 1296165 - DNA, 15 bp, Homo sapiens
agtctcttcacgtcc

SEQ ID NO: 1296166 - DNA, 15 bp, Homo sapiens
cagtctcttcacgtc

SEQ ID NO: 1296167 - DNA, 15 bp, Homo sapiens
tcagtctcttcacgt

SEQ ID NO: 1296168 - DNA, 15 bp, Homo sapiens
atcagtctcttcacg

SEQ ID NO: 1296169 - DNA, 15 bp, Homo sapiens
catcagtctcttcac

SEQ ID NO: 1296170 - DNA, 15 bp, Homo sapiens
acatcagtctcttca

SEQ ID NO: 1296171 - DNA, 15 bp, Homo sapiens
aacatcagtctcttc

SEQ ID NO: 1296172 - DNA, 15 bp, Homo sapiens
aaacatcagtctctt

SEQ ID NO: 1296173 - DNA, 15 bp, Homo sapiens
gaaacatcagtctct

SEQ ID NO: 1296174 - DNA, 15 bp, Homo sapiens
ggaaacatcagtctc

SEQ ID NO: 1296175 - DNA, 15 bp, Homo sapiens
gggaaacatcagtct

SEQ ID NO: 1296176 - DNA, 15 bp, Homo sapiens
tgggaaacatcagtc

SEQ ID NO: 1296177 - DNA, 15 bp, Homo sapiens
atgggaaacatcagt

SEQ ID NO: 1296178 - DNA, 15 bp, Homo sapiens
aatgggaaacatcag

SEQ ID NO: 1296179 - DNA, 15 bp, Homo sapiens
aaatgggaaacatca

SEQ ID NO: 1296180 - DNA, 15 bp, Homo sapiens
caaatgggaaacatc

SEQ ID NO: 1296181 - DNA, 15 bp, Homo sapiens
ccaaatgggaaacat

SEQ ID NO: 1296182 - DNA, 15 bp, Homo sapiens
gccaaatgggaaaca

SEQ ID NO: 1296183 - DNA, 15 bp, Homo sapiens
ggccaaatgggaaac

SEQ ID NO: 1296184 - DNA, 15 bp, Homo sapiens
aggccaaatgggaaa

SEQ ID NO: 1296185 - DNA, 15 bp, Homo sapiens
aaggccaaatgggaa

SEQ ID NO: 1296186 - DNA, 15 bp, Homo sapiens
aaaggccaaatggga

SEQ ID NO: 1296187 - DNA, 15 bp, Homo sapiens
caaaggccaaatggg

SEQ ID NO: 1296188 - DNA, 15 bp, Homo sapiens
gcaaaggccaaatgg

SEQ ID NO: 1296189 - DNA, 15 bp, Homo sapiens
ggcaaaggccaaatg

SEQ ID NO: 1296190 - DNA, 15 bp, Homo sapiens
aggcaaaggccaaat

SEQ ID NO: 1296191 - DNA, 15 bp, Homo sapiens
aaggcaaaggccaaa

SEQ ID NO: 1296192 - DNA, 15 bp, Homo sapiens
aaaggcaaaggccaa

SEQ ID NO: 1296193 - DNA, 15 bp, Homo sapiens
gaaaggcaaaggcca

SEQ ID NO: 1296194 - DNA, 15 bp, Homo sapiens
ggaaaggcaaaggcc

SEQ ID NO: 1296195 - DNA, 15 bp, Homo sapiens
tggaaaggcaaaggc

SEQ ID NO: 1296196 - DNA, 15 bp, Homo sapiens
ttggaaaggcaaagg

SEQ ID NO: 1296197 - DNA, 15 bp, Homo sapiens
gttggaaaggcaaag

SEQ ID NO: 1296198 - DNA, 15 bp, Homo sapiens
agttggaaaggcaaa

SEQ ID NO: 1296199 - DNA, 15 bp, Homo sapiens
tagttggaaaggcaa

SEQ ID NO: 1296200 - DNA, 15 bp, Homo sapiens
ttagttggaaaggca

SEQ ID NO: 1296201 - DNA, 15 bp, Homo sapiens
cttagttggaaaggc

SEQ ID NO: 1296202 - DNA, 15 bp, Homo sapiens
acttagttggaaagg

SEQ ID NO: 1296203 - DNA, 15 bp, Homo sapiens
gacttagttggaaag

SEQ ID NO: 1296204 - DNA, 15 bp, Homo sapiens
cgacttagttggaaa

SEQ ID NO: 1296205 - DNA, 15 bp, Homo sapiens
ccgacttagttggaa

SEQ ID NO: 1296206 - DNA, 15 bp, Homo sapiens
cccgacttagttgga

SEQ ID NO: 1296207 - DNA, 15 bp, Homo sapiens
ccccgacttagttgg

SEQ ID NO: 1296208 - DNA, 15 bp, Homo sapiens
tccccgacttagttg

SEQ ID NO: 1296209 - DNA, 15 bp, Homo sapiens
ctccccgacttagtt

SEQ ID NO: 1296210 - DNA, 15 bp, Homo sapiens
tctccccgacttagt

SEQ ID NO: 1296211 - DNA, 15 bp, Homo sapiens
ctctccccgacttag

SEQ ID NO: 1296212 - DNA, 15 bp, Homo sapiens
gctctccccgactta

SEQ ID NO: 1296213 - DNA, 15 bp, Homo sapiens
agctctccccgactt

SEQ ID NO: 1296214 - DNA, 15 bp, Homo sapiens
cagctctccccgact

SEQ ID NO: 1296215 - DNA, 15 bp, Homo sapiens
acagctctccccgac

SEQ ID NO: 1296216 - DNA, 15 bp, Homo sapiens
gacagctctccccga

SEQ ID NO: 1296217 - DNA, 15 bp, Homo sapiens
tgacagctctccccg

SEQ ID NO: 1296218 - DNA, 15 bp, Homo sapiens
atgacagctctcccc

SEQ ID NO: 1296219 - DNA, 15 bp, Homo sapiens
aatgacagctctccc

SEQ ID NO: 1296220 - DNA, 15 bp, Homo sapiens
aaatgacagctctcc

SEQ ID NO: 1296221 - DNA, 15 bp, Homo sapiens
aaaatgacagctctc

SEQ ID NO: 1296222 - DNA, 15 bp, Homo sapiens
gaaaatgacagctct

SEQ ID NO: 1296223 - DNA, 15 bp, Homo sapiens
agaaaatgacagctc

SEQ ID NO: 1296224 - DNA, 15 bp, Homo sapiens
cagaaaatgacagct

SEQ ID NO: 1296225 - DNA, 15 bp, Homo sapiens
tcagaaaatgacagc

SEQ ID NO: 1296226 - DNA, 15 bp, Homo sapiens
ttcagaaaatgacag

SEQ ID NO: 1296227 - DNA, 15 bp, Homo sapiens
attcagaaaatgaca

SEQ ID NO: 1296228 - DNA, 15 bp, Homo sapiens
aattcagaaaatgac

SEQ ID NO: 1296229 - DNA, 15 bp, Homo sapiens
taattcagaaaatga

SEQ ID NO: 1296230 - DNA, 15 bp, Homo sapiens
ataattcagaaaatg

SEQ ID NO: 1296231 - DNA, 15 bp, Homo sapiens
gataattcagaaaat

SEQ ID NO: 1296232 - DNA, 15 bp, Homo sapiens
tgataattcagaaaa

SEQ ID NO: 1296233 - DNA, 15 bp, Homo sapiens
ttgataattcagaaa

SEQ ID NO: 1296234 - DNA, 15 bp, Homo sapiens
gttgataattcagaa

SEQ ID NO: 1296235 - DNA, 15 bp, Homo sapiens
ggttgataattcaga

SEQ ID NO: 1296236 - DNA, 15 bp, Homo sapiens
tggttgataattcag

SEQ ID NO: 1296237 - DNA, 15 bp, Homo sapiens
ctggttgataattca

SEQ ID NO: 1296238 - DNA, 15 bp, Homo sapiens
actggttgataattc

SEQ ID NO: 1296239 - DNA, 15 bp, Homo sapiens
aactggttgataatt

SEQ ID NO: 1296240 - DNA, 15 bp, Homo sapiens
aaactggttgataat

SEQ ID NO: 1296241 - DNA, 15 bp, Homo sapiens
taaactggttgataa

SEQ ID NO: 1296242 - DNA, 15 bp, Homo sapiens
gtaaactggttgata

SEQ ID NO: 1296243 - DNA, 15 bp, Homo sapiens
tgtaaactggttgat

SEQ ID NO: 1296244 - DNA, 15 bp, Homo sapiens
ttgtaaactggttga

SEQ ID NO: 1296245 - DNA, 15 bp, Homo sapiens
cttgtaaactggttg

SEQ ID NO: 1296246 - DNA, 15 bp, Homo sapiens
ccttgtaaactggtt

SEQ ID NO: 1296247 - DNA, 15 bp, Homo sapiens
accttgtaaactggt

SEQ ID NO: 1296248 - DNA, 15 bp, Homo sapiens
caccttgtaaactgg

SEQ ID NO: 1296249 - DNA, 15 bp, Homo sapiens
ccaccttgtaaactg

SEQ ID NO: 1296250 - DNA, 15 bp, Homo sapiens
gccaccttgtaaact

SEQ ID NO: 1296251 - DNA, 15 bp, Homo sapiens
tgccaccttgtaaac

SEQ ID NO: 1296252 - DNA, 15 bp, Homo sapiens
atgccaccttgtaaa

SEQ ID NO: 1296253 - DNA, 15 bp, Homo sapiens
gatgccaccttgtaa

SEQ ID NO: 1296254 - DNA, 15 bp, Homo sapiens
agatgccaccttgta

SEQ ID NO: 1296255 - DNA, 15 bp, Homo sapiens
tagatgccaccttgt

SEQ ID NO: 1296256 - DNA, 15 bp, Homo sapiens
atagatgccaccttg

SEQ ID NO: 1296257 - DNA, 15 bp, Homo sapiens
tatagatgccacctt

SEQ ID NO: 1296258 - DNA, 15 bp, Homo sapiens
atatagatgccacct

SEQ ID NO: 1296259 - DNA, 15 bp, Homo sapiens
aatatagatgccacc

SEQ ID NO: 1296260 - DNA, 15 bp, Homo sapiens
aaatatagatgccac

SEQ ID NO: 1296261 - DNA, 15 bp, Homo sapiens
aaaatatagatgcca

SEQ ID NO: 1296262 - DNA, 15 bp, Homo sapiens
caaaatatagatgcc

SEQ ID NO: 1296263 - DNA, 15 bp, Homo sapiens
gcaaaatatagatgc

SEQ ID NO: 1296264 - DNA, 15 bp, Homo sapiens
ggcaaaatatagatg

SEQ ID NO: 1296265 - DNA, 15 bp, Homo sapiens
aggcaaaatatagat

SEQ ID NO: 1296266 - DNA, 15 bp, Homo sapiens
gaggcaaaatataga

SEQ ID NO: 1296267 - DNA, 15 bp, Homo sapiens
agaggcaaaatatag

SEQ ID NO: 1296268 - DNA, 15 bp, Homo sapiens
tagaggcaaaatata

SEQ ID NO: 1296269 - DNA, 15 bp, Homo sapiens
ttagaggcaaaatat

SEQ ID NO: 1296270 - DNA, 15 bp, Homo sapiens
attagaggcaaaata

SEQ ID NO: 1296271 - DNA, 15 bp, Homo sapiens
cattagaggcaaaat

SEQ ID NO: 1296272 - DNA, 15 bp, Homo sapiens
acattagaggcaaaa

SEQ ID NO: 1296273 - DNA, 15 bp, Homo sapiens
cacattagaggcaaa

SEQ ID NO: 1296274 - DNA, 15 bp, Homo sapiens
acacattagaggcaa

SEQ ID NO: 1296275 - DNA, 15 bp, Homo sapiens
gacacattagaggca

SEQ ID NO: 1296276 - DNA, 15 bp, Homo sapiens
agacacattagaggc

SEQ ID NO: 1296277 - DNA, 15 bp, Homo sapiens
cagacacattagagg

SEQ ID NO: 1296278 - DNA, 15 bp, Homo sapiens
acagacacattagag

SEQ ID NO: 1296279 - DNA, 15 bp, Homo sapiens
tacagacacattaga

SEQ ID NO: 1296280 - DNA, 15 bp, Homo sapiens
gtacagacacattag

SEQ ID NO: 1296281 - DNA, 15 bp, Homo sapiens
agtacagacacatta

SEQ ID NO: 1296282 - DNA, 15 bp, Homo sapiens
aagtacagacacatt

SEQ ID NO: 1296283 - DNA, 15 bp, Homo sapiens
aaagtacagacacat

SEQ ID NO: 1296284 - DNA, 15 bp, Homo sapiens
aaaagtacagacaca

SEQ ID NO: 1296285 - DNA, 15 bp, Homo sapiens
caaaagtacagacac

SEQ ID NO: 1296286 - DNA, 15 bp, Homo sapiens
acaaaagtacagaca

SEQ ID NO: 1296287 - DNA, 15 bp, Homo sapiens
aacaaaagtacagac

SEQ ID NO: 1296288 - DNA, 15 bp, Homo sapiens
caacaaaagtacaga

SEQ ID NO: 1296289 - DNA, 15 bp, Homo sapiens
gcaacaaaagtacag

SEQ ID NO: 1296290 - DNA, 15 bp, Homo sapiens
agcaacaaaagtaca

SEQ ID NO: 1296291 - DNA, 15 bp, Homo sapiens
aagcaacaaaagtac

SEQ ID NO: 1296292 - DNA, 15 bp, Homo sapiens
gaagcaacaaaagta

SEQ ID NO: 1296293 - DNA, 15 bp, Homo sapiens
agaagcaacaaaagt

SEQ ID NO: 1296294 - DNA, 15 bp, Homo sapiens
gagaagcaacaaaag

SEQ ID NO: 1296295 - DNA, 15 bp, Homo sapiens
agagaagcaacaaaa

SEQ ID NO: 1296296 - DNA, 15 bp, Homo sapiens
tagagaagcaacaaa

SEQ ID NO: 1296297 - DNA, 15 bp, Homo sapiens
atagagaagcaacaa

SEQ ID NO: 1296298 - DNA, 15 bp, Homo sapiens
gatagagaagcaaca

SEQ ID NO: 1296299 - DNA, 15 bp, Homo sapiens
agatagagaagcaac

SEQ ID NO: 1296300 - DNA, 15 bp, Homo sapiens
aagatagagaagcaa

SEQ ID NO: 1296301 - DNA, 15 bp, Homo sapiens
gaagatagagaagca

SEQ ID NO: 1296302 - DNA, 15 bp, Homo sapiens
tgaagatagagaagc

SEQ ID NO: 1296303 - DNA, 15 bp, Homo sapiens
atgaagatagagaag

SEQ ID NO: 1296304 - DNA, 15 bp, Homo sapiens
tatgaagatagagaa

SEQ ID NO: 1296305 - DNA, 15 bp, Homo sapiens
atatgaagatagaga

SEQ ID NO: 1296306 - DNA, 15 bp, Homo sapiens
gatatgaagatagag

SEQ ID NO: 1296307 - DNA, 15 bp, Homo sapiens
tgatatgaagataga

SEQ ID NO: 1296308 - DNA, 15 bp, Homo sapiens
atgatatgaagatag

SEQ ID NO: 1296309 - DNA, 15 bp, Homo sapiens
gatgatatgaagata

SEQ ID NO: 1296310 - DNA, 15 bp, Homo sapiens
ggatgatatgaagat

SEQ ID NO: 1296311 - DNA, 15 bp, Homo sapiens
aggatgatatgaaga

SEQ ID NO: 1296312 - DNA, 15 bp, Homo sapiens
gaggatgatatgaag

SEQ ID NO: 1296313 - DNA, 15 bp, Homo sapiens
agaggatgatatgaa

SEQ ID NO: 1296314 - DNA, 15 bp, Homo sapiens
gagaggatgatatga

SEQ ID NO: 1296315 - DNA, 15 bp, Homo sapiens
ggagaggatgatatg

SEQ ID NO: 1296316 - DNA, 15 bp, Homo sapiens
gggagaggatgatat

SEQ ID NO: 1296317 - DNA, 15 bp, Homo sapiens
agggagaggatgata

SEQ ID NO: 1296318 - DNA, 15 bp, Homo sapiens
tagggagaggatgat

SEQ ID NO: 1296319 - DNA, 15 bp, Homo sapiens
ctagggagaggatga

SEQ ID NO: 1296320 - DNA, 15 bp, Homo sapiens
actagggagaggatg

SEQ ID NO: 1296321 - DNA, 15 bp, Homo sapiens
tactagggagaggat

SEQ ID NO: 1296322 - DNA, 15 bp, Homo sapiens
ctactagggagagga

SEQ ID NO: 1296323 - DNA, 15 bp, Homo sapiens
tctactagggagagg

SEQ ID NO: 1296324 - DNA, 15 bp, Homo sapiens
atctactagggagag

SEQ ID NO: 1296325 - DNA, 15 bp, Homo sapiens
catctactagggaga

SEQ ID NO: 1296326 - DNA, 15 bp, Homo sapiens
acatctactagggag

SEQ ID NO: 1296327 - DNA, 15 bp, Homo sapiens
aacatctactaggga

SEQ ID NO: 1296328 - DNA, 15 bp, Homo sapiens
gaacatctactaggg

SEQ ID NO: 1296329 - DNA, 15 bp, Homo sapiens
agaacatctactagg

SEQ ID NO: 1296330 - DNA, 15 bp, Homo sapiens
tagaacatctactag

SEQ ID NO: 1296331 - DNA, 15 bp, Homo sapiens
gtagaacatctacta

SEQ ID NO: 1296332 - DNA, 15 bp, Homo sapiens
tgtagaacatctact

SEQ ID NO: 1296333 - DNA, 15 bp, Homo sapiens
ctgtagaacatctac

SEQ ID NO: 1296334 - DNA, 15 bp, Homo sapiens
actgtagaacatcta

SEQ ID NO: 1296335 - DNA, 15 bp, Homo sapiens
tactgtagaacatct

SEQ ID NO: 1296336 - DNA, 15 bp, Homo sapiens
gtactgtagaacatc

SEQ ID NO: 1296337 - DNA, 15 bp, Homo sapiens
agtactgtagaacat

SEQ ID NO: 1296338 - DNA, 15 bp, Homo sapiens
cagtactgtagaaca

SEQ ID NO: 1296339 - DNA, 15 bp, Homo sapiens
gcagtactgtagaac

SEQ ID NO: 1296340 - DNA, 15 bp, Homo sapiens
ggcagtactgtagaa

SEQ ID NO: 1296341 - DNA, 15 bp, Homo sapiens
gggcagtactgtaga

SEQ ID NO: 1296342 - DNA, 15 bp, Homo sapiens
tgggcagtactgtag

SEQ ID NO: 1296343 - DNA, 15 bp, Homo sapiens
ctgggcagtactgta

SEQ ID NO: 1296344 - DNA, 15 bp, Homo sapiens
tctgggcagtactgt

SEQ ID NO: 1296345 - DNA, 15 bp, Homo sapiens
ctctgggcagtactg

SEQ ID NO: 1296346 - DNA, 15 bp, Homo sapiens
cctctgggcagtact

SEQ ID NO: 1296347 - DNA, 15 bp, Homo sapiens
ccctctgggcagtac

SEQ ID NO: 1296348 - DNA, 15 bp, Homo sapiens
tccctctgggcagta

SEQ ID NO: 1296349 - DNA, 15 bp, Homo sapiens
ctccctctgggcagt

SEQ ID NO: 1296350 - DNA, 15 bp, Homo sapiens
actccctctgggcag

SEQ ID NO: 1296351 - DNA, 15 bp, Homo sapiens
cactccctctgggca

SEQ ID NO: 1296352 - DNA, 15 bp, Homo sapiens
ccactccctctgggc

SEQ ID NO: 1296353 - DNA, 15 bp, Homo sapiens
accactccctctggg

SEQ ID NO: 1296354 - DNA, 15 bp, Homo sapiens
taccactccctctgg

SEQ ID NO: 1296355 - DNA, 15 bp, Homo sapiens
ttaccactccctctg

SEQ ID NO: 1296356 - DNA, 15 bp, Homo sapiens
cttaccactccctct

SEQ ID NO: 1296357 - DNA, 15 bp, Homo sapiens
tcttaccactccctc

SEQ ID NO: 1296358 - DNA, 15 bp, Homo sapiens
ttcttaccactccct

SEQ ID NO: 1296359 - DNA, 15 bp, Homo sapiens
tttcttaccactccc

SEQ ID NO: 1296360 - DNA, 15 bp, Homo sapiens
atttcttaccactcc

SEQ ID NO: 1296361 - DNA, 15 bp, Homo sapiens
catttcttaccactc

SEQ ID NO: 1296362 - DNA, 15 bp, Homo sapiens
acatttcttaccact

SEQ ID NO: 1296363 - DNA, 15 bp, Homo sapiens
gacatttcttaccac

SEQ ID NO: 1296364 - DNA, 15 bp, Homo sapiens
agacatttcttacca

SEQ ID NO: 1296365 - DNA, 15 bp, Homo sapiens
aagacatttcttacc

SEQ ID NO: 1296366 - DNA, 15 bp, Homo sapiens
aaagacatttcttac

SEQ ID NO: 1296367 - DNA, 15 bp, Homo sapiens
aaaagacatttctta

SEQ ID NO: 1296368 - DNA, 15 bp, Homo sapiens
caaaagacatttctt

SEQ ID NO: 1296369 - DNA, 15 bp, Homo sapiens
tcaaaagacatttct

SEQ ID NO: 1296370 - DNA, 15 bp, Homo sapiens
atcaaaagacatttc

SEQ ID NO: 1296371 - DNA, 15 bp, Homo sapiens
tatcaaaagacattt

SEQ ID NO: 1296372 - DNA, 15 bp, Homo sapiens
ttatcaaaagacatt

SEQ ID NO: 1296373 - DNA, 15 bp, Homo sapiens
tttatcaaaagacat

SEQ ID NO: 1296374 - DNA, 15 bp, Homo sapiens
ttttatcaaaagaca

SEQ ID NO: 1296375 - DNA, 15 bp, Homo sapiens
gttttatcaaaagac

SEQ ID NO: 1296376 - DNA, 15 bp, Homo sapiens
ggttttatcaaaaga

SEQ ID NO: 1296377 - DNA, 15 bp, Homo sapiens
aggttttatcaaaag

SEQ ID NO: 1296378 - DNA, 15 bp, Homo sapiens
aaggttttatcaaaa

SEQ ID NO: 1296379 - DNA, 15 bp, Homo sapiens
taaggttttatcaaa

SEQ ID NO: 1296380 - DNA, 15 bp, Homo sapiens
ttaaggttttatcaa

SEQ ID NO: 1296381 - DNA, 15 bp, Homo sapiens
tttaaggttttatca

SEQ ID NO: 1296382 - DNA, 15 bp, Homo sapiens
ttttaaggttttatc

SEQ ID NO: 1296383 - DNA, 15 bp, Homo sapiens
cttttaaggttttat

SEQ ID NO: 1296384 - DNA, 15 bp, Homo sapiens
gcttttaaggtttta

SEQ ID NO: 1296385 - DNA, 15 bp, Homo sapiens
agcttttaaggtttt

SEQ ID NO: 1296386 - DNA, 15 bp, Homo sapiens
aagcttttaaggttt

SEQ ID NO: 1296387 - DNA, 15 bp, Homo sapiens
taagcttttaaggtt

SEQ ID NO: 1296388 - DNA, 15 bp, Homo sapiens
ttaagcttttaaggt

SEQ ID NO: 1296389 - DNA, 15 bp, Homo sapiens
tttaagcttttaagg

SEQ ID NO: 1296390 - DNA, 15 bp, Homo sapiens
ttttaagcttttaag

SEQ ID NO: 1296391 - DNA, 15 bp, Homo sapiens
gttttaagcttttaa

SEQ ID NO: 1296392 - DNA, 15 bp, Homo sapiens
agttttaagctttta

SEQ ID NO: 1296393 - DNA, 15 bp, Homo sapiens
aagttttaagctttt

SEQ ID NO: 1296394 - DNA, 15 bp, Homo sapiens
gaagttttaagcttt

SEQ ID NO: 1296395 - DNA, 15 bp, Homo sapiens
ggaagttttaagctt

SEQ ID NO: 1296396 - DNA, 15 bp, Homo sapiens
tggaagttttaagct

SEQ ID NO: 1296397 - DNA, 15 bp, Homo sapiens
ctggaagttttaagc

SEQ ID NO: 1296398 - DNA, 15 bp, Homo sapiens
actggaagttttaag

SEQ ID NO: 1296399 - DNA, 15 bp, Homo sapiens
gactggaagttttaa

SEQ ID NO: 1296400 - DNA, 15 bp, Homo sapiens
tgactggaagtttta

SEQ ID NO: 1296401 - DNA, 15 bp, Homo sapiens
gtgactggaagtttt

SEQ ID NO: 1296402 - DNA, 15 bp, Homo sapiens
agtgactggaagttt

SEQ ID NO: 1296403 - DNA, 15 bp, Homo sapiens
aagtgactggaagtt

SEQ ID NO: 1296404 - DNA, 15 bp, Homo sapiens
aaagtgactggaagt

SEQ ID NO: 1296405 - DNA, 15 bp, Homo sapiens
gaaagtgactggaag

SEQ ID NO: 1296406 - DNA, 15 bp, Homo sapiens
agaaagtgactggaa

SEQ ID NO: 1296407 - DNA, 15 bp, Homo sapiens
aagaaagtgactgga

SEQ ID NO: 1296408 - DNA, 15 bp, Homo sapiens
aaagaaagtgactgg

SEQ ID NO: 1296409 - DNA, 15 bp, Homo sapiens
aaaagaaagtgactg

SEQ ID NO: 1296410 - DNA, 15 bp, Homo sapiens
caaaagaaagtgact

SEQ ID NO: 1296411 - DNA, 15 bp, Homo sapiens
gcaaaagaaagtgac

SEQ ID NO: 1296412 - DNA, 15 bp, Homo sapiens
tgcaaaagaaagtga

SEQ ID NO: 1296413 - DNA, 15 bp, Homo sapiens
atgcaaaagaaagtg

SEQ ID NO: 1296414 - DNA, 15 bp, Homo sapiens
tatgcaaaagaaagt

SEQ ID NO: 1296415 - DNA, 15 bp, Homo sapiens
atatgcaaaagaaag

SEQ ID NO: 1296416 - DNA, 15 bp, Homo sapiens
aatatgcaaaagaaa

SEQ ID NO: 1296417 - DNA, 15 bp, Homo sapiens
gaatatgcaaaagaa

SEQ ID NO: 1296418 - DNA, 15 bp, Homo sapiens
ggaatatgcaaaaga

SEQ ID NO: 1296419 - DNA, 15 bp, Homo sapiens
aggaatatgcaaaag

SEQ ID NO: 1296420 - DNA, 15 bp, Homo sapiens
aaggaatatgcaaaa

SEQ ID NO: 1296421 - DNA, 15 bp, Homo sapiens
taaggaatatgcaaa

SEQ ID NO: 1296422 - DNA, 15 bp, Homo sapiens
ctaaggaatatgcaa

SEQ ID NO: 1296423 - DNA, 15 bp, Homo sapiens
tctaaggaatatgca

SEQ ID NO: 1296424 - DNA, 15 bp, Homo sapiens
gtctaaggaatatgc

SEQ ID NO: 1296425 - DNA, 15 bp, Homo sapiens
ggtctaaggaatatg

SEQ ID NO: 1296426 - DNA, 15 bp, Homo sapiens
gggtctaaggaatat

SEQ ID NO: 1296427 - DNA, 15 bp, Homo sapiens
agggtctaaggaata

SEQ ID NO: 1296428 - DNA, 15 bp, Homo sapiens
cagggtctaaggaat

SEQ ID NO: 1296429 - DNA, 15 bp, Homo sapiens
ccagggtctaaggaa

SEQ ID NO: 1296430 - DNA, 15 bp, Homo sapiens
gccagggtctaagga

SEQ ID NO: 1296431 - DNA, 15 bp, Homo sapiens
ggccagggtctaagg

SEQ ID NO: 1296432 - DNA, 15 bp, Homo sapiens
tggccagggtctaag

SEQ ID NO: 1296433 - DNA, 15 bp, Homo sapiens
atggccagggtctaa

SEQ ID NO: 1296434 - DNA, 15 bp, Homo sapiens
tatggccagggtcta

SEQ ID NO: 1296435 - DNA, 15 bp, Homo sapiens
ctatggccagggtct

SEQ ID NO: 1296436 - DNA, 15 bp, Homo sapiens
cctatggccagggtc

SEQ ID NO: 1296437 - DNA, 15 bp, Homo sapiens
gcctatggccagggt

SEQ ID NO: 1296438 - DNA, 15 bp, Homo sapiens
ggcctatggccaggg

SEQ ID NO: 1296439 - DNA, 15 bp, Homo sapiens
tggcctatggccagg

SEQ ID NO: 1296440 - DNA, 15 bp, Homo sapiens
ctggcctatggccag

SEQ ID NO: 1296441 - DNA, 15 bp, Homo sapiens
actggcctatggcca

SEQ ID NO: 1296442 - DNA, 15 bp, Homo sapiens
cactggcctatggcc

SEQ ID NO: 1296443 - DNA, 15 bp, Homo sapiens
gcactggcctatggc

SEQ ID NO: 1296444 - DNA, 15 bp, Homo sapiens
agcactggcctatgg

SEQ ID NO: 1296445 - DNA, 15 bp, Homo sapiens
gagcactggcctatg

SEQ ID NO: 1296446 - DNA, 15 bp, Homo sapiens
gtgagcactggccta

SEQ ID NO: 1296447 - DNA, 15 bp, Homo sapiens
agtgagcactggcct

SEQ ID NO: 1296448 - DNA, 15 bp, Homo sapiens
tagtgagcactggcc

SEQ ID NO: 1296449 - DNA, 15 bp, Homo sapiens
gtagtgagcactggc

SEQ ID NO: 1296450 - DNA, 15 bp, Homo sapiens
tgtagtgagcactgg

SEQ ID NO: 1296451 - DNA, 15 bp, Homo sapiens
ctgtagtgagcactg

SEQ ID NO: 1296452 - DNA, 15 bp, Homo sapiens
tctgtagtgagcact

SEQ ID NO: 1296453 - DNA, 15 bp, Homo sapiens
ttctgtagtgagcac

SEQ ID NO: 1296454 - DNA, 15 bp, Homo sapiens
cttctgtagtgagca

SEQ ID NO: 1296455 - DNA, 15 bp, Homo sapiens
ccttctgtagtgagc

SEQ ID NO: 1296456 - DNA, 15 bp, Homo sapiens
tccttctgtagtgag

SEQ ID NO: 1296457 - DNA, 15 bp, Homo sapiens
ctccttctgtagtga

SEQ ID NO: 1296458 - DNA, 15 bp, Homo sapiens
gctccttctgtagtg

SEQ ID NO: 1296459 - DNA, 15 bp, Homo sapiens
tgctccttctgtagt

SEQ ID NO: 1296460 - DNA, 15 bp, Homo sapiens
ctgctccttctgtag

SEQ ID NO: 1296461 - DNA, 15 bp, Homo sapiens
actgctccttctgta

SEQ ID NO: 1296462 - DNA, 15 bp, Homo sapiens
cactgctccttctgt

SEQ ID NO: 1296463 - DNA, 15 bp, Homo sapiens
acactgctccttctg

SEQ ID NO: 1296464 - DNA, 15 bp, Homo sapiens
aacactgctccttct

SEQ ID NO: 1296465 - DNA, 15 bp, Homo sapiens
aaacactgctccttc

SEQ ID NO: 1296466 - DNA, 15 bp, Homo sapiens
caaacactgctcctt

SEQ ID NO: 1296467 - DNA, 15 bp, Homo sapiens
acaaacactgctcct

SEQ ID NO: 1296468 - DNA, 15 bp, Homo sapiens
aacaaacactgctcc

SEQ ID NO: 1296469 - DNA, 15 bp, Homo sapiens
aaacaaacactgctc

SEQ ID NO: 1296470 - DNA, 15 bp, Homo sapiens
aaaacaaacactgct

SEQ ID NO: 1296471 - DNA, 15 bp, Homo sapiens
caaaacaaacactgc

SEQ ID NO: 1296472 - DNA, 15 bp, Homo sapiens
acaaaacaaacactg

SEQ ID NO: 1296473 - DNA, 15 bp, Homo sapiens
aacaaaacaaacact

SEQ ID NO: 1296474 - DNA, 15 bp, Homo sapiens
taacaaaacaaacac

SEQ ID NO: 1296475 - DNA, 15 bp, Homo sapiens
ttaacaaaacaaaca

SEQ ID NO: 1296476 - DNA, 15 bp, Homo sapiens
gttaacaaaacaaac

SEQ ID NO: 1296477 - DNA, 15 bp, Homo sapiens
tgttaacaaaacaaa

SEQ ID NO: 1296478 - DNA, 15 bp, Homo sapiens
gtgttaacaaaacaa

SEQ ID NO: 1296479 - DNA, 15 bp, Homo sapiens
tgtgttaacaaaaca

SEQ ID NO: 1296480 - DNA, 15 bp, Homo sapiens
gtgtgttaacaaaac

SEQ ID NO: 1296481 - DNA, 15 bp, Homo sapiens
tgtgtgttaacaaaa

SEQ ID NO: 1296482 - DNA, 15 bp, Homo sapiens
gtgtgtgttaacaaa

SEQ ID NO: 1296483 - DNA, 15 bp, Homo sapiens
tgtgtgtgttaacaa

SEQ ID NO: 1296484 - DNA, 15 bp, Homo sapiens
gtgtgtgtgttaaca

SEQ ID NO: 1296485 - DNA, 15 bp, Homo sapiens
tgtgtgtgtgttaac

SEQ ID NO: 1296486 - DNA, 15 bp, Homo sapiens
gtgtgtgtgtgttaa

SEQ ID NO: 1296487 - DNA, 15 bp, Homo sapiens
ttgtgtgtgtgtgtt

SEQ ID NO: 1296488 - DNA, 15 bp, Homo sapiens
cagggtgtgtgtgtg

SEQ ID NO: 1296489 - DNA, 15 bp, Homo sapiens
acagggtgtgtgtgt

SEQ ID NO: 1296490 - DNA, 15 bp, Homo sapiens
tacagggtgtgtgtg

SEQ ID NO: 1296491 - DNA, 15 bp, Homo sapiens
gtacagggtgtgtgt

SEQ ID NO: 1296492 - DNA, 15 bp, Homo sapiens
agtacagggtgtgtg

SEQ ID NO: 1296493 - DNA, 15 bp, Homo sapiens
cagtacagggtgtgt

SEQ ID NO: 1296494 - DNA, 15 bp, Homo sapiens
gcagtacagggtgtg

SEQ ID NO: 1296495 - DNA, 15 bp, Homo sapiens
tgcagtacagggtgt

SEQ ID NO: 1296496 - DNA, 15 bp, Homo sapiens
ttgcagtacagggtg

SEQ ID NO: 1296497 - DNA, 15 bp, Homo sapiens
cttgcagtacagggt

SEQ ID NO: 1296498 - DNA, 15 bp, Homo sapiens
tcttgcagtacaggg

SEQ ID NO: 1296499 - DNA, 15 bp, Homo sapiens
atcttgcagtacagg

SEQ ID NO: 1296500 - DNA, 15 bp, Homo sapiens
gatcttgcagtacag

SEQ ID NO: 1296501 - DNA, 15 bp, Homo sapiens
ggatcttgcagtaca

SEQ ID NO: 1296502 - DNA, 15 bp, Homo sapiens
aggatcttgcagtac

SEQ ID NO: 1296503 - DNA, 15 bp, Homo sapiens
taggatcttgcagta

SEQ ID NO: 1296504 - DNA, 15 bp, Homo sapiens
ttaggatcttgcagt

SEQ ID NO: 1296505 - DNA, 15 bp, Homo sapiens
tttaggatcttgcag

SEQ ID NO: 1296506 - DNA, 15 bp, Homo sapiens
atttaggatcttgca

SEQ ID NO: 1296507 - DNA, 15 bp, Homo sapiens
aatttaggatcttgc

SEQ ID NO: 1296508 - DNA, 15 bp, Homo sapiens
aaatttaggatcttg

SEQ ID NO: 1296509 - DNA, 15 bp, Homo sapiens
aaaatttaggatctt

SEQ ID NO: 1296510 - DNA, 15 bp, Homo sapiens
taaaatttaggatct

SEQ ID NO: 1296511 - DNA, 15 bp, Homo sapiens
ctaaaatttaggatc

SEQ ID NO: 1296512 - DNA, 15 bp, Homo sapiens
tctaaaatttaggat

SEQ ID NO: 1296513 - DNA, 15 bp, Homo sapiens
gtctaaaatttagga

SEQ ID NO: 1296514 - DNA, 15 bp, Homo sapiens
agtctaaaatttagg

SEQ ID NO: 1296515 - DNA, 15 bp, Homo sapiens
aagtctaaaatttag

SEQ ID NO: 1296516 - DNA, 15 bp, Homo sapiens
taagtctaaaattta

SEQ ID NO: 1296517 - DNA, 15 bp, Homo sapiens
ctaagtctaaaattt

SEQ ID NO: 1296518 - DNA, 15 bp, Homo sapiens
actaagtctaaaatt

SEQ ID NO: 1296519 - DNA, 15 bp, Homo sapiens
aactaagtctaaaat

SEQ ID NO: 1296520 - DNA, 15 bp, Homo sapiens
gaactaagtctaaaa

SEQ ID NO: 1296521 - DNA, 15 bp, Homo sapiens
tgaactaagtctaaa

SEQ ID NO: 1296522 - DNA, 15 bp, Homo sapiens
gtgaactaagtctaa

SEQ ID NO: 1296523 - DNA, 15 bp, Homo sapiens
agtgaactaagtcta

SEQ ID NO: 1296524 - DNA, 15 bp, Homo sapiens
cagtgaactaagtct

SEQ ID NO: 1296525 - DNA, 15 bp, Homo sapiens
acagtgaactaagtc

SEQ ID NO: 1296526 - DNA, 15 bp, Homo sapiens
aacagtgaactaagt

SEQ ID NO: 1296527 - DNA, 15 bp, Homo sapiens
aaacagtgaactaag

SEQ ID NO: 1296528 - DNA, 15 bp, Homo sapiens
aaaacagtgaactaa

SEQ ID NO: 1296529 - DNA, 15 bp, Homo sapiens
taaaacagtgaacta

SEQ ID NO: 1296530 - DNA, 15 bp, Homo sapiens
ataaaacagtgaact

SEQ ID NO: 1296531 - DNA, 15 bp, Homo sapiens
tataaaacagtgaac

SEQ ID NO: 1296532 - DNA, 15 bp, Homo sapiens
atataaaacagtgaa

SEQ ID NO: 1296533 - DNA, 15 bp, Homo sapiens
catataaaacagtga

SEQ ID NO: 1296534 - DNA, 15 bp, Homo sapiens
ccatataaaacagtg

SEQ ID NO: 1296535 - DNA, 15 bp, Homo sapiens
accatataaaacagt

SEQ ID NO: 1296536 - DNA, 15 bp, Homo sapiens
taccatataaaacag

SEQ ID NO: 1296537 - DNA, 15 bp, Homo sapiens
ctaccatataaaaca

SEQ ID NO: 1296538 - DNA, 15 bp, Homo sapiens
gctaccatataaaac

SEQ ID NO: 1296539 - DNA, 15 bp, Homo sapiens
ggctaccatataaaa

SEQ ID NO: 1296540 - DNA, 15 bp, Homo sapiens
tggctaccatataaa

SEQ ID NO: 1296541 - DNA, 15 bp, Homo sapiens
gtggctaccatataa

SEQ ID NO: 1296542 - DNA, 15 bp, Homo sapiens
agtggctaccatata

SEQ ID NO: 1296543 - DNA, 15 bp, Homo sapiens
ctagtggctaccata

SEQ ID NO: 1296544 - DNA, 15 bp, Homo sapiens
tctagtggctaccat

SEQ ID NO: 1296545 - DNA, 15 bp, Homo sapiens
gtctagtggctacca

SEQ ID NO: 1296546 - DNA, 15 bp, Homo sapiens
tgtctagtggctacc

SEQ ID NO: 1296547 - DNA, 15 bp, Homo sapiens
gtgtctagtggctac

SEQ ID NO: 1296548 - DNA, 15 bp, Homo sapiens
cgtgtctagtggcta

SEQ ID NO: 1296549 - DNA, 15 bp, Homo sapiens
tcgtgtctagtggct

SEQ ID NO: 1296550 - DNA, 15 bp, Homo sapiens
ctcgtgtctagtggc

SEQ ID NO: 1296551 - DNA, 15 bp, Homo sapiens
actcgtgtctagtgg

SEQ ID NO: 1296552 - DNA, 15 bp, Homo sapiens
cactcgtgtctagtg

SEQ ID NO: 1296553 - DNA, 15 bp, Homo sapiens
ccactcgtgtctagt

SEQ ID NO: 1296554 - DNA, 15 bp, Homo sapiens
accactcgtgtctag

SEQ ID NO: 1296555 - DNA, 15 bp, Homo sapiens
aaccactcgtgtcta

SEQ ID NO: 1296556 - DNA, 15 bp, Homo sapiens
caaccactcgtgtct

SEQ ID NO: 1296557 - DNA, 15 bp, Homo sapiens
acaaccactcgtgtc

SEQ ID NO: 1296558 - DNA, 15 bp, Homo sapiens
aacaaccactcgtgt

SEQ ID NO: 1296559 - DNA, 15 bp, Homo sapiens
aaacaaccactcgtg

SEQ ID NO: 1296560 - DNA, 15 bp, Homo sapiens
taaacaaccactcgt

SEQ ID NO: 1296561 - DNA, 15 bp, Homo sapiens
ttaaacaaccactcg

SEQ ID NO: 1296562 - DNA, 15 bp, Homo sapiens
cttaaacaaccactc

SEQ ID NO: 1296563 - DNA, 15 bp, Homo sapiens
acttaaacaaccact

SEQ ID NO: 1296564 - DNA, 15 bp, Homo sapiens
aacttaaacaaccac

SEQ ID NO: 1296565 - DNA, 15 bp, Homo sapiens
aaacttaaacaacca

SEQ ID NO: 1296566 - DNA, 15 bp, Homo sapiens
taaacttaaacaacc

SEQ ID NO: 1296567 - DNA, 15 bp, Homo sapiens
ttaaacttaaacaac

SEQ ID NO: 1296568 - DNA, 15 bp, Homo sapiens
tttaaacttaaacaa

SEQ ID NO: 1296569 - DNA, 15 bp, Homo sapiens
atttaaacttaaaca

SEQ ID NO: 1296570 - DNA, 15 bp, Homo sapiens
catttaaacttaaac

SEQ ID NO: 1296571 - DNA, 15 bp, Homo sapiens
tcatttaaacttaaa

SEQ ID NO: 1296572 - DNA, 15 bp, Homo sapiens
ttcatttaaacttaa

SEQ ID NO: 1296573 - DNA, 15 bp, Homo sapiens
tttcatttaaactta

SEQ ID NO: 1296574 - DNA, 15 bp, Homo sapiens
atttcatttaaactt

SEQ ID NO: 1296575 - DNA, 15 bp, Homo sapiens
aatttcatttaaact

SEQ ID NO: 1296576 - DNA, 15 bp, Homo sapiens
taatttcatttaaac

SEQ ID NO: 1296577 - DNA, 15 bp, Homo sapiens
gtaatttcatttaaa

SEQ ID NO: 1296578 - DNA, 15 bp, Homo sapiens
tgtaatttcatttaa

SEQ ID NO: 1296579 - DNA, 15 bp, Homo sapiens
ctgtaatttcattta

SEQ ID NO: 1296580 - DNA, 15 bp, Homo sapiens
cctgtaatttcattt

SEQ ID NO: 1296581 - DNA, 15 bp, Homo sapiens
acctgtaatttcatt

SEQ ID NO: 1296582 - DNA, 15 bp, Homo sapiens
aacctgtaatttcat

SEQ ID NO: 1296583 - DNA, 15 bp, Homo sapiens
gaacctgtaatttca

SEQ ID NO: 1296584 - DNA, 15 bp, Homo sapiens
tgaacctgtaatttc

SEQ ID NO: 1296585 - DNA, 15 bp, Homo sapiens
ctgaacctgtaattt

SEQ ID NO: 1296586 - DNA, 15 bp, Homo sapiens
actgaacctgtaatt

SEQ ID NO: 1296587 - DNA, 15 bp, Homo sapiens
aactgaacctgtaat

SEQ ID NO: 1296588 - DNA, 15 bp, Homo sapiens
aaactgaacctgtaa

SEQ ID NO: 1296589 - DNA, 15 bp, Homo sapiens
gaaactgaacctgta

SEQ ID NO: 1296590 - DNA, 15 bp, Homo sapiens
agaaactgaacctgt

SEQ ID NO: 1296591 - DNA, 15 bp, Homo sapiens
gagaaactgaacctg

SEQ ID NO: 1296592 - DNA, 15 bp, Homo sapiens
agagaaactgaacct

SEQ ID NO: 1296593 - DNA, 15 bp, Homo sapiens
aagagaaactgaacc

SEQ ID NO: 1296594 - DNA, 15 bp, Homo sapiens
aaagagaaactgaac

SEQ ID NO: 1296595 - DNA, 15 bp, Homo sapiens
caaagagaaactgaa

SEQ ID NO: 1296596 - DNA, 15 bp, Homo sapiens
gcaaagagaaactga

SEQ ID NO: 1296597 - DNA, 15 bp, Homo sapiens
tgcaaagagaaactg

SEQ ID NO: 1296598 - DNA, 15 bp, Homo sapiens
atgcaaagagaaact

SEQ ID NO: 1296599 - DNA, 15 bp, Homo sapiens
aatgcaaagagaaac

SEQ ID NO: 1296600 - DNA, 15 bp, Homo sapiens
taatgcaaagagaaa

SEQ ID NO: 1296601 - DNA, 15 bp, Homo sapiens
ctaatgcaaagagaa

SEQ ID NO: 1296602 - DNA, 15 bp, Homo sapiens
gctaatgcaaagaga

SEQ ID NO: 1296603 - DNA, 15 bp, Homo sapiens
ggctaatgcaaagag

SEQ ID NO: 1296604 - DNA, 15 bp, Homo sapiens
tggctaatgcaaaga

SEQ ID NO: 1296605 - DNA, 15 bp, Homo sapiens
gtggctaatgcaaag

SEQ ID NO: 1296606 - DNA, 15 bp, Homo sapiens
ggtggctaatgcaaa

SEQ ID NO: 1296607 - DNA, 15 bp, Homo sapiens
aggtggctaatgcaa

SEQ ID NO: 1296608 - DNA, 15 bp, Homo sapiens
aaggtggctaatgca

SEQ ID NO: 1296609 - DNA, 15 bp, Homo sapiens
aaaggtggctaatgc

SEQ ID NO: 1296610 - DNA, 15 bp, Homo sapiens
aaaaggtggctaatg

SEQ ID NO: 1296611 - DNA, 15 bp, Homo sapiens
caaaaggtggctaat

SEQ ID NO: 1296612 - DNA, 15 bp, Homo sapiens
tcaaaaggtggctaa

SEQ ID NO: 1296613 - DNA, 15 bp, Homo sapiens
ctcaaaaggtggcta

SEQ ID NO: 1296614 - DNA, 15 bp, Homo sapiens
actcaaaaggtggct

SEQ ID NO: 1296615 - DNA, 15 bp, Homo sapiens
tactcaaaaggtggc

SEQ ID NO: 1296616 - DNA, 15 bp, Homo sapiens
gtactcaaaaggtgg

SEQ ID NO: 1296617 - DNA, 15 bp, Homo sapiens
agtactcaaaaggtg

SEQ ID NO: 1296618 - DNA, 15 bp, Homo sapiens
gagtactcaaaaggt

SEQ ID NO: 1296619 - DNA, 15 bp, Homo sapiens
tgagtactcaaaagg

SEQ ID NO: 1296620 - DNA, 15 bp, Homo sapiens
ttgagtactcaaaag

SEQ ID NO: 1296621 - DNA, 15 bp, Homo sapiens
attgagtactcaaaa

SEQ ID NO: 1296622 - DNA, 15 bp, Homo sapiens
tattgagtactcaaa

SEQ ID NO: 1296623 - DNA, 15 bp, Homo sapiens
ctattgagtactcaa

SEQ ID NO: 1296624 - DNA, 15 bp, Homo sapiens
gctattgagtactca

SEQ ID NO: 1296625 - DNA, 15 bp, Homo sapiens
ggctattgagtactc

SEQ ID NO: 1296626 - DNA, 15 bp, Homo sapiens
tggctattgagtact

SEQ ID NO: 1296627 - DNA, 15 bp, Homo sapiens
atggctattgagtac

SEQ ID NO: 1296628 - DNA, 15 bp, Homo sapiens
catggctattgagta

SEQ ID NO: 1296629 - DNA, 15 bp, Homo sapiens
acatggctattgagt

SEQ ID NO: 1296630 - DNA, 15 bp, Homo sapiens
cacatggctattgag

SEQ ID NO: 1296631 - DNA, 15 bp, Homo sapiens
acacatggctattga

SEQ ID NO: 1296632 - DNA, 15 bp, Homo sapiens
cacacatggctattg

SEQ ID NO: 1296633 - DNA, 15 bp, Homo sapiens
ccacacatggctatt

SEQ ID NO: 1296634 - DNA, 15 bp, Homo sapiens
accacacatggctat

SEQ ID NO: 1296635 - DNA, 15 bp, Homo sapiens
aaccacacatggcta

SEQ ID NO: 1296636 - DNA, 15 bp, Homo sapiens
taaccacacatggct

SEQ ID NO: 1296637 - DNA, 15 bp, Homo sapiens
ctaaccacacatggc

SEQ ID NO: 1296638 - DNA, 15 bp, Homo sapiens
actaaccacacatgg

SEQ ID NO: 1296639 - DNA, 15 bp, Homo sapiens
cactaaccacacatg

SEQ ID NO: 1296640 - DNA, 15 bp, Homo sapiens
ccactaaccacacat

SEQ ID NO: 1296641 - DNA, 15 bp, Homo sapiens
gccactaaccacaca

SEQ ID NO: 1296642 - DNA, 15 bp, Homo sapiens
agccactaaccacac

SEQ ID NO: 1296643 - DNA, 15 bp, Homo sapiens
tagccactaaccaca

SEQ ID NO: 1296644 - DNA, 15 bp, Homo sapiens
gtagccactaaccac

SEQ ID NO: 1296645 - DNA, 15 bp, Homo sapiens
ggtagccactaacca

SEQ ID NO: 1296646 - DNA, 15 bp, Homo sapiens
tggtagccactaacc

SEQ ID NO: 1296647 - DNA, 15 bp, Homo sapiens
atggtagccactaac

SEQ ID NO: 1296648 - DNA, 15 bp, Homo sapiens
tatggtagccactaa

SEQ ID NO: 1296649 - DNA, 15 bp, Homo sapiens
aatatggtagccact

SEQ ID NO: 1296650 - DNA, 15 bp, Homo sapiens
caatatggtagccac

SEQ ID NO: 1296651 - DNA, 15 bp, Homo sapiens
ccaatatggtagcca

SEQ ID NO: 1296652 - DNA, 15 bp, Homo sapiens
cccaatatggtagcc

SEQ ID NO: 1296653 - DNA, 15 bp, Homo sapiens
gcccaatatggtagc

SEQ ID NO: 1296654 - DNA, 15 bp, Homo sapiens
tgcccaatatggtag

SEQ ID NO: 1296655 - DNA, 15 bp, Homo sapiens
ctgcccaatatggta

SEQ ID NO: 1296656 - DNA, 15 bp, Homo sapiens
gctgcccaatatggt

SEQ ID NO: 1296657 - DNA, 15 bp, Homo sapiens
tgctgcccaatatgg

SEQ ID NO: 1296658 - DNA, 15 bp, Homo sapiens
gtgctgcccaatatg

SEQ ID NO: 1296659 - DNA, 15 bp, Homo sapiens
tgtgctgcccaatat

SEQ ID NO: 1296660 - DNA, 15 bp, Homo sapiens
ctgtgctgcccaata

SEQ ID NO: 1296661 - DNA, 15 bp, Homo sapiens
tctgtgctgcccaat

SEQ ID NO: 1296662 - DNA, 15 bp, Homo sapiens
atctgtgctgcccaa

SEQ ID NO: 1296663 - DNA, 15 bp, Homo sapiens
tatctgtgctgccca

SEQ ID NO: 1296664 - DNA, 15 bp, Homo sapiens
ctatctgtgctgccc

SEQ ID NO: 1296665 - DNA, 15 bp, Homo sapiens
tctatctgtgctgcc

SEQ ID NO: 1296666 - DNA, 15 bp, Homo sapiens
ctctatctgtgctgc

SEQ ID NO: 1296667 - DNA, 15 bp, Homo sapiens
tctctatctgtgctg

SEQ ID NO: 1296668 - DNA, 15 bp, Homo sapiens
ttctctatctgtgct

SEQ ID NO: 1296669 - DNA, 15 bp, Homo sapiens
gttctctatctgtgc

SEQ ID NO: 1296670 - DNA, 15 bp, Homo sapiens
tgttctctatctgtg

SEQ ID NO: 1296671 - DNA, 15 bp, Homo sapiens
atgttctctatctgt

SEQ ID NO: 1296672 - DNA, 15 bp, Homo sapiens
aatgttctctatctg

SEQ ID NO: 1296673 - DNA, 15 bp, Homo sapiens
aaatgttctctatct

SEQ ID NO: 1296674 - DNA, 15 bp, Homo sapiens
gaaatgttctctatc

SEQ ID NO: 1296675 - DNA, 15 bp, Homo sapiens
ggaaatgttctctat

SEQ ID NO: 1296676 - DNA, 15 bp, Homo sapiens
tggaaatgttctcta

SEQ ID NO: 1296677 - DNA, 15 bp, Homo sapiens
atggaaatgttctct

SEQ ID NO: 1296678 - DNA, 15 bp, Homo sapiens
gatggaaatgttctc

SEQ ID NO: 1296679 - DNA, 15 bp, Homo sapiens
tgatggaaatgttct

SEQ ID NO: 1296680 - DNA, 15 bp, Homo sapiens
ttgatggaaatgttc

SEQ ID NO: 1296681 - DNA, 15 bp, Homo sapiens
attgatggaaatgtt

SEQ ID NO: 1296682 - DNA, 15 bp, Homo sapiens
gattgatggaaatgt

SEQ ID NO: 1296683 - DNA, 15 bp, Homo sapiens
tgattgatggaaatg

SEQ ID NO: 1296684 - DNA, 15 bp, Homo sapiens
gtgattgatggaaat

SEQ ID NO: 1296685 - DNA, 15 bp, Homo sapiens
tgtgattgatggaaa

SEQ ID NO: 1296686 - DNA, 15 bp, Homo sapiens
ttgtgattgatggaa

SEQ ID NO: 1296687 - DNA, 15 bp, Homo sapiens
tttgtgattgatgga

SEQ ID NO: 1296688 - DNA, 15 bp, Homo sapiens
ctttgtgattgatgg

SEQ ID NO: 1296689 - DNA, 15 bp, Homo sapiens
actttgtgattgatg

SEQ ID NO: 1296690 - DNA, 15 bp, Homo sapiens
gactttgtgattgat

SEQ ID NO: 1296691 - DNA, 15 bp, Homo sapiens
tgactttgtgattga

SEQ ID NO: 1296692 - DNA, 15 bp, Homo sapiens
atgactttgtgattg

SEQ ID NO: 1296693 - DNA, 15 bp, Homo sapiens
tatgactttgtgatt

SEQ ID NO: 1296694 - DNA, 15 bp, Homo sapiens
atatgactttgtgat

SEQ ID NO: 1296695 - DNA, 15 bp, Homo sapiens
catatgactttgtga

SEQ ID NO: 1296696 - DNA, 15 bp, Homo sapiens
ccatatgactttgtg

SEQ ID NO: 1296697 - DNA, 15 bp, Homo sapiens
cccatatgactttgt

SEQ ID NO: 1296698 - DNA, 15 bp, Homo sapiens
tcccatatgactttg

SEQ ID NO: 1296699 - DNA, 15 bp, Homo sapiens
gtcccatatgacttt

SEQ ID NO: 1296700 - DNA, 15 bp, Homo sapiens
tgtcccatatgactt

SEQ ID NO: 1296701 - DNA, 15 bp, Homo sapiens
ttgtcccatatgact

SEQ ID NO: 1296702 - DNA, 15 bp, Homo sapiens
gttgtcccatatgac

SEQ ID NO: 1296703 - DNA, 15 bp, Homo sapiens
tgttgtcccatatga

SEQ ID NO: 1296704 - DNA, 15 bp, Homo sapiens
atgttgtcccatatg

SEQ ID NO: 1296705 - DNA, 15 bp, Homo sapiens
aatgttgtcccatat

SEQ ID NO: 1296706 - DNA, 15 bp, Homo sapiens
aaatgttgtcccata

SEQ ID NO: 1296707 - DNA, 15 bp, Homo sapiens
taaatgttgtcccat

SEQ ID NO: 1296708 - DNA, 15 bp, Homo sapiens
gtaaatgttgtccca

SEQ ID NO: 1296709 - DNA, 15 bp, Homo sapiens
ggtaaatgttgtccc

SEQ ID NO: 1296710 - DNA, 15 bp, Homo sapiens
tggtaaatgttgtcc

SEQ ID NO: 1296711 - DNA, 15 bp, Homo sapiens
atggtaaatgttgtc

SEQ ID NO: 1296712 - DNA, 15 bp, Homo sapiens
tatggtaaatgttgt

SEQ ID NO: 1296713 - DNA, 15 bp, Homo sapiens
ttatggtaaatgttg

SEQ ID NO: 1296714 - DNA, 15 bp, Homo sapiens
tttatggtaaatgtt

SEQ ID NO: 1296715 - DNA, 15 bp, Homo sapiens
ctttatggtaaatgt

SEQ ID NO: 1296716 - DNA, 15 bp, Homo sapiens
cctttatggtaaatg

SEQ ID NO: 1296717 - DNA, 15 bp, Homo sapiens
ccctttatggtaaat

SEQ ID NO: 1296718 - DNA, 15 bp, Homo sapiens
cccctttatggtaaa

SEQ ID NO: 1296719 - DNA, 15 bp, Homo sapiens
tcccctttatggtaa

SEQ ID NO: 1296720 - DNA, 15 bp, Homo sapiens
ttcccctttatggta

SEQ ID NO: 1296721 - DNA, 15 bp, Homo sapiens
tttcccctttatggt

SEQ ID NO: 1296722 - DNA, 15 bp, Homo sapiens
ctttcccctttatgg

SEQ ID NO: 1296723 - DNA, 15 bp, Homo sapiens
cctttcccctttatg

SEQ ID NO: 1296724 - DNA, 15 bp, Homo sapiens
ccctttcccctttat

SEQ ID NO: 1296725 - DNA, 15 bp, Homo sapiens
tccctttccccttta

SEQ ID NO: 1296726 - DNA, 15 bp, Homo sapiens
ttccctttccccttt

SEQ ID NO: 1296727 - DNA, 15 bp, Homo sapiens
gttccctttcccctt

SEQ ID NO: 1296728 - DNA, 15 bp, Homo sapiens
ccgttccctttcccc

SEQ ID NO: 1296729 - DNA, 15 bp, Homo sapiens
cccgttccctttccc

SEQ ID NO: 1296730 - DNA, 15 bp, Homo sapiens
tcccgttccctttcc

SEQ ID NO: 1296731 - DNA, 15 bp, Homo sapiens
ttcccgttccctttc

SEQ ID NO: 1296732 - DNA, 15 bp, Homo sapiens
attcccgttcccttt

SEQ ID NO: 1296733 - DNA, 15 bp, Homo sapiens
cattcccgttccctt

SEQ ID NO: 1296734 - DNA, 15 bp, Homo sapiens
ccattcccgttccct

SEQ ID NO: 1296735 - DNA, 15 bp, Homo sapiens
cccattcccgttccc

SEQ ID NO: 1296736 - DNA, 15 bp, Homo sapiens
gcccattcccgttcc

SEQ ID NO: 1296737 - DNA, 15 bp, Homo sapiens
tgcccattcccgttc

SEQ ID NO: 1296738 - DNA, 15 bp, Homo sapiens
gtgcccattcccgtt

SEQ ID NO: 1296739 - DNA, 15 bp, Homo sapiens
tgtgcccattcccgt

SEQ ID NO: 1296740 - DNA, 15 bp, Homo sapiens
atgtgcccattcccg

SEQ ID NO: 1296741 - DNA, 15 bp, Homo sapiens
catgtgcccattccc

SEQ ID NO: 1296742 - DNA, 15 bp, Homo sapiens
tcatgtgcccattcc

SEQ ID NO: 1296743 - DNA, 15 bp, Homo sapiens
ctcatgtgcccattc

SEQ ID NO: 1296744 - DNA, 15 bp, Homo sapiens
actcatgtgcccatt

SEQ ID NO: 1296745 - DNA, 15 bp, Homo sapiens
cactcatgtgcccat

SEQ ID NO: 1296746 - DNA, 15 bp, Homo sapiens
acactcatgtgccca

SEQ ID NO: 1296747 - DNA, 15 bp, Homo sapiens
tacactcatgtgccc

SEQ ID NO: 1296748 - DNA, 15 bp, Homo sapiens
ctacactcatgtgcc

SEQ ID NO: 1296749 - DNA, 15 bp, Homo sapiens
actacactcatgtgc

SEQ ID NO: 1296750 - DNA, 15 bp, Homo sapiens
cactacactcatgtg

SEQ ID NO: 1296751 - DNA, 15 bp, Homo sapiens
acactacactcatgt

SEQ ID NO: 1296752 - DNA, 15 bp, Homo sapiens
aacactacactcatg

SEQ ID NO: 1296753 - DNA, 15 bp, Homo sapiens
gaacactacactcat

SEQ ID NO: 1296754 - DNA, 15 bp, Homo sapiens
tgaacactacactca

SEQ ID NO: 1296755 - DNA, 15 bp, Homo sapiens
ctgaacactacactc

SEQ ID NO: 1296756 - DNA, 15 bp, Homo sapiens
actgaacactacact

SEQ ID NO: 1296757 - DNA, 15 bp, Homo sapiens
aactgaacactacac

SEQ ID NO: 1296758 - DNA, 15 bp, Homo sapiens
taactgaacactaca

SEQ ID NO: 1296759 - DNA, 15 bp, Homo sapiens
ttaactgaacactac

SEQ ID NO: 1296760 - DNA, 15 bp, Homo sapiens
cttaactgaacacta

SEQ ID NO: 1296761 - DNA, 15 bp, Homo sapiens
acttaactgaacact

SEQ ID NO: 1296762 - DNA, 15 bp, Homo sapiens
tacttaactgaacac

SEQ ID NO: 1296763 - DNA, 15 bp, Homo sapiens
ctacttaactgaaca

SEQ ID NO: 1296764 - DNA, 15 bp, Homo sapiens
gctacttaactgaac

SEQ ID NO: 1296765 - DNA, 15 bp, Homo sapiens
tgctacttaactgaa

SEQ ID NO: 1296766 - DNA, 15 bp, Homo sapiens
atgctacttaactga

SEQ ID NO: 1296767 - DNA, 15 bp, Homo sapiens
gatgctacttaactg

SEQ ID NO: 1296768 - DNA, 15 bp, Homo sapiens
tgatgctacttaact

SEQ ID NO: 1296769 - DNA, 15 bp, Homo sapiens
gtgatgctacttaac

SEQ ID NO: 1296770 - DNA, 15 bp, Homo sapiens
cgtgatgctacttaa

SEQ ID NO: 1296771 - DNA, 15 bp, Homo sapiens
ccgtgatgctactta

SEQ ID NO: 1296772 - DNA, 15 bp, Homo sapiens
cccgtgatgctactt

SEQ ID NO: 1296773 - DNA, 15 bp, Homo sapiens
tcccgtgatgctact

SEQ ID NO: 1296774 - DNA, 15 bp, Homo sapiens
gtcccgtgatgctac

SEQ ID NO: 1296775 - DNA, 15 bp, Homo sapiens
tgtcccgtgatgcta

SEQ ID NO: 1296776 - DNA, 15 bp, Homo sapiens
ttgtcccgtgatgct

SEQ ID NO: 1296777 - DNA, 15 bp, Homo sapiens
gttgtcccgtgatgc

SEQ ID NO: 1296778 - DNA, 15 bp, Homo sapiens
tgttgtcccgtgatg

SEQ ID NO: 1296779 - DNA, 15 bp, Homo sapiens
ctgttgtcccgtgat

SEQ ID NO: 1296780 - DNA, 15 bp, Homo sapiens
tctgttgtcccgtga

SEQ ID NO: 1296781 - DNA, 15 bp, Homo sapiens
atctgttgtcccgtg

SEQ ID NO: 1296782 - DNA, 15 bp, Homo sapiens
catctgttgtcccgt

SEQ ID NO: 1296783 - DNA, 15 bp, Homo sapiens
acatctgttgtcccg

SEQ ID NO: 1296784 - DNA, 15 bp, Homo sapiens
cacatctgttgtccc

SEQ ID NO: 1296785 - DNA, 15 bp, Homo sapiens
tcacatctgttgtcc

SEQ ID NO: 1296786 - DNA, 15 bp, Homo sapiens
ttcacatctgttgtc

SEQ ID NO: 1296787 - DNA, 15 bp, Homo sapiens
cttcacatctgttgt

SEQ ID NO: 1296788 - DNA, 15 bp, Homo sapiens
acttcacatctgttg

SEQ ID NO: 1296789 - DNA, 15 bp, Homo sapiens
tacttcacatctgtt

SEQ ID NO: 1296790 - DNA, 15 bp, Homo sapiens
ctacttcacatctgt

SEQ ID NO: 1296791 - DNA, 15 bp, Homo sapiens
actacttcacatctg

SEQ ID NO: 1296792 - DNA, 15 bp, Homo sapiens
gactacttcacatct

SEQ ID NO: 1296793 - DNA, 15 bp, Homo sapiens
ggactacttcacatc

SEQ ID NO: 1296794 - DNA, 15 bp, Homo sapiens
aggactacttcacat

SEQ ID NO: 1296795 - DNA, 15 bp, Homo sapiens
gaggactacttcaca

SEQ ID NO: 1296796 - DNA, 15 bp, Homo sapiens
agaggactacttcac

SEQ ID NO: 1296797 - DNA, 15 bp, Homo sapiens
aagaggactacttca

SEQ ID NO: 1296798 - DNA, 15 bp, Homo sapiens
taagaggactacttc

SEQ ID NO: 1296799 - DNA, 15 bp, Homo sapiens
ttaagaggactactt

SEQ ID NO: 1296800 - DNA, 15 bp, Homo sapiens
gttaagaggactact

SEQ ID NO: 1296801 - DNA, 15 bp, Homo sapiens
agttaagaggactac

SEQ ID NO: 1296802 - DNA, 15 bp, Homo sapiens
gagttaagaggacta

SEQ ID NO: 1296803 - DNA, 15 bp, Homo sapiens
agagttaagaggact

SEQ ID NO: 1296804 - DNA, 15 bp, Homo sapiens
gagagttaagaggac

SEQ ID NO: 1296805 - DNA, 15 bp, Homo sapiens
agagagttaagagga

SEQ ID NO: 1296806 - DNA, 15 bp, Homo sapiens
cagagagttaagagg

SEQ ID NO: 1296807 - DNA, 15 bp, Homo sapiens
gcagagagttaagag

SEQ ID NO: 1296808 - DNA, 15 bp, Homo sapiens
tgcagagagttaaga

SEQ ID NO: 1296809 - DNA, 15 bp, Homo sapiens
atgcagagagttaag

SEQ ID NO: 1296810 - DNA, 15 bp, Homo sapiens
catgcagagagttaa

SEQ ID NO: 1296811 - DNA, 15 bp, Homo sapiens
acatgcagagagtta

SEQ ID NO: 1296812 - DNA, 15 bp, Homo sapiens
tacatgcagagagtt

SEQ ID NO: 1296813 - DNA, 15 bp, Homo sapiens
atacatgcagagagt

SEQ ID NO: 1296814 - DNA, 15 bp, Homo sapiens
aatacatgcagagag

SEQ ID NO: 1296815 - DNA, 15 bp, Homo sapiens
aaatacatgcagaga

SEQ ID NO: 1296816 - DNA, 15 bp, Homo sapiens
gaaatacatgcagag

SEQ ID NO: 1296817 - DNA, 15 bp, Homo sapiens
ggaaatacatgcaga

SEQ ID NO: 1296818 - DNA, 15 bp, Homo sapiens
aggaaatacatgcag

SEQ ID NO: 1296819 - DNA, 15 bp, Homo sapiens
gaggaaatacatgca

SEQ ID NO: 1296820 - DNA, 15 bp, Homo sapiens
agaggaaatacatgc

SEQ ID NO: 1296821 - DNA, 15 bp, Homo sapiens
cagaggaaatacatg

SEQ ID NO: 1296822 - DNA, 15 bp, Homo sapiens
acagaggaaatacat

SEQ ID NO: 1296823 - DNA, 15 bp, Homo sapiens
cacagaggaaataca

SEQ ID NO: 1296824 - DNA, 15 bp, Homo sapiens
tcacagaggaaatac

SEQ ID NO: 1296825 - DNA, 15 bp, Homo sapiens
atcacagaggaaata

SEQ ID NO: 1296826 - DNA, 15 bp, Homo sapiens
aatcacagaggaaat

SEQ ID NO: 1296827 - DNA, 15 bp, Homo sapiens
aaatcacagaggaaa

SEQ ID NO: 1296828 - DNA, 15 bp, Homo sapiens
gaaatcacagaggaa

SEQ ID NO: 1296829 - DNA, 15 bp, Homo sapiens
ggaaatcacagagga

SEQ ID NO: 1296830 - DNA, 15 bp, Homo sapiens
tggaaatcacagagg

SEQ ID NO: 1296831 - DNA, 15 bp, Homo sapiens
ttggaaatcacagag

SEQ ID NO: 1296832 - DNA, 15 bp, Homo sapiens
tttggaaatcacaga

SEQ ID NO: 1296833 - DNA, 15 bp, Homo sapiens
ctttggaaatcacag

SEQ ID NO: 1296834 - DNA, 15 bp, Homo sapiens
cctttggaaatcaca

SEQ ID NO: 1296835 - DNA, 15 bp, Homo sapiens
tcctttggaaatcac

SEQ ID NO: 1296836 - DNA, 15 bp, Homo sapiens
gtcctttggaaatca

SEQ ID NO: 1296837 - DNA, 15 bp, Homo sapiens
ggtcctttggaaatc

SEQ ID NO: 1296838 - DNA, 15 bp, Homo sapiens
tggtcctttggaaat

SEQ ID NO: 1296839 - DNA, 15 bp, Homo sapiens
gtggtcctttggaaa

SEQ ID NO: 1296840 - DNA, 15 bp, Homo sapiens
agtggtcctttggaa

SEQ ID NO: 1296841 - DNA, 15 bp, Homo sapiens
tagtggtcctttgga

SEQ ID NO: 1296842 - DNA, 15 bp, Homo sapiens
ttagtggtcctttgg

SEQ ID NO: 1296843 - DNA, 15 bp, Homo sapiens
gttagtggtcctttg

SEQ ID NO: 1296844 - DNA, 15 bp, Homo sapiens
ggttagtggtccttt

SEQ ID NO: 1296845 - DNA, 15 bp, Homo sapiens
tggttagtggtcctt

SEQ ID NO: 1296846 - DNA, 15 bp, Homo sapiens
ctggttagtggtcct

SEQ ID NO: 1296847 - DNA, 15 bp, Homo sapiens
cctggttagtggtcc

SEQ ID NO: 1296848 - DNA, 15 bp, Homo sapiens
tcctggttagtggtc

SEQ ID NO: 1296849 - DNA, 15 bp, Homo sapiens
ctcctggttagtggt

SEQ ID NO: 1296850 - DNA, 15 bp, Homo sapiens
tctcctggttagtgg

SEQ ID NO: 1296851 - DNA, 15 bp, Homo sapiens
ttctcctggttagtg

SEQ ID NO: 1296852 - DNA, 15 bp, Homo sapiens
tttctcctggttagt

SEQ ID NO: 1296853 - DNA, 15 bp, Homo sapiens
atttctcctggttag

SEQ ID NO: 1296854 - DNA, 15 bp, Homo sapiens
tatttctcctggtta

SEQ ID NO: 1296855 - DNA, 15 bp, Homo sapiens
ttatttctcctggtt

SEQ ID NO: 1296856 - DNA, 15 bp, Homo sapiens
cttatttctcctggt

SEQ ID NO: 1296857 - DNA, 15 bp, Homo sapiens
tcttatttctcctgg

SEQ ID NO: 1296858 - DNA, 15 bp, Homo sapiens
ttcttatttctcctg

SEQ ID NO: 1296859 - DNA, 15 bp, Homo sapiens
tttcttatttctcct

SEQ ID NO: 1296860 - DNA, 15 bp, Homo sapiens
gtttcttatttctcc

SEQ ID NO: 1296861 - DNA, 15 bp, Homo sapiens
agtttcttatttctc

SEQ ID NO: 1296862 - DNA, 15 bp, Homo sapiens
cagtttcttatttct

SEQ ID NO: 1296863 - DNA, 15 bp, Homo sapiens
acagtttcttatttc

SEQ ID NO: 1296864 - DNA, 15 bp, Homo sapiens
aacagtttcttattt

SEQ ID NO: 1296865 - DNA, 15 bp, Homo sapiens
caacagtttcttatt

SEQ ID NO: 1296866 - DNA, 15 bp, Homo sapiens
acaacagtttcttat

SEQ ID NO: 1296867 - DNA, 15 bp, Homo sapiens
aacaacagtttctta

SEQ ID NO: 1296868 - DNA, 15 bp, Homo sapiens
aaacaacagtttctt

SEQ ID NO: 1296869 - DNA, 15 bp, Homo sapiens
aaaacaacagtttct

SEQ ID NO: 1296870 - DNA, 15 bp, Homo sapiens
gaaaacaacagtttc

SEQ ID NO: 1296871 - DNA, 15 bp, Homo sapiens
agaaaacaacagttt

SEQ ID NO: 1296872 - DNA, 15 bp, Homo sapiens
cagaaaacaacagtt

SEQ ID NO: 1296873 - DNA, 15 bp, Homo sapiens
tcagaaaacaacagt

SEQ ID NO: 1296874 - DNA, 15 bp, Homo sapiens
gtcagaaaacaacag

SEQ ID NO: 1296875 - DNA, 15 bp, Homo sapiens
ggtcagaaaacaaca

SEQ ID NO: 1296876 - DNA, 15 bp, Homo sapiens
gggtcagaaaacaac

SEQ ID NO: 1296877 - DNA, 15 bp, Homo sapiens
tgggtcagaaaacaa

SEQ ID NO: 1296878 - DNA, 15 bp, Homo sapiens
ttgggtcagaaaaca

SEQ ID NO: 1296879 - DNA, 15 bp, Homo sapiens
gttgggtcagaaaac

SEQ ID NO: 1296880 - DNA, 15 bp, Homo sapiens
tgttgggtcagaaaa

SEQ ID NO: 1296881 - DNA, 15 bp, Homo sapiens
gtgttgggtcagaaa

SEQ ID NO: 1296882 - DNA, 15 bp, Homo sapiens
ggtgttgggtcagaa

SEQ ID NO: 1296883 - DNA, 15 bp, Homo sapiens
tggtgttgggtcaga

SEQ ID NO: 1296884 - DNA, 15 bp, Homo sapiens
ctggtgttgggtcag

SEQ ID NO: 1296885 - DNA, 15 bp, Homo sapiens
gctggtgttgggtca

SEQ ID NO: 1296886 - DNA, 15 bp, Homo sapiens
tgctggtgttgggtc

SEQ ID NO: 1296887 - DNA, 15 bp, Homo sapiens
atgctggtgttgggt

SEQ ID NO: 1296888 - DNA, 15 bp, Homo sapiens
catgctggtgttggg

SEQ ID NO: 1296889 - DNA, 15 bp, Homo sapiens
gcatgctggtgttgg

SEQ ID NO: 1296890 - DNA, 15 bp, Homo sapiens
tgcatgctggtgttg

SEQ ID NO: 1296891 - DNA, 15 bp, Homo sapiens
ttgcatgctggtgtt

SEQ ID NO: 1296892 - DNA, 15 bp, Homo sapiens
attgcatgctggtgt

SEQ ID NO: 1296893 - DNA, 15 bp, Homo sapiens
cattgcatgctggtg

SEQ ID NO: 1296894 - DNA, 15 bp, Homo sapiens
tcattgcatgctggt

SEQ ID NO: 1296895 - DNA, 15 bp, Homo sapiens
ttcattgcatgctgg

SEQ ID NO: 1296896 - DNA, 15 bp, Homo sapiens
tttcattgcatgctg

SEQ ID NO: 1296897 - DNA, 15 bp, Homo sapiens
ctttcattgcatgct

SEQ ID NO: 1296898 - DNA, 15 bp, Homo sapiens
actttcattgcatgc

SEQ ID NO: 1296899 - DNA, 15 bp, Homo sapiens
tactttcattgcatg

SEQ ID NO: 1296900 - DNA, 15 bp, Homo sapiens
ctactttcattgcat

SEQ ID NO: 1296901 - DNA, 15 bp, Homo sapiens
cctactttcattgca

SEQ ID NO: 1296902 - DNA, 15 bp, Homo sapiens
tcctactttcattgc

SEQ ID NO: 1296903 - DNA, 15 bp, Homo sapiens
atcctactttcattg

SEQ ID NO: 1296904 - DNA, 15 bp, Homo sapiens
tatcctactttcatt

SEQ ID NO: 1296905 - DNA, 15 bp, Homo sapiens
atatcctactttcat

SEQ ID NO: 1296906 - DNA, 15 bp, Homo sapiens
aatatcctactttca

SEQ ID NO: 1296907 - DNA, 15 bp, Homo sapiens
aaatatcctactttc

SEQ ID NO: 1296908 - DNA, 15 bp, Homo sapiens
aaaatatcctacttt

SEQ ID NO: 1296909 - DNA, 15 bp, Homo sapiens
aaaaatatcctactt

SEQ ID NO: 1296910 - DNA, 15 bp, Homo sapiens
gaaaaatatcctact

SEQ ID NO: 1296911 - DNA, 15 bp, Homo sapiens
tgaaaaatatcctac

SEQ ID NO: 1296912 - DNA, 15 bp, Homo sapiens
atgaaaaatatccta

SEQ ID NO: 1296913 - DNA, 15 bp, Homo sapiens
aatgaaaaatatcct

SEQ ID NO: 1296914 - DNA, 15 bp, Homo sapiens
gaatgaaaaatatcc

SEQ ID NO: 1296915 - DNA, 15 bp, Homo sapiens
agaatgaaaaatatc

SEQ ID NO: 1296916 - DNA, 15 bp, Homo sapiens
tagaatgaaaaatat

SEQ ID NO: 1296917 - DNA, 15 bp, Homo sapiens
atagaatgaaaaata

SEQ ID NO: 1296918 - DNA, 15 bp, Homo sapiens
tatagaatgaaaaat

SEQ ID NO: 1296919 - DNA, 15 bp, Homo sapiens
ctatagaatgaaaaa

SEQ ID NO: 1296920 - DNA, 15 bp, Homo sapiens
tctatagaatgaaaa

SEQ ID NO: 1296921 - DNA, 15 bp, Homo sapiens
ctctatagaatgaaa

SEQ ID NO: 1296922 - DNA, 15 bp, Homo sapiens
tctctatagaatgaa

SEQ ID NO: 1296923 - DNA, 15 bp, Homo sapiens
ttctctatagaatga

SEQ ID NO: 1296924 - DNA, 15 bp, Homo sapiens
gttctctatagaatg

SEQ ID NO: 1296925 - DNA, 15 bp, Homo sapiens
ggttctctatagaat

SEQ ID NO: 1296926 - DNA, 15 bp, Homo sapiens
cggttctctatagaa

SEQ ID NO: 1296927 - DNA, 15 bp, Homo sapiens
acggttctctataga

SEQ ID NO: 1296928 - DNA, 15 bp, Homo sapiens
gacggttctctatag

SEQ ID NO: 1296929 - DNA, 15 bp, Homo sapiens
tgacggttctctata

SEQ ID NO: 1296930 - DNA, 15 bp, Homo sapiens
ttgacggttctctat

SEQ ID NO: 1296931 - DNA, 15 bp, Homo sapiens
attgacggttctcta

SEQ ID NO: 1296932 - DNA, 15 bp, Homo sapiens
cattgacggttctct

SEQ ID NO: 1296933 - DNA, 15 bp, Homo sapiens
acattgacggttctc

SEQ ID NO: 1296934 - DNA, 15 bp, Homo sapiens
cacattgacggttct

SEQ ID NO: 1296935 - DNA, 15 bp, Homo sapiens
acacattgacggttc

SEQ ID NO: 1296936 - DNA, 15 bp, Homo sapiens
tacacattgacggtt

SEQ ID NO: 1296937 - DNA, 15 bp, Homo sapiens
atacacattgacggt

SEQ ID NO: 1296938 - DNA, 15 bp, Homo sapiens
aatacacattgacgg

SEQ ID NO: 1296939 - DNA, 15 bp, Homo sapiens
aaatacacattgacg

SEQ ID NO: 1296940 - DNA, 15 bp, Homo sapiens
aaaatacacattgac

SEQ ID NO: 1296941 - DNA, 15 bp, Homo sapiens
caaaatacacattga

SEQ ID NO: 1296942 - DNA, 15 bp, Homo sapiens
acaaaatacacattg

SEQ ID NO: 1296943 - DNA, 15 bp, Homo sapiens
aacaaaatacacatt

SEQ ID NO: 1296944 - DNA, 15 bp, Homo sapiens
taacaaaatacacat

SEQ ID NO: 1296945 - DNA, 15 bp, Homo sapiens
ataacaaaatacaca

SEQ ID NO: 1296946 - DNA, 15 bp, Homo sapiens
gataacaaaatacac

SEQ ID NO: 1296947 - DNA, 15 bp, Homo sapiens
agataacaaaataca

SEQ ID NO: 1296948 - DNA, 15 bp, Homo sapiens
cagataacaaaatac

SEQ ID NO: 1296949 - DNA, 15 bp, Homo sapiens
tcagataacaaaata

SEQ ID NO: 1296950 - DNA, 15 bp, Homo sapiens
atcagataacaaaat

SEQ ID NO: 1296951 - DNA, 15 bp, Homo sapiens
aatcagataacaaaa

SEQ ID NO: 1296952 - DNA, 15 bp, Homo sapiens
aaatcagataacaaa

SEQ ID NO: 1296953 - DNA, 15 bp, Homo sapiens
caaatcagataacaa

SEQ ID NO: 1296954 - DNA, 15 bp, Homo sapiens
tcaaatcagataaca

SEQ ID NO: 1296955 - DNA, 15 bp, Homo sapiens
ttcaaatcagataac

SEQ ID NO: 1296956 - DNA, 15 bp, Homo sapiens
gttcaaatcagataa

SEQ ID NO: 1296957 - DNA, 15 bp, Homo sapiens
ggttcaaatcagata

SEQ ID NO: 1296958 - DNA, 15 bp, Homo sapiens
gggttcaaatcagat

SEQ ID NO: 1296959 - DNA, 15 bp, Homo sapiens
agggttcaaatcaga

SEQ ID NO: 1296960 - DNA, 15 bp, Homo sapiens
cagggttcaaatcag

SEQ ID NO: 1296961 - DNA, 15 bp, Homo sapiens
gcagggttcaaatca

SEQ ID NO: 1296962 - DNA, 15 bp, Homo sapiens
tgcagggttcaaatc

SEQ ID NO: 1296963 - DNA, 15 bp, Homo sapiens
gtgcagggttcaaat

SEQ ID NO: 1296964 - DNA, 15 bp, Homo sapiens
cgtgcagggttcaaa

SEQ ID NO: 1296965 - DNA, 15 bp, Homo sapiens
gcgtgcagggttcaa

SEQ ID NO: 1296966 - DNA, 15 bp, Homo sapiens
cgcgtgcagggttca

SEQ ID NO: 1296967 - DNA, 15 bp, Homo sapiens
ccgcgtgcagggttc

SEQ ID NO: 1296968 - DNA, 15 bp, Homo sapiens
tccgcgtgcagggtt

SEQ ID NO: 1296969 - DNA, 15 bp, Homo sapiens
gtccgcgtgcagggt

SEQ ID NO: 1296970 - DNA, 15 bp, Homo sapiens
tgtccgcgtgcaggg

SEQ ID NO: 1296971 - DNA, 15 bp, Homo sapiens
ctgtccgcgtgcagg

SEQ ID NO: 1296972 - DNA, 15 bp, Homo sapiens
gctgtccgcgtgcag

SEQ ID NO: 1296973 - DNA, 15 bp, Homo sapiens
tgctgtccgcgtgca

SEQ ID NO: 1296974 - DNA, 15 bp, Homo sapiens
gtgctgtccgcgtgc

SEQ ID NO: 1296975 - DNA, 15 bp, Homo sapiens
tgtgctgtccgcgtg

SEQ ID NO: 1296976 - DNA, 15 bp, Homo sapiens
atgtgctgtccgcgt

SEQ ID NO: 1296977 - DNA, 15 bp, Homo sapiens
aatgtgctgtccgcg

SEQ ID NO: 1296978 - DNA, 15 bp, Homo sapiens
aaatgtgctgtccgc

SEQ ID NO: 1296979 - DNA, 15 bp, Homo sapiens
gaaatgtgctgtccg

SEQ ID NO: 1296980 - DNA, 15 bp, Homo sapiens
tgaaatgtgctgtcc

SEQ ID NO: 1296981 - DNA, 15 bp, Homo sapiens
gtgaaatgtgctgtc

SEQ ID NO: 1296982 - DNA, 15 bp, Homo sapiens
cgtgaaatgtgctgt

SEQ ID NO: 1296983 - DNA, 15 bp, Homo sapiens
acgtgaaatgtgctg

SEQ ID NO: 1296984 - DNA, 15 bp, Homo sapiens
cacgtgaaatgtgct

SEQ ID NO: 1296985 - DNA, 15 bp, Homo sapiens
acacgtgaaatgtgc

SEQ ID NO: 1296986 - DNA, 15 bp, Homo sapiens
aacacgtgaaatgtg

SEQ ID NO: 1296987 - DNA, 15 bp, Homo sapiens
aaacacgtgaaatgt

SEQ ID NO: 1296988 - DNA, 15 bp, Homo sapiens
aaaacacgtgaaatg

SEQ ID NO: 1296989 - DNA, 15 bp, Homo sapiens
taaaacacgtgaaat

SEQ ID NO: 1296990 - DNA, 15 bp, Homo sapiens
ctaaaacacgtgaaa

SEQ ID NO: 1296991 - DNA, 15 bp, Homo sapiens
gctaaaacacgtgaa

SEQ ID NO: 1296992 - DNA, 15 bp, Homo sapiens
ggctaaaacacgtga

SEQ ID NO: 1296993 - DNA, 15 bp, Homo sapiens
gggctaaaacacgtg

SEQ ID NO: 1296994 - DNA, 15 bp, Homo sapiens
tgggctaaaacacgt

SEQ ID NO: 1296995 - DNA, 15 bp, Homo sapiens
atgggctaaaacacg

SEQ ID NO: 1296996 - DNA, 15 bp, Homo sapiens
aatgggctaaaacac

SEQ ID NO: 1296997 - DNA, 15 bp, Homo sapiens
aaatgggctaaaaca

SEQ ID NO: 1296998 - DNA, 15 bp, Homo sapiens
caaatgggctaaaac

SEQ ID NO: 1296999 - DNA, 15 bp, Homo sapiens
acaaatgggctaaaa

SEQ ID NO: 1297000 - DNA, 15 bp, Homo sapiens
cacaaatgggctaaa

SEQ ID NO: 1297001 - DNA, 15 bp, Homo sapiens
ccacaaatgggctaa

SEQ ID NO: 1297002 - DNA, 15 bp, Homo sapiens
gccacaaatgggcta

SEQ ID NO: 1297003 - DNA, 15 bp, Homo sapiens
agccacaaatgggct

SEQ ID NO: 1297004 - DNA, 15 bp, Homo sapiens
cagccacaaatgggc

SEQ ID NO: 1297005 - DNA, 15 bp, Homo sapiens
ccagccacaaatggg

SEQ ID NO: 1297006 - DNA, 15 bp, Homo sapiens
gccagccacaaatgg

SEQ ID NO: 1297007 - DNA, 15 bp, Homo sapiens
tgccagccacaaatg

SEQ ID NO: 1297008 - DNA, 15 bp, Homo sapiens
gtgccagccacaaat

SEQ ID NO: 1297009 - DNA, 15 bp, Homo sapiens
tgtgccagccacaaa

SEQ ID NO: 1297010 - DNA, 15 bp, Homo sapiens
ctgtgccagccacaa

SEQ ID NO: 1297011 - DNA, 15 bp, Homo sapiens
cctgtgccagccaca

SEQ ID NO: 1297012 - DNA, 15 bp, Homo sapiens
acctgtgccagccac

SEQ ID NO: 1297013 - DNA, 15 bp, Homo sapiens
cacctgtgccagcca

SEQ ID NO: 1297014 - DNA, 15 bp, Homo sapiens
acacctgtgccagcc

SEQ ID NO: 1297015 - DNA, 15 bp, Homo sapiens
cacacctgtgccagc

SEQ ID NO: 1297016 - DNA, 15 bp, Homo sapiens
ccacacctgtgccag

SEQ ID NO: 1297017 - DNA, 15 bp, Homo sapiens
gccacacctgtgcca

SEQ ID NO: 1297018 - DNA, 15 bp, Homo sapiens
ggccacacctgtgcc

SEQ ID NO: 1297019 - DNA, 15 bp, Homo sapiens
tggccacacctgtgc

SEQ ID NO: 1297020 - DNA, 15 bp, Homo sapiens
ctggccacacctgtg

SEQ ID NO: 1297021 - DNA, 15 bp, Homo sapiens
tctggccacacctgt

SEQ ID NO: 1297022 - DNA, 15 bp, Homo sapiens
ttctggccacacctg

SEQ ID NO: 1297023 - DNA, 15 bp, Homo sapiens
tttctggccacacct

SEQ ID NO: 1297024 - DNA, 15 bp, Homo sapiens
ctttctggccacacc

SEQ ID NO: 1297025 - DNA, 15 bp, Homo sapiens
gctttctggccacac

SEQ ID NO: 1297026 - DNA, 15 bp, Homo sapiens
ggctttctggccaca

SEQ ID NO: 1297027 - DNA, 15 bp, Homo sapiens
tggctttctggccac

SEQ ID NO: 1297028 - DNA, 15 bp, Homo sapiens
ctggctttctggcca

SEQ ID NO: 1297029 - DNA, 15 bp, Homo sapiens
gctggctttctggcc

SEQ ID NO: 1297030 - DNA, 15 bp, Homo sapiens
tgctggctttctggc

SEQ ID NO: 1297031 - DNA, 15 bp, Homo sapiens
atgctggctttctgg

SEQ ID NO: 1297032 - DNA, 15 bp, Homo sapiens
tatgctggctttctg

SEQ ID NO: 1297033 - DNA, 15 bp, Homo sapiens
ctatgctggctttct

SEQ ID NO: 1297034 - DNA, 15 bp, Homo sapiens
cctatgctggctttc

SEQ ID NO: 1297035 - DNA, 15 bp, Homo sapiens
tcctatgctggcttt

SEQ ID NO: 1297036 - DNA, 15 bp, Homo sapiens
atcctatgctggctt

SEQ ID NO: 1297037 - DNA, 15 bp, Homo sapiens
gatcctatgctggct

SEQ ID NO: 1297038 - DNA, 15 bp, Homo sapiens
agatcctatgctggc

SEQ ID NO: 1297039 - DNA, 15 bp, Homo sapiens
aagatcctatgctgg

SEQ ID NO: 1297040 - DNA, 15 bp, Homo sapiens
caagatcctatgctg

SEQ ID NO: 1297041 - DNA, 15 bp, Homo sapiens
acaagatcctatgct

SEQ ID NO: 1297042 - DNA, 15 bp, Homo sapiens
aacaagatcctatgc

SEQ ID NO: 1297043 - DNA, 15 bp, Homo sapiens
aaacaagatcctatg

SEQ ID NO: 1297044 - DNA, 15 bp, Homo sapiens
caaacaagatcctat

SEQ ID NO: 1297045 - DNA, 15 bp, Homo sapiens
acaaacaagatccta

SEQ ID NO: 1297046 - DNA, 15 bp, Homo sapiens
cacaaacaagatcct

SEQ ID NO: 1297047 - DNA, 15 bp, Homo sapiens
acacaaacaagatcc

SEQ ID NO: 1297048 - DNA, 15 bp, Homo sapiens
aacacaaacaagatc

SEQ ID NO: 1297049 - DNA, 15 bp, Homo sapiens
aaacacaaacaagat

SEQ ID NO: 1297050 - DNA, 15 bp, Homo sapiens
taaacacaaacaaga

SEQ ID NO: 1297051 - DNA, 15 bp, Homo sapiens
ttaaacacaaacaag

SEQ ID NO: 1297052 - DNA, 15 bp, Homo sapiens
cttaaacacaaacaa

SEQ ID NO: 1297053 - DNA, 15 bp, Homo sapiens
tcttaaacacaaaca

SEQ ID NO: 1297054 - DNA, 15 bp, Homo sapiens
ctcttaaacacaaac

SEQ ID NO: 1297055 - DNA, 15 bp, Homo sapiens
tctcttaaacacaaa

SEQ ID NO: 1297056 - DNA, 15 bp, Homo sapiens
ctctcttaaacacaa

SEQ ID NO: 1297057 - DNA, 15 bp, Homo sapiens
tctctcttaaacaca

SEQ ID NO: 1297058 - DNA, 15 bp, Homo sapiens
ttctctcttaaacac

SEQ ID NO: 1297059 - DNA, 15 bp, Homo sapiens
cttctctcttaaaca

SEQ ID NO: 1297060 - DNA, 15 bp, Homo sapiens
acttctctcttaaac

SEQ ID NO: 1297061 - DNA, 15 bp, Homo sapiens
aacttctctcttaaa

SEQ ID NO: 1297062 - DNA, 15 bp, Homo sapiens
gaacttctctcttaa

SEQ ID NO: 1297063 - DNA, 15 bp, Homo sapiens
tgaacttctctctta

SEQ ID NO: 1297064 - DNA, 15 bp, Homo sapiens
ctgaacttctctctt

SEQ ID NO: 1297065 - DNA, 15 bp, Homo sapiens
cctgaacttctctct

SEQ ID NO: 1297066 - DNA, 15 bp, Homo sapiens
ccctgaacttctctc

SEQ ID NO: 1297067 - DNA, 15 bp, Homo sapiens
tccctgaacttctct

SEQ ID NO: 1297068 - DNA, 15 bp, Homo sapiens
ctccctgaacttctc

SEQ ID NO: 1297069 - DNA, 15 bp, Homo sapiens
tctccctgaacttct

SEQ ID NO: 1297070 - DNA, 15 bp, Homo sapiens
gtctccctgaacttc

SEQ ID NO: 1297071 - DNA, 15 bp, Homo sapiens
agtctccctgaactt

SEQ ID NO: 1297072 - DNA, 15 bp, Homo sapiens
tagtctccctgaact

SEQ ID NO: 1297073 - DNA, 15 bp, Homo sapiens
atagtctccctgaac

SEQ ID NO: 1297074 - DNA, 15 bp, Homo sapiens
aatagtctccctgaa

SEQ ID NO: 1297075 - DNA, 15 bp, Homo sapiens
gaatagtctccctga

SEQ ID NO: 1297076 - DNA, 15 bp, Homo sapiens
tgaatagtctccctg

SEQ ID NO: 1297077 - DNA, 15 bp, Homo sapiens
ctgaatagtctccct

SEQ ID NO: 1297078 - DNA, 15 bp, Homo sapiens
cctgaatagtctccc

SEQ ID NO: 1297079 - DNA, 15 bp, Homo sapiens
gcctgaatagtctcc

SEQ ID NO: 1297080 - DNA, 15 bp, Homo sapiens
tgcctgaatagtctc

SEQ ID NO: 1297081 - DNA, 15 bp, Homo sapiens
gtgcctgaatagtct

SEQ ID NO: 1297082 - DNA, 15 bp, Homo sapiens
tgtgcctgaatagtc

SEQ ID NO: 1297083 - DNA, 15 bp, Homo sapiens
atgtgcctgaatagt

SEQ ID NO: 1297084 - DNA, 15 bp, Homo sapiens
aatgtgcctgaatag

SEQ ID NO: 1297085 - DNA, 15 bp, Homo sapiens
caatgtgcctgaata

SEQ ID NO: 1297086 - DNA, 15 bp, Homo sapiens
acaatgtgcctgaat

SEQ ID NO: 1297087 - DNA, 15 bp, Homo sapiens
gacaatgtgcctgaa

SEQ ID NO: 1297088 - DNA, 15 bp, Homo sapiens
agacaatgtgcctga

SEQ ID NO: 1297089 - DNA, 15 bp, Homo sapiens
cagacaatgtgcctg

SEQ ID NO: 1297090 - DNA, 15 bp, Homo sapiens
ccagacaatgtgcct

SEQ ID NO: 1297091 - DNA, 15 bp, Homo sapiens
gccagacaatgtgcc

SEQ ID NO: 1297092 - DNA, 15 bp, Homo sapiens
tgccagacaatgtgc

SEQ ID NO: 1297093 - DNA, 15 bp, Homo sapiens
ttgccagacaatgtg

SEQ ID NO: 1297094 - DNA, 15 bp, Homo sapiens
cttgccagacaatgt

SEQ ID NO: 1297095 - DNA, 15 bp, Homo sapiens
acttgccagacaatg

SEQ ID NO: 1297096 - DNA, 15 bp, Homo sapiens
gacttgccagacaat

SEQ ID NO: 1297097 - DNA, 15 bp, Homo sapiens
agacttgccagacaa

SEQ ID NO: 1297098 - DNA, 15 bp, Homo sapiens
tagacttgccagaca

SEQ ID NO: 1297099 - DNA, 15 bp, Homo sapiens
ctagacttgccagac

SEQ ID NO: 1297100 - DNA, 15 bp, Homo sapiens
gctagacttgccaga

SEQ ID NO: 1297101 - DNA, 15 bp, Homo sapiens
tgctagacttgccag

SEQ ID NO: 1297102 - DNA, 15 bp, Homo sapiens
gtgctagacttgcca

SEQ ID NO: 1297103 - DNA, 15 bp, Homo sapiens
agtgctagacttgcc

SEQ ID NO: 1297104 - DNA, 15 bp, Homo sapiens
cagtgctagacttgc

SEQ ID NO: 1297105 - DNA, 15 bp, Homo sapiens
ccagtgctagacttg

SEQ ID NO: 1297106 - DNA, 15 bp, Homo sapiens
accagtgctagactt

SEQ ID NO: 1297107 - DNA, 15 bp, Homo sapiens
gaccagtgctagact

SEQ ID NO: 1297108 - DNA, 15 bp, Homo sapiens
tgaccagtgctagac

SEQ ID NO: 1297109 - DNA, 15 bp, Homo sapiens
ttgaccagtgctaga

SEQ ID NO: 1297110 - DNA, 15 bp, Homo sapiens
tttgaccagtgctag

SEQ ID NO: 1297111 - DNA, 15 bp, Homo sapiens
gtttgaccagtgcta

SEQ ID NO: 1297112 - DNA, 15 bp, Homo sapiens
ggtttgaccagtgct

SEQ ID NO: 1297113 - DNA, 15 bp, Homo sapiens
gggtttgaccagtgc

SEQ ID NO: 1297114 - DNA, 15 bp, Homo sapiens
agggtttgaccagtg

SEQ ID NO: 1297115 - DNA, 15 bp, Homo sapiens
gagggtttgaccagt

SEQ ID NO: 1297116 - DNA, 15 bp, Homo sapiens
tgagggtttgaccag

SEQ ID NO: 1297117 - DNA, 15 bp, Homo sapiens
atgagggtttgacca

SEQ ID NO: 1297118 - DNA, 15 bp, Homo sapiens
tatgagggtttgacc

SEQ ID NO: 1297119 - DNA, 15 bp, Homo sapiens
ttatgagggtttgac

SEQ ID NO: 1297120 - DNA, 15 bp, Homo sapiens
tttatgagggtttga

SEQ ID NO: 1297121 - DNA, 15 bp, Homo sapiens
atttatgagggtttg

SEQ ID NO: 1297122 - DNA, 15 bp, Homo sapiens
tatttatgagggttt

SEQ ID NO: 1297123 - DNA, 15 bp, Homo sapiens
atatttatgagggtt

SEQ ID NO: 1297124 - DNA, 15 bp, Homo sapiens
aatatttatgagggt

SEQ ID NO: 1297125 - DNA, 15 bp, Homo sapiens
gaatatttatgaggg

SEQ ID NO: 1297126 - DNA, 15 bp, Homo sapiens
ggaatatttatgagg

SEQ ID NO: 1297127 - DNA, 15 bp, Homo sapiens
aggaatatttatgag

SEQ ID NO: 1297128 - DNA, 15 bp, Homo sapiens
caggaatatttatga

SEQ ID NO: 1297129 - DNA, 15 bp, Homo sapiens
acaggaatatttatg

SEQ ID NO: 1297130 - DNA, 15 bp, Homo sapiens
gacaggaatatttat

SEQ ID NO: 1297131 - DNA, 15 bp, Homo sapiens
ggacaggaatattta

SEQ ID NO: 1297132 - DNA, 15 bp, Homo sapiens
tggacaggaatattt

SEQ ID NO: 1297133 - DNA, 15 bp, Homo sapiens
ttggacaggaatatt

SEQ ID NO: 1297134 - DNA, 15 bp, Homo sapiens
attggacaggaatat

SEQ ID NO: 1297135 - DNA, 15 bp, Homo sapiens
gattggacaggaata

SEQ ID NO: 1297136 - DNA, 15 bp, Homo sapiens
agattggacaggaat

SEQ ID NO: 1297137 - DNA, 15 bp, Homo sapiens
cagattggacaggaa

SEQ ID NO: 1297138 - DNA, 15 bp, Homo sapiens
tcagattggacagga

SEQ ID NO: 1297139 - DNA, 15 bp, Homo sapiens
ttcagattggacagg

SEQ ID NO: 1297140 - DNA, 15 bp, Homo sapiens
gttcagattggacag

SEQ ID NO: 1297141 - DNA, 15 bp, Homo sapiens
agttcagattggaca

SEQ ID NO: 1297142 - DNA, 15 bp, Homo sapiens
aagttcagattggac

SEQ ID NO: 1297143 - DNA, 15 bp, Homo sapiens
caagttcagattgga

SEQ ID NO: 1297144 - DNA, 15 bp, Homo sapiens
tcaagttcagattgg

SEQ ID NO: 1297145 - DNA, 15 bp, Homo sapiens
ttcaagttcagattg

SEQ ID NO: 1297146 - DNA, 15 bp, Homo sapiens
tttcaagttcagatt

SEQ ID NO: 1297147 - DNA, 15 bp, Homo sapiens
atttcaagttcagat

SEQ ID NO: 1297148 - DNA, 15 bp, Homo sapiens
catttcaagttcaga

SEQ ID NO: 1297149 - DNA, 15 bp, Homo sapiens
acatttcaagttcag

SEQ ID NO: 1297150 - DNA, 15 bp, Homo sapiens
aacatttcaagttca

SEQ ID NO: 1297151 - DNA, 15 bp, Homo sapiens
gaacatttcaagttc

SEQ ID NO: 1297152 - DNA, 15 bp, Homo sapiens
agaacatttcaagtt

SEQ ID NO: 1297153 - DNA, 15 bp, Homo sapiens
aagaacatttcaagt

SEQ ID NO: 1297154 - DNA, 15 bp, Homo sapiens
caagaacatttcaag

SEQ ID NO: 1297155 - DNA, 15 bp, Homo sapiens
acaagaacatttcaa

SEQ ID NO: 1297156 - DNA, 15 bp, Homo sapiens
aacaagaacatttca

SEQ ID NO: 1297157 - DNA, 15 bp, Homo sapiens
caacaagaacatttc

SEQ ID NO: 1297158 - DNA, 15 bp, Homo sapiens
acaacaagaacattt

SEQ ID NO: 1297159 - DNA, 15 bp, Homo sapiens
cacaacaagaacatt

SEQ ID NO: 1297160 - DNA, 15 bp, Homo sapiens
ccacaacaagaacat

SEQ ID NO: 1297161 - DNA, 15 bp, Homo sapiens
tccacaacaagaaca

SEQ ID NO: 1297162 - DNA, 15 bp, Homo sapiens
gtccacaacaagaac

SEQ ID NO: 1297163 - DNA, 15 bp, Homo sapiens
tgtccacaacaagaa

SEQ ID NO: 1297164 - DNA, 15 bp, Homo sapiens
gtgtccacaacaaga

SEQ ID NO: 1297165 - DNA, 15 bp, Homo sapiens
ggtgtccacaacaag

SEQ ID NO: 1297166 - DNA, 15 bp, Homo sapiens
aggtgtccacaacaa

SEQ ID NO: 1297167 - DNA, 15 bp, Homo sapiens
aaggtgtccacaaca

SEQ ID NO: 1297168 - DNA, 15 bp, Homo sapiens
aaaggtgtccacaac

SEQ ID NO: 1297169 - DNA, 15 bp, Homo sapiens
caaaggtgtccacaa

SEQ ID NO: 1297170 - DNA, 15 bp, Homo sapiens
ccaaaggtgtccaca

SEQ ID NO: 1297171 - DNA, 15 bp, Homo sapiens
accaaaggtgtccac

SEQ ID NO: 1297172 - DNA, 15 bp, Homo sapiens
caccaaaggtgtcca

SEQ ID NO: 1297173 - DNA, 15 bp, Homo sapiens
tcaccaaaggtgtcc

SEQ ID NO: 1297174 - DNA, 15 bp, Homo sapiens
ctcaccaaaggtgtc

SEQ ID NO: 1297175 - DNA, 15 bp, Homo sapiens
gctcaccaaaggtgt

SEQ ID NO: 1297176 - DNA, 15 bp, Homo sapiens
ggctcaccaaaggtg

SEQ ID NO: 1297177 - DNA, 15 bp, Homo sapiens
tggctcaccaaaggt

SEQ ID NO: 1297178 - DNA, 15 bp, Homo sapiens
ctggctcaccaaagg

SEQ ID NO: 1297179 - DNA, 15 bp, Homo sapiens
actggctcaccaaag

SEQ ID NO: 1297180 - DNA, 15 bp, Homo sapiens
ttgtcctcgatcctt

SEQ ID NO: 1297181 - DNA, 15 bp, Homo sapiens
attgtcctcgatcct

SEQ ID NO: 1297182 - DNA, 15 bp, Homo sapiens
cattgtcctcgatcc

SEQ ID NO: 1297183 - DNA, 15 bp, Homo sapiens
ccattgtcctcgatc

SEQ ID NO: 1297184 - DNA, 15 bp, Homo sapiens
gccattgtcctcgat

SEQ ID NO: 1297185 - DNA, 15 bp, Homo sapiens
ggccattgtcctcga

SEQ ID NO: 1297186 - DNA, 15 bp, Homo sapiens
aggccattgtcctcg

SEQ ID NO: 1297187 - DNA, 15 bp, Homo sapiens
gaggccattgtcctc

SEQ ID NO: 1297188 - DNA, 15 bp, Homo sapiens
agaggccattgtcct

SEQ ID NO: 1297189 - DNA, 15 bp, Homo sapiens
aagaggccattgtcc

SEQ ID NO: 1297190 - DNA, 15 bp, Homo sapiens
gaagaggccattgtc

SEQ ID NO: 1297191 - DNA, 15 bp, Homo sapiens
tgaagaggccattgt

SEQ ID NO: 1297192 - DNA, 15 bp, Homo sapiens
gtgaagaggccattg

SEQ ID NO: 1297193 - DNA, 15 bp, Homo sapiens
agtgaagaggccatt

SEQ ID NO: 1297194 - DNA, 15 bp, Homo sapiens
aagtgaagaggccat

SEQ ID NO: 1297195 - DNA, 15 bp, Homo sapiens
aaagtgaagaggcca

SEQ ID NO: 1297196 - DNA, 15 bp, Homo sapiens
aaaagtgaagaggcc

SEQ ID NO: 1297197 - DNA, 15 bp, Homo sapiens
caaaagtgaagaggc

SEQ ID NO: 1297198 - DNA, 15 bp, Homo sapiens
gcaaaagtgaagagg

SEQ ID NO: 1297199 - DNA, 15 bp, Homo sapiens
agcaaaagtgaagag

SEQ ID NO: 1297200 - DNA, 15 bp, Homo sapiens
aagcaaaagtgaaga

SEQ ID NO: 1297201 - DNA, 15 bp, Homo sapiens
aaagcaaaagtgaag

SEQ ID NO: 1297202 - DNA, 15 bp, Homo sapiens
gaaagcaaaagtgaa

SEQ ID NO: 1297203 - DNA, 15 bp, Homo sapiens
agaaagcaaaagtga

SEQ ID NO: 1297204 - DNA, 15 bp, Homo sapiens
gagaaagcaaaagtg

SEQ ID NO: 1297205 - DNA, 15 bp, Homo sapiens
agagaaagcaaaagt

SEQ ID NO: 1297206 - DNA, 15 bp, Homo sapiens
gagagaaagcaaaag

SEQ ID NO: 1297207 - DNA, 15 bp, Homo sapiens
agagagaaagcaaaa

SEQ ID NO: 1297208 - DNA, 15 bp, Homo sapiens
aagagagaaagcaaa

SEQ ID NO: 1297209 - DNA, 15 bp, Homo sapiens
gaagagagaaagcaa

SEQ ID NO: 1297210 - DNA, 15 bp, Homo sapiens
agaagagagaaagca

SEQ ID NO: 1297211 - DNA, 15 bp, Homo sapiens
aagaagagagaaagc

SEQ ID NO: 1297212 - DNA, 15 bp, Homo sapiens
aaagaagagagaaag

SEQ ID NO: 1297213 - DNA, 15 bp, Homo sapiens
caaagaagagagaaa

SEQ ID NO: 1297214 - DNA, 15 bp, Homo sapiens
ccaaagaagagagaa

SEQ ID NO: 1297215 - DNA, 15 bp, Homo sapiens
cccaaagaagagaga

SEQ ID NO: 1297216 - DNA, 15 bp, Homo sapiens
acccaaagaagagag

SEQ ID NO: 1297217 - DNA, 15 bp, Homo sapiens
aacccaaagaagaga

SEQ ID NO: 1297218 - DNA, 15 bp, Homo sapiens
aaacccaaagaagag

SEQ ID NO: 1297219 - DNA, 15 bp, Homo sapiens
aaaacccaaagaaga

SEQ ID NO: 1297220 - DNA, 15 bp, Homo sapiens
taaaacccaaagaag

SEQ ID NO: 1297221 - DNA, 15 bp, Homo sapiens
gtaaaacccaaagaa

SEQ ID NO: 1297222 - DNA, 15 bp, Homo sapiens
agtaaaacccaaaga

SEQ ID NO: 1297223 - DNA, 15 bp, Homo sapiens
aagtaaaacccaaag

SEQ ID NO: 1297224 - DNA, 15 bp, Homo sapiens
aaagtaaaacccaaa

SEQ ID NO: 1297225 - DNA, 15 bp, Homo sapiens
caaagtaaaacccaa

SEQ ID NO: 1297226 - DNA, 15 bp, Homo sapiens
acaaagtaaaaccca

SEQ ID NO: 1297227 - DNA, 15 bp, Homo sapiens
cacaaagtaaaaccc

SEQ ID NO: 1297228 - DNA, 15 bp, Homo sapiens
acacaaagtaaaacc

SEQ ID NO: 1297229 - DNA, 15 bp, Homo sapiens
aacacaaagtaaaac

SEQ ID NO: 1297230 - DNA, 15 bp, Homo sapiens
aaacacaaagtaaaa

SEQ ID NO: 1297231 - DNA, 15 bp, Homo sapiens
gaaacacaaagtaaa

SEQ ID NO: 1297232 - DNA, 15 bp, Homo sapiens
ggaaacacaaagtaa

SEQ ID NO: 1297233 - DNA, 15 bp, Homo sapiens
tggaaacacaaagta

SEQ ID NO: 1297234 - DNA, 15 bp, Homo sapiens
ttggaaacacaaagt

SEQ ID NO: 1297235 - DNA, 15 bp, Homo sapiens
gttggaaacacaaag

SEQ ID NO: 1297236 - DNA, 15 bp, Homo sapiens
tgttggaaacacaaa

SEQ ID NO: 1297237 - DNA, 15 bp, Homo sapiens
ctgttggaaacacaa

SEQ ID NO: 1297238 - DNA, 15 bp, Homo sapiens
gctgttggaaacaca

SEQ ID NO: 1297239 - DNA, 15 bp, Homo sapiens
ggctgttggaaacac

SEQ ID NO: 1297240 - DNA, 15 bp, Homo sapiens
tggctgttggaaaca

SEQ ID NO: 1297241 - DNA, 15 bp, Homo sapiens
ttggctgttggaaac

SEQ ID NO: 1297242 - DNA, 15 bp, Homo sapiens
attggctgttggaaa

SEQ ID NO: 1297243 - DNA, 15 bp, Homo sapiens
cattggctgttggaa

SEQ ID NO: 1297244 - DNA, 15 bp, Homo sapiens
ccattggctgttgga

SEQ ID NO: 1297245 - DNA, 15 bp, Homo sapiens
tccattggctgttgg

SEQ ID NO: 1297246 - DNA, 15 bp, Homo sapiens
ttccattggctgttg

SEQ ID NO: 1297247 - DNA, 15 bp, Homo sapiens
cttccattggctgtt

SEQ ID NO: 1297248 - DNA, 15 bp, Homo sapiens
ccttccattggctgt

SEQ ID NO: 1297249 - DNA, 15 bp, Homo sapiens
gccttccattggctg

SEQ ID NO: 1297250 - DNA, 15 bp, Homo sapiens
agccttccattggct

SEQ ID NO: 1297251 - DNA, 15 bp, Homo sapiens
cagccttccattggc

SEQ ID NO: 1297252 - DNA, 15 bp, Homo sapiens
acagccttccattgg

SEQ ID NO: 1297253 - DNA, 15 bp, Homo sapiens
aacagccttccattg

SEQ ID NO: 1297254 - DNA, 15 bp, Homo sapiens
gaacagccttccatt

SEQ ID NO: 1297255 - DNA, 15 bp, Homo sapiens
agaacagccttccat

SEQ ID NO: 1297256 - DNA, 15 bp, Homo sapiens
tagaacagccttcca

SEQ ID NO: 1297257 - DNA, 15 bp, Homo sapiens
atagaacagccttcc

SEQ ID NO: 1297258 - DNA, 15 bp, Homo sapiens
aatagaacagccttc

SEQ ID NO: 1297259 - DNA, 15 bp, Homo sapiens
aaatagaacagcctt

SEQ ID NO: 1297260 - DNA, 15 bp, Homo sapiens
taaatagaacagcct

SEQ ID NO: 1297261 - DNA, 15 bp, Homo sapiens
ctaaatagaacagcc

SEQ ID NO: 1297262 - DNA, 15 bp, Homo sapiens
cctaaatagaacagc

SEQ ID NO: 1297263 - DNA, 15 bp, Homo sapiens
ccctaaatagaacag

SEQ ID NO: 1297264 - DNA, 15 bp, Homo sapiens
accctaaatagaaca

SEQ ID NO: 1297265 - DNA, 15 bp, Homo sapiens
taccctaaatagaac

SEQ ID NO: 1297266 - DNA, 15 bp, Homo sapiens
ttaccctaaatagaa

SEQ ID NO: 1297267 - DNA, 15 bp, Homo sapiens
tttaccctaaataga

SEQ ID NO: 1297268 - DNA, 15 bp, Homo sapiens
atttaccctaaatag

SEQ ID NO: 1297269 - DNA, 15 bp, Homo sapiens
catttaccctaaata

SEQ ID NO: 1297270 - DNA, 15 bp, Homo sapiens
tcatttaccctaaat

SEQ ID NO: 1297271 - DNA, 15 bp, Homo sapiens
gtcatttaccctaaa

SEQ ID NO: 1297272 - DNA, 15 bp, Homo sapiens
agtcatttaccctaa

SEQ ID NO: 1297273 - DNA, 15 bp, Homo sapiens
gagtcatttacccta

SEQ ID NO: 1297274 - DNA, 15 bp, Homo sapiens
tgagtcatttaccct

SEQ ID NO: 1297275 - DNA, 15 bp, Homo sapiens
ctgagtcatttaccc

SEQ ID NO: 1297276 - DNA, 15 bp, Homo sapiens
tctgagtcatttacc

SEQ ID NO: 1297277 - DNA, 15 bp, Homo sapiens
gtctgagtcatttac

SEQ ID NO: 1297278 - DNA, 15 bp, Homo sapiens
agtctgagtcattta

SEQ ID NO: 1297279 - DNA, 15 bp, Homo sapiens
aagtctgagtcattt

SEQ ID NO: 1297280 - DNA, 15 bp, Homo sapiens
caagtctgagtcatt

SEQ ID NO: 1297281 - DNA, 15 bp, Homo sapiens
ccaagtctgagtcat

SEQ ID NO: 1297282 - DNA, 15 bp, Homo sapiens
accaagtctgagtca

SEQ ID NO: 1297283 - DNA, 15 bp, Homo sapiens
taccaagtctgagtc

SEQ ID NO: 1297284 - DNA, 15 bp, Homo sapiens
gtaccaagtctgagt

SEQ ID NO: 1297285 - DNA, 15 bp, Homo sapiens
tgtaccaagtctgag

SEQ ID NO: 1297286 - DNA, 15 bp, Homo sapiens
atgtaccaagtctga

SEQ ID NO: 1297287 - DNA, 15 bp, Homo sapiens
gatgtaccaagtctg

SEQ ID NO: 1297288 - DNA, 15 bp, Homo sapiens
agatgtaccaagtct

SEQ ID NO: 1297289 - DNA, 15 bp, Homo sapiens
gagatgtaccaagtc

SEQ ID NO: 1297290 - DNA, 15 bp, Homo sapiens
cgagatgtaccaagt

SEQ ID NO: 1297291 - DNA, 15 bp, Homo sapiens
tcgagatgtaccaag

SEQ ID NO: 1297292 - DNA, 15 bp, Homo sapiens
ttcgagatgtaccaa

SEQ ID NO: 1297293 - DNA, 15 bp, Homo sapiens
attcgagatgtacca

SEQ ID NO: 1297294 - DNA, 15 bp, Homo sapiens
gattcgagatgtacc

SEQ ID NO: 1297295 - DNA, 15 bp, Homo sapiens
cgattcgagatgtac

SEQ ID NO: 1297296 - DNA, 15 bp, Homo sapiens
acgattcgagatgta

SEQ ID NO: 1297297 - DNA, 15 bp, Homo sapiens
tacgattcgagatgt

SEQ ID NO: 1297298 - DNA, 15 bp, Homo sapiens
atacgattcgagatg

SEQ ID NO: 1297299 - DNA, 15 bp, Homo sapiens
catacgattcgagat

SEQ ID NO: 1297300 - DNA, 15 bp, Homo sapiens
acatacgattcgaga

SEQ ID NO: 1297301 - DNA, 15 bp, Homo sapiens
gacatacgattcgag

SEQ ID NO: 1297302 - DNA, 15 bp, Homo sapiens
tgacatacgattcga

SEQ ID NO: 1297303 - DNA, 15 bp, Homo sapiens
ctgacatacgattcg

SEQ ID NO: 1297304 - DNA, 15 bp, Homo sapiens
tctgacatacgattc

SEQ ID NO: 1297305 - DNA, 15 bp, Homo sapiens
ctctgacatacgatt

SEQ ID NO: 1297306 - DNA, 15 bp, Homo sapiens
gctctgacatacgat

SEQ ID NO: 1297307 - DNA, 15 bp, Homo sapiens
tgctctgacatacga

SEQ ID NO: 1297308 - DNA, 15 bp, Homo sapiens
gtgctctgacatacg

SEQ ID NO: 1297309 - DNA, 15 bp, Homo sapiens
tgtgctctgacatac

SEQ ID NO: 1297310 - DNA, 15 bp, Homo sapiens
gtgtgctctgacata

SEQ ID NO: 1297311 - DNA, 15 bp, Homo sapiens
agtgtgctctgacat

SEQ ID NO: 1297312 - DNA, 15 bp, Homo sapiens
cagtgtgctctgaca

SEQ ID NO: 1297313 - DNA, 15 bp, Homo sapiens
acagtgtgctctgac

SEQ ID NO: 1297314 - DNA, 15 bp, Homo sapiens
aacagtgtgctctga

SEQ ID NO: 1297315 - DNA, 15 bp, Homo sapiens
caacagtgtgctctg

SEQ ID NO: 1297316 - DNA, 15 bp, Homo sapiens
gcaacagtgtgctct

SEQ ID NO: 1297317 - DNA, 15 bp, Homo sapiens
ggcaacagtgtgctc

SEQ ID NO: 1297318 - DNA, 15 bp, Homo sapiens
gggcaacagtgtgct

SEQ ID NO: 1297319 - DNA, 15 bp, Homo sapiens
ggggcaacagtgtgc

SEQ ID NO: 1297320 - DNA, 15 bp, Homo sapiens
aggggcaacagtgtg

SEQ ID NO: 1297321 - DNA, 15 bp, Homo sapiens
gaggggcaacagtgt

SEQ ID NO: 1297322 - DNA, 15 bp, Homo sapiens
tgaggggcaacagtg

SEQ ID NO: 1297323 - DNA, 15 bp, Homo sapiens
ttgaggggcaacagt

SEQ ID NO: 1297324 - DNA, 15 bp, Homo sapiens
tttgaggggcaacag

SEQ ID NO: 1297325 - DNA, 15 bp, Homo sapiens
ctttgaggggcaaca

SEQ ID NO: 1297326 - DNA, 15 bp, Homo sapiens
gctttgaggggcaac

SEQ ID NO: 1297327 - DNA, 15 bp, Homo sapiens
agctttgaggggcaa

SEQ ID NO: 1297328 - DNA, 15 bp, Homo sapiens
gagctttgaggggca

SEQ ID NO: 1297329 - DNA, 15 bp, Homo sapiens
tgagctttgaggggc

SEQ ID NO: 1297330 - DNA, 15 bp, Homo sapiens
ctgagctttgagggg

SEQ ID NO: 1297331 - DNA, 15 bp, Homo sapiens
cctgagctttgaggg

SEQ ID NO: 1297332 - DNA, 15 bp, Homo sapiens
tcctgagctttgagg

SEQ ID NO: 1297333 - DNA, 15 bp, Homo sapiens
ttcctgagctttgag

SEQ ID NO: 1297334 - DNA, 15 bp, Homo sapiens
tttcctgagctttga

SEQ ID NO: 1297335 - DNA, 15 bp, Homo sapiens
ctttcctgagctttg

SEQ ID NO: 1297336 - DNA, 15 bp, Homo sapiens
cctttcctgagcttt

SEQ ID NO: 1297337 - DNA, 15 bp, Homo sapiens
gcctttcctgagctt

SEQ ID NO: 1297338 - DNA, 15 bp, Homo sapiens
agcctttcctgagct

SEQ ID NO: 1297339 - DNA, 15 bp, Homo sapiens
cagcctttcctgagc

SEQ ID NO: 1297340 - DNA, 15 bp, Homo sapiens
gcagcctttcctgag

SEQ ID NO: 1297341 - DNA, 15 bp, Homo sapiens
tgcagcctttcctga

SEQ ID NO: 1297342 - DNA, 15 bp, Homo sapiens
atgcagcctttcctg

SEQ ID NO: 1297343 - DNA, 15 bp, Homo sapiens
tatgcagcctttcct

SEQ ID NO: 1297344 - DNA, 15 bp, Homo sapiens
gtatgcagcctttcc

SEQ ID NO: 1297345 - DNA, 15 bp, Homo sapiens
agtatgcagcctttc

SEQ ID NO: 1297346 - DNA, 15 bp, Homo sapiens
gagtatgcagccttt

SEQ ID NO: 1297347 - DNA, 15 bp, Homo sapiens
agagtatgcagcctt

SEQ ID NO: 1297348 - DNA, 15 bp, Homo sapiens
tagagtatgcagcct

SEQ ID NO: 1297349 - DNA, 15 bp, Homo sapiens
atagagtatgcagcc

SEQ ID NO: 1297350 - DNA, 15 bp, Homo sapiens
gatagagtatgcagc

SEQ ID NO: 1297351 - DNA, 15 bp, Homo sapiens
agatagagtatgcag

SEQ ID NO: 1297352 - DNA, 15 bp, Homo sapiens
gagatagagtatgca

SEQ ID NO: 1297353 - DNA, 15 bp, Homo sapiens
ggagatagagtatgc

SEQ ID NO: 1297354 - DNA, 15 bp, Homo sapiens
gggagatagagtatg

SEQ ID NO: 1297355 - DNA, 15 bp, Homo sapiens
agggagatagagtat

SEQ ID NO: 1297356 - DNA, 15 bp, Homo sapiens
gagggagatagagta

SEQ ID NO: 1297357 - DNA, 15 bp, Homo sapiens
agagggagatagagt

SEQ ID NO: 1297358 - DNA, 15 bp, Homo sapiens
aagagggagatagag

SEQ ID NO: 1297359 - DNA, 15 bp, Homo sapiens
caagagggagataga

SEQ ID NO: 1297360 - DNA, 15 bp, Homo sapiens
tcaagagggagatag

SEQ ID NO: 1297361 - DNA, 15 bp, Homo sapiens
atcaagagggagata

SEQ ID NO: 1297362 - DNA, 15 bp, Homo sapiens
catcaagagggagat

SEQ ID NO: 1297363 - DNA, 15 bp, Homo sapiens
ccatcaagagggaga

SEQ ID NO: 1297364 - DNA, 15 bp, Homo sapiens
accatcaagagggag

SEQ ID NO: 1297365 - DNA, 15 bp, Homo sapiens
aaccatcaagaggga

SEQ ID NO: 1297366 - DNA, 15 bp, Homo sapiens
aaaccatcaagaggg

SEQ ID NO: 1297367 - DNA, 15 bp, Homo sapiens
gaaaccatcaagagg

SEQ ID NO: 1297368 - DNA, 15 bp, Homo sapiens
ggaaaccatcaagag

SEQ ID NO: 1297369 - DNA, 15 bp, Homo sapiens
aggaaaccatcaaga

SEQ ID NO: 1297370 - DNA, 15 bp, Homo sapiens
gaggaaaccatcaag

SEQ ID NO: 1297371 - DNA, 15 bp, Homo sapiens
cgaggaaaccatcaa

SEQ ID NO: 1297372 - DNA, 15 bp, Homo sapiens
acgaggaaaccatca

SEQ ID NO: 1297373 - DNA, 15 bp, Homo sapiens
tacgaggaaaccatc

SEQ ID NO: 1297374 - DNA, 15 bp, Homo sapiens
atacgaggaaaccat

SEQ ID NO: 1297375 - DNA, 15 bp, Homo sapiens
aatacgaggaaacca

SEQ ID NO: 1297376 - DNA, 15 bp, Homo sapiens
aaatacgaggaaacc

SEQ ID NO: 1297377 - DNA, 15 bp, Homo sapiens
taaatacgaggaaac

SEQ ID NO: 1297378 - DNA, 15 bp, Homo sapiens
gtaaatacgaggaaa

SEQ ID NO: 1297379 - DNA, 15 bp, Homo sapiens
tgtaaatacgaggaa

SEQ ID NO: 1297380 - DNA, 15 bp, Homo sapiens
ttgtaaatacgagga

SEQ ID NO: 1297381 - DNA, 15 bp, Homo sapiens
cttgtaaatacgagg

SEQ ID NO: 1297382 - DNA, 15 bp, Homo sapiens
acttgtaaatacgag

SEQ ID NO: 1297383 - DNA, 15 bp, Homo sapiens
aacttgtaaatacga

SEQ ID NO: 1297384 - DNA, 15 bp, Homo sapiens
taacttgtaaatacg

SEQ ID NO: 1297385 - DNA, 15 bp, Homo sapiens
ttaacttgtaaatac

SEQ ID NO: 1297386 - DNA, 15 bp, Homo sapiens
tttaacttgtaaata

SEQ ID NO: 1297387 - DNA, 15 bp, Homo sapiens
ctttaacttgtaaat

SEQ ID NO: 1297388 - DNA, 15 bp, Homo sapiens
tctttaacttgtaaa

SEQ ID NO: 1297389 - DNA, 15 bp, Homo sapiens
gtctttaacttgtaa

SEQ ID NO: 1297390 - DNA, 15 bp, Homo sapiens
ggtctttaacttgta

SEQ ID NO: 1297391 - DNA, 15 bp, Homo sapiens
tggtctttaacttgt

SEQ ID NO: 1297392 - DNA, 15 bp, Homo sapiens
atggtctttaacttg

SEQ ID NO: 1297393 - DNA, 15 bp, Homo sapiens
tatggtctttaactt

SEQ ID NO: 1297394 - DNA, 15 bp, Homo sapiens
ctatggtctttaact

SEQ ID NO: 1297395 - DNA, 15 bp, Homo sapiens
tctatggtctttaac

SEQ ID NO: 1297396 - DNA, 15 bp, Homo sapiens
atctatggtctttaa

SEQ ID NO: 1297397 - DNA, 15 bp, Homo sapiens
catctatggtcttta

SEQ ID NO: 1297398 - DNA, 15 bp, Homo sapiens
acatctatggtcttt

SEQ ID NO: 1297399 - DNA, 15 bp, Homo sapiens
gacatctatggtctt

SEQ ID NO: 1297400 - DNA, 15 bp, Homo sapiens
ggacatctatggtct

SEQ ID NO: 1297401 - DNA, 15 bp, Homo sapiens
aggacatctatggtc

SEQ ID NO: 1297402 - DNA, 15 bp, Homo sapiens
caggacatctatggt

SEQ ID NO: 1297403 - DNA, 15 bp, Homo sapiens
acaggacatctatgg

SEQ ID NO: 1297404 - DNA, 15 bp, Homo sapiens
tacaggacatctatg

SEQ ID NO: 1297405 - DNA, 15 bp, Homo sapiens
ctacaggacatctat

SEQ ID NO: 1297406 - DNA, 15 bp, Homo sapiens
actacaggacatcta

SEQ ID NO: 1297407 - DNA, 15 bp, Homo sapiens
tactacaggacatct

SEQ ID NO: 1297408 - DNA, 15 bp, Homo sapiens
ttactacaggacatc

SEQ ID NO: 1297409 - DNA, 15 bp, Homo sapiens
tttactacaggacat

SEQ ID NO: 1297410 - DNA, 15 bp, Homo sapiens
ctttactacaggaca

SEQ ID NO: 1297411 - DNA, 15 bp, Homo sapiens
cctttactacaggac

SEQ ID NO: 1297412 - DNA, 15 bp, Homo sapiens
ccctttactacagga

SEQ ID NO: 1297413 - DNA, 15 bp, Homo sapiens
cccctttactacagg

SEQ ID NO: 1297414 - DNA, 15 bp, Homo sapiens
acccctttactacag

SEQ ID NO: 1297415 - DNA, 15 bp, Homo sapiens
aacccctttactaca

SEQ ID NO: 1297416 - DNA, 15 bp, Homo sapiens
taacccctttactac

SEQ ID NO: 1297417 - DNA, 15 bp, Homo sapiens
ctaacccctttacta

SEQ ID NO: 1297418 - DNA, 15 bp, Homo sapiens
gctaacccctttact

SEQ ID NO: 1297419 - DNA, 15 bp, Homo sapiens
agctaacccctttac

SEQ ID NO: 1297420 - DNA, 15 bp, Homo sapiens
aagctaaccccttta

SEQ ID NO: 1297421 - DNA, 15 bp, Homo sapiens
caagctaaccccttt

SEQ ID NO: 1297422 - DNA, 15 bp, Homo sapiens
gcaagctaacccctt

SEQ ID NO: 1297423 - DNA, 15 bp, Homo sapiens
ggcaagctaacccct

SEQ ID NO: 1297424 - DNA, 15 bp, Homo sapiens
aggcaagctaacccc

SEQ ID NO: 1297425 - DNA, 15 bp, Homo sapiens
gaggcaagctaaccc

SEQ ID NO: 1297426 - DNA, 15 bp, Homo sapiens
agaggcaagctaacc

SEQ ID NO: 1297427 - DNA, 15 bp, Homo sapiens
cagaggcaagctaac

SEQ ID NO: 1297428 - DNA, 15 bp, Homo sapiens
acagaggcaagctaa

SEQ ID NO: 1297429 - DNA, 15 bp, Homo sapiens
aacagaggcaagcta

SEQ ID NO: 1297430 - DNA, 15 bp, Homo sapiens
aaacagaggcaagct

SEQ ID NO: 1297431 - DNA, 15 bp, Homo sapiens
taaacagaggcaagc

SEQ ID NO: 1297432 - DNA, 15 bp, Homo sapiens
ataaacagaggcaag

SEQ ID NO: 1297433 - DNA, 15 bp, Homo sapiens
gataaacagaggcaa

SEQ ID NO: 1297434 - DNA, 15 bp, Homo sapiens
ggataaacagaggca

SEQ ID NO: 1297435 - DNA, 15 bp, Homo sapiens
gggataaacagaggc

SEQ ID NO: 1297436 - DNA, 15 bp, Homo sapiens
cgggataaacagagg

SEQ ID NO: 1297437 - DNA, 15 bp, Homo sapiens
ccgggataaacagag

SEQ ID NO: 1297438 - DNA, 15 bp, Homo sapiens
accgggataaacaga

SEQ ID NO: 1297439 - DNA, 15 bp, Homo sapiens
caccgggataaacag

SEQ ID NO: 1297440 - DNA, 15 bp, Homo sapiens
tcaccgggataaaca

SEQ ID NO: 1297441 - DNA, 15 bp, Homo sapiens
atcaccgggataaac

SEQ ID NO: 1297442 - DNA, 15 bp, Homo sapiens
aatcaccgggataaa

SEQ ID NO: 1297443 - DNA, 15 bp, Homo sapiens
gaatcaccgggataa

SEQ ID NO: 1297444 - DNA, 15 bp, Homo sapiens
agaatcaccgggata

SEQ ID NO: 1297445 - DNA, 15 bp, Homo sapiens
tagaatcaccgggat

SEQ ID NO: 1297446 - DNA, 15 bp, Homo sapiens
ctagaatcaccggga

SEQ ID NO: 1297447 - DNA, 15 bp, Homo sapiens
actagaatcaccggg

SEQ ID NO: 1297448 - DNA, 15 bp, Homo sapiens
cactagaatcaccgg

SEQ ID NO: 1297449 - DNA, 15 bp, Homo sapiens
tcactagaatcaccg

SEQ ID NO: 1297450 - DNA, 15 bp, Homo sapiens
ttcactagaatcacc

SEQ ID NO: 1297451 - DNA, 15 bp, Homo sapiens
tttcactagaatcac

SEQ ID NO: 1297452 - DNA, 15 bp, Homo sapiens
gtttcactagaatca

SEQ ID NO: 1297453 - DNA, 15 bp, Homo sapiens
agtttcactagaatc

SEQ ID NO: 1297454 - DNA, 15 bp, Homo sapiens
tagtttcactagaat

SEQ ID NO: 1297455 - DNA, 15 bp, Homo sapiens
ttagtttcactagaa

SEQ ID NO: 1297456 - DNA, 15 bp, Homo sapiens
tttagtttcactaga

SEQ ID NO: 1297457 - DNA, 15 bp, Homo sapiens
ttttagtttcactag

SEQ ID NO: 1297458 - DNA, 15 bp, Homo sapiens
attttagtttcacta

SEQ ID NO: 1297459 - DNA, 15 bp, Homo sapiens
cattttagtttcact

SEQ ID NO: 1297460 - DNA, 15 bp, Homo sapiens
gcattttagtttcac

SEQ ID NO: 1297461 - DNA, 15 bp, Homo sapiens
agcattttagtttca

SEQ ID NO: 1297462 - DNA, 15 bp, Homo sapiens
aagcattttagtttc

SEQ ID NO: 1297463 - DNA, 15 bp, Homo sapiens
caagcattttagttt

SEQ ID NO: 1297464 - DNA, 15 bp, Homo sapiens
acaagcattttagtt

SEQ ID NO: 1297465 - DNA, 15 bp, Homo sapiens
aacaagcattttagt

SEQ ID NO: 1297466 - DNA, 15 bp, Homo sapiens
aaacaagcattttag

SEQ ID NO: 1297467 - DNA, 15 bp, Homo sapiens
gaaacaagcatttta

SEQ ID NO: 1297468 - DNA, 15 bp, Homo sapiens
agaaacaagcatttt

SEQ ID NO: 1297469 - DNA, 15 bp, Homo sapiens
tagaaacaagcattt

SEQ ID NO: 1297470 - DNA, 15 bp, Homo sapiens
atagaaacaagcatt

SEQ ID NO: 1297471 - DNA, 15 bp, Homo sapiens
catagaaacaagcat

SEQ ID NO: 1297472 - DNA, 15 bp, Homo sapiens
ccatagaaacaagca

SEQ ID NO: 1297473 - DNA, 15 bp, Homo sapiens
cccatagaaacaagc

SEQ ID NO: 1297474 - DNA, 15 bp, Homo sapiens
ccccatagaaacaag

SEQ ID NO: 1297475 - DNA, 15 bp, Homo sapiens
gccccatagaaacaa

SEQ ID NO: 1297476 - DNA, 15 bp, Homo sapiens
tgccccatagaaaca

SEQ ID NO: 1297477 - DNA, 15 bp, Homo sapiens
gtgccccatagaaac

SEQ ID NO: 1297478 - DNA, 15 bp, Homo sapiens
tgtgccccatagaaa

SEQ ID NO: 1297479 - DNA, 15 bp, Homo sapiens
ctgtgccccatagaa

SEQ ID NO: 1297480 - DNA, 15 bp, Homo sapiens
actgtgccccataga

SEQ ID NO: 1297481 - DNA, 15 bp, Homo sapiens
gactgtgccccatag

SEQ ID NO: 1297482 - DNA, 15 bp, Homo sapiens
ggactgtgccccata

SEQ ID NO: 1297483 - DNA, 15 bp, Homo sapiens
tggactgtgccccat

SEQ ID NO: 1297484 - DNA, 15 bp, Homo sapiens
ctggactgtgcccca

SEQ ID NO: 1297485 - DNA, 15 bp, Homo sapiens
tctggactgtgcccc

SEQ ID NO: 1297486 - DNA, 15 bp, Homo sapiens
atctggactgtgccc

SEQ ID NO: 1297487 - DNA, 15 bp, Homo sapiens
catctggactgtgcc

SEQ ID NO: 1297488 - DNA, 15 bp, Homo sapiens
acatctggactgtgc

SEQ ID NO: 1297489 - DNA, 15 bp, Homo sapiens
cacatctggactgtg

SEQ ID NO: 1297490 - DNA, 15 bp, Homo sapiens
acacatctggactgt

SEQ ID NO: 1297491 - DNA, 15 bp, Homo sapiens
aacacatctggactg

SEQ ID NO: 1297492 - DNA, 15 bp, Homo sapiens
caacacatctggact

SEQ ID NO: 1297493 - DNA, 15 bp, Homo sapiens
acaacacatctggac

SEQ ID NO: 1297494 - DNA, 15 bp, Homo sapiens
aacaacacatctgga

SEQ ID NO: 1297495 - DNA, 15 bp, Homo sapiens
gaacaacacatctgg

SEQ ID NO: 1297496 - DNA, 15 bp, Homo sapiens
tgaacaacacatctg

SEQ ID NO: 1297497 - DNA, 15 bp, Homo sapiens
gtgaacaacacatct

SEQ ID NO: 1297498 - DNA, 15 bp, Homo sapiens
agtgaacaacacatc

SEQ ID NO: 1297499 - DNA, 15 bp, Homo sapiens
aagtgaacaacacat

SEQ ID NO: 1297500 - DNA, 15 bp, Homo sapiens
caagtgaacaacaca

SEQ ID NO: 1297501 - DNA, 15 bp, Homo sapiens
ccaagtgaacaacac

SEQ ID NO: 1297502 - DNA, 15 bp, Homo sapiens
tccaagtgaacaaca

SEQ ID NO: 1297503 - DNA, 15 bp, Homo sapiens
atccaagtgaacaac

SEQ ID NO: 1297504 - DNA, 15 bp, Homo sapiens
aatccaagtgaacaa

SEQ ID NO: 1297505 - DNA, 15 bp, Homo sapiens
caatccaagtgaaca

SEQ ID NO: 1297506 - DNA, 15 bp, Homo sapiens
tcaatccaagtgaac

SEQ ID NO: 1297507 - DNA, 15 bp, Homo sapiens
gtcaatccaagtgaa

SEQ ID NO: 1297508 - DNA, 15 bp, Homo sapiens
ggtcaatccaagtga

SEQ ID NO: 1297509 - DNA, 15 bp, Homo sapiens
tggtcaatccaagtg

SEQ ID NO: 1297510 - DNA, 15 bp, Homo sapiens
ttggtcaatccaagt

SEQ ID NO: 1297511 - DNA, 15 bp, Homo sapiens
attggtcaatccaag

SEQ ID NO: 1297512 - DNA, 15 bp, Homo sapiens
gattggtcaatccaa

SEQ ID NO: 1297513 - DNA, 15 bp, Homo sapiens
ggattggtcaatcca

SEQ ID NO: 1297514 - DNA, 15 bp, Homo sapiens
aggattggtcaatcc

SEQ ID NO: 1297515 - DNA, 15 bp, Homo sapiens
aaggattggtcaatc

SEQ ID NO: 1297516 - DNA, 15 bp, Homo sapiens
aaaggattggtcaat

SEQ ID NO: 1297517 - DNA, 15 bp, Homo sapiens
gaaaggattggtcaa

SEQ ID NO: 1297518 - DNA, 15 bp, Homo sapiens
tgaaaggattggtca

SEQ ID NO: 1297519 - DNA, 15 bp, Homo sapiens
ttgaaaggattggtc

SEQ ID NO: 1297520 - DNA, 15 bp, Homo sapiens
attgaaaggattggt

SEQ ID NO: 1297521 - DNA, 15 bp, Homo sapiens
tattgaaaggattgg

SEQ ID NO: 1297522 - DNA, 15 bp, Homo sapiens
ttattgaaaggattg

SEQ ID NO: 1297523 - DNA, 15 bp, Homo sapiens
tttattgaaaggatt

SEQ ID NO: 1297524 - DNA, 15 bp, Homo sapiens
ctttattgaaaggat

SEQ ID NO: 1297525 - DNA, 15 bp, Homo sapiens
actttattgaaagga

SEQ ID NO: 1297526 - DNA, 15 bp, Homo sapiens
aactttattgaaagg

SEQ ID NO: 1297527 - DNA, 15 bp, Homo sapiens
aaactttattgaaag

SEQ ID NO: 1297528 - DNA, 15 bp, Homo sapiens
aaaactttattgaaa

SEQ ID NO: 1297529 - DNA, 15 bp, Homo sapiens
caaaactttattgaa

SEQ ID NO: 1297530 - DNA, 15 bp, Homo sapiens
tcaaaactttattga

SEQ ID NO: 1297531 - DNA, 15 bp, Homo sapiens
atcaaaactttattg

SEQ ID NO: 1297532 - DNA, 15 bp, Homo sapiens
catcaaaactttatt

SEQ ID NO: 1297533 - DNA, 15 bp, Homo sapiens
gcatcaaaactttat

SEQ ID NO: 1297534 - DNA, 15 bp, Homo sapiens
tgcatcaaaacttta

SEQ ID NO: 1297535 - DNA, 15 bp, Homo sapiens
ttgcatcaaaacttt

SEQ ID NO: 1297536 - DNA, 15 bp, Homo sapiens
gttgcatcaaaactt

SEQ ID NO: 1297537 - DNA, 15 bp, Homo sapiens
ggttgcatcaaaact

SEQ ID NO: 1297538 - DNA, 15 bp, Homo sapiens
tggttgcatcaaaac

SEQ ID NO: 1297539 - DNA, 15 bp, Homo sapiens
atggttgcatcaaaa

SEQ ID NO: 1297540 - DNA, 15 bp, Homo sapiens
catggttgcatcaaa

SEQ ID NO: 1297541 - DNA, 15 bp, Homo sapiens
acatggttgcatcaa

SEQ ID NO: 1297542 - DNA, 15 bp, Homo sapiens
cacatggttgcatca

SEQ ID NO: 1297543 - DNA, 15 bp, Homo sapiens
tcacatggttgcatc

SEQ ID NO: 1297544 - DNA, 15 bp, Homo sapiens
ttcacatggttgcat

SEQ ID NO: 1297545 - DNA, 15 bp, Homo sapiens
attcacatggttgca

SEQ ID NO: 1297546 - DNA, 15 bp, Homo sapiens
gattcacatggttgc

SEQ ID NO: 1297547 - DNA, 15 bp, Homo sapiens
ggattcacatggttg

SEQ ID NO: 1297548 - DNA, 15 bp, Homo sapiens
gggattcacatggtt

SEQ ID NO: 1297549 - DNA, 15 bp, Homo sapiens
tgggattcacatggt

SEQ ID NO: 1297550 - DNA, 15 bp, Homo sapiens
ttgggattcacatgg

SEQ ID NO: 1297551 - DNA, 15 bp, Homo sapiens
cttgggattcacatg

SEQ ID NO: 1297552 - DNA, 15 bp, Homo sapiens
acttgggattcacat

SEQ ID NO: 1297553 - DNA, 15 bp, Homo sapiens
aacttgggattcaca

SEQ ID NO: 1297554 - DNA, 15 bp, Homo sapiens
aaacttgggattcac

SEQ ID NO: 1297555 - DNA, 15 bp, Homo sapiens
aaaacttgggattca

SEQ ID NO: 1297556 - DNA, 15 bp, Homo sapiens
gaaaacttgggattc

SEQ ID NO: 1297557 - DNA, 15 bp, Homo sapiens
tgaaaacttgggatt

SEQ ID NO: 1297558 - DNA, 15 bp, Homo sapiens
ctgaaaacttgggat

SEQ ID NO: 1297559 - DNA, 15 bp, Homo sapiens
gctgaaaacttggga

SEQ ID NO: 1297560 - DNA, 15 bp, Homo sapiens
tgctgaaaacttggg

SEQ ID NO: 1297561 - DNA, 15 bp, Homo sapiens
gtgctgaaaacttgg

SEQ ID NO: 1297562 - DNA, 15 bp, Homo sapiens
agtgctgaaaacttg

SEQ ID NO: 1297563 - DNA, 15 bp, Homo sapiens
aagtgctgaaaactt

SEQ ID NO: 1297564 - DNA, 15 bp, Homo sapiens
taagtgctgaaaact

SEQ ID NO: 1297565 - DNA, 15 bp, Homo sapiens
ctaagtgctgaaaac

SEQ ID NO: 1297566 - DNA, 15 bp, Homo sapiens
actaagtgctgaaaa

SEQ ID NO: 1297567 - DNA, 15 bp, Homo sapiens
aactaagtgctgaaa

SEQ ID NO: 1297568 - DNA, 15 bp, Homo sapiens
aaactaagtgctgaa

SEQ ID NO: 1297569 - DNA, 15 bp, Homo sapiens
aaaactaagtgctga

SEQ ID NO: 1297570 - DNA, 15 bp, Homo sapiens
caaaactaagtgctg

SEQ ID NO: 1297571 - DNA, 15 bp, Homo sapiens
acaaaactaagtgct

SEQ ID NO: 1297572 - DNA, 15 bp, Homo sapiens
cacaaaactaagtgc

SEQ ID NO: 1297573 - DNA, 15 bp, Homo sapiens
tcacaaaactaagtg

SEQ ID NO: 1297574 - DNA, 15 bp, Homo sapiens
gtcacaaaactaagt

SEQ ID NO: 1297575 - DNA, 15 bp, Homo sapiens
ggtcacaaaactaag

SEQ ID NO: 1297576 - DNA, 15 bp, Homo sapiens
aggtcacaaaactaa

SEQ ID NO: 1297577 - DNA, 15 bp, Homo sapiens
aaggtcacaaaacta

SEQ ID NO: 1297578 - DNA, 15 bp, Homo sapiens
caaggtcacaaaact

SEQ ID NO: 1297579 - DNA, 15 bp, Homo sapiens
tcaaggtcacaaaac

SEQ ID NO: 1297580 - DNA, 15 bp, Homo sapiens
ctcaaggtcacaaaa

SEQ ID NO: 1297581 - DNA, 15 bp, Homo sapiens
gctcaaggtcacaaa

SEQ ID NO: 1297582 - DNA, 15 bp, Homo sapiens
gacttgctcaaggtc

SEQ ID NO: 1297583 - DNA, 15 bp, Homo sapiens
tgacttgctcaaggt

SEQ ID NO: 1297584 - DNA, 15 bp, Homo sapiens
ggtgacttgctcaag

SEQ ID NO: 1297585 - DNA, 15 bp, Homo sapiens
aggtgacttgctcaa

SEQ ID NO: 1297586 - DNA, 15 bp, Homo sapiens
taggtgacttgctca

SEQ ID NO: 1297587 - DNA, 15 bp, Homo sapiens
ttaggtgacttgctc

SEQ ID NO: 1297588 - DNA, 15 bp, Homo sapiens
attaggtgacttgct

SEQ ID NO: 1297589 - DNA, 15 bp, Homo sapiens
gattaggtgacttgc

SEQ ID NO: 1297590 - DNA, 15 bp, Homo sapiens
tgattaggtgacttg

SEQ ID NO: 1297591 - DNA, 15 bp, Homo sapiens
atgattaggtgactt

SEQ ID NO: 1297592 - DNA, 15 bp, Homo sapiens
aatgattaggtgact

SEQ ID NO: 1297593 - DNA, 15 bp, Homo sapiens
taatgattaggtgac

SEQ ID NO: 1297594 - DNA, 15 bp, Homo sapiens
gtaatgattaggtga

SEQ ID NO: 1297595 - DNA, 15 bp, Homo sapiens
tgtaatgattaggtg

SEQ ID NO: 1297596 - DNA, 15 bp, Homo sapiens
atgtaatgattaggt

SEQ ID NO: 1297597 - DNA, 15 bp, Homo sapiens
catgtaatgattagg

SEQ ID NO: 1297598 - DNA, 15 bp, Homo sapiens
gcatgtaatgattag

SEQ ID NO: 1297599 - DNA, 15 bp, Homo sapiens
ggcatgtaatgatta

SEQ ID NO: 1297600 - DNA, 15 bp, Homo sapiens
aggcatgtaatgatt

SEQ ID NO: 1297601 - DNA, 15 bp, Homo sapiens
gaggcatgtaatgat

SEQ ID NO: 1297602 - DNA, 15 bp, Homo sapiens
tgaggcatgtaatga

SEQ ID NO: 1297603 - DNA, 15 bp, Homo sapiens
ctgaggcatgtaatg

SEQ ID NO: 1297604 - DNA, 15 bp, Homo sapiens
actgaggcatgtaat

SEQ ID NO: 1297605 - DNA, 15 bp, Homo sapiens
aactgaggcatgtaa

SEQ ID NO: 1297606 - DNA, 15 bp, Homo sapiens
aaactgaggcatgta

SEQ ID NO: 1297607 - DNA, 15 bp, Homo sapiens
gaaactgaggcatgt

SEQ ID NO: 1297608 - DNA, 15 bp, Homo sapiens
aggaaactgaggcat

SEQ ID NO: 1297609 - DNA, 15 bp, Homo sapiens
cttttacagatgagg

SEQ ID NO: 1297610 - DNA, 15 bp, Homo sapiens
ccttttacagatgag

SEQ ID NO: 1297611 - DNA, 15 bp, Homo sapiens
cccttttacagatga

SEQ ID NO: 1297612 - DNA, 15 bp, Homo sapiens
ccccttttacagatg

SEQ ID NO: 1297613 - DNA, 15 bp, Homo sapiens
tccccttttacagat

SEQ ID NO: 1297614 - DNA, 15 bp, Homo sapiens
atccccttttacaga

SEQ ID NO: 1297615 - DNA, 15 bp, Homo sapiens
tatccccttttacag

SEQ ID NO: 1297616 - DNA, 15 bp, Homo sapiens
ttatccccttttaca

SEQ ID NO: 1297617 - DNA, 15 bp, Homo sapiens
attatccccttttac

SEQ ID NO: 1297618 - DNA, 15 bp, Homo sapiens
tattatcccctttta

SEQ ID NO: 1297619 - DNA, 15 bp, Homo sapiens
ttattatcccctttt

SEQ ID NO: 1297620 - DNA, 15 bp, Homo sapiens
tttattatccccttt

SEQ ID NO: 1297621 - DNA, 15 bp, Homo sapiens
ttttattatcccctt

SEQ ID NO: 1297622 - DNA, 15 bp, Homo sapiens
tttttattatcccct

SEQ ID NO: 1297623 - DNA, 15 bp, Homo sapiens
ctttttattatcccc

SEQ ID NO: 1297624 - DNA, 15 bp, Homo sapiens
gctttttattatccc

SEQ ID NO: 1297625 - DNA, 15 bp, Homo sapiens
tgctttttattatcc

SEQ ID NO: 1297626 - DNA, 15 bp, Homo sapiens
atgctttttattatc

SEQ ID NO: 1297627 - DNA, 15 bp, Homo sapiens
gatgctttttattat

SEQ ID NO: 1297628 - DNA, 15 bp, Homo sapiens
agatgctttttatta

SEQ ID NO: 1297629 - DNA, 15 bp, Homo sapiens
tagatgctttttatt

SEQ ID NO: 1297630 - DNA, 15 bp, Homo sapiens
gtagatgctttttat

SEQ ID NO: 1297631 - DNA, 15 bp, Homo sapiens
agtagatgcttttta

SEQ ID NO: 1297632 - DNA, 15 bp, Homo sapiens
aagtagatgcttttt

SEQ ID NO: 1297633 - DNA, 15 bp, Homo sapiens
gaagtagatgctttt

SEQ ID NO: 1297634 - DNA, 15 bp, Homo sapiens
tgaagtagatgcttt

SEQ ID NO: 1297635 - DNA, 15 bp, Homo sapiens
gtgaagtagatgctt

SEQ ID NO: 1297636 - DNA, 15 bp, Homo sapiens
tgtgaagtagatgct

SEQ ID NO: 1297637 - DNA, 15 bp, Homo sapiens
ctgtgaagtagatgc

SEQ ID NO: 1297638 - DNA, 15 bp, Homo sapiens
cctgtgaagtagatg

SEQ ID NO: 1297639 - DNA, 15 bp, Homo sapiens
ccctgtgaagtagat

SEQ ID NO: 1297640 - DNA, 15 bp, Homo sapiens
accctgtgaagtaga

SEQ ID NO: 1297641 - DNA, 15 bp, Homo sapiens
aaccctgtgaagtag

SEQ ID NO: 1297642 - DNA, 15 bp, Homo sapiens
caaccctgtgaagta

SEQ ID NO: 1297643 - DNA, 15 bp, Homo sapiens
gcaaccctgtgaagt

SEQ ID NO: 1297644 - DNA, 15 bp, Homo sapiens
tgcaaccctgtgaag

SEQ ID NO: 1297645 - DNA, 15 bp, Homo sapiens
atgcaaccctgtgaa

SEQ ID NO: 1297646 - DNA, 15 bp, Homo sapiens
aatgcaaccctgtga

SEQ ID NO: 1297647 - DNA, 15 bp, Homo sapiens
caatgcaaccctgtg

SEQ ID NO: 1297648 - DNA, 15 bp, Homo sapiens
tcaatgcaaccctgt

SEQ ID NO: 1297649 - DNA, 15 bp, Homo sapiens
ctcaatgcaaccctg

SEQ ID NO: 1297650 - DNA, 15 bp, Homo sapiens
cctcaatgcaaccct

SEQ ID NO: 1297651 - DNA, 15 bp, Homo sapiens
tcctcaatgcaaccc

SEQ ID NO: 1297652 - DNA, 15 bp, Homo sapiens
atcctcaatgcaacc

SEQ ID NO: 1297653 - DNA, 15 bp, Homo sapiens
aatcctcaatgcaac

SEQ ID NO: 1297654 - DNA, 15 bp, Homo sapiens
taatcctcaatgcaa

SEQ ID NO: 1297655 - DNA, 15 bp, Homo sapiens
ttaatcctcaatgca

SEQ ID NO: 1297656 - DNA, 15 bp, Homo sapiens
cttaatcctcaatgc

SEQ ID NO: 1297657 - DNA, 15 bp, Homo sapiens
acttaatcctcaatg

SEQ ID NO: 1297658 - DNA, 15 bp, Homo sapiens
cacttaatcctcaat

SEQ ID NO: 1297659 - DNA, 15 bp, Homo sapiens
gcacttaatcctcaa

SEQ ID NO: 1297660 - DNA, 15 bp, Homo sapiens
agcacttaatcctca

SEQ ID NO: 1297661 - DNA, 15 bp, Homo sapiens
aagcacttaatcctc

SEQ ID NO: 1297662 - DNA, 15 bp, Homo sapiens
aaagcacttaatcct

SEQ ID NO: 1297663 - DNA, 15 bp, Homo sapiens
taaagcacttaatcc

SEQ ID NO: 1297664 - DNA, 15 bp, Homo sapiens
ttaaagcacttaatc

SEQ ID NO: 1297665 - DNA, 15 bp, Homo sapiens
attaaagcacttaat

SEQ ID NO: 1297666 - DNA, 15 bp, Homo sapiens
aattaaagcacttaa

SEQ ID NO: 1297667 - DNA, 15 bp, Homo sapiens
taattaaagcactta

SEQ ID NO: 1297668 - DNA, 15 bp, Homo sapiens
ttaattaaagcactt

SEQ ID NO: 1297669 - DNA, 15 bp, Homo sapiens
cttaattaaagcact

SEQ ID NO: 1297670 - DNA, 15 bp, Homo sapiens
ccttaattaaagcac

SEQ ID NO: 1297671 - DNA, 15 bp, Homo sapiens
accttaattaaagca

SEQ ID NO: 1297672 - DNA, 15 bp, Homo sapiens
aaccttaattaaagc

SEQ ID NO: 1297673 - DNA, 15 bp, Homo sapiens
aaaccttaattaaag

SEQ ID NO: 1297674 - DNA, 15 bp, Homo sapiens
aaaaccttaattaaa

SEQ ID NO: 1297675 - DNA, 15 bp, Homo sapiens
taaaaccttaattaa

SEQ ID NO: 1297676 - DNA, 15 bp, Homo sapiens
ctaaaaccttaatta

SEQ ID NO: 1297677 - DNA, 15 bp, Homo sapiens
actaaaaccttaatt

SEQ ID NO: 1297678 - DNA, 15 bp, Homo sapiens
tactaaaaccttaat

SEQ ID NO: 1297679 - DNA, 15 bp, Homo sapiens
gtactaaaaccttaa

SEQ ID NO: 1297680 - DNA, 15 bp, Homo sapiens
tgtactaaaacctta

SEQ ID NO: 1297681 - DNA, 15 bp, Homo sapiens
ctgtactaaaacctt

SEQ ID NO: 1297682 - DNA, 15 bp, Homo sapiens
actgtactaaaacct

SEQ ID NO: 1297683 - DNA, 15 bp, Homo sapiens
aactgtactaaaacc

SEQ ID NO: 1297684 - DNA, 15 bp, Homo sapiens
aaactgtactaaaac

SEQ ID NO: 1297685 - DNA, 15 bp, Homo sapiens
gaaactgtactaaaa

SEQ ID NO: 1297686 - DNA, 15 bp, Homo sapiens
agaaactgtactaaa

SEQ ID NO: 1297687 - DNA, 15 bp, Homo sapiens
cagaaactgtactaa

SEQ ID NO: 1297688 - DNA, 15 bp, Homo sapiens
tcagaaactgtacta

SEQ ID NO: 1297689 - DNA, 15 bp, Homo sapiens
ttcagaaactgtact

SEQ ID NO: 1297690 - DNA, 15 bp, Homo sapiens
tttcagaaactgtac

SEQ ID NO: 1297691 - DNA, 15 bp, Homo sapiens
atttcagaaactgta

SEQ ID NO: 1297692 - DNA, 15 bp, Homo sapiens
tatttcagaaactgt

SEQ ID NO: 1297693 - DNA, 15 bp, Homo sapiens
atatttcagaaactg

SEQ ID NO: 1297694 - DNA, 15 bp, Homo sapiens
tatatttcagaaact

SEQ ID NO: 1297695 - DNA, 15 bp, Homo sapiens
ttatatttcagaaac

SEQ ID NO: 1297696 - DNA, 15 bp, Homo sapiens
attatatttcagaaa

SEQ ID NO: 1297697 - DNA, 15 bp, Homo sapiens
cattatatttcagaa

SEQ ID NO: 1297698 - DNA, 15 bp, Homo sapiens
acattatatttcaga

SEQ ID NO: 1297699 - DNA, 15 bp, Homo sapiens
tacattatatttcag

SEQ ID NO: 1297700 - DNA, 15 bp, Homo sapiens
atacattatatttca

SEQ ID NO: 1297701 - DNA, 15 bp, Homo sapiens
aatacattatatttc

SEQ ID NO: 1297702 - DNA, 15 bp, Homo sapiens
gaatacattatattt

SEQ ID NO: 1297703 - DNA, 15 bp, Homo sapiens
agaatacattatatt

SEQ ID NO: 1297704 - DNA, 15 bp, Homo sapiens
tagaatacattatat

SEQ ID NO: 1297705 - DNA, 15 bp, Homo sapiens
atagaatacattata

SEQ ID NO: 1297706 - DNA, 15 bp, Homo sapiens
tatagaatacattat

SEQ ID NO: 1297707 - DNA, 15 bp, Homo sapiens
atatagaatacatta

SEQ ID NO: 1297708 - DNA, 15 bp, Homo sapiens
tatatagaatacatt

SEQ ID NO: 1297709 - DNA, 15 bp, Homo sapiens
atatatagaatacat

SEQ ID NO: 1297710 - DNA, 15 bp, Homo sapiens
catatatagaataca

SEQ ID NO: 1297711 - DNA, 15 bp, Homo sapiens
ccatatatagaatac

SEQ ID NO: 1297712 - DNA, 15 bp, Homo sapiens
accatatatagaata

SEQ ID NO: 1297713 - DNA, 15 bp, Homo sapiens
taccatatatagaat

SEQ ID NO: 1297714 - DNA, 15 bp, Homo sapiens
ctaccatatatagaa

SEQ ID NO: 1297715 - DNA, 15 bp, Homo sapiens
gctaccatatataga

SEQ ID NO: 1297716 - DNA, 15 bp, Homo sapiens
agctaccatatatag

SEQ ID NO: 1297717 - DNA, 15 bp, Homo sapiens
tagctaccatatata

SEQ ID NO: 1297718 - DNA, 15 bp, Homo sapiens
atagctaccatatat

SEQ ID NO: 1297719 - DNA, 15 bp, Homo sapiens
aatagctaccatata

SEQ ID NO: 1297720 - DNA, 15 bp, Homo sapiens
taatagctaccatat

SEQ ID NO: 1297721 - DNA, 15 bp, Homo sapiens
ataatagctaccata

SEQ ID NO: 1297722 - DNA, 15 bp, Homo sapiens
aataatagctaccat

SEQ ID NO: 1297723 - DNA, 15 bp, Homo sapiens
taataatagctacca

SEQ ID NO: 1297724 - DNA, 15 bp, Homo sapiens
ataataatagctacc

SEQ ID NO: 1297725 - DNA, 15 bp, Homo sapiens
cataataatagctac

SEQ ID NO: 1297726 - DNA, 15 bp, Homo sapiens
acataataatagcta

SEQ ID NO: 1297727 - DNA, 15 bp, Homo sapiens
aacataataatagct

SEQ ID NO: 1297728 - DNA, 15 bp, Homo sapiens
taacataataatagc

SEQ ID NO: 1297729 - DNA, 15 bp, Homo sapiens
ctaacataataatag

SEQ ID NO: 1297730 - DNA, 15 bp, Homo sapiens
actaacataataata

SEQ ID NO: 1297731 - DNA, 15 bp, Homo sapiens
tactaacataataat

SEQ ID NO: 1297732 - DNA, 15 bp, Homo sapiens
atactaacataataa

SEQ ID NO: 1297733 - DNA, 15 bp, Homo sapiens
gatactaacataata

SEQ ID NO: 1297734 - DNA, 15 bp, Homo sapiens
ggatactaacataat

SEQ ID NO: 1297735 - DNA, 15 bp, Homo sapiens
tggatactaacataa

SEQ ID NO: 1297736 - DNA, 15 bp, Homo sapiens
atggatactaacata

SEQ ID NO: 1297737 - DNA, 15 bp, Homo sapiens
aatggatactaacat

SEQ ID NO: 1297738 - DNA, 15 bp, Homo sapiens
taatggatactaaca

SEQ ID NO: 1297739 - DNA, 15 bp, Homo sapiens
ataatggatactaac

SEQ ID NO: 1297740 - DNA, 15 bp, Homo sapiens
aataatggatactaa

SEQ ID NO: 1297741 - DNA, 15 bp, Homo sapiens
taataatggatacta

SEQ ID NO: 1297742 - DNA, 15 bp, Homo sapiens
ataataatggatact

SEQ ID NO: 1297743 - DNA, 15 bp, Homo sapiens
aataataatggatac

SEQ ID NO: 1297744 - DNA, 15 bp, Homo sapiens
aaataataatggata

SEQ ID NO: 1297745 - DNA, 15 bp, Homo sapiens
caaataataatggat

SEQ ID NO: 1297746 - DNA, 15 bp, Homo sapiens
gcaaataataatgga

SEQ ID NO: 1297747 - DNA, 15 bp, Homo sapiens
agcaaataataatgg

SEQ ID NO: 1297748 - DNA, 15 bp, Homo sapiens
cagcaaataataatg

SEQ ID NO: 1297749 - DNA, 15 bp, Homo sapiens
ccagcaaataataat

SEQ ID NO: 1297750 - DNA, 15 bp, Homo sapiens
tccagcaaataataa

SEQ ID NO: 1297751 - DNA, 15 bp, Homo sapiens
ttccagcaaataata

SEQ ID NO: 1297752 - DNA, 15 bp, Homo sapiens
attccagcaaataat

SEQ ID NO: 1297753 - DNA, 15 bp, Homo sapiens
gattccagcaaataa

SEQ ID NO: 1297754 - DNA, 15 bp, Homo sapiens
agattccagcaaata

SEQ ID NO: 1297755 - DNA, 15 bp, Homo sapiens
aagattccagcaaat

SEQ ID NO: 1297756 - DNA, 15 bp, Homo sapiens
aaagattccagcaaa

SEQ ID NO: 1297757 - DNA, 15 bp, Homo sapiens
aaaagattccagcaa

SEQ ID NO: 1297758 - DNA, 15 bp, Homo sapiens
taaaagattccagca

SEQ ID NO: 1297759 - DNA, 15 bp, Homo sapiens
agtgttaaaagattc

SEQ ID NO: 1297760 - DNA, 15 bp, Homo sapiens
cagtgttaaaagatt

SEQ ID NO: 1297761 - DNA, 15 bp, Homo sapiens
acagtgttaaaagat

SEQ ID NO: 1297762 - DNA, 15 bp, Homo sapiens
cacagtgttaaaaga

SEQ ID NO: 1297763 - DNA, 15 bp, Homo sapiens
gcacagtgttaaaag

SEQ ID NO: 1297764 - DNA, 15 bp, Homo sapiens
agcacagtgttaaaa

SEQ ID NO: 1297765 - DNA, 15 bp, Homo sapiens
cagcacagtgttaaa

SEQ ID NO: 1297766 - DNA, 15 bp, Homo sapiens
tcagcacagtgttaa

SEQ ID NO: 1297767 - DNA, 15 bp, Homo sapiens
ctcagcacagtgtta

SEQ ID NO: 1297768 - DNA, 15 bp, Homo sapiens
actcagcacagtgtt

SEQ ID NO: 1297769 - DNA, 15 bp, Homo sapiens
cactcagcacagtgt

SEQ ID NO: 1297770 - DNA, 15 bp, Homo sapiens
acactcagcacagtg

SEQ ID NO: 1297771 - DNA, 15 bp, Homo sapiens
aacactcagcacagt

SEQ ID NO: 1297772 - DNA, 15 bp, Homo sapiens
caacactcagcacag

SEQ ID NO: 1297773 - DNA, 15 bp, Homo sapiens
ccaacactcagcaca

SEQ ID NO: 1297774 - DNA, 15 bp, Homo sapiens
accaacactcagcac

SEQ ID NO: 1297775 - DNA, 15 bp, Homo sapiens
taccaacactcagca

SEQ ID NO: 1297776 - DNA, 15 bp, Homo sapiens
gtaccaacactcagc

SEQ ID NO: 1297777 - DNA, 15 bp, Homo sapiens
agtaccaacactcag

SEQ ID NO: 1297778 - DNA, 15 bp, Homo sapiens
cagtaccaacactca

SEQ ID NO: 1297779 - DNA, 15 bp, Homo sapiens
acagtaccaacactc

SEQ ID NO: 1297780 - DNA, 15 bp, Homo sapiens
gacagtaccaacact

SEQ ID NO: 1297781 - DNA, 15 bp, Homo sapiens
agacagtaccaacac

SEQ ID NO: 1297782 - DNA, 15 bp, Homo sapiens
aagacagtaccaaca

SEQ ID NO: 1297783 - DNA, 15 bp, Homo sapiens
gaagacagtaccaac

SEQ ID NO: 1297784 - DNA, 15 bp, Homo sapiens
agaagacagtaccaa

SEQ ID NO: 1297785 - DNA, 15 bp, Homo sapiens
aagaagacagtacca

SEQ ID NO: 1297786 - DNA, 15 bp, Homo sapiens
taagaagacagtacc

SEQ ID NO: 1297787 - DNA, 15 bp, Homo sapiens
ataagaagacagtac

SEQ ID NO: 1297788 - DNA, 15 bp, Homo sapiens
gataagaagacagta

SEQ ID NO: 1297789 - DNA, 15 bp, Homo sapiens
tgataagaagacagt

SEQ ID NO: 1297790 - DNA, 15 bp, Homo sapiens
atgataagaagacag

SEQ ID NO: 1297791 - DNA, 15 bp, Homo sapiens
catgataagaagaca

SEQ ID NO: 1297792 - DNA, 15 bp, Homo sapiens
acatgataagaagac

SEQ ID NO: 1297793 - DNA, 15 bp, Homo sapiens
gacatgataagaaga

SEQ ID NO: 1297794 - DNA, 15 bp, Homo sapiens
tgacatgataagaag

SEQ ID NO: 1297795 - DNA, 15 bp, Homo sapiens
atgacatgataagaa

SEQ ID NO: 1297796 - DNA, 15 bp, Homo sapiens
tatgacatgataaga

SEQ ID NO: 1297797 - DNA, 15 bp, Homo sapiens
ctatgacatgataag

SEQ ID NO: 1297798 - DNA, 15 bp, Homo sapiens
tctatgacatgataa

SEQ ID NO: 1297799 - DNA, 15 bp, Homo sapiens
ctctatgacatgata

SEQ ID NO: 1297800 - DNA, 15 bp, Homo sapiens
gctctatgacatgat

SEQ ID NO: 1297801 - DNA, 15 bp, Homo sapiens
tgctctatgacatga

SEQ ID NO: 1297802 - DNA, 15 bp, Homo sapiens
atgctctatgacatg

SEQ ID NO: 1297803 - DNA, 15 bp, Homo sapiens
catgctctatgacat

SEQ ID NO: 1297804 - DNA, 15 bp, Homo sapiens
ccatgctctatgaca

SEQ ID NO: 1297805 - DNA, 15 bp, Homo sapiens
cccatgctctatgac

SEQ ID NO: 1297806 - DNA, 15 bp, Homo sapiens
ccccatgctctatga

SEQ ID NO: 1297807 - DNA, 15 bp, Homo sapiens
accccatgctctatg

SEQ ID NO: 1297808 - DNA, 15 bp, Homo sapiens
taccccatgctctat

SEQ ID NO: 1297809 - DNA, 15 bp, Homo sapiens
ctaccccatgctcta

SEQ ID NO: 1297810 - DNA, 15 bp, Homo sapiens
actaccccatgctct

SEQ ID NO: 1297811 - DNA, 15 bp, Homo sapiens
tactaccccatgctc

SEQ ID NO: 1297812 - DNA, 15 bp, Homo sapiens
atactaccccatgct

SEQ ID NO: 1297813 - DNA, 15 bp, Homo sapiens
tatactaccccatgc

SEQ ID NO: 1297814 - DNA, 15 bp, Homo sapiens
ttatactaccccatg

SEQ ID NO: 1297815 - DNA, 15 bp, Homo sapiens
cttatactaccccat

SEQ ID NO: 1297816 - DNA, 15 bp, Homo sapiens
tcttatactacccca

SEQ ID NO: 1297817 - DNA, 15 bp, Homo sapiens
ttcttatactacccc

SEQ ID NO: 1297818 - DNA, 15 bp, Homo sapiens
attcttatactaccc

SEQ ID NO: 1297819 - DNA, 15 bp, Homo sapiens
gattcttatactacc

SEQ ID NO: 1297820 - DNA, 15 bp, Homo sapiens
ggattcttatactac

SEQ ID NO: 1297821 - DNA, 15 bp, Homo sapiens
aggattcttatacta

SEQ ID NO: 1297822 - DNA, 15 bp, Homo sapiens
taggattcttatact

SEQ ID NO: 1297823 - DNA, 15 bp, Homo sapiens
gtaggattcttatac

SEQ ID NO: 1297824 - DNA, 15 bp, Homo sapiens
ggtaggattcttata

SEQ ID NO: 1297825 - DNA, 15 bp, Homo sapiens
aggtaggattcttat

SEQ ID NO: 1297826 - DNA, 15 bp, Homo sapiens
aaggtaggattctta

SEQ ID NO: 1297827 - DNA, 15 bp, Homo sapiens
taaggtaggattctt

SEQ ID NO: 1297828 - DNA, 15 bp, Homo sapiens
ctaaggtaggattct

SEQ ID NO: 1297829 - DNA, 15 bp, Homo sapiens
cctaaggtaggattc

SEQ ID NO: 1297830 - DNA, 15 bp, Homo sapiens
acctaaggtaggatt

SEQ ID NO: 1297831 - DNA, 15 bp, Homo sapiens
gacctaaggtaggat

SEQ ID NO: 1297832 - DNA, 15 bp, Homo sapiens
tgacctaaggtagga

SEQ ID NO: 1297833 - DNA, 15 bp, Homo sapiens
ttgacctaaggtagg

SEQ ID NO: 1297834 - DNA, 15 bp, Homo sapiens
tttgacctaaggtag

SEQ ID NO: 1297835 - DNA, 15 bp, Homo sapiens
ctttgacctaaggta

SEQ ID NO: 1297836 - DNA, 15 bp, Homo sapiens
acctttgacctaagg

SEQ ID NO: 1297837 - DNA, 15 bp, Homo sapiens
gacctttgacctaag

SEQ ID NO: 1297838 - DNA, 15 bp, Homo sapiens
tgacctttgacctaa

SEQ ID NO: 1297839 - DNA, 15 bp, Homo sapiens
gtgacctttgaccta

SEQ ID NO: 1297840 - DNA, 15 bp, Homo sapiens
tgtgacctttgacct

SEQ ID NO: 1297841 - DNA, 15 bp, Homo sapiens
ttgtgacctttgacc

SEQ ID NO: 1297842 - DNA, 15 bp, Homo sapiens
tttgtgacctttgac

SEQ ID NO: 1297843 - DNA, 15 bp, Homo sapiens
ctttgtgacctttga

SEQ ID NO: 1297844 - DNA, 15 bp, Homo sapiens
gctttgtgacctttg

SEQ ID NO: 1297845 - DNA, 15 bp, Homo sapiens
ggctttgtgaccttt

SEQ ID NO: 1297846 - DNA, 15 bp, Homo sapiens
gggctttgtgacctt

SEQ ID NO: 1297847 - DNA, 15 bp, Homo sapiens
agggctttgtgacct

SEQ ID NO: 1297848 - DNA, 15 bp, Homo sapiens
tagggctttgtgacc

SEQ ID NO: 1297849 - DNA, 15 bp, Homo sapiens
atagggctttgtgac

SEQ ID NO: 1297850 - DNA, 15 bp, Homo sapiens
aatagggctttgtga

SEQ ID NO: 1297851 - DNA, 15 bp, Homo sapiens
caatagggctttgtg

SEQ ID NO: 1297852 - DNA, 15 bp, Homo sapiens
aacaatagggctttg

SEQ ID NO: 1297853 - DNA, 15 bp, Homo sapiens
aaacaatagggcttt

SEQ ID NO: 1297854 - DNA, 15 bp, Homo sapiens
aaaacaatagggctt

SEQ ID NO: 1297855 - DNA, 15 bp, Homo sapiens
taaaacaatagggct

SEQ ID NO: 1297856 - DNA, 15 bp, Homo sapiens
ataaaacaatagggc

SEQ ID NO: 1297857 - DNA, 15 bp, Homo sapiens
aataaaacaataggg

SEQ ID NO: 1297858 - DNA, 15 bp, Homo sapiens
gaataaaacaatagg

SEQ ID NO: 1297859 - DNA, 15 bp, Homo sapiens
ggaataaaacaatag

SEQ ID NO: 1297860 - DNA, 15 bp, Homo sapiens
gggaataaaacaata

SEQ ID NO: 1297861 - DNA, 15 bp, Homo sapiens
tgggaataaaacaat

SEQ ID NO: 1297862 - DNA, 15 bp, Homo sapiens
ttgggaataaaacaa

SEQ ID NO: 1297863 - DNA, 15 bp, Homo sapiens
attgggaataaaaca

SEQ ID NO: 1297864 - DNA, 15 bp, Homo sapiens
tattgggaataaaac

SEQ ID NO: 1297865 - DNA, 15 bp, Homo sapiens
ctattgggaataaaa

SEQ ID NO: 1297866 - DNA, 15 bp, Homo sapiens
actattgggaataaa

SEQ ID NO: 1297867 - DNA, 15 bp, Homo sapiens
gactattgggaataa

SEQ ID NO: 1297868 - DNA, 15 bp, Homo sapiens
agactattgggaata

SEQ ID NO: 1297869 - DNA, 15 bp, Homo sapiens
aagactattgggaat

SEQ ID NO: 1297870 - DNA, 15 bp, Homo sapiens
taagactattgggaa

SEQ ID NO: 1297871 - DNA, 15 bp, Homo sapiens
gtaagactattggga

SEQ ID NO: 1297872 - DNA, 15 bp, Homo sapiens
tgtaagactattggg

SEQ ID NO: 1297873 - DNA, 15 bp, Homo sapiens
ctgtaagactattgg

SEQ ID NO: 1297874 - DNA, 15 bp, Homo sapiens
cctgtaagactattg

SEQ ID NO: 1297875 - DNA, 15 bp, Homo sapiens
ccctgtaagactatt

SEQ ID NO: 1297876 - DNA, 15 bp, Homo sapiens
tccctgtaagactat

SEQ ID NO: 1297877 - DNA, 15 bp, Homo sapiens
ttccctgtaagacta

SEQ ID NO: 1297878 - DNA, 15 bp, Homo sapiens
cttccctgtaagact

SEQ ID NO: 1297879 - DNA, 15 bp, Homo sapiens
tcttccctgtaagac

SEQ ID NO: 1297880 - DNA, 15 bp, Homo sapiens
atcttccctgtaaga

SEQ ID NO: 1297881 - DNA, 15 bp, Homo sapiens
catcttccctgtaag

SEQ ID NO: 1297882 - DNA, 15 bp, Homo sapiens
gcatcttccctgtaa

SEQ ID NO: 1297883 - DNA, 15 bp, Homo sapiens
tgcatcttccctgta

SEQ ID NO: 1297884 - DNA, 15 bp, Homo sapiens
ctgcatcttccctgt

SEQ ID NO: 1297885 - DNA, 15 bp, Homo sapiens
actgcatcttccctg

SEQ ID NO: 1297886 - DNA, 15 bp, Homo sapiens
aactgcatcttccct

SEQ ID NO: 1297887 - DNA, 15 bp, Homo sapiens
caactgcatcttccc

SEQ ID NO: 1297888 - DNA, 15 bp, Homo sapiens
acaactgcatcttcc

SEQ ID NO: 1297889 - DNA, 15 bp, Homo sapiens
gacaactgcatcttc

SEQ ID NO: 1297890 - DNA, 15 bp, Homo sapiens
ggacaactgcatctt

SEQ ID NO: 1297891 - DNA, 15 bp, Homo sapiens
aggacaactgcatct

SEQ ID NO: 1297892 - DNA, 15 bp, Homo sapiens
aaggacaactgcatc

SEQ ID NO: 1297893 - DNA, 15 bp, Homo sapiens
caaggacaactgcat

SEQ ID NO: 1297894 - DNA, 15 bp, Homo sapiens
acaaggacaactgca

SEQ ID NO: 1297895 - DNA, 15 bp, Homo sapiens
gacaaggacaactgc

SEQ ID NO: 1297896 - DNA, 15 bp, Homo sapiens
agacaaggacaactg

SEQ ID NO: 1297897 - DNA, 15 bp, Homo sapiens
aagacaaggacaact

SEQ ID NO: 1297898 - DNA, 15 bp, Homo sapiens
taagacaaggacaac

SEQ ID NO: 1297899 - DNA, 15 bp, Homo sapiens
ataagacaaggacaa

SEQ ID NO: 1297900 - DNA, 15 bp, Homo sapiens
cataagacaaggaca

SEQ ID NO: 1297901 - DNA, 15 bp, Homo sapiens
ccataagacaaggac

SEQ ID NO: 1297902 - DNA, 15 bp, Homo sapiens
tccataagacaagga

SEQ ID NO: 1297903 - DNA, 15 bp, Homo sapiens
ctccataagacaagg

SEQ ID NO: 1297904 - DNA, 15 bp, Homo sapiens
cctccataagacaag

SEQ ID NO: 1297905 - DNA, 15 bp, Homo sapiens
tcctccataagacaa

SEQ ID NO: 1297906 - DNA, 15 bp, Homo sapiens
ttcctccataagaca

SEQ ID NO: 1297907 - DNA, 15 bp, Homo sapiens
cttcctccataagac

SEQ ID NO: 1297908 - DNA, 15 bp, Homo sapiens
ccttcctccataaga

SEQ ID NO: 1297909 - DNA, 15 bp, Homo sapiens
tccttcctccataag

SEQ ID NO: 1297910 - DNA, 15 bp, Homo sapiens
ctccttcctccataa

SEQ ID NO: 1297911 - DNA, 15 bp, Homo sapiens
cctccttcctccata

SEQ ID NO: 1297912 - DNA, 15 bp, Homo sapiens
acctccttcctccat

SEQ ID NO: 1297913 - DNA, 15 bp, Homo sapiens
cacctccttcctcca

SEQ ID NO: 1297914 - DNA, 15 bp, Homo sapiens
tcacctccttcctcc

SEQ ID NO: 1297915 - DNA, 15 bp, Homo sapiens
ttcacctccttcctc

SEQ ID NO: 1297916 - DNA, 15 bp, Homo sapiens
cttcacctccttcct

SEQ ID NO: 1297917 - DNA, 15 bp, Homo sapiens
gcttcacctccttcc

SEQ ID NO: 1297918 - DNA, 15 bp, Homo sapiens
tgcttcacctccttc

SEQ ID NO: 1297919 - DNA, 15 bp, Homo sapiens
gtgcttcacctcctt

SEQ ID NO: 1297920 - DNA, 15 bp, Homo sapiens
tgtgcttcacctcct

SEQ ID NO: 1297921 - DNA, 15 bp, Homo sapiens
gtgtgcttcacctcc

SEQ ID NO: 1297922 - DNA, 15 bp, Homo sapiens
ggtgtgcttcacctc

SEQ ID NO: 1297923 - DNA, 15 bp, Homo sapiens
gggtgtgcttcacct

SEQ ID NO: 1297924 - DNA, 15 bp, Homo sapiens
cgggtgtgcttcacc

SEQ ID NO: 1297925 - DNA, 15 bp, Homo sapiens
tcgggtgtgcttcac

SEQ ID NO: 1297926 - DNA, 15 bp, Homo sapiens
ctcgggtgtgcttca

SEQ ID NO: 1297927 - DNA, 15 bp, Homo sapiens
gctcgggtgtgcttc

SEQ ID NO: 1297928 - DNA, 15 bp, Homo sapiens
cgctcgggtgtgctt

SEQ ID NO: 1297929 - DNA, 15 bp, Homo sapiens
ccgctcgggtgtgct

SEQ ID NO: 1297930 - DNA, 15 bp, Homo sapiens
accgctcgggtgtgc

SEQ ID NO: 1297931 - DNA, 15 bp, Homo sapiens
taccgctcgggtgtg

SEQ ID NO: 1297932 - DNA, 15 bp, Homo sapiens
ttaccgctcgggtgt

SEQ ID NO: 1297933 - DNA, 15 bp, Homo sapiens
tttaccgctcgggtg

SEQ ID NO: 1297934 - DNA, 15 bp, Homo sapiens
ctttaccgctcgggt

SEQ ID NO: 1297935 - DNA, 15 bp, Homo sapiens
tctttaccgctcggg

SEQ ID NO: 1297936 - DNA, 15 bp, Homo sapiens
ctctttaccgctcgg

SEQ ID NO: 1297937 - DNA, 15 bp, Homo sapiens
cctctttaccgctcg

SEQ ID NO: 1297938 - DNA, 15 bp, Homo sapiens
gcctctttaccgctc

SEQ ID NO: 1297939 - DNA, 15 bp, Homo sapiens
ggcctctttaccgct

SEQ ID NO: 1297940 - DNA, 15 bp, Homo sapiens
gggcctctttaccgc

SEQ ID NO: 1297941 - DNA, 15 bp, Homo sapiens
ggggcctctttaccg

SEQ ID NO: 1297942 - DNA, 15 bp, Homo sapiens
aggggcctctttacc

SEQ ID NO: 1297943 - DNA, 15 bp, Homo sapiens
caggggcctctttac

SEQ ID NO: 1297944 - DNA, 15 bp, Homo sapiens
ccaggggcctcttta

SEQ ID NO: 1297945 - DNA, 15 bp, Homo sapiens
accaggggcctcttt

SEQ ID NO: 1297946 - DNA, 15 bp, Homo sapiens
gaccaggggcctctt

SEQ ID NO: 1297947 - DNA, 15 bp, Homo sapiens
tgaccaggggcctct

SEQ ID NO: 1297948 - DNA, 15 bp, Homo sapiens
gtgaccaggggcctc

SEQ ID NO: 1297949 - DNA, 15 bp, Homo sapiens
tgtgaccaggggcct

SEQ ID NO: 1297950 - DNA, 15 bp, Homo sapiens
gtgtgaccaggggcc

SEQ ID NO: 1297951 - DNA, 15 bp, Homo sapiens
tgtgtgaccaggggc

SEQ ID NO: 1297952 - DNA, 15 bp, Homo sapiens
ctgtgtgaccagggg

SEQ ID NO: 1297953 - DNA, 15 bp, Homo sapiens
gctgtgtgaccaggg

SEQ ID NO: 1297954 - DNA, 15 bp, Homo sapiens
ggctgtgtgaccagg

SEQ ID NO: 1297955 - DNA, 15 bp, Homo sapiens
gggctgtgtgaccag

SEQ ID NO: 1297956 - DNA, 15 bp, Homo sapiens
tgggctgtgtgacca

SEQ ID NO: 1297957 - DNA, 15 bp, Homo sapiens
atgggctgtgtgacc

SEQ ID NO: 1297958 - DNA, 15 bp, Homo sapiens
tatgggctgtgtgac

SEQ ID NO: 1297959 - DNA, 15 bp, Homo sapiens
gtatgggctgtgtga

SEQ ID NO: 1297960 - DNA, 15 bp, Homo sapiens
tgtatgggctgtgtg

SEQ ID NO: 1297961 - DNA, 15 bp, Homo sapiens
ctgtatgggctgtgt

SEQ ID NO: 1297962 - DNA, 15 bp, Homo sapiens
cctgtatgggctgtg

SEQ ID NO: 1297963 - DNA, 15 bp, Homo sapiens
tcctgtatgggctgt

SEQ ID NO: 1297964 - DNA, 15 bp, Homo sapiens
ctcctgtatgggctg

SEQ ID NO: 1297965 - DNA, 15 bp, Homo sapiens
actcctgtatgggct

SEQ ID NO: 1297966 - DNA, 15 bp, Homo sapiens
gactcctgtatgggc

SEQ ID NO: 1297967 - DNA, 15 bp, Homo sapiens
tgactcctgtatggg

SEQ ID NO: 1297968 - DNA, 15 bp, Homo sapiens
ttgactcctgtatgg

SEQ ID NO: 1297969 - DNA, 15 bp, Homo sapiens
tttgactcctgtatg

SEQ ID NO: 1297970 - DNA, 15 bp, Homo sapiens
gtttgactcctgtat

SEQ ID NO: 1297971 - DNA, 15 bp, Homo sapiens
ggtttgactcctgta

SEQ ID NO: 1297972 - DNA, 15 bp, Homo sapiens
gggtttgactcctgt

SEQ ID NO: 1297973 - DNA, 15 bp, Homo sapiens
agggtttgactcctg

SEQ ID NO: 1297974 - DNA, 15 bp, Homo sapiens
cagggtttgactcct

SEQ ID NO: 1297975 - DNA, 15 bp, Homo sapiens
ccagggtttgactcc

SEQ ID NO: 1297976 - DNA, 15 bp, Homo sapiens
gccagggtttgactc

SEQ ID NO: 1297977 - DNA, 15 bp, Homo sapiens
ggccagggtttgact

SEQ ID NO: 1297978 - DNA, 15 bp, Homo sapiens
aggccagggtttgac

SEQ ID NO: 1297979 - DNA, 15 bp, Homo sapiens
gaggccagggtttga

SEQ ID NO: 1297980 - DNA, 15 bp, Homo sapiens
agaggccagggtttg

SEQ ID NO: 1297981 - DNA, 15 bp, Homo sapiens
cagaggccagggttt

SEQ ID NO: 1297982 - DNA, 15 bp, Homo sapiens
ccagaggccagggtt

SEQ ID NO: 1297983 - DNA, 15 bp, Homo sapiens
gccagaggccagggt

SEQ ID NO: 1297984 - DNA, 15 bp, Homo sapiens
agccagaggccaggg

SEQ ID NO: 1297985 - DNA, 15 bp, Homo sapiens
cagccagaggccagg

SEQ ID NO: 1297986 - DNA, 15 bp, Homo sapiens
gcagccagaggccag

SEQ ID NO: 1297987 - DNA, 15 bp, Homo sapiens
tgcagccagaggcca

SEQ ID NO: 1297988 - DNA, 15 bp, Homo sapiens
ttgcagccagaggcc

SEQ ID NO: 1297989 - DNA, 15 bp, Homo sapiens
cttgcagccagaggc

SEQ ID NO: 1297990 - DNA, 15 bp, Homo sapiens
gcttgcagccagagg

SEQ ID NO: 1297991 - DNA, 15 bp, Homo sapiens
ggcttgcagccagag

SEQ ID NO: 1297992 - DNA, 15 bp, Homo sapiens
aggcttgcagccaga

SEQ ID NO: 1297993 - DNA, 15 bp, Homo sapiens
caggcttgcagccag

SEQ ID NO: 1297994 - DNA, 15 bp, Homo sapiens
gcaggcttgcagcca

SEQ ID NO: 1297995 - DNA, 15 bp, Homo sapiens
ggcaggcttgcagcc

SEQ ID NO: 1297996 - DNA, 15 bp, Homo sapiens
tggcaggcttgcagc

SEQ ID NO: 1297997 - DNA, 15 bp, Homo sapiens
atggcaggcttgcag

SEQ ID NO: 1297998 - DNA, 15 bp, Homo sapiens
gatggcaggcttgca

SEQ ID NO: 1297999 - DNA, 15 bp, Homo sapiens
ggatggcaggcttgc

SEQ ID NO: 1298000 - DNA, 15 bp, Homo sapiens
gggatggcaggcttg

SEQ ID NO: 1298001 - DNA, 15 bp, Homo sapiens
ggggatggcaggctt

SEQ ID NO: 1298002 - DNA, 15 bp, Homo sapiens
tggggatggcaggct

SEQ ID NO: 1298003 - DNA, 15 bp, Homo sapiens
ttggggatggcaggc

SEQ ID NO: 1298004 - DNA, 15 bp, Homo sapiens
cttggggatggcagg

SEQ ID NO: 1298005 - DNA, 15 bp, Homo sapiens
gcttggggatggcag

SEQ ID NO: 1298006 - DNA, 15 bp, Homo sapiens
cgcttggggatggca

SEQ ID NO: 1298007 - DNA, 15 bp, Homo sapiens
acgcttggggatggc

SEQ ID NO: 1298008 - DNA, 15 bp, Homo sapiens
gacgcttggggatgg

SEQ ID NO: 1298009 - DNA, 15 bp, Homo sapiens
agacgcttggggatg

SEQ ID NO: 1298010 - DNA, 15 bp, Homo sapiens
gagacgcttggggat

SEQ ID NO: 1298011 - DNA, 15 bp, Homo sapiens
agagacgcttgggga

SEQ ID NO: 1298012 - DNA, 15 bp, Homo sapiens
gagagacgcttgggg

SEQ ID NO: 1298013 - DNA, 15 bp, Homo sapiens
agagagacgcttggg

SEQ ID NO: 1298014 - DNA, 15 bp, Homo sapiens
tagagagacgcttgg

SEQ ID NO: 1298015 - DNA, 15 bp, Homo sapiens
ttagagagacgcttg

SEQ ID NO: 1298016 - DNA, 15 bp, Homo sapiens
tttagagagacgctt

SEQ ID NO: 1298017 - DNA, 15 bp, Homo sapiens
ctttagagagacgct

SEQ ID NO: 1298018 - DNA, 15 bp, Homo sapiens
gctttagagagacgc

SEQ ID NO: 1298019 - DNA, 15 bp, Homo sapiens
agctttagagagacg

SEQ ID NO: 1298020 - DNA, 15 bp, Homo sapiens
aagctttagagagac

SEQ ID NO: 1298021 - DNA, 15 bp, Homo sapiens
gaagctttagagaga

SEQ ID NO: 1298022 - DNA, 15 bp, Homo sapiens
agaagctttagagag

SEQ ID NO: 1298023 - DNA, 15 bp, Homo sapiens
aagaagctttagaga

SEQ ID NO: 1298024 - DNA, 15 bp, Homo sapiens
caagaagctttagag

SEQ ID NO: 1298025 - DNA, 15 bp, Homo sapiens
acaagaagctttaga

SEQ ID NO: 1298026 - DNA, 15 bp, Homo sapiens
gacaagaagctttag

SEQ ID NO: 1298027 - DNA, 15 bp, Homo sapiens
tgacaagaagcttta

SEQ ID NO: 1298028 - DNA, 15 bp, Homo sapiens
ttgacaagaagcttt

SEQ ID NO: 1298029 - DNA, 15 bp, Homo sapiens
gttgacaagaagctt

SEQ ID NO: 1298030 - DNA, 15 bp, Homo sapiens
ggttgacaagaagct

SEQ ID NO: 1298031 - DNA, 15 bp, Homo sapiens
tggttgacaagaagc

SEQ ID NO: 1298032 - DNA, 15 bp, Homo sapiens
ctggttgacaagaag

SEQ ID NO: 1298033 - DNA, 15 bp, Homo sapiens
gctggttgacaagaa

SEQ ID NO: 1298034 - DNA, 15 bp, Homo sapiens
ggctggttgacaaga

SEQ ID NO: 1298035 - DNA, 15 bp, Homo sapiens
aggctggttgacaag

SEQ ID NO: 1298036 - DNA, 15 bp, Homo sapiens
gaggctggttgacaa

SEQ ID NO: 1298037 - DNA, 15 bp, Homo sapiens
tgaggctggttgaca

SEQ ID NO: 1298038 - DNA, 15 bp, Homo sapiens
ctgaggctggttgac

SEQ ID NO: 1298039 - DNA, 15 bp, Homo sapiens
tctgaggctggttga

SEQ ID NO: 1298040 - DNA, 15 bp, Homo sapiens
gtctgaggctggttg

SEQ ID NO: 1298041 - DNA, 15 bp, Homo sapiens
tgtctgaggctggtt

SEQ ID NO: 1298042 - DNA, 15 bp, Homo sapiens
ctgtctgaggctggt

SEQ ID NO: 1298043 - DNA, 15 bp, Homo sapiens
cctgtctgaggctgg

SEQ ID NO: 1298044 - DNA, 15 bp, Homo sapiens
ccctgtctgaggctg

SEQ ID NO: 1298045 - DNA, 15 bp, Homo sapiens
cccctgtctgaggct

SEQ ID NO: 1298046 - DNA, 15 bp, Homo sapiens
gcccctgtctgaggc

SEQ ID NO: 1298047 - DNA, 15 bp, Homo sapiens
ggcccctgtctgagg

SEQ ID NO: 1298048 - DNA, 15 bp, Homo sapiens
gggcccctgtctgag

SEQ ID NO: 1298049 - DNA, 15 bp, Homo sapiens
tgggcccctgtctga

SEQ ID NO: 1298050 - DNA, 15 bp, Homo sapiens
gtgggcccctgtctg

SEQ ID NO: 1298051 - DNA, 15 bp, Homo sapiens
tgtgggcccctgtct

SEQ ID NO: 1298052 - DNA, 15 bp, Homo sapiens
ctgtgggcccctgtc

SEQ ID NO: 1298053 - DNA, 15 bp, Homo sapiens
tctgtgggcccctgt

SEQ ID NO: 1298054 - DNA, 15 bp, Homo sapiens
gtctgtgggcccctg

SEQ ID NO: 1298055 - DNA, 15 bp, Homo sapiens
tgtctgtgggcccct

SEQ ID NO: 1298056 - DNA, 15 bp, Homo sapiens
gtgtctgtgggcccc

SEQ ID NO: 1298057 - DNA, 15 bp, Homo sapiens
cgtgtctgtgggccc

SEQ ID NO: 1298058 - DNA, 15 bp, Homo sapiens
tcgtgtctgtgggcc

SEQ ID NO: 1298059 - DNA, 15 bp, Homo sapiens
ttcgtgtctgtgggc

SEQ ID NO: 1298060 - DNA, 15 bp, Homo sapiens
gttcgtgtctgtggg

SEQ ID NO: 1298061 - DNA, 15 bp, Homo sapiens
ggttcgtgtctgtgg

SEQ ID NO: 1298062 - DNA, 15 bp, Homo sapiens
aggttcgtgtctgtg

SEQ ID NO: 1298063 - DNA, 15 bp, Homo sapiens
gaggttcgtgtctgt

SEQ ID NO: 1298064 - DNA, 15 bp, Homo sapiens
tgaggttcgtgtctg

SEQ ID NO: 1298065 - DNA, 15 bp, Homo sapiens
atgaggttcgtgtct

SEQ ID NO: 1298066 - DNA, 15 bp, Homo sapiens
gatgaggttcgtgtc

SEQ ID NO: 1298067 - DNA, 15 bp, Homo sapiens
agatgaggttcgtgt

SEQ ID NO: 1298068 - DNA, 15 bp, Homo sapiens
gagatgaggttcgtg

SEQ ID NO: 1298069 - DNA, 15 bp, Homo sapiens
tgagatgaggttcgt

SEQ ID NO: 1298070 - DNA, 15 bp, Homo sapiens
ctgagatgaggttcg

SEQ ID NO: 1298071 - DNA, 15 bp, Homo sapiens
gctgagatgaggttc

SEQ ID NO: 1298072 - DNA, 15 bp, Homo sapiens
cgctgagatgaggtt

SEQ ID NO: 1298073 - DNA, 15 bp, Homo sapiens
acgctgagatgaggt

SEQ ID NO: 1298074 - DNA, 15 bp, Homo sapiens
aacgctgagatgagg

SEQ ID NO: 1298075 - DNA, 15 bp, Homo sapiens
caacgctgagatgag

SEQ ID NO: 1298076 - DNA, 15 bp, Homo sapiens
ccaacgctgagatga

SEQ ID NO: 1298077 - DNA, 15 bp, Homo sapiens
accaacgctgagatg

SEQ ID NO: 1298078 - DNA, 15 bp, Homo sapiens
taccaacgctgagat

SEQ ID NO: 1298079 - DNA, 15 bp, Homo sapiens
ctaccaacgctgaga

SEQ ID NO: 1298080 - DNA, 15 bp, Homo sapiens
cctaccaacgctgag

SEQ ID NO: 1298081 - DNA, 15 bp, Homo sapiens
tcctaccaacgctga

SEQ ID NO: 1298082 - DNA, 15 bp, Homo sapiens
ctcctaccaacgctg

SEQ ID NO: 1298083 - DNA, 15 bp, Homo sapiens
cctcctaccaacgct

SEQ ID NO: 1298084 - DNA, 15 bp, Homo sapiens
gcctcctaccaacgc

SEQ ID NO: 1298085 - DNA, 15 bp, Homo sapiens
tgcctcctaccaacg

SEQ ID NO: 1298086 - DNA, 15 bp, Homo sapiens
gtgcctcctaccaac

SEQ ID NO: 1298087 - DNA, 15 bp, Homo sapiens
ggtgcctcctaccaa

SEQ ID NO: 1298088 - DNA, 15 bp, Homo sapiens
aggtgcctcctacca

SEQ ID NO: 1298089 - DNA, 15 bp, Homo sapiens
aaggtgcctcctacc

SEQ ID NO: 1298090 - DNA, 15 bp, Homo sapiens
gaaggtgcctcctac

SEQ ID NO: 1298091 - DNA, 15 bp, Homo sapiens
ggaaggtgcctccta

SEQ ID NO: 1298092 - DNA, 15 bp, Homo sapiens
tggaaggtgcctcct

SEQ ID NO: 1298093 - DNA, 15 bp, Homo sapiens
gtggaaggtgcctcc

SEQ ID NO: 1298094 - DNA, 15 bp, Homo sapiens
aagtggaaggtgcct

SEQ ID NO: 1298095 - DNA, 15 bp, Homo sapiens
caagtggaaggtgcc

SEQ ID NO: 1298096 - DNA, 15 bp, Homo sapiens
ccaagtggaaggtgc

SEQ ID NO: 1298097 - DNA, 15 bp, Homo sapiens
tccaagtggaaggtg

SEQ ID NO: 1298098 - DNA, 15 bp, Homo sapiens
atccaagtggaaggt

SEQ ID NO: 1298099 - DNA, 15 bp, Homo sapiens
aatccaagtggaagg

SEQ ID NO: 1298100 - DNA, 15 bp, Homo sapiens
gaatccaagtggaag

SEQ ID NO: 1298101 - DNA, 15 bp, Homo sapiens
agaatccaagtggaa

SEQ ID NO: 1298102 - DNA, 15 bp, Homo sapiens
gagaatccaagtgga

SEQ ID NO: 1298103 - DNA, 15 bp, Homo sapiens
agagaatccaagtgg

SEQ ID NO: 1298104 - DNA, 15 bp, Homo sapiens
aagagaatccaagtg

SEQ ID NO: 1298105 - DNA, 15 bp, Homo sapiens
gaagagaatccaagt

SEQ ID NO: 1298106 - DNA, 15 bp, Homo sapiens
tgaagagaatccaag

SEQ ID NO: 1298107 - DNA, 15 bp, Homo sapiens
atgaagagaatccaa

SEQ ID NO: 1298108 - DNA, 15 bp, Homo sapiens
catgaagagaatcca

SEQ ID NO: 1298109 - DNA, 15 bp, Homo sapiens
acatgaagagaatcc

SEQ ID NO: 1298110 - DNA, 15 bp, Homo sapiens
cacatgaagagaatc

SEQ ID NO: 1298111 - DNA, 15 bp, Homo sapiens
ccacatgaagagaat

SEQ ID NO: 1298112 - DNA, 15 bp, Homo sapiens
accacatgaagagaa

SEQ ID NO: 1298113 - DNA, 15 bp, Homo sapiens
aaccacatgaagaga

SEQ ID NO: 1298114 - DNA, 15 bp, Homo sapiens
taaccacatgaagag

SEQ ID NO: 1298115 - DNA, 15 bp, Homo sapiens
ttaaccacatgaaga

SEQ ID NO: 1298116 - DNA, 15 bp, Homo sapiens
cttaaccacatgaag

SEQ ID NO: 1298117 - DNA, 15 bp, Homo sapiens
tcttaaccacatgaa

SEQ ID NO: 1298118 - DNA, 15 bp, Homo sapiens
ctcttaaccacatga

SEQ ID NO: 1298119 - DNA, 15 bp, Homo sapiens
tctcttaaccacatg

SEQ ID NO: 1298120 - DNA, 15 bp, Homo sapiens
ctctcttaaccacat

SEQ ID NO: 1298121 - DNA, 15 bp, Homo sapiens
actctcttaaccaca

SEQ ID NO: 1298122 - DNA, 15 bp, Homo sapiens
gactctcttaaccac

SEQ ID NO: 1298123 - DNA, 15 bp, Homo sapiens
ggactctcttaacca

SEQ ID NO: 1298124 - DNA, 15 bp, Homo sapiens
aggactctcttaacc

SEQ ID NO: 1298125 - DNA, 15 bp, Homo sapiens
caggactctcttaac

SEQ ID NO: 1298126 - DNA, 15 bp, Homo sapiens
tcaggactctcttaa

SEQ ID NO: 1298127 - DNA, 15 bp, Homo sapiens
ctcaggactctctta

SEQ ID NO: 1298128 - DNA, 15 bp, Homo sapiens
actcaggactctctt

SEQ ID NO: 1298129 - DNA, 15 bp, Homo sapiens
aactcaggactctct

SEQ ID NO: 1298130 - DNA, 15 bp, Homo sapiens
gaactcaggactctc

SEQ ID NO: 1298131 - DNA, 15 bp, Homo sapiens
ggaactcaggactct

SEQ ID NO: 1298132 - DNA, 15 bp, Homo sapiens
tggaactcaggactc

SEQ ID NO: 1298133 - DNA, 15 bp, Homo sapiens
ttggaactcaggact

SEQ ID NO: 1298134 - DNA, 15 bp, Homo sapiens
attggaactcaggac

SEQ ID NO: 1298135 - DNA, 15 bp, Homo sapiens
gattggaactcagga

SEQ ID NO: 1298136 - DNA, 15 bp, Homo sapiens
ggattggaactcagg

SEQ ID NO: 1298137 - DNA, 15 bp, Homo sapiens
aggattggaactcag

SEQ ID NO: 1298138 - DNA, 15 bp, Homo sapiens
taggattggaactca

SEQ ID NO: 1298139 - DNA, 15 bp, Homo sapiens
ttaggattggaactc

SEQ ID NO: 1298140 - DNA, 15 bp, Homo sapiens
cttaggattggaact

SEQ ID NO: 1298141 - DNA, 15 bp, Homo sapiens
acttaggattggaac

SEQ ID NO: 1298142 - DNA, 15 bp, Homo sapiens
aacttaggattggaa

SEQ ID NO: 1298143 - DNA, 15 bp, Homo sapiens
gaacttaggattgga

SEQ ID NO: 1298144 - DNA, 15 bp, Homo sapiens
tgaacttaggattgg

SEQ ID NO: 1298145 - DNA, 15 bp, Homo sapiens
gtgaacttaggattg

SEQ ID NO: 1298146 - DNA, 15 bp, Homo sapiens
agtgaacttaggatt

SEQ ID NO: 1298147 - DNA, 15 bp, Homo sapiens
gagtgaacttaggat

SEQ ID NO: 1298148 - DNA, 15 bp, Homo sapiens
cgagtgaacttagga

SEQ ID NO: 1298149 - DNA, 15 bp, Homo sapiens
acgagtgaacttagg

SEQ ID NO: 1298150 - DNA, 15 bp, Homo sapiens
gacgagtgaacttag

SEQ ID NO: 1298151 - DNA, 15 bp, Homo sapiens
agacgagtgaactta

SEQ ID NO: 1298152 - DNA, 15 bp, Homo sapiens
gagacgagtgaactt

SEQ ID NO: 1298153 - DNA, 15 bp, Homo sapiens
agagacgagtgaact

SEQ ID NO: 1298154 - DNA, 15 bp, Homo sapiens
tagagacgagtgaac

SEQ ID NO: 1298155 - DNA, 15 bp, Homo sapiens
gtagagacgagtgaa

SEQ ID NO: 1298156 - DNA, 15 bp, Homo sapiens
ggtagagacgagtga

SEQ ID NO: 1298157 - DNA, 15 bp, Homo sapiens
aggtagagacgagtg

SEQ ID NO: 1298158 - DNA, 15 bp, Homo sapiens
gaggtagagacgagt

SEQ ID NO: 1298159 - DNA, 15 bp, Homo sapiens
ggaggtagagacgag

SEQ ID NO: 1298160 - DNA, 15 bp, Homo sapiens
aggaggtagagacga

SEQ ID NO: 1298161 - DNA, 15 bp, Homo sapiens
aaggaggtagagacg

SEQ ID NO: 1298162 - DNA, 15 bp, Homo sapiens
caaggaggtagagac

SEQ ID NO: 1298163 - DNA, 15 bp, Homo sapiens
gcaaggaggtagaga

SEQ ID NO: 1298164 - DNA, 15 bp, Homo sapiens
ggcaaggaggtagag

SEQ ID NO: 1298165 - DNA, 15 bp, Homo sapiens
aggcaaggaggtaga

SEQ ID NO: 1298166 - DNA, 15 bp, Homo sapiens
aaggcaaggaggtag

SEQ ID NO: 1298167 - DNA, 15 bp, Homo sapiens
aaaggcaaggaggta

SEQ ID NO: 1298168 - DNA, 15 bp, Homo sapiens
caaaggcaaggaggt

SEQ ID NO: 1298169 - DNA, 15 bp, Homo sapiens
acaaaggcaaggagg

SEQ ID NO: 1298170 - DNA, 15 bp, Homo sapiens
cacaaaggcaaggag

SEQ ID NO: 1298171 - DNA, 15 bp, Homo sapiens
gcacaaaggcaagga

SEQ ID NO: 1298172 - DNA, 15 bp, Homo sapiens
tgcacaaaggcaagg

SEQ ID NO: 1298173 - DNA, 15 bp, Homo sapiens
ctgcacaaaggcaag

SEQ ID NO: 1298174 - DNA, 15 bp, Homo sapiens
cctgcacaaaggcaa

SEQ ID NO: 1298175 - DNA, 15 bp, Homo sapiens
acctgcacaaaggca

SEQ ID NO: 1298176 - DNA, 15 bp, Homo sapiens
aacctgcacaaaggc

SEQ ID NO: 1298177 - DNA, 15 bp, Homo sapiens
taacctgcacaaagg

SEQ ID NO: 1298178 - DNA, 15 bp, Homo sapiens
gtaacctgcacaaag

SEQ ID NO: 1298179 - DNA, 15 bp, Homo sapiens
agtaacctgcacaaa

SEQ ID NO: 1298180 - DNA, 15 bp, Homo sapiens
aagtaacctgcacaa

SEQ ID NO: 1298181 - DNA, 15 bp, Homo sapiens
taagtaacctgcaca

SEQ ID NO: 1298182 - DNA, 15 bp, Homo sapiens
ttaagtaacctgcac

SEQ ID NO: 1298183 - DNA, 15 bp, Homo sapiens
gttaagtaacctgca

SEQ ID NO: 1298184 - DNA, 15 bp, Homo sapiens
agttaagtaacctgc

SEQ ID NO: 1298185 - DNA, 15 bp, Homo sapiens
aagttaagtaacctg

SEQ ID NO: 1298186 - DNA, 15 bp, Homo sapiens
aaagttaagtaacct

SEQ ID NO: 1298187 - DNA, 15 bp, Homo sapiens
aaaagttaagtaacc

SEQ ID NO: 1298188 - DNA, 15 bp, Homo sapiens
gaaaagttaagtaac

SEQ ID NO: 1298189 - DNA, 15 bp, Homo sapiens
agaaaagttaagtaa

SEQ ID NO: 1298190 - DNA, 15 bp, Homo sapiens
cagaaaagttaagta

SEQ ID NO: 1298191 - DNA, 15 bp, Homo sapiens
tcagaaaagttaagt

SEQ ID NO: 1298192 - DNA, 15 bp, Homo sapiens
gtcagaaaagttaag

SEQ ID NO: 1298193 - DNA, 15 bp, Homo sapiens
ggtcagaaaagttaa

SEQ ID NO: 1298194 - DNA, 15 bp, Homo sapiens
tggtcagaaaagtta

SEQ ID NO: 1298195 - DNA, 15 bp, Homo sapiens
atggtcagaaaagtt

SEQ ID NO: 1298196 - DNA, 15 bp, Homo sapiens
gatggtcagaaaagt

SEQ ID NO: 1298197 - DNA, 15 bp, Homo sapiens
tgatggtcagaaaag

SEQ ID NO: 1298198 - DNA, 15 bp, Homo sapiens
ctgatggtcagaaaa

SEQ ID NO: 1298199 - DNA, 15 bp, Homo sapiens
actgatggtcagaaa

SEQ ID NO: 1298200 - DNA, 15 bp, Homo sapiens
gactgatggtcagaa

SEQ ID NO: 1298201 - DNA, 15 bp, Homo sapiens
agactgatggtcaga

SEQ ID NO: 1298202 - DNA, 15 bp, Homo sapiens
aagactgatggtcag

SEQ ID NO: 1298203 - DNA, 15 bp, Homo sapiens
gaagactgatggtca

SEQ ID NO: 1298204 - DNA, 15 bp, Homo sapiens
agaagactgatggtc

SEQ ID NO: 1298205 - DNA, 15 bp, Homo sapiens
gagaagactgatggt

SEQ ID NO: 1298206 - DNA, 15 bp, Homo sapiens
agagaagactgatgg

SEQ ID NO: 1298207 - DNA, 15 bp, Homo sapiens
cagagaagactgatg

SEQ ID NO: 1298208 - DNA, 15 bp, Homo sapiens
acagagaagactgat

SEQ ID NO: 1298209 - DNA, 15 bp, Homo sapiens
aacagagaagactga

SEQ ID NO: 1298210 - DNA, 15 bp, Homo sapiens
caacagagaagactg

SEQ ID NO: 1298211 - DNA, 15 bp, Homo sapiens
acaacagagaagact

SEQ ID NO: 1298212 - DNA, 15 bp, Homo sapiens
tacaacagagaagac

SEQ ID NO: 1298213 - DNA, 15 bp, Homo sapiens
ttacaacagagaaga

SEQ ID NO: 1298214 - DNA, 15 bp, Homo sapiens
gttacaacagagaag

SEQ ID NO: 1298215 - DNA, 15 bp, Homo sapiens
tgttacaacagagaa

SEQ ID NO: 1298216 - DNA, 15 bp, Homo sapiens
atgttacaacagaga

SEQ ID NO: 1298217 - DNA, 15 bp, Homo sapiens
tatgttacaacagag

SEQ ID NO: 1298218 - DNA, 15 bp, Homo sapiens
ctatgttacaacaga

SEQ ID NO: 1298219 - DNA, 15 bp, Homo sapiens
cctatgttacaacag

SEQ ID NO: 1298220 - DNA, 15 bp, Homo sapiens
ccctatgttacaaca

SEQ ID NO: 1298221 - DNA, 15 bp, Homo sapiens
tccctatgttacaac

SEQ ID NO: 1298222 - DNA, 15 bp, Homo sapiens
atccctatgttacaa

SEQ ID NO: 1298223 - DNA, 15 bp, Homo sapiens
catccctatgttaca

SEQ ID NO: 1298224 - DNA, 15 bp, Homo sapiens
ccatccctatgttac

SEQ ID NO: 1298225 - DNA, 15 bp, Homo sapiens
accatccctatgtta

SEQ ID NO: 1298226 - DNA, 15 bp, Homo sapiens
taccatccctatgtt

SEQ ID NO: 1298227 - DNA, 15 bp, Homo sapiens
ttaccatccctatgt

SEQ ID NO: 1298228 - DNA, 15 bp, Homo sapiens
gttaccatccctatg

SEQ ID NO: 1298229 - DNA, 15 bp, Homo sapiens
tgttaccatccctat

SEQ ID NO: 1298230 - DNA, 15 bp, Homo sapiens
gtgttaccatcccta

SEQ ID NO: 1298231 - DNA, 15 bp, Homo sapiens
ggtgttaccatccct

SEQ ID NO: 1298232 - DNA, 15 bp, Homo sapiens
gggtgttaccatccc

SEQ ID NO: 1298233 - DNA, 15 bp, Homo sapiens
tgggtgttaccatcc

SEQ ID NO: 1298234 - DNA, 15 bp, Homo sapiens
atgggtgttaccatc

SEQ ID NO: 1298235 - DNA, 15 bp, Homo sapiens
aatgggtgttaccat

SEQ ID NO: 1298236 - DNA, 15 bp, Homo sapiens
aaatgggtgttacca

SEQ ID NO: 1298237 - DNA, 15 bp, Homo sapiens
gaaatgggtgttacc

SEQ ID NO: 1298238 - DNA, 15 bp, Homo sapiens
agaaatgggtgttac

SEQ ID NO: 1298239 - DNA, 15 bp, Homo sapiens
aagaaatgggtgtta

SEQ ID NO: 1298240 - DNA, 15 bp, Homo sapiens
taagaaatgggtgtt

SEQ ID NO: 1298241 - DNA, 15 bp, Homo sapiens
ataagaaatgggtgt

SEQ ID NO: 1298242 - DNA, 15 bp, Homo sapiens
cataagaaatgggtg

SEQ ID NO: 1298243 - DNA, 15 bp, Homo sapiens
gcataagaaatgggt

SEQ ID NO: 1298244 - DNA, 15 bp, Homo sapiens
tgcataagaaatggg

SEQ ID NO: 1298245 - DNA, 15 bp, Homo sapiens
atgcataagaaatgg

SEQ ID NO: 1298246 - DNA, 15 bp, Homo sapiens
catgcataagaaatg

SEQ ID NO: 1298247 - DNA, 15 bp, Homo sapiens
gcatgcataagaaat

SEQ ID NO: 1298248 - DNA, 15 bp, Homo sapiens
tgcatgcataagaaa

SEQ ID NO: 1298249 - DNA, 15 bp, Homo sapiens
ctgcatgcataagaa

SEQ ID NO: 1298250 - DNA, 15 bp, Homo sapiens
actgcatgcataaga

SEQ ID NO: 1298251 - DNA, 15 bp, Homo sapiens
cactgcatgcataag

SEQ ID NO: 1298252 - DNA, 15 bp, Homo sapiens
tcactgcatgcataa

SEQ ID NO: 1298253 - DNA, 15 bp, Homo sapiens
atcactgcatgcata

SEQ ID NO: 1298254 - DNA, 15 bp, Homo sapiens
catcactgcatgcat

SEQ ID NO: 1298255 - DNA, 15 bp, Homo sapiens
gcatcactgcatgca

SEQ ID NO: 1298256 - DNA, 15 bp, Homo sapiens
agcatcactgcatgc

SEQ ID NO: 1298257 - DNA, 15 bp, Homo sapiens
aagcatcactgcatg

SEQ ID NO: 1298258 - DNA, 15 bp, Homo sapiens
taagcatcactgcat

SEQ ID NO: 1298259 - DNA, 15 bp, Homo sapiens
ttaagcatcactgca

SEQ ID NO: 1298260 - DNA, 15 bp, Homo sapiens
attaagcatcactgc

SEQ ID NO: 1298261 - DNA, 15 bp, Homo sapiens
cattaagcatcactg

SEQ ID NO: 1298262 - DNA, 15 bp, Homo sapiens
tcattaagcatcact

SEQ ID NO: 1298263 - DNA, 15 bp, Homo sapiens
gtcattaagcatcac

SEQ ID NO: 1298264 - DNA, 15 bp, Homo sapiens
tgtcattaagcatca

SEQ ID NO: 1298265 - DNA, 15 bp, Homo sapiens
atgtcattaagcatc

SEQ ID NO: 1298266 - DNA, 15 bp, Homo sapiens
tatgtcattaagcat

SEQ ID NO: 1298267 - DNA, 15 bp, Homo sapiens
ttatgtcattaagca

SEQ ID NO: 1298268 - DNA, 15 bp, Homo sapiens
attatgtcattaagc

SEQ ID NO: 1298269 - DNA, 15 bp, Homo sapiens
cattatgtcattaag

SEQ ID NO: 1298270 - DNA, 15 bp, Homo sapiens
acattatgtcattaa

SEQ ID NO: 1298271 - DNA, 15 bp, Homo sapiens
tacattatgtcatta

SEQ ID NO: 1298272 - DNA, 15 bp, Homo sapiens
ctacattatgtcatt

SEQ ID NO: 1298273 - DNA, 15 bp, Homo sapiens
cctacattatgtcat

SEQ ID NO: 1298274 - DNA, 15 bp, Homo sapiens
acctacattatgtca

SEQ ID NO: 1298275 - DNA, 15 bp, Homo sapiens
cacctacattatgtc

SEQ ID NO: 1298276 - DNA, 15 bp, Homo sapiens
ccacctacattatgt

SEQ ID NO: 1298277 - DNA, 15 bp, Homo sapiens
cccacctacattatg

SEQ ID NO: 1298278 - DNA, 15 bp, Homo sapiens
ccccacctacattat

SEQ ID NO: 1298279 - DNA, 15 bp, Homo sapiens
accccacctacatta

SEQ ID NO: 1298280 - DNA, 15 bp, Homo sapiens
aaccccacctacatt

SEQ ID NO: 1298281 - DNA, 15 bp, Homo sapiens
gaaccccacctacat

SEQ ID NO: 1298282 - DNA, 15 bp, Homo sapiens
tgaaccccacctaca

SEQ ID NO: 1298283 - DNA, 15 bp, Homo sapiens
atgaaccccacctac

SEQ ID NO: 1298284 - DNA, 15 bp, Homo sapiens
catgaaccccaccta

SEQ ID NO: 1298285 - DNA, 15 bp, Homo sapiens
gcatgaaccccacct

SEQ ID NO: 1298286 - DNA, 15 bp, Homo sapiens
tgcatgaaccccacc

SEQ ID NO: 1298287 - DNA, 15 bp, Homo sapiens
gtgcatgaaccccac

SEQ ID NO: 1298288 - DNA, 15 bp, Homo sapiens
tgtgcatgaacccca

SEQ ID NO: 1298289 - DNA, 15 bp, Homo sapiens
ttgtgcatgaacccc

SEQ ID NO: 1298290 - DNA, 15 bp, Homo sapiens
cttgtgcatgaaccc

SEQ ID NO: 1298291 - DNA, 15 bp, Homo sapiens
ccttgtgcatgaacc

SEQ ID NO: 1298292 - DNA, 15 bp, Homo sapiens
gccttgtgcatgaac

SEQ ID NO: 1298293 - DNA, 15 bp, Homo sapiens
ggccttgtgcatgaa

SEQ ID NO: 1298294 - DNA, 15 bp, Homo sapiens
aggccttgtgcatga

SEQ ID NO: 1298295 - DNA, 15 bp, Homo sapiens
caggccttgtgcatg

SEQ ID NO: 1298296 - DNA, 15 bp, Homo sapiens
ccaggccttgtgcat

SEQ ID NO: 1298297 - DNA, 15 bp, Homo sapiens
accaggccttgtgca

SEQ ID NO: 1298298 - DNA, 15 bp, Homo sapiens
taccaggccttgtgc

SEQ ID NO: 1298299 - DNA, 15 bp, Homo sapiens
ataccaggccttgtg

SEQ ID NO: 1298300 - DNA, 15 bp, Homo sapiens
tataccaggccttgt

SEQ ID NO: 1298301 - DNA, 15 bp, Homo sapiens
atataccaggccttg

SEQ ID NO: 1298302 - DNA, 15 bp, Homo sapiens
catataccaggcctt

SEQ ID NO: 1298303 - DNA, 15 bp, Homo sapiens
tcatataccaggcct

SEQ ID NO: 1298304 - DNA, 15 bp, Homo sapiens
atcatataccaggcc

SEQ ID NO: 1298305 - DNA, 15 bp, Homo sapiens
catcatataccaggc

SEQ ID NO: 1298306 - DNA, 15 bp, Homo sapiens
tcatcatataccagg

SEQ ID NO: 1298307 - DNA, 15 bp, Homo sapiens
ctcatcatataccag

SEQ ID NO: 1298308 - DNA, 15 bp, Homo sapiens
actcatcatatacca

SEQ ID NO: 1298309 - DNA, 15 bp, Homo sapiens
cactcatcatatacc

SEQ ID NO: 1298310 - DNA, 15 bp, Homo sapiens
gcactcatcatatac

SEQ ID NO: 1298311 - DNA, 15 bp, Homo sapiens
agcactcatcatata

SEQ ID NO: 1298312 - DNA, 15 bp, Homo sapiens
cagcactcatcatat

SEQ ID NO: 1298313 - DNA, 15 bp, Homo sapiens
ccagcactcatcata

SEQ ID NO: 1298314 - DNA, 15 bp, Homo sapiens
accagcactcatcat

SEQ ID NO: 1298315 - DNA, 15 bp, Homo sapiens
taccagcactcatca

SEQ ID NO: 1298316 - DNA, 15 bp, Homo sapiens
ttaccagcactcatc

SEQ ID NO: 1298317 - DNA, 15 bp, Homo sapiens
tttaccagcactcat

SEQ ID NO: 1298318 - DNA, 15 bp, Homo sapiens
atttaccagcactca

SEQ ID NO: 1298319 - DNA, 15 bp, Homo sapiens
gatttaccagcactc

SEQ ID NO: 1298320 - DNA, 15 bp, Homo sapiens
agatttaccagcact

SEQ ID NO: 1298321 - DNA, 15 bp, Homo sapiens
aagatttaccagcac

SEQ ID NO: 1298322 - DNA, 15 bp, Homo sapiens
taagatttaccagca

SEQ ID NO: 1298323 - DNA, 15 bp, Homo sapiens
ctaagatttaccagc

SEQ ID NO: 1298324 - DNA, 15 bp, Homo sapiens
gctaagatttaccag

SEQ ID NO: 1298325 - DNA, 15 bp, Homo sapiens
agctaagatttacca

SEQ ID NO: 1298326 - DNA, 15 bp, Homo sapiens
gagctaagatttacc

SEQ ID NO: 1298327 - DNA, 15 bp, Homo sapiens
ggagctaagatttac

SEQ ID NO: 1298328 - DNA, 15 bp, Homo sapiens
gggagctaagattta

SEQ ID NO: 1298329 - DNA, 15 bp, Homo sapiens
tgggagctaagattt

SEQ ID NO: 1298330 - DNA, 15 bp, Homo sapiens
ttgggagctaagatt

SEQ ID NO: 1298331 - DNA, 15 bp, Homo sapiens
attgggagctaagat

SEQ ID NO: 1298332 - DNA, 15 bp, Homo sapiens
cattgggagctaaga

SEQ ID NO: 1298333 - DNA, 15 bp, Homo sapiens
tcattgggagctaag

SEQ ID NO: 1298334 - DNA, 15 bp, Homo sapiens
gtcattgggagctaa

SEQ ID NO: 1298335 - DNA, 15 bp, Homo sapiens
tgtcattgggagcta

SEQ ID NO: 1298336 - DNA, 15 bp, Homo sapiens
gtgtcattgggagct

SEQ ID NO: 1298337 - DNA, 15 bp, Homo sapiens
agtgtcattgggagc

SEQ ID NO: 1298338 - DNA, 15 bp, Homo sapiens
cagtgtcattgggag

SEQ ID NO: 1298339 - DNA, 15 bp, Homo sapiens
acagtgtcattggga

SEQ ID NO: 1298340 - DNA, 15 bp, Homo sapiens
tacagtgtcattggg

SEQ ID NO: 1298341 - DNA, 15 bp, Homo sapiens
atacagtgtcattgg

SEQ ID NO: 1298342 - DNA, 15 bp, Homo sapiens
gatacagtgtcattg

SEQ ID NO: 1298343 - DNA, 15 bp, Homo sapiens
tgatacagtgtcatt

SEQ ID NO: 1298344 - DNA, 15 bp, Homo sapiens
ctgatacagtgtcat

SEQ ID NO: 1298345 - DNA, 15 bp, Homo sapiens
cctgatacagtgtca

SEQ ID NO: 1298346 - DNA, 15 bp, Homo sapiens
gcctgatacagtgtc

SEQ ID NO: 1298347 - DNA, 15 bp, Homo sapiens
agcctgatacagtgt

SEQ ID NO: 1298348 - DNA, 15 bp, Homo sapiens
gagcctgatacagtg

SEQ ID NO: 1298349 - DNA, 15 bp, Homo sapiens
agagcctgatacagt

SEQ ID NO: 1298350 - DNA, 15 bp, Homo sapiens
cagagcctgatacag

SEQ ID NO: 1298351 - DNA, 15 bp, Homo sapiens
acagagcctgataca

SEQ ID NO: 1298352 - DNA, 15 bp, Homo sapiens
cacagagcctgatac

SEQ ID NO: 1298353 - DNA, 15 bp, Homo sapiens
gcacagagcctgata

SEQ ID NO: 1298354 - DNA, 15 bp, Homo sapiens
agcacagagcctgat

SEQ ID NO: 1298355 - DNA, 15 bp, Homo sapiens
tagcacagagcctga

SEQ ID NO: 1298356 - DNA, 15 bp, Homo sapiens
ctagcacagagcctg

SEQ ID NO: 1298357 - DNA, 15 bp, Homo sapiens
cctagcacagagcct

SEQ ID NO: 1298358 - DNA, 15 bp, Homo sapiens
ccctagcacagagcc

SEQ ID NO: 1298359 - DNA, 15 bp, Homo sapiens
accctagcacagagc

SEQ ID NO: 1298360 - DNA, 15 bp, Homo sapiens
caccctagcacagag

SEQ ID NO: 1298361 - DNA, 15 bp, Homo sapiens
gcaccctagcacaga

SEQ ID NO: 1298362 - DNA, 15 bp, Homo sapiens
agcaccctagcacag

SEQ ID NO: 1298363 - DNA, 15 bp, Homo sapiens
aagcaccctagcaca

SEQ ID NO: 1298364 - DNA, 15 bp, Homo sapiens
aaagcaccctagcac

SEQ ID NO: 1298365 - DNA, 15 bp, Homo sapiens
taaagcaccctagca

SEQ ID NO: 1298366 - DNA, 15 bp, Homo sapiens
gtaaagcaccctagc

SEQ ID NO: 1298367 - DNA, 15 bp, Homo sapiens
cgtaaagcaccctag

SEQ ID NO: 1298368 - DNA, 15 bp, Homo sapiens
tcgtaaagcacccta

SEQ ID NO: 1298369 - DNA, 15 bp, Homo sapiens
ttcgtaaagcaccct

SEQ ID NO: 1298370 - DNA, 15 bp, Homo sapiens
tttcgtaaagcaccc

SEQ ID NO: 1298371 - DNA, 15 bp, Homo sapiens
ttttcgtaaagcacc

SEQ ID NO: 1298372 - DNA, 15 bp, Homo sapiens
attttcgtaaagcac

SEQ ID NO: 1298373 - DNA, 15 bp, Homo sapiens
cattttcgtaaagca

SEQ ID NO: 1298374 - DNA, 15 bp, Homo sapiens
tcattttcgtaaagc

SEQ ID NO: 1298375 - DNA, 15 bp, Homo sapiens
atcattttcgtaaag

SEQ ID NO: 1298376 - DNA, 15 bp, Homo sapiens
gatcattttcgtaaa

SEQ ID NO: 1298377 - DNA, 15 bp, Homo sapiens
agatcattttcgtaa

SEQ ID NO: 1298378 - DNA, 15 bp, Homo sapiens
gagatcattttcgta

SEQ ID NO: 1298379 - DNA, 15 bp, Homo sapiens
tgagatcattttcgt

SEQ ID NO: 1298380 - DNA, 15 bp, Homo sapiens
atgagatcattttcg

SEQ ID NO: 1298381 - DNA, 15 bp, Homo sapiens
catgagatcattttc

SEQ ID NO: 1298382 - DNA, 15 bp, Homo sapiens
acatgagatcatttt

SEQ ID NO: 1298383 - DNA, 15 bp, Homo sapiens
tacatgagatcattt

SEQ ID NO: 1298384 - DNA, 15 bp, Homo sapiens
ttacatgagatcatt

SEQ ID NO: 1298385 - DNA, 15 bp, Homo sapiens
attacatgagatcat

SEQ ID NO: 1298386 - DNA, 15 bp, Homo sapiens
gattacatgagatca

SEQ ID NO: 1298387 - DNA, 15 bp, Homo sapiens
ggattacatgagatc

SEQ ID NO: 1298388 - DNA, 15 bp, Homo sapiens
aggattacatgagat

SEQ ID NO: 1298389 - DNA, 15 bp, Homo sapiens
gaggattacatgaga

SEQ ID NO: 1298390 - DNA, 15 bp, Homo sapiens
tgaggattacatgag

SEQ ID NO: 1298391 - DNA, 15 bp, Homo sapiens
gtgaggattacatga

SEQ ID NO: 1298392 - DNA, 15 bp, Homo sapiens
tgtgaggattacatg

SEQ ID NO: 1298393 - DNA, 15 bp, Homo sapiens
ttgtgaggattacat

SEQ ID NO: 1298394 - DNA, 15 bp, Homo sapiens
gttgtgaggattaca

SEQ ID NO: 1298395 - DNA, 15 bp, Homo sapiens
tgttgtgaggattac

SEQ ID NO: 1298396 - DNA, 15 bp, Homo sapiens
gtgttgtgaggatta

SEQ ID NO: 1298397 - DNA, 15 bp, Homo sapiens
tgtgttgtgaggatt

SEQ ID NO: 1298398 - DNA, 15 bp, Homo sapiens
atgtgttgtgaggat

SEQ ID NO: 1298399 - DNA, 15 bp, Homo sapiens
gatgtgttgtgagga

SEQ ID NO: 1298400 - DNA, 15 bp, Homo sapiens
tgatgtgttgtgagg

SEQ ID NO: 1298401 - DNA, 15 bp, Homo sapiens
ctgatgtgttgtgag

SEQ ID NO: 1298402 - DNA, 15 bp, Homo sapiens
cctgatgtgttgtga

SEQ ID NO: 1298403 - DNA, 15 bp, Homo sapiens
tcctgatgtgttgtg

SEQ ID NO: 1298404 - DNA, 15 bp, Homo sapiens
atcctgatgtgttgt

SEQ ID NO: 1298405 - DNA, 15 bp, Homo sapiens
tatcctgatgtgttg

SEQ ID NO: 1298406 - DNA, 15 bp, Homo sapiens
atatcctgatgtgtt

SEQ ID NO: 1298407 - DNA, 15 bp, Homo sapiens
aatatcctgatgtgt

SEQ ID NO: 1298408 - DNA, 15 bp, Homo sapiens
caatatcctgatgtg

SEQ ID NO: 1298409 - DNA, 15 bp, Homo sapiens
ccaatatcctgatgt

SEQ ID NO: 1298410 - DNA, 15 bp, Homo sapiens
accaatatcctgatg

SEQ ID NO: 1298411 - DNA, 15 bp, Homo sapiens
taccaatatcctgat

SEQ ID NO: 1298412 - DNA, 15 bp, Homo sapiens
gtaccaatatcctga

SEQ ID NO: 1298413 - DNA, 15 bp, Homo sapiens
agtaccaatatcctg

SEQ ID NO: 1298414 - DNA, 15 bp, Homo sapiens
gagtaccaatatcct

SEQ ID NO: 1298415 - DNA, 15 bp, Homo sapiens
agagtaccaatatcc

SEQ ID NO: 1298416 - DNA, 15 bp, Homo sapiens
aagagtaccaatatc

SEQ ID NO: 1298417 - DNA, 15 bp, Homo sapiens
gaagagtaccaatat

SEQ ID NO: 1298418 - DNA, 15 bp, Homo sapiens
tgaagagtaccaata

SEQ ID NO: 1298419 - DNA, 15 bp, Homo sapiens
atgaagagtaccaat

SEQ ID NO: 1298420 - DNA, 15 bp, Homo sapiens
aatgaagagtaccaa

SEQ ID NO: 1298421 - DNA, 15 bp, Homo sapiens
aaatgaagagtacca

SEQ ID NO: 1298422 - DNA, 15 bp, Homo sapiens
aaaatgaagagtacc

SEQ ID NO: 1298423 - DNA, 15 bp, Homo sapiens
taaaatgaagagtac

SEQ ID NO: 1298424 - DNA, 15 bp, Homo sapiens
gtaaaatgaagagta

SEQ ID NO: 1298425 - DNA, 15 bp, Homo sapiens
tgtaaaatgaagagt

SEQ ID NO: 1298426 - DNA, 15 bp, Homo sapiens
ctgtaaaatgaagag

SEQ ID NO: 1298427 - DNA, 15 bp, Homo sapiens
tctgtaaaatgaaga

SEQ ID NO: 1298428 - DNA, 15 bp, Homo sapiens
ccatctgtaaaatga

SEQ ID NO: 1298429 - DNA, 15 bp, Homo sapiens
cccatctgtaaaatg

SEQ ID NO: 1298430 - DNA, 15 bp, Homo sapiens
ccccatctgtaaaat

SEQ ID NO: 1298431 - DNA, 15 bp, Homo sapiens
tccccatctgtaaaa

SEQ ID NO: 1298432 - DNA, 15 bp, Homo sapiens
ttccccatctgtaaa

SEQ ID NO: 1298433 - DNA, 15 bp, Homo sapiens
tttccccatctgtaa

SEQ ID NO: 1298434 - DNA, 15 bp, Homo sapiens
gtttccccatctgta

SEQ ID NO: 1298435 - DNA, 15 bp, Homo sapiens
agtttccccatctgt

SEQ ID NO: 1298436 - DNA, 15 bp, Homo sapiens
cagtttccccatctg

SEQ ID NO: 1298437 - DNA, 15 bp, Homo sapiens
tcagtttccccatct

SEQ ID NO: 1298438 - DNA, 15 bp, Homo sapiens
ctcagtttccccatc

SEQ ID NO: 1298439 - DNA, 15 bp, Homo sapiens
cctcagtttccccat

SEQ ID NO: 1298440 - DNA, 15 bp, Homo sapiens
agcctcagtttcccc

SEQ ID NO: 1298441 - DNA, 15 bp, Homo sapiens
gagcctcagtttccc

SEQ ID NO: 1298442 - DNA, 15 bp, Homo sapiens
agagcctcagtttcc

SEQ ID NO: 1298443 - DNA, 15 bp, Homo sapiens
cagagcctcagtttc

SEQ ID NO: 1298444 - DNA, 15 bp, Homo sapiens
acagagcctcagttt

SEQ ID NO: 1298445 - DNA, 15 bp, Homo sapiens
cacagagcctcagtt

SEQ ID NO: 1298446 - DNA, 15 bp, Homo sapiens
ccacagagcctcagt

SEQ ID NO: 1298447 - DNA, 15 bp, Homo sapiens
cccacagagcctcag

SEQ ID NO: 1298448 - DNA, 15 bp, Homo sapiens
tcccacagagcctca

SEQ ID NO: 1298449 - DNA, 15 bp, Homo sapiens
atcccacagagcctc

SEQ ID NO: 1298450 - DNA, 15 bp, Homo sapiens
aatcccacagagcct

SEQ ID NO: 1298451 - DNA, 15 bp, Homo sapiens
taatcccacagagcc

SEQ ID NO: 1298452 - DNA, 15 bp, Homo sapiens
ttaatcccacagagc

SEQ ID NO: 1298453 - DNA, 15 bp, Homo sapiens
cttaatcccacagag

SEQ ID NO: 1298454 - DNA, 15 bp, Homo sapiens
ccttaatcccacaga

SEQ ID NO: 1298455 - DNA, 15 bp, Homo sapiens
cccttaatcccacag

SEQ ID NO: 1298456 - DNA, 15 bp, Homo sapiens
tcccttaatcccaca

SEQ ID NO: 1298457 - DNA, 15 bp, Homo sapiens
gtcccttaatcccac

SEQ ID NO: 1298458 - DNA, 15 bp, Homo sapiens
agtcccttaatccca

SEQ ID NO: 1298459 - DNA, 15 bp, Homo sapiens
gagtcccttaatccc

SEQ ID NO: 1298460 - DNA, 15 bp, Homo sapiens
tgagtcccttaatcc

SEQ ID NO: 1298461 - DNA, 15 bp, Homo sapiens
gtgagtcccttaatc

SEQ ID NO: 1298462 - DNA, 15 bp, Homo sapiens
ggtgagtcccttaat

SEQ ID NO: 1298463 - DNA, 15 bp, Homo sapiens
gggtgagtcccttaa

SEQ ID NO: 1298464 - DNA, 15 bp, Homo sapiens
tgggtgagtccctta

SEQ ID NO: 1298465 - DNA, 15 bp, Homo sapiens
ttgggtgagtccctt

SEQ ID NO: 1298466 - DNA, 15 bp, Homo sapiens
cttgggtgagtccct

SEQ ID NO: 1298467 - DNA, 15 bp, Homo sapiens
ccttgggtgagtccc

SEQ ID NO: 1298468 - DNA, 15 bp, Homo sapiens
accttgggtgagtcc

SEQ ID NO: 1298469 - DNA, 15 bp, Homo sapiens
gaccttgggtgagtc

SEQ ID NO: 1298470 - DNA, 15 bp, Homo sapiens
tgaccttgggtgagt

SEQ ID NO: 1298471 - DNA, 15 bp, Homo sapiens
atgaccttgggtgag

SEQ ID NO: 1298472 - DNA, 15 bp, Homo sapiens
tatgaccttgggtga

SEQ ID NO: 1298473 - DNA, 15 bp, Homo sapiens
ttatgaccttgggtg

SEQ ID NO: 1298474 - DNA, 15 bp, Homo sapiens
tttatgaccttgggt

SEQ ID NO: 1298475 - DNA, 15 bp, Homo sapiens
ctttatgaccttggg

SEQ ID NO: 1298476 - DNA, 15 bp, Homo sapiens
gctttatgaccttgg

SEQ ID NO: 1298477 - DNA, 15 bp, Homo sapiens
ggctttatgaccttg

SEQ ID NO: 1298478 - DNA, 15 bp, Homo sapiens
tggctttatgacctt

SEQ ID NO: 1298479 - DNA, 15 bp, Homo sapiens
ctggctttatgacct

SEQ ID NO: 1298480 - DNA, 15 bp, Homo sapiens
tctggctttatgacc

SEQ ID NO: 1298481 - DNA, 15 bp, Homo sapiens
atctggctttatgac

SEQ ID NO: 1298482 - DNA, 15 bp, Homo sapiens
aatctggctttatga

SEQ ID NO: 1298483 - DNA, 15 bp, Homo sapiens
caatctggctttatg

SEQ ID NO: 1298484 - DNA, 15 bp, Homo sapiens
acaatctggctttat

SEQ ID NO: 1298485 - DNA, 15 bp, Homo sapiens
cacaatctggcttta

SEQ ID NO: 1298486 - DNA, 15 bp, Homo sapiens
tcacaatctggcttt

SEQ ID NO: 1298487 - DNA, 15 bp, Homo sapiens
gtcacaatctggctt

SEQ ID NO: 1298488 - DNA, 15 bp, Homo sapiens
tgtcacaatctggct

SEQ ID NO: 1298489 - DNA, 15 bp, Homo sapiens
atgtcacaatctggc

SEQ ID NO: 1298490 - DNA, 15 bp, Homo sapiens
aatgtcacaatctgg

SEQ ID NO: 1298491 - DNA, 15 bp, Homo sapiens
caatgtcacaatctg

SEQ ID NO: 1298492 - DNA, 15 bp, Homo sapiens
tcaatgtcacaatct

SEQ ID NO: 1298493 - DNA, 15 bp, Homo sapiens
ctcaatgtcacaatc

SEQ ID NO: 1298494 - DNA, 15 bp, Homo sapiens
tctcaatgtcacaat

SEQ ID NO: 1298495 - DNA, 15 bp, Homo sapiens
atctcaatgtcacaa

SEQ ID NO: 1298496 - DNA, 15 bp, Homo sapiens
aatctcaatgtcaca

SEQ ID NO: 1298497 - DNA, 15 bp, Homo sapiens
gaatctcaatgtcac

SEQ ID NO: 1298498 - DNA, 15 bp, Homo sapiens
tgaatctcaatgtca

SEQ ID NO: 1298499 - DNA, 15 bp, Homo sapiens
ttgaatctcaatgtc

SEQ ID NO: 1298500 - DNA, 15 bp, Homo sapiens
tttgaatctcaatgt

SEQ ID NO: 1298501 - DNA, 15 bp, Homo sapiens
atttgaatctcaatg

SEQ ID NO: 1298502 - DNA, 15 bp, Homo sapiens
gatttgaatctcaat

SEQ ID NO: 1298503 - DNA, 15 bp, Homo sapiens
agatttgaatctcaa

SEQ ID NO: 1298504 - DNA, 15 bp, Homo sapiens
aagatttgaatctca

SEQ ID NO: 1298505 - DNA, 15 bp, Homo sapiens
caagatttgaatctc

SEQ ID NO: 1298506 - DNA, 15 bp, Homo sapiens
ccaagatttgaatct

SEQ ID NO: 1298507 - DNA, 15 bp, Homo sapiens
gccaagatttgaatc

SEQ ID NO: 1298508 - DNA, 15 bp, Homo sapiens
tgccaagatttgaat

SEQ ID NO: 1298509 - DNA, 15 bp, Homo sapiens
ttgccaagatttgaa

SEQ ID NO: 1298510 - DNA, 15 bp, Homo sapiens
gttgccaagatttga

SEQ ID NO: 1298511 - DNA, 15 bp, Homo sapiens
ggttgccaagatttg

SEQ ID NO: 1298512 - DNA, 15 bp, Homo sapiens
aggttgccaagattt

SEQ ID NO: 1298513 - DNA, 15 bp, Homo sapiens
aaggttgccaagatt

SEQ ID NO: 1298514 - DNA, 15 bp, Homo sapiens
taaggttgccaagat

SEQ ID NO: 1298515 - DNA, 15 bp, Homo sapiens
gtaaggttgccaaga

SEQ ID NO: 1298516 - DNA, 15 bp, Homo sapiens
agtaaggttgccaag

SEQ ID NO: 1298517 - DNA, 15 bp, Homo sapiens
aagtaaggttgccaa

SEQ ID NO: 1298518 - DNA, 15 bp, Homo sapiens
aaagtaaggttgcca

SEQ ID NO: 1298519 - DNA, 15 bp, Homo sapiens
gaaagtaaggttgcc

SEQ ID NO: 1298520 - DNA, 15 bp, Homo sapiens
agaaagtaaggttgc

SEQ ID NO: 1298521 - DNA, 15 bp, Homo sapiens
cagaaagtaaggttg

SEQ ID NO: 1298522 - DNA, 15 bp, Homo sapiens
ccagaaagtaaggtt

SEQ ID NO: 1298523 - DNA, 15 bp, Homo sapiens
tccagaaagtaaggt

SEQ ID NO: 1298524 - DNA, 15 bp, Homo sapiens
ttccagaaagtaagg

SEQ ID NO: 1298525 - DNA, 15 bp, Homo sapiens
tttccagaaagtaag

SEQ ID NO: 1298526 - DNA, 15 bp, Homo sapiens
gtttccagaaagtaa

SEQ ID NO: 1298527 - DNA, 15 bp, Homo sapiens
tgtttccagaaagta

SEQ ID NO: 1298528 - DNA, 15 bp, Homo sapiens
gtgtttccagaaagt

SEQ ID NO: 1298529 - DNA, 15 bp, Homo sapiens
agtgtttccagaaag

SEQ ID NO: 1298530 - DNA, 15 bp, Homo sapiens
aagtgtttccagaaa

SEQ ID NO: 1298531 - DNA, 15 bp, Homo sapiens
aaagtgtttccagaa

SEQ ID NO: 1298532 - DNA, 15 bp, Homo sapiens
gaaagtgtttccaga

SEQ ID NO: 1298533 - DNA, 15 bp, Homo sapiens
ggaaagtgtttccag

SEQ ID NO: 1298534 - DNA, 15 bp, Homo sapiens
gggaaagtgtttcca

SEQ ID NO: 1298535 - DNA, 15 bp, Homo sapiens
ggggaaagtgtttcc

SEQ ID NO: 1298536 - DNA, 15 bp, Homo sapiens
gggggaaagtgtttc

SEQ ID NO: 1298537 - DNA, 15 bp, Homo sapiens
agggggaaagtgttt

SEQ ID NO: 1298538 - DNA, 15 bp, Homo sapiens
aagggggaaagtgtt

SEQ ID NO: 1298539 - DNA, 15 bp, Homo sapiens
gaagggggaaagtgt

SEQ ID NO: 1298540 - DNA, 15 bp, Homo sapiens
ggaagggggaaagtg

SEQ ID NO: 1298541 - DNA, 15 bp, Homo sapiens
aggaagggggaaagt

SEQ ID NO: 1298542 - DNA, 15 bp, Homo sapiens
gaggaagggggaaag

SEQ ID NO: 1298543 - DNA, 15 bp, Homo sapiens
agaggaagggggaaa

SEQ ID NO: 1298544 - DNA, 15 bp, Homo sapiens
aagaggaagggggaa

SEQ ID NO: 1298545 - DNA, 15 bp, Homo sapiens
gaagaggaaggggga

SEQ ID NO: 1298546 - DNA, 15 bp, Homo sapiens
agaagaggaaggggg

SEQ ID NO: 1298547 - DNA, 15 bp, Homo sapiens
aagaagaggaagggg

SEQ ID NO: 1298548 - DNA, 15 bp, Homo sapiens
aaagaagaggaaggg

SEQ ID NO: 1298549 - DNA, 15 bp, Homo sapiens
taaagaagaggaagg

SEQ ID NO: 1298550 - DNA, 15 bp, Homo sapiens
ctaaagaagaggaag

SEQ ID NO: 1298551 - DNA, 15 bp, Homo sapiens
tctaaagaagaggaa

SEQ ID NO: 1298552 - DNA, 15 bp, Homo sapiens
gtctaaagaagagga

SEQ ID NO: 1298553 - DNA, 15 bp, Homo sapiens
ggtctaaagaagagg

SEQ ID NO: 1298554 - DNA, 15 bp, Homo sapiens
gggtctaaagaagag

SEQ ID NO: 1298555 - DNA, 15 bp, Homo sapiens
tgggtctaaagaaga

SEQ ID NO: 1298556 - DNA, 15 bp, Homo sapiens
gtgggtctaaagaag

SEQ ID NO: 1298557 - DNA, 15 bp, Homo sapiens
tgtgggtctaaagaa

SEQ ID NO: 1298558 - DNA, 15 bp, Homo sapiens
atgtgggtctaaaga

SEQ ID NO: 1298559 - DNA, 15 bp, Homo sapiens
catgtgggtctaaag

SEQ ID NO: 1298560 - DNA, 15 bp, Homo sapiens
gcatgtgggtctaaa

SEQ ID NO: 1298561 - DNA, 15 bp, Homo sapiens
tgcatgtgggtctaa

SEQ ID NO: 1298562 - DNA, 15 bp, Homo sapiens
ctgcatgtgggtcta

SEQ ID NO: 1298563 - DNA, 15 bp, Homo sapiens
cctgcatgtgggtct

SEQ ID NO: 1298564 - DNA, 15 bp, Homo sapiens
gcctgcatgtgggtc

SEQ ID NO: 1298565 - DNA, 15 bp, Homo sapiens
agcctgcatgtgggt

SEQ ID NO: 1298566 - DNA, 15 bp, Homo sapiens
cagcctgcatgtggg

SEQ ID NO: 1298567 - DNA, 15 bp, Homo sapiens
gcagcctgcatgtgg

SEQ ID NO: 1298568 - DNA, 15 bp, Homo sapiens
agcagcctgcatgtg

SEQ ID NO: 1298569 - DNA, 15 bp, Homo sapiens
aagcagcctgcatgt

SEQ ID NO: 1298570 - DNA, 15 bp, Homo sapiens
caagcagcctgcatg

SEQ ID NO: 1298571 - DNA, 15 bp, Homo sapiens
gcaagcagcctgcat

SEQ ID NO: 1298572 - DNA, 15 bp, Homo sapiens
tgcaagcagcctgca

SEQ ID NO: 1298573 - DNA, 15 bp, Homo sapiens
ctgcaagcagcctgc

SEQ ID NO: 1298574 - DNA, 15 bp, Homo sapiens
tctgcaagcagcctg

SEQ ID NO: 1298575 - DNA, 15 bp, Homo sapiens
gtctgcaagcagcct

SEQ ID NO: 1298576 - DNA, 15 bp, Homo sapiens
agtctgcaagcagcc

SEQ ID NO: 1298577 - DNA, 15 bp, Homo sapiens
gagtctgcaagcagc

SEQ ID NO: 1298578 - DNA, 15 bp, Homo sapiens
agagtctgcaagcag

SEQ ID NO: 1298579 - DNA, 15 bp, Homo sapiens
cagagtctgcaagca

SEQ ID NO: 1298580 - DNA, 15 bp, Homo sapiens
acagagtctgcaagc

SEQ ID NO: 1298581 - DNA, 15 bp, Homo sapiens
cacagagtctgcaag

SEQ ID NO: 1298582 - DNA, 15 bp, Homo sapiens
gcacagagtctgcaa

SEQ ID NO: 1298583 - DNA, 15 bp, Homo sapiens
agcacagagtctgca

SEQ ID NO: 1298584 - DNA, 15 bp, Homo sapiens
aagcacagagtctgc

SEQ ID NO: 1298585 - DNA, 15 bp, Homo sapiens
caagcacagagtctg

SEQ ID NO: 1298586 - DNA, 15 bp, Homo sapiens
ccaagcacagagtct

SEQ ID NO: 1298587 - DNA, 15 bp, Homo sapiens
gccaagcacagagtc

SEQ ID NO: 1298588 - DNA, 15 bp, Homo sapiens
ggccaagcacagagt

SEQ ID NO: 1298589 - DNA, 15 bp, Homo sapiens
tggccaagcacagag

SEQ ID NO: 1298590 - DNA, 15 bp, Homo sapiens
atggccaagcacaga

SEQ ID NO: 1298591 - DNA, 15 bp, Homo sapiens
catggccaagcacag

SEQ ID NO: 1298592 - DNA, 15 bp, Homo sapiens
acatggccaagcaca

SEQ ID NO: 1298593 - DNA, 15 bp, Homo sapiens
aacatggccaagcac

SEQ ID NO: 1298594 - DNA, 15 bp, Homo sapiens
aaacatggccaagca

SEQ ID NO: 1298595 - DNA, 15 bp, Homo sapiens
gaaacatggccaagc

SEQ ID NO: 1298596 - DNA, 15 bp, Homo sapiens
agaaacatggccaag

SEQ ID NO: 1298597 - DNA, 15 bp, Homo sapiens
aagaaacatggccaa

SEQ ID NO: 1298598 - DNA, 15 bp, Homo sapiens
caagaaacatggcca

SEQ ID NO: 1298599 - DNA, 15 bp, Homo sapiens
ccaagaaacatggcc

SEQ ID NO: 1298600 - DNA, 15 bp, Homo sapiens
accaagaaacatggc

SEQ ID NO: 1298601 - DNA, 15 bp, Homo sapiens
gaccaagaaacatgg

SEQ ID NO: 1298602 - DNA, 15 bp, Homo sapiens
tgaccaagaaacatg

SEQ ID NO: 1298603 - DNA, 15 bp, Homo sapiens
ctgaccaagaaacat

SEQ ID NO: 1298604 - DNA, 15 bp, Homo sapiens
gctgaccaagaaaca

SEQ ID NO: 1298605 - DNA, 15 bp, Homo sapiens
tgctgaccaagaaac

SEQ ID NO: 1298606 - DNA, 15 bp, Homo sapiens
ctgctgaccaagaaa

SEQ ID NO: 1298607 - DNA, 15 bp, Homo sapiens
cctgctgaccaagaa

SEQ ID NO: 1298608 - DNA, 15 bp, Homo sapiens
ccctgctgaccaaga

SEQ ID NO: 1298609 - DNA, 15 bp, Homo sapiens
gccctgctgaccaag

SEQ ID NO: 1298610 - DNA, 15 bp, Homo sapiens
tgccctgctgaccaa

SEQ ID NO: 1298611 - DNA, 15 bp, Homo sapiens
ctgccctgctgacca

SEQ ID NO: 1298612 - DNA, 15 bp, Homo sapiens
actgccctgctgacc

SEQ ID NO: 1298613 - DNA, 15 bp, Homo sapiens
gactgccctgctgac

SEQ ID NO: 1298614 - DNA, 15 bp, Homo sapiens
cgactgccctgctga

SEQ ID NO: 1298615 - DNA, 15 bp, Homo sapiens
ccgactgccctgctg

SEQ ID NO: 1298616 - DNA, 15 bp, Homo sapiens
cccgactgccctgct

SEQ ID NO: 1298617 - DNA, 15 bp, Homo sapiens
gcccgactgccctgc

SEQ ID NO: 1298618 - DNA, 15 bp, Homo sapiens
tgcccgactgccctg

SEQ ID NO: 1298619 - DNA, 15 bp, Homo sapiens
ttgcccgactgccct

SEQ ID NO: 1298620 - DNA, 15 bp, Homo sapiens
attgcccgactgccc

SEQ ID NO: 1298621 - DNA, 15 bp, Homo sapiens
cattgcccgactgcc

SEQ ID NO: 1298622 - DNA, 15 bp, Homo sapiens
ccattgcccgactgc

SEQ ID NO: 1298623 - DNA, 15 bp, Homo sapiens
cccattgcccgactg

SEQ ID NO: 1298624 - DNA, 15 bp, Homo sapiens
gcccattgcccgact

SEQ ID NO: 1298625 - DNA, 15 bp, Homo sapiens
tgcccattgcccgac

SEQ ID NO: 1298626 - DNA, 15 bp, Homo sapiens
atgcccattgcccga

SEQ ID NO: 1298627 - DNA, 15 bp, Homo sapiens
aatgcccattgcccg

SEQ ID NO: 1298628 - DNA, 15 bp, Homo sapiens
aaatgcccattgccc

SEQ ID NO: 1298629 - DNA, 15 bp, Homo sapiens
aaaatgcccattgcc

SEQ ID NO: 1298630 - DNA, 15 bp, Homo sapiens
taaaatgcccattgc

SEQ ID NO: 1298631 - DNA, 15 bp, Homo sapiens
ttaaaatgcccattg

SEQ ID NO: 1298632 - DNA, 15 bp, Homo sapiens
attaaaatgcccatt

SEQ ID NO: 1298633 - DNA, 15 bp, Homo sapiens
gattaaaatgcccat

SEQ ID NO: 1298634 - DNA, 15 bp, Homo sapiens
tgattaaaatgccca

SEQ ID NO: 1298635 - DNA, 15 bp, Homo sapiens
atgattaaaatgccc

SEQ ID NO: 1298636 - DNA, 15 bp, Homo sapiens
catgattaaaatgcc

SEQ ID NO: 1298637 - DNA, 15 bp, Homo sapiens
acatgattaaaatgc

SEQ ID NO: 1298638 - DNA, 15 bp, Homo sapiens
aacatgattaaaatg

SEQ ID NO: 1298639 - DNA, 15 bp, Homo sapiens
aaacatgattaaaat

SEQ ID NO: 1298640 - DNA, 15 bp, Homo sapiens
taaacatgattaaaa

SEQ ID NO: 1298641 - DNA, 15 bp, Homo sapiens
ataaacatgattaaa

SEQ ID NO: 1298642 - DNA, 15 bp, Homo sapiens
cataaacatgattaa

SEQ ID NO: 1298643 - DNA, 15 bp, Homo sapiens
gcataaacatgatta

SEQ ID NO: 1298644 - DNA, 15 bp, Homo sapiens
agcataaacatgatt

SEQ ID NO: 1298645 - DNA, 15 bp, Homo sapiens
cagcataaacatgat

SEQ ID NO: 1298646 - DNA, 15 bp, Homo sapiens
ccagcataaacatga

SEQ ID NO: 1298647 - DNA, 15 bp, Homo sapiens
tccagcataaacatg

SEQ ID NO: 1298648 - DNA, 15 bp, Homo sapiens
gtccagcataaacat

SEQ ID NO: 1298649 - DNA, 15 bp, Homo sapiens
tgtccagcataaaca

SEQ ID NO: 1298650 - DNA, 15 bp, Homo sapiens
ctgtccagcataaac

SEQ ID NO: 1298651 - DNA, 15 bp, Homo sapiens
cctgtccagcataaa

SEQ ID NO: 1298652 - DNA, 15 bp, Homo sapiens
ccctgtccagcataa

SEQ ID NO: 1298653 - DNA, 15 bp, Homo sapiens
gccctgtccagcata

SEQ ID NO: 1298654 - DNA, 15 bp, Homo sapiens
agccctgtccagcat

SEQ ID NO: 1298655 - DNA, 15 bp, Homo sapiens
cagccctgtccagca

SEQ ID NO: 1298656 - DNA, 15 bp, Homo sapiens
acagccctgtccagc

SEQ ID NO: 1298657 - DNA, 15 bp, Homo sapiens
gacagccctgtccag

SEQ ID NO: 1298658 - DNA, 15 bp, Homo sapiens
ggacagccctgtcca

SEQ ID NO: 1298659 - DNA, 15 bp, Homo sapiens
gggacagccctgtcc

SEQ ID NO: 1298660 - DNA, 15 bp, Homo sapiens
aagggacagccctgt

SEQ ID NO: 1298661 - DNA, 15 bp, Homo sapiens
caagggacagccctg

SEQ ID NO: 1298662 - DNA, 15 bp, Homo sapiens
ccaagggacagccct

SEQ ID NO: 1298663 - DNA, 15 bp, Homo sapiens
cccaagggacagccc

SEQ ID NO: 1298664 - DNA, 15 bp, Homo sapiens
gcccaagggacagcc

SEQ ID NO: 1298665 - DNA, 15 bp, Homo sapiens
agcccaagggacagc

SEQ ID NO: 1298666 - DNA, 15 bp, Homo sapiens
aagcccaagggacag

SEQ ID NO: 1298667 - DNA, 15 bp, Homo sapiens
caagcccaagggaca

SEQ ID NO: 1298668 - DNA, 15 bp, Homo sapiens
tcaagcccaagggac

SEQ ID NO: 1298669 - DNA, 15 bp, Homo sapiens
ctcaagcccaaggga

SEQ ID NO: 1298670 - DNA, 15 bp, Homo sapiens
cctcaagcccaaggg

SEQ ID NO: 1298671 - DNA, 15 bp, Homo sapiens
tcctcaagcccaagg

SEQ ID NO: 1298672 - DNA, 15 bp, Homo sapiens
gtcctcaagcccaag

SEQ ID NO: 1298673 - DNA, 15 bp, Homo sapiens
tgtcctcaagcccaa

SEQ ID NO: 1298674 - DNA, 15 bp, Homo sapiens
ttgtcctcaagccca

SEQ ID NO: 1298675 - DNA, 15 bp, Homo sapiens
attgtcctcaagccc

SEQ ID NO: 1298676 - DNA, 15 bp, Homo sapiens
cattgtcctcaagcc

SEQ ID NO: 1298677 - DNA, 15 bp, Homo sapiens
acattgtcctcaagc

SEQ ID NO: 1298678 - DNA, 15 bp, Homo sapiens
aacattgtcctcaag

SEQ ID NO: 1298679 - DNA, 15 bp, Homo sapiens
gaacattgtcctcaa

SEQ ID NO: 1298680 - DNA, 15 bp, Homo sapiens
agaacattgtcctca

SEQ ID NO: 1298681 - DNA, 15 bp, Homo sapiens
aagaacattgtcctc

SEQ ID NO: 1298682 - DNA, 15 bp, Homo sapiens
caagaacattgtcct

SEQ ID NO: 1298683 - DNA, 15 bp, Homo sapiens
tcaagaacattgtcc

SEQ ID NO: 1298684 - DNA, 15 bp, Homo sapiens
ttcaagaacattgtc

SEQ ID NO: 1298685 - DNA, 15 bp, Homo sapiens
gttcaagaacattgt

SEQ ID NO: 1298686 - DNA, 15 bp, Homo sapiens
ggttcaagaacattg

SEQ ID NO: 1298687 - DNA, 15 bp, Homo sapiens
tggttcaagaacatt

SEQ ID NO: 1298688 - DNA, 15 bp, Homo sapiens
ctggttcaagaacat

SEQ ID NO: 1298689 - DNA, 15 bp, Homo sapiens
tctggttcaagaaca

SEQ ID NO: 1298690 - DNA, 15 bp, Homo sapiens
ttctggttcaagaac

SEQ ID NO: 1298691 - DNA, 15 bp, Homo sapiens
cttctggttcaagaa

SEQ ID NO: 1298692 - DNA, 15 bp, Homo sapiens
tcttctggttcaaga

SEQ ID NO: 1298693 - DNA, 15 bp, Homo sapiens
ttcttctggttcaag

SEQ ID NO: 1298694 - DNA, 15 bp, Homo sapiens
attcttctggttcaa

SEQ ID NO: 1298695 - DNA, 15 bp, Homo sapiens
tattcttctggttca

SEQ ID NO: 1298696 - DNA, 15 bp, Homo sapiens
atattcttctggttc

SEQ ID NO: 1298697 - DNA, 15 bp, Homo sapiens
catattcttctggtt

SEQ ID NO: 1298698 - DNA, 15 bp, Homo sapiens
ccatattcttctggt

SEQ ID NO: 1298699 - DNA, 15 bp, Homo sapiens
gccatattcttctgg

SEQ ID NO: 1298700 - DNA, 15 bp, Homo sapiens
tgccatattcttctg

SEQ ID NO: 1298701 - DNA, 15 bp, Homo sapiens
ctgccatattcttct

SEQ ID NO: 1298702 - DNA, 15 bp, Homo sapiens
tctgccatattcttc

SEQ ID NO: 1298703 - DNA, 15 bp, Homo sapiens
ttctgccatattctt

SEQ ID NO: 1298704 - DNA, 15 bp, Homo sapiens
cttctgccatattct

SEQ ID NO: 1298705 - DNA, 15 bp, Homo sapiens
acttctgccatattc

SEQ ID NO: 1298706 - DNA, 15 bp, Homo sapiens
tacttctgccatatt

SEQ ID NO: 1298707 - DNA, 15 bp, Homo sapiens
atacttctgccatat

SEQ ID NO: 1298708 - DNA, 15 bp, Homo sapiens
tatacttctgccata

SEQ ID NO: 1298709 - DNA, 15 bp, Homo sapiens
ttatacttctgccat

SEQ ID NO: 1298710 - DNA, 15 bp, Homo sapiens
attatacttctgcca

SEQ ID NO: 1298711 - DNA, 15 bp, Homo sapiens
cattatacttctgcc

SEQ ID NO: 1298712 - DNA, 15 bp, Homo sapiens
gcattatacttctgc

SEQ ID NO: 1298713 - DNA, 15 bp, Homo sapiens
ggcattatacttctg

SEQ ID NO: 1298714 - DNA, 15 bp, Homo sapiens
tggcattatacttct

SEQ ID NO: 1298715 - DNA, 15 bp, Homo sapiens
atggcattatacttc

SEQ ID NO: 1298716 - DNA, 15 bp, Homo sapiens
aatggcattatactt

SEQ ID NO: 1298717 - DNA, 15 bp, Homo sapiens
aaatggcattatact

SEQ ID NO: 1298718 - DNA, 15 bp, Homo sapiens
gaaatggcattatac

SEQ ID NO: 1298719 - DNA, 15 bp, Homo sapiens
tgaaatggcattata

SEQ ID NO: 1298720 - DNA, 15 bp, Homo sapiens
gtgaaatggcattat

SEQ ID NO: 1298721 - DNA, 15 bp, Homo sapiens
ggtgaaatggcatta

SEQ ID NO: 1298722 - DNA, 15 bp, Homo sapiens
tggtgaaatggcatt

SEQ ID NO: 1298723 - DNA, 15 bp, Homo sapiens
ctggtgaaatggcat

SEQ ID NO: 1298724 - DNA, 15 bp, Homo sapiens
cctggtgaaatggca

SEQ ID NO: 1298725 - DNA, 15 bp, Homo sapiens
tcctggtgaaatggc

SEQ ID NO: 1298726 - DNA, 15 bp, Homo sapiens
gtcctggtgaaatgg

SEQ ID NO: 1298727 - DNA, 15 bp, Homo sapiens
tgtcctggtgaaatg

SEQ ID NO: 1298728 - DNA, 15 bp, Homo sapiens
ctgtcctggtgaaat

SEQ ID NO: 1298729 - DNA, 15 bp, Homo sapiens
tctgtcctggtgaaa

SEQ ID NO: 1298730 - DNA, 15 bp, Homo sapiens
atctgtcctggtgaa

SEQ ID NO: 1298731 - DNA, 15 bp, Homo sapiens
catctgtcctggtga

SEQ ID NO: 1298732 - DNA, 15 bp, Homo sapiens
gcatctgtcctggtg

SEQ ID NO: 1298733 - DNA, 15 bp, Homo sapiens
tgcatctgtcctggt

SEQ ID NO: 1298734 - DNA, 15 bp, Homo sapiens
atgcatctgtcctgg

SEQ ID NO: 1298735 - DNA, 15 bp, Homo sapiens
gatgcatctgtcctg

SEQ ID NO: 1298736 - DNA, 15 bp, Homo sapiens
tgatgcatctgtcct

SEQ ID NO: 1298737 - DNA, 15 bp, Homo sapiens
ttgatgcatctgtcc

SEQ ID NO: 1298738 - DNA, 15 bp, Homo sapiens
tttgatgcatctgtc

SEQ ID NO: 1298739 - DNA, 15 bp, Homo sapiens
atttgatgcatctgt

SEQ ID NO: 1298740 - DNA, 15 bp, Homo sapiens
aatttgatgcatctg

SEQ ID NO: 1298741 - DNA, 15 bp, Homo sapiens
gaatttgatgcatct

SEQ ID NO: 1298742 - DNA, 15 bp, Homo sapiens
ggaatttgatgcatc

SEQ ID NO: 1298743 - DNA, 15 bp, Homo sapiens
tggaatttgatgcat

SEQ ID NO: 1298744 - DNA, 15 bp, Homo sapiens
atggaatttgatgca

SEQ ID NO: 1298745 - DNA, 15 bp, Homo sapiens
gatggaatttgatgc

SEQ ID NO: 1298746 - DNA, 15 bp, Homo sapiens
agatggaatttgatg

SEQ ID NO: 1298747 - DNA, 15 bp, Homo sapiens
aagatggaatttgat

SEQ ID NO: 1298748 - DNA, 15 bp, Homo sapiens
caagatggaatttga

SEQ ID NO: 1298749 - DNA, 15 bp, Homo sapiens
ccaagatggaatttg

SEQ ID NO: 1298750 - DNA, 15 bp, Homo sapiens
cccaagatggaattt

SEQ ID NO: 1298751 - DNA, 15 bp, Homo sapiens
acccaagatggaatt

SEQ ID NO: 1298752 - DNA, 15 bp, Homo sapiens
gacccaagatggaat

SEQ ID NO: 1298753 - DNA, 15 bp, Homo sapiens
agacccaagatggaa

SEQ ID NO: 1298754 - DNA, 15 bp, Homo sapiens
cagacccaagatgga

SEQ ID NO: 1298755 - DNA, 15 bp, Homo sapiens
ccagacccaagatgg

SEQ ID NO: 1298756 - DNA, 15 bp, Homo sapiens
accagacccaagatg

SEQ ID NO: 1298757 - DNA, 15 bp, Homo sapiens
taccagacccaagat

SEQ ID NO: 1298758 - DNA, 15 bp, Homo sapiens
ttaccagacccaaga

SEQ ID NO: 1298759 - DNA, 15 bp, Homo sapiens
attaccagacccaag

SEQ ID NO: 1298760 - DNA, 15 bp, Homo sapiens
aattaccagacccaa

SEQ ID NO: 1298761 - DNA, 15 bp, Homo sapiens
gaattaccagaccca

SEQ ID NO: 1298762 - DNA, 15 bp, Homo sapiens
agaattaccagaccc

SEQ ID NO: 1298763 - DNA, 15 bp, Homo sapiens
cagaattaccagacc

SEQ ID NO: 1298764 - DNA, 15 bp, Homo sapiens
gcagaattaccagac

SEQ ID NO: 1298765 - DNA, 15 bp, Homo sapiens
ggcagaattaccaga

SEQ ID NO: 1298766 - DNA, 15 bp, Homo sapiens
tggcagaattaccag

SEQ ID NO: 1298767 - DNA, 15 bp, Homo sapiens
gtggcagaattacca

SEQ ID NO: 1298768 - DNA, 15 bp, Homo sapiens
tgtggcagaattacc

SEQ ID NO: 1298769 - DNA, 15 bp, Homo sapiens
ctgtggcagaattac

SEQ ID NO: 1298770 - DNA, 15 bp, Homo sapiens
tctgtggcagaatta

SEQ ID NO: 1298771 - DNA, 15 bp, Homo sapiens
atctgtggcagaatt

SEQ ID NO: 1298772 - DNA, 15 bp, Homo sapiens
catctgtggcagaat

SEQ ID NO: 1298773 - DNA, 15 bp, Homo sapiens
ccatctgtggcagaa

SEQ ID NO: 1298774 - DNA, 15 bp, Homo sapiens
accatctgtggcaga

SEQ ID NO: 1298775 - DNA, 15 bp, Homo sapiens
caccatctgtggcag

SEQ ID NO: 1298776 - DNA, 15 bp, Homo sapiens
ccaccatctgtggca

SEQ ID NO: 1298777 - DNA, 15 bp, Homo sapiens
gccaccatctgtggc

SEQ ID NO: 1298778 - DNA, 15 bp, Homo sapiens
ggccaccatctgtgg

SEQ ID NO: 1298779 - DNA, 15 bp, Homo sapiens
gggccaccatctgtg

SEQ ID NO: 1298780 - DNA, 15 bp, Homo sapiens
tgggccaccatctgt

SEQ ID NO: 1298781 - DNA, 15 bp, Homo sapiens
atgggccaccatctg

SEQ ID NO: 1298782 - DNA, 15 bp, Homo sapiens
aatgggccaccatct

SEQ ID NO: 1298783 - DNA, 15 bp, Homo sapiens
caatgggccaccatc

SEQ ID NO: 1298784 - DNA, 15 bp, Homo sapiens
tcaatgggccaccat

SEQ ID NO: 1298785 - DNA, 15 bp, Homo sapiens
atcaatgggccacca

SEQ ID NO: 1298786 - DNA, 15 bp, Homo sapiens
tatcaatgggccacc

SEQ ID NO: 1298787 - DNA, 15 bp, Homo sapiens
atatcaatgggccac

SEQ ID NO: 1298788 - DNA, 15 bp, Homo sapiens
catatcaatgggcca

SEQ ID NO: 1298789 - DNA, 15 bp, Homo sapiens
acatatcaatgggcc

SEQ ID NO: 1298790 - DNA, 15 bp, Homo sapiens
cacatatcaatgggc

SEQ ID NO: 1298791 - DNA, 15 bp, Homo sapiens
gcacatatcaatggg

SEQ ID NO: 1298792 - DNA, 15 bp, Homo sapiens
tgcacatatcaatgg

SEQ ID NO: 1298793 - DNA, 15 bp, Homo sapiens
atgcacatatcaatg

SEQ ID NO: 1298794 - DNA, 15 bp, Homo sapiens
catgcacatatcaat

SEQ ID NO: 1298795 - DNA, 15 bp, Homo sapiens
gcatgcacatatcaa

SEQ ID NO: 1298796 - DNA, 15 bp, Homo sapiens
agcatgcacatatca

SEQ ID NO: 1298797 - DNA, 15 bp, Homo sapiens
aagcatgcacatatc

SEQ ID NO: 1298798 - DNA, 15 bp, Homo sapiens
caagcatgcacatat

SEQ ID NO: 1298799 - DNA, 15 bp, Homo sapiens
ccaagcatgcacata

SEQ ID NO: 1298800 - DNA, 15 bp, Homo sapiens
gccaagcatgcacat

SEQ ID NO: 1298801 - DNA, 15 bp, Homo sapiens
agccaagcatgcaca

SEQ ID NO: 1298802 - DNA, 15 bp, Homo sapiens
cagccaagcatgcac

SEQ ID NO: 1298803 - DNA, 15 bp, Homo sapiens
ccagccaagcatgca

SEQ ID NO: 1298804 - DNA, 15 bp, Homo sapiens
cccagccaagcatgc

SEQ ID NO: 1298805 - DNA, 15 bp, Homo sapiens
ccccagccaagcatg

SEQ ID NO: 1298806 - DNA, 15 bp, Homo sapiens
accccagccaagcat

SEQ ID NO: 1298807 - DNA, 15 bp, Homo sapiens
caccccagccaagca

SEQ ID NO: 1298808 - DNA, 15 bp, Homo sapiens
tcaccccagccaagc

SEQ ID NO: 1298809 - DNA, 15 bp, Homo sapiens
ctcaccccagccaag

SEQ ID NO: 1298810 - DNA, 15 bp, Homo sapiens
tctcaccccagccaa

SEQ ID NO: 1298811 - DNA, 15 bp, Homo sapiens
ctctcaccccagcca

SEQ ID NO: 1298812 - DNA, 15 bp, Homo sapiens
actctcaccccagcc

SEQ ID NO: 1298813 - DNA, 15 bp, Homo sapiens
gactctcaccccagc

SEQ ID NO: 1298814 - DNA, 15 bp, Homo sapiens
agactctcaccccag

SEQ ID NO: 1298815 - DNA, 15 bp, Homo sapiens
cagactctcacccca

SEQ ID NO: 1298816 - DNA, 15 bp, Homo sapiens
acagactctcacccc

SEQ ID NO: 1298817 - DNA, 15 bp, Homo sapiens
cacagactctcaccc

SEQ ID NO: 1298818 - DNA, 15 bp, Homo sapiens
gcacagactctcacc

SEQ ID NO: 1298819 - DNA, 15 bp, Homo sapiens
ggcacagactctcac

SEQ ID NO: 1298820 - DNA, 15 bp, Homo sapiens
tggcacagactctca

SEQ ID NO: 1298821 - DNA, 15 bp, Homo sapiens
ttggcacagactctc

SEQ ID NO: 1298822 - DNA, 15 bp, Homo sapiens
attggcacagactct

SEQ ID NO: 1298823 - DNA, 15 bp, Homo sapiens
cattggcacagactc

SEQ ID NO: 1298824 - DNA, 15 bp, Homo sapiens
acattggcacagact

SEQ ID NO: 1298825 - DNA, 15 bp, Homo sapiens
gacattggcacagac

SEQ ID NO: 1298826 - DNA, 15 bp, Homo sapiens
tgacattggcacaga

SEQ ID NO: 1298827 - DNA, 15 bp, Homo sapiens
gtgacattggcacag

SEQ ID NO: 1298828 - DNA, 15 bp, Homo sapiens
tgtgacattggcaca

SEQ ID NO: 1298829 - DNA, 15 bp, Homo sapiens
ctgtgacattggcac

SEQ ID NO: 1298830 - DNA, 15 bp, Homo sapiens
cctgtgacattggca

SEQ ID NO: 1298831 - DNA, 15 bp, Homo sapiens
tcctgtgacattggc

SEQ ID NO: 1298832 - DNA, 15 bp, Homo sapiens
gtcctgtgacattgg

SEQ ID NO: 1298833 - DNA, 15 bp, Homo sapiens
tgtcctgtgacattg

SEQ ID NO: 1298834 - DNA, 15 bp, Homo sapiens
gtgtcctgtgacatt

SEQ ID NO: 1298835 - DNA, 15 bp, Homo sapiens
tgtgtcctgtgacat

SEQ ID NO: 1298836 - DNA, 15 bp, Homo sapiens
ctgtgtcctgtgaca

SEQ ID NO: 1298837 - DNA, 15 bp, Homo sapiens
gctgtgtcctgtgac

SEQ ID NO: 1298838 - DNA, 15 bp, Homo sapiens
tgctgtgtcctgtga

SEQ ID NO: 1298839 - DNA, 15 bp, Homo sapiens
ttgctgtgtcctgtg

SEQ ID NO: 1298840 - DNA, 15 bp, Homo sapiens
gttgctgtgtcctgt

SEQ ID NO: 1298841 - DNA, 15 bp, Homo sapiens
ggttgctgtgtcctg

SEQ ID NO: 1298842 - DNA, 15 bp, Homo sapiens
gggttgctgtgtcct

SEQ ID NO: 1298843 - DNA, 15 bp, Homo sapiens
ggggttgctgtgtcc

SEQ ID NO: 1298844 - DNA, 15 bp, Homo sapiens
tggggttgctgtgtc

SEQ ID NO: 1298845 - DNA, 15 bp, Homo sapiens
ttggggttgctgtgt

SEQ ID NO: 1298846 - DNA, 15 bp, Homo sapiens
attggggttgctgtg

SEQ ID NO: 1298847 - DNA, 15 bp, Homo sapiens
cattggggttgctgt

SEQ ID NO: 1298848 - DNA, 15 bp, Homo sapiens
tcattggggttgctg

SEQ ID NO: 1298849 - DNA, 15 bp, Homo sapiens
ctcattggggttgct

SEQ ID NO: 1298850 - DNA, 15 bp, Homo sapiens
actcattggggttgc

SEQ ID NO: 1298851 - DNA, 15 bp, Homo sapiens
gactcattggggttg

SEQ ID NO: 1298852 - DNA, 15 bp, Homo sapiens
agactcattggggtt

SEQ ID NO: 1298853 - DNA, 15 bp, Homo sapiens
cagactcattggggt

SEQ ID NO: 1298854 - DNA, 15 bp, Homo sapiens
acagactcattgggg

SEQ ID NO: 1298855 - DNA, 15 bp, Homo sapiens
aacagactcattggg

SEQ ID NO: 1298856 - DNA, 15 bp, Homo sapiens
aaacagactcattgg

SEQ ID NO: 1298857 - DNA, 15 bp, Homo sapiens
taaacagactcattg

SEQ ID NO: 1298858 - DNA, 15 bp, Homo sapiens
gtaaacagactcatt

SEQ ID NO: 1298859 - DNA, 15 bp, Homo sapiens
agtaaacagactcat

SEQ ID NO: 1298860 - DNA, 15 bp, Homo sapiens
aagtaaacagactca

SEQ ID NO: 1298861 - DNA, 15 bp, Homo sapiens
taagtaaacagactc

SEQ ID NO: 1298862 - DNA, 15 bp, Homo sapiens
ataagtaaacagact

SEQ ID NO: 1298863 - DNA, 15 bp, Homo sapiens
aataagtaaacagac

SEQ ID NO: 1298864 - DNA, 15 bp, Homo sapiens
aaataagtaaacaga

SEQ ID NO: 1298865 - DNA, 15 bp, Homo sapiens
taaataagtaaacag

SEQ ID NO: 1298866 - DNA, 15 bp, Homo sapiens
ttaaataagtaaaca

SEQ ID NO: 1298867 - DNA, 15 bp, Homo sapiens
gttaaataagtaaac

SEQ ID NO: 1298868 - DNA, 15 bp, Homo sapiens
tgttaaataagtaaa

SEQ ID NO: 1298869 - DNA, 15 bp, Homo sapiens
ctgttaaataagtaa

SEQ ID NO: 1298870 - DNA, 15 bp, Homo sapiens
actgttaaataagta

SEQ ID NO: 1298871 - DNA, 15 bp, Homo sapiens
gactgttaaataagt

SEQ ID NO: 1298872 - DNA, 15 bp, Homo sapiens
tgactgttaaataag

SEQ ID NO: 1298873 - DNA, 15 bp, Homo sapiens
ttgactgttaaataa

SEQ ID NO: 1298874 - DNA, 15 bp, Homo sapiens
cttgactgttaaata

SEQ ID NO: 1298875 - DNA, 15 bp, Homo sapiens
ccttgactgttaaat

SEQ ID NO: 1298876 - DNA, 15 bp, Homo sapiens
accttgactgttaaa

SEQ ID NO: 1298877 - DNA, 15 bp, Homo sapiens
caccttgactgttaa

SEQ ID NO: 1298878 - DNA, 15 bp, Homo sapiens
tcaccttgactgtta

SEQ ID NO: 1298879 - DNA, 15 bp, Homo sapiens
gtcaccttgactgtt

SEQ ID NO: 1298880 - DNA, 15 bp, Homo sapiens
ggtcaccttgactgt

SEQ ID NO: 1298881 - DNA, 15 bp, Homo sapiens
tggtcaccttgactg

SEQ ID NO: 1298882 - DNA, 15 bp, Homo sapiens
ctggtcaccttgact

SEQ ID NO: 1298883 - DNA, 15 bp, Homo sapiens
tctggtcaccttgac

SEQ ID NO: 1298884 - DNA, 15 bp, Homo sapiens
ttctggtcaccttga

SEQ ID NO: 1298885 - DNA, 15 bp, Homo sapiens
cttctggtcaccttg

SEQ ID NO: 1298886 - DNA, 15 bp, Homo sapiens
tcttctggtcacctt

SEQ ID NO: 1298887 - DNA, 15 bp, Homo sapiens
ctcttctggtcacct

SEQ ID NO: 1298888 - DNA, 15 bp, Homo sapiens
tctcttctggtcacc

SEQ ID NO: 1298889 - DNA, 15 bp, Homo sapiens
gtctcttctggtcac

SEQ ID NO: 1298890 - DNA, 15 bp, Homo sapiens
tgtctcttctggtca

SEQ ID NO: 1298891 - DNA, 15 bp, Homo sapiens
gtgtctcttctggtc

SEQ ID NO: 1298892 - DNA, 15 bp, Homo sapiens
agtgtctcttctggt

SEQ ID NO: 1298893 - DNA, 15 bp, Homo sapiens
aagtgtctcttctgg

SEQ ID NO: 1298894 - DNA, 15 bp, Homo sapiens
aaagtgtctcttctg

SEQ ID NO: 1298895 - DNA, 15 bp, Homo sapiens
gaaagtgtctcttct

SEQ ID NO: 1298896 - DNA, 15 bp, Homo sapiens
ggaaagtgtctcttc

SEQ ID NO: 1298897 - DNA, 15 bp, Homo sapiens
tggaaagtgtctctt

SEQ ID NO: 1298898 - DNA, 15 bp, Homo sapiens
ttggaaagtgtctct

SEQ ID NO: 1298899 - DNA, 15 bp, Homo sapiens
gttggaaagtgtctc

SEQ ID NO: 1298900 - DNA, 15 bp, Homo sapiens
tgttggaaagtgtct

SEQ ID NO: 1298901 - DNA, 15 bp, Homo sapiens
ctgttggaaagtgtc

SEQ ID NO: 1298902 - DNA, 15 bp, Homo sapiens
cctgttggaaagtgt

SEQ ID NO: 1298903 - DNA, 15 bp, Homo sapiens
tcctgttggaaagtg

SEQ ID NO: 1298904 - DNA, 15 bp, Homo sapiens
gtcctgttggaaagt

SEQ ID NO: 1298905 - DNA, 15 bp, Homo sapiens
tgtcctgttggaaag

SEQ ID NO: 1298906 - DNA, 15 bp, Homo sapiens
gtgtcctgttggaaa

SEQ ID NO: 1298907 - DNA, 15 bp, Homo sapiens
tgtgtcctgttggaa

SEQ ID NO: 1298908 - DNA, 15 bp, Homo sapiens
ttgtgtcctgttgga

SEQ ID NO: 1298909 - DNA, 15 bp, Homo sapiens
attgtgtcctgttgg

SEQ ID NO: 1298910 - DNA, 15 bp, Homo sapiens
cattgtgtcctgttg

SEQ ID NO: 1298911 - DNA, 15 bp, Homo sapiens
tcattgtgtcctgtt

SEQ ID NO: 1298912 - DNA, 15 bp, Homo sapiens
ctcattgtgtcctgt

SEQ ID NO: 1298913 - DNA, 15 bp, Homo sapiens
cctcattgtgtcctg

SEQ ID NO: 1298914 - DNA, 15 bp, Homo sapiens
tcctcattgtgtcct

SEQ ID NO: 1298915 - DNA, 15 bp, Homo sapiens
ctcctcattgtgtcc

SEQ ID NO: 1298916 - DNA, 15 bp, Homo sapiens
cctcctcattgtgtc

SEQ ID NO: 1298917 - DNA, 15 bp, Homo sapiens
acctcctcattgtgt

SEQ ID NO: 1298918 - DNA, 15 bp, Homo sapiens
tacctcctcattgtg

SEQ ID NO: 1298919 - DNA, 15 bp, Homo sapiens
gtacctcctcattgt

SEQ ID NO: 1298920 - DNA, 15 bp, Homo sapiens
ggtacctcctcattg

SEQ ID NO: 1298921 - DNA, 15 bp, Homo sapiens
gggtacctcctcatt

SEQ ID NO: 1298922 - DNA, 15 bp, Homo sapiens
tgggtacctcctcat

SEQ ID NO: 1298923 - DNA, 15 bp, Homo sapiens
ctgggtacctcctca

SEQ ID NO: 1298924 - DNA, 15 bp, Homo sapiens
gctgggtacctcctc

SEQ ID NO: 1298925 - DNA, 15 bp, Homo sapiens
tgctgggtacctcct

SEQ ID NO: 1298926 - DNA, 15 bp, Homo sapiens
ttgctgggtacctcc

SEQ ID NO: 1298927 - DNA, 15 bp, Homo sapiens
cttgctgggtacctc

SEQ ID NO: 1298928 - DNA, 15 bp, Homo sapiens
acttgctgggtacct

SEQ ID NO: 1298929 - DNA, 15 bp, Homo sapiens
gacttgctgggtacc

SEQ ID NO: 1298930 - DNA, 15 bp, Homo sapiens
agacttgctgggtac

SEQ ID NO: 1298931 - DNA, 15 bp, Homo sapiens
aagacttgctgggta

SEQ ID NO: 1298932 - DNA, 15 bp, Homo sapiens
gaagacttgctgggt

SEQ ID NO: 1298933 - DNA, 15 bp, Homo sapiens
agaagacttgctggg

SEQ ID NO: 1298934 - DNA, 15 bp, Homo sapiens
tagaagacttgctgg

SEQ ID NO: 1298935 - DNA, 15 bp, Homo sapiens
ctagaagacttgctg

SEQ ID NO: 1298936 - DNA, 15 bp, Homo sapiens
gctagaagacttgct

SEQ ID NO: 1298937 - DNA, 15 bp, Homo sapiens
agctagaagacttgc

SEQ ID NO: 1298938 - DNA, 15 bp, Homo sapiens
cagctagaagacttg

SEQ ID NO: 1298939 - DNA, 15 bp, Homo sapiens
tcagctagaagactt

SEQ ID NO: 1298940 - DNA, 15 bp, Homo sapiens
atcagctagaagact

SEQ ID NO: 1298941 - DNA, 15 bp, Homo sapiens
aatcagctagaagac

SEQ ID NO: 1298942 - DNA, 15 bp, Homo sapiens
caatcagctagaaga

SEQ ID NO: 1298943 - DNA, 15 bp, Homo sapiens
ccaatcagctagaag

SEQ ID NO: 1298944 - DNA, 15 bp, Homo sapiens
cccaatcagctagaa

SEQ ID NO: 1298945 - DNA, 15 bp, Homo sapiens
ccccaatcagctaga

SEQ ID NO: 1298946 - DNA, 15 bp, Homo sapiens
cccccaatcagctag

SEQ ID NO: 1298947 - DNA, 15 bp, Homo sapiens
tcccccaatcagcta

SEQ ID NO: 1298948 - DNA, 15 bp, Homo sapiens
ttcccccaatcagct

SEQ ID NO: 1298949 - DNA, 15 bp, Homo sapiens
cttcccccaatcagc

SEQ ID NO: 1298950 - DNA, 15 bp, Homo sapiens
tcttcccccaatcag

SEQ ID NO: 1298951 - DNA, 15 bp, Homo sapiens
ttcttcccccaatca

SEQ ID NO: 1298952 - DNA, 15 bp, Homo sapiens
tttcttcccccaatc

SEQ ID NO: 1298953 - DNA, 15 bp, Homo sapiens
gtttcttcccccaat

SEQ ID NO: 1298954 - DNA, 15 bp, Homo sapiens
ggtttcttcccccaa

SEQ ID NO: 1298955 - DNA, 15 bp, Homo sapiens
gggtttcttccccca

SEQ ID NO: 1298956 - DNA, 15 bp, Homo sapiens
tgggtttcttccccc

SEQ ID NO: 1298957 - DNA, 15 bp, Homo sapiens
ctgggtttcttcccc

SEQ ID NO: 1298958 - DNA, 15 bp, Homo sapiens
actgggtttcttccc

SEQ ID NO: 1298959 - DNA, 15 bp, Homo sapiens
cactgggtttcttcc

SEQ ID NO: 1298960 - DNA, 15 bp, Homo sapiens
acactgggtttcttc

SEQ ID NO: 1298961 - DNA, 15 bp, Homo sapiens
tacactgggtttctt

SEQ ID NO: 1298962 - DNA, 15 bp, Homo sapiens
atacactgggtttct

SEQ ID NO: 1298963 - DNA, 15 bp, Homo sapiens
aatacactgggtttc

SEQ ID NO: 1298964 - DNA, 15 bp, Homo sapiens
taatacactgggttt

SEQ ID NO: 1298965 - DNA, 15 bp, Homo sapiens
gtaatacactgggtt

SEQ ID NO: 1298966 - DNA, 15 bp, Homo sapiens
tgtaatacactgggt

SEQ ID NO: 1298967 - DNA, 15 bp, Homo sapiens
ctgtaatacactggg

SEQ ID NO: 1298968 - DNA, 15 bp, Homo sapiens
cctgtaatacactgg

SEQ ID NO: 1298969 - DNA, 15 bp, Homo sapiens
tcctgtaatacactg

SEQ ID NO: 1298970 - DNA, 15 bp, Homo sapiens
ttcctgtaatacact

SEQ ID NO: 1298971 - DNA, 15 bp, Homo sapiens
tttcctgtaatacac

SEQ ID NO: 1298972 - DNA, 15 bp, Homo sapiens
ttttcctgtaataca

SEQ ID NO: 1298973 - DNA, 15 bp, Homo sapiens
attttcctgtaatac

SEQ ID NO: 1298974 - DNA, 15 bp, Homo sapiens
cattttcctgtaata

SEQ ID NO: 1298975 - DNA, 15 bp, Homo sapiens
tcattttcctgtaat

SEQ ID NO: 1298976 - DNA, 15 bp, Homo sapiens
ctcattttcctgtaa

SEQ ID NO: 1298977 - DNA, 15 bp, Homo sapiens
tctcattttcctgta

SEQ ID NO: 1298978 - DNA, 15 bp, Homo sapiens
ctctcattttcctgt

SEQ ID NO: 1298979 - DNA, 15 bp, Homo sapiens
tctctcattttcctg

SEQ ID NO: 1298980 - DNA, 15 bp, Homo sapiens
ctctctcattttcct

SEQ ID NO: 1298981 - DNA, 15 bp, Homo sapiens
actctctcattttcc

SEQ ID NO: 1298982 - DNA, 15 bp, Homo sapiens
cactctctcattttc

SEQ ID NO: 1298983 - DNA, 15 bp, Homo sapiens
gcactctctcatttt

SEQ ID NO: 1298984 - DNA, 15 bp, Homo sapiens
tgcactctctcattt

SEQ ID NO: 1298985 - DNA, 15 bp, Homo sapiens
atgcactctctcatt

SEQ ID NO: 1298986 - DNA, 15 bp, Homo sapiens
aatgcactctctcat

SEQ ID NO: 1298987 - DNA, 15 bp, Homo sapiens
aaatgcactctctca

SEQ ID NO: 1298988 - DNA, 15 bp, Homo sapiens
caaatgcactctctc

SEQ ID NO: 1298989 - DNA, 15 bp, Homo sapiens
tcaaatgcactctct

SEQ ID NO: 1298990 - DNA, 15 bp, Homo sapiens
ttcaaatgcactctc

SEQ ID NO: 1298991 - DNA, 15 bp, Homo sapiens
attcaaatgcactct

SEQ ID NO: 1298992 - DNA, 15 bp, Homo sapiens
aattcaaatgcactc

SEQ ID NO: 1298993 - DNA, 15 bp, Homo sapiens
aaattcaaatgcact

SEQ ID NO: 1298994 - DNA, 15 bp, Homo sapiens
caaattcaaatgcac

SEQ ID NO: 1298995 - DNA, 15 bp, Homo sapiens
acaaattcaaatgca

SEQ ID NO: 1298996 - DNA, 15 bp, Homo sapiens
aacaaattcaaatgc

SEQ ID NO: 1298997 - DNA, 15 bp, Homo sapiens
aaacaaattcaaatg

SEQ ID NO: 1298998 - DNA, 15 bp, Homo sapiens
gaaacaaattcaaat

SEQ ID NO: 1298999 - DNA, 15 bp, Homo sapiens
agaaacaaattcaaa

SEQ ID NO: 1299000 - DNA, 15 bp, Homo sapiens
tagaaacaaattcaa

SEQ ID NO: 1299001 - DNA, 15 bp, Homo sapiens
ttagaaacaaattca

SEQ ID NO: 1299002 - DNA, 15 bp, Homo sapiens
attagaaacaaattc

SEQ ID NO: 1299003 - DNA, 15 bp, Homo sapiens
gattagaaacaaatt

SEQ ID NO: 1299004 - DNA, 15 bp, Homo sapiens
agattagaaacaaat

SEQ ID NO: 1299005 - DNA, 15 bp, Homo sapiens
cagattagaaacaaa

SEQ ID NO: 1299006 - DNA, 15 bp, Homo sapiens
tcagattagaaacaa

SEQ ID NO: 1299007 - DNA, 15 bp, Homo sapiens
ttcagattagaaaca

SEQ ID NO: 1299008 - DNA, 15 bp, Homo sapiens
attcagattagaaac

SEQ ID NO: 1299009 - DNA, 15 bp, Homo sapiens
aattcagattagaaa

SEQ ID NO: 1299010 - DNA, 15 bp, Homo sapiens
aaattcagattagaa

SEQ ID NO: 1299011 - DNA, 15 bp, Homo sapiens
aaaattcagattaga

SEQ ID NO: 1299012 - DNA, 15 bp, Homo sapiens
gaaaattcagattag

SEQ ID NO: 1299013 - DNA, 15 bp, Homo sapiens
ggaaaattcagatta

SEQ ID NO: 1299014 - DNA, 15 bp, Homo sapiens
tggaaaattcagatt

SEQ ID NO: 1299015 - DNA, 15 bp, Homo sapiens
atggaaaattcagat

SEQ ID NO: 1299016 - DNA, 15 bp, Homo sapiens
tatggaaaattcaga

SEQ ID NO: 1299017 - DNA, 15 bp, Homo sapiens
atatggaaaattcag

SEQ ID NO: 1299018 - DNA, 15 bp, Homo sapiens
tatatggaaaattca

SEQ ID NO: 1299019 - DNA, 15 bp, Homo sapiens
ttatatggaaaattc

SEQ ID NO: 1299020 - DNA, 15 bp, Homo sapiens
tttatatggaaaatt

SEQ ID NO: 1299021 - DNA, 15 bp, Homo sapiens
gtttatatggaaaat

SEQ ID NO: 1299022 - DNA, 15 bp, Homo sapiens
agtttatatggaaaa

SEQ ID NO: 1299023 - DNA, 15 bp, Homo sapiens
gagtttatatggaaa

SEQ ID NO: 1299024 - DNA, 15 bp, Homo sapiens
agagtttatatggaa

SEQ ID NO: 1299025 - DNA, 15 bp, Homo sapiens
tagagtttatatgga

SEQ ID NO: 1299026 - DNA, 15 bp, Homo sapiens
ctagagtttatatgg

SEQ ID NO: 1299027 - DNA, 15 bp, Homo sapiens
actagagtttatatg

SEQ ID NO: 1299028 - DNA, 15 bp, Homo sapiens
aactagagtttatat

SEQ ID NO: 1299029 - DNA, 15 bp, Homo sapiens
taactagagtttata

SEQ ID NO: 1299030 - DNA, 15 bp, Homo sapiens
ctaactagagtttat

SEQ ID NO: 1299031 - DNA, 15 bp, Homo sapiens
gctaactagagttta

SEQ ID NO: 1299032 - DNA, 15 bp, Homo sapiens
tgctaactagagttt

SEQ ID NO: 1299033 - DNA, 15 bp, Homo sapiens
ctgctaactagagtt

SEQ ID NO: 1299034 - DNA, 15 bp, Homo sapiens
actgctaactagagt

SEQ ID NO: 1299035 - DNA, 15 bp, Homo sapiens
aactgctaactagag

SEQ ID NO: 1299036 - DNA, 15 bp, Homo sapiens
aaactgctaactaga

SEQ ID NO: 1299037 - DNA, 15 bp, Homo sapiens
gaaactgctaactag

SEQ ID NO: 1299038 - DNA, 15 bp, Homo sapiens
tgaaactgctaacta

SEQ ID NO: 1299039 - DNA, 15 bp, Homo sapiens
ttgaaactgctaact

SEQ ID NO: 1299040 - DNA, 15 bp, Homo sapiens
tttgaaactgctaac

SEQ ID NO: 1299041 - DNA, 15 bp, Homo sapiens
ttttgaaactgctaa

SEQ ID NO: 1299042 - DNA, 15 bp, Homo sapiens
gttttgaaactgcta

SEQ ID NO: 1299043 - DNA, 15 bp, Homo sapiens
agttttgaaactgct

SEQ ID NO: 1299044 - DNA, 15 bp, Homo sapiens
cagttttgaaactgc

SEQ ID NO: 1299045 - DNA, 15 bp, Homo sapiens
acagttttgaaactg

SEQ ID NO: 1299046 - DNA, 15 bp, Homo sapiens
cacagttttgaaact

SEQ ID NO: 1299047 - DNA, 15 bp, Homo sapiens
ccacagttttgaaac

SEQ ID NO: 1299048 - DNA, 15 bp, Homo sapiens
tccacagttttgaaa

SEQ ID NO: 1299049 - DNA, 15 bp, Homo sapiens
gtccacagttttgaa

SEQ ID NO: 1299050 - DNA, 15 bp, Homo sapiens
cgtccacagttttga

SEQ ID NO: 1299051 - DNA, 15 bp, Homo sapiens
gcgtccacagttttg

SEQ ID NO: 1299052 - DNA, 15 bp, Homo sapiens
tgcgtccacagtttt

SEQ ID NO: 1299053 - DNA, 15 bp, Homo sapiens
gtgcgtccacagttt

SEQ ID NO: 1299054 - DNA, 15 bp, Homo sapiens
agtgcgtccacagtt

SEQ ID NO: 1299055 - DNA, 15 bp, Homo sapiens
aagtgcgtccacagt

SEQ ID NO: 1299056 - DNA, 15 bp, Homo sapiens
gaagtgcgtccacag

SEQ ID NO: 1299057 - DNA, 15 bp, Homo sapiens
tgaagtgcgtccaca

SEQ ID NO: 1299058 - DNA, 15 bp, Homo sapiens
ctgaagtgcgtccac

SEQ ID NO: 1299059 - DNA, 15 bp, Homo sapiens
gctgaagtgcgtcca

SEQ ID NO: 1299060 - DNA, 15 bp, Homo sapiens
ggctgaagtgcgtcc

SEQ ID NO: 1299061 - DNA, 15 bp, Homo sapiens
aggctgaagtgcgtc

SEQ ID NO: 1299062 - DNA, 15 bp, Homo sapiens
taggctgaagtgcgt

SEQ ID NO: 1299063 - DNA, 15 bp, Homo sapiens
ttaggctgaagtgcg

SEQ ID NO: 1299064 - DNA, 15 bp, Homo sapiens
cttaggctgaagtgc

SEQ ID NO: 1299065 - DNA, 15 bp, Homo sapiens
ccttaggctgaagtg

SEQ ID NO: 1299066 - DNA, 15 bp, Homo sapiens
cccttaggctgaagt

SEQ ID NO: 1299067 - DNA, 15 bp, Homo sapiens
tcccttaggctgaag

SEQ ID NO: 1299068 - DNA, 15 bp, Homo sapiens
gtcccttaggctgaa

SEQ ID NO: 1299069 - DNA, 15 bp, Homo sapiens
tgtcccttaggctga

SEQ ID NO: 1299070 - DNA, 15 bp, Homo sapiens
ttgtcccttaggctg

SEQ ID NO: 1299071 - DNA, 15 bp, Homo sapiens
tttgtcccttaggct

SEQ ID NO: 1299072 - DNA, 15 bp, Homo sapiens
ttttgtcccttaggc

SEQ ID NO: 1299073 - DNA, 15 bp, Homo sapiens
tttttgtcccttagg

SEQ ID NO: 1299074 - DNA, 15 bp, Homo sapiens
gtttttgtcccttag

SEQ ID NO: 1299075 - DNA, 15 bp, Homo sapiens
tgtttttgtccctta

SEQ ID NO: 1299076 - DNA, 15 bp, Homo sapiens
ttgtttttgtccctt

SEQ ID NO: 1299077 - DNA, 15 bp, Homo sapiens
tttgtttttgtccct

SEQ ID NO: 1299078 - DNA, 15 bp, Homo sapiens
ttttgtttttgtccc

SEQ ID NO: 1299079 - DNA, 15 bp, Homo sapiens
gttttgtttttgtcc

SEQ ID NO: 1299080 - DNA, 15 bp, Homo sapiens
tgttttgtttttgtc

SEQ ID NO: 1299081 - DNA, 15 bp, Homo sapiens
ttgttttgtttttgt

SEQ ID NO: 1299082 - DNA, 15 bp, Homo sapiens
tttgttttgtttttg

SEQ ID NO: 1299083 - DNA, 15 bp, Homo sapiens
atttgttttgttttt

SEQ ID NO: 1299084 - DNA, 15 bp, Homo sapiens
catttgttttgtttt

SEQ ID NO: 1299085 - DNA, 15 bp, Homo sapiens
tcatttgttttgttt

SEQ ID NO: 1299086 - DNA, 15 bp, Homo sapiens
gtcatttgttttgtt

SEQ ID NO: 1299087 - DNA, 15 bp, Homo sapiens
ggtcatttgttttgt

SEQ ID NO: 1299088 - DNA, 15 bp, Homo sapiens
gggtcatttgttttg

SEQ ID NO: 1299089 - DNA, 15 bp, Homo sapiens
tgggtcatttgtttt

SEQ ID NO: 1299090 - DNA, 15 bp, Homo sapiens
ttgggtcatttgttt

SEQ ID NO: 1299091 - DNA, 15 bp, Homo sapiens
cttgggtcatttgtt

SEQ ID NO: 1299092 - DNA, 15 bp, Homo sapiens
ccttgggtcatttgt

SEQ ID NO: 1299093 - DNA, 15 bp, Homo sapiens
accttgggtcatttg

SEQ ID NO: 1299094 - DNA, 15 bp, Homo sapiens
taccttgggtcattt

SEQ ID NO: 1299095 - DNA, 15 bp, Homo sapiens
gtaccttgggtcatt

SEQ ID NO: 1299096 - DNA, 15 bp, Homo sapiens
ggtaccttgggtcat

SEQ ID NO: 1299097 - DNA, 15 bp, Homo sapiens
tggtaccttgggtca

SEQ ID NO: 1299098 - DNA, 15 bp, Homo sapiens
ctggtaccttgggtc

SEQ ID NO: 1299099 - DNA, 15 bp, Homo sapiens
gctggtaccttgggt

SEQ ID NO: 1299100 - DNA, 15 bp, Homo sapiens
agctggtaccttggg

SEQ ID NO: 1299101 - DNA, 15 bp, Homo sapiens
cagctggtaccttgg

SEQ ID NO: 1299102 - DNA, 15 bp, Homo sapiens
gcagctggtaccttg

SEQ ID NO: 1299103 - DNA, 15 bp, Homo sapiens
tgcagctggtacctt

SEQ ID NO: 1299104 - DNA, 15 bp, Homo sapiens
ttgcagctggtacct

SEQ ID NO: 1299105 - DNA, 15 bp, Homo sapiens
cttgcagctggtacc

SEQ ID NO: 1299106 - DNA, 15 bp, Homo sapiens
tcttgcagctggtac

SEQ ID NO: 1299107 - DNA, 15 bp, Homo sapiens
atcttgcagctggta

SEQ ID NO: 1299108 - DNA, 15 bp, Homo sapiens
catcttgcagctggt

SEQ ID NO: 1299109 - DNA, 15 bp, Homo sapiens
gcatcttgcagctgg

SEQ ID NO: 1299110 - DNA, 15 bp, Homo sapiens
agcatcttgcagctg

SEQ ID NO: 1299111 - DNA, 15 bp, Homo sapiens
cagcatcttgcagct

SEQ ID NO: 1299112 - DNA, 15 bp, Homo sapiens
ccagcatcttgcagc

SEQ ID NO: 1299113 - DNA, 15 bp, Homo sapiens
tccagcatcttgcag

SEQ ID NO: 1299114 - DNA, 15 bp, Homo sapiens
ttccagcatcttgca

SEQ ID NO: 1299115 - DNA, 15 bp, Homo sapiens
attccagcatcttgc

SEQ ID NO: 1299116 - DNA, 15 bp, Homo sapiens
tattccagcatcttg

SEQ ID NO: 1299117 - DNA, 15 bp, Homo sapiens
ctattccagcatctt

SEQ ID NO: 1299118 - DNA, 15 bp, Homo sapiens
cctattccagcatct

SEQ ID NO: 1299119 - DNA, 15 bp, Homo sapiens
tcctattccagcatc

SEQ ID NO: 1299120 - DNA, 15 bp, Homo sapiens
ctcctattccagcat

SEQ ID NO: 1299121 - DNA, 15 bp, Homo sapiens
cctcctattccagca

SEQ ID NO: 1299122 - DNA, 15 bp, Homo sapiens
ccctcctattccagc

SEQ ID NO: 1299123 - DNA, 15 bp, Homo sapiens
tccctcctattccag

SEQ ID NO: 1299124 - DNA, 15 bp, Homo sapiens
ctccctcctattcca

SEQ ID NO: 1299125 - DNA, 15 bp, Homo sapiens
cctccctcctattcc

SEQ ID NO: 1299126 - DNA, 15 bp, Homo sapiens
ccctccctcctattc

SEQ ID NO: 1299127 - DNA, 15 bp, Homo sapiens
tccctccctcctatt

SEQ ID NO: 1299128 - DNA, 15 bp, Homo sapiens
ctccctccctcctat

SEQ ID NO: 1299129 - DNA, 15 bp, Homo sapiens
cctccctccctccta

SEQ ID NO: 1299130 - DNA, 15 bp, Homo sapiens
ggccttccctccctc

SEQ ID NO: 1299131 - DNA, 15 bp, Homo sapiens
ttgaacaatgcctgg

SEQ ID NO: 1299132 - DNA, 15 bp, Homo sapiens
cttgaacaatgcctg

SEQ ID NO: 1299133 - DNA, 15 bp, Homo sapiens
ccttgaacaatgcct

SEQ ID NO: 1299134 - DNA, 15 bp, Homo sapiens
accttgaacaatgcc

SEQ ID NO: 1299135 - DNA, 15 bp, Homo sapiens
aaccttgaacaatgc

SEQ ID NO: 1299136 - DNA, 15 bp, Homo sapiens
gaaccttgaacaatg

SEQ ID NO: 1299137 - DNA, 15 bp, Homo sapiens
tgaaccttgaacaat

SEQ ID NO: 1299138 - DNA, 15 bp, Homo sapiens
ttgaaccttgaacaa

SEQ ID NO: 1299139 - DNA, 15 bp, Homo sapiens
cttgaaccttgaaca

SEQ ID NO: 1299140 - DNA, 15 bp, Homo sapiens
gcttgaaccttgaac

SEQ ID NO: 1299141 - DNA, 15 bp, Homo sapiens
tgcttgaaccttgaa

SEQ ID NO: 1299142 - DNA, 15 bp, Homo sapiens
gtgcttgaaccttga

SEQ ID NO: 1299143 - DNA, 15 bp, Homo sapiens
tgtgcttgaaccttg

SEQ ID NO: 1299144 - DNA, 15 bp, Homo sapiens
ttgtgcttgaacctt

SEQ ID NO: 1299145 - DNA, 15 bp, Homo sapiens
tttgtgcttgaacct

SEQ ID NO: 1299146 - DNA, 15 bp, Homo sapiens
ctttgtgcttgaacc

SEQ ID NO: 1299147 - DNA, 15 bp, Homo sapiens
gctttgtgcttgaac

SEQ ID NO: 1299148 - DNA, 15 bp, Homo sapiens
ggctttgtgcttgaa

SEQ ID NO: 1299149 - DNA, 15 bp, Homo sapiens
cggctttgtgcttga

SEQ ID NO: 1299150 - DNA, 15 bp, Homo sapiens
acggctttgtgcttg

SEQ ID NO: 1299151 - DNA, 15 bp, Homo sapiens
cacggctttgtgctt

SEQ ID NO: 1299152 - DNA, 15 bp, Homo sapiens
acacggctttgtgct

SEQ ID NO: 1299153 - DNA, 15 bp, Homo sapiens
aacacggctttgtgc

SEQ ID NO: 1299154 - DNA, 15 bp, Homo sapiens
gaacacggctttgtg

SEQ ID NO: 1299155 - DNA, 15 bp, Homo sapiens
tgaacacggctttgt

SEQ ID NO: 1299156 - DNA, 15 bp, Homo sapiens
ttgaacacggctttg

SEQ ID NO: 1299157 - DNA, 15 bp, Homo sapiens
attgaacacggcttt

SEQ ID NO: 1299158 - DNA, 15 bp, Homo sapiens
cattgaacacggctt

SEQ ID NO: 1299159 - DNA, 15 bp, Homo sapiens
ccattgaacacggct

SEQ ID NO: 1299160 - DNA, 15 bp, Homo sapiens
cccattgaacacggc

SEQ ID NO: 1299161 - DNA, 15 bp, Homo sapiens
acccattgaacacgg

SEQ ID NO: 1299162 - DNA, 15 bp, Homo sapiens
aacccattgaacacg

SEQ ID NO: 1299163 - DNA, 15 bp, Homo sapiens
gaacccattgaacac

SEQ ID NO: 1299164 - DNA, 15 bp, Homo sapiens
tgaacccattgaaca

SEQ ID NO: 1299165 - DNA, 15 bp, Homo sapiens
ctgaacccattgaac

SEQ ID NO: 1299166 - DNA, 15 bp, Homo sapiens
cctgaacccattgaa

SEQ ID NO: 1299167 - DNA, 15 bp, Homo sapiens
acctgaacccattga

SEQ ID NO: 1299168 - DNA, 15 bp, Homo sapiens
tacctgaacccattg

SEQ ID NO: 1299169 - DNA, 15 bp, Homo sapiens
ctacctgaacccatt

SEQ ID NO: 1299170 - DNA, 15 bp, Homo sapiens
tctacctgaacccat

SEQ ID NO: 1299171 - DNA, 15 bp, Homo sapiens
ttctacctgaaccca

SEQ ID NO: 1299172 - DNA, 15 bp, Homo sapiens
tttctacctgaaccc

SEQ ID NO: 1299173 - DNA, 15 bp, Homo sapiens
gtttctacctgaacc

SEQ ID NO: 1299174 - DNA, 15 bp, Homo sapiens
tgtttctacctgaac

SEQ ID NO: 1299175 - DNA, 15 bp, Homo sapiens
atgtttctacctgaa

SEQ ID NO: 1299176 - DNA, 15 bp, Homo sapiens
catgtttctacctga

SEQ ID NO: 1299177 - DNA, 15 bp, Homo sapiens
gcatgtttctacctg

SEQ ID NO: 1299178 - DNA, 15 bp, Homo sapiens
tgcatgtttctacct

SEQ ID NO: 1299179 - DNA, 15 bp, Homo sapiens
gtgcatgtttctacc

SEQ ID NO: 1299180 - DNA, 15 bp, Homo sapiens
tgtgcatgtttctac

SEQ ID NO: 1299181 - DNA, 15 bp, Homo sapiens
ctgtgcatgtttcta

SEQ ID NO: 1299182 - DNA, 15 bp, Homo sapiens
actgtgcatgtttct

SEQ ID NO: 1299183 - DNA, 15 bp, Homo sapiens
aactgtgcatgtttc

SEQ ID NO: 1299184 - DNA, 15 bp, Homo sapiens
taactgtgcatgttt

SEQ ID NO: 1299185 - DNA, 15 bp, Homo sapiens
gtaactgtgcatgtt

SEQ ID NO: 1299186 - DNA, 15 bp, Homo sapiens
tgtaactgtgcatgt

SEQ ID NO: 1299187 - DNA, 15 bp, Homo sapiens
atgtaactgtgcatg

SEQ ID NO: 1299188 - DNA, 15 bp, Homo sapiens
gatgtaactgtgcat

SEQ ID NO: 1299189 - DNA, 15 bp, Homo sapiens
tgatgtaactgtgca

SEQ ID NO: 1299190 - DNA, 15 bp, Homo sapiens
gtgatgtaactgtgc

SEQ ID NO: 1299191 - DNA, 15 bp, Homo sapiens
tgtgatgtaactgtg

SEQ ID NO: 1299192 - DNA, 15 bp, Homo sapiens
ttgtgatgtaactgt

SEQ ID NO: 1299193 - DNA, 15 bp, Homo sapiens
gttgtgatgtaactg

SEQ ID NO: 1299194 - DNA, 15 bp, Homo sapiens
tgttgtgatgtaact

SEQ ID NO: 1299195 - DNA, 15 bp, Homo sapiens
ctgttgtgatgtaac

SEQ ID NO: 1299196 - DNA, 15 bp, Homo sapiens
tctgttgtgatgtaa

SEQ ID NO: 1299197 - DNA, 15 bp, Homo sapiens
ctctgttgtgatgta

SEQ ID NO: 1299198 - DNA, 15 bp, Homo sapiens
actctgttgtgatgt

SEQ ID NO: 1299199 - DNA, 15 bp, Homo sapiens
tactctgttgtgatg

SEQ ID NO: 1299200 - DNA, 15 bp, Homo sapiens
ttactctgttgtgat

SEQ ID NO: 1299201 - DNA, 15 bp, Homo sapiens
tttactctgttgtga

SEQ ID NO: 1299202 - DNA, 15 bp, Homo sapiens
gtttactctgttgtg

SEQ ID NO: 1299203 - DNA, 15 bp, Homo sapiens
ggtttactctgttgt

SEQ ID NO: 1299204 - DNA, 15 bp, Homo sapiens
tggtttactctgttg

SEQ ID NO: 1299205 - DNA, 15 bp, Homo sapiens
atggtttactctgtt

SEQ ID NO: 1299206 - DNA, 15 bp, Homo sapiens
catggtttactctgt

SEQ ID NO: 1299207 - DNA, 15 bp, Homo sapiens
ccatggtttactctg

SEQ ID NO: 1299208 - DNA, 15 bp, Homo sapiens
cccatggtttactct

SEQ ID NO: 1299209 - DNA, 15 bp, Homo sapiens
tcccatggtttactc

SEQ ID NO: 1299210 - DNA, 15 bp, Homo sapiens
ttcccatggtttact

SEQ ID NO: 1299211 - DNA, 15 bp, Homo sapiens
gttcccatggtttac

SEQ ID NO: 1299212 - DNA, 15 bp, Homo sapiens
agttcccatggttta

SEQ ID NO: 1299213 - DNA, 15 bp, Homo sapiens
cagttcccatggttt

SEQ ID NO: 1299214 - DNA, 15 bp, Homo sapiens
gcagttcccatggtt

SEQ ID NO: 1299215 - DNA, 15 bp, Homo sapiens
tgcagttcccatggt

SEQ ID NO: 1299216 - DNA, 15 bp, Homo sapiens
atgcagttcccatgg

SEQ ID NO: 1299217 - DNA, 15 bp, Homo sapiens
catgcagttcccatg

SEQ ID NO: 1299218 - DNA, 15 bp, Homo sapiens
ccatgcagttcccat

SEQ ID NO: 1299219 - DNA, 15 bp, Homo sapiens
accatgcagttccca

SEQ ID NO: 1299220 - DNA, 15 bp, Homo sapiens
caccatgcagttccc

SEQ ID NO: 1299221 - DNA, 15 bp, Homo sapiens
gcaccatgcagttcc

SEQ ID NO: 1299222 - DNA, 15 bp, Homo sapiens
tgcaccatgcagttc

SEQ ID NO: 1299223 - DNA, 15 bp, Homo sapiens
ctgcaccatgcagtt

SEQ ID NO: 1299224 - DNA, 15 bp, Homo sapiens
tctgcaccatgcagt

SEQ ID NO: 1299225 - DNA, 15 bp, Homo sapiens
ctctgcaccatgcag

SEQ ID NO: 1299226 - DNA, 15 bp, Homo sapiens
actctgcaccatgca

SEQ ID NO: 1299227 - DNA, 15 bp, Homo sapiens
tactctgcaccatgc

SEQ ID NO: 1299228 - DNA, 15 bp, Homo sapiens
ctactctgcaccatg

SEQ ID NO: 1299229 - DNA, 15 bp, Homo sapiens
cctactctgcaccat

SEQ ID NO: 1299230 - DNA, 15 bp, Homo sapiens
ccctactctgcacca

SEQ ID NO: 1299231 - DNA, 15 bp, Homo sapiens
cccctactctgcacc

SEQ ID NO: 1299232 - DNA, 15 bp, Homo sapiens
ccccctactctgcac

SEQ ID NO: 1299233 - DNA, 15 bp, Homo sapiens
accccctactctgca

SEQ ID NO: 1299234 - DNA, 15 bp, Homo sapiens
taccccctactctgc

SEQ ID NO: 1299235 - DNA, 15 bp, Homo sapiens
ataccccctactctg

SEQ ID NO: 1299236 - DNA, 15 bp, Homo sapiens
aataccccctactct

SEQ ID NO: 1299237 - DNA, 15 bp, Homo sapiens
aaataccccctactc

SEQ ID NO: 1299238 - DNA, 15 bp, Homo sapiens
caaataccccctact

SEQ ID NO: 1299239 - DNA, 15 bp, Homo sapiens
gcaaataccccctac

SEQ ID NO: 1299240 - DNA, 15 bp, Homo sapiens
tgcaaatacccccta

SEQ ID NO: 1299241 - DNA, 15 bp, Homo sapiens
atgcaaataccccct

SEQ ID NO: 1299242 - DNA, 15 bp, Homo sapiens
catgcaaataccccc

SEQ ID NO: 1299243 - DNA, 15 bp, Homo sapiens
ccatgcaaatacccc

SEQ ID NO: 1299244 - DNA, 15 bp, Homo sapiens
gccatgcaaataccc

SEQ ID NO: 1299245 - DNA, 15 bp, Homo sapiens
tgccatgcaaatacc

SEQ ID NO: 1299246 - DNA, 15 bp, Homo sapiens
ctgccatgcaaatac

SEQ ID NO: 1299247 - DNA, 15 bp, Homo sapiens
actgccatgcaaata

SEQ ID NO: 1299248 - DNA, 15 bp, Homo sapiens
aactgccatgcaaat

SEQ ID NO: 1299249 - DNA, 15 bp, Homo sapiens
caactgccatgcaaa

SEQ ID NO: 1299250 - DNA, 15 bp, Homo sapiens
tcaactgccatgcaa

SEQ ID NO: 1299251 - DNA, 15 bp, Homo sapiens
ttcaactgccatgca

SEQ ID NO: 1299252 - DNA, 15 bp, Homo sapiens
tcttcaactgccatg

SEQ ID NO: 1299253 - DNA, 15 bp, Homo sapiens
gtcttcaactgccat

SEQ ID NO: 1299254 - DNA, 15 bp, Homo sapiens
ggtcttcaactgcca

SEQ ID NO: 1299255 - DNA, 15 bp, Homo sapiens
aggtcttcaactgcc

SEQ ID NO: 1299256 - DNA, 15 bp, Homo sapiens
caggtcttcaactgc

SEQ ID NO: 1299257 - DNA, 15 bp, Homo sapiens
acaggtcttcaactg

SEQ ID NO: 1299258 - DNA, 15 bp, Homo sapiens
cacaggtcttcaact

SEQ ID NO: 1299259 - DNA, 15 bp, Homo sapiens
acacaggtcttcaac

SEQ ID NO: 1299260 - DNA, 15 bp, Homo sapiens
gacacaggtcttcaa

SEQ ID NO: 1299261 - DNA, 15 bp, Homo sapiens
cgacacaggtcttca

SEQ ID NO: 1299262 - DNA, 15 bp, Homo sapiens
ccgacacaggtcttc

SEQ ID NO: 1299263 - DNA, 15 bp, Homo sapiens
tccgacacaggtctt

SEQ ID NO: 1299264 - DNA, 15 bp, Homo sapiens
gtccgacacaggtct

SEQ ID NO: 1299265 - DNA, 15 bp, Homo sapiens
cgtccgacacaggtc

SEQ ID NO: 1299266 - DNA, 15 bp, Homo sapiens
gcgtccgacacaggt

SEQ ID NO: 1299267 - DNA, 15 bp, Homo sapiens
agcgtccgacacagg

SEQ ID NO: 1299268 - DNA, 15 bp, Homo sapiens
cagcgtccgacacag

SEQ ID NO: 1299269 - DNA, 15 bp, Homo sapiens
tcagcgtccgacaca

SEQ ID NO: 1299270 - DNA, 15 bp, Homo sapiens
atcagcgtccgacac

SEQ ID NO: 1299271 - DNA, 15 bp, Homo sapiens
catcagcgtccgaca

SEQ ID NO: 1299272 - DNA, 15 bp, Homo sapiens
gcatcagcgtccgac

SEQ ID NO: 1299273 - DNA, 15 bp, Homo sapiens
agcatcagcgtccga

SEQ ID NO: 1299274 - DNA, 15 bp, Homo sapiens
aagcatcagcgtccg

SEQ ID NO: 1299275 - DNA, 15 bp, Homo sapiens
gaagcatcagcgtcc

SEQ ID NO: 1299276 - DNA, 15 bp, Homo sapiens
agaagcatcagcgtc

SEQ ID NO: 1299277 - DNA, 15 bp, Homo sapiens
tagaagcatcagcgt

SEQ ID NO: 1299278 - DNA, 15 bp, Homo sapiens
atagaagcatcagcg

SEQ ID NO: 1299279 - DNA, 15 bp, Homo sapiens
tatagaagcatcagc

SEQ ID NO: 1299280 - DNA, 15 bp, Homo sapiens
ttatagaagcatcag

SEQ ID NO: 1299281 - DNA, 15 bp, Homo sapiens
attatagaagcatca

SEQ ID NO: 1299282 - DNA, 15 bp, Homo sapiens
tattatagaagcatc

SEQ ID NO: 1299283 - DNA, 15 bp, Homo sapiens
ttattatagaagcat

SEQ ID NO: 1299284 - DNA, 15 bp, Homo sapiens
gttattatagaagca

SEQ ID NO: 1299285 - DNA, 15 bp, Homo sapiens
ggttattatagaagc

SEQ ID NO: 1299286 - DNA, 15 bp, Homo sapiens
gggttattatagaag

SEQ ID NO: 1299287 - DNA, 15 bp, Homo sapiens
tgggttattatagaa

SEQ ID NO: 1299288 - DNA, 15 bp, Homo sapiens
ttgggttattataga

SEQ ID NO: 1299289 - DNA, 15 bp, Homo sapiens
gttgggttattatag

SEQ ID NO: 1299290 - DNA, 15 bp, Homo sapiens
agttgggttattata

SEQ ID NO: 1299291 - DNA, 15 bp, Homo sapiens
aagttgggttattat

SEQ ID NO: 1299292 - DNA, 15 bp, Homo sapiens
caagttgggttatta

SEQ ID NO: 1299293 - DNA, 15 bp, Homo sapiens
ccaagttgggttatt

SEQ ID NO: 1299294 - DNA, 15 bp, Homo sapiens
accaagttgggttat

SEQ ID NO: 1299295 - DNA, 15 bp, Homo sapiens
aaccaagttgggtta

SEQ ID NO: 1299296 - DNA, 15 bp, Homo sapiens
gaaccaagttgggtt

SEQ ID NO: 1299297 - DNA, 15 bp, Homo sapiens
ggaaccaagttgggt

SEQ ID NO: 1299298 - DNA, 15 bp, Homo sapiens
aggaaccaagttggg

SEQ ID NO: 1299299 - DNA, 15 bp, Homo sapiens
gaggaaccaagttgg

SEQ ID NO: 1299300 - DNA, 15 bp, Homo sapiens
agaggaaccaagttg

SEQ ID NO: 1299301 - DNA, 15 bp, Homo sapiens
gagaggaaccaagtt

SEQ ID NO: 1299302 - DNA, 15 bp, Homo sapiens
ggagaggaaccaagt

SEQ ID NO: 1299303 - DNA, 15 bp, Homo sapiens
tggagaggaaccaag

SEQ ID NO: 1299304 - DNA, 15 bp, Homo sapiens
gtggagaggaaccaa

SEQ ID NO: 1299305 - DNA, 15 bp, Homo sapiens
agtggagaggaacca

SEQ ID NO: 1299306 - DNA, 15 bp, Homo sapiens
aagtggagaggaacc

SEQ ID NO: 1299307 - DNA, 15 bp, Homo sapiens
aaagtggagaggaac

SEQ ID NO: 1299308 - DNA, 15 bp, Homo sapiens
aaaagtggagaggaa

SEQ ID NO: 1299309 - DNA, 15 bp, Homo sapiens
taaaagtggagagga

SEQ ID NO: 1299310 - DNA, 15 bp, Homo sapiens
ctaaaagtggagagg

SEQ ID NO: 1299311 - DNA, 15 bp, Homo sapiens
tctaaaagtggagag

SEQ ID NO: 1299312 - DNA, 15 bp, Homo sapiens
ctctaaaagtggaga

SEQ ID NO: 1299313 - DNA, 15 bp, Homo sapiens
gctctaaaagtggag

SEQ ID NO: 1299314 - DNA, 15 bp, Homo sapiens
ggctctaaaagtgga

SEQ ID NO: 1299315 - DNA, 15 bp, Homo sapiens
tggctctaaaagtgg

SEQ ID NO: 1299316 - DNA, 15 bp, Homo sapiens
ttggctctaaaagtg

SEQ ID NO: 1299317 - DNA, 15 bp, Homo sapiens
attggctctaaaagt

SEQ ID NO: 1299318 - DNA, 15 bp, Homo sapiens
aattggctctaaaag

SEQ ID NO: 1299319 - DNA, 15 bp, Homo sapiens
taattggctctaaaa

SEQ ID NO: 1299320 - DNA, 15 bp, Homo sapiens
ttaattggctctaaa

SEQ ID NO: 1299321 - DNA, 15 bp, Homo sapiens
attaattggctctaa

SEQ ID NO: 1299322 - DNA, 15 bp, Homo sapiens
aattaattggctcta

SEQ ID NO: 1299323 - DNA, 15 bp, Homo sapiens
taattaattggctct

SEQ ID NO: 1299324 - DNA, 15 bp, Homo sapiens
ctaattaattggctc

SEQ ID NO: 1299325 - DNA, 15 bp, Homo sapiens
cctaattaattggct

SEQ ID NO: 1299326 - DNA, 15 bp, Homo sapiens
tcctaattaattggc

SEQ ID NO: 1299327 - DNA, 15 bp, Homo sapiens
ttcctaattaattgg

SEQ ID NO: 1299328 - DNA, 15 bp, Homo sapiens
tttcctaattaattg

SEQ ID NO: 1299329 - DNA, 15 bp, Homo sapiens
ttttcctaattaatt

SEQ ID NO: 1299330 - DNA, 15 bp, Homo sapiens
tttttcctaattaat

SEQ ID NO: 1299331 - DNA, 15 bp, Homo sapiens
gtttttcctaattaa

SEQ ID NO: 1299332 - DNA, 15 bp, Homo sapiens
tgtttttcctaatta

SEQ ID NO: 1299333 - DNA, 15 bp, Homo sapiens
gtgtttttcctaatt

SEQ ID NO: 1299334 - DNA, 15 bp, Homo sapiens
agtgtttttcctaat

SEQ ID NO: 1299335 - DNA, 15 bp, Homo sapiens
aagtgtttttcctaa

SEQ ID NO: 1299336 - DNA, 15 bp, Homo sapiens
aaagtgtttttccta

SEQ ID NO: 1299337 - DNA, 15 bp, Homo sapiens
gaaagtgtttttcct

SEQ ID NO: 1299338 - DNA, 15 bp, Homo sapiens
agaaagtgtttttcc

SEQ ID NO: 1299339 - DNA, 15 bp, Homo sapiens
aagaaagtgtttttc

SEQ ID NO: 1299340 - DNA, 15 bp, Homo sapiens
gaagaaagtgttttt

SEQ ID NO: 1299341 - DNA, 15 bp, Homo sapiens
ggaagaaagtgtttt

SEQ ID NO: 1299342 - DNA, 15 bp, Homo sapiens
aggaagaaagtgttt

SEQ ID NO: 1299343 - DNA, 15 bp, Homo sapiens
aaggaagaaagtgtt

SEQ ID NO: 1299344 - DNA, 15 bp, Homo sapiens
gaaggaagaaagtgt

SEQ ID NO: 1299345 - DNA, 15 bp, Homo sapiens
ggaaggaagaaagtg

SEQ ID NO: 1299346 - DNA, 15 bp, Homo sapiens
gggaaggaagaaagt

SEQ ID NO: 1299347 - DNA, 15 bp, Homo sapiens
agggaaggaagaaag

SEQ ID NO: 1299348 - DNA, 15 bp, Homo sapiens
gagggaaggaagaaa

SEQ ID NO: 1299349 - DNA, 15 bp, Homo sapiens
agagggaaggaagaa

SEQ ID NO: 1299350 - DNA, 15 bp, Homo sapiens
gagagggaaggaaga

SEQ ID NO: 1299351 - DNA, 15 bp, Homo sapiens
agagagggaaggaag

SEQ ID NO: 1299352 - DNA, 15 bp, Homo sapiens
cagagagggaaggaa

SEQ ID NO: 1299353 - DNA, 15 bp, Homo sapiens
acagagagggaagga

SEQ ID NO: 1299354 - DNA, 15 bp, Homo sapiens
gacagagagggaagg

SEQ ID NO: 1299355 - DNA, 15 bp, Homo sapiens
tgacagagagggaag

SEQ ID NO: 1299356 - DNA, 15 bp, Homo sapiens
atgacagagagggaa

SEQ ID NO: 1299357 - DNA, 15 bp, Homo sapiens
aatgacagagaggga

SEQ ID NO: 1299358 - DNA, 15 bp, Homo sapiens
gaatgacagagaggg

SEQ ID NO: 1299359 - DNA, 15 bp, Homo sapiens
agaatgacagagagg

SEQ ID NO: 1299360 - DNA, 15 bp, Homo sapiens
tagaatgacagagag

SEQ ID NO: 1299361 - DNA, 15 bp, Homo sapiens
atagaatgacagaga

SEQ ID NO: 1299362 - DNA, 15 bp, Homo sapiens
catagaatgacagag

SEQ ID NO: 1299363 - DNA, 15 bp, Homo sapiens
acatagaatgacaga

SEQ ID NO: 1299364 - DNA, 15 bp, Homo sapiens
aacatagaatgacag

SEQ ID NO: 1299365 - DNA, 15 bp, Homo sapiens
caacatagaatgaca

SEQ ID NO: 1299366 - DNA, 15 bp, Homo sapiens
ccaacatagaatgac

SEQ ID NO: 1299367 - DNA, 15 bp, Homo sapiens
gccaacatagaatga

SEQ ID NO: 1299368 - DNA, 15 bp, Homo sapiens
tgccaacatagaatg

SEQ ID NO: 1299369 - DNA, 15 bp, Homo sapiens
atgccaacatagaat

SEQ ID NO: 1299370 - DNA, 15 bp, Homo sapiens
aatgccaacatagaa

SEQ ID NO: 1299371 - DNA, 15 bp, Homo sapiens
aaatgccaacataga

SEQ ID NO: 1299372 - DNA, 15 bp, Homo sapiens
caaatgccaacatag

SEQ ID NO: 1299373 - DNA, 15 bp, Homo sapiens
acaaatgccaacata

SEQ ID NO: 1299374 - DNA, 15 bp, Homo sapiens
gacaaatgccaacat

SEQ ID NO: 1299375 - DNA, 15 bp, Homo sapiens
ggacaaatgccaaca

SEQ ID NO: 1299376 - DNA, 15 bp, Homo sapiens
gggacaaatgccaac

SEQ ID NO: 1299377 - DNA, 15 bp, Homo sapiens
ggggacaaatgccaa

SEQ ID NO: 1299378 - DNA, 15 bp, Homo sapiens
gggggacaaatgcca

SEQ ID NO: 1299379 - DNA, 15 bp, Homo sapiens
agggggacaaatgcc

SEQ ID NO: 1299380 - DNA, 15 bp, Homo sapiens
aagggggacaaatgc

SEQ ID NO: 1299381 - DNA, 15 bp, Homo sapiens
caagggggacaaatg

SEQ ID NO: 1299382 - DNA, 15 bp, Homo sapiens
ccaagggggacaaat

SEQ ID NO: 1299383 - DNA, 15 bp, Homo sapiens
cccaagggggacaaa

SEQ ID NO: 1299384 - DNA, 15 bp, Homo sapiens
acccaagggggacaa

SEQ ID NO: 1299385 - DNA, 15 bp, Homo sapiens
aacccaagggggaca

SEQ ID NO: 1299386 - DNA, 15 bp, Homo sapiens
caacccaagggggac

SEQ ID NO: 1299387 - DNA, 15 bp, Homo sapiens
tcaacccaaggggga

SEQ ID NO: 1299388 - DNA, 15 bp, Homo sapiens
atcaacccaaggggg

SEQ ID NO: 1299389 - DNA, 15 bp, Homo sapiens
catcaacccaagggg

SEQ ID NO: 1299390 - DNA, 15 bp, Homo sapiens
ccatcaacccaaggg

SEQ ID NO: 1299391 - DNA, 15 bp, Homo sapiens
cccatcaacccaagg

SEQ ID NO: 1299392 - DNA, 15 bp, Homo sapiens
gcccatcaacccaag

SEQ ID NO: 1299393 - DNA, 15 bp, Homo sapiens
tgcccatcaacccaa

SEQ ID NO: 1299394 - DNA, 15 bp, Homo sapiens
ctgcccatcaaccca

SEQ ID NO: 1299395 - DNA, 15 bp, Homo sapiens
tctgcccatcaaccc

SEQ ID NO: 1299396 - DNA, 15 bp, Homo sapiens
gtctgcccatcaacc

SEQ ID NO: 1299397 - DNA, 15 bp, Homo sapiens
tgtctgcccatcaac

SEQ ID NO: 1299398 - DNA, 15 bp, Homo sapiens
gtgtctgcccatcaa

SEQ ID NO: 1299399 - DNA, 15 bp, Homo sapiens
tgtgtctgcccatca

SEQ ID NO: 1299400 - DNA, 15 bp, Homo sapiens
ctgtgtctgcccatc

SEQ ID NO: 1299401 - DNA, 15 bp, Homo sapiens
cctgtgtctgcccat

SEQ ID NO: 1299402 - DNA, 15 bp, Homo sapiens
acctgtgtctgccca

SEQ ID NO: 1299403 - DNA, 15 bp, Homo sapiens
tacctgtgtctgccc

SEQ ID NO: 1299404 - DNA, 15 bp, Homo sapiens
atacctgtgtctgcc

SEQ ID NO: 1299405 - DNA, 15 bp, Homo sapiens
catacctgtgtctgc

SEQ ID NO: 1299406 - DNA, 15 bp, Homo sapiens
tcatacctgtgtctg

SEQ ID NO: 1299407 - DNA, 15 bp, Homo sapiens
ttcatacctgtgtct

SEQ ID NO: 1299408 - DNA, 15 bp, Homo sapiens
tttcatacctgtgtc

SEQ ID NO: 1299409 - DNA, 15 bp, Homo sapiens
gtttcatacctgtgt

SEQ ID NO: 1299410 - DNA, 15 bp, Homo sapiens
ggtttcatacctgtg

SEQ ID NO: 1299411 - DNA, 15 bp, Homo sapiens
gggtttcatacctgt

SEQ ID NO: 1299412 - DNA, 15 bp, Homo sapiens
tgggtttcatacctg

SEQ ID NO: 1299413 - DNA, 15 bp, Homo sapiens
atgggtttcatacct

SEQ ID NO: 1299414 - DNA, 15 bp, Homo sapiens
tatgggtttcatacc

SEQ ID NO: 1299415 - DNA, 15 bp, Homo sapiens
ttatgggtttcatac

SEQ ID NO: 1299416 - DNA, 15 bp, Homo sapiens
gttatgggtttcata

SEQ ID NO: 1299417 - DNA, 15 bp, Homo sapiens
agttatgggtttcat

SEQ ID NO: 1299418 - DNA, 15 bp, Homo sapiens
aagttatgggtttca

SEQ ID NO: 1299419 - DNA, 15 bp, Homo sapiens
gaagttatgggtttc

SEQ ID NO: 1299420 - DNA, 15 bp, Homo sapiens
tgaagttatgggttt

SEQ ID NO: 1299421 - DNA, 15 bp, Homo sapiens
atgaagttatgggtt

SEQ ID NO: 1299422 - DNA, 15 bp, Homo sapiens
gatgaagttatgggt

SEQ ID NO: 1299423 - DNA, 15 bp, Homo sapiens
agatgaagttatggg

SEQ ID NO: 1299424 - DNA, 15 bp, Homo sapiens
gagatgaagttatgg

SEQ ID NO: 1299425 - DNA, 15 bp, Homo sapiens
agagatgaagttatg

SEQ ID NO: 1299426 - DNA, 15 bp, Homo sapiens
gagagatgaagttat

SEQ ID NO: 1299427 - DNA, 15 bp, Homo sapiens
agagagatgaagtta

SEQ ID NO: 1299428 - DNA, 15 bp, Homo sapiens
cagagagatgaagtt

SEQ ID NO: 1299429 - DNA, 15 bp, Homo sapiens
ccagagagatgaagt

SEQ ID NO: 1299430 - DNA, 15 bp, Homo sapiens
cccagagagatgaag

SEQ ID NO: 1299431 - DNA, 15 bp, Homo sapiens
tcccagagagatgaa

SEQ ID NO: 1299432 - DNA, 15 bp, Homo sapiens
atcccagagagatga

SEQ ID NO: 1299433 - DNA, 15 bp, Homo sapiens
aatcccagagagatg

SEQ ID NO: 1299434 - DNA, 15 bp, Homo sapiens
gaatcccagagagat

SEQ ID NO: 1299435 - DNA, 15 bp, Homo sapiens
tgaatcccagagaga

SEQ ID NO: 1299436 - DNA, 15 bp, Homo sapiens
ctgaatcccagagag

SEQ ID NO: 1299437 - DNA, 15 bp, Homo sapiens
actgaatcccagaga

SEQ ID NO: 1299438 - DNA, 15 bp, Homo sapiens
aactgaatcccagag

SEQ ID NO: 1299439 - DNA, 15 bp, Homo sapiens
aaactgaatcccaga

SEQ ID NO: 1299440 - DNA, 15 bp, Homo sapiens
gaaactgaatcccag

SEQ ID NO: 1299441 - DNA, 15 bp, Homo sapiens
agaaactgaatccca

SEQ ID NO: 1299442 - DNA, 15 bp, Homo sapiens
cagaaactgaatccc

SEQ ID NO: 1299443 - DNA, 15 bp, Homo sapiens
ccagaaactgaatcc

SEQ ID NO: 1299444 - DNA, 15 bp, Homo sapiens
cccagaaactgaatc

SEQ ID NO: 1299445 - DNA, 15 bp, Homo sapiens
gcccagaaactgaat

SEQ ID NO: 1299446 - DNA, 15 bp, Homo sapiens
tgcccagaaactgaa

SEQ ID NO: 1299447 - DNA, 15 bp, Homo sapiens
ctgcccagaaactga

SEQ ID NO: 1299448 - DNA, 15 bp, Homo sapiens
tctgcccagaaactg

SEQ ID NO: 1299449 - DNA, 15 bp, Homo sapiens
ctctgcccagaaact

SEQ ID NO: 1299450 - DNA, 15 bp, Homo sapiens
actctgcccagaaac

SEQ ID NO: 1299451 - DNA, 15 bp, Homo sapiens
cactctgcccagaaa

SEQ ID NO: 1299452 - DNA, 15 bp, Homo sapiens
ccactctgcccagaa

SEQ ID NO: 1299453 - DNA, 15 bp, Homo sapiens
cccactctgcccaga

SEQ ID NO: 1299454 - DNA, 15 bp, Homo sapiens
gcccactctgcccag

SEQ ID NO: 1299455 - DNA, 15 bp, Homo sapiens
tgcccactctgccca

SEQ ID NO: 1299456 - DNA, 15 bp, Homo sapiens
ttgcccactctgccc

SEQ ID NO: 1299457 - DNA, 15 bp, Homo sapiens
cttgcccactctgcc

SEQ ID NO: 1299458 - DNA, 15 bp, Homo sapiens
ccttgcccactctgc

SEQ ID NO: 1299459 - DNA, 15 bp, Homo sapiens
cccttgcccactctg

SEQ ID NO: 1299460 - DNA, 15 bp, Homo sapiens
tcccttgcccactct

SEQ ID NO: 1299461 - DNA, 15 bp, Homo sapiens
ctcccttgcccactc

SEQ ID NO: 1299462 - DNA, 15 bp, Homo sapiens
cctcccttgcccact

SEQ ID NO: 1299463 - DNA, 15 bp, Homo sapiens
gcctcccttgcccac

SEQ ID NO: 1299464 - DNA, 15 bp, Homo sapiens
ggcctcccttgccca

SEQ ID NO: 1299465 - DNA, 15 bp, Homo sapiens
tggcctcccttgccc

SEQ ID NO: 1299466 - DNA, 15 bp, Homo sapiens
ctggcctcccttgcc

SEQ ID NO: 1299467 - DNA, 15 bp, Homo sapiens
cctggcctcccttgc

SEQ ID NO: 1299468 - DNA, 15 bp, Homo sapiens
ccctggcctcccttg

SEQ ID NO: 1299469 - DNA, 15 bp, Homo sapiens
accctggcctccctt

SEQ ID NO: 1299470 - DNA, 15 bp, Homo sapiens
gaccctggcctccct

SEQ ID NO: 1299471 - DNA, 15 bp, Homo sapiens
agaccctggcctccc

SEQ ID NO: 1299472 - DNA, 15 bp, Homo sapiens
aagaccctggcctcc

SEQ ID NO: 1299473 - DNA, 15 bp, Homo sapiens
gaagaccctggcctc

SEQ ID NO: 1299474 - DNA, 15 bp, Homo sapiens
agaagaccctggcct

SEQ ID NO: 1299475 - DNA, 15 bp, Homo sapiens
tagaagaccctggcc

SEQ ID NO: 1299476 - DNA, 15 bp, Homo sapiens
ctagaagaccctggc

SEQ ID NO: 1299477 - DNA, 15 bp, Homo sapiens
tctagaagaccctgg

SEQ ID NO: 1299478 - DNA, 15 bp, Homo sapiens
gtctagaagaccctg

SEQ ID NO: 1299479 - DNA, 15 bp, Homo sapiens
agtctagaagaccct

SEQ ID NO: 1299480 - DNA, 15 bp, Homo sapiens
gagtctagaagaccc

SEQ ID NO: 1299481 - DNA, 15 bp, Homo sapiens
tgagtctagaagacc

SEQ ID NO: 1299482 - DNA, 15 bp, Homo sapiens
gtgagtctagaagac

SEQ ID NO: 1299483 - DNA, 15 bp, Homo sapiens
agtgagtctagaaga

SEQ ID NO: 1299484 - DNA, 15 bp, Homo sapiens
tagtgagtctagaag

SEQ ID NO: 1299485 - DNA, 15 bp, Homo sapiens
ttagtgagtctagaa

SEQ ID NO: 1299486 - DNA, 15 bp, Homo sapiens
cttagtgagtctaga

SEQ ID NO: 1299487 - DNA, 15 bp, Homo sapiens
acttagtgagtctag

SEQ ID NO: 1299488 - DNA, 15 bp, Homo sapiens
gacttagtgagtcta

SEQ ID NO: 1299489 - DNA, 15 bp, Homo sapiens
tgacttagtgagtct

SEQ ID NO: 1299490 - DNA, 15 bp, Homo sapiens
ctgacttagtgagtc

SEQ ID NO: 1299491 - DNA, 15 bp, Homo sapiens
tctgacttagtgagt

SEQ ID NO: 1299492 - DNA, 15 bp, Homo sapiens
ttctgacttagtgag

SEQ ID NO: 1299493 - DNA, 15 bp, Homo sapiens
cttctgacttagtga

SEQ ID NO: 1299494 - DNA, 15 bp, Homo sapiens
gcttctgacttagtg

SEQ ID NO: 1299495 - DNA, 15 bp, Homo sapiens
tgcttctgacttagt

SEQ ID NO: 1299496 - DNA, 15 bp, Homo sapiens
atgcttctgacttag

SEQ ID NO: 1299497 - DNA, 15 bp, Homo sapiens
gatgcttctgactta

SEQ ID NO: 1299498 - DNA, 15 bp, Homo sapiens
agatgcttctgactt

SEQ ID NO: 1299499 - DNA, 15 bp, Homo sapiens
gagatgcttctgact

SEQ ID NO: 1299500 - DNA, 15 bp, Homo sapiens
ggagatgcttctgac

SEQ ID NO: 1299501 - DNA, 15 bp, Homo sapiens
aggagatgcttctga

SEQ ID NO: 1299502 - DNA, 15 bp, Homo sapiens
gaggagatgcttctg

SEQ ID NO: 1299503 - DNA, 15 bp, Homo sapiens
ggaggagatgcttct

SEQ ID NO: 1299504 - DNA, 15 bp, Homo sapiens
aggaggagatgcttc

SEQ ID NO: 1299505 - DNA, 15 bp, Homo sapiens
caggaggagatgctt

SEQ ID NO: 1299506 - DNA, 15 bp, Homo sapiens
tcaggaggagatgct

SEQ ID NO: 1299507 - DNA, 15 bp, Homo sapiens
atcaggaggagatgc

SEQ ID NO: 1299508 - DNA, 15 bp, Homo sapiens
gatcaggaggagatg

SEQ ID NO: 1299509 - DNA, 15 bp, Homo sapiens
agatcaggaggagat

SEQ ID NO: 1299510 - DNA, 15 bp, Homo sapiens
aagatcaggaggaga

SEQ ID NO: 1299511 - DNA, 15 bp, Homo sapiens
aaagatcaggaggag

SEQ ID NO: 1299512 - DNA, 15 bp, Homo sapiens
caaagatcaggagga

SEQ ID NO: 1299513 - DNA, 15 bp, Homo sapiens
ccaaagatcaggagg

SEQ ID NO: 1299514 - DNA, 15 bp, Homo sapiens
accaaagatcaggag

SEQ ID NO: 1299515 - DNA, 15 bp, Homo sapiens
aaccaaagatcagga

SEQ ID NO: 1299516 - DNA, 15 bp, Homo sapiens
aaaccaaagatcagg

SEQ ID NO: 1299517 - DNA, 15 bp, Homo sapiens
taaaccaaagatcag

SEQ ID NO: 1299518 - DNA, 15 bp, Homo sapiens
ttaaaccaaagatca

SEQ ID NO: 1299519 - DNA, 15 bp, Homo sapiens
attaaaccaaagatc

SEQ ID NO: 1299520 - DNA, 15 bp, Homo sapiens
aattaaaccaaagat

SEQ ID NO: 1299521 - DNA, 15 bp, Homo sapiens
aaattaaaccaaaga

SEQ ID NO: 1299522 - DNA, 15 bp, Homo sapiens
aaaattaaaccaaag

SEQ ID NO: 1299523 - DNA, 15 bp, Homo sapiens
aaaaattaaaccaaa

SEQ ID NO: 1299524 - DNA, 15 bp, Homo sapiens
gaaaaattaaaccaa

SEQ ID NO: 1299525 - DNA, 15 bp, Homo sapiens
agaaaaattaaacca

SEQ ID NO: 1299526 - DNA, 15 bp, Homo sapiens
aagaaaaattaaacc

SEQ ID NO: 1299527 - DNA, 15 bp, Homo sapiens
aaagaaaaattaaac

SEQ ID NO: 1299528 - DNA, 15 bp, Homo sapiens
aaaagaaaaattaaa

SEQ ID NO: 1299529 - DNA, 15 bp, Homo sapiens
caaaagaaaaattaa

SEQ ID NO: 1299530 - DNA, 15 bp, Homo sapiens
tcaaaagaaaaatta

SEQ ID NO: 1299531 - DNA, 15 bp, Homo sapiens
ttcaaaagaaaaatt

SEQ ID NO: 1299532 - DNA, 15 bp, Homo sapiens
cttcaaaagaaaaat

SEQ ID NO: 1299533 - DNA, 15 bp, Homo sapiens
ccttcaaaagaaaaa

SEQ ID NO: 1299534 - DNA, 15 bp, Homo sapiens
accttcaaaagaaaa

SEQ ID NO: 1299535 - DNA, 15 bp, Homo sapiens
taccttcaaaagaaa

SEQ ID NO: 1299536 - DNA, 15 bp, Homo sapiens
gtaccttcaaaagaa

SEQ ID NO: 1299537 - DNA, 15 bp, Homo sapiens
agtaccttcaaaaga

SEQ ID NO: 1299538 - DNA, 15 bp, Homo sapiens
gagtaccttcaaaag

SEQ ID NO: 1299539 - DNA, 15 bp, Homo sapiens
tgagtaccttcaaaa

SEQ ID NO: 1299540 - DNA, 15 bp, Homo sapiens
ctgagtaccttcaaa

SEQ ID NO: 1299541 - DNA, 15 bp, Homo sapiens
actgagtaccttcaa

SEQ ID NO: 1299542 - DNA, 15 bp, Homo sapiens
gactgagtaccttca

SEQ ID NO: 1299543 - DNA, 15 bp, Homo sapiens
ggactgagtaccttc

SEQ ID NO: 1299544 - DNA, 15 bp, Homo sapiens
tggactgagtacctt

SEQ ID NO: 1299545 - DNA, 15 bp, Homo sapiens
atggactgagtacct

SEQ ID NO: 1299546 - DNA, 15 bp, Homo sapiens
catggactgagtacc

SEQ ID NO: 1299547 - DNA, 15 bp, Homo sapiens
tcatggactgagtac

SEQ ID NO: 1299548 - DNA, 15 bp, Homo sapiens
atcatggactgagta

SEQ ID NO: 1299549 - DNA, 15 bp, Homo sapiens
aatcatggactgagt

SEQ ID NO: 1299550 - DNA, 15 bp, Homo sapiens
aaatcatggactgag

SEQ ID NO: 1299551 - DNA, 15 bp, Homo sapiens
gaaatcatggactga

SEQ ID NO: 1299552 - DNA, 15 bp, Homo sapiens
tgaaatcatggactg

SEQ ID NO: 1299553 - DNA, 15 bp, Homo sapiens
ctgaaatcatggact

SEQ ID NO: 1299554 - DNA, 15 bp, Homo sapiens
tctgaaatcatggac

SEQ ID NO: 1299555 - DNA, 15 bp, Homo sapiens
atctgaaatcatgga

SEQ ID NO: 1299556 - DNA, 15 bp, Homo sapiens
aatctgaaatcatgg

SEQ ID NO: 1299557 - DNA, 15 bp, Homo sapiens
taatctgaaatcatg

SEQ ID NO: 1299558 - DNA, 15 bp, Homo sapiens
ctaatctgaaatcat

SEQ ID NO: 1299559 - DNA, 15 bp, Homo sapiens
cctaatctgaaatca

SEQ ID NO: 1299560 - DNA, 15 bp, Homo sapiens
ccctaatctgaaatc

SEQ ID NO: 1299561 - DNA, 15 bp, Homo sapiens
tccctaatctgaaat

SEQ ID NO: 1299562 - DNA, 15 bp, Homo sapiens
ctccctaatctgaaa

SEQ ID NO: 1299563 - DNA, 15 bp, Homo sapiens
cctccctaatctgaa

SEQ ID NO: 1299564 - DNA, 15 bp, Homo sapiens
gcctccctaatctga

SEQ ID NO: 1299565 - DNA, 15 bp, Homo sapiens
tgcctccctaatctg

SEQ ID NO: 1299566 - DNA, 15 bp, Homo sapiens
gtgcctccctaatct

SEQ ID NO: 1299567 - DNA, 15 bp, Homo sapiens
ggtgcctccctaatc

SEQ ID NO: 1299568 - DNA, 15 bp, Homo sapiens
tggtgcctccctaat

SEQ ID NO: 1299569 - DNA, 15 bp, Homo sapiens
gtggtgcctccctaa

SEQ ID NO: 1299570 - DNA, 15 bp, Homo sapiens
ggtggtgcctcccta

SEQ ID NO: 1299571 - DNA, 15 bp, Homo sapiens
aggtggtgcctccct

SEQ ID NO: 1299572 - DNA, 15 bp, Homo sapiens
caggtggtgcctccc

SEQ ID NO: 1299573 - DNA, 15 bp, Homo sapiens
ccaggtggtgcctcc

SEQ ID NO: 1299574 - DNA, 15 bp, Homo sapiens
gccaggtggtgcctc

SEQ ID NO: 1299575 - DNA, 15 bp, Homo sapiens
tgccaggtggtgcct

SEQ ID NO: 1299576 - DNA, 15 bp, Homo sapiens
ttgccaggtggtgcc

SEQ ID NO: 1299577 - DNA, 15 bp, Homo sapiens
tttgccaggtggtgc

SEQ ID NO: 1299578 - DNA, 15 bp, Homo sapiens
ctttgccaggtggtg

SEQ ID NO: 1299579 - DNA, 15 bp, Homo sapiens
cctttgccaggtggt

SEQ ID NO: 1299580 - DNA, 15 bp, Homo sapiens
ccctttgccaggtgg

SEQ ID NO: 1299581 - DNA, 15 bp, Homo sapiens
cccctttgccaggtg

SEQ ID NO: 1299582 - DNA, 15 bp, Homo sapiens
ccccctttgccaggt

SEQ ID NO: 1299583 - DNA, 15 bp, Homo sapiens
tccccctttgccagg

SEQ ID NO: 1299584 - DNA, 15 bp, Homo sapiens
ctccccctttgccag

SEQ ID NO: 1299585 - DNA, 15 bp, Homo sapiens
gctccccctttgcca

SEQ ID NO: 1299586 - DNA, 15 bp, Homo sapiens
ggctccccctttgcc

SEQ ID NO: 1299587 - DNA, 15 bp, Homo sapiens
aggctccccctttgc

SEQ ID NO: 1299588 - DNA, 15 bp, Homo sapiens
caggctccccctttg

SEQ ID NO: 1299589 - DNA, 15 bp, Homo sapiens
tcaggctcccccttt

SEQ ID NO: 1299590 - DNA, 15 bp, Homo sapiens
gtcaggctccccctt

SEQ ID NO: 1299591 - DNA, 15 bp, Homo sapiens
tgtcaggctccccct

SEQ ID NO: 1299592 - DNA, 15 bp, Homo sapiens
ttgtcaggctccccc

SEQ ID NO: 1299593 - DNA, 15 bp, Homo sapiens
attgtcaggctcccc

SEQ ID NO: 1299594 - DNA, 15 bp, Homo sapiens
cattgtcaggctccc

SEQ ID NO: 1299595 - DNA, 15 bp, Homo sapiens
gcattgtcaggctcc

SEQ ID NO: 1299596 - DNA, 15 bp, Homo sapiens
tgcattgtcaggctc

SEQ ID NO: 1299597 - DNA, 15 bp, Homo sapiens
ctgcattgtcaggct

SEQ ID NO: 1299598 - DNA, 15 bp, Homo sapiens
cctgcattgtcaggc

SEQ ID NO: 1299599 - DNA, 15 bp, Homo sapiens
ccctgcattgtcagg

SEQ ID NO: 1299600 - DNA, 15 bp, Homo sapiens
gccctgcattgtcag

SEQ ID NO: 1299601 - DNA, 15 bp, Homo sapiens
tgccctgcattgtca

SEQ ID NO: 1299602 - DNA, 15 bp, Homo sapiens
ctgccctgcattgtc

SEQ ID NO: 1299603 - DNA, 15 bp, Homo sapiens
actgccctgcattgt

SEQ ID NO: 1299604 - DNA, 15 bp, Homo sapiens
aactgccctgcattg

SEQ ID NO: 1299605 - DNA, 15 bp, Homo sapiens
gaactgccctgcatt

SEQ ID NO: 1299606 - DNA, 15 bp, Homo sapiens
agaactgccctgcat

SEQ ID NO: 1299607 - DNA, 15 bp, Homo sapiens
tagaactgccctgca

SEQ ID NO: 1299608 - DNA, 15 bp, Homo sapiens
ttagaactgccctgc

SEQ ID NO: 1299609 - DNA, 15 bp, Homo sapiens
cttagaactgccctg

SEQ ID NO: 1299610 - DNA, 15 bp, Homo sapiens
acttagaactgccct

SEQ ID NO: 1299611 - DNA, 15 bp, Homo sapiens
tacttagaactgccc

SEQ ID NO: 1299612 - DNA, 15 bp, Homo sapiens
gtacttagaactgcc

SEQ ID NO: 1299613 - DNA, 15 bp, Homo sapiens
ggtacttagaactgc

SEQ ID NO: 1299614 - DNA, 15 bp, Homo sapiens
tggtacttagaactg

SEQ ID NO: 1299615 - DNA, 15 bp, Homo sapiens
ctggtacttagaact

SEQ ID NO: 1299616 - DNA, 15 bp, Homo sapiens
cctggtacttagaac

SEQ ID NO: 1299617 - DNA, 15 bp, Homo sapiens
gcctggtacttagaa

SEQ ID NO: 1299618 - DNA, 15 bp, Homo sapiens
agcctggtacttaga

SEQ ID NO: 1299619 - DNA, 15 bp, Homo sapiens
aagcctggtacttag

SEQ ID NO: 1299620 - DNA, 15 bp, Homo sapiens
caagcctggtactta

SEQ ID NO: 1299621 - DNA, 15 bp, Homo sapiens
ccaagcctggtactt

SEQ ID NO: 1299622 - DNA, 15 bp, Homo sapiens
cccaagcctggtact

SEQ ID NO: 1299623 - DNA, 15 bp, Homo sapiens
tcccaagcctggtac

SEQ ID NO: 1299624 - DNA, 15 bp, Homo sapiens
gtcccaagcctggta

SEQ ID NO: 1299625 - DNA, 15 bp, Homo sapiens
ggtcccaagcctggt

SEQ ID NO: 1299626 - DNA, 15 bp, Homo sapiens
cggtcccaagcctgg

SEQ ID NO: 1299627 - DNA, 15 bp, Homo sapiens
tcggtcccaagcctg

SEQ ID NO: 1299628 - DNA, 15 bp, Homo sapiens
atcggtcccaagcct

SEQ ID NO: 1299629 - DNA, 15 bp, Homo sapiens
aatcggtcccaagcc

SEQ ID NO: 1299630 - DNA, 15 bp, Homo sapiens
gaatcggtcccaagc

SEQ ID NO: 1299631 - DNA, 15 bp, Homo sapiens
agaatcggtcccaag

SEQ ID NO: 1299632 - DNA, 15 bp, Homo sapiens
tagaatcggtcccaa

SEQ ID NO: 1299633 - DNA, 15 bp, Homo sapiens
atagaatcggtccca

SEQ ID NO: 1299634 - DNA, 15 bp, Homo sapiens
catagaatcggtccc

SEQ ID NO: 1299635 - DNA, 15 bp, Homo sapiens
ccatagaatcggtcc

SEQ ID NO: 1299636 - DNA, 15 bp, Homo sapiens
tccatagaatcggtc

SEQ ID NO: 1299637 - DNA, 15 bp, Homo sapiens
ctccatagaatcggt

SEQ ID NO: 1299638 - DNA, 15 bp, Homo sapiens
tctccatagaatcgg

SEQ ID NO: 1299639 - DNA, 15 bp, Homo sapiens
atctccatagaatcg

SEQ ID NO: 1299640 - DNA, 15 bp, Homo sapiens
tatctccatagaatc

SEQ ID NO: 1299641 - DNA, 15 bp, Homo sapiens
atatctccatagaat

SEQ ID NO: 1299642 - DNA, 15 bp, Homo sapiens
catatctccatagaa

SEQ ID NO: 1299643 - DNA, 15 bp, Homo sapiens
ccatatctccataga

SEQ ID NO: 1299644 - DNA, 15 bp, Homo sapiens
accatatctccatag

SEQ ID NO: 1299645 - DNA, 15 bp, Homo sapiens
taccatatctccata

SEQ ID NO: 1299646 - DNA, 15 bp, Homo sapiens
ctaccatatctccat

SEQ ID NO: 1299647 - DNA, 15 bp, Homo sapiens
tctaccatatctcca

SEQ ID NO: 1299648 - DNA, 15 bp, Homo sapiens
atctaccatatctcc

SEQ ID NO: 1299649 - DNA, 15 bp, Homo sapiens
catctaccatatctc

SEQ ID NO: 1299650 - DNA, 15 bp, Homo sapiens
ccatctaccatatct

SEQ ID NO: 1299651 - DNA, 15 bp, Homo sapiens
cccatctaccatatc

SEQ ID NO: 1299652 - DNA, 15 bp, Homo sapiens
tcccatctaccatat

SEQ ID NO: 1299653 - DNA, 15 bp, Homo sapiens
gtcccatctaccata

SEQ ID NO: 1299654 - DNA, 15 bp, Homo sapiens
agtcccatctaccat

SEQ ID NO: 1299655 - DNA, 15 bp, Homo sapiens
tagtcccatctacca

SEQ ID NO: 1299656 - DNA, 15 bp, Homo sapiens
gtagtcccatctacc

SEQ ID NO: 1299657 - DNA, 15 bp, Homo sapiens
ggtagtcccatctac

SEQ ID NO: 1299658 - DNA, 15 bp, Homo sapiens
gggtagtcccatcta

SEQ ID NO: 1299659 - DNA, 15 bp, Homo sapiens
agggtagtcccatct

SEQ ID NO: 1299660 - DNA, 15 bp, Homo sapiens
gagggtagtcccatc

SEQ ID NO: 1299661 - DNA, 15 bp, Homo sapiens
tgagggtagtcccat

SEQ ID NO: 1299662 - DNA, 15 bp, Homo sapiens
ttgagggtagtccca

SEQ ID NO: 1299663 - DNA, 15 bp, Homo sapiens
gttgagggtagtccc

SEQ ID NO: 1299664 - DNA, 15 bp, Homo sapiens
agttgagggtagtcc

SEQ ID NO: 1299665 - DNA, 15 bp, Homo sapiens
cagttgagggtagtc

SEQ ID NO: 1299666 - DNA, 15 bp, Homo sapiens
tcagttgagggtagt

SEQ ID NO: 1299667 - DNA, 15 bp, Homo sapiens
ttcagttgagggtag

SEQ ID NO: 1299668 - DNA, 15 bp, Homo sapiens
attcagttgagggta

SEQ ID NO: 1299669 - DNA, 15 bp, Homo sapiens
tattcagttgagggt

SEQ ID NO: 1299670 - DNA, 15 bp, Homo sapiens
ttattcagttgaggg

SEQ ID NO: 1299671 - DNA, 15 bp, Homo sapiens
attattcagttgagg

SEQ ID NO: 1299672 - DNA, 15 bp, Homo sapiens
cattattcagttgag

SEQ ID NO: 1299673 - DNA, 15 bp, Homo sapiens
acattattcagttga

SEQ ID NO: 1299674 - DNA, 15 bp, Homo sapiens
cacattattcagttg

SEQ ID NO: 1299675 - DNA, 15 bp, Homo sapiens
acacattattcagtt

SEQ ID NO: 1299676 - DNA, 15 bp, Homo sapiens
cacacattattcagt

SEQ ID NO: 1299677 - DNA, 15 bp, Homo sapiens
tcacacattattcag

SEQ ID NO: 1299678 - DNA, 15 bp, Homo sapiens
ttcacacattattca

SEQ ID NO: 1299679 - DNA, 15 bp, Homo sapiens
cttcacacattattc

SEQ ID NO: 1299680 - DNA, 15 bp, Homo sapiens
tcttcacacattatt

SEQ ID NO: 1299681 - DNA, 15 bp, Homo sapiens
ctcttcacacattat

SEQ ID NO: 1299682 - DNA, 15 bp, Homo sapiens
tctcttcacacatta

SEQ ID NO: 1299683 - DNA, 15 bp, Homo sapiens
ttctcttcacacatt

SEQ ID NO: 1299684 - DNA, 15 bp, Homo sapiens
attctcttcacacat

SEQ ID NO: 1299685 - DNA, 15 bp, Homo sapiens
aattctcttcacaca

SEQ ID NO: 1299686 - DNA, 15 bp, Homo sapiens
aaattctcttcacac

SEQ ID NO: 1299687 - DNA, 15 bp, Homo sapiens
taaattctcttcaca

SEQ ID NO: 1299688 - DNA, 15 bp, Homo sapiens
ttaaattctcttcac

SEQ ID NO: 1299689 - DNA, 15 bp, Homo sapiens
cttaaattctcttca

SEQ ID NO: 1299690 - DNA, 15 bp, Homo sapiens
tcttaaattctcttc

SEQ ID NO: 1299691 - DNA, 15 bp, Homo sapiens
gtcttaaattctctt

SEQ ID NO: 1299692 - DNA, 15 bp, Homo sapiens
ggtcttaaattctct

SEQ ID NO: 1299693 - DNA, 15 bp, Homo sapiens
tggtcttaaattctc

SEQ ID NO: 1299694 - DNA, 15 bp, Homo sapiens
atggtcttaaattct

SEQ ID NO: 1299695 - DNA, 15 bp, Homo sapiens
catggtcttaaattc

SEQ ID NO: 1299696 - DNA, 15 bp, Homo sapiens
gcatggtcttaaatt

SEQ ID NO: 1299697 - DNA, 15 bp, Homo sapiens
ggcatggtcttaaat

SEQ ID NO: 1299698 - DNA, 15 bp, Homo sapiens
aggcatggtcttaaa

SEQ ID NO: 1299699 - DNA, 15 bp, Homo sapiens
caggcatggtcttaa

SEQ ID NO: 1299700 - DNA, 15 bp, Homo sapiens
tcaggcatggtctta

SEQ ID NO: 1299701 - DNA, 15 bp, Homo sapiens
atcaggcatggtctt

SEQ ID NO: 1299702 - DNA, 15 bp, Homo sapiens
tatcaggcatggtct

SEQ ID NO: 1299703 - DNA, 15 bp, Homo sapiens
gtatcaggcatggtc

SEQ ID NO: 1299704 - DNA, 15 bp, Homo sapiens
tgtatcaggcatggt

SEQ ID NO: 1299705 - DNA, 15 bp, Homo sapiens
atgtatcaggcatgg

SEQ ID NO: 1299706 - DNA, 15 bp, Homo sapiens
tatgtatcaggcatg

SEQ ID NO: 1299707 - DNA, 15 bp, Homo sapiens
ctatgtatcaggcat

SEQ ID NO: 1299708 - DNA, 15 bp, Homo sapiens
tctatgtatcaggca

SEQ ID NO: 1299709 - DNA, 15 bp, Homo sapiens
ctctatgtatcaggc

SEQ ID NO: 1299710 - DNA, 15 bp, Homo sapiens
cctctatgtatcagg

SEQ ID NO: 1299711 - DNA, 15 bp, Homo sapiens
ccctctatgtatcag

SEQ ID NO: 1299712 - DNA, 15 bp, Homo sapiens
accctctatgtatca

SEQ ID NO: 1299713 - DNA, 15 bp, Homo sapiens
gaccctctatgtatc

SEQ ID NO: 1299714 - DNA, 15 bp, Homo sapiens
ggaccctctatgtat

SEQ ID NO: 1299715 - DNA, 15 bp, Homo sapiens
tggaccctctatgta

SEQ ID NO: 1299716 - DNA, 15 bp, Homo sapiens
ctggaccctctatgt

SEQ ID NO: 1299717 - DNA, 15 bp, Homo sapiens
actggaccctctatg

SEQ ID NO: 1299718 - DNA, 15 bp, Homo sapiens
cactggaccctctat

SEQ ID NO: 1299719 - DNA, 15 bp, Homo sapiens
tcactggaccctcta

SEQ ID NO: 1299720 - DNA, 15 bp, Homo sapiens
ttcactggaccctct

SEQ ID NO: 1299721 - DNA, 15 bp, Homo sapiens
tttcactggaccctc

SEQ ID NO: 1299722 - DNA, 15 bp, Homo sapiens
ctttcactggaccct

SEQ ID NO: 1299723 - DNA, 15 bp, Homo sapiens
actttcactggaccc

SEQ ID NO: 1299724 - DNA, 15 bp, Homo sapiens
aactttcactggacc

SEQ ID NO: 1299725 - DNA, 15 bp, Homo sapiens
caactttcactggac

SEQ ID NO: 1299726 - DNA, 15 bp, Homo sapiens
tcaactttcactgga

SEQ ID NO: 1299727 - DNA, 15 bp, Homo sapiens
ttcaactttcactgg

SEQ ID NO: 1299728 - DNA, 15 bp, Homo sapiens
cttcaactttcactg

SEQ ID NO: 1299729 - DNA, 15 bp, Homo sapiens
ccttcaactttcact

SEQ ID NO: 1299730 - DNA, 15 bp, Homo sapiens
gccttcaactttcac

SEQ ID NO: 1299731 - DNA, 15 bp, Homo sapiens
tgccttcaactttca

SEQ ID NO: 1299732 - DNA, 15 bp, Homo sapiens
ttgccttcaactttc

SEQ ID NO: 1299733 - DNA, 15 bp, Homo sapiens
tttgccttcaacttt

SEQ ID NO: 1299734 - DNA, 15 bp, Homo sapiens
atttgccttcaactt

SEQ ID NO: 1299735 - DNA, 15 bp, Homo sapiens
tatttgccttcaact

SEQ ID NO: 1299736 - DNA, 15 bp, Homo sapiens
ttatttgccttcaac

SEQ ID NO: 1299737 - DNA, 15 bp, Homo sapiens
gttatttgccttcaa

SEQ ID NO: 1299738 - DNA, 15 bp, Homo sapiens
ggttatttgccttca

SEQ ID NO: 1299739 - DNA, 15 bp, Homo sapiens
gggttatttgccttc

SEQ ID NO: 1299740 - DNA, 15 bp, Homo sapiens
agggttatttgcctt

SEQ ID NO: 1299741 - DNA, 15 bp, Homo sapiens
cagggttatttgcct

SEQ ID NO: 1299742 - DNA, 15 bp, Homo sapiens
ccagggttatttgcc

SEQ ID NO: 1299743 - DNA, 15 bp, Homo sapiens
accagggttatttgc

SEQ ID NO: 1299744 - DNA, 15 bp, Homo sapiens
taccagggttatttg

SEQ ID NO: 1299745 - DNA, 15 bp, Homo sapiens
ttaccagggttattt

SEQ ID NO: 1299746 - DNA, 15 bp, Homo sapiens
tttaccagggttatt

SEQ ID NO: 1299747 - DNA, 15 bp, Homo sapiens
ctttaccagggttat

SEQ ID NO: 1299748 - DNA, 15 bp, Homo sapiens
tctttaccagggtta

SEQ ID NO: 1299749 - DNA, 15 bp, Homo sapiens
ttctttaccagggtt

SEQ ID NO: 1299750 - DNA, 15 bp, Homo sapiens
cttctttaccagggt

SEQ ID NO: 1299751 - DNA, 15 bp, Homo sapiens
ccttctttaccaggg

SEQ ID NO: 1299752 - DNA, 15 bp, Homo sapiens
gccttctttaccagg

SEQ ID NO: 1299753 - DNA, 15 bp, Homo sapiens
tgccttctttaccag

SEQ ID NO: 1299754 - DNA, 15 bp, Homo sapiens
ctgccttctttacca

SEQ ID NO: 1299755 - DNA, 15 bp, Homo sapiens
cctgccttctttacc

SEQ ID NO: 1299756 - DNA, 15 bp, Homo sapiens
tcctgccttctttac

SEQ ID NO: 1299757 - DNA, 15 bp, Homo sapiens
ttcctgccttcttta

SEQ ID NO: 1299758 - DNA, 15 bp, Homo sapiens
tttcctgccttcttt

SEQ ID NO: 1299759 - DNA, 15 bp, Homo sapiens
gtttcctgccttctt

SEQ ID NO: 1299760 - DNA, 15 bp, Homo sapiens
tgtttcctgccttct

SEQ ID NO: 1299761 - DNA, 15 bp, Homo sapiens
gtgtttcctgccttc

SEQ ID NO: 1299762 - DNA, 15 bp, Homo sapiens
tgtgtttcctgcctt

SEQ ID NO: 1299763 - DNA, 15 bp, Homo sapiens
ttgtgtttcctgcct

SEQ ID NO: 1299764 - DNA, 15 bp, Homo sapiens
cttgtgtttcctgcc

SEQ ID NO: 1299765 - DNA, 15 bp, Homo sapiens
ccttgtgtttcctgc

SEQ ID NO: 1299766 - DNA, 15 bp, Homo sapiens
tccttgtgtttcctg

SEQ ID NO: 1299767 - DNA, 15 bp, Homo sapiens
ttccttgtgtttcct

SEQ ID NO: 1299768 - DNA, 15 bp, Homo sapiens
cttccttgtgtttcc

SEQ ID NO: 1299769 - DNA, 15 bp, Homo sapiens
gcttccttgtgtttc

SEQ ID NO: 1299770 - DNA, 15 bp, Homo sapiens
ggcttccttgtgttt

SEQ ID NO: 1299771 - DNA, 15 bp, Homo sapiens
tggcttccttgtgtt

SEQ ID NO: 1299772 - DNA, 15 bp, Homo sapiens
atggcttccttgtgt

SEQ ID NO: 1299773 - DNA, 15 bp, Homo sapiens
aatggcttccttgtg

SEQ ID NO: 1299774 - DNA, 15 bp, Homo sapiens
gaatggcttccttgt

SEQ ID NO: 1299775 - DNA, 15 bp, Homo sapiens
tgaatggcttccttg

SEQ ID NO: 1299776 - DNA, 15 bp, Homo sapiens
atgaatggcttcctt

SEQ ID NO: 1299777 - DNA, 15 bp, Homo sapiens
aatgaatggcttcct

SEQ ID NO: 1299778 - DNA, 15 bp, Homo sapiens
aaatgaatggcttcc

SEQ ID NO: 1299779 - DNA, 15 bp, Homo sapiens
taaatgaatggcttc

SEQ ID NO: 1299780 - DNA, 15 bp, Homo sapiens
ataaatgaatggctt

SEQ ID NO: 1299781 - DNA, 15 bp, Homo sapiens
aataaatgaatggct

SEQ ID NO: 1299782 - DNA, 15 bp, Homo sapiens
aaataaatgaatggc

SEQ ID NO: 1299783 - DNA, 15 bp, Homo sapiens
taaataaatgaatgg

SEQ ID NO: 1299784 - DNA, 15 bp, Homo sapiens
ataaataaatgaatg

SEQ ID NO: 1299785 - DNA, 15 bp, Homo sapiens
aataaataaatgaat

SEQ ID NO: 1299786 - DNA, 15 bp, Homo sapiens
ataataaataaatga

SEQ ID NO: 1299787 - DNA, 15 bp, Homo sapiens
aataataaataaatg

SEQ ID NO: 1299788 - DNA, 15 bp, Homo sapiens
gaataataaataaat

SEQ ID NO: 1299789 - DNA, 15 bp, Homo sapiens
tgaataataaataaa

SEQ ID NO: 1299790 - DNA, 15 bp, Homo sapiens
atgaataataaataa

SEQ ID NO: 1299791 - DNA, 15 bp, Homo sapiens
aatgaataataaata

SEQ ID NO: 1299792 - DNA, 15 bp, Homo sapiens
gaatgaataataaat

SEQ ID NO: 1299793 - DNA, 15 bp, Homo sapiens
tgaatgaataataaa

SEQ ID NO: 1299794 - DNA, 15 bp, Homo sapiens
ttgaatgaataataa

SEQ ID NO: 1299795 - DNA, 15 bp, Homo sapiens
attgaatgaataata

SEQ ID NO: 1299796 - DNA, 15 bp, Homo sapiens
gattgaatgaataat

SEQ ID NO: 1299797 - DNA, 15 bp, Homo sapiens
tgattgaatgaataa

SEQ ID NO: 1299798 - DNA, 15 bp, Homo sapiens
ttgattgaatgaata

SEQ ID NO: 1299799 - DNA, 15 bp, Homo sapiens
gttgattgaatgaat

SEQ ID NO: 1299800 - DNA, 15 bp, Homo sapiens
tgttgattgaatgaa

SEQ ID NO: 1299801 - DNA, 15 bp, Homo sapiens
ttgttgattgaatga

SEQ ID NO: 1299802 - DNA, 15 bp, Homo sapiens
tttgttgattgaatg

SEQ ID NO: 1299803 - DNA, 15 bp, Homo sapiens
atttgttgattgaat

SEQ ID NO: 1299804 - DNA, 15 bp, Homo sapiens
tatttgttgattgaa

SEQ ID NO: 1299805 - DNA, 15 bp, Homo sapiens
atatttgttgattga

SEQ ID NO: 1299806 - DNA, 15 bp, Homo sapiens
aatatttgttgattg

SEQ ID NO: 1299807 - DNA, 15 bp, Homo sapiens
aaatatttgttgatt

SEQ ID NO: 1299808 - DNA, 15 bp, Homo sapiens
gaaatatttgttgat

SEQ ID NO: 1299809 - DNA, 15 bp, Homo sapiens
agaaatatttgttga

SEQ ID NO: 1299810 - DNA, 15 bp, Homo sapiens
aagaaatatttgttg

SEQ ID NO: 1299811 - DNA, 15 bp, Homo sapiens
taagaaatatttgtt

SEQ ID NO: 1299812 - DNA, 15 bp, Homo sapiens
ttaagaaatatttgt

SEQ ID NO: 1299813 - DNA, 15 bp, Homo sapiens
tttaagaaatatttg

SEQ ID NO: 1299814 - DNA, 15 bp, Homo sapiens
atttaagaaatattt

SEQ ID NO: 1299815 - DNA, 15 bp, Homo sapiens
tatttaagaaatatt

SEQ ID NO: 1299816 - DNA, 15 bp, Homo sapiens
atatttaagaaatat

SEQ ID NO: 1299817 - DNA, 15 bp, Homo sapiens
aatatttaagaaata

SEQ ID NO: 1299818 - DNA, 15 bp, Homo sapiens
aaatatttaagaaat

SEQ ID NO: 1299819 - DNA, 15 bp, Homo sapiens
taaatatttaagaaa

SEQ ID NO: 1299820 - DNA, 15 bp, Homo sapiens
ataaatatttaagaa

SEQ ID NO: 1299821 - DNA, 15 bp, Homo sapiens
tataaatatttaaga

SEQ ID NO: 1299822 - DNA, 15 bp, Homo sapiens
gtataaatatttaag

SEQ ID NO: 1299823 - DNA, 15 bp, Homo sapiens
ggtataaatatttaa

SEQ ID NO: 1299824 - DNA, 15 bp, Homo sapiens
tggtataaatattta

SEQ ID NO: 1299825 - DNA, 15 bp, Homo sapiens
ttggtataaatattt

SEQ ID NO: 1299826 - DNA, 15 bp, Homo sapiens
gttggtataaatatt

SEQ ID NO: 1299827 - DNA, 15 bp, Homo sapiens
tgttggtataaatat

SEQ ID NO: 1299828 - DNA, 15 bp, Homo sapiens
ttgttggtataaata

SEQ ID NO: 1299829 - DNA, 15 bp, Homo sapiens
tttgttggtataaat

SEQ ID NO: 1299830 - DNA, 15 bp, Homo sapiens
ctttgttggtataaa

SEQ ID NO: 1299831 - DNA, 15 bp, Homo sapiens
gctttgttggtataa

SEQ ID NO: 1299832 - DNA, 15 bp, Homo sapiens
tgctttgttggtata

SEQ ID NO: 1299833 - DNA, 15 bp, Homo sapiens
atgctttgttggtat

SEQ ID NO: 1299834 - DNA, 15 bp, Homo sapiens
catgctttgttggta

SEQ ID NO: 1299835 - DNA, 15 bp, Homo sapiens
ccatgctttgttggt

SEQ ID NO: 1299836 - DNA, 15 bp, Homo sapiens
tccatgctttgttgg

SEQ ID NO: 1299837 - DNA, 15 bp, Homo sapiens
ttccatgctttgttg

SEQ ID NO: 1299838 - DNA, 15 bp, Homo sapiens
gttccatgctttgtt

SEQ ID NO: 1299839 - DNA, 15 bp, Homo sapiens
ggttccatgctttgt

SEQ ID NO: 1299840 - DNA, 15 bp, Homo sapiens
aggttccatgctttg

SEQ ID NO: 1299841 - DNA, 15 bp, Homo sapiens
gaggttccatgcttt

SEQ ID NO: 1299842 - DNA, 15 bp, Homo sapiens
agaggttccatgctt

SEQ ID NO: 1299843 - DNA, 15 bp, Homo sapiens
tagaggttccatgct

SEQ ID NO: 1299844 - DNA, 15 bp, Homo sapiens
ctagaggttccatgc

SEQ ID NO: 1299845 - DNA, 15 bp, Homo sapiens
gctagaggttccatg

SEQ ID NO: 1299846 - DNA, 15 bp, Homo sapiens
ggctagaggttccat

SEQ ID NO: 1299847 - DNA, 15 bp, Homo sapiens
tggctagaggttcca

SEQ ID NO: 1299848 - DNA, 15 bp, Homo sapiens
ttggctagaggttcc

SEQ ID NO: 1299849 - DNA, 15 bp, Homo sapiens
tttggctagaggttc

SEQ ID NO: 1299850 - DNA, 15 bp, Homo sapiens
gtttggctagaggtt

SEQ ID NO: 1299851 - DNA, 15 bp, Homo sapiens
agtttggctagaggt

SEQ ID NO: 1299852 - DNA, 15 bp, Homo sapiens
gagtttggctagagg

SEQ ID NO: 1299853 - DNA, 15 bp, Homo sapiens
agagtttggctagag

SEQ ID NO: 1299854 - DNA, 15 bp, Homo sapiens
gagagtttggctaga

SEQ ID NO: 1299855 - DNA, 15 bp, Homo sapiens
agagagtttggctag

SEQ ID NO: 1299856 - DNA, 15 bp, Homo sapiens
cagagagtttggcta

SEQ ID NO: 1299857 - DNA, 15 bp, Homo sapiens
ccagagagtttggct

SEQ ID NO: 1299858 - DNA, 15 bp, Homo sapiens
accagagagtttggc

SEQ ID NO: 1299859 - DNA, 15 bp, Homo sapiens
aaccagagagtttgg

SEQ ID NO: 1299860 - DNA, 15 bp, Homo sapiens
aaaccagagagtttg

SEQ ID NO: 1299861 - DNA, 15 bp, Homo sapiens
gaaaccagagagttt

SEQ ID NO: 1299862 - DNA, 15 bp, Homo sapiens
tgaaaccagagagtt

SEQ ID NO: 1299863 - DNA, 15 bp, Homo sapiens
ttgaaaccagagagt

SEQ ID NO: 1299864 - DNA, 15 bp, Homo sapiens
tttgaaaccagagag

SEQ ID NO: 1299865 - DNA, 15 bp, Homo sapiens
atttgaaaccagaga

SEQ ID NO: 1299866 - DNA, 15 bp, Homo sapiens
gatttgaaaccagag

SEQ ID NO: 1299867 - DNA, 15 bp, Homo sapiens
ggatttgaaaccaga

SEQ ID NO: 1299868 - DNA, 15 bp, Homo sapiens
aggatttgaaaccag

SEQ ID NO: 1299869 - DNA, 15 bp, Homo sapiens
caggatttgaaacca

SEQ ID NO: 1299870 - DNA, 15 bp, Homo sapiens
ccaggatttgaaacc

SEQ ID NO: 1299871 - DNA, 15 bp, Homo sapiens
gccaggatttgaaac

SEQ ID NO: 1299872 - DNA, 15 bp, Homo sapiens
agccaggatttgaaa

SEQ ID NO: 1299873 - DNA, 15 bp, Homo sapiens
cagccaggatttgaa

SEQ ID NO: 1299874 - DNA, 15 bp, Homo sapiens
acagccaggatttga

SEQ ID NO: 1299875 - DNA, 15 bp, Homo sapiens
aacagccaggatttg

SEQ ID NO: 1299876 - DNA, 15 bp, Homo sapiens
aaacagccaggattt

SEQ ID NO: 1299877 - DNA, 15 bp, Homo sapiens
aaaacagccaggatt

SEQ ID NO: 1299878 - DNA, 15 bp, Homo sapiens
taaaacagccaggat

SEQ ID NO: 1299879 - DNA, 15 bp, Homo sapiens
gtaaaacagccagga

SEQ ID NO: 1299880 - DNA, 15 bp, Homo sapiens
tgtaaaacagccagg

SEQ ID NO: 1299881 - DNA, 15 bp, Homo sapiens
ttgtaaaacagccag

SEQ ID NO: 1299882 - DNA, 15 bp, Homo sapiens
attgtaaaacagcca

SEQ ID NO: 1299883 - DNA, 15 bp, Homo sapiens
tattgtaaaacagcc

SEQ ID NO: 1299884 - DNA, 15 bp, Homo sapiens
atattgtaaaacagc

SEQ ID NO: 1299885 - DNA, 15 bp, Homo sapiens
gatattgtaaaacag

SEQ ID NO: 1299886 - DNA, 15 bp, Homo sapiens
agatattgtaaaaca

SEQ ID NO: 1299887 - DNA, 15 bp, Homo sapiens
cagatattgtaaaac

SEQ ID NO: 1299888 - DNA, 15 bp, Homo sapiens
acagatattgtaaaa

SEQ ID NO: 1299889 - DNA, 15 bp, Homo sapiens
tacagatattgtaaa

SEQ ID NO: 1299890 - DNA, 15 bp, Homo sapiens
atacagatattgtaa

SEQ ID NO: 1299891 - DNA, 15 bp, Homo sapiens
tatacagatattgta

SEQ ID NO: 1299892 - DNA, 15 bp, Homo sapiens
ttatacagatattgt

SEQ ID NO: 1299893 - DNA, 15 bp, Homo sapiens
gttatacagatattg

SEQ ID NO: 1299894 - DNA, 15 bp, Homo sapiens
ggttatacagatatt

SEQ ID NO: 1299895 - DNA, 15 bp, Homo sapiens
aggttatacagatat

SEQ ID NO: 1299896 - DNA, 15 bp, Homo sapiens
aaggttatacagata

SEQ ID NO: 1299897 - DNA, 15 bp, Homo sapiens
caaggttatacagat

SEQ ID NO: 1299898 - DNA, 15 bp, Homo sapiens
tcaaggttatacaga

SEQ ID NO: 1299899 - DNA, 15 bp, Homo sapiens
ctcaaggttatacag

SEQ ID NO: 1299900 - DNA, 15 bp, Homo sapiens
gctcaaggttataca

SEQ ID NO: 1299901 - DNA, 15 bp, Homo sapiens
tgctcaaggttatac

SEQ ID NO: 1299902 - DNA, 15 bp, Homo sapiens
ttgctcaaggttata

SEQ ID NO: 1299903 - DNA, 15 bp, Homo sapiens
cttgctcaaggttat

SEQ ID NO: 1299904 - DNA, 15 bp, Homo sapiens
acttgctcaaggtta

SEQ ID NO: 1299905 - DNA, 15 bp, Homo sapiens
aacttgctcaaggtt

SEQ ID NO: 1299906 - DNA, 15 bp, Homo sapiens
taacttgctcaaggt

SEQ ID NO: 1299907 - DNA, 15 bp, Homo sapiens
gtaacttgctcaagg

SEQ ID NO: 1299908 - DNA, 15 bp, Homo sapiens
agtaacttgctcaag

SEQ ID NO: 1299909 - DNA, 15 bp, Homo sapiens
aagtaacttgctcaa

SEQ ID NO: 1299910 - DNA, 15 bp, Homo sapiens
taagtaacttgctca

SEQ ID NO: 1299911 - DNA, 15 bp, Homo sapiens
ttaagtaacttgctc

SEQ ID NO: 1299912 - DNA, 15 bp, Homo sapiens
attaagtaacttgct

SEQ ID NO: 1299913 - DNA, 15 bp, Homo sapiens
aattaagtaacttgc

SEQ ID NO: 1299914 - DNA, 15 bp, Homo sapiens
taattaagtaacttg

SEQ ID NO: 1299915 - DNA, 15 bp, Homo sapiens
ataattaagtaactt

SEQ ID NO: 1299916 - DNA, 15 bp, Homo sapiens
aataattaagtaact

SEQ ID NO: 1299917 - DNA, 15 bp, Homo sapiens
gaataattaagtaac

SEQ ID NO: 1299918 - DNA, 15 bp, Homo sapiens
agaataattaagtaa

SEQ ID NO: 1299919 - DNA, 15 bp, Homo sapiens
gagaataattaagta

SEQ ID NO: 1299920 - DNA, 15 bp, Homo sapiens
agagaataattaagt

SEQ ID NO: 1299921 - DNA, 15 bp, Homo sapiens
cagagaataattaag

SEQ ID NO: 1299922 - DNA, 15 bp, Homo sapiens
acagagaataattaa

SEQ ID NO: 1299923 - DNA, 15 bp, Homo sapiens
cacagagaataatta

SEQ ID NO: 1299924 - DNA, 15 bp, Homo sapiens
gcacagagaataatt

SEQ ID NO: 1299925 - DNA, 15 bp, Homo sapiens
ggcacagagaataat

SEQ ID NO: 1299926 - DNA, 15 bp, Homo sapiens
aggcacagagaataa

SEQ ID NO: 1299927 - DNA, 15 bp, Homo sapiens
gaggcacagagaata

SEQ ID NO: 1299928 - DNA, 15 bp, Homo sapiens
ggaggcacagagaat

SEQ ID NO: 1299929 - DNA, 15 bp, Homo sapiens
tggaggcacagagaa

SEQ ID NO: 1299930 - DNA, 15 bp, Homo sapiens
atggaggcacagaga

SEQ ID NO: 1299931 - DNA, 15 bp, Homo sapiens
aatggaggcacagag

SEQ ID NO: 1299932 - DNA, 15 bp, Homo sapiens
agaaatggaggcaca

SEQ ID NO: 1299933 - DNA, 15 bp, Homo sapiens
aagaaatggaggcac

SEQ ID NO: 1299934 - DNA, 15 bp, Homo sapiens
gaagaaatggaggca

SEQ ID NO: 1299935 - DNA, 15 bp, Homo sapiens
tgaagaaatggaggc

SEQ ID NO: 1299936 - DNA, 15 bp, Homo sapiens
atgaagaaatggagg

SEQ ID NO: 1299937 - DNA, 15 bp, Homo sapiens
aatgaagaaatggag

SEQ ID NO: 1299938 - DNA, 15 bp, Homo sapiens
aaatgaagaaatgga

SEQ ID NO: 1299939 - DNA, 15 bp, Homo sapiens
caaatgaagaaatgg

SEQ ID NO: 1299940 - DNA, 15 bp, Homo sapiens
acaaatgaagaaatg

SEQ ID NO: 1299941 - DNA, 15 bp, Homo sapiens
tacaaatgaagaaat

SEQ ID NO: 1299942 - DNA, 15 bp, Homo sapiens
ttacaaatgaagaaa

SEQ ID NO: 1299943 - DNA, 15 bp, Homo sapiens
gttacaaatgaagaa

SEQ ID NO: 1299944 - DNA, 15 bp, Homo sapiens
tgttacaaatgaaga

SEQ ID NO: 1299945 - DNA, 15 bp, Homo sapiens
atgttacaaatgaag

SEQ ID NO: 1299946 - DNA, 15 bp, Homo sapiens
catgttacaaatgaa

SEQ ID NO: 1299947 - DNA, 15 bp, Homo sapiens
ccatgttacaaatga

SEQ ID NO: 1299948 - DNA, 15 bp, Homo sapiens
cccatgttacaaatg

SEQ ID NO: 1299949 - DNA, 15 bp, Homo sapiens
tcccatgttacaaat

SEQ ID NO: 1299950 - DNA, 15 bp, Homo sapiens
ttcccatgttacaaa

SEQ ID NO: 1299951 - DNA, 15 bp, Homo sapiens
attcccatgttacaa

SEQ ID NO: 1299952 - DNA, 15 bp, Homo sapiens
tattcccatgttaca

SEQ ID NO: 1299953 - DNA, 15 bp, Homo sapiens
ttattcccatgttac

SEQ ID NO: 1299954 - DNA, 15 bp, Homo sapiens
attattcccatgtta

SEQ ID NO: 1299955 - DNA, 15 bp, Homo sapiens
gattattcccatgtt

SEQ ID NO: 1299956 - DNA, 15 bp, Homo sapiens
tgattattcccatgt

SEQ ID NO: 1299957 - DNA, 15 bp, Homo sapiens
ttgattattcccatg

SEQ ID NO: 1299958 - DNA, 15 bp, Homo sapiens
tttgattattcccat

SEQ ID NO: 1299959 - DNA, 15 bp, Homo sapiens
ttttgattattccca

SEQ ID NO: 1299960 - DNA, 15 bp, Homo sapiens
tttttgattattccc

SEQ ID NO: 1299961 - DNA, 15 bp, Homo sapiens
ctttttgattattcc

SEQ ID NO: 1299962 - DNA, 15 bp, Homo sapiens
tctttttgattattc

SEQ ID NO: 1299963 - DNA, 15 bp, Homo sapiens
ttctttttgattatt

SEQ ID NO: 1299964 - DNA, 15 bp, Homo sapiens
attctttttgattat

SEQ ID NO: 1299965 - DNA, 15 bp, Homo sapiens
tattctttttgatta

SEQ ID NO: 1299966 - DNA, 15 bp, Homo sapiens
ttattctttttgatt

SEQ ID NO: 1299967 - DNA, 15 bp, Homo sapiens
tttattctttttgat

SEQ ID NO: 1299968 - DNA, 15 bp, Homo sapiens
atttattctttttga

SEQ ID NO: 1299969 - DNA, 15 bp, Homo sapiens
catttattctttttg

SEQ ID NO: 1299970 - DNA, 15 bp, Homo sapiens
tcatttattcttttt

SEQ ID NO: 1299971 - DNA, 15 bp, Homo sapiens
ttcatttattctttt

SEQ ID NO: 1299972 - DNA, 15 bp, Homo sapiens
cttcatttattcttt

SEQ ID NO: 1299973 - DNA, 15 bp, Homo sapiens
tcttcatttattctt

SEQ ID NO: 1299974 - DNA, 15 bp, Homo sapiens
atcttcatttattct

SEQ ID NO: 1299975 - DNA, 15 bp, Homo sapiens
aatcttcatttattc

SEQ ID NO: 1299976 - DNA, 15 bp, Homo sapiens
caatcttcatttatt

SEQ ID NO: 1299977 - DNA, 15 bp, Homo sapiens
acaatcttcatttat

SEQ ID NO: 1299978 - DNA, 15 bp, Homo sapiens
aacaatcttcattta

SEQ ID NO: 1299979 - DNA, 15 bp, Homo sapiens
taacaatcttcattt

SEQ ID NO: 1299980 - DNA, 15 bp, Homo sapiens
ataacaatcttcatt

SEQ ID NO: 1299981 - DNA, 15 bp, Homo sapiens
cataacaatcttcat

SEQ ID NO: 1299982 - DNA, 15 bp, Homo sapiens
tcataacaatcttca

SEQ ID NO: 1299983 - DNA, 15 bp, Homo sapiens
ttcataacaatcttc

SEQ ID NO: 1299984 - DNA, 15 bp, Homo sapiens
cttcataacaatctt

SEQ ID NO: 1299985 - DNA, 15 bp, Homo sapiens
tcttcataacaatct

SEQ ID NO: 1299986 - DNA, 15 bp, Homo sapiens
gtcttcataacaatc

SEQ ID NO: 1299987 - DNA, 15 bp, Homo sapiens
agtcttcataacaat

SEQ ID NO: 1299988 - DNA, 15 bp, Homo sapiens
tagtcttcataacaa

SEQ ID NO: 1299989 - DNA, 15 bp, Homo sapiens
ttagtcttcataaca

SEQ ID NO: 1299990 - DNA, 15 bp, Homo sapiens
gttagtcttcataac

SEQ ID NO: 1299991 - DNA, 15 bp, Homo sapiens
tgttagtcttcataa

SEQ ID NO: 1299992 - DNA, 15 bp, Homo sapiens
gtgttagtcttcata

SEQ ID NO: 1299993 - DNA, 15 bp, Homo sapiens
tgtgttagtcttcat

SEQ ID NO: 1299994 - DNA, 15 bp, Homo sapiens
atgtgttagtcttca

SEQ ID NO: 1299995 - DNA, 15 bp, Homo sapiens
catgtgttagtcttc

SEQ ID NO: 1299996 - DNA, 15 bp, Homo sapiens
tcatgtgttagtctt

SEQ ID NO: 1299997 - DNA, 15 bp, Homo sapiens
atcatgtgttagtct

SEQ ID NO: 1299998 - DNA, 15 bp, Homo sapiens
aatcatgtgttagtc

SEQ ID NO: 1299999 - DNA, 15 bp, Homo sapiens
caatcatgtgttagt

SEQ ID NO: 1300000 - DNA, 15 bp, Homo sapiens
acaatcatgtgttag

SEQ ID NO: 1300001 - DNA, 15 bp, Homo sapiens
aacaatcatgtgtta

SEQ ID NO: 1300002 - DNA, 15 bp, Homo sapiens
taacaatcatgtgtt

SEQ ID NO: 1300003 - DNA, 15 bp, Homo sapiens
ataacaatcatgtgt

SEQ ID NO: 1300004 - DNA, 15 bp, Homo sapiens
aataacaatcatgtg

SEQ ID NO: 1300005 - DNA, 15 bp, Homo sapiens
taataacaatcatgt

SEQ ID NO: 1300006 - DNA, 15 bp, Homo sapiens
ataataacaatcatg

SEQ ID NO: 1300007 - DNA, 15 bp, Homo sapiens
aataataacaatcat

SEQ ID NO: 1300008 - DNA, 15 bp, Homo sapiens
taataataacaatca

SEQ ID NO: 1300009 - DNA, 15 bp, Homo sapiens
ataataataacaatc

SEQ ID NO: 1300010 - DNA, 15 bp, Homo sapiens
gataataataacaat

SEQ ID NO: 1300011 - DNA, 15 bp, Homo sapiens
agataataataacaa

SEQ ID NO: 1300012 - DNA, 15 bp, Homo sapiens
aagataataataaca

SEQ ID NO: 1300013 - DNA, 15 bp, Homo sapiens
aaagataataataac

SEQ ID NO: 1300014 - DNA, 15 bp, Homo sapiens
aaaagataataataa

SEQ ID NO: 1300015 - DNA, 15 bp, Homo sapiens
aaaaagataataata

SEQ ID NO: 1300016 - DNA, 15 bp, Homo sapiens
caaaaagataataat

SEQ ID NO: 1300017 - DNA, 15 bp, Homo sapiens
acaaaaagataataa

SEQ ID NO: 1300018 - DNA, 15 bp, Homo sapiens
aacaaaaagataata

SEQ ID NO: 1300019 - DNA, 15 bp, Homo sapiens
gaacaaaaagataat

SEQ ID NO: 1300020 - DNA, 15 bp, Homo sapiens
tgaacaaaaagataa

SEQ ID NO: 1300021 - DNA, 15 bp, Homo sapiens
atgaacaaaaagata

SEQ ID NO: 1300022 - DNA, 15 bp, Homo sapiens
aatgaacaaaaagat

SEQ ID NO: 1300023 - DNA, 15 bp, Homo sapiens
aaatgaacaaaaaga

SEQ ID NO: 1300024 - DNA, 15 bp, Homo sapiens
taaatgaacaaaaag

SEQ ID NO: 1300025 - DNA, 15 bp, Homo sapiens
ataaatgaacaaaaa

SEQ ID NO: 1300026 - DNA, 15 bp, Homo sapiens
aataaatgaacaaaa

SEQ ID NO: 1300027 - DNA, 15 bp, Homo sapiens
ctaaataaatgaaca

SEQ ID NO: 1300028 - DNA, 15 bp, Homo sapiens
gctaaataaatgaac

SEQ ID NO: 1300029 - DNA, 15 bp, Homo sapiens
agctaaataaatgaa

SEQ ID NO: 1300030 - DNA, 15 bp, Homo sapiens
cagctaaataaatga

SEQ ID NO: 1300031 - DNA, 15 bp, Homo sapiens
acagctaaataaatg

SEQ ID NO: 1300032 - DNA, 15 bp, Homo sapiens
cacagctaaataaat

SEQ ID NO: 1300033 - DNA, 15 bp, Homo sapiens
acacagctaaataaa

SEQ ID NO: 1300034 - DNA, 15 bp, Homo sapiens
gacacagctaaataa

SEQ ID NO: 1300035 - DNA, 15 bp, Homo sapiens
ggacacagctaaata

SEQ ID NO: 1300036 - DNA, 15 bp, Homo sapiens
aggacacagctaaat

SEQ ID NO: 1300037 - DNA, 15 bp, Homo sapiens
aaggacacagctaaa

SEQ ID NO: 1300038 - DNA, 15 bp, Homo sapiens
taaggacacagctaa

SEQ ID NO: 1300039 - DNA, 15 bp, Homo sapiens
ctaaggacacagcta

SEQ ID NO: 1300040 - DNA, 15 bp, Homo sapiens
actaaggacacagct

SEQ ID NO: 1300041 - DNA, 15 bp, Homo sapiens
gactaaggacacagc

SEQ ID NO: 1300042 - DNA, 15 bp, Homo sapiens
agactaaggacacag

SEQ ID NO: 1300043 - DNA, 15 bp, Homo sapiens
cagactaaggacaca

SEQ ID NO: 1300044 - DNA, 15 bp, Homo sapiens
acagactaaggacac

SEQ ID NO: 1300045 - DNA, 15 bp, Homo sapiens
aacagactaaggaca

SEQ ID NO: 1300046 - DNA, 15 bp, Homo sapiens
caacagactaaggac

SEQ ID NO: 1300047 - DNA, 15 bp, Homo sapiens
gcaacagactaagga

SEQ ID NO: 1300048 - DNA, 15 bp, Homo sapiens
agcaacagactaagg

SEQ ID NO: 1300049 - DNA, 15 bp, Homo sapiens
aagcaacagactaag

SEQ ID NO: 1300050 - DNA, 15 bp, Homo sapiens
caagcaacagactaa

SEQ ID NO: 1300051 - DNA, 15 bp, Homo sapiens
tcaagcaacagacta

SEQ ID NO: 1300052 - DNA, 15 bp, Homo sapiens
atcaagcaacagact

SEQ ID NO: 1300053 - DNA, 15 bp, Homo sapiens
aatcaagcaacagac

SEQ ID NO: 1300054 - DNA, 15 bp, Homo sapiens
caatcaagcaacaga

SEQ ID NO: 1300055 - DNA, 15 bp, Homo sapiens
ccaatcaagcaacag

SEQ ID NO: 1300056 - DNA, 15 bp, Homo sapiens
accaatcaagcaaca

SEQ ID NO: 1300057 - DNA, 15 bp, Homo sapiens
caccaatcaagcaac

SEQ ID NO: 1300058 - DNA, 15 bp, Homo sapiens
acaccaatcaagcaa

SEQ ID NO: 1300059 - DNA, 15 bp, Homo sapiens
cacaccaatcaagca

SEQ ID NO: 1300060 - DNA, 15 bp, Homo sapiens
ccacaccaatcaagc

SEQ ID NO: 1300061 - DNA, 15 bp, Homo sapiens
accacaccaatcaag

SEQ ID NO: 1300062 - DNA, 15 bp, Homo sapiens
caccacaccaatcaa

SEQ ID NO: 1300063 - DNA, 15 bp, Homo sapiens
acaccacaccaatca

SEQ ID NO: 1300064 - DNA, 15 bp, Homo sapiens
aacaccacaccaatc

SEQ ID NO: 1300065 - DNA, 15 bp, Homo sapiens
caacaccacaccaat

SEQ ID NO: 1300066 - DNA, 15 bp, Homo sapiens
ccaacaccacaccaa

SEQ ID NO: 1300067 - DNA, 15 bp, Homo sapiens
cccaacaccacacca

SEQ ID NO: 1300068 - DNA, 15 bp, Homo sapiens
ccccaacaccacacc

SEQ ID NO: 1300069 - DNA, 15 bp, Homo sapiens
tccccaacaccacac

SEQ ID NO: 1300070 - DNA, 15 bp, Homo sapiens
atccccaacaccaca

SEQ ID NO: 1300071 - DNA, 15 bp, Homo sapiens
catccccaacaccac

SEQ ID NO: 1300072 - DNA, 15 bp, Homo sapiens
acatccccaacacca

SEQ ID NO: 1300073 - DNA, 15 bp, Homo sapiens
cacatccccaacacc

SEQ ID NO: 1300074 - DNA, 15 bp, Homo sapiens
ccacatccccaacac

SEQ ID NO: 1300075 - DNA, 15 bp, Homo sapiens
gccacatccccaaca

SEQ ID NO: 1300076 - DNA, 15 bp, Homo sapiens
ggccacatccccaac

SEQ ID NO: 1300077 - DNA, 15 bp, Homo sapiens
tggccacatccccaa

SEQ ID NO: 1300078 - DNA, 15 bp, Homo sapiens
ttggccacatcccca

SEQ ID NO: 1300079 - DNA, 15 bp, Homo sapiens
gttggccacatcccc

SEQ ID NO: 1300080 - DNA, 15 bp, Homo sapiens
cgttggccacatccc

SEQ ID NO: 1300081 - DNA, 15 bp, Homo sapiens
ccgttggccacatcc

SEQ ID NO: 1300082 - DNA, 15 bp, Homo sapiens
tccgttggccacatc

SEQ ID NO: 1300083 - DNA, 15 bp, Homo sapiens
ctccgttggccacat

SEQ ID NO: 1300084 - DNA, 15 bp, Homo sapiens
tctccgttggccaca

SEQ ID NO: 1300085 - DNA, 15 bp, Homo sapiens
gtctccgttggccac

SEQ ID NO: 1300086 - DNA, 15 bp, Homo sapiens
tgtctccgttggcca

SEQ ID NO: 1300087 - DNA, 15 bp, Homo sapiens
ctgtctccgttggcc

SEQ ID NO: 1300088 - DNA, 15 bp, Homo sapiens
cctgtctccgttggc

SEQ ID NO: 1300089 - DNA, 15 bp, Homo sapiens
tcctgtctccgttgg

SEQ ID NO: 1300090 - DNA, 15 bp, Homo sapiens
ttcctgtctccgttg

SEQ ID NO: 1300091 - DNA, 15 bp, Homo sapiens
tttcctgtctccgtt

SEQ ID NO: 1300092 - DNA, 15 bp, Homo sapiens
ctttcctgtctccgt

SEQ ID NO: 1300093 - DNA, 15 bp, Homo sapiens
cctttcctgtctccg

SEQ ID NO: 1300094 - DNA, 15 bp, Homo sapiens
acctttcctgtctcc

SEQ ID NO: 1300095 - DNA, 15 bp, Homo sapiens
gacctttcctgtctc

SEQ ID NO: 1300096 - DNA, 15 bp, Homo sapiens
agacctttcctgtct

SEQ ID NO: 1300097 - DNA, 15 bp, Homo sapiens
gagacctttcctgtc

SEQ ID NO: 1300098 - DNA, 15 bp, Homo sapiens
ggagacctttcctgt

SEQ ID NO: 1300099 - DNA, 15 bp, Homo sapiens
cggagacctttcctg

SEQ ID NO: 1300100 - DNA, 15 bp, Homo sapiens
acggagacctttcct

SEQ ID NO: 1300101 - DNA, 15 bp, Homo sapiens
gacggagacctttcc

SEQ ID NO: 1300102 - DNA, 15 bp, Homo sapiens
agacggagacctttc

SEQ ID NO: 1300103 - DNA, 15 bp, Homo sapiens
aagacggagaccttt

SEQ ID NO: 1300104 - DNA, 15 bp, Homo sapiens
aaagacggagacctt

SEQ ID NO: 1300105 - DNA, 15 bp, Homo sapiens
taaagacggagacct

SEQ ID NO: 1300106 - DNA, 15 bp, Homo sapiens
gtaaagacggagacc

SEQ ID NO: 1300107 - DNA, 15 bp, Homo sapiens
ggtaaagacggagac

SEQ ID NO: 1300108 - DNA, 15 bp, Homo sapiens
gggtaaagacggaga

SEQ ID NO: 1300109 - DNA, 15 bp, Homo sapiens
tgggtaaagacggag

SEQ ID NO: 1300110 - DNA, 15 bp, Homo sapiens
gtgggtaaagacgga

SEQ ID NO: 1300111 - DNA, 15 bp, Homo sapiens
ggtgggtaaagacgg

SEQ ID NO: 1300112 - DNA, 15 bp, Homo sapiens
aggtgggtaaagacg

SEQ ID NO: 1300113 - DNA, 15 bp, Homo sapiens
aaggtgggtaaagac

SEQ ID NO: 1300114 - DNA, 15 bp, Homo sapiens
taaggtgggtaaaga

SEQ ID NO: 1300115 - DNA, 15 bp, Homo sapiens
ataaggtgggtaaag

SEQ ID NO: 1300116 - DNA, 15 bp, Homo sapiens
tataaggtgggtaaa

SEQ ID NO: 1300117 - DNA, 15 bp, Homo sapiens
atataaggtgggtaa

SEQ ID NO: 1300118 - DNA, 15 bp, Homo sapiens
aatataaggtgggta

SEQ ID NO: 1300119 - DNA, 15 bp, Homo sapiens
taatataaggtgggt

SEQ ID NO: 1300120 - DNA, 15 bp, Homo sapiens
gtaatataaggtggg

SEQ ID NO: 1300121 - DNA, 15 bp, Homo sapiens
tgtaatataaggtgg

SEQ ID NO: 1300122 - DNA, 15 bp, Homo sapiens
ttgtaatataaggtg

SEQ ID NO: 1300123 - DNA, 15 bp, Homo sapiens
attgtaatataaggt

SEQ ID NO: 1300124 - DNA, 15 bp, Homo sapiens
tattgtaatataagg

SEQ ID NO: 1300125 - DNA, 15 bp, Homo sapiens
ctattgtaatataag

SEQ ID NO: 1300126 - DNA, 15 bp, Homo sapiens
tctattgtaatataa

SEQ ID NO: 1300127 - DNA, 15 bp, Homo sapiens
ttctattgtaatata

SEQ ID NO: 1300128 - DNA, 15 bp, Homo sapiens
cttctattgtaatat

SEQ ID NO: 1300129 - DNA, 15 bp, Homo sapiens
tcttctattgtaata

SEQ ID NO: 1300130 - DNA, 15 bp, Homo sapiens
ctcttctattgtaat

SEQ ID NO: 1300131 - DNA, 15 bp, Homo sapiens
actcttctattgtaa

SEQ ID NO: 1300132 - DNA, 15 bp, Homo sapiens
gactcttctattgta

SEQ ID NO: 1300133 - DNA, 15 bp, Homo sapiens
tgactcttctattgt

SEQ ID NO: 1300134 - DNA, 15 bp, Homo sapiens
ctgactcttctattg

SEQ ID NO: 1300135 - DNA, 15 bp, Homo sapiens
tctgactcttctatt

SEQ ID NO: 1300136 - DNA, 15 bp, Homo sapiens
atctgactcttctat

SEQ ID NO: 1300137 - DNA, 15 bp, Homo sapiens
aatctgactcttcta

SEQ ID NO: 1300138 - DNA, 15 bp, Homo sapiens
taatctgactcttct

SEQ ID NO: 1300139 - DNA, 15 bp, Homo sapiens
ataatctgactcttc

SEQ ID NO: 1300140 - DNA, 15 bp, Homo sapiens
tataatctgactctt

SEQ ID NO: 1300141 - DNA, 15 bp, Homo sapiens
ttataatctgactct

SEQ ID NO: 1300142 - DNA, 15 bp, Homo sapiens
tttataatctgactc

SEQ ID NO: 1300143 - DNA, 15 bp, Homo sapiens
ttttataatctgact

SEQ ID NO: 1300144 - DNA, 15 bp, Homo sapiens
tttttataatctgac

SEQ ID NO: 1300145 - DNA, 15 bp, Homo sapiens
ttttttataatctga

SEQ ID NO: 1300146 - DNA, 15 bp, Homo sapiens
tttttttataatctg

SEQ ID NO: 1300147 - DNA, 15 bp, Homo sapiens
atttttttataatct

SEQ ID NO: 1300148 - DNA, 15 bp, Homo sapiens
tatttttttataatc

SEQ ID NO: 1300149 - DNA, 15 bp, Homo sapiens
ttatttttttataat

SEQ ID NO: 1300150 - DNA, 15 bp, Homo sapiens
attatttttttataa

SEQ ID NO: 1300151 - DNA, 15 bp, Homo sapiens
tattatttttttata

SEQ ID NO: 1300152 - DNA, 15 bp, Homo sapiens
ttattatttttttat

SEQ ID NO: 1300153 - DNA, 15 bp, Homo sapiens
tttattattttttta

SEQ ID NO: 1300154 - DNA, 15 bp, Homo sapiens
atttattattttttt

SEQ ID NO: 1300155 - DNA, 15 bp, Homo sapiens
gatttattatttttt

SEQ ID NO: 1300156 - DNA, 15 bp, Homo sapiens
tgatttattattttt

SEQ ID NO: 1300157 - DNA, 15 bp, Homo sapiens
ttgatttattatttt

SEQ ID NO: 1300158 - DNA, 15 bp, Homo sapiens
attgatttattattt

SEQ ID NO: 1300159 - DNA, 15 bp, Homo sapiens
tattgatttattatt

SEQ ID NO: 1300160 - DNA, 15 bp, Homo sapiens
ttattgatttattat

SEQ ID NO: 1300161 - DNA, 15 bp, Homo sapiens
tttattgatttatta

SEQ ID NO: 1300162 - DNA, 15 bp, Homo sapiens
atttattgatttatt

SEQ ID NO: 1300163 - DNA, 15 bp, Homo sapiens
tatttattgatttat

SEQ ID NO: 1300164 - DNA, 15 bp, Homo sapiens
ttatttattgattta

SEQ ID NO: 1300165 - DNA, 15 bp, Homo sapiens
attatttattgattt

SEQ ID NO: 1300166 - DNA, 15 bp, Homo sapiens
tattatttattgatt

SEQ ID NO: 1300167 - DNA, 15 bp, Homo sapiens
gtattatttattgat

SEQ ID NO: 1300168 - DNA, 15 bp, Homo sapiens
agtattatttattga

SEQ ID NO: 1300169 - DNA, 15 bp, Homo sapiens
aagtattatttattg

SEQ ID NO: 1300170 - DNA, 15 bp, Homo sapiens
aaagtattatttatt

SEQ ID NO: 1300171 - DNA, 15 bp, Homo sapiens
taaagtattatttat

SEQ ID NO: 1300172 - DNA, 15 bp, Homo sapiens
ttaaagtattattta

SEQ ID NO: 1300173 - DNA, 15 bp, Homo sapiens
cttaaagtattattt

SEQ ID NO: 1300174 - DNA, 15 bp, Homo sapiens
ccttaaagtattatt

SEQ ID NO: 1300175 - DNA, 15 bp, Homo sapiens
accttaaagtattat

SEQ ID NO: 1300176 - DNA, 15 bp, Homo sapiens
taccttaaagtatta

SEQ ID NO: 1300177 - DNA, 15 bp, Homo sapiens
ctaccttaaagtatt

SEQ ID NO: 1300178 - DNA, 15 bp, Homo sapiens
actaccttaaagtat

SEQ ID NO: 1300179 - DNA, 15 bp, Homo sapiens
cactaccttaaagta

SEQ ID NO: 1300180 - DNA, 15 bp, Homo sapiens
tcactaccttaaagt

SEQ ID NO: 1300181 - DNA, 15 bp, Homo sapiens
atcactaccttaaag

SEQ ID NO: 1300182 - DNA, 15 bp, Homo sapiens
catcactaccttaaa

SEQ ID NO: 1300183 - DNA, 15 bp, Homo sapiens
tcatcactaccttaa

SEQ ID NO: 1300184 - DNA, 15 bp, Homo sapiens
ctcatcactacctta

SEQ ID NO: 1300185 - DNA, 15 bp, Homo sapiens
actcatcactacctt

SEQ ID NO: 1300186 - DNA, 15 bp, Homo sapiens
cactcatcactacct

SEQ ID NO: 1300187 - DNA, 15 bp, Homo sapiens
tcactcatcactacc

SEQ ID NO: 1300188 - DNA, 15 bp, Homo sapiens
atcactcatcactac

SEQ ID NO: 1300189 - DNA, 15 bp, Homo sapiens
catcactcatcacta

SEQ ID NO: 1300190 - DNA, 15 bp, Homo sapiens
gcatcactcatcact

SEQ ID NO: 1300191 - DNA, 15 bp, Homo sapiens
tgcatcactcatcac

SEQ ID NO: 1300192 - DNA, 15 bp, Homo sapiens
ctgcatcactcatca

SEQ ID NO: 1300193 - DNA, 15 bp, Homo sapiens
cctgcatcactcatc

SEQ ID NO: 1300194 - DNA, 15 bp, Homo sapiens
tcctgcatcactcat

SEQ ID NO: 1300195 - DNA, 15 bp, Homo sapiens
ttcctgcatcactca

SEQ ID NO: 1300196 - DNA, 15 bp, Homo sapiens
tttcctgcatcactc

SEQ ID NO: 1300197 - DNA, 15 bp, Homo sapiens
gtttcctgcatcact

SEQ ID NO: 1300198 - DNA, 15 bp, Homo sapiens
tgtttcctgcatcac

SEQ ID NO: 1300199 - DNA, 15 bp, Homo sapiens
ttgtttcctgcatca

SEQ ID NO: 1300200 - DNA, 15 bp, Homo sapiens
cttgtttcctgcatc

SEQ ID NO: 1300201 - DNA, 15 bp, Homo sapiens
tcttgtttcctgcat

SEQ ID NO: 1300202 - DNA, 15 bp, Homo sapiens
ctcttgtttcctgca

SEQ ID NO: 1300203 - DNA, 15 bp, Homo sapiens
tctcttgtttcctgc

SEQ ID NO: 1300204 - DNA, 15 bp, Homo sapiens
ttctcttgtttcctg

SEQ ID NO: 1300205 - DNA, 15 bp, Homo sapiens
cttctcttgtttcct

SEQ ID NO: 1300206 - DNA, 15 bp, Homo sapiens
tcttctcttgtttcc

SEQ ID NO: 1300207 - DNA, 15 bp, Homo sapiens
atcttctcttgtttc

SEQ ID NO: 1300208 - DNA, 15 bp, Homo sapiens
catcttctcttgttt

SEQ ID NO: 1300209 - DNA, 15 bp, Homo sapiens
tcatcttctcttgtt

SEQ ID NO: 1300210 - DNA, 15 bp, Homo sapiens
atcatcttctcttgt

SEQ ID NO: 1300211 - DNA, 15 bp, Homo sapiens
aatcatcttctcttg

SEQ ID NO: 1300212 - DNA, 15 bp, Homo sapiens
caatcatcttctctt

SEQ ID NO: 1300213 - DNA, 15 bp, Homo sapiens
acaatcatcttctct

SEQ ID NO: 1300214 - DNA, 15 bp, Homo sapiens
cacaatcatcttctc

SEQ ID NO: 1300215 - DNA, 15 bp, Homo sapiens
ccacaatcatcttct

SEQ ID NO: 1300216 - DNA, 15 bp, Homo sapiens
tccacaatcatcttc

SEQ ID NO: 1300217 - DNA, 15 bp, Homo sapiens
ctccacaatcatctt

SEQ ID NO: 1300218 - DNA, 15 bp, Homo sapiens
actccacaatcatct

SEQ ID NO: 1300219 - DNA, 15 bp, Homo sapiens
cactccacaatcatc

SEQ ID NO: 1300220 - DNA, 15 bp, Homo sapiens
tcactccacaatcat

SEQ ID NO: 1300221 - DNA, 15 bp, Homo sapiens
ctcactccacaatca

SEQ ID NO: 1300222 - DNA, 15 bp, Homo sapiens
actcactccacaatc

SEQ ID NO: 1300223 - DNA, 15 bp, Homo sapiens
cactcactccacaat

SEQ ID NO: 1300224 - DNA, 15 bp, Homo sapiens
tcactcactccacaa

SEQ ID NO: 1300225 - DNA, 15 bp, Homo sapiens
atcactcactccaca

SEQ ID NO: 1300226 - DNA, 15 bp, Homo sapiens
aatcactcactccac

SEQ ID NO: 1300227 - DNA, 15 bp, Homo sapiens
taatcactcactcca

SEQ ID NO: 1300228 - DNA, 15 bp, Homo sapiens
gtaatcactcactcc

SEQ ID NO: 1300229 - DNA, 15 bp, Homo sapiens
agtaatcactcactc

SEQ ID NO: 1300230 - DNA, 15 bp, Homo sapiens
tagtaatcactcact

SEQ ID NO: 1300231 - DNA, 15 bp, Homo sapiens
gtagtaatcactcac

SEQ ID NO: 1300232 - DNA, 15 bp, Homo sapiens
cgtagtaatcactca

SEQ ID NO: 1300233 - DNA, 15 bp, Homo sapiens
ccgtagtaatcactc

SEQ ID NO: 1300234 - DNA, 15 bp, Homo sapiens
cccgtagtaatcact

SEQ ID NO: 1300235 - DNA, 15 bp, Homo sapiens
acccgtagtaatcac

SEQ ID NO: 1300236 - DNA, 15 bp, Homo sapiens
cacccgtagtaatca

SEQ ID NO: 1300237 - DNA, 15 bp, Homo sapiens
tcacccgtagtaatc

SEQ ID NO: 1300238 - DNA, 15 bp, Homo sapiens
ctcacccgtagtaat

SEQ ID NO: 1300239 - DNA, 15 bp, Homo sapiens
cctcacccgtagtaa

SEQ ID NO: 1300240 - DNA, 15 bp, Homo sapiens
acctcacccgtagta

SEQ ID NO: 1300241 - DNA, 15 bp, Homo sapiens
gacctcacccgtagt

SEQ ID NO: 1300242 - DNA, 15 bp, Homo sapiens
ggacctcacccgtag

SEQ ID NO: 1300243 - DNA, 15 bp, Homo sapiens
tggacctcacccgta

SEQ ID NO: 1300244 - DNA, 15 bp, Homo sapiens
ttggacctcacccgt

SEQ ID NO: 1300245 - DNA, 15 bp, Homo sapiens
attggacctcacccg

SEQ ID NO: 1300246 - DNA, 15 bp, Homo sapiens
cattggacctcaccc

SEQ ID NO: 1300247 - DNA, 15 bp, Homo sapiens
tcattggacctcacc

SEQ ID NO: 1300248 - DNA, 15 bp, Homo sapiens
atcattggacctcac

SEQ ID NO: 1300249 - DNA, 15 bp, Homo sapiens
tatcattggacctca

SEQ ID NO: 1300250 - DNA, 15 bp, Homo sapiens
ctatcattggacctc

SEQ ID NO: 1300251 - DNA, 15 bp, Homo sapiens
tctatcattggacct

SEQ ID NO: 1300252 - DNA, 15 bp, Homo sapiens
ctctatcattggacc

SEQ ID NO: 1300253 - DNA, 15 bp, Homo sapiens
tctctatcattggac

SEQ ID NO: 1300254 - DNA, 15 bp, Homo sapiens
ctctctatcattgga

SEQ ID NO: 1300255 - DNA, 15 bp, Homo sapiens
cctctctatcattgg

SEQ ID NO: 1300256 - DNA, 15 bp, Homo sapiens
tcctctctatcattg

SEQ ID NO: 1300257 - DNA, 15 bp, Homo sapiens
gtcctctctatcatt

SEQ ID NO: 1300258 - DNA, 15 bp, Homo sapiens
agtcctctctatcat

SEQ ID NO: 1300259 - DNA, 15 bp, Homo sapiens
tagtcctctctatca

SEQ ID NO: 1300260 - DNA, 15 bp, Homo sapiens
ctagtcctctctatc

SEQ ID NO: 1300261 - DNA, 15 bp, Homo sapiens
actagtcctctctat

SEQ ID NO: 1300262 - DNA, 15 bp, Homo sapiens
cactagtcctctcta

SEQ ID NO: 1300263 - DNA, 15 bp, Homo sapiens
tcactagtcctctct

SEQ ID NO: 1300264 - DNA, 15 bp, Homo sapiens
ttcactagtcctctc

SEQ ID NO: 1300265 - DNA, 15 bp, Homo sapiens
cttcactagtcctct

SEQ ID NO: 1300266 - DNA, 15 bp, Homo sapiens
tcttcactagtcctc

SEQ ID NO: 1300267 - DNA, 15 bp, Homo sapiens
ctcttcactagtcct

SEQ ID NO: 1300268 - DNA, 15 bp, Homo sapiens
cctcttcactagtcc

SEQ ID NO: 1300269 - DNA, 15 bp, Homo sapiens
ccctcttcactagtc

SEQ ID NO: 1300270 - DNA, 15 bp, Homo sapiens
tccctcttcactagt

SEQ ID NO: 1300271 - DNA, 15 bp, Homo sapiens
ttccctcttcactag

SEQ ID NO: 1300272 - DNA, 15 bp, Homo sapiens
cttccctcttcacta

SEQ ID NO: 1300273 - DNA, 15 bp, Homo sapiens
tcttccctcttcact

SEQ ID NO: 1300274 - DNA, 15 bp, Homo sapiens
gtcttccctcttcac

SEQ ID NO: 1300275 - DNA, 15 bp, Homo sapiens
tgtcttccctcttca

SEQ ID NO: 1300276 - DNA, 15 bp, Homo sapiens
ctgtcttccctcttc

SEQ ID NO: 1300277 - DNA, 15 bp, Homo sapiens
actgtcttccctctt

SEQ ID NO: 1300278 - DNA, 15 bp, Homo sapiens
gactgtcttccctct

SEQ ID NO: 1300279 - DNA, 15 bp, Homo sapiens
tgactgtcttccctc

SEQ ID NO: 1300280 - DNA, 15 bp, Homo sapiens
ctgactgtcttccct

SEQ ID NO: 1300281 - DNA, 15 bp, Homo sapiens
actgactgtcttccc

SEQ ID NO: 1300282 - DNA, 15 bp, Homo sapiens
gactgactgtcttcc

SEQ ID NO: 1300283 - DNA, 15 bp, Homo sapiens
agactgactgtcttc

SEQ ID NO: 1300284 - DNA, 15 bp, Homo sapiens
tagactgactgtctt

SEQ ID NO: 1300285 - DNA, 15 bp, Homo sapiens
gtagactgactgtct

SEQ ID NO: 1300286 - DNA, 15 bp, Homo sapiens
tgtagactgactgtc

SEQ ID NO: 1300287 - DNA, 15 bp, Homo sapiens
gtgtagactgactgt

SEQ ID NO: 1300288 - DNA, 15 bp, Homo sapiens
tgtgtagactgactg

SEQ ID NO: 1300289 - DNA, 15 bp, Homo sapiens
ttgtgtagactgact

SEQ ID NO: 1300290 - DNA, 15 bp, Homo sapiens
tttgtgtagactgac

SEQ ID NO: 1300291 - DNA, 15 bp, Homo sapiens
ctttgtgtagactga

SEQ ID NO: 1300292 - DNA, 15 bp, Homo sapiens
tctttgtgtagactg

SEQ ID NO: 1300293 - DNA, 15 bp, Homo sapiens
atctttgtgtagact

SEQ ID NO: 1300294 - DNA, 15 bp, Homo sapiens
gatctttgtgtagac

SEQ ID NO: 1300295 - DNA, 15 bp, Homo sapiens
tgatctttgtgtaga

SEQ ID NO: 1300296 - DNA, 15 bp, Homo sapiens
atgatctttgtgtag

SEQ ID NO: 1300297 - DNA, 15 bp, Homo sapiens
gatgatctttgtgta

SEQ ID NO: 1300298 - DNA, 15 bp, Homo sapiens
ggatgatctttgtgt

SEQ ID NO: 1300299 - DNA, 15 bp, Homo sapiens
aggatgatctttgtg

SEQ ID NO: 1300300 - DNA, 15 bp, Homo sapiens
caggatgatctttgt

SEQ ID NO: 1300301 - DNA, 15 bp, Homo sapiens
acaggatgatctttg

SEQ ID NO: 1300302 - DNA, 15 bp, Homo sapiens
aacaggatgatcttt

SEQ ID NO: 1300303 - DNA, 15 bp, Homo sapiens
caacaggatgatctt

SEQ ID NO: 1300304 - DNA, 15 bp, Homo sapiens
tcaacaggatgatct

SEQ ID NO: 1300305 - DNA, 15 bp, Homo sapiens
ttcaacaggatgatc

SEQ ID NO: 1300306 - DNA, 15 bp, Homo sapiens
tttcaacaggatgat

SEQ ID NO: 1300307 - DNA, 15 bp, Homo sapiens
ttttcaacaggatga

SEQ ID NO: 1300308 - DNA, 15 bp, Homo sapiens
tttttcaacaggatg

SEQ ID NO: 1300309 - DNA, 15 bp, Homo sapiens
atttttcaacaggat

SEQ ID NO: 1300310 - DNA, 15 bp, Homo sapiens
tatttttcaacagga

SEQ ID NO: 1300311 - DNA, 15 bp, Homo sapiens
atatttttcaacagg

SEQ ID NO: 1300312 - DNA, 15 bp, Homo sapiens
catatttttcaacag

SEQ ID NO: 1300313 - DNA, 15 bp, Homo sapiens
tcatatttttcaaca

SEQ ID NO: 1300314 - DNA, 15 bp, Homo sapiens
ttcatatttttcaac

SEQ ID NO: 1300315 - DNA, 15 bp, Homo sapiens
tttcatatttttcaa

SEQ ID NO: 1300316 - DNA, 15 bp, Homo sapiens
atttcatatttttca

SEQ ID NO: 1300317 - DNA, 15 bp, Homo sapiens
tatttcatatttttc

SEQ ID NO: 1300318 - DNA, 15 bp, Homo sapiens
atatttcatattttt

SEQ ID NO: 1300319 - DNA, 15 bp, Homo sapiens
catatttcatatttt

SEQ ID NO: 1300320 - DNA, 15 bp, Homo sapiens
gcatatttcatattt

SEQ ID NO: 1300321 - DNA, 15 bp, Homo sapiens
tgcatatttcatatt

SEQ ID NO: 1300322 - DNA, 15 bp, Homo sapiens
ttgcatatttcatat

SEQ ID NO: 1300323 - DNA, 15 bp, Homo sapiens
cttgcatatttcata

SEQ ID NO: 1300324 - DNA, 15 bp, Homo sapiens
acttgcatatttcat

SEQ ID NO: 1300325 - DNA, 15 bp, Homo sapiens
gacttgcatatttca

SEQ ID NO: 1300326 - DNA, 15 bp, Homo sapiens
agacttgcatatttc

SEQ ID NO: 1300327 - DNA, 15 bp, Homo sapiens
aaagacttgcatatt

SEQ ID NO: 1300328 - DNA, 15 bp, Homo sapiens
caaagacttgcatat

SEQ ID NO: 1300329 - DNA, 15 bp, Homo sapiens
ccaaagacttgcata

SEQ ID NO: 1300330 - DNA, 15 bp, Homo sapiens
tccaaagacttgcat

SEQ ID NO: 1300331 - DNA, 15 bp, Homo sapiens
ttccaaagacttgca

SEQ ID NO: 1300332 - DNA, 15 bp, Homo sapiens
attccaaagacttgc

SEQ ID NO: 1300333 - DNA, 15 bp, Homo sapiens
aattccaaagacttg

SEQ ID NO: 1300334 - DNA, 15 bp, Homo sapiens
aaattccaaagactt

SEQ ID NO: 1300335 - DNA, 15 bp, Homo sapiens
taaattccaaagact

SEQ ID NO: 1300336 - DNA, 15 bp, Homo sapiens
gtaaattccaaagac

SEQ ID NO: 1300337 - DNA, 15 bp, Homo sapiens
ggtaaattccaaaga

SEQ ID NO: 1300338 - DNA, 15 bp, Homo sapiens
gggtaaattccaaag

SEQ ID NO: 1300339 - DNA, 15 bp, Homo sapiens
tgggtaaattccaaa

SEQ ID NO: 1300340 - DNA, 15 bp, Homo sapiens
ttgggtaaattccaa

SEQ ID NO: 1300341 - DNA, 15 bp, Homo sapiens
tttgggtaaattcca

SEQ ID NO: 1300342 - DNA, 15 bp, Homo sapiens
ttttgggtaaattcc

SEQ ID NO: 1300343 - DNA, 15 bp, Homo sapiens
tttttgggtaaattc

SEQ ID NO: 1300344 - DNA, 15 bp, Homo sapiens
ttttttgggtaaatt

SEQ ID NO: 1300345 - DNA, 15 bp, Homo sapiens
tttttttgggtaaat

SEQ ID NO: 1300346 - DNA, 15 bp, Homo sapiens
ttttttttgggtaaa

SEQ ID NO: 1300347 - DNA, 15 bp, Homo sapiens
tttttttttgggtaa

SEQ ID NO: 1300348 - DNA, 15 bp, Homo sapiens
ttttttttttgggta

SEQ ID NO: 1300349 - DNA, 15 bp, Homo sapiens
tttttttttttgggt

SEQ ID NO: 1300350 - DNA, 15 bp, Homo sapiens
atttttttttttggg

SEQ ID NO: 1300351 - DNA, 15 bp, Homo sapiens
tatttttttttttgg

SEQ ID NO: 1300352 - DNA, 15 bp, Homo sapiens
ctatttttttttttg

SEQ ID NO: 1300353 - DNA, 15 bp, Homo sapiens
ctctatttttttttt

SEQ ID NO: 1300354 - DNA, 15 bp, Homo sapiens
tctctattttttttt

SEQ ID NO: 1300355 - DNA, 15 bp, Homo sapiens
ttctctatttttttt

SEQ ID NO: 1300356 - DNA, 15 bp, Homo sapiens
tttctctattttttt

SEQ ID NO: 1300357 - DNA, 15 bp, Homo sapiens
ctttctctatttttt

SEQ ID NO: 1300358 - DNA, 15 bp, Homo sapiens
gctttctctattttt

SEQ ID NO: 1300359 - DNA, 15 bp, Homo sapiens
tgctttctctatttt

SEQ ID NO: 1300360 - DNA, 15 bp, Homo sapiens
atgctttctctattt

SEQ ID NO: 1300361 - DNA, 15 bp, Homo sapiens
aatgctttctctatt

SEQ ID NO: 1300362 - DNA, 15 bp, Homo sapiens
aaatgctttctctat

SEQ ID NO: 1300363 - DNA, 15 bp, Homo sapiens
gaaatgctttctcta

SEQ ID NO: 1300364 - DNA, 15 bp, Homo sapiens
agaaatgctttctct

SEQ ID NO: 1300365 - DNA, 15 bp, Homo sapiens
aagaaatgctttctc

SEQ ID NO: 1300366 - DNA, 15 bp, Homo sapiens
caagaaatgctttct

SEQ ID NO: 1300367 - DNA, 15 bp, Homo sapiens
tcaagaaatgctttc

SEQ ID NO: 1300368 - DNA, 15 bp, Homo sapiens
ctcaagaaatgcttt

SEQ ID NO: 1300369 - DNA, 15 bp, Homo sapiens
actcaagaaatgctt

SEQ ID NO: 1300370 - DNA, 15 bp, Homo sapiens
aactcaagaaatgct

SEQ ID NO: 1300371 - DNA, 15 bp, Homo sapiens
aaactcaagaaatgc

SEQ ID NO: 1300372 - DNA, 15 bp, Homo sapiens
gaaactcaagaaatg

SEQ ID NO: 1300373 - DNA, 15 bp, Homo sapiens
ggaaactcaagaaat

SEQ ID NO: 1300374 - DNA, 15 bp, Homo sapiens
tggaaactcaagaaa

SEQ ID NO: 1300375 - DNA, 15 bp, Homo sapiens
ttggaaactcaagaa

SEQ ID NO: 1300376 - DNA, 15 bp, Homo sapiens
cttggaaactcaaga

SEQ ID NO: 1300377 - DNA, 15 bp, Homo sapiens
tcttggaaactcaag

SEQ ID NO: 1300378 - DNA, 15 bp, Homo sapiens
ctcttggaaactcaa

SEQ ID NO: 1300379 - DNA, 15 bp, Homo sapiens
tctcttggaaactca

SEQ ID NO: 1300380 - DNA, 15 bp, Homo sapiens
ctctcttggaaactc

SEQ ID NO: 1300381 - DNA, 15 bp, Homo sapiens
cctctcttggaaact

SEQ ID NO: 1300382 - DNA, 15 bp, Homo sapiens
gcctctcttggaaac

SEQ ID NO: 1300383 - DNA, 15 bp, Homo sapiens
tgcctctcttggaaa

SEQ ID NO: 1300384 - DNA, 15 bp, Homo sapiens
ttgcctctcttggaa

SEQ ID NO: 1300385 - DNA, 15 bp, Homo sapiens
cttgcctctcttgga

SEQ ID NO: 1300386 - DNA, 15 bp, Homo sapiens
gcttgcctctcttgg

SEQ ID NO: 1300387 - DNA, 15 bp, Homo sapiens
tgcttgcctctcttg

SEQ ID NO: 1300388 - DNA, 15 bp, Homo sapiens
ctgcttgcctctctt

SEQ ID NO: 1300389 - DNA, 15 bp, Homo sapiens
cctgcttgcctctct

SEQ ID NO: 1300390 - DNA, 15 bp, Homo sapiens
tcctgcttgcctctc

SEQ ID NO: 1300391 - DNA, 15 bp, Homo sapiens
atcctgcttgcctct

SEQ ID NO: 1300392 - DNA, 15 bp, Homo sapiens
catcctgcttgcctc

SEQ ID NO: 1300393 - DNA, 15 bp, Homo sapiens
tcatcctgcttgcct

SEQ ID NO: 1300394 - DNA, 15 bp, Homo sapiens
ctcatcctgcttgcc

SEQ ID NO: 1300395 - DNA, 15 bp, Homo sapiens
gctcatcctgcttgc

SEQ ID NO: 1300396 - DNA, 15 bp, Homo sapiens
ggctcatcctgcttg

SEQ ID NO: 1300397 - DNA, 15 bp, Homo sapiens
tggctcatcctgctt

SEQ ID NO: 1300398 - DNA, 15 bp, Homo sapiens
gtggctcatcctgct

SEQ ID NO: 1300399 - DNA, 15 bp, Homo sapiens
ggtggctcatcctgc

SEQ ID NO: 1300400 - DNA, 15 bp, Homo sapiens
tggtggctcatcctg

SEQ ID NO: 1300401 - DNA, 15 bp, Homo sapiens
ttggtggctcatcct

SEQ ID NO: 1300402 - DNA, 15 bp, Homo sapiens
tttggtggctcatcc

SEQ ID NO: 1300403 - DNA, 15 bp, Homo sapiens
ttttggtggctcatc

SEQ ID NO: 1300404 - DNA, 15 bp, Homo sapiens
tttttggtggctcat

SEQ ID NO: 1300405 - DNA, 15 bp, Homo sapiens
atttttggtggctca

SEQ ID NO: 1300406 - DNA, 15 bp, Homo sapiens
tatttttggtggctc

SEQ ID NO: 1300407 - DNA, 15 bp, Homo sapiens
ttatttttggtggct

SEQ ID NO: 1300408 - DNA, 15 bp, Homo sapiens
cttatttttggtggc

SEQ ID NO: 1300409 - DNA, 15 bp, Homo sapiens
acttatttttggtgg

SEQ ID NO: 1300410 - DNA, 15 bp, Homo sapiens
tacttatttttggtg

SEQ ID NO: 1300411 - DNA, 15 bp, Homo sapiens
gtacttatttttggt

SEQ ID NO: 1300412 - DNA, 15 bp, Homo sapiens
cgtacttatttttgg

SEQ ID NO: 1300413 - DNA, 15 bp, Homo sapiens
ccgtacttatttttg

SEQ ID NO: 1300414 - DNA, 15 bp, Homo sapiens
accgtacttattttt

SEQ ID NO: 1300415 - DNA, 15 bp, Homo sapiens
aaccgtacttatttt

SEQ ID NO: 1300416 - DNA, 15 bp, Homo sapiens
taaccgtacttattt

SEQ ID NO: 1300417 - DNA, 15 bp, Homo sapiens
ttaaccgtacttatt

SEQ ID NO: 1300418 - DNA, 15 bp, Homo sapiens
tttaaccgtacttat

SEQ ID NO: 1300419 - DNA, 15 bp, Homo sapiens
atttaaccgtactta

SEQ ID NO: 1300420 - DNA, 15 bp, Homo sapiens
tatttaaccgtactt

SEQ ID NO: 1300421 - DNA, 15 bp, Homo sapiens
ttatttaaccgtact

SEQ ID NO: 1300422 - DNA, 15 bp, Homo sapiens
tttatttaaccgtac

SEQ ID NO: 1300423 - DNA, 15 bp, Homo sapiens
ctttatttaaccgta

SEQ ID NO: 1300424 - DNA, 15 bp, Homo sapiens
tctttatttaaccgt

SEQ ID NO: 1300425 - DNA, 15 bp, Homo sapiens
atctttatttaaccg

SEQ ID NO: 1300426 - DNA, 15 bp, Homo sapiens
aatctttatttaacc

SEQ ID NO: 1300427 - DNA, 15 bp, Homo sapiens
caatctttatttaac

SEQ ID NO: 1300428 - DNA, 15 bp, Homo sapiens
tcaatctttatttaa

SEQ ID NO: 1300429 - DNA, 15 bp, Homo sapiens
atcaatctttattta

SEQ ID NO: 1300430 - DNA, 15 bp, Homo sapiens
aatcaatctttattt

SEQ ID NO: 1300431 - DNA, 15 bp, Homo sapiens
gaatcaatctttatt

SEQ ID NO: 1300432 - DNA, 15 bp, Homo sapiens
agaatcaatctttat

SEQ ID NO: 1300433 - DNA, 15 bp, Homo sapiens
cagaatcaatcttta

SEQ ID NO: 1300434 - DNA, 15 bp, Homo sapiens
ccagaatcaatcttt

SEQ ID NO: 1300435 - DNA, 15 bp, Homo sapiens
cccagaatcaatctt

SEQ ID NO: 1300436 - DNA, 15 bp, Homo sapiens
tcccagaatcaatct

SEQ ID NO: 1300437 - DNA, 15 bp, Homo sapiens
gtcccagaatcaatc

SEQ ID NO: 1300438 - DNA, 15 bp, Homo sapiens
ggtcccagaatcaat

SEQ ID NO: 1300439 - DNA, 15 bp, Homo sapiens
tggtcccagaatcaa

SEQ ID NO: 1300440 - DNA, 15 bp, Homo sapiens
ttggtcccagaatca

SEQ ID NO: 1300441 - DNA, 15 bp, Homo sapiens
tttggtcccagaatc

SEQ ID NO: 1300442 - DNA, 15 bp, Homo sapiens
atttggtcccagaat

SEQ ID NO: 1300443 - DNA, 15 bp, Homo sapiens
tatttggtcccagaa

SEQ ID NO: 1300444 - DNA, 15 bp, Homo sapiens
ttatttggtcccaga

SEQ ID NO: 1300445 - DNA, 15 bp, Homo sapiens
cttatttggtcccag

SEQ ID NO: 1300446 - DNA, 15 bp, Homo sapiens
gcttatttggtccca

SEQ ID NO: 1300447 - DNA, 15 bp, Homo sapiens
agcttatttggtccc

SEQ ID NO: 1300448 - DNA, 15 bp, Homo sapiens
aagcttatttggtcc

SEQ ID NO: 1300449 - DNA, 15 bp, Homo sapiens
gaagcttatttggtc

SEQ ID NO: 1300450 - DNA, 15 bp, Homo sapiens
tgaagcttatttggt

SEQ ID NO: 1300451 - DNA, 15 bp, Homo sapiens
ttgaagcttatttgg

SEQ ID NO: 1300452 - DNA, 15 bp, Homo sapiens
cttgaagcttatttg

SEQ ID NO: 1300453 - DNA, 15 bp, Homo sapiens
tcttgaagcttattt

SEQ ID NO: 1300454 - DNA, 15 bp, Homo sapiens
atcttgaagcttatt

SEQ ID NO: 1300455 - DNA, 15 bp, Homo sapiens
tatcttgaagcttat

SEQ ID NO: 1300456 - DNA, 15 bp, Homo sapiens
ttatcttgaagctta

SEQ ID NO: 1300457 - DNA, 15 bp, Homo sapiens
attatcttgaagctt

SEQ ID NO: 1300458 - DNA, 15 bp, Homo sapiens
aattatcttgaagct

SEQ ID NO: 1300459 - DNA, 15 bp, Homo sapiens
taattatcttgaagc

SEQ ID NO: 1300460 - DNA, 15 bp, Homo sapiens
ataattatcttgaag

SEQ ID NO: 1300461 - DNA, 15 bp, Homo sapiens
aataattatcttgaa

SEQ ID NO: 1300462 - DNA, 15 bp, Homo sapiens
aaataattatcttga

SEQ ID NO: 1300463 - DNA, 15 bp, Homo sapiens
gaaataattatcttg

SEQ ID NO: 1300464 - DNA, 15 bp, Homo sapiens
agaaataattatctt

SEQ ID NO: 1300465 - DNA, 15 bp, Homo sapiens
gagaaataattatct

SEQ ID NO: 1300466 - DNA, 15 bp, Homo sapiens
tgagaaataattatc

SEQ ID NO: 1300467 - DNA, 15 bp, Homo sapiens
atgagaaataattat

SEQ ID NO: 1300468 - DNA, 15 bp, Homo sapiens
catgagaaataatta

SEQ ID NO: 1300469 - DNA, 15 bp, Homo sapiens
ccatgagaaataatt

SEQ ID NO: 1300470 - DNA, 15 bp, Homo sapiens
accatgagaaataat

SEQ ID NO: 1300471 - DNA, 15 bp, Homo sapiens
taccatgagaaataa

SEQ ID NO: 1300472 - DNA, 15 bp, Homo sapiens
ctaccatgagaaata

SEQ ID NO: 1300473 - DNA, 15 bp, Homo sapiens
actaccatgagaaat

SEQ ID NO: 1300474 - DNA, 15 bp, Homo sapiens
cactaccatgagaaa

SEQ ID NO: 1300475 - DNA, 15 bp, Homo sapiens
ttcactaccatgaga

SEQ ID NO: 1300476 - DNA, 15 bp, Homo sapiens
attcactaccatgag

SEQ ID NO: 1300477 - DNA, 15 bp, Homo sapiens
gattcactaccatga

SEQ ID NO: 1300478 - DNA, 15 bp, Homo sapiens
tgattcactaccatg

SEQ ID NO: 1300479 - DNA, 15 bp, Homo sapiens
ctgattcactaccat

SEQ ID NO: 1300480 - DNA, 15 bp, Homo sapiens
actgattcactacca

SEQ ID NO: 1300481 - DNA, 15 bp, Homo sapiens
tactgattcactacc

SEQ ID NO: 1300482 - DNA, 15 bp, Homo sapiens
atactgattcactac

SEQ ID NO: 1300483 - DNA, 15 bp, Homo sapiens
catactgattcacta

SEQ ID NO: 1300484 - DNA, 15 bp, Homo sapiens
acatactgattcact

SEQ ID NO: 1300485 - DNA, 15 bp, Homo sapiens
gacatactgattcac

SEQ ID NO: 1300486 - DNA, 15 bp, Homo sapiens
agacatactgattca

SEQ ID NO: 1300487 - DNA, 15 bp, Homo sapiens
gagacatactgattc

SEQ ID NO: 1300488 - DNA, 15 bp, Homo sapiens
tgagacatactgatt

SEQ ID NO: 1300489 - DNA, 15 bp, Homo sapiens
gtgagacatactgat

SEQ ID NO: 1300490 - DNA, 15 bp, Homo sapiens
tgtgagacatactga

SEQ ID NO: 1300491 - DNA, 15 bp, Homo sapiens
ttgtgagacatactg

SEQ ID NO: 1300492 - DNA, 15 bp, Homo sapiens
tttgtgagacatact

SEQ ID NO: 1300493 - DNA, 15 bp, Homo sapiens
atttgtgagacatac

SEQ ID NO: 1300494 - DNA, 15 bp, Homo sapiens
catttgtgagacata

SEQ ID NO: 1300495 - DNA, 15 bp, Homo sapiens
gcatttgtgagacat

SEQ ID NO: 1300496 - DNA, 15 bp, Homo sapiens
tgcatttgtgagaca

SEQ ID NO: 1300497 - DNA, 15 bp, Homo sapiens
atgcatttgtgagac

SEQ ID NO: 1300498 - DNA, 15 bp, Homo sapiens
aatgcatttgtgaga

SEQ ID NO: 1300499 - DNA, 15 bp, Homo sapiens
gaatgcatttgtgag

SEQ ID NO: 1300500 - DNA, 15 bp, Homo sapiens
tgaatgcatttgtga

SEQ ID NO: 1300501 - DNA, 15 bp, Homo sapiens
atgaatgcatttgtg

SEQ ID NO: 1300502 - DNA, 15 bp, Homo sapiens
gatgaatgcatttgt

SEQ ID NO: 1300503 - DNA, 15 bp, Homo sapiens
agatgaatgcatttg

SEQ ID NO: 1300504 - DNA, 15 bp, Homo sapiens
aagatgaatgcattt

SEQ ID NO: 1300505 - DNA, 15 bp, Homo sapiens
aaagatgaatgcatt

SEQ ID NO: 1300506 - DNA, 15 bp, Homo sapiens
aaaagatgaatgcat

SEQ ID NO: 1300507 - DNA, 15 bp, Homo sapiens
gaaaagatgaatgca

SEQ ID NO: 1300508 - DNA, 15 bp, Homo sapiens
tgaaaagatgaatgc

SEQ ID NO: 1300509 - DNA, 15 bp, Homo sapiens
atgaaaagatgaatg

SEQ ID NO: 1300510 - DNA, 15 bp, Homo sapiens
catgaaaagatgaat

SEQ ID NO: 1300511 - DNA, 15 bp, Homo sapiens
acatgaaaagatgaa

SEQ ID NO: 1300512 - DNA, 15 bp, Homo sapiens
aacatgaaaagatga

SEQ ID NO: 1300513 - DNA, 15 bp, Homo sapiens
aaacatgaaaagatg

SEQ ID NO: 1300514 - DNA, 15 bp, Homo sapiens
aaaacatgaaaagat

SEQ ID NO: 1300515 - DNA, 15 bp, Homo sapiens
gaaaacatgaaaaga

SEQ ID NO: 1300516 - DNA, 15 bp, Homo sapiens
tgaaaacatgaaaag

SEQ ID NO: 1300517 - DNA, 15 bp, Homo sapiens
ctgaaaacatgaaaa

SEQ ID NO: 1300518 - DNA, 15 bp, Homo sapiens
actgaaaacatgaaa

SEQ ID NO: 1300519 - DNA, 15 bp, Homo sapiens
tactgaaaacatgaa

SEQ ID NO: 1300520 - DNA, 15 bp, Homo sapiens
gtactgaaaacatga

SEQ ID NO: 1300521 - DNA, 15 bp, Homo sapiens
ggtactgaaaacatg

SEQ ID NO: 1300522 - DNA, 15 bp, Homo sapiens
gggtactgaaaacat

SEQ ID NO: 1300523 - DNA, 15 bp, Homo sapiens
tgggtactgaaaaca

SEQ ID NO: 1300524 - DNA, 15 bp, Homo sapiens
ttgggtactgaaaac

SEQ ID NO: 1300525 - DNA, 15 bp, Homo sapiens
cttgggtactgaaaa

SEQ ID NO: 1300526 - DNA, 15 bp, Homo sapiens
ccttgggtactgaaa

SEQ ID NO: 1300527 - DNA, 15 bp, Homo sapiens
accttgggtactgaa

SEQ ID NO: 1300528 - DNA, 15 bp, Homo sapiens
gaccttgggtactga

SEQ ID NO: 1300529 - DNA, 15 bp, Homo sapiens
ggaccttgggtactg

SEQ ID NO: 1300530 - DNA, 15 bp, Homo sapiens
aggaccttgggtact

SEQ ID NO: 1300531 - DNA, 15 bp, Homo sapiens
aaggaccttgggtac

SEQ ID NO: 1300532 - DNA, 15 bp, Homo sapiens
caaggaccttgggta

SEQ ID NO: 1300533 - DNA, 15 bp, Homo sapiens
tcaaggaccttgggt

SEQ ID NO: 1300534 - DNA, 15 bp, Homo sapiens
atcaaggaccttggg

SEQ ID NO: 1300535 - DNA, 15 bp, Homo sapiens
catcaaggaccttgg

SEQ ID NO: 1300536 - DNA, 15 bp, Homo sapiens
ccatcaaggaccttg

SEQ ID NO: 1300537 - DNA, 15 bp, Homo sapiens
tccatcaaggacctt

SEQ ID NO: 1300538 - DNA, 15 bp, Homo sapiens
atccatcaaggacct

SEQ ID NO: 1300539 - DNA, 15 bp, Homo sapiens
catccatcaaggacc

SEQ ID NO: 1300540 - DNA, 15 bp, Homo sapiens
ccatccatcaaggac

SEQ ID NO: 1300541 - DNA, 15 bp, Homo sapiens
tccatccatcaagga

SEQ ID NO: 1300542 - DNA, 15 bp, Homo sapiens
atccatccatcaagg

SEQ ID NO: 1300543 - DNA, 15 bp, Homo sapiens
aatccatccatcaag

SEQ ID NO: 1300544 - DNA, 15 bp, Homo sapiens
taatccatccatcaa

SEQ ID NO: 1300545 - DNA, 15 bp, Homo sapiens
ttaatccatccatca

SEQ ID NO: 1300546 - DNA, 15 bp, Homo sapiens
attaatccatccatc

SEQ ID NO: 1300547 - DNA, 15 bp, Homo sapiens
gattaatccatccat

SEQ ID NO: 1300548 - DNA, 15 bp, Homo sapiens
ggattaatccatcca

SEQ ID NO: 1300549 - DNA, 15 bp, Homo sapiens
aggattaatccatcc

SEQ ID NO: 1300550 - DNA, 15 bp, Homo sapiens
gaggattaatccatc

SEQ ID NO: 1300551 - DNA, 15 bp, Homo sapiens
ggaggattaatccat

SEQ ID NO: 1300552 - DNA, 15 bp, Homo sapiens
aggaggattaatcca

SEQ ID NO: 1300553 - DNA, 15 bp, Homo sapiens
aaggaggattaatcc

SEQ ID NO: 1300554 - DNA, 15 bp, Homo sapiens
aaaggaggattaatc

SEQ ID NO: 1300555 - DNA, 15 bp, Homo sapiens
aaaaggaggattaat

SEQ ID NO: 1300556 - DNA, 15 bp, Homo sapiens
gaaaaggaggattaa

SEQ ID NO: 1300557 - DNA, 15 bp, Homo sapiens
tgaaaaggaggatta

SEQ ID NO: 1300558 - DNA, 15 bp, Homo sapiens
gtgaaaaggaggatt

SEQ ID NO: 1300559 - DNA, 15 bp, Homo sapiens
ggtgaaaaggaggat

SEQ ID NO: 1300560 - DNA, 15 bp, Homo sapiens
aggtgaaaaggagga

SEQ ID NO: 1300561 - DNA, 15 bp, Homo sapiens
aaggtgaaaaggagg

SEQ ID NO: 1300562 - DNA, 15 bp, Homo sapiens
caaggtgaaaaggag

SEQ ID NO: 1300563 - DNA, 15 bp, Homo sapiens
gcaaggtgaaaagga

SEQ ID NO: 1300564 - DNA, 15 bp, Homo sapiens
agcaaggtgaaaagg

SEQ ID NO: 1300565 - DNA, 15 bp, Homo sapiens
aagcaaggtgaaaag

SEQ ID NO: 1300566 - DNA, 15 bp, Homo sapiens
gaagcaaggtgaaaa

SEQ ID NO: 1300567 - DNA, 15 bp, Homo sapiens
ggaagcaaggtgaaa

SEQ ID NO: 1300568 - DNA, 15 bp, Homo sapiens
aggaagcaaggtgaa

SEQ ID NO: 1300569 - DNA, 15 bp, Homo sapiens
aaggaagcaaggtga

SEQ ID NO: 1300570 - DNA, 15 bp, Homo sapiens
gaaggaagcaaggtg

SEQ ID NO: 1300571 - DNA, 15 bp, Homo sapiens
tgaaggaagcaaggt

SEQ ID NO: 1300572 - DNA, 15 bp, Homo sapiens
gtgaaggaagcaagg

SEQ ID NO: 1300573 - DNA, 15 bp, Homo sapiens
ggtgaaggaagcaag

SEQ ID NO: 1300574 - DNA, 15 bp, Homo sapiens
aggtgaaggaagcaa

SEQ ID NO: 1300575 - DNA, 15 bp, Homo sapiens
caggtgaaggaagca

SEQ ID NO: 1300576 - DNA, 15 bp, Homo sapiens
tcaggtgaaggaagc

SEQ ID NO: 1300577 - DNA, 15 bp, Homo sapiens
atcaggtgaaggaag

SEQ ID NO: 1300578 - DNA, 15 bp, Homo sapiens
gatcaggtgaaggaa

SEQ ID NO: 1300579 - DNA, 15 bp, Homo sapiens
ggatcaggtgaagga

SEQ ID NO: 1300580 - DNA, 15 bp, Homo sapiens
gggatcaggtgaagg

SEQ ID NO: 1300581 - DNA, 15 bp, Homo sapiens
agggatcaggtgaag

SEQ ID NO: 1300582 - DNA, 15 bp, Homo sapiens
gagggatcaggtgaa

SEQ ID NO: 1300583 - DNA, 15 bp, Homo sapiens
tgagggatcaggtga

SEQ ID NO: 1300584 - DNA, 15 bp, Homo sapiens
gtgagggatcaggtg

SEQ ID NO: 1300585 - DNA, 15 bp, Homo sapiens
ggtgagggatcaggt

SEQ ID NO: 1300586 - DNA, 15 bp, Homo sapiens
aggtgagggatcagg

SEQ ID NO: 1300587 - DNA, 15 bp, Homo sapiens
gaggtgagggatcag

SEQ ID NO: 1300588 - DNA, 15 bp, Homo sapiens
agaggtgagggatca

SEQ ID NO: 1300589 - DNA, 15 bp, Homo sapiens
gagaggtgagggatc

SEQ ID NO: 1300590 - DNA, 15 bp, Homo sapiens
tgagaggtgagggat

SEQ ID NO: 1300591 - DNA, 15 bp, Homo sapiens
ttgagaggtgaggga

SEQ ID NO: 1300592 - DNA, 15 bp, Homo sapiens
attgagaggtgaggg

SEQ ID NO: 1300593 - DNA, 15 bp, Homo sapiens
cattgagaggtgagg

SEQ ID NO: 1300594 - DNA, 15 bp, Homo sapiens
tcattgagaggtgag

SEQ ID NO: 1300595 - DNA, 15 bp, Homo sapiens
ttcattgagaggtga

SEQ ID NO: 1300596 - DNA, 15 bp, Homo sapiens
attcattgagaggtg

SEQ ID NO: 1300597 - DNA, 15 bp, Homo sapiens
aattcattgagaggt

SEQ ID NO: 1300598 - DNA, 15 bp, Homo sapiens
caattcattgagagg

SEQ ID NO: 1300599 - DNA, 15 bp, Homo sapiens
tcaattcattgagag

SEQ ID NO: 1300600 - DNA, 15 bp, Homo sapiens
ttcaattcattgaga

SEQ ID NO: 1300601 - DNA, 15 bp, Homo sapiens
tttcaattcattgag

SEQ ID NO: 1300602 - DNA, 15 bp, Homo sapiens
caacaagggtataat

SEQ ID NO: 1300603 - DNA, 15 bp, Homo sapiens
tcaacaagggtataa

SEQ ID NO: 1300604 - DNA, 15 bp, Homo sapiens
actcaacaagggtat

SEQ ID NO: 1300605 - DNA, 15 bp, Homo sapiens
aactcaacaagggta

SEQ ID NO: 1300606 - DNA, 15 bp, Homo sapiens
aaactcaacaagggt

SEQ ID NO: 1300607 - DNA, 15 bp, Homo sapiens
gaaactcaacaaggg

SEQ ID NO: 1300608 - DNA, 15 bp, Homo sapiens
agaaactcaacaagg

SEQ ID NO: 1300609 - DNA, 15 bp, Homo sapiens
gagaaactcaacaag

SEQ ID NO: 1300610 - DNA, 15 bp, Homo sapiens
agagaaactcaacaa

SEQ ID NO: 1300611 - DNA, 15 bp, Homo sapiens
aagagaaactcaaca

SEQ ID NO: 1300612 - DNA, 15 bp, Homo sapiens
caagagaaactcaac

SEQ ID NO: 1300613 - DNA, 15 bp, Homo sapiens
tcaagagaaactcaa

SEQ ID NO: 1300614 - DNA, 15 bp, Homo sapiens
gtcaagagaaactca

SEQ ID NO: 1300615 - DNA, 15 bp, Homo sapiens
tgtcaagagaaactc

SEQ ID NO: 1300616 - DNA, 15 bp, Homo sapiens
ctgtcaagagaaact

SEQ ID NO: 1300617 - DNA, 15 bp, Homo sapiens
cctgtcaagagaaac

SEQ ID NO: 1300618 - DNA, 15 bp, Homo sapiens
tcctgtcaagagaaa

SEQ ID NO: 1300619 - DNA, 15 bp, Homo sapiens
ttcctgtcaagagaa

SEQ ID NO: 1300620 - DNA, 15 bp, Homo sapiens
cttcctgtcaagaga

SEQ ID NO: 1300621 - DNA, 15 bp, Homo sapiens
ccttcctgtcaagag

SEQ ID NO: 1300622 - DNA, 15 bp, Homo sapiens
tccttcctgtcaaga

SEQ ID NO: 1300623 - DNA, 15 bp, Homo sapiens
ttccttcctgtcaag

SEQ ID NO: 1300624 - DNA, 15 bp, Homo sapiens
tttccttcctgtcaa

SEQ ID NO: 1300625 - DNA, 15 bp, Homo sapiens
atttccttcctgtca

SEQ ID NO: 1300626 - DNA, 15 bp, Homo sapiens
catttccttcctgtc

SEQ ID NO: 1300627 - DNA, 15 bp, Homo sapiens
tcatttccttcctgt

SEQ ID NO: 1300628 - DNA, 15 bp, Homo sapiens
ttcatttccttcctg

SEQ ID NO: 1300629 - DNA, 15 bp, Homo sapiens
attcatttccttcct

SEQ ID NO: 1300630 - DNA, 15 bp, Homo sapiens
aattcatttccttcc

SEQ ID NO: 1300631 - DNA, 15 bp, Homo sapiens
aaattcatttccttc

SEQ ID NO: 1300632 - DNA, 15 bp, Homo sapiens
taaattcatttcctt

SEQ ID NO: 1300633 - DNA, 15 bp, Homo sapiens
gtaaattcatttcct

SEQ ID NO: 1300634 - DNA, 15 bp, Homo sapiens
ggtaaattcatttcc

SEQ ID NO: 1300635 - DNA, 15 bp, Homo sapiens
aggtaaattcatttc

SEQ ID NO: 1300636 - DNA, 15 bp, Homo sapiens
gaggtaaattcattt

SEQ ID NO: 1300637 - DNA, 15 bp, Homo sapiens
cgaggtaaattcatt

SEQ ID NO: 1300638 - DNA, 15 bp, Homo sapiens
acgaggtaaattcat

SEQ ID NO: 1300639 - DNA, 15 bp, Homo sapiens
cacgaggtaaattca

SEQ ID NO: 1300640 - DNA, 15 bp, Homo sapiens
acacgaggtaaattc

SEQ ID NO: 1300641 - DNA, 15 bp, Homo sapiens
gacacgaggtaaatt

SEQ ID NO: 1300642 - DNA, 15 bp, Homo sapiens
tgacacgaggtaaat

SEQ ID NO: 1300643 - DNA, 15 bp, Homo sapiens
gtgacacgaggtaaa

SEQ ID NO: 1300644 - DNA, 15 bp, Homo sapiens
ggtgacacgaggtaa

SEQ ID NO: 1300645 - DNA, 15 bp, Homo sapiens
aggtgacacgaggta

SEQ ID NO: 1300646 - DNA, 15 bp, Homo sapiens
gaggtgacacgaggt

SEQ ID NO: 1300647 - DNA, 15 bp, Homo sapiens
agaggtgacacgagg

SEQ ID NO: 1300648 - DNA, 15 bp, Homo sapiens
cagaggtgacacgag

SEQ ID NO: 1300649 - DNA, 15 bp, Homo sapiens
acagaggtgacacga

SEQ ID NO: 1300650 - DNA, 15 bp, Homo sapiens
tacagaggtgacacg

SEQ ID NO: 1300651 - DNA, 15 bp, Homo sapiens
ctacagaggtgacac

SEQ ID NO: 1300652 - DNA, 15 bp, Homo sapiens
actacagaggtgaca

SEQ ID NO: 1300653 - DNA, 15 bp, Homo sapiens
aactacagaggtgac

SEQ ID NO: 1300654 - DNA, 15 bp, Homo sapiens
aaactacagaggtga

SEQ ID NO: 1300655 - DNA, 15 bp, Homo sapiens
caaactacagaggtg

SEQ ID NO: 1300656 - DNA, 15 bp, Homo sapiens
gcaaactacagaggt

SEQ ID NO: 1300657 - DNA, 15 bp, Homo sapiens
tgcaaactacagagg

SEQ ID NO: 1300658 - DNA, 15 bp, Homo sapiens
ttgcaaactacagag

SEQ ID NO: 1300659 - DNA, 15 bp, Homo sapiens
cttgcaaactacaga

SEQ ID NO: 1300660 - DNA, 15 bp, Homo sapiens
gcttgcaaactacag

SEQ ID NO: 1300661 - DNA, 15 bp, Homo sapiens
tgcttgcaaactaca

SEQ ID NO: 1300662 - DNA, 15 bp, Homo sapiens
ctgcttgcaaactac

SEQ ID NO: 1300663 - DNA, 15 bp, Homo sapiens
cctgcttgcaaacta

SEQ ID NO: 1300664 - DNA, 15 bp, Homo sapiens
gcctgcttgcaaact

SEQ ID NO: 1300665 - DNA, 15 bp, Homo sapiens
tgcctgcttgcaaac

SEQ ID NO: 1300666 - DNA, 15 bp, Homo sapiens
atgcctgcttgcaaa

SEQ ID NO: 1300667 - DNA, 15 bp, Homo sapiens
catgcctgcttgcaa

SEQ ID NO: 1300668 - DNA, 15 bp, Homo sapiens
ccatgcctgcttgca

SEQ ID NO: 1300669 - DNA, 15 bp, Homo sapiens
gccatgcctgcttgc

SEQ ID NO: 1300670 - DNA, 15 bp, Homo sapiens
agccatgcctgcttg

SEQ ID NO: 1300671 - DNA, 15 bp, Homo sapiens
aagccatgcctgctt

SEQ ID NO: 1300672 - DNA, 15 bp, Homo sapiens
gaagccatgcctgct

SEQ ID NO: 1300673 - DNA, 15 bp, Homo sapiens
agaagccatgcctgc

SEQ ID NO: 1300674 - DNA, 15 bp, Homo sapiens
cagaagccatgcctg

SEQ ID NO: 1300675 - DNA, 15 bp, Homo sapiens
tcagaagccatgcct

SEQ ID NO: 1300676 - DNA, 15 bp, Homo sapiens
atcagaagccatgcc

SEQ ID NO: 1300677 - DNA, 15 bp, Homo sapiens
tatcagaagccatgc

SEQ ID NO: 1300678 - DNA, 15 bp, Homo sapiens
ttatcagaagccatg

SEQ ID NO: 1300679 - DNA, 15 bp, Homo sapiens
attatcagaagccat

SEQ ID NO: 1300680 - DNA, 15 bp, Homo sapiens
tattatcagaagcca

SEQ ID NO: 1300681 - DNA, 15 bp, Homo sapiens
ctattatcagaagcc

SEQ ID NO: 1300682 - DNA, 15 bp, Homo sapiens
gctattatcagaagc

SEQ ID NO: 1300683 - DNA, 15 bp, Homo sapiens
tgctattatcagaag

SEQ ID NO: 1300684 - DNA, 15 bp, Homo sapiens
gtgctattatcagaa

SEQ ID NO: 1300685 - DNA, 15 bp, Homo sapiens
ggtgctattatcaga

SEQ ID NO: 1300686 - DNA, 15 bp, Homo sapiens
aggtgctattatcag

SEQ ID NO: 1300687 - DNA, 15 bp, Homo sapiens
aaggtgctattatca

SEQ ID NO: 1300688 - DNA, 15 bp, Homo sapiens
aaaggtgctattatc

SEQ ID NO: 1300689 - DNA, 15 bp, Homo sapiens
gaaaggtgctattat

SEQ ID NO: 1300690 - DNA, 15 bp, Homo sapiens
tgaaaggtgctatta

SEQ ID NO: 1300691 - DNA, 15 bp, Homo sapiens
atgaaaggtgctatt

SEQ ID NO: 1300692 - DNA, 15 bp, Homo sapiens
catgaaaggtgctat

SEQ ID NO: 1300693 - DNA, 15 bp, Homo sapiens
acatgaaaggtgcta

SEQ ID NO: 1300694 - DNA, 15 bp, Homo sapiens
aacatgaaaggtgct

SEQ ID NO: 1300695 - DNA, 15 bp, Homo sapiens
aaacatgaaaggtgc

SEQ ID NO: 1300696 - DNA, 15 bp, Homo sapiens
aaaacatgaaaggtg

SEQ ID NO: 1300697 - DNA, 15 bp, Homo sapiens
caaaacatgaaaggt

SEQ ID NO: 1300698 - DNA, 15 bp, Homo sapiens
acaaaacatgaaagg

SEQ ID NO: 1300699 - DNA, 15 bp, Homo sapiens
tacaaaacatgaaag

SEQ ID NO: 1300700 - DNA, 15 bp, Homo sapiens
ttacaaaacatgaaa

SEQ ID NO: 1300701 - DNA, 15 bp, Homo sapiens
cttacaaaacatgaa

SEQ ID NO: 1300702 - DNA, 15 bp, Homo sapiens
tcttacaaaacatga

SEQ ID NO: 1300703 - DNA, 15 bp, Homo sapiens
gtcttacaaaacatg

SEQ ID NO: 1300704 - DNA, 15 bp, Homo sapiens
ggtcttacaaaacat

SEQ ID NO: 1300705 - DNA, 15 bp, Homo sapiens
tggtcttacaaaaca

SEQ ID NO: 1300706 - DNA, 15 bp, Homo sapiens
ttggtcttacaaaac

SEQ ID NO: 1300707 - DNA, 15 bp, Homo sapiens
cttggtcttacaaaa

SEQ ID NO: 1300708 - DNA, 15 bp, Homo sapiens
ccttggtcttacaaa

SEQ ID NO: 1300709 - DNA, 15 bp, Homo sapiens
tccttggtcttacaa

SEQ ID NO: 1300710 - DNA, 15 bp, Homo sapiens
ctccttggtcttaca

SEQ ID NO: 1300711 - DNA, 15 bp, Homo sapiens
tctccttggtcttac

SEQ ID NO: 1300712 - DNA, 15 bp, Homo sapiens
ttctccttggtctta

SEQ ID NO: 1300713 - DNA, 15 bp, Homo sapiens
cttctccttggtctt

SEQ ID NO: 1300714 - DNA, 15 bp, Homo sapiens
gcttctccttggtct

SEQ ID NO: 1300715 - DNA, 15 bp, Homo sapiens
tgcttctccttggtc

SEQ ID NO: 1300716 - DNA, 15 bp, Homo sapiens
atgcttctccttggt

SEQ ID NO: 1300717 - DNA, 15 bp, Homo sapiens
aatgcttctccttgg

SEQ ID NO: 1300718 - DNA, 15 bp, Homo sapiens
gaatgcttctccttg

SEQ ID NO: 1300719 - DNA, 15 bp, Homo sapiens
cgaatgcttctcctt

SEQ ID NO: 1300720 - DNA, 15 bp, Homo sapiens
acgaatgcttctcct

SEQ ID NO: 1300721 - DNA, 15 bp, Homo sapiens
cacgaatgcttctcc

SEQ ID NO: 1300722 - DNA, 15 bp, Homo sapiens
acacgaatgcttctc

SEQ ID NO: 1300723 - DNA, 15 bp, Homo sapiens
cacacgaatgcttct

SEQ ID NO: 1300724 - DNA, 15 bp, Homo sapiens
ccacacgaatgcttc

SEQ ID NO: 1300725 - DNA, 15 bp, Homo sapiens
accacacgaatgctt

SEQ ID NO: 1300726 - DNA, 15 bp, Homo sapiens
caccacacgaatgct

SEQ ID NO: 1300727 - DNA, 15 bp, Homo sapiens
ccaccacacgaatgc

SEQ ID NO: 1300728 - DNA, 15 bp, Homo sapiens
gccaccacacgaatg

SEQ ID NO: 1300729 - DNA, 15 bp, Homo sapiens
ggccaccacacgaat

SEQ ID NO: 1300730 - DNA, 15 bp, Homo sapiens
tggccaccacacgaa

SEQ ID NO: 1300731 - DNA, 15 bp, Homo sapiens
ctggccaccacacga

SEQ ID NO: 1300732 - DNA, 15 bp, Homo sapiens
actggccaccacacg

SEQ ID NO: 1300733 - DNA, 15 bp, Homo sapiens
gactggccaccacac

SEQ ID NO: 1300734 - DNA, 15 bp, Homo sapiens
ggactggccaccaca

SEQ ID NO: 1300735 - DNA, 15 bp, Homo sapiens
aggactggccaccac

SEQ ID NO: 1300736 - DNA, 15 bp, Homo sapiens
aaggactggccacca

SEQ ID NO: 1300737 - DNA, 15 bp, Homo sapiens
caaggactggccacc

SEQ ID NO: 1300738 - DNA, 15 bp, Homo sapiens
ccaaggactggccac

SEQ ID NO: 1300739 - DNA, 15 bp, Homo sapiens
accaaggactggcca

SEQ ID NO: 1300740 - DNA, 15 bp, Homo sapiens
caccaaggactggcc

SEQ ID NO: 1300741 - DNA, 15 bp, Homo sapiens
tcaccaaggactggc

SEQ ID NO: 1300742 - DNA, 15 bp, Homo sapiens
gtcaccaaggactgg

SEQ ID NO: 1300743 - DNA, 15 bp, Homo sapiens
ggtcaccaaggactg

SEQ ID NO: 1300744 - DNA, 15 bp, Homo sapiens
gggtcaccaaggact

SEQ ID NO: 1300745 - DNA, 15 bp, Homo sapiens
agggtcaccaaggac

SEQ ID NO: 1300746 - DNA, 15 bp, Homo sapiens
aagggtcaccaagga

SEQ ID NO: 1300747 - DNA, 15 bp, Homo sapiens
aaagggtcaccaagg

SEQ ID NO: 1300748 - DNA, 15 bp, Homo sapiens
caaagggtcaccaag

SEQ ID NO: 1300749 - DNA, 15 bp, Homo sapiens
acaaagggtcaccaa

SEQ ID NO: 1300750 - DNA, 15 bp, Homo sapiens
gacaaagggtcacca

SEQ ID NO: 1300751 - DNA, 15 bp, Homo sapiens
agacaaagggtcacc

SEQ ID NO: 1300752 - DNA, 15 bp, Homo sapiens
gagacaaagggtcac

SEQ ID NO: 1300753 - DNA, 15 bp, Homo sapiens
tgagacaaagggtca

SEQ ID NO: 1300754 - DNA, 15 bp, Homo sapiens
ctgagacaaagggtc

SEQ ID NO: 1300755 - DNA, 15 bp, Homo sapiens
gctgagacaaagggt

SEQ ID NO: 1300756 - DNA, 15 bp, Homo sapiens
ggctgagacaaaggg

SEQ ID NO: 1300757 - DNA, 15 bp, Homo sapiens
aggctgagacaaagg

SEQ ID NO: 1300758 - DNA, 15 bp, Homo sapiens
caggctgagacaaag

SEQ ID NO: 1300759 - DNA, 15 bp, Homo sapiens
ccaggctgagacaaa

SEQ ID NO: 1300760 - DNA, 15 bp, Homo sapiens
tccaggctgagacaa

SEQ ID NO: 1300761 - DNA, 15 bp, Homo sapiens
ctccaggctgagaca

SEQ ID NO: 1300762 - DNA, 15 bp, Homo sapiens
cctccaggctgagac

SEQ ID NO: 1300763 - DNA, 15 bp, Homo sapiens
acctccaggctgaga

SEQ ID NO: 1300764 - DNA, 15 bp, Homo sapiens
cacctccaggctgag

SEQ ID NO: 1300765 - DNA, 15 bp, Homo sapiens
tcacctccaggctga

SEQ ID NO: 1300766 - DNA, 15 bp, Homo sapiens
ctcacctccaggctg

SEQ ID NO: 1300767 - DNA, 15 bp, Homo sapiens
gctcacctccaggct

SEQ ID NO: 1300768 - DNA, 15 bp, Homo sapiens
agctcacctccaggc

SEQ ID NO: 1300769 - DNA, 15 bp, Homo sapiens
aagctcacctccagg

SEQ ID NO: 1300770 - DNA, 15 bp, Homo sapiens
caagctcacctccag

SEQ ID NO: 1300771 - DNA, 15 bp, Homo sapiens
tcaagctcacctcca

SEQ ID NO: 1300772 - DNA, 15 bp, Homo sapiens
ctcaagctcacctcc

SEQ ID NO: 1300773 - DNA, 15 bp, Homo sapiens
gctcaagctcacctc

SEQ ID NO: 1300774 - DNA, 15 bp, Homo sapiens
agctcaagctcacct

SEQ ID NO: 1300775 - DNA, 15 bp, Homo sapiens
cagctcaagctcacc

SEQ ID NO: 1300776 - DNA, 15 bp, Homo sapiens
tcagctcaagctcac

SEQ ID NO: 1300777 - DNA, 15 bp, Homo sapiens
atcagctcaagctca

SEQ ID NO: 1300778 - DNA, 15 bp, Homo sapiens
aatcagctcaagctc

SEQ ID NO: 1300779 - DNA, 15 bp, Homo sapiens
gaatcagctcaagct

SEQ ID NO: 1300780 - DNA, 15 bp, Homo sapiens
agaatcagctcaagc

SEQ ID NO: 1300781 - DNA, 15 bp, Homo sapiens
aagaatcagctcaag

SEQ ID NO: 1300782 - DNA, 15 bp, Homo sapiens
gaagaatcagctcaa

SEQ ID NO: 1300783 - DNA, 15 bp, Homo sapiens
tgaagaatcagctca

SEQ ID NO: 1300784 - DNA, 15 bp, Homo sapiens
atgaagaatcagctc

SEQ ID NO: 1300785 - DNA, 15 bp, Homo sapiens
catgaagaatcagct

SEQ ID NO: 1300786 - DNA, 15 bp, Homo sapiens
ccatgaagaatcagc

SEQ ID NO: 1300787 - DNA, 15 bp, Homo sapiens
cccatgaagaatcag

SEQ ID NO: 1300788 - DNA, 15 bp, Homo sapiens
tcccatgaagaatca

SEQ ID NO: 1300789 - DNA, 15 bp, Homo sapiens
ctcccatgaagaatc

SEQ ID NO: 1300790 - DNA, 15 bp, Homo sapiens
actcccatgaagaat

SEQ ID NO: 1300791 - DNA, 15 bp, Homo sapiens
cactcccatgaagaa

SEQ ID NO: 1300792 - DNA, 15 bp, Homo sapiens
acactcccatgaaga

SEQ ID NO: 1300793 - DNA, 15 bp, Homo sapiens
aacactcccatgaag

SEQ ID NO: 1300794 - DNA, 15 bp, Homo sapiens
aaacactcccatgaa

SEQ ID NO: 1300795 - DNA, 15 bp, Homo sapiens
taaacactcccatga

SEQ ID NO: 1300796 - DNA, 15 bp, Homo sapiens
gtaaacactcccatg

SEQ ID NO: 1300797 - DNA, 15 bp, Homo sapiens
agtaaacactcccat

SEQ ID NO: 1300798 - DNA, 15 bp, Homo sapiens
gagtaaacactccca

SEQ ID NO: 1300799 - DNA, 15 bp, Homo sapiens
ggagtaaacactccc

SEQ ID NO: 1300800 - DNA, 15 bp, Homo sapiens
aggagtaaacactcc

SEQ ID NO: 1300801 - DNA, 15 bp, Homo sapiens
caggagtaaacactc

SEQ ID NO: 1300802 - DNA, 15 bp, Homo sapiens
ccaggagtaaacact

SEQ ID NO: 1300803 - DNA, 15 bp, Homo sapiens
cccaggagtaaacac

SEQ ID NO: 1300804 - DNA, 15 bp, Homo sapiens
ccccaggagtaaaca

SEQ ID NO: 1300805 - DNA, 15 bp, Homo sapiens
gccccaggagtaaac

SEQ ID NO: 1300806 - DNA, 15 bp, Homo sapiens
agccccaggagtaaa

SEQ ID NO: 1300807 - DNA, 15 bp, Homo sapiens
aagccccaggagtaa

SEQ ID NO: 1300808 - DNA, 15 bp, Homo sapiens
caagccccaggagta

SEQ ID NO: 1300809 - DNA, 15 bp, Homo sapiens
acaagccccaggagt

SEQ ID NO: 1300810 - DNA, 15 bp, Homo sapiens
tacaagccccaggag

SEQ ID NO: 1300811 - DNA, 15 bp, Homo sapiens
ctacaagccccagga

SEQ ID NO: 1300812 - DNA, 15 bp, Homo sapiens
cctacaagccccagg

SEQ ID NO: 1300813 - DNA, 15 bp, Homo sapiens
tcctacaagccccag

SEQ ID NO: 1300814 - DNA, 15 bp, Homo sapiens
ttcctacaagcccca

SEQ ID NO: 1300815 - DNA, 15 bp, Homo sapiens
attcctacaagcccc

SEQ ID NO: 1300816 - DNA, 15 bp, Homo sapiens
gattcctacaagccc

SEQ ID NO: 1300817 - DNA, 15 bp, Homo sapiens
agattcctacaagcc

SEQ ID NO: 1300818 - DNA, 15 bp, Homo sapiens
cagattcctacaagc

SEQ ID NO: 1300819 - DNA, 15 bp, Homo sapiens
ccagattcctacaag

SEQ ID NO: 1300820 - DNA, 15 bp, Homo sapiens
gccagattcctacaa

SEQ ID NO: 1300821 - DNA, 15 bp, Homo sapiens
agccagattcctaca

SEQ ID NO: 1300822 - DNA, 15 bp, Homo sapiens
cagccagattcctac

SEQ ID NO: 1300823 - DNA, 15 bp, Homo sapiens
ccagccagattccta

SEQ ID NO: 1300824 - DNA, 15 bp, Homo sapiens
cccagccagattcct

SEQ ID NO: 1300825 - DNA, 15 bp, Homo sapiens
ccccagccagattcc

SEQ ID NO: 1300826 - DNA, 15 bp, Homo sapiens
cccccagccagattc

SEQ ID NO: 1300827 - DNA, 15 bp, Homo sapiens
acccccagccagatt

SEQ ID NO: 1300828 - DNA, 15 bp, Homo sapiens
aacccccagccagat

SEQ ID NO: 1300829 - DNA, 15 bp, Homo sapiens
caacccccagccaga

SEQ ID NO: 1300830 - DNA, 15 bp, Homo sapiens
ccaacccccagccag

SEQ ID NO: 1300831 - DNA, 15 bp, Homo sapiens
cccaacccccagcca

SEQ ID NO: 1300832 - DNA, 15 bp, Homo sapiens
acccaacccccagcc

SEQ ID NO: 1300833 - DNA, 15 bp, Homo sapiens
cacccaacccccagc

SEQ ID NO: 1300834 - DNA, 15 bp, Homo sapiens
ccacccaacccccag

SEQ ID NO: 1300835 - DNA, 15 bp, Homo sapiens
accacccaaccccca

SEQ ID NO: 1300836 - DNA, 15 bp, Homo sapiens
gaccacccaaccccc

SEQ ID NO: 1300837 - DNA, 15 bp, Homo sapiens
tgaccacccaacccc

SEQ ID NO: 1300838 - DNA, 15 bp, Homo sapiens
ctgaccacccaaccc

SEQ ID NO: 1300839 - DNA, 15 bp, Homo sapiens
gctgaccacccaacc

SEQ ID NO: 1300840 - DNA, 15 bp, Homo sapiens
agctgaccacccaac

SEQ ID NO: 1300841 - DNA, 15 bp, Homo sapiens
cagctgaccacccaa

SEQ ID NO: 1300842 - DNA, 15 bp, Homo sapiens
acagctgaccaccca

SEQ ID NO: 1300843 - DNA, 15 bp, Homo sapiens
gacagctgaccaccc

SEQ ID NO: 1300844 - DNA, 15 bp, Homo sapiens
ggacagctgaccacc

SEQ ID NO: 1300845 - DNA, 15 bp, Homo sapiens
gggacagctgaccac

SEQ ID NO: 1300846 - DNA, 15 bp, Homo sapiens
tgggacagctgacca

SEQ ID NO: 1300847 - DNA, 15 bp, Homo sapiens
atgggacagctgacc

SEQ ID NO: 1300848 - DNA, 15 bp, Homo sapiens
tatgggacagctgac

SEQ ID NO: 1300849 - DNA, 15 bp, Homo sapiens
ttatgggacagctga

SEQ ID NO: 1300850 - DNA, 15 bp, Homo sapiens
cttatgggacagctg

SEQ ID NO: 1300851 - DNA, 15 bp, Homo sapiens
tcttatgggacagct

SEQ ID NO: 1300852 - DNA, 15 bp, Homo sapiens
atcttatgggacagc

SEQ ID NO: 1300853 - DNA, 15 bp, Homo sapiens
aatcttatgggacag

SEQ ID NO: 1300854 - DNA, 15 bp, Homo sapiens
caatcttatgggaca

SEQ ID NO: 1300855 - DNA, 15 bp, Homo sapiens
acaatcttatgggac

SEQ ID NO: 1300856 - DNA, 15 bp, Homo sapiens
cacaatcttatggga

SEQ ID NO: 1300857 - DNA, 15 bp, Homo sapiens
ccacaatcttatggg

SEQ ID NO: 1300858 - DNA, 15 bp, Homo sapiens
cccacaatcttatgg

SEQ ID NO: 1300859 - DNA, 15 bp, Homo sapiens
gcccacaatcttatg

SEQ ID NO: 1300860 - DNA, 15 bp, Homo sapiens
ggcccacaatcttat

SEQ ID NO: 1300861 - DNA, 15 bp, Homo sapiens
aggcccacaatctta

SEQ ID NO: 1300862 - DNA, 15 bp, Homo sapiens
aaggcccacaatctt

SEQ ID NO: 1300863 - DNA, 15 bp, Homo sapiens
caaggcccacaatct

SEQ ID NO: 1300864 - DNA, 15 bp, Homo sapiens
ccaaggcccacaatc

SEQ ID NO: 1300865 - DNA, 15 bp, Homo sapiens
gccaaggcccacaat

SEQ ID NO: 1300866 - DNA, 15 bp, Homo sapiens
ggccaaggcccacaa

SEQ ID NO: 1300867 - DNA, 15 bp, Homo sapiens
tggccaaggcccaca

SEQ ID NO: 1300868 - DNA, 15 bp, Homo sapiens
gtggccaaggcccac

SEQ ID NO: 1300869 - DNA, 15 bp, Homo sapiens
agtggccaaggccca

SEQ ID NO: 1300870 - DNA, 15 bp, Homo sapiens
cagtggccaaggccc

SEQ ID NO: 1300871 - DNA, 15 bp, Homo sapiens
gcagtggccaaggcc

SEQ ID NO: 1300872 - DNA, 15 bp, Homo sapiens
tgcagtggccaaggc

SEQ ID NO: 1300873 - DNA, 15 bp, Homo sapiens
ctgcagtggccaagg

SEQ ID NO: 1300874 - DNA, 15 bp, Homo sapiens
gctgcagtggccaag

SEQ ID NO: 1300875 - DNA, 15 bp, Homo sapiens
tgctgcagtggccaa

SEQ ID NO: 1300876 - DNA, 15 bp, Homo sapiens
atgctgcagtggcca

SEQ ID NO: 1300877 - DNA, 15 bp, Homo sapiens
catgctgcagtggcc

SEQ ID NO: 1300878 - DNA, 15 bp, Homo sapiens
gcatgctgcagtggc

SEQ ID NO: 1300879 - DNA, 15 bp, Homo sapiens
tgcatgctgcagtgg

SEQ ID NO: 1300880 - DNA, 15 bp, Homo sapiens
gtgcatgctgcagtg

SEQ ID NO: 1300881 - DNA, 15 bp, Homo sapiens
tgtgcatgctgcagt

SEQ ID NO: 1300882 - DNA, 15 bp, Homo sapiens
atgtgcatgctgcag

SEQ ID NO: 1300883 - DNA, 15 bp, Homo sapiens
gatgtgcatgctgca

SEQ ID NO: 1300884 - DNA, 15 bp, Homo sapiens
ggatgtgcatgctgc

SEQ ID NO: 1300885 - DNA, 15 bp, Homo sapiens
gggatgtgcatgctg

SEQ ID NO: 1300886 - DNA, 15 bp, Homo sapiens
agggatgtgcatgct

SEQ ID NO: 1300887 - DNA, 15 bp, Homo sapiens
cagggatgtgcatgc

SEQ ID NO: 1300888 - DNA, 15 bp, Homo sapiens
tcagggatgtgcatg

SEQ ID NO: 1300889 - DNA, 15 bp, Homo sapiens
ttcagggatgtgcat

SEQ ID NO: 1300890 - DNA, 15 bp, Homo sapiens
attcagggatgtgca

SEQ ID NO: 1300891 - DNA, 15 bp, Homo sapiens
gattcagggatgtgc

SEQ ID NO: 1300892 - DNA, 15 bp, Homo sapiens
ggattcagggatgtg

SEQ ID NO: 1300893 - DNA, 15 bp, Homo sapiens
tggattcagggatgt

SEQ ID NO: 1300894 - DNA, 15 bp, Homo sapiens
gtggattcagggatg

SEQ ID NO: 1300895 - DNA, 15 bp, Homo sapiens
tgtggattcagggat

SEQ ID NO: 1300896 - DNA, 15 bp, Homo sapiens
gtgtggattcaggga

SEQ ID NO: 1300897 - DNA, 15 bp, Homo sapiens
agtgtggattcaggg

SEQ ID NO: 1300898 - DNA, 15 bp, Homo sapiens
gagtgtggattcagg

SEQ ID NO: 1300899 - DNA, 15 bp, Homo sapiens
agagtgtggattcag

SEQ ID NO: 1300900 - DNA, 15 bp, Homo sapiens
aagagtgtggattca

SEQ ID NO: 1300901 - DNA, 15 bp, Homo sapiens
taagagtgtggattc

SEQ ID NO: 1300902 - DNA, 15 bp, Homo sapiens
ataagagtgtggatt

SEQ ID NO: 1300903 - DNA, 15 bp, Homo sapiens
cataagagtgtggat

SEQ ID NO: 1300904 - DNA, 15 bp, Homo sapiens
ccataagagtgtgga

SEQ ID NO: 1300905 - DNA, 15 bp, Homo sapiens
accataagagtgtgg

SEQ ID NO: 1300906 - DNA, 15 bp, Homo sapiens
taccataagagtgtg

SEQ ID NO: 1300907 - DNA, 15 bp, Homo sapiens
ataccataagagtgt

SEQ ID NO: 1300908 - DNA, 15 bp, Homo sapiens
gataccataagagtg

SEQ ID NO: 1300909 - DNA, 15 bp, Homo sapiens
cgataccataagagt

SEQ ID NO: 1300910 - DNA, 15 bp, Homo sapiens
tcgataccataagag

SEQ ID NO: 1300911 - DNA, 15 bp, Homo sapiens
ctcgataccataaga

SEQ ID NO: 1300912 - DNA, 15 bp, Homo sapiens
cctcgataccataag

SEQ ID NO: 1300913 - DNA, 15 bp, Homo sapiens
gcctcgataccataa

SEQ ID NO: 1300914 - DNA, 15 bp, Homo sapiens
ggcctcgataccata

SEQ ID NO: 1300915 - DNA, 15 bp, Homo sapiens
aggcctcgataccat

SEQ ID NO: 1300916 - DNA, 15 bp, Homo sapiens
aaggcctcgatacca

SEQ ID NO: 1300917 - DNA, 15 bp, Homo sapiens
caaggcctcgatacc

SEQ ID NO: 1300918 - DNA, 15 bp, Homo sapiens
ccaaggcctcgatac

SEQ ID NO: 1300919 - DNA, 15 bp, Homo sapiens
cccaaggcctcgata

SEQ ID NO: 1300920 - DNA, 15 bp, Homo sapiens
gcccaaggcctcgat

SEQ ID NO: 1300921 - DNA, 15 bp, Homo sapiens
tgcccaaggcctcga

SEQ ID NO: 1300922 - DNA, 15 bp, Homo sapiens
ttgcccaaggcctcg

SEQ ID NO: 1300923 - DNA, 15 bp, Homo sapiens
tttgcccaaggcctc

SEQ ID NO: 1300924 - DNA, 15 bp, Homo sapiens
atttgcccaaggcct

SEQ ID NO: 1300925 - DNA, 15 bp, Homo sapiens
catttgcccaaggcc

SEQ ID NO: 1300926 - DNA, 15 bp, Homo sapiens
tcatttgcccaaggc

SEQ ID NO: 1300927 - DNA, 15 bp, Homo sapiens
cagtcatttgcccaa

SEQ ID NO: 1300928 - DNA, 15 bp, Homo sapiens
tcagtcatttgccca

SEQ ID NO: 1300929 - DNA, 15 bp, Homo sapiens
ttcagtcatttgccc

SEQ ID NO: 1300930 - DNA, 15 bp, Homo sapiens
attcagtcatttgcc

SEQ ID NO: 1300931 - DNA, 15 bp, Homo sapiens
aattcagtcatttgc

SEQ ID NO: 1300932 - DNA, 15 bp, Homo sapiens
aaattcagtcatttg

SEQ ID NO: 1300933 - DNA, 15 bp, Homo sapiens
gaaattcagtcattt

SEQ ID NO: 1300934 - DNA, 15 bp, Homo sapiens
ggaaattcagtcatt

SEQ ID NO: 1300935 - DNA, 15 bp, Homo sapiens
gggaaattcagtcat

SEQ ID NO: 1300936 - DNA, 15 bp, Homo sapiens
agggaaattcagtca

SEQ ID NO: 1300937 - DNA, 15 bp, Homo sapiens
aagggaaattcagtc

SEQ ID NO: 1300938 - DNA, 15 bp, Homo sapiens
caagggaaattcagt

SEQ ID NO: 1300939 - DNA, 15 bp, Homo sapiens
tcaagggaaattcag

SEQ ID NO: 1300940 - DNA, 15 bp, Homo sapiens
gtcaagggaaattca

SEQ ID NO: 1300941 - DNA, 15 bp, Homo sapiens
ggtcaagggaaattc

SEQ ID NO: 1300942 - DNA, 15 bp, Homo sapiens
aggtcaagggaaatt

SEQ ID NO: 1300943 - DNA, 15 bp, Homo sapiens
aaggtcaagggaaat

SEQ ID NO: 1300944 - DNA, 15 bp, Homo sapiens
gaaggtcaagggaaa

SEQ ID NO: 1300945 - DNA, 15 bp, Homo sapiens
ggaaggtcaagggaa

SEQ ID NO: 1300946 - DNA, 15 bp, Homo sapiens
gggaaggtcaaggga

SEQ ID NO: 1300947 - DNA, 15 bp, Homo sapiens
agggaaggtcaaggg

SEQ ID NO: 1300948 - DNA, 15 bp, Homo sapiens
aagggaaggtcaagg

SEQ ID NO: 1300949 - DNA, 15 bp, Homo sapiens
gaagggaaggtcaag

SEQ ID NO: 1300950 - DNA, 15 bp, Homo sapiens
ggaagggaaggtcaa

SEQ ID NO: 1300951 - DNA, 15 bp, Homo sapiens
tggaagggaaggtca

SEQ ID NO: 1300952 - DNA, 15 bp, Homo sapiens
gtggaagggaaggtc

SEQ ID NO: 1300953 - DNA, 15 bp, Homo sapiens
ggtggaagggaaggt

SEQ ID NO: 1300954 - DNA, 15 bp, Homo sapiens
aggtggaagggaagg

SEQ ID NO: 1300955 - DNA, 15 bp, Homo sapiens
caggtggaagggaag

SEQ ID NO: 1300956 - DNA, 15 bp, Homo sapiens
acaggtggaagggaa

SEQ ID NO: 1300957 - DNA, 15 bp, Homo sapiens
tacaggtggaaggga

SEQ ID NO: 1300958 - DNA, 15 bp, Homo sapiens
ttacaggtggaaggg

SEQ ID NO: 1300959 - DNA, 15 bp, Homo sapiens
tttacaggtggaagg

SEQ ID NO: 1300960 - DNA, 15 bp, Homo sapiens
ttttacaggtggaag

SEQ ID NO: 1300961 - DNA, 15 bp, Homo sapiens
attttacaggtggaa

SEQ ID NO: 1300962 - DNA, 15 bp, Homo sapiens
cattttacaggtgga

SEQ ID NO: 1300963 - DNA, 15 bp, Homo sapiens
ccattttacaggtgg

SEQ ID NO: 1300964 - DNA, 15 bp, Homo sapiens
gtccccattttacag

SEQ ID NO: 1300965 - DNA, 15 bp, Homo sapiens
tgtccccattttaca

SEQ ID NO: 1300966 - DNA, 15 bp, Homo sapiens
ttgtccccattttac

SEQ ID NO: 1300967 - DNA, 15 bp, Homo sapiens
attgtccccatttta

SEQ ID NO: 1300968 - DNA, 15 bp, Homo sapiens
cattgtccccatttt

SEQ ID NO: 1300969 - DNA, 15 bp, Homo sapiens
tcattgtccccattt

SEQ ID NO: 1300970 - DNA, 15 bp, Homo sapiens
atcattgtccccatt

SEQ ID NO: 1300971 - DNA, 15 bp, Homo sapiens
tatcattgtccccat

SEQ ID NO: 1300972 - DNA, 15 bp, Homo sapiens
ctatcattgtcccca

SEQ ID NO: 1300973 - DNA, 15 bp, Homo sapiens
actatcattgtcccc

SEQ ID NO: 1300974 - DNA, 15 bp, Homo sapiens
tactatcattgtccc

SEQ ID NO: 1300975 - DNA, 15 bp, Homo sapiens
ctactatcattgtcc

SEQ ID NO: 1300976 - DNA, 15 bp, Homo sapiens
actactatcattgtc

SEQ ID NO: 1300977 - DNA, 15 bp, Homo sapiens
aactactatcattgt

SEQ ID NO: 1300978 - DNA, 15 bp, Homo sapiens
taactactatcattg

SEQ ID NO: 1300979 - DNA, 15 bp, Homo sapiens
ataactactatcatt

SEQ ID NO: 1300980 - DNA, 15 bp, Homo sapiens
gataactactatcat

SEQ ID NO: 1300981 - DNA, 15 bp, Homo sapiens
agataactactatca

SEQ ID NO: 1300982 - DNA, 15 bp, Homo sapiens
gagataactactatc

SEQ ID NO: 1300983 - DNA, 15 bp, Homo sapiens
tgagataactactat

SEQ ID NO: 1300984 - DNA, 15 bp, Homo sapiens
gtgagataactacta

SEQ ID NO: 1300985 - DNA, 15 bp, Homo sapiens
tgtgagataactact

SEQ ID NO: 1300986 - DNA, 15 bp, Homo sapiens
ctgtgagataactac

SEQ ID NO: 1300987 - DNA, 15 bp, Homo sapiens
cctgtgagataacta

SEQ ID NO: 1300988 - DNA, 15 bp, Homo sapiens
ccctgtgagataact

SEQ ID NO: 1300989 - DNA, 15 bp, Homo sapiens
accctgtgagataac

SEQ ID NO: 1300990 - DNA, 15 bp, Homo sapiens
taccctgtgagataa

SEQ ID NO: 1300991 - DNA, 15 bp, Homo sapiens
ctaccctgtgagata

SEQ ID NO: 1300992 - DNA, 15 bp, Homo sapiens
cctaccctgtgagat

SEQ ID NO: 1300993 - DNA, 15 bp, Homo sapiens
gcctaccctgtgaga

SEQ ID NO: 1300994 - DNA, 15 bp, Homo sapiens
cgcctaccctgtgag

SEQ ID NO: 1300995 - DNA, 15 bp, Homo sapiens
acgcctaccctgtga

SEQ ID NO: 1300996 - DNA, 15 bp, Homo sapiens
gacgcctaccctgtg

SEQ ID NO: 1300997 - DNA, 15 bp, Homo sapiens
tgacgcctaccctgt

SEQ ID NO: 1300998 - DNA, 15 bp, Homo sapiens
ctgacgcctaccctg

SEQ ID NO: 1300999 - DNA, 15 bp, Homo sapiens
tctgacgcctaccct

SEQ ID NO: 1301000 - DNA, 15 bp, Homo sapiens
atctgacgcctaccc

SEQ ID NO: 1301001 - DNA, 15 bp, Homo sapiens
aatctgacgcctacc

SEQ ID NO: 1301002 - DNA, 15 bp, Homo sapiens
aaatctgacgcctac

SEQ ID NO: 1301003 - DNA, 15 bp, Homo sapiens
taaatctgacgccta

SEQ ID NO: 1301004 - DNA, 15 bp, Homo sapiens
ttaaatctgacgcct

SEQ ID NO: 1301005 - DNA, 15 bp, Homo sapiens
attaaatctgacgcc

SEQ ID NO: 1301006 - DNA, 15 bp, Homo sapiens
cattaaatctgacgc

SEQ ID NO: 1301007 - DNA, 15 bp, Homo sapiens
tcattaaatctgacg

SEQ ID NO: 1301008 - DNA, 15 bp, Homo sapiens
ctcattaaatctgac

SEQ ID NO: 1301009 - DNA, 15 bp, Homo sapiens
gctcattaaatctga

SEQ ID NO: 1301010 - DNA, 15 bp, Homo sapiens
agctcattaaatctg

SEQ ID NO: 1301011 - DNA, 15 bp, Homo sapiens
tagctcattaaatct

SEQ ID NO: 1301012 - DNA, 15 bp, Homo sapiens
ttagctcattaaatc

SEQ ID NO: 1301013 - DNA, 15 bp, Homo sapiens
attagctcattaaat

SEQ ID NO: 1301014 - DNA, 15 bp, Homo sapiens
tattagctcattaaa

SEQ ID NO: 1301015 - DNA, 15 bp, Homo sapiens
ctattagctcattaa

SEQ ID NO: 1301016 - DNA, 15 bp, Homo sapiens
tctattagctcatta

SEQ ID NO: 1301017 - DNA, 15 bp, Homo sapiens
atctattagctcatt

SEQ ID NO: 1301018 - DNA, 15 bp, Homo sapiens
catctattagctcat

SEQ ID NO: 1301019 - DNA, 15 bp, Homo sapiens
gcatctattagctca

SEQ ID NO: 1301020 - DNA, 15 bp, Homo sapiens
tgcatctattagctc

SEQ ID NO: 1301021 - DNA, 15 bp, Homo sapiens
ttgcatctattagct

SEQ ID NO: 1301022 - DNA, 15 bp, Homo sapiens
tttgcatctattagc

SEQ ID NO: 1301023 - DNA, 15 bp, Homo sapiens
ctttgcatctattag

SEQ ID NO: 1301024 - DNA, 15 bp, Homo sapiens
gctttgcatctatta

SEQ ID NO: 1301025 - DNA, 15 bp, Homo sapiens
ggctttgcatctatt

SEQ ID NO: 1301026 - DNA, 15 bp, Homo sapiens
gggctttgcatctat

SEQ ID NO: 1301027 - DNA, 15 bp, Homo sapiens
agggctttgcatcta

SEQ ID NO: 1301028 - DNA, 15 bp, Homo sapiens
aagggctttgcatct

SEQ ID NO: 1301029 - DNA, 15 bp, Homo sapiens
caagggctttgcatc

SEQ ID NO: 1301030 - DNA, 15 bp, Homo sapiens
gcaagggctttgcat

SEQ ID NO: 1301031 - DNA, 15 bp, Homo sapiens
tgcaagggctttgca

SEQ ID NO: 1301032 - DNA, 15 bp, Homo sapiens
atgcaagggctttgc

SEQ ID NO: 1301033 - DNA, 15 bp, Homo sapiens
catgcaagggctttg

SEQ ID NO: 1301034 - DNA, 15 bp, Homo sapiens
acatgcaagggcttt

SEQ ID NO: 1301035 - DNA, 15 bp, Homo sapiens
cacatgcaagggctt

SEQ ID NO: 1301036 - DNA, 15 bp, Homo sapiens
gcacatgcaagggct

SEQ ID NO: 1301037 - DNA, 15 bp, Homo sapiens
ggcacatgcaagggc

SEQ ID NO: 1301038 - DNA, 15 bp, Homo sapiens
aggcacatgcaaggg

SEQ ID NO: 1301039 - DNA, 15 bp, Homo sapiens
caggcacatgcaagg

SEQ ID NO: 1301040 - DNA, 15 bp, Homo sapiens
ccaggcacatgcaag

SEQ ID NO: 1301041 - DNA, 15 bp, Homo sapiens
gccaggcacatgcaa

SEQ ID NO: 1301042 - DNA, 15 bp, Homo sapiens
tgccaggcacatgca

SEQ ID NO: 1301043 - DNA, 15 bp, Homo sapiens
atgccaggcacatgc

SEQ ID NO: 1301044 - DNA, 15 bp, Homo sapiens
tatgccaggcacatg

SEQ ID NO: 1301045 - DNA, 15 bp, Homo sapiens
atatgccaggcacat

SEQ ID NO: 1301046 - DNA, 15 bp, Homo sapiens
tatatgccaggcaca

SEQ ID NO: 1301047 - DNA, 15 bp, Homo sapiens
ttatatgccaggcac

SEQ ID NO: 1301048 - DNA, 15 bp, Homo sapiens
attatatgccaggca

SEQ ID NO: 1301049 - DNA, 15 bp, Homo sapiens
tattatatgccaggc

SEQ ID NO: 1301050 - DNA, 15 bp, Homo sapiens
ttattatatgccagg

SEQ ID NO: 1301051 - DNA, 15 bp, Homo sapiens
tttattatatgccag

SEQ ID NO: 1301052 - DNA, 15 bp, Homo sapiens
atttattatatgcca

SEQ ID NO: 1301053 - DNA, 15 bp, Homo sapiens
catttattatatgcc

SEQ ID NO: 1301054 - DNA, 15 bp, Homo sapiens
gcatttattatatgc

SEQ ID NO: 1301055 - DNA, 15 bp, Homo sapiens
agcatttattatatg

SEQ ID NO: 1301056 - DNA, 15 bp, Homo sapiens
tagcatttattatat

SEQ ID NO: 1301057 - DNA, 15 bp, Homo sapiens
gtagcatttattata

SEQ ID NO: 1301058 - DNA, 15 bp, Homo sapiens
tgtagcatttattat

SEQ ID NO: 1301059 - DNA, 15 bp, Homo sapiens
atgtagcatttatta

SEQ ID NO: 1301060 - DNA, 15 bp, Homo sapiens
aatgtagcatttatt

SEQ ID NO: 1301061 - DNA, 15 bp, Homo sapiens
caatgtagcatttat

SEQ ID NO: 1301062 - DNA, 15 bp, Homo sapiens
acaatgtagcattta

SEQ ID NO: 1301063 - DNA, 15 bp, Homo sapiens
cacaatgtagcattt

SEQ ID NO: 1301064 - DNA, 15 bp, Homo sapiens
acacaatgtagcatt

SEQ ID NO: 1301065 - DNA, 15 bp, Homo sapiens
aacacaatgtagcat

SEQ ID NO: 1301066 - DNA, 15 bp, Homo sapiens
aaacacaatgtagca

SEQ ID NO: 1301067 - DNA, 15 bp, Homo sapiens
aaaacacaatgtagc

SEQ ID NO: 1301068 - DNA, 15 bp, Homo sapiens
aaaaacacaatgtag

SEQ ID NO: 1301069 - DNA, 15 bp, Homo sapiens
taaaaacacaatgta

SEQ ID NO: 1301070 - DNA, 15 bp, Homo sapiens
ataaaaacacaatgt

SEQ ID NO: 1301071 - DNA, 15 bp, Homo sapiens
gataaaaacacaatg

SEQ ID NO: 1301072 - DNA, 15 bp, Homo sapiens
tgataaaaacacaat

SEQ ID NO: 1301073 - DNA, 15 bp, Homo sapiens
atgataaaaacacaa

SEQ ID NO: 1301074 - DNA, 15 bp, Homo sapiens
aatgataaaaacaca

SEQ ID NO: 1301075 - DNA, 15 bp, Homo sapiens
taatgataaaaacac

SEQ ID NO: 1301076 - DNA, 15 bp, Homo sapiens
ttaatgataaaaaca

SEQ ID NO: 1301077 - DNA, 15 bp, Homo sapiens
tttaatgataaaaac

SEQ ID NO: 1301078 - DNA, 15 bp, Homo sapiens
ttttaatgataaaaa

SEQ ID NO: 1301079 - DNA, 15 bp, Homo sapiens
attttaatgataaaa

SEQ ID NO: 1301080 - DNA, 15 bp, Homo sapiens
aattttaatgataaa

SEQ ID NO: 1301081 - DNA, 15 bp, Homo sapiens
taattttaatgataa

SEQ ID NO: 1301082 - DNA, 15 bp, Homo sapiens
ataattttaatgata

SEQ ID NO: 1301083 - DNA, 15 bp, Homo sapiens
gataattttaatgat

SEQ ID NO: 1301084 - DNA, 15 bp, Homo sapiens
agataattttaatga

SEQ ID NO: 1301085 - DNA, 15 bp, Homo sapiens
aagataattttaatg

SEQ ID NO: 1301086 - DNA, 15 bp, Homo sapiens
taagataattttaat

SEQ ID NO: 1301087 - DNA, 15 bp, Homo sapiens
ttaagataattttaa

SEQ ID NO: 1301088 - DNA, 15 bp, Homo sapiens
attaagataatttta

SEQ ID NO: 1301089 - DNA, 15 bp, Homo sapiens
tattaagataatttt

SEQ ID NO: 1301090 - DNA, 15 bp, Homo sapiens
atattaagataattt

SEQ ID NO: 1301091 - DNA, 15 bp, Homo sapiens
aatattaagataatt

SEQ ID NO: 1301092 - DNA, 15 bp, Homo sapiens
taatattaagataat

SEQ ID NO: 1301093 - DNA, 15 bp, Homo sapiens
ataatattaagataa

SEQ ID NO: 1301094 - DNA, 15 bp, Homo sapiens
aataatattaagata

SEQ ID NO: 1301095 - DNA, 15 bp, Homo sapiens
aaataatattaagat

SEQ ID NO: 1301096 - DNA, 15 bp, Homo sapiens
aaaataatattaaga

SEQ ID NO: 1301097 - DNA, 15 bp, Homo sapiens
caaaataatattaag

SEQ ID NO: 1301098 - DNA, 15 bp, Homo sapiens
gcaaaataatattaa

SEQ ID NO: 1301099 - DNA, 15 bp, Homo sapiens
agcaaaataatatta

SEQ ID NO: 1301100 - DNA, 15 bp, Homo sapiens
cagcaaaataatatt

SEQ ID NO: 1301101 - DNA, 15 bp, Homo sapiens
acagcaaaataatat

SEQ ID NO: 1301102 - DNA, 15 bp, Homo sapiens
aacagcaaaataata

SEQ ID NO: 1301103 - DNA, 15 bp, Homo sapiens
caacagcaaaataat

SEQ ID NO: 1301104 - DNA, 15 bp, Homo sapiens
gcaacagcaaaataa

SEQ ID NO: 1301105 - DNA, 15 bp, Homo sapiens
agcaacagcaaaata

SEQ ID NO: 1301106 - DNA, 15 bp, Homo sapiens
cagcaacagcaaaat

SEQ ID NO: 1301107 - DNA, 15 bp, Homo sapiens
acagcaacagcaaaa

SEQ ID NO: 1301108 - DNA, 15 bp, Homo sapiens
aacagcaacagcaaa

SEQ ID NO: 1301109 - DNA, 15 bp, Homo sapiens
taacagcaacagcaa

SEQ ID NO: 1301110 - DNA, 15 bp, Homo sapiens
ataacagcaacagca

SEQ ID NO: 1301111 - DNA, 15 bp, Homo sapiens
aataacagcaacagc

SEQ ID NO: 1301112 - DNA, 15 bp, Homo sapiens
taataacagcaacag

SEQ ID NO: 1301113 - DNA, 15 bp, Homo sapiens
ataataacagcaaca

SEQ ID NO: 1301114 - DNA, 15 bp, Homo sapiens
aataataacagcaac

SEQ ID NO: 1301115 - DNA, 15 bp, Homo sapiens
caataataacagcaa

SEQ ID NO: 1301116 - DNA, 15 bp, Homo sapiens
gcaataataacagca

SEQ ID NO: 1301117 - DNA, 15 bp, Homo sapiens
agcaataataacagc

SEQ ID NO: 1301118 - DNA, 15 bp, Homo sapiens
cagcaataataacag

SEQ ID NO: 1301119 - DNA, 15 bp, Homo sapiens
acagcaataataaca

SEQ ID NO: 1301120 - DNA, 15 bp, Homo sapiens
aacagcaataataac

SEQ ID NO: 1301121 - DNA, 15 bp, Homo sapiens
caacagcaataataa

SEQ ID NO: 1301122 - DNA, 15 bp, Homo sapiens
acaacagcaataata

SEQ ID NO: 1301123 - DNA, 15 bp, Homo sapiens
aacaacagcaataat

SEQ ID NO: 1301124 - DNA, 15 bp, Homo sapiens
taacaacagcaataa

SEQ ID NO: 1301125 - DNA, 15 bp, Homo sapiens
ataacaacagcaata

SEQ ID NO: 1301126 - DNA, 15 bp, Homo sapiens
aataacaacagcaat

SEQ ID NO: 1301127 - DNA, 15 bp, Homo sapiens
caataacaacagcaa

SEQ ID NO: 1301128 - DNA, 15 bp, Homo sapiens
gcaataacaacagca

SEQ ID NO: 1301129 - DNA, 15 bp, Homo sapiens
agcaataacaacagc

SEQ ID NO: 1301130 - DNA, 15 bp, Homo sapiens
aagcaataacaacag

SEQ ID NO: 1301131 - DNA, 15 bp, Homo sapiens
taagcaataacaaca

SEQ ID NO: 1301132 - DNA, 15 bp, Homo sapiens
ctaagcaataacaac

SEQ ID NO: 1301133 - DNA, 15 bp, Homo sapiens
tctaagcaataacaa

SEQ ID NO: 1301134 - DNA, 15 bp, Homo sapiens
atctaagcaataaca

SEQ ID NO: 1301135 - DNA, 15 bp, Homo sapiens
aatctaagcaataac

SEQ ID NO: 1301136 - DNA, 15 bp, Homo sapiens
caatctaagcaataa

SEQ ID NO: 1301137 - DNA, 15 bp, Homo sapiens
ccaatctaagcaata

SEQ ID NO: 1301138 - DNA, 15 bp, Homo sapiens
tccaatctaagcaat

SEQ ID NO: 1301139 - DNA, 15 bp, Homo sapiens
ttccaatctaagcaa

SEQ ID NO: 1301140 - DNA, 15 bp, Homo sapiens
gttccaatctaagca

SEQ ID NO: 1301141 - DNA, 15 bp, Homo sapiens
tgttccaatctaagc

SEQ ID NO: 1301142 - DNA, 15 bp, Homo sapiens
atgttccaatctaag

SEQ ID NO: 1301143 - DNA, 15 bp, Homo sapiens
catgttccaatctaa

SEQ ID NO: 1301144 - DNA, 15 bp, Homo sapiens
acatgttccaatcta

SEQ ID NO: 1301145 - DNA, 15 bp, Homo sapiens
gacatgttccaatct

SEQ ID NO: 1301146 - DNA, 15 bp, Homo sapiens
agacatgttccaatc

SEQ ID NO: 1301147 - DNA, 15 bp, Homo sapiens
aagacatgttccaat

SEQ ID NO: 1301148 - DNA, 15 bp, Homo sapiens
aaagacatgttccaa

SEQ ID NO: 1301149 - DNA, 15 bp, Homo sapiens
caaagacatgttcca

SEQ ID NO: 1301150 - DNA, 15 bp, Homo sapiens
gcaaagacatgttcc

SEQ ID NO: 1301151 - DNA, 15 bp, Homo sapiens
agcaaagacatgttc

SEQ ID NO: 1301152 - DNA, 15 bp, Homo sapiens
tagcaaagacatgtt

SEQ ID NO: 1301153 - DNA, 15 bp, Homo sapiens
atagcaaagacatgt

SEQ ID NO: 1301154 - DNA, 15 bp, Homo sapiens
aatagcaaagacatg

SEQ ID NO: 1301155 - DNA, 15 bp, Homo sapiens
aaatagcaaagacat

SEQ ID NO: 1301156 - DNA, 15 bp, Homo sapiens
taaatagcaaagaca

SEQ ID NO: 1301157 - DNA, 15 bp, Homo sapiens
ataaatagcaaagac

SEQ ID NO: 1301158 - DNA, 15 bp, Homo sapiens
tataaatagcaaaga

SEQ ID NO: 1301159 - DNA, 15 bp, Homo sapiens
ttataaatagcaaag

SEQ ID NO: 1301160 - DNA, 15 bp, Homo sapiens
gttataaatagcaaa

SEQ ID NO: 1301161 - DNA, 15 bp, Homo sapiens
agttataaatagcaa

SEQ ID NO: 1301162 - DNA, 15 bp, Homo sapiens
cagttataaatagca

SEQ ID NO: 1301163 - DNA, 15 bp, Homo sapiens
acagttataaatagc

SEQ ID NO: 1301164 - DNA, 15 bp, Homo sapiens
cacagttataaatag

SEQ ID NO: 1301165 - DNA, 15 bp, Homo sapiens
acacagttataaata

SEQ ID NO: 1301166 - DNA, 15 bp, Homo sapiens
cacacagttataaat

SEQ ID NO: 1301167 - DNA, 15 bp, Homo sapiens
tcacacagttataaa

SEQ ID NO: 1301168 - DNA, 15 bp, Homo sapiens
aaggtcacacagtta

SEQ ID NO: 1301169 - DNA, 15 bp, Homo sapiens
caaggtcacacagtt

SEQ ID NO: 1301170 - DNA, 15 bp, Homo sapiens
gttcaaggtcacaca

SEQ ID NO: 1301171 - DNA, 15 bp, Homo sapiens
tgttcaaggtcacac

SEQ ID NO: 1301172 - DNA, 15 bp, Homo sapiens
atgttcaaggtcaca

SEQ ID NO: 1301173 - DNA, 15 bp, Homo sapiens
tatgttcaaggtcac

SEQ ID NO: 1301174 - DNA, 15 bp, Homo sapiens
atatgttcaaggtca

SEQ ID NO: 1301175 - DNA, 15 bp, Homo sapiens
gatatgttcaaggtc

SEQ ID NO: 1301176 - DNA, 15 bp, Homo sapiens
tgatatgttcaaggt

SEQ ID NO: 1301177 - DNA, 15 bp, Homo sapiens
gtgatatgttcaagg

SEQ ID NO: 1301178 - DNA, 15 bp, Homo sapiens
agtgatatgttcaag

SEQ ID NO: 1301179 - DNA, 15 bp, Homo sapiens
aagtgatatgttcaa

SEQ ID NO: 1301180 - DNA, 15 bp, Homo sapiens
taagtgatatgttca

SEQ ID NO: 1301181 - DNA, 15 bp, Homo sapiens
ctaagtgatatgttc

SEQ ID NO: 1301182 - DNA, 15 bp, Homo sapiens
gctaagtgatatgtt

SEQ ID NO: 1301183 - DNA, 15 bp, Homo sapiens
ggctaagtgatatgt

SEQ ID NO: 1301184 - DNA, 15 bp, Homo sapiens
gggctaagtgatatg

SEQ ID NO: 1301185 - DNA, 15 bp, Homo sapiens
ggggctaagtgatat

SEQ ID NO: 1301186 - DNA, 15 bp, Homo sapiens
gggggctaagtgata

SEQ ID NO: 1301187 - DNA, 15 bp, Homo sapiens
tgggggctaagtgat

SEQ ID NO: 1301188 - DNA, 15 bp, Homo sapiens
atgggggctaagtga

SEQ ID NO: 1301189 - DNA, 15 bp, Homo sapiens
catgggggctaagtg

SEQ ID NO: 1301190 - DNA, 15 bp, Homo sapiens
acatgggggctaagt

SEQ ID NO: 1301191 - DNA, 15 bp, Homo sapiens
cacatgggggctaag

SEQ ID NO: 1301192 - DNA, 15 bp, Homo sapiens
gcacatgggggctaa

SEQ ID NO: 1301193 - DNA, 15 bp, Homo sapiens
ggcacatgggggcta

SEQ ID NO: 1301194 - DNA, 15 bp, Homo sapiens
tggcacatgggggct

SEQ ID NO: 1301195 - DNA, 15 bp, Homo sapiens
atggcacatgggggc

SEQ ID NO: 1301196 - DNA, 15 bp, Homo sapiens
catggcacatggggg

SEQ ID NO: 1301197 - DNA, 15 bp, Homo sapiens
tcatggcacatgggg

SEQ ID NO: 1301198 - DNA, 15 bp, Homo sapiens
gtcatggcacatggg

SEQ ID NO: 1301199 - DNA, 15 bp, Homo sapiens
tgtcatggcacatgg

SEQ ID NO: 1301200 - DNA, 15 bp, Homo sapiens
atgtcatggcacatg

SEQ ID NO: 1301201 - DNA, 15 bp, Homo sapiens
aatgtcatggcacat

SEQ ID NO: 1301202 - DNA, 15 bp, Homo sapiens
aaatgtcatggcaca

SEQ ID NO: 1301203 - DNA, 15 bp, Homo sapiens
caaatgtcatggcac

SEQ ID NO: 1301204 - DNA, 15 bp, Homo sapiens
acaaatgtcatggca

SEQ ID NO: 1301205 - DNA, 15 bp, Homo sapiens
tacaaatgtcatggc

SEQ ID NO: 1301206 - DNA, 15 bp, Homo sapiens
ttacaaatgtcatgg

SEQ ID NO: 1301207 - DNA, 15 bp, Homo sapiens
tttacaaatgtcatg

SEQ ID NO: 1301208 - DNA, 15 bp, Homo sapiens
ttttacaaatgtcat

SEQ ID NO: 1301209 - DNA, 15 bp, Homo sapiens
attttacaaatgtca

SEQ ID NO: 1301210 - DNA, 15 bp, Homo sapiens
cattttacaaatgtc

SEQ ID NO: 1301211 - DNA, 15 bp, Homo sapiens
ccattttacaaatgt

SEQ ID NO: 1301212 - DNA, 15 bp, Homo sapiens
cccattttacaaatg

SEQ ID NO: 1301213 - DNA, 15 bp, Homo sapiens
ccccattttacaaat

SEQ ID NO: 1301214 - DNA, 15 bp, Homo sapiens
tccccattttacaaa

SEQ ID NO: 1301215 - DNA, 15 bp, Homo sapiens
ttccccattttacaa

SEQ ID NO: 1301216 - DNA, 15 bp, Homo sapiens
tttccccattttaca

SEQ ID NO: 1301217 - DNA, 15 bp, Homo sapiens
ctttccccattttac

SEQ ID NO: 1301218 - DNA, 15 bp, Homo sapiens
tctttccccatttta

SEQ ID NO: 1301219 - DNA, 15 bp, Homo sapiens
ctctttccccatttt

SEQ ID NO: 1301220 - DNA, 15 bp, Homo sapiens
cctctttccccattt

SEQ ID NO: 1301221 - DNA, 15 bp, Homo sapiens
tcctctttccccatt

SEQ ID NO: 1301222 - DNA, 15 bp, Homo sapiens
ctcctctttccccat

SEQ ID NO: 1301223 - DNA, 15 bp, Homo sapiens
actcctctttcccca

SEQ ID NO: 1301224 - DNA, 15 bp, Homo sapiens
gactcctctttcccc

SEQ ID NO: 1301225 - DNA, 15 bp, Homo sapiens
agactcctctttccc

SEQ ID NO: 1301226 - DNA, 15 bp, Homo sapiens
cagactcctctttcc

SEQ ID NO: 1301227 - DNA, 15 bp, Homo sapiens
acagactcctctttc

SEQ ID NO: 1301228 - DNA, 15 bp, Homo sapiens
aacagactcctcttt

SEQ ID NO: 1301229 - DNA, 15 bp, Homo sapiens
gaacagactcctctt

SEQ ID NO: 1301230 - DNA, 15 bp, Homo sapiens
ggaacagactcctct

SEQ ID NO: 1301231 - DNA, 15 bp, Homo sapiens
aggaacagactcctc

SEQ ID NO: 1301232 - DNA, 15 bp, Homo sapiens
aaggaacagactcct

SEQ ID NO: 1301233 - DNA, 15 bp, Homo sapiens
caaggaacagactcc

SEQ ID NO: 1301234 - DNA, 15 bp, Homo sapiens
ccaaggaacagactc

SEQ ID NO: 1301235 - DNA, 15 bp, Homo sapiens
accaaggaacagact

SEQ ID NO: 1301236 - DNA, 15 bp, Homo sapiens
caccaaggaacagac

SEQ ID NO: 1301237 - DNA, 15 bp, Homo sapiens
gcaccaaggaacaga

SEQ ID NO: 1301238 - DNA, 15 bp, Homo sapiens
tgcaccaaggaacag

SEQ ID NO: 1301239 - DNA, 15 bp, Homo sapiens
ctgcaccaaggaaca

SEQ ID NO: 1301240 - DNA, 15 bp, Homo sapiens
gctgcaccaaggaac

SEQ ID NO: 1301241 - DNA, 15 bp, Homo sapiens
agctgcaccaaggaa

SEQ ID NO: 1301242 - DNA, 15 bp, Homo sapiens
cagctgcaccaagga

SEQ ID NO: 1301243 - DNA, 15 bp, Homo sapiens
gcagctgcaccaagg

SEQ ID NO: 1301244 - DNA, 15 bp, Homo sapiens
tgcagctgcaccaag

SEQ ID NO: 1301245 - DNA, 15 bp, Homo sapiens
ttgcagctgcaccaa

SEQ ID NO: 1301246 - DNA, 15 bp, Homo sapiens
cttgcagctgcacca

SEQ ID NO: 1301247 - DNA, 15 bp, Homo sapiens
ccttgcagctgcacc

SEQ ID NO: 1301248 - DNA, 15 bp, Homo sapiens
tccttgcagctgcac

SEQ ID NO: 1301249 - DNA, 15 bp, Homo sapiens
atccttgcagctgca

SEQ ID NO: 1301250 - DNA, 15 bp, Homo sapiens
catccttgcagctgc

SEQ ID NO: 1301251 - DNA, 15 bp, Homo sapiens
acatccttgcagctg

SEQ ID NO: 1301252 - DNA, 15 bp, Homo sapiens
gacatccttgcagct

SEQ ID NO: 1301253 - DNA, 15 bp, Homo sapiens
tgacatccttgcagc

SEQ ID NO: 1301254 - DNA, 15 bp, Homo sapiens
ctgacatccttgcag

SEQ ID NO: 1301255 - DNA, 15 bp, Homo sapiens
actgacatccttgca

SEQ ID NO: 1301256 - DNA, 15 bp, Homo sapiens
tactgacatccttgc

SEQ ID NO: 1301257 - DNA, 15 bp, Homo sapiens
ctactgacatccttg

SEQ ID NO: 1301258 - DNA, 15 bp, Homo sapiens
cctactgacatcctt

SEQ ID NO: 1301259 - DNA, 15 bp, Homo sapiens
acctactgacatcct

SEQ ID NO: 1301260 - DNA, 15 bp, Homo sapiens
aacctactgacatcc

SEQ ID NO: 1301261 - DNA, 15 bp, Homo sapiens
caacctactgacatc

SEQ ID NO: 1301262 - DNA, 15 bp, Homo sapiens
ccaacctactgacat

SEQ ID NO: 1301263 - DNA, 15 bp, Homo sapiens
gccaacctactgaca

SEQ ID NO: 1301264 - DNA, 15 bp, Homo sapiens
tgccaacctactgac

SEQ ID NO: 1301265 - DNA, 15 bp, Homo sapiens
gtgccaacctactga

SEQ ID NO: 1301266 - DNA, 15 bp, Homo sapiens
tgtgccaacctactg

SEQ ID NO: 1301267 - DNA, 15 bp, Homo sapiens
ctgtgccaacctact

SEQ ID NO: 1301268 - DNA, 15 bp, Homo sapiens
cctgtgccaacctac

SEQ ID NO: 1301269 - DNA, 15 bp, Homo sapiens
tcctgtgccaaccta

SEQ ID NO: 1301270 - DNA, 15 bp, Homo sapiens
ttcctgtgccaacct

SEQ ID NO: 1301271 - DNA, 15 bp, Homo sapiens
tttcctgtgccaacc

SEQ ID NO: 1301272 - DNA, 15 bp, Homo sapiens
ctttcctgtgccaac

SEQ ID NO: 1301273 - DNA, 15 bp, Homo sapiens
cctttcctgtgccaa

SEQ ID NO: 1301274 - DNA, 15 bp, Homo sapiens
gcctttcctgtgcca

SEQ ID NO: 1301275 - DNA, 15 bp, Homo sapiens
ggcctttcctgtgcc

SEQ ID NO: 1301276 - DNA, 15 bp, Homo sapiens
aggcctttcctgtgc

SEQ ID NO: 1301277 - DNA, 15 bp, Homo sapiens
aaggcctttcctgtg

SEQ ID NO: 1301278 - DNA, 15 bp, Homo sapiens
aaaggcctttcctgt

SEQ ID NO: 1301279 - DNA, 15 bp, Homo sapiens
caaaggcctttcctg

SEQ ID NO: 1301280 - DNA, 15 bp, Homo sapiens
tcaaaggcctttcct

SEQ ID NO: 1301281 - DNA, 15 bp, Homo sapiens
ttcaaaggcctttcc

SEQ ID NO: 1301282 - DNA, 15 bp, Homo sapiens
cttcaaaggcctttc

SEQ ID NO: 1301283 - DNA, 15 bp, Homo sapiens
gcttcaaaggccttt

SEQ ID NO: 1301284 - DNA, 15 bp, Homo sapiens
tgcttcaaaggcctt

SEQ ID NO: 1301285 - DNA, 15 bp, Homo sapiens
ctgcttcaaaggcct

SEQ ID NO: 1301286 - DNA, 15 bp, Homo sapiens
gctgcttcaaaggcc

SEQ ID NO: 1301287 - DNA, 15 bp, Homo sapiens
tgctgcttcaaaggc

SEQ ID NO: 1301288 - DNA, 15 bp, Homo sapiens
atgctgcttcaaagg

SEQ ID NO: 1301289 - DNA, 15 bp, Homo sapiens
gatgctgcttcaaag

SEQ ID NO: 1301290 - DNA, 15 bp, Homo sapiens
tgatgctgcttcaaa

SEQ ID NO: 1301291 - DNA, 15 bp, Homo sapiens
ctgatgctgcttcaa

SEQ ID NO: 1301292 - DNA, 15 bp, Homo sapiens
actgatgctgcttca

SEQ ID NO: 1301293 - DNA, 15 bp, Homo sapiens
cactgatgctgcttc

SEQ ID NO: 1301294 - DNA, 15 bp, Homo sapiens
gcactgatgctgctt

SEQ ID NO: 1301295 - DNA, 15 bp, Homo sapiens
tgcactgatgctgct

SEQ ID NO: 1301296 - DNA, 15 bp, Homo sapiens
ctgcactgatgctgc

SEQ ID NO: 1301297 - DNA, 15 bp, Homo sapiens
cctgcactgatgctg

SEQ ID NO: 1301298 - DNA, 15 bp, Homo sapiens
ccctgcactgatgct

SEQ ID NO: 1301299 - DNA, 15 bp, Homo sapiens
gccctgcactgatgc

SEQ ID NO: 1301300 - DNA, 15 bp, Homo sapiens
tgccctgcactgatg

SEQ ID NO: 1301301 - DNA, 15 bp, Homo sapiens
ttgccctgcactgat

SEQ ID NO: 1301302 - DNA, 15 bp, Homo sapiens
cttgccctgcactga

SEQ ID NO: 1301303 - DNA, 15 bp, Homo sapiens
acttgccctgcactg

SEQ ID NO: 1301304 - DNA, 15 bp, Homo sapiens
cacttgccctgcact

SEQ ID NO: 1301305 - DNA, 15 bp, Homo sapiens
acacttgccctgcac

SEQ ID NO: 1301306 - DNA, 15 bp, Homo sapiens
aacacttgccctgca

SEQ ID NO: 1301307 - DNA, 15 bp, Homo sapiens
caacacttgccctgc

SEQ ID NO: 1301308 - DNA, 15 bp, Homo sapiens
acaacacttgccctg

SEQ ID NO: 1301309 - DNA, 15 bp, Homo sapiens
cacaacacttgccct

SEQ ID NO: 1301310 - DNA, 15 bp, Homo sapiens
ccacaacacttgccc

SEQ ID NO: 1301311 - DNA, 15 bp, Homo sapiens
cccacaacacttgcc

SEQ ID NO: 1301312 - DNA, 15 bp, Homo sapiens
acccacaacacttgc

SEQ ID NO: 1301313 - DNA, 15 bp, Homo sapiens
aacccacaacacttg

SEQ ID NO: 1301314 - DNA, 15 bp, Homo sapiens
taacccacaacactt

SEQ ID NO: 1301315 - DNA, 15 bp, Homo sapiens
ataacccacaacact

SEQ ID NO: 1301316 - DNA, 15 bp, Homo sapiens
aataacccacaacac

SEQ ID NO: 1301317 - DNA, 15 bp, Homo sapiens
caataataacccaca

SEQ ID NO: 1301318 - DNA, 15 bp, Homo sapiens
ccaataataacccac

SEQ ID NO: 1301319 - DNA, 15 bp, Homo sapiens
accaataataaccca

SEQ ID NO: 1301320 - DNA, 15 bp, Homo sapiens
caccaataataaccc

SEQ ID NO: 1301321 - DNA, 15 bp, Homo sapiens
tcaccaataataacc

SEQ ID NO: 1301322 - DNA, 15 bp, Homo sapiens
gtcaccaataataac

SEQ ID NO: 1301323 - DNA, 15 bp, Homo sapiens
agtcaccaataataa

SEQ ID NO: 1301324 - DNA, 15 bp, Homo sapiens
aagtcaccaataata

SEQ ID NO: 1301325 - DNA, 15 bp, Homo sapiens
caagtcaccaataat

SEQ ID NO: 1301326 - DNA, 15 bp, Homo sapiens
gcaagtcaccaataa

SEQ ID NO: 1301327 - DNA, 15 bp, Homo sapiens
agcaagtcaccaata

SEQ ID NO: 1301328 - DNA, 15 bp, Homo sapiens
gagcaagtcaccaat

SEQ ID NO: 1301329 - DNA, 15 bp, Homo sapiens
ggagcaagtcaccaa

SEQ ID NO: 1301330 - DNA, 15 bp, Homo sapiens
gggagcaagtcacca

SEQ ID NO: 1301331 - DNA, 15 bp, Homo sapiens
ggggagcaagtcacc

SEQ ID NO: 1301332 - DNA, 15 bp, Homo sapiens
aggggagcaagtcac

SEQ ID NO: 1301333 - DNA, 15 bp, Homo sapiens
gaggggagcaagtca

SEQ ID NO: 1301334 - DNA, 15 bp, Homo sapiens
tgaggggagcaagtc

SEQ ID NO: 1301335 - DNA, 15 bp, Homo sapiens
gtgaggggagcaagt

SEQ ID NO: 1301336 - DNA, 15 bp, Homo sapiens
ggtgaggggagcaag

SEQ ID NO: 1301337 - DNA, 15 bp, Homo sapiens
tggtgaggggagcaa

SEQ ID NO: 1301338 - DNA, 15 bp, Homo sapiens
ctggtgaggggagca

SEQ ID NO: 1301339 - DNA, 15 bp, Homo sapiens
tctggtgaggggagc

SEQ ID NO: 1301340 - DNA, 15 bp, Homo sapiens
ctctggtgaggggag

SEQ ID NO: 1301341 - DNA, 15 bp, Homo sapiens
cctctggtgagggga

SEQ ID NO: 1301342 - DNA, 15 bp, Homo sapiens
ccctctggtgagggg

SEQ ID NO: 1301343 - DNA, 15 bp, Homo sapiens
cccctctggtgaggg

SEQ ID NO: 1301344 - DNA, 15 bp, Homo sapiens
acccctctggtgagg

SEQ ID NO: 1301345 - DNA, 15 bp, Homo sapiens
gacccctctggtgag

SEQ ID NO: 1301346 - DNA, 15 bp, Homo sapiens
agacccctctggtga

SEQ ID NO: 1301347 - DNA, 15 bp, Homo sapiens
aagacccctctggtg

SEQ ID NO: 1301348 - DNA, 15 bp, Homo sapiens
aaagacccctctggt

SEQ ID NO: 1301349 - DNA, 15 bp, Homo sapiens
aaaagacccctctgg

SEQ ID NO: 1301350 - DNA, 15 bp, Homo sapiens
caaaagacccctctg

SEQ ID NO: 1301351 - DNA, 15 bp, Homo sapiens
ccaaaagacccctct

SEQ ID NO: 1301352 - DNA, 15 bp, Homo sapiens
cccaaaagacccctc

SEQ ID NO: 1301353 - DNA, 15 bp, Homo sapiens
acccaaaagacccct

SEQ ID NO: 1301354 - DNA, 15 bp, Homo sapiens
cacccaaaagacccc

SEQ ID NO: 1301355 - DNA, 15 bp, Homo sapiens
gcacccaaaagaccc

SEQ ID NO: 1301356 - DNA, 15 bp, Homo sapiens
agcacccaaaagacc

SEQ ID NO: 1301357 - DNA, 15 bp, Homo sapiens
cagcacccaaaagac

SEQ ID NO: 1301358 - DNA, 15 bp, Homo sapiens
acagcacccaaaaga

SEQ ID NO: 1301359 - DNA, 15 bp, Homo sapiens
cacagcacccaaaag

SEQ ID NO: 1301360 - DNA, 15 bp, Homo sapiens
ccacagcacccaaaa

SEQ ID NO: 1301361 - DNA, 15 bp, Homo sapiens
tccacagcacccaaa

SEQ ID NO: 1301362 - DNA, 15 bp, Homo sapiens
ctccacagcacccaa

SEQ ID NO: 1301363 - DNA, 15 bp, Homo sapiens
gctccacagcaccca

SEQ ID NO: 1301364 - DNA, 15 bp, Homo sapiens
ggctccacagcaccc

SEQ ID NO: 1301365 - DNA, 15 bp, Homo sapiens
tggctccacagcacc

SEQ ID NO: 1301366 - DNA, 15 bp, Homo sapiens
ctggctccacagcac

SEQ ID NO: 1301367 - DNA, 15 bp, Homo sapiens
tctggctccacagca

SEQ ID NO: 1301368 - DNA, 15 bp, Homo sapiens
ctctggctccacagc

SEQ ID NO: 1301369 - DNA, 15 bp, Homo sapiens
cctctggctccacag

SEQ ID NO: 1301370 - DNA, 15 bp, Homo sapiens
ccctctggctccaca

SEQ ID NO: 1301371 - DNA, 15 bp, Homo sapiens
cccctctggctccac

SEQ ID NO: 1301372 - DNA, 15 bp, Homo sapiens
acccctctggctcca

SEQ ID NO: 1301373 - DNA, 15 bp, Homo sapiens
gacccctctggctcc

SEQ ID NO: 1301374 - DNA, 15 bp, Homo sapiens
agacccctctggctc

SEQ ID NO: 1301375 - DNA, 15 bp, Homo sapiens
cagacccctctggct

SEQ ID NO: 1301376 - DNA, 15 bp, Homo sapiens
acagacccctctggc

SEQ ID NO: 1301377 - DNA, 15 bp, Homo sapiens
gacagacccctctgg

SEQ ID NO: 1301378 - DNA, 15 bp, Homo sapiens
ggacagacccctctg

SEQ ID NO: 1301379 - DNA, 15 bp, Homo sapiens
tggacagacccctct

SEQ ID NO: 1301380 - DNA, 15 bp, Homo sapiens
atggacagacccctc

SEQ ID NO: 1301381 - DNA, 15 bp, Homo sapiens
catggacagacccct

SEQ ID NO: 1301382 - DNA, 15 bp, Homo sapiens
ccatggacagacccc

SEQ ID NO: 1301383 - DNA, 15 bp, Homo sapiens
accatggacagaccc

SEQ ID NO: 1301384 - DNA, 15 bp, Homo sapiens
caccatggacagacc

SEQ ID NO: 1301385 - DNA, 15 bp, Homo sapiens
ccaccatggacagac

SEQ ID NO: 1301386 - DNA, 15 bp, Homo sapiens
cccaccatggacaga

SEQ ID NO: 1301387 - DNA, 15 bp, Homo sapiens
acccaccatggacag

SEQ ID NO: 1301388 - DNA, 15 bp, Homo sapiens
aacccaccatggaca

SEQ ID NO: 1301389 - DNA, 15 bp, Homo sapiens
taacccaccatggac

SEQ ID NO: 1301390 - DNA, 15 bp, Homo sapiens
ctaacccaccatgga

SEQ ID NO: 1301391 - DNA, 15 bp, Homo sapiens
cctaacccaccatgg

SEQ ID NO: 1301392 - DNA, 15 bp, Homo sapiens
tcctaacccaccatg

SEQ ID NO: 1301393 - DNA, 15 bp, Homo sapiens
atcctaacccaccat

SEQ ID NO: 1301394 - DNA, 15 bp, Homo sapiens
aatcctaacccacca

SEQ ID NO: 1301395 - DNA, 15 bp, Homo sapiens
taatcctaacccacc

SEQ ID NO: 1301396 - DNA, 15 bp, Homo sapiens
ataatcctaacccac

SEQ ID NO: 1301397 - DNA, 15 bp, Homo sapiens
cataatcctaaccca

SEQ ID NO: 1301398 - DNA, 15 bp, Homo sapiens
gcataatcctaaccc

SEQ ID NO: 1301399 - DNA, 15 bp, Homo sapiens
tgcataatcctaacc

SEQ ID NO: 1301400 - DNA, 15 bp, Homo sapiens
gtgcataatcctaac

SEQ ID NO: 1301401 - DNA, 15 bp, Homo sapiens
agtgcataatcctaa

SEQ ID NO: 1301402 - DNA, 15 bp, Homo sapiens
aagtgcataatccta

SEQ ID NO: 1301403 - DNA, 15 bp, Homo sapiens
taagtgcataatcct

SEQ ID NO: 1301404 - DNA, 15 bp, Homo sapiens
ctaagtgcataatcc

SEQ ID NO: 1301405 - DNA, 15 bp, Homo sapiens
cctaagtgcataatc

SEQ ID NO: 1301406 - DNA, 15 bp, Homo sapiens
acctaagtgcataat

SEQ ID NO: 1301407 - DNA, 15 bp, Homo sapiens
gacctaagtgcataa

SEQ ID NO: 1301408 - DNA, 15 bp, Homo sapiens
agacctaagtgcata

SEQ ID NO: 1301409 - DNA, 15 bp, Homo sapiens
aagacctaagtgcat

SEQ ID NO: 1301410 - DNA, 15 bp, Homo sapiens
caagacctaagtgca

SEQ ID NO: 1301411 - DNA, 15 bp, Homo sapiens
gcaagacctaagtgc

SEQ ID NO: 1301412 - DNA, 15 bp, Homo sapiens
agcaagacctaagtg

SEQ ID NO: 1301413 - DNA, 15 bp, Homo sapiens
aagcaagacctaagt

SEQ ID NO: 1301414 - DNA, 15 bp, Homo sapiens
aaagcaagacctaag

SEQ ID NO: 1301415 - DNA, 15 bp, Homo sapiens
gaaagcaagacctaa

SEQ ID NO: 1301416 - DNA, 15 bp, Homo sapiens
ggaaagcaagaccta

SEQ ID NO: 1301417 - DNA, 15 bp, Homo sapiens
tggaaagcaagacct

SEQ ID NO: 1301418 - DNA, 15 bp, Homo sapiens
atggaaagcaagacc

SEQ ID NO: 1301419 - DNA, 15 bp, Homo sapiens
aatggaaagcaagac

SEQ ID NO: 1301420 - DNA, 15 bp, Homo sapiens
aaatggaaagcaaga

SEQ ID NO: 1301421 - DNA, 15 bp, Homo sapiens
caaatggaaagcaag

SEQ ID NO: 1301422 - DNA, 15 bp, Homo sapiens
ccaaatggaaagcaa

SEQ ID NO: 1301423 - DNA, 15 bp, Homo sapiens
cccaaatggaaagca

SEQ ID NO: 1301424 - DNA, 15 bp, Homo sapiens
tcccaaatggaaagc

SEQ ID NO: 1301425 - DNA, 15 bp, Homo sapiens
gtcccaaatggaaag

SEQ ID NO: 1301426 - DNA, 15 bp, Homo sapiens
tgtcccaaatggaaa

SEQ ID NO: 1301427 - DNA, 15 bp, Homo sapiens
ctgtcccaaatggaa

SEQ ID NO: 1301428 - DNA, 15 bp, Homo sapiens
actgtcccaaatgga

SEQ ID NO: 1301429 - DNA, 15 bp, Homo sapiens
tactgtcccaaatgg

SEQ ID NO: 1301430 - DNA, 15 bp, Homo sapiens
ttactgtcccaaatg

SEQ ID NO: 1301431 - DNA, 15 bp, Homo sapiens
cttactgtcccaaat

SEQ ID NO: 1301432 - DNA, 15 bp, Homo sapiens
gcttactgtcccaaa

SEQ ID NO: 1301433 - DNA, 15 bp, Homo sapiens
tgcttactgtcccaa

SEQ ID NO: 1301434 - DNA, 15 bp, Homo sapiens
atgcttactgtccca

SEQ ID NO: 1301435 - DNA, 15 bp, Homo sapiens
gatgcttactgtccc

SEQ ID NO: 1301436 - DNA, 15 bp, Homo sapiens
agatgcttactgtcc

SEQ ID NO: 1301437 - DNA, 15 bp, Homo sapiens
cagatgcttactgtc

SEQ ID NO: 1301438 - DNA, 15 bp, Homo sapiens
tcagatgcttactgt

SEQ ID NO: 1301439 - DNA, 15 bp, Homo sapiens
ctcagatgcttactg

SEQ ID NO: 1301440 - DNA, 15 bp, Homo sapiens
tctcagatgcttact

SEQ ID NO: 1301441 - DNA, 15 bp, Homo sapiens
ctctcagatgcttac

SEQ ID NO: 1301442 - DNA, 15 bp, Homo sapiens
tctctcagatgctta

SEQ ID NO: 1301443 - DNA, 15 bp, Homo sapiens
ttctctcagatgctt

SEQ ID NO: 1301444 - DNA, 15 bp, Homo sapiens
cttctctcagatgct

SEQ ID NO: 1301445 - DNA, 15 bp, Homo sapiens
tcttctctcagatgc

SEQ ID NO: 1301446 - DNA, 15 bp, Homo sapiens
ctcttctctcagatg

SEQ ID NO: 1301447 - DNA, 15 bp, Homo sapiens
actcttctctcagat

SEQ ID NO: 1301448 - DNA, 15 bp, Homo sapiens
aactcttctctcaga

SEQ ID NO: 1301449 - DNA, 15 bp, Homo sapiens
aaactcttctctcag

SEQ ID NO: 1301450 - DNA, 15 bp, Homo sapiens
caaactcttctctca

SEQ ID NO: 1301451 - DNA, 15 bp, Homo sapiens
acaaactcttctctc

SEQ ID NO: 1301452 - DNA, 15 bp, Homo sapiens
gacaaactcttctct

SEQ ID NO: 1301453 - DNA, 15 bp, Homo sapiens
ggacaaactcttctc

SEQ ID NO: 1301454 - DNA, 15 bp, Homo sapiens
gggacaaactcttct

SEQ ID NO: 1301455 - DNA, 15 bp, Homo sapiens
agggacaaactcttc

SEQ ID NO: 1301456 - DNA, 15 bp, Homo sapiens
cagggacaaactctt

SEQ ID NO: 1301457 - DNA, 15 bp, Homo sapiens
tcagggacaaactct

SEQ ID NO: 1301458 - DNA, 15 bp, Homo sapiens
gtcagggacaaactc

SEQ ID NO: 1301459 - DNA, 15 bp, Homo sapiens
agtcagggacaaact

SEQ ID NO: 1301460 - DNA, 15 bp, Homo sapiens
tagtcagggacaaac

SEQ ID NO: 1301461 - DNA, 15 bp, Homo sapiens
atagtcagggacaaa

SEQ ID NO: 1301462 - DNA, 15 bp, Homo sapiens
tatagtcagggacaa

SEQ ID NO: 1301463 - DNA, 15 bp, Homo sapiens
gtatagtcagggaca

SEQ ID NO: 1301464 - DNA, 15 bp, Homo sapiens
ggtatagtcagggac

SEQ ID NO: 1301465 - DNA, 15 bp, Homo sapiens
tggtatagtcaggga

SEQ ID NO: 1301466 - DNA, 15 bp, Homo sapiens
ttggtatagtcaggg

SEQ ID NO: 1301467 - DNA, 15 bp, Homo sapiens
tttggtatagtcagg

SEQ ID NO: 1301468 - DNA, 15 bp, Homo sapiens
atttggtatagtcag

SEQ ID NO: 1301469 - DNA, 15 bp, Homo sapiens
aatttggtatagtca

SEQ ID NO: 1301470 - DNA, 15 bp, Homo sapiens
gaatttggtatagtc

SEQ ID NO: 1301471 - DNA, 15 bp, Homo sapiens
ggaatttggtatagt

SEQ ID NO: 1301472 - DNA, 15 bp, Homo sapiens
tggaatttggtatag

SEQ ID NO: 1301473 - DNA, 15 bp, Homo sapiens
ttggaatttggtata

SEQ ID NO: 1301474 - DNA, 15 bp, Homo sapiens
cttggaatttggtat

SEQ ID NO: 1301475 - DNA, 15 bp, Homo sapiens
acttggaatttggta

SEQ ID NO: 1301476 - DNA, 15 bp, Homo sapiens
aacttggaatttggt

SEQ ID NO: 1301477 - DNA, 15 bp, Homo sapiens
gaacttggaatttgg

SEQ ID NO: 1301478 - DNA, 15 bp, Homo sapiens
agaacttggaatttg

SEQ ID NO: 1301479 - DNA, 15 bp, Homo sapiens
cagaacttggaattt

SEQ ID NO: 1301480 - DNA, 15 bp, Homo sapiens
gagactcagagatgc

SEQ ID NO: 1301481 - DNA, 15 bp, Homo sapiens
ggagactcagagatg

SEQ ID NO: 1301482 - DNA, 15 bp, Homo sapiens
gggagactcagagat

SEQ ID NO: 1301483 - DNA, 15 bp, Homo sapiens
agggagactcagaga

SEQ ID NO: 1301484 - DNA, 15 bp, Homo sapiens
cagggagactcagag

SEQ ID NO: 1301485 - DNA, 15 bp, Homo sapiens
gcagggagactcaga

SEQ ID NO: 1301486 - DNA, 15 bp, Homo sapiens
tgcagggagactcag

SEQ ID NO: 1301487 - DNA, 15 bp, Homo sapiens
gtgcagggagactca

SEQ ID NO: 1301488 - DNA, 15 bp, Homo sapiens
agtgcagggagactc

SEQ ID NO: 1301489 - DNA, 15 bp, Homo sapiens
gagtgcagggagact

SEQ ID NO: 1301490 - DNA, 15 bp, Homo sapiens
agagtgcagggagac

SEQ ID NO: 1301491 - DNA, 15 bp, Homo sapiens
cagagtgcagggaga

SEQ ID NO: 1301492 - DNA, 15 bp, Homo sapiens
ccagagtgcagggag

SEQ ID NO: 1301493 - DNA, 15 bp, Homo sapiens
tccagagtgcaggga

SEQ ID NO: 1301494 - DNA, 15 bp, Homo sapiens
gtccagagtgcaggg

SEQ ID NO: 1301495 - DNA, 15 bp, Homo sapiens
tgtccagagtgcagg

SEQ ID NO: 1301496 - DNA, 15 bp, Homo sapiens
atgtccagagtgcag

SEQ ID NO: 1301497 - DNA, 15 bp, Homo sapiens
aatgtccagagtgca

SEQ ID NO: 1301498 - DNA, 15 bp, Homo sapiens
caatgtccagagtgc

SEQ ID NO: 1301499 - DNA, 15 bp, Homo sapiens
tcaatgtccagagtg

SEQ ID NO: 1301500 - DNA, 15 bp, Homo sapiens
ctcaatgtccagagt

SEQ ID NO: 1301501 - DNA, 15 bp, Homo sapiens
tctcaatgtccagag

SEQ ID NO: 1301502 - DNA, 15 bp, Homo sapiens
ttctcaatgtccaga

SEQ ID NO: 1301503 - DNA, 15 bp, Homo sapiens
cttctcaatgtccag

SEQ ID NO: 1301504 - DNA, 15 bp, Homo sapiens
gcttctcaatgtcca

SEQ ID NO: 1301505 - DNA, 15 bp, Homo sapiens
tgcttctcaatgtcc

SEQ ID NO: 1301506 - DNA, 15 bp, Homo sapiens
gtgcttctcaatgtc

SEQ ID NO: 1301507 - DNA, 15 bp, Homo sapiens
agtgcttctcaatgt

SEQ ID NO: 1301508 - DNA, 15 bp, Homo sapiens
tagtgcttctcaatg

SEQ ID NO: 1301509 - DNA, 15 bp, Homo sapiens
ctagtgcttctcaat

SEQ ID NO: 1301510 - DNA, 15 bp, Homo sapiens
actagtgcttctcaa

SEQ ID NO: 1301511 - DNA, 15 bp, Homo sapiens
gactagtgcttctca

SEQ ID NO: 1301512 - DNA, 15 bp, Homo sapiens
tgactagtgcttctc

SEQ ID NO: 1301513 - DNA, 15 bp, Homo sapiens
atgactagtgcttct

SEQ ID NO: 1301514 - DNA, 15 bp, Homo sapiens
aatgactagtgcttc

SEQ ID NO: 1301515 - DNA, 15 bp, Homo sapiens
gaatgactagtgctt

SEQ ID NO: 1301516 - DNA, 15 bp, Homo sapiens
agaatgactagtgct

SEQ ID NO: 1301517 - DNA, 15 bp, Homo sapiens
cagaatgactagtgc

SEQ ID NO: 1301518 - DNA, 15 bp, Homo sapiens
acagaatgactagtg

SEQ ID NO: 1301519 - DNA, 15 bp, Homo sapiens
aacagaatgactagt

SEQ ID NO: 1301520 - DNA, 15 bp, Homo sapiens
aaacagaatgactag

SEQ ID NO: 1301521 - DNA, 15 bp, Homo sapiens
aaaacagaatgacta

SEQ ID NO: 1301522 - DNA, 15 bp, Homo sapiens
caaaacagaatgact

SEQ ID NO: 1301523 - DNA, 15 bp, Homo sapiens
acaaaacagaatgac

SEQ ID NO: 1301524 - DNA, 15 bp, Homo sapiens
tacaaaacagaatga

SEQ ID NO: 1301525 - DNA, 15 bp, Homo sapiens
ctacaaaacagaatg

SEQ ID NO: 1301526 - DNA, 15 bp, Homo sapiens
actacaaaacagaat

SEQ ID NO: 1301527 - DNA, 15 bp, Homo sapiens
tactacaaaacagaa

SEQ ID NO: 1301528 - DNA, 15 bp, Homo sapiens
gtactacaaaacaga

SEQ ID NO: 1301529 - DNA, 15 bp, Homo sapiens
tgtactacaaaacag

SEQ ID NO: 1301530 - DNA, 15 bp, Homo sapiens
ctgtactacaaaaca

SEQ ID NO: 1301531 - DNA, 15 bp, Homo sapiens
tctgtactacaaaac

SEQ ID NO: 1301532 - DNA, 15 bp, Homo sapiens
atctgtactacaaaa

SEQ ID NO: 1301533 - DNA, 15 bp, Homo sapiens
catctgtactacaaa

SEQ ID NO: 1301534 - DNA, 15 bp, Homo sapiens
acatctgtactacaa

SEQ ID NO: 1301535 - DNA, 15 bp, Homo sapiens
cacatctgtactaca

SEQ ID NO: 1301536 - DNA, 15 bp, Homo sapiens
acacatctgtactac

SEQ ID NO: 1301537 - DNA, 15 bp, Homo sapiens
aacacatctgtacta

SEQ ID NO: 1301538 - DNA, 15 bp, Homo sapiens
aaacacatctgtact

SEQ ID NO: 1301539 - DNA, 15 bp, Homo sapiens
taaacacatctgtac

SEQ ID NO: 1301540 - DNA, 15 bp, Homo sapiens
ataaacacatctgta

SEQ ID NO: 1301541 - DNA, 15 bp, Homo sapiens
tataaacacatctgt

SEQ ID NO: 1301542 - DNA, 15 bp, Homo sapiens
ttataaacacatctg

SEQ ID NO: 1301543 - DNA, 15 bp, Homo sapiens
tttataaacacatct

SEQ ID NO: 1301544 - DNA, 15 bp, Homo sapiens
ctttataaacacatc

SEQ ID NO: 1301545 - DNA, 15 bp, Homo sapiens
tctttataaacacat

SEQ ID NO: 1301546 - DNA, 15 bp, Homo sapiens
ctctttataaacaca

SEQ ID NO: 1301547 - DNA, 15 bp, Homo sapiens
tctctttataaacac

SEQ ID NO: 1301548 - DNA, 15 bp, Homo sapiens
gtctctttataaaca

SEQ ID NO: 1301549 - DNA, 15 bp, Homo sapiens
agtctctttataaac

SEQ ID NO: 1301550 - DNA, 15 bp, Homo sapiens
gagtctctttataaa

SEQ ID NO: 1301551 - DNA, 15 bp, Homo sapiens
ggagtctctttataa

SEQ ID NO: 1301552 - DNA, 15 bp, Homo sapiens
tggagtctctttata

SEQ ID NO: 1301553 - DNA, 15 bp, Homo sapiens
ctggagtctctttat

SEQ ID NO: 1301554 - DNA, 15 bp, Homo sapiens
cctggagtctcttta

SEQ ID NO: 1301555 - DNA, 15 bp, Homo sapiens
tccctggagtctctt

SEQ ID NO: 1301556 - DNA, 15 bp, Homo sapiens
ttccctggagtctct

SEQ ID NO: 1301557 - DNA, 15 bp, Homo sapiens
cttccctggagtctc

SEQ ID NO: 1301558 - DNA, 15 bp, Homo sapiens
acttccctggagtct

SEQ ID NO: 1301559 - DNA, 15 bp, Homo sapiens
gacttccctggagtc

SEQ ID NO: 1301560 - DNA, 15 bp, Homo sapiens
tgacttccctggagt

SEQ ID NO: 1301561 - DNA, 15 bp, Homo sapiens
ctgacttccctggag

SEQ ID NO: 1301562 - DNA, 15 bp, Homo sapiens
tctgacttccctgga

SEQ ID NO: 1301563 - DNA, 15 bp, Homo sapiens
atctgacttccctgg

SEQ ID NO: 1301564 - DNA, 15 bp, Homo sapiens
catctgacttccctg

SEQ ID NO: 1301565 - DNA, 15 bp, Homo sapiens
ccatctgacttccct

SEQ ID NO: 1301566 - DNA, 15 bp, Homo sapiens
cccatctgacttccc

SEQ ID NO: 1301567 - DNA, 15 bp, Homo sapiens
acccatctgacttcc

SEQ ID NO: 1301568 - DNA, 15 bp, Homo sapiens
tacccatctgacttc

SEQ ID NO: 1301569 - DNA, 15 bp, Homo sapiens
ttacccatctgactt

SEQ ID NO: 1301570 - DNA, 15 bp, Homo sapiens
cttacccatctgact

SEQ ID NO: 1301571 - DNA, 15 bp, Homo sapiens
ccttacccatctgac

SEQ ID NO: 1301572 - DNA, 15 bp, Homo sapiens
tccttacccatctga

SEQ ID NO: 1301573 - DNA, 15 bp, Homo sapiens
atccttacccatctg

SEQ ID NO: 1301574 - DNA, 15 bp, Homo sapiens
aatccttacccatct

SEQ ID NO: 1301575 - DNA, 15 bp, Homo sapiens
taatccttacccatc

SEQ ID NO: 1301576 - DNA, 15 bp, Homo sapiens
ataatccttacccat

SEQ ID NO: 1301577 - DNA, 15 bp, Homo sapiens
cataatccttaccca

SEQ ID NO: 1301578 - DNA, 15 bp, Homo sapiens
gcataatccttaccc

SEQ ID NO: 1301579 - DNA, 15 bp, Homo sapiens
ggcataatccttacc

SEQ ID NO: 1301580 - DNA, 15 bp, Homo sapiens
aggcataatccttac

SEQ ID NO: 1301581 - DNA, 15 bp, Homo sapiens
caggcataatcctta

SEQ ID NO: 1301582 - DNA, 15 bp, Homo sapiens
acaggcataatcctt

SEQ ID NO: 1301583 - DNA, 15 bp, Homo sapiens
gacaggcataatcct

SEQ ID NO: 1301584 - DNA, 15 bp, Homo sapiens
tgacaggcataatcc

SEQ ID NO: 1301585 - DNA, 15 bp, Homo sapiens
gtgacaggcataatc

SEQ ID NO: 1301586 - DNA, 15 bp, Homo sapiens
agtgacaggcataat

SEQ ID NO: 1301587 - DNA, 15 bp, Homo sapiens
gagtgacaggcataa

SEQ ID NO: 1301588 - DNA, 15 bp, Homo sapiens
agagtgacaggcata

SEQ ID NO: 1301589 - DNA, 15 bp, Homo sapiens
aagagtgacaggcat

SEQ ID NO: 1301590 - DNA, 15 bp, Homo sapiens
aaagagtgacaggca

SEQ ID NO: 1301591 - DNA, 15 bp, Homo sapiens
aaaagagtgacaggc

SEQ ID NO: 1301592 - DNA, 15 bp, Homo sapiens
aaaaagagtgacagg

SEQ ID NO: 1301593 - DNA, 15 bp, Homo sapiens
aaaaaagagtgacag

SEQ ID NO: 1301594 - DNA, 15 bp, Homo sapiens
aaaaaaagagtgaca

SEQ ID NO: 1301595 - DNA, 15 bp, Homo sapiens
aaaaaaaagagtgac

SEQ ID NO: 1301596 - DNA, 15 bp, Homo sapiens
aaaaaaaaagagtga

SEQ ID NO: 1301597 - DNA, 15 bp, Homo sapiens
aaaaaaaaaagagtg

SEQ ID NO: 1301598 - DNA, 15 bp, Homo sapiens
atgccaaaaaaaaaa

SEQ ID NO: 1301599 - DNA, 15 bp, Homo sapiens
aatgccaaaaaaaaa

SEQ ID NO: 1301600 - DNA, 15 bp, Homo sapiens
aaatgccaaaaaaaa

SEQ ID NO: 1301601 - DNA, 15 bp, Homo sapiens
aaaatgccaaaaaaa

SEQ ID NO: 1301602 - DNA, 15 bp, Homo sapiens
aaaaatgccaaaaaa

SEQ ID NO: 1301603 - DNA, 15 bp, Homo sapiens
aaaaaatgccaaaaa

SEQ ID NO: 1301604 - DNA, 15 bp, Homo sapiens
taaaaaatgccaaaa

SEQ ID NO: 1301605 - DNA, 15 bp, Homo sapiens
ttaaaaaatgccaaa

SEQ ID NO: 1301606 - DNA, 15 bp, Homo sapiens
tttaaaaaatgccaa

SEQ ID NO: 1301607 - DNA, 15 bp, Homo sapiens
atttaaaaaatgcca

SEQ ID NO: 1301608 - DNA, 15 bp, Homo sapiens
aatttaaaaaatgcc

SEQ ID NO: 1301609 - DNA, 15 bp, Homo sapiens
taatttaaaaaatgc

SEQ ID NO: 1301610 - DNA, 15 bp, Homo sapiens
ataatttaaaaaatg

SEQ ID NO: 1301611 - DNA, 15 bp, Homo sapiens
gtataatttaaaaaa

SEQ ID NO: 1301612 - DNA, 15 bp, Homo sapiens
agtataatttaaaaa

SEQ ID NO: 1301613 - DNA, 15 bp, Homo sapiens
aagtataatttaaaa

SEQ ID NO: 1301614 - DNA, 15 bp, Homo sapiens
gttgtgcacatgtac

SEQ ID NO: 1301615 - DNA, 15 bp, Homo sapiens
tgttgtgcacatgta

SEQ ID NO: 1301616 - DNA, 15 bp, Homo sapiens
atgttgtgcacatgt

SEQ ID NO: 1301617 - DNA, 15 bp, Homo sapiens
catgttgtgcacatg

SEQ ID NO: 1301618 - DNA, 15 bp, Homo sapiens
gcatgttgtgcacat

SEQ ID NO: 1301619 - DNA, 15 bp, Homo sapiens
tgcatgttgtgcaca

SEQ ID NO: 1301620 - DNA, 15 bp, Homo sapiens
ctgcatgttgtgcac

SEQ ID NO: 1301621 - DNA, 15 bp, Homo sapiens
cctgcatgttgtgca

SEQ ID NO: 1301622 - DNA, 15 bp, Homo sapiens
acctgcatgttgtgc

SEQ ID NO: 1301623 - DNA, 15 bp, Homo sapiens
aacctgcatgttgtg

SEQ ID NO: 1301624 - DNA, 15 bp, Homo sapiens
aaacctgcatgttgt

SEQ ID NO: 1301625 - DNA, 15 bp, Homo sapiens
caaacctgcatgttg

SEQ ID NO: 1301626 - DNA, 15 bp, Homo sapiens
cggcacatgtataca

SEQ ID NO: 1301627 - DNA, 15 bp, Homo sapiens
acggcacatgtatac

SEQ ID NO: 1301628 - DNA, 15 bp, Homo sapiens
cacggcacatgtata

SEQ ID NO: 1301629 - DNA, 15 bp, Homo sapiens
acacggcacatgtat

SEQ ID NO: 1301630 - DNA, 15 bp, Homo sapiens
aacacggcacatgta

SEQ ID NO: 1301631 - DNA, 15 bp, Homo sapiens
caacacggcacatgt

SEQ ID NO: 1301632 - DNA, 15 bp, Homo sapiens
ccaacacggcacatg

SEQ ID NO: 1301633 - DNA, 15 bp, Homo sapiens
accaacacggcacat

SEQ ID NO: 1301634 - DNA, 15 bp, Homo sapiens
caccaacacggcaca

SEQ ID NO: 1301635 - DNA, 15 bp, Homo sapiens
acaccaacacggcac

SEQ ID NO: 1301636 - DNA, 15 bp, Homo sapiens
cacaccaacacggca

SEQ ID NO: 1301637 - DNA, 15 bp, Homo sapiens
gcacaccaacacggc

SEQ ID NO: 1301638 - DNA, 15 bp, Homo sapiens
agcacaccaacacgg

SEQ ID NO: 1301639 - DNA, 15 bp, Homo sapiens
cagcacaccaacacg

SEQ ID NO: 1301640 - DNA, 15 bp, Homo sapiens
gcagcacaccaacac

SEQ ID NO: 1301641 - DNA, 15 bp, Homo sapiens
gagttaatgggtgca

SEQ ID NO: 1301642 - DNA, 15 bp, Homo sapiens
tgagttaatgggtgc

SEQ ID NO: 1301643 - DNA, 15 bp, Homo sapiens
atgagttaatgggtg

SEQ ID NO: 1301644 - DNA, 15 bp, Homo sapiens
gatgagttaatgggt

SEQ ID NO: 1301645 - DNA, 15 bp, Homo sapiens
tgatgagttaatggg

SEQ ID NO: 1301646 - DNA, 15 bp, Homo sapiens
atgatgagttaatgg

SEQ ID NO: 1301647 - DNA, 15 bp, Homo sapiens
aatgatgagttaatg

SEQ ID NO: 1301648 - DNA, 15 bp, Homo sapiens
aaatgatgagttaat

SEQ ID NO: 1301649 - DNA, 15 bp, Homo sapiens
taaatgatgagttaa

SEQ ID NO: 1301650 - DNA, 15 bp, Homo sapiens
gtaaatgatgagtta

SEQ ID NO: 1301651 - DNA, 15 bp, Homo sapiens
tgtaaatgatgagtt

SEQ ID NO: 1301652 - DNA, 15 bp, Homo sapiens
atgtaaatgatgagt

SEQ ID NO: 1301653 - DNA, 15 bp, Homo sapiens
aatgtaaatgatgag

SEQ ID NO: 1301654 - DNA, 15 bp, Homo sapiens
taatgtaaatgatga

SEQ ID NO: 1301655 - DNA, 15 bp, Homo sapiens
ctaatgtaaatgatg

SEQ ID NO: 1301656 - DNA, 15 bp, Homo sapiens
cctaatgtaaatgat

SEQ ID NO: 1301657 - DNA, 15 bp, Homo sapiens
cagggatagcattag

SEQ ID NO: 1301658 - DNA, 15 bp, Homo sapiens
gcagggatagcatta

SEQ ID NO: 1301659 - DNA, 15 bp, Homo sapiens
ggcagggatagcatt

SEQ ID NO: 1301660 - DNA, 15 bp, Homo sapiens
gggcagggatagcat

SEQ ID NO: 1301661 - DNA, 15 bp, Homo sapiens
ggggcagggatagca

SEQ ID NO: 1301662 - DNA, 15 bp, Homo sapiens
gggggcagggatagc

SEQ ID NO: 1301663 - DNA, 15 bp, Homo sapiens
agggggcagggatag

SEQ ID NO: 1301664 - DNA, 15 bp, Homo sapiens
gagggggcagggata

SEQ ID NO: 1301665 - DNA, 15 bp, Homo sapiens
ggagggggcagggat

SEQ ID NO: 1301666 - DNA, 15 bp, Homo sapiens
gggagggggcaggga

SEQ ID NO: 1301667 - DNA, 15 bp, Homo sapiens
ggggagggggcaggg

SEQ ID NO: 1301668 - DNA, 15 bp, Homo sapiens
gggggagggggcagg

SEQ ID NO: 1301669 - DNA, 15 bp, Homo sapiens
ggggggagggggcag

SEQ ID NO: 1301670 - DNA, 15 bp, Homo sapiens
cggggggagggggca

SEQ ID NO: 1301671 - DNA, 15 bp, Homo sapiens
tcggggggagggggc

SEQ ID NO: 1301672 - DNA, 15 bp, Homo sapiens
gtcggggggaggggg

SEQ ID NO: 1301673 - DNA, 15 bp, Homo sapiens
ggtcggggggagggg

SEQ ID NO: 1301674 - DNA, 15 bp, Homo sapiens
gggtcggggggaggg

SEQ ID NO: 1301675 - DNA, 15 bp, Homo sapiens
ggggtcggggggagg

SEQ ID NO: 1301676 - DNA, 15 bp, Homo sapiens
tggggtcggggggag

SEQ ID NO: 1301677 - DNA, 15 bp, Homo sapiens
gtggggtcgggggga

SEQ ID NO: 1301678 - DNA, 15 bp, Homo sapiens
cgtggggtcgggggg

SEQ ID NO: 1301679 - DNA, 15 bp, Homo sapiens
tcgtggggtcggggg

SEQ ID NO: 1301680 - DNA, 15 bp, Homo sapiens
gtcgtggggtcgggg

SEQ ID NO: 1301681 - DNA, 15 bp, Homo sapiens
tgtcgtggggtcggg

SEQ ID NO: 1301682 - DNA, 15 bp, Homo sapiens
ctgtcgtggggtcgg

SEQ ID NO: 1301683 - DNA, 15 bp, Homo sapiens
cctgtcgtggggtcg

SEQ ID NO: 1301684 - DNA, 15 bp, Homo sapiens
gcctgtcgtggggtc

SEQ ID NO: 1301685 - DNA, 15 bp, Homo sapiens
ggcctgtcgtggggt

SEQ ID NO: 1301686 - DNA, 15 bp, Homo sapiens
gggcctgtcgtgggg

SEQ ID NO: 1301687 - DNA, 15 bp, Homo sapiens
ggggcctgtcgtggg

SEQ ID NO: 1301688 - DNA, 15 bp, Homo sapiens
tggggcctgtcgtgg

SEQ ID NO: 1301689 - DNA, 15 bp, Homo sapiens
ctggggcctgtcgtg

SEQ ID NO: 1301690 - DNA, 15 bp, Homo sapiens
actggggcctgtcgt

SEQ ID NO: 1301691 - DNA, 15 bp, Homo sapiens
cactggggcctgtcg

SEQ ID NO: 1301692 - DNA, 15 bp, Homo sapiens
acactggggcctgtc

SEQ ID NO: 1301693 - DNA, 15 bp, Homo sapiens
cacacactggggcct

SEQ ID NO: 1301694 - DNA, 15 bp, Homo sapiens
agggaacatcacaca

SEQ ID NO: 1301695 - DNA, 15 bp, Homo sapiens
aagggaacatcacac

SEQ ID NO: 1301696 - DNA, 15 bp, Homo sapiens
aaagggaacatcaca

SEQ ID NO: 1301697 - DNA, 15 bp, Homo sapiens
gaaagggaacatcac

SEQ ID NO: 1301698 - DNA, 15 bp, Homo sapiens
ggaaagggaacatca

SEQ ID NO: 1301699 - DNA, 15 bp, Homo sapiens
aggaaagggaacatc

SEQ ID NO: 1301700 - DNA, 15 bp, Homo sapiens
caggaaagggaacat

SEQ ID NO: 1301701 - DNA, 15 bp, Homo sapiens
acaggaaagggaaca

SEQ ID NO: 1301702 - DNA, 15 bp, Homo sapiens
cacaggaaagggaac

SEQ ID NO: 1301703 - DNA, 15 bp, Homo sapiens
acacaggaaagggaa

SEQ ID NO: 1301704 - DNA, 15 bp, Homo sapiens
gacacaggaaaggga

SEQ ID NO: 1301705 - DNA, 15 bp, Homo sapiens
ggacacaggaaaggg

SEQ ID NO: 1301706 - DNA, 15 bp, Homo sapiens
tggacacaggaaagg

SEQ ID NO: 1301707 - DNA, 15 bp, Homo sapiens
ttggacacaggaaag

SEQ ID NO: 1301708 - DNA, 15 bp, Homo sapiens
cttggacacaggaaa

SEQ ID NO: 1301709 - DNA, 15 bp, Homo sapiens
gcatgttctcactca

SEQ ID NO: 1301710 - DNA, 15 bp, Homo sapiens
tgcatgttctcactc

SEQ ID NO: 1301711 - DNA, 15 bp, Homo sapiens
ctgcatgttctcact

SEQ ID NO: 1301712 - DNA, 15 bp, Homo sapiens
actgcatgttctcac

SEQ ID NO: 1301713 - DNA, 15 bp, Homo sapiens
cactgcatgttctca

SEQ ID NO: 1301714 - DNA, 15 bp, Homo sapiens
acactgcatgttctc

SEQ ID NO: 1301715 - DNA, 15 bp, Homo sapiens
aacactgcatgttct

SEQ ID NO: 1301716 - DNA, 15 bp, Homo sapiens
aaacactgcatgttc

SEQ ID NO: 1301717 - DNA, 15 bp, Homo sapiens
caaacactgcatgtt

SEQ ID NO: 1301718 - DNA, 15 bp, Homo sapiens
ccaaacactgcatgt

SEQ ID NO: 1301719 - DNA, 15 bp, Homo sapiens
accaaacactgcatg

SEQ ID NO: 1301720 - DNA, 15 bp, Homo sapiens
aaccaaacactgcat

SEQ ID NO: 1301721 - DNA, 15 bp, Homo sapiens
aaaccaaacactgca

SEQ ID NO: 1301722 - DNA, 15 bp, Homo sapiens
aaaaccaaacactgc

SEQ ID NO: 1301723 - DNA, 15 bp, Homo sapiens
aaaaaccaaacactg

SEQ ID NO: 1301724 - DNA, 15 bp, Homo sapiens
caaaaaccaaacact

SEQ ID NO: 1301725 - DNA, 15 bp, Homo sapiens
acaaaaaccaaacac

SEQ ID NO: 1301726 - DNA, 15 bp, Homo sapiens
gacaaaaaccaaaca

SEQ ID NO: 1301727 - DNA, 15 bp, Homo sapiens
ggacaaaaaccaaac

SEQ ID NO: 1301728 - DNA, 15 bp, Homo sapiens
aggacaaaaaccaaa

SEQ ID NO: 1301729 - DNA, 15 bp, Homo sapiens
aaggacaaaaaccaa

SEQ ID NO: 1301730 - DNA, 15 bp, Homo sapiens
caaggacaaaaacca

SEQ ID NO: 1301731 - DNA, 15 bp, Homo sapiens
gcaaggacaaaaacc

SEQ ID NO: 1301732 - DNA, 15 bp, Homo sapiens
cgcaaggacaaaaac

SEQ ID NO: 1301733 - DNA, 15 bp, Homo sapiens
gtcattctcagcaaa

SEQ ID NO: 1301734 - DNA, 15 bp, Homo sapiens
cgtcattctcagcaa

SEQ ID NO: 1301735 - DNA, 15 bp, Homo sapiens
ccgtcattctcagca

SEQ ID NO: 1301736 - DNA, 15 bp, Homo sapiens
accgtcattctcagc

SEQ ID NO: 1301737 - DNA, 15 bp, Homo sapiens
aaccgtcattctcag

SEQ ID NO: 1301738 - DNA, 15 bp, Homo sapiens
aaaccgtcattctca

SEQ ID NO: 1301739 - DNA, 15 bp, Homo sapiens
gaaaccgtcattctc

SEQ ID NO: 1301740 - DNA, 15 bp, Homo sapiens
ggaaaccgtcattct

SEQ ID NO: 1301741 - DNA, 15 bp, Homo sapiens
tggaaaccgtcattc

SEQ ID NO: 1301742 - DNA, 15 bp, Homo sapiens
ctggaaaccgtcatt

SEQ ID NO: 1301743 - DNA, 15 bp, Homo sapiens
gctggaaaccgtcat

SEQ ID NO: 1301744 - DNA, 15 bp, Homo sapiens
agctggaaaccgtca

SEQ ID NO: 1301745 - DNA, 15 bp, Homo sapiens
aagctggaaaccgtc

SEQ ID NO: 1301746 - DNA, 15 bp, Homo sapiens
gaagctggaaaccgt

SEQ ID NO: 1301747 - DNA, 15 bp, Homo sapiens
tgaagctggaaaccg

SEQ ID NO: 1301748 - DNA, 15 bp, Homo sapiens
tggatgaagctggaa

SEQ ID NO: 1301749 - DNA, 15 bp, Homo sapiens
atggatgaagctgga

SEQ ID NO: 1301750 - DNA, 15 bp, Homo sapiens
catggatgaagctgg

SEQ ID NO: 1301751 - DNA, 15 bp, Homo sapiens
acatggatgaagctg

SEQ ID NO: 1301752 - DNA, 15 bp, Homo sapiens
gacatggatgaagct

SEQ ID NO: 1301753 - DNA, 15 bp, Homo sapiens
ggacatggatgaagc

SEQ ID NO: 1301754 - DNA, 15 bp, Homo sapiens
gggacatggatgaag

SEQ ID NO: 1301755 - DNA, 15 bp, Homo sapiens
aaaaaaaggatgagt

SEQ ID NO: 1301756 - DNA, 15 bp, Homo sapiens
taaaaaaaggatgag

SEQ ID NO: 1301757 - DNA, 15 bp, Homo sapiens
ataaaaaaaggatga

SEQ ID NO: 1301758 - DNA, 15 bp, Homo sapiens
cataaaaaaaggatg

SEQ ID NO: 1301759 - DNA, 15 bp, Homo sapiens
ccataaaaaaaggat

SEQ ID NO: 1301760 - DNA, 15 bp, Homo sapiens
gccataaaaaaagga

SEQ ID NO: 1301761 - DNA, 15 bp, Homo sapiens
agccataaaaaaagg

SEQ ID NO: 1301762 - DNA, 15 bp, Homo sapiens
cagccataaaaaaag

SEQ ID NO: 1301763 - DNA, 15 bp, Homo sapiens
gcagccataaaaaaa

SEQ ID NO: 1301764 - DNA, 15 bp, Homo sapiens
cactatgcagccata

SEQ ID NO: 1301765 - DNA, 15 bp, Homo sapiens
acactatgcagccat

SEQ ID NO: 1301766 - DNA, 15 bp, Homo sapiens
aacactatgcagcca

SEQ ID NO: 1301767 - DNA, 15 bp, Homo sapiens
gaacactatgcagcc

SEQ ID NO: 1301768 - DNA, 15 bp, Homo sapiens
ggaacactatgcagc

SEQ ID NO: 1301769 - DNA, 15 bp, Homo sapiens
tggaacactatgcag

SEQ ID NO: 1301770 - DNA, 15 bp, Homo sapiens
atggaacactatgca

SEQ ID NO: 1301771 - DNA, 15 bp, Homo sapiens
catggaacactatgc

SEQ ID NO: 1301772 - DNA, 15 bp, Homo sapiens
ccatggaacactatg

SEQ ID NO: 1301773 - DNA, 15 bp, Homo sapiens
accatggaacactat

SEQ ID NO: 1301774 - DNA, 15 bp, Homo sapiens
caccatggaacacta

SEQ ID NO: 1301775 - DNA, 15 bp, Homo sapiens
acaccatggaacact

SEQ ID NO: 1301776 - DNA, 15 bp, Homo sapiens
tacaccatggaacac

SEQ ID NO: 1301777 - DNA, 15 bp, Homo sapiens
atacaccatggaaca

SEQ ID NO: 1301778 - DNA, 15 bp, Homo sapiens
tatacaccatggaac

SEQ ID NO: 1301779 - DNA, 15 bp, Homo sapiens
tgcacatatacacca

SEQ ID NO: 1301780 - DNA, 15 bp, Homo sapiens
gtgcacatatacacc

SEQ ID NO: 1301781 - DNA, 15 bp, Homo sapiens
tgtgcacatatacac

SEQ ID NO: 1301782 - DNA, 15 bp, Homo sapiens
atgtgcacatataca

SEQ ID NO: 1301783 - DNA, 15 bp, Homo sapiens
aatgtgcacatatac

SEQ ID NO: 1301784 - DNA, 15 bp, Homo sapiens
aaatgtgcacatata

SEQ ID NO: 1301785 - DNA, 15 bp, Homo sapiens
aaaatgtgcacatat

SEQ ID NO: 1301786 - DNA, 15 bp, Homo sapiens
gaaaatgtgcacata

SEQ ID NO: 1301787 - DNA, 15 bp, Homo sapiens
agaaaatgtgcacat

SEQ ID NO: 1301788 - DNA, 15 bp, Homo sapiens
aagaaaatgtgcaca

SEQ ID NO: 1301789 - DNA, 15 bp, Homo sapiens
taagaaaatgtgcac

SEQ ID NO: 1301790 - DNA, 15 bp, Homo sapiens
ttaagaaaatgtgca

SEQ ID NO: 1301791 - DNA, 15 bp, Homo sapiens
attaagaaaatgtgc

SEQ ID NO: 1301792 - DNA, 15 bp, Homo sapiens
tcaatgatagactgg

SEQ ID NO: 1301793 - DNA, 15 bp, Homo sapiens
atcaatgatagactg

SEQ ID NO: 1301794 - DNA, 15 bp, Homo sapiens
catcaatgatagact

SEQ ID NO: 1301795 - DNA, 15 bp, Homo sapiens
ccatcaatgatagac

SEQ ID NO: 1301796 - DNA, 15 bp, Homo sapiens
tccatcaatgataga

SEQ ID NO: 1301797 - DNA, 15 bp, Homo sapiens
gtccatcaatgatag

SEQ ID NO: 1301798 - DNA, 15 bp, Homo sapiens
cgtccatcaatgata

SEQ ID NO: 1301799 - DNA, 15 bp, Homo sapiens
acgtccatcaatgat

SEQ ID NO: 1301800 - DNA, 15 bp, Homo sapiens
aacgtccatcaatga

SEQ ID NO: 1301801 - DNA, 15 bp, Homo sapiens
aaacgtccatcaatg

SEQ ID NO: 1301802 - DNA, 15 bp, Homo sapiens
caaacgtccatcaat

SEQ ID NO: 1301803 - DNA, 15 bp, Homo sapiens
ccaaacgtccatcaa

SEQ ID NO: 1301804 - DNA, 15 bp, Homo sapiens
cccaaacgtccatca

SEQ ID NO: 1301805 - DNA, 15 bp, Homo sapiens
acccaaacgtccatc

SEQ ID NO: 1301806 - DNA, 15 bp, Homo sapiens
aacccaaacgtccat

SEQ ID NO: 1301807 - DNA, 15 bp, Homo sapiens
caacccaaacgtcca

SEQ ID NO: 1301808 - DNA, 15 bp, Homo sapiens
ccaacccaaacgtcc

SEQ ID NO: 1301809 - DNA, 15 bp, Homo sapiens
accaacccaaacgtc

SEQ ID NO: 1301810 - DNA, 15 bp, Homo sapiens
aaccaacccaaacgt

SEQ ID NO: 1301811 - DNA, 15 bp, Homo sapiens
gaaccaacccaaacg

SEQ ID NO: 1301812 - DNA, 15 bp, Homo sapiens
ggaaccaacccaaac

SEQ ID NO: 1301813 - DNA, 15 bp, Homo sapiens
ggacttggaaccaac

SEQ ID NO: 1301814 - DNA, 15 bp, Homo sapiens
cggacttggaaccaa

SEQ ID NO: 1301815 - DNA, 15 bp, Homo sapiens
acggacttggaacca

SEQ ID NO: 1301816 - DNA, 15 bp, Homo sapiens
cacggacttggaacc

SEQ ID NO: 1301817 - DNA, 15 bp, Homo sapiens
gcacggacttggaac

SEQ ID NO: 1301818 - DNA, 15 bp, Homo sapiens
agcacggacttggaa

SEQ ID NO: 1301819 - DNA, 15 bp, Homo sapiens
tagcacggacttgga

SEQ ID NO: 1301820 - DNA, 15 bp, Homo sapiens
atagcacggacttgg

SEQ ID NO: 1301821 - DNA, 15 bp, Homo sapiens
aatagcacggacttg

SEQ ID NO: 1301822 - DNA, 15 bp, Homo sapiens
caatagcacggactt

SEQ ID NO: 1301823 - DNA, 15 bp, Homo sapiens
acaatagcacggact

SEQ ID NO: 1301824 - DNA, 15 bp, Homo sapiens
cacaatagcacggac

SEQ ID NO: 1301825 - DNA, 15 bp, Homo sapiens
tcacaatagcacgga

SEQ ID NO: 1301826 - DNA, 15 bp, Homo sapiens
atcacaatagcacgg

SEQ ID NO: 1301827 - DNA, 15 bp, Homo sapiens
aatcacaatagcacg

SEQ ID NO: 1301828 - DNA, 15 bp, Homo sapiens
taatcacaatagcac

SEQ ID NO: 1301829 - DNA, 15 bp, Homo sapiens
ctaatcacaatagca

SEQ ID NO: 1301830 - DNA, 15 bp, Homo sapiens
actaatcacaatagc

SEQ ID NO: 1301831 - DNA, 15 bp, Homo sapiens
cactaatcacaatag

SEQ ID NO: 1301832 - DNA, 15 bp, Homo sapiens
gcactaatcacaata

SEQ ID NO: 1301833 - DNA, 15 bp, Homo sapiens
ggcactaatcacaat

SEQ ID NO: 1301834 - DNA, 15 bp, Homo sapiens
tggcactaatcacaa

SEQ ID NO: 1301835 - DNA, 15 bp, Homo sapiens
gtggcactaatcaca

SEQ ID NO: 1301836 - DNA, 15 bp, Homo sapiens
tgtggcactaatcac

SEQ ID NO: 1301837 - DNA, 15 bp, Homo sapiens
ttgtggcactaatca

SEQ ID NO: 1301838 - DNA, 15 bp, Homo sapiens
attgtggcactaatc

SEQ ID NO: 1301839 - DNA, 15 bp, Homo sapiens
tattgtggcactaat

SEQ ID NO: 1301840 - DNA, 15 bp, Homo sapiens
ttattgtggcactaa

SEQ ID NO: 1301841 - DNA, 15 bp, Homo sapiens
tgtatgtttattgtg

SEQ ID NO: 1301842 - DNA, 15 bp, Homo sapiens
atgtatgtttattgt

SEQ ID NO: 1301843 - DNA, 15 bp, Homo sapiens
catgtatgtttattg

SEQ ID NO: 1301844 - DNA, 15 bp, Homo sapiens
acatgtatgtttatt

SEQ ID NO: 1301845 - DNA, 15 bp, Homo sapiens
cacatgtatgtttat

SEQ ID NO: 1301846 - DNA, 15 bp, Homo sapiens
gcacatgtatgttta

SEQ ID NO: 1301847 - DNA, 15 bp, Homo sapiens
tgcacatgtatgttt

SEQ ID NO: 1301848 - DNA, 15 bp, Homo sapiens
atgcacatgtatgtt

SEQ ID NO: 1301849 - DNA, 15 bp, Homo sapiens
catgcacatgtatgt

SEQ ID NO: 1301850 - DNA, 15 bp, Homo sapiens
acatgcacatgtatg

SEQ ID NO: 1301851 - DNA, 15 bp, Homo sapiens
cacatgcacatgtat

SEQ ID NO: 1301852 - DNA, 15 bp, Homo sapiens
acacatgcacatgta

SEQ ID NO: 1301853 - DNA, 15 bp, Homo sapiens
gacacatgcacatgt

SEQ ID NO: 1301854 - DNA, 15 bp, Homo sapiens
agacacatgcacatg

SEQ ID NO: 1301855 - DNA, 15 bp, Homo sapiens
aagacacatgcacat

SEQ ID NO: 1301856 - DNA, 15 bp, Homo sapiens
taagacacatgcaca

SEQ ID NO: 1301857 - DNA, 15 bp, Homo sapiens
ttaagacacatgcac

SEQ ID NO: 1301858 - DNA, 15 bp, Homo sapiens
attaagacacatgca

SEQ ID NO: 1301859 - DNA, 15 bp, Homo sapiens
tattaagacacatgc

SEQ ID NO: 1301860 - DNA, 15 bp, Homo sapiens
ctattaagacacatg

SEQ ID NO: 1301861 - DNA, 15 bp, Homo sapiens
gctattaagacacat

SEQ ID NO: 1301862 - DNA, 15 bp, Homo sapiens
tgctattaagacaca

SEQ ID NO: 1301863 - DNA, 15 bp, Homo sapiens
ctgctattaagacac

SEQ ID NO: 1301864 - DNA, 15 bp, Homo sapiens
gctgctattaagaca

SEQ ID NO: 1301865 - DNA, 15 bp, Homo sapiens
tgctgctattaagac

SEQ ID NO: 1301866 - DNA, 15 bp, Homo sapiens
atgctgctattaaga

SEQ ID NO: 1301867 - DNA, 15 bp, Homo sapiens
tatgctgctattaag

SEQ ID NO: 1301868 - DNA, 15 bp, Homo sapiens
ttatgctgctattaa

SEQ ID NO: 1301869 - DNA, 15 bp, Homo sapiens
attatgctgctatta

SEQ ID NO: 1301870 - DNA, 15 bp, Homo sapiens
aattatgctgctatt

SEQ ID NO: 1301871 - DNA, 15 bp, Homo sapiens
aaattatgctgctat

SEQ ID NO: 1301872 - DNA, 15 bp, Homo sapiens
taaattatgctgcta

SEQ ID NO: 1301873 - DNA, 15 bp, Homo sapiens
ataaattatgctgct

SEQ ID NO: 1301874 - DNA, 15 bp, Homo sapiens
tataaattatgctgc

SEQ ID NO: 1301875 - DNA, 15 bp, Homo sapiens
ttataaattatgctg

SEQ ID NO: 1301876 - DNA, 15 bp, Homo sapiens
attataaattatgct

SEQ ID NO: 1301877 - DNA, 15 bp, Homo sapiens
gattataaattatgc

SEQ ID NO: 1301878 - DNA, 15 bp, Homo sapiens
ggattataaattatg

SEQ ID NO: 1301879 - DNA, 15 bp, Homo sapiens
aggattataaattat

SEQ ID NO: 1301880 - DNA, 15 bp, Homo sapiens
aaggattataaatta

SEQ ID NO: 1301881 - DNA, 15 bp, Homo sapiens
aaaggattataaatt

SEQ ID NO: 1301882 - DNA, 15 bp, Homo sapiens
atatatacccaaagg

SEQ ID NO: 1301883 - DNA, 15 bp, Homo sapiens
tatatatacccaaag

SEQ ID NO: 1301884 - DNA, 15 bp, Homo sapiens
gtatatatacccaaa

SEQ ID NO: 1301885 - DNA, 15 bp, Homo sapiens
tgtatatatacccaa

SEQ ID NO: 1301886 - DNA, 15 bp, Homo sapiens
ctgtatatataccca

SEQ ID NO: 1301887 - DNA, 15 bp, Homo sapiens
actgtatatataccc

SEQ ID NO: 1301888 - DNA, 15 bp, Homo sapiens
tactgtatatatacc

SEQ ID NO: 1301889 - DNA, 15 bp, Homo sapiens
ttactgtatatatac

SEQ ID NO: 1301890 - DNA, 15 bp, Homo sapiens
attactgtatatata

SEQ ID NO: 1301891 - DNA, 15 bp, Homo sapiens
cattactgtatatat

SEQ ID NO: 1301892 - DNA, 15 bp, Homo sapiens
ccattactgtatata

SEQ ID NO: 1301893 - DNA, 15 bp, Homo sapiens
cccattactgtatat

SEQ ID NO: 1301894 - DNA, 15 bp, Homo sapiens
tcccattactgtata

SEQ ID NO: 1301895 - DNA, 15 bp, Homo sapiens
atcccattactgtat

SEQ ID NO: 1301896 - DNA, 15 bp, Homo sapiens
catcccattactgta

SEQ ID NO: 1301897 - DNA, 15 bp, Homo sapiens
ccatcccattactgt

SEQ ID NO: 1301898 - DNA, 15 bp, Homo sapiens
catctagaactagaa

SEQ ID NO: 1301899 - DNA, 15 bp, Homo sapiens
gcatctagaactaga

SEQ ID NO: 1301900 - DNA, 15 bp, Homo sapiens
agcatctagaactag

SEQ ID NO: 1301901 - DNA, 15 bp, Homo sapiens
aagcatctagaacta

SEQ ID NO: 1301902 - DNA, 15 bp, Homo sapiens
caagcatctagaact

SEQ ID NO: 1301903 - DNA, 15 bp, Homo sapiens
tcaagcatctagaac

SEQ ID NO: 1301904 - DNA, 15 bp, Homo sapiens
ttcaagcatctagaa

SEQ ID NO: 1301905 - DNA, 15 bp, Homo sapiens
cttcaagcatctaga

SEQ ID NO: 1301906 - DNA, 15 bp, Homo sapiens
tcttcaagcatctag

SEQ ID NO: 1301907 - DNA, 15 bp, Homo sapiens
ttcttcaagcatcta

SEQ ID NO: 1301908 - DNA, 15 bp, Homo sapiens
attcttcaagcatct

SEQ ID NO: 1301909 - DNA, 15 bp, Homo sapiens
aattcttcaagcatc

SEQ ID NO: 1301910 - DNA, 15 bp, Homo sapiens
caattcttcaagcat

SEQ ID NO: 1301911 - DNA, 15 bp, Homo sapiens
gcaattcttcaagca

SEQ ID NO: 1301912 - DNA, 15 bp, Homo sapiens
ggcaattcttcaagc

SEQ ID NO: 1301913 - DNA, 15 bp, Homo sapiens
tggcaattcttcaag

SEQ ID NO: 1301914 - DNA, 15 bp, Homo sapiens
gtggcaattcttcaa

SEQ ID NO: 1301915 - DNA, 15 bp, Homo sapiens
tgtggcaattcttca

SEQ ID NO: 1301916 - DNA, 15 bp, Homo sapiens
gtgtggcaattcttc

SEQ ID NO: 1301917 - DNA, 15 bp, Homo sapiens
agtgtggcaattctt

SEQ ID NO: 1301918 - DNA, 15 bp, Homo sapiens
cagtgtggcaattct

SEQ ID NO: 1301919 - DNA, 15 bp, Homo sapiens
acagtgtggcaattc

SEQ ID NO: 1301920 - DNA, 15 bp, Homo sapiens
gacagtgtggcaatt

SEQ ID NO: 1301921 - DNA, 15 bp, Homo sapiens
agacagtgtggcaat

SEQ ID NO: 1301922 - DNA, 15 bp, Homo sapiens
aagacagtgtggcaa

SEQ ID NO: 1301923 - DNA, 15 bp, Homo sapiens
gaagacagtgtggca

SEQ ID NO: 1301924 - DNA, 15 bp, Homo sapiens
ggaagacagtgtggc

SEQ ID NO: 1301925 - DNA, 15 bp, Homo sapiens
tggaagacagtgtgg

SEQ ID NO: 1301926 - DNA, 15 bp, Homo sapiens
gtggaagacagtgtg

SEQ ID NO: 1301927 - DNA, 15 bp, Homo sapiens
tgtggaagacagtgt

SEQ ID NO: 1301928 - DNA, 15 bp, Homo sapiens
ttgtggaagacagtg

SEQ ID NO: 1301929 - DNA, 15 bp, Homo sapiens
attgtggaagacagt

SEQ ID NO: 1301930 - DNA, 15 bp, Homo sapiens
acatcagggacaaat

SEQ ID NO: 1301931 - DNA, 15 bp, Homo sapiens
cacatcagggacaaa

SEQ ID NO: 1301932 - DNA, 15 bp, Homo sapiens
ccacatcagggacaa

SEQ ID NO: 1301933 - DNA, 15 bp, Homo sapiens
gccacatcagggaca

SEQ ID NO: 1301934 - DNA, 15 bp, Homo sapiens
ggccacatcagggac

SEQ ID NO: 1301935 - DNA, 15 bp, Homo sapiens
aggccacatcaggga

SEQ ID NO: 1301936 - DNA, 15 bp, Homo sapiens
gaggccacatcaggg

SEQ ID NO: 1301937 - DNA, 15 bp, Homo sapiens
agaggccacatcagg

SEQ ID NO: 1301938 - DNA, 15 bp, Homo sapiens
cagaggccacatcag

SEQ ID NO: 1301939 - DNA, 15 bp, Homo sapiens
tcagaggccacatca

SEQ ID NO: 1301940 - DNA, 15 bp, Homo sapiens
ctcagaggccacatc

SEQ ID NO: 1301941 - DNA, 15 bp, Homo sapiens
cctcagaggccacat

SEQ ID NO: 1301942 - DNA, 15 bp, Homo sapiens
ccctcagaggccaca

SEQ ID NO: 1301943 - DNA, 15 bp, Homo sapiens
gccctcagaggccac

SEQ ID NO: 1301944 - DNA, 15 bp, Homo sapiens
tgccctcagaggcca

SEQ ID NO: 1301945 - DNA, 15 bp, Homo sapiens
ctgccctcagaggcc

SEQ ID NO: 1301946 - DNA, 15 bp, Homo sapiens
actgccctcagaggc

SEQ ID NO: 1301947 - DNA, 15 bp, Homo sapiens
cactgccctcagagg

SEQ ID NO: 1301948 - DNA, 15 bp, Homo sapiens
tcactgccctcagag

SEQ ID NO: 1301949 - DNA, 15 bp, Homo sapiens
ttcactgccctcaga

SEQ ID NO: 1301950 - DNA, 15 bp, Homo sapiens
tttcactgccctcag

SEQ ID NO: 1301951 - DNA, 15 bp, Homo sapiens
ttttcactgccctca

SEQ ID NO: 1301952 - DNA, 15 bp, Homo sapiens
attttcactgccctc

SEQ ID NO: 1301953 - DNA, 15 bp, Homo sapiens
gattttcactgccct

SEQ ID NO: 1301954 - DNA, 15 bp, Homo sapiens
tgattttcactgccc

SEQ ID NO: 1301955 - DNA, 15 bp, Homo sapiens
gtgattttcactgcc

SEQ ID NO: 1301956 - DNA, 15 bp, Homo sapiens
agtgattttcactgc

SEQ ID NO: 1301957 - DNA, 15 bp, Homo sapiens
cagtgattttcactg

SEQ ID NO: 1301958 - DNA, 15 bp, Homo sapiens
ccagtgattttcact

SEQ ID NO: 1301959 - DNA, 15 bp, Homo sapiens
tccagtgattttcac

SEQ ID NO: 1301960 - DNA, 15 bp, Homo sapiens
atccagtgattttca

SEQ ID NO: 1301961 - DNA, 15 bp, Homo sapiens
catccagtgattttc

SEQ ID NO: 1301962 - DNA, 15 bp, Homo sapiens
tcatccagtgatttt

SEQ ID NO: 1301963 - DNA, 15 bp, Homo sapiens
ttcatccagtgattt

SEQ ID NO: 1301964 - DNA, 15 bp, Homo sapiens
attcatccagtgatt

SEQ ID NO: 1301965 - DNA, 15 bp, Homo sapiens
cattcatccagtgat

SEQ ID NO: 1301966 - DNA, 15 bp, Homo sapiens
ccattcatccagtga

SEQ ID NO: 1301967 - DNA, 15 bp, Homo sapiens
accattcatccagtg

SEQ ID NO: 1301968 - DNA, 15 bp, Homo sapiens
aaccattcatccagt

SEQ ID NO: 1301969 - DNA, 15 bp, Homo sapiens
taaccattcatccag

SEQ ID NO: 1301970 - DNA, 15 bp, Homo sapiens
ctaaccattcatcca

SEQ ID NO: 1301971 - DNA, 15 bp, Homo sapiens
tctaaccattcatcc

SEQ ID NO: 1301972 - DNA, 15 bp, Homo sapiens
atctaaccattcatc

SEQ ID NO: 1301973 - DNA, 15 bp, Homo sapiens
aatctaaccattcat

SEQ ID NO: 1301974 - DNA, 15 bp, Homo sapiens
gaatctaaccattca

SEQ ID NO: 1301975 - DNA, 15 bp, Homo sapiens
tgaatctaaccattc

SEQ ID NO: 1301976 - DNA, 15 bp, Homo sapiens
atgaatctaaccatt

SEQ ID NO: 1301977 - DNA, 15 bp, Homo sapiens
gatgaatctaaccat

SEQ ID NO: 1301978 - DNA, 15 bp, Homo sapiens
tgatgaatctaacca

SEQ ID NO: 1301979 - DNA, 15 bp, Homo sapiens
ctgatgaatctaacc

SEQ ID NO: 1301980 - DNA, 15 bp, Homo sapiens
actgatgaatctaac

SEQ ID NO: 1301981 - DNA, 15 bp, Homo sapiens
cactgatgaatctaa

SEQ ID NO: 1301982 - DNA, 15 bp, Homo sapiens
ccactgatgaatcta

SEQ ID NO: 1301983 - DNA, 15 bp, Homo sapiens
gccactgatgaatct

SEQ ID NO: 1301984 - DNA, 15 bp, Homo sapiens
agccactgatgaatc

SEQ ID NO: 1301985 - DNA, 15 bp, Homo sapiens
aagccactgatgaat

SEQ ID NO: 1301986 - DNA, 15 bp, Homo sapiens
aaagccactgatgaa

SEQ ID NO: 1301987 - DNA, 15 bp, Homo sapiens
aaaagccactgatga

SEQ ID NO: 1301988 - DNA, 15 bp, Homo sapiens
caaaagccactgatg

SEQ ID NO: 1301989 - DNA, 15 bp, Homo sapiens
ccaaaagccactgat

SEQ ID NO: 1301990 - DNA, 15 bp, Homo sapiens
gccaaaagccactga

SEQ ID NO: 1301991 - DNA, 15 bp, Homo sapiens
ggccaaaagccactg

SEQ ID NO: 1301992 - DNA, 15 bp, Homo sapiens
aggccaaaagccact

SEQ ID NO: 1301993 - DNA, 15 bp, Homo sapiens
aaggccaaaagccac

SEQ ID NO: 1301994 - DNA, 15 bp, Homo sapiens
taaggccaaaagcca

SEQ ID NO: 1301995 - DNA, 15 bp, Homo sapiens
ttaaggccaaaagcc

SEQ ID NO: 1301996 - DNA, 15 bp, Homo sapiens
cttaaggccaaaagc

SEQ ID NO: 1301997 - DNA, 15 bp, Homo sapiens
tcttaaggccaaaag

SEQ ID NO: 1301998 - DNA, 15 bp, Homo sapiens
gtcttaaggccaaaa

SEQ ID NO: 1301999 - DNA, 15 bp, Homo sapiens
tgtcttaaggccaaa

SEQ ID NO: 1302000 - DNA, 15 bp, Homo sapiens
gtgtcttaaggccaa

SEQ ID NO: 1302001 - DNA, 15 bp, Homo sapiens
agtgtcttaaggcca

SEQ ID NO: 1302002 - DNA, 15 bp, Homo sapiens
cagtgtcttaaggcc

SEQ ID NO: 1302003 - DNA, 15 bp, Homo sapiens
acagtgtcttaaggc

SEQ ID NO: 1302004 - DNA, 15 bp, Homo sapiens
tacagtgtcttaagg

SEQ ID NO: 1302005 - DNA, 15 bp, Homo sapiens
gtacagtgtcttaag

SEQ ID NO: 1302006 - DNA, 15 bp, Homo sapiens
tgtacagtgtcttaa

SEQ ID NO: 1302007 - DNA, 15 bp, Homo sapiens
gtgtacagtgtctta

SEQ ID NO: 1302008 - DNA, 15 bp, Homo sapiens
ggtgtacagtgtctt

SEQ ID NO: 1302009 - DNA, 15 bp, Homo sapiens
gggtgtacagtgtct

SEQ ID NO: 1302010 - DNA, 15 bp, Homo sapiens
tgggtgtacagtgtc

SEQ ID NO: 1302011 - DNA, 15 bp, Homo sapiens
ttgggtgtacagtgt

SEQ ID NO: 1302012 - DNA, 15 bp, Homo sapiens
attgggtgtacagtg

SEQ ID NO: 1302013 - DNA, 15 bp, Homo sapiens
tattgggtgtacagt

SEQ ID NO: 1302014 - DNA, 15 bp, Homo sapiens
ctattgggtgtacag

SEQ ID NO: 1302015 - DNA, 15 bp, Homo sapiens
tctattgggtgtaca

SEQ ID NO: 1302016 - DNA, 15 bp, Homo sapiens
gtctattgggtgtac

SEQ ID NO: 1302017 - DNA, 15 bp, Homo sapiens
tgtctattgggtgta

SEQ ID NO: 1302018 - DNA, 15 bp, Homo sapiens
gtgtctattgggtgt

SEQ ID NO: 1302019 - DNA, 15 bp, Homo sapiens
tgtgtctattgggtg

SEQ ID NO: 1302020 - DNA, 15 bp, Homo sapiens
gtgtgtctattgggt

SEQ ID NO: 1302021 - DNA, 15 bp, Homo sapiens
tgtgtgtctattggg

SEQ ID NO: 1302022 - DNA, 15 bp, Homo sapiens
gtgtgtgtctattgg

SEQ ID NO: 1302023 - DNA, 15 bp, Homo sapiens
agtgtgtgtctattg

SEQ ID NO: 1302024 - DNA, 15 bp, Homo sapiens
gagtgtgtgtctatt

SEQ ID NO: 1302025 - DNA, 15 bp, Homo sapiens
tgagtgtgtgtctat

SEQ ID NO: 1302026 - DNA, 15 bp, Homo sapiens
atgagtgtgtgtcta

SEQ ID NO: 1302027 - DNA, 15 bp, Homo sapiens
catgagtgtgtgtct

SEQ ID NO: 1302028 - DNA, 15 bp, Homo sapiens
gcatgagtgtgtgtc

SEQ ID NO: 1302029 - DNA, 15 bp, Homo sapiens
ggcatgagtgtgtgt

SEQ ID NO: 1302030 - DNA, 15 bp, Homo sapiens
gggcatgagtgtgtg

SEQ ID NO: 1302031 - DNA, 15 bp, Homo sapiens
agggcatgagtgtgt

SEQ ID NO: 1302032 - DNA, 15 bp, Homo sapiens
cagggcatgagtgtg

SEQ ID NO: 1302033 - DNA, 15 bp, Homo sapiens
gcagggcatgagtgt

SEQ ID NO: 1302034 - DNA, 15 bp, Homo sapiens
tgcagggcatgagtg

SEQ ID NO: 1302035 - DNA, 15 bp, Homo sapiens
ttgcagggcatgagt

SEQ ID NO: 1302036 - DNA, 15 bp, Homo sapiens
cttgcagggcatgag

SEQ ID NO: 1302037 - DNA, 15 bp, Homo sapiens
acttgcagggcatga

SEQ ID NO: 1302038 - DNA, 15 bp, Homo sapiens
tacttgcagggcatg

SEQ ID NO: 1302039 - DNA, 15 bp, Homo sapiens
gtacttgcagggcat

SEQ ID NO: 1302040 - DNA, 15 bp, Homo sapiens
tgtacttgcagggca

SEQ ID NO: 1302041 - DNA, 15 bp, Homo sapiens
ttgtacttgcagggc

SEQ ID NO: 1302042 - DNA, 15 bp, Homo sapiens
cttgtacttgcaggg

SEQ ID NO: 1302043 - DNA, 15 bp, Homo sapiens
gcttgtacttgcagg

SEQ ID NO: 1302044 - DNA, 15 bp, Homo sapiens
ggcttgtacttgcag

SEQ ID NO: 1302045 - DNA, 15 bp, Homo sapiens
aggcttgtacttgca

SEQ ID NO: 1302046 - DNA, 15 bp, Homo sapiens
taggcttgtacttgc

SEQ ID NO: 1302047 - DNA, 15 bp, Homo sapiens
ttaggcttgtacttg

SEQ ID NO: 1302048 - DNA, 15 bp, Homo sapiens
attaggcttgtactt

SEQ ID NO: 1302049 - DNA, 15 bp, Homo sapiens
aattaggcttgtact

SEQ ID NO: 1302050 - DNA, 15 bp, Homo sapiens
aaattaggcttgtac

SEQ ID NO: 1302051 - DNA, 15 bp, Homo sapiens
aaaattaggcttgta

SEQ ID NO: 1302052 - DNA, 15 bp, Homo sapiens
gaaaattaggcttgt

SEQ ID NO: 1302053 - DNA, 15 bp, Homo sapiens
ggaaaattaggcttg

SEQ ID NO: 1302054 - DNA, 15 bp, Homo sapiens
aggaaaattaggctt

SEQ ID NO: 1302055 - DNA, 15 bp, Homo sapiens
caggaaaattaggct

SEQ ID NO: 1302056 - DNA, 15 bp, Homo sapiens
acaggaaaattaggc

SEQ ID NO: 1302057 - DNA, 15 bp, Homo sapiens
tacaggaaaattagg

SEQ ID NO: 1302058 - DNA, 15 bp, Homo sapiens
gtacaggaaaattag

SEQ ID NO: 1302059 - DNA, 15 bp, Homo sapiens
agtacaggaaaatta

SEQ ID NO: 1302060 - DNA, 15 bp, Homo sapiens
gagtacaggaaaatt

SEQ ID NO: 1302061 - DNA, 15 bp, Homo sapiens
tgagtacaggaaaat

SEQ ID NO: 1302062 - DNA, 15 bp, Homo sapiens
gtgagtacaggaaaa

SEQ ID NO: 1302063 - DNA, 15 bp, Homo sapiens
ggtgagtacaggaaa

SEQ ID NO: 1302064 - DNA, 15 bp, Homo sapiens
aggtgagtacaggaa

SEQ ID NO: 1302065 - DNA, 15 bp, Homo sapiens
aaggtgagtacagga

SEQ ID NO: 1302066 - DNA, 15 bp, Homo sapiens
aaaggtgagtacagg

SEQ ID NO: 1302067 - DNA, 15 bp, Homo sapiens
taaaggtgagtacag

SEQ ID NO: 1302068 - DNA, 15 bp, Homo sapiens
gtaaaggtgagtaca

SEQ ID NO: 1302069 - DNA, 15 bp, Homo sapiens
agtaaaggtgagtac

SEQ ID NO: 1302070 - DNA, 15 bp, Homo sapiens
tagtaaaggtgagta

SEQ ID NO: 1302071 - DNA, 15 bp, Homo sapiens
gtagtaaaggtgagt

SEQ ID NO: 1302072 - DNA, 15 bp, Homo sapiens
tgtagtaaaggtgag

SEQ ID NO: 1302073 - DNA, 15 bp, Homo sapiens
atgtagtaaaggtga

SEQ ID NO: 1302074 - DNA, 15 bp, Homo sapiens
catgtagtaaaggtg

SEQ ID NO: 1302075 - DNA, 15 bp, Homo sapiens
acatgtagtaaaggt

SEQ ID NO: 1302076 - DNA, 15 bp, Homo sapiens
cacatgtagtaaagg

SEQ ID NO: 1302077 - DNA, 15 bp, Homo sapiens
tcacatgtagtaaag

SEQ ID NO: 1302078 - DNA, 15 bp, Homo sapiens
atcacatgtagtaaa

SEQ ID NO: 1302079 - DNA, 15 bp, Homo sapiens
catcacatgtagtaa

SEQ ID NO: 1302080 - DNA, 15 bp, Homo sapiens
acatcacatgtagta

SEQ ID NO: 1302081 - DNA, 15 bp, Homo sapiens
tacatcacatgtagt

SEQ ID NO: 1302082 - DNA, 15 bp, Homo sapiens
gtacatcacatgtag

SEQ ID NO: 1302083 - DNA, 15 bp, Homo sapiens
agtacatcacatgta

SEQ ID NO: 1302084 - DNA, 15 bp, Homo sapiens
aagtacatcacatgt

SEQ ID NO: 1302085 - DNA, 15 bp, Homo sapiens
aaagtacatcacatg

SEQ ID NO: 1302086 - DNA, 15 bp, Homo sapiens
caaagtacatcacat

SEQ ID NO: 1302087 - DNA, 15 bp, Homo sapiens
tcaaagtacatcaca

SEQ ID NO: 1302088 - DNA, 15 bp, Homo sapiens
atcaaagtacatcac

SEQ ID NO: 1302089 - DNA, 15 bp, Homo sapiens
tatcaaagtacatca

SEQ ID NO: 1302090 - DNA, 15 bp, Homo sapiens
ctatcaaagtacatc

SEQ ID NO: 1302091 - DNA, 15 bp, Homo sapiens
actatcaaagtacat

SEQ ID NO: 1302092 - DNA, 15 bp, Homo sapiens
aactatcaaagtaca

SEQ ID NO: 1302093 - DNA, 15 bp, Homo sapiens
aaactatcaaagtac

SEQ ID NO: 1302094 - DNA, 15 bp, Homo sapiens
gaaactatcaaagta

SEQ ID NO: 1302095 - DNA, 15 bp, Homo sapiens
agaaactatcaaagt

SEQ ID NO: 1302096 - DNA, 15 bp, Homo sapiens
tagaaactatcaaag

SEQ ID NO: 1302097 - DNA, 15 bp, Homo sapiens
atagaaactatcaaa

SEQ ID NO: 1302098 - DNA, 15 bp, Homo sapiens
aatagaaactatcaa

SEQ ID NO: 1302099 - DNA, 15 bp, Homo sapiens
gaatagaaactatca

SEQ ID NO: 1302100 - DNA, 15 bp, Homo sapiens
agaatagaaactatc

SEQ ID NO: 1302101 - DNA, 15 bp, Homo sapiens
cagaatagaaactat

SEQ ID NO: 1302102 - DNA, 15 bp, Homo sapiens
ccagaatagaaacta

SEQ ID NO: 1302103 - DNA, 15 bp, Homo sapiens
tccagaatagaaact

SEQ ID NO: 1302104 - DNA, 15 bp, Homo sapiens
ttccagaatagaaac

SEQ ID NO: 1302105 - DNA, 15 bp, Homo sapiens
attccagaatagaaa

SEQ ID NO: 1302106 - DNA, 15 bp, Homo sapiens
tattccagaatagaa

SEQ ID NO: 1302107 - DNA, 15 bp, Homo sapiens
atattccagaataga

SEQ ID NO: 1302108 - DNA, 15 bp, Homo sapiens
aatattccagaatag

SEQ ID NO: 1302109 - DNA, 15 bp, Homo sapiens
gaatattccagaata

SEQ ID NO: 1302110 - DNA, 15 bp, Homo sapiens
agaatattccagaat

SEQ ID NO: 1302111 - DNA, 15 bp, Homo sapiens
tagaatattccagaa

SEQ ID NO: 1302112 - DNA, 15 bp, Homo sapiens
atagaatattccaga

SEQ ID NO: 1302113 - DNA, 15 bp, Homo sapiens
aatagaatattccag

SEQ ID NO: 1302114 - DNA, 15 bp, Homo sapiens
taatagaatattcca

SEQ ID NO: 1302115 - DNA, 15 bp, Homo sapiens
ataatagaatattcc

SEQ ID NO: 1302116 - DNA, 15 bp, Homo sapiens
aataatagaatattc

SEQ ID NO: 1302117 - DNA, 15 bp, Homo sapiens
aaataatagaatatt

SEQ ID NO: 1302118 - DNA, 15 bp, Homo sapiens
gaaataatagaatat

SEQ ID NO: 1302119 - DNA, 15 bp, Homo sapiens
ggaaataatagaata

SEQ ID NO: 1302120 - DNA, 15 bp, Homo sapiens
aggaaataatagaat

SEQ ID NO: 1302121 - DNA, 15 bp, Homo sapiens
caggaaataatagaa

SEQ ID NO: 1302122 - DNA, 15 bp, Homo sapiens
gcaggaaataataga

SEQ ID NO: 1302123 - DNA, 15 bp, Homo sapiens
agcaggaaataatag

SEQ ID NO: 1302124 - DNA, 15 bp, Homo sapiens
tagcaggaaataata

SEQ ID NO: 1302125 - DNA, 15 bp, Homo sapiens
ctagcaggaaataat

SEQ ID NO: 1302126 - DNA, 15 bp, Homo sapiens
actagcaggaaataa

SEQ ID NO: 1302127 - DNA, 15 bp, Homo sapiens
aactagcaggaaata

SEQ ID NO: 1302128 - DNA, 15 bp, Homo sapiens
gaactagcaggaaat

SEQ ID NO: 1302129 - DNA, 15 bp, Homo sapiens
ggaactagcaggaaa

SEQ ID NO: 1302130 - DNA, 15 bp, Homo sapiens
tggaactagcaggaa

SEQ ID NO: 1302131 - DNA, 15 bp, Homo sapiens
atggaactagcagga

SEQ ID NO: 1302132 - DNA, 15 bp, Homo sapiens
gatggaactagcagg

SEQ ID NO: 1302133 - DNA, 15 bp, Homo sapiens
agatggaactagcag

SEQ ID NO: 1302134 - DNA, 15 bp, Homo sapiens
gagatggaactagca

SEQ ID NO: 1302135 - DNA, 15 bp, Homo sapiens
tgagatggaactagc

SEQ ID NO: 1302136 - DNA, 15 bp, Homo sapiens
atgagatggaactag

SEQ ID NO: 1302137 - DNA, 15 bp, Homo sapiens
aatgagatggaacta

SEQ ID NO: 1302138 - DNA, 15 bp, Homo sapiens
gaatgagatggaact

SEQ ID NO: 1302139 - DNA, 15 bp, Homo sapiens
ggaatgagatggaac

SEQ ID NO: 1302140 - DNA, 15 bp, Homo sapiens
tggaatgagatggaa

SEQ ID NO: 1302141 - DNA, 15 bp, Homo sapiens
atggaatgagatgga

SEQ ID NO: 1302142 - DNA, 15 bp, Homo sapiens
gatggaatgagatgg

SEQ ID NO: 1302143 - DNA, 15 bp, Homo sapiens
ggatggaatgagatg

SEQ ID NO: 1302144 - DNA, 15 bp, Homo sapiens
gggatggaatgagat

SEQ ID NO: 1302145 - DNA, 15 bp, Homo sapiens
tgggatggaatgaga

SEQ ID NO: 1302146 - DNA, 15 bp, Homo sapiens
gtgggatggaatgag

SEQ ID NO: 1302147 - DNA, 15 bp, Homo sapiens
agtgggatggaatga

SEQ ID NO: 1302148 - DNA, 15 bp, Homo sapiens
gagtgggatggaatg

SEQ ID NO: 1302149 - DNA, 15 bp, Homo sapiens
ggagtgggatggaat

SEQ ID NO: 1302150 - DNA, 15 bp, Homo sapiens
tggagtgggatggaa

SEQ ID NO: 1302151 - DNA, 15 bp, Homo sapiens
gtggagtgggatgga

SEQ ID NO: 1302152 - DNA, 15 bp, Homo sapiens
agtggagtgggatgg

SEQ ID NO: 1302153 - DNA, 15 bp, Homo sapiens
gagtggagtgggatg

SEQ ID NO: 1302154 - DNA, 15 bp, Homo sapiens
ggagtggagtgggat

SEQ ID NO: 1302155 - DNA, 15 bp, Homo sapiens
tggagtggagtggga

SEQ ID NO: 1302156 - DNA, 15 bp, Homo sapiens
gtggagtggagtggg

SEQ ID NO: 1302157 - DNA, 15 bp, Homo sapiens
agtggagtggagtgg

SEQ ID NO: 1302158 - DNA, 15 bp, Homo sapiens
aagtggagtggagtg

SEQ ID NO: 1302159 - DNA, 15 bp, Homo sapiens
gaagtggagtggagt

SEQ ID NO: 1302160 - DNA, 15 bp, Homo sapiens
tgaagtggagtggag

SEQ ID NO: 1302161 - DNA, 15 bp, Homo sapiens
atgaagtggagtgga

SEQ ID NO: 1302162 - DNA, 15 bp, Homo sapiens
aatgaagtggagtgg

SEQ ID NO: 1302163 - DNA, 15 bp, Homo sapiens
aaatgaagtggagtg

SEQ ID NO: 1302164 - DNA, 15 bp, Homo sapiens
gaaatgaagtggagt

SEQ ID NO: 1302165 - DNA, 15 bp, Homo sapiens
tgaaatgaagtggag

SEQ ID NO: 1302166 - DNA, 15 bp, Homo sapiens
atgaaatgaagtgga

SEQ ID NO: 1302167 - DNA, 15 bp, Homo sapiens
aatgaaatgaagtgg

SEQ ID NO: 1302168 - DNA, 15 bp, Homo sapiens
gaatgaaatgaagtg

SEQ ID NO: 1302169 - DNA, 15 bp, Homo sapiens
ggaatgaaatgaagt

SEQ ID NO: 1302170 - DNA, 15 bp, Homo sapiens
tggaatgaaatgaag

SEQ ID NO: 1302171 - DNA, 15 bp, Homo sapiens
atggaatgaaatgaa

SEQ ID NO: 1302172 - DNA, 15 bp, Homo sapiens
aatggaatgaaatga

SEQ ID NO: 1302173 - DNA, 15 bp, Homo sapiens
gaatggaatgaaatg

SEQ ID NO: 1302174 - DNA, 15 bp, Homo sapiens
agaatggaatgaaat

SEQ ID NO: 1302175 - DNA, 15 bp, Homo sapiens
gagaatggaatgaaa

SEQ ID NO: 1302176 - DNA, 15 bp, Homo sapiens
tgagaatggaatgaa

SEQ ID NO: 1302177 - DNA, 15 bp, Homo sapiens
atgagaatggaatga

SEQ ID NO: 1302178 - DNA, 15 bp, Homo sapiens
aatgagaatggaatg

SEQ ID NO: 1302179 - DNA, 15 bp, Homo sapiens
aaatgagaatggaat

SEQ ID NO: 1302180 - DNA, 15 bp, Homo sapiens
gaaatgagaatggaa

SEQ ID NO: 1302181 - DNA, 15 bp, Homo sapiens
tgaaatgagaatgga

SEQ ID NO: 1302182 - DNA, 15 bp, Homo sapiens
atgaaatgagaatgg

SEQ ID NO: 1302183 - DNA, 15 bp, Homo sapiens
aatgaaatgagaatg

SEQ ID NO: 1302184 - DNA, 15 bp, Homo sapiens
aaatgaaatgagaat

SEQ ID NO: 1302185 - DNA, 15 bp, Homo sapiens
taaatgaaatgagaa

SEQ ID NO: 1302186 - DNA, 15 bp, Homo sapiens
ataaatgaaatgaga

SEQ ID NO: 1302187 - DNA, 15 bp, Homo sapiens
tataaatgaaatgag

SEQ ID NO: 1302188 - DNA, 15 bp, Homo sapiens
ttataaatgaaatga

SEQ ID NO: 1302189 - DNA, 15 bp, Homo sapiens
tttataaatgaaatg

SEQ ID NO: 1302190 - DNA, 15 bp, Homo sapiens
ttttataaatgaaat

SEQ ID NO: 1302191 - DNA, 15 bp, Homo sapiens
attttataaatgaaa

SEQ ID NO: 1302192 - DNA, 15 bp, Homo sapiens
cattttataaatgaa

SEQ ID NO: 1302193 - DNA, 15 bp, Homo sapiens
tcattttataaatga

SEQ ID NO: 1302194 - DNA, 15 bp, Homo sapiens
gtcattttataaatg

SEQ ID NO: 1302195 - DNA, 15 bp, Homo sapiens
cgtcattttataaat

SEQ ID NO: 1302196 - DNA, 15 bp, Homo sapiens
ccgtcattttataaa

SEQ ID NO: 1302197 - DNA, 15 bp, Homo sapiens
accgtcattttataa

SEQ ID NO: 1302198 - DNA, 15 bp, Homo sapiens
gaccgtcattttata

SEQ ID NO: 1302199 - DNA, 15 bp, Homo sapiens
tgaccgtcattttat

SEQ ID NO: 1302200 - DNA, 15 bp, Homo sapiens
ctgaccgtcatttta

SEQ ID NO: 1302201 - DNA, 15 bp, Homo sapiens
cctgaccgtcatttt

SEQ ID NO: 1302202 - DNA, 15 bp, Homo sapiens
tcctgaccgtcattt

SEQ ID NO: 1302203 - DNA, 15 bp, Homo sapiens
gtcctgaccgtcatt

SEQ ID NO: 1302204 - DNA, 15 bp, Homo sapiens
agtcctgaccgtcat

SEQ ID NO: 1302205 - DNA, 15 bp, Homo sapiens
gagtcctgaccgtca

SEQ ID NO: 1302206 - DNA, 15 bp, Homo sapiens
tgagtcctgaccgtc

SEQ ID NO: 1302207 - DNA, 15 bp, Homo sapiens
atgagtcctgaccgt

SEQ ID NO: 1302208 - DNA, 15 bp, Homo sapiens
catgagtcctgaccg

SEQ ID NO: 1302209 - DNA, 15 bp, Homo sapiens
tcatgagtcctgacc

SEQ ID NO: 1302210 - DNA, 15 bp, Homo sapiens
ttcatgagtcctgac

SEQ ID NO: 1302211 - DNA, 15 bp, Homo sapiens
tttcatgagtcctga

SEQ ID NO: 1302212 - DNA, 15 bp, Homo sapiens
gtttcatgagtcctg

SEQ ID NO: 1302213 - DNA, 15 bp, Homo sapiens
agtttcatgagtcct

SEQ ID NO: 1302214 - DNA, 15 bp, Homo sapiens
cagtttcatgagtcc

SEQ ID NO: 1302215 - DNA, 15 bp, Homo sapiens
tcagtttcatgagtc

SEQ ID NO: 1302216 - DNA, 15 bp, Homo sapiens
atcagtttcatgagt

SEQ ID NO: 1302217 - DNA, 15 bp, Homo sapiens
gatcagtttcatgag

SEQ ID NO: 1302218 - DNA, 15 bp, Homo sapiens
agatcagtttcatga

SEQ ID NO: 1302219 - DNA, 15 bp, Homo sapiens
gagatcagtttcatg

SEQ ID NO: 1302220 - DNA, 15 bp, Homo sapiens
tgagatcagtttcat

SEQ ID NO: 1302221 - DNA, 15 bp, Homo sapiens
atgagatcagtttca

SEQ ID NO: 1302222 - DNA, 15 bp, Homo sapiens
catgagatcagtttc

SEQ ID NO: 1302223 - DNA, 15 bp, Homo sapiens
ccatgagatcagttt

SEQ ID NO: 1302224 - DNA, 15 bp, Homo sapiens
accatgagatcagtt

SEQ ID NO: 1302225 - DNA, 15 bp, Homo sapiens
gaccatgagatcagt

SEQ ID NO: 1302226 - DNA, 15 bp, Homo sapiens
ggaccatgagatcag

SEQ ID NO: 1302227 - DNA, 15 bp, Homo sapiens
tggaccatgagatca

SEQ ID NO: 1302228 - DNA, 15 bp, Homo sapiens
gtggaccatgagatc

SEQ ID NO: 1302229 - DNA, 15 bp, Homo sapiens
agtggaccatgagat

SEQ ID NO: 1302230 - DNA, 15 bp, Homo sapiens
tagtggaccatgaga

SEQ ID NO: 1302231 - DNA, 15 bp, Homo sapiens
ttagtggaccatgag

SEQ ID NO: 1302232 - DNA, 15 bp, Homo sapiens
attagtggaccatga

SEQ ID NO: 1302233 - DNA, 15 bp, Homo sapiens
tattagtggaccatg

SEQ ID NO: 1302234 - DNA, 15 bp, Homo sapiens
ctattagtggaccat

SEQ ID NO: 1302235 - DNA, 15 bp, Homo sapiens
cctattagtggacca

SEQ ID NO: 1302236 - DNA, 15 bp, Homo sapiens
acctattagtggacc

SEQ ID NO: 1302237 - DNA, 15 bp, Homo sapiens
aacctattagtggac

SEQ ID NO: 1302238 - DNA, 15 bp, Homo sapiens
caacctattagtgga

SEQ ID NO: 1302239 - DNA, 15 bp, Homo sapiens
gcaacctattagtgg

SEQ ID NO: 1302240 - DNA, 15 bp, Homo sapiens
tgcaacctattagtg

SEQ ID NO: 1302241 - DNA, 15 bp, Homo sapiens
ttgcaacctattagt

SEQ ID NO: 1302242 - DNA, 15 bp, Homo sapiens
gttgcaacctattag

SEQ ID NO: 1302243 - DNA, 15 bp, Homo sapiens
ggttgcaacctatta

SEQ ID NO: 1302244 - DNA, 15 bp, Homo sapiens
aggttgcaacctatt

SEQ ID NO: 1302245 - DNA, 15 bp, Homo sapiens
caggttgcaacctat

SEQ ID NO: 1302246 - DNA, 15 bp, Homo sapiens
acaggttgcaaccta

SEQ ID NO: 1302247 - DNA, 15 bp, Homo sapiens
cacaggttgcaacct

SEQ ID NO: 1302248 - DNA, 15 bp, Homo sapiens
tcacaggttgcaacc

SEQ ID NO: 1302249 - DNA, 15 bp, Homo sapiens
atcacaggttgcaac

SEQ ID NO: 1302250 - DNA, 15 bp, Homo sapiens
aatcacaggttgcaa

SEQ ID NO: 1302251 - DNA, 15 bp, Homo sapiens
aaatcacaggttgca

SEQ ID NO: 1302252 - DNA, 15 bp, Homo sapiens
aaaatcacaggttgc

SEQ ID NO: 1302253 - DNA, 15 bp, Homo sapiens
taaaatcacaggttg

SEQ ID NO: 1302254 - DNA, 15 bp, Homo sapiens
ttaaaatcacaggtt

SEQ ID NO: 1302255 - DNA, 15 bp, Homo sapiens
tttaaaatcacaggt

SEQ ID NO: 1302256 - DNA, 15 bp, Homo sapiens
ttttaaaatcacagg

SEQ ID NO: 1302257 - DNA, 15 bp, Homo sapiens
tttttaaaatcacag

SEQ ID NO: 1302258 - DNA, 15 bp, Homo sapiens
atttttaaaatcaca

SEQ ID NO: 1302259 - DNA, 15 bp, Homo sapiens
tatttttaaaatcac

SEQ ID NO: 1302260 - DNA, 15 bp, Homo sapiens
gtatttttaaaatca

SEQ ID NO: 1302261 - DNA, 15 bp, Homo sapiens
ggtatttttaaaatc

SEQ ID NO: 1302262 - DNA, 15 bp, Homo sapiens
tggtatttttaaaat

SEQ ID NO: 1302263 - DNA, 15 bp, Homo sapiens
ctggtatttttaaaa

SEQ ID NO: 1302264 - DNA, 15 bp, Homo sapiens
tctggtatttttaaa

SEQ ID NO: 1302265 - DNA, 15 bp, Homo sapiens
atctggtatttttaa

SEQ ID NO: 1302266 - DNA, 15 bp, Homo sapiens
aatctggtattttta

SEQ ID NO: 1302267 - DNA, 15 bp, Homo sapiens
caatctggtattttt

SEQ ID NO: 1302268 - DNA, 15 bp, Homo sapiens
ccaatctggtatttt

SEQ ID NO: 1302269 - DNA, 15 bp, Homo sapiens
cccaatctggtattt

SEQ ID NO: 1302270 - DNA, 15 bp, Homo sapiens
acccaatctggtatt

SEQ ID NO: 1302271 - DNA, 15 bp, Homo sapiens
aacccaatctggtat

SEQ ID NO: 1302272 - DNA, 15 bp, Homo sapiens
taacccaatctggta

SEQ ID NO: 1302273 - DNA, 15 bp, Homo sapiens
ataacccaatctggt

SEQ ID NO: 1302274 - DNA, 15 bp, Homo sapiens
tataacccaatctgg

SEQ ID NO: 1302275 - DNA, 15 bp, Homo sapiens
atataacccaatctg

SEQ ID NO: 1302276 - DNA, 15 bp, Homo sapiens
aatataacccaatct

SEQ ID NO: 1302277 - DNA, 15 bp, Homo sapiens
gaatataacccaatc

SEQ ID NO: 1302278 - DNA, 15 bp, Homo sapiens
tgaatataacccaat

SEQ ID NO: 1302279 - DNA, 15 bp, Homo sapiens
ttgaatataacccaa

SEQ ID NO: 1302280 - DNA, 15 bp, Homo sapiens
tttgaatataaccca

SEQ ID NO: 1302281 - DNA, 15 bp, Homo sapiens
atttgaatataaccc

SEQ ID NO: 1302282 - DNA, 15 bp, Homo sapiens
aatttgaatataacc

SEQ ID NO: 1302283 - DNA, 15 bp, Homo sapiens
gaatttgaatataac

SEQ ID NO: 1302284 - DNA, 15 bp, Homo sapiens
ggaatttgaatataa

SEQ ID NO: 1302285 - DNA, 15 bp, Homo sapiens
gggaatttgaatata

SEQ ID NO: 1302286 - DNA, 15 bp, Homo sapiens
agggaatttgaatat

SEQ ID NO: 1302287 - DNA, 15 bp, Homo sapiens
aagggaatttgaata

SEQ ID NO: 1302288 - DNA, 15 bp, Homo sapiens
aaagggaatttgaat

SEQ ID NO: 1302289 - DNA, 15 bp, Homo sapiens
taaagggaatttgaa

SEQ ID NO: 1302290 - DNA, 15 bp, Homo sapiens
ttaaagggaatttga

SEQ ID NO: 1302291 - DNA, 15 bp, Homo sapiens
gttaaagggaatttg

SEQ ID NO: 1302292 - DNA, 15 bp, Homo sapiens
ggttaaagggaattt

SEQ ID NO: 1302293 - DNA, 15 bp, Homo sapiens
gggttaaagggaatt

SEQ ID NO: 1302294 - DNA, 15 bp, Homo sapiens
ggggttaaagggaat

SEQ ID NO: 1302295 - DNA, 15 bp, Homo sapiens
gggggttaaagggaa

SEQ ID NO: 1302296 - DNA, 15 bp, Homo sapiens
tgggggttaaaggga

SEQ ID NO: 1302297 - DNA, 15 bp, Homo sapiens
ttgggggttaaaggg

SEQ ID NO: 1302298 - DNA, 15 bp, Homo sapiens
tttgggggttaaagg

SEQ ID NO: 1302299 - DNA, 15 bp, Homo sapiens
atttgggggttaaag

SEQ ID NO: 1302300 - DNA, 15 bp, Homo sapiens
gatttgggggttaaa

SEQ ID NO: 1302301 - DNA, 15 bp, Homo sapiens
ggatttgggggttaa

SEQ ID NO: 1302302 - DNA, 15 bp, Homo sapiens
aggatttgggggtta

SEQ ID NO: 1302303 - DNA, 15 bp, Homo sapiens
caggatttgggggtt

SEQ ID NO: 1302304 - DNA, 15 bp, Homo sapiens
acaggatttgggggt

SEQ ID NO: 1302305 - DNA, 15 bp, Homo sapiens
cacaggatttggggg

SEQ ID NO: 1302306 - DNA, 15 bp, Homo sapiens
tcacaggatttgggg

SEQ ID NO: 1302307 - DNA, 15 bp, Homo sapiens
ctcacaggatttggg

SEQ ID NO: 1302308 - DNA, 15 bp, Homo sapiens
actcacaggatttgg

SEQ ID NO: 1302309 - DNA, 15 bp, Homo sapiens
gactcacaggatttg

SEQ ID NO: 1302310 - DNA, 15 bp, Homo sapiens
ggactcacaggattt

SEQ ID NO: 1302311 - DNA, 15 bp, Homo sapiens
tggactcacaggatt

SEQ ID NO: 1302312 - DNA, 15 bp, Homo sapiens
ttggactcacaggat

SEQ ID NO: 1302313 - DNA, 15 bp, Homo sapiens
attggactcacagga

SEQ ID NO: 1302314 - DNA, 15 bp, Homo sapiens
cattggactcacagg

SEQ ID NO: 1302315 - DNA, 15 bp, Homo sapiens
acattggactcacag

SEQ ID NO: 1302316 - DNA, 15 bp, Homo sapiens
tacattggactcaca

SEQ ID NO: 1302317 - DNA, 15 bp, Homo sapiens
ttacattggactcac

SEQ ID NO: 1302318 - DNA, 15 bp, Homo sapiens
tttacattggactca

SEQ ID NO: 1302319 - DNA, 15 bp, Homo sapiens
atttacattggactc

SEQ ID NO: 1302320 - DNA, 15 bp, Homo sapiens
aatttacattggact

SEQ ID NO: 1302321 - DNA, 15 bp, Homo sapiens
caatttacattggac

SEQ ID NO: 1302322 - DNA, 15 bp, Homo sapiens
gcaatttacattgga

SEQ ID NO: 1302323 - DNA, 15 bp, Homo sapiens
agcaatttacattgg

SEQ ID NO: 1302324 - DNA, 15 bp, Homo sapiens
tagcaatttacattg

SEQ ID NO: 1302325 - DNA, 15 bp, Homo sapiens
gtagcaatttacatt

SEQ ID NO: 1302326 - DNA, 15 bp, Homo sapiens
agtagcaatttacat

SEQ ID NO: 1302327 - DNA, 15 bp, Homo sapiens
tagtagcaatttaca

SEQ ID NO: 1302328 - DNA, 15 bp, Homo sapiens
gtagtagcaatttac

SEQ ID NO: 1302329 - DNA, 15 bp, Homo sapiens
tgtagtagcaattta

SEQ ID NO: 1302330 - DNA, 15 bp, Homo sapiens
ctgtagtagcaattt

SEQ ID NO: 1302331 - DNA, 15 bp, Homo sapiens
actgtagtagcaatt

SEQ ID NO: 1302332 - DNA, 15 bp, Homo sapiens
tactgtagtagcaat

SEQ ID NO: 1302333 - DNA, 15 bp, Homo sapiens
atactgtagtagcaa

SEQ ID NO: 1302334 - DNA, 15 bp, Homo sapiens
aatactgtagtagca

SEQ ID NO: 1302335 - DNA, 15 bp, Homo sapiens
taatactgtagtagc

SEQ ID NO: 1302336 - DNA, 15 bp, Homo sapiens
ctaatactgtagtag

SEQ ID NO: 1302337 - DNA, 15 bp, Homo sapiens
cctaatactgtagta

SEQ ID NO: 1302338 - DNA, 15 bp, Homo sapiens
ccctaatactgtagt

SEQ ID NO: 1302339 - DNA, 15 bp, Homo sapiens
accctaatactgtag

SEQ ID NO: 1302340 - DNA, 15 bp, Homo sapiens
taccctaatactgta

SEQ ID NO: 1302341 - DNA, 15 bp, Homo sapiens
gtaccctaatactgt

SEQ ID NO: 1302342 - DNA, 15 bp, Homo sapiens
tgtaccctaatactg

SEQ ID NO: 1302343 - DNA, 15 bp, Homo sapiens
ttgtaccctaatact

SEQ ID NO: 1302344 - DNA, 15 bp, Homo sapiens
tttgtaccctaatac

SEQ ID NO: 1302345 - DNA, 15 bp, Homo sapiens
ttttgtaccctaata

SEQ ID NO: 1302346 - DNA, 15 bp, Homo sapiens
attttgtaccctaat

SEQ ID NO: 1302347 - DNA, 15 bp, Homo sapiens
aattttgtaccctaa

SEQ ID NO: 1302348 - DNA, 15 bp, Homo sapiens
gaattttgtacccta

SEQ ID NO: 1302349 - DNA, 15 bp, Homo sapiens
agaattttgtaccct

SEQ ID NO: 1302350 - DNA, 15 bp, Homo sapiens
cagaattttgtaccc

SEQ ID NO: 1302351 - DNA, 15 bp, Homo sapiens
acagaattttgtacc

SEQ ID NO: 1302352 - DNA, 15 bp, Homo sapiens
cacagaattttgtac

SEQ ID NO: 1302353 - DNA, 15 bp, Homo sapiens
gcacagaattttgta

SEQ ID NO: 1302354 - DNA, 15 bp, Homo sapiens
tgcacagaattttgt

SEQ ID NO: 1302355 - DNA, 15 bp, Homo sapiens
gtgcacagaattttg

SEQ ID NO: 1302356 - DNA, 15 bp, Homo sapiens
tgtgcacagaatttt

SEQ ID NO: 1302357 - DNA, 15 bp, Homo sapiens
ctgtgcacagaattt

SEQ ID NO: 1302358 - DNA, 15 bp, Homo sapiens
gctgtgcacagaatt

SEQ ID NO: 1302359 - DNA, 15 bp, Homo sapiens
tgctgtgcacagaat

SEQ ID NO: 1302360 - DNA, 15 bp, Homo sapiens
ctgctgtgcacagaa

SEQ ID NO: 1302361 - DNA, 15 bp, Homo sapiens
cctgctgtgcacaga

SEQ ID NO: 1302362 - DNA, 15 bp, Homo sapiens
gcctgctgtgcacag

SEQ ID NO: 1302363 - DNA, 15 bp, Homo sapiens
agcctgctgtgcaca

SEQ ID NO: 1302364 - DNA, 15 bp, Homo sapiens
gagcctgctgtgcac

SEQ ID NO: 1302365 - DNA, 15 bp, Homo sapiens
tgagcctgctgtgca

SEQ ID NO: 1302366 - DNA, 15 bp, Homo sapiens
gtgagcctgctgtgc

SEQ ID NO: 1302367 - DNA, 15 bp, Homo sapiens
tgtgagcctgctgtg

SEQ ID NO: 1302368 - DNA, 15 bp, Homo sapiens
ctgtgagcctgctgt

SEQ ID NO: 1302369 - DNA, 15 bp, Homo sapiens
tctgtgagcctgctg

SEQ ID NO: 1302370 - DNA, 15 bp, Homo sapiens
atctgtgagcctgct

SEQ ID NO: 1302371 - DNA, 15 bp, Homo sapiens
tatctgtgagcctgc

SEQ ID NO: 1302372 - DNA, 15 bp, Homo sapiens
ttatctgtgagcctg

SEQ ID NO: 1302373 - DNA, 15 bp, Homo sapiens
tttatctgtgagcct

SEQ ID NO: 1302374 - DNA, 15 bp, Homo sapiens
ctttatctgtgagcc

SEQ ID NO: 1302375 - DNA, 15 bp, Homo sapiens
actttatctgtgagc

SEQ ID NO: 1302376 - DNA, 15 bp, Homo sapiens
aactttatctgtgag

SEQ ID NO: 1302377 - DNA, 15 bp, Homo sapiens
aaactttatctgtga

SEQ ID NO: 1302378 - DNA, 15 bp, Homo sapiens
aaaactttatctgtg

SEQ ID NO: 1302379 - DNA, 15 bp, Homo sapiens
aaaaactttatctgt

SEQ ID NO: 1302380 - DNA, 15 bp, Homo sapiens
caaaaactttatctg

SEQ ID NO: 1302381 - DNA, 15 bp, Homo sapiens
tcaaaaactttatct

SEQ ID NO: 1302382 - DNA, 15 bp, Homo sapiens
gtcaaaaactttatc

SEQ ID NO: 1302383 - DNA, 15 bp, Homo sapiens
tgtcaaaaactttat

SEQ ID NO: 1302384 - DNA, 15 bp, Homo sapiens
ttgtcaaaaacttta

SEQ ID NO: 1302385 - DNA, 15 bp, Homo sapiens
tttgtcaaaaacttt

SEQ ID NO: 1302386 - DNA, 15 bp, Homo sapiens
gtttgtcaaaaactt

SEQ ID NO: 1302387 - DNA, 15 bp, Homo sapiens
agtttgtcaaaaact

SEQ ID NO: 1302388 - DNA, 15 bp, Homo sapiens
cagtttgtcaaaaac

SEQ ID NO: 1302389 - DNA, 15 bp, Homo sapiens
tcagtttgtcaaaaa

SEQ ID NO: 1302390 - DNA, 15 bp, Homo sapiens
ttcagtttgtcaaaa

SEQ ID NO: 1302391 - DNA, 15 bp, Homo sapiens
tttcagtttgtcaaa

SEQ ID NO: 1302392 - DNA, 15 bp, Homo sapiens
ttttcagtttgtcaa

SEQ ID NO: 1302393 - DNA, 15 bp, Homo sapiens
gttttcagtttgtca

SEQ ID NO: 1302394 - DNA, 15 bp, Homo sapiens
ggttttcagtttgtc

SEQ ID NO: 1302395 - DNA, 15 bp, Homo sapiens
tggttttcagtttgt

SEQ ID NO: 1302396 - DNA, 15 bp, Homo sapiens
atggttttcagtttg

SEQ ID NO: 1302397 - DNA, 15 bp, Homo sapiens
catggttttcagttt

SEQ ID NO: 1302398 - DNA, 15 bp, Homo sapiens
acatggttttcagtt

SEQ ID NO: 1302399 - DNA, 15 bp, Homo sapiens
cacatggttttcagt

SEQ ID NO: 1302400 - DNA, 15 bp, Homo sapiens
acacatggttttcag

SEQ ID NO: 1302401 - DNA, 15 bp, Homo sapiens
aacacatggttttca

SEQ ID NO: 1302402 - DNA, 15 bp, Homo sapiens
taacacatggttttc

SEQ ID NO: 1302403 - DNA, 15 bp, Homo sapiens
ataacacatggtttt

SEQ ID NO: 1302404 - DNA, 15 bp, Homo sapiens
aataacacatggttt

SEQ ID NO: 1302405 - DNA, 15 bp, Homo sapiens
taataacacatggtt

SEQ ID NO: 1302406 - DNA, 15 bp, Homo sapiens
ttaataacacatggt

SEQ ID NO: 1302407 - DNA, 15 bp, Homo sapiens
attaataacacatgg

SEQ ID NO: 1302408 - DNA, 15 bp, Homo sapiens
aattaataacacatg

SEQ ID NO: 1302409 - DNA, 15 bp, Homo sapiens
gaattaataacacat

SEQ ID NO: 1302410 - DNA, 15 bp, Homo sapiens
tgaattaataacaca

SEQ ID NO: 1302411 - DNA, 15 bp, Homo sapiens
gtgaattaataacac

SEQ ID NO: 1302412 - DNA, 15 bp, Homo sapiens
agtgaattaataaca

SEQ ID NO: 1302413 - DNA, 15 bp, Homo sapiens
aagtgaattaataac

SEQ ID NO: 1302414 - DNA, 15 bp, Homo sapiens
taagtgaattaataa

SEQ ID NO: 1302415 - DNA, 15 bp, Homo sapiens
gtaagtgaattaata

SEQ ID NO: 1302416 - DNA, 15 bp, Homo sapiens
agtaagtgaattaat

SEQ ID NO: 1302417 - DNA, 15 bp, Homo sapiens
gagtaagtgaattaa

SEQ ID NO: 1302418 - DNA, 15 bp, Homo sapiens
tgagtaagtgaatta

SEQ ID NO: 1302419 - DNA, 15 bp, Homo sapiens
atgagtaagtgaatt

SEQ ID NO: 1302420 - DNA, 15 bp, Homo sapiens
aatgagtaagtgaat

SEQ ID NO: 1302421 - DNA, 15 bp, Homo sapiens
caatgagtaagtgaa

SEQ ID NO: 1302422 - DNA, 15 bp, Homo sapiens
tcaatgagtaagtga

SEQ ID NO: 1302423 - DNA, 15 bp, Homo sapiens
atcaatgagtaagtg

SEQ ID NO: 1302424 - DNA, 15 bp, Homo sapiens
aatcaatgagtaagt

SEQ ID NO: 1302425 - DNA, 15 bp, Homo sapiens
gaatcaatgagtaag

SEQ ID NO: 1302426 - DNA, 15 bp, Homo sapiens
tgaatcaatgagtaa

SEQ ID NO: 1302427 - DNA, 15 bp, Homo sapiens
gtgaatcaatgagta

SEQ ID NO: 1302428 - DNA, 15 bp, Homo sapiens
agtgaatcaatgagt

SEQ ID NO: 1302429 - DNA, 15 bp, Homo sapiens
aagtgaatcaatgag

SEQ ID NO: 1302430 - DNA, 15 bp, Homo sapiens
gaagtgaatcaatga

SEQ ID NO: 1302431 - DNA, 15 bp, Homo sapiens
ggaagtgaatcaatg

SEQ ID NO: 1302432 - DNA, 15 bp, Homo sapiens
aggaagtgaatcaat

SEQ ID NO: 1302433 - DNA, 15 bp, Homo sapiens
gaggaagtgaatcaa

SEQ ID NO: 1302434 - DNA, 15 bp, Homo sapiens
tgaggaagtgaatca

SEQ ID NO: 1302435 - DNA, 15 bp, Homo sapiens
atgaggaagtgaatc

SEQ ID NO: 1302436 - DNA, 15 bp, Homo sapiens
gatgaggaagtgaat

SEQ ID NO: 1302437 - DNA, 15 bp, Homo sapiens
ggatgaggaagtgaa

SEQ ID NO: 1302438 - DNA, 15 bp, Homo sapiens
tggatgaggaagtga

SEQ ID NO: 1302439 - DNA, 15 bp, Homo sapiens
atggatgaggaagtg

SEQ ID NO: 1302440 - DNA, 15 bp, Homo sapiens
gatggatgaggaagt

SEQ ID NO: 1302441 - DNA, 15 bp, Homo sapiens
ggatggatgaggaag

SEQ ID NO: 1302442 - DNA, 15 bp, Homo sapiens
gggatggatgaggaa

SEQ ID NO: 1302443 - DNA, 15 bp, Homo sapiens
cgggatggatgagga

SEQ ID NO: 1302444 - DNA, 15 bp, Homo sapiens
acgggatggatgagg

SEQ ID NO: 1302445 - DNA, 15 bp, Homo sapiens
aacgggatggatgag

SEQ ID NO: 1302446 - DNA, 15 bp, Homo sapiens
gaacgggatggatga

SEQ ID NO: 1302447 - DNA, 15 bp, Homo sapiens
tgaacgggatggatg

SEQ ID NO: 1302448 - DNA, 15 bp, Homo sapiens
atgaacgggatggat

SEQ ID NO: 1302449 - DNA, 15 bp, Homo sapiens
aatgaacgggatgga

SEQ ID NO: 1302450 - DNA, 15 bp, Homo sapiens
taatgaacgggatgg

SEQ ID NO: 1302451 - DNA, 15 bp, Homo sapiens
gtaatgaacgggatg

SEQ ID NO: 1302452 - DNA, 15 bp, Homo sapiens
agtaatgaacgggat

SEQ ID NO: 1302453 - DNA, 15 bp, Homo sapiens
aagtaatgaacggga

SEQ ID NO: 1302454 - DNA, 15 bp, Homo sapiens
taagtaatgaacggg

SEQ ID NO: 1302455 - DNA, 15 bp, Homo sapiens
gtaagtaatgaacgg

SEQ ID NO: 1302456 - DNA, 15 bp, Homo sapiens
ggtaagtaatgaacg

SEQ ID NO: 1302457 - DNA, 15 bp, Homo sapiens
tggtaagtaatgaac

SEQ ID NO: 1302458 - DNA, 15 bp, Homo sapiens
atggtaagtaatgaa

SEQ ID NO: 1302459 - DNA, 15 bp, Homo sapiens
catggtaagtaatga

SEQ ID NO: 1302460 - DNA, 15 bp, Homo sapiens
acatggtaagtaatg

SEQ ID NO: 1302461 - DNA, 15 bp, Homo sapiens
cacatggtaagtaat

SEQ ID NO: 1302462 - DNA, 15 bp, Homo sapiens
gcacatggtaagtaa

SEQ ID NO: 1302463 - DNA, 15 bp, Homo sapiens
ggcacatggtaagta

SEQ ID NO: 1302464 - DNA, 15 bp, Homo sapiens
tggcacatggtaagt

SEQ ID NO: 1302465 - DNA, 15 bp, Homo sapiens
ctggcacatggtaag

SEQ ID NO: 1302466 - DNA, 15 bp, Homo sapiens
cctggcacatggtaa

SEQ ID NO: 1302467 - DNA, 15 bp, Homo sapiens
acctggcacatggta

SEQ ID NO: 1302468 - DNA, 15 bp, Homo sapiens
tacctggcacatggt

SEQ ID NO: 1302469 - DNA, 15 bp, Homo sapiens
agtacctggcacatg

SEQ ID NO: 1302470 - DNA, 15 bp, Homo sapiens
cagtacctggcacat

SEQ ID NO: 1302471 - DNA, 15 bp, Homo sapiens
acagtacctggcaca

SEQ ID NO: 1302472 - DNA, 15 bp, Homo sapiens
cacagtacctggcac

SEQ ID NO: 1302473 - DNA, 15 bp, Homo sapiens
gcacagtacctggca

SEQ ID NO: 1302474 - DNA, 15 bp, Homo sapiens
agcacagtacctggc

SEQ ID NO: 1302475 - DNA, 15 bp, Homo sapiens
tagcacagtacctgg

SEQ ID NO: 1302476 - DNA, 15 bp, Homo sapiens
ctagcacagtacctg

SEQ ID NO: 1302477 - DNA, 15 bp, Homo sapiens
cctagcacagtacct

SEQ ID NO: 1302478 - DNA, 15 bp, Homo sapiens
gcctagcacagtacc

SEQ ID NO: 1302479 - DNA, 15 bp, Homo sapiens
ggcctagcacagtac

SEQ ID NO: 1302480 - DNA, 15 bp, Homo sapiens
tggcctagcacagta

SEQ ID NO: 1302481 - DNA, 15 bp, Homo sapiens
gtggcctagcacagt

SEQ ID NO: 1302482 - DNA, 15 bp, Homo sapiens
tgtggcctagcacag

SEQ ID NO: 1302483 - DNA, 15 bp, Homo sapiens
atgtggcctagcaca

SEQ ID NO: 1302484 - DNA, 15 bp, Homo sapiens
aatgtggcctagcac

SEQ ID NO: 1302485 - DNA, 15 bp, Homo sapiens
caatgtggcctagca

SEQ ID NO: 1302486 - DNA, 15 bp, Homo sapiens
tcaatgtggcctagc

SEQ ID NO: 1302487 - DNA, 15 bp, Homo sapiens
atcaatgtggcctag

SEQ ID NO: 1302488 - DNA, 15 bp, Homo sapiens
tatcaatgtggccta

SEQ ID NO: 1302489 - DNA, 15 bp, Homo sapiens
atatcaatgtggcct

SEQ ID NO: 1302490 - DNA, 15 bp, Homo sapiens
tatatcaatgtggcc

SEQ ID NO: 1302491 - DNA, 15 bp, Homo sapiens
ttatatcaatgtggc

SEQ ID NO: 1302492 - DNA, 15 bp, Homo sapiens
cttatatcaatgtgg

SEQ ID NO: 1302493 - DNA, 15 bp, Homo sapiens
ccttatatcaatgtg

SEQ ID NO: 1302494 - DNA, 15 bp, Homo sapiens
accttatatcaatgt

SEQ ID NO: 1302495 - DNA, 15 bp, Homo sapiens
taccttatatcaatg

SEQ ID NO: 1302496 - DNA, 15 bp, Homo sapiens
ttaccttatatcaat

SEQ ID NO: 1302497 - DNA, 15 bp, Homo sapiens
tttaccttatatcaa

SEQ ID NO: 1302498 - DNA, 15 bp, Homo sapiens
atttaccttatatca

SEQ ID NO: 1302499 - DNA, 15 bp, Homo sapiens
tatttaccttatatc

SEQ ID NO: 1302500 - DNA, 15 bp, Homo sapiens
ttatttaccttatat

SEQ ID NO: 1302501 - DNA, 15 bp, Homo sapiens
cttatttaccttata

SEQ ID NO: 1302502 - DNA, 15 bp, Homo sapiens
tcttatttaccttat

SEQ ID NO: 1302503 - DNA, 15 bp, Homo sapiens
gtcttatttacctta

SEQ ID NO: 1302504 - DNA, 15 bp, Homo sapiens
tgtcttatttacctt

SEQ ID NO: 1302505 - DNA, 15 bp, Homo sapiens
gtgtcttatttacct

SEQ ID NO: 1302506 - DNA, 15 bp, Homo sapiens
tgtgtcttatttacc

SEQ ID NO: 1302507 - DNA, 15 bp, Homo sapiens
ctgtgtcttatttac

SEQ ID NO: 1302508 - DNA, 15 bp, Homo sapiens
gctgtgtcttattta

SEQ ID NO: 1302509 - DNA, 15 bp, Homo sapiens
ggctgtgtcttattt

SEQ ID NO: 1302510 - DNA, 15 bp, Homo sapiens
gggctgtgtcttatt

SEQ ID NO: 1302511 - DNA, 15 bp, Homo sapiens
ggggctgtgtcttat

SEQ ID NO: 1302512 - DNA, 15 bp, Homo sapiens
aggggctgtgtctta

SEQ ID NO: 1302513 - DNA, 15 bp, Homo sapiens
caggggctgtgtctt

SEQ ID NO: 1302514 - DNA, 15 bp, Homo sapiens
acaggggctgtgtct

SEQ ID NO: 1302515 - DNA, 15 bp, Homo sapiens
aacaggggctgtgtc

SEQ ID NO: 1302516 - DNA, 15 bp, Homo sapiens
gaacaggggctgtgt

SEQ ID NO: 1302517 - DNA, 15 bp, Homo sapiens
agaacaggggctgtg

SEQ ID NO: 1302518 - DNA, 15 bp, Homo sapiens
gagaacaggggctgt

SEQ ID NO: 1302519 - DNA, 15 bp, Homo sapiens
tgagaacaggggctg

SEQ ID NO: 1302520 - DNA, 15 bp, Homo sapiens
ttgagaacaggggct

SEQ ID NO: 1302521 - DNA, 15 bp, Homo sapiens
tttgagaacaggggc

SEQ ID NO: 1302522 - DNA, 15 bp, Homo sapiens
ctttgagaacagggg

SEQ ID NO: 1302523 - DNA, 15 bp, Homo sapiens
tctttgagaacaggg

SEQ ID NO: 1302524 - DNA, 15 bp, Homo sapiens
ctctttgagaacagg

SEQ ID NO: 1302525 - DNA, 15 bp, Homo sapiens
gctctttgagaacag

SEQ ID NO: 1302526 - DNA, 15 bp, Homo sapiens
agctctttgagaaca

SEQ ID NO: 1302527 - DNA, 15 bp, Homo sapiens
gagctctttgagaac

SEQ ID NO: 1302528 - DNA, 15 bp, Homo sapiens
agagctctttgagaa

SEQ ID NO: 1302529 - DNA, 15 bp, Homo sapiens
aagagctctttgaga

SEQ ID NO: 1302530 - DNA, 15 bp, Homo sapiens
caagagctctttgag

SEQ ID NO: 1302531 - DNA, 15 bp, Homo sapiens
ccaagagctctttga

SEQ ID NO: 1302532 - DNA, 15 bp, Homo sapiens
accaagagctctttg

SEQ ID NO: 1302533 - DNA, 15 bp, Homo sapiens
aaccaagagctcttt

SEQ ID NO: 1302534 - DNA, 15 bp, Homo sapiens
taaccaagagctctt

SEQ ID NO: 1302535 - DNA, 15 bp, Homo sapiens
gtaaccaagagctct

SEQ ID NO: 1302536 - DNA, 15 bp, Homo sapiens
tgtaaccaagagctc

SEQ ID NO: 1302537 - DNA, 15 bp, Homo sapiens
ctgtaaccaagagct

SEQ ID NO: 1302538 - DNA, 15 bp, Homo sapiens
cctgtaaccaagagc

SEQ ID NO: 1302539 - DNA, 15 bp, Homo sapiens
ccctgtaaccaagag

SEQ ID NO: 1302540 - DNA, 15 bp, Homo sapiens
tccctgtaaccaaga

SEQ ID NO: 1302541 - DNA, 15 bp, Homo sapiens
gtccctgtaaccaag

SEQ ID NO: 1302542 - DNA, 15 bp, Homo sapiens
tgtccctgtaaccaa

SEQ ID NO: 1302543 - DNA, 15 bp, Homo sapiens
gtgtccctgtaacca

SEQ ID NO: 1302544 - DNA, 15 bp, Homo sapiens
agtgtccctgtaacc

SEQ ID NO: 1302545 - DNA, 15 bp, Homo sapiens
cagtgtccctgtaac

SEQ ID NO: 1302546 - DNA, 15 bp, Homo sapiens
tcagtgtccctgtaa

SEQ ID NO: 1302547 - DNA, 15 bp, Homo sapiens
atcagtgtccctgta

SEQ ID NO: 1302548 - DNA, 15 bp, Homo sapiens
aatcagtgtccctgt

SEQ ID NO: 1302549 - DNA, 15 bp, Homo sapiens
taatcagtgtccctg

SEQ ID NO: 1302550 - DNA, 15 bp, Homo sapiens
ctaatcagtgtccct

SEQ ID NO: 1302551 - DNA, 15 bp, Homo sapiens
cctaatcagtgtccc

SEQ ID NO: 1302552 - DNA, 15 bp, Homo sapiens
acctaatcagtgtcc

SEQ ID NO: 1302553 - DNA, 15 bp, Homo sapiens
aacctaatcagtgtc

SEQ ID NO: 1302554 - DNA, 15 bp, Homo sapiens
aaacctaatcagtgt

SEQ ID NO: 1302555 - DNA, 15 bp, Homo sapiens
gaaacctaatcagtg

SEQ ID NO: 1302556 - DNA, 15 bp, Homo sapiens
ggaaacctaatcagt

SEQ ID NO: 1302557 - DNA, 15 bp, Homo sapiens
aggaaacctaatcag

SEQ ID NO: 1302558 - DNA, 15 bp, Homo sapiens
caggaaacctaatca

SEQ ID NO: 1302559 - DNA, 15 bp, Homo sapiens
ccaggaaacctaatc

SEQ ID NO: 1302560 - DNA, 15 bp, Homo sapiens
cccaggaaacctaat

SEQ ID NO: 1302561 - DNA, 15 bp, Homo sapiens
ccccaggaaacctaa

SEQ ID NO: 1302562 - DNA, 15 bp, Homo sapiens
accccaggaaaccta

SEQ ID NO: 1302563 - DNA, 15 bp, Homo sapiens
aaccccaggaaacct

SEQ ID NO: 1302564 - DNA, 15 bp, Homo sapiens
caaccccaggaaacc

SEQ ID NO: 1302565 - DNA, 15 bp, Homo sapiens
gcaaccccaggaaac

SEQ ID NO: 1302566 - DNA, 15 bp, Homo sapiens
ggcaaccccaggaaa

SEQ ID NO: 1302567 - DNA, 15 bp, Homo sapiens
tggcaaccccaggaa

SEQ ID NO: 1302568 - DNA, 15 bp, Homo sapiens
ctggcaaccccagga

SEQ ID NO: 1302569 - DNA, 15 bp, Homo sapiens
cctggcaaccccagg

SEQ ID NO: 1302570 - DNA, 15 bp, Homo sapiens
tcctggcaaccccag

SEQ ID NO: 1302571 - DNA, 15 bp, Homo sapiens
atcctggcaacccca

SEQ ID NO: 1302572 - DNA, 15 bp, Homo sapiens
gatcctggcaacccc

SEQ ID NO: 1302573 - DNA, 15 bp, Homo sapiens
ggatcctggcaaccc

SEQ ID NO: 1302574 - DNA, 15 bp, Homo sapiens
aggatcctggcaacc

SEQ ID NO: 1302575 - DNA, 15 bp, Homo sapiens
taggatcctggcaac

SEQ ID NO: 1302576 - DNA, 15 bp, Homo sapiens
ctaggatcctggcaa

SEQ ID NO: 1302577 - DNA, 15 bp, Homo sapiens
gctaggatcctggca

SEQ ID NO: 1302578 - DNA, 15 bp, Homo sapiens
tgctaggatcctggc

SEQ ID NO: 1302579 - DNA, 15 bp, Homo sapiens
atgctaggatcctgg

SEQ ID NO: 1302580 - DNA, 15 bp, Homo sapiens
gatgctaggatcctg

SEQ ID NO: 1302581 - DNA, 15 bp, Homo sapiens
agatgctaggatcct

SEQ ID NO: 1302582 - DNA, 15 bp, Homo sapiens
cagatgctaggatcc

SEQ ID NO: 1302583 - DNA, 15 bp, Homo sapiens
gcagatgctaggatc

SEQ ID NO: 1302584 - DNA, 15 bp, Homo sapiens
agcagatgctaggat

SEQ ID NO: 1302585 - DNA, 15 bp, Homo sapiens
aagcagatgctagga

SEQ ID NO: 1302586 - DNA, 15 bp, Homo sapiens
aaagcagatgctagg

SEQ ID NO: 1302587 - DNA, 15 bp, Homo sapiens
gaaagcagatgctag

SEQ ID NO: 1302588 - DNA, 15 bp, Homo sapiens
ggaaagcagatgcta

SEQ ID NO: 1302589 - DNA, 15 bp, Homo sapiens
gggaaagcagatgct

SEQ ID NO: 1302590 - DNA, 15 bp, Homo sapiens
agggaaagcagatgc

SEQ ID NO: 1302591 - DNA, 15 bp, Homo sapiens
cagggaaagcagatg

SEQ ID NO: 1302592 - DNA, 15 bp, Homo sapiens
tcagggaaagcagat

SEQ ID NO: 1302593 - DNA, 15 bp, Homo sapiens
ctcagggaaagcaga

SEQ ID NO: 1302594 - DNA, 15 bp, Homo sapiens
actcagggaaagcag

SEQ ID NO: 1302595 - DNA, 15 bp, Homo sapiens
aactcagggaaagca

SEQ ID NO: 1302596 - DNA, 15 bp, Homo sapiens
aaactcagggaaagc

SEQ ID NO: 1302597 - DNA, 15 bp, Homo sapiens
gaaactcagggaaag

SEQ ID NO: 1302598 - DNA, 15 bp, Homo sapiens
ggaaactcagggaaa

SEQ ID NO: 1302599 - DNA, 15 bp, Homo sapiens
aggaaactcagggaa

SEQ ID NO: 1302600 - DNA, 15 bp, Homo sapiens
aaggaaactcaggga

SEQ ID NO: 1302601 - DNA, 15 bp, Homo sapiens
caaggaaactcaggg

SEQ ID NO: 1302602 - DNA, 15 bp, Homo sapiens
ccaaggaaactcagg

SEQ ID NO: 1302603 - DNA, 15 bp, Homo sapiens
tccaaggaaactcag

SEQ ID NO: 1302604 - DNA, 15 bp, Homo sapiens
ttccaaggaaactca

SEQ ID NO: 1302605 - DNA, 15 bp, Homo sapiens
cttccaaggaaactc

SEQ ID NO: 1302606 - DNA, 15 bp, Homo sapiens
ccttccaaggaaact

SEQ ID NO: 1302607 - DNA, 15 bp, Homo sapiens
tccttccaaggaaac

SEQ ID NO: 1302608 - DNA, 15 bp, Homo sapiens
ttccttccaaggaaa

SEQ ID NO: 1302609 - DNA, 15 bp, Homo sapiens
cttccttccaaggaa

SEQ ID NO: 1302610 - DNA, 15 bp, Homo sapiens
ccttccttccaagga

SEQ ID NO: 1302611 - DNA, 15 bp, Homo sapiens
accttccttccaagg

SEQ ID NO: 1302612 - DNA, 15 bp, Homo sapiens
gaccttccttccaag

SEQ ID NO: 1302613 - DNA, 15 bp, Homo sapiens
ggaccttccttccaa

SEQ ID NO: 1302614 - DNA, 15 bp, Homo sapiens
gggaccttccttcca

SEQ ID NO: 1302615 - DNA, 15 bp, Homo sapiens
tgggaccttccttcc

SEQ ID NO: 1302616 - DNA, 15 bp, Homo sapiens
atgggaccttccttc

SEQ ID NO: 1302617 - DNA, 15 bp, Homo sapiens
catgggaccttcctt

SEQ ID NO: 1302618 - DNA, 15 bp, Homo sapiens
gcatgggaccttcct

SEQ ID NO: 1302619 - DNA, 15 bp, Homo sapiens
tgcatgggaccttcc

SEQ ID NO: 1302620 - DNA, 15 bp, Homo sapiens
atgcatgggaccttc

SEQ ID NO: 1302621 - DNA, 15 bp, Homo sapiens
catgcatgggacctt

SEQ ID NO: 1302622 - DNA, 15 bp, Homo sapiens
tcatgcatgggacct

SEQ ID NO: 1302623 - DNA, 15 bp, Homo sapiens
gtcatgcatgggacc

SEQ ID NO: 1302624 - DNA, 15 bp, Homo sapiens
tgtcatgcatgggac

SEQ ID NO: 1302625 - DNA, 15 bp, Homo sapiens
gtgtcatgcatggga

SEQ ID NO: 1302626 - DNA, 15 bp, Homo sapiens
tgtgtcatgcatggg

SEQ ID NO: 1302627 - DNA, 15 bp, Homo sapiens
atgtgtcatgcatgg

SEQ ID NO: 1302628 - DNA, 15 bp, Homo sapiens
gatgtgtcatgcatg

SEQ ID NO: 1302629 - DNA, 15 bp, Homo sapiens
ggatgtgtcatgcat

SEQ ID NO: 1302630 - DNA, 15 bp, Homo sapiens
aggatgtgtcatgca

SEQ ID NO: 1302631 - DNA, 15 bp, Homo sapiens
caggatgtgtcatgc

SEQ ID NO: 1302632 - DNA, 15 bp, Homo sapiens
acaggatgtgtcatg

SEQ ID NO: 1302633 - DNA, 15 bp, Homo sapiens
aacaggatgtgtcat

SEQ ID NO: 1302634 - DNA, 15 bp, Homo sapiens
gaacaggatgtgtca

SEQ ID NO: 1302635 - DNA, 15 bp, Homo sapiens
cgaacaggatgtgtc

SEQ ID NO: 1302636 - DNA, 15 bp, Homo sapiens
gcgaacaggatgtgt

SEQ ID NO: 1302637 - DNA, 15 bp, Homo sapiens
agcgaacaggatgtg

SEQ ID NO: 1302638 - DNA, 15 bp, Homo sapiens
cagcgaacaggatgt

SEQ ID NO: 1302639 - DNA, 15 bp, Homo sapiens
acagcgaacaggatg

SEQ ID NO: 1302640 - DNA, 15 bp, Homo sapiens
aacagcgaacaggat

SEQ ID NO: 1302641 - DNA, 15 bp, Homo sapiens
gaacagcgaacagga

SEQ ID NO: 1302642 - DNA, 15 bp, Homo sapiens
agaacagcgaacagg

SEQ ID NO: 1302643 - DNA, 15 bp, Homo sapiens
aagaacagcgaacag

SEQ ID NO: 1302644 - DNA, 15 bp, Homo sapiens
caagaacagcgaaca

SEQ ID NO: 1302645 - DNA, 15 bp, Homo sapiens
ccaagaacagcgaac

SEQ ID NO: 1302646 - DNA, 15 bp, Homo sapiens
cccaagaacagcgaa

SEQ ID NO: 1302647 - DNA, 15 bp, Homo sapiens
acccaagaacagcga

SEQ ID NO: 1302648 - DNA, 15 bp, Homo sapiens
cacccaagaacagcg

SEQ ID NO: 1302649 - DNA, 15 bp, Homo sapiens
tcacccaagaacagc

SEQ ID NO: 1302650 - DNA, 15 bp, Homo sapiens
gtcacccaagaacag

SEQ ID NO: 1302651 - DNA, 15 bp, Homo sapiens
cgtcacccaagaaca

SEQ ID NO: 1302652 - DNA, 15 bp, Homo sapiens
acgtcacccaagaac

SEQ ID NO: 1302653 - DNA, 15 bp, Homo sapiens
tacgtcacccaagaa

SEQ ID NO: 1302654 - DNA, 15 bp, Homo sapiens
atacgtcacccaaga

SEQ ID NO: 1302655 - DNA, 15 bp, Homo sapiens
catacgtcacccaag

SEQ ID NO: 1302656 - DNA, 15 bp, Homo sapiens
acatacgtcacccaa

SEQ ID NO: 1302657 - DNA, 15 bp, Homo sapiens
tacatacgtcaccca

SEQ ID NO: 1302658 - DNA, 15 bp, Homo sapiens
ctacatacgtcaccc

SEQ ID NO: 1302659 - DNA, 15 bp, Homo sapiens
gctacatacgtcacc

SEQ ID NO: 1302660 - DNA, 15 bp, Homo sapiens
ggctacatacgtcac

SEQ ID NO: 1302661 - DNA, 15 bp, Homo sapiens
gggctacatacgtca

SEQ ID NO: 1302662 - DNA, 15 bp, Homo sapiens
agggctacatacgtc

SEQ ID NO: 1302663 - DNA, 15 bp, Homo sapiens
tagggctacatacgt

SEQ ID NO: 1302664 - DNA, 15 bp, Homo sapiens
ttagggctacatacg

SEQ ID NO: 1302665 - DNA, 15 bp, Homo sapiens
tttagggctacatac

SEQ ID NO: 1302666 - DNA, 15 bp, Homo sapiens
ctttagggctacata

SEQ ID NO: 1302667 - DNA, 15 bp, Homo sapiens
actttagggctacat

SEQ ID NO: 1302668 - DNA, 15 bp, Homo sapiens
gactttagggctaca

SEQ ID NO: 1302669 - DNA, 15 bp, Homo sapiens
agactttagggctac

SEQ ID NO: 1302670 - DNA, 15 bp, Homo sapiens
aagactttagggcta

SEQ ID NO: 1302671 - DNA, 15 bp, Homo sapiens
caagactttagggct

SEQ ID NO: 1302672 - DNA, 15 bp, Homo sapiens
ccaagactttagggc

SEQ ID NO: 1302673 - DNA, 15 bp, Homo sapiens
gccaagactttaggg

SEQ ID NO: 1302674 - DNA, 15 bp, Homo sapiens
ggccaagactttagg

SEQ ID NO: 1302675 - DNA, 15 bp, Homo sapiens
gggccaagactttag

SEQ ID NO: 1302676 - DNA, 15 bp, Homo sapiens
tgggccaagacttta

SEQ ID NO: 1302677 - DNA, 15 bp, Homo sapiens
ctgggccaagacttt

SEQ ID NO: 1302678 - DNA, 15 bp, Homo sapiens
actgggccaagactt

SEQ ID NO: 1302679 - DNA, 15 bp, Homo sapiens
tactgggccaagact

SEQ ID NO: 1302680 - DNA, 15 bp, Homo sapiens
ctactgggccaagac

SEQ ID NO: 1302681 - DNA, 15 bp, Homo sapiens
gctactgggccaaga

SEQ ID NO: 1302682 - DNA, 15 bp, Homo sapiens
tgctactgggccaag

SEQ ID NO: 1302683 - DNA, 15 bp, Homo sapiens
ctgctactgggccaa

SEQ ID NO: 1302684 - DNA, 15 bp, Homo sapiens
tctgctactgggcca

SEQ ID NO: 1302685 - DNA, 15 bp, Homo sapiens
ctctgctactgggcc

SEQ ID NO: 1302686 - DNA, 15 bp, Homo sapiens
tctctgctactgggc

SEQ ID NO: 1302687 - DNA, 15 bp, Homo sapiens
ttctctgctactggg

SEQ ID NO: 1302688 - DNA, 15 bp, Homo sapiens
attctctgctactgg

SEQ ID NO: 1302689 - DNA, 15 bp, Homo sapiens
aattctctgctactg

SEQ ID NO: 1302690 - DNA, 15 bp, Homo sapiens
aaattctctgctact

SEQ ID NO: 1302691 - DNA, 15 bp, Homo sapiens
gaaattctctgctac

SEQ ID NO: 1302692 - DNA, 15 bp, Homo sapiens
tgaaattctctgcta

SEQ ID NO: 1302693 - DNA, 15 bp, Homo sapiens
gtgaaattctctgct

SEQ ID NO: 1302694 - DNA, 15 bp, Homo sapiens
tgtgaaattctctgc

SEQ ID NO: 1302695 - DNA, 15 bp, Homo sapiens
atgtgaaattctctg

SEQ ID NO: 1302696 - DNA, 15 bp, Homo sapiens
gatgtgaaattctct

SEQ ID NO: 1302697 - DNA, 15 bp, Homo sapiens
ggatgtgaaattctc

SEQ ID NO: 1302698 - DNA, 15 bp, Homo sapiens
aggatgtgaaattct

SEQ ID NO: 1302699 - DNA, 15 bp, Homo sapiens
aaggatgtgaaattc

SEQ ID NO: 1302700 - DNA, 15 bp, Homo sapiens
gaaggatgtgaaatt

SEQ ID NO: 1302701 - DNA, 15 bp, Homo sapiens
tgaaggatgtgaaat

SEQ ID NO: 1302702 - DNA, 15 bp, Homo sapiens
ctgaaggatgtgaaa

SEQ ID NO: 1302703 - DNA, 15 bp, Homo sapiens
actgaaggatgtgaa

SEQ ID NO: 1302704 - DNA, 15 bp, Homo sapiens
tactgaaggatgtga

SEQ ID NO: 1302705 - DNA, 15 bp, Homo sapiens
ttactgaaggatgtg

SEQ ID NO: 1302706 - DNA, 15 bp, Homo sapiens
tttactgaaggatgt

SEQ ID NO: 1302707 - DNA, 15 bp, Homo sapiens
atttactgaaggatg

SEQ ID NO: 1302708 - DNA, 15 bp, Homo sapiens
tatttactgaaggat

SEQ ID NO: 1302709 - DNA, 15 bp, Homo sapiens
ttatttactgaagga

SEQ ID NO: 1302710 - DNA, 15 bp, Homo sapiens
tttatttactgaagg

SEQ ID NO: 1302711 - DNA, 15 bp, Homo sapiens
ttttatttactgaag

SEQ ID NO: 1302712 - DNA, 15 bp, Homo sapiens
tttttatttactgaa

SEQ ID NO: 1302713 - DNA, 15 bp, Homo sapiens
gtttttatttactga

SEQ ID NO: 1302714 - DNA, 15 bp, Homo sapiens
ggtttttatttactg

SEQ ID NO: 1302715 - DNA, 15 bp, Homo sapiens
tggtttttatttact

SEQ ID NO: 1302716 - DNA, 15 bp, Homo sapiens
ttggtttttatttac

SEQ ID NO: 1302717 - DNA, 15 bp, Homo sapiens
tttggtttttattta

SEQ ID NO: 1302718 - DNA, 15 bp, Homo sapiens
ctttggtttttattt

SEQ ID NO: 1302719 - DNA, 15 bp, Homo sapiens
actttggtttttatt

SEQ ID NO: 1302720 - DNA, 15 bp, Homo sapiens
gactttggtttttat

SEQ ID NO: 1302721 - DNA, 15 bp, Homo sapiens
tgactttggttttta

SEQ ID NO: 1302722 - DNA, 15 bp, Homo sapiens
attttgactttggtt

SEQ ID NO: 1302723 - DNA, 15 bp, Homo sapiens
cattttgactttggt

SEQ ID NO: 1302724 - DNA, 15 bp, Homo sapiens
tcattttgactttgg

SEQ ID NO: 1302725 - DNA, 15 bp, Homo sapiens
ttcattttgactttg

SEQ ID NO: 1302726 - DNA, 15 bp, Homo sapiens
gttcattttgacttt

SEQ ID NO: 1302727 - DNA, 15 bp, Homo sapiens
tgttcattttgactt

SEQ ID NO: 1302728 - DNA, 15 bp, Homo sapiens
atgttcattttgact

SEQ ID NO: 1302729 - DNA, 15 bp, Homo sapiens
tatgttcattttgac

SEQ ID NO: 1302730 - DNA, 15 bp, Homo sapiens
atatgttcattttga

SEQ ID NO: 1302731 - DNA, 15 bp, Homo sapiens
catatgttcattttg

SEQ ID NO: 1302732 - DNA, 15 bp, Homo sapiens
gcatatgttcatttt

SEQ ID NO: 1302733 - DNA, 15 bp, Homo sapiens
agcatatgttcattt

SEQ ID NO: 1302734 - DNA, 15 bp, Homo sapiens
tagcatatgttcatt

SEQ ID NO: 1302735 - DNA, 15 bp, Homo sapiens
ctagcatatgttcat

SEQ ID NO: 1302736 - DNA, 15 bp, Homo sapiens
tctagcatatgttca

SEQ ID NO: 1302737 - DNA, 15 bp, Homo sapiens
ttctagcatatgttc

SEQ ID NO: 1302738 - DNA, 15 bp, Homo sapiens
tttctagcatatgtt

SEQ ID NO: 1302739 - DNA, 15 bp, Homo sapiens
ttttctagcatatgt

SEQ ID NO: 1302740 - DNA, 15 bp, Homo sapiens
gttttctagcatatg

SEQ ID NO: 1302741 - DNA, 15 bp, Homo sapiens
tgttttctagcatat

SEQ ID NO: 1302742 - DNA, 15 bp, Homo sapiens
ctgttttctagcata

SEQ ID NO: 1302743 - DNA, 15 bp, Homo sapiens
tctgttttctagcat

SEQ ID NO: 1302744 - DNA, 15 bp, Homo sapiens
ctctgttttctagca

SEQ ID NO: 1302745 - DNA, 15 bp, Homo sapiens
tctctgttttctagc

SEQ ID NO: 1302746 - DNA, 15 bp, Homo sapiens
gtctctgttttctag

SEQ ID NO: 1302747 - DNA, 15 bp, Homo sapiens
agtctctgttttcta

SEQ ID NO: 1302748 - DNA, 15 bp, Homo sapiens
cagtctctgttttct

SEQ ID NO: 1302749 - DNA, 15 bp, Homo sapiens
ccagtctctgttttc

SEQ ID NO: 1302750 - DNA, 15 bp, Homo sapiens
gccagtctctgtttt

SEQ ID NO: 1302751 - DNA, 15 bp, Homo sapiens
tgccagtctctgttt

SEQ ID NO: 1302752 - DNA, 15 bp, Homo sapiens
ctgccagtctctgtt

SEQ ID NO: 1302753 - DNA, 15 bp, Homo sapiens
actgccagtctctgt

SEQ ID NO: 1302754 - DNA, 15 bp, Homo sapiens
cactgccagtctctg

SEQ ID NO: 1302755 - DNA, 15 bp, Homo sapiens
gcactgccagtctct

SEQ ID NO: 1302756 - DNA, 15 bp, Homo sapiens
agcactgccagtctc

SEQ ID NO: 1302757 - DNA, 15 bp, Homo sapiens
cagcactgccagtct

SEQ ID NO: 1302758 - DNA, 15 bp, Homo sapiens
acagcactgccagtc

SEQ ID NO: 1302759 - DNA, 15 bp, Homo sapiens
cacagcactgccagt

SEQ ID NO: 1302760 - DNA, 15 bp, Homo sapiens
tcacagcactgccag

SEQ ID NO: 1302761 - DNA, 15 bp, Homo sapiens
ttcacagcactgcca

SEQ ID NO: 1302762 - DNA, 15 bp, Homo sapiens
cttcacagcactgcc

SEQ ID NO: 1302763 - DNA, 15 bp, Homo sapiens
ccttcacagcactgc

SEQ ID NO: 1302764 - DNA, 15 bp, Homo sapiens
gccttcacagcactg

SEQ ID NO: 1302765 - DNA, 15 bp, Homo sapiens
ggccttcacagcact

SEQ ID NO: 1302766 - DNA, 15 bp, Homo sapiens
gggccttcacagcac

SEQ ID NO: 1302767 - DNA, 15 bp, Homo sapiens
agggccttcacagca

SEQ ID NO: 1302768 - DNA, 15 bp, Homo sapiens
cagggccttcacagc

SEQ ID NO: 1302769 - DNA, 15 bp, Homo sapiens
acagggccttcacag

SEQ ID NO: 1302770 - DNA, 15 bp, Homo sapiens
gacagggccttcaca

SEQ ID NO: 1302771 - DNA, 15 bp, Homo sapiens
ggacagggccttcac

SEQ ID NO: 1302772 - DNA, 15 bp, Homo sapiens
gggacagggccttca

SEQ ID NO: 1302773 - DNA, 15 bp, Homo sapiens
ggggacagggccttc

SEQ ID NO: 1302774 - DNA, 15 bp, Homo sapiens
aggggacagggcctt

SEQ ID NO: 1302775 - DNA, 15 bp, Homo sapiens
gaggggacagggcct

SEQ ID NO: 1302776 - DNA, 15 bp, Homo sapiens
tgaggggacagggcc

SEQ ID NO: 1302777 - DNA, 15 bp, Homo sapiens
atgaggggacagggc

SEQ ID NO: 1302778 - DNA, 15 bp, Homo sapiens
catgaggggacaggg

SEQ ID NO: 1302779 - DNA, 15 bp, Homo sapiens
ccatgaggggacagg

SEQ ID NO: 1302780 - DNA, 15 bp, Homo sapiens
tccatgaggggacag

SEQ ID NO: 1302781 - DNA, 15 bp, Homo sapiens
gtccatgaggggaca

SEQ ID NO: 1302782 - DNA, 15 bp, Homo sapiens
agtccatgaggggac

SEQ ID NO: 1302783 - DNA, 15 bp, Homo sapiens
gagtccatgagggga

SEQ ID NO: 1302784 - DNA, 15 bp, Homo sapiens
agagtccatgagggg

SEQ ID NO: 1302785 - DNA, 15 bp, Homo sapiens
cagagtccatgaggg

SEQ ID NO: 1302786 - DNA, 15 bp, Homo sapiens
acagagtccatgagg

SEQ ID NO: 1302787 - DNA, 15 bp, Homo sapiens
gacagagtccatgag

SEQ ID NO: 1302788 - DNA, 15 bp, Homo sapiens
cgacagagtccatga

SEQ ID NO: 1302789 - DNA, 15 bp, Homo sapiens
acgacagagtccatg

SEQ ID NO: 1302790 - DNA, 15 bp, Homo sapiens
cacgacagagtccat

SEQ ID NO: 1302791 - DNA, 15 bp, Homo sapiens
tcacgacagagtcca

SEQ ID NO: 1302792 - DNA, 15 bp, Homo sapiens
ctcacgacagagtcc

SEQ ID NO: 1302793 - DNA, 15 bp, Homo sapiens
actcacgacagagtc

SEQ ID NO: 1302794 - DNA, 15 bp, Homo sapiens
cactcacgacagagt

SEQ ID NO: 1302795 - DNA, 15 bp, Homo sapiens
ccactcacgacagag

SEQ ID NO: 1302796 - DNA, 15 bp, Homo sapiens
gccactcacgacaga

SEQ ID NO: 1302797 - DNA, 15 bp, Homo sapiens
agccactcacgacag

SEQ ID NO: 1302798 - DNA, 15 bp, Homo sapiens
aagccactcacgaca

SEQ ID NO: 1302799 - DNA, 15 bp, Homo sapiens
taagccactcacgac

SEQ ID NO: 1302800 - DNA, 15 bp, Homo sapiens
ttaagccactcacga

SEQ ID NO: 1302801 - DNA, 15 bp, Homo sapiens
cttaagccactcacg

SEQ ID NO: 1302802 - DNA, 15 bp, Homo sapiens
ccttaagccactcac

SEQ ID NO: 1302803 - DNA, 15 bp, Homo sapiens
cccttaagccactca

SEQ ID NO: 1302804 - DNA, 15 bp, Homo sapiens
ccccttaagccactc

SEQ ID NO: 1302805 - DNA, 15 bp, Homo sapiens
tccccttaagccact

SEQ ID NO: 1302806 - DNA, 15 bp, Homo sapiens
ttccccttaagccac

SEQ ID NO: 1302807 - DNA, 15 bp, Homo sapiens
cttccccttaagcca

SEQ ID NO: 1302808 - DNA, 15 bp, Homo sapiens
tcttccccttaagcc

SEQ ID NO: 1302809 - DNA, 15 bp, Homo sapiens
ctcttccccttaagc

SEQ ID NO: 1302810 - DNA, 15 bp, Homo sapiens
tctcttccccttaag

SEQ ID NO: 1302811 - DNA, 15 bp, Homo sapiens
ttctcttccccttaa

SEQ ID NO: 1302812 - DNA, 15 bp, Homo sapiens
cttctcttcccctta

SEQ ID NO: 1302813 - DNA, 15 bp, Homo sapiens
acttctcttcccctt

SEQ ID NO: 1302814 - DNA, 15 bp, Homo sapiens
cacttctcttcccct

SEQ ID NO: 1302815 - DNA, 15 bp, Homo sapiens
gcacttctcttcccc

SEQ ID NO: 1302816 - DNA, 15 bp, Homo sapiens
agcacttctcttccc

SEQ ID NO: 1302817 - DNA, 15 bp, Homo sapiens
gagcacttctcttcc

SEQ ID NO: 1302818 - DNA, 15 bp, Homo sapiens
ggagcacttctcttc

SEQ ID NO: 1302819 - DNA, 15 bp, Homo sapiens
aggagcacttctctt

SEQ ID NO: 1302820 - DNA, 15 bp, Homo sapiens
gaggagcacttctct

SEQ ID NO: 1302821 - DNA, 15 bp, Homo sapiens
agaggagcacttctc

SEQ ID NO: 1302822 - DNA, 15 bp, Homo sapiens
aagaggagcacttct

SEQ ID NO: 1302823 - DNA, 15 bp, Homo sapiens
taagaggagcacttc

SEQ ID NO: 1302824 - DNA, 15 bp, Homo sapiens
gtaagaggagcactt

SEQ ID NO: 1302825 - DNA, 15 bp, Homo sapiens
ggtaagaggagcact

SEQ ID NO: 1302826 - DNA, 15 bp, Homo sapiens
cggtaagaggagcac

SEQ ID NO: 1302827 - DNA, 15 bp, Homo sapiens
ccggtaagaggagca

SEQ ID NO: 1302828 - DNA, 15 bp, Homo sapiens
gccggtaagaggagc

SEQ ID NO: 1302829 - DNA, 15 bp, Homo sapiens
tgccggtaagaggag

SEQ ID NO: 1302830 - DNA, 15 bp, Homo sapiens
atgccggtaagagga

SEQ ID NO: 1302831 - DNA, 15 bp, Homo sapiens
gatgccggtaagagg

SEQ ID NO: 1302832 - DNA, 15 bp, Homo sapiens
tgatgccggtaagag

SEQ ID NO: 1302833 - DNA, 15 bp, Homo sapiens
ctgatgccggtaaga

SEQ ID NO: 1302834 - DNA, 15 bp, Homo sapiens
cctgatgccggtaag

SEQ ID NO: 1302835 - DNA, 15 bp, Homo sapiens
tcctgatgccggtaa

SEQ ID NO: 1302836 - DNA, 15 bp, Homo sapiens
ctcctgatgccggta

SEQ ID NO: 1302837 - DNA, 15 bp, Homo sapiens
gctcctgatgccggt

SEQ ID NO: 1302838 - DNA, 15 bp, Homo sapiens
ggctcctgatgccgg

SEQ ID NO: 1302839 - DNA, 15 bp, Homo sapiens
gggctcctgatgccg

SEQ ID NO: 1302840 - DNA, 15 bp, Homo sapiens
agggctcctgatgcc

SEQ ID NO: 1302841 - DNA, 15 bp, Homo sapiens
tagggctcctgatgc

SEQ ID NO: 1302842 - DNA, 15 bp, Homo sapiens
ttagggctcctgatg

SEQ ID NO: 1302843 - DNA, 15 bp, Homo sapiens
attagggctcctgat

SEQ ID NO: 1302844 - DNA, 15 bp, Homo sapiens
aattagggctcctga

SEQ ID NO: 1302845 - DNA, 15 bp, Homo sapiens
taattagggctcctg

SEQ ID NO: 1302846 - DNA, 15 bp, Homo sapiens
gtaattagggctcct

SEQ ID NO: 1302847 - DNA, 15 bp, Homo sapiens
agtaattagggctcc

SEQ ID NO: 1302848 - DNA, 15 bp, Homo sapiens
cagtaattagggctc

SEQ ID NO: 1302849 - DNA, 15 bp, Homo sapiens
acagtaattagggct

SEQ ID NO: 1302850 - DNA, 15 bp, Homo sapiens
aacagtaattagggc

SEQ ID NO: 1302851 - DNA, 15 bp, Homo sapiens
caacagtaattaggg

SEQ ID NO: 1302852 - DNA, 15 bp, Homo sapiens
acaacagtaattagg

SEQ ID NO: 1302853 - DNA, 15 bp, Homo sapiens
tacaacagtaattag

SEQ ID NO: 1302854 - DNA, 15 bp, Homo sapiens
atacaacagtaatta

SEQ ID NO: 1302855 - DNA, 15 bp, Homo sapiens
tatacaacagtaatt

SEQ ID NO: 1302856 - DNA, 15 bp, Homo sapiens
atatacaacagtaat

SEQ ID NO: 1302857 - DNA, 15 bp, Homo sapiens
aatatacaacagtaa

SEQ ID NO: 1302858 - DNA, 15 bp, Homo sapiens
caatatacaacagta

SEQ ID NO: 1302859 - DNA, 15 bp, Homo sapiens
tcaatatacaacagt

SEQ ID NO: 1302860 - DNA, 15 bp, Homo sapiens
atcaatatacaacag

SEQ ID NO: 1302861 - DNA, 15 bp, Homo sapiens
aatcaatatacaaca

SEQ ID NO: 1302862 - DNA, 15 bp, Homo sapiens
gaatcaatatacaac

SEQ ID NO: 1302863 - DNA, 15 bp, Homo sapiens
ggaatcaatatacaa

SEQ ID NO: 1302864 - DNA, 15 bp, Homo sapiens
aggaatcaatataca

SEQ ID NO: 1302865 - DNA, 15 bp, Homo sapiens
aaggaatcaatatac

SEQ ID NO: 1302866 - DNA, 15 bp, Homo sapiens
aaaggaatcaatata

SEQ ID NO: 1302867 - DNA, 15 bp, Homo sapiens
gaaaggaatcaatat

SEQ ID NO: 1302868 - DNA, 15 bp, Homo sapiens
agaaaggaatcaata

SEQ ID NO: 1302869 - DNA, 15 bp, Homo sapiens
aagaaaggaatcaat

SEQ ID NO: 1302870 - DNA, 15 bp, Homo sapiens
gaagaaaggaatcaa

SEQ ID NO: 1302871 - DNA, 15 bp, Homo sapiens
ggaagaaaggaatca

SEQ ID NO: 1302872 - DNA, 15 bp, Homo sapiens
cggaagaaaggaatc

SEQ ID NO: 1302873 - DNA, 15 bp, Homo sapiens
gcggaagaaaggaat

SEQ ID NO: 1302874 - DNA, 15 bp, Homo sapiens
tgcggaagaaaggaa

SEQ ID NO: 1302875 - DNA, 15 bp, Homo sapiens
ctgcggaagaaagga

SEQ ID NO: 1302876 - DNA, 15 bp, Homo sapiens
tctgcggaagaaagg

SEQ ID NO: 1302877 - DNA, 15 bp, Homo sapiens
gtctgcggaagaaag

SEQ ID NO: 1302878 - DNA, 15 bp, Homo sapiens
ggtctgcggaagaaa

SEQ ID NO: 1302879 - DNA, 15 bp, Homo sapiens
cggtctgcggaagaa

SEQ ID NO: 1302880 - DNA, 15 bp, Homo sapiens
gcggtctgcggaaga

SEQ ID NO: 1302881 - DNA, 15 bp, Homo sapiens
agcggtctgcggaag

SEQ ID NO: 1302882 - DNA, 15 bp, Homo sapiens
tagcggtctgcggaa

SEQ ID NO: 1302883 - DNA, 15 bp, Homo sapiens
ttagcggtctgcgga

SEQ ID NO: 1302884 - DNA, 15 bp, Homo sapiens
attagcggtctgcgg

SEQ ID NO: 1302885 - DNA, 15 bp, Homo sapiens
gattagcggtctgcg

SEQ ID NO: 1302886 - DNA, 15 bp, Homo sapiens
ggattagcggtctgc

SEQ ID NO: 1302887 - DNA, 15 bp, Homo sapiens
aggattagcggtctg

SEQ ID NO: 1302888 - DNA, 15 bp, Homo sapiens
caggattagcggtct

SEQ ID NO: 1302889 - DNA, 15 bp, Homo sapiens
gcaggattagcggtc

SEQ ID NO: 1302890 - DNA, 15 bp, Homo sapiens
tgcaggattagcggt

SEQ ID NO: 1302891 - DNA, 15 bp, Homo sapiens
ctgcaggattagcgg

SEQ ID NO: 1302892 - DNA, 15 bp, Homo sapiens
tctgcaggattagcg

SEQ ID NO: 1302893 - DNA, 15 bp, Homo sapiens
ctctgcaggattagc

SEQ ID NO: 1302894 - DNA, 15 bp, Homo sapiens
gctctgcaggattag

SEQ ID NO: 1302895 - DNA, 15 bp, Homo sapiens
tgctctgcaggatta

SEQ ID NO: 1302896 - DNA, 15 bp, Homo sapiens
ttgctctgcaggatt

SEQ ID NO: 1302897 - DNA, 15 bp, Homo sapiens
gttgctctgcaggat

SEQ ID NO: 1302898 - DNA, 15 bp, Homo sapiens
agttgctctgcagga

SEQ ID NO: 1302899 - DNA, 15 bp, Homo sapiens
aagttgctctgcagg

SEQ ID NO: 1302900 - DNA, 15 bp, Homo sapiens
caagttgctctgcag

SEQ ID NO: 1302901 - DNA, 15 bp, Homo sapiens
gcaagttgctctgca

SEQ ID NO: 1302902 - DNA, 15 bp, Homo sapiens
tgcaagttgctctgc

SEQ ID NO: 1302903 - DNA, 15 bp, Homo sapiens
ctgcaagttgctctg

SEQ ID NO: 1302904 - DNA, 15 bp, Homo sapiens
cctgcaagttgctct

SEQ ID NO: 1302905 - DNA, 15 bp, Homo sapiens
ccctgcaagttgctc

SEQ ID NO: 1302906 - DNA, 15 bp, Homo sapiens
gccctgcaagttgct

SEQ ID NO: 1302907 - DNA, 15 bp, Homo sapiens
tgccctgcaagttgc

SEQ ID NO: 1302908 - DNA, 15 bp, Homo sapiens
atgccctgcaagttg

SEQ ID NO: 1302909 - DNA, 15 bp, Homo sapiens
tatgccctgcaagtt

SEQ ID NO: 1302910 - DNA, 15 bp, Homo sapiens
ttatgccctgcaagt

SEQ ID NO: 1302911 - DNA, 15 bp, Homo sapiens
attatgccctgcaag

SEQ ID NO: 1302912 - DNA, 15 bp, Homo sapiens
tattatgccctgcaa

SEQ ID NO: 1302913 - DNA, 15 bp, Homo sapiens
ttattatgccctgca

SEQ ID NO: 1302914 - DNA, 15 bp, Homo sapiens
attattatgccctgc

SEQ ID NO: 1302915 - DNA, 15 bp, Homo sapiens
aattattatgccctg

SEQ ID NO: 1302916 - DNA, 15 bp, Homo sapiens
caattattatgccct

SEQ ID NO: 1302917 - DNA, 15 bp, Homo sapiens
ccaattattatgccc

SEQ ID NO: 1302918 - DNA, 15 bp, Homo sapiens
cccaattattatgcc

SEQ ID NO: 1302919 - DNA, 15 bp, Homo sapiens
tcccaattattatgc

SEQ ID NO: 1302920 - DNA, 15 bp, Homo sapiens
atcccaattattatg

SEQ ID NO: 1302921 - DNA, 15 bp, Homo sapiens
aatcccaattattat

SEQ ID NO: 1302922 - DNA, 15 bp, Homo sapiens
caatcccaattatta

SEQ ID NO: 1302923 - DNA, 15 bp, Homo sapiens
gcaatcccaattatt

SEQ ID NO: 1302924 - DNA, 15 bp, Homo sapiens
ggcaatcccaattat

SEQ ID NO: 1302925 - DNA, 15 bp, Homo sapiens
gggcaatcccaatta

SEQ ID NO: 1302926 - DNA, 15 bp, Homo sapiens
tgggcaatcccaatt

SEQ ID NO: 1302927 - DNA, 15 bp, Homo sapiens
ttgggcaatcccaat

SEQ ID NO: 1302928 - DNA, 15 bp, Homo sapiens
attgggcaatcccaa

SEQ ID NO: 1302929 - DNA, 15 bp, Homo sapiens
cattgggcaatccca

SEQ ID NO: 1302930 - DNA, 15 bp, Homo sapiens
gcattgggcaatccc

SEQ ID NO: 1302931 - DNA, 15 bp, Homo sapiens
agcattgggcaatcc

SEQ ID NO: 1302932 - DNA, 15 bp, Homo sapiens
cagcattgggcaatc

SEQ ID NO: 1302933 - DNA, 15 bp, Homo sapiens
ccagcattgggcaat

SEQ ID NO: 1302934 - DNA, 15 bp, Homo sapiens
cccagcattgggcaa

SEQ ID NO: 1302935 - DNA, 15 bp, Homo sapiens
tcccagcattgggca

SEQ ID NO: 1302936 - DNA, 15 bp, Homo sapiens
ctcccagcattgggc

SEQ ID NO: 1302937 - DNA, 15 bp, Homo sapiens
gctcccagcattggg

SEQ ID NO: 1302938 - DNA, 15 bp, Homo sapiens
agctcccagcattgg

SEQ ID NO: 1302939 - DNA, 15 bp, Homo sapiens
tagctcccagcattg

SEQ ID NO: 1302940 - DNA, 15 bp, Homo sapiens
ttagctcccagcatt

SEQ ID NO: 1302941 - DNA, 15 bp, Homo sapiens
attagctcccagcat

SEQ ID NO: 1302942 - DNA, 15 bp, Homo sapiens
gattagctcccagca

SEQ ID NO: 1302943 - DNA, 15 bp, Homo sapiens
tgattagctcccagc

SEQ ID NO: 1302944 - DNA, 15 bp, Homo sapiens
ctgattagctcccag

SEQ ID NO: 1302945 - DNA, 15 bp, Homo sapiens
tctgattagctccca

SEQ ID NO: 1302946 - DNA, 15 bp, Homo sapiens
atctgattagctccc

SEQ ID NO: 1302947 - DNA, 15 bp, Homo sapiens
aatctgattagctcc

SEQ ID NO: 1302948 - DNA, 15 bp, Homo sapiens
aaatctgattagctc

SEQ ID NO: 1302949 - DNA, 15 bp, Homo sapiens
gaaatctgattagct

SEQ ID NO: 1302950 - DNA, 15 bp, Homo sapiens
agaaatctgattagc

SEQ ID NO: 1302951 - DNA, 15 bp, Homo sapiens
aagaaatctgattag

SEQ ID NO: 1302952 - DNA, 15 bp, Homo sapiens
taagaaatctgatta

SEQ ID NO: 1302953 - DNA, 15 bp, Homo sapiens
ataagaaatctgatt

SEQ ID NO: 1302954 - DNA, 15 bp, Homo sapiens
cataagaaatctgat

SEQ ID NO: 1302955 - DNA, 15 bp, Homo sapiens
acataagaaatctga

SEQ ID NO: 1302956 - DNA, 15 bp, Homo sapiens
cacataagaaatctg

SEQ ID NO: 1302957 - DNA, 15 bp, Homo sapiens
acacataagaaatct

SEQ ID NO: 1302958 - DNA, 15 bp, Homo sapiens
tacacataagaaatc

SEQ ID NO: 1302959 - DNA, 15 bp, Homo sapiens
ctacacataagaaat

SEQ ID NO: 1302960 - DNA, 15 bp, Homo sapiens
tctacacataagaaa

SEQ ID NO: 1302961 - DNA, 15 bp, Homo sapiens
gtctacacataagaa

SEQ ID NO: 1302962 - DNA, 15 bp, Homo sapiens
ggtctacacataaga

SEQ ID NO: 1302963 - DNA, 15 bp, Homo sapiens
tggtctacacataag

SEQ ID NO: 1302964 - DNA, 15 bp, Homo sapiens
ctggtctacacataa

SEQ ID NO: 1302965 - DNA, 15 bp, Homo sapiens
gctggtctacacata

SEQ ID NO: 1302966 - DNA, 15 bp, Homo sapiens
agctggtctacacat

SEQ ID NO: 1302967 - DNA, 15 bp, Homo sapiens
aagctggtctacaca

SEQ ID NO: 1302968 - DNA, 15 bp, Homo sapiens
aaagctggtctacac

SEQ ID NO: 1302969 - DNA, 15 bp, Homo sapiens
taaagctggtctaca

SEQ ID NO: 1302970 - DNA, 15 bp, Homo sapiens
ataaagctggtctac

SEQ ID NO: 1302971 - DNA, 15 bp, Homo sapiens
cataaagctggtcta

SEQ ID NO: 1302972 - DNA, 15 bp, Homo sapiens
gcataaagctggtct

SEQ ID NO: 1302973 - DNA, 15 bp, Homo sapiens
agcataaagctggtc

SEQ ID NO: 1302974 - DNA, 15 bp, Homo sapiens
tagcataaagctggt

SEQ ID NO: 1302975 - DNA, 15 bp, Homo sapiens
ctagcataaagctgg

SEQ ID NO: 1302976 - DNA, 15 bp, Homo sapiens
gctagcataaagctg

SEQ ID NO: 1302977 - DNA, 15 bp, Homo sapiens
cgctagcataaagct

SEQ ID NO: 1302978 - DNA, 15 bp, Homo sapiens
acgctagcataaagc

SEQ ID NO: 1302979 - DNA, 15 bp, Homo sapiens
aacgctagcataaag

SEQ ID NO: 1302980 - DNA, 15 bp, Homo sapiens
aaacgctagcataaa

SEQ ID NO: 1302981 - DNA, 15 bp, Homo sapiens
taaacgctagcataa

SEQ ID NO: 1302982 - DNA, 15 bp, Homo sapiens
ttaaacgctagcata

SEQ ID NO: 1302983 - DNA, 15 bp, Homo sapiens
cttaaacgctagcat

SEQ ID NO: 1302984 - DNA, 15 bp, Homo sapiens
ccttaaacgctagca

SEQ ID NO: 1302985 - DNA, 15 bp, Homo sapiens
tccttaaacgctagc

SEQ ID NO: 1302986 - DNA, 15 bp, Homo sapiens
ttccttaaacgctag

SEQ ID NO: 1302987 - DNA, 15 bp, Homo sapiens
cttccttaaacgcta

SEQ ID NO: 1302988 - DNA, 15 bp, Homo sapiens
gcttccttaaacgct

SEQ ID NO: 1302989 - DNA, 15 bp, Homo sapiens
agcttccttaaacgc

SEQ ID NO: 1302990 - DNA, 15 bp, Homo sapiens
gagcttccttaaacg

SEQ ID NO: 1302991 - DNA, 15 bp, Homo sapiens
ggagcttccttaaac

SEQ ID NO: 1302992 - DNA, 15 bp, Homo sapiens
aggagcttccttaaa

SEQ ID NO: 1302993 - DNA, 15 bp, Homo sapiens
caggagcttccttaa

SEQ ID NO: 1302994 - DNA, 15 bp, Homo sapiens
tcaggagcttcctta

SEQ ID NO: 1302995 - DNA, 15 bp, Homo sapiens
atcaggagcttcctt

SEQ ID NO: 1302996 - DNA, 15 bp, Homo sapiens
aatcaggagcttcct

SEQ ID NO: 1302997 - DNA, 15 bp, Homo sapiens
gaatcaggagcttcc

SEQ ID NO: 1302998 - DNA, 15 bp, Homo sapiens
tgaatcaggagcttc

SEQ ID NO: 1302999 - DNA, 15 bp, Homo sapiens
ttgaatcaggagctt

SEQ ID NO: 1303000 - DNA, 15 bp, Homo sapiens
cttgaatcaggagct

SEQ ID NO: 1303001 - DNA, 15 bp, Homo sapiens
gcttgaatcaggagc

SEQ ID NO: 1303002 - DNA, 15 bp, Homo sapiens
tgcttgaatcaggag

SEQ ID NO: 1303003 - DNA, 15 bp, Homo sapiens
tgtgcttgaatcagg

SEQ ID NO: 1303004 - DNA, 15 bp, Homo sapiens
ctgtgcttgaatcag

SEQ ID NO: 1303005 - DNA, 15 bp, Homo sapiens
tctgtgcttgaatca

SEQ ID NO: 1303006 - DNA, 15 bp, Homo sapiens
ttctgtgcttgaatc

SEQ ID NO: 1303007 - DNA, 15 bp, Homo sapiens
tttctgtgcttgaat

SEQ ID NO: 1303008 - DNA, 15 bp, Homo sapiens
atttctgtgcttgaa

SEQ ID NO: 1303009 - DNA, 15 bp, Homo sapiens
catttctgtgcttga

SEQ ID NO: 1303010 - DNA, 15 bp, Homo sapiens
tcatttctgtgcttg

SEQ ID NO: 1303011 - DNA, 15 bp, Homo sapiens
ttcatttctgtgctt

SEQ ID NO: 1303012 - DNA, 15 bp, Homo sapiens
gttcatttctgtgct

SEQ ID NO: 1303013 - DNA, 15 bp, Homo sapiens
agttcatttctgtgc

SEQ ID NO: 1303014 - DNA, 15 bp, Homo sapiens
cagttcatttctgtg

SEQ ID NO: 1303015 - DNA, 15 bp, Homo sapiens
acagttcatttctgt

SEQ ID NO: 1303016 - DNA, 15 bp, Homo sapiens
aacagttcatttctg

SEQ ID NO: 1303017 - DNA, 15 bp, Homo sapiens
aaacagttcatttct

SEQ ID NO: 1303018 - DNA, 15 bp, Homo sapiens
taaacagttcatttc

SEQ ID NO: 1303019 - DNA, 15 bp, Homo sapiens
ttaaacagttcattt

SEQ ID NO: 1303020 - DNA, 15 bp, Homo sapiens
gttaaacagttcatt

SEQ ID NO: 1303021 - DNA, 15 bp, Homo sapiens
ggttaaacagttcat

SEQ ID NO: 1303022 - DNA, 15 bp, Homo sapiens
tggttaaacagttca

SEQ ID NO: 1303023 - DNA, 15 bp, Homo sapiens
atggttaaacagttc

SEQ ID NO: 1303024 - DNA, 15 bp, Homo sapiens
aatggttaaacagtt

SEQ ID NO: 1303025 - DNA, 15 bp, Homo sapiens
aaatggttaaacagt

SEQ ID NO: 1303026 - DNA, 15 bp, Homo sapiens
gaaatggttaaacag

SEQ ID NO: 1303027 - DNA, 15 bp, Homo sapiens
ggaaatggttaaaca

SEQ ID NO: 1303028 - DNA, 15 bp, Homo sapiens
cggaaatggttaaac

SEQ ID NO: 1303029 - DNA, 15 bp, Homo sapiens
tcggaaatggttaaa

SEQ ID NO: 1303030 - DNA, 15 bp, Homo sapiens
ctcggaaatggttaa

SEQ ID NO: 1303031 - DNA, 15 bp, Homo sapiens
gctcggaaatggtta

SEQ ID NO: 1303032 - DNA, 15 bp, Homo sapiens
ggctcggaaatggtt

SEQ ID NO: 1303033 - DNA, 15 bp, Homo sapiens
tggctcggaaatggt

SEQ ID NO: 1303034 - DNA, 15 bp, Homo sapiens
ctggctcggaaatgg

SEQ ID NO: 1303035 - DNA, 15 bp, Homo sapiens
tctggctcggaaatg

SEQ ID NO: 1303036 - DNA, 15 bp, Homo sapiens
ctctggctcggaaat

SEQ ID NO: 1303037 - DNA, 15 bp, Homo sapiens
tctctggctcggaaa

SEQ ID NO: 1303038 - DNA, 15 bp, Homo sapiens
atctctggctcggaa

SEQ ID NO: 1303039 - DNA, 15 bp, Homo sapiens
catctctggctcgga

SEQ ID NO: 1303040 - DNA, 15 bp, Homo sapiens
tcatctctggctcgg

SEQ ID NO: 1303041 - DNA, 15 bp, Homo sapiens
ctcatctctggctcg

SEQ ID NO: 1303042 - DNA, 15 bp, Homo sapiens
gctcatctctggctc

SEQ ID NO: 1303043 - DNA, 15 bp, Homo sapiens
ggctcatctctggct

SEQ ID NO: 1303044 - DNA, 15 bp, Homo sapiens
tggctcatctctggc

SEQ ID NO: 1303045 - DNA, 15 bp, Homo sapiens
atggctcatctctgg

SEQ ID NO: 1303046 - DNA, 15 bp, Homo sapiens
gatggctcatctctg

SEQ ID NO: 1303047 - DNA, 15 bp, Homo sapiens
tgatggctcatctct

SEQ ID NO: 1303048 - DNA, 15 bp, Homo sapiens
gtgatggctcatctc

SEQ ID NO: 1303049 - DNA, 15 bp, Homo sapiens
tgtgatggctcatct

SEQ ID NO: 1303050 - DNA, 15 bp, Homo sapiens
ctgtgatggctcatc

SEQ ID NO: 1303051 - DNA, 15 bp, Homo sapiens
tctgtgatggctcat

SEQ ID NO: 1303052 - DNA, 15 bp, Homo sapiens
gtctgtgatggctca

SEQ ID NO: 1303053 - DNA, 15 bp, Homo sapiens
ggtctgtgatggctc

SEQ ID NO: 1303054 - DNA, 15 bp, Homo sapiens
tggtctgtgatggct

SEQ ID NO: 1303055 - DNA, 15 bp, Homo sapiens
ttggtctgtgatggc

SEQ ID NO: 1303056 - DNA, 15 bp, Homo sapiens
gttggtctgtgatgg

SEQ ID NO: 1303057 - DNA, 15 bp, Homo sapiens
cgttggtctgtgatg

SEQ ID NO: 1303058 - DNA, 15 bp, Homo sapiens
gcgttggtctgtgat

SEQ ID NO: 1303059 - DNA, 15 bp, Homo sapiens
cgcgttggtctgtga

SEQ ID NO: 1303060 - DNA, 15 bp, Homo sapiens
ccgcgttggtctgtg

SEQ ID NO: 1303061 - DNA, 15 bp, Homo sapiens
tccgcgttggtctgt

SEQ ID NO: 1303062 - DNA, 15 bp, Homo sapiens
ctccgcgttggtctg

SEQ ID NO: 1303063 - DNA, 15 bp, Homo sapiens
actccgcgttggtct

SEQ ID NO: 1303064 - DNA, 15 bp, Homo sapiens
gactccgcgttggtc

SEQ ID NO: 1303065 - DNA, 15 bp, Homo sapiens
agactccgcgttggt

SEQ ID NO: 1303066 - DNA, 15 bp, Homo sapiens
cagactccgcgttgg

SEQ ID NO: 1303067 - DNA, 15 bp, Homo sapiens
tcagactccgcgttg

SEQ ID NO: 1303068 - DNA, 15 bp, Homo sapiens
atcagactccgcgtt

SEQ ID NO: 1303069 - DNA, 15 bp, Homo sapiens
tatcagactccgcgt

SEQ ID NO: 1303070 - DNA, 15 bp, Homo sapiens
ctatcagactccgcg

SEQ ID NO: 1303071 - DNA, 15 bp, Homo sapiens
cctatcagactccgc

SEQ ID NO: 1303072 - DNA, 15 bp, Homo sapiens
acctatcagactccg

SEQ ID NO: 1303073 - DNA, 15 bp, Homo sapiens
aacctatcagactcc

SEQ ID NO: 1303074 - DNA, 15 bp, Homo sapiens
taacctatcagactc

SEQ ID NO: 1303075 - DNA, 15 bp, Homo sapiens
ctaacctatcagact

SEQ ID NO: 1303076 - DNA, 15 bp, Homo sapiens
cctaacctatcagac

SEQ ID NO: 1303077 - DNA, 15 bp, Homo sapiens
ccctaacctatcaga

SEQ ID NO: 1303078 - DNA, 15 bp, Homo sapiens
cccctaacctatcag

SEQ ID NO: 1303079 - DNA, 15 bp, Homo sapiens
acccctaacctatca

SEQ ID NO: 1303080 - DNA, 15 bp, Homo sapiens
cacccctaacctatc

SEQ ID NO: 1303081 - DNA, 15 bp, Homo sapiens
tcacccctaacctat

SEQ ID NO: 1303082 - DNA, 15 bp, Homo sapiens
ttcacccctaaccta

SEQ ID NO: 1303083 - DNA, 15 bp, Homo sapiens
attcacccctaacct

SEQ ID NO: 1303084 - DNA, 15 bp, Homo sapiens
aattcacccctaacc

SEQ ID NO: 1303085 - DNA, 15 bp, Homo sapiens
caattcacccctaac

SEQ ID NO: 1303086 - DNA, 15 bp, Homo sapiens
gcaattcacccctaa

SEQ ID NO: 1303087 - DNA, 15 bp, Homo sapiens
cgcaattcaccccta

SEQ ID NO: 1303088 - DNA, 15 bp, Homo sapiens
gcgcaattcacccct

SEQ ID NO: 1303089 - DNA, 15 bp, Homo sapiens
agcgcaattcacccc

SEQ ID NO: 1303090 - DNA, 15 bp, Homo sapiens
cagcgcaattcaccc

SEQ ID NO: 1303091 - DNA, 15 bp, Homo sapiens
ccagcgcaattcacc

SEQ ID NO: 1303092 - DNA, 15 bp, Homo sapiens
tccagcgcaattcac

SEQ ID NO: 1303093 - DNA, 15 bp, Homo sapiens
ctccagcgcaattca

SEQ ID NO: 1303094 - DNA, 15 bp, Homo sapiens
tctccagcgcaattc

SEQ ID NO: 1303095 - DNA, 15 bp, Homo sapiens
ctctccagcgcaatt

SEQ ID NO: 1303096 - DNA, 15 bp, Homo sapiens
cctctccagcgcaat

SEQ ID NO: 1303097 - DNA, 15 bp, Homo sapiens
gcctctccagcgcaa

SEQ ID NO: 1303098 - DNA, 15 bp, Homo sapiens
agcctctccagcgca

SEQ ID NO: 1303099 - DNA, 15 bp, Homo sapiens
cagcctctccagcgc

SEQ ID NO: 1303100 - DNA, 15 bp, Homo sapiens
tcagcctctccagcg

SEQ ID NO: 1303101 - DNA, 15 bp, Homo sapiens
ttcagcctctccagc

SEQ ID NO: 1303102 - DNA, 15 bp, Homo sapiens
gttcagcctctccag

SEQ ID NO: 1303103 - DNA, 15 bp, Homo sapiens
cgttcagcctctcca

SEQ ID NO: 1303104 - DNA, 15 bp, Homo sapiens
acgttcagcctctcc

SEQ ID NO: 1303105 - DNA, 15 bp, Homo sapiens
aacgttcagcctctc

SEQ ID NO: 1303106 - DNA, 15 bp, Homo sapiens
aaacgttcagcctct

SEQ ID NO: 1303107 - DNA, 15 bp, Homo sapiens
gaaacgttcagcctc

SEQ ID NO: 1303108 - DNA, 15 bp, Homo sapiens
agaaacgttcagcct

SEQ ID NO: 1303109 - DNA, 15 bp, Homo sapiens
aagaaacgttcagcc

SEQ ID NO: 1303110 - DNA, 15 bp, Homo sapiens
taagaaacgttcagc

SEQ ID NO: 1303111 - DNA, 15 bp, Homo sapiens
ttaagaaacgttcag

SEQ ID NO: 1303112 - DNA, 15 bp, Homo sapiens
tttaagaaacgttca

SEQ ID NO: 1303113 - DNA, 15 bp, Homo sapiens
ctttaagaaacgttc

SEQ ID NO: 1303114 - DNA, 15 bp, Homo sapiens
actttaagaaacgtt

SEQ ID NO: 1303115 - DNA, 15 bp, Homo sapiens
gactttaagaaacgt

SEQ ID NO: 1303116 - DNA, 15 bp, Homo sapiens
ggactttaagaaacg

SEQ ID NO: 1303117 - DNA, 15 bp, Homo sapiens
tggactttaagaaac

SEQ ID NO: 1303118 - DNA, 15 bp, Homo sapiens
gtggactttaagaaa

SEQ ID NO: 1303119 - DNA, 15 bp, Homo sapiens
agtggactttaagaa

SEQ ID NO: 1303120 - DNA, 15 bp, Homo sapiens
cagtggactttaaga

SEQ ID NO: 1303121 - DNA, 15 bp, Homo sapiens
ccagtggactttaag

SEQ ID NO: 1303122 - DNA, 15 bp, Homo sapiens
gccagtggactttaa

SEQ ID NO: 1303123 - DNA, 15 bp, Homo sapiens
tgccagtggacttta

SEQ ID NO: 1303124 - DNA, 15 bp, Homo sapiens
ttgccagtggacttt

SEQ ID NO: 1303125 - DNA, 15 bp, Homo sapiens
gttgccagtggactt

SEQ ID NO: 1303126 - DNA, 15 bp, Homo sapiens
tgttgccagtggact

SEQ ID NO: 1303127 - DNA, 15 bp, Homo sapiens
ctgttgccagtggac

SEQ ID NO: 1303128 - DNA, 15 bp, Homo sapiens
cctgttgccagtgga

SEQ ID NO: 1303129 - DNA, 15 bp, Homo sapiens
tcctgttgccagtgg

SEQ ID NO: 1303130 - DNA, 15 bp, Homo sapiens
ttcctgttgccagtg

SEQ ID NO: 1303131 - DNA, 15 bp, Homo sapiens
cttcctgttgccagt

SEQ ID NO: 1303132 - DNA, 15 bp, Homo sapiens
acttcctgttgccag

SEQ ID NO: 1303133 - DNA, 15 bp, Homo sapiens
gacttcctgttgcca

SEQ ID NO: 1303134 - DNA, 15 bp, Homo sapiens
ggacttcctgttgcc

SEQ ID NO: 1303135 - DNA, 15 bp, Homo sapiens
aggacttcctgttgc

SEQ ID NO: 1303136 - DNA, 15 bp, Homo sapiens
gaggacttcctgttg

SEQ ID NO: 1303137 - DNA, 15 bp, Homo sapiens
tgaggacttcctgtt

SEQ ID NO: 1303138 - DNA, 15 bp, Homo sapiens
ctgaggacttcctgt

SEQ ID NO: 1303139 - DNA, 15 bp, Homo sapiens
tctgaggacttcctg

SEQ ID NO: 1303140 - DNA, 15 bp, Homo sapiens
ttctgaggacttcct

SEQ ID NO: 1303141 - DNA, 15 bp, Homo sapiens
cttctgaggacttcc

SEQ ID NO: 1303142 - DNA, 15 bp, Homo sapiens
acttctgaggacttc

SEQ ID NO: 1303143 - DNA, 15 bp, Homo sapiens
gacttctgaggactt

SEQ ID NO: 1303144 - DNA, 15 bp, Homo sapiens
ggacttctgaggact

SEQ ID NO: 1303145 - DNA, 15 bp, Homo sapiens
tggacttctgaggac

SEQ ID NO: 1303146 - DNA, 15 bp, Homo sapiens
ttggacttctgagga

SEQ ID NO: 1303147 - DNA, 15 bp, Homo sapiens
attggacttctgagg

SEQ ID NO: 1303148 - DNA, 15 bp, Homo sapiens
aattggacttctgag

SEQ ID NO: 1303149 - DNA, 15 bp, Homo sapiens
aaattggacttctga

SEQ ID NO: 1303150 - DNA, 15 bp, Homo sapiens
caaattggacttctg

SEQ ID NO: 1303151 - DNA, 15 bp, Homo sapiens
acaaattggacttct

SEQ ID NO: 1303152 - DNA, 15 bp, Homo sapiens
aacaaattggacttc

SEQ ID NO: 1303153 - DNA, 15 bp, Homo sapiens
caacaaattggactt

SEQ ID NO: 1303154 - DNA, 15 bp, Homo sapiens
acaacaaattggact

SEQ ID NO: 1303155 - DNA, 15 bp, Homo sapiens
aacaacaaattggac

SEQ ID NO: 1303156 - DNA, 15 bp, Homo sapiens
caacaacaaattgga

SEQ ID NO: 1303157 - DNA, 15 bp, Homo sapiens
acaacaacaaattgg

SEQ ID NO: 1303158 - DNA, 15 bp, Homo sapiens
aacaacaacaaattg

SEQ ID NO: 1303159 - DNA, 15 bp, Homo sapiens
gaacaacaacaaatt

SEQ ID NO: 1303160 - DNA, 15 bp, Homo sapiens
ggaacaacaacaaat

SEQ ID NO: 1303161 - DNA, 15 bp, Homo sapiens
aggaacaacaacaaa

SEQ ID NO: 1303162 - DNA, 15 bp, Homo sapiens
gaggaacaacaacaa

SEQ ID NO: 1303163 - DNA, 15 bp, Homo sapiens
ggaggaacaacaaca

SEQ ID NO: 1303164 - DNA, 15 bp, Homo sapiens
gggaggaacaacaac

SEQ ID NO: 1303165 - DNA, 15 bp, Homo sapiens
agggaggaacaacaa

SEQ ID NO: 1303166 - DNA, 15 bp, Homo sapiens
cagggaggaacaaca

SEQ ID NO: 1303167 - DNA, 15 bp, Homo sapiens
tcagggaggaacaac

SEQ ID NO: 1303168 - DNA, 15 bp, Homo sapiens
ttcagggaggaacaa

SEQ ID NO: 1303169 - DNA, 15 bp, Homo sapiens
gttcagggaggaaca

SEQ ID NO: 1303170 - DNA, 15 bp, Homo sapiens
agttcagggaggaac

SEQ ID NO: 1303171 - DNA, 15 bp, Homo sapiens
aagttcagggaggaa

SEQ ID NO: 1303172 - DNA, 15 bp, Homo sapiens
gaagttcagggagga

SEQ ID NO: 1303173 - DNA, 15 bp, Homo sapiens
agaagttcagggagg

SEQ ID NO: 1303174 - DNA, 15 bp, Homo sapiens
cagaagttcagggag

SEQ ID NO: 1303175 - DNA, 15 bp, Homo sapiens
ccagaagttcaggga

SEQ ID NO: 1303176 - DNA, 15 bp, Homo sapiens
tccagaagttcaggg

SEQ ID NO: 1303177 - DNA, 15 bp, Homo sapiens
atccagaagttcagg

SEQ ID NO: 1303178 - DNA, 15 bp, Homo sapiens
aatccagaagttcag

SEQ ID NO: 1303179 - DNA, 15 bp, Homo sapiens
aaatccagaagttca

SEQ ID NO: 1303180 - DNA, 15 bp, Homo sapiens
gaaatccagaagttc

SEQ ID NO: 1303181 - DNA, 15 bp, Homo sapiens
agaaatccagaagtt

SEQ ID NO: 1303182 - DNA, 15 bp, Homo sapiens
cagaaatccagaagt

SEQ ID NO: 1303183 - DNA, 15 bp, Homo sapiens
tcagaaatccagaag

SEQ ID NO: 1303184 - DNA, 15 bp, Homo sapiens
ctcagaaatccagaa

SEQ ID NO: 1303185 - DNA, 15 bp, Homo sapiens
cctcagaaatccaga

SEQ ID NO: 1303186 - DNA, 15 bp, Homo sapiens
tcctcagaaatccag

SEQ ID NO: 1303187 - DNA, 15 bp, Homo sapiens
atcctcagaaatcca

SEQ ID NO: 1303188 - DNA, 15 bp, Homo sapiens
catcctcagaaatcc

SEQ ID NO: 1303189 - DNA, 15 bp, Homo sapiens
ccatcctcagaaatc

SEQ ID NO: 1303190 - DNA, 15 bp, Homo sapiens
accatcctcagaaat

SEQ ID NO: 1303191 - DNA, 15 bp, Homo sapiens
aaccatcctcagaaa

SEQ ID NO: 1303192 - DNA, 15 bp, Homo sapiens
caaccatcctcagaa

SEQ ID NO: 1303193 - DNA, 15 bp, Homo sapiens
acaaccatcctcaga

SEQ ID NO: 1303194 - DNA, 15 bp, Homo sapiens
cacaaccatcctcag

SEQ ID NO: 1303195 - DNA, 15 bp, Homo sapiens
tcacaaccatcctca

SEQ ID NO: 1303196 - DNA, 15 bp, Homo sapiens
ctcacaaccatcctc

SEQ ID NO: 1303197 - DNA, 15 bp, Homo sapiens
tctcacaaccatcct

SEQ ID NO: 1303198 - DNA, 15 bp, Homo sapiens
ctctcacaaccatcc

SEQ ID NO: 1303199 - DNA, 15 bp, Homo sapiens
actctcacaaccatc

SEQ ID NO: 1303200 - DNA, 15 bp, Homo sapiens
cactctcacaaccat

SEQ ID NO: 1303201 - DNA, 15 bp, Homo sapiens
ccactctcacaacca

SEQ ID NO: 1303202 - DNA, 15 bp, Homo sapiens
gccactctcacaacc

SEQ ID NO: 1303203 - DNA, 15 bp, Homo sapiens
ggccactctcacaac

SEQ ID NO: 1303204 - DNA, 15 bp, Homo sapiens
cggccactctcacaa

SEQ ID NO: 1303205 - DNA, 15 bp, Homo sapiens
acggccactctcaca

SEQ ID NO: 1303206 - DNA, 15 bp, Homo sapiens
cacggccactctcac

SEQ ID NO: 1303207 - DNA, 15 bp, Homo sapiens
acacggccactctca

SEQ ID NO: 1303208 - DNA, 15 bp, Homo sapiens
cacacggccactctc

SEQ ID NO: 1303209 - DNA, 15 bp, Homo sapiens
acacacggccactct

SEQ ID NO: 1303210 - DNA, 15 bp, Homo sapiens
gacacacggccactc

SEQ ID NO: 1303211 - DNA, 15 bp, Homo sapiens
tgacacacggccact

SEQ ID NO: 1303212 - DNA, 15 bp, Homo sapiens
ttgacacacggccac

SEQ ID NO: 1303213 - DNA, 15 bp, Homo sapiens
attgacacacggcca

SEQ ID NO: 1303214 - DNA, 15 bp, Homo sapiens
aattgacacacggcc

SEQ ID NO: 1303215 - DNA, 15 bp, Homo sapiens
aaattgacacacggc

SEQ ID NO: 1303216 - DNA, 15 bp, Homo sapiens
aaaattgacacacgg

SEQ ID NO: 1303217 - DNA, 15 bp, Homo sapiens
aaaaattgacacacg

SEQ ID NO: 1303218 - DNA, 15 bp, Homo sapiens
taaaaattgacacac

SEQ ID NO: 1303219 - DNA, 15 bp, Homo sapiens
ttaaaaattgacaca

SEQ ID NO: 1303220 - DNA, 15 bp, Homo sapiens
tttaaaaattgacac

SEQ ID NO: 1303221 - DNA, 15 bp, Homo sapiens
atttaaaaattgaca

SEQ ID NO: 1303222 - DNA, 15 bp, Homo sapiens
gatttaaaaattgac

SEQ ID NO: 1303223 - DNA, 15 bp, Homo sapiens
tgatttaaaaattga

SEQ ID NO: 1303224 - DNA, 15 bp, Homo sapiens
atgatttaaaaattg

SEQ ID NO: 1303225 - DNA, 15 bp, Homo sapiens
catgatttaaaaatt

SEQ ID NO: 1303226 - DNA, 15 bp, Homo sapiens
acatgatttaaaaat

SEQ ID NO: 1303227 - DNA, 15 bp, Homo sapiens
cacatgatttaaaaa

SEQ ID NO: 1303228 - DNA, 15 bp, Homo sapiens
ccacatgatttaaaa

SEQ ID NO: 1303229 - DNA, 15 bp, Homo sapiens
accacatgatttaaa

SEQ ID NO: 1303230 - DNA, 15 bp, Homo sapiens
taccacatgatttaa

SEQ ID NO: 1303231 - DNA, 15 bp, Homo sapiens
ttaccacatgattta

SEQ ID NO: 1303232 - DNA, 15 bp, Homo sapiens
attaccacatgattt

SEQ ID NO: 1303233 - DNA, 15 bp, Homo sapiens
aattaccacatgatt

SEQ ID NO: 1303234 - DNA, 15 bp, Homo sapiens
aaattaccacatgat

SEQ ID NO: 1303235 - DNA, 15 bp, Homo sapiens
caaattaccacatga

SEQ ID NO: 1303236 - DNA, 15 bp, Homo sapiens
acaaattaccacatg

SEQ ID NO: 1303237 - DNA, 15 bp, Homo sapiens
gacaaattaccacat

SEQ ID NO: 1303238 - DNA, 15 bp, Homo sapiens
ggacaaattaccaca

SEQ ID NO: 1303239 - DNA, 15 bp, Homo sapiens
tggacaaattaccac

SEQ ID NO: 1303240 - DNA, 15 bp, Homo sapiens
atggacaaattacca

SEQ ID NO: 1303241 - DNA, 15 bp, Homo sapiens
catggacaaattacc

SEQ ID NO: 1303242 - DNA, 15 bp, Homo sapiens
tcatggacaaattac

SEQ ID NO: 1303243 - DNA, 15 bp, Homo sapiens
atcatggacaaatta

SEQ ID NO: 1303244 - DNA, 15 bp, Homo sapiens
aatcatggacaaatt

SEQ ID NO: 1303245 - DNA, 15 bp, Homo sapiens
caatcatggacaaat

SEQ ID NO: 1303246 - DNA, 15 bp, Homo sapiens
acaatcatggacaaa

SEQ ID NO: 1303247 - DNA, 15 bp, Homo sapiens
aacaatcatggacaa

SEQ ID NO: 1303248 - DNA, 15 bp, Homo sapiens
aaacaatcatggaca

SEQ ID NO: 1303249 - DNA, 15 bp, Homo sapiens
taaacaatcatggac

SEQ ID NO: 1303250 - DNA, 15 bp, Homo sapiens
ataaacaatcatgga

SEQ ID NO: 1303251 - DNA, 15 bp, Homo sapiens
aataaacaatcatgg

SEQ ID NO: 1303252 - DNA, 15 bp, Homo sapiens
aaataaacaatcatg

SEQ ID NO: 1303253 - DNA, 15 bp, Homo sapiens
aaaataaacaatcat

SEQ ID NO: 1303254 - DNA, 15 bp, Homo sapiens
caaaataaacaatca

SEQ ID NO: 1303255 - DNA, 15 bp, Homo sapiens
acaaaataaacaatc

SEQ ID NO: 1303256 - DNA, 15 bp, Homo sapiens
gacaaaataaacaat

SEQ ID NO: 1303257 - DNA, 15 bp, Homo sapiens
ggacaaaataaacaa

SEQ ID NO: 1303258 - DNA, 15 bp, Homo sapiens
gggacaaaataaaca

SEQ ID NO: 1303259 - DNA, 15 bp, Homo sapiens
ggggacaaaataaac

SEQ ID NO: 1303260 - DNA, 15 bp, Homo sapiens
gggggacaaaataaa

SEQ ID NO: 1303261 - DNA, 15 bp, Homo sapiens
tgggggacaaaataa

SEQ ID NO: 1303262 - DNA, 15 bp, Homo sapiens
ctgggggacaaaata

SEQ ID NO: 1303263 - DNA, 15 bp, Homo sapiens
gctgggggacaaaat

SEQ ID NO: 1303264 - DNA, 15 bp, Homo sapiens
tgctgggggacaaaa

SEQ ID NO: 1303265 - DNA, 15 bp, Homo sapiens
ttgctgggggacaaa

SEQ ID NO: 1303266 - DNA, 15 bp, Homo sapiens
cttgctgggggacaa

SEQ ID NO: 1303267 - DNA, 15 bp, Homo sapiens
tcttgctgggggaca

SEQ ID NO: 1303268 - DNA, 15 bp, Homo sapiens
atcttgctgggggac

SEQ ID NO: 1303269 - DNA, 15 bp, Homo sapiens
aatcttgctggggga

SEQ ID NO: 1303270 - DNA, 15 bp, Homo sapiens
caatcttgctggggg

SEQ ID NO: 1303271 - DNA, 15 bp, Homo sapiens
acaatcttgctgggg

SEQ ID NO: 1303272 - DNA, 15 bp, Homo sapiens
tacaatcttgctggg

SEQ ID NO: 1303273 - DNA, 15 bp, Homo sapiens
atacaatcttgctgg

SEQ ID NO: 1303274 - DNA, 15 bp, Homo sapiens
tatacaatcttgctg

SEQ ID NO: 1303275 - DNA, 15 bp, Homo sapiens
gtatacaatcttgct

SEQ ID NO: 1303276 - DNA, 15 bp, Homo sapiens
agtatacaatcttgc

SEQ ID NO: 1303277 - DNA, 15 bp, Homo sapiens
gagtatacaatcttg

SEQ ID NO: 1303278 - DNA, 15 bp, Homo sapiens
ggagtatacaatctt

SEQ ID NO: 1303279 - DNA, 15 bp, Homo sapiens
tggagtatacaatct

SEQ ID NO: 1303280 - DNA, 15 bp, Homo sapiens
ctggagtatacaatc

SEQ ID NO: 1303281 - DNA, 15 bp, Homo sapiens
tctggagtatacaat

SEQ ID NO: 1303282 - DNA, 15 bp, Homo sapiens
ttctggagtatacaa

SEQ ID NO: 1303283 - DNA, 15 bp, Homo sapiens
tttctggagtataca

SEQ ID NO: 1303284 - DNA, 15 bp, Homo sapiens
ttttctggagtatac

SEQ ID NO: 1303285 - DNA, 15 bp, Homo sapiens
cttttctggagtata

SEQ ID NO: 1303286 - DNA, 15 bp, Homo sapiens
ccttttctggagtat

SEQ ID NO: 1303287 - DNA, 15 bp, Homo sapiens
cccttttctggagta

SEQ ID NO: 1303288 - DNA, 15 bp, Homo sapiens
ccccttttctggagt

SEQ ID NO: 1303289 - DNA, 15 bp, Homo sapiens
accccttttctggag

SEQ ID NO: 1303290 - DNA, 15 bp, Homo sapiens
taccccttttctgga

SEQ ID NO: 1303291 - DNA, 15 bp, Homo sapiens
ctaccccttttctgg

SEQ ID NO: 1303292 - DNA, 15 bp, Homo sapiens
gctaccccttttctg

SEQ ID NO: 1303293 - DNA, 15 bp, Homo sapiens
agctaccccttttct

SEQ ID NO: 1303294 - DNA, 15 bp, Homo sapiens
cagctaccccttttc

SEQ ID NO: 1303295 - DNA, 15 bp, Homo sapiens
tcagctacccctttt

SEQ ID NO: 1303296 - DNA, 15 bp, Homo sapiens
gtcagctaccccttt

SEQ ID NO: 1303297 - DNA, 15 bp, Homo sapiens
ggtcagctacccctt

SEQ ID NO: 1303298 - DNA, 15 bp, Homo sapiens
aggtcagctacccct

SEQ ID NO: 1303299 - DNA, 15 bp, Homo sapiens
taggtcagctacccc

SEQ ID NO: 1303300 - DNA, 15 bp, Homo sapiens
gtaggtcagctaccc

SEQ ID NO: 1303301 - DNA, 15 bp, Homo sapiens
agtaggtcagctacc

SEQ ID NO: 1303302 - DNA, 15 bp, Homo sapiens
tagtaggtcagctac

SEQ ID NO: 1303303 - DNA, 15 bp, Homo sapiens
ctagtaggtcagcta

SEQ ID NO: 1303304 - DNA, 15 bp, Homo sapiens
cctagtaggtcagct

SEQ ID NO: 1303305 - DNA, 15 bp, Homo sapiens
acctagtaggtcagc

SEQ ID NO: 1303306 - DNA, 15 bp, Homo sapiens
cacctagtaggtcag

SEQ ID NO: 1303307 - DNA, 15 bp, Homo sapiens
tcacctagtaggtca

SEQ ID NO: 1303308 - DNA, 15 bp, Homo sapiens
ttcacctagtaggtc

SEQ ID NO: 1303309 - DNA, 15 bp, Homo sapiens
tttcacctagtaggt

SEQ ID NO: 1303310 - DNA, 15 bp, Homo sapiens
atttcacctagtagg

SEQ ID NO: 1303311 - DNA, 15 bp, Homo sapiens
gatttcacctagtag

SEQ ID NO: 1303312 - DNA, 15 bp, Homo sapiens
tgatttcacctagta

SEQ ID NO: 1303313 - DNA, 15 bp, Homo sapiens
atgatttcacctagt

SEQ ID NO: 1303314 - DNA, 15 bp, Homo sapiens
catgatttcacctag

SEQ ID NO: 1303315 - DNA, 15 bp, Homo sapiens
gcatgatttcaccta

SEQ ID NO: 1303316 - DNA, 15 bp, Homo sapiens
agcatgatttcacct

SEQ ID NO: 1303317 - DNA, 15 bp, Homo sapiens
cagcatgatttcacc

SEQ ID NO: 1303318 - DNA, 15 bp, Homo sapiens
acagcatgatttcac

SEQ ID NO: 1303319 - DNA, 15 bp, Homo sapiens
tacagcatgatttca

SEQ ID NO: 1303320 - DNA, 15 bp, Homo sapiens
ctacagcatgatttc

SEQ ID NO: 1303321 - DNA, 15 bp, Homo sapiens
actacagcatgattt

SEQ ID NO: 1303322 - DNA, 15 bp, Homo sapiens
aactacagcatgatt

SEQ ID NO: 1303323 - DNA, 15 bp, Homo sapiens
gaactacagcatgat

SEQ ID NO: 1303324 - DNA, 15 bp, Homo sapiens
agaactacagcatga

SEQ ID NO: 1303325 - DNA, 15 bp, Homo sapiens
cagaactacagcatg

SEQ ID NO: 1303326 - DNA, 15 bp, Homo sapiens
tcagaactacagcat

SEQ ID NO: 1303327 - DNA, 15 bp, Homo sapiens
ctcagaactacagca

SEQ ID NO: 1303328 - DNA, 15 bp, Homo sapiens
actcagaactacagc

SEQ ID NO: 1303329 - DNA, 15 bp, Homo sapiens
aactcagaactacag

SEQ ID NO: 1303330 - DNA, 15 bp, Homo sapiens
caactcagaactaca

SEQ ID NO: 1303331 - DNA, 15 bp, Homo sapiens
gcaactcagaactac

SEQ ID NO: 1303332 - DNA, 15 bp, Homo sapiens
agcaactcagaacta

SEQ ID NO: 1303333 - DNA, 15 bp, Homo sapiens
cagcaactcagaact

SEQ ID NO: 1303334 - DNA, 15 bp, Homo sapiens
gcagcaactcagaac

SEQ ID NO: 1303335 - DNA, 15 bp, Homo sapiens
agcagcaactcagaa

SEQ ID NO: 1303336 - DNA, 15 bp, Homo sapiens
aagcagcaactcaga

SEQ ID NO: 1303337 - DNA, 15 bp, Homo sapiens
gaagcagcaactcag

SEQ ID NO: 1303338 - DNA, 15 bp, Homo sapiens
agaagcagcaactca

SEQ ID NO: 1303339 - DNA, 15 bp, Homo sapiens
aagaagcagcaactc

SEQ ID NO: 1303340 - DNA, 15 bp, Homo sapiens
gaagaagcagcaact

SEQ ID NO: 1303341 - DNA, 15 bp, Homo sapiens
tgaagaagcagcaac

SEQ ID NO: 1303342 - DNA, 15 bp, Homo sapiens
atgaagaagcagcaa

SEQ ID NO: 1303343 - DNA, 15 bp, Homo sapiens
catgaagaagcagca

SEQ ID NO: 1303344 - DNA, 15 bp, Homo sapiens
gcatgaagaagcagc

SEQ ID NO: 1303345 - DNA, 15 bp, Homo sapiens
tgcatgaagaagcag

SEQ ID NO: 1303346 - DNA, 15 bp, Homo sapiens
atgcatgaagaagca

SEQ ID NO: 1303347 - DNA, 15 bp, Homo sapiens
tatgcatgaagaagc

SEQ ID NO: 1303348 - DNA, 15 bp, Homo sapiens
gtatgcatgaagaag

SEQ ID NO: 1303349 - DNA, 15 bp, Homo sapiens
tgtatgcatgaagaa

SEQ ID NO: 1303350 - DNA, 15 bp, Homo sapiens
ttgtatgcatgaaga

SEQ ID NO: 1303351 - DNA, 15 bp, Homo sapiens
attgtatgcatgaag

SEQ ID NO: 1303352 - DNA, 15 bp, Homo sapiens
cattgtatgcatgaa

SEQ ID NO: 1303353 - DNA, 15 bp, Homo sapiens
ccattgtatgcatga

SEQ ID NO: 1303354 - DNA, 15 bp, Homo sapiens
tccattgtatgcatg

SEQ ID NO: 1303355 - DNA, 15 bp, Homo sapiens
ttccattgtatgcat

SEQ ID NO: 1303356 - DNA, 15 bp, Homo sapiens
tttccattgtatgca

SEQ ID NO: 1303357 - DNA, 15 bp, Homo sapiens
gtttccattgtatgc

SEQ ID NO: 1303358 - DNA, 15 bp, Homo sapiens
tgtttccattgtatg

SEQ ID NO: 1303359 - DNA, 15 bp, Homo sapiens
ttgtttccattgtat

SEQ ID NO: 1303360 - DNA, 15 bp, Homo sapiens
cttgtttccattgta

SEQ ID NO: 1303361 - DNA, 15 bp, Homo sapiens
acttgtttccattgt

SEQ ID NO: 1303362 - DNA, 15 bp, Homo sapiens
tacttgtttccattg

SEQ ID NO: 1303363 - DNA, 15 bp, Homo sapiens
gtacttgtttccatt

SEQ ID NO: 1303364 - DNA, 15 bp, Homo sapiens
tgtacttgtttccat

SEQ ID NO: 1303365 - DNA, 15 bp, Homo sapiens
gtgtacttgtttcca

SEQ ID NO: 1303366 - DNA, 15 bp, Homo sapiens
ggtgtacttgtttcc

SEQ ID NO: 1303367 - DNA, 15 bp, Homo sapiens
gggtgtacttgtttc

SEQ ID NO: 1303368 - DNA, 15 bp, Homo sapiens
ggggtgtacttgttt

SEQ ID NO: 1303369 - DNA, 15 bp, Homo sapiens
gggggtgtacttgtt

SEQ ID NO: 1303370 - DNA, 15 bp, Homo sapiens
tgggggtgtacttgt

SEQ ID NO: 1303371 - DNA, 15 bp, Homo sapiens
gtgggggtgtacttg

SEQ ID NO: 1303372 - DNA, 15 bp, Homo sapiens
ggtgggggtgtactt

SEQ ID NO: 1303373 - DNA, 15 bp, Homo sapiens
tggtgggggtgtact

SEQ ID NO: 1303374 - DNA, 15 bp, Homo sapiens
ctggtgggggtgtac

SEQ ID NO: 1303375 - DNA, 15 bp, Homo sapiens
cctggtgggggtgta

SEQ ID NO: 1303376 - DNA, 15 bp, Homo sapiens
gcctggtgggggtgt

SEQ ID NO: 1303377 - DNA, 15 bp, Homo sapiens
agcctggtgggggtg

SEQ ID NO: 1303378 - DNA, 15 bp, Homo sapiens
gagcctggtgggggt

SEQ ID NO: 1303379 - DNA, 15 bp, Homo sapiens
tgagcctggtggggg

SEQ ID NO: 1303380 - DNA, 15 bp, Homo sapiens
atgagcctggtgggg

SEQ ID NO: 1303381 - DNA, 15 bp, Homo sapiens
catgagcctggtggg

SEQ ID NO: 1303382 - DNA, 15 bp, Homo sapiens
acatgagcctggtgg

SEQ ID NO: 1303383 - DNA, 15 bp, Homo sapiens
ccacatgagcctggt

SEQ ID NO: 1303384 - DNA, 15 bp, Homo sapiens
tccacatgagcctgg

SEQ ID NO: 1303385 - DNA, 15 bp, Homo sapiens
ctccacatgagcctg

SEQ ID NO: 1303386 - DNA, 15 bp, Homo sapiens
cctccacatgagcct

SEQ ID NO: 1303387 - DNA, 15 bp, Homo sapiens
ccctccacatgagcc

SEQ ID NO: 1303388 - DNA, 15 bp, Homo sapiens
gccctccacatgagc

SEQ ID NO: 1303389 - DNA, 15 bp, Homo sapiens
agccctccacatgag

SEQ ID NO: 1303390 - DNA, 15 bp, Homo sapiens
gagccctccacatga

SEQ ID NO: 1303391 - DNA, 15 bp, Homo sapiens
tgagccctccacatg

SEQ ID NO: 1303392 - DNA, 15 bp, Homo sapiens
ctgagccctccacat

SEQ ID NO: 1303393 - DNA, 15 bp, Homo sapiens
actgagccctccaca

SEQ ID NO: 1303394 - DNA, 15 bp, Homo sapiens
cactgagccctccac

SEQ ID NO: 1303395 - DNA, 15 bp, Homo sapiens
tcactgagccctcca

SEQ ID NO: 1303396 - DNA, 15 bp, Homo sapiens
gtcactgagccctcc

SEQ ID NO: 1303397 - DNA, 15 bp, Homo sapiens
agtcactgagccctc

SEQ ID NO: 1303398 - DNA, 15 bp, Homo sapiens
tagtcactgagccct

SEQ ID NO: 1303399 - DNA, 15 bp, Homo sapiens
ttagtcactgagccc

SEQ ID NO: 1303400 - DNA, 15 bp, Homo sapiens
gttagtcactgagcc

SEQ ID NO: 1303401 - DNA, 15 bp, Homo sapiens
ggttagtcactgagc

SEQ ID NO: 1303402 - DNA, 15 bp, Homo sapiens
aggttagtcactgag

SEQ ID NO: 1303403 - DNA, 15 bp, Homo sapiens
caggttagtcactga

SEQ ID NO: 1303404 - DNA, 15 bp, Homo sapiens
ccaggttagtcactg

SEQ ID NO: 1303405 - DNA, 15 bp, Homo sapiens
gccaggttagtcact

SEQ ID NO: 1303406 - DNA, 15 bp, Homo sapiens
ggccaggttagtcac

SEQ ID NO: 1303407 - DNA, 15 bp, Homo sapiens
gggccaggttagtca

SEQ ID NO: 1303408 - DNA, 15 bp, Homo sapiens
agggccaggttagtc

SEQ ID NO: 1303409 - DNA, 15 bp, Homo sapiens
gagggccaggttagt

SEQ ID NO: 1303410 - DNA, 15 bp, Homo sapiens
tgagggccaggttag

SEQ ID NO: 1303411 - DNA, 15 bp, Homo sapiens
ctgagggccaggtta

SEQ ID NO: 1303412 - DNA, 15 bp, Homo sapiens
gctgagggccaggtt

SEQ ID NO: 1303413 - DNA, 15 bp, Homo sapiens
agctgagggccaggt

SEQ ID NO: 1303414 - DNA, 15 bp, Homo sapiens
tagctgagggccagg

SEQ ID NO: 1303415 - DNA, 15 bp, Homo sapiens
atagctgagggccag

SEQ ID NO: 1303416 - DNA, 15 bp, Homo sapiens
gatagctgagggcca

SEQ ID NO: 1303417 - DNA, 15 bp, Homo sapiens
ggatagctgagggcc

SEQ ID NO: 1303418 - DNA, 15 bp, Homo sapiens
gggatagctgagggc

SEQ ID NO: 1303419 - DNA, 15 bp, Homo sapiens
ggggatagctgaggg

SEQ ID NO: 1303420 - DNA, 15 bp, Homo sapiens
aggggatagctgagg

SEQ ID NO: 1303421 - DNA, 15 bp, Homo sapiens
caggggatagctgag

SEQ ID NO: 1303422 - DNA, 15 bp, Homo sapiens
gcaggggatagctga

SEQ ID NO: 1303423 - DNA, 15 bp, Homo sapiens
agcaggggatagctg

SEQ ID NO: 1303424 - DNA, 15 bp, Homo sapiens
tagcaggggatagct

SEQ ID NO: 1303425 - DNA, 15 bp, Homo sapiens
gtagcaggggatagc

SEQ ID NO: 1303426 - DNA, 15 bp, Homo sapiens
agtagcaggggatag

SEQ ID NO: 1303427 - DNA, 15 bp, Homo sapiens
gagtagcaggggata

SEQ ID NO: 1303428 - DNA, 15 bp, Homo sapiens
ggagtagcaggggat

SEQ ID NO: 1303429 - DNA, 15 bp, Homo sapiens
gggagtagcagggga

SEQ ID NO: 1303430 - DNA, 15 bp, Homo sapiens
tgggagtagcagggg

SEQ ID NO: 1303431 - DNA, 15 bp, Homo sapiens
atgggagtagcaggg

SEQ ID NO: 1303432 - DNA, 15 bp, Homo sapiens
tatgggagtagcagg

SEQ ID NO: 1303433 - DNA, 15 bp, Homo sapiens
ttatgggagtagcag

SEQ ID NO: 1303434 - DNA, 15 bp, Homo sapiens
tttatgggagtagca

SEQ ID NO: 1303435 - DNA, 15 bp, Homo sapiens
ttttatgggagtagc

SEQ ID NO: 1303436 - DNA, 15 bp, Homo sapiens
cttttatgggagtag

SEQ ID NO: 1303437 - DNA, 15 bp, Homo sapiens
gcttttatgggagta

SEQ ID NO: 1303438 - DNA, 15 bp, Homo sapiens
agcttttatgggagt

SEQ ID NO: 1303439 - DNA, 15 bp, Homo sapiens
tagcttttatgggag

SEQ ID NO: 1303440 - DNA, 15 bp, Homo sapiens
ctagcttttatggga

SEQ ID NO: 1303441 - DNA, 15 bp, Homo sapiens
gctagcttttatggg

SEQ ID NO: 1303442 - DNA, 15 bp, Homo sapiens
tgctagcttttatgg

SEQ ID NO: 1303443 - DNA, 15 bp, Homo sapiens
gtgctagcttttatg

SEQ ID NO: 1303444 - DNA, 15 bp, Homo sapiens
agtgctagcttttat

SEQ ID NO: 1303445 - DNA, 15 bp, Homo sapiens
cagtgctagctttta

SEQ ID NO: 1303446 - DNA, 15 bp, Homo sapiens
ccagtgctagctttt

SEQ ID NO: 1303447 - DNA, 15 bp, Homo sapiens
cccagtgctagcttt

SEQ ID NO: 1303448 - DNA, 15 bp, Homo sapiens
gcccagtgctagctt

SEQ ID NO: 1303449 - DNA, 15 bp, Homo sapiens
tgcccagtgctagct

SEQ ID NO: 1303450 - DNA, 15 bp, Homo sapiens
atgcccagtgctagc

SEQ ID NO: 1303451 - DNA, 15 bp, Homo sapiens
catgcccagtgctag

SEQ ID NO: 1303452 - DNA, 15 bp, Homo sapiens
acatgcccagtgcta

SEQ ID NO: 1303453 - DNA, 15 bp, Homo sapiens
cacatgcccagtgct

SEQ ID NO: 1303454 - DNA, 15 bp, Homo sapiens
ccacatgcccagtgc

SEQ ID NO: 1303455 - DNA, 15 bp, Homo sapiens
gccacatgcccagtg

SEQ ID NO: 1303456 - DNA, 15 bp, Homo sapiens
agccacatgcccagt

SEQ ID NO: 1303457 - DNA, 15 bp, Homo sapiens
aagccacatgcccag

SEQ ID NO: 1303458 - DNA, 15 bp, Homo sapiens
caagccacatgccca

SEQ ID NO: 1303459 - DNA, 15 bp, Homo sapiens
acaagccacatgccc

SEQ ID NO: 1303460 - DNA, 15 bp, Homo sapiens
tacaagccacatgcc

SEQ ID NO: 1303461 - DNA, 15 bp, Homo sapiens
gtacaagccacatgc

SEQ ID NO: 1303462 - DNA, 15 bp, Homo sapiens
agtacaagccacatg

SEQ ID NO: 1303463 - DNA, 15 bp, Homo sapiens
aagtacaagccacat

SEQ ID NO: 1303464 - DNA, 15 bp, Homo sapiens
gaagtacaagccaca

SEQ ID NO: 1303465 - DNA, 15 bp, Homo sapiens
ggaagtacaagccac

SEQ ID NO: 1303466 - DNA, 15 bp, Homo sapiens
tggaagtacaagcca

SEQ ID NO: 1303467 - DNA, 15 bp, Homo sapiens
ttggaagtacaagcc

SEQ ID NO: 1303468 - DNA, 15 bp, Homo sapiens
gttggaagtacaagc

SEQ ID NO: 1303469 - DNA, 15 bp, Homo sapiens
tgttggaagtacaag

SEQ ID NO: 1303470 - DNA, 15 bp, Homo sapiens
ttgttggaagtacaa

SEQ ID NO: 1303471 - DNA, 15 bp, Homo sapiens
attgttggaagtaca

SEQ ID NO: 1303472 - DNA, 15 bp, Homo sapiens
cattgttggaagtac

SEQ ID NO: 1303473 - DNA, 15 bp, Homo sapiens
tcattgttggaagta

SEQ ID NO: 1303474 - DNA, 15 bp, Homo sapiens
ctcattgttggaagt

SEQ ID NO: 1303475 - DNA, 15 bp, Homo sapiens
actcattgttggaag

SEQ ID NO: 1303476 - DNA, 15 bp, Homo sapiens
tactcattgttggaa

SEQ ID NO: 1303477 - DNA, 15 bp, Homo sapiens
gtactcattgttgga

SEQ ID NO: 1303478 - DNA, 15 bp, Homo sapiens
agtactcattgttgg

SEQ ID NO: 1303479 - DNA, 15 bp, Homo sapiens
gagtactcattgttg

SEQ ID NO: 1303480 - DNA, 15 bp, Homo sapiens
ggagtactcattgtt

SEQ ID NO: 1303481 - DNA, 15 bp, Homo sapiens
gggagtactcattgt

SEQ ID NO: 1303482 - DNA, 15 bp, Homo sapiens
agggagtactcattg

SEQ ID NO: 1303483 - DNA, 15 bp, Homo sapiens
aagggagtactcatt

SEQ ID NO: 1303484 - DNA, 15 bp, Homo sapiens
aaagggagtactcat

SEQ ID NO: 1303485 - DNA, 15 bp, Homo sapiens
aaaagggagtactca

SEQ ID NO: 1303486 - DNA, 15 bp, Homo sapiens
gaaaagggagtactc

SEQ ID NO: 1303487 - DNA, 15 bp, Homo sapiens
agaaaagggagtact

SEQ ID NO: 1303488 - DNA, 15 bp, Homo sapiens
gagaaaagggagtac

SEQ ID NO: 1303489 - DNA, 15 bp, Homo sapiens
ggagaaaagggagta

SEQ ID NO: 1303490 - DNA, 15 bp, Homo sapiens
gggagaaaagggagt

SEQ ID NO: 1303491 - DNA, 15 bp, Homo sapiens
ggggagaaaagggag

SEQ ID NO: 1303492 - DNA, 15 bp, Homo sapiens
aggggagaaaaggga

SEQ ID NO: 1303493 - DNA, 15 bp, Homo sapiens
taggggagaaaaggg

SEQ ID NO: 1303494 - DNA, 15 bp, Homo sapiens
ttaggggagaaaagg

SEQ ID NO: 1303495 - DNA, 15 bp, Homo sapiens
tttaggggagaaaag

SEQ ID NO: 1303496 - DNA, 15 bp, Homo sapiens
atttaggggagaaaa

SEQ ID NO: 1303497 - DNA, 15 bp, Homo sapiens
gatttaggggagaaa

SEQ ID NO: 1303498 - DNA, 15 bp, Homo sapiens
ggatttaggggagaa

SEQ ID NO: 1303499 - DNA, 15 bp, Homo sapiens
tggatttaggggaga

SEQ ID NO: 1303500 - DNA, 15 bp, Homo sapiens
ctggatttaggggag

SEQ ID NO: 1303501 - DNA, 15 bp, Homo sapiens
gctggatttagggga

SEQ ID NO: 1303502 - DNA, 15 bp, Homo sapiens
ggctggatttagggg

SEQ ID NO: 1303503 - DNA, 15 bp, Homo sapiens
gggctggatttaggg

SEQ ID NO: 1303504 - DNA, 15 bp, Homo sapiens
agggctggatttagg

SEQ ID NO: 1303505 - DNA, 15 bp, Homo sapiens
cagggctggatttag

SEQ ID NO: 1303506 - DNA, 15 bp, Homo sapiens
ccagggctggattta

SEQ ID NO: 1303507 - DNA, 15 bp, Homo sapiens
tccagggctggattt

SEQ ID NO: 1303508 - DNA, 15 bp, Homo sapiens
ttccagggctggatt

SEQ ID NO: 1303509 - DNA, 15 bp, Homo sapiens
cttccagggctggat

SEQ ID NO: 1303510 - DNA, 15 bp, Homo sapiens
gcttccagggctgga

SEQ ID NO: 1303511 - DNA, 15 bp, Homo sapiens
tgcttccagggctgg

SEQ ID NO: 1303512 - DNA, 15 bp, Homo sapiens
atgcttccagggctg

SEQ ID NO: 1303513 - DNA, 15 bp, Homo sapiens
aatgcttccagggct

SEQ ID NO: 1303514 - DNA, 15 bp, Homo sapiens
caatgcttccagggc

SEQ ID NO: 1303515 - DNA, 15 bp, Homo sapiens
gcaatgcttccaggg

SEQ ID NO: 1303516 - DNA, 15 bp, Homo sapiens
ggcaatgcttccagg

SEQ ID NO: 1303517 - DNA, 15 bp, Homo sapiens
cggcaatgcttccag

SEQ ID NO: 1303518 - DNA, 15 bp, Homo sapiens
acggcaatgcttcca

SEQ ID NO: 1303519 - DNA, 15 bp, Homo sapiens
cacggcaatgcttcc

SEQ ID NO: 1303520 - DNA, 15 bp, Homo sapiens
acacggcaatgcttc

SEQ ID NO: 1303521 - DNA, 15 bp, Homo sapiens
aacacggcaatgctt

SEQ ID NO: 1303522 - DNA, 15 bp, Homo sapiens
aaacacggcaatgct

SEQ ID NO: 1303523 - DNA, 15 bp, Homo sapiens
aaaacacggcaatgc

SEQ ID NO: 1303524 - DNA, 15 bp, Homo sapiens
aaaaacacggcaatg

SEQ ID NO: 1303525 - DNA, 15 bp, Homo sapiens
taaaaacacggcaat

SEQ ID NO: 1303526 - DNA, 15 bp, Homo sapiens
ataaaaacacggcaa

SEQ ID NO: 1303527 - DNA, 15 bp, Homo sapiens
cataaaaacacggca

SEQ ID NO: 1303528 - DNA, 15 bp, Homo sapiens
gcataaaaacacggc

SEQ ID NO: 1303529 - DNA, 15 bp, Homo sapiens
ggcataaaaacacgg

SEQ ID NO: 1303530 - DNA, 15 bp, Homo sapiens
aggcataaaaacacg

SEQ ID NO: 1303531 - DNA, 15 bp, Homo sapiens
gaggcataaaaacac

SEQ ID NO: 1303532 - DNA, 15 bp, Homo sapiens
agaggcataaaaaca

SEQ ID NO: 1303533 - DNA, 15 bp, Homo sapiens
aagaggcataaaaac

SEQ ID NO: 1303534 - DNA, 15 bp, Homo sapiens
caagaggcataaaaa

SEQ ID NO: 1303535 - DNA, 15 bp, Homo sapiens
ccaagaggcataaaa

SEQ ID NO: 1303536 - DNA, 15 bp, Homo sapiens
gccaagaggcataaa

SEQ ID NO: 1303537 - DNA, 15 bp, Homo sapiens
tgccaagaggcataa

SEQ ID NO: 1303538 - DNA, 15 bp, Homo sapiens
atgccaagaggcata

SEQ ID NO: 1303539 - DNA, 15 bp, Homo sapiens
aatgccaagaggcat

SEQ ID NO: 1303540 - DNA, 15 bp, Homo sapiens
gaatgccaagaggca

SEQ ID NO: 1303541 - DNA, 15 bp, Homo sapiens
agaatgccaagaggc

SEQ ID NO: 1303542 - DNA, 15 bp, Homo sapiens
aagaatgccaagagg

SEQ ID NO: 1303543 - DNA, 15 bp, Homo sapiens
aaagaatgccaagag

SEQ ID NO: 1303544 - DNA, 15 bp, Homo sapiens
taaagaatgccaaga

SEQ ID NO: 1303545 - DNA, 15 bp, Homo sapiens
ataaagaatgccaag

SEQ ID NO: 1303546 - DNA, 15 bp, Homo sapiens
aataaagaatgccaa

SEQ ID NO: 1303547 - DNA, 15 bp, Homo sapiens
aaataaagaatgcca

SEQ ID NO: 1303548 - DNA, 15 bp, Homo sapiens
aaaataaagaatgcc

SEQ ID NO: 1303549 - DNA, 15 bp, Homo sapiens
aaaaataaagaatgc

SEQ ID NO: 1303550 - DNA, 15 bp, Homo sapiens
aaaaaataaagaatg

SEQ ID NO: 1303551 - DNA, 15 bp, Homo sapiens
caaaaaataaagaat

SEQ ID NO: 1303552 - DNA, 15 bp, Homo sapiens
tcaaaaaataaagaa

SEQ ID NO: 1303553 - DNA, 15 bp, Homo sapiens
ctcaaaaaataaaga

SEQ ID NO: 1303554 - DNA, 15 bp, Homo sapiens
tctcaaaaaataaag

SEQ ID NO: 1303555 - DNA, 15 bp, Homo sapiens
gtctcaaaaaataaa

SEQ ID NO: 1303556 - DNA, 15 bp, Homo sapiens
tgtctcaaaaaataa

SEQ ID NO: 1303557 - DNA, 15 bp, Homo sapiens
ctgtctcaaaaaata

SEQ ID NO: 1303558 - DNA, 15 bp, Homo sapiens
tctgtctcaaaaaat

SEQ ID NO: 1303559 - DNA, 15 bp, Homo sapiens
ttctgtctcaaaaaa

SEQ ID NO: 1303560 - DNA, 15 bp, Homo sapiens
attctgtctcaaaaa

SEQ ID NO: 1303561 - DNA, 15 bp, Homo sapiens
gattctgtctcaaaa

SEQ ID NO: 1303562 - DNA, 15 bp, Homo sapiens
agattctgtctcaaa

SEQ ID NO: 1303563 - DNA, 15 bp, Homo sapiens
gagattctgtctcaa

SEQ ID NO: 1303564 - DNA, 15 bp, Homo sapiens
cgagattctgtctca

SEQ ID NO: 1303565 - DNA, 15 bp, Homo sapiens
gcgagattctgtctc

SEQ ID NO: 1303566 - DNA, 15 bp, Homo sapiens
agcgagattctgtct

SEQ ID NO: 1303567 - DNA, 15 bp, Homo sapiens
gagcgagattctgtc

SEQ ID NO: 1303568 - DNA, 15 bp, Homo sapiens
agagcgagattctgt

SEQ ID NO: 1303569 - DNA, 15 bp, Homo sapiens
cagagcgagattctg

SEQ ID NO: 1303570 - DNA, 15 bp, Homo sapiens
acagagcgagattct

SEQ ID NO: 1303571 - DNA, 15 bp, Homo sapiens
aacagagcgagattc

SEQ ID NO: 1303572 - DNA, 15 bp, Homo sapiens
caacagagcgagatt

SEQ ID NO: 1303573 - DNA, 15 bp, Homo sapiens
ttgggcaacagagcg

SEQ ID NO: 1303574 - DNA, 15 bp, Homo sapiens
tttgggcaacagagc

SEQ ID NO: 1303575 - DNA, 15 bp, Homo sapiens
gtttgggcaacagag

SEQ ID NO: 1303576 - DNA, 15 bp, Homo sapiens
agtttgggcaacaga

SEQ ID NO: 1303577 - DNA, 15 bp, Homo sapiens
cagtttgggcaacag

SEQ ID NO: 1303578 - DNA, 15 bp, Homo sapiens
ccagtttgggcaaca

SEQ ID NO: 1303579 - DNA, 15 bp, Homo sapiens
tccagtttgggcaac

SEQ ID NO: 1303580 - DNA, 15 bp, Homo sapiens
ctccagtttgggcaa

SEQ ID NO: 1303581 - DNA, 15 bp, Homo sapiens
actccagtttgggca

SEQ ID NO: 1303582 - DNA, 15 bp, Homo sapiens
cactccagtttgggc

SEQ ID NO: 1303583 - DNA, 15 bp, Homo sapiens
gcactccagtttggg

SEQ ID NO: 1303584 - DNA, 15 bp, Homo sapiens
tgcactccagtttgg

SEQ ID NO: 1303585 - DNA, 15 bp, Homo sapiens
ctgcactccagtttg

SEQ ID NO: 1303586 - DNA, 15 bp, Homo sapiens
actgcactccagttt

SEQ ID NO: 1303587 - DNA, 15 bp, Homo sapiens
cactgcactccagtt

SEQ ID NO: 1303588 - DNA, 15 bp, Homo sapiens
acactgcactccagt

SEQ ID NO: 1303589 - DNA, 15 bp, Homo sapiens
gacactgcactccag

SEQ ID NO: 1303590 - DNA, 15 bp, Homo sapiens
tgacactgcactcca

SEQ ID NO: 1303591 - DNA, 15 bp, Homo sapiens
gtgacactgcactcc

SEQ ID NO: 1303592 - DNA, 15 bp, Homo sapiens
cgtgacactgcactc

SEQ ID NO: 1303593 - DNA, 15 bp, Homo sapiens
tcgtgacactgcact

SEQ ID NO: 1303594 - DNA, 15 bp, Homo sapiens
aatcgtgacactgca

SEQ ID NO: 1303595 - DNA, 15 bp, Homo sapiens
aaatcgtgacactgc

SEQ ID NO: 1303596 - DNA, 15 bp, Homo sapiens
gaaatcgtgacactg

SEQ ID NO: 1303597 - DNA, 15 bp, Homo sapiens
tgaaatcgtgacact

SEQ ID NO: 1303598 - DNA, 15 bp, Homo sapiens
ctgaaatcgtgacac

SEQ ID NO: 1303599 - DNA, 15 bp, Homo sapiens
gctgaaatcgtgaca

SEQ ID NO: 1303600 - DNA, 15 bp, Homo sapiens
agctgaaatcgtgac

SEQ ID NO: 1303601 - DNA, 15 bp, Homo sapiens
gagctgaaatcgtga

SEQ ID NO: 1303602 - DNA, 15 bp, Homo sapiens
tgagctgaaatcgtg

SEQ ID NO: 1303603 - DNA, 15 bp, Homo sapiens
gtgagctgaaatcgt

SEQ ID NO: 1303604 - DNA, 15 bp, Homo sapiens
agtgagctgaaatcg

SEQ ID NO: 1303605 - DNA, 15 bp, Homo sapiens
tagtgagctgaaatc

SEQ ID NO: 1303606 - DNA, 15 bp, Homo sapiens
gtagtgagctgaaat

SEQ ID NO: 1303607 - DNA, 15 bp, Homo sapiens
tgtagtgagctgaaa

SEQ ID NO: 1303608 - DNA, 15 bp, Homo sapiens
ttgtagtgagctgaa

SEQ ID NO: 1303609 - DNA, 15 bp, Homo sapiens
attgtagtgagctga

SEQ ID NO: 1303610 - DNA, 15 bp, Homo sapiens
gattgtagtgagctg

SEQ ID NO: 1303611 - DNA, 15 bp, Homo sapiens
agattgtagtgagct

SEQ ID NO: 1303612 - DNA, 15 bp, Homo sapiens
gagattgtagtgagc

SEQ ID NO: 1303613 - DNA, 15 bp, Homo sapiens
ggagattgtagtgag

SEQ ID NO: 1303614 - DNA, 15 bp, Homo sapiens
cggagattgtagtga

SEQ ID NO: 1303615 - DNA, 15 bp, Homo sapiens
acggagattgtagtg

SEQ ID NO: 1303616 - DNA, 15 bp, Homo sapiens
gacggagattgtagt

SEQ ID NO: 1303617 - DNA, 15 bp, Homo sapiens
agacggagattgtag

SEQ ID NO: 1303618 - DNA, 15 bp, Homo sapiens
gagacggagattgta

SEQ ID NO: 1303619 - DNA, 15 bp, Homo sapiens
ggagacggagattgt

SEQ ID NO: 1303620 - DNA, 15 bp, Homo sapiens
gggagacggagattg

SEQ ID NO: 1303621 - DNA, 15 bp, Homo sapiens
tgggagacggagatt

SEQ ID NO: 1303622 - DNA, 15 bp, Homo sapiens
ttgggagacggagat

SEQ ID NO: 1303623 - DNA, 15 bp, Homo sapiens
cttgggagacggaga

SEQ ID NO: 1303624 - DNA, 15 bp, Homo sapiens
acttgggagacggag

SEQ ID NO: 1303625 - DNA, 15 bp, Homo sapiens
aacttgggagacgga

SEQ ID NO: 1303626 - DNA, 15 bp, Homo sapiens
gaacttgggagacgg

SEQ ID NO: 1303627 - DNA, 15 bp, Homo sapiens
tgaacttgggagacg

SEQ ID NO: 1303628 - DNA, 15 bp, Homo sapiens
ttgaacttgggagac

SEQ ID NO: 1303629 - DNA, 15 bp, Homo sapiens
cttgaacttgggaga

SEQ ID NO: 1303630 - DNA, 15 bp, Homo sapiens
gcttgaacttgggag

SEQ ID NO: 1303631 - DNA, 15 bp, Homo sapiens
tgcttgaacttggga

SEQ ID NO: 1303632 - DNA, 15 bp, Homo sapiens
ctgcttgaacttggg

SEQ ID NO: 1303633 - DNA, 15 bp, Homo sapiens
actgcttgaacttgg

SEQ ID NO: 1303634 - DNA, 15 bp, Homo sapiens
gactgcttgaacttg

SEQ ID NO: 1303635 - DNA, 15 bp, Homo sapiens
ggactgcttgaactt

SEQ ID NO: 1303636 - DNA, 15 bp, Homo sapiens
aggactgcttgaact

SEQ ID NO: 1303637 - DNA, 15 bp, Homo sapiens
gaggactgcttgaac

SEQ ID NO: 1303638 - DNA, 15 bp, Homo sapiens
ggaggactgcttgaa

SEQ ID NO: 1303639 - DNA, 15 bp, Homo sapiens
aggaggactgcttga

SEQ ID NO: 1303640 - DNA, 15 bp, Homo sapiens
gaggaggactgcttg

SEQ ID NO: 1303641 - DNA, 15 bp, Homo sapiens
agaggaggactgctt

SEQ ID NO: 1303642 - DNA, 15 bp, Homo sapiens
gagaggaggactgct

SEQ ID NO: 1303643 - DNA, 15 bp, Homo sapiens
agagaggaggactgc

SEQ ID NO: 1303644 - DNA, 15 bp, Homo sapiens
gagagaggaggactg

SEQ ID NO: 1303645 - DNA, 15 bp, Homo sapiens
tgagagaggaggact

SEQ ID NO: 1303646 - DNA, 15 bp, Homo sapiens
ctgagagaggaggac

SEQ ID NO: 1303647 - DNA, 15 bp, Homo sapiens
gctgagagaggagga

SEQ ID NO: 1303648 - DNA, 15 bp, Homo sapiens
ggctgagagaggagg

SEQ ID NO: 1303649 - DNA, 15 bp, Homo sapiens
aggctgagagaggag

SEQ ID NO: 1303650 - DNA, 15 bp, Homo sapiens
ggaggctgagagagg

SEQ ID NO: 1303651 - DNA, 15 bp, Homo sapiens
gggaggctgagagag

SEQ ID NO: 1303652 - DNA, 15 bp, Homo sapiens
tgggaggctgagaga

SEQ ID NO: 1303653 - DNA, 15 bp, Homo sapiens
ttgggaggctgagag

SEQ ID NO: 1303654 - DNA, 15 bp, Homo sapiens
ttgtaatcccagcta

SEQ ID NO: 1303655 - DNA, 15 bp, Homo sapiens
tttgtaatcccagct

SEQ ID NO: 1303656 - DNA, 15 bp, Homo sapiens
atttgtaatcccagc

SEQ ID NO: 1303657 - DNA, 15 bp, Homo sapiens
catttgtaatcccag

SEQ ID NO: 1303658 - DNA, 15 bp, Homo sapiens
acatttgtaatccca

SEQ ID NO: 1303659 - DNA, 15 bp, Homo sapiens
cacatttgtaatccc

SEQ ID NO: 1303660 - DNA, 15 bp, Homo sapiens
gcacatttgtaatcc

SEQ ID NO: 1303661 - DNA, 15 bp, Homo sapiens
tgcacatttgtaatc

SEQ ID NO: 1303662 - DNA, 15 bp, Homo sapiens
atgcacatttgtaat

SEQ ID NO: 1303663 - DNA, 15 bp, Homo sapiens
gatgcacatttgtaa

SEQ ID NO: 1303664 - DNA, 15 bp, Homo sapiens
tgatgcacatttgta

SEQ ID NO: 1303665 - DNA, 15 bp, Homo sapiens
gtgatgcacatttgt

SEQ ID NO: 1303666 - DNA, 15 bp, Homo sapiens
ggtgatgcacatttg

SEQ ID NO: 1303667 - DNA, 15 bp, Homo sapiens
tggtgatgcacattt

SEQ ID NO: 1303668 - DNA, 15 bp, Homo sapiens
atggtgatgcacatt

SEQ ID NO: 1303669 - DNA, 15 bp, Homo sapiens
aatggtgatgcacat

SEQ ID NO: 1303670 - DNA, 15 bp, Homo sapiens
gaatggtgatgcaca

SEQ ID NO: 1303671 - DNA, 15 bp, Homo sapiens
ggaatggtgatgcac

SEQ ID NO: 1303672 - DNA, 15 bp, Homo sapiens
gggaatggtgatgca

SEQ ID NO: 1303673 - DNA, 15 bp, Homo sapiens
tgggaatggtgatgc

SEQ ID NO: 1303674 - DNA, 15 bp, Homo sapiens
ctgggaatggtgatg

SEQ ID NO: 1303675 - DNA, 15 bp, Homo sapiens
actgggaatggtgat

SEQ ID NO: 1303676 - DNA, 15 bp, Homo sapiens
aactgggaatggtga

SEQ ID NO: 1303677 - DNA, 15 bp, Homo sapiens
taactgggaatggtg

SEQ ID NO: 1303678 - DNA, 15 bp, Homo sapiens
ataactgggaatggt

SEQ ID NO: 1303679 - DNA, 15 bp, Homo sapiens
aataactgggaatgg

SEQ ID NO: 1303680 - DNA, 15 bp, Homo sapiens
aaataactgggaatg

SEQ ID NO: 1303681 - DNA, 15 bp, Homo sapiens
aaaataactgggaat

SEQ ID NO: 1303682 - DNA, 15 bp, Homo sapiens
aaaaataactgggaa

SEQ ID NO: 1303683 - DNA, 15 bp, Homo sapiens
aaaaaataactggga

SEQ ID NO: 1303684 - DNA, 15 bp, Homo sapiens
caaaaaataactggg

SEQ ID NO: 1303685 - DNA, 15 bp, Homo sapiens
acaaaaaataactgg

SEQ ID NO: 1303686 - DNA, 15 bp, Homo sapiens
tacaaaaaataactg

SEQ ID NO: 1303687 - DNA, 15 bp, Homo sapiens
atacaaaaaataact

SEQ ID NO: 1303688 - DNA, 15 bp, Homo sapiens
gatacaaaaaataac

SEQ ID NO: 1303689 - DNA, 15 bp, Homo sapiens
agatacaaaaaataa

SEQ ID NO: 1303690 - DNA, 15 bp, Homo sapiens
aagatacaaaaaata

SEQ ID NO: 1303691 - DNA, 15 bp, Homo sapiens
aaagatacaaaaaat

SEQ ID NO: 1303692 - DNA, 15 bp, Homo sapiens
taaagatacaaaaaa

SEQ ID NO: 1303693 - DNA, 15 bp, Homo sapiens
ctaaagatacaaaaa

SEQ ID NO: 1303694 - DNA, 15 bp, Homo sapiens
actaaagatacaaaa

SEQ ID NO: 1303695 - DNA, 15 bp, Homo sapiens
tactaaagatacaaa

SEQ ID NO: 1303696 - DNA, 15 bp, Homo sapiens
ctactaaagatacaa

SEQ ID NO: 1303697 - DNA, 15 bp, Homo sapiens
tctactaaagataca

SEQ ID NO: 1303698 - DNA, 15 bp, Homo sapiens
ctctactaaagatac

SEQ ID NO: 1303699 - DNA, 15 bp, Homo sapiens
tctctactaaagata

SEQ ID NO: 1303700 - DNA, 15 bp, Homo sapiens
atctctactaaagat

SEQ ID NO: 1303701 - DNA, 15 bp, Homo sapiens
catctctactaaaga

SEQ ID NO: 1303702 - DNA, 15 bp, Homo sapiens
ccatctctactaaag

SEQ ID NO: 1303703 - DNA, 15 bp, Homo sapiens
aaggcaggcggatca

SEQ ID NO: 1303704 - DNA, 15 bp, Homo sapiens
caaggcaggcggatc

SEQ ID NO: 1303705 - DNA, 15 bp, Homo sapiens
ccaaggcaggcggat

SEQ ID NO: 1303706 - DNA, 15 bp, Homo sapiens
gccaaggcaggcgga

SEQ ID NO: 1303707 - DNA, 15 bp, Homo sapiens
ggccaaggcaggcgg

SEQ ID NO: 1303708 - DNA, 15 bp, Homo sapiens
aggccaaggcaggcg

SEQ ID NO: 1303709 - DNA, 15 bp, Homo sapiens
tgcccgtaatcccag

SEQ ID NO: 1303710 - DNA, 15 bp, Homo sapiens
atgcccgtaatccca

SEQ ID NO: 1303711 - DNA, 15 bp, Homo sapiens
catgcccgtaatccc

SEQ ID NO: 1303712 - DNA, 15 bp, Homo sapiens
tcatgcccgtaatcc

SEQ ID NO: 1303713 - DNA, 15 bp, Homo sapiens
ctcatgcccgtaatc

SEQ ID NO: 1303714 - DNA, 15 bp, Homo sapiens
gctcatgcccgtaat

SEQ ID NO: 1303715 - DNA, 15 bp, Homo sapiens
ggctcatgcccgtaa

SEQ ID NO: 1303716 - DNA, 15 bp, Homo sapiens
tggctcatgcccgta

SEQ ID NO: 1303717 - DNA, 15 bp, Homo sapiens
gtggctcatgcccgt

SEQ ID NO: 1303718 - DNA, 15 bp, Homo sapiens
ggtggctcatgcccg

SEQ ID NO: 1303719 - DNA, 15 bp, Homo sapiens
cggtggctcatgccc

SEQ ID NO: 1303720 - DNA, 15 bp, Homo sapiens
ccgcggtggctcatg

SEQ ID NO: 1303721 - DNA, 15 bp, Homo sapiens
gccgcggtggctcat

SEQ ID NO: 1303722 - DNA, 15 bp, Homo sapiens
ggccgcggtggctca

SEQ ID NO: 1303723 - DNA, 15 bp, Homo sapiens
cggccgcggtggctc

SEQ ID NO: 1303724 - DNA, 15 bp, Homo sapiens
ccggccgcggtggct

SEQ ID NO: 1303725 - DNA, 15 bp, Homo sapiens
gccggccgcggtggc

SEQ ID NO: 1303726 - DNA, 15 bp, Homo sapiens
ggccggccgcggtgg

SEQ ID NO: 1303727 - DNA, 15 bp, Homo sapiens
tggccggccgcggtg

SEQ ID NO: 1303728 - DNA, 15 bp, Homo sapiens
atggccggccgcggt

SEQ ID NO: 1303729 - DNA, 15 bp, Homo sapiens
gatggccggccgcgg

SEQ ID NO: 1303730 - DNA, 15 bp, Homo sapiens
agatggccggccgcg

SEQ ID NO: 1303731 - DNA, 15 bp, Homo sapiens
gagatggccggccgc

SEQ ID NO: 1303732 - DNA, 15 bp, Homo sapiens
ggagatggccggccg

SEQ ID NO: 1303733 - DNA, 15 bp, Homo sapiens
aggagatggccggcc

SEQ ID NO: 1303734 - DNA, 15 bp, Homo sapiens
caggagatggccggc

SEQ ID NO: 1303735 - DNA, 15 bp, Homo sapiens
ccaggagatggccgg

SEQ ID NO: 1303736 - DNA, 15 bp, Homo sapiens
tccaggagatggccg

SEQ ID NO: 1303737 - DNA, 15 bp, Homo sapiens
ttccaggagatggcc

SEQ ID NO: 1303738 - DNA, 15 bp, Homo sapiens
attccaggagatggc

SEQ ID NO: 1303739 - DNA, 15 bp, Homo sapiens
aattccaggagatgg

SEQ ID NO: 1303740 - DNA, 15 bp, Homo sapiens
gaattccaggagatg

SEQ ID NO: 1303741 - DNA, 15 bp, Homo sapiens
agaattccaggagat

SEQ ID NO: 1303742 - DNA, 15 bp, Homo sapiens
aagaattccaggaga

SEQ ID NO: 1303743 - DNA, 15 bp, Homo sapiens
aaagaattccaggag

SEQ ID NO: 1303744 - DNA, 15 bp, Homo sapiens
caaagaattccagga

SEQ ID NO: 1303745 - DNA, 15 bp, Homo sapiens
acaaagaattccagg

SEQ ID NO: 1303746 - DNA, 15 bp, Homo sapiens
gacaaagaattccag

SEQ ID NO: 1303747 - DNA, 15 bp, Homo sapiens
ggacaaagaattcca

SEQ ID NO: 1303748 - DNA, 15 bp, Homo sapiens
tggacaaagaattcc

SEQ ID NO: 1303749 - DNA, 15 bp, Homo sapiens
gtggacaaagaattc

SEQ ID NO: 1303750 - DNA, 15 bp, Homo sapiens
agtggacaaagaatt

SEQ ID NO: 1303751 - DNA, 15 bp, Homo sapiens
aagtggacaaagaat

SEQ ID NO: 1303752 - DNA, 15 bp, Homo sapiens
aaagtggacaaagaa

SEQ ID NO: 1303753 - DNA, 15 bp, Homo sapiens
aaaagtggacaaaga

SEQ ID NO: 1303754 - DNA, 15 bp, Homo sapiens
gaaaagtggacaaag

SEQ ID NO: 1303755 - DNA, 15 bp, Homo sapiens
agaaaagtggacaaa

SEQ ID NO: 1303756 - DNA, 15 bp, Homo sapiens
cagaaaagtggacaa

SEQ ID NO: 1303757 - DNA, 15 bp, Homo sapiens
acagaaaagtggaca

SEQ ID NO: 1303758 - DNA, 15 bp, Homo sapiens
gacagaaaagtggac

SEQ ID NO: 1303759 - DNA, 15 bp, Homo sapiens
ggacagaaaagtgga

SEQ ID NO: 1303760 - DNA, 15 bp, Homo sapiens
ggaaggacagaaaag

SEQ ID NO: 1303761 - DNA, 15 bp, Homo sapiens
aggaaggacagaaaa

SEQ ID NO: 1303762 - DNA, 15 bp, Homo sapiens
gaggaaggacagaaa

SEQ ID NO: 1303763 - DNA, 15 bp, Homo sapiens
agaggaaggacagaa

SEQ ID NO: 1303764 - DNA, 15 bp, Homo sapiens
gagaggaaggacaga

SEQ ID NO: 1303765 - DNA, 15 bp, Homo sapiens
agagaggaaggacag

SEQ ID NO: 1303766 - DNA, 15 bp, Homo sapiens
aagagaggaaggaca

SEQ ID NO: 1303767 - DNA, 15 bp, Homo sapiens
gaagagaggaaggac

SEQ ID NO: 1303768 - DNA, 15 bp, Homo sapiens
ggaagagaggaagga

SEQ ID NO: 1303769 - DNA, 15 bp, Homo sapiens
gggaagagaggaagg

SEQ ID NO: 1303770 - DNA, 15 bp, Homo sapiens
agggaagagaggaag

SEQ ID NO: 1303771 - DNA, 15 bp, Homo sapiens
aagggaagagaggaa

SEQ ID NO: 1303772 - DNA, 15 bp, Homo sapiens
gaagggaagagagga

SEQ ID NO: 1303773 - DNA, 15 bp, Homo sapiens
agaagggaagagagg

SEQ ID NO: 1303774 - DNA, 15 bp, Homo sapiens
gagaagggaagagag

SEQ ID NO: 1303775 - DNA, 15 bp, Homo sapiens
agagaagggaagaga

SEQ ID NO: 1303776 - DNA, 15 bp, Homo sapiens
gagagaagggaagag

SEQ ID NO: 1303777 - DNA, 15 bp, Homo sapiens
tgagagaagggaaga

SEQ ID NO: 1303778 - DNA, 15 bp, Homo sapiens
atgagagaagggaag

SEQ ID NO: 1303779 - DNA, 15 bp, Homo sapiens
catgagagaagggaa

SEQ ID NO: 1303780 - DNA, 15 bp, Homo sapiens
gcatgagagaaggga

SEQ ID NO: 1303781 - DNA, 15 bp, Homo sapiens
agcatgagagaaggg

SEQ ID NO: 1303782 - DNA, 15 bp, Homo sapiens
tagcatgagagaagg

SEQ ID NO: 1303783 - DNA, 15 bp, Homo sapiens
gtagcatgagagaag

SEQ ID NO: 1303784 - DNA, 15 bp, Homo sapiens
tgtagcatgagagaa

SEQ ID NO: 1303785 - DNA, 15 bp, Homo sapiens
gtgtagcatgagaga

SEQ ID NO: 1303786 - DNA, 15 bp, Homo sapiens
agtgtagcatgagag

SEQ ID NO: 1303787 - DNA, 15 bp, Homo sapiens
gagtgtagcatgaga

SEQ ID NO: 1303788 - DNA, 15 bp, Homo sapiens
ggagtgtagcatgag

SEQ ID NO: 1303789 - DNA, 15 bp, Homo sapiens
aggagtgtagcatga

SEQ ID NO: 1303790 - DNA, 15 bp, Homo sapiens
gaggagtgtagcatg

SEQ ID NO: 1303791 - DNA, 15 bp, Homo sapiens
agaggagtgtagcat

SEQ ID NO: 1303792 - DNA, 15 bp, Homo sapiens
aagaggagtgtagca

SEQ ID NO: 1303793 - DNA, 15 bp, Homo sapiens
aaagaggagtgtagc

SEQ ID NO: 1303794 - DNA, 15 bp, Homo sapiens
gaaagaggagtgtag

SEQ ID NO: 1303795 - DNA, 15 bp, Homo sapiens
ggaaagaggagtgta

SEQ ID NO: 1303796 - DNA, 15 bp, Homo sapiens
tggaaagaggagtgt

SEQ ID NO: 1303797 - DNA, 15 bp, Homo sapiens
gtggaaagaggagtg

SEQ ID NO: 1303798 - DNA, 15 bp, Homo sapiens
agtggaaagaggagt

SEQ ID NO: 1303799 - DNA, 15 bp, Homo sapiens
cagatccagcagaga

SEQ ID NO: 1303800 - DNA, 15 bp, Homo sapiens
acagatccagcagag

SEQ ID NO: 1303801 - DNA, 15 bp, Homo sapiens
cacagatccagcaga

SEQ ID NO: 1303802 - DNA, 15 bp, Homo sapiens
gcacagatccagcag

SEQ ID NO: 1303803 - DNA, 15 bp, Homo sapiens
agcacagatccagca

SEQ ID NO: 1303804 - DNA, 15 bp, Homo sapiens
cagcacagatccagc

SEQ ID NO: 1303805 - DNA, 15 bp, Homo sapiens
gcagcacagatccag

SEQ ID NO: 1303806 - DNA, 15 bp, Homo sapiens
tgcagcacagatcca

SEQ ID NO: 1303807 - DNA, 15 bp, Homo sapiens
gtgcagcacagatcc

SEQ ID NO: 1303808 - DNA, 15 bp, Homo sapiens
tgtgcagcacagatc

SEQ ID NO: 1303809 - DNA, 15 bp, Homo sapiens
gtgtgcagcacagat

SEQ ID NO: 1303810 - DNA, 15 bp, Homo sapiens
cgtgtgcagcacaga

SEQ ID NO: 1303811 - DNA, 15 bp, Homo sapiens
ccgtgtgcagcacag

SEQ ID NO: 1303812 - DNA, 15 bp, Homo sapiens
cccgtgtgcagcaca

SEQ ID NO: 1303813 - DNA, 15 bp, Homo sapiens
ccccgtgtgcagcac

SEQ ID NO: 1303814 - DNA, 15 bp, Homo sapiens
accccgtgtgcagca

SEQ ID NO: 1303815 - DNA, 15 bp, Homo sapiens
caccccgtgtgcagc

SEQ ID NO: 1303816 - DNA, 15 bp, Homo sapiens
acaccccgtgtgcag

SEQ ID NO: 1303817 - DNA, 15 bp, Homo sapiens
cacaccccgtgtgca

SEQ ID NO: 1303818 - DNA, 15 bp, Homo sapiens
ccacaccccgtgtgc

SEQ ID NO: 1303819 - DNA, 15 bp, Homo sapiens
cccacaccccgtgtg

SEQ ID NO: 1303820 - DNA, 15 bp, Homo sapiens
tcccacaccccgtgt

SEQ ID NO: 1303821 - DNA, 15 bp, Homo sapiens
ttcccacaccccgtg

SEQ ID NO: 1303822 - DNA, 15 bp, Homo sapiens
attcccacaccccgt

SEQ ID NO: 1303823 - DNA, 15 bp, Homo sapiens
gattcccacaccccg

SEQ ID NO: 1303824 - DNA, 15 bp, Homo sapiens
agattcccacacccc

SEQ ID NO: 1303825 - DNA, 15 bp, Homo sapiens
gagattcccacaccc

SEQ ID NO: 1303826 - DNA, 15 bp, Homo sapiens
agagattcccacacc

SEQ ID NO: 1303827 - DNA, 15 bp, Homo sapiens
cagagattcccacac

SEQ ID NO: 1303828 - DNA, 15 bp, Homo sapiens
ccagagattcccaca

SEQ ID NO: 1303829 - DNA, 15 bp, Homo sapiens
cccagagattcccac

SEQ ID NO: 1303830 - DNA, 15 bp, Homo sapiens
gcccagagattccca

SEQ ID NO: 1303831 - DNA, 15 bp, Homo sapiens
tgcccagagattccc

SEQ ID NO: 1303832 - DNA, 15 bp, Homo sapiens
ttgcccagagattcc

SEQ ID NO: 1303833 - DNA, 15 bp, Homo sapiens
gttgcccagagattc

SEQ ID NO: 1303834 - DNA, 15 bp, Homo sapiens
ggttgcccagagatt

SEQ ID NO: 1303835 - DNA, 15 bp, Homo sapiens
tggttgcccagagat

SEQ ID NO: 1303836 - DNA, 15 bp, Homo sapiens
ctggttgcccagaga

SEQ ID NO: 1303837 - DNA, 15 bp, Homo sapiens
tctggttgcccagag

SEQ ID NO: 1303838 - DNA, 15 bp, Homo sapiens
ttctggttgcccaga

SEQ ID NO: 1303839 - DNA, 15 bp, Homo sapiens
cttctggttgcccag

SEQ ID NO: 1303840 - DNA, 15 bp, Homo sapiens
tcttctggttgccca

SEQ ID NO: 1303841 - DNA, 15 bp, Homo sapiens
ctcttctggttgccc

SEQ ID NO: 1303842 - DNA, 15 bp, Homo sapiens
gctcttctggttgcc

SEQ ID NO: 1303843 - DNA, 15 bp, Homo sapiens
tgctcttctggttgc

SEQ ID NO: 1303844 - DNA, 15 bp, Homo sapiens
ctgctcttctggttg

SEQ ID NO: 1303845 - DNA, 15 bp, Homo sapiens
actgctcttctggtt

SEQ ID NO: 1303846 - DNA, 15 bp, Homo sapiens
tactgctcttctggt

SEQ ID NO: 1303847 - DNA, 15 bp, Homo sapiens
ctactgctcttctgg

SEQ ID NO: 1303848 - DNA, 15 bp, Homo sapiens
actactgctcttctg

SEQ ID NO: 1303849 - DNA, 15 bp, Homo sapiens
tactactgctcttct

SEQ ID NO: 1303850 - DNA, 15 bp, Homo sapiens
ttactactgctcttc

SEQ ID NO: 1303851 - DNA, 15 bp, Homo sapiens
gttactactgctctt

SEQ ID NO: 1303852 - DNA, 15 bp, Homo sapiens
tgttactactgctct

SEQ ID NO: 1303853 - DNA, 15 bp, Homo sapiens
atgttactactgctc

SEQ ID NO: 1303854 - DNA, 15 bp, Homo sapiens
gatgttactactgct

SEQ ID NO: 1303855 - DNA, 15 bp, Homo sapiens
agatgttactactgc

SEQ ID NO: 1303856 - DNA, 15 bp, Homo sapiens
aagatgttactactg

SEQ ID NO: 1303857 - DNA, 15 bp, Homo sapiens
aaagatgttactact

SEQ ID NO: 1303858 - DNA, 15 bp, Homo sapiens
taaagatgttactac

SEQ ID NO: 1303859 - DNA, 15 bp, Homo sapiens
ctaaagatgttacta

SEQ ID NO: 1303860 - DNA, 15 bp, Homo sapiens
cctaaagatgttact

SEQ ID NO: 1303861 - DNA, 15 bp, Homo sapiens
acctaaagatgttac

SEQ ID NO: 1303862 - DNA, 15 bp, Homo sapiens
tacctaaagatgtta

SEQ ID NO: 1303863 - DNA, 15 bp, Homo sapiens
ttacctaaagatgtt

SEQ ID NO: 1303864 - DNA, 15 bp, Homo sapiens
gttacctaaagatgt

SEQ ID NO: 1303865 - DNA, 15 bp, Homo sapiens
agttacctaaagatg

SEQ ID NO: 1303866 - DNA, 15 bp, Homo sapiens
cagttacctaaagat

SEQ ID NO: 1303867 - DNA, 15 bp, Homo sapiens
tcagttacctaaaga

SEQ ID NO: 1303868 - DNA, 15 bp, Homo sapiens
ttcagttacctaaag

SEQ ID NO: 1303869 - DNA, 15 bp, Homo sapiens
cttcagttacctaaa

SEQ ID NO: 1303870 - DNA, 15 bp, Homo sapiens
acttcagttacctaa

SEQ ID NO: 1303871 - DNA, 15 bp, Homo sapiens
gacttcagttaccta

SEQ ID NO: 1303872 - DNA, 15 bp, Homo sapiens
tgacttcagttacct

SEQ ID NO: 1303873 - DNA, 15 bp, Homo sapiens
ttgacttcagttacc

SEQ ID NO: 1303874 - DNA, 15 bp, Homo sapiens
attgacttcagttac

SEQ ID NO: 1303875 - DNA, 15 bp, Homo sapiens
gattgacttcagtta

SEQ ID NO: 1303876 - DNA, 15 bp, Homo sapiens
ggattgacttcagtt

SEQ ID NO: 1303877 - DNA, 15 bp, Homo sapiens
aggattgacttcagt

SEQ ID NO: 1303878 - DNA, 15 bp, Homo sapiens
caggattgacttcag

SEQ ID NO: 1303879 - DNA, 15 bp, Homo sapiens
gcaggattgacttca

SEQ ID NO: 1303880 - DNA, 15 bp, Homo sapiens
ggcaggattgacttc

SEQ ID NO: 1303881 - DNA, 15 bp, Homo sapiens
gggcaggattgactt

SEQ ID NO: 1303882 - DNA, 15 bp, Homo sapiens
tgggcaggattgact

SEQ ID NO: 1303883 - DNA, 15 bp, Homo sapiens
gtgggcaggattgac

SEQ ID NO: 1303884 - DNA, 15 bp, Homo sapiens
agtgggcaggattga

SEQ ID NO: 1303885 - DNA, 15 bp, Homo sapiens
cagtgggcaggattg

SEQ ID NO: 1303886 - DNA, 15 bp, Homo sapiens
ccagtgggcaggatt

SEQ ID NO: 1303887 - DNA, 15 bp, Homo sapiens
cccagtgggcaggat

SEQ ID NO: 1303888 - DNA, 15 bp, Homo sapiens
ttgcccagtgggcag

SEQ ID NO: 1303889 - DNA, 15 bp, Homo sapiens
tttgcccagtgggca

SEQ ID NO: 1303890 - DNA, 15 bp, Homo sapiens
atttgcccagtgggc

SEQ ID NO: 1303891 - DNA, 15 bp, Homo sapiens
tatttgcccagtggg

SEQ ID NO: 1303892 - DNA, 15 bp, Homo sapiens
atatttgcccagtgg

SEQ ID NO: 1303893 - DNA, 15 bp, Homo sapiens
aatatttgcccagtg

SEQ ID NO: 1303894 - DNA, 15 bp, Homo sapiens
taatatttgcccagt

SEQ ID NO: 1303895 - DNA, 15 bp, Homo sapiens
ttaatatttgcccag

SEQ ID NO: 1303896 - DNA, 15 bp, Homo sapiens
attaatatttgccca

SEQ ID NO: 1303897 - DNA, 15 bp, Homo sapiens
aattaatatttgccc

SEQ ID NO: 1303898 - DNA, 15 bp, Homo sapiens
caattaatatttgcc

SEQ ID NO: 1303899 - DNA, 15 bp, Homo sapiens
ccaattaatatttgc

SEQ ID NO: 1303900 - DNA, 15 bp, Homo sapiens
accaattaatatttg

SEQ ID NO: 1303901 - DNA, 15 bp, Homo sapiens
aaccaattaatattt

SEQ ID NO: 1303902 - DNA, 15 bp, Homo sapiens
caaccaattaatatt

SEQ ID NO: 1303903 - DNA, 15 bp, Homo sapiens
gcaaccaattaatat

SEQ ID NO: 1303904 - DNA, 15 bp, Homo sapiens
agcaaccaattaata

SEQ ID NO: 1303905 - DNA, 15 bp, Homo sapiens
gagcaaccaattaat

SEQ ID NO: 1303906 - DNA, 15 bp, Homo sapiens
tgagcaaccaattaa

SEQ ID NO: 1303907 - DNA, 15 bp, Homo sapiens
ctgagcaaccaatta

SEQ ID NO: 1303908 - DNA, 15 bp, Homo sapiens
cctgagcaaccaatt

SEQ ID NO: 1303909 - DNA, 15 bp, Homo sapiens
ccctgagcaaccaat

SEQ ID NO: 1303910 - DNA, 15 bp, Homo sapiens
gccctgagcaaccaa

SEQ ID NO: 1303911 - DNA, 15 bp, Homo sapiens
agccctgagcaacca

SEQ ID NO: 1303912 - DNA, 15 bp, Homo sapiens
cagccctgagcaacc

SEQ ID NO: 1303913 - DNA, 15 bp, Homo sapiens
gcagccctgagcaac

SEQ ID NO: 1303914 - DNA, 15 bp, Homo sapiens
tgcagccctgagcaa

SEQ ID NO: 1303915 - DNA, 15 bp, Homo sapiens
gtgcagccctgagca

SEQ ID NO: 1303916 - DNA, 15 bp, Homo sapiens
agtgcagccctgagc

SEQ ID NO: 1303917 - DNA, 15 bp, Homo sapiens
cagtgcagccctgag

SEQ ID NO: 1303918 - DNA, 15 bp, Homo sapiens
tcagtgcagccctga

SEQ ID NO: 1303919 - DNA, 15 bp, Homo sapiens
ctcagtgcagccctg

SEQ ID NO: 1303920 - DNA, 15 bp, Homo sapiens
actcagtgcagccct

SEQ ID NO: 1303921 - DNA, 15 bp, Homo sapiens
aactcagtgcagccc

SEQ ID NO: 1303922 - DNA, 15 bp, Homo sapiens
gaactcagtgcagcc

SEQ ID NO: 1303923 - DNA, 15 bp, Homo sapiens
tgaactcagtgcagc

SEQ ID NO: 1303924 - DNA, 15 bp, Homo sapiens
ttgaactcagtgcag

SEQ ID NO: 1303925 - DNA, 15 bp, Homo sapiens
tttgaactcagtgca

SEQ ID NO: 1303926 - DNA, 15 bp, Homo sapiens
atttgaactcagtgc

SEQ ID NO: 1303927 - DNA, 15 bp, Homo sapiens
tatttgaactcagtg

SEQ ID NO: 1303928 - DNA, 15 bp, Homo sapiens
gtatttgaactcagt

SEQ ID NO: 1303929 - DNA, 15 bp, Homo sapiens
agtatttgaactcag

SEQ ID NO: 1303930 - DNA, 15 bp, Homo sapiens
cagtatttgaactca

SEQ ID NO: 1303931 - DNA, 15 bp, Homo sapiens
tcagtatttgaactc

SEQ ID NO: 1303932 - DNA, 15 bp, Homo sapiens
ctcagtatttgaact

SEQ ID NO: 1303933 - DNA, 15 bp, Homo sapiens
gctcagtatttgaac

SEQ ID NO: 1303934 - DNA, 15 bp, Homo sapiens
ggctcagtatttgaa

SEQ ID NO: 1303935 - DNA, 15 bp, Homo sapiens
tggctcagtatttga

SEQ ID NO: 1303936 - DNA, 15 bp, Homo sapiens
gtggctcagtatttg

SEQ ID NO: 1303937 - DNA, 15 bp, Homo sapiens
agtggctcagtattt

SEQ ID NO: 1303938 - DNA, 15 bp, Homo sapiens
gagtggctcagtatt

SEQ ID NO: 1303939 - DNA, 15 bp, Homo sapiens
tgagtggctcagtat

SEQ ID NO: 1303940 - DNA, 15 bp, Homo sapiens
ctgagtggctcagta

SEQ ID NO: 1303941 - DNA, 15 bp, Homo sapiens
cctgagtggctcagt

SEQ ID NO: 1303942 - DNA, 15 bp, Homo sapiens
ccctgagtggctcag

SEQ ID NO: 1303943 - DNA, 15 bp, Homo sapiens
cccctgagtggctca

SEQ ID NO: 1303944 - DNA, 15 bp, Homo sapiens
gcccctgagtggctc

SEQ ID NO: 1303945 - DNA, 15 bp, Homo sapiens
agcccctgagtggct

SEQ ID NO: 1303946 - DNA, 15 bp, Homo sapiens
aagcccctgagtggc

SEQ ID NO: 1303947 - DNA, 15 bp, Homo sapiens
gaagcccctgagtgg

SEQ ID NO: 1303948 - DNA, 15 bp, Homo sapiens
cgaagcccctgagtg

SEQ ID NO: 1303949 - DNA, 15 bp, Homo sapiens
tcgaagcccctgagt

SEQ ID NO: 1303950 - DNA, 15 bp, Homo sapiens
ttcgaagcccctgag

SEQ ID NO: 1303951 - DNA, 15 bp, Homo sapiens
gttcgaagcccctga

SEQ ID NO: 1303952 - DNA, 15 bp, Homo sapiens
cgttcgaagcccctg

SEQ ID NO: 1303953 - DNA, 15 bp, Homo sapiens
tcgttcgaagcccct

SEQ ID NO: 1303954 - DNA, 15 bp, Homo sapiens
gtcgttcgaagcccc

SEQ ID NO: 1303955 - DNA, 15 bp, Homo sapiens
ggtcgttcgaagccc

SEQ ID NO: 1303956 - DNA, 15 bp, Homo sapiens
tggtcgttcgaagcc

SEQ ID NO: 1303957 - DNA, 15 bp, Homo sapiens
ttggtcgttcgaagc

SEQ ID NO: 1303958 - DNA, 15 bp, Homo sapiens
cttggtcgttcgaag

SEQ ID NO: 1303959 - DNA, 15 bp, Homo sapiens
tcttggtcgttcgaa

SEQ ID NO: 1303960 - DNA, 15 bp, Homo sapiens
atcttggtcgttcga

SEQ ID NO: 1303961 - DNA, 15 bp, Homo sapiens
gatcttggtcgttcg

SEQ ID NO: 1303962 - DNA, 15 bp, Homo sapiens
tgatcttggtcgttc

SEQ ID NO: 1303963 - DNA, 15 bp, Homo sapiens
ctgatcttggtcgtt

SEQ ID NO: 1303964 - DNA, 15 bp, Homo sapiens
cctgatcttggtcgt

SEQ ID NO: 1303965 - DNA, 15 bp, Homo sapiens
gcctgatcttggtcg

SEQ ID NO: 1303966 - DNA, 15 bp, Homo sapiens
tgcctgatcttggtc

SEQ ID NO: 1303967 - DNA, 15 bp, Homo sapiens
ctgcctgatcttggt

SEQ ID NO: 1303968 - DNA, 15 bp, Homo sapiens
actgcctgatcttgg

SEQ ID NO: 1303969 - DNA, 15 bp, Homo sapiens
aactgcctgatcttg

SEQ ID NO: 1303970 - DNA, 15 bp, Homo sapiens
aaactgcctgatctt

SEQ ID NO: 1303971 - DNA, 15 bp, Homo sapiens
aaaactgcctgatct

SEQ ID NO: 1303972 - DNA, 15 bp, Homo sapiens
gaaaactgcctgatc

SEQ ID NO: 1303973 - DNA, 15 bp, Homo sapiens
tgaaaactgcctgat

SEQ ID NO: 1303974 - DNA, 15 bp, Homo sapiens
ttgaaaactgcctga

SEQ ID NO: 1303975 - DNA, 15 bp, Homo sapiens
gttgaaaactgcctg

SEQ ID NO: 1303976 - DNA, 15 bp, Homo sapiens
ggttgaaaactgcct

SEQ ID NO: 1303977 - DNA, 15 bp, Homo sapiens
aggttgaaaactgcc

SEQ ID NO: 1303978 - DNA, 15 bp, Homo sapiens
caggttgaaaactgc

SEQ ID NO: 1303979 - DNA, 15 bp, Homo sapiens
acaggttgaaaactg

SEQ ID NO: 1303980 - DNA, 15 bp, Homo sapiens
cacaggttgaaaact

SEQ ID NO: 1303981 - DNA, 15 bp, Homo sapiens
tcacaggttgaaaac

SEQ ID NO: 1303982 - DNA, 15 bp, Homo sapiens
atcacaggttgaaaa

SEQ ID NO: 1303983 - DNA, 15 bp, Homo sapiens
gatcacaggttgaaa

SEQ ID NO: 1303984 - DNA, 15 bp, Homo sapiens
ggatcacaggttgaa

SEQ ID NO: 1303985 - DNA, 15 bp, Homo sapiens
tggatcacaggttga

SEQ ID NO: 1303986 - DNA, 15 bp, Homo sapiens
gtggatcacaggttg

SEQ ID NO: 1303987 - DNA, 15 bp, Homo sapiens
agtggatcacaggtt

SEQ ID NO: 1303988 - DNA, 15 bp, Homo sapiens
aagtggatcacaggt

SEQ ID NO: 1303989 - DNA, 15 bp, Homo sapiens
aaagtggatcacagg

SEQ ID NO: 1303990 - DNA, 15 bp, Homo sapiens
aaaagtggatcacag

SEQ ID NO: 1303991 - DNA, 15 bp, Homo sapiens
caaaagtggatcaca

SEQ ID NO: 1303992 - DNA, 15 bp, Homo sapiens
ccaaaagtggatcac

SEQ ID NO: 1303993 - DNA, 15 bp, Homo sapiens
accaaaagtggatca

SEQ ID NO: 1303994 - DNA, 15 bp, Homo sapiens
taccaaaagtggatc

SEQ ID NO: 1303995 - DNA, 15 bp, Homo sapiens
ctaccaaaagtggat

SEQ ID NO: 1303996 - DNA, 15 bp, Homo sapiens
tctaccaaaagtgga

SEQ ID NO: 1303997 - DNA, 15 bp, Homo sapiens
atctaccaaaagtgg

SEQ ID NO: 1303998 - DNA, 15 bp, Homo sapiens
aatctaccaaaagtg

SEQ ID NO: 1303999 - DNA, 15 bp, Homo sapiens
aaatctaccaaaagt

SEQ ID NO: 1304000 - DNA, 15 bp, Homo sapiens
taaatctaccaaaag

SEQ ID NO: 1304001 - DNA, 15 bp, Homo sapiens
ttaaatctaccaaaa

SEQ ID NO: 1304002 - DNA, 15 bp, Homo sapiens
cttaaatctaccaaa

SEQ ID NO: 1304003 - DNA, 15 bp, Homo sapiens
ccttaaatctaccaa

SEQ ID NO: 1304004 - DNA, 15 bp, Homo sapiens
gccttaaatctacca

SEQ ID NO: 1304005 - DNA, 15 bp, Homo sapiens
tgccttaaatctacc

SEQ ID NO: 1304006 - DNA, 15 bp, Homo sapiens
ttgccttaaatctac

SEQ ID NO: 1304007 - DNA, 15 bp, Homo sapiens
tttgccttaaatcta

SEQ ID NO: 1304008 - DNA, 15 bp, Homo sapiens
ttttgccttaaatct

SEQ ID NO: 1304009 - DNA, 15 bp, Homo sapiens
cttttgccttaaatc

SEQ ID NO: 1304010 - DNA, 15 bp, Homo sapiens
gcttttgccttaaat

SEQ ID NO: 1304011 - DNA, 15 bp, Homo sapiens
tgcttttgccttaaa

SEQ ID NO: 1304012 - DNA, 15 bp, Homo sapiens
ttgcttttgccttaa

SEQ ID NO: 1304013 - DNA, 15 bp, Homo sapiens
tttgcttttgcctta

SEQ ID NO: 1304014 - DNA, 15 bp, Homo sapiens
atttgcttttgcctt

SEQ ID NO: 1304015 - DNA, 15 bp, Homo sapiens
tatttgcttttgcct

SEQ ID NO: 1304016 - DNA, 15 bp, Homo sapiens
atatttgcttttgcc

SEQ ID NO: 1304017 - DNA, 15 bp, Homo sapiens
aatatttgcttttgc

SEQ ID NO: 1304018 - DNA, 15 bp, Homo sapiens
aaatatttgcttttg

SEQ ID NO: 1304019 - DNA, 15 bp, Homo sapiens
aaaatatttgctttt

SEQ ID NO: 1304020 - DNA, 15 bp, Homo sapiens
aaaaatatttgcttt

SEQ ID NO: 1304021 - DNA, 15 bp, Homo sapiens
aaaaaatatttgctt

SEQ ID NO: 1304022 - DNA, 15 bp, Homo sapiens
caaaaaatatttgct

SEQ ID NO: 1304023 - DNA, 15 bp, Homo sapiens
gcaaaaaatatttgc

SEQ ID NO: 1304024 - DNA, 15 bp, Homo sapiens
ggcaaaaaatatttg

SEQ ID NO: 1304025 - DNA, 15 bp, Homo sapiens
tggcaaaaaatattt

SEQ ID NO: 1304026 - DNA, 15 bp, Homo sapiens
atggcaaaaaatatt

SEQ ID NO: 1304027 - DNA, 15 bp, Homo sapiens
aatggcaaaaaatat

SEQ ID NO: 1304028 - DNA, 15 bp, Homo sapiens
aaatggcaaaaaata

SEQ ID NO: 1304029 - DNA, 15 bp, Homo sapiens
aaaatggcaaaaaat

SEQ ID NO: 1304030 - DNA, 15 bp, Homo sapiens
aaaaatggcaaaaaa

SEQ ID NO: 1304031 - DNA, 15 bp, Homo sapiens
aaaaaatggcaaaaa

SEQ ID NO: 1304032 - DNA, 15 bp, Homo sapiens
gaaaaaatggcaaaa

SEQ ID NO: 1304033 - DNA, 15 bp, Homo sapiens
ggaaaaaatggcaaa

SEQ ID NO: 1304034 - DNA, 15 bp, Homo sapiens
gggaaaaaatggcaa

SEQ ID NO: 1304035 - DNA, 15 bp, Homo sapiens
tgggaaaaaatggca

SEQ ID NO: 1304036 - DNA, 15 bp, Homo sapiens
ttgggaaaaaatggc

SEQ ID NO: 1304037 - DNA, 15 bp, Homo sapiens
tttgggaaaaaatgg

SEQ ID NO: 1304038 - DNA, 15 bp, Homo sapiens
atttgggaaaaaatg

SEQ ID NO: 1304039 - DNA, 15 bp, Homo sapiens
aatttgggaaaaaat

SEQ ID NO: 1304040 - DNA, 15 bp, Homo sapiens
taatttgggaaaaaa

SEQ ID NO: 1304041 - DNA, 15 bp, Homo sapiens
ataatttgggaaaaa

SEQ ID NO: 1304042 - DNA, 15 bp, Homo sapiens
aataatttgggaaaa

SEQ ID NO: 1304043 - DNA, 15 bp, Homo sapiens
aaataatttgggaaa

SEQ ID NO: 1304044 - DNA, 15 bp, Homo sapiens
aaaataatttgggaa

SEQ ID NO: 1304045 - DNA, 15 bp, Homo sapiens
taaaataatttggga

SEQ ID NO: 1304046 - DNA, 15 bp, Homo sapiens
gtaaaataatttggg

SEQ ID NO: 1304047 - DNA, 15 bp, Homo sapiens
ggtaaaataatttgg

SEQ ID NO: 1304048 - DNA, 15 bp, Homo sapiens
tggtaaaataatttg

SEQ ID NO: 1304049 - DNA, 15 bp, Homo sapiens
atggtaaaataattt

SEQ ID NO: 1304050 - DNA, 15 bp, Homo sapiens
aatggtaaaataatt

SEQ ID NO: 1304051 - DNA, 15 bp, Homo sapiens
taatggtaaaataat

SEQ ID NO: 1304052 - DNA, 15 bp, Homo sapiens
ataatggtaaaataa

SEQ ID NO: 1304053 - DNA, 15 bp, Homo sapiens
cataatggtaaaata

SEQ ID NO: 1304054 - DNA, 15 bp, Homo sapiens
ccataatggtaaaat

SEQ ID NO: 1304055 - DNA, 15 bp, Homo sapiens
gccataatggtaaaa

SEQ ID NO: 1304056 - DNA, 15 bp, Homo sapiens
tgccataatggtaaa

SEQ ID NO: 1304057 - DNA, 15 bp, Homo sapiens
gtgccataatggtaa

SEQ ID NO: 1304058 - DNA, 15 bp, Homo sapiens
cgtgccataatggta

SEQ ID NO: 1304059 - DNA, 15 bp, Homo sapiens
acgtgccataatggt

SEQ ID NO: 1304060 - DNA, 15 bp, Homo sapiens
cacgtgccataatgg

SEQ ID NO: 1304061 - DNA, 15 bp, Homo sapiens
acacgtgccataatg

SEQ ID NO: 1304062 - DNA, 15 bp, Homo sapiens
aacacgtgccataat

SEQ ID NO: 1304063 - DNA, 15 bp, Homo sapiens
caacacgtgccataa

SEQ ID NO: 1304064 - DNA, 15 bp, Homo sapiens
gcaacacgtgccata

SEQ ID NO: 1304065 - DNA, 15 bp, Homo sapiens
agcaacacgtgccat

SEQ ID NO: 1304066 - DNA, 15 bp, Homo sapiens
gagcaacacgtgcca

SEQ ID NO: 1304067 - DNA, 15 bp, Homo sapiens
ggagcaacacgtgcc

SEQ ID NO: 1304068 - DNA, 15 bp, Homo sapiens
aggagcaacacgtgc

SEQ ID NO: 1304069 - DNA, 15 bp, Homo sapiens
caggagcaacacgtg

SEQ ID NO: 1304070 - DNA, 15 bp, Homo sapiens
gcaggagcaacacgt

SEQ ID NO: 1304071 - DNA, 15 bp, Homo sapiens
ggcaggagcaacacg

SEQ ID NO: 1304072 - DNA, 15 bp, Homo sapiens
aggcaggagcaacac

SEQ ID NO: 1304073 - DNA, 15 bp, Homo sapiens
taggcaggagcaaca

SEQ ID NO: 1304074 - DNA, 15 bp, Homo sapiens
ctaggcaggagcaac

SEQ ID NO: 1304075 - DNA, 15 bp, Homo sapiens
cctaggcaggagcaa

SEQ ID NO: 1304076 - DNA, 15 bp, Homo sapiens
tcctaggcaggagca

SEQ ID NO: 1304077 - DNA, 15 bp, Homo sapiens
ctcctaggcaggagc

SEQ ID NO: 1304078 - DNA, 15 bp, Homo sapiens
tctcctaggcaggag

SEQ ID NO: 1304079 - DNA, 15 bp, Homo sapiens
atctcctaggcagga

SEQ ID NO: 1304080 - DNA, 15 bp, Homo sapiens
catctcctaggcagg

SEQ ID NO: 1304081 - DNA, 15 bp, Homo sapiens
gcatctcctaggcag

SEQ ID NO: 1304082 - DNA, 15 bp, Homo sapiens
tgcatctcctaggca

SEQ ID NO: 1304083 - DNA, 15 bp, Homo sapiens
atgcatctcctaggc

SEQ ID NO: 1304084 - DNA, 15 bp, Homo sapiens
aatgcatctcctagg

SEQ ID NO: 1304085 - DNA, 15 bp, Homo sapiens
gaatgcatctcctag

SEQ ID NO: 1304086 - DNA, 15 bp, Homo sapiens
ggaatgcatctccta

SEQ ID NO: 1304087 - DNA, 15 bp, Homo sapiens
gggaatgcatctcct

SEQ ID NO: 1304088 - DNA, 15 bp, Homo sapiens
ggggaatgcatctcc

SEQ ID NO: 1304089 - DNA, 15 bp, Homo sapiens
tggggaatgcatctc

SEQ ID NO: 1304090 - DNA, 15 bp, Homo sapiens
ctggggaatgcatct

SEQ ID NO: 1304091 - DNA, 15 bp, Homo sapiens
tctggggaatgcatc

SEQ ID NO: 1304092 - DNA, 15 bp, Homo sapiens
ttctggggaatgcat

SEQ ID NO: 1304093 - DNA, 15 bp, Homo sapiens
gttctggggaatgca

SEQ ID NO: 1304094 - DNA, 15 bp, Homo sapiens
ggttctggggaatgc

SEQ ID NO: 1304095 - DNA, 15 bp, Homo sapiens
tggttctggggaatg

SEQ ID NO: 1304096 - DNA, 15 bp, Homo sapiens
ttggttctggggaat

SEQ ID NO: 1304097 - DNA, 15 bp, Homo sapiens
cttggttctggggaa

SEQ ID NO: 1304098 - DNA, 15 bp, Homo sapiens
gcttggttctgggga

SEQ ID NO: 1304099 - DNA, 15 bp, Homo sapiens
tgcttggttctgggg

SEQ ID NO: 1304100 - DNA, 15 bp, Homo sapiens
ttgcttggttctggg

SEQ ID NO: 1304101 - DNA, 15 bp, Homo sapiens
tttgcttggttctgg

SEQ ID NO: 1304102 - DNA, 15 bp, Homo sapiens
gtttgcttggttctg

SEQ ID NO: 1304103 - DNA, 15 bp, Homo sapiens
tgtttgcttggttct

SEQ ID NO: 1304104 - DNA, 15 bp, Homo sapiens
ttgtttgcttggttc

SEQ ID NO: 1304105 - DNA, 15 bp, Homo sapiens
cttgtttgcttggtt

SEQ ID NO: 1304106 - DNA, 15 bp, Homo sapiens
tcttgtttgcttggt

SEQ ID NO: 1304107 - DNA, 15 bp, Homo sapiens
ttcttgtttgcttgg

SEQ ID NO: 1304108 - DNA, 15 bp, Homo sapiens
cttcttgtttgcttg

SEQ ID NO: 1304109 - DNA, 15 bp, Homo sapiens
tcttcttgtttgctt

SEQ ID NO: 1304110 - DNA, 15 bp, Homo sapiens
ttcttcttgtttgct

SEQ ID NO: 1304111 - DNA, 15 bp, Homo sapiens
cttcttcttgtttgc

SEQ ID NO: 1304112 - DNA, 15 bp, Homo sapiens
ccttcttcttgtttg

SEQ ID NO: 1304113 - DNA, 15 bp, Homo sapiens
accttcttcttgttt

SEQ ID NO: 1304114 - DNA, 15 bp, Homo sapiens
gaccttcttcttgtt

SEQ ID NO: 1304115 - DNA, 15 bp, Homo sapiens
ggaccttcttcttgt

SEQ ID NO: 1304116 - DNA, 15 bp, Homo sapiens
aggaccttcttcttg

SEQ ID NO: 1304117 - DNA, 15 bp, Homo sapiens
gaggaccttcttctt

SEQ ID NO: 1304118 - DNA, 15 bp, Homo sapiens
ggaggaccttcttct

SEQ ID NO: 1304119 - DNA, 15 bp, Homo sapiens
aggaggaccttcttc

SEQ ID NO: 1304120 - DNA, 15 bp, Homo sapiens
aaggaggaccttctt

SEQ ID NO: 1304121 - DNA, 15 bp, Homo sapiens
gaaggaggaccttct

SEQ ID NO: 1304122 - DNA, 15 bp, Homo sapiens
tgaaggaggaccttc

SEQ ID NO: 1304123 - DNA, 15 bp, Homo sapiens
ctgaaggaggacctt

SEQ ID NO: 1304124 - DNA, 15 bp, Homo sapiens
actgaaggaggacct

SEQ ID NO: 1304125 - DNA, 15 bp, Homo sapiens
cactgaaggaggacc

SEQ ID NO: 1304126 - DNA, 15 bp, Homo sapiens
ccactgaaggaggac

SEQ ID NO: 1304127 - DNA, 15 bp, Homo sapiens
cccactgaaggagga

SEQ ID NO: 1304128 - DNA, 15 bp, Homo sapiens
gcccactgaaggagg

SEQ ID NO: 1304129 - DNA, 15 bp, Homo sapiens
agcccactgaaggag

SEQ ID NO: 1304130 - DNA, 15 bp, Homo sapiens
cagcccactgaagga

SEQ ID NO: 1304131 - DNA, 15 bp, Homo sapiens
acagcccactgaagg

SEQ ID NO: 1304132 - DNA, 15 bp, Homo sapiens
gacagcccactgaag

SEQ ID NO: 1304133 - DNA, 15 bp, Homo sapiens
tgacagcccactgaa

SEQ ID NO: 1304134 - DNA, 15 bp, Homo sapiens
atgacagcccactga

SEQ ID NO: 1304135 - DNA, 15 bp, Homo sapiens
gatgacagcccactg

SEQ ID NO: 1304136 - DNA, 15 bp, Homo sapiens
cgatgacagcccact

SEQ ID NO: 1304137 - DNA, 15 bp, Homo sapiens
tcgatgacagcccac

SEQ ID NO: 1304138 - DNA, 15 bp, Homo sapiens
atcgatgacagccca

SEQ ID NO: 1304139 - DNA, 15 bp, Homo sapiens
gatcgatgacagccc

SEQ ID NO: 1304140 - DNA, 15 bp, Homo sapiens
tgatcgatgacagcc

SEQ ID NO: 1304141 - DNA, 15 bp, Homo sapiens
atgatcgatgacagc

SEQ ID NO: 1304142 - DNA, 15 bp, Homo sapiens
aatgatcgatgacag

SEQ ID NO: 1304143 - DNA, 15 bp, Homo sapiens
gaatgatcgatgaca

SEQ ID NO: 1304144 - DNA, 15 bp, Homo sapiens
ggaatgatcgatgac

SEQ ID NO: 1304145 - DNA, 15 bp, Homo sapiens
gggaatgatcgatga

SEQ ID NO: 1304146 - DNA, 15 bp, Homo sapiens
ggggaatgatcgatg

SEQ ID NO: 1304147 - DNA, 15 bp, Homo sapiens
cggggaatgatcgat

SEQ ID NO: 1304148 - DNA, 15 bp, Homo sapiens
acggggaatgatcga

SEQ ID NO: 1304149 - DNA, 15 bp, Homo sapiens
aacggggaatgatcg

SEQ ID NO: 1304150 - DNA, 15 bp, Homo sapiens
gaacggggaatgatc

SEQ ID NO: 1304151 - DNA, 15 bp, Homo sapiens
ggaacggggaatgat

SEQ ID NO: 1304152 - DNA, 15 bp, Homo sapiens
tggaacggggaatga

SEQ ID NO: 1304153 - DNA, 15 bp, Homo sapiens
atggaacggggaatg

SEQ ID NO: 1304154 - DNA, 15 bp, Homo sapiens
catggaacggggaat

SEQ ID NO: 1304155 - DNA, 15 bp, Homo sapiens
ccatggaacggggaa

SEQ ID NO: 1304156 - DNA, 15 bp, Homo sapiens
gccatggaacgggga

SEQ ID NO: 1304157 - DNA, 15 bp, Homo sapiens
ggccatggaacgggg

SEQ ID NO: 1304158 - DNA, 15 bp, Homo sapiens
tggccatggaacggg

SEQ ID NO: 1304159 - DNA, 15 bp, Homo sapiens
gtggccatggaacgg

SEQ ID NO: 1304160 - DNA, 15 bp, Homo sapiens
tgtggccatggaacg

SEQ ID NO: 1304161 - DNA, 15 bp, Homo sapiens
ctgtggccatggaac

SEQ ID NO: 1304162 - DNA, 15 bp, Homo sapiens
cctgtggccatggaa

SEQ ID NO: 1304163 - DNA, 15 bp, Homo sapiens
tcctgtggccatgga

SEQ ID NO: 1304164 - DNA, 15 bp, Homo sapiens
gtcctgtggccatgg

SEQ ID NO: 1304165 - DNA, 15 bp, Homo sapiens
agtcctgtggccatg

SEQ ID NO: 1304166 - DNA, 15 bp, Homo sapiens
cagtcctgtggccat

SEQ ID NO: 1304167 - DNA, 15 bp, Homo sapiens
tcagtcctgtggcca

SEQ ID NO: 1304168 - DNA, 15 bp, Homo sapiens
gtcagtcctgtggcc

SEQ ID NO: 1304169 - DNA, 15 bp, Homo sapiens
agtcagtcctgtggc

SEQ ID NO: 1304170 - DNA, 15 bp, Homo sapiens
cagtcagtcctgtgg

SEQ ID NO: 1304171 - DNA, 15 bp, Homo sapiens
gcagtcagtcctgtg

SEQ ID NO: 1304172 - DNA, 15 bp, Homo sapiens
agcagtcagtcctgt

SEQ ID NO: 1304173 - DNA, 15 bp, Homo sapiens
cagcagtcagtcctg

SEQ ID NO: 1304174 - DNA, 15 bp, Homo sapiens
tcagcagtcagtcct

SEQ ID NO: 1304175 - DNA, 15 bp, Homo sapiens
atcagcagtcagtcc

SEQ ID NO: 1304176 - DNA, 15 bp, Homo sapiens
catcagcagtcagtc

SEQ ID NO: 1304177 - DNA, 15 bp, Homo sapiens
tcatcagcagtcagt

SEQ ID NO: 1304178 - DNA, 15 bp, Homo sapiens
ttcatcagcagtcag

SEQ ID NO: 1304179 - DNA, 15 bp, Homo sapiens
tttcatcagcagtca

SEQ ID NO: 1304180 - DNA, 15 bp, Homo sapiens
atttcatcagcagtc

SEQ ID NO: 1304181 - DNA, 15 bp, Homo sapiens
gatttcatcagcagt

SEQ ID NO: 1304182 - DNA, 15 bp, Homo sapiens
agatttcatcagcag

SEQ ID NO: 1304183 - DNA, 15 bp, Homo sapiens
tagatttcatcagca

SEQ ID NO: 1304184 - DNA, 15 bp, Homo sapiens
ttagatttcatcagc

SEQ ID NO: 1304185 - DNA, 15 bp, Homo sapiens
tttagatttcatcag

SEQ ID NO: 1304186 - DNA, 15 bp, Homo sapiens
ttttagatttcatca

SEQ ID NO: 1304187 - DNA, 15 bp, Homo sapiens
cttttagatttcatc

SEQ ID NO: 1304188 - DNA, 15 bp, Homo sapiens
tcttttagatttcat

SEQ ID NO: 1304189 - DNA, 15 bp, Homo sapiens
gtcttttagatttca

SEQ ID NO: 1304190 - DNA, 15 bp, Homo sapiens
ggtcttttagatttc

SEQ ID NO: 1304191 - DNA, 15 bp, Homo sapiens
tggtcttttagattt

SEQ ID NO: 1304192 - DNA, 15 bp, Homo sapiens
ctggtcttttagatt

SEQ ID NO: 1304193 - DNA, 15 bp, Homo sapiens
gctggtcttttagat

SEQ ID NO: 1304194 - DNA, 15 bp, Homo sapiens
agctggtcttttaga

SEQ ID NO: 1304195 - DNA, 15 bp, Homo sapiens
aagctggtcttttag

SEQ ID NO: 1304196 - DNA, 15 bp, Homo sapiens
caagctggtctttta

SEQ ID NO: 1304197 - DNA, 15 bp, Homo sapiens
gcaagctggtctttt

SEQ ID NO: 1304198 - DNA, 15 bp, Homo sapiens
tgcaagctggtcttt

SEQ ID NO: 1304199 - DNA, 15 bp, Homo sapiens
ctgcaagctggtctt

SEQ ID NO: 1304200 - DNA, 15 bp, Homo sapiens
tctgcaagctggtct

SEQ ID NO: 1304201 - DNA, 15 bp, Homo sapiens
ttctgcaagctggtc

SEQ ID NO: 1304202 - DNA, 15 bp, Homo sapiens
cttctgcaagctggt

SEQ ID NO: 1304203 - DNA, 15 bp, Homo sapiens
ccttctgcaagctgg

SEQ ID NO: 1304204 - DNA, 15 bp, Homo sapiens
gccttctgcaagctg

SEQ ID NO: 1304205 - DNA, 15 bp, Homo sapiens
tgccttctgcaagct

SEQ ID NO: 1304206 - DNA, 15 bp, Homo sapiens
atgccttctgcaagc

SEQ ID NO: 1304207 - DNA, 15 bp, Homo sapiens
catgccttctgcaag

SEQ ID NO: 1304208 - DNA, 15 bp, Homo sapiens
ccatgccttctgcaa

SEQ ID NO: 1304209 - DNA, 15 bp, Homo sapiens
tccatgccttctgca

SEQ ID NO: 1304210 - DNA, 15 bp, Homo sapiens
ttccatgccttctgc

SEQ ID NO: 1304211 - DNA, 15 bp, Homo sapiens
tttccatgccttctg

SEQ ID NO: 1304212 - DNA, 15 bp, Homo sapiens
atttccatgccttct

SEQ ID NO: 1304213 - DNA, 15 bp, Homo sapiens
gatttccatgccttc

SEQ ID NO: 1304214 - DNA, 15 bp, Homo sapiens
ggatttccatgcctt

SEQ ID NO: 1304215 - DNA, 15 bp, Homo sapiens
aggatttccatgcct

SEQ ID NO: 1304216 - DNA, 15 bp, Homo sapiens
caggatttccatgcc

SEQ ID NO: 1304217 - DNA, 15 bp, Homo sapiens
ccaggatttccatgc

SEQ ID NO: 1304218 - DNA, 15 bp, Homo sapiens
cccaggatttccatg

SEQ ID NO: 1304219 - DNA, 15 bp, Homo sapiens
ccccaggatttccat

SEQ ID NO: 1304220 - DNA, 15 bp, Homo sapiens
accccaggatttcca

SEQ ID NO: 1304221 - DNA, 15 bp, Homo sapiens
aaccccaggatttcc

SEQ ID NO: 1304222 - DNA, 15 bp, Homo sapiens
taaccccaggatttc

SEQ ID NO: 1304223 - DNA, 15 bp, Homo sapiens
ctaaccccaggattt

SEQ ID NO: 1304224 - DNA, 15 bp, Homo sapiens
cctaaccccaggatt

SEQ ID NO: 1304225 - DNA, 15 bp, Homo sapiens
ccctaaccccaggat

SEQ ID NO: 1304226 - DNA, 15 bp, Homo sapiens
cccctaaccccagga

SEQ ID NO: 1304227 - DNA, 15 bp, Homo sapiens
gcccctaaccccagg

SEQ ID NO: 1304228 - DNA, 15 bp, Homo sapiens
ggcccctaaccccag

SEQ ID NO: 1304229 - DNA, 15 bp, Homo sapiens
gggcccctaacccca

SEQ ID NO: 1304230 - DNA, 15 bp, Homo sapiens
ggggcccctaacccc

SEQ ID NO: 1304231 - DNA, 15 bp, Homo sapiens
aggggcccctaaccc

SEQ ID NO: 1304232 - DNA, 15 bp, Homo sapiens
gaggggcccctaacc

SEQ ID NO: 1304233 - DNA, 15 bp, Homo sapiens
agaggggcccctaac

SEQ ID NO: 1304234 - DNA, 15 bp, Homo sapiens
cagaggggcccctaa

SEQ ID NO: 1304235 - DNA, 15 bp, Homo sapiens
gcagaggggccccta

SEQ ID NO: 1304236 - DNA, 15 bp, Homo sapiens
agcagaggggcccct

SEQ ID NO: 1304237 - DNA, 15 bp, Homo sapiens
tagcagaggggcccc

SEQ ID NO: 1304238 - DNA, 15 bp, Homo sapiens
atagcagaggggccc

SEQ ID NO: 1304239 - DNA, 15 bp, Homo sapiens
catagcagaggggcc

SEQ ID NO: 1304240 - DNA, 15 bp, Homo sapiens
ccatagcagaggggc

SEQ ID NO: 1304241 - DNA, 15 bp, Homo sapiens
tccatagcagagggg

SEQ ID NO: 1304242 - DNA, 15 bp, Homo sapiens
ctccatagcagaggg

SEQ ID NO: 1304243 - DNA, 15 bp, Homo sapiens
cctccatagcagagg

SEQ ID NO: 1304244 - DNA, 15 bp, Homo sapiens
acctccatagcagag

SEQ ID NO: 1304245 - DNA, 15 bp, Homo sapiens
tacctccatagcaga

SEQ ID NO: 1304246 - DNA, 15 bp, Homo sapiens
atacctccatagcag

SEQ ID NO: 1304247 - DNA, 15 bp, Homo sapiens
catacctccatagca

SEQ ID NO: 1304248 - DNA, 15 bp, Homo sapiens
tcatacctccatagc

SEQ ID NO: 1304249 - DNA, 15 bp, Homo sapiens
gtcatacctccatag

SEQ ID NO: 1304250 - DNA, 15 bp, Homo sapiens
agtcatacctccata

SEQ ID NO: 1304251 - DNA, 15 bp, Homo sapiens
gagtcatacctccat

SEQ ID NO: 1304252 - DNA, 15 bp, Homo sapiens
tgagtcatacctcca

SEQ ID NO: 1304253 - DNA, 15 bp, Homo sapiens
gtgagtcatacctcc

SEQ ID NO: 1304254 - DNA, 15 bp, Homo sapiens
tgtgagtcatacctc

SEQ ID NO: 1304255 - DNA, 15 bp, Homo sapiens
ctgtgagtcatacct

SEQ ID NO: 1304256 - DNA, 15 bp, Homo sapiens
actgtgagtcatacc

SEQ ID NO: 1304257 - DNA, 15 bp, Homo sapiens
cactgtgagtcatac

SEQ ID NO: 1304258 - DNA, 15 bp, Homo sapiens
ccactgtgagtcata

SEQ ID NO: 1304259 - DNA, 15 bp, Homo sapiens
cccactgtgagtcat

SEQ ID NO: 1304260 - DNA, 15 bp, Homo sapiens
acccactgtgagtca

SEQ ID NO: 1304261 - DNA, 15 bp, Homo sapiens
gacccactgtgagtc

SEQ ID NO: 1304262 - DNA, 15 bp, Homo sapiens
tgacccactgtgagt

SEQ ID NO: 1304263 - DNA, 15 bp, Homo sapiens
ctgacccactgtgag

SEQ ID NO: 1304264 - DNA, 15 bp, Homo sapiens
cctgacccactgtga

SEQ ID NO: 1304265 - DNA, 15 bp, Homo sapiens
ccctgacccactgtg

SEQ ID NO: 1304266 - DNA, 15 bp, Homo sapiens
tccctgacccactgt

SEQ ID NO: 1304267 - DNA, 15 bp, Homo sapiens
ttccctgacccactg

SEQ ID NO: 1304268 - DNA, 15 bp, Homo sapiens
gttccctgacccact

SEQ ID NO: 1304269 - DNA, 15 bp, Homo sapiens
ggttccctgacccac

SEQ ID NO: 1304270 - DNA, 15 bp, Homo sapiens
aggttccctgaccca

SEQ ID NO: 1304271 - DNA, 15 bp, Homo sapiens
caggttccctgaccc

SEQ ID NO: 1304272 - DNA, 15 bp, Homo sapiens
tcaggttccctgacc

SEQ ID NO: 1304273 - DNA, 15 bp, Homo sapiens
ctcaggttccctgac

SEQ ID NO: 1304274 - DNA, 15 bp, Homo sapiens
actcaggttccctga

SEQ ID NO: 1304275 - DNA, 15 bp, Homo sapiens
cactcaggttccctg

SEQ ID NO: 1304276 - DNA, 15 bp, Homo sapiens
ccactcaggttccct

SEQ ID NO: 1304277 - DNA, 15 bp, Homo sapiens
cccactcaggttccc

SEQ ID NO: 1304278 - DNA, 15 bp, Homo sapiens
tcccactcaggttcc

SEQ ID NO: 1304279 - DNA, 15 bp, Homo sapiens
atcccactcaggttc

SEQ ID NO: 1304280 - DNA, 15 bp, Homo sapiens
gatcccactcaggtt

SEQ ID NO: 1304281 - DNA, 15 bp, Homo sapiens
tgatcccactcaggt

SEQ ID NO: 1304282 - DNA, 15 bp, Homo sapiens
atgatcccactcagg

SEQ ID NO: 1304283 - DNA, 15 bp, Homo sapiens
gatgatcccactcag

SEQ ID NO: 1304284 - DNA, 15 bp, Homo sapiens
ggatgatcccactca

SEQ ID NO: 1304285 - DNA, 15 bp, Homo sapiens
gggatgatcccactc

SEQ ID NO: 1304286 - DNA, 15 bp, Homo sapiens
agggatgatcccact

SEQ ID NO: 1304287 - DNA, 15 bp, Homo sapiens
cagggatgatcccac

SEQ ID NO: 1304288 - DNA, 15 bp, Homo sapiens
ccagggatgatccca

SEQ ID NO: 1304289 - DNA, 15 bp, Homo sapiens
tccagggatgatccc

SEQ ID NO: 1304290 - DNA, 15 bp, Homo sapiens
ttccagggatgatcc

SEQ ID NO: 1304291 - DNA, 15 bp, Homo sapiens
gttccagggatgatc

SEQ ID NO: 1304292 - DNA, 15 bp, Homo sapiens
agttccagggatgat

SEQ ID NO: 1304293 - DNA, 15 bp, Homo sapiens
gagttccagggatga

SEQ ID NO: 1304294 - DNA, 15 bp, Homo sapiens
tgagttccagggatg

SEQ ID NO: 1304295 - DNA, 15 bp, Homo sapiens
ctgagttccagggat

SEQ ID NO: 1304296 - DNA, 15 bp, Homo sapiens
tctgagttccaggga

SEQ ID NO: 1304297 - DNA, 15 bp, Homo sapiens
ttctgagttccaggg

SEQ ID NO: 1304298 - DNA, 15 bp, Homo sapiens
attctgagttccagg

SEQ ID NO: 1304299 - DNA, 15 bp, Homo sapiens
gattctgagttccag

SEQ ID NO: 1304300 - DNA, 15 bp, Homo sapiens
agattctgagttcca

SEQ ID NO: 1304301 - DNA, 15 bp, Homo sapiens
gagattctgagttcc

SEQ ID NO: 1304302 - DNA, 15 bp, Homo sapiens
agagattctgagttc

SEQ ID NO: 1304303 - DNA, 15 bp, Homo sapiens
tagagattctgagtt

SEQ ID NO: 1304304 - DNA, 15 bp, Homo sapiens
ttagagattctgagt

SEQ ID NO: 1304305 - DNA, 15 bp, Homo sapiens
cttagagattctgag

SEQ ID NO: 1304306 - DNA, 15 bp, Homo sapiens
tcttagagattctga

SEQ ID NO: 1304307 - DNA, 15 bp, Homo sapiens
gtcttagagattctg

SEQ ID NO: 1304308 - DNA, 15 bp, Homo sapiens
tgtcttagagattct

SEQ ID NO: 1304309 - DNA, 15 bp, Homo sapiens
gtgtcttagagattc

SEQ ID NO: 1304310 - DNA, 15 bp, Homo sapiens
tgtgtcttagagatt

SEQ ID NO: 1304311 - DNA, 15 bp, Homo sapiens
gtgtgtcttagagat

SEQ ID NO: 1304312 - DNA, 15 bp, Homo sapiens
agtgtgtcttagaga

SEQ ID NO: 1304313 - DNA, 15 bp, Homo sapiens
aagtgtgtcttagag

SEQ ID NO: 1304314 - DNA, 15 bp, Homo sapiens
taagtgtgtcttaga

SEQ ID NO: 1304315 - DNA, 15 bp, Homo sapiens
ataagtgtgtcttag

SEQ ID NO: 1304316 - DNA, 15 bp, Homo sapiens
aataagtgtgtctta

SEQ ID NO: 1304317 - DNA, 15 bp, Homo sapiens
caataagtgtgtctt

SEQ ID NO: 1304318 - DNA, 15 bp, Homo sapiens
ccaataagtgtgtct

SEQ ID NO: 1304319 - DNA, 15 bp, Homo sapiens
gccaataagtgtgtc

SEQ ID NO: 1304320 - DNA, 15 bp, Homo sapiens
agccaataagtgtgt

SEQ ID NO: 1304321 - DNA, 15 bp, Homo sapiens
gagccaataagtgtg

SEQ ID NO: 1304322 - DNA, 15 bp, Homo sapiens
agagccaataagtgt

SEQ ID NO: 1304323 - DNA, 15 bp, Homo sapiens
gagagccaataagtg

SEQ ID NO: 1304324 - DNA, 15 bp, Homo sapiens
agagagccaataagt

SEQ ID NO: 1304325 - DNA, 15 bp, Homo sapiens
tagagagccaataag

SEQ ID NO: 1304326 - DNA, 15 bp, Homo sapiens
atagagagccaataa

SEQ ID NO: 1304327 - DNA, 15 bp, Homo sapiens
tatagagagccaata

SEQ ID NO: 1304328 - DNA, 15 bp, Homo sapiens
ttatagagagccaat

SEQ ID NO: 1304329 - DNA, 15 bp, Homo sapiens
cttatagagagccaa

SEQ ID NO: 1304330 - DNA, 15 bp, Homo sapiens
gcttatagagagcca

SEQ ID NO: 1304331 - DNA, 15 bp, Homo sapiens
tgcttatagagagcc

SEQ ID NO: 1304332 - DNA, 15 bp, Homo sapiens
ttgcttatagagagc

SEQ ID NO: 1304333 - DNA, 15 bp, Homo sapiens
attgcttatagagag

SEQ ID NO: 1304334 - DNA, 15 bp, Homo sapiens
tattgcttatagaga

SEQ ID NO: 1304335 - DNA, 15 bp, Homo sapiens
ttattgcttatagag

SEQ ID NO: 1304336 - DNA, 15 bp, Homo sapiens
gttattgcttataga

SEQ ID NO: 1304337 - DNA, 15 bp, Homo sapiens
tgttattgcttatag

SEQ ID NO: 1304338 - DNA, 15 bp, Homo sapiens
ctgttattgcttata

SEQ ID NO: 1304339 - DNA, 15 bp, Homo sapiens
tctgttattgcttat

SEQ ID NO: 1304340 - DNA, 15 bp, Homo sapiens
atctgttattgctta

SEQ ID NO: 1304341 - DNA, 15 bp, Homo sapiens
catctgttattgctt

SEQ ID NO: 1304342 - DNA, 15 bp, Homo sapiens
ccatctgttattgct

SEQ ID NO: 1304343 - DNA, 15 bp, Homo sapiens
gccatctgttattgc

SEQ ID NO: 1304344 - DNA, 15 bp, Homo sapiens
tgccatctgttattg

SEQ ID NO: 1304345 - DNA, 15 bp, Homo sapiens
ttgccatctgttatt

SEQ ID NO: 1304346 - DNA, 15 bp, Homo sapiens
cttgccatctgttat

SEQ ID NO: 1304347 - DNA, 15 bp, Homo sapiens
tcttgccatctgtta

SEQ ID NO: 1304348 - DNA, 15 bp, Homo sapiens
atcttgccatctgtt

SEQ ID NO: 1304349 - DNA, 15 bp, Homo sapiens
tatcttgccatctgt

SEQ ID NO: 1304350 - DNA, 15 bp, Homo sapiens
ttatcttgccatctg

SEQ ID NO: 1304351 - DNA, 15 bp, Homo sapiens
attatcttgccatct

SEQ ID NO: 1304352 - DNA, 15 bp, Homo sapiens
tattatcttgccatc

SEQ ID NO: 1304353 - DNA, 15 bp, Homo sapiens
atattatcttgccat

SEQ ID NO: 1304354 - DNA, 15 bp, Homo sapiens
aatattatcttgcca

SEQ ID NO: 1304355 - DNA, 15 bp, Homo sapiens
taatattatcttgcc

SEQ ID NO: 1304356 - DNA, 15 bp, Homo sapiens
ataatattatcttgc

SEQ ID NO: 1304357 - DNA, 15 bp, Homo sapiens
aataatattatcttg

SEQ ID NO: 1304358 - DNA, 15 bp, Homo sapiens
gaataatattatctt

SEQ ID NO: 1304359 - DNA, 15 bp, Homo sapiens
agaataatattatct

SEQ ID NO: 1304360 - DNA, 15 bp, Homo sapiens
aagaataatattatc

SEQ ID NO: 1304361 - DNA, 15 bp, Homo sapiens
gaagaataatattat

SEQ ID NO: 1304362 - DNA, 15 bp, Homo sapiens
agaagaataatatta

SEQ ID NO: 1304363 - DNA, 15 bp, Homo sapiens
tagaagaataatatt

SEQ ID NO: 1304364 - DNA, 15 bp, Homo sapiens
ttagaagaataatat

SEQ ID NO: 1304365 - DNA, 15 bp, Homo sapiens
attagaagaataata

SEQ ID NO: 1304366 - DNA, 15 bp, Homo sapiens
gattagaagaataat

SEQ ID NO: 1304367 - DNA, 15 bp, Homo sapiens
agattagaagaataa

SEQ ID NO: 1304368 - DNA, 15 bp, Homo sapiens
aagattagaagaata

SEQ ID NO: 1304369 - DNA, 15 bp, Homo sapiens
aaagattagaagaat

SEQ ID NO: 1304370 - DNA, 15 bp, Homo sapiens
aaaagattagaagaa

SEQ ID NO: 1304371 - DNA, 15 bp, Homo sapiens
caaaagattagaaga

SEQ ID NO: 1304372 - DNA, 15 bp, Homo sapiens
gcaaaagattagaag

SEQ ID NO: 1304373 - DNA, 15 bp, Homo sapiens
agcaaaagattagaa

SEQ ID NO: 1304374 - DNA, 15 bp, Homo sapiens
tagcaaaagattaga

SEQ ID NO: 1304375 - DNA, 15 bp, Homo sapiens
ttagcaaaagattag

SEQ ID NO: 1304376 - DNA, 15 bp, Homo sapiens
tttagcaaaagatta

SEQ ID NO: 1304377 - DNA, 15 bp, Homo sapiens
ttttagcaaaagatt

SEQ ID NO: 1304378 - DNA, 15 bp, Homo sapiens
tttttagcaaaagat

SEQ ID NO: 1304379 - DNA, 15 bp, Homo sapiens
gtttttagcaaaaga

SEQ ID NO: 1304380 - DNA, 15 bp, Homo sapiens
tgtttttagcaaaag

SEQ ID NO: 1304381 - DNA, 15 bp, Homo sapiens
atgtttttagcaaaa

SEQ ID NO: 1304382 - DNA, 15 bp, Homo sapiens
aatgtttttagcaaa

SEQ ID NO: 1304383 - DNA, 15 bp, Homo sapiens
gaatgtttttagcaa

SEQ ID NO: 1304384 - DNA, 15 bp, Homo sapiens
tgaatgtttttagca

SEQ ID NO: 1304385 - DNA, 15 bp, Homo sapiens
ctgaatgtttttagc

SEQ ID NO: 1304386 - DNA, 15 bp, Homo sapiens
actgaatgtttttag

SEQ ID NO: 1304387 - DNA, 15 bp, Homo sapiens
gactgaatgttttta

SEQ ID NO: 1304388 - DNA, 15 bp, Homo sapiens
tgactgaatgttttt

SEQ ID NO: 1304389 - DNA, 15 bp, Homo sapiens
atgactgaatgtttt

SEQ ID NO: 1304390 - DNA, 15 bp, Homo sapiens
aatgactgaatgttt

SEQ ID NO: 1304391 - DNA, 15 bp, Homo sapiens
aaatgactgaatgtt

SEQ ID NO: 1304392 - DNA, 15 bp, Homo sapiens
gaaatgactgaatgt

SEQ ID NO: 1304393 - DNA, 15 bp, Homo sapiens
agaaatgactgaatg

SEQ ID NO: 1304394 - DNA, 15 bp, Homo sapiens
gagaaatgactgaat

SEQ ID NO: 1304395 - DNA, 15 bp, Homo sapiens
tgagaaatgactgaa

SEQ ID NO: 1304396 - DNA, 15 bp, Homo sapiens
ctgagaaatgactga

SEQ ID NO: 1304397 - DNA, 15 bp, Homo sapiens
cctgagaaatgactg

SEQ ID NO: 1304398 - DNA, 15 bp, Homo sapiens
ccctgagaaatgact

SEQ ID NO: 1304399 - DNA, 15 bp, Homo sapiens
cccctgagaaatgac

SEQ ID NO: 1304400 - DNA, 15 bp, Homo sapiens
gcccctgagaaatga

SEQ ID NO: 1304401 - DNA, 15 bp, Homo sapiens
ggcccctgagaaatg

SEQ ID NO: 1304402 - DNA, 15 bp, Homo sapiens
aggcccctgagaaat

SEQ ID NO: 1304403 - DNA, 15 bp, Homo sapiens
gaggcccctgagaaa

SEQ ID NO: 1304404 - DNA, 15 bp, Homo sapiens
ggaggcccctgagaa

SEQ ID NO: 1304405 - DNA, 15 bp, Homo sapiens
gggaggcccctgaga

SEQ ID NO: 1304406 - DNA, 15 bp, Homo sapiens
agggaggcccctgag

SEQ ID NO: 1304407 - DNA, 15 bp, Homo sapiens
tagggaggcccctga

SEQ ID NO: 1304408 - DNA, 15 bp, Homo sapiens
ctagggaggcccctg

SEQ ID NO: 1304409 - DNA, 15 bp, Homo sapiens
actagggaggcccct

SEQ ID NO: 1304410 - DNA, 15 bp, Homo sapiens
tactagggaggcccc

SEQ ID NO: 1304411 - DNA, 15 bp, Homo sapiens
ctactagggaggccc

SEQ ID NO: 1304412 - DNA, 15 bp, Homo sapiens
tctactagggaggcc

SEQ ID NO: 1304413 - DNA, 15 bp, Homo sapiens
ctctactagggaggc

SEQ ID NO: 1304414 - DNA, 15 bp, Homo sapiens
cctctactagggagg

SEQ ID NO: 1304415 - DNA, 15 bp, Homo sapiens
tcctctactagggag

SEQ ID NO: 1304416 - DNA, 15 bp, Homo sapiens
ttcctctactaggga

SEQ ID NO: 1304417 - DNA, 15 bp, Homo sapiens
cttcctctactaggg

SEQ ID NO: 1304418 - DNA, 15 bp, Homo sapiens
tcttcctctactagg

SEQ ID NO: 1304419 - DNA, 15 bp, Homo sapiens
gtcttcctctactag

SEQ ID NO: 1304420 - DNA, 15 bp, Homo sapiens
tgtcttcctctacta

SEQ ID NO: 1304421 - DNA, 15 bp, Homo sapiens
gtgtcttcctctact

SEQ ID NO: 1304422 - DNA, 15 bp, Homo sapiens
ggtgtcttcctctac

SEQ ID NO: 1304423 - DNA, 15 bp, Homo sapiens
aggtgtcttcctcta

SEQ ID NO: 1304424 - DNA, 15 bp, Homo sapiens
caggtgtcttcctct

SEQ ID NO: 1304425 - DNA, 15 bp, Homo sapiens
gcaggtgtcttcctc

SEQ ID NO: 1304426 - DNA, 15 bp, Homo sapiens
tgcaggtgtcttcct

SEQ ID NO: 1304427 - DNA, 15 bp, Homo sapiens
ctgcaggtgtcttcc

SEQ ID NO: 1304428 - DNA, 15 bp, Homo sapiens
cctgcaggtgtcttc

SEQ ID NO: 1304429 - DNA, 15 bp, Homo sapiens
ccctgcaggtgtctt

SEQ ID NO: 1304430 - DNA, 15 bp, Homo sapiens
accctgcaggtgtct

SEQ ID NO: 1304431 - DNA, 15 bp, Homo sapiens
taccctgcaggtgtc

SEQ ID NO: 1304432 - DNA, 15 bp, Homo sapiens
ataccctgcaggtgt

SEQ ID NO: 1304433 - DNA, 15 bp, Homo sapiens
gataccctgcaggtg

SEQ ID NO: 1304434 - DNA, 15 bp, Homo sapiens
agataccctgcaggt

SEQ ID NO: 1304435 - DNA, 15 bp, Homo sapiens
gagataccctgcagg

SEQ ID NO: 1304436 - DNA, 15 bp, Homo sapiens
tgagataccctgcag

SEQ ID NO: 1304437 - DNA, 15 bp, Homo sapiens
atgagataccctgca

SEQ ID NO: 1304438 - DNA, 15 bp, Homo sapiens
aatgagataccctgc

SEQ ID NO: 1304439 - DNA, 15 bp, Homo sapiens
gaatgagataccctg

SEQ ID NO: 1304440 - DNA, 15 bp, Homo sapiens
agaatgagataccct

SEQ ID NO: 1304441 - DNA, 15 bp, Homo sapiens
aagaatgagataccc

SEQ ID NO: 1304442 - DNA, 15 bp, Homo sapiens
aaagaatgagatacc

SEQ ID NO: 1304443 - DNA, 15 bp, Homo sapiens
gaaagaatgagatac

SEQ ID NO: 1304444 - DNA, 15 bp, Homo sapiens
agaaagaatgagata

SEQ ID NO: 1304445 - DNA, 15 bp, Homo sapiens
aagaaagaatgagat

SEQ ID NO: 1304446 - DNA, 15 bp, Homo sapiens
caagaaagaatgaga

SEQ ID NO: 1304447 - DNA, 15 bp, Homo sapiens
acaagaaagaatgag

SEQ ID NO: 1304448 - DNA, 15 bp, Homo sapiens
aacaagaaagaatga

SEQ ID NO: 1304449 - DNA, 15 bp, Homo sapiens
gaacaagaaagaatg

SEQ ID NO: 1304450 - DNA, 15 bp, Homo sapiens
agaacaagaaagaat

SEQ ID NO: 1304451 - DNA, 15 bp, Homo sapiens
gagaacaagaaagaa

SEQ ID NO: 1304452 - DNA, 15 bp, Homo sapiens
tgagaacaagaaaga

SEQ ID NO: 1304453 - DNA, 15 bp, Homo sapiens
atgagaacaagaaag

SEQ ID NO: 1304454 - DNA, 15 bp, Homo sapiens
aatgagaacaagaaa

SEQ ID NO: 1304455 - DNA, 15 bp, Homo sapiens
aaatgagaacaagaa

SEQ ID NO: 1304456 - DNA, 15 bp, Homo sapiens
aaaatgagaacaaga

SEQ ID NO: 1304457 - DNA, 15 bp, Homo sapiens
gaaaatgagaacaag

SEQ ID NO: 1304458 - DNA, 15 bp, Homo sapiens
ggaaaatgagaacaa

SEQ ID NO: 1304459 - DNA, 15 bp, Homo sapiens
gggaaaatgagaaca

SEQ ID NO: 1304460 - DNA, 15 bp, Homo sapiens
agggaaaatgagaac

SEQ ID NO: 1304461 - DNA, 15 bp, Homo sapiens
aagggaaaatgagaa

SEQ ID NO: 1304462 - DNA, 15 bp, Homo sapiens
gaagggaaaatgaga

SEQ ID NO: 1304463 - DNA, 15 bp, Homo sapiens
agaagggaaaatgag

SEQ ID NO: 1304464 - DNA, 15 bp, Homo sapiens
tagaagggaaaatga

SEQ ID NO: 1304465 - DNA, 15 bp, Homo sapiens
gtagaagggaaaatg

SEQ ID NO: 1304466 - DNA, 15 bp, Homo sapiens
ggtagaagggaaaat

SEQ ID NO: 1304467 - DNA, 15 bp, Homo sapiens
tggtagaagggaaaa

SEQ ID NO: 1304468 - DNA, 15 bp, Homo sapiens
atggtagaagggaaa

SEQ ID NO: 1304469 - DNA, 15 bp, Homo sapiens
aatggtagaagggaa

SEQ ID NO: 1304470 - DNA, 15 bp, Homo sapiens
aaatggtagaaggga

SEQ ID NO: 1304471 - DNA, 15 bp, Homo sapiens
aaaatggtagaaggg

SEQ ID NO: 1304472 - DNA, 15 bp, Homo sapiens
gaaaatggtagaagg

SEQ ID NO: 1304473 - DNA, 15 bp, Homo sapiens
ggaaaatggtagaag

SEQ ID NO: 1304474 - DNA, 15 bp, Homo sapiens
gggaaaatggtagaa

SEQ ID NO: 1304475 - DNA, 15 bp, Homo sapiens
ggggaaaatggtaga

SEQ ID NO: 1304476 - DNA, 15 bp, Homo sapiens
aggggaaaatggtag

SEQ ID NO: 1304477 - DNA, 15 bp, Homo sapiens
aaggggaaaatggta

SEQ ID NO: 1304478 - DNA, 15 bp, Homo sapiens
taaggggaaaatggt

SEQ ID NO: 1304479 - DNA, 15 bp, Homo sapiens
ctaaggggaaaatgg

SEQ ID NO: 1304480 - DNA, 15 bp, Homo sapiens
actaaggggaaaatg

SEQ ID NO: 1304481 - DNA, 15 bp, Homo sapiens
tactaaggggaaaat

SEQ ID NO: 1304482 - DNA, 15 bp, Homo sapiens
atactaaggggaaaa

SEQ ID NO: 1304483 - DNA, 15 bp, Homo sapiens
tatactaaggggaaa

SEQ ID NO: 1304484 - DNA, 15 bp, Homo sapiens
atatactaaggggaa

SEQ ID NO: 1304485 - DNA, 15 bp, Homo sapiens
aatatactaagggga

SEQ ID NO: 1304486 - DNA, 15 bp, Homo sapiens
aaatatactaagggg

SEQ ID NO: 1304487 - DNA, 15 bp, Homo sapiens
gaaatatactaaggg

SEQ ID NO: 1304488 - DNA, 15 bp, Homo sapiens
agaaatatactaagg

SEQ ID NO: 1304489 - DNA, 15 bp, Homo sapiens
cagaaatatactaag

SEQ ID NO: 1304490 - DNA, 15 bp, Homo sapiens
ccagaaatatactaa

SEQ ID NO: 1304491 - DNA, 15 bp, Homo sapiens
gccagaaatatacta

SEQ ID NO: 1304492 - DNA, 15 bp, Homo sapiens
ggccagaaatatact

SEQ ID NO: 1304493 - DNA, 15 bp, Homo sapiens
gggccagaaatatac

SEQ ID NO: 1304494 - DNA, 15 bp, Homo sapiens
agggccagaaatata

SEQ ID NO: 1304495 - DNA, 15 bp, Homo sapiens
tagggccagaaatat

SEQ ID NO: 1304496 - DNA, 15 bp, Homo sapiens
atagggccagaaata

SEQ ID NO: 1304497 - DNA, 15 bp, Homo sapiens
catagggccagaaat

SEQ ID NO: 1304498 - DNA, 15 bp, Homo sapiens
acatagggccagaaa

SEQ ID NO: 1304499 - DNA, 15 bp, Homo sapiens
cacatagggccagaa

SEQ ID NO: 1304500 - DNA, 15 bp, Homo sapiens
gcacatagggccaga

SEQ ID NO: 1304501 - DNA, 15 bp, Homo sapiens
tgcacatagggccag

SEQ ID NO: 1304502 - DNA, 15 bp, Homo sapiens
ctgcacatagggcca

SEQ ID NO: 1304503 - DNA, 15 bp, Homo sapiens
cctgcacatagggcc

SEQ ID NO: 1304504 - DNA, 15 bp, Homo sapiens
tcctgcacatagggc

SEQ ID NO: 1304505 - DNA, 15 bp, Homo sapiens
tttcctgcacatagg

SEQ ID NO: 1304506 - DNA, 15 bp, Homo sapiens
atttcctgcacatag

SEQ ID NO: 1304507 - DNA, 15 bp, Homo sapiens
gatttcctgcacata

SEQ ID NO: 1304508 - DNA, 15 bp, Homo sapiens
tgatttcctgcacat

SEQ ID NO: 1304509 - DNA, 15 bp, Homo sapiens
ctgatttcctgcaca

SEQ ID NO: 1304510 - DNA, 15 bp, Homo sapiens
cctgatttcctgcac

SEQ ID NO: 1304511 - DNA, 15 bp, Homo sapiens
acctgatttcctgca

SEQ ID NO: 1304512 - DNA, 15 bp, Homo sapiens
tacctgatttcctgc

SEQ ID NO: 1304513 - DNA, 15 bp, Homo sapiens
ctacctgatttcctg

SEQ ID NO: 1304514 - DNA, 15 bp, Homo sapiens
gctacctgatttcct

SEQ ID NO: 1304515 - DNA, 15 bp, Homo sapiens
agctacctgatttcc

SEQ ID NO: 1304516 - DNA, 15 bp, Homo sapiens
cagctacctgatttc

SEQ ID NO: 1304517 - DNA, 15 bp, Homo sapiens
tcagctacctgattt

SEQ ID NO: 1304518 - DNA, 15 bp, Homo sapiens
ctcagctacctgatt

SEQ ID NO: 1304519 - DNA, 15 bp, Homo sapiens
cctcagctacctgat

SEQ ID NO: 1304520 - DNA, 15 bp, Homo sapiens
acctcagctacctga

SEQ ID NO: 1304521 - DNA, 15 bp, Homo sapiens
cacctcagctacctg

SEQ ID NO: 1304522 - DNA, 15 bp, Homo sapiens
acacctcagctacct

SEQ ID NO: 1304523 - DNA, 15 bp, Homo sapiens
cacacctcagctacc

SEQ ID NO: 1304524 - DNA, 15 bp, Homo sapiens
ccacacctcagctac

SEQ ID NO: 1304525 - DNA, 15 bp, Homo sapiens
accacacctcagcta

SEQ ID NO: 1304526 - DNA, 15 bp, Homo sapiens
aaccacacctcagct

SEQ ID NO: 1304527 - DNA, 15 bp, Homo sapiens
aaaccacacctcagc

SEQ ID NO: 1304528 - DNA, 15 bp, Homo sapiens
taaaccacacctcag

SEQ ID NO: 1304529 - DNA, 15 bp, Homo sapiens
ttaaaccacacctca

SEQ ID NO: 1304530 - DNA, 15 bp, Homo sapiens
cttaaaccacacctc

SEQ ID NO: 1304531 - DNA, 15 bp, Homo sapiens
ccttaaaccacacct

SEQ ID NO: 1304532 - DNA, 15 bp, Homo sapiens
cccttaaaccacacc

SEQ ID NO: 1304533 - DNA, 15 bp, Homo sapiens
tcccttaaaccacac

SEQ ID NO: 1304534 - DNA, 15 bp, Homo sapiens
gtcccttaaaccaca

SEQ ID NO: 1304535 - DNA, 15 bp, Homo sapiens
ggtcccttaaaccac

SEQ ID NO: 1304536 - DNA, 15 bp, Homo sapiens
gggtcccttaaacca

SEQ ID NO: 1304537 - DNA, 15 bp, Homo sapiens
tgggtcccttaaacc

SEQ ID NO: 1304538 - DNA, 15 bp, Homo sapiens
atgggtcccttaaac

SEQ ID NO: 1304539 - DNA, 15 bp, Homo sapiens
aatgggtcccttaaa

SEQ ID NO: 1304540 - DNA, 15 bp, Homo sapiens
caatgggtcccttaa

SEQ ID NO: 1304541 - DNA, 15 bp, Homo sapiens
acaatgggtccctta

SEQ ID NO: 1304542 - DNA, 15 bp, Homo sapiens
cacaatgggtccctt

SEQ ID NO: 1304543 - DNA, 15 bp, Homo sapiens
ccacaatgggtccct

SEQ ID NO: 1304544 - DNA, 15 bp, Homo sapiens
accacaatgggtccc

SEQ ID NO: 1304545 - DNA, 15 bp, Homo sapiens
aaccacaatgggtcc

SEQ ID NO: 1304546 - DNA, 15 bp, Homo sapiens
gaaccacaatgggtc

SEQ ID NO: 1304547 - DNA, 15 bp, Homo sapiens
agaaccacaatgggt

SEQ ID NO: 1304548 - DNA, 15 bp, Homo sapiens
aagaaccacaatggg

SEQ ID NO: 1304549 - DNA, 15 bp, Homo sapiens
taagaaccacaatgg

SEQ ID NO: 1304550 - DNA, 15 bp, Homo sapiens
ataagaaccacaatg

SEQ ID NO: 1304551 - DNA, 15 bp, Homo sapiens
cataagaaccacaat

SEQ ID NO: 1304552 - DNA, 15 bp, Homo sapiens
ccataagaaccacaa

SEQ ID NO: 1304553 - DNA, 15 bp, Homo sapiens
gccataagaaccaca

SEQ ID NO: 1304554 - DNA, 15 bp, Homo sapiens
ggccataagaaccac

SEQ ID NO: 1304555 - DNA, 15 bp, Homo sapiens
gggccataagaacca

SEQ ID NO: 1304556 - DNA, 15 bp, Homo sapiens
tgggccataagaacc

SEQ ID NO: 1304557 - DNA, 15 bp, Homo sapiens
atgggccataagaac

SEQ ID NO: 1304558 - DNA, 15 bp, Homo sapiens
gatgggccataagaa

SEQ ID NO: 1304559 - DNA, 15 bp, Homo sapiens
tgatgggccataaga

SEQ ID NO: 1304560 - DNA, 15 bp, Homo sapiens
ttgatgggccataag

SEQ ID NO: 1304561 - DNA, 15 bp, Homo sapiens
gttgatgggccataa

SEQ ID NO: 1304562 - DNA, 15 bp, Homo sapiens
tgttgatgggccata

SEQ ID NO: 1304563 - DNA, 15 bp, Homo sapiens
gtgttgatgggccat

SEQ ID NO: 1304564 - DNA, 15 bp, Homo sapiens
tgtgttgatgggcca

SEQ ID NO: 1304565 - DNA, 15 bp, Homo sapiens
ttgtgttgatgggcc

SEQ ID NO: 1304566 - DNA, 15 bp, Homo sapiens
attgtgttgatgggc

SEQ ID NO: 1304567 - DNA, 15 bp, Homo sapiens
aattgtgttgatggg

SEQ ID NO: 1304568 - DNA, 15 bp, Homo sapiens
gaattgtgttgatgg

SEQ ID NO: 1304569 - DNA, 15 bp, Homo sapiens
ggaattgtgttgatg

SEQ ID NO: 1304570 - DNA, 15 bp, Homo sapiens
aggaattgtgttgat

SEQ ID NO: 1304571 - DNA, 15 bp, Homo sapiens
aaggaattgtgttga

SEQ ID NO: 1304572 - DNA, 15 bp, Homo sapiens
gaaggaattgtgttg

SEQ ID NO: 1304573 - DNA, 15 bp, Homo sapiens
cgaaggaattgtgtt

SEQ ID NO: 1304574 - DNA, 15 bp, Homo sapiens
acgaaggaattgtgt

SEQ ID NO: 1304575 - DNA, 15 bp, Homo sapiens
cacgaaggaattgtg

SEQ ID NO: 1304576 - DNA, 15 bp, Homo sapiens
acacgaaggaattgt

SEQ ID NO: 1304577 - DNA, 15 bp, Homo sapiens
aacacgaaggaattg

SEQ ID NO: 1304578 - DNA, 15 bp, Homo sapiens
caacacgaaggaatt

SEQ ID NO: 1304579 - DNA, 15 bp, Homo sapiens
ccaacacgaaggaat

SEQ ID NO: 1304580 - DNA, 15 bp, Homo sapiens
gccaacacgaaggaa

SEQ ID NO: 1304581 - DNA, 15 bp, Homo sapiens
ggccaacacgaagga

SEQ ID NO: 1304582 - DNA, 15 bp, Homo sapiens
aggccaacacgaagg

SEQ ID NO: 1304583 - DNA, 15 bp, Homo sapiens
caggccaacacgaag

SEQ ID NO: 1304584 - DNA, 15 bp, Homo sapiens
gcaggccaacacgaa

SEQ ID NO: 1304585 - DNA, 15 bp, Homo sapiens
tgcaggccaacacga

SEQ ID NO: 1304586 - DNA, 15 bp, Homo sapiens
ctgcaggccaacacg

SEQ ID NO: 1304587 - DNA, 15 bp, Homo sapiens
actgcaggccaacac

SEQ ID NO: 1304588 - DNA, 15 bp, Homo sapiens
tactgcaggccaaca

SEQ ID NO: 1304589 - DNA, 15 bp, Homo sapiens
atactgcaggccaac

SEQ ID NO: 1304590 - DNA, 15 bp, Homo sapiens
gatactgcaggccaa

SEQ ID NO: 1304591 - DNA, 15 bp, Homo sapiens
ggatactgcaggcca

SEQ ID NO: 1304592 - DNA, 15 bp, Homo sapiens
tggatactgcaggcc

SEQ ID NO: 1304593 - DNA, 15 bp, Homo sapiens
atggatactgcaggc

SEQ ID NO: 1304594 - DNA, 15 bp, Homo sapiens
catggatactgcagg

SEQ ID NO: 1304595 - DNA, 15 bp, Homo sapiens
acatggatactgcag

SEQ ID NO: 1304596 - DNA, 15 bp, Homo sapiens
aacatggatactgca

SEQ ID NO: 1304597 - DNA, 15 bp, Homo sapiens
aaacatggatactgc

SEQ ID NO: 1304598 - DNA, 15 bp, Homo sapiens
caaacatggatactg

SEQ ID NO: 1304599 - DNA, 15 bp, Homo sapiens
acaaacatggatact

SEQ ID NO: 1304600 - DNA, 15 bp, Homo sapiens
aacaaacatggatac

SEQ ID NO: 1304601 - DNA, 15 bp, Homo sapiens
taacaaacatggata

SEQ ID NO: 1304602 - DNA, 15 bp, Homo sapiens
gtaacaaacatggat

SEQ ID NO: 1304603 - DNA, 15 bp, Homo sapiens
ggtaacaaacatgga

SEQ ID NO: 1304604 - DNA, 15 bp, Homo sapiens
gggtaacaaacatgg

SEQ ID NO: 1304605 - DNA, 15 bp, Homo sapiens
agggtaacaaacatg

SEQ ID NO: 1304606 - DNA, 15 bp, Homo sapiens
aagggtaacaaacat

SEQ ID NO: 1304607 - DNA, 15 bp, Homo sapiens
aaagggtaacaaaca

SEQ ID NO: 1304608 - DNA, 15 bp, Homo sapiens
aaaagggtaacaaac

SEQ ID NO: 1304609 - DNA, 15 bp, Homo sapiens
caaaagggtaacaaa

SEQ ID NO: 1304610 - DNA, 15 bp, Homo sapiens
ccaaaagggtaacaa

SEQ ID NO: 1304611 - DNA, 15 bp, Homo sapiens
cccaaaagggtaaca

SEQ ID NO: 1304612 - DNA, 15 bp, Homo sapiens
acccaaaagggtaac

SEQ ID NO: 1304613 - DNA, 15 bp, Homo sapiens
gacccaaaagggtaa

SEQ ID NO: 1304614 - DNA, 15 bp, Homo sapiens
tgacccaaaagggta

SEQ ID NO: 1304615 - DNA, 15 bp, Homo sapiens
ttgacccaaaagggt

SEQ ID NO: 1304616 - DNA, 15 bp, Homo sapiens
cttgacccaaaaggg

SEQ ID NO: 1304617 - DNA, 15 bp, Homo sapiens
ccttgacccaaaagg

SEQ ID NO: 1304618 - DNA, 15 bp, Homo sapiens
gccttgacccaaaag

SEQ ID NO: 1304619 - DNA, 15 bp, Homo sapiens
tgccttgacccaaaa

SEQ ID NO: 1304620 - DNA, 15 bp, Homo sapiens
atgccttgacccaaa

SEQ ID NO: 1304621 - DNA, 15 bp, Homo sapiens
catgccttgacccaa

SEQ ID NO: 1304622 - DNA, 15 bp, Homo sapiens
tcatgccttgaccca

SEQ ID NO: 1304623 - DNA, 15 bp, Homo sapiens
ttcatgccttgaccc

SEQ ID NO: 1304624 - DNA, 15 bp, Homo sapiens
tttcatgccttgacc

SEQ ID NO: 1304625 - DNA, 15 bp, Homo sapiens
ttttcatgccttgac

SEQ ID NO: 1304626 - DNA, 15 bp, Homo sapiens
gttttcatgccttga

SEQ ID NO: 1304627 - DNA, 15 bp, Homo sapiens
tgttttcatgccttg

SEQ ID NO: 1304628 - DNA, 15 bp, Homo sapiens
atgttttcatgcctt

SEQ ID NO: 1304629 - DNA, 15 bp, Homo sapiens
gatgttttcatgcct

SEQ ID NO: 1304630 - DNA, 15 bp, Homo sapiens
agatgttttcatgcc

SEQ ID NO: 1304631 - DNA, 15 bp, Homo sapiens
cagatgttttcatgc

SEQ ID NO: 1304632 - DNA, 15 bp, Homo sapiens
acagatgttttcatg

SEQ ID NO: 1304633 - DNA, 15 bp, Homo sapiens
gacagatgttttcat

SEQ ID NO: 1304634 - DNA, 15 bp, Homo sapiens
ggacagatgttttca

SEQ ID NO: 1304635 - DNA, 15 bp, Homo sapiens
tggacagatgttttc

SEQ ID NO: 1304636 - DNA, 15 bp, Homo sapiens
gtggacagatgtttt

SEQ ID NO: 1304637 - DNA, 15 bp, Homo sapiens
tgtggacagatgttt

SEQ ID NO: 1304638 - DNA, 15 bp, Homo sapiens
ttgtggacagatgtt

SEQ ID NO: 1304639 - DNA, 15 bp, Homo sapiens
attgtggacagatgt

SEQ ID NO: 1304640 - DNA, 15 bp, Homo sapiens
cattgtggacagatg

SEQ ID NO: 1304641 - DNA, 15 bp, Homo sapiens
gcattgtggacagat

SEQ ID NO: 1304642 - DNA, 15 bp, Homo sapiens
ggcattgtggacaga

SEQ ID NO: 1304643 - DNA, 15 bp, Homo sapiens
tggcattgtggacag

SEQ ID NO: 1304644 - DNA, 15 bp, Homo sapiens
ctggcattgtggaca

SEQ ID NO: 1304645 - DNA, 15 bp, Homo sapiens
actggcattgtggac

SEQ ID NO: 1304646 - DNA, 15 bp, Homo sapiens
gactggcattgtgga

SEQ ID NO: 1304647 - DNA, 15 bp, Homo sapiens
agactggcattgtgg

SEQ ID NO: 1304648 - DNA, 15 bp, Homo sapiens
aagactggcattgtg

SEQ ID NO: 1304649 - DNA, 15 bp, Homo sapiens
taagactggcattgt

SEQ ID NO: 1304650 - DNA, 15 bp, Homo sapiens
gtaagactggcattg

SEQ ID NO: 1304651 - DNA, 15 bp, Homo sapiens
ggtaagactggcatt

SEQ ID NO: 1304652 - DNA, 15 bp, Homo sapiens
aggtaagactggcat

SEQ ID NO: 1304653 - DNA, 15 bp, Homo sapiens
gaggtaagactggca

SEQ ID NO: 1304654 - DNA, 15 bp, Homo sapiens
agaggtaagactggc

SEQ ID NO: 1304655 - DNA, 15 bp, Homo sapiens
cagaggtaagactgg

SEQ ID NO: 1304656 - DNA, 15 bp, Homo sapiens
tcagaggtaagactg

SEQ ID NO: 1304657 - DNA, 15 bp, Homo sapiens
atcagaggtaagact

SEQ ID NO: 1304658 - DNA, 15 bp, Homo sapiens
tatcagaggtaagac

SEQ ID NO: 1304659 - DNA, 15 bp, Homo sapiens
atatcagaggtaaga

SEQ ID NO: 1304660 - DNA, 15 bp, Homo sapiens
gatatcagaggtaag

SEQ ID NO: 1304661 - DNA, 15 bp, Homo sapiens
tgatatcagaggtaa

SEQ ID NO: 1304662 - DNA, 15 bp, Homo sapiens
ttgatatcagaggta

SEQ ID NO: 1304663 - DNA, 15 bp, Homo sapiens
tttgatatcagaggt

SEQ ID NO: 1304664 - DNA, 15 bp, Homo sapiens
ctttgatatcagagg

SEQ ID NO: 1304665 - DNA, 15 bp, Homo sapiens
tctttgatatcagag

SEQ ID NO: 1304666 - DNA, 15 bp, Homo sapiens
atctttgatatcaga

SEQ ID NO: 1304667 - DNA, 15 bp, Homo sapiens
tatctttgatatcag

SEQ ID NO: 1304668 - DNA, 15 bp, Homo sapiens
ctatctttgatatca

SEQ ID NO: 1304669 - DNA, 15 bp, Homo sapiens
actatctttgatatc

SEQ ID NO: 1304670 - DNA, 15 bp, Homo sapiens
tactatctttgatat

SEQ ID NO: 1304671 - DNA, 15 bp, Homo sapiens
atactatctttgata

SEQ ID NO: 1304672 - DNA, 15 bp, Homo sapiens
gatactatctttgat

SEQ ID NO: 1304673 - DNA, 15 bp, Homo sapiens
agatactatctttga

SEQ ID NO: 1304674 - DNA, 15 bp, Homo sapiens
cagatactatctttg

SEQ ID NO: 1304675 - DNA, 15 bp, Homo sapiens
tcagatactatcttt

SEQ ID NO: 1304676 - DNA, 15 bp, Homo sapiens
ctcagatactatctt

SEQ ID NO: 1304677 - DNA, 15 bp, Homo sapiens
tctcagatactatct

SEQ ID NO: 1304678 - DNA, 15 bp, Homo sapiens
gtctcagatactatc

SEQ ID NO: 1304679 - DNA, 15 bp, Homo sapiens
cgtctcagatactat

SEQ ID NO: 1304680 - DNA, 15 bp, Homo sapiens
ccgtctcagatacta

SEQ ID NO: 1304681 - DNA, 15 bp, Homo sapiens
cccgtctcagatact

SEQ ID NO: 1304682 - DNA, 15 bp, Homo sapiens
acccgtctcagatac

SEQ ID NO: 1304683 - DNA, 15 bp, Homo sapiens
cacccgtctcagata

SEQ ID NO: 1304684 - DNA, 15 bp, Homo sapiens
tcacccgtctcagat

SEQ ID NO: 1304685 - DNA, 15 bp, Homo sapiens
atcacccgtctcaga

SEQ ID NO: 1304686 - DNA, 15 bp, Homo sapiens
tatcacccgtctcag

SEQ ID NO: 1304687 - DNA, 15 bp, Homo sapiens
ttatcacccgtctca

SEQ ID NO: 1304688 - DNA, 15 bp, Homo sapiens
tttatcacccgtctc

SEQ ID NO: 1304689 - DNA, 15 bp, Homo sapiens
gtttatcacccgtct

SEQ ID NO: 1304690 - DNA, 15 bp, Homo sapiens
tgtttatcacccgtc

SEQ ID NO: 1304691 - DNA, 15 bp, Homo sapiens
ttgtttatcacccgt

SEQ ID NO: 1304692 - DNA, 15 bp, Homo sapiens
tttgtttatcacccg

SEQ ID NO: 1304693 - DNA, 15 bp, Homo sapiens
atttgtttatcaccc

SEQ ID NO: 1304694 - DNA, 15 bp, Homo sapiens
aatttgtttatcacc

SEQ ID NO: 1304695 - DNA, 15 bp, Homo sapiens
aaatttgtttatcac

SEQ ID NO: 1304696 - DNA, 15 bp, Homo sapiens
taaatttgtttatca

SEQ ID NO: 1304697 - DNA, 15 bp, Homo sapiens
ttaaatttgtttatc

SEQ ID NO: 1304698 - DNA, 15 bp, Homo sapiens
attaaatttgtttat

SEQ ID NO: 1304699 - DNA, 15 bp, Homo sapiens
cattaaatttgttta

SEQ ID NO: 1304700 - DNA, 15 bp, Homo sapiens
acattaaatttgttt

SEQ ID NO: 1304701 - DNA, 15 bp, Homo sapiens
cacattaaatttgtt

SEQ ID NO: 1304702 - DNA, 15 bp, Homo sapiens
tcacattaaatttgt

SEQ ID NO: 1304703 - DNA, 15 bp, Homo sapiens
ttcacattaaatttg

SEQ ID NO: 1304704 - DNA, 15 bp, Homo sapiens
tttcacattaaattt

SEQ ID NO: 1304705 - DNA, 15 bp, Homo sapiens
ttttcacattaaatt

SEQ ID NO: 1304706 - DNA, 15 bp, Homo sapiens
cttttcacattaaat

SEQ ID NO: 1304707 - DNA, 15 bp, Homo sapiens
gcttttcacattaaa

SEQ ID NO: 1304708 - DNA, 15 bp, Homo sapiens
agcttttcacattaa

SEQ ID NO: 1304709 - DNA, 15 bp, Homo sapiens
cagcttttcacatta

SEQ ID NO: 1304710 - DNA, 15 bp, Homo sapiens
tcagcttttcacatt

SEQ ID NO: 1304711 - DNA, 15 bp, Homo sapiens
atcagcttttcacat

SEQ ID NO: 1304712 - DNA, 15 bp, Homo sapiens
catcagcttttcaca

SEQ ID NO: 1304713 - DNA, 15 bp, Homo sapiens
tcatcagcttttcac

SEQ ID NO: 1304714 - DNA, 15 bp, Homo sapiens
atcatcagcttttca

SEQ ID NO: 1304715 - DNA, 15 bp, Homo sapiens
catcatcagcttttc

SEQ ID NO: 1304716 - DNA, 15 bp, Homo sapiens
acatcatcagctttt

SEQ ID NO: 1304717 - DNA, 15 bp, Homo sapiens
aacatcatcagcttt

SEQ ID NO: 1304718 - DNA, 15 bp, Homo sapiens
aaacatcatcagctt

SEQ ID NO: 1304719 - DNA, 15 bp, Homo sapiens
aaaacatcatcagct

SEQ ID NO: 1304720 - DNA, 15 bp, Homo sapiens
caaaacatcatcagc

SEQ ID NO: 1304721 - DNA, 15 bp, Homo sapiens
tcaaaacatcatcag

SEQ ID NO: 1304722 - DNA, 15 bp, Homo sapiens
ttcaaaacatcatca

SEQ ID NO: 1304723 - DNA, 15 bp, Homo sapiens
cttcaaaacatcatc

SEQ ID NO: 1304724 - DNA, 15 bp, Homo sapiens
acttcaaaacatcat

SEQ ID NO: 1304725 - DNA, 15 bp, Homo sapiens
gacttcaaaacatca

SEQ ID NO: 1304726 - DNA, 15 bp, Homo sapiens
tgacttcaaaacatc

SEQ ID NO: 1304727 - DNA, 15 bp, Homo sapiens
ctgacttcaaaacat

SEQ ID NO: 1304728 - DNA, 15 bp, Homo sapiens
actgacttcaaaaca

SEQ ID NO: 1304729 - DNA, 15 bp, Homo sapiens
tactgacttcaaaac

SEQ ID NO: 1304730 - DNA, 15 bp, Homo sapiens
ctactgacttcaaaa

SEQ ID NO: 1304731 - DNA, 15 bp, Homo sapiens
tctactgacttcaaa

SEQ ID NO: 1304732 - DNA, 15 bp, Homo sapiens
ctctactgacttcaa

SEQ ID NO: 1304733 - DNA, 15 bp, Homo sapiens
cctctactgacttca

SEQ ID NO: 1304734 - DNA, 15 bp, Homo sapiens
tcctctactgacttc

SEQ ID NO: 1304735 - DNA, 15 bp, Homo sapiens
gtcctctactgactt

SEQ ID NO: 1304736 - DNA, 15 bp, Homo sapiens
cgtcctctactgact

SEQ ID NO: 1304737 - DNA, 15 bp, Homo sapiens
ccgtcctctactgac

SEQ ID NO: 1304738 - DNA, 15 bp, Homo sapiens
tccgtcctctactga

SEQ ID NO: 1304739 - DNA, 15 bp, Homo sapiens
ctccgtcctctactg

SEQ ID NO: 1304740 - DNA, 15 bp, Homo sapiens
gctccgtcctctact

SEQ ID NO: 1304741 - DNA, 15 bp, Homo sapiens
agctccgtcctctac

SEQ ID NO: 1304742 - DNA, 15 bp, Homo sapiens
cagctccgtcctcta

SEQ ID NO: 1304743 - DNA, 15 bp, Homo sapiens
tcagctccgtcctct

SEQ ID NO: 1304744 - DNA, 15 bp, Homo sapiens
gtcagctccgtcctc

SEQ ID NO: 1304745 - DNA, 15 bp, Homo sapiens
tgtcagctccgtcct

SEQ ID NO: 1304746 - DNA, 15 bp, Homo sapiens
ttgtcagctccgtcc

SEQ ID NO: 1304747 - DNA, 15 bp, Homo sapiens
attgtcagctccgtc

SEQ ID NO: 1304748 - DNA, 15 bp, Homo sapiens
cattgtcagctccgt

SEQ ID NO: 1304749 - DNA, 15 bp, Homo sapiens
tcattgtcagctccg

SEQ ID NO: 1304750 - DNA, 15 bp, Homo sapiens
ctcattgtcagctcc

SEQ ID NO: 1304751 - DNA, 15 bp, Homo sapiens
gctcattgtcagctc

SEQ ID NO: 1304752 - DNA, 15 bp, Homo sapiens
cgctcattgtcagct

SEQ ID NO: 1304753 - DNA, 15 bp, Homo sapiens
acgctcattgtcagc

SEQ ID NO: 1304754 - DNA, 15 bp, Homo sapiens
gacgctcattgtcag

SEQ ID NO: 1304755 - DNA, 15 bp, Homo sapiens
agacgctcattgtca

SEQ ID NO: 1304756 - DNA, 15 bp, Homo sapiens
aagacgctcattgtc

SEQ ID NO: 1304757 - DNA, 15 bp, Homo sapiens
caagacgctcattgt

SEQ ID NO: 1304758 - DNA, 15 bp, Homo sapiens
gcaagacgctcattg

SEQ ID NO: 1304759 - DNA, 15 bp, Homo sapiens
tgcaagacgctcatt

SEQ ID NO: 1304760 - DNA, 15 bp, Homo sapiens
ttgcaagacgctcat

SEQ ID NO: 1304761 - DNA, 15 bp, Homo sapiens
attgcaagacgctca

SEQ ID NO: 1304762 - DNA, 15 bp, Homo sapiens
cattgcaagacgctc

SEQ ID NO: 1304763 - DNA, 15 bp, Homo sapiens
tcattgcaagacgct

SEQ ID NO: 1304764 - DNA, 15 bp, Homo sapiens
ctcattgcaagacgc

SEQ ID NO: 1304765 - DNA, 15 bp, Homo sapiens
actcattgcaagacg

SEQ ID NO: 1304766 - DNA, 15 bp, Homo sapiens
gactcattgcaagac

SEQ ID NO: 1304767 - DNA, 15 bp, Homo sapiens
agactcattgcaaga

SEQ ID NO: 1304768 - DNA, 15 bp, Homo sapiens
cagactcattgcaag

SEQ ID NO: 1304769 - DNA, 15 bp, Homo sapiens
acagactcattgcaa

SEQ ID NO: 1304770 - DNA, 15 bp, Homo sapiens
aacagactcattgca

SEQ ID NO: 1304771 - DNA, 15 bp, Homo sapiens
gaacagactcattgc

SEQ ID NO: 1304772 - DNA, 15 bp, Homo sapiens
agaacagactcattg

SEQ ID NO: 1304773 - DNA, 15 bp, Homo sapiens
gagaacagactcatt

SEQ ID NO: 1304774 - DNA, 15 bp, Homo sapiens
tgagaacagactcat

SEQ ID NO: 1304775 - DNA, 15 bp, Homo sapiens
ttgagaacagactca

SEQ ID NO: 1304776 - DNA, 15 bp, Homo sapiens
attgagaacagactc

SEQ ID NO: 1304777 - DNA, 15 bp, Homo sapiens
aattgagaacagact

SEQ ID NO: 1304778 - DNA, 15 bp, Homo sapiens
aaattgagaacagac

SEQ ID NO: 1304779 - DNA, 15 bp, Homo sapiens
gaaattgagaacaga

SEQ ID NO: 1304780 - DNA, 15 bp, Homo sapiens
tgaaattgagaacag

SEQ ID NO: 1304781 - DNA, 15 bp, Homo sapiens
atgaaattgagaaca

SEQ ID NO: 1304782 - DNA, 15 bp, Homo sapiens
aatgaaattgagaac

SEQ ID NO: 1304783 - DNA, 15 bp, Homo sapiens
caatgaaattgagaa

SEQ ID NO: 1304784 - DNA, 15 bp, Homo sapiens
gcaatgaaattgaga

SEQ ID NO: 1304785 - DNA, 15 bp, Homo sapiens
agcaatgaaattgag

SEQ ID NO: 1304786 - DNA, 15 bp, Homo sapiens
cagcaatgaaattga

SEQ ID NO: 1304787 - DNA, 15 bp, Homo sapiens
tcagcaatgaaattg

SEQ ID NO: 1304788 - DNA, 15 bp, Homo sapiens
atcagcaatgaaatt

SEQ ID NO: 1304789 - DNA, 15 bp, Homo sapiens
tatcagcaatgaaat

SEQ ID NO: 1304790 - DNA, 15 bp, Homo sapiens
ttatcagcaatgaaa

SEQ ID NO: 1304791 - DNA, 15 bp, Homo sapiens
tttatcagcaatgaa

SEQ ID NO: 1304792 - DNA, 15 bp, Homo sapiens
ctttatcagcaatga

SEQ ID NO: 1304793 - DNA, 15 bp, Homo sapiens
tctttatcagcaatg

SEQ ID NO: 1304794 - DNA, 15 bp, Homo sapiens
ctctttatcagcaat

SEQ ID NO: 1304795 - DNA, 15 bp, Homo sapiens
tctctttatcagcaa

SEQ ID NO: 1304796 - DNA, 15 bp, Homo sapiens
ttctctttatcagca

SEQ ID NO: 1304797 - DNA, 15 bp, Homo sapiens
tttctctttatcagc

SEQ ID NO: 1304798 - DNA, 15 bp, Homo sapiens
gtttctctttatcag

SEQ ID NO: 1304799 - DNA, 15 bp, Homo sapiens
tgtttctctttatca

SEQ ID NO: 1304800 - DNA, 15 bp, Homo sapiens
ctgtttctctttatc

SEQ ID NO: 1304801 - DNA, 15 bp, Homo sapiens
actgtttctctttat

SEQ ID NO: 1304802 - DNA, 15 bp, Homo sapiens
cactgtttctcttta

SEQ ID NO: 1304803 - DNA, 15 bp, Homo sapiens
acactgtttctcttt

SEQ ID NO: 1304804 - DNA, 15 bp, Homo sapiens
tacactgtttctctt

SEQ ID NO: 1304805 - DNA, 15 bp, Homo sapiens
ctacactgtttctct

SEQ ID NO: 1304806 - DNA, 15 bp, Homo sapiens
actacactgtttctc

SEQ ID NO: 1304807 - DNA, 15 bp, Homo sapiens
cactacactgtttct

SEQ ID NO: 1304808 - DNA, 15 bp, Homo sapiens
acactacactgtttc

SEQ ID NO: 1304809 - DNA, 15 bp, Homo sapiens
cacactacactgttt

SEQ ID NO: 1304810 - DNA, 15 bp, Homo sapiens
ccacactacactgtt

SEQ ID NO: 1304811 - DNA, 15 bp, Homo sapiens
accacactacactgt

SEQ ID NO: 1304812 - DNA, 15 bp, Homo sapiens
caccacactacactg

SEQ ID NO: 1304813 - DNA, 15 bp, Homo sapiens
ccaccacactacact

SEQ ID NO: 1304814 - DNA, 15 bp, Homo sapiens
gccaccacactacac

SEQ ID NO: 1304815 - DNA, 15 bp, Homo sapiens
cgccaccacactaca

SEQ ID NO: 1304816 - DNA, 15 bp, Homo sapiens
tcgccaccacactac

SEQ ID NO: 1304817 - DNA, 15 bp, Homo sapiens
ttcgccaccacacta

SEQ ID NO: 1304818 - DNA, 15 bp, Homo sapiens
cttcgccaccacact

SEQ ID NO: 1304819 - DNA, 15 bp, Homo sapiens
tcttcgccaccacac

SEQ ID NO: 1304820 - DNA, 15 bp, Homo sapiens
ctcttcgccaccaca

SEQ ID NO: 1304821 - DNA, 15 bp, Homo sapiens
gctcttcgccaccac

SEQ ID NO: 1304822 - DNA, 15 bp, Homo sapiens
tgctcttcgccacca

SEQ ID NO: 1304823 - DNA, 15 bp, Homo sapiens
gtgctcttcgccacc

SEQ ID NO: 1304824 - DNA, 15 bp, Homo sapiens
tgtgctcttcgccac

SEQ ID NO: 1304825 - DNA, 15 bp, Homo sapiens
ctgtgctcttcgcca

SEQ ID NO: 1304826 - DNA, 15 bp, Homo sapiens
tctgtgctcttcgcc

SEQ ID NO: 1304827 - DNA, 15 bp, Homo sapiens
gtctgtgctcttcgc

SEQ ID NO: 1304828 - DNA, 15 bp, Homo sapiens
ggtctgtgctcttcg

SEQ ID NO: 1304829 - DNA, 15 bp, Homo sapiens
gggtctgtgctcttc

SEQ ID NO: 1304830 - DNA, 15 bp, Homo sapiens
agggtctgtgctctt

SEQ ID NO: 1304831 - DNA, 15 bp, Homo sapiens
cagggtctgtgctct

SEQ ID NO: 1304832 - DNA, 15 bp, Homo sapiens
tcagggtctgtgctc

SEQ ID NO: 1304833 - DNA, 15 bp, Homo sapiens
ttcagggtctgtgct

SEQ ID NO: 1304834 - DNA, 15 bp, Homo sapiens
cttcagggtctgtgc

SEQ ID NO: 1304835 - DNA, 15 bp, Homo sapiens
gcttcagggtctgtg

SEQ ID NO: 1304836 - DNA, 15 bp, Homo sapiens
tgcttcagggtctgt

SEQ ID NO: 1304837 - DNA, 15 bp, Homo sapiens
ttgcttcagggtctg

SEQ ID NO: 1304838 - DNA, 15 bp, Homo sapiens
cttgcttcagggtct

SEQ ID NO: 1304839 - DNA, 15 bp, Homo sapiens
tcttgcttcagggtc

SEQ ID NO: 1304840 - DNA, 15 bp, Homo sapiens
ttcttgcttcagggt

SEQ ID NO: 1304841 - DNA, 15 bp, Homo sapiens
attcttgcttcaggg

SEQ ID NO: 1304842 - DNA, 15 bp, Homo sapiens
gattcttgcttcagg

SEQ ID NO: 1304843 - DNA, 15 bp, Homo sapiens
ggattcttgcttcag

SEQ ID NO: 1304844 - DNA, 15 bp, Homo sapiens
tggattcttgcttca

SEQ ID NO: 1304845 - DNA, 15 bp, Homo sapiens
atggattcttgcttc

SEQ ID NO: 1304846 - DNA, 15 bp, Homo sapiens
catggattcttgctt

SEQ ID NO: 1304847 - DNA, 15 bp, Homo sapiens
ccatggattcttgct

SEQ ID NO: 1304848 - DNA, 15 bp, Homo sapiens
cccatggattcttgc

SEQ ID NO: 1304849 - DNA, 15 bp, Homo sapiens
gcccatggattcttg

SEQ ID NO: 1304850 - DNA, 15 bp, Homo sapiens
agcccatggattctt

SEQ ID NO: 1304851 - DNA, 15 bp, Homo sapiens
gagcccatggattct

SEQ ID NO: 1304852 - DNA, 15 bp, Homo sapiens
tgagcccatggattc

SEQ ID NO: 1304853 - DNA, 15 bp, Homo sapiens
ttgagcccatggatt

SEQ ID NO: 1304854 - DNA, 15 bp, Homo sapiens
tttgagcccatggat

SEQ ID NO: 1304855 - DNA, 15 bp, Homo sapiens
atttgagcccatgga

SEQ ID NO: 1304856 - DNA, 15 bp, Homo sapiens
aatttgagcccatgg

SEQ ID NO: 1304857 - DNA, 15 bp, Homo sapiens
gaatttgagcccatg

SEQ ID NO: 1304858 - DNA, 15 bp, Homo sapiens
agaatttgagcccat

SEQ ID NO: 1304859 - DNA, 15 bp, Homo sapiens
cagaatttgagccca

SEQ ID NO: 1304860 - DNA, 15 bp, Homo sapiens
tcagaatttgagccc

SEQ ID NO: 1304861 - DNA, 15 bp, Homo sapiens
ctcagaatttgagcc

SEQ ID NO: 1304862 - DNA, 15 bp, Homo sapiens
actcagaatttgagc

SEQ ID NO: 1304863 - DNA, 15 bp, Homo sapiens
gactcagaatttgag

SEQ ID NO: 1304864 - DNA, 15 bp, Homo sapiens
agactcagaatttga

SEQ ID NO: 1304865 - DNA, 15 bp, Homo sapiens
aagactcagaatttg

SEQ ID NO: 1304866 - DNA, 15 bp, Homo sapiens
aaagactcagaattt

SEQ ID NO: 1304867 - DNA, 15 bp, Homo sapiens
taaagactcagaatt

SEQ ID NO: 1304868 - DNA, 15 bp, Homo sapiens
ttaaagactcagaat

SEQ ID NO: 1304869 - DNA, 15 bp, Homo sapiens
cttaaagactcagaa

SEQ ID NO: 1304870 - DNA, 15 bp, Homo sapiens
acttaaagactcaga

SEQ ID NO: 1304871 - DNA, 15 bp, Homo sapiens
gacttaaagactcag

SEQ ID NO: 1304872 - DNA, 15 bp, Homo sapiens
agacttaaagactca

SEQ ID NO: 1304873 - DNA, 15 bp, Homo sapiens
cagacttaaagactc

SEQ ID NO: 1304874 - DNA, 15 bp, Homo sapiens
acagacttaaagact

SEQ ID NO: 1304875 - DNA, 15 bp, Homo sapiens
cacagacttaaagac

SEQ ID NO: 1304876 - DNA, 15 bp, Homo sapiens
ccacagacttaaaga

SEQ ID NO: 1304877 - DNA, 15 bp, Homo sapiens
gccacagacttaaag

SEQ ID NO: 1304878 - DNA, 15 bp, Homo sapiens
ggccacagacttaaa

SEQ ID NO: 1304879 - DNA, 15 bp, Homo sapiens
gggccacagacttaa

SEQ ID NO: 1304880 - DNA, 15 bp, Homo sapiens
tgggccacagactta

SEQ ID NO: 1304881 - DNA, 15 bp, Homo sapiens
ttgggccacagactt

SEQ ID NO: 1304882 - DNA, 15 bp, Homo sapiens
cttgggccacagact

SEQ ID NO: 1304883 - DNA, 15 bp, Homo sapiens
tcttgggccacagac

SEQ ID NO: 1304884 - DNA, 15 bp, Homo sapiens
ttcttgggccacaga

SEQ ID NO: 1304885 - DNA, 15 bp, Homo sapiens
attcttgggccacag

SEQ ID NO: 1304886 - DNA, 15 bp, Homo sapiens
aattcttgggccaca

SEQ ID NO: 1304887 - DNA, 15 bp, Homo sapiens
gaattcttgggccac

SEQ ID NO: 1304888 - DNA, 15 bp, Homo sapiens
tgaattcttgggcca

SEQ ID NO: 1304889 - DNA, 15 bp, Homo sapiens
gtgaattcttgggcc

SEQ ID NO: 1304890 - DNA, 15 bp, Homo sapiens
tgtgaattcttgggc

SEQ ID NO: 1304891 - DNA, 15 bp, Homo sapiens
atgtgaattcttggg

SEQ ID NO: 1304892 - DNA, 15 bp, Homo sapiens
aatgtgaattcttgg

SEQ ID NO: 1304893 - DNA, 15 bp, Homo sapiens
aaatgtgaattcttg

SEQ ID NO: 1304894 - DNA, 15 bp, Homo sapiens
gaaatgtgaattctt

SEQ ID NO: 1304895 - DNA, 15 bp, Homo sapiens
agaaatgtgaattct

SEQ ID NO: 1304896 - DNA, 15 bp, Homo sapiens
tagaaatgtgaattc

SEQ ID NO: 1304897 - DNA, 15 bp, Homo sapiens
ttagaaatgtgaatt

SEQ ID NO: 1304898 - DNA, 15 bp, Homo sapiens
gttagaaatgtgaat

SEQ ID NO: 1304899 - DNA, 15 bp, Homo sapiens
agttagaaatgtgaa

SEQ ID NO: 1304900 - DNA, 15 bp, Homo sapiens
cagttagaaatgtga

SEQ ID NO: 1304901 - DNA, 15 bp, Homo sapiens
tcagttagaaatgtg

SEQ ID NO: 1304902 - DNA, 15 bp, Homo sapiens
gtcagttagaaatgt

SEQ ID NO: 1304903 - DNA, 15 bp, Homo sapiens
agtcagttagaaatg

SEQ ID NO: 1304904 - DNA, 15 bp, Homo sapiens
aagtcagttagaaat

SEQ ID NO: 1304905 - DNA, 15 bp, Homo sapiens
gaagtcagttagaaa

SEQ ID NO: 1304906 - DNA, 15 bp, Homo sapiens
ggaagtcagttagaa

SEQ ID NO: 1304907 - DNA, 15 bp, Homo sapiens
aggaagtcagttaga

SEQ ID NO: 1304908 - DNA, 15 bp, Homo sapiens
caggaagtcagttag

SEQ ID NO: 1304909 - DNA, 15 bp, Homo sapiens
ccaggaagtcagtta

SEQ ID NO: 1304910 - DNA, 15 bp, Homo sapiens
cccaggaagtcagtt

SEQ ID NO: 1304911 - DNA, 15 bp, Homo sapiens
acccaggaagtcagt

SEQ ID NO: 1304912 - DNA, 15 bp, Homo sapiens
tacccaggaagtcag

SEQ ID NO: 1304913 - DNA, 15 bp, Homo sapiens
atacccaggaagtca

SEQ ID NO: 1304914 - DNA, 15 bp, Homo sapiens
catacccaggaagtc

SEQ ID NO: 1304915 - DNA, 15 bp, Homo sapiens
gcatacccaggaagt

SEQ ID NO: 1304916 - DNA, 15 bp, Homo sapiens
agcatacccaggaag

SEQ ID NO: 1304917 - DNA, 15 bp, Homo sapiens
cagcatacccaggaa

SEQ ID NO: 1304918 - DNA, 15 bp, Homo sapiens
tcagcatacccagga

SEQ ID NO: 1304919 - DNA, 15 bp, Homo sapiens
atcagcatacccagg

SEQ ID NO: 1304920 - DNA, 15 bp, Homo sapiens
catcagcatacccag

SEQ ID NO: 1304921 - DNA, 15 bp, Homo sapiens
gcatcagcataccca

SEQ ID NO: 1304922 - DNA, 15 bp, Homo sapiens
agcatcagcataccc

SEQ ID NO: 1304923 - DNA, 15 bp, Homo sapiens
cagcatcagcatacc

SEQ ID NO: 1304924 - DNA, 15 bp, Homo sapiens
gcagcatcagcatac

SEQ ID NO: 1304925 - DNA, 15 bp, Homo sapiens
agcagcatcagcata

SEQ ID NO: 1304926 - DNA, 15 bp, Homo sapiens
cagcagcatcagcat

SEQ ID NO: 1304927 - DNA, 15 bp, Homo sapiens
ccagcagcatcagca

SEQ ID NO: 1304928 - DNA, 15 bp, Homo sapiens
accagcagcatcagc

SEQ ID NO: 1304929 - DNA, 15 bp, Homo sapiens
gaccagcagcatcag

SEQ ID NO: 1304930 - DNA, 15 bp, Homo sapiens
agaccagcagcatca

SEQ ID NO: 1304931 - DNA, 15 bp, Homo sapiens
cagaccagcagcatc

SEQ ID NO: 1304932 - DNA, 15 bp, Homo sapiens
gcagaccagcagcat

SEQ ID NO: 1304933 - DNA, 15 bp, Homo sapiens
tgcagaccagcagca

SEQ ID NO: 1304934 - DNA, 15 bp, Homo sapiens
ctgcagaccagcagc

SEQ ID NO: 1304935 - DNA, 15 bp, Homo sapiens
cctgcagaccagcag

SEQ ID NO: 1304936 - DNA, 15 bp, Homo sapiens
acctgcagaccagca

SEQ ID NO: 1304937 - DNA, 15 bp, Homo sapiens
gacctgcagaccagc

SEQ ID NO: 1304938 - DNA, 15 bp, Homo sapiens
tgacctgcagaccag

SEQ ID NO: 1304939 - DNA, 15 bp, Homo sapiens
gtgacctgcagacca

SEQ ID NO: 1304940 - DNA, 15 bp, Homo sapiens
tgtgacctgcagacc

SEQ ID NO: 1304941 - DNA, 15 bp, Homo sapiens
gtgtgacctgcagac

SEQ ID NO: 1304942 - DNA, 15 bp, Homo sapiens
agtgtgacctgcaga

SEQ ID NO: 1304943 - DNA, 15 bp, Homo sapiens
gagtgtgacctgcag

SEQ ID NO: 1304944 - DNA, 15 bp, Homo sapiens
tgagtgtgacctgca

SEQ ID NO: 1304945 - DNA, 15 bp, Homo sapiens
ctgagtgtgacctgc

SEQ ID NO: 1304946 - DNA, 15 bp, Homo sapiens
cctgagtgtgacctg

SEQ ID NO: 1304947 - DNA, 15 bp, Homo sapiens
ccctgagtgtgacct

SEQ ID NO: 1304948 - DNA, 15 bp, Homo sapiens
accctgagtgtgacc

SEQ ID NO: 1304949 - DNA, 15 bp, Homo sapiens
caccctgagtgtgac

SEQ ID NO: 1304950 - DNA, 15 bp, Homo sapiens
ccaccctgagtgtga

SEQ ID NO: 1304951 - DNA, 15 bp, Homo sapiens
gccaccctgagtgtg

SEQ ID NO: 1304952 - DNA, 15 bp, Homo sapiens
tgccaccctgagtgt

SEQ ID NO: 1304953 - DNA, 15 bp, Homo sapiens
ttgccaccctgagtg

SEQ ID NO: 1304954 - DNA, 15 bp, Homo sapiens
cttgccaccctgagt

SEQ ID NO: 1304955 - DNA, 15 bp, Homo sapiens
ccttgccaccctgag

SEQ ID NO: 1304956 - DNA, 15 bp, Homo sapiens
accttgccaccctga

SEQ ID NO: 1304957 - DNA, 15 bp, Homo sapiens
gaccttgccaccctg

SEQ ID NO: 1304958 - DNA, 15 bp, Homo sapiens
tgaccttgccaccct

SEQ ID NO: 1304959 - DNA, 15 bp, Homo sapiens
ctgaccttgccaccc

SEQ ID NO: 1304960 - DNA, 15 bp, Homo sapiens
cctgaccttgccacc

SEQ ID NO: 1304961 - DNA, 15 bp, Homo sapiens
gcctgaccttgccac

SEQ ID NO: 1304962 - DNA, 15 bp, Homo sapiens
tgcctgaccttgcca

SEQ ID NO: 1304963 - DNA, 15 bp, Homo sapiens
ttgcctgaccttgcc

SEQ ID NO: 1304964 - DNA, 15 bp, Homo sapiens
cttgcctgaccttgc

SEQ ID NO: 1304965 - DNA, 15 bp, Homo sapiens
ccttgcctgaccttg

SEQ ID NO: 1304966 - DNA, 15 bp, Homo sapiens
accttgcctgacctt

SEQ ID NO: 1304967 - DNA, 15 bp, Homo sapiens
gaccttgcctgacct

SEQ ID NO: 1304968 - DNA, 15 bp, Homo sapiens
tgaccttgcctgacc

SEQ ID NO: 1304969 - DNA, 15 bp, Homo sapiens
ctgaccttgcctgac

SEQ ID NO: 1304970 - DNA, 15 bp, Homo sapiens
tctgaccttgcctga

SEQ ID NO: 1304971 - DNA, 15 bp, Homo sapiens
ctctgaccttgcctg

SEQ ID NO: 1304972 - DNA, 15 bp, Homo sapiens
gctctgaccttgcct

SEQ ID NO: 1304973 - DNA, 15 bp, Homo sapiens
tgctctgaccttgcc

SEQ ID NO: 1304974 - DNA, 15 bp, Homo sapiens
gtgctctgaccttgc

SEQ ID NO: 1304975 - DNA, 15 bp, Homo sapiens
tgtgctctgaccttg

SEQ ID NO: 1304976 - DNA, 15 bp, Homo sapiens
ctgtgctctgacctt

SEQ ID NO: 1304977 - DNA, 15 bp, Homo sapiens
gctgtgctctgacct

SEQ ID NO: 1304978 - DNA, 15 bp, Homo sapiens
tgctgtgctctgacc

SEQ ID NO: 1304979 - DNA, 15 bp, Homo sapiens
atgctgtgctctgac

SEQ ID NO: 1304980 - DNA, 15 bp, Homo sapiens
catgctgtgctctga

SEQ ID NO: 1304981 - DNA, 15 bp, Homo sapiens
ccatgctgtgctctg

SEQ ID NO: 1304982 - DNA, 15 bp, Homo sapiens
cccatgctgtgctct

SEQ ID NO: 1304983 - DNA, 15 bp, Homo sapiens
tcccatgctgtgctc

SEQ ID NO: 1304984 - DNA, 15 bp, Homo sapiens
ctcccatgctgtgct

SEQ ID NO: 1304985 - DNA, 15 bp, Homo sapiens
cctcccatgctgtgc

SEQ ID NO: 1304986 - DNA, 15 bp, Homo sapiens
ccctcccatgctgtg

SEQ ID NO: 1304987 - DNA, 15 bp, Homo sapiens
tccctcccatgctgt

SEQ ID NO: 1304988 - DNA, 15 bp, Homo sapiens
gtccctcccatgctg

SEQ ID NO: 1304989 - DNA, 15 bp, Homo sapiens
agtccctcccatgct

SEQ ID NO: 1304990 - DNA, 15 bp, Homo sapiens
cagtccctcccatgc

SEQ ID NO: 1304991 - DNA, 15 bp, Homo sapiens
acagtccctcccatg

SEQ ID NO: 1304992 - DNA, 15 bp, Homo sapiens
cacagtccctcccat

SEQ ID NO: 1304993 - DNA, 15 bp, Homo sapiens
gcacagtccctccca

SEQ ID NO: 1304994 - DNA, 15 bp, Homo sapiens
agcacagtccctccc

SEQ ID NO: 1304995 - DNA, 15 bp, Homo sapiens
cagcacagtccctcc

SEQ ID NO: 1304996 - DNA, 15 bp, Homo sapiens
gcagcacagtccctc

SEQ ID NO: 1304997 - DNA, 15 bp, Homo sapiens
ggcagcacagtccct

SEQ ID NO: 1304998 - DNA, 15 bp, Homo sapiens
aggcagcacagtccc

SEQ ID NO: 1304999 - DNA, 15 bp, Homo sapiens
caggcagcacagtcc

SEQ ID NO: 1305000 - DNA, 15 bp, Homo sapiens
acaggcagcacagtc

SEQ ID NO: 1305001 - DNA, 15 bp, Homo sapiens
tacaggcagcacagt

SEQ ID NO: 1305002 - DNA, 15 bp, Homo sapiens
ctacaggcagcacag

SEQ ID NO: 1305003 - DNA, 15 bp, Homo sapiens
actacaggcagcaca

SEQ ID NO: 1305004 - DNA, 15 bp, Homo sapiens
tactacaggcagcac

SEQ ID NO: 1305005 - DNA, 15 bp, Homo sapiens
gtactacaggcagca

SEQ ID NO: 1305006 - DNA, 15 bp, Homo sapiens
tgtactacaggcagc

SEQ ID NO: 1305007 - DNA, 15 bp, Homo sapiens
gtgtactacaggcag

SEQ ID NO: 1305008 - DNA, 15 bp, Homo sapiens
tgtgtactacaggca

SEQ ID NO: 1305009 - DNA, 15 bp, Homo sapiens
ctgtgtactacaggc

SEQ ID NO: 1305010 - DNA, 15 bp, Homo sapiens
actgtgtactacagg

SEQ ID NO: 1305011 - DNA, 15 bp, Homo sapiens
cactgtgtactacag

SEQ ID NO: 1305012 - DNA, 15 bp, Homo sapiens
ccactgtgtactaca

SEQ ID NO: 1305013 - DNA, 15 bp, Homo sapiens
tccactgtgtactac

SEQ ID NO: 1305014 - DNA, 15 bp, Homo sapiens
ttccactgtgtacta

SEQ ID NO: 1305015 - DNA, 15 bp, Homo sapiens
cttccactgtgtact

SEQ ID NO: 1305016 - DNA, 15 bp, Homo sapiens
ccttccactgtgtac

SEQ ID NO: 1305017 - DNA, 15 bp, Homo sapiens
accttccactgtgta

SEQ ID NO: 1305018 - DNA, 15 bp, Homo sapiens
caccttccactgtgt

SEQ ID NO: 1305019 - DNA, 15 bp, Homo sapiens
ccaccttccactgtg

SEQ ID NO: 1305020 - DNA, 15 bp, Homo sapiens
tccaccttccactgt

SEQ ID NO: 1305021 - DNA, 15 bp, Homo sapiens
ctccaccttccactg

SEQ ID NO: 1305022 - DNA, 15 bp, Homo sapiens
cctccaccttccact

SEQ ID NO: 1305023 - DNA, 15 bp, Homo sapiens
tcctccaccttccac

SEQ ID NO: 1305024 - DNA, 15 bp, Homo sapiens
ttcctccaccttcca

SEQ ID NO: 1305025 - DNA, 15 bp, Homo sapiens
cttcctccaccttcc

SEQ ID NO: 1305026 - DNA, 15 bp, Homo sapiens
gcttcctccaccttc

SEQ ID NO: 1305027 - DNA, 15 bp, Homo sapiens
ggcttcctccacctt

SEQ ID NO: 1305028 - DNA, 15 bp, Homo sapiens
gggcttcctccacct

SEQ ID NO: 1305029 - DNA, 15 bp, Homo sapiens
tgggcttcctccacc

SEQ ID NO: 1305030 - DNA, 15 bp, Homo sapiens
ctgggcttcctccac

SEQ ID NO: 1305031 - DNA, 15 bp, Homo sapiens
cctgggcttcctcca

SEQ ID NO: 1305032 - DNA, 15 bp, Homo sapiens
ccctgggcttcctcc

SEQ ID NO: 1305033 - DNA, 15 bp, Homo sapiens
cccctgggcttcctc

SEQ ID NO: 1305034 - DNA, 15 bp, Homo sapiens
acccctgggcttcct

SEQ ID NO: 1305035 - DNA, 15 bp, Homo sapiens
cacccctgggcttcc

SEQ ID NO: 1305036 - DNA, 15 bp, Homo sapiens
tcacccctgggcttc

SEQ ID NO: 1305037 - DNA, 15 bp, Homo sapiens
gtcacccctgggctt

SEQ ID NO: 1305038 - DNA, 15 bp, Homo sapiens
tgtcacccctgggct

SEQ ID NO: 1305039 - DNA, 15 bp, Homo sapiens
atgtcacccctgggc

SEQ ID NO: 1305040 - DNA, 15 bp, Homo sapiens
catgtcacccctggg

SEQ ID NO: 1305041 - DNA, 15 bp, Homo sapiens
ccatgtcacccctgg

SEQ ID NO: 1305042 - DNA, 15 bp, Homo sapiens
gccatgtcacccctg

SEQ ID NO: 1305043 - DNA, 15 bp, Homo sapiens
agccatgtcacccct

SEQ ID NO: 1305044 - DNA, 15 bp, Homo sapiens
aagccatgtcacccc

SEQ ID NO: 1305045 - DNA, 15 bp, Homo sapiens
taagccatgtcaccc

SEQ ID NO: 1305046 - DNA, 15 bp, Homo sapiens
gtaagccatgtcacc

SEQ ID NO: 1305047 - DNA, 15 bp, Homo sapiens
agtaagccatgtcac

SEQ ID NO: 1305048 - DNA, 15 bp, Homo sapiens
aagtaagccatgtca

SEQ ID NO: 1305049 - DNA, 15 bp, Homo sapiens
taagtaagccatgtc

SEQ ID NO: 1305050 - DNA, 15 bp, Homo sapiens
ataagtaagccatgt

SEQ ID NO: 1305051 - DNA, 15 bp, Homo sapiens
tataagtaagccatg

SEQ ID NO: 1305052 - DNA, 15 bp, Homo sapiens
atataagtaagccat

SEQ ID NO: 1305053 - DNA, 15 bp, Homo sapiens
gatataagtaagcca

SEQ ID NO: 1305054 - DNA, 15 bp, Homo sapiens
tgatataagtaagcc

SEQ ID NO: 1305055 - DNA, 15 bp, Homo sapiens
atgatataagtaagc

SEQ ID NO: 1305056 - DNA, 15 bp, Homo sapiens
gatgatataagtaag

SEQ ID NO: 1305057 - DNA, 15 bp, Homo sapiens
agatgatataagtaa

SEQ ID NO: 1305058 - DNA, 15 bp, Homo sapiens
tagatgatataagta

SEQ ID NO: 1305059 - DNA, 15 bp, Homo sapiens
atagatgatataagt

SEQ ID NO: 1305060 - DNA, 15 bp, Homo sapiens
catagatgatataag

SEQ ID NO: 1305061 - DNA, 15 bp, Homo sapiens
tcatagatgatataa

SEQ ID NO: 1305062 - DNA, 15 bp, Homo sapiens
ctcatagatgatata

SEQ ID NO: 1305063 - DNA, 15 bp, Homo sapiens
actcatagatgatat

SEQ ID NO: 1305064 - DNA, 15 bp, Homo sapiens
aactcatagatgata

SEQ ID NO: 1305065 - DNA, 15 bp, Homo sapiens
aaactcatagatgat

SEQ ID NO: 1305066 - DNA, 15 bp, Homo sapiens
aaaactcatagatga

SEQ ID NO: 1305067 - DNA, 15 bp, Homo sapiens
aaaaactcatagatg

SEQ ID NO: 1305068 - DNA, 15 bp, Homo sapiens
aaaaaactcatagat

SEQ ID NO: 1305069 - DNA, 15 bp, Homo sapiens
caaaaaactcataga

SEQ ID NO: 1305070 - DNA, 15 bp, Homo sapiens
acaaaaaactcatag

SEQ ID NO: 1305071 - DNA, 15 bp, Homo sapiens
aacaaaaaactcata

SEQ ID NO: 1305072 - DNA, 15 bp, Homo sapiens
aaacaaaaaactcat

SEQ ID NO: 1305073 - DNA, 15 bp, Homo sapiens
gaaacaaaaaactca

SEQ ID NO: 1305074 - DNA, 15 bp, Homo sapiens
ggaaacaaaaaactc

SEQ ID NO: 1305075 - DNA, 15 bp, Homo sapiens
aggaaacaaaaaact

SEQ ID NO: 1305076 - DNA, 15 bp, Homo sapiens
aaggaaacaaaaaac

SEQ ID NO: 1305077 - DNA, 15 bp, Homo sapiens
aaaggaaacaaaaaa

SEQ ID NO: 1305078 - DNA, 15 bp, Homo sapiens
taaaggaaacaaaaa

SEQ ID NO: 1305079 - DNA, 15 bp, Homo sapiens
ctaaaggaaacaaaa

SEQ ID NO: 1305080 - DNA, 15 bp, Homo sapiens
cctaaaggaaacaaa

SEQ ID NO: 1305081 - DNA, 15 bp, Homo sapiens
tcctaaaggaaacaa

SEQ ID NO: 1305082 - DNA, 15 bp, Homo sapiens
ttcctaaaggaaaca

SEQ ID NO: 1305083 - DNA, 15 bp, Homo sapiens
tttcctaaaggaaac

SEQ ID NO: 1305084 - DNA, 15 bp, Homo sapiens
atttcctaaaggaaa

SEQ ID NO: 1305085 - DNA, 15 bp, Homo sapiens
aatttcctaaaggaa

SEQ ID NO: 1305086 - DNA, 15 bp, Homo sapiens
aaatttcctaaagga

SEQ ID NO: 1305087 - DNA, 15 bp, Homo sapiens
taaatttcctaaagg

SEQ ID NO: 1305088 - DNA, 15 bp, Homo sapiens
gtaaatttcctaaag

SEQ ID NO: 1305089 - DNA, 15 bp, Homo sapiens
agtaaatttcctaaa

SEQ ID NO: 1305090 - DNA, 15 bp, Homo sapiens
cagtaaatttcctaa

SEQ ID NO: 1305091 - DNA, 15 bp, Homo sapiens
tcagtaaatttccta

SEQ ID NO: 1305092 - DNA, 15 bp, Homo sapiens
ttcagtaaatttcct

SEQ ID NO: 1305093 - DNA, 15 bp, Homo sapiens
tttcagtaaatttcc

SEQ ID NO: 1305094 - DNA, 15 bp, Homo sapiens
gtttcagtaaatttc

SEQ ID NO: 1305095 - DNA, 15 bp, Homo sapiens
tgtttcagtaaattt

SEQ ID NO: 1305096 - DNA, 15 bp, Homo sapiens
atgtttcagtaaatt

SEQ ID NO: 1305097 - DNA, 15 bp, Homo sapiens
aatgtttcagtaaat

SEQ ID NO: 1305098 - DNA, 15 bp, Homo sapiens
gaatgtttcagtaaa

SEQ ID NO: 1305099 - DNA, 15 bp, Homo sapiens
agaatgtttcagtaa

SEQ ID NO: 1305100 - DNA, 15 bp, Homo sapiens
aagaatgtttcagta

SEQ ID NO: 1305101 - DNA, 15 bp, Homo sapiens
gaagaatgtttcagt

SEQ ID NO: 1305102 - DNA, 15 bp, Homo sapiens
tgaagaatgtttcag

SEQ ID NO: 1305103 - DNA, 15 bp, Homo sapiens
atgaagaatgtttca

SEQ ID NO: 1305104 - DNA, 15 bp, Homo sapiens
aatgaagaatgtttc

SEQ ID NO: 1305105 - DNA, 15 bp, Homo sapiens
caatgaagaatgttt

SEQ ID NO: 1305106 - DNA, 15 bp, Homo sapiens
gcaatgaagaatgtt

SEQ ID NO: 1305107 - DNA, 15 bp, Homo sapiens
tgcaatgaagaatgt

SEQ ID NO: 1305108 - DNA, 15 bp, Homo sapiens
ttgcaatgaagaatg

SEQ ID NO: 1305109 - DNA, 15 bp, Homo sapiens
tttgcaatgaagaat

SEQ ID NO: 1305110 - DNA, 15 bp, Homo sapiens
ctttgcaatgaagaa

SEQ ID NO: 1305111 - DNA, 15 bp, Homo sapiens
actttgcaatgaaga

SEQ ID NO: 1305112 - DNA, 15 bp, Homo sapiens
tactttgcaatgaag

SEQ ID NO: 1305113 - DNA, 15 bp, Homo sapiens
atactttgcaatgaa

SEQ ID NO: 1305114 - DNA, 15 bp, Homo sapiens
tatactttgcaatga

SEQ ID NO: 1305115 - DNA, 15 bp, Homo sapiens
ttatactttgcaatg

SEQ ID NO: 1305116 - DNA, 15 bp, Homo sapiens
tttatactttgcaat

SEQ ID NO: 1305117 - DNA, 15 bp, Homo sapiens
ttttatactttgcaa

SEQ ID NO: 1305118 - DNA, 15 bp, Homo sapiens
tttttatactttgca

SEQ ID NO: 1305119 - DNA, 15 bp, Homo sapiens
gtttttatactttgc

SEQ ID NO: 1305120 - DNA, 15 bp, Homo sapiens
tgtttttatactttg

SEQ ID NO: 1305121 - DNA, 15 bp, Homo sapiens
ttgtttttatacttt

SEQ ID NO: 1305122 - DNA, 15 bp, Homo sapiens
tttgtttttatactt

SEQ ID NO: 1305123 - DNA, 15 bp, Homo sapiens
atttgtttttatact

SEQ ID NO: 1305124 - DNA, 15 bp, Homo sapiens
tatttgtttttatac

SEQ ID NO: 1305125 - DNA, 15 bp, Homo sapiens
atatttgtttttata

SEQ ID NO: 1305126 - DNA, 15 bp, Homo sapiens
tatatttgtttttat

SEQ ID NO: 1305127 - DNA, 15 bp, Homo sapiens
ttatatttgttttta

SEQ ID NO: 1305128 - DNA, 15 bp, Homo sapiens
tttatatttgttttt

SEQ ID NO: 1305129 - DNA, 15 bp, Homo sapiens
ttttatatttgtttt

SEQ ID NO: 1305130 - DNA, 15 bp, Homo sapiens
attttatatttgttt

SEQ ID NO: 1305131 - DNA, 15 bp, Homo sapiens
gtggcatgtttcagt

SEQ ID NO: 1305132 - DNA, 15 bp, Homo sapiens
tgtggcatgtttcag

SEQ ID NO: 1305133 - DNA, 15 bp, Homo sapiens
ttgtggcatgtttca

SEQ ID NO: 1305134 - DNA, 15 bp, Homo sapiens
gttgtggcatgtttc

SEQ ID NO: 1305135 - DNA, 15 bp, Homo sapiens
tgttgtggcatgttt

SEQ ID NO: 1305136 - DNA, 15 bp, Homo sapiens
atgttgtggcatgtt

SEQ ID NO: 1305137 - DNA, 15 bp, Homo sapiens
tatgttgtggcatgt

SEQ ID NO: 1305138 - DNA, 15 bp, Homo sapiens
atatgttgtggcatg

SEQ ID NO: 1305139 - DNA, 15 bp, Homo sapiens
catatgttgtggcat

SEQ ID NO: 1305140 - DNA, 15 bp, Homo sapiens
acatatgttgtggca

SEQ ID NO: 1305141 - DNA, 15 bp, Homo sapiens
cacatatgttgtggc

SEQ ID NO: 1305142 - DNA, 15 bp, Homo sapiens
acacatatgttgtgg

SEQ ID NO: 1305143 - DNA, 15 bp, Homo sapiens
tacacatatgttgtg

SEQ ID NO: 1305144 - DNA, 15 bp, Homo sapiens
gtacacatatgttgt

SEQ ID NO: 1305145 - DNA, 15 bp, Homo sapiens
ggtacacatatgttg

SEQ ID NO: 1305146 - DNA, 15 bp, Homo sapiens
aggtacacatatgtt

SEQ ID NO: 1305147 - DNA, 15 bp, Homo sapiens
aaggtacacatatgt

SEQ ID NO: 1305148 - DNA, 15 bp, Homo sapiens
caaggtacacatatg

SEQ ID NO: 1305149 - DNA, 15 bp, Homo sapiens
tcaaggtacacatat

SEQ ID NO: 1305150 - DNA, 15 bp, Homo sapiens
ttcaaggtacacata

SEQ ID NO: 1305151 - DNA, 15 bp, Homo sapiens
tttcaaggtacacat

SEQ ID NO: 1305152 - DNA, 15 bp, Homo sapiens
ctttcaaggtacaca

SEQ ID NO: 1305153 - DNA, 15 bp, Homo sapiens
gctttcaaggtacac

SEQ ID NO: 1305154 - DNA, 15 bp, Homo sapiens
tgctttcaaggtaca

SEQ ID NO: 1305155 - DNA, 15 bp, Homo sapiens
atgctttcaaggtac

SEQ ID NO: 1305156 - DNA, 15 bp, Homo sapiens
aatgctttcaaggta

SEQ ID NO: 1305157 - DNA, 15 bp, Homo sapiens
gcataatgctttcaa

SEQ ID NO: 1305158 - DNA, 15 bp, Homo sapiens
agcataatgctttca

SEQ ID NO: 1305159 - DNA, 15 bp, Homo sapiens
tagcataatgctttc

SEQ ID NO: 1305160 - DNA, 15 bp, Homo sapiens
ttagcataatgcttt

SEQ ID NO: 1305161 - DNA, 15 bp, Homo sapiens
cttagcataatgctt

SEQ ID NO: 1305162 - DNA, 15 bp, Homo sapiens
acttagcataatgct

SEQ ID NO: 1305163 - DNA, 15 bp, Homo sapiens
cacttagcataatgc

SEQ ID NO: 1305164 - DNA, 15 bp, Homo sapiens
cttccacttagcata

SEQ ID NO: 1305165 - DNA, 15 bp, Homo sapiens
tcttccacttagcat

SEQ ID NO: 1305166 - DNA, 15 bp, Homo sapiens
ttcttccacttagca

SEQ ID NO: 1305167 - DNA, 15 bp, Homo sapiens
tttcttccacttagc

SEQ ID NO: 1305168 - DNA, 15 bp, Homo sapiens
gtttcttccacttag

SEQ ID NO: 1305169 - DNA, 15 bp, Homo sapiens
agtttcttccactta

SEQ ID NO: 1305170 - DNA, 15 bp, Homo sapiens
tagtttcttccactt

SEQ ID NO: 1305171 - DNA, 15 bp, Homo sapiens
ctagtttcttccact

SEQ ID NO: 1305172 - DNA, 15 bp, Homo sapiens
actagtttcttccac

SEQ ID NO: 1305173 - DNA, 15 bp, Homo sapiens
gactagtttcttcca

SEQ ID NO: 1305174 - DNA, 15 bp, Homo sapiens
tgactagtttcttcc

SEQ ID NO: 1305175 - DNA, 15 bp, Homo sapiens
gtgactagtttcttc

SEQ ID NO: 1305176 - DNA, 15 bp, Homo sapiens
tgtgactagtttctt

SEQ ID NO: 1305177 - DNA, 15 bp, Homo sapiens
ttgtgactagtttct

SEQ ID NO: 1305178 - DNA, 15 bp, Homo sapiens
tttgtgactagtttc

SEQ ID NO: 1305179 - DNA, 15 bp, Homo sapiens
ttttgtgactagttt

SEQ ID NO: 1305180 - DNA, 15 bp, Homo sapiens
cttttgtgactagtt

SEQ ID NO: 1305181 - DNA, 15 bp, Homo sapiens
tcttttgtgactagt

SEQ ID NO: 1305182 - DNA, 15 bp, Homo sapiens
atcttttgtgactag

SEQ ID NO: 1305183 - DNA, 15 bp, Homo sapiens
gatcttttgtgacta

SEQ ID NO: 1305184 - DNA, 15 bp, Homo sapiens
tgatcttttgtgact

SEQ ID NO: 1305185 - DNA, 15 bp, Homo sapiens
gtgatcttttgtgac

SEQ ID NO: 1305186 - DNA, 15 bp, Homo sapiens
tgtgatcttttgtga

SEQ ID NO: 1305187 - DNA, 15 bp, Homo sapiens
gtgtgatcttttgtg

SEQ ID NO: 1305188 - DNA, 15 bp, Homo sapiens
tgtgtgatcttttgt

SEQ ID NO: 1305189 - DNA, 15 bp, Homo sapiens
ctgtgtgatcttttg

SEQ ID NO: 1305190 - DNA, 15 bp, Homo sapiens
actgtgtgatctttt

SEQ ID NO: 1305191 - DNA, 15 bp, Homo sapiens
tactgtgtgatcttt

SEQ ID NO: 1305192 - DNA, 15 bp, Homo sapiens
atactgtgtgatctt

SEQ ID NO: 1305193 - DNA, 15 bp, Homo sapiens
tatactgtgtgatct

SEQ ID NO: 1305194 - DNA, 15 bp, Homo sapiens
atatactgtgtgatc

SEQ ID NO: 1305195 - DNA, 15 bp, Homo sapiens
catatactgtgtgat

SEQ ID NO: 1305196 - DNA, 15 bp, Homo sapiens
tcatatactgtgtga

SEQ ID NO: 1305197 - DNA, 15 bp, Homo sapiens
gtcatatactgtgtg

SEQ ID NO: 1305198 - DNA, 15 bp, Homo sapiens
agtcatatactgtgt

SEQ ID NO: 1305199 - DNA, 15 bp, Homo sapiens
aagtcatatactgtg

SEQ ID NO: 1305200 - DNA, 15 bp, Homo sapiens
gaagtcatatactgt

SEQ ID NO: 1305201 - DNA, 15 bp, Homo sapiens
tgaagtcatatactg

SEQ ID NO: 1305202 - DNA, 15 bp, Homo sapiens
gtgaagtcatatact

SEQ ID NO: 1305203 - DNA, 15 bp, Homo sapiens
agtgaagtcatatac

SEQ ID NO: 1305204 - DNA, 15 bp, Homo sapiens
aagtgaagtcatata

SEQ ID NO: 1305205 - DNA, 15 bp, Homo sapiens
caagtgaagtcatat

SEQ ID NO: 1305206 - DNA, 15 bp, Homo sapiens
acaagtgaagtcata

SEQ ID NO: 1305207 - DNA, 15 bp, Homo sapiens
cacaagtgaagtcat

SEQ ID NO: 1305208 - DNA, 15 bp, Homo sapiens
acacaagtgaagtca

SEQ ID NO: 1305209 - DNA, 15 bp, Homo sapiens
tacacaagtgaagtc

SEQ ID NO: 1305210 - DNA, 15 bp, Homo sapiens
ttacacaagtgaagt

SEQ ID NO: 1305211 - DNA, 15 bp, Homo sapiens
tttacacaagtgaag

SEQ ID NO: 1305212 - DNA, 15 bp, Homo sapiens
ttttacacaagtgaa

SEQ ID NO: 1305213 - DNA, 15 bp, Homo sapiens
attttacacaagtga

SEQ ID NO: 1305214 - DNA, 15 bp, Homo sapiens
cattttacacaagtg

SEQ ID NO: 1305215 - DNA, 15 bp, Homo sapiens
acattttacacaagt

SEQ ID NO: 1305216 - DNA, 15 bp, Homo sapiens
gacattttacacaag

SEQ ID NO: 1305217 - DNA, 15 bp, Homo sapiens
tgacattttacacaa

SEQ ID NO: 1305218 - DNA, 15 bp, Homo sapiens
ttgacattttacaca

SEQ ID NO: 1305219 - DNA, 15 bp, Homo sapiens
cttgacattttacac

SEQ ID NO: 1305220 - DNA, 15 bp, Homo sapiens
tcttgacattttaca

SEQ ID NO: 1305221 - DNA, 15 bp, Homo sapiens
ttcttgacattttac

SEQ ID NO: 1305222 - DNA, 15 bp, Homo sapiens
attcttgacatttta

SEQ ID NO: 1305223 - DNA, 15 bp, Homo sapiens
tattcttgacatttt

SEQ ID NO: 1305224 - DNA, 15 bp, Homo sapiens
ctattcttgacattt

SEQ ID NO: 1305225 - DNA, 15 bp, Homo sapiens
cctattcttgacatt

SEQ ID NO: 1305226 - DNA, 15 bp, Homo sapiens
gcctattcttgacat

SEQ ID NO: 1305227 - DNA, 15 bp, Homo sapiens
tgcctattcttgaca

SEQ ID NO: 1305228 - DNA, 15 bp, Homo sapiens
ttgcctattcttgac

SEQ ID NO: 1305229 - DNA, 15 bp, Homo sapiens
tttgcctattcttga

SEQ ID NO: 1305230 - DNA, 15 bp, Homo sapiens
atttgcctattcttg

SEQ ID NO: 1305231 - DNA, 15 bp, Homo sapiens
tatttgcctattctt

SEQ ID NO: 1305232 - DNA, 15 bp, Homo sapiens
atatttgcctattct

SEQ ID NO: 1305233 - DNA, 15 bp, Homo sapiens
tatatttgcctattc

SEQ ID NO: 1305234 - DNA, 15 bp, Homo sapiens
atatatttgcctatt

SEQ ID NO: 1305235 - DNA, 15 bp, Homo sapiens
tatatatttgcctat

SEQ ID NO: 1305236 - DNA, 15 bp, Homo sapiens
ctatatatttgccta

SEQ ID NO: 1305237 - DNA, 15 bp, Homo sapiens
tctatatatttgcct

SEQ ID NO: 1305238 - DNA, 15 bp, Homo sapiens
ctctatatatttgcc

SEQ ID NO: 1305239 - DNA, 15 bp, Homo sapiens
actctatatatttgc

SEQ ID NO: 1305240 - DNA, 15 bp, Homo sapiens
gactctatatatttg

SEQ ID NO: 1305241 - DNA, 15 bp, Homo sapiens
tgactctatatattt

SEQ ID NO: 1305242 - DNA, 15 bp, Homo sapiens
ctgactctatatatt

SEQ ID NO: 1305243 - DNA, 15 bp, Homo sapiens
tctgactctatatat

SEQ ID NO: 1305244 - DNA, 15 bp, Homo sapiens
ctctgactctatata

SEQ ID NO: 1305245 - DNA, 15 bp, Homo sapiens
tctctgactctatat

SEQ ID NO: 1305246 - DNA, 15 bp, Homo sapiens
ttctctgactctata

SEQ ID NO: 1305247 - DNA, 15 bp, Homo sapiens
attctctgactctat

SEQ ID NO: 1305248 - DNA, 15 bp, Homo sapiens
tattctctgactcta

SEQ ID NO: 1305249 - DNA, 15 bp, Homo sapiens
ctattctctgactct

SEQ ID NO: 1305250 - DNA, 15 bp, Homo sapiens
tctattctctgactc

SEQ ID NO: 1305251 - DNA, 15 bp, Homo sapiens
atctattctctgact

SEQ ID NO: 1305252 - DNA, 15 bp, Homo sapiens
aatctattctctgac

SEQ ID NO: 1305253 - DNA, 15 bp, Homo sapiens
taatctattctctga

SEQ ID NO: 1305254 - DNA, 15 bp, Homo sapiens
gtaatctattctctg

SEQ ID NO: 1305255 - DNA, 15 bp, Homo sapiens
agtaatctattctct

SEQ ID NO: 1305256 - DNA, 15 bp, Homo sapiens
cagtaatctattctc

SEQ ID NO: 1305257 - DNA, 15 bp, Homo sapiens
tcagtaatctattct

SEQ ID NO: 1305258 - DNA, 15 bp, Homo sapiens
gtcagtaatctattc

SEQ ID NO: 1305259 - DNA, 15 bp, Homo sapiens
agtcagtaatctatt

SEQ ID NO: 1305260 - DNA, 15 bp, Homo sapiens
gagtcagtaatctat

SEQ ID NO: 1305261 - DNA, 15 bp, Homo sapiens
ggagtcagtaatcta

SEQ ID NO: 1305262 - DNA, 15 bp, Homo sapiens
aggagtcagtaatct

SEQ ID NO: 1305263 - DNA, 15 bp, Homo sapiens
aaggagtcagtaatc

SEQ ID NO: 1305264 - DNA, 15 bp, Homo sapiens
caaggagtcagtaat

SEQ ID NO: 1305265 - DNA, 15 bp, Homo sapiens
gcaaggagtcagtaa

SEQ ID NO: 1305266 - DNA, 15 bp, Homo sapiens
agcaaggagtcagta

SEQ ID NO: 1305267 - DNA, 15 bp, Homo sapiens
aagcaaggagtcagt

SEQ ID NO: 1305268 - DNA, 15 bp, Homo sapiens
caagcaaggagtcag

SEQ ID NO: 1305269 - DNA, 15 bp, Homo sapiens
acaagcaaggagtca

SEQ ID NO: 1305270 - DNA, 15 bp, Homo sapiens
cacaagcaaggagtc

SEQ ID NO: 1305271 - DNA, 15 bp, Homo sapiens
ccacaagcaaggagt

SEQ ID NO: 1305272 - DNA, 15 bp, Homo sapiens
cccacaagcaaggag

SEQ ID NO: 1305273 - DNA, 15 bp, Homo sapiens
ccccacaagcaagga

SEQ ID NO: 1305274 - DNA, 15 bp, Homo sapiens
tccccacaagcaagg

SEQ ID NO: 1305275 - DNA, 15 bp, Homo sapiens
ctccccacaagcaag

SEQ ID NO: 1305276 - DNA, 15 bp, Homo sapiens
tctccccacaagcaa

SEQ ID NO: 1305277 - DNA, 15 bp, Homo sapiens
atctccccacaagca

SEQ ID NO: 1305278 - DNA, 15 bp, Homo sapiens
aatctccccacaagc

SEQ ID NO: 1305279 - DNA, 15 bp, Homo sapiens
caatctccccacaag

SEQ ID NO: 1305280 - DNA, 15 bp, Homo sapiens
ccaatctccccacaa

SEQ ID NO: 1305281 - DNA, 15 bp, Homo sapiens
cccaatctccccaca

SEQ ID NO: 1305282 - DNA, 15 bp, Homo sapiens
ccccaatctccccac

SEQ ID NO: 1305283 - DNA, 15 bp, Homo sapiens
cccccaatctcccca

SEQ ID NO: 1305284 - DNA, 15 bp, Homo sapiens
acccccaatctcccc

SEQ ID NO: 1305285 - DNA, 15 bp, Homo sapiens
aacccccaatctccc

SEQ ID NO: 1305286 - DNA, 15 bp, Homo sapiens
caacccccaatctcc

SEQ ID NO: 1305287 - DNA, 15 bp, Homo sapiens
tcaacccccaatctc

SEQ ID NO: 1305288 - DNA, 15 bp, Homo sapiens
atcaacccccaatct

SEQ ID NO: 1305289 - DNA, 15 bp, Homo sapiens
tatcaacccccaatc

SEQ ID NO: 1305290 - DNA, 15 bp, Homo sapiens
ctatcaacccccaat

SEQ ID NO: 1305291 - DNA, 15 bp, Homo sapiens
gctatcaacccccaa

SEQ ID NO: 1305292 - DNA, 15 bp, Homo sapiens
agctatcaaccccca

SEQ ID NO: 1305293 - DNA, 15 bp, Homo sapiens
cagctatcaaccccc

SEQ ID NO: 1305294 - DNA, 15 bp, Homo sapiens
tcagctatcaacccc

SEQ ID NO: 1305295 - DNA, 15 bp, Homo sapiens
ttcagctatcaaccc

SEQ ID NO: 1305296 - DNA, 15 bp, Homo sapiens
cttcagctatcaacc

SEQ ID NO: 1305297 - DNA, 15 bp, Homo sapiens
ccttcagctatcaac

SEQ ID NO: 1305298 - DNA, 15 bp, Homo sapiens
gccttcagctatcaa

SEQ ID NO: 1305299 - DNA, 15 bp, Homo sapiens
agccttcagctatca

SEQ ID NO: 1305300 - DNA, 15 bp, Homo sapiens
tagccttcagctatc

SEQ ID NO: 1305301 - DNA, 15 bp, Homo sapiens
gtagccttcagctat

SEQ ID NO: 1305302 - DNA, 15 bp, Homo sapiens
tgtagccttcagcta

SEQ ID NO: 1305303 - DNA, 15 bp, Homo sapiens
ctgtagccttcagct

SEQ ID NO: 1305304 - DNA, 15 bp, Homo sapiens
cctgtagccttcagc

SEQ ID NO: 1305305 - DNA, 15 bp, Homo sapiens
ccctgtagccttcag

SEQ ID NO: 1305306 - DNA, 15 bp, Homo sapiens
gccctgtagccttca

SEQ ID NO: 1305307 - DNA, 15 bp, Homo sapiens
agccctgtagccttc

SEQ ID NO: 1305308 - DNA, 15 bp, Homo sapiens
aagccctgtagcctt

SEQ ID NO: 1305309 - DNA, 15 bp, Homo sapiens
gaagccctgtagcct

SEQ ID NO: 1305310 - DNA, 15 bp, Homo sapiens
agaagccctgtagcc

SEQ ID NO: 1305311 - DNA, 15 bp, Homo sapiens
aagaagccctgtagc

SEQ ID NO: 1305312 - DNA, 15 bp, Homo sapiens
aaagaagccctgtag

SEQ ID NO: 1305313 - DNA, 15 bp, Homo sapiens
aaaagaagccctgta

SEQ ID NO: 1305314 - DNA, 15 bp, Homo sapiens
aaaaagaagccctgt

SEQ ID NO: 1305315 - DNA, 15 bp, Homo sapiens
caaaaagaagccctg

SEQ ID NO: 1305316 - DNA, 15 bp, Homo sapiens
tcaaaaagaagccct

SEQ ID NO: 1305317 - DNA, 15 bp, Homo sapiens
ctcaaaaagaagccc

SEQ ID NO: 1305318 - DNA, 15 bp, Homo sapiens
cctcaaaaagaagcc

SEQ ID NO: 1305319 - DNA, 15 bp, Homo sapiens
acctcaaaaagaagc

SEQ ID NO: 1305320 - DNA, 15 bp, Homo sapiens
cacctcaaaaagaag

SEQ ID NO: 1305321 - DNA, 15 bp, Homo sapiens
tcacctcaaaaagaa

SEQ ID NO: 1305322 - DNA, 15 bp, Homo sapiens
atcacctcaaaaaga

SEQ ID NO: 1305323 - DNA, 15 bp, Homo sapiens
catcacctcaaaaag

SEQ ID NO: 1305324 - DNA, 15 bp, Homo sapiens
tcatcacctcaaaaa

SEQ ID NO: 1305325 - DNA, 15 bp, Homo sapiens
ttcatcacctcaaaa

SEQ ID NO: 1305326 - DNA, 15 bp, Homo sapiens
tttcatcacctcaaa

SEQ ID NO: 1305327 - DNA, 15 bp, Homo sapiens
ctttcatcacctcaa

SEQ ID NO: 1305328 - DNA, 15 bp, Homo sapiens
actttcatcacctca

SEQ ID NO: 1305329 - DNA, 15 bp, Homo sapiens
cactttcatcacctc

SEQ ID NO: 1305330 - DNA, 15 bp, Homo sapiens
acactttcatcacct

SEQ ID NO: 1305331 - DNA, 15 bp, Homo sapiens
aacactttcatcacc

SEQ ID NO: 1305332 - DNA, 15 bp, Homo sapiens
aaacactttcatcac

SEQ ID NO: 1305333 - DNA, 15 bp, Homo sapiens
aaaacactttcatca

SEQ ID NO: 1305334 - DNA, 15 bp, Homo sapiens
taaaacactttcatc

SEQ ID NO: 1305335 - DNA, 15 bp, Homo sapiens
ttaaaacactttcat

SEQ ID NO: 1305336 - DNA, 15 bp, Homo sapiens
tttaaaacactttca

SEQ ID NO: 1305337 - DNA, 15 bp, Homo sapiens
ttttaaaacactttc

SEQ ID NO: 1305338 - DNA, 15 bp, Homo sapiens
attttaaaacacttt

SEQ ID NO: 1305339 - DNA, 15 bp, Homo sapiens
aattttaaaacactt

SEQ ID NO: 1305340 - DNA, 15 bp, Homo sapiens
caattttaaaacact

SEQ ID NO: 1305341 - DNA, 15 bp, Homo sapiens
tcaattttaaaacac

SEQ ID NO: 1305342 - DNA, 15 bp, Homo sapiens
atcaattttaaaaca

SEQ ID NO: 1305343 - DNA, 15 bp, Homo sapiens
aatcaattttaaaac

SEQ ID NO: 1305344 - DNA, 15 bp, Homo sapiens
caatcaattttaaaa

SEQ ID NO: 1305345 - DNA, 15 bp, Homo sapiens
acaatcaattttaaa

SEQ ID NO: 1305346 - DNA, 15 bp, Homo sapiens
gacaatcaattttaa

SEQ ID NO: 1305347 - DNA, 15 bp, Homo sapiens
ggacaatcaatttta

SEQ ID NO: 1305348 - DNA, 15 bp, Homo sapiens
gggacaatcaatttt

SEQ ID NO: 1305349 - DNA, 15 bp, Homo sapiens
tgggacaatcaattt

SEQ ID NO: 1305350 - DNA, 15 bp, Homo sapiens
atgggacaatcaatt

SEQ ID NO: 1305351 - DNA, 15 bp, Homo sapiens
aatgggacaatcaat

SEQ ID NO: 1305352 - DNA, 15 bp, Homo sapiens
caatgggacaatcaa

SEQ ID NO: 1305353 - DNA, 15 bp, Homo sapiens
tcaatgggacaatca

SEQ ID NO: 1305354 - DNA, 15 bp, Homo sapiens
ttcaatgggacaatc

SEQ ID NO: 1305355 - DNA, 15 bp, Homo sapiens
attcaatgggacaat

SEQ ID NO: 1305356 - DNA, 15 bp, Homo sapiens
aattcaatgggacaa

SEQ ID NO: 1305357 - DNA, 15 bp, Homo sapiens
aaattcaatgggaca

SEQ ID NO: 1305358 - DNA, 15 bp, Homo sapiens
aaaattcaatgggac

SEQ ID NO: 1305359 - DNA, 15 bp, Homo sapiens
taaaattcaatggga

SEQ ID NO: 1305360 - DNA, 15 bp, Homo sapiens
ttaaaattcaatggg

SEQ ID NO: 1305361 - DNA, 15 bp, Homo sapiens
tttaaaattcaatgg

SEQ ID NO: 1305362 - DNA, 15 bp, Homo sapiens
gtttaaaattcaatg

SEQ ID NO: 1305363 - DNA, 15 bp, Homo sapiens
ggtttaaaattcaat

SEQ ID NO: 1305364 - DNA, 15 bp, Homo sapiens
aggtttaaaattcaa

SEQ ID NO: 1305365 - DNA, 15 bp, Homo sapiens
gaggtttaaaattca

SEQ ID NO: 1305366 - DNA, 15 bp, Homo sapiens
tgaggtttaaaattc

SEQ ID NO: 1305367 - DNA, 15 bp, Homo sapiens
ttgaggtttaaaatt

SEQ ID NO: 1305368 - DNA, 15 bp, Homo sapiens
tttgaggtttaaaat

SEQ ID NO: 1305369 - DNA, 15 bp, Homo sapiens
atttgaggtttaaaa

SEQ ID NO: 1305370 - DNA, 15 bp, Homo sapiens
catttgaggtttaaa

SEQ ID NO: 1305371 - DNA, 15 bp, Homo sapiens
ccatttgaggtttaa

SEQ ID NO: 1305372 - DNA, 15 bp, Homo sapiens
cccatttgaggttta

SEQ ID NO: 1305373 - DNA, 15 bp, Homo sapiens
acccatttgaggttt

SEQ ID NO: 1305374 - DNA, 15 bp, Homo sapiens
cacccatttgaggtt

SEQ ID NO: 1305375 - DNA, 15 bp, Homo sapiens
tcacccatttgaggt

SEQ ID NO: 1305376 - DNA, 15 bp, Homo sapiens
ttcacccatttgagg

SEQ ID NO: 1305377 - DNA, 15 bp, Homo sapiens
attcacccatttgag

SEQ ID NO: 1305378 - DNA, 15 bp, Homo sapiens
aattcacccatttga

SEQ ID NO: 1305379 - DNA, 15 bp, Homo sapiens
caattcacccatttg

SEQ ID NO: 1305380 - DNA, 15 bp, Homo sapiens
acaattcacccattt

SEQ ID NO: 1305381 - DNA, 15 bp, Homo sapiens
tacaattcacccatt

SEQ ID NO: 1305382 - DNA, 15 bp, Homo sapiens
atacaattcacccat

SEQ ID NO: 1305383 - DNA, 15 bp, Homo sapiens
catacaattcaccca

SEQ ID NO: 1305384 - DNA, 15 bp, Homo sapiens
ccatacaattcaccc

SEQ ID NO: 1305385 - DNA, 15 bp, Homo sapiens
accatacaattcacc

SEQ ID NO: 1305386 - DNA, 15 bp, Homo sapiens
caccatacaattcac

SEQ ID NO: 1305387 - DNA, 15 bp, Homo sapiens
acaccatacaattca

SEQ ID NO: 1305388 - DNA, 15 bp, Homo sapiens
tacaccatacaattc

SEQ ID NO: 1305389 - DNA, 15 bp, Homo sapiens
ctacaccatacaatt

SEQ ID NO: 1305390 - DNA, 15 bp, Homo sapiens
tctacaccatacaat

SEQ ID NO: 1305391 - DNA, 15 bp, Homo sapiens
ttctacaccatacaa

SEQ ID NO: 1305392 - DNA, 15 bp, Homo sapiens
tttctacaccataca

SEQ ID NO: 1305393 - DNA, 15 bp, Homo sapiens
gtttctacaccatac

SEQ ID NO: 1305394 - DNA, 15 bp, Homo sapiens
agtttctacaccata

SEQ ID NO: 1305395 - DNA, 15 bp, Homo sapiens
tagtttctacaccat

SEQ ID NO: 1305396 - DNA, 15 bp, Homo sapiens
ctagtttctacacca

SEQ ID NO: 1305397 - DNA, 15 bp, Homo sapiens
tctagtttctacacc

SEQ ID NO: 1305398 - DNA, 15 bp, Homo sapiens
ttctagtttctacac

SEQ ID NO: 1305399 - DNA, 15 bp, Homo sapiens
gttctagtttctaca

SEQ ID NO: 1305400 - DNA, 15 bp, Homo sapiens
agttctagtttctac

SEQ ID NO: 1305401 - DNA, 15 bp, Homo sapiens
gagttctagtttcta

SEQ ID NO: 1305402 - DNA, 15 bp, Homo sapiens
tgagttctagtttct

SEQ ID NO: 1305403 - DNA, 15 bp, Homo sapiens
ttgagttctagtttc

SEQ ID NO: 1305404 - DNA, 15 bp, Homo sapiens
attgagttctagttt

SEQ ID NO: 1305405 - DNA, 15 bp, Homo sapiens
tattgagttctagtt

SEQ ID NO: 1305406 - DNA, 15 bp, Homo sapiens
ttattgagttctagt

SEQ ID NO: 1305407 - DNA, 15 bp, Homo sapiens
tttattgagttctag

SEQ ID NO: 1305408 - DNA, 15 bp, Homo sapiens
ctttattgagttcta

SEQ ID NO: 1305409 - DNA, 15 bp, Homo sapiens
gctttattgagttct

SEQ ID NO: 1305410 - DNA, 15 bp, Homo sapiens
ggctttattgagttc

SEQ ID NO: 1305411 - DNA, 15 bp, Homo sapiens
tggctttattgagtt

SEQ ID NO: 1305412 - DNA, 15 bp, Homo sapiens
atggctttattgagt

SEQ ID NO: 1305413 - DNA, 15 bp, Homo sapiens
aatggctttattgag

SEQ ID NO: 1305414 - DNA, 15 bp, Homo sapiens
taatggctttattga

SEQ ID NO: 1305415 - DNA, 15 bp, Homo sapiens
ctaatggctttattg

SEQ ID NO: 1305416 - DNA, 15 bp, Homo sapiens
gctaatggctttatt

SEQ ID NO: 1305417 - DNA, 15 bp, Homo sapiens
tgctaatggctttat

SEQ ID NO: 1305418 - DNA, 15 bp, Homo sapiens
ttgctaatggcttta

SEQ ID NO: 1305419 - DNA, 15 bp, Homo sapiens
tttgctaatggcttt

SEQ ID NO: 1305420 - DNA, 15 bp, Homo sapiens
atttgctaatggctt

SEQ ID NO: 1305421 - DNA, 15 bp, Homo sapiens
tatttgctaatggct

SEQ ID NO: 1305422 - DNA, 15 bp, Homo sapiens
ttatttgctaatggc

SEQ ID NO: 1305423 - DNA, 15 bp, Homo sapiens
attatttgctaatgg

SEQ ID NO: 1305424 - DNA, 15 bp, Homo sapiens
cattatttgctaatg

SEQ ID NO: 1305425 - DNA, 15 bp, Homo sapiens
tcattatttgctaat

SEQ ID NO: 1305426 - DNA, 15 bp, Homo sapiens
gtcattatttgctaa

SEQ ID NO: 1305427 - DNA, 15 bp, Homo sapiens
agtcattatttgcta

SEQ ID NO: 1305428 - DNA, 15 bp, Homo sapiens
cagtcattatttgct

SEQ ID NO: 1305429 - DNA, 15 bp, Homo sapiens
acagtcattatttgc

SEQ ID NO: 1305430 - DNA, 15 bp, Homo sapiens
cacagtcattatttg

SEQ ID NO: 1305431 - DNA, 15 bp, Homo sapiens
tcacagtcattattt

SEQ ID NO: 1305432 - DNA, 15 bp, Homo sapiens
atcacagtcattatt

SEQ ID NO: 1305433 - DNA, 15 bp, Homo sapiens
catcacagtcattat

SEQ ID NO: 1305434 - DNA, 15 bp, Homo sapiens
acatcacagtcatta

SEQ ID NO: 1305435 - DNA, 15 bp, Homo sapiens
cacatcacagtcatt

SEQ ID NO: 1305436 - DNA, 15 bp, Homo sapiens
ccacatcacagtcat

SEQ ID NO: 1305437 - DNA, 15 bp, Homo sapiens
tccacatcacagtca

SEQ ID NO: 1305438 - DNA, 15 bp, Homo sapiens
ctccacatcacagtc

SEQ ID NO: 1305439 - DNA, 15 bp, Homo sapiens
tctccacatcacagt

SEQ ID NO: 1305440 - DNA, 15 bp, Homo sapiens
ttctccacatcacag

SEQ ID NO: 1305441 - DNA, 15 bp, Homo sapiens
tattctccacatcac

SEQ ID NO: 1305442 - DNA, 15 bp, Homo sapiens
ctattctccacatca

SEQ ID NO: 1305443 - DNA, 15 bp, Homo sapiens
tctattctccacatc

SEQ ID NO: 1305444 - DNA, 15 bp, Homo sapiens
ctctattctccacat

SEQ ID NO: 1305445 - DNA, 15 bp, Homo sapiens
actctattctccaca

SEQ ID NO: 1305446 - DNA, 15 bp, Homo sapiens
aactctattctccac

SEQ ID NO: 1305447 - DNA, 15 bp, Homo sapiens
gaactctattctcca

SEQ ID NO: 1305448 - DNA, 15 bp, Homo sapiens
tgaactctattctcc

SEQ ID NO: 1305449 - DNA, 15 bp, Homo sapiens
ctgaactctattctc

SEQ ID NO: 1305450 - DNA, 15 bp, Homo sapiens
cctgaactctattct

SEQ ID NO: 1305451 - DNA, 15 bp, Homo sapiens
ccctgaactctattc

SEQ ID NO: 1305452 - DNA, 15 bp, Homo sapiens
tccctgaactctatt

SEQ ID NO: 1305453 - DNA, 15 bp, Homo sapiens
ttccctgaactctat

SEQ ID NO: 1305454 - DNA, 15 bp, Homo sapiens
tttccctgaactcta

SEQ ID NO: 1305455 - DNA, 15 bp, Homo sapiens
ctttccctgaactct

SEQ ID NO: 1305456 - DNA, 15 bp, Homo sapiens
tctttccctgaactc

SEQ ID NO: 1305457 - DNA, 15 bp, Homo sapiens
gtctttccctgaact

SEQ ID NO: 1305458 - DNA, 15 bp, Homo sapiens
tgtctttccctgaac

SEQ ID NO: 1305459 - DNA, 15 bp, Homo sapiens
ttgtctttccctgaa

SEQ ID NO: 1305460 - DNA, 15 bp, Homo sapiens
tttgtctttccctga

SEQ ID NO: 1305461 - DNA, 15 bp, Homo sapiens
ttttgtctttccctg

SEQ ID NO: 1305462 - DNA, 15 bp, Homo sapiens
cttttgtctttccct

SEQ ID NO: 1305463 - DNA, 15 bp, Homo sapiens
gcttttgtctttccc

SEQ ID NO: 1305464 - DNA, 15 bp, Homo sapiens
tgcttttgtctttcc

SEQ ID NO: 1305465 - DNA, 15 bp, Homo sapiens
ttgcttttgtctttc

SEQ ID NO: 1305466 - DNA, 15 bp, Homo sapiens
cttgcttttgtcttt

SEQ ID NO: 1305467 - DNA, 15 bp, Homo sapiens
ccttgcttttgtctt

SEQ ID NO: 1305468 - DNA, 15 bp, Homo sapiens
tccttgcttttgtct

SEQ ID NO: 1305469 - DNA, 15 bp, Homo sapiens
ttccttgcttttgtc

SEQ ID NO: 1305470 - DNA, 15 bp, Homo sapiens
tttccttgcttttgt

SEQ ID NO: 1305471 - DNA, 15 bp, Homo sapiens
ttttccttgcttttg

SEQ ID NO: 1305472 - DNA, 15 bp, Homo sapiens
attttccttgctttt

SEQ ID NO: 1305473 - DNA, 15 bp, Homo sapiens
tattttccttgcttt

SEQ ID NO: 1305474 - DNA, 15 bp, Homo sapiens
atattttccttgctt

SEQ ID NO: 1305475 - DNA, 15 bp, Homo sapiens
aatattttccttgct

SEQ ID NO: 1305476 - DNA, 15 bp, Homo sapiens
aaatattttccttgc

SEQ ID NO: 1305477 - DNA, 15 bp, Homo sapiens
caaatattttccttg

SEQ ID NO: 1305478 - DNA, 15 bp, Homo sapiens
ccaaatattttcctt

SEQ ID NO: 1305479 - DNA, 15 bp, Homo sapiens
cccaaatattttcct

SEQ ID NO: 1305480 - DNA, 15 bp, Homo sapiens
tcccaaatattttcc

SEQ ID NO: 1305481 - DNA, 15 bp, Homo sapiens
ctcccaaatattttc

SEQ ID NO: 1305482 - DNA, 15 bp, Homo sapiens
cctcccaaatatttt

SEQ ID NO: 1305483 - DNA, 15 bp, Homo sapiens
gcctcccaaatattt

SEQ ID NO: 1305484 - DNA, 15 bp, Homo sapiens
tgcctcccaaatatt

SEQ ID NO: 1305485 - DNA, 15 bp, Homo sapiens
ctgcctcccaaatat

SEQ ID NO: 1305486 - DNA, 15 bp, Homo sapiens
actgcctcccaaata

SEQ ID NO: 1305487 - DNA, 15 bp, Homo sapiens
aactgcctcccaaat

SEQ ID NO: 1305488 - DNA, 15 bp, Homo sapiens
aaactgcctcccaaa

SEQ ID NO: 1305489 - DNA, 15 bp, Homo sapiens
aaaactgcctcccaa

SEQ ID NO: 1305490 - DNA, 15 bp, Homo sapiens
gaaaactgcctccca

SEQ ID NO: 1305491 - DNA, 15 bp, Homo sapiens
agaaaactgcctccc

SEQ ID NO: 1305492 - DNA, 15 bp, Homo sapiens
aagaaaactgcctcc

SEQ ID NO: 1305493 - DNA, 15 bp, Homo sapiens
taagaaaactgcctc

SEQ ID NO: 1305494 - DNA, 15 bp, Homo sapiens
ctaagaaaactgcct

SEQ ID NO: 1305495 - DNA, 15 bp, Homo sapiens
cctaagaaaactgcc

SEQ ID NO: 1305496 - DNA, 15 bp, Homo sapiens
acctaagaaaactgc

SEQ ID NO: 1305497 - DNA, 15 bp, Homo sapiens
gacctaagaaaactg

SEQ ID NO: 1305498 - DNA, 15 bp, Homo sapiens
agacctaagaaaact

SEQ ID NO: 1305499 - DNA, 15 bp, Homo sapiens
gagacctaagaaaac

SEQ ID NO: 1305500 - DNA, 15 bp, Homo sapiens
tgagacctaagaaaa

SEQ ID NO: 1305501 - DNA, 15 bp, Homo sapiens
ttgagacctaagaaa

SEQ ID NO: 1305502 - DNA, 15 bp, Homo sapiens
gttgagacctaagaa

SEQ ID NO: 1305503 - DNA, 15 bp, Homo sapiens
agttgagacctaaga

SEQ ID NO: 1305504 - DNA, 15 bp, Homo sapiens
cagttgagacctaag

SEQ ID NO: 1305505 - DNA, 15 bp, Homo sapiens
tcagttgagacctaa

SEQ ID NO: 1305506 - DNA, 15 bp, Homo sapiens
ctcagttgagaccta

SEQ ID NO: 1305507 - DNA, 15 bp, Homo sapiens
tctcagttgagacct

SEQ ID NO: 1305508 - DNA, 15 bp, Homo sapiens
ctctcagttgagacc

SEQ ID NO: 1305509 - DNA, 15 bp, Homo sapiens
cctctcagttgagac

SEQ ID NO: 1305510 - DNA, 15 bp, Homo sapiens
tcctctcagttgaga

SEQ ID NO: 1305511 - DNA, 15 bp, Homo sapiens
atcctctcagttgag

SEQ ID NO: 1305512 - DNA, 15 bp, Homo sapiens
catcctctcagttga

SEQ ID NO: 1305513 - DNA, 15 bp, Homo sapiens
gcatcctctcagttg

SEQ ID NO: 1305514 - DNA, 15 bp, Homo sapiens
agcatcctctcagtt

SEQ ID NO: 1305515 - DNA, 15 bp, Homo sapiens
cagcatcctctcagt

SEQ ID NO: 1305516 - DNA, 15 bp, Homo sapiens
gcagcatcctctcag

SEQ ID NO: 1305517 - DNA, 15 bp, Homo sapiens
ggcagcatcctctca

SEQ ID NO: 1305518 - DNA, 15 bp, Homo sapiens
aggcagcatcctctc

SEQ ID NO: 1305519 - DNA, 15 bp, Homo sapiens
aaggcagcatcctct

SEQ ID NO: 1305520 - DNA, 15 bp, Homo sapiens
caaggcagcatcctc

SEQ ID NO: 1305521 - DNA, 15 bp, Homo sapiens
ccaaggcagcatcct

SEQ ID NO: 1305522 - DNA, 15 bp, Homo sapiens
cccaaggcagcatcc

SEQ ID NO: 1305523 - DNA, 15 bp, Homo sapiens
tcccaaggcagcatc

SEQ ID NO: 1305524 - DNA, 15 bp, Homo sapiens
ctcccaaggcagcat

SEQ ID NO: 1305525 - DNA, 15 bp, Homo sapiens
tctcccaaggcagca

SEQ ID NO: 1305526 - DNA, 15 bp, Homo sapiens
ctctcccaaggcagc

SEQ ID NO: 1305527 - DNA, 15 bp, Homo sapiens
cctctcccaaggcag

SEQ ID NO: 1305528 - DNA, 15 bp, Homo sapiens
acctctcccaaggca

SEQ ID NO: 1305529 - DNA, 15 bp, Homo sapiens
gacctctcccaaggc

SEQ ID NO: 1305530 - DNA, 15 bp, Homo sapiens
ggacctctcccaagg

SEQ ID NO: 1305531 - DNA, 15 bp, Homo sapiens
cggacctctcccaag

SEQ ID NO: 1305532 - DNA, 15 bp, Homo sapiens
tcggacctctcccaa

SEQ ID NO: 1305533 - DNA, 15 bp, Homo sapiens
ctcggacctctccca

SEQ ID NO: 1305534 - DNA, 15 bp, Homo sapiens
cctcggacctctccc

SEQ ID NO: 1305535 - DNA, 15 bp, Homo sapiens
gcctcggacctctcc

SEQ ID NO: 1305536 - DNA, 15 bp, Homo sapiens
ggcctcggacctctc

SEQ ID NO: 1305537 - DNA, 15 bp, Homo sapiens
tggcctcggacctct

SEQ ID NO: 1305538 - DNA, 15 bp, Homo sapiens
atggcctcggacctc

SEQ ID NO: 1305539 - DNA, 15 bp, Homo sapiens
aatggcctcggacct

SEQ ID NO: 1305540 - DNA, 15 bp, Homo sapiens
caatggcctcggacc

SEQ ID NO: 1305541 - DNA, 15 bp, Homo sapiens
ccaatggcctcggac

SEQ ID NO: 1305542 - DNA, 15 bp, Homo sapiens
cccaatggcctcgga

SEQ ID NO: 1305543 - DNA, 15 bp, Homo sapiens
ccccaatggcctcgg

SEQ ID NO: 1305544 - DNA, 15 bp, Homo sapiens
accccaatggcctcg

SEQ ID NO: 1305545 - DNA, 15 bp, Homo sapiens
caccccaatggcctc

SEQ ID NO: 1305546 - DNA, 15 bp, Homo sapiens
acaccccaatggcct

SEQ ID NO: 1305547 - DNA, 15 bp, Homo sapiens
cacaccccaatggcc

SEQ ID NO: 1305548 - DNA, 15 bp, Homo sapiens
tcacaccccaatggc

SEQ ID NO: 1305549 - DNA, 15 bp, Homo sapiens
ctcacaccccaatgg

SEQ ID NO: 1305550 - DNA, 15 bp, Homo sapiens
gctcacaccccaatg

SEQ ID NO: 1305551 - DNA, 15 bp, Homo sapiens
tgctcacaccccaat

SEQ ID NO: 1305552 - DNA, 15 bp, Homo sapiens
gtgctcacaccccaa

SEQ ID NO: 1305553 - DNA, 15 bp, Homo sapiens
tgtgctcacacccca

SEQ ID NO: 1305554 - DNA, 15 bp, Homo sapiens
atgtgctcacacccc

SEQ ID NO: 1305555 - DNA, 15 bp, Homo sapiens
catgtgctcacaccc

SEQ ID NO: 1305556 - DNA, 15 bp, Homo sapiens
gcatgtgctcacacc

SEQ ID NO: 1305557 - DNA, 15 bp, Homo sapiens
agcatgtgctcacac

SEQ ID NO: 1305558 - DNA, 15 bp, Homo sapiens
cagcatgtgctcaca

SEQ ID NO: 1305559 - DNA, 15 bp, Homo sapiens
ccagcatgtgctcac

SEQ ID NO: 1305560 - DNA, 15 bp, Homo sapiens
tccagcatgtgctca

SEQ ID NO: 1305561 - DNA, 15 bp, Homo sapiens
ctccagcatgtgctc

SEQ ID NO: 1305562 - DNA, 15 bp, Homo sapiens
cctccagcatgtgct

SEQ ID NO: 1305563 - DNA, 15 bp, Homo sapiens
gcctccagcatgtgc

SEQ ID NO: 1305564 - DNA, 15 bp, Homo sapiens
cgcctccagcatgtg

SEQ ID NO: 1305565 - DNA, 15 bp, Homo sapiens
acgcctccagcatgt

SEQ ID NO: 1305566 - DNA, 15 bp, Homo sapiens
gacgcctccagcatg

SEQ ID NO: 1305567 - DNA, 15 bp, Homo sapiens
tgacgcctccagcat

SEQ ID NO: 1305568 - DNA, 15 bp, Homo sapiens
gtgacgcctccagca

SEQ ID NO: 1305569 - DNA, 15 bp, Homo sapiens
tgtgacgcctccagc

SEQ ID NO: 1305570 - DNA, 15 bp, Homo sapiens
ctgtgacgcctccag

SEQ ID NO: 1305571 - DNA, 15 bp, Homo sapiens
tctgtgacgcctcca

SEQ ID NO: 1305572 - DNA, 15 bp, Homo sapiens
gtctgtgacgcctcc

SEQ ID NO: 1305573 - DNA, 15 bp, Homo sapiens
tgtctgtgacgcctc

SEQ ID NO: 1305574 - DNA, 15 bp, Homo sapiens
ctgtctgtgacgcct

SEQ ID NO: 1305575 - DNA, 15 bp, Homo sapiens
tctgtctgtgacgcc

SEQ ID NO: 1305576 - DNA, 15 bp, Homo sapiens
ctctgtctgtgacgc

SEQ ID NO: 1305577 - DNA, 15 bp, Homo sapiens
gctctgtctgtgacg

SEQ ID NO: 1305578 - DNA, 15 bp, Homo sapiens
tgctctgtctgtgac

SEQ ID NO: 1305579 - DNA, 15 bp, Homo sapiens
ctgctctgtctgtga

SEQ ID NO: 1305580 - DNA, 15 bp, Homo sapiens
gctgctctgtctgtg

SEQ ID NO: 1305581 - DNA, 15 bp, Homo sapiens
agctgctctgtctgt

SEQ ID NO: 1305582 - DNA, 15 bp, Homo sapiens
cagctgctctgtctg

SEQ ID NO: 1305583 - DNA, 15 bp, Homo sapiens
acagctgctctgtct

SEQ ID NO: 1305584 - DNA, 15 bp, Homo sapiens
aacagctgctctgtc

SEQ ID NO: 1305585 - DNA, 15 bp, Homo sapiens
aaacagctgctctgt

SEQ ID NO: 1305586 - DNA, 15 bp, Homo sapiens
taaacagctgctctg

SEQ ID NO: 1305587 - DNA, 15 bp, Homo sapiens
ctaaacagctgctct

SEQ ID NO: 1305588 - DNA, 15 bp, Homo sapiens
actaaacagctgctc

SEQ ID NO: 1305589 - DNA, 15 bp, Homo sapiens
aactaaacagctgct

SEQ ID NO: 1305590 - DNA, 15 bp, Homo sapiens
caactaaacagctgc

SEQ ID NO: 1305591 - DNA, 15 bp, Homo sapiens
tcaactaaacagctg

SEQ ID NO: 1305592 - DNA, 15 bp, Homo sapiens
ttcaactaaacagct

SEQ ID NO: 1305593 - DNA, 15 bp, Homo sapiens
tttcaactaaacagc

SEQ ID NO: 1305594 - DNA, 15 bp, Homo sapiens
ttttcaactaaacag

SEQ ID NO: 1305595 - DNA, 15 bp, Homo sapiens
attttcaactaaaca

SEQ ID NO: 1305596 - DNA, 15 bp, Homo sapiens
cattttcaactaaac

SEQ ID NO: 1305597 - DNA, 15 bp, Homo sapiens
ccattttcaactaaa

SEQ ID NO: 1305598 - DNA, 15 bp, Homo sapiens
tccattttcaactaa

SEQ ID NO: 1305599 - DNA, 15 bp, Homo sapiens
ctccattttcaacta

SEQ ID NO: 1305600 - DNA, 15 bp, Homo sapiens
tctccattttcaact

SEQ ID NO: 1305601 - DNA, 15 bp, Homo sapiens
ctctccattttcaac

SEQ ID NO: 1305602 - DNA, 15 bp, Homo sapiens
cctctccattttcaa

SEQ ID NO: 1305603 - DNA, 15 bp, Homo sapiens
tcctctccattttca

SEQ ID NO: 1305604 - DNA, 15 bp, Homo sapiens
ttcctctccattttc

SEQ ID NO: 1305605 - DNA, 15 bp, Homo sapiens
attcctctccatttt

SEQ ID NO: 1305606 - DNA, 15 bp, Homo sapiens
gattcctctccattt

SEQ ID NO: 1305607 - DNA, 15 bp, Homo sapiens
tgattcctctccatt

SEQ ID NO: 1305608 - DNA, 15 bp, Homo sapiens
ttgattcctctccat

SEQ ID NO: 1305609 - DNA, 15 bp, Homo sapiens
cttgattcctctcca

SEQ ID NO: 1305610 - DNA, 15 bp, Homo sapiens
tcttgattcctctcc

SEQ ID NO: 1305611 - DNA, 15 bp, Homo sapiens
ctcttgattcctctc

SEQ ID NO: 1305612 - DNA, 15 bp, Homo sapiens
actcttgattcctct

SEQ ID NO: 1305613 - DNA, 15 bp, Homo sapiens
cactcttgattcctc

SEQ ID NO: 1305614 - DNA, 15 bp, Homo sapiens
tcactcttgattcct

SEQ ID NO: 1305615 - DNA, 15 bp, Homo sapiens
gtcactcttgattcc

SEQ ID NO: 1305616 - DNA, 15 bp, Homo sapiens
agtcactcttgattc

SEQ ID NO: 1305617 - DNA, 15 bp, Homo sapiens
gagtcactcttgatt

SEQ ID NO: 1305618 - DNA, 15 bp, Homo sapiens
agagtcactcttgat

SEQ ID NO: 1305619 - DNA, 15 bp, Homo sapiens
aagagtcactcttga

SEQ ID NO: 1305620 - DNA, 15 bp, Homo sapiens
taagagtcactcttg

SEQ ID NO: 1305621 - DNA, 15 bp, Homo sapiens
ctaagagtcactctt

SEQ ID NO: 1305622 - DNA, 15 bp, Homo sapiens
cctaagagtcactct

SEQ ID NO: 1305623 - DNA, 15 bp, Homo sapiens
acctaagagtcactc

SEQ ID NO: 1305624 - DNA, 15 bp, Homo sapiens
aacctaagagtcact

SEQ ID NO: 1305625 - DNA, 15 bp, Homo sapiens
caacctaagagtcac

SEQ ID NO: 1305626 - DNA, 15 bp, Homo sapiens
acaacctaagagtca

SEQ ID NO: 1305627 - DNA, 15 bp, Homo sapiens
aacaacctaagagtc

SEQ ID NO: 1305628 - DNA, 15 bp, Homo sapiens
caacaacctaagagt

SEQ ID NO: 1305629 - DNA, 15 bp, Homo sapiens
tcaacaacctaagag

SEQ ID NO: 1305630 - DNA, 15 bp, Homo sapiens
gtcaacaacctaaga

SEQ ID NO: 1305631 - DNA, 15 bp, Homo sapiens
ggtcaacaacctaag

SEQ ID NO: 1305632 - DNA, 15 bp, Homo sapiens
tggtcaacaacctaa

SEQ ID NO: 1305633 - DNA, 15 bp, Homo sapiens
atggtcaacaaccta

SEQ ID NO: 1305634 - DNA, 15 bp, Homo sapiens
tatggtcaacaacct

SEQ ID NO: 1305635 - DNA, 15 bp, Homo sapiens
ttatggtcaacaacc

SEQ ID NO: 1305636 - DNA, 15 bp, Homo sapiens
gttatggtcaacaac

SEQ ID NO: 1305637 - DNA, 15 bp, Homo sapiens
tgttatggtcaacaa

SEQ ID NO: 1305638 - DNA, 15 bp, Homo sapiens
ctgttatggtcaaca

SEQ ID NO: 1305639 - DNA, 15 bp, Homo sapiens
cctgttatggtcaac

SEQ ID NO: 1305640 - DNA, 15 bp, Homo sapiens
acctgttatggtcaa

SEQ ID NO: 1305641 - DNA, 15 bp, Homo sapiens
tacctgttatggtca

SEQ ID NO: 1305642 - DNA, 15 bp, Homo sapiens
atacctgttatggtc

SEQ ID NO: 1305643 - DNA, 15 bp, Homo sapiens
aatacctgttatggt

SEQ ID NO: 1305644 - DNA, 15 bp, Homo sapiens
aaatacctgttatgg

SEQ ID NO: 1305645 - DNA, 15 bp, Homo sapiens
aaaatacctgttatg

SEQ ID NO: 1305646 - DNA, 15 bp, Homo sapiens
gaaaatacctgttat

SEQ ID NO: 1305647 - DNA, 15 bp, Homo sapiens
ggaaaatacctgtta

SEQ ID NO: 1305648 - DNA, 15 bp, Homo sapiens
aggaaaatacctgtt

SEQ ID NO: 1305649 - DNA, 15 bp, Homo sapiens
gaggaaaatacctgt

SEQ ID NO: 1305650 - DNA, 15 bp, Homo sapiens
ggaggaaaatacctg

SEQ ID NO: 1305651 - DNA, 15 bp, Homo sapiens
aggaggaaaatacct

SEQ ID NO: 1305652 - DNA, 15 bp, Homo sapiens
taggaggaaaatacc

SEQ ID NO: 1305653 - DNA, 15 bp, Homo sapiens
ctaggaggaaaatac

SEQ ID NO: 1305654 - DNA, 15 bp, Homo sapiens
tctaggaggaaaata

SEQ ID NO: 1305655 - DNA, 15 bp, Homo sapiens
ttctaggaggaaaat

SEQ ID NO: 1305656 - DNA, 15 bp, Homo sapiens
tttctaggaggaaaa

SEQ ID NO: 1305657 - DNA, 15 bp, Homo sapiens
ttttctaggaggaaa

SEQ ID NO: 1305658 - DNA, 15 bp, Homo sapiens
cttttctaggaggaa

SEQ ID NO: 1305659 - DNA, 15 bp, Homo sapiens
gcttttctaggagga

SEQ ID NO: 1305660 - DNA, 15 bp, Homo sapiens
agcttttctaggagg

SEQ ID NO: 1305661 - DNA, 15 bp, Homo sapiens
cagcttttctaggag

SEQ ID NO: 1305662 - DNA, 15 bp, Homo sapiens
tcagcttttctagga

SEQ ID NO: 1305663 - DNA, 15 bp, Homo sapiens
ctcagcttttctagg

SEQ ID NO: 1305664 - DNA, 15 bp, Homo sapiens
gctcagcttttctag

SEQ ID NO: 1305665 - DNA, 15 bp, Homo sapiens
agctcagcttttcta

SEQ ID NO: 1305666 - DNA, 15 bp, Homo sapiens
aagctcagcttttct

SEQ ID NO: 1305667 - DNA, 15 bp, Homo sapiens
gaagctcagcttttc

SEQ ID NO: 1305668 - DNA, 15 bp, Homo sapiens
tgaagctcagctttt

SEQ ID NO: 1305669 - DNA, 15 bp, Homo sapiens
ctgaagctcagcttt

SEQ ID NO: 1305670 - DNA, 15 bp, Homo sapiens
actgaagctcagctt

SEQ ID NO: 1305671 - DNA, 15 bp, Homo sapiens
aactgaagctcagct

SEQ ID NO: 1305672 - DNA, 15 bp, Homo sapiens
taactgaagctcagc

SEQ ID NO: 1305673 - DNA, 15 bp, Homo sapiens
gtaactgaagctcag

SEQ ID NO: 1305674 - DNA, 15 bp, Homo sapiens
tgtaactgaagctca

SEQ ID NO: 1305675 - DNA, 15 bp, Homo sapiens
ttgtaactgaagctc

SEQ ID NO: 1305676 - DNA, 15 bp, Homo sapiens
attgtaactgaagct

SEQ ID NO: 1305677 - DNA, 15 bp, Homo sapiens
gattgtaactgaagc

SEQ ID NO: 1305678 - DNA, 15 bp, Homo sapiens
agattgtaactgaag

SEQ ID NO: 1305679 - DNA, 15 bp, Homo sapiens
cagattgtaactgaa

SEQ ID NO: 1305680 - DNA, 15 bp, Homo sapiens
gcagattgtaactga

SEQ ID NO: 1305681 - DNA, 15 bp, Homo sapiens
tgcagattgtaactg

SEQ ID NO: 1305682 - DNA, 15 bp, Homo sapiens
ctgcagattgtaact

SEQ ID NO: 1305683 - DNA, 15 bp, Homo sapiens
tctgcagattgtaac

SEQ ID NO: 1305684 - DNA, 15 bp, Homo sapiens
ttctgcagattgtaa

SEQ ID NO: 1305685 - DNA, 15 bp, Homo sapiens
tttctgcagattgta

SEQ ID NO: 1305686 - DNA, 15 bp, Homo sapiens
atttctgcagattgt

SEQ ID NO: 1305687 - DNA, 15 bp, Homo sapiens
catttctgcagattg

SEQ ID NO: 1305688 - DNA, 15 bp, Homo sapiens
gcatttctgcagatt

SEQ ID NO: 1305689 - DNA, 15 bp, Homo sapiens
agcatttctgcagat

SEQ ID NO: 1305690 - DNA, 15 bp, Homo sapiens
cagcatttctgcaga

SEQ ID NO: 1305691 - DNA, 15 bp, Homo sapiens
ccagcatttctgcag

SEQ ID NO: 1305692 - DNA, 15 bp, Homo sapiens
cccagcatttctgca

SEQ ID NO: 1305693 - DNA, 15 bp, Homo sapiens
tcccagcatttctgc

SEQ ID NO: 1305694 - DNA, 15 bp, Homo sapiens
ctcccagcatttctg

SEQ ID NO: 1305695 - DNA, 15 bp, Homo sapiens
cctcccagcatttct

SEQ ID NO: 1305696 - DNA, 15 bp, Homo sapiens
tcctcccagcatttc

SEQ ID NO: 1305697 - DNA, 15 bp, Homo sapiens
atcctcccagcattt

SEQ ID NO: 1305698 - DNA, 15 bp, Homo sapiens
aatcctcccagcatt

SEQ ID NO: 1305699 - DNA, 15 bp, Homo sapiens
taatcctcccagcat

SEQ ID NO: 1305700 - DNA, 15 bp, Homo sapiens
cactaatcctcccag

SEQ ID NO: 1305701 - DNA, 15 bp, Homo sapiens
ccactaatcctccca

SEQ ID NO: 1305702 - DNA, 15 bp, Homo sapiens
gccactaatcctccc

SEQ ID NO: 1305703 - DNA, 15 bp, Homo sapiens
tgccactaatcctcc

SEQ ID NO: 1305704 - DNA, 15 bp, Homo sapiens
ttgccactaatcctc

SEQ ID NO: 1305705 - DNA, 15 bp, Homo sapiens
tttgccactaatcct

SEQ ID NO: 1305706 - DNA, 15 bp, Homo sapiens
gtttgccactaatcc

SEQ ID NO: 1305707 - DNA, 15 bp, Homo sapiens
ggtttgccactaatc

SEQ ID NO: 1305708 - DNA, 15 bp, Homo sapiens
aggtttgccactaat

SEQ ID NO: 1305709 - DNA, 15 bp, Homo sapiens
taggtttgccactaa

SEQ ID NO: 1305710 - DNA, 15 bp, Homo sapiens
ttaggtttgccacta

SEQ ID NO: 1305711 - DNA, 15 bp, Homo sapiens
tttaggtttgccact

SEQ ID NO: 1305712 - DNA, 15 bp, Homo sapiens
ttttaggtttgccac

SEQ ID NO: 1305713 - DNA, 15 bp, Homo sapiens
tttttaggtttgcca

SEQ ID NO: 1305714 - DNA, 15 bp, Homo sapiens
ttttttaggtttgcc

SEQ ID NO: 1305715 - DNA, 15 bp, Homo sapiens
tttttttaggtttgc

SEQ ID NO: 1305716 - DNA, 15 bp, Homo sapiens
ttttttttaggtttg

SEQ ID NO: 1305717 - DNA, 15 bp, Homo sapiens
cttttttttaggttt

SEQ ID NO: 1305718 - DNA, 15 bp, Homo sapiens
tcttttttttaggtt

SEQ ID NO: 1305719 - DNA, 15 bp, Homo sapiens
ttcttttttttaggt

SEQ ID NO: 1305720 - DNA, 15 bp, Homo sapiens
tttcttttttttagg

SEQ ID NO: 1305721 - DNA, 15 bp, Homo sapiens
ttttcttttttttag

SEQ ID NO: 1305722 - DNA, 15 bp, Homo sapiens
gtttttctttttttt

SEQ ID NO: 1305723 - DNA, 15 bp, Homo sapiens
gtgtttttctttttt

SEQ ID NO: 1305724 - DNA, 15 bp, Homo sapiens
agtgtttttcttttt

SEQ ID NO: 1305725 - DNA, 15 bp, Homo sapiens
tagtgtttttctttt

SEQ ID NO: 1305726 - DNA, 15 bp, Homo sapiens
ctagtgtttttcttt

SEQ ID NO: 1305727 - DNA, 15 bp, Homo sapiens
tctagtgtttttctt

SEQ ID NO: 1305728 - DNA, 15 bp, Homo sapiens
ttctagtgtttttct

SEQ ID NO: 1305729 - DNA, 15 bp, Homo sapiens
cttctagtgtttttc

SEQ ID NO: 1305730 - DNA, 15 bp, Homo sapiens
gcttctagtgttttt

SEQ ID NO: 1305731 - DNA, 15 bp, Homo sapiens
agcttctagtgtttt

SEQ ID NO: 1305732 - DNA, 15 bp, Homo sapiens
aagcttctagtgttt

SEQ ID NO: 1305733 - DNA, 15 bp, Homo sapiens
taagcttctagtgtt

SEQ ID NO: 1305734 - DNA, 15 bp, Homo sapiens
ataagcttctagtgt

SEQ ID NO: 1305735 - DNA, 15 bp, Homo sapiens
gataagcttctagtg

SEQ ID NO: 1305736 - DNA, 15 bp, Homo sapiens
cgataagcttctagt

SEQ ID NO: 1305737 - DNA, 15 bp, Homo sapiens
ccgataagcttctag

SEQ ID NO: 1305738 - DNA, 15 bp, Homo sapiens
tccgataagcttcta

SEQ ID NO: 1305739 - DNA, 15 bp, Homo sapiens
ctccgataagcttct

SEQ ID NO: 1305740 - DNA, 15 bp, Homo sapiens
tctccgataagcttc

SEQ ID NO: 1305741 - DNA, 15 bp, Homo sapiens
ctctccgataagctt

SEQ ID NO: 1305742 - DNA, 15 bp, Homo sapiens
actctccgataagct

SEQ ID NO: 1305743 - DNA, 15 bp, Homo sapiens
aactctccgataagc

SEQ ID NO: 1305744 - DNA, 15 bp, Homo sapiens
caactctccgataag

SEQ ID NO: 1305745 - DNA, 15 bp, Homo sapiens
ccaactctccgataa

SEQ ID NO: 1305746 - DNA, 15 bp, Homo sapiens
accaactctccgata

SEQ ID NO: 1305747 - DNA, 15 bp, Homo sapiens
aaccaactctccgat

SEQ ID NO: 1305748 - DNA, 15 bp, Homo sapiens
aaaccaactctccga

SEQ ID NO: 1305749 - DNA, 15 bp, Homo sapiens
caaaccaactctccg

SEQ ID NO: 1305750 - DNA, 15 bp, Homo sapiens
gcaaaccaactctcc

SEQ ID NO: 1305751 - DNA, 15 bp, Homo sapiens
tgcaaaccaactctc

SEQ ID NO: 1305752 - DNA, 15 bp, Homo sapiens
ttgcaaaccaactct

SEQ ID NO: 1305753 - DNA, 15 bp, Homo sapiens
tttgcaaaccaactc

SEQ ID NO: 1305754 - DNA, 15 bp, Homo sapiens
ctttgcaaaccaact

SEQ ID NO: 1305755 - DNA, 15 bp, Homo sapiens
actttgcaaaccaac

SEQ ID NO: 1305756 - DNA, 15 bp, Homo sapiens
aactttgcaaaccaa

SEQ ID NO: 1305757 - DNA, 15 bp, Homo sapiens
aaactttgcaaacca

SEQ ID NO: 1305758 - DNA, 15 bp, Homo sapiens
gaaactttgcaaacc

SEQ ID NO: 1305759 - DNA, 15 bp, Homo sapiens
tgaaactttgcaaac

SEQ ID NO: 1305760 - DNA, 15 bp, Homo sapiens
gtgaaactttgcaaa

SEQ ID NO: 1305761 - DNA, 15 bp, Homo sapiens
agtgaaactttgcaa

SEQ ID NO: 1305762 - DNA, 15 bp, Homo sapiens
tagtgaaactttgca

SEQ ID NO: 1305763 - DNA, 15 bp, Homo sapiens
atagtgaaactttgc

SEQ ID NO: 1305764 - DNA, 15 bp, Homo sapiens
gatagtgaaactttg

SEQ ID NO: 1305765 - DNA, 15 bp, Homo sapiens
tgatagtgaaacttt

SEQ ID NO: 1305766 - DNA, 15 bp, Homo sapiens
ttgatagtgaaactt

SEQ ID NO: 1305767 - DNA, 15 bp, Homo sapiens
attgatagtgaaact

SEQ ID NO: 1305768 - DNA, 15 bp, Homo sapiens
aattgatagtgaaac

SEQ ID NO: 1305769 - DNA, 15 bp, Homo sapiens
aaattgatagtgaaa

SEQ ID NO: 1305770 - DNA, 15 bp, Homo sapiens
gaaattgatagtgaa

SEQ ID NO: 1305771 - DNA, 15 bp, Homo sapiens
tgaaattgatagtga

SEQ ID NO: 1305772 - DNA, 15 bp, Homo sapiens
atgaaattgatagtg

SEQ ID NO: 1305773 - DNA, 15 bp, Homo sapiens
aatgaaattgatagt

SEQ ID NO: 1305774 - DNA, 15 bp, Homo sapiens
caatgaaattgatag

SEQ ID NO: 1305775 - DNA, 15 bp, Homo sapiens
acaatgaaattgata

SEQ ID NO: 1305776 - DNA, 15 bp, Homo sapiens
tacaatgaaattgat

SEQ ID NO: 1305777 - DNA, 15 bp, Homo sapiens
gtacaatgaaattga

SEQ ID NO: 1305778 - DNA, 15 bp, Homo sapiens
ggtacaatgaaattg

SEQ ID NO: 1305779 - DNA, 15 bp, Homo sapiens
aggtacaatgaaatt

SEQ ID NO: 1305780 - DNA, 15 bp, Homo sapiens
aaggtacaatgaaat

SEQ ID NO: 1305781 - DNA, 15 bp, Homo sapiens
aaaggtacaatgaaa

SEQ ID NO: 1305782 - DNA, 15 bp, Homo sapiens
aaaaggtacaatgaa

SEQ ID NO: 1305783 - DNA, 15 bp, Homo sapiens
taaaaggtacaatga

SEQ ID NO: 1305784 - DNA, 15 bp, Homo sapiens
ctaaaaggtacaatg

SEQ ID NO: 1305785 - DNA, 15 bp, Homo sapiens
gctaaaaggtacaat

SEQ ID NO: 1305786 - DNA, 15 bp, Homo sapiens
tgctaaaaggtacaa

SEQ ID NO: 1305787 - DNA, 15 bp, Homo sapiens
ctgctaaaaggtaca

SEQ ID NO: 1305788 - DNA, 15 bp, Homo sapiens
cctgctaaaaggtac

SEQ ID NO: 1305789 - DNA, 15 bp, Homo sapiens
ccctgctaaaaggta

SEQ ID NO: 1305790 - DNA, 15 bp, Homo sapiens
tccctgctaaaaggt

SEQ ID NO: 1305791 - DNA, 15 bp, Homo sapiens
ttccctgctaaaagg

SEQ ID NO: 1305792 - DNA, 15 bp, Homo sapiens
tttccctgctaaaag

SEQ ID NO: 1305793 - DNA, 15 bp, Homo sapiens
ttttccctgctaaaa

SEQ ID NO: 1305794 - DNA, 15 bp, Homo sapiens
tttttccctgctaaa

SEQ ID NO: 1305795 - DNA, 15 bp, Homo sapiens
atttttccctgctaa

SEQ ID NO: 1305796 - DNA, 15 bp, Homo sapiens
tatttttccctgcta

SEQ ID NO: 1305797 - DNA, 15 bp, Homo sapiens
atatttttccctgct

SEQ ID NO: 1305798 - DNA, 15 bp, Homo sapiens
aatatttttccctgc

SEQ ID NO: 1305799 - DNA, 15 bp, Homo sapiens
gaatatttttccctg

SEQ ID NO: 1305800 - DNA, 15 bp, Homo sapiens
tgaatatttttccct

SEQ ID NO: 1305801 - DNA, 15 bp, Homo sapiens
atgaatatttttccc

SEQ ID NO: 1305802 - DNA, 15 bp, Homo sapiens
gatgaatatttttcc

SEQ ID NO: 1305803 - DNA, 15 bp, Homo sapiens
tgatgaatatttttc

SEQ ID NO: 1305804 - DNA, 15 bp, Homo sapiens
atgatgaatattttt

SEQ ID NO: 1305805 - DNA, 15 bp, Homo sapiens
tatgatgaatatttt

SEQ ID NO: 1305806 - DNA, 15 bp, Homo sapiens
gtatgatgaatattt

SEQ ID NO: 1305807 - DNA, 15 bp, Homo sapiens
tgtatgatgaatatt

SEQ ID NO: 1305808 - DNA, 15 bp, Homo sapiens
atgtatgatgaatat

SEQ ID NO: 1305809 - DNA, 15 bp, Homo sapiens
catgtatgatgaata

SEQ ID NO: 1305810 - DNA, 15 bp, Homo sapiens
gcatgtatgatgaat

SEQ ID NO: 1305811 - DNA, 15 bp, Homo sapiens
tgcatgtatgatgaa

SEQ ID NO: 1305812 - DNA, 15 bp, Homo sapiens
gtgcatgtatgatga

SEQ ID NO: 1305813 - DNA, 15 bp, Homo sapiens
tgtgcatgtatgatg

SEQ ID NO: 1305814 - DNA, 15 bp, Homo sapiens
gtgtgcatgtatgat

SEQ ID NO: 1305815 - DNA, 15 bp, Homo sapiens
tgtgtgcatgtatga

SEQ ID NO: 1305816 - DNA, 15 bp, Homo sapiens
ttgtgtgcatgtatg

SEQ ID NO: 1305817 - DNA, 15 bp, Homo sapiens
tttgtgtgcatgtat

SEQ ID NO: 1305818 - DNA, 15 bp, Homo sapiens
atttgtgtgcatgta

SEQ ID NO: 1305819 - DNA, 15 bp, Homo sapiens
aatttgtgtgcatgt

SEQ ID NO: 1305820 - DNA, 15 bp, Homo sapiens
aaatttgtgtgcatg

SEQ ID NO: 1305821 - DNA, 15 bp, Homo sapiens
taaatttgtgtgcat

SEQ ID NO: 1305822 - DNA, 15 bp, Homo sapiens
gtaaatttgtgtgca

SEQ ID NO: 1305823 - DNA, 15 bp, Homo sapiens
tgtaaatttgtgtgc

SEQ ID NO: 1305824 - DNA, 15 bp, Homo sapiens
gtgtaaatttgtgtg

SEQ ID NO: 1305825 - DNA, 15 bp, Homo sapiens
tgtgtaaatttgtgt

SEQ ID NO: 1305826 - DNA, 15 bp, Homo sapiens
gtgtgtaaatttgtg

SEQ ID NO: 1305827 - DNA, 15 bp, Homo sapiens
tgtgtgtaaatttgt

SEQ ID NO: 1305828 - DNA, 15 bp, Homo sapiens
ttgtgtgtaaatttg

SEQ ID NO: 1305829 - DNA, 15 bp, Homo sapiens
gttgtgtgtaaattt

SEQ ID NO: 1305830 - DNA, 15 bp, Homo sapiens
agttgtgtgtaaatt

SEQ ID NO: 1305831 - DNA, 15 bp, Homo sapiens
aagttgtgtgtaaat

SEQ ID NO: 1305832 - DNA, 15 bp, Homo sapiens
gaagttgtgtgtaaa

SEQ ID NO: 1305833 - DNA, 15 bp, Homo sapiens
tgaagttgtgtgtaa

SEQ ID NO: 1305834 - DNA, 15 bp, Homo sapiens
gtgaagttgtgtgta

SEQ ID NO: 1305835 - DNA, 15 bp, Homo sapiens
tgtgaagttgtgtgt

SEQ ID NO: 1305836 - DNA, 15 bp, Homo sapiens
atgtgaagttgtgtg

SEQ ID NO: 1305837 - DNA, 15 bp, Homo sapiens
gatgtgaagttgtgt

SEQ ID NO: 1305838 - DNA, 15 bp, Homo sapiens
agatgtgaagttgtg

SEQ ID NO: 1305839 - DNA, 15 bp, Homo sapiens
aagatgtgaagttgt

SEQ ID NO: 1305840 - DNA, 15 bp, Homo sapiens
caagatgtgaagttg

SEQ ID NO: 1305841 - DNA, 15 bp, Homo sapiens
tcaagatgtgaagtt

SEQ ID NO: 1305842 - DNA, 15 bp, Homo sapiens
ttcaagatgtgaagt

SEQ ID NO: 1305843 - DNA, 15 bp, Homo sapiens
tttcaagatgtgaag

SEQ ID NO: 1305844 - DNA, 15 bp, Homo sapiens
ttttcaagatgtgaa

SEQ ID NO: 1305845 - DNA, 15 bp, Homo sapiens
cttttcaagatgtga

SEQ ID NO: 1305846 - DNA, 15 bp, Homo sapiens
gcttttcaagatgtg

SEQ ID NO: 1305847 - DNA, 15 bp, Homo sapiens
tgcttttcaagatgt

SEQ ID NO: 1305848 - DNA, 15 bp, Homo sapiens
ttgcttttcaagatg

SEQ ID NO: 1305849 - DNA, 15 bp, Homo sapiens
gttgcttttcaagat

SEQ ID NO: 1305850 - DNA, 15 bp, Homo sapiens
tgttgcttttcaaga

SEQ ID NO: 1305851 - DNA, 15 bp, Homo sapiens
ttgttgcttttcaag

SEQ ID NO: 1305852 - DNA, 15 bp, Homo sapiens
attgttgcttttcaa

SEQ ID NO: 1305853 - DNA, 15 bp, Homo sapiens
tattgttgcttttca

SEQ ID NO: 1305854 - DNA, 15 bp, Homo sapiens
atattgttgcttttc

SEQ ID NO: 1305855 - DNA, 15 bp, Homo sapiens
tatattgttgctttt

SEQ ID NO: 1305856 - DNA, 15 bp, Homo sapiens
ttatattgttgcttt

SEQ ID NO: 1305857 - DNA, 15 bp, Homo sapiens
tttatattgttgctt

SEQ ID NO: 1305858 - DNA, 15 bp, Homo sapiens
ttttatattgttgct

SEQ ID NO: 1305859 - DNA, 15 bp, Homo sapiens
gttttatattgttgc

SEQ ID NO: 1305860 - DNA, 15 bp, Homo sapiens
agttttatattgttg

SEQ ID NO: 1305861 - DNA, 15 bp, Homo sapiens
gagttttatattgtt

SEQ ID NO: 1305862 - DNA, 15 bp, Homo sapiens
tgagttttatattgt

SEQ ID NO: 1305863 - DNA, 15 bp, Homo sapiens
gtgagttttatattg

SEQ ID NO: 1305864 - DNA, 15 bp, Homo sapiens
tgtgagttttatatt

SEQ ID NO: 1305865 - DNA, 15 bp, Homo sapiens
gtgtgagttttatat

SEQ ID NO: 1305866 - DNA, 15 bp, Homo sapiens
cgtgtgagttttata

SEQ ID NO: 1305867 - DNA, 15 bp, Homo sapiens
gcgtgtgagttttat

SEQ ID NO: 1305868 - DNA, 15 bp, Homo sapiens
agcgtgtgagtttta

SEQ ID NO: 1305869 - DNA, 15 bp, Homo sapiens
aagcgtgtgagtttt

SEQ ID NO: 1305870 - DNA, 15 bp, Homo sapiens
aaagcgtgtgagttt

SEQ ID NO: 1305871 - DNA, 15 bp, Homo sapiens
taaagcgtgtgagtt

SEQ ID NO: 1305872 - DNA, 15 bp, Homo sapiens
ctaaagcgtgtgagt

SEQ ID NO: 1305873 - DNA, 15 bp, Homo sapiens
tctaaagcgtgtgag

SEQ ID NO: 1305874 - DNA, 15 bp, Homo sapiens
ttctaaagcgtgtga

SEQ ID NO: 1305875 - DNA, 15 bp, Homo sapiens
tttctaaagcgtgtg

SEQ ID NO: 1305876 - DNA, 15 bp, Homo sapiens
ctttctaaagcgtgt

SEQ ID NO: 1305877 - DNA, 15 bp, Homo sapiens
gctttctaaagcgtg

SEQ ID NO: 1305878 - DNA, 15 bp, Homo sapiens
ggctttctaaagcgt

SEQ ID NO: 1305879 - DNA, 15 bp, Homo sapiens
tggctttctaaagcg

SEQ ID NO: 1305880 - DNA, 15 bp, Homo sapiens
ttggctttctaaagc

SEQ ID NO: 1305881 - DNA, 15 bp, Homo sapiens
cttggctttctaaag

SEQ ID NO: 1305882 - DNA, 15 bp, Homo sapiens
gcttggctttctaaa

SEQ ID NO: 1305883 - DNA, 15 bp, Homo sapiens
ggcttggctttctaa

SEQ ID NO: 1305884 - DNA, 15 bp, Homo sapiens
tggcttggctttcta

SEQ ID NO: 1305885 - DNA, 15 bp, Homo sapiens
ctggcttggctttct

SEQ ID NO: 1305886 - DNA, 15 bp, Homo sapiens
cctggcttggctttc

SEQ ID NO: 1305887 - DNA, 15 bp, Homo sapiens
ccctggcttggcttt

SEQ ID NO: 1305888 - DNA, 15 bp, Homo sapiens
tccctggcttggctt

SEQ ID NO: 1305889 - DNA, 15 bp, Homo sapiens
ttccctggcttggct

SEQ ID NO: 1305890 - DNA, 15 bp, Homo sapiens
cttccctggcttggc

SEQ ID NO: 1305891 - DNA, 15 bp, Homo sapiens
tcttccctggcttgg

SEQ ID NO: 1305892 - DNA, 15 bp, Homo sapiens
ttcttccctggcttg

SEQ ID NO: 1305893 - DNA, 15 bp, Homo sapiens
tttcttccctggctt

SEQ ID NO: 1305894 - DNA, 15 bp, Homo sapiens
ctttcttccctggct

SEQ ID NO: 1305895 - DNA, 15 bp, Homo sapiens
tctttcttccctggc

SEQ ID NO: 1305896 - DNA, 15 bp, Homo sapiens
ttctttcttccctgg

SEQ ID NO: 1305897 - DNA, 15 bp, Homo sapiens
attctttcttccctg

SEQ ID NO: 1305898 - DNA, 15 bp, Homo sapiens
cattctttcttccct

SEQ ID NO: 1305899 - DNA, 15 bp, Homo sapiens
tcattctttcttccc

SEQ ID NO: 1305900 - DNA, 15 bp, Homo sapiens
ttcattctttcttcc

SEQ ID NO: 1305901 - DNA, 15 bp, Homo sapiens
gttcattctttcttc

SEQ ID NO: 1305902 - DNA, 15 bp, Homo sapiens
ggttcattctttctt

SEQ ID NO: 1305903 - DNA, 15 bp, Homo sapiens
gggttcattctttct

SEQ ID NO: 1305904 - DNA, 15 bp, Homo sapiens
ggggttcattctttc

SEQ ID NO: 1305905 - DNA, 15 bp, Homo sapiens
gggggttcattcttt

SEQ ID NO: 1305906 - DNA, 15 bp, Homo sapiens
agggggttcattctt

SEQ ID NO: 1305907 - DNA, 15 bp, Homo sapiens
cagggggttcattct

SEQ ID NO: 1305908 - DNA, 15 bp, Homo sapiens
gcagggggttcattc

SEQ ID NO: 1305909 - DNA, 15 bp, Homo sapiens
ggcagggggttcatt

SEQ ID NO: 1305910 - DNA, 15 bp, Homo sapiens
aggcagggggttcat

SEQ ID NO: 1305911 - DNA, 15 bp, Homo sapiens
aaggcagggggttca

SEQ ID NO: 1305912 - DNA, 15 bp, Homo sapiens
caaggcagggggttc

SEQ ID NO: 1305913 - DNA, 15 bp, Homo sapiens
acaaggcagggggtt

SEQ ID NO: 1305914 - DNA, 15 bp, Homo sapiens
cacaaggcagggggt

SEQ ID NO: 1305915 - DNA, 15 bp, Homo sapiens
tcacaaggcaggggg

SEQ ID NO: 1305916 - DNA, 15 bp, Homo sapiens
gtcacaaggcagggg

SEQ ID NO: 1305917 - DNA, 15 bp, Homo sapiens
agtcacaaggcaggg

SEQ ID NO: 1305918 - DNA, 15 bp, Homo sapiens
aagtcacaaggcagg

SEQ ID NO: 1305919 - DNA, 15 bp, Homo sapiens
gaagtcacaaggcag

SEQ ID NO: 1305920 - DNA, 15 bp, Homo sapiens
agaagtcacaaggca

SEQ ID NO: 1305921 - DNA, 15 bp, Homo sapiens
gagaagtcacaaggc

SEQ ID NO: 1305922 - DNA, 15 bp, Homo sapiens
tgagaagtcacaagg

SEQ ID NO: 1305923 - DNA, 15 bp, Homo sapiens
atgagaagtcacaag

SEQ ID NO: 1305924 - DNA, 15 bp, Homo sapiens
catgagaagtcacaa

SEQ ID NO: 1305925 - DNA, 15 bp, Homo sapiens
gcatgagaagtcaca

SEQ ID NO: 1305926 - DNA, 15 bp, Homo sapiens
agcatgagaagtcac

SEQ ID NO: 1305927 - DNA, 15 bp, Homo sapiens
cagcatgagaagtca

SEQ ID NO: 1305928 - DNA, 15 bp, Homo sapiens
tcagcatgagaagtc

SEQ ID NO: 1305929 - DNA, 15 bp, Homo sapiens
atcagcatgagaagt

SEQ ID NO: 1305930 - DNA, 15 bp, Homo sapiens
tatcagcatgagaag

SEQ ID NO: 1305931 - DNA, 15 bp, Homo sapiens
gtatcagcatgagaa

SEQ ID NO: 1305932 - DNA, 15 bp, Homo sapiens
agtatcagcatgaga

SEQ ID NO: 1305933 - DNA, 15 bp, Homo sapiens
gagtatcagcatgag

SEQ ID NO: 1305934 - DNA, 15 bp, Homo sapiens
tgagtatcagcatga

SEQ ID NO: 1305935 - DNA, 15 bp, Homo sapiens
ttgagtatcagcatg

SEQ ID NO: 1305936 - DNA, 15 bp, Homo sapiens
attgagtatcagcat

SEQ ID NO: 1305937 - DNA, 15 bp, Homo sapiens
aattgagtatcagca

SEQ ID NO: 1305938 - DNA, 15 bp, Homo sapiens
aaattgagtatcagc

SEQ ID NO: 1305939 - DNA, 15 bp, Homo sapiens
caaattgagtatcag

SEQ ID NO: 1305940 - DNA, 15 bp, Homo sapiens
acaaattgagtatca

SEQ ID NO: 1305941 - DNA, 15 bp, Homo sapiens
aacaaattgagtatc

SEQ ID NO: 1305942 - DNA, 15 bp, Homo sapiens
gaacaaattgagtat

SEQ ID NO: 1305943 - DNA, 15 bp, Homo sapiens
tgaacaaattgagta

SEQ ID NO: 1305944 - DNA, 15 bp, Homo sapiens
ctgaacaaattgagt

SEQ ID NO: 1305945 - DNA, 15 bp, Homo sapiens
actgaacaaattgag

SEQ ID NO: 1305946 - DNA, 15 bp, Homo sapiens
cactgaacaaattga

SEQ ID NO: 1305947 - DNA, 15 bp, Homo sapiens
ccactgaacaaattg

SEQ ID NO: 1305948 - DNA, 15 bp, Homo sapiens
tccactgaacaaatt

SEQ ID NO: 1305949 - DNA, 15 bp, Homo sapiens
ttccactgaacaaat

SEQ ID NO: 1305950 - DNA, 15 bp, Homo sapiens
tttccactgaacaaa

SEQ ID NO: 1305951 - DNA, 15 bp, Homo sapiens
gtttccactgaacaa

SEQ ID NO: 1305952 - DNA, 15 bp, Homo sapiens
cgtttccactgaaca

SEQ ID NO: 1305953 - DNA, 15 bp, Homo sapiens
ccgtttccactgaac

SEQ ID NO: 1305954 - DNA, 15 bp, Homo sapiens
tccgtttccactgaa

SEQ ID NO: 1305955 - DNA, 15 bp, Homo sapiens
atccgtttccactga

SEQ ID NO: 1305956 - DNA, 15 bp, Homo sapiens
gatccgtttccactg

SEQ ID NO: 1305957 - DNA, 15 bp, Homo sapiens
tgatccgtttccact

SEQ ID NO: 1305958 - DNA, 15 bp, Homo sapiens
ctgatccgtttccac

SEQ ID NO: 1305959 - DNA, 15 bp, Homo sapiens
actgatccgtttcca

SEQ ID NO: 1305960 - DNA, 15 bp, Homo sapiens
cactgatccgtttcc

SEQ ID NO: 1305961 - DNA, 15 bp, Homo sapiens
tcactgatccgtttc

SEQ ID NO: 1305962 - DNA, 15 bp, Homo sapiens
ctcactgatccgttt

SEQ ID NO: 1305963 - DNA, 15 bp, Homo sapiens
actcactgatccgtt

SEQ ID NO: 1305964 - DNA, 15 bp, Homo sapiens
tactcactgatccgt

SEQ ID NO: 1305965 - DNA, 15 bp, Homo sapiens
ctactcactgatccg

SEQ ID NO: 1305966 - DNA, 15 bp, Homo sapiens
tctactcactgatcc

SEQ ID NO: 1305967 - DNA, 15 bp, Homo sapiens
ctctactcactgatc

SEQ ID NO: 1305968 - DNA, 15 bp, Homo sapiens
gctctactcactgat

SEQ ID NO: 1305969 - DNA, 15 bp, Homo sapiens
tgctctactcactga

SEQ ID NO: 1305970 - DNA, 15 bp, Homo sapiens
ttgctctactcactg

SEQ ID NO: 1305971 - DNA, 15 bp, Homo sapiens
cttgctctactcact

SEQ ID NO: 1305972 - DNA, 15 bp, Homo sapiens
acttgctctactcac

SEQ ID NO: 1305973 - DNA, 15 bp, Homo sapiens
tacttgctctactca

SEQ ID NO: 1305974 - DNA, 15 bp, Homo sapiens
ctacttgctctactc

SEQ ID NO: 1305975 - DNA, 15 bp, Homo sapiens
cctacttgctctact

SEQ ID NO: 1305976 - DNA, 15 bp, Homo sapiens
tcctacttgctctac

SEQ ID NO: 1305977 - DNA, 15 bp, Homo sapiens
ttcctacttgctcta

SEQ ID NO: 1305978 - DNA, 15 bp, Homo sapiens
tttcctacttgctct

SEQ ID NO: 1305979 - DNA, 15 bp, Homo sapiens
ctttcctacttgctc

SEQ ID NO: 1305980 - DNA, 15 bp, Homo sapiens
tctttcctacttgct

SEQ ID NO: 1305981 - DNA, 15 bp, Homo sapiens
ttctttcctacttgc

SEQ ID NO: 1305982 - DNA, 15 bp, Homo sapiens
attctttcctacttg

SEQ ID NO: 1305983 - DNA, 15 bp, Homo sapiens
gattctttcctactt

SEQ ID NO: 1305984 - DNA, 15 bp, Homo sapiens
agattctttcctact

SEQ ID NO: 1305985 - DNA, 15 bp, Homo sapiens
gagattctttcctac

SEQ ID NO: 1305986 - DNA, 15 bp, Homo sapiens
agagattctttccta

SEQ ID NO: 1305987 - DNA, 15 bp, Homo sapiens
aagagattctttcct

SEQ ID NO: 1305988 - DNA, 15 bp, Homo sapiens
gaagagattctttcc

SEQ ID NO: 1305989 - DNA, 15 bp, Homo sapiens
tgaagagattctttc

SEQ ID NO: 1305990 - DNA, 15 bp, Homo sapiens
ttgaagagattcttt

SEQ ID NO: 1305991 - DNA, 15 bp, Homo sapiens
cttgaagagattctt

SEQ ID NO: 1305992 - DNA, 15 bp, Homo sapiens
tcttgaagagattct

SEQ ID NO: 1305993 - DNA, 15 bp, Homo sapiens
ttcttgaagagattc

SEQ ID NO: 1305994 - DNA, 15 bp, Homo sapiens
gttcttgaagagatt

SEQ ID NO: 1305995 - DNA, 15 bp, Homo sapiens
agttcttgaagagat

SEQ ID NO: 1305996 - DNA, 15 bp, Homo sapiens
aagttcttgaagaga

SEQ ID NO: 1305997 - DNA, 15 bp, Homo sapiens
taagttcttgaagag

SEQ ID NO: 1305998 - DNA, 15 bp, Homo sapiens
ataagttcttgaaga

SEQ ID NO: 1305999 - DNA, 15 bp, Homo sapiens
cataagttcttgaag

SEQ ID NO: 1306000 - DNA, 15 bp, Homo sapiens
acataagttcttgaa

SEQ ID NO: 1306001 - DNA, 15 bp, Homo sapiens
tacataagttcttga

SEQ ID NO: 1306002 - DNA, 15 bp, Homo sapiens
atacataagttcttg

SEQ ID NO: 1306003 - DNA, 15 bp, Homo sapiens
gatacataagttctt

SEQ ID NO: 1306004 - DNA, 15 bp, Homo sapiens
agatacataagttct

SEQ ID NO: 1306005 - DNA, 15 bp, Homo sapiens
aagatacataagttc

SEQ ID NO: 1306006 - DNA, 15 bp, Homo sapiens
gaagatacataagtt

SEQ ID NO: 1306007 - DNA, 15 bp, Homo sapiens
cgaagatacataagt

SEQ ID NO: 1306008 - DNA, 15 bp, Homo sapiens
tcgaagatacataag

SEQ ID NO: 1306009 - DNA, 15 bp, Homo sapiens
gtcgaagatacataa

SEQ ID NO: 1306010 - DNA, 15 bp, Homo sapiens
tgtcgaagatacata

SEQ ID NO: 1306011 - DNA, 15 bp, Homo sapiens
atgtcgaagatacat

SEQ ID NO: 1306012 - DNA, 15 bp, Homo sapiens
catgtcgaagataca

SEQ ID NO: 1306013 - DNA, 15 bp, Homo sapiens
acatgtcgaagatac

SEQ ID NO: 1306014 - DNA, 15 bp, Homo sapiens
gacatgtcgaagata

SEQ ID NO: 1306015 - DNA, 15 bp, Homo sapiens
ggacatgtcgaagat

SEQ ID NO: 1306016 - DNA, 15 bp, Homo sapiens
tggacatgtcgaaga

SEQ ID NO: 1306017 - DNA, 15 bp, Homo sapiens
atggacatgtcgaag

SEQ ID NO: 1306018 - DNA, 15 bp, Homo sapiens
gatggacatgtcgaa

SEQ ID NO: 1306019 - DNA, 15 bp, Homo sapiens
tgatggacatgtcga

SEQ ID NO: 1306020 - DNA, 15 bp, Homo sapiens
gtgatggacatgtcg

SEQ ID NO: 1306021 - DNA, 15 bp, Homo sapiens
tgtgatggacatgtc

SEQ ID NO: 1306022 - DNA, 15 bp, Homo sapiens
gtgtgatggacatgt

SEQ ID NO: 1306023 - DNA, 15 bp, Homo sapiens
tgtgtgatggacatg

SEQ ID NO: 1306024 - DNA, 15 bp, Homo sapiens
atgtgtgatggacat

SEQ ID NO: 1306025 - DNA, 15 bp, Homo sapiens
tatgtgtgatggaca

SEQ ID NO: 1306026 - DNA, 15 bp, Homo sapiens
ttatgtgtgatggac

SEQ ID NO: 1306027 - DNA, 15 bp, Homo sapiens
attatgtgtgatgga

SEQ ID NO: 1306028 - DNA, 15 bp, Homo sapiens
aattatgtgtgatgg

SEQ ID NO: 1306029 - DNA, 15 bp, Homo sapiens
aaattatgtgtgatg

SEQ ID NO: 1306030 - DNA, 15 bp, Homo sapiens
aaaattatgtgtgat

SEQ ID NO: 1306031 - DNA, 15 bp, Homo sapiens
gaaaattatgtgtga

SEQ ID NO: 1306032 - DNA, 15 bp, Homo sapiens
agaaaattatgtgtg

SEQ ID NO: 1306033 - DNA, 15 bp, Homo sapiens
gagaaaattatgtgt

SEQ ID NO: 1306034 - DNA, 15 bp, Homo sapiens
ggagaaaattatgtg

SEQ ID NO: 1306035 - DNA, 15 bp, Homo sapiens
aggagaaaattatgt

SEQ ID NO: 1306036 - DNA, 15 bp, Homo sapiens
taggagaaaattatg

SEQ ID NO: 1306037 - DNA, 15 bp, Homo sapiens
ctaggagaaaattat

SEQ ID NO: 1306038 - DNA, 15 bp, Homo sapiens
actaggagaaaatta

SEQ ID NO: 1306039 - DNA, 15 bp, Homo sapiens
gactaggagaaaatt

SEQ ID NO: 1306040 - DNA, 15 bp, Homo sapiens
tgactaggagaaaat

SEQ ID NO: 1306041 - DNA, 15 bp, Homo sapiens
gtgactaggagaaaa

SEQ ID NO: 1306042 - DNA, 15 bp, Homo sapiens
tgtgactaggagaaa

SEQ ID NO: 1306043 - DNA, 15 bp, Homo sapiens
atgtgactaggagaa

SEQ ID NO: 1306044 - DNA, 15 bp, Homo sapiens
catgtgactaggaga

SEQ ID NO: 1306045 - DNA, 15 bp, Homo sapiens
acatgtgactaggag

SEQ ID NO: 1306046 - DNA, 15 bp, Homo sapiens
tacatgtgactagga

SEQ ID NO: 1306047 - DNA, 15 bp, Homo sapiens
gtacatgtgactagg

SEQ ID NO: 1306048 - DNA, 15 bp, Homo sapiens
tgtacatgtgactag

SEQ ID NO: 1306049 - DNA, 15 bp, Homo sapiens
ttgtacatgtgacta

SEQ ID NO: 1306050 - DNA, 15 bp, Homo sapiens
tttgtacatgtgact

SEQ ID NO: 1306051 - DNA, 15 bp, Homo sapiens
atttgtacatgtgac

SEQ ID NO: 1306052 - DNA, 15 bp, Homo sapiens
catttgtacatgtga

SEQ ID NO: 1306053 - DNA, 15 bp, Homo sapiens
tcatttgtacatgtg

SEQ ID NO: 1306054 - DNA, 15 bp, Homo sapiens
atcatttgtacatgt

SEQ ID NO: 1306055 - DNA, 15 bp, Homo sapiens
tatcatttgtacatg

SEQ ID NO: 1306056 - DNA, 15 bp, Homo sapiens
ttatcatttgtacat

SEQ ID NO: 1306057 - DNA, 15 bp, Homo sapiens
tttatcatttgtaca

SEQ ID NO: 1306058 - DNA, 15 bp, Homo sapiens
ctttatcatttgtac

SEQ ID NO: 1306059 - DNA, 15 bp, Homo sapiens
cctttatcatttgta

SEQ ID NO: 1306060 - DNA, 15 bp, Homo sapiens
tcctttatcatttgt

SEQ ID NO: 1306061 - DNA, 15 bp, Homo sapiens
ctcctttatcatttg

SEQ ID NO: 1306062 - DNA, 15 bp, Homo sapiens
tctcctttatcattt

SEQ ID NO: 1306063 - DNA, 15 bp, Homo sapiens
ctctcctttatcatt

SEQ ID NO: 1306064 - DNA, 15 bp, Homo sapiens
cctctcctttatcat

SEQ ID NO: 1306065 - DNA, 15 bp, Homo sapiens
tcctctcctttatca

SEQ ID NO: 1306066 - DNA, 15 bp, Homo sapiens
ttcctctcctttatc

SEQ ID NO: 1306067 - DNA, 15 bp, Homo sapiens
tttcctctcctttat

SEQ ID NO: 1306068 - DNA, 15 bp, Homo sapiens
ttttcctctccttta

SEQ ID NO: 1306069 - DNA, 15 bp, Homo sapiens
attttcctctccttt

SEQ ID NO: 1306070 - DNA, 15 bp, Homo sapiens
cattttcctctcctt

SEQ ID NO: 1306071 - DNA, 15 bp, Homo sapiens
acattttcctctcct

SEQ ID NO: 1306072 - DNA, 15 bp, Homo sapiens
gacattttcctctcc

SEQ ID NO: 1306073 - DNA, 15 bp, Homo sapiens
tgacattttcctctc

SEQ ID NO: 1306074 - DNA, 15 bp, Homo sapiens
atgacattttcctct

SEQ ID NO: 1306075 - DNA, 15 bp, Homo sapiens
aatgacattttcctc

SEQ ID NO: 1306076 - DNA, 15 bp, Homo sapiens
aaatgacattttcct

SEQ ID NO: 1306077 - DNA, 15 bp, Homo sapiens
gaaatgacattttcc

SEQ ID NO: 1306078 - DNA, 15 bp, Homo sapiens
tgaaatgacattttc

SEQ ID NO: 1306079 - DNA, 15 bp, Homo sapiens
ctgaaatgacatttt

SEQ ID NO: 1306080 - DNA, 15 bp, Homo sapiens
cctgaaatgacattt

SEQ ID NO: 1306081 - DNA, 15 bp, Homo sapiens
ccctgaaatgacatt

SEQ ID NO: 1306082 - DNA, 15 bp, Homo sapiens
gccctgaaatgacat

SEQ ID NO: 1306083 - DNA, 15 bp, Homo sapiens
ggccctgaaatgaca

SEQ ID NO: 1306084 - DNA, 15 bp, Homo sapiens
aggccctgaaatgac

SEQ ID NO: 1306085 - DNA, 15 bp, Homo sapiens
aaggccctgaaatga

SEQ ID NO: 1306086 - DNA, 15 bp, Homo sapiens
tcaaggccctgaaat

SEQ ID NO: 1306087 - DNA, 15 bp, Homo sapiens
ctcaaggccctgaaa

SEQ ID NO: 1306088 - DNA, 15 bp, Homo sapiens
actcaaggccctgaa

SEQ ID NO: 1306089 - DNA, 15 bp, Homo sapiens
atactcaaggccctg

SEQ ID NO: 1306090 - DNA, 15 bp, Homo sapiens
gatactcaaggccct

SEQ ID NO: 1306091 - DNA, 15 bp, Homo sapiens
tgatactcaaggccc

SEQ ID NO: 1306092 - DNA, 15 bp, Homo sapiens
gtgatactcaaggcc

SEQ ID NO: 1306093 - DNA, 15 bp, Homo sapiens
tgtgatactcaaggc

SEQ ID NO: 1306094 - DNA, 15 bp, Homo sapiens
ctgtgatactcaagg

SEQ ID NO: 1306095 - DNA, 15 bp, Homo sapiens
cctgtgatactcaag

SEQ ID NO: 1306096 - DNA, 15 bp, Homo sapiens
tcctgtgatactcaa

SEQ ID NO: 1306097 - DNA, 15 bp, Homo sapiens
atcctgtgatactca

SEQ ID NO: 1306098 - DNA, 15 bp, Homo sapiens
aatcctgtgatactc

SEQ ID NO: 1306099 - DNA, 15 bp, Homo sapiens
aaatcctgtgatact

SEQ ID NO: 1306100 - DNA, 15 bp, Homo sapiens
aaaatcctgtgatac

SEQ ID NO: 1306101 - DNA, 15 bp, Homo sapiens
caaaatcctgtgata

SEQ ID NO: 1306102 - DNA, 15 bp, Homo sapiens
tcaaaatcctgtgat

SEQ ID NO: 1306103 - DNA, 15 bp, Homo sapiens
atcaaaatcctgtga

SEQ ID NO: 1306104 - DNA, 15 bp, Homo sapiens
tatcaaaatcctgtg

SEQ ID NO: 1306105 - DNA, 15 bp, Homo sapiens
ttatcaaaatcctgt

SEQ ID NO: 1306106 - DNA, 15 bp, Homo sapiens
attatcaaaatcctg

SEQ ID NO: 1306107 - DNA, 15 bp, Homo sapiens
cattatcaaaatcct

SEQ ID NO: 1306108 - DNA, 15 bp, Homo sapiens
acattatcaaaatcc

SEQ ID NO: 1306109 - DNA, 15 bp, Homo sapiens
aacattatcaaaatc

SEQ ID NO: 1306110 - DNA, 15 bp, Homo sapiens
taacattatcaaaat

SEQ ID NO: 1306111 - DNA, 15 bp, Homo sapiens
ctaacattatcaaaa

SEQ ID NO: 1306112 - DNA, 15 bp, Homo sapiens
gctaacattatcaaa

SEQ ID NO: 1306113 - DNA, 15 bp, Homo sapiens
tgctaacattatcaa

SEQ ID NO: 1306114 - DNA, 15 bp, Homo sapiens
ttgctaacattatca

SEQ ID NO: 1306115 - DNA, 15 bp, Homo sapiens
tttgctaacattatc

SEQ ID NO: 1306116 - DNA, 15 bp, Homo sapiens
ttttgctaacattat

SEQ ID NO: 1306117 - DNA, 15 bp, Homo sapiens
attttgctaacatta

SEQ ID NO: 1306118 - DNA, 15 bp, Homo sapiens
tattttgctaacatt

SEQ ID NO: 1306119 - DNA, 15 bp, Homo sapiens
ttattttgctaacat

SEQ ID NO: 1306120 - DNA, 15 bp, Homo sapiens
attattttgctaaca

SEQ ID NO: 1306121 - DNA, 15 bp, Homo sapiens
cattattttgctaac

SEQ ID NO: 1306122 - DNA, 15 bp, Homo sapiens
ccattattttgctaa

SEQ ID NO: 1306123 - DNA, 15 bp, Homo sapiens
cccattattttgcta

SEQ ID NO: 1306124 - DNA, 15 bp, Homo sapiens
acccattattttgct

SEQ ID NO: 1306125 - DNA, 15 bp, Homo sapiens
tacccattattttgc

SEQ ID NO: 1306126 - DNA, 15 bp, Homo sapiens
ttacccattattttg

SEQ ID NO: 1306127 - DNA, 15 bp, Homo sapiens
tttacccattatttt

SEQ ID NO: 1306128 - DNA, 15 bp, Homo sapiens
ttttacccattattt

SEQ ID NO: 1306129 - DNA, 15 bp, Homo sapiens
attttacccattatt

SEQ ID NO: 1306130 - DNA, 15 bp, Homo sapiens
tattttacccattat

SEQ ID NO: 1306131 - DNA, 15 bp, Homo sapiens
ttattttacccatta

SEQ ID NO: 1306132 - DNA, 15 bp, Homo sapiens
gttattttacccatt

SEQ ID NO: 1306133 - DNA, 15 bp, Homo sapiens
agttattttacccat

SEQ ID NO: 1306134 - DNA, 15 bp, Homo sapiens
cagttattttaccca

SEQ ID NO: 1306135 - DNA, 15 bp, Homo sapiens
tcagttattttaccc

SEQ ID NO: 1306136 - DNA, 15 bp, Homo sapiens
atcagttattttacc

SEQ ID NO: 1306137 - DNA, 15 bp, Homo sapiens
aatcagttattttac

SEQ ID NO: 1306138 - DNA, 15 bp, Homo sapiens
aaatcagttatttta

SEQ ID NO: 1306139 - DNA, 15 bp, Homo sapiens
gaaatcagttatttt

SEQ ID NO: 1306140 - DNA, 15 bp, Homo sapiens
agaaatcagttattt

SEQ ID NO: 1306141 - DNA, 15 bp, Homo sapiens
gagaaatcagttatt

SEQ ID NO: 1306142 - DNA, 15 bp, Homo sapiens
tgagaaatcagttat

SEQ ID NO: 1306143 - DNA, 15 bp, Homo sapiens
ttgagaaatcagtta

SEQ ID NO: 1306144 - DNA, 15 bp, Homo sapiens
attgagaaatcagtt

SEQ ID NO: 1306145 - DNA, 15 bp, Homo sapiens
aattgagaaatcagt

SEQ ID NO: 1306146 - DNA, 15 bp, Homo sapiens
taattgagaaatcag

SEQ ID NO: 1306147 - DNA, 15 bp, Homo sapiens
ttaattgagaaatca

SEQ ID NO: 1306148 - DNA, 15 bp, Homo sapiens
tttaattgagaaatc

SEQ ID NO: 1306149 - DNA, 15 bp, Homo sapiens
ctttaattgagaaat

SEQ ID NO: 1306150 - DNA, 15 bp, Homo sapiens
gctttaattgagaaa

SEQ ID NO: 1306151 - DNA, 15 bp, Homo sapiens
ggctttaattgagaa

SEQ ID NO: 1306152 - DNA, 15 bp, Homo sapiens
gggctttaattgaga

SEQ ID NO: 1306153 - DNA, 15 bp, Homo sapiens
tgggctttaattgag

SEQ ID NO: 1306154 - DNA, 15 bp, Homo sapiens
ttgggctttaattga

SEQ ID NO: 1306155 - DNA, 15 bp, Homo sapiens
cttgggctttaattg

SEQ ID NO: 1306156 - DNA, 15 bp, Homo sapiens
gcttgggctttaatt

SEQ ID NO: 1306157 - DNA, 15 bp, Homo sapiens
agcttgggctttaat

SEQ ID NO: 1306158 - DNA, 15 bp, Homo sapiens
tagcttgggctttaa

SEQ ID NO: 1306159 - DNA, 15 bp, Homo sapiens
ttagcttgggcttta

SEQ ID NO: 1306160 - DNA, 15 bp, Homo sapiens
cttagcttgggcttt

SEQ ID NO: 1306161 - DNA, 15 bp, Homo sapiens
acttagcttgggctt

SEQ ID NO: 1306162 - DNA, 15 bp, Homo sapiens
tacttagcttgggct

SEQ ID NO: 1306163 - DNA, 15 bp, Homo sapiens
ttacttagcttgggc

SEQ ID NO: 1306164 - DNA, 15 bp, Homo sapiens
gttacttagcttggg

SEQ ID NO: 1306165 - DNA, 15 bp, Homo sapiens
agttacttagcttgg

SEQ ID NO: 1306166 - DNA, 15 bp, Homo sapiens
aagttacttagcttg

SEQ ID NO: 1306167 - DNA, 15 bp, Homo sapiens
caagttacttagctt

SEQ ID NO: 1306168 - DNA, 15 bp, Homo sapiens
acaagttacttagct

SEQ ID NO: 1306169 - DNA, 15 bp, Homo sapiens
gacaagttacttagc

SEQ ID NO: 1306170 - DNA, 15 bp, Homo sapiens
tgacaagttacttag

SEQ ID NO: 1306171 - DNA, 15 bp, Homo sapiens
ctgacaagttactta

SEQ ID NO: 1306172 - DNA, 15 bp, Homo sapiens
gctgacaagttactt

SEQ ID NO: 1306173 - DNA, 15 bp, Homo sapiens
ggctgacaagttact

SEQ ID NO: 1306174 - DNA, 15 bp, Homo sapiens
gggctgacaagttac

SEQ ID NO: 1306175 - DNA, 15 bp, Homo sapiens
tgggctgacaagtta

SEQ ID NO: 1306176 - DNA, 15 bp, Homo sapiens
ctgggctgacaagtt

SEQ ID NO: 1306177 - DNA, 15 bp, Homo sapiens
cctgggctgacaagt

SEQ ID NO: 1306178 - DNA, 15 bp, Homo sapiens
acctgggctgacaag

SEQ ID NO: 1306179 - DNA, 15 bp, Homo sapiens
cacctgggctgacaa

SEQ ID NO: 1306180 - DNA, 15 bp, Homo sapiens
acacctgggctgaca

SEQ ID NO: 1306181 - DNA, 15 bp, Homo sapiens
cacacctgggctgac

SEQ ID NO: 1306182 - DNA, 15 bp, Homo sapiens
acacacctgggctga

SEQ ID NO: 1306183 - DNA, 15 bp, Homo sapiens
aacacacctgggctg

SEQ ID NO: 1306184 - DNA, 15 bp, Homo sapiens
taacacacctgggct

SEQ ID NO: 1306185 - DNA, 15 bp, Homo sapiens
ttaacacacctgggc

SEQ ID NO: 1306186 - DNA, 15 bp, Homo sapiens
tttaacacacctggg

SEQ ID NO: 1306187 - DNA, 15 bp, Homo sapiens
ttttaacacacctgg

SEQ ID NO: 1306188 - DNA, 15 bp, Homo sapiens
attttaacacacctg

SEQ ID NO: 1306189 - DNA, 15 bp, Homo sapiens
gattttaacacacct

SEQ ID NO: 1306190 - DNA, 15 bp, Homo sapiens
agattttaacacacc

SEQ ID NO: 1306191 - DNA, 15 bp, Homo sapiens
cagattttaacacac

SEQ ID NO: 1306192 - DNA, 15 bp, Homo sapiens
tcagattttaacaca

SEQ ID NO: 1306193 - DNA, 15 bp, Homo sapiens
ctcagattttaacac

SEQ ID NO: 1306194 - DNA, 15 bp, Homo sapiens
actcagattttaaca

SEQ ID NO: 1306195 - DNA, 15 bp, Homo sapiens
aactcagattttaac

SEQ ID NO: 1306196 - DNA, 15 bp, Homo sapiens
taactcagattttaa

SEQ ID NO: 1306197 - DNA, 15 bp, Homo sapiens
gtaactcagatttta

SEQ ID NO: 1306198 - DNA, 15 bp, Homo sapiens
agtaactcagatttt

SEQ ID NO: 1306199 - DNA, 15 bp, Homo sapiens
gagtaactcagattt

SEQ ID NO: 1306200 - DNA, 15 bp, Homo sapiens
agagtaactcagatt

SEQ ID NO: 1306201 - DNA, 15 bp, Homo sapiens
tagagtaactcagat

SEQ ID NO: 1306202 - DNA, 15 bp, Homo sapiens
ctagagtaactcaga

SEQ ID NO: 1306203 - DNA, 15 bp, Homo sapiens
cctagagtaactcag

SEQ ID NO: 1306204 - DNA, 15 bp, Homo sapiens
acctagagtaactca

SEQ ID NO: 1306205 - DNA, 15 bp, Homo sapiens
gacctagagtaactc

SEQ ID NO: 1306206 - DNA, 15 bp, Homo sapiens
ggacctagagtaact

SEQ ID NO: 1306207 - DNA, 15 bp, Homo sapiens
aggacctagagtaac

SEQ ID NO: 1306208 - DNA, 15 bp, Homo sapiens
aaggacctagagtaa

SEQ ID NO: 1306209 - DNA, 15 bp, Homo sapiens
gaaggacctagagta

SEQ ID NO: 1306210 - DNA, 15 bp, Homo sapiens
agaaggacctagagt

SEQ ID NO: 1306211 - DNA, 15 bp, Homo sapiens
gagaaggacctagag

SEQ ID NO: 1306212 - DNA, 15 bp, Homo sapiens
agagaaggacctaga

SEQ ID NO: 1306213 - DNA, 15 bp, Homo sapiens
tagagaaggacctag

SEQ ID NO: 1306214 - DNA, 15 bp, Homo sapiens
ctagagaaggaccta

SEQ ID NO: 1306215 - DNA, 15 bp, Homo sapiens
tctagagaaggacct

SEQ ID NO: 1306216 - DNA, 15 bp, Homo sapiens
ctctagagaaggacc

SEQ ID NO: 1306217 - DNA, 15 bp, Homo sapiens
tctctagagaaggac

SEQ ID NO: 1306218 - DNA, 15 bp, Homo sapiens
gtctctagagaagga

SEQ ID NO: 1306219 - DNA, 15 bp, Homo sapiens
tgtctctagagaagg

SEQ ID NO: 1306220 - DNA, 15 bp, Homo sapiens
ctgtctctagagaag

SEQ ID NO: 1306221 - DNA, 15 bp, Homo sapiens
actgtctctagagaa

SEQ ID NO: 1306222 - DNA, 15 bp, Homo sapiens
cactgtctctagaga

SEQ ID NO: 1306223 - DNA, 15 bp, Homo sapiens
acactgtctctagag

SEQ ID NO: 1306224 - DNA, 15 bp, Homo sapiens
cacactgtctctaga

SEQ ID NO: 1306225 - DNA, 15 bp, Homo sapiens
ccacactgtctctag

SEQ ID NO: 1306226 - DNA, 15 bp, Homo sapiens
gccacactgtctcta

SEQ ID NO: 1306227 - DNA, 15 bp, Homo sapiens
agccacactgtctct

SEQ ID NO: 1306228 - DNA, 15 bp, Homo sapiens
aagccacactgtctc

SEQ ID NO: 1306229 - DNA, 15 bp, Homo sapiens
gaagccacactgtct

SEQ ID NO: 1306230 - DNA, 15 bp, Homo sapiens
cgaagccacactgtc

SEQ ID NO: 1306231 - DNA, 15 bp, Homo sapiens
ccgaagccacactgt

SEQ ID NO: 1306232 - DNA, 15 bp, Homo sapiens
accgaagccacactg

SEQ ID NO: 1306233 - DNA, 15 bp, Homo sapiens
taccgaagccacact

SEQ ID NO: 1306234 - DNA, 15 bp, Homo sapiens
ttaccgaagccacac

SEQ ID NO: 1306235 - DNA, 15 bp, Homo sapiens
attaccgaagccaca

SEQ ID NO: 1306236 - DNA, 15 bp, Homo sapiens
cattaccgaagccac

SEQ ID NO: 1306237 - DNA, 15 bp, Homo sapiens
tcattaccgaagcca

SEQ ID NO: 1306238 - DNA, 15 bp, Homo sapiens
ctcattaccgaagcc

SEQ ID NO: 1306239 - DNA, 15 bp, Homo sapiens
gctcattaccgaagc

SEQ ID NO: 1306240 - DNA, 15 bp, Homo sapiens
tgctcattaccgaag

SEQ ID NO: 1306241 - DNA, 15 bp, Homo sapiens
ttgctcattaccgaa

SEQ ID NO: 1306242 - DNA, 15 bp, Homo sapiens
cttgctcattaccga

SEQ ID NO: 1306243 - DNA, 15 bp, Homo sapiens
gcttgctcattaccg

SEQ ID NO: 1306244 - DNA, 15 bp, Homo sapiens
agcttgctcattacc

SEQ ID NO: 1306245 - DNA, 15 bp, Homo sapiens
gagcttgctcattac

SEQ ID NO: 1306246 - DNA, 15 bp, Homo sapiens
agagcttgctcatta

SEQ ID NO: 1306247 - DNA, 15 bp, Homo sapiens
cagagcttgctcatt

SEQ ID NO: 1306248 - DNA, 15 bp, Homo sapiens
ccagagcttgctcat

SEQ ID NO: 1306249 - DNA, 15 bp, Homo sapiens
tccagagcttgctca

SEQ ID NO: 1306250 - DNA, 15 bp, Homo sapiens
ttccagagcttgctc

SEQ ID NO: 1306251 - DNA, 15 bp, Homo sapiens
tttccagagcttgct

SEQ ID NO: 1306252 - DNA, 15 bp, Homo sapiens
atttccagagcttgc

SEQ ID NO: 1306253 - DNA, 15 bp, Homo sapiens
aatttccagagcttg

SEQ ID NO: 1306254 - DNA, 15 bp, Homo sapiens
taatttccagagctt

SEQ ID NO: 1306255 - DNA, 15 bp, Homo sapiens
ttaatttccagagct

SEQ ID NO: 1306256 - DNA, 15 bp, Homo sapiens
tttaatttccagagc

SEQ ID NO: 1306257 - DNA, 15 bp, Homo sapiens
ctttaatttccagag

SEQ ID NO: 1306258 - DNA, 15 bp, Homo sapiens
tctttaatttccaga

SEQ ID NO: 1306259 - DNA, 15 bp, Homo sapiens
ttctttaatttccag

SEQ ID NO: 1306260 - DNA, 15 bp, Homo sapiens
cttctttaatttcca

SEQ ID NO: 1306261 - DNA, 15 bp, Homo sapiens
acttctttaatttcc

SEQ ID NO: 1306262 - DNA, 15 bp, Homo sapiens
tacttctttaatttc

SEQ ID NO: 1306263 - DNA, 15 bp, Homo sapiens
ttacttctttaattt

SEQ ID NO: 1306264 - DNA, 15 bp, Homo sapiens
attacttctttaatt

SEQ ID NO: 1306265 - DNA, 15 bp, Homo sapiens
gattacttctttaat

SEQ ID NO: 1306266 - DNA, 15 bp, Homo sapiens
tgattacttctttaa

SEQ ID NO: 1306267 - DNA, 15 bp, Homo sapiens
ctgattacttcttta

SEQ ID NO: 1306268 - DNA, 15 bp, Homo sapiens
tctgattacttcttt

SEQ ID NO: 1306269 - DNA, 15 bp, Homo sapiens
atctgattacttctt

SEQ ID NO: 1306270 - DNA, 15 bp, Homo sapiens
catctgattacttct

SEQ ID NO: 1306271 - DNA, 15 bp, Homo sapiens
acatctgattacttc

SEQ ID NO: 1306272 - DNA, 15 bp, Homo sapiens
aacatctgattactt

SEQ ID NO: 1306273 - DNA, 15 bp, Homo sapiens
caacatctgattact

SEQ ID NO: 1306274 - DNA, 15 bp, Homo sapiens
tcaacatctgattac

SEQ ID NO: 1306275 - DNA, 15 bp, Homo sapiens
atcaacatctgatta

SEQ ID NO: 1306276 - DNA, 15 bp, Homo sapiens
aatcaacatctgatt

SEQ ID NO: 1306277 - DNA, 15 bp, Homo sapiens
caatcaacatctgat

SEQ ID NO: 1306278 - DNA, 15 bp, Homo sapiens
tcaatcaacatctga

SEQ ID NO: 1306279 - DNA, 15 bp, Homo sapiens
ctcaatcaacatctg

SEQ ID NO: 1306280 - DNA, 15 bp, Homo sapiens
cctcaatcaacatct

SEQ ID NO: 1306281 - DNA, 15 bp, Homo sapiens
acctcaatcaacatc

SEQ ID NO: 1306282 - DNA, 15 bp, Homo sapiens
aacctcaatcaacat

SEQ ID NO: 1306283 - DNA, 15 bp, Homo sapiens
taacctcaatcaaca

SEQ ID NO: 1306284 - DNA, 15 bp, Homo sapiens
ataacctcaatcaac

SEQ ID NO: 1306285 - DNA, 15 bp, Homo sapiens
gataacctcaatcaa

SEQ ID NO: 1306286 - DNA, 15 bp, Homo sapiens
agataacctcaatca

SEQ ID NO: 1306287 - DNA, 15 bp, Homo sapiens
cagataacctcaatc

SEQ ID NO: 1306288 - DNA, 15 bp, Homo sapiens
gcagataacctcaat

SEQ ID NO: 1306289 - DNA, 15 bp, Homo sapiens
agcagataacctcaa

SEQ ID NO: 1306290 - DNA, 15 bp, Homo sapiens
aagcagataacctca

SEQ ID NO: 1306291 - DNA, 15 bp, Homo sapiens
gaagcagataacctc

SEQ ID NO: 1306292 - DNA, 15 bp, Homo sapiens
tgaagcagataacct

SEQ ID NO: 1306293 - DNA, 15 bp, Homo sapiens
gtgaagcagataacc

SEQ ID NO: 1306294 - DNA, 15 bp, Homo sapiens
agtgaagcagataac

SEQ ID NO: 1306295 - DNA, 15 bp, Homo sapiens
aagtgaagcagataa

SEQ ID NO: 1306296 - DNA, 15 bp, Homo sapiens
gaagtgaagcagata

SEQ ID NO: 1306297 - DNA, 15 bp, Homo sapiens
tgaagtgaagcagat

SEQ ID NO: 1306298 - DNA, 15 bp, Homo sapiens
ttgaagtgaagcaga

SEQ ID NO: 1306299 - DNA, 15 bp, Homo sapiens
cttgaagtgaagcag

SEQ ID NO: 1306300 - DNA, 15 bp, Homo sapiens
gcttgaagtgaagca

SEQ ID NO: 1306301 - DNA, 15 bp, Homo sapiens
tgcttgaagtgaagc

SEQ ID NO: 1306302 - DNA, 15 bp, Homo sapiens
ctgcttgaagtgaag

SEQ ID NO: 1306303 - DNA, 15 bp, Homo sapiens
tctgcttgaagtgaa

SEQ ID NO: 1306304 - DNA, 15 bp, Homo sapiens
ttctgcttgaagtga

SEQ ID NO: 1306305 - DNA, 15 bp, Homo sapiens
cttctgcttgaagtg

SEQ ID NO: 1306306 - DNA, 15 bp, Homo sapiens
gcttctgcttgaagt

SEQ ID NO: 1306307 - DNA, 15 bp, Homo sapiens
tgcttctgcttgaag

SEQ ID NO: 1306308 - DNA, 15 bp, Homo sapiens
ttgcttctgcttgaa

SEQ ID NO: 1306309 - DNA, 15 bp, Homo sapiens
tttgcttctgcttga

SEQ ID NO: 1306310 - DNA, 15 bp, Homo sapiens
atttgcttctgcttg

SEQ ID NO: 1306311 - DNA, 15 bp, Homo sapiens
gatttgcttctgctt

SEQ ID NO: 1306312 - DNA, 15 bp, Homo sapiens
tgatttgcttctgct

SEQ ID NO: 1306313 - DNA, 15 bp, Homo sapiens
ttgatttgcttctgc

SEQ ID NO: 1306314 - DNA, 15 bp, Homo sapiens
cttgatttgcttctg

SEQ ID NO: 1306315 - DNA, 15 bp, Homo sapiens
acttgatttgcttct

SEQ ID NO: 1306316 - DNA, 15 bp, Homo sapiens
cacttgatttgcttc

SEQ ID NO: 1306317 - DNA, 15 bp, Homo sapiens
ccacttgatttgctt

SEQ ID NO: 1306318 - DNA, 15 bp, Homo sapiens
tccacttgatttgct

SEQ ID NO: 1306319 - DNA, 15 bp, Homo sapiens
gtccacttgatttgc

SEQ ID NO: 1306320 - DNA, 15 bp, Homo sapiens
agtccacttgatttg

SEQ ID NO: 1306321 - DNA, 15 bp, Homo sapiens
aagtccacttgattt

SEQ ID NO: 1306322 - DNA, 15 bp, Homo sapiens
gaagtccacttgatt

SEQ ID NO: 1306323 - DNA, 15 bp, Homo sapiens
ggaagtccacttgat

SEQ ID NO: 1306324 - DNA, 15 bp, Homo sapiens
gggaagtccacttga

SEQ ID NO: 1306325 - DNA, 15 bp, Homo sapiens
agggaagtccacttg

SEQ ID NO: 1306326 - DNA, 15 bp, Homo sapiens
aagggaagtccactt

SEQ ID NO: 1306327 - DNA, 15 bp, Homo sapiens
caagggaagtccact

SEQ ID NO: 1306328 - DNA, 15 bp, Homo sapiens
tcaagggaagtccac

SEQ ID NO: 1306329 - DNA, 15 bp, Homo sapiens
ttcaagggaagtcca

SEQ ID NO: 1306330 - DNA, 15 bp, Homo sapiens
cttcaagggaagtcc

SEQ ID NO: 1306331 - DNA, 15 bp, Homo sapiens
tcttcaagggaagtc

SEQ ID NO: 1306332 - DNA, 15 bp, Homo sapiens
gtcttcaagggaagt

SEQ ID NO: 1306333 - DNA, 15 bp, Homo sapiens
tgtcttcaagggaag

SEQ ID NO: 1306334 - DNA, 15 bp, Homo sapiens
ctgtcttcaagggaa

SEQ ID NO: 1306335 - DNA, 15 bp, Homo sapiens
tctgtcttcaaggga

SEQ ID NO: 1306336 - DNA, 15 bp, Homo sapiens
ttctgtcttcaaggg

SEQ ID NO: 1306337 - DNA, 15 bp, Homo sapiens
tttctgtcttcaagg

SEQ ID NO: 1306338 - DNA, 15 bp, Homo sapiens
atttctgtcttcaag

SEQ ID NO: 1306339 - DNA, 15 bp, Homo sapiens
aatttctgtcttcaa

SEQ ID NO: 1306340 - DNA, 15 bp, Homo sapiens
aaatttctgtcttca

SEQ ID NO: 1306341 - DNA, 15 bp, Homo sapiens
gaaatttctgtcttc

SEQ ID NO: 1306342 - DNA, 15 bp, Homo sapiens
agaaatttctgtctt

SEQ ID NO: 1306343 - DNA, 15 bp, Homo sapiens
gagaaatttctgtct

SEQ ID NO: 1306344 - DNA, 15 bp, Homo sapiens
agagaaatttctgtc

SEQ ID NO: 1306345 - DNA, 15 bp, Homo sapiens
tagagaaatttctgt

SEQ ID NO: 1306346 - DNA, 15 bp, Homo sapiens
atagagaaatttctg

SEQ ID NO: 1306347 - DNA, 15 bp, Homo sapiens
aatagagaaatttct

SEQ ID NO: 1306348 - DNA, 15 bp, Homo sapiens
caatagagaaatttc

SEQ ID NO: 1306349 - DNA, 15 bp, Homo sapiens
tcaatagagaaattt

SEQ ID NO: 1306350 - DNA, 15 bp, Homo sapiens
atcaatagagaaatt

SEQ ID NO: 1306351 - DNA, 15 bp, Homo sapiens
tatcaatagagaaat

SEQ ID NO: 1306352 - DNA, 15 bp, Homo sapiens
ctatcaatagagaaa

SEQ ID NO: 1306353 - DNA, 15 bp, Homo sapiens
tctatcaatagagaa

SEQ ID NO: 1306354 - DNA, 15 bp, Homo sapiens
ctctatcaatagaga

SEQ ID NO: 1306355 - DNA, 15 bp, Homo sapiens
gctctatcaatagag

SEQ ID NO: 1306356 - DNA, 15 bp, Homo sapiens
agctctatcaataga

SEQ ID NO: 1306357 - DNA, 15 bp, Homo sapiens
tagctctatcaatag

SEQ ID NO: 1306358 - DNA, 15 bp, Homo sapiens
ttagctctatcaata

SEQ ID NO: 1306359 - DNA, 15 bp, Homo sapiens
cttagctctatcaat

SEQ ID NO: 1306360 - DNA, 15 bp, Homo sapiens
ccttagctctatcaa

SEQ ID NO: 1306361 - DNA, 15 bp, Homo sapiens
cccttagctctatca

SEQ ID NO: 1306362 - DNA, 15 bp, Homo sapiens
acccttagctctatc

SEQ ID NO: 1306363 - DNA, 15 bp, Homo sapiens
cacccttagctctat

SEQ ID NO: 1306364 - DNA, 15 bp, Homo sapiens
acacccttagctcta

SEQ ID NO: 1306365 - DNA, 15 bp, Homo sapiens
aacacccttagctct

SEQ ID NO: 1306366 - DNA, 15 bp, Homo sapiens
aaacacccttagctc

SEQ ID NO: 1306367 - DNA, 15 bp, Homo sapiens
gaaacacccttagct

SEQ ID NO: 1306368 - DNA, 15 bp, Homo sapiens
tgaaacacccttagc

SEQ ID NO: 1306369 - DNA, 15 bp, Homo sapiens
atgaaacacccttag

SEQ ID NO: 1306370 - DNA, 15 bp, Homo sapiens
catgaaacaccctta

SEQ ID NO: 1306371 - DNA, 15 bp, Homo sapiens
tcatgaaacaccctt

SEQ ID NO: 1306372 - DNA, 15 bp, Homo sapiens
atcatgaaacaccct

SEQ ID NO: 1306373 - DNA, 15 bp, Homo sapiens
catcatgaaacaccc

SEQ ID NO: 1306374 - DNA, 15 bp, Homo sapiens
gcatcatgaaacacc

SEQ ID NO: 1306375 - DNA, 15 bp, Homo sapiens
agcatcatgaaacac

SEQ ID NO: 1306376 - DNA, 15 bp, Homo sapiens
cagcatcatgaaaca

SEQ ID NO: 1306377 - DNA, 15 bp, Homo sapiens
tcagcatcatgaaac

SEQ ID NO: 1306378 - DNA, 15 bp, Homo sapiens
ttcagcatcatgaaa

SEQ ID NO: 1306379 - DNA, 15 bp, Homo sapiens
attcagcatcatgaa

SEQ ID NO: 1306380 - DNA, 15 bp, Homo sapiens
aattcagcatcatga

SEQ ID NO: 1306381 - DNA, 15 bp, Homo sapiens
gaattcagcatcatg

SEQ ID NO: 1306382 - DNA, 15 bp, Homo sapiens
agaattcagcatcat

SEQ ID NO: 1306383 - DNA, 15 bp, Homo sapiens
aagaattcagcatca

SEQ ID NO: 1306384 - DNA, 15 bp, Homo sapiens
aaagaattcagcatc

SEQ ID NO: 1306385 - DNA, 15 bp, Homo sapiens
caaagaattcagcat

SEQ ID NO: 1306386 - DNA, 15 bp, Homo sapiens
acaaagaattcagca

SEQ ID NO: 1306387 - DNA, 15 bp, Homo sapiens
cacaaagaattcagc

SEQ ID NO: 1306388 - DNA, 15 bp, Homo sapiens
ccacaaagaattcag

SEQ ID NO: 1306389 - DNA, 15 bp, Homo sapiens
gccacaaagaattca

SEQ ID NO: 1306390 - DNA, 15 bp, Homo sapiens
agccacaaagaattc

SEQ ID NO: 1306391 - DNA, 15 bp, Homo sapiens
gagccacaaagaatt

SEQ ID NO: 1306392 - DNA, 15 bp, Homo sapiens
ggagccacaaagaat

SEQ ID NO: 1306393 - DNA, 15 bp, Homo sapiens
aggagccacaaagaa

SEQ ID NO: 1306394 - DNA, 15 bp, Homo sapiens
aaggagccacaaaga

SEQ ID NO: 1306395 - DNA, 15 bp, Homo sapiens
aaaggagccacaaag

SEQ ID NO: 1306396 - DNA, 15 bp, Homo sapiens
aaaaggagccacaaa

SEQ ID NO: 1306397 - DNA, 15 bp, Homo sapiens
gaaaaggagccacaa

SEQ ID NO: 1306398 - DNA, 15 bp, Homo sapiens
tgaaaaggagccaca

SEQ ID NO: 1306399 - DNA, 15 bp, Homo sapiens
gtgaaaaggagccac

SEQ ID NO: 1306400 - DNA, 15 bp, Homo sapiens
tgtgaaaaggagcca

SEQ ID NO: 1306401 - DNA, 15 bp, Homo sapiens
atgtgaaaaggagcc

SEQ ID NO: 1306402 - DNA, 15 bp, Homo sapiens
tatgtgaaaaggagc

SEQ ID NO: 1306403 - DNA, 15 bp, Homo sapiens
ttatgtgaaaaggag

SEQ ID NO: 1306404 - DNA, 15 bp, Homo sapiens
tttatgtgaaaagga

SEQ ID NO: 1306405 - DNA, 15 bp, Homo sapiens
ttttatgtgaaaagg

SEQ ID NO: 1306406 - DNA, 15 bp, Homo sapiens
cttttatgtgaaaag

SEQ ID NO: 1306407 - DNA, 15 bp, Homo sapiens
acttttatgtgaaaa

SEQ ID NO: 1306408 - DNA, 15 bp, Homo sapiens
tacttttatgtgaaa

SEQ ID NO: 1306409 - DNA, 15 bp, Homo sapiens
ctacttttatgtgaa

SEQ ID NO: 1306410 - DNA, 15 bp, Homo sapiens
cctacttttatgtga

SEQ ID NO: 1306411 - DNA, 15 bp, Homo sapiens
tcctacttttatgtg

SEQ ID NO: 1306412 - DNA, 15 bp, Homo sapiens
ttcctacttttatgt

SEQ ID NO: 1306413 - DNA, 15 bp, Homo sapiens
cttcctacttttatg

SEQ ID NO: 1306414 - DNA, 15 bp, Homo sapiens
gcttcctacttttat

SEQ ID NO: 1306415 - DNA, 15 bp, Homo sapiens
ggcttcctactttta

SEQ ID NO: 1306416 - DNA, 15 bp, Homo sapiens
tggcttcctactttt

SEQ ID NO: 1306417 - DNA, 15 bp, Homo sapiens
atggcttcctacttt

SEQ ID NO: 1306418 - DNA, 15 bp, Homo sapiens
aatggcttcctactt

SEQ ID NO: 1306419 - DNA, 15 bp, Homo sapiens
aaatggcttcctact

SEQ ID NO: 1306420 - DNA, 15 bp, Homo sapiens
aaaatggcttcctac

SEQ ID NO: 1306421 - DNA, 15 bp, Homo sapiens
gaaaatggcttccta

SEQ ID NO: 1306422 - DNA, 15 bp, Homo sapiens
ggaaaatggcttcct

SEQ ID NO: 1306423 - DNA, 15 bp, Homo sapiens
gggaaaatggcttcc

SEQ ID NO: 1306424 - DNA, 15 bp, Homo sapiens
agggaaaatggcttc

SEQ ID NO: 1306425 - DNA, 15 bp, Homo sapiens
cagggaaaatggctt

SEQ ID NO: 1306426 - DNA, 15 bp, Homo sapiens
ccagggaaaatggct

SEQ ID NO: 1306427 - DNA, 15 bp, Homo sapiens
tccagggaaaatggc

SEQ ID NO: 1306428 - DNA, 15 bp, Homo sapiens
ctccagggaaaatgg

SEQ ID NO: 1306429 - DNA, 15 bp, Homo sapiens
actccagggaaaatg

SEQ ID NO: 1306430 - DNA, 15 bp, Homo sapiens
cactccagggaaaat

SEQ ID NO: 1306431 - DNA, 15 bp, Homo sapiens
ccactccagggaaaa

SEQ ID NO: 1306432 - DNA, 15 bp, Homo sapiens
tccactccagggaaa

SEQ ID NO: 1306433 - DNA, 15 bp, Homo sapiens
ttccactccagggaa

SEQ ID NO: 1306434 - DNA, 15 bp, Homo sapiens
cttccactccaggga

SEQ ID NO: 1306435 - DNA, 15 bp, Homo sapiens
ccttccactccaggg

SEQ ID NO: 1306436 - DNA, 15 bp, Homo sapiens
cccttccactccagg

SEQ ID NO: 1306437 - DNA, 15 bp, Homo sapiens
tcccttccactccag

SEQ ID NO: 1306438 - DNA, 15 bp, Homo sapiens
ctcccttccactcca

SEQ ID NO: 1306439 - DNA, 15 bp, Homo sapiens
cctcccttccactcc

SEQ ID NO: 1306440 - DNA, 15 bp, Homo sapiens
tcctcccttccactc

SEQ ID NO: 1306441 - DNA, 15 bp, Homo sapiens
atcctcccttccact

SEQ ID NO: 1306442 - DNA, 15 bp, Homo sapiens
catcctcccttccac

SEQ ID NO: 1306443 - DNA, 15 bp, Homo sapiens
tcatcctcccttcca

SEQ ID NO: 1306444 - DNA, 15 bp, Homo sapiens
gtcatcctcccttcc

SEQ ID NO: 1306445 - DNA, 15 bp, Homo sapiens
agtcatcctcccttc

SEQ ID NO: 1306446 - DNA, 15 bp, Homo sapiens
aagtcatcctccctt

SEQ ID NO: 1306447 - DNA, 15 bp, Homo sapiens
gaagtcatcctccct

SEQ ID NO: 1306448 - DNA, 15 bp, Homo sapiens
ggaagtcatcctccc

SEQ ID NO: 1306449 - DNA, 15 bp, Homo sapiens
gggaagtcatcctcc

SEQ ID NO: 1306450 - DNA, 15 bp, Homo sapiens
tgggaagtcatcctc

SEQ ID NO: 1306451 - DNA, 15 bp, Homo sapiens
ctgggaagtcatcct

SEQ ID NO: 1306452 - DNA, 15 bp, Homo sapiens
cctgggaagtcatcc

SEQ ID NO: 1306453 - DNA, 15 bp, Homo sapiens
tcctgggaagtcatc

SEQ ID NO: 1306454 - DNA, 15 bp, Homo sapiens
ttcctgggaagtcat

SEQ ID NO: 1306455 - DNA, 15 bp, Homo sapiens
attcctgggaagtca

SEQ ID NO: 1306456 - DNA, 15 bp, Homo sapiens
tattcctgggaagtc

SEQ ID NO: 1306457 - DNA, 15 bp, Homo sapiens
atattcctgggaagt

SEQ ID NO: 1306458 - DNA, 15 bp, Homo sapiens
catattcctgggaag

SEQ ID NO: 1306459 - DNA, 15 bp, Homo sapiens
tcatattcctgggaa

SEQ ID NO: 1306460 - DNA, 15 bp, Homo sapiens
ctcatattcctggga

SEQ ID NO: 1306461 - DNA, 15 bp, Homo sapiens
gctcatattcctggg

SEQ ID NO: 1306462 - DNA, 15 bp, Homo sapiens
agctcatattcctgg

SEQ ID NO: 1306463 - DNA, 15 bp, Homo sapiens
aagctcatattcctg

SEQ ID NO: 1306464 - DNA, 15 bp, Homo sapiens
aaagctcatattcct

SEQ ID NO: 1306465 - DNA, 15 bp, Homo sapiens
caaagctcatattcc

SEQ ID NO: 1306466 - DNA, 15 bp, Homo sapiens
tcaaagctcatattc

SEQ ID NO: 1306467 - DNA, 15 bp, Homo sapiens
ctcaaagctcatatt

SEQ ID NO: 1306468 - DNA, 15 bp, Homo sapiens
gctcaaagctcatat

SEQ ID NO: 1306469 - DNA, 15 bp, Homo sapiens
ggctcaaagctcata

SEQ ID NO: 1306470 - DNA, 15 bp, Homo sapiens
tggctcaaagctcat

SEQ ID NO: 1306471 - DNA, 15 bp, Homo sapiens
ttggctcaaagctca

SEQ ID NO: 1306472 - DNA, 15 bp, Homo sapiens
tttggctcaaagctc

SEQ ID NO: 1306473 - DNA, 15 bp, Homo sapiens
ctttggctcaaagct

SEQ ID NO: 1306474 - DNA, 15 bp, Homo sapiens
tctttggctcaaagc

SEQ ID NO: 1306475 - DNA, 15 bp, Homo sapiens
ctctttggctcaaag

SEQ ID NO: 1306476 - DNA, 15 bp, Homo sapiens
cctctttggctcaaa

SEQ ID NO: 1306477 - DNA, 15 bp, Homo sapiens
gcctctttggctcaa

SEQ ID NO: 1306478 - DNA, 15 bp, Homo sapiens
tgcctctttggctca

SEQ ID NO: 1306479 - DNA, 15 bp, Homo sapiens
ctgcctctttggctc

SEQ ID NO: 1306480 - DNA, 15 bp, Homo sapiens
cctgcctctttggct

SEQ ID NO: 1306481 - DNA, 15 bp, Homo sapiens
tcctgcctctttggc

SEQ ID NO: 1306482 - DNA, 15 bp, Homo sapiens
ttcctgcctctttgg

SEQ ID NO: 1306483 - DNA, 15 bp, Homo sapiens
gttcctgcctctttg

SEQ ID NO: 1306484 - DNA, 15 bp, Homo sapiens
agttcctgcctcttt

SEQ ID NO: 1306485 - DNA, 15 bp, Homo sapiens
cagttcctgcctctt

SEQ ID NO: 1306486 - DNA, 15 bp, Homo sapiens
ccagttcctgcctct

SEQ ID NO: 1306487 - DNA, 15 bp, Homo sapiens
cccagttcctgcctc

SEQ ID NO: 1306488 - DNA, 15 bp, Homo sapiens
tcccagttcctgcct

SEQ ID NO: 1306489 - DNA, 15 bp, Homo sapiens
ctcccagttcctgcc

SEQ ID NO: 1306490 - DNA, 15 bp, Homo sapiens
cctcccagttcctgc

SEQ ID NO: 1306491 - DNA, 15 bp, Homo sapiens
gcctcccagttcctg

SEQ ID NO: 1306492 - DNA, 15 bp, Homo sapiens
agcctcccagttcct

SEQ ID NO: 1306493 - DNA, 15 bp, Homo sapiens
gagcctcccagttcc

SEQ ID NO: 1306494 - DNA, 15 bp, Homo sapiens
agagcctcccagttc

SEQ ID NO: 1306495 - DNA, 15 bp, Homo sapiens
gagagcctcccagtt

SEQ ID NO: 1306496 - DNA, 15 bp, Homo sapiens
tgagagcctcccagt

SEQ ID NO: 1306497 - DNA, 15 bp, Homo sapiens
ctgagagcctcccag

SEQ ID NO: 1306498 - DNA, 15 bp, Homo sapiens
actgagagcctccca

SEQ ID NO: 1306499 - DNA, 15 bp, Homo sapiens
aactgagagcctccc

SEQ ID NO: 1306500 - DNA, 15 bp, Homo sapiens
taactgagagcctcc

SEQ ID NO: 1306501 - DNA, 15 bp, Homo sapiens
gtaactgagagcctc

SEQ ID NO: 1306502 - DNA, 15 bp, Homo sapiens
tgtaactgagagcct

SEQ ID NO: 1306503 - DNA, 15 bp, Homo sapiens
gtgtaactgagagcc

SEQ ID NO: 1306504 - DNA, 15 bp, Homo sapiens
agtgtaactgagagc

SEQ ID NO: 1306505 - DNA, 15 bp, Homo sapiens
aagtgtaactgagag

SEQ ID NO: 1306506 - DNA, 15 bp, Homo sapiens
caagtgtaactgaga

SEQ ID NO: 1306507 - DNA, 15 bp, Homo sapiens
tcaagtgtaactgag

SEQ ID NO: 1306508 - DNA, 15 bp, Homo sapiens
ctcaagtgtaactga

SEQ ID NO: 1306509 - DNA, 15 bp, Homo sapiens
tctcaagtgtaactg

SEQ ID NO: 1306510 - DNA, 15 bp, Homo sapiens
ttctcaagtgtaact

SEQ ID NO: 1306511 - DNA, 15 bp, Homo sapiens
tttctcaagtgtaac

SEQ ID NO: 1306512 - DNA, 15 bp, Homo sapiens
ctttctcaagtgtaa

SEQ ID NO: 1306513 - DNA, 15 bp, Homo sapiens
tctttctcaagtgta

SEQ ID NO: 1306514 - DNA, 15 bp, Homo sapiens
ttctttctcaagtgt

SEQ ID NO: 1306515 - DNA, 15 bp, Homo sapiens
attctttctcaagtg

SEQ ID NO: 1306516 - DNA, 15 bp, Homo sapiens
aattctttctcaagt

SEQ ID NO: 1306517 - DNA, 15 bp, Homo sapiens
taattctttctcaag

SEQ ID NO: 1306518 - DNA, 15 bp, Homo sapiens
ataattctttctcaa

SEQ ID NO: 1306519 - DNA, 15 bp, Homo sapiens
aataattctttctca

SEQ ID NO: 1306520 - DNA, 15 bp, Homo sapiens
aaataattctttctc

SEQ ID NO: 1306521 - DNA, 15 bp, Homo sapiens
gaaataattctttct

SEQ ID NO: 1306522 - DNA, 15 bp, Homo sapiens
agaaataattctttc

SEQ ID NO: 1306523 - DNA, 15 bp, Homo sapiens
gagaaataattcttt

SEQ ID NO: 1306524 - DNA, 15 bp, Homo sapiens
agagaaataattctt

SEQ ID NO: 1306525 - DNA, 15 bp, Homo sapiens
gagagaaataattct

SEQ ID NO: 1306526 - DNA, 15 bp, Homo sapiens
tgagagaaataattc

SEQ ID NO: 1306527 - DNA, 15 bp, Homo sapiens
ttgagagaaataatt

SEQ ID NO: 1306528 - DNA, 15 bp, Homo sapiens
attgagagaaataat

SEQ ID NO: 1306529 - DNA, 15 bp, Homo sapiens
tattgagagaaataa

SEQ ID NO: 1306530 - DNA, 15 bp, Homo sapiens
atattgagagaaata

SEQ ID NO: 1306531 - DNA, 15 bp, Homo sapiens
aatattgagagaaat

SEQ ID NO: 1306532 - DNA, 15 bp, Homo sapiens
caatattgagagaaa

SEQ ID NO: 1306533 - DNA, 15 bp, Homo sapiens
acaatattgagagaa

SEQ ID NO: 1306534 - DNA, 15 bp, Homo sapiens
aacaatattgagaga

SEQ ID NO: 1306535 - DNA, 15 bp, Homo sapiens
gaacaatattgagag

SEQ ID NO: 1306536 - DNA, 15 bp, Homo sapiens
agaacaatattgaga

SEQ ID NO: 1306537 - DNA, 15 bp, Homo sapiens
aagaacaatattgag

SEQ ID NO: 1306538 - DNA, 15 bp, Homo sapiens
gaagaacaatattga

SEQ ID NO: 1306539 - DNA, 15 bp, Homo sapiens
agaagaacaatattg

SEQ ID NO: 1306540 - DNA, 15 bp, Homo sapiens
aagaagaacaatatt

SEQ ID NO: 1306541 - DNA, 15 bp, Homo sapiens
aaagaagaacaatat

SEQ ID NO: 1306542 - DNA, 15 bp, Homo sapiens
aaaagaagaacaata

SEQ ID NO: 1306543 - DNA, 15 bp, Homo sapiens
gaaaagaagaacaat

SEQ ID NO: 1306544 - DNA, 15 bp, Homo sapiens
ggaaaagaagaacaa

SEQ ID NO: 1306545 - DNA, 15 bp, Homo sapiens
aggaaaagaagaaca

SEQ ID NO: 1306546 - DNA, 15 bp, Homo sapiens
gaggaaaagaagaac

SEQ ID NO: 1306547 - DNA, 15 bp, Homo sapiens
ggaggaaaagaagaa

SEQ ID NO: 1306548 - DNA, 15 bp, Homo sapiens
tggaggaaaagaaga

SEQ ID NO: 1306549 - DNA, 15 bp, Homo sapiens
ctggaggaaaagaag

SEQ ID NO: 1306550 - DNA, 15 bp, Homo sapiens
tctggaggaaaagaa

SEQ ID NO: 1306551 - DNA, 15 bp, Homo sapiens
ctctggaggaaaaga

SEQ ID NO: 1306552 - DNA, 15 bp, Homo sapiens
gctctggaggaaaag

SEQ ID NO: 1306553 - DNA, 15 bp, Homo sapiens
ggctctggaggaaaa

SEQ ID NO: 1306554 - DNA, 15 bp, Homo sapiens
gggctctggaggaaa

SEQ ID NO: 1306555 - DNA, 15 bp, Homo sapiens
ggggctctggaggaa

SEQ ID NO: 1306556 - DNA, 15 bp, Homo sapiens
tggggctctggagga

SEQ ID NO: 1306557 - DNA, 15 bp, Homo sapiens
ctggggctctggagg

SEQ ID NO: 1306558 - DNA, 15 bp, Homo sapiens
actggggctctggag

SEQ ID NO: 1306559 - DNA, 15 bp, Homo sapiens
cactggggctctgga

SEQ ID NO: 1306560 - DNA, 15 bp, Homo sapiens
acactggggctctgg

SEQ ID NO: 1306561 - DNA, 15 bp, Homo sapiens
cacactggggctctg

SEQ ID NO: 1306562 - DNA, 15 bp, Homo sapiens
tcacactggggctct

SEQ ID NO: 1306563 - DNA, 15 bp, Homo sapiens
ctcacactggggctc

SEQ ID NO: 1306564 - DNA, 15 bp, Homo sapiens
gctcacactggggct

SEQ ID NO: 1306565 - DNA, 15 bp, Homo sapiens
ggctcacactggggc

SEQ ID NO: 1306566 - DNA, 15 bp, Homo sapiens
aggctcacactgggg

SEQ ID NO: 1306567 - DNA, 15 bp, Homo sapiens
caggctcacactggg

SEQ ID NO: 1306568 - DNA, 15 bp, Homo sapiens
ccaggctcacactgg

SEQ ID NO: 1306569 - DNA, 15 bp, Homo sapiens
cccaggctcacactg

SEQ ID NO: 1306570 - DNA, 15 bp, Homo sapiens
acccaggctcacact

SEQ ID NO: 1306571 - DNA, 15 bp, Homo sapiens
cacccaggctcacac

SEQ ID NO: 1306572 - DNA, 15 bp, Homo sapiens
gcacccaggctcaca

SEQ ID NO: 1306573 - DNA, 15 bp, Homo sapiens
tgcacccaggctcac

SEQ ID NO: 1306574 - DNA, 15 bp, Homo sapiens
ttgcacccaggctca

SEQ ID NO: 1306575 - DNA, 15 bp, Homo sapiens
cttgcacccaggctc

SEQ ID NO: 1306576 - DNA, 15 bp, Homo sapiens
gcttgcacccaggct

SEQ ID NO: 1306577 - DNA, 15 bp, Homo sapiens
agcttgcacccaggc

SEQ ID NO: 1306578 - DNA, 15 bp, Homo sapiens
gagcttgcacccagg

SEQ ID NO: 1306579 - DNA, 15 bp, Homo sapiens
agagcttgcacccag

SEQ ID NO: 1306580 - DNA, 15 bp, Homo sapiens
atcagagcttgcacc

SEQ ID NO: 1306581 - DNA, 15 bp, Homo sapiens
tatcagagcttgcac

SEQ ID NO: 1306582 - DNA, 15 bp, Homo sapiens
ttatcagagcttgca

SEQ ID NO: 1306583 - DNA, 15 bp, Homo sapiens
tttatcagagcttgc

SEQ ID NO: 1306584 - DNA, 15 bp, Homo sapiens
atttatcagagcttg

SEQ ID NO: 1306585 - DNA, 15 bp, Homo sapiens
aatttatcagagctt

SEQ ID NO: 1306586 - DNA, 15 bp, Homo sapiens
taatttatcagagct

SEQ ID NO: 1306587 - DNA, 15 bp, Homo sapiens
ttaatttatcagagc

SEQ ID NO: 1306588 - DNA, 15 bp, Homo sapiens
attaatttatcagag

SEQ ID NO: 1306589 - DNA, 15 bp, Homo sapiens
aattaatttatcaga

SEQ ID NO: 1306590 - DNA, 15 bp, Homo sapiens
caattaatttatcag

SEQ ID NO: 1306591 - DNA, 15 bp, Homo sapiens
tcaattaatttatca

SEQ ID NO: 1306592 - DNA, 15 bp, Homo sapiens
gtcaattaatttatc

SEQ ID NO: 1306593 - DNA, 15 bp, Homo sapiens
tgtcaattaatttat

SEQ ID NO: 1306594 - DNA, 15 bp, Homo sapiens
ctgtcaattaattta

SEQ ID NO: 1306595 - DNA, 15 bp, Homo sapiens
tctgtcaattaattt

SEQ ID NO: 1306596 - DNA, 15 bp, Homo sapiens
ctctgtcaattaatt

SEQ ID NO: 1306597 - DNA, 15 bp, Homo sapiens
cctctgtcaattaat

SEQ ID NO: 1306598 - DNA, 15 bp, Homo sapiens
ccctctgtcaattaa

SEQ ID NO: 1306599 - DNA, 15 bp, Homo sapiens
accctctgtcaatta

SEQ ID NO: 1306600 - DNA, 15 bp, Homo sapiens
aaccctctgtcaatt

SEQ ID NO: 1306601 - DNA, 15 bp, Homo sapiens
caaccctctgtcaat

SEQ ID NO: 1306602 - DNA, 15 bp, Homo sapiens
tcaaccctctgtcaa

SEQ ID NO: 1306603 - DNA, 15 bp, Homo sapiens
gtcaaccctctgtca

SEQ ID NO: 1306604 - DNA, 15 bp, Homo sapiens
agtcaaccctctgtc

SEQ ID NO: 1306605 - DNA, 15 bp, Homo sapiens
aagtcaaccctctgt

SEQ ID NO: 1306606 - DNA, 15 bp, Homo sapiens
gaagtcaaccctctg

SEQ ID NO: 1306607 - DNA, 15 bp, Homo sapiens
agaagtcaaccctct

SEQ ID NO: 1306608 - DNA, 15 bp, Homo sapiens
tagaagtcaaccctc

SEQ ID NO: 1306609 - DNA, 15 bp, Homo sapiens
ttagaagtcaaccct

SEQ ID NO: 1306610 - DNA, 15 bp, Homo sapiens
gttagaagtcaaccc

SEQ ID NO: 1306611 - DNA, 15 bp, Homo sapiens
ggttagaagtcaacc

SEQ ID NO: 1306612 - DNA, 15 bp, Homo sapiens
gggttagaagtcaac

SEQ ID NO: 1306613 - DNA, 15 bp, Homo sapiens
ggggttagaagtcaa

SEQ ID NO: 1306614 - DNA, 15 bp, Homo sapiens
tggggttagaagtca

SEQ ID NO: 1306615 - DNA, 15 bp, Homo sapiens
ttggggttagaagtc

SEQ ID NO: 1306616 - DNA, 15 bp, Homo sapiens
gttggggttagaagt

SEQ ID NO: 1306617 - DNA, 15 bp, Homo sapiens
agttggggttagaag

SEQ ID NO: 1306618 - DNA, 15 bp, Homo sapiens
aagttggggttagaa

SEQ ID NO: 1306619 - DNA, 15 bp, Homo sapiens
gaagttggggttaga

SEQ ID NO: 1306620 - DNA, 15 bp, Homo sapiens
tgaagttggggttag

SEQ ID NO: 1306621 - DNA, 15 bp, Homo sapiens
gtgaagttggggtta

SEQ ID NO: 1306622 - DNA, 15 bp, Homo sapiens
ggtgaagttggggtt

SEQ ID NO: 1306623 - DNA, 15 bp, Homo sapiens
cggtgaagttggggt

SEQ ID NO: 1306624 - DNA, 15 bp, Homo sapiens
ccggtgaagttgggg

SEQ ID NO: 1306625 - DNA, 15 bp, Homo sapiens
gccggtgaagttggg

SEQ ID NO: 1306626 - DNA, 15 bp, Homo sapiens
tgccggtgaagttgg

SEQ ID NO: 1306627 - DNA, 15 bp, Homo sapiens
ttgccggtgaagttg

SEQ ID NO: 1306628 - DNA, 15 bp, Homo sapiens
tttgccggtgaagtt

SEQ ID NO: 1306629 - DNA, 15 bp, Homo sapiens
gtttgccggtgaagt

SEQ ID NO: 1306630 - DNA, 15 bp, Homo sapiens
agtttgccggtgaag

SEQ ID NO: 1306631 - DNA, 15 bp, Homo sapiens
aagtttgccggtgaa

SEQ ID NO: 1306632 - DNA, 15 bp, Homo sapiens
aaagtttgccggtga

SEQ ID NO: 1306633 - DNA, 15 bp, Homo sapiens
taaagtttgccggtg

SEQ ID NO: 1306634 - DNA, 15 bp, Homo sapiens
ctaaagtttgccggt

SEQ ID NO: 1306635 - DNA, 15 bp, Homo sapiens
gctaaagtttgccgg

SEQ ID NO: 1306636 - DNA, 15 bp, Homo sapiens
agctaaagtttgccg

SEQ ID NO: 1306637 - DNA, 15 bp, Homo sapiens
tagctaaagtttgcc

SEQ ID NO: 1306638 - DNA, 15 bp, Homo sapiens
atagctaaagtttgc

SEQ ID NO: 1306639 - DNA, 15 bp, Homo sapiens
catagctaaagtttg

SEQ ID NO: 1306640 - DNA, 15 bp, Homo sapiens
acatagctaaagttt

SEQ ID NO: 1306641 - DNA, 15 bp, Homo sapiens
tacatagctaaagtt

SEQ ID NO: 1306642 - DNA, 15 bp, Homo sapiens
ttacatagctaaagt

SEQ ID NO: 1306643 - DNA, 15 bp, Homo sapiens
attacatagctaaag

SEQ ID NO: 1306644 - DNA, 15 bp, Homo sapiens
aattacatagctaaa

SEQ ID NO: 1306645 - DNA, 15 bp, Homo sapiens
gaattacatagctaa

SEQ ID NO: 1306646 - DNA, 15 bp, Homo sapiens
ggaattacatagcta

SEQ ID NO: 1306647 - DNA, 15 bp, Homo sapiens
cggaattacatagct

SEQ ID NO: 1306648 - DNA, 15 bp, Homo sapiens
gcggaattacatagc

SEQ ID NO: 1306649 - DNA, 15 bp, Homo sapiens
tgcggaattacatag

SEQ ID NO: 1306650 - DNA, 15 bp, Homo sapiens
gtgcggaattacata

SEQ ID NO: 1306651 - DNA, 15 bp, Homo sapiens
agtgcggaattacat

SEQ ID NO: 1306652 - DNA, 15 bp, Homo sapiens
cagtgcggaattaca

SEQ ID NO: 1306653 - DNA, 15 bp, Homo sapiens
ccagtgcggaattac

SEQ ID NO: 1306654 - DNA, 15 bp, Homo sapiens
tccagtgcggaatta

SEQ ID NO: 1306655 - DNA, 15 bp, Homo sapiens
gtccagtgcggaatt

SEQ ID NO: 1306656 - DNA, 15 bp, Homo sapiens
tgtccagtgcggaat

SEQ ID NO: 1306657 - DNA, 15 bp, Homo sapiens
ctgtccagtgcggaa

SEQ ID NO: 1306658 - DNA, 15 bp, Homo sapiens
tctgtccagtgcgga

SEQ ID NO: 1306659 - DNA, 15 bp, Homo sapiens
gtctgtccagtgcgg

SEQ ID NO: 1306660 - DNA, 15 bp, Homo sapiens
agtctgtccagtgcg

SEQ ID NO: 1306661 - DNA, 15 bp, Homo sapiens
cagtctgtccagtgc

SEQ ID NO: 1306662 - DNA, 15 bp, Homo sapiens
tcagtctgtccagtg

SEQ ID NO: 1306663 - DNA, 15 bp, Homo sapiens
gtcagtctgtccagt

SEQ ID NO: 1306664 - DNA, 15 bp, Homo sapiens
tgtcagtctgtccag

SEQ ID NO: 1306665 - DNA, 15 bp, Homo sapiens
ctgtcagtctgtcca

SEQ ID NO: 1306666 - DNA, 15 bp, Homo sapiens
gctgtcagtctgtcc

SEQ ID NO: 1306667 - DNA, 15 bp, Homo sapiens
agctgtcagtctgtc

SEQ ID NO: 1306668 - DNA, 15 bp, Homo sapiens
gagctgtcagtctgt

SEQ ID NO: 1306669 - DNA, 15 bp, Homo sapiens
tgagctgtcagtctg

SEQ ID NO: 1306670 - DNA, 15 bp, Homo sapiens
atgagctgtcagtct

SEQ ID NO: 1306671 - DNA, 15 bp, Homo sapiens
aatgagctgtcagtc

SEQ ID NO: 1306672 - DNA, 15 bp, Homo sapiens
aaatgagctgtcagt

SEQ ID NO: 1306673 - DNA, 15 bp, Homo sapiens
aaaatgagctgtcag

SEQ ID NO: 1306674 - DNA, 15 bp, Homo sapiens
gaaaatgagctgtca

SEQ ID NO: 1306675 - DNA, 15 bp, Homo sapiens
ggaaaatgagctgtc

SEQ ID NO: 1306676 - DNA, 15 bp, Homo sapiens
aggaaaatgagctgt

SEQ ID NO: 1306677 - DNA, 15 bp, Homo sapiens
gaggaaaatgagctg

SEQ ID NO: 1306678 - DNA, 15 bp, Homo sapiens
tgaggaaaatgagct

SEQ ID NO: 1306679 - DNA, 15 bp, Homo sapiens
atgaggaaaatgagc

SEQ ID NO: 1306680 - DNA, 15 bp, Homo sapiens
gatgaggaaaatgag

SEQ ID NO: 1306681 - DNA, 15 bp, Homo sapiens
ggatgaggaaaatga

SEQ ID NO: 1306682 - DNA, 15 bp, Homo sapiens
tggatgaggaaaatg

SEQ ID NO: 1306683 - DNA, 15 bp, Homo sapiens
gtggatgaggaaaat

SEQ ID NO: 1306684 - DNA, 15 bp, Homo sapiens
tgtggatgaggaaaa

SEQ ID NO: 1306685 - DNA, 15 bp, Homo sapiens
ttgtggatgaggaaa

SEQ ID NO: 1306686 - DNA, 15 bp, Homo sapiens
tttgtggatgaggaa

SEQ ID NO: 1306687 - DNA, 15 bp, Homo sapiens
ctttgtggatgagga

SEQ ID NO: 1306688 - DNA, 15 bp, Homo sapiens
tctttgtggatgagg

SEQ ID NO: 1306689 - DNA, 15 bp, Homo sapiens
ttctttgtggatgag

SEQ ID NO: 1306690 - DNA, 15 bp, Homo sapiens
attctttgtggatga

SEQ ID NO: 1306691 - DNA, 15 bp, Homo sapiens
cattctttgtggatg

SEQ ID NO: 1306692 - DNA, 15 bp, Homo sapiens
gcattctttgtggat

SEQ ID NO: 1306693 - DNA, 15 bp, Homo sapiens
tgcattctttgtgga

SEQ ID NO: 1306694 - DNA, 15 bp, Homo sapiens
ctgcattctttgtgg

SEQ ID NO: 1306695 - DNA, 15 bp, Homo sapiens
actgcattctttgtg

SEQ ID NO: 1306696 - DNA, 15 bp, Homo sapiens
cactgcattctttgt

SEQ ID NO: 1306697 - DNA, 15 bp, Homo sapiens
gcactgcattctttg

SEQ ID NO: 1306698 - DNA, 15 bp, Homo sapiens
ttgcactgcattctt

SEQ ID NO: 1306699 - DNA, 15 bp, Homo sapiens
attgcactgcattct

SEQ ID NO: 1306700 - DNA, 15 bp, Homo sapiens
tattgcactgcattc

SEQ ID NO: 1306701 - DNA, 15 bp, Homo sapiens
ctattgcactgcatt

SEQ ID NO: 1306702 - DNA, 15 bp, Homo sapiens
tctattgcactgcat

SEQ ID NO: 1306703 - DNA, 15 bp, Homo sapiens
ctctattgcactgca

SEQ ID NO: 1306704 - DNA, 15 bp, Homo sapiens
tctctattgcactgc

SEQ ID NO: 1306705 - DNA, 15 bp, Homo sapiens
ttctctattgcactg

SEQ ID NO: 1306706 - DNA, 15 bp, Homo sapiens
gttctctattgcact

SEQ ID NO: 1306707 - DNA, 15 bp, Homo sapiens
agttctctattgcac

SEQ ID NO: 1306708 - DNA, 15 bp, Homo sapiens
aagttctctattgca

SEQ ID NO: 1306709 - DNA, 15 bp, Homo sapiens
caagttctctattgc

SEQ ID NO: 1306710 - DNA, 15 bp, Homo sapiens
acaagttctctattg

SEQ ID NO: 1306711 - DNA, 15 bp, Homo sapiens
cacaagttctctatt

SEQ ID NO: 1306712 - DNA, 15 bp, Homo sapiens
tcacaagttctctat

SEQ ID NO: 1306713 - DNA, 15 bp, Homo sapiens
ttcacaagttctcta

SEQ ID NO: 1306714 - DNA, 15 bp, Homo sapiens
tttcacaagttctct

SEQ ID NO: 1306715 - DNA, 15 bp, Homo sapiens
atttcacaagttctc

SEQ ID NO: 1306716 - DNA, 15 bp, Homo sapiens
tatttcacaagttct

SEQ ID NO: 1306717 - DNA, 15 bp, Homo sapiens
atatttcacaagttc

SEQ ID NO: 1306718 - DNA, 15 bp, Homo sapiens
gatatttcacaagtt

SEQ ID NO: 1306719 - DNA, 15 bp, Homo sapiens
agatatttcacaagt

SEQ ID NO: 1306720 - DNA, 15 bp, Homo sapiens
aagatatttcacaag

SEQ ID NO: 1306721 - DNA, 15 bp, Homo sapiens
gaagatatttcacaa

SEQ ID NO: 1306722 - DNA, 15 bp, Homo sapiens
agaagatatttcaca

SEQ ID NO: 1306723 - DNA, 15 bp, Homo sapiens
tagaagatatttcac

SEQ ID NO: 1306724 - DNA, 15 bp, Homo sapiens
ttagaagatatttca

SEQ ID NO: 1306725 - DNA, 15 bp, Homo sapiens
gttagaagatatttc

SEQ ID NO: 1306726 - DNA, 15 bp, Homo sapiens
agttagaagatattt

SEQ ID NO: 1306727 - DNA, 15 bp, Homo sapiens
aagttagaagatatt

SEQ ID NO: 1306728 - DNA, 15 bp, Homo sapiens
aaagttagaagatat

SEQ ID NO: 1306729 - DNA, 15 bp, Homo sapiens
taaagttagaagata

SEQ ID NO: 1306730 - DNA, 15 bp, Homo sapiens
gtaaagttagaagat

SEQ ID NO: 1306731 - DNA, 15 bp, Homo sapiens
ggtaaagttagaaga

SEQ ID NO: 1306732 - DNA, 15 bp, Homo sapiens
tggtaaagttagaag

SEQ ID NO: 1306733 - DNA, 15 bp, Homo sapiens
gtggtaaagttagaa

SEQ ID NO: 1306734 - DNA, 15 bp, Homo sapiens
agtggtaaagttaga

SEQ ID NO: 1306735 - DNA, 15 bp, Homo sapiens
gagtggtaaagttag

SEQ ID NO: 1306736 - DNA, 15 bp, Homo sapiens
agagtggtaaagtta

SEQ ID NO: 1306737 - DNA, 15 bp, Homo sapiens
aagagtggtaaagtt

SEQ ID NO: 1306738 - DNA, 15 bp, Homo sapiens
aaagagtggtaaagt

SEQ ID NO: 1306739 - DNA, 15 bp, Homo sapiens
aaaagagtggtaaag

SEQ ID NO: 1306740 - DNA, 15 bp, Homo sapiens
caaaagagtggtaaa

SEQ ID NO: 1306741 - DNA, 15 bp, Homo sapiens
acaaaagagtggtaa

SEQ ID NO: 1306742 - DNA, 15 bp, Homo sapiens
aacaaaagagtggta

SEQ ID NO: 1306743 - DNA, 15 bp, Homo sapiens
aaacaaaagagtggt

SEQ ID NO: 1306744 - DNA, 15 bp, Homo sapiens
aaaacaaaagagtgg

SEQ ID NO: 1306745 - DNA, 15 bp, Homo sapiens
gaaaacaaaagagtg

SEQ ID NO: 1306746 - DNA, 15 bp, Homo sapiens
agaaaacaaaagagt

SEQ ID NO: 1306747 - DNA, 15 bp, Homo sapiens
aagaaaacaaaagag

SEQ ID NO: 1306748 - DNA, 15 bp, Homo sapiens
taagaaaacaaaaga

SEQ ID NO: 1306749 - DNA, 15 bp, Homo sapiens
ttaagaaaacaaaag

SEQ ID NO: 1306750 - DNA, 15 bp, Homo sapiens
attaagaaaacaaaa

SEQ ID NO: 1306751 - DNA, 15 bp, Homo sapiens
gattaagaaaacaaa

SEQ ID NO: 1306752 - DNA, 15 bp, Homo sapiens
ggattaagaaaacaa

SEQ ID NO: 1306753 - DNA, 15 bp, Homo sapiens
aggattaagaaaaca

SEQ ID NO: 1306754 - DNA, 15 bp, Homo sapiens
caggattaagaaaac

SEQ ID NO: 1306755 - DNA, 15 bp, Homo sapiens
ccaggattaagaaaa

SEQ ID NO: 1306756 - DNA, 15 bp, Homo sapiens
gccaggattaagaaa

SEQ ID NO: 1306757 - DNA, 15 bp, Homo sapiens
tgccaggattaagaa

SEQ ID NO: 1306758 - DNA, 15 bp, Homo sapiens
ttgccaggattaaga

SEQ ID NO: 1306759 - DNA, 15 bp, Homo sapiens
tttgccaggattaag

SEQ ID NO: 1306760 - DNA, 15 bp, Homo sapiens
ttttgccaggattaa

SEQ ID NO: 1306761 - DNA, 15 bp, Homo sapiens
attttgccaggatta

SEQ ID NO: 1306762 - DNA, 15 bp, Homo sapiens
aattttgccaggatt

SEQ ID NO: 1306763 - DNA, 15 bp, Homo sapiens
gaattttgccaggat

SEQ ID NO: 1306764 - DNA, 15 bp, Homo sapiens
tgaattttgccagga

SEQ ID NO: 1306765 - DNA, 15 bp, Homo sapiens
gtgaattttgccagg

SEQ ID NO: 1306766 - DNA, 15 bp, Homo sapiens
tgtgaattttgccag

SEQ ID NO: 1306767 - DNA, 15 bp, Homo sapiens
ctgtgaattttgcca

SEQ ID NO: 1306768 - DNA, 15 bp, Homo sapiens
tctgtgaattttgcc

SEQ ID NO: 1306769 - DNA, 15 bp, Homo sapiens
ctctgtgaattttgc

SEQ ID NO: 1306770 - DNA, 15 bp, Homo sapiens
gctctgtgaattttg

SEQ ID NO: 1306771 - DNA, 15 bp, Homo sapiens
tgctctgtgaatttt

SEQ ID NO: 1306772 - DNA, 15 bp, Homo sapiens
atgctctgtgaattt

SEQ ID NO: 1306773 - DNA, 15 bp, Homo sapiens
tatgctctgtgaatt

SEQ ID NO: 1306774 - DNA, 15 bp, Homo sapiens
ttatgctctgtgaat

SEQ ID NO: 1306775 - DNA, 15 bp, Homo sapiens
tttatgctctgtgaa

SEQ ID NO: 1306776 - DNA, 15 bp, Homo sapiens
ttttatgctctgtga

SEQ ID NO: 1306777 - DNA, 15 bp, Homo sapiens
cttttatgctctgtg

SEQ ID NO: 1306778 - DNA, 15 bp, Homo sapiens
acttttatgctctgt

SEQ ID NO: 1306779 - DNA, 15 bp, Homo sapiens
tacttttatgctctg

SEQ ID NO: 1306780 - DNA, 15 bp, Homo sapiens
ttacttttatgctct

SEQ ID NO: 1306781 - DNA, 15 bp, Homo sapiens
gttacttttatgctc

SEQ ID NO: 1306782 - DNA, 15 bp, Homo sapiens
agttacttttatgct

SEQ ID NO: 1306783 - DNA, 15 bp, Homo sapiens
tagttacttttatgc

SEQ ID NO: 1306784 - DNA, 15 bp, Homo sapiens
atagttacttttatg

SEQ ID NO: 1306785 - DNA, 15 bp, Homo sapiens
aatagttacttttat

SEQ ID NO: 1306786 - DNA, 15 bp, Homo sapiens
taatagttactttta

SEQ ID NO: 1306787 - DNA, 15 bp, Homo sapiens
ctaatagttactttt

SEQ ID NO: 1306788 - DNA, 15 bp, Homo sapiens
gctaatagttacttt

SEQ ID NO: 1306789 - DNA, 15 bp, Homo sapiens
ggctaatagttactt

SEQ ID NO: 1306790 - DNA, 15 bp, Homo sapiens
tggctaatagttact

SEQ ID NO: 1306791 - DNA, 15 bp, Homo sapiens
atggctaatagttac

SEQ ID NO: 1306792 - DNA, 15 bp, Homo sapiens
aatggctaatagtta

SEQ ID NO: 1306793 - DNA, 15 bp, Homo sapiens
aaatggctaatagtt

SEQ ID NO: 1306794 - DNA, 15 bp, Homo sapiens
aaaatggctaatagt

SEQ ID NO: 1306795 - DNA, 15 bp, Homo sapiens
taaaatggctaatag

SEQ ID NO: 1306796 - DNA, 15 bp, Homo sapiens
ttaaaatggctaata

SEQ ID NO: 1306797 - DNA, 15 bp, Homo sapiens
attaaaatggctaat

SEQ ID NO: 1306798 - DNA, 15 bp, Homo sapiens
cattaaaatggctaa

SEQ ID NO: 1306799 - DNA, 15 bp, Homo sapiens
acattaaaatggcta

SEQ ID NO: 1306800 - DNA, 15 bp, Homo sapiens
cacattaaaatggct

SEQ ID NO: 1306801 - DNA, 15 bp, Homo sapiens
acacattaaaatggc

SEQ ID NO: 1306802 - DNA, 15 bp, Homo sapiens
tacacattaaaatgg

SEQ ID NO: 1306803 - DNA, 15 bp, Homo sapiens
gtacacattaaaatg

SEQ ID NO: 1306804 - DNA, 15 bp, Homo sapiens
cgtacacattaaaat

SEQ ID NO: 1306805 - DNA, 15 bp, Homo sapiens
tcgtacacattaaaa

SEQ ID NO: 1306806 - DNA, 15 bp, Homo sapiens
atcgtacacattaaa

SEQ ID NO: 1306807 - DNA, 15 bp, Homo sapiens
tatcgtacacattaa

SEQ ID NO: 1306808 - DNA, 15 bp, Homo sapiens
gtatcgtacacatta

SEQ ID NO: 1306809 - DNA, 15 bp, Homo sapiens
tgtatcgtacacatt

SEQ ID NO: 1306810 - DNA, 15 bp, Homo sapiens
ctgtatcgtacacat

SEQ ID NO: 1306811 - DNA, 15 bp, Homo sapiens
actgtatcgtacaca

SEQ ID NO: 1306812 - DNA, 15 bp, Homo sapiens
cactgtatcgtacac

SEQ ID NO: 1306813 - DNA, 15 bp, Homo sapiens
ccactgtatcgtaca

SEQ ID NO: 1306814 - DNA, 15 bp, Homo sapiens
accactgtatcgtac

SEQ ID NO: 1306815 - DNA, 15 bp, Homo sapiens
caccactgtatcgta

SEQ ID NO: 1306816 - DNA, 15 bp, Homo sapiens
tcaccactgtatcgt

SEQ ID NO: 1306817 - DNA, 15 bp, Homo sapiens
atcaccactgtatcg

SEQ ID NO: 1306818 - DNA, 15 bp, Homo sapiens
aatcaccactgtatc

SEQ ID NO: 1306819 - DNA, 15 bp, Homo sapiens
gaatcaccactgtat

SEQ ID NO: 1306820 - DNA, 15 bp, Homo sapiens
cgaatcaccactgta

SEQ ID NO: 1306821 - DNA, 15 bp, Homo sapiens
acgaatcaccactgt

SEQ ID NO: 1306822 - DNA, 15 bp, Homo sapiens
tacgaatcaccactg

SEQ ID NO: 1306823 - DNA, 15 bp, Homo sapiens
gtacgaatcaccact

SEQ ID NO: 1306824 - DNA, 15 bp, Homo sapiens
ggtacgaatcaccac

SEQ ID NO: 1306825 - DNA, 15 bp, Homo sapiens
aggtacgaatcacca

SEQ ID NO: 1306826 - DNA, 15 bp, Homo sapiens
aaggtacgaatcacc

SEQ ID NO: 1306827 - DNA, 15 bp, Homo sapiens
gaaggtacgaatcac

SEQ ID NO: 1306828 - DNA, 15 bp, Homo sapiens
tgaaggtacgaatca

SEQ ID NO: 1306829 - DNA, 15 bp, Homo sapiens
gtgaaggtacgaatc

SEQ ID NO: 1306830 - DNA, 15 bp, Homo sapiens
tgtgaaggtacgaat

SEQ ID NO: 1306831 - DNA, 15 bp, Homo sapiens
ttgtgaaggtacgaa

SEQ ID NO: 1306832 - DNA, 15 bp, Homo sapiens
attgtgaaggtacga

SEQ ID NO: 1306833 - DNA, 15 bp, Homo sapiens
cattgtgaaggtacg

SEQ ID NO: 1306834 - DNA, 15 bp, Homo sapiens
acattgtgaaggtac

SEQ ID NO: 1306835 - DNA, 15 bp, Homo sapiens
aacattgtgaaggta

SEQ ID NO: 1306836 - DNA, 15 bp, Homo sapiens
taacattgtgaaggt

SEQ ID NO: 1306837 - DNA, 15 bp, Homo sapiens
ataacattgtgaagg

SEQ ID NO: 1306838 - DNA, 15 bp, Homo sapiens
cataacattgtgaag

SEQ ID NO: 1306839 - DNA, 15 bp, Homo sapiens
gcataacattgtgaa

SEQ ID NO: 1306840 - DNA, 15 bp, Homo sapiens
tgcataacattgtga

SEQ ID NO: 1306841 - DNA, 15 bp, Homo sapiens
ttgcataacattgtg

SEQ ID NO: 1306842 - DNA, 15 bp, Homo sapiens
gttgcataacattgt

SEQ ID NO: 1306843 - DNA, 15 bp, Homo sapiens
ggttgcataacattg

SEQ ID NO: 1306844 - DNA, 15 bp, Homo sapiens
tggttgcataacatt

SEQ ID NO: 1306845 - DNA, 15 bp, Homo sapiens
atggttgcataacat

SEQ ID NO: 1306846 - DNA, 15 bp, Homo sapiens
gatggttgcataaca

SEQ ID NO: 1306847 - DNA, 15 bp, Homo sapiens
tgatggttgcataac

SEQ ID NO: 1306848 - DNA, 15 bp, Homo sapiens
gtgatggttgcataa

SEQ ID NO: 1306849 - DNA, 15 bp, Homo sapiens
agtgatggttgcata

SEQ ID NO: 1306850 - DNA, 15 bp, Homo sapiens
aagtgatggttgcat

SEQ ID NO: 1306851 - DNA, 15 bp, Homo sapiens
gaagtgatggttgca

SEQ ID NO: 1306852 - DNA, 15 bp, Homo sapiens
agaagtgatggttgc

SEQ ID NO: 1306853 - DNA, 15 bp, Homo sapiens
tagaagtgatggttg

SEQ ID NO: 1306854 - DNA, 15 bp, Homo sapiens
atagaagtgatggtt

SEQ ID NO: 1306855 - DNA, 15 bp, Homo sapiens
aatagaagtgatggt

SEQ ID NO: 1306856 - DNA, 15 bp, Homo sapiens
aaatagaagtgatgg

SEQ ID NO: 1306857 - DNA, 15 bp, Homo sapiens
taaatagaagtgatg

SEQ ID NO: 1306858 - DNA, 15 bp, Homo sapiens
ctaaatagaagtgat

SEQ ID NO: 1306859 - DNA, 15 bp, Homo sapiens
actaaatagaagtga

SEQ ID NO: 1306860 - DNA, 15 bp, Homo sapiens
gactaaatagaagtg

SEQ ID NO: 1306861 - DNA, 15 bp, Homo sapiens
tgactaaatagaagt

SEQ ID NO: 1306862 - DNA, 15 bp, Homo sapiens
ttgactaaatagaag

SEQ ID NO: 1306863 - DNA, 15 bp, Homo sapiens
cttgactaaatagaa

SEQ ID NO: 1306864 - DNA, 15 bp, Homo sapiens
tcttgactaaataga

SEQ ID NO: 1306865 - DNA, 15 bp, Homo sapiens
gtcttgactaaatag

SEQ ID NO: 1306866 - DNA, 15 bp, Homo sapiens
tgtcttgactaaata

SEQ ID NO: 1306867 - DNA, 15 bp, Homo sapiens
atgtcttgactaaat

SEQ ID NO: 1306868 - DNA, 15 bp, Homo sapiens
aatgtcttgactaaa

SEQ ID NO: 1306869 - DNA, 15 bp, Homo sapiens
aaatgtcttgactaa

SEQ ID NO: 1306870 - DNA, 15 bp, Homo sapiens
gaaatgtcttgacta

SEQ ID NO: 1306871 - DNA, 15 bp, Homo sapiens
agaaatgtcttgact

SEQ ID NO: 1306872 - DNA, 15 bp, Homo sapiens
cagaaatgtcttgac

SEQ ID NO: 1306873 - DNA, 15 bp, Homo sapiens
acagaaatgtcttga

SEQ ID NO: 1306874 - DNA, 15 bp, Homo sapiens
tacagaaatgtcttg

SEQ ID NO: 1306875 - DNA, 15 bp, Homo sapiens
ttacagaaatgtctt

SEQ ID NO: 1306876 - DNA, 15 bp, Homo sapiens
tttacagaaatgtct

SEQ ID NO: 1306877 - DNA, 15 bp, Homo sapiens
gtttacagaaatgtc

SEQ ID NO: 1306878 - DNA, 15 bp, Homo sapiens
ggtttacagaaatgt

SEQ ID NO: 1306879 - DNA, 15 bp, Homo sapiens
gggtttacagaaatg

SEQ ID NO: 1306880 - DNA, 15 bp, Homo sapiens
tgggtttacagaaat

SEQ ID NO: 1306881 - DNA, 15 bp, Homo sapiens
ttgggtttacagaaa

SEQ ID NO: 1306882 - DNA, 15 bp, Homo sapiens
tttgggtttacagaa

SEQ ID NO: 1306883 - DNA, 15 bp, Homo sapiens
ttttgggtttacaga

SEQ ID NO: 1306884 - DNA, 15 bp, Homo sapiens
cttttgggtttacag

SEQ ID NO: 1306885 - DNA, 15 bp, Homo sapiens
ccttttgggtttaca

SEQ ID NO: 1306886 - DNA, 15 bp, Homo sapiens
tccttttgggtttac

SEQ ID NO: 1306887 - DNA, 15 bp, Homo sapiens
ttccttttgggttta

SEQ ID NO: 1306888 - DNA, 15 bp, Homo sapiens
tttccttttgggttt

SEQ ID NO: 1306889 - DNA, 15 bp, Homo sapiens
gtttccttttgggtt

SEQ ID NO: 1306890 - DNA, 15 bp, Homo sapiens
ggtttccttttgggt

SEQ ID NO: 1306891 - DNA, 15 bp, Homo sapiens
gggtttccttttggg

SEQ ID NO: 1306892 - DNA, 15 bp, Homo sapiens
ggggtttccttttgg

SEQ ID NO: 1306893 - DNA, 15 bp, Homo sapiens
tggggtttccttttg

SEQ ID NO: 1306894 - DNA, 15 bp, Homo sapiens
atggggtttcctttt

SEQ ID NO: 1306895 - DNA, 15 bp, Homo sapiens
tatggggtttccttt

SEQ ID NO: 1306896 - DNA, 15 bp, Homo sapiens
gtatggggtttcctt

SEQ ID NO: 1306897 - DNA, 15 bp, Homo sapiens
agtatggggtttcct

SEQ ID NO: 1306898 - DNA, 15 bp, Homo sapiens
gagtatggggtttcc

SEQ ID NO: 1306899 - DNA, 15 bp, Homo sapiens
tgagtatggggtttc

SEQ ID NO: 1306900 - DNA, 15 bp, Homo sapiens
atgagtatggggttt

SEQ ID NO: 1306901 - DNA, 15 bp, Homo sapiens
gatgagtatggggtt

SEQ ID NO: 1306902 - DNA, 15 bp, Homo sapiens
tgatgagtatggggt

SEQ ID NO: 1306903 - DNA, 15 bp, Homo sapiens
ctgatgagtatgggg

SEQ ID NO: 1306904 - DNA, 15 bp, Homo sapiens
tctgatgagtatggg

SEQ ID NO: 1306905 - DNA, 15 bp, Homo sapiens
ctctgatgagtatgg

SEQ ID NO: 1306906 - DNA, 15 bp, Homo sapiens
actctgatgagtatg

SEQ ID NO: 1306907 - DNA, 15 bp, Homo sapiens
gactctgatgagtat

SEQ ID NO: 1306908 - DNA, 15 bp, Homo sapiens
tgactctgatgagta

SEQ ID NO: 1306909 - DNA, 15 bp, Homo sapiens
gtgactctgatgagt

SEQ ID NO: 1306910 - DNA, 15 bp, Homo sapiens
agtgactctgatgag

SEQ ID NO: 1306911 - DNA, 15 bp, Homo sapiens
ggagtgactctgatg

SEQ ID NO: 1306912 - DNA, 15 bp, Homo sapiens
gggagtgactctgat

SEQ ID NO: 1306913 - DNA, 15 bp, Homo sapiens
ggggagtgactctga

SEQ ID NO: 1306914 - DNA, 15 bp, Homo sapiens
tggggagtgactctg

SEQ ID NO: 1306915 - DNA, 15 bp, Homo sapiens
atggggagtgactct

SEQ ID NO: 1306916 - DNA, 15 bp, Homo sapiens
aatggggagtgactc

SEQ ID NO: 1306917 - DNA, 15 bp, Homo sapiens
gaatggggagtgact

SEQ ID NO: 1306918 - DNA, 15 bp, Homo sapiens
ggaatggggagtgac

SEQ ID NO: 1306919 - DNA, 15 bp, Homo sapiens
aggaatggggagtga

SEQ ID NO: 1306920 - DNA, 15 bp, Homo sapiens
gaggaatggggagtg

SEQ ID NO: 1306921 - DNA, 15 bp, Homo sapiens
agaggaatggggagt

SEQ ID NO: 1306922 - DNA, 15 bp, Homo sapiens
cagaggaatggggag

SEQ ID NO: 1306923 - DNA, 15 bp, Homo sapiens
acagaggaatgggga

SEQ ID NO: 1306924 - DNA, 15 bp, Homo sapiens
gacagaggaatgggg

SEQ ID NO: 1306925 - DNA, 15 bp, Homo sapiens
ggacagaggaatggg

SEQ ID NO: 1306926 - DNA, 15 bp, Homo sapiens
aggacagaggaatgg

SEQ ID NO: 1306927 - DNA, 15 bp, Homo sapiens
gaggacagaggaatg

SEQ ID NO: 1306928 - DNA, 15 bp, Homo sapiens
ggaggacagaggaat

SEQ ID NO: 1306929 - DNA, 15 bp, Homo sapiens
aggaggacagaggaa

SEQ ID NO: 1306930 - DNA, 15 bp, Homo sapiens
taggaggacagagga

SEQ ID NO: 1306931 - DNA, 15 bp, Homo sapiens
ctaggaggacagagg

SEQ ID NO: 1306932 - DNA, 15 bp, Homo sapiens
cctaggaggacagag

SEQ ID NO: 1306933 - DNA, 15 bp, Homo sapiens
gcctaggaggacaga

SEQ ID NO: 1306934 - DNA, 15 bp, Homo sapiens
ggcctaggaggacag

SEQ ID NO: 1306935 - DNA, 15 bp, Homo sapiens
gggcctaggaggaca

SEQ ID NO: 1306936 - DNA, 15 bp, Homo sapiens
agggcctaggaggac

SEQ ID NO: 1306937 - DNA, 15 bp, Homo sapiens
cagggcctaggagga

SEQ ID NO: 1306938 - DNA, 15 bp, Homo sapiens
tcagggcctaggagg

SEQ ID NO: 1306939 - DNA, 15 bp, Homo sapiens
gtcagggcctaggag

SEQ ID NO: 1306940 - DNA, 15 bp, Homo sapiens
tgtcagggcctagga

SEQ ID NO: 1306941 - DNA, 15 bp, Homo sapiens
ttgtcagggcctagg

SEQ ID NO: 1306942 - DNA, 15 bp, Homo sapiens
gttgtcagggcctag

SEQ ID NO: 1306943 - DNA, 15 bp, Homo sapiens
ggttgtcagggccta

SEQ ID NO: 1306944 - DNA, 15 bp, Homo sapiens
tggttgtcagggcct

SEQ ID NO: 1306945 - DNA, 15 bp, Homo sapiens
gtggttgtcagggcc

SEQ ID NO: 1306946 - DNA, 15 bp, Homo sapiens
agtggttgtcagggc

SEQ ID NO: 1306947 - DNA, 15 bp, Homo sapiens
cagtggttgtcaggg

SEQ ID NO: 1306948 - DNA, 15 bp, Homo sapiens
tcagtggttgtcagg

SEQ ID NO: 1306949 - DNA, 15 bp, Homo sapiens
atcagtggttgtcag

SEQ ID NO: 1306950 - DNA, 15 bp, Homo sapiens
gatcagtggttgtca

SEQ ID NO: 1306951 - DNA, 15 bp, Homo sapiens
agatcagtggttgtc

SEQ ID NO: 1306952 - DNA, 15 bp, Homo sapiens
cagatcagtggttgt

SEQ ID NO: 1306953 - DNA, 15 bp, Homo sapiens
gcagatcagtggttg

SEQ ID NO: 1306954 - DNA, 15 bp, Homo sapiens
agcagatcagtggtt

SEQ ID NO: 1306955 - DNA, 15 bp, Homo sapiens
aagcagatcagtggt

SEQ ID NO: 1306956 - DNA, 15 bp, Homo sapiens
aaagcagatcagtgg

SEQ ID NO: 1306957 - DNA, 15 bp, Homo sapiens
gaaagcagatcagtg

SEQ ID NO: 1306958 - DNA, 15 bp, Homo sapiens
agaaagcagatcagt

SEQ ID NO: 1306959 - DNA, 15 bp, Homo sapiens
cagaaagcagatcag

SEQ ID NO: 1306960 - DNA, 15 bp, Homo sapiens
acagaaagcagatca

SEQ ID NO: 1306961 - DNA, 15 bp, Homo sapiens
gacagaaagcagatc

SEQ ID NO: 1306962 - DNA, 15 bp, Homo sapiens
agacagaaagcagat

SEQ ID NO: 1306963 - DNA, 15 bp, Homo sapiens
gagacagaaagcaga

SEQ ID NO: 1306964 - DNA, 15 bp, Homo sapiens
agagacagaaagcag

SEQ ID NO: 1306965 - DNA, 15 bp, Homo sapiens
tagagacagaaagca

SEQ ID NO: 1306966 - DNA, 15 bp, Homo sapiens
atagagacagaaagc

SEQ ID NO: 1306967 - DNA, 15 bp, Homo sapiens
catagagacagaaag

SEQ ID NO: 1306968 - DNA, 15 bp, Homo sapiens
ccatagagacagaaa

SEQ ID NO: 1306969 - DNA, 15 bp, Homo sapiens
tccatagagacagaa

SEQ ID NO: 1306970 - DNA, 15 bp, Homo sapiens
atccatagagacaga

SEQ ID NO: 1306971 - DNA, 15 bp, Homo sapiens
aatccatagagacag

SEQ ID NO: 1306972 - DNA, 15 bp, Homo sapiens
aaatccatagagaca

SEQ ID NO: 1306973 - DNA, 15 bp, Homo sapiens
taaatccatagagac

SEQ ID NO: 1306974 - DNA, 15 bp, Homo sapiens
gtaaatccatagaga

SEQ ID NO: 1306975 - DNA, 15 bp, Homo sapiens
ggtaaatccatagag

SEQ ID NO: 1306976 - DNA, 15 bp, Homo sapiens
aggtaaatccataga

SEQ ID NO: 1306977 - DNA, 15 bp, Homo sapiens
gaggtaaatccatag

SEQ ID NO: 1306978 - DNA, 15 bp, Homo sapiens
agaggtaaatccata

SEQ ID NO: 1306979 - DNA, 15 bp, Homo sapiens
aagaggtaaatccat

SEQ ID NO: 1306980 - DNA, 15 bp, Homo sapiens
gaagaggtaaatcca

SEQ ID NO: 1306981 - DNA, 15 bp, Homo sapiens
agaagaggtaaatcc

SEQ ID NO: 1306982 - DNA, 15 bp, Homo sapiens
tagaagaggtaaatc

SEQ ID NO: 1306983 - DNA, 15 bp, Homo sapiens
ctagaagaggtaaat

SEQ ID NO: 1306984 - DNA, 15 bp, Homo sapiens
tctagaagaggtaaa

SEQ ID NO: 1306985 - DNA, 15 bp, Homo sapiens
atctagaagaggtaa

SEQ ID NO: 1306986 - DNA, 15 bp, Homo sapiens
catctagaagaggta

SEQ ID NO: 1306987 - DNA, 15 bp, Homo sapiens
acatctagaagaggt

SEQ ID NO: 1306988 - DNA, 15 bp, Homo sapiens
aacatctagaagagg

SEQ ID NO: 1306989 - DNA, 15 bp, Homo sapiens
aaacatctagaagag

SEQ ID NO: 1306990 - DNA, 15 bp, Homo sapiens
gaaacatctagaaga

SEQ ID NO: 1306991 - DNA, 15 bp, Homo sapiens
tgaaacatctagaag

SEQ ID NO: 1306992 - DNA, 15 bp, Homo sapiens
atgaaacatctagaa

SEQ ID NO: 1306993 - DNA, 15 bp, Homo sapiens
gatgaaacatctaga

SEQ ID NO: 1306994 - DNA, 15 bp, Homo sapiens
agatgaaacatctag

SEQ ID NO: 1306995 - DNA, 15 bp, Homo sapiens
tagatgaaacatcta

SEQ ID NO: 1306996 - DNA, 15 bp, Homo sapiens
ttagatgaaacatct

SEQ ID NO: 1306997 - DNA, 15 bp, Homo sapiens
tttagatgaaacatc

SEQ ID NO: 1306998 - DNA, 15 bp, Homo sapiens
atttagatgaaacat

SEQ ID NO: 1306999 - DNA, 15 bp, Homo sapiens
catttagatgaaaca

SEQ ID NO: 1307000 - DNA, 15 bp, Homo sapiens
ccatttagatgaaac

SEQ ID NO: 1307001 - DNA, 15 bp, Homo sapiens
tccatttagatgaaa

SEQ ID NO: 1307002 - DNA, 15 bp, Homo sapiens
ttccatttagatgaa

SEQ ID NO: 1307003 - DNA, 15 bp, Homo sapiens
attccatttagatga

SEQ ID NO: 1307004 - DNA, 15 bp, Homo sapiens
gattccatttagatg

SEQ ID NO: 1307005 - DNA, 15 bp, Homo sapiens
tgattccatttagat

SEQ ID NO: 1307006 - DNA, 15 bp, Homo sapiens
atgattccatttaga

SEQ ID NO: 1307007 - DNA, 15 bp, Homo sapiens
tatgattccatttag

SEQ ID NO: 1307008 - DNA, 15 bp, Homo sapiens
atatgattccattta

SEQ ID NO: 1307009 - DNA, 15 bp, Homo sapiens
tatatgattccattt

SEQ ID NO: 1307010 - DNA, 15 bp, Homo sapiens
atatatgattccatt

SEQ ID NO: 1307011 - DNA, 15 bp, Homo sapiens
aatatatgattccat

SEQ ID NO: 1307012 - DNA, 15 bp, Homo sapiens
aaatatatgattcca

SEQ ID NO: 1307013 - DNA, 15 bp, Homo sapiens
caaatatatgattcc

SEQ ID NO: 1307014 - DNA, 15 bp, Homo sapiens
gcaaatatatgattc

SEQ ID NO: 1307015 - DNA, 15 bp, Homo sapiens
cgcaaatatatgatt

SEQ ID NO: 1307016 - DNA, 15 bp, Homo sapiens
tcgcaaatatatgat

SEQ ID NO: 1307017 - DNA, 15 bp, Homo sapiens
gtcgcaaatatatga

SEQ ID NO: 1307018 - DNA, 15 bp, Homo sapiens
ggtcgcaaatatatg

SEQ ID NO: 1307019 - DNA, 15 bp, Homo sapiens
aggtcgcaaatatat

SEQ ID NO: 1307020 - DNA, 15 bp, Homo sapiens
aaggtcgcaaatata

SEQ ID NO: 1307021 - DNA, 15 bp, Homo sapiens
aaaggtcgcaaatat

SEQ ID NO: 1307022 - DNA, 15 bp, Homo sapiens
caaaggtcgcaaata

SEQ ID NO: 1307023 - DNA, 15 bp, Homo sapiens
acaaaggtcgcaaat

SEQ ID NO: 1307024 - DNA, 15 bp, Homo sapiens
cacaaaggtcgcaaa

SEQ ID NO: 1307025 - DNA, 15 bp, Homo sapiens
acacaaaggtcgcaa

SEQ ID NO: 1307026 - DNA, 15 bp, Homo sapiens
gacacaaaggtcgca

SEQ ID NO: 1307027 - DNA, 15 bp, Homo sapiens
agacacaaaggtcgc

SEQ ID NO: 1307028 - DNA, 15 bp, Homo sapiens
cagacacaaaggtcg

SEQ ID NO: 1307029 - DNA, 15 bp, Homo sapiens
ccagacacaaaggtc

SEQ ID NO: 1307030 - DNA, 15 bp, Homo sapiens
gccagacacaaaggt

SEQ ID NO: 1307031 - DNA, 15 bp, Homo sapiens
agccagacacaaagg

SEQ ID NO: 1307032 - DNA, 15 bp, Homo sapiens
aagccagacacaaag

SEQ ID NO: 1307033 - DNA, 15 bp, Homo sapiens
ggaagccagacacaa

SEQ ID NO: 1307034 - DNA, 15 bp, Homo sapiens
aggaagccagacaca

SEQ ID NO: 1307035 - DNA, 15 bp, Homo sapiens
aaggaagccagacac

SEQ ID NO: 1307036 - DNA, 15 bp, Homo sapiens
gaaggaagccagaca

SEQ ID NO: 1307037 - DNA, 15 bp, Homo sapiens
tgaaggaagccagac

SEQ ID NO: 1307038 - DNA, 15 bp, Homo sapiens
atgaaggaagccaga

SEQ ID NO: 1307039 - DNA, 15 bp, Homo sapiens
aatgaaggaagccag

SEQ ID NO: 1307040 - DNA, 15 bp, Homo sapiens
caatgaaggaagcca

SEQ ID NO: 1307041 - DNA, 15 bp, Homo sapiens
tcaatgaaggaagcc

SEQ ID NO: 1307042 - DNA, 15 bp, Homo sapiens
gtcaatgaaggaagc

SEQ ID NO: 1307043 - DNA, 15 bp, Homo sapiens
tgtcaatgaaggaag

SEQ ID NO: 1307044 - DNA, 15 bp, Homo sapiens
atgtcaatgaaggaa

SEQ ID NO: 1307045 - DNA, 15 bp, Homo sapiens
tatgtcaatgaagga

SEQ ID NO: 1307046 - DNA, 15 bp, Homo sapiens
ttatgtcaatgaagg

SEQ ID NO: 1307047 - DNA, 15 bp, Homo sapiens
attatgtcaatgaag

SEQ ID NO: 1307048 - DNA, 15 bp, Homo sapiens
cattatgtcaatgaa

SEQ ID NO: 1307049 - DNA, 15 bp, Homo sapiens
gcattatgtcaatga

SEQ ID NO: 1307050 - DNA, 15 bp, Homo sapiens
agcattatgtcaatg

SEQ ID NO: 1307051 - DNA, 15 bp, Homo sapiens
aagcattatgtcaat

SEQ ID NO: 1307052 - DNA, 15 bp, Homo sapiens
aaagcattatgtcaa

SEQ ID NO: 1307053 - DNA, 15 bp, Homo sapiens
gaaagcattatgtca

SEQ ID NO: 1307054 - DNA, 15 bp, Homo sapiens
tgaaagcattatgtc

SEQ ID NO: 1307055 - DNA, 15 bp, Homo sapiens
ttgaaagcattatgt

SEQ ID NO: 1307056 - DNA, 15 bp, Homo sapiens
aaccttgaaagcatt

SEQ ID NO: 1307057 - DNA, 15 bp, Homo sapiens
gaaccttgaaagcat

SEQ ID NO: 1307058 - DNA, 15 bp, Homo sapiens
tgaaccttgaaagca

SEQ ID NO: 1307059 - DNA, 15 bp, Homo sapiens
atgaaccttgaaagc

SEQ ID NO: 1307060 - DNA, 15 bp, Homo sapiens
gatgaaccttgaaag

SEQ ID NO: 1307061 - DNA, 15 bp, Homo sapiens
ggatgaaccttgaaa

SEQ ID NO: 1307062 - DNA, 15 bp, Homo sapiens
tggatgaaccttgaa

SEQ ID NO: 1307063 - DNA, 15 bp, Homo sapiens
aaagggtctccttgg

SEQ ID NO: 1307064 - DNA, 15 bp, Homo sapiens
caaagggtctccttg

SEQ ID NO: 1307065 - DNA, 15 bp, Homo sapiens
ccaaagggtctcctt

SEQ ID NO: 1307066 - DNA, 15 bp, Homo sapiens
cccaaagggtctcct

SEQ ID NO: 1307067 - DNA, 15 bp, Homo sapiens
acccaaagggtctcc

SEQ ID NO: 1307068 - DNA, 15 bp, Homo sapiens
aacccaaagggtctc

SEQ ID NO: 1307069 - DNA, 15 bp, Homo sapiens
taacccaaagggtct

SEQ ID NO: 1307070 - DNA, 15 bp, Homo sapiens
ttaacccaaagggtc

SEQ ID NO: 1307071 - DNA, 15 bp, Homo sapiens
tttaacccaaagggt

SEQ ID NO: 1307072 - DNA, 15 bp, Homo sapiens
ttttaacccaaaggg

SEQ ID NO: 1307073 - DNA, 15 bp, Homo sapiens
attttaacccaaagg

SEQ ID NO: 1307074 - DNA, 15 bp, Homo sapiens
gattttaacccaaag

SEQ ID NO: 1307075 - DNA, 15 bp, Homo sapiens
ggattttaacccaaa

SEQ ID NO: 1307076 - DNA, 15 bp, Homo sapiens
aggattttaacccaa

SEQ ID NO: 1307077 - DNA, 15 bp, Homo sapiens
gaggattttaaccca

SEQ ID NO: 1307078 - DNA, 15 bp, Homo sapiens
tgaggattttaaccc

SEQ ID NO: 1307079 - DNA, 15 bp, Homo sapiens
gtgaggattttaacc

SEQ ID NO: 1307080 - DNA, 15 bp, Homo sapiens
ggtgaggattttaac

SEQ ID NO: 1307081 - DNA, 15 bp, Homo sapiens
gggtgaggattttaa

SEQ ID NO: 1307082 - DNA, 15 bp, Homo sapiens
tgggtgaggatttta

SEQ ID NO: 1307083 - DNA, 15 bp, Homo sapiens
gtgggtgaggatttt

SEQ ID NO: 1307084 - DNA, 15 bp, Homo sapiens
tgtgggtgaggattt

SEQ ID NO: 1307085 - DNA, 15 bp, Homo sapiens
gtgtgggtgaggatt

SEQ ID NO: 1307086 - DNA, 15 bp, Homo sapiens
agtgtgggtgaggat

SEQ ID NO: 1307087 - DNA, 15 bp, Homo sapiens
gagtgtgggtgagga

SEQ ID NO: 1307088 - DNA, 15 bp, Homo sapiens
ggagtgtgggtgagg

SEQ ID NO: 1307089 - DNA, 15 bp, Homo sapiens
aggagtgtgggtgag

SEQ ID NO: 1307090 - DNA, 15 bp, Homo sapiens
gaggagtgtgggtga

SEQ ID NO: 1307091 - DNA, 15 bp, Homo sapiens
agaggagtgtgggtg

SEQ ID NO: 1307092 - DNA, 15 bp, Homo sapiens
aagaggagtgtgggt

SEQ ID NO: 1307093 - DNA, 15 bp, Homo sapiens
gaagaggagtgtggg

SEQ ID NO: 1307094 - DNA, 15 bp, Homo sapiens
tgaagaggagtgtgg

SEQ ID NO: 1307095 - DNA, 15 bp, Homo sapiens
atgaagaggagtgtg

SEQ ID NO: 1307096 - DNA, 15 bp, Homo sapiens
gatgaagaggagtgt

SEQ ID NO: 1307097 - DNA, 15 bp, Homo sapiens
agatgaagaggagtg

SEQ ID NO: 1307098 - DNA, 15 bp, Homo sapiens
tagatgaagaggagt

SEQ ID NO: 1307099 - DNA, 15 bp, Homo sapiens
atagatgaagaggag

SEQ ID NO: 1307100 - DNA, 15 bp, Homo sapiens
catagatgaagagga

SEQ ID NO: 1307101 - DNA, 15 bp, Homo sapiens
acatagatgaagagg

SEQ ID NO: 1307102 - DNA, 15 bp, Homo sapiens
tacatagatgaagag

SEQ ID NO: 1307103 - DNA, 15 bp, Homo sapiens
atacatagatgaaga

SEQ ID NO: 1307104 - DNA, 15 bp, Homo sapiens
aatacatagatgaag

SEQ ID NO: 1307105 - DNA, 15 bp, Homo sapiens
gaatacatagatgaa

SEQ ID NO: 1307106 - DNA, 15 bp, Homo sapiens
agaatacatagatga

SEQ ID NO: 1307107 - DNA, 15 bp, Homo sapiens
aagaatacatagatg

SEQ ID NO: 1307108 - DNA, 15 bp, Homo sapiens
taagaatacatagat

SEQ ID NO: 1307109 - DNA, 15 bp, Homo sapiens
ataagaatacataga

SEQ ID NO: 1307110 - DNA, 15 bp, Homo sapiens
cataagaatacatag

SEQ ID NO: 1307111 - DNA, 15 bp, Homo sapiens
acataagaatacata

SEQ ID NO: 1307112 - DNA, 15 bp, Homo sapiens
cacataagaatacat

SEQ ID NO: 1307113 - DNA, 15 bp, Homo sapiens
ccacataagaataca

SEQ ID NO: 1307114 - DNA, 15 bp, Homo sapiens
tccacataagaatac

SEQ ID NO: 1307115 - DNA, 15 bp, Homo sapiens
ctccacataagaata

SEQ ID NO: 1307116 - DNA, 15 bp, Homo sapiens
tctccacataagaat

SEQ ID NO: 1307117 - DNA, 15 bp, Homo sapiens
atctccacataagaa

SEQ ID NO: 1307118 - DNA, 15 bp, Homo sapiens
aatctccacataaga

SEQ ID NO: 1307119 - DNA, 15 bp, Homo sapiens
aaatctccacataag

SEQ ID NO: 1307120 - DNA, 15 bp, Homo sapiens
aaaatctccacataa

SEQ ID NO: 1307121 - DNA, 15 bp, Homo sapiens
taaaatctccacata

SEQ ID NO: 1307122 - DNA, 15 bp, Homo sapiens
ttaaaatctccacat

SEQ ID NO: 1307123 - DNA, 15 bp, Homo sapiens
attaaaatctccaca

SEQ ID NO: 1307124 - DNA, 15 bp, Homo sapiens
aattaaaatctccac

SEQ ID NO: 1307125 - DNA, 15 bp, Homo sapiens
gaattaaaatctcca

SEQ ID NO: 1307126 - DNA, 15 bp, Homo sapiens
tgaattaaaatctcc

SEQ ID NO: 1307127 - DNA, 15 bp, Homo sapiens
atgaattaaaatctc

SEQ ID NO: 1307128 - DNA, 15 bp, Homo sapiens
gatgaattaaaatct

SEQ ID NO: 1307129 - DNA, 15 bp, Homo sapiens
agatgaattaaaatc

SEQ ID NO: 1307130 - DNA, 15 bp, Homo sapiens
aagatgaattaaaat

SEQ ID NO: 1307131 - DNA, 15 bp, Homo sapiens
aaagatgaattaaaa

SEQ ID NO: 1307132 - DNA, 15 bp, Homo sapiens
aaaagatgaattaaa

SEQ ID NO: 1307133 - DNA, 15 bp, Homo sapiens
aaaaagatgaattaa

SEQ ID NO: 1307134 - DNA, 15 bp, Homo sapiens
gaaaaagatgaatta

SEQ ID NO: 1307135 - DNA, 15 bp, Homo sapiens
ggaaaaagatgaatt

SEQ ID NO: 1307136 - DNA, 15 bp, Homo sapiens
tggaaaaagatgaat

SEQ ID NO: 1307137 - DNA, 15 bp, Homo sapiens
atggaaaaagatgaa

SEQ ID NO: 1307138 - DNA, 15 bp, Homo sapiens
aatggaaaaagatga

SEQ ID NO: 1307139 - DNA, 15 bp, Homo sapiens
caatggaaaaagatg

SEQ ID NO: 1307140 - DNA, 15 bp, Homo sapiens
acaatggaaaaagat

SEQ ID NO: 1307141 - DNA, 15 bp, Homo sapiens
aacaatggaaaaaga

SEQ ID NO: 1307142 - DNA, 15 bp, Homo sapiens
caacaatggaaaaag

SEQ ID NO: 1307143 - DNA, 15 bp, Homo sapiens
gcaacaatggaaaaa

SEQ ID NO: 1307144 - DNA, 15 bp, Homo sapiens
agcaacaatggaaaa

SEQ ID NO: 1307145 - DNA, 15 bp, Homo sapiens
aagcaacaatggaaa

SEQ ID NO: 1307146 - DNA, 15 bp, Homo sapiens
caagcaacaatggaa

SEQ ID NO: 1307147 - DNA, 15 bp, Homo sapiens
tcaagcaacaatgga

SEQ ID NO: 1307148 - DNA, 15 bp, Homo sapiens
ttcaagcaacaatgg

SEQ ID NO: 1307149 - DNA, 15 bp, Homo sapiens
gttcaagcaacaatg

SEQ ID NO: 1307150 - DNA, 15 bp, Homo sapiens
tgttcaagcaacaat

SEQ ID NO: 1307151 - DNA, 15 bp, Homo sapiens
gtgttcaagcaacaa

SEQ ID NO: 1307152 - DNA, 15 bp, Homo sapiens
ggtgttcaagcaaca

SEQ ID NO: 1307153 - DNA, 15 bp, Homo sapiens
aggtgttcaagcaac

SEQ ID NO: 1307154 - DNA, 15 bp, Homo sapiens
caggtgttcaagcaa

SEQ ID NO: 1307155 - DNA, 15 bp, Homo sapiens
tcaggtgttcaagca

SEQ ID NO: 1307156 - DNA, 15 bp, Homo sapiens
atcaggtgttcaagc

SEQ ID NO: 1307157 - DNA, 15 bp, Homo sapiens
aatcaggtgttcaag

SEQ ID NO: 1307158 - DNA, 15 bp, Homo sapiens
gaatcaggtgttcaa

SEQ ID NO: 1307159 - DNA, 15 bp, Homo sapiens
ggaatcaggtgttca

SEQ ID NO: 1307160 - DNA, 15 bp, Homo sapiens
aggaatcaggtgttc

SEQ ID NO: 1307161 - DNA, 15 bp, Homo sapiens
aaggaatcaggtgtt

SEQ ID NO: 1307162 - DNA, 15 bp, Homo sapiens
caaggaatcaggtgt

SEQ ID NO: 1307163 - DNA, 15 bp, Homo sapiens
ccaaggaatcaggtg

SEQ ID NO: 1307164 - DNA, 15 bp, Homo sapiens
cccaaggaatcaggt

SEQ ID NO: 1307165 - DNA, 15 bp, Homo sapiens
acccaaggaatcagg

SEQ ID NO: 1307166 - DNA, 15 bp, Homo sapiens
aacccaaggaatcag

SEQ ID NO: 1307167 - DNA, 15 bp, Homo sapiens
caacccaaggaatca

SEQ ID NO: 1307168 - DNA, 15 bp, Homo sapiens
ccaacccaaggaatc

SEQ ID NO: 1307169 - DNA, 15 bp, Homo sapiens
gccaacccaaggaat

SEQ ID NO: 1307170 - DNA, 15 bp, Homo sapiens
agccaacccaaggaa

SEQ ID NO: 1307171 - DNA, 15 bp, Homo sapiens
aagccaacccaagga

SEQ ID NO: 1307172 - DNA, 15 bp, Homo sapiens
gaagccaacccaagg

SEQ ID NO: 1307173 - DNA, 15 bp, Homo sapiens
ggaagccaacccaag

SEQ ID NO: 1307174 - DNA, 15 bp, Homo sapiens
aggaagccaacccaa

SEQ ID NO: 1307175 - DNA, 15 bp, Homo sapiens
caggaagccaaccca

SEQ ID NO: 1307176 - DNA, 15 bp, Homo sapiens
ccaggaagccaaccc

SEQ ID NO: 1307177 - DNA, 15 bp, Homo sapiens
tccaggaagccaacc

SEQ ID NO: 1307178 - DNA, 15 bp, Homo sapiens
ctccaggaagccaac

SEQ ID NO: 1307179 - DNA, 15 bp, Homo sapiens
tctccaggaagccaa

SEQ ID NO: 1307180 - DNA, 15 bp, Homo sapiens
ttctccaggaagcca

SEQ ID NO: 1307181 - DNA, 15 bp, Homo sapiens
tttctccaggaagcc

SEQ ID NO: 1307182 - DNA, 15 bp, Homo sapiens
atttctccaggaagc

SEQ ID NO: 1307183 - DNA, 15 bp, Homo sapiens
catttctccaggaag

SEQ ID NO: 1307184 - DNA, 15 bp, Homo sapiens
tcatttctccaggaa

SEQ ID NO: 1307185 - DNA, 15 bp, Homo sapiens
ttcatttctccagga

SEQ ID NO: 1307186 - DNA, 15 bp, Homo sapiens
attcatttctccagg

SEQ ID NO: 1307187 - DNA, 15 bp, Homo sapiens
gattcatttctccag

SEQ ID NO: 1307188 - DNA, 15 bp, Homo sapiens
tgattcatttctcca

SEQ ID NO: 1307189 - DNA, 15 bp, Homo sapiens
ctgattcatttctcc

SEQ ID NO: 1307190 - DNA, 15 bp, Homo sapiens
gctgattcatttctc

SEQ ID NO: 1307191 - DNA, 15 bp, Homo sapiens
tgctgattcatttct

SEQ ID NO: 1307192 - DNA, 15 bp, Homo sapiens
ttgctgattcatttc

SEQ ID NO: 1307193 - DNA, 15 bp, Homo sapiens
cttgctgattcattt

SEQ ID NO: 1307194 - DNA, 15 bp, Homo sapiens
tcttgctgattcatt

SEQ ID NO: 1307195 - DNA, 15 bp, Homo sapiens
ctcttgctgattcat

SEQ ID NO: 1307196 - DNA, 15 bp, Homo sapiens
tctcttgctgattca

SEQ ID NO: 1307197 - DNA, 15 bp, Homo sapiens
ttctcttgctgattc

SEQ ID NO: 1307198 - DNA, 15 bp, Homo sapiens
tttctcttgctgatt

SEQ ID NO: 1307199 - DNA, 15 bp, Homo sapiens
gtttctcttgctgat

SEQ ID NO: 1307200 - DNA, 15 bp, Homo sapiens
tgtttctcttgctga

SEQ ID NO: 1307201 - DNA, 15 bp, Homo sapiens
atgtttctcttgctg

SEQ ID NO: 1307202 - DNA, 15 bp, Homo sapiens
tcatgtttctcttgc

SEQ ID NO: 1307203 - DNA, 15 bp, Homo sapiens
ctcatgtttctcttg

SEQ ID NO: 1307204 - DNA, 15 bp, Homo sapiens
gctcatgtttctctt

SEQ ID NO: 1307205 - DNA, 15 bp, Homo sapiens
agctcatgtttctct

SEQ ID NO: 1307206 - DNA, 15 bp, Homo sapiens
cagctcatgtttctc

SEQ ID NO: 1307207 - DNA, 15 bp, Homo sapiens
tcagctcatgtttct

SEQ ID NO: 1307208 - DNA, 15 bp, Homo sapiens
gtcagctcatgtttc

SEQ ID NO: 1307209 - DNA, 15 bp, Homo sapiens
agtcagctcatgttt

SEQ ID NO: 1307210 - DNA, 15 bp, Homo sapiens
aagtcagctcatgtt

SEQ ID NO: 1307211 - DNA, 15 bp, Homo sapiens
gaagtcagctcatgt

SEQ ID NO: 1307212 - DNA, 15 bp, Homo sapiens
ggaagtcagctcatg

SEQ ID NO: 1307213 - DNA, 15 bp, Homo sapiens
aggaagtcagctcat

SEQ ID NO: 1307214 - DNA, 15 bp, Homo sapiens
gaggaagtcagctca

SEQ ID NO: 1307215 - DNA, 15 bp, Homo sapiens
ggaggaagtcagctc

SEQ ID NO: 1307216 - DNA, 15 bp, Homo sapiens
aggaggaagtcagct

SEQ ID NO: 1307217 - DNA, 15 bp, Homo sapiens
taggaggaagtcagc

SEQ ID NO: 1307218 - DNA, 15 bp, Homo sapiens
ataggaggaagtcag

SEQ ID NO: 1307219 - DNA, 15 bp, Homo sapiens
aataggaggaagtca

SEQ ID NO: 1307220 - DNA, 15 bp, Homo sapiens
aaataggaggaagtc

SEQ ID NO: 1307221 - DNA, 15 bp, Homo sapiens
caaataggaggaagt

SEQ ID NO: 1307222 - DNA, 15 bp, Homo sapiens
tcaaataggaggaag

SEQ ID NO: 1307223 - DNA, 15 bp, Homo sapiens
atcaaataggaggaa

SEQ ID NO: 1307224 - DNA, 15 bp, Homo sapiens
tatcaaataggagga

SEQ ID NO: 1307225 - DNA, 15 bp, Homo sapiens
atatcaaataggagg

SEQ ID NO: 1307226 - DNA, 15 bp, Homo sapiens
catatcaaataggag

SEQ ID NO: 1307227 - DNA, 15 bp, Homo sapiens
gcatatcaaatagga

SEQ ID NO: 1307228 - DNA, 15 bp, Homo sapiens
tgcatatcaaatagg

SEQ ID NO: 1307229 - DNA, 15 bp, Homo sapiens
gtgcatatcaaatag

SEQ ID NO: 1307230 - DNA, 15 bp, Homo sapiens
tgtgcatatcaaata

SEQ ID NO: 1307231 - DNA, 15 bp, Homo sapiens
gtgtgcatatcaaat

SEQ ID NO: 1307232 - DNA, 15 bp, Homo sapiens
tgtgtgcatatcaaa

SEQ ID NO: 1307233 - DNA, 15 bp, Homo sapiens
atgtgtgcatatcaa

SEQ ID NO: 1307234 - DNA, 15 bp, Homo sapiens
gatgtgtgcatatca

SEQ ID NO: 1307235 - DNA, 15 bp, Homo sapiens
agatgtgtgcatatc

SEQ ID NO: 1307236 - DNA, 15 bp, Homo sapiens
gagatgtgtgcatat

SEQ ID NO: 1307237 - DNA, 15 bp, Homo sapiens
agagatgtgtgcata

SEQ ID NO: 1307238 - DNA, 15 bp, Homo sapiens
tagagatgtgtgcat

SEQ ID NO: 1307239 - DNA, 15 bp, Homo sapiens
ctagagatgtgtgca

SEQ ID NO: 1307240 - DNA, 15 bp, Homo sapiens
tctagagatgtgtgc

SEQ ID NO: 1307241 - DNA, 15 bp, Homo sapiens
atctagagatgtgtg

SEQ ID NO: 1307242 - DNA, 15 bp, Homo sapiens
aatctagagatgtgt

SEQ ID NO: 1307243 - DNA, 15 bp, Homo sapiens
aaatctagagatgtg

SEQ ID NO: 1307244 - DNA, 15 bp, Homo sapiens
aaaatctagagatgt

SEQ ID NO: 1307245 - DNA, 15 bp, Homo sapiens
aaaaatctagagatg

SEQ ID NO: 1307246 - DNA, 15 bp, Homo sapiens
taaaaatctagagat

SEQ ID NO: 1307247 - DNA, 15 bp, Homo sapiens
ctaaaaatctagaga

SEQ ID NO: 1307248 - DNA, 15 bp, Homo sapiens
gctaaaaatctagag

SEQ ID NO: 1307249 - DNA, 15 bp, Homo sapiens
agctaaaaatctaga

SEQ ID NO: 1307250 - DNA, 15 bp, Homo sapiens
aagctaaaaatctag

SEQ ID NO: 1307251 - DNA, 15 bp, Homo sapiens
aaagctaaaaatcta

SEQ ID NO: 1307252 - DNA, 15 bp, Homo sapiens
caaagctaaaaatct

SEQ ID NO: 1307253 - DNA, 15 bp, Homo sapiens
gcaaagctaaaaatc

SEQ ID NO: 1307254 - DNA, 15 bp, Homo sapiens
agcaaagctaaaaat

SEQ ID NO: 1307255 - DNA, 15 bp, Homo sapiens
gagcaaagctaaaaa

SEQ ID NO: 1307256 - DNA, 15 bp, Homo sapiens
ggagcaaagctaaaa

SEQ ID NO: 1307257 - DNA, 15 bp, Homo sapiens
aggagcaaagctaaa

SEQ ID NO: 1307258 - DNA, 15 bp, Homo sapiens
taggagcaaagctaa

SEQ ID NO: 1307259 - DNA, 15 bp, Homo sapiens
ctaggagcaaagcta

SEQ ID NO: 1307260 - DNA, 15 bp, Homo sapiens
actaggagcaaagct

SEQ ID NO: 1307261 - DNA, 15 bp, Homo sapiens
tactaggagcaaagc

SEQ ID NO: 1307262 - DNA, 15 bp, Homo sapiens
atactaggagcaaag

SEQ ID NO: 1307263 - DNA, 15 bp, Homo sapiens
catactaggagcaaa

SEQ ID NO: 1307264 - DNA, 15 bp, Homo sapiens
gcatactaggagcaa

SEQ ID NO: 1307265 - DNA, 15 bp, Homo sapiens
agcatactaggagca

SEQ ID NO: 1307266 - DNA, 15 bp, Homo sapiens
aagcatactaggagc

SEQ ID NO: 1307267 - DNA, 15 bp, Homo sapiens
gaagcatactaggag

SEQ ID NO: 1307268 - DNA, 15 bp, Homo sapiens
cgaagcatactagga

SEQ ID NO: 1307269 - DNA, 15 bp, Homo sapiens
acgaagcatactagg

SEQ ID NO: 1307270 - DNA, 15 bp, Homo sapiens
cacgaagcatactag

SEQ ID NO: 1307271 - DNA, 15 bp, Homo sapiens
acacgaagcatacta

SEQ ID NO: 1307272 - DNA, 15 bp, Homo sapiens
gacacgaagcatact

SEQ ID NO: 1307273 - DNA, 15 bp, Homo sapiens
tgacacgaagcatac

SEQ ID NO: 1307274 - DNA, 15 bp, Homo sapiens
ttgacacgaagcata

SEQ ID NO: 1307275 - DNA, 15 bp, Homo sapiens
cttgacacgaagcat

SEQ ID NO: 1307276 - DNA, 15 bp, Homo sapiens
acttgacacgaagca

SEQ ID NO: 1307277 - DNA, 15 bp, Homo sapiens
aacttgacacgaagc

SEQ ID NO: 1307278 - DNA, 15 bp, Homo sapiens
aaacttgacacgaag

SEQ ID NO: 1307279 - DNA, 15 bp, Homo sapiens
taaacttgacacgaa

SEQ ID NO: 1307280 - DNA, 15 bp, Homo sapiens
ctaaacttgacacga

SEQ ID NO: 1307281 - DNA, 15 bp, Homo sapiens
cctaaacttgacacg

SEQ ID NO: 1307282 - DNA, 15 bp, Homo sapiens
acctaaacttgacac

SEQ ID NO: 1307283 - DNA, 15 bp, Homo sapiens
gacctaaacttgaca

SEQ ID NO: 1307284 - DNA, 15 bp, Homo sapiens
ggacctaaacttgac

SEQ ID NO: 1307285 - DNA, 15 bp, Homo sapiens
tggacctaaacttga

SEQ ID NO: 1307286 - DNA, 15 bp, Homo sapiens
ctggacctaaacttg

SEQ ID NO: 1307287 - DNA, 15 bp, Homo sapiens
gctggacctaaactt

SEQ ID NO: 1307288 - DNA, 15 bp, Homo sapiens
agctggacctaaact

SEQ ID NO: 1307289 - DNA, 15 bp, Homo sapiens
aagctggacctaaac

SEQ ID NO: 1307290 - DNA, 15 bp, Homo sapiens
gaagctggacctaaa

SEQ ID NO: 1307291 - DNA, 15 bp, Homo sapiens
ggaagctggacctaa

SEQ ID NO: 1307292 - DNA, 15 bp, Homo sapiens
aggaagctggaccta

SEQ ID NO: 1307293 - DNA, 15 bp, Homo sapiens
caggaagctggacct

SEQ ID NO: 1307294 - DNA, 15 bp, Homo sapiens
tcaggaagctggacc

SEQ ID NO: 1307295 - DNA, 15 bp, Homo sapiens
ctcaggaagctggac

SEQ ID NO: 1307296 - DNA, 15 bp, Homo sapiens
gctcaggaagctgga

SEQ ID NO: 1307297 - DNA, 15 bp, Homo sapiens
agctcaggaagctgg

SEQ ID NO: 1307298 - DNA, 15 bp, Homo sapiens
tagctcaggaagctg

SEQ ID NO: 1307299 - DNA, 15 bp, Homo sapiens
ctagctcaggaagct

SEQ ID NO: 1307300 - DNA, 15 bp, Homo sapiens
tctagctcaggaagc

SEQ ID NO: 1307301 - DNA, 15 bp, Homo sapiens
ctctagctcaggaag

SEQ ID NO: 1307302 - DNA, 15 bp, Homo sapiens
gctctagctcaggaa

SEQ ID NO: 1307303 - DNA, 15 bp, Homo sapiens
tgctctagctcagga

SEQ ID NO: 1307304 - DNA, 15 bp, Homo sapiens
gtgctctagctcagg

SEQ ID NO: 1307305 - DNA, 15 bp, Homo sapiens
tgtgctctagctcag

SEQ ID NO: 1307306 - DNA, 15 bp, Homo sapiens
ttgtgctctagctca

SEQ ID NO: 1307307 - DNA, 15 bp, Homo sapiens
tttgtgctctagctc

SEQ ID NO: 1307308 - DNA, 15 bp, Homo sapiens
ttttgtgctctagct

SEQ ID NO: 1307309 - DNA, 15 bp, Homo sapiens
tttttgtgctctagc

SEQ ID NO: 1307310 - DNA, 15 bp, Homo sapiens
ttttttgtgctctag

SEQ ID NO: 1307311 - DNA, 15 bp, Homo sapiens
tttttttgtgctcta

SEQ ID NO: 1307312 - DNA, 15 bp, Homo sapiens
atttttttgtgctct

SEQ ID NO: 1307313 - DNA, 15 bp, Homo sapiens
tatttttttgtgctc

SEQ ID NO: 1307314 - DNA, 15 bp, Homo sapiens
atatttttttgtgct

SEQ ID NO: 1307315 - DNA, 15 bp, Homo sapiens
tatatttttttgtgc

SEQ ID NO: 1307316 - DNA, 15 bp, Homo sapiens
atatatttttttgtg

SEQ ID NO: 1307317 - DNA, 15 bp, Homo sapiens
gatatatttttttgt

SEQ ID NO: 1307318 - DNA, 15 bp, Homo sapiens
tgatatatttttttg

SEQ ID NO: 1307319 - DNA, 15 bp, Homo sapiens
atgatatattttttt

SEQ ID NO: 1307320 - DNA, 15 bp, Homo sapiens
aatgatatatttttt

SEQ ID NO: 1307321 - DNA, 15 bp, Homo sapiens
aaatgatatattttt

SEQ ID NO: 1307322 - DNA, 15 bp, Homo sapiens
caaatgatatatttt

SEQ ID NO: 1307323 - DNA, 15 bp, Homo sapiens
tcaaatgatatattt

SEQ ID NO: 1307324 - DNA, 15 bp, Homo sapiens
ttcaaatgatatatt

SEQ ID NO: 1307325 - DNA, 15 bp, Homo sapiens
cttcaaatgatatat

SEQ ID NO: 1307326 - DNA, 15 bp, Homo sapiens
gcttcaaatgatata

SEQ ID NO: 1307327 - DNA, 15 bp, Homo sapiens
tgcttcaaatgatat

SEQ ID NO: 1307328 - DNA, 15 bp, Homo sapiens
ttgcttcaaatgata

SEQ ID NO: 1307329 - DNA, 15 bp, Homo sapiens
tttgcttcaaatgat

SEQ ID NO: 1307330 - DNA, 15 bp, Homo sapiens
ctttgcttcaaatga

SEQ ID NO: 1307331 - DNA, 15 bp, Homo sapiens
tctttgcttcaaatg

SEQ ID NO: 1307332 - DNA, 15 bp, Homo sapiens
ctctttgcttcaaat

SEQ ID NO: 1307333 - DNA, 15 bp, Homo sapiens
tctctttgcttcaaa

SEQ ID NO: 1307334 - DNA, 15 bp, Homo sapiens
ctctctttgcttcaa

SEQ ID NO: 1307335 - DNA, 15 bp, Homo sapiens
tctctctttgcttca

SEQ ID NO: 1307336 - DNA, 15 bp, Homo sapiens
ttctctctttgcttc

SEQ ID NO: 1307337 - DNA, 15 bp, Homo sapiens
cttctctctttgctt

SEQ ID NO: 1307338 - DNA, 15 bp, Homo sapiens
tcttctctctttgct

SEQ ID NO: 1307339 - DNA, 15 bp, Homo sapiens
ttcttctctctttgc

SEQ ID NO: 1307340 - DNA, 15 bp, Homo sapiens
gttcttctctctttg

SEQ ID NO: 1307341 - DNA, 15 bp, Homo sapiens
cgttcttctctcttt

SEQ ID NO: 1307342 - DNA, 15 bp, Homo sapiens
tcgttcttctctctt

SEQ ID NO: 1307343 - DNA, 15 bp, Homo sapiens
ttcgttcttctctct

SEQ ID NO: 1307344 - DNA, 15 bp, Homo sapiens
gttcgttcttctctc

SEQ ID NO: 1307345 - DNA, 15 bp, Homo sapiens
agttcgttcttctct

SEQ ID NO: 1307346 - DNA, 15 bp, Homo sapiens
cagttcgttcttctc

SEQ ID NO: 1307347 - DNA, 15 bp, Homo sapiens
ccagttcgttcttct

SEQ ID NO: 1307348 - DNA, 15 bp, Homo sapiens
cccagttcgttcttc

SEQ ID NO: 1307349 - DNA, 15 bp, Homo sapiens
ccccagttcgttctt

SEQ ID NO: 1307350 - DNA, 15 bp, Homo sapiens
gccccagttcgttct

SEQ ID NO: 1307351 - DNA, 15 bp, Homo sapiens
agccccagttcgttc

SEQ ID NO: 1307352 - DNA, 15 bp, Homo sapiens
aagccccagttcgtt

SEQ ID NO: 1307353 - DNA, 15 bp, Homo sapiens
gaagccccagttcgt

SEQ ID NO: 1307354 - DNA, 15 bp, Homo sapiens
tgaagccccagttcg

SEQ ID NO: 1307355 - DNA, 15 bp, Homo sapiens
ttgaagccccagttc

SEQ ID NO: 1307356 - DNA, 15 bp, Homo sapiens
attgaagccccagtt

SEQ ID NO: 1307357 - DNA, 15 bp, Homo sapiens
gattgaagccccagt

SEQ ID NO: 1307358 - DNA, 15 bp, Homo sapiens
tgattgaagccccag

SEQ ID NO: 1307359 - DNA, 15 bp, Homo sapiens
gtgattgaagcccca

SEQ ID NO: 1307360 - DNA, 15 bp, Homo sapiens
ggtgattgaagcccc

SEQ ID NO: 1307361 - DNA, 15 bp, Homo sapiens
aggtgattgaagccc

SEQ ID NO: 1307362 - DNA, 15 bp, Homo sapiens
gaggtgattgaagcc

SEQ ID NO: 1307363 - DNA, 15 bp, Homo sapiens
agaggtgattgaagc

SEQ ID NO: 1307364 - DNA, 15 bp, Homo sapiens
cagaggtgattgaag

SEQ ID NO: 1307365 - DNA, 15 bp, Homo sapiens
acagaggtgattgaa

SEQ ID NO: 1307366 - DNA, 15 bp, Homo sapiens
cacagaggtgattga

SEQ ID NO: 1307367 - DNA, 15 bp, Homo sapiens
acacagaggtgattg

SEQ ID NO: 1307368 - DNA, 15 bp, Homo sapiens
tacacagaggtgatt

SEQ ID NO: 1307369 - DNA, 15 bp, Homo sapiens
atacacagaggtgat

SEQ ID NO: 1307370 - DNA, 15 bp, Homo sapiens
aatacacagaggtga

SEQ ID NO: 1307371 - DNA, 15 bp, Homo sapiens
taatacacagaggtg

SEQ ID NO: 1307372 - DNA, 15 bp, Homo sapiens
ataatacacagaggt

SEQ ID NO: 1307373 - DNA, 15 bp, Homo sapiens
aataatacacagagg

SEQ ID NO: 1307374 - DNA, 15 bp, Homo sapiens
aaataatacacagag

SEQ ID NO: 1307375 - DNA, 15 bp, Homo sapiens
gaaataatacacaga

SEQ ID NO: 1307376 - DNA, 15 bp, Homo sapiens
agaaataatacacag

SEQ ID NO: 1307377 - DNA, 15 bp, Homo sapiens
cagaaataatacaca

SEQ ID NO: 1307378 - DNA, 15 bp, Homo sapiens
tcagaaataatacac

SEQ ID NO: 1307379 - DNA, 15 bp, Homo sapiens
atcagaaataataca

SEQ ID NO: 1307380 - DNA, 15 bp, Homo sapiens
tatcagaaataatac

SEQ ID NO: 1307381 - DNA, 15 bp, Homo sapiens
atatcagaaataata

SEQ ID NO: 1307382 - DNA, 15 bp, Homo sapiens
tatatcagaaataat

SEQ ID NO: 1307383 - DNA, 15 bp, Homo sapiens
ctatatcagaaataa

SEQ ID NO: 1307384 - DNA, 15 bp, Homo sapiens
tctatatcagaaata

SEQ ID NO: 1307385 - DNA, 15 bp, Homo sapiens
ttctatatcagaaat

SEQ ID NO: 1307386 - DNA, 15 bp, Homo sapiens
gttctatatcagaaa

SEQ ID NO: 1307387 - DNA, 15 bp, Homo sapiens
ggttctatatcagaa

SEQ ID NO: 1307388 - DNA, 15 bp, Homo sapiens
tggttctatatcaga

SEQ ID NO: 1307389 - DNA, 15 bp, Homo sapiens
ttggttctatatcag

SEQ ID NO: 1307390 - DNA, 15 bp, Homo sapiens
attggttctatatca

SEQ ID NO: 1307391 - DNA, 15 bp, Homo sapiens
tattggttctatatc

SEQ ID NO: 1307392 - DNA, 15 bp, Homo sapiens
ttattggttctatat

SEQ ID NO: 1307393 - DNA, 15 bp, Homo sapiens
cttattggttctata

SEQ ID NO: 1307394 - DNA, 15 bp, Homo sapiens
acttattggttctat

SEQ ID NO: 1307395 - DNA, 15 bp, Homo sapiens
aacttattggttcta

SEQ ID NO: 1307396 - DNA, 15 bp, Homo sapiens
aaacttattggttct

SEQ ID NO: 1307397 - DNA, 15 bp, Homo sapiens
caaacttattggttc

SEQ ID NO: 1307398 - DNA, 15 bp, Homo sapiens
acaaacttattggtt

SEQ ID NO: 1307399 - DNA, 15 bp, Homo sapiens
cacaaacttattggt

SEQ ID NO: 1307400 - DNA, 15 bp, Homo sapiens
acacaaacttattgg

SEQ ID NO: 1307401 - DNA, 15 bp, Homo sapiens
cacacaaacttattg

SEQ ID NO: 1307402 - DNA, 15 bp, Homo sapiens
gcacacaaacttatt

SEQ ID NO: 1307403 - DNA, 15 bp, Homo sapiens
ggcacacaaacttat

SEQ ID NO: 1307404 - DNA, 15 bp, Homo sapiens
gggcacacaaactta

SEQ ID NO: 1307405 - DNA, 15 bp, Homo sapiens
tgggcacacaaactt

SEQ ID NO: 1307406 - DNA, 15 bp, Homo sapiens
gtgggcacacaaact

SEQ ID NO: 1307407 - DNA, 15 bp, Homo sapiens
agtgggcacacaaac

SEQ ID NO: 1307408 - DNA, 15 bp, Homo sapiens
cagtgggcacacaaa

SEQ ID NO: 1307409 - DNA, 15 bp, Homo sapiens
gcagtgggcacacaa

SEQ ID NO: 1307410 - DNA, 15 bp, Homo sapiens
tgcagtgggcacaca

SEQ ID NO: 1307411 - DNA, 15 bp, Homo sapiens
atgcagtgggcacac

SEQ ID NO: 1307412 - DNA, 15 bp, Homo sapiens
tatgcagtgggcaca

SEQ ID NO: 1307413 - DNA, 15 bp, Homo sapiens
ctatgcagtgggcac

SEQ ID NO: 1307414 - DNA, 15 bp, Homo sapiens
actatgcagtgggca

SEQ ID NO: 1307415 - DNA, 15 bp, Homo sapiens
tactatgcagtgggc

SEQ ID NO: 1307416 - DNA, 15 bp, Homo sapiens
ttactatgcagtggg

SEQ ID NO: 1307417 - DNA, 15 bp, Homo sapiens
gttactatgcagtgg

SEQ ID NO: 1307418 - DNA, 15 bp, Homo sapiens
tgttactatgcagtg

SEQ ID NO: 1307419 - DNA, 15 bp, Homo sapiens
ctgttactatgcagt

SEQ ID NO: 1307420 - DNA, 15 bp, Homo sapiens
tctgttactatgcag

SEQ ID NO: 1307421 - DNA, 15 bp, Homo sapiens
gtctgttactatgca

SEQ ID NO: 1307422 - DNA, 15 bp, Homo sapiens
ggtctgttactatgc

SEQ ID NO: 1307423 - DNA, 15 bp, Homo sapiens
gggtctgttactatg

SEQ ID NO: 1307424 - DNA, 15 bp, Homo sapiens
tgggtctgttactat

SEQ ID NO: 1307425 - DNA, 15 bp, Homo sapiens
atgggtctgttacta

SEQ ID NO: 1307426 - DNA, 15 bp, Homo sapiens
aatgggtctgttact

SEQ ID NO: 1307427 - DNA, 15 bp, Homo sapiens
taatgggtctgttac

SEQ ID NO: 1307428 - DNA, 15 bp, Homo sapiens
gtaatgggtctgtta

SEQ ID NO: 1307429 - DNA, 15 bp, Homo sapiens
ggtaatgggtctgtt

SEQ ID NO: 1307430 - DNA, 15 bp, Homo sapiens
gggtaatgggtctgt

SEQ ID NO: 1307431 - DNA, 15 bp, Homo sapiens
agggtaatgggtctg

SEQ ID NO: 1307432 - DNA, 15 bp, Homo sapiens
cagggtaatgggtct

SEQ ID NO: 1307433 - DNA, 15 bp, Homo sapiens
tcagggtaatgggtc

SEQ ID NO: 1307434 - DNA, 15 bp, Homo sapiens
ctcagggtaatgggt

SEQ ID NO: 1307435 - DNA, 15 bp, Homo sapiens
tctcagggtaatggg

SEQ ID NO: 1307436 - DNA, 15 bp, Homo sapiens
gtctcagggtaatgg

SEQ ID NO: 1307437 - DNA, 15 bp, Homo sapiens
tgtctcagggtaatg

SEQ ID NO: 1307438 - DNA, 15 bp, Homo sapiens
ctgtctcagggtaat

SEQ ID NO: 1307439 - DNA, 15 bp, Homo sapiens
gctgtctcagggtaa

SEQ ID NO: 1307440 - DNA, 15 bp, Homo sapiens
tgctgtctcagggta

SEQ ID NO: 1307441 - DNA, 15 bp, Homo sapiens
ctgctgtctcagggt

SEQ ID NO: 1307442 - DNA, 15 bp, Homo sapiens
cctgctgtctcaggg

SEQ ID NO: 1307443 - DNA, 15 bp, Homo sapiens
acctgctgtctcagg

SEQ ID NO: 1307444 - DNA, 15 bp, Homo sapiens
aacctgctgtctcag

SEQ ID NO: 1307445 - DNA, 15 bp, Homo sapiens
aaacctgctgtctca

SEQ ID NO: 1307446 - DNA, 15 bp, Homo sapiens
caaacctgctgtctc

SEQ ID NO: 1307447 - DNA, 15 bp, Homo sapiens
gcaaacctgctgtct

SEQ ID NO: 1307448 - DNA, 15 bp, Homo sapiens
tgcaaacctgctgtc

SEQ ID NO: 1307449 - DNA, 15 bp, Homo sapiens
ctgcaaacctgctgt

SEQ ID NO: 1307450 - DNA, 15 bp, Homo sapiens
gctgcaaacctgctg

SEQ ID NO: 1307451 - DNA, 15 bp, Homo sapiens
tgctgcaaacctgct

SEQ ID NO: 1307452 - DNA, 15 bp, Homo sapiens
ctgctgcaaacctgc

SEQ ID NO: 1307453 - DNA, 15 bp, Homo sapiens
tctgctgcaaacctg

SEQ ID NO: 1307454 - DNA, 15 bp, Homo sapiens
ctctgctgcaaacct

SEQ ID NO: 1307455 - DNA, 15 bp, Homo sapiens
tctctgctgcaaacc

SEQ ID NO: 1307456 - DNA, 15 bp, Homo sapiens
ttctctgctgcaaac

SEQ ID NO: 1307457 - DNA, 15 bp, Homo sapiens
cttctctgctgcaaa

SEQ ID NO: 1307458 - DNA, 15 bp, Homo sapiens
ccttctctgctgcaa

SEQ ID NO: 1307459 - DNA, 15 bp, Homo sapiens
cccttctctgctgca

SEQ ID NO: 1307460 - DNA, 15 bp, Homo sapiens
acccttctctgctgc

SEQ ID NO: 1307461 - DNA, 15 bp, Homo sapiens
aacccttctctgctg

SEQ ID NO: 1307462 - DNA, 15 bp, Homo sapiens
aaacccttctctgct

SEQ ID NO: 1307463 - DNA, 15 bp, Homo sapiens
taaacccttctctgc

SEQ ID NO: 1307464 - DNA, 15 bp, Homo sapiens
ttaaacccttctctg

SEQ ID NO: 1307465 - DNA, 15 bp, Homo sapiens
gttaaacccttctct

SEQ ID NO: 1307466 - DNA, 15 bp, Homo sapiens
agttaaacccttctc

SEQ ID NO: 1307467 - DNA, 15 bp, Homo sapiens
tagttaaacccttct

SEQ ID NO: 1307468 - DNA, 15 bp, Homo sapiens
atagttaaacccttc

SEQ ID NO: 1307469 - DNA, 15 bp, Homo sapiens
gatagttaaaccctt

SEQ ID NO: 1307470 - DNA, 15 bp, Homo sapiens
agatagttaaaccct

SEQ ID NO: 1307471 - DNA, 15 bp, Homo sapiens
gagatagttaaaccc

SEQ ID NO: 1307472 - DNA, 15 bp, Homo sapiens
tgagatagttaaacc

SEQ ID NO: 1307473 - DNA, 15 bp, Homo sapiens
ctgagatagttaaac

SEQ ID NO: 1307474 - DNA, 15 bp, Homo sapiens
cctgagatagttaaa

SEQ ID NO: 1307475 - DNA, 15 bp, Homo sapiens
ccctgagatagttaa

SEQ ID NO: 1307476 - DNA, 15 bp, Homo sapiens
gccctgagatagtta

SEQ ID NO: 1307477 - DNA, 15 bp, Homo sapiens
tgccctgagatagtt

SEQ ID NO: 1307478 - DNA, 15 bp, Homo sapiens
gtgccctgagatagt

SEQ ID NO: 1307479 - DNA, 15 bp, Homo sapiens
ggtgccctgagatag

SEQ ID NO: 1307480 - DNA, 15 bp, Homo sapiens
tggtgccctgagata

SEQ ID NO: 1307481 - DNA, 15 bp, Homo sapiens
ttggtgccctgagat

SEQ ID NO: 1307482 - DNA, 15 bp, Homo sapiens
cttggtgccctgaga

SEQ ID NO: 1307483 - DNA, 15 bp, Homo sapiens
ccttggtgccctgag

SEQ ID NO: 1307484 - DNA, 15 bp, Homo sapiens
cccttggtgccctga

SEQ ID NO: 1307485 - DNA, 15 bp, Homo sapiens
tcccttggtgccctg

SEQ ID NO: 1307486 - DNA, 15 bp, Homo sapiens
ctcccttggtgccct

SEQ ID NO: 1307487 - DNA, 15 bp, Homo sapiens
cctcccttggtgccc

SEQ ID NO: 1307488 - DNA, 15 bp, Homo sapiens
tcctcccttggtgcc

SEQ ID NO: 1307489 - DNA, 15 bp, Homo sapiens
ctcctcccttggtgc

SEQ ID NO: 1307490 - DNA, 15 bp, Homo sapiens
tctcctcccttggtg

SEQ ID NO: 1307491 - DNA, 15 bp, Homo sapiens
atctcctcccttggt

SEQ ID NO: 1307492 - DNA, 15 bp, Homo sapiens
catctcctcccttgg

SEQ ID NO: 1307493 - DNA, 15 bp, Homo sapiens
ccatctcctcccttg

SEQ ID NO: 1307494 - DNA, 15 bp, Homo sapiens
cccatctcctccctt

SEQ ID NO: 1307495 - DNA, 15 bp, Homo sapiens
tcccatctcctccct

SEQ ID NO: 1307496 - DNA, 15 bp, Homo sapiens
ctcccatctcctccc

SEQ ID NO: 1307497 - DNA, 15 bp, Homo sapiens
cctcccatctcctcc

SEQ ID NO: 1307498 - DNA, 15 bp, Homo sapiens
tcctcccatctcctc

SEQ ID NO: 1307499 - DNA, 15 bp, Homo sapiens
ctcctcccatctcct

SEQ ID NO: 1307500 - DNA, 15 bp, Homo sapiens
tctcctcccatctcc

SEQ ID NO: 1307501 - DNA, 15 bp, Homo sapiens
ctctcctcccatctc

SEQ ID NO: 1307502 - DNA, 15 bp, Homo sapiens
gctctcctcccatct

SEQ ID NO: 1307503 - DNA, 15 bp, Homo sapiens
ggctctcctcccatc

SEQ ID NO: 1307504 - DNA, 15 bp, Homo sapiens
aggctctcctcccat

SEQ ID NO: 1307505 - DNA, 15 bp, Homo sapiens
gaggctctcctccca

SEQ ID NO: 1307506 - DNA, 15 bp, Homo sapiens
tgaggctctcctccc

SEQ ID NO: 1307507 - DNA, 15 bp, Homo sapiens
ttgaggctctcctcc

SEQ ID NO: 1307508 - DNA, 15 bp, Homo sapiens
tttgaggctctcctc

SEQ ID NO: 1307509 - DNA, 15 bp, Homo sapiens
atttgaggctctcct

SEQ ID NO: 1307510 - DNA, 15 bp, Homo sapiens
aatttgaggctctcc

SEQ ID NO: 1307511 - DNA, 15 bp, Homo sapiens
gaatttgaggctctc

SEQ ID NO: 1307512 - DNA, 15 bp, Homo sapiens
tgaatttgaggctct

SEQ ID NO: 1307513 - DNA, 15 bp, Homo sapiens
atgaatttgaggctc

SEQ ID NO: 1307514 - DNA, 15 bp, Homo sapiens
gatgaatttgaggct

SEQ ID NO: 1307515 - DNA, 15 bp, Homo sapiens
agatgaatttgaggc

SEQ ID NO: 1307516 - DNA, 15 bp, Homo sapiens
aagatgaatttgagg

SEQ ID NO: 1307517 - DNA, 15 bp, Homo sapiens
aaagatgaatttgag

SEQ ID NO: 1307518 - DNA, 15 bp, Homo sapiens
gaaagatgaatttga

SEQ ID NO: 1307519 - DNA, 15 bp, Homo sapiens
agaaagatgaatttg

SEQ ID NO: 1307520 - DNA, 15 bp, Homo sapiens
cagaaagatgaattt

SEQ ID NO: 1307521 - DNA, 15 bp, Homo sapiens
tcagaaagatgaatt

SEQ ID NO: 1307522 - DNA, 15 bp, Homo sapiens
ctcagaaagatgaat

SEQ ID NO: 1307523 - DNA, 15 bp, Homo sapiens
cctcagaaagatgaa

SEQ ID NO: 1307524 - DNA, 15 bp, Homo sapiens
tcctcagaaagatga

SEQ ID NO: 1307525 - DNA, 15 bp, Homo sapiens
ctcctcagaaagatg

SEQ ID NO: 1307526 - DNA, 15 bp, Homo sapiens
gctcctcagaaagat

SEQ ID NO: 1307527 - DNA, 15 bp, Homo sapiens
agctcctcagaaaga

SEQ ID NO: 1307528 - DNA, 15 bp, Homo sapiens
gagctcctcagaaag

SEQ ID NO: 1307529 - DNA, 15 bp, Homo sapiens
agagctcctcagaaa

SEQ ID NO: 1307530 - DNA, 15 bp, Homo sapiens
cagagctcctcagaa

SEQ ID NO: 1307531 - DNA, 15 bp, Homo sapiens
ccagagctcctcaga

SEQ ID NO: 1307532 - DNA, 15 bp, Homo sapiens
cccagagctcctcag

SEQ ID NO: 1307533 - DNA, 15 bp, Homo sapiens
gcccagagctcctca

SEQ ID NO: 1307534 - DNA, 15 bp, Homo sapiens
agcccagagctcctc

SEQ ID NO: 1307535 - DNA, 15 bp, Homo sapiens
cagcccagagctcct

SEQ ID NO: 1307536 - DNA, 15 bp, Homo sapiens
acagcccagagctcc

SEQ ID NO: 1307537 - DNA, 15 bp, Homo sapiens
cacagcccagagctc

SEQ ID NO: 1307538 - DNA, 15 bp, Homo sapiens
ccacagcccagagct

SEQ ID NO: 1307539 - DNA, 15 bp, Homo sapiens
accacagcccagagc

SEQ ID NO: 1307540 - DNA, 15 bp, Homo sapiens
aaccacagcccagag

SEQ ID NO: 1307541 - DNA, 15 bp, Homo sapiens
aaaccacagcccaga

SEQ ID NO: 1307542 - DNA, 15 bp, Homo sapiens
aaaaccacagcccag

SEQ ID NO: 1307543 - DNA, 15 bp, Homo sapiens
aaaaaccacagccca

SEQ ID NO: 1307544 - DNA, 15 bp, Homo sapiens
taaaaaccacagccc

SEQ ID NO: 1307545 - DNA, 15 bp, Homo sapiens
ttaaaaaccacagcc

SEQ ID NO: 1307546 - DNA, 15 bp, Homo sapiens
cttaaaaaccacagc

SEQ ID NO: 1307547 - DNA, 15 bp, Homo sapiens
tcttaaaaaccacag

SEQ ID NO: 1307548 - DNA, 15 bp, Homo sapiens
ttcttaaaaaccaca

SEQ ID NO: 1307549 - DNA, 15 bp, Homo sapiens
gttcttaaaaaccac

SEQ ID NO: 1307550 - DNA, 15 bp, Homo sapiens
tgttcttaaaaacca

SEQ ID NO: 1307551 - DNA, 15 bp, Homo sapiens
atgttcttaaaaacc

SEQ ID NO: 1307552 - DNA, 15 bp, Homo sapiens
gatgttcttaaaaac

SEQ ID NO: 1307553 - DNA, 15 bp, Homo sapiens
tgatgttcttaaaaa

SEQ ID NO: 1307554 - DNA, 15 bp, Homo sapiens
atgatgttcttaaaa

SEQ ID NO: 1307555 - DNA, 15 bp, Homo sapiens
catgatgttcttaaa

SEQ ID NO: 1307556 - DNA, 15 bp, Homo sapiens
ccatgatgttcttaa

SEQ ID NO: 1307557 - DNA, 15 bp, Homo sapiens
tccatgatgttctta

SEQ ID NO: 1307558 - DNA, 15 bp, Homo sapiens
ctccatgatgttctt

SEQ ID NO: 1307559 - DNA, 15 bp, Homo sapiens
gctccatgatgttct

SEQ ID NO: 1307560 - DNA, 15 bp, Homo sapiens
cgctccatgatgttc

SEQ ID NO: 1307561 - DNA, 15 bp, Homo sapiens
acgctccatgatgtt

SEQ ID NO: 1307562 - DNA, 15 bp, Homo sapiens
cacgctccatgatgt

SEQ ID NO: 1307563 - DNA, 15 bp, Homo sapiens
tcacgctccatgatg

SEQ ID NO: 1307564 - DNA, 15 bp, Homo sapiens
atcacgctccatgat

SEQ ID NO: 1307565 - DNA, 15 bp, Homo sapiens
catcacgctccatga

SEQ ID NO: 1307566 - DNA, 15 bp, Homo sapiens
ccatcacgctccatg

SEQ ID NO: 1307567 - DNA, 15 bp, Homo sapiens
cccatcacgctccat

SEQ ID NO: 1307568 - DNA, 15 bp, Homo sapiens
gcccatcacgctcca

SEQ ID NO: 1307569 - DNA, 15 bp, Homo sapiens
agcccatcacgctcc

SEQ ID NO: 1307570 - DNA, 15 bp, Homo sapiens
cagcccatcacgctc

SEQ ID NO: 1307571 - DNA, 15 bp, Homo sapiens
ccagcccatcacgct

SEQ ID NO: 1307572 - DNA, 15 bp, Homo sapiens
tccagcccatcacgc

SEQ ID NO: 1307573 - DNA, 15 bp, Homo sapiens
ttccagcccatcacg

SEQ ID NO: 1307574 - DNA, 15 bp, Homo sapiens
tttccagcccatcac

SEQ ID NO: 1307575 - DNA, 15 bp, Homo sapiens
ttttccagcccatca

SEQ ID NO: 1307576 - DNA, 15 bp, Homo sapiens
attttccagcccatc

SEQ ID NO: 1307577 - DNA, 15 bp, Homo sapiens
aattttccagcccat

SEQ ID NO: 1307578 - DNA, 15 bp, Homo sapiens
caattttccagccca

SEQ ID NO: 1307579 - DNA, 15 bp, Homo sapiens
ccaattttccagccc

SEQ ID NO: 1307580 - DNA, 15 bp, Homo sapiens
cccaattttccagcc

SEQ ID NO: 1307581 - DNA, 15 bp, Homo sapiens
ccccaattttccagc

SEQ ID NO: 1307582 - DNA, 15 bp, Homo sapiens
accccaattttccag

SEQ ID NO: 1307583 - DNA, 15 bp, Homo sapiens
aaccccaattttcca

SEQ ID NO: 1307584 - DNA, 15 bp, Homo sapiens
caaccccaattttcc

SEQ ID NO: 1307585 - DNA, 15 bp, Homo sapiens
acaaccccaattttc

SEQ ID NO: 1307586 - DNA, 15 bp, Homo sapiens
aacaaccccaatttt

SEQ ID NO: 1307587 - DNA, 15 bp, Homo sapiens
caacaaccccaattt

SEQ ID NO: 1307588 - DNA, 15 bp, Homo sapiens
tcaacaaccccaatt

SEQ ID NO: 1307589 - DNA, 15 bp, Homo sapiens
gtcaacaaccccaat

SEQ ID NO: 1307590 - DNA, 15 bp, Homo sapiens
agtcaacaaccccaa

SEQ ID NO: 1307591 - DNA, 15 bp, Homo sapiens
cagtcaacaacccca

SEQ ID NO: 1307592 - DNA, 15 bp, Homo sapiens
tcagtcaacaacccc

SEQ ID NO: 1307593 - DNA, 15 bp, Homo sapiens
atcagtcaacaaccc

SEQ ID NO: 1307594 - DNA, 15 bp, Homo sapiens
gatcagtcaacaacc

SEQ ID NO: 1307595 - DNA, 15 bp, Homo sapiens
tgatcagtcaacaac

SEQ ID NO: 1307596 - DNA, 15 bp, Homo sapiens
ctgatcagtcaacaa

SEQ ID NO: 1307597 - DNA, 15 bp, Homo sapiens
cctgatcagtcaaca

SEQ ID NO: 1307598 - DNA, 15 bp, Homo sapiens
ccctgatcagtcaac

SEQ ID NO: 1307599 - DNA, 15 bp, Homo sapiens
cccctgatcagtcaa

SEQ ID NO: 1307600 - DNA, 15 bp, Homo sapiens
tcccctgatcagtca

SEQ ID NO: 1307601 - DNA, 15 bp, Homo sapiens
ttcccctgatcagtc

SEQ ID NO: 1307602 - DNA, 15 bp, Homo sapiens
cttcccctgatcagt

SEQ ID NO: 1307603 - DNA, 15 bp, Homo sapiens
ccttcccctgatcag

SEQ ID NO: 1307604 - DNA, 15 bp, Homo sapiens
cccttcccctgatca

SEQ ID NO: 1307605 - DNA, 15 bp, Homo sapiens
ccccttcccctgatc

SEQ ID NO: 1307606 - DNA, 15 bp, Homo sapiens
cccccttcccctgat

SEQ ID NO: 1307607 - DNA, 15 bp, Homo sapiens
tcccccttcccctga

SEQ ID NO: 1307608 - DNA, 15 bp, Homo sapiens
taatcccccttcccc

SEQ ID NO: 1307609 - DNA, 15 bp, Homo sapiens
ttaatcccccttccc

SEQ ID NO: 1307610 - DNA, 15 bp, Homo sapiens
tttaatcccccttcc

SEQ ID NO: 1307611 - DNA, 15 bp, Homo sapiens
atttaatcccccttc

SEQ ID NO: 1307612 - DNA, 15 bp, Homo sapiens
gatttaatccccctt

SEQ ID NO: 1307613 - DNA, 15 bp, Homo sapiens
tgatttaatccccct

SEQ ID NO: 1307614 - DNA, 15 bp, Homo sapiens
atgatttaatccccc

SEQ ID NO: 1307615 - DNA, 15 bp, Homo sapiens
gatgatttaatcccc

SEQ ID NO: 1307616 - DNA, 15 bp, Homo sapiens
tgatgatttaatccc

SEQ ID NO: 1307617 - DNA, 15 bp, Homo sapiens
ctgatgatttaatcc

SEQ ID NO: 1307618 - DNA, 15 bp, Homo sapiens
tctgatgatttaatc

SEQ ID NO: 1307619 - DNA, 15 bp, Homo sapiens
ttctgatgatttaat

SEQ ID NO: 1307620 - DNA, 15 bp, Homo sapiens
attctgatgatttaa

SEQ ID NO: 1307621 - DNA, 15 bp, Homo sapiens
cattctgatgattta

SEQ ID NO: 1307622 - DNA, 15 bp, Homo sapiens
acattctgatgattt

SEQ ID NO: 1307623 - DNA, 15 bp, Homo sapiens
cacattctgatgatt

SEQ ID NO: 1307624 - DNA, 15 bp, Homo sapiens
ccacattctgatgat

SEQ ID NO: 1307625 - DNA, 15 bp, Homo sapiens
tccacattctgatga

SEQ ID NO: 1307626 - DNA, 15 bp, Homo sapiens
ttccacattctgatg

SEQ ID NO: 1307627 - DNA, 15 bp, Homo sapiens
tttccacattctgat

SEQ ID NO: 1307628 - DNA, 15 bp, Homo sapiens
atttccacattctga

SEQ ID NO: 1307629 - DNA, 15 bp, Homo sapiens
aatttccacattctg

SEQ ID NO: 1307630 - DNA, 15 bp, Homo sapiens
caatttccacattct

SEQ ID NO: 1307631 - DNA, 15 bp, Homo sapiens
acaatttccacattc

SEQ ID NO: 1307632 - DNA, 15 bp, Homo sapiens
cacaatttccacatt

SEQ ID NO: 1307633 - DNA, 15 bp, Homo sapiens
acacaatttccacat

SEQ ID NO: 1307634 - DNA, 15 bp, Homo sapiens
aacacaatttccaca

SEQ ID NO: 1307635 - DNA, 15 bp, Homo sapiens
gaacacaatttccac

SEQ ID NO: 1307636 - DNA, 15 bp, Homo sapiens
agaacacaatttcca

SEQ ID NO: 1307637 - DNA, 15 bp, Homo sapiens
aagaacacaatttcc

SEQ ID NO: 1307638 - DNA, 15 bp, Homo sapiens
aaagaacacaatttc

SEQ ID NO: 1307639 - DNA, 15 bp, Homo sapiens
caaagaacacaattt

SEQ ID NO: 1307640 - DNA, 15 bp, Homo sapiens
ccaaagaacacaatt

SEQ ID NO: 1307641 - DNA, 15 bp, Homo sapiens
accaaagaacacaat

SEQ ID NO: 1307642 - DNA, 15 bp, Homo sapiens
caccaaagaacacaa

SEQ ID NO: 1307643 - DNA, 15 bp, Homo sapiens
tcaccaaagaacaca

SEQ ID NO: 1307644 - DNA, 15 bp, Homo sapiens
ctcaccaaagaacac

SEQ ID NO: 1307645 - DNA, 15 bp, Homo sapiens
actcaccaaagaaca

SEQ ID NO: 1307646 - DNA, 15 bp, Homo sapiens
gactcaccaaagaac

SEQ ID NO: 1307647 - DNA, 15 bp, Homo sapiens
tgactcaccaaagaa

SEQ ID NO: 1307648 - DNA, 15 bp, Homo sapiens
ctgactcaccaaaga

SEQ ID NO: 1307649 - DNA, 15 bp, Homo sapiens
gctgactcaccaaag

SEQ ID NO: 1307650 - DNA, 15 bp, Homo sapiens
agctgactcaccaaa

SEQ ID NO: 1307651 - DNA, 15 bp, Homo sapiens
aagctgactcaccaa

SEQ ID NO: 1307652 - DNA, 15 bp, Homo sapiens
gaagctgactcacca

SEQ ID NO: 1307653 - DNA, 15 bp, Homo sapiens
agaagctgactcacc

SEQ ID NO: 1307654 - DNA, 15 bp, Homo sapiens
aagaagctgactcac

SEQ ID NO: 1307655 - DNA, 15 bp, Homo sapiens
caagaagctgactca

SEQ ID NO: 1307656 - DNA, 15 bp, Homo sapiens
acaagaagctgactc

SEQ ID NO: 1307657 - DNA, 15 bp, Homo sapiens
cacaagaagctgact

SEQ ID NO: 1307658 - DNA, 15 bp, Homo sapiens
ccacaagaagctgac

SEQ ID NO: 1307659 - DNA, 15 bp, Homo sapiens
accacaagaagctga

SEQ ID NO: 1307660 - DNA, 15 bp, Homo sapiens
caccacaagaagctg

SEQ ID NO: 1307661 - DNA, 15 bp, Homo sapiens
acaccacaagaagct

SEQ ID NO: 1307662 - DNA, 15 bp, Homo sapiens
aacaccacaagaagc

SEQ ID NO: 1307663 - DNA, 15 bp, Homo sapiens
gaacaccacaagaag

SEQ ID NO: 1307664 - DNA, 15 bp, Homo sapiens
ggaacaccacaagaa

SEQ ID NO: 1307665 - DNA, 15 bp, Homo sapiens
aggaacaccacaaga

SEQ ID NO: 1307666 - DNA, 15 bp, Homo sapiens
gaggaacaccacaag

SEQ ID NO: 1307667 - DNA, 15 bp, Homo sapiens
tgaggaacaccacaa

SEQ ID NO: 1307668 - DNA, 15 bp, Homo sapiens
ctgaggaacaccaca

SEQ ID NO: 1307669 - DNA, 15 bp, Homo sapiens
tctgaggaacaccac

SEQ ID NO: 1307670 - DNA, 15 bp, Homo sapiens
gtctgaggaacacca

SEQ ID NO: 1307671 - DNA, 15 bp, Homo sapiens
ggtctgaggaacacc

SEQ ID NO: 1307672 - DNA, 15 bp, Homo sapiens
aggtctgaggaacac

SEQ ID NO: 1307673 - DNA, 15 bp, Homo sapiens
aaggtctgaggaaca

SEQ ID NO: 1307674 - DNA, 15 bp, Homo sapiens
gaaggtctgaggaac

SEQ ID NO: 1307675 - DNA, 15 bp, Homo sapiens
ggaaggtctgaggaa

SEQ ID NO: 1307676 - DNA, 15 bp, Homo sapiens
aggaaggtctgagga

SEQ ID NO: 1307677 - DNA, 15 bp, Homo sapiens
caggaaggtctgagg

SEQ ID NO: 1307678 - DNA, 15 bp, Homo sapiens
ccaggaaggtctgag

SEQ ID NO: 1307679 - DNA, 15 bp, Homo sapiens
cccaggaaggtctga

SEQ ID NO: 1307680 - DNA, 15 bp, Homo sapiens
ccccaggaaggtctg

SEQ ID NO: 1307681 - DNA, 15 bp, Homo sapiens
accccaggaaggtct

SEQ ID NO: 1307682 - DNA, 15 bp, Homo sapiens
gaccccaggaaggtc

SEQ ID NO: 1307683 - DNA, 15 bp, Homo sapiens
tgaccccaggaaggt

SEQ ID NO: 1307684 - DNA, 15 bp, Homo sapiens
gtgaccccaggaagg

SEQ ID NO: 1307685 - DNA, 15 bp, Homo sapiens
ggtgaccccaggaag

SEQ ID NO: 1307686 - DNA, 15 bp, Homo sapiens
gggtgaccccaggaa

SEQ ID NO: 1307687 - DNA, 15 bp, Homo sapiens
cgggtgaccccagga

SEQ ID NO: 1307688 - DNA, 15 bp, Homo sapiens
acgggtgaccccagg

SEQ ID NO: 1307689 - DNA, 15 bp, Homo sapiens
cacgggtgaccccag

SEQ ID NO: 1307690 - DNA, 15 bp, Homo sapiens
ccacgggtgacccca

SEQ ID NO: 1307691 - DNA, 15 bp, Homo sapiens
cccacgggtgacccc

SEQ ID NO: 1307692 - DNA, 15 bp, Homo sapiens
ccccacgggtgaccc

SEQ ID NO: 1307693 - DNA, 15 bp, Homo sapiens
accccacgggtgacc

SEQ ID NO: 1307694 - DNA, 15 bp, Homo sapiens
gaccccacgggtgac

SEQ ID NO: 1307695 - DNA, 15 bp, Homo sapiens
agaccccacgggtga

SEQ ID NO: 1307696 - DNA, 15 bp, Homo sapiens
aagaccccacgggtg

SEQ ID NO: 1307697 - DNA, 15 bp, Homo sapiens
aaagaccccacgggt

SEQ ID NO: 1307698 - DNA, 15 bp, Homo sapiens
gaaagaccccacggg

SEQ ID NO: 1307699 - DNA, 15 bp, Homo sapiens
tgaaagaccccacgg

SEQ ID NO: 1307700 - DNA, 15 bp, Homo sapiens
atgaaagaccccacg

SEQ ID NO: 1307701 - DNA, 15 bp, Homo sapiens
aatgaaagaccccac

SEQ ID NO: 1307702 - DNA, 15 bp, Homo sapiens
gaatgaaagacccca

SEQ ID NO: 1307703 - DNA, 15 bp, Homo sapiens
tgaatgaaagacccc

SEQ ID NO: 1307704 - DNA, 15 bp, Homo sapiens
ctgaatgaaagaccc

SEQ ID NO: 1307705 - DNA, 15 bp, Homo sapiens
tctgaatgaaagacc

SEQ ID NO: 1307706 - DNA, 15 bp, Homo sapiens
atctgaatgaaagac

SEQ ID NO: 1307707 - DNA, 15 bp, Homo sapiens
gatctgaatgaaaga

SEQ ID NO: 1307708 - DNA, 15 bp, Homo sapiens
tgatctgaatgaaag

SEQ ID NO: 1307709 - DNA, 15 bp, Homo sapiens
ctgatctgaatgaaa

SEQ ID NO: 1307710 - DNA, 15 bp, Homo sapiens
gctgatctgaatgaa

SEQ ID NO: 1307711 - DNA, 15 bp, Homo sapiens
agctgatctgaatga

SEQ ID NO: 1307712 - DNA, 15 bp, Homo sapiens
cagctgatctgaatg

SEQ ID NO: 1307713 - DNA, 15 bp, Homo sapiens
tcagctgatctgaat

SEQ ID NO: 1307714 - DNA, 15 bp, Homo sapiens
atcagctgatctgaa

SEQ ID NO: 1307715 - DNA, 15 bp, Homo sapiens
catcagctgatctga

SEQ ID NO: 1307716 - DNA, 15 bp, Homo sapiens
acatcagctgatctg

SEQ ID NO: 1307717 - DNA, 15 bp, Homo sapiens
tacatcagctgatct

SEQ ID NO: 1307718 - DNA, 15 bp, Homo sapiens
ctacatcagctgatc

SEQ ID NO: 1307719 - DNA, 15 bp, Homo sapiens
actacatcagctgat

SEQ ID NO: 1307720 - DNA, 15 bp, Homo sapiens
tactacatcagctga

SEQ ID NO: 1307721 - DNA, 15 bp, Homo sapiens
ctactacatcagctg

SEQ ID NO: 1307722 - DNA, 15 bp, Homo sapiens
actactacatcagct

SEQ ID NO: 1307723 - DNA, 15 bp, Homo sapiens
aactactacatcagc

SEQ ID NO: 1307724 - DNA, 15 bp, Homo sapiens
aaactactacatcag

SEQ ID NO: 1307725 - DNA, 15 bp, Homo sapiens
gaaactactacatca

SEQ ID NO: 1307726 - DNA, 15 bp, Homo sapiens
tgaaactactacatc

SEQ ID NO: 1307727 - DNA, 15 bp, Homo sapiens
gtgaaactactacat

SEQ ID NO: 1307728 - DNA, 15 bp, Homo sapiens
agtgaaactactaca

SEQ ID NO: 1307729 - DNA, 15 bp, Homo sapiens
gagtgaaactactac

SEQ ID NO: 1307730 - DNA, 15 bp, Homo sapiens
cgagtgaaactacta

SEQ ID NO: 1307731 - DNA, 15 bp, Homo sapiens
acgagtgaaactact

SEQ ID NO: 1307732 - DNA, 15 bp, Homo sapiens
tacgagtgaaactac

SEQ ID NO: 1307733 - DNA, 15 bp, Homo sapiens
atacgagtgaaacta

SEQ ID NO: 1307734 - DNA, 15 bp, Homo sapiens
catacgagtgaaact

SEQ ID NO: 1307735 - DNA, 15 bp, Homo sapiens
gcatacgagtgaaac

SEQ ID NO: 1307736 - DNA, 15 bp, Homo sapiens
tgcatacgagtgaaa

SEQ ID NO: 1307737 - DNA, 15 bp, Homo sapiens
ctgcatacgagtgaa

SEQ ID NO: 1307738 - DNA, 15 bp, Homo sapiens
cctgcatacgagtga

SEQ ID NO: 1307739 - DNA, 15 bp, Homo sapiens
tcctgcatacgagtg

SEQ ID NO: 1307740 - DNA, 15 bp, Homo sapiens
gtcctgcatacgagt

SEQ ID NO: 1307741 - DNA, 15 bp, Homo sapiens
ggtcctgcatacgag

SEQ ID NO: 1307742 - DNA, 15 bp, Homo sapiens
aggtcctgcatacga

SEQ ID NO: 1307743 - DNA, 15 bp, Homo sapiens
caggtcctgcatacg

SEQ ID NO: 1307744 - DNA, 15 bp, Homo sapiens
tcaggtcctgcatac

SEQ ID NO: 1307745 - DNA, 15 bp, Homo sapiens
ttcaggtcctgcata

SEQ ID NO: 1307746 - DNA, 15 bp, Homo sapiens
tttcaggtcctgcat

SEQ ID NO: 1307747 - DNA, 15 bp, Homo sapiens
ctttcaggtcctgca

SEQ ID NO: 1307748 - DNA, 15 bp, Homo sapiens
tctttcaggtcctgc

SEQ ID NO: 1307749 - DNA, 15 bp, Homo sapiens
gtctttcaggtcctg

SEQ ID NO: 1307750 - DNA, 15 bp, Homo sapiens
agtctttcaggtcct

SEQ ID NO: 1307751 - DNA, 15 bp, Homo sapiens
tagtctttcaggtcc

SEQ ID NO: 1307752 - DNA, 15 bp, Homo sapiens
gtagtctttcaggtc

SEQ ID NO: 1307753 - DNA, 15 bp, Homo sapiens
ggtagtctttcaggt

SEQ ID NO: 1307754 - DNA, 15 bp, Homo sapiens
aggtagtctttcagg

SEQ ID NO: 1307755 - DNA, 15 bp, Homo sapiens
gaggtagtctttcag

SEQ ID NO: 1307756 - DNA, 15 bp, Homo sapiens
tgaggtagtctttca

SEQ ID NO: 1307757 - DNA, 15 bp, Homo sapiens
gtgaggtagtctttc

SEQ ID NO: 1307758 - DNA, 15 bp, Homo sapiens
cgtgaggtagtcttt

SEQ ID NO: 1307759 - DNA, 15 bp, Homo sapiens
ccgtgaggtagtctt

SEQ ID NO: 1307760 - DNA, 15 bp, Homo sapiens
cccgtgaggtagtct

SEQ ID NO: 1307761 - DNA, 15 bp, Homo sapiens
ccccgtgaggtagtc

SEQ ID NO: 1307762 - DNA, 15 bp, Homo sapiens
tccccgtgaggtagt

SEQ ID NO: 1307763 - DNA, 15 bp, Homo sapiens
ttccccgtgaggtag

SEQ ID NO: 1307764 - DNA, 15 bp, Homo sapiens
tttccccgtgaggta

SEQ ID NO: 1307765 - DNA, 15 bp, Homo sapiens
ctttccccgtgaggt

SEQ ID NO: 1307766 - DNA, 15 bp, Homo sapiens
gctttccccgtgagg

SEQ ID NO: 1307767 - DNA, 15 bp, Homo sapiens
agctttccccgtgag

SEQ ID NO: 1307768 - DNA, 15 bp, Homo sapiens
aagctttccccgtga

SEQ ID NO: 1307769 - DNA, 15 bp, Homo sapiens
taagctttccccgtg

SEQ ID NO: 1307770 - DNA, 15 bp, Homo sapiens
ttaagctttccccgt

SEQ ID NO: 1307771 - DNA, 15 bp, Homo sapiens
gttaagctttccccg

SEQ ID NO: 1307772 - DNA, 15 bp, Homo sapiens
tgttaagctttcccc

SEQ ID NO: 1307773 - DNA, 15 bp, Homo sapiens
atgttaagctttccc

SEQ ID NO: 1307774 - DNA, 15 bp, Homo sapiens
aatgttaagctttcc

SEQ ID NO: 1307775 - DNA, 15 bp, Homo sapiens
aaatgttaagctttc

SEQ ID NO: 1307776 - DNA, 15 bp, Homo sapiens
gaaatgttaagcttt

SEQ ID NO: 1307777 - DNA, 15 bp, Homo sapiens
agaaatgttaagctt

SEQ ID NO: 1307778 - DNA, 15 bp, Homo sapiens
aagaaatgttaagct

SEQ ID NO: 1307779 - DNA, 15 bp, Homo sapiens
taagaaatgttaagc

SEQ ID NO: 1307780 - DNA, 15 bp, Homo sapiens
ttaagaaatgttaag

SEQ ID NO: 1307781 - DNA, 15 bp, Homo sapiens
attaagaaatgttaa

SEQ ID NO: 1307782 - DNA, 15 bp, Homo sapiens
cattaagaaatgtta

SEQ ID NO: 1307783 - DNA, 15 bp, Homo sapiens
acattaagaaatgtt

SEQ ID NO: 1307784 - DNA, 15 bp, Homo sapiens
aacattaagaaatgt

SEQ ID NO: 1307785 - DNA, 15 bp, Homo sapiens
gaacattaagaaatg

SEQ ID NO: 1307786 - DNA, 15 bp, Homo sapiens
tgaacattaagaaat

SEQ ID NO: 1307787 - DNA, 15 bp, Homo sapiens
ttgaacattaagaaa

SEQ ID NO: 1307788 - DNA, 15 bp, Homo sapiens
cttgaacattaagaa

SEQ ID NO: 1307789 - DNA, 15 bp, Homo sapiens
acttgaacattaaga

SEQ ID NO: 1307790 - DNA, 15 bp, Homo sapiens
aacttgaacattaag

SEQ ID NO: 1307791 - DNA, 15 bp, Homo sapiens
caacttgaacattaa

SEQ ID NO: 1307792 - DNA, 15 bp, Homo sapiens
acaacttgaacatta

SEQ ID NO: 1307793 - DNA, 15 bp, Homo sapiens
aacaacttgaacatt

SEQ ID NO: 1307794 - DNA, 15 bp, Homo sapiens
taacaacttgaacat

SEQ ID NO: 1307795 - DNA, 15 bp, Homo sapiens
ataacaacttgaaca

SEQ ID NO: 1307796 - DNA, 15 bp, Homo sapiens
gataacaacttgaac

SEQ ID NO: 1307797 - DNA, 15 bp, Homo sapiens
agataacaacttgaa

SEQ ID NO: 1307798 - DNA, 15 bp, Homo sapiens
tagataacaacttga

SEQ ID NO: 1307799 - DNA, 15 bp, Homo sapiens
atagataacaacttg

SEQ ID NO: 1307800 - DNA, 15 bp, Homo sapiens
tatagataacaactt

SEQ ID NO: 1307801 - DNA, 15 bp, Homo sapiens
ctatagataacaact

SEQ ID NO: 1307802 - DNA, 15 bp, Homo sapiens
tctatagataacaac

SEQ ID NO: 1307803 - DNA, 15 bp, Homo sapiens
ctctatagataacaa

SEQ ID NO: 1307804 - DNA, 15 bp, Homo sapiens
gctctatagataaca

SEQ ID NO: 1307805 - DNA, 15 bp, Homo sapiens
tgctctatagataac

SEQ ID NO: 1307806 - DNA, 15 bp, Homo sapiens
gtgctctatagataa

SEQ ID NO: 1307807 - DNA, 15 bp, Homo sapiens
agtgctctatagata

SEQ ID NO: 1307808 - DNA, 15 bp, Homo sapiens
aagtgctctatagat

SEQ ID NO: 1307809 - DNA, 15 bp, Homo sapiens
taagtgctctataga

SEQ ID NO: 1307810 - DNA, 15 bp, Homo sapiens
ttaagtgctctatag

SEQ ID NO: 1307811 - DNA, 15 bp, Homo sapiens
cttaagtgctctata

SEQ ID NO: 1307812 - DNA, 15 bp, Homo sapiens
ccttaagtgctctat

SEQ ID NO: 1307813 - DNA, 15 bp, Homo sapiens
cccttaagtgctcta

SEQ ID NO: 1307814 - DNA, 15 bp, Homo sapiens
ccccttaagtgctct

SEQ ID NO: 1307815 - DNA, 15 bp, Homo sapiens
tccccttaagtgctc

SEQ ID NO: 1307816 - DNA, 15 bp, Homo sapiens
ttccccttaagtgct

SEQ ID NO: 1307817 - DNA, 15 bp, Homo sapiens
gttccccttaagtgc

SEQ ID NO: 1307818 - DNA, 15 bp, Homo sapiens
agttccccttaagtg

SEQ ID NO: 1307819 - DNA, 15 bp, Homo sapiens
tagttccccttaagt

SEQ ID NO: 1307820 - DNA, 15 bp, Homo sapiens
atagttccccttaag

SEQ ID NO: 1307821 - DNA, 15 bp, Homo sapiens
gatagttccccttaa

SEQ ID NO: 1307822 - DNA, 15 bp, Homo sapiens
tgatagttcccctta

SEQ ID NO: 1307823 - DNA, 15 bp, Homo sapiens
atgatagttcccctt

SEQ ID NO: 1307824 - DNA, 15 bp, Homo sapiens
gatgatagttcccct

SEQ ID NO: 1307825 - DNA, 15 bp, Homo sapiens
agatgatagttcccc

SEQ ID NO: 1307826 - DNA, 15 bp, Homo sapiens
aagatgatagttccc

SEQ ID NO: 1307827 - DNA, 15 bp, Homo sapiens
taagatgatagttcc

SEQ ID NO: 1307828 - DNA, 15 bp, Homo sapiens
ataagatgatagttc

SEQ ID NO: 1307829 - DNA, 15 bp, Homo sapiens
gataagatgatagtt

SEQ ID NO: 1307830 - DNA, 15 bp, Homo sapiens
tgataagatgatagt

SEQ ID NO: 1307831 - DNA, 15 bp, Homo sapiens
gtgataagatgatag

SEQ ID NO: 1307832 - DNA, 15 bp, Homo sapiens
tgtgataagatgata

SEQ ID NO: 1307833 - DNA, 15 bp, Homo sapiens
ctgtgataagatgat

SEQ ID NO: 1307834 - DNA, 15 bp, Homo sapiens
tctgtgataagatga

SEQ ID NO: 1307835 - DNA, 15 bp, Homo sapiens
ctctgtgataagatg

SEQ ID NO: 1307836 - DNA, 15 bp, Homo sapiens
actctgtgataagat

SEQ ID NO: 1307837 - DNA, 15 bp, Homo sapiens
gactctgtgataaga

SEQ ID NO: 1307838 - DNA, 15 bp, Homo sapiens
agactctgtgataag

SEQ ID NO: 1307839 - DNA, 15 bp, Homo sapiens
tagactctgtgataa

SEQ ID NO: 1307840 - DNA, 15 bp, Homo sapiens
gtagactctgtgata

SEQ ID NO: 1307841 - DNA, 15 bp, Homo sapiens
tgtagactctgtgat

SEQ ID NO: 1307842 - DNA, 15 bp, Homo sapiens
atgtagactctgtga

SEQ ID NO: 1307843 - DNA, 15 bp, Homo sapiens
catgtagactctgtg

SEQ ID NO: 1307844 - DNA, 15 bp, Homo sapiens
tcatgtagactctgt

SEQ ID NO: 1307845 - DNA, 15 bp, Homo sapiens
atcatgtagactctg

SEQ ID NO: 1307846 - DNA, 15 bp, Homo sapiens
aatcatgtagactct

SEQ ID NO: 1307847 - DNA, 15 bp, Homo sapiens
gaatcatgtagactc

SEQ ID NO: 1307848 - DNA, 15 bp, Homo sapiens
agaatcatgtagact

SEQ ID NO: 1307849 - DNA, 15 bp, Homo sapiens
tagaatcatgtagac

SEQ ID NO: 1307850 - DNA, 15 bp, Homo sapiens
ctagaatcatgtaga

SEQ ID NO: 1307851 - DNA, 15 bp, Homo sapiens
cctagaatcatgtag

SEQ ID NO: 1307852 - DNA, 15 bp, Homo sapiens
tcctagaatcatgta

SEQ ID NO: 1307853 - DNA, 15 bp, Homo sapiens
gtcctagaatcatgt

SEQ ID NO: 1307854 - DNA, 15 bp, Homo sapiens
tgtcctagaatcatg

SEQ ID NO: 1307855 - DNA, 15 bp, Homo sapiens
ttgtcctagaatcat

SEQ ID NO: 1307856 - DNA, 15 bp, Homo sapiens
attgtcctagaatca

SEQ ID NO: 1307857 - DNA, 15 bp, Homo sapiens
tattgtcctagaatc

SEQ ID NO: 1307858 - DNA, 15 bp, Homo sapiens
ctattgtcctagaat

SEQ ID NO: 1307859 - DNA, 15 bp, Homo sapiens
cctattgtcctagaa

SEQ ID NO: 1307860 - DNA, 15 bp, Homo sapiens
gcctattgtcctaga

SEQ ID NO: 1307861 - DNA, 15 bp, Homo sapiens
tgcctattgtcctag

SEQ ID NO: 1307862 - DNA, 15 bp, Homo sapiens
gtgcctattgtccta

SEQ ID NO: 1307863 - DNA, 15 bp, Homo sapiens
ggtgcctattgtcct

SEQ ID NO: 1307864 - DNA, 15 bp, Homo sapiens
tggtgcctattgtcc

SEQ ID NO: 1307865 - DNA, 15 bp, Homo sapiens
ttggtgcctattgtc

SEQ ID NO: 1307866 - DNA, 15 bp, Homo sapiens
tttggtgcctattgt

SEQ ID NO: 1307867 - DNA, 15 bp, Homo sapiens
gtttggtgcctattg

SEQ ID NO: 1307868 - DNA, 15 bp, Homo sapiens
ggtttggtgcctatt

SEQ ID NO: 1307869 - DNA, 15 bp, Homo sapiens
tggtttggtgcctat

SEQ ID NO: 1307870 - DNA, 15 bp, Homo sapiens
atggtttggtgccta

SEQ ID NO: 1307871 - DNA, 15 bp, Homo sapiens
catggtttggtgcct

SEQ ID NO: 1307872 - DNA, 15 bp, Homo sapiens
acatggtttggtgcc

SEQ ID NO: 1307873 - DNA, 15 bp, Homo sapiens
gacatggtttggtgc

SEQ ID NO: 1307874 - DNA, 15 bp, Homo sapiens
cgacatggtttggtg

SEQ ID NO: 1307875 - DNA, 15 bp, Homo sapiens
tcgacatggtttggt

SEQ ID NO: 1307876 - DNA, 15 bp, Homo sapiens
ctcgacatggtttgg

SEQ ID NO: 1307877 - DNA, 15 bp, Homo sapiens
cctcgacatggtttg

SEQ ID NO: 1307878 - DNA, 15 bp, Homo sapiens
tcctcgacatggttt

SEQ ID NO: 1307879 - DNA, 15 bp, Homo sapiens
ttcctcgacatggtt

SEQ ID NO: 1307880 - DNA, 15 bp, Homo sapiens
cttcctcgacatggt

SEQ ID NO: 1307881 - DNA, 15 bp, Homo sapiens
gcttcctcgacatgg

SEQ ID NO: 1307882 - DNA, 15 bp, Homo sapiens
tgcttcctcgacatg

SEQ ID NO: 1307883 - DNA, 15 bp, Homo sapiens
ctgcttcctcgacat

SEQ ID NO: 1307884 - DNA, 15 bp, Homo sapiens
cctgcttcctcgaca

SEQ ID NO: 1307885 - DNA, 15 bp, Homo sapiens
acctgcttcctcgac

SEQ ID NO: 1307886 - DNA, 15 bp, Homo sapiens
gacctgcttcctcga

SEQ ID NO: 1307887 - DNA, 15 bp, Homo sapiens
tgacctgcttcctcg

SEQ ID NO: 1307888 - DNA, 15 bp, Homo sapiens
ctgacctgcttcctc

SEQ ID NO: 1307889 - DNA, 15 bp, Homo sapiens
tctgacctgcttcct

SEQ ID NO: 1307890 - DNA, 15 bp, Homo sapiens
ctctgacctgcttcc

SEQ ID NO: 1307891 - DNA, 15 bp, Homo sapiens
tctctgacctgcttc

SEQ ID NO: 1307892 - DNA, 15 bp, Homo sapiens
ttctctgacctgctt

SEQ ID NO: 1307893 - DNA, 15 bp, Homo sapiens
attctctgacctgct

SEQ ID NO: 1307894 - DNA, 15 bp, Homo sapiens
cattctctgacctgc

SEQ ID NO: 1307895 - DNA, 15 bp, Homo sapiens
tcattctctgacctg

SEQ ID NO: 1307896 - DNA, 15 bp, Homo sapiens
ctcattctctgacct

SEQ ID NO: 1307897 - DNA, 15 bp, Homo sapiens
actcattctctgacc

SEQ ID NO: 1307898 - DNA, 15 bp, Homo sapiens
aactcattctctgac

SEQ ID NO: 1307899 - DNA, 15 bp, Homo sapiens
caactcattctctga

SEQ ID NO: 1307900 - DNA, 15 bp, Homo sapiens
tcaactcattctctg

SEQ ID NO: 1307901 - DNA, 15 bp, Homo sapiens
gtcaactcattctct

SEQ ID NO: 1307902 - DNA, 15 bp, Homo sapiens
ggtcaactcattctc

SEQ ID NO: 1307903 - DNA, 15 bp, Homo sapiens
aggtcaactcattct

SEQ ID NO: 1307904 - DNA, 15 bp, Homo sapiens
gaggtcaactcattc

SEQ ID NO: 1307905 - DNA, 15 bp, Homo sapiens
tgaggtcaactcatt

SEQ ID NO: 1307906 - DNA, 15 bp, Homo sapiens
atgaggtcaactcat

SEQ ID NO: 1307907 - DNA, 15 bp, Homo sapiens
catgaggtcaactca

SEQ ID NO: 1307908 - DNA, 15 bp, Homo sapiens
gcatgaggtcaactc

SEQ ID NO: 1307909 - DNA, 15 bp, Homo sapiens
agcatgaggtcaact

SEQ ID NO: 1307910 - DNA, 15 bp, Homo sapiens
aagcatgaggtcaac

SEQ ID NO: 1307911 - DNA, 15 bp, Homo sapiens
taagcatgaggtcaa

SEQ ID NO: 1307912 - DNA, 15 bp, Homo sapiens
ttaagcatgaggtca

SEQ ID NO: 1307913 - DNA, 15 bp, Homo sapiens
attaagcatgaggtc

SEQ ID NO: 1307914 - DNA, 15 bp, Homo sapiens
cattaagcatgaggt

SEQ ID NO: 1307915 - DNA, 15 bp, Homo sapiens
gcattaagcatgagg

SEQ ID NO: 1307916 - DNA, 15 bp, Homo sapiens
agcattaagcatgag

SEQ ID NO: 1307917 - DNA, 15 bp, Homo sapiens
cagcattaagcatga

SEQ ID NO: 1307918 - DNA, 15 bp, Homo sapiens
tcagcattaagcatg

SEQ ID NO: 1307919 - DNA, 15 bp, Homo sapiens
ttcagcattaagcat

SEQ ID NO: 1307920 - DNA, 15 bp, Homo sapiens
attcagcattaagca

SEQ ID NO: 1307921 - DNA, 15 bp, Homo sapiens
cattcagcattaagc

SEQ ID NO: 1307922 - DNA, 15 bp, Homo sapiens
acattcagcattaag

SEQ ID NO: 1307923 - DNA, 15 bp, Homo sapiens
cacattcagcattaa

SEQ ID NO: 1307924 - DNA, 15 bp, Homo sapiens
gcacattcagcatta

SEQ ID NO: 1307925 - DNA, 15 bp, Homo sapiens
agcacattcagcatt

SEQ ID NO: 1307926 - DNA, 15 bp, Homo sapiens
aagcacattcagcat

SEQ ID NO: 1307927 - DNA, 15 bp, Homo sapiens
gaagcacattcagca

SEQ ID NO: 1307928 - DNA, 15 bp, Homo sapiens
tgaagcacattcagc

SEQ ID NO: 1307929 - DNA, 15 bp, Homo sapiens
ttgaagcacattcag

SEQ ID NO: 1307930 - DNA, 15 bp, Homo sapiens
cttgaagcacattca

SEQ ID NO: 1307931 - DNA, 15 bp, Homo sapiens
gcttgaagcacattc

SEQ ID NO: 1307932 - DNA, 15 bp, Homo sapiens
agcttgaagcacatt

SEQ ID NO: 1307933 - DNA, 15 bp, Homo sapiens
aagcttgaagcacat

SEQ ID NO: 1307934 - DNA, 15 bp, Homo sapiens
caagcttgaagcaca

SEQ ID NO: 1307935 - DNA, 15 bp, Homo sapiens
ccaagcttgaagcac

SEQ ID NO: 1307936 - DNA, 15 bp, Homo sapiens
accaagcttgaagca

SEQ ID NO: 1307937 - DNA, 15 bp, Homo sapiens
aaccaagcttgaagc

SEQ ID NO: 1307938 - DNA, 15 bp, Homo sapiens
aaaccaagcttgaag

SEQ ID NO: 1307939 - DNA, 15 bp, Homo sapiens
taaaccaagcttgaa

SEQ ID NO: 1307940 - DNA, 15 bp, Homo sapiens
ataaaccaagcttga

SEQ ID NO: 1307941 - DNA, 15 bp, Homo sapiens
aataaaccaagcttg

SEQ ID NO: 1307942 - DNA, 15 bp, Homo sapiens
taataaaccaagctt

SEQ ID NO: 1307943 - DNA, 15 bp, Homo sapiens
ttaataaaccaagct

SEQ ID NO: 1307944 - DNA, 15 bp, Homo sapiens
attaataaaccaagc

SEQ ID NO: 1307945 - DNA, 15 bp, Homo sapiens
aattaataaaccaag

SEQ ID NO: 1307946 - DNA, 15 bp, Homo sapiens
aaattaataaaccaa

SEQ ID NO: 1307947 - DNA, 15 bp, Homo sapiens
taaattaataaacca

SEQ ID NO: 1307948 - DNA, 15 bp, Homo sapiens
ataaattaataaacc

SEQ ID NO: 1307949 - DNA, 15 bp, Homo sapiens
aataaattaataaac

SEQ ID NO: 1307950 - DNA, 15 bp, Homo sapiens
aaataaattaataaa

SEQ ID NO: 1307951 - DNA, 15 bp, Homo sapiens
aaaataaattaataa

SEQ ID NO: 1307952 - DNA, 15 bp, Homo sapiens
aaaaataaattaata

SEQ ID NO: 1307953 - DNA, 15 bp, Homo sapiens
aaaaaataaattaat

SEQ ID NO: 1307954 - DNA, 15 bp, Homo sapiens
gaaaaaataaattaa

SEQ ID NO: 1307955 - DNA, 15 bp, Homo sapiens
ggaaaaaataaatta

SEQ ID NO: 1307956 - DNA, 15 bp, Homo sapiens
gggaaaaaataaatt

SEQ ID NO: 1307957 - DNA, 15 bp, Homo sapiens
ggggaaaaaataaat

SEQ ID NO: 1307958 - DNA, 15 bp, Homo sapiens
aggggaaaaaataaa

SEQ ID NO: 1307959 - DNA, 15 bp, Homo sapiens
aaggggaaaaaataa

SEQ ID NO: 1307960 - DNA, 15 bp, Homo sapiens
aaaggggaaaaaata

SEQ ID NO: 1307961 - DNA, 15 bp, Homo sapiens
gaaaggggaaaaaat

SEQ ID NO: 1307962 - DNA, 15 bp, Homo sapiens
agaaaggggaaaaaa

SEQ ID NO: 1307963 - DNA, 15 bp, Homo sapiens
aagaaaggggaaaaa

SEQ ID NO: 1307964 - DNA, 15 bp, Homo sapiens
gaagaaaggggaaaa

SEQ ID NO: 1307965 - DNA, 15 bp, Homo sapiens
agaagaaaggggaaa

SEQ ID NO: 1307966 - DNA, 15 bp, Homo sapiens
aagaagaaaggggaa

SEQ ID NO: 1307967 - DNA, 15 bp, Homo sapiens
gaagaagaaagggga

SEQ ID NO: 1307968 - DNA, 15 bp, Homo sapiens
ggaagaagaaagggg

SEQ ID NO: 1307969 - DNA, 15 bp, Homo sapiens
gggaagaagaaaggg

SEQ ID NO: 1307970 - DNA, 15 bp, Homo sapiens
agggaagaagaaagg

SEQ ID NO: 1307971 - DNA, 15 bp, Homo sapiens
cagggaagaagaaag

SEQ ID NO: 1307972 - DNA, 15 bp, Homo sapiens
tcagggaagaagaaa

SEQ ID NO: 1307973 - DNA, 15 bp, Homo sapiens
atcagggaagaagaa

SEQ ID NO: 1307974 - DNA, 15 bp, Homo sapiens
aatcagggaagaaga

SEQ ID NO: 1307975 - DNA, 15 bp, Homo sapiens
taatcagggaagaag

SEQ ID NO: 1307976 - DNA, 15 bp, Homo sapiens
ttaatcagggaagaa

SEQ ID NO: 1307977 - DNA, 15 bp, Homo sapiens
attaatcagggaaga

SEQ ID NO: 1307978 - DNA, 15 bp, Homo sapiens
aattaatcagggaag

SEQ ID NO: 1307979 - DNA, 15 bp, Homo sapiens
aaattaatcagggaa

SEQ ID NO: 1307980 - DNA, 15 bp, Homo sapiens
aaaattaatcaggga

SEQ ID NO: 1307981 - DNA, 15 bp, Homo sapiens
taaaattaatcaggg

SEQ ID NO: 1307982 - DNA, 15 bp, Homo sapiens
ataaaattaatcagg

SEQ ID NO: 1307983 - DNA, 15 bp, Homo sapiens
tataaaattaatcag

SEQ ID NO: 1307984 - DNA, 15 bp, Homo sapiens
ttataaaattaatca

SEQ ID NO: 1307985 - DNA, 15 bp, Homo sapiens
attataaaattaatc

SEQ ID NO: 1307986 - DNA, 15 bp, Homo sapiens
cattataaaattaat

SEQ ID NO: 1307987 - DNA, 15 bp, Homo sapiens
acattataaaattaa

SEQ ID NO: 1307988 - DNA, 15 bp, Homo sapiens
aacattataaaatta

SEQ ID NO: 1307989 - DNA, 15 bp, Homo sapiens
aaacattataaaatt

SEQ ID NO: 1307990 - DNA, 15 bp, Homo sapiens
taaacattataaaat

SEQ ID NO: 1307991 - DNA, 15 bp, Homo sapiens
gtaaacattataaaa

SEQ ID NO: 1307992 - DNA, 15 bp, Homo sapiens
tgtaaacattataaa

SEQ ID NO: 1307993 - DNA, 15 bp, Homo sapiens
ctgtaaacattataa

SEQ ID NO: 1307994 - DNA, 15 bp, Homo sapiens
cctgtaaacattata

SEQ ID NO: 1307995 - DNA, 15 bp, Homo sapiens
ccctgtaaacattat

SEQ ID NO: 1307996 - DNA, 15 bp, Homo sapiens
cccctgtaaacatta

SEQ ID NO: 1307997 - DNA, 15 bp, Homo sapiens
gcccctgtaaacatt

SEQ ID NO: 1307998 - DNA, 15 bp, Homo sapiens
tgcccctgtaaacat

SEQ ID NO: 1307999 - DNA, 15 bp, Homo sapiens
ttgcccctgtaaaca

SEQ ID NO: 1308000 - DNA, 15 bp, Homo sapiens
gttgcccctgtaaac

SEQ ID NO: 1308001 - DNA, 15 bp, Homo sapiens
agttgcccctgtaaa

SEQ ID NO: 1308002 - DNA, 15 bp, Homo sapiens
aagttgcccctgtaa

SEQ ID NO: 1308003 - DNA, 15 bp, Homo sapiens
gaagttgcccctgta

SEQ ID NO: 1308004 - DNA, 15 bp, Homo sapiens
tgaagttgcccctgt

SEQ ID NO: 1308005 - DNA, 15 bp, Homo sapiens
atgaagttgcccctg

SEQ ID NO: 1308006 - DNA, 15 bp, Homo sapiens
aatgaagttgcccct

SEQ ID NO: 1308007 - DNA, 15 bp, Homo sapiens
aaatgaagttgcccc

SEQ ID NO: 1308008 - DNA, 15 bp, Homo sapiens
gaaatgaagttgccc

SEQ ID NO: 1308009 - DNA, 15 bp, Homo sapiens
tgaaatgaagttgcc

SEQ ID NO: 1308010 - DNA, 15 bp, Homo sapiens
ttgaaatgaagttgc

SEQ ID NO: 1308011 - DNA, 15 bp, Homo sapiens
attgaaatgaagttg

SEQ ID NO: 1308012 - DNA, 15 bp, Homo sapiens
gattgaaatgaagtt

SEQ ID NO: 1308013 - DNA, 15 bp, Homo sapiens
agattgaaatgaagt

SEQ ID NO: 1308014 - DNA, 15 bp, Homo sapiens
aagattgaaatgaag

SEQ ID NO: 1308015 - DNA, 15 bp, Homo sapiens
caagattgaaatgaa

SEQ ID NO: 1308016 - DNA, 15 bp, Homo sapiens
ccaagattgaaatga

SEQ ID NO: 1308017 - DNA, 15 bp, Homo sapiens
accaagattgaaatg

SEQ ID NO: 1308018 - DNA, 15 bp, Homo sapiens
aaccaagattgaaat

SEQ ID NO: 1308019 - DNA, 15 bp, Homo sapiens
aaaccaagattgaaa

SEQ ID NO: 1308020 - DNA, 15 bp, Homo sapiens
gaaaccaagattgaa

SEQ ID NO: 1308021 - DNA, 15 bp, Homo sapiens
ggaaaccaagattga

SEQ ID NO: 1308022 - DNA, 15 bp, Homo sapiens
gggaaaccaagattg

SEQ ID NO: 1308023 - DNA, 15 bp, Homo sapiens
tgggaaaccaagatt

SEQ ID NO: 1308024 - DNA, 15 bp, Homo sapiens
ctgggaaaccaagat

SEQ ID NO: 1308025 - DNA, 15 bp, Homo sapiens
actgggaaaccaaga

SEQ ID NO: 1308026 - DNA, 15 bp, Homo sapiens
aactgggaaaccaag

SEQ ID NO: 1308027 - DNA, 15 bp, Homo sapiens
taactgggaaaccaa

SEQ ID NO: 1308028 - DNA, 15 bp, Homo sapiens
ataactgggaaacca

SEQ ID NO: 1308029 - DNA, 15 bp, Homo sapiens
tataactgggaaacc

SEQ ID NO: 1308030 - DNA, 15 bp, Homo sapiens
ctataactgggaaac

SEQ ID NO: 1308031 - DNA, 15 bp, Homo sapiens
tctataactgggaaa

SEQ ID NO: 1308032 - DNA, 15 bp, Homo sapiens
ttctataactgggaa

SEQ ID NO: 1308033 - DNA, 15 bp, Homo sapiens
cttctataactggga

SEQ ID NO: 1308034 - DNA, 15 bp, Homo sapiens
tcttctataactggg

SEQ ID NO: 1308035 - DNA, 15 bp, Homo sapiens
atcttctataactgg

SEQ ID NO: 1308036 - DNA, 15 bp, Homo sapiens
tatcttctataactg

SEQ ID NO: 1308037 - DNA, 15 bp, Homo sapiens
ttatcttctataact

SEQ ID NO: 1308038 - DNA, 15 bp, Homo sapiens
gttatcttctataac

SEQ ID NO: 1308039 - DNA, 15 bp, Homo sapiens
ggttatcttctataa

SEQ ID NO: 1308040 - DNA, 15 bp, Homo sapiens
gggttatcttctata

SEQ ID NO: 1308041 - DNA, 15 bp, Homo sapiens
agggttatcttctat

SEQ ID NO: 1308042 - DNA, 15 bp, Homo sapiens
gagggttatcttcta

SEQ ID NO: 1308043 - DNA, 15 bp, Homo sapiens
tgagggttatcttct

SEQ ID NO: 1308044 - DNA, 15 bp, Homo sapiens
atgagggttatcttc

SEQ ID NO: 1308045 - DNA, 15 bp, Homo sapiens
tatgagggttatctt

SEQ ID NO: 1308046 - DNA, 15 bp, Homo sapiens
ctatgagggttatct

SEQ ID NO: 1308047 - DNA, 15 bp, Homo sapiens
tctatgagggttatc

SEQ ID NO: 1308048 - DNA, 15 bp, Homo sapiens
ttctatgagggttat

SEQ ID NO: 1308049 - DNA, 15 bp, Homo sapiens
cttctatgagggtta

SEQ ID NO: 1308050 - DNA, 15 bp, Homo sapiens
ccttctatgagggtt

SEQ ID NO: 1308051 - DNA, 15 bp, Homo sapiens
tccttctatgagggt

SEQ ID NO: 1308052 - DNA, 15 bp, Homo sapiens
ctccttctatgaggg

SEQ ID NO: 1308053 - DNA, 15 bp, Homo sapiens
tctccttctatgagg

SEQ ID NO: 1308054 - DNA, 15 bp, Homo sapiens
ttctccttctatgag

SEQ ID NO: 1308055 - DNA, 15 bp, Homo sapiens
tttctccttctatga

SEQ ID NO: 1308056 - DNA, 15 bp, Homo sapiens
ttttctccttctatg

SEQ ID NO: 1308057 - DNA, 15 bp, Homo sapiens
cttttctccttctat

SEQ ID NO: 1308058 - DNA, 15 bp, Homo sapiens
acttttctccttcta

SEQ ID NO: 1308059 - DNA, 15 bp, Homo sapiens
cacttttctccttct

SEQ ID NO: 1308060 - DNA, 15 bp, Homo sapiens
gcacttttctccttc

SEQ ID NO: 1308061 - DNA, 15 bp, Homo sapiens
tgcacttttctcctt

SEQ ID NO: 1308062 - DNA, 15 bp, Homo sapiens
atgcacttttctcct

SEQ ID NO: 1308063 - DNA, 15 bp, Homo sapiens
tatgcacttttctcc

SEQ ID NO: 1308064 - DNA, 15 bp, Homo sapiens
gtatgcacttttctc

SEQ ID NO: 1308065 - DNA, 15 bp, Homo sapiens
agtatgcacttttct

SEQ ID NO: 1308066 - DNA, 15 bp, Homo sapiens
gagtatgcacttttc

SEQ ID NO: 1308067 - DNA, 15 bp, Homo sapiens
tgagtatgcactttt

SEQ ID NO: 1308068 - DNA, 15 bp, Homo sapiens
atgagtatgcacttt

SEQ ID NO: 1308069 - DNA, 15 bp, Homo sapiens
aatgagtatgcactt

SEQ ID NO: 1308070 - DNA, 15 bp, Homo sapiens
taatgagtatgcact

SEQ ID NO: 1308071 - DNA, 15 bp, Homo sapiens
ctaatgagtatgcac

SEQ ID NO: 1308072 - DNA, 15 bp, Homo sapiens
actaatgagtatgca

SEQ ID NO: 1308073 - DNA, 15 bp, Homo sapiens
aactaatgagtatgc

SEQ ID NO: 1308074 - DNA, 15 bp, Homo sapiens
aaactaatgagtatg

SEQ ID NO: 1308075 - DNA, 15 bp, Homo sapiens
gaaactaatgagtat

SEQ ID NO: 1308076 - DNA, 15 bp, Homo sapiens
tgaaactaatgagta

SEQ ID NO: 1308077 - DNA, 15 bp, Homo sapiens
ctgaaactaatgagt

SEQ ID NO: 1308078 - DNA, 15 bp, Homo sapiens
tctgaaactaatgag

SEQ ID NO: 1308079 - DNA, 15 bp, Homo sapiens
ctctgaaactaatga

SEQ ID NO: 1308080 - DNA, 15 bp, Homo sapiens
cctctgaaactaatg

SEQ ID NO: 1308081 - DNA, 15 bp, Homo sapiens
tcctctgaaactaat

SEQ ID NO: 1308082 - DNA, 15 bp, Homo sapiens
ttcctctgaaactaa

SEQ ID NO: 1308083 - DNA, 15 bp, Homo sapiens
attcctctgaaacta

SEQ ID NO: 1308084 - DNA, 15 bp, Homo sapiens
cattcctctgaaact

SEQ ID NO: 1308085 - DNA, 15 bp, Homo sapiens
tcattcctctgaaac

SEQ ID NO: 1308086 - DNA, 15 bp, Homo sapiens
gtcattcctctgaaa

SEQ ID NO: 1308087 - DNA, 15 bp, Homo sapiens
agtcattcctctgaa

SEQ ID NO: 1308088 - DNA, 15 bp, Homo sapiens
aagtcattcctctga

SEQ ID NO: 1308089 - DNA, 15 bp, Homo sapiens
aaagtcattcctctg

SEQ ID NO: 1308090 - DNA, 15 bp, Homo sapiens
aaaagtcattcctct

SEQ ID NO: 1308091 - DNA, 15 bp, Homo sapiens
aaaaagtcattcctc

SEQ ID NO: 1308092 - DNA, 15 bp, Homo sapiens
aaaaaagtcattcct

SEQ ID NO: 1308093 - DNA, 15 bp, Homo sapiens
aaaaaaagtcattcc

SEQ ID NO: 1308094 - DNA, 15 bp, Homo sapiens
aaaaaaaagtcattc

SEQ ID NO: 1308095 - DNA, 15 bp, Homo sapiens
taaaaaaaagtcatt

SEQ ID NO: 1308096 - DNA, 15 bp, Homo sapiens
ctaaaaaaaagtcat

SEQ ID NO: 1308097 - DNA, 15 bp, Homo sapiens
actaaaaaaaagtca

SEQ ID NO: 1308098 - DNA, 15 bp, Homo sapiens
aactaaaaaaaagtc

SEQ ID NO: 1308099 - DNA, 15 bp, Homo sapiens
aaactaaaaaaaagt

SEQ ID NO: 1308100 - DNA, 15 bp, Homo sapiens
aaaactaaaaaaaag

SEQ ID NO: 1308101 - DNA, 15 bp, Homo sapiens
taaaactaaaaaaaa

SEQ ID NO: 1308102 - DNA, 15 bp, Homo sapiens
ctaaaactaaaaaaa

SEQ ID NO: 1308103 - DNA, 15 bp, Homo sapiens
cctaaaactaaaaaa

SEQ ID NO: 1308104 - DNA, 15 bp, Homo sapiens
gcctaaaactaaaaa

SEQ ID NO: 1308105 - DNA, 15 bp, Homo sapiens
tgcctaaaactaaaa

SEQ ID NO: 1308106 - DNA, 15 bp, Homo sapiens
atgcctaaaactaaa

SEQ ID NO: 1308107 - DNA, 15 bp, Homo sapiens
aatgcctaaaactaa

SEQ ID NO: 1308108 - DNA, 15 bp, Homo sapiens
aaatgcctaaaacta

SEQ ID NO: 1308109 - DNA, 15 bp, Homo sapiens
taaatgcctaaaact

SEQ ID NO: 1308110 - DNA, 15 bp, Homo sapiens
ctaaatgcctaaaac

SEQ ID NO: 1308111 - DNA, 15 bp, Homo sapiens
tctaaatgcctaaaa

SEQ ID NO: 1308112 - DNA, 15 bp, Homo sapiens
atctaaatgcctaaa

SEQ ID NO: 1308113 - DNA, 15 bp, Homo sapiens
aatctaaatgcctaa

SEQ ID NO: 1308114 - DNA, 15 bp, Homo sapiens
aaatctaaatgccta

SEQ ID NO: 1308115 - DNA, 15 bp, Homo sapiens
aaaatctaaatgcct

SEQ ID NO: 1308116 - DNA, 15 bp, Homo sapiens
caaaatctaaatgcc

SEQ ID NO: 1308117 - DNA, 15 bp, Homo sapiens
acaaaatctaaatgc

SEQ ID NO: 1308118 - DNA, 15 bp, Homo sapiens
cacaaaatctaaatg

SEQ ID NO: 1308119 - DNA, 15 bp, Homo sapiens
tcacaaaatctaaat

SEQ ID NO: 1308120 - DNA, 15 bp, Homo sapiens
atcacaaaatctaaa

SEQ ID NO: 1308121 - DNA, 15 bp, Homo sapiens
catcacaaaatctaa

SEQ ID NO: 1308122 - DNA, 15 bp, Homo sapiens
gcatcacaaaatcta

SEQ ID NO: 1308123 - DNA, 15 bp, Homo sapiens
ggcatcacaaaatct

SEQ ID NO: 1308124 - DNA, 15 bp, Homo sapiens
aggcatcacaaaatc

SEQ ID NO: 1308125 - DNA, 15 bp, Homo sapiens
taggcatcacaaaat

SEQ ID NO: 1308126 - DNA, 15 bp, Homo sapiens
ttaggcatcacaaaa

SEQ ID NO: 1308127 - DNA, 15 bp, Homo sapiens
attaggcatcacaaa

SEQ ID NO: 1308128 - DNA, 15 bp, Homo sapiens
cattaggcatcacaa

SEQ ID NO: 1308129 - DNA, 15 bp, Homo sapiens
tcattaggcatcaca

SEQ ID NO: 1308130 - DNA, 15 bp, Homo sapiens
gtcattaggcatcac

SEQ ID NO: 1308131 - DNA, 15 bp, Homo sapiens
tgtcattaggcatca

SEQ ID NO: 1308132 - DNA, 15 bp, Homo sapiens
gtgtcattaggcatc

SEQ ID NO: 1308133 - DNA, 15 bp, Homo sapiens
tgtgtcattaggcat

SEQ ID NO: 1308134 - DNA, 15 bp, Homo sapiens
ctgtgtcattaggca

SEQ ID NO: 1308135 - DNA, 15 bp, Homo sapiens
tctgtgtcattaggc

SEQ ID NO: 1308136 - DNA, 15 bp, Homo sapiens
ttctgtgtcattagg

SEQ ID NO: 1308137 - DNA, 15 bp, Homo sapiens
tttctgtgtcattag

SEQ ID NO: 1308138 - DNA, 15 bp, Homo sapiens
atttctgtgtcatta

SEQ ID NO: 1308139 - DNA, 15 bp, Homo sapiens
aatttctgtgtcatt

SEQ ID NO: 1308140 - DNA, 15 bp, Homo sapiens
caatttctgtgtcat

SEQ ID NO: 1308141 - DNA, 15 bp, Homo sapiens
tcaatttctgtgtca

SEQ ID NO: 1308142 - DNA, 15 bp, Homo sapiens
ttcaatttctgtgtc

SEQ ID NO: 1308143 - DNA, 15 bp, Homo sapiens
attcaatttctgtgt

SEQ ID NO: 1308144 - DNA, 15 bp, Homo sapiens
cattcaatttctgtg

SEQ ID NO: 1308145 - DNA, 15 bp, Homo sapiens
gcattcaatttctgt

SEQ ID NO: 1308146 - DNA, 15 bp, Homo sapiens
ggcattcaatttctg

SEQ ID NO: 1308147 - DNA, 15 bp, Homo sapiens
gggcattcaatttct

SEQ ID NO: 1308148 - DNA, 15 bp, Homo sapiens
agggcattcaatttc

SEQ ID NO: 1308149 - DNA, 15 bp, Homo sapiens
gagggcattcaattt

SEQ ID NO: 1308150 - DNA, 15 bp, Homo sapiens
cgagggcattcaatt

SEQ ID NO: 1308151 - DNA, 15 bp, Homo sapiens
ccgagggcattcaat

SEQ ID NO: 1308152 - DNA, 15 bp, Homo sapiens
cccgagggcattcaa

SEQ ID NO: 1308153 - DNA, 15 bp, Homo sapiens
ccccgagggcattca

SEQ ID NO: 1308154 - DNA, 15 bp, Homo sapiens
tccccgagggcattc

SEQ ID NO: 1308155 - DNA, 15 bp, Homo sapiens
ctccccgagggcatt

SEQ ID NO: 1308156 - DNA, 15 bp, Homo sapiens
tctccccgagggcat

SEQ ID NO: 1308157 - DNA, 15 bp, Homo sapiens
gtctccccgagggca

SEQ ID NO: 1308158 - DNA, 15 bp, Homo sapiens
agtctccccgagggc

SEQ ID NO: 1308159 - DNA, 15 bp, Homo sapiens
gagtctccccgaggg

SEQ ID NO: 1308160 - DNA, 15 bp, Homo sapiens
agagtctccccgagg

SEQ ID NO: 1308161 - DNA, 15 bp, Homo sapiens
gagagtctccccgag

SEQ ID NO: 1308162 - DNA, 15 bp, Homo sapiens
ggagagtctccccga

SEQ ID NO: 1308163 - DNA, 15 bp, Homo sapiens
aggagagtctccccg

SEQ ID NO: 1308164 - DNA, 15 bp, Homo sapiens
caggagagtctcccc

SEQ ID NO: 1308165 - DNA, 15 bp, Homo sapiens
acaggagagtctccc

SEQ ID NO: 1308166 - DNA, 15 bp, Homo sapiens
cacaggagagtctcc

SEQ ID NO: 1308167 - DNA, 15 bp, Homo sapiens
ccacaggagagtctc

SEQ ID NO: 1308168 - DNA, 15 bp, Homo sapiens
tccacaggagagtct

SEQ ID NO: 1308169 - DNA, 15 bp, Homo sapiens
ttccacaggagagtc

SEQ ID NO: 1308170 - DNA, 15 bp, Homo sapiens
attccacaggagagt

SEQ ID NO: 1308171 - DNA, 15 bp, Homo sapiens
aattccacaggagag

SEQ ID NO: 1308172 - DNA, 15 bp, Homo sapiens
aaattccacaggaga

SEQ ID NO: 1308173 - DNA, 15 bp, Homo sapiens
aaaattccacaggag

SEQ ID NO: 1308174 - DNA, 15 bp, Homo sapiens
taaaattccacagga

SEQ ID NO: 1308175 - DNA, 15 bp, Homo sapiens
ttaaaattccacagg

SEQ ID NO: 1308176 - DNA, 15 bp, Homo sapiens
gttaaaattccacag

SEQ ID NO: 1308177 - DNA, 15 bp, Homo sapiens
agttaaaattccaca

SEQ ID NO: 1308178 - DNA, 15 bp, Homo sapiens
tagttaaaattccac

SEQ ID NO: 1308179 - DNA, 15 bp, Homo sapiens
atagttaaaattcca

SEQ ID NO: 1308180 - DNA, 15 bp, Homo sapiens
gatagttaaaattcc

SEQ ID NO: 1308181 - DNA, 15 bp, Homo sapiens
ggatagttaaaattc

SEQ ID NO: 1308182 - DNA, 15 bp, Homo sapiens
gggatagttaaaatt

SEQ ID NO: 1308183 - DNA, 15 bp, Homo sapiens
tgggatagttaaaat

SEQ ID NO: 1308184 - DNA, 15 bp, Homo sapiens
atgggatagttaaaa

SEQ ID NO: 1308185 - DNA, 15 bp, Homo sapiens
tatgggatagttaaa

SEQ ID NO: 1308186 - DNA, 15 bp, Homo sapiens
ctatgggatagttaa

SEQ ID NO: 1308187 - DNA, 15 bp, Homo sapiens
gctatgggatagtta

SEQ ID NO: 1308188 - DNA, 15 bp, Homo sapiens
ggctatgggatagtt

SEQ ID NO: 1308189 - DNA, 15 bp, Homo sapiens
aggctatgggatagt

SEQ ID NO: 1308190 - DNA, 15 bp, Homo sapiens
aaggctatgggatag

SEQ ID NO: 1308191 - DNA, 15 bp, Homo sapiens
gaaggctatgggata

SEQ ID NO: 1308192 - DNA, 15 bp, Homo sapiens
agaaggctatgggat

SEQ ID NO: 1308193 - DNA, 15 bp, Homo sapiens
gagaaggctatggga

SEQ ID NO: 1308194 - DNA, 15 bp, Homo sapiens
tgagaaggctatggg

SEQ ID NO: 1308195 - DNA, 15 bp, Homo sapiens
ctgagaaggctatgg

SEQ ID NO: 1308196 - DNA, 15 bp, Homo sapiens
cctgagaaggctatg

SEQ ID NO: 1308197 - DNA, 15 bp, Homo sapiens
acctgagaaggctat

SEQ ID NO: 1308198 - DNA, 15 bp, Homo sapiens
gacctgagaaggcta

SEQ ID NO: 1308199 - DNA, 15 bp, Homo sapiens
agacctgagaaggct

SEQ ID NO: 1308200 - DNA, 15 bp, Homo sapiens
aagacctgagaaggc

SEQ ID NO: 1308201 - DNA, 15 bp, Homo sapiens
caagacctgagaagg

SEQ ID NO: 1308202 - DNA, 15 bp, Homo sapiens
ccaagacctgagaag

SEQ ID NO: 1308203 - DNA, 15 bp, Homo sapiens
tccaagacctgagaa

SEQ ID NO: 1308204 - DNA, 15 bp, Homo sapiens
gtccaagacctgaga

SEQ ID NO: 1308205 - DNA, 15 bp, Homo sapiens
ggtccaagacctgag

SEQ ID NO: 1308206 - DNA, 15 bp, Homo sapiens
aggtccaagacctga

SEQ ID NO: 1308207 - DNA, 15 bp, Homo sapiens
gaggtccaagacctg

SEQ ID NO: 1308208 - DNA, 15 bp, Homo sapiens
agaggtccaagacct

SEQ ID NO: 1308209 - DNA, 15 bp, Homo sapiens
gagaggtccaagacc

SEQ ID NO: 1308210 - DNA, 15 bp, Homo sapiens
tgagaggtccaagac

SEQ ID NO: 1308211 - DNA, 15 bp, Homo sapiens
atgagaggtccaaga

SEQ ID NO: 1308212 - DNA, 15 bp, Homo sapiens
catgagaggtccaag

SEQ ID NO: 1308213 - DNA, 15 bp, Homo sapiens
ccatgagaggtccaa

SEQ ID NO: 1308214 - DNA, 15 bp, Homo sapiens
gccatgagaggtcca

SEQ ID NO: 1308215 - DNA, 15 bp, Homo sapiens
agccatgagaggtcc

SEQ ID NO: 1308216 - DNA, 15 bp, Homo sapiens
tagccatgagaggtc

SEQ ID NO: 1308217 - DNA, 15 bp, Homo sapiens
ctagccatgagaggt

SEQ ID NO: 1308218 - DNA, 15 bp, Homo sapiens
actagccatgagagg

SEQ ID NO: 1308219 - DNA, 15 bp, Homo sapiens
cactagccatgagag

SEQ ID NO: 1308220 - DNA, 15 bp, Homo sapiens
tcactagccatgaga

SEQ ID NO: 1308221 - DNA, 15 bp, Homo sapiens
ctcactagccatgag

SEQ ID NO: 1308222 - DNA, 15 bp, Homo sapiens
cctcactagccatga

SEQ ID NO: 1308223 - DNA, 15 bp, Homo sapiens
acctcactagccatg

SEQ ID NO: 1308224 - DNA, 15 bp, Homo sapiens
gacctcactagccat

SEQ ID NO: 1308225 - DNA, 15 bp, Homo sapiens
tgacctcactagcca

SEQ ID NO: 1308226 - DNA, 15 bp, Homo sapiens
ttgacctcactagcc

SEQ ID NO: 1308227 - DNA, 15 bp, Homo sapiens
tttgacctcactagc

SEQ ID NO: 1308228 - DNA, 15 bp, Homo sapiens
atttgacctcactag

SEQ ID NO: 1308229 - DNA, 15 bp, Homo sapiens
catttgacctcacta

SEQ ID NO: 1308230 - DNA, 15 bp, Homo sapiens
ccatttgacctcact

SEQ ID NO: 1308231 - DNA, 15 bp, Homo sapiens
gccatttgacctcac

SEQ ID NO: 1308232 - DNA, 15 bp, Homo sapiens
aagccatttgacctc

SEQ ID NO: 1308233 - DNA, 15 bp, Homo sapiens
aaagccatttgacct

SEQ ID NO: 1308234 - DNA, 15 bp, Homo sapiens
caaagccatttgacc

SEQ ID NO: 1308235 - DNA, 15 bp, Homo sapiens
gcaaagccatttgac

SEQ ID NO: 1308236 - DNA, 15 bp, Homo sapiens
cagcaaagccatttg

SEQ ID NO: 1308237 - DNA, 15 bp, Homo sapiens
tcagcaaagccattt

SEQ ID NO: 1308238 - DNA, 15 bp, Homo sapiens
ctcagcaaagccatt

SEQ ID NO: 1308239 - DNA, 15 bp, Homo sapiens
actcagcaaagccat

SEQ ID NO: 1308240 - DNA, 15 bp, Homo sapiens
cactcagcaaagcca

SEQ ID NO: 1308241 - DNA, 15 bp, Homo sapiens
ccactcagcaaagcc

SEQ ID NO: 1308242 - DNA, 15 bp, Homo sapiens
accactcagcaaagc

SEQ ID NO: 1308243 - DNA, 15 bp, Homo sapiens
caccactcagcaaag

SEQ ID NO: 1308244 - DNA, 15 bp, Homo sapiens
tcaccactcagcaaa

SEQ ID NO: 1308245 - DNA, 15 bp, Homo sapiens
ttcaccactcagcaa

SEQ ID NO: 1308246 - DNA, 15 bp, Homo sapiens
attcaccactcagca

SEQ ID NO: 1308247 - DNA, 15 bp, Homo sapiens
gattcaccactcagc

SEQ ID NO: 1308248 - DNA, 15 bp, Homo sapiens
agattcaccactcag

SEQ ID NO: 1308249 - DNA, 15 bp, Homo sapiens
aagattcaccactca

SEQ ID NO: 1308250 - DNA, 15 bp, Homo sapiens
caagattcaccactc

SEQ ID NO: 1308251 - DNA, 15 bp, Homo sapiens
acaagattcaccact

SEQ ID NO: 1308252 - DNA, 15 bp, Homo sapiens
aacaagattcaccac

SEQ ID NO: 1308253 - DNA, 15 bp, Homo sapiens
taacaagattcacca

SEQ ID NO: 1308254 - DNA, 15 bp, Homo sapiens
gtaacaagattcacc

SEQ ID NO: 1308255 - DNA, 15 bp, Homo sapiens
ggtaacaagattcac

SEQ ID NO: 1308256 - DNA, 15 bp, Homo sapiens
aggtaacaagattca

SEQ ID NO: 1308257 - DNA, 15 bp, Homo sapiens
gaggtaacaagattc

SEQ ID NO: 1308258 - DNA, 15 bp, Homo sapiens
ggaggtaacaagatt

SEQ ID NO: 1308259 - DNA, 15 bp, Homo sapiens
tggaggtaacaagat

SEQ ID NO: 1308260 - DNA, 15 bp, Homo sapiens
ttggaggtaacaaga

SEQ ID NO: 1308261 - DNA, 15 bp, Homo sapiens
cttggaggtaacaag

SEQ ID NO: 1308262 - DNA, 15 bp, Homo sapiens
ccttggaggtaacaa

SEQ ID NO: 1308263 - DNA, 15 bp, Homo sapiens
accttggaggtaaca

SEQ ID NO: 1308264 - DNA, 15 bp, Homo sapiens
gaccttggaggtaac

SEQ ID NO: 1308265 - DNA, 15 bp, Homo sapiens
tgaccttggaggtaa

SEQ ID NO: 1308266 - DNA, 15 bp, Homo sapiens
atgaccttggaggta

SEQ ID NO: 1308267 - DNA, 15 bp, Homo sapiens
aatgaccttggaggt

SEQ ID NO: 1308268 - DNA, 15 bp, Homo sapiens
gaatgaccttggagg

SEQ ID NO: 1308269 - DNA, 15 bp, Homo sapiens
ggaatgaccttggag

SEQ ID NO: 1308270 - DNA, 15 bp, Homo sapiens
gggaatgaccttgga

SEQ ID NO: 1308271 - DNA, 15 bp, Homo sapiens
tgggaatgaccttgg

SEQ ID NO: 1308272 - DNA, 15 bp, Homo sapiens
atgggaatgaccttg

SEQ ID NO: 1308273 - DNA, 15 bp, Homo sapiens
aatgggaatgacctt

SEQ ID NO: 1308274 - DNA, 15 bp, Homo sapiens
gaatgggaatgacct

SEQ ID NO: 1308275 - DNA, 15 bp, Homo sapiens
agaatgggaatgacc

SEQ ID NO: 1308276 - DNA, 15 bp, Homo sapiens
aagaatgggaatgac

SEQ ID NO: 1308277 - DNA, 15 bp, Homo sapiens
gaagaatgggaatga

SEQ ID NO: 1308278 - DNA, 15 bp, Homo sapiens
agaagaatgggaatg

SEQ ID NO: 1308279 - DNA, 15 bp, Homo sapiens
aagaagaatgggaat

SEQ ID NO: 1308280 - DNA, 15 bp, Homo sapiens
gaagaagaatgggaa

SEQ ID NO: 1308281 - DNA, 15 bp, Homo sapiens
agaagaagaatggga

SEQ ID NO: 1308282 - DNA, 15 bp, Homo sapiens
aagaagaagaatggg

SEQ ID NO: 1308283 - DNA, 15 bp, Homo sapiens
caagaagaagaatgg

SEQ ID NO: 1308284 - DNA, 15 bp, Homo sapiens
gcaagaagaagaatg

SEQ ID NO: 1308285 - DNA, 15 bp, Homo sapiens
tgcaagaagaagaat

SEQ ID NO: 1308286 - DNA, 15 bp, Homo sapiens
gtgcaagaagaagaa

SEQ ID NO: 1308287 - DNA, 15 bp, Homo sapiens
tgtgcaagaagaaga

SEQ ID NO: 1308288 - DNA, 15 bp, Homo sapiens
gtgtgcaagaagaag

SEQ ID NO: 1308289 - DNA, 15 bp, Homo sapiens
tgtgtgcaagaagaa

SEQ ID NO: 1308290 - DNA, 15 bp, Homo sapiens
atgtgtgcaagaaga

SEQ ID NO: 1308291 - DNA, 15 bp, Homo sapiens
catgtgtgcaagaag

SEQ ID NO: 1308292 - DNA, 15 bp, Homo sapiens
tcatgtgtgcaagaa

SEQ ID NO: 1308293 - DNA, 15 bp, Homo sapiens
ctcatgtgtgcaaga

SEQ ID NO: 1308294 - DNA, 15 bp, Homo sapiens
cctcatgtgtgcaag

SEQ ID NO: 1308295 - DNA, 15 bp, Homo sapiens
acctcatgtgtgcaa

SEQ ID NO: 1308296 - DNA, 15 bp, Homo sapiens
cacctcatgtgtgca

SEQ ID NO: 1308297 - DNA, 15 bp, Homo sapiens
tcacctcatgtgtgc

SEQ ID NO: 1308298 - DNA, 15 bp, Homo sapiens
ctcacctcatgtgtg

SEQ ID NO: 1308299 - DNA, 15 bp, Homo sapiens
tctcacctcatgtgt

SEQ ID NO: 1308300 - DNA, 15 bp, Homo sapiens
atctcacctcatgtg

SEQ ID NO: 1308301 - DNA, 15 bp, Homo sapiens
tatctcacctcatgt

SEQ ID NO: 1308302 - DNA, 15 bp, Homo sapiens
ttatctcacctcatg

SEQ ID NO: 1308303 - DNA, 15 bp, Homo sapiens
gttatctcacctcat

SEQ ID NO: 1308304 - DNA, 15 bp, Homo sapiens
ggttatctcacctca

SEQ ID NO: 1308305 - DNA, 15 bp, Homo sapiens
aggttatctcacctc

SEQ ID NO: 1308306 - DNA, 15 bp, Homo sapiens
caggttatctcacct

SEQ ID NO: 1308307 - DNA, 15 bp, Homo sapiens
tcaggttatctcacc

SEQ ID NO: 1308308 - DNA, 15 bp, Homo sapiens
ttcaggttatctcac

SEQ ID NO: 1308309 - DNA, 15 bp, Homo sapiens
tttcaggttatctca

SEQ ID NO: 1308310 - DNA, 15 bp, Homo sapiens
gtttcaggttatctc

SEQ ID NO: 1308311 - DNA, 15 bp, Homo sapiens
agtttcaggttatct

SEQ ID NO: 1308312 - DNA, 15 bp, Homo sapiens
gagtttcaggttatc

SEQ ID NO: 1308313 - DNA, 15 bp, Homo sapiens
ggagtttcaggttat

SEQ ID NO: 1308314 - DNA, 15 bp, Homo sapiens
gggagtttcaggtta

SEQ ID NO: 1308315 - DNA, 15 bp, Homo sapiens
ggggagtttcaggtt

SEQ ID NO: 1308316 - DNA, 15 bp, Homo sapiens
aggggagtttcaggt

SEQ ID NO: 1308317 - DNA, 15 bp, Homo sapiens
caggggagtttcagg

SEQ ID NO: 1308318 - DNA, 15 bp, Homo sapiens
tcaggggagtttcag

SEQ ID NO: 1308319 - DNA, 15 bp, Homo sapiens
ttcaggggagtttca

SEQ ID NO: 1308320 - DNA, 15 bp, Homo sapiens
tttcaggggagtttc

SEQ ID NO: 1308321 - DNA, 15 bp, Homo sapiens
gtttcaggggagttt

SEQ ID NO: 1308322 - DNA, 15 bp, Homo sapiens
tgtttcaggggagtt

SEQ ID NO: 1308323 - DNA, 15 bp, Homo sapiens
gtgtttcaggggagt

SEQ ID NO: 1308324 - DNA, 15 bp, Homo sapiens
cgtgtttcaggggag

SEQ ID NO: 1308325 - DNA, 15 bp, Homo sapiens
ccgtgtttcagggga

SEQ ID NO: 1308326 - DNA, 15 bp, Homo sapiens
cccgtgtttcagggg

SEQ ID NO: 1308327 - DNA, 15 bp, Homo sapiens
tcccgtgtttcaggg

SEQ ID NO: 1308328 - DNA, 15 bp, Homo sapiens
ttcccgtgtttcagg

SEQ ID NO: 1308329 - DNA, 15 bp, Homo sapiens
cttcccgtgtttcag

SEQ ID NO: 1308330 - DNA, 15 bp, Homo sapiens
tcttcccgtgtttca

SEQ ID NO: 1308331 - DNA, 15 bp, Homo sapiens
ctcttcccgtgtttc

SEQ ID NO: 1308332 - DNA, 15 bp, Homo sapiens
gctcttcccgtgttt

SEQ ID NO: 1308333 - DNA, 15 bp, Homo sapiens
tgctcttcccgtgtt

SEQ ID NO: 1308334 - DNA, 15 bp, Homo sapiens
gtgctcttcccgtgt

SEQ ID NO: 1308335 - DNA, 15 bp, Homo sapiens
tgtgctcttcccgtg

SEQ ID NO: 1308336 - DNA, 15 bp, Homo sapiens
gtgtgctcttcccgt

SEQ ID NO: 1308337 - DNA, 15 bp, Homo sapiens
tgtgtgctcttcccg

SEQ ID NO: 1308338 - DNA, 15 bp, Homo sapiens
ttgtgtgctcttccc

SEQ ID NO: 1308339 - DNA, 15 bp, Homo sapiens
tttgtgtgctcttcc

SEQ ID NO: 1308340 - DNA, 15 bp, Homo sapiens
atttgtgtgctcttc

SEQ ID NO: 1308341 - DNA, 15 bp, Homo sapiens
gatttgtgtgctctt

SEQ ID NO: 1308342 - DNA, 15 bp, Homo sapiens
tgatttgtgtgctct

SEQ ID NO: 1308343 - DNA, 15 bp, Homo sapiens
ctgatttgtgtgctc

SEQ ID NO: 1308344 - DNA, 15 bp, Homo sapiens
actgatttgtgtgct

SEQ ID NO: 1308345 - DNA, 15 bp, Homo sapiens
gactgatttgtgtgc

SEQ ID NO: 1308346 - DNA, 15 bp, Homo sapiens
ggactgatttgtgtg

SEQ ID NO: 1308347 - DNA, 15 bp, Homo sapiens
aggactgatttgtgt

SEQ ID NO: 1308348 - DNA, 15 bp, Homo sapiens
aaggactgatttgtg

SEQ ID NO: 1308349 - DNA, 15 bp, Homo sapiens
aaaggactgatttgt

SEQ ID NO: 1308350 - DNA, 15 bp, Homo sapiens
caaaggactgatttg

SEQ ID NO: 1308351 - DNA, 15 bp, Homo sapiens
tcaaaggactgattt

SEQ ID NO: 1308352 - DNA, 15 bp, Homo sapiens
ttcaaaggactgatt

SEQ ID NO: 1308353 - DNA, 15 bp, Homo sapiens
attcaaaggactgat

SEQ ID NO: 1308354 - DNA, 15 bp, Homo sapiens
cattcaaaggactga

SEQ ID NO: 1308355 - DNA, 15 bp, Homo sapiens
gcattcaaaggactg

SEQ ID NO: 1308356 - DNA, 15 bp, Homo sapiens
tgcattcaaaggact

SEQ ID NO: 1308357 - DNA, 15 bp, Homo sapiens
gtgcattcaaaggac

SEQ ID NO: 1308358 - DNA, 15 bp, Homo sapiens
ggtgcattcaaagga

SEQ ID NO: 1308359 - DNA, 15 bp, Homo sapiens
aggtgcattcaaagg

SEQ ID NO: 1308360 - DNA, 15 bp, Homo sapiens
gaggtgcattcaaag

SEQ ID NO: 1308361 - DNA, 15 bp, Homo sapiens
tgaggtgcattcaaa

SEQ ID NO: 1308362 - DNA, 15 bp, Homo sapiens
atgaggtgcattcaa

SEQ ID NO: 1308363 - DNA, 15 bp, Homo sapiens
gatgaggtgcattca

SEQ ID NO: 1308364 - DNA, 15 bp, Homo sapiens
ggatgaggtgcattc

SEQ ID NO: 1308365 - DNA, 15 bp, Homo sapiens
aggatgaggtgcatt

SEQ ID NO: 1308366 - DNA, 15 bp, Homo sapiens
gaggatgaggtgcat

SEQ ID NO: 1308367 - DNA, 15 bp, Homo sapiens
agaggatgaggtgca

SEQ ID NO: 1308368 - DNA, 15 bp, Homo sapiens
tagaggatgaggtgc

SEQ ID NO: 1308369 - DNA, 15 bp, Homo sapiens
ctagaggatgaggtg

SEQ ID NO: 1308370 - DNA, 15 bp, Homo sapiens
cctagaggatgaggt

SEQ ID NO: 1308371 - DNA, 15 bp, Homo sapiens
ccctagaggatgagg

SEQ ID NO: 1308372 - DNA, 15 bp, Homo sapiens
tccctagaggatgag

SEQ ID NO: 1308373 - DNA, 15 bp, Homo sapiens
atccctagaggatga

SEQ ID NO: 1308374 - DNA, 15 bp, Homo sapiens
aatccctagaggatg

SEQ ID NO: 1308375 - DNA, 15 bp, Homo sapiens
caatccctagaggat

SEQ ID NO: 1308376 - DNA, 15 bp, Homo sapiens
acaatccctagagga

SEQ ID NO: 1308377 - DNA, 15 bp, Homo sapiens
tacaatccctagagg

SEQ ID NO: 1308378 - DNA, 15 bp, Homo sapiens
ctacaatccctagag

SEQ ID NO: 1308379 - DNA, 15 bp, Homo sapiens
actacaatccctaga

SEQ ID NO: 1308380 - DNA, 15 bp, Homo sapiens
tactacaatccctag

SEQ ID NO: 1308381 - DNA, 15 bp, Homo sapiens
ttactacaatcccta

SEQ ID NO: 1308382 - DNA, 15 bp, Homo sapiens
attactacaatccct

SEQ ID NO: 1308383 - DNA, 15 bp, Homo sapiens
tattactacaatccc

SEQ ID NO: 1308384 - DNA, 15 bp, Homo sapiens
atattactacaatcc

SEQ ID NO: 1308385 - DNA, 15 bp, Homo sapiens
aatattactacaatc

SEQ ID NO: 1308386 - DNA, 15 bp, Homo sapiens
caatattactacaat

SEQ ID NO: 1308387 - DNA, 15 bp, Homo sapiens
acaatattactacaa

SEQ ID NO: 1308388 - DNA, 15 bp, Homo sapiens
tacaatattactaca

SEQ ID NO: 1308389 - DNA, 15 bp, Homo sapiens
ttacaatattactac

SEQ ID NO: 1308390 - DNA, 15 bp, Homo sapiens
gttacaatattacta

SEQ ID NO: 1308391 - DNA, 15 bp, Homo sapiens
agttacaatattact

SEQ ID NO: 1308392 - DNA, 15 bp, Homo sapiens
cagttacaatattac

SEQ ID NO: 1308393 - DNA, 15 bp, Homo sapiens
tcagttacaatatta

SEQ ID NO: 1308394 - DNA, 15 bp, Homo sapiens
atcagttacaatatt

SEQ ID NO: 1308395 - DNA, 15 bp, Homo sapiens
catcagttacaatat

SEQ ID NO: 1308396 - DNA, 15 bp, Homo sapiens
acatcagttacaata

SEQ ID NO: 1308397 - DNA, 15 bp, Homo sapiens
tacatcagttacaat

SEQ ID NO: 1308398 - DNA, 15 bp, Homo sapiens
ttacatcagttacaa

SEQ ID NO: 1308399 - DNA, 15 bp, Homo sapiens
attacatcagttaca

SEQ ID NO: 1308400 - DNA, 15 bp, Homo sapiens
aattacatcagttac

SEQ ID NO: 1308401 - DNA, 15 bp, Homo sapiens
caattacatcagtta

SEQ ID NO: 1308402 - DNA, 15 bp, Homo sapiens
acaattacatcagtt

SEQ ID NO: 1308403 - DNA, 15 bp, Homo sapiens
tatgacaattacatc

SEQ ID NO: 1308404 - DNA, 15 bp, Homo sapiens
atatgacaattacat

SEQ ID NO: 1308405 - DNA, 15 bp, Homo sapiens
tatatgacaattaca

SEQ ID NO: 1308406 - DNA, 15 bp, Homo sapiens
ttatatgacaattac

SEQ ID NO: 1308407 - DNA, 15 bp, Homo sapiens
attatatgacaatta

SEQ ID NO: 1308408 - DNA, 15 bp, Homo sapiens
aattatatgacaatt

SEQ ID NO: 1308409 - DNA, 15 bp, Homo sapiens
aaattatatgacaat

SEQ ID NO: 1308410 - DNA, 15 bp, Homo sapiens
taaattatatgacaa

SEQ ID NO: 1308411 - DNA, 15 bp, Homo sapiens
ttaaattatatgaca

SEQ ID NO: 1308412 - DNA, 15 bp, Homo sapiens
cttaaattatatgac

SEQ ID NO: 1308413 - DNA, 15 bp, Homo sapiens
acttaaattatatga

SEQ ID NO: 1308414 - DNA, 15 bp, Homo sapiens
aacttaaattatatg

SEQ ID NO: 1308415 - DNA, 15 bp, Homo sapiens
gaacttaaattatat

SEQ ID NO: 1308416 - DNA, 15 bp, Homo sapiens
agaacttaaattata

SEQ ID NO: 1308417 - DNA, 15 bp, Homo sapiens
aagaacttaaattat

SEQ ID NO: 1308418 - DNA, 15 bp, Homo sapiens
aaagaacttaaatta

SEQ ID NO: 1308419 - DNA, 15 bp, Homo sapiens
aaaagaacttaaatt

SEQ ID NO: 1308420 - DNA, 15 bp, Homo sapiens
aaaaagaacttaaat

SEQ ID NO: 1308421 - DNA, 15 bp, Homo sapiens
aaaaaagaacttaaa

SEQ ID NO: 1308422 - DNA, 15 bp, Homo sapiens
agaaaaaagaactta

SEQ ID NO: 1308423 - DNA, 15 bp, Homo sapiens
aagaaaaaagaactt

SEQ ID NO: 1308424 - DNA, 15 bp, Homo sapiens
aaagaaaaaagaact

SEQ ID NO: 1308425 - DNA, 15 bp, Homo sapiens
gaaagaaaaaagaac

SEQ ID NO: 1308426 - DNA, 15 bp, Homo sapiens
caggaaaaaaaaaaa

SEQ ID NO: 1308427 - DNA, 15 bp, Homo sapiens
tcaggaaaaaaaaaa

SEQ ID NO: 1308428 - DNA, 15 bp, Homo sapiens
ctcaggaaaaaaaaa

SEQ ID NO: 1308429 - DNA, 15 bp, Homo sapiens
tctcaggaaaaaaaa

SEQ ID NO: 1308430 - DNA, 15 bp, Homo sapiens
ctctcaggaaaaaaa

SEQ ID NO: 1308431 - DNA, 15 bp, Homo sapiens
cctctcaggaaaaaa

SEQ ID NO: 1308432 - DNA, 15 bp, Homo sapiens
ccctctcaggaaaaa

SEQ ID NO: 1308433 - DNA, 15 bp, Homo sapiens
tccctctcaggaaaa

SEQ ID NO: 1308434 - DNA, 15 bp, Homo sapiens
ctccctctcaggaaa

SEQ ID NO: 1308435 - DNA, 15 bp, Homo sapiens
actccctctcaggaa

SEQ ID NO: 1308436 - DNA, 15 bp, Homo sapiens
gactccctctcagga

SEQ ID NO: 1308437 - DNA, 15 bp, Homo sapiens
agactccctctcagg

SEQ ID NO: 1308438 - DNA, 15 bp, Homo sapiens
gagactccctctcag

SEQ ID NO: 1308439 - DNA, 15 bp, Homo sapiens
tgagactccctctca

SEQ ID NO: 1308440 - DNA, 15 bp, Homo sapiens
gtgagactccctctc

SEQ ID NO: 1308441 - DNA, 15 bp, Homo sapiens
agtgagactccctct

SEQ ID NO: 1308442 - DNA, 15 bp, Homo sapiens
cagtgagactccctc

SEQ ID NO: 1308443 - DNA, 15 bp, Homo sapiens
acagtgagactccct

SEQ ID NO: 1308444 - DNA, 15 bp, Homo sapiens
cacagtgagactccc

SEQ ID NO: 1308445 - DNA, 15 bp, Homo sapiens
gacacagtgagactc

SEQ ID NO: 1308446 - DNA, 15 bp, Homo sapiens
ggacacagtgagact

SEQ ID NO: 1308447 - DNA, 15 bp, Homo sapiens
gggacacagtgagac

SEQ ID NO: 1308448 - DNA, 15 bp, Homo sapiens
ggggacacagtgaga

SEQ ID NO: 1308449 - DNA, 15 bp, Homo sapiens
gggggacacagtgag

SEQ ID NO: 1308450 - DNA, 15 bp, Homo sapiens
tgggggacacagtga

SEQ ID NO: 1308451 - DNA, 15 bp, Homo sapiens
ctgggggacacagtg

SEQ ID NO: 1308452 - DNA, 15 bp, Homo sapiens
cctgggggacacagt

SEQ ID NO: 1308453 - DNA, 15 bp, Homo sapiens
gcctgggggacacag

SEQ ID NO: 1308454 - DNA, 15 bp, Homo sapiens
agcctgggggacaca

SEQ ID NO: 1308455 - DNA, 15 bp, Homo sapiens
cagcctgggggacac

SEQ ID NO: 1308456 - DNA, 15 bp, Homo sapiens
ccagcctgggggaca

SEQ ID NO: 1308457 - DNA, 15 bp, Homo sapiens
tccagcctgggggac

SEQ ID NO: 1308458 - DNA, 15 bp, Homo sapiens
ttccagcctggggga

SEQ ID NO: 1308459 - DNA, 15 bp, Homo sapiens
attccagcctggggg

SEQ ID NO: 1308460 - DNA, 15 bp, Homo sapiens
cattccagcctgggg

SEQ ID NO: 1308461 - DNA, 15 bp, Homo sapiens
ctgcattccagcctg

SEQ ID NO: 1308462 - DNA, 15 bp, Homo sapiens
actgcattccagcct

SEQ ID NO: 1308463 - DNA, 15 bp, Homo sapiens
cactgcattccagcc

SEQ ID NO: 1308464 - DNA, 15 bp, Homo sapiens
tcactgcattccagc

SEQ ID NO: 1308465 - DNA, 15 bp, Homo sapiens
atcactgcattccag

SEQ ID NO: 1308466 - DNA, 15 bp, Homo sapiens
catcactgcattcca

SEQ ID NO: 1308467 - DNA, 15 bp, Homo sapiens
acatcactgcattcc

SEQ ID NO: 1308468 - DNA, 15 bp, Homo sapiens
cacatcactgcattc

SEQ ID NO: 1308469 - DNA, 15 bp, Homo sapiens
tcacatcactgcatt

SEQ ID NO: 1308470 - DNA, 15 bp, Homo sapiens
atcacatcactgcat

SEQ ID NO: 1308471 - DNA, 15 bp, Homo sapiens
gatcacatcactgca

SEQ ID NO: 1308472 - DNA, 15 bp, Homo sapiens
agatcacatcactgc

SEQ ID NO: 1308473 - DNA, 15 bp, Homo sapiens
aagatcacatcactg

SEQ ID NO: 1308474 - DNA, 15 bp, Homo sapiens
caagatcacatcact

SEQ ID NO: 1308475 - DNA, 15 bp, Homo sapiens
ccaagatcacatcac

SEQ ID NO: 1308476 - DNA, 15 bp, Homo sapiens
gccaagatcacatca

SEQ ID NO: 1308477 - DNA, 15 bp, Homo sapiens
agccaagatcacatc

SEQ ID NO: 1308478 - DNA, 15 bp, Homo sapiens
aagccaagatcacat

SEQ ID NO: 1308479 - DNA, 15 bp, Homo sapiens
caagccaagatcaca

SEQ ID NO: 1308480 - DNA, 15 bp, Homo sapiens
gcaagccaagatcac

SEQ ID NO: 1308481 - DNA, 15 bp, Homo sapiens
agcaagccaagatca

SEQ ID NO: 1308482 - DNA, 15 bp, Homo sapiens
cagcaagccaagatc

SEQ ID NO: 1308483 - DNA, 15 bp, Homo sapiens
agttgcagcaagcca

SEQ ID NO: 1308484 - DNA, 15 bp, Homo sapiens
aagttgcagcaagcc

SEQ ID NO: 1308485 - DNA, 15 bp, Homo sapiens
gaagttgcagcaagc

SEQ ID NO: 1308486 - DNA, 15 bp, Homo sapiens
ggaagttgcagcaag

SEQ ID NO: 1308487 - DNA, 15 bp, Homo sapiens
tggaagttgcagcaa

SEQ ID NO: 1308488 - DNA, 15 bp, Homo sapiens
gtggaagttgcagca

SEQ ID NO: 1308489 - DNA, 15 bp, Homo sapiens
ggtggaagttgcagc

SEQ ID NO: 1308490 - DNA, 15 bp, Homo sapiens
aggtggaagttgcag

SEQ ID NO: 1308491 - DNA, 15 bp, Homo sapiens
gaggtggaagttgca

SEQ ID NO: 1308492 - DNA, 15 bp, Homo sapiens
tgaggtggaagttgc

SEQ ID NO: 1308493 - DNA, 15 bp, Homo sapiens
atgaggtggaagttg

SEQ ID NO: 1308494 - DNA, 15 bp, Homo sapiens
catgaggtggaagtt

SEQ ID NO: 1308495 - DNA, 15 bp, Homo sapiens
ccatgaggtggaagt

SEQ ID NO: 1308496 - DNA, 15 bp, Homo sapiens
tccatgaggtggaag

SEQ ID NO: 1308497 - DNA, 15 bp, Homo sapiens
atccatgaggtggaa

SEQ ID NO: 1308498 - DNA, 15 bp, Homo sapiens
aatccatgaggtgga

SEQ ID NO: 1308499 - DNA, 15 bp, Homo sapiens
gaatccatgaggtgg

SEQ ID NO: 1308500 - DNA, 15 bp, Homo sapiens
tgaatccatgaggtg

SEQ ID NO: 1308501 - DNA, 15 bp, Homo sapiens
ttgaatccatgaggt

SEQ ID NO: 1308502 - DNA, 15 bp, Homo sapiens
cttgaatccatgagg

SEQ ID NO: 1308503 - DNA, 15 bp, Homo sapiens
acttgaatccatgag

SEQ ID NO: 1308504 - DNA, 15 bp, Homo sapiens
cacttgaatccatga

SEQ ID NO: 1308505 - DNA, 15 bp, Homo sapiens
tcacttgaatccatg

SEQ ID NO: 1308506 - DNA, 15 bp, Homo sapiens
atcacttgaatccat

SEQ ID NO: 1308507 - DNA, 15 bp, Homo sapiens
tcaggagaatcactt

SEQ ID NO: 1308508 - DNA, 15 bp, Homo sapiens
gtcaggagaatcact

SEQ ID NO: 1308509 - DNA, 15 bp, Homo sapiens
agtcaggagaatcac

SEQ ID NO: 1308510 - DNA, 15 bp, Homo sapiens
gagtcaggagaatca

SEQ ID NO: 1308511 - DNA, 15 bp, Homo sapiens
tgagtcaggagaatc

SEQ ID NO: 1308512 - DNA, 15 bp, Homo sapiens
ctgagtcaggagaat

SEQ ID NO: 1308513 - DNA, 15 bp, Homo sapiens
actgagtcaggagaa

SEQ ID NO: 1308514 - DNA, 15 bp, Homo sapiens
gactgagtcaggaga

SEQ ID NO: 1308515 - DNA, 15 bp, Homo sapiens
agactgagtcaggag

SEQ ID NO: 1308516 - DNA, 15 bp, Homo sapiens
gagactgagtcagga

SEQ ID NO: 1308517 - DNA, 15 bp, Homo sapiens
ggagactgagtcagg

SEQ ID NO: 1308518 - DNA, 15 bp, Homo sapiens
gggagactgagtcag

SEQ ID NO: 1308519 - DNA, 15 bp, Homo sapiens
tgggagactgagtca

SEQ ID NO: 1308520 - DNA, 15 bp, Homo sapiens
ttgggagactgagtc

SEQ ID NO: 1308521 - DNA, 15 bp, Homo sapiens
cttgggagactgagt

SEQ ID NO: 1308522 - DNA, 15 bp, Homo sapiens
tcctataatcccagc

SEQ ID NO: 1308523 - DNA, 15 bp, Homo sapiens
ttcctataatcccag

SEQ ID NO: 1308524 - DNA, 15 bp, Homo sapiens
gttcctataatccca

SEQ ID NO: 1308525 - DNA, 15 bp, Homo sapiens
ggttcctataatccc

SEQ ID NO: 1308526 - DNA, 15 bp, Homo sapiens
gggttcctataatcc

SEQ ID NO: 1308527 - DNA, 15 bp, Homo sapiens
cgggttcctataatc

SEQ ID NO: 1308528 - DNA, 15 bp, Homo sapiens
gcgggttcctataat

SEQ ID NO: 1308529 - DNA, 15 bp, Homo sapiens
ggcgggttcctataa

SEQ ID NO: 1308530 - DNA, 15 bp, Homo sapiens
tggcgggttcctata

SEQ ID NO: 1308531 - DNA, 15 bp, Homo sapiens
gtggcgggttcctat

SEQ ID NO: 1308532 - DNA, 15 bp, Homo sapiens
ggtggcgggttccta

SEQ ID NO: 1308533 - DNA, 15 bp, Homo sapiens
tggtggcgggttcct

SEQ ID NO: 1308534 - DNA, 15 bp, Homo sapiens
atggtggcgggttcc

SEQ ID NO: 1308535 - DNA, 15 bp, Homo sapiens
catggtggcgggttc

SEQ ID NO: 1308536 - DNA, 15 bp, Homo sapiens
gcatggtggcgggtt

SEQ ID NO: 1308537 - DNA, 15 bp, Homo sapiens
ggcatggtggcgggt

SEQ ID NO: 1308538 - DNA, 15 bp, Homo sapiens
gaatacaaaaattag

SEQ ID NO: 1308539 - DNA, 15 bp, Homo sapiens
agaatacaaaaatta

SEQ ID NO: 1308540 - DNA, 15 bp, Homo sapiens
tagaatacaaaaatt

SEQ ID NO: 1308541 - DNA, 15 bp, Homo sapiens
atagaatacaaaaat

SEQ ID NO: 1308542 - DNA, 15 bp, Homo sapiens
aatagaatacaaaaa

SEQ ID NO: 1308543 - DNA, 15 bp, Homo sapiens
taatagaatacaaaa

SEQ ID NO: 1308544 - DNA, 15 bp, Homo sapiens
ctaatagaatacaaa

SEQ ID NO: 1308545 - DNA, 15 bp, Homo sapiens
tctaatagaatacaa

SEQ ID NO: 1308546 - DNA, 15 bp, Homo sapiens
ctctaatagaataca

SEQ ID NO: 1308547 - DNA, 15 bp, Homo sapiens
tctctaatagaatac

SEQ ID NO: 1308548 - DNA, 15 bp, Homo sapiens
atctctaatagaata

SEQ ID NO: 1308549 - DNA, 15 bp, Homo sapiens
catctctaatagaat

SEQ ID NO: 1308550 - DNA, 15 bp, Homo sapiens
tcatctctaatagaa

SEQ ID NO: 1308551 - DNA, 15 bp, Homo sapiens
ctcatctctaataga

SEQ ID NO: 1308552 - DNA, 15 bp, Homo sapiens
cctcatctctaatag

SEQ ID NO: 1308553 - DNA, 15 bp, Homo sapiens
aacctcatctctaat

SEQ ID NO: 1308554 - DNA, 15 bp, Homo sapiens
aaacctcatctctaa

SEQ ID NO: 1308555 - DNA, 15 bp, Homo sapiens
tgaaacctcatctct

SEQ ID NO: 1308556 - DNA, 15 bp, Homo sapiens
gtgaaacctcatctc

SEQ ID NO: 1308557 - DNA, 15 bp, Homo sapiens
agtgaaacctcatct

SEQ ID NO: 1308558 - DNA, 15 bp, Homo sapiens
tagtgaaacctcatc

SEQ ID NO: 1308559 - DNA, 15 bp, Homo sapiens
atagtgaaacctcat

SEQ ID NO: 1308560 - DNA, 15 bp, Homo sapiens
catagtgaaacctca

SEQ ID NO: 1308561 - DNA, 15 bp, Homo sapiens
acatagtgaaacctc

SEQ ID NO: 1308562 - DNA, 15 bp, Homo sapiens
aacatagtgaaacct

SEQ ID NO: 1308563 - DNA, 15 bp, Homo sapiens
tctggccaacatagt

SEQ ID NO: 1308564 - DNA, 15 bp, Homo sapiens
gtctggccaacatag

SEQ ID NO: 1308565 - DNA, 15 bp, Homo sapiens
agtctggccaacata

SEQ ID NO: 1308566 - DNA, 15 bp, Homo sapiens
ccagtctggccaaca

SEQ ID NO: 1308567 - DNA, 15 bp, Homo sapiens
accagtctggccaac

SEQ ID NO: 1308568 - DNA, 15 bp, Homo sapiens
gaccagtctggccaa

SEQ ID NO: 1308569 - DNA, 15 bp, Homo sapiens
agaccagtctggcca

SEQ ID NO: 1308570 - DNA, 15 bp, Homo sapiens
gagaccagtctggcc

SEQ ID NO: 1308571 - DNA, 15 bp, Homo sapiens
cgagaccagtctggc

SEQ ID NO: 1308572 - DNA, 15 bp, Homo sapiens
ccgagaccagtctgg

SEQ ID NO: 1308573 - DNA, 15 bp, Homo sapiens
tccgagaccagtctg

SEQ ID NO: 1308574 - DNA, 15 bp, Homo sapiens
atccgagaccagtct

SEQ ID NO: 1308575 - DNA, 15 bp, Homo sapiens
aatccgagaccagtc

SEQ ID NO: 1308576 - DNA, 15 bp, Homo sapiens
gaatccgagaccagt

SEQ ID NO: 1308577 - DNA, 15 bp, Homo sapiens
ggaatccgagaccag

SEQ ID NO: 1308578 - DNA, 15 bp, Homo sapiens
aggaatccgagacca

SEQ ID NO: 1308579 - DNA, 15 bp, Homo sapiens
caggaatccgagacc

SEQ ID NO: 1308580 - DNA, 15 bp, Homo sapiens
tcaggaatccgagac

SEQ ID NO: 1308581 - DNA, 15 bp, Homo sapiens
gtcaggaatccgaga

SEQ ID NO: 1308582 - DNA, 15 bp, Homo sapiens
agtcaggaatccgag

SEQ ID NO: 1308583 - DNA, 15 bp, Homo sapiens
aagtcaggaatccga

SEQ ID NO: 1308584 - DNA, 15 bp, Homo sapiens
gaagtcaggaatccg

SEQ ID NO: 1308585 - DNA, 15 bp, Homo sapiens
tgaagtcaggaatcc

SEQ ID NO: 1308586 - DNA, 15 bp, Homo sapiens
ttgaagtcaggaatc

SEQ ID NO: 1308587 - DNA, 15 bp, Homo sapiens
cttgaagtcaggaat

SEQ ID NO: 1308588 - DNA, 15 bp, Homo sapiens
acttgaagtcaggaa

SEQ ID NO: 1308589 - DNA, 15 bp, Homo sapiens
cacttgaagtcagga

SEQ ID NO: 1308590 - DNA, 15 bp, Homo sapiens
tcacttgaagtcagg

SEQ ID NO: 1308591 - DNA, 15 bp, Homo sapiens
atcacttgaagtcag

SEQ ID NO: 1308592 - DNA, 15 bp, Homo sapiens
gatcacttgaagtca

SEQ ID NO: 1308593 - DNA, 15 bp, Homo sapiens
agatcacttgaagtc

SEQ ID NO: 1308594 - DNA, 15 bp, Homo sapiens
cagatcacttgaagt

SEQ ID NO: 1308595 - DNA, 15 bp, Homo sapiens
gcagatcacttgaag

SEQ ID NO: 1308596 - DNA, 15 bp, Homo sapiens
ggcagatcacttgaa

SEQ ID NO: 1308597 - DNA, 15 bp, Homo sapiens
gatggctcacacctg

SEQ ID NO: 1308598 - DNA, 15 bp, Homo sapiens
tgatggctcacacct

SEQ ID NO: 1308599 - DNA, 15 bp, Homo sapiens
gtgatggctcacacc

SEQ ID NO: 1308600 - DNA, 15 bp, Homo sapiens
cgtgatggctcacac

SEQ ID NO: 1308601 - DNA, 15 bp, Homo sapiens
gcgtgatggctcaca

SEQ ID NO: 1308602 - DNA, 15 bp, Homo sapiens
ggcgtgatggctcac

SEQ ID NO: 1308603 - DNA, 15 bp, Homo sapiens
aggcgtgatggctca

SEQ ID NO: 1308604 - DNA, 15 bp, Homo sapiens
taggcgtgatggctc

SEQ ID NO: 1308605 - DNA, 15 bp, Homo sapiens
ctaggcgtgatggct

SEQ ID NO: 1308606 - DNA, 15 bp, Homo sapiens
gctaggcgtgatggc

SEQ ID NO: 1308607 - DNA, 15 bp, Homo sapiens
ggctaggcgtgatgg

SEQ ID NO: 1308608 - DNA, 15 bp, Homo sapiens
aggctaggcgtgatg

SEQ ID NO: 1308609 - DNA, 15 bp, Homo sapiens
taggctaggcgtgat

SEQ ID NO: 1308610 - DNA, 15 bp, Homo sapiens
ttaggctaggcgtga

SEQ ID NO: 1308611 - DNA, 15 bp, Homo sapiens
attaggctaggcgtg

SEQ ID NO: 1308612 - DNA, 15 bp, Homo sapiens
aattaggctaggcgt

SEQ ID NO: 1308613 - DNA, 15 bp, Homo sapiens
aaattaggctaggcg

SEQ ID NO: 1308614 - DNA, 15 bp, Homo sapiens
taaattaggctaggc

SEQ ID NO: 1308615 - DNA, 15 bp, Homo sapiens
ttaaattaggctagg

SEQ ID NO: 1308616 - DNA, 15 bp, Homo sapiens
cttaaattaggctag

SEQ ID NO: 1308617 - DNA, 15 bp, Homo sapiens
acttaaattaggcta

SEQ ID NO: 1308618 - DNA, 15 bp, Homo sapiens
aacttaaattaggct

SEQ ID NO: 1308619 - DNA, 15 bp, Homo sapiens
gaacttaaattaggc

SEQ ID NO: 1308620 - DNA, 15 bp, Homo sapiens
tattacctgcaagtg

SEQ ID NO: 1308621 - DNA, 15 bp, Homo sapiens
ttattacctgcaagt

SEQ ID NO: 1308622 - DNA, 15 bp, Homo sapiens
gttattacctgcaag

SEQ ID NO: 1308623 - DNA, 15 bp, Homo sapiens
cgttattacctgcaa

SEQ ID NO: 1308624 - DNA, 15 bp, Homo sapiens
ccgttattacctgca

SEQ ID NO: 1308625 - DNA, 15 bp, Homo sapiens
accgttattacctgc

SEQ ID NO: 1308626 - DNA, 15 bp, Homo sapiens
caccgttattacctg

SEQ ID NO: 1308627 - DNA, 15 bp, Homo sapiens
acaccgttattacct

SEQ ID NO: 1308628 - DNA, 15 bp, Homo sapiens
gacaccgttattacc

SEQ ID NO: 1308629 - DNA, 15 bp, Homo sapiens
tgacaccgttattac

SEQ ID NO: 1308630 - DNA, 15 bp, Homo sapiens
ctgacaccgttatta

SEQ ID NO: 1308631 - DNA, 15 bp, Homo sapiens
cctgacaccgttatt

SEQ ID NO: 1308632 - DNA, 15 bp, Homo sapiens
acctgacaccgttat

SEQ ID NO: 1308633 - DNA, 15 bp, Homo sapiens
aacctgacaccgtta

SEQ ID NO: 1308634 - DNA, 15 bp, Homo sapiens
taacctgacaccgtt

SEQ ID NO: 1308635 - DNA, 15 bp, Homo sapiens
ttaacctgacaccgt

SEQ ID NO: 1308636 - DNA, 15 bp, Homo sapiens
gttaacctgacaccg

SEQ ID NO: 1308637 - DNA, 15 bp, Homo sapiens
tgttaacctgacacc

SEQ ID NO: 1308638 - DNA, 15 bp, Homo sapiens
ctgttaacctgacac

SEQ ID NO: 1308639 - DNA, 15 bp, Homo sapiens
gctgttaacctgaca

SEQ ID NO: 1308640 - DNA, 15 bp, Homo sapiens
tgctgttaacctgac

SEQ ID NO: 1308641 - DNA, 15 bp, Homo sapiens
ctgctgttaacctga

SEQ ID NO: 1308642 - DNA, 15 bp, Homo sapiens
actgctgttaacctg

SEQ ID NO: 1308643 - DNA, 15 bp, Homo sapiens
cactgctgttaacct

SEQ ID NO: 1308644 - DNA, 15 bp, Homo sapiens
tcactgctgttaacc

SEQ ID NO: 1308645 - DNA, 15 bp, Homo sapiens
gtcactgctgttaac

SEQ ID NO: 1308646 - DNA, 15 bp, Homo sapiens
tgtcactgctgttaa

SEQ ID NO: 1308647 - DNA, 15 bp, Homo sapiens
gtgtcactgctgtta

SEQ ID NO: 1308648 - DNA, 15 bp, Homo sapiens
tgtgtcactgctgtt

SEQ ID NO: 1308649 - DNA, 15 bp, Homo sapiens
atgtgtcactgctgt

SEQ ID NO: 1308650 - DNA, 15 bp, Homo sapiens
gatgtgtcactgctg

SEQ ID NO: 1308651 - DNA, 15 bp, Homo sapiens
agatgtgtcactgct

SEQ ID NO: 1308652 - DNA, 15 bp, Homo sapiens
aagatgtgtcactgc

SEQ ID NO: 1308653 - DNA, 15 bp, Homo sapiens
gaagatgtgtcactg

SEQ ID NO: 1308654 - DNA, 15 bp, Homo sapiens
agaagatgtgtcact

SEQ ID NO: 1308655 - DNA, 15 bp, Homo sapiens
tagaagatgtgtcac

SEQ ID NO: 1308656 - DNA, 15 bp, Homo sapiens
atagaagatgtgtca

SEQ ID NO: 1308657 - DNA, 15 bp, Homo sapiens
aatagaagatgtgtc

SEQ ID NO: 1308658 - DNA, 15 bp, Homo sapiens
aaatagaagatgtgt

SEQ ID NO: 1308659 - DNA, 15 bp, Homo sapiens
gaaatagaagatgtg

SEQ ID NO: 1308660 - DNA, 15 bp, Homo sapiens
tgaaatagaagatgt

SEQ ID NO: 1308661 - DNA, 15 bp, Homo sapiens
ctgaaatagaagatg

SEQ ID NO: 1308662 - DNA, 15 bp, Homo sapiens
cctgaaatagaagat

SEQ ID NO: 1308663 - DNA, 15 bp, Homo sapiens
tcctgaaatagaaga

SEQ ID NO: 1308664 - DNA, 15 bp, Homo sapiens
ttcctgaaatagaag

SEQ ID NO: 1308665 - DNA, 15 bp, Homo sapiens
cttcctgaaatagaa

SEQ ID NO: 1308666 - DNA, 15 bp, Homo sapiens
ccttcctgaaataga

SEQ ID NO: 1308667 - DNA, 15 bp, Homo sapiens
tccttcctgaaatag

SEQ ID NO: 1308668 - DNA, 15 bp, Homo sapiens
atccttcctgaaata

SEQ ID NO: 1308669 - DNA, 15 bp, Homo sapiens
aatccttcctgaaat

SEQ ID NO: 1308670 - DNA, 15 bp, Homo sapiens
caatccttcctgaaa

SEQ ID NO: 1308671 - DNA, 15 bp, Homo sapiens
tcaatccttcctgaa

SEQ ID NO: 1308672 - DNA, 15 bp, Homo sapiens
ttcaatccttcctga

SEQ ID NO: 1308673 - DNA, 15 bp, Homo sapiens
attcaatccttcctg

SEQ ID NO: 1308674 - DNA, 15 bp, Homo sapiens
aattcaatccttcct

SEQ ID NO: 1308675 - DNA, 15 bp, Homo sapiens
caattcaatccttcc

SEQ ID NO: 1308676 - DNA, 15 bp, Homo sapiens
ccaattcaatccttc

SEQ ID NO: 1308677 - DNA, 15 bp, Homo sapiens
gccaattcaatcctt

SEQ ID NO: 1308678 - DNA, 15 bp, Homo sapiens
agccaattcaatcct

SEQ ID NO: 1308679 - DNA, 15 bp, Homo sapiens
gagccaattcaatcc

SEQ ID NO: 1308680 - DNA, 15 bp, Homo sapiens
agagccaattcaatc

SEQ ID NO: 1308681 - DNA, 15 bp, Homo sapiens
aagagccaattcaat

SEQ ID NO: 1308682 - DNA, 15 bp, Homo sapiens
gaagagccaattcaa

SEQ ID NO: 1308683 - DNA, 15 bp, Homo sapiens
ggaagagccaattca

SEQ ID NO: 1308684 - DNA, 15 bp, Homo sapiens
aggaagagccaattc

SEQ ID NO: 1308685 - DNA, 15 bp, Homo sapiens
caggaagagccaatt

SEQ ID NO: 1308686 - DNA, 15 bp, Homo sapiens
ccaggaagagccaat

SEQ ID NO: 1308687 - DNA, 15 bp, Homo sapiens
tccaggaagagccaa

SEQ ID NO: 1308688 - DNA, 15 bp, Homo sapiens
atccaggaagagcca

SEQ ID NO: 1308689 - DNA, 15 bp, Homo sapiens
tatccaggaagagcc

SEQ ID NO: 1308690 - DNA, 15 bp, Homo sapiens
atatccaggaagagc

SEQ ID NO: 1308691 - DNA, 15 bp, Homo sapiens
aatatccaggaagag

SEQ ID NO: 1308692 - DNA, 15 bp, Homo sapiens
gaatatccaggaaga

SEQ ID NO: 1308693 - DNA, 15 bp, Homo sapiens
tgaatatccaggaag

SEQ ID NO: 1308694 - DNA, 15 bp, Homo sapiens
atgaatatccaggaa

SEQ ID NO: 1308695 - DNA, 15 bp, Homo sapiens
aatgaatatccagga

SEQ ID NO: 1308696 - DNA, 15 bp, Homo sapiens
aaatgaatatccagg

SEQ ID NO: 1308697 - DNA, 15 bp, Homo sapiens
caaatgaatatccag

SEQ ID NO: 1308698 - DNA, 15 bp, Homo sapiens
gcaaatgaatatcca

SEQ ID NO: 1308699 - DNA, 15 bp, Homo sapiens
agcaaatgaatatcc

SEQ ID NO: 1308700 - DNA, 15 bp, Homo sapiens
cagcaaatgaatatc

SEQ ID NO: 1308701 - DNA, 15 bp, Homo sapiens
tcagcaaatgaatat

SEQ ID NO: 1308702 - DNA, 15 bp, Homo sapiens
ctcagcaaatgaata

SEQ ID NO: 1308703 - DNA, 15 bp, Homo sapiens
cctcagcaaatgaat

SEQ ID NO: 1308704 - DNA, 15 bp, Homo sapiens
gcctcagcaaatgaa

SEQ ID NO: 1308705 - DNA, 15 bp, Homo sapiens
agcctcagcaaatga

SEQ ID NO: 1308706 - DNA, 15 bp, Homo sapiens
aagcctcagcaaatg

SEQ ID NO: 1308707 - DNA, 15 bp, Homo sapiens
gaagcctcagcaaat

SEQ ID NO: 1308708 - DNA, 15 bp, Homo sapiens
tgaagcctcagcaaa

SEQ ID NO: 1308709 - DNA, 15 bp, Homo sapiens
ttgaagcctcagcaa

SEQ ID NO: 1308710 - DNA, 15 bp, Homo sapiens
attgaagcctcagca

SEQ ID NO: 1308711 - DNA, 15 bp, Homo sapiens
aattgaagcctcagc

SEQ ID NO: 1308712 - DNA, 15 bp, Homo sapiens
gaattgaagcctcag

SEQ ID NO: 1308713 - DNA, 15 bp, Homo sapiens
ggaattgaagcctca

SEQ ID NO: 1308714 - DNA, 15 bp, Homo sapiens
tggaattgaagcctc

SEQ ID NO: 1308715 - DNA, 15 bp, Homo sapiens
ctggaattgaagcct

SEQ ID NO: 1308716 - DNA, 15 bp, Homo sapiens
cctggaattgaagcc

SEQ ID NO: 1308717 - DNA, 15 bp, Homo sapiens
tcctggaattgaagc

SEQ ID NO: 1308718 - DNA, 15 bp, Homo sapiens
ctcctggaattgaag

SEQ ID NO: 1308719 - DNA, 15 bp, Homo sapiens
tctcctggaattgaa

SEQ ID NO: 1308720 - DNA, 15 bp, Homo sapiens
atctcctggaattga

SEQ ID NO: 1308721 - DNA, 15 bp, Homo sapiens
aatctcctggaattg

SEQ ID NO: 1308722 - DNA, 15 bp, Homo sapiens
aaatctcctggaatt

SEQ ID NO: 1308723 - DNA, 15 bp, Homo sapiens
aaaatctcctggaat

SEQ ID NO: 1308724 - DNA, 15 bp, Homo sapiens
taaaatctcctggaa

SEQ ID NO: 1308725 - DNA, 15 bp, Homo sapiens
ataaaatctcctgga

SEQ ID NO: 1308726 - DNA, 15 bp, Homo sapiens
aataaaatctcctgg

SEQ ID NO: 1308727 - DNA, 15 bp, Homo sapiens
gaataaaatctcctg

SEQ ID NO: 1308728 - DNA, 15 bp, Homo sapiens
agaataaaatctcct

SEQ ID NO: 1308729 - DNA, 15 bp, Homo sapiens
aagaataaaatctcc

SEQ ID NO: 1308730 - DNA, 15 bp, Homo sapiens
aaagaataaaatctc

SEQ ID NO: 1308731 - DNA, 15 bp, Homo sapiens
caaagaataaaatct

SEQ ID NO: 1308732 - DNA, 15 bp, Homo sapiens
gcaaagaataaaatc

SEQ ID NO: 1308733 - DNA, 15 bp, Homo sapiens
tgcaaagaataaaat

SEQ ID NO: 1308734 - DNA, 15 bp, Homo sapiens
gtgcaaagaataaaa

SEQ ID NO: 1308735 - DNA, 15 bp, Homo sapiens
tgtgcaaagaataaa

SEQ ID NO: 1308736 - DNA, 15 bp, Homo sapiens
atgtgcaaagaataa

SEQ ID NO: 1308737 - DNA, 15 bp, Homo sapiens
aatgtgcaaagaata

SEQ ID NO: 1308738 - DNA, 15 bp, Homo sapiens
aaatgtgcaaagaat

SEQ ID NO: 1308739 - DNA, 15 bp, Homo sapiens
gaaatgtgcaaagaa

SEQ ID NO: 1308740 - DNA, 15 bp, Homo sapiens
agaaatgtgcaaaga

SEQ ID NO: 1308741 - DNA, 15 bp, Homo sapiens
gagaaatgtgcaaag

SEQ ID NO: 1308742 - DNA, 15 bp, Homo sapiens
agagaaatgtgcaaa

SEQ ID NO: 1308743 - DNA, 15 bp, Homo sapiens
cagagaaatgtgcaa

SEQ ID NO: 1308744 - DNA, 15 bp, Homo sapiens
acagagaaatgtgca

SEQ ID NO: 1308745 - DNA, 15 bp, Homo sapiens
aacagagaaatgtgc

SEQ ID NO: 1308746 - DNA, 15 bp, Homo sapiens
aaacagagaaatgtg

SEQ ID NO: 1308747 - DNA, 15 bp, Homo sapiens
aaaacagagaaatgt

SEQ ID NO: 1308748 - DNA, 15 bp, Homo sapiens
gaaaacagagaaatg

SEQ ID NO: 1308749 - DNA, 15 bp, Homo sapiens
agaaaacagagaaat

SEQ ID NO: 1308750 - DNA, 15 bp, Homo sapiens
aagaaaacagagaaa

SEQ ID NO: 1308751 - DNA, 15 bp, Homo sapiens
aaagaaaacagagaa

SEQ ID NO: 1308752 - DNA, 15 bp, Homo sapiens
aaaagaaaacagaga

SEQ ID NO: 1308753 - DNA, 15 bp, Homo sapiens
aaaaagaaaacagag

SEQ ID NO: 1308754 - DNA, 15 bp, Homo sapiens
caaaaagaaaacaga

SEQ ID NO: 1308755 - DNA, 15 bp, Homo sapiens
acaaaaagaaaacag

SEQ ID NO: 1308756 - DNA, 15 bp, Homo sapiens
aacaaaaagaaaaca

SEQ ID NO: 1308757 - DNA, 15 bp, Homo sapiens
gaacaaaaagaaaac

SEQ ID NO: 1308758 - DNA, 15 bp, Homo sapiens
ggaacaaaaagaaaa

SEQ ID NO: 1308759 - DNA, 15 bp, Homo sapiens
aggaacaaaaagaaa

SEQ ID NO: 1308760 - DNA, 15 bp, Homo sapiens
caggaacaaaaagaa

SEQ ID NO: 1308761 - DNA, 15 bp, Homo sapiens
acaggaacaaaaaga

SEQ ID NO: 1308762 - DNA, 15 bp, Homo sapiens
aacaggaacaaaaag

SEQ ID NO: 1308763 - DNA, 15 bp, Homo sapiens
taacaggaacaaaaa

SEQ ID NO: 1308764 - DNA, 15 bp, Homo sapiens
ctaacaggaacaaaa

SEQ ID NO: 1308765 - DNA, 15 bp, Homo sapiens
tctaacaggaacaaa

SEQ ID NO: 1308766 - DNA, 15 bp, Homo sapiens
ctctaacaggaacaa

SEQ ID NO: 1308767 - DNA, 15 bp, Homo sapiens
cctctaacaggaaca

SEQ ID NO: 1308768 - DNA, 15 bp, Homo sapiens
gcctctaacaggaac

SEQ ID NO: 1308769 - DNA, 15 bp, Homo sapiens
tgcctctaacaggaa

SEQ ID NO: 1308770 - DNA, 15 bp, Homo sapiens
ctgcctctaacagga

SEQ ID NO: 1308771 - DNA, 15 bp, Homo sapiens
gctgcctctaacagg

SEQ ID NO: 1308772 - DNA, 15 bp, Homo sapiens
agctgcctctaacag

SEQ ID NO: 1308773 - DNA, 15 bp, Homo sapiens
aagctgcctctaaca

SEQ ID NO: 1308774 - DNA, 15 bp, Homo sapiens
gaagctgcctctaac

SEQ ID NO: 1308775 - DNA, 15 bp, Homo sapiens
agaagctgcctctaa

SEQ ID NO: 1308776 - DNA, 15 bp, Homo sapiens
gagaagctgcctcta

SEQ ID NO: 1308777 - DNA, 15 bp, Homo sapiens
tgagaagctgcctct

SEQ ID NO: 1308778 - DNA, 15 bp, Homo sapiens
ctgagaagctgcctc

SEQ ID NO: 1308779 - DNA, 15 bp, Homo sapiens
tctgagaagctgcct

SEQ ID NO: 1308780 - DNA, 15 bp, Homo sapiens
ttctgagaagctgcc

SEQ ID NO: 1308781 - DNA, 15 bp, Homo sapiens
attctgagaagctgc

SEQ ID NO: 1308782 - DNA, 15 bp, Homo sapiens
cattctgagaagctg

SEQ ID NO: 1308783 - DNA, 15 bp, Homo sapiens
tcattctgagaagct

SEQ ID NO: 1308784 - DNA, 15 bp, Homo sapiens
atcattctgagaagc

SEQ ID NO: 1308785 - DNA, 15 bp, Homo sapiens
tatcattctgagaag

SEQ ID NO: 1308786 - DNA, 15 bp, Homo sapiens
ttatcattctgagaa

SEQ ID NO: 1308787 - DNA, 15 bp, Homo sapiens
tttatcattctgaga

SEQ ID NO: 1308788 - DNA, 15 bp, Homo sapiens
ttttatcattctgag

SEQ ID NO: 1308789 - DNA, 15 bp, Homo sapiens
tttttatcattctga

SEQ ID NO: 1308790 - DNA, 15 bp, Homo sapiens
gtttttatcattctg

SEQ ID NO: 1308791 - DNA, 15 bp, Homo sapiens
agtttttatcattct

SEQ ID NO: 1308792 - DNA, 15 bp, Homo sapiens
cagtttttatcattc

SEQ ID NO: 1308793 - DNA, 15 bp, Homo sapiens
acagtttttatcatt

SEQ ID NO: 1308794 - DNA, 15 bp, Homo sapiens
aacagtttttatcat

SEQ ID NO: 1308795 - DNA, 15 bp, Homo sapiens
caacagtttttatca

SEQ ID NO: 1308796 - DNA, 15 bp, Homo sapiens
tcaacagtttttatc

SEQ ID NO: 1308797 - DNA, 15 bp, Homo sapiens
gtcaacagtttttat

SEQ ID NO: 1308798 - DNA, 15 bp, Homo sapiens
tgtcaacagttttta

SEQ ID NO: 1308799 - DNA, 15 bp, Homo sapiens
atgtcaacagttttt

SEQ ID NO: 1308800 - DNA, 15 bp, Homo sapiens
catgtcaacagtttt

SEQ ID NO: 1308801 - DNA, 15 bp, Homo sapiens
acatgtcaacagttt

SEQ ID NO: 1308802 - DNA, 15 bp, Homo sapiens
aacatgtcaacagtt

SEQ ID NO: 1308803 - DNA, 15 bp, Homo sapiens
gaacatgtcaacagt

SEQ ID NO: 1308804 - DNA, 15 bp, Homo sapiens
ggaacatgtcaacag

SEQ ID NO: 1308805 - DNA, 15 bp, Homo sapiens
aggaacatgtcaaca

SEQ ID NO: 1308806 - DNA, 15 bp, Homo sapiens
aaggaacatgtcaac

SEQ ID NO: 1308807 - DNA, 15 bp, Homo sapiens
caaggaacatgtcaa

SEQ ID NO: 1308808 - DNA, 15 bp, Homo sapiens
gcaaggaacatgtca

SEQ ID NO: 1308809 - DNA, 15 bp, Homo sapiens
tgcaaggaacatgtc

SEQ ID NO: 1308810 - DNA, 15 bp, Homo sapiens
ttgcaaggaacatgt

SEQ ID NO: 1308811 - DNA, 15 bp, Homo sapiens
tttgcaaggaacatg

SEQ ID NO: 1308812 - DNA, 15 bp, Homo sapiens
ctttgcaaggaacat

SEQ ID NO: 1308813 - DNA, 15 bp, Homo sapiens
actttgcaaggaaca

SEQ ID NO: 1308814 - DNA, 15 bp, Homo sapiens
gactttgcaaggaac

SEQ ID NO: 1308815 - DNA, 15 bp, Homo sapiens
agactttgcaaggaa

SEQ ID NO: 1308816 - DNA, 15 bp, Homo sapiens
aagactttgcaagga

SEQ ID NO: 1308817 - DNA, 15 bp, Homo sapiens
aaagactttgcaagg

SEQ ID NO: 1308818 - DNA, 15 bp, Homo sapiens
caaagactttgcaag

SEQ ID NO: 1308819 - DNA, 15 bp, Homo sapiens
ccaaagactttgcaa

SEQ ID NO: 1308820 - DNA, 15 bp, Homo sapiens
gccaaagactttgca

SEQ ID NO: 1308821 - DNA, 15 bp, Homo sapiens
tgccaaagactttgc

SEQ ID NO: 1308822 - DNA, 15 bp, Homo sapiens
atgccaaagactttg

SEQ ID NO: 1308823 - DNA, 15 bp, Homo sapiens
aatgccaaagacttt

SEQ ID NO: 1308824 - DNA, 15 bp, Homo sapiens
gaatgccaaagactt

SEQ ID NO: 1308825 - DNA, 15 bp, Homo sapiens
agaatgccaaagact

SEQ ID NO: 1308826 - DNA, 15 bp, Homo sapiens
tagaatgccaaagac

SEQ ID NO: 1308827 - DNA, 15 bp, Homo sapiens
ttagaatgccaaaga

SEQ ID NO: 1308828 - DNA, 15 bp, Homo sapiens
cttagaatgccaaag

SEQ ID NO: 1308829 - DNA, 15 bp, Homo sapiens
ccttagaatgccaaa

SEQ ID NO: 1308830 - DNA, 15 bp, Homo sapiens
tccttagaatgccaa

SEQ ID NO: 1308831 - DNA, 15 bp, Homo sapiens
atccttagaatgcca

SEQ ID NO: 1308832 - DNA, 15 bp, Homo sapiens
gatccttagaatgcc

SEQ ID NO: 1308833 - DNA, 15 bp, Homo sapiens
ggatccttagaatgc

SEQ ID NO: 1308834 - DNA, 15 bp, Homo sapiens
tggatccttagaatg

SEQ ID NO: 1308835 - DNA, 15 bp, Homo sapiens
atggatccttagaat

SEQ ID NO: 1308836 - DNA, 15 bp, Homo sapiens
gatggatccttagaa

SEQ ID NO: 1308837 - DNA, 15 bp, Homo sapiens
ggatggatccttaga

SEQ ID NO: 1308838 - DNA, 15 bp, Homo sapiens
aggatggatccttag

SEQ ID NO: 1308839 - DNA, 15 bp, Homo sapiens
aaggatggatcctta

SEQ ID NO: 1308840 - DNA, 15 bp, Homo sapiens
taaggatggatcctt

SEQ ID NO: 1308841 - DNA, 15 bp, Homo sapiens
ataaggatggatcct

SEQ ID NO: 1308842 - DNA, 15 bp, Homo sapiens
aataaggatggatcc

SEQ ID NO: 1308843 - DNA, 15 bp, Homo sapiens
caataaggatggatc

SEQ ID NO: 1308844 - DNA, 15 bp, Homo sapiens
gcaataaggatggat

SEQ ID NO: 1308845 - DNA, 15 bp, Homo sapiens
ggcaataaggatgga

SEQ ID NO: 1308846 - DNA, 15 bp, Homo sapiens
aggcaataaggatgg

SEQ ID NO: 1308847 - DNA, 15 bp, Homo sapiens
gaggcaataaggatg

SEQ ID NO: 1308848 - DNA, 15 bp, Homo sapiens
tgaggcaataaggat

SEQ ID NO: 1308849 - DNA, 15 bp, Homo sapiens
atgaggcaataagga

SEQ ID NO: 1308850 - DNA, 15 bp, Homo sapiens
aatgaggcaataagg

SEQ ID NO: 1308851 - DNA, 15 bp, Homo sapiens
aaatgaggcaataag

SEQ ID NO: 1308852 - DNA, 15 bp, Homo sapiens
caaatgaggcaataa

SEQ ID NO: 1308853 - DNA, 15 bp, Homo sapiens
ccaaatgaggcaata

SEQ ID NO: 1308854 - DNA, 15 bp, Homo sapiens
gccaaatgaggcaat

SEQ ID NO: 1308855 - DNA, 15 bp, Homo sapiens
ggccaaatgaggcaa

SEQ ID NO: 1308856 - DNA, 15 bp, Homo sapiens
aggccaaatgaggca

SEQ ID NO: 1308857 - DNA, 15 bp, Homo sapiens
aaggccaaatgaggc

SEQ ID NO: 1308858 - DNA, 15 bp, Homo sapiens
caaggccaaatgagg

SEQ ID NO: 1308859 - DNA, 15 bp, Homo sapiens
tcaaggccaaatgag

SEQ ID NO: 1308860 - DNA, 15 bp, Homo sapiens
gtcaaggccaaatga

SEQ ID NO: 1308861 - DNA, 15 bp, Homo sapiens
agtcaaggccaaatg

SEQ ID NO: 1308862 - DNA, 15 bp, Homo sapiens
aagtcaaggccaaat

SEQ ID NO: 1308863 - DNA, 15 bp, Homo sapiens
aaagtcaaggccaaa

SEQ ID NO: 1308864 - DNA, 15 bp, Homo sapiens
taaagtcaaggccaa

SEQ ID NO: 1308865 - DNA, 15 bp, Homo sapiens
gtaaagtcaaggcca

SEQ ID NO: 1308866 - DNA, 15 bp, Homo sapiens
agtaaagtcaaggcc

SEQ ID NO: 1308867 - DNA, 15 bp, Homo sapiens
aagtaaagtcaaggc

SEQ ID NO: 1308868 - DNA, 15 bp, Homo sapiens
gaagtaaagtcaagg

SEQ ID NO: 1308869 - DNA, 15 bp, Homo sapiens
ggaagtaaagtcaag

SEQ ID NO: 1308870 - DNA, 15 bp, Homo sapiens
tggaagtaaagtcaa

SEQ ID NO: 1308871 - DNA, 15 bp, Homo sapiens
ttggaagtaaagtca

SEQ ID NO: 1308872 - DNA, 15 bp, Homo sapiens
attggaagtaaagtc

SEQ ID NO: 1308873 - DNA, 15 bp, Homo sapiens
tattggaagtaaagt

SEQ ID NO: 1308874 - DNA, 15 bp, Homo sapiens
atattggaagtaaag

SEQ ID NO: 1308875 - DNA, 15 bp, Homo sapiens
tatattggaagtaaa

SEQ ID NO: 1308876 - DNA, 15 bp, Homo sapiens
ttatattggaagtaa

SEQ ID NO: 1308877 - DNA, 15 bp, Homo sapiens
attatattggaagta

SEQ ID NO: 1308878 - DNA, 15 bp, Homo sapiens
aattatattggaagt

SEQ ID NO: 1308879 - DNA, 15 bp, Homo sapiens
caattatattggaag

SEQ ID NO: 1308880 - DNA, 15 bp, Homo sapiens
gcaattatattggaa

SEQ ID NO: 1308881 - DNA, 15 bp, Homo sapiens
ggcaattatattgga

SEQ ID NO: 1308882 - DNA, 15 bp, Homo sapiens
gggcaattatattgg

SEQ ID NO: 1308883 - DNA, 15 bp, Homo sapiens
tgggcaattatattg

SEQ ID NO: 1308884 - DNA, 15 bp, Homo sapiens
atgggcaattatatt

SEQ ID NO: 1308885 - DNA, 15 bp, Homo sapiens
catgggcaattatat

SEQ ID NO: 1308886 - DNA, 15 bp, Homo sapiens
tcatgggcaattata

SEQ ID NO: 1308887 - DNA, 15 bp, Homo sapiens
gtcatgggcaattat

SEQ ID NO: 1308888 - DNA, 15 bp, Homo sapiens
tgtcatgggcaatta

SEQ ID NO: 1308889 - DNA, 15 bp, Homo sapiens
gttgtcatgggcaat

SEQ ID NO: 1308890 - DNA, 15 bp, Homo sapiens
agttgtcatgggcaa

SEQ ID NO: 1308891 - DNA, 15 bp, Homo sapiens
aagttgtcatgggca

SEQ ID NO: 1308892 - DNA, 15 bp, Homo sapiens
taagttgtcatgggc

SEQ ID NO: 1308893 - DNA, 15 bp, Homo sapiens
ataagttgtcatggg

SEQ ID NO: 1308894 - DNA, 15 bp, Homo sapiens
aataagttgtcatgg

SEQ ID NO: 1308895 - DNA, 15 bp, Homo sapiens
aaataagttgtcatg

SEQ ID NO: 1308896 - DNA, 15 bp, Homo sapiens
aaaataagttgtcat

SEQ ID NO: 1308897 - DNA, 15 bp, Homo sapiens
taaaataagttgtca

SEQ ID NO: 1308898 - DNA, 15 bp, Homo sapiens
ctaaaataagttgtc

SEQ ID NO: 1308899 - DNA, 15 bp, Homo sapiens
actaaaataagttgt

SEQ ID NO: 1308900 - DNA, 15 bp, Homo sapiens
tactaaaataagttg

SEQ ID NO: 1308901 - DNA, 15 bp, Homo sapiens
ctactaaaataagtt

SEQ ID NO: 1308902 - DNA, 15 bp, Homo sapiens
tctactaaaataagt

SEQ ID NO: 1308903 - DNA, 15 bp, Homo sapiens
ctctactaaaataag

SEQ ID NO: 1308904 - DNA, 15 bp, Homo sapiens
tctctactaaaataa

SEQ ID NO: 1308905 - DNA, 15 bp, Homo sapiens
actctctactaaaat

SEQ ID NO: 1308906 - DNA, 15 bp, Homo sapiens
cactctctactaaaa

SEQ ID NO: 1308907 - DNA, 15 bp, Homo sapiens
acactctctactaaa

SEQ ID NO: 1308908 - DNA, 15 bp, Homo sapiens
cacactctctactaa

SEQ ID NO: 1308909 - DNA, 15 bp, Homo sapiens
ccacactctctacta

SEQ ID NO: 1308910 - DNA, 15 bp, Homo sapiens
accacactctctact

SEQ ID NO: 1308911 - DNA, 15 bp, Homo sapiens
taccacactctctac

SEQ ID NO: 1308912 - DNA, 15 bp, Homo sapiens
ctaccacactctcta

SEQ ID NO: 1308913 - DNA, 15 bp, Homo sapiens
tctaccacactctct

SEQ ID NO: 1308914 - DNA, 15 bp, Homo sapiens
atctaccacactctc

SEQ ID NO: 1308915 - DNA, 15 bp, Homo sapiens
catctaccacactct

SEQ ID NO: 1308916 - DNA, 15 bp, Homo sapiens
ccatctaccacactc

SEQ ID NO: 1308917 - DNA, 15 bp, Homo sapiens
gccatctaccacact

SEQ ID NO: 1308918 - DNA, 15 bp, Homo sapiens
ggccatctaccacac

SEQ ID NO: 1308919 - DNA, 15 bp, Homo sapiens
tggccatctaccaca

SEQ ID NO: 1308920 - DNA, 15 bp, Homo sapiens
atggccatctaccac

SEQ ID NO: 1308921 - DNA, 15 bp, Homo sapiens
gatggccatctacca

SEQ ID NO: 1308922 - DNA, 15 bp, Homo sapiens
ggatggccatctacc

SEQ ID NO: 1308923 - DNA, 15 bp, Homo sapiens
aggatggccatctac

SEQ ID NO: 1308924 - DNA, 15 bp, Homo sapiens
aaggatggccatcta

SEQ ID NO: 1308925 - DNA, 15 bp, Homo sapiens
caaggatggccatct

SEQ ID NO: 1308926 - DNA, 15 bp, Homo sapiens
ccaaggatggccatc

SEQ ID NO: 1308927 - DNA, 15 bp, Homo sapiens
cccaaggatggccat

SEQ ID NO: 1308928 - DNA, 15 bp, Homo sapiens
acccaaggatggcca

SEQ ID NO: 1308929 - DNA, 15 bp, Homo sapiens
cacccaaggatggcc

SEQ ID NO: 1308930 - DNA, 15 bp, Homo sapiens
tcacccaaggatggc

SEQ ID NO: 1308931 - DNA, 15 bp, Homo sapiens
ctcacccaaggatgg

SEQ ID NO: 1308932 - DNA, 15 bp, Homo sapiens
actcacccaaggatg

SEQ ID NO: 1308933 - DNA, 15 bp, Homo sapiens
aactcacccaaggat

SEQ ID NO: 1308934 - DNA, 15 bp, Homo sapiens
aaactcacccaagga

SEQ ID NO: 1308935 - DNA, 15 bp, Homo sapiens
caaactcacccaagg

SEQ ID NO: 1308936 - DNA, 15 bp, Homo sapiens
tcaaactcacccaag

SEQ ID NO: 1308937 - DNA, 15 bp, Homo sapiens
ctcaaactcacccaa

SEQ ID NO: 1308938 - DNA, 15 bp, Homo sapiens
cctcaaactcaccca

SEQ ID NO: 1308939 - DNA, 15 bp, Homo sapiens
ccctcaaactcaccc

SEQ ID NO: 1308940 - DNA, 15 bp, Homo sapiens
accctcaaactcacc

SEQ ID NO: 1308941 - DNA, 15 bp, Homo sapiens
caccctcaaactcac

SEQ ID NO: 1308942 - DNA, 15 bp, Homo sapiens
gcaccctcaaactca

SEQ ID NO: 1308943 - DNA, 15 bp, Homo sapiens
agcaccctcaaactc

SEQ ID NO: 1308944 - DNA, 15 bp, Homo sapiens
cagcaccctcaaact

SEQ ID NO: 1308945 - DNA, 15 bp, Homo sapiens
acagcaccctcaaac

SEQ ID NO: 1308946 - DNA, 15 bp, Homo sapiens
tacagcaccctcaaa

SEQ ID NO: 1308947 - DNA, 15 bp, Homo sapiens
ttacagcaccctcaa

SEQ ID NO: 1308948 - DNA, 15 bp, Homo sapiens
tttacagcaccctca

SEQ ID NO: 1308949 - DNA, 15 bp, Homo sapiens
atttacagcaccctc

SEQ ID NO: 1308950 - DNA, 15 bp, Homo sapiens
tatttacagcaccct

SEQ ID NO: 1308951 - DNA, 15 bp, Homo sapiens
gtatttacagcaccc

SEQ ID NO: 1308952 - DNA, 15 bp, Homo sapiens
agtatttacagcacc

SEQ ID NO: 1308953 - DNA, 15 bp, Homo sapiens
gagtatttacagcac

SEQ ID NO: 1308954 - DNA, 15 bp, Homo sapiens
ggagtatttacagca

SEQ ID NO: 1308955 - DNA, 15 bp, Homo sapiens
aggagtatttacagc

SEQ ID NO: 1308956 - DNA, 15 bp, Homo sapiens
taggagtatttacag

SEQ ID NO: 1308957 - DNA, 15 bp, Homo sapiens
ataggagtatttaca

SEQ ID NO: 1308958 - DNA, 15 bp, Homo sapiens
tataggagtatttac

SEQ ID NO: 1308959 - DNA, 15 bp, Homo sapiens
gtataggagtattta

SEQ ID NO: 1308960 - DNA, 15 bp, Homo sapiens
agtataggagtattt

SEQ ID NO: 1308961 - DNA, 15 bp, Homo sapiens
gagtataggagtatt

SEQ ID NO: 1308962 - DNA, 15 bp, Homo sapiens
ggagtataggagtat

SEQ ID NO: 1308963 - DNA, 15 bp, Homo sapiens
tggagtataggagta

SEQ ID NO: 1308964 - DNA, 15 bp, Homo sapiens
ttggagtataggagt

SEQ ID NO: 1308965 - DNA, 15 bp, Homo sapiens
tttggagtataggag

SEQ ID NO: 1308966 - DNA, 15 bp, Homo sapiens
ttttggagtatagga

SEQ ID NO: 1308967 - DNA, 15 bp, Homo sapiens
gttttggagtatagg

SEQ ID NO: 1308968 - DNA, 15 bp, Homo sapiens
tgttttggagtatag

SEQ ID NO: 1308969 - DNA, 15 bp, Homo sapiens
atgttttggagtata

SEQ ID NO: 1308970 - DNA, 15 bp, Homo sapiens
gatgttttggagtat

SEQ ID NO: 1308971 - DNA, 15 bp, Homo sapiens
agatgttttggagta

SEQ ID NO: 1308972 - DNA, 15 bp, Homo sapiens
gagatgttttggagt

SEQ ID NO: 1308973 - DNA, 15 bp, Homo sapiens
agagatgttttggag

SEQ ID NO: 1308974 - DNA, 15 bp, Homo sapiens
aagagatgttttgga

SEQ ID NO: 1308975 - DNA, 15 bp, Homo sapiens
gaagagatgttttgg

SEQ ID NO: 1308976 - DNA, 15 bp, Homo sapiens
agaagagatgttttg

SEQ ID NO: 1308977 - DNA, 15 bp, Homo sapiens
tagaagagatgtttt

SEQ ID NO: 1308978 - DNA, 15 bp, Homo sapiens
ttagaagagatgttt

SEQ ID NO: 1308979 - DNA, 15 bp, Homo sapiens
gttagaagagatgtt

SEQ ID NO: 1308980 - DNA, 15 bp, Homo sapiens
agttagaagagatgt

SEQ ID NO: 1308981 - DNA, 15 bp, Homo sapiens
aagttagaagagatg

SEQ ID NO: 1308982 - DNA, 15 bp, Homo sapiens
caagttagaagagat

SEQ ID NO: 1308983 - DNA, 15 bp, Homo sapiens
gcaagttagaagaga

SEQ ID NO: 1308984 - DNA, 15 bp, Homo sapiens
tgcaagttagaagag

SEQ ID NO: 1308985 - DNA, 15 bp, Homo sapiens
ttgcaagttagaaga

SEQ ID NO: 1308986 - DNA, 15 bp, Homo sapiens
tttgcaagttagaag

SEQ ID NO: 1308987 - DNA, 15 bp, Homo sapiens
ctttgcaagttagaa

SEQ ID NO: 1308988 - DNA, 15 bp, Homo sapiens
actttgcaagttaga

SEQ ID NO: 1308989 - DNA, 15 bp, Homo sapiens
tactttgcaagttag

SEQ ID NO: 1308990 - DNA, 15 bp, Homo sapiens
gtactttgcaagtta

SEQ ID NO: 1308991 - DNA, 15 bp, Homo sapiens
ggtactttgcaagtt

SEQ ID NO: 1308992 - DNA, 15 bp, Homo sapiens
aggtactttgcaagt

SEQ ID NO: 1308993 - DNA, 15 bp, Homo sapiens
caggtactttgcaag

SEQ ID NO: 1308994 - DNA, 15 bp, Homo sapiens
tcaggtactttgcaa

SEQ ID NO: 1308995 - DNA, 15 bp, Homo sapiens
ttcaggtactttgca

SEQ ID NO: 1308996 - DNA, 15 bp, Homo sapiens
tttcaggtactttgc

SEQ ID NO: 1308997 - DNA, 15 bp, Homo sapiens
atttcaggtactttg

SEQ ID NO: 1308998 - DNA, 15 bp, Homo sapiens
aatttcaggtacttt

SEQ ID NO: 1308999 - DNA, 15 bp, Homo sapiens
gaatttcaggtactt

SEQ ID NO: 1309000 - DNA, 15 bp, Homo sapiens
ggaatttcaggtact

SEQ ID NO: 1309001 - DNA, 15 bp, Homo sapiens
tggaatttcaggtac

SEQ ID NO: 1309002 - DNA, 15 bp, Homo sapiens
gtggaatttcaggta

SEQ ID NO: 1309003 - DNA, 15 bp, Homo sapiens
ggtggaatttcaggt

SEQ ID NO: 1309004 - DNA, 15 bp, Homo sapiens
tggtggaatttcagg

SEQ ID NO: 1309005 - DNA, 15 bp, Homo sapiens
ttggtggaatttcag

SEQ ID NO: 1309006 - DNA, 15 bp, Homo sapiens
attggtggaatttca

SEQ ID NO: 1309007 - DNA, 15 bp, Homo sapiens
aattggtggaatttc

SEQ ID NO: 1309008 - DNA, 15 bp, Homo sapiens
taattggtggaattt

SEQ ID NO: 1309009 - DNA, 15 bp, Homo sapiens
ctaattggtggaatt

SEQ ID NO: 1309010 - DNA, 15 bp, Homo sapiens
tctaattggtggaat

SEQ ID NO: 1309011 - DNA, 15 bp, Homo sapiens
gtctaattggtggaa

SEQ ID NO: 1309012 - DNA, 15 bp, Homo sapiens
tgtctaattggtgga

SEQ ID NO: 1309013 - DNA, 15 bp, Homo sapiens
atgtctaattggtgg

SEQ ID NO: 1309014 - DNA, 15 bp, Homo sapiens
aatgtctaattggtg

SEQ ID NO: 1309015 - DNA, 15 bp, Homo sapiens
gaatgtctaattggt

SEQ ID NO: 1309016 - DNA, 15 bp, Homo sapiens
tgaatgtctaattgg

SEQ ID NO: 1309017 - DNA, 15 bp, Homo sapiens
atgaatgtctaattg

SEQ ID NO: 1309018 - DNA, 15 bp, Homo sapiens
aatgaatgtctaatt

SEQ ID NO: 1309019 - DNA, 15 bp, Homo sapiens
gaatgaatgtctaat

SEQ ID NO: 1309020 - DNA, 15 bp, Homo sapiens
agaatgaatgtctaa

SEQ ID NO: 1309021 - DNA, 15 bp, Homo sapiens
aagaatgaatgtcta

SEQ ID NO: 1309022 - DNA, 15 bp, Homo sapiens
caagaatgaatgtct

SEQ ID NO: 1309023 - DNA, 15 bp, Homo sapiens
tcaagaatgaatgtc

SEQ ID NO: 1309024 - DNA, 15 bp, Homo sapiens
ttcaagaatgaatgt

SEQ ID NO: 1309025 - DNA, 15 bp, Homo sapiens
cttcaagaatgaatg

SEQ ID NO: 1309026 - DNA, 15 bp, Homo sapiens
gcttcaagaatgaat

SEQ ID NO: 1309027 - DNA, 15 bp, Homo sapiens
ggcttcaagaatgaa

SEQ ID NO: 1309028 - DNA, 15 bp, Homo sapiens
aggcttcaagaatga

SEQ ID NO: 1309029 - DNA, 15 bp, Homo sapiens
aaggcttcaagaatg

SEQ ID NO: 1309030 - DNA, 15 bp, Homo sapiens
aaaggcttcaagaat

SEQ ID NO: 1309031 - DNA, 15 bp, Homo sapiens
aaaaggcttcaagaa

SEQ ID NO: 1309032 - DNA, 15 bp, Homo sapiens
gaaaaggcttcaaga

SEQ ID NO: 1309033 - DNA, 15 bp, Homo sapiens
tgaaaaggcttcaag

SEQ ID NO: 1309034 - DNA, 15 bp, Homo sapiens
ctgaaaaggcttcaa

SEQ ID NO: 1309035 - DNA, 15 bp, Homo sapiens
actgaaaaggcttca

SEQ ID NO: 1309036 - DNA, 15 bp, Homo sapiens
aactgaaaaggcttc

SEQ ID NO: 1309037 - DNA, 15 bp, Homo sapiens
caactgaaaaggctt

SEQ ID NO: 1309038 - DNA, 15 bp, Homo sapiens
acaactgaaaaggct

SEQ ID NO: 1309039 - DNA, 15 bp, Homo sapiens
aacaactgaaaaggc

SEQ ID NO: 1309040 - DNA, 15 bp, Homo sapiens
aaacaactgaaaagg

SEQ ID NO: 1309041 - DNA, 15 bp, Homo sapiens
gaaacaactgaaaag

SEQ ID NO: 1309042 - DNA, 15 bp, Homo sapiens
agaaacaactgaaaa

SEQ ID NO: 1309043 - DNA, 15 bp, Homo sapiens
aagaaacaactgaaa

SEQ ID NO: 1309044 - DNA, 15 bp, Homo sapiens
taagaaacaactgaa

SEQ ID NO: 1309045 - DNA, 15 bp, Homo sapiens
ttaagaaacaactga

SEQ ID NO: 1309046 - DNA, 15 bp, Homo sapiens
tttaagaaacaactg

SEQ ID NO: 1309047 - DNA, 15 bp, Homo sapiens
ttttaagaaacaact

SEQ ID NO: 1309048 - DNA, 15 bp, Homo sapiens
attttaagaaacaac

SEQ ID NO: 1309049 - DNA, 15 bp, Homo sapiens
gattttaagaaacaa

SEQ ID NO: 1309050 - DNA, 15 bp, Homo sapiens
agattttaagaaaca

SEQ ID NO: 1309051 - DNA, 15 bp, Homo sapiens
tagattttaagaaac

SEQ ID NO: 1309052 - DNA, 15 bp, Homo sapiens
ttagattttaagaaa

SEQ ID NO: 1309053 - DNA, 15 bp, Homo sapiens
cttagattttaagaa

SEQ ID NO: 1309054 - DNA, 15 bp, Homo sapiens
acttagattttaaga

SEQ ID NO: 1309055 - DNA, 15 bp, Homo sapiens
tacttagattttaag

SEQ ID NO: 1309056 - DNA, 15 bp, Homo sapiens
ctacttagattttaa

SEQ ID NO: 1309057 - DNA, 15 bp, Homo sapiens
gctacttagatttta

SEQ ID NO: 1309058 - DNA, 15 bp, Homo sapiens
agctacttagatttt

SEQ ID NO: 1309059 - DNA, 15 bp, Homo sapiens
gagctacttagattt

SEQ ID NO: 1309060 - DNA, 15 bp, Homo sapiens
agagctacttagatt

SEQ ID NO: 1309061 - DNA, 15 bp, Homo sapiens
aagagctacttagat

SEQ ID NO: 1309062 - DNA, 15 bp, Homo sapiens
taagagctacttaga

SEQ ID NO: 1309063 - DNA, 15 bp, Homo sapiens
ctaagagctacttag

SEQ ID NO: 1309064 - DNA, 15 bp, Homo sapiens
actaagagctactta

SEQ ID NO: 1309065 - DNA, 15 bp, Homo sapiens
cactaagagctactt

SEQ ID NO: 1309066 - DNA, 15 bp, Homo sapiens
acactaagagctact

SEQ ID NO: 1309067 - DNA, 15 bp, Homo sapiens
gacactaagagctac

SEQ ID NO: 1309068 - DNA, 15 bp, Homo sapiens
tgacactaagagcta

SEQ ID NO: 1309069 - DNA, 15 bp, Homo sapiens
gtgacactaagagct

SEQ ID NO: 1309070 - DNA, 15 bp, Homo sapiens
ggtgacactaagagc

SEQ ID NO: 1309071 - DNA, 15 bp, Homo sapiens
gggtgacactaagag

SEQ ID NO: 1309072 - DNA, 15 bp, Homo sapiens
agggtgacactaaga

SEQ ID NO: 1309073 - DNA, 15 bp, Homo sapiens
cagggtgacactaag

SEQ ID NO: 1309074 - DNA, 15 bp, Homo sapiens
gcagggtgacactaa

SEQ ID NO: 1309075 - DNA, 15 bp, Homo sapiens
tgcagggtgacacta

SEQ ID NO: 1309076 - DNA, 15 bp, Homo sapiens
gtgcagggtgacact

SEQ ID NO: 1309077 - DNA, 15 bp, Homo sapiens
ggtgcagggtgacac

SEQ ID NO: 1309078 - DNA, 15 bp, Homo sapiens
aggtgcagggtgaca

SEQ ID NO: 1309079 - DNA, 15 bp, Homo sapiens
aaggtgcagggtgac

SEQ ID NO: 1309080 - DNA, 15 bp, Homo sapiens
gaaggtgcagggtga

SEQ ID NO: 1309081 - DNA, 15 bp, Homo sapiens
tgaaggtgcagggtg

SEQ ID NO: 1309082 - DNA, 15 bp, Homo sapiens
atgaaggtgcagggt

SEQ ID NO: 1309083 - DNA, 15 bp, Homo sapiens
aatgaaggtgcaggg

SEQ ID NO: 1309084 - DNA, 15 bp, Homo sapiens
taatgaaggtgcagg

SEQ ID NO: 1309085 - DNA, 15 bp, Homo sapiens
ttaatgaaggtgcag

SEQ ID NO: 1309086 - DNA, 15 bp, Homo sapiens
cttaatgaaggtgca

SEQ ID NO: 1309087 - DNA, 15 bp, Homo sapiens
gcttaatgaaggtgc

SEQ ID NO: 1309088 - DNA, 15 bp, Homo sapiens
tgcttaatgaaggtg

SEQ ID NO: 1309089 - DNA, 15 bp, Homo sapiens
ctgcttaatgaaggt

SEQ ID NO: 1309090 - DNA, 15 bp, Homo sapiens
cctgcttaatgaagg

SEQ ID NO: 1309091 - DNA, 15 bp, Homo sapiens
acctgcttaatgaag

SEQ ID NO: 1309092 - DNA, 15 bp, Homo sapiens
tacctgcttaatgaa

SEQ ID NO: 1309093 - DNA, 15 bp, Homo sapiens
atacctgcttaatga

SEQ ID NO: 1309094 - DNA, 15 bp, Homo sapiens
gatacctgcttaatg

SEQ ID NO: 1309095 - DNA, 15 bp, Homo sapiens
tgatacctgcttaat

SEQ ID NO: 1309096 - DNA, 15 bp, Homo sapiens
gtgatacctgcttaa

SEQ ID NO: 1309097 - DNA, 15 bp, Homo sapiens
agtgatacctgctta

SEQ ID NO: 1309098 - DNA, 15 bp, Homo sapiens
aagtgatacctgctt

SEQ ID NO: 1309099 - DNA, 15 bp, Homo sapiens
caagtgatacctgct

SEQ ID NO: 1309100 - DNA, 15 bp, Homo sapiens
acaagtgatacctgc

SEQ ID NO: 1309101 - DNA, 15 bp, Homo sapiens
aacaagtgatacctg

SEQ ID NO: 1309102 - DNA, 15 bp, Homo sapiens
caacaagtgatacct

SEQ ID NO: 1309103 - DNA, 15 bp, Homo sapiens
ccaacaagtgatacc

SEQ ID NO: 1309104 - DNA, 15 bp, Homo sapiens
gccaacaagtgatac

SEQ ID NO: 1309105 - DNA, 15 bp, Homo sapiens
agccaacaagtgata

SEQ ID NO: 1309106 - DNA, 15 bp, Homo sapiens
gagccaacaagtgat

SEQ ID NO: 1309107 - DNA, 15 bp, Homo sapiens
ggagccaacaagtga

SEQ ID NO: 1309108 - DNA, 15 bp, Homo sapiens
aggagccaacaagtg

SEQ ID NO: 1309109 - DNA, 15 bp, Homo sapiens
gaggagccaacaagt

SEQ ID NO: 1309110 - DNA, 15 bp, Homo sapiens
tgaggagccaacaag

SEQ ID NO: 1309111 - DNA, 15 bp, Homo sapiens
ctgaggagccaacaa

SEQ ID NO: 1309112 - DNA, 15 bp, Homo sapiens
actgaggagccaaca

SEQ ID NO: 1309113 - DNA, 15 bp, Homo sapiens
cactgaggagccaac

SEQ ID NO: 1309114 - DNA, 15 bp, Homo sapiens
acactgaggagccaa

SEQ ID NO: 1309115 - DNA, 15 bp, Homo sapiens
cacactgaggagcca

SEQ ID NO: 1309116 - DNA, 15 bp, Homo sapiens
ccacactgaggagcc

SEQ ID NO: 1309117 - DNA, 15 bp, Homo sapiens
accacactgaggagc

SEQ ID NO: 1309118 - DNA, 15 bp, Homo sapiens
caccacactgaggag

SEQ ID NO: 1309119 - DNA, 15 bp, Homo sapiens
tcaccacactgagga

SEQ ID NO: 1309120 - DNA, 15 bp, Homo sapiens
ctcaccacactgagg

SEQ ID NO: 1309121 - DNA, 15 bp, Homo sapiens
gctcaccacactgag

SEQ ID NO: 1309122 - DNA, 15 bp, Homo sapiens
tgctcaccacactga

SEQ ID NO: 1309123 - DNA, 15 bp, Homo sapiens
gtgctcaccacactg

SEQ ID NO: 1309124 - DNA, 15 bp, Homo sapiens
agtgctcaccacact

SEQ ID NO: 1309125 - DNA, 15 bp, Homo sapiens
cagtgctcaccacac

SEQ ID NO: 1309126 - DNA, 15 bp, Homo sapiens
tcagtgctcaccaca

SEQ ID NO: 1309127 - DNA, 15 bp, Homo sapiens
ctcagtgctcaccac

SEQ ID NO: 1309128 - DNA, 15 bp, Homo sapiens
actcagtgctcacca

SEQ ID NO: 1309129 - DNA, 15 bp, Homo sapiens
aactcagtgctcacc

SEQ ID NO: 1309130 - DNA, 15 bp, Homo sapiens
gaactcagtgctcac

SEQ ID NO: 1309131 - DNA, 15 bp, Homo sapiens
agaactcagtgctca

SEQ ID NO: 1309132 - DNA, 15 bp, Homo sapiens
cagaactcagtgctc

SEQ ID NO: 1309133 - DNA, 15 bp, Homo sapiens
ccagaactcagtgct

SEQ ID NO: 1309134 - DNA, 15 bp, Homo sapiens
cccagaactcagtgc

SEQ ID NO: 1309135 - DNA, 15 bp, Homo sapiens
tcccagaactcagtg

SEQ ID NO: 1309136 - DNA, 15 bp, Homo sapiens
ttcccagaactcagt

SEQ ID NO: 1309137 - DNA, 15 bp, Homo sapiens
cttcccagaactcag

SEQ ID NO: 1309138 - DNA, 15 bp, Homo sapiens
ccttcccagaactca

SEQ ID NO: 1309139 - DNA, 15 bp, Homo sapiens
tccttcccagaactc

SEQ ID NO: 1309140 - DNA, 15 bp, Homo sapiens
gtccttcccagaact

SEQ ID NO: 1309141 - DNA, 15 bp, Homo sapiens
tgtccttcccagaac

SEQ ID NO: 1309142 - DNA, 15 bp, Homo sapiens
ttgtccttcccagaa

SEQ ID NO: 1309143 - DNA, 15 bp, Homo sapiens
tttgtccttcccaga

SEQ ID NO: 1309144 - DNA, 15 bp, Homo sapiens
ttttgtccttcccag

SEQ ID NO: 1309145 - DNA, 15 bp, Homo sapiens
gttttgtccttccca

SEQ ID NO: 1309146 - DNA, 15 bp, Homo sapiens
tgttttgtccttccc

SEQ ID NO: 1309147 - DNA, 15 bp, Homo sapiens
ctgttttgtccttcc

SEQ ID NO: 1309148 - DNA, 15 bp, Homo sapiens
cctgttttgtccttc

SEQ ID NO: 1309149 - DNA, 15 bp, Homo sapiens
ccctgttttgtcctt

SEQ ID NO: 1309150 - DNA, 15 bp, Homo sapiens
tccctgttttgtcct

SEQ ID NO: 1309151 - DNA, 15 bp, Homo sapiens
gtccctgttttgtcc

SEQ ID NO: 1309152 - DNA, 15 bp, Homo sapiens
agtccctgttttgtc

SEQ ID NO: 1309153 - DNA, 15 bp, Homo sapiens
cagtccctgttttgt

SEQ ID NO: 1309154 - DNA, 15 bp, Homo sapiens
tcagtccctgttttg

SEQ ID NO: 1309155 - DNA, 15 bp, Homo sapiens
ttcagtccctgtttt

SEQ ID NO: 1309156 - DNA, 15 bp, Homo sapiens
tttcagtccctgttt

SEQ ID NO: 1309157 - DNA, 15 bp, Homo sapiens
ttttcagtccctgtt

SEQ ID NO: 1309158 - DNA, 15 bp, Homo sapiens
tttttcagtccctgt

SEQ ID NO: 1309159 - DNA, 15 bp, Homo sapiens
gtttttcagtccctg

SEQ ID NO: 1309160 - DNA, 15 bp, Homo sapiens
agtttttcagtccct

SEQ ID NO: 1309161 - DNA, 15 bp, Homo sapiens
tagtttttcagtccc

SEQ ID NO: 1309162 - DNA, 15 bp, Homo sapiens
ttagtttttcagtcc

SEQ ID NO: 1309163 - DNA, 15 bp, Homo sapiens
cttagtttttcagtc

SEQ ID NO: 1309164 - DNA, 15 bp, Homo sapiens
ccttagtttttcagt

SEQ ID NO: 1309165 - DNA, 15 bp, Homo sapiens
tccttagtttttcag

SEQ ID NO: 1309166 - DNA, 15 bp, Homo sapiens
ttccttagtttttca

SEQ ID NO: 1309167 - DNA, 15 bp, Homo sapiens
tttccttagtttttc

SEQ ID NO: 1309168 - DNA, 15 bp, Homo sapiens
ttttccttagttttt

SEQ ID NO: 1309169 - DNA, 15 bp, Homo sapiens
cttttccttagtttt

SEQ ID NO: 1309170 - DNA, 15 bp, Homo sapiens
ccttttccttagttt

SEQ ID NO: 1309171 - DNA, 15 bp, Homo sapiens
tccttttccttagtt

SEQ ID NO: 1309172 - DNA, 15 bp, Homo sapiens
atccttttccttagt

SEQ ID NO: 1309173 - DNA, 15 bp, Homo sapiens
catccttttccttag

SEQ ID NO: 1309174 - DNA, 15 bp, Homo sapiens
ccatccttttcctta

SEQ ID NO: 1309175 - DNA, 15 bp, Homo sapiens
gccatccttttcctt

SEQ ID NO: 1309176 - DNA, 15 bp, Homo sapiens
agccatccttttcct

SEQ ID NO: 1309177 - DNA, 15 bp, Homo sapiens
aagccatccttttcc

SEQ ID NO: 1309178 - DNA, 15 bp, Homo sapiens
taagccatccttttc

SEQ ID NO: 1309179 - DNA, 15 bp, Homo sapiens
ctaagccatcctttt

SEQ ID NO: 1309180 - DNA, 15 bp, Homo sapiens
gctaagccatccttt

SEQ ID NO: 1309181 - DNA, 15 bp, Homo sapiens
ggctaagccatcctt

SEQ ID NO: 1309182 - DNA, 15 bp, Homo sapiens
aggctaagccatcct

SEQ ID NO: 1309183 - DNA, 15 bp, Homo sapiens
caggctaagccatcc

SEQ ID NO: 1309184 - DNA, 15 bp, Homo sapiens
gcaggctaagccatc

SEQ ID NO: 1309185 - DNA, 15 bp, Homo sapiens
tgcaggctaagccat

SEQ ID NO: 1309186 - DNA, 15 bp, Homo sapiens
gtgcaggctaagcca

SEQ ID NO: 1309187 - DNA, 15 bp, Homo sapiens
ggtgcaggctaagcc

SEQ ID NO: 1309188 - DNA, 15 bp, Homo sapiens
tggtgcaggctaagc

SEQ ID NO: 1309189 - DNA, 15 bp, Homo sapiens
ttggtgcaggctaag

SEQ ID NO: 1309190 - DNA, 15 bp, Homo sapiens
gttggtgcaggctaa

SEQ ID NO: 1309191 - DNA, 15 bp, Homo sapiens
agttggtgcaggcta

SEQ ID NO: 1309192 - DNA, 15 bp, Homo sapiens
cagttggtgcaggct

SEQ ID NO: 1309193 - DNA, 15 bp, Homo sapiens
acagttggtgcaggc

SEQ ID NO: 1309194 - DNA, 15 bp, Homo sapiens
tacagttggtgcagg

SEQ ID NO: 1309195 - DNA, 15 bp, Homo sapiens
gtacagttggtgcag

SEQ ID NO: 1309196 - DNA, 15 bp, Homo sapiens
cgtacagttggtgca

SEQ ID NO: 1309197 - DNA, 15 bp, Homo sapiens
acgtacagttggtgc

SEQ ID NO: 1309198 - DNA, 15 bp, Homo sapiens
cacgtacagttggtg

SEQ ID NO: 1309199 - DNA, 15 bp, Homo sapiens
tcacgtacagttggt

SEQ ID NO: 1309200 - DNA, 15 bp, Homo sapiens
ttcacgtacagttgg

SEQ ID NO: 1309201 - DNA, 15 bp, Homo sapiens
cttcacgtacagttg

SEQ ID NO: 1309202 - DNA, 15 bp, Homo sapiens
ccttcacgtacagtt

SEQ ID NO: 1309203 - DNA, 15 bp, Homo sapiens
tccttcacgtacagt

SEQ ID NO: 1309204 - DNA, 15 bp, Homo sapiens
ttccttcacgtacag

SEQ ID NO: 1309205 - DNA, 15 bp, Homo sapiens
cttccttcacgtaca

SEQ ID NO: 1309206 - DNA, 15 bp, Homo sapiens
tcttccttcacgtac

SEQ ID NO: 1309207 - DNA, 15 bp, Homo sapiens
ctcttccttcacgta

SEQ ID NO: 1309208 - DNA, 15 bp, Homo sapiens
tctcttccttcacgt

SEQ ID NO: 1309209 - DNA, 15 bp, Homo sapiens
ctctcttccttcacg

SEQ ID NO: 1309210 - DNA, 15 bp, Homo sapiens
actctcttccttcac

SEQ ID NO: 1309211 - DNA, 15 bp, Homo sapiens
gactctcttccttca

SEQ ID NO: 1309212 - DNA, 15 bp, Homo sapiens
tgactctcttccttc

SEQ ID NO: 1309213 - DNA, 15 bp, Homo sapiens
atgactctcttcctt

SEQ ID NO: 1309214 - DNA, 15 bp, Homo sapiens
aatgactctcttcct

SEQ ID NO: 1309215 - DNA, 15 bp, Homo sapiens
taatgactctcttcc

SEQ ID NO: 1309216 - DNA, 15 bp, Homo sapiens
ataatgactctcttc

SEQ ID NO: 1309217 - DNA, 15 bp, Homo sapiens
gataatgactctctt

SEQ ID NO: 1309218 - DNA, 15 bp, Homo sapiens
tgataatgactctct

SEQ ID NO: 1309219 - DNA, 15 bp, Homo sapiens
gtgataatgactctc

SEQ ID NO: 1309220 - DNA, 15 bp, Homo sapiens
tgtgataatgactct

SEQ ID NO: 1309221 - DNA, 15 bp, Homo sapiens
atgtgataatgactc

SEQ ID NO: 1309222 - DNA, 15 bp, Homo sapiens
gatgtgataatgact

SEQ ID NO: 1309223 - DNA, 15 bp, Homo sapiens
tgatgtgataatgac

SEQ ID NO: 1309224 - DNA, 15 bp, Homo sapiens
ctgatgtgataatga

SEQ ID NO: 1309225 - DNA, 15 bp, Homo sapiens
actgatgtgataatg

SEQ ID NO: 1309226 - DNA, 15 bp, Homo sapiens
aactgatgtgataat

SEQ ID NO: 1309227 - DNA, 15 bp, Homo sapiens
caactgatgtgataa

SEQ ID NO: 1309228 - DNA, 15 bp, Homo sapiens
gcaactgatgtgata

SEQ ID NO: 1309229 - DNA, 15 bp, Homo sapiens
tgcaactgatgtgat

SEQ ID NO: 1309230 - DNA, 15 bp, Homo sapiens
atgcaactgatgtga

SEQ ID NO: 1309231 - DNA, 15 bp, Homo sapiens
aatgcaactgatgtg

SEQ ID NO: 1309232 - DNA, 15 bp, Homo sapiens
taatgcaactgatgt

SEQ ID NO: 1309233 - DNA, 15 bp, Homo sapiens
ataatgcaactgatg

SEQ ID NO: 1309234 - DNA, 15 bp, Homo sapiens
aataatgcaactgat

SEQ ID NO: 1309235 - DNA, 15 bp, Homo sapiens
gaataatgcaactga

SEQ ID NO: 1309236 - DNA, 15 bp, Homo sapiens
tgaataatgcaactg

SEQ ID NO: 1309237 - DNA, 15 bp, Homo sapiens
ctgaataatgcaact

SEQ ID NO: 1309238 - DNA, 15 bp, Homo sapiens
gctgaataatgcaac

SEQ ID NO: 1309239 - DNA, 15 bp, Homo sapiens
tgctgaataatgcaa

SEQ ID NO: 1309240 - DNA, 15 bp, Homo sapiens
gtgctgaataatgca

SEQ ID NO: 1309241 - DNA, 15 bp, Homo sapiens
tgtgctgaataatgc

SEQ ID NO: 1309242 - DNA, 15 bp, Homo sapiens
ctgtgctgaataatg

SEQ ID NO: 1309243 - DNA, 15 bp, Homo sapiens
gctgtgctgaataat

SEQ ID NO: 1309244 - DNA, 15 bp, Homo sapiens
agctgtgctgaataa

SEQ ID NO: 1309245 - DNA, 15 bp, Homo sapiens
aagctgtgctgaata

SEQ ID NO: 1309246 - DNA, 15 bp, Homo sapiens
caagctgtgctgaat

SEQ ID NO: 1309247 - DNA, 15 bp, Homo sapiens
acaagctgtgctgaa

SEQ ID NO: 1309248 - DNA, 15 bp, Homo sapiens
aacaagctgtgctga

SEQ ID NO: 1309249 - DNA, 15 bp, Homo sapiens
taacaagctgtgctg

SEQ ID NO: 1309250 - DNA, 15 bp, Homo sapiens
gtaacaagctgtgct

SEQ ID NO: 1309251 - DNA, 15 bp, Homo sapiens
ggtaacaagctgtgc

SEQ ID NO: 1309252 - DNA, 15 bp, Homo sapiens
aggtaacaagctgtg

SEQ ID NO: 1309253 - DNA, 15 bp, Homo sapiens
caggtaacaagctgt

SEQ ID NO: 1309254 - DNA, 15 bp, Homo sapiens
tcaggtaacaagctg

SEQ ID NO: 1309255 - DNA, 15 bp, Homo sapiens
atcaggtaacaagct

SEQ ID NO: 1309256 - DNA, 15 bp, Homo sapiens
tatcaggtaacaagc

SEQ ID NO: 1309257 - DNA, 15 bp, Homo sapiens
atatcaggtaacaag

SEQ ID NO: 1309258 - DNA, 15 bp, Homo sapiens
gatatcaggtaacaa

SEQ ID NO: 1309259 - DNA, 15 bp, Homo sapiens
agatatcaggtaaca

SEQ ID NO: 1309260 - DNA, 15 bp, Homo sapiens
cagatatcaggtaac

SEQ ID NO: 1309261 - DNA, 15 bp, Homo sapiens
gcagatatcaggtaa

SEQ ID NO: 1309262 - DNA, 15 bp, Homo sapiens
agcagatatcaggta

SEQ ID NO: 1309263 - DNA, 15 bp, Homo sapiens
aagcagatatcaggt

SEQ ID NO: 1309264 - DNA, 15 bp, Homo sapiens
taagcagatatcagg

SEQ ID NO: 1309265 - DNA, 15 bp, Homo sapiens
gtaagcagatatcag

SEQ ID NO: 1309266 - DNA, 15 bp, Homo sapiens
ggtaagcagatatca

SEQ ID NO: 1309267 - DNA, 15 bp, Homo sapiens
aggtaagcagatatc

SEQ ID NO: 1309268 - DNA, 15 bp, Homo sapiens
caggtaagcagatat

SEQ ID NO: 1309269 - DNA, 15 bp, Homo sapiens
tcaggtaagcagata

SEQ ID NO: 1309270 - DNA, 15 bp, Homo sapiens
ttcaggtaagcagat

SEQ ID NO: 1309271 - DNA, 15 bp, Homo sapiens
cttcaggtaagcaga

SEQ ID NO: 1309272 - DNA, 15 bp, Homo sapiens
tcttcaggtaagcag

SEQ ID NO: 1309273 - DNA, 15 bp, Homo sapiens
ctcttcaggtaagca

SEQ ID NO: 1309274 - DNA, 15 bp, Homo sapiens
tctcttcaggtaagc

SEQ ID NO: 1309275 - DNA, 15 bp, Homo sapiens
atctcttcaggtaag

SEQ ID NO: 1309276 - DNA, 15 bp, Homo sapiens
aatctcttcaggtaa

SEQ ID NO: 1309277 - DNA, 15 bp, Homo sapiens
taatctcttcaggta

SEQ ID NO: 1309278 - DNA, 15 bp, Homo sapiens
gtaatctcttcaggt

SEQ ID NO: 1309279 - DNA, 15 bp, Homo sapiens
agtaatctcttcagg

SEQ ID NO: 1309280 - DNA, 15 bp, Homo sapiens
cagtaatctcttcag

SEQ ID NO: 1309281 - DNA, 15 bp, Homo sapiens
acagtaatctcttca

SEQ ID NO: 1309282 - DNA, 15 bp, Homo sapiens
cacagtaatctcttc

SEQ ID NO: 1309283 - DNA, 15 bp, Homo sapiens
ccacagtaatctctt

SEQ ID NO: 1309284 - DNA, 15 bp, Homo sapiens
cccacagtaatctct

SEQ ID NO: 1309285 - DNA, 15 bp, Homo sapiens
aacccacagtaatct

SEQ ID NO: 1309286 - DNA, 15 bp, Homo sapiens
taacccacagtaatc

SEQ ID NO: 1309287 - DNA, 15 bp, Homo sapiens
ttaacccacagtaat

SEQ ID NO: 1309288 - DNA, 15 bp, Homo sapiens
attaacccacagtaa

SEQ ID NO: 1309289 - DNA, 15 bp, Homo sapiens
aattaacccacagta

SEQ ID NO: 1309290 - DNA, 15 bp, Homo sapiens
gaattaacccacagt

SEQ ID NO: 1309291 - DNA, 15 bp, Homo sapiens
agaattaacccacag

SEQ ID NO: 1309292 - DNA, 15 bp, Homo sapiens
tagaattaacccaca

SEQ ID NO: 1309293 - DNA, 15 bp, Homo sapiens
ctagaattaacccac

SEQ ID NO: 1309294 - DNA, 15 bp, Homo sapiens
tctagaattaaccca

SEQ ID NO: 1309295 - DNA, 15 bp, Homo sapiens
ttctagaattaaccc

SEQ ID NO: 1309296 - DNA, 15 bp, Homo sapiens
cttctagaattaacc

SEQ ID NO: 1309297 - DNA, 15 bp, Homo sapiens
gcttctagaattaac

SEQ ID NO: 1309298 - DNA, 15 bp, Homo sapiens
agcttctagaattaa

SEQ ID NO: 1309299 - DNA, 15 bp, Homo sapiens
aagcttctagaatta

SEQ ID NO: 1309300 - DNA, 15 bp, Homo sapiens
caagcttctagaatt

SEQ ID NO: 1309301 - DNA, 15 bp, Homo sapiens
gcaagcttctagaat

SEQ ID NO: 1309302 - DNA, 15 bp, Homo sapiens
agcaagcttctagaa

SEQ ID NO: 1309303 - DNA, 15 bp, Homo sapiens
aagcaagcttctaga

SEQ ID NO: 1309304 - DNA, 15 bp, Homo sapiens
taagcaagcttctag

SEQ ID NO: 1309305 - DNA, 15 bp, Homo sapiens
ataagcaagcttcta

SEQ ID NO: 1309306 - DNA, 15 bp, Homo sapiens
aataagcaagcttct

SEQ ID NO: 1309307 - DNA, 15 bp, Homo sapiens
taataagcaagcttc

SEQ ID NO: 1309308 - DNA, 15 bp, Homo sapiens
gtaataagcaagctt

SEQ ID NO: 1309309 - DNA, 15 bp, Homo sapiens
tgtaataagcaagct

SEQ ID NO: 1309310 - DNA, 15 bp, Homo sapiens
atgtaataagcaagc

SEQ ID NO: 1309311 - DNA, 15 bp, Homo sapiens
aatgtaataagcaag

SEQ ID NO: 1309312 - DNA, 15 bp, Homo sapiens
taatgtaataagcaa

SEQ ID NO: 1309313 - DNA, 15 bp, Homo sapiens
ttaatgtaataagca

SEQ ID NO: 1309314 - DNA, 15 bp, Homo sapiens
gttaatgtaataagc

SEQ ID NO: 1309315 - DNA, 15 bp, Homo sapiens
cgttaatgtaataag

SEQ ID NO: 1309316 - DNA, 15 bp, Homo sapiens
tcgttaatgtaataa

SEQ ID NO: 1309317 - DNA, 15 bp, Homo sapiens
gtcgttaatgtaata

SEQ ID NO: 1309318 - DNA, 15 bp, Homo sapiens
ggtcgttaatgtaat

SEQ ID NO: 1309319 - DNA, 15 bp, Homo sapiens
aggtcgttaatgtaa

SEQ ID NO: 1309320 - DNA, 15 bp, Homo sapiens
taggtcgttaatgta

SEQ ID NO: 1309321 - DNA, 15 bp, Homo sapiens
gtaggtcgttaatgt

SEQ ID NO: 1309322 - DNA, 15 bp, Homo sapiens
tgtaggtcgttaatg

SEQ ID NO: 1309323 - DNA, 15 bp, Homo sapiens
atgtaggtcgttaat

SEQ ID NO: 1309324 - DNA, 15 bp, Homo sapiens
aatgtaggtcgttaa

SEQ ID NO: 1309325 - DNA, 15 bp, Homo sapiens
aaatgtaggtcgtta

SEQ ID NO: 1309326 - DNA, 15 bp, Homo sapiens
taaatgtaggtcgtt

SEQ ID NO: 1309327 - DNA, 15 bp, Homo sapiens
ataaatgtaggtcgt

SEQ ID NO: 1309328 - DNA, 15 bp, Homo sapiens
aataaatgtaggtcg

SEQ ID NO: 1309329 - DNA, 15 bp, Homo sapiens
caataaatgtaggtc

SEQ ID NO: 1309330 - DNA, 15 bp, Homo sapiens
tcaataaatgtaggt

SEQ ID NO: 1309331 - DNA, 15 bp, Homo sapiens
gtcaataaatgtagg

SEQ ID NO: 1309332 - DNA, 15 bp, Homo sapiens
tgtcaataaatgtag

SEQ ID NO: 1309333 - DNA, 15 bp, Homo sapiens
ctgtcaataaatgta

SEQ ID NO: 1309334 - DNA, 15 bp, Homo sapiens
gctgtcaataaatgt

SEQ ID NO: 1309335 - DNA, 15 bp, Homo sapiens
agctgtcaataaatg

SEQ ID NO: 1309336 - DNA, 15 bp, Homo sapiens
cagctgtcaataaat

SEQ ID NO: 1309337 - DNA, 15 bp, Homo sapiens
tcagctgtcaataaa

SEQ ID NO: 1309338 - DNA, 15 bp, Homo sapiens
atcagctgtcaataa

SEQ ID NO: 1309339 - DNA, 15 bp, Homo sapiens
aatcagctgtcaata

SEQ ID NO: 1309340 - DNA, 15 bp, Homo sapiens
taatcagctgtcaat

SEQ ID NO: 1309341 - DNA, 15 bp, Homo sapiens
ataatcagctgtcaa

SEQ ID NO: 1309342 - DNA, 15 bp, Homo sapiens
gataatcagctgtca

SEQ ID NO: 1309343 - DNA, 15 bp, Homo sapiens
agataatcagctgtc

SEQ ID NO: 1309344 - DNA, 15 bp, Homo sapiens
aagataatcagctgt

SEQ ID NO: 1309345 - DNA, 15 bp, Homo sapiens
caagataatcagctg

SEQ ID NO: 1309346 - DNA, 15 bp, Homo sapiens
ccaagataatcagct

SEQ ID NO: 1309347 - DNA, 15 bp, Homo sapiens
cccaagataatcagc

SEQ ID NO: 1309348 - DNA, 15 bp, Homo sapiens
ccccaagataatcag

SEQ ID NO: 1309349 - DNA, 15 bp, Homo sapiens
cccccaagataatca

SEQ ID NO: 1309350 - DNA, 15 bp, Homo sapiens
tcccccaagataatc

SEQ ID NO: 1309351 - DNA, 15 bp, Homo sapiens
atcccccaagataat

SEQ ID NO: 1309352 - DNA, 15 bp, Homo sapiens
aatcccccaagataa

SEQ ID NO: 1309353 - DNA, 15 bp, Homo sapiens
caatcccccaagata

SEQ ID NO: 1309354 - DNA, 15 bp, Homo sapiens
acaatcccccaagat

SEQ ID NO: 1309355 - DNA, 15 bp, Homo sapiens
gacaatcccccaaga

SEQ ID NO: 1309356 - DNA, 15 bp, Homo sapiens
agacaatcccccaag

SEQ ID NO: 1309357 - DNA, 15 bp, Homo sapiens
gagacaatcccccaa

SEQ ID NO: 1309358 - DNA, 15 bp, Homo sapiens
agagacaatccccca

SEQ ID NO: 1309359 - DNA, 15 bp, Homo sapiens
cagagacaatccccc

SEQ ID NO: 1309360 - DNA, 15 bp, Homo sapiens
tcagagacaatcccc

SEQ ID NO: 1309361 - DNA, 15 bp, Homo sapiens
ctcagagacaatccc

SEQ ID NO: 1309362 - DNA, 15 bp, Homo sapiens
tctcagagacaatcc

SEQ ID NO: 1309363 - DNA, 15 bp, Homo sapiens
ttctcagagacaatc

SEQ ID NO: 1309364 - DNA, 15 bp, Homo sapiens
attctcagagacaat

SEQ ID NO: 1309365 - DNA, 15 bp, Homo sapiens
aattctcagagacaa

SEQ ID NO: 1309366 - DNA, 15 bp, Homo sapiens
aaattctcagagaca

SEQ ID NO: 1309367 - DNA, 15 bp, Homo sapiens
caaattctcagagac

SEQ ID NO: 1309368 - DNA, 15 bp, Homo sapiens
acaaattctcagaga

SEQ ID NO: 1309369 - DNA, 15 bp, Homo sapiens
cacaaattctcagag

SEQ ID NO: 1309370 - DNA, 15 bp, Homo sapiens
gcacaaattctcaga

SEQ ID NO: 1309371 - DNA, 15 bp, Homo sapiens
tgcacaaattctcag

SEQ ID NO: 1309372 - DNA, 15 bp, Homo sapiens
ctgcacaaattctca

SEQ ID NO: 1309373 - DNA, 15 bp, Homo sapiens
actgcacaaattctc

SEQ ID NO: 1309374 - DNA, 15 bp, Homo sapiens
tactgcacaaattct

SEQ ID NO: 1309375 - DNA, 15 bp, Homo sapiens
ctactgcacaaattc

SEQ ID NO: 1309376 - DNA, 15 bp, Homo sapiens
cctactgcacaaatt

SEQ ID NO: 1309377 - DNA, 15 bp, Homo sapiens
acctactgcacaaat

SEQ ID NO: 1309378 - DNA, 15 bp, Homo sapiens
tacctactgcacaaa

SEQ ID NO: 1309379 - DNA, 15 bp, Homo sapiens
ttacctactgcacaa

SEQ ID NO: 1309380 - DNA, 15 bp, Homo sapiens
tttacctactgcaca

SEQ ID NO: 1309381 - DNA, 15 bp, Homo sapiens
atttacctactgcac

SEQ ID NO: 1309382 - DNA, 15 bp, Homo sapiens
catttacctactgca

SEQ ID NO: 1309383 - DNA, 15 bp, Homo sapiens
tcatttacctactgc

SEQ ID NO: 1309384 - DNA, 15 bp, Homo sapiens
atcatttacctactg

SEQ ID NO: 1309385 - DNA, 15 bp, Homo sapiens
catcatttacctact

SEQ ID NO: 1309386 - DNA, 15 bp, Homo sapiens
acatcatttacctac

SEQ ID NO: 1309387 - DNA, 15 bp, Homo sapiens
gacatcatttaccta

SEQ ID NO: 1309388 - DNA, 15 bp, Homo sapiens
agacatcatttacct

SEQ ID NO: 1309389 - DNA, 15 bp, Homo sapiens
aagacatcatttacc

SEQ ID NO: 1309390 - DNA, 15 bp, Homo sapiens
aaagacatcatttac

SEQ ID NO: 1309391 - DNA, 15 bp, Homo sapiens
caaagacatcattta

SEQ ID NO: 1309392 - DNA, 15 bp, Homo sapiens
gcaaagacatcattt

SEQ ID NO: 1309393 - DNA, 15 bp, Homo sapiens
ggcaaagacatcatt

SEQ ID NO: 1309394 - DNA, 15 bp, Homo sapiens
aggcaaagacatcat

SEQ ID NO: 1309395 - DNA, 15 bp, Homo sapiens
gaggcaaagacatca

SEQ ID NO: 1309396 - DNA, 15 bp, Homo sapiens
tgaggcaaagacatc

SEQ ID NO: 1309397 - DNA, 15 bp, Homo sapiens
ttgaggcaaagacat

SEQ ID NO: 1309398 - DNA, 15 bp, Homo sapiens
attgaggcaaagaca

SEQ ID NO: 1309399 - DNA, 15 bp, Homo sapiens
aattgaggcaaagac

SEQ ID NO: 1309400 - DNA, 15 bp, Homo sapiens
taattgaggcaaaga

SEQ ID NO: 1309401 - DNA, 15 bp, Homo sapiens
ctaattgaggcaaag

SEQ ID NO: 1309402 - DNA, 15 bp, Homo sapiens
gctaattgaggcaaa

SEQ ID NO: 1309403 - DNA, 15 bp, Homo sapiens
tgctaattgaggcaa

SEQ ID NO: 1309404 - DNA, 15 bp, Homo sapiens
gtgctaattgaggca

SEQ ID NO: 1309405 - DNA, 15 bp, Homo sapiens
agtgctaattgaggc

SEQ ID NO: 1309406 - DNA, 15 bp, Homo sapiens
gagtgctaattgagg

SEQ ID NO: 1309407 - DNA, 15 bp, Homo sapiens
ggagtgctaattgag

SEQ ID NO: 1309408 - DNA, 15 bp, Homo sapiens
aggagtgctaattga

SEQ ID NO: 1309409 - DNA, 15 bp, Homo sapiens
aaggagtgctaattg

SEQ ID NO: 1309410 - DNA, 15 bp, Homo sapiens
aaaggagtgctaatt

SEQ ID NO: 1309411 - DNA, 15 bp, Homo sapiens
caaaggagtgctaat

SEQ ID NO: 1309412 - DNA, 15 bp, Homo sapiens
tcaaaggagtgctaa

SEQ ID NO: 1309413 - DNA, 15 bp, Homo sapiens
ctcaaaggagtgcta

SEQ ID NO: 1309414 - DNA, 15 bp, Homo sapiens
tctcaaaggagtgct

SEQ ID NO: 1309415 - DNA, 15 bp, Homo sapiens
ttctcaaaggagtgc

SEQ ID NO: 1309416 - DNA, 15 bp, Homo sapiens
tttctcaaaggagtg

SEQ ID NO: 1309417 - DNA, 15 bp, Homo sapiens
ctttctcaaaggagt

SEQ ID NO: 1309418 - DNA, 15 bp, Homo sapiens
cctttctcaaaggag

SEQ ID NO: 1309419 - DNA, 15 bp, Homo sapiens
tcctttctcaaagga

SEQ ID NO: 1309420 - DNA, 15 bp, Homo sapiens
ttcctttctcaaagg

SEQ ID NO: 1309421 - DNA, 15 bp, Homo sapiens
gttcctttctcaaag

SEQ ID NO: 1309422 - DNA, 15 bp, Homo sapiens
agttcctttctcaaa

SEQ ID NO: 1309423 - DNA, 15 bp, Homo sapiens
tagttcctttctcaa

SEQ ID NO: 1309424 - DNA, 15 bp, Homo sapiens
ttagttcctttctca

SEQ ID NO: 1309425 - DNA, 15 bp, Homo sapiens
cttagttcctttctc

SEQ ID NO: 1309426 - DNA, 15 bp, Homo sapiens
tcttagttcctttct

SEQ ID NO: 1309427 - DNA, 15 bp, Homo sapiens
atcttagttcctttc

SEQ ID NO: 1309428 - DNA, 15 bp, Homo sapiens
tatcttagttccttt

SEQ ID NO: 1309429 - DNA, 15 bp, Homo sapiens
ctatcttagttcctt

SEQ ID NO: 1309430 - DNA, 15 bp, Homo sapiens
actatcttagttcct

SEQ ID NO: 1309431 - DNA, 15 bp, Homo sapiens
aactatcttagttcc

SEQ ID NO: 1309432 - DNA, 15 bp, Homo sapiens
taactatcttagttc

SEQ ID NO: 1309433 - DNA, 15 bp, Homo sapiens
ttaactatcttagtt

SEQ ID NO: 1309434 - DNA, 15 bp, Homo sapiens
attaactatcttagt

SEQ ID NO: 1309435 - DNA, 15 bp, Homo sapiens
cattaactatcttag

SEQ ID NO: 1309436 - DNA, 15 bp, Homo sapiens
acattaactatctta

SEQ ID NO: 1309437 - DNA, 15 bp, Homo sapiens
aacattaactatctt

SEQ ID NO: 1309438 - DNA, 15 bp, Homo sapiens
caacattaactatct

SEQ ID NO: 1309439 - DNA, 15 bp, Homo sapiens
tcaacattaactatc

SEQ ID NO: 1309440 - DNA, 15 bp, Homo sapiens
atcaacattaactat

SEQ ID NO: 1309441 - DNA, 15 bp, Homo sapiens
aatcaacattaacta

SEQ ID NO: 1309442 - DNA, 15 bp, Homo sapiens
aaatcaacattaact

SEQ ID NO: 1309443 - DNA, 15 bp, Homo sapiens
caaatcaacattaac

SEQ ID NO: 1309444 - DNA, 15 bp, Homo sapiens
acaaatcaacattaa

SEQ ID NO: 1309445 - DNA, 15 bp, Homo sapiens
tacaaatcaacatta

SEQ ID NO: 1309446 - DNA, 15 bp, Homo sapiens
atacaaatcaacatt

SEQ ID NO: 1309447 - DNA, 15 bp, Homo sapiens
gatacaaatcaacat

SEQ ID NO: 1309448 - DNA, 15 bp, Homo sapiens
tgatacaaatcaaca

SEQ ID NO: 1309449 - DNA, 15 bp, Homo sapiens
gtgatacaaatcaac

SEQ ID NO: 1309450 - DNA, 15 bp, Homo sapiens
agtgatacaaatcaa

SEQ ID NO: 1309451 - DNA, 15 bp, Homo sapiens
cagtgatacaaatca

SEQ ID NO: 1309452 - DNA, 15 bp, Homo sapiens
acagtgatacaaatc

SEQ ID NO: 1309453 - DNA, 15 bp, Homo sapiens
cacagtgatacaaat

SEQ ID NO: 1309454 - DNA, 15 bp, Homo sapiens
ccacagtgatacaaa

SEQ ID NO: 1309455 - DNA, 15 bp, Homo sapiens
accacagtgatacaa

SEQ ID NO: 1309456 - DNA, 15 bp, Homo sapiens
aaccacagtgataca

SEQ ID NO: 1309457 - DNA, 15 bp, Homo sapiens
aaaccacagtgatac

SEQ ID NO: 1309458 - DNA, 15 bp, Homo sapiens
gaaaccacagtgata

SEQ ID NO: 1309459 - DNA, 15 bp, Homo sapiens
agaaaccacagtgat

SEQ ID NO: 1309460 - DNA, 15 bp, Homo sapiens
aagaaaccacagtga

SEQ ID NO: 1309461 - DNA, 15 bp, Homo sapiens
taagaaaccacagtg

SEQ ID NO: 1309462 - DNA, 15 bp, Homo sapiens
ataagaaaccacagt

SEQ ID NO: 1309463 - DNA, 15 bp, Homo sapiens
gataagaaaccacag

SEQ ID NO: 1309464 - DNA, 15 bp, Homo sapiens
ggataagaaaccaca

SEQ ID NO: 1309465 - DNA, 15 bp, Homo sapiens
gggataagaaaccac

SEQ ID NO: 1309466 - DNA, 15 bp, Homo sapiens
agggataagaaacca

SEQ ID NO: 1309467 - DNA, 15 bp, Homo sapiens
gagggataagaaacc

SEQ ID NO: 1309468 - DNA, 15 bp, Homo sapiens
agagggataagaaac

SEQ ID NO: 1309469 - DNA, 15 bp, Homo sapiens
aagagggataagaaa

SEQ ID NO: 1309470 - DNA, 15 bp, Homo sapiens
aaagagggataagaa

SEQ ID NO: 1309471 - DNA, 15 bp, Homo sapiens
aaaagagggataaga

SEQ ID NO: 1309472 - DNA, 15 bp, Homo sapiens
taaaagagggataag

SEQ ID NO: 1309473 - DNA, 15 bp, Homo sapiens
ataaaagagggataa

SEQ ID NO: 1309474 - DNA, 15 bp, Homo sapiens
tataaaagagggata

SEQ ID NO: 1309475 - DNA, 15 bp, Homo sapiens
atataaaagagggat

SEQ ID NO: 1309476 - DNA, 15 bp, Homo sapiens
gatataaaagaggga

SEQ ID NO: 1309477 - DNA, 15 bp, Homo sapiens
agatataaaagaggg

SEQ ID NO: 1309478 - DNA, 15 bp, Homo sapiens
aagatataaaagagg

SEQ ID NO: 1309479 - DNA, 15 bp, Homo sapiens
aaagatataaaagag

SEQ ID NO: 1309480 - DNA, 15 bp, Homo sapiens
aaaagatataaaaga

SEQ ID NO: 1309481 - DNA, 15 bp, Homo sapiens
caaaagatataaaag

SEQ ID NO: 1309482 - DNA, 15 bp, Homo sapiens
ccaaaagatataaaa

SEQ ID NO: 1309483 - DNA, 15 bp, Homo sapiens
tccaaaagatataaa

SEQ ID NO: 1309484 - DNA, 15 bp, Homo sapiens
ttccaaaagatataa

SEQ ID NO: 1309485 - DNA, 15 bp, Homo sapiens
attccaaaagatata

SEQ ID NO: 1309486 - DNA, 15 bp, Homo sapiens
aattccaaaagatat

SEQ ID NO: 1309487 - DNA, 15 bp, Homo sapiens
caattccaaaagata

SEQ ID NO: 1309488 - DNA, 15 bp, Homo sapiens
tcaattccaaaagat

SEQ ID NO: 1309489 - DNA, 15 bp, Homo sapiens
ttcaattccaaaaga

SEQ ID NO: 1309490 - DNA, 15 bp, Homo sapiens
gttcaattccaaaag

SEQ ID NO: 1309491 - DNA, 15 bp, Homo sapiens
tgttcaattccaaaa

SEQ ID NO: 1309492 - DNA, 15 bp, Homo sapiens
gtgttcaattccaaa

SEQ ID NO: 1309493 - DNA, 15 bp, Homo sapiens
tgtgttcaattccaa

SEQ ID NO: 1309494 - DNA, 15 bp, Homo sapiens
ctgtgttcaattcca

SEQ ID NO: 1309495 - DNA, 15 bp, Homo sapiens
actgtgttcaattcc

SEQ ID NO: 1309496 - DNA, 15 bp, Homo sapiens
tactgtgttcaattc

SEQ ID NO: 1309497 - DNA, 15 bp, Homo sapiens
atactgtgttcaatt

SEQ ID NO: 1309498 - DNA, 15 bp, Homo sapiens
aatactgtgttcaat

SEQ ID NO: 1309499 - DNA, 15 bp, Homo sapiens
taatactgtgttcaa

SEQ ID NO: 1309500 - DNA, 15 bp, Homo sapiens
ataatactgtgttca

SEQ ID NO: 1309501 - DNA, 15 bp, Homo sapiens
tataatactgtgttc

SEQ ID NO: 1309502 - DNA, 15 bp, Homo sapiens
gtataatactgtgtt

SEQ ID NO: 1309503 - DNA, 15 bp, Homo sapiens
ggtataatactgtgt

SEQ ID NO: 1309504 - DNA, 15 bp, Homo sapiens
aggtataatactgtg

SEQ ID NO: 1309505 - DNA, 15 bp, Homo sapiens
taggtataatactgt

SEQ ID NO: 1309506 - DNA, 15 bp, Homo sapiens
ataggtataatactg

SEQ ID NO: 1309507 - DNA, 15 bp, Homo sapiens
tataggtataatact

SEQ ID NO: 1309508 - DNA, 15 bp, Homo sapiens
ttataggtataatac

SEQ ID NO: 1309509 - DNA, 15 bp, Homo sapiens
gttataggtataata

SEQ ID NO: 1309510 - DNA, 15 bp, Homo sapiens
tgttataggtataat

SEQ ID NO: 1309511 - DNA, 15 bp, Homo sapiens
ctgttataggtataa

SEQ ID NO: 1309512 - DNA, 15 bp, Homo sapiens
cctgttataggtata

SEQ ID NO: 1309513 - DNA, 15 bp, Homo sapiens
acctgttataggtat

SEQ ID NO: 1309514 - DNA, 15 bp, Homo sapiens
cacctgttataggta

SEQ ID NO: 1309515 - DNA, 15 bp, Homo sapiens
gcacctgttataggt

SEQ ID NO: 1309516 - DNA, 15 bp, Homo sapiens
agcacctgttatagg

SEQ ID NO: 1309517 - DNA, 15 bp, Homo sapiens
cagcacctgttatag

SEQ ID NO: 1309518 - DNA, 15 bp, Homo sapiens
tcagcacctgttata

SEQ ID NO: 1309519 - DNA, 15 bp, Homo sapiens
ctcagcacctgttat

SEQ ID NO: 1309520 - DNA, 15 bp, Homo sapiens
actcagcacctgtta

SEQ ID NO: 1309521 - DNA, 15 bp, Homo sapiens
tactcagcacctgtt

SEQ ID NO: 1309522 - DNA, 15 bp, Homo sapiens
ttactcagcacctgt

SEQ ID NO: 1309523 - DNA, 15 bp, Homo sapiens
tttactcagcacctg

SEQ ID NO: 1309524 - DNA, 15 bp, Homo sapiens
atttactcagcacct

SEQ ID NO: 1309525 - DNA, 15 bp, Homo sapiens
catttactcagcacc

SEQ ID NO: 1309526 - DNA, 15 bp, Homo sapiens
acatttactcagcac

SEQ ID NO: 1309527 - DNA, 15 bp, Homo sapiens
aacatttactcagca

SEQ ID NO: 1309528 - DNA, 15 bp, Homo sapiens
aaacatttactcagc

SEQ ID NO: 1309529 - DNA, 15 bp, Homo sapiens
caaacatttactcag

SEQ ID NO: 1309530 - DNA, 15 bp, Homo sapiens
acaaacatttactca

SEQ ID NO: 1309531 - DNA, 15 bp, Homo sapiens
aacaaacatttactc

SEQ ID NO: 1309532 - DNA, 15 bp, Homo sapiens
taacaaacatttact

SEQ ID NO: 1309533 - DNA, 15 bp, Homo sapiens
ttaacaaacatttac

SEQ ID NO: 1309534 - DNA, 15 bp, Homo sapiens
tttaacaaacattta

SEQ ID NO: 1309535 - DNA, 15 bp, Homo sapiens
ctttaacaaacattt

SEQ ID NO: 1309536 - DNA, 15 bp, Homo sapiens
tctttaacaaacatt

SEQ ID NO: 1309537 - DNA, 15 bp, Homo sapiens
ttctttaacaaacat

SEQ ID NO: 1309538 - DNA, 15 bp, Homo sapiens
tttctttaacaaaca

SEQ ID NO: 1309539 - DNA, 15 bp, Homo sapiens
atttctttaacaaac

SEQ ID NO: 1309540 - DNA, 15 bp, Homo sapiens
gatttctttaacaaa

SEQ ID NO: 1309541 - DNA, 15 bp, Homo sapiens
tgatttctttaacaa

SEQ ID NO: 1309542 - DNA, 15 bp, Homo sapiens
ctgatttctttaaca

SEQ ID NO: 1309543 - DNA, 15 bp, Homo sapiens
actgatttctttaac

SEQ ID NO: 1309544 - DNA, 15 bp, Homo sapiens
gactgatttctttaa

SEQ ID NO: 1309545 - DNA, 15 bp, Homo sapiens
agactgatttcttta

SEQ ID NO: 1309546 - DNA, 15 bp, Homo sapiens
cagactgatttcttt

SEQ ID NO: 1309547 - DNA, 15 bp, Homo sapiens
acagactgatttctt

SEQ ID NO: 1309548 - DNA, 15 bp, Homo sapiens
tacagactgatttct

SEQ ID NO: 1309549 - DNA, 15 bp, Homo sapiens
ctacagactgatttc

SEQ ID NO: 1309550 - DNA, 15 bp, Homo sapiens
tctacagactgattt

SEQ ID NO: 1309551 - DNA, 15 bp, Homo sapiens
gtctacagactgatt

SEQ ID NO: 1309552 - DNA, 15 bp, Homo sapiens
tgtctacagactgat

SEQ ID NO: 1309553 - DNA, 15 bp, Homo sapiens
atgtctacagactga

SEQ ID NO: 1309554 - DNA, 15 bp, Homo sapiens
aatgtctacagactg

SEQ ID NO: 1309555 - DNA, 15 bp, Homo sapiens
aaatgtctacagact

SEQ ID NO: 1309556 - DNA, 15 bp, Homo sapiens
taaatgtctacagac

SEQ ID NO: 1309557 - DNA, 15 bp, Homo sapiens
ctaaatgtctacaga

SEQ ID NO: 1309558 - DNA, 15 bp, Homo sapiens
tctaaatgtctacag

SEQ ID NO: 1309559 - DNA, 15 bp, Homo sapiens
ctctaaatgtctaca

SEQ ID NO: 1309560 - DNA, 15 bp, Homo sapiens
cctctaaatgtctac

SEQ ID NO: 1309561 - DNA, 15 bp, Homo sapiens
gcctctaaatgtcta

SEQ ID NO: 1309562 - DNA, 15 bp, Homo sapiens
tgcctctaaatgtct

SEQ ID NO: 1309563 - DNA, 15 bp, Homo sapiens
gtgcctctaaatgtc

SEQ ID NO: 1309564 - DNA, 15 bp, Homo sapiens
tgtgcctctaaatgt

SEQ ID NO: 1309565 - DNA, 15 bp, Homo sapiens
atgtgcctctaaatg

SEQ ID NO: 1309566 - DNA, 15 bp, Homo sapiens
tatgtgcctctaaat

SEQ ID NO: 1309567 - DNA, 15 bp, Homo sapiens
atatgtgcctctaaa

SEQ ID NO: 1309568 - DNA, 15 bp, Homo sapiens
gatatgtgcctctaa

SEQ ID NO: 1309569 - DNA, 15 bp, Homo sapiens
tgatatgtgcctcta

SEQ ID NO: 1309570 - DNA, 15 bp, Homo sapiens
gtgatatgtgcctct

SEQ ID NO: 1309571 - DNA, 15 bp, Homo sapiens
ggtgatatgtgcctc

SEQ ID NO: 1309572 - DNA, 15 bp, Homo sapiens
tggtgatatgtgcct

SEQ ID NO: 1309573 - DNA, 15 bp, Homo sapiens
ctggtgatatgtgcc

SEQ ID NO: 1309574 - DNA, 15 bp, Homo sapiens
tctggtgatatgtgc

SEQ ID NO: 1309575 - DNA, 15 bp, Homo sapiens
ttctggtgatatgtg

SEQ ID NO: 1309576 - DNA, 15 bp, Homo sapiens
tttctggtgatatgt

SEQ ID NO: 1309577 - DNA, 15 bp, Homo sapiens
atttctggtgatatg

SEQ ID NO: 1309578 - DNA, 15 bp, Homo sapiens
tatttctggtgatat

SEQ ID NO: 1309579 - DNA, 15 bp, Homo sapiens
ctatttctggtgata

SEQ ID NO: 1309580 - DNA, 15 bp, Homo sapiens
tctatttctggtgat

SEQ ID NO: 1309581 - DNA, 15 bp, Homo sapiens
gtctatttctggtga

SEQ ID NO: 1309582 - DNA, 15 bp, Homo sapiens
ggtctatttctggtg

SEQ ID NO: 1309583 - DNA, 15 bp, Homo sapiens
tggtctatttctggt

SEQ ID NO: 1309584 - DNA, 15 bp, Homo sapiens
gtggtctatttctgg

SEQ ID NO: 1309585 - DNA, 15 bp, Homo sapiens
agtggtctatttctg

SEQ ID NO: 1309586 - DNA, 15 bp, Homo sapiens
tagtggtctatttct

SEQ ID NO: 1309587 - DNA, 15 bp, Homo sapiens
ctagtggtctatttc

SEQ ID NO: 1309588 - DNA, 15 bp, Homo sapiens
gctagtggtctattt

SEQ ID NO: 1309589 - DNA, 15 bp, Homo sapiens
ggctagtggtctatt

SEQ ID NO: 1309590 - DNA, 15 bp, Homo sapiens
aggctagtggtctat

SEQ ID NO: 1309591 - DNA, 15 bp, Homo sapiens
caggctagtggtcta

SEQ ID NO: 1309592 - DNA, 15 bp, Homo sapiens
tcaggctagtggtct

SEQ ID NO: 1309593 - DNA, 15 bp, Homo sapiens
atcaggctagtggtc

SEQ ID NO: 1309594 - DNA, 15 bp, Homo sapiens
catcaggctagtggt

SEQ ID NO: 1309595 - DNA, 15 bp, Homo sapiens
acatcaggctagtgg

SEQ ID NO: 1309596 - DNA, 15 bp, Homo sapiens
gacatcaggctagtg

SEQ ID NO: 1309597 - DNA, 15 bp, Homo sapiens
agacatcaggctagt

SEQ ID NO: 1309598 - DNA, 15 bp, Homo sapiens
cagacatcaggctag

SEQ ID NO: 1309599 - DNA, 15 bp, Homo sapiens
ccagacatcaggcta

SEQ ID NO: 1309600 - DNA, 15 bp, Homo sapiens
gccagacatcaggct

SEQ ID NO: 1309601 - DNA, 15 bp, Homo sapiens
agccagacatcaggc

SEQ ID NO: 1309602 - DNA, 15 bp, Homo sapiens
tagccagacatcagg

SEQ ID NO: 1309603 - DNA, 15 bp, Homo sapiens
gtagccagacatcag

SEQ ID NO: 1309604 - DNA, 15 bp, Homo sapiens
tgtagccagacatca

SEQ ID NO: 1309605 - DNA, 15 bp, Homo sapiens
ctgtagccagacatc

SEQ ID NO: 1309606 - DNA, 15 bp, Homo sapiens
actgtagccagacat

SEQ ID NO: 1309607 - DNA, 15 bp, Homo sapiens
tactgtagccagaca

SEQ ID NO: 1309608 - DNA, 15 bp, Homo sapiens
ttactgtagccagac

SEQ ID NO: 1309609 - DNA, 15 bp, Homo sapiens
tttactgtagccaga

SEQ ID NO: 1309610 - DNA, 15 bp, Homo sapiens
ttttactgtagccag

SEQ ID NO: 1309611 - DNA, 15 bp, Homo sapiens
gttttactgtagcca

SEQ ID NO: 1309612 - DNA, 15 bp, Homo sapiens
ggttttactgtagcc

SEQ ID NO: 1309613 - DNA, 15 bp, Homo sapiens
tggttttactgtagc

SEQ ID NO: 1309614 - DNA, 15 bp, Homo sapiens
ttggttttactgtag

SEQ ID NO: 1309615 - DNA, 15 bp, Homo sapiens
tttggttttactgta

SEQ ID NO: 1309616 - DNA, 15 bp, Homo sapiens
gtttggttttactgt

SEQ ID NO: 1309617 - DNA, 15 bp, Homo sapiens
tgtttggttttactg

SEQ ID NO: 1309618 - DNA, 15 bp, Homo sapiens
ctgtttggttttact

SEQ ID NO: 1309619 - DNA, 15 bp, Homo sapiens
cctgtttggttttac

SEQ ID NO: 1309620 - DNA, 15 bp, Homo sapiens
tcctgtttggtttta

SEQ ID NO: 1309621 - DNA, 15 bp, Homo sapiens
ctcctgtttggtttt

SEQ ID NO: 1309622 - DNA, 15 bp, Homo sapiens
tctcctgtttggttt

SEQ ID NO: 1309623 - DNA, 15 bp, Homo sapiens
ttctcctgtttggtt

SEQ ID NO: 1309624 - DNA, 15 bp, Homo sapiens
attctcctgtttggt

SEQ ID NO: 1309625 - DNA, 15 bp, Homo sapiens
tattctcctgtttgg

SEQ ID NO: 1309626 - DNA, 15 bp, Homo sapiens
ttattctcctgtttg

SEQ ID NO: 1309627 - DNA, 15 bp, Homo sapiens
gttattctcctgttt

SEQ ID NO: 1309628 - DNA, 15 bp, Homo sapiens
agttattctcctgtt

SEQ ID NO: 1309629 - DNA, 15 bp, Homo sapiens
cagttattctcctgt

SEQ ID NO: 1309630 - DNA, 15 bp, Homo sapiens
acagttattctcctg

SEQ ID NO: 1309631 - DNA, 15 bp, Homo sapiens
aacagttattctcct

SEQ ID NO: 1309632 - DNA, 15 bp, Homo sapiens
aaacagttattctcc

SEQ ID NO: 1309633 - DNA, 15 bp, Homo sapiens
aaaacagttattctc

SEQ ID NO: 1309634 - DNA, 15 bp, Homo sapiens
aaaaacagttattct

SEQ ID NO: 1309635 - DNA, 15 bp, Homo sapiens
aaaaaacagttattc

SEQ ID NO: 1309636 - DNA, 15 bp, Homo sapiens
taaaaaacagttatt

SEQ ID NO: 1309637 - DNA, 15 bp, Homo sapiens
ttaaaaaacagttat

SEQ ID NO: 1309638 - DNA, 15 bp, Homo sapiens
tttaaaaaacagtta

SEQ ID NO: 1309639 - DNA, 15 bp, Homo sapiens
ttttaaaaaacagtt

SEQ ID NO: 1309640 - DNA, 15 bp, Homo sapiens
attttaaaaaacagt

SEQ ID NO: 1309641 - DNA, 15 bp, Homo sapiens
aattttaaaaaacag

SEQ ID NO: 1309642 - DNA, 15 bp, Homo sapiens
taattttaaaaaaca

SEQ ID NO: 1309643 - DNA, 15 bp, Homo sapiens
ctaattttaaaaaac

SEQ ID NO: 1309644 - DNA, 15 bp, Homo sapiens
tctaattttaaaaaa

SEQ ID NO: 1309645 - DNA, 15 bp, Homo sapiens
ttctaattttaaaaa

SEQ ID NO: 1309646 - DNA, 15 bp, Homo sapiens
gttctaattttaaaa

SEQ ID NO: 1309647 - DNA, 15 bp, Homo sapiens
agttctaattttaaa

SEQ ID NO: 1309648 - DNA, 15 bp, Homo sapiens
aagttctaattttaa

SEQ ID NO: 1309649 - DNA, 15 bp, Homo sapiens
gaagttctaatttta

SEQ ID NO: 1309650 - DNA, 15 bp, Homo sapiens
tgaagttctaatttt

SEQ ID NO: 1309651 - DNA, 15 bp, Homo sapiens
atgaagttctaattt

SEQ ID NO: 1309652 - DNA, 15 bp, Homo sapiens
aatgaagttctaatt

SEQ ID NO: 1309653 - DNA, 15 bp, Homo sapiens
aaatgaagttctaat

SEQ ID NO: 1309654 - DNA, 15 bp, Homo sapiens
aaaatgaagttctaa

SEQ ID NO: 1309655 - DNA, 15 bp, Homo sapiens
caaaatgaagttcta

SEQ ID NO: 1309656 - DNA, 15 bp, Homo sapiens
tcaaaatgaagttct

SEQ ID NO: 1309657 - DNA, 15 bp, Homo sapiens
ttcaaaatgaagttc

SEQ ID NO: 1309658 - DNA, 15 bp, Homo sapiens
tttcaaaatgaagtt

SEQ ID NO: 1309659 - DNA, 15 bp, Homo sapiens
atttcaaaatgaagt

SEQ ID NO: 1309660 - DNA, 15 bp, Homo sapiens
tatttcaaaatgaag

SEQ ID NO: 1309661 - DNA, 15 bp, Homo sapiens
ctatttcaaaatgaa

SEQ ID NO: 1309662 - DNA, 15 bp, Homo sapiens
actatttcaaaatga

SEQ ID NO: 1309663 - DNA, 15 bp, Homo sapiens
aactatttcaaaatg

SEQ ID NO: 1309664 - DNA, 15 bp, Homo sapiens
aaactatttcaaaat

SEQ ID NO: 1309665 - DNA, 15 bp, Homo sapiens
taaactatttcaaaa

SEQ ID NO: 1309666 - DNA, 15 bp, Homo sapiens
ttaaactatttcaaa

SEQ ID NO: 1309667 - DNA, 15 bp, Homo sapiens
cttaaactatttcaa

SEQ ID NO: 1309668 - DNA, 15 bp, Homo sapiens
tcttaaactatttca

SEQ ID NO: 1309669 - DNA, 15 bp, Homo sapiens
atcttaaactatttc

SEQ ID NO: 1309670 - DNA, 15 bp, Homo sapiens
aatcttaaactattt

SEQ ID NO: 1309671 - DNA, 15 bp, Homo sapiens
gaatcttaaactatt

SEQ ID NO: 1309672 - DNA, 15 bp, Homo sapiens
tgaatcttaaactat

SEQ ID NO: 1309673 - DNA, 15 bp, Homo sapiens
gtgaatcttaaacta

SEQ ID NO: 1309674 - DNA, 15 bp, Homo sapiens
tgtgaatcttaaact

SEQ ID NO: 1309675 - DNA, 15 bp, Homo sapiens
ttgtgaatcttaaac

SEQ ID NO: 1309676 - DNA, 15 bp, Homo sapiens
cttgtgaatcttaaa

SEQ ID NO: 1309677 - DNA, 15 bp, Homo sapiens
tcttgtgaatcttaa

SEQ ID NO: 1309678 - DNA, 15 bp, Homo sapiens
ttcttgtgaatctta

SEQ ID NO: 1309679 - DNA, 15 bp, Homo sapiens
cttcttgtgaatctt

SEQ ID NO: 1309680 - DNA, 15 bp, Homo sapiens
acttcttgtgaatct

SEQ ID NO: 1309681 - DNA, 15 bp, Homo sapiens
aacttcttgtgaatc

SEQ ID NO: 1309682 - DNA, 15 bp, Homo sapiens
caacttcttgtgaat

SEQ ID NO: 1309683 - DNA, 15 bp, Homo sapiens
gcaacttcttgtgaa

SEQ ID NO: 1309684 - DNA, 15 bp, Homo sapiens
tgcaacttcttgtga

SEQ ID NO: 1309685 - DNA, 15 bp, Homo sapiens
ttgcaacttcttgtg

SEQ ID NO: 1309686 - DNA, 15 bp, Homo sapiens
tttgcaacttcttgt

SEQ ID NO: 1309687 - DNA, 15 bp, Homo sapiens
ttttgcaacttcttg

SEQ ID NO: 1309688 - DNA, 15 bp, Homo sapiens
tttttgcaacttctt

SEQ ID NO: 1309689 - DNA, 15 bp, Homo sapiens
gtttttgcaacttct

SEQ ID NO: 1309690 - DNA, 15 bp, Homo sapiens
tgtttttgcaacttc

SEQ ID NO: 1309691 - DNA, 15 bp, Homo sapiens
ctgtttttgcaactt

SEQ ID NO: 1309692 - DNA, 15 bp, Homo sapiens
cctgtttttgcaact

SEQ ID NO: 1309693 - DNA, 15 bp, Homo sapiens
tcctgtttttgcaac

SEQ ID NO: 1309694 - DNA, 15 bp, Homo sapiens
gtcctgtttttgcaa

SEQ ID NO: 1309695 - DNA, 15 bp, Homo sapiens
tgtcctgtttttgca

SEQ ID NO: 1309696 - DNA, 15 bp, Homo sapiens
ctgtcctgtttttgc

SEQ ID NO: 1309697 - DNA, 15 bp, Homo sapiens
tctgtcctgtttttg

SEQ ID NO: 1309698 - DNA, 15 bp, Homo sapiens
ctctgtcctgttttt

SEQ ID NO: 1309699 - DNA, 15 bp, Homo sapiens
actctgtcctgtttt

SEQ ID NO: 1309700 - DNA, 15 bp, Homo sapiens
aactctgtcctgttt

SEQ ID NO: 1309701 - DNA, 15 bp, Homo sapiens
aaactctgtcctgtt

SEQ ID NO: 1309702 - DNA, 15 bp, Homo sapiens
gaaactctgtcctgt

SEQ ID NO: 1309703 - DNA, 15 bp, Homo sapiens
agaaactctgtcctg

SEQ ID NO: 1309704 - DNA, 15 bp, Homo sapiens
cagaaactctgtcct

SEQ ID NO: 1309705 - DNA, 15 bp, Homo sapiens
acagaaactctgtcc

SEQ ID NO: 1309706 - DNA, 15 bp, Homo sapiens
tacagaaactctgtc

SEQ ID NO: 1309707 - DNA, 15 bp, Homo sapiens
atacagaaactctgt

SEQ ID NO: 1309708 - DNA, 15 bp, Homo sapiens
gatacagaaactctg

SEQ ID NO: 1309709 - DNA, 15 bp, Homo sapiens
ggatacagaaactct

SEQ ID NO: 1309710 - DNA, 15 bp, Homo sapiens
aggatacagaaactc

SEQ ID NO: 1309711 - DNA, 15 bp, Homo sapiens
aaggatacagaaact

SEQ ID NO: 1309712 - DNA, 15 bp, Homo sapiens
aaaggatacagaaac

SEQ ID NO: 1309713 - DNA, 15 bp, Homo sapiens
gaaaggatacagaaa

SEQ ID NO: 1309714 - DNA, 15 bp, Homo sapiens
ggaaaggatacagaa

SEQ ID NO: 1309715 - DNA, 15 bp, Homo sapiens
tggaaaggatacaga

SEQ ID NO: 1309716 - DNA, 15 bp, Homo sapiens
ttggaaaggatacag

SEQ ID NO: 1309717 - DNA, 15 bp, Homo sapiens
cttggaaaggataca

SEQ ID NO: 1309718 - DNA, 15 bp, Homo sapiens
gcttggaaaggatac

SEQ ID NO: 1309719 - DNA, 15 bp, Homo sapiens
agcttggaaaggata

SEQ ID NO: 1309720 - DNA, 15 bp, Homo sapiens
aagcttggaaaggat

SEQ ID NO: 1309721 - DNA, 15 bp, Homo sapiens
aaagcttggaaagga

SEQ ID NO: 1309722 - DNA, 15 bp, Homo sapiens
gaaagcttggaaagg

SEQ ID NO: 1309723 - DNA, 15 bp, Homo sapiens
ggaaagcttggaaag

SEQ ID NO: 1309724 - DNA, 15 bp, Homo sapiens
gggaaagcttggaaa

SEQ ID NO: 1309725 - DNA, 15 bp, Homo sapiens
ggggaaagcttggaa

SEQ ID NO: 1309726 - DNA, 15 bp, Homo sapiens
tggggaaagcttgga

SEQ ID NO: 1309727 - DNA, 15 bp, Homo sapiens
atggggaaagcttgg

SEQ ID NO: 1309728 - DNA, 15 bp, Homo sapiens
catggggaaagcttg

SEQ ID NO: 1309729 - DNA, 15 bp, Homo sapiens
tcatggggaaagctt

SEQ ID NO: 1309730 - DNA, 15 bp, Homo sapiens
atcatggggaaagct

SEQ ID NO: 1309731 - DNA, 15 bp, Homo sapiens
tatcatggggaaagc

SEQ ID NO: 1309732 - DNA, 15 bp, Homo sapiens
ctatcatggggaaag

SEQ ID NO: 1309733 - DNA, 15 bp, Homo sapiens
actatcatggggaaa

SEQ ID NO: 1309734 - DNA, 15 bp, Homo sapiens
cactatcatggggaa

SEQ ID NO: 1309735 - DNA, 15 bp, Homo sapiens
gcactatcatgggga

SEQ ID NO: 1309736 - DNA, 15 bp, Homo sapiens
agcactatcatgggg

SEQ ID NO: 1309737 - DNA, 15 bp, Homo sapiens
tagcactatcatggg

SEQ ID NO: 1309738 - DNA, 15 bp, Homo sapiens
atagcactatcatgg

SEQ ID NO: 1309739 - DNA, 15 bp, Homo sapiens
tatagcactatcatg

SEQ ID NO: 1309740 - DNA, 15 bp, Homo sapiens
atatagcactatcat

SEQ ID NO: 1309741 - DNA, 15 bp, Homo sapiens
catatagcactatca

SEQ ID NO: 1309742 - DNA, 15 bp, Homo sapiens
gcatatagcactatc

SEQ ID NO: 1309743 - DNA, 15 bp, Homo sapiens
agcatatagcactat

SEQ ID NO: 1309744 - DNA, 15 bp, Homo sapiens
tagcatatagcacta

SEQ ID NO: 1309745 - DNA, 15 bp, Homo sapiens
gtagcatatagcact

SEQ ID NO: 1309746 - DNA, 15 bp, Homo sapiens
tgtagcatatagcac

SEQ ID NO: 1309747 - DNA, 15 bp, Homo sapiens
atgtagcatatagca

SEQ ID NO: 1309748 - DNA, 15 bp, Homo sapiens
tatgtagcatatagc

SEQ ID NO: 1309749 - DNA, 15 bp, Homo sapiens
ctatgtagcatatag

SEQ ID NO: 1309750 - DNA, 15 bp, Homo sapiens
cctatgtagcatata

SEQ ID NO: 1309751 - DNA, 15 bp, Homo sapiens
gcctatgtagcatat

SEQ ID NO: 1309752 - DNA, 15 bp, Homo sapiens
tgcctatgtagcata

SEQ ID NO: 1309753 - DNA, 15 bp, Homo sapiens
atgcctatgtagcat

SEQ ID NO: 1309754 - DNA, 15 bp, Homo sapiens
catgcctatgtagca

SEQ ID NO: 1309755 - DNA, 15 bp, Homo sapiens
gcatgcctatgtagc

SEQ ID NO: 1309756 - DNA, 15 bp, Homo sapiens
tgcatgcctatgtag

SEQ ID NO: 1309757 - DNA, 15 bp, Homo sapiens
atgcatgcctatgta

SEQ ID NO: 1309758 - DNA, 15 bp, Homo sapiens
catgcatgcctatgt

SEQ ID NO: 1309759 - DNA, 15 bp, Homo sapiens
ccatgcatgcctatg

SEQ ID NO: 1309760 - DNA, 15 bp, Homo sapiens
accatgcatgcctat

SEQ ID NO: 1309761 - DNA, 15 bp, Homo sapiens
taccatgcatgccta

SEQ ID NO: 1309762 - DNA, 15 bp, Homo sapiens
ataccatgcatgcct

SEQ ID NO: 1309763 - DNA, 15 bp, Homo sapiens
cataccatgcatgcc

SEQ ID NO: 1309764 - DNA, 15 bp, Homo sapiens
acataccatgcatgc

SEQ ID NO: 1309765 - DNA, 15 bp, Homo sapiens
aacataccatgcatg

SEQ ID NO: 1309766 - DNA, 15 bp, Homo sapiens
taacataccatgcat

SEQ ID NO: 1309767 - DNA, 15 bp, Homo sapiens
ataacataccatgca

SEQ ID NO: 1309768 - DNA, 15 bp, Homo sapiens
gataacataccatgc

SEQ ID NO: 1309769 - DNA, 15 bp, Homo sapiens
tgataacataccatg

SEQ ID NO: 1309770 - DNA, 15 bp, Homo sapiens
ttgataacataccat

SEQ ID NO: 1309771 - DNA, 15 bp, Homo sapiens
tttgataacatacca

SEQ ID NO: 1309772 - DNA, 15 bp, Homo sapiens
ttttgataacatacc

SEQ ID NO: 1309773 - DNA, 15 bp, Homo sapiens
gttttgataacatac

SEQ ID NO: 1309774 - DNA, 15 bp, Homo sapiens
ggttttgataacata

SEQ ID NO: 1309775 - DNA, 15 bp, Homo sapiens
tggttttgataacat

SEQ ID NO: 1309776 - DNA, 15 bp, Homo sapiens
ctggttttgataaca

SEQ ID NO: 1309777 - DNA, 15 bp, Homo sapiens
cctggttttgataac

SEQ ID NO: 1309778 - DNA, 15 bp, Homo sapiens
tcctggttttgataa

SEQ ID NO: 1309779 - DNA, 15 bp, Homo sapiens
ttcctggttttgata

SEQ ID NO: 1309780 - DNA, 15 bp, Homo sapiens
tttcctggttttgat

SEQ ID NO: 1309781 - DNA, 15 bp, Homo sapiens
atttcctggttttga

SEQ ID NO: 1309782 - DNA, 15 bp, Homo sapiens
aatttcctggttttg

SEQ ID NO: 1309783 - DNA, 15 bp, Homo sapiens
caatttcctggtttt

SEQ ID NO: 1309784 - DNA, 15 bp, Homo sapiens
tcaatttcctggttt

SEQ ID NO: 1309785 - DNA, 15 bp, Homo sapiens
atcaatttcctggtt

SEQ ID NO: 1309786 - DNA, 15 bp, Homo sapiens
tatcaatttcctggt

SEQ ID NO: 1309787 - DNA, 15 bp, Homo sapiens
atatcaatttcctgg

SEQ ID NO: 1309788 - DNA, 15 bp, Homo sapiens
aatatcaatttcctg

SEQ ID NO: 1309789 - DNA, 15 bp, Homo sapiens
caatatcaatttcct

SEQ ID NO: 1309790 - DNA, 15 bp, Homo sapiens
ccaatatcaatttcc

SEQ ID NO: 1309791 - DNA, 15 bp, Homo sapiens
gccaatatcaatttc

SEQ ID NO: 1309792 - DNA, 15 bp, Homo sapiens
cgccaatatcaattt

SEQ ID NO: 1309793 - DNA, 15 bp, Homo sapiens
acgccaatatcaatt

SEQ ID NO: 1309794 - DNA, 15 bp, Homo sapiens
tacgccaatatcaat

SEQ ID NO: 1309795 - DNA, 15 bp, Homo sapiens
gtacgccaatatcaa

SEQ ID NO: 1309796 - DNA, 15 bp, Homo sapiens
agtacgccaatatca

SEQ ID NO: 1309797 - DNA, 15 bp, Homo sapiens
cagtacgccaatatc

SEQ ID NO: 1309798 - DNA, 15 bp, Homo sapiens
gcagtacgccaatat

SEQ ID NO: 1309799 - DNA, 15 bp, Homo sapiens
agcagtacgccaata

SEQ ID NO: 1309800 - DNA, 15 bp, Homo sapiens
cagcagtacgccaat

SEQ ID NO: 1309801 - DNA, 15 bp, Homo sapiens
acagcagtacgccaa

SEQ ID NO: 1309802 - DNA, 15 bp, Homo sapiens
tacagcagtacgcca

SEQ ID NO: 1309803 - DNA, 15 bp, Homo sapiens
ttacagcagtacgcc

SEQ ID NO: 1309804 - DNA, 15 bp, Homo sapiens
tttacagcagtacgc

SEQ ID NO: 1309805 - DNA, 15 bp, Homo sapiens
gtttacagcagtacg

SEQ ID NO: 1309806 - DNA, 15 bp, Homo sapiens
agtttacagcagtac

SEQ ID NO: 1309807 - DNA, 15 bp, Homo sapiens
gagtttacagcagta

SEQ ID NO: 1309808 - DNA, 15 bp, Homo sapiens
tgagtttacagcagt

SEQ ID NO: 1309809 - DNA, 15 bp, Homo sapiens
ttgagtttacagcag

SEQ ID NO: 1309810 - DNA, 15 bp, Homo sapiens
cttgagtttacagca

SEQ ID NO: 1309811 - DNA, 15 bp, Homo sapiens
acttgagtttacagc

SEQ ID NO: 1309812 - DNA, 15 bp, Homo sapiens
tacttgagtttacag

SEQ ID NO: 1309813 - DNA, 15 bp, Homo sapiens
gtacttgagtttaca

SEQ ID NO: 1309814 - DNA, 15 bp, Homo sapiens
tgtacttgagtttac

SEQ ID NO: 1309815 - DNA, 15 bp, Homo sapiens
ctgtacttgagttta

SEQ ID NO: 1309816 - DNA, 15 bp, Homo sapiens
tctgtacttgagttt

SEQ ID NO: 1309817 - DNA, 15 bp, Homo sapiens
atctgtacttgagtt

SEQ ID NO: 1309818 - DNA, 15 bp, Homo sapiens
catctgtacttgagt

SEQ ID NO: 1309819 - DNA, 15 bp, Homo sapiens
acatctgtacttgag

SEQ ID NO: 1309820 - DNA, 15 bp, Homo sapiens
aacatctgtacttga

SEQ ID NO: 1309821 - DNA, 15 bp, Homo sapiens
aaacatctgtacttg

SEQ ID NO: 1309822 - DNA, 15 bp, Homo sapiens
aaaacatctgtactt

SEQ ID NO: 1309823 - DNA, 15 bp, Homo sapiens
caaaacatctgtact

SEQ ID NO: 1309824 - DNA, 15 bp, Homo sapiens
gcaaaacatctgtac

SEQ ID NO: 1309825 - DNA, 15 bp, Homo sapiens
ggcaaaacatctgta

SEQ ID NO: 1309826 - DNA, 15 bp, Homo sapiens
tggcaaaacatctgt

SEQ ID NO: 1309827 - DNA, 15 bp, Homo sapiens
ctggcaaaacatctg

SEQ ID NO: 1309828 - DNA, 15 bp, Homo sapiens
actggcaaaacatct

SEQ ID NO: 1309829 - DNA, 15 bp, Homo sapiens
aactggcaaaacatc

SEQ ID NO: 1309830 - DNA, 15 bp, Homo sapiens
aaactggcaaaacat

SEQ ID NO: 1309831 - DNA, 15 bp, Homo sapiens
aaaactggcaaaaca

SEQ ID NO: 1309832 - DNA, 15 bp, Homo sapiens
aaaaactggcaaaac

SEQ ID NO: 1309833 - DNA, 15 bp, Homo sapiens
taaaaactggcaaaa

SEQ ID NO: 1309834 - DNA, 15 bp, Homo sapiens
gtaaaaactggcaaa

SEQ ID NO: 1309835 - DNA, 15 bp, Homo sapiens
tgtaaaaactggcaa

SEQ ID NO: 1309836 - DNA, 15 bp, Homo sapiens
ttgtaaaaactggca

SEQ ID NO: 1309837 - DNA, 15 bp, Homo sapiens
cttgtaaaaactggc

SEQ ID NO: 1309838 - DNA, 15 bp, Homo sapiens
gcttgtaaaaactgg

SEQ ID NO: 1309839 - DNA, 15 bp, Homo sapiens
tgcttgtaaaaactg

SEQ ID NO: 1309840 - DNA, 15 bp, Homo sapiens
gtgcttgtaaaaact

SEQ ID NO: 1309841 - DNA, 15 bp, Homo sapiens
agtgcttgtaaaaac

SEQ ID NO: 1309842 - DNA, 15 bp, Homo sapiens
aagtgcttgtaaaaa

SEQ ID NO: 1309843 - DNA, 15 bp, Homo sapiens
aaagtgcttgtaaaa

SEQ ID NO: 1309844 - DNA, 15 bp, Homo sapiens
aaaagtgcttgtaaa

SEQ ID NO: 1309845 - DNA, 15 bp, Homo sapiens
aaaaagtgcttgtaa

SEQ ID NO: 1309846 - DNA, 15 bp, Homo sapiens
aaaaaagtgcttgta

SEQ ID NO: 1309847 - DNA, 15 bp, Homo sapiens
aaaaaaagtgcttgt

SEQ ID NO: 1309848 - DNA, 15 bp, Homo sapiens
aaaaaaaagtgcttg

SEQ ID NO: 1309849 - DNA, 15 bp, Homo sapiens
aaaaaaaaagtgctt

SEQ ID NO: 1309850 - DNA, 15 bp, Homo sapiens
aaaaaaaaaagtgct

SEQ ID NO: 1309851 - DNA, 15 bp, Homo sapiens
cagcaaaaaaaaaaa

SEQ ID NO: 1309852 - DNA, 15 bp, Homo sapiens
acagcaaaaaaaaaa

SEQ ID NO: 1309853 - DNA, 15 bp, Homo sapiens
cacagcaaaaaaaaa

SEQ ID NO: 1309854 - DNA, 15 bp, Homo sapiens
acacagcaaaaaaaa

SEQ ID NO: 1309855 - DNA, 15 bp, Homo sapiens
tacacagcaaaaaaa

SEQ ID NO: 1309856 - DNA, 15 bp, Homo sapiens
atctacacagcaaaa

SEQ ID NO: 1309857 - DNA, 15 bp, Homo sapiens
gatctacacagcaaa

SEQ ID NO: 1309858 - DNA, 15 bp, Homo sapiens
ggatctacacagcaa

SEQ ID NO: 1309859 - DNA, 15 bp, Homo sapiens
tggatctacacagca

SEQ ID NO: 1309860 - DNA, 15 bp, Homo sapiens
ttggatctacacagc

SEQ ID NO: 1309861 - DNA, 15 bp, Homo sapiens
cttggatctacacag

SEQ ID NO: 1309862 - DNA, 15 bp, Homo sapiens
tcttggatctacaca

SEQ ID NO: 1309863 - DNA, 15 bp, Homo sapiens
gtcttggatctacac

SEQ ID NO: 1309864 - DNA, 15 bp, Homo sapiens
tgtcttggatctaca

SEQ ID NO: 1309865 - DNA, 15 bp, Homo sapiens
atgtcttggatctac

SEQ ID NO: 1309866 - DNA, 15 bp, Homo sapiens
aatgtcttggatcta

SEQ ID NO: 1309867 - DNA, 15 bp, Homo sapiens
aaatgtcttggatct

SEQ ID NO: 1309868 - DNA, 15 bp, Homo sapiens
aaaatgtcttggatc

SEQ ID NO: 1309869 - DNA, 15 bp, Homo sapiens
taaaatgtcttggat

SEQ ID NO: 1309870 - DNA, 15 bp, Homo sapiens
ataaaatgtcttgga

SEQ ID NO: 1309871 - DNA, 15 bp, Homo sapiens
gataaaatgtcttgg

SEQ ID NO: 1309872 - DNA, 15 bp, Homo sapiens
ggataaaatgtcttg

SEQ ID NO: 1309873 - DNA, 15 bp, Homo sapiens
gggataaaatgtctt

SEQ ID NO: 1309874 - DNA, 15 bp, Homo sapiens
tgggataaaatgtct

SEQ ID NO: 1309875 - DNA, 15 bp, Homo sapiens
gtgggataaaatgtc

SEQ ID NO: 1309876 - DNA, 15 bp, Homo sapiens
tgtgggataaaatgt

SEQ ID NO: 1309877 - DNA, 15 bp, Homo sapiens
atgtgggataaaatg

SEQ ID NO: 1309878 - DNA, 15 bp, Homo sapiens
tatgtgggataaaat

SEQ ID NO: 1309879 - DNA, 15 bp, Homo sapiens
ttatgtgggataaaa

SEQ ID NO: 1309880 - DNA, 15 bp, Homo sapiens
tttatgtgggataaa

SEQ ID NO: 1309881 - DNA, 15 bp, Homo sapiens
atttatgtgggataa

SEQ ID NO: 1309882 - DNA, 15 bp, Homo sapiens
aatttatgtgggata

SEQ ID NO: 1309883 - DNA, 15 bp, Homo sapiens
aaatttatgtgggat

SEQ ID NO: 1309884 - DNA, 15 bp, Homo sapiens
caaatttatgtggga

SEQ ID NO: 1309885 - DNA, 15 bp, Homo sapiens
acaaatttatgtggg

SEQ ID NO: 1309886 - DNA, 15 bp, Homo sapiens
aacaaatttatgtgg

SEQ ID NO: 1309887 - DNA, 15 bp, Homo sapiens
aaacaaatttatgtg

SEQ ID NO: 1309888 - DNA, 15 bp, Homo sapiens
aaaacaaatttatgt

SEQ ID NO: 1309889 - DNA, 15 bp, Homo sapiens
taaaacaaatttatg

SEQ ID NO: 1309890 - DNA, 15 bp, Homo sapiens
ataaaacaaatttat

SEQ ID NO: 1309891 - DNA, 15 bp, Homo sapiens
aataaaacaaattta

SEQ ID NO: 1309892 - DNA, 15 bp, Homo sapiens
taataaaacaaattt

SEQ ID NO: 1309893 - DNA, 15 bp, Homo sapiens
gtaataaaacaaatt

SEQ ID NO: 1309894 - DNA, 15 bp, Homo sapiens
ggtaataaaacaaat

SEQ ID NO: 1309895 - DNA, 15 bp, Homo sapiens
aggtaataaaacaaa

SEQ ID NO: 1309896 - DNA, 15 bp, Homo sapiens
gaggtaataaaacaa

SEQ ID NO: 1309897 - DNA, 15 bp, Homo sapiens
agaggtaataaaaca

SEQ ID NO: 1309898 - DNA, 15 bp, Homo sapiens
gagaggtaataaaac

SEQ ID NO: 1309899 - DNA, 15 bp, Homo sapiens
ggagaggtaataaaa

SEQ ID NO: 1309900 - DNA, 15 bp, Homo sapiens
tggagaggtaataaa

SEQ ID NO: 1309901 - DNA, 15 bp, Homo sapiens
ctggagaggtaataa

SEQ ID NO: 1309902 - DNA, 15 bp, Homo sapiens
actggagaggtaata

SEQ ID NO: 1309903 - DNA, 15 bp, Homo sapiens
gactggagaggtaat

SEQ ID NO: 1309904 - DNA, 15 bp, Homo sapiens
tgactggagaggtaa

SEQ ID NO: 1309905 - DNA, 15 bp, Homo sapiens
ctgactggagaggta

SEQ ID NO: 1309906 - DNA, 15 bp, Homo sapiens
actgactggagaggt

SEQ ID NO: 1309907 - DNA, 15 bp, Homo sapiens
tactgactggagagg

SEQ ID NO: 1309908 - DNA, 15 bp, Homo sapiens
atactgactggagag

SEQ ID NO: 1309909 - DNA, 15 bp, Homo sapiens
tatactgactggaga

SEQ ID NO: 1309910 - DNA, 15 bp, Homo sapiens
gtatactgactggag

SEQ ID NO: 1309911 - DNA, 15 bp, Homo sapiens
tgtatactgactgga

SEQ ID NO: 1309912 - DNA, 15 bp, Homo sapiens
ctgtatactgactgg

SEQ ID NO: 1309913 - DNA, 15 bp, Homo sapiens
tctgtatactgactg

SEQ ID NO: 1309914 - DNA, 15 bp, Homo sapiens
ttctgtatactgact

SEQ ID NO: 1309915 - DNA, 15 bp, Homo sapiens
gttctgtatactgac

SEQ ID NO: 1309916 - DNA, 15 bp, Homo sapiens
agttctgtatactga

SEQ ID NO: 1309917 - DNA, 15 bp, Homo sapiens
gagttctgtatactg

SEQ ID NO: 1309918 - DNA, 15 bp, Homo sapiens
agagttctgtatact

SEQ ID NO: 1309919 - DNA, 15 bp, Homo sapiens
aagagttctgtatac

SEQ ID NO: 1309920 - DNA, 15 bp, Homo sapiens
gaagagttctgtata

SEQ ID NO: 1309921 - DNA, 15 bp, Homo sapiens
ggaagagttctgtat

SEQ ID NO: 1309922 - DNA, 15 bp, Homo sapiens
tggaagagttctgta

SEQ ID NO: 1309923 - DNA, 15 bp, Homo sapiens
atggaagagttctgt

SEQ ID NO: 1309924 - DNA, 15 bp, Homo sapiens
gatggaagagttctg

SEQ ID NO: 1309925 - DNA, 15 bp, Homo sapiens
tgatggaagagttct

SEQ ID NO: 1309926 - DNA, 15 bp, Homo sapiens
ctgatggaagagttc

SEQ ID NO: 1309927 - DNA, 15 bp, Homo sapiens
gctgatggaagagtt

SEQ ID NO: 1309928 - DNA, 15 bp, Homo sapiens
tgctgatggaagagt

SEQ ID NO: 1309929 - DNA, 15 bp, Homo sapiens
gtgctgatggaagag

SEQ ID NO: 1309930 - DNA, 15 bp, Homo sapiens
tgtgctgatggaaga

SEQ ID NO: 1309931 - DNA, 15 bp, Homo sapiens
ttgtgctgatggaag

SEQ ID NO: 1309932 - DNA, 15 bp, Homo sapiens
attgtgctgatggaa

SEQ ID NO: 1309933 - DNA, 15 bp, Homo sapiens
cattgtgctgatgga

SEQ ID NO: 1309934 - DNA, 15 bp, Homo sapiens
tcattgtgctgatgg

SEQ ID NO: 1309935 - DNA, 15 bp, Homo sapiens
ttcattgtgctgatg

SEQ ID NO: 1309936 - DNA, 15 bp, Homo sapiens
tttcattgtgctgat

SEQ ID NO: 1309937 - DNA, 15 bp, Homo sapiens
atttcattgtgctga

SEQ ID NO: 1309938 - DNA, 15 bp, Homo sapiens
aatttcattgtgctg

SEQ ID NO: 1309939 - DNA, 15 bp, Homo sapiens
gaatttcattgtgct

SEQ ID NO: 1309940 - DNA, 15 bp, Homo sapiens
agaatttcattgtgc

SEQ ID NO: 1309941 - DNA, 15 bp, Homo sapiens
gagaatttcattgtg

SEQ ID NO: 1309942 - DNA, 15 bp, Homo sapiens
agagaatttcattgt

SEQ ID NO: 1309943 - DNA, 15 bp, Homo sapiens
aagagaatttcattg

SEQ ID NO: 1309944 - DNA, 15 bp, Homo sapiens
caagagaatttcatt

SEQ ID NO: 1309945 - DNA, 15 bp, Homo sapiens
acaagagaatttcat

SEQ ID NO: 1309946 - DNA, 15 bp, Homo sapiens
cacaagagaatttca

SEQ ID NO: 1309947 - DNA, 15 bp, Homo sapiens
tcacaagagaatttc

SEQ ID NO: 1309948 - DNA, 15 bp, Homo sapiens
ctcacaagagaattt

SEQ ID NO: 1309949 - DNA, 15 bp, Homo sapiens
tctcacaagagaatt

SEQ ID NO: 1309950 - DNA, 15 bp, Homo sapiens
ttctcacaagagaat

SEQ ID NO: 1309951 - DNA, 15 bp, Homo sapiens
tttctcacaagagaa

SEQ ID NO: 1309952 - DNA, 15 bp, Homo sapiens
gtttctcacaagaga

SEQ ID NO: 1309953 - DNA, 15 bp, Homo sapiens
ggtttctcacaagag

SEQ ID NO: 1309954 - DNA, 15 bp, Homo sapiens
tggtttctcacaaga

SEQ ID NO: 1309955 - DNA, 15 bp, Homo sapiens
ttggtttctcacaag

SEQ ID NO: 1309956 - DNA, 15 bp, Homo sapiens
tttggtttctcacaa

SEQ ID NO: 1309957 - DNA, 15 bp, Homo sapiens
atttggtttctcaca

SEQ ID NO: 1309958 - DNA, 15 bp, Homo sapiens
aatttggtttctcac

SEQ ID NO: 1309959 - DNA, 15 bp, Homo sapiens
aaatttggtttctca

SEQ ID NO: 1309960 - DNA, 15 bp, Homo sapiens
aaaatttggtttctc

SEQ ID NO: 1309961 - DNA, 15 bp, Homo sapiens
taaaatttggtttct

SEQ ID NO: 1309962 - DNA, 15 bp, Homo sapiens
ttaaaatttggtttc

SEQ ID NO: 1309963 - DNA, 15 bp, Homo sapiens
tttaaaatttggttt

SEQ ID NO: 1309964 - DNA, 15 bp, Homo sapiens
ttttaaaatttggtt

SEQ ID NO: 1309965 - DNA, 15 bp, Homo sapiens
tttttaaaatttggt

SEQ ID NO: 1309966 - DNA, 15 bp, Homo sapiens
ctttttaaaatttgg

SEQ ID NO: 1309967 - DNA, 15 bp, Homo sapiens
tctttttaaaatttg

SEQ ID NO: 1309968 - DNA, 15 bp, Homo sapiens
ttctttttaaaattt

SEQ ID NO: 1309969 - DNA, 15 bp, Homo sapiens
tttctttttaaaatt

SEQ ID NO: 1309970 - DNA, 15 bp, Homo sapiens
ttttctttttaaaat

SEQ ID NO: 1309971 - DNA, 15 bp, Homo sapiens
tttttctttttaaaa

SEQ ID NO: 1309972 - DNA, 15 bp, Homo sapiens
atttctttttctttt

SEQ ID NO: 1309973 - DNA, 15 bp, Homo sapiens
tatttctttttcttt

SEQ ID NO: 1309974 - DNA, 15 bp, Homo sapiens
ttatttctttttctt

SEQ ID NO: 1309975 - DNA, 15 bp, Homo sapiens
gttatttctttttct

SEQ ID NO: 1309976 - DNA, 15 bp, Homo sapiens
agttatttctttttc

SEQ ID NO: 1309977 - DNA, 15 bp, Homo sapiens
taagttatttctttt

SEQ ID NO: 1309978 - DNA, 15 bp, Homo sapiens
ttaagttatttcttt

SEQ ID NO: 1309979 - DNA, 15 bp, Homo sapiens
tttaagttatttctt

SEQ ID NO: 1309980 - DNA, 15 bp, Homo sapiens
ttttaagttatttct

SEQ ID NO: 1309981 - DNA, 15 bp, Homo sapiens
tttttaagttatttc

SEQ ID NO: 1309982 - DNA, 15 bp, Homo sapiens
atttttaagttattt

SEQ ID NO: 1309983 - DNA, 15 bp, Homo sapiens
tatttttaagttatt

SEQ ID NO: 1309984 - DNA, 15 bp, Homo sapiens
ttatttttaagttat

SEQ ID NO: 1309985 - DNA, 15 bp, Homo sapiens
cttatttttaagtta

SEQ ID NO: 1309986 - DNA, 15 bp, Homo sapiens
gcttatttttaagtt

SEQ ID NO: 1309987 - DNA, 15 bp, Homo sapiens
tgcttatttttaagt

SEQ ID NO: 1309988 - DNA, 15 bp, Homo sapiens
gtgcttatttttaag

SEQ ID NO: 1309989 - DNA, 15 bp, Homo sapiens
ggtgcttatttttaa

SEQ ID NO: 1309990 - DNA, 15 bp, Homo sapiens
tggtgcttattttta

SEQ ID NO: 1309991 - DNA, 15 bp, Homo sapiens
ttggtgcttattttt

SEQ ID NO: 1309992 - DNA, 15 bp, Homo sapiens
gttggtgcttatttt

SEQ ID NO: 1309993 - DNA, 15 bp, Homo sapiens
tgttggtgcttattt

SEQ ID NO: 1309994 - DNA, 15 bp, Homo sapiens
atgttggtgcttatt

SEQ ID NO: 1309995 - DNA, 15 bp, Homo sapiens
aatgttggtgcttat

SEQ ID NO: 1309996 - DNA, 15 bp, Homo sapiens
aaatgttggtgctta

SEQ ID NO: 1309997 - DNA, 15 bp, Homo sapiens
aaaatgttggtgctt

SEQ ID NO: 1309998 - DNA, 15 bp, Homo sapiens
aaaaatgttggtgct

SEQ ID NO: 1309999 - DNA, 15 bp, Homo sapiens
taaaaatgttggtgc

SEQ ID NO: 1310000 - DNA, 15 bp, Homo sapiens
ataaaaatgttggtg

SEQ ID NO: 1310001 - DNA, 15 bp, Homo sapiens
tataaaaatgttggt

SEQ ID NO: 1310002 - DNA, 15 bp, Homo sapiens
ttataaaaatgttgg

SEQ ID NO: 1310003 - DNA, 15 bp, Homo sapiens
cttataaaaatgttg

SEQ ID NO: 1310004 - DNA, 15 bp, Homo sapiens
ccttataaaaatgtt

SEQ ID NO: 1310005 - DNA, 15 bp, Homo sapiens
accttataaaaatgt

SEQ ID NO: 1310006 - DNA, 15 bp, Homo sapiens
gaccttataaaaatg

SEQ ID NO: 1310007 - DNA, 15 bp, Homo sapiens
tgaccttataaaaat

SEQ ID NO: 1310008 - DNA, 15 bp, Homo sapiens
gtgaccttataaaaa

SEQ ID NO: 1310009 - DNA, 15 bp, Homo sapiens
tgtgaccttataaaa

SEQ ID NO: 1310010 - DNA, 15 bp, Homo sapiens
atgtgaccttataaa

SEQ ID NO: 1310011 - DNA, 15 bp, Homo sapiens
catgtgaccttataa

SEQ ID NO: 1310012 - DNA, 15 bp, Homo sapiens
gcatgtgaccttata

SEQ ID NO: 1310013 - DNA, 15 bp, Homo sapiens
cgcatgtgaccttat

SEQ ID NO: 1310014 - DNA, 15 bp, Homo sapiens
acgcatgtgacctta

SEQ ID NO: 1310015 - DNA, 15 bp, Homo sapiens
cacgcatgtgacctt

SEQ ID NO: 1310016 - DNA, 15 bp, Homo sapiens
tcacgcatgtgacct

SEQ ID NO: 1310017 - DNA, 15 bp, Homo sapiens
ttcacgcatgtgacc

SEQ ID NO: 1310018 - DNA, 15 bp, Homo sapiens
gttcacgcatgtgac

SEQ ID NO: 1310019 - DNA, 15 bp, Homo sapiens
agttcacgcatgtga

SEQ ID NO: 1310020 - DNA, 15 bp, Homo sapiens
aagttcacgcatgtg

SEQ ID NO: 1310021 - DNA, 15 bp, Homo sapiens
aaagttcacgcatgt

SEQ ID NO: 1310022 - DNA, 15 bp, Homo sapiens
taaagttcacgcatg

SEQ ID NO: 1310023 - DNA, 15 bp, Homo sapiens
ttaaagttcacgcat

SEQ ID NO: 1310024 - DNA, 15 bp, Homo sapiens
tttaaagttcacgca

SEQ ID NO: 1310025 - DNA, 15 bp, Homo sapiens
ttttaaagttcacgc

SEQ ID NO: 1310026 - DNA, 15 bp, Homo sapiens
attttaaagttcacg

SEQ ID NO: 1310027 - DNA, 15 bp, Homo sapiens
tattttaaagttcac

SEQ ID NO: 1310028 - DNA, 15 bp, Homo sapiens
ttattttaaagttca

SEQ ID NO: 1310029 - DNA, 15 bp, Homo sapiens
attattttaaagttc

SEQ ID NO: 1310030 - DNA, 15 bp, Homo sapiens
tattattttaaagtt

SEQ ID NO: 1310031 - DNA, 15 bp, Homo sapiens
gtattattttaaagt

SEQ ID NO: 1310032 - DNA, 15 bp, Homo sapiens
agtattattttaaag

SEQ ID NO: 1310033 - DNA, 15 bp, Homo sapiens
tagtattattttaaa

SEQ ID NO: 1310034 - DNA, 15 bp, Homo sapiens
attagtattatttta

SEQ ID NO: 1310035 - DNA, 15 bp, Homo sapiens
aattagtattatttt

SEQ ID NO: 1310036 - DNA, 15 bp, Homo sapiens
aaattagtattattt

SEQ ID NO: 1310037 - DNA, 15 bp, Homo sapiens
gaaattagtattatt

SEQ ID NO: 1310038 - DNA, 15 bp, Homo sapiens
tgaaattagtattat

SEQ ID NO: 1310039 - DNA, 15 bp, Homo sapiens
ctgaaattagtatta

SEQ ID NO: 1310040 - DNA, 15 bp, Homo sapiens
cctgaaattagtatt

SEQ ID NO: 1310041 - DNA, 15 bp, Homo sapiens
gcctgaaattagtat

SEQ ID NO: 1310042 - DNA, 15 bp, Homo sapiens
agcctgaaattagta

SEQ ID NO: 1310043 - DNA, 15 bp, Homo sapiens
cagcctgaaattagt

SEQ ID NO: 1310044 - DNA, 15 bp, Homo sapiens
ccagcctgaaattag

SEQ ID NO: 1310045 - DNA, 15 bp, Homo sapiens
cccagcctgaaatta

SEQ ID NO: 1310046 - DNA, 15 bp, Homo sapiens
acccagcctgaaatt

SEQ ID NO: 1310047 - DNA, 15 bp, Homo sapiens
cacccagcctgaaat

SEQ ID NO: 1310048 - DNA, 15 bp, Homo sapiens
gcacccagcctgaaa

SEQ ID NO: 1310049 - DNA, 15 bp, Homo sapiens
cgcacccagcctgaa

SEQ ID NO: 1310050 - DNA, 15 bp, Homo sapiens
ccgcacccagcctga

SEQ ID NO: 1310051 - DNA, 15 bp, Homo sapiens
accgcacccagcctg

SEQ ID NO: 1310052 - DNA, 15 bp, Homo sapiens
caccgcacccagcct

SEQ ID NO: 1310053 - DNA, 15 bp, Homo sapiens
aggcaccgcacccag

SEQ ID NO: 1310054 - DNA, 15 bp, Homo sapiens
gaggcaccgcaccca

SEQ ID NO: 1310055 - DNA, 15 bp, Homo sapiens
tgaggcaccgcaccc

SEQ ID NO: 1310056 - DNA, 15 bp, Homo sapiens
gtgaggcaccgcacc

SEQ ID NO: 1310057 - DNA, 15 bp, Homo sapiens
cgtgaggcaccgcac

SEQ ID NO: 1310058 - DNA, 15 bp, Homo sapiens
gcgtgaggcaccgca

SEQ ID NO: 1310059 - DNA, 15 bp, Homo sapiens
ggcgtgaggcaccgc

SEQ ID NO: 1310060 - DNA, 15 bp, Homo sapiens
aggcgtgaggcaccg

SEQ ID NO: 1310061 - DNA, 15 bp, Homo sapiens
caggcgtgaggcacc

SEQ ID NO: 1310062 - DNA, 15 bp, Homo sapiens
taagtgctgggatta

SEQ ID NO: 1310063 - DNA, 15 bp, Homo sapiens
ctaagtgctgggatt

SEQ ID NO: 1310064 - DNA, 15 bp, Homo sapiens
cctaagtgctgggat

SEQ ID NO: 1310065 - DNA, 15 bp, Homo sapiens
gcctaagtgctggga

SEQ ID NO: 1310066 - DNA, 15 bp, Homo sapiens
ggcctaagtgctggg

SEQ ID NO: 1310067 - DNA, 15 bp, Homo sapiens
aggcctaagtgctgg

SEQ ID NO: 1310068 - DNA, 15 bp, Homo sapiens
caggcctaagtgctg

SEQ ID NO: 1310069 - DNA, 15 bp, Homo sapiens
acaggcctaagtgct

SEQ ID NO: 1310070 - DNA, 15 bp, Homo sapiens
aacaggcctaagtgc

SEQ ID NO: 1310071 - DNA, 15 bp, Homo sapiens
gaacaggcctaagtg

SEQ ID NO: 1310072 - DNA, 15 bp, Homo sapiens
agaacaggcctaagt

SEQ ID NO: 1310073 - DNA, 15 bp, Homo sapiens
tagaacaggcctaag

SEQ ID NO: 1310074 - DNA, 15 bp, Homo sapiens
gtagaacaggcctaa

SEQ ID NO: 1310075 - DNA, 15 bp, Homo sapiens
agtagaacaggccta

SEQ ID NO: 1310076 - DNA, 15 bp, Homo sapiens
gagtagaacaggcct

SEQ ID NO: 1310077 - DNA, 15 bp, Homo sapiens
agagtagaacaggcc

SEQ ID NO: 1310078 - DNA, 15 bp, Homo sapiens
gagagtagaacaggc

SEQ ID NO: 1310079 - DNA, 15 bp, Homo sapiens
ggagagtagaacagg

SEQ ID NO: 1310080 - DNA, 15 bp, Homo sapiens
aggagagtagaacag

SEQ ID NO: 1310081 - DNA, 15 bp, Homo sapiens
aaggagagtagaaca

SEQ ID NO: 1310082 - DNA, 15 bp, Homo sapiens
aaaggagagtagaac

SEQ ID NO: 1310083 - DNA, 15 bp, Homo sapiens
caaaggagagtagaa

SEQ ID NO: 1310084 - DNA, 15 bp, Homo sapiens
tcaaaggagagtaga

SEQ ID NO: 1310085 - DNA, 15 bp, Homo sapiens
ttcaaaggagagtag

SEQ ID NO: 1310086 - DNA, 15 bp, Homo sapiens
tttcaaaggagagta

SEQ ID NO: 1310087 - DNA, 15 bp, Homo sapiens
atttcaaaggagagt

SEQ ID NO: 1310088 - DNA, 15 bp, Homo sapiens
catttcaaaggagag

SEQ ID NO: 1310089 - DNA, 15 bp, Homo sapiens
tcatttcaaaggaga

SEQ ID NO: 1310090 - DNA, 15 bp, Homo sapiens
ctcatttcaaaggag

SEQ ID NO: 1310091 - DNA, 15 bp, Homo sapiens
cctcatttcaaagga

SEQ ID NO: 1310092 - DNA, 15 bp, Homo sapiens
acctcatttcaaagg

SEQ ID NO: 1310093 - DNA, 15 bp, Homo sapiens
gacctcatttcaaag

SEQ ID NO: 1310094 - DNA, 15 bp, Homo sapiens
ggacctcatttcaaa

SEQ ID NO: 1310095 - DNA, 15 bp, Homo sapiens
aggacctcatttcaa

SEQ ID NO: 1310096 - DNA, 15 bp, Homo sapiens
aaggacctcatttca

SEQ ID NO: 1310097 - DNA, 15 bp, Homo sapiens
gaaggacctcatttc

SEQ ID NO: 1310098 - DNA, 15 bp, Homo sapiens
ggaaggacctcattt

SEQ ID NO: 1310099 - DNA, 15 bp, Homo sapiens
gggaaggacctcatt

SEQ ID NO: 1310100 - DNA, 15 bp, Homo sapiens
ggggaaggacctcat

SEQ ID NO: 1310101 - DNA, 15 bp, Homo sapiens
tggggaaggacctca

SEQ ID NO: 1310102 - DNA, 15 bp, Homo sapiens
ctggggaaggacctc

SEQ ID NO: 1310103 - DNA, 15 bp, Homo sapiens
tgctggggaaggacc

SEQ ID NO: 1310104 - DNA, 15 bp, Homo sapiens
atgctggggaaggac

SEQ ID NO: 1310105 - DNA, 15 bp, Homo sapiens
catgctggggaagga

SEQ ID NO: 1310106 - DNA, 15 bp, Homo sapiens
gcatgctggggaagg

SEQ ID NO: 1310107 - DNA, 15 bp, Homo sapiens
ggcatgctggggaag

SEQ ID NO: 1310108 - DNA, 15 bp, Homo sapiens
aggcatgctggggaa

SEQ ID NO: 1310109 - DNA, 15 bp, Homo sapiens
aaggcatgctgggga

SEQ ID NO: 1310110 - DNA, 15 bp, Homo sapiens
gaaggcatgctgggg

SEQ ID NO: 1310111 - DNA, 15 bp, Homo sapiens
ggaaggcatgctggg

SEQ ID NO: 1310112 - DNA, 15 bp, Homo sapiens
aggaaggcatgctgg

SEQ ID NO: 1310113 - DNA, 15 bp, Homo sapiens
caggaaggcatgctg

SEQ ID NO: 1310114 - DNA, 15 bp, Homo sapiens
gcaggaaggcatgct

SEQ ID NO: 1310115 - DNA, 15 bp, Homo sapiens
agcaggaaggcatgc

SEQ ID NO: 1310116 - DNA, 15 bp, Homo sapiens
cagcaggaaggcatg

SEQ ID NO: 1310117 - DNA, 15 bp, Homo sapiens
tcagcaggaaggcat

SEQ ID NO: 1310118 - DNA, 15 bp, Homo sapiens
ctcagcaggaaggca

SEQ ID NO: 1310119 - DNA, 15 bp, Homo sapiens
gctcagcaggaaggc

SEQ ID NO: 1310120 - DNA, 15 bp, Homo sapiens
tgctcagcaggaagg

SEQ ID NO: 1310121 - DNA, 15 bp, Homo sapiens
ttgctcagcaggaag

SEQ ID NO: 1310122 - DNA, 15 bp, Homo sapiens
attgctcagcaggaa

SEQ ID NO: 1310123 - DNA, 15 bp, Homo sapiens
aattgctcagcagga

SEQ ID NO: 1310124 - DNA, 15 bp, Homo sapiens
caattgctcagcagg

SEQ ID NO: 1310125 - DNA, 15 bp, Homo sapiens
gcaattgctcagcag

SEQ ID NO: 1310126 - DNA, 15 bp, Homo sapiens
agcaattgctcagca

SEQ ID NO: 1310127 - DNA, 15 bp, Homo sapiens
cagcaattgctcagc

SEQ ID NO: 1310128 - DNA, 15 bp, Homo sapiens
gcagcaattgctcag

SEQ ID NO: 1310129 - DNA, 15 bp, Homo sapiens
ggcagcaattgctca

SEQ ID NO: 1310130 - DNA, 15 bp, Homo sapiens
aggcagcaattgctc

SEQ ID NO: 1310131 - DNA, 15 bp, Homo sapiens
caggcagcaattgct

SEQ ID NO: 1310132 - DNA, 15 bp, Homo sapiens
ccaggcagcaattgc

SEQ ID NO: 1310133 - DNA, 15 bp, Homo sapiens
tccaggcagcaattg

SEQ ID NO: 1310134 - DNA, 15 bp, Homo sapiens
ctccaggcagcaatt

SEQ ID NO: 1310135 - DNA, 15 bp, Homo sapiens
gctccaggcagcaat

SEQ ID NO: 1310136 - DNA, 15 bp, Homo sapiens
tgctccaggcagcaa

SEQ ID NO: 1310137 - DNA, 15 bp, Homo sapiens
atgctccaggcagca

SEQ ID NO: 1310138 - DNA, 15 bp, Homo sapiens
gatgctccaggcagc

SEQ ID NO: 1310139 - DNA, 15 bp, Homo sapiens
agatgctccaggcag

SEQ ID NO: 1310140 - DNA, 15 bp, Homo sapiens
gagatgctccaggca

SEQ ID NO: 1310141 - DNA, 15 bp, Homo sapiens
ggagatgctccaggc

SEQ ID NO: 1310142 - DNA, 15 bp, Homo sapiens
gggagatgctccagg

SEQ ID NO: 1310143 - DNA, 15 bp, Homo sapiens
agggagatgctccag

SEQ ID NO: 1310144 - DNA, 15 bp, Homo sapiens
cagggagatgctcca

SEQ ID NO: 1310145 - DNA, 15 bp, Homo sapiens
tcagggagatgctcc

SEQ ID NO: 1310146 - DNA, 15 bp, Homo sapiens
ctcagggagatgctc

SEQ ID NO: 1310147 - DNA, 15 bp, Homo sapiens
actcagggagatgct

SEQ ID NO: 1310148 - DNA, 15 bp, Homo sapiens
cactcagggagatgc

SEQ ID NO: 1310149 - DNA, 15 bp, Homo sapiens
acactcagggagatg

SEQ ID NO: 1310150 - DNA, 15 bp, Homo sapiens
gacactcagggagat

SEQ ID NO: 1310151 - DNA, 15 bp, Homo sapiens
agacactcagggaga

SEQ ID NO: 1310152 - DNA, 15 bp, Homo sapiens
cagacactcagggag

SEQ ID NO: 1310153 - DNA, 15 bp, Homo sapiens
agcagacactcaggg

SEQ ID NO: 1310154 - DNA, 15 bp, Homo sapiens
cagcagacactcagg

SEQ ID NO: 1310155 - DNA, 15 bp, Homo sapiens
acagcagacactcag

SEQ ID NO: 1310156 - DNA, 15 bp, Homo sapiens
cacagcagacactca

SEQ ID NO: 1310157 - DNA, 15 bp, Homo sapiens
gcacagcagacactc

SEQ ID NO: 1310158 - DNA, 15 bp, Homo sapiens
tgcacagcagacact

SEQ ID NO: 1310159 - DNA, 15 bp, Homo sapiens
ctgcacagcagacac

SEQ ID NO: 1310160 - DNA, 15 bp, Homo sapiens
gctgcacagcagaca

SEQ ID NO: 1310161 - DNA, 15 bp, Homo sapiens
tgctgcacagcagac

SEQ ID NO: 1310162 - DNA, 15 bp, Homo sapiens
ttgctgcacagcaga

SEQ ID NO: 1310163 - DNA, 15 bp, Homo sapiens
cttgctgcacagcag

SEQ ID NO: 1310164 - DNA, 15 bp, Homo sapiens
ccttgctgcacagca

SEQ ID NO: 1310165 - DNA, 15 bp, Homo sapiens
accttgctgcacagc

SEQ ID NO: 1310166 - DNA, 15 bp, Homo sapiens
caccttgctgcacag

SEQ ID NO: 1310167 - DNA, 15 bp, Homo sapiens
ccaccttgctgcaca

SEQ ID NO: 1310168 - DNA, 15 bp, Homo sapiens
gccaccttgctgcac

SEQ ID NO: 1310169 - DNA, 15 bp, Homo sapiens
agccaccttgctgca

SEQ ID NO: 1310170 - DNA, 15 bp, Homo sapiens
cagccaccttgctgc

SEQ ID NO: 1310171 - DNA, 15 bp, Homo sapiens
gcagccaccttgctg

SEQ ID NO: 1310172 - DNA, 15 bp, Homo sapiens
ggcagccaccttgct

SEQ ID NO: 1310173 - DNA, 15 bp, Homo sapiens
tggcagccaccttgc

SEQ ID NO: 1310174 - DNA, 15 bp, Homo sapiens
gtggcagccaccttg

SEQ ID NO: 1310175 - DNA, 15 bp, Homo sapiens
agtggcagccacctt

SEQ ID NO: 1310176 - DNA, 15 bp, Homo sapiens
aagtggcagccacct

SEQ ID NO: 1310177 - DNA, 15 bp, Homo sapiens
aaagtggcagccacc

SEQ ID NO: 1310178 - DNA, 15 bp, Homo sapiens
taaagtggcagccac

SEQ ID NO: 1310179 - DNA, 15 bp, Homo sapiens
ctaaagtggcagcca

SEQ ID NO: 1310180 - DNA, 15 bp, Homo sapiens
cctaaagtggcagcc

SEQ ID NO: 1310181 - DNA, 15 bp, Homo sapiens
ccctaaagtggcagc

SEQ ID NO: 1310182 - DNA, 15 bp, Homo sapiens
tccctaaagtggcag

SEQ ID NO: 1310183 - DNA, 15 bp, Homo sapiens
ttccctaaagtggca

SEQ ID NO: 1310184 - DNA, 15 bp, Homo sapiens
attccctaaagtggc

SEQ ID NO: 1310185 - DNA, 15 bp, Homo sapiens
gattccctaaagtgg

SEQ ID NO: 1310186 - DNA, 15 bp, Homo sapiens
agattccctaaagtg

SEQ ID NO: 1310187 - DNA, 15 bp, Homo sapiens
gagattccctaaagt

SEQ ID NO: 1310188 - DNA, 15 bp, Homo sapiens
tgagattccctaaag

SEQ ID NO: 1310189 - DNA, 15 bp, Homo sapiens
ctgagattccctaaa

SEQ ID NO: 1310190 - DNA, 15 bp, Homo sapiens
gctgagattccctaa

SEQ ID NO: 1310191 - DNA, 15 bp, Homo sapiens
ggctgagattcccta

SEQ ID NO: 1310192 - DNA, 15 bp, Homo sapiens
aggctgagattccct

SEQ ID NO: 1310193 - DNA, 15 bp, Homo sapiens
caggctgagattccc

SEQ ID NO: 1310194 - DNA, 15 bp, Homo sapiens
acaggctgagattcc

SEQ ID NO: 1310195 - DNA, 15 bp, Homo sapiens
cacaggctgagattc

SEQ ID NO: 1310196 - DNA, 15 bp, Homo sapiens
gcacaggctgagatt

SEQ ID NO: 1310197 - DNA, 15 bp, Homo sapiens
agcacaggctgagat

SEQ ID NO: 1310198 - DNA, 15 bp, Homo sapiens
gagcacaggctgaga

SEQ ID NO: 1310199 - DNA, 15 bp, Homo sapiens
ggagcacaggctgag

SEQ ID NO: 1310200 - DNA, 15 bp, Homo sapiens
aggagcacaggctga

SEQ ID NO: 1310201 - DNA, 15 bp, Homo sapiens
aaggagcacaggctg

SEQ ID NO: 1310202 - DNA, 15 bp, Homo sapiens
aaaggagcacaggct

SEQ ID NO: 1310203 - DNA, 15 bp, Homo sapiens
aaaaggagcacaggc

SEQ ID NO: 1310204 - DNA, 15 bp, Homo sapiens
gaaaaggagcacagg

SEQ ID NO: 1310205 - DNA, 15 bp, Homo sapiens
ggaaaaggagcacag

SEQ ID NO: 1310206 - DNA, 15 bp, Homo sapiens
tggaaaaggagcaca

SEQ ID NO: 1310207 - DNA, 15 bp, Homo sapiens
ttggaaaaggagcac

SEQ ID NO: 1310208 - DNA, 15 bp, Homo sapiens
cttggaaaaggagca

SEQ ID NO: 1310209 - DNA, 15 bp, Homo sapiens
acttggaaaaggagc

SEQ ID NO: 1310210 - DNA, 15 bp, Homo sapiens
aacttggaaaaggag

SEQ ID NO: 1310211 - DNA, 15 bp, Homo sapiens
gaacttggaaaagga

SEQ ID NO: 1310212 - DNA, 15 bp, Homo sapiens
tgaacttggaaaagg

SEQ ID NO: 1310213 - DNA, 15 bp, Homo sapiens
ctgaacttggaaaag

SEQ ID NO: 1310214 - DNA, 15 bp, Homo sapiens
tgtgggaagagcttc

SEQ ID NO: 1310215 - DNA, 15 bp, Homo sapiens
ctgtgggaagagctt

SEQ ID NO: 1310216 - DNA, 15 bp, Homo sapiens
actgtgggaagagct

SEQ ID NO: 1310217 - DNA, 15 bp, Homo sapiens
gactgtgggaagagc

SEQ ID NO: 1310218 - DNA, 15 bp, Homo sapiens
ggactgtgggaagag

SEQ ID NO: 1310219 - DNA, 15 bp, Homo sapiens
aggactgtgggaaga

SEQ ID NO: 1310220 - DNA, 15 bp, Homo sapiens
aaggactgtgggaag

SEQ ID NO: 1310221 - DNA, 15 bp, Homo sapiens
aaaggactgtgggaa

SEQ ID NO: 1310222 - DNA, 15 bp, Homo sapiens
aaaaggactgtggga

SEQ ID NO: 1310223 - DNA, 15 bp, Homo sapiens
aaaaaggactgtggg

SEQ ID NO: 1310224 - DNA, 15 bp, Homo sapiens
gaaaaaggactgtgg

SEQ ID NO: 1310225 - DNA, 15 bp, Homo sapiens
ggaaaaaggactgtg

SEQ ID NO: 1310226 - DNA, 15 bp, Homo sapiens
aggaaaaaggactgt

SEQ ID NO: 1310227 - DNA, 15 bp, Homo sapiens
gaggaaaaaggactg

SEQ ID NO: 1310228 - DNA, 15 bp, Homo sapiens
ggaggaaaaaggact

SEQ ID NO: 1310229 - DNA, 15 bp, Homo sapiens
aggaggaaaaaggac

SEQ ID NO: 1310230 - DNA, 15 bp, Homo sapiens
taggaggaaaaagga

SEQ ID NO: 1310231 - DNA, 15 bp, Homo sapiens
ataggaggaaaaagg

SEQ ID NO: 1310232 - DNA, 15 bp, Homo sapiens
aataggaggaaaaag

SEQ ID NO: 1310233 - DNA, 15 bp, Homo sapiens
gaataggaggaaaaa

SEQ ID NO: 1310234 - DNA, 15 bp, Homo sapiens
agaataggaggaaaa

SEQ ID NO: 1310235 - DNA, 15 bp, Homo sapiens
tagaataggaggaaa

SEQ ID NO: 1310236 - DNA, 15 bp, Homo sapiens
atagaataggaggaa

SEQ ID NO: 1310237 - DNA, 15 bp, Homo sapiens
aatagaataggagga

SEQ ID NO: 1310238 - DNA, 15 bp, Homo sapiens
taatagaataggagg

SEQ ID NO: 1310239 - DNA, 15 bp, Homo sapiens
ttaatagaataggag

SEQ ID NO: 1310240 - DNA, 15 bp, Homo sapiens
gttaatagaatagga

SEQ ID NO: 1310241 - DNA, 15 bp, Homo sapiens
ggttaatagaatagg

SEQ ID NO: 1310242 - DNA, 15 bp, Homo sapiens
tggttaatagaatag

SEQ ID NO: 1310243 - DNA, 15 bp, Homo sapiens
atggttaatagaata

SEQ ID NO: 1310244 - DNA, 15 bp, Homo sapiens
tatggttaatagaat

SEQ ID NO: 1310245 - DNA, 15 bp, Homo sapiens
atatggttaatagaa

SEQ ID NO: 1310246 - DNA, 15 bp, Homo sapiens
gatatggttaataga

SEQ ID NO: 1310247 - DNA, 15 bp, Homo sapiens
ggatatggttaatag

SEQ ID NO: 1310248 - DNA, 15 bp, Homo sapiens
gggatatggttaata

SEQ ID NO: 1310249 - DNA, 15 bp, Homo sapiens
tgggatatggttaat

SEQ ID NO: 1310250 - DNA, 15 bp, Homo sapiens
atgggatatggttaa

SEQ ID NO: 1310251 - DNA, 15 bp, Homo sapiens
catgggatatggtta

SEQ ID NO: 1310252 - DNA, 15 bp, Homo sapiens
acatgggatatggtt

SEQ ID NO: 1310253 - DNA, 15 bp, Homo sapiens
tacatgggatatggt

SEQ ID NO: 1310254 - DNA, 15 bp, Homo sapiens
atacatgggatatgg

SEQ ID NO: 1310255 - DNA, 15 bp, Homo sapiens
aatacatgggatatg

SEQ ID NO: 1310256 - DNA, 15 bp, Homo sapiens
taatacatgggatat

SEQ ID NO: 1310257 - DNA, 15 bp, Homo sapiens
ataatacatgggata

SEQ ID NO: 1310258 - DNA, 15 bp, Homo sapiens
tataatacatgggat

SEQ ID NO: 1310259 - DNA, 15 bp, Homo sapiens
atataatacatggga

SEQ ID NO: 1310260 - DNA, 15 bp, Homo sapiens
aatataatacatggg

SEQ ID NO: 1310261 - DNA, 15 bp, Homo sapiens
caatataatacatgg

SEQ ID NO: 1310262 - DNA, 15 bp, Homo sapiens
tcaatataatacatg

SEQ ID NO: 1310263 - DNA, 15 bp, Homo sapiens
ttcaatataatacat

SEQ ID NO: 1310264 - DNA, 15 bp, Homo sapiens
tttcaatataataca

SEQ ID NO: 1310265 - DNA, 15 bp, Homo sapiens
atttcaatataatac

SEQ ID NO: 1310266 - DNA, 15 bp, Homo sapiens
catttcaatataata

SEQ ID NO: 1310267 - DNA, 15 bp, Homo sapiens
ccatttcaatataat

SEQ ID NO: 1310268 - DNA, 15 bp, Homo sapiens
tccatttcaatataa

SEQ ID NO: 1310269 - DNA, 15 bp, Homo sapiens
gtccatttcaatata

SEQ ID NO: 1310270 - DNA, 15 bp, Homo sapiens
agtccatttcaatat

SEQ ID NO: 1310271 - DNA, 15 bp, Homo sapiens
aagtccatttcaata

SEQ ID NO: 1310272 - DNA, 15 bp, Homo sapiens
aaagtccatttcaat

SEQ ID NO: 1310273 - DNA, 15 bp, Homo sapiens
caaagtccatttcaa

SEQ ID NO: 1310274 - DNA, 15 bp, Homo sapiens
gcaaagtccatttca

SEQ ID NO: 1310275 - DNA, 15 bp, Homo sapiens
agcaaagtccatttc

SEQ ID NO: 1310276 - DNA, 15 bp, Homo sapiens
aagcaaagtccattt

SEQ ID NO: 1310277 - DNA, 15 bp, Homo sapiens
taagcaaagtccatt

SEQ ID NO: 1310278 - DNA, 15 bp, Homo sapiens
ctaagcaaagtccat

SEQ ID NO: 1310279 - DNA, 15 bp, Homo sapiens
tctaagcaaagtcca

SEQ ID NO: 1310280 - DNA, 15 bp, Homo sapiens
ttctaagcaaagtcc

SEQ ID NO: 1310281 - DNA, 15 bp, Homo sapiens
attctaagcaaagtc

SEQ ID NO: 1310282 - DNA, 15 bp, Homo sapiens
aattctaagcaaagt

SEQ ID NO: 1310283 - DNA, 15 bp, Homo sapiens
aaattctaagcaaag

SEQ ID NO: 1310284 - DNA, 15 bp, Homo sapiens
gaaattctaagcaaa

SEQ ID NO: 1310285 - DNA, 15 bp, Homo sapiens
tgaaattctaagcaa

SEQ ID NO: 1310286 - DNA, 15 bp, Homo sapiens
atgaaattctaagca

SEQ ID NO: 1310287 - DNA, 15 bp, Homo sapiens
tatgaaattctaagc

SEQ ID NO: 1310288 - DNA, 15 bp, Homo sapiens
ttatgaaattctaag

SEQ ID NO: 1310289 - DNA, 15 bp, Homo sapiens
gttatgaaattctaa

SEQ ID NO: 1310290 - DNA, 15 bp, Homo sapiens
tgttatgaaattcta

SEQ ID NO: 1310291 - DNA, 15 bp, Homo sapiens
atgttatgaaattct

SEQ ID NO: 1310292 - DNA, 15 bp, Homo sapiens
catgttatgaaattc

SEQ ID NO: 1310293 - DNA, 15 bp, Homo sapiens
acatgttatgaaatt

SEQ ID NO: 1310294 - DNA, 15 bp, Homo sapiens
aacatgttatgaaat

SEQ ID NO: 1310295 - DNA, 15 bp, Homo sapiens
gaacatgttatgaaa

SEQ ID NO: 1310296 - DNA, 15 bp, Homo sapiens
agaacatgttatgaa

SEQ ID NO: 1310297 - DNA, 15 bp, Homo sapiens
aagaacatgttatga

SEQ ID NO: 1310298 - DNA, 15 bp, Homo sapiens
aaagaacatgttatg

SEQ ID NO: 1310299 - DNA, 15 bp, Homo sapiens
aaaagaacatgttat

SEQ ID NO: 1310300 - DNA, 15 bp, Homo sapiens
caaaagaacatgtta

SEQ ID NO: 1310301 - DNA, 15 bp, Homo sapiens
ccaaaagaacatgtt

SEQ ID NO: 1310302 - DNA, 15 bp, Homo sapiens
accaaaagaacatgt

SEQ ID NO: 1310303 - DNA, 15 bp, Homo sapiens
taccaaaagaacatg

SEQ ID NO: 1310304 - DNA, 15 bp, Homo sapiens
ttaccaaaagaacat

SEQ ID NO: 1310305 - DNA, 15 bp, Homo sapiens
gttaccaaaagaaca

SEQ ID NO: 1310306 - DNA, 15 bp, Homo sapiens
ggttaccaaaagaac

SEQ ID NO: 1310307 - DNA, 15 bp, Homo sapiens
tggttaccaaaagaa

SEQ ID NO: 1310308 - DNA, 15 bp, Homo sapiens
ctggttaccaaaaga

SEQ ID NO: 1310309 - DNA, 15 bp, Homo sapiens
actggttaccaaaag

SEQ ID NO: 1310310 - DNA, 15 bp, Homo sapiens
tactggttaccaaaa

SEQ ID NO: 1310311 - DNA, 15 bp, Homo sapiens
ttactggttaccaaa

SEQ ID NO: 1310312 - DNA, 15 bp, Homo sapiens
tttactggttaccaa

SEQ ID NO: 1310313 - DNA, 15 bp, Homo sapiens
ttttactggttacca

SEQ ID NO: 1310314 - DNA, 15 bp, Homo sapiens
tttttactggttacc

SEQ ID NO: 1310315 - DNA, 15 bp, Homo sapiens
ctttttactggttac

SEQ ID NO: 1310316 - DNA, 15 bp, Homo sapiens
tctttttactggtta

SEQ ID NO: 1310317 - DNA, 15 bp, Homo sapiens
atctttttactggtt

SEQ ID NO: 1310318 - DNA, 15 bp, Homo sapiens
gatctttttactggt

SEQ ID NO: 1310319 - DNA, 15 bp, Homo sapiens
ggatctttttactgg

SEQ ID NO: 1310320 - DNA, 15 bp, Homo sapiens
aggatctttttactg

SEQ ID NO: 1310321 - DNA, 15 bp, Homo sapiens
aaggatctttttact

SEQ ID NO: 1310322 - DNA, 15 bp, Homo sapiens
aaaggatctttttac

SEQ ID NO: 1310323 - DNA, 15 bp, Homo sapiens
caaaggatcttttta

SEQ ID NO: 1310324 - DNA, 15 bp, Homo sapiens
tcaaaggatcttttt

SEQ ID NO: 1310325 - DNA, 15 bp, Homo sapiens
ttcaaaggatctttt

SEQ ID NO: 1310326 - DNA, 15 bp, Homo sapiens
attcaaaggatcttt

SEQ ID NO: 1310327 - DNA, 15 bp, Homo sapiens
cattcaaaggatctt

SEQ ID NO: 1310328 - DNA, 15 bp, Homo sapiens
ccattcaaaggatct

SEQ ID NO: 1310329 - DNA, 15 bp, Homo sapiens
cccattcaaaggatc

SEQ ID NO: 1310330 - DNA, 15 bp, Homo sapiens
tcccattcaaaggat

SEQ ID NO: 1310331 - DNA, 15 bp, Homo sapiens
ctcccattcaaagga

SEQ ID NO: 1310332 - DNA, 15 bp, Homo sapiens
gctcccattcaaagg

SEQ ID NO: 1310333 - DNA, 15 bp, Homo sapiens
tgctcccattcaaag

SEQ ID NO: 1310334 - DNA, 15 bp, Homo sapiens
atgctcccattcaaa

SEQ ID NO: 1310335 - DNA, 15 bp, Homo sapiens
aatgctcccattcaa

SEQ ID NO: 1310336 - DNA, 15 bp, Homo sapiens
aaatgctcccattca

SEQ ID NO: 1310337 - DNA, 15 bp, Homo sapiens
gaaatgctcccattc

SEQ ID NO: 1310338 - DNA, 15 bp, Homo sapiens
cgaaatgctcccatt

SEQ ID NO: 1310339 - DNA, 15 bp, Homo sapiens
gcgaaatgctcccat

SEQ ID NO: 1310340 - DNA, 15 bp, Homo sapiens
agcgaaatgctccca

SEQ ID NO: 1310341 - DNA, 15 bp, Homo sapiens
aagcgaaatgctccc

SEQ ID NO: 1310342 - DNA, 15 bp, Homo sapiens
aaagcgaaatgctcc

SEQ ID NO: 1310343 - DNA, 15 bp, Homo sapiens
aaaagcgaaatgctc

SEQ ID NO: 1310344 - DNA, 15 bp, Homo sapiens
aaaaagcgaaatgct

SEQ ID NO: 1310345 - DNA, 15 bp, Homo sapiens
caaaaagcgaaatgc

SEQ ID NO: 1310346 - DNA, 15 bp, Homo sapiens
tcaaaaagcgaaatg

SEQ ID NO: 1310347 - DNA, 15 bp, Homo sapiens
ttcaaaaagcgaaat

SEQ ID NO: 1310348 - DNA, 15 bp, Homo sapiens
tttcaaaaagcgaaa

SEQ ID NO: 1310349 - DNA, 15 bp, Homo sapiens
ctttcaaaaagcgaa

SEQ ID NO: 1310350 - DNA, 15 bp, Homo sapiens
cctttcaaaaagcga

SEQ ID NO: 1310351 - DNA, 15 bp, Homo sapiens
tcctttcaaaaagcg

SEQ ID NO: 1310352 - DNA, 15 bp, Homo sapiens
ctcctttcaaaaagc

SEQ ID NO: 1310353 - DNA, 15 bp, Homo sapiens
gctcctttcaaaaag

SEQ ID NO: 1310354 - DNA, 15 bp, Homo sapiens
agctcctttcaaaaa

SEQ ID NO: 1310355 - DNA, 15 bp, Homo sapiens
aagctcctttcaaaa

SEQ ID NO: 1310356 - DNA, 15 bp, Homo sapiens
taagctcctttcaaa

SEQ ID NO: 1310357 - DNA, 15 bp, Homo sapiens
ttaagctcctttcaa

SEQ ID NO: 1310358 - DNA, 15 bp, Homo sapiens
tttaagctcctttca

SEQ ID NO: 1310359 - DNA, 15 bp, Homo sapiens
atttaagctcctttc

SEQ ID NO: 1310360 - DNA, 15 bp, Homo sapiens
catttaagctccttt

SEQ ID NO: 1310361 - DNA, 15 bp, Homo sapiens
acatttaagctcctt

SEQ ID NO: 1310362 - DNA, 15 bp, Homo sapiens
tacatttaagctcct

SEQ ID NO: 1310363 - DNA, 15 bp, Homo sapiens
ttacatttaagctcc

SEQ ID NO: 1310364 - DNA, 15 bp, Homo sapiens
attacatttaagctc

SEQ ID NO: 1310365 - DNA, 15 bp, Homo sapiens
aattacatttaagct

SEQ ID NO: 1310366 - DNA, 15 bp, Homo sapiens
taattacatttaagc

SEQ ID NO: 1310367 - DNA, 15 bp, Homo sapiens
gtaattacatttaag

SEQ ID NO: 1310368 - DNA, 15 bp, Homo sapiens
tgtaattacatttaa

SEQ ID NO: 1310369 - DNA, 15 bp, Homo sapiens
ctgtaattacattta

SEQ ID NO: 1310370 - DNA, 15 bp, Homo sapiens
actgtaattacattt

SEQ ID NO: 1310371 - DNA, 15 bp, Homo sapiens
tactgtaattacatt

SEQ ID NO: 1310372 - DNA, 15 bp, Homo sapiens
gtactgtaattacat

SEQ ID NO: 1310373 - DNA, 15 bp, Homo sapiens
tgtactgtaattaca

SEQ ID NO: 1310374 - DNA, 15 bp, Homo sapiens
ctgtactgtaattac

SEQ ID NO: 1310375 - DNA, 15 bp, Homo sapiens
tctgtactgtaatta

SEQ ID NO: 1310376 - DNA, 15 bp, Homo sapiens
gtctgtactgtaatt

SEQ ID NO: 1310377 - DNA, 15 bp, Homo sapiens
ggtctgtactgtaat

SEQ ID NO: 1310378 - DNA, 15 bp, Homo sapiens
aggtctgtactgtaa

SEQ ID NO: 1310379 - DNA, 15 bp, Homo sapiens
caggtctgtactgta

SEQ ID NO: 1310380 - DNA, 15 bp, Homo sapiens
acaggtctgtactgt

SEQ ID NO: 1310381 - DNA, 15 bp, Homo sapiens
cacaggtctgtactg

SEQ ID NO: 1310382 - DNA, 15 bp, Homo sapiens
gcacaggtctgtact

SEQ ID NO: 1310383 - DNA, 15 bp, Homo sapiens
tgcacaggtctgtac

SEQ ID NO: 1310384 - DNA, 15 bp, Homo sapiens
ctgcacaggtctgta

SEQ ID NO: 1310385 - DNA, 15 bp, Homo sapiens
cctgcacaggtctgt

SEQ ID NO: 1310386 - DNA, 15 bp, Homo sapiens
gcctgcacaggtctg

SEQ ID NO: 1310387 - DNA, 15 bp, Homo sapiens
tgcctgcacaggtct

SEQ ID NO: 1310388 - DNA, 15 bp, Homo sapiens
ctgcctgcacaggtc

SEQ ID NO: 1310389 - DNA, 15 bp, Homo sapiens
cctgcctgcacaggt

SEQ ID NO: 1310390 - DNA, 15 bp, Homo sapiens
gcctgcctgcacagg

SEQ ID NO: 1310391 - DNA, 15 bp, Homo sapiens
cgcctgcctgcacag

SEQ ID NO: 1310392 - DNA, 15 bp, Homo sapiens
tcgcctgcctgcaca

SEQ ID NO: 1310393 - DNA, 15 bp, Homo sapiens
atcgcctgcctgcac

SEQ ID NO: 1310394 - DNA, 15 bp, Homo sapiens
gatcgcctgcctgca

SEQ ID NO: 1310395 - DNA, 15 bp, Homo sapiens
ggatcgcctgcctgc

SEQ ID NO: 1310396 - DNA, 15 bp, Homo sapiens
aggatcgcctgcctg

SEQ ID NO: 1310397 - DNA, 15 bp, Homo sapiens
caggatcgcctgcct

SEQ ID NO: 1310398 - DNA, 15 bp, Homo sapiens
gcaggatcgcctgcc

SEQ ID NO: 1310399 - DNA, 15 bp, Homo sapiens
ggcaggatcgcctgc

SEQ ID NO: 1310400 - DNA, 15 bp, Homo sapiens
gggcaggatcgcctg

SEQ ID NO: 1310401 - DNA, 15 bp, Homo sapiens
tgggcaggatcgcct

SEQ ID NO: 1310402 - DNA, 15 bp, Homo sapiens
ctgggcaggatcgcc

SEQ ID NO: 1310403 - DNA, 15 bp, Homo sapiens
gctgggcaggatcgc

SEQ ID NO: 1310404 - DNA, 15 bp, Homo sapiens
tgctgggcaggatcg

SEQ ID NO: 1310405 - DNA, 15 bp, Homo sapiens
gtgctgggcaggatc

SEQ ID NO: 1310406 - DNA, 15 bp, Homo sapiens
cgtgctgggcaggat

SEQ ID NO: 1310407 - DNA, 15 bp, Homo sapiens
acgtgctgggcagga

SEQ ID NO: 1310408 - DNA, 15 bp, Homo sapiens
aacgtgctgggcagg

SEQ ID NO: 1310409 - DNA, 15 bp, Homo sapiens
caacgtgctgggcag

SEQ ID NO: 1310410 - DNA, 15 bp, Homo sapiens
ccaacgtgctgggca

SEQ ID NO: 1310411 - DNA, 15 bp, Homo sapiens
gccaacgtgctgggc

SEQ ID NO: 1310412 - DNA, 15 bp, Homo sapiens
tgccaacgtgctggg

SEQ ID NO: 1310413 - DNA, 15 bp, Homo sapiens
atgccaacgtgctgg

SEQ ID NO: 1310414 - DNA, 15 bp, Homo sapiens
tatgccaacgtgctg

SEQ ID NO: 1310415 - DNA, 15 bp, Homo sapiens
atatgccaacgtgct

SEQ ID NO: 1310416 - DNA, 15 bp, Homo sapiens
aatatgccaacgtgc

SEQ ID NO: 1310417 - DNA, 15 bp, Homo sapiens
gaatatgccaacgtg

SEQ ID NO: 1310418 - DNA, 15 bp, Homo sapiens
agaatatgccaacgt

SEQ ID NO: 1310419 - DNA, 15 bp, Homo sapiens
gagaatatgccaacg

SEQ ID NO: 1310420 - DNA, 15 bp, Homo sapiens
tgagaatatgccaac

SEQ ID NO: 1310421 - DNA, 15 bp, Homo sapiens
gtgagaatatgccaa

SEQ ID NO: 1310422 - DNA, 15 bp, Homo sapiens
agtgagaatatgcca

SEQ ID NO: 1310423 - DNA, 15 bp, Homo sapiens
aagtgagaatatgcc

SEQ ID NO: 1310424 - DNA, 15 bp, Homo sapiens
aaagtgagaatatgc

SEQ ID NO: 1310425 - DNA, 15 bp, Homo sapiens
taaagtgagaatatg

SEQ ID NO: 1310426 - DNA, 15 bp, Homo sapiens
ataaagtgagaatat

SEQ ID NO: 1310427 - DNA, 15 bp, Homo sapiens
tcataaagtgagaat

SEQ ID NO: 1310428 - DNA, 15 bp, Homo sapiens
ttcataaagtgagaa

SEQ ID NO: 1310429 - DNA, 15 bp, Homo sapiens
gttcataaagtgaga

SEQ ID NO: 1310430 - DNA, 15 bp, Homo sapiens
cgttcataaagtgag

SEQ ID NO: 1310431 - DNA, 15 bp, Homo sapiens
acgttcataaagtga

SEQ ID NO: 1310432 - DNA, 15 bp, Homo sapiens
aacgttcataaagtg

SEQ ID NO: 1310433 - DNA, 15 bp, Homo sapiens
aaacgttcataaagt

SEQ ID NO: 1310434 - DNA, 15 bp, Homo sapiens
aaaacgttcataaag

SEQ ID NO: 1310435 - DNA, 15 bp, Homo sapiens
gaaaacgttcataaa

SEQ ID NO: 1310436 - DNA, 15 bp, Homo sapiens
tgaaaacgttcataa

SEQ ID NO: 1310437 - DNA, 15 bp, Homo sapiens
atgaaaacgttcata

SEQ ID NO: 1310438 - DNA, 15 bp, Homo sapiens
gatgaaaacgttcat

SEQ ID NO: 1310439 - DNA, 15 bp, Homo sapiens
agatgaaaacgttca

SEQ ID NO: 1310440 - DNA, 15 bp, Homo sapiens
cagatgaaaacgttc

SEQ ID NO: 1310441 - DNA, 15 bp, Homo sapiens
ccagatgaaaacgtt

SEQ ID NO: 1310442 - DNA, 15 bp, Homo sapiens
cccagatgaaaacgt

SEQ ID NO: 1310443 - DNA, 15 bp, Homo sapiens
ccccagatgaaaacg

SEQ ID NO: 1310444 - DNA, 15 bp, Homo sapiens
cccccagatgaaaac

SEQ ID NO: 1310445 - DNA, 15 bp, Homo sapiens
gcccccagatgaaaa

SEQ ID NO: 1310446 - DNA, 15 bp, Homo sapiens
agcccccagatgaaa

SEQ ID NO: 1310447 - DNA, 15 bp, Homo sapiens
aagcccccagatgaa

SEQ ID NO: 1310448 - DNA, 15 bp, Homo sapiens
caagcccccagatga

SEQ ID NO: 1310449 - DNA, 15 bp, Homo sapiens
ccaagcccccagatg

SEQ ID NO: 1310450 - DNA, 15 bp, Homo sapiens
gccaagcccccagat

SEQ ID NO: 1310451 - DNA, 15 bp, Homo sapiens
cgccaagcccccaga

SEQ ID NO: 1310452 - DNA, 15 bp, Homo sapiens
tcgccaagcccccag

SEQ ID NO: 1310453 - DNA, 15 bp, Homo sapiens
ttcgccaagccccca

SEQ ID NO: 1310454 - DNA, 15 bp, Homo sapiens
cttcgccaagccccc

SEQ ID NO: 1310455 - DNA, 15 bp, Homo sapiens
ccttcgccaagcccc

SEQ ID NO: 1310456 - DNA, 15 bp, Homo sapiens
tccttcgccaagccc

SEQ ID NO: 1310457 - DNA, 15 bp, Homo sapiens
ttccttcgccaagcc

SEQ ID NO: 1310458 - DNA, 15 bp, Homo sapiens
tttccttcgccaagc

SEQ ID NO: 1310459 - DNA, 15 bp, Homo sapiens
gtttccttcgccaag

SEQ ID NO: 1310460 - DNA, 15 bp, Homo sapiens
tgtttccttcgccaa

SEQ ID NO: 1310461 - DNA, 15 bp, Homo sapiens
atgtttccttcgcca

SEQ ID NO: 1310462 - DNA, 15 bp, Homo sapiens
gatgtttccttcgcc

SEQ ID NO: 1310463 - DNA, 15 bp, Homo sapiens
agatgtttccttcgc

SEQ ID NO: 1310464 - DNA, 15 bp, Homo sapiens
cagatgtttccttcg

SEQ ID NO: 1310465 - DNA, 15 bp, Homo sapiens
tcagatgtttccttc

SEQ ID NO: 1310466 - DNA, 15 bp, Homo sapiens
atcagatgtttcctt

SEQ ID NO: 1310467 - DNA, 15 bp, Homo sapiens
aatcagatgtttcct

SEQ ID NO: 1310468 - DNA, 15 bp, Homo sapiens
gaatcagatgtttcc

SEQ ID NO: 1310469 - DNA, 15 bp, Homo sapiens
agaatcagatgtttc

SEQ ID NO: 1310470 - DNA, 15 bp, Homo sapiens
gagaatcagatgttt

SEQ ID NO: 1310471 - DNA, 15 bp, Homo sapiens
agagaatcagatgtt

SEQ ID NO: 1310472 - DNA, 15 bp, Homo sapiens
aagagaatcagatgt

SEQ ID NO: 1310473 - DNA, 15 bp, Homo sapiens
aaagagaatcagatg

SEQ ID NO: 1310474 - DNA, 15 bp, Homo sapiens
aaaagagaatcagat

SEQ ID NO: 1310475 - DNA, 15 bp, Homo sapiens
caaaagagaatcaga

SEQ ID NO: 1310476 - DNA, 15 bp, Homo sapiens
acaaaagagaatcag

SEQ ID NO: 1310477 - DNA, 15 bp, Homo sapiens
cacaaaagagaatca

SEQ ID NO: 1310478 - DNA, 15 bp, Homo sapiens
tcacaaaagagaatc

SEQ ID NO: 1310479 - DNA, 15 bp, Homo sapiens
ctcacaaaagagaat

SEQ ID NO: 1310480 - DNA, 15 bp, Homo sapiens
tctcacaaaagagaa

SEQ ID NO: 1310481 - DNA, 15 bp, Homo sapiens
atctcacaaaagaga

SEQ ID NO: 1310482 - DNA, 15 bp, Homo sapiens
aatctcacaaaagag

SEQ ID NO: 1310483 - DNA, 15 bp, Homo sapiens
gaatctcacaaaaga

SEQ ID NO: 1310484 - DNA, 15 bp, Homo sapiens
agaatctcacaaaag

SEQ ID NO: 1310485 - DNA, 15 bp, Homo sapiens
aagaatctcacaaaa

SEQ ID NO: 1310486 - DNA, 15 bp, Homo sapiens
gaagaatctcacaaa

SEQ ID NO: 1310487 - DNA, 15 bp, Homo sapiens
tgaagaatctcacaa

SEQ ID NO: 1310488 - DNA, 15 bp, Homo sapiens
ctgaagaatctcaca

SEQ ID NO: 1310489 - DNA, 15 bp, Homo sapiens
actgaagaatctcac

SEQ ID NO: 1310490 - DNA, 15 bp, Homo sapiens
tactgaagaatctca

SEQ ID NO: 1310491 - DNA, 15 bp, Homo sapiens
gtactgaagaatctc

SEQ ID NO: 1310492 - DNA, 15 bp, Homo sapiens
tgtactgaagaatct

SEQ ID NO: 1310493 - DNA, 15 bp, Homo sapiens
ctgtactgaagaatc

SEQ ID NO: 1310494 - DNA, 15 bp, Homo sapiens
tctgtactgaagaat

SEQ ID NO: 1310495 - DNA, 15 bp, Homo sapiens
ctctgtactgaagaa

SEQ ID NO: 1310496 - DNA, 15 bp, Homo sapiens
tctctgtactgaaga

SEQ ID NO: 1310497 - DNA, 15 bp, Homo sapiens
gtctctgtactgaag

SEQ ID NO: 1310498 - DNA, 15 bp, Homo sapiens
ggtctctgtactgaa

SEQ ID NO: 1310499 - DNA, 15 bp, Homo sapiens
gggtctctgtactga

SEQ ID NO: 1310500 - DNA, 15 bp, Homo sapiens
tgggtctctgtactg

SEQ ID NO: 1310501 - DNA, 15 bp, Homo sapiens
atgggtctctgtact

SEQ ID NO: 1310502 - DNA, 15 bp, Homo sapiens
aatgggtctctgtac

SEQ ID NO: 1310503 - DNA, 15 bp, Homo sapiens
gaatgggtctctgta

SEQ ID NO: 1310504 - DNA, 15 bp, Homo sapiens
ggaatgggtctctgt

SEQ ID NO: 1310505 - DNA, 15 bp, Homo sapiens
aggaatgggtctctg

SEQ ID NO: 1310506 - DNA, 15 bp, Homo sapiens
gaggaatgggtctct

SEQ ID NO: 1310507 - DNA, 15 bp, Homo sapiens
aagaggaatgggtct

SEQ ID NO: 1310508 - DNA, 15 bp, Homo sapiens
aaagaggaatgggtc

SEQ ID NO: 1310509 - DNA, 15 bp, Homo sapiens
gaaagaggaatgggt

SEQ ID NO: 1310510 - DNA, 15 bp, Homo sapiens
ggaaagaggaatggg

SEQ ID NO: 1310511 - DNA, 15 bp, Homo sapiens
gggaaagaggaatgg

SEQ ID NO: 1310512 - DNA, 15 bp, Homo sapiens
tgggaaagaggaatg

SEQ ID NO: 1310513 - DNA, 15 bp, Homo sapiens
ctgggaaagaggaat

SEQ ID NO: 1310514 - DNA, 15 bp, Homo sapiens
tctgggaaagaggaa

SEQ ID NO: 1310515 - DNA, 15 bp, Homo sapiens
ttctgggaaagagga

SEQ ID NO: 1310516 - DNA, 15 bp, Homo sapiens
tttctgggaaagagg

SEQ ID NO: 1310517 - DNA, 15 bp, Homo sapiens
ttttctgggaaagag

SEQ ID NO: 1310518 - DNA, 15 bp, Homo sapiens
tttttctgggaaaga

SEQ ID NO: 1310519 - DNA, 15 bp, Homo sapiens
gtttttctgggaaag

SEQ ID NO: 1310520 - DNA, 15 bp, Homo sapiens
tgtttttctgggaaa

SEQ ID NO: 1310521 - DNA, 15 bp, Homo sapiens
gtgtttttctgggaa

SEQ ID NO: 1310522 - DNA, 15 bp, Homo sapiens
tgtgtttttctggga

SEQ ID NO: 1310523 - DNA, 15 bp, Homo sapiens
ctgtgtttttctggg

SEQ ID NO: 1310524 - DNA, 15 bp, Homo sapiens
actgtgtttttctgg

SEQ ID NO: 1310525 - DNA, 15 bp, Homo sapiens
cactgtgtttttctg

SEQ ID NO: 1310526 - DNA, 15 bp, Homo sapiens
tcactgtgtttttct

SEQ ID NO: 1310527 - DNA, 15 bp, Homo sapiens
atcactgtgtttttc

SEQ ID NO: 1310528 - DNA, 15 bp, Homo sapiens
aatcactgtgttttt

SEQ ID NO: 1310529 - DNA, 15 bp, Homo sapiens
gaatcactgtgtttt

SEQ ID NO: 1310530 - DNA, 15 bp, Homo sapiens
ggaatcactgtgttt

SEQ ID NO: 1310531 - DNA, 15 bp, Homo sapiens
aggaatcactgtgtt

SEQ ID NO: 1310532 - DNA, 15 bp, Homo sapiens
gaggaatcactgtgt

SEQ ID NO: 1310533 - DNA, 15 bp, Homo sapiens
tgaggaatcactgtg

SEQ ID NO: 1310534 - DNA, 15 bp, Homo sapiens
atgaggaatcactgt

SEQ ID NO: 1310535 - DNA, 15 bp, Homo sapiens
tatgaggaatcactg

SEQ ID NO: 1310536 - DNA, 15 bp, Homo sapiens
ttatgaggaatcact

SEQ ID NO: 1310537 - DNA, 15 bp, Homo sapiens
tttatgaggaatcac

SEQ ID NO: 1310538 - DNA, 15 bp, Homo sapiens
ttttatgaggaatca

SEQ ID NO: 1310539 - DNA, 15 bp, Homo sapiens
attttatgaggaatc

SEQ ID NO: 1310540 - DNA, 15 bp, Homo sapiens
cattttatgaggaat

SEQ ID NO: 1310541 - DNA, 15 bp, Homo sapiens
tcattttatgaggaa

SEQ ID NO: 1310542 - DNA, 15 bp, Homo sapiens
ttcattttatgagga

SEQ ID NO: 1310543 - DNA, 15 bp, Homo sapiens
tttcattttatgagg

SEQ ID NO: 1310544 - DNA, 15 bp, Homo sapiens
ctttcattttatgag

SEQ ID NO: 1310545 - DNA, 15 bp, Homo sapiens
cctttcattttatga

SEQ ID NO: 1310546 - DNA, 15 bp, Homo sapiens
tcctttcattttatg

SEQ ID NO: 1310547 - DNA, 15 bp, Homo sapiens
atcctttcattttat

SEQ ID NO: 1310548 - DNA, 15 bp, Homo sapiens
aatcctttcatttta

SEQ ID NO: 1310549 - DNA, 15 bp, Homo sapiens
aaatcctttcatttt

SEQ ID NO: 1310550 - DNA, 15 bp, Homo sapiens
gaaatcctttcattt

SEQ ID NO: 1310551 - DNA, 15 bp, Homo sapiens
agaaatcctttcatt

SEQ ID NO: 1310552 - DNA, 15 bp, Homo sapiens
cagaaatcctttcat

SEQ ID NO: 1310553 - DNA, 15 bp, Homo sapiens
tcagaaatcctttca

SEQ ID NO: 1310554 - DNA, 15 bp, Homo sapiens
ttcagaaatcctttc

SEQ ID NO: 1310555 - DNA, 15 bp, Homo sapiens
cttcagaaatccttt

SEQ ID NO: 1310556 - DNA, 15 bp, Homo sapiens
gcttcagaaatcctt

SEQ ID NO: 1310557 - DNA, 15 bp, Homo sapiens
ggcttcagaaatcct

SEQ ID NO: 1310558 - DNA, 15 bp, Homo sapiens
gggcttcagaaatcc

SEQ ID NO: 1310559 - DNA, 15 bp, Homo sapiens
tgggcttcagaaatc

SEQ ID NO: 1310560 - DNA, 15 bp, Homo sapiens
ttgggcttcagaaat

SEQ ID NO: 1310561 - DNA, 15 bp, Homo sapiens
gttgggcttcagaaa

SEQ ID NO: 1310562 - DNA, 15 bp, Homo sapiens
tgttgggcttcagaa

SEQ ID NO: 1310563 - DNA, 15 bp, Homo sapiens
ctgttgggcttcaga

SEQ ID NO: 1310564 - DNA, 15 bp, Homo sapiens
tctgttgggcttcag

SEQ ID NO: 1310565 - DNA, 15 bp, Homo sapiens
ttctgttgggcttca

SEQ ID NO: 1310566 - DNA, 15 bp, Homo sapiens
tttctgttgggcttc

SEQ ID NO: 1310567 - DNA, 15 bp, Homo sapiens
ctttctgttgggctt

SEQ ID NO: 1310568 - DNA, 15 bp, Homo sapiens
actttctgttgggct

SEQ ID NO: 1310569 - DNA, 15 bp, Homo sapiens
cactttctgttgggc

SEQ ID NO: 1310570 - DNA, 15 bp, Homo sapiens
ccactttctgttggg

SEQ ID NO: 1310571 - DNA, 15 bp, Homo sapiens
cccactttctgttgg

SEQ ID NO: 1310572 - DNA, 15 bp, Homo sapiens
ccccactttctgttg

SEQ ID NO: 1310573 - DNA, 15 bp, Homo sapiens
tccccactttctgtt

SEQ ID NO: 1310574 - DNA, 15 bp, Homo sapiens
atccccactttctgt

SEQ ID NO: 1310575 - DNA, 15 bp, Homo sapiens
tatccccactttctg

SEQ ID NO: 1310576 - DNA, 15 bp, Homo sapiens
gtatccccactttct

SEQ ID NO: 1310577 - DNA, 15 bp, Homo sapiens
tgtatccccactttc

SEQ ID NO: 1310578 - DNA, 15 bp, Homo sapiens
ctgtatccccacttt

SEQ ID NO: 1310579 - DNA, 15 bp, Homo sapiens
tctgtatccccactt

SEQ ID NO: 1310580 - DNA, 15 bp, Homo sapiens
ctctgtatccccact

SEQ ID NO: 1310581 - DNA, 15 bp, Homo sapiens
tctctgtatccccac

SEQ ID NO: 1310582 - DNA, 15 bp, Homo sapiens
atctctgtatcccca

SEQ ID NO: 1310583 - DNA, 15 bp, Homo sapiens
gatctctgtatcccc

SEQ ID NO: 1310584 - DNA, 15 bp, Homo sapiens
ggatctctgtatccc

SEQ ID NO: 1310585 - DNA, 15 bp, Homo sapiens
tggatctctgtatcc

SEQ ID NO: 1310586 - DNA, 15 bp, Homo sapiens
atggatctctgtatc

SEQ ID NO: 1310587 - DNA, 15 bp, Homo sapiens
aatggatctctgtat

SEQ ID NO: 1310588 - DNA, 15 bp, Homo sapiens
gaatggatctctgta

SEQ ID NO: 1310589 - DNA, 15 bp, Homo sapiens
tgaatggatctctgt

SEQ ID NO: 1310590 - DNA, 15 bp, Homo sapiens
gtgaatggatctctg

SEQ ID NO: 1310591 - DNA, 15 bp, Homo sapiens
tgtgaatggatctct

SEQ ID NO: 1310592 - DNA, 15 bp, Homo sapiens
ctgtgaatggatctc

SEQ ID NO: 1310593 - DNA, 15 bp, Homo sapiens
tctgtgaatggatct

SEQ ID NO: 1310594 - DNA, 15 bp, Homo sapiens
ctctgtgaatggatc

SEQ ID NO: 1310595 - DNA, 15 bp, Homo sapiens
tctctgtgaatggat

SEQ ID NO: 1310596 - DNA, 15 bp, Homo sapiens
gtctctgtgaatgga

SEQ ID NO: 1310597 - DNA, 15 bp, Homo sapiens
tgtctctgtgaatgg

SEQ ID NO: 1310598 - DNA, 15 bp, Homo sapiens
ctgtctctgtgaatg

SEQ ID NO: 1310599 - DNA, 15 bp, Homo sapiens
tctgtctctgtgaat

SEQ ID NO: 1310600 - DNA, 15 bp, Homo sapiens
ttctgtctctgtgaa

SEQ ID NO: 1310601 - DNA, 15 bp, Homo sapiens
cttctgtctctgtga

SEQ ID NO: 1310602 - DNA, 15 bp, Homo sapiens
tcttctgtctctgtg

SEQ ID NO: 1310603 - DNA, 15 bp, Homo sapiens
ctcttctgtctctgt

SEQ ID NO: 1310604 - DNA, 15 bp, Homo sapiens
tctcttctgtctctg

SEQ ID NO: 1310605 - DNA, 15 bp, Homo sapiens
ttctcttctgtctct

SEQ ID NO: 1310606 - DNA, 15 bp, Homo sapiens
tttctcttctgtctc

SEQ ID NO: 1310607 - DNA, 15 bp, Homo sapiens
ttttctcttctgtct

SEQ ID NO: 1310608 - DNA, 15 bp, Homo sapiens
attttctcttctgtc

SEQ ID NO: 1310609 - DNA, 15 bp, Homo sapiens
gattttctcttctgt

SEQ ID NO: 1310610 - DNA, 15 bp, Homo sapiens
ggattttctcttctg

SEQ ID NO: 1310611 - DNA, 15 bp, Homo sapiens
aggattttctcttct

SEQ ID NO: 1310612 - DNA, 15 bp, Homo sapiens
taggattttctcttc

SEQ ID NO: 1310613 - DNA, 15 bp, Homo sapiens
ttaggattttctctt

SEQ ID NO: 1310614 - DNA, 15 bp, Homo sapiens
cttaggattttctct

SEQ ID NO: 1310615 - DNA, 15 bp, Homo sapiens
tcttaggattttctc

SEQ ID NO: 1310616 - DNA, 15 bp, Homo sapiens
ttcttaggattttct

SEQ ID NO: 1310617 - DNA, 15 bp, Homo sapiens
tttcttaggattttc

SEQ ID NO: 1310618 - DNA, 15 bp, Homo sapiens
atttcttaggatttt

SEQ ID NO: 1310619 - DNA, 15 bp, Homo sapiens
gatttcttaggattt

SEQ ID NO: 1310620 - DNA, 15 bp, Homo sapiens
cgatttcttaggatt

SEQ ID NO: 1310621 - DNA, 15 bp, Homo sapiens
ccgatttcttaggat

SEQ ID NO: 1310622 - DNA, 15 bp, Homo sapiens
gccgatttcttagga

SEQ ID NO: 1310623 - DNA, 15 bp, Homo sapiens
agccgatttcttagg

SEQ ID NO: 1310624 - DNA, 15 bp, Homo sapiens
aagccgatttcttag

SEQ ID NO: 1310625 - DNA, 15 bp, Homo sapiens
gaagccgatttctta

SEQ ID NO: 1310626 - DNA, 15 bp, Homo sapiens
ggaagccgatttctt

SEQ ID NO: 1310627 - DNA, 15 bp, Homo sapiens
aggaagccgatttct

SEQ ID NO: 1310628 - DNA, 15 bp, Homo sapiens
caggaagccgatttc

SEQ ID NO: 1310629 - DNA, 15 bp, Homo sapiens
ccaggaagccgattt

SEQ ID NO: 1310630 - DNA, 15 bp, Homo sapiens
cccaggaagccgatt

SEQ ID NO: 1310631 - DNA, 15 bp, Homo sapiens
ccccaggaagccgat

SEQ ID NO: 1310632 - DNA, 15 bp, Homo sapiens
gccccaggaagccga

SEQ ID NO: 1310633 - DNA, 15 bp, Homo sapiens
ggccccaggaagccg

SEQ ID NO: 1310634 - DNA, 15 bp, Homo sapiens
tggccccaggaagcc

SEQ ID NO: 1310635 - DNA, 15 bp, Homo sapiens
atggccccaggaagc

SEQ ID NO: 1310636 - DNA, 15 bp, Homo sapiens
gatggccccaggaag

SEQ ID NO: 1310637 - DNA, 15 bp, Homo sapiens
ggatggccccaggaa

SEQ ID NO: 1310638 - DNA, 15 bp, Homo sapiens
aggatggccccagga

SEQ ID NO: 1310639 - DNA, 15 bp, Homo sapiens
taggatggccccagg

SEQ ID NO: 1310640 - DNA, 15 bp, Homo sapiens
ctaggatggccccag

SEQ ID NO: 1310641 - DNA, 15 bp, Homo sapiens
cctaggatggcccca

SEQ ID NO: 1310642 - DNA, 15 bp, Homo sapiens
gcctaggatggcccc

SEQ ID NO: 1310643 - DNA, 15 bp, Homo sapiens
ggcctaggatggccc

SEQ ID NO: 1310644 - DNA, 15 bp, Homo sapiens
aggcctaggatggcc

SEQ ID NO: 1310645 - DNA, 15 bp, Homo sapiens
gaggcctaggatggc

SEQ ID NO: 1310646 - DNA, 15 bp, Homo sapiens
agaggcctaggatgg

SEQ ID NO: 1310647 - DNA, 15 bp, Homo sapiens
gagaggcctaggatg

SEQ ID NO: 1310648 - DNA, 15 bp, Homo sapiens
tgagaggcctaggat

SEQ ID NO: 1310649 - DNA, 15 bp, Homo sapiens
gtgagaggcctagga

SEQ ID NO: 1310650 - DNA, 15 bp, Homo sapiens
tgtgagaggcctagg

SEQ ID NO: 1310651 - DNA, 15 bp, Homo sapiens
ctgtgagaggcctag

SEQ ID NO: 1310652 - DNA, 15 bp, Homo sapiens
tctgtgagaggccta

SEQ ID NO: 1310653 - DNA, 15 bp, Homo sapiens
ctctgtgagaggcct

SEQ ID NO: 1310654 - DNA, 15 bp, Homo sapiens
tctctgtgagaggcc

SEQ ID NO: 1310655 - DNA, 15 bp, Homo sapiens
atctctgtgagaggc

SEQ ID NO: 1310656 - DNA, 15 bp, Homo sapiens
catctctgtgagagg

SEQ ID NO: 1310657 - DNA, 15 bp, Homo sapiens
acatctctgtgagag

SEQ ID NO: 1310658 - DNA, 15 bp, Homo sapiens
aacatctctgtgaga

SEQ ID NO: 1310659 - DNA, 15 bp, Homo sapiens
aaacatctctgtgag

SEQ ID NO: 1310660 - DNA, 15 bp, Homo sapiens
aaaacatctctgtga

SEQ ID NO: 1310661 - DNA, 15 bp, Homo sapiens
aaaaacatctctgtg

SEQ ID NO: 1310662 - DNA, 15 bp, Homo sapiens
taaaaacatctctgt

SEQ ID NO: 1310663 - DNA, 15 bp, Homo sapiens
ataaaaacatctctg

SEQ ID NO: 1310664 - DNA, 15 bp, Homo sapiens
tataaaaacatctct

SEQ ID NO: 1310665 - DNA, 15 bp, Homo sapiens
ttataaaaacatctc

SEQ ID NO: 1310666 - DNA, 15 bp, Homo sapiens
attataaaaacatct

SEQ ID NO: 1310667 - DNA, 15 bp, Homo sapiens
cattataaaaacatc

SEQ ID NO: 1310668 - DNA, 15 bp, Homo sapiens
tcattataaaaacat

SEQ ID NO: 1310669 - DNA, 15 bp, Homo sapiens
atcattataaaaaca

SEQ ID NO: 1310670 - DNA, 15 bp, Homo sapiens
tatcattataaaaac

SEQ ID NO: 1310671 - DNA, 15 bp, Homo sapiens
ctatcattataaaaa

SEQ ID NO: 1310672 - DNA, 15 bp, Homo sapiens
cctatcattataaaa

SEQ ID NO: 1310673 - DNA, 15 bp, Homo sapiens
tcctatcattataaa

SEQ ID NO: 1310674 - DNA, 15 bp, Homo sapiens
ttcctatcattataa

SEQ ID NO: 1310675 - DNA, 15 bp, Homo sapiens
attcctatcattata

SEQ ID NO: 1310676 - DNA, 15 bp, Homo sapiens
tattcctatcattat

SEQ ID NO: 1310677 - DNA, 15 bp, Homo sapiens
ttattcctatcatta

SEQ ID NO: 1310678 - DNA, 15 bp, Homo sapiens
gttattcctatcatt

SEQ ID NO: 1310679 - DNA, 15 bp, Homo sapiens
tgttattcctatcat

SEQ ID NO: 1310680 - DNA, 15 bp, Homo sapiens
atgttattcctatca

SEQ ID NO: 1310681 - DNA, 15 bp, Homo sapiens
gatgttattcctatc

SEQ ID NO: 1310682 - DNA, 15 bp, Homo sapiens
agatgttattcctat

SEQ ID NO: 1310683 - DNA, 15 bp, Homo sapiens
gagatgttattccta

SEQ ID NO: 1310684 - DNA, 15 bp, Homo sapiens
agagatgttattcct

SEQ ID NO: 1310685 - DNA, 15 bp, Homo sapiens
tagagatgttattcc

SEQ ID NO: 1310686 - DNA, 15 bp, Homo sapiens
ctagagatgttattc

SEQ ID NO: 1310687 - DNA, 15 bp, Homo sapiens
tctagagatgttatt

SEQ ID NO: 1310688 - DNA, 15 bp, Homo sapiens
ctctagagatgttat

SEQ ID NO: 1310689 - DNA, 15 bp, Homo sapiens
tctctagagatgtta

SEQ ID NO: 1310690 - DNA, 15 bp, Homo sapiens
ttctctagagatgtt

SEQ ID NO: 1310691 - DNA, 15 bp, Homo sapiens
cttctctagagatgt

SEQ ID NO: 1310692 - DNA, 15 bp, Homo sapiens
acttctctagagatg

SEQ ID NO: 1310693 - DNA, 15 bp, Homo sapiens
aacttctctagagat

SEQ ID NO: 1310694 - DNA, 15 bp, Homo sapiens
gaacttctctagaga

SEQ ID NO: 1310695 - DNA, 15 bp, Homo sapiens
tgaacttctctagag

SEQ ID NO: 1310696 - DNA, 15 bp, Homo sapiens
ttgaacttctctaga

SEQ ID NO: 1310697 - DNA, 15 bp, Homo sapiens
tttgaacttctctag

SEQ ID NO: 1310698 - DNA, 15 bp, Homo sapiens
ctttgaacttctcta

SEQ ID NO: 1310699 - DNA, 15 bp, Homo sapiens
tctttgaacttctct

SEQ ID NO: 1310700 - DNA, 15 bp, Homo sapiens
atctttgaacttctc

SEQ ID NO: 1310701 - DNA, 15 bp, Homo sapiens
tatctttgaacttct

SEQ ID NO: 1310702 - DNA, 15 bp, Homo sapiens
ctatctttgaacttc

SEQ ID NO: 1310703 - DNA, 15 bp, Homo sapiens
cctatctttgaactt

SEQ ID NO: 1310704 - DNA, 15 bp, Homo sapiens
tcctatctttgaact

SEQ ID NO: 1310705 - DNA, 15 bp, Homo sapiens
gtcctatctttgaac

SEQ ID NO: 1310706 - DNA, 15 bp, Homo sapiens
tgtcctatctttgaa

SEQ ID NO: 1310707 - DNA, 15 bp, Homo sapiens
ttgtcctatctttga

SEQ ID NO: 1310708 - DNA, 15 bp, Homo sapiens
attgtcctatctttg

SEQ ID NO: 1310709 - DNA, 15 bp, Homo sapiens
tattgtcctatcttt

SEQ ID NO: 1310710 - DNA, 15 bp, Homo sapiens
ttattgtcctatctt

SEQ ID NO: 1310711 - DNA, 15 bp, Homo sapiens
tttattgtcctatct

SEQ ID NO: 1310712 - DNA, 15 bp, Homo sapiens
ttttattgtcctatc

SEQ ID NO: 1310713 - DNA, 15 bp, Homo sapiens
attttattgtcctat

SEQ ID NO: 1310714 - DNA, 15 bp, Homo sapiens
aattttattgtccta

SEQ ID NO: 1310715 - DNA, 15 bp, Homo sapiens
taattttattgtcct

SEQ ID NO: 1310716 - DNA, 15 bp, Homo sapiens
ttaattttattgtcc

SEQ ID NO: 1310717 - DNA, 15 bp, Homo sapiens
tttaattttattgtc

SEQ ID NO: 1310718 - DNA, 15 bp, Homo sapiens
ttttaattttattgt

SEQ ID NO: 1310719 - DNA, 15 bp, Homo sapiens
cttttaattttattg

SEQ ID NO: 1310720 - DNA, 15 bp, Homo sapiens
tcttttaattttatt

SEQ ID NO: 1310721 - DNA, 15 bp, Homo sapiens
ttcttttaattttat

SEQ ID NO: 1310722 - DNA, 15 bp, Homo sapiens
cttcttttaatttta

SEQ ID NO: 1310723 - DNA, 15 bp, Homo sapiens
ccttcttttaatttt

SEQ ID NO: 1310724 - DNA, 15 bp, Homo sapiens
cccttcttttaattt

SEQ ID NO: 1310725 - DNA, 15 bp, Homo sapiens
gcccttcttttaatt

SEQ ID NO: 1310726 - DNA, 15 bp, Homo sapiens
ggcccttcttttaat

SEQ ID NO: 1310727 - DNA, 15 bp, Homo sapiens
aggcccttcttttaa

SEQ ID NO: 1310728 - DNA, 15 bp, Homo sapiens
caggcccttctttta

SEQ ID NO: 1310729 - DNA, 15 bp, Homo sapiens
gcaggcccttctttt

SEQ ID NO: 1310730 - DNA, 15 bp, Homo sapiens
tgcaggcccttcttt

SEQ ID NO: 1310731 - DNA, 15 bp, Homo sapiens
ctgcaggcccttctt

SEQ ID NO: 1310732 - DNA, 15 bp, Homo sapiens
cctgcaggcccttct

SEQ ID NO: 1310733 - DNA, 15 bp, Homo sapiens
tcctgcaggcccttc

SEQ ID NO: 1310734 - DNA, 15 bp, Homo sapiens
ctcctgcaggccctt

SEQ ID NO: 1310735 - DNA, 15 bp, Homo sapiens
cctcctgcaggccct

SEQ ID NO: 1310736 - DNA, 15 bp, Homo sapiens
tcctcctgcaggccc

SEQ ID NO: 1310737 - DNA, 15 bp, Homo sapiens
ttcctcctgcaggcc

SEQ ID NO: 1310738 - DNA, 15 bp, Homo sapiens
tgcttcctcctgcag

SEQ ID NO: 1310739 - DNA, 15 bp, Homo sapiens
ttgcttcctcctgca

SEQ ID NO: 1310740 - DNA, 15 bp, Homo sapiens
cttgcttcctcctgc

SEQ ID NO: 1310741 - DNA, 15 bp, Homo sapiens
ccttgcttcctcctg

SEQ ID NO: 1310742 - DNA, 15 bp, Homo sapiens
tccttgcttcctcct

SEQ ID NO: 1310743 - DNA, 15 bp, Homo sapiens
ctccttgcttcctcc

SEQ ID NO: 1310744 - DNA, 15 bp, Homo sapiens
tctccttgcttcctc

SEQ ID NO: 1310745 - DNA, 15 bp, Homo sapiens
ttctccttgcttcct

SEQ ID NO: 1310746 - DNA, 15 bp, Homo sapiens
tttctccttgcttcc

SEQ ID NO: 1310747 - DNA, 15 bp, Homo sapiens
ctttctccttgcttc

SEQ ID NO: 1310748 - DNA, 15 bp, Homo sapiens
tctttctccttgctt

SEQ ID NO: 1310749 - DNA, 15 bp, Homo sapiens
gtctttctccttgct

SEQ ID NO: 1310750 - DNA, 15 bp, Homo sapiens
tgtctttctccttgc

SEQ ID NO: 1310751 - DNA, 15 bp, Homo sapiens
gtgtctttctccttg

SEQ ID NO: 1310752 - DNA, 15 bp, Homo sapiens
agtgtctttctcctt

SEQ ID NO: 1310753 - DNA, 15 bp, Homo sapiens
aagtgtctttctcct

SEQ ID NO: 1310754 - DNA, 15 bp, Homo sapiens
gaagtgtctttctcc

SEQ ID NO: 1310755 - DNA, 15 bp, Homo sapiens
tgaagtgtctttctc

SEQ ID NO: 1310756 - DNA, 15 bp, Homo sapiens
gtgaagtgtctttct

SEQ ID NO: 1310757 - DNA, 15 bp, Homo sapiens
ggtgaagtgtctttc

SEQ ID NO: 1310758 - DNA, 15 bp, Homo sapiens
gggtgaagtgtcttt

SEQ ID NO: 1310759 - DNA, 15 bp, Homo sapiens
ggggtgaagtgtctt

SEQ ID NO: 1310760 - DNA, 15 bp, Homo sapiens
tggggtgaagtgtct

SEQ ID NO: 1310761 - DNA, 15 bp, Homo sapiens
gtggggtgaagtgtc

SEQ ID NO: 1310762 - DNA, 15 bp, Homo sapiens
agtggggtgaagtgt

SEQ ID NO: 1310763 - DNA, 15 bp, Homo sapiens
cagtggggtgaagtg

SEQ ID NO: 1310764 - DNA, 15 bp, Homo sapiens
tcagtggggtgaagt

SEQ ID NO: 1310765 - DNA, 15 bp, Homo sapiens
ctcagtggggtgaag

SEQ ID NO: 1310766 - DNA, 15 bp, Homo sapiens
gctcagtggggtgaa

SEQ ID NO: 1310767 - DNA, 15 bp, Homo sapiens
tgctcagtggggtga

SEQ ID NO: 1310768 - DNA, 15 bp, Homo sapiens
ctgctcagtggggtg

SEQ ID NO: 1310769 - DNA, 15 bp, Homo sapiens
cctgctcagtggggt

SEQ ID NO: 1310770 - DNA, 15 bp, Homo sapiens
acctgctcagtgggg

SEQ ID NO: 1310771 - DNA, 15 bp, Homo sapiens
tacctgctcagtggg

SEQ ID NO: 1310772 - DNA, 15 bp, Homo sapiens
ttacctgctcagtgg

SEQ ID NO: 1310773 - DNA, 15 bp, Homo sapiens
attacctgctcagtg

SEQ ID NO: 1310774 - DNA, 15 bp, Homo sapiens
aattacctgctcagt

SEQ ID NO: 1310775 - DNA, 15 bp, Homo sapiens
gaattacctgctcag

SEQ ID NO: 1310776 - DNA, 15 bp, Homo sapiens
tgaattacctgctca

SEQ ID NO: 1310777 - DNA, 15 bp, Homo sapiens
atgaattacctgctc

SEQ ID NO: 1310778 - DNA, 15 bp, Homo sapiens
gatgaattacctgct

SEQ ID NO: 1310779 - DNA, 15 bp, Homo sapiens
tgatgaattacctgc

SEQ ID NO: 1310780 - DNA, 15 bp, Homo sapiens
atgatgaattacctg

SEQ ID NO: 1310781 - DNA, 15 bp, Homo sapiens
tatgatgaattacct

SEQ ID NO: 1310782 - DNA, 15 bp, Homo sapiens
atatgatgaattacc

SEQ ID NO: 1310783 - DNA, 15 bp, Homo sapiens
aatatgatgaattac

SEQ ID NO: 1310784 - DNA, 15 bp, Homo sapiens
aaatatgatgaatta

SEQ ID NO: 1310785 - DNA, 15 bp, Homo sapiens
gaaatatgatgaatt

SEQ ID NO: 1310786 - DNA, 15 bp, Homo sapiens
agaaatatgatgaat

SEQ ID NO: 1310787 - DNA, 15 bp, Homo sapiens
aagaaatatgatgaa

SEQ ID NO: 1310788 - DNA, 15 bp, Homo sapiens
aaagaaatatgatga

SEQ ID NO: 1310789 - DNA, 15 bp, Homo sapiens
gaaagaaatatgatg

SEQ ID NO: 1310790 - DNA, 15 bp, Homo sapiens
ggaaagaaatatgat

SEQ ID NO: 1310791 - DNA, 15 bp, Homo sapiens
tggaaagaaatatga

SEQ ID NO: 1310792 - DNA, 15 bp, Homo sapiens
ttggaaagaaatatg

SEQ ID NO: 1310793 - DNA, 15 bp, Homo sapiens
tttggaaagaaatat

SEQ ID NO: 1310794 - DNA, 15 bp, Homo sapiens
atttggaaagaaata

SEQ ID NO: 1310795 - DNA, 15 bp, Homo sapiens
aatttggaaagaaat

SEQ ID NO: 1310796 - DNA, 15 bp, Homo sapiens
aaatttggaaagaaa

SEQ ID NO: 1310797 - DNA, 15 bp, Homo sapiens
taaatttggaaagaa

SEQ ID NO: 1310798 - DNA, 15 bp, Homo sapiens
ataaatttggaaaga

SEQ ID NO: 1310799 - DNA, 15 bp, Homo sapiens
tataaatttggaaag

SEQ ID NO: 1310800 - DNA, 15 bp, Homo sapiens
gtataaatttggaaa

SEQ ID NO: 1310801 - DNA, 15 bp, Homo sapiens
ggtataaatttggaa

SEQ ID NO: 1310802 - DNA, 15 bp, Homo sapiens
gggtataaatttgga

SEQ ID NO: 1310803 - DNA, 15 bp, Homo sapiens
tgggtataaatttgg

SEQ ID NO: 1310804 - DNA, 15 bp, Homo sapiens
ttgggtataaatttg

SEQ ID NO: 1310805 - DNA, 15 bp, Homo sapiens
tttgggtataaattt

SEQ ID NO: 1310806 - DNA, 15 bp, Homo sapiens
ttttgggtataaatt

SEQ ID NO: 1310807 - DNA, 15 bp, Homo sapiens
tttttgggtataaat

SEQ ID NO: 1310808 - DNA, 15 bp, Homo sapiens
atttttgggtataaa

SEQ ID NO: 1310809 - DNA, 15 bp, Homo sapiens
gatttttgggtataa

SEQ ID NO: 1310810 - DNA, 15 bp, Homo sapiens
agatttttgggtata

SEQ ID NO: 1310811 - DNA, 15 bp, Homo sapiens
tagatttttgggtat

SEQ ID NO: 1310812 - DNA, 15 bp, Homo sapiens
ctagatttttgggta

SEQ ID NO: 1310813 - DNA, 15 bp, Homo sapiens
actagatttttgggt

SEQ ID NO: 1310814 - DNA, 15 bp, Homo sapiens
cactagatttttggg

SEQ ID NO: 1310815 - DNA, 15 bp, Homo sapiens
ccactagatttttgg

SEQ ID NO: 1310816 - DNA, 15 bp, Homo sapiens
tccactagatttttg

SEQ ID NO: 1310817 - DNA, 15 bp, Homo sapiens
atccactagattttt

SEQ ID NO: 1310818 - DNA, 15 bp, Homo sapiens
catccactagatttt

SEQ ID NO: 1310819 - DNA, 15 bp, Homo sapiens
acatccactagattt

SEQ ID NO: 1310820 - DNA, 15 bp, Homo sapiens
gacatccactagatt

SEQ ID NO: 1310821 - DNA, 15 bp, Homo sapiens
tgacatccactagat

SEQ ID NO: 1310822 - DNA, 15 bp, Homo sapiens
atgacatccactaga

SEQ ID NO: 1310823 - DNA, 15 bp, Homo sapiens
aatgacatccactag

SEQ ID NO: 1310824 - DNA, 15 bp, Homo sapiens
caatgacatccacta

SEQ ID NO: 1310825 - DNA, 15 bp, Homo sapiens
tcaatgacatccact

SEQ ID NO: 1310826 - DNA, 15 bp, Homo sapiens
atcaatgacatccac

SEQ ID NO: 1310827 - DNA, 15 bp, Homo sapiens
tatcaatgacatcca

SEQ ID NO: 1310828 - DNA, 15 bp, Homo sapiens
atatcaatgacatcc

SEQ ID NO: 1310829 - DNA, 15 bp, Homo sapiens
catatcaatgacatc

SEQ ID NO: 1310830 - DNA, 15 bp, Homo sapiens
ccatatcaatgacat

SEQ ID NO: 1310831 - DNA, 15 bp, Homo sapiens
accatatcaatgaca

SEQ ID NO: 1310832 - DNA, 15 bp, Homo sapiens
caccatatcaatgac

SEQ ID NO: 1310833 - DNA, 15 bp, Homo sapiens
ccaccatatcaatga

SEQ ID NO: 1310834 - DNA, 15 bp, Homo sapiens
tccaccatatcaatg

SEQ ID NO: 1310835 - DNA, 15 bp, Homo sapiens
ttccaccatatcaat

SEQ ID NO: 1310836 - DNA, 15 bp, Homo sapiens
tttccaccatatcaa

SEQ ID NO: 1310837 - DNA, 15 bp, Homo sapiens
atttccaccatatca

SEQ ID NO: 1310838 - DNA, 15 bp, Homo sapiens
tatttccaccatatc

SEQ ID NO: 1310839 - DNA, 15 bp, Homo sapiens
ctatttccaccatat

SEQ ID NO: 1310840 - DNA, 15 bp, Homo sapiens
gctatttccaccata

SEQ ID NO: 1310841 - DNA, 15 bp, Homo sapiens
agctatttccaccat

SEQ ID NO: 1310842 - DNA, 15 bp, Homo sapiens
tagctatttccacca

SEQ ID NO: 1310843 - DNA, 15 bp, Homo sapiens
atagctatttccacc

SEQ ID NO: 1310844 - DNA, 15 bp, Homo sapiens
aatagctatttccac

SEQ ID NO: 1310845 - DNA, 15 bp, Homo sapiens
aaatagctatttcca

SEQ ID NO: 1310846 - DNA, 15 bp, Homo sapiens
taaatagctatttcc

SEQ ID NO: 1310847 - DNA, 15 bp, Homo sapiens
ataaatagctatttc

SEQ ID NO: 1310848 - DNA, 15 bp, Homo sapiens
aataaatagctattt

SEQ ID NO: 1310849 - DNA, 15 bp, Homo sapiens
taataaatagctatt

SEQ ID NO: 1310850 - DNA, 15 bp, Homo sapiens
ataataaatagctat

SEQ ID NO: 1310851 - DNA, 15 bp, Homo sapiens
aataataaatagcta

SEQ ID NO: 1310852 - DNA, 15 bp, Homo sapiens
taataataaatagct

SEQ ID NO: 1310853 - DNA, 15 bp, Homo sapiens
ataataataaatagc

SEQ ID NO: 1310854 - DNA, 15 bp, Homo sapiens
aataataataaatag

SEQ ID NO: 1310855 - DNA, 15 bp, Homo sapiens
gaaaaataataataa

SEQ ID NO: 1310856 - DNA, 15 bp, Homo sapiens
agaaaaataataata

SEQ ID NO: 1310857 - DNA, 15 bp, Homo sapiens
aagaaaaataataat

SEQ ID NO: 1310858 - DNA, 15 bp, Homo sapiens
aaagaaaaataataa

SEQ ID NO: 1310859 - DNA, 15 bp, Homo sapiens
aaaagaaaaataata

SEQ ID NO: 1310860 - DNA, 15 bp, Homo sapiens
aaaaaaagaaaaata

SEQ ID NO: 1310861 - DNA, 15 bp, Homo sapiens
caaaaaaagaaaaat

SEQ ID NO: 1310862 - DNA, 15 bp, Homo sapiens
ctgtctcaaaaaaag

SEQ ID NO: 1310863 - DNA, 15 bp, Homo sapiens
gagactgtctcaaaa

SEQ ID NO: 1310864 - DNA, 15 bp, Homo sapiens
tgagactgtctcaaa

SEQ ID NO: 1310865 - DNA, 15 bp, Homo sapiens
gtgagactgtctcaa

SEQ ID NO: 1310866 - DNA, 15 bp, Homo sapiens
agtgagactgtctca

SEQ ID NO: 1310867 - DNA, 15 bp, Homo sapiens
gagtgagactgtctc

SEQ ID NO: 1310868 - DNA, 15 bp, Homo sapiens
ggagtgagactgtct

SEQ ID NO: 1310869 - DNA, 15 bp, Homo sapiens
cggagtgagactgtc

SEQ ID NO: 1310870 - DNA, 15 bp, Homo sapiens
acggagtgagactgt

SEQ ID NO: 1310871 - DNA, 15 bp, Homo sapiens
aacggagtgagactg

SEQ ID NO: 1310872 - DNA, 15 bp, Homo sapiens
caacggagtgagact

SEQ ID NO: 1310873 - DNA, 15 bp, Homo sapiens
gcaacggagtgagac

SEQ ID NO: 1310874 - DNA, 15 bp, Homo sapiens
ggcaacggagtgaga

SEQ ID NO: 1310875 - DNA, 15 bp, Homo sapiens
gggcaacggagtgag

SEQ ID NO: 1310876 - DNA, 15 bp, Homo sapiens
tgggcaacggagtga

SEQ ID NO: 1310877 - DNA, 15 bp, Homo sapiens
ctgggcaacggagtg

SEQ ID NO: 1310878 - DNA, 15 bp, Homo sapiens
cctgggcaacggagt

SEQ ID NO: 1310879 - DNA, 15 bp, Homo sapiens
gcctgggcaacggag

SEQ ID NO: 1310880 - DNA, 15 bp, Homo sapiens
agcctgggcaacgga

SEQ ID NO: 1310881 - DNA, 15 bp, Homo sapiens
cagcctgggcaacgg

SEQ ID NO: 1310882 - DNA, 15 bp, Homo sapiens
aagatcataccactg

SEQ ID NO: 1310883 - DNA, 15 bp, Homo sapiens
caagatcataccact

SEQ ID NO: 1310884 - DNA, 15 bp, Homo sapiens
ccaagatcataccac

SEQ ID NO: 1310885 - DNA, 15 bp, Homo sapiens
gccaagatcatacca

SEQ ID NO: 1310886 - DNA, 15 bp, Homo sapiens
agccaagatcatacc

SEQ ID NO: 1310887 - DNA, 15 bp, Homo sapiens
gagccaagatcatac

SEQ ID NO: 1310888 - DNA, 15 bp, Homo sapiens
tgagccaagatcata

SEQ ID NO: 1310889 - DNA, 15 bp, Homo sapiens
tagaggttgcagtga

SEQ ID NO: 1310890 - DNA, 15 bp, Homo sapiens
gtagaggttgcagtg

SEQ ID NO: 1310891 - DNA, 15 bp, Homo sapiens
ggtagaggttgcagt

SEQ ID NO: 1310892 - DNA, 15 bp, Homo sapiens
tggtagaggttgcag

SEQ ID NO: 1310893 - DNA, 15 bp, Homo sapiens
gtggtagaggttgca

SEQ ID NO: 1310894 - DNA, 15 bp, Homo sapiens
ggtggtagaggttgc

SEQ ID NO: 1310895 - DNA, 15 bp, Homo sapiens
gggtggtagaggttg

SEQ ID NO: 1310896 - DNA, 15 bp, Homo sapiens
cgggtggtagaggtt

SEQ ID NO: 1310897 - DNA, 15 bp, Homo sapiens
tcgggtggtagaggt

SEQ ID NO: 1310898 - DNA, 15 bp, Homo sapiens
ctcgggtggtagagg

SEQ ID NO: 1310899 - DNA, 15 bp, Homo sapiens
actcgggtggtagag

SEQ ID NO: 1310900 - DNA, 15 bp, Homo sapiens
aactcgggtggtaga

SEQ ID NO: 1310901 - DNA, 15 bp, Homo sapiens
gaactcgggtggtag

SEQ ID NO: 1310902 - DNA, 15 bp, Homo sapiens
tgaactcgggtggta

SEQ ID NO: 1310903 - DNA, 15 bp, Homo sapiens
ttgaactcgggtggt

SEQ ID NO: 1310904 - DNA, 15 bp, Homo sapiens
tttgaactcgggtgg

SEQ ID NO: 1310905 - DNA, 15 bp, Homo sapiens
gtttgaactcgggtg

SEQ ID NO: 1310906 - DNA, 15 bp, Homo sapiens
ggtttgaactcgggt

SEQ ID NO: 1310907 - DNA, 15 bp, Homo sapiens
tggtttgaactcggg

SEQ ID NO: 1310908 - DNA, 15 bp, Homo sapiens
atggtttgaactcgg

SEQ ID NO: 1310909 - DNA, 15 bp, Homo sapiens
aatggtttgaactcg

SEQ ID NO: 1310910 - DNA, 15 bp, Homo sapiens
gaatggtttgaactc

SEQ ID NO: 1310911 - DNA, 15 bp, Homo sapiens
agaatggtttgaact

SEQ ID NO: 1310912 - DNA, 15 bp, Homo sapiens
gagaatggtttgaac

SEQ ID NO: 1310913 - DNA, 15 bp, Homo sapiens
ggagaatggtttgaa

SEQ ID NO: 1310914 - DNA, 15 bp, Homo sapiens
aggagaatggtttga

SEQ ID NO: 1310915 - DNA, 15 bp, Homo sapiens
caggagaatggtttg

SEQ ID NO: 1310916 - DNA, 15 bp, Homo sapiens
gcaggagaatggttt

SEQ ID NO: 1310917 - DNA, 15 bp, Homo sapiens
ggcaggagaatggtt

SEQ ID NO: 1310918 - DNA, 15 bp, Homo sapiens
aacacctgtagtccc

SEQ ID NO: 1310919 - DNA, 15 bp, Homo sapiens
gaacacctgtagtcc

SEQ ID NO: 1310920 - DNA, 15 bp, Homo sapiens
tgaacacctgtagtc

SEQ ID NO: 1310921 - DNA, 15 bp, Homo sapiens
gtgaacacctgtagt

SEQ ID NO: 1310922 - DNA, 15 bp, Homo sapiens
ggtgaacacctgtag

SEQ ID NO: 1310923 - DNA, 15 bp, Homo sapiens
tggtgaacacctgta

SEQ ID NO: 1310924 - DNA, 15 bp, Homo sapiens
gtggtgaacacctgt

SEQ ID NO: 1310925 - DNA, 15 bp, Homo sapiens
ggtggtgaacacctg

SEQ ID NO: 1310926 - DNA, 15 bp, Homo sapiens
tggtggtgaacacct

SEQ ID NO: 1310927 - DNA, 15 bp, Homo sapiens
gtggtggtgaacacc

SEQ ID NO: 1310928 - DNA, 15 bp, Homo sapiens
agtggtggtgaacac

SEQ ID NO: 1310929 - DNA, 15 bp, Homo sapiens
gagtggtggtgaaca

SEQ ID NO: 1310930 - DNA, 15 bp, Homo sapiens
ggagtggtggtgaac

SEQ ID NO: 1310931 - DNA, 15 bp, Homo sapiens
gggagtggtggtgaa

SEQ ID NO: 1310932 - DNA, 15 bp, Homo sapiens
tgggagtggtggtga

SEQ ID NO: 1310933 - DNA, 15 bp, Homo sapiens
ctgggagtggtggtg

SEQ ID NO: 1310934 - DNA, 15 bp, Homo sapiens
gctgggagtggtggt

SEQ ID NO: 1310935 - DNA, 15 bp, Homo sapiens
agctgggagtggtgg

SEQ ID NO: 1310936 - DNA, 15 bp, Homo sapiens
tagctgggagtggtg

SEQ ID NO: 1310937 - DNA, 15 bp, Homo sapiens
ttagctgggagtggt

SEQ ID NO: 1310938 - DNA, 15 bp, Homo sapiens
attagctgggagtgg

SEQ ID NO: 1310939 - DNA, 15 bp, Homo sapiens
aattagctgggagtg

SEQ ID NO: 1310940 - DNA, 15 bp, Homo sapiens
aaattagctgggagt

SEQ ID NO: 1310941 - DNA, 15 bp, Homo sapiens
cactgaaaatacaaa

SEQ ID NO: 1310942 - DNA, 15 bp, Homo sapiens
ccactgaaaatacaa

SEQ ID NO: 1310943 - DNA, 15 bp, Homo sapiens
tccactgaaaataca

SEQ ID NO: 1310944 - DNA, 15 bp, Homo sapiens
ctccactgaaaatac

SEQ ID NO: 1310945 - DNA, 15 bp, Homo sapiens
cctccactgaaaata

SEQ ID NO: 1310946 - DNA, 15 bp, Homo sapiens
acctccactgaaaat

SEQ ID NO: 1310947 - DNA, 15 bp, Homo sapiens
cacctccactgaaaa

SEQ ID NO: 1310948 - DNA, 15 bp, Homo sapiens
ccacctccactgaaa

SEQ ID NO: 1310949 - DNA, 15 bp, Homo sapiens
cccacctccactgaa

SEQ ID NO: 1310950 - DNA, 15 bp, Homo sapiens
ccccacctccactga

SEQ ID NO: 1310951 - DNA, 15 bp, Homo sapiens
accccacctccactg

SEQ ID NO: 1310952 - DNA, 15 bp, Homo sapiens
aaccccacctccact

SEQ ID NO: 1310953 - DNA, 15 bp, Homo sapiens
aaaccccacctccac

SEQ ID NO: 1310954 - DNA, 15 bp, Homo sapiens
gaaaccccacctcca

SEQ ID NO: 1310955 - DNA, 15 bp, Homo sapiens
tgaaaccccacctcc

SEQ ID NO: 1310956 - DNA, 15 bp, Homo sapiens
tggtgaaaccccacc

SEQ ID NO: 1310957 - DNA, 15 bp, Homo sapiens
atggtgaaaccccac

SEQ ID NO: 1310958 - DNA, 15 bp, Homo sapiens
agtcaggagttcgag

SEQ ID NO: 1310959 - DNA, 15 bp, Homo sapiens
aagtcaggagttcga

SEQ ID NO: 1310960 - DNA, 15 bp, Homo sapiens
aaagtcaggagttcg

SEQ ID NO: 1310961 - DNA, 15 bp, Homo sapiens
taaagtcaggagttc

SEQ ID NO: 1310962 - DNA, 15 bp, Homo sapiens
ttaaagtcaggagtt

SEQ ID NO: 1310963 - DNA, 15 bp, Homo sapiens
cttaaagtcaggagt

SEQ ID NO: 1310964 - DNA, 15 bp, Homo sapiens
acttaaagtcaggag

SEQ ID NO: 1310965 - DNA, 15 bp, Homo sapiens
cacttaaagtcagga

SEQ ID NO: 1310966 - DNA, 15 bp, Homo sapiens
tcacttaaagtcagg

SEQ ID NO: 1310967 - DNA, 15 bp, Homo sapiens
atcacttaaagtcag

SEQ ID NO: 1310968 - DNA, 15 bp, Homo sapiens
gatcacttaaagtca

SEQ ID NO: 1310969 - DNA, 15 bp, Homo sapiens
ggatcacttaaagtc

SEQ ID NO: 1310970 - DNA, 15 bp, Homo sapiens
tggatcacttaaagt

SEQ ID NO: 1310971 - DNA, 15 bp, Homo sapiens
gtggatcacttaaag

SEQ ID NO: 1310972 - DNA, 15 bp, Homo sapiens
ggtggatcacttaaa

SEQ ID NO: 1310973 - DNA, 15 bp, Homo sapiens
aggtggatcacttaa

SEQ ID NO: 1310974 - DNA, 15 bp, Homo sapiens
caggtggatcactta

SEQ ID NO: 1310975 - DNA, 15 bp, Homo sapiens
gcaggtggatcactt

SEQ ID NO: 1310976 - DNA, 15 bp, Homo sapiens
ggcaggtggatcact

SEQ ID NO: 1310977 - DNA, 15 bp, Homo sapiens
ggtggctcaagcctg

SEQ ID NO: 1310978 - DNA, 15 bp, Homo sapiens
tggtggctcaagcct

SEQ ID NO: 1310979 - DNA, 15 bp, Homo sapiens
atggtggctcaagcc

SEQ ID NO: 1310980 - DNA, 15 bp, Homo sapiens
tatggtggctcaagc

SEQ ID NO: 1310981 - DNA, 15 bp, Homo sapiens
gtatggtggctcaag

SEQ ID NO: 1310982 - DNA, 15 bp, Homo sapiens
agtatggtggctcaa

SEQ ID NO: 1310983 - DNA, 15 bp, Homo sapiens
gagtatggtggctca

SEQ ID NO: 1310984 - DNA, 15 bp, Homo sapiens
tgagtatggtggctc

SEQ ID NO: 1310985 - DNA, 15 bp, Homo sapiens
ctgagtatggtggct

SEQ ID NO: 1310986 - DNA, 15 bp, Homo sapiens
gctgagtatggtggc

SEQ ID NO: 1310987 - DNA, 15 bp, Homo sapiens
ggctgagtatggtgg

SEQ ID NO: 1310988 - DNA, 15 bp, Homo sapiens
tggctgagtatggtg

SEQ ID NO: 1310989 - DNA, 15 bp, Homo sapiens
ctggctgagtatggt

SEQ ID NO: 1310990 - DNA, 15 bp, Homo sapiens
gctggctgagtatgg

SEQ ID NO: 1310991 - DNA, 15 bp, Homo sapiens
agctggctgagtatg

SEQ ID NO: 1310992 - DNA, 15 bp, Homo sapiens
tagctggctgagtat

SEQ ID NO: 1310993 - DNA, 15 bp, Homo sapiens
atagctggctgagta

SEQ ID NO: 1310994 - DNA, 15 bp, Homo sapiens
aatagctggctgagt

SEQ ID NO: 1310995 - DNA, 15 bp, Homo sapiens
aaatagctggctgag

SEQ ID NO: 1310996 - DNA, 15 bp, Homo sapiens
taaatagctggctga

SEQ ID NO: 1310997 - DNA, 15 bp, Homo sapiens
ataaatagctggctg

SEQ ID NO: 1310998 - DNA, 15 bp, Homo sapiens
aataaatagctggct

SEQ ID NO: 1310999 - DNA, 15 bp, Homo sapiens
taataaatagctggc

SEQ ID NO: 1311000 - DNA, 15 bp, Homo sapiens
ataataaatagctgg

SEQ ID NO: 1311001 - DNA, 15 bp, Homo sapiens
aataataaatagctg

SEQ ID NO: 1311002 - DNA, 15 bp, Homo sapiens
aaataataaatagct

SEQ ID NO: 1311003 - DNA, 15 bp, Homo sapiens
gaaataataaatagc

SEQ ID NO: 1311004 - DNA, 15 bp, Homo sapiens
agaaataataaatag

SEQ ID NO: 1311005 - DNA, 15 bp, Homo sapiens
cagaaataataaata

SEQ ID NO: 1311006 - DNA, 15 bp, Homo sapiens
tcagaaataataaat

SEQ ID NO: 1311007 - DNA, 15 bp, Homo sapiens
ttcagaaataataaa

SEQ ID NO: 1311008 - DNA, 15 bp, Homo sapiens
tttcagaaataataa

SEQ ID NO: 1311009 - DNA, 15 bp, Homo sapiens
gtttcagaaataata

SEQ ID NO: 1311010 - DNA, 15 bp, Homo sapiens
tgtttcagaaataat

SEQ ID NO: 1311011 - DNA, 15 bp, Homo sapiens
ccatgtttcagaaat

SEQ ID NO: 1311012 - DNA, 15 bp, Homo sapiens
cccatgtttcagaaa

SEQ ID NO: 1311013 - DNA, 15 bp, Homo sapiens
gcccatgtttcagaa

SEQ ID NO: 1311014 - DNA, 15 bp, Homo sapiens
tgcccatgtttcaga

SEQ ID NO: 1311015 - DNA, 15 bp, Homo sapiens
ctgcccatgtttcag

SEQ ID NO: 1311016 - DNA, 15 bp, Homo sapiens
cctgcccatgtttca

SEQ ID NO: 1311017 - DNA, 15 bp, Homo sapiens
ccctgcccatgtttc

SEQ ID NO: 1311018 - DNA, 15 bp, Homo sapiens
cccctgcccatgttt

SEQ ID NO: 1311019 - DNA, 15 bp, Homo sapiens
tcccctgcccatgtt

SEQ ID NO: 1311020 - DNA, 15 bp, Homo sapiens
ttcccctgcccatgt

SEQ ID NO: 1311021 - DNA, 15 bp, Homo sapiens
tttcccctgcccatg

SEQ ID NO: 1311022 - DNA, 15 bp, Homo sapiens
gtttcccctgcccat

SEQ ID NO: 1311023 - DNA, 15 bp, Homo sapiens
ggtttcccctgccca

SEQ ID NO: 1311024 - DNA, 15 bp, Homo sapiens
aggtttcccctgccc

SEQ ID NO: 1311025 - DNA, 15 bp, Homo sapiens
taggtttcccctgcc

SEQ ID NO: 1311026 - DNA, 15 bp, Homo sapiens
ttaggtttcccctgc

SEQ ID NO: 1311027 - DNA, 15 bp, Homo sapiens
attaggtttcccctg

SEQ ID NO: 1311028 - DNA, 15 bp, Homo sapiens
aattaggtttcccct

SEQ ID NO: 1311029 - DNA, 15 bp, Homo sapiens
aaattaggtttcccc

SEQ ID NO: 1311030 - DNA, 15 bp, Homo sapiens
aaaattaggtttccc

SEQ ID NO: 1311031 - DNA, 15 bp, Homo sapiens
caaaattaggtttcc

SEQ ID NO: 1311032 - DNA, 15 bp, Homo sapiens
tcaaaattaggtttc

SEQ ID NO: 1311033 - DNA, 15 bp, Homo sapiens
atcaaaattaggttt

SEQ ID NO: 1311034 - DNA, 15 bp, Homo sapiens
tatcaaaattaggtt

SEQ ID NO: 1311035 - DNA, 15 bp, Homo sapiens
ttatcaaaattaggt

SEQ ID NO: 1311036 - DNA, 15 bp, Homo sapiens
tttatcaaaattagg

SEQ ID NO: 1311037 - DNA, 15 bp, Homo sapiens
atttatcaaaattag

SEQ ID NO: 1311038 - DNA, 15 bp, Homo sapiens
tatttatcaaaatta

SEQ ID NO: 1311039 - DNA, 15 bp, Homo sapiens
ttatttatcaaaatt

SEQ ID NO: 1311040 - DNA, 15 bp, Homo sapiens
tttatttatcaaaat

SEQ ID NO: 1311041 - DNA, 15 bp, Homo sapiens
atttatttatcaaaa

SEQ ID NO: 1311042 - DNA, 15 bp, Homo sapiens
catttatttatcaaa

SEQ ID NO: 1311043 - DNA, 15 bp, Homo sapiens
tcatttatttatcaa

SEQ ID NO: 1311044 - DNA, 15 bp, Homo sapiens
aatgtagatctctga

SEQ ID NO: 1311045 - DNA, 15 bp, Homo sapiens
aaatgtagatctctg

SEQ ID NO: 1311046 - DNA, 15 bp, Homo sapiens
gaaatgtagatctct

SEQ ID NO: 1311047 - DNA, 15 bp, Homo sapiens
ggaaatgtagatctc

SEQ ID NO: 1311048 - DNA, 15 bp, Homo sapiens
tggaaatgtagatct

SEQ ID NO: 1311049 - DNA, 15 bp, Homo sapiens
gtggaaatgtagatc

SEQ ID NO: 1311050 - DNA, 15 bp, Homo sapiens
ggtggaaatgtagat

SEQ ID NO: 1311051 - DNA, 15 bp, Homo sapiens
tggtggaaatgtaga

SEQ ID NO: 1311052 - DNA, 15 bp, Homo sapiens
ctggtggaaatgtag

SEQ ID NO: 1311053 - DNA, 15 bp, Homo sapiens
gctggtggaaatgta

SEQ ID NO: 1311054 - DNA, 15 bp, Homo sapiens
agctggtggaaatgt

SEQ ID NO: 1311055 - DNA, 15 bp, Homo sapiens
gagctggtggaaatg

SEQ ID NO: 1311056 - DNA, 15 bp, Homo sapiens
agagctggtggaaat

SEQ ID NO: 1311057 - DNA, 15 bp, Homo sapiens
gagagctggtggaaa

SEQ ID NO: 1311058 - DNA, 15 bp, Homo sapiens
tgagagctggtggaa

SEQ ID NO: 1311059 - DNA, 15 bp, Homo sapiens
ctgagagctggtgga

SEQ ID NO: 1311060 - DNA, 15 bp, Homo sapiens
cctgagagctggtgg

SEQ ID NO: 1311061 - DNA, 15 bp, Homo sapiens
acctgagagctggtg

SEQ ID NO: 1311062 - DNA, 15 bp, Homo sapiens
cacctgagagctggt

SEQ ID NO: 1311063 - DNA, 15 bp, Homo sapiens
acacctgagagctgg

SEQ ID NO: 1311064 - DNA, 15 bp, Homo sapiens
tacacctgagagctg

SEQ ID NO: 1311065 - DNA, 15 bp, Homo sapiens
ctacacctgagagct

SEQ ID NO: 1311066 - DNA, 15 bp, Homo sapiens
actacacctgagagc

SEQ ID NO: 1311067 - DNA, 15 bp, Homo sapiens
cactacacctgagag

SEQ ID NO: 1311068 - DNA, 15 bp, Homo sapiens
tcactacacctgaga

SEQ ID NO: 1311069 - DNA, 15 bp, Homo sapiens
atcactacacctgag

SEQ ID NO: 1311070 - DNA, 15 bp, Homo sapiens
aatcactacacctga

SEQ ID NO: 1311071 - DNA, 15 bp, Homo sapiens
gaatcactacacctg

SEQ ID NO: 1311072 - DNA, 15 bp, Homo sapiens
agaatcactacacct

SEQ ID NO: 1311073 - DNA, 15 bp, Homo sapiens
gagaatcactacacc

SEQ ID NO: 1311074 - DNA, 15 bp, Homo sapiens
ggagaatcactacac

SEQ ID NO: 1311075 - DNA, 15 bp, Homo sapiens
aggagaatcactaca

SEQ ID NO: 1311076 - DNA, 15 bp, Homo sapiens
caggagaatcactac

SEQ ID NO: 1311077 - DNA, 15 bp, Homo sapiens
gcaggagaatcacta

SEQ ID NO: 1311078 - DNA, 15 bp, Homo sapiens
gagcaggagaatcac

SEQ ID NO: 1311079 - DNA, 15 bp, Homo sapiens
agagcaggagaatca

SEQ ID NO: 1311080 - DNA, 15 bp, Homo sapiens
cagagcaggagaatc

SEQ ID NO: 1311081 - DNA, 15 bp, Homo sapiens
acagagcaggagaat

SEQ ID NO: 1311082 - DNA, 15 bp, Homo sapiens
cacagagcaggagaa

SEQ ID NO: 1311083 - DNA, 15 bp, Homo sapiens
ccacagagcaggaga

SEQ ID NO: 1311084 - DNA, 15 bp, Homo sapiens
tccacagagcaggag

SEQ ID NO: 1311085 - DNA, 15 bp, Homo sapiens
gtccacagagcagga

SEQ ID NO: 1311086 - DNA, 15 bp, Homo sapiens
ggtccacagagcagg

SEQ ID NO: 1311087 - DNA, 15 bp, Homo sapiens
tggtccacagagcag

SEQ ID NO: 1311088 - DNA, 15 bp, Homo sapiens
gtggtccacagagca

SEQ ID NO: 1311089 - DNA, 15 bp, Homo sapiens
tgtggtccacagagc

SEQ ID NO: 1311090 - DNA, 15 bp, Homo sapiens
gtgtggtccacagag

SEQ ID NO: 1311091 - DNA, 15 bp, Homo sapiens
agtgtggtccacaga

SEQ ID NO: 1311092 - DNA, 15 bp, Homo sapiens
aagtgtggtccacag

SEQ ID NO: 1311093 - DNA, 15 bp, Homo sapiens
aaagtgtggtccaca

SEQ ID NO: 1311094 - DNA, 15 bp, Homo sapiens
taaagtgtggtccac

SEQ ID NO: 1311095 - DNA, 15 bp, Homo sapiens
ttaaagtgtggtcca

SEQ ID NO: 1311096 - DNA, 15 bp, Homo sapiens
tttaaagtgtggtcc

SEQ ID NO: 1311097 - DNA, 15 bp, Homo sapiens
atttaaagtgtggtc

SEQ ID NO: 1311098 - DNA, 15 bp, Homo sapiens
tatttaaagtgtggt

SEQ ID NO: 1311099 - DNA, 15 bp, Homo sapiens
ctatttaaagtgtgg

SEQ ID NO: 1311100 - DNA, 15 bp, Homo sapiens
gctatttaaagtgtg

SEQ ID NO: 1311101 - DNA, 15 bp, Homo sapiens
ggctatttaaagtgt

SEQ ID NO: 1311102 - DNA, 15 bp, Homo sapiens
tggctatttaaagtg

SEQ ID NO: 1311103 - DNA, 15 bp, Homo sapiens
ctggctatttaaagt

SEQ ID NO: 1311104 - DNA, 15 bp, Homo sapiens
cctggctatttaaag

SEQ ID NO: 1311105 - DNA, 15 bp, Homo sapiens
agcctggctatttaa

SEQ ID NO: 1311106 - DNA, 15 bp, Homo sapiens
aagcctggctattta

SEQ ID NO: 1311107 - DNA, 15 bp, Homo sapiens
taagcctggctattt

SEQ ID NO: 1311108 - DNA, 15 bp, Homo sapiens
gtaagcctggctatt

SEQ ID NO: 1311109 - DNA, 15 bp, Homo sapiens
ggtaagcctggctat

SEQ ID NO: 1311110 - DNA, 15 bp, Homo sapiens
tggtaagcctggcta

SEQ ID NO: 1311111 - DNA, 15 bp, Homo sapiens
ttggtaagcctggct

SEQ ID NO: 1311112 - DNA, 15 bp, Homo sapiens
attggtaagcctggc

SEQ ID NO: 1311113 - DNA, 15 bp, Homo sapiens
gattggtaagcctgg

SEQ ID NO: 1311114 - DNA, 15 bp, Homo sapiens
ggattggtaagcctg

SEQ ID NO: 1311115 - DNA, 15 bp, Homo sapiens
tggattggtaagcct

SEQ ID NO: 1311116 - DNA, 15 bp, Homo sapiens
gtggattggtaagcc

SEQ ID NO: 1311117 - DNA, 15 bp, Homo sapiens
agtggattggtaagc

SEQ ID NO: 1311118 - DNA, 15 bp, Homo sapiens
aagtggattggtaag

SEQ ID NO: 1311119 - DNA, 15 bp, Homo sapiens
taagtggattggtaa

SEQ ID NO: 1311120 - DNA, 15 bp, Homo sapiens
ttaagtggattggta

SEQ ID NO: 1311121 - DNA, 15 bp, Homo sapiens
tttaagtggattggt

SEQ ID NO: 1311122 - DNA, 15 bp, Homo sapiens
ttttaagtggattgg

SEQ ID NO: 1311123 - DNA, 15 bp, Homo sapiens
tttttaagtggattg

SEQ ID NO: 1311124 - DNA, 15 bp, Homo sapiens
atttttaagtggatt

SEQ ID NO: 1311125 - DNA, 15 bp, Homo sapiens
catttttaagtggat

SEQ ID NO: 1311126 - DNA, 15 bp, Homo sapiens
ccatttttaagtgga

SEQ ID NO: 1311127 - DNA, 15 bp, Homo sapiens
gccatttttaagtgg

SEQ ID NO: 1311128 - DNA, 15 bp, Homo sapiens
ggccatttttaagtg

SEQ ID NO: 1311129 - DNA, 15 bp, Homo sapiens
tggccatttttaagt

SEQ ID NO: 1311130 - DNA, 15 bp, Homo sapiens
ttggccatttttaag

SEQ ID NO: 1311131 - DNA, 15 bp, Homo sapiens
tttggccatttttaa

SEQ ID NO: 1311132 - DNA, 15 bp, Homo sapiens
ttttggccattttta

SEQ ID NO: 1311133 - DNA, 15 bp, Homo sapiens
gttttggccattttt

SEQ ID NO: 1311134 - DNA, 15 bp, Homo sapiens
ggttttggccatttt

SEQ ID NO: 1311135 - DNA, 15 bp, Homo sapiens
tggttttggccattt

SEQ ID NO: 1311136 - DNA, 15 bp, Homo sapiens
gtggttttggccatt

SEQ ID NO: 1311137 - DNA, 15 bp, Homo sapiens
tgtggttttggccat

SEQ ID NO: 1311138 - DNA, 15 bp, Homo sapiens
ttgtggttttggcca

SEQ ID NO: 1311139 - DNA, 15 bp, Homo sapiens
attgtggttttggcc

SEQ ID NO: 1311140 - DNA, 15 bp, Homo sapiens
aattgtggttttggc

SEQ ID NO: 1311141 - DNA, 15 bp, Homo sapiens
taattgtggttttgg

SEQ ID NO: 1311142 - DNA, 15 bp, Homo sapiens
gtaattgtggttttg

SEQ ID NO: 1311143 - DNA, 15 bp, Homo sapiens
agtaattgtggtttt

SEQ ID NO: 1311144 - DNA, 15 bp, Homo sapiens
aagtaattgtggttt

SEQ ID NO: 1311145 - DNA, 15 bp, Homo sapiens
aaagtaattgtggtt

SEQ ID NO: 1311146 - DNA, 15 bp, Homo sapiens
aaaagtaattgtggt

SEQ ID NO: 1311147 - DNA, 15 bp, Homo sapiens
caaaagtaattgtgg

SEQ ID NO: 1311148 - DNA, 15 bp, Homo sapiens
gcaaaagtaattgtg

SEQ ID NO: 1311149 - DNA, 15 bp, Homo sapiens
tgcaaaagtaattgt

SEQ ID NO: 1311150 - DNA, 15 bp, Homo sapiens
gtgcaaaagtaattg

SEQ ID NO: 1311151 - DNA, 15 bp, Homo sapiens
ggtgcaaaagtaatt

SEQ ID NO: 1311152 - DNA, 15 bp, Homo sapiens
tggtgcaaaagtaat

SEQ ID NO: 1311153 - DNA, 15 bp, Homo sapiens
ttggtgcaaaagtaa

SEQ ID NO: 1311154 - DNA, 15 bp, Homo sapiens
tttggtgcaaaagta

SEQ ID NO: 1311155 - DNA, 15 bp, Homo sapiens
gtttggtgcaaaagt

SEQ ID NO: 1311156 - DNA, 15 bp, Homo sapiens
agtttggtgcaaaag

SEQ ID NO: 1311157 - DNA, 15 bp, Homo sapiens
tagtttggtgcaaaa

SEQ ID NO: 1311158 - DNA, 15 bp, Homo sapiens
ttagtttggtgcaaa

SEQ ID NO: 1311159 - DNA, 15 bp, Homo sapiens
attagtttggtgcaa

SEQ ID NO: 1311160 - DNA, 15 bp, Homo sapiens
tattagtttggtgca

SEQ ID NO: 1311161 - DNA, 15 bp, Homo sapiens
gtattagtttggtgc

SEQ ID NO: 1311162 - DNA, 15 bp, Homo sapiens
tgtattagtttggtg

SEQ ID NO: 1311163 - DNA, 15 bp, Homo sapiens
gtgtattagtttggt

SEQ ID NO: 1311164 - DNA, 15 bp, Homo sapiens
agtgtattagtttgg

SEQ ID NO: 1311165 - DNA, 15 bp, Homo sapiens
cagtgtattagtttg

SEQ ID NO: 1311166 - DNA, 15 bp, Homo sapiens
acagtgtattagttt

SEQ ID NO: 1311167 - DNA, 15 bp, Homo sapiens
cacagtgtattagtt

SEQ ID NO: 1311168 - DNA, 15 bp, Homo sapiens
gcacagtgtattagt

SEQ ID NO: 1311169 - DNA, 15 bp, Homo sapiens
agcacagtgtattag

SEQ ID NO: 1311170 - DNA, 15 bp, Homo sapiens
cagcacagtgtatta

SEQ ID NO: 1311171 - DNA, 15 bp, Homo sapiens
acagcacagtgtatt

SEQ ID NO: 1311172 - DNA, 15 bp, Homo sapiens
gacagcacagtgtat

SEQ ID NO: 1311173 - DNA, 15 bp, Homo sapiens
ggacagcacagtgta

SEQ ID NO: 1311174 - DNA, 15 bp, Homo sapiens
tggacagcacagtgt

SEQ ID NO: 1311175 - DNA, 15 bp, Homo sapiens
ctggacagcacagtg

SEQ ID NO: 1311176 - DNA, 15 bp, Homo sapiens
actggacagcacagt

SEQ ID NO: 1311177 - DNA, 15 bp, Homo sapiens
tactggacagcacag

SEQ ID NO: 1311178 - DNA, 15 bp, Homo sapiens
atactggacagcaca

SEQ ID NO: 1311179 - DNA, 15 bp, Homo sapiens
catactggacagcac

SEQ ID NO: 1311180 - DNA, 15 bp, Homo sapiens
ccatactggacagca

SEQ ID NO: 1311181 - DNA, 15 bp, Homo sapiens
accatactggacagc

SEQ ID NO: 1311182 - DNA, 15 bp, Homo sapiens
taccatactggacag

SEQ ID NO: 1311183 - DNA, 15 bp, Homo sapiens
ctaccatactggaca

SEQ ID NO: 1311184 - DNA, 15 bp, Homo sapiens
gctaccatactggac

SEQ ID NO: 1311185 - DNA, 15 bp, Homo sapiens
agctaccatactgga

SEQ ID NO: 1311186 - DNA, 15 bp, Homo sapiens
gagctaccatactgg

SEQ ID NO: 1311187 - DNA, 15 bp, Homo sapiens
ggagctaccatactg

SEQ ID NO: 1311188 - DNA, 15 bp, Homo sapiens
aggagctaccatact

SEQ ID NO: 1311189 - DNA, 15 bp, Homo sapiens
taggagctaccatac

SEQ ID NO: 1311190 - DNA, 15 bp, Homo sapiens
ctaggagctaccata

SEQ ID NO: 1311191 - DNA, 15 bp, Homo sapiens
gctaggagctaccat

SEQ ID NO: 1311192 - DNA, 15 bp, Homo sapiens
ggctaggagctacca

SEQ ID NO: 1311193 - DNA, 15 bp, Homo sapiens
tggctaggagctacc

SEQ ID NO: 1311194 - DNA, 15 bp, Homo sapiens
gtggctaggagctac

SEQ ID NO: 1311195 - DNA, 15 bp, Homo sapiens
tgtggctaggagcta

SEQ ID NO: 1311196 - DNA, 15 bp, Homo sapiens
atgtggctaggagct

SEQ ID NO: 1311197 - DNA, 15 bp, Homo sapiens
aatgtggctaggagc

SEQ ID NO: 1311198 - DNA, 15 bp, Homo sapiens
aaatgtggctaggag

SEQ ID NO: 1311199 - DNA, 15 bp, Homo sapiens
caaatgtggctagga

SEQ ID NO: 1311200 - DNA, 15 bp, Homo sapiens
gcaaatgtggctagg

SEQ ID NO: 1311201 - DNA, 15 bp, Homo sapiens
ggcaaatgtggctag

SEQ ID NO: 1311202 - DNA, 15 bp, Homo sapiens
aggcaaatgtggcta

SEQ ID NO: 1311203 - DNA, 15 bp, Homo sapiens
taggcaaatgtggct

SEQ ID NO: 1311204 - DNA, 15 bp, Homo sapiens
ataggcaaatgtggc

SEQ ID NO: 1311205 - DNA, 15 bp, Homo sapiens
aataggcaaatgtgg

SEQ ID NO: 1311206 - DNA, 15 bp, Homo sapiens
aaataggcaaatgtg

SEQ ID NO: 1311207 - DNA, 15 bp, Homo sapiens
taaataggcaaatgt

SEQ ID NO: 1311208 - DNA, 15 bp, Homo sapiens
ttaaataggcaaatg

SEQ ID NO: 1311209 - DNA, 15 bp, Homo sapiens
tttaaataggcaaat

SEQ ID NO: 1311210 - DNA, 15 bp, Homo sapiens
ttttaaataggcaaa

SEQ ID NO: 1311211 - DNA, 15 bp, Homo sapiens
cttttaaataggcaa

SEQ ID NO: 1311212 - DNA, 15 bp, Homo sapiens
gcttttaaataggca

SEQ ID NO: 1311213 - DNA, 15 bp, Homo sapiens
agcttttaaataggc

SEQ ID NO: 1311214 - DNA, 15 bp, Homo sapiens
gagcttttaaatagg

SEQ ID NO: 1311215 - DNA, 15 bp, Homo sapiens
tgagcttttaaatag

SEQ ID NO: 1311216 - DNA, 15 bp, Homo sapiens
ctgagcttttaaata

SEQ ID NO: 1311217 - DNA, 15 bp, Homo sapiens
actgagcttttaaat

SEQ ID NO: 1311218 - DNA, 15 bp, Homo sapiens
aactgagcttttaaa

SEQ ID NO: 1311219 - DNA, 15 bp, Homo sapiens
gaactgagcttttaa

SEQ ID NO: 1311220 - DNA, 15 bp, Homo sapiens
ggaactgagctttta

SEQ ID NO: 1311221 - DNA, 15 bp, Homo sapiens
aggaactgagctttt

SEQ ID NO: 1311222 - DNA, 15 bp, Homo sapiens
gaggaactgagcttt

SEQ ID NO: 1311223 - DNA, 15 bp, Homo sapiens
ggaggaactgagctt

SEQ ID NO: 1311224 - DNA, 15 bp, Homo sapiens
tggaggaactgagct

SEQ ID NO: 1311225 - DNA, 15 bp, Homo sapiens
atggaggaactgagc

SEQ ID NO: 1311226 - DNA, 15 bp, Homo sapiens
gatggaggaactgag

SEQ ID NO: 1311227 - DNA, 15 bp, Homo sapiens
ggatggaggaactga

SEQ ID NO: 1311228 - DNA, 15 bp, Homo sapiens
aggatggaggaactg

SEQ ID NO: 1311229 - DNA, 15 bp, Homo sapiens
taggatggaggaact

SEQ ID NO: 1311230 - DNA, 15 bp, Homo sapiens
gtaggatggaggaac

SEQ ID NO: 1311231 - DNA, 15 bp, Homo sapiens
ggtaggatggaggaa

SEQ ID NO: 1311232 - DNA, 15 bp, Homo sapiens
tggtaggatggagga

SEQ ID NO: 1311233 - DNA, 15 bp, Homo sapiens
ctggtaggatggagg

SEQ ID NO: 1311234 - DNA, 15 bp, Homo sapiens
gctggtaggatggag

SEQ ID NO: 1311235 - DNA, 15 bp, Homo sapiens
agctggtaggatgga

SEQ ID NO: 1311236 - DNA, 15 bp, Homo sapiens
cagctggtaggatgg

SEQ ID NO: 1311237 - DNA, 15 bp, Homo sapiens
acagctggtaggatg

SEQ ID NO: 1311238 - DNA, 15 bp, Homo sapiens
aacagctggtaggat

SEQ ID NO: 1311239 - DNA, 15 bp, Homo sapiens
aaacagctggtagga

SEQ ID NO: 1311240 - DNA, 15 bp, Homo sapiens
aaaacagctggtagg

SEQ ID NO: 1311241 - DNA, 15 bp, Homo sapiens
aaaaacagctggtag

SEQ ID NO: 1311242 - DNA, 15 bp, Homo sapiens
gaaaaacagctggta

SEQ ID NO: 1311243 - DNA, 15 bp, Homo sapiens
tgaaaaacagctggt

SEQ ID NO: 1311244 - DNA, 15 bp, Homo sapiens
ctgaaaaacagctgg

SEQ ID NO: 1311245 - DNA, 15 bp, Homo sapiens
cctgaaaaacagctg

SEQ ID NO: 1311246 - DNA, 15 bp, Homo sapiens
acctgaaaaacagct

SEQ ID NO: 1311247 - DNA, 15 bp, Homo sapiens
tacctgaaaaacagc

SEQ ID NO: 1311248 - DNA, 15 bp, Homo sapiens
gtacctgaaaaacag

SEQ ID NO: 1311249 - DNA, 15 bp, Homo sapiens
agtacctgaaaaaca

SEQ ID NO: 1311250 - DNA, 15 bp, Homo sapiens
gagtacctgaaaaac

SEQ ID NO: 1311251 - DNA, 15 bp, Homo sapiens
tgagtacctgaaaaa

SEQ ID NO: 1311252 - DNA, 15 bp, Homo sapiens
ttgagtacctgaaaa

SEQ ID NO: 1311253 - DNA, 15 bp, Homo sapiens
cttgagtacctgaaa

SEQ ID NO: 1311254 - DNA, 15 bp, Homo sapiens
tcttgagtacctgaa

SEQ ID NO: 1311255 - DNA, 15 bp, Homo sapiens
ctcttgagtacctga

SEQ ID NO: 1311256 - DNA, 15 bp, Homo sapiens
gctcttgagtacctg

SEQ ID NO: 1311257 - DNA, 15 bp, Homo sapiens
ggctcttgagtacct

SEQ ID NO: 1311258 - DNA, 15 bp, Homo sapiens
gggctcttgagtacc

SEQ ID NO: 1311259 - DNA, 15 bp, Homo sapiens
ggggctcttgagtac

SEQ ID NO: 1311260 - DNA, 15 bp, Homo sapiens
tggggctcttgagta

SEQ ID NO: 1311261 - DNA, 15 bp, Homo sapiens
atggggctcttgagt

SEQ ID NO: 1311262 - DNA, 15 bp, Homo sapiens
catggggctcttgag

SEQ ID NO: 1311263 - DNA, 15 bp, Homo sapiens
acatggggctcttga

SEQ ID NO: 1311264 - DNA, 15 bp, Homo sapiens
cacatggggctcttg

SEQ ID NO: 1311265 - DNA, 15 bp, Homo sapiens
ccacatggggctctt

SEQ ID NO: 1311266 - DNA, 15 bp, Homo sapiens
gccacatggggctct

SEQ ID NO: 1311267 - DNA, 15 bp, Homo sapiens
agccacatggggctc

SEQ ID NO: 1311268 - DNA, 15 bp, Homo sapiens
gagccacatggggct

SEQ ID NO: 1311269 - DNA, 15 bp, Homo sapiens
tgagccacatggggc

SEQ ID NO: 1311270 - DNA, 15 bp, Homo sapiens
atgagccacatgggg

SEQ ID NO: 1311271 - DNA, 15 bp, Homo sapiens
aatgagccacatggg

SEQ ID NO: 1311272 - DNA, 15 bp, Homo sapiens
caatgagccacatgg

SEQ ID NO: 1311273 - DNA, 15 bp, Homo sapiens
ccaatgagccacatg

SEQ ID NO: 1311274 - DNA, 15 bp, Homo sapiens
gccaatgagccacat

SEQ ID NO: 1311275 - DNA, 15 bp, Homo sapiens
agccaatgagccaca

SEQ ID NO: 1311276 - DNA, 15 bp, Homo sapiens
cagccaatgagccac

SEQ ID NO: 1311277 - DNA, 15 bp, Homo sapiens
gcagccaatgagcca

SEQ ID NO: 1311278 - DNA, 15 bp, Homo sapiens
cgcagccaatgagcc

SEQ ID NO: 1311279 - DNA, 15 bp, Homo sapiens
ccgcagccaatgagc

SEQ ID NO: 1311280 - DNA, 15 bp, Homo sapiens
tccgcagccaatgag

SEQ ID NO: 1311281 - DNA, 15 bp, Homo sapiens
ctccgcagccaatga

SEQ ID NO: 1311282 - DNA, 15 bp, Homo sapiens
gctccgcagccaatg

SEQ ID NO: 1311283 - DNA, 15 bp, Homo sapiens
agctccgcagccaat

SEQ ID NO: 1311284 - DNA, 15 bp, Homo sapiens
cagctccgcagccaa

SEQ ID NO: 1311285 - DNA, 15 bp, Homo sapiens
ccagctccgcagcca

SEQ ID NO: 1311286 - DNA, 15 bp, Homo sapiens
tccagctccgcagcc

SEQ ID NO: 1311287 - DNA, 15 bp, Homo sapiens
gtccagctccgcagc

SEQ ID NO: 1311288 - DNA, 15 bp, Homo sapiens
tgtccagctccgcag

SEQ ID NO: 1311289 - DNA, 15 bp, Homo sapiens
ctgtccagctccgca

SEQ ID NO: 1311290 - DNA, 15 bp, Homo sapiens
gctgtccagctccgc

SEQ ID NO: 1311291 - DNA, 15 bp, Homo sapiens
tgctgtccagctccg

SEQ ID NO: 1311292 - DNA, 15 bp, Homo sapiens
gtgctgtccagctcc

SEQ ID NO: 1311293 - DNA, 15 bp, Homo sapiens
tgtgctgtccagctc

SEQ ID NO: 1311294 - DNA, 15 bp, Homo sapiens
ctgtgctgtccagct

SEQ ID NO: 1311295 - DNA, 15 bp, Homo sapiens
tctgtgctgtccagc

SEQ ID NO: 1311296 - DNA, 15 bp, Homo sapiens
atctgtgctgtccag

SEQ ID NO: 1311297 - DNA, 15 bp, Homo sapiens
catctgtgctgtcca

SEQ ID NO: 1311298 - DNA, 15 bp, Homo sapiens
acatctgtgctgtcc

SEQ ID NO: 1311299 - DNA, 15 bp, Homo sapiens
cacatctgtgctgtc

SEQ ID NO: 1311300 - DNA, 15 bp, Homo sapiens
ccacatctgtgctgt

SEQ ID NO: 1311301 - DNA, 15 bp, Homo sapiens
tccacatctgtgctg

SEQ ID NO: 1311302 - DNA, 15 bp, Homo sapiens
ttccacatctgtgct

SEQ ID NO: 1311303 - DNA, 15 bp, Homo sapiens
gttccacatctgtgc

SEQ ID NO: 1311304 - DNA, 15 bp, Homo sapiens
tgttccacatctgtg

SEQ ID NO: 1311305 - DNA, 15 bp, Homo sapiens
atgttccacatctgt

SEQ ID NO: 1311306 - DNA, 15 bp, Homo sapiens
aatgttccacatctg

SEQ ID NO: 1311307 - DNA, 15 bp, Homo sapiens
gaatgttccacatct

SEQ ID NO: 1311308 - DNA, 15 bp, Homo sapiens
ggaatgttccacatc

SEQ ID NO: 1311309 - DNA, 15 bp, Homo sapiens
tggaatgttccacat

SEQ ID NO: 1311310 - DNA, 15 bp, Homo sapiens
atggaatgttccaca

SEQ ID NO: 1311311 - DNA, 15 bp, Homo sapiens
gatggaatgttccac

SEQ ID NO: 1311312 - DNA, 15 bp, Homo sapiens
tgatggaatgttcca

SEQ ID NO: 1311313 - DNA, 15 bp, Homo sapiens
atgatggaatgttcc

SEQ ID NO: 1311314 - DNA, 15 bp, Homo sapiens
gatgatggaatgttc

SEQ ID NO: 1311315 - DNA, 15 bp, Homo sapiens
tgatgatggaatgtt

SEQ ID NO: 1311316 - DNA, 15 bp, Homo sapiens
atgatgatggaatgt

SEQ ID NO: 1311317 - DNA, 15 bp, Homo sapiens
tatgatgatggaatg

SEQ ID NO: 1311318 - DNA, 15 bp, Homo sapiens
ctatgatgatggaat

SEQ ID NO: 1311319 - DNA, 15 bp, Homo sapiens
tctatgatgatggaa

SEQ ID NO: 1311320 - DNA, 15 bp, Homo sapiens
gtctatgatgatgga

SEQ ID NO: 1311321 - DNA, 15 bp, Homo sapiens
tgtctatgatgatgg

SEQ ID NO: 1311322 - DNA, 15 bp, Homo sapiens
ctgtctatgatgatg

SEQ ID NO: 1311323 - DNA, 15 bp, Homo sapiens
actgtctatgatgat

SEQ ID NO: 1311324 - DNA, 15 bp, Homo sapiens
aactgtctatgatga

SEQ ID NO: 1311325 - DNA, 15 bp, Homo sapiens
gaactgtctatgatg

SEQ ID NO: 1311326 - DNA, 15 bp, Homo sapiens
agaactgtctatgat

SEQ ID NO: 1311327 - DNA, 15 bp, Homo sapiens
cagaactgtctatga

SEQ ID NO: 1311328 - DNA, 15 bp, Homo sapiens
acagaactgtctatg

SEQ ID NO: 1311329 - DNA, 15 bp, Homo sapiens
cacagaactgtctat

SEQ ID NO: 1311330 - DNA, 15 bp, Homo sapiens
ccacagaactgtcta

SEQ ID NO: 1311331 - DNA, 15 bp, Homo sapiens
cccacagaactgtct

SEQ ID NO: 1311332 - DNA, 15 bp, Homo sapiens
tcccacagaactgtc

SEQ ID NO: 1311333 - DNA, 15 bp, Homo sapiens
gtcccacagaactgt

SEQ ID NO: 1311334 - DNA, 15 bp, Homo sapiens
ggtcccacagaactg

SEQ ID NO: 1311335 - DNA, 15 bp, Homo sapiens
tggtcccacagaact

SEQ ID NO: 1311336 - DNA, 15 bp, Homo sapiens
gtggtcccacagaac

SEQ ID NO: 1311337 - DNA, 15 bp, Homo sapiens
cgtggtcccacagaa

SEQ ID NO: 1311338 - DNA, 15 bp, Homo sapiens
gcgtggtcccacaga

SEQ ID NO: 1311339 - DNA, 15 bp, Homo sapiens
agcgtggtcccacag

SEQ ID NO: 1311340 - DNA, 15 bp, Homo sapiens
cagcgtggtcccaca

SEQ ID NO: 1311341 - DNA, 15 bp, Homo sapiens
gcagcgtggtcccac

SEQ ID NO: 1311342 - DNA, 15 bp, Homo sapiens
agcagcgtggtccca

SEQ ID NO: 1311343 - DNA, 15 bp, Homo sapiens
gagcagcgtggtccc

SEQ ID NO: 1311344 - DNA, 15 bp, Homo sapiens
agagcagcgtggtcc

SEQ ID NO: 1311345 - DNA, 15 bp, Homo sapiens
tagagcagcgtggtc

SEQ ID NO: 1311346 - DNA, 15 bp, Homo sapiens
ctagagcagcgtggt

SEQ ID NO: 1311347 - DNA, 15 bp, Homo sapiens
tctagagcagcgtgg

SEQ ID NO: 1311348 - DNA, 15 bp, Homo sapiens
ttctagagcagcgtg

SEQ ID NO: 1311349 - DNA, 15 bp, Homo sapiens
attctagagcagcgt

SEQ ID NO: 1311350 - DNA, 15 bp, Homo sapiens
cattctagagcagcg

SEQ ID NO: 1311351 - DNA, 15 bp, Homo sapiens
tcattctagagcagc

SEQ ID NO: 1311352 - DNA, 15 bp, Homo sapiens
ctcattctagagcag

SEQ ID NO: 1311353 - DNA, 15 bp, Homo sapiens
actcattctagagca

SEQ ID NO: 1311354 - DNA, 15 bp, Homo sapiens
gactcattctagagc

SEQ ID NO: 1311355 - DNA, 15 bp, Homo sapiens
agactcattctagag

SEQ ID NO: 1311356 - DNA, 15 bp, Homo sapiens
cagactcattctaga

SEQ ID NO: 1311357 - DNA, 15 bp, Homo sapiens
acagactcattctag

SEQ ID NO: 1311358 - DNA, 15 bp, Homo sapiens
cacagactcattcta

SEQ ID NO: 1311359 - DNA, 15 bp, Homo sapiens
tcacagactcattct

SEQ ID NO: 1311360 - DNA, 15 bp, Homo sapiens
gtcacagactcattc

SEQ ID NO: 1311361 - DNA, 15 bp, Homo sapiens
tgtcacagactcatt

SEQ ID NO: 1311362 - DNA, 15 bp, Homo sapiens
ctgtcacagactcat

SEQ ID NO: 1311363 - DNA, 15 bp, Homo sapiens
gctgtcacagactca

SEQ ID NO: 1311364 - DNA, 15 bp, Homo sapiens
tgctgtcacagactc

SEQ ID NO: 1311365 - DNA, 15 bp, Homo sapiens
gtgctgtcacagact

SEQ ID NO: 1311366 - DNA, 15 bp, Homo sapiens
tgtgctgtcacagac

SEQ ID NO: 1311367 - DNA, 15 bp, Homo sapiens
gtgtgctgtcacaga

SEQ ID NO: 1311368 - DNA, 15 bp, Homo sapiens
tgtgtgctgtcacag

SEQ ID NO: 1311369 - DNA, 15 bp, Homo sapiens
gtgtgtgctgtcaca

SEQ ID NO: 1311370 - DNA, 15 bp, Homo sapiens
ggtgtgtgctgtcac

SEQ ID NO: 1311371 - DNA, 15 bp, Homo sapiens
tggtgtgtgctgtca

SEQ ID NO: 1311372 - DNA, 15 bp, Homo sapiens
atggtgtgtgctgtc

SEQ ID NO: 1311373 - DNA, 15 bp, Homo sapiens
catggtgtgtgctgt

SEQ ID NO: 1311374 - DNA, 15 bp, Homo sapiens
ccatggtgtgtgctg

SEQ ID NO: 1311375 - DNA, 15 bp, Homo sapiens
gccatggtgtgtgct

SEQ ID NO: 1311376 - DNA, 15 bp, Homo sapiens
agccatggtgtgtgc

SEQ ID NO: 1311377 - DNA, 15 bp, Homo sapiens
aagccatggtgtgtg

SEQ ID NO: 1311378 - DNA, 15 bp, Homo sapiens
aaagccatggtgtgt

SEQ ID NO: 1311379 - DNA, 15 bp, Homo sapiens
aaaagccatggtgtg

SEQ ID NO: 1311380 - DNA, 15 bp, Homo sapiens
aaaaagccatggtgt

SEQ ID NO: 1311381 - DNA, 15 bp, Homo sapiens
taaaaagccatggtg

SEQ ID NO: 1311382 - DNA, 15 bp, Homo sapiens
gtaaaaagccatggt

SEQ ID NO: 1311383 - DNA, 15 bp, Homo sapiens
agtaaaaagccatgg

SEQ ID NO: 1311384 - DNA, 15 bp, Homo sapiens
aagtaaaaagccatg

SEQ ID NO: 1311385 - DNA, 15 bp, Homo sapiens
aaagtaaaaagccat

SEQ ID NO: 1311386 - DNA, 15 bp, Homo sapiens
aaaagtaaaaagcca

SEQ ID NO: 1311387 - DNA, 15 bp, Homo sapiens
aaaaagtaaaaagcc

SEQ ID NO: 1311388 - DNA, 15 bp, Homo sapiens
caaaaagtaaaaagc

SEQ ID NO: 1311389 - DNA, 15 bp, Homo sapiens
acaaaaagtaaaaag

SEQ ID NO: 1311390 - DNA, 15 bp, Homo sapiens
tacaaaaagtaaaaa

SEQ ID NO: 1311391 - DNA, 15 bp, Homo sapiens
atacaaaaagtaaaa

SEQ ID NO: 1311392 - DNA, 15 bp, Homo sapiens
catacaaaaagtaaa

SEQ ID NO: 1311393 - DNA, 15 bp, Homo sapiens
gcatacaaaaagtaa

SEQ ID NO: 1311394 - DNA, 15 bp, Homo sapiens
ggcatacaaaaagta

SEQ ID NO: 1311395 - DNA, 15 bp, Homo sapiens
gggcatacaaaaagt

SEQ ID NO: 1311396 - DNA, 15 bp, Homo sapiens
tgggcatacaaaaag

SEQ ID NO: 1311397 - DNA, 15 bp, Homo sapiens
ctgggcatacaaaaa

SEQ ID NO: 1311398 - DNA, 15 bp, Homo sapiens
cctgggcatacaaaa

SEQ ID NO: 1311399 - DNA, 15 bp, Homo sapiens
tcctgggcatacaaa

SEQ ID NO: 1311400 - DNA, 15 bp, Homo sapiens
gtcctgggcatacaa

SEQ ID NO: 1311401 - DNA, 15 bp, Homo sapiens
tgtcctgggcataca

SEQ ID NO: 1311402 - DNA, 15 bp, Homo sapiens
gtgtcctgggcatac

SEQ ID NO: 1311403 - DNA, 15 bp, Homo sapiens
agtgtcctgggcata

SEQ ID NO: 1311404 - DNA, 15 bp, Homo sapiens
gagtgtcctgggcat

SEQ ID NO: 1311405 - DNA, 15 bp, Homo sapiens
agagtgtcctgggca

SEQ ID NO: 1311406 - DNA, 15 bp, Homo sapiens
aagagtgtcctgggc

SEQ ID NO: 1311407 - DNA, 15 bp, Homo sapiens
caagagtgtcctggg

SEQ ID NO: 1311408 - DNA, 15 bp, Homo sapiens
gcaagagtgtcctgg

SEQ ID NO: 1311409 - DNA, 15 bp, Homo sapiens
tgcaagagtgtcctg

SEQ ID NO: 1311410 - DNA, 15 bp, Homo sapiens
gtgcaagagtgtcct

SEQ ID NO: 1311411 - DNA, 15 bp, Homo sapiens
tgtgcaagagtgtcc

SEQ ID NO: 1311412 - DNA, 15 bp, Homo sapiens
atgtgcaagagtgtc

SEQ ID NO: 1311413 - DNA, 15 bp, Homo sapiens
tatgtgcaagagtgt

SEQ ID NO: 1311414 - DNA, 15 bp, Homo sapiens
ctatgtgcaagagtg

SEQ ID NO: 1311415 - DNA, 15 bp, Homo sapiens
actatgtgcaagagt

SEQ ID NO: 1311416 - DNA, 15 bp, Homo sapiens
cactatgtgcaagag

SEQ ID NO: 1311417 - DNA, 15 bp, Homo sapiens
ccactatgtgcaaga

SEQ ID NO: 1311418 - DNA, 15 bp, Homo sapiens
tccactatgtgcaag

SEQ ID NO: 1311419 - DNA, 15 bp, Homo sapiens
ttccactatgtgcaa

SEQ ID NO: 1311420 - DNA, 15 bp, Homo sapiens
cttccactatgtgca

SEQ ID NO: 1311421 - DNA, 15 bp, Homo sapiens
gcttccactatgtgc

SEQ ID NO: 1311422 - DNA, 15 bp, Homo sapiens
agcttccactatgtg

SEQ ID NO: 1311423 - DNA, 15 bp, Homo sapiens
aagcttccactatgt

SEQ ID NO: 1311424 - DNA, 15 bp, Homo sapiens
taagcttccactatg

SEQ ID NO: 1311425 - DNA, 15 bp, Homo sapiens
ctaagcttccactat

SEQ ID NO: 1311426 - DNA, 15 bp, Homo sapiens
gctaagcttccacta

SEQ ID NO: 1311427 - DNA, 15 bp, Homo sapiens
tgctaagcttccact

SEQ ID NO: 1311428 - DNA, 15 bp, Homo sapiens
ttgctaagcttccac

SEQ ID NO: 1311429 - DNA, 15 bp, Homo sapiens
tttgctaagcttcca

SEQ ID NO: 1311430 - DNA, 15 bp, Homo sapiens
atttgctaagcttcc

SEQ ID NO: 1311431 - DNA, 15 bp, Homo sapiens
catttgctaagcttc

SEQ ID NO: 1311432 - DNA, 15 bp, Homo sapiens
acatttgctaagctt

SEQ ID NO: 1311433 - DNA, 15 bp, Homo sapiens
aacatttgctaagct

SEQ ID NO: 1311434 - DNA, 15 bp, Homo sapiens
aaacatttgctaagc

SEQ ID NO: 1311435 - DNA, 15 bp, Homo sapiens
aaaacatttgctaag

SEQ ID NO: 1311436 - DNA, 15 bp, Homo sapiens
aaaaacatttgctaa

SEQ ID NO: 1311437 - DNA, 15 bp, Homo sapiens
aaaaaacatttgcta

SEQ ID NO: 1311438 - DNA, 15 bp, Homo sapiens
caaaaaacatttgct

SEQ ID NO: 1311439 - DNA, 15 bp, Homo sapiens
tcaaaaaacatttgc

SEQ ID NO: 1311440 - DNA, 15 bp, Homo sapiens
ttcaaaaaacatttg

SEQ ID NO: 1311441 - DNA, 15 bp, Homo sapiens
cttcaaaaaacattt

SEQ ID NO: 1311442 - DNA, 15 bp, Homo sapiens
acttcaaaaaacatt

SEQ ID NO: 1311443 - DNA, 15 bp, Homo sapiens
cacttcaaaaaacat

SEQ ID NO: 1311444 - DNA, 15 bp, Homo sapiens
tcacttcaaaaaaca

SEQ ID NO: 1311445 - DNA, 15 bp, Homo sapiens
atcacttcaaaaaac

SEQ ID NO: 1311446 - DNA, 15 bp, Homo sapiens
aatcacttcaaaaaa

SEQ ID NO: 1311447 - DNA, 15 bp, Homo sapiens
aaatcacttcaaaaa

SEQ ID NO: 1311448 - DNA, 15 bp, Homo sapiens
aaaatcacttcaaaa

SEQ ID NO: 1311449 - DNA, 15 bp, Homo sapiens
caaaatcacttcaaa

SEQ ID NO: 1311450 - DNA, 15 bp, Homo sapiens
tcaaaatcacttcaa

SEQ ID NO: 1311451 - DNA, 15 bp, Homo sapiens
actcaaaatcacttc

SEQ ID NO: 1311452 - DNA, 15 bp, Homo sapiens
cactcaaaatcactt

SEQ ID NO: 1311453 - DNA, 15 bp, Homo sapiens
tcactcaaaatcact

SEQ ID NO: 1311454 - DNA, 15 bp, Homo sapiens
ttcactcaaaatcac

SEQ ID NO: 1311455 - DNA, 15 bp, Homo sapiens
attcactcaaaatca

SEQ ID NO: 1311456 - DNA, 15 bp, Homo sapiens
cattcactcaaaatc

SEQ ID NO: 1311457 - DNA, 15 bp, Homo sapiens
ccattcactcaaaat

SEQ ID NO: 1311458 - DNA, 15 bp, Homo sapiens
tccattcactcaaaa

SEQ ID NO: 1311459 - DNA, 15 bp, Homo sapiens
gtccattcactcaaa

SEQ ID NO: 1311460 - DNA, 15 bp, Homo sapiens
ggtccattcactcaa

SEQ ID NO: 1311461 - DNA, 15 bp, Homo sapiens
tggtccattcactca

SEQ ID NO: 1311462 - DNA, 15 bp, Homo sapiens
ttggtccattcactc

SEQ ID NO: 1311463 - DNA, 15 bp, Homo sapiens
attggtccattcact

SEQ ID NO: 1311464 - DNA, 15 bp, Homo sapiens
cattggtccattcac

SEQ ID NO: 1311465 - DNA, 15 bp, Homo sapiens
ccattggtccattca

SEQ ID NO: 1311466 - DNA, 15 bp, Homo sapiens
accattggtccattc

SEQ ID NO: 1311467 - DNA, 15 bp, Homo sapiens
taccattggtccatt

SEQ ID NO: 1311468 - DNA, 15 bp, Homo sapiens
ttaccattggtccat

SEQ ID NO: 1311469 - DNA, 15 bp, Homo sapiens
tttaccattggtcca

SEQ ID NO: 1311470 - DNA, 15 bp, Homo sapiens
ttttaccattggtcc

SEQ ID NO: 1311471 - DNA, 15 bp, Homo sapiens
tttttaccattggtc

SEQ ID NO: 1311472 - DNA, 15 bp, Homo sapiens
atttttaccattggt

SEQ ID NO: 1311473 - DNA, 15 bp, Homo sapiens
aatttttaccattgg

SEQ ID NO: 1311474 - DNA, 15 bp, Homo sapiens
gaatttttaccattg

SEQ ID NO: 1311475 - DNA, 15 bp, Homo sapiens
agaatttttaccatt

SEQ ID NO: 1311476 - DNA, 15 bp, Homo sapiens
tagaatttttaccat

SEQ ID NO: 1311477 - DNA, 15 bp, Homo sapiens
atagaatttttacca

SEQ ID NO: 1311478 - DNA, 15 bp, Homo sapiens
tatagaatttttacc

SEQ ID NO: 1311479 - DNA, 15 bp, Homo sapiens
atatagaatttttac

SEQ ID NO: 1311480 - DNA, 15 bp, Homo sapiens
gatatagaattttta

SEQ ID NO: 1311481 - DNA, 15 bp, Homo sapiens
agatatagaattttt

SEQ ID NO: 1311482 - DNA, 15 bp, Homo sapiens
tagatatagaatttt

SEQ ID NO: 1311483 - DNA, 15 bp, Homo sapiens
ttagatatagaattt

SEQ ID NO: 1311484 - DNA, 15 bp, Homo sapiens
tttagatatagaatt

SEQ ID NO: 1311485 - DNA, 15 bp, Homo sapiens
ttttagatatagaat

SEQ ID NO: 1311486 - DNA, 15 bp, Homo sapiens
cttttagatatagaa

SEQ ID NO: 1311487 - DNA, 15 bp, Homo sapiens
tcttttagatataga

SEQ ID NO: 1311488 - DNA, 15 bp, Homo sapiens
ttcttttagatatag

SEQ ID NO: 1311489 - DNA, 15 bp, Homo sapiens
tttcttttagatata

SEQ ID NO: 1311490 - DNA, 15 bp, Homo sapiens
atttcttttagatat

SEQ ID NO: 1311491 - DNA, 15 bp, Homo sapiens
tatttcttttagata

SEQ ID NO: 1311492 - DNA, 15 bp, Homo sapiens
ttatttcttttagat

SEQ ID NO: 1311493 - DNA, 15 bp, Homo sapiens
tttatttcttttaga

SEQ ID NO: 1311494 - DNA, 15 bp, Homo sapiens
atttatttcttttag

SEQ ID NO: 1311495 - DNA, 15 bp, Homo sapiens
tatttatttctttta

SEQ ID NO: 1311496 - DNA, 15 bp, Homo sapiens
gttatttatttcttt

SEQ ID NO: 1311497 - DNA, 15 bp, Homo sapiens
agttatttatttctt

SEQ ID NO: 1311498 - DNA, 15 bp, Homo sapiens
aagttatttatttct

SEQ ID NO: 1311499 - DNA, 15 bp, Homo sapiens
aaagttatttatttc

SEQ ID NO: 1311500 - DNA, 15 bp, Homo sapiens
gaaagttatttattt

SEQ ID NO: 1311501 - DNA, 15 bp, Homo sapiens
ggaaagttatttatt

SEQ ID NO: 1311502 - DNA, 15 bp, Homo sapiens
aggaaagttatttat

SEQ ID NO: 1311503 - DNA, 15 bp, Homo sapiens
caggaaagttattta

SEQ ID NO: 1311504 - DNA, 15 bp, Homo sapiens
tcaggaaagttattt

SEQ ID NO: 1311505 - DNA, 15 bp, Homo sapiens
ttcaggaaagttatt

SEQ ID NO: 1311506 - DNA, 15 bp, Homo sapiens
cttcaggaaagttat

SEQ ID NO: 1311507 - DNA, 15 bp, Homo sapiens
tcttcaggaaagtta

SEQ ID NO: 1311508 - DNA, 15 bp, Homo sapiens
ttcttcaggaaagtt

SEQ ID NO: 1311509 - DNA, 15 bp, Homo sapiens
tttcttcaggaaagt

SEQ ID NO: 1311510 - DNA, 15 bp, Homo sapiens
atttcttcaggaaag

SEQ ID NO: 1311511 - DNA, 15 bp, Homo sapiens
catttcttcaggaaa

SEQ ID NO: 1311512 - DNA, 15 bp, Homo sapiens
gcatttcttcaggaa

SEQ ID NO: 1311513 - DNA, 15 bp, Homo sapiens
agcatttcttcagga

SEQ ID NO: 1311514 - DNA, 15 bp, Homo sapiens
tagcatttcttcagg

SEQ ID NO: 1311515 - DNA, 15 bp, Homo sapiens
ctagcatttcttcag

SEQ ID NO: 1311516 - DNA, 15 bp, Homo sapiens
tctagcatttcttca

SEQ ID NO: 1311517 - DNA, 15 bp, Homo sapiens
ctctagcatttcttc

SEQ ID NO: 1311518 - DNA, 15 bp, Homo sapiens
tctctagcatttctt

SEQ ID NO: 1311519 - DNA, 15 bp, Homo sapiens
ttctctagcatttct

SEQ ID NO: 1311520 - DNA, 15 bp, Homo sapiens
tttctctagcatttc

SEQ ID NO: 1311521 - DNA, 15 bp, Homo sapiens
atttctctagcattt

SEQ ID NO: 1311522 - DNA, 15 bp, Homo sapiens
gatttctctagcatt

SEQ ID NO: 1311523 - DNA, 15 bp, Homo sapiens
tgatttctctagcat

SEQ ID NO: 1311524 - DNA, 15 bp, Homo sapiens
atgatttctctagca

SEQ ID NO: 1311525 - DNA, 15 bp, Homo sapiens
catgatttctctagc

SEQ ID NO: 1311526 - DNA, 15 bp, Homo sapiens
tcatgatttctctag

SEQ ID NO: 1311527 - DNA, 15 bp, Homo sapiens
ttcatgatttctcta

SEQ ID NO: 1311528 - DNA, 15 bp, Homo sapiens
attcatgatttctct

SEQ ID NO: 1311529 - DNA, 15 bp, Homo sapiens
tattcatgatttctc

SEQ ID NO: 1311530 - DNA, 15 bp, Homo sapiens
gtattcatgatttct

SEQ ID NO: 1311531 - DNA, 15 bp, Homo sapiens
tgtattcatgatttc

SEQ ID NO: 1311532 - DNA, 15 bp, Homo sapiens
gtgtattcatgattt

SEQ ID NO: 1311533 - DNA, 15 bp, Homo sapiens
agtgtattcatgatt

SEQ ID NO: 1311534 - DNA, 15 bp, Homo sapiens
cagtgtattcatgat

SEQ ID NO: 1311535 - DNA, 15 bp, Homo sapiens
acagtgtattcatga

SEQ ID NO: 1311536 - DNA, 15 bp, Homo sapiens
aacagtgtattcatg

SEQ ID NO: 1311537 - DNA, 15 bp, Homo sapiens
taacagtgtattcat

SEQ ID NO: 1311538 - DNA, 15 bp, Homo sapiens
ttaacagtgtattca

SEQ ID NO: 1311539 - DNA, 15 bp, Homo sapiens
tttaacagtgtattc

SEQ ID NO: 1311540 - DNA, 15 bp, Homo sapiens
ttttaacagtgtatt

SEQ ID NO: 1311541 - DNA, 15 bp, Homo sapiens
cttttaacagtgtat

SEQ ID NO: 1311542 - DNA, 15 bp, Homo sapiens
ccttttaacagtgta

SEQ ID NO: 1311543 - DNA, 15 bp, Homo sapiens
tccttttaacagtgt

SEQ ID NO: 1311544 - DNA, 15 bp, Homo sapiens
ttccttttaacagtg

SEQ ID NO: 1311545 - DNA, 15 bp, Homo sapiens
gttccttttaacagt

SEQ ID NO: 1311546 - DNA, 15 bp, Homo sapiens
ggttccttttaacag

SEQ ID NO: 1311547 - DNA, 15 bp, Homo sapiens
gggttccttttaaca

SEQ ID NO: 1311548 - DNA, 15 bp, Homo sapiens
agggttccttttaac

SEQ ID NO: 1311549 - DNA, 15 bp, Homo sapiens
gagggttccttttaa

SEQ ID NO: 1311550 - DNA, 15 bp, Homo sapiens
agagggttcctttta

SEQ ID NO: 1311551 - DNA, 15 bp, Homo sapiens
tagagggttcctttt

SEQ ID NO: 1311552 - DNA, 15 bp, Homo sapiens
gtagagggttccttt

SEQ ID NO: 1311553 - DNA, 15 bp, Homo sapiens
ggtagagggttcctt

SEQ ID NO: 1311554 - DNA, 15 bp, Homo sapiens
tggtagagggttcct

SEQ ID NO: 1311555 - DNA, 15 bp, Homo sapiens
gtggtagagggttcc

SEQ ID NO: 1311556 - DNA, 15 bp, Homo sapiens
ggtggtagagggttc

SEQ ID NO: 1311557 - DNA, 15 bp, Homo sapiens
gggtggtagagggtt

SEQ ID NO: 1311558 - DNA, 15 bp, Homo sapiens
agggtggtagagggt

SEQ ID NO: 1311559 - DNA, 15 bp, Homo sapiens
tagggtggtagaggg

SEQ ID NO: 1311560 - DNA, 15 bp, Homo sapiens
gtagggtggtagagg

SEQ ID NO: 1311561 - DNA, 15 bp, Homo sapiens
ggtagggtggtagag

SEQ ID NO: 1311562 - DNA, 15 bp, Homo sapiens
gggtagggtggtaga

SEQ ID NO: 1311563 - DNA, 15 bp, Homo sapiens
tgggtagggtggtag

SEQ ID NO: 1311564 - DNA, 15 bp, Homo sapiens
ttgggtagggtggta

SEQ ID NO: 1311565 - DNA, 15 bp, Homo sapiens
tttgggtagggtggt

SEQ ID NO: 1311566 - DNA, 15 bp, Homo sapiens
atttgggtagggtgg

SEQ ID NO: 1311567 - DNA, 15 bp, Homo sapiens
aatttgggtagggtg

SEQ ID NO: 1311568 - DNA, 15 bp, Homo sapiens
taatttgggtagggt

SEQ ID NO: 1311569 - DNA, 15 bp, Homo sapiens
ttaatttgggtaggg

SEQ ID NO: 1311570 - DNA, 15 bp, Homo sapiens
tttaatttgggtagg

SEQ ID NO: 1311571 - DNA, 15 bp, Homo sapiens
atttaatttgggtag

SEQ ID NO: 1311572 - DNA, 15 bp, Homo sapiens
aatttaatttgggta

SEQ ID NO: 1311573 - DNA, 15 bp, Homo sapiens
taatttaatttgggt

SEQ ID NO: 1311574 - DNA, 15 bp, Homo sapiens
ttaatttaatttggg

SEQ ID NO: 1311575 - DNA, 15 bp, Homo sapiens
tttaatttaatttgg

SEQ ID NO: 1311576 - DNA, 15 bp, Homo sapiens
atttaatttaatttg

SEQ ID NO: 1311577 - DNA, 15 bp, Homo sapiens
tatttaatttaattt

SEQ ID NO: 1311578 - DNA, 15 bp, Homo sapiens
atatttaatttaatt

SEQ ID NO: 1311579 - DNA, 15 bp, Homo sapiens
tatatttaatttaat

SEQ ID NO: 1311580 - DNA, 15 bp, Homo sapiens
gtatatttaatttaa

SEQ ID NO: 1311581 - DNA, 15 bp, Homo sapiens
agtatatttaattta

SEQ ID NO: 1311582 - DNA, 15 bp, Homo sapiens
aagtatatttaattt

SEQ ID NO: 1311583 - DNA, 15 bp, Homo sapiens
taagtatatttaatt

SEQ ID NO: 1311584 - DNA, 15 bp, Homo sapiens
ttaagtatatttaat

SEQ ID NO: 1311585 - DNA, 15 bp, Homo sapiens
cttaagtatatttaa

SEQ ID NO: 1311586 - DNA, 15 bp, Homo sapiens
ccttaagtatattta

SEQ ID NO: 1311587 - DNA, 15 bp, Homo sapiens
tccttaagtatattt

SEQ ID NO: 1311588 - DNA, 15 bp, Homo sapiens
gtccttaagtatatt

SEQ ID NO: 1311589 - DNA, 15 bp, Homo sapiens
agtccttaagtatat

SEQ ID NO: 1311590 - DNA, 15 bp, Homo sapiens
gagtccttaagtata

SEQ ID NO: 1311591 - DNA, 15 bp, Homo sapiens
tgagtccttaagtat

SEQ ID NO: 1311592 - DNA, 15 bp, Homo sapiens
ctgagtccttaagta

SEQ ID NO: 1311593 - DNA, 15 bp, Homo sapiens
actgagtccttaagt

SEQ ID NO: 1311594 - DNA, 15 bp, Homo sapiens
tactgagtccttaag

SEQ ID NO: 1311595 - DNA, 15 bp, Homo sapiens
ctactgagtccttaa

SEQ ID NO: 1311596 - DNA, 15 bp, Homo sapiens
cctactgagtcctta

SEQ ID NO: 1311597 - DNA, 15 bp, Homo sapiens
gcctactgagtcctt

SEQ ID NO: 1311598 - DNA, 15 bp, Homo sapiens
ggcctactgagtcct

SEQ ID NO: 1311599 - DNA, 15 bp, Homo sapiens
tggcctactgagtcc

SEQ ID NO: 1311600 - DNA, 15 bp, Homo sapiens
ttggcctactgagtc

SEQ ID NO: 1311601 - DNA, 15 bp, Homo sapiens
tttggcctactgagt

SEQ ID NO: 1311602 - DNA, 15 bp, Homo sapiens
ttttggcctactgag

SEQ ID NO: 1311603 - DNA, 15 bp, Homo sapiens
tttttggcctactga

SEQ ID NO: 1311604 - DNA, 15 bp, Homo sapiens
ctttttggcctactg

SEQ ID NO: 1311605 - DNA, 15 bp, Homo sapiens
gctttttggcctact

SEQ ID NO: 1311606 - DNA, 15 bp, Homo sapiens
tgctttttggcctac

SEQ ID NO: 1311607 - DNA, 15 bp, Homo sapiens
gtgctttttggccta

SEQ ID NO: 1311608 - DNA, 15 bp, Homo sapiens
tgtgctttttggcct

SEQ ID NO: 1311609 - DNA, 15 bp, Homo sapiens
ttgtgctttttggcc

SEQ ID NO: 1311610 - DNA, 15 bp, Homo sapiens
cttgtgctttttggc

SEQ ID NO: 1311611 - DNA, 15 bp, Homo sapiens
tcttgtgctttttgg

SEQ ID NO: 1311612 - DNA, 15 bp, Homo sapiens
ctcttgtgctttttg

SEQ ID NO: 1311613 - DNA, 15 bp, Homo sapiens
tctcttgtgcttttt

SEQ ID NO: 1311614 - DNA, 15 bp, Homo sapiens
gtctcttgtgctttt

SEQ ID NO: 1311615 - DNA, 15 bp, Homo sapiens
tgtctcttgtgcttt

SEQ ID NO: 1311616 - DNA, 15 bp, Homo sapiens
gtgtctcttgtgctt

SEQ ID NO: 1311617 - DNA, 15 bp, Homo sapiens
agtgtctcttgtgct

SEQ ID NO: 1311618 - DNA, 15 bp, Homo sapiens
cagtgtctcttgtgc

SEQ ID NO: 1311619 - DNA, 15 bp, Homo sapiens
ccagtgtctcttgtg

SEQ ID NO: 1311620 - DNA, 15 bp, Homo sapiens
tccagtgtctcttgt

SEQ ID NO: 1311621 - DNA, 15 bp, Homo sapiens
gtccagtgtctcttg

SEQ ID NO: 1311622 - DNA, 15 bp, Homo sapiens
ggtccagtgtctctt

SEQ ID NO: 1311623 - DNA, 15 bp, Homo sapiens
tggtccagtgtctct

SEQ ID NO: 1311624 - DNA, 15 bp, Homo sapiens
atggtccagtgtctc

SEQ ID NO: 1311625 - DNA, 15 bp, Homo sapiens
catggtccagtgtct

SEQ ID NO: 1311626 - DNA, 15 bp, Homo sapiens
gcatggtccagtgtc

SEQ ID NO: 1311627 - DNA, 15 bp, Homo sapiens
agcatggtccagtgt

SEQ ID NO: 1311628 - DNA, 15 bp, Homo sapiens
gagcatggtccagtg

SEQ ID NO: 1311629 - DNA, 15 bp, Homo sapiens
ggagcatggtccagt

SEQ ID NO: 1311630 - DNA, 15 bp, Homo sapiens
tggagcatggtccag

SEQ ID NO: 1311631 - DNA, 15 bp, Homo sapiens
ctggagcatggtcca

SEQ ID NO: 1311632 - DNA, 15 bp, Homo sapiens
gctggagcatggtcc

SEQ ID NO: 1311633 - DNA, 15 bp, Homo sapiens
agctggagcatggtc

SEQ ID NO: 1311634 - DNA, 15 bp, Homo sapiens
gagctggagcatggt

SEQ ID NO: 1311635 - DNA, 15 bp, Homo sapiens
ggagctggagcatgg

SEQ ID NO: 1311636 - DNA, 15 bp, Homo sapiens
tggagctggagcatg

SEQ ID NO: 1311637 - DNA, 15 bp, Homo sapiens
ctggagctggagcat

SEQ ID NO: 1311638 - DNA, 15 bp, Homo sapiens
cctggagctggagca

SEQ ID NO: 1311639 - DNA, 15 bp, Homo sapiens
tcctggagctggagc

SEQ ID NO: 1311640 - DNA, 15 bp, Homo sapiens
gtcctggagctggag

SEQ ID NO: 1311641 - DNA, 15 bp, Homo sapiens
tgtcctggagctgga

SEQ ID NO: 1311642 - DNA, 15 bp, Homo sapiens
gtgtcctggagctgg

SEQ ID NO: 1311643 - DNA, 15 bp, Homo sapiens
tgtgtcctggagctg

SEQ ID NO: 1311644 - DNA, 15 bp, Homo sapiens
gtgtgtcctggagct

SEQ ID NO: 1311645 - DNA, 15 bp, Homo sapiens
agtgtgtcctggagc

SEQ ID NO: 1311646 - DNA, 15 bp, Homo sapiens
tagtgtgtcctggag

SEQ ID NO: 1311647 - DNA, 15 bp, Homo sapiens
gtagtgtgtcctgga

SEQ ID NO: 1311648 - DNA, 15 bp, Homo sapiens
agtagtgtgtcctgg

SEQ ID NO: 1311649 - DNA, 15 bp, Homo sapiens
gagtagtgtgtcctg

SEQ ID NO: 1311650 - DNA, 15 bp, Homo sapiens
agagtagtgtgtcct

SEQ ID NO: 1311651 - DNA, 15 bp, Homo sapiens
cagagtagtgtgtcc

SEQ ID NO: 1311652 - DNA, 15 bp, Homo sapiens
gcagagtagtgtgtc

SEQ ID NO: 1311653 - DNA, 15 bp, Homo sapiens
agcagagtagtgtgt

SEQ ID NO: 1311654 - DNA, 15 bp, Homo sapiens
cagcagagtagtgtg

SEQ ID NO: 1311655 - DNA, 15 bp, Homo sapiens
gcagcagagtagtgt

SEQ ID NO: 1311656 - DNA, 15 bp, Homo sapiens
agcagcagagtagtg

SEQ ID NO: 1311657 - DNA, 15 bp, Homo sapiens
tagcagcagagtagt

SEQ ID NO: 1311658 - DNA, 15 bp, Homo sapiens
gtagcagcagagtag

SEQ ID NO: 1311659 - DNA, 15 bp, Homo sapiens
agtagcagcagagta

SEQ ID NO: 1311660 - DNA, 15 bp, Homo sapiens
cagtagcagcagagt

SEQ ID NO: 1311661 - DNA, 15 bp, Homo sapiens
tcagtagcagcagag

SEQ ID NO: 1311662 - DNA, 15 bp, Homo sapiens
ttcagtagcagcaga

SEQ ID NO: 1311663 - DNA, 15 bp, Homo sapiens
tttcagtagcagcag

SEQ ID NO: 1311664 - DNA, 15 bp, Homo sapiens
atttcagtagcagca

SEQ ID NO: 1311665 - DNA, 15 bp, Homo sapiens
catttcagtagcagc

SEQ ID NO: 1311666 - DNA, 15 bp, Homo sapiens
ccatttcagtagcag

SEQ ID NO: 1311667 - DNA, 15 bp, Homo sapiens
gccatttcagtagca

SEQ ID NO: 1311668 - DNA, 15 bp, Homo sapiens
tgccatttcagtagc

SEQ ID NO: 1311669 - DNA, 15 bp, Homo sapiens
atgccatttcagtag

SEQ ID NO: 1311670 - DNA, 15 bp, Homo sapiens
aatgccatttcagta

SEQ ID NO: 1311671 - DNA, 15 bp, Homo sapiens
aaatgccatttcagt

SEQ ID NO: 1311672 - DNA, 15 bp, Homo sapiens
aaaatgccatttcag

SEQ ID NO: 1311673 - DNA, 15 bp, Homo sapiens
caaaatgccatttca

SEQ ID NO: 1311674 - DNA, 15 bp, Homo sapiens
ccaaaatgccatttc

SEQ ID NO: 1311675 - DNA, 15 bp, Homo sapiens
cccaaaatgccattt

SEQ ID NO: 1311676 - DNA, 15 bp, Homo sapiens
gcccaaaatgccatt

SEQ ID NO: 1311677 - DNA, 15 bp, Homo sapiens
agcccaaaatgccat

SEQ ID NO: 1311678 - DNA, 15 bp, Homo sapiens
gagcccaaaatgcca

SEQ ID NO: 1311679 - DNA, 15 bp, Homo sapiens
agagcccaaaatgcc

SEQ ID NO: 1311680 - DNA, 15 bp, Homo sapiens
cagagcccaaaatgc

SEQ ID NO: 1311681 - DNA, 15 bp, Homo sapiens
tcagagcccaaaatg

SEQ ID NO: 1311682 - DNA, 15 bp, Homo sapiens
ttcagagcccaaaat

SEQ ID NO: 1311683 - DNA, 15 bp, Homo sapiens
tttcagagcccaaaa

SEQ ID NO: 1311684 - DNA, 15 bp, Homo sapiens
ctttcagagcccaaa

SEQ ID NO: 1311685 - DNA, 15 bp, Homo sapiens
cctttcagagcccaa

SEQ ID NO: 1311686 - DNA, 15 bp, Homo sapiens
tcctttcagagccca

SEQ ID NO: 1311687 - DNA, 15 bp, Homo sapiens
ttcctttcagagccc

SEQ ID NO: 1311688 - DNA, 15 bp, Homo sapiens
tttcctttcagagcc

SEQ ID NO: 1311689 - DNA, 15 bp, Homo sapiens
ctttcctttcagagc

SEQ ID NO: 1311690 - DNA, 15 bp, Homo sapiens
cctttcctttcagag

SEQ ID NO: 1311691 - DNA, 15 bp, Homo sapiens
acctttcctttcaga

SEQ ID NO: 1311692 - DNA, 15 bp, Homo sapiens
gacctttcctttcag

SEQ ID NO: 1311693 - DNA, 15 bp, Homo sapiens
agacctttcctttca

SEQ ID NO: 1311694 - DNA, 15 bp, Homo sapiens
gagacctttcctttc

SEQ ID NO: 1311695 - DNA, 15 bp, Homo sapiens
agagacctttccttt

SEQ ID NO: 1311696 - DNA, 15 bp, Homo sapiens
cagagacctttcctt

SEQ ID NO: 1311697 - DNA, 15 bp, Homo sapiens
ccagagacctttcct

SEQ ID NO: 1311698 - DNA, 15 bp, Homo sapiens
accagagacctttcc

SEQ ID NO: 1311699 - DNA, 15 bp, Homo sapiens
caccagagacctttc

SEQ ID NO: 1311700 - DNA, 15 bp, Homo sapiens
gcaccagagaccttt

SEQ ID NO: 1311701 - DNA, 15 bp, Homo sapiens
ggcaccagagacctt

SEQ ID NO: 1311702 - DNA, 15 bp, Homo sapiens
gggcaccagagacct

SEQ ID NO: 1311703 - DNA, 15 bp, Homo sapiens
ggggcaccagagacc

SEQ ID NO: 1311704 - DNA, 15 bp, Homo sapiens
gggggcaccagagac

SEQ ID NO: 1311705 - DNA, 15 bp, Homo sapiens
agggggcaccagaga

SEQ ID NO: 1311706 - DNA, 15 bp, Homo sapiens
tagggggcaccagag

SEQ ID NO: 1311707 - DNA, 15 bp, Homo sapiens
ctagggggcaccaga

SEQ ID NO: 1311708 - DNA, 15 bp, Homo sapiens
tctagggggcaccag

SEQ ID NO: 1311709 - DNA, 15 bp, Homo sapiens
ctctagggggcacca

SEQ ID NO: 1311710 - DNA, 15 bp, Homo sapiens
cctctagggggcacc

SEQ ID NO: 1311711 - DNA, 15 bp, Homo sapiens
gcctctagggggcac

SEQ ID NO: 1311712 - DNA, 15 bp, Homo sapiens
agcctctagggggca

SEQ ID NO: 1311713 - DNA, 15 bp, Homo sapiens
cagcctctagggggc

SEQ ID NO: 1311714 - DNA, 15 bp, Homo sapiens
ccagcctctaggggg

SEQ ID NO: 1311715 - DNA, 15 bp, Homo sapiens
accagcctctagggg

SEQ ID NO: 1311716 - DNA, 15 bp, Homo sapiens
gaccagcctctaggg

SEQ ID NO: 1311717 - DNA, 15 bp, Homo sapiens
ggaccagcctctagg

SEQ ID NO: 1311718 - DNA, 15 bp, Homo sapiens
aggaccagcctctag

SEQ ID NO: 1311719 - DNA, 15 bp, Homo sapiens
caggaccagcctcta

SEQ ID NO: 1311720 - DNA, 15 bp, Homo sapiens
gcaggaccagcctct

SEQ ID NO: 1311721 - DNA, 15 bp, Homo sapiens
tgcaggaccagcctc

SEQ ID NO: 1311722 - DNA, 15 bp, Homo sapiens
ttgcaggaccagcct

SEQ ID NO: 1311723 - DNA, 15 bp, Homo sapiens
attgcaggaccagcc

SEQ ID NO: 1311724 - DNA, 15 bp, Homo sapiens
aattgcaggaccagc

SEQ ID NO: 1311725 - DNA, 15 bp, Homo sapiens
aaattgcaggaccag

SEQ ID NO: 1311726 - DNA, 15 bp, Homo sapiens
caaattgcaggacca

SEQ ID NO: 1311727 - DNA, 15 bp, Homo sapiens
gcaaattgcaggacc

SEQ ID NO: 1311728 - DNA, 15 bp, Homo sapiens
agcaaattgcaggac

SEQ ID NO: 1311729 - DNA, 15 bp, Homo sapiens
cagcaaattgcagga

SEQ ID NO: 1311730 - DNA, 15 bp, Homo sapiens
ccagcaaattgcagg

SEQ ID NO: 1311731 - DNA, 15 bp, Homo sapiens
tccagcaaattgcag

SEQ ID NO: 1311732 - DNA, 15 bp, Homo sapiens
atccagcaaattgca

SEQ ID NO: 1311733 - DNA, 15 bp, Homo sapiens
aatccagcaaattgc

SEQ ID NO: 1311734 - DNA, 15 bp, Homo sapiens
aaatccagcaaattg

SEQ ID NO: 1311735 - DNA, 15 bp, Homo sapiens
caaatccagcaaatt

SEQ ID NO: 1311736 - DNA, 15 bp, Homo sapiens
acaaatccagcaaat

SEQ ID NO: 1311737 - DNA, 15 bp, Homo sapiens
cacaaatccagcaaa

SEQ ID NO: 1311738 - DNA, 15 bp, Homo sapiens
tcacaaatccagcaa

SEQ ID NO: 1311739 - DNA, 15 bp, Homo sapiens
ctcacaaatccagca

SEQ ID NO: 1311740 - DNA, 15 bp, Homo sapiens
gctcacaaatccagc

SEQ ID NO: 1311741 - DNA, 15 bp, Homo sapiens
tgctcacaaatccag

SEQ ID NO: 1311742 - DNA, 15 bp, Homo sapiens
ttgctcacaaatcca

SEQ ID NO: 1311743 - DNA, 15 bp, Homo sapiens
attgctcacaaatcc

SEQ ID NO: 1311744 - DNA, 15 bp, Homo sapiens
aattgctcacaaatc

SEQ ID NO: 1311745 - DNA, 15 bp, Homo sapiens
taattgctcacaaat

SEQ ID NO: 1311746 - DNA, 15 bp, Homo sapiens
ttaattgctcacaaa

SEQ ID NO: 1311747 - DNA, 15 bp, Homo sapiens
cttaattgctcacaa

SEQ ID NO: 1311748 - DNA, 15 bp, Homo sapiens
acttaattgctcaca

SEQ ID NO: 1311749 - DNA, 15 bp, Homo sapiens
tacttaattgctcac

SEQ ID NO: 1311750 - DNA, 15 bp, Homo sapiens
ctacttaattgctca

SEQ ID NO: 1311751 - DNA, 15 bp, Homo sapiens
gctacttaattgctc

SEQ ID NO: 1311752 - DNA, 15 bp, Homo sapiens
tgctacttaattgct

SEQ ID NO: 1311753 - DNA, 15 bp, Homo sapiens
ttgctacttaattgc

SEQ ID NO: 1311754 - DNA, 15 bp, Homo sapiens
cttgctacttaattg

SEQ ID NO: 1311755 - DNA, 15 bp, Homo sapiens
ccttgctacttaatt

SEQ ID NO: 1311756 - DNA, 15 bp, Homo sapiens
cccttgctacttaat

SEQ ID NO: 1311757 - DNA, 15 bp, Homo sapiens
ccccttgctacttaa

SEQ ID NO: 1311758 - DNA, 15 bp, Homo sapiens
tccccttgctactta

SEQ ID NO: 1311759 - DNA, 15 bp, Homo sapiens
ctccccttgctactt

SEQ ID NO: 1311760 - DNA, 15 bp, Homo sapiens
tctccccttgctact

SEQ ID NO: 1311761 - DNA, 15 bp, Homo sapiens
ctctccccttgctac

SEQ ID NO: 1311762 - DNA, 15 bp, Homo sapiens
cctctccccttgcta

SEQ ID NO: 1311763 - DNA, 15 bp, Homo sapiens
ccctctccccttgct

SEQ ID NO: 1311764 - DNA, 15 bp, Homo sapiens
cccctctccccttgc

SEQ ID NO: 1311765 - DNA, 15 bp, Homo sapiens
tcccctctccccttg

SEQ ID NO: 1311766 - DNA, 15 bp, Homo sapiens
ttcccctctcccctt

SEQ ID NO: 1311767 - DNA, 15 bp, Homo sapiens
cttcccctctcccct

SEQ ID NO: 1311768 - DNA, 15 bp, Homo sapiens
ccttcccctctcccc

SEQ ID NO: 1311769 - DNA, 15 bp, Homo sapiens
cccttcccctctccc

SEQ ID NO: 1311770 - DNA, 15 bp, Homo sapiens
ccccttcccctctcc

SEQ ID NO: 1311771 - DNA, 15 bp, Homo sapiens
cccccttcccctctc

SEQ ID NO: 1311772 - DNA, 15 bp, Homo sapiens
gcccccttcccctct

SEQ ID NO: 1311773 - DNA, 15 bp, Homo sapiens
ggcccccttcccctc

SEQ ID NO: 1311774 - DNA, 15 bp, Homo sapiens
tggcccccttcccct

SEQ ID NO: 1311775 - DNA, 15 bp, Homo sapiens
ttggcccccttcccc

SEQ ID NO: 1311776 - DNA, 15 bp, Homo sapiens
attggcccccttccc

SEQ ID NO: 1311777 - DNA, 15 bp, Homo sapiens
aattggcccccttcc

SEQ ID NO: 1311778 - DNA, 15 bp, Homo sapiens
aaattggcccccttc

SEQ ID NO: 1311779 - DNA, 15 bp, Homo sapiens
gaaattggccccctt

SEQ ID NO: 1311780 - DNA, 15 bp, Homo sapiens
tgaaattggccccct

SEQ ID NO: 1311781 - DNA, 15 bp, Homo sapiens
atgaaattggccccc

SEQ ID NO: 1311782 - DNA, 15 bp, Homo sapiens
gatgaaattggcccc

SEQ ID NO: 1311783 - DNA, 15 bp, Homo sapiens
tgatgaaattggccc

SEQ ID NO: 1311784 - DNA, 15 bp, Homo sapiens
atgatgaaattggcc

SEQ ID NO: 1311785 - DNA, 15 bp, Homo sapiens
catgatgaaattggc

SEQ ID NO: 1311786 - DNA, 15 bp, Homo sapiens
gcatgatgaaattgg

SEQ ID NO: 1311787 - DNA, 15 bp, Homo sapiens
agcatgatgaaattg

SEQ ID NO: 1311788 - DNA, 15 bp, Homo sapiens
gagcatgatgaaatt

SEQ ID NO: 1311789 - DNA, 15 bp, Homo sapiens
tgagcatgatgaaat

SEQ ID NO: 1311790 - DNA, 15 bp, Homo sapiens
ctgagcatgatgaaa

SEQ ID NO: 1311791 - DNA, 15 bp, Homo sapiens
tctgagcatgatgaa

SEQ ID NO: 1311792 - DNA, 15 bp, Homo sapiens
atctgagcatgatga

SEQ ID NO: 1311793 - DNA, 15 bp, Homo sapiens
catctgagcatgatg

SEQ ID NO: 1311794 - DNA, 15 bp, Homo sapiens
ccatctgagcatgat

SEQ ID NO: 1311795 - DNA, 15 bp, Homo sapiens
cccatctgagcatga

SEQ ID NO: 1311796 - DNA, 15 bp, Homo sapiens
gcccatctgagcatg

SEQ ID NO: 1311797 - DNA, 15 bp, Homo sapiens
tgcccatctgagcat

SEQ ID NO: 1311798 - DNA, 15 bp, Homo sapiens
ctgcccatctgagca

SEQ ID NO: 1311799 - DNA, 15 bp, Homo sapiens
actgcccatctgagc

SEQ ID NO: 1311800 - DNA, 15 bp, Homo sapiens
aactgcccatctgag

SEQ ID NO: 1311801 - DNA, 15 bp, Homo sapiens
gaactgcccatctga

SEQ ID NO: 1311802 - DNA, 15 bp, Homo sapiens
cgaactgcccatctg

SEQ ID NO: 1311803 - DNA, 15 bp, Homo sapiens
acgaactgcccatct

SEQ ID NO: 1311804 - DNA, 15 bp, Homo sapiens
cacgaactgcccatc

SEQ ID NO: 1311805 - DNA, 15 bp, Homo sapiens
ccacgaactgcccat

SEQ ID NO: 1311806 - DNA, 15 bp, Homo sapiens
accacgaactgccca

SEQ ID NO: 1311807 - DNA, 15 bp, Homo sapiens
aaccacgaactgccc

SEQ ID NO: 1311808 - DNA, 15 bp, Homo sapiens
taaccacgaactgcc

SEQ ID NO: 1311809 - DNA, 15 bp, Homo sapiens
ctaaccacgaactgc

SEQ ID NO: 1311810 - DNA, 15 bp, Homo sapiens
gctaaccacgaactg

SEQ ID NO: 1311811 - DNA, 15 bp, Homo sapiens
tgctaaccacgaact

SEQ ID NO: 1311812 - DNA, 15 bp, Homo sapiens
ctgctaaccacgaac

SEQ ID NO: 1311813 - DNA, 15 bp, Homo sapiens
actgctaaccacgaa

SEQ ID NO: 1311814 - DNA, 15 bp, Homo sapiens
cactgctaaccacga

SEQ ID NO: 1311815 - DNA, 15 bp, Homo sapiens
ccactgctaaccacg

SEQ ID NO: 1311816 - DNA, 15 bp, Homo sapiens
accactgctaaccac

SEQ ID NO: 1311817 - DNA, 15 bp, Homo sapiens
caccactgctaacca

SEQ ID NO: 1311818 - DNA, 15 bp, Homo sapiens
ccaccactgctaacc

SEQ ID NO: 1311819 - DNA, 15 bp, Homo sapiens
tccaccactgctaac

SEQ ID NO: 1311820 - DNA, 15 bp, Homo sapiens
ctccaccactgctaa

SEQ ID NO: 1311821 - DNA, 15 bp, Homo sapiens
tctccaccactgcta

SEQ ID NO: 1311822 - DNA, 15 bp, Homo sapiens
atctccaccactgct

SEQ ID NO: 1311823 - DNA, 15 bp, Homo sapiens
tatctccaccactgc

SEQ ID NO: 1311824 - DNA, 15 bp, Homo sapiens
ctatctccaccactg

SEQ ID NO: 1311825 - DNA, 15 bp, Homo sapiens
cctatctccaccact

SEQ ID NO: 1311826 - DNA, 15 bp, Homo sapiens
gcctatctccaccac

SEQ ID NO: 1311827 - DNA, 15 bp, Homo sapiens
agcctatctccacca

SEQ ID NO: 1311828 - DNA, 15 bp, Homo sapiens
gagcctatctccacc

SEQ ID NO: 1311829 - DNA, 15 bp, Homo sapiens
tgagcctatctccac

SEQ ID NO: 1311830 - DNA, 15 bp, Homo sapiens
gtgagcctatctcca

SEQ ID NO: 1311831 - DNA, 15 bp, Homo sapiens
agtgagcctatctcc

SEQ ID NO: 1311832 - DNA, 15 bp, Homo sapiens
aagtgagcctatctc

SEQ ID NO: 1311833 - DNA, 15 bp, Homo sapiens
aaagtgagcctatct

SEQ ID NO: 1311834 - DNA, 15 bp, Homo sapiens
caaagtgagcctatc

SEQ ID NO: 1311835 - DNA, 15 bp, Homo sapiens
tcaaagtgagcctat

SEQ ID NO: 1311836 - DNA, 15 bp, Homo sapiens
ttcaaagtgagccta

SEQ ID NO: 1311837 - DNA, 15 bp, Homo sapiens
gttcaaagtgagcct

SEQ ID NO: 1311838 - DNA, 15 bp, Homo sapiens
agttcaaagtgagcc

SEQ ID NO: 1311839 - DNA, 15 bp, Homo sapiens
gagttcaaagtgagc

SEQ ID NO: 1311840 - DNA, 15 bp, Homo sapiens
ggagttcaaagtgag

SEQ ID NO: 1311841 - DNA, 15 bp, Homo sapiens
aggagttcaaagtga

SEQ ID NO: 1311842 - DNA, 15 bp, Homo sapiens
taggagttcaaagtg

SEQ ID NO: 1311843 - DNA, 15 bp, Homo sapiens
ataggagttcaaagt

SEQ ID NO: 1311844 - DNA, 15 bp, Homo sapiens
tataggagttcaaag

SEQ ID NO: 1311845 - DNA, 15 bp, Homo sapiens
ttataggagttcaaa

SEQ ID NO: 1311846 - DNA, 15 bp, Homo sapiens
cttataggagttcaa

SEQ ID NO: 1311847 - DNA, 15 bp, Homo sapiens
gcttataggagttca

SEQ ID NO: 1311848 - DNA, 15 bp, Homo sapiens
agcttataggagttc

SEQ ID NO: 1311849 - DNA, 15 bp, Homo sapiens
tagcttataggagtt

SEQ ID NO: 1311850 - DNA, 15 bp, Homo sapiens
atagcttataggagt

SEQ ID NO: 1311851 - DNA, 15 bp, Homo sapiens
aatagcttataggag

SEQ ID NO: 1311852 - DNA, 15 bp, Homo sapiens
aaatagcttatagga

SEQ ID NO: 1311853 - DNA, 15 bp, Homo sapiens
caaatagcttatagg

SEQ ID NO: 1311854 - DNA, 15 bp, Homo sapiens
tcaaatagcttatag

SEQ ID NO: 1311855 - DNA, 15 bp, Homo sapiens
gtcaaatagcttata

SEQ ID NO: 1311856 - DNA, 15 bp, Homo sapiens
tgtcaaatagcttat

SEQ ID NO: 1311857 - DNA, 15 bp, Homo sapiens
atgtcaaatagctta

SEQ ID NO: 1311858 - DNA, 15 bp, Homo sapiens
gatgtcaaatagctt

SEQ ID NO: 1311859 - DNA, 15 bp, Homo sapiens
agatgtcaaatagct

SEQ ID NO: 1311860 - DNA, 15 bp, Homo sapiens
cagatgtcaaatagc

SEQ ID NO: 1311861 - DNA, 15 bp, Homo sapiens
tcagatgtcaaatag

SEQ ID NO: 1311862 - DNA, 15 bp, Homo sapiens
atcagatgtcaaata

SEQ ID NO: 1311863 - DNA, 15 bp, Homo sapiens
tatcagatgtcaaat

SEQ ID NO: 1311864 - DNA, 15 bp, Homo sapiens
ttatcagatgtcaaa

SEQ ID NO: 1311865 - DNA, 15 bp, Homo sapiens
gttatcagatgtcaa

SEQ ID NO: 1311866 - DNA, 15 bp, Homo sapiens
agttatcagatgtca

SEQ ID NO: 1311867 - DNA, 15 bp, Homo sapiens
aagttatcagatgtc

SEQ ID NO: 1311868 - DNA, 15 bp, Homo sapiens
caagttatcagatgt

SEQ ID NO: 1311869 - DNA, 15 bp, Homo sapiens
tcaagttatcagatg

SEQ ID NO: 1311870 - DNA, 15 bp, Homo sapiens
gtcaagttatcagat

SEQ ID NO: 1311871 - DNA, 15 bp, Homo sapiens
agtcaagttatcaga

SEQ ID NO: 1311872 - DNA, 15 bp, Homo sapiens
gagtcaagttatcag

SEQ ID NO: 1311873 - DNA, 15 bp, Homo sapiens
tgagtcaagttatca

SEQ ID NO: 1311874 - DNA, 15 bp, Homo sapiens
ttgagtcaagttatc

SEQ ID NO: 1311875 - DNA, 15 bp, Homo sapiens
gttgagtcaagttat

SEQ ID NO: 1311876 - DNA, 15 bp, Homo sapiens
ggttgagtcaagtta

SEQ ID NO: 1311877 - DNA, 15 bp, Homo sapiens
cggttgagtcaagtt

SEQ ID NO: 1311878 - DNA, 15 bp, Homo sapiens
gcggttgagtcaagt

SEQ ID NO: 1311879 - DNA, 15 bp, Homo sapiens
agcggttgagtcaag

SEQ ID NO: 1311880 - DNA, 15 bp, Homo sapiens
tagcggttgagtcaa

SEQ ID NO: 1311881 - DNA, 15 bp, Homo sapiens
atagcggttgagtca

SEQ ID NO: 1311882 - DNA, 15 bp, Homo sapiens
catagcggttgagtc

SEQ ID NO: 1311883 - DNA, 15 bp, Homo sapiens
tcatagcggttgagt

SEQ ID NO: 1311884 - DNA, 15 bp, Homo sapiens
gtcatagcggttgag

SEQ ID NO: 1311885 - DNA, 15 bp, Homo sapiens
ggtcatagcggttga

SEQ ID NO: 1311886 - DNA, 15 bp, Homo sapiens
tggtcatagcggttg

SEQ ID NO: 1311887 - DNA, 15 bp, Homo sapiens
ttggtcatagcggtt

SEQ ID NO: 1311888 - DNA, 15 bp, Homo sapiens
tttggtcatagcggt

SEQ ID NO: 1311889 - DNA, 15 bp, Homo sapiens
ttttggtcatagcgg

SEQ ID NO: 1311890 - DNA, 15 bp, Homo sapiens
cttttggtcatagcg

SEQ ID NO: 1311891 - DNA, 15 bp, Homo sapiens
gcttttggtcatagc

SEQ ID NO: 1311892 - DNA, 15 bp, Homo sapiens
tgcttttggtcatag

SEQ ID NO: 1311893 - DNA, 15 bp, Homo sapiens
gtgcttttggtcata

SEQ ID NO: 1311894 - DNA, 15 bp, Homo sapiens
ggtgcttttggtcat

SEQ ID NO: 1311895 - DNA, 15 bp, Homo sapiens
gggtgcttttggtca

SEQ ID NO: 1311896 - DNA, 15 bp, Homo sapiens
ggggtgcttttggtc

SEQ ID NO: 1311897 - DNA, 15 bp, Homo sapiens
aggggtgcttttggt

SEQ ID NO: 1311898 - DNA, 15 bp, Homo sapiens
gaggggtgcttttgg

SEQ ID NO: 1311899 - DNA, 15 bp, Homo sapiens
ggaggggtgcttttg

SEQ ID NO: 1311900 - DNA, 15 bp, Homo sapiens
gggaggggtgctttt

SEQ ID NO: 1311901 - DNA, 15 bp, Homo sapiens
ggggaggggtgcttt

SEQ ID NO: 1311902 - DNA, 15 bp, Homo sapiens
gggggaggggtgctt

SEQ ID NO: 1311903 - DNA, 15 bp, Homo sapiens
tgggggaggggtgct

SEQ ID NO: 1311904 - DNA, 15 bp, Homo sapiens
ttgggggaggggtgc

SEQ ID NO: 1311905 - DNA, 15 bp, Homo sapiens
cttgggggaggggtg

SEQ ID NO: 1311906 - DNA, 15 bp, Homo sapiens
ccttgggggaggggt

SEQ ID NO: 1311907 - DNA, 15 bp, Homo sapiens
cccttgggggagggg

SEQ ID NO: 1311908 - DNA, 15 bp, Homo sapiens
tcccttgggggaggg

SEQ ID NO: 1311909 - DNA, 15 bp, Homo sapiens
ctcccttgggggagg

SEQ ID NO: 1311910 - DNA, 15 bp, Homo sapiens
actcccttgggggag

SEQ ID NO: 1311911 - DNA, 15 bp, Homo sapiens
aactcccttggggga

SEQ ID NO: 1311912 - DNA, 15 bp, Homo sapiens
caactcccttggggg

SEQ ID NO: 1311913 - DNA, 15 bp, Homo sapiens
gcaactcccttgggg

SEQ ID NO: 1311914 - DNA, 15 bp, Homo sapiens
agcaactcccttggg

SEQ ID NO: 1311915 - DNA, 15 bp, Homo sapiens
aagcaactcccttgg

SEQ ID NO: 1311916 - DNA, 15 bp, Homo sapiens
gaagcaactcccttg

SEQ ID NO: 1311917 - DNA, 15 bp, Homo sapiens
agaagcaactccctt

SEQ ID NO: 1311918 - DNA, 15 bp, Homo sapiens
gagaagcaactccct

SEQ ID NO: 1311919 - DNA, 15 bp, Homo sapiens
tgagaagcaactccc

SEQ ID NO: 1311920 - DNA, 15 bp, Homo sapiens
ctgagaagcaactcc

SEQ ID NO: 1311921 - DNA, 15 bp, Homo sapiens
actgagaagcaactc

SEQ ID NO: 1311922 - DNA, 15 bp, Homo sapiens
cactgagaagcaact

SEQ ID NO: 1311923 - DNA, 15 bp, Homo sapiens
tcactgagaagcaac

SEQ ID NO: 1311924 - DNA, 15 bp, Homo sapiens
gtcactgagaagcaa

SEQ ID NO: 1311925 - DNA, 15 bp, Homo sapiens
tgtcactgagaagca

SEQ ID NO: 1311926 - DNA, 15 bp, Homo sapiens
ctgtcactgagaagc

SEQ ID NO: 1311927 - DNA, 15 bp, Homo sapiens
actgtcactgagaag

SEQ ID NO: 1311928 - DNA, 15 bp, Homo sapiens
cactgtcactgagaa

SEQ ID NO: 1311929 - DNA, 15 bp, Homo sapiens
gcactgtcactgaga

SEQ ID NO: 1311930 - DNA, 15 bp, Homo sapiens
ggcactgtcactgag

SEQ ID NO: 1311931 - DNA, 15 bp, Homo sapiens
gggcactgtcactga

SEQ ID NO: 1311932 - DNA, 15 bp, Homo sapiens
cgggcactgtcactg

SEQ ID NO: 1311933 - DNA, 15 bp, Homo sapiens
tcgggcactgtcact

SEQ ID NO: 1311934 - DNA, 15 bp, Homo sapiens
ttcgggcactgtcac

SEQ ID NO: 1311935 - DNA, 15 bp, Homo sapiens
cttcgggcactgtca

SEQ ID NO: 1311936 - DNA, 15 bp, Homo sapiens
gcttcgggcactgtc

SEQ ID NO: 1311937 - DNA, 15 bp, Homo sapiens
ggcttcgggcactgt

SEQ ID NO: 1311938 - DNA, 15 bp, Homo sapiens
aggcttcgggcactg

SEQ ID NO: 1311939 - DNA, 15 bp, Homo sapiens
caggcttcgggcact

SEQ ID NO: 1311940 - DNA, 15 bp, Homo sapiens
ccaggcttcgggcac

SEQ ID NO: 1311941 - DNA, 15 bp, Homo sapiens
tccaggcttcgggca

SEQ ID NO: 1311942 - DNA, 15 bp, Homo sapiens
ttccaggcttcgggc

SEQ ID NO: 1311943 - DNA, 15 bp, Homo sapiens
cttccaggcttcggg

SEQ ID NO: 1311944 - DNA, 15 bp, Homo sapiens
ccttccaggcttcgg

SEQ ID NO: 1311945 - DNA, 15 bp, Homo sapiens
tccttccaggcttcg

SEQ ID NO: 1311946 - DNA, 15 bp, Homo sapiens
ttccttccaggcttc

SEQ ID NO: 1311947 - DNA, 15 bp, Homo sapiens
cttccttccaggctt

SEQ ID NO: 1311948 - DNA, 15 bp, Homo sapiens
ccttccttccaggct

SEQ ID NO: 1311949 - DNA, 15 bp, Homo sapiens
cccttccttccaggc

SEQ ID NO: 1311950 - DNA, 15 bp, Homo sapiens
gcccttccttccagg

SEQ ID NO: 1311951 - DNA, 15 bp, Homo sapiens
ggcccttccttccag

SEQ ID NO: 1311952 - DNA, 15 bp, Homo sapiens
gggcccttccttcca

SEQ ID NO: 1311953 - DNA, 15 bp, Homo sapiens
ggggcccttccttcc

SEQ ID NO: 1311954 - DNA, 15 bp, Homo sapiens
aggggcccttccttc

SEQ ID NO: 1311955 - DNA, 15 bp, Homo sapiens
caggggcccttcctt

SEQ ID NO: 1311956 - DNA, 15 bp, Homo sapiens
tcaggggcccttcct

SEQ ID NO: 1311957 - DNA, 15 bp, Homo sapiens
ctcaggggcccttcc

SEQ ID NO: 1311958 - DNA, 15 bp, Homo sapiens
actcaggggcccttc

SEQ ID NO: 1311959 - DNA, 15 bp, Homo sapiens
cactcaggggccctt

SEQ ID NO: 1311960 - DNA, 15 bp, Homo sapiens
gcactcaggggccct

SEQ ID NO: 1311961 - DNA, 15 bp, Homo sapiens
ggcactcaggggccc

SEQ ID NO: 1311962 - DNA, 15 bp, Homo sapiens
gggcactcaggggcc

SEQ ID NO: 1311963 - DNA, 15 bp, Homo sapiens
ggggcactcaggggc

SEQ ID NO: 1311964 - DNA, 15 bp, Homo sapiens
gggggcactcagggg

SEQ ID NO: 1311965 - DNA, 15 bp, Homo sapiens
tgggggcactcaggg

SEQ ID NO: 1311966 - DNA, 15 bp, Homo sapiens
ctgggggcactcagg

SEQ ID NO: 1311967 - DNA, 15 bp, Homo sapiens
tctgggggcactcag

SEQ ID NO: 1311968 - DNA, 15 bp, Homo sapiens
ctctgggggcactca

SEQ ID NO: 1311969 - DNA, 15 bp, Homo sapiens
cctctgggggcactc

SEQ ID NO: 1311970 - DNA, 15 bp, Homo sapiens
acctctgggggcact

SEQ ID NO: 1311971 - DNA, 15 bp, Homo sapiens
gacctctgggggcac

SEQ ID NO: 1311972 - DNA, 15 bp, Homo sapiens
tgacctctgggggca

SEQ ID NO: 1311973 - DNA, 15 bp, Homo sapiens
gtgacctctgggggc

SEQ ID NO: 1311974 - DNA, 15 bp, Homo sapiens
ggtgacctctggggg

SEQ ID NO: 1311975 - DNA, 15 bp, Homo sapiens
gggtgacctctgggg

SEQ ID NO: 1311976 - DNA, 15 bp, Homo sapiens
tgggtgacctctggg

SEQ ID NO: 1311977 - DNA, 15 bp, Homo sapiens
gtgggtgacctctgg

SEQ ID NO: 1311978 - DNA, 15 bp, Homo sapiens
agtgggtgacctctg

SEQ ID NO: 1311979 - DNA, 15 bp, Homo sapiens
gagtgggtgacctct

SEQ ID NO: 1311980 - DNA, 15 bp, Homo sapiens
ggagtgggtgacctc

SEQ ID NO: 1311981 - DNA, 15 bp, Homo sapiens
tggagtgggtgacct

SEQ ID NO: 1311982 - DNA, 15 bp, Homo sapiens
atggagtgggtgacc

SEQ ID NO: 1311983 - DNA, 15 bp, Homo sapiens
catggagtgggtgac

SEQ ID NO: 1311984 - DNA, 15 bp, Homo sapiens
acatggagtgggtga

SEQ ID NO: 1311985 - DNA, 15 bp, Homo sapiens
aacatggagtgggtg

SEQ ID NO: 1311986 - DNA, 15 bp, Homo sapiens
gaacatggagtgggt

SEQ ID NO: 1311987 - DNA, 15 bp, Homo sapiens
ggaacatggagtggg

SEQ ID NO: 1311988 - DNA, 15 bp, Homo sapiens
tggaacatggagtgg

SEQ ID NO: 1311989 - DNA, 15 bp, Homo sapiens
ctggaacatggagtg

SEQ ID NO: 1311990 - DNA, 15 bp, Homo sapiens
cctggaacatggagt

SEQ ID NO: 1311991 - DNA, 15 bp, Homo sapiens
gcctggaacatggag

SEQ ID NO: 1311992 - DNA, 15 bp, Homo sapiens
tgcctggaacatgga

SEQ ID NO: 1311993 - DNA, 15 bp, Homo sapiens
ctgcctggaacatgg

SEQ ID NO: 1311994 - DNA, 15 bp, Homo sapiens
gctgcctggaacatg

SEQ ID NO: 1311995 - DNA, 15 bp, Homo sapiens
agctgcctggaacat

SEQ ID NO: 1311996 - DNA, 15 bp, Homo sapiens
cagctgcctggaaca

SEQ ID NO: 1311997 - DNA, 15 bp, Homo sapiens
tcagctgcctggaac

SEQ ID NO: 1311998 - DNA, 15 bp, Homo sapiens
gtcagctgcctggaa

SEQ ID NO: 1311999 - DNA, 15 bp, Homo sapiens
agtcagctgcctgga

SEQ ID NO: 1312000 - DNA, 15 bp, Homo sapiens
aagtcagctgcctgg

SEQ ID NO: 1312001 - DNA, 15 bp, Homo sapiens
aaagtcagctgcctg

SEQ ID NO: 1312002 - DNA, 15 bp, Homo sapiens
gaaagtcagctgcct

SEQ ID NO: 1312003 - DNA, 15 bp, Homo sapiens
tgaaagtcagctgcc

SEQ ID NO: 1312004 - DNA, 15 bp, Homo sapiens
ttgaaagtcagctgc

SEQ ID NO: 1312005 - DNA, 15 bp, Homo sapiens
gttgaaagtcagctg

SEQ ID NO: 1312006 - DNA, 15 bp, Homo sapiens
agttgaaagtcagct

SEQ ID NO: 1312007 - DNA, 15 bp, Homo sapiens
aagttgaaagtcagc

SEQ ID NO: 1312008 - DNA, 15 bp, Homo sapiens
caagttgaaagtcag

SEQ ID NO: 1312009 - DNA, 15 bp, Homo sapiens
ccaagttgaaagtca

SEQ ID NO: 1312010 - DNA, 15 bp, Homo sapiens
tccaagttgaaagtc

SEQ ID NO: 1312011 - DNA, 15 bp, Homo sapiens
gtccaagttgaaagt

SEQ ID NO: 1312012 - DNA, 15 bp, Homo sapiens
tgtccaagttgaaag

SEQ ID NO: 1312013 - DNA, 15 bp, Homo sapiens
atgtccaagttgaaa

SEQ ID NO: 1312014 - DNA, 15 bp, Homo sapiens
gatgtccaagttgaa

SEQ ID NO: 1312015 - DNA, 15 bp, Homo sapiens
agatgtccaagttga

SEQ ID NO: 1312016 - DNA, 15 bp, Homo sapiens
tagatgtccaagttg

SEQ ID NO: 1312017 - DNA, 15 bp, Homo sapiens
ctagatgtccaagtt

SEQ ID NO: 1312018 - DNA, 15 bp, Homo sapiens
tctagatgtccaagt

SEQ ID NO: 1312019 - DNA, 15 bp, Homo sapiens
atctagatgtccaag

SEQ ID NO: 1312020 - DNA, 15 bp, Homo sapiens
aatctagatgtccaa

SEQ ID NO: 1312021 - DNA, 15 bp, Homo sapiens
gaatctagatgtcca

SEQ ID NO: 1312022 - DNA, 15 bp, Homo sapiens
ggaatctagatgtcc

SEQ ID NO: 1312023 - DNA, 15 bp, Homo sapiens
gggaatctagatgtc

SEQ ID NO: 1312024 - DNA, 15 bp, Homo sapiens
agggaatctagatgt

SEQ ID NO: 1312025 - DNA, 15 bp, Homo sapiens
cagggaatctagatg

SEQ ID NO: 1312026 - DNA, 15 bp, Homo sapiens
tcagggaatctagat

SEQ ID NO: 1312027 - DNA, 15 bp, Homo sapiens
ttcagggaatctaga

SEQ ID NO: 1312028 - DNA, 15 bp, Homo sapiens
cttcagggaatctag

SEQ ID NO: 1312029 - DNA, 15 bp, Homo sapiens
gcttcagggaatcta

SEQ ID NO: 1312030 - DNA, 15 bp, Homo sapiens
ggcttcagggaatct

SEQ ID NO: 1312031 - DNA, 15 bp, Homo sapiens
gggcttcagggaatc

SEQ ID NO: 1312032 - DNA, 15 bp, Homo sapiens
tgggcttcagggaat

SEQ ID NO: 1312033 - DNA, 15 bp, Homo sapiens
ctgggcttcagggaa

SEQ ID NO: 1312034 - DNA, 15 bp, Homo sapiens
tctgggcttcaggga

SEQ ID NO: 1312035 - DNA, 15 bp, Homo sapiens
ctctgggcttcaggg

SEQ ID NO: 1312036 - DNA, 15 bp, Homo sapiens
gctctgggcttcagg

SEQ ID NO: 1312037 - DNA, 15 bp, Homo sapiens
ggctctgggcttcag

SEQ ID NO: 1312038 - DNA, 15 bp, Homo sapiens
aggctctgggcttca

SEQ ID NO: 1312039 - DNA, 15 bp, Homo sapiens
aaggctctgggcttc

SEQ ID NO: 1312040 - DNA, 15 bp, Homo sapiens
gaaggctctgggctt

SEQ ID NO: 1312041 - DNA, 15 bp, Homo sapiens
agaaggctctgggct

SEQ ID NO: 1312042 - DNA, 15 bp, Homo sapiens
tagaaggctctgggc

SEQ ID NO: 1312043 - DNA, 15 bp, Homo sapiens
ttagaaggctctggg

SEQ ID NO: 1312044 - DNA, 15 bp, Homo sapiens
cttagaaggctctgg

SEQ ID NO: 1312045 - DNA, 15 bp, Homo sapiens
acttagaaggctctg

SEQ ID NO: 1312046 - DNA, 15 bp, Homo sapiens
tacttagaaggctct

SEQ ID NO: 1312047 - DNA, 15 bp, Homo sapiens
ttacttagaaggctc

SEQ ID NO: 1312048 - DNA, 15 bp, Homo sapiens
tttacttagaaggct

SEQ ID NO: 1312049 - DNA, 15 bp, Homo sapiens
gtttacttagaaggc

SEQ ID NO: 1312050 - DNA, 15 bp, Homo sapiens
agtttacttagaagg

SEQ ID NO: 1312051 - DNA, 15 bp, Homo sapiens
cagtttacttagaag

SEQ ID NO: 1312052 - DNA, 15 bp, Homo sapiens
gcagtttacttagaa

SEQ ID NO: 1312053 - DNA, 15 bp, Homo sapiens
agcagtttacttaga

SEQ ID NO: 1312054 - DNA, 15 bp, Homo sapiens
cagcagtttacttag

SEQ ID NO: 1312055 - DNA, 15 bp, Homo sapiens
acagcagtttactta

SEQ ID NO: 1312056 - DNA, 15 bp, Homo sapiens
gacagcagtttactt

SEQ ID NO: 1312057 - DNA, 15 bp, Homo sapiens
agacagcagtttact

SEQ ID NO: 1312058 - DNA, 15 bp, Homo sapiens
cagacagcagtttac

SEQ ID NO: 1312059 - DNA, 15 bp, Homo sapiens
acagacagcagttta

SEQ ID NO: 1312060 - DNA, 15 bp, Homo sapiens
tacagacagcagttt

SEQ ID NO: 1312061 - DNA, 15 bp, Homo sapiens
ctacagacagcagtt

SEQ ID NO: 1312062 - DNA, 15 bp, Homo sapiens
actacagacagcagt

SEQ ID NO: 1312063 - DNA, 15 bp, Homo sapiens
gactacagacagcag

SEQ ID NO: 1312064 - DNA, 15 bp, Homo sapiens
agactacagacagca

SEQ ID NO: 1312065 - DNA, 15 bp, Homo sapiens
cagactacagacagc

SEQ ID NO: 1312066 - DNA, 15 bp, Homo sapiens
acagactacagacag

SEQ ID NO: 1312067 - DNA, 15 bp, Homo sapiens
cacagactacagaca

SEQ ID NO: 1312068 - DNA, 15 bp, Homo sapiens
ccacagactacagac

SEQ ID NO: 1312069 - DNA, 15 bp, Homo sapiens
cccacagactacaga

SEQ ID NO: 1312070 - DNA, 15 bp, Homo sapiens
acccacagactacag

SEQ ID NO: 1312071 - DNA, 15 bp, Homo sapiens
aacccacagactaca

SEQ ID NO: 1312072 - DNA, 15 bp, Homo sapiens
aaacccacagactac

SEQ ID NO: 1312073 - DNA, 15 bp, Homo sapiens
gaaacccacagacta

SEQ ID NO: 1312074 - DNA, 15 bp, Homo sapiens
agaaacccacagact

SEQ ID NO: 1312075 - DNA, 15 bp, Homo sapiens
aagaaacccacagac

SEQ ID NO: 1312076 - DNA, 15 bp, Homo sapiens
aaagaaacccacaga

SEQ ID NO: 1312077 - DNA, 15 bp, Homo sapiens
taaagaaacccacag

SEQ ID NO: 1312078 - DNA, 15 bp, Homo sapiens
ctaaagaaacccaca

SEQ ID NO: 1312079 - DNA, 15 bp, Homo sapiens
tctaaagaaacccac

SEQ ID NO: 1312080 - DNA, 15 bp, Homo sapiens
ttctaaagaaaccca

SEQ ID NO: 1312081 - DNA, 15 bp, Homo sapiens
attctaaagaaaccc

SEQ ID NO: 1312082 - DNA, 15 bp, Homo sapiens
tattctaaagaaacc

SEQ ID NO: 1312083 - DNA, 15 bp, Homo sapiens
ttattctaaagaaac

SEQ ID NO: 1312084 - DNA, 15 bp, Homo sapiens
cttattctaaagaaa

SEQ ID NO: 1312085 - DNA, 15 bp, Homo sapiens
tcttattctaaagaa

SEQ ID NO: 1312086 - DNA, 15 bp, Homo sapiens
ttcttattctaaaga

SEQ ID NO: 1312087 - DNA, 15 bp, Homo sapiens
attcttattctaaag

SEQ ID NO: 1312088 - DNA, 15 bp, Homo sapiens
tattcttattctaaa

SEQ ID NO: 1312089 - DNA, 15 bp, Homo sapiens
ctattcttattctaa

SEQ ID NO: 1312090 - DNA, 15 bp, Homo sapiens
actattcttattcta

SEQ ID NO: 1312091 - DNA, 15 bp, Homo sapiens
cactattcttattct

SEQ ID NO: 1312092 - DNA, 15 bp, Homo sapiens
tcactattcttattc

SEQ ID NO: 1312093 - DNA, 15 bp, Homo sapiens
ttcactattcttatt

SEQ ID NO: 1312094 - DNA, 15 bp, Homo sapiens
tttcactattcttat

SEQ ID NO: 1312095 - DNA, 15 bp, Homo sapiens
atttcactattctta

SEQ ID NO: 1312096 - DNA, 15 bp, Homo sapiens
tatttcactattctt

SEQ ID NO: 1312097 - DNA, 15 bp, Homo sapiens
ttatttcactattct

SEQ ID NO: 1312098 - DNA, 15 bp, Homo sapiens
tttatttcactattc

SEQ ID NO: 1312099 - DNA, 15 bp, Homo sapiens
ctttatttcactatt

SEQ ID NO: 1312100 - DNA, 15 bp, Homo sapiens
tctttatttcactat

SEQ ID NO: 1312101 - DNA, 15 bp, Homo sapiens
ttctttatttcacta

SEQ ID NO: 1312102 - DNA, 15 bp, Homo sapiens
tttctttatttcact

SEQ ID NO: 1312103 - DNA, 15 bp, Homo sapiens
ttttctttatttcac

SEQ ID NO: 1312104 - DNA, 15 bp, Homo sapiens
cttttctttatttca

SEQ ID NO: 1312105 - DNA, 15 bp, Homo sapiens
tcttttctttatttc

SEQ ID NO: 1312106 - DNA, 15 bp, Homo sapiens
ttcttttctttattt

SEQ ID NO: 1312107 - DNA, 15 bp, Homo sapiens
tttcttttctttatt

SEQ ID NO: 1312108 - DNA, 15 bp, Homo sapiens
ttttcttttctttat

SEQ ID NO: 1312109 - DNA, 15 bp, Homo sapiens
actttttcttttctt

SEQ ID NO: 1312110 - DNA, 15 bp, Homo sapiens
tactttttcttttct

SEQ ID NO: 1312111 - DNA, 15 bp, Homo sapiens
atactttttcttttc

SEQ ID NO: 1312112 - DNA, 15 bp, Homo sapiens
catactttttctttt

SEQ ID NO: 1312113 - DNA, 15 bp, Homo sapiens
tcatactttttcttt

SEQ ID NO: 1312114 - DNA, 15 bp, Homo sapiens
atcatactttttctt

SEQ ID NO: 1312115 - DNA, 15 bp, Homo sapiens
aatcatactttttct

SEQ ID NO: 1312116 - DNA, 15 bp, Homo sapiens
aaatcatactttttc

SEQ ID NO: 1312117 - DNA, 15 bp, Homo sapiens
gaaatcatacttttt

SEQ ID NO: 1312118 - DNA, 15 bp, Homo sapiens
ggaaatcatactttt

SEQ ID NO: 1312119 - DNA, 15 bp, Homo sapiens
gggaaatcatacttt

SEQ ID NO: 1312120 - DNA, 15 bp, Homo sapiens
agggaaatcatactt

SEQ ID NO: 1312121 - DNA, 15 bp, Homo sapiens
aagggaaatcatact

SEQ ID NO: 1312122 - DNA, 15 bp, Homo sapiens
aaagggaaatcatac

SEQ ID NO: 1312123 - DNA, 15 bp, Homo sapiens
aaaagggaaatcata

SEQ ID NO: 1312124 - DNA, 15 bp, Homo sapiens
aaaaagggaaatcat

SEQ ID NO: 1312125 - DNA, 15 bp, Homo sapiens
caaaaagggaaatca

SEQ ID NO: 1312126 - DNA, 15 bp, Homo sapiens
ccaaaaagggaaatc

SEQ ID NO: 1312127 - DNA, 15 bp, Homo sapiens
cccaaaaagggaaat

SEQ ID NO: 1312128 - DNA, 15 bp, Homo sapiens
gcccaaaaagggaaa

SEQ ID NO: 1312129 - DNA, 15 bp, Homo sapiens
ggcccaaaaagggaa

SEQ ID NO: 1312130 - DNA, 15 bp, Homo sapiens
tggcccaaaaaggga

SEQ ID NO: 1312131 - DNA, 15 bp, Homo sapiens
ctggcccaaaaaggg

SEQ ID NO: 1312132 - DNA, 15 bp, Homo sapiens
cctggcccaaaaagg

SEQ ID NO: 1312133 - DNA, 15 bp, Homo sapiens
acctggcccaaaaag

SEQ ID NO: 1312134 - DNA, 15 bp, Homo sapiens
cacctggcccaaaaa

SEQ ID NO: 1312135 - DNA, 15 bp, Homo sapiens
acacctggcccaaaa

SEQ ID NO: 1312136 - DNA, 15 bp, Homo sapiens
gacacctggcccaaa

SEQ ID NO: 1312137 - DNA, 15 bp, Homo sapiens
ggacacctggcccaa

SEQ ID NO: 1312138 - DNA, 15 bp, Homo sapiens
aggacacctggccca

SEQ ID NO: 1312139 - DNA, 15 bp, Homo sapiens
aaggacacctggccc

SEQ ID NO: 1312140 - DNA, 15 bp, Homo sapiens
taaggacacctggcc

SEQ ID NO: 1312141 - DNA, 15 bp, Homo sapiens
ctaaggacacctggc

SEQ ID NO: 1312142 - DNA, 15 bp, Homo sapiens
cctaaggacacctgg

SEQ ID NO: 1312143 - DNA, 15 bp, Homo sapiens
tcctaaggacacctg

SEQ ID NO: 1312144 - DNA, 15 bp, Homo sapiens
ctcctaaggacacct

SEQ ID NO: 1312145 - DNA, 15 bp, Homo sapiens
tctcctaaggacacc

SEQ ID NO: 1312146 - DNA, 15 bp, Homo sapiens
ctctcctaaggacac

SEQ ID NO: 1312147 - DNA, 15 bp, Homo sapiens
actctcctaaggaca

SEQ ID NO: 1312148 - DNA, 15 bp, Homo sapiens
cactctcctaaggac

SEQ ID NO: 1312149 - DNA, 15 bp, Homo sapiens
ccactctcctaagga

SEQ ID NO: 1312150 - DNA, 15 bp, Homo sapiens
cccactctcctaagg

SEQ ID NO: 1312151 - DNA, 15 bp, Homo sapiens
ccccactctcctaag

SEQ ID NO: 1312152 - DNA, 15 bp, Homo sapiens
cccccactctcctaa

SEQ ID NO: 1312153 - DNA, 15 bp, Homo sapiens
acccccactctccta

SEQ ID NO: 1312154 - DNA, 15 bp, Homo sapiens
aacccccactctcct

SEQ ID NO: 1312155 - DNA, 15 bp, Homo sapiens
caacccccactctcc

SEQ ID NO: 1312156 - DNA, 15 bp, Homo sapiens
ccaacccccactctc

SEQ ID NO: 1312157 - DNA, 15 bp, Homo sapiens
cccaacccccactct

SEQ ID NO: 1312158 - DNA, 15 bp, Homo sapiens
ccccaacccccactc

SEQ ID NO: 1312159 - DNA, 15 bp, Homo sapiens
cccccaacccccact

SEQ ID NO: 1312160 - DNA, 15 bp, Homo sapiens
ccccccaacccccac

SEQ ID NO: 1312161 - DNA, 15 bp, Homo sapiens
accccccaaccccca

SEQ ID NO: 1312162 - DNA, 15 bp, Homo sapiens
aaccccccaaccccc

SEQ ID NO: 1312163 - DNA, 15 bp, Homo sapiens
aaaccccccaacccc

SEQ ID NO: 1312164 - DNA, 15 bp, Homo sapiens
caaaccccccaaccc

SEQ ID NO: 1312165 - DNA, 15 bp, Homo sapiens
tcaaaccccccaacc

SEQ ID NO: 1312166 - DNA, 15 bp, Homo sapiens
ctcaaaccccccaac

SEQ ID NO: 1312167 - DNA, 15 bp, Homo sapiens
tctcaaaccccccaa

SEQ ID NO: 1312168 - DNA, 15 bp, Homo sapiens
ctctcaaacccccca

SEQ ID NO: 1312169 - DNA, 15 bp, Homo sapiens
tctctcaaacccccc

SEQ ID NO: 1312170 - DNA, 15 bp, Homo sapiens
ttctctcaaaccccc

SEQ ID NO: 1312171 - DNA, 15 bp, Homo sapiens
tttctctcaaacccc

SEQ ID NO: 1312172 - DNA, 15 bp, Homo sapiens
ctttctctcaaaccc

SEQ ID NO: 1312173 - DNA, 15 bp, Homo sapiens
tctttctctcaaacc

SEQ ID NO: 1312174 - DNA, 15 bp, Homo sapiens
ctctttctctcaaac

SEQ ID NO: 1312175 - DNA, 15 bp, Homo sapiens
tctctttctctcaaa

SEQ ID NO: 1312176 - DNA, 15 bp, Homo sapiens
ttctctttctctcaa

SEQ ID NO: 1312177 - DNA, 15 bp, Homo sapiens
tttctctttctctca

SEQ ID NO: 1312178 - DNA, 15 bp, Homo sapiens
atttctctttctctc

SEQ ID NO: 1312179 - DNA, 15 bp, Homo sapiens
gatttctctttctct

SEQ ID NO: 1312180 - DNA, 15 bp, Homo sapiens
ggatttctctttctc

SEQ ID NO: 1312181 - DNA, 15 bp, Homo sapiens
tggatttctctttct

SEQ ID NO: 1312182 - DNA, 15 bp, Homo sapiens
ttggatttctctttc

SEQ ID NO: 1312183 - DNA, 15 bp, Homo sapiens
tttggatttctcttt

SEQ ID NO: 1312184 - DNA, 15 bp, Homo sapiens
ttttggatttctctt

SEQ ID NO: 1312185 - DNA, 15 bp, Homo sapiens
cttttggatttctct

SEQ ID NO: 1312186 - DNA, 15 bp, Homo sapiens
tcttttggatttctc

SEQ ID NO: 1312187 - DNA, 15 bp, Homo sapiens
ttcttttggatttct

SEQ ID NO: 1312188 - DNA, 15 bp, Homo sapiens
tttcttttggatttc

SEQ ID NO: 1312189 - DNA, 15 bp, Homo sapiens
ttttcttttggattt

SEQ ID NO: 1312190 - DNA, 15 bp, Homo sapiens
cttttcttttggatt

SEQ ID NO: 1312191 - DNA, 15 bp, Homo sapiens
acttttcttttggat

SEQ ID NO: 1312192 - DNA, 15 bp, Homo sapiens
cacttttcttttgga

SEQ ID NO: 1312193 - DNA, 15 bp, Homo sapiens
gcacttttcttttgg

SEQ ID NO: 1312194 - DNA, 15 bp, Homo sapiens
agcacttttcttttg

SEQ ID NO: 1312195 - DNA, 15 bp, Homo sapiens
aagcacttttctttt

SEQ ID NO: 1312196 - DNA, 15 bp, Homo sapiens
gaagcacttttcttt

SEQ ID NO: 1312197 - DNA, 15 bp, Homo sapiens
ggaagcacttttctt

SEQ ID NO: 1312198 - DNA, 15 bp, Homo sapiens
tggaagcacttttct

SEQ ID NO: 1312199 - DNA, 15 bp, Homo sapiens
atggaagcacttttc

SEQ ID NO: 1312200 - DNA, 15 bp, Homo sapiens
tatggaagcactttt

SEQ ID NO: 1312201 - DNA, 15 bp, Homo sapiens
ttatggaagcacttt

SEQ ID NO: 1312202 - DNA, 15 bp, Homo sapiens
gttatggaagcactt

SEQ ID NO: 1312203 - DNA, 15 bp, Homo sapiens
agttatggaagcact

SEQ ID NO: 1312204 - DNA, 15 bp, Homo sapiens
tagttatggaagcac

SEQ ID NO: 1312205 - DNA, 15 bp, Homo sapiens
ctagttatggaagca

SEQ ID NO: 1312206 - DNA, 15 bp, Homo sapiens
tctagttatggaagc

SEQ ID NO: 1312207 - DNA, 15 bp, Homo sapiens
ttctagttatggaag

SEQ ID NO: 1312208 - DNA, 15 bp, Homo sapiens
attctagttatggaa

SEQ ID NO: 1312209 - DNA, 15 bp, Homo sapiens
tattctagttatgga

SEQ ID NO: 1312210 - DNA, 15 bp, Homo sapiens
ttattctagttatgg

SEQ ID NO: 1312211 - DNA, 15 bp, Homo sapiens
tttattctagttatg

SEQ ID NO: 1312212 - DNA, 15 bp, Homo sapiens
ctttattctagttat

SEQ ID NO: 1312213 - DNA, 15 bp, Homo sapiens
actttattctagtta

SEQ ID NO: 1312214 - DNA, 15 bp, Homo sapiens
aactttattctagtt

SEQ ID NO: 1312215 - DNA, 15 bp, Homo sapiens
taactttattctagt

SEQ ID NO: 1312216 - DNA, 15 bp, Homo sapiens
ctaactttattctag

SEQ ID NO: 1312217 - DNA, 15 bp, Homo sapiens
tctaactttattcta

SEQ ID NO: 1312218 - DNA, 15 bp, Homo sapiens
atctaactttattct

SEQ ID NO: 1312219 - DNA, 15 bp, Homo sapiens
catctaactttattc

SEQ ID NO: 1312220 - DNA, 15 bp, Homo sapiens
acatctaactttatt

SEQ ID NO: 1312221 - DNA, 15 bp, Homo sapiens
cacatctaactttat

SEQ ID NO: 1312222 - DNA, 15 bp, Homo sapiens
acacatctaacttta

SEQ ID NO: 1312223 - DNA, 15 bp, Homo sapiens
aacacatctaacttt

SEQ ID NO: 1312224 - DNA, 15 bp, Homo sapiens
gaacacatctaactt

SEQ ID NO: 1312225 - DNA, 15 bp, Homo sapiens
tgaacacatctaact

SEQ ID NO: 1312226 - DNA, 15 bp, Homo sapiens
atgaacacatctaac

SEQ ID NO: 1312227 - DNA, 15 bp, Homo sapiens
tatgaacacatctaa

SEQ ID NO: 1312228 - DNA, 15 bp, Homo sapiens
atatgaacacatcta

SEQ ID NO: 1312229 - DNA, 15 bp, Homo sapiens
aatatgaacacatct

SEQ ID NO: 1312230 - DNA, 15 bp, Homo sapiens
taatatgaacacatc

SEQ ID NO: 1312231 - DNA, 15 bp, Homo sapiens
gtaatatgaacacat

SEQ ID NO: 1312232 - DNA, 15 bp, Homo sapiens
tgtaatatgaacaca

SEQ ID NO: 1312233 - DNA, 15 bp, Homo sapiens
gtgtaatatgaacac

SEQ ID NO: 1312234 - DNA, 15 bp, Homo sapiens
tgtgtaatatgaaca

SEQ ID NO: 1312235 - DNA, 15 bp, Homo sapiens
atgtgtaatatgaac

SEQ ID NO: 1312236 - DNA, 15 bp, Homo sapiens
tatgtgtaatatgaa

SEQ ID NO: 1312237 - DNA, 15 bp, Homo sapiens
atatgtgtaatatga

SEQ ID NO: 1312238 - DNA, 15 bp, Homo sapiens
aatatgtgtaatatg

SEQ ID NO: 1312239 - DNA, 15 bp, Homo sapiens
taatatgtgtaatat

SEQ ID NO: 1312240 - DNA, 15 bp, Homo sapiens
gtaatatgtgtaata

SEQ ID NO: 1312241 - DNA, 15 bp, Homo sapiens
tgtaatatgtgtaat

SEQ ID NO: 1312242 - DNA, 15 bp, Homo sapiens
atgtaatatgtgtaa

SEQ ID NO: 1312243 - DNA, 15 bp, Homo sapiens
tatgtaatatgtgta

SEQ ID NO: 1312244 - DNA, 15 bp, Homo sapiens
atatgtaatatgtgt

SEQ ID NO: 1312245 - DNA, 15 bp, Homo sapiens
tatatgtaatatgtg

SEQ ID NO: 1312246 - DNA, 15 bp, Homo sapiens
atatatgtaatatgt

SEQ ID NO: 1312247 - DNA, 15 bp, Homo sapiens
catatatgtaatatg

SEQ ID NO: 1312248 - DNA, 15 bp, Homo sapiens
acatatatgtaatat

SEQ ID NO: 1312249 - DNA, 15 bp, Homo sapiens
cacatatatgtaata

SEQ ID NO: 1312250 - DNA, 15 bp, Homo sapiens
acacatatatgtaat

SEQ ID NO: 1312251 - DNA, 15 bp, Homo sapiens
tacacatatatgtaa

SEQ ID NO: 1312252 - DNA, 15 bp, Homo sapiens
atacacatatatgta

SEQ ID NO: 1312253 - DNA, 15 bp, Homo sapiens
tatacacatatatgt

SEQ ID NO: 1312254 - DNA, 15 bp, Homo sapiens
atatacacatatatg

SEQ ID NO: 1312255 - DNA, 15 bp, Homo sapiens
tatatacacatatat

SEQ ID NO: 1312256 - DNA, 15 bp, Homo sapiens
tatatatacacatat

SEQ ID NO: 1312257 - DNA, 15 bp, Homo sapiens
catatatatacacat

SEQ ID NO: 1312258 - DNA, 15 bp, Homo sapiens
acatatatatacaca

SEQ ID NO: 1312259 - DNA, 15 bp, Homo sapiens
tacatatatatacac

SEQ ID NO: 1312260 - DNA, 15 bp, Homo sapiens
tacatacatatatat

SEQ ID NO: 1312261 - DNA, 15 bp, Homo sapiens
atacatacatatata

SEQ ID NO: 1312262 - DNA, 15 bp, Homo sapiens
catacacatacatac

SEQ ID NO: 1312263 - DNA, 15 bp, Homo sapiens
acatacacatacata

SEQ ID NO: 1312264 - DNA, 15 bp, Homo sapiens
tacatacacatacat

SEQ ID NO: 1312265 - DNA, 15 bp, Homo sapiens
tgtacatacacatac

SEQ ID NO: 1312266 - DNA, 15 bp, Homo sapiens
atgtacatacacata

SEQ ID NO: 1312267 - DNA, 15 bp, Homo sapiens
tatgtacatacacat

SEQ ID NO: 1312268 - DNA, 15 bp, Homo sapiens
gtatgtacatacaca

SEQ ID NO: 1312269 - DNA, 15 bp, Homo sapiens
tgtatgtacatacac

SEQ ID NO: 1312270 - DNA, 15 bp, Homo sapiens
ctgtatgtacataca

SEQ ID NO: 1312271 - DNA, 15 bp, Homo sapiens
actgtatgtacatac

SEQ ID NO: 1312272 - DNA, 15 bp, Homo sapiens
tactgtatgtacata

SEQ ID NO: 1312273 - DNA, 15 bp, Homo sapiens
atactgtatgtacat

SEQ ID NO: 1312274 - DNA, 15 bp, Homo sapiens
tatactgtatgtaca

SEQ ID NO: 1312275 - DNA, 15 bp, Homo sapiens
atatactgtatgtac

SEQ ID NO: 1312276 - DNA, 15 bp, Homo sapiens
tatatactgtatgta

SEQ ID NO: 1312277 - DNA, 15 bp, Homo sapiens
ttatatactgtatgt

SEQ ID NO: 1312278 - DNA, 15 bp, Homo sapiens
attatatactgtatg

SEQ ID NO: 1312279 - DNA, 15 bp, Homo sapiens
aattatatactgtat

SEQ ID NO: 1312280 - DNA, 15 bp, Homo sapiens
caattatatactgta

SEQ ID NO: 1312281 - DNA, 15 bp, Homo sapiens
acaattatatactgt

SEQ ID NO: 1312282 - DNA, 15 bp, Homo sapiens
gacaattatatactg

SEQ ID NO: 1312283 - DNA, 15 bp, Homo sapiens
agacaattatatact

SEQ ID NO: 1312284 - DNA, 15 bp, Homo sapiens
gagacaattatatac

SEQ ID NO: 1312285 - DNA, 15 bp, Homo sapiens
tgagacaattatata

SEQ ID NO: 1312286 - DNA, 15 bp, Homo sapiens
ttgagacaattatat

SEQ ID NO: 1312287 - DNA, 15 bp, Homo sapiens
cttgagacaattata

SEQ ID NO: 1312288 - DNA, 15 bp, Homo sapiens
acttgagacaattat

SEQ ID NO: 1312289 - DNA, 15 bp, Homo sapiens
cacttgagacaatta

SEQ ID NO: 1312290 - DNA, 15 bp, Homo sapiens
gcacttgagacaatt

SEQ ID NO: 1312291 - DNA, 15 bp, Homo sapiens
agcacttgagacaat

SEQ ID NO: 1312292 - DNA, 15 bp, Homo sapiens
gagcacttgagacaa

SEQ ID NO: 1312293 - DNA, 15 bp, Homo sapiens
agagcacttgagaca

SEQ ID NO: 1312294 - DNA, 15 bp, Homo sapiens
aagagcacttgagac

SEQ ID NO: 1312295 - DNA, 15 bp, Homo sapiens
gaagagcacttgaga

SEQ ID NO: 1312296 - DNA, 15 bp, Homo sapiens
ggaagagcacttgag

SEQ ID NO: 1312297 - DNA, 15 bp, Homo sapiens
tggaagagcacttga

SEQ ID NO: 1312298 - DNA, 15 bp, Homo sapiens
ttggaagagcacttg

SEQ ID NO: 1312299 - DNA, 15 bp, Homo sapiens
tttggaagagcactt

SEQ ID NO: 1312300 - DNA, 15 bp, Homo sapiens
gtttggaagagcact

SEQ ID NO: 1312301 - DNA, 15 bp, Homo sapiens
tgtttggaagagcac

SEQ ID NO: 1312302 - DNA, 15 bp, Homo sapiens
ctgtttggaagagca

SEQ ID NO: 1312303 - DNA, 15 bp, Homo sapiens
actgtttggaagagc

SEQ ID NO: 1312304 - DNA, 15 bp, Homo sapiens
tactgtttggaagag

SEQ ID NO: 1312305 - DNA, 15 bp, Homo sapiens
gtactgtttggaaga

SEQ ID NO: 1312306 - DNA, 15 bp, Homo sapiens
agtactgtttggaag

SEQ ID NO: 1312307 - DNA, 15 bp, Homo sapiens
tagtactgtttggaa

SEQ ID NO: 1312308 - DNA, 15 bp, Homo sapiens
atagtactgtttgga

SEQ ID NO: 1312309 - DNA, 15 bp, Homo sapiens
catagtactgtttgg

SEQ ID NO: 1312310 - DNA, 15 bp, Homo sapiens
tcatagtactgtttg

SEQ ID NO: 1312311 - DNA, 15 bp, Homo sapiens
ttcatagtactgttt

SEQ ID NO: 1312312 - DNA, 15 bp, Homo sapiens
tttcatagtactgtt

SEQ ID NO: 1312313 - DNA, 15 bp, Homo sapiens
atttcatagtactgt

SEQ ID NO: 1312314 - DNA, 15 bp, Homo sapiens
tatttcatagtactg

SEQ ID NO: 1312315 - DNA, 15 bp, Homo sapiens
ctatttcatagtact

SEQ ID NO: 1312316 - DNA, 15 bp, Homo sapiens
cctatttcatagtac

SEQ ID NO: 1312317 - DNA, 15 bp, Homo sapiens
acctatttcatagta

SEQ ID NO: 1312318 - DNA, 15 bp, Homo sapiens
cacctatttcatagt

SEQ ID NO: 1312319 - DNA, 15 bp, Homo sapiens
acacctatttcatag

SEQ ID NO: 1312320 - DNA, 15 bp, Homo sapiens
gacacctatttcata

SEQ ID NO: 1312321 - DNA, 15 bp, Homo sapiens
tgacacctatttcat

SEQ ID NO: 1312322 - DNA, 15 bp, Homo sapiens
atgacacctatttca

SEQ ID NO: 1312323 - DNA, 15 bp, Homo sapiens
aatgacacctatttc

SEQ ID NO: 1312324 - DNA, 15 bp, Homo sapiens
aaatgacacctattt

SEQ ID NO: 1312325 - DNA, 15 bp, Homo sapiens
caaatgacacctatt

SEQ ID NO: 1312326 - DNA, 15 bp, Homo sapiens
ccaaatgacacctat

SEQ ID NO: 1312327 - DNA, 15 bp, Homo sapiens
cccaaatgacaccta

SEQ ID NO: 1312328 - DNA, 15 bp, Homo sapiens
ccccaaatgacacct

SEQ ID NO: 1312329 - DNA, 15 bp, Homo sapiens
cccccaaatgacacc

SEQ ID NO: 1312330 - DNA, 15 bp, Homo sapiens
gcccccaaatgacac

SEQ ID NO: 1312331 - DNA, 15 bp, Homo sapiens
ggcccccaaatgaca

SEQ ID NO: 1312332 - DNA, 15 bp, Homo sapiens
gggcccccaaatgac

SEQ ID NO: 1312333 - DNA, 15 bp, Homo sapiens
tgggcccccaaatga

SEQ ID NO: 1312334 - DNA, 15 bp, Homo sapiens
atgggcccccaaatg

SEQ ID NO: 1312335 - DNA, 15 bp, Homo sapiens
tatgggcccccaaat

SEQ ID NO: 1312336 - DNA, 15 bp, Homo sapiens
atatgggcccccaaa

SEQ ID NO: 1312337 - DNA, 15 bp, Homo sapiens
aatatgggcccccaa

SEQ ID NO: 1312338 - DNA, 15 bp, Homo sapiens
taatatgggccccca

SEQ ID NO: 1312339 - DNA, 15 bp, Homo sapiens
gtaatatgggccccc

SEQ ID NO: 1312340 - DNA, 15 bp, Homo sapiens
tgtaatatgggcccc

SEQ ID NO: 1312341 - DNA, 15 bp, Homo sapiens
ctgtaatatgggccc

SEQ ID NO: 1312342 - DNA, 15 bp, Homo sapiens
tctgtaatatgggcc

SEQ ID NO: 1312343 - DNA, 15 bp, Homo sapiens
atctgtaatatgggc

SEQ ID NO: 1312344 - DNA, 15 bp, Homo sapiens
catctgtaatatggg

SEQ ID NO: 1312345 - DNA, 15 bp, Homo sapiens
ccatctgtaatatgg

SEQ ID NO: 1312346 - DNA, 15 bp, Homo sapiens
cccatctgtaatatg

SEQ ID NO: 1312347 - DNA, 15 bp, Homo sapiens
ccccatctgtaatat

SEQ ID NO: 1312348 - DNA, 15 bp, Homo sapiens
tccccatctgtaata

SEQ ID NO: 1312349 - DNA, 15 bp, Homo sapiens
ttccccatctgtaat

SEQ ID NO: 1312350 - DNA, 15 bp, Homo sapiens
aagcctcagtttccc

SEQ ID NO: 1312351 - DNA, 15 bp, Homo sapiens
gaagcctcagtttcc

SEQ ID NO: 1312352 - DNA, 15 bp, Homo sapiens
tgaagcctcagtttc

SEQ ID NO: 1312353 - DNA, 15 bp, Homo sapiens
ctgaagcctcagttt

SEQ ID NO: 1312354 - DNA, 15 bp, Homo sapiens
tctgaagcctcagtt

SEQ ID NO: 1312355 - DNA, 15 bp, Homo sapiens
ttctgaagcctcagt

SEQ ID NO: 1312356 - DNA, 15 bp, Homo sapiens
cttctgaagcctcag

SEQ ID NO: 1312357 - DNA, 15 bp, Homo sapiens
ccttctgaagcctca

SEQ ID NO: 1312358 - DNA, 15 bp, Homo sapiens
accttctgaagcctc

SEQ ID NO: 1312359 - DNA, 15 bp, Homo sapiens
aaccttctgaagcct

SEQ ID NO: 1312360 - DNA, 15 bp, Homo sapiens
taaccttctgaagcc

SEQ ID NO: 1312361 - DNA, 15 bp, Homo sapiens
ttaaccttctgaagc

SEQ ID NO: 1312362 - DNA, 15 bp, Homo sapiens
tttaaccttctgaag

SEQ ID NO: 1312363 - DNA, 15 bp, Homo sapiens
atttaaccttctgaa

SEQ ID NO: 1312364 - DNA, 15 bp, Homo sapiens
tatttaaccttctga

SEQ ID NO: 1312365 - DNA, 15 bp, Homo sapiens
ttatttaaccttctg

SEQ ID NO: 1312366 - DNA, 15 bp, Homo sapiens
tttatttaaccttct

SEQ ID NO: 1312367 - DNA, 15 bp, Homo sapiens
atttatttaaccttc

SEQ ID NO: 1312368 - DNA, 15 bp, Homo sapiens
aatttatttaacctt

SEQ ID NO: 1312369 - DNA, 15 bp, Homo sapiens
caatttatttaacct

SEQ ID NO: 1312370 - DNA, 15 bp, Homo sapiens
gcaatttatttaacc

SEQ ID NO: 1312371 - DNA, 15 bp, Homo sapiens
agcaatttatttaac

SEQ ID NO: 1312372 - DNA, 15 bp, Homo sapiens
cagcaatttatttaa

SEQ ID NO: 1312373 - DNA, 15 bp, Homo sapiens
tcagcaatttattta

SEQ ID NO: 1312374 - DNA, 15 bp, Homo sapiens
ctcagcaatttattt

SEQ ID NO: 1312375 - DNA, 15 bp, Homo sapiens
tctcagcaatttatt

SEQ ID NO: 1312376 - DNA, 15 bp, Homo sapiens
ctctcagcaatttat

SEQ ID NO: 1312377 - DNA, 15 bp, Homo sapiens
actctcagcaattta

SEQ ID NO: 1312378 - DNA, 15 bp, Homo sapiens
gactctcagcaattt

SEQ ID NO: 1312379 - DNA, 15 bp, Homo sapiens
tgactctcagcaatt

SEQ ID NO: 1312380 - DNA, 15 bp, Homo sapiens
gtgactctcagcaat

SEQ ID NO: 1312381 - DNA, 15 bp, Homo sapiens
ggtgactctcagcaa

SEQ ID NO: 1312382 - DNA, 15 bp, Homo sapiens
aggtgactctcagca

SEQ ID NO: 1312383 - DNA, 15 bp, Homo sapiens
taggtgactctcagc

SEQ ID NO: 1312384 - DNA, 15 bp, Homo sapiens
ctaggtgactctcag

SEQ ID NO: 1312385 - DNA, 15 bp, Homo sapiens
actaggtgactctca

SEQ ID NO: 1312386 - DNA, 15 bp, Homo sapiens
cactaggtgactctc

SEQ ID NO: 1312387 - DNA, 15 bp, Homo sapiens
tcactaggtgactct

SEQ ID NO: 1312388 - DNA, 15 bp, Homo sapiens
ctcactaggtgactc

SEQ ID NO: 1312389 - DNA, 15 bp, Homo sapiens
actcactaggtgact

SEQ ID NO: 1312390 - DNA, 15 bp, Homo sapiens
tactcactaggtgac

SEQ ID NO: 1312391 - DNA, 15 bp, Homo sapiens
ttactcactaggtga

SEQ ID NO: 1312392 - DNA, 15 bp, Homo sapiens
tttactcactaggtg

SEQ ID NO: 1312393 - DNA, 15 bp, Homo sapiens
atttactcactaggt

SEQ ID NO: 1312394 - DNA, 15 bp, Homo sapiens
catttactcactagg

SEQ ID NO: 1312395 - DNA, 15 bp, Homo sapiens
ccatttactcactag

SEQ ID NO: 1312396 - DNA, 15 bp, Homo sapiens
accatttactcacta

SEQ ID NO: 1312397 - DNA, 15 bp, Homo sapiens
taccatttactcact

SEQ ID NO: 1312398 - DNA, 15 bp, Homo sapiens
ctaccatttactcac

SEQ ID NO: 1312399 - DNA, 15 bp, Homo sapiens
tctaccatttactca

SEQ ID NO: 1312400 - DNA, 15 bp, Homo sapiens
ctctaccatttactc

SEQ ID NO: 1312401 - DNA, 15 bp, Homo sapiens
gctctaccatttact

SEQ ID NO: 1312402 - DNA, 15 bp, Homo sapiens
agctctaccatttac

SEQ ID NO: 1312403 - DNA, 15 bp, Homo sapiens
gagctctaccattta

SEQ ID NO: 1312404 - DNA, 15 bp, Homo sapiens
tgagctctaccattt

SEQ ID NO: 1312405 - DNA, 15 bp, Homo sapiens
ctgagctctaccatt

SEQ ID NO: 1312406 - DNA, 15 bp, Homo sapiens
gctgagctctaccat

SEQ ID NO: 1312407 - DNA, 15 bp, Homo sapiens
agctgagctctacca

SEQ ID NO: 1312408 - DNA, 15 bp, Homo sapiens
aagctgagctctacc

SEQ ID NO: 1312409 - DNA, 15 bp, Homo sapiens
aaagctgagctctac

SEQ ID NO: 1312410 - DNA, 15 bp, Homo sapiens
caaagctgagctcta

SEQ ID NO: 1312411 - DNA, 15 bp, Homo sapiens
tcaaagctgagctct

SEQ ID NO: 1312412 - DNA, 15 bp, Homo sapiens
atcaaagctgagctc

SEQ ID NO: 1312413 - DNA, 15 bp, Homo sapiens
gatcaaagctgagct

SEQ ID NO: 1312414 - DNA, 15 bp, Homo sapiens
agatcaaagctgagc

SEQ ID NO: 1312415 - DNA, 15 bp, Homo sapiens
gagatcaaagctgag

SEQ ID NO: 1312416 - DNA, 15 bp, Homo sapiens
tgagatcaaagctga

SEQ ID NO: 1312417 - DNA, 15 bp, Homo sapiens
ctgagatcaaagctg

SEQ ID NO: 1312418 - DNA, 15 bp, Homo sapiens
cctgagatcaaagct

SEQ ID NO: 1312419 - DNA, 15 bp, Homo sapiens
gcctgagatcaaagc

SEQ ID NO: 1312420 - DNA, 15 bp, Homo sapiens
tgcctgagatcaaag

SEQ ID NO: 1312421 - DNA, 15 bp, Homo sapiens
ttgcctgagatcaaa

SEQ ID NO: 1312422 - DNA, 15 bp, Homo sapiens
attgcctgagatcaa

SEQ ID NO: 1312423 - DNA, 15 bp, Homo sapiens
gattgcctgagatca

SEQ ID NO: 1312424 - DNA, 15 bp, Homo sapiens
agattgcctgagatc

SEQ ID NO: 1312425 - DNA, 15 bp, Homo sapiens
tagattgcctgagat

SEQ ID NO: 1312426 - DNA, 15 bp, Homo sapiens
gtagattgcctgaga

SEQ ID NO: 1312427 - DNA, 15 bp, Homo sapiens
ggtagattgcctgag

SEQ ID NO: 1312428 - DNA, 15 bp, Homo sapiens
aggtagattgcctga

SEQ ID NO: 1312429 - DNA, 15 bp, Homo sapiens
gaggtagattgcctg

SEQ ID NO: 1312430 - DNA, 15 bp, Homo sapiens
ggaggtagattgcct

SEQ ID NO: 1312431 - DNA, 15 bp, Homo sapiens
tggaggtagattgcc

SEQ ID NO: 1312432 - DNA, 15 bp, Homo sapiens
ttggaggtagattgc

SEQ ID NO: 1312433 - DNA, 15 bp, Homo sapiens
tttggaggtagattg

SEQ ID NO: 1312434 - DNA, 15 bp, Homo sapiens
ctttggaggtagatt

SEQ ID NO: 1312435 - DNA, 15 bp, Homo sapiens
actttggaggtagat

SEQ ID NO: 1312436 - DNA, 15 bp, Homo sapiens
gactttggaggtaga

SEQ ID NO: 1312437 - DNA, 15 bp, Homo sapiens
ggactttggaggtag

SEQ ID NO: 1312438 - DNA, 15 bp, Homo sapiens
tggactttggaggta

SEQ ID NO: 1312439 - DNA, 15 bp, Homo sapiens
atggactttggaggt

SEQ ID NO: 1312440 - DNA, 15 bp, Homo sapiens
catggactttggagg

SEQ ID NO: 1312441 - DNA, 15 bp, Homo sapiens
acatggactttggag

SEQ ID NO: 1312442 - DNA, 15 bp, Homo sapiens
aacatggactttgga

SEQ ID NO: 1312443 - DNA, 15 bp, Homo sapiens
taacatggactttgg

SEQ ID NO: 1312444 - DNA, 15 bp, Homo sapiens
gtaacatggactttg

SEQ ID NO: 1312445 - DNA, 15 bp, Homo sapiens
agtaacatggacttt

SEQ ID NO: 1312446 - DNA, 15 bp, Homo sapiens
aagtaacatggactt

SEQ ID NO: 1312447 - DNA, 15 bp, Homo sapiens
caagtaacatggact

SEQ ID NO: 1312448 - DNA, 15 bp, Homo sapiens
tcaagtaacatggac

SEQ ID NO: 1312449 - DNA, 15 bp, Homo sapiens
atcaagtaacatgga

SEQ ID NO: 1312450 - DNA, 15 bp, Homo sapiens
tatcaagtaacatgg

SEQ ID NO: 1312451 - DNA, 15 bp, Homo sapiens
atatcaagtaacatg

SEQ ID NO: 1312452 - DNA, 15 bp, Homo sapiens
catatcaagtaacat

SEQ ID NO: 1312453 - DNA, 15 bp, Homo sapiens
tcatatcaagtaaca

SEQ ID NO: 1312454 - DNA, 15 bp, Homo sapiens
atcatatcaagtaac

SEQ ID NO: 1312455 - DNA, 15 bp, Homo sapiens
tatcatatcaagtaa

SEQ ID NO: 1312456 - DNA, 15 bp, Homo sapiens
gtatcatatcaagta

SEQ ID NO: 1312457 - DNA, 15 bp, Homo sapiens
agtatcatatcaagt

SEQ ID NO: 1312458 - DNA, 15 bp, Homo sapiens
tagtatcatatcaag

SEQ ID NO: 1312459 - DNA, 15 bp, Homo sapiens
atagtatcatatcaa

SEQ ID NO: 1312460 - DNA, 15 bp, Homo sapiens
catagtatcatatca

SEQ ID NO: 1312461 - DNA, 15 bp, Homo sapiens
gcatagtatcatatc

SEQ ID NO: 1312462 - DNA, 15 bp, Homo sapiens
agcatagtatcatat

SEQ ID NO: 1312463 - DNA, 15 bp, Homo sapiens
cagcatagtatcata

SEQ ID NO: 1312464 - DNA, 15 bp, Homo sapiens
acagcatagtatcat

SEQ ID NO: 1312465 - DNA, 15 bp, Homo sapiens
gacagcatagtatca

SEQ ID NO: 1312466 - DNA, 15 bp, Homo sapiens
agacagcatagtatc

SEQ ID NO: 1312467 - DNA, 15 bp, Homo sapiens
gagacagcatagtat

SEQ ID NO: 1312468 - DNA, 15 bp, Homo sapiens
agagacagcatagta

SEQ ID NO: 1312469 - DNA, 15 bp, Homo sapiens
gagagacagcatagt

SEQ ID NO: 1312470 - DNA, 15 bp, Homo sapiens
tgagagacagcatag

SEQ ID NO: 1312471 - DNA, 15 bp, Homo sapiens
ttgagagacagcata

SEQ ID NO: 1312472 - DNA, 15 bp, Homo sapiens
cttgagagacagcat

SEQ ID NO: 1312473 - DNA, 15 bp, Homo sapiens
gcttgagagacagca

SEQ ID NO: 1312474 - DNA, 15 bp, Homo sapiens
agcttgagagacagc

SEQ ID NO: 1312475 - DNA, 15 bp, Homo sapiens
tagcttgagagacag

SEQ ID NO: 1312476 - DNA, 15 bp, Homo sapiens
gtagcttgagagaca

SEQ ID NO: 1312477 - DNA, 15 bp, Homo sapiens
tgtagcttgagagac

SEQ ID NO: 1312478 - DNA, 15 bp, Homo sapiens
ttgtagcttgagaga

SEQ ID NO: 1312479 - DNA, 15 bp, Homo sapiens
cttgtagcttgagag

SEQ ID NO: 1312480 - DNA, 15 bp, Homo sapiens
acttgtagcttgaga

SEQ ID NO: 1312481 - DNA, 15 bp, Homo sapiens
aacttgtagcttgag

SEQ ID NO: 1312482 - DNA, 15 bp, Homo sapiens
taacttgtagcttga

SEQ ID NO: 1312483 - DNA, 15 bp, Homo sapiens
ttaacttgtagcttg

SEQ ID NO: 1312484 - DNA, 15 bp, Homo sapiens
gttaacttgtagctt

SEQ ID NO: 1312485 - DNA, 15 bp, Homo sapiens
tgttaacttgtagct

SEQ ID NO: 1312486 - DNA, 15 bp, Homo sapiens
gtgttaacttgtagc

SEQ ID NO: 1312487 - DNA, 15 bp, Homo sapiens
tgtgttaacttgtag

SEQ ID NO: 1312488 - DNA, 15 bp, Homo sapiens
atgtgttaacttgta

SEQ ID NO: 1312489 - DNA, 15 bp, Homo sapiens
aatgtgttaacttgt

SEQ ID NO: 1312490 - DNA, 15 bp, Homo sapiens
aaatgtgttaacttg

SEQ ID NO: 1312491 - DNA, 15 bp, Homo sapiens
aaaatgtgttaactt

SEQ ID NO: 1312492 - DNA, 15 bp, Homo sapiens
aaaaatgtgttaact

SEQ ID NO: 1312493 - DNA, 15 bp, Homo sapiens
taaaaatgtgttaac

SEQ ID NO: 1312494 - DNA, 15 bp, Homo sapiens
ttaaaaatgtgttaa

SEQ ID NO: 1312495 - DNA, 15 bp, Homo sapiens
attaaaaatgtgtta

SEQ ID NO: 1312496 - DNA, 15 bp, Homo sapiens
tattaaaaatgtgtt

SEQ ID NO: 1312497 - DNA, 15 bp, Homo sapiens
ttattaaaaatgtgt

SEQ ID NO: 1312498 - DNA, 15 bp, Homo sapiens
gttattaaaaatgtg

SEQ ID NO: 1312499 - DNA, 15 bp, Homo sapiens
agttattaaaaatgt

SEQ ID NO: 1312500 - DNA, 15 bp, Homo sapiens
aagttattaaaaatg

SEQ ID NO: 1312501 - DNA, 15 bp, Homo sapiens
taagttattaaaaat

SEQ ID NO: 1312502 - DNA, 15 bp, Homo sapiens
gtaagttattaaaaa

SEQ ID NO: 1312503 - DNA, 15 bp, Homo sapiens
ggtaagttattaaaa

SEQ ID NO: 1312504 - DNA, 15 bp, Homo sapiens
tggtaagttattaaa

SEQ ID NO: 1312505 - DNA, 15 bp, Homo sapiens
ctggtaagttattaa

SEQ ID NO: 1312506 - DNA, 15 bp, Homo sapiens
gctggtaagttatta

SEQ ID NO: 1312507 - DNA, 15 bp, Homo sapiens
ggctggtaagttatt

SEQ ID NO: 1312508 - DNA, 15 bp, Homo sapiens
aggctggtaagttat

SEQ ID NO: 1312509 - DNA, 15 bp, Homo sapiens
gaggctggtaagtta

SEQ ID NO: 1312510 - DNA, 15 bp, Homo sapiens
ggaggctggtaagtt

SEQ ID NO: 1312511 - DNA, 15 bp, Homo sapiens
tggaggctggtaagt

SEQ ID NO: 1312512 - DNA, 15 bp, Homo sapiens
ttggaggctggtaag

SEQ ID NO: 1312513 - DNA, 15 bp, Homo sapiens
tttggaggctggtaa

SEQ ID NO: 1312514 - DNA, 15 bp, Homo sapiens
gtttggaggctggta

SEQ ID NO: 1312515 - DNA, 15 bp, Homo sapiens
agtttggaggctggt

SEQ ID NO: 1312516 - DNA, 15 bp, Homo sapiens
tagtttggaggctgg

SEQ ID NO: 1312517 - DNA, 15 bp, Homo sapiens
gtagtttggaggctg

SEQ ID NO: 1312518 - DNA, 15 bp, Homo sapiens
agtagtttggaggct

SEQ ID NO: 1312519 - DNA, 15 bp, Homo sapiens
aagtagtttggaggc

SEQ ID NO: 1312520 - DNA, 15 bp, Homo sapiens
aaagtagtttggagg

SEQ ID NO: 1312521 - DNA, 15 bp, Homo sapiens
aaaagtagtttggag

SEQ ID NO: 1312522 - DNA, 15 bp, Homo sapiens
aaaaagtagtttgga

SEQ ID NO: 1312523 - DNA, 15 bp, Homo sapiens
aaaaaagtagtttgg

SEQ ID NO: 1312524 - DNA, 15 bp, Homo sapiens
gaaaaaagtagtttg

SEQ ID NO: 1312525 - DNA, 15 bp, Homo sapiens
ggaaaaaagtagttt

SEQ ID NO: 1312526 - DNA, 15 bp, Homo sapiens
gggaaaaaagtagtt

SEQ ID NO: 1312527 - DNA, 15 bp, Homo sapiens
ggggaaaaaagtagt

SEQ ID NO: 1312528 - DNA, 15 bp, Homo sapiens
gggggaaaaaagtag

SEQ ID NO: 1312529 - DNA, 15 bp, Homo sapiens
tgggggaaaaaagta

SEQ ID NO: 1312530 - DNA, 15 bp, Homo sapiens
atgggggaaaaaagt

SEQ ID NO: 1312531 - DNA, 15 bp, Homo sapiens
catgggggaaaaaag

SEQ ID NO: 1312532 - DNA, 15 bp, Homo sapiens
acatgggggaaaaaa

SEQ ID NO: 1312533 - DNA, 15 bp, Homo sapiens
aacatgggggaaaaa

SEQ ID NO: 1312534 - DNA, 15 bp, Homo sapiens
gaacatgggggaaaa

SEQ ID NO: 1312535 - DNA, 15 bp, Homo sapiens
tgaacatgggggaaa

SEQ ID NO: 1312536 - DNA, 15 bp, Homo sapiens
gtgaacatgggggaa

SEQ ID NO: 1312537 - DNA, 15 bp, Homo sapiens
ggtgaacatggggga

SEQ ID NO: 1312538 - DNA, 15 bp, Homo sapiens
tggtgaacatggggg

SEQ ID NO: 1312539 - DNA, 15 bp, Homo sapiens
ctggtgaacatgggg

SEQ ID NO: 1312540 - DNA, 15 bp, Homo sapiens
actggtgaacatggg

SEQ ID NO: 1312541 - DNA, 15 bp, Homo sapiens
gactggtgaacatgg

SEQ ID NO: 1312542 - DNA, 15 bp, Homo sapiens
ggactggtgaacatg

SEQ ID NO: 1312543 - DNA, 15 bp, Homo sapiens
gggactggtgaacat

SEQ ID NO: 1312544 - DNA, 15 bp, Homo sapiens
ggggactggtgaaca

SEQ ID NO: 1312545 - DNA, 15 bp, Homo sapiens
aggggactggtgaac

SEQ ID NO: 1312546 - DNA, 15 bp, Homo sapiens
gaggggactggtgaa

SEQ ID NO: 1312547 - DNA, 15 bp, Homo sapiens
agaggggactggtga

SEQ ID NO: 1312548 - DNA, 15 bp, Homo sapiens
aagaggggactggtg

SEQ ID NO: 1312549 - DNA, 15 bp, Homo sapiens
gaagaggggactggt

SEQ ID NO: 1312550 - DNA, 15 bp, Homo sapiens
tcagaagaggggact

SEQ ID NO: 1312551 - DNA, 15 bp, Homo sapiens
ctcagaagaggggac

SEQ ID NO: 1312552 - DNA, 15 bp, Homo sapiens
gctcagaagagggga

SEQ ID NO: 1312553 - DNA, 15 bp, Homo sapiens
agctcagaagagggg

SEQ ID NO: 1312554 - DNA, 15 bp, Homo sapiens
aagctcagaagaggg

SEQ ID NO: 1312555 - DNA, 15 bp, Homo sapiens
gaagctcagaagagg

SEQ ID NO: 1312556 - DNA, 15 bp, Homo sapiens
agaagctcagaagag

SEQ ID NO: 1312557 - DNA, 15 bp, Homo sapiens
aagaagctcagaaga

SEQ ID NO: 1312558 - DNA, 15 bp, Homo sapiens
caagaagctcagaag

SEQ ID NO: 1312559 - DNA, 15 bp, Homo sapiens
tcaagaagctcagaa

SEQ ID NO: 1312560 - DNA, 15 bp, Homo sapiens
gtcaagaagctcaga

SEQ ID NO: 1312561 - DNA, 15 bp, Homo sapiens
ggtcaagaagctcag

SEQ ID NO: 1312562 - DNA, 15 bp, Homo sapiens
gggtcaagaagctca

SEQ ID NO: 1312563 - DNA, 15 bp, Homo sapiens
tgggtcaagaagctc

SEQ ID NO: 1312564 - DNA, 15 bp, Homo sapiens
atgggtcaagaagct

SEQ ID NO: 1312565 - DNA, 15 bp, Homo sapiens
aatgggtcaagaagc

SEQ ID NO: 1312566 - DNA, 15 bp, Homo sapiens
gaatgggtcaagaag

SEQ ID NO: 1312567 - DNA, 15 bp, Homo sapiens
agaatgggtcaagaa

SEQ ID NO: 1312568 - DNA, 15 bp, Homo sapiens
tagaatgggtcaaga

SEQ ID NO: 1312569 - DNA, 15 bp, Homo sapiens
atagaatgggtcaag

SEQ ID NO: 1312570 - DNA, 15 bp, Homo sapiens
tatagaatgggtcaa

SEQ ID NO: 1312571 - DNA, 15 bp, Homo sapiens
gtatagaatgggtca

SEQ ID NO: 1312572 - DNA, 15 bp, Homo sapiens
tgtatagaatgggtc

SEQ ID NO: 1312573 - DNA, 15 bp, Homo sapiens
ttgtatagaatgggt

SEQ ID NO: 1312574 - DNA, 15 bp, Homo sapiens
cttgtatagaatggg

SEQ ID NO: 1312575 - DNA, 15 bp, Homo sapiens
acttgtatagaatgg

SEQ ID NO: 1312576 - DNA, 15 bp, Homo sapiens
tacttgtatagaatg

SEQ ID NO: 1312577 - DNA, 15 bp, Homo sapiens
ctacttgtatagaat

SEQ ID NO: 1312578 - DNA, 15 bp, Homo sapiens
gctacttgtatagaa

SEQ ID NO: 1312579 - DNA, 15 bp, Homo sapiens
ggctacttgtataga

SEQ ID NO: 1312580 - DNA, 15 bp, Homo sapiens
tggctacttgtatag

SEQ ID NO: 1312581 - DNA, 15 bp, Homo sapiens
ttggctacttgtata

SEQ ID NO: 1312582 - DNA, 15 bp, Homo sapiens
tttggctacttgtat

SEQ ID NO: 1312583 - DNA, 15 bp, Homo sapiens
atttggctacttgta

SEQ ID NO: 1312584 - DNA, 15 bp, Homo sapiens
tatttggctacttgt

SEQ ID NO: 1312585 - DNA, 15 bp, Homo sapiens
ttatttggctacttg

SEQ ID NO: 1312586 - DNA, 15 bp, Homo sapiens
tttatttggctactt

SEQ ID NO: 1312587 - DNA, 15 bp, Homo sapiens
atttatttggctact

SEQ ID NO: 1312588 - DNA, 15 bp, Homo sapiens
tatttatttggctac

SEQ ID NO: 1312589 - DNA, 15 bp, Homo sapiens
ttatttatttggcta

SEQ ID NO: 1312590 - DNA, 15 bp, Homo sapiens
tttatttatttggct

SEQ ID NO: 1312591 - DNA, 15 bp, Homo sapiens
ttttatttatttggc

SEQ ID NO: 1312592 - DNA, 15 bp, Homo sapiens
tttttatttatttgg

SEQ ID NO: 1312593 - DNA, 15 bp, Homo sapiens
gtttttatttatttg

SEQ ID NO: 1312594 - DNA, 15 bp, Homo sapiens
ttgtttttatttatt

SEQ ID NO: 1312595 - DNA, 15 bp, Homo sapiens
attgtttttatttat

SEQ ID NO: 1312596 - DNA, 15 bp, Homo sapiens
gattgtttttattta

SEQ ID NO: 1312597 - DNA, 15 bp, Homo sapiens
ggattgtttttattt

SEQ ID NO: 1312598 - DNA, 15 bp, Homo sapiens
tggattgtttttatt

SEQ ID NO: 1312599 - DNA, 15 bp, Homo sapiens
atggattgtttttat

SEQ ID NO: 1312600 - DNA, 15 bp, Homo sapiens
catggattgttttta

SEQ ID NO: 1312601 - DNA, 15 bp, Homo sapiens
acatggattgttttt

SEQ ID NO: 1312602 - DNA, 15 bp, Homo sapiens
aacatggattgtttt

SEQ ID NO: 1312603 - DNA, 15 bp, Homo sapiens
aaacatggattgttt

SEQ ID NO: 1312604 - DNA, 15 bp, Homo sapiens
aaaacatggattgtt

SEQ ID NO: 1312605 - DNA, 15 bp, Homo sapiens
aaaaacatggattgt

SEQ ID NO: 1312606 - DNA, 15 bp, Homo sapiens
taaaaacatggattg

SEQ ID NO: 1312607 - DNA, 15 bp, Homo sapiens
gtaaaaacatggatt

SEQ ID NO: 1312608 - DNA, 15 bp, Homo sapiens
ggtaaaaacatggat

SEQ ID NO: 1312609 - DNA, 15 bp, Homo sapiens
tggtaaaaacatgga

SEQ ID NO: 1312610 - DNA, 15 bp, Homo sapiens
atggtaaaaacatgg

SEQ ID NO: 1312611 - DNA, 15 bp, Homo sapiens
aatggtaaaaacatg

SEQ ID NO: 1312612 - DNA, 15 bp, Homo sapiens
taatggtaaaaacat

SEQ ID NO: 1312613 - DNA, 15 bp, Homo sapiens
ctaatggtaaaaaca

SEQ ID NO: 1312614 - DNA, 15 bp, Homo sapiens
actaatggtaaaaac

SEQ ID NO: 1312615 - DNA, 15 bp, Homo sapiens
gactaatggtaaaaa

SEQ ID NO: 1312616 - DNA, 15 bp, Homo sapiens
ggactaatggtaaaa

SEQ ID NO: 1312617 - DNA, 15 bp, Homo sapiens
tggactaatggtaaa

SEQ ID NO: 1312618 - DNA, 15 bp, Homo sapiens
atggactaatggtaa

SEQ ID NO: 1312619 - DNA, 15 bp, Homo sapiens
catggactaatggta

SEQ ID NO: 1312620 - DNA, 15 bp, Homo sapiens
acatggactaatggt

SEQ ID NO: 1312621 - DNA, 15 bp, Homo sapiens
aacatggactaatgg

SEQ ID NO: 1312622 - DNA, 15 bp, Homo sapiens
caacatggactaatg

SEQ ID NO: 1312623 - DNA, 15 bp, Homo sapiens
tcaacatggactaat

SEQ ID NO: 1312624 - DNA, 15 bp, Homo sapiens
ttcaacatggactaa

SEQ ID NO: 1312625 - DNA, 15 bp, Homo sapiens
tttcaacatggacta

SEQ ID NO: 1312626 - DNA, 15 bp, Homo sapiens
atttcaacatggact

SEQ ID NO: 1312627 - DNA, 15 bp, Homo sapiens
tatttcaacatggac

SEQ ID NO: 1312628 - DNA, 15 bp, Homo sapiens
ctatttcaacatgga

SEQ ID NO: 1312629 - DNA, 15 bp, Homo sapiens
actatttcaacatgg

SEQ ID NO: 1312630 - DNA, 15 bp, Homo sapiens
tactatttcaacatg

SEQ ID NO: 1312631 - DNA, 15 bp, Homo sapiens
atactatttcaacat

SEQ ID NO: 1312632 - DNA, 15 bp, Homo sapiens
gatactatttcaaca

SEQ ID NO: 1312633 - DNA, 15 bp, Homo sapiens
tgatactatttcaac

SEQ ID NO: 1312634 - DNA, 15 bp, Homo sapiens
atgatactatttcaa

SEQ ID NO: 1312635 - DNA, 15 bp, Homo sapiens
catgatactatttca

SEQ ID NO: 1312636 - DNA, 15 bp, Homo sapiens
gcatgatactatttc

SEQ ID NO: 1312637 - DNA, 15 bp, Homo sapiens
agcatgatactattt

SEQ ID NO: 1312638 - DNA, 15 bp, Homo sapiens
tagcatgatactatt

SEQ ID NO: 1312639 - DNA, 15 bp, Homo sapiens
ctagcatgatactat

SEQ ID NO: 1312640 - DNA, 15 bp, Homo sapiens
tctagcatgatacta

SEQ ID NO: 1312641 - DNA, 15 bp, Homo sapiens
atctagcatgatact

SEQ ID NO: 1312642 - DNA, 15 bp, Homo sapiens
catctagcatgatac

SEQ ID NO: 1312643 - DNA, 15 bp, Homo sapiens
acatctagcatgata

SEQ ID NO: 1312644 - DNA, 15 bp, Homo sapiens
aacatctagcatgat

SEQ ID NO: 1312645 - DNA, 15 bp, Homo sapiens
taacatctagcatga

SEQ ID NO: 1312646 - DNA, 15 bp, Homo sapiens
ataacatctagcatg

SEQ ID NO: 1312647 - DNA, 15 bp, Homo sapiens
cataacatctagcat

SEQ ID NO: 1312648 - DNA, 15 bp, Homo sapiens
ccataacatctagca

SEQ ID NO: 1312649 - DNA, 15 bp, Homo sapiens
cccataacatctagc

SEQ ID NO: 1312650 - DNA, 15 bp, Homo sapiens
gcccataacatctag

SEQ ID NO: 1312651 - DNA, 15 bp, Homo sapiens
agcccataacatcta

SEQ ID NO: 1312652 - DNA, 15 bp, Homo sapiens
cagcccataacatct

SEQ ID NO: 1312653 - DNA, 15 bp, Homo sapiens
gcagcccataacatc

SEQ ID NO: 1312654 - DNA, 15 bp, Homo sapiens
agcagcccataacat

SEQ ID NO: 1312655 - DNA, 15 bp, Homo sapiens
tagcagcccataaca

SEQ ID NO: 1312656 - DNA, 15 bp, Homo sapiens
atagcagcccataac

SEQ ID NO: 1312657 - DNA, 15 bp, Homo sapiens
catagcagcccataa

SEQ ID NO: 1312658 - DNA, 15 bp, Homo sapiens
ccatagcagcccata

SEQ ID NO: 1312659 - DNA, 15 bp, Homo sapiens
accatagcagcccat

SEQ ID NO: 1312660 - DNA, 15 bp, Homo sapiens
gaccatagcagccca

SEQ ID NO: 1312661 - DNA, 15 bp, Homo sapiens
agaccatagcagccc

SEQ ID NO: 1312662 - DNA, 15 bp, Homo sapiens
cagaccatagcagcc

SEQ ID NO: 1312663 - DNA, 15 bp, Homo sapiens
tcagaccatagcagc

SEQ ID NO: 1312664 - DNA, 15 bp, Homo sapiens
ttcagaccatagcag

SEQ ID NO: 1312665 - DNA, 15 bp, Homo sapiens
aaacattcagaccat

SEQ ID NO: 1312666 - DNA, 15 bp, Homo sapiens
caaacattcagacca

SEQ ID NO: 1312667 - DNA, 15 bp, Homo sapiens
acaaacattcagacc

SEQ ID NO: 1312668 - DNA, 15 bp, Homo sapiens
tacaaacattcagac

SEQ ID NO: 1312669 - DNA, 15 bp, Homo sapiens
atacaaacattcaga

SEQ ID NO: 1312670 - DNA, 15 bp, Homo sapiens
gatacaaacattcag

SEQ ID NO: 1312671 - DNA, 15 bp, Homo sapiens
agatacaaacattca

SEQ ID NO: 1312672 - DNA, 15 bp, Homo sapiens
cagatacaaacattc

SEQ ID NO: 1312673 - DNA, 15 bp, Homo sapiens
gcagatacaaacatt

SEQ ID NO: 1312674 - DNA, 15 bp, Homo sapiens
ggcagatacaaacat

SEQ ID NO: 1312675 - DNA, 15 bp, Homo sapiens
gggcagatacaaaca

SEQ ID NO: 1312676 - DNA, 15 bp, Homo sapiens
ggggcagatacaaac

SEQ ID NO: 1312677 - DNA, 15 bp, Homo sapiens
tggggcagatacaaa

SEQ ID NO: 1312678 - DNA, 15 bp, Homo sapiens
ttggggcagatacaa

SEQ ID NO: 1312679 - DNA, 15 bp, Homo sapiens
tttggggcagataca

SEQ ID NO: 1312680 - DNA, 15 bp, Homo sapiens
atttggggcagatac

SEQ ID NO: 1312681 - DNA, 15 bp, Homo sapiens
catttggggcagata

SEQ ID NO: 1312682 - DNA, 15 bp, Homo sapiens
acatttggggcagat

SEQ ID NO: 1312683 - DNA, 15 bp, Homo sapiens
tacatttggggcaga

SEQ ID NO: 1312684 - DNA, 15 bp, Homo sapiens
atacatttggggcag

SEQ ID NO: 1312685 - DNA, 15 bp, Homo sapiens
catacatttggggca

SEQ ID NO: 1312686 - DNA, 15 bp, Homo sapiens
acatacatttggggc

SEQ ID NO: 1312687 - DNA, 15 bp, Homo sapiens
cacatacatttgggg

SEQ ID NO: 1312688 - DNA, 15 bp, Homo sapiens
acacatacatttggg

SEQ ID NO: 1312689 - DNA, 15 bp, Homo sapiens
aacacatacatttgg

SEQ ID NO: 1312690 - DNA, 15 bp, Homo sapiens
caacacatacatttg

SEQ ID NO: 1312691 - DNA, 15 bp, Homo sapiens
tcaacacatacattt

SEQ ID NO: 1312692 - DNA, 15 bp, Homo sapiens
ttcaacacatacatt

SEQ ID NO: 1312693 - DNA, 15 bp, Homo sapiens
tttcaacacatacat

SEQ ID NO: 1312694 - DNA, 15 bp, Homo sapiens
atttcaacacataca

SEQ ID NO: 1312695 - DNA, 15 bp, Homo sapiens
catttcaacacatac

SEQ ID NO: 1312696 - DNA, 15 bp, Homo sapiens
tcatttcaacacata

SEQ ID NO: 1312697 - DNA, 15 bp, Homo sapiens
ttcatttcaacacat

SEQ ID NO: 1312698 - DNA, 15 bp, Homo sapiens
tttcatttcaacaca

SEQ ID NO: 1312699 - DNA, 15 bp, Homo sapiens
atttcatttcaacac

SEQ ID NO: 1312700 - DNA, 15 bp, Homo sapiens
gatttcatttcaaca

SEQ ID NO: 1312701 - DNA, 15 bp, Homo sapiens
ggatttcatttcaac

SEQ ID NO: 1312702 - DNA, 15 bp, Homo sapiens
gggatttcatttcaa

SEQ ID NO: 1312703 - DNA, 15 bp, Homo sapiens
tgggatttcatttca

SEQ ID NO: 1312704 - DNA, 15 bp, Homo sapiens
ttgggatttcatttc

SEQ ID NO: 1312705 - DNA, 15 bp, Homo sapiens
attgggatttcattt

SEQ ID NO: 1312706 - DNA, 15 bp, Homo sapiens
cattgggatttcatt

SEQ ID NO: 1312707 - DNA, 15 bp, Homo sapiens
gcattgggatttcat

SEQ ID NO: 1312708 - DNA, 15 bp, Homo sapiens
ggcattgggatttca

SEQ ID NO: 1312709 - DNA, 15 bp, Homo sapiens
cggcattgggatttc

SEQ ID NO: 1312710 - DNA, 15 bp, Homo sapiens
acggcattgggattt

SEQ ID NO: 1312711 - DNA, 15 bp, Homo sapiens
gacggcattgggatt

SEQ ID NO: 1312712 - DNA, 15 bp, Homo sapiens
cgacggcattgggat

SEQ ID NO: 1312713 - DNA, 15 bp, Homo sapiens
acgacggcattggga

SEQ ID NO: 1312714 - DNA, 15 bp, Homo sapiens
cacgacggcattggg

SEQ ID NO: 1312715 - DNA, 15 bp, Homo sapiens
acacgacggcattgg

SEQ ID NO: 1312716 - DNA, 15 bp, Homo sapiens
aacacgacggcattg

SEQ ID NO: 1312717 - DNA, 15 bp, Homo sapiens
caacacgacggcatt

SEQ ID NO: 1312718 - DNA, 15 bp, Homo sapiens
ccaacacgacggcat

SEQ ID NO: 1312719 - DNA, 15 bp, Homo sapiens
tccaacacgacggca

SEQ ID NO: 1312720 - DNA, 15 bp, Homo sapiens
ctccaacacgacggc

SEQ ID NO: 1312721 - DNA, 15 bp, Homo sapiens
tctccaacacgacgg

SEQ ID NO: 1312722 - DNA, 15 bp, Homo sapiens
atctccaacacgacg

SEQ ID NO: 1312723 - DNA, 15 bp, Homo sapiens
catctccaacacgac

SEQ ID NO: 1312724 - DNA, 15 bp, Homo sapiens
ccatctccaacacga

SEQ ID NO: 1312725 - DNA, 15 bp, Homo sapiens
cccatctccaacacg

SEQ ID NO: 1312726 - DNA, 15 bp, Homo sapiens
ccccatctccaacac

SEQ ID NO: 1312727 - DNA, 15 bp, Homo sapiens
gccccatctccaaca

SEQ ID NO: 1312728 - DNA, 15 bp, Homo sapiens
ggccccatctccaac

SEQ ID NO: 1312729 - DNA, 15 bp, Homo sapiens
aggccccatctccaa

SEQ ID NO: 1312730 - DNA, 15 bp, Homo sapiens
gaggccccatctcca

SEQ ID NO: 1312731 - DNA, 15 bp, Homo sapiens
agaggccccatctcc

SEQ ID NO: 1312732 - DNA, 15 bp, Homo sapiens
cagaggccccatctc

SEQ ID NO: 1312733 - DNA, 15 bp, Homo sapiens
ccagaggccccatct

SEQ ID NO: 1312734 - DNA, 15 bp, Homo sapiens
cccagaggccccatc

SEQ ID NO: 1312735 - DNA, 15 bp, Homo sapiens
tcccagaggccccat

SEQ ID NO: 1312736 - DNA, 15 bp, Homo sapiens
ctcccagaggcccca

SEQ ID NO: 1312737 - DNA, 15 bp, Homo sapiens
tctcccagaggcccc

SEQ ID NO: 1312738 - DNA, 15 bp, Homo sapiens
atctcccagaggccc

SEQ ID NO: 1312739 - DNA, 15 bp, Homo sapiens
catctcccagaggcc

SEQ ID NO: 1312740 - DNA, 15 bp, Homo sapiens
tcatctcccagaggc

SEQ ID NO: 1312741 - DNA, 15 bp, Homo sapiens
atcatctcccagagg

SEQ ID NO: 1312742 - DNA, 15 bp, Homo sapiens
aatcatctcccagag

SEQ ID NO: 1312743 - DNA, 15 bp, Homo sapiens
taatcatctcccaga

SEQ ID NO: 1312744 - DNA, 15 bp, Homo sapiens
ctaatcatctcccag

SEQ ID NO: 1312745 - DNA, 15 bp, Homo sapiens
tctaatcatctccca

SEQ ID NO: 1312746 - DNA, 15 bp, Homo sapiens
atctaatcatctccc

SEQ ID NO: 1312747 - DNA, 15 bp, Homo sapiens
gatctaatcatctcc

SEQ ID NO: 1312748 - DNA, 15 bp, Homo sapiens
tgatctaatcatctc

SEQ ID NO: 1312749 - DNA, 15 bp, Homo sapiens
atgatctaatcatct

SEQ ID NO: 1312750 - DNA, 15 bp, Homo sapiens
catgatctaatcatc

SEQ ID NO: 1312751 - DNA, 15 bp, Homo sapiens
tcatgatctaatcat

SEQ ID NO: 1312752 - DNA, 15 bp, Homo sapiens
ctcatgatctaatca

SEQ ID NO: 1312753 - DNA, 15 bp, Homo sapiens
cctcatgatctaatc

SEQ ID NO: 1312754 - DNA, 15 bp, Homo sapiens
ccctcatgatctaat

SEQ ID NO: 1312755 - DNA, 15 bp, Homo sapiens
accctcatgatctaa

SEQ ID NO: 1312756 - DNA, 15 bp, Homo sapiens
caccctcatgatcta

SEQ ID NO: 1312757 - DNA, 15 bp, Homo sapiens
ccaccctcatgatct

SEQ ID NO: 1312758 - DNA, 15 bp, Homo sapiens
tccaccctcatgatc

SEQ ID NO: 1312759 - DNA, 15 bp, Homo sapiens
ctccaccctcatgat

SEQ ID NO: 1312760 - DNA, 15 bp, Homo sapiens
gctccaccctcatga

SEQ ID NO: 1312761 - DNA, 15 bp, Homo sapiens
ggctccaccctcatg

SEQ ID NO: 1312762 - DNA, 15 bp, Homo sapiens
gggctccaccctcat

SEQ ID NO: 1312763 - DNA, 15 bp, Homo sapiens
agggctccaccctca

SEQ ID NO: 1312764 - DNA, 15 bp, Homo sapiens
gagggctccaccctc

SEQ ID NO: 1312765 - DNA, 15 bp, Homo sapiens
tgagggctccaccct

SEQ ID NO: 1312766 - DNA, 15 bp, Homo sapiens
ctgagggctccaccc

SEQ ID NO: 1312767 - DNA, 15 bp, Homo sapiens
cctgagggctccacc

SEQ ID NO: 1312768 - DNA, 15 bp, Homo sapiens
tcctgagggctccac

SEQ ID NO: 1312769 - DNA, 15 bp, Homo sapiens
ttcctgagggctcca

SEQ ID NO: 1312770 - DNA, 15 bp, Homo sapiens
attcctgagggctcc

SEQ ID NO: 1312771 - DNA, 15 bp, Homo sapiens
cattcctgagggctc

SEQ ID NO: 1312772 - DNA, 15 bp, Homo sapiens
ccattcctgagggct

SEQ ID NO: 1312773 - DNA, 15 bp, Homo sapiens
accattcctgagggc

SEQ ID NO: 1312774 - DNA, 15 bp, Homo sapiens
taccattcctgaggg

SEQ ID NO: 1312775 - DNA, 15 bp, Homo sapiens
ataccattcctgagg

SEQ ID NO: 1312776 - DNA, 15 bp, Homo sapiens
aataccattcctgag

SEQ ID NO: 1312777 - DNA, 15 bp, Homo sapiens
caataccattcctga

SEQ ID NO: 1312778 - DNA, 15 bp, Homo sapiens
ccaataccattcctg

SEQ ID NO: 1312779 - DNA, 15 bp, Homo sapiens
accaataccattcct

SEQ ID NO: 1312780 - DNA, 15 bp, Homo sapiens
caccaataccattcc

SEQ ID NO: 1312781 - DNA, 15 bp, Homo sapiens
gcaccaataccattc

SEQ ID NO: 1312782 - DNA, 15 bp, Homo sapiens
ggcaccaataccatt

SEQ ID NO: 1312783 - DNA, 15 bp, Homo sapiens
gggcaccaataccat

SEQ ID NO: 1312784 - DNA, 15 bp, Homo sapiens
agggcaccaatacca

SEQ ID NO: 1312785 - DNA, 15 bp, Homo sapiens
aagggcaccaatacc

SEQ ID NO: 1312786 - DNA, 15 bp, Homo sapiens
taagggcaccaatac

SEQ ID NO: 1312787 - DNA, 15 bp, Homo sapiens
ataagggcaccaata

SEQ ID NO: 1312788 - DNA, 15 bp, Homo sapiens
cataagggcaccaat

SEQ ID NO: 1312789 - DNA, 15 bp, Homo sapiens
tcataagggcaccaa

SEQ ID NO: 1312790 - DNA, 15 bp, Homo sapiens
ttcataagggcacca

SEQ ID NO: 1312791 - DNA, 15 bp, Homo sapiens
tttcataagggcacc

SEQ ID NO: 1312792 - DNA, 15 bp, Homo sapiens
ctttcataagggcac

SEQ ID NO: 1312793 - DNA, 15 bp, Homo sapiens
tctttcataagggca

SEQ ID NO: 1312794 - DNA, 15 bp, Homo sapiens
ttctttcataagggc

SEQ ID NO: 1312795 - DNA, 15 bp, Homo sapiens
cttctttcataaggg

SEQ ID NO: 1312796 - DNA, 15 bp, Homo sapiens
gcttctttcataagg

SEQ ID NO: 1312797 - DNA, 15 bp, Homo sapiens
ggcttctttcataag

SEQ ID NO: 1312798 - DNA, 15 bp, Homo sapiens
gggcttctttcataa

SEQ ID NO: 1312799 - DNA, 15 bp, Homo sapiens
agggcttctttcata

SEQ ID NO: 1312800 - DNA, 15 bp, Homo sapiens
aagggcttctttcat

SEQ ID NO: 1312801 - DNA, 15 bp, Homo sapiens
caagggcttctttca

SEQ ID NO: 1312802 - DNA, 15 bp, Homo sapiens
ccaagggcttctttc

SEQ ID NO: 1312803 - DNA, 15 bp, Homo sapiens
cccaagggcttcttt

SEQ ID NO: 1312804 - DNA, 15 bp, Homo sapiens
tcccaagggcttctt

SEQ ID NO: 1312805 - DNA, 15 bp, Homo sapiens
ctcccaagggcttct

SEQ ID NO: 1312806 - DNA, 15 bp, Homo sapiens
cctcccaagggcttc

SEQ ID NO: 1312807 - DNA, 15 bp, Homo sapiens
gcctcccaagggctt

SEQ ID NO: 1312808 - DNA, 15 bp, Homo sapiens
agcctcccaagggct

SEQ ID NO: 1312809 - DNA, 15 bp, Homo sapiens
cagcctcccaagggc

SEQ ID NO: 1312810 - DNA, 15 bp, Homo sapiens
acagcctcccaaggg

SEQ ID NO: 1312811 - DNA, 15 bp, Homo sapiens
aacagcctcccaagg

SEQ ID NO: 1312812 - DNA, 15 bp, Homo sapiens
aaacagcctcccaag

SEQ ID NO: 1312813 - DNA, 15 bp, Homo sapiens
caaacagcctcccaa

SEQ ID NO: 1312814 - DNA, 15 bp, Homo sapiens
acaaacagcctccca

SEQ ID NO: 1312815 - DNA, 15 bp, Homo sapiens
gacaaacagcctccc

SEQ ID NO: 1312816 - DNA, 15 bp, Homo sapiens
ggacaaacagcctcc

SEQ ID NO: 1312817 - DNA, 15 bp, Homo sapiens
gggacaaacagcctc

SEQ ID NO: 1312818 - DNA, 15 bp, Homo sapiens
agggacaaacagcct

SEQ ID NO: 1312819 - DNA, 15 bp, Homo sapiens
gagggacaaacagcc

SEQ ID NO: 1312820 - DNA, 15 bp, Homo sapiens
ggagggacaaacagc

SEQ ID NO: 1312821 - DNA, 15 bp, Homo sapiens
gggagggacaaacag

SEQ ID NO: 1312822 - DNA, 15 bp, Homo sapiens
tgggagggacaaaca

SEQ ID NO: 1312823 - DNA, 15 bp, Homo sapiens
gtgggagggacaaac

SEQ ID NO: 1312824 - DNA, 15 bp, Homo sapiens
ggtgggagggacaaa

SEQ ID NO: 1312825 - DNA, 15 bp, Homo sapiens
tggtgggagggacaa

SEQ ID NO: 1312826 - DNA, 15 bp, Homo sapiens
atggtgggagggaca

SEQ ID NO: 1312827 - DNA, 15 bp, Homo sapiens
catggtgggagggac

SEQ ID NO: 1312828 - DNA, 15 bp, Homo sapiens
gcatggtgggaggga

SEQ ID NO: 1312829 - DNA, 15 bp, Homo sapiens
tgcatggtgggaggg

SEQ ID NO: 1312830 - DNA, 15 bp, Homo sapiens
ctgcatggtgggagg

SEQ ID NO: 1312831 - DNA, 15 bp, Homo sapiens
cctgcatggtgggag

SEQ ID NO: 1312832 - DNA, 15 bp, Homo sapiens
ccctgcatggtggga

SEQ ID NO: 1312833 - DNA, 15 bp, Homo sapiens
tccctgcatggtggg

SEQ ID NO: 1312834 - DNA, 15 bp, Homo sapiens
ttccctgcatggtgg

SEQ ID NO: 1312835 - DNA, 15 bp, Homo sapiens
tttccctgcatggtg

SEQ ID NO: 1312836 - DNA, 15 bp, Homo sapiens
gtttccctgcatggt

SEQ ID NO: 1312837 - DNA, 15 bp, Homo sapiens
tgtttccctgcatgg

SEQ ID NO: 1312838 - DNA, 15 bp, Homo sapiens
ttgtttccctgcatg

SEQ ID NO: 1312839 - DNA, 15 bp, Homo sapiens
cttgtttccctgcat

SEQ ID NO: 1312840 - DNA, 15 bp, Homo sapiens
tcttgtttccctgca

SEQ ID NO: 1312841 - DNA, 15 bp, Homo sapiens
ttcttgtttccctgc

SEQ ID NO: 1312842 - DNA, 15 bp, Homo sapiens
tttcttgtttccctg

SEQ ID NO: 1312843 - DNA, 15 bp, Homo sapiens
ctttcttgtttccct

SEQ ID NO: 1312844 - DNA, 15 bp, Homo sapiens
actttcttgtttccc

SEQ ID NO: 1312845 - DNA, 15 bp, Homo sapiens
cactttcttgtttcc

SEQ ID NO: 1312846 - DNA, 15 bp, Homo sapiens
gcactttcttgtttc

SEQ ID NO: 1312847 - DNA, 15 bp, Homo sapiens
ggcactttcttgttt

SEQ ID NO: 1312848 - DNA, 15 bp, Homo sapiens
tggcactttcttgtt

SEQ ID NO: 1312849 - DNA, 15 bp, Homo sapiens
atggcactttcttgt

SEQ ID NO: 1312850 - DNA, 15 bp, Homo sapiens
gatggcactttcttg

SEQ ID NO: 1312851 - DNA, 15 bp, Homo sapiens
agatggcactttctt

SEQ ID NO: 1312852 - DNA, 15 bp, Homo sapiens
tagatggcactttct

SEQ ID NO: 1312853 - DNA, 15 bp, Homo sapiens
atagatggcactttc

SEQ ID NO: 1312854 - DNA, 15 bp, Homo sapiens
catagatggcacttt

SEQ ID NO: 1312855 - DNA, 15 bp, Homo sapiens
ccatagatggcactt

SEQ ID NO: 1312856 - DNA, 15 bp, Homo sapiens
tccatagatggcact

SEQ ID NO: 1312857 - DNA, 15 bp, Homo sapiens
ctccatagatggcac

SEQ ID NO: 1312858 - DNA, 15 bp, Homo sapiens
gctccatagatggca

SEQ ID NO: 1312859 - DNA, 15 bp, Homo sapiens
tgctccatagatggc

SEQ ID NO: 1312860 - DNA, 15 bp, Homo sapiens
ctgctccatagatgg

SEQ ID NO: 1312861 - DNA, 15 bp, Homo sapiens
tctgctccatagatg

SEQ ID NO: 1312862 - DNA, 15 bp, Homo sapiens
ctctgctccatagat

SEQ ID NO: 1312863 - DNA, 15 bp, Homo sapiens
tctctgctccataga

SEQ ID NO: 1312864 - DNA, 15 bp, Homo sapiens
ttctctgctccatag

SEQ ID NO: 1312865 - DNA, 15 bp, Homo sapiens
tttctctgctccata

SEQ ID NO: 1312866 - DNA, 15 bp, Homo sapiens
ttttctctgctccat

SEQ ID NO: 1312867 - DNA, 15 bp, Homo sapiens
tttttctctgctcca

SEQ ID NO: 1312868 - DNA, 15 bp, Homo sapiens
ttttttctctgctcc

SEQ ID NO: 1312869 - DNA, 15 bp, Homo sapiens
gttttttctctgctc

SEQ ID NO: 1312870 - DNA, 15 bp, Homo sapiens
ggttttttctctgct

SEQ ID NO: 1312871 - DNA, 15 bp, Homo sapiens
gggttttttctctgc

SEQ ID NO: 1312872 - DNA, 15 bp, Homo sapiens
agggttttttctctg

SEQ ID NO: 1312873 - DNA, 15 bp, Homo sapiens
gagggttttttctct

SEQ ID NO: 1312874 - DNA, 15 bp, Homo sapiens
ggagggttttttctc

SEQ ID NO: 1312875 - DNA, 15 bp, Homo sapiens
gggagggttttttct

SEQ ID NO: 1312876 - DNA, 15 bp, Homo sapiens
ggggagggttttttc

SEQ ID NO: 1312877 - DNA, 15 bp, Homo sapiens
tggggagggtttttt

SEQ ID NO: 1312878 - DNA, 15 bp, Homo sapiens
ctggggagggttttt

SEQ ID NO: 1312879 - DNA, 15 bp, Homo sapiens
tctggggagggtttt

SEQ ID NO: 1312880 - DNA, 15 bp, Homo sapiens
atctggggagggttt

SEQ ID NO: 1312881 - DNA, 15 bp, Homo sapiens
catctggggagggtt

SEQ ID NO: 1312882 - DNA, 15 bp, Homo sapiens
gcatctggggagggt

SEQ ID NO: 1312883 - DNA, 15 bp, Homo sapiens
agcatctggggaggg

SEQ ID NO: 1312884 - DNA, 15 bp, Homo sapiens
cagcatctggggagg

SEQ ID NO: 1312885 - DNA, 15 bp, Homo sapiens
tcagcatctggggag

SEQ ID NO: 1312886 - DNA, 15 bp, Homo sapiens
ttcagcatctgggga

SEQ ID NO: 1312887 - DNA, 15 bp, Homo sapiens
attcagcatctgggg

SEQ ID NO: 1312888 - DNA, 15 bp, Homo sapiens
gattcagcatctggg

SEQ ID NO: 1312889 - DNA, 15 bp, Homo sapiens
agattcagcatctgg

SEQ ID NO: 1312890 - DNA, 15 bp, Homo sapiens
cagattcagcatctg

SEQ ID NO: 1312891 - DNA, 15 bp, Homo sapiens
acagattcagcatct

SEQ ID NO: 1312892 - DNA, 15 bp, Homo sapiens
aacagattcagcatc

SEQ ID NO: 1312893 - DNA, 15 bp, Homo sapiens
caacagattcagcat

SEQ ID NO: 1312894 - DNA, 15 bp, Homo sapiens
acaacagattcagca

SEQ ID NO: 1312895 - DNA, 15 bp, Homo sapiens
gacaacagattcagc

SEQ ID NO: 1312896 - DNA, 15 bp, Homo sapiens
cgacaacagattcag

SEQ ID NO: 1312897 - DNA, 15 bp, Homo sapiens
gcgacaacagattca

SEQ ID NO: 1312898 - DNA, 15 bp, Homo sapiens
ggcgacaacagattc

SEQ ID NO: 1312899 - DNA, 15 bp, Homo sapiens
aggcgacaacagatt

SEQ ID NO: 1312900 - DNA, 15 bp, Homo sapiens
aaggcgacaacagat

SEQ ID NO: 1312901 - DNA, 15 bp, Homo sapiens
caaggcgacaacaga

SEQ ID NO: 1312902 - DNA, 15 bp, Homo sapiens
tcaaggcgacaacag

SEQ ID NO: 1312903 - DNA, 15 bp, Homo sapiens
atcaaggcgacaaca

SEQ ID NO: 1312904 - DNA, 15 bp, Homo sapiens
gatcaaggcgacaac

SEQ ID NO: 1312905 - DNA, 15 bp, Homo sapiens
agatcaaggcgacaa

SEQ ID NO: 1312906 - DNA, 15 bp, Homo sapiens
cagatcaaggcgaca

SEQ ID NO: 1312907 - DNA, 15 bp, Homo sapiens
ccagatcaaggcgac

SEQ ID NO: 1312908 - DNA, 15 bp, Homo sapiens
cccagatcaaggcga

SEQ ID NO: 1312909 - DNA, 15 bp, Homo sapiens
tcccagatcaaggcg

SEQ ID NO: 1312910 - DNA, 15 bp, Homo sapiens
gtcccagatcaaggc

SEQ ID NO: 1312911 - DNA, 15 bp, Homo sapiens
tgtcccagatcaagg

SEQ ID NO: 1312912 - DNA, 15 bp, Homo sapiens
atgtcccagatcaag

SEQ ID NO: 1312913 - DNA, 15 bp, Homo sapiens
aatgtcccagatcaa

SEQ ID NO: 1312914 - DNA, 15 bp, Homo sapiens
gaatgtcccagatca

SEQ ID NO: 1312915 - DNA, 15 bp, Homo sapiens
ggaatgtcccagatc

SEQ ID NO: 1312916 - DNA, 15 bp, Homo sapiens
cggaatgtcccagat

SEQ ID NO: 1312917 - DNA, 15 bp, Homo sapiens
ccggaatgtcccaga

SEQ ID NO: 1312918 - DNA, 15 bp, Homo sapiens
gccggaatgtcccag

SEQ ID NO: 1312919 - DNA, 15 bp, Homo sapiens
ggccggaatgtccca

SEQ ID NO: 1312920 - DNA, 15 bp, Homo sapiens
aggccggaatgtccc

SEQ ID NO: 1312921 - DNA, 15 bp, Homo sapiens
aaggccggaatgtcc

SEQ ID NO: 1312922 - DNA, 15 bp, Homo sapiens
aaaggccggaatgtc

SEQ ID NO: 1312923 - DNA, 15 bp, Homo sapiens
taaaggccggaatgt

SEQ ID NO: 1312924 - DNA, 15 bp, Homo sapiens
ctaaaggccggaatg

SEQ ID NO: 1312925 - DNA, 15 bp, Homo sapiens
tctaaaggccggaat

SEQ ID NO: 1312926 - DNA, 15 bp, Homo sapiens
ttctaaaggccggaa

SEQ ID NO: 1312927 - DNA, 15 bp, Homo sapiens
gttctaaaggccgga

SEQ ID NO: 1312928 - DNA, 15 bp, Homo sapiens
agttctaaaggccgg

SEQ ID NO: 1312929 - DNA, 15 bp, Homo sapiens
cagttctaaaggccg

SEQ ID NO: 1312930 - DNA, 15 bp, Homo sapiens
acagttctaaaggcc

SEQ ID NO: 1312931 - DNA, 15 bp, Homo sapiens
cacagttctaaaggc

SEQ ID NO: 1312932 - DNA, 15 bp, Homo sapiens
tcacagttctaaagg

SEQ ID NO: 1312933 - DNA, 15 bp, Homo sapiens
ctcacagttctaaag

SEQ ID NO: 1312934 - DNA, 15 bp, Homo sapiens
gctcacagttctaaa

SEQ ID NO: 1312935 - DNA, 15 bp, Homo sapiens
tgctcacagttctaa

SEQ ID NO: 1312936 - DNA, 15 bp, Homo sapiens
ttgctcacagttcta

SEQ ID NO: 1312937 - DNA, 15 bp, Homo sapiens
attgctcacagttct

SEQ ID NO: 1312938 - DNA, 15 bp, Homo sapiens
gattgctcacagttc

SEQ ID NO: 1312939 - DNA, 15 bp, Homo sapiens
tgattgctcacagtt

SEQ ID NO: 1312940 - DNA, 15 bp, Homo sapiens
ttgattgctcacagt

SEQ ID NO: 1312941 - DNA, 15 bp, Homo sapiens
attgattgctcacag

SEQ ID NO: 1312942 - DNA, 15 bp, Homo sapiens
aattgattgctcaca

SEQ ID NO: 1312943 - DNA, 15 bp, Homo sapiens
caattgattgctcac

SEQ ID NO: 1312944 - DNA, 15 bp, Homo sapiens
gcaattgattgctca

SEQ ID NO: 1312945 - DNA, 15 bp, Homo sapiens
agcaattgattgctc

SEQ ID NO: 1312946 - DNA, 15 bp, Homo sapiens
cagcaattgattgct

SEQ ID NO: 1312947 - DNA, 15 bp, Homo sapiens
acagcaattgattgc

SEQ ID NO: 1312948 - DNA, 15 bp, Homo sapiens
aacagcaattgattg

SEQ ID NO: 1312949 - DNA, 15 bp, Homo sapiens
caacagcaattgatt

SEQ ID NO: 1312950 - DNA, 15 bp, Homo sapiens
acaacagcaattgat

SEQ ID NO: 1312951 - DNA, 15 bp, Homo sapiens
aacaacagcaattga

SEQ ID NO: 1312952 - DNA, 15 bp, Homo sapiens
aaacaacagcaattg

SEQ ID NO: 1312953 - DNA, 15 bp, Homo sapiens
taaacaacagcaatt

SEQ ID NO: 1312954 - DNA, 15 bp, Homo sapiens
ataaacaacagcaat

SEQ ID NO: 1312955 - DNA, 15 bp, Homo sapiens
tataaacaacagcaa

SEQ ID NO: 1312956 - DNA, 15 bp, Homo sapiens
ttataaacaacagca

SEQ ID NO: 1312957 - DNA, 15 bp, Homo sapiens
tttataaacaacagc

SEQ ID NO: 1312958 - DNA, 15 bp, Homo sapiens
atttataaacaacag

SEQ ID NO: 1312959 - DNA, 15 bp, Homo sapiens
aatttataaacaaca

SEQ ID NO: 1312960 - DNA, 15 bp, Homo sapiens
taatttataaacaac

SEQ ID NO: 1312961 - DNA, 15 bp, Homo sapiens
gtaatttataaacaa

SEQ ID NO: 1312962 - DNA, 15 bp, Homo sapiens
ggtaatttataaaca

SEQ ID NO: 1312963 - DNA, 15 bp, Homo sapiens
gggtaatttataaac

SEQ ID NO: 1312964 - DNA, 15 bp, Homo sapiens
tagactgggtaattt

SEQ ID NO: 1312965 - DNA, 15 bp, Homo sapiens
ttagactgggtaatt

SEQ ID NO: 1312966 - DNA, 15 bp, Homo sapiens
cttagactgggtaat

SEQ ID NO: 1312967 - DNA, 15 bp, Homo sapiens
ccttagactgggtaa

SEQ ID NO: 1312968 - DNA, 15 bp, Homo sapiens
accttagactgggta

SEQ ID NO: 1312969 - DNA, 15 bp, Homo sapiens
taccttagactgggt

SEQ ID NO: 1312970 - DNA, 15 bp, Homo sapiens
ataccttagactggg

SEQ ID NO: 1312971 - DNA, 15 bp, Homo sapiens
aataccttagactgg

SEQ ID NO: 1312972 - DNA, 15 bp, Homo sapiens
aaataccttagactg

SEQ ID NO: 1312973 - DNA, 15 bp, Homo sapiens
aaaataccttagact

SEQ ID NO: 1312974 - DNA, 15 bp, Homo sapiens
caaaataccttagac

SEQ ID NO: 1312975 - DNA, 15 bp, Homo sapiens
acaaaataccttaga

SEQ ID NO: 1312976 - DNA, 15 bp, Homo sapiens
aacaaaataccttag

SEQ ID NO: 1312977 - DNA, 15 bp, Homo sapiens
taacaaaatacctta

SEQ ID NO: 1312978 - DNA, 15 bp, Homo sapiens
ctaacaaaatacctt

SEQ ID NO: 1312979 - DNA, 15 bp, Homo sapiens
gctaacaaaatacct

SEQ ID NO: 1312980 - DNA, 15 bp, Homo sapiens
cgctaacaaaatacc

SEQ ID NO: 1312981 - DNA, 15 bp, Homo sapiens
gcgctaacaaaatac

SEQ ID NO: 1312982 - DNA, 15 bp, Homo sapiens
tgcgctaacaaaata

SEQ ID NO: 1312983 - DNA, 15 bp, Homo sapiens
atgcgctaacaaaat

SEQ ID NO: 1312984 - DNA, 15 bp, Homo sapiens
tatgcgctaacaaaa

SEQ ID NO: 1312985 - DNA, 15 bp, Homo sapiens
atatgcgctaacaaa

SEQ ID NO: 1312986 - DNA, 15 bp, Homo sapiens
tatatgcgctaacaa

SEQ ID NO: 1312987 - DNA, 15 bp, Homo sapiens
ctatatgcgctaaca

SEQ ID NO: 1312988 - DNA, 15 bp, Homo sapiens
tctatatgcgctaac

SEQ ID NO: 1312989 - DNA, 15 bp, Homo sapiens
gtctatatgcgctaa

SEQ ID NO: 1312990 - DNA, 15 bp, Homo sapiens
agtctatatgcgcta

SEQ ID NO: 1312991 - DNA, 15 bp, Homo sapiens
cagtctatatgcgct

SEQ ID NO: 1312992 - DNA, 15 bp, Homo sapiens
tcagtctatatgcgc

SEQ ID NO: 1312993 - DNA, 15 bp, Homo sapiens
gtcagtctatatgcg

SEQ ID NO: 1312994 - DNA, 15 bp, Homo sapiens
aacagattcctcagc

SEQ ID NO: 1312995 - DNA, 15 bp, Homo sapiens
aaacagattcctcag

SEQ ID NO: 1312996 - DNA, 15 bp, Homo sapiens
aaaacagattcctca

SEQ ID NO: 1312997 - DNA, 15 bp, Homo sapiens
taaaacagattcctc

SEQ ID NO: 1312998 - DNA, 15 bp, Homo sapiens
ttaaaacagattcct

SEQ ID NO: 1312999 - DNA, 15 bp, Homo sapiens
gttaaaacagattcc

SEQ ID NO: 1313000 - DNA, 15 bp, Homo sapiens
tgttaaaacagattc

SEQ ID NO: 1313001 - DNA, 15 bp, Homo sapiens
ttgttaaaacagatt

SEQ ID NO: 1313002 - DNA, 15 bp, Homo sapiens
tttgttaaaacagat

SEQ ID NO: 1313003 - DNA, 15 bp, Homo sapiens
atttgttaaaacaga

SEQ ID NO: 1313004 - DNA, 15 bp, Homo sapiens
aatttgttaaaacag

SEQ ID NO: 1313005 - DNA, 15 bp, Homo sapiens
gaatttgttaaaaca

SEQ ID NO: 1313006 - DNA, 15 bp, Homo sapiens
agaatttgttaaaac

SEQ ID NO: 1313007 - DNA, 15 bp, Homo sapiens
gagaatttgttaaaa

SEQ ID NO: 1313008 - DNA, 15 bp, Homo sapiens
ggagaatttgttaaa

SEQ ID NO: 1313009 - DNA, 15 bp, Homo sapiens
aggagaatttgttaa

SEQ ID NO: 1313010 - DNA, 15 bp, Homo sapiens
caggagaatttgtta

SEQ ID NO: 1313011 - DNA, 15 bp, Homo sapiens
ccaggagaatttgtt

SEQ ID NO: 1313012 - DNA, 15 bp, Homo sapiens
accaggagaatttgt

SEQ ID NO: 1313013 - DNA, 15 bp, Homo sapiens
caccaggagaatttg

SEQ ID NO: 1313014 - DNA, 15 bp, Homo sapiens
tcaccaggagaattt

SEQ ID NO: 1313015 - DNA, 15 bp, Homo sapiens
atcaccaggagaatt

SEQ ID NO: 1313016 - DNA, 15 bp, Homo sapiens
aatcaccaggagaat

SEQ ID NO: 1313017 - DNA, 15 bp, Homo sapiens
gaatcaccaggagaa

SEQ ID NO: 1313018 - DNA, 15 bp, Homo sapiens
agaatcaccaggaga

SEQ ID NO: 1313019 - DNA, 15 bp, Homo sapiens
aagaatcaccaggag

SEQ ID NO: 1313020 - DNA, 15 bp, Homo sapiens
gaagaatcaccagga

SEQ ID NO: 1313021 - DNA, 15 bp, Homo sapiens
agaagaatcaccagg

SEQ ID NO: 1313022 - DNA, 15 bp, Homo sapiens
tagaagaatcaccag

SEQ ID NO: 1313023 - DNA, 15 bp, Homo sapiens
atagaagaatcacca

SEQ ID NO: 1313024 - DNA, 15 bp, Homo sapiens
catagaagaatcacc

SEQ ID NO: 1313025 - DNA, 15 bp, Homo sapiens
ccatagaagaatcac

SEQ ID NO: 1313026 - DNA, 15 bp, Homo sapiens
cccatagaagaatca

SEQ ID NO: 1313027 - DNA, 15 bp, Homo sapiens
gcccatagaagaatc

SEQ ID NO: 1313028 - DNA, 15 bp, Homo sapiens
agcccatagaagaat

SEQ ID NO: 1313029 - DNA, 15 bp, Homo sapiens
tagcccatagaagaa

SEQ ID NO: 1313030 - DNA, 15 bp, Homo sapiens
ttagcccatagaaga

SEQ ID NO: 1313031 - DNA, 15 bp, Homo sapiens
tttagcccatagaag

SEQ ID NO: 1313032 - DNA, 15 bp, Homo sapiens
atttagcccatagaa

SEQ ID NO: 1313033 - DNA, 15 bp, Homo sapiens
catttagcccataga

SEQ ID NO: 1313034 - DNA, 15 bp, Homo sapiens
tcatttagcccatag

SEQ ID NO: 1313035 - DNA, 15 bp, Homo sapiens
atcatttagcccata

SEQ ID NO: 1313036 - DNA, 15 bp, Homo sapiens
gatcatttagcccat

SEQ ID NO: 1313037 - DNA, 15 bp, Homo sapiens
agatcatttagccca

SEQ ID NO: 1313038 - DNA, 15 bp, Homo sapiens
aagatcatttagccc

SEQ ID NO: 1313039 - DNA, 15 bp, Homo sapiens
caagatcatttagcc

SEQ ID NO: 1313040 - DNA, 15 bp, Homo sapiens
ccaagatcatttagc

SEQ ID NO: 1313041 - DNA, 15 bp, Homo sapiens
gccaagatcatttag

SEQ ID NO: 1313042 - DNA, 15 bp, Homo sapiens
tgccaagatcattta

SEQ ID NO: 1313043 - DNA, 15 bp, Homo sapiens
ctgccaagatcattt

SEQ ID NO: 1313044 - DNA, 15 bp, Homo sapiens
actgccaagatcatt

SEQ ID NO: 1313045 - DNA, 15 bp, Homo sapiens
tactgccaagatcat

SEQ ID NO: 1313046 - DNA, 15 bp, Homo sapiens
atactgccaagatca

SEQ ID NO: 1313047 - DNA, 15 bp, Homo sapiens
catactgccaagatc

SEQ ID NO: 1313048 - DNA, 15 bp, Homo sapiens
acatactgccaagat

SEQ ID NO: 1313049 - DNA, 15 bp, Homo sapiens
aacatactgccaaga

SEQ ID NO: 1313050 - DNA, 15 bp, Homo sapiens
taacatactgccaag

SEQ ID NO: 1313051 - DNA, 15 bp, Homo sapiens
ctaacatactgccaa

SEQ ID NO: 1313052 - DNA, 15 bp, Homo sapiens
tctaacatactgcca

SEQ ID NO: 1313053 - DNA, 15 bp, Homo sapiens
ttctaacatactgcc

SEQ ID NO: 1313054 - DNA, 15 bp, Homo sapiens
attctaacatactgc

SEQ ID NO: 1313055 - DNA, 15 bp, Homo sapiens
gattctaacatactg

SEQ ID NO: 1313056 - DNA, 15 bp, Homo sapiens
tgattctaacatact

SEQ ID NO: 1313057 - DNA, 15 bp, Homo sapiens
gtgattctaacatac

SEQ ID NO: 1313058 - DNA, 15 bp, Homo sapiens
ggtgattctaacata

SEQ ID NO: 1313059 - DNA, 15 bp, Homo sapiens
gggtgattctaacat

SEQ ID NO: 1313060 - DNA, 15 bp, Homo sapiens
tgggtgattctaaca

SEQ ID NO: 1313061 - DNA, 15 bp, Homo sapiens
ctgggtgattctaac

SEQ ID NO: 1313062 - DNA, 15 bp, Homo sapiens
cctgggtgattctaa

SEQ ID NO: 1313063 - DNA, 15 bp, Homo sapiens
tcctgggtgattcta

SEQ ID NO: 1313064 - DNA, 15 bp, Homo sapiens
ttcctgggtgattct

SEQ ID NO: 1313065 - DNA, 15 bp, Homo sapiens
gttcctgggtgattc

SEQ ID NO: 1313066 - DNA, 15 bp, Homo sapiens
agttcctgggtgatt

SEQ ID NO: 1313067 - DNA, 15 bp, Homo sapiens
gagttcctgggtgat

SEQ ID NO: 1313068 - DNA, 15 bp, Homo sapiens
agagttcctgggtga

SEQ ID NO: 1313069 - DNA, 15 bp, Homo sapiens
cagagttcctgggtg

SEQ ID NO: 1313070 - DNA, 15 bp, Homo sapiens
tcagagttcctgggt

SEQ ID NO: 1313071 - DNA, 15 bp, Homo sapiens
gtcagagttcctggg

SEQ ID NO: 1313072 - DNA, 15 bp, Homo sapiens
tgtcagagttcctgg

SEQ ID NO: 1313073 - DNA, 15 bp, Homo sapiens
gtgtcagagttcctg

SEQ ID NO: 1313074 - DNA, 15 bp, Homo sapiens
cgtgtcagagttcct

SEQ ID NO: 1313075 - DNA, 15 bp, Homo sapiens
acgtgtcagagttcc

SEQ ID NO: 1313076 - DNA, 15 bp, Homo sapiens
gacgtgtcagagttc

SEQ ID NO: 1313077 - DNA, 15 bp, Homo sapiens
ggacgtgtcagagtt

SEQ ID NO: 1313078 - DNA, 15 bp, Homo sapiens
aggacgtgtcagagt

SEQ ID NO: 1313079 - DNA, 15 bp, Homo sapiens
gaggacgtgtcagag

SEQ ID NO: 1313080 - DNA, 15 bp, Homo sapiens
ggaggacgtgtcaga

SEQ ID NO: 1313081 - DNA, 15 bp, Homo sapiens
aggaggacgtgtcag

SEQ ID NO: 1313082 - DNA, 15 bp, Homo sapiens
caggaggacgtgtca

SEQ ID NO: 1313083 - DNA, 15 bp, Homo sapiens
ccaggaggacgtgtc

SEQ ID NO: 1313084 - DNA, 15 bp, Homo sapiens
gccaggaggacgtgt

SEQ ID NO: 1313085 - DNA, 15 bp, Homo sapiens
ggccaggaggacgtg

SEQ ID NO: 1313086 - DNA, 15 bp, Homo sapiens
tggccaggaggacgt

SEQ ID NO: 1313087 - DNA, 15 bp, Homo sapiens
ctggccaggaggacg

SEQ ID NO: 1313088 - DNA, 15 bp, Homo sapiens
tctggccaggaggac

SEQ ID NO: 1313089 - DNA, 15 bp, Homo sapiens
gtctggccaggagga

SEQ ID NO: 1313090 - DNA, 15 bp, Homo sapiens
agtctggccaggagg

SEQ ID NO: 1313091 - DNA, 15 bp, Homo sapiens
cagtctggccaggag

SEQ ID NO: 1313092 - DNA, 15 bp, Homo sapiens
acagtctggccagga

SEQ ID NO: 1313093 - DNA, 15 bp, Homo sapiens
tacagtctggccagg

SEQ ID NO: 1313094 - DNA, 15 bp, Homo sapiens
atacagtctggccag

SEQ ID NO: 1313095 - DNA, 15 bp, Homo sapiens
aatacagtctggcca

SEQ ID NO: 1313096 - DNA, 15 bp, Homo sapiens
aaatacagtctggcc

SEQ ID NO: 1313097 - DNA, 15 bp, Homo sapiens
gaaatacagtctggc

SEQ ID NO: 1313098 - DNA, 15 bp, Homo sapiens
agaaatacagtctgg

SEQ ID NO: 1313099 - DNA, 15 bp, Homo sapiens
tagaaatacagtctg

SEQ ID NO: 1313100 - DNA, 15 bp, Homo sapiens
ttagaaatacagtct

SEQ ID NO: 1313101 - DNA, 15 bp, Homo sapiens
gttagaaatacagtc

SEQ ID NO: 1313102 - DNA, 15 bp, Homo sapiens
ggttagaaatacagt

SEQ ID NO: 1313103 - DNA, 15 bp, Homo sapiens
tggttagaaatacag

SEQ ID NO: 1313104 - DNA, 15 bp, Homo sapiens
ttggttagaaataca

SEQ ID NO: 1313105 - DNA, 15 bp, Homo sapiens
cttggttagaaatac

SEQ ID NO: 1313106 - DNA, 15 bp, Homo sapiens
gcttggttagaaata

SEQ ID NO: 1313107 - DNA, 15 bp, Homo sapiens
tgcttggttagaaat

SEQ ID NO: 1313108 - DNA, 15 bp, Homo sapiens
atgcttggttagaaa

SEQ ID NO: 1313109 - DNA, 15 bp, Homo sapiens
tatgcttggttagaa

SEQ ID NO: 1313110 - DNA, 15 bp, Homo sapiens
atatgcttggttaga

SEQ ID NO: 1313111 - DNA, 15 bp, Homo sapiens
catatgcttggttag

SEQ ID NO: 1313112 - DNA, 15 bp, Homo sapiens
tcatatgcttggtta

SEQ ID NO: 1313113 - DNA, 15 bp, Homo sapiens
ctcatatgcttggtt

SEQ ID NO: 1313114 - DNA, 15 bp, Homo sapiens
tctcatatgcttggt

SEQ ID NO: 1313115 - DNA, 15 bp, Homo sapiens
ttctcatatgcttgg

SEQ ID NO: 1313116 - DNA, 15 bp, Homo sapiens
attctcatatgcttg

SEQ ID NO: 1313117 - DNA, 15 bp, Homo sapiens
aattctcatatgctt

SEQ ID NO: 1313118 - DNA, 15 bp, Homo sapiens
caattctcatatgct

SEQ ID NO: 1313119 - DNA, 15 bp, Homo sapiens
ccaattctcatatgc

SEQ ID NO: 1313120 - DNA, 15 bp, Homo sapiens
cccaattctcatatg

SEQ ID NO: 1313121 - DNA, 15 bp, Homo sapiens
ccccaattctcatat

SEQ ID NO: 1313122 - DNA, 15 bp, Homo sapiens
tccccaattctcata

SEQ ID NO: 1313123 - DNA, 15 bp, Homo sapiens
atccccaattctcat

SEQ ID NO: 1313124 - DNA, 15 bp, Homo sapiens
catccccaattctca

SEQ ID NO: 1313125 - DNA, 15 bp, Homo sapiens
tcatccccaattctc

SEQ ID NO: 1313126 - DNA, 15 bp, Homo sapiens
ttcatccccaattct

SEQ ID NO: 1313127 - DNA, 15 bp, Homo sapiens
gttcatccccaattc

SEQ ID NO: 1313128 - DNA, 15 bp, Homo sapiens
agttcatccccaatt

SEQ ID NO: 1313129 - DNA, 15 bp, Homo sapiens
gagttcatccccaat

SEQ ID NO: 1313130 - DNA, 15 bp, Homo sapiens
tgagttcatccccaa

SEQ ID NO: 1313131 - DNA, 15 bp, Homo sapiens
ctgagttcatcccca

SEQ ID NO: 1313132 - DNA, 15 bp, Homo sapiens
actgagttcatcccc

SEQ ID NO: 1313133 - DNA, 15 bp, Homo sapiens
gactgagttcatccc

SEQ ID NO: 1313134 - DNA, 15 bp, Homo sapiens
tgactgagttcatcc

SEQ ID NO: 1313135 - DNA, 15 bp, Homo sapiens
gtgactgagttcatc

SEQ ID NO: 1313136 - DNA, 15 bp, Homo sapiens
ggtgactgagttcat

SEQ ID NO: 1313137 - DNA, 15 bp, Homo sapiens
tggtgactgagttca

SEQ ID NO: 1313138 - DNA, 15 bp, Homo sapiens
ctggtgactgagttc

SEQ ID NO: 1313139 - DNA, 15 bp, Homo sapiens
tctggtgactgagtt

SEQ ID NO: 1313140 - DNA, 15 bp, Homo sapiens
ttctggtgactgagt

SEQ ID NO: 1313141 - DNA, 15 bp, Homo sapiens
attctggtgactgag

SEQ ID NO: 1313142 - DNA, 15 bp, Homo sapiens
cattctggtgactga

SEQ ID NO: 1313143 - DNA, 15 bp, Homo sapiens
acattctggtgactg

SEQ ID NO: 1313144 - DNA, 15 bp, Homo sapiens
aacattctggtgact

SEQ ID NO: 1313145 - DNA, 15 bp, Homo sapiens
aaacattctggtgac

SEQ ID NO: 1313146 - DNA, 15 bp, Homo sapiens
aaaacattctggtga

SEQ ID NO: 1313147 - DNA, 15 bp, Homo sapiens
gaaaacattctggtg

SEQ ID NO: 1313148 - DNA, 15 bp, Homo sapiens
tgaaaacattctggt

SEQ ID NO: 1313149 - DNA, 15 bp, Homo sapiens
ttgaaaacattctgg

SEQ ID NO: 1313150 - DNA, 15 bp, Homo sapiens
cttgaaaacattctg

SEQ ID NO: 1313151 - DNA, 15 bp, Homo sapiens
acttgaaaacattct

SEQ ID NO: 1313152 - DNA, 15 bp, Homo sapiens
aacttgaaaacattc

SEQ ID NO: 1313153 - DNA, 15 bp, Homo sapiens
gaacttgaaaacatt

SEQ ID NO: 1313154 - DNA, 15 bp, Homo sapiens
agaacttgaaaacat

SEQ ID NO: 1313155 - DNA, 15 bp, Homo sapiens
gagaacttgaaaaca

SEQ ID NO: 1313156 - DNA, 15 bp, Homo sapiens
agagaacttgaaaac

SEQ ID NO: 1313157 - DNA, 15 bp, Homo sapiens
cagagaacttgaaaa

SEQ ID NO: 1313158 - DNA, 15 bp, Homo sapiens
tcagagaacttgaaa

SEQ ID NO: 1313159 - DNA, 15 bp, Homo sapiens
ttcagagaacttgaa

SEQ ID NO: 1313160 - DNA, 15 bp, Homo sapiens
attcagagaacttga

SEQ ID NO: 1313161 - DNA, 15 bp, Homo sapiens
tattcagagaacttg

SEQ ID NO: 1313162 - DNA, 15 bp, Homo sapiens
ttattcagagaactt

SEQ ID NO: 1313163 - DNA, 15 bp, Homo sapiens
attattcagagaact

SEQ ID NO: 1313164 - DNA, 15 bp, Homo sapiens
aattattcagagaac

SEQ ID NO: 1313165 - DNA, 15 bp, Homo sapiens
aaattattcagagaa

SEQ ID NO: 1313166 - DNA, 15 bp, Homo sapiens
gaaattattcagaga

SEQ ID NO: 1313167 - DNA, 15 bp, Homo sapiens
tgaaattattcagag

SEQ ID NO: 1313168 - DNA, 15 bp, Homo sapiens
gtgaaattattcaga

SEQ ID NO: 1313169 - DNA, 15 bp, Homo sapiens
agtgaaattattcag

SEQ ID NO: 1313170 - DNA, 15 bp, Homo sapiens
aagtgaaattattca

SEQ ID NO: 1313171 - DNA, 15 bp, Homo sapiens
caagtgaaattattc

SEQ ID NO: 1313172 - DNA, 15 bp, Homo sapiens
acaagtgaaattatt

SEQ ID NO: 1313173 - DNA, 15 bp, Homo sapiens
cacaagtgaaattat

SEQ ID NO: 1313174 - DNA, 15 bp, Homo sapiens
gcacaagtgaaatta

SEQ ID NO: 1313175 - DNA, 15 bp, Homo sapiens
tgcacaagtgaaatt

SEQ ID NO: 1313176 - DNA, 15 bp, Homo sapiens
ctgcacaagtgaaat

SEQ ID NO: 1313177 - DNA, 15 bp, Homo sapiens
gctgcacaagtgaaa

SEQ ID NO: 1313178 - DNA, 15 bp, Homo sapiens
ggctgcacaagtgaa

SEQ ID NO: 1313179 - DNA, 15 bp, Homo sapiens
tggctgcacaagtga

SEQ ID NO: 1313180 - DNA, 15 bp, Homo sapiens
gtggctgcacaagtg

SEQ ID NO: 1313181 - DNA, 15 bp, Homo sapiens
agtggctgcacaagt

SEQ ID NO: 1313182 - DNA, 15 bp, Homo sapiens
cagtggctgcacaag

SEQ ID NO: 1313183 - DNA, 15 bp, Homo sapiens
acagtggctgcacaa

SEQ ID NO: 1313184 - DNA, 15 bp, Homo sapiens
aacagtggctgcaca

SEQ ID NO: 1313185 - DNA, 15 bp, Homo sapiens
caacagtggctgcac

SEQ ID NO: 1313186 - DNA, 15 bp, Homo sapiens
tcaacagtggctgca

SEQ ID NO: 1313187 - DNA, 15 bp, Homo sapiens
ctcaacagtggctgc

SEQ ID NO: 1313188 - DNA, 15 bp, Homo sapiens
tctcaacagtggctg

SEQ ID NO: 1313189 - DNA, 15 bp, Homo sapiens
ctctcaacagtggct

SEQ ID NO: 1313190 - DNA, 15 bp, Homo sapiens
cctctcaacagtggc

SEQ ID NO: 1313191 - DNA, 15 bp, Homo sapiens
gcctctcaacagtgg

SEQ ID NO: 1313192 - DNA, 15 bp, Homo sapiens
ggcctctcaacagtg

SEQ ID NO: 1313193 - DNA, 15 bp, Homo sapiens
aggcctctcaacagt

SEQ ID NO: 1313194 - DNA, 15 bp, Homo sapiens
caggcctctcaacag

SEQ ID NO: 1313195 - DNA, 15 bp, Homo sapiens
ccaggcctctcaaca

SEQ ID NO: 1313196 - DNA, 15 bp, Homo sapiens
gccaggcctctcaac

SEQ ID NO: 1313197 - DNA, 15 bp, Homo sapiens
tgccaggcctctcaa

SEQ ID NO: 1313198 - DNA, 15 bp, Homo sapiens
gtgccaggcctctca

SEQ ID NO: 1313199 - DNA, 15 bp, Homo sapiens
tgtgccaggcctctc

SEQ ID NO: 1313200 - DNA, 15 bp, Homo sapiens
ctgtgccaggcctct

SEQ ID NO: 1313201 - DNA, 15 bp, Homo sapiens
actgtgccaggcctc

SEQ ID NO: 1313202 - DNA, 15 bp, Homo sapiens
cactgtgccaggcct

SEQ ID NO: 1313203 - DNA, 15 bp, Homo sapiens
ccactgtgccaggcc

SEQ ID NO: 1313204 - DNA, 15 bp, Homo sapiens
accactgtgccaggc

SEQ ID NO: 1313205 - DNA, 15 bp, Homo sapiens
caccactgtgccagg

SEQ ID NO: 1313206 - DNA, 15 bp, Homo sapiens
ccaccactgtgccag

SEQ ID NO: 1313207 - DNA, 15 bp, Homo sapiens
accaccactgtgcca

SEQ ID NO: 1313208 - DNA, 15 bp, Homo sapiens
aaccaccactgtgcc

SEQ ID NO: 1313209 - DNA, 15 bp, Homo sapiens
gaaccaccactgtgc

SEQ ID NO: 1313210 - DNA, 15 bp, Homo sapiens
agaaccaccactgtg

SEQ ID NO: 1313211 - DNA, 15 bp, Homo sapiens
aagaaccaccactgt

SEQ ID NO: 1313212 - DNA, 15 bp, Homo sapiens
taagaaccaccactg

SEQ ID NO: 1313213 - DNA, 15 bp, Homo sapiens
ttaagaaccaccact

SEQ ID NO: 1313214 - DNA, 15 bp, Homo sapiens
tttaagaaccaccac

SEQ ID NO: 1313215 - DNA, 15 bp, Homo sapiens
gtttaagaaccacca

SEQ ID NO: 1313216 - DNA, 15 bp, Homo sapiens
ggtttaagaaccacc

SEQ ID NO: 1313217 - DNA, 15 bp, Homo sapiens
tggtttaagaaccac

SEQ ID NO: 1313218 - DNA, 15 bp, Homo sapiens
ctggtttaagaacca

SEQ ID NO: 1313219 - DNA, 15 bp, Homo sapiens
tctggtttaagaacc

SEQ ID NO: 1313220 - DNA, 15 bp, Homo sapiens
ctctggtttaagaac

SEQ ID NO: 1313221 - DNA, 15 bp, Homo sapiens
cctctggtttaagaa

SEQ ID NO: 1313222 - DNA, 15 bp, Homo sapiens
tcctctggtttaaga

SEQ ID NO: 1313223 - DNA, 15 bp, Homo sapiens
ttcctctggtttaag

SEQ ID NO: 1313224 - DNA, 15 bp, Homo sapiens
gttcctctggtttaa

SEQ ID NO: 1313225 - DNA, 15 bp, Homo sapiens
tgttcctctggttta

SEQ ID NO: 1313226 - DNA, 15 bp, Homo sapiens
atgttcctctggttt

SEQ ID NO: 1313227 - DNA, 15 bp, Homo sapiens
tatgttcctctggtt

SEQ ID NO: 1313228 - DNA, 15 bp, Homo sapiens
gtatgttcctctggt

SEQ ID NO: 1313229 - DNA, 15 bp, Homo sapiens
ggtatgttcctctgg

SEQ ID NO: 1313230 - DNA, 15 bp, Homo sapiens
aggtatgttcctctg

SEQ ID NO: 1313231 - DNA, 15 bp, Homo sapiens
caggtatgttcctct

SEQ ID NO: 1313232 - DNA, 15 bp, Homo sapiens
tcaggtatgttcctc

SEQ ID NO: 1313233 - DNA, 15 bp, Homo sapiens
ttcaggtatgttcct

SEQ ID NO: 1313234 - DNA, 15 bp, Homo sapiens
attcaggtatgttcc

SEQ ID NO: 1313235 - DNA, 15 bp, Homo sapiens
tattcaggtatgttc

SEQ ID NO: 1313236 - DNA, 15 bp, Homo sapiens
gtattcaggtatgtt

SEQ ID NO: 1313237 - DNA, 15 bp, Homo sapiens
ggtattcaggtatgt

SEQ ID NO: 1313238 - DNA, 15 bp, Homo sapiens
aggtattcaggtatg

SEQ ID NO: 1313239 - DNA, 15 bp, Homo sapiens
caggtattcaggtat

SEQ ID NO: 1313240 - DNA, 15 bp, Homo sapiens
tcaggtattcaggta

SEQ ID NO: 1313241 - DNA, 15 bp, Homo sapiens
ctcaggtattcaggt

SEQ ID NO: 1313242 - DNA, 15 bp, Homo sapiens
tctcaggtattcagg

SEQ ID NO: 1313243 - DNA, 15 bp, Homo sapiens
ttctcaggtattcag

SEQ ID NO: 1313244 - DNA, 15 bp, Homo sapiens
tttctcaggtattca

SEQ ID NO: 1313245 - DNA, 15 bp, Homo sapiens
gtttctcaggtattc

SEQ ID NO: 1313246 - DNA, 15 bp, Homo sapiens
agtttctcaggtatt

SEQ ID NO: 1313247 - DNA, 15 bp, Homo sapiens
aagtttctcaggtat

SEQ ID NO: 1313248 - DNA, 15 bp, Homo sapiens
gaagtttctcaggta

SEQ ID NO: 1313249 - DNA, 15 bp, Homo sapiens
tgaagtttctcaggt

SEQ ID NO: 1313250 - DNA, 15 bp, Homo sapiens
ttgaagtttctcagg

SEQ ID NO: 1313251 - DNA, 15 bp, Homo sapiens
gttgaagtttctcag

SEQ ID NO: 1313252 - DNA, 15 bp, Homo sapiens
tgttgaagtttctca

SEQ ID NO: 1313253 - DNA, 15 bp, Homo sapiens
gtgttgaagtttctc

SEQ ID NO: 1313254 - DNA, 15 bp, Homo sapiens
tgtgttgaagtttct

SEQ ID NO: 1313255 - DNA, 15 bp, Homo sapiens
gtgtgttgaagtttc

SEQ ID NO: 1313256 - DNA, 15 bp, Homo sapiens
tgtgtgttgaagttt

SEQ ID NO: 1313257 - DNA, 15 bp, Homo sapiens
gtgtgtgttgaagtt

SEQ ID NO: 1313258 - DNA, 15 bp, Homo sapiens
tgtgtgtgttgaagt

SEQ ID NO: 1313259 - DNA, 15 bp, Homo sapiens
gtgtgtgtgttgaag

SEQ ID NO: 1313260 - DNA, 15 bp, Homo sapiens
tgtgtgtgtgttgaa

SEQ ID NO: 1313261 - DNA, 15 bp, Homo sapiens
gtgtgtgtgtgttga

SEQ ID NO: 1313262 - DNA, 15 bp, Homo sapiens
gcgtgtgtgtgtgtg

SEQ ID NO: 1313263 - DNA, 15 bp, Homo sapiens
tgcgtgtgtgtgtgt

SEQ ID NO: 1313264 - DNA, 15 bp, Homo sapiens
gtgcgtgtgtgtgtg

SEQ ID NO: 1313265 - DNA, 15 bp, Homo sapiens
tgtgcgtgtgtgtgt

SEQ ID NO: 1313266 - DNA, 15 bp, Homo sapiens
gtgtgcgtgtgtgtg

SEQ ID NO: 1313267 - DNA, 15 bp, Homo sapiens
tgtgtgcgtgtgtgt

SEQ ID NO: 1313268 - DNA, 15 bp, Homo sapiens
gtgtgtgcgtgtgtg

SEQ ID NO: 1313269 - DNA, 15 bp, Homo sapiens
tgtgtgtgtgtgcgt

SEQ ID NO: 1313270 - DNA, 15 bp, Homo sapiens
cgtgtgtgtgtgtgc

SEQ ID NO: 1313271 - DNA, 15 bp, Homo sapiens
cgtgtgcgtgtgtgt

SEQ ID NO: 1313272 - DNA, 15 bp, Homo sapiens
acgtgtgcgtgtgtg

SEQ ID NO: 1313273 - DNA, 15 bp, Homo sapiens
tacgtgtgcgtgtgt

SEQ ID NO: 1313274 - DNA, 15 bp, Homo sapiens
gtacgtgtgcgtgtg

SEQ ID NO: 1313275 - DNA, 15 bp, Homo sapiens
agtacgtgtgcgtgt

SEQ ID NO: 1313276 - DNA, 15 bp, Homo sapiens
aagtacgtgtgcgtg

SEQ ID NO: 1313277 - DNA, 15 bp, Homo sapiens
aaagtacgtgtgcgt

SEQ ID NO: 1313278 - DNA, 15 bp, Homo sapiens
gaaagtacgtgtgcg

SEQ ID NO: 1313279 - DNA, 15 bp, Homo sapiens
ggaaagtacgtgtgc

SEQ ID NO: 1313280 - DNA, 15 bp, Homo sapiens
cggaaagtacgtgtg

SEQ ID NO: 1313281 - DNA, 15 bp, Homo sapiens
tcggaaagtacgtgt

SEQ ID NO: 1313282 - DNA, 15 bp, Homo sapiens
ttcggaaagtacgtg

SEQ ID NO: 1313283 - DNA, 15 bp, Homo sapiens
tttcggaaagtacgt

SEQ ID NO: 1313284 - DNA, 15 bp, Homo sapiens
atttcggaaagtacg

SEQ ID NO: 1313285 - DNA, 15 bp, Homo sapiens
gatttcggaaagtac

SEQ ID NO: 1313286 - DNA, 15 bp, Homo sapiens
agatttcggaaagta

SEQ ID NO: 1313287 - DNA, 15 bp, Homo sapiens
tagatttcggaaagt

SEQ ID NO: 1313288 - DNA, 15 bp, Homo sapiens
atagatttcggaaag

SEQ ID NO: 1313289 - DNA, 15 bp, Homo sapiens
aatagatttcggaaa

SEQ ID NO: 1313290 - DNA, 15 bp, Homo sapiens
gaatagatttcggaa

SEQ ID NO: 1313291 - DNA, 15 bp, Homo sapiens
agaatagatttcgga

SEQ ID NO: 1313292 - DNA, 15 bp, Homo sapiens
cagaatagatttcgg

SEQ ID NO: 1313293 - DNA, 15 bp, Homo sapiens
acagaatagatttcg

SEQ ID NO: 1313294 - DNA, 15 bp, Homo sapiens
cacagaatagatttc

SEQ ID NO: 1313295 - DNA, 15 bp, Homo sapiens
tcacagaatagattt

SEQ ID NO: 1313296 - DNA, 15 bp, Homo sapiens
ctcacagaatagatt

SEQ ID NO: 1313297 - DNA, 15 bp, Homo sapiens
cctcacagaatagat

SEQ ID NO: 1313298 - DNA, 15 bp, Homo sapiens
gcctcacagaataga

SEQ ID NO: 1313299 - DNA, 15 bp, Homo sapiens
agcctcacagaatag

SEQ ID NO: 1313300 - DNA, 15 bp, Homo sapiens
gagcctcacagaata

SEQ ID NO: 1313301 - DNA, 15 bp, Homo sapiens
agagcctcacagaat

SEQ ID NO: 1313302 - DNA, 15 bp, Homo sapiens
aagagcctcacagaa

SEQ ID NO: 1313303 - DNA, 15 bp, Homo sapiens
aaagagcctcacaga

SEQ ID NO: 1313304 - DNA, 15 bp, Homo sapiens
caaagagcctcacag

SEQ ID NO: 1313305 - DNA, 15 bp, Homo sapiens
ccaaagagcctcaca

SEQ ID NO: 1313306 - DNA, 15 bp, Homo sapiens
cccaaagagcctcac

SEQ ID NO: 1313307 - DNA, 15 bp, Homo sapiens
acccaaagagcctca

SEQ ID NO: 1313308 - DNA, 15 bp, Homo sapiens
gacccaaagagcctc

SEQ ID NO: 1313309 - DNA, 15 bp, Homo sapiens
cgacccaaagagcct

SEQ ID NO: 1313310 - DNA, 15 bp, Homo sapiens
acgacccaaagagcc

SEQ ID NO: 1313311 - DNA, 15 bp, Homo sapiens
cacgacccaaagagc

SEQ ID NO: 1313312 - DNA, 15 bp, Homo sapiens
ccacgacccaaagag

SEQ ID NO: 1313313 - DNA, 15 bp, Homo sapiens
accacgacccaaaga

SEQ ID NO: 1313314 - DNA, 15 bp, Homo sapiens
taccacgacccaaag

SEQ ID NO: 1313315 - DNA, 15 bp, Homo sapiens
ttaccacgacccaaa

SEQ ID NO: 1313316 - DNA, 15 bp, Homo sapiens
cttaccacgacccaa

SEQ ID NO: 1313317 - DNA, 15 bp, Homo sapiens
ccttaccacgaccca

SEQ ID NO: 1313318 - DNA, 15 bp, Homo sapiens
tccttaccacgaccc

SEQ ID NO: 1313319 - DNA, 15 bp, Homo sapiens
gtccttaccacgacc

SEQ ID NO: 1313320 - DNA, 15 bp, Homo sapiens
tgtccttaccacgac

SEQ ID NO: 1313321 - DNA, 15 bp, Homo sapiens
ttgtccttaccacga

SEQ ID NO: 1313322 - DNA, 15 bp, Homo sapiens
attgtccttaccacg

SEQ ID NO: 1313323 - DNA, 15 bp, Homo sapiens
aattgtccttaccac

SEQ ID NO: 1313324 - DNA, 15 bp, Homo sapiens
caattgtccttacca

SEQ ID NO: 1313325 - DNA, 15 bp, Homo sapiens
gcaattgtccttacc

SEQ ID NO: 1313326 - DNA, 15 bp, Homo sapiens
agcaattgtccttac

SEQ ID NO: 1313327 - DNA, 15 bp, Homo sapiens
aagcaattgtcctta

SEQ ID NO: 1313328 - DNA, 15 bp, Homo sapiens
aaagcaattgtcctt

SEQ ID NO: 1313329 - DNA, 15 bp, Homo sapiens
caaagcaattgtcct

SEQ ID NO: 1313330 - DNA, 15 bp, Homo sapiens
ccaaagcaattgtcc

SEQ ID NO: 1313331 - DNA, 15 bp, Homo sapiens
tccaaagcaattgtc

SEQ ID NO: 1313332 - DNA, 15 bp, Homo sapiens
ttccaaagcaattgt

SEQ ID NO: 1313333 - DNA, 15 bp, Homo sapiens
gttccaaagcaattg

SEQ ID NO: 1313334 - DNA, 15 bp, Homo sapiens
tgttccaaagcaatt

SEQ ID NO: 1313335 - DNA, 15 bp, Homo sapiens
ttgttccaaagcaat

SEQ ID NO: 1313336 - DNA, 15 bp, Homo sapiens
cttgttccaaagcaa

SEQ ID NO: 1313337 - DNA, 15 bp, Homo sapiens
gcttgttccaaagca

SEQ ID NO: 1313338 - DNA, 15 bp, Homo sapiens
tgcttgttccaaagc

SEQ ID NO: 1313339 - DNA, 15 bp, Homo sapiens
gtgcttgttccaaag

SEQ ID NO: 1313340 - DNA, 15 bp, Homo sapiens
tgtgcttgttccaaa

SEQ ID NO: 1313341 - DNA, 15 bp, Homo sapiens
gtgtgcttgttccaa

SEQ ID NO: 1313342 - DNA, 15 bp, Homo sapiens
agtgtgcttgttcca

SEQ ID NO: 1313343 - DNA, 15 bp, Homo sapiens
tagtgtgcttgttcc

SEQ ID NO: 1313344 - DNA, 15 bp, Homo sapiens
atagtgtgcttgttc

SEQ ID NO: 1313345 - DNA, 15 bp, Homo sapiens
catagtgtgcttgtt

SEQ ID NO: 1313346 - DNA, 15 bp, Homo sapiens
acatagtgtgcttgt

SEQ ID NO: 1313347 - DNA, 15 bp, Homo sapiens
tacatagtgtgcttg

SEQ ID NO: 1313348 - DNA, 15 bp, Homo sapiens
atacatagtgtgctt

SEQ ID NO: 1313349 - DNA, 15 bp, Homo sapiens
aatacatagtgtgct

SEQ ID NO: 1313350 - DNA, 15 bp, Homo sapiens
gaatacatagtgtgc

SEQ ID NO: 1313351 - DNA, 15 bp, Homo sapiens
agaatacatagtgtg

SEQ ID NO: 1313352 - DNA, 15 bp, Homo sapiens
tagaatacatagtgt

SEQ ID NO: 1313353 - DNA, 15 bp, Homo sapiens
ctagaatacatagtg

SEQ ID NO: 1313354 - DNA, 15 bp, Homo sapiens
tctagaatacatagt

SEQ ID NO: 1313355 - DNA, 15 bp, Homo sapiens
atctagaatacatag

SEQ ID NO: 1313356 - DNA, 15 bp, Homo sapiens
tatctagaatacata

SEQ ID NO: 1313357 - DNA, 15 bp, Homo sapiens
ctatctagaatacat

SEQ ID NO: 1313358 - DNA, 15 bp, Homo sapiens
tctatctagaataca

SEQ ID NO: 1313359 - DNA, 15 bp, Homo sapiens
gtctatctagaatac

SEQ ID NO: 1313360 - DNA, 15 bp, Homo sapiens
ggtctatctagaata

SEQ ID NO: 1313361 - DNA, 15 bp, Homo sapiens
tggtctatctagaat

SEQ ID NO: 1313362 - DNA, 15 bp, Homo sapiens
ctggtctatctagaa

SEQ ID NO: 1313363 - DNA, 15 bp, Homo sapiens
actggtctatctaga

SEQ ID NO: 1313364 - DNA, 15 bp, Homo sapiens
cactggtctatctag

SEQ ID NO: 1313365 - DNA, 15 bp, Homo sapiens
ccactggtctatcta

SEQ ID NO: 1313366 - DNA, 15 bp, Homo sapiens
accactggtctatct

SEQ ID NO: 1313367 - DNA, 15 bp, Homo sapiens
aaccactggtctatc

SEQ ID NO: 1313368 - DNA, 15 bp, Homo sapiens
gaaccactggtctat

SEQ ID NO: 1313369 - DNA, 15 bp, Homo sapiens
gtttgagaaccactg

SEQ ID NO: 1313370 - DNA, 15 bp, Homo sapiens
agtttgagaaccact

SEQ ID NO: 1313371 - DNA, 15 bp, Homo sapiens
aagtttgagaaccac

SEQ ID NO: 1313372 - DNA, 15 bp, Homo sapiens
aaagtttgagaacca

SEQ ID NO: 1313373 - DNA, 15 bp, Homo sapiens
caaagtttgagaacc

SEQ ID NO: 1313374 - DNA, 15 bp, Homo sapiens
tcaaagtttgagaac

SEQ ID NO: 1313375 - DNA, 15 bp, Homo sapiens
ctcaaagtttgagaa

SEQ ID NO: 1313376 - DNA, 15 bp, Homo sapiens
actcaaagtttgaga

SEQ ID NO: 1313377 - DNA, 15 bp, Homo sapiens
cactcaaagtttgag

SEQ ID NO: 1313378 - DNA, 15 bp, Homo sapiens
gcactcaaagtttga

SEQ ID NO: 1313379 - DNA, 15 bp, Homo sapiens
tgcactcaaagtttg

SEQ ID NO: 1313380 - DNA, 15 bp, Homo sapiens
gtgcactcaaagttt

SEQ ID NO: 1313381 - DNA, 15 bp, Homo sapiens
ggtgcactcaaagtt

SEQ ID NO: 1313382 - DNA, 15 bp, Homo sapiens
tggtgcactcaaagt

SEQ ID NO: 1313383 - DNA, 15 bp, Homo sapiens
ctggtgcactcaaag

SEQ ID NO: 1313384 - DNA, 15 bp, Homo sapiens
tctggtgcactcaaa

SEQ ID NO: 1313385 - DNA, 15 bp, Homo sapiens
ctctggtgcactcaa

SEQ ID NO: 1313386 - DNA, 15 bp, Homo sapiens
actctggtgcactca

SEQ ID NO: 1313387 - DNA, 15 bp, Homo sapiens
gactctggtgcactc

SEQ ID NO: 1313388 - DNA, 15 bp, Homo sapiens
tgactctggtgcact

SEQ ID NO: 1313389 - DNA, 15 bp, Homo sapiens
gtgactctggtgcac

SEQ ID NO: 1313390 - DNA, 15 bp, Homo sapiens
ggtgactctggtgca

SEQ ID NO: 1313391 - DNA, 15 bp, Homo sapiens
aggtgactctggtgc

SEQ ID NO: 1313392 - DNA, 15 bp, Homo sapiens
taggtgactctggtg

SEQ ID NO: 1313393 - DNA, 15 bp, Homo sapiens
ctaggtgactctggt

SEQ ID NO: 1313394 - DNA, 15 bp, Homo sapiens
tctaggtgactctgg

SEQ ID NO: 1313395 - DNA, 15 bp, Homo sapiens
ctctaggtgactctg

SEQ ID NO: 1313396 - DNA, 15 bp, Homo sapiens
cctctaggtgactct

SEQ ID NO: 1313397 - DNA, 15 bp, Homo sapiens
acctctaggtgactc

SEQ ID NO: 1313398 - DNA, 15 bp, Homo sapiens
gacctctaggtgact

SEQ ID NO: 1313399 - DNA, 15 bp, Homo sapiens
agacctctaggtgac

SEQ ID NO: 1313400 - DNA, 15 bp, Homo sapiens
cagacctctaggtga

SEQ ID NO: 1313401 - DNA, 15 bp, Homo sapiens
ccagacctctaggtg

SEQ ID NO: 1313402 - DNA, 15 bp, Homo sapiens
accagacctctaggt

SEQ ID NO: 1313403 - DNA, 15 bp, Homo sapiens
aaccagacctctagg

SEQ ID NO: 1313404 - DNA, 15 bp, Homo sapiens
taaccagacctctag

SEQ ID NO: 1313405 - DNA, 15 bp, Homo sapiens
ttaaccagacctcta

SEQ ID NO: 1313406 - DNA, 15 bp, Homo sapiens
tttaaccagacctct

SEQ ID NO: 1313407 - DNA, 15 bp, Homo sapiens
atttaaccagacctc

SEQ ID NO: 1313408 - DNA, 15 bp, Homo sapiens
aatttaaccagacct

SEQ ID NO: 1313409 - DNA, 15 bp, Homo sapiens
taatttaaccagacc

SEQ ID NO: 1313410 - DNA, 15 bp, Homo sapiens
gtaatttaaccagac

SEQ ID NO: 1313411 - DNA, 15 bp, Homo sapiens
tgtaatttaaccaga

SEQ ID NO: 1313412 - DNA, 15 bp, Homo sapiens
ctgtaatttaaccag

SEQ ID NO: 1313413 - DNA, 15 bp, Homo sapiens
tctgtaatttaacca

SEQ ID NO: 1313414 - DNA, 15 bp, Homo sapiens
atctgtaatttaacc

SEQ ID NO: 1313415 - DNA, 15 bp, Homo sapiens
aatctgtaatttaac

SEQ ID NO: 1313416 - DNA, 15 bp, Homo sapiens
aaatctgtaatttaa

SEQ ID NO: 1313417 - DNA, 15 bp, Homo sapiens
caaatctgtaattta

SEQ ID NO: 1313418 - DNA, 15 bp, Homo sapiens
ccaaatctgtaattt

SEQ ID NO: 1313419 - DNA, 15 bp, Homo sapiens
cccaaatctgtaatt

SEQ ID NO: 1313420 - DNA, 15 bp, Homo sapiens
ccccaaatctgtaat

SEQ ID NO: 1313421 - DNA, 15 bp, Homo sapiens
accccaaatctgtaa

SEQ ID NO: 1313422 - DNA, 15 bp, Homo sapiens
caccccaaatctgta

SEQ ID NO: 1313423 - DNA, 15 bp, Homo sapiens
acaccccaaatctgt

SEQ ID NO: 1313424 - DNA, 15 bp, Homo sapiens
aacaccccaaatctg

SEQ ID NO: 1313425 - DNA, 15 bp, Homo sapiens
gaacaccccaaatct

SEQ ID NO: 1313426 - DNA, 15 bp, Homo sapiens
ggaacaccccaaatc

SEQ ID NO: 1313427 - DNA, 15 bp, Homo sapiens
tggaacaccccaaat

SEQ ID NO: 1313428 - DNA, 15 bp, Homo sapiens
atggaacaccccaaa

SEQ ID NO: 1313429 - DNA, 15 bp, Homo sapiens
gatggaacaccccaa

SEQ ID NO: 1313430 - DNA, 15 bp, Homo sapiens
ggatggaacacccca

SEQ ID NO: 1313431 - DNA, 15 bp, Homo sapiens
gggatggaacacccc

SEQ ID NO: 1313432 - DNA, 15 bp, Homo sapiens
ggggatggaacaccc

SEQ ID NO: 1313433 - DNA, 15 bp, Homo sapiens
tggggatggaacacc

SEQ ID NO: 1313434 - DNA, 15 bp, Homo sapiens
ctggggatggaacac

SEQ ID NO: 1313435 - DNA, 15 bp, Homo sapiens
tctggggatggaaca

SEQ ID NO: 1313436 - DNA, 15 bp, Homo sapiens
ctctggggatggaac

SEQ ID NO: 1313437 - DNA, 15 bp, Homo sapiens
actctggggatggaa

SEQ ID NO: 1313438 - DNA, 15 bp, Homo sapiens
aactctggggatgga

SEQ ID NO: 1313439 - DNA, 15 bp, Homo sapiens
aaactctggggatgg

SEQ ID NO: 1313440 - DNA, 15 bp, Homo sapiens
gaaactctggggatg

SEQ ID NO: 1313441 - DNA, 15 bp, Homo sapiens
tgaaactctggggat

SEQ ID NO: 1313442 - DNA, 15 bp, Homo sapiens
ctgaaactctgggga

SEQ ID NO: 1313443 - DNA, 15 bp, Homo sapiens
tctgaaactctgggg

SEQ ID NO: 1313444 - DNA, 15 bp, Homo sapiens
atctgaaactctggg

SEQ ID NO: 1313445 - DNA, 15 bp, Homo sapiens
aatctgaaactctgg

SEQ ID NO: 1313446 - DNA, 15 bp, Homo sapiens
gaatctgaaactctg

SEQ ID NO: 1313447 - DNA, 15 bp, Homo sapiens
tgaatctgaaactct

SEQ ID NO: 1313448 - DNA, 15 bp, Homo sapiens
ctgaatctgaaactc

SEQ ID NO: 1313449 - DNA, 15 bp, Homo sapiens
actgaatctgaaact

SEQ ID NO: 1313450 - DNA, 15 bp, Homo sapiens
tactgaatctgaaac

SEQ ID NO: 1313451 - DNA, 15 bp, Homo sapiens
gtactgaatctgaaa

SEQ ID NO: 1313452 - DNA, 15 bp, Homo sapiens
tgtactgaatctgaa

SEQ ID NO: 1313453 - DNA, 15 bp, Homo sapiens
gtgtactgaatctga

SEQ ID NO: 1313454 - DNA, 15 bp, Homo sapiens
ggtgtactgaatctg

SEQ ID NO: 1313455 - DNA, 15 bp, Homo sapiens
aggtgtactgaatct

SEQ ID NO: 1313456 - DNA, 15 bp, Homo sapiens
caggtgtactgaatc

SEQ ID NO: 1313457 - DNA, 15 bp, Homo sapiens
ccaggtgtactgaat

SEQ ID NO: 1313458 - DNA, 15 bp, Homo sapiens
cccaggtgtactgaa

SEQ ID NO: 1313459 - DNA, 15 bp, Homo sapiens
tcccaggtgtactga

SEQ ID NO: 1313460 - DNA, 15 bp, Homo sapiens
atcccaggtgtactg

SEQ ID NO: 1313461 - DNA, 15 bp, Homo sapiens
catcccaggtgtact

SEQ ID NO: 1313462 - DNA, 15 bp, Homo sapiens
ccatcccaggtgtac

SEQ ID NO: 1313463 - DNA, 15 bp, Homo sapiens
cccatcccaggtgta

SEQ ID NO: 1313464 - DNA, 15 bp, Homo sapiens
ccccatcccaggtgt

SEQ ID NO: 1313465 - DNA, 15 bp, Homo sapiens
gccccatcccaggtg

SEQ ID NO: 1313466 - DNA, 15 bp, Homo sapiens
ggccccatcccaggt

SEQ ID NO: 1313467 - DNA, 15 bp, Homo sapiens
aggccccatcccagg

SEQ ID NO: 1313468 - DNA, 15 bp, Homo sapiens
caggccccatcccag

SEQ ID NO: 1313469 - DNA, 15 bp, Homo sapiens
tcaggccccatccca

SEQ ID NO: 1313470 - DNA, 15 bp, Homo sapiens
ctcaggccccatccc

SEQ ID NO: 1313471 - DNA, 15 bp, Homo sapiens
cctcaggccccatcc

SEQ ID NO: 1313472 - DNA, 15 bp, Homo sapiens
tcctcaggccccatc

SEQ ID NO: 1313473 - DNA, 15 bp, Homo sapiens
atcctcaggccccat

SEQ ID NO: 1313474 - DNA, 15 bp, Homo sapiens
gatcctcaggcccca

SEQ ID NO: 1313475 - DNA, 15 bp, Homo sapiens
agatcctcaggcccc

SEQ ID NO: 1313476 - DNA, 15 bp, Homo sapiens
cagatcctcaggccc

SEQ ID NO: 1313477 - DNA, 15 bp, Homo sapiens
gcagatcctcaggcc

SEQ ID NO: 1313478 - DNA, 15 bp, Homo sapiens
tgcagatcctcaggc

SEQ ID NO: 1313479 - DNA, 15 bp, Homo sapiens
atgcagatcctcagg

SEQ ID NO: 1313480 - DNA, 15 bp, Homo sapiens
catgcagatcctcag

SEQ ID NO: 1313481 - DNA, 15 bp, Homo sapiens
ccatgcagatcctca

SEQ ID NO: 1313482 - DNA, 15 bp, Homo sapiens
gccatgcagatcctc

SEQ ID NO: 1313483 - DNA, 15 bp, Homo sapiens
agccatgcagatcct

SEQ ID NO: 1313484 - DNA, 15 bp, Homo sapiens
tagccatgcagatcc

SEQ ID NO: 1313485 - DNA, 15 bp, Homo sapiens
ttagccatgcagatc

SEQ ID NO: 1313486 - DNA, 15 bp, Homo sapiens
gttagccatgcagat

SEQ ID NO: 1313487 - DNA, 15 bp, Homo sapiens
tgttagccatgcaga

SEQ ID NO: 1313488 - DNA, 15 bp, Homo sapiens
gtgttagccatgcag

SEQ ID NO: 1313489 - DNA, 15 bp, Homo sapiens
tgtgttagccatgca

SEQ ID NO: 1313490 - DNA, 15 bp, Homo sapiens
atgtgttagccatgc

SEQ ID NO: 1313491 - DNA, 15 bp, Homo sapiens
aatgtgttagccatg

SEQ ID NO: 1313492 - DNA, 15 bp, Homo sapiens
gaatgtgttagccat

SEQ ID NO: 1313493 - DNA, 15 bp, Homo sapiens
ggaatgtgttagcca

SEQ ID NO: 1313494 - DNA, 15 bp, Homo sapiens
gggaatgtgttagcc

SEQ ID NO: 1313495 - DNA, 15 bp, Homo sapiens
tgggaatgtgttagc

SEQ ID NO: 1313496 - DNA, 15 bp, Homo sapiens
ttgggaatgtgttag

SEQ ID NO: 1313497 - DNA, 15 bp, Homo sapiens
cttgggaatgtgtta

SEQ ID NO: 1313498 - DNA, 15 bp, Homo sapiens
acttgggaatgtgtt

SEQ ID NO: 1313499 - DNA, 15 bp, Homo sapiens
cacttgggaatgtgt

SEQ ID NO: 1313500 - DNA, 15 bp, Homo sapiens
tcacttgggaatgtg

SEQ ID NO: 1313501 - DNA, 15 bp, Homo sapiens
atcacttgggaatgt

SEQ ID NO: 1313502 - DNA, 15 bp, Homo sapiens
catcacttgggaatg

SEQ ID NO: 1313503 - DNA, 15 bp, Homo sapiens
gcatcacttgggaat

SEQ ID NO: 1313504 - DNA, 15 bp, Homo sapiens
agcatcacttgggaa

SEQ ID NO: 1313505 - DNA, 15 bp, Homo sapiens
cagcatcacttggga

SEQ ID NO: 1313506 - DNA, 15 bp, Homo sapiens
gcagcatcacttggg

SEQ ID NO: 1313507 - DNA, 15 bp, Homo sapiens
agcagcatcacttgg

SEQ ID NO: 1313508 - DNA, 15 bp, Homo sapiens
cagcagcatcacttg

SEQ ID NO: 1313509 - DNA, 15 bp, Homo sapiens
gcagcagcatcactt

SEQ ID NO: 1313510 - DNA, 15 bp, Homo sapiens
agcagcagcatcact

SEQ ID NO: 1313511 - DNA, 15 bp, Homo sapiens
cagcagcagcatcac

SEQ ID NO: 1313512 - DNA, 15 bp, Homo sapiens
gcagcagcagcatca

SEQ ID NO: 1313513 - DNA, 15 bp, Homo sapiens
agcagcagcagcatc

SEQ ID NO: 1313514 - DNA, 15 bp, Homo sapiens
cagcagcagcagcat

SEQ ID NO: 1313515 - DNA, 15 bp, Homo sapiens
atcagcagcagcagc

SEQ ID NO: 1313516 - DNA, 15 bp, Homo sapiens
gatcagcagcagcag

SEQ ID NO: 1313517 - DNA, 15 bp, Homo sapiens
agatcagcagcagca

SEQ ID NO: 1313518 - DNA, 15 bp, Homo sapiens
cagatcagcagcagc

SEQ ID NO: 1313519 - DNA, 15 bp, Homo sapiens
ccagatcagcagcag

SEQ ID NO: 1313520 - DNA, 15 bp, Homo sapiens
cccagatcagcagca

SEQ ID NO: 1313521 - DNA, 15 bp, Homo sapiens
ccccagatcagcagc

SEQ ID NO: 1313522 - DNA, 15 bp, Homo sapiens
cccccagatcagcag

SEQ ID NO: 1313523 - DNA, 15 bp, Homo sapiens
gcccccagatcagca

SEQ ID NO: 1313524 - DNA, 15 bp, Homo sapiens
ggcccccagatcagc

SEQ ID NO: 1313525 - DNA, 15 bp, Homo sapiens
tggcccccagatcag

SEQ ID NO: 1313526 - DNA, 15 bp, Homo sapiens
gtggcccccagatca

SEQ ID NO: 1313527 - DNA, 15 bp, Homo sapiens
tgtggcccccagatc

SEQ ID NO: 1313528 - DNA, 15 bp, Homo sapiens
gtgtggcccccagat

SEQ ID NO: 1313529 - DNA, 15 bp, Homo sapiens
agtgtggcccccaga

SEQ ID NO: 1313530 - DNA, 15 bp, Homo sapiens
aagtgtggcccccag

SEQ ID NO: 1313531 - DNA, 15 bp, Homo sapiens
aaagtgtggccccca

SEQ ID NO: 1313532 - DNA, 15 bp, Homo sapiens
caaagtgtggccccc

SEQ ID NO: 1313533 - DNA, 15 bp, Homo sapiens
atctcaaagtgtggc

SEQ ID NO: 1313534 - DNA, 15 bp, Homo sapiens
gatctcaaagtgtgg

SEQ ID NO: 1313535 - DNA, 15 bp, Homo sapiens
agatctcaaagtgtg

SEQ ID NO: 1313536 - DNA, 15 bp, Homo sapiens
cagatctcaaagtgt

SEQ ID NO: 1313537 - DNA, 15 bp, Homo sapiens
gcagatctcaaagtg

SEQ ID NO: 1313538 - DNA, 15 bp, Homo sapiens
agcagatctcaaagt

SEQ ID NO: 1313539 - DNA, 15 bp, Homo sapiens
cagcagatctcaaag

SEQ ID NO: 1313540 - DNA, 15 bp, Homo sapiens
ccagcagatctcaaa

SEQ ID NO: 1313541 - DNA, 15 bp, Homo sapiens
accagcagatctcaa

SEQ ID NO: 1313542 - DNA, 15 bp, Homo sapiens
gaccagcagatctca

SEQ ID NO: 1313543 - DNA, 15 bp, Homo sapiens
ggaccagcagatctc

SEQ ID NO: 1313544 - DNA, 15 bp, Homo sapiens
tggaccagcagatct

SEQ ID NO: 1313545 - DNA, 15 bp, Homo sapiens
ctggaccagcagatc

SEQ ID NO: 1313546 - DNA, 15 bp, Homo sapiens
gctggaccagcagat

SEQ ID NO: 1313547 - DNA, 15 bp, Homo sapiens
ggctggaccagcaga

SEQ ID NO: 1313548 - DNA, 15 bp, Homo sapiens
gggctggaccagcag

SEQ ID NO: 1313549 - DNA, 15 bp, Homo sapiens
tgggctggaccagca

SEQ ID NO: 1313550 - DNA, 15 bp, Homo sapiens
gtgggctggaccagc

SEQ ID NO: 1313551 - DNA, 15 bp, Homo sapiens
cgtgggctggaccag

SEQ ID NO: 1313552 - DNA, 15 bp, Homo sapiens
ccgtgggctggacca

SEQ ID NO: 1313553 - DNA, 15 bp, Homo sapiens
accgtgggctggacc

SEQ ID NO: 1313554 - DNA, 15 bp, Homo sapiens
caccgtgggctggac

SEQ ID NO: 1313555 - DNA, 15 bp, Homo sapiens
tcaccgtgggctgga

SEQ ID NO: 1313556 - DNA, 15 bp, Homo sapiens
ctcaccgtgggctgg

SEQ ID NO: 1313557 - DNA, 15 bp, Homo sapiens
cctcaccgtgggctg

SEQ ID NO: 1313558 - DNA, 15 bp, Homo sapiens
gcctcaccgtgggct

SEQ ID NO: 1313559 - DNA, 15 bp, Homo sapiens
agcctcaccgtgggc

SEQ ID NO: 1313560 - DNA, 15 bp, Homo sapiens
cagcctcaccgtggg

SEQ ID NO: 1313561 - DNA, 15 bp, Homo sapiens
tcagcctcaccgtgg

SEQ ID NO: 1313562 - DNA, 15 bp, Homo sapiens
ttcagcctcaccgtg

SEQ ID NO: 1313563 - DNA, 15 bp, Homo sapiens
gttcagcctcaccgt

SEQ ID NO: 1313564 - DNA, 15 bp, Homo sapiens
agttcagcctcaccg

SEQ ID NO: 1313565 - DNA, 15 bp, Homo sapiens
aagttcagcctcacc

SEQ ID NO: 1313566 - DNA, 15 bp, Homo sapiens
caagttcagcctcac

SEQ ID NO: 1313567 - DNA, 15 bp, Homo sapiens
tcaagttcagcctca

SEQ ID NO: 1313568 - DNA, 15 bp, Homo sapiens
ttcaagttcagcctc

SEQ ID NO: 1313569 - DNA, 15 bp, Homo sapiens
attcaagttcagcct

SEQ ID NO: 1313570 - DNA, 15 bp, Homo sapiens
aattcaagttcagcc

SEQ ID NO: 1313571 - DNA, 15 bp, Homo sapiens
gaattcaagttcagc

SEQ ID NO: 1313572 - DNA, 15 bp, Homo sapiens
agaattcaagttcag

SEQ ID NO: 1313573 - DNA, 15 bp, Homo sapiens
tagaattcaagttca

SEQ ID NO: 1313574 - DNA, 15 bp, Homo sapiens
ctagaattcaagttc

SEQ ID NO: 1313575 - DNA, 15 bp, Homo sapiens
actagaattcaagtt

SEQ ID NO: 1313576 - DNA, 15 bp, Homo sapiens
aactagaattcaagt

SEQ ID NO: 1313577 - DNA, 15 bp, Homo sapiens
caactagaattcaag

SEQ ID NO: 1313578 - DNA, 15 bp, Homo sapiens
acaactagaattcaa

SEQ ID NO: 1313579 - DNA, 15 bp, Homo sapiens
tacaactagaattca

SEQ ID NO: 1313580 - DNA, 15 bp, Homo sapiens
ctacaactagaattc

SEQ ID NO: 1313581 - DNA, 15 bp, Homo sapiens
gctacaactagaatt

SEQ ID NO: 1313582 - DNA, 15 bp, Homo sapiens
agctacaactagaat

SEQ ID NO: 1313583 - DNA, 15 bp, Homo sapiens
cagctacaactagaa

SEQ ID NO: 1313584 - DNA, 15 bp, Homo sapiens
gcagctacaactaga

SEQ ID NO: 1313585 - DNA, 15 bp, Homo sapiens
agcagctacaactag

SEQ ID NO: 1313586 - DNA, 15 bp, Homo sapiens
tagcagctacaacta

SEQ ID NO: 1313587 - DNA, 15 bp, Homo sapiens
atagcagctacaact

SEQ ID NO: 1313588 - DNA, 15 bp, Homo sapiens
catagcagctacaac

SEQ ID NO: 1313589 - DNA, 15 bp, Homo sapiens
gcatagcagctacaa

SEQ ID NO: 1313590 - DNA, 15 bp, Homo sapiens
tgcatagcagctaca

SEQ ID NO: 1313591 - DNA, 15 bp, Homo sapiens
ttgcatagcagctac

SEQ ID NO: 1313592 - DNA, 15 bp, Homo sapiens
cttgcatagcagcta

SEQ ID NO: 1313593 - DNA, 15 bp, Homo sapiens
acttgcatagcagct

SEQ ID NO: 1313594 - DNA, 15 bp, Homo sapiens
aacttgcatagcagc

SEQ ID NO: 1313595 - DNA, 15 bp, Homo sapiens
aaacttgcatagcag

SEQ ID NO: 1313596 - DNA, 15 bp, Homo sapiens
gaaacttgcatagca

SEQ ID NO: 1313597 - DNA, 15 bp, Homo sapiens
ggaaacttgcatagc

SEQ ID NO: 1313598 - DNA, 15 bp, Homo sapiens
tggaaacttgcatag

SEQ ID NO: 1313599 - DNA, 15 bp, Homo sapiens
ctggaaacttgcata

SEQ ID NO: 1313600 - DNA, 15 bp, Homo sapiens
cctggaaacttgcat

SEQ ID NO: 1313601 - DNA, 15 bp, Homo sapiens
tcctggaaacttgca

SEQ ID NO: 1313602 - DNA, 15 bp, Homo sapiens
atcctggaaacttgc

SEQ ID NO: 1313603 - DNA, 15 bp, Homo sapiens
aatcctggaaacttg

SEQ ID NO: 1313604 - DNA, 15 bp, Homo sapiens
gaatcctggaaactt

SEQ ID NO: 1313605 - DNA, 15 bp, Homo sapiens
agaatcctggaaact

SEQ ID NO: 1313606 - DNA, 15 bp, Homo sapiens
cagaatcctggaaac

SEQ ID NO: 1313607 - DNA, 15 bp, Homo sapiens
ccagaatcctggaaa

SEQ ID NO: 1313608 - DNA, 15 bp, Homo sapiens
accagaatcctggaa

SEQ ID NO: 1313609 - DNA, 15 bp, Homo sapiens
taccagaatcctgga

SEQ ID NO: 1313610 - DNA, 15 bp, Homo sapiens
ataccagaatcctgg

SEQ ID NO: 1313611 - DNA, 15 bp, Homo sapiens
aataccagaatcctg

SEQ ID NO: 1313612 - DNA, 15 bp, Homo sapiens
taataccagaatcct

SEQ ID NO: 1313613 - DNA, 15 bp, Homo sapiens
ctaataccagaatcc

SEQ ID NO: 1313614 - DNA, 15 bp, Homo sapiens
tctaataccagaatc

SEQ ID NO: 1313615 - DNA, 15 bp, Homo sapiens
ctctaataccagaat

SEQ ID NO: 1313616 - DNA, 15 bp, Homo sapiens
actctaataccagaa

SEQ ID NO: 1313617 - DNA, 15 bp, Homo sapiens
tactctaataccaga

SEQ ID NO: 1313618 - DNA, 15 bp, Homo sapiens
ttactctaataccag

SEQ ID NO: 1313619 - DNA, 15 bp, Homo sapiens
tttactctaatacca

SEQ ID NO: 1313620 - DNA, 15 bp, Homo sapiens
gtttactctaatacc

SEQ ID NO: 1313621 - DNA, 15 bp, Homo sapiens
ggtttactctaatac

SEQ ID NO: 1313622 - DNA, 15 bp, Homo sapiens
aggtttactctaata

SEQ ID NO: 1313623 - DNA, 15 bp, Homo sapiens
aaggtttactctaat

SEQ ID NO: 1313624 - DNA, 15 bp, Homo sapiens
caaggtttactctaa

SEQ ID NO: 1313625 - DNA, 15 bp, Homo sapiens
gcaaggtttactcta

SEQ ID NO: 1313626 - DNA, 15 bp, Homo sapiens
agcaaggtttactct

SEQ ID NO: 1313627 - DNA, 15 bp, Homo sapiens
tagcaaggtttactc

SEQ ID NO: 1313628 - DNA, 15 bp, Homo sapiens
atagcaaggtttact

SEQ ID NO: 1313629 - DNA, 15 bp, Homo sapiens
aatagcaaggtttac

SEQ ID NO: 1313630 - DNA, 15 bp, Homo sapiens
aaatagcaaggttta

SEQ ID NO: 1313631 - DNA, 15 bp, Homo sapiens
aaaatagcaaggttt

SEQ ID NO: 1313632 - DNA, 15 bp, Homo sapiens
caaaatagcaaggtt

SEQ ID NO: 1313633 - DNA, 15 bp, Homo sapiens
acaaaatagcaaggt

SEQ ID NO: 1313634 - DNA, 15 bp, Homo sapiens
cacaaaatagcaagg

SEQ ID NO: 1313635 - DNA, 15 bp, Homo sapiens
gcacaaaatagcaag

SEQ ID NO: 1313636 - DNA, 15 bp, Homo sapiens
agcacaaaatagcaa

SEQ ID NO: 1313637 - DNA, 15 bp, Homo sapiens
gagcacaaaatagca

SEQ ID NO: 1313638 - DNA, 15 bp, Homo sapiens
ggagcacaaaatagc

SEQ ID NO: 1313639 - DNA, 15 bp, Homo sapiens
aggagcacaaaatag

SEQ ID NO: 1313640 - DNA, 15 bp, Homo sapiens
taggagcacaaaata

SEQ ID NO: 1313641 - DNA, 15 bp, Homo sapiens
ttaggagcacaaaat

SEQ ID NO: 1313642 - DNA, 15 bp, Homo sapiens
tttaggagcacaaaa

SEQ ID NO: 1313643 - DNA, 15 bp, Homo sapiens
atttaggagcacaaa

SEQ ID NO: 1313644 - DNA, 15 bp, Homo sapiens
tatttaggagcacaa

SEQ ID NO: 1313645 - DNA, 15 bp, Homo sapiens
atatttaggagcaca

SEQ ID NO: 1313646 - DNA, 15 bp, Homo sapiens
gatatttaggagcac

SEQ ID NO: 1313647 - DNA, 15 bp, Homo sapiens
tgatatttaggagca

SEQ ID NO: 1313648 - DNA, 15 bp, Homo sapiens
ctgatatttaggagc

SEQ ID NO: 1313649 - DNA, 15 bp, Homo sapiens
actgatatttaggag

SEQ ID NO: 1313650 - DNA, 15 bp, Homo sapiens
tactgatatttagga

SEQ ID NO: 1313651 - DNA, 15 bp, Homo sapiens
atactgatatttagg

SEQ ID NO: 1313652 - DNA, 15 bp, Homo sapiens
aatactgatatttag

SEQ ID NO: 1313653 - DNA, 15 bp, Homo sapiens
gaatactgatattta

SEQ ID NO: 1313654 - DNA, 15 bp, Homo sapiens
agaatactgatattt

SEQ ID NO: 1313655 - DNA, 15 bp, Homo sapiens
aagaatactgatatt

SEQ ID NO: 1313656 - DNA, 15 bp, Homo sapiens
taagaatactgatat

SEQ ID NO: 1313657 - DNA, 15 bp, Homo sapiens
ataagaatactgata

SEQ ID NO: 1313658 - DNA, 15 bp, Homo sapiens
aataagaatactgat

SEQ ID NO: 1313659 - DNA, 15 bp, Homo sapiens
taataagaatactga

SEQ ID NO: 1313660 - DNA, 15 bp, Homo sapiens
ttaataagaatactg

SEQ ID NO: 1313661 - DNA, 15 bp, Homo sapiens
attaataagaatact

SEQ ID NO: 1313662 - DNA, 15 bp, Homo sapiens
cattaataagaatac

SEQ ID NO: 1313663 - DNA, 15 bp, Homo sapiens
acattaataagaata

SEQ ID NO: 1313664 - DNA, 15 bp, Homo sapiens
tacattaataagaat

SEQ ID NO: 1313665 - DNA, 15 bp, Homo sapiens
ttacattaataagaa

SEQ ID NO: 1313666 - DNA, 15 bp, Homo sapiens
attacattaataaga

SEQ ID NO: 1313667 - DNA, 15 bp, Homo sapiens
gattacattaataag

SEQ ID NO: 1313668 - DNA, 15 bp, Homo sapiens
ggattacattaataa

SEQ ID NO: 1313669 - DNA, 15 bp, Homo sapiens
aggattacattaata

SEQ ID NO: 1313670 - DNA, 15 bp, Homo sapiens
aaggattacattaat

SEQ ID NO: 1313671 - DNA, 15 bp, Homo sapiens
aaaggattacattaa

SEQ ID NO: 1313672 - DNA, 15 bp, Homo sapiens
taaaggattacatta

SEQ ID NO: 1313673 - DNA, 15 bp, Homo sapiens
ataaaggattacatt

SEQ ID NO: 1313674 - DNA, 15 bp, Homo sapiens
aataaaggattacat

SEQ ID NO: 1313675 - DNA, 15 bp, Homo sapiens
aaataaaggattaca

SEQ ID NO: 1313676 - DNA, 15 bp, Homo sapiens
gaaataaaggattac

SEQ ID NO: 1313677 - DNA, 15 bp, Homo sapiens
tgaaataaaggatta

SEQ ID NO: 1313678 - DNA, 15 bp, Homo sapiens
atgaaataaaggatt

SEQ ID NO: 1313679 - DNA, 15 bp, Homo sapiens
tatgaaataaaggat

SEQ ID NO: 1313680 - DNA, 15 bp, Homo sapiens
atatgaaataaagga

SEQ ID NO: 1313681 - DNA, 15 bp, Homo sapiens
catatgaaataaagg

SEQ ID NO: 1313682 - DNA, 15 bp, Homo sapiens
acatatgaaataaag

SEQ ID NO: 1313683 - DNA, 15 bp, Homo sapiens
aacatatgaaataaa

SEQ ID NO: 1313684 - DNA, 15 bp, Homo sapiens
aaacatatgaaataa

SEQ ID NO: 1313685 - DNA, 15 bp, Homo sapiens
aaaacatatgaaata

SEQ ID NO: 1313686 - DNA, 15 bp, Homo sapiens
aaaaacatatgaaat

SEQ ID NO: 1313687 - DNA, 15 bp, Homo sapiens
caaaaacatatgaaa

SEQ ID NO: 1313688 - DNA, 15 bp, Homo sapiens
tcaaaaacatatgaa

SEQ ID NO: 1313689 - DNA, 15 bp, Homo sapiens
ctcaaaaacatatga

SEQ ID NO: 1313690 - DNA, 15 bp, Homo sapiens
tctcaaaaacatatg

SEQ ID NO: 1313691 - DNA, 15 bp, Homo sapiens
atctcaaaaacatat

SEQ ID NO: 1313692 - DNA, 15 bp, Homo sapiens
aatctcaaaaacata

SEQ ID NO: 1313693 - DNA, 15 bp, Homo sapiens
taatctcaaaaacat

SEQ ID NO: 1313694 - DNA, 15 bp, Homo sapiens
ttaatctcaaaaaca

SEQ ID NO: 1313695 - DNA, 15 bp, Homo sapiens
tttaatctcaaaaac

SEQ ID NO: 1313696 - DNA, 15 bp, Homo sapiens
ttttaatctcaaaaa

SEQ ID NO: 1313697 - DNA, 15 bp, Homo sapiens
attttaatctcaaaa

SEQ ID NO: 1313698 - DNA, 15 bp, Homo sapiens
gattttaatctcaaa

SEQ ID NO: 1313699 - DNA, 15 bp, Homo sapiens
agattttaatctcaa

SEQ ID NO: 1313700 - DNA, 15 bp, Homo sapiens
cagattttaatctca

SEQ ID NO: 1313701 - DNA, 15 bp, Homo sapiens
tcagattttaatctc

SEQ ID NO: 1313702 - DNA, 15 bp, Homo sapiens
ctcagattttaatct

SEQ ID NO: 1313703 - DNA, 15 bp, Homo sapiens
actcagattttaatc

SEQ ID NO: 1313704 - DNA, 15 bp, Homo sapiens
gactcagattttaat

SEQ ID NO: 1313705 - DNA, 15 bp, Homo sapiens
aatgactcagatttt

SEQ ID NO: 1313706 - DNA, 15 bp, Homo sapiens
aaatgactcagattt

SEQ ID NO: 1313707 - DNA, 15 bp, Homo sapiens
taaatgactcagatt

SEQ ID NO: 1313708 - DNA, 15 bp, Homo sapiens
gtaaatgactcagat

SEQ ID NO: 1313709 - DNA, 15 bp, Homo sapiens
tgtaaatgactcaga

SEQ ID NO: 1313710 - DNA, 15 bp, Homo sapiens
atgtaaatgactcag

SEQ ID NO: 1313711 - DNA, 15 bp, Homo sapiens
gatgtaaatgactca

SEQ ID NO: 1313712 - DNA, 15 bp, Homo sapiens
agatgtaaatgactc

SEQ ID NO: 1313713 - DNA, 15 bp, Homo sapiens
aagatgtaaatgact

SEQ ID NO: 1313714 - DNA, 15 bp, Homo sapiens
caagatgtaaatgac

SEQ ID NO: 1313715 - DNA, 15 bp, Homo sapiens
tcaagatgtaaatga

SEQ ID NO: 1313716 - DNA, 15 bp, Homo sapiens
ctcaagatgtaaatg

SEQ ID NO: 1313717 - DNA, 15 bp, Homo sapiens
tctcaagatgtaaat

SEQ ID NO: 1313718 - DNA, 15 bp, Homo sapiens
atctcaagatgtaaa

SEQ ID NO: 1313719 - DNA, 15 bp, Homo sapiens
tatctcaagatgtaa

SEQ ID NO: 1313720 - DNA, 15 bp, Homo sapiens
atatctcaagatgta

SEQ ID NO: 1313721 - DNA, 15 bp, Homo sapiens
tatatctcaagatgt

SEQ ID NO: 1313722 - DNA, 15 bp, Homo sapiens
gtatatctcaagatg

SEQ ID NO: 1313723 - DNA, 15 bp, Homo sapiens
agtatatctcaagat

SEQ ID NO: 1313724 - DNA, 15 bp, Homo sapiens
gagtatatctcaaga

SEQ ID NO: 1313725 - DNA, 15 bp, Homo sapiens
tgagtatatctcaag

SEQ ID NO: 1313726 - DNA, 15 bp, Homo sapiens
atgagtatatctcaa

SEQ ID NO: 1313727 - DNA, 15 bp, Homo sapiens
gatgagtatatctca

SEQ ID NO: 1313728 - DNA, 15 bp, Homo sapiens
ggatgagtatatctc

SEQ ID NO: 1313729 - DNA, 15 bp, Homo sapiens
aggatgagtatatct

SEQ ID NO: 1313730 - DNA, 15 bp, Homo sapiens
taggatgagtatatc

SEQ ID NO: 1313731 - DNA, 15 bp, Homo sapiens
ataggatgagtatat

SEQ ID NO: 1313732 - DNA, 15 bp, Homo sapiens
cataggatgagtata

SEQ ID NO: 1313733 - DNA, 15 bp, Homo sapiens
tcataggatgagtat

SEQ ID NO: 1313734 - DNA, 15 bp, Homo sapiens
atcataggatgagta

SEQ ID NO: 1313735 - DNA, 15 bp, Homo sapiens
tatcataggatgagt

SEQ ID NO: 1313736 - DNA, 15 bp, Homo sapiens
atatcataggatgag

SEQ ID NO: 1313737 - DNA, 15 bp, Homo sapiens
aatatcataggatga

SEQ ID NO: 1313738 - DNA, 15 bp, Homo sapiens
gaatatcataggatg

SEQ ID NO: 1313739 - DNA, 15 bp, Homo sapiens
ggaatatcataggat

SEQ ID NO: 1313740 - DNA, 15 bp, Homo sapiens
tggaatatcatagga

SEQ ID NO: 1313741 - DNA, 15 bp, Homo sapiens
atggaatatcatagg

SEQ ID NO: 1313742 - DNA, 15 bp, Homo sapiens
tatggaatatcatag

SEQ ID NO: 1313743 - DNA, 15 bp, Homo sapiens
atatggaatatcata

SEQ ID NO: 1313744 - DNA, 15 bp, Homo sapiens
aatatggaatatcat

SEQ ID NO: 1313745 - DNA, 15 bp, Homo sapiens
taatatggaatatca

SEQ ID NO: 1313746 - DNA, 15 bp, Homo sapiens
gtaatatggaatatc

SEQ ID NO: 1313747 - DNA, 15 bp, Homo sapiens
tgtaatatggaatat

SEQ ID NO: 1313748 - DNA, 15 bp, Homo sapiens
ttgtaatatggaata

SEQ ID NO: 1313749 - DNA, 15 bp, Homo sapiens
attgtaatatggaat

SEQ ID NO: 1313750 - DNA, 15 bp, Homo sapiens
aattgtaatatggaa

SEQ ID NO: 1313751 - DNA, 15 bp, Homo sapiens
aaattgtaatatgga

SEQ ID NO: 1313752 - DNA, 15 bp, Homo sapiens
gaaattgtaatatgg

SEQ ID NO: 1313753 - DNA, 15 bp, Homo sapiens
tgaaattgtaatatg

SEQ ID NO: 1313754 - DNA, 15 bp, Homo sapiens
ttgaaattgtaatat

SEQ ID NO: 1313755 - DNA, 15 bp, Homo sapiens
gttgaaattgtaata

SEQ ID NO: 1313756 - DNA, 15 bp, Homo sapiens
agttgaaattgtaat

SEQ ID NO: 1313757 - DNA, 15 bp, Homo sapiens
aagttgaaattgtaa

SEQ ID NO: 1313758 - DNA, 15 bp, Homo sapiens
caagttgaaattgta

SEQ ID NO: 1313759 - DNA, 15 bp, Homo sapiens
tcaagttgaaattgt

SEQ ID NO: 1313760 - DNA, 15 bp, Homo sapiens
ttcaagttgaaattg

SEQ ID NO: 1313761 - DNA, 15 bp, Homo sapiens
gttcaagttgaaatt

SEQ ID NO: 1313762 - DNA, 15 bp, Homo sapiens
tgttcaagttgaaat

SEQ ID NO: 1313763 - DNA, 15 bp, Homo sapiens
ctgttcaagttgaaa

SEQ ID NO: 1313764 - DNA, 15 bp, Homo sapiens
gctgttcaagttgaa

SEQ ID NO: 1313765 - DNA, 15 bp, Homo sapiens
tgctgttcaagttga

SEQ ID NO: 1313766 - DNA, 15 bp, Homo sapiens
ctgctgttcaagttg

SEQ ID NO: 1313767 - DNA, 15 bp, Homo sapiens
tctgctgttcaagtt

SEQ ID NO: 1313768 - DNA, 15 bp, Homo sapiens
ttctgctgttcaagt

SEQ ID NO: 1313769 - DNA, 15 bp, Homo sapiens
gttctgctgttcaag

SEQ ID NO: 1313770 - DNA, 15 bp, Homo sapiens
ggttctgctgttcaa

SEQ ID NO: 1313771 - DNA, 15 bp, Homo sapiens
gggttctgctgttca

SEQ ID NO: 1313772 - DNA, 15 bp, Homo sapiens
agggttctgctgttc

SEQ ID NO: 1313773 - DNA, 15 bp, Homo sapiens
aagggttctgctgtt

SEQ ID NO: 1313774 - DNA, 15 bp, Homo sapiens
aaagggttctgctgt

SEQ ID NO: 1313775 - DNA, 15 bp, Homo sapiens
aaaagggttctgctg

SEQ ID NO: 1313776 - DNA, 15 bp, Homo sapiens
gaaaagggttctgct

SEQ ID NO: 1313777 - DNA, 15 bp, Homo sapiens
ggaaaagggttctgc

SEQ ID NO: 1313778 - DNA, 15 bp, Homo sapiens
gggaaaagggttctg

SEQ ID NO: 1313779 - DNA, 15 bp, Homo sapiens
tgggaaaagggttct

SEQ ID NO: 1313780 - DNA, 15 bp, Homo sapiens
atgggaaaagggttc

SEQ ID NO: 1313781 - DNA, 15 bp, Homo sapiens
tatgggaaaagggtt

SEQ ID NO: 1313782 - DNA, 15 bp, Homo sapiens
ctatgggaaaagggt

SEQ ID NO: 1313783 - DNA, 15 bp, Homo sapiens
gctatgggaaaaggg

SEQ ID NO: 1313784 - DNA, 15 bp, Homo sapiens
agctatgggaaaagg

SEQ ID NO: 1313785 - DNA, 15 bp, Homo sapiens
gagctatgggaaaag

SEQ ID NO: 1313786 - DNA, 15 bp, Homo sapiens
agagctatgggaaaa

SEQ ID NO: 1313787 - DNA, 15 bp, Homo sapiens
aagagctatgggaaa

SEQ ID NO: 1313788 - DNA, 15 bp, Homo sapiens
caagagctatgggaa

SEQ ID NO: 1313789 - DNA, 15 bp, Homo sapiens
ccaagagctatggga

SEQ ID NO: 1313790 - DNA, 15 bp, Homo sapiens
tccaagagctatggg

SEQ ID NO: 1313791 - DNA, 15 bp, Homo sapiens
atccaagagctatgg

SEQ ID NO: 1313792 - DNA, 15 bp, Homo sapiens
gatccaagagctatg

SEQ ID NO: 1313793 - DNA, 15 bp, Homo sapiens
agatccaagagctat

SEQ ID NO: 1313794 - DNA, 15 bp, Homo sapiens
aagatccaagagcta

SEQ ID NO: 1313795 - DNA, 15 bp, Homo sapiens
gaagatccaagagct

SEQ ID NO: 1313796 - DNA, 15 bp, Homo sapiens
ggaagatccaagagc

SEQ ID NO: 1313797 - DNA, 15 bp, Homo sapiens
tggaagatccaagag

SEQ ID NO: 1313798 - DNA, 15 bp, Homo sapiens
gtggaagatccaaga

SEQ ID NO: 1313799 - DNA, 15 bp, Homo sapiens
agtggaagatccaag

SEQ ID NO: 1313800 - DNA, 15 bp, Homo sapiens
aagtggaagatccaa

SEQ ID NO: 1313801 - DNA, 15 bp, Homo sapiens
caagtggaagatcca

SEQ ID NO: 1313802 - DNA, 15 bp, Homo sapiens
acaagtggaagatcc

SEQ ID NO: 1313803 - DNA, 15 bp, Homo sapiens
tacaagtggaagatc

SEQ ID NO: 1313804 - DNA, 15 bp, Homo sapiens
ttacaagtggaagat

SEQ ID NO: 1313805 - DNA, 15 bp, Homo sapiens
attacaagtggaaga

SEQ ID NO: 1313806 - DNA, 15 bp, Homo sapiens
gattacaagtggaag

SEQ ID NO: 1313807 - DNA, 15 bp, Homo sapiens
ggattacaagtggaa

SEQ ID NO: 1313808 - DNA, 15 bp, Homo sapiens
gggattacaagtgga

SEQ ID NO: 1313809 - DNA, 15 bp, Homo sapiens
ggggattacaagtgg

SEQ ID NO: 1313810 - DNA, 15 bp, Homo sapiens
aggggattacaagtg

SEQ ID NO: 1313811 - DNA, 15 bp, Homo sapiens
aaggggattacaagt

SEQ ID NO: 1313812 - DNA, 15 bp, Homo sapiens
gaaggggattacaag

SEQ ID NO: 1313813 - DNA, 15 bp, Homo sapiens
agaaggggattacaa

SEQ ID NO: 1313814 - DNA, 15 bp, Homo sapiens
tagaaggggattaca

SEQ ID NO: 1313815 - DNA, 15 bp, Homo sapiens
ttagaaggggattac

SEQ ID NO: 1313816 - DNA, 15 bp, Homo sapiens
cttagaaggggatta

SEQ ID NO: 1313817 - DNA, 15 bp, Homo sapiens
ccttagaaggggatt

SEQ ID NO: 1313818 - DNA, 15 bp, Homo sapiens
accttagaaggggat

SEQ ID NO: 1313819 - DNA, 15 bp, Homo sapiens
taccttagaagggga

SEQ ID NO: 1313820 - DNA, 15 bp, Homo sapiens
ataccttagaagggg

SEQ ID NO: 1313821 - DNA, 15 bp, Homo sapiens
aataccttagaaggg

SEQ ID NO: 1313822 - DNA, 15 bp, Homo sapiens
gaataccttagaagg

SEQ ID NO: 1313823 - DNA, 15 bp, Homo sapiens
ggaataccttagaag

SEQ ID NO: 1313824 - DNA, 15 bp, Homo sapiens
tggaataccttagaa

SEQ ID NO: 1313825 - DNA, 15 bp, Homo sapiens
ttggaataccttaga

SEQ ID NO: 1313826 - DNA, 15 bp, Homo sapiens
cttggaataccttag

SEQ ID NO: 1313827 - DNA, 15 bp, Homo sapiens
acttggaatacctta

SEQ ID NO: 1313828 - DNA, 15 bp, Homo sapiens
gacttggaatacctt

SEQ ID NO: 1313829 - DNA, 15 bp, Homo sapiens
ggacttggaatacct

SEQ ID NO: 1313830 - DNA, 15 bp, Homo sapiens
aggacttggaatacc

SEQ ID NO: 1313831 - DNA, 15 bp, Homo sapiens
aaggacttggaatac

SEQ ID NO: 1313832 - DNA, 15 bp, Homo sapiens
caaggacttggaata

SEQ ID NO: 1313833 - DNA, 15 bp, Homo sapiens
ccaaggacttggaat

SEQ ID NO: 1313834 - DNA, 15 bp, Homo sapiens
accaaggacttggaa

SEQ ID NO: 1313835 - DNA, 15 bp, Homo sapiens
aaccaaggacttgga

SEQ ID NO: 1313836 - DNA, 15 bp, Homo sapiens
taaccaaggacttgg

SEQ ID NO: 1313837 - DNA, 15 bp, Homo sapiens
gtaaccaaggacttg

SEQ ID NO: 1313838 - DNA, 15 bp, Homo sapiens
agtaaccaaggactt

SEQ ID NO: 1313839 - DNA, 15 bp, Homo sapiens
tagtaaccaaggact

SEQ ID NO: 1313840 - DNA, 15 bp, Homo sapiens
ctagtaaccaaggac

SEQ ID NO: 1313841 - DNA, 15 bp, Homo sapiens
actagtaaccaagga

SEQ ID NO: 1313842 - DNA, 15 bp, Homo sapiens
tactagtaaccaagg

SEQ ID NO: 1313843 - DNA, 15 bp, Homo sapiens
ttactagtaaccaag

SEQ ID NO: 1313844 - DNA, 15 bp, Homo sapiens
cttactagtaaccaa

SEQ ID NO: 1313845 - DNA, 15 bp, Homo sapiens
tcttactagtaacca

SEQ ID NO: 1313846 - DNA, 15 bp, Homo sapiens
ttcttactagtaacc

SEQ ID NO: 1313847 - DNA, 15 bp, Homo sapiens
attcttactagtaac

SEQ ID NO: 1313848 - DNA, 15 bp, Homo sapiens
cattcttactagtaa

SEQ ID NO: 1313849 - DNA, 15 bp, Homo sapiens
tcattcttactagta

SEQ ID NO: 1313850 - DNA, 15 bp, Homo sapiens
ctcattcttactagt

SEQ ID NO: 1313851 - DNA, 15 bp, Homo sapiens
gctcattcttactag

SEQ ID NO: 1313852 - DNA, 15 bp, Homo sapiens
tgctcattcttacta

SEQ ID NO: 1313853 - DNA, 15 bp, Homo sapiens
gtgctcattcttact

SEQ ID NO: 1313854 - DNA, 15 bp, Homo sapiens
ggtgctcattcttac

SEQ ID NO: 1313855 - DNA, 15 bp, Homo sapiens
aggtgctcattctta

SEQ ID NO: 1313856 - DNA, 15 bp, Homo sapiens
aaggtgctcattctt

SEQ ID NO: 1313857 - DNA, 15 bp, Homo sapiens
aaaggtgctcattct

SEQ ID NO: 1313858 - DNA, 15 bp, Homo sapiens
caaaggtgctcattc

SEQ ID NO: 1313859 - DNA, 15 bp, Homo sapiens
gcaaaggtgctcatt

SEQ ID NO: 1313860 - DNA, 15 bp, Homo sapiens
agcaaaggtgctcat

SEQ ID NO: 1313861 - DNA, 15 bp, Homo sapiens
aagcaaaggtgctca

SEQ ID NO: 1313862 - DNA, 15 bp, Homo sapiens
caagcaaaggtgctc

SEQ ID NO: 1313863 - DNA, 15 bp, Homo sapiens
tcaagcaaaggtgct

SEQ ID NO: 1313864 - DNA, 15 bp, Homo sapiens
gtcaagcaaaggtgc

SEQ ID NO: 1313865 - DNA, 15 bp, Homo sapiens
agtcaagcaaaggtg

SEQ ID NO: 1313866 - DNA, 15 bp, Homo sapiens
aagtcaagcaaaggt

SEQ ID NO: 1313867 - DNA, 15 bp, Homo sapiens
aaagtcaagcaaagg

SEQ ID NO: 1313868 - DNA, 15 bp, Homo sapiens
taaagtcaagcaaag

SEQ ID NO: 1313869 - DNA, 15 bp, Homo sapiens
ataaagtcaagcaaa

SEQ ID NO: 1313870 - DNA, 15 bp, Homo sapiens
aataaagtcaagcaa

SEQ ID NO: 1313871 - DNA, 15 bp, Homo sapiens
taataaagtcaagca

SEQ ID NO: 1313872 - DNA, 15 bp, Homo sapiens
ctaataaagtcaagc

SEQ ID NO: 1313873 - DNA, 15 bp, Homo sapiens
actaataaagtcaag

SEQ ID NO: 1313874 - DNA, 15 bp, Homo sapiens
gactaataaagtcaa

SEQ ID NO: 1313875 - DNA, 15 bp, Homo sapiens
tgactaataaagtca

SEQ ID NO: 1313876 - DNA, 15 bp, Homo sapiens
gtgactaataaagtc

SEQ ID NO: 1313877 - DNA, 15 bp, Homo sapiens
agtgactaataaagt

SEQ ID NO: 1313878 - DNA, 15 bp, Homo sapiens
tagtgactaataaag

SEQ ID NO: 1313879 - DNA, 15 bp, Homo sapiens
ctagtgactaataaa

SEQ ID NO: 1313880 - DNA, 15 bp, Homo sapiens
actagtgactaataa

SEQ ID NO: 1313881 - DNA, 15 bp, Homo sapiens
tactagtgactaata

SEQ ID NO: 1313882 - DNA, 15 bp, Homo sapiens
atactagtgactaat

SEQ ID NO: 1313883 - DNA, 15 bp, Homo sapiens
aatactagtgactaa

SEQ ID NO: 1313884 - DNA, 15 bp, Homo sapiens
aaatactagtgacta

SEQ ID NO: 1313885 - DNA, 15 bp, Homo sapiens
aaaatactagtgact

SEQ ID NO: 1313886 - DNA, 15 bp, Homo sapiens
caaaatactagtgac

SEQ ID NO: 1313887 - DNA, 15 bp, Homo sapiens
acaaaatactagtga

SEQ ID NO: 1313888 - DNA, 15 bp, Homo sapiens
gacaaaatactagtg

SEQ ID NO: 1313889 - DNA, 15 bp, Homo sapiens
agacaaaatactagt

SEQ ID NO: 1313890 - DNA, 15 bp, Homo sapiens
tagacaaaatactag

SEQ ID NO: 1313891 - DNA, 15 bp, Homo sapiens
ctagacaaaatacta

SEQ ID NO: 1313892 - DNA, 15 bp, Homo sapiens
tctagacaaaatact

SEQ ID NO: 1313893 - DNA, 15 bp, Homo sapiens
ctctagacaaaatac

SEQ ID NO: 1313894 - DNA, 15 bp, Homo sapiens
gctctagacaaaata

SEQ ID NO: 1313895 - DNA, 15 bp, Homo sapiens
ggctctagacaaaat

SEQ ID NO: 1313896 - DNA, 15 bp, Homo sapiens
tggctctagacaaaa

SEQ ID NO: 1313897 - DNA, 15 bp, Homo sapiens
ttggctctagacaaa

SEQ ID NO: 1313898 - DNA, 15 bp, Homo sapiens
attggctctagacaa

SEQ ID NO: 1313899 - DNA, 15 bp, Homo sapiens
aattggctctagaca

SEQ ID NO: 1313900 - DNA, 15 bp, Homo sapiens
aaattggctctagac

SEQ ID NO: 1313901 - DNA, 15 bp, Homo sapiens
caaattggctctaga

SEQ ID NO: 1313902 - DNA, 15 bp, Homo sapiens
ccaaattggctctag

SEQ ID NO: 1313903 - DNA, 15 bp, Homo sapiens
accaaattggctcta

SEQ ID NO: 1313904 - DNA, 15 bp, Homo sapiens
aaccaaattggctct

SEQ ID NO: 1313905 - DNA, 15 bp, Homo sapiens
caaccaaattggctc

SEQ ID NO: 1313906 - DNA, 15 bp, Homo sapiens
tcaaccaaattggct

SEQ ID NO: 1313907 - DNA, 15 bp, Homo sapiens
atcaaccaaattggc

SEQ ID NO: 1313908 - DNA, 15 bp, Homo sapiens
tatcaaccaaattgg

SEQ ID NO: 1313909 - DNA, 15 bp, Homo sapiens
atatcaaccaaattg

SEQ ID NO: 1313910 - DNA, 15 bp, Homo sapiens
gatatcaaccaaatt

SEQ ID NO: 1313911 - DNA, 15 bp, Homo sapiens
cgatatcaaccaaat

SEQ ID NO: 1313912 - DNA, 15 bp, Homo sapiens
gcgatatcaaccaaa

SEQ ID NO: 1313913 - DNA, 15 bp, Homo sapiens
agcgatatcaaccaa

SEQ ID NO: 1313914 - DNA, 15 bp, Homo sapiens
aagcgatatcaacca

SEQ ID NO: 1313915 - DNA, 15 bp, Homo sapiens
gaagcgatatcaacc

SEQ ID NO: 1313916 - DNA, 15 bp, Homo sapiens
ggaagcgatatcaac

SEQ ID NO: 1313917 - DNA, 15 bp, Homo sapiens
aggaagcgatatcaa

SEQ ID NO: 1313918 - DNA, 15 bp, Homo sapiens
taggaagcgatatca

SEQ ID NO: 1313919 - DNA, 15 bp, Homo sapiens
ttaggaagcgatatc

SEQ ID NO: 1313920 - DNA, 15 bp, Homo sapiens
tttaggaagcgatat

SEQ ID NO: 1313921 - DNA, 15 bp, Homo sapiens
gtttaggaagcgata

SEQ ID NO: 1313922 - DNA, 15 bp, Homo sapiens
agtttaggaagcgat

SEQ ID NO: 1313923 - DNA, 15 bp, Homo sapiens
gagtttaggaagcga

SEQ ID NO: 1313924 - DNA, 15 bp, Homo sapiens
agagtttaggaagcg

SEQ ID NO: 1313925 - DNA, 15 bp, Homo sapiens
gagagtttaggaagc

SEQ ID NO: 1313926 - DNA, 15 bp, Homo sapiens
agagagtttaggaag

SEQ ID NO: 1313927 - DNA, 15 bp, Homo sapiens
cagagagtttaggaa

SEQ ID NO: 1313928 - DNA, 15 bp, Homo sapiens
tcagagagtttagga

SEQ ID NO: 1313929 - DNA, 15 bp, Homo sapiens
ttcagagagtttagg

SEQ ID NO: 1313930 - DNA, 15 bp, Homo sapiens
tttcagagagtttag

SEQ ID NO: 1313931 - DNA, 15 bp, Homo sapiens
atttcagagagttta

SEQ ID NO: 1313932 - DNA, 15 bp, Homo sapiens
aatttcagagagttt

SEQ ID NO: 1313933 - DNA, 15 bp, Homo sapiens
taatttcagagagtt

SEQ ID NO: 1313934 - DNA, 15 bp, Homo sapiens
ctaatttcagagagt

SEQ ID NO: 1313935 - DNA, 15 bp, Homo sapiens
cctaatttcagagag

SEQ ID NO: 1313936 - DNA, 15 bp, Homo sapiens
tcctaatttcagaga

SEQ ID NO: 1313937 - DNA, 15 bp, Homo sapiens
atcctaatttcagag

SEQ ID NO: 1313938 - DNA, 15 bp, Homo sapiens
tatcctaatttcaga

SEQ ID NO: 1313939 - DNA, 15 bp, Homo sapiens
ctatcctaatttcag

SEQ ID NO: 1313940 - DNA, 15 bp, Homo sapiens
cctatcctaatttca

SEQ ID NO: 1313941 - DNA, 15 bp, Homo sapiens
ccctatcctaatttc

SEQ ID NO: 1313942 - DNA, 15 bp, Homo sapiens
accctatcctaattt

SEQ ID NO: 1313943 - DNA, 15 bp, Homo sapiens
gaccctatcctaatt

SEQ ID NO: 1313944 - DNA, 15 bp, Homo sapiens
tgaccctatcctaat

SEQ ID NO: 1313945 - DNA, 15 bp, Homo sapiens
ttgaccctatcctaa

SEQ ID NO: 1313946 - DNA, 15 bp, Homo sapiens
gttgaccctatccta

SEQ ID NO: 1313947 - DNA, 15 bp, Homo sapiens
agttgaccctatcct

SEQ ID NO: 1313948 - DNA, 15 bp, Homo sapiens
gagttgaccctatcc

SEQ ID NO: 1313949 - DNA, 15 bp, Homo sapiens
tgagttgaccctatc

SEQ ID NO: 1313950 - DNA, 15 bp, Homo sapiens
atgagttgaccctat

SEQ ID NO: 1313951 - DNA, 15 bp, Homo sapiens
aatgagttgacccta

SEQ ID NO: 1313952 - DNA, 15 bp, Homo sapiens
gaatgagttgaccct

SEQ ID NO: 1313953 - DNA, 15 bp, Homo sapiens
tgaatgagttgaccc

SEQ ID NO: 1313954 - DNA, 15 bp, Homo sapiens
ctgaatgagttgacc

SEQ ID NO: 1313955 - DNA, 15 bp, Homo sapiens
cctgaatgagttgac

SEQ ID NO: 1313956 - DNA, 15 bp, Homo sapiens
tcctgaatgagttga

SEQ ID NO: 1313957 - DNA, 15 bp, Homo sapiens
ttcctgaatgagttg

SEQ ID NO: 1313958 - DNA, 15 bp, Homo sapiens
tttcctgaatgagtt

SEQ ID NO: 1313959 - DNA, 15 bp, Homo sapiens
ttttcctgaatgagt

SEQ ID NO: 1313960 - DNA, 15 bp, Homo sapiens
attttcctgaatgag

SEQ ID NO: 1313961 - DNA, 15 bp, Homo sapiens
tattttcctgaatga

SEQ ID NO: 1313962 - DNA, 15 bp, Homo sapiens
ctattttcctgaatg

SEQ ID NO: 1313963 - DNA, 15 bp, Homo sapiens
tctattttcctgaat

SEQ ID NO: 1313964 - DNA, 15 bp, Homo sapiens
atctattttcctgaa

SEQ ID NO: 1313965 - DNA, 15 bp, Homo sapiens
tatctattttcctga

SEQ ID NO: 1313966 - DNA, 15 bp, Homo sapiens
gtatctattttcctg

SEQ ID NO: 1313967 - DNA, 15 bp, Homo sapiens
tgtatctattttcct

SEQ ID NO: 1313968 - DNA, 15 bp, Homo sapiens
tgggccatctactat

SEQ ID NO: 1313969 - DNA, 15 bp, Homo sapiens
ctgggccatctacta

SEQ ID NO: 1313970 - DNA, 15 bp, Homo sapiens
actgggccatctact

SEQ ID NO: 1313971 - DNA, 15 bp, Homo sapiens
aactgggccatctac

SEQ ID NO: 1313972 - DNA, 15 bp, Homo sapiens
taactgggccatcta

SEQ ID NO: 1313973 - DNA, 15 bp, Homo sapiens
ttaactgggccatct

SEQ ID NO: 1313974 - DNA, 15 bp, Homo sapiens
attaactgggccatc

SEQ ID NO: 1313975 - DNA, 15 bp, Homo sapiens
aattaactgggccat

SEQ ID NO: 1313976 - DNA, 15 bp, Homo sapiens
taattaactgggcca

SEQ ID NO: 1313977 - DNA, 15 bp, Homo sapiens
ttaattaactgggcc

SEQ ID NO: 1313978 - DNA, 15 bp, Homo sapiens
gttaattaactgggc

SEQ ID NO: 1313979 - DNA, 15 bp, Homo sapiens
ggttaattaactggg

SEQ ID NO: 1313980 - DNA, 15 bp, Homo sapiens
aggttaattaactgg

SEQ ID NO: 1313981 - DNA, 15 bp, Homo sapiens
gaggttaattaactg

SEQ ID NO: 1313982 - DNA, 15 bp, Homo sapiens
agaggttaattaact

SEQ ID NO: 1313983 - DNA, 15 bp, Homo sapiens
aagaggttaattaac

SEQ ID NO: 1313984 - DNA, 15 bp, Homo sapiens
caagaggttaattaa

SEQ ID NO: 1313985 - DNA, 15 bp, Homo sapiens
tcaagaggttaatta

SEQ ID NO: 1313986 - DNA, 15 bp, Homo sapiens
ttcaagaggttaatt

SEQ ID NO: 1313987 - DNA, 15 bp, Homo sapiens
cttcaagaggttaat

SEQ ID NO: 1313988 - DNA, 15 bp, Homo sapiens
gcttcaagaggttaa

SEQ ID NO: 1313989 - DNA, 15 bp, Homo sapiens
agcttcaagaggtta

SEQ ID NO: 1313990 - DNA, 15 bp, Homo sapiens
gagcttcaagaggtt

SEQ ID NO: 1313991 - DNA, 15 bp, Homo sapiens
agagcttcaagaggt

SEQ ID NO: 1313992 - DNA, 15 bp, Homo sapiens
cagagcttcaagagg

SEQ ID NO: 1313993 - DNA, 15 bp, Homo sapiens
ccagagcttcaagag

SEQ ID NO: 1313994 - DNA, 15 bp, Homo sapiens
cccagagcttcaaga

SEQ ID NO: 1313995 - DNA, 15 bp, Homo sapiens
acccagagcttcaag

SEQ ID NO: 1313996 - DNA, 15 bp, Homo sapiens
aacccagagcttcaa

SEQ ID NO: 1313997 - DNA, 15 bp, Homo sapiens
taacccagagcttca

SEQ ID NO: 1313998 - DNA, 15 bp, Homo sapiens
ttaacccagagcttc

SEQ ID NO: 1313999 - DNA, 15 bp, Homo sapiens
attaacccagagctt

SEQ ID NO: 1314000 - DNA, 15 bp, Homo sapiens
tattaacccagagct

SEQ ID NO: 1314001 - DNA, 15 bp, Homo sapiens
ttattaacccagagc

SEQ ID NO: 1314002 - DNA, 15 bp, Homo sapiens
gttattaacccagag

SEQ ID NO: 1314003 - DNA, 15 bp, Homo sapiens
tgttattaacccaga

SEQ ID NO: 1314004 - DNA, 15 bp, Homo sapiens
atgttattaacccag

SEQ ID NO: 1314005 - DNA, 15 bp, Homo sapiens
tatgttattaaccca

SEQ ID NO: 1314006 - DNA, 15 bp, Homo sapiens
gtatgttattaaccc

SEQ ID NO: 1314007 - DNA, 15 bp, Homo sapiens
ggtatgttattaacc

SEQ ID NO: 1314008 - DNA, 15 bp, Homo sapiens
aggtatgttattaac

SEQ ID NO: 1314009 - DNA, 15 bp, Homo sapiens
caggtatgttattaa

SEQ ID NO: 1314010 - DNA, 15 bp, Homo sapiens
gcaggtatgttatta

SEQ ID NO: 1314011 - DNA, 15 bp, Homo sapiens
ggcaggtatgttatt

SEQ ID NO: 1314012 - DNA, 15 bp, Homo sapiens
aggcaggtatgttat

SEQ ID NO: 1314013 - DNA, 15 bp, Homo sapiens
taggcaggtatgtta

SEQ ID NO: 1314014 - DNA, 15 bp, Homo sapiens
ataggcaggtatgtt

SEQ ID NO: 1314015 - DNA, 15 bp, Homo sapiens
tataggcaggtatgt

SEQ ID NO: 1314016 - DNA, 15 bp, Homo sapiens
ctataggcaggtatg

SEQ ID NO: 1314017 - DNA, 15 bp, Homo sapiens
cctataggcaggtat

SEQ ID NO: 1314018 - DNA, 15 bp, Homo sapiens
ccctataggcaggta

SEQ ID NO: 1314019 - DNA, 15 bp, Homo sapiens
accctataggcaggt

SEQ ID NO: 1314020 - DNA, 15 bp, Homo sapiens
aaccctataggcagg

SEQ ID NO: 1314021 - DNA, 15 bp, Homo sapiens
caaccctataggcag

SEQ ID NO: 1314022 - DNA, 15 bp, Homo sapiens
acaaccctataggca

SEQ ID NO: 1314023 - DNA, 15 bp, Homo sapiens
aacaaccctataggc

SEQ ID NO: 1314024 - DNA, 15 bp, Homo sapiens
aaacaaccctatagg

SEQ ID NO: 1314025 - DNA, 15 bp, Homo sapiens
aaaacaaccctatag

SEQ ID NO: 1314026 - DNA, 15 bp, Homo sapiens
caaaacaaccctata

SEQ ID NO: 1314027 - DNA, 15 bp, Homo sapiens
tcaaaacaaccctat

SEQ ID NO: 1314028 - DNA, 15 bp, Homo sapiens
ctcaaaacaacccta

SEQ ID NO: 1314029 - DNA, 15 bp, Homo sapiens
tctcaaaacaaccct

SEQ ID NO: 1314030 - DNA, 15 bp, Homo sapiens
atctcaaaacaaccc

SEQ ID NO: 1314031 - DNA, 15 bp, Homo sapiens
aatctcaaaacaacc

SEQ ID NO: 1314032 - DNA, 15 bp, Homo sapiens
aaatctcaaaacaac

SEQ ID NO: 1314033 - DNA, 15 bp, Homo sapiens
taaatctcaaaacaa

SEQ ID NO: 1314034 - DNA, 15 bp, Homo sapiens
ttaaatctcaaaaca

SEQ ID NO: 1314035 - DNA, 15 bp, Homo sapiens
tttaaatctcaaaac

SEQ ID NO: 1314036 - DNA, 15 bp, Homo sapiens
atttaaatctcaaaa

SEQ ID NO: 1314037 - DNA, 15 bp, Homo sapiens
catttaaatctcaaa

SEQ ID NO: 1314038 - DNA, 15 bp, Homo sapiens
tcatttaaatctcaa

SEQ ID NO: 1314039 - DNA, 15 bp, Homo sapiens
ttcatttaaatctca

SEQ ID NO: 1314040 - DNA, 15 bp, Homo sapiens
attcatttaaatctc

SEQ ID NO: 1314041 - DNA, 15 bp, Homo sapiens
aattcatttaaatct

SEQ ID NO: 1314042 - DNA, 15 bp, Homo sapiens
taattcatttaaatc

SEQ ID NO: 1314043 - DNA, 15 bp, Homo sapiens
ttaattcatttaaat

SEQ ID NO: 1314044 - DNA, 15 bp, Homo sapiens
attaattcatttaaa

SEQ ID NO: 1314045 - DNA, 15 bp, Homo sapiens
cattaattcatttaa

SEQ ID NO: 1314046 - DNA, 15 bp, Homo sapiens
gcattaattcattta

SEQ ID NO: 1314047 - DNA, 15 bp, Homo sapiens
agcattaattcattt

SEQ ID NO: 1314048 - DNA, 15 bp, Homo sapiens
gagcattaattcatt

SEQ ID NO: 1314049 - DNA, 15 bp, Homo sapiens
tgagcattaattcat

SEQ ID NO: 1314050 - DNA, 15 bp, Homo sapiens
atgagcattaattca

SEQ ID NO: 1314051 - DNA, 15 bp, Homo sapiens
gatgagcattaattc

SEQ ID NO: 1314052 - DNA, 15 bp, Homo sapiens
tgatgagcattaatt

SEQ ID NO: 1314053 - DNA, 15 bp, Homo sapiens
atgatgagcattaat

SEQ ID NO: 1314054 - DNA, 15 bp, Homo sapiens
catgatgagcattaa

SEQ ID NO: 1314055 - DNA, 15 bp, Homo sapiens
ccatgatgagcatta

SEQ ID NO: 1314056 - DNA, 15 bp, Homo sapiens
gccatgatgagcatt

SEQ ID NO: 1314057 - DNA, 15 bp, Homo sapiens
ggccatgatgagcat

SEQ ID NO: 1314058 - DNA, 15 bp, Homo sapiens
tggccatgatgagca

SEQ ID NO: 1314059 - DNA, 15 bp, Homo sapiens
ctggccatgatgagc

SEQ ID NO: 1314060 - DNA, 15 bp, Homo sapiens
cctggccatgatgag

SEQ ID NO: 1314061 - DNA, 15 bp, Homo sapiens
gcctggccatgatga

SEQ ID NO: 1314062 - DNA, 15 bp, Homo sapiens
tgcctggccatgatg

SEQ ID NO: 1314063 - DNA, 15 bp, Homo sapiens
atgcctggccatgat

SEQ ID NO: 1314064 - DNA, 15 bp, Homo sapiens
catgcctggccatga

SEQ ID NO: 1314065 - DNA, 15 bp, Homo sapiens
ccatgcctggccatg

SEQ ID NO: 1314066 - DNA, 15 bp, Homo sapiens
cctaacatttgtgaa

SEQ ID NO: 1314067 - DNA, 15 bp, Homo sapiens
gcctaacatttgtga

SEQ ID NO: 1314068 - DNA, 15 bp, Homo sapiens
tgcctaacatttgtg

SEQ ID NO: 1314069 - DNA, 15 bp, Homo sapiens
ttgcctaacatttgt

SEQ ID NO: 1314070 - DNA, 15 bp, Homo sapiens
cttgcctaacatttg

SEQ ID NO: 1314071 - DNA, 15 bp, Homo sapiens
acttgcctaacattt

SEQ ID NO: 1314072 - DNA, 15 bp, Homo sapiens
cacttgcctaacatt

SEQ ID NO: 1314073 - DNA, 15 bp, Homo sapiens
acacttgcctaacat

SEQ ID NO: 1314074 - DNA, 15 bp, Homo sapiens
aacacttgcctaaca

SEQ ID NO: 1314075 - DNA, 15 bp, Homo sapiens
caacacttgcctaac

SEQ ID NO: 1314076 - DNA, 15 bp, Homo sapiens
tcaacacttgcctaa

SEQ ID NO: 1314077 - DNA, 15 bp, Homo sapiens
gtcaacacttgccta

SEQ ID NO: 1314078 - DNA, 15 bp, Homo sapiens
agtcaacacttgcct

SEQ ID NO: 1314079 - DNA, 15 bp, Homo sapiens
aagtcaacacttgcc

SEQ ID NO: 1314080 - DNA, 15 bp, Homo sapiens
taagtcaacacttgc

SEQ ID NO: 1314081 - DNA, 15 bp, Homo sapiens
ataagtcaacacttg

SEQ ID NO: 1314082 - DNA, 15 bp, Homo sapiens
gataagtcaacactt

SEQ ID NO: 1314083 - DNA, 15 bp, Homo sapiens
tgataagtcaacact

SEQ ID NO: 1314084 - DNA, 15 bp, Homo sapiens
gtgataagtcaacac

SEQ ID NO: 1314085 - DNA, 15 bp, Homo sapiens
cgtgataagtcaaca

SEQ ID NO: 1314086 - DNA, 15 bp, Homo sapiens
ccgtgataagtcaac

SEQ ID NO: 1314087 - DNA, 15 bp, Homo sapiens
accgtgataagtcaa

SEQ ID NO: 1314088 - DNA, 15 bp, Homo sapiens
taccgtgataagtca

SEQ ID NO: 1314089 - DNA, 15 bp, Homo sapiens
gtaccgtgataagtc

SEQ ID NO: 1314090 - DNA, 15 bp, Homo sapiens
ggtaccgtgataagt

SEQ ID NO: 1314091 - DNA, 15 bp, Homo sapiens
aggtaccgtgataag

SEQ ID NO: 1314092 - DNA, 15 bp, Homo sapiens
caggtaccgtgataa

SEQ ID NO: 1314093 - DNA, 15 bp, Homo sapiens
ccaggtaccgtgata

SEQ ID NO: 1314094 - DNA, 15 bp, Homo sapiens
gccaggtaccgtgat

SEQ ID NO: 1314095 - DNA, 15 bp, Homo sapiens
cgccaggtaccgtga

SEQ ID NO: 1314096 - DNA, 15 bp, Homo sapiens
acgccaggtaccgtg

SEQ ID NO: 1314097 - DNA, 15 bp, Homo sapiens
tacgccaggtaccgt

SEQ ID NO: 1314098 - DNA, 15 bp, Homo sapiens
atacgccaggtaccg

SEQ ID NO: 1314099 - DNA, 15 bp, Homo sapiens
tatacgccaggtacc

SEQ ID NO: 1314100 - DNA, 15 bp, Homo sapiens
ctatacgccaggtac

SEQ ID NO: 1314101 - DNA, 15 bp, Homo sapiens
actatacgccaggta

SEQ ID NO: 1314102 - DNA, 15 bp, Homo sapiens
tactatacgccaggt

SEQ ID NO: 1314103 - DNA, 15 bp, Homo sapiens
ctactatacgccagg

SEQ ID NO: 1314104 - DNA, 15 bp, Homo sapiens
cctactatacgccag

SEQ ID NO: 1314105 - DNA, 15 bp, Homo sapiens
acctactatacgcca

SEQ ID NO: 1314106 - DNA, 15 bp, Homo sapiens
aacctactatacgcc

SEQ ID NO: 1314107 - DNA, 15 bp, Homo sapiens
gaacctactatacgc

SEQ ID NO: 1314108 - DNA, 15 bp, Homo sapiens
agaacctactatacg

SEQ ID NO: 1314109 - DNA, 15 bp, Homo sapiens
tagaacctactatac

SEQ ID NO: 1314110 - DNA, 15 bp, Homo sapiens
ttagaacctactata

SEQ ID NO: 1314111 - DNA, 15 bp, Homo sapiens
gttagaacctactat

SEQ ID NO: 1314112 - DNA, 15 bp, Homo sapiens
agttagaacctacta

SEQ ID NO: 1314113 - DNA, 15 bp, Homo sapiens
tagttagaacctact

SEQ ID NO: 1314114 - DNA, 15 bp, Homo sapiens
ttagttagaacctac

SEQ ID NO: 1314115 - DNA, 15 bp, Homo sapiens
tttagttagaaccta

SEQ ID NO: 1314116 - DNA, 15 bp, Homo sapiens
atttagttagaacct

SEQ ID NO: 1314117 - DNA, 15 bp, Homo sapiens
tatttagttagaacc

SEQ ID NO: 1314118 - DNA, 15 bp, Homo sapiens
atatttagttagaac

SEQ ID NO: 1314119 - DNA, 15 bp, Homo sapiens
gatatttagttagaa

SEQ ID NO: 1314120 - DNA, 15 bp, Homo sapiens
tgatatttagttaga

SEQ ID NO: 1314121 - DNA, 15 bp, Homo sapiens
atgatatttagttag

SEQ ID NO: 1314122 - DNA, 15 bp, Homo sapiens
gatgatatttagtta

SEQ ID NO: 1314123 - DNA, 15 bp, Homo sapiens
agatgatatttagtt

SEQ ID NO: 1314124 - DNA, 15 bp, Homo sapiens
gagatgatatttagt

SEQ ID NO: 1314125 - DNA, 15 bp, Homo sapiens
ggagatgatatttag

SEQ ID NO: 1314126 - DNA, 15 bp, Homo sapiens
gggagatgatattta

SEQ ID NO: 1314127 - DNA, 15 bp, Homo sapiens
tgggagatgatattt

SEQ ID NO: 1314128 - DNA, 15 bp, Homo sapiens
ctgggagatgatatt

SEQ ID NO: 1314129 - DNA, 15 bp, Homo sapiens
actgggagatgatat

SEQ ID NO: 1314130 - DNA, 15 bp, Homo sapiens
cactgggagatgata

SEQ ID NO: 1314131 - DNA, 15 bp, Homo sapiens
gcactgggagatgat

SEQ ID NO: 1314132 - DNA, 15 bp, Homo sapiens
ggcactgggagatga

SEQ ID NO: 1314133 - DNA, 15 bp, Homo sapiens
aggcactgggagatg

SEQ ID NO: 1314134 - DNA, 15 bp, Homo sapiens
taggcactgggagat

SEQ ID NO: 1314135 - DNA, 15 bp, Homo sapiens
ctaggcactgggaga

SEQ ID NO: 1314136 - DNA, 15 bp, Homo sapiens
gctaggcactgggag

SEQ ID NO: 1314137 - DNA, 15 bp, Homo sapiens
tgctaggcactggga

SEQ ID NO: 1314138 - DNA, 15 bp, Homo sapiens
gtgctaggcactggg

SEQ ID NO: 1314139 - DNA, 15 bp, Homo sapiens
cgtgctaggcactgg

SEQ ID NO: 1314140 - DNA, 15 bp, Homo sapiens
ccgtgctaggcactg

SEQ ID NO: 1314141 - DNA, 15 bp, Homo sapiens
accgtgctaggcact

SEQ ID NO: 1314142 - DNA, 15 bp, Homo sapiens
taccgtgctaggcac

SEQ ID NO: 1314143 - DNA, 15 bp, Homo sapiens
gtaccgtgctaggca

SEQ ID NO: 1314144 - DNA, 15 bp, Homo sapiens
ggtaccgtgctaggc

SEQ ID NO: 1314145 - DNA, 15 bp, Homo sapiens
aggtaccgtgctagg

SEQ ID NO: 1314146 - DNA, 15 bp, Homo sapiens
aaggtaccgtgctag

SEQ ID NO: 1314147 - DNA, 15 bp, Homo sapiens
taaggtaccgtgcta

SEQ ID NO: 1314148 - DNA, 15 bp, Homo sapiens
ataaggtaccgtgct

SEQ ID NO: 1314149 - DNA, 15 bp, Homo sapiens
gataaggtaccgtgc

SEQ ID NO: 1314150 - DNA, 15 bp, Homo sapiens
cgataaggtaccgtg

SEQ ID NO: 1314151 - DNA, 15 bp, Homo sapiens
tcgataaggtaccgt

SEQ ID NO: 1314152 - DNA, 15 bp, Homo sapiens
gtcgataaggtaccg

SEQ ID NO: 1314153 - DNA, 15 bp, Homo sapiens
tgtcgataaggtacc

SEQ ID NO: 1314154 - DNA, 15 bp, Homo sapiens
ctgtcgataaggtac

SEQ ID NO: 1314155 - DNA, 15 bp, Homo sapiens
actgtcgataaggta

SEQ ID NO: 1314156 - DNA, 15 bp, Homo sapiens
gactgtcgataaggt

SEQ ID NO: 1314157 - DNA, 15 bp, Homo sapiens
agactgtcgataagg

SEQ ID NO: 1314158 - DNA, 15 bp, Homo sapiens
aagactgtcgataag

SEQ ID NO: 1314159 - DNA, 15 bp, Homo sapiens
aaagactgtcgataa

SEQ ID NO: 1314160 - DNA, 15 bp, Homo sapiens
aaaagactgtcgata

SEQ ID NO: 1314161 - DNA, 15 bp, Homo sapiens
aaaaagactgtcgat

SEQ ID NO: 1314162 - DNA, 15 bp, Homo sapiens
gaaaaagactgtcga

SEQ ID NO: 1314163 - DNA, 15 bp, Homo sapiens
tgaaaaagactgtcg

SEQ ID NO: 1314164 - DNA, 15 bp, Homo sapiens
atgaaaaagactgtc

SEQ ID NO: 1314165 - DNA, 15 bp, Homo sapiens
gatgaaaaagactgt

SEQ ID NO: 1314166 - DNA, 15 bp, Homo sapiens
agatgaaaaagactg

SEQ ID NO: 1314167 - DNA, 15 bp, Homo sapiens
gagatgaaaaagact

SEQ ID NO: 1314168 - DNA, 15 bp, Homo sapiens
agagatgaaaaagac

SEQ ID NO: 1314169 - DNA, 15 bp, Homo sapiens
cagagatgaaaaaga

SEQ ID NO: 1314170 - DNA, 15 bp, Homo sapiens
gcagagatgaaaaag

SEQ ID NO: 1314171 - DNA, 15 bp, Homo sapiens
tgcagagatgaaaaa

SEQ ID NO: 1314172 - DNA, 15 bp, Homo sapiens
ctgcagagatgaaaa

SEQ ID NO: 1314173 - DNA, 15 bp, Homo sapiens
tctgcagagatgaaa

SEQ ID NO: 1314174 - DNA, 15 bp, Homo sapiens
ttctgcagagatgaa

SEQ ID NO: 1314175 - DNA, 15 bp, Homo sapiens
attctgcagagatga

SEQ ID NO: 1314176 - DNA, 15 bp, Homo sapiens
aattctgcagagatg

SEQ ID NO: 1314177 - DNA, 15 bp, Homo sapiens
taattctgcagagat

SEQ ID NO: 1314178 - DNA, 15 bp, Homo sapiens
ttaattctgcagaga

SEQ ID NO: 1314179 - DNA, 15 bp, Homo sapiens
gttaattctgcagag

SEQ ID NO: 1314180 - DNA, 15 bp, Homo sapiens
tgttaattctgcaga

SEQ ID NO: 1314181 - DNA, 15 bp, Homo sapiens
ttgttaattctgcag

SEQ ID NO: 1314182 - DNA, 15 bp, Homo sapiens
tttgttaattctgca

SEQ ID NO: 1314183 - DNA, 15 bp, Homo sapiens
atttgttaattctgc

SEQ ID NO: 1314184 - DNA, 15 bp, Homo sapiens
catttgttaattctg

SEQ ID NO: 1314185 - DNA, 15 bp, Homo sapiens
tcatttgttaattct

SEQ ID NO: 1314186 - DNA, 15 bp, Homo sapiens
ttcatttgttaattc

SEQ ID NO: 1314187 - DNA, 15 bp, Homo sapiens
attcatttgttaatt

SEQ ID NO: 1314188 - DNA, 15 bp, Homo sapiens
tattcatttgttaat

SEQ ID NO: 1314189 - DNA, 15 bp, Homo sapiens
ttattcatttgttaa

SEQ ID NO: 1314190 - DNA, 15 bp, Homo sapiens
tttattcatttgtta

SEQ ID NO: 1314191 - DNA, 15 bp, Homo sapiens
atttattcatttgtt

SEQ ID NO: 1314192 - DNA, 15 bp, Homo sapiens
tatttattcatttgt

SEQ ID NO: 1314193 - DNA, 15 bp, Homo sapiens
ctatttattcatttg

SEQ ID NO: 1314194 - DNA, 15 bp, Homo sapiens
cctatttattcattt

SEQ ID NO: 1314195 - DNA, 15 bp, Homo sapiens
acctatttattcatt

SEQ ID NO: 1314196 - DNA, 15 bp, Homo sapiens
gacctatttattcat

SEQ ID NO: 1314197 - DNA, 15 bp, Homo sapiens
tgacctatttattca

SEQ ID NO: 1314198 - DNA, 15 bp, Homo sapiens
gtgacctatttattc

SEQ ID NO: 1314199 - DNA, 15 bp, Homo sapiens
agtgacctatttatt

SEQ ID NO: 1314200 - DNA, 15 bp, Homo sapiens
aagtgacctatttat

SEQ ID NO: 1314201 - DNA, 15 bp, Homo sapiens
caagtgacctattta

SEQ ID NO: 1314202 - DNA, 15 bp, Homo sapiens
acaagtgacctattt

SEQ ID NO: 1314203 - DNA, 15 bp, Homo sapiens
aacaagtgacctatt

SEQ ID NO: 1314204 - DNA, 15 bp, Homo sapiens
aaacaagtgacctat

SEQ ID NO: 1314205 - DNA, 15 bp, Homo sapiens
taaacaagtgaccta

SEQ ID NO: 1314206 - DNA, 15 bp, Homo sapiens
ttaaacaagtgacct

SEQ ID NO: 1314207 - DNA, 15 bp, Homo sapiens
attaaacaagtgacc

SEQ ID NO: 1314208 - DNA, 15 bp, Homo sapiens
gattaaacaagtgac

SEQ ID NO: 1314209 - DNA, 15 bp, Homo sapiens
ggattaaacaagtga

SEQ ID NO: 1314210 - DNA, 15 bp, Homo sapiens
aggattaaacaagtg

SEQ ID NO: 1314211 - DNA, 15 bp, Homo sapiens
aaggattaaacaagt

SEQ ID NO: 1314212 - DNA, 15 bp, Homo sapiens
caaggattaaacaag

SEQ ID NO: 1314213 - DNA, 15 bp, Homo sapiens
acaaggattaaacaa

SEQ ID NO: 1314214 - DNA, 15 bp, Homo sapiens
gacaaggattaaaca

SEQ ID NO: 1314215 - DNA, 15 bp, Homo sapiens
ggacaaggattaaac

SEQ ID NO: 1314216 - DNA, 15 bp, Homo sapiens
aggacaaggattaaa

SEQ ID NO: 1314217 - DNA, 15 bp, Homo sapiens
gaggacaaggattaa

SEQ ID NO: 1314218 - DNA, 15 bp, Homo sapiens
ggaggacaaggatta

SEQ ID NO: 1314219 - DNA, 15 bp, Homo sapiens
tggaggacaaggatt

SEQ ID NO: 1314220 - DNA, 15 bp, Homo sapiens
ttggaggacaaggat

SEQ ID NO: 1314221 - DNA, 15 bp, Homo sapiens
tttggaggacaagga

SEQ ID NO: 1314222 - DNA, 15 bp, Homo sapiens
ctttggaggacaagg

SEQ ID NO: 1314223 - DNA, 15 bp, Homo sapiens
tctttggaggacaag

SEQ ID NO: 1314224 - DNA, 15 bp, Homo sapiens
ctctttggaggacaa

SEQ ID NO: 1314225 - DNA, 15 bp, Homo sapiens
tctctttggaggaca

SEQ ID NO: 1314226 - DNA, 15 bp, Homo sapiens
ttctctttggaggac

SEQ ID NO: 1314227 - DNA, 15 bp, Homo sapiens
tttctctttggagga

SEQ ID NO: 1314228 - DNA, 15 bp, Homo sapiens
ctttctctttggagg

SEQ ID NO: 1314229 - DNA, 15 bp, Homo sapiens
tctttctctttggag

SEQ ID NO: 1314230 - DNA, 15 bp, Homo sapiens
atctttctctttgga

SEQ ID NO: 1314231 - DNA, 15 bp, Homo sapiens
catctttctctttgg

SEQ ID NO: 1314232 - DNA, 15 bp, Homo sapiens
acatctttctctttg

SEQ ID NO: 1314233 - DNA, 15 bp, Homo sapiens
gacatctttctcttt

SEQ ID NO: 1314234 - DNA, 15 bp, Homo sapiens
tgacatctttctctt

SEQ ID NO: 1314235 - DNA, 15 bp, Homo sapiens
ctgacatctttctct

SEQ ID NO: 1314236 - DNA, 15 bp, Homo sapiens
actgacatctttctc

SEQ ID NO: 1314237 - DNA, 15 bp, Homo sapiens
tactgacatctttct

SEQ ID NO: 1314238 - DNA, 15 bp, Homo sapiens
gtactgacatctttc

SEQ ID NO: 1314239 - DNA, 15 bp, Homo sapiens
tgtactgacatcttt

SEQ ID NO: 1314240 - DNA, 15 bp, Homo sapiens
ctgtactgacatctt

SEQ ID NO: 1314241 - DNA, 15 bp, Homo sapiens
tctgtactgacatct

SEQ ID NO: 1314242 - DNA, 15 bp, Homo sapiens
atctgtactgacatc

SEQ ID NO: 1314243 - DNA, 15 bp, Homo sapiens
gatctgtactgacat

SEQ ID NO: 1314244 - DNA, 15 bp, Homo sapiens
tgatctgtactgaca

SEQ ID NO: 1314245 - DNA, 15 bp, Homo sapiens
ctgatctgtactgac

SEQ ID NO: 1314246 - DNA, 15 bp, Homo sapiens
gctgatctgtactga

SEQ ID NO: 1314247 - DNA, 15 bp, Homo sapiens
tgctgatctgtactg

SEQ ID NO: 1314248 - DNA, 15 bp, Homo sapiens
gtgctgatctgtact

SEQ ID NO: 1314249 - DNA, 15 bp, Homo sapiens
ggtgctgatctgtac

SEQ ID NO: 1314250 - DNA, 15 bp, Homo sapiens
tggtgctgatctgta

SEQ ID NO: 1314251 - DNA, 15 bp, Homo sapiens
ttggtgctgatctgt

SEQ ID NO: 1314252 - DNA, 15 bp, Homo sapiens
cttggtgctgatctg

SEQ ID NO: 1314253 - DNA, 15 bp, Homo sapiens
tcttggtgctgatct

SEQ ID NO: 1314254 - DNA, 15 bp, Homo sapiens
ttcttggtgctgatc

SEQ ID NO: 1314255 - DNA, 15 bp, Homo sapiens
tttcttggtgctgat

SEQ ID NO: 1314256 - DNA, 15 bp, Homo sapiens
atttcttggtgctga

SEQ ID NO: 1314257 - DNA, 15 bp, Homo sapiens
catttcttggtgctg

SEQ ID NO: 1314258 - DNA, 15 bp, Homo sapiens
acatttcttggtgct

SEQ ID NO: 1314259 - DNA, 15 bp, Homo sapiens
cacatttcttggtgc

SEQ ID NO: 1314260 - DNA, 15 bp, Homo sapiens
tcacatttcttggtg

SEQ ID NO: 1314261 - DNA, 15 bp, Homo sapiens
atcacatttcttggt

SEQ ID NO: 1314262 - DNA, 15 bp, Homo sapiens
catcacatttcttgg

SEQ ID NO: 1314263 - DNA, 15 bp, Homo sapiens
tcatcacatttcttg

SEQ ID NO: 1314264 - DNA, 15 bp, Homo sapiens
ctcatcacatttctt

SEQ ID NO: 1314265 - DNA, 15 bp, Homo sapiens
actcatcacatttct

SEQ ID NO: 1314266 - DNA, 15 bp, Homo sapiens
gactcatcacatttc

SEQ ID NO: 1314267 - DNA, 15 bp, Homo sapiens
cgactcatcacattt

SEQ ID NO: 1314268 - DNA, 15 bp, Homo sapiens
gcgactcatcacatt

SEQ ID NO: 1314269 - DNA, 15 bp, Homo sapiens
tgcgactcatcacat

SEQ ID NO: 1314270 - DNA, 15 bp, Homo sapiens
atgcgactcatcaca

SEQ ID NO: 1314271 - DNA, 15 bp, Homo sapiens
tatgcgactcatcac

SEQ ID NO: 1314272 - DNA, 15 bp, Homo sapiens
gtatgcgactcatca

SEQ ID NO: 1314273 - DNA, 15 bp, Homo sapiens
tgtatgcgactcatc

SEQ ID NO: 1314274 - DNA, 15 bp, Homo sapiens
atgtatgcgactcat

SEQ ID NO: 1314275 - DNA, 15 bp, Homo sapiens
catgtatgcgactca

SEQ ID NO: 1314276 - DNA, 15 bp, Homo sapiens
acatgtatgcgactc

SEQ ID NO: 1314277 - DNA, 15 bp, Homo sapiens
cacatgtatgcgact

SEQ ID NO: 1314278 - DNA, 15 bp, Homo sapiens
acacatgtatgcgac

SEQ ID NO: 1314279 - DNA, 15 bp, Homo sapiens
cacacatgtatgcga

SEQ ID NO: 1314280 - DNA, 15 bp, Homo sapiens
acacacatgtatgcg

SEQ ID NO: 1314281 - DNA, 15 bp, Homo sapiens
cacacacatgtatgc

SEQ ID NO: 1314282 - DNA, 15 bp, Homo sapiens
tcacacacatgtatg

SEQ ID NO: 1314283 - DNA, 15 bp, Homo sapiens
ttcacacacatgtat

SEQ ID NO: 1314284 - DNA, 15 bp, Homo sapiens
attcacacacatgta

SEQ ID NO: 1314285 - DNA, 15 bp, Homo sapiens
gattcacacacatgt

SEQ ID NO: 1314286 - DNA, 15 bp, Homo sapiens
tgattcacacacatg

SEQ ID NO: 1314287 - DNA, 15 bp, Homo sapiens
ttgattcacacacat

SEQ ID NO: 1314288 - DNA, 15 bp, Homo sapiens
cttgattcacacaca

SEQ ID NO: 1314289 - DNA, 15 bp, Homo sapiens
tcttgattcacacac

SEQ ID NO: 1314290 - DNA, 15 bp, Homo sapiens
ttcttgattcacaca

SEQ ID NO: 1314291 - DNA, 15 bp, Homo sapiens
gttcttgattcacac

SEQ ID NO: 1314292 - DNA, 15 bp, Homo sapiens
tgttcttgattcaca

SEQ ID NO: 1314293 - DNA, 15 bp, Homo sapiens
ttgttcttgattcac

SEQ ID NO: 1314294 - DNA, 15 bp, Homo sapiens
attgttcttgattca

SEQ ID NO: 1314295 - DNA, 15 bp, Homo sapiens
tattgttcttgattc

SEQ ID NO: 1314296 - DNA, 15 bp, Homo sapiens
ttattgttcttgatt

SEQ ID NO: 1314297 - DNA, 15 bp, Homo sapiens
attattgttcttgat

SEQ ID NO: 1314298 - DNA, 15 bp, Homo sapiens
cattattgttcttga

SEQ ID NO: 1314299 - DNA, 15 bp, Homo sapiens
tcattattgttcttg

SEQ ID NO: 1314300 - DNA, 15 bp, Homo sapiens
ctcattattgttctt

SEQ ID NO: 1314301 - DNA, 15 bp, Homo sapiens
tctcattattgttct

SEQ ID NO: 1314302 - DNA, 15 bp, Homo sapiens
ctctcattattgttc

SEQ ID NO: 1314303 - DNA, 15 bp, Homo sapiens
actctcattattgtt

SEQ ID NO: 1314304 - DNA, 15 bp, Homo sapiens
tactctcattattgt

SEQ ID NO: 1314305 - DNA, 15 bp, Homo sapiens
ttactctcattattg

SEQ ID NO: 1314306 - DNA, 15 bp, Homo sapiens
tttactctcattatt

SEQ ID NO: 1314307 - DNA, 15 bp, Homo sapiens
atttactctcattat

SEQ ID NO: 1314308 - DNA, 15 bp, Homo sapiens
aatttactctcatta

SEQ ID NO: 1314309 - DNA, 15 bp, Homo sapiens
taatttactctcatt

SEQ ID NO: 1314310 - DNA, 15 bp, Homo sapiens
ttaatttactctcat

SEQ ID NO: 1314311 - DNA, 15 bp, Homo sapiens
cttaatttactctca

SEQ ID NO: 1314312 - DNA, 15 bp, Homo sapiens
acttaatttactctc

SEQ ID NO: 1314313 - DNA, 15 bp, Homo sapiens
gacttaatttactct

SEQ ID NO: 1314314 - DNA, 15 bp, Homo sapiens
agacttaatttactc

SEQ ID NO: 1314315 - DNA, 15 bp, Homo sapiens
cagacttaatttact

SEQ ID NO: 1314316 - DNA, 15 bp, Homo sapiens
acagacttaatttac

SEQ ID NO: 1314317 - DNA, 15 bp, Homo sapiens
gacagacttaattta

SEQ ID NO: 1314318 - DNA, 15 bp, Homo sapiens
agacagacttaattt

SEQ ID NO: 1314319 - DNA, 15 bp, Homo sapiens
cagacagacttaatt

SEQ ID NO: 1314320 - DNA, 15 bp, Homo sapiens
acagacagacttaat

SEQ ID NO: 1314321 - DNA, 15 bp, Homo sapiens
cacagacagacttaa

SEQ ID NO: 1314322 - DNA, 15 bp, Homo sapiens
ccacagacagactta

SEQ ID NO: 1314323 - DNA, 15 bp, Homo sapiens
gccacagacagactt

SEQ ID NO: 1314324 - DNA, 15 bp, Homo sapiens
agccacagacagact

SEQ ID NO: 1314325 - DNA, 15 bp, Homo sapiens
gagccacagacagac

SEQ ID NO: 1314326 - DNA, 15 bp, Homo sapiens
ggagccacagacaga

SEQ ID NO: 1314327 - DNA, 15 bp, Homo sapiens
aggagccacagacag

SEQ ID NO: 1314328 - DNA, 15 bp, Homo sapiens
gaggagccacagaca

SEQ ID NO: 1314329 - DNA, 15 bp, Homo sapiens
tgaggagccacagac

SEQ ID NO: 1314330 - DNA, 15 bp, Homo sapiens
ctgaggagccacaga

SEQ ID NO: 1314331 - DNA, 15 bp, Homo sapiens
tctgaggagccacag

SEQ ID NO: 1314332 - DNA, 15 bp, Homo sapiens
ctctgaggagccaca

SEQ ID NO: 1314333 - DNA, 15 bp, Homo sapiens
actctgaggagccac

SEQ ID NO: 1314334 - DNA, 15 bp, Homo sapiens
cactctgaggagcca

SEQ ID NO: 1314335 - DNA, 15 bp, Homo sapiens
tcactctgaggagcc

SEQ ID NO: 1314336 - DNA, 15 bp, Homo sapiens
atcactctgaggagc

SEQ ID NO: 1314337 - DNA, 15 bp, Homo sapiens
tatcactctgaggag

SEQ ID NO: 1314338 - DNA, 15 bp, Homo sapiens
gtatcactctgagga

SEQ ID NO: 1314339 - DNA, 15 bp, Homo sapiens
agtatcactctgagg

SEQ ID NO: 1314340 - DNA, 15 bp, Homo sapiens
aagtatcactctgag

SEQ ID NO: 1314341 - DNA, 15 bp, Homo sapiens
aaagtatcactctga

SEQ ID NO: 1314342 - DNA, 15 bp, Homo sapiens
aaaagtatcactctg

SEQ ID NO: 1314343 - DNA, 15 bp, Homo sapiens
aaaaagtatcactct

SEQ ID NO: 1314344 - DNA, 15 bp, Homo sapiens
caaaaagtatcactc

SEQ ID NO: 1314345 - DNA, 15 bp, Homo sapiens
tcaaaaagtatcact

SEQ ID NO: 1314346 - DNA, 15 bp, Homo sapiens
atcaaaaagtatcac

SEQ ID NO: 1314347 - DNA, 15 bp, Homo sapiens
gatcaaaaagtatca

SEQ ID NO: 1314348 - DNA, 15 bp, Homo sapiens
ggatcaaaaagtatc

SEQ ID NO: 1314349 - DNA, 15 bp, Homo sapiens
tggatcaaaaagtat

SEQ ID NO: 1314350 - DNA, 15 bp, Homo sapiens
ctggatcaaaaagta

SEQ ID NO: 1314351 - DNA, 15 bp, Homo sapiens
cctggatcaaaaagt

SEQ ID NO: 1314352 - DNA, 15 bp, Homo sapiens
gcctggatcaaaaag

SEQ ID NO: 1314353 - DNA, 15 bp, Homo sapiens
ggcctggatcaaaaa

SEQ ID NO: 1314354 - DNA, 15 bp, Homo sapiens
aggcctggatcaaaa

SEQ ID NO: 1314355 - DNA, 15 bp, Homo sapiens
aaggcctggatcaaa

SEQ ID NO: 1314356 - DNA, 15 bp, Homo sapiens
caaggcctggatcaa

SEQ ID NO: 1314357 - DNA, 15 bp, Homo sapiens
ccaaggcctggatca

SEQ ID NO: 1314358 - DNA, 15 bp, Homo sapiens
cccaaggcctggatc

SEQ ID NO: 1314359 - DNA, 15 bp, Homo sapiens
ccccaaggcctggat

SEQ ID NO: 1314360 - DNA, 15 bp, Homo sapiens
cccccaaggcctgga

SEQ ID NO: 1314361 - DNA, 15 bp, Homo sapiens
tcccccaaggcctgg

SEQ ID NO: 1314362 - DNA, 15 bp, Homo sapiens
atcccccaaggcctg

SEQ ID NO: 1314363 - DNA, 15 bp, Homo sapiens
catcccccaaggcct

SEQ ID NO: 1314364 - DNA, 15 bp, Homo sapiens
tcatcccccaaggcc

SEQ ID NO: 1314365 - DNA, 15 bp, Homo sapiens
ctcatcccccaaggc

SEQ ID NO: 1314366 - DNA, 15 bp, Homo sapiens
tctcatcccccaagg

SEQ ID NO: 1314367 - DNA, 15 bp, Homo sapiens
ttctcatcccccaag

SEQ ID NO: 1314368 - DNA, 15 bp, Homo sapiens
cttctcatcccccaa

SEQ ID NO: 1314369 - DNA, 15 bp, Homo sapiens
acttctcatccccca

SEQ ID NO: 1314370 - DNA, 15 bp, Homo sapiens
gacttctcatccccc

SEQ ID NO: 1314371 - DNA, 15 bp, Homo sapiens
ggacttctcatcccc

SEQ ID NO: 1314372 - DNA, 15 bp, Homo sapiens
tggacttctcatccc

SEQ ID NO: 1314373 - DNA, 15 bp, Homo sapiens
atggacttctcatcc

SEQ ID NO: 1314374 - DNA, 15 bp, Homo sapiens
catggacttctcatc

SEQ ID NO: 1314375 - DNA, 15 bp, Homo sapiens
tcatggacttctcat

SEQ ID NO: 1314376 - DNA, 15 bp, Homo sapiens
ctcatggacttctca

SEQ ID NO: 1314377 - DNA, 15 bp, Homo sapiens
tctcatggacttctc

SEQ ID NO: 1314378 - DNA, 15 bp, Homo sapiens
gtctcatggacttct

SEQ ID NO: 1314379 - DNA, 15 bp, Homo sapiens
tgtctcatggacttc

SEQ ID NO: 1314380 - DNA, 15 bp, Homo sapiens
gtgtctcatggactt

SEQ ID NO: 1314381 - DNA, 15 bp, Homo sapiens
tgtgtctcatggact

SEQ ID NO: 1314382 - DNA, 15 bp, Homo sapiens
ctgtgtctcatggac

SEQ ID NO: 1314383 - DNA, 15 bp, Homo sapiens
tctgtgtctcatgga

SEQ ID NO: 1314384 - DNA, 15 bp, Homo sapiens
ttctgtgtctcatgg

SEQ ID NO: 1314385 - DNA, 15 bp, Homo sapiens
cttctgtgtctcatg

SEQ ID NO: 1314386 - DNA, 15 bp, Homo sapiens
gcttctgtgtctcat

SEQ ID NO: 1314387 - DNA, 15 bp, Homo sapiens
tgcttctgtgtctca

SEQ ID NO: 1314388 - DNA, 15 bp, Homo sapiens
ctgcttctgtgtctc

SEQ ID NO: 1314389 - DNA, 15 bp, Homo sapiens
tctgcttctgtgtct

SEQ ID NO: 1314390 - DNA, 15 bp, Homo sapiens
ctctgcttctgtgtc

SEQ ID NO: 1314391 - DNA, 15 bp, Homo sapiens
tctctgcttctgtgt

SEQ ID NO: 1314392 - DNA, 15 bp, Homo sapiens
atctctgcttctgtg

SEQ ID NO: 1314393 - DNA, 15 bp, Homo sapiens
tatctctgcttctgt

SEQ ID NO: 1314394 - DNA, 15 bp, Homo sapiens
ttatctctgcttctg

SEQ ID NO: 1314395 - DNA, 15 bp, Homo sapiens
cttatctctgcttct

SEQ ID NO: 1314396 - DNA, 15 bp, Homo sapiens
ccttatctctgcttc

SEQ ID NO: 1314397 - DNA, 15 bp, Homo sapiens
accttatctctgctt

SEQ ID NO: 1314398 - DNA, 15 bp, Homo sapiens
aaccttatctctgct

SEQ ID NO: 1314399 - DNA, 15 bp, Homo sapiens
gaaccttatctctgc

SEQ ID NO: 1314400 - DNA, 15 bp, Homo sapiens
tgaaccttatctctg

SEQ ID NO: 1314401 - DNA, 15 bp, Homo sapiens
atgaaccttatctct

SEQ ID NO: 1314402 - DNA, 15 bp, Homo sapiens
catgaaccttatctc

SEQ ID NO: 1314403 - DNA, 15 bp, Homo sapiens
tcatgaaccttatct

SEQ ID NO: 1314404 - DNA, 15 bp, Homo sapiens
atcatgaaccttatc

SEQ ID NO: 1314405 - DNA, 15 bp, Homo sapiens
catcatgaaccttat

SEQ ID NO: 1314406 - DNA, 15 bp, Homo sapiens
ccatcatgaacctta

SEQ ID NO: 1314407 - DNA, 15 bp, Homo sapiens
tccatcatgaacctt

SEQ ID NO: 1314408 - DNA, 15 bp, Homo sapiens
ctccatcatgaacct

SEQ ID NO: 1314409 - DNA, 15 bp, Homo sapiens
cctccatcatgaacc

SEQ ID NO: 1314410 - DNA, 15 bp, Homo sapiens
ccctccatcatgaac

SEQ ID NO: 1314411 - DNA, 15 bp, Homo sapiens
tccctccatcatgaa

SEQ ID NO: 1314412 - DNA, 15 bp, Homo sapiens
ttccctccatcatga

SEQ ID NO: 1314413 - DNA, 15 bp, Homo sapiens
gttccctccatcatg

SEQ ID NO: 1314414 - DNA, 15 bp, Homo sapiens
tgttccctccatcat

SEQ ID NO: 1314415 - DNA, 15 bp, Homo sapiens
ctgttccctccatca

SEQ ID NO: 1314416 - DNA, 15 bp, Homo sapiens
gctgttccctccatc

SEQ ID NO: 1314417 - DNA, 15 bp, Homo sapiens
tgctgttccctccat

SEQ ID NO: 1314418 - DNA, 15 bp, Homo sapiens
ctgctgttccctcca

SEQ ID NO: 1314419 - DNA, 15 bp, Homo sapiens
cctgctgttccctcc

SEQ ID NO: 1314420 - DNA, 15 bp, Homo sapiens
tcctgctgttccctc

SEQ ID NO: 1314421 - DNA, 15 bp, Homo sapiens
atcctgctgttccct

SEQ ID NO: 1314422 - DNA, 15 bp, Homo sapiens
catcctgctgttccc

SEQ ID NO: 1314423 - DNA, 15 bp, Homo sapiens
gcatcctgctgttcc

SEQ ID NO: 1314424 - DNA, 15 bp, Homo sapiens
ggcatcctgctgttc

SEQ ID NO: 1314425 - DNA, 15 bp, Homo sapiens
aggcatcctgctgtt

SEQ ID NO: 1314426 - DNA, 15 bp, Homo sapiens
gaggcatcctgctgt

SEQ ID NO: 1314427 - DNA, 15 bp, Homo sapiens
agaggcatcctgctg

SEQ ID NO: 1314428 - DNA, 15 bp, Homo sapiens
gagaggcatcctgct

SEQ ID NO: 1314429 - DNA, 15 bp, Homo sapiens
ggagaggcatcctgc

SEQ ID NO: 1314430 - DNA, 15 bp, Homo sapiens
gggagaggcatcctg

SEQ ID NO: 1314431 - DNA, 15 bp, Homo sapiens
tgggagaggcatcct

SEQ ID NO: 1314432 - DNA, 15 bp, Homo sapiens
ctgggagaggcatcc

SEQ ID NO: 1314433 - DNA, 15 bp, Homo sapiens
cctgggagaggcatc

SEQ ID NO: 1314434 - DNA, 15 bp, Homo sapiens
ccctgggagaggcat

SEQ ID NO: 1314435 - DNA, 15 bp, Homo sapiens
cccctgggagaggca

SEQ ID NO: 1314436 - DNA, 15 bp, Homo sapiens
tcccctgggagaggc

SEQ ID NO: 1314437 - DNA, 15 bp, Homo sapiens
ttcccctgggagagg

SEQ ID NO: 1314438 - DNA, 15 bp, Homo sapiens
gttcccctgggagag

SEQ ID NO: 1314439 - DNA, 15 bp, Homo sapiens
ggttcccctgggaga

SEQ ID NO: 1314440 - DNA, 15 bp, Homo sapiens
aggttcccctgggag

SEQ ID NO: 1314441 - DNA, 15 bp, Homo sapiens
aaggttcccctggga

SEQ ID NO: 1314442 - DNA, 15 bp, Homo sapiens
gaaggttcccctggg

SEQ ID NO: 1314443 - DNA, 15 bp, Homo sapiens
cgaaggttcccctgg

SEQ ID NO: 1314444 - DNA, 15 bp, Homo sapiens
ccgaaggttcccctg

SEQ ID NO: 1314445 - DNA, 15 bp, Homo sapiens
gccgaaggttcccct

SEQ ID NO: 1314446 - DNA, 15 bp, Homo sapiens
agccgaaggttcccc

SEQ ID NO: 1314447 - DNA, 15 bp, Homo sapiens
tagccgaaggttccc

SEQ ID NO: 1314448 - DNA, 15 bp, Homo sapiens
ttagccgaaggttcc

SEQ ID NO: 1314449 - DNA, 15 bp, Homo sapiens
attagccgaaggttc

SEQ ID NO: 1314450 - DNA, 15 bp, Homo sapiens
gattagccgaaggtt

SEQ ID NO: 1314451 - DNA, 15 bp, Homo sapiens
ggattagccgaaggt

SEQ ID NO: 1314452 - DNA, 15 bp, Homo sapiens
aggattagccgaagg

SEQ ID NO: 1314453 - DNA, 15 bp, Homo sapiens
aaggattagccgaag

SEQ ID NO: 1314454 - DNA, 15 bp, Homo sapiens
caaggattagccgaa

SEQ ID NO: 1314455 - DNA, 15 bp, Homo sapiens
tcaaggattagccga

SEQ ID NO: 1314456 - DNA, 15 bp, Homo sapiens
atcaaggattagccg

SEQ ID NO: 1314457 - DNA, 15 bp, Homo sapiens
aatcaaggattagcc

SEQ ID NO: 1314458 - DNA, 15 bp, Homo sapiens
caatcaaggattagc

SEQ ID NO: 1314459 - DNA, 15 bp, Homo sapiens
acaatcaaggattag

SEQ ID NO: 1314460 - DNA, 15 bp, Homo sapiens
tacaatcaaggatta

SEQ ID NO: 1314461 - DNA, 15 bp, Homo sapiens
atacaatcaaggatt

SEQ ID NO: 1314462 - DNA, 15 bp, Homo sapiens
aatacaatcaaggat

SEQ ID NO: 1314463 - DNA, 15 bp, Homo sapiens
taatacaatcaagga

SEQ ID NO: 1314464 - DNA, 15 bp, Homo sapiens
ctaatacaatcaagg

SEQ ID NO: 1314465 - DNA, 15 bp, Homo sapiens
actaatacaatcaag

SEQ ID NO: 1314466 - DNA, 15 bp, Homo sapiens
gactaatacaatcaa

SEQ ID NO: 1314467 - DNA, 15 bp, Homo sapiens
tgactaatacaatca

SEQ ID NO: 1314468 - DNA, 15 bp, Homo sapiens
ctgactaatacaatc

SEQ ID NO: 1314469 - DNA, 15 bp, Homo sapiens
cctgactaatacaat

SEQ ID NO: 1314470 - DNA, 15 bp, Homo sapiens
ccctgactaatacaa

SEQ ID NO: 1314471 - DNA, 15 bp, Homo sapiens
gccctgactaataca

SEQ ID NO: 1314472 - DNA, 15 bp, Homo sapiens
agccctgactaatac

SEQ ID NO: 1314473 - DNA, 15 bp, Homo sapiens
gagccctgactaata

SEQ ID NO: 1314474 - DNA, 15 bp, Homo sapiens
agagccctgactaat

SEQ ID NO: 1314475 - DNA, 15 bp, Homo sapiens
gagagccctgactaa

SEQ ID NO: 1314476 - DNA, 15 bp, Homo sapiens
ggagagccctgacta

SEQ ID NO: 1314477 - DNA, 15 bp, Homo sapiens
tggagagccctgact

SEQ ID NO: 1314478 - DNA, 15 bp, Homo sapiens
ctggagagccctgac

SEQ ID NO: 1314479 - DNA, 15 bp, Homo sapiens
actggagagccctga

SEQ ID NO: 1314480 - DNA, 15 bp, Homo sapiens
cactggagagccctg

SEQ ID NO: 1314481 - DNA, 15 bp, Homo sapiens
tcactggagagccct

SEQ ID NO: 1314482 - DNA, 15 bp, Homo sapiens
ttcactggagagccc

SEQ ID NO: 1314483 - DNA, 15 bp, Homo sapiens
tttcactggagagcc

SEQ ID NO: 1314484 - DNA, 15 bp, Homo sapiens
gtttcactggagagc

SEQ ID NO: 1314485 - DNA, 15 bp, Homo sapiens
tgtttcactggagag

SEQ ID NO: 1314486 - DNA, 15 bp, Homo sapiens
ctgtttcactggaga

SEQ ID NO: 1314487 - DNA, 15 bp, Homo sapiens
tctgtttcactggag

SEQ ID NO: 1314488 - DNA, 15 bp, Homo sapiens
ctctgtttcactgga

SEQ ID NO: 1314489 - DNA, 15 bp, Homo sapiens
actctgtttcactgg

SEQ ID NO: 1314490 - DNA, 15 bp, Homo sapiens
gactctgtttcactg

SEQ ID NO: 1314491 - DNA, 15 bp, Homo sapiens
tgactctgtttcact

SEQ ID NO: 1314492 - DNA, 15 bp, Homo sapiens
ttgactctgtttcac

SEQ ID NO: 1314493 - DNA, 15 bp, Homo sapiens
attgactctgtttca

SEQ ID NO: 1314494 - DNA, 15 bp, Homo sapiens
tattgactctgtttc

SEQ ID NO: 1314495 - DNA, 15 bp, Homo sapiens
ctattgactctgttt

SEQ ID NO: 1314496 - DNA, 15 bp, Homo sapiens
cctattgactctgtt

SEQ ID NO: 1314497 - DNA, 15 bp, Homo sapiens
tcctattgactctgt

SEQ ID NO: 1314498 - DNA, 15 bp, Homo sapiens
ttcctattgactctg

SEQ ID NO: 1314499 - DNA, 15 bp, Homo sapiens
tttcctattgactct

SEQ ID NO: 1314500 - DNA, 15 bp, Homo sapiens
atttcctattgactc

SEQ ID NO: 1314501 - DNA, 15 bp, Homo sapiens
tatttcctattgact

SEQ ID NO: 1314502 - DNA, 15 bp, Homo sapiens
atatttcctattgac

SEQ ID NO: 1314503 - DNA, 15 bp, Homo sapiens
tatatttcctattga

SEQ ID NO: 1314504 - DNA, 15 bp, Homo sapiens
atatatttcctattg

SEQ ID NO: 1314505 - DNA, 15 bp, Homo sapiens
tatatatttcctatt

SEQ ID NO: 1314506 - DNA, 15 bp, Homo sapiens
atatatatttcctat

SEQ ID NO: 1314507 - DNA, 15 bp, Homo sapiens
tatatatatttccta

SEQ ID NO: 1314508 - DNA, 15 bp, Homo sapiens
atatatatatttcct

SEQ ID NO: 1314509 - DNA, 15 bp, Homo sapiens
gatatatatatttcc

SEQ ID NO: 1314510 - DNA, 15 bp, Homo sapiens
tgatatatatatttc

SEQ ID NO: 1314511 - DNA, 15 bp, Homo sapiens
ttgatatatatattt

SEQ ID NO: 1314512 - DNA, 15 bp, Homo sapiens
attgatatatatatt

SEQ ID NO: 1314513 - DNA, 15 bp, Homo sapiens
tattgatatatatat

SEQ ID NO: 1314514 - DNA, 15 bp, Homo sapiens
atattgatatatata

SEQ ID NO: 1314515 - DNA, 15 bp, Homo sapiens
tatattgatatatat

SEQ ID NO: 1314516 - DNA, 15 bp, Homo sapiens
atatattgatatata

SEQ ID NO: 1314517 - DNA, 15 bp, Homo sapiens
gatatattgatatat

SEQ ID NO: 1314518 - DNA, 15 bp, Homo sapiens
agatatattgatata

SEQ ID NO: 1314519 - DNA, 15 bp, Homo sapiens
tagatatattgatat

SEQ ID NO: 1314520 - DNA, 15 bp, Homo sapiens
ttagatatattgata

SEQ ID NO: 1314521 - DNA, 15 bp, Homo sapiens
attagatatattgat

SEQ ID NO: 1314522 - DNA, 15 bp, Homo sapiens
tattagatatattga

SEQ ID NO: 1314523 - DNA, 15 bp, Homo sapiens
gtattagatatattg

SEQ ID NO: 1314524 - DNA, 15 bp, Homo sapiens
tgtattagatatatt

SEQ ID NO: 1314525 - DNA, 15 bp, Homo sapiens
ctgtattagatatat

SEQ ID NO: 1314526 - DNA, 15 bp, Homo sapiens
tctgtattagatata

SEQ ID NO: 1314527 - DNA, 15 bp, Homo sapiens
atctgtattagatat

SEQ ID NO: 1314528 - DNA, 15 bp, Homo sapiens
tatctgtattagata

SEQ ID NO: 1314529 - DNA, 15 bp, Homo sapiens
atatctgtattagat

SEQ ID NO: 1314530 - DNA, 15 bp, Homo sapiens
tatatctgtattaga

SEQ ID NO: 1314531 - DNA, 15 bp, Homo sapiens
atatatctgtattag

SEQ ID NO: 1314532 - DNA, 15 bp, Homo sapiens
tatatatctgtatta

SEQ ID NO: 1314533 - DNA, 15 bp, Homo sapiens
atatatatctgtatt

SEQ ID NO: 1314534 - DNA, 15 bp, Homo sapiens
gatatatatctgtat

SEQ ID NO: 1314535 - DNA, 15 bp, Homo sapiens
cgatatatatctgta

SEQ ID NO: 1314536 - DNA, 15 bp, Homo sapiens
ccgatatatatctgt

SEQ ID NO: 1314537 - DNA, 15 bp, Homo sapiens
accgatatatatctg

SEQ ID NO: 1314538 - DNA, 15 bp, Homo sapiens
taccgatatatatct

SEQ ID NO: 1314539 - DNA, 15 bp, Homo sapiens
ataccgatatatatc

SEQ ID NO: 1314540 - DNA, 15 bp, Homo sapiens
gataccgatatatat

SEQ ID NO: 1314541 - DNA, 15 bp, Homo sapiens
agataccgatatata

SEQ ID NO: 1314542 - DNA, 15 bp, Homo sapiens
tagataccgatatat

SEQ ID NO: 1314543 - DNA, 15 bp, Homo sapiens
atagataccgatata

SEQ ID NO: 1314544 - DNA, 15 bp, Homo sapiens
tatagataccgatat

SEQ ID NO: 1314545 - DNA, 15 bp, Homo sapiens
atatagataccgata

SEQ ID NO: 1314546 - DNA, 15 bp, Homo sapiens
tatatagataccgat

SEQ ID NO: 1314547 - DNA, 15 bp, Homo sapiens
atatatagataccga

SEQ ID NO: 1314548 - DNA, 15 bp, Homo sapiens
aatatatagataccg

SEQ ID NO: 1314549 - DNA, 15 bp, Homo sapiens
caatatatagatacc

SEQ ID NO: 1314550 - DNA, 15 bp, Homo sapiens
tcaatatatagatac

SEQ ID NO: 1314551 - DNA, 15 bp, Homo sapiens
atcaatatatagata

SEQ ID NO: 1314552 - DNA, 15 bp, Homo sapiens
tatcaatatatagat

SEQ ID NO: 1314553 - DNA, 15 bp, Homo sapiens
gtatcaatatataga

SEQ ID NO: 1314554 - DNA, 15 bp, Homo sapiens
tgtatcaatatatag

SEQ ID NO: 1314555 - DNA, 15 bp, Homo sapiens
atgtatcaatatata

SEQ ID NO: 1314556 - DNA, 15 bp, Homo sapiens
gatgtatcaatatat

SEQ ID NO: 1314557 - DNA, 15 bp, Homo sapiens
agatgtatcaatata

SEQ ID NO: 1314558 - DNA, 15 bp, Homo sapiens
tagatgtatcaatat

SEQ ID NO: 1314559 - DNA, 15 bp, Homo sapiens
atagatgtatcaata

SEQ ID NO: 1314560 - DNA, 15 bp, Homo sapiens
gatagatgtatcaat

SEQ ID NO: 1314561 - DNA, 15 bp, Homo sapiens
agatagatgtatcaa

SEQ ID NO: 1314562 - DNA, 15 bp, Homo sapiens
tagatagatgtatca

SEQ ID NO: 1314563 - DNA, 15 bp, Homo sapiens
atagatagatgtatc

SEQ ID NO: 1314564 - DNA, 15 bp, Homo sapiens
gatagatagatgtat

SEQ ID NO: 1314565 - DNA, 15 bp, Homo sapiens
agatagatagatgta

SEQ ID NO: 1314566 - DNA, 15 bp, Homo sapiens
tagatagatagatgt

SEQ ID NO: 1314567 - DNA, 15 bp, Homo sapiens
atagatagatagatg

SEQ ID NO: 1314568 - DNA, 15 bp, Homo sapiens
gatagatagatagat

SEQ ID NO: 1314569 - DNA, 15 bp, Homo sapiens
agatagatagataga

SEQ ID NO: 1314570 - DNA, 15 bp, Homo sapiens
tagatagatagatag

SEQ ID NO: 1314571 - DNA, 15 bp, Homo sapiens
atagatagatagata

SEQ ID NO: 1314572 - DNA, 15 bp, Homo sapiens
gagatagatagatag

SEQ ID NO: 1314573 - DNA, 15 bp, Homo sapiens
agagatagatagata

SEQ ID NO: 1314574 - DNA, 15 bp, Homo sapiens
tagagatagatagat

SEQ ID NO: 1314575 - DNA, 15 bp, Homo sapiens
ctagagatagataga

SEQ ID NO: 1314576 - DNA, 15 bp, Homo sapiens
tctagagatagatag

SEQ ID NO: 1314577 - DNA, 15 bp, Homo sapiens
ctctagagatagata

SEQ ID NO: 1314578 - DNA, 15 bp, Homo sapiens
tctctagagatagat

SEQ ID NO: 1314579 - DNA, 15 bp, Homo sapiens
ctctctagagataga

SEQ ID NO: 1314580 - DNA, 15 bp, Homo sapiens
tctctctagagatag

SEQ ID NO: 1314581 - DNA, 15 bp, Homo sapiens
atctctctagagata

SEQ ID NO: 1314582 - DNA, 15 bp, Homo sapiens
aatctctctagagat

SEQ ID NO: 1314583 - DNA, 15 bp, Homo sapiens
aaatctctctagaga

SEQ ID NO: 1314584 - DNA, 15 bp, Homo sapiens
taaatctctctagag

SEQ ID NO: 1314585 - DNA, 15 bp, Homo sapiens
ataaatctctctaga

SEQ ID NO: 1314586 - DNA, 15 bp, Homo sapiens
aataaatctctctag

SEQ ID NO: 1314587 - DNA, 15 bp, Homo sapiens
taataaatctctcta

SEQ ID NO: 1314588 - DNA, 15 bp, Homo sapiens
ctaataaatctctct

SEQ ID NO: 1314589 - DNA, 15 bp, Homo sapiens
cctaataaatctctc

SEQ ID NO: 1314590 - DNA, 15 bp, Homo sapiens
tcctaataaatctct

SEQ ID NO: 1314591 - DNA, 15 bp, Homo sapiens
ttcctaataaatctc

SEQ ID NO: 1314592 - DNA, 15 bp, Homo sapiens
cttcctaataaatct

SEQ ID NO: 1314593 - DNA, 15 bp, Homo sapiens
tcttcctaataaatc

SEQ ID NO: 1314594 - DNA, 15 bp, Homo sapiens
ttcttcctaataaat

SEQ ID NO: 1314595 - DNA, 15 bp, Homo sapiens
attcttcctaataaa

SEQ ID NO: 1314596 - DNA, 15 bp, Homo sapiens
aattcttcctaataa

SEQ ID NO: 1314597 - DNA, 15 bp, Homo sapiens
caattcttcctaata

SEQ ID NO: 1314598 - DNA, 15 bp, Homo sapiens
ccaattcttcctaat

SEQ ID NO: 1314599 - DNA, 15 bp, Homo sapiens
gccaattcttcctaa

SEQ ID NO: 1314600 - DNA, 15 bp, Homo sapiens
agccaattcttccta

SEQ ID NO: 1314601 - DNA, 15 bp, Homo sapiens
gagccaattcttcct

SEQ ID NO: 1314602 - DNA, 15 bp, Homo sapiens
tgagccaattcttcc

SEQ ID NO: 1314603 - DNA, 15 bp, Homo sapiens
atgagccaattcttc

SEQ ID NO: 1314604 - DNA, 15 bp, Homo sapiens
aatgagccaattctt

SEQ ID NO: 1314605 - DNA, 15 bp, Homo sapiens
aaatgagccaattct

SEQ ID NO: 1314606 - DNA, 15 bp, Homo sapiens
caaatgagccaattc

SEQ ID NO: 1314607 - DNA, 15 bp, Homo sapiens
tcaaatgagccaatt

SEQ ID NO: 1314608 - DNA, 15 bp, Homo sapiens
atcaaatgagccaat

SEQ ID NO: 1314609 - DNA, 15 bp, Homo sapiens
aatcaaatgagccaa

SEQ ID NO: 1314610 - DNA, 15 bp, Homo sapiens
taatcaaatgagcca

SEQ ID NO: 1314611 - DNA, 15 bp, Homo sapiens
gtaatcaaatgagcc

SEQ ID NO: 1314612 - DNA, 15 bp, Homo sapiens
tgtaatcaaatgagc

SEQ ID NO: 1314613 - DNA, 15 bp, Homo sapiens
ctgtaatcaaatgag

SEQ ID NO: 1314614 - DNA, 15 bp, Homo sapiens
tctgtaatcaaatga

SEQ ID NO: 1314615 - DNA, 15 bp, Homo sapiens
ctctgtaatcaaatg

SEQ ID NO: 1314616 - DNA, 15 bp, Homo sapiens
cctctgtaatcaaat

SEQ ID NO: 1314617 - DNA, 15 bp, Homo sapiens
gcctctgtaatcaaa

SEQ ID NO: 1314618 - DNA, 15 bp, Homo sapiens
agcctctgtaatcaa

SEQ ID NO: 1314619 - DNA, 15 bp, Homo sapiens
cagcctctgtaatca

SEQ ID NO: 1314620 - DNA, 15 bp, Homo sapiens
ccagcctctgtaatc

SEQ ID NO: 1314621 - DNA, 15 bp, Homo sapiens
cccagcctctgtaat

SEQ ID NO: 1314622 - DNA, 15 bp, Homo sapiens
tcccagcctctgtaa

SEQ ID NO: 1314623 - DNA, 15 bp, Homo sapiens
ttcccagcctctgta

SEQ ID NO: 1314624 - DNA, 15 bp, Homo sapiens
cttcccagcctctgt

SEQ ID NO: 1314625 - DNA, 15 bp, Homo sapiens
acttcccagcctctg

SEQ ID NO: 1314626 - DNA, 15 bp, Homo sapiens
gacttcccagcctct

SEQ ID NO: 1314627 - DNA, 15 bp, Homo sapiens
ggacttcccagcctc

SEQ ID NO: 1314628 - DNA, 15 bp, Homo sapiens
gggacttcccagcct

SEQ ID NO: 1314629 - DNA, 15 bp, Homo sapiens
tgggacttcccagcc

SEQ ID NO: 1314630 - DNA, 15 bp, Homo sapiens
gtgggacttcccagc

SEQ ID NO: 1314631 - DNA, 15 bp, Homo sapiens
agtgggacttcccag

SEQ ID NO: 1314632 - DNA, 15 bp, Homo sapiens
cagtgggacttccca

SEQ ID NO: 1314633 - DNA, 15 bp, Homo sapiens
gcagtgggacttccc

SEQ ID NO: 1314634 - DNA, 15 bp, Homo sapiens
ggcagtgggacttcc

SEQ ID NO: 1314635 - DNA, 15 bp, Homo sapiens
aggcagtgggacttc

SEQ ID NO: 1314636 - DNA, 15 bp, Homo sapiens
caggcagtgggactt

SEQ ID NO: 1314637 - DNA, 15 bp, Homo sapiens
gcaggcagtgggact

SEQ ID NO: 1314638 - DNA, 15 bp, Homo sapiens
ggcaggcagtgggac

SEQ ID NO: 1314639 - DNA, 15 bp, Homo sapiens
tggcaggcagtggga

SEQ ID NO: 1314640 - DNA, 15 bp, Homo sapiens
gtggcaggcagtggg

SEQ ID NO: 1314641 - DNA, 15 bp, Homo sapiens
ggtggcaggcagtgg

SEQ ID NO: 1314642 - DNA, 15 bp, Homo sapiens
tggtggcaggcagtg

SEQ ID NO: 1314643 - DNA, 15 bp, Homo sapiens
ctggtggcaggcagt

SEQ ID NO: 1314644 - DNA, 15 bp, Homo sapiens
gctggtggcaggcag

SEQ ID NO: 1314645 - DNA, 15 bp, Homo sapiens
tgctggtggcaggca

SEQ ID NO: 1314646 - DNA, 15 bp, Homo sapiens
ttgctggtggcaggc

SEQ ID NO: 1314647 - DNA, 15 bp, Homo sapiens
cttgctggtggcagg

SEQ ID NO: 1314648 - DNA, 15 bp, Homo sapiens
gcttgctggtggcag

SEQ ID NO: 1314649 - DNA, 15 bp, Homo sapiens
agcttgctggtggca

SEQ ID NO: 1314650 - DNA, 15 bp, Homo sapiens
cagcttgctggtggc

SEQ ID NO: 1314651 - DNA, 15 bp, Homo sapiens
ccagcttgctggtgg

SEQ ID NO: 1314652 - DNA, 15 bp, Homo sapiens
tccagcttgctggtg

SEQ ID NO: 1314653 - DNA, 15 bp, Homo sapiens
ctccagcttgctggt

SEQ ID NO: 1314654 - DNA, 15 bp, Homo sapiens
tctccagcttgctgg

SEQ ID NO: 1314655 - DNA, 15 bp, Homo sapiens
gtctccagcttgctg

SEQ ID NO: 1314656 - DNA, 15 bp, Homo sapiens
ggtctccagcttgct

SEQ ID NO: 1314657 - DNA, 15 bp, Homo sapiens
gggtctccagcttgc

SEQ ID NO: 1314658 - DNA, 15 bp, Homo sapiens
tgggtctccagcttg

SEQ ID NO: 1314659 - DNA, 15 bp, Homo sapiens
ctgggtctccagctt

SEQ ID NO: 1314660 - DNA, 15 bp, Homo sapiens
cctgggtctccagct

SEQ ID NO: 1314661 - DNA, 15 bp, Homo sapiens
tcctgggtctccagc

SEQ ID NO: 1314662 - DNA, 15 bp, Homo sapiens
ttcctgggtctccag

SEQ ID NO: 1314663 - DNA, 15 bp, Homo sapiens
tttcctgggtctcca

SEQ ID NO: 1314664 - DNA, 15 bp, Homo sapiens
ctttcctgggtctcc

SEQ ID NO: 1314665 - DNA, 15 bp, Homo sapiens
gctttcctgggtctc

SEQ ID NO: 1314666 - DNA, 15 bp, Homo sapiens
agctttcctgggtct

SEQ ID NO: 1314667 - DNA, 15 bp, Homo sapiens
cagctttcctgggtc

SEQ ID NO: 1314668 - DNA, 15 bp, Homo sapiens
ccagctttcctgggt

SEQ ID NO: 1314669 - DNA, 15 bp, Homo sapiens
accagctttcctggg

SEQ ID NO: 1314670 - DNA, 15 bp, Homo sapiens
caccagctttcctgg

SEQ ID NO: 1314671 - DNA, 15 bp, Homo sapiens
ccaccagctttcctg

SEQ ID NO: 1314672 - DNA, 15 bp, Homo sapiens
accaccagctttcct

SEQ ID NO: 1314673 - DNA, 15 bp, Homo sapiens
caccaccagctttcc

SEQ ID NO: 1314674 - DNA, 15 bp, Homo sapiens
acaccaccagctttc

SEQ ID NO: 1314675 - DNA, 15 bp, Homo sapiens
aacaccaccagcttt

SEQ ID NO: 1314676 - DNA, 15 bp, Homo sapiens
aaacaccaccagctt

SEQ ID NO: 1314677 - DNA, 15 bp, Homo sapiens
caaacaccaccagct

SEQ ID NO: 1314678 - DNA, 15 bp, Homo sapiens
tcaaacaccaccagc

SEQ ID NO: 1314679 - DNA, 15 bp, Homo sapiens
ctcaaacaccaccag

SEQ ID NO: 1314680 - DNA, 15 bp, Homo sapiens
actcaaacaccacca

SEQ ID NO: 1314681 - DNA, 15 bp, Homo sapiens
gactcaaacaccacc

SEQ ID NO: 1314682 - DNA, 15 bp, Homo sapiens
agactcaaacaccac

SEQ ID NO: 1314683 - DNA, 15 bp, Homo sapiens
cagactcaaacacca

SEQ ID NO: 1314684 - DNA, 15 bp, Homo sapiens
tcagactcaaacacc

SEQ ID NO: 1314685 - DNA, 15 bp, Homo sapiens
ctcagactcaaacac

SEQ ID NO: 1314686 - DNA, 15 bp, Homo sapiens
cctcagactcaaaca

SEQ ID NO: 1314687 - DNA, 15 bp, Homo sapiens
ccctcagactcaaac

SEQ ID NO: 1314688 - DNA, 15 bp, Homo sapiens
gccctcagactcaaa

SEQ ID NO: 1314689 - DNA, 15 bp, Homo sapiens
ggccctcagactcaa

SEQ ID NO: 1314690 - DNA, 15 bp, Homo sapiens
tggccctcagactca

SEQ ID NO: 1314691 - DNA, 15 bp, Homo sapiens
ctggccctcagactc

SEQ ID NO: 1314692 - DNA, 15 bp, Homo sapiens
tctggccctcagact

SEQ ID NO: 1314693 - DNA, 15 bp, Homo sapiens
ctctggccctcagac

SEQ ID NO: 1314694 - DNA, 15 bp, Homo sapiens
tctctggccctcaga

SEQ ID NO: 1314695 - DNA, 15 bp, Homo sapiens
ctctctggccctcag

SEQ ID NO: 1314696 - DNA, 15 bp, Homo sapiens
actctctggccctca

SEQ ID NO: 1314697 - DNA, 15 bp, Homo sapiens
gactctctggccctc

SEQ ID NO: 1314698 - DNA, 15 bp, Homo sapiens
tgactctctggccct

SEQ ID NO: 1314699 - DNA, 15 bp, Homo sapiens
atgactctctggccc

SEQ ID NO: 1314700 - DNA, 15 bp, Homo sapiens
tatgactctctggcc

SEQ ID NO: 1314701 - DNA, 15 bp, Homo sapiens
ctatgactctctggc

SEQ ID NO: 1314702 - DNA, 15 bp, Homo sapiens
tctatgactctctgg

SEQ ID NO: 1314703 - DNA, 15 bp, Homo sapiens
ctctatgactctctg

SEQ ID NO: 1314704 - DNA, 15 bp, Homo sapiens
gctctatgactctct

SEQ ID NO: 1314705 - DNA, 15 bp, Homo sapiens
ggctctatgactctc

SEQ ID NO: 1314706 - DNA, 15 bp, Homo sapiens
tggctctatgactct

SEQ ID NO: 1314707 - DNA, 15 bp, Homo sapiens
ttggctctatgactc

SEQ ID NO: 1314708 - DNA, 15 bp, Homo sapiens
attggctctatgact

SEQ ID NO: 1314709 - DNA, 15 bp, Homo sapiens
cattggctctatgac

SEQ ID NO: 1314710 - DNA, 15 bp, Homo sapiens
acattggctctatga

SEQ ID NO: 1314711 - DNA, 15 bp, Homo sapiens
gacattggctctatg

SEQ ID NO: 1314712 - DNA, 15 bp, Homo sapiens
tgacattggctctat

SEQ ID NO: 1314713 - DNA, 15 bp, Homo sapiens
ttgacattggctcta

SEQ ID NO: 1314714 - DNA, 15 bp, Homo sapiens
gttgacattggctct

SEQ ID NO: 1314715 - DNA, 15 bp, Homo sapiens
ggttgacattggctc

SEQ ID NO: 1314716 - DNA, 15 bp, Homo sapiens
gggttgacattggct

SEQ ID NO: 1314717 - DNA, 15 bp, Homo sapiens
ggggttgacattggc

SEQ ID NO: 1314718 - DNA, 15 bp, Homo sapiens
tggggttgacattgg

SEQ ID NO: 1314719 - DNA, 15 bp, Homo sapiens
ctggggttgacattg

SEQ ID NO: 1314720 - DNA, 15 bp, Homo sapiens
actggggttgacatt

SEQ ID NO: 1314721 - DNA, 15 bp, Homo sapiens
gactggggttgacat

SEQ ID NO: 1314722 - DNA, 15 bp, Homo sapiens
ggactggggttgaca

SEQ ID NO: 1314723 - DNA, 15 bp, Homo sapiens
tggactggggttgac

SEQ ID NO: 1314724 - DNA, 15 bp, Homo sapiens
ttggactggggttga

SEQ ID NO: 1314725 - DNA, 15 bp, Homo sapiens
cttggactggggttg

SEQ ID NO: 1314726 - DNA, 15 bp, Homo sapiens
ccttggactggggtt

SEQ ID NO: 1314727 - DNA, 15 bp, Homo sapiens
tccttggactggggt

SEQ ID NO: 1314728 - DNA, 15 bp, Homo sapiens
atccttggactgggg

SEQ ID NO: 1314729 - DNA, 15 bp, Homo sapiens
tatccttggactggg

SEQ ID NO: 1314730 - DNA, 15 bp, Homo sapiens
ctatccttggactgg

SEQ ID NO: 1314731 - DNA, 15 bp, Homo sapiens
cctatccttggactg

SEQ ID NO: 1314732 - DNA, 15 bp, Homo sapiens
tcctatccttggact

SEQ ID NO: 1314733 - DNA, 15 bp, Homo sapiens
ctcctatccttggac

SEQ ID NO: 1314734 - DNA, 15 bp, Homo sapiens
tctcctatccttgga

SEQ ID NO: 1314735 - DNA, 15 bp, Homo sapiens
ttctcctatccttgg

SEQ ID NO: 1314736 - DNA, 15 bp, Homo sapiens
attctcctatccttg

SEQ ID NO: 1314737 - DNA, 15 bp, Homo sapiens
cattctcctatcctt

SEQ ID NO: 1314738 - DNA, 15 bp, Homo sapiens
tcattctcctatcct

SEQ ID NO: 1314739 - DNA, 15 bp, Homo sapiens
gtcattctcctatcc

SEQ ID NO: 1314740 - DNA, 15 bp, Homo sapiens
tgtcattctcctatc

SEQ ID NO: 1314741 - DNA, 15 bp, Homo sapiens
ttgtcattctcctat

SEQ ID NO: 1314742 - DNA, 15 bp, Homo sapiens
cttgtcattctccta

SEQ ID NO: 1314743 - DNA, 15 bp, Homo sapiens
tcttgtcattctcct

SEQ ID NO: 1314744 - DNA, 15 bp, Homo sapiens
ctcttgtcattctcc

SEQ ID NO: 1314745 - DNA, 15 bp, Homo sapiens
tctcttgtcattctc

SEQ ID NO: 1314746 - DNA, 15 bp, Homo sapiens
atctcttgtcattct

SEQ ID NO: 1314747 - DNA, 15 bp, Homo sapiens
catctcttgtcattc

SEQ ID NO: 1314748 - DNA, 15 bp, Homo sapiens
gcatctcttgtcatt

SEQ ID NO: 1314749 - DNA, 15 bp, Homo sapiens
ggcatctcttgtcat

SEQ ID NO: 1314750 - DNA, 15 bp, Homo sapiens
gggcatctcttgtca

SEQ ID NO: 1314751 - DNA, 15 bp, Homo sapiens
tgggcatctcttgtc

SEQ ID NO: 1314752 - DNA, 15 bp, Homo sapiens
ctgggcatctcttgt

SEQ ID NO: 1314753 - DNA, 15 bp, Homo sapiens
actgggcatctcttg

SEQ ID NO: 1314754 - DNA, 15 bp, Homo sapiens
aactgggcatctctt

SEQ ID NO: 1314755 - DNA, 15 bp, Homo sapiens
gaactgggcatctct

SEQ ID NO: 1314756 - DNA, 15 bp, Homo sapiens
tgaactgggcatctc

SEQ ID NO: 1314757 - DNA, 15 bp, Homo sapiens
ttgaactgggcatct

SEQ ID NO: 1314758 - DNA, 15 bp, Homo sapiens
cttgaactgggcatc

SEQ ID NO: 1314759 - DNA, 15 bp, Homo sapiens
gcttgaactgggcat

SEQ ID NO: 1314760 - DNA, 15 bp, Homo sapiens
ggcttgaactgggca

SEQ ID NO: 1314761 - DNA, 15 bp, Homo sapiens
cggcttgaactgggc

SEQ ID NO: 1314762 - DNA, 15 bp, Homo sapiens
ccggcttgaactggg

SEQ ID NO: 1314763 - DNA, 15 bp, Homo sapiens
gccggcttgaactgg

SEQ ID NO: 1314764 - DNA, 15 bp, Homo sapiens
tgccggcttgaactg

SEQ ID NO: 1314765 - DNA, 15 bp, Homo sapiens
ctgccggcttgaact

SEQ ID NO: 1314766 - DNA, 15 bp, Homo sapiens
cctgccggcttgaac

SEQ ID NO: 1314767 - DNA, 15 bp, Homo sapiens
tcctgccggcttgaa

SEQ ID NO: 1314768 - DNA, 15 bp, Homo sapiens
ttcctgccggcttga

SEQ ID NO: 1314769 - DNA, 15 bp, Homo sapiens
tttcctgccggcttg

SEQ ID NO: 1314770 - DNA, 15 bp, Homo sapiens
ctttcctgccggctt

SEQ ID NO: 1314771 - DNA, 15 bp, Homo sapiens
tctttcctgccggct

SEQ ID NO: 1314772 - DNA, 15 bp, Homo sapiens
ttctttcctgccggc

SEQ ID NO: 1314773 - DNA, 15 bp, Homo sapiens
cttctttcctgccgg

SEQ ID NO: 1314774 - DNA, 15 bp, Homo sapiens
gcttctttcctgccg

SEQ ID NO: 1314775 - DNA, 15 bp, Homo sapiens
tgcttctttcctgcc

SEQ ID NO: 1314776 - DNA, 15 bp, Homo sapiens
ttgcttctttcctgc

SEQ ID NO: 1314777 - DNA, 15 bp, Homo sapiens
tttgcttctttcctg

SEQ ID NO: 1314778 - DNA, 15 bp, Homo sapiens
ttttgcttctttcct

SEQ ID NO: 1314779 - DNA, 15 bp, Homo sapiens
cttttgcttctttcc

SEQ ID NO: 1314780 - DNA, 15 bp, Homo sapiens
ccttttgcttctttc

SEQ ID NO: 1314781 - DNA, 15 bp, Homo sapiens
cccttttgcttcttt

SEQ ID NO: 1314782 - DNA, 15 bp, Homo sapiens
gtcccttttgcttct

SEQ ID NO: 1314783 - DNA, 15 bp, Homo sapiens
tgtcccttttgcttc

SEQ ID NO: 1314784 - DNA, 15 bp, Homo sapiens
ttgtcccttttgctt

SEQ ID NO: 1314785 - DNA, 15 bp, Homo sapiens
tttgtcccttttgct

SEQ ID NO: 1314786 - DNA, 15 bp, Homo sapiens
gtttgtcccttttgc

SEQ ID NO: 1314787 - DNA, 15 bp, Homo sapiens
cgtttgtcccttttg

SEQ ID NO: 1314788 - DNA, 15 bp, Homo sapiens
gcgtttgtccctttt

SEQ ID NO: 1314789 - DNA, 15 bp, Homo sapiens
ggcgtttgtcccttt

SEQ ID NO: 1314790 - DNA, 15 bp, Homo sapiens
aggcgtttgtccctt

SEQ ID NO: 1314791 - DNA, 15 bp, Homo sapiens
gaggcgtttgtccct

SEQ ID NO: 1314792 - DNA, 15 bp, Homo sapiens
agaggcgtttgtccc

SEQ ID NO: 1314793 - DNA, 15 bp, Homo sapiens
cagaggcgtttgtcc

SEQ ID NO: 1314794 - DNA, 15 bp, Homo sapiens
acagaggcgtttgtc

SEQ ID NO: 1314795 - DNA, 15 bp, Homo sapiens
gacagaggcgtttgt

SEQ ID NO: 1314796 - DNA, 15 bp, Homo sapiens
ggacagaggcgtttg

SEQ ID NO: 1314797 - DNA, 15 bp, Homo sapiens
aggacagaggcgttt

SEQ ID NO: 1314798 - DNA, 15 bp, Homo sapiens
gaggacagaggcgtt

SEQ ID NO: 1314799 - DNA, 15 bp, Homo sapiens
agaggacagaggcgt

SEQ ID NO: 1314800 - DNA, 15 bp, Homo sapiens
cagaggacagaggcg

SEQ ID NO: 1314801 - DNA, 15 bp, Homo sapiens
acagaggacagaggc

SEQ ID NO: 1314802 - DNA, 15 bp, Homo sapiens
aacagaggacagagg

SEQ ID NO: 1314803 - DNA, 15 bp, Homo sapiens
aaacagaggacagag

SEQ ID NO: 1314804 - DNA, 15 bp, Homo sapiens
aaaacagaggacaga

SEQ ID NO: 1314805 - DNA, 15 bp, Homo sapiens
taaaacagaggacag

SEQ ID NO: 1314806 - DNA, 15 bp, Homo sapiens
ataaaacagaggaca

SEQ ID NO: 1314807 - DNA, 15 bp, Homo sapiens
aataaaacagaggac

SEQ ID NO: 1314808 - DNA, 15 bp, Homo sapiens
caataaaacagagga

SEQ ID NO: 1314809 - DNA, 15 bp, Homo sapiens
acaataaaacagagg

SEQ ID NO: 1314810 - DNA, 15 bp, Homo sapiens
aacaataaaacagag

SEQ ID NO: 1314811 - DNA, 15 bp, Homo sapiens
gaacaataaaacaga

SEQ ID NO: 1314812 - DNA, 15 bp, Homo sapiens
agaacaataaaacag

SEQ ID NO: 1314813 - DNA, 15 bp, Homo sapiens
gagaacaataaaaca

SEQ ID NO: 1314814 - DNA, 15 bp, Homo sapiens
agagaacaataaaac

SEQ ID NO: 1314815 - DNA, 15 bp, Homo sapiens
aagagaacaataaaa

SEQ ID NO: 1314816 - DNA, 15 bp, Homo sapiens
gaagagaacaataaa

SEQ ID NO: 1314817 - DNA, 15 bp, Homo sapiens
tgaagagaacaataa

SEQ ID NO: 1314818 - DNA, 15 bp, Homo sapiens
ctgaagagaacaata

SEQ ID NO: 1314819 - DNA, 15 bp, Homo sapiens
tctgaagagaacaat

SEQ ID NO: 1314820 - DNA, 15 bp, Homo sapiens
gtctgaagagaacaa

SEQ ID NO: 1314821 - DNA, 15 bp, Homo sapiens
ggtctgaagagaaca

SEQ ID NO: 1314822 - DNA, 15 bp, Homo sapiens
gggtctgaagagaac

SEQ ID NO: 1314823 - DNA, 15 bp, Homo sapiens
agggtctgaagagaa

SEQ ID NO: 1314824 - DNA, 15 bp, Homo sapiens
gagggtctgaagaga

SEQ ID NO: 1314825 - DNA, 15 bp, Homo sapiens
tgagggtctgaagag

SEQ ID NO: 1314826 - DNA, 15 bp, Homo sapiens
ttgagggtctgaaga

SEQ ID NO: 1314827 - DNA, 15 bp, Homo sapiens
tttgagggtctgaag

SEQ ID NO: 1314828 - DNA, 15 bp, Homo sapiens
ctttgagggtctgaa

SEQ ID NO: 1314829 - DNA, 15 bp, Homo sapiens
cctttgagggtctga

SEQ ID NO: 1314830 - DNA, 15 bp, Homo sapiens
tcctttgagggtctg

SEQ ID NO: 1314831 - DNA, 15 bp, Homo sapiens
gtcctttgagggtct

SEQ ID NO: 1314832 - DNA, 15 bp, Homo sapiens
agtcctttgagggtc

SEQ ID NO: 1314833 - DNA, 15 bp, Homo sapiens
cagtcctttgagggt

SEQ ID NO: 1314834 - DNA, 15 bp, Homo sapiens
ccagtcctttgaggg

SEQ ID NO: 1314835 - DNA, 15 bp, Homo sapiens
tccagtcctttgagg

SEQ ID NO: 1314836 - DNA, 15 bp, Homo sapiens
atccagtcctttgag

SEQ ID NO: 1314837 - DNA, 15 bp, Homo sapiens
catccagtcctttga

SEQ ID NO: 1314838 - DNA, 15 bp, Homo sapiens
tcatccagtcctttg

SEQ ID NO: 1314839 - DNA, 15 bp, Homo sapiens
atcatccagtccttt

SEQ ID NO: 1314840 - DNA, 15 bp, Homo sapiens
catcatccagtcctt

SEQ ID NO: 1314841 - DNA, 15 bp, Homo sapiens
gcatcatccagtcct

SEQ ID NO: 1314842 - DNA, 15 bp, Homo sapiens
ggcatcatccagtcc

SEQ ID NO: 1314843 - DNA, 15 bp, Homo sapiens
gggcatcatccagtc

SEQ ID NO: 1314844 - DNA, 15 bp, Homo sapiens
tgggcatcatccagt

SEQ ID NO: 1314845 - DNA, 15 bp, Homo sapiens
gtgggcatcatccag

SEQ ID NO: 1314846 - DNA, 15 bp, Homo sapiens
agtgggcatcatcca

SEQ ID NO: 1314847 - DNA, 15 bp, Homo sapiens
gagtgggcatcatcc

SEQ ID NO: 1314848 - DNA, 15 bp, Homo sapiens
ggagtgggcatcatc

SEQ ID NO: 1314849 - DNA, 15 bp, Homo sapiens
gggagtgggcatcat

SEQ ID NO: 1314850 - DNA, 15 bp, Homo sapiens
tgggagtgggcatca

SEQ ID NO: 1314851 - DNA, 15 bp, Homo sapiens
gtgggagtgggcatc

SEQ ID NO: 1314852 - DNA, 15 bp, Homo sapiens
tgtgggagtgggcat

SEQ ID NO: 1314853 - DNA, 15 bp, Homo sapiens
ttgtgggagtgggca

SEQ ID NO: 1314854 - DNA, 15 bp, Homo sapiens
tttgtgggagtgggc

SEQ ID NO: 1314855 - DNA, 15 bp, Homo sapiens
ctttgtgggagtggg

SEQ ID NO: 1314856 - DNA, 15 bp, Homo sapiens
cctttgtgggagtgg

SEQ ID NO: 1314857 - DNA, 15 bp, Homo sapiens
tcctttgtgggagtg

SEQ ID NO: 1314858 - DNA, 15 bp, Homo sapiens
ctcctttgtgggagt

SEQ ID NO: 1314859 - DNA, 15 bp, Homo sapiens
cctcctttgtgggag

SEQ ID NO: 1314860 - DNA, 15 bp, Homo sapiens
ccctcctttgtggga

SEQ ID NO: 1314861 - DNA, 15 bp, Homo sapiens
accctcctttgtggg

SEQ ID NO: 1314862 - DNA, 15 bp, Homo sapiens
taccctcctttgtgg

SEQ ID NO: 1314863 - DNA, 15 bp, Homo sapiens
ctaccctcctttgtg

SEQ ID NO: 1314864 - DNA, 15 bp, Homo sapiens
actaccctcctttgt

SEQ ID NO: 1314865 - DNA, 15 bp, Homo sapiens
gactaccctcctttg

SEQ ID NO: 1314866 - DNA, 15 bp, Homo sapiens
agactaccctccttt

SEQ ID NO: 1314867 - DNA, 15 bp, Homo sapiens
tagactaccctcctt

SEQ ID NO: 1314868 - DNA, 15 bp, Homo sapiens
gtagactaccctcct

SEQ ID NO: 1314869 - DNA, 15 bp, Homo sapiens
agtagactaccctcc

SEQ ID NO: 1314870 - DNA, 15 bp, Homo sapiens
cagtagactaccctc

SEQ ID NO: 1314871 - DNA, 15 bp, Homo sapiens
tcagtagactaccct

SEQ ID NO: 1314872 - DNA, 15 bp, Homo sapiens
ttcagtagactaccc

SEQ ID NO: 1314873 - DNA, 15 bp, Homo sapiens
attcagtagactacc

SEQ ID NO: 1314874 - DNA, 15 bp, Homo sapiens
aattcagtagactac

SEQ ID NO: 1314875 - DNA, 15 bp, Homo sapiens
gaattcagtagacta

SEQ ID NO: 1314876 - DNA, 15 bp, Homo sapiens
tgaattcagtagact

SEQ ID NO: 1314877 - DNA, 15 bp, Homo sapiens
gtgaattcagtagac

SEQ ID NO: 1314878 - DNA, 15 bp, Homo sapiens
agtgaattcagtaga

SEQ ID NO: 1314879 - DNA, 15 bp, Homo sapiens
cagtgaattcagtag

SEQ ID NO: 1314880 - DNA, 15 bp, Homo sapiens
tcagtgaattcagta

SEQ ID NO: 1314881 - DNA, 15 bp, Homo sapiens
atcagtgaattcagt

SEQ ID NO: 1314882 - DNA, 15 bp, Homo sapiens
aatcagtgaattcag

SEQ ID NO: 1314883 - DNA, 15 bp, Homo sapiens
gaatcagtgaattca

SEQ ID NO: 1314884 - DNA, 15 bp, Homo sapiens
tgaatcagtgaattc

SEQ ID NO: 1314885 - DNA, 15 bp, Homo sapiens
ttgaatcagtgaatt

SEQ ID NO: 1314886 - DNA, 15 bp, Homo sapiens
tttgaatcagtgaat

SEQ ID NO: 1314887 - DNA, 15 bp, Homo sapiens
atttgaatcagtgaa

SEQ ID NO: 1314888 - DNA, 15 bp, Homo sapiens
catttgaatcagtga

SEQ ID NO: 1314889 - DNA, 15 bp, Homo sapiens
gcatttgaatcagtg

SEQ ID NO: 1314890 - DNA, 15 bp, Homo sapiens
ggcatttgaatcagt

SEQ ID NO: 1314891 - DNA, 15 bp, Homo sapiens
tggcatttgaatcag

SEQ ID NO: 1314892 - DNA, 15 bp, Homo sapiens
atggcatttgaatca

SEQ ID NO: 1314893 - DNA, 15 bp, Homo sapiens
aatggcatttgaatc

SEQ ID NO: 1314894 - DNA, 15 bp, Homo sapiens
gaatggcatttgaat

SEQ ID NO: 1314895 - DNA, 15 bp, Homo sapiens
agaatggcatttgaa

SEQ ID NO: 1314896 - DNA, 15 bp, Homo sapiens
gagaatggcatttga

SEQ ID NO: 1314897 - DNA, 15 bp, Homo sapiens
tgagaatggcatttg

SEQ ID NO: 1314898 - DNA, 15 bp, Homo sapiens
atgagaatggcattt

SEQ ID NO: 1314899 - DNA, 15 bp, Homo sapiens
gatgagaatggcatt

SEQ ID NO: 1314900 - DNA, 15 bp, Homo sapiens
ggatgagaatggcat

SEQ ID NO: 1314901 - DNA, 15 bp, Homo sapiens
tggatgagaatggca

SEQ ID NO: 1314902 - DNA, 15 bp, Homo sapiens
ctggatgagaatggc

SEQ ID NO: 1314903 - DNA, 15 bp, Homo sapiens
tctggatgagaatgg

SEQ ID NO: 1314904 - DNA, 15 bp, Homo sapiens
ctctggatgagaatg

SEQ ID NO: 1314905 - DNA, 15 bp, Homo sapiens
tctctggatgagaat

SEQ ID NO: 1314906 - DNA, 15 bp, Homo sapiens
gtctctggatgagaa

SEQ ID NO: 1314907 - DNA, 15 bp, Homo sapiens
agtctctggatgaga

SEQ ID NO: 1314908 - DNA, 15 bp, Homo sapiens
gagtctctggatgag

SEQ ID NO: 1314909 - DNA, 15 bp, Homo sapiens
agagtctctggatga

SEQ ID NO: 1314910 - DNA, 15 bp, Homo sapiens
gagagtctctggatg

SEQ ID NO: 1314911 - DNA, 15 bp, Homo sapiens
ggagagtctctggat

SEQ ID NO: 1314912 - DNA, 15 bp, Homo sapiens
gggagagtctctgga

SEQ ID NO: 1314913 - DNA, 15 bp, Homo sapiens
tgggagagtctctgg

SEQ ID NO: 1314914 - DNA, 15 bp, Homo sapiens
ctgggagagtctctg

SEQ ID NO: 1314915 - DNA, 15 bp, Homo sapiens
tctgggagagtctct

SEQ ID NO: 1314916 - DNA, 15 bp, Homo sapiens
gtctgggagagtctc

SEQ ID NO: 1314917 - DNA, 15 bp, Homo sapiens
tgtctgggagagtct

SEQ ID NO: 1314918 - DNA, 15 bp, Homo sapiens
gtgtctgggagagtc

SEQ ID NO: 1314919 - DNA, 15 bp, Homo sapiens
tgtgtctgggagagt

SEQ ID NO: 1314920 - DNA, 15 bp, Homo sapiens
gtgtgtctgggagag

SEQ ID NO: 1314921 - DNA, 15 bp, Homo sapiens
ggtgtgtctgggaga

SEQ ID NO: 1314922 - DNA, 15 bp, Homo sapiens
gggtgtgtctgggag

SEQ ID NO: 1314923 - DNA, 15 bp, Homo sapiens
tgggtgtgtctggga

SEQ ID NO: 1314924 - DNA, 15 bp, Homo sapiens
ctgggtgtgtctggg

SEQ ID NO: 1314925 - DNA, 15 bp, Homo sapiens
tctgggtgtgtctgg

SEQ ID NO: 1314926 - DNA, 15 bp, Homo sapiens
ttctgggtgtgtctg

SEQ ID NO: 1314927 - DNA, 15 bp, Homo sapiens
tttctgggtgtgtct

SEQ ID NO: 1314928 - DNA, 15 bp, Homo sapiens
atttctgggtgtgtc

SEQ ID NO: 1314929 - DNA, 15 bp, Homo sapiens
gatttctgggtgtgt

SEQ ID NO: 1314930 - DNA, 15 bp, Homo sapiens
tgatttctgggtgtg

SEQ ID NO: 1314931 - DNA, 15 bp, Homo sapiens
gtgatttctgggtgt

SEQ ID NO: 1314932 - DNA, 15 bp, Homo sapiens
tgtgatttctgggtg

SEQ ID NO: 1314933 - DNA, 15 bp, Homo sapiens
gtgtgatttctgggt

SEQ ID NO: 1314934 - DNA, 15 bp, Homo sapiens
agtgtgatttctggg

SEQ ID NO: 1314935 - DNA, 15 bp, Homo sapiens
cagtgtgatttctgg

SEQ ID NO: 1314936 - DNA, 15 bp, Homo sapiens
ccagtgtgatttctg

SEQ ID NO: 1314937 - DNA, 15 bp, Homo sapiens
tccagtgtgatttct

SEQ ID NO: 1314938 - DNA, 15 bp, Homo sapiens
atccagtgtgatttc

SEQ ID NO: 1314939 - DNA, 15 bp, Homo sapiens
gatccagtgtgattt

SEQ ID NO: 1314940 - DNA, 15 bp, Homo sapiens
agatccagtgtgatt

SEQ ID NO: 1314941 - DNA, 15 bp, Homo sapiens
cagatccagtgtgat

SEQ ID NO: 1314942 - DNA, 15 bp, Homo sapiens
ccagatccagtgtga

SEQ ID NO: 1314943 - DNA, 15 bp, Homo sapiens
cccagatccagtgtg

SEQ ID NO: 1314944 - DNA, 15 bp, Homo sapiens
gcccagatccagtgt

SEQ ID NO: 1314945 - DNA, 15 bp, Homo sapiens
tgcccagatccagtg

SEQ ID NO: 1314946 - DNA, 15 bp, Homo sapiens
gtgcccagatccagt

SEQ ID NO: 1314947 - DNA, 15 bp, Homo sapiens
ggtgcccagatccag

SEQ ID NO: 1314948 - DNA, 15 bp, Homo sapiens
gggtgcccagatcca

SEQ ID NO: 1314949 - DNA, 15 bp, Homo sapiens
agggtgcccagatcc

SEQ ID NO: 1314950 - DNA, 15 bp, Homo sapiens
gagggtgcccagatc

SEQ ID NO: 1314951 - DNA, 15 bp, Homo sapiens
agagggtgcccagat

SEQ ID NO: 1314952 - DNA, 15 bp, Homo sapiens
cagagggtgcccaga

SEQ ID NO: 1314953 - DNA, 15 bp, Homo sapiens
ccagagggtgcccag

SEQ ID NO: 1314954 - DNA, 15 bp, Homo sapiens
gccagagggtgccca

SEQ ID NO: 1314955 - DNA, 15 bp, Homo sapiens
tgccagagggtgccc

SEQ ID NO: 1314956 - DNA, 15 bp, Homo sapiens
gtgccagagggtgcc

SEQ ID NO: 1314957 - DNA, 15 bp, Homo sapiens
tgtgccagagggtgc

SEQ ID NO: 1314958 - DNA, 15 bp, Homo sapiens
ctgtgccagagggtg

SEQ ID NO: 1314959 - DNA, 15 bp, Homo sapiens
actgtgccagagggt

SEQ ID NO: 1314960 - DNA, 15 bp, Homo sapiens
gactgtgccagaggg

SEQ ID NO: 1314961 - DNA, 15 bp, Homo sapiens
ggactgtgccagagg

SEQ ID NO: 1314962 - DNA, 15 bp, Homo sapiens
cggactgtgccagag

SEQ ID NO: 1314963 - DNA, 15 bp, Homo sapiens
gcggactgtgccaga

SEQ ID NO: 1314964 - DNA, 15 bp, Homo sapiens
tgcggactgtgccag

SEQ ID NO: 1314965 - DNA, 15 bp, Homo sapiens
atgcggactgtgcca

SEQ ID NO: 1314966 - DNA, 15 bp, Homo sapiens
tatgcggactgtgcc

SEQ ID NO: 1314967 - DNA, 15 bp, Homo sapiens
ttatgcggactgtgc

SEQ ID NO: 1314968 - DNA, 15 bp, Homo sapiens
tttatgcggactgtg

SEQ ID NO: 1314969 - DNA, 15 bp, Homo sapiens
ttttatgcggactgt

SEQ ID NO: 1314970 - DNA, 15 bp, Homo sapiens
attttatgcggactg

SEQ ID NO: 1314971 - DNA, 15 bp, Homo sapiens
cattttatgcggact

SEQ ID NO: 1314972 - DNA, 15 bp, Homo sapiens
tcattttatgcggac

SEQ ID NO: 1314973 - DNA, 15 bp, Homo sapiens
ttcattttatgcgga

SEQ ID NO: 1314974 - DNA, 15 bp, Homo sapiens
gttcattttatgcgg

SEQ ID NO: 1314975 - DNA, 15 bp, Homo sapiens
ggttcattttatgcg

SEQ ID NO: 1314976 - DNA, 15 bp, Homo sapiens
tggttcattttatgc

SEQ ID NO: 1314977 - DNA, 15 bp, Homo sapiens
atggttcattttatg

SEQ ID NO: 1314978 - DNA, 15 bp, Homo sapiens
gatggttcattttat

SEQ ID NO: 1314979 - DNA, 15 bp, Homo sapiens
ggatggttcatttta

SEQ ID NO: 1314980 - DNA, 15 bp, Homo sapiens
gggatggttcatttt

SEQ ID NO: 1314981 - DNA, 15 bp, Homo sapiens
tgggatggttcattt

SEQ ID NO: 1314982 - DNA, 15 bp, Homo sapiens
gtgggatggttcatt

SEQ ID NO: 1314983 - DNA, 15 bp, Homo sapiens
agtgggatggttcat

SEQ ID NO: 1314984 - DNA, 15 bp, Homo sapiens
tagtgggatggttca

SEQ ID NO: 1314985 - DNA, 15 bp, Homo sapiens
ctagtgggatggttc

SEQ ID NO: 1314986 - DNA, 15 bp, Homo sapiens
actagtgggatggtt

SEQ ID NO: 1314987 - DNA, 15 bp, Homo sapiens
cactagtgggatggt

SEQ ID NO: 1314988 - DNA, 15 bp, Homo sapiens
ccactagtgggatgg

SEQ ID NO: 1314989 - DNA, 15 bp, Homo sapiens
gccactagtgggatg

SEQ ID NO: 1314990 - DNA, 15 bp, Homo sapiens
cgccactagtgggat

SEQ ID NO: 1314991 - DNA, 15 bp, Homo sapiens
gcgccactagtggga

SEQ ID NO: 1314992 - DNA, 15 bp, Homo sapiens
tgcgccactagtggg

SEQ ID NO: 1314993 - DNA, 15 bp, Homo sapiens
ctgcgccactagtgg

SEQ ID NO: 1314994 - DNA, 15 bp, Homo sapiens
gctgcgccactagtg

SEQ ID NO: 1314995 - DNA, 15 bp, Homo sapiens
ggctgcgccactagt

SEQ ID NO: 1314996 - DNA, 15 bp, Homo sapiens
gggctgcgccactag

SEQ ID NO: 1314997 - DNA, 15 bp, Homo sapiens
tgggctgcgccacta

SEQ ID NO: 1314998 - DNA, 15 bp, Homo sapiens
ctgggctgcgccact

SEQ ID NO: 1314999 - DNA, 15 bp, Homo sapiens
gctgggctgcgccac

SEQ ID NO: 1315000 - DNA, 15 bp, Homo sapiens
agctgggctgcgcca

SEQ ID NO: 1315001 - DNA, 15 bp, Homo sapiens
aagctgggctgcgcc

SEQ ID NO: 1315002 - DNA, 15 bp, Homo sapiens
gaagctgggctgcgc

SEQ ID NO: 1315003 - DNA, 15 bp, Homo sapiens
ggaagctgggctgcg

SEQ ID NO: 1315004 - DNA, 15 bp, Homo sapiens
tggaagctgggctgc

SEQ ID NO: 1315005 - DNA, 15 bp, Homo sapiens
atggaagctgggctg

SEQ ID NO: 1315006 - DNA, 15 bp, Homo sapiens
tatggaagctgggct

SEQ ID NO: 1315007 - DNA, 15 bp, Homo sapiens
atatggaagctgggc

SEQ ID NO: 1315008 - DNA, 15 bp, Homo sapiens
aatatggaagctggg

SEQ ID NO: 1315009 - DNA, 15 bp, Homo sapiens
aaatatggaagctgg

SEQ ID NO: 1315010 - DNA, 15 bp, Homo sapiens
taaatatggaagctg

SEQ ID NO: 1315011 - DNA, 15 bp, Homo sapiens
ataaatatggaagct

SEQ ID NO: 1315012 - DNA, 15 bp, Homo sapiens
tataaatatggaagc

SEQ ID NO: 1315013 - DNA, 15 bp, Homo sapiens
ttataaatatggaag

SEQ ID NO: 1315014 - DNA, 15 bp, Homo sapiens
cttataaatatggaa

SEQ ID NO: 1315015 - DNA, 15 bp, Homo sapiens
tcttataaatatgga

SEQ ID NO: 1315016 - DNA, 15 bp, Homo sapiens
atcttataaatatgg

SEQ ID NO: 1315017 - DNA, 15 bp, Homo sapiens
tatcttataaatatg

SEQ ID NO: 1315018 - DNA, 15 bp, Homo sapiens
ctatcttataaatat

SEQ ID NO: 1315019 - DNA, 15 bp, Homo sapiens
cctatcttataaata

SEQ ID NO: 1315020 - DNA, 15 bp, Homo sapiens
tcctatcttataaat

SEQ ID NO: 1315021 - DNA, 15 bp, Homo sapiens
ttcctatcttataaa

SEQ ID NO: 1315022 - DNA, 15 bp, Homo sapiens
attcctatcttataa

SEQ ID NO: 1315023 - DNA, 15 bp, Homo sapiens
aattcctatcttata

SEQ ID NO: 1315024 - DNA, 15 bp, Homo sapiens
gaattcctatcttat

SEQ ID NO: 1315025 - DNA, 15 bp, Homo sapiens
ggaattcctatctta

SEQ ID NO: 1315026 - DNA, 15 bp, Homo sapiens
tggaattcctatctt

SEQ ID NO: 1315027 - DNA, 15 bp, Homo sapiens
atggaattcctatct

SEQ ID NO: 1315028 - DNA, 15 bp, Homo sapiens
aatggaattcctatc

SEQ ID NO: 1315029 - DNA, 15 bp, Homo sapiens
gaatggaattcctat

SEQ ID NO: 1315030 - DNA, 15 bp, Homo sapiens
tgaatggaattccta

SEQ ID NO: 1315031 - DNA, 15 bp, Homo sapiens
atgaatggaattcct

SEQ ID NO: 1315032 - DNA, 15 bp, Homo sapiens
tatgaatggaattcc

SEQ ID NO: 1315033 - DNA, 15 bp, Homo sapiens
gtatgaatggaattc

SEQ ID NO: 1315034 - DNA, 15 bp, Homo sapiens
ggtatgaatggaatt

SEQ ID NO: 1315035 - DNA, 15 bp, Homo sapiens
cggtatgaatggaat

SEQ ID NO: 1315036 - DNA, 15 bp, Homo sapiens
tcggtatgaatggaa

SEQ ID NO: 1315037 - DNA, 15 bp, Homo sapiens
ttcggtatgaatgga

SEQ ID NO: 1315038 - DNA, 15 bp, Homo sapiens
cttcggtatgaatgg

SEQ ID NO: 1315039 - DNA, 15 bp, Homo sapiens
tcttcggtatgaatg

SEQ ID NO: 1315040 - DNA, 15 bp, Homo sapiens
ctcttcggtatgaat

SEQ ID NO: 1315041 - DNA, 15 bp, Homo sapiens
tctcttcggtatgaa

SEQ ID NO: 1315042 - DNA, 15 bp, Homo sapiens
ttctcttcggtatga

SEQ ID NO: 1315043 - DNA, 15 bp, Homo sapiens
cttctcttcggtatg

SEQ ID NO: 1315044 - DNA, 15 bp, Homo sapiens
tcttctcttcggtat

SEQ ID NO: 1315045 - DNA, 15 bp, Homo sapiens
gtcttctcttcggta

SEQ ID NO: 1315046 - DNA, 15 bp, Homo sapiens
tgtcttctcttcggt

SEQ ID NO: 1315047 - DNA, 15 bp, Homo sapiens
atgtcttctcttcgg

SEQ ID NO: 1315048 - DNA, 15 bp, Homo sapiens
aatgtcttctcttcg

SEQ ID NO: 1315049 - DNA, 15 bp, Homo sapiens
aaatgtcttctcttc

SEQ ID NO: 1315050 - DNA, 15 bp, Homo sapiens
caaatgtcttctctt

SEQ ID NO: 1315051 - DNA, 15 bp, Homo sapiens
acaaatgtcttctct

SEQ ID NO: 1315052 - DNA, 15 bp, Homo sapiens
gacaaatgtcttctc

SEQ ID NO: 1315053 - DNA, 15 bp, Homo sapiens
ggacaaatgtcttct

SEQ ID NO: 1315054 - DNA, 15 bp, Homo sapiens
aggacaaatgtcttc

SEQ ID NO: 1315055 - DNA, 15 bp, Homo sapiens
caggacaaatgtctt

SEQ ID NO: 1315056 - DNA, 15 bp, Homo sapiens
tcaggacaaatgtct

SEQ ID NO: 1315057 - DNA, 15 bp, Homo sapiens
ctcaggacaaatgtc

SEQ ID NO: 1315058 - DNA, 15 bp, Homo sapiens
cctcaggacaaatgt

SEQ ID NO: 1315059 - DNA, 15 bp, Homo sapiens
acctcaggacaaatg

SEQ ID NO: 1315060 - DNA, 15 bp, Homo sapiens
gacctcaggacaaat

SEQ ID NO: 1315061 - DNA, 15 bp, Homo sapiens
agacctcaggacaaa

SEQ ID NO: 1315062 - DNA, 15 bp, Homo sapiens
aagacctcaggacaa

SEQ ID NO: 1315063 - DNA, 15 bp, Homo sapiens
caagacctcaggaca

SEQ ID NO: 1315064 - DNA, 15 bp, Homo sapiens
ccaagacctcaggac

SEQ ID NO: 1315065 - DNA, 15 bp, Homo sapiens
gccaagacctcagga

SEQ ID NO: 1315066 - DNA, 15 bp, Homo sapiens
ggccaagacctcagg

SEQ ID NO: 1315067 - DNA, 15 bp, Homo sapiens
aggccaagacctcag

SEQ ID NO: 1315068 - DNA, 15 bp, Homo sapiens
aaggccaagacctca

SEQ ID NO: 1315069 - DNA, 15 bp, Homo sapiens
gaaggccaagacctc

SEQ ID NO: 1315070 - DNA, 15 bp, Homo sapiens
ggaaggccaagacct

SEQ ID NO: 1315071 - DNA, 15 bp, Homo sapiens
aggaaggccaagacc

SEQ ID NO: 1315072 - DNA, 15 bp, Homo sapiens
taggaaggccaagac

SEQ ID NO: 1315073 - DNA, 15 bp, Homo sapiens
ttaggaaggccaaga

SEQ ID NO: 1315074 - DNA, 15 bp, Homo sapiens
tttaggaaggccaag

SEQ ID NO: 1315075 - DNA, 15 bp, Homo sapiens
ctttaggaaggccaa

SEQ ID NO: 1315076 - DNA, 15 bp, Homo sapiens
gctttaggaaggcca

SEQ ID NO: 1315077 - DNA, 15 bp, Homo sapiens
ggctttaggaaggcc

SEQ ID NO: 1315078 - DNA, 15 bp, Homo sapiens
gggctttaggaaggc

SEQ ID NO: 1315079 - DNA, 15 bp, Homo sapiens
tgggctttaggaagg

SEQ ID NO: 1315080 - DNA, 15 bp, Homo sapiens
atgggctttaggaag

SEQ ID NO: 1315081 - DNA, 15 bp, Homo sapiens
catgggctttaggaa

SEQ ID NO: 1315082 - DNA, 15 bp, Homo sapiens
tcatgggctttagga

SEQ ID NO: 1315083 - DNA, 15 bp, Homo sapiens
ttcatgggctttagg

SEQ ID NO: 1315084 - DNA, 15 bp, Homo sapiens
gttcatgggctttag

SEQ ID NO: 1315085 - DNA, 15 bp, Homo sapiens
ggttcatgggcttta

SEQ ID NO: 1315086 - DNA, 15 bp, Homo sapiens
aggttcatgggcttt

SEQ ID NO: 1315087 - DNA, 15 bp, Homo sapiens
gaggttcatgggctt

SEQ ID NO: 1315088 - DNA, 15 bp, Homo sapiens
agaggttcatgggct

SEQ ID NO: 1315089 - DNA, 15 bp, Homo sapiens
aagaggttcatgggc

SEQ ID NO: 1315090 - DNA, 15 bp, Homo sapiens
aaagaggttcatggg

SEQ ID NO: 1315091 - DNA, 15 bp, Homo sapiens
gaaagaggttcatgg

SEQ ID NO: 1315092 - DNA, 15 bp, Homo sapiens
agaaagaggttcatg

SEQ ID NO: 1315093 - DNA, 15 bp, Homo sapiens
aagaaagaggttcat

SEQ ID NO: 1315094 - DNA, 15 bp, Homo sapiens
aaagaaagaggttca

SEQ ID NO: 1315095 - DNA, 15 bp, Homo sapiens
aaaagaaagaggttc

SEQ ID NO: 1315096 - DNA, 15 bp, Homo sapiens
taaaagaaagaggtt

SEQ ID NO: 1315097 - DNA, 15 bp, Homo sapiens
gtaaaagaaagaggt

SEQ ID NO: 1315098 - DNA, 15 bp, Homo sapiens
ggtaaaagaaagagg

SEQ ID NO: 1315099 - DNA, 15 bp, Homo sapiens
tggtaaaagaaagag

SEQ ID NO: 1315100 - DNA, 15 bp, Homo sapiens
atggtaaaagaaaga

SEQ ID NO: 1315101 - DNA, 15 bp, Homo sapiens
catggtaaaagaaag

SEQ ID NO: 1315102 - DNA, 15 bp, Homo sapiens
ccatggtaaaagaaa

SEQ ID NO: 1315103 - DNA, 15 bp, Homo sapiens
accatggtaaaagaa

SEQ ID NO: 1315104 - DNA, 15 bp, Homo sapiens
taccatggtaaaaga

SEQ ID NO: 1315105 - DNA, 15 bp, Homo sapiens
gtaccatggtaaaag

SEQ ID NO: 1315106 - DNA, 15 bp, Homo sapiens
agtaccatggtaaaa

SEQ ID NO: 1315107 - DNA, 15 bp, Homo sapiens
cagtaccatggtaaa

SEQ ID NO: 1315108 - DNA, 15 bp, Homo sapiens
ccagtaccatggtaa

SEQ ID NO: 1315109 - DNA, 15 bp, Homo sapiens
accagtaccatggta

SEQ ID NO: 1315110 - DNA, 15 bp, Homo sapiens
aaccagtaccatggt

SEQ ID NO: 1315111 - DNA, 15 bp, Homo sapiens
aaaccagtaccatgg

SEQ ID NO: 1315112 - DNA, 15 bp, Homo sapiens
caaaccagtaccatg

SEQ ID NO: 1315113 - DNA, 15 bp, Homo sapiens
ccaaaccagtaccat

SEQ ID NO: 1315114 - DNA, 15 bp, Homo sapiens
accaaaccagtacca

SEQ ID NO: 1315115 - DNA, 15 bp, Homo sapiens
aaccaaaccagtacc

SEQ ID NO: 1315116 - DNA, 15 bp, Homo sapiens
aaaccaaaccagtac

SEQ ID NO: 1315117 - DNA, 15 bp, Homo sapiens
aaaaccaaaccagta

SEQ ID NO: 1315118 - DNA, 15 bp, Homo sapiens
gaaaaccaaaccagt

SEQ ID NO: 1315119 - DNA, 15 bp, Homo sapiens
tgaaaaccaaaccag

SEQ ID NO: 1315120 - DNA, 15 bp, Homo sapiens
ctgaaaaccaaacca

SEQ ID NO: 1315121 - DNA, 15 bp, Homo sapiens
actgaaaaccaaacc

SEQ ID NO: 1315122 - DNA, 15 bp, Homo sapiens
caactgaaaaccaaa

SEQ ID NO: 1315123 - DNA, 15 bp, Homo sapiens
ccaactgaaaaccaa

SEQ ID NO: 1315124 - DNA, 15 bp, Homo sapiens
cccaactgaaaacca

SEQ ID NO: 1315125 - DNA, 15 bp, Homo sapiens
gcccaactgaaaacc

SEQ ID NO: 1315126 - DNA, 15 bp, Homo sapiens
agcccaactgaaaac

SEQ ID NO: 1315127 - DNA, 15 bp, Homo sapiens
cagcccaactgaaaa

SEQ ID NO: 1315128 - DNA, 15 bp, Homo sapiens
ccagcccaactgaaa

SEQ ID NO: 1315129 - DNA, 15 bp, Homo sapiens
cccagcccaactgaa

SEQ ID NO: 1315130 - DNA, 15 bp, Homo sapiens
ccccagcccaactga

SEQ ID NO: 1315131 - DNA, 15 bp, Homo sapiens
accccagcccaactg

SEQ ID NO: 1315132 - DNA, 15 bp, Homo sapiens
aaaaccccagcccaa

SEQ ID NO: 1315133 - DNA, 15 bp, Homo sapiens
taaaaccccagccca

SEQ ID NO: 1315134 - DNA, 15 bp, Homo sapiens
gtaaaaccccagccc

SEQ ID NO: 1315135 - DNA, 15 bp, Homo sapiens
agtaaaaccccagcc

SEQ ID NO: 1315136 - DNA, 15 bp, Homo sapiens
aagtaaaaccccagc

SEQ ID NO: 1315137 - DNA, 15 bp, Homo sapiens
gaagtaaaaccccag

SEQ ID NO: 1315138 - DNA, 15 bp, Homo sapiens
agaagtaaaacccca

SEQ ID NO: 1315139 - DNA, 15 bp, Homo sapiens
gagaagtaaaacccc

SEQ ID NO: 1315140 - DNA, 15 bp, Homo sapiens
agagaagtaaaaccc

SEQ ID NO: 1315141 - DNA, 15 bp, Homo sapiens
aagagaagtaaaacc

SEQ ID NO: 1315142 - DNA, 15 bp, Homo sapiens
caagagaagtaaaac

SEQ ID NO: 1315143 - DNA, 15 bp, Homo sapiens
tcaagagaagtaaaa

SEQ ID NO: 1315144 - DNA, 15 bp, Homo sapiens
ctcaagagaagtaaa

SEQ ID NO: 1315145 - DNA, 15 bp, Homo sapiens
actcaagagaagtaa

SEQ ID NO: 1315146 - DNA, 15 bp, Homo sapiens
cactcaagagaagta

SEQ ID NO: 1315147 - DNA, 15 bp, Homo sapiens
acactcaagagaagt

SEQ ID NO: 1315148 - DNA, 15 bp, Homo sapiens
cacactcaagagaag

SEQ ID NO: 1315149 - DNA, 15 bp, Homo sapiens
tcacactcaagagaa

SEQ ID NO: 1315150 - DNA, 15 bp, Homo sapiens
ctcacactcaagaga

SEQ ID NO: 1315151 - DNA, 15 bp, Homo sapiens
actcacactcaagag

SEQ ID NO: 1315152 - DNA, 15 bp, Homo sapiens
gactcacactcaaga

SEQ ID NO: 1315153 - DNA, 15 bp, Homo sapiens
agactcacactcaag

SEQ ID NO: 1315154 - DNA, 15 bp, Homo sapiens
aagactcacactcaa

SEQ ID NO: 1315155 - DNA, 15 bp, Homo sapiens
aaagactcacactca

SEQ ID NO: 1315156 - DNA, 15 bp, Homo sapiens
aaaagactcacactc

SEQ ID NO: 1315157 - DNA, 15 bp, Homo sapiens
taaaagactcacact

SEQ ID NO: 1315158 - DNA, 15 bp, Homo sapiens
ataaaagactcacac

SEQ ID NO: 1315159 - DNA, 15 bp, Homo sapiens
aataaaagactcaca

SEQ ID NO: 1315160 - DNA, 15 bp, Homo sapiens
aaataaaagactcac

SEQ ID NO: 1315161 - DNA, 15 bp, Homo sapiens
taaataaaagactca

SEQ ID NO: 1315162 - DNA, 15 bp, Homo sapiens
ataaataaaagactc

SEQ ID NO: 1315163 - DNA, 15 bp, Homo sapiens
cataaataaaagact

SEQ ID NO: 1315164 - DNA, 15 bp, Homo sapiens
ccataaataaaagac

SEQ ID NO: 1315165 - DNA, 15 bp, Homo sapiens
gccataaataaaaga

SEQ ID NO: 1315166 - DNA, 15 bp, Homo sapiens
tgccataaataaaag

SEQ ID NO: 1315167 - DNA, 15 bp, Homo sapiens
ttgccataaataaaa

SEQ ID NO: 1315168 - DNA, 15 bp, Homo sapiens
cttgccataaataaa

SEQ ID NO: 1315169 - DNA, 15 bp, Homo sapiens
gcttgccataaataa

SEQ ID NO: 1315170 - DNA, 15 bp, Homo sapiens
tgcttgccataaata

SEQ ID NO: 1315171 - DNA, 15 bp, Homo sapiens
ttgcttgccataaat

SEQ ID NO: 1315172 - DNA, 15 bp, Homo sapiens
tttgcttgccataaa

SEQ ID NO: 1315173 - DNA, 15 bp, Homo sapiens
ttttgcttgccataa

SEQ ID NO: 1315174 - DNA, 15 bp, Homo sapiens
cttttgcttgccata

SEQ ID NO: 1315175 - DNA, 15 bp, Homo sapiens
ccttttgcttgccat

SEQ ID NO: 1315176 - DNA, 15 bp, Homo sapiens
cccttttgcttgcca

SEQ ID NO: 1315177 - DNA, 15 bp, Homo sapiens
acccttttgcttgcc

SEQ ID NO: 1315178 - DNA, 15 bp, Homo sapiens
cacccttttgcttgc

SEQ ID NO: 1315179 - DNA, 15 bp, Homo sapiens
tcacccttttgcttg

SEQ ID NO: 1315180 - DNA, 15 bp, Homo sapiens
gtcacccttttgctt

SEQ ID NO: 1315181 - DNA, 15 bp, Homo sapiens
agtcacccttttgct

SEQ ID NO: 1315182 - DNA, 15 bp, Homo sapiens
cagtcacccttttgc

SEQ ID NO: 1315183 - DNA, 15 bp, Homo sapiens
acagtcacccttttg

SEQ ID NO: 1315184 - DNA, 15 bp, Homo sapiens
tacagtcaccctttt

SEQ ID NO: 1315185 - DNA, 15 bp, Homo sapiens
ctacagtcacccttt

SEQ ID NO: 1315186 - DNA, 15 bp, Homo sapiens
cctacagtcaccctt

SEQ ID NO: 1315187 - DNA, 15 bp, Homo sapiens
acctacagtcaccct

SEQ ID NO: 1315188 - DNA, 15 bp, Homo sapiens
gacctacagtcaccc

SEQ ID NO: 1315189 - DNA, 15 bp, Homo sapiens
tgacctacagtcacc

SEQ ID NO: 1315190 - DNA, 15 bp, Homo sapiens
gtgacctacagtcac

SEQ ID NO: 1315191 - DNA, 15 bp, Homo sapiens
tgtgacctacagtca

SEQ ID NO: 1315192 - DNA, 15 bp, Homo sapiens
ctgtgacctacagtc

SEQ ID NO: 1315193 - DNA, 15 bp, Homo sapiens
gctgtgacctacagt

SEQ ID NO: 1315194 - DNA, 15 bp, Homo sapiens
ggctgtgacctacag

SEQ ID NO: 1315195 - DNA, 15 bp, Homo sapiens
aggctgtgacctaca

SEQ ID NO: 1315196 - DNA, 15 bp, Homo sapiens
gaggctgtgacctac

SEQ ID NO: 1315197 - DNA, 15 bp, Homo sapiens
agaggctgtgaccta

SEQ ID NO: 1315198 - DNA, 15 bp, Homo sapiens
gagaggctgtgacct

SEQ ID NO: 1315199 - DNA, 15 bp, Homo sapiens
ggagaggctgtgacc

SEQ ID NO: 1315200 - DNA, 15 bp, Homo sapiens
gggagaggctgtgac

SEQ ID NO: 1315201 - DNA, 15 bp, Homo sapiens
ggggagaggctgtga

SEQ ID NO: 1315202 - DNA, 15 bp, Homo sapiens
tggggagaggctgtg

SEQ ID NO: 1315203 - DNA, 15 bp, Homo sapiens
ctggggagaggctgt

SEQ ID NO: 1315204 - DNA, 15 bp, Homo sapiens
cctggggagaggctg

SEQ ID NO: 1315205 - DNA, 15 bp, Homo sapiens
ccctggggagaggct

SEQ ID NO: 1315206 - DNA, 15 bp, Homo sapiens
gccctggggagaggc

SEQ ID NO: 1315207 - DNA, 15 bp, Homo sapiens
agccctggggagagg

SEQ ID NO: 1315208 - DNA, 15 bp, Homo sapiens
gagccctggggagag

SEQ ID NO: 1315209 - DNA, 15 bp, Homo sapiens
ggagccctggggaga

SEQ ID NO: 1315210 - DNA, 15 bp, Homo sapiens
gggagccctggggag

SEQ ID NO: 1315211 - DNA, 15 bp, Homo sapiens
agggagccctgggga

SEQ ID NO: 1315212 - DNA, 15 bp, Homo sapiens
cagggagccctgggg

SEQ ID NO: 1315213 - DNA, 15 bp, Homo sapiens
acagggagccctggg

SEQ ID NO: 1315214 - DNA, 15 bp, Homo sapiens
cacagggagccctgg

SEQ ID NO: 1315215 - DNA, 15 bp, Homo sapiens
ccacagggagccctg

SEQ ID NO: 1315216 - DNA, 15 bp, Homo sapiens
tccacagggagccct

SEQ ID NO: 1315217 - DNA, 15 bp, Homo sapiens
ttccacagggagccc

SEQ ID NO: 1315218 - DNA, 15 bp, Homo sapiens
tttccacagggagcc

SEQ ID NO: 1315219 - DNA, 15 bp, Homo sapiens
atttccacagggagc

SEQ ID NO: 1315220 - DNA, 15 bp, Homo sapiens
aatttccacagggag

SEQ ID NO: 1315221 - DNA, 15 bp, Homo sapiens
taatttccacaggga

SEQ ID NO: 1315222 - DNA, 15 bp, Homo sapiens
ctaatttccacaggg

SEQ ID NO: 1315223 - DNA, 15 bp, Homo sapiens
tctaatttccacagg

SEQ ID NO: 1315224 - DNA, 15 bp, Homo sapiens
ctctaatttccacag

SEQ ID NO: 1315225 - DNA, 15 bp, Homo sapiens
tctctaatttccaca

SEQ ID NO: 1315226 - DNA, 15 bp, Homo sapiens
ctctctaatttccac

SEQ ID NO: 1315227 - DNA, 15 bp, Homo sapiens
cctctctaatttcca

SEQ ID NO: 1315228 - DNA, 15 bp, Homo sapiens
tcctctctaatttcc

SEQ ID NO: 1315229 - DNA, 15 bp, Homo sapiens
ttcctctctaatttc

SEQ ID NO: 1315230 - DNA, 15 bp, Homo sapiens
cttcctctctaattt

SEQ ID NO: 1315231 - DNA, 15 bp, Homo sapiens
ccttcctctctaatt

SEQ ID NO: 1315232 - DNA, 15 bp, Homo sapiens
tccttcctctctaat

SEQ ID NO: 1315233 - DNA, 15 bp, Homo sapiens
ctccttcctctctaa

SEQ ID NO: 1315234 - DNA, 15 bp, Homo sapiens
gctccttcctctcta

SEQ ID NO: 1315235 - DNA, 15 bp, Homo sapiens
ggctccttcctctct

SEQ ID NO: 1315236 - DNA, 15 bp, Homo sapiens
gggctccttcctctc

SEQ ID NO: 1315237 - DNA, 15 bp, Homo sapiens
tgggctccttcctct

SEQ ID NO: 1315238 - DNA, 15 bp, Homo sapiens
atgggctccttcctc

SEQ ID NO: 1315239 - DNA, 15 bp, Homo sapiens
catgggctccttcct

SEQ ID NO: 1315240 - DNA, 15 bp, Homo sapiens
ccatgggctccttcc

SEQ ID NO: 1315241 - DNA, 15 bp, Homo sapiens
tccatgggctccttc

SEQ ID NO: 1315242 - DNA, 15 bp, Homo sapiens
ctccatgggctcctt

SEQ ID NO: 1315243 - DNA, 15 bp, Homo sapiens
cctccatgggctcct

SEQ ID NO: 1315244 - DNA, 15 bp, Homo sapiens
gcctccatgggctcc

SEQ ID NO: 1315245 - DNA, 15 bp, Homo sapiens
agcctccatgggctc

SEQ ID NO: 1315246 - DNA, 15 bp, Homo sapiens
cagcctccatgggct

SEQ ID NO: 1315247 - DNA, 15 bp, Homo sapiens
tcagcctccatgggc

SEQ ID NO: 1315248 - DNA, 15 bp, Homo sapiens
ttcagcctccatggg

SEQ ID NO: 1315249 - DNA, 15 bp, Homo sapiens
tttcagcctccatgg

SEQ ID NO: 1315250 - DNA, 15 bp, Homo sapiens
gtttcagcctccatg

SEQ ID NO: 1315251 - DNA, 15 bp, Homo sapiens
ggtttcagcctccat

SEQ ID NO: 1315252 - DNA, 15 bp, Homo sapiens
gggtttcagcctcca

SEQ ID NO: 1315253 - DNA, 15 bp, Homo sapiens
ggggtttcagcctcc

SEQ ID NO: 1315254 - DNA, 15 bp, Homo sapiens
gggggtttcagcctc

SEQ ID NO: 1315255 - DNA, 15 bp, Homo sapiens
cgggggtttcagcct

SEQ ID NO: 1315256 - DNA, 15 bp, Homo sapiens
tcgggggtttcagcc

SEQ ID NO: 1315257 - DNA, 15 bp, Homo sapiens
ctcgggggtttcagc

SEQ ID NO: 1315258 - DNA, 15 bp, Homo sapiens
actcgggggtttcag

SEQ ID NO: 1315259 - DNA, 15 bp, Homo sapiens
gactcgggggtttca

SEQ ID NO: 1315260 - DNA, 15 bp, Homo sapiens
ggactcgggggtttc

SEQ ID NO: 1315261 - DNA, 15 bp, Homo sapiens
tggactcgggggttt

SEQ ID NO: 1315262 - DNA, 15 bp, Homo sapiens
atggactcgggggtt

SEQ ID NO: 1315263 - DNA, 15 bp, Homo sapiens
aatggactcgggggt

SEQ ID NO: 1315264 - DNA, 15 bp, Homo sapiens
taatggactcggggg

SEQ ID NO: 1315265 - DNA, 15 bp, Homo sapiens
ttaatggactcgggg

SEQ ID NO: 1315266 - DNA, 15 bp, Homo sapiens
tttaatggactcggg

SEQ ID NO: 1315267 - DNA, 15 bp, Homo sapiens
atttaatggactcgg

SEQ ID NO: 1315268 - DNA, 15 bp, Homo sapiens
aatttaatggactcg

SEQ ID NO: 1315269 - DNA, 15 bp, Homo sapiens
taatttaatggactc

SEQ ID NO: 1315270 - DNA, 15 bp, Homo sapiens
ttaatttaatggact

SEQ ID NO: 1315271 - DNA, 15 bp, Homo sapiens
attaatttaatggac

SEQ ID NO: 1315272 - DNA, 15 bp, Homo sapiens
tattaatttaatgga

SEQ ID NO: 1315273 - DNA, 15 bp, Homo sapiens
ctattaatttaatgg

SEQ ID NO: 1315274 - DNA, 15 bp, Homo sapiens
gctattaatttaatg

SEQ ID NO: 1315275 - DNA, 15 bp, Homo sapiens
cgctattaatttaat

SEQ ID NO: 1315276 - DNA, 15 bp, Homo sapiens
tcgctattaatttaa

SEQ ID NO: 1315277 - DNA, 15 bp, Homo sapiens
atcgctattaattta

SEQ ID NO: 1315278 - DNA, 15 bp, Homo sapiens
aatcgctattaattt

SEQ ID NO: 1315279 - DNA, 15 bp, Homo sapiens
aaatcgctattaatt

SEQ ID NO: 1315280 - DNA, 15 bp, Homo sapiens
gaaatcgctattaat

SEQ ID NO: 1315281 - DNA, 15 bp, Homo sapiens
agaaatcgctattaa

SEQ ID NO: 1315282 - DNA, 15 bp, Homo sapiens
aagaaatcgctatta

SEQ ID NO: 1315283 - DNA, 15 bp, Homo sapiens
gaagaaatcgctatt

SEQ ID NO: 1315284 - DNA, 15 bp, Homo sapiens
agaagaaatcgctat

SEQ ID NO: 1315285 - DNA, 15 bp, Homo sapiens
gagaagaaatcgcta

SEQ ID NO: 1315286 - DNA, 15 bp, Homo sapiens
agagaagaaatcgct

SEQ ID NO: 1315287 - DNA, 15 bp, Homo sapiens
gagagaagaaatcgc

SEQ ID NO: 1315288 - DNA, 15 bp, Homo sapiens
ggagagaagaaatcg

SEQ ID NO: 1315289 - DNA, 15 bp, Homo sapiens
gggagagaagaaatc

SEQ ID NO: 1315290 - DNA, 15 bp, Homo sapiens
agggagagaagaaat

SEQ ID NO: 1315291 - DNA, 15 bp, Homo sapiens
cagggagagaagaaa

SEQ ID NO: 1315292 - DNA, 15 bp, Homo sapiens
acagggagagaagaa

SEQ ID NO: 1315293 - DNA, 15 bp, Homo sapiens
cacagggagagaaga

SEQ ID NO: 1315294 - DNA, 15 bp, Homo sapiens
acacagggagagaag

SEQ ID NO: 1315295 - DNA, 15 bp, Homo sapiens
tacacagggagagaa

SEQ ID NO: 1315296 - DNA, 15 bp, Homo sapiens
ctacacagggagaga

SEQ ID NO: 1315297 - DNA, 15 bp, Homo sapiens
gctacacagggagag

SEQ ID NO: 1315298 - DNA, 15 bp, Homo sapiens
tgctacacagggaga

SEQ ID NO: 1315299 - DNA, 15 bp, Homo sapiens
atgctacacagggag

SEQ ID NO: 1315300 - DNA, 15 bp, Homo sapiens
gatgctacacaggga

SEQ ID NO: 1315301 - DNA, 15 bp, Homo sapiens
agatgctacacaggg

SEQ ID NO: 1315302 - DNA, 15 bp, Homo sapiens
gagatgctacacagg

SEQ ID NO: 1315303 - DNA, 15 bp, Homo sapiens
ggagatgctacacag

SEQ ID NO: 1315304 - DNA, 15 bp, Homo sapiens
gggagatgctacaca

SEQ ID NO: 1315305 - DNA, 15 bp, Homo sapiens
ggggagatgctacac

SEQ ID NO: 1315306 - DNA, 15 bp, Homo sapiens
gggggagatgctaca

SEQ ID NO: 1315307 - DNA, 15 bp, Homo sapiens
tgggggagatgctac

SEQ ID NO: 1315308 - DNA, 15 bp, Homo sapiens
ttgggggagatgcta

SEQ ID NO: 1315309 - DNA, 15 bp, Homo sapiens
gttgggggagatgct

SEQ ID NO: 1315310 - DNA, 15 bp, Homo sapiens
ggttgggggagatgc

SEQ ID NO: 1315311 - DNA, 15 bp, Homo sapiens
aggttgggggagatg

SEQ ID NO: 1315312 - DNA, 15 bp, Homo sapiens
caggttgggggagat

SEQ ID NO: 1315313 - DNA, 15 bp, Homo sapiens
ccaggttgggggaga

SEQ ID NO: 1315314 - DNA, 15 bp, Homo sapiens
tccaggttgggggag

SEQ ID NO: 1315315 - DNA, 15 bp, Homo sapiens
ctccaggttggggga

SEQ ID NO: 1315316 - DNA, 15 bp, Homo sapiens
gctccaggttggggg

SEQ ID NO: 1315317 - DNA, 15 bp, Homo sapiens
agctccaggttgggg

SEQ ID NO: 1315318 - DNA, 15 bp, Homo sapiens
aagctccaggttggg

SEQ ID NO: 1315319 - DNA, 15 bp, Homo sapiens
caagctccaggttgg

SEQ ID NO: 1315320 - DNA, 15 bp, Homo sapiens
tcaagctccaggttg

SEQ ID NO: 1315321 - DNA, 15 bp, Homo sapiens
ttcaagctccaggtt

SEQ ID NO: 1315322 - DNA, 15 bp, Homo sapiens
cttcaagctccaggt

SEQ ID NO: 1315323 - DNA, 15 bp, Homo sapiens
gcttcaagctccagg

SEQ ID NO: 1315324 - DNA, 15 bp, Homo sapiens
agcttcaagctccag

SEQ ID NO: 1315325 - DNA, 15 bp, Homo sapiens
gagcttcaagctcca

SEQ ID NO: 1315326 - DNA, 15 bp, Homo sapiens
agagcttcaagctcc

SEQ ID NO: 1315327 - DNA, 15 bp, Homo sapiens
cagagcttcaagctc

SEQ ID NO: 1315328 - DNA, 15 bp, Homo sapiens
acagagcttcaagct

SEQ ID NO: 1315329 - DNA, 15 bp, Homo sapiens
aacagagcttcaagc

SEQ ID NO: 1315330 - DNA, 15 bp, Homo sapiens
gaacagagcttcaag

SEQ ID NO: 1315331 - DNA, 15 bp, Homo sapiens
tgaacagagcttcaa

SEQ ID NO: 1315332 - DNA, 15 bp, Homo sapiens
ttgaacagagcttca

SEQ ID NO: 1315333 - DNA, 15 bp, Homo sapiens
tttgaacagagcttc

SEQ ID NO: 1315334 - DNA, 15 bp, Homo sapiens
gtttgaacagagctt

SEQ ID NO: 1315335 - DNA, 15 bp, Homo sapiens
cgtttgaacagagct

SEQ ID NO: 1315336 - DNA, 15 bp, Homo sapiens
tcgtttgaacagagc

SEQ ID NO: 1315337 - DNA, 15 bp, Homo sapiens
gtcgtttgaacagag

SEQ ID NO: 1315338 - DNA, 15 bp, Homo sapiens
tgtcgtttgaacaga

SEQ ID NO: 1315339 - DNA, 15 bp, Homo sapiens
atgtcgtttgaacag

SEQ ID NO: 1315340 - DNA, 15 bp, Homo sapiens
aatgtcgtttgaaca

SEQ ID NO: 1315341 - DNA, 15 bp, Homo sapiens
aaatgtcgtttgaac

SEQ ID NO: 1315342 - DNA, 15 bp, Homo sapiens
aaaatgtcgtttgaa

SEQ ID NO: 1315343 - DNA, 15 bp, Homo sapiens
taaaatgtcgtttga

SEQ ID NO: 1315344 - DNA, 15 bp, Homo sapiens
gtaaaatgtcgtttg

SEQ ID NO: 1315345 - DNA, 15 bp, Homo sapiens
agtaaaatgtcgttt

SEQ ID NO: 1315346 - DNA, 15 bp, Homo sapiens
gagtaaaatgtcgtt

SEQ ID NO: 1315347 - DNA, 15 bp, Homo sapiens
tgagtaaaatgtcgt

SEQ ID NO: 1315348 - DNA, 15 bp, Homo sapiens
ctgagtaaaatgtcg

SEQ ID NO: 1315349 - DNA, 15 bp, Homo sapiens
cctgagtaaaatgtc

SEQ ID NO: 1315350 - DNA, 15 bp, Homo sapiens
acctgagtaaaatgt

SEQ ID NO: 1315351 - DNA, 15 bp, Homo sapiens
cacctgagtaaaatg

SEQ ID NO: 1315352 - DNA, 15 bp, Homo sapiens
ccacctgagtaaaat

SEQ ID NO: 1315353 - DNA, 15 bp, Homo sapiens
tccacctgagtaaaa

SEQ ID NO: 1315354 - DNA, 15 bp, Homo sapiens
ttccacctgagtaaa

SEQ ID NO: 1315355 - DNA, 15 bp, Homo sapiens
attccacctgagtaa

SEQ ID NO: 1315356 - DNA, 15 bp, Homo sapiens
aattccacctgagta

SEQ ID NO: 1315357 - DNA, 15 bp, Homo sapiens
aaattccacctgagt

SEQ ID NO: 1315358 - DNA, 15 bp, Homo sapiens
aaaattccacctgag

SEQ ID NO: 1315359 - DNA, 15 bp, Homo sapiens
taaaattccacctga

SEQ ID NO: 1315360 - DNA, 15 bp, Homo sapiens
ataaaattccacctg

SEQ ID NO: 1315361 - DNA, 15 bp, Homo sapiens
gataaaattccacct

SEQ ID NO: 1315362 - DNA, 15 bp, Homo sapiens
tgataaaattccacc

SEQ ID NO: 1315363 - DNA, 15 bp, Homo sapiens
ctgataaaattccac

SEQ ID NO: 1315364 - DNA, 15 bp, Homo sapiens
cctgataaaattcca

SEQ ID NO: 1315365 - DNA, 15 bp, Homo sapiens
ccctgataaaattcc

SEQ ID NO: 1315366 - DNA, 15 bp, Homo sapiens
accctgataaaattc

SEQ ID NO: 1315367 - DNA, 15 bp, Homo sapiens
aaccctgataaaatt

SEQ ID NO: 1315368 - DNA, 15 bp, Homo sapiens
gaaccctgataaaat

SEQ ID NO: 1315369 - DNA, 15 bp, Homo sapiens
ggaaccctgataaaa

SEQ ID NO: 1315370 - DNA, 15 bp, Homo sapiens
cggaaccctgataaa

SEQ ID NO: 1315371 - DNA, 15 bp, Homo sapiens
acggaaccctgataa

SEQ ID NO: 1315372 - DNA, 15 bp, Homo sapiens
gacggaaccctgata

SEQ ID NO: 1315373 - DNA, 15 bp, Homo sapiens
ggacggaaccctgat

SEQ ID NO: 1315374 - DNA, 15 bp, Homo sapiens
aggacggaaccctga

SEQ ID NO: 1315375 - DNA, 15 bp, Homo sapiens
gaggacggaaccctg

SEQ ID NO: 1315376 - DNA, 15 bp, Homo sapiens
tgaggacggaaccct

SEQ ID NO: 1315377 - DNA, 15 bp, Homo sapiens
ttgaggacggaaccc

SEQ ID NO: 1315378 - DNA, 15 bp, Homo sapiens
attgaggacggaacc

SEQ ID NO: 1315379 - DNA, 15 bp, Homo sapiens
gattgaggacggaac

SEQ ID NO: 1315380 - DNA, 15 bp, Homo sapiens
ggattgaggacggaa

SEQ ID NO: 1315381 - DNA, 15 bp, Homo sapiens
tggattgaggacgga

SEQ ID NO: 1315382 - DNA, 15 bp, Homo sapiens
gtggattgaggacgg

SEQ ID NO: 1315383 - DNA, 15 bp, Homo sapiens
tgtggattgaggacg

SEQ ID NO: 1315384 - DNA, 15 bp, Homo sapiens
atgtggattgaggac

SEQ ID NO: 1315385 - DNA, 15 bp, Homo sapiens
catgtggattgagga

SEQ ID NO: 1315386 - DNA, 15 bp, Homo sapiens
tcatgtggattgagg

SEQ ID NO: 1315387 - DNA, 15 bp, Homo sapiens
atcatgtggattgag

SEQ ID NO: 1315388 - DNA, 15 bp, Homo sapiens
gatcatgtggattga

SEQ ID NO: 1315389 - DNA, 15 bp, Homo sapiens
agatcatgtggattg

SEQ ID NO: 1315390 - DNA, 15 bp, Homo sapiens
aagatcatgtggatt

SEQ ID NO: 1315391 - DNA, 15 bp, Homo sapiens
caagatcatgtggat

SEQ ID NO: 1315392 - DNA, 15 bp, Homo sapiens
gcaagatcatgtgga

SEQ ID NO: 1315393 - DNA, 15 bp, Homo sapiens
tgcaagatcatgtgg

SEQ ID NO: 1315394 - DNA, 15 bp, Homo sapiens
ttgcaagatcatgtg

SEQ ID NO: 1315395 - DNA, 15 bp, Homo sapiens
cttgcaagatcatgt

SEQ ID NO: 1315396 - DNA, 15 bp, Homo sapiens
tcttgcaagatcatg

SEQ ID NO: 1315397 - DNA, 15 bp, Homo sapiens
ctcttgcaagatcat

SEQ ID NO: 1315398 - DNA, 15 bp, Homo sapiens
actcttgcaagatca

SEQ ID NO: 1315399 - DNA, 15 bp, Homo sapiens
gactcttgcaagatc

SEQ ID NO: 1315400 - DNA, 15 bp, Homo sapiens
tgactcttgcaagat

SEQ ID NO: 1315401 - DNA, 15 bp, Homo sapiens
ttgactcttgcaaga

SEQ ID NO: 1315402 - DNA, 15 bp, Homo sapiens
cttgactcttgcaag

SEQ ID NO: 1315403 - DNA, 15 bp, Homo sapiens
ccttgactcttgcaa

SEQ ID NO: 1315404 - DNA, 15 bp, Homo sapiens
accttgactcttgca

SEQ ID NO: 1315405 - DNA, 15 bp, Homo sapiens
taccttgactcttgc

SEQ ID NO: 1315406 - DNA, 15 bp, Homo sapiens
ttaccttgactcttg

SEQ ID NO: 1315407 - DNA, 15 bp, Homo sapiens
cttaccttgactctt

SEQ ID NO: 1315408 - DNA, 15 bp, Homo sapiens
ccttaccttgactct

SEQ ID NO: 1315409 - DNA, 15 bp, Homo sapiens
tccttaccttgactc

SEQ ID NO: 1315410 - DNA, 15 bp, Homo sapiens
ctccttaccttgact

SEQ ID NO: 1315411 - DNA, 15 bp, Homo sapiens
cctccttaccttgac

SEQ ID NO: 1315412 - DNA, 15 bp, Homo sapiens
tcctccttaccttga

SEQ ID NO: 1315413 - DNA, 15 bp, Homo sapiens
ttcctccttaccttg

SEQ ID NO: 1315414 - DNA, 15 bp, Homo sapiens
cttcctccttacctt

SEQ ID NO: 1315415 - DNA, 15 bp, Homo sapiens
tcttcctccttacct

SEQ ID NO: 1315416 - DNA, 15 bp, Homo sapiens
ctcttcctccttacc

SEQ ID NO: 1315417 - DNA, 15 bp, Homo sapiens
cctcttcctccttac

SEQ ID NO: 1315418 - DNA, 15 bp, Homo sapiens
acctcttcctcctta

SEQ ID NO: 1315419 - DNA, 15 bp, Homo sapiens
cacctcttcctcctt

SEQ ID NO: 1315420 - DNA, 15 bp, Homo sapiens
tcacctcttcctcct

SEQ ID NO: 1315421 - DNA, 15 bp, Homo sapiens
gtcacctcttcctcc

SEQ ID NO: 1315422 - DNA, 15 bp, Homo sapiens
agtcacctcttcctc

SEQ ID NO: 1315423 - DNA, 15 bp, Homo sapiens
aagtcacctcttcct

SEQ ID NO: 1315424 - DNA, 15 bp, Homo sapiens
gaagtcacctcttcc

SEQ ID NO: 1315425 - DNA, 15 bp, Homo sapiens
agaagtcacctcttc

SEQ ID NO: 1315426 - DNA, 15 bp, Homo sapiens
cagaagtcacctctt

SEQ ID NO: 1315427 - DNA, 15 bp, Homo sapiens
gcagaagtcacctct

SEQ ID NO: 1315428 - DNA, 15 bp, Homo sapiens
agcagaagtcacctc

SEQ ID NO: 1315429 - DNA, 15 bp, Homo sapiens
aagcagaagtcacct

SEQ ID NO: 1315430 - DNA, 15 bp, Homo sapiens
aaagcagaagtcacc

SEQ ID NO: 1315431 - DNA, 15 bp, Homo sapiens
aaaagcagaagtcac

SEQ ID NO: 1315432 - DNA, 15 bp, Homo sapiens
taaaagcagaagtca

SEQ ID NO: 1315433 - DNA, 15 bp, Homo sapiens
ataaaagcagaagtc

SEQ ID NO: 1315434 - DNA, 15 bp, Homo sapiens
aataaaagcagaagt

SEQ ID NO: 1315435 - DNA, 15 bp, Homo sapiens
gaataaaagcagaag

SEQ ID NO: 1315436 - DNA, 15 bp, Homo sapiens
ggaataaaagcagaa

SEQ ID NO: 1315437 - DNA, 15 bp, Homo sapiens
tggaataaaagcaga

SEQ ID NO: 1315438 - DNA, 15 bp, Homo sapiens
atggaataaaagcag

SEQ ID NO: 1315439 - DNA, 15 bp, Homo sapiens
gatggaataaaagca

SEQ ID NO: 1315440 - DNA, 15 bp, Homo sapiens
agatggaataaaagc

SEQ ID NO: 1315441 - DNA, 15 bp, Homo sapiens
aagatggaataaaag

SEQ ID NO: 1315442 - DNA, 15 bp, Homo sapiens
caagatggaataaaa

SEQ ID NO: 1315443 - DNA, 15 bp, Homo sapiens
ccaagatggaataaa

SEQ ID NO: 1315444 - DNA, 15 bp, Homo sapiens
accaagatggaataa

SEQ ID NO: 1315445 - DNA, 15 bp, Homo sapiens
caccaagatggaata

SEQ ID NO: 1315446 - DNA, 15 bp, Homo sapiens
acaccaagatggaat

SEQ ID NO: 1315447 - DNA, 15 bp, Homo sapiens
cacaccaagatggaa

SEQ ID NO: 1315448 - DNA, 15 bp, Homo sapiens
ccacaccaagatgga

SEQ ID NO: 1315449 - DNA, 15 bp, Homo sapiens
cccacaccaagatgg

SEQ ID NO: 1315450 - DNA, 15 bp, Homo sapiens
acccacaccaagatg

SEQ ID NO: 1315451 - DNA, 15 bp, Homo sapiens
gacccacaccaagat

SEQ ID NO: 1315452 - DNA, 15 bp, Homo sapiens
agacccacaccaaga

SEQ ID NO: 1315453 - DNA, 15 bp, Homo sapiens
cagacccacaccaag

SEQ ID NO: 1315454 - DNA, 15 bp, Homo sapiens
ccagacccacaccaa

SEQ ID NO: 1315455 - DNA, 15 bp, Homo sapiens
cccagacccacacca

SEQ ID NO: 1315456 - DNA, 15 bp, Homo sapiens
ccccagacccacacc

SEQ ID NO: 1315457 - DNA, 15 bp, Homo sapiens
cccccagacccacac

SEQ ID NO: 1315458 - DNA, 15 bp, Homo sapiens
ccccccagacccaca

SEQ ID NO: 1315459 - DNA, 15 bp, Homo sapiens
tccccccagacccac

SEQ ID NO: 1315460 - DNA, 15 bp, Homo sapiens
ctccccccagaccca

SEQ ID NO: 1315461 - DNA, 15 bp, Homo sapiens
actccccccagaccc

SEQ ID NO: 1315462 - DNA, 15 bp, Homo sapiens
gactccccccagacc

SEQ ID NO: 1315463 - DNA, 15 bp, Homo sapiens
ggactccccccagac

SEQ ID NO: 1315464 - DNA, 15 bp, Homo sapiens
aggactccccccaga

SEQ ID NO: 1315465 - DNA, 15 bp, Homo sapiens
caggactccccccag

SEQ ID NO: 1315466 - DNA, 15 bp, Homo sapiens
tcaggactcccccca

SEQ ID NO: 1315467 - DNA, 15 bp, Homo sapiens
gtcaggactcccccc

SEQ ID NO: 1315468 - DNA, 15 bp, Homo sapiens
agtcaggactccccc

SEQ ID NO: 1315469 - DNA, 15 bp, Homo sapiens
gagtcaggactcccc

SEQ ID NO: 1315470 - DNA, 15 bp, Homo sapiens
agagtcaggactccc

SEQ ID NO: 1315471 - DNA, 15 bp, Homo sapiens
cagagtcaggactcc

SEQ ID NO: 1315472 - DNA, 15 bp, Homo sapiens
acagagtcaggactc

SEQ ID NO: 1315473 - DNA, 15 bp, Homo sapiens
cacagagtcaggact

SEQ ID NO: 1315474 - DNA, 15 bp, Homo sapiens
gcacagagtcaggac

SEQ ID NO: 1315475 - DNA, 15 bp, Homo sapiens
agcacagagtcagga

SEQ ID NO: 1315476 - DNA, 15 bp, Homo sapiens
cagcacagagtcagg

SEQ ID NO: 1315477 - DNA, 15 bp, Homo sapiens
tcagcacagagtcag

SEQ ID NO: 1315478 - DNA, 15 bp, Homo sapiens
ctcagcacagagtca

SEQ ID NO: 1315479 - DNA, 15 bp, Homo sapiens
cctcagcacagagtc

SEQ ID NO: 1315480 - DNA, 15 bp, Homo sapiens
ccctcagcacagagt

SEQ ID NO: 1315481 - DNA, 15 bp, Homo sapiens
cccctcagcacagag

SEQ ID NO: 1315482 - DNA, 15 bp, Homo sapiens
tcccctcagcacaga

SEQ ID NO: 1315483 - DNA, 15 bp, Homo sapiens
gtcccctcagcacag

SEQ ID NO: 1315484 - DNA, 15 bp, Homo sapiens
tgtcccctcagcaca

SEQ ID NO: 1315485 - DNA, 15 bp, Homo sapiens
gtgtcccctcagcac

SEQ ID NO: 1315486 - DNA, 15 bp, Homo sapiens
tgtgtcccctcagca

SEQ ID NO: 1315487 - DNA, 15 bp, Homo sapiens
gtgtgtcccctcagc

SEQ ID NO: 1315488 - DNA, 15 bp, Homo sapiens
ggtgtgtcccctcag

SEQ ID NO: 1315489 - DNA, 15 bp, Homo sapiens
aggtgtgtcccctca

SEQ ID NO: 1315490 - DNA, 15 bp, Homo sapiens
gaggtgtgtcccctc

SEQ ID NO: 1315491 - DNA, 15 bp, Homo sapiens
ggaggtgtgtcccct

SEQ ID NO: 1315492 - DNA, 15 bp, Homo sapiens
aggaggtgtgtcccc

SEQ ID NO: 1315493 - DNA, 15 bp, Homo sapiens
taggaggtgtgtccc

SEQ ID NO: 1315494 - DNA, 15 bp, Homo sapiens
ctaggaggtgtgtcc

SEQ ID NO: 1315495 - DNA, 15 bp, Homo sapiens
cctaggaggtgtgtc

SEQ ID NO: 1315496 - DNA, 15 bp, Homo sapiens
acctaggaggtgtgt

SEQ ID NO: 1315497 - DNA, 15 bp, Homo sapiens
aacctaggaggtgtg

SEQ ID NO: 1315498 - DNA, 15 bp, Homo sapiens
caacctaggaggtgt

SEQ ID NO: 1315499 - DNA, 15 bp, Homo sapiens
ccaacctaggaggtg

SEQ ID NO: 1315500 - DNA, 15 bp, Homo sapiens
gccaacctaggaggt

SEQ ID NO: 1315501 - DNA, 15 bp, Homo sapiens
ggccaacctaggagg

SEQ ID NO: 1315502 - DNA, 15 bp, Homo sapiens
tggccaacctaggag

SEQ ID NO: 1315503 - DNA, 15 bp, Homo sapiens
gtggccaacctagga

SEQ ID NO: 1315504 - DNA, 15 bp, Homo sapiens
cgtggccaacctagg

SEQ ID NO: 1315505 - DNA, 15 bp, Homo sapiens
tcgtggccaacctag

SEQ ID NO: 1315506 - DNA, 15 bp, Homo sapiens
ctcgtggccaaccta

SEQ ID NO: 1315507 - DNA, 15 bp, Homo sapiens
actcgtggccaacct

SEQ ID NO: 1315508 - DNA, 15 bp, Homo sapiens
gactcgtggccaacc

SEQ ID NO: 1315509 - DNA, 15 bp, Homo sapiens
tgactcgtggccaac

SEQ ID NO: 1315510 - DNA, 15 bp, Homo sapiens
atgactcgtggccaa

SEQ ID NO: 1315511 - DNA, 15 bp, Homo sapiens
gatgactcgtggcca

SEQ ID NO: 1315512 - DNA, 15 bp, Homo sapiens
agatgactcgtggcc

SEQ ID NO: 1315513 - DNA, 15 bp, Homo sapiens
gagatgactcgtggc

SEQ ID NO: 1315514 - DNA, 15 bp, Homo sapiens
ggagatgactcgtgg

SEQ ID NO: 1315515 - DNA, 15 bp, Homo sapiens
aggagatgactcgtg

SEQ ID NO: 1315516 - DNA, 15 bp, Homo sapiens
taggagatgactcgt

SEQ ID NO: 1315517 - DNA, 15 bp, Homo sapiens
ttaggagatgactcg

SEQ ID NO: 1315518 - DNA, 15 bp, Homo sapiens
tttaggagatgactc

SEQ ID NO: 1315519 - DNA, 15 bp, Homo sapiens
gtttaggagatgact

SEQ ID NO: 1315520 - DNA, 15 bp, Homo sapiens
tgtttaggagatgac

SEQ ID NO: 1315521 - DNA, 15 bp, Homo sapiens
gtgtttaggagatga

SEQ ID NO: 1315522 - DNA, 15 bp, Homo sapiens
ggtgtttaggagatg

SEQ ID NO: 1315523 - DNA, 15 bp, Homo sapiens
aggtgtttaggagat

SEQ ID NO: 1315524 - DNA, 15 bp, Homo sapiens
taggtgtttaggaga

SEQ ID NO: 1315525 - DNA, 15 bp, Homo sapiens
ttaggtgtttaggag

SEQ ID NO: 1315526 - DNA, 15 bp, Homo sapiens
attaggtgtttagga

SEQ ID NO: 1315527 - DNA, 15 bp, Homo sapiens
cattaggtgtttagg

SEQ ID NO: 1315528 - DNA, 15 bp, Homo sapiens
tcattaggtgtttag

SEQ ID NO: 1315529 - DNA, 15 bp, Homo sapiens
ctcattaggtgttta

SEQ ID NO: 1315530 - DNA, 15 bp, Homo sapiens
tctcattaggtgttt

SEQ ID NO: 1315531 - DNA, 15 bp, Homo sapiens
atctcattaggtgtt

SEQ ID NO: 1315532 - DNA, 15 bp, Homo sapiens
gatctcattaggtgt

SEQ ID NO: 1315533 - DNA, 15 bp, Homo sapiens
tgatctcattaggtg

SEQ ID NO: 1315534 - DNA, 15 bp, Homo sapiens
ttgatctcattaggt

SEQ ID NO: 1315535 - DNA, 15 bp, Homo sapiens
attgatctcattagg

SEQ ID NO: 1315536 - DNA, 15 bp, Homo sapiens
gattgatctcattag

SEQ ID NO: 1315537 - DNA, 15 bp, Homo sapiens
tgattgatctcatta

SEQ ID NO: 1315538 - DNA, 15 bp, Homo sapiens
gtgattgatctcatt

SEQ ID NO: 1315539 - DNA, 15 bp, Homo sapiens
tgtgattgatctcat

SEQ ID NO: 1315540 - DNA, 15 bp, Homo sapiens
atgtgattgatctca

SEQ ID NO: 1315541 - DNA, 15 bp, Homo sapiens
tatgtgattgatctc

SEQ ID NO: 1315542 - DNA, 15 bp, Homo sapiens
gtatgtgattgatct

SEQ ID NO: 1315543 - DNA, 15 bp, Homo sapiens
ggtatgtgattgatc

SEQ ID NO: 1315544 - DNA, 15 bp, Homo sapiens
tggtatgtgattgat

SEQ ID NO: 1315545 - DNA, 15 bp, Homo sapiens
ctggtatgtgattga

SEQ ID NO: 1315546 - DNA, 15 bp, Homo sapiens
gctggtatgtgattg

SEQ ID NO: 1315547 - DNA, 15 bp, Homo sapiens
tgctggtatgtgatt

SEQ ID NO: 1315548 - DNA, 15 bp, Homo sapiens
ttgctggtatgtgat

SEQ ID NO: 1315549 - DNA, 15 bp, Homo sapiens
gttgctggtatgtga

SEQ ID NO: 1315550 - DNA, 15 bp, Homo sapiens
ggttgctggtatgtg

SEQ ID NO: 1315551 - DNA, 15 bp, Homo sapiens
aggttgctggtatgt

SEQ ID NO: 1315552 - DNA, 15 bp, Homo sapiens
aaggttgctggtatg

SEQ ID NO: 1315553 - DNA, 15 bp, Homo sapiens
caaggttgctggtat

SEQ ID NO: 1315554 - DNA, 15 bp, Homo sapiens
tcaaggttgctggta

SEQ ID NO: 1315555 - DNA, 15 bp, Homo sapiens
ctcaaggttgctggt

SEQ ID NO: 1315556 - DNA, 15 bp, Homo sapiens
cctcaaggttgctgg

SEQ ID NO: 1315557 - DNA, 15 bp, Homo sapiens
acctcaaggttgctg

SEQ ID NO: 1315558 - DNA, 15 bp, Homo sapiens
gacctcaaggttgct

SEQ ID NO: 1315559 - DNA, 15 bp, Homo sapiens
tgacctcaaggttgc

SEQ ID NO: 1315560 - DNA, 15 bp, Homo sapiens
gtgacctcaaggttg

SEQ ID NO: 1315561 - DNA, 15 bp, Homo sapiens
ggtgacctcaaggtt

SEQ ID NO: 1315562 - DNA, 15 bp, Homo sapiens
gggtgacctcaaggt

SEQ ID NO: 1315563 - DNA, 15 bp, Homo sapiens
agggtgacctcaagg

SEQ ID NO: 1315564 - DNA, 15 bp, Homo sapiens
aagggtgacctcaag

SEQ ID NO: 1315565 - DNA, 15 bp, Homo sapiens
gaagggtgacctcaa

SEQ ID NO: 1315566 - DNA, 15 bp, Homo sapiens
ggaagggtgacctca

SEQ ID NO: 1315567 - DNA, 15 bp, Homo sapiens
tggaagggtgacctc

SEQ ID NO: 1315568 - DNA, 15 bp, Homo sapiens
gtggaagggtgacct

SEQ ID NO: 1315569 - DNA, 15 bp, Homo sapiens
agtggaagggtgacc

SEQ ID NO: 1315570 - DNA, 15 bp, Homo sapiens
cagtggaagggtgac

SEQ ID NO: 1315571 - DNA, 15 bp, Homo sapiens
ccagtggaagggtga

SEQ ID NO: 1315572 - DNA, 15 bp, Homo sapiens
accagtggaagggtg

SEQ ID NO: 1315573 - DNA, 15 bp, Homo sapiens
gaccagtggaagggt

SEQ ID NO: 1315574 - DNA, 15 bp, Homo sapiens
ggaccagtggaaggg

SEQ ID NO: 1315575 - DNA, 15 bp, Homo sapiens
gggaccagtggaagg

SEQ ID NO: 1315576 - DNA, 15 bp, Homo sapiens
tgggaccagtggaag

SEQ ID NO: 1315577 - DNA, 15 bp, Homo sapiens
ctgggaccagtggaa

SEQ ID NO: 1315578 - DNA, 15 bp, Homo sapiens
cctgggaccagtgga

SEQ ID NO: 1315579 - DNA, 15 bp, Homo sapiens
tcctgggaccagtgg

SEQ ID NO: 1315580 - DNA, 15 bp, Homo sapiens
gtcctgggaccagtg

SEQ ID NO: 1315581 - DNA, 15 bp, Homo sapiens
ggtcctgggaccagt

SEQ ID NO: 1315582 - DNA, 15 bp, Homo sapiens
aggtcctgggaccag

SEQ ID NO: 1315583 - DNA, 15 bp, Homo sapiens
gaggtcctgggacca

SEQ ID NO: 1315584 - DNA, 15 bp, Homo sapiens
ggaggtcctgggacc

SEQ ID NO: 1315585 - DNA, 15 bp, Homo sapiens
aggaggtcctgggac

SEQ ID NO: 1315586 - DNA, 15 bp, Homo sapiens
aaggaggtcctggga

SEQ ID NO: 1315587 - DNA, 15 bp, Homo sapiens
gaaggaggtcctggg

SEQ ID NO: 1315588 - DNA, 15 bp, Homo sapiens
agaaggaggtcctgg

SEQ ID NO: 1315589 - DNA, 15 bp, Homo sapiens
cagaaggaggtcctg

SEQ ID NO: 1315590 - DNA, 15 bp, Homo sapiens
gcagaaggaggtcct

SEQ ID NO: 1315591 - DNA, 15 bp, Homo sapiens
agcagaaggaggtcc

SEQ ID NO: 1315592 - DNA, 15 bp, Homo sapiens
cagcagaaggaggtc

SEQ ID NO: 1315593 - DNA, 15 bp, Homo sapiens
ccagcagaaggaggt

SEQ ID NO: 1315594 - DNA, 15 bp, Homo sapiens
gccagcagaaggagg

SEQ ID NO: 1315595 - DNA, 15 bp, Homo sapiens
tgccagcagaaggag

SEQ ID NO: 1315596 - DNA, 15 bp, Homo sapiens
atgccagcagaagga

SEQ ID NO: 1315597 - DNA, 15 bp, Homo sapiens
tatgccagcagaagg

SEQ ID NO: 1315598 - DNA, 15 bp, Homo sapiens
atatgccagcagaag

SEQ ID NO: 1315599 - DNA, 15 bp, Homo sapiens
catatgccagcagaa

SEQ ID NO: 1315600 - DNA, 15 bp, Homo sapiens
gcatatgccagcaga

SEQ ID NO: 1315601 - DNA, 15 bp, Homo sapiens
tgcatatgccagcag

SEQ ID NO: 1315602 - DNA, 15 bp, Homo sapiens
ttgcatatgccagca

SEQ ID NO: 1315603 - DNA, 15 bp, Homo sapiens
gttgcatatgccagc

SEQ ID NO: 1315604 - DNA, 15 bp, Homo sapiens
tgttgcatatgccag

SEQ ID NO: 1315605 - DNA, 15 bp, Homo sapiens
gtgttgcatatgcca

SEQ ID NO: 1315606 - DNA, 15 bp, Homo sapiens
agtgttgcatatgcc

SEQ ID NO: 1315607 - DNA, 15 bp, Homo sapiens
tagtgttgcatatgc

SEQ ID NO: 1315608 - DNA, 15 bp, Homo sapiens
gtagtgttgcatatg

SEQ ID NO: 1315609 - DNA, 15 bp, Homo sapiens
ggtagtgttgcatat

SEQ ID NO: 1315610 - DNA, 15 bp, Homo sapiens
aggtagtgttgcata

SEQ ID NO: 1315611 - DNA, 15 bp, Homo sapiens
taggtagtgttgcat

SEQ ID NO: 1315612 - DNA, 15 bp, Homo sapiens
ataggtagtgttgca

SEQ ID NO: 1315613 - DNA, 15 bp, Homo sapiens
tataggtagtgttgc

SEQ ID NO: 1315614 - DNA, 15 bp, Homo sapiens
ttataggtagtgttg

SEQ ID NO: 1315615 - DNA, 15 bp, Homo sapiens
gttataggtagtgtt

SEQ ID NO: 1315616 - DNA, 15 bp, Homo sapiens
ggttataggtagtgt

SEQ ID NO: 1315617 - DNA, 15 bp, Homo sapiens
tggttataggtagtg

SEQ ID NO: 1315618 - DNA, 15 bp, Homo sapiens
atggttataggtagt

SEQ ID NO: 1315619 - DNA, 15 bp, Homo sapiens
gatggttataggtag

SEQ ID NO: 1315620 - DNA, 15 bp, Homo sapiens
ggatggttataggta

SEQ ID NO: 1315621 - DNA, 15 bp, Homo sapiens
gggatggttataggt

SEQ ID NO: 1315622 - DNA, 15 bp, Homo sapiens
tgggatggttatagg

SEQ ID NO: 1315623 - DNA, 15 bp, Homo sapiens
gtgggatggttatag

SEQ ID NO: 1315624 - DNA, 15 bp, Homo sapiens
tgtgggatggttata

SEQ ID NO: 1315625 - DNA, 15 bp, Homo sapiens
gtgtgggatggttat

SEQ ID NO: 1315626 - DNA, 15 bp, Homo sapiens
agtgtgggatggtta

SEQ ID NO: 1315627 - DNA, 15 bp, Homo sapiens
aagtgtgggatggtt

SEQ ID NO: 1315628 - DNA, 15 bp, Homo sapiens
caagtgtgggatggt

SEQ ID NO: 1315629 - DNA, 15 bp, Homo sapiens
ccaagtgtgggatgg

SEQ ID NO: 1315630 - DNA, 15 bp, Homo sapiens
tccaagtgtgggatg

SEQ ID NO: 1315631 - DNA, 15 bp, Homo sapiens
gtccaagtgtgggat

SEQ ID NO: 1315632 - DNA, 15 bp, Homo sapiens
agtccaagtgtggga

SEQ ID NO: 1315633 - DNA, 15 bp, Homo sapiens
cagtccaagtgtggg

SEQ ID NO: 1315634 - DNA, 15 bp, Homo sapiens
ccagtccaagtgtgg

SEQ ID NO: 1315635 - DNA, 15 bp, Homo sapiens
accagtccaagtgtg

SEQ ID NO: 1315636 - DNA, 15 bp, Homo sapiens
gaccagtccaagtgt

SEQ ID NO: 1315637 - DNA, 15 bp, Homo sapiens
tgaccagtccaagtg

SEQ ID NO: 1315638 - DNA, 15 bp, Homo sapiens
atgaccagtccaagt

SEQ ID NO: 1315639 - DNA, 15 bp, Homo sapiens
tatgaccagtccaag

SEQ ID NO: 1315640 - DNA, 15 bp, Homo sapiens
ttatgaccagtccaa

SEQ ID NO: 1315641 - DNA, 15 bp, Homo sapiens
gttatgaccagtcca

SEQ ID NO: 1315642 - DNA, 15 bp, Homo sapiens
tgttatgaccagtcc

SEQ ID NO: 1315643 - DNA, 15 bp, Homo sapiens
atgttatgaccagtc

SEQ ID NO: 1315644 - DNA, 15 bp, Homo sapiens
catgttatgaccagt

SEQ ID NO: 1315645 - DNA, 15 bp, Homo sapiens
tcatgttatgaccag

SEQ ID NO: 1315646 - DNA, 15 bp, Homo sapiens
ttcatgttatgacca

SEQ ID NO: 1315647 - DNA, 15 bp, Homo sapiens
tttcatgttatgacc

SEQ ID NO: 1315648 - DNA, 15 bp, Homo sapiens
gtttcatgttatgac

SEQ ID NO: 1315649 - DNA, 15 bp, Homo sapiens
agtttcatgttatga

SEQ ID NO: 1315650 - DNA, 15 bp, Homo sapiens
aagtttcatgttatg

SEQ ID NO: 1315651 - DNA, 15 bp, Homo sapiens
caagtttcatgttat

SEQ ID NO: 1315652 - DNA, 15 bp, Homo sapiens
gcaagtttcatgtta

SEQ ID NO: 1315653 - DNA, 15 bp, Homo sapiens
agcaagtttcatgtt

SEQ ID NO: 1315654 - DNA, 15 bp, Homo sapiens
aagcaagtttcatgt

SEQ ID NO: 1315655 - DNA, 15 bp, Homo sapiens
aaagcaagtttcatg

SEQ ID NO: 1315656 - DNA, 15 bp, Homo sapiens
caaagcaagtttcat

SEQ ID NO: 1315657 - DNA, 15 bp, Homo sapiens
gcaaagcaagtttca

SEQ ID NO: 1315658 - DNA, 15 bp, Homo sapiens
agcaaagcaagtttc

SEQ ID NO: 1315659 - DNA, 15 bp, Homo sapiens
cagcaaagcaagttt

SEQ ID NO: 1315660 - DNA, 15 bp, Homo sapiens
ccagcaaagcaagtt

SEQ ID NO: 1315661 - DNA, 15 bp, Homo sapiens
tccagcaaagcaagt

SEQ ID NO: 1315662 - DNA, 15 bp, Homo sapiens
atccagcaaagcaag

SEQ ID NO: 1315663 - DNA, 15 bp, Homo sapiens
aatccagcaaagcaa

SEQ ID NO: 1315664 - DNA, 15 bp, Homo sapiens
gaatccagcaaagca

SEQ ID NO: 1315665 - DNA, 15 bp, Homo sapiens
ggaatccagcaaagc

SEQ ID NO: 1315666 - DNA, 15 bp, Homo sapiens
aggaatccagcaaag

SEQ ID NO: 1315667 - DNA, 15 bp, Homo sapiens
gaggaatccagcaaa

SEQ ID NO: 1315668 - DNA, 15 bp, Homo sapiens
tgaggaatccagcaa

SEQ ID NO: 1315669 - DNA, 15 bp, Homo sapiens
ttgaggaatccagca

SEQ ID NO: 1315670 - DNA, 15 bp, Homo sapiens
tttgaggaatccagc

SEQ ID NO: 1315671 - DNA, 15 bp, Homo sapiens
ttttgaggaatccag

SEQ ID NO: 1315672 - DNA, 15 bp, Homo sapiens
attttgaggaatcca

SEQ ID NO: 1315673 - DNA, 15 bp, Homo sapiens
gattttgaggaatcc

SEQ ID NO: 1315674 - DNA, 15 bp, Homo sapiens
tgattttgaggaatc

SEQ ID NO: 1315675 - DNA, 15 bp, Homo sapiens
ctgattttgaggaat

SEQ ID NO: 1315676 - DNA, 15 bp, Homo sapiens
gctgattttgaggaa

SEQ ID NO: 1315677 - DNA, 15 bp, Homo sapiens
agctgattttgagga

SEQ ID NO: 1315678 - DNA, 15 bp, Homo sapiens
tagctgattttgagg

SEQ ID NO: 1315679 - DNA, 15 bp, Homo sapiens
gtagctgattttgag

SEQ ID NO: 1315680 - DNA, 15 bp, Homo sapiens
agtagctgattttga

SEQ ID NO: 1315681 - DNA, 15 bp, Homo sapiens
gagtagctgattttg

SEQ ID NO: 1315682 - DNA, 15 bp, Homo sapiens
tgagtagctgatttt

SEQ ID NO: 1315683 - DNA, 15 bp, Homo sapiens
atgagtagctgattt

SEQ ID NO: 1315684 - DNA, 15 bp, Homo sapiens
gatgagtagctgatt

SEQ ID NO: 1315685 - DNA, 15 bp, Homo sapiens
tgatgagtagctgat

SEQ ID NO: 1315686 - DNA, 15 bp, Homo sapiens
ttgatgagtagctga

SEQ ID NO: 1315687 - DNA, 15 bp, Homo sapiens
cttgatgagtagctg

SEQ ID NO: 1315688 - DNA, 15 bp, Homo sapiens
ccttgatgagtagct

SEQ ID NO: 1315689 - DNA, 15 bp, Homo sapiens
tccttgatgagtagc

SEQ ID NO: 1315690 - DNA, 15 bp, Homo sapiens
ttccttgatgagtag

SEQ ID NO: 1315691 - DNA, 15 bp, Homo sapiens
cttccttgatgagta

SEQ ID NO: 1315692 - DNA, 15 bp, Homo sapiens
acttccttgatgagt

SEQ ID NO: 1315693 - DNA, 15 bp, Homo sapiens
tacttccttgatgag

SEQ ID NO: 1315694 - DNA, 15 bp, Homo sapiens
ctacttccttgatga

SEQ ID NO: 1315695 - DNA, 15 bp, Homo sapiens
tctacttccttgatg

SEQ ID NO: 1315696 - DNA, 15 bp, Homo sapiens
gtctacttccttgat

SEQ ID NO: 1315697 - DNA, 15 bp, Homo sapiens
ggtctacttccttga

SEQ ID NO: 1315698 - DNA, 15 bp, Homo sapiens
tggtctacttccttg

SEQ ID NO: 1315699 - DNA, 15 bp, Homo sapiens
ctggtctacttcctt

SEQ ID NO: 1315700 - DNA, 15 bp, Homo sapiens
actggtctacttcct

SEQ ID NO: 1315701 - DNA, 15 bp, Homo sapiens
aactggtctacttcc

SEQ ID NO: 1315702 - DNA, 15 bp, Homo sapiens
taactggtctacttc

SEQ ID NO: 1315703 - DNA, 15 bp, Homo sapiens
ataactggtctactt

SEQ ID NO: 1315704 - DNA, 15 bp, Homo sapiens
tataactggtctact

SEQ ID NO: 1315705 - DNA, 15 bp, Homo sapiens
atataactggtctac

SEQ ID NO: 1315706 - DNA, 15 bp, Homo sapiens
catataactggtcta

SEQ ID NO: 1315707 - DNA, 15 bp, Homo sapiens
ccatataactggtct

SEQ ID NO: 1315708 - DNA, 15 bp, Homo sapiens
tccatataactggtc

SEQ ID NO: 1315709 - DNA, 15 bp, Homo sapiens
gtccatataactggt

SEQ ID NO: 1315710 - DNA, 15 bp, Homo sapiens
ggtccatataactgg

SEQ ID NO: 1315711 - DNA, 15 bp, Homo sapiens
gggtccatataactg

SEQ ID NO: 1315712 - DNA, 15 bp, Homo sapiens
tgggtccatataact

SEQ ID NO: 1315713 - DNA, 15 bp, Homo sapiens
ctgggtccatataac

SEQ ID NO: 1315714 - DNA, 15 bp, Homo sapiens
actgggtccatataa

SEQ ID NO: 1315715 - DNA, 15 bp, Homo sapiens
tactgggtccatata

SEQ ID NO: 1315716 - DNA, 15 bp, Homo sapiens
ctactgggtccatat

SEQ ID NO: 1315717 - DNA, 15 bp, Homo sapiens
gctactgggtccata

SEQ ID NO: 1315718 - DNA, 15 bp, Homo sapiens
agctactgggtccat

SEQ ID NO: 1315719 - DNA, 15 bp, Homo sapiens
aagctactgggtcca

SEQ ID NO: 1315720 - DNA, 15 bp, Homo sapiens
aaagctactgggtcc

SEQ ID NO: 1315721 - DNA, 15 bp, Homo sapiens
taaagctactgggtc

SEQ ID NO: 1315722 - DNA, 15 bp, Homo sapiens
ataaagctactgggt

SEQ ID NO: 1315723 - DNA, 15 bp, Homo sapiens
tataaagctactggg

SEQ ID NO: 1315724 - DNA, 15 bp, Homo sapiens
gtataaagctactgg

SEQ ID NO: 1315725 - DNA, 15 bp, Homo sapiens
tgtataaagctactg

SEQ ID NO: 1315726 - DNA, 15 bp, Homo sapiens
ttgtataaagctact

SEQ ID NO: 1315727 - DNA, 15 bp, Homo sapiens
gttgtataaagctac

SEQ ID NO: 1315728 - DNA, 15 bp, Homo sapiens
tgttgtataaagcta

SEQ ID NO: 1315729 - DNA, 15 bp, Homo sapiens
atgttgtataaagct

SEQ ID NO: 1315730 - DNA, 15 bp, Homo sapiens
tatgttgtataaagc

SEQ ID NO: 1315731 - DNA, 15 bp, Homo sapiens
ttatgttgtataaag

SEQ ID NO: 1315732 - DNA, 15 bp, Homo sapiens
attatgttgtataaa

SEQ ID NO: 1315733 - DNA, 15 bp, Homo sapiens
tattatgttgtataa

SEQ ID NO: 1315734 - DNA, 15 bp, Homo sapiens
ttattatgttgtata

SEQ ID NO: 1315735 - DNA, 15 bp, Homo sapiens
attattatgttgtat

SEQ ID NO: 1315736 - DNA, 15 bp, Homo sapiens
gattattatgttgta

SEQ ID NO: 1315737 - DNA, 15 bp, Homo sapiens
tgattattatgttgt

SEQ ID NO: 1315738 - DNA, 15 bp, Homo sapiens
ttgattattatgttg

SEQ ID NO: 1315739 - DNA, 15 bp, Homo sapiens
cttgattattatgtt

SEQ ID NO: 1315740 - DNA, 15 bp, Homo sapiens
acttgattattatgt

SEQ ID NO: 1315741 - DNA, 15 bp, Homo sapiens
tacttgattattatg

SEQ ID NO: 1315742 - DNA, 15 bp, Homo sapiens
ttacttgattattat

SEQ ID NO: 1315743 - DNA, 15 bp, Homo sapiens
attacttgattatta

SEQ ID NO: 1315744 - DNA, 15 bp, Homo sapiens
aattacttgattatt

SEQ ID NO: 1315745 - DNA, 15 bp, Homo sapiens
gaattacttgattat

SEQ ID NO: 1315746 - DNA, 15 bp, Homo sapiens
ggaattacttgatta

SEQ ID NO: 1315747 - DNA, 15 bp, Homo sapiens
aggaattacttgatt

SEQ ID NO: 1315748 - DNA, 15 bp, Homo sapiens
taggaattacttgat

SEQ ID NO: 1315749 - DNA, 15 bp, Homo sapiens
ataggaattacttga

SEQ ID NO: 1315750 - DNA, 15 bp, Homo sapiens
tataggaattacttg

SEQ ID NO: 1315751 - DNA, 15 bp, Homo sapiens
atataggaattactt

SEQ ID NO: 1315752 - DNA, 15 bp, Homo sapiens
aatataggaattact

SEQ ID NO: 1315753 - DNA, 15 bp, Homo sapiens
caatataggaattac

SEQ ID NO: 1315754 - DNA, 15 bp, Homo sapiens
tcaatataggaatta

SEQ ID NO: 1315755 - DNA, 15 bp, Homo sapiens
ttcaatataggaatt

SEQ ID NO: 1315756 - DNA, 15 bp, Homo sapiens
gttcaatataggaat

SEQ ID NO: 1315757 - DNA, 15 bp, Homo sapiens
tgttcaatataggaa

SEQ ID NO: 1315758 - DNA, 15 bp, Homo sapiens
gtgttcaatatagga

SEQ ID NO: 1315759 - DNA, 15 bp, Homo sapiens
agtgttcaatatagg

SEQ ID NO: 1315760 - DNA, 15 bp, Homo sapiens
aagtgttcaatatag

SEQ ID NO: 1315761 - DNA, 15 bp, Homo sapiens
taagtgttcaatata

SEQ ID NO: 1315762 - DNA, 15 bp, Homo sapiens
ttaagtgttcaatat

SEQ ID NO: 1315763 - DNA, 15 bp, Homo sapiens
cttaagtgttcaata

SEQ ID NO: 1315764 - DNA, 15 bp, Homo sapiens
acttaagtgttcaat

SEQ ID NO: 1315765 - DNA, 15 bp, Homo sapiens
aacttaagtgttcaa

SEQ ID NO: 1315766 - DNA, 15 bp, Homo sapiens
caacttaagtgttca

SEQ ID NO: 1315767 - DNA, 15 bp, Homo sapiens
ccaacttaagtgttc

SEQ ID NO: 1315768 - DNA, 15 bp, Homo sapiens
tccaacttaagtgtt

SEQ ID NO: 1315769 - DNA, 15 bp, Homo sapiens
gtccaacttaagtgt

SEQ ID NO: 1315770 - DNA, 15 bp, Homo sapiens
agtccaacttaagtg

SEQ ID NO: 1315771 - DNA, 15 bp, Homo sapiens
gagtccaacttaagt

SEQ ID NO: 1315772 - DNA, 15 bp, Homo sapiens
tgagtccaacttaag

SEQ ID NO: 1315773 - DNA, 15 bp, Homo sapiens
ttgagtccaacttaa

SEQ ID NO: 1315774 - DNA, 15 bp, Homo sapiens
attgagtccaactta

SEQ ID NO: 1315775 - DNA, 15 bp, Homo sapiens
tattgagtccaactt

SEQ ID NO: 1315776 - DNA, 15 bp, Homo sapiens
atattgagtccaact

SEQ ID NO: 1315777 - DNA, 15 bp, Homo sapiens
tatattgagtccaac

SEQ ID NO: 1315778 - DNA, 15 bp, Homo sapiens
ctatattgagtccaa

SEQ ID NO: 1315779 - DNA, 15 bp, Homo sapiens
gctatattgagtcca

SEQ ID NO: 1315780 - DNA, 15 bp, Homo sapiens
agctatattgagtcc

SEQ ID NO: 1315781 - DNA, 15 bp, Homo sapiens
gagctatattgagtc

SEQ ID NO: 1315782 - DNA, 15 bp, Homo sapiens
agagctatattgagt

SEQ ID NO: 1315783 - DNA, 15 bp, Homo sapiens
cagagctatattgag

SEQ ID NO: 1315784 - DNA, 15 bp, Homo sapiens
tcagagctatattga

SEQ ID NO: 1315785 - DNA, 15 bp, Homo sapiens
gtcagagctatattg

SEQ ID NO: 1315786 - DNA, 15 bp, Homo sapiens
agtcagagctatatt

SEQ ID NO: 1315787 - DNA, 15 bp, Homo sapiens
aagtcagagctatat

SEQ ID NO: 1315788 - DNA, 15 bp, Homo sapiens
gaagtcagagctata

SEQ ID NO: 1315789 - DNA, 15 bp, Homo sapiens
agaagtcagagctat

SEQ ID NO: 1315790 - DNA, 15 bp, Homo sapiens
tagaagtcagagcta

SEQ ID NO: 1315791 - DNA, 15 bp, Homo sapiens
atagaagtcagagct

SEQ ID NO: 1315792 - DNA, 15 bp, Homo sapiens
tgatattcgaggcat

SEQ ID NO: 1315793 - DNA, 15 bp, Homo sapiens
atgatattcgaggca

SEQ ID NO: 1315794 - DNA, 15 bp, Homo sapiens
catgatattcgaggc

SEQ ID NO: 1315795 - DNA, 15 bp, Homo sapiens
tcatgatattcgagg

SEQ ID NO: 1315796 - DNA, 15 bp, Homo sapiens
ctcatgatattcgag

SEQ ID NO: 1315797 - DNA, 15 bp, Homo sapiens
cctcatgatattcga

SEQ ID NO: 1315798 - DNA, 15 bp, Homo sapiens
acctcatgatattcg

SEQ ID NO: 1315799 - DNA, 15 bp, Homo sapiens
tacctcatgatattc

SEQ ID NO: 1315800 - DNA, 15 bp, Homo sapiens
ttacctcatgatatt

SEQ ID NO: 1315801 - DNA, 15 bp, Homo sapiens
gttacctcatgatat

SEQ ID NO: 1315802 - DNA, 15 bp, Homo sapiens
agttacctcatgata

SEQ ID NO: 1315803 - DNA, 15 bp, Homo sapiens
gagttacctcatgat

SEQ ID NO: 1315804 - DNA, 15 bp, Homo sapiens
agagttacctcatga

SEQ ID NO: 1315805 - DNA, 15 bp, Homo sapiens
aagagttacctcatg

SEQ ID NO: 1315806 - DNA, 15 bp, Homo sapiens
caagagttacctcat

SEQ ID NO: 1315807 - DNA, 15 bp, Homo sapiens
ccaagagttacctca

SEQ ID NO: 1315808 - DNA, 15 bp, Homo sapiens
cccaagagttacctc

SEQ ID NO: 1315809 - DNA, 15 bp, Homo sapiens
ccccaagagttacct

SEQ ID NO: 1315810 - DNA, 15 bp, Homo sapiens
gccccaagagttacc

SEQ ID NO: 1315811 - DNA, 15 bp, Homo sapiens
cgccccaagagttac

SEQ ID NO: 1315812 - DNA, 15 bp, Homo sapiens
gcgccccaagagtta

SEQ ID NO: 1315813 - DNA, 15 bp, Homo sapiens
agcgccccaagagtt

SEQ ID NO: 1315814 - DNA, 15 bp, Homo sapiens
cagcgccccaagagt

SEQ ID NO: 1315815 - DNA, 15 bp, Homo sapiens
gcagcgccccaagag

SEQ ID NO: 1315816 - DNA, 15 bp, Homo sapiens
cgcagcgccccaaga

SEQ ID NO: 1315817 - DNA, 15 bp, Homo sapiens
ccgcagcgccccaag

SEQ ID NO: 1315818 - DNA, 15 bp, Homo sapiens
tccgcagcgccccaa

SEQ ID NO: 1315819 - DNA, 15 bp, Homo sapiens
ttccgcagcgcccca

SEQ ID NO: 1315820 - DNA, 15 bp, Homo sapiens
cttccgcagcgcccc

SEQ ID NO: 1315821 - DNA, 15 bp, Homo sapiens
ccttccgcagcgccc

SEQ ID NO: 1315822 - DNA, 15 bp, Homo sapiens
gccttccgcagcgcc

SEQ ID NO: 1315823 - DNA, 15 bp, Homo sapiens
ggccttccgcagcgc

SEQ ID NO: 1315824 - DNA, 15 bp, Homo sapiens
gggccttccgcagcg

SEQ ID NO: 1315825 - DNA, 15 bp, Homo sapiens
agggccttccgcagc

SEQ ID NO: 1315826 - DNA, 15 bp, Homo sapiens
cagggccttccgcag

SEQ ID NO: 1315827 - DNA, 15 bp, Homo sapiens
ccagggccttccgca

SEQ ID NO: 1315828 - DNA, 15 bp, Homo sapiens
cccagggccttccgc

SEQ ID NO: 1315829 - DNA, 15 bp, Homo sapiens
gcccagggccttccg

SEQ ID NO: 1315830 - DNA, 15 bp, Homo sapiens
agcccagggccttcc

SEQ ID NO: 1315831 - DNA, 15 bp, Homo sapiens
aagcccagggccttc

SEQ ID NO: 1315832 - DNA, 15 bp, Homo sapiens
caagcccagggcctt

SEQ ID NO: 1315833 - DNA, 15 bp, Homo sapiens
ccaagcccagggcct

SEQ ID NO: 1315834 - DNA, 15 bp, Homo sapiens
gccaagcccagggcc

SEQ ID NO: 1315835 - DNA, 15 bp, Homo sapiens
tgccaagcccagggc

SEQ ID NO: 1315836 - DNA, 15 bp, Homo sapiens
ctgccaagcccaggg

SEQ ID NO: 1315837 - DNA, 15 bp, Homo sapiens
actgccaagcccagg

SEQ ID NO: 1315838 - DNA, 15 bp, Homo sapiens
gactgccaagcccag

SEQ ID NO: 1315839 - DNA, 15 bp, Homo sapiens
agactgccaagccca

SEQ ID NO: 1315840 - DNA, 15 bp, Homo sapiens
cagactgccaagccc

SEQ ID NO: 1315841 - DNA, 15 bp, Homo sapiens
acagactgccaagcc

SEQ ID NO: 1315842 - DNA, 15 bp, Homo sapiens
cacagactgccaagc

SEQ ID NO: 1315843 - DNA, 15 bp, Homo sapiens
ccacagactgccaag

SEQ ID NO: 1315844 - DNA, 15 bp, Homo sapiens
gccacagactgccaa

SEQ ID NO: 1315845 - DNA, 15 bp, Homo sapiens
agccacagactgcca

SEQ ID NO: 1315846 - DNA, 15 bp, Homo sapiens
cagccacagactgcc

SEQ ID NO: 1315847 - DNA, 15 bp, Homo sapiens
acagccacagactgc

SEQ ID NO: 1315848 - DNA, 15 bp, Homo sapiens
aacagccacagactg

SEQ ID NO: 1315849 - DNA, 15 bp, Homo sapiens
gaacagccacagact

SEQ ID NO: 1315850 - DNA, 15 bp, Homo sapiens
tgaacagccacagac

SEQ ID NO: 1315851 - DNA, 15 bp, Homo sapiens
gtgaacagccacaga

SEQ ID NO: 1315852 - DNA, 15 bp, Homo sapiens
cgtgaacagccacag

SEQ ID NO: 1315853 - DNA, 15 bp, Homo sapiens
ccgtgaacagccaca

SEQ ID NO: 1315854 - DNA, 15 bp, Homo sapiens
gccgtgaacagccac

SEQ ID NO: 1315855 - DNA, 15 bp, Homo sapiens
ggccgtgaacagcca

SEQ ID NO: 1315856 - DNA, 15 bp, Homo sapiens
gggccgtgaacagcc

SEQ ID NO: 1315857 - DNA, 15 bp, Homo sapiens
agggccgtgaacagc

SEQ ID NO: 1315858 - DNA, 15 bp, Homo sapiens
aagggccgtgaacag

SEQ ID NO: 1315859 - DNA, 15 bp, Homo sapiens
aaagggccgtgaaca

SEQ ID NO: 1315860 - DNA, 15 bp, Homo sapiens
aaaagggccgtgaac

SEQ ID NO: 1315861 - DNA, 15 bp, Homo sapiens
caaaagggccgtgaa

SEQ ID NO: 1315862 - DNA, 15 bp, Homo sapiens
ccaaaagggccgtga

SEQ ID NO: 1315863 - DNA, 15 bp, Homo sapiens
tccaaaagggccgtg

SEQ ID NO: 1315864 - DNA, 15 bp, Homo sapiens
atccaaaagggccgt

SEQ ID NO: 1315865 - DNA, 15 bp, Homo sapiens
gatccaaaagggccg

SEQ ID NO: 1315866 - DNA, 15 bp, Homo sapiens
agatccaaaagggcc

SEQ ID NO: 1315867 - DNA, 15 bp, Homo sapiens
aagatccaaaagggc

SEQ ID NO: 1315868 - DNA, 15 bp, Homo sapiens
gaagatccaaaaggg

SEQ ID NO: 1315869 - DNA, 15 bp, Homo sapiens
agaagatccaaaagg

SEQ ID NO: 1315870 - DNA, 15 bp, Homo sapiens
cagaagatccaaaag

SEQ ID NO: 1315871 - DNA, 15 bp, Homo sapiens
gcagaagatccaaaa

SEQ ID NO: 1315872 - DNA, 15 bp, Homo sapiens
tgcagaagatccaaa

SEQ ID NO: 1315873 - DNA, 15 bp, Homo sapiens
ctgcagaagatccaa

SEQ ID NO: 1315874 - DNA, 15 bp, Homo sapiens
tctgcagaagatcca

SEQ ID NO: 1315875 - DNA, 15 bp, Homo sapiens
ctctgcagaagatcc

SEQ ID NO: 1315876 - DNA, 15 bp, Homo sapiens
cctctgcagaagatc

SEQ ID NO: 1315877 - DNA, 15 bp, Homo sapiens
tcctctgcagaagat

SEQ ID NO: 1315878 - DNA, 15 bp, Homo sapiens
gtcctctgcagaaga

SEQ ID NO: 1315879 - DNA, 15 bp, Homo sapiens
agtcctctgcagaag

SEQ ID NO: 1315880 - DNA, 15 bp, Homo sapiens
tagtcctctgcagaa

SEQ ID NO: 1315881 - DNA, 15 bp, Homo sapiens
atagtcctctgcaga

SEQ ID NO: 1315882 - DNA, 15 bp, Homo sapiens
gatagtcctctgcag

SEQ ID NO: 1315883 - DNA, 15 bp, Homo sapiens
agatagtcctctgca

SEQ ID NO: 1315884 - DNA, 15 bp, Homo sapiens
gagatagtcctctgc

SEQ ID NO: 1315885 - DNA, 15 bp, Homo sapiens
agagatagtcctctg

SEQ ID NO: 1315886 - DNA, 15 bp, Homo sapiens
tagagatagtcctct

SEQ ID NO: 1315887 - DNA, 15 bp, Homo sapiens
atagagatagtcctc

SEQ ID NO: 1315888 - DNA, 15 bp, Homo sapiens
catagagatagtcct

SEQ ID NO: 1315889 - DNA, 15 bp, Homo sapiens
tcatagagatagtcc

SEQ ID NO: 1315890 - DNA, 15 bp, Homo sapiens
ctcatagagatagtc

SEQ ID NO: 1315891 - DNA, 15 bp, Homo sapiens
cctcatagagatagt

SEQ ID NO: 1315892 - DNA, 15 bp, Homo sapiens
gcctcatagagatag

SEQ ID NO: 1315893 - DNA, 15 bp, Homo sapiens
ggcctcatagagata

SEQ ID NO: 1315894 - DNA, 15 bp, Homo sapiens
aggcctcatagagat

SEQ ID NO: 1315895 - DNA, 15 bp, Homo sapiens
aaggcctcatagaga

SEQ ID NO: 1315896 - DNA, 15 bp, Homo sapiens
aaaggcctcatagag

SEQ ID NO: 1315897 - DNA, 15 bp, Homo sapiens
aaaaggcctcataga

SEQ ID NO: 1315898 - DNA, 15 bp, Homo sapiens
aaaaaggcctcatag

SEQ ID NO: 1315899 - DNA, 15 bp, Homo sapiens
caaaaaggcctcata

SEQ ID NO: 1315900 - DNA, 15 bp, Homo sapiens
gcaaaaaggcctcat

SEQ ID NO: 1315901 - DNA, 15 bp, Homo sapiens
ggcaaaaaggcctca

SEQ ID NO: 1315902 - DNA, 15 bp, Homo sapiens
gggcaaaaaggcctc

SEQ ID NO: 1315903 - DNA, 15 bp, Homo sapiens
ggggcaaaaaggcct

SEQ ID NO: 1315904 - DNA, 15 bp, Homo sapiens
tggggcaaaaaggcc

SEQ ID NO: 1315905 - DNA, 15 bp, Homo sapiens
gtggggcaaaaaggc

SEQ ID NO: 1315906 - DNA, 15 bp, Homo sapiens
tgtggggcaaaaagg

SEQ ID NO: 1315907 - DNA, 15 bp, Homo sapiens
ttgtggggcaaaaag

SEQ ID NO: 1315908 - DNA, 15 bp, Homo sapiens
cttgtggggcaaaaa

SEQ ID NO: 1315909 - DNA, 15 bp, Homo sapiens
gcttgtggggcaaaa

SEQ ID NO: 1315910 - DNA, 15 bp, Homo sapiens
ggcttgtggggcaaa

SEQ ID NO: 1315911 - DNA, 15 bp, Homo sapiens
tggcttgtggggcaa

SEQ ID NO: 1315912 - DNA, 15 bp, Homo sapiens
gtggcttgtggggca

SEQ ID NO: 1315913 - DNA, 15 bp, Homo sapiens
agtggcttgtggggc

SEQ ID NO: 1315914 - DNA, 15 bp, Homo sapiens
cagtggcttgtgggg

SEQ ID NO: 1315915 - DNA, 15 bp, Homo sapiens
acagtggcttgtggg

SEQ ID NO: 1315916 - DNA, 15 bp, Homo sapiens
tacagtggcttgtgg

SEQ ID NO: 1315917 - DNA, 15 bp, Homo sapiens
gtacagtggcttgtg

SEQ ID NO: 1315918 - DNA, 15 bp, Homo sapiens
tgtacagtggcttgt

SEQ ID NO: 1315919 - DNA, 15 bp, Homo sapiens
ttgtacagtggcttg

SEQ ID NO: 1315920 - DNA, 15 bp, Homo sapiens
gttgtacagtggctt

SEQ ID NO: 1315921 - DNA, 15 bp, Homo sapiens
agttgtacagtggct

SEQ ID NO: 1315922 - DNA, 15 bp, Homo sapiens
gagttgtacagtggc

SEQ ID NO: 1315923 - DNA, 15 bp, Homo sapiens
tgagttgtacagtgg

SEQ ID NO: 1315924 - DNA, 15 bp, Homo sapiens
gtgagttgtacagtg

SEQ ID NO: 1315925 - DNA, 15 bp, Homo sapiens
ggtgagttgtacagt

SEQ ID NO: 1315926 - DNA, 15 bp, Homo sapiens
tggtgagttgtacag

SEQ ID NO: 1315927 - DNA, 15 bp, Homo sapiens
ctggtgagttgtaca

SEQ ID NO: 1315928 - DNA, 15 bp, Homo sapiens
gctggtgagttgtac

SEQ ID NO: 1315929 - DNA, 15 bp, Homo sapiens
agctggtgagttgta

SEQ ID NO: 1315930 - DNA, 15 bp, Homo sapiens
cagctggtgagttgt

SEQ ID NO: 1315931 - DNA, 15 bp, Homo sapiens
gcagctggtgagttg

SEQ ID NO: 1315932 - DNA, 15 bp, Homo sapiens
tgcagctggtgagtt

SEQ ID NO: 1315933 - DNA, 15 bp, Homo sapiens
atgcagctggtgagt

SEQ ID NO: 1315934 - DNA, 15 bp, Homo sapiens
tatgcagctggtgag

SEQ ID NO: 1315935 - DNA, 15 bp, Homo sapiens
ctatgcagctggtga

SEQ ID NO: 1315936 - DNA, 15 bp, Homo sapiens
cctatgcagctggtg

SEQ ID NO: 1315937 - DNA, 15 bp, Homo sapiens
gcctatgcagctggt

SEQ ID NO: 1315938 - DNA, 15 bp, Homo sapiens
ggcctatgcagctgg

SEQ ID NO: 1315939 - DNA, 15 bp, Homo sapiens
aggcctatgcagctg

SEQ ID NO: 1315940 - DNA, 15 bp, Homo sapiens
caggcctatgcagct

SEQ ID NO: 1315941 - DNA, 15 bp, Homo sapiens
ccaggcctatgcagc

SEQ ID NO: 1315942 - DNA, 15 bp, Homo sapiens
cccaggcctatgcag

SEQ ID NO: 1315943 - DNA, 15 bp, Homo sapiens
ccccaggcctatgca

SEQ ID NO: 1315944 - DNA, 15 bp, Homo sapiens
cccccaggcctatgc

SEQ ID NO: 1315945 - DNA, 15 bp, Homo sapiens
tcccccaggcctatg

SEQ ID NO: 1315946 - DNA, 15 bp, Homo sapiens
ctcccccaggcctat

SEQ ID NO: 1315947 - DNA, 15 bp, Homo sapiens
gctcccccaggccta

SEQ ID NO: 1315948 - DNA, 15 bp, Homo sapiens
ggctcccccaggcct

SEQ ID NO: 1315949 - DNA, 15 bp, Homo sapiens
cggctcccccaggcc

SEQ ID NO: 1315950 - DNA, 15 bp, Homo sapiens
tcggctcccccaggc

SEQ ID NO: 1315951 - DNA, 15 bp, Homo sapiens
ctcggctcccccagg

SEQ ID NO: 1315952 - DNA, 15 bp, Homo sapiens
cctcggctcccccag

SEQ ID NO: 1315953 - DNA, 15 bp, Homo sapiens
gcctcggctccccca

SEQ ID NO: 1315954 - DNA, 15 bp, Homo sapiens
agcctcggctccccc

SEQ ID NO: 1315955 - DNA, 15 bp, Homo sapiens
cagcctcggctcccc

SEQ ID NO: 1315956 - DNA, 15 bp, Homo sapiens
acagcctcggctccc

SEQ ID NO: 1315957 - DNA, 15 bp, Homo sapiens
gacagcctcggctcc

SEQ ID NO: 1315958 - DNA, 15 bp, Homo sapiens
agacagcctcggctc

SEQ ID NO: 1315959 - DNA, 15 bp, Homo sapiens
cagacagcctcggct

SEQ ID NO: 1315960 - DNA, 15 bp, Homo sapiens
acagacagcctcggc

SEQ ID NO: 1315961 - DNA, 15 bp, Homo sapiens
cacagacagcctcgg

SEQ ID NO: 1315962 - DNA, 15 bp, Homo sapiens
acacagacagcctcg

SEQ ID NO: 1315963 - DNA, 15 bp, Homo sapiens
cacacagacagcctc

SEQ ID NO: 1315964 - DNA, 15 bp, Homo sapiens
ccacacagacagcct

SEQ ID NO: 1315965 - DNA, 15 bp, Homo sapiens
cccacacagacagcc

SEQ ID NO: 1315966 - DNA, 15 bp, Homo sapiens
acccacacagacagc

SEQ ID NO: 1315967 - DNA, 15 bp, Homo sapiens
aacccacacagacag

SEQ ID NO: 1315968 - DNA, 15 bp, Homo sapiens
caacccacacagaca

SEQ ID NO: 1315969 - DNA, 15 bp, Homo sapiens
ccaacccacacagac

SEQ ID NO: 1315970 - DNA, 15 bp, Homo sapiens
cccaacccacacaga

SEQ ID NO: 1315971 - DNA, 15 bp, Homo sapiens
ccccaacccacacag

SEQ ID NO: 1315972 - DNA, 15 bp, Homo sapiens
gccccaacccacaca

SEQ ID NO: 1315973 - DNA, 15 bp, Homo sapiens
tgccccaacccacac

SEQ ID NO: 1315974 - DNA, 15 bp, Homo sapiens
ctgccccaacccaca

SEQ ID NO: 1315975 - DNA, 15 bp, Homo sapiens
actgccccaacccac

SEQ ID NO: 1315976 - DNA, 15 bp, Homo sapiens
cactgccccaaccca

SEQ ID NO: 1315977 - DNA, 15 bp, Homo sapiens
ccactgccccaaccc

SEQ ID NO: 1315978 - DNA, 15 bp, Homo sapiens
gccactgccccaacc

SEQ ID NO: 1315979 - DNA, 15 bp, Homo sapiens
tgccactgccccaac

SEQ ID NO: 1315980 - DNA, 15 bp, Homo sapiens
gtgccactgccccaa

SEQ ID NO: 1315981 - DNA, 15 bp, Homo sapiens
tgtgccactgcccca

SEQ ID NO: 1315982 - DNA, 15 bp, Homo sapiens
gtgtgccactgcccc

SEQ ID NO: 1315983 - DNA, 15 bp, Homo sapiens
tgtgtgccactgccc

SEQ ID NO: 1315984 - DNA, 15 bp, Homo sapiens
ctgtgtgccactgcc

SEQ ID NO: 1315985 - DNA, 15 bp, Homo sapiens
cctgtgtgccactgc

SEQ ID NO: 1315986 - DNA, 15 bp, Homo sapiens
ccctgtgtgccactg

SEQ ID NO: 1315987 - DNA, 15 bp, Homo sapiens
accctgtgtgccact

SEQ ID NO: 1315988 - DNA, 15 bp, Homo sapiens
caccctgtgtgccac

SEQ ID NO: 1315989 - DNA, 15 bp, Homo sapiens
acaccctgtgtgcca

SEQ ID NO: 1315990 - DNA, 15 bp, Homo sapiens
gacaccctgtgtgcc

SEQ ID NO: 1315991 - DNA, 15 bp, Homo sapiens
tgacaccctgtgtgc

SEQ ID NO: 1315992 - DNA, 15 bp, Homo sapiens
gtgacaccctgtgtg

SEQ ID NO: 1315993 - DNA, 15 bp, Homo sapiens
ggtgacaccctgtgt

SEQ ID NO: 1315994 - DNA, 15 bp, Homo sapiens
tggtgacaccctgtg

SEQ ID NO: 1315995 - DNA, 15 bp, Homo sapiens
ttggtgacaccctgt

SEQ ID NO: 1315996 - DNA, 15 bp, Homo sapiens
gttggtgacaccctg

SEQ ID NO: 1315997 - DNA, 15 bp, Homo sapiens
ggttggtgacaccct

SEQ ID NO: 1315998 - DNA, 15 bp, Homo sapiens
cggttggtgacaccc

SEQ ID NO: 1315999 - DNA, 15 bp, Homo sapiens
ccggttggtgacacc

SEQ ID NO: 1316000 - DNA, 15 bp, Homo sapiens
tccggttggtgacac

SEQ ID NO: 1316001 - DNA, 15 bp, Homo sapiens
ttccggttggtgaca

SEQ ID NO: 1316002 - DNA, 15 bp, Homo sapiens
cttccggttggtgac

SEQ ID NO: 1316003 - DNA, 15 bp, Homo sapiens
gcttccggttggtga

SEQ ID NO: 1316004 - DNA, 15 bp, Homo sapiens
agcttccggttggtg

SEQ ID NO: 1316005 - DNA, 15 bp, Homo sapiens
gagcttccggttggt

SEQ ID NO: 1316006 - DNA, 15 bp, Homo sapiens
tgagcttccggttgg

SEQ ID NO: 1316007 - DNA, 15 bp, Homo sapiens
gtgagcttccggttg

SEQ ID NO: 1316008 - DNA, 15 bp, Homo sapiens
ggtgagcttccggtt

SEQ ID NO: 1316009 - DNA, 15 bp, Homo sapiens
gggtgagcttccggt

SEQ ID NO: 1316010 - DNA, 15 bp, Homo sapiens
agggtgagcttccgg

SEQ ID NO: 1316011 - DNA, 15 bp, Homo sapiens
gagggtgagcttccg

SEQ ID NO: 1316012 - DNA, 15 bp, Homo sapiens
tgagggtgagcttcc

SEQ ID NO: 1316013 - DNA, 15 bp, Homo sapiens
ctgagggtgagcttc

SEQ ID NO: 1316014 - DNA, 15 bp, Homo sapiens
gctgagggtgagctt

SEQ ID NO: 1316015 - DNA, 15 bp, Homo sapiens
tgctgagggtgagct

SEQ ID NO: 1316016 - DNA, 15 bp, Homo sapiens
ctgctgagggtgagc

SEQ ID NO: 1316017 - DNA, 15 bp, Homo sapiens
cctgctgagggtgag

SEQ ID NO: 1316018 - DNA, 15 bp, Homo sapiens
acctgctgagggtga

SEQ ID NO: 1316019 - DNA, 15 bp, Homo sapiens
cacctgctgagggtg

SEQ ID NO: 1316020 - DNA, 15 bp, Homo sapiens
ccacctgctgagggt

SEQ ID NO: 1316021 - DNA, 15 bp, Homo sapiens
gccacctgctgaggg

SEQ ID NO: 1316022 - DNA, 15 bp, Homo sapiens
tgccacctgctgagg

SEQ ID NO: 1316023 - DNA, 15 bp, Homo sapiens
ctgccacctgctgag

SEQ ID NO: 1316024 - DNA, 15 bp, Homo sapiens
gctgccacctgctga

SEQ ID NO: 1316025 - DNA, 15 bp, Homo sapiens
agctgccacctgctg

SEQ ID NO: 1316026 - DNA, 15 bp, Homo sapiens
gagctgccacctgct

SEQ ID NO: 1316027 - DNA, 15 bp, Homo sapiens
agagctgccacctgc

SEQ ID NO: 1316028 - DNA, 15 bp, Homo sapiens
tagagctgccacctg

SEQ ID NO: 1316029 - DNA, 15 bp, Homo sapiens
ctagagctgccacct

SEQ ID NO: 1316030 - DNA, 15 bp, Homo sapiens
cctagagctgccacc

SEQ ID NO: 1316031 - DNA, 15 bp, Homo sapiens
ccctagagctgccac

SEQ ID NO: 1316032 - DNA, 15 bp, Homo sapiens
gccctagagctgcca

SEQ ID NO: 1316033 - DNA, 15 bp, Homo sapiens
agccctagagctgcc

SEQ ID NO: 1316034 - DNA, 15 bp, Homo sapiens
aagccctagagctgc

SEQ ID NO: 1316035 - DNA, 15 bp, Homo sapiens
taagccctagagctg

SEQ ID NO: 1316036 - DNA, 15 bp, Homo sapiens
gtaagccctagagct

SEQ ID NO: 1316037 - DNA, 15 bp, Homo sapiens
tgtaagccctagagc

SEQ ID NO: 1316038 - DNA, 15 bp, Homo sapiens
agctgtaagccctag

SEQ ID NO: 1316039 - DNA, 15 bp, Homo sapiens
cagctgtaagcccta

SEQ ID NO: 1316040 - DNA, 15 bp, Homo sapiens
ccagctgtaagccct

SEQ ID NO: 1316041 - DNA, 15 bp, Homo sapiens
gccagctgtaagccc

SEQ ID NO: 1316042 - DNA, 15 bp, Homo sapiens
ggccagctgtaagcc

SEQ ID NO: 1316043 - DNA, 15 bp, Homo sapiens
aggccagctgtaagc

SEQ ID NO: 1316044 - DNA, 15 bp, Homo sapiens
aaggccagctgtaag

SEQ ID NO: 1316045 - DNA, 15 bp, Homo sapiens
caaggccagctgtaa

SEQ ID NO: 1316046 - DNA, 15 bp, Homo sapiens
ccaaggccagctgta

SEQ ID NO: 1316047 - DNA, 15 bp, Homo sapiens
cccaaggccagctgt

SEQ ID NO: 1316048 - DNA, 15 bp, Homo sapiens
acccaaggccagctg

SEQ ID NO: 1316049 - DNA, 15 bp, Homo sapiens
aacccaaggccagct

SEQ ID NO: 1316050 - DNA, 15 bp, Homo sapiens
aaacccaaggccagc

SEQ ID NO: 1316051 - DNA, 15 bp, Homo sapiens
caaacccaaggccag

SEQ ID NO: 1316052 - DNA, 15 bp, Homo sapiens
tcaaacccaaggcca

SEQ ID NO: 1316053 - DNA, 15 bp, Homo sapiens
ctcaaacccaaggcc

SEQ ID NO: 1316054 - DNA, 15 bp, Homo sapiens
tctcaaacccaaggc

SEQ ID NO: 1316055 - DNA, 15 bp, Homo sapiens
atctcaaacccaagg

SEQ ID NO: 1316056 - DNA, 15 bp, Homo sapiens
aatctcaaacccaag

SEQ ID NO: 1316057 - DNA, 15 bp, Homo sapiens
gaatctcaaacccaa

SEQ ID NO: 1316058 - DNA, 15 bp, Homo sapiens
ggaatctcaaaccca

SEQ ID NO: 1316059 - DNA, 15 bp, Homo sapiens
aggaatctcaaaccc

SEQ ID NO: 1316060 - DNA, 15 bp, Homo sapiens
aaggaatctcaaacc

SEQ ID NO: 1316061 - DNA, 15 bp, Homo sapiens
caaggaatctcaaac

SEQ ID NO: 1316062 - DNA, 15 bp, Homo sapiens
tcaaggaatctcaaa

SEQ ID NO: 1316063 - DNA, 15 bp, Homo sapiens
ctcaaggaatctcaa

SEQ ID NO: 1316064 - DNA, 15 bp, Homo sapiens
tctcaaggaatctca

SEQ ID NO: 1316065 - DNA, 15 bp, Homo sapiens
gtctcaaggaatctc

SEQ ID NO: 1316066 - DNA, 15 bp, Homo sapiens
tgtctcaaggaatct

SEQ ID NO: 1316067 - DNA, 15 bp, Homo sapiens
ctgtctcaaggaatc

SEQ ID NO: 1316068 - DNA, 15 bp, Homo sapiens
tctgtctcaaggaat

SEQ ID NO: 1316069 - DNA, 15 bp, Homo sapiens
ttctgtctcaaggaa

SEQ ID NO: 1316070 - DNA, 15 bp, Homo sapiens
gttctgtctcaagga

SEQ ID NO: 1316071 - DNA, 15 bp, Homo sapiens
agttctgtctcaagg

SEQ ID NO: 1316072 - DNA, 15 bp, Homo sapiens
tagttctgtctcaag

SEQ ID NO: 1316073 - DNA, 15 bp, Homo sapiens
ctagttctgtctcaa

SEQ ID NO: 1316074 - DNA, 15 bp, Homo sapiens
cctagttctgtctca

SEQ ID NO: 1316075 - DNA, 15 bp, Homo sapiens
tcctagttctgtctc

SEQ ID NO: 1316076 - DNA, 15 bp, Homo sapiens
ttcctagttctgtct

SEQ ID NO: 1316077 - DNA, 15 bp, Homo sapiens
tttcctagttctgtc

SEQ ID NO: 1316078 - DNA, 15 bp, Homo sapiens
atttcctagttctgt

SEQ ID NO: 1316079 - DNA, 15 bp, Homo sapiens
tatttcctagttctg

SEQ ID NO: 1316080 - DNA, 15 bp, Homo sapiens
ctatttcctagttct

SEQ ID NO: 1316081 - DNA, 15 bp, Homo sapiens
tctatttcctagttc

SEQ ID NO: 1316082 - DNA, 15 bp, Homo sapiens
atctatttcctagtt

SEQ ID NO: 1316083 - DNA, 15 bp, Homo sapiens
aatctatttcctagt

SEQ ID NO: 1316084 - DNA, 15 bp, Homo sapiens
caatctatttcctag

SEQ ID NO: 1316085 - DNA, 15 bp, Homo sapiens
tcaatctatttccta

SEQ ID NO: 1316086 - DNA, 15 bp, Homo sapiens
ctcaatctatttcct

SEQ ID NO: 1316087 - DNA, 15 bp, Homo sapiens
tctcaatctatttcc

SEQ ID NO: 1316088 - DNA, 15 bp, Homo sapiens
atctcaatctatttc

SEQ ID NO: 1316089 - DNA, 15 bp, Homo sapiens
catctcaatctattt

SEQ ID NO: 1316090 - DNA, 15 bp, Homo sapiens
ccatctcaatctatt

SEQ ID NO: 1316091 - DNA, 15 bp, Homo sapiens
cccatctcaatctat

SEQ ID NO: 1316092 - DNA, 15 bp, Homo sapiens
acccatctcaatcta

SEQ ID NO: 1316093 - DNA, 15 bp, Homo sapiens
cacccatctcaatct

SEQ ID NO: 1316094 - DNA, 15 bp, Homo sapiens
gcacccatctcaatc

SEQ ID NO: 1316095 - DNA, 15 bp, Homo sapiens
agcacccatctcaat

SEQ ID NO: 1316096 - DNA, 15 bp, Homo sapiens
cagcacccatctcaa

SEQ ID NO: 1316097 - DNA, 15 bp, Homo sapiens
ccagcacccatctca

SEQ ID NO: 1316098 - DNA, 15 bp, Homo sapiens
gccagcacccatctc

SEQ ID NO: 1316099 - DNA, 15 bp, Homo sapiens
ggccagcacccatct

SEQ ID NO: 1316100 - DNA, 15 bp, Homo sapiens
aggccagcacccatc

SEQ ID NO: 1316101 - DNA, 15 bp, Homo sapiens
caggccagcacccat

SEQ ID NO: 1316102 - DNA, 15 bp, Homo sapiens
tcaggccagcaccca

SEQ ID NO: 1316103 - DNA, 15 bp, Homo sapiens
ttcaggccagcaccc

SEQ ID NO: 1316104 - DNA, 15 bp, Homo sapiens
attcaggccagcacc

SEQ ID NO: 1316105 - DNA, 15 bp, Homo sapiens
aattcaggccagcac

SEQ ID NO: 1316106 - DNA, 15 bp, Homo sapiens
taattcaggccagca

SEQ ID NO: 1316107 - DNA, 15 bp, Homo sapiens
ttaattcaggccagc

SEQ ID NO: 1316108 - DNA, 15 bp, Homo sapiens
tttaattcaggccag

SEQ ID NO: 1316109 - DNA, 15 bp, Homo sapiens
ctttaattcaggcca

SEQ ID NO: 1316110 - DNA, 15 bp, Homo sapiens
actttaattcaggcc

SEQ ID NO: 1316111 - DNA, 15 bp, Homo sapiens
tactttaattcaggc

SEQ ID NO: 1316112 - DNA, 15 bp, Homo sapiens
gtactttaattcagg

SEQ ID NO: 1316113 - DNA, 15 bp, Homo sapiens
ggtactttaattcag

SEQ ID NO: 1316114 - DNA, 15 bp, Homo sapiens
tggtactttaattca

SEQ ID NO: 1316115 - DNA, 15 bp, Homo sapiens
atggtactttaattc

SEQ ID NO: 1316116 - DNA, 15 bp, Homo sapiens
catggtactttaatt

SEQ ID NO: 1316117 - DNA, 15 bp, Homo sapiens
acatggtactttaat

SEQ ID NO: 1316118 - DNA, 15 bp, Homo sapiens
aacatggtactttaa

SEQ ID NO: 1316119 - DNA, 15 bp, Homo sapiens
gaacatggtacttta

SEQ ID NO: 1316120 - DNA, 15 bp, Homo sapiens
ggaacatggtacttt

SEQ ID NO: 1316121 - DNA, 15 bp, Homo sapiens
gggaacatggtactt

SEQ ID NO: 1316122 - DNA, 15 bp, Homo sapiens
agggaacatggtact

SEQ ID NO: 1316123 - DNA, 15 bp, Homo sapiens
tagggaacatggtac

SEQ ID NO: 1316124 - DNA, 15 bp, Homo sapiens
ttagggaacatggta

SEQ ID NO: 1316125 - DNA, 15 bp, Homo sapiens
tttagggaacatggt

SEQ ID NO: 1316126 - DNA, 15 bp, Homo sapiens
ctttagggaacatgg

SEQ ID NO: 1316127 - DNA, 15 bp, Homo sapiens
cctttagggaacatg

SEQ ID NO: 1316128 - DNA, 15 bp, Homo sapiens
tcctttagggaacat

SEQ ID NO: 1316129 - DNA, 15 bp, Homo sapiens
ttcctttagggaaca

SEQ ID NO: 1316130 - DNA, 15 bp, Homo sapiens
tttcctttagggaac

SEQ ID NO: 1316131 - DNA, 15 bp, Homo sapiens
atttcctttagggaa

SEQ ID NO: 1316132 - DNA, 15 bp, Homo sapiens
catttcctttaggga

SEQ ID NO: 1316133 - DNA, 15 bp, Homo sapiens
ccatttcctttaggg

SEQ ID NO: 1316134 - DNA, 15 bp, Homo sapiens
cccatttcctttagg

SEQ ID NO: 1316135 - DNA, 15 bp, Homo sapiens
gcccatttcctttag

SEQ ID NO: 1316136 - DNA, 15 bp, Homo sapiens
ggcccatttccttta

SEQ ID NO: 1316137 - DNA, 15 bp, Homo sapiens
aggcccatttccttt

SEQ ID NO: 1316138 - DNA, 15 bp, Homo sapiens
caggcccatttcctt

SEQ ID NO: 1316139 - DNA, 15 bp, Homo sapiens
tcaggcccatttcct

SEQ ID NO: 1316140 - DNA, 15 bp, Homo sapiens
ctcaggcccatttcc

SEQ ID NO: 1316141 - DNA, 15 bp, Homo sapiens
tctcaggcccatttc

SEQ ID NO: 1316142 - DNA, 15 bp, Homo sapiens
atctcaggcccattt

SEQ ID NO: 1316143 - DNA, 15 bp, Homo sapiens
tatctcaggcccatt

SEQ ID NO: 1316144 - DNA, 15 bp, Homo sapiens
atatctcaggcccat

SEQ ID NO: 1316145 - DNA, 15 bp, Homo sapiens
gatatctcaggccca

SEQ ID NO: 1316146 - DNA, 15 bp, Homo sapiens
agatatctcaggccc

SEQ ID NO: 1316147 - DNA, 15 bp, Homo sapiens
aagatatctcaggcc

SEQ ID NO: 1316148 - DNA, 15 bp, Homo sapiens
taagatatctcaggc

SEQ ID NO: 1316149 - DNA, 15 bp, Homo sapiens
ttaagatatctcagg

SEQ ID NO: 1316150 - DNA, 15 bp, Homo sapiens
gttaagatatctcag

SEQ ID NO: 1316151 - DNA, 15 bp, Homo sapiens
agttaagatatctca

SEQ ID NO: 1316152 - DNA, 15 bp, Homo sapiens
tagttaagatatctc

SEQ ID NO: 1316153 - DNA, 15 bp, Homo sapiens
ttagttaagatatct

SEQ ID NO: 1316154 - DNA, 15 bp, Homo sapiens
tttagttaagatatc

SEQ ID NO: 1316155 - DNA, 15 bp, Homo sapiens
ctttagttaagatat

SEQ ID NO: 1316156 - DNA, 15 bp, Homo sapiens
cctttagttaagata

SEQ ID NO: 1316157 - DNA, 15 bp, Homo sapiens
gcctttagttaagat

SEQ ID NO: 1316158 - DNA, 15 bp, Homo sapiens
tgcctttagttaaga

SEQ ID NO: 1316159 - DNA, 15 bp, Homo sapiens
ctgcctttagttaag

SEQ ID NO: 1316160 - DNA, 15 bp, Homo sapiens
tctgcctttagttaa

SEQ ID NO: 1316161 - DNA, 15 bp, Homo sapiens
atctgcctttagtta

SEQ ID NO: 1316162 - DNA, 15 bp, Homo sapiens
catctgcctttagtt

SEQ ID NO: 1316163 - DNA, 15 bp, Homo sapiens
gcatctgcctttagt

SEQ ID NO: 1316164 - DNA, 15 bp, Homo sapiens
ggcatctgcctttag

SEQ ID NO: 1316165 - DNA, 15 bp, Homo sapiens
gggcatctgccttta

SEQ ID NO: 1316166 - DNA, 15 bp, Homo sapiens
ggggcatctgccttt

SEQ ID NO: 1316167 - DNA, 15 bp, Homo sapiens
gggggcatctgcctt

SEQ ID NO: 1316168 - DNA, 15 bp, Homo sapiens
tgggggcatctgcct

SEQ ID NO: 1316169 - DNA, 15 bp, Homo sapiens
ctgggggcatctgcc

SEQ ID NO: 1316170 - DNA, 15 bp, Homo sapiens
cctgggggcatctgc

SEQ ID NO: 1316171 - DNA, 15 bp, Homo sapiens
ccctgggggcatctg

SEQ ID NO: 1316172 - DNA, 15 bp, Homo sapiens
cccctgggggcatct

SEQ ID NO: 1316173 - DNA, 15 bp, Homo sapiens
tcccctgggggcatc

SEQ ID NO: 1316174 - DNA, 15 bp, Homo sapiens
gtcccctgggggcat

SEQ ID NO: 1316175 - DNA, 15 bp, Homo sapiens
tgtcccctgggggca

SEQ ID NO: 1316176 - DNA, 15 bp, Homo sapiens
atgtcccctgggggc

SEQ ID NO: 1316177 - DNA, 15 bp, Homo sapiens
aatgtcccctggggg

SEQ ID NO: 1316178 - DNA, 15 bp, Homo sapiens
aaatgtcccctgggg

SEQ ID NO: 1316179 - DNA, 15 bp, Homo sapiens
aaaatgtcccctggg

SEQ ID NO: 1316180 - DNA, 15 bp, Homo sapiens
caaaatgtcccctgg

SEQ ID NO: 1316181 - DNA, 15 bp, Homo sapiens
gcaaaatgtcccctg

SEQ ID NO: 1316182 - DNA, 15 bp, Homo sapiens
tgcaaaatgtcccct

SEQ ID NO: 1316183 - DNA, 15 bp, Homo sapiens
ttgcaaaatgtcccc

SEQ ID NO: 1316184 - DNA, 15 bp, Homo sapiens
attgcaaaatgtccc

SEQ ID NO: 1316185 - DNA, 15 bp, Homo sapiens
cattgcaaaatgtcc

SEQ ID NO: 1316186 - DNA, 15 bp, Homo sapiens
acattgcaaaatgtc

SEQ ID NO: 1316187 - DNA, 15 bp, Homo sapiens
gacattgcaaaatgt

SEQ ID NO: 1316188 - DNA, 15 bp, Homo sapiens
agacattgcaaaatg

SEQ ID NO: 1316189 - DNA, 15 bp, Homo sapiens
cagacattgcaaaat

SEQ ID NO: 1316190 - DNA, 15 bp, Homo sapiens
ccagacattgcaaaa

SEQ ID NO: 1316191 - DNA, 15 bp, Homo sapiens
tccagacattgcaaa

SEQ ID NO: 1316192 - DNA, 15 bp, Homo sapiens
ctccagacattgcaa

SEQ ID NO: 1316193 - DNA, 15 bp, Homo sapiens
tctccagacattgca

SEQ ID NO: 1316194 - DNA, 15 bp, Homo sapiens
atctccagacattgc

SEQ ID NO: 1316195 - DNA, 15 bp, Homo sapiens
catctccagacattg

SEQ ID NO: 1316196 - DNA, 15 bp, Homo sapiens
acatctccagacatt

SEQ ID NO: 1316197 - DNA, 15 bp, Homo sapiens
aacatctccagacat

SEQ ID NO: 1316198 - DNA, 15 bp, Homo sapiens
aaacatctccagaca

SEQ ID NO: 1316199 - DNA, 15 bp, Homo sapiens
aaaacatctccagac

SEQ ID NO: 1316200 - DNA, 15 bp, Homo sapiens
aaaaacatctccaga

SEQ ID NO: 1316201 - DNA, 15 bp, Homo sapiens
caaaaacatctccag

SEQ ID NO: 1316202 - DNA, 15 bp, Homo sapiens
ccaaaaacatctcca

SEQ ID NO: 1316203 - DNA, 15 bp, Homo sapiens
caaccaaaaacatct

SEQ ID NO: 1316204 - DNA, 15 bp, Homo sapiens
acaaccaaaaacatc

SEQ ID NO: 1316205 - DNA, 15 bp, Homo sapiens
gacaaccaaaaacat

SEQ ID NO: 1316206 - DNA, 15 bp, Homo sapiens
tgacaaccaaaaaca

SEQ ID NO: 1316207 - DNA, 15 bp, Homo sapiens
gtgacaaccaaaaac

SEQ ID NO: 1316208 - DNA, 15 bp, Homo sapiens
tgtgacaaccaaaaa

SEQ ID NO: 1316209 - DNA, 15 bp, Homo sapiens
ttgtgacaaccaaaa

SEQ ID NO: 1316210 - DNA, 15 bp, Homo sapiens
gttgtgacaaccaaa

SEQ ID NO: 1316211 - DNA, 15 bp, Homo sapiens
agttgtgacaaccaa

SEQ ID NO: 1316212 - DNA, 15 bp, Homo sapiens
tagttgtgacaacca

SEQ ID NO: 1316213 - DNA, 15 bp, Homo sapiens
ctagttgtgacaacc

SEQ ID NO: 1316214 - DNA, 15 bp, Homo sapiens
cctagttgtgacaac

SEQ ID NO: 1316215 - DNA, 15 bp, Homo sapiens
ccctagttgtgacaa

SEQ ID NO: 1316216 - DNA, 15 bp, Homo sapiens
cccctagttgtgaca

SEQ ID NO: 1316217 - DNA, 15 bp, Homo sapiens
tcccctagttgtgac

SEQ ID NO: 1316218 - DNA, 15 bp, Homo sapiens
gtcccctagttgtga

SEQ ID NO: 1316219 - DNA, 15 bp, Homo sapiens
ggtcccctagttgtg

SEQ ID NO: 1316220 - DNA, 15 bp, Homo sapiens
cggtcccctagttgt

SEQ ID NO: 1316221 - DNA, 15 bp, Homo sapiens
acggtcccctagttg

SEQ ID NO: 1316222 - DNA, 15 bp, Homo sapiens
cacggtcccctagtt

SEQ ID NO: 1316223 - DNA, 15 bp, Homo sapiens
gcacggtcccctagt

SEQ ID NO: 1316224 - DNA, 15 bp, Homo sapiens
agcacggtcccctag

SEQ ID NO: 1316225 - DNA, 15 bp, Homo sapiens
cagcacggtccccta

SEQ ID NO: 1316226 - DNA, 15 bp, Homo sapiens
gcagcacggtcccct

SEQ ID NO: 1316227 - DNA, 15 bp, Homo sapiens
agcagcacggtcccc

SEQ ID NO: 1316228 - DNA, 15 bp, Homo sapiens
cagcagcacggtccc

SEQ ID NO: 1316229 - DNA, 15 bp, Homo sapiens
ccagcagcacggtcc

SEQ ID NO: 1316230 - DNA, 15 bp, Homo sapiens
gccagcagcacggtc

SEQ ID NO: 1316231 - DNA, 15 bp, Homo sapiens
tgccagcagcacggt

SEQ ID NO: 1316232 - DNA, 15 bp, Homo sapiens
atgccagcagcacgg

SEQ ID NO: 1316233 - DNA, 15 bp, Homo sapiens
gatgccagcagcacg

SEQ ID NO: 1316234 - DNA, 15 bp, Homo sapiens
agatgccagcagcac

SEQ ID NO: 1316235 - DNA, 15 bp, Homo sapiens
cagatgccagcagca

SEQ ID NO: 1316236 - DNA, 15 bp, Homo sapiens
tcagatgccagcagc

SEQ ID NO: 1316237 - DNA, 15 bp, Homo sapiens
atcagatgccagcag

SEQ ID NO: 1316238 - DNA, 15 bp, Homo sapiens
tatcagatgccagca

SEQ ID NO: 1316239 - DNA, 15 bp, Homo sapiens
ctatcagatgccagc

SEQ ID NO: 1316240 - DNA, 15 bp, Homo sapiens
cctatcagatgccag

SEQ ID NO: 1316241 - DNA, 15 bp, Homo sapiens
acctatcagatgcca

SEQ ID NO: 1316242 - DNA, 15 bp, Homo sapiens
tacctatcagatgcc

SEQ ID NO: 1316243 - DNA, 15 bp, Homo sapiens
ctacctatcagatgc

SEQ ID NO: 1316244 - DNA, 15 bp, Homo sapiens
tctacctatcagatg

SEQ ID NO: 1316245 - DNA, 15 bp, Homo sapiens
ctctacctatcagat

SEQ ID NO: 1316246 - DNA, 15 bp, Homo sapiens
gctctacctatcaga

SEQ ID NO: 1316247 - DNA, 15 bp, Homo sapiens
ggctctacctatcag

SEQ ID NO: 1316248 - DNA, 15 bp, Homo sapiens
gggctctacctatca

SEQ ID NO: 1316249 - DNA, 15 bp, Homo sapiens
tgggctctacctatc

SEQ ID NO: 1316250 - DNA, 15 bp, Homo sapiens
ctgggctctacctat

SEQ ID NO: 1316251 - DNA, 15 bp, Homo sapiens
cctgggctctaccta

SEQ ID NO: 1316252 - DNA, 15 bp, Homo sapiens
ccctgggctctacct

SEQ ID NO: 1316253 - DNA, 15 bp, Homo sapiens
tccctgggctctacc

SEQ ID NO: 1316254 - DNA, 15 bp, Homo sapiens
gtccctgggctctac

SEQ ID NO: 1316255 - DNA, 15 bp, Homo sapiens
tgtccctgggctcta

SEQ ID NO: 1316256 - DNA, 15 bp, Homo sapiens
gtgtccctgggctct

SEQ ID NO: 1316257 - DNA, 15 bp, Homo sapiens
agtgtccctgggctc

SEQ ID NO: 1316258 - DNA, 15 bp, Homo sapiens
cagtgtccctgggct

SEQ ID NO: 1316259 - DNA, 15 bp, Homo sapiens
gcagtgtccctgggc

SEQ ID NO: 1316260 - DNA, 15 bp, Homo sapiens
cgcagtgtccctggg

SEQ ID NO: 1316261 - DNA, 15 bp, Homo sapiens
tcgcagtgtccctgg

SEQ ID NO: 1316262 - DNA, 15 bp, Homo sapiens
ttcgcagtgtccctg

SEQ ID NO: 1316263 - DNA, 15 bp, Homo sapiens
gttcgcagtgtccct

SEQ ID NO: 1316264 - DNA, 15 bp, Homo sapiens
cgttcgcagtgtccc

SEQ ID NO: 1316265 - DNA, 15 bp, Homo sapiens
tcgttcgcagtgtcc

SEQ ID NO: 1316266 - DNA, 15 bp, Homo sapiens
gtcgttcgcagtgtc

SEQ ID NO: 1316267 - DNA, 15 bp, Homo sapiens
ggtcgttcgcagtgt

SEQ ID NO: 1316268 - DNA, 15 bp, Homo sapiens
gggtcgttcgcagtg

SEQ ID NO: 1316269 - DNA, 15 bp, Homo sapiens
agggtcgttcgcagt

SEQ ID NO: 1316270 - DNA, 15 bp, Homo sapiens
cagggtcgttcgcag

SEQ ID NO: 1316271 - DNA, 15 bp, Homo sapiens
gcagggtcgttcgca

SEQ ID NO: 1316272 - DNA, 15 bp, Homo sapiens
tgcagggtcgttcgc

SEQ ID NO: 1316273 - DNA, 15 bp, Homo sapiens
ttgcagggtcgttcg

SEQ ID NO: 1316274 - DNA, 15 bp, Homo sapiens
attgcagggtcgttc

SEQ ID NO: 1316275 - DNA, 15 bp, Homo sapiens
cattgcagggtcgtt

SEQ ID NO: 1316276 - DNA, 15 bp, Homo sapiens
gcattgcagggtcgt

SEQ ID NO: 1316277 - DNA, 15 bp, Homo sapiens
tgcattgcagggtcg

SEQ ID NO: 1316278 - DNA, 15 bp, Homo sapiens
gtgcattgcagggtc

SEQ ID NO: 1316279 - DNA, 15 bp, Homo sapiens
tgtgcattgcagggt

SEQ ID NO: 1316280 - DNA, 15 bp, Homo sapiens
ctgtgcattgcaggg

SEQ ID NO: 1316281 - DNA, 15 bp, Homo sapiens
cctgtgcattgcagg

SEQ ID NO: 1316282 - DNA, 15 bp, Homo sapiens
acctgtgcattgcag

SEQ ID NO: 1316283 - DNA, 15 bp, Homo sapiens
gacctgtgcattgca

SEQ ID NO: 1316284 - DNA, 15 bp, Homo sapiens
tgacctgtgcattgc

SEQ ID NO: 1316285 - DNA, 15 bp, Homo sapiens
ctgacctgtgcattg

SEQ ID NO: 1316286 - DNA, 15 bp, Homo sapiens
gctgacctgtgcatt

SEQ ID NO: 1316287 - DNA, 15 bp, Homo sapiens
ggctgacctgtgcat

SEQ ID NO: 1316288 - DNA, 15 bp, Homo sapiens
gggctgacctgtgca

SEQ ID NO: 1316289 - DNA, 15 bp, Homo sapiens
ggggctgacctgtgc

SEQ ID NO: 1316290 - DNA, 15 bp, Homo sapiens
gggggctgacctgtg

SEQ ID NO: 1316291 - DNA, 15 bp, Homo sapiens
tgggggctgacctgt

SEQ ID NO: 1316292 - DNA, 15 bp, Homo sapiens
ttgggggctgacctg

SEQ ID NO: 1316293 - DNA, 15 bp, Homo sapiens
tttgggggctgacct

SEQ ID NO: 1316294 - DNA, 15 bp, Homo sapiens
ttttgggggctgacc

SEQ ID NO: 1316295 - DNA, 15 bp, Homo sapiens
gttttgggggctgac

SEQ ID NO: 1316296 - DNA, 15 bp, Homo sapiens
tgttttgggggctga

SEQ ID NO: 1316297 - DNA, 15 bp, Homo sapiens
ctgttttgggggctg

SEQ ID NO: 1316298 - DNA, 15 bp, Homo sapiens
tctgttttgggggct

SEQ ID NO: 1316299 - DNA, 15 bp, Homo sapiens
ctctgttttgggggc

SEQ ID NO: 1316300 - DNA, 15 bp, Homo sapiens
tctctgttttggggg

SEQ ID NO: 1316301 - DNA, 15 bp, Homo sapiens
ttctctgttttgggg

SEQ ID NO: 1316302 - DNA, 15 bp, Homo sapiens
attctctgttttggg

SEQ ID NO: 1316303 - DNA, 15 bp, Homo sapiens
aattctctgttttgg

SEQ ID NO: 1316304 - DNA, 15 bp, Homo sapiens
caattctctgttttg

SEQ ID NO: 1316305 - DNA, 15 bp, Homo sapiens
acaattctctgtttt

SEQ ID NO: 1316306 - DNA, 15 bp, Homo sapiens
gacaattctctgttt

SEQ ID NO: 1316307 - DNA, 15 bp, Homo sapiens
agacaattctctgtt

SEQ ID NO: 1316308 - DNA, 15 bp, Homo sapiens
cagacaattctctgt

SEQ ID NO: 1316309 - DNA, 15 bp, Homo sapiens
ccagacaattctctg

SEQ ID NO: 1316310 - DNA, 15 bp, Homo sapiens
gccagacaattctct

SEQ ID NO: 1316311 - DNA, 15 bp, Homo sapiens
ggccagacaattctc

SEQ ID NO: 1316312 - DNA, 15 bp, Homo sapiens
gggccagacaattct

SEQ ID NO: 1316313 - DNA, 15 bp, Homo sapiens
tgggccagacaattc

SEQ ID NO: 1316314 - DNA, 15 bp, Homo sapiens
ctgggccagacaatt

SEQ ID NO: 1316315 - DNA, 15 bp, Homo sapiens
tctgggccagacaat

SEQ ID NO: 1316316 - DNA, 15 bp, Homo sapiens
ttctgggccagacaa

SEQ ID NO: 1316317 - DNA, 15 bp, Homo sapiens
attctgggccagaca

SEQ ID NO: 1316318 - DNA, 15 bp, Homo sapiens
cattctgggccagac

SEQ ID NO: 1316319 - DNA, 15 bp, Homo sapiens
acattctgggccaga

SEQ ID NO: 1316320 - DNA, 15 bp, Homo sapiens
aacattctgggccag

SEQ ID NO: 1316321 - DNA, 15 bp, Homo sapiens
taacattctgggcca

SEQ ID NO: 1316322 - DNA, 15 bp, Homo sapiens
ttaacattctgggcc

SEQ ID NO: 1316323 - DNA, 15 bp, Homo sapiens
attaacattctgggc

SEQ ID NO: 1316324 - DNA, 15 bp, Homo sapiens
cattaacattctggg

SEQ ID NO: 1316325 - DNA, 15 bp, Homo sapiens
ccattaacattctgg

SEQ ID NO: 1316326 - DNA, 15 bp, Homo sapiens
accattaacattctg

SEQ ID NO: 1316327 - DNA, 15 bp, Homo sapiens
caccattaacattct

SEQ ID NO: 1316328 - DNA, 15 bp, Homo sapiens
acaccattaacattc

SEQ ID NO: 1316329 - DNA, 15 bp, Homo sapiens
gacaccattaacatt

SEQ ID NO: 1316330 - DNA, 15 bp, Homo sapiens
cgacaccattaacat

SEQ ID NO: 1316331 - DNA, 15 bp, Homo sapiens
tcgacaccattaaca

SEQ ID NO: 1316332 - DNA, 15 bp, Homo sapiens
ctcgacaccattaac

SEQ ID NO: 1316333 - DNA, 15 bp, Homo sapiens
cctcgacaccattaa

SEQ ID NO: 1316334 - DNA, 15 bp, Homo sapiens
gcctcgacaccatta

SEQ ID NO: 1316335 - DNA, 15 bp, Homo sapiens
agcctcgacaccatt

SEQ ID NO: 1316336 - DNA, 15 bp, Homo sapiens
cagcctcgacaccat

SEQ ID NO: 1316337 - DNA, 15 bp, Homo sapiens
tcagcctcgacacca

SEQ ID NO: 1316338 - DNA, 15 bp, Homo sapiens
ctcagcctcgacacc

SEQ ID NO: 1316339 - DNA, 15 bp, Homo sapiens
tctcagcctcgacac

SEQ ID NO: 1316340 - DNA, 15 bp, Homo sapiens
ttctcagcctcgaca

SEQ ID NO: 1316341 - DNA, 15 bp, Homo sapiens
tttctcagcctcgac

SEQ ID NO: 1316342 - DNA, 15 bp, Homo sapiens
ttttctcagcctcga

SEQ ID NO: 1316343 - DNA, 15 bp, Homo sapiens
gttttctcagcctcg

SEQ ID NO: 1316344 - DNA, 15 bp, Homo sapiens
ggttttctcagcctc

SEQ ID NO: 1316345 - DNA, 15 bp, Homo sapiens
gggttttctcagcct

SEQ ID NO: 1316346 - DNA, 15 bp, Homo sapiens
agggttttctcagcc

SEQ ID NO: 1316347 - DNA, 15 bp, Homo sapiens
aagggttttctcagc

SEQ ID NO: 1316348 - DNA, 15 bp, Homo sapiens
taagggttttctcag

SEQ ID NO: 1316349 - DNA, 15 bp, Homo sapiens
gtaagggttttctca

SEQ ID NO: 1316350 - DNA, 15 bp, Homo sapiens
agtaagggttttctc

SEQ ID NO: 1316351 - DNA, 15 bp, Homo sapiens
tagtaagggttttct

SEQ ID NO: 1316352 - DNA, 15 bp, Homo sapiens
ctagtaagggttttc

SEQ ID NO: 1316353 - DNA, 15 bp, Homo sapiens
cctagtaagggtttt

SEQ ID NO: 1316354 - DNA, 15 bp, Homo sapiens
ccctagtaagggttt

SEQ ID NO: 1316355 - DNA, 15 bp, Homo sapiens
gccctagtaagggtt

SEQ ID NO: 1316356 - DNA, 15 bp, Homo sapiens
agccctagtaagggt

SEQ ID NO: 1316357 - DNA, 15 bp, Homo sapiens
aagccctagtaaggg

SEQ ID NO: 1316358 - DNA, 15 bp, Homo sapiens
aaagccctagtaagg

SEQ ID NO: 1316359 - DNA, 15 bp, Homo sapiens
gaaagccctagtaag

SEQ ID NO: 1316360 - DNA, 15 bp, Homo sapiens
ggaaagccctagtaa

SEQ ID NO: 1316361 - DNA, 15 bp, Homo sapiens
tggaaagccctagta

SEQ ID NO: 1316362 - DNA, 15 bp, Homo sapiens
ttggaaagccctagt

SEQ ID NO: 1316363 - DNA, 15 bp, Homo sapiens
cttggaaagccctag

SEQ ID NO: 1316364 - DNA, 15 bp, Homo sapiens
acttggaaagcccta

SEQ ID NO: 1316365 - DNA, 15 bp, Homo sapiens
cacttggaaagccct

SEQ ID NO: 1316366 - DNA, 15 bp, Homo sapiens
acacttggaaagccc

SEQ ID NO: 1316367 - DNA, 15 bp, Homo sapiens
cacacttggaaagcc

SEQ ID NO: 1316368 - DNA, 15 bp, Homo sapiens
acacacttggaaagc

SEQ ID NO: 1316369 - DNA, 15 bp, Homo sapiens
gacacacttggaaag

SEQ ID NO: 1316370 - DNA, 15 bp, Homo sapiens
agacacacttggaaa

SEQ ID NO: 1316371 - DNA, 15 bp, Homo sapiens
tagacacacttggaa

SEQ ID NO: 1316372 - DNA, 15 bp, Homo sapiens
gtagacacacttgga

SEQ ID NO: 1316373 - DNA, 15 bp, Homo sapiens
cgtagacacacttgg

SEQ ID NO: 1316374 - DNA, 15 bp, Homo sapiens
ccgtagacacacttg

SEQ ID NO: 1316375 - DNA, 15 bp, Homo sapiens
gccgtagacacactt

SEQ ID NO: 1316376 - DNA, 15 bp, Homo sapiens
tgccgtagacacact

SEQ ID NO: 1316377 - DNA, 15 bp, Homo sapiens
atgccgtagacacac

SEQ ID NO: 1316378 - DNA, 15 bp, Homo sapiens
tatgccgtagacaca

SEQ ID NO: 1316379 - DNA, 15 bp, Homo sapiens
atatgccgtagacac

SEQ ID NO: 1316380 - DNA, 15 bp, Homo sapiens
aatatgccgtagaca

SEQ ID NO: 1316381 - DNA, 15 bp, Homo sapiens
caatatgccgtagac

SEQ ID NO: 1316382 - DNA, 15 bp, Homo sapiens
tcaatatgccgtaga

SEQ ID NO: 1316383 - DNA, 15 bp, Homo sapiens
atcaatatgccgtag

SEQ ID NO: 1316384 - DNA, 15 bp, Homo sapiens
aatcaatatgccgta

SEQ ID NO: 1316385 - DNA, 15 bp, Homo sapiens
gaatcaatatgccgt

SEQ ID NO: 1316386 - DNA, 15 bp, Homo sapiens
ggaatcaatatgccg

SEQ ID NO: 1316387 - DNA, 15 bp, Homo sapiens
aggaatcaatatgcc

SEQ ID NO: 1316388 - DNA, 15 bp, Homo sapiens
taggaatcaatatgc

SEQ ID NO: 1316389 - DNA, 15 bp, Homo sapiens
ataggaatcaatatg

SEQ ID NO: 1316390 - DNA, 15 bp, Homo sapiens
gataggaatcaatat

SEQ ID NO: 1316391 - DNA, 15 bp, Homo sapiens
tgataggaatcaata

SEQ ID NO: 1316392 - DNA, 15 bp, Homo sapiens
gtgataggaatcaat

SEQ ID NO: 1316393 - DNA, 15 bp, Homo sapiens
ggtgataggaatcaa

SEQ ID NO: 1316394 - DNA, 15 bp, Homo sapiens
gggtgataggaatca

SEQ ID NO: 1316395 - DNA, 15 bp, Homo sapiens
ggggtgataggaatc

SEQ ID NO: 1316396 - DNA, 15 bp, Homo sapiens
tggggtgataggaat

SEQ ID NO: 1316397 - DNA, 15 bp, Homo sapiens
ttggggtgataggaa

SEQ ID NO: 1316398 - DNA, 15 bp, Homo sapiens
tttggggtgatagga

SEQ ID NO: 1316399 - DNA, 15 bp, Homo sapiens
ctttggggtgatagg

SEQ ID NO: 1316400 - DNA, 15 bp, Homo sapiens
cctttggggtgatag

SEQ ID NO: 1316401 - DNA, 15 bp, Homo sapiens
ccctttggggtgata

SEQ ID NO: 1316402 - DNA, 15 bp, Homo sapiens
cccctttggggtgat

SEQ ID NO: 1316403 - DNA, 15 bp, Homo sapiens
tcccctttggggtga

SEQ ID NO: 1316404 - DNA, 15 bp, Homo sapiens
ttcccctttggggtg

SEQ ID NO: 1316405 - DNA, 15 bp, Homo sapiens
attcccctttggggt

SEQ ID NO: 1316406 - DNA, 15 bp, Homo sapiens
aattcccctttgggg

SEQ ID NO: 1316407 - DNA, 15 bp, Homo sapiens
aaattcccctttggg

SEQ ID NO: 1316408 - DNA, 15 bp, Homo sapiens
taaattcccctttgg

SEQ ID NO: 1316409 - DNA, 15 bp, Homo sapiens
ctaaattcccctttg

SEQ ID NO: 1316410 - DNA, 15 bp, Homo sapiens
actaaattccccttt

SEQ ID NO: 1316411 - DNA, 15 bp, Homo sapiens
cactaaattcccctt

SEQ ID NO: 1316412 - DNA, 15 bp, Homo sapiens
tcactaaattcccct

SEQ ID NO: 1316413 - DNA, 15 bp, Homo sapiens
gtcactaaattcccc

SEQ ID NO: 1316414 - DNA, 15 bp, Homo sapiens
ggtcactaaattccc

SEQ ID NO: 1316415 - DNA, 15 bp, Homo sapiens
tggtcactaaattcc

SEQ ID NO: 1316416 - DNA, 15 bp, Homo sapiens
ctggtcactaaattc

SEQ ID NO: 1316417 - DNA, 15 bp, Homo sapiens
actggtcactaaatt

SEQ ID NO: 1316418 - DNA, 15 bp, Homo sapiens
aactggtcactaaat

SEQ ID NO: 1316419 - DNA, 15 bp, Homo sapiens
taactggtcactaaa

SEQ ID NO: 1316420 - DNA, 15 bp, Homo sapiens
ctaactggtcactaa

SEQ ID NO: 1316421 - DNA, 15 bp, Homo sapiens
cctaactggtcacta

SEQ ID NO: 1316422 - DNA, 15 bp, Homo sapiens
gcctaactggtcact

SEQ ID NO: 1316423 - DNA, 15 bp, Homo sapiens
agcctaactggtcac

SEQ ID NO: 1316424 - DNA, 15 bp, Homo sapiens
cagcctaactggtca

SEQ ID NO: 1316425 - DNA, 15 bp, Homo sapiens
acagcctaactggtc

SEQ ID NO: 1316426 - DNA, 15 bp, Homo sapiens
aacagcctaactggt

SEQ ID NO: 1316427 - DNA, 15 bp, Homo sapiens
aaacagcctaactgg

SEQ ID NO: 1316428 - DNA, 15 bp, Homo sapiens
gaaacagcctaactg

SEQ ID NO: 1316429 - DNA, 15 bp, Homo sapiens
tgaaacagcctaact

SEQ ID NO: 1316430 - DNA, 15 bp, Homo sapiens
atgaaacagcctaac

SEQ ID NO: 1316431 - DNA, 15 bp, Homo sapiens
gatgaaacagcctaa

SEQ ID NO: 1316432 - DNA, 15 bp, Homo sapiens
ggatgaaacagccta

SEQ ID NO: 1316433 - DNA, 15 bp, Homo sapiens
tggatgaaacagcct

SEQ ID NO: 1316434 - DNA, 15 bp, Homo sapiens
ctggatgaaacagcc

SEQ ID NO: 1316435 - DNA, 15 bp, Homo sapiens
actggatgaaacagc

SEQ ID NO: 1316436 - DNA, 15 bp, Homo sapiens
aactggatgaaacag

SEQ ID NO: 1316437 - DNA, 15 bp, Homo sapiens
aaactggatgaaaca

SEQ ID NO: 1316438 - DNA, 15 bp, Homo sapiens
gaaactggatgaaac

SEQ ID NO: 1316439 - DNA, 15 bp, Homo sapiens
ggaaactggatgaaa

SEQ ID NO: 1316440 - DNA, 15 bp, Homo sapiens
gggaaactggatgaa

SEQ ID NO: 1316441 - DNA, 15 bp, Homo sapiens
tgggaaactggatga

SEQ ID NO: 1316442 - DNA, 15 bp, Homo sapiens
ttgggaaactggatg

SEQ ID NO: 1316443 - DNA, 15 bp, Homo sapiens
tttgggaaactggat

SEQ ID NO: 1316444 - DNA, 15 bp, Homo sapiens
ttttgggaaactgga

SEQ ID NO: 1316445 - DNA, 15 bp, Homo sapiens
attttgggaaactgg

SEQ ID NO: 1316446 - DNA, 15 bp, Homo sapiens
aattttgggaaactg

SEQ ID NO: 1316447 - DNA, 15 bp, Homo sapiens
taattttgggaaact

SEQ ID NO: 1316448 - DNA, 15 bp, Homo sapiens
ttaattttgggaaac

SEQ ID NO: 1316449 - DNA, 15 bp, Homo sapiens
attaattttgggaaa

SEQ ID NO: 1316450 - DNA, 15 bp, Homo sapiens
cattaattttgggaa

SEQ ID NO: 1316451 - DNA, 15 bp, Homo sapiens
acattaattttggga

SEQ ID NO: 1316452 - DNA, 15 bp, Homo sapiens
aacattaattttggg

SEQ ID NO: 1316453 - DNA, 15 bp, Homo sapiens
gaacattaattttgg

SEQ ID NO: 1316454 - DNA, 15 bp, Homo sapiens
agaacattaattttg

SEQ ID NO: 1316455 - DNA, 15 bp, Homo sapiens
aagaacattaatttt

SEQ ID NO: 1316456 - DNA, 15 bp, Homo sapiens
aaagaacattaattt

SEQ ID NO: 1316457 - DNA, 15 bp, Homo sapiens
gaaagaacattaatt

SEQ ID NO: 1316458 - DNA, 15 bp, Homo sapiens
agaaagaacattaat

SEQ ID NO: 1316459 - DNA, 15 bp, Homo sapiens
aagaaagaacattaa

SEQ ID NO: 1316460 - DNA, 15 bp, Homo sapiens
caagaaagaacatta

SEQ ID NO: 1316461 - DNA, 15 bp, Homo sapiens
tcaagaaagaacatt

SEQ ID NO: 1316462 - DNA, 15 bp, Homo sapiens
ttcaagaaagaacat

SEQ ID NO: 1316463 - DNA, 15 bp, Homo sapiens
tttcaagaaagaaca

SEQ ID NO: 1316464 - DNA, 15 bp, Homo sapiens
ctttcaagaaagaac

SEQ ID NO: 1316465 - DNA, 15 bp, Homo sapiens
cctttcaagaaagaa

SEQ ID NO: 1316466 - DNA, 15 bp, Homo sapiens
gcctttcaagaaaga

SEQ ID NO: 1316467 - DNA, 15 bp, Homo sapiens
agcctttcaagaaag

SEQ ID NO: 1316468 - DNA, 15 bp, Homo sapiens
aagcctttcaagaaa

SEQ ID NO: 1316469 - DNA, 15 bp, Homo sapiens
aaagcctttcaagaa

SEQ ID NO: 1316470 - DNA, 15 bp, Homo sapiens
aaaagcctttcaaga

SEQ ID NO: 1316471 - DNA, 15 bp, Homo sapiens
gaaaagcctttcaag

SEQ ID NO: 1316472 - DNA, 15 bp, Homo sapiens
tgaaaagcctttcaa

SEQ ID NO: 1316473 - DNA, 15 bp, Homo sapiens
ctgaaaagcctttca

SEQ ID NO: 1316474 - DNA, 15 bp, Homo sapiens
actgaaaagcctttc

SEQ ID NO: 1316475 - DNA, 15 bp, Homo sapiens
cactgaaaagccttt

SEQ ID NO: 1316476 - DNA, 15 bp, Homo sapiens
gcactgaaaagcctt

SEQ ID NO: 1316477 - DNA, 15 bp, Homo sapiens
agcactgaaaagcct

SEQ ID NO: 1316478 - DNA, 15 bp, Homo sapiens
aagcactgaaaagcc

SEQ ID NO: 1316479 - DNA, 15 bp, Homo sapiens
aaagcactgaaaagc

SEQ ID NO: 1316480 - DNA, 15 bp, Homo sapiens
aaaagcactgaaaag

SEQ ID NO: 1316481 - DNA, 15 bp, Homo sapiens
taaaagcactgaaaa

SEQ ID NO: 1316482 - DNA, 15 bp, Homo sapiens
ttaaaagcactgaaa

SEQ ID NO: 1316483 - DNA, 15 bp, Homo sapiens
attaaaagcactgaa

SEQ ID NO: 1316484 - DNA, 15 bp, Homo sapiens
tattaaaagcactga

SEQ ID NO: 1316485 - DNA, 15 bp, Homo sapiens
gtattaaaagcactg

SEQ ID NO: 1316486 - DNA, 15 bp, Homo sapiens
agtattaaaagcact

SEQ ID NO: 1316487 - DNA, 15 bp, Homo sapiens
tagtattaaaagcac

SEQ ID NO: 1316488 - DNA, 15 bp, Homo sapiens
ttagtattaaaagca

SEQ ID NO: 1316489 - DNA, 15 bp, Homo sapiens
attagtattaaaagc

SEQ ID NO: 1316490 - DNA, 15 bp, Homo sapiens
tattagtattaaaag

SEQ ID NO: 1316491 - DNA, 15 bp, Homo sapiens
atattagtattaaaa

SEQ ID NO: 1316492 - DNA, 15 bp, Homo sapiens
catattagtattaaa

SEQ ID NO: 1316493 - DNA, 15 bp, Homo sapiens
gcatattagtattaa

SEQ ID NO: 1316494 - DNA, 15 bp, Homo sapiens
tgcatattagtatta

SEQ ID NO: 1316495 - DNA, 15 bp, Homo sapiens
atgcatattagtatt

SEQ ID NO: 1316496 - DNA, 15 bp, Homo sapiens
gatgcatattagtat

SEQ ID NO: 1316497 - DNA, 15 bp, Homo sapiens
agatgcatattagta

SEQ ID NO: 1316498 - DNA, 15 bp, Homo sapiens
gagatgcatattagt

SEQ ID NO: 1316499 - DNA, 15 bp, Homo sapiens
agagatgcatattag

SEQ ID NO: 1316500 - DNA, 15 bp, Homo sapiens
cagagatgcatatta

SEQ ID NO: 1316501 - DNA, 15 bp, Homo sapiens
tcagagatgcatatt

SEQ ID NO: 1316502 - DNA, 15 bp, Homo sapiens
ctcagagatgcatat

SEQ ID NO: 1316503 - DNA, 15 bp, Homo sapiens
tctcagagatgcata

SEQ ID NO: 1316504 - DNA, 15 bp, Homo sapiens
atctcagagatgcat

SEQ ID NO: 1316505 - DNA, 15 bp, Homo sapiens
tatctcagagatgca

SEQ ID NO: 1316506 - DNA, 15 bp, Homo sapiens
ttatctcagagatgc

SEQ ID NO: 1316507 - DNA, 15 bp, Homo sapiens
gttatctcagagatg

SEQ ID NO: 1316508 - DNA, 15 bp, Homo sapiens
cgttatctcagagat

SEQ ID NO: 1316509 - DNA, 15 bp, Homo sapiens
acgttatctcagaga

SEQ ID NO: 1316510 - DNA, 15 bp, Homo sapiens
tacgttatctcagag

SEQ ID NO: 1316511 - DNA, 15 bp, Homo sapiens
gtacgttatctcaga

SEQ ID NO: 1316512 - DNA, 15 bp, Homo sapiens
agtacgttatctcag

SEQ ID NO: 1316513 - DNA, 15 bp, Homo sapiens
tagtacgttatctca

SEQ ID NO: 1316514 - DNA, 15 bp, Homo sapiens
atagtacgttatctc

SEQ ID NO: 1316515 - DNA, 15 bp, Homo sapiens
tatagtacgttatct

SEQ ID NO: 1316516 - DNA, 15 bp, Homo sapiens
ctatagtacgttatc

SEQ ID NO: 1316517 - DNA, 15 bp, Homo sapiens
tctatagtacgttat

SEQ ID NO: 1316518 - DNA, 15 bp, Homo sapiens
ttctatagtacgtta

SEQ ID NO: 1316519 - DNA, 15 bp, Homo sapiens
gttctatagtacgtt

SEQ ID NO: 1316520 - DNA, 15 bp, Homo sapiens
tgttctatagtacgt

SEQ ID NO: 1316521 - DNA, 15 bp, Homo sapiens
gtgttctatagtacg

SEQ ID NO: 1316522 - DNA, 15 bp, Homo sapiens
agtgttctatagtac

SEQ ID NO: 1316523 - DNA, 15 bp, Homo sapiens
aagtgttctatagta

SEQ ID NO: 1316524 - DNA, 15 bp, Homo sapiens
aaagtgttctatagt

SEQ ID NO: 1316525 - DNA, 15 bp, Homo sapiens
gaaagtgttctatag

SEQ ID NO: 1316526 - DNA, 15 bp, Homo sapiens
ggaaagtgttctata

SEQ ID NO: 1316527 - DNA, 15 bp, Homo sapiens
tggaaagtgttctat

SEQ ID NO: 1316528 - DNA, 15 bp, Homo sapiens
ttggaaagtgttcta

SEQ ID NO: 1316529 - DNA, 15 bp, Homo sapiens
tttggaaagtgttct

SEQ ID NO: 1316530 - DNA, 15 bp, Homo sapiens
gtttggaaagtgttc

SEQ ID NO: 1316531 - DNA, 15 bp, Homo sapiens
ggtttggaaagtgtt

SEQ ID NO: 1316532 - DNA, 15 bp, Homo sapiens
aggtttggaaagtgt

SEQ ID NO: 1316533 - DNA, 15 bp, Homo sapiens
taggtttggaaagtg

SEQ ID NO: 1316534 - DNA, 15 bp, Homo sapiens
ataggtttggaaagt

SEQ ID NO: 1316535 - DNA, 15 bp, Homo sapiens
aataggtttggaaag

SEQ ID NO: 1316536 - DNA, 15 bp, Homo sapiens
aaataggtttggaaa

SEQ ID NO: 1316537 - DNA, 15 bp, Homo sapiens
caaataggtttggaa

SEQ ID NO: 1316538 - DNA, 15 bp, Homo sapiens
tcaaataggtttgga

SEQ ID NO: 1316539 - DNA, 15 bp, Homo sapiens
gtcaaataggtttgg

SEQ ID NO: 1316540 - DNA, 15 bp, Homo sapiens
agtcaaataggtttg

SEQ ID NO: 1316541 - DNA, 15 bp, Homo sapiens
tagtcaaataggttt

SEQ ID NO: 1316542 - DNA, 15 bp, Homo sapiens
atagtcaaataggtt

SEQ ID NO: 1316543 - DNA, 15 bp, Homo sapiens
tatagtcaaataggt

SEQ ID NO: 1316544 - DNA, 15 bp, Homo sapiens
ttatagtcaaatagg

SEQ ID NO: 1316545 - DNA, 15 bp, Homo sapiens
cttatagtcaaatag

SEQ ID NO: 1316546 - DNA, 15 bp, Homo sapiens
gcttatagtcaaata

SEQ ID NO: 1316547 - DNA, 15 bp, Homo sapiens
ggcttatagtcaaat

SEQ ID NO: 1316548 - DNA, 15 bp, Homo sapiens
aggcttatagtcaaa

SEQ ID NO: 1316549 - DNA, 15 bp, Homo sapiens
gaggcttatagtcaa

SEQ ID NO: 1316550 - DNA, 15 bp, Homo sapiens
agaggcttatagtca

SEQ ID NO: 1316551 - DNA, 15 bp, Homo sapiens
cagaggcttatagtc

SEQ ID NO: 1316552 - DNA, 15 bp, Homo sapiens
gcagaggcttatagt

SEQ ID NO: 1316553 - DNA, 15 bp, Homo sapiens
agcagaggcttatag

SEQ ID NO: 1316554 - DNA, 15 bp, Homo sapiens
gagcagaggcttata

SEQ ID NO: 1316555 - DNA, 15 bp, Homo sapiens
ggagcagaggcttat

SEQ ID NO: 1316556 - DNA, 15 bp, Homo sapiens
aggagcagaggctta

SEQ ID NO: 1316557 - DNA, 15 bp, Homo sapiens
gaggagcagaggctt

SEQ ID NO: 1316558 - DNA, 15 bp, Homo sapiens
agaggagcagaggct

SEQ ID NO: 1316559 - DNA, 15 bp, Homo sapiens
gagaggagcagaggc

SEQ ID NO: 1316560 - DNA, 15 bp, Homo sapiens
ggagaggagcagagg

SEQ ID NO: 1316561 - DNA, 15 bp, Homo sapiens
gggagaggagcagag

SEQ ID NO: 1316562 - DNA, 15 bp, Homo sapiens
tgggagaggagcaga

SEQ ID NO: 1316563 - DNA, 15 bp, Homo sapiens
gtgggagaggagcag

SEQ ID NO: 1316564 - DNA, 15 bp, Homo sapiens
ggtgggagaggagca

SEQ ID NO: 1316565 - DNA, 15 bp, Homo sapiens
aggtgggagaggagc

SEQ ID NO: 1316566 - DNA, 15 bp, Homo sapiens
gaggtgggagaggag

SEQ ID NO: 1316567 - DNA, 15 bp, Homo sapiens
ggaggtgggagagga

SEQ ID NO: 1316568 - DNA, 15 bp, Homo sapiens
gggaggtgggagagg

SEQ ID NO: 1316569 - DNA, 15 bp, Homo sapiens
ggggaggtgggagag

SEQ ID NO: 1316570 - DNA, 15 bp, Homo sapiens
gggggaggtgggaga

SEQ ID NO: 1316571 - DNA, 15 bp, Homo sapiens
ttgggggaggtggga

SEQ ID NO: 1316572 - DNA, 15 bp, Homo sapiens
gttgggggaggtggg

SEQ ID NO: 1316573 - DNA, 15 bp, Homo sapiens
ggttgggggaggtgg

SEQ ID NO: 1316574 - DNA, 15 bp, Homo sapiens
gggttgggggaggtg

SEQ ID NO: 1316575 - DNA, 15 bp, Homo sapiens
ggggttgggggaggt

SEQ ID NO: 1316576 - DNA, 15 bp, Homo sapiens
gggggttgggggagg

SEQ ID NO: 1316577 - DNA, 15 bp, Homo sapiens
ggggggttgggggag

SEQ ID NO: 1316578 - DNA, 15 bp, Homo sapiens
gggggggttggggga

SEQ ID NO: 1316579 - DNA, 15 bp, Homo sapiens
ggggggggttggggg

SEQ ID NO: 1316580 - DNA, 15 bp, Homo sapiens
gggggggggttgggg

SEQ ID NO: 1316581 - DNA, 15 bp, Homo sapiens
cgggggggggttggg

SEQ ID NO: 1316582 - DNA, 15 bp, Homo sapiens
acgggggggggttgg

SEQ ID NO: 1316583 - DNA, 15 bp, Homo sapiens
aacgggggggggttg

SEQ ID NO: 1316584 - DNA, 15 bp, Homo sapiens
aaacgggggggggtt

SEQ ID NO: 1316585 - DNA, 15 bp, Homo sapiens
aaaacgggggggggt

SEQ ID NO: 1316586 - DNA, 15 bp, Homo sapiens
aaaaacggggggggg

SEQ ID NO: 1316587 - DNA, 15 bp, Homo sapiens
aaaaaacgggggggg

SEQ ID NO: 1316588 - DNA, 15 bp, Homo sapiens
aaaaaaacggggggg

SEQ ID NO: 1316589 - DNA, 15 bp, Homo sapiens
aaaaaaaacgggggg

SEQ ID NO: 1316590 - DNA, 15 bp, Homo sapiens
gaaaaaaaacggggg

SEQ ID NO: 1316591 - DNA, 15 bp, Homo sapiens
tgaaaaaaaacgggg

SEQ ID NO: 1316592 - DNA, 15 bp, Homo sapiens
atgaaaaaaaacggg

SEQ ID NO: 1316593 - DNA, 15 bp, Homo sapiens
tatgaaaaaaaacgg

SEQ ID NO: 1316594 - DNA, 15 bp, Homo sapiens
ctatgaaaaaaaacg

SEQ ID NO: 1316595 - DNA, 15 bp, Homo sapiens
ctctatgaaaaaaaa

SEQ ID NO: 1316596 - DNA, 15 bp, Homo sapiens
tctctatgaaaaaaa

SEQ ID NO: 1316597 - DNA, 15 bp, Homo sapiens
gtctctatgaaaaaa

SEQ ID NO: 1316598 - DNA, 15 bp, Homo sapiens
tgtctctatgaaaaa

SEQ ID NO: 1316599 - DNA, 15 bp, Homo sapiens
ctgtctctatgaaaa

SEQ ID NO: 1316600 - DNA, 15 bp, Homo sapiens
tctgtctctatgaaa

SEQ ID NO: 1316601 - DNA, 15 bp, Homo sapiens
ctctgtctctatgaa

SEQ ID NO: 1316602 - DNA, 15 bp, Homo sapiens
actctgtctctatga

SEQ ID NO: 1316603 - DNA, 15 bp, Homo sapiens
gactctgtctctatg

SEQ ID NO: 1316604 - DNA, 15 bp, Homo sapiens
agactctgtctctat

SEQ ID NO: 1316605 - DNA, 15 bp, Homo sapiens
gagactctgtctcta

SEQ ID NO: 1316606 - DNA, 15 bp, Homo sapiens
cgagactctgtctct

SEQ ID NO: 1316607 - DNA, 15 bp, Homo sapiens
tgcgagactctgtct

SEQ ID NO: 1316608 - DNA, 15 bp, Homo sapiens
tagtgcgagactctg

SEQ ID NO: 1316609 - DNA, 15 bp, Homo sapiens
atagtgcgagactct

SEQ ID NO: 1316610 - DNA, 15 bp, Homo sapiens
gatagtgcgagactc

SEQ ID NO: 1316611 - DNA, 15 bp, Homo sapiens
cgatagtgcgagact

SEQ ID NO: 1316612 - DNA, 15 bp, Homo sapiens
gcgatagtgcgagac

SEQ ID NO: 1316613 - DNA, 15 bp, Homo sapiens
ggcgatagtgcgaga

SEQ ID NO: 1316614 - DNA, 15 bp, Homo sapiens
gggcgatagtgcgag

SEQ ID NO: 1316615 - DNA, 15 bp, Homo sapiens
tgggcgatagtgcga

SEQ ID NO: 1316616 - DNA, 15 bp, Homo sapiens
ctgggcgatagtgcg

SEQ ID NO: 1316617 - DNA, 15 bp, Homo sapiens
cctgggcgatagtgc

SEQ ID NO: 1316618 - DNA, 15 bp, Homo sapiens
gcctgggcgatagtg

SEQ ID NO: 1316619 - DNA, 15 bp, Homo sapiens
agcctgggcgatagt

SEQ ID NO: 1316620 - DNA, 15 bp, Homo sapiens
cagcctgggcgatag

SEQ ID NO: 1316621 - DNA, 15 bp, Homo sapiens
ccagcctgggcgata

SEQ ID NO: 1316622 - DNA, 15 bp, Homo sapiens
cctgcactccagcct

SEQ ID NO: 1316623 - DNA, 15 bp, Homo sapiens
ccctgcactccagcc

SEQ ID NO: 1316624 - DNA, 15 bp, Homo sapiens
tccctgcactccagc

SEQ ID NO: 1316625 - DNA, 15 bp, Homo sapiens
gtccctgcactccag

SEQ ID NO: 1316626 - DNA, 15 bp, Homo sapiens
agtccctgcactcca

SEQ ID NO: 1316627 - DNA, 15 bp, Homo sapiens
gagtccctgcactcc

SEQ ID NO: 1316628 - DNA, 15 bp, Homo sapiens
tgagtccctgcactc

SEQ ID NO: 1316629 - DNA, 15 bp, Homo sapiens
ttgagtccctgcact

SEQ ID NO: 1316630 - DNA, 15 bp, Homo sapiens
attgagtccctgcac

SEQ ID NO: 1316631 - DNA, 15 bp, Homo sapiens
gattgagtccctgca

SEQ ID NO: 1316632 - DNA, 15 bp, Homo sapiens
tgattgagtccctgc

SEQ ID NO: 1316633 - DNA, 15 bp, Homo sapiens
atgattgagtccctg

SEQ ID NO: 1316634 - DNA, 15 bp, Homo sapiens
tatgattgagtccct

SEQ ID NO: 1316635 - DNA, 15 bp, Homo sapiens
ctatgattgagtccc

SEQ ID NO: 1316636 - DNA, 15 bp, Homo sapiens
gctatgattgagtcc

SEQ ID NO: 1316637 - DNA, 15 bp, Homo sapiens
agctatgattgagtc

SEQ ID NO: 1316638 - DNA, 15 bp, Homo sapiens
gagctatgattgagt

SEQ ID NO: 1316639 - DNA, 15 bp, Homo sapiens
tgagctatgattgag

SEQ ID NO: 1316640 - DNA, 15 bp, Homo sapiens
gtgagctatgattga

SEQ ID NO: 1316641 - DNA, 15 bp, Homo sapiens
tagtgagctatgatt

SEQ ID NO: 1316642 - DNA, 15 bp, Homo sapiens
atagtgagctatgat

SEQ ID NO: 1316643 - DNA, 15 bp, Homo sapiens
tatagtgagctatga

SEQ ID NO: 1316644 - DNA, 15 bp, Homo sapiens
ttatagtgagctatg

SEQ ID NO: 1316645 - DNA, 15 bp, Homo sapiens
gttatagtgagctat

SEQ ID NO: 1316646 - DNA, 15 bp, Homo sapiens
ggttatagtgagcta

SEQ ID NO: 1316647 - DNA, 15 bp, Homo sapiens
aggttatagtgagct

SEQ ID NO: 1316648 - DNA, 15 bp, Homo sapiens
aaggttatagtgagc

SEQ ID NO: 1316649 - DNA, 15 bp, Homo sapiens
caaggttatagtgag

SEQ ID NO: 1316650 - DNA, 15 bp, Homo sapiens
tcaaggttatagtga

SEQ ID NO: 1316651 - DNA, 15 bp, Homo sapiens
ttcaaggttatagtg

SEQ ID NO: 1316652 - DNA, 15 bp, Homo sapiens
gttcaaggttatagt

SEQ ID NO: 1316653 - DNA, 15 bp, Homo sapiens
agttcaaggttatag

SEQ ID NO: 1316654 - DNA, 15 bp, Homo sapiens
gagttcaaggttata

SEQ ID NO: 1316655 - DNA, 15 bp, Homo sapiens
ggagttcaaggttat

SEQ ID NO: 1316656 - DNA, 15 bp, Homo sapiens
ggtcttaaattctta

SEQ ID NO: 1316657 - DNA, 15 bp, Homo sapiens
aggtcttaaattctt

SEQ ID NO: 1316658 - DNA, 15 bp, Homo sapiens
aaggtcttaaattct

SEQ ID NO: 1316659 - DNA, 15 bp, Homo sapiens
gaaggtcttaaattc

SEQ ID NO: 1316660 - DNA, 15 bp, Homo sapiens
agaaggtcttaaatt

SEQ ID NO: 1316661 - DNA, 15 bp, Homo sapiens
tagaaggtcttaaat

SEQ ID NO: 1316662 - DNA, 15 bp, Homo sapiens
atagaaggtcttaaa

SEQ ID NO: 1316663 - DNA, 15 bp, Homo sapiens
catagaaggtcttaa

SEQ ID NO: 1316664 - DNA, 15 bp, Homo sapiens
acatagaaggtctta

SEQ ID NO: 1316665 - DNA, 15 bp, Homo sapiens
cacatagaaggtctt

SEQ ID NO: 1316666 - DNA, 15 bp, Homo sapiens
acacatagaaggtct

SEQ ID NO: 1316667 - DNA, 15 bp, Homo sapiens
gacacatagaaggtc

SEQ ID NO: 1316668 - DNA, 15 bp, Homo sapiens
tgacacatagaaggt

SEQ ID NO: 1316669 - DNA, 15 bp, Homo sapiens
ctgacacatagaagg

SEQ ID NO: 1316670 - DNA, 15 bp, Homo sapiens
actgacacatagaag

SEQ ID NO: 1316671 - DNA, 15 bp, Homo sapiens
gactgacacatagaa

SEQ ID NO: 1316672 - DNA, 15 bp, Homo sapiens
tgactgacacataga

SEQ ID NO: 1316673 - DNA, 15 bp, Homo sapiens
atgactgacacatag

SEQ ID NO: 1316674 - DNA, 15 bp, Homo sapiens
catgactgacacata

SEQ ID NO: 1316675 - DNA, 15 bp, Homo sapiens
acatgactgacacat

SEQ ID NO: 1316676 - DNA, 15 bp, Homo sapiens
tacatgactgacaca

SEQ ID NO: 1316677 - DNA, 15 bp, Homo sapiens
ctacatgactgacac

SEQ ID NO: 1316678 - DNA, 15 bp, Homo sapiens
gctacatgactgaca

SEQ ID NO: 1316679 - DNA, 15 bp, Homo sapiens
tgctacatgactgac

SEQ ID NO: 1316680 - DNA, 15 bp, Homo sapiens
gtgctacatgactga

SEQ ID NO: 1316681 - DNA, 15 bp, Homo sapiens
tgtgctacatgactg

SEQ ID NO: 1316682 - DNA, 15 bp, Homo sapiens
atgtgctacatgact

SEQ ID NO: 1316683 - DNA, 15 bp, Homo sapiens
tatgtgctacatgac

SEQ ID NO: 1316684 - DNA, 15 bp, Homo sapiens
ctatgtgctacatga

SEQ ID NO: 1316685 - DNA, 15 bp, Homo sapiens
actatgtgctacatg

SEQ ID NO: 1316686 - DNA, 15 bp, Homo sapiens
tactatgtgctacat

SEQ ID NO: 1316687 - DNA, 15 bp, Homo sapiens
gtactatgtgctaca

SEQ ID NO: 1316688 - DNA, 15 bp, Homo sapiens
tgtactatgtgctac

SEQ ID NO: 1316689 - DNA, 15 bp, Homo sapiens
atgtactatgtgcta

SEQ ID NO: 1316690 - DNA, 15 bp, Homo sapiens
tatgtactatgtgct

SEQ ID NO: 1316691 - DNA, 15 bp, Homo sapiens
gtatgtactatgtgc

SEQ ID NO: 1316692 - DNA, 15 bp, Homo sapiens
agtatgtactatgtg

SEQ ID NO: 1316693 - DNA, 15 bp, Homo sapiens
aagtatgtactatgt

SEQ ID NO: 1316694 - DNA, 15 bp, Homo sapiens
aaagtatgtactatg

SEQ ID NO: 1316695 - DNA, 15 bp, Homo sapiens
taaagtatgtactat

SEQ ID NO: 1316696 - DNA, 15 bp, Homo sapiens
ttaaagtatgtacta

SEQ ID NO: 1316697 - DNA, 15 bp, Homo sapiens
gttaaagtatgtact

SEQ ID NO: 1316698 - DNA, 15 bp, Homo sapiens
agttaaagtatgtac

SEQ ID NO: 1316699 - DNA, 15 bp, Homo sapiens
gagttaaagtatgta

SEQ ID NO: 1316700 - DNA, 15 bp, Homo sapiens
agagttaaagtatgt

SEQ ID NO: 1316701 - DNA, 15 bp, Homo sapiens
gagagttaaagtatg

SEQ ID NO: 1316702 - DNA, 15 bp, Homo sapiens
agagagttaaagtat

SEQ ID NO: 1316703 - DNA, 15 bp, Homo sapiens
aagagagttaaagta

SEQ ID NO: 1316704 - DNA, 15 bp, Homo sapiens
taagagagttaaagt

SEQ ID NO: 1316705 - DNA, 15 bp, Homo sapiens
ctaagagagttaaag

SEQ ID NO: 1316706 - DNA, 15 bp, Homo sapiens
tctaagagagttaaa

SEQ ID NO: 1316707 - DNA, 15 bp, Homo sapiens
ctctaagagagttaa

SEQ ID NO: 1316708 - DNA, 15 bp, Homo sapiens
cctctaagagagtta

SEQ ID NO: 1316709 - DNA, 15 bp, Homo sapiens
gcctctaagagagtt

SEQ ID NO: 1316710 - DNA, 15 bp, Homo sapiens
tgcctctaagagagt

SEQ ID NO: 1316711 - DNA, 15 bp, Homo sapiens
atgcctctaagagag

SEQ ID NO: 1316712 - DNA, 15 bp, Homo sapiens
aatgcctctaagaga

SEQ ID NO: 1316713 - DNA, 15 bp, Homo sapiens
caatgcctctaagag

SEQ ID NO: 1316714 - DNA, 15 bp, Homo sapiens
acaatgcctctaaga

SEQ ID NO: 1316715 - DNA, 15 bp, Homo sapiens
tacaatgcctctaag

SEQ ID NO: 1316716 - DNA, 15 bp, Homo sapiens
ttacaatgcctctaa

SEQ ID NO: 1316717 - DNA, 15 bp, Homo sapiens
cttacaatgcctcta

SEQ ID NO: 1316718 - DNA, 15 bp, Homo sapiens
gcttacaatgcctct

SEQ ID NO: 1316719 - DNA, 15 bp, Homo sapiens
agcttacaatgcctc

SEQ ID NO: 1316720 - DNA, 15 bp, Homo sapiens
tagcttacaatgcct

SEQ ID NO: 1316721 - DNA, 15 bp, Homo sapiens
ctagcttacaatgcc

SEQ ID NO: 1316722 - DNA, 15 bp, Homo sapiens
gctagcttacaatgc

SEQ ID NO: 1316723 - DNA, 15 bp, Homo sapiens
cgctagcttacaatg

SEQ ID NO: 1316724 - DNA, 15 bp, Homo sapiens
tcgctagcttacaat

SEQ ID NO: 1316725 - DNA, 15 bp, Homo sapiens
atcgctagcttacaa

SEQ ID NO: 1316726 - DNA, 15 bp, Homo sapiens
aatcgctagcttaca

SEQ ID NO: 1316727 - DNA, 15 bp, Homo sapiens
taatcgctagcttac

SEQ ID NO: 1316728 - DNA, 15 bp, Homo sapiens
ataatcgctagctta

SEQ ID NO: 1316729 - DNA, 15 bp, Homo sapiens
aataatcgctagctt

SEQ ID NO: 1316730 - DNA, 15 bp, Homo sapiens
gaataatcgctagct

SEQ ID NO: 1316731 - DNA, 15 bp, Homo sapiens
tgaataatcgctagc

SEQ ID NO: 1316732 - DNA, 15 bp, Homo sapiens
gtgaataatcgctag

SEQ ID NO: 1316733 - DNA, 15 bp, Homo sapiens
ggtgaataatcgcta

SEQ ID NO: 1316734 - DNA, 15 bp, Homo sapiens
gggtgaataatcgct

SEQ ID NO: 1316735 - DNA, 15 bp, Homo sapiens
tgggtgaataatcgc

SEQ ID NO: 1316736 - DNA, 15 bp, Homo sapiens
atgggtgaataatcg

SEQ ID NO: 1316737 - DNA, 15 bp, Homo sapiens
aatgggtgaataatc

SEQ ID NO: 1316738 - DNA, 15 bp, Homo sapiens
aaatgggtgaataat

SEQ ID NO: 1316739 - DNA, 15 bp, Homo sapiens
aaaatgggtgaataa

SEQ ID NO: 1316740 - DNA, 15 bp, Homo sapiens
taaaatgggtgaata

SEQ ID NO: 1316741 - DNA, 15 bp, Homo sapiens
gtaaaatgggtgaat

SEQ ID NO: 1316742 - DNA, 15 bp, Homo sapiens
tgtaaaatgggtgaa

SEQ ID NO: 1316743 - DNA, 15 bp, Homo sapiens
ctgtaaaatgggtga

SEQ ID NO: 1316744 - DNA, 15 bp, Homo sapiens
tctgtaaaatgggtg

SEQ ID NO: 1316745 - DNA, 15 bp, Homo sapiens
atctgtaaaatgggt

SEQ ID NO: 1316746 - DNA, 15 bp, Homo sapiens
tctcatctgtaaaat

SEQ ID NO: 1316747 - DNA, 15 bp, Homo sapiens
ttctcatctgtaaaa

SEQ ID NO: 1316748 - DNA, 15 bp, Homo sapiens
cttctcatctgtaaa

SEQ ID NO: 1316749 - DNA, 15 bp, Homo sapiens
acttctcatctgtaa

SEQ ID NO: 1316750 - DNA, 15 bp, Homo sapiens
cacttctcatctgta

SEQ ID NO: 1316751 - DNA, 15 bp, Homo sapiens
acacttctcatctgt

SEQ ID NO: 1316752 - DNA, 15 bp, Homo sapiens
cacacttctcatctg

SEQ ID NO: 1316753 - DNA, 15 bp, Homo sapiens
tcacacttctcatct

SEQ ID NO: 1316754 - DNA, 15 bp, Homo sapiens
ctcacacttctcatc

SEQ ID NO: 1316755 - DNA, 15 bp, Homo sapiens
cctcacacttctcat

SEQ ID NO: 1316756 - DNA, 15 bp, Homo sapiens
gcctcacacttctca

SEQ ID NO: 1316757 - DNA, 15 bp, Homo sapiens
agcctcacacttctc

SEQ ID NO: 1316758 - DNA, 15 bp, Homo sapiens
aagcctcacacttct

SEQ ID NO: 1316759 - DNA, 15 bp, Homo sapiens
taagcctcacacttc

SEQ ID NO: 1316760 - DNA, 15 bp, Homo sapiens
gtaagcctcacactt

SEQ ID NO: 1316761 - DNA, 15 bp, Homo sapiens
ggtaagcctcacact

SEQ ID NO: 1316762 - DNA, 15 bp, Homo sapiens
aggtaagcctcacac

SEQ ID NO: 1316763 - DNA, 15 bp, Homo sapiens
gcaggtaagcctcac

SEQ ID NO: 1316764 - DNA, 15 bp, Homo sapiens
tgcaggtaagcctca

SEQ ID NO: 1316765 - DNA, 15 bp, Homo sapiens
atgcaggtaagcctc

SEQ ID NO: 1316766 - DNA, 15 bp, Homo sapiens
aatgcaggtaagcct

SEQ ID NO: 1316767 - DNA, 15 bp, Homo sapiens
aaatgcaggtaagcc

SEQ ID NO: 1316768 - DNA, 15 bp, Homo sapiens
caaatgcaggtaagc

SEQ ID NO: 1316769 - DNA, 15 bp, Homo sapiens
gcaaatgcaggtaag

SEQ ID NO: 1316770 - DNA, 15 bp, Homo sapiens
tgcaaatgcaggtaa

SEQ ID NO: 1316771 - DNA, 15 bp, Homo sapiens
ttgcaaatgcaggta

SEQ ID NO: 1316772 - DNA, 15 bp, Homo sapiens
tttgcaaatgcaggt

SEQ ID NO: 1316773 - DNA, 15 bp, Homo sapiens
ctttgcaaatgcagg

SEQ ID NO: 1316774 - DNA, 15 bp, Homo sapiens
gctttgcaaatgcag

SEQ ID NO: 1316775 - DNA, 15 bp, Homo sapiens
ggctttgcaaatgca

SEQ ID NO: 1316776 - DNA, 15 bp, Homo sapiens
tggctttgcaaatgc

SEQ ID NO: 1316777 - DNA, 15 bp, Homo sapiens
ctggctttgcaaatg

SEQ ID NO: 1316778 - DNA, 15 bp, Homo sapiens
cctggctttgcaaat

SEQ ID NO: 1316779 - DNA, 15 bp, Homo sapiens
tcctggctttgcaaa

SEQ ID NO: 1316780 - DNA, 15 bp, Homo sapiens
gtcctggctttgcaa

SEQ ID NO: 1316781 - DNA, 15 bp, Homo sapiens
ggtcctggctttgca

SEQ ID NO: 1316782 - DNA, 15 bp, Homo sapiens
gggtcctggctttgc

SEQ ID NO: 1316783 - DNA, 15 bp, Homo sapiens
tgggtcctggctttg

SEQ ID NO: 1316784 - DNA, 15 bp, Homo sapiens
atgggtcctggcttt

SEQ ID NO: 1316785 - DNA, 15 bp, Homo sapiens
aatgggtcctggctt

SEQ ID NO: 1316786 - DNA, 15 bp, Homo sapiens
aaatgggtcctggct

SEQ ID NO: 1316787 - DNA, 15 bp, Homo sapiens
aaaatgggtcctggc

SEQ ID NO: 1316788 - DNA, 15 bp, Homo sapiens
taaaatgggtcctgg

SEQ ID NO: 1316789 - DNA, 15 bp, Homo sapiens
gtaaaatgggtcctg

SEQ ID NO: 1316790 - DNA, 15 bp, Homo sapiens
tgtaaaatgggtcct

SEQ ID NO: 1316791 - DNA, 15 bp, Homo sapiens
ctgtaaaatgggtcc

SEQ ID NO: 1316792 - DNA, 15 bp, Homo sapiens
tctgtaaaatgggtc

SEQ ID NO: 1316793 - DNA, 15 bp, Homo sapiens
actggctttgcaaat

SEQ ID NO: 1316794 - DNA, 15 bp, Homo sapiens
cactggctttgcaaa

SEQ ID NO: 1316795 - DNA, 15 bp, Homo sapiens
gcactggctttgcaa

SEQ ID NO: 1316796 - DNA, 15 bp, Homo sapiens
tgcactggctttgca

SEQ ID NO: 1316797 - DNA, 15 bp, Homo sapiens
atgcactggctttgc

SEQ ID NO: 1316798 - DNA, 15 bp, Homo sapiens
catgcactggctttg

SEQ ID NO: 1316799 - DNA, 15 bp, Homo sapiens
ccatgcactggcttt

SEQ ID NO: 1316800 - DNA, 15 bp, Homo sapiens
tccatgcactggctt

SEQ ID NO: 1316801 - DNA, 15 bp, Homo sapiens
ttccatgcactggct

SEQ ID NO: 1316802 - DNA, 15 bp, Homo sapiens
attccatgcactggc

SEQ ID NO: 1316803 - DNA, 15 bp, Homo sapiens
aattccatgcactgg

SEQ ID NO: 1316804 - DNA, 15 bp, Homo sapiens
aaattccatgcactg

SEQ ID NO: 1316805 - DNA, 15 bp, Homo sapiens
aaaattccatgcact

SEQ ID NO: 1316806 - DNA, 15 bp, Homo sapiens
aaaaattccatgcac

SEQ ID NO: 1316807 - DNA, 15 bp, Homo sapiens
aaaaaattccatgca

SEQ ID NO: 1316808 - DNA, 15 bp, Homo sapiens
caaaaaattccatgc

SEQ ID NO: 1316809 - DNA, 15 bp, Homo sapiens
acaaaaaattccatg

SEQ ID NO: 1316810 - DNA, 15 bp, Homo sapiens
cacaaaaaattccat

SEQ ID NO: 1316811 - DNA, 15 bp, Homo sapiens
acacaaaaaattcca

SEQ ID NO: 1316812 - DNA, 15 bp, Homo sapiens
tacacaaaaaattcc

SEQ ID NO: 1316813 - DNA, 15 bp, Homo sapiens
atacacaaaaaattc

SEQ ID NO: 1316814 - DNA, 15 bp, Homo sapiens
catacacaaaaaatt

SEQ ID NO: 1316815 - DNA, 15 bp, Homo sapiens
acatacacaaaaaat

SEQ ID NO: 1316816 - DNA, 15 bp, Homo sapiens
gacatacacaaaaaa

SEQ ID NO: 1316817 - DNA, 15 bp, Homo sapiens
ggacatacacaaaaa

SEQ ID NO: 1316818 - DNA, 15 bp, Homo sapiens
aggacatacacaaaa

SEQ ID NO: 1316819 - DNA, 15 bp, Homo sapiens
aaggacatacacaaa

SEQ ID NO: 1316820 - DNA, 15 bp, Homo sapiens
taaggacatacacaa

SEQ ID NO: 1316821 - DNA, 15 bp, Homo sapiens
ataaggacatacaca

SEQ ID NO: 1316822 - DNA, 15 bp, Homo sapiens
tataaggacatacac

SEQ ID NO: 1316823 - DNA, 15 bp, Homo sapiens
gtataaggacataca

SEQ ID NO: 1316824 - DNA, 15 bp, Homo sapiens
tgtataaggacatac

SEQ ID NO: 1316825 - DNA, 15 bp, Homo sapiens
atgtataaggacata

SEQ ID NO: 1316826 - DNA, 15 bp, Homo sapiens
aatgtataaggacat

SEQ ID NO: 1316827 - DNA, 15 bp, Homo sapiens
taatgtataaggaca

SEQ ID NO: 1316828 - DNA, 15 bp, Homo sapiens
ataatgtataaggac

SEQ ID NO: 1316829 - DNA, 15 bp, Homo sapiens
aataatgtataagga

SEQ ID NO: 1316830 - DNA, 15 bp, Homo sapiens
gaataatgtataagg

SEQ ID NO: 1316831 - DNA, 15 bp, Homo sapiens
agaataatgtataag

SEQ ID NO: 1316832 - DNA, 15 bp, Homo sapiens
cagaataatgtataa

SEQ ID NO: 1316833 - DNA, 15 bp, Homo sapiens
acagaataatgtata

SEQ ID NO: 1316834 - DNA, 15 bp, Homo sapiens
tacagaataatgtat

SEQ ID NO: 1316835 - DNA, 15 bp, Homo sapiens
ctacagaataatgta

SEQ ID NO: 1316836 - DNA, 15 bp, Homo sapiens
gctacagaataatgt

SEQ ID NO: 1316837 - DNA, 15 bp, Homo sapiens
cgctacagaataatg

SEQ ID NO: 1316838 - DNA, 15 bp, Homo sapiens
acgctacagaataat

SEQ ID NO: 1316839 - DNA, 15 bp, Homo sapiens
tacgctacagaataa

SEQ ID NO: 1316840 - DNA, 15 bp, Homo sapiens
gtacgctacagaata

SEQ ID NO: 1316841 - DNA, 15 bp, Homo sapiens
tgtacgctacagaat

SEQ ID NO: 1316842 - DNA, 15 bp, Homo sapiens
ctgtacgctacagaa

SEQ ID NO: 1316843 - DNA, 15 bp, Homo sapiens
actgtacgctacaga

SEQ ID NO: 1316844 - DNA, 15 bp, Homo sapiens
aactgtacgctacag

SEQ ID NO: 1316845 - DNA, 15 bp, Homo sapiens
gaactgtacgctaca

SEQ ID NO: 1316846 - DNA, 15 bp, Homo sapiens
agaactgtacgctac

SEQ ID NO: 1316847 - DNA, 15 bp, Homo sapiens
aagaactgtacgcta

SEQ ID NO: 1316848 - DNA, 15 bp, Homo sapiens
aaagaactgtacgct

SEQ ID NO: 1316849 - DNA, 15 bp, Homo sapiens
taaagaactgtacgc

SEQ ID NO: 1316850 - DNA, 15 bp, Homo sapiens
gtaaagaactgtacg

SEQ ID NO: 1316851 - DNA, 15 bp, Homo sapiens
ggtaaagaactgtac

SEQ ID NO: 1316852 - DNA, 15 bp, Homo sapiens
gggtaaagaactgta

SEQ ID NO: 1316853 - DNA, 15 bp, Homo sapiens
agggtaaagaactgt

SEQ ID NO: 1316854 - DNA, 15 bp, Homo sapiens
tagggtaaagaactg

SEQ ID NO: 1316855 - DNA, 15 bp, Homo sapiens
atagggtaaagaact

SEQ ID NO: 1316856 - DNA, 15 bp, Homo sapiens
tatagggtaaagaac

SEQ ID NO: 1316857 - DNA, 15 bp, Homo sapiens
ttatagggtaaagaa

SEQ ID NO: 1316858 - DNA, 15 bp, Homo sapiens
attatagggtaaaga

SEQ ID NO: 1316859 - DNA, 15 bp, Homo sapiens
aattatagggtaaag

SEQ ID NO: 1316860 - DNA, 15 bp, Homo sapiens
aaattatagggtaaa

SEQ ID NO: 1316861 - DNA, 15 bp, Homo sapiens
gaaattatagggtaa

SEQ ID NO: 1316862 - DNA, 15 bp, Homo sapiens
tgaaattatagggta

SEQ ID NO: 1316863 - DNA, 15 bp, Homo sapiens
atgaaattatagggt

SEQ ID NO: 1316864 - DNA, 15 bp, Homo sapiens
gatgaaattataggg

SEQ ID NO: 1316865 - DNA, 15 bp, Homo sapiens
agatgaaattatagg

SEQ ID NO: 1316866 - DNA, 15 bp, Homo sapiens
gagatgaaattatag

SEQ ID NO: 1316867 - DNA, 15 bp, Homo sapiens
tgagatgaaattata

SEQ ID NO: 1316868 - DNA, 15 bp, Homo sapiens
atgagatgaaattat

SEQ ID NO: 1316869 - DNA, 15 bp, Homo sapiens
aatgagatgaaatta

SEQ ID NO: 1316870 - DNA, 15 bp, Homo sapiens
taatgagatgaaatt

SEQ ID NO: 1316871 - DNA, 15 bp, Homo sapiens
ttaatgagatgaaat

SEQ ID NO: 1316872 - DNA, 15 bp, Homo sapiens
attaatgagatgaaa

SEQ ID NO: 1316873 - DNA, 15 bp, Homo sapiens
cattaatgagatgaa

SEQ ID NO: 1316874 - DNA, 15 bp, Homo sapiens
ccattaatgagatga

SEQ ID NO: 1316875 - DNA, 15 bp, Homo sapiens
cccattaatgagatg

SEQ ID NO: 1316876 - DNA, 15 bp, Homo sapiens
gcccattaatgagat

SEQ ID NO: 1316877 - DNA, 15 bp, Homo sapiens
tgcccattaatgaga

SEQ ID NO: 1316878 - DNA, 15 bp, Homo sapiens
ttgcccattaatgag

SEQ ID NO: 1316879 - DNA, 15 bp, Homo sapiens
cttgcccattaatga

SEQ ID NO: 1316880 - DNA, 15 bp, Homo sapiens
ccttgcccattaatg

SEQ ID NO: 1316881 - DNA, 15 bp, Homo sapiens
accttgcccattaat

SEQ ID NO: 1316882 - DNA, 15 bp, Homo sapiens
taccttgcccattaa

SEQ ID NO: 1316883 - DNA, 15 bp, Homo sapiens
ataccttgcccatta

SEQ ID NO: 1316884 - DNA, 15 bp, Homo sapiens
aataccttgcccatt

SEQ ID NO: 1316885 - DNA, 15 bp, Homo sapiens
aaataccttgcccat

SEQ ID NO: 1316886 - DNA, 15 bp, Homo sapiens
aaaataccttgccca

SEQ ID NO: 1316887 - DNA, 15 bp, Homo sapiens
caaaataccttgccc

SEQ ID NO: 1316888 - DNA, 15 bp, Homo sapiens
tcaaaataccttgcc

SEQ ID NO: 1316889 - DNA, 15 bp, Homo sapiens
atcaaaataccttgc

SEQ ID NO: 1316890 - DNA, 15 bp, Homo sapiens
tatcaaaataccttg

SEQ ID NO: 1316891 - DNA, 15 bp, Homo sapiens
ttatcaaaatacctt

SEQ ID NO: 1316892 - DNA, 15 bp, Homo sapiens
cttatcaaaatacct

SEQ ID NO: 1316893 - DNA, 15 bp, Homo sapiens
tcttatcaaaatacc

SEQ ID NO: 1316894 - DNA, 15 bp, Homo sapiens
ttcttatcaaaatac

SEQ ID NO: 1316895 - DNA, 15 bp, Homo sapiens
cttcttatcaaaata

SEQ ID NO: 1316896 - DNA, 15 bp, Homo sapiens
tcttcttatcaaaat

SEQ ID NO: 1316897 - DNA, 15 bp, Homo sapiens
gtcttcttatcaaaa

SEQ ID NO: 1316898 - DNA, 15 bp, Homo sapiens
agtcttcttatcaaa

SEQ ID NO: 1316899 - DNA, 15 bp, Homo sapiens
cagtcttcttatcaa

SEQ ID NO: 1316900 - DNA, 15 bp, Homo sapiens
acagtcttcttatca

SEQ ID NO: 1316901 - DNA, 15 bp, Homo sapiens
tacagtcttcttatc

SEQ ID NO: 1316902 - DNA, 15 bp, Homo sapiens
atacagtcttcttat

SEQ ID NO: 1316903 - DNA, 15 bp, Homo sapiens
aatacagtcttctta

SEQ ID NO: 1316904 - DNA, 15 bp, Homo sapiens
taatacagtcttctt

SEQ ID NO: 1316905 - DNA, 15 bp, Homo sapiens
ataatacagtcttct

SEQ ID NO: 1316906 - DNA, 15 bp, Homo sapiens
tataatacagtcttc

SEQ ID NO: 1316907 - DNA, 15 bp, Homo sapiens
atataatacagtctt

SEQ ID NO: 1316908 - DNA, 15 bp, Homo sapiens
aatataatacagtct

SEQ ID NO: 1316909 - DNA, 15 bp, Homo sapiens
gaatataatacagtc

SEQ ID NO: 1316910 - DNA, 15 bp, Homo sapiens
ggaatataatacagt

SEQ ID NO: 1316911 - DNA, 15 bp, Homo sapiens
tggaatataatacag

SEQ ID NO: 1316912 - DNA, 15 bp, Homo sapiens
atggaatataataca

SEQ ID NO: 1316913 - DNA, 15 bp, Homo sapiens
catggaatataatac

SEQ ID NO: 1316914 - DNA, 15 bp, Homo sapiens
ccatggaatataata

SEQ ID NO: 1316915 - DNA, 15 bp, Homo sapiens
cccatggaatataat

SEQ ID NO: 1316916 - DNA, 15 bp, Homo sapiens
ccccatggaatataa

SEQ ID NO: 1316917 - DNA, 15 bp, Homo sapiens
accccatggaatata

SEQ ID NO: 1316918 - DNA, 15 bp, Homo sapiens
gaccccatggaatat

SEQ ID NO: 1316919 - DNA, 15 bp, Homo sapiens
tgaccccatggaata

SEQ ID NO: 1316920 - DNA, 15 bp, Homo sapiens
ctgaccccatggaat

SEQ ID NO: 1316921 - DNA, 15 bp, Homo sapiens
gctgaccccatggaa

SEQ ID NO: 1316922 - DNA, 15 bp, Homo sapiens
agctgaccccatgga

SEQ ID NO: 1316923 - DNA, 15 bp, Homo sapiens
tagctgaccccatgg

SEQ ID NO: 1316924 - DNA, 15 bp, Homo sapiens
ctagctgaccccatg

SEQ ID NO: 1316925 - DNA, 15 bp, Homo sapiens
tctagctgaccccat

SEQ ID NO: 1316926 - DNA, 15 bp, Homo sapiens
ctctagctgacccca

SEQ ID NO: 1316927 - DNA, 15 bp, Homo sapiens
tctctagctgacccc

SEQ ID NO: 1316928 - DNA, 15 bp, Homo sapiens
ttctctagctgaccc

SEQ ID NO: 1316929 - DNA, 15 bp, Homo sapiens
tttctctagctgacc

SEQ ID NO: 1316930 - DNA, 15 bp, Homo sapiens
ttttctctagctgac

SEQ ID NO: 1316931 - DNA, 15 bp, Homo sapiens
attttctctagctga

SEQ ID NO: 1316932 - DNA, 15 bp, Homo sapiens
gattttctctagctg

SEQ ID NO: 1316933 - DNA, 15 bp, Homo sapiens
agattttctctagct

SEQ ID NO: 1316934 - DNA, 15 bp, Homo sapiens
cagattttctctagc

SEQ ID NO: 1316935 - DNA, 15 bp, Homo sapiens
acagattttctctag

SEQ ID NO: 1316936 - DNA, 15 bp, Homo sapiens
cacagattttctcta

SEQ ID NO: 1316937 - DNA, 15 bp, Homo sapiens
tcacagattttctct

SEQ ID NO: 1316938 - DNA, 15 bp, Homo sapiens
atcacagattttctc

SEQ ID NO: 1316939 - DNA, 15 bp, Homo sapiens
tatcacagattttct

SEQ ID NO: 1316940 - DNA, 15 bp, Homo sapiens
ttatcacagattttc

SEQ ID NO: 1316941 - DNA, 15 bp, Homo sapiens
gttatcacagatttt

SEQ ID NO: 1316942 - DNA, 15 bp, Homo sapiens
agttatcacagattt

SEQ ID NO: 1316943 - DNA, 15 bp, Homo sapiens
aagttatcacagatt

SEQ ID NO: 1316944 - DNA, 15 bp, Homo sapiens
aaagttatcacagat

SEQ ID NO: 1316945 - DNA, 15 bp, Homo sapiens
caaagttatcacaga

SEQ ID NO: 1316946 - DNA, 15 bp, Homo sapiens
acaaagttatcacag

SEQ ID NO: 1316947 - DNA, 15 bp, Homo sapiens
aacaaagttatcaca

SEQ ID NO: 1316948 - DNA, 15 bp, Homo sapiens
caacaaagttatcac

SEQ ID NO: 1316949 - DNA, 15 bp, Homo sapiens
tcaacaaagttatca

SEQ ID NO: 1316950 - DNA, 15 bp, Homo sapiens
ttcaacaaagttatc

SEQ ID NO: 1316951 - DNA, 15 bp, Homo sapiens
tttcaacaaagttat

SEQ ID NO: 1316952 - DNA, 15 bp, Homo sapiens
ttttcaacaaagtta

SEQ ID NO: 1316953 - DNA, 15 bp, Homo sapiens
attttcaacaaagtt

SEQ ID NO: 1316954 - DNA, 15 bp, Homo sapiens
cattttcaacaaagt

SEQ ID NO: 1316955 - DNA, 15 bp, Homo sapiens
tcattttcaacaaag

SEQ ID NO: 1316956 - DNA, 15 bp, Homo sapiens
ttcattttcaacaaa

SEQ ID NO: 1316957 - DNA, 15 bp, Homo sapiens
tttcattttcaacaa

SEQ ID NO: 1316958 - DNA, 15 bp, Homo sapiens
atttcattttcaaca

SEQ ID NO: 1316959 - DNA, 15 bp, Homo sapiens
tatttcattttcaac

SEQ ID NO: 1316960 - DNA, 15 bp, Homo sapiens
gtatttcattttcaa

SEQ ID NO: 1316961 - DNA, 15 bp, Homo sapiens
tgtatttcattttca

SEQ ID NO: 1316962 - DNA, 15 bp, Homo sapiens
gtgtatttcattttc

SEQ ID NO: 1316963 - DNA, 15 bp, Homo sapiens
agtgtatttcatttt

SEQ ID NO: 1316964 - DNA, 15 bp, Homo sapiens
aagtgtatttcattt

SEQ ID NO: 1316965 - DNA, 15 bp, Homo sapiens
aaagtgtatttcatt

SEQ ID NO: 1316966 - DNA, 15 bp, Homo sapiens
caaagtgtatttcat

SEQ ID NO: 1316967 - DNA, 15 bp, Homo sapiens
ccaaagtgtatttca

SEQ ID NO: 1316968 - DNA, 15 bp, Homo sapiens
tccaaagtgtatttc

SEQ ID NO: 1316969 - DNA, 15 bp, Homo sapiens
atccaaagtgtattt

SEQ ID NO: 1316970 - DNA, 15 bp, Homo sapiens
aatccaaagtgtatt

SEQ ID NO: 1316971 - DNA, 15 bp, Homo sapiens
aaatccaaagtgtat

SEQ ID NO: 1316972 - DNA, 15 bp, Homo sapiens
aaaatccaaagtgta

SEQ ID NO: 1316973 - DNA, 15 bp, Homo sapiens
aaaaatccaaagtgt

SEQ ID NO: 1316974 - DNA, 15 bp, Homo sapiens
aaaaaatccaaagtg

SEQ ID NO: 1316975 - DNA, 15 bp, Homo sapiens
aaaaaaatccaaagt

SEQ ID NO: 1316976 - DNA, 15 bp, Homo sapiens
aaaaaaaatccaaag

SEQ ID NO: 1316977 - DNA, 15 bp, Homo sapiens
aaaaaaaaatccaaa

SEQ ID NO: 1316978 - DNA, 15 bp, Homo sapiens
caaaaaaaaatccaa

SEQ ID NO: 1316979 - DNA, 15 bp, Homo sapiens
gcaaaaaaaaatcca

SEQ ID NO: 1316980 - DNA, 15 bp, Homo sapiens
tgcaaaaaaaaatcc

SEQ ID NO: 1316981 - DNA, 15 bp, Homo sapiens
ttgcaaaaaaaaatc

SEQ ID NO: 1316982 - DNA, 15 bp, Homo sapiens
cttgcaaaaaaaaat

SEQ ID NO: 1316983 - DNA, 15 bp, Homo sapiens
tcttgcaaaaaaaaa

SEQ ID NO: 1316984 - DNA, 15 bp, Homo sapiens
ttcttgcaaaaaaaa

SEQ ID NO: 1316985 - DNA, 15 bp, Homo sapiens
attcttgcaaaaaaa

SEQ ID NO: 1316986 - DNA, 15 bp, Homo sapiens
aattcttgcaaaaaa

SEQ ID NO: 1316987 - DNA, 15 bp, Homo sapiens
taattcttgcaaaaa

SEQ ID NO: 1316988 - DNA, 15 bp, Homo sapiens
ttaattcttgcaaaa

SEQ ID NO: 1316989 - DNA, 15 bp, Homo sapiens
tttaattcttgcaaa

SEQ ID NO: 1316990 - DNA, 15 bp, Homo sapiens
ttttaattcttgcaa

SEQ ID NO: 1316991 - DNA, 15 bp, Homo sapiens
tttttaattcttgca

SEQ ID NO: 1316992 - DNA, 15 bp, Homo sapiens
ttttttaattcttgc

SEQ ID NO: 1316993 - DNA, 15 bp, Homo sapiens
tttttttaattcttg

SEQ ID NO: 1316994 - DNA, 15 bp, Homo sapiens
ctttttttaattctt

SEQ ID NO: 1316995 - DNA, 15 bp, Homo sapiens
cctttttttaattct

SEQ ID NO: 1316996 - DNA, 15 bp, Homo sapiens
tcctttttttaattc

SEQ ID NO: 1316997 - DNA, 15 bp, Homo sapiens
ttcctttttttaatt

SEQ ID NO: 1316998 - DNA, 15 bp, Homo sapiens
gttcctttttttaat

SEQ ID NO: 1316999 - DNA, 15 bp, Homo sapiens
tgttcctttttttaa

SEQ ID NO: 1317000 - DNA, 15 bp, Homo sapiens
ttgttccttttttta

SEQ ID NO: 1317001 - DNA, 15 bp, Homo sapiens
attgttccttttttt

SEQ ID NO: 1317002 - DNA, 15 bp, Homo sapiens
tattgttcctttttt

SEQ ID NO: 1317003 - DNA, 15 bp, Homo sapiens
ttattgttccttttt

SEQ ID NO: 1317004 - DNA, 15 bp, Homo sapiens
gttattgttcctttt

SEQ ID NO: 1317005 - DNA, 15 bp, Homo sapiens
ggttattgttccttt

SEQ ID NO: 1317006 - DNA, 15 bp, Homo sapiens
gggttattgttcctt

SEQ ID NO: 1317007 - DNA, 15 bp, Homo sapiens
tgggttattgttcct

SEQ ID NO: 1317008 - DNA, 15 bp, Homo sapiens
gtgggttattgttcc

SEQ ID NO: 1317009 - DNA, 15 bp, Homo sapiens
tgtgggttattgttc

SEQ ID NO: 1317010 - DNA, 15 bp, Homo sapiens
atgtgggttattgtt

SEQ ID NO: 1317011 - DNA, 15 bp, Homo sapiens
catgtgggttattgt

SEQ ID NO: 1317012 - DNA, 15 bp, Homo sapiens
gcatgtgggttattg

SEQ ID NO: 1317013 - DNA, 15 bp, Homo sapiens
tgcatgtgggttatt

SEQ ID NO: 1317014 - DNA, 15 bp, Homo sapiens
atgcatgtgggttat

SEQ ID NO: 1317015 - DNA, 15 bp, Homo sapiens
aatgcatgtgggtta

SEQ ID NO: 1317016 - DNA, 15 bp, Homo sapiens
caatgcatgtgggtt

SEQ ID NO: 1317017 - DNA, 15 bp, Homo sapiens
tcaatgcatgtgggt

SEQ ID NO: 1317018 - DNA, 15 bp, Homo sapiens
ctcaatgcatgtggg

SEQ ID NO: 1317019 - DNA, 15 bp, Homo sapiens
gctcaatgcatgtgg

SEQ ID NO: 1317020 - DNA, 15 bp, Homo sapiens
ggctcaatgcatgtg

SEQ ID NO: 1317021 - DNA, 15 bp, Homo sapiens
aggctcaatgcatgt

SEQ ID NO: 1317022 - DNA, 15 bp, Homo sapiens
aaggctcaatgcatg

SEQ ID NO: 1317023 - DNA, 15 bp, Homo sapiens
gaaggctcaatgcat

SEQ ID NO: 1317024 - DNA, 15 bp, Homo sapiens
agaaggctcaatgca

SEQ ID NO: 1317025 - DNA, 15 bp, Homo sapiens
tagaaggctcaatgc

SEQ ID NO: 1317026 - DNA, 15 bp, Homo sapiens
atagaaggctcaatg

SEQ ID NO: 1317027 - DNA, 15 bp, Homo sapiens
tatagaaggctcaat

SEQ ID NO: 1317028 - DNA, 15 bp, Homo sapiens
gtatagaaggctcaa

SEQ ID NO: 1317029 - DNA, 15 bp, Homo sapiens
tgtatagaaggctca

SEQ ID NO: 1317030 - DNA, 15 bp, Homo sapiens
atgtatagaaggctc

SEQ ID NO: 1317031 - DNA, 15 bp, Homo sapiens
gatgtatagaaggct

SEQ ID NO: 1317032 - DNA, 15 bp, Homo sapiens
tgatgtatagaaggc

SEQ ID NO: 1317033 - DNA, 15 bp, Homo sapiens
atgatgtatagaagg

SEQ ID NO: 1317034 - DNA, 15 bp, Homo sapiens
gatgatgtatagaag

SEQ ID NO: 1317035 - DNA, 15 bp, Homo sapiens
agatgatgtatagaa

SEQ ID NO: 1317036 - DNA, 15 bp, Homo sapiens
gagatgatgtataga

SEQ ID NO: 1317037 - DNA, 15 bp, Homo sapiens
agagatgatgtatag

SEQ ID NO: 1317038 - DNA, 15 bp, Homo sapiens
gagagatgatgtata

SEQ ID NO: 1317039 - DNA, 15 bp, Homo sapiens
agagagatgatgtat

SEQ ID NO: 1317040 - DNA, 15 bp, Homo sapiens
aagagagatgatgta

SEQ ID NO: 1317041 - DNA, 15 bp, Homo sapiens
taagagagatgatgt

SEQ ID NO: 1317042 - DNA, 15 bp, Homo sapiens
ttaagagagatgatg

SEQ ID NO: 1317043 - DNA, 15 bp, Homo sapiens
attaagagagatgat

SEQ ID NO: 1317044 - DNA, 15 bp, Homo sapiens
aattaagagagatga

SEQ ID NO: 1317045 - DNA, 15 bp, Homo sapiens
gaattaagagagatg

SEQ ID NO: 1317046 - DNA, 15 bp, Homo sapiens
agaattaagagagat

SEQ ID NO: 1317047 - DNA, 15 bp, Homo sapiens
gagaattaagagaga

SEQ ID NO: 1317048 - DNA, 15 bp, Homo sapiens
agagaattaagagag

SEQ ID NO: 1317049 - DNA, 15 bp, Homo sapiens
tagagaattaagaga

SEQ ID NO: 1317050 - DNA, 15 bp, Homo sapiens
ttagagaattaagag

SEQ ID NO: 1317051 - DNA, 15 bp, Homo sapiens
tttagagaattaaga

SEQ ID NO: 1317052 - DNA, 15 bp, Homo sapiens
ctttagagaattaag

SEQ ID NO: 1317053 - DNA, 15 bp, Homo sapiens
tctttagagaattaa

SEQ ID NO: 1317054 - DNA, 15 bp, Homo sapiens
atctttagagaatta

SEQ ID NO: 1317055 - DNA, 15 bp, Homo sapiens
aatctttagagaatt

SEQ ID NO: 1317056 - DNA, 15 bp, Homo sapiens
taatctttagagaat

SEQ ID NO: 1317057 - DNA, 15 bp, Homo sapiens
ataatctttagagaa

SEQ ID NO: 1317058 - DNA, 15 bp, Homo sapiens
aataatctttagaga

SEQ ID NO: 1317059 - DNA, 15 bp, Homo sapiens
caataatctttagag

SEQ ID NO: 1317060 - DNA, 15 bp, Homo sapiens
acaataatctttaga

SEQ ID NO: 1317061 - DNA, 15 bp, Homo sapiens
aacaataatctttag

SEQ ID NO: 1317062 - DNA, 15 bp, Homo sapiens
taacaataatcttta

SEQ ID NO: 1317063 - DNA, 15 bp, Homo sapiens
gtaacaataatcttt

SEQ ID NO: 1317064 - DNA, 15 bp, Homo sapiens
ggtaacaataatctt

SEQ ID NO: 1317065 - DNA, 15 bp, Homo sapiens
tggtaacaataatct

SEQ ID NO: 1317066 - DNA, 15 bp, Homo sapiens
atggtaacaataatc

SEQ ID NO: 1317067 - DNA, 15 bp, Homo sapiens
aatggtaacaataat

SEQ ID NO: 1317068 - DNA, 15 bp, Homo sapiens
taatggtaacaataa

SEQ ID NO: 1317069 - DNA, 15 bp, Homo sapiens
ataatggtaacaata

SEQ ID NO: 1317070 - DNA, 15 bp, Homo sapiens
gataatggtaacaat

SEQ ID NO: 1317071 - DNA, 15 bp, Homo sapiens
ggataatggtaacaa

SEQ ID NO: 1317072 - DNA, 15 bp, Homo sapiens
tggataatggtaaca

SEQ ID NO: 1317073 - DNA, 15 bp, Homo sapiens
gtggataatggtaac

SEQ ID NO: 1317074 - DNA, 15 bp, Homo sapiens
ggtggataatggtaa

SEQ ID NO: 1317075 - DNA, 15 bp, Homo sapiens
aggtggataatggta

SEQ ID NO: 1317076 - DNA, 15 bp, Homo sapiens
gaggtggataatggt

SEQ ID NO: 1317077 - DNA, 15 bp, Homo sapiens
agaggtggataatgg

SEQ ID NO: 1317078 - DNA, 15 bp, Homo sapiens
aagaggtggataatg

SEQ ID NO: 1317079 - DNA, 15 bp, Homo sapiens
caagaggtggataat

SEQ ID NO: 1317080 - DNA, 15 bp, Homo sapiens
acaagaggtggataa

SEQ ID NO: 1317081 - DNA, 15 bp, Homo sapiens
tacaagaggtggata

SEQ ID NO: 1317082 - DNA, 15 bp, Homo sapiens
ctacaagaggtggat

SEQ ID NO: 1317083 - DNA, 15 bp, Homo sapiens
cctacaagaggtgga

SEQ ID NO: 1317084 - DNA, 15 bp, Homo sapiens
acctacaagaggtgg

SEQ ID NO: 1317085 - DNA, 15 bp, Homo sapiens
tacctacaagaggtg

SEQ ID NO: 1317086 - DNA, 15 bp, Homo sapiens
ttacctacaagaggt

SEQ ID NO: 1317087 - DNA, 15 bp, Homo sapiens
cttacctacaagagg

SEQ ID NO: 1317088 - DNA, 15 bp, Homo sapiens
tcttacctacaagag

SEQ ID NO: 1317089 - DNA, 15 bp, Homo sapiens
ttcttacctacaaga

SEQ ID NO: 1317090 - DNA, 15 bp, Homo sapiens
tttcttacctacaag

SEQ ID NO: 1317091 - DNA, 15 bp, Homo sapiens
ctttcttacctacaa

SEQ ID NO: 1317092 - DNA, 15 bp, Homo sapiens
actttcttacctaca

SEQ ID NO: 1317093 - DNA, 15 bp, Homo sapiens
aactttcttacctac

SEQ ID NO: 1317094 - DNA, 15 bp, Homo sapiens
caactttcttaccta

SEQ ID NO: 1317095 - DNA, 15 bp, Homo sapiens
tcaactttcttacct

SEQ ID NO: 1317096 - DNA, 15 bp, Homo sapiens
ctcaactttcttacc

SEQ ID NO: 1317097 - DNA, 15 bp, Homo sapiens
actcaactttcttac

SEQ ID NO: 1317098 - DNA, 15 bp, Homo sapiens
aactcaactttctta

SEQ ID NO: 1317099 - DNA, 15 bp, Homo sapiens
gaactcaactttctt

SEQ ID NO: 1317100 - DNA, 15 bp, Homo sapiens
agaactcaactttct

SEQ ID NO: 1317101 - DNA, 15 bp, Homo sapiens
tagaactcaactttc

SEQ ID NO: 1317102 - DNA, 15 bp, Homo sapiens
ctagaactcaacttt

SEQ ID NO: 1317103 - DNA, 15 bp, Homo sapiens
cctagaactcaactt

SEQ ID NO: 1317104 - DNA, 15 bp, Homo sapiens
ccctagaactcaact

SEQ ID NO: 1317105 - DNA, 15 bp, Homo sapiens
tccctagaactcaac

SEQ ID NO: 1317106 - DNA, 15 bp, Homo sapiens
atccctagaactcaa

SEQ ID NO: 1317107 - DNA, 15 bp, Homo sapiens
tatccctagaactca

SEQ ID NO: 1317108 - DNA, 15 bp, Homo sapiens
atatccctagaactc

SEQ ID NO: 1317109 - DNA, 15 bp, Homo sapiens
aatatccctagaact

SEQ ID NO: 1317110 - DNA, 15 bp, Homo sapiens
aaatatccctagaac

SEQ ID NO: 1317111 - DNA, 15 bp, Homo sapiens
taaatatccctagaa

SEQ ID NO: 1317112 - DNA, 15 bp, Homo sapiens
ctaaatatccctaga

SEQ ID NO: 1317113 - DNA, 15 bp, Homo sapiens
actaaatatccctag

SEQ ID NO: 1317114 - DNA, 15 bp, Homo sapiens
tactaaatatcccta

SEQ ID NO: 1317115 - DNA, 15 bp, Homo sapiens
ttactaaatatccct

SEQ ID NO: 1317116 - DNA, 15 bp, Homo sapiens
gttactaaatatccc

SEQ ID NO: 1317117 - DNA, 15 bp, Homo sapiens
agttactaaatatcc

SEQ ID NO: 1317118 - DNA, 15 bp, Homo sapiens
cagttactaaatatc

SEQ ID NO: 1317119 - DNA, 15 bp, Homo sapiens
ccagttactaaatat

SEQ ID NO: 1317120 - DNA, 15 bp, Homo sapiens
gccagttactaaata

SEQ ID NO: 1317121 - DNA, 15 bp, Homo sapiens
ggccagttactaaat

SEQ ID NO: 1317122 - DNA, 15 bp, Homo sapiens
gggccagttactaaa

SEQ ID NO: 1317123 - DNA, 15 bp, Homo sapiens
tgggccagttactaa

SEQ ID NO: 1317124 - DNA, 15 bp, Homo sapiens
ttgggccagttacta

SEQ ID NO: 1317125 - DNA, 15 bp, Homo sapiens
tttgggccagttact

SEQ ID NO: 1317126 - DNA, 15 bp, Homo sapiens
ctttgggccagttac

SEQ ID NO: 1317127 - DNA, 15 bp, Homo sapiens
actttgggccagtta

SEQ ID NO: 1317128 - DNA, 15 bp, Homo sapiens
gactttgggccagtt

SEQ ID NO: 1317129 - DNA, 15 bp, Homo sapiens
tgactttgggccagt

SEQ ID NO: 1317130 - DNA, 15 bp, Homo sapiens
ttgactttgggccag

SEQ ID NO: 1317131 - DNA, 15 bp, Homo sapiens
tttgactttgggcca

SEQ ID NO: 1317132 - DNA, 15 bp, Homo sapiens
gtttgactttgggcc

SEQ ID NO: 1317133 - DNA, 15 bp, Homo sapiens
tgtttgactttgggc

SEQ ID NO: 1317134 - DNA, 15 bp, Homo sapiens
ctgtttgactttggg

SEQ ID NO: 1317135 - DNA, 15 bp, Homo sapiens
gctgtttgactttgg

SEQ ID NO: 1317136 - DNA, 15 bp, Homo sapiens
agctgtttgactttg

SEQ ID NO: 1317137 - DNA, 15 bp, Homo sapiens
tagctgtttgacttt

SEQ ID NO: 1317138 - DNA, 15 bp, Homo sapiens
atagctgtttgactt

SEQ ID NO: 1317139 - DNA, 15 bp, Homo sapiens
aatagctgtttgact

SEQ ID NO: 1317140 - DNA, 15 bp, Homo sapiens
taatagctgtttgac

SEQ ID NO: 1317141 - DNA, 15 bp, Homo sapiens
ttaatagctgtttga

SEQ ID NO: 1317142 - DNA, 15 bp, Homo sapiens
cttaatagctgtttg

SEQ ID NO: 1317143 - DNA, 15 bp, Homo sapiens
acttaatagctgttt

SEQ ID NO: 1317144 - DNA, 15 bp, Homo sapiens
cacttaatagctgtt

SEQ ID NO: 1317145 - DNA, 15 bp, Homo sapiens
taccacttaatagct

SEQ ID NO: 1317146 - DNA, 15 bp, Homo sapiens
ctaccacttaatagc

SEQ ID NO: 1317147 - DNA, 15 bp, Homo sapiens
actaccacttaatag

SEQ ID NO: 1317148 - DNA, 15 bp, Homo sapiens
cactaccacttaata

SEQ ID NO: 1317149 - DNA, 15 bp, Homo sapiens
acactaccacttaat

SEQ ID NO: 1317150 - DNA, 15 bp, Homo sapiens
aacactaccacttaa

SEQ ID NO: 1317151 - DNA, 15 bp, Homo sapiens
caacactaccactta

SEQ ID NO: 1317152 - DNA, 15 bp, Homo sapiens
ccaacactaccactt

SEQ ID NO: 1317153 - DNA, 15 bp, Homo sapiens
tccaacactaccact

SEQ ID NO: 1317154 - DNA, 15 bp, Homo sapiens
ttccaacactaccac

SEQ ID NO: 1317155 - DNA, 15 bp, Homo sapiens
attccaacactacca

SEQ ID NO: 1317156 - DNA, 15 bp, Homo sapiens
aattccaacactacc

SEQ ID NO: 1317157 - DNA, 15 bp, Homo sapiens
aaattccaacactac

SEQ ID NO: 1317158 - DNA, 15 bp, Homo sapiens
caaattccaacacta

SEQ ID NO: 1317159 - DNA, 15 bp, Homo sapiens
ccaaattccaacact

SEQ ID NO: 1317160 - DNA, 15 bp, Homo sapiens
tccaaattccaacac

SEQ ID NO: 1317161 - DNA, 15 bp, Homo sapiens
gtccaaattccaaca

SEQ ID NO: 1317162 - DNA, 15 bp, Homo sapiens
ggtccaaattccaac

SEQ ID NO: 1317163 - DNA, 15 bp, Homo sapiens
gggtccaaattccaa

SEQ ID NO: 1317164 - DNA, 15 bp, Homo sapiens
tgggtccaaattcca

SEQ ID NO: 1317165 - DNA, 15 bp, Homo sapiens
ttgggtccaaattcc

SEQ ID NO: 1317166 - DNA, 15 bp, Homo sapiens
tttgggtccaaattc

SEQ ID NO: 1317167 - DNA, 15 bp, Homo sapiens
atttgggtccaaatt

SEQ ID NO: 1317168 - DNA, 15 bp, Homo sapiens
aatttgggtccaaat

SEQ ID NO: 1317169 - DNA, 15 bp, Homo sapiens
gaatttgggtccaaa

SEQ ID NO: 1317170 - DNA, 15 bp, Homo sapiens
agaatttgggtccaa

SEQ ID NO: 1317171 - DNA, 15 bp, Homo sapiens
cagaatttgggtcca

SEQ ID NO: 1317172 - DNA, 15 bp, Homo sapiens
tcagaatttgggtcc

SEQ ID NO: 1317173 - DNA, 15 bp, Homo sapiens
atcagaatttgggtc

SEQ ID NO: 1317174 - DNA, 15 bp, Homo sapiens
aatcagaatttgggt

SEQ ID NO: 1317175 - DNA, 15 bp, Homo sapiens
caatcagaatttggg

SEQ ID NO: 1317176 - DNA, 15 bp, Homo sapiens
gcaatcagaatttgg

SEQ ID NO: 1317177 - DNA, 15 bp, Homo sapiens
tgcaatcagaatttg

SEQ ID NO: 1317178 - DNA, 15 bp, Homo sapiens
ctgcaatcagaattt

SEQ ID NO: 1317179 - DNA, 15 bp, Homo sapiens
tctgcaatcagaatt

SEQ ID NO: 1317180 - DNA, 15 bp, Homo sapiens
ctctgcaatcagaat

SEQ ID NO: 1317181 - DNA, 15 bp, Homo sapiens
gctctgcaatcagaa

SEQ ID NO: 1317182 - DNA, 15 bp, Homo sapiens
ggctctgcaatcaga

SEQ ID NO: 1317183 - DNA, 15 bp, Homo sapiens
tggctctgcaatcag

SEQ ID NO: 1317184 - DNA, 15 bp, Homo sapiens
ctggctctgcaatca

SEQ ID NO: 1317185 - DNA, 15 bp, Homo sapiens
cctggctctgcaatc

SEQ ID NO: 1317186 - DNA, 15 bp, Homo sapiens
ccctggctctgcaat

SEQ ID NO: 1317187 - DNA, 15 bp, Homo sapiens
tgccctggctctgca

SEQ ID NO: 1317188 - DNA, 15 bp, Homo sapiens
atgccctggctctgc

SEQ ID NO: 1317189 - DNA, 15 bp, Homo sapiens
catgccctggctctg

SEQ ID NO: 1317190 - DNA, 15 bp, Homo sapiens
acatgccctggctct

SEQ ID NO: 1317191 - DNA, 15 bp, Homo sapiens
tacatgccctggctc

SEQ ID NO: 1317192 - DNA, 15 bp, Homo sapiens
ttacatgccctggct

SEQ ID NO: 1317193 - DNA, 15 bp, Homo sapiens
tttacatgccctggc

SEQ ID NO: 1317194 - DNA, 15 bp, Homo sapiens
ttttacatgccctgg

SEQ ID NO: 1317195 - DNA, 15 bp, Homo sapiens
tttttacatgccctg

SEQ ID NO: 1317196 - DNA, 15 bp, Homo sapiens
gtttttacatgccct

SEQ ID NO: 1317197 - DNA, 15 bp, Homo sapiens
agtttttacatgccc

SEQ ID NO: 1317198 - DNA, 15 bp, Homo sapiens
cagtttttacatgcc

SEQ ID NO: 1317199 - DNA, 15 bp, Homo sapiens
gcagtttttacatgc

SEQ ID NO: 1317200 - DNA, 15 bp, Homo sapiens
ggcagtttttacatg

SEQ ID NO: 1317201 - DNA, 15 bp, Homo sapiens
aggcagtttttacat

SEQ ID NO: 1317202 - DNA, 15 bp, Homo sapiens
aaggcagtttttaca

SEQ ID NO: 1317203 - DNA, 15 bp, Homo sapiens
caaggcagtttttac

SEQ ID NO: 1317204 - DNA, 15 bp, Homo sapiens
gcaaggcagttttta

SEQ ID NO: 1317205 - DNA, 15 bp, Homo sapiens
tgcaaggcagttttt

SEQ ID NO: 1317206 - DNA, 15 bp, Homo sapiens
ctgcaaggcagtttt

SEQ ID NO: 1317207 - DNA, 15 bp, Homo sapiens
cctgcaaggcagttt

SEQ ID NO: 1317208 - DNA, 15 bp, Homo sapiens
tcctgcaaggcagtt

SEQ ID NO: 1317209 - DNA, 15 bp, Homo sapiens
ttcctgcaaggcagt

SEQ ID NO: 1317210 - DNA, 15 bp, Homo sapiens
tttcctgcaaggcag

SEQ ID NO: 1317211 - DNA, 15 bp, Homo sapiens
ctttcctgcaaggca

SEQ ID NO: 1317212 - DNA, 15 bp, Homo sapiens
cctttcctgcaaggc

SEQ ID NO: 1317213 - DNA, 15 bp, Homo sapiens
tcctttcctgcaagg

SEQ ID NO: 1317214 - DNA, 15 bp, Homo sapiens
ctcctttcctgcaag

SEQ ID NO: 1317215 - DNA, 15 bp, Homo sapiens
cctcctttcctgcaa

SEQ ID NO: 1317216 - DNA, 15 bp, Homo sapiens
acctcctttcctgca

SEQ ID NO: 1317217 - DNA, 15 bp, Homo sapiens
aacctcctttcctgc

SEQ ID NO: 1317218 - DNA, 15 bp, Homo sapiens
taacctcctttcctg

SEQ ID NO: 1317219 - DNA, 15 bp, Homo sapiens
ttaacctcctttcct

SEQ ID NO: 1317220 - DNA, 15 bp, Homo sapiens
tttaacctcctttcc

SEQ ID NO: 1317221 - DNA, 15 bp, Homo sapiens
ttttaacctcctttc

SEQ ID NO: 1317222 - DNA, 15 bp, Homo sapiens
tttttaacctccttt

SEQ ID NO: 1317223 - DNA, 15 bp, Homo sapiens
ttttttaacctcctt

SEQ ID NO: 1317224 - DNA, 15 bp, Homo sapiens
tttttttaacctcct

SEQ ID NO: 1317225 - DNA, 15 bp, Homo sapiens
atttttttaacctcc

SEQ ID NO: 1317226 - DNA, 15 bp, Homo sapiens
catttttttaacctc

SEQ ID NO: 1317227 - DNA, 15 bp, Homo sapiens
acatttttttaacct

SEQ ID NO: 1317228 - DNA, 15 bp, Homo sapiens
cacatttttttaacc

SEQ ID NO: 1317229 - DNA, 15 bp, Homo sapiens
gcacatttttttaac

SEQ ID NO: 1317230 - DNA, 15 bp, Homo sapiens
tgcacatttttttaa

SEQ ID NO: 1317231 - DNA, 15 bp, Homo sapiens
ttgcacattttttta

SEQ ID NO: 1317232 - DNA, 15 bp, Homo sapiens
tttgcacattttttt

SEQ ID NO: 1317233 - DNA, 15 bp, Homo sapiens
ttttgcacatttttt

SEQ ID NO: 1317234 - DNA, 15 bp, Homo sapiens
attttgcacattttt

SEQ ID NO: 1317235 - DNA, 15 bp, Homo sapiens
aattttgcacatttt

SEQ ID NO: 1317236 - DNA, 15 bp, Homo sapiens
aaattttgcacattt

SEQ ID NO: 1317237 - DNA, 15 bp, Homo sapiens
taaattttgcacatt

SEQ ID NO: 1317238 - DNA, 15 bp, Homo sapiens
ataaattttgcacat

SEQ ID NO: 1317239 - DNA, 15 bp, Homo sapiens
tataaattttgcaca

SEQ ID NO: 1317240 - DNA, 15 bp, Homo sapiens
ttataaattttgcac

SEQ ID NO: 1317241 - DNA, 15 bp, Homo sapiens
attataaattttgca

SEQ ID NO: 1317242 - DNA, 15 bp, Homo sapiens
gattataaattttgc

SEQ ID NO: 1317243 - DNA, 15 bp, Homo sapiens
ggattataaattttg

SEQ ID NO: 1317244 - DNA, 15 bp, Homo sapiens
aggattataaatttt

SEQ ID NO: 1317245 - DNA, 15 bp, Homo sapiens
caggattataaattt

SEQ ID NO: 1317246 - DNA, 15 bp, Homo sapiens
gcaggattataaatt

SEQ ID NO: 1317247 - DNA, 15 bp, Homo sapiens
ggcaggattataaat

SEQ ID NO: 1317248 - DNA, 15 bp, Homo sapiens
aggcaggattataaa

SEQ ID NO: 1317249 - DNA, 15 bp, Homo sapiens
aaggcaggattataa

SEQ ID NO: 1317250 - DNA, 15 bp, Homo sapiens
aaaggcaggattata

SEQ ID NO: 1317251 - DNA, 15 bp, Homo sapiens
gaaaggcaggattat

SEQ ID NO: 1317252 - DNA, 15 bp, Homo sapiens
agaaaggcaggatta

SEQ ID NO: 1317253 - DNA, 15 bp, Homo sapiens
tagaaaggcaggatt

SEQ ID NO: 1317254 - DNA, 15 bp, Homo sapiens
ttagaaaggcaggat

SEQ ID NO: 1317255 - DNA, 15 bp, Homo sapiens
tttagaaaggcagga

SEQ ID NO: 1317256 - DNA, 15 bp, Homo sapiens
ttttagaaaggcagg

SEQ ID NO: 1317257 - DNA, 15 bp, Homo sapiens
gttttagaaaggcag

SEQ ID NO: 1317258 - DNA, 15 bp, Homo sapiens
tgttttagaaaggca

SEQ ID NO: 1317259 - DNA, 15 bp, Homo sapiens
atgttttagaaaggc

SEQ ID NO: 1317260 - DNA, 15 bp, Homo sapiens
gatgttttagaaagg

SEQ ID NO: 1317261 - DNA, 15 bp, Homo sapiens
tgatgttttagaaag

SEQ ID NO: 1317262 - DNA, 15 bp, Homo sapiens
atgatgttttagaaa

SEQ ID NO: 1317263 - DNA, 15 bp, Homo sapiens
tatgatgttttagaa

SEQ ID NO: 1317264 - DNA, 15 bp, Homo sapiens
gtatgatgttttaga

SEQ ID NO: 1317265 - DNA, 15 bp, Homo sapiens
agtatgatgttttag

SEQ ID NO: 1317266 - DNA, 15 bp, Homo sapiens
cagtatgatgtttta

SEQ ID NO: 1317267 - DNA, 15 bp, Homo sapiens
tcagtatgatgtttt

SEQ ID NO: 1317268 - DNA, 15 bp, Homo sapiens
ttcagtatgatgttt

SEQ ID NO: 1317269 - DNA, 15 bp, Homo sapiens
attcagtatgatgtt

SEQ ID NO: 1317270 - DNA, 15 bp, Homo sapiens
aattcagtatgatgt

SEQ ID NO: 1317271 - DNA, 15 bp, Homo sapiens
caattcagtatgatg

SEQ ID NO: 1317272 - DNA, 15 bp, Homo sapiens
ccaattcagtatgat

SEQ ID NO: 1317273 - DNA, 15 bp, Homo sapiens
gccaattcagtatga

SEQ ID NO: 1317274 - DNA, 15 bp, Homo sapiens
agccaattcagtatg

SEQ ID NO: 1317275 - DNA, 15 bp, Homo sapiens
aagccaattcagtat

SEQ ID NO: 1317276 - DNA, 15 bp, Homo sapiens
aaagccaattcagta

SEQ ID NO: 1317277 - DNA, 15 bp, Homo sapiens
caaagccaattcagt

SEQ ID NO: 1317278 - DNA, 15 bp, Homo sapiens
tcaaagccaattcag

SEQ ID NO: 1317279 - DNA, 15 bp, Homo sapiens
ttcaaagccaattca

SEQ ID NO: 1317280 - DNA, 15 bp, Homo sapiens
tttcaaagccaattc

SEQ ID NO: 1317281 - DNA, 15 bp, Homo sapiens
ctttcaaagccaatt

SEQ ID NO: 1317282 - DNA, 15 bp, Homo sapiens
tctttcaaagccaat

SEQ ID NO: 1317283 - DNA, 15 bp, Homo sapiens
atctttcaaagccaa

SEQ ID NO: 1317284 - DNA, 15 bp, Homo sapiens
tatctttcaaagcca

SEQ ID NO: 1317285 - DNA, 15 bp, Homo sapiens
ttatctttcaaagcc

SEQ ID NO: 1317286 - DNA, 15 bp, Homo sapiens
tttatctttcaaagc

SEQ ID NO: 1317287 - DNA, 15 bp, Homo sapiens
atttatctttcaaag

SEQ ID NO: 1317288 - DNA, 15 bp, Homo sapiens
aatttatctttcaaa

SEQ ID NO: 1317289 - DNA, 15 bp, Homo sapiens
gaatttatctttcaa

SEQ ID NO: 1317290 - DNA, 15 bp, Homo sapiens
tgaatttatctttca

SEQ ID NO: 1317291 - DNA, 15 bp, Homo sapiens
atgaatttatctttc

SEQ ID NO: 1317292 - DNA, 15 bp, Homo sapiens
gatgaatttatcttt

SEQ ID NO: 1317293 - DNA, 15 bp, Homo sapiens
agatgaatttatctt

SEQ ID NO: 1317294 - DNA, 15 bp, Homo sapiens
tagatgaatttatct

SEQ ID NO: 1317295 - DNA, 15 bp, Homo sapiens
ttagatgaatttatc

SEQ ID NO: 1317296 - DNA, 15 bp, Homo sapiens
tttagatgaatttat

SEQ ID NO: 1317297 - DNA, 15 bp, Homo sapiens
gtttagatgaattta

SEQ ID NO: 1317298 - DNA, 15 bp, Homo sapiens
agtttagatgaattt

SEQ ID NO: 1317299 - DNA, 15 bp, Homo sapiens
cagtttagatgaatt

SEQ ID NO: 1317300 - DNA, 15 bp, Homo sapiens
acagtttagatgaat

SEQ ID NO: 1317301 - DNA, 15 bp, Homo sapiens
tacagtttagatgaa

SEQ ID NO: 1317302 - DNA, 15 bp, Homo sapiens
atacagtttagatga

SEQ ID NO: 1317303 - DNA, 15 bp, Homo sapiens
catacagtttagatg

SEQ ID NO: 1317304 - DNA, 15 bp, Homo sapiens
tcatacagtttagat

SEQ ID NO: 1317305 - DNA, 15 bp, Homo sapiens
ctcatacagtttaga

SEQ ID NO: 1317306 - DNA, 15 bp, Homo sapiens
gctcatacagtttag

SEQ ID NO: 1317307 - DNA, 15 bp, Homo sapiens
agctcatacagttta

SEQ ID NO: 1317308 - DNA, 15 bp, Homo sapiens
gagctcatacagttt

SEQ ID NO: 1317309 - DNA, 15 bp, Homo sapiens
agagctcatacagtt

SEQ ID NO: 1317310 - DNA, 15 bp, Homo sapiens
tagagctcatacagt

SEQ ID NO: 1317311 - DNA, 15 bp, Homo sapiens
ttagagctcatacag

SEQ ID NO: 1317312 - DNA, 15 bp, Homo sapiens
gttagagctcataca

SEQ ID NO: 1317313 - DNA, 15 bp, Homo sapiens
tgttagagctcatac

SEQ ID NO: 1317314 - DNA, 15 bp, Homo sapiens
gtgttagagctcata

SEQ ID NO: 1317315 - DNA, 15 bp, Homo sapiens
agtgttagagctcat

SEQ ID NO: 1317316 - DNA, 15 bp, Homo sapiens
aagtgttagagctca

SEQ ID NO: 1317317 - DNA, 15 bp, Homo sapiens
gaagtgttagagctc

SEQ ID NO: 1317318 - DNA, 15 bp, Homo sapiens
tgaagtgttagagct

SEQ ID NO: 1317319 - DNA, 15 bp, Homo sapiens
gtgaagtgttagagc

SEQ ID NO: 1317320 - DNA, 15 bp, Homo sapiens
ggtgaagtgttagag

SEQ ID NO: 1317321 - DNA, 15 bp, Homo sapiens
gggtgaagtgttaga

SEQ ID NO: 1317322 - DNA, 15 bp, Homo sapiens
agggtgaagtgttag

SEQ ID NO: 1317323 - DNA, 15 bp, Homo sapiens
gagggtgaagtgtta

SEQ ID NO: 1317324 - DNA, 15 bp, Homo sapiens
cgagggtgaagtgtt

SEQ ID NO: 1317325 - DNA, 15 bp, Homo sapiens
acgagggtgaagtgt

SEQ ID NO: 1317326 - DNA, 15 bp, Homo sapiens
cacgagggtgaagtg

SEQ ID NO: 1317327 - DNA, 15 bp, Homo sapiens
tcacgagggtgaagt

SEQ ID NO: 1317328 - DNA, 15 bp, Homo sapiens
atcacgagggtgaag

SEQ ID NO: 1317329 - DNA, 15 bp, Homo sapiens
aatcacgagggtgaa

SEQ ID NO: 1317330 - DNA, 15 bp, Homo sapiens
caatcacgagggtga

SEQ ID NO: 1317331 - DNA, 15 bp, Homo sapiens
gcaatcacgagggtg

SEQ ID NO: 1317332 - DNA, 15 bp, Homo sapiens
tgcaatcacgagggt

SEQ ID NO: 1317333 - DNA, 15 bp, Homo sapiens
atgcaatcacgaggg

SEQ ID NO: 1317334 - DNA, 15 bp, Homo sapiens
catgcaatcacgagg

SEQ ID NO: 1317335 - DNA, 15 bp, Homo sapiens
tcatgcaatcacgag

SEQ ID NO: 1317336 - DNA, 15 bp, Homo sapiens
ttcatgcaatcacga

SEQ ID NO: 1317337 - DNA, 15 bp, Homo sapiens
cttcatgcaatcacg

SEQ ID NO: 1317338 - DNA, 15 bp, Homo sapiens
acttcatgcaatcac

SEQ ID NO: 1317339 - DNA, 15 bp, Homo sapiens
gacttcatgcaatca

SEQ ID NO: 1317340 - DNA, 15 bp, Homo sapiens
tgacttcatgcaatc

SEQ ID NO: 1317341 - DNA, 15 bp, Homo sapiens
ctgacttcatgcaat

SEQ ID NO: 1317342 - DNA, 15 bp, Homo sapiens
tctgacttcatgcaa

SEQ ID NO: 1317343 - DNA, 15 bp, Homo sapiens
ctctgacttcatgca

SEQ ID NO: 1317344 - DNA, 15 bp, Homo sapiens
cctctgacttcatgc

SEQ ID NO: 1317345 - DNA, 15 bp, Homo sapiens
ccctctgacttcatg

SEQ ID NO: 1317346 - DNA, 15 bp, Homo sapiens
gccctctgacttcat

SEQ ID NO: 1317347 - DNA, 15 bp, Homo sapiens
agccctctgacttca

SEQ ID NO: 1317348 - DNA, 15 bp, Homo sapiens
aagccctctgacttc

SEQ ID NO: 1317349 - DNA, 15 bp, Homo sapiens
caagccctctgactt

SEQ ID NO: 1317350 - DNA, 15 bp, Homo sapiens
acaagccctctgact

SEQ ID NO: 1317351 - DNA, 15 bp, Homo sapiens
aacaagccctctgac

SEQ ID NO: 1317352 - DNA, 15 bp, Homo sapiens
taacaagccctctga

SEQ ID NO: 1317353 - DNA, 15 bp, Homo sapiens
ataacaagccctctg

SEQ ID NO: 1317354 - DNA, 15 bp, Homo sapiens
tataacaagccctct

SEQ ID NO: 1317355 - DNA, 15 bp, Homo sapiens
gtataacaagccctc

SEQ ID NO: 1317356 - DNA, 15 bp, Homo sapiens
ggtataacaagccct

SEQ ID NO: 1317357 - DNA, 15 bp, Homo sapiens
gggtataacaagccc

SEQ ID NO: 1317358 - DNA, 15 bp, Homo sapiens
tgggtataacaagcc

SEQ ID NO: 1317359 - DNA, 15 bp, Homo sapiens
atgggtataacaagc

SEQ ID NO: 1317360 - DNA, 15 bp, Homo sapiens
catgggtataacaag

SEQ ID NO: 1317361 - DNA, 15 bp, Homo sapiens
acatgggtataacaa

SEQ ID NO: 1317362 - DNA, 15 bp, Homo sapiens
cacatgggtataaca

SEQ ID NO: 1317363 - DNA, 15 bp, Homo sapiens
tcacatgggtataac

SEQ ID NO: 1317364 - DNA, 15 bp, Homo sapiens
ttcacatgggtataa

SEQ ID NO: 1317365 - DNA, 15 bp, Homo sapiens
cttcacatgggtata

SEQ ID NO: 1317366 - DNA, 15 bp, Homo sapiens
tcttcacatgggtat

SEQ ID NO: 1317367 - DNA, 15 bp, Homo sapiens
ctcttcacatgggta

SEQ ID NO: 1317368 - DNA, 15 bp, Homo sapiens
actcttcacatgggt

SEQ ID NO: 1317369 - DNA, 15 bp, Homo sapiens
aactcttcacatggg

SEQ ID NO: 1317370 - DNA, 15 bp, Homo sapiens
caactcttcacatgg

SEQ ID NO: 1317371 - DNA, 15 bp, Homo sapiens
ccaactcttcacatg

SEQ ID NO: 1317372 - DNA, 15 bp, Homo sapiens
gccaactcttcacat

SEQ ID NO: 1317373 - DNA, 15 bp, Homo sapiens
cgccaactcttcaca

SEQ ID NO: 1317374 - DNA, 15 bp, Homo sapiens
ccgccaactcttcac

SEQ ID NO: 1317375 - DNA, 15 bp, Homo sapiens
tccgccaactcttca

SEQ ID NO: 1317376 - DNA, 15 bp, Homo sapiens
ctccgccaactcttc

SEQ ID NO: 1317377 - DNA, 15 bp, Homo sapiens
cctccgccaactctt

SEQ ID NO: 1317378 - DNA, 15 bp, Homo sapiens
ccctccgccaactct

SEQ ID NO: 1317379 - DNA, 15 bp, Homo sapiens
cccctccgccaactc

SEQ ID NO: 1317380 - DNA, 15 bp, Homo sapiens
acccctccgccaact

SEQ ID NO: 1317381 - DNA, 15 bp, Homo sapiens
gacccctccgccaac

SEQ ID NO: 1317382 - DNA, 15 bp, Homo sapiens
tgacccctccgccaa

SEQ ID NO: 1317383 - DNA, 15 bp, Homo sapiens
atgacccctccgcca

SEQ ID NO: 1317384 - DNA, 15 bp, Homo sapiens
aatgacccctccgcc

SEQ ID NO: 1317385 - DNA, 15 bp, Homo sapiens
taatgacccctccgc

SEQ ID NO: 1317386 - DNA, 15 bp, Homo sapiens
ctaatgacccctccg

SEQ ID NO: 1317387 - DNA, 15 bp, Homo sapiens
cctaatgacccctcc

SEQ ID NO: 1317388 - DNA, 15 bp, Homo sapiens
tcctaatgacccctc

SEQ ID NO: 1317389 - DNA, 15 bp, Homo sapiens
ctcctaatgacccct

SEQ ID NO: 1317390 - DNA, 15 bp, Homo sapiens
cctcctaatgacccc

SEQ ID NO: 1317391 - DNA, 15 bp, Homo sapiens
acctcctaatgaccc

SEQ ID NO: 1317392 - DNA, 15 bp, Homo sapiens
cacctcctaatgacc

SEQ ID NO: 1317393 - DNA, 15 bp, Homo sapiens
gcacctcctaatgac

SEQ ID NO: 1317394 - DNA, 15 bp, Homo sapiens
agcacctcctaatga

SEQ ID NO: 1317395 - DNA, 15 bp, Homo sapiens
aagcacctcctaatg

SEQ ID NO: 1317396 - DNA, 15 bp, Homo sapiens
taagcacctcctaat

SEQ ID NO: 1317397 - DNA, 15 bp, Homo sapiens
ataagcacctcctaa

SEQ ID NO: 1317398 - DNA, 15 bp, Homo sapiens
cataagcacctccta

SEQ ID NO: 1317399 - DNA, 15 bp, Homo sapiens
ccataagcacctcct

SEQ ID NO: 1317400 - DNA, 15 bp, Homo sapiens
tccataagcacctcc

SEQ ID NO: 1317401 - DNA, 15 bp, Homo sapiens
ctccataagcacctc

SEQ ID NO: 1317402 - DNA, 15 bp, Homo sapiens
tctccataagcacct

SEQ ID NO: 1317403 - DNA, 15 bp, Homo sapiens
ctctccataagcacc

SEQ ID NO: 1317404 - DNA, 15 bp, Homo sapiens
gctctccataagcac

SEQ ID NO: 1317405 - DNA, 15 bp, Homo sapiens
ggctctccataagca

SEQ ID NO: 1317406 - DNA, 15 bp, Homo sapiens
cggctctccataagc

SEQ ID NO: 1317407 - DNA, 15 bp, Homo sapiens
gcggctctccataag

SEQ ID NO: 1317408 - DNA, 15 bp, Homo sapiens
agcggctctccataa

SEQ ID NO: 1317409 - DNA, 15 bp, Homo sapiens
cagcggctctccata

SEQ ID NO: 1317410 - DNA, 15 bp, Homo sapiens
gcagcggctctccat

SEQ ID NO: 1317411 - DNA, 15 bp, Homo sapiens
agcagcggctctcca

SEQ ID NO: 1317412 - DNA, 15 bp, Homo sapiens
gagcagcggctctcc

SEQ ID NO: 1317413 - DNA, 15 bp, Homo sapiens
tgagcagcggctctc

SEQ ID NO: 1317414 - DNA, 15 bp, Homo sapiens
ctgagcagcggctct

SEQ ID NO: 1317415 - DNA, 15 bp, Homo sapiens
actgagcagcggctc

SEQ ID NO: 1317416 - DNA, 15 bp, Homo sapiens
cactgagcagcggct

SEQ ID NO: 1317417 - DNA, 15 bp, Homo sapiens
gcactgagcagcggc

SEQ ID NO: 1317418 - DNA, 15 bp, Homo sapiens
tgcactgagcagcgg

SEQ ID NO: 1317419 - DNA, 15 bp, Homo sapiens
ctgcactgagcagcg

SEQ ID NO: 1317420 - DNA, 15 bp, Homo sapiens
cctgcactgagcagc

SEQ ID NO: 1317421 - DNA, 15 bp, Homo sapiens
gcctgcactgagcag

SEQ ID NO: 1317422 - DNA, 15 bp, Homo sapiens
ggcctgcactgagca

SEQ ID NO: 1317423 - DNA, 15 bp, Homo sapiens
cggcctgcactgagc

SEQ ID NO: 1317424 - DNA, 15 bp, Homo sapiens
acggcctgcactgag

SEQ ID NO: 1317425 - DNA, 15 bp, Homo sapiens
cacggcctgcactga

SEQ ID NO: 1317426 - DNA, 15 bp, Homo sapiens
gcacggcctgcactg

SEQ ID NO: 1317427 - DNA, 15 bp, Homo sapiens
agcacggcctgcact

SEQ ID NO: 1317428 - DNA, 15 bp, Homo sapiens
tagcacggcctgcac

SEQ ID NO: 1317429 - DNA, 15 bp, Homo sapiens
atagcacggcctgca

SEQ ID NO: 1317430 - DNA, 15 bp, Homo sapiens
aatagcacggcctgc

SEQ ID NO: 1317431 - DNA, 15 bp, Homo sapiens
taatagcacggcctg

SEQ ID NO: 1317432 - DNA, 15 bp, Homo sapiens
ctaatagcacggcct

SEQ ID NO: 1317433 - DNA, 15 bp, Homo sapiens
actaatagcacggcc

SEQ ID NO: 1317434 - DNA, 15 bp, Homo sapiens
cactaatagcacggc

SEQ ID NO: 1317435 - DNA, 15 bp, Homo sapiens
acactaatagcacgg

SEQ ID NO: 1317436 - DNA, 15 bp, Homo sapiens
cacactaatagcacg

SEQ ID NO: 1317437 - DNA, 15 bp, Homo sapiens
ccacactaatagcac

SEQ ID NO: 1317438 - DNA, 15 bp, Homo sapiens
tccacactaatagca

SEQ ID NO: 1317439 - DNA, 15 bp, Homo sapiens
gtccacactaatagc

SEQ ID NO: 1317440 - DNA, 15 bp, Homo sapiens
agtccacactaatag

SEQ ID NO: 1317441 - DNA, 15 bp, Homo sapiens
cagtccacactaata

SEQ ID NO: 1317442 - DNA, 15 bp, Homo sapiens
gcagtccacactaat

SEQ ID NO: 1317443 - DNA, 15 bp, Homo sapiens
agcagtccacactaa

SEQ ID NO: 1317444 - DNA, 15 bp, Homo sapiens
cagcagtccacacta

SEQ ID NO: 1317445 - DNA, 15 bp, Homo sapiens
gcagcagtccacact

SEQ ID NO: 1317446 - DNA, 15 bp, Homo sapiens
agcagcagtccacac

SEQ ID NO: 1317447 - DNA, 15 bp, Homo sapiens
cagcagcagtccaca

SEQ ID NO: 1317448 - DNA, 15 bp, Homo sapiens
acagcagcagtccac

SEQ ID NO: 1317449 - DNA, 15 bp, Homo sapiens
gacagcagcagtcca

SEQ ID NO: 1317450 - DNA, 15 bp, Homo sapiens
agacagcagcagtcc

SEQ ID NO: 1317451 - DNA, 15 bp, Homo sapiens
cagacagcagcagtc

SEQ ID NO: 1317452 - DNA, 15 bp, Homo sapiens
tcagacagcagcagt

SEQ ID NO: 1317453 - DNA, 15 bp, Homo sapiens
atcagacagcagcag

SEQ ID NO: 1317454 - DNA, 15 bp, Homo sapiens
aatcagacagcagca

SEQ ID NO: 1317455 - DNA, 15 bp, Homo sapiens
aaatcagacagcagc

SEQ ID NO: 1317456 - DNA, 15 bp, Homo sapiens
caaatcagacagcag

SEQ ID NO: 1317457 - DNA, 15 bp, Homo sapiens
ccaaatcagacagca

SEQ ID NO: 1317458 - DNA, 15 bp, Homo sapiens
cccaaatcagacagc

SEQ ID NO: 1317459 - DNA, 15 bp, Homo sapiens
tcccaaatcagacag

SEQ ID NO: 1317460 - DNA, 15 bp, Homo sapiens
ctcccaaatcagaca

SEQ ID NO: 1317461 - DNA, 15 bp, Homo sapiens
cctcccaaatcagac

SEQ ID NO: 1317462 - DNA, 15 bp, Homo sapiens
tcctcccaaatcaga

SEQ ID NO: 1317463 - DNA, 15 bp, Homo sapiens
ttcctcccaaatcag

SEQ ID NO: 1317464 - DNA, 15 bp, Homo sapiens
attcctcccaaatca

SEQ ID NO: 1317465 - DNA, 15 bp, Homo sapiens
gattcctcccaaatc

SEQ ID NO: 1317466 - DNA, 15 bp, Homo sapiens
agattcctcccaaat

SEQ ID NO: 1317467 - DNA, 15 bp, Homo sapiens
gagattcctcccaaa

SEQ ID NO: 1317468 - DNA, 15 bp, Homo sapiens
tgagattcctcccaa

SEQ ID NO: 1317469 - DNA, 15 bp, Homo sapiens
gtgagattcctccca

SEQ ID NO: 1317470 - DNA, 15 bp, Homo sapiens
agtgagattcctccc

SEQ ID NO: 1317471 - DNA, 15 bp, Homo sapiens
cagtgagattcctcc

SEQ ID NO: 1317472 - DNA, 15 bp, Homo sapiens
gcagtgagattcctc

SEQ ID NO: 1317473 - DNA, 15 bp, Homo sapiens
agcagtgagattcct

SEQ ID NO: 1317474 - DNA, 15 bp, Homo sapiens
cagcagtgagattcc

SEQ ID NO: 1317475 - DNA, 15 bp, Homo sapiens
gcagcagtgagattc

SEQ ID NO: 1317476 - DNA, 15 bp, Homo sapiens
ggcagcagtgagatt

SEQ ID NO: 1317477 - DNA, 15 bp, Homo sapiens
aggcagcagtgagat

SEQ ID NO: 1317478 - DNA, 15 bp, Homo sapiens
caggcagcagtgaga

SEQ ID NO: 1317479 - DNA, 15 bp, Homo sapiens
acaggcagcagtgag

SEQ ID NO: 1317480 - DNA, 15 bp, Homo sapiens
cacaggcagcagtga

SEQ ID NO: 1317481 - DNA, 15 bp, Homo sapiens
ccacaggcagcagtg

SEQ ID NO: 1317482 - DNA, 15 bp, Homo sapiens
accacaggcagcagt

SEQ ID NO: 1317483 - DNA, 15 bp, Homo sapiens
aaccacaggcagcag

SEQ ID NO: 1317484 - DNA, 15 bp, Homo sapiens
caaccacaggcagca

SEQ ID NO: 1317485 - DNA, 15 bp, Homo sapiens
acaaccacaggcagc

SEQ ID NO: 1317486 - DNA, 15 bp, Homo sapiens
tacaaccacaggcag

SEQ ID NO: 1317487 - DNA, 15 bp, Homo sapiens
ctacaaccacaggca

SEQ ID NO: 1317488 - DNA, 15 bp, Homo sapiens
cctacaaccacaggc

SEQ ID NO: 1317489 - DNA, 15 bp, Homo sapiens
ccctacaaccacagg

SEQ ID NO: 1317490 - DNA, 15 bp, Homo sapiens
gccctacaaccacag

SEQ ID NO: 1317491 - DNA, 15 bp, Homo sapiens
tgccctacaaccaca

SEQ ID NO: 1317492 - DNA, 15 bp, Homo sapiens
ctgccctacaaccac

SEQ ID NO: 1317493 - DNA, 15 bp, Homo sapiens
tctgccctacaacca

SEQ ID NO: 1317494 - DNA, 15 bp, Homo sapiens
ttctgccctacaacc

SEQ ID NO: 1317495 - DNA, 15 bp, Homo sapiens
gttctgccctacaac

SEQ ID NO: 1317496 - DNA, 15 bp, Homo sapiens
tgttctgccctacaa

SEQ ID NO: 1317497 - DNA, 15 bp, Homo sapiens
ctgttctgccctaca

SEQ ID NO: 1317498 - DNA, 15 bp, Homo sapiens
actgttctgccctac

SEQ ID NO: 1317499 - DNA, 15 bp, Homo sapiens
aactgttctgcccta

SEQ ID NO: 1317500 - DNA, 15 bp, Homo sapiens
taactgttctgccct

SEQ ID NO: 1317501 - DNA, 15 bp, Homo sapiens
ttaactgttctgccc

SEQ ID NO: 1317502 - DNA, 15 bp, Homo sapiens
tttaactgttctgcc

SEQ ID NO: 1317503 - DNA, 15 bp, Homo sapiens
atttaactgttctgc

SEQ ID NO: 1317504 - DNA, 15 bp, Homo sapiens
gatttaactgttctg

SEQ ID NO: 1317505 - DNA, 15 bp, Homo sapiens
agatttaactgttct

SEQ ID NO: 1317506 - DNA, 15 bp, Homo sapiens
aagatttaactgttc

SEQ ID NO: 1317507 - DNA, 15 bp, Homo sapiens
gaagatttaactgtt

SEQ ID NO: 1317508 - DNA, 15 bp, Homo sapiens
tgaagatttaactgt

SEQ ID NO: 1317509 - DNA, 15 bp, Homo sapiens
atgaagatttaactg

SEQ ID NO: 1317510 - DNA, 15 bp, Homo sapiens
tatgaagatttaact

SEQ ID NO: 1317511 - DNA, 15 bp, Homo sapiens
ctatgaagatttaac

SEQ ID NO: 1317512 - DNA, 15 bp, Homo sapiens
gctatgaagatttaa

SEQ ID NO: 1317513 - DNA, 15 bp, Homo sapiens
ggctatgaagattta

SEQ ID NO: 1317514 - DNA, 15 bp, Homo sapiens
aggctatgaagattt

SEQ ID NO: 1317515 - DNA, 15 bp, Homo sapiens
aaggctatgaagatt

SEQ ID NO: 1317516 - DNA, 15 bp, Homo sapiens
aaaggctatgaagat

SEQ ID NO: 1317517 - DNA, 15 bp, Homo sapiens
aaaaggctatgaaga

SEQ ID NO: 1317518 - DNA, 15 bp, Homo sapiens
caaaaggctatgaag

SEQ ID NO: 1317519 - DNA, 15 bp, Homo sapiens
ccaaaaggctatgaa

SEQ ID NO: 1317520 - DNA, 15 bp, Homo sapiens
accaaaaggctatga

SEQ ID NO: 1317521 - DNA, 15 bp, Homo sapiens
taccaaaaggctatg

SEQ ID NO: 1317522 - DNA, 15 bp, Homo sapiens
ataccaaaaggctat

SEQ ID NO: 1317523 - DNA, 15 bp, Homo sapiens
aataccaaaaggcta

SEQ ID NO: 1317524 - DNA, 15 bp, Homo sapiens
taataccaaaaggct

SEQ ID NO: 1317525 - DNA, 15 bp, Homo sapiens
ataataccaaaaggc

SEQ ID NO: 1317526 - DNA, 15 bp, Homo sapiens
aataataccaaaagg

SEQ ID NO: 1317527 - DNA, 15 bp, Homo sapiens
caataataccaaaag

SEQ ID NO: 1317528 - DNA, 15 bp, Homo sapiens
tcaataataccaaaa

SEQ ID NO: 1317529 - DNA, 15 bp, Homo sapiens
ctcaataataccaaa

SEQ ID NO: 1317530 - DNA, 15 bp, Homo sapiens
actcaataataccaa

SEQ ID NO: 1317531 - DNA, 15 bp, Homo sapiens
cactcaataatacca

SEQ ID NO: 1317532 - DNA, 15 bp, Homo sapiens
acactcaataatacc

SEQ ID NO: 1317533 - DNA, 15 bp, Homo sapiens
aacactcaataatac

SEQ ID NO: 1317534 - DNA, 15 bp, Homo sapiens
taacactcaataata

SEQ ID NO: 1317535 - DNA, 15 bp, Homo sapiens
ttaacactcaataat

SEQ ID NO: 1317536 - DNA, 15 bp, Homo sapiens
attaacactcaataa

SEQ ID NO: 1317537 - DNA, 15 bp, Homo sapiens
tattaacactcaata

SEQ ID NO: 1317538 - DNA, 15 bp, Homo sapiens
ttattaacactcaat

SEQ ID NO: 1317539 - DNA, 15 bp, Homo sapiens
attattaacactcaa

SEQ ID NO: 1317540 - DNA, 15 bp, Homo sapiens
tattattaacactca

SEQ ID NO: 1317541 - DNA, 15 bp, Homo sapiens
ctattattaacactc

SEQ ID NO: 1317542 - DNA, 15 bp, Homo sapiens
actattattaacact

SEQ ID NO: 1317543 - DNA, 15 bp, Homo sapiens
gactattattaacac

SEQ ID NO: 1317544 - DNA, 15 bp, Homo sapiens
tgactattattaaca

SEQ ID NO: 1317545 - DNA, 15 bp, Homo sapiens
atgactattattaac

SEQ ID NO: 1317546 - DNA, 15 bp, Homo sapiens
catgactattattaa

SEQ ID NO: 1317547 - DNA, 15 bp, Homo sapiens
tcatgactattatta

SEQ ID NO: 1317548 - DNA, 15 bp, Homo sapiens
gtcatgactattatt

SEQ ID NO: 1317549 - DNA, 15 bp, Homo sapiens
tgtcatgactattat

SEQ ID NO: 1317550 - DNA, 15 bp, Homo sapiens
gtgtcatgactatta

SEQ ID NO: 1317551 - DNA, 15 bp, Homo sapiens
tgtgtcatgactatt

SEQ ID NO: 1317552 - DNA, 15 bp, Homo sapiens
ttgtgtcatgactat

SEQ ID NO: 1317553 - DNA, 15 bp, Homo sapiens
cttgtgtcatgacta

SEQ ID NO: 1317554 - DNA, 15 bp, Homo sapiens
acttgtgtcatgact

SEQ ID NO: 1317555 - DNA, 15 bp, Homo sapiens
tacttgtgtcatgac

SEQ ID NO: 1317556 - DNA, 15 bp, Homo sapiens
gtacttgtgtcatga

SEQ ID NO: 1317557 - DNA, 15 bp, Homo sapiens
tgtacttgtgtcatg

SEQ ID NO: 1317558 - DNA, 15 bp, Homo sapiens
ctgtacttgtgtcat

SEQ ID NO: 1317559 - DNA, 15 bp, Homo sapiens
actgtacttgtgtca

SEQ ID NO: 1317560 - DNA, 15 bp, Homo sapiens
aactgtacttgtgtc

SEQ ID NO: 1317561 - DNA, 15 bp, Homo sapiens
aaactgtacttgtgt

SEQ ID NO: 1317562 - DNA, 15 bp, Homo sapiens
gaaactgtacttgtg

SEQ ID NO: 1317563 - DNA, 15 bp, Homo sapiens
ggaaactgtacttgt

SEQ ID NO: 1317564 - DNA, 15 bp, Homo sapiens
aggaaactgtacttg

SEQ ID NO: 1317565 - DNA, 15 bp, Homo sapiens
gaggaaactgtactt

SEQ ID NO: 1317566 - DNA, 15 bp, Homo sapiens
ggaggaaactgtact

SEQ ID NO: 1317567 - DNA, 15 bp, Homo sapiens
aggaggaaactgtac

SEQ ID NO: 1317568 - DNA, 15 bp, Homo sapiens
caggaggaaactgta

SEQ ID NO: 1317569 - DNA, 15 bp, Homo sapiens
acaggaggaaactgt

SEQ ID NO: 1317570 - DNA, 15 bp, Homo sapiens
gacaggaggaaactg

SEQ ID NO: 1317571 - DNA, 15 bp, Homo sapiens
tgacaggaggaaact

SEQ ID NO: 1317572 - DNA, 15 bp, Homo sapiens
ctgacaggaggaaac

SEQ ID NO: 1317573 - DNA, 15 bp, Homo sapiens
cctgacaggaggaaa

SEQ ID NO: 1317574 - DNA, 15 bp, Homo sapiens
acctgacaggaggaa

SEQ ID NO: 1317575 - DNA, 15 bp, Homo sapiens
tacctgacaggagga

SEQ ID NO: 1317576 - DNA, 15 bp, Homo sapiens
atacctgacaggagg

SEQ ID NO: 1317577 - DNA, 15 bp, Homo sapiens
aatacctgacaggag

SEQ ID NO: 1317578 - DNA, 15 bp, Homo sapiens
caatacctgacagga

SEQ ID NO: 1317579 - DNA, 15 bp, Homo sapiens
acaatacctgacagg

SEQ ID NO: 1317580 - DNA, 15 bp, Homo sapiens
aacaatacctgacag

SEQ ID NO: 1317581 - DNA, 15 bp, Homo sapiens
taacaatacctgaca

SEQ ID NO: 1317582 - DNA, 15 bp, Homo sapiens
ataacaatacctgac

SEQ ID NO: 1317583 - DNA, 15 bp, Homo sapiens
tataacaatacctga

SEQ ID NO: 1317584 - DNA, 15 bp, Homo sapiens
ttataacaatacctg

SEQ ID NO: 1317585 - DNA, 15 bp, Homo sapiens
cttataacaatacct

SEQ ID NO: 1317586 - DNA, 15 bp, Homo sapiens
acttataacaatacc

SEQ ID NO: 1317587 - DNA, 15 bp, Homo sapiens
tacttataacaatac

SEQ ID NO: 1317588 - DNA, 15 bp, Homo sapiens
ttacttataacaata

SEQ ID NO: 1317589 - DNA, 15 bp, Homo sapiens
attacttataacaat

SEQ ID NO: 1317590 - DNA, 15 bp, Homo sapiens
cattacttataacaa

SEQ ID NO: 1317591 - DNA, 15 bp, Homo sapiens
ccattacttataaca

SEQ ID NO: 1317592 - DNA, 15 bp, Homo sapiens
accattacttataac

SEQ ID NO: 1317593 - DNA, 15 bp, Homo sapiens
taccattacttataa

SEQ ID NO: 1317594 - DNA, 15 bp, Homo sapiens
ctaccattacttata

SEQ ID NO: 1317595 - DNA, 15 bp, Homo sapiens
tctaccattacttat

SEQ ID NO: 1317596 - DNA, 15 bp, Homo sapiens
atctaccattactta

SEQ ID NO: 1317597 - DNA, 15 bp, Homo sapiens
catctaccattactt

SEQ ID NO: 1317598 - DNA, 15 bp, Homo sapiens
acatctaccattact

SEQ ID NO: 1317599 - DNA, 15 bp, Homo sapiens
aacatctaccattac

SEQ ID NO: 1317600 - DNA, 15 bp, Homo sapiens
gaacatctaccatta

SEQ ID NO: 1317601 - DNA, 15 bp, Homo sapiens
agaacatctaccatt

SEQ ID NO: 1317602 - DNA, 15 bp, Homo sapiens
aagaacatctaccat

SEQ ID NO: 1317603 - DNA, 15 bp, Homo sapiens
caagaacatctacca

SEQ ID NO: 1317604 - DNA, 15 bp, Homo sapiens
acaagaacatctacc

SEQ ID NO: 1317605 - DNA, 15 bp, Homo sapiens
cacaagaacatctac

SEQ ID NO: 1317606 - DNA, 15 bp, Homo sapiens
tcacaagaacatcta

SEQ ID NO: 1317607 - DNA, 15 bp, Homo sapiens
gtcacaagaacatct

SEQ ID NO: 1317608 - DNA, 15 bp, Homo sapiens
ggtcacaagaacatc

SEQ ID NO: 1317609 - DNA, 15 bp, Homo sapiens
tggtcacaagaacat

SEQ ID NO: 1317610 - DNA, 15 bp, Homo sapiens
gtggtcacaagaaca

SEQ ID NO: 1317611 - DNA, 15 bp, Homo sapiens
tgtggtcacaagaac

SEQ ID NO: 1317612 - DNA, 15 bp, Homo sapiens
ttgtggtcacaagaa

SEQ ID NO: 1317613 - DNA, 15 bp, Homo sapiens
tttgtggtcacaaga

SEQ ID NO: 1317614 - DNA, 15 bp, Homo sapiens
ttttgtggtcacaag

SEQ ID NO: 1317615 - DNA, 15 bp, Homo sapiens
tttttgtggtcacaa

SEQ ID NO: 1317616 - DNA, 15 bp, Homo sapiens
ttttttgtggtcaca

SEQ ID NO: 1317617 - DNA, 15 bp, Homo sapiens
attttttgtggtcac

SEQ ID NO: 1317618 - DNA, 15 bp, Homo sapiens
aattttttgtggtca

SEQ ID NO: 1317619 - DNA, 15 bp, Homo sapiens
taattttttgtggtc

SEQ ID NO: 1317620 - DNA, 15 bp, Homo sapiens
ataattttttgtggt

SEQ ID NO: 1317621 - DNA, 15 bp, Homo sapiens
aataattttttgtgg

SEQ ID NO: 1317622 - DNA, 15 bp, Homo sapiens
aaataattttttgtg

SEQ ID NO: 1317623 - DNA, 15 bp, Homo sapiens
aaaataattttttgt

SEQ ID NO: 1317624 - DNA, 15 bp, Homo sapiens
caaaataattttttg

SEQ ID NO: 1317625 - DNA, 15 bp, Homo sapiens
gcaaaataatttttt

SEQ ID NO: 1317626 - DNA, 15 bp, Homo sapiens
tgcaaaataattttt

SEQ ID NO: 1317627 - DNA, 15 bp, Homo sapiens
ttgcaaaataatttt

SEQ ID NO: 1317628 - DNA, 15 bp, Homo sapiens
attgcaaaataattt

SEQ ID NO: 1317629 - DNA, 15 bp, Homo sapiens
tattgcaaaataatt

SEQ ID NO: 1317630 - DNA, 15 bp, Homo sapiens
ttattgcaaaataat

SEQ ID NO: 1317631 - DNA, 15 bp, Homo sapiens
attattgcaaaataa

SEQ ID NO: 1317632 - DNA, 15 bp, Homo sapiens
cattattgcaaaata

SEQ ID NO: 1317633 - DNA, 15 bp, Homo sapiens
tcattattgcaaaat

SEQ ID NO: 1317634 - DNA, 15 bp, Homo sapiens
atcattattgcaaaa

SEQ ID NO: 1317635 - DNA, 15 bp, Homo sapiens
gatcattattgcaaa

SEQ ID NO: 1317636 - DNA, 15 bp, Homo sapiens
agatcattattgcaa

SEQ ID NO: 1317637 - DNA, 15 bp, Homo sapiens
cagatcattattgca

SEQ ID NO: 1317638 - DNA, 15 bp, Homo sapiens
gcagatcattattgc

SEQ ID NO: 1317639 - DNA, 15 bp, Homo sapiens
agcagatcattattg

SEQ ID NO: 1317640 - DNA, 15 bp, Homo sapiens
gagcagatcattatt

SEQ ID NO: 1317641 - DNA, 15 bp, Homo sapiens
cgagcagatcattat

SEQ ID NO: 1317642 - DNA, 15 bp, Homo sapiens
ccgagcagatcatta

SEQ ID NO: 1317643 - DNA, 15 bp, Homo sapiens
tccgagcagatcatt

SEQ ID NO: 1317644 - DNA, 15 bp, Homo sapiens
ctccgagcagatcat

SEQ ID NO: 1317645 - DNA, 15 bp, Homo sapiens
cctccgagcagatca

SEQ ID NO: 1317646 - DNA, 15 bp, Homo sapiens
acctccgagcagatc

SEQ ID NO: 1317647 - DNA, 15 bp, Homo sapiens
gacctccgagcagat

SEQ ID NO: 1317648 - DNA, 15 bp, Homo sapiens
agacctccgagcaga

SEQ ID NO: 1317649 - DNA, 15 bp, Homo sapiens
gagacctccgagcag

SEQ ID NO: 1317650 - DNA, 15 bp, Homo sapiens
ggagacctccgagca

SEQ ID NO: 1317651 - DNA, 15 bp, Homo sapiens
gggagacctccgagc

SEQ ID NO: 1317652 - DNA, 15 bp, Homo sapiens
tgggagacctccgag

SEQ ID NO: 1317653 - DNA, 15 bp, Homo sapiens
ttgggagacctccga

SEQ ID NO: 1317654 - DNA, 15 bp, Homo sapiens
gttgggagacctccg

SEQ ID NO: 1317655 - DNA, 15 bp, Homo sapiens
ggttgggagacctcc

SEQ ID NO: 1317656 - DNA, 15 bp, Homo sapiens
tggttgggagacctc

SEQ ID NO: 1317657 - DNA, 15 bp, Homo sapiens
ctggttgggagacct

SEQ ID NO: 1317658 - DNA, 15 bp, Homo sapiens
cctggttgggagacc

SEQ ID NO: 1317659 - DNA, 15 bp, Homo sapiens
acctggttgggagac

SEQ ID NO: 1317660 - DNA, 15 bp, Homo sapiens
cacctggttgggaga

SEQ ID NO: 1317661 - DNA, 15 bp, Homo sapiens
tcacctggttgggag

SEQ ID NO: 1317662 - DNA, 15 bp, Homo sapiens
ttcacctggttggga

SEQ ID NO: 1317663 - DNA, 15 bp, Homo sapiens
gttcacctggttggg

SEQ ID NO: 1317664 - DNA, 15 bp, Homo sapiens
tgttcacctggttgg

SEQ ID NO: 1317665 - DNA, 15 bp, Homo sapiens
ttgttcacctggttg

SEQ ID NO: 1317666 - DNA, 15 bp, Homo sapiens
tttgttcacctggtt

SEQ ID NO: 1317667 - DNA, 15 bp, Homo sapiens
ctttgttcacctggt

SEQ ID NO: 1317668 - DNA, 15 bp, Homo sapiens
cctttgttcacctgg

SEQ ID NO: 1317669 - DNA, 15 bp, Homo sapiens
acctttgttcacctg

SEQ ID NO: 1317670 - DNA, 15 bp, Homo sapiens
aacctttgttcacct

SEQ ID NO: 1317671 - DNA, 15 bp, Homo sapiens
gaacctttgttcacc

SEQ ID NO: 1317672 - DNA, 15 bp, Homo sapiens
tgaacctttgttcac

SEQ ID NO: 1317673 - DNA, 15 bp, Homo sapiens
gtgaacctttgttca

SEQ ID NO: 1317674 - DNA, 15 bp, Homo sapiens
ggtgaacctttgttc

SEQ ID NO: 1317675 - DNA, 15 bp, Homo sapiens
aggtgaacctttgtt

SEQ ID NO: 1317676 - DNA, 15 bp, Homo sapiens
caggtgaacctttgt

SEQ ID NO: 1317677 - DNA, 15 bp, Homo sapiens
ccaggtgaacctttg

SEQ ID NO: 1317678 - DNA, 15 bp, Homo sapiens
cccaggtgaaccttt

SEQ ID NO: 1317679 - DNA, 15 bp, Homo sapiens
acccaggtgaacctt

SEQ ID NO: 1317680 - DNA, 15 bp, Homo sapiens
gacccaggtgaacct

SEQ ID NO: 1317681 - DNA, 15 bp, Homo sapiens
ggacccaggtgaacc

SEQ ID NO: 1317682 - DNA, 15 bp, Homo sapiens
aggacccaggtgaac

SEQ ID NO: 1317683 - DNA, 15 bp, Homo sapiens
aaggacccaggtgaa

SEQ ID NO: 1317684 - DNA, 15 bp, Homo sapiens
gaaggacccaggtga

SEQ ID NO: 1317685 - DNA, 15 bp, Homo sapiens
ggaaggacccaggtg

SEQ ID NO: 1317686 - DNA, 15 bp, Homo sapiens
aggaaggacccaggt

SEQ ID NO: 1317687 - DNA, 15 bp, Homo sapiens
caggaaggacccagg

SEQ ID NO: 1317688 - DNA, 15 bp, Homo sapiens
acaggaaggacccag

SEQ ID NO: 1317689 - DNA, 15 bp, Homo sapiens
tacaggaaggaccca

SEQ ID NO: 1317690 - DNA, 15 bp, Homo sapiens
atacaggaaggaccc

SEQ ID NO: 1317691 - DNA, 15 bp, Homo sapiens
catacaggaaggacc

SEQ ID NO: 1317692 - DNA, 15 bp, Homo sapiens
tcatacaggaaggac

SEQ ID NO: 1317693 - DNA, 15 bp, Homo sapiens
gtcatacaggaagga

SEQ ID NO: 1317694 - DNA, 15 bp, Homo sapiens
agtcatacaggaagg

SEQ ID NO: 1317695 - DNA, 15 bp, Homo sapiens
tagtcatacaggaag

SEQ ID NO: 1317696 - DNA, 15 bp, Homo sapiens
gtagtcatacaggaa

SEQ ID NO: 1317697 - DNA, 15 bp, Homo sapiens
tgtagtcatacagga

SEQ ID NO: 1317698 - DNA, 15 bp, Homo sapiens
ctgtagtcatacagg

SEQ ID NO: 1317699 - DNA, 15 bp, Homo sapiens
tctgtagtcatacag

SEQ ID NO: 1317700 - DNA, 15 bp, Homo sapiens
gtctgtagtcataca

SEQ ID NO: 1317701 - DNA, 15 bp, Homo sapiens
cgtctgtagtcatac

SEQ ID NO: 1317702 - DNA, 15 bp, Homo sapiens
acgtctgtagtcata

SEQ ID NO: 1317703 - DNA, 15 bp, Homo sapiens
tacgtctgtagtcat

SEQ ID NO: 1317704 - DNA, 15 bp, Homo sapiens
atacgtctgtagtca

SEQ ID NO: 1317705 - DNA, 15 bp, Homo sapiens
gatacgtctgtagtc

SEQ ID NO: 1317706 - DNA, 15 bp, Homo sapiens
tgatacgtctgtagt

SEQ ID NO: 1317707 - DNA, 15 bp, Homo sapiens
gtgatacgtctgtag

SEQ ID NO: 1317708 - DNA, 15 bp, Homo sapiens
agtgatacgtctgta

SEQ ID NO: 1317709 - DNA, 15 bp, Homo sapiens
aagtgatacgtctgt

SEQ ID NO: 1317710 - DNA, 15 bp, Homo sapiens
gaagtgatacgtctg

SEQ ID NO: 1317711 - DNA, 15 bp, Homo sapiens
tgaagtgatacgtct

SEQ ID NO: 1317712 - DNA, 15 bp, Homo sapiens
atgaagtgatacgtc

SEQ ID NO: 1317713 - DNA, 15 bp, Homo sapiens
catgaagtgatacgt

SEQ ID NO: 1317714 - DNA, 15 bp, Homo sapiens
tcatgaagtgatacg

SEQ ID NO: 1317715 - DNA, 15 bp, Homo sapiens
gtcatgaagtgatac

SEQ ID NO: 1317716 - DNA, 15 bp, Homo sapiens
ggtcatgaagtgata

SEQ ID NO: 1317717 - DNA, 15 bp, Homo sapiens
tggtcatgaagtgat

SEQ ID NO: 1317718 - DNA, 15 bp, Homo sapiens
gtggtcatgaagtga

SEQ ID NO: 1317719 - DNA, 15 bp, Homo sapiens
tgtggtcatgaagtg

SEQ ID NO: 1317720 - DNA, 15 bp, Homo sapiens
ttgtggtcatgaagt

SEQ ID NO: 1317721 - DNA, 15 bp, Homo sapiens
gttgtggtcatgaag

SEQ ID NO: 1317722 - DNA, 15 bp, Homo sapiens
tgttgtggtcatgaa

SEQ ID NO: 1317723 - DNA, 15 bp, Homo sapiens
gtgttgtggtcatga

SEQ ID NO: 1317724 - DNA, 15 bp, Homo sapiens
agtgttgtggtcatg

SEQ ID NO: 1317725 - DNA, 15 bp, Homo sapiens
aagtgttgtggtcat

SEQ ID NO: 1317726 - DNA, 15 bp, Homo sapiens
gaagtgttgtggtca

SEQ ID NO: 1317727 - DNA, 15 bp, Homo sapiens
agaagtgttgtggtc

SEQ ID NO: 1317728 - DNA, 15 bp, Homo sapiens
gagaagtgttgtggt

SEQ ID NO: 1317729 - DNA, 15 bp, Homo sapiens
agagaagtgttgtgg

SEQ ID NO: 1317730 - DNA, 15 bp, Homo sapiens
cagagaagtgttgtg

SEQ ID NO: 1317731 - DNA, 15 bp, Homo sapiens
ccagagaagtgttgt

SEQ ID NO: 1317732 - DNA, 15 bp, Homo sapiens
tccagagaagtgttg

SEQ ID NO: 1317733 - DNA, 15 bp, Homo sapiens
ttccagagaagtgtt

SEQ ID NO: 1317734 - DNA, 15 bp, Homo sapiens
attccagagaagtgt

SEQ ID NO: 1317735 - DNA, 15 bp, Homo sapiens
cattccagagaagtg

SEQ ID NO: 1317736 - DNA, 15 bp, Homo sapiens
ccattccagagaagt

SEQ ID NO: 1317737 - DNA, 15 bp, Homo sapiens
accattccagagaag

SEQ ID NO: 1317738 - DNA, 15 bp, Homo sapiens
aaccattccagagaa

SEQ ID NO: 1317739 - DNA, 15 bp, Homo sapiens
aaaccattccagaga

SEQ ID NO: 1317740 - DNA, 15 bp, Homo sapiens
taaaccattccagag

SEQ ID NO: 1317741 - DNA, 15 bp, Homo sapiens
ataaaccattccaga

SEQ ID NO: 1317742 - DNA, 15 bp, Homo sapiens
gataaaccattccag

SEQ ID NO: 1317743 - DNA, 15 bp, Homo sapiens
tgataaaccattcca

SEQ ID NO: 1317744 - DNA, 15 bp, Homo sapiens
ctgataaaccattcc

SEQ ID NO: 1317745 - DNA, 15 bp, Homo sapiens
actgataaaccattc

SEQ ID NO: 1317746 - DNA, 15 bp, Homo sapiens
tactgataaaccatt

SEQ ID NO: 1317747 - DNA, 15 bp, Homo sapiens
ctactgataaaccat

SEQ ID NO: 1317748 - DNA, 15 bp, Homo sapiens
cctactgataaacca

SEQ ID NO: 1317749 - DNA, 15 bp, Homo sapiens
tcctactgataaacc

SEQ ID NO: 1317750 - DNA, 15 bp, Homo sapiens
ttcctactgataaac

SEQ ID NO: 1317751 - DNA, 15 bp, Homo sapiens
tttcctactgataaa

SEQ ID NO: 1317752 - DNA, 15 bp, Homo sapiens
ttttcctactgataa

SEQ ID NO: 1317753 - DNA, 15 bp, Homo sapiens
tttttcctactgata

SEQ ID NO: 1317754 - DNA, 15 bp, Homo sapiens
ttttttcctactgat

SEQ ID NO: 1317755 - DNA, 15 bp, Homo sapiens
cttttttcctactga

SEQ ID NO: 1317756 - DNA, 15 bp, Homo sapiens
tcttttttcctactg

SEQ ID NO: 1317757 - DNA, 15 bp, Homo sapiens
atcttttttcctact

SEQ ID NO: 1317758 - DNA, 15 bp, Homo sapiens
aatcttttttcctac

SEQ ID NO: 1317759 - DNA, 15 bp, Homo sapiens
taatcttttttccta

SEQ ID NO: 1317760 - DNA, 15 bp, Homo sapiens
ataatcttttttcct

SEQ ID NO: 1317761 - DNA, 15 bp, Homo sapiens
cataatcttttttcc

SEQ ID NO: 1317762 - DNA, 15 bp, Homo sapiens
acataatcttttttc

SEQ ID NO: 1317763 - DNA, 15 bp, Homo sapiens
cacataatctttttt

SEQ ID NO: 1317764 - DNA, 15 bp, Homo sapiens
acacataatcttttt

SEQ ID NO: 1317765 - DNA, 15 bp, Homo sapiens
aacacataatctttt

SEQ ID NO: 1317766 - DNA, 15 bp, Homo sapiens
taacacataatcttt

SEQ ID NO: 1317767 - DNA, 15 bp, Homo sapiens
ttaacacataatctt

SEQ ID NO: 1317768 - DNA, 15 bp, Homo sapiens
attaacacataatct

SEQ ID NO: 1317769 - DNA, 15 bp, Homo sapiens
aattaacacataatc

SEQ ID NO: 1317770 - DNA, 15 bp, Homo sapiens
taattaacacataat

SEQ ID NO: 1317771 - DNA, 15 bp, Homo sapiens
gtaattaacacataa

SEQ ID NO: 1317772 - DNA, 15 bp, Homo sapiens
ggtaattaacacata

SEQ ID NO: 1317773 - DNA, 15 bp, Homo sapiens
tggtaattaacacat

SEQ ID NO: 1317774 - DNA, 15 bp, Homo sapiens
atggtaattaacaca

SEQ ID NO: 1317775 - DNA, 15 bp, Homo sapiens
gatggtaattaacac

SEQ ID NO: 1317776 - DNA, 15 bp, Homo sapiens
ggatggtaattaaca

SEQ ID NO: 1317777 - DNA, 15 bp, Homo sapiens
aggatggtaattaac

SEQ ID NO: 1317778 - DNA, 15 bp, Homo sapiens
gaggatggtaattaa

SEQ ID NO: 1317779 - DNA, 15 bp, Homo sapiens
agaggatggtaatta

SEQ ID NO: 1317780 - DNA, 15 bp, Homo sapiens
tagaggatggtaatt

SEQ ID NO: 1317781 - DNA, 15 bp, Homo sapiens
atagaggatggtaat

SEQ ID NO: 1317782 - DNA, 15 bp, Homo sapiens
tatagaggatggtaa

SEQ ID NO: 1317783 - DNA, 15 bp, Homo sapiens
atatagaggatggta

SEQ ID NO: 1317784 - DNA, 15 bp, Homo sapiens
aatatagaggatggt

SEQ ID NO: 1317785 - DNA, 15 bp, Homo sapiens
aaatatagaggatgg

SEQ ID NO: 1317786 - DNA, 15 bp, Homo sapiens
aaaatatagaggatg

SEQ ID NO: 1317787 - DNA, 15 bp, Homo sapiens
caaaatatagaggat

SEQ ID NO: 1317788 - DNA, 15 bp, Homo sapiens
tcaaaatatagagga

SEQ ID NO: 1317789 - DNA, 15 bp, Homo sapiens
atcaaaatatagagg

SEQ ID NO: 1317790 - DNA, 15 bp, Homo sapiens
aatcaaaatatagag

SEQ ID NO: 1317791 - DNA, 15 bp, Homo sapiens
caatcaaaatataga

SEQ ID NO: 1317792 - DNA, 15 bp, Homo sapiens
acaatcaaaatatag

SEQ ID NO: 1317793 - DNA, 15 bp, Homo sapiens
aacaatcaaaatata

SEQ ID NO: 1317794 - DNA, 15 bp, Homo sapiens
aaacaatcaaaatat

SEQ ID NO: 1317795 - DNA, 15 bp, Homo sapiens
caaacaatcaaaata

SEQ ID NO: 1317796 - DNA, 15 bp, Homo sapiens
ccaaacaatcaaaat

SEQ ID NO: 1317797 - DNA, 15 bp, Homo sapiens
cccaaacaatcaaaa

SEQ ID NO: 1317798 - DNA, 15 bp, Homo sapiens
ccccaaacaatcaaa

SEQ ID NO: 1317799 - DNA, 15 bp, Homo sapiens
gccccaaacaatcaa

SEQ ID NO: 1317800 - DNA, 15 bp, Homo sapiens
tgccccaaacaatca

SEQ ID NO: 1317801 - DNA, 15 bp, Homo sapiens
ctgccccaaacaatc

SEQ ID NO: 1317802 - DNA, 15 bp, Homo sapiens
gctgccccaaacaat

SEQ ID NO: 1317803 - DNA, 15 bp, Homo sapiens
agctgccccaaacaa

SEQ ID NO: 1317804 - DNA, 15 bp, Homo sapiens
cagctgccccaaaca

SEQ ID NO: 1317805 - DNA, 15 bp, Homo sapiens
tcagctgccccaaac

SEQ ID NO: 1317806 - DNA, 15 bp, Homo sapiens
ctcagctgccccaaa

SEQ ID NO: 1317807 - DNA, 15 bp, Homo sapiens
tctcagctgccccaa

SEQ ID NO: 1317808 - DNA, 15 bp, Homo sapiens
ttctcagctgcccca

SEQ ID NO: 1317809 - DNA, 15 bp, Homo sapiens
gttctcagctgcccc

SEQ ID NO: 1317810 - DNA, 15 bp, Homo sapiens
agttctcagctgccc

SEQ ID NO: 1317811 - DNA, 15 bp, Homo sapiens
aagttctcagctgcc

SEQ ID NO: 1317812 - DNA, 15 bp, Homo sapiens
gaagttctcagctgc

SEQ ID NO: 1317813 - DNA, 15 bp, Homo sapiens
ggaagttctcagctg

SEQ ID NO: 1317814 - DNA, 15 bp, Homo sapiens
aggaagttctcagct

SEQ ID NO: 1317815 - DNA, 15 bp, Homo sapiens
aaggaagttctcagc

SEQ ID NO: 1317816 - DNA, 15 bp, Homo sapiens
aaaggaagttctcag

SEQ ID NO: 1317817 - DNA, 15 bp, Homo sapiens
taaaggaagttctca

SEQ ID NO: 1317818 - DNA, 15 bp, Homo sapiens
ctaaaggaagttctc

SEQ ID NO: 1317819 - DNA, 15 bp, Homo sapiens
tctaaaggaagttct

SEQ ID NO: 1317820 - DNA, 15 bp, Homo sapiens
gtctaaaggaagttc

SEQ ID NO: 1317821 - DNA, 15 bp, Homo sapiens
agtctaaaggaagtt

SEQ ID NO: 1317822 - DNA, 15 bp, Homo sapiens
cagtctaaaggaagt

SEQ ID NO: 1317823 - DNA, 15 bp, Homo sapiens
tcagtctaaaggaag

SEQ ID NO: 1317824 - DNA, 15 bp, Homo sapiens
atcagtctaaaggaa

SEQ ID NO: 1317825 - DNA, 15 bp, Homo sapiens
aatcagtctaaagga

SEQ ID NO: 1317826 - DNA, 15 bp, Homo sapiens
gaatcagtctaaagg

SEQ ID NO: 1317827 - DNA, 15 bp, Homo sapiens
ggaatcagtctaaag

SEQ ID NO: 1317828 - DNA, 15 bp, Homo sapiens
tggaatcagtctaaa

SEQ ID NO: 1317829 - DNA, 15 bp, Homo sapiens
ttggaatcagtctaa

SEQ ID NO: 1317830 - DNA, 15 bp, Homo sapiens
tttggaatcagtcta

SEQ ID NO: 1317831 - DNA, 15 bp, Homo sapiens
atttggaatcagtct

SEQ ID NO: 1317832 - DNA, 15 bp, Homo sapiens
tatttggaatcagtc

SEQ ID NO: 1317833 - DNA, 15 bp, Homo sapiens
atatttggaatcagt

SEQ ID NO: 1317834 - DNA, 15 bp, Homo sapiens
gatatttggaatcag

SEQ ID NO: 1317835 - DNA, 15 bp, Homo sapiens
agatatttggaatca

SEQ ID NO: 1317836 - DNA, 15 bp, Homo sapiens
tagatatttggaatc

SEQ ID NO: 1317837 - DNA, 15 bp, Homo sapiens
atagatatttggaat

SEQ ID NO: 1317838 - DNA, 15 bp, Homo sapiens
aatagatatttggaa

SEQ ID NO: 1317839 - DNA, 15 bp, Homo sapiens
taatagatatttgga

SEQ ID NO: 1317840 - DNA, 15 bp, Homo sapiens
gtaatagatatttgg

SEQ ID NO: 1317841 - DNA, 15 bp, Homo sapiens
ggtaatagatatttg

SEQ ID NO: 1317842 - DNA, 15 bp, Homo sapiens
aggtaatagatattt

SEQ ID NO: 1317843 - DNA, 15 bp, Homo sapiens
aaggtaatagatatt

SEQ ID NO: 1317844 - DNA, 15 bp, Homo sapiens
taaggtaatagatat

SEQ ID NO: 1317845 - DNA, 15 bp, Homo sapiens
ataaggtaatagata

SEQ ID NO: 1317846 - DNA, 15 bp, Homo sapiens
aataaggtaatagat

SEQ ID NO: 1317847 - DNA, 15 bp, Homo sapiens
taataaggtaataga

SEQ ID NO: 1317848 - DNA, 15 bp, Homo sapiens
ttaataaggtaatag

SEQ ID NO: 1317849 - DNA, 15 bp, Homo sapiens
cttaataaggtaata

SEQ ID NO: 1317850 - DNA, 15 bp, Homo sapiens
gcttaataaggtaat

SEQ ID NO: 1317851 - DNA, 15 bp, Homo sapiens
tgcttaataaggtaa

SEQ ID NO: 1317852 - DNA, 15 bp, Homo sapiens
ttgcttaataaggta

SEQ ID NO: 1317853 - DNA, 15 bp, Homo sapiens
gttgcttaataaggt

SEQ ID NO: 1317854 - DNA, 15 bp, Homo sapiens
tgttgcttaataagg

SEQ ID NO: 1317855 - DNA, 15 bp, Homo sapiens
atgttgcttaataag

SEQ ID NO: 1317856 - DNA, 15 bp, Homo sapiens
gatgttgcttaataa

SEQ ID NO: 1317857 - DNA, 15 bp, Homo sapiens
agatgttgcttaata

SEQ ID NO: 1317858 - DNA, 15 bp, Homo sapiens
aagatgttgcttaat

SEQ ID NO: 1317859 - DNA, 15 bp, Homo sapiens
aaagatgttgcttaa

SEQ ID NO: 1317860 - DNA, 15 bp, Homo sapiens
aaaagatgttgctta

SEQ ID NO: 1317861 - DNA, 15 bp, Homo sapiens
gaaaagatgttgctt

SEQ ID NO: 1317862 - DNA, 15 bp, Homo sapiens
tgaaaagatgttgct

SEQ ID NO: 1317863 - DNA, 15 bp, Homo sapiens
ctgaaaagatgttgc

SEQ ID NO: 1317864 - DNA, 15 bp, Homo sapiens
tctgaaaagatgttg

SEQ ID NO: 1317865 - DNA, 15 bp, Homo sapiens
ttctgaaaagatgtt

SEQ ID NO: 1317866 - DNA, 15 bp, Homo sapiens
gttctgaaaagatgt

SEQ ID NO: 1317867 - DNA, 15 bp, Homo sapiens
tgttctgaaaagatg

SEQ ID NO: 1317868 - DNA, 15 bp, Homo sapiens
ttgttctgaaaagat

SEQ ID NO: 1317869 - DNA, 15 bp, Homo sapiens
cttgttctgaaaaga

SEQ ID NO: 1317870 - DNA, 15 bp, Homo sapiens
ccttgttctgaaaag

SEQ ID NO: 1317871 - DNA, 15 bp, Homo sapiens
tccttgttctgaaaa

SEQ ID NO: 1317872 - DNA, 15 bp, Homo sapiens
ttccttgttctgaaa

SEQ ID NO: 1317873 - DNA, 15 bp, Homo sapiens
attccttgttctgaa

SEQ ID NO: 1317874 - DNA, 15 bp, Homo sapiens
tattccttgttctga

SEQ ID NO: 1317875 - DNA, 15 bp, Homo sapiens
gtattccttgttctg

SEQ ID NO: 1317876 - DNA, 15 bp, Homo sapiens
ggtattccttgttct

SEQ ID NO: 1317877 - DNA, 15 bp, Homo sapiens
aggtattccttgttc

SEQ ID NO: 1317878 - DNA, 15 bp, Homo sapiens
gaggtattccttgtt

SEQ ID NO: 1317879 - DNA, 15 bp, Homo sapiens
agaggtattccttgt

SEQ ID NO: 1317880 - DNA, 15 bp, Homo sapiens
cagaggtattccttg

SEQ ID NO: 1317881 - DNA, 15 bp, Homo sapiens
acagaggtattcctt

SEQ ID NO: 1317882 - DNA, 15 bp, Homo sapiens
aacagaggtattcct

SEQ ID NO: 1317883 - DNA, 15 bp, Homo sapiens
caacagaggtattcc

SEQ ID NO: 1317884 - DNA, 15 bp, Homo sapiens
acaacagaggtattc

SEQ ID NO: 1317885 - DNA, 15 bp, Homo sapiens
tacaacagaggtatt

SEQ ID NO: 1317886 - DNA, 15 bp, Homo sapiens
atacaacagaggtat

SEQ ID NO: 1317887 - DNA, 15 bp, Homo sapiens
gatacaacagaggta

SEQ ID NO: 1317888 - DNA, 15 bp, Homo sapiens
agatacaacagaggt

SEQ ID NO: 1317889 - DNA, 15 bp, Homo sapiens
cagatacaacagagg

SEQ ID NO: 1317890 - DNA, 15 bp, Homo sapiens
acagatacaacagag

SEQ ID NO: 1317891 - DNA, 15 bp, Homo sapiens
aacagatacaacaga

SEQ ID NO: 1317892 - DNA, 15 bp, Homo sapiens
caacagatacaacag

SEQ ID NO: 1317893 - DNA, 15 bp, Homo sapiens
acaacagatacaaca

SEQ ID NO: 1317894 - DNA, 15 bp, Homo sapiens
aacaacagatacaac

SEQ ID NO: 1317895 - DNA, 15 bp, Homo sapiens
aaacaacagatacaa

SEQ ID NO: 1317896 - DNA, 15 bp, Homo sapiens
aaaacaacagataca

SEQ ID NO: 1317897 - DNA, 15 bp, Homo sapiens
taaaacaacagatac

SEQ ID NO: 1317898 - DNA, 15 bp, Homo sapiens
ataaaacaacagata

SEQ ID NO: 1317899 - DNA, 15 bp, Homo sapiens
aataaaacaacagat

SEQ ID NO: 1317900 - DNA, 15 bp, Homo sapiens
gaataaaacaacaga

SEQ ID NO: 1317901 - DNA, 15 bp, Homo sapiens
tgaataaaacaacag

SEQ ID NO: 1317902 - DNA, 15 bp, Homo sapiens
ctgaataaaacaaca

SEQ ID NO: 1317903 - DNA, 15 bp, Homo sapiens
tctgaataaaacaac

SEQ ID NO: 1317904 - DNA, 15 bp, Homo sapiens
attctgaataaaaca

SEQ ID NO: 1317905 - DNA, 15 bp, Homo sapiens
gattctgaataaaac

SEQ ID NO: 1317906 - DNA, 15 bp, Homo sapiens
ggattctgaataaaa

SEQ ID NO: 1317907 - DNA, 15 bp, Homo sapiens
gggattctgaataaa

SEQ ID NO: 1317908 - DNA, 15 bp, Homo sapiens
agggattctgaataa

SEQ ID NO: 1317909 - DNA, 15 bp, Homo sapiens
cagggattctgaata

SEQ ID NO: 1317910 - DNA, 15 bp, Homo sapiens
tcagggattctgaat

SEQ ID NO: 1317911 - DNA, 15 bp, Homo sapiens
ttcagggattctgaa

SEQ ID NO: 1317912 - DNA, 15 bp, Homo sapiens
attcagggattctga

SEQ ID NO: 1317913 - DNA, 15 bp, Homo sapiens
aattcagggattctg

SEQ ID NO: 1317914 - DNA, 15 bp, Homo sapiens
gaattcagggattct

SEQ ID NO: 1317915 - DNA, 15 bp, Homo sapiens
tgaattcagggattc

SEQ ID NO: 1317916 - DNA, 15 bp, Homo sapiens
ctgaattcagggatt

SEQ ID NO: 1317917 - DNA, 15 bp, Homo sapiens
actgaattcagggat

SEQ ID NO: 1317918 - DNA, 15 bp, Homo sapiens
tactgaattcaggga

SEQ ID NO: 1317919 - DNA, 15 bp, Homo sapiens
atactgaattcaggg

SEQ ID NO: 1317920 - DNA, 15 bp, Homo sapiens
gatactgaattcagg

SEQ ID NO: 1317921 - DNA, 15 bp, Homo sapiens
ggatactgaattcag

SEQ ID NO: 1317922 - DNA, 15 bp, Homo sapiens
tggatactgaattca

SEQ ID NO: 1317923 - DNA, 15 bp, Homo sapiens
atggatactgaattc

SEQ ID NO: 1317924 - DNA, 15 bp, Homo sapiens
aatggatactgaatt

SEQ ID NO: 1317925 - DNA, 15 bp, Homo sapiens
taatggatactgaat

SEQ ID NO: 1317926 - DNA, 15 bp, Homo sapiens
ttaatggatactgaa

SEQ ID NO: 1317927 - DNA, 15 bp, Homo sapiens
cttaatggatactga

SEQ ID NO: 1317928 - DNA, 15 bp, Homo sapiens
gcttaatggatactg

SEQ ID NO: 1317929 - DNA, 15 bp, Homo sapiens
ggcttaatggatact

SEQ ID NO: 1317930 - DNA, 15 bp, Homo sapiens
aggcttaatggatac

SEQ ID NO: 1317931 - DNA, 15 bp, Homo sapiens
caggcttaatggata

SEQ ID NO: 1317932 - DNA, 15 bp, Homo sapiens
tcaggcttaatggat

SEQ ID NO: 1317933 - DNA, 15 bp, Homo sapiens
ttcaggcttaatgga

SEQ ID NO: 1317934 - DNA, 15 bp, Homo sapiens
cttcaggcttaatgg

SEQ ID NO: 1317935 - DNA, 15 bp, Homo sapiens
acttcaggcttaatg

SEQ ID NO: 1317936 - DNA, 15 bp, Homo sapiens
gacttcaggcttaat

SEQ ID NO: 1317937 - DNA, 15 bp, Homo sapiens
agacttcaggcttaa

SEQ ID NO: 1317938 - DNA, 15 bp, Homo sapiens
aagacttcaggctta

SEQ ID NO: 1317939 - DNA, 15 bp, Homo sapiens
aaagacttcaggctt

SEQ ID NO: 1317940 - DNA, 15 bp, Homo sapiens
aaaagacttcaggct

SEQ ID NO: 1317941 - DNA, 15 bp, Homo sapiens
gaaaagacttcaggc

SEQ ID NO: 1317942 - DNA, 15 bp, Homo sapiens
agaaaagacttcagg

SEQ ID NO: 1317943 - DNA, 15 bp, Homo sapiens
gagaaaagacttcag

SEQ ID NO: 1317944 - DNA, 15 bp, Homo sapiens
tgagaaaagacttca

SEQ ID NO: 1317945 - DNA, 15 bp, Homo sapiens
ctgagaaaagacttc

SEQ ID NO: 1317946 - DNA, 15 bp, Homo sapiens
actgagaaaagactt

SEQ ID NO: 1317947 - DNA, 15 bp, Homo sapiens
gactgagaaaagact

SEQ ID NO: 1317948 - DNA, 15 bp, Homo sapiens
agactgagaaaagac

SEQ ID NO: 1317949 - DNA, 15 bp, Homo sapiens
gagactgagaaaaga

SEQ ID NO: 1317950 - DNA, 15 bp, Homo sapiens
agagactgagaaaag

SEQ ID NO: 1317951 - DNA, 15 bp, Homo sapiens
cagagactgagaaaa

SEQ ID NO: 1317952 - DNA, 15 bp, Homo sapiens
gcagagactgagaaa

SEQ ID NO: 1317953 - DNA, 15 bp, Homo sapiens
tgcagagactgagaa

SEQ ID NO: 1317954 - DNA, 15 bp, Homo sapiens
atgcagagactgaga

SEQ ID NO: 1317955 - DNA, 15 bp, Homo sapiens
gatgcagagactgag

SEQ ID NO: 1317956 - DNA, 15 bp, Homo sapiens
tgatgcagagactga

SEQ ID NO: 1317957 - DNA, 15 bp, Homo sapiens
ctgatgcagagactg

SEQ ID NO: 1317958 - DNA, 15 bp, Homo sapiens
tctgatgcagagact

SEQ ID NO: 1317959 - DNA, 15 bp, Homo sapiens
gtctgatgcagagac

SEQ ID NO: 1317960 - DNA, 15 bp, Homo sapiens
tgtctgatgcagaga

SEQ ID NO: 1317961 - DNA, 15 bp, Homo sapiens
ttgtctgatgcagag

SEQ ID NO: 1317962 - DNA, 15 bp, Homo sapiens
attgtctgatgcaga

SEQ ID NO: 1317963 - DNA, 15 bp, Homo sapiens
gattgtctgatgcag

SEQ ID NO: 1317964 - DNA, 15 bp, Homo sapiens
agattgtctgatgca

SEQ ID NO: 1317965 - DNA, 15 bp, Homo sapiens
aagattgtctgatgc

SEQ ID NO: 1317966 - DNA, 15 bp, Homo sapiens
caagattgtctgatg

SEQ ID NO: 1317967 - DNA, 15 bp, Homo sapiens
acaagattgtctgat

SEQ ID NO: 1317968 - DNA, 15 bp, Homo sapiens
tacaagattgtctga

SEQ ID NO: 1317969 - DNA, 15 bp, Homo sapiens
atacaagattgtctg

SEQ ID NO: 1317970 - DNA, 15 bp, Homo sapiens
aatacaagattgtct

SEQ ID NO: 1317971 - DNA, 15 bp, Homo sapiens
gaatacaagattgtc

SEQ ID NO: 1317972 - DNA, 15 bp, Homo sapiens
agaatacaagattgt

SEQ ID NO: 1317973 - DNA, 15 bp, Homo sapiens
cagaatacaagattg

SEQ ID NO: 1317974 - DNA, 15 bp, Homo sapiens
gcagaatacaagatt

SEQ ID NO: 1317975 - DNA, 15 bp, Homo sapiens
agcagaatacaagat

SEQ ID NO: 1317976 - DNA, 15 bp, Homo sapiens
aagcagaatacaaga

SEQ ID NO: 1317977 - DNA, 15 bp, Homo sapiens
aaagcagaatacaag

SEQ ID NO: 1317978 - DNA, 15 bp, Homo sapiens
aaaagcagaatacaa

SEQ ID NO: 1317979 - DNA, 15 bp, Homo sapiens
caaaagcagaataca

SEQ ID NO: 1317980 - DNA, 15 bp, Homo sapiens
tcaaaagcagaatac

SEQ ID NO: 1317981 - DNA, 15 bp, Homo sapiens
atcaaaagcagaata

SEQ ID NO: 1317982 - DNA, 15 bp, Homo sapiens
gatcaaaagcagaat

SEQ ID NO: 1317983 - DNA, 15 bp, Homo sapiens
agatcaaaagcagaa

SEQ ID NO: 1317984 - DNA, 15 bp, Homo sapiens
cagatcaaaagcaga

SEQ ID NO: 1317985 - DNA, 15 bp, Homo sapiens
gcagatcaaaagcag

SEQ ID NO: 1317986 - DNA, 15 bp, Homo sapiens
tgcagatcaaaagca

SEQ ID NO: 1317987 - DNA, 15 bp, Homo sapiens
ctgcagatcaaaagc

SEQ ID NO: 1317988 - DNA, 15 bp, Homo sapiens
tctgcagatcaaaag

SEQ ID NO: 1317989 - DNA, 15 bp, Homo sapiens
ttctgcagatcaaaa

SEQ ID NO: 1317990 - DNA, 15 bp, Homo sapiens
tttctgcagatcaaa

SEQ ID NO: 1317991 - DNA, 15 bp, Homo sapiens
ttttctgcagatcaa

SEQ ID NO: 1317992 - DNA, 15 bp, Homo sapiens
attttctgcagatca

SEQ ID NO: 1317993 - DNA, 15 bp, Homo sapiens
aattttctgcagatc

SEQ ID NO: 1317994 - DNA, 15 bp, Homo sapiens
taattttctgcagat

SEQ ID NO: 1317995 - DNA, 15 bp, Homo sapiens
ttaattttctgcaga

SEQ ID NO: 1317996 - DNA, 15 bp, Homo sapiens
tttaattttctgcag

SEQ ID NO: 1317997 - DNA, 15 bp, Homo sapiens
gtttaattttctgca

SEQ ID NO: 1317998 - DNA, 15 bp, Homo sapiens
agtttaattttctgc

SEQ ID NO: 1317999 - DNA, 15 bp, Homo sapiens
aagtttaattttctg

SEQ ID NO: 1318000 - DNA, 15 bp, Homo sapiens
caagtttaattttct

SEQ ID NO: 1318001 - DNA, 15 bp, Homo sapiens
acaagtttaattttc

SEQ ID NO: 1318002 - DNA, 15 bp, Homo sapiens
aacaagtttaatttt

SEQ ID NO: 1318003 - DNA, 15 bp, Homo sapiens
aaacaagtttaattt

SEQ ID NO: 1318004 - DNA, 15 bp, Homo sapiens
caaacaagtttaatt

SEQ ID NO: 1318005 - DNA, 15 bp, Homo sapiens
acaaacaagtttaat

SEQ ID NO: 1318006 - DNA, 15 bp, Homo sapiens
aacaaacaagtttaa

SEQ ID NO: 1318007 - DNA, 15 bp, Homo sapiens
aaacaaacaagttta

SEQ ID NO: 1318008 - DNA, 15 bp, Homo sapiens
gaaacaaacaagttt

SEQ ID NO: 1318009 - DNA, 15 bp, Homo sapiens
tgaaacaaacaagtt

SEQ ID NO: 1318010 - DNA, 15 bp, Homo sapiens
atgaaacaaacaagt

SEQ ID NO: 1318011 - DNA, 15 bp, Homo sapiens
gatgaaacaaacaag

SEQ ID NO: 1318012 - DNA, 15 bp, Homo sapiens
ggatgaaacaaacaa

SEQ ID NO: 1318013 - DNA, 15 bp, Homo sapiens
tggatgaaacaaaca

SEQ ID NO: 1318014 - DNA, 15 bp, Homo sapiens
atggatgaaacaaac

SEQ ID NO: 1318015 - DNA, 15 bp, Homo sapiens
aatggatgaaacaaa

SEQ ID NO: 1318016 - DNA, 15 bp, Homo sapiens
aaatggatgaaacaa

SEQ ID NO: 1318017 - DNA, 15 bp, Homo sapiens
taaatggatgaaaca

SEQ ID NO: 1318018 - DNA, 15 bp, Homo sapiens
ataaatggatgaaac

SEQ ID NO: 1318019 - DNA, 15 bp, Homo sapiens
aataaatggatgaaa

SEQ ID NO: 1318020 - DNA, 15 bp, Homo sapiens
taataaatggatgaa

SEQ ID NO: 1318021 - DNA, 15 bp, Homo sapiens
ctaataaatggatga

SEQ ID NO: 1318022 - DNA, 15 bp, Homo sapiens
tctaataaatggatg

SEQ ID NO: 1318023 - DNA, 15 bp, Homo sapiens
atctaataaatggat

SEQ ID NO: 1318024 - DNA, 15 bp, Homo sapiens
aatctaataaatgga

SEQ ID NO: 1318025 - DNA, 15 bp, Homo sapiens
taatctaataaatgg

SEQ ID NO: 1318026 - DNA, 15 bp, Homo sapiens
ctaatctaataaatg

SEQ ID NO: 1318027 - DNA, 15 bp, Homo sapiens
cctaatctaataaat

SEQ ID NO: 1318028 - DNA, 15 bp, Homo sapiens
tcctaatctaataaa

SEQ ID NO: 1318029 - DNA, 15 bp, Homo sapiens
atcctaatctaataa

SEQ ID NO: 1318030 - DNA, 15 bp, Homo sapiens
tatcctaatctaata

SEQ ID NO: 1318031 - DNA, 15 bp, Homo sapiens
gtatcctaatctaat

SEQ ID NO: 1318032 - DNA, 15 bp, Homo sapiens
tgtatcctaatctaa

SEQ ID NO: 1318033 - DNA, 15 bp, Homo sapiens
atgtatcctaatcta

SEQ ID NO: 1318034 - DNA, 15 bp, Homo sapiens
aatgtatcctaatct

SEQ ID NO: 1318035 - DNA, 15 bp, Homo sapiens
aaatgtatcctaatc

SEQ ID NO: 1318036 - DNA, 15 bp, Homo sapiens
taaatgtatcctaat

SEQ ID NO: 1318037 - DNA, 15 bp, Homo sapiens
ataaatgtatcctaa

SEQ ID NO: 1318038 - DNA, 15 bp, Homo sapiens
gataaatgtatccta

SEQ ID NO: 1318039 - DNA, 15 bp, Homo sapiens
agataaatgtatcct

SEQ ID NO: 1318040 - DNA, 15 bp, Homo sapiens
gagataaatgtatcc

SEQ ID NO: 1318041 - DNA, 15 bp, Homo sapiens
agagataaatgtatc

SEQ ID NO: 1318042 - DNA, 15 bp, Homo sapiens
aagagataaatgtat

SEQ ID NO: 1318043 - DNA, 15 bp, Homo sapiens
gaagagataaatgta

SEQ ID NO: 1318044 - DNA, 15 bp, Homo sapiens
agaagagataaatgt

SEQ ID NO: 1318045 - DNA, 15 bp, Homo sapiens
cagaagagataaatg

SEQ ID NO: 1318046 - DNA, 15 bp, Homo sapiens
acagaagagataaat

SEQ ID NO: 1318047 - DNA, 15 bp, Homo sapiens
gacagaagagataaa

SEQ ID NO: 1318048 - DNA, 15 bp, Homo sapiens
tgacagaagagataa

SEQ ID NO: 1318049 - DNA, 15 bp, Homo sapiens
ctgacagaagagata

SEQ ID NO: 1318050 - DNA, 15 bp, Homo sapiens
actgacagaagagat

SEQ ID NO: 1318051 - DNA, 15 bp, Homo sapiens
gactgacagaagaga

SEQ ID NO: 1318052 - DNA, 15 bp, Homo sapiens
ggactgacagaagag

SEQ ID NO: 1318053 - DNA, 15 bp, Homo sapiens
tggactgacagaaga

SEQ ID NO: 1318054 - DNA, 15 bp, Homo sapiens
ttggactgacagaag

SEQ ID NO: 1318055 - DNA, 15 bp, Homo sapiens
tttggactgacagaa

SEQ ID NO: 1318056 - DNA, 15 bp, Homo sapiens
gtttggactgacaga

SEQ ID NO: 1318057 - DNA, 15 bp, Homo sapiens
tgtttggactgacag

SEQ ID NO: 1318058 - DNA, 15 bp, Homo sapiens
gtgtttggactgaca

SEQ ID NO: 1318059 - DNA, 15 bp, Homo sapiens
tgtgtttggactgac

SEQ ID NO: 1318060 - DNA, 15 bp, Homo sapiens
ttgtgtttggactga

SEQ ID NO: 1318061 - DNA, 15 bp, Homo sapiens
gttgtgtttggactg

SEQ ID NO: 1318062 - DNA, 15 bp, Homo sapiens
agttgtgtttggact

SEQ ID NO: 1318063 - DNA, 15 bp, Homo sapiens
aagttgtgtttggac

SEQ ID NO: 1318064 - DNA, 15 bp, Homo sapiens
caagttgtgtttgga

SEQ ID NO: 1318065 - DNA, 15 bp, Homo sapiens
ccaagttgtgtttgg

SEQ ID NO: 1318066 - DNA, 15 bp, Homo sapiens
accaagttgtgtttg

SEQ ID NO: 1318067 - DNA, 15 bp, Homo sapiens
gaccaagttgtgttt

SEQ ID NO: 1318068 - DNA, 15 bp, Homo sapiens
ggaccaagttgtgtt

SEQ ID NO: 1318069 - DNA, 15 bp, Homo sapiens
cggaccaagttgtgt

SEQ ID NO: 1318070 - DNA, 15 bp, Homo sapiens
gcggaccaagttgtg

SEQ ID NO: 1318071 - DNA, 15 bp, Homo sapiens
agcggaccaagttgt

SEQ ID NO: 1318072 - DNA, 15 bp, Homo sapiens
tagcggaccaagttg

SEQ ID NO: 1318073 - DNA, 15 bp, Homo sapiens
ttagcggaccaagtt

SEQ ID NO: 1318074 - DNA, 15 bp, Homo sapiens
attagcggaccaagt

SEQ ID NO: 1318075 - DNA, 15 bp, Homo sapiens
gattagcggaccaag

SEQ ID NO: 1318076 - DNA, 15 bp, Homo sapiens
agattagcggaccaa

SEQ ID NO: 1318077 - DNA, 15 bp, Homo sapiens
tagattagcggacca

SEQ ID NO: 1318078 - DNA, 15 bp, Homo sapiens
atagattagcggacc

SEQ ID NO: 1318079 - DNA, 15 bp, Homo sapiens
aatagattagcggac

SEQ ID NO: 1318080 - DNA, 15 bp, Homo sapiens
aaatagattagcgga

SEQ ID NO: 1318081 - DNA, 15 bp, Homo sapiens
taaatagattagcgg

SEQ ID NO: 1318082 - DNA, 15 bp, Homo sapiens
ataaatagattagcg

SEQ ID NO: 1318083 - DNA, 15 bp, Homo sapiens
cataaatagattagc

SEQ ID NO: 1318084 - DNA, 15 bp, Homo sapiens
gcataaatagattag

SEQ ID NO: 1318085 - DNA, 15 bp, Homo sapiens
ggcataaatagatta

SEQ ID NO: 1318086 - DNA, 15 bp, Homo sapiens
tggcataaatagatt

SEQ ID NO: 1318087 - DNA, 15 bp, Homo sapiens
gtggcataaatagat

SEQ ID NO: 1318088 - DNA, 15 bp, Homo sapiens
agtggcataaataga

SEQ ID NO: 1318089 - DNA, 15 bp, Homo sapiens
aagtggcataaatag

SEQ ID NO: 1318090 - DNA, 15 bp, Homo sapiens
aaagtggcataaata

SEQ ID NO: 1318091 - DNA, 15 bp, Homo sapiens
caaagtggcataaat

SEQ ID NO: 1318092 - DNA, 15 bp, Homo sapiens
tcaaagtggcataaa

SEQ ID NO: 1318093 - DNA, 15 bp, Homo sapiens
ttcaaagtggcataa

SEQ ID NO: 1318094 - DNA, 15 bp, Homo sapiens
tttcaaagtggcata

SEQ ID NO: 1318095 - DNA, 15 bp, Homo sapiens
atttcaaagtggcat

SEQ ID NO: 1318096 - DNA, 15 bp, Homo sapiens
tatttcaaagtggca

SEQ ID NO: 1318097 - DNA, 15 bp, Homo sapiens
ctatttcaaagtggc

SEQ ID NO: 1318098 - DNA, 15 bp, Homo sapiens
cctatttcaaagtgg

SEQ ID NO: 1318099 - DNA, 15 bp, Homo sapiens
tcctatttcaaagtg

SEQ ID NO: 1318100 - DNA, 15 bp, Homo sapiens
gtcctatttcaaagt

SEQ ID NO: 1318101 - DNA, 15 bp, Homo sapiens
tgtcctatttcaaag

SEQ ID NO: 1318102 - DNA, 15 bp, Homo sapiens
ttgtcctatttcaaa

SEQ ID NO: 1318103 - DNA, 15 bp, Homo sapiens
attgtcctatttcaa

SEQ ID NO: 1318104 - DNA, 15 bp, Homo sapiens
cattgtcctatttca

SEQ ID NO: 1318105 - DNA, 15 bp, Homo sapiens
acattgtcctatttc

SEQ ID NO: 1318106 - DNA, 15 bp, Homo sapiens
tacattgtcctattt

SEQ ID NO: 1318107 - DNA, 15 bp, Homo sapiens
atacattgtcctatt

SEQ ID NO: 1318108 - DNA, 15 bp, Homo sapiens
tatacattgtcctat

SEQ ID NO: 1318109 - DNA, 15 bp, Homo sapiens
atatacattgtccta

SEQ ID NO: 1318110 - DNA, 15 bp, Homo sapiens
aatatacattgtcct

SEQ ID NO: 1318111 - DNA, 15 bp, Homo sapiens
aaatatacattgtcc

SEQ ID NO: 1318112 - DNA, 15 bp, Homo sapiens
taaatatacattgtc

SEQ ID NO: 1318113 - DNA, 15 bp, Homo sapiens
ctaaatatacattgt

SEQ ID NO: 1318114 - DNA, 15 bp, Homo sapiens
cctaaatatacattg

SEQ ID NO: 1318115 - DNA, 15 bp, Homo sapiens
acctaaatatacatt

SEQ ID NO: 1318116 - DNA, 15 bp, Homo sapiens
aacctaaatatacat

SEQ ID NO: 1318117 - DNA, 15 bp, Homo sapiens
gaacctaaatataca

SEQ ID NO: 1318118 - DNA, 15 bp, Homo sapiens
ggaacctaaatatac

SEQ ID NO: 1318119 - DNA, 15 bp, Homo sapiens
gggaacctaaatata

SEQ ID NO: 1318120 - DNA, 15 bp, Homo sapiens
tgggaacctaaatat

SEQ ID NO: 1318121 - DNA, 15 bp, Homo sapiens
gtgggaacctaaata

SEQ ID NO: 1318122 - DNA, 15 bp, Homo sapiens
agtgggaacctaaat

SEQ ID NO: 1318123 - DNA, 15 bp, Homo sapiens
aagtgggaacctaaa

SEQ ID NO: 1318124 - DNA, 15 bp, Homo sapiens
gaagtgggaacctaa

SEQ ID NO: 1318125 - DNA, 15 bp, Homo sapiens
agaagtgggaaccta

SEQ ID NO: 1318126 - DNA, 15 bp, Homo sapiens
gagaagtgggaacct

SEQ ID NO: 1318127 - DNA, 15 bp, Homo sapiens
agagaagtgggaacc

SEQ ID NO: 1318128 - DNA, 15 bp, Homo sapiens
cagagaagtgggaac

SEQ ID NO: 1318129 - DNA, 15 bp, Homo sapiens
gcagagaagtgggaa

SEQ ID NO: 1318130 - DNA, 15 bp, Homo sapiens
tgcagagaagtggga

SEQ ID NO: 1318131 - DNA, 15 bp, Homo sapiens
ctgcagagaagtggg

SEQ ID NO: 1318132 - DNA, 15 bp, Homo sapiens
cctgcagagaagtgg

SEQ ID NO: 1318133 - DNA, 15 bp, Homo sapiens
ccctgcagagaagtg

SEQ ID NO: 1318134 - DNA, 15 bp, Homo sapiens
gccctgcagagaagt

SEQ ID NO: 1318135 - DNA, 15 bp, Homo sapiens
tgccctgcagagaag

SEQ ID NO: 1318136 - DNA, 15 bp, Homo sapiens
ttgccctgcagagaa

SEQ ID NO: 1318137 - DNA, 15 bp, Homo sapiens
cttgccctgcagaga

SEQ ID NO: 1318138 - DNA, 15 bp, Homo sapiens
acttgccctgcagag

SEQ ID NO: 1318139 - DNA, 15 bp, Homo sapiens
aacttgccctgcaga

SEQ ID NO: 1318140 - DNA, 15 bp, Homo sapiens
aaacttgccctgcag

SEQ ID NO: 1318141 - DNA, 15 bp, Homo sapiens
aaaacttgccctgca

SEQ ID NO: 1318142 - DNA, 15 bp, Homo sapiens
aaaaacttgccctgc

SEQ ID NO: 1318143 - DNA, 15 bp, Homo sapiens
aaaaaacttgccctg

SEQ ID NO: 1318144 - DNA, 15 bp, Homo sapiens
aaaaaaacttgccct

SEQ ID NO: 1318145 - DNA, 15 bp, Homo sapiens
taaaaaaacttgccc

SEQ ID NO: 1318146 - DNA, 15 bp, Homo sapiens
ttaaaaaaacttgcc

SEQ ID NO: 1318147 - DNA, 15 bp, Homo sapiens
cttaaaaaaacttgc

SEQ ID NO: 1318148 - DNA, 15 bp, Homo sapiens
ccttaaaaaaacttg

SEQ ID NO: 1318149 - DNA, 15 bp, Homo sapiens
cccttaaaaaaactt

SEQ ID NO: 1318150 - DNA, 15 bp, Homo sapiens
ccccttaaaaaaact

SEQ ID NO: 1318151 - DNA, 15 bp, Homo sapiens
tccccttaaaaaaac

SEQ ID NO: 1318152 - DNA, 15 bp, Homo sapiens
ctccccttaaaaaaa

SEQ ID NO: 1318153 - DNA, 15 bp, Homo sapiens
cctccccttaaaaaa

SEQ ID NO: 1318154 - DNA, 15 bp, Homo sapiens
acctccccttaaaaa

SEQ ID NO: 1318155 - DNA, 15 bp, Homo sapiens
aacctccccttaaaa

SEQ ID NO: 1318156 - DNA, 15 bp, Homo sapiens
aaacctccccttaaa

SEQ ID NO: 1318157 - DNA, 15 bp, Homo sapiens
caaacctccccttaa

SEQ ID NO: 1318158 - DNA, 15 bp, Homo sapiens
gcaaacctcccctta

SEQ ID NO: 1318159 - DNA, 15 bp, Homo sapiens
tgcaaacctcccctt

SEQ ID NO: 1318160 - DNA, 15 bp, Homo sapiens
atgcaaacctcccct

SEQ ID NO: 1318161 - DNA, 15 bp, Homo sapiens
aatgcaaacctcccc

SEQ ID NO: 1318162 - DNA, 15 bp, Homo sapiens
aaatgcaaacctccc

SEQ ID NO: 1318163 - DNA, 15 bp, Homo sapiens
caaatgcaaacctcc

SEQ ID NO: 1318164 - DNA, 15 bp, Homo sapiens
acaaatgcaaacctc

SEQ ID NO: 1318165 - DNA, 15 bp, Homo sapiens
aacaaatgcaaacct

SEQ ID NO: 1318166 - DNA, 15 bp, Homo sapiens
aaacaaatgcaaacc

SEQ ID NO: 1318167 - DNA, 15 bp, Homo sapiens
aaaacaaatgcaaac

SEQ ID NO: 1318168 - DNA, 15 bp, Homo sapiens
gaaaacaaatgcaaa

SEQ ID NO: 1318169 - DNA, 15 bp, Homo sapiens
agaaaacaaatgcaa

SEQ ID NO: 1318170 - DNA, 15 bp, Homo sapiens
gagaaaacaaatgca

SEQ ID NO: 1318171 - DNA, 15 bp, Homo sapiens
tgagaaaacaaatgc

SEQ ID NO: 1318172 - DNA, 15 bp, Homo sapiens
ttgagaaaacaaatg

SEQ ID NO: 1318173 - DNA, 15 bp, Homo sapiens
attgagaaaacaaat

SEQ ID NO: 1318174 - DNA, 15 bp, Homo sapiens
aattgagaaaacaaa

SEQ ID NO: 1318175 - DNA, 15 bp, Homo sapiens
aaattgagaaaacaa

SEQ ID NO: 1318176 - DNA, 15 bp, Homo sapiens
caaattgagaaaaca

SEQ ID NO: 1318177 - DNA, 15 bp, Homo sapiens
gcaaattgagaaaac

SEQ ID NO: 1318178 - DNA, 15 bp, Homo sapiens
ggcaaattgagaaaa

SEQ ID NO: 1318179 - DNA, 15 bp, Homo sapiens
aggcaaattgagaaa

SEQ ID NO: 1318180 - DNA, 15 bp, Homo sapiens
gaggcaaattgagaa

SEQ ID NO: 1318181 - DNA, 15 bp, Homo sapiens
tgaggcaaattgaga

SEQ ID NO: 1318182 - DNA, 15 bp, Homo sapiens
ttgaggcaaattgag

SEQ ID NO: 1318183 - DNA, 15 bp, Homo sapiens
attgaggcaaattga

SEQ ID NO: 1318184 - DNA, 15 bp, Homo sapiens
aattgaggcaaattg

SEQ ID NO: 1318185 - DNA, 15 bp, Homo sapiens
taattgaggcaaatt

SEQ ID NO: 1318186 - DNA, 15 bp, Homo sapiens
ctaattgaggcaaat

SEQ ID NO: 1318187 - DNA, 15 bp, Homo sapiens
cctaattgaggcaaa

SEQ ID NO: 1318188 - DNA, 15 bp, Homo sapiens
tcctaattgaggcaa

SEQ ID NO: 1318189 - DNA, 15 bp, Homo sapiens
gtcctaattgaggca

SEQ ID NO: 1318190 - DNA, 15 bp, Homo sapiens
tgtcctaattgaggc

SEQ ID NO: 1318191 - DNA, 15 bp, Homo sapiens
atgtcctaattgagg

SEQ ID NO: 1318192 - DNA, 15 bp, Homo sapiens
catgtcctaattgag

SEQ ID NO: 1318193 - DNA, 15 bp, Homo sapiens
gcatgtcctaattga

SEQ ID NO: 1318194 - DNA, 15 bp, Homo sapiens
agcatgtcctaattg

SEQ ID NO: 1318195 - DNA, 15 bp, Homo sapiens
tagcatgtcctaatt

SEQ ID NO: 1318196 - DNA, 15 bp, Homo sapiens
ctagcatgtcctaat

SEQ ID NO: 1318197 - DNA, 15 bp, Homo sapiens
tctagcatgtcctaa

SEQ ID NO: 1318198 - DNA, 15 bp, Homo sapiens
gtctagcatgtccta

SEQ ID NO: 1318199 - DNA, 15 bp, Homo sapiens
tgtctagcatgtcct

SEQ ID NO: 1318200 - DNA, 15 bp, Homo sapiens
gtgtctagcatgtcc

SEQ ID NO: 1318201 - DNA, 15 bp, Homo sapiens
tgtgtctagcatgtc

SEQ ID NO: 1318202 - DNA, 15 bp, Homo sapiens
gtgtgtctagcatgt

SEQ ID NO: 1318203 - DNA, 15 bp, Homo sapiens
tgtgtgtctagcatg

SEQ ID NO: 1318204 - DNA, 15 bp, Homo sapiens
atgtgtgtctagcat

SEQ ID NO: 1318205 - DNA, 15 bp, Homo sapiens
gatgtgtgtctagca

SEQ ID NO: 1318206 - DNA, 15 bp, Homo sapiens
agatgtgtgtctagc

SEQ ID NO: 1318207 - DNA, 15 bp, Homo sapiens
aagatgtgtgtctag

SEQ ID NO: 1318208 - DNA, 15 bp, Homo sapiens
taagatgtgtgtcta

SEQ ID NO: 1318209 - DNA, 15 bp, Homo sapiens
ataagatgtgtgtct

SEQ ID NO: 1318210 - DNA, 15 bp, Homo sapiens
aataagatgtgtgtc

SEQ ID NO: 1318211 - DNA, 15 bp, Homo sapiens
gaataagatgtgtgt

SEQ ID NO: 1318212 - DNA, 15 bp, Homo sapiens
tgaataagatgtgtg

SEQ ID NO: 1318213 - DNA, 15 bp, Homo sapiens
ttgaataagatgtgt

SEQ ID NO: 1318214 - DNA, 15 bp, Homo sapiens
tttgaataagatgtg

SEQ ID NO: 1318215 - DNA, 15 bp, Homo sapiens
gtttgaataagatgt

SEQ ID NO: 1318216 - DNA, 15 bp, Homo sapiens
tgtttgaataagatg

SEQ ID NO: 1318217 - DNA, 15 bp, Homo sapiens
gtgtttgaataagat

SEQ ID NO: 1318218 - DNA, 15 bp, Homo sapiens
ggtgtttgaataaga

SEQ ID NO: 1318219 - DNA, 15 bp, Homo sapiens
gggtgtttgaataag

SEQ ID NO: 1318220 - DNA, 15 bp, Homo sapiens
agggtgtttgaataa

SEQ ID NO: 1318221 - DNA, 15 bp, Homo sapiens
cagggtgtttgaata

SEQ ID NO: 1318222 - DNA, 15 bp, Homo sapiens
acagggtgtttgaat

SEQ ID NO: 1318223 - DNA, 15 bp, Homo sapiens
tacagggtgtttgaa

SEQ ID NO: 1318224 - DNA, 15 bp, Homo sapiens
gtacagggtgtttga

SEQ ID NO: 1318225 - DNA, 15 bp, Homo sapiens
cgtacagggtgtttg

SEQ ID NO: 1318226 - DNA, 15 bp, Homo sapiens
acgtacagggtgttt

SEQ ID NO: 1318227 - DNA, 15 bp, Homo sapiens
aacgtacagggtgtt

SEQ ID NO: 1318228 - DNA, 15 bp, Homo sapiens
aaacgtacagggtgt

SEQ ID NO: 1318229 - DNA, 15 bp, Homo sapiens
aaaacgtacagggtg

SEQ ID NO: 1318230 - DNA, 15 bp, Homo sapiens
aaaaacgtacagggt

SEQ ID NO: 1318231 - DNA, 15 bp, Homo sapiens
taaaaacgtacaggg

SEQ ID NO: 1318232 - DNA, 15 bp, Homo sapiens
ataaaaacgtacagg

SEQ ID NO: 1318233 - DNA, 15 bp, Homo sapiens
tataaaaacgtacag

SEQ ID NO: 1318234 - DNA, 15 bp, Homo sapiens
ttataaaaacgtaca

SEQ ID NO: 1318235 - DNA, 15 bp, Homo sapiens
tttataaaaacgtac

SEQ ID NO: 1318236 - DNA, 15 bp, Homo sapiens
gtttataaaaacgta

SEQ ID NO: 1318237 - DNA, 15 bp, Homo sapiens
tgtttataaaaacgt

SEQ ID NO: 1318238 - DNA, 15 bp, Homo sapiens
ctgtttataaaaacg

SEQ ID NO: 1318239 - DNA, 15 bp, Homo sapiens
gctgtttataaaaac

SEQ ID NO: 1318240 - DNA, 15 bp, Homo sapiens
tgctgtttataaaaa

SEQ ID NO: 1318241 - DNA, 15 bp, Homo sapiens
ctgctgtttataaaa

SEQ ID NO: 1318242 - DNA, 15 bp, Homo sapiens
tctgctgtttataaa

SEQ ID NO: 1318243 - DNA, 15 bp, Homo sapiens
gtctgctgtttataa

SEQ ID NO: 1318244 - DNA, 15 bp, Homo sapiens
agtctgctgtttata

SEQ ID NO: 1318245 - DNA, 15 bp, Homo sapiens
cagtctgctgtttat

SEQ ID NO: 1318246 - DNA, 15 bp, Homo sapiens
ccagtctgctgttta

SEQ ID NO: 1318247 - DNA, 15 bp, Homo sapiens
tccagtctgctgttt

SEQ ID NO: 1318248 - DNA, 15 bp, Homo sapiens
ttccagtctgctgtt

SEQ ID NO: 1318249 - DNA, 15 bp, Homo sapiens
attccagtctgctgt

SEQ ID NO: 1318250 - DNA, 15 bp, Homo sapiens
aattccagtctgctg

SEQ ID NO: 1318251 - DNA, 15 bp, Homo sapiens
caattccagtctgct

SEQ ID NO: 1318252 - DNA, 15 bp, Homo sapiens
acaattccagtctgc

SEQ ID NO: 1318253 - DNA, 15 bp, Homo sapiens
aacaattccagtctg

SEQ ID NO: 1318254 - DNA, 15 bp, Homo sapiens
taacaattccagtct

SEQ ID NO: 1318255 - DNA, 15 bp, Homo sapiens
ttaacaattccagtc

SEQ ID NO: 1318256 - DNA, 15 bp, Homo sapiens
cttaacaattccagt

SEQ ID NO: 1318257 - DNA, 15 bp, Homo sapiens
acttaacaattccag

SEQ ID NO: 1318258 - DNA, 15 bp, Homo sapiens
tacttaacaattcca

SEQ ID NO: 1318259 - DNA, 15 bp, Homo sapiens
atacttaacaattcc

SEQ ID NO: 1318260 - DNA, 15 bp, Homo sapiens
tatacttaacaattc

SEQ ID NO: 1318261 - DNA, 15 bp, Homo sapiens
atatacttaacaatt

SEQ ID NO: 1318262 - DNA, 15 bp, Homo sapiens
gatatacttaacaat

SEQ ID NO: 1318263 - DNA, 15 bp, Homo sapiens
ggatatacttaacaa

SEQ ID NO: 1318264 - DNA, 15 bp, Homo sapiens
tggatatacttaaca

SEQ ID NO: 1318265 - DNA, 15 bp, Homo sapiens
ttggatatacttaac

SEQ ID NO: 1318266 - DNA, 15 bp, Homo sapiens
gttggatatacttaa

SEQ ID NO: 1318267 - DNA, 15 bp, Homo sapiens
agttggatatactta

SEQ ID NO: 1318268 - DNA, 15 bp, Homo sapiens
cagttggatatactt

SEQ ID NO: 1318269 - DNA, 15 bp, Homo sapiens
gcagttggatatact

SEQ ID NO: 1318270 - DNA, 15 bp, Homo sapiens
agcagttggatatac

SEQ ID NO: 1318271 - DNA, 15 bp, Homo sapiens
tcctccaactccaaa

SEQ ID NO: 1318272 - DNA, 15 bp, Homo sapiens
ttcctccaactccaa

SEQ ID NO: 1318273 - DNA, 15 bp, Homo sapiens
cttcctccaactcca

SEQ ID NO: 1318274 - DNA, 15 bp, Homo sapiens
tcttcctccaactcc

SEQ ID NO: 1318275 - DNA, 15 bp, Homo sapiens
gtcttcctccaactc

SEQ ID NO: 1318276 - DNA, 15 bp, Homo sapiens
tgtcttcctccaact

SEQ ID NO: 1318277 - DNA, 15 bp, Homo sapiens
gtgtcttcctccaac

SEQ ID NO: 1318278 - DNA, 15 bp, Homo sapiens
agtgtcttcctccaa

SEQ ID NO: 1318279 - DNA, 15 bp, Homo sapiens
cagtgtcttcctcca

SEQ ID NO: 1318280 - DNA, 15 bp, Homo sapiens
ccagtgtcttcctcc

SEQ ID NO: 1318281 - DNA, 15 bp, Homo sapiens
gccagtgtcttcctc

SEQ ID NO: 1318282 - DNA, 15 bp, Homo sapiens
ggccagtgtcttcct

SEQ ID NO: 1318283 - DNA, 15 bp, Homo sapiens
aggccagtgtcttcc

SEQ ID NO: 1318284 - DNA, 15 bp, Homo sapiens
caggccagtgtcttc

SEQ ID NO: 1318285 - DNA, 15 bp, Homo sapiens
acaggccagtgtctt

SEQ ID NO: 1318286 - DNA, 15 bp, Homo sapiens
aacaggccagtgtct

SEQ ID NO: 1318287 - DNA, 15 bp, Homo sapiens
caacaggccagtgtc

SEQ ID NO: 1318288 - DNA, 15 bp, Homo sapiens
gcaacaggccagtgt

SEQ ID NO: 1318289 - DNA, 15 bp, Homo sapiens
agcaacaggccagtg

SEQ ID NO: 1318290 - DNA, 15 bp, Homo sapiens
gagcaacaggccagt

SEQ ID NO: 1318291 - DNA, 15 bp, Homo sapiens
agagcaacaggccag

SEQ ID NO: 1318292 - DNA, 15 bp, Homo sapiens
aagagcaacaggcca

SEQ ID NO: 1318293 - DNA, 15 bp, Homo sapiens
taagagcaacaggcc

SEQ ID NO: 1318294 - DNA, 15 bp, Homo sapiens
gtaagagcaacaggc

SEQ ID NO: 1318295 - DNA, 15 bp, Homo sapiens
agtaagagcaacagg

SEQ ID NO: 1318296 - DNA, 15 bp, Homo sapiens
tagtaagagcaacag

SEQ ID NO: 1318297 - DNA, 15 bp, Homo sapiens
ttagtaagagcaaca

SEQ ID NO: 1318298 - DNA, 15 bp, Homo sapiens
attagtaagagcaac

SEQ ID NO: 1318299 - DNA, 15 bp, Homo sapiens
gattagtaagagcaa

SEQ ID NO: 1318300 - DNA, 15 bp, Homo sapiens
agattagtaagagca

SEQ ID NO: 1318301 - DNA, 15 bp, Homo sapiens
gagattagtaagagc

SEQ ID NO: 1318302 - DNA, 15 bp, Homo sapiens
agagattagtaagag

SEQ ID NO: 1318303 - DNA, 15 bp, Homo sapiens
gagagattagtaaga

SEQ ID NO: 1318304 - DNA, 15 bp, Homo sapiens
agagagattagtaag

SEQ ID NO: 1318305 - DNA, 15 bp, Homo sapiens
gagagagattagtaa

SEQ ID NO: 1318306 - DNA, 15 bp, Homo sapiens
tagagagagattagt

SEQ ID NO: 1318307 - DNA, 15 bp, Homo sapiens
ctagagagagattag

SEQ ID NO: 1318308 - DNA, 15 bp, Homo sapiens
gctagagagagatta

SEQ ID NO: 1318309 - DNA, 15 bp, Homo sapiens
ggctagagagagatt

SEQ ID NO: 1318310 - DNA, 15 bp, Homo sapiens
gggctagagagagat

SEQ ID NO: 1318311 - DNA, 15 bp, Homo sapiens
ggggctagagagaga

SEQ ID NO: 1318312 - DNA, 15 bp, Homo sapiens
aggggctagagagag

SEQ ID NO: 1318313 - DNA, 15 bp, Homo sapiens
aaggggctagagaga

SEQ ID NO: 1318314 - DNA, 15 bp, Homo sapiens
caaggggctagagag

SEQ ID NO: 1318315 - DNA, 15 bp, Homo sapiens
acaaggggctagaga

SEQ ID NO: 1318316 - DNA, 15 bp, Homo sapiens
tacaaggggctagag

SEQ ID NO: 1318317 - DNA, 15 bp, Homo sapiens
ttacaaggggctaga

SEQ ID NO: 1318318 - DNA, 15 bp, Homo sapiens
attacaaggggctag

SEQ ID NO: 1318319 - DNA, 15 bp, Homo sapiens
cattacaaggggcta

SEQ ID NO: 1318320 - DNA, 15 bp, Homo sapiens
tcattacaaggggct

SEQ ID NO: 1318321 - DNA, 15 bp, Homo sapiens
atcattacaaggggc

SEQ ID NO: 1318322 - DNA, 15 bp, Homo sapiens
aatcattacaagggg

SEQ ID NO: 1318323 - DNA, 15 bp, Homo sapiens
taatcattacaaggg

SEQ ID NO: 1318324 - DNA, 15 bp, Homo sapiens
ataatcattacaagg

SEQ ID NO: 1318325 - DNA, 15 bp, Homo sapiens
aataatcattacaag

SEQ ID NO: 1318326 - DNA, 15 bp, Homo sapiens
aaataatcattacaa

SEQ ID NO: 1318327 - DNA, 15 bp, Homo sapiens
caaataatcattaca

SEQ ID NO: 1318328 - DNA, 15 bp, Homo sapiens
ccaaataatcattac

SEQ ID NO: 1318329 - DNA, 15 bp, Homo sapiens
cccaaataatcatta

SEQ ID NO: 1318330 - DNA, 15 bp, Homo sapiens
ccccaaataatcatt

SEQ ID NO: 1318331 - DNA, 15 bp, Homo sapiens
tccccaaataatcat

SEQ ID NO: 1318332 - DNA, 15 bp, Homo sapiens
ctccccaaataatca

SEQ ID NO: 1318333 - DNA, 15 bp, Homo sapiens
tctccccaaataatc

SEQ ID NO: 1318334 - DNA, 15 bp, Homo sapiens
atctccccaaataat

SEQ ID NO: 1318335 - DNA, 15 bp, Homo sapiens
gatctccccaaataa

SEQ ID NO: 1318336 - DNA, 15 bp, Homo sapiens
agatctccccaaata

SEQ ID NO: 1318337 - DNA, 15 bp, Homo sapiens
aagatctccccaaat

SEQ ID NO: 1318338 - DNA, 15 bp, Homo sapiens
aaagatctccccaaa

SEQ ID NO: 1318339 - DNA, 15 bp, Homo sapiens
aaaagatctccccaa

SEQ ID NO: 1318340 - DNA, 15 bp, Homo sapiens
gaaaagatctcccca

SEQ ID NO: 1318341 - DNA, 15 bp, Homo sapiens
agaaaagatctcccc

SEQ ID NO: 1318342 - DNA, 15 bp, Homo sapiens
gagaaaagatctccc

SEQ ID NO: 1318343 - DNA, 15 bp, Homo sapiens
agagaaaagatctcc

SEQ ID NO: 1318344 - DNA, 15 bp, Homo sapiens
cagagaaaagatctc

SEQ ID NO: 1318345 - DNA, 15 bp, Homo sapiens
tcagagaaaagatct

SEQ ID NO: 1318346 - DNA, 15 bp, Homo sapiens
ttcagagaaaagatc

SEQ ID NO: 1318347 - DNA, 15 bp, Homo sapiens
attcagagaaaagat

SEQ ID NO: 1318348 - DNA, 15 bp, Homo sapiens
cattcagagaaaaga

SEQ ID NO: 1318349 - DNA, 15 bp, Homo sapiens
tcattcagagaaaag

SEQ ID NO: 1318350 - DNA, 15 bp, Homo sapiens
atcattcagagaaaa

SEQ ID NO: 1318351 - DNA, 15 bp, Homo sapiens
aatcattcagagaaa

SEQ ID NO: 1318352 - DNA, 15 bp, Homo sapiens
aaatcattcagagaa

SEQ ID NO: 1318353 - DNA, 15 bp, Homo sapiens
taaatcattcagaga

SEQ ID NO: 1318354 - DNA, 15 bp, Homo sapiens
ttaaatcattcagag

SEQ ID NO: 1318355 - DNA, 15 bp, Homo sapiens
cttaaatcattcaga

SEQ ID NO: 1318356 - DNA, 15 bp, Homo sapiens
gcttaaatcattcag

SEQ ID NO: 1318357 - DNA, 15 bp, Homo sapiens
tgcttaaatcattca

SEQ ID NO: 1318358 - DNA, 15 bp, Homo sapiens
ttgcttaaatcattc

SEQ ID NO: 1318359 - DNA, 15 bp, Homo sapiens
tttgcttaaatcatt

SEQ ID NO: 1318360 - DNA, 15 bp, Homo sapiens
ttttgcttaaatcat

SEQ ID NO: 1318361 - DNA, 15 bp, Homo sapiens
gttttgcttaaatca

SEQ ID NO: 1318362 - DNA, 15 bp, Homo sapiens
tgttttgcttaaatc

SEQ ID NO: 1318363 - DNA, 15 bp, Homo sapiens
ctgttttgcttaaat

SEQ ID NO: 1318364 - DNA, 15 bp, Homo sapiens
cctgttttgcttaaa

SEQ ID NO: 1318365 - DNA, 15 bp, Homo sapiens
gcctgttttgcttaa

SEQ ID NO: 1318366 - DNA, 15 bp, Homo sapiens
ggcctgttttgctta

SEQ ID NO: 1318367 - DNA, 15 bp, Homo sapiens
gggcctgttttgctt

SEQ ID NO: 1318368 - DNA, 15 bp, Homo sapiens
ggggcctgttttgct

SEQ ID NO: 1318369 - DNA, 15 bp, Homo sapiens
aggggcctgttttgc

SEQ ID NO: 1318370 - DNA, 15 bp, Homo sapiens
gaggggcctgttttg

SEQ ID NO: 1318371 - DNA, 15 bp, Homo sapiens
ggaggggcctgtttt

SEQ ID NO: 1318372 - DNA, 15 bp, Homo sapiens
tggaggggcctgttt

SEQ ID NO: 1318373 - DNA, 15 bp, Homo sapiens
ctggaggggcctgtt

SEQ ID NO: 1318374 - DNA, 15 bp, Homo sapiens
tctggaggggcctgt

SEQ ID NO: 1318375 - DNA, 15 bp, Homo sapiens
ttctggaggggcctg

SEQ ID NO: 1318376 - DNA, 15 bp, Homo sapiens
tttctggaggggcct

SEQ ID NO: 1318377 - DNA, 15 bp, Homo sapiens
atttctggaggggcc

SEQ ID NO: 1318378 - DNA, 15 bp, Homo sapiens
catttctggaggggc

SEQ ID NO: 1318379 - DNA, 15 bp, Homo sapiens
acatttctggagggg

SEQ ID NO: 1318380 - DNA, 15 bp, Homo sapiens
gacatttctggaggg

SEQ ID NO: 1318381 - DNA, 15 bp, Homo sapiens
ggacatttctggagg

SEQ ID NO: 1318382 - DNA, 15 bp, Homo sapiens
gggacatttctggag

SEQ ID NO: 1318383 - DNA, 15 bp, Homo sapiens
agggacatttctgga

SEQ ID NO: 1318384 - DNA, 15 bp, Homo sapiens
cagggacatttctgg

SEQ ID NO: 1318385 - DNA, 15 bp, Homo sapiens
ccagggacatttctg

SEQ ID NO: 1318386 - DNA, 15 bp, Homo sapiens
tccagggacatttct

SEQ ID NO: 1318387 - DNA, 15 bp, Homo sapiens
ttccagggacatttc

SEQ ID NO: 1318388 - DNA, 15 bp, Homo sapiens
tttccagggacattt

SEQ ID NO: 1318389 - DNA, 15 bp, Homo sapiens
ctttccagggacatt

SEQ ID NO: 1318390 - DNA, 15 bp, Homo sapiens
actttccagggacat

SEQ ID NO: 1318391 - DNA, 15 bp, Homo sapiens
gactttccagggaca

SEQ ID NO: 1318392 - DNA, 15 bp, Homo sapiens
ggactttccagggac

SEQ ID NO: 1318393 - DNA, 15 bp, Homo sapiens
tggactttccaggga

SEQ ID NO: 1318394 - DNA, 15 bp, Homo sapiens
ttggactttccaggg

SEQ ID NO: 1318395 - DNA, 15 bp, Homo sapiens
cttggactttccagg

SEQ ID NO: 1318396 - DNA, 15 bp, Homo sapiens
ccttggactttccag

SEQ ID NO: 1318397 - DNA, 15 bp, Homo sapiens
gccttggactttcca

SEQ ID NO: 1318398 - DNA, 15 bp, Homo sapiens
tgccttggactttcc

SEQ ID NO: 1318399 - DNA, 15 bp, Homo sapiens
ctgccttggactttc

SEQ ID NO: 1318400 - DNA, 15 bp, Homo sapiens
gctgccttggacttt

SEQ ID NO: 1318401 - DNA, 15 bp, Homo sapiens
tgctgccttggactt

SEQ ID NO: 1318402 - DNA, 15 bp, Homo sapiens
atgctgccttggact

SEQ ID NO: 1318403 - DNA, 15 bp, Homo sapiens
aatgctgccttggac

SEQ ID NO: 1318404 - DNA, 15 bp, Homo sapiens
caatgctgccttgga

SEQ ID NO: 1318405 - DNA, 15 bp, Homo sapiens
ccaatgctgccttgg

SEQ ID NO: 1318406 - DNA, 15 bp, Homo sapiens
tccaatgctgccttg

SEQ ID NO: 1318407 - DNA, 15 bp, Homo sapiens
gtccaatgctgcctt

SEQ ID NO: 1318408 - DNA, 15 bp, Homo sapiens
tgtccaatgctgcct

SEQ ID NO: 1318409 - DNA, 15 bp, Homo sapiens
ctgtccaatgctgcc

SEQ ID NO: 1318410 - DNA, 15 bp, Homo sapiens
cctgtccaatgctgc

SEQ ID NO: 1318411 - DNA, 15 bp, Homo sapiens
ccctgtccaatgctg

SEQ ID NO: 1318412 - DNA, 15 bp, Homo sapiens
cccctgtccaatgct

SEQ ID NO: 1318413 - DNA, 15 bp, Homo sapiens
acccctgtccaatgc

SEQ ID NO: 1318414 - DNA, 15 bp, Homo sapiens
gacccctgtccaatg

SEQ ID NO: 1318415 - DNA, 15 bp, Homo sapiens
tgacccctgtccaat

SEQ ID NO: 1318416 - DNA, 15 bp, Homo sapiens
ctgacccctgtccaa

SEQ ID NO: 1318417 - DNA, 15 bp, Homo sapiens
gctgacccctgtcca

SEQ ID NO: 1318418 - DNA, 15 bp, Homo sapiens
tgctgacccctgtcc

SEQ ID NO: 1318419 - DNA, 15 bp, Homo sapiens
ttgctgacccctgtc

SEQ ID NO: 1318420 - DNA, 15 bp, Homo sapiens
tttgctgacccctgt

SEQ ID NO: 1318421 - DNA, 15 bp, Homo sapiens
aaaagtttgctgacc

SEQ ID NO: 1318422 - DNA, 15 bp, Homo sapiens
aaaaagtttgctgac

SEQ ID NO: 1318423 - DNA, 15 bp, Homo sapiens
gaaaaagtttgctga

SEQ ID NO: 1318424 - DNA, 15 bp, Homo sapiens
agaaaaagtttgctg

SEQ ID NO: 1318425 - DNA, 15 bp, Homo sapiens
cagaaaaagtttgct

SEQ ID NO: 1318426 - DNA, 15 bp, Homo sapiens
acagaaaaagtttgc

SEQ ID NO: 1318427 - DNA, 15 bp, Homo sapiens
tacagaaaaagtttg

SEQ ID NO: 1318428 - DNA, 15 bp, Homo sapiens
ttacagaaaaagttt

SEQ ID NO: 1318429 - DNA, 15 bp, Homo sapiens
attacagaaaaagtt

SEQ ID NO: 1318430 - DNA, 15 bp, Homo sapiens
tattacagaaaaagt

SEQ ID NO: 1318431 - DNA, 15 bp, Homo sapiens
ttattacagaaaaag

SEQ ID NO: 1318432 - DNA, 15 bp, Homo sapiens
cttattacagaaaaa

SEQ ID NO: 1318433 - DNA, 15 bp, Homo sapiens
acttattacagaaaa

SEQ ID NO: 1318434 - DNA, 15 bp, Homo sapiens
gacttattacagaaa

SEQ ID NO: 1318435 - DNA, 15 bp, Homo sapiens
tgacttattacagaa

SEQ ID NO: 1318436 - DNA, 15 bp, Homo sapiens
atgacttattacaga

SEQ ID NO: 1318437 - DNA, 15 bp, Homo sapiens
tatgacttattacag

SEQ ID NO: 1318438 - DNA, 15 bp, Homo sapiens
atatgacttattaca

SEQ ID NO: 1318439 - DNA, 15 bp, Homo sapiens
tatatgacttattac

SEQ ID NO: 1318440 - DNA, 15 bp, Homo sapiens
ttatatgacttatta

SEQ ID NO: 1318441 - DNA, 15 bp, Homo sapiens
attatatgacttatt

SEQ ID NO: 1318442 - DNA, 15 bp, Homo sapiens
cattatatgacttat

SEQ ID NO: 1318443 - DNA, 15 bp, Homo sapiens
tcattatatgactta

SEQ ID NO: 1318444 - DNA, 15 bp, Homo sapiens
ttcattatatgactt

SEQ ID NO: 1318445 - DNA, 15 bp, Homo sapiens
tttcattatatgact

SEQ ID NO: 1318446 - DNA, 15 bp, Homo sapiens
ttttcattatatgac

SEQ ID NO: 1318447 - DNA, 15 bp, Homo sapiens
tttttcattatatga

SEQ ID NO: 1318448 - DNA, 15 bp, Homo sapiens
atttttcattatatg

SEQ ID NO: 1318449 - DNA, 15 bp, Homo sapiens
aatttttcattatat

SEQ ID NO: 1318450 - DNA, 15 bp, Homo sapiens
aaatttttcattata

SEQ ID NO: 1318451 - DNA, 15 bp, Homo sapiens
taaatttttcattat

SEQ ID NO: 1318452 - DNA, 15 bp, Homo sapiens
ctaaatttttcatta

SEQ ID NO: 1318453 - DNA, 15 bp, Homo sapiens
cctaaatttttcatt

SEQ ID NO: 1318454 - DNA, 15 bp, Homo sapiens
acctaaatttttcat

SEQ ID NO: 1318455 - DNA, 15 bp, Homo sapiens
aacctaaatttttca

SEQ ID NO: 1318456 - DNA, 15 bp, Homo sapiens
aaacctaaatttttc

SEQ ID NO: 1318457 - DNA, 15 bp, Homo sapiens
aaaacctaaattttt

SEQ ID NO: 1318458 - DNA, 15 bp, Homo sapiens
aaaaacctaaatttt

SEQ ID NO: 1318459 - DNA, 15 bp, Homo sapiens
gaaaaacctaaattt

SEQ ID NO: 1318460 - DNA, 15 bp, Homo sapiens
tgaaaaacctaaatt

SEQ ID NO: 1318461 - DNA, 15 bp, Homo sapiens
ctgaaaaacctaaat

SEQ ID NO: 1318462 - DNA, 15 bp, Homo sapiens
cctgaaaaacctaaa

SEQ ID NO: 1318463 - DNA, 15 bp, Homo sapiens
ccctgaaaaacctaa

SEQ ID NO: 1318464 - DNA, 15 bp, Homo sapiens
accctgaaaaaccta

SEQ ID NO: 1318465 - DNA, 15 bp, Homo sapiens
taccctgaaaaacct

SEQ ID NO: 1318466 - DNA, 15 bp, Homo sapiens
ataccctgaaaaacc

SEQ ID NO: 1318467 - DNA, 15 bp, Homo sapiens
tataccctgaaaaac

SEQ ID NO: 1318468 - DNA, 15 bp, Homo sapiens
ttataccctgaaaaa

SEQ ID NO: 1318469 - DNA, 15 bp, Homo sapiens
cttataccctgaaaa

SEQ ID NO: 1318470 - DNA, 15 bp, Homo sapiens
tcttataccctgaaa

SEQ ID NO: 1318471 - DNA, 15 bp, Homo sapiens
atcttataccctgaa

SEQ ID NO: 1318472 - DNA, 15 bp, Homo sapiens
gatcttataccctga

SEQ ID NO: 1318473 - DNA, 15 bp, Homo sapiens
agatcttataccctg

SEQ ID NO: 1318474 - DNA, 15 bp, Homo sapiens
gagatcttataccct

SEQ ID NO: 1318475 - DNA, 15 bp, Homo sapiens
agagatcttataccc

SEQ ID NO: 1318476 - DNA, 15 bp, Homo sapiens
cagagatcttatacc

SEQ ID NO: 1318477 - DNA, 15 bp, Homo sapiens
acagagatcttatac

SEQ ID NO: 1318478 - DNA, 15 bp, Homo sapiens
aacagagatcttata

SEQ ID NO: 1318479 - DNA, 15 bp, Homo sapiens
caacagagatcttat

SEQ ID NO: 1318480 - DNA, 15 bp, Homo sapiens
gcaacagagatctta

SEQ ID NO: 1318481 - DNA, 15 bp, Homo sapiens
agcaacagagatctt

SEQ ID NO: 1318482 - DNA, 15 bp, Homo sapiens
tagcaacagagatct

SEQ ID NO: 1318483 - DNA, 15 bp, Homo sapiens
gtagcaacagagatc

SEQ ID NO: 1318484 - DNA, 15 bp, Homo sapiens
agtagcaacagagat

SEQ ID NO: 1318485 - DNA, 15 bp, Homo sapiens
cagtagcaacagaga

SEQ ID NO: 1318486 - DNA, 15 bp, Homo sapiens
tcagtagcaacagag

SEQ ID NO: 1318487 - DNA, 15 bp, Homo sapiens
atcagtagcaacaga

SEQ ID NO: 1318488 - DNA, 15 bp, Homo sapiens
aatcagtagcaacag

SEQ ID NO: 1318489 - DNA, 15 bp, Homo sapiens
taatcagtagcaaca

SEQ ID NO: 1318490 - DNA, 15 bp, Homo sapiens
ctaatcagtagcaac

SEQ ID NO: 1318491 - DNA, 15 bp, Homo sapiens
gctaatcagtagcaa

SEQ ID NO: 1318492 - DNA, 15 bp, Homo sapiens
agctaatcagtagca

SEQ ID NO: 1318493 - DNA, 15 bp, Homo sapiens
gagctaatcagtagc

SEQ ID NO: 1318494 - DNA, 15 bp, Homo sapiens
agagctaatcagtag

SEQ ID NO: 1318495 - DNA, 15 bp, Homo sapiens
cagagctaatcagta

SEQ ID NO: 1318496 - DNA, 15 bp, Homo sapiens
gcagagctaatcagt

SEQ ID NO: 1318497 - DNA, 15 bp, Homo sapiens
agcagagctaatcag

SEQ ID NO: 1318498 - DNA, 15 bp, Homo sapiens
cagcagagctaatca

SEQ ID NO: 1318499 - DNA, 15 bp, Homo sapiens
acagcagagctaatc

SEQ ID NO: 1318500 - DNA, 15 bp, Homo sapiens
aacagcagagctaat

SEQ ID NO: 1318501 - DNA, 15 bp, Homo sapiens
caacagcagagctaa

SEQ ID NO: 1318502 - DNA, 15 bp, Homo sapiens
acaacagcagagcta

SEQ ID NO: 1318503 - DNA, 15 bp, Homo sapiens
tacaacagcagagct

SEQ ID NO: 1318504 - DNA, 15 bp, Homo sapiens
ctacaacagcagagc

SEQ ID NO: 1318505 - DNA, 15 bp, Homo sapiens
gctacaacagcagag

SEQ ID NO: 1318506 - DNA, 15 bp, Homo sapiens
tgctacaacagcaga

SEQ ID NO: 1318507 - DNA, 15 bp, Homo sapiens
atgctacaacagcag

SEQ ID NO: 1318508 - DNA, 15 bp, Homo sapiens
tatgctacaacagca

SEQ ID NO: 1318509 - DNA, 15 bp, Homo sapiens
ttatgctacaacagc

SEQ ID NO: 1318510 - DNA, 15 bp, Homo sapiens
tttatgctacaacag

SEQ ID NO: 1318511 - DNA, 15 bp, Homo sapiens
ttttatgctacaaca

SEQ ID NO: 1318512 - DNA, 15 bp, Homo sapiens
cttttatgctacaac

SEQ ID NO: 1318513 - DNA, 15 bp, Homo sapiens
gcttttatgctacaa

SEQ ID NO: 1318514 - DNA, 15 bp, Homo sapiens
tgcttttatgctaca

SEQ ID NO: 1318515 - DNA, 15 bp, Homo sapiens
gtgcttttatgctac

SEQ ID NO: 1318516 - DNA, 15 bp, Homo sapiens
ggtgcttttatgcta

SEQ ID NO: 1318517 - DNA, 15 bp, Homo sapiens
gggtgcttttatgct

SEQ ID NO: 1318518 - DNA, 15 bp, Homo sapiens
tgggtgcttttatgc

SEQ ID NO: 1318519 - DNA, 15 bp, Homo sapiens
atgggtgcttttatg

SEQ ID NO: 1318520 - DNA, 15 bp, Homo sapiens
tatgggtgcttttat

SEQ ID NO: 1318521 - DNA, 15 bp, Homo sapiens
ctatgggtgctttta

SEQ ID NO: 1318522 - DNA, 15 bp, Homo sapiens
cctatgggtgctttt

SEQ ID NO: 1318523 - DNA, 15 bp, Homo sapiens
gcctatgggtgcttt

SEQ ID NO: 1318524 - DNA, 15 bp, Homo sapiens
tgcctatgggtgctt

SEQ ID NO: 1318525 - DNA, 15 bp, Homo sapiens
ttgcctatgggtgct

SEQ ID NO: 1318526 - DNA, 15 bp, Homo sapiens
attgcctatgggtgc

SEQ ID NO: 1318527 - DNA, 15 bp, Homo sapiens
tattgcctatgggtg

SEQ ID NO: 1318528 - DNA, 15 bp, Homo sapiens
gtattgcctatgggt

SEQ ID NO: 1318529 - DNA, 15 bp, Homo sapiens
ggtattgcctatggg

SEQ ID NO: 1318530 - DNA, 15 bp, Homo sapiens
aggtattgcctatgg

SEQ ID NO: 1318531 - DNA, 15 bp, Homo sapiens
taggtattgcctatg

SEQ ID NO: 1318532 - DNA, 15 bp, Homo sapiens
ttaggtattgcctat

SEQ ID NO: 1318533 - DNA, 15 bp, Homo sapiens
tttaggtattgccta

SEQ ID NO: 1318534 - DNA, 15 bp, Homo sapiens
gtttaggtattgcct

SEQ ID NO: 1318535 - DNA, 15 bp, Homo sapiens
cgtttaggtattgcc

SEQ ID NO: 1318536 - DNA, 15 bp, Homo sapiens
acgtttaggtattgc

SEQ ID NO: 1318537 - DNA, 15 bp, Homo sapiens
tacgtttaggtattg

SEQ ID NO: 1318538 - DNA, 15 bp, Homo sapiens
atacgtttaggtatt

SEQ ID NO: 1318539 - DNA, 15 bp, Homo sapiens
catacgtttaggtat

SEQ ID NO: 1318540 - DNA, 15 bp, Homo sapiens
tcatacgtttaggta

SEQ ID NO: 1318541 - DNA, 15 bp, Homo sapiens
ctcatacgtttaggt

SEQ ID NO: 1318542 - DNA, 15 bp, Homo sapiens
gctcatacgtttagg

SEQ ID NO: 1318543 - DNA, 15 bp, Homo sapiens
tgctcatacgtttag

SEQ ID NO: 1318544 - DNA, 15 bp, Homo sapiens
atgctcatacgttta

SEQ ID NO: 1318545 - DNA, 15 bp, Homo sapiens
catgctcatacgttt

SEQ ID NO: 1318546 - DNA, 15 bp, Homo sapiens
ccatgctcatacgtt

SEQ ID NO: 1318547 - DNA, 15 bp, Homo sapiens
gccatgctcatacgt

SEQ ID NO: 1318548 - DNA, 15 bp, Homo sapiens
agccatgctcatacg

SEQ ID NO: 1318549 - DNA, 15 bp, Homo sapiens
cagccatgctcatac

SEQ ID NO: 1318550 - DNA, 15 bp, Homo sapiens
gcagccatgctcata

SEQ ID NO: 1318551 - DNA, 15 bp, Homo sapiens
tgcagccatgctcat

SEQ ID NO: 1318552 - DNA, 15 bp, Homo sapiens
atgcagccatgctca

SEQ ID NO: 1318553 - DNA, 15 bp, Homo sapiens
aatgcagccatgctc

SEQ ID NO: 1318554 - DNA, 15 bp, Homo sapiens
gaatgcagccatgct

SEQ ID NO: 1318555 - DNA, 15 bp, Homo sapiens
ggaatgcagccatgc

SEQ ID NO: 1318556 - DNA, 15 bp, Homo sapiens
ttggaatgcagccat

SEQ ID NO: 1318557 - DNA, 15 bp, Homo sapiens
attggaatgcagcca

SEQ ID NO: 1318558 - DNA, 15 bp, Homo sapiens
tattggaatgcagcc

SEQ ID NO: 1318559 - DNA, 15 bp, Homo sapiens
gtattggaatgcagc

SEQ ID NO: 1318560 - DNA, 15 bp, Homo sapiens
tgtattggaatgcag

SEQ ID NO: 1318561 - DNA, 15 bp, Homo sapiens
ttgtattggaatgca

SEQ ID NO: 1318562 - DNA, 15 bp, Homo sapiens
gttgtattggaatgc

SEQ ID NO: 1318563 - DNA, 15 bp, Homo sapiens
agttgtattggaatg

SEQ ID NO: 1318564 - DNA, 15 bp, Homo sapiens
aagttgtattggaat

SEQ ID NO: 1318565 - DNA, 15 bp, Homo sapiens
aaagttgtattggaa

SEQ ID NO: 1318566 - DNA, 15 bp, Homo sapiens
taaagttgtattgga

SEQ ID NO: 1318567 - DNA, 15 bp, Homo sapiens
ataaagttgtattgg

SEQ ID NO: 1318568 - DNA, 15 bp, Homo sapiens
cataaagttgtattg

SEQ ID NO: 1318569 - DNA, 15 bp, Homo sapiens
ccataaagttgtatt

SEQ ID NO: 1318570 - DNA, 15 bp, Homo sapiens
cccataaagttgtat

SEQ ID NO: 1318571 - DNA, 15 bp, Homo sapiens
tcccataaagttgta

SEQ ID NO: 1318572 - DNA, 15 bp, Homo sapiens
ttcccataaagttgt

SEQ ID NO: 1318573 - DNA, 15 bp, Homo sapiens
attcccataaagttg

SEQ ID NO: 1318574 - DNA, 15 bp, Homo sapiens
aattcccataaagtt

SEQ ID NO: 1318575 - DNA, 15 bp, Homo sapiens
aaattcccataaagt

SEQ ID NO: 1318576 - DNA, 15 bp, Homo sapiens
caaattcccataaag

SEQ ID NO: 1318577 - DNA, 15 bp, Homo sapiens
tcaaattcccataaa

SEQ ID NO: 1318578 - DNA, 15 bp, Homo sapiens
ttcaaattcccataa

SEQ ID NO: 1318579 - DNA, 15 bp, Homo sapiens
gttcaaattcccata

SEQ ID NO: 1318580 - DNA, 15 bp, Homo sapiens
agttcaaattcccat

SEQ ID NO: 1318581 - DNA, 15 bp, Homo sapiens
aagttcaaattccca

SEQ ID NO: 1318582 - DNA, 15 bp, Homo sapiens
aaagttcaaattccc

SEQ ID NO: 1318583 - DNA, 15 bp, Homo sapiens
taaagttcaaattcc

SEQ ID NO: 1318584 - DNA, 15 bp, Homo sapiens
ataaagttcaaattc

SEQ ID NO: 1318585 - DNA, 15 bp, Homo sapiens
cataaagttcaaatt

SEQ ID NO: 1318586 - DNA, 15 bp, Homo sapiens
acataaagttcaaat

SEQ ID NO: 1318587 - DNA, 15 bp, Homo sapiens
tacataaagttcaaa

SEQ ID NO: 1318588 - DNA, 15 bp, Homo sapiens
ttacataaagttcaa

SEQ ID NO: 1318589 - DNA, 15 bp, Homo sapiens
attacataaagttca

SEQ ID NO: 1318590 - DNA, 15 bp, Homo sapiens
aattacataaagttc

SEQ ID NO: 1318591 - DNA, 15 bp, Homo sapiens
aaattacataaagtt

SEQ ID NO: 1318592 - DNA, 15 bp, Homo sapiens
aaaattacataaagt

SEQ ID NO: 1318593 - DNA, 15 bp, Homo sapiens
gaaaattacataaag

SEQ ID NO: 1318594 - DNA, 15 bp, Homo sapiens
tgaaaattacataaa

SEQ ID NO: 1318595 - DNA, 15 bp, Homo sapiens
gtgaaaattacataa

SEQ ID NO: 1318596 - DNA, 15 bp, Homo sapiens
tgtgaaaattacata

SEQ ID NO: 1318597 - DNA, 15 bp, Homo sapiens
ctgtgaaaattacat

SEQ ID NO: 1318598 - DNA, 15 bp, Homo sapiens
tctgtgaaaattaca

SEQ ID NO: 1318599 - DNA, 15 bp, Homo sapiens
atctgtgaaaattac

SEQ ID NO: 1318600 - DNA, 15 bp, Homo sapiens
aatctgtgaaaatta

SEQ ID NO: 1318601 - DNA, 15 bp, Homo sapiens
taatctgtgaaaatt

SEQ ID NO: 1318602 - DNA, 15 bp, Homo sapiens
ataatctgtgaaaat

SEQ ID NO: 1318603 - DNA, 15 bp, Homo sapiens
cataatctgtgaaaa

SEQ ID NO: 1318604 - DNA, 15 bp, Homo sapiens
tcataatctgtgaaa

SEQ ID NO: 1318605 - DNA, 15 bp, Homo sapiens
gtcataatctgtgaa

SEQ ID NO: 1318606 - DNA, 15 bp, Homo sapiens
tgtcataatctgtga

SEQ ID NO: 1318607 - DNA, 15 bp, Homo sapiens
atgtcataatctgtg

SEQ ID NO: 1318608 - DNA, 15 bp, Homo sapiens
aatgtcataatctgt

SEQ ID NO: 1318609 - DNA, 15 bp, Homo sapiens
caatgtcataatctg

SEQ ID NO: 1318610 - DNA, 15 bp, Homo sapiens
acaatgtcataatct

SEQ ID NO: 1318611 - DNA, 15 bp, Homo sapiens
gacaatgtcataatc

SEQ ID NO: 1318612 - DNA, 15 bp, Homo sapiens
agacaatgtcataat

SEQ ID NO: 1318613 - DNA, 15 bp, Homo sapiens
aagacaatgtcataa

SEQ ID NO: 1318614 - DNA, 15 bp, Homo sapiens
gaagacaatgtcata

SEQ ID NO: 1318615 - DNA, 15 bp, Homo sapiens
agaagacaatgtcat

SEQ ID NO: 1318616 - DNA, 15 bp, Homo sapiens
aagaagacaatgtca

SEQ ID NO: 1318617 - DNA, 15 bp, Homo sapiens
aaagaagacaatgtc

SEQ ID NO: 1318618 - DNA, 15 bp, Homo sapiens
aaaagaagacaatgt

SEQ ID NO: 1318619 - DNA, 15 bp, Homo sapiens
caaaagaagacaatg

SEQ ID NO: 1318620 - DNA, 15 bp, Homo sapiens
tcaaaagaagacaat

SEQ ID NO: 1318621 - DNA, 15 bp, Homo sapiens
atcaaaagaagacaa

SEQ ID NO: 1318622 - DNA, 15 bp, Homo sapiens
aatcaaaagaagaca

SEQ ID NO: 1318623 - DNA, 15 bp, Homo sapiens
aaatcaaaagaagac

SEQ ID NO: 1318624 - DNA, 15 bp, Homo sapiens
aaaatcaaaagaaga

SEQ ID NO: 1318625 - DNA, 15 bp, Homo sapiens
aaaaatcaaaagaag

SEQ ID NO: 1318626 - DNA, 15 bp, Homo sapiens
aaaaaatcaaaagaa

SEQ ID NO: 1318627 - DNA, 15 bp, Homo sapiens
aaaaaaatcaaaaga

SEQ ID NO: 1318628 - DNA, 15 bp, Homo sapiens
aaaaaaaatcaaaag

SEQ ID NO: 1318629 - DNA, 15 bp, Homo sapiens
gaaaaaaaatcaaaa

SEQ ID NO: 1318630 - DNA, 15 bp, Homo sapiens
tgaaaaaaaatcaaa

SEQ ID NO: 1318631 - DNA, 15 bp, Homo sapiens
ttgaaaaaaaatcaa

SEQ ID NO: 1318632 - DNA, 15 bp, Homo sapiens
gttgaaaaaaaatca

SEQ ID NO: 1318633 - DNA, 15 bp, Homo sapiens
ggttgaaaaaaaatc

SEQ ID NO: 1318634 - DNA, 15 bp, Homo sapiens
tggttgaaaaaaaat

SEQ ID NO: 1318635 - DNA, 15 bp, Homo sapiens
atggttgaaaaaaaa

SEQ ID NO: 1318636 - DNA, 15 bp, Homo sapiens
aatggttgaaaaaaa

SEQ ID NO: 1318637 - DNA, 15 bp, Homo sapiens
aaatggttgaaaaaa

SEQ ID NO: 1318638 - DNA, 15 bp, Homo sapiens
aaaatggttgaaaaa

SEQ ID NO: 1318639 - DNA, 15 bp, Homo sapiens
caaaatggttgaaaa

SEQ ID NO: 1318640 - DNA, 15 bp, Homo sapiens
tcaaaatggttgaaa

SEQ ID NO: 1318641 - DNA, 15 bp, Homo sapiens
ttcaaaatggttgaa

SEQ ID NO: 1318642 - DNA, 15 bp, Homo sapiens
cttcaaaatggttga

SEQ ID NO: 1318643 - DNA, 15 bp, Homo sapiens
gcttcaaaatggttg

SEQ ID NO: 1318644 - DNA, 15 bp, Homo sapiens
tgcttcaaaatggtt

SEQ ID NO: 1318645 - DNA, 15 bp, Homo sapiens
tggactcaaaacaaa

SEQ ID NO: 1318646 - DNA, 15 bp, Homo sapiens
ttggactcaaaacaa

SEQ ID NO: 1318647 - DNA, 15 bp, Homo sapiens
cttggactcaaaaca

SEQ ID NO: 1318648 - DNA, 15 bp, Homo sapiens
acttggactcaaaac

SEQ ID NO: 1318649 - DNA, 15 bp, Homo sapiens
aacttggactcaaaa

SEQ ID NO: 1318650 - DNA, 15 bp, Homo sapiens
aaacttggactcaaa

SEQ ID NO: 1318651 - DNA, 15 bp, Homo sapiens
gaaacttggactcaa

SEQ ID NO: 1318652 - DNA, 15 bp, Homo sapiens
tgaaacttggactca

SEQ ID NO: 1318653 - DNA, 15 bp, Homo sapiens
gtgaaacttggactc

SEQ ID NO: 1318654 - DNA, 15 bp, Homo sapiens
agtgaaacttggact

SEQ ID NO: 1318655 - DNA, 15 bp, Homo sapiens
gagtgaaacttggac

SEQ ID NO: 1318656 - DNA, 15 bp, Homo sapiens
agagtgaaacttgga

SEQ ID NO: 1318657 - DNA, 15 bp, Homo sapiens
aagagtgaaacttgg

SEQ ID NO: 1318658 - DNA, 15 bp, Homo sapiens
caagagtgaaacttg

SEQ ID NO: 1318659 - DNA, 15 bp, Homo sapiens
gcaagagtgaaactt

SEQ ID NO: 1318660 - DNA, 15 bp, Homo sapiens
agcaagagtgaaact

SEQ ID NO: 1318661 - DNA, 15 bp, Homo sapiens
cagcaagagtgaaac

SEQ ID NO: 1318662 - DNA, 15 bp, Homo sapiens
gcagcaagagtgaaa

SEQ ID NO: 1318663 - DNA, 15 bp, Homo sapiens
ggcagcaagagtgaa

SEQ ID NO: 1318664 - DNA, 15 bp, Homo sapiens
gggcagcaagagtga

SEQ ID NO: 1318665 - DNA, 15 bp, Homo sapiens
tgggcagcaagagtg

SEQ ID NO: 1318666 - DNA, 15 bp, Homo sapiens
ctgggcagcaagagt

SEQ ID NO: 1318667 - DNA, 15 bp, Homo sapiens
cctgggcagcaagag

SEQ ID NO: 1318668 - DNA, 15 bp, Homo sapiens
gcctgggcagcaaga

SEQ ID NO: 1318669 - DNA, 15 bp, Homo sapiens
agcctgggcagcaag

SEQ ID NO: 1318670 - DNA, 15 bp, Homo sapiens
cagcctgggcagcaa

SEQ ID NO: 1318671 - DNA, 15 bp, Homo sapiens
ccagcctgggcagca

SEQ ID NO: 1318672 - DNA, 15 bp, Homo sapiens
tccagcctgggcagc

SEQ ID NO: 1318673 - DNA, 15 bp, Homo sapiens
ctccagcctgggcag

SEQ ID NO: 1318674 - DNA, 15 bp, Homo sapiens
aaggttgcagtgagc

SEQ ID NO: 1318675 - DNA, 15 bp, Homo sapiens
gaaggttgcagtgag

SEQ ID NO: 1318676 - DNA, 15 bp, Homo sapiens
tgaaggttgcagtga

SEQ ID NO: 1318677 - DNA, 15 bp, Homo sapiens
gtgaaggttgcagtg

SEQ ID NO: 1318678 - DNA, 15 bp, Homo sapiens
ggtgaaggttgcagt

SEQ ID NO: 1318679 - DNA, 15 bp, Homo sapiens
aggtgaaggttgcag

SEQ ID NO: 1318680 - DNA, 15 bp, Homo sapiens
gaggtgaaggttgca

SEQ ID NO: 1318681 - DNA, 15 bp, Homo sapiens
ggaggtgaaggttgc

SEQ ID NO: 1318682 - DNA, 15 bp, Homo sapiens
aggaggtgaaggttg

SEQ ID NO: 1318683 - DNA, 15 bp, Homo sapiens
caggaggtgaaggtt

SEQ ID NO: 1318684 - DNA, 15 bp, Homo sapiens
ccaggaggtgaaggt

SEQ ID NO: 1318685 - DNA, 15 bp, Homo sapiens
cccaggaggtgaagg

SEQ ID NO: 1318686 - DNA, 15 bp, Homo sapiens
acccaggaggtgaag

SEQ ID NO: 1318687 - DNA, 15 bp, Homo sapiens
aacccaggaggtgaa

SEQ ID NO: 1318688 - DNA, 15 bp, Homo sapiens
gaacccaggaggtga

SEQ ID NO: 1318689 - DNA, 15 bp, Homo sapiens
acccagctactcagg

SEQ ID NO: 1318690 - DNA, 15 bp, Homo sapiens
aacccagctactcag

SEQ ID NO: 1318691 - DNA, 15 bp, Homo sapiens
aaacccagctactca

SEQ ID NO: 1318692 - DNA, 15 bp, Homo sapiens
taaacccagctactc

SEQ ID NO: 1318693 - DNA, 15 bp, Homo sapiens
gtaaacccagctact

SEQ ID NO: 1318694 - DNA, 15 bp, Homo sapiens
tgtaaacccagctac

SEQ ID NO: 1318695 - DNA, 15 bp, Homo sapiens
ctgtaaacccagcta

SEQ ID NO: 1318696 - DNA, 15 bp, Homo sapiens
cctgtaaacccagct

SEQ ID NO: 1318697 - DNA, 15 bp, Homo sapiens
gcctgtaaacccagc

SEQ ID NO: 1318698 - DNA, 15 bp, Homo sapiens
tgcctgtaaacccag

SEQ ID NO: 1318699 - DNA, 15 bp, Homo sapiens
gcatgcctgtaaacc

SEQ ID NO: 1318700 - DNA, 15 bp, Homo sapiens
tgcatgcctgtaaac

SEQ ID NO: 1318701 - DNA, 15 bp, Homo sapiens
gtgcatgcctgtaaa

SEQ ID NO: 1318702 - DNA, 15 bp, Homo sapiens
gtagccaggcatggt

SEQ ID NO: 1318703 - DNA, 15 bp, Homo sapiens
agtagccaggcatgg

SEQ ID NO: 1318704 - DNA, 15 bp, Homo sapiens
aagtagccaggcatg

SEQ ID NO: 1318705 - DNA, 15 bp, Homo sapiens
aaagtagccaggcat

SEQ ID NO: 1318706 - DNA, 15 bp, Homo sapiens
aaaagtagccaggca

SEQ ID NO: 1318707 - DNA, 15 bp, Homo sapiens
aaaaagtagccaggc

SEQ ID NO: 1318708 - DNA, 15 bp, Homo sapiens
aaaaaagtagccagg

SEQ ID NO: 1318709 - DNA, 15 bp, Homo sapiens
aaaaaaagtagccag

SEQ ID NO: 1318710 - DNA, 15 bp, Homo sapiens
caaaaaaagtagcca

SEQ ID NO: 1318711 - DNA, 15 bp, Homo sapiens
acaaaaaaagtagcc

SEQ ID NO: 1318712 - DNA, 15 bp, Homo sapiens
tacaaaaaaagtagc

SEQ ID NO: 1318713 - DNA, 15 bp, Homo sapiens
atacaaaaaaagtag

SEQ ID NO: 1318714 - DNA, 15 bp, Homo sapiens
aatacaaaaaaagta

SEQ ID NO: 1318715 - DNA, 15 bp, Homo sapiens
aaatacaaaaaaagt

SEQ ID NO: 1318716 - DNA, 15 bp, Homo sapiens
aaaatacaaaaaaag

SEQ ID NO: 1318717 - DNA, 15 bp, Homo sapiens
gaaaatacaaaaaaa

SEQ ID NO: 1318718 - DNA, 15 bp, Homo sapiens
tgtctctactgaaaa

SEQ ID NO: 1318719 - DNA, 15 bp, Homo sapiens
ctgtctctactgaaa

SEQ ID NO: 1318720 - DNA, 15 bp, Homo sapiens
caaccatcctggcca

SEQ ID NO: 1318721 - DNA, 15 bp, Homo sapiens
gcaaccatcctggcc

SEQ ID NO: 1318722 - DNA, 15 bp, Homo sapiens
tgcaaccatcctggc

SEQ ID NO: 1318723 - DNA, 15 bp, Homo sapiens
ttgcaaccatcctgg

SEQ ID NO: 1318724 - DNA, 15 bp, Homo sapiens
tttgcaaccatcctg

SEQ ID NO: 1318725 - DNA, 15 bp, Homo sapiens
gtttgcaaccatcct

SEQ ID NO: 1318726 - DNA, 15 bp, Homo sapiens
agtttgcaaccatcc

SEQ ID NO: 1318727 - DNA, 15 bp, Homo sapiens
gagtttgcaaccatc

SEQ ID NO: 1318728 - DNA, 15 bp, Homo sapiens
ggagtttgcaaccat

SEQ ID NO: 1318729 - DNA, 15 bp, Homo sapiens
aggagtttgcaacca

SEQ ID NO: 1318730 - DNA, 15 bp, Homo sapiens
caggagtttgcaacc

SEQ ID NO: 1318731 - DNA, 15 bp, Homo sapiens
tcaggagtttgcaac

SEQ ID NO: 1318732 - DNA, 15 bp, Homo sapiens
gtcaggagtttgcaa

SEQ ID NO: 1318733 - DNA, 15 bp, Homo sapiens
ggtcaggagtttgca

SEQ ID NO: 1318734 - DNA, 15 bp, Homo sapiens
aggtcaggagtttgc

SEQ ID NO: 1318735 - DNA, 15 bp, Homo sapiens
gatgcctgtaatccc

SEQ ID NO: 1318736 - DNA, 15 bp, Homo sapiens
tgatgcctgtaatcc

SEQ ID NO: 1318737 - DNA, 15 bp, Homo sapiens
ctgatgcctgtaatc

SEQ ID NO: 1318738 - DNA, 15 bp, Homo sapiens
gctgatgcctgtaat

SEQ ID NO: 1318739 - DNA, 15 bp, Homo sapiens
ggctgatgcctgtaa

SEQ ID NO: 1318740 - DNA, 15 bp, Homo sapiens
tggctgatgcctgta

SEQ ID NO: 1318741 - DNA, 15 bp, Homo sapiens
gtggctgatgcctgt

SEQ ID NO: 1318742 - DNA, 15 bp, Homo sapiens
ggtggctgatgcctg

SEQ ID NO: 1318743 - DNA, 15 bp, Homo sapiens
cggtggctgatgcct

SEQ ID NO: 1318744 - DNA, 15 bp, Homo sapiens
gcggtggctgatgcc

SEQ ID NO: 1318745 - DNA, 15 bp, Homo sapiens
cgcggtggctgatgc

SEQ ID NO: 1318746 - DNA, 15 bp, Homo sapiens
gcgcggtggctgatg

SEQ ID NO: 1318747 - DNA, 15 bp, Homo sapiens
ggcgcggtggctgat

SEQ ID NO: 1318748 - DNA, 15 bp, Homo sapiens
cgggcgcggtggctg

SEQ ID NO: 1318749 - DNA, 15 bp, Homo sapiens
gagccgggcgcggtg

SEQ ID NO: 1318750 - DNA, 15 bp, Homo sapiens
agagccgggcgcggt

SEQ ID NO: 1318751 - DNA, 15 bp, Homo sapiens
cagagccgggcgcgg

SEQ ID NO: 1318752 - DNA, 15 bp, Homo sapiens
acagagccgggcgcg

SEQ ID NO: 1318753 - DNA, 15 bp, Homo sapiens
cacagagccgggcgc

SEQ ID NO: 1318754 - DNA, 15 bp, Homo sapiens
acacagagccgggcg

SEQ ID NO: 1318755 - DNA, 15 bp, Homo sapiens
cacacagagccgggc

SEQ ID NO: 1318756 - DNA, 15 bp, Homo sapiens
gcacacagagccggg

SEQ ID NO: 1318757 - DNA, 15 bp, Homo sapiens
ggcacacagagccgg

SEQ ID NO: 1318758 - DNA, 15 bp, Homo sapiens
gggcacacagagccg

SEQ ID NO: 1318759 - DNA, 15 bp, Homo sapiens
agggcacacagagcc

SEQ ID NO: 1318760 - DNA, 15 bp, Homo sapiens
aagggcacacagagc

SEQ ID NO: 1318761 - DNA, 15 bp, Homo sapiens
caagggcacacagag

SEQ ID NO: 1318762 - DNA, 15 bp, Homo sapiens
acaagggcacacaga

SEQ ID NO: 1318763 - DNA, 15 bp, Homo sapiens
tacaagggcacacag

SEQ ID NO: 1318764 - DNA, 15 bp, Homo sapiens
gtacaagggcacaca

SEQ ID NO: 1318765 - DNA, 15 bp, Homo sapiens
tgtacaagggcacac

SEQ ID NO: 1318766 - DNA, 15 bp, Homo sapiens
gtgtacaagggcaca

SEQ ID NO: 1318767 - DNA, 15 bp, Homo sapiens
cgtgtacaagggcac

SEQ ID NO: 1318768 - DNA, 15 bp, Homo sapiens
acgtgtacaagggca

SEQ ID NO: 1318769 - DNA, 15 bp, Homo sapiens
aacgtgtacaagggc

SEQ ID NO: 1318770 - DNA, 15 bp, Homo sapiens
gaacgtgtacaaggg

SEQ ID NO: 1318771 - DNA, 15 bp, Homo sapiens
tgaacgtgtacaagg

SEQ ID NO: 1318772 - DNA, 15 bp, Homo sapiens
gtgaacgtgtacaag

SEQ ID NO: 1318773 - DNA, 15 bp, Homo sapiens
agtgaacgtgtacaa

SEQ ID NO: 1318774 - DNA, 15 bp, Homo sapiens
gagtgaacgtgtaca

SEQ ID NO: 1318775 - DNA, 15 bp, Homo sapiens
tgagtgaacgtgtac

SEQ ID NO: 1318776 - DNA, 15 bp, Homo sapiens
atgagtgaacgtgta

SEQ ID NO: 1318777 - DNA, 15 bp, Homo sapiens
gatgagtgaacgtgt

SEQ ID NO: 1318778 - DNA, 15 bp, Homo sapiens
agatgagtgaacgtg

SEQ ID NO: 1318779 - DNA, 15 bp, Homo sapiens
aagatgagtgaacgt

SEQ ID NO: 1318780 - DNA, 15 bp, Homo sapiens
aaagatgagtgaacg

SEQ ID NO: 1318781 - DNA, 15 bp, Homo sapiens
gaaagatgagtgaac

SEQ ID NO: 1318782 - DNA, 15 bp, Homo sapiens
agaaagatgagtgaa

SEQ ID NO: 1318783 - DNA, 15 bp, Homo sapiens
aagaaagatgagtga

SEQ ID NO: 1318784 - DNA, 15 bp, Homo sapiens
gaagaaagatgagtg

SEQ ID NO: 1318785 - DNA, 15 bp, Homo sapiens
tgaagaaagatgagt

SEQ ID NO: 1318786 - DNA, 15 bp, Homo sapiens
atgaagaaagatgag

SEQ ID NO: 1318787 - DNA, 15 bp, Homo sapiens
catgaagaaagatga

SEQ ID NO: 1318788 - DNA, 15 bp, Homo sapiens
acatgaagaaagatg

SEQ ID NO: 1318789 - DNA, 15 bp, Homo sapiens
tacatgaagaaagat

SEQ ID NO: 1318790 - DNA, 15 bp, Homo sapiens
atatctttttctttt

SEQ ID NO: 1318791 - DNA, 15 bp, Homo sapiens
tatatctttttcttt

SEQ ID NO: 1318792 - DNA, 15 bp, Homo sapiens
ttatatctttttctt

SEQ ID NO: 1318793 - DNA, 15 bp, Homo sapiens
attatatctttttct

SEQ ID NO: 1318794 - DNA, 15 bp, Homo sapiens
tattatatctttttc

SEQ ID NO: 1318795 - DNA, 15 bp, Homo sapiens
ttattatatcttttt

SEQ ID NO: 1318796 - DNA, 15 bp, Homo sapiens
cttattatatctttt

SEQ ID NO: 1318797 - DNA, 15 bp, Homo sapiens
gcttattatatcttt

SEQ ID NO: 1318798 - DNA, 15 bp, Homo sapiens
tgcttattatatctt

SEQ ID NO: 1318799 - DNA, 15 bp, Homo sapiens
ctgcttattatatct

SEQ ID NO: 1318800 - DNA, 15 bp, Homo sapiens
actgcttattatatc

SEQ ID NO: 1318801 - DNA, 15 bp, Homo sapiens
tactgcttattatat

SEQ ID NO: 1318802 - DNA, 15 bp, Homo sapiens
atactgcttattata

SEQ ID NO: 1318803 - DNA, 15 bp, Homo sapiens
aatactgcttattat

SEQ ID NO: 1318804 - DNA, 15 bp, Homo sapiens
aaatactgcttatta

SEQ ID NO: 1318805 - DNA, 15 bp, Homo sapiens
aaaatactgcttatt

SEQ ID NO: 1318806 - DNA, 15 bp, Homo sapiens
taaaatactgcttat

SEQ ID NO: 1318807 - DNA, 15 bp, Homo sapiens
ttaaaatactgctta

SEQ ID NO: 1318808 - DNA, 15 bp, Homo sapiens
tttaaaatactgctt

SEQ ID NO: 1318809 - DNA, 15 bp, Homo sapiens
ttttaaaatactgct

SEQ ID NO: 1318810 - DNA, 15 bp, Homo sapiens
attttaaaatactgc

SEQ ID NO: 1318811 - DNA, 15 bp, Homo sapiens
tattttaaaatactg

SEQ ID NO: 1318812 - DNA, 15 bp, Homo sapiens
gtattttaaaatact

SEQ ID NO: 1318813 - DNA, 15 bp, Homo sapiens
ggtattttaaaatac

SEQ ID NO: 1318814 - DNA, 15 bp, Homo sapiens
tggtattttaaaata

SEQ ID NO: 1318815 - DNA, 15 bp, Homo sapiens
atggtattttaaaat

SEQ ID NO: 1318816 - DNA, 15 bp, Homo sapiens
catggtattttaaaa

SEQ ID NO: 1318817 - DNA, 15 bp, Homo sapiens
tcatggtattttaaa

SEQ ID NO: 1318818 - DNA, 15 bp, Homo sapiens
ctcatggtattttaa

SEQ ID NO: 1318819 - DNA, 15 bp, Homo sapiens
actcatggtatttta

SEQ ID NO: 1318820 - DNA, 15 bp, Homo sapiens
aactcatggtatttt

SEQ ID NO: 1318821 - DNA, 15 bp, Homo sapiens
taactcatggtattt

SEQ ID NO: 1318822 - DNA, 15 bp, Homo sapiens
ataactcatggtatt

SEQ ID NO: 1318823 - DNA, 15 bp, Homo sapiens
cataactcatggtat

SEQ ID NO: 1318824 - DNA, 15 bp, Homo sapiens
ccataactcatggta

SEQ ID NO: 1318825 - DNA, 15 bp, Homo sapiens
cccataactcatggt

SEQ ID NO: 1318826 - DNA, 15 bp, Homo sapiens
gcccataactcatgg

SEQ ID NO: 1318827 - DNA, 15 bp, Homo sapiens
tgcccataactcatg

SEQ ID NO: 1318828 - DNA, 15 bp, Homo sapiens
atgcccataactcat

SEQ ID NO: 1318829 - DNA, 15 bp, Homo sapiens
catgcccataactca

SEQ ID NO: 1318830 - DNA, 15 bp, Homo sapiens
gcatgcccataactc

SEQ ID NO: 1318831 - DNA, 15 bp, Homo sapiens
tgcatgcccataact

SEQ ID NO: 1318832 - DNA, 15 bp, Homo sapiens
atgcatgcccataac

SEQ ID NO: 1318833 - DNA, 15 bp, Homo sapiens
tatgcatgcccataa

SEQ ID NO: 1318834 - DNA, 15 bp, Homo sapiens
atatgcatgcccata

SEQ ID NO: 1318835 - DNA, 15 bp, Homo sapiens
catatgcatgcccat

SEQ ID NO: 1318836 - DNA, 15 bp, Homo sapiens
ccatatgcatgccca

SEQ ID NO: 1318837 - DNA, 15 bp, Homo sapiens
accatatgcatgccc

SEQ ID NO: 1318838 - DNA, 15 bp, Homo sapiens
taccatatgcatgcc

SEQ ID NO: 1318839 - DNA, 15 bp, Homo sapiens
gtaccatatgcatgc

SEQ ID NO: 1318840 - DNA, 15 bp, Homo sapiens
tgtaccatatgcatg

SEQ ID NO: 1318841 - DNA, 15 bp, Homo sapiens
ttgtaccatatgcat

SEQ ID NO: 1318842 - DNA, 15 bp, Homo sapiens
tttgtaccatatgca

SEQ ID NO: 1318843 - DNA, 15 bp, Homo sapiens
ctttgtaccatatgc

SEQ ID NO: 1318844 - DNA, 15 bp, Homo sapiens
tctttgtaccatatg

SEQ ID NO: 1318845 - DNA, 15 bp, Homo sapiens
ctctttgtaccatat

SEQ ID NO: 1318846 - DNA, 15 bp, Homo sapiens
actctttgtaccata

SEQ ID NO: 1318847 - DNA, 15 bp, Homo sapiens
tactctttgtaccat

SEQ ID NO: 1318848 - DNA, 15 bp, Homo sapiens
ctactctttgtacca

SEQ ID NO: 1318849 - DNA, 15 bp, Homo sapiens
actactctttgtacc

SEQ ID NO: 1318850 - DNA, 15 bp, Homo sapiens
aactactctttgtac

SEQ ID NO: 1318851 - DNA, 15 bp, Homo sapiens
gaactactctttgta

SEQ ID NO: 1318852 - DNA, 15 bp, Homo sapiens
agaactactctttgt

SEQ ID NO: 1318853 - DNA, 15 bp, Homo sapiens
aagaactactctttg

SEQ ID NO: 1318854 - DNA, 15 bp, Homo sapiens
aaagaactactcttt

SEQ ID NO: 1318855 - DNA, 15 bp, Homo sapiens
caaagaactactctt

SEQ ID NO: 1318856 - DNA, 15 bp, Homo sapiens
ccaaagaactactct

SEQ ID NO: 1318857 - DNA, 15 bp, Homo sapiens
cccaaagaactactc

SEQ ID NO: 1318858 - DNA, 15 bp, Homo sapiens
acccaaagaactact

SEQ ID NO: 1318859 - DNA, 15 bp, Homo sapiens
aacccaaagaactac

SEQ ID NO: 1318860 - DNA, 15 bp, Homo sapiens
caacccaaagaacta

SEQ ID NO: 1318861 - DNA, 15 bp, Homo sapiens
tcaacccaaagaact

SEQ ID NO: 1318862 - DNA, 15 bp, Homo sapiens
ttcaacccaaagaac

SEQ ID NO: 1318863 - DNA, 15 bp, Homo sapiens
tttcaacccaaagaa

SEQ ID NO: 1318864 - DNA, 15 bp, Homo sapiens
ctttcaacccaaaga

SEQ ID NO: 1318865 - DNA, 15 bp, Homo sapiens
tctttcaacccaaag

SEQ ID NO: 1318866 - DNA, 15 bp, Homo sapiens
ttctttcaacccaaa

SEQ ID NO: 1318867 - DNA, 15 bp, Homo sapiens
tttctttcaacccaa

SEQ ID NO: 1318868 - DNA, 15 bp, Homo sapiens
ctttctttcaaccca

SEQ ID NO: 1318869 - DNA, 15 bp, Homo sapiens
tctttctttcaaccc

SEQ ID NO: 1318870 - DNA, 15 bp, Homo sapiens
ttctttctttcaacc

SEQ ID NO: 1318871 - DNA, 15 bp, Homo sapiens
cttctttctttcaac

SEQ ID NO: 1318872 - DNA, 15 bp, Homo sapiens
tcttctttctttcaa

SEQ ID NO: 1318873 - DNA, 15 bp, Homo sapiens
ctcttctttctttca

SEQ ID NO: 1318874 - DNA, 15 bp, Homo sapiens
actcttctttctttc

SEQ ID NO: 1318875 - DNA, 15 bp, Homo sapiens
aactcttctttcttt

SEQ ID NO: 1318876 - DNA, 15 bp, Homo sapiens
aaactcttctttctt

SEQ ID NO: 1318877 - DNA, 15 bp, Homo sapiens
caaactcttctttct

SEQ ID NO: 1318878 - DNA, 15 bp, Homo sapiens
gcaaactcttctttc

SEQ ID NO: 1318879 - DNA, 15 bp, Homo sapiens
tgcaaactcttcttt

SEQ ID NO: 1318880 - DNA, 15 bp, Homo sapiens
atgcaaactcttctt

SEQ ID NO: 1318881 - DNA, 15 bp, Homo sapiens
aatgcaaactcttct

SEQ ID NO: 1318882 - DNA, 15 bp, Homo sapiens
caatgcaaactcttc

SEQ ID NO: 1318883 - DNA, 15 bp, Homo sapiens
tcaatgcaaactctt

SEQ ID NO: 1318884 - DNA, 15 bp, Homo sapiens
ttcaatgcaaactct

SEQ ID NO: 1318885 - DNA, 15 bp, Homo sapiens
gttcaatgcaaactc

SEQ ID NO: 1318886 - DNA, 15 bp, Homo sapiens
agttcaatgcaaact

SEQ ID NO: 1318887 - DNA, 15 bp, Homo sapiens
cagttcaatgcaaac

SEQ ID NO: 1318888 - DNA, 15 bp, Homo sapiens
gcagttcaatgcaaa

SEQ ID NO: 1318889 - DNA, 15 bp, Homo sapiens
cgcagttcaatgcaa

SEQ ID NO: 1318890 - DNA, 15 bp, Homo sapiens
acgcagttcaatgca

SEQ ID NO: 1318891 - DNA, 15 bp, Homo sapiens
tacgcagttcaatgc

SEQ ID NO: 1318892 - DNA, 15 bp, Homo sapiens
ctacgcagttcaatg

SEQ ID NO: 1318893 - DNA, 15 bp, Homo sapiens
cctacgcagttcaat

SEQ ID NO: 1318894 - DNA, 15 bp, Homo sapiens
gcctacgcagttcaa

SEQ ID NO: 1318895 - DNA, 15 bp, Homo sapiens
agcctacgcagttca

SEQ ID NO: 1318896 - DNA, 15 bp, Homo sapiens
cagcctacgcagttc

SEQ ID NO: 1318897 - DNA, 15 bp, Homo sapiens
ccagcctacgcagtt

SEQ ID NO: 1318898 - DNA, 15 bp, Homo sapiens
gccagcctacgcagt

SEQ ID NO: 1318899 - DNA, 15 bp, Homo sapiens
tgccagcctacgcag

SEQ ID NO: 1318900 - DNA, 15 bp, Homo sapiens
ttgccagcctacgca

SEQ ID NO: 1318901 - DNA, 15 bp, Homo sapiens
cttgccagcctacgc

SEQ ID NO: 1318902 - DNA, 15 bp, Homo sapiens
tcttgccagcctacg

SEQ ID NO: 1318903 - DNA, 15 bp, Homo sapiens
ttcttgccagcctac

SEQ ID NO: 1318904 - DNA, 15 bp, Homo sapiens
attcttgccagccta

SEQ ID NO: 1318905 - DNA, 15 bp, Homo sapiens
cattcttgccagcct

SEQ ID NO: 1318906 - DNA, 15 bp, Homo sapiens
gcattcttgccagcc

SEQ ID NO: 1318907 - DNA, 15 bp, Homo sapiens
tgcattcttgccagc

SEQ ID NO: 1318908 - DNA, 15 bp, Homo sapiens
ctgcattcttgccag

SEQ ID NO: 1318909 - DNA, 15 bp, Homo sapiens
tctgcattcttgcca

SEQ ID NO: 1318910 - DNA, 15 bp, Homo sapiens
ctctgcattcttgcc

SEQ ID NO: 1318911 - DNA, 15 bp, Homo sapiens
cctctgcattcttgc

SEQ ID NO: 1318912 - DNA, 15 bp, Homo sapiens
acctctgcattcttg

SEQ ID NO: 1318913 - DNA, 15 bp, Homo sapiens
tacctctgcattctt

SEQ ID NO: 1318914 - DNA, 15 bp, Homo sapiens
atacctctgcattct

SEQ ID NO: 1318915 - DNA, 15 bp, Homo sapiens
tatacctctgcattc

SEQ ID NO: 1318916 - DNA, 15 bp, Homo sapiens
gtatacctctgcatt

SEQ ID NO: 1318917 - DNA, 15 bp, Homo sapiens
tgtatacctctgcat

SEQ ID NO: 1318918 - DNA, 15 bp, Homo sapiens
ttgtatacctctgca

SEQ ID NO: 1318919 - DNA, 15 bp, Homo sapiens
attgtatacctctgc

SEQ ID NO: 1318920 - DNA, 15 bp, Homo sapiens
cattgtatacctctg

SEQ ID NO: 1318921 - DNA, 15 bp, Homo sapiens
acattgtatacctct

SEQ ID NO: 1318922 - DNA, 15 bp, Homo sapiens
aacattgtatacctc

SEQ ID NO: 1318923 - DNA, 15 bp, Homo sapiens
aaacattgtatacct

SEQ ID NO: 1318924 - DNA, 15 bp, Homo sapiens
caaacattgtatacc

SEQ ID NO: 1318925 - DNA, 15 bp, Homo sapiens
tcaaacattgtatac

SEQ ID NO: 1318926 - DNA, 15 bp, Homo sapiens
atcaaacattgtata

SEQ ID NO: 1318927 - DNA, 15 bp, Homo sapiens
catcaaacattgtat

SEQ ID NO: 1318928 - DNA, 15 bp, Homo sapiens
ccatcaaacattgta

SEQ ID NO: 1318929 - DNA, 15 bp, Homo sapiens
cccatcaaacattgt

SEQ ID NO: 1318930 - DNA, 15 bp, Homo sapiens
gcccatcaaacattg

SEQ ID NO: 1318931 - DNA, 15 bp, Homo sapiens
agcccatcaaacatt

SEQ ID NO: 1318932 - DNA, 15 bp, Homo sapiens
aagcccatcaaacat

SEQ ID NO: 1318933 - DNA, 15 bp, Homo sapiens
aaagcccatcaaaca

SEQ ID NO: 1318934 - DNA, 15 bp, Homo sapiens
caaagcccatcaaac

SEQ ID NO: 1318935 - DNA, 15 bp, Homo sapiens
ccaaagcccatcaaa

SEQ ID NO: 1318936 - DNA, 15 bp, Homo sapiens
tccaaagcccatcaa

SEQ ID NO: 1318937 - DNA, 15 bp, Homo sapiens
ctccaaagcccatca

SEQ ID NO: 1318938 - DNA, 15 bp, Homo sapiens
cctccaaagcccatc

SEQ ID NO: 1318939 - DNA, 15 bp, Homo sapiens
gcctccaaagcccat

SEQ ID NO: 1318940 - DNA, 15 bp, Homo sapiens
tgcctccaaagccca

SEQ ID NO: 1318941 - DNA, 15 bp, Homo sapiens
atgcctccaaagccc

SEQ ID NO: 1318942 - DNA, 15 bp, Homo sapiens
aatgcctccaaagcc

SEQ ID NO: 1318943 - DNA, 15 bp, Homo sapiens
aaatgcctccaaagc

SEQ ID NO: 1318944 - DNA, 15 bp, Homo sapiens
gaaatgcctccaaag

SEQ ID NO: 1318945 - DNA, 15 bp, Homo sapiens
tgaaatgcctccaaa

SEQ ID NO: 1318946 - DNA, 15 bp, Homo sapiens
ttgaaatgcctccaa

SEQ ID NO: 1318947 - DNA, 15 bp, Homo sapiens
attgaaatgcctcca

SEQ ID NO: 1318948 - DNA, 15 bp, Homo sapiens
tattgaaatgcctcc

SEQ ID NO: 1318949 - DNA, 15 bp, Homo sapiens
ctattgaaatgcctc

SEQ ID NO: 1318950 - DNA, 15 bp, Homo sapiens
actattgaaatgcct

SEQ ID NO: 1318951 - DNA, 15 bp, Homo sapiens
tactattgaaatgcc

SEQ ID NO: 1318952 - DNA, 15 bp, Homo sapiens
ttactattgaaatgc

SEQ ID NO: 1318953 - DNA, 15 bp, Homo sapiens
tttactattgaaatg

SEQ ID NO: 1318954 - DNA, 15 bp, Homo sapiens
atttactattgaaat

SEQ ID NO: 1318955 - DNA, 15 bp, Homo sapiens
catttactattgaaa

SEQ ID NO: 1318956 - DNA, 15 bp, Homo sapiens
ccatttactattgaa

SEQ ID NO: 1318957 - DNA, 15 bp, Homo sapiens
cccatttactattga

SEQ ID NO: 1318958 - DNA, 15 bp, Homo sapiens
acccatttactattg

SEQ ID NO: 1318959 - DNA, 15 bp, Homo sapiens
cacccatttactatt

SEQ ID NO: 1318960 - DNA, 15 bp, Homo sapiens
tcacccatttactat

SEQ ID NO: 1318961 - DNA, 15 bp, Homo sapiens
gtcacccatttacta

SEQ ID NO: 1318962 - DNA, 15 bp, Homo sapiens
tgtcacccatttact

SEQ ID NO: 1318963 - DNA, 15 bp, Homo sapiens
ctgtcacccatttac

SEQ ID NO: 1318964 - DNA, 15 bp, Homo sapiens
cctgtcacccattta

SEQ ID NO: 1318965 - DNA, 15 bp, Homo sapiens
tcctgtcacccattt

SEQ ID NO: 1318966 - DNA, 15 bp, Homo sapiens
gtcctgtcacccatt

SEQ ID NO: 1318967 - DNA, 15 bp, Homo sapiens
agtcctgtcacccat

SEQ ID NO: 1318968 - DNA, 15 bp, Homo sapiens
cagtcctgtcaccca

SEQ ID NO: 1318969 - DNA, 15 bp, Homo sapiens
ccagtcctgtcaccc

SEQ ID NO: 1318970 - DNA, 15 bp, Homo sapiens
tccagtcctgtcacc

SEQ ID NO: 1318971 - DNA, 15 bp, Homo sapiens
ttccagtcctgtcac

SEQ ID NO: 1318972 - DNA, 15 bp, Homo sapiens
tttccagtcctgtca

SEQ ID NO: 1318973 - DNA, 15 bp, Homo sapiens
ctttccagtcctgtc

SEQ ID NO: 1318974 - DNA, 15 bp, Homo sapiens
tctttccagtcctgt

SEQ ID NO: 1318975 - DNA, 15 bp, Homo sapiens
atctttccagtcctg

SEQ ID NO: 1318976 - DNA, 15 bp, Homo sapiens
catctttccagtcct

SEQ ID NO: 1318977 - DNA, 15 bp, Homo sapiens
acatctttccagtcc

SEQ ID NO: 1318978 - DNA, 15 bp, Homo sapiens
cacatctttccagtc

SEQ ID NO: 1318979 - DNA, 15 bp, Homo sapiens
ccacatctttccagt

SEQ ID NO: 1318980 - DNA, 15 bp, Homo sapiens
tccacatctttccag

SEQ ID NO: 1318981 - DNA, 15 bp, Homo sapiens
ttccacatctttcca

SEQ ID NO: 1318982 - DNA, 15 bp, Homo sapiens
attccacatctttcc

SEQ ID NO: 1318983 - DNA, 15 bp, Homo sapiens
tattccacatctttc

SEQ ID NO: 1318984 - DNA, 15 bp, Homo sapiens
atattccacatcttt

SEQ ID NO: 1318985 - DNA, 15 bp, Homo sapiens
catattccacatctt

SEQ ID NO: 1318986 - DNA, 15 bp, Homo sapiens
tcatattccacatct

SEQ ID NO: 1318987 - DNA, 15 bp, Homo sapiens
ctcatattccacatc

SEQ ID NO: 1318988 - DNA, 15 bp, Homo sapiens
cctcatattccacat

SEQ ID NO: 1318989 - DNA, 15 bp, Homo sapiens
ccctcatattccaca

SEQ ID NO: 1318990 - DNA, 15 bp, Homo sapiens
accctcatattccac

SEQ ID NO: 1318991 - DNA, 15 bp, Homo sapiens
aaccctcatattcca

SEQ ID NO: 1318992 - DNA, 15 bp, Homo sapiens
aaaccctcatattcc

SEQ ID NO: 1318993 - DNA, 15 bp, Homo sapiens
aaaaccctcatattc

SEQ ID NO: 1318994 - DNA, 15 bp, Homo sapiens
gaaaaccctcatatt

SEQ ID NO: 1318995 - DNA, 15 bp, Homo sapiens
ggaaaaccctcatat

SEQ ID NO: 1318996 - DNA, 15 bp, Homo sapiens
tggaaaaccctcata

SEQ ID NO: 1318997 - DNA, 15 bp, Homo sapiens
ctggaaaaccctcat

SEQ ID NO: 1318998 - DNA, 15 bp, Homo sapiens
cctggaaaaccctca

SEQ ID NO: 1318999 - DNA, 15 bp, Homo sapiens
ccctggaaaaccctc

SEQ ID NO: 1319000 - DNA, 15 bp, Homo sapiens
tccctggaaaaccct

SEQ ID NO: 1319001 - DNA, 15 bp, Homo sapiens
ctccctggaaaaccc

SEQ ID NO: 1319002 - DNA, 15 bp, Homo sapiens
tctccctggaaaacc

SEQ ID NO: 1319003 - DNA, 15 bp, Homo sapiens
atctccctggaaaac

SEQ ID NO: 1319004 - DNA, 15 bp, Homo sapiens
catctccctggaaaa

SEQ ID NO: 1319005 - DNA, 15 bp, Homo sapiens
ccatctccctggaaa

SEQ ID NO: 1319006 - DNA, 15 bp, Homo sapiens
cccatctccctggaa

SEQ ID NO: 1319007 - DNA, 15 bp, Homo sapiens
tcccatctccctgga

SEQ ID NO: 1319008 - DNA, 15 bp, Homo sapiens
gtcccatctccctgg

SEQ ID NO: 1319009 - DNA, 15 bp, Homo sapiens
agtcccatctccctg

SEQ ID NO: 1319010 - DNA, 15 bp, Homo sapiens
aagtcccatctccct

SEQ ID NO: 1319011 - DNA, 15 bp, Homo sapiens
taagtcccatctccc

SEQ ID NO: 1319012 - DNA, 15 bp, Homo sapiens
ttaagtcccatctcc

SEQ ID NO: 1319013 - DNA, 15 bp, Homo sapiens
attaagtcccatctc

SEQ ID NO: 1319014 - DNA, 15 bp, Homo sapiens
cattaagtcccatct

SEQ ID NO: 1319015 - DNA, 15 bp, Homo sapiens
ccattaagtcccatc

SEQ ID NO: 1319016 - DNA, 15 bp, Homo sapiens
cccattaagtcccat

SEQ ID NO: 1319017 - DNA, 15 bp, Homo sapiens
gcccattaagtccca

SEQ ID NO: 1319018 - DNA, 15 bp, Homo sapiens
ggcccattaagtccc

SEQ ID NO: 1319019 - DNA, 15 bp, Homo sapiens
tggcccattaagtcc

SEQ ID NO: 1319020 - DNA, 15 bp, Homo sapiens
atggcccattaagtc

SEQ ID NO: 1319021 - DNA, 15 bp, Homo sapiens
catggcccattaagt

SEQ ID NO: 1319022 - DNA, 15 bp, Homo sapiens
tcatggcccattaag

SEQ ID NO: 1319023 - DNA, 15 bp, Homo sapiens
atcatggcccattaa

SEQ ID NO: 1319024 - DNA, 15 bp, Homo sapiens
catcatggcccatta

SEQ ID NO: 1319025 - DNA, 15 bp, Homo sapiens
acatcatggcccatt

SEQ ID NO: 1319026 - DNA, 15 bp, Homo sapiens
tacatcatggcccat

SEQ ID NO: 1319027 - DNA, 15 bp, Homo sapiens
atacatcatggccca

SEQ ID NO: 1319028 - DNA, 15 bp, Homo sapiens
aatacatcatggccc

SEQ ID NO: 1319029 - DNA, 15 bp, Homo sapiens
aaatacatcatggcc

SEQ ID NO: 1319030 - DNA, 15 bp, Homo sapiens
caaatacatcatggc

SEQ ID NO: 1319031 - DNA, 15 bp, Homo sapiens
acaaatacatcatgg

SEQ ID NO: 1319032 - DNA, 15 bp, Homo sapiens
tacaaatacatcatg

SEQ ID NO: 1319033 - DNA, 15 bp, Homo sapiens
ctacaaatacatcat

SEQ ID NO: 1319034 - DNA, 15 bp, Homo sapiens
cctacaaatacatca

SEQ ID NO: 1319035 - DNA, 15 bp, Homo sapiens
tcctacaaatacatc

SEQ ID NO: 1319036 - DNA, 15 bp, Homo sapiens
ttcctacaaatacat

SEQ ID NO: 1319037 - DNA, 15 bp, Homo sapiens
attcctacaaataca

SEQ ID NO: 1319038 - DNA, 15 bp, Homo sapiens
cattcctacaaatac

SEQ ID NO: 1319039 - DNA, 15 bp, Homo sapiens
acattcctacaaata

SEQ ID NO: 1319040 - DNA, 15 bp, Homo sapiens
cacattcctacaaat

SEQ ID NO: 1319041 - DNA, 15 bp, Homo sapiens
tcacattcctacaaa

SEQ ID NO: 1319042 - DNA, 15 bp, Homo sapiens
atcacattcctacaa

SEQ ID NO: 1319043 - DNA, 15 bp, Homo sapiens
aatcacattcctaca

SEQ ID NO: 1319044 - DNA, 15 bp, Homo sapiens
aaatcacattcctac

SEQ ID NO: 1319045 - DNA, 15 bp, Homo sapiens
gaaatcacattccta

SEQ ID NO: 1319046 - DNA, 15 bp, Homo sapiens
tgaaatcacattcct

SEQ ID NO: 1319047 - DNA, 15 bp, Homo sapiens
ttgaaatcacattcc

SEQ ID NO: 1319048 - DNA, 15 bp, Homo sapiens
attgaaatcacattc

SEQ ID NO: 1319049 - DNA, 15 bp, Homo sapiens
tattgaaatcacatt

SEQ ID NO: 1319050 - DNA, 15 bp, Homo sapiens
ctattgaaatcacat

SEQ ID NO: 1319051 - DNA, 15 bp, Homo sapiens
tctattgaaatcaca

SEQ ID NO: 1319052 - DNA, 15 bp, Homo sapiens
atctattgaaatcac

SEQ ID NO: 1319053 - DNA, 15 bp, Homo sapiens
aatctattgaaatca

SEQ ID NO: 1319054 - DNA, 15 bp, Homo sapiens
caatctattgaaatc

SEQ ID NO: 1319055 - DNA, 15 bp, Homo sapiens
tcaatctattgaaat

SEQ ID NO: 1319056 - DNA, 15 bp, Homo sapiens
gtcaatctattgaaa

SEQ ID NO: 1319057 - DNA, 15 bp, Homo sapiens
agtcaatctattgaa

SEQ ID NO: 1319058 - DNA, 15 bp, Homo sapiens
tagtcaatctattga

SEQ ID NO: 1319059 - DNA, 15 bp, Homo sapiens
atagtcaatctattg

SEQ ID NO: 1319060 - DNA, 15 bp, Homo sapiens
aatagtcaatctatt

SEQ ID NO: 1319061 - DNA, 15 bp, Homo sapiens
aaatagtcaatctat

SEQ ID NO: 1319062 - DNA, 15 bp, Homo sapiens
aaaatagtcaatcta

SEQ ID NO: 1319063 - DNA, 15 bp, Homo sapiens
caaaatagtcaatct

SEQ ID NO: 1319064 - DNA, 15 bp, Homo sapiens
acaaaatagtcaatc

SEQ ID NO: 1319065 - DNA, 15 bp, Homo sapiens
gacaaaatagtcaat

SEQ ID NO: 1319066 - DNA, 15 bp, Homo sapiens
agacaaaatagtcaa

SEQ ID NO: 1319067 - DNA, 15 bp, Homo sapiens
tagacaaaatagtca

SEQ ID NO: 1319068 - DNA, 15 bp, Homo sapiens
gtagacaaaatagtc

SEQ ID NO: 1319069 - DNA, 15 bp, Homo sapiens
agtagacaaaatagt

SEQ ID NO: 1319070 - DNA, 15 bp, Homo sapiens
cagtagacaaaatag

SEQ ID NO: 1319071 - DNA, 15 bp, Homo sapiens
acagtagacaaaata

SEQ ID NO: 1319072 - DNA, 15 bp, Homo sapiens
cacagtagacaaaat

SEQ ID NO: 1319073 - DNA, 15 bp, Homo sapiens
tcacagtagacaaaa

SEQ ID NO: 1319074 - DNA, 15 bp, Homo sapiens
atcacagtagacaaa

SEQ ID NO: 1319075 - DNA, 15 bp, Homo sapiens
tatcacagtagacaa

SEQ ID NO: 1319076 - DNA, 15 bp, Homo sapiens
ttatcacagtagaca

SEQ ID NO: 1319077 - DNA, 15 bp, Homo sapiens
cttatcacagtagac

SEQ ID NO: 1319078 - DNA, 15 bp, Homo sapiens
acttatcacagtaga

SEQ ID NO: 1319079 - DNA, 15 bp, Homo sapiens
aacttatcacagtag

SEQ ID NO: 1319080 - DNA, 15 bp, Homo sapiens
aaacttatcacagta

SEQ ID NO: 1319081 - DNA, 15 bp, Homo sapiens
caaacttatcacagt

SEQ ID NO: 1319082 - DNA, 15 bp, Homo sapiens
acaaacttatcacag

SEQ ID NO: 1319083 - DNA, 15 bp, Homo sapiens
cacaaacttatcaca

SEQ ID NO: 1319084 - DNA, 15 bp, Homo sapiens
acacaaacttatcac

SEQ ID NO: 1319085 - DNA, 15 bp, Homo sapiens
tacacaaacttatca

SEQ ID NO: 1319086 - DNA, 15 bp, Homo sapiens
ctacacaaacttatc

SEQ ID NO: 1319087 - DNA, 15 bp, Homo sapiens
cctacacaaacttat

SEQ ID NO: 1319088 - DNA, 15 bp, Homo sapiens
ccctacacaaactta

SEQ ID NO: 1319089 - DNA, 15 bp, Homo sapiens
cccctacacaaactt

SEQ ID NO: 1319090 - DNA, 15 bp, Homo sapiens
tcccctacacaaact

SEQ ID NO: 1319091 - DNA, 15 bp, Homo sapiens
ttcccctacacaaac

SEQ ID NO: 1319092 - DNA, 15 bp, Homo sapiens
gttcccctacacaaa

SEQ ID NO: 1319093 - DNA, 15 bp, Homo sapiens
agttcccctacacaa

SEQ ID NO: 1319094 - DNA, 15 bp, Homo sapiens
tcagttcccctacac

SEQ ID NO: 1319095 - DNA, 15 bp, Homo sapiens
ctcagttcccctaca

SEQ ID NO: 1319096 - DNA, 15 bp, Homo sapiens
tcctcagttccccta

SEQ ID NO: 1319097 - DNA, 15 bp, Homo sapiens
ttcctcagttcccct

SEQ ID NO: 1319098 - DNA, 15 bp, Homo sapiens
tttcctcagttcccc

SEQ ID NO: 1319099 - DNA, 15 bp, Homo sapiens
ttttcctcagttccc

SEQ ID NO: 1319100 - DNA, 15 bp, Homo sapiens
gttttcctcagttcc

SEQ ID NO: 1319101 - DNA, 15 bp, Homo sapiens
agttttcctcagttc

SEQ ID NO: 1319102 - DNA, 15 bp, Homo sapiens
cagttttcctcagtt

SEQ ID NO: 1319103 - DNA, 15 bp, Homo sapiens
tcagttttcctcagt

SEQ ID NO: 1319104 - DNA, 15 bp, Homo sapiens
ctcagttttcctcag

SEQ ID NO: 1319105 - DNA, 15 bp, Homo sapiens
tctcagttttcctca

SEQ ID NO: 1319106 - DNA, 15 bp, Homo sapiens
atctcagttttcctc

SEQ ID NO: 1319107 - DNA, 15 bp, Homo sapiens
catctcagttttcct

SEQ ID NO: 1319108 - DNA, 15 bp, Homo sapiens
tcatctcagttttcc

SEQ ID NO: 1319109 - DNA, 15 bp, Homo sapiens
ctcatctcagttttc

SEQ ID NO: 1319110 - DNA, 15 bp, Homo sapiens
tctcatctcagtttt

SEQ ID NO: 1319111 - DNA, 15 bp, Homo sapiens
gtctcatctcagttt

SEQ ID NO: 1319112 - DNA, 15 bp, Homo sapiens
agtctcatctcagtt

SEQ ID NO: 1319113 - DNA, 15 bp, Homo sapiens
aagtctcatctcagt

SEQ ID NO: 1319114 - DNA, 15 bp, Homo sapiens
gaagtctcatctcag

SEQ ID NO: 1319115 - DNA, 15 bp, Homo sapiens
tgaagtctcatctca

SEQ ID NO: 1319116 - DNA, 15 bp, Homo sapiens
atgaagtctcatctc

SEQ ID NO: 1319117 - DNA, 15 bp, Homo sapiens
catgaagtctcatct

SEQ ID NO: 1319118 - DNA, 15 bp, Homo sapiens
ccatgaagtctcatc

SEQ ID NO: 1319119 - DNA, 15 bp, Homo sapiens
tccatgaagtctcat

SEQ ID NO: 1319120 - DNA, 15 bp, Homo sapiens
ttccatgaagtctca

SEQ ID NO: 1319121 - DNA, 15 bp, Homo sapiens
cttccatgaagtctc

SEQ ID NO: 1319122 - DNA, 15 bp, Homo sapiens
ccttccatgaagtct

SEQ ID NO: 1319123 - DNA, 15 bp, Homo sapiens
cccttccatgaagtc

SEQ ID NO: 1319124 - DNA, 15 bp, Homo sapiens
ccccttccatgaagt

SEQ ID NO: 1319125 - DNA, 15 bp, Homo sapiens
gccccttccatgaag

SEQ ID NO: 1319126 - DNA, 15 bp, Homo sapiens
agccccttccatgaa

SEQ ID NO: 1319127 - DNA, 15 bp, Homo sapiens
tagccccttccatga

SEQ ID NO: 1319128 - DNA, 15 bp, Homo sapiens
gtagccccttccatg

SEQ ID NO: 1319129 - DNA, 15 bp, Homo sapiens
tgtagccccttccat

SEQ ID NO: 1319130 - DNA, 15 bp, Homo sapiens
ttgtagccccttcca

SEQ ID NO: 1319131 - DNA, 15 bp, Homo sapiens
tttgtagccccttcc

SEQ ID NO: 1319132 - DNA, 15 bp, Homo sapiens
ctttgtagccccttc

SEQ ID NO: 1319133 - DNA, 15 bp, Homo sapiens
actttgtagcccctt

SEQ ID NO: 1319134 - DNA, 15 bp, Homo sapiens
tactttgtagcccct

SEQ ID NO: 1319135 - DNA, 15 bp, Homo sapiens
gtactttgtagcccc

SEQ ID NO: 1319136 - DNA, 15 bp, Homo sapiens
tgtactttgtagccc

SEQ ID NO: 1319137 - DNA, 15 bp, Homo sapiens
ctgtactttgtagcc

SEQ ID NO: 1319138 - DNA, 15 bp, Homo sapiens
actgtactttgtagc

SEQ ID NO: 1319139 - DNA, 15 bp, Homo sapiens
gactgtactttgtag

SEQ ID NO: 1319140 - DNA, 15 bp, Homo sapiens
agactgtactttgta

SEQ ID NO: 1319141 - DNA, 15 bp, Homo sapiens
tagactgtactttgt

SEQ ID NO: 1319142 - DNA, 15 bp, Homo sapiens
ttagactgtactttg

SEQ ID NO: 1319143 - DNA, 15 bp, Homo sapiens
tttagactgtacttt

SEQ ID NO: 1319144 - DNA, 15 bp, Homo sapiens
ctttagactgtactt

SEQ ID NO: 1319145 - DNA, 15 bp, Homo sapiens
cctttagactgtact

SEQ ID NO: 1319146 - DNA, 15 bp, Homo sapiens
gcctttagactgtac

SEQ ID NO: 1319147 - DNA, 15 bp, Homo sapiens
ggcctttagactgta

SEQ ID NO: 1319148 - DNA, 15 bp, Homo sapiens
aggcctttagactgt

SEQ ID NO: 1319149 - DNA, 15 bp, Homo sapiens
taggcctttagactg

SEQ ID NO: 1319150 - DNA, 15 bp, Homo sapiens
ctaggcctttagact

SEQ ID NO: 1319151 - DNA, 15 bp, Homo sapiens
tctaggcctttagac

SEQ ID NO: 1319152 - DNA, 15 bp, Homo sapiens
atctaggcctttaga

SEQ ID NO: 1319153 - DNA, 15 bp, Homo sapiens
tatctaggcctttag

SEQ ID NO: 1319154 - DNA, 15 bp, Homo sapiens
ttatctaggccttta

SEQ ID NO: 1319155 - DNA, 15 bp, Homo sapiens
tttatctaggccttt

SEQ ID NO: 1319156 - DNA, 15 bp, Homo sapiens
ctttatctaggcctt

SEQ ID NO: 1319157 - DNA, 15 bp, Homo sapiens
actttatctaggcct

SEQ ID NO: 1319158 - DNA, 15 bp, Homo sapiens
aactttatctaggcc

SEQ ID NO: 1319159 - DNA, 15 bp, Homo sapiens
aaactttatctaggc

SEQ ID NO: 1319160 - DNA, 15 bp, Homo sapiens
caaactttatctagg

SEQ ID NO: 1319161 - DNA, 15 bp, Homo sapiens
tcaaactttatctag

SEQ ID NO: 1319162 - DNA, 15 bp, Homo sapiens
ttcaaactttatcta

SEQ ID NO: 1319163 - DNA, 15 bp, Homo sapiens
tttcaaactttatct

SEQ ID NO: 1319164 - DNA, 15 bp, Homo sapiens
gtttcaaactttatc

SEQ ID NO: 1319165 - DNA, 15 bp, Homo sapiens
agtttcaaactttat

SEQ ID NO: 1319166 - DNA, 15 bp, Homo sapiens
aagtttcaaacttta

SEQ ID NO: 1319167 - DNA, 15 bp, Homo sapiens
caagtttcaaacttt

SEQ ID NO: 1319168 - DNA, 15 bp, Homo sapiens
tcaagtttcaaactt

SEQ ID NO: 1319169 - DNA, 15 bp, Homo sapiens
atcaagtttcaaact

SEQ ID NO: 1319170 - DNA, 15 bp, Homo sapiens
aatcaagtttcaaac

SEQ ID NO: 1319171 - DNA, 15 bp, Homo sapiens
aaatcaagtttcaaa

SEQ ID NO: 1319172 - DNA, 15 bp, Homo sapiens
taaatcaagtttcaa

SEQ ID NO: 1319173 - DNA, 15 bp, Homo sapiens
tctaaatcaagtttc

SEQ ID NO: 1319174 - DNA, 15 bp, Homo sapiens
ttctaaatcaagttt

SEQ ID NO: 1319175 - DNA, 15 bp, Homo sapiens
tttctaaatcaagtt

SEQ ID NO: 1319176 - DNA, 15 bp, Homo sapiens
ctttctaaatcaagt

SEQ ID NO: 1319177 - DNA, 15 bp, Homo sapiens
actttctaaatcaag

SEQ ID NO: 1319178 - DNA, 15 bp, Homo sapiens
gactttctaaatcaa

SEQ ID NO: 1319179 - DNA, 15 bp, Homo sapiens
tgactttctaaatca

SEQ ID NO: 1319180 - DNA, 15 bp, Homo sapiens
atgactttctaaatc

SEQ ID NO: 1319181 - DNA, 15 bp, Homo sapiens
catgactttctaaat

SEQ ID NO: 1319182 - DNA, 15 bp, Homo sapiens
tcatgactttctaaa

SEQ ID NO: 1319183 - DNA, 15 bp, Homo sapiens
ttcatgactttctaa

SEQ ID NO: 1319184 - DNA, 15 bp, Homo sapiens
tttcatgactttcta

SEQ ID NO: 1319185 - DNA, 15 bp, Homo sapiens
ttttcatgactttct

SEQ ID NO: 1319186 - DNA, 15 bp, Homo sapiens
cttttcatgactttc

SEQ ID NO: 1319187 - DNA, 15 bp, Homo sapiens
gcttttcatgacttt

SEQ ID NO: 1319188 - DNA, 15 bp, Homo sapiens
ggcttttcatgactt

SEQ ID NO: 1319189 - DNA, 15 bp, Homo sapiens
tggcttttcatgact

SEQ ID NO: 1319190 - DNA, 15 bp, Homo sapiens
gtggcttttcatgac

SEQ ID NO: 1319191 - DNA, 15 bp, Homo sapiens
agtggcttttcatga

SEQ ID NO: 1319192 - DNA, 15 bp, Homo sapiens
gagtggcttttcatg

SEQ ID NO: 1319193 - DNA, 15 bp, Homo sapiens
tgagtggcttttcat

SEQ ID NO: 1319194 - DNA, 15 bp, Homo sapiens
ctgagtggcttttca

SEQ ID NO: 1319195 - DNA, 15 bp, Homo sapiens
tctgagtggcttttc

SEQ ID NO: 1319196 - DNA, 15 bp, Homo sapiens
ctctgagtggctttt

SEQ ID NO: 1319197 - DNA, 15 bp, Homo sapiens
actctgagtggcttt

SEQ ID NO: 1319198 - DNA, 15 bp, Homo sapiens
aactctgagtggctt

SEQ ID NO: 1319199 - DNA, 15 bp, Homo sapiens
aaactctgagtggct

SEQ ID NO: 1319200 - DNA, 15 bp, Homo sapiens
aaaactctgagtggc

SEQ ID NO: 1319201 - DNA, 15 bp, Homo sapiens
taaaactctgagtgg

SEQ ID NO: 1319202 - DNA, 15 bp, Homo sapiens
ttaaaactctgagtg

SEQ ID NO: 1319203 - DNA, 15 bp, Homo sapiens
cttaaaactctgagt

SEQ ID NO: 1319204 - DNA, 15 bp, Homo sapiens
gcttaaaactctgag

SEQ ID NO: 1319205 - DNA, 15 bp, Homo sapiens
tgcttaaaactctga

SEQ ID NO: 1319206 - DNA, 15 bp, Homo sapiens
ttgcttaaaactctg

SEQ ID NO: 1319207 - DNA, 15 bp, Homo sapiens
tttgcttaaaactct

SEQ ID NO: 1319208 - DNA, 15 bp, Homo sapiens
ctttgcttaaaactc

SEQ ID NO: 1319209 - DNA, 15 bp, Homo sapiens
tctttgcttaaaact

SEQ ID NO: 1319210 - DNA, 15 bp, Homo sapiens
ctctttgcttaaaac

SEQ ID NO: 1319211 - DNA, 15 bp, Homo sapiens
actctttgcttaaaa

SEQ ID NO: 1319212 - DNA, 15 bp, Homo sapiens
cactctttgcttaaa

SEQ ID NO: 1319213 - DNA, 15 bp, Homo sapiens
tcactctttgcttaa

SEQ ID NO: 1319214 - DNA, 15 bp, Homo sapiens
atcactctttgctta

SEQ ID NO: 1319215 - DNA, 15 bp, Homo sapiens
catcactctttgctt

SEQ ID NO: 1319216 - DNA, 15 bp, Homo sapiens
ccatcactctttgct

SEQ ID NO: 1319217 - DNA, 15 bp, Homo sapiens
cccatcactctttgc

SEQ ID NO: 1319218 - DNA, 15 bp, Homo sapiens
gccccatcactcttt

SEQ ID NO: 1319219 - DNA, 15 bp, Homo sapiens
tgccccatcactctt

SEQ ID NO: 1319220 - DNA, 15 bp, Homo sapiens
ctgccccatcactct

SEQ ID NO: 1319221 - DNA, 15 bp, Homo sapiens
gctgccccatcactc

SEQ ID NO: 1319222 - DNA, 15 bp, Homo sapiens
tgctgccccatcact

SEQ ID NO: 1319223 - DNA, 15 bp, Homo sapiens
ttgctgccccatcac

SEQ ID NO: 1319224 - DNA, 15 bp, Homo sapiens
attgctgccccatca

SEQ ID NO: 1319225 - DNA, 15 bp, Homo sapiens
cattgctgccccatc

SEQ ID NO: 1319226 - DNA, 15 bp, Homo sapiens
ccattgctgccccat

SEQ ID NO: 1319227 - DNA, 15 bp, Homo sapiens
gccattgctgcccca

SEQ ID NO: 1319228 - DNA, 15 bp, Homo sapiens
agccattgctgcccc

SEQ ID NO: 1319229 - DNA, 15 bp, Homo sapiens
cagccattgctgccc

SEQ ID NO: 1319230 - DNA, 15 bp, Homo sapiens
acagccattgctgcc

SEQ ID NO: 1319231 - DNA, 15 bp, Homo sapiens
cacagccattgctgc

SEQ ID NO: 1319232 - DNA, 15 bp, Homo sapiens
gcacagccattgctg

SEQ ID NO: 1319233 - DNA, 15 bp, Homo sapiens
tgcacagccattgct

SEQ ID NO: 1319234 - DNA, 15 bp, Homo sapiens
atgcacagccattgc

SEQ ID NO: 1319235 - DNA, 15 bp, Homo sapiens
aatgcacagccattg

SEQ ID NO: 1319236 - DNA, 15 bp, Homo sapiens
aaatgcacagccatt

SEQ ID NO: 1319237 - DNA, 15 bp, Homo sapiens
aaaatgcacagccat

SEQ ID NO: 1319238 - DNA, 15 bp, Homo sapiens
aaaaatgcacagcca

SEQ ID NO: 1319239 - DNA, 15 bp, Homo sapiens
gaaaaatgcacagcc

SEQ ID NO: 1319240 - DNA, 15 bp, Homo sapiens
tgaaaaatgcacagc

SEQ ID NO: 1319241 - DNA, 15 bp, Homo sapiens
ctgaaaaatgcacag

SEQ ID NO: 1319242 - DNA, 15 bp, Homo sapiens
cctgaaaaatgcaca

SEQ ID NO: 1319243 - DNA, 15 bp, Homo sapiens
acctgaaaaatgcac

SEQ ID NO: 1319244 - DNA, 15 bp, Homo sapiens
aacctgaaaaatgca

SEQ ID NO: 1319245 - DNA, 15 bp, Homo sapiens
caacctgaaaaatgc

SEQ ID NO: 1319246 - DNA, 15 bp, Homo sapiens
tcaacctgaaaaatg

SEQ ID NO: 1319247 - DNA, 15 bp, Homo sapiens
ttcaacctgaaaaat

SEQ ID NO: 1319248 - DNA, 15 bp, Homo sapiens
tttcaacctgaaaaa

SEQ ID NO: 1319249 - DNA, 15 bp, Homo sapiens
ctttcaacctgaaaa

SEQ ID NO: 1319250 - DNA, 15 bp, Homo sapiens
actttcaacctgaaa

SEQ ID NO: 1319251 - DNA, 15 bp, Homo sapiens
tactttcaacctgaa

SEQ ID NO: 1319252 - DNA, 15 bp, Homo sapiens
ctactttcaacctga

SEQ ID NO: 1319253 - DNA, 15 bp, Homo sapiens
actactttcaacctg

SEQ ID NO: 1319254 - DNA, 15 bp, Homo sapiens
cactactttcaacct

SEQ ID NO: 1319255 - DNA, 15 bp, Homo sapiens
tcactactttcaacc

SEQ ID NO: 1319256 - DNA, 15 bp, Homo sapiens
ctcactactttcaac

SEQ ID NO: 1319257 - DNA, 15 bp, Homo sapiens
tctcactactttcaa

SEQ ID NO: 1319258 - DNA, 15 bp, Homo sapiens
atctcactactttca

SEQ ID NO: 1319259 - DNA, 15 bp, Homo sapiens
catctcactactttc

SEQ ID NO: 1319260 - DNA, 15 bp, Homo sapiens
acatctcactacttt

SEQ ID NO: 1319261 - DNA, 15 bp, Homo sapiens
gacatctcactactt

SEQ ID NO: 1319262 - DNA, 15 bp, Homo sapiens
tgacatctcactact

SEQ ID NO: 1319263 - DNA, 15 bp, Homo sapiens
ctgacatctcactac

SEQ ID NO: 1319264 - DNA, 15 bp, Homo sapiens
actgacatctcacta

SEQ ID NO: 1319265 - DNA, 15 bp, Homo sapiens
aactgacatctcact

SEQ ID NO: 1319266 - DNA, 15 bp, Homo sapiens
gaactgacatctcac

SEQ ID NO: 1319267 - DNA, 15 bp, Homo sapiens
agaactgacatctca

SEQ ID NO: 1319268 - DNA, 15 bp, Homo sapiens
aagaactgacatctc

SEQ ID NO: 1319269 - DNA, 15 bp, Homo sapiens
gaagaactgacatct

SEQ ID NO: 1319270 - DNA, 15 bp, Homo sapiens
ggaagaactgacatc

SEQ ID NO: 1319271 - DNA, 15 bp, Homo sapiens
aggaagaactgacat

SEQ ID NO: 1319272 - DNA, 15 bp, Homo sapiens
caggaagaactgaca

SEQ ID NO: 1319273 - DNA, 15 bp, Homo sapiens
ccaggaagaactgac

SEQ ID NO: 1319274 - DNA, 15 bp, Homo sapiens
tccaggaagaactga

SEQ ID NO: 1319275 - DNA, 15 bp, Homo sapiens
ttccaggaagaactg

SEQ ID NO: 1319276 - DNA, 15 bp, Homo sapiens
cttccaggaagaact

SEQ ID NO: 1319277 - DNA, 15 bp, Homo sapiens
atcttccaggaagaa

SEQ ID NO: 1319278 - DNA, 15 bp, Homo sapiens
tatcttccaggaaga

SEQ ID NO: 1319279 - DNA, 15 bp, Homo sapiens
atatcttccaggaag

SEQ ID NO: 1319280 - DNA, 15 bp, Homo sapiens
gatatcttccaggaa

SEQ ID NO: 1319281 - DNA, 15 bp, Homo sapiens
tgatatcttccagga

SEQ ID NO: 1319282 - DNA, 15 bp, Homo sapiens
atgatatcttccagg

SEQ ID NO: 1319283 - DNA, 15 bp, Homo sapiens
catgatatcttccag

SEQ ID NO: 1319284 - DNA, 15 bp, Homo sapiens
tcatgatatcttcca

SEQ ID NO: 1319285 - DNA, 15 bp, Homo sapiens
ctcatgatatcttcc

SEQ ID NO: 1319286 - DNA, 15 bp, Homo sapiens
tctcatgatatcttc

SEQ ID NO: 1319287 - DNA, 15 bp, Homo sapiens
ttctcatgatatctt

SEQ ID NO: 1319288 - DNA, 15 bp, Homo sapiens
attctcatgatatct

SEQ ID NO: 1319289 - DNA, 15 bp, Homo sapiens
cattctcatgatatc

SEQ ID NO: 1319290 - DNA, 15 bp, Homo sapiens
gcattctcatgatat

SEQ ID NO: 1319291 - DNA, 15 bp, Homo sapiens
tgcattctcatgata

SEQ ID NO: 1319292 - DNA, 15 bp, Homo sapiens
gtgcattctcatgat

SEQ ID NO: 1319293 - DNA, 15 bp, Homo sapiens
tgtgcattctcatga

SEQ ID NO: 1319294 - DNA, 15 bp, Homo sapiens
gtgtgcattctcatg

SEQ ID NO: 1319295 - DNA, 15 bp, Homo sapiens
tgtgtgcattctcat

SEQ ID NO: 1319296 - DNA, 15 bp, Homo sapiens
ttgtgtgcattctca

SEQ ID NO: 1319297 - DNA, 15 bp, Homo sapiens
tttgtgtgcattctc

SEQ ID NO: 1319298 - DNA, 15 bp, Homo sapiens
ttttgtgtgcattct

SEQ ID NO: 1319299 - DNA, 15 bp, Homo sapiens
gttttgtgtgcattc

SEQ ID NO: 1319300 - DNA, 15 bp, Homo sapiens
agttttgtgtgcatt

SEQ ID NO: 1319301 - DNA, 15 bp, Homo sapiens
cagttttgtgtgcat

SEQ ID NO: 1319302 - DNA, 15 bp, Homo sapiens
tcagttttgtgtgca

SEQ ID NO: 1319303 - DNA, 15 bp, Homo sapiens
ttcagttttgtgtgc

SEQ ID NO: 1319304 - DNA, 15 bp, Homo sapiens
gttcagttttgtgtg

SEQ ID NO: 1319305 - DNA, 15 bp, Homo sapiens
tgttcagttttgtgt

SEQ ID NO: 1319306 - DNA, 15 bp, Homo sapiens
atgttcagttttgtg

SEQ ID NO: 1319307 - DNA, 15 bp, Homo sapiens
aatgttcagttttgt

SEQ ID NO: 1319308 - DNA, 15 bp, Homo sapiens
aaatgttcagttttg

SEQ ID NO: 1319309 - DNA, 15 bp, Homo sapiens
aaaatgttcagtttt

SEQ ID NO: 1319310 - DNA, 15 bp, Homo sapiens
gaaaatgttcagttt

SEQ ID NO: 1319311 - DNA, 15 bp, Homo sapiens
agaaaatgttcagtt

SEQ ID NO: 1319312 - DNA, 15 bp, Homo sapiens
gagaaaatgttcagt

SEQ ID NO: 1319313 - DNA, 15 bp, Homo sapiens
tgagaaaatgttcag

SEQ ID NO: 1319314 - DNA, 15 bp, Homo sapiens
ctgagaaaatgttca

SEQ ID NO: 1319315 - DNA, 15 bp, Homo sapiens
gctgagaaaatgttc

SEQ ID NO: 1319316 - DNA, 15 bp, Homo sapiens
tgctgagaaaatgtt

SEQ ID NO: 1319317 - DNA, 15 bp, Homo sapiens
ctgctgagaaaatgt

SEQ ID NO: 1319318 - DNA, 15 bp, Homo sapiens
gctgctgagaaaatg

SEQ ID NO: 1319319 - DNA, 15 bp, Homo sapiens
tgctgctgagaaaat

SEQ ID NO: 1319320 - DNA, 15 bp, Homo sapiens
ttgctgctgagaaaa

SEQ ID NO: 1319321 - DNA, 15 bp, Homo sapiens
cttgctgctgagaaa

SEQ ID NO: 1319322 - DNA, 15 bp, Homo sapiens
ccttgctgctgagaa

SEQ ID NO: 1319323 - DNA, 15 bp, Homo sapiens
tccttgctgctgaga

SEQ ID NO: 1319324 - DNA, 15 bp, Homo sapiens
ctccttgctgctgag

SEQ ID NO: 1319325 - DNA, 15 bp, Homo sapiens
actccttgctgctga

SEQ ID NO: 1319326 - DNA, 15 bp, Homo sapiens
cactccttgctgctg

SEQ ID NO: 1319327 - DNA, 15 bp, Homo sapiens
gcactccttgctgct

SEQ ID NO: 1319328 - DNA, 15 bp, Homo sapiens
agcactccttgctgc

SEQ ID NO: 1319329 - DNA, 15 bp, Homo sapiens
tagcactccttgctg

SEQ ID NO: 1319330 - DNA, 15 bp, Homo sapiens
ttagcactccttgct

SEQ ID NO: 1319331 - DNA, 15 bp, Homo sapiens
tttagcactccttgc

SEQ ID NO: 1319332 - DNA, 15 bp, Homo sapiens
ctttagcactccttg

SEQ ID NO: 1319333 - DNA, 15 bp, Homo sapiens
cctttagcactcctt

SEQ ID NO: 1319334 - DNA, 15 bp, Homo sapiens
ccctttagcactcct

SEQ ID NO: 1319335 - DNA, 15 bp, Homo sapiens
accctttagcactcc

SEQ ID NO: 1319336 - DNA, 15 bp, Homo sapiens
caccctttagcactc

SEQ ID NO: 1319337 - DNA, 15 bp, Homo sapiens
gcaccctttagcact

SEQ ID NO: 1319338 - DNA, 15 bp, Homo sapiens
tgcaccctttagcac

SEQ ID NO: 1319339 - DNA, 15 bp, Homo sapiens
gtgcaccctttagca

SEQ ID NO: 1319340 - DNA, 15 bp, Homo sapiens
tgtgcaccctttagc

SEQ ID NO: 1319341 - DNA, 15 bp, Homo sapiens
gtgtgcaccctttag

SEQ ID NO: 1319342 - DNA, 15 bp, Homo sapiens
agtgtgcacccttta

SEQ ID NO: 1319343 - DNA, 15 bp, Homo sapiens
gagtgtgcacccttt
